(19) United States
(12) Patent Application Publication
(10) Pub. No.: US 2021/0382068 A1
(43) Pub. Date: Dec. 9, 2021

(54) HLA SINGLE ALLELE LINES

(71) Applicants: Dana-Farber Cancer Institute, Inc., Boston, MA (US); The General Hospital Corporation, Boston, MA (US); The Broad Institute, Inc., Cambridge, MA (US)

(72) Inventors: Derin Keskin, Boston, MA (US); Siranush Sarkizova, Boston, MA (US); Susan Klaeger, Cambridge, MA (US); Karl Clauser, Cambridge, MA (US); Steven Carr, Cambridge, MA (US); Nir Hacohen, Boston, MA (US); Catherine J. Wu, Boston, MA (US)

(21) Appl. No.: 17/280,380

(22) PCT Filed: Oct. 2, 2019
(86) PCT No.: PCT/US2019/054365

§ 371 Date: Mar. 26, 2021

Related U.S. Application Data
(60) Provisional application No. 62/740,324, filed on Oct. 2, 2018.
(60) Provisional application No. 62/852,924, filed on May 24, 2019.

(51) Int. Cl. G01N 33/68; G01N 33/569; G16B 40/00; G16B 30/10; A61K 39/00

(52) U.S. Cl. CPC G01N 33/6878; G01N 33/56977; G16B 40/00; G01N 2333/70539; A61K 39/001114; G01N 2500/04; G16B 30/10

(57) ABSTRACT

Adaptive immune responses rely on the ability of cytotoxic T cells to identify and eliminate cells displaying disease-specific antigens on human leukocyte antigen (HLA) class I molecules. Investigations into antigen processing and display have immense implications in human health, disease and therapy. To extend understanding of the rules governing antigen processing and presentation, immunopurified peptides from B cells, each expressing a single HLA class I allele, were profiled. A resource dataset containing thousands of peptides bound to distinct class I HLA-A, -B, and -C alleles was generated by implementing a novel allele-specific database search strategy. Applicants discovered new binding motifs, established the role of gene expression in peptide presentation and improved prediction of HLA-peptide binding by using these data to train machine-learning models. These streamlined experimental and analytic workflows enable direct identification and analysis of endogenously processed and presented antigens.

### CROSS-REFERENCE TO RELATED APPLICATIONS

[0001] This application claims the benefit of U.S. Provisional Application Nos. 62/740,324, filed Oct. 2, 2018, and 62/852,924, filed May 24, 2019. The entire contents of the above-identified applications are hereby fully incorporated herein by reference.

### STATEMENT REGARDING FEDERALLY SPONSORED RESEARCH

[0002] This invention was made with government support under Grant No.(s) CA155010, HL103532, CA216772, CA101942, CA210986, CA214125 and CA160034 awarded by the National Institutes of Health. The government has certain rights in the invention.

### REFERENCE TO AN ELECTRONIC SEQUENCE LISTING

[0003] The contents of the electronic sequence listing (BROD_4350_ST25.txt”; Size is 27.5 megabytes and it was created on Sep. 30, 2019) is herein incorporated by reference in its entirety.

### TECHNICAL FIELD

[0004] The subject matter disclosed herein is generally directed to human leukocyte antigen (HLA) single allele cell lines and their application for creating predictive methods for presentation of peptides on HLA alleles.

### BACKGROUND

[0005] Human leukocyte antigen (HLA) class I glycoproteins (HLA-A, -B, and -C) are expressed on the surface of almost all nucleated cells in the human body and are required for presentation of short peptides for detection by T cell receptors. The HLA genes are the most polymorphic genes across the human population; with more than 16,200 distinct HLA class I allele variants identified as of May 2019 (Lefranc, M.-P. et al. IMGT®, the international ImMunoGeneTics information System® 25 years on. Nucleic Acids Res. 43, D413-22 (2015); and Robinson, J. et al. The IPD and IMGT/HLA database: allele variant databases. Nucleic Acids Res. 43, D423-31 (2015)). Each HLA allele is estimated to bind and present ˜1,000-10,000 unique peptides to T cells (Hunt D F, Henderson R A, Shabanowitz J, Sakaguchi K, Michel H, Sevilir N, Cox A L, Appella E, Engelhard V H. Characterization of peptides bound to the class I MHC molecule HLA-A2.1 by mass spectrometry. Science. 1992; 255:1261-1263; Rammensee H G, Friede T, Stevanoviic S. MHC ligands and peptide motifs: first listing. Immunogenetics. 1995; 41:178-228; Vita R, Overton J A, Greenbaum J A, Ponomarenko J, Clark J D, Cantrell J R, Wheeler D K, Gabbard J L, Hix D, Sette A, Peters B. The immune epitope database (IEDB) 3.0. Nucleic Acids Res. 2015; 43:D405-D412), less than 0.1% of the estimated 10 million potential 9-mer peptides from human protein-coding genes. Given such diversity in HLA binding, accurate prediction of whether a peptide is likely to bind to a specific HLA allele is highly challenging.

[0006] Rules for peptide binding to HLA molecules have been studied extensively for a subset of HLA alleles (Vita R, Overton J A, Greenbaum J A, Ponomarenko J, Clark J D, Cantrell J R, Wheeler D K, Gabbard J L, Hix D, Sette A, Peters B. The immune epitope database (IEDB) 3.0. Nucleic Acids Res. 2015; 43:D405-D412) and have been encoded in modern advanced neural-network-based algorithms (Hoof I, Peters B, Sidney J, Pedersen L E, Sette A, Lund O, Buus S, Nielsen M. NetMHCpan, a method for MHC class I binding prediction beyond humans. Immunogenetics. 2009; 61:1-13; Lundegaard C, Lamberth K, Harndahl M, Buus S, Lund O, Nielsen M. NetMHC-3.0: accurate web accessible predictions of human, mouse and monkey MHC class I affinities for peptides of length 8-11. Nucleic Acids Res. 2008; 36:W509-12). However, the algorithms in common use today (Trolle T, Metushi I G, Greenbaum J A, Kim Y, Sidney J, Lund O, Sette A, Peters B, Nielsen M. Automated benchmarking of peptide-MHC class I binding predictions. Bioinformatics. 2015; 31:2174-2181) are trained almost exclusively on measurements of biochemical affinity of synthetic peptides. This imparts several disadvantages. First, the throughput of these methods is limited because only a very small percentage of peptides are expected to bind, and therefore researchers must synthesize and experimentally assess potentially 1,000 s of negative examples to identify 10 s of strong-binding positive examples. Biased sampling can improve these odds but carries the risk of skewing the results or missing subdominant motifs. Meanwhile, other unintentional forms of bias, such as pre-existing notions of the length distribution or limitations on peptide synthesis and solubility, are difficult to avoid. Most importantly, these approaches do not necessarily consider the endogenous processing and transport of peptides prior to HLA binding. Mass spectrometry (MS)-based approaches yield a large and relatively unbiased portrait of the population of processed and presented peptides and should theoretically address most of these problems. However, historically liquid chromatography-tandem mass spectrometry (LC-MS/MS) methods have required large cellular input, which limits throughput, and the multi-allelic nature of the data complicates productive motif learning.

[0007] Citation or identification of any document in this application is not an admission that such a document is available as prior art to the present invention.

### SUMMARY

[0008] In one aspect, the present invention provides for a method of generating an HLA allele specific binding peptide sequence database comprising: (a) providing a population of cells expressing a single HLA allele; (b) isolating HLA-peptide complexes from said cells; (c) isolating peptides from said HLA-peptide complexes; and (d) sequencing said peptides, wherein the HLA allele is selected from the group consisting of: A*01:01; A*02:01; A*02:02; A*02:03; A*02:04; A*02:05; A*02:06; A*02:07; A*02:11; A*03:01; A*11:01; A*11:02; A*23:01; A*24:02; A*24:07; A*25:01; A*26:01; A*29:02; A*30:01; A*30:02; A*31:01; A*32:01; A*33:01; A*33:03; A*34:01; A*34:02; A*36:01; A*66:01; A*68:01; A*68:02; A*74:01; B*07:02; B*07:04; B*08:01; B*13:01; B*13:02; B*14:02; B*15:01; B*15:02; B*15:03; B*15:10; B*15:17; B*18:01; B*27.05; B*35:01; B*35:03; B*35:07; B*37:01; B*38:01; B*38:02; B*40:01; B*40:02; B*40:06; B*42:01; B*44:02; B*44:03; B*45:01; B*46:01; B*49:01; B*50:01; B*51:01; B*52:01; B*53:01; 54:01; B*55:01; B*55:02; B*56:01; B*57:01; B*57:03; B*58:01; B*58:02; C*01:02; C*02:02; C*03:02; C*03:03; C*03:04; C*04:01; C*04:03; C*05:01; C*06:02; C*07:01; C*07:02; C*07:04; C*08:01; C*08:02; C*12:02; C*12:03; C*14:02; C*14:03; C*15:02; C*16:01; C*17:01; G*01:01; G*01:03 and G*01:04. In certain embodiments, said sequencing is performed by LC-MS/MS. In certain embodiments, the population of cells comprises at least 10⁶ cells. In certain embodiments, the cells are dendritic cells, macrophages or B-cells. In certain embodiments, the cells are tumor cells, cells targeted in an autoimmune disease, or infected cells. In certain embodiments, the cells are contacted with an agent or condition prior to isolating said HLA-peptide complexes from said cells. In certain embodiments, said agent or condition is an inflammatory cytokine, a chemical agent, a therapeutic agent or radiation. In certain embodiments, the method comprises carrying out steps (a) to (d) for different HLA alleles.

[0009] In another aspect, the present invention provides for an HLA-allele specific binding peptide sequence database obtained by carrying out the method of any one of the preceding claims and repeating the method one or more times using a different HLA allele.

[0010] In another aspect, the present invention provides for a method for generating a prediction algorithm for identifying HLA-allele specific binding peptides, which method comprises: training a machine with the peptide sequence database of any embodiment herein.

[0011] In certain embodiments, the database comprises HLA-alleles and peptide sequences selected from the group consisting of: A*01:01 (SEQ ID Nos: 44-1120); A*02:01 (SEQ ID Nos: 1121-4202); A*02:02 (SEQ ID Nos: 4203-7373); A*02:03 (SEQ ID Nos: 7374-9953); A*02:04 (SEQ ID Nos: 9954-11940); A*02:05 (SEQ ID Nos: 11941-14981); A*02:06 (SEQ ID Nos: 14982-17191); A*02:07 (SEQ ID Nos: 117192-20710); A*02:11 (SEQ ID Nos: 20711-22696); A*03:01 (SEQ ID Nos: 22697-24233); A*11:01 (SEQ ID Nos: 24234-27505); A*11:02 (SEQ ID Nos: 27506-29812); A*23:01 (SEQ ID Nos: 29813-32133); A*24:02 (SEQ ID Nos: 32134-34347); A*24:07 (SEQ ID Nos: 34348-35681); A*25:01 (SEQ ID Nos: 35682-36682); A*26:01 (SEQ ID Nos: 36683-37957); A*29:02 (SEQ ID Nos: 37958-38921); A*30:01 (SEQ ID Nos: 38922-40029); A*30:02 (SEQ ID Nos: 40030-42114); A*31:01 (SEQ ID Nos: 42115-42919); A*32:01 (SEQ ID Nos: 42920-44874); A*33:01 (SEQ ID Nos: 44875-46761); A*33:03 (SEQ ID Nos: 46762-49053); A*34:01 (SEQ ID Nos: 49054-50948); A*34:02 (SEQ ID Nos: 50949-53677); A*36:01 (SEQ ID Nos: 53678-55165); A*66:01 (SEQ ID Nos: 55166-56901); A*68:01 (SEQ ID Nos: 56902-58374); A*68:02 (SEQ ID Nos: 58375-59804); A*74:01 (SEQ ID Nos: 59805-61821); B*07:02 (SEQ ID Nos: 61822-63473); B*07:04 (SEQ ID Nos: 63474-64885); B*08:01 (SEQ ID Nos: 64886-65609); B*13:01 (SEQ ID Nos: 65610-69419); B*13:02 (SEQ ID Nos: 69420-71587); B*14:02 (SEQ ID Nos: 71588-72970); B*15:01 (SEQ ID Nos: 72971-76378); B*15:02 (SEQ ID Nos: 76379-77762); B*15:03 (SEQ ID Nos: 77763-80458); B*15:10 (SEQ ID Nos: 80459-81940); B*15:17 (SEQ ID Nos: 81941-83632); B*18:01 (SEQ ID Nos: 83633-85593); B*27.05 (SEQ ID Nos: 85594-87076); B*35:01 (SEQ ID Nos: 87077-87772); B*35:03 (SEQ ID Nos: 87773-89157); B*35:07 (SEQ ID Nos: 89158-90977); B*37:01 (SEQ ID Nos: 90978-92452); B*38:01 (SEQ ID Nos: 92453-94858); B*38:02 (SEQ ID Nos: 94859-97742); B*40:01 (SEQ ID Nos: 97743-100731); B*40:02 (SEQ ID Nos: 100732-104409); B*40:06 (SEQ ID Nos: 104410-106653); B*42:01 (SEQ ID Nos: 106612-019885); B*44:02 (SEQ ID Nos: 109886-110903); B*44:03 (SEQ ID Nos: 110904-111749); B*45:01 (SEQ ID Nos: 111750-113153); B*46:01 (SEQ ID Nos: 113154-114113); B*49:01 (SEQ ID Nos: 114114-117833); B*50:01 (SEQ ID Nos: 117834-118468); B*51:01 (SEQ ID Nos: 118469-119991); B*52:01 (SEQ ID Nos: 119992-121525); B*53:01 (SEQ ID Nos: 121526-123560); 54:01 (SEQ ID Nos: 123561-124684); B*55:01 (SEQ ID Nos: 124685-126136); B*55:02 (SEQ ID Nos: 126137-127557); B*56:01 (SEQ ID Nos: 127558-129239); B*57:01 (SEQ ID Nos: 129240-130274); B*57:03 (SEQ ID Nos: 130275-132636); B*58:01 (SEQ ID Nos: 132637-134577); B*58:02 (SEQ ID Nos: 134578-135530); C*01:02 (SEQ ID Nos: 135531-136878); C*02:02 (SEQ ID Nos: 136879-137802); C*03:02 (SEQ ID Nos: 137803-138984); C*03:03 (SEQ ID Nos: 138985-141074); C*03:04 (SEQ ID Nos: 141075-143394); C*04:01 (SEQ ID Nos: 143395-145236); C*04:03 (SEQ ID Nos: 145237-146269); C*05:01 (SEQ ID Nos: 146270-147708); C*06:02 (SEQ ID Nos: 147709-149028); C*07:01 (SEQ ID Nos: 149029-149822); C*07:02 (SEQ ID Nos: 149823-150900); C*07:04 (SEQ ID Nos: 150901-151615); C*08:01 (SEQ ID Nos: 151616-153388); C*08:02 (SEQ ID Nos: 153389-156499); C*12:02 (SEQ ID Nos: 156500-157889); C*12:03 (SEQ ID Nos: 157890-160043); C*14:02 (SEQ ID Nos: 160044-161408); C*14:03 (SEQ ID Nos: 161409-164186); C*15:02 (SEQ ID Nos: 164187-167475); C*16:01 (SEQ ID Nos: 167476-170317); C*17:01 (SEQ ID Nos: 170318-171281); G*01:01 (SEQ ID Nos: 171282-172073); G*01:03 (SEQ ID Nos: 172074-172742) and G*01:04 (SEQ ID Nos: 172743-173477). In certain embodiments, the method further comprises identifying HLA-allele specific binding peptides that bind to one or more additional HLA-alleles. Thus, the peptides exhibit a pan-allele model. Applicants show that peptides can be identified that are compatible with multiple alleles and thus are immunogenic across individuals.

[0012] In certain embodiments, the machine combines one or more linear models, support vector machines, decision trees, and neural networks. In certain embodiments, the variables used to train the machine comprise one or more variables selected from the group consisting of peptide sequence, amino acid physical properties, peptide physical properties, expression level of the source protein of a peptide within a cell, protein stability, protein translation rate, protein degradation rate, translational efficiencies from ribosomal profiling, protein cleavability, protein localization, motifs of host proteins that facilitate TAP transport, whether host protein is subject to autophagy, motifs that favor ribosomal stalling, protein features that favor nonsense-mediated mRNA decay (NMD) and peptide cleavability. In certain embodiments, the expression level of the source protein of a peptide within a cell comprises determining the protein levels and/or transcripts of the source protein. In certain embodiments, protein features that favor nonsense-mediated mRNA decay (NMD) comprise a long 3′ UTR and stop codon >50 nt upstream of last exon-exon junction. In certain embodiments, motifs that favor ribosomal stalling comprise polyproline stretches. In certain embodiments, the method comprises determining the expression level of the source protein within a cell; and wherein the source protein expression is one of the predictive variables used by the machine. In certain embodiments, the expression level is determined by measuring the amount of source protein or the amount of RNA encoding the source protein.

[0013] In certain embodiments, the method comprises generating a consensus sequence from HLA-allele specific binding peptides. In certain embodiments, the HLA-allele specific binding peptides are 8 amino acids in length. In certain embodiments, the HLA-allele specific binding peptides are 9 amino acids in length. In certain embodiments, the HLA-allele specific binding peptides are 10 amino acids in length. In certain embodiments, the HLA-allele specific binding peptides are 11 amino acids in length. In certain embodiments, the HLA-allele specific binding peptides are any combination of peptides selected from the group consisting of 8, 9, 10 and 11 amino acids in length. In certain embodiments, the HLA-allele is an HLA-A allele. In certain embodiments, the HLA-allele is an HLA-B allele. In certain embodiments, the HLA-allele is an HLA-C allele. In certain embodiments, the HLA-allele is an HLA-G allele. In certain embodiments, the consensus sequence comprises a sequence logo of any figure herein.

[0014] In another aspect, the present invention provides for a method for identifying HLA-allele specific binding peptides, which method comprises analyzing the sequence of a peptide with a machine which has been trained with a peptide sequence database obtained by carrying out the method of any embodiment herein for said HLA-allele or a database obtained by carrying out the method of any embodiment herein for a combination of two or more HLA-alleles.

[0015] In another aspect, the present invention provides for a method of identifying one or more suitable peptides for preparing an immunogenic composition for a subject in need thereof, said method comprising selecting one or more peptides determined as capable of binding one or more HLA proteins of the subject, wherein the ability of the one or more peptides to bind an HLA protein of the subject is determined by analyzing the sequence of peptide with a machine which has been trained with a peptide sequence database obtained by carrying out the method of any embodiment herein.

[0016] In certain embodiments, the one or more peptides selected bind to HLA-allele motifs that are shared across two or more HLA-alleles. In certain embodiments, the HLA-allele motif is shared across the −11:01, −11:02, −31:01, −33:03, −34:01, −34:02, −66:01, −68:01, and/or −74:01 alleles of HLA-A. In certain embodiments, the HLA-allele motif is xVxxxxxxR. In certain embodiments, the HLA-allele motif is shared across the −07:02, −07:04, −35:03, 42:01, 51:01, −54:01, −55:01, −55:02, and/or −56:01 alleles of HLA-B. In certain embodiments, the HLA-allele motif is xPxxxxxxV. In certain embodiments, the HLA-allele motif is shared across the A*23:01, A*24:02, A*24:07, C*04:01, C*07:02, and/or C*14:03 alleles. In certain embodiments, the HLA-allele motif is xYxxxxxxL. In certain embodiments, the HLA-allele motif is shared across the B*15:01, B*15:02, B*15:03, B*15:17, B*35:03, B*35:07, B*46:01, B*53:01, C*02:02, C*03:02, C*12:01, C*12:03, and/or C*16:01 alleles. In certain embodiments, the HLA-allele motif is xAxxxxxxY.

[0017] In certain embodiments, the subject is suffering from a disease or condition. In certain embodiments, the disease or condition is selected from the group consisting of cancer, an infection, an autoimmune disease, and a transplant. In certain embodiments, the peptides are identified by nucleic acid sequencing of a sample obtained from the subject, wherein the sample comprises tumor cells, infected cells, cells targeted by the autoimmune response, or cells to be transplanted. In certain embodiments, the sequencing comprises RNA sequencing to determine proteins expressed in the sample. In certain embodiments, the sequencing comprises whole genome or whole exome sequencing to determine non-silent somatic mutations.

[0018] In another aspect, the present invention provides for a method of identifying a subject-specific peptide for preparing a subject-specific immunogenic composition, wherein the subject has a tumor and the subject specific peptide is specific to the subject and the subject's tumor, said method comprising: (a) nucleic acid sequencing of a sample of the subject's tumor and a non-tumor sample of the subject; (b) determining based on the nucleic acid sequencing non-silent mutations present in the genome of cancer cells of the subject but not in normal tissue from the subject, (c) selecting from the identified non-silent mutations one or more subject-specific peptides, each having a different tumor neo-epitope that is an epitope specific to the tumor of the subject and each having a predictive score indicative of binding an HLA protein of the subject, wherein said predictive score is determined by analyzing the sequence of peptides derived from the non-silent mutations by carrying out the method of any embodiment herein.

[0019] In another aspect, the present invention provides for a method of identifying a subject-specific peptide for preparing a subject-specific immunogenic composition, wherein the subject has a tumor and the subject specific peptide is specific to the subject and the subject's tumor, said method comprising: (a) nucleic acid sequencing of a sample of the subject's tumor and a non-tumor sample of the subject; (b) determining based on the nucleic acid sequencing non-silent mutations present in the genome of cancer cells of the subject but not in normal tissue from the subject, and (c) selecting from the identified non-silent mutations one or more subject-specific peptides, each having a different tumor neo-epitope that is an epitope specific to the tumor of the subject and each having a predictive score indicative of binding an HLA protein of the subject, wherein said predictive score is determined by comparing the sequence of peptides derived from the non-silent mutations to a consensus sequence of HLA-allele specific binding peptides, wherein the consensus sequence comprises a sequence logo of any figure herein.

[0020] In certain embodiments, the nucleic acid sequencing comprises whole genome or whole exome sequencing. In certain embodiments, the non-silent mutation comprises a point, splice-site, frameshift, read-through, neoORF, or gene-fusion mutation.

[0021] In another aspect, the present invention provides for a method of identifying a plurality of subject-specific peptides for preparing a subject-specific immunogenic composition, said method comprising selecting a plurality of subject-specific peptides, each having a different tumor neo-epitope that is an epitope specific to the tumor of the subject and each having a predictive score indicative of binding an HLA protein of the subject, wherein said predictive score is determined by analyzing the sequence of peptides derived from the non-silent mutations by carrying out the method of any embodiment herein.

[0022] In another aspect, the present invention provides for an immunogenic composition for use in a method of inducing a tumor specific or infection specific immune response or inducing immune tolerance, said immunogenic composition comprising two or more peptides identified with the method of any embodiment herein and a pharmaceutically acceptable carrier.

[0023] In another aspect, the present invention provides for an immunogenic composition for use in a method of inducing a tumor specific or infection specific immune response or inducing immune tolerance, comprising autologous dendritic cells or antigen presenting cells that have been pulsed with the two or more peptides identified with the method of any embodiment herein.

[0024] The immunogenic composition according to any embodiment herein may be for use in a method of inducing a tumor or infection specific immune response or inducing immune tolerance, comprising at least one vector capable of expressing two or more peptides identified with the method of any embodiment herein. In certain embodiments, the vector is a viral vector.

[0025] In another aspect, the present invention provides for an immune cell specific for a peptide identified with the method of any embodiment herein. In certain embodiments, the immune cell is a CD8+ T cell. In certain embodiments, the immune cell expresses a chimeric antigen receptor (CAR) or exogenous T cell receptor (TCR) specific to the peptide. In certain embodiments, the immune cell is a dendritic cell loaded with the peptide.

[0026] These and other aspects, objects, features, and advantages of the example embodiments will become apparent to those having ordinary skill in the art upon consideration of the following detailed description of example embodiments.

### BRIEF DESCRIPTION OF THE DRAWINGS

[0027] An understanding of the features and advantages of the present invention will be obtained by reference to the following detailed description that sets forth illustrative embodiments, in which the principles of the invention may be utilized, and the accompanying drawings of which:

[0028] FIG. 1—The human immune system recognizes non-self antigens (e.g. viral or mutated peptides) presented on MHC class I molecules and elicits an immune response upon T-cell receptor recognition.

[0029] FIG. 2—Cancer vaccine therapeutic workflow. Tumor specific mutations that give rise to protein coding changes are identified and evaluated for their likelihood to produce HLA-binding neoantigens. Selected candidates are synthesized and administered as a vaccine. Tumor-specific antigens can be used to design a personalized cancer vaccine that potentiates a tumor-specific immune response.

[0030] FIG. 3—Intracellular proteins are processed into peptides by the proteasome, transported into the ER and loaded onto MHC molecules. Peptide-MHC complexes are shuttled to the cell surface for T cell recognition. Thus, many endogenous processing steps contribute to peptide presentation.

[0031] FIG. 4—Disease-specific mutations have the potential to generate neoantigens. Current neoantigen prediction models NetMHCpan solely based on binding affinity. MS provides a platform to better understand rules of antigen processing and presentation. See, e.g., Purroy N et al., Cold Spring Harb Perspect Med 2017.

[0032] FIG. 5—Cell lines engineered to express a single HLA allele of interest enable high throughput peptide identification via MS and unambiguous assignment of peptides to alleles. Cell lines engineered to express a single HLA allele allow for high-throughput and unambiguous identification of bound peptides.

[0033] FIG. 6—Single-allele approach to improve prediction algorithms. Single HLA Class I allele expression on B721.221 cells. No inference of peptide binding to allele based on preexisting predictors. Unambiguous peptide-to-allele assignment. Enables creation of new predictors and comprehensive allele-specific and pan-allele analyses of binding preferences. Allele expression is confirmed by FACS. Sample preparation for HLA-peptides includes sample preparation (50 Mio cells per IP, 3 IPs pooled for 2 injections, acid elution and desalt), LC-MS/MS (QE+, QE-HF or Lumos, Lumos: include 1+ precursor fragmentation, 2 injections/replicate) and data analysis: spectrum mill (No enzyme specificity search, Improved scoring for HLA-derived peptides, FDR filtering to 1%).

[0034] FIG. 7—Over 185,000 peptides were identified across 95 alleles that cover the most frequent alleles in the population. Numbers of HLA-bound peptides identified per allele by MS-based profiling (circles; filled-newly generated data; open-previously reported (Abelin J G, Keskin D B, Sarkizova S, Hartigan C R, Zhang W, Sidney J, Stevens J, Lane W, Zhang G L, Eisenhaure T M, Clauser K R, Hacohen N, Rooney M S, Carr S A, Wu C J., 2017. Mass spectrometry profiling of HLA-associated peptidomes in mono-allelic cells enables more accurate epitope prediction. Immunity 46:315-26) or within IEDB (diamonds) (top). Relative population frequency across racial groups per allele (bottom). Massive mono-allelic peptide dataset enables in-depth integrative analysis and improved understanding of epitope presentation rules.

[0035] FIG. 8—Applicants systematically selected MS-enriched binding motifs (left) and validated their binding strength in vitro (right) (SEQ ID NO:1-29). Of 33 peptides selected for validation across 5 alleles, 32 were confirmed as strong binders showing the feasibility and benefit of an endogenous unbiased profiling approach. Peptides that represent novel binding motifs were validated as strong binders with tradition affinity measurement assays.

[0036] FIG. 9—Profiled 8 mer alleles and motifs.

[0037] FIG. 10—Profiled 9 mer alleles and motifs.

[0038] FIG. 11—Profiled 10 mer alleles and motifs.

[0039] FIG. 12—Profiled 11 mer alleles and motifs.

[0040] FIG. 13—Alleles with length-specific motifs identified amongst the profiled alleles and motifs. Sequence logos show pairwise comparisons of the 9-mer peptide motif and the non-9-mer motif detected to be different. A alleles tend to have peptides of length 9, 10, and 11. B alleles bind lengths 8 to 12. C alleles present mainly length 8, and 9.

[0041] FIG. 14—Peptide length distribution per allele. The frequency of MS-identified peptides of each of the most common binding lengths for HLA class I (8-11) per HLA allele are grouped per HLA gene. Some alleles have the strongest preference for peptides of lengths other than 9. HLA-A alleles present more peptides of length 10 and 11 than B and C alleles. HLA-B and C alleles accommodate shorter peptides better than HLA-A alleles. Differences in the ability to accommodate ligands of various lengths detected amongst HLA-A, B, and C genes.

[0042] FIG. 15—The distribution of expression (based on RNA-seq), predicted cleavability and hydrophobicity for identified across all alleles. HLA-C alleles bind peptides from proteins with higher expression levels than A, B or G alleles and tend to be more hydrophobic. Intracellular signals, such as expression and proteasomal cleavage, significantly increase the power for predicting endogenously presented epitopes.

[0043] FIG. 16—RNA-Seq. HLA-C alleles favor peptides derived from proteins with higher RNA expression. C alleles have a more shallow binding cleft.

[0044] FIG. 17—Cleavage profiles are very similar across HLA-A,B,C alleles. No difference between HLA alleles. Proteasome cleavage happens before peptide loading in the ER. Amino acid distribution up and downstream of HLA-presented peptide. R/K/A are preferred cleavage sites.

[0045] FIG. 18—Hits and decoys are binned according to source transcript expression (based on RNA-seq) and predicted affinity for each allele. Per bin, hit (top) and decoy (bottom) counts are reported. Color is according to the hit:decoy ratio (red: enriched for hits; blue: depleted of hits). High expression compensates for low affinity and vice versa.

[0046] FIG. 19—Heatmap of amino acids frequencies (percent change relative to background) in the protein sequence context (upsteam: U10-U1; downstream D1-D10) of HLA peptides identified from mono-allelic cell lines. Colors of heatmap cells indicate directionality (red: enriched; blue: depleted) and p value (see key).

[0047] FIG. 20—Contribution of endogenous signals to positive predictive value determined by training linear models, adding the most important feature at a time.

[0048] FIG. 21—Neural network models trained on the mono-allelic data outperform state of the art NetMHCpan4-0 algorithm. Gains increase when the likelihood of proteasomal cleavability (C) and expression (E, RNA-seq) are integrated into the model.

[0049] FIG. 22—The ability of Applicants' models to correctly identify peptides presented on HLA were evaluated on external MS datasets spanning multiple cell lines and alleles with a 2× gain in PPV on average.

[0050] FIG. 23—Applicants evaluated the propensity of HLA-A, B, and C allele to present peptides on the cell surface of fives melanoma and one ovarian patient-derived tumor cell lines. HLA-C peptide amount to 8% of presented peptides while A and B alleles present more than 45% and 33% respectively (left). This is not driven by the identity of tumor specific peptides since peptides derived from tumor-specific mutations distribute evenly across HLA genes (right). Patient-derived tumor cell lines present epitopes on HLA-C alleles.

[0051] FIG. 24—Model performance on patient discovery data.

[0052] FIG. 25—Comprehensive peptide binding data to single alleles improves antigen prediction. Improvements due in part to inclusion of expression and proteasome cleavability.

[0053] FIG. 26A-26D—Mass spectrometric characterization of peptides eluted from HLA proteins in mono-allelic cell lines. FIG. 26A) Schematic of the experimental design: HLA-null B721.221 cells transfected to express a single HLA allele (31 HLA-A, 40 HLA-B, 21 HLA-C and 3 HLA-G) were subjected to HLA class I-immunoprecipitation with W6/32 antibody from 50-300 million cells per allele followed by identification of eluted peptides by LC-MS/MS, in order to generate endogenous peptide binding data used to characterize allele-specific or pan-allele binding preferences and train neural network predictors of antigen processing and presentation. FIG. 26B) Surface expression of each transfected HLA-alleles was confirmed by flow cytometric detection against parental cells transfected with an empty vector (MFI: Mean fluorescence intensity; profiles of all lines in FIG. 32A). FIG. 26C) Overlap of human genes represented by at least two HLA-associated peptides (pink), detected in RNA sequencing (TPM>2, light grey) or identified in deep proteome analysis (≥2 unique peptides, dark grey) of the B721.221 mono-allelic cells lines. FIG. 26D) Top: Numbers of HLA-bound peptides identified per allele by MS-based profiling (circles; filled: newly generated data; open: previously reported (Abelin et al. 2017) or recorded in IEDB (diamonds). Bottom: Heatmaps of relative median population frequencies per allele across racial groups (AFA: African American, API: Asian or Pacific Islander, HIS: Hispanic, CAU: Caucasian) in the US population (Gragert et al. 2013) and worldwide.

[0054] FIG. 27A-27D—Identification of shared motifs and submotifs amongst HLA-A, B, C and G alleles. FIG. 27A) Pair-wise correlations between the 95 HLA-A, -B, -C, and -G binding motifs, each represented as a vector of amino acid frequencies (left), and pair-wise distances between the 95 HLA binding pockets, each represented by the properties of amino acids that are in contact with the peptide (right). Examples of groups of alleles with high similarity (middle) and the corresponding binding motif of each group (bottom). FIG. 27B) Average correlations of A to A (i.e. each dot represents an HLA-A allele and the y-axis is the mean of the correlations between that allele and all other HLA-A alleles), B to B, C to C and G to G alleles show that C and G alleles are more similar to each other than A and B alleles in both peptide motif (left) and protein (right) space. FIG. 27C) Number of alleles sharing a submotif colored according to HLA locus (A: purple, B: blue, C: orange, G: yellow). FIG. 27D) 2D-visualization of submotifs identified across the 95 alleles (middle), colored according to HLA locus (A:purple; B:blue; C:orange; G:yellow) and scaled in size according to the number of underlying peptides making up the sub-cluster. The collection of all allele-specific submotifs was clustered to identify groups of alleles that share a submotif (shown in FIG. 34B). Four examples of clusters of submotifs are highlighted with dashed circles, along with the respective motifs they represent and the allele-specific clusters that contribute to each shared motif.

[0055] FIG. 28A-28G—Mono-allelic data uncovers lengths-specific HLA-binding preferences. FIG. 28A) Frequencies of peptide lengths observed across alleles (8: pink, 9: violet, 10: green, 11: cyan). All but two HLA-B alleles preferentially present 9-mers. HLA-A alleles bind longer peptides more frequently than B and C alleles, while B and C alleles have a higher propensity for short peptides. FIG. 28B) 8-, 10-, and 11-mer binding motifs were transformed to pseudo 9-mer motifs by adding (8-mers: positions 4 or 5) or removing (10-mers: positions 5 or 6; 11-mers positions 5, 6, or 7) middle residues and selecting the pseudo-9-mer motif which was most similar to the corresponding 9-mer motifs. The maximum difference amongst peptide positions between the 8-, 10-, and 11-mer pseudo 9-mer motifs and the corresponding 9-mer motif in amino acid frequency (x-axis) and entropy (y-axis) are shown. Circle size reflects number of peptides, dotted lines indicate cutoff values. Circles in color and label denote alleles with >100 peptides with change in amino acid frequency or entropy greater than the selected cutoffs. FIG. 28C) Percent motif changes within each HLA type colored by length. FIG. 28D) Length dependent logo plots for A*33:01, B*14:02 and C*01:02; red boxes outline the changing motifs. FIG. 28E) Experimental validation of selected peptides (indicated with black dots on the NMDS plots) by in vitro binding assays compared to their predicted scores by NetMHC and MS models. FIG. 28F)-FIG. 28G) Expression, predicted cleavability and hydrophobicity stratified by HLA loci and peptide length.

[0056] FIG. 29A-29F—Proteasomal shaping of the HLA-associated peptidome. FIG. 29A) Three types of primary tumor cell lines (melanoma [MEL], glioblastoma [GBM] and clear cell renal cell carcinoma [ccRCC]) used to identify HLA-associated peptidomes. FIG. 29B) Changes in relative protein abundance of proteasomal subunits and IFNγ inducible genes in patient-derived GBM cells with or without IFNγ-treatment based on MS proteome analysis. FIG. 29C) Schematic of proteasomal cleavage signature analysis. FIG. 29D) Peptide processing signatures of HLA ligands presented by primary tumor and cancer cell lines at baseline (top) and following IFNγ treatment (bottom), showing overrepresented (red) or underrepresented (blue) amino acid residues upstream and downstream of the HLA peptide. The number in each cell denotes percent change over a background decoy set; color intensity indicates significance (see key). FIG. 29E) Peptide processing signatures of HLA peptides in normal tissue (primary skin and fibroblast cells). FIG. 29F) Heatmap of Spearman correlations between the processing preferences in untreated and IFNγ-treated samples at upstream and downstream positions. Signatures for peptides from the IFNγ treated cells correlate well with peptides eluted from untreated cells suggesting minimal to no difference between the two patterns.

[0057] FIG. 30A-30G—Length-specific and pan-allele MS-based models outperform state of the art predictors. FIG. 30A) Contribution of predictor variables (peptide binding, transcript expression, cleavability, and gene presentation bias) to positive predictive value (PPV) as the most informative variable is added on at a time. FIG. 30B) Schematic of the neural networks used to generate allele-length-specific and pan predictive models. FIG. 30C) Comparison of PPVs across each of the 95 HLA alleles (grey lines) by testing novel length-specific and pan-allele MS based-models on internal data against NetMHC and MHCflurry. FIG. 30D) Summary of PPVs for state-of-the-art and MS-based models resulting in a 2-fold improvement for PPV at top 0.1% of observed peptides, or 7-fold for PPV at 40% recall of positives. FIG. 30E) Prediction of peptides presented by C-alleles (Di Marco et al. 2017) using NetMHC, MHCflurry and MS-based models. FIG. 30F) Correlation of actual PPV vs predicted PPV using a linear model, with variables in the linear model and their respective significance tabulated. FIG. 30G) pie chart

[0058] FIG. 31A-31D—Evaluation of novel MS-based predictors against directly observed peptides displayed on primary tumor cells. FIG. 31A) chematic of evaluation: generation of the dataset of observed peptides displayed on primary tumor specimens, prediction of epitopes based on unique HLA identities of each set of cells, and comparison of predicted to observed peptides across 7 prediction models in order to determine performance and accuracy. FIG. 31B) MS-based predictor ranks MS detected peptides better than NetMHCpan and MHCflurry. Internal data on 12 patients (5 Mel, 3 GBM, 3 CLL, 1 OV), and external data (Bassani-Sternberg et al. 2016; Schuster et al. 2017). FIG. 31C) Using the best scoring peptide-allele combination, peptides can be reassigned to the respective allele. Allele contribution to peptide presentation is tumor and individual dependent and includes A, -B, and -C alleles in endogenous datasets. FIG. 31D) Fraction of peptides contributing per allele type+/−IFNγ. Peptides presentation on HLA-B increased with IFNγ stimulation.

[0059] FIG. 32A-32M-FIG. 32A) Mean Fluorescence Intensity (MFI) plots confirming expression of 76 newly generated mono-allelic cell lines. FIG. 32B) Each allele adds unique peptide sequences to the total immunopeptidome (black), number of individual peptide identifications are similar across alleles (blue). FIG. 32C) Only a small fraction of identified peptides was discovered with a modification (cysteinylation (C), carbamidomethylation (C), oxidation (M) or pyroglutamic acid (Q)). FIG. 32D) Addition of iodoacetamide (IAA) in the lysis buffer increases recovery of cysteine containing HLA peptides. FIG. 32E) Number of genes presented by HLA peptides increases with additional allotypes. FIG. 32F) Most genes are covered by one or 2 peptide sequences only. Ranked by number of peptides for each protein starting with the most frequently observed gene, the top 50 proteins per HLA-type are similar between A-, B-, and C-alleles and derived from large and abundant proteins. FIG. 32G) Peptides from genes only identified in HLA experiments show same scores, backbone cleavage scores and intensity distribution as peptides from genes overlapping to RNA and Proteome. FIG. 32H) Antigens of up to 5000 genes can be presented by 6 alleles, HLA phenotypes reflect those of melanoma patients used in this and other studies (Ott et al. 2017). FIG. 32I) Logo plots per peptide length (8-11mers) for 95 alleles using MS data. FIG. 32J) Logo plots per peptide length (8-11mers) for 95 alleles as available in IEDB. FIG. 32K) Entropy plots per peptide length (8-11mers) for 95 alleles for MS and IEDB data. FIG. 32L) NMDS plots per peptide length (8-11mers) for 95 alleles overlaying MS and IEDB data. FIG. 32M) Surface expression of single alleles measured by flow cytometry correlated weakly with number of identified peptides. FIG. 32N) Correlation analysis of mean aliphatic index of peptides per allele and number of identified peptides does not indicate a bias during ionization towards peptides with charged residues and less aliphatic residues.

[0060] FIG. 33A-33C-FIG. 33A) Fraction of neighbor alleles in motif space that are also neighbors in HLA-binding pocket space. FIG. 33B) 2D visualization of all submotifs as in FIG. 27D but colored by identified cluster. FIG. 33C) Clustering of submotifs colored by HLA-type (middle). For circled clusters, the respective motif and the allele-specific clusters contributing to the shared motif are highlighted.

[0061] FIG. 34A-34C-FIG. 34A) Amino acid entropy difference for each peptide position in 8-, 10-, 11-mers compared to 9-mers. 8-mers show significantly higher entropy at P5 indicating that this position is part of an 8-mer specific motif. FIG. 34B) Motif logo plots of alleles that differ from their corresponding 9-mer. FIG. 34C) Experimental validation of selected 8-mer peptides for C*07:02 (indicated with black dots on the NMDS plots) by in vitro binding assays compared to their predicted scores by NetMHC and MS models.

[0062] FIG. 35A-35B-FIG. 35A) Heatmap of correlations between processing differences in evaluated tumor lineages (MEL, GBM, ccRCC, lung) compared to healthy tissues (skin, fibroblast) at upstream and downstream positions for untreated and IFNγ stimulated tumor samples. FIG. 35B) Potential proteasomal spliced peptides (data from Liepe et al. and Faridi et al. (Liepe et al. 2016; Faridi et al. 2018)) are distributed over a wide range of predicted binding score whereas linear peptides are predicted with very high affinity.

[0063] FIG. 36A-36B—Gene expression and cleavability influence HLA presentation. Hits and decoys are binned according to (FIG. 36A) source transcript expression (per RNA-seq; y axis) or (FIG. 36B) predicted cleavability and predicted affinity (x-axis) for each allele. Per bin, hits (top) and decoys (bottom) counts are reported. Each cell is colored according to the hit:decoy ratio (red=enriched for hits; blue=depleted of hits).

[0064] FIG. 37A-37C—Evaluation of MS informed models compared to other prediction tools MHCflurry, NetMHCpan4.0-BA, NetMHCpan4.0-EL for patient derived tumor samples FIG. 37A) on internally generated data, FIG. 37B) and FIG. 37C) on external datasets (Bassani-Sternberg et al. 2016; Schuster et al. 2017). Predictions were made with the allele-and-length-specific models for covered alleles (n=50), while missing alleles (n=7; indicated by ‘-’ in front of the allele name, e.g. -B4701) were scored by the pan-allele-pan-length predictors. Performance was evaluated by number of predicted binding peptides at percentile rank thresholds.

[0065] The figures herein are for illustrative purposes only and are not necessarily drawn to scale.

### DETAILED DESCRIPTION OF THE EXAMPLE EMBODIMENTS

### General Definitions

[0066] Unless defined otherwise, technical and scientific terms used herein have the same meaning as commonly understood by one of ordinary skill in the art to which this disclosure pertains. Definitions of common terms and techniques in molecular biology may be found in Molecular Cloning: A Laboratory Manual, 2^{nd} edition (1989) (Sambrook, Fritsch, and Maniatis); Molecular Cloning: A Laboratory Manual, 4^{th} edition (2012) (Green and Sambrook); Current Protocols in Molecular Biology (1987) (F. M. Ausubel et al. eds.); the series Methods in Enzymology (Academic Press, Inc.): PCR 2: A Practical Approach (1995) (M. J. MacPherson, B. D. Hames, and G. R. Taylor eds.): Antibodies, A Laboratory Manual (1988) (Harlow and Lane, eds.): Antibodies A Laboraotry Manual, 2^{nd} edition 2013 (E. A. Greenfield ed.); Animal Cell Culture (1987) (R. I. Freshney, ed.); Benjamin Lewin, Genes IX, published by Jones and Bartlet, 2008 (ISBN 0763752223); Kendrew et al. (eds.), The Encyclopedia of Molecular Biology, published by Blackwell Science Ltd., 1994 (ISBN 0632021829); Robert A. Meyers (ed.), Molecular Biology and Biotechnology: a Comprehensive Desk Reference, published by VCH Publishers, Inc., 1995 (ISBN 9780471185710); Singleton et al., Dictionary of Microbiology and Molecular Biology 2nd ed., J. Wiley & Sons (New York, N.Y. 1994), March, Advanced Organic Chemistry Reactions, Mechanisms and Structure 4th ed., John Wiley & Sons (New York, N.Y. 1992); and Marten H. Hofker and Jan van Deursen, Transgenic Mouse Methods and Protocols, 2^{nd} edition (2011).

[0067] As used herein, the singular forms “a”, “an”, and “the” include both singular and plural referents unless the context clearly dictates otherwise.

[0068] The term “optional” or “optionally” means that the subsequent described event, circumstance or substituent may or may not occur, and that the description includes instances where the event or circumstance occurs and instances where it does not.

[0069] The recitation of numerical ranges by endpoints includes all numbers and fractions subsumed within the respective ranges, as well as the recited endpoints.

[0070] The terms “about” or “approximately” as used herein when referring to a measurable value such as a parameter, an amount, a temporal duration, and the like, are meant to encompass variations of and from the specified value, such as variations of +/−10% or less, +/−5% or less, +/−1% or less, and +/−0.1% or less of and from the specified value, insofar such variations are appropriate to perform in the disclosed invention. It is to be understood that the value to which the modifier “about” or “approximately” refers is itself also specifically, and preferably, disclosed.

[0071] As used herein, a “biological sample” may contain whole cells and/or live cells and/or cell debris. The biological sample may contain (or be derived from) a “bodily fluid”. The present invention encompasses embodiments wherein the bodily fluid is selected from amniotic fluid, aqueous humour, vitreous humour, bile, blood serum, breast milk, cerebrospinal fluid, cerumen (earwax), chyle, chyme, endolymph, perilymph, exudates, feces, female ejaculate, gastric acid, gastric juice, lymph, mucus (including nasal drainage and phlegm), pericardial fluid, peritoneal fluid, pleural fluid, pus, rheum, saliva, sebum (skin oil), semen, sputum, synovial fluid, sweat, tears, urine, vaginal secretion, vomit and mixtures of one or more thereof. Biological samples include cell cultures, bodily fluids, cell cultures from bodily fluids. Bodily fluids may be obtained from a mammal organism, for example by puncture, or other collecting or sampling procedures.

[0072] The terms “subject,” “individual,” and “patient” are used interchangeably herein to refer to a vertebrate, preferably a mammal, more preferably a human. Mammals include, but are not limited to, murines, simians, humans, farm animals, sport animals, and pets. Tissues, cells and their progeny of a biological entity obtained in vivo or cultured in vitro are also encompassed.

[0073] Various embodiments are described hereinafter. It should be noted that the specific embodiments are not intended as an exhaustive description or as a limitation to the broader aspects discussed herein. One aspect described in conjunction with a particular embodiment is not necessarily limited to that embodiment and can be practiced with any other embodiment(s). Reference throughout this specification to “one embodiment”, “an embodiment,” “an example embodiment,” means that a particular feature, structure or characteristic described in connection with the embodiment is included in at least one embodiment of the present invention. Thus, appearances of the phrases “in one embodiment,” “in an embodiment,” or “an example embodiment” in various places throughout this specification are not necessarily all referring to the same embodiment, but may. Furthermore, the particular features, structures or characteristics may be combined in any suitable manner, as would be apparent to a person skilled in the art from this disclosure, in one or more embodiments. Furthermore, while some embodiments described herein include some but not other features included in other embodiments, combinations of features of different embodiments are meant to be within the scope of the invention. For example, in the appended claims, any of the claimed embodiments can be used in any combination.

[0074] Reference is made to international patent application Serial No. PCT/US2017/028122 filed 18 Apr. 2017, which published as PCT Publication No. WO 2017/184590 on 26 Oct. 2017, which claims priority to U.S. provisional patent application Ser. Nos. 62/324,228 18 filed April 2016, 62/345,556 03 filed June 2016 and 62/458,954 filed 14 Feb. 2017.

[0075] All publications, published patent documents, and patent applications cited herein are hereby incorporated by reference to the same extent as though each individual publication, published patent document, or patent application was specifically and individually indicated as being incorporated by reference.

### Overview

[0076] The present invention provides for improved HLA epitope prediction, methods and products for use therein. Provided herein are methods and tools for improved HLA epitope prediction. Vaccine therapies (e.g., cancer and infections) rely on accurate selection of immunizing peptides to potentiate immune responses (e.g., against tumor-specific neoepitopes or viral epitopes). Given the patient's particular complement of HLA alleles, the ability to predict which epitopes will be presented is a fundamental prerequisite for successful vaccine design. Additionally, given the unique accumulation of mutations in different tumors as well as the patient's particular complement of HLA alleles, the ability to predict which epitopes will be presented is a fundamental prerequisite for successful cancer vaccine design. Additionally, epitopes recognized in autoimmune diseases for patients having specific HLA alleles is a prerequisite for designing treatments aimed at blocking an immune response against the target proteins. Applicants recently showed that prediction of endogenous antigen presentation is greatly improved when models utilize single HLA allele ligandome datasets and integrate intracellular processes such as proteasomal processing and gene expression. Applicants now extend the approach to many more HLA alleles, address limitations in model performance and test the utility of these approaches in predicting antigen presentation in primary tumors.

[0077] Applicants utilized a single-allele method to profile naturally presented peptides on HLA molecules via mass spectrometry to collect endogenous ligandome data for 95 HLA-A, B, C and G alleles, identifying >185,000 peptides. In addition, endogenously presented antigens on primary tumor-derived cell lines from 11 patients (3 chronic lymphocytic leukemia, 1 ovarian, 3 glioblastoma, 4 melanoma) were also identified by MS. To extract knowledge from this vast dataset, Applicants created analytic and predictive computational tools. Furthermore, Applicants evaluated the utility of the models to predict HLA ligands on primary tumors and learn tumor-specific presentation biases.

[0078] Based on observations that certain alleles present non-9-mer peptides with high frequency, Applicants built length-specific models that often outperform length-unspecific predictors currently used. Applicants demonstrate distinctive binding of HLA ligands according to peptide length. By clustering allele-specific peptides into sub-motifs, Applicants derived an approach to delineate allele similarity at finer granularity. Notably, deconvolution of tumor-presented peptides revealed a skewed distribution of allele utilization and showed that ˜10% of peptides are presented on HLA-C, which has been historically understudied. Applicants show that allele-specific neural network models are better at discriminating tumor-presented epitopes than state-of-the-art algorithms and develop an approach to dissect the basis for differences in prediction accuracy.

[0079] Single-allele system generates high coverage data and enables deep integrative analysis by removing the problem of allele ambiguity. MS data can be used to learn peptide motifs and cleavage motifs de novo and to systematically probe how various factors (protein localization, expression, etc.) impact epitope presentation. These findings yield new predictors that improve the ability to delineate endogenously presented peptides and apply directly towards a more successful personalized tumor vaccine design.

[0080] The present invention encompasses one or more of the following alleles and peptide sequences bound to the alleles identified using the single allele system described further herein (see also, sequence listing): A*01:01 (SEQ ID Nos: 44-1120); A*02:01 (SEQ ID Nos: 1121-4202); A*02:02 (SEQ ID Nos: 4203-7373); A*02:03 (SEQ ID Nos: 7374-9953); A*02:04 (SEQ ID Nos: 9954-11940); A*02:05 (SEQ ID Nos: 11941-14981); A*02:06 (SEQ ID Nos: 14982-17191); A*02:07 (SEQ ID Nos: 117192-20710); A*02:11 (SEQ ID Nos: 20711-22696); A*03:01 (SEQ ID Nos: 22697-24233); A*11:01 (SEQ ID Nos: 24234-27505); A*11:02 (SEQ ID Nos: 27506-29812); A*23:01 (SEQ ID Nos: 29813-32133); A*24:02 (SEQ ID Nos: 32134-34347); A*24:07 (SEQ ID Nos: 34348-35681); A*25:01 (SEQ ID Nos: 35682-36682); A*26:01 (SEQ ID Nos: 36683-37957); A*29:02 (SEQ ID Nos: 37958-38921); A*30:01 (SEQ ID Nos: 38922-40029); A*30:02 (SEQ ID Nos: 40030-42114); A*31:01 (SEQ ID Nos: 42115-42919); A*32:01 (SEQ ID Nos: 42920-44874); A*33:01 (SEQ ID Nos: 44875-46761); A*33:03 (SEQ ID Nos: 46762-49053); A*34:01 (SEQ ID Nos: 49054-50948); A*34:02 (SEQ ID Nos: 50949-53677); A*36:01 (SEQ ID Nos: 53678-55165); A*66:01 (SEQ ID Nos: 55166-56901); A*68:01 (SEQ ID Nos: 56902-58374); A*68:02 (SEQ ID Nos: 58375-59804); A*74:01 (SEQ ID Nos: 59805-61821); B*07:02 (SEQ ID Nos: 61822-63473); B*07:04 (SEQ ID Nos: 63474-64885); B*08:01 (SEQ ID Nos: 64886-65609); B*13:01 (SEQ ID Nos: 65610-69419); B*13:02 (SEQ ID Nos: 69420-71587); B*14:02 (SEQ ID Nos: 71588-72970); B*15:01 (SEQ ID Nos: 72971-76378); B*15:02 (SEQ ID Nos: 76379-77762); B*15:03 (SEQ ID Nos: 77763-80458); B*15:10 (SEQ ID Nos: 80459-81940); B*15:17 (SEQ ID Nos: 81941-83632); B*18:01 (SEQ ID Nos: 83633-85593); B*27.05 (SEQ ID Nos: 85594-87076); B*35:01 (SEQ ID Nos: 87077-87772); B*35:03 (SEQ ID Nos: 87773-89157); B*35:07 (SEQ ID Nos: 89158-90977); B*37:01 (SEQ ID Nos: 90978-92452); B*38:01 (SEQ ID Nos: 92453-94858); B*38:02 (SEQ ID Nos: 94859-97742); B*40:01 (SEQ ID Nos: 97743-100731); B*40:02 (SEQ ID Nos: 100732-104409); B*40:06 (SEQ ID Nos: 104410-106653); B*42:01 (SEQ ID Nos: 106612-019885); B*44:02 (SEQ ID Nos: 109886-110903); B*44:03 (SEQ ID Nos: 110904-111749); B*45:01 (SEQ ID Nos: 111750-113153); B*46:01 (SEQ ID Nos: 113154-114113); B*49:01 (SEQ ID Nos: 114114-117833); B*50:01 (SEQ ID Nos: 117834-118468); B*51:01 (SEQ ID Nos: 118469-119991); B*52:01 (SEQ ID Nos: 119992-121525); B*53:01 (SEQ ID Nos: 121526-123560); 54:01 (SEQ ID Nos: 123561-124684); B*55:01 (SEQ ID Nos: 124685-126136); B*55:02 (SEQ ID Nos: 126137-127557); B*56:01 (SEQ ID Nos: 127558-129239); B*57:01 (SEQ ID Nos: 129240-130274); B*57:03 (SEQ ID Nos: 130275-132636); B*58:01 (SEQ ID Nos: 132637-134577); B*58:02 (SEQ ID Nos: 134578-135530); C*01:02 (SEQ ID Nos: 135531-136878); C*02:02 (SEQ ID Nos: 136879-137802); C*03:02 (SEQ ID Nos: 137803-138984); C*03:03 (SEQ ID Nos: 138985-141074); C*03:04 (SEQ ID Nos: 141075-143394); C*04:01 (SEQ ID Nos: 143395-145236); C*04:03 (SEQ ID Nos: 145237-146269); C*05:01 (SEQ ID Nos: 146270-147708); C*06:02 (SEQ ID Nos: 147709-149028); C*07:01 (SEQ ID Nos: 149029-149822); C*07:02 (SEQ ID Nos: 149823-150900); C*07:04 (SEQ ID Nos: 150901-151615); C*08:01 (SEQ ID Nos: 151616-153388); C*08:02 (SEQ ID Nos: 153389-156499); C*12:02 (SEQ ID Nos: 156500-157889); C*12:03 (SEQ ID Nos: 157890-160043); C*14:02 (SEQ ID Nos: 160044-161408); C*14:03 (SEQ ID Nos: 161409-164186); C*15:02 (SEQ ID Nos: 164187-167475); C*16:01 (SEQ ID Nos: 167476-170317); C*17:01 (SEQ ID Nos: 170318-171281); G*01:01 (SEQ ID Nos: 171282-172073); G*01:03 (SEQ ID Nos: 172074-172742) and G*01:04 (SEQ ID Nos: 172743-173477). The genes for each peptide and backbone cleavage can be determined using the peptide sequence and publicly available databases described further herein. All gene name symbols used herein refer to the gene as commonly known in the art. Gene symbols may be those referred to by the HUGO Gene Nomenclature Committee (HGNC). Any reference to the gene symbol is a reference made to the entire gene or variants of the gene. The HUGO Gene Nomenclature Committee is responsible for providing human gene naming guidelines and approving new, unique human gene names and symbols. All human gene names and symbols can be searched at www.genenames.org, the HGNC website, and the guidelines for their formation are available there (www.genenames.org/guidelines).

### Immune System and Antigen Presentation

[0081] The immune system can be classified into two functional subsystems: the innate and the acquired immune system. The innate immune system is the first line of defense against infections, and most potential pathogens are rapidly neutralized by this system before they can cause, for example, a noticeable infection. The acquired immune system reacts to molecular structures, referred to as antigens, of the intruding organism. There are two types of acquired immune reactions, which include the humoral immune reaction and the cell-mediated immune reaction. In the humoral immune reaction, antibodies secreted by B cells into bodily fluids bind to pathogen-derived antigens, leading to the elimination of the pathogen through a variety of mechanisms, e.g. complement-mediated lysis. In the cell-mediated immune reaction, T-cells capable of destroying other cells are activated. For example, if proteins associated with a disease are present in a cell, they are fragmented proteolytically to peptides within the cell. Specific cell proteins then attach themselves to the antigen or peptide formed in this manner and transport them to the surface of the cell, where they are presented to the molecular defense mechanisms, in particular T-cells, of the body. Cytotoxic T cells recognize these antigens and kill the cells that harbor the antigens.

[0082] The molecules that transport and present peptides on the cell surface are referred to as proteins of the major histocompatibility complex (MHC). MHC proteins are classified into two types, referred to as MHC class I and MHC class II. The structures of the proteins of the two MHC classes are very similar; however, they have very different functions. Proteins of MHC class I are present on the surface of almost all cells of the body, including most tumor cells. MHC class I proteins are loaded with antigens that usually originate from endogenous proteins or from pathogens present inside cells, and are then presented to naive or cytotoxic T-lymphocytes (CTLs). MHC class II proteins are present on dendritic cells, B-lymphocytes, macrophages and other antigen-presenting cells. They mainly present peptides, which are processed from external antigen sources, i.e. outside of the cells, to T-helper (Th) cells. Most of the peptides bound by the MHC class I proteins originate from cytoplasmic proteins produced in the healthy host cells of an organism itself, and do not normally stimulate an immune reaction. Accordingly, cytotoxic T-lymphocytes that recognize such self-peptide-presenting MHC molecules of class I are deleted in the thymus (central tolerance) or, after their release from the thymus, are deleted or inactivated, i.e. tolerized (peripheral tolerance). MHC molecules are capable of stimulating an immune reaction when they present peptides to non-tolerized T-lymphocytes. Cytotoxic T-lymphocytes have both T-cell receptors (TCR) and CD8 molecules on their surface. T-Cell receptors are capable of recognizing and binding peptides complexed with the molecules of MHC class I. Each cytotoxic T-lymphocyte expresses a unique T-cell receptor which is capable of binding specific MHC/peptide complexes.

[0083] The peptide antigens attach themselves to the molecules of MHC class I by competitive affinity binding within the endoplasmic reticulum, before they are presented on the cell surface. Here, the affinity of an individual peptide antigen is directly linked to its amino acid sequence and the presence of specific binding motifs in defined positions within the amino acid sequence. If the sequence of such a peptide is known, it is possible to manipulate the immune system against diseased cells using, for example, peptide vaccines. The human leukocyte antigen (HLA) system is a gene complex encoding the major histocompatibility complex (MHC) proteins in humans.

[0084] By “proteins or molecules of the major histocompatibility complex (MHC)”, “MHC molecules”, “MHC proteins” or “HLA proteins” is thus meant proteins capable of binding peptides resulting from the proteolytic cleavage of protein antigens and representing potential T-cell epitopes, transporting them to the cell surface and presenting them there to specific cells, in particular cytotoxic T-lymphocytes or T-helper cells. MHC molecules of class I consist of a heavy chain and a light chain and are capable of binding a peptide of about 8 to 11 amino acids, but usually 9 or 10 amino acids, if this peptide has suitable binding motifs, and presenting it to cytotoxic T-lymphocytes. The peptide bound by the MHC molecules of class I originates from an endogenous protein antigen. The heavy chain of the MHC molecules of class I is preferably an HLA-A, HLA-B or HLA-C monomer, and the light chain is β-2-microglobulin (B2M).

[0085] MHC molecules of class II consist of an a-chain and a β-chain and are capable of binding a peptide of about 15 to 24 amino acids if this peptide has suitable binding motifs, and presenting it to T-helper cells. The peptide bound by the MHC molecules of class II usually originates from an extracellular of exogenous protein antigen. The a-chain and the β-chain are in particular HLA-DR, HLA-DQ and HLA-DP monomers.

[0086] Subject specific HLA alleles or HLA genotype of a subject may be determined by any method known in the art. In preferred embodiments, HLA genotypes are determined by any method described in International Patent Application number PCT/US2014/068746, published Jun. 11, 2015 as WO2015085147. Briefly, the methods include determining polymorphic gene types that may comprise generating an alignment of reads extracted from a sequencing data set to a gene reference set comprising allele variants of the polymorphic gene, determining a first posterior probability or a posterior probability derived score for each allele variant in the alignment, identifying the allele variant with a maximum first posterior probability or posterior probability derived score as a first allele variant, identifying one or more overlapping reads that aligned with the first allele variant and one or more other allele variants, determining a second posterior probability or posterior probability derived score for the one or more other allele variants using a weighting factor, identifying a second allele variant by selecting the allele variant with a maximum second posterior probability or posterior probability derived score, the first and second allele variant defining the gene type for the polymorphic gene, and providing an output of the first and second allele variant.

### Human Leukocyte Antigen (HLA) Class I Binding Peptides

### Identifying Peptides

[0087] In one aspect, the present disclosure provides methods for generating an HLA-allele specific binding peptide sequence database. Such a database is very useful for predicting suitable HLA-binding peptides, identifying factors which play a role in HLA-peptide presentation and generating a more accurate prediction algorithm for identifying HLA-allele specific binding peptides. The methods comprise isolating and sequencing, for each HLA-allele, the HLA-binding peptides. In particular embodiments, the methods comprise providing a) a population of cells which expresses a single class I HLA allele or a single pair of class II HLA alleles (one a-chain and one β-chain); b) isolating the respective HLA-peptide complexes from said cells; c) isolating peptides from said HLA-peptide complexes; and d) sequencing said peptides. One of the advantages of the present method is the ability to identify a large number of HLA binding peptides which are specific for a particular HLA allele.

[0088] The method comprises providing a population of cells that expresses either a single class I HLA allele, a single pair of class II HLA alleles, or a single class I HLA allele and a single pair of class II HLA alleles. Suitable cell populations include, e.g., class I deficient cells lines in which a single HLA class I allele is expressed, class II deficient cell lines in which a single pair of HLA class II alleles are expressed, or class I and class II deficient cell lines in which a single HLA class I and/or single pair of class II alleles are expressed. As an exemplary embodiment, the class I deficient B cell line is B721.221. However, it is clear to a skilled person that other cell populations can be generated which are class I and/or class II deficient. An exemplary method for deleting/inactivating endogenous class I or class II genes includes, CRISPR-Cas9 mediated genome editing.

[0089] In preferred embodiments, the population of cells are professional antigen presenting cells such as macrophages, B cells and dendritic cells. Preferably, the cells are B cells or dendritic cells. In preferred embodiments, the cells are tumor cells or cells from a tumor cell line. In particular embodiments, the cells are cells isolated from a patient. In preferred embodiments, the population of cells comprises at least 10⁶ cells.

[0090] In some embodiments, the population of cells are further modified, such as by increasing or decreasing the expression and/or activity of at least one gene. In preferred embodiments, the gene encodes a member of the immunoproteasome. The immunoproteasome is known to be involved in the processing of HLA class I binding peptides and includes the LMP2 (β\acute{ι}\acute{ι}), MECL-1 (β2\acute{ι}), and LMP7 (β5\acute{ι}) subunits. The immunoproteasome can also be induced by interferon-gamma. Accordingly, in some embodiments, the population of cells may be contacted with one or more cytokines, growth factors, or other proteins. Preferably, the cells are stimulated with inflammatory cytokines such as interferon-gamma, IL-Iβ, IL-6, and/or T F-α. The population of cells may also be subjected to various environmental conditions, such as stress (heat stress, oxygen deprivation, glucose starvation, DNA damaging agents, etc.). In some embodiments the cells are contacted with one or more of a chemotherapy drug, radiation, targeted therapies, immunotherapy. The methods disclosed herein can therefore be used to study the effect of various genes or conditions on HLA peptide processing and presentation. In particular embodiments, the conditions used are selected so as to match the condition of the patient for which the population of HLA-peptides is to be identified.

[0091] Any HLA allele may be expressed in the cell population. Typically, it will be of interest to sequentially perform the methods provided herein for different HLA alleles, such that resulting datasets can be used in combination. In particular embodiments, the HLA allele is selected so as to correspond to a genotype of interest. In a preferred embodiment, the HLA allele is a mutated HLA allele, which may be non-naturally occurring allele or a naturally occurring allele in an afflicted patient. The methods disclosed herein have the further advantage of identifying HLA binding peptides for HLA alleles associated with various disorders as well as alleles which are present at low frequency. Accordingly, in a preferred method the HLA allele is present at a frequency of less than 1% within a population, such as within the Caucasian population.

[0092] Vectors, promoters, etc for expression. In some embodiments, the nucleic acid sequence encoding the HLA allele further comprises a peptide tag which can be used to immunopurify the HLA-protein. Suitable tags are well-known in the art and include Myc, VSV, V5, His, HA, and FLAG tags.

[0093] The methods further comprise isolating HLA-peptide complexes from said cells. In preferred embodiments, the complexes can be isolated using standard immunoprecipitation techniques known in the art with commercially available antibodies. Preferably, the cells are first lysed. HLA class I-peptide complexes can be isolated using HLA class I specific antibodies such as the W6/32 antibody, while HLA class Il-peptide complexes can be isolated using HLA class II specific antibodies such as the M5/114.15.2 monoclonal antibody. In some embodiments, the single (or pair of) HLA alleles are expressed as a fusion protein with a peptide tag and the HLA-peptide complexes are isolated using binding molecules that recognize the peptide tags.

[0094] The methods further comprise isolating peptides from said HLA-peptide complexes and sequencing the peptides. The peptides are isolated from the complex by any method known to one of skill in the art, such as acid elution. While any sequencing method may be used, methods employing mass spectrometry, such as liquid chromatography-mass spectrometry (LC-MS or LC-MS/MS, or alternatively HPLC-MS or HPLC-MS/MS) are preferred. These sequencing methods are well-known to a skilled person and are reviewed in Medzihradszky K F and Chalkley R J. Mass Spectrom Rev. 2015 January-February; 34(1):43-63.

[0095] Typically, an HLA-allele specific binding peptide sequence database comprises at least 1000 different binding peptide sequences.

[0096] The methods disclosed herein may also be used to generate a database comprising the HLA-allele specific binding peptide sequences for more than one HLA-allele. In preferred embodiments, the methods comprise performing the steps a)-d) for at least two different HLA-alleles, preferably at least five, more preferably at least 10 different alleles.

[0097] In one aspect, the present disclosure provides a plurality of HLA-allele specific binding peptides, or the sequences thereof, which peptides correspond to the peptides which are presented by one specific HLA allele. More particularly, an HLA-allele specific binding peptide sequence database is provided obtained by carrying out the method according to the invention. In particular embodiments, combinations of pluralities of peptides, sets of sequences or databases is provided, represent HLA-allele specific peptides, sets of sequences or databases for different HLA alleles. The combination of databases is also referred to herein as a dataset. These combinations differentiate themselves over prior art datasets in that they represent HLA-specific peptides for each HLA-allele individually rather than combining HLA peptides obtained from a combination of HLA-alleles.

[0098] In one aspect, the present disclosure provides methods for generating a prediction algorithm for identifying HLA-allele specific binding peptides, which methods comprise training a neural network with one or more peptide sequence databases (i.e; combinations of databases). In particular embodiments, the methods involve training a machine with one or more peptide sequence databases generated with a method according to the invention. More particularly, the methods comprise training a neural network running on a machine with several peptide sequence databases. In the methods provided herein, the sequences are compared so as to identify prediction algorithms for a peptide to be presented by said HLA-allele.

[0099] Generating a prediction algorithm by training a machine is a well-known technique. The most important in the training of the machine is the quality of the database used for the training. Typically, the machine combines one or more linear models, support vector machines, decision trees and/or a neural network.

[0100] Machine learning can be generalized as the ability of a learning machine to perform accurately on new, unseen examples/tasks after having experienced a learning data set. Machine learning may include the following concepts and methods. Supervised learning concepts may include AODE; Artificial neural network, such as Backpropagation, Autoencoders, Hopfield networks, Boltzmann machines, Restricted Boltzmann Machines, and Spiking neural networks; Bayesian statistics, such as Bayesian network and Bayesian knowledge base; Case-based reasoning; Gaussian process regression; Gene expression programming; Group method of data handling (GMDH); Inductive logic programming; Instance-based learning; Lazy learning; Learning Automata; Learning Vector Quantization; Logistic Model Tree; Minimum message length (decision trees, decision graphs, etc.), such as Nearest Neighbor Algorithm and Analogical modeling; Probably approximately correct learning (PAC) learning; Ripple down rules, a knowledge acquisition methodology; Symbolic machine learning algorithms; Support vector machines; Random Forests; Ensembles of classifiers, such as Bootstrap aggregating (bagging) and Boosting (meta-algorithm); Ordinal classification; Information fuzzy networks (IFN); Conditional Random Field; ANOVA; Linear classifiers, such as Fisher's linear discriminant, Linear regression, Logistic regression, Multinomial logistic regression, Naive Bayes classifier, Perceptron, Support vector machines; Quadratic classifiers; k-nearest neighbor; Boosting; Decision trees, such as C4.5, Random forests, ID3, CART, SLIQ, SPRINT; Bayesian networks, such as Naive Bayes; and Hidden Markov models. Unsupervised learning concepts may include; Expectation-maximization algorithm; Vector Quantization; Generative topographic map; Information bottleneck method; Artificial neural network, such as Self-organizing map; Association rule learning, such as, Apriori algorithm, Eclat algorithm, and FP-growth algorithm; Hierarchical clustering, such as Single-linkage clustering and Conceptual clustering; Cluster analysis, such as, K-means algorithm, Fuzzy clustering, DBSCAN, and OPTICS algorithm; and Outlier Detection, such as Local Outlier Factor. Semi-supervised learning concepts may include; Generative models; Low-density separation; Graph-based methods; and Co-training. Reinforcement learning concepts may include; Temporal difference learning; Q-learning; Learning Automata; and SARSA. Deep learning concepts may include; Deep belief networks; Deep Boltzmann machines; Deep Convolutional neural networks; Deep Recurrent neural networks; and Hierarchical temporal memory.

[0101] In a preferred embodiment, the methods involve generating models based on predictive variables. In particular embodiments, only peptide-intrinsic features are used as variables (such as sequence, amino acid properties, peptide characteristics). In alternative embodiments, the models also incorporate extrinsic features such as expression and cleavage information. In particular embodiments, the variables used to train the machine comprise one or more predictive variables selected from the group consisting of peptide sequence, amino acid physical properties, peptide physical properties, protein stability, protein translation rate, protein degradation rate, translational efficiencies from ribosomal profiling, protein cleavability, protein localization, motifs of host protein that facilitate TAP transport, whether host protein is subject to autophagy, motifs that favor ribosomal stalling (polyproline stretches) and protein features that favor NMD (long 3′ UTR, stop codon >50 nt upstream of last exomexon junction). In particular embodiments, at least two of these features are used. In further embodiments, at least 3, 4, 5, 6, 7, 8, 9 or all ten of these features are used. In a preferred embodiment, the variables used to train the machine comprise the expression level of the source protein of a peptide within a cell. In a preferred embodiment, the variables used to train the machine comprise expression level of the source protein of a peptide within a cell, peptide sequence, amino acid physical properties, peptide physical properties, expression level of the source protein of a peptide within a cell, Protein stability, protein translation rate, protein degradation rate, translational efficiencies from ribosomal profiling, protein cleavability, protein localization, motifs of host protein that facilitate TAP transport, host protein is subject to autophagy, motifs that favor ribosomal stalling (polyproline stretches), protein features that favor NMD (long 3′ UTR, stop codon >50 nt upstream of last exomexon junction and peptide cleavability.

[0102] In one aspect, the present disclosure provides methods for identifying HLA-allele specific binding peptides, which method comprises analyzing the sequence of a peptide with a machine which has been trained with a peptide sequence database obtained by carrying out the method according to the invention for said HLA-allele. In a preferred embodiment, the method comprises using information on the expression level of the source protein of the peptide within the cell as a variable. In further embodiments, the method comprises determining the expression level of the source protein of the peptide within a cell and using the source protein expression as one of the predictive variables used by the machine. Typically, the expression level is determined by measuring the amount of source protein or the amount of RNA encoding said source protein. It is demonstrated herein that the methods provided herein allow a more effective prediction of HLA-binding peptides than methods of the prior art, with fewer false positives. This is important as the number of immunogenic peptides that can practically be generated in the context of an immune therapy is limited. In particular embodiments, the methods are used to determine an effective neoantigen vaccine. In particular embodiments, the methods are used to determine an effective vaccine against a pathogen. In particular embodiments, the methods are used to determine an effective tolerizing vaccine. In these contexts, it is of interest to determine which peptides forming neoantigens, pathogen antigens, or self-antigens are likely to bind to a subject's HLA so as to effectively function as immunogenic peptides.

[0103] One of the critical barriers to developing curative and tumor-specific immunotherapy is the identification and selection of highly specific and restricted tumor antigens to avoid autoimmunity. Tumor neoantigens, which arise as a result of genetic change (e.g., inversions, translocations, deletions, missense mutations, splice site mutations, etc.) within malignant cells, represent the most tumor-specific class of antigens. Neoantigens have rarely been used in cancer vaccine or immunogenic compositions due to technical difficulties in identifying them, selecting optimized neoantigens, and producing neoantigens for use in a vaccine or immunogenic composition. These problems may be addressed by: identifying mutations in neoplasias/tumors which are present at the DNA level in tumor but not in matched germline samples from a high proportion of subjects having cancer; analyzing the identified mutations with one or more peptide-MHC binding prediction algorithms to generate a plurality of neoantigen T cell epitopes that are expressed within the neoplasia/tumor and that bind to a high proportion of patient HLA alleles; and synthesizing the plurality of neoantigenic peptides selected from the sets of all neoantigen peptides and predicted binding peptides for use in a cancer vaccine or immunogenic composition suitable for treating a high proportion of subjects having cancer.

[0104] For example, translating sequencing information into a therapeutic vaccine may include: (1) Prediction of mutated peptides that can bind to HLA molecules of a high proportion of individuals. Efficiently choosing which particular mutations to utilize as immunogen requires the ability to predict which mutated peptides would efficiently bind to a high proportion of patient's HLA alleles. Recently, neural network based learning approaches with validated binding and non-binding peptides have advanced the accuracy of prediction algorithms for the major HLA-A and -B alleles; (2) Formulating the drug as a multi-epitope vaccine of long peptides. Targeting as many mutated epitopes as practically possible takes advantage of the enormous capacity of the immune system, prevents the opportunity for immunological escape by down-modulation of a particular immune targeted gene product, and compensates for the known inaccuracy of epitope prediction approaches. Synthetic peptides provide a particularly useful means to prepare multiple immunogens efficiently and to rapidly translate identification of mutant epitopes to an effective vaccine. Peptides can be readily synthesized chemically and easily purified utilizing reagents free of contaminating bacteria or animal substances. The small size allows a clear focus on the mutated region of the protein and also reduces irrelevant antigenic competition from other components (unmutated protein or viral vector antigens); (3) Combination with a strong vaccine adjuvant. Effective vaccines require a strong adjuvant to initiate an immune response. As described below, poly-ICLC, an agonist of TLR3 and the RNA helicase-domains of MDA5 and RIG3, has shown several desirable properties for a vaccine adjuvant. These properties include the induction of local and systemic activation of immune cells in vivo, production of stimulatory chemokines and cytokines, and stimulation of antigen-presentation by DCs. Furthermore, poly-ICLC can induce durable CD4+ and CD8+ responses in humans. Importantly, striking similarities in the upregulation of transcriptional and signal transduction pathways were seen in subjects vaccinated with poly-ICLC and in volunteers who had received the highly effective, replication-competent yellow fever vaccine. Furthermore, >90% of ovarian carcinoma patients immunized with poly-ICLC in combination with a NYES0-1 peptide vaccine (in addition to Montanide) showed induction of CD4+ and CD8+ T cell, as well as antibody responses to the peptide in a recent phase 1 study. At the same time, polylCLC has been extensively tested in more than 25 clinical trials to date and exhibited a relatively benign toxicity profile.

[0105] The application provides improved methods of prediction of peptides, such as mutated peptides, that can bind to HLA molecules of a high proportion of individuals. In particular embodiments, the application provides methods of identifying from a given set of neo-antigen comprising peptides the most suitable peptides for preparing an immunogenic composition for a subject, said method comprising selecting from set given set of peptides the plurality of peptides capable of binding an HLA protein of the subject, wherein said ability to bind an HLA protein is determined by analyzing the sequence of peptides with a machine which has been trained with peptide sequence databases corresponding to the specific HLA-binding peptides for each of the HLA-alleles of said subject. More particularly, the application provides methods of identifying from a given set of neo-antigen comprising peptides the most suitable peptides for preparing an immunogenic composition for a subject, said method comprising selecting from set given set of peptides the plurality of peptides determined as capable of binding an HLA protein of the subject, ability to bind an HLA protein is determined by analyzing the sequence of peptides with a machine which has been trained with a peptide sequence database obtained by carrying out the methods described herein above. Thus, in particular embodiments, the application provides methods of identifying a plurality of subject-specific peptides for preparing a subject-specific immunogenic composition, wherein the subject has a tumor and the subject-specific peptides are specific to the subject and the subject's tumor, said method comprising: whole genome or whole exome nucleic acid sequencing of a sample of the subject's tumor and a non-tumor sample of the subject; determining based on the whole genome or whole exome nucleic acid sequencing, non-silent mutations present in the genome of cancer cells of the subject but not in normal tissue from the subject, and the HLA genotype of the subject, wherein the non-silent mutations comprise a point, splice-site, frameshift, read-through or gene-fusion mutation; and selecting from the identified non-silent mutations the plurality of subject-specific peptides, each having a different tumor neo-epitope that is an epitope specific to the tumor of the subject and each being identified as capable of binding an HLA protein of the subject, as determined by analyzing the sequence of peptides derived from the non-silent mutations in the methods for predicting HLA binding described herein.

[0106] In particular embodiments, the methods are used to determine whether or not a peptide will bind to an HLA protein. In further embodiments, the methods provide a predictive score indicative of binding an HLA protein of the subject.

[0107] Thus, in particular embodiments, the application provides methods of identifying a plurality of subject-specific peptides for preparing a subject-specific immunogenic composition, said method comprising selecting a plurality of subject-specific peptides, each having a different tumor neo-epitope that is an epitope specific to the tumor of the subject and each having a predictive score indicative of binding an HLA protein of the subject, wherein said predictive score is determined by analyzing the sequence of peptides derived from the non-silent mutations by carrying out the method of predicting HLA-binding described herein.

[0108] In particular embodiments, the cell used in the method for determining HLA binding as described herein is an antigen-presenting cell.

### Neoantigens

[0109] In certain embodiments, tumor antigens that bind to HLA alleles are identified or predicted. In certain embodiments, the tumor antigens are neoantigens. In a further aspect, the invention provides methods for identifying tumor neonatigen—comprising peptides, wherein the methods comprise identifying for a given HLA allele, the peptides binding said HLA allele in a tumor cell from a tumor of a patient.

[0110] As described herein, there is a large body of evidence in both animals and humans that mutated epitopes are effective in inducing an immune response and that cases of spontaneous tumor regression or long term survival correlate with CD8+ T-cell responses to mutated epitopes (Buckwalter and Srivastava P K. “It is the antigen(s), stupid” and other lessons from over a decade of vaccitherapy of human cancer. Seminars in immunology 20:296-300 (2008); Karanikas et al, High frequency of cytolytic T lymphocytes directed against a tumor-specific mutated antigen detectable with HLA tetramers in the blood of a lung carcinoma patient with long survival. Cancer Res. 61:3718-3724 (2001); Lennerz et al, The response of autologous T cells to a human melanoma is dominated by mutated neoantigens. Proc Natl Acad Sci USA. 102: 16013 (2005)) and that “immunoediting” can be tracked to alterations in expression of dominant mutated antigens in mice and man (Matsushita et al, Cancer exome analysis reveals a T-cell-dependent mechanism of cancer immunoediting Nature 482:400 (2012); DuPage et al, Expression of tumor-specific antigens underlies cancer immunoediting Nature 482:405 (2012); and Sampson et al, Immunologic escape after prolonged progression-free survival with epidermal growth factor receptor variant III peptide vaccination in patients with newly diagnosed glioblastoma J Clin Oncol. 28:4722-4729 (2010)).

[0111] Sequencing technology has revealed that each tumor contains multiple, patient-specific mutations that alter the protein coding content of a gene. Such mutations create altered proteins, ranging from single amino acid changes (caused by missense mutations) to addition of long regions of novel amino acid sequence due to frame shifts, read-through of termination codons or translation of intron regions (novel open reading frame mutations; neoORFs). These mutated proteins are valuable targets for the host's immune response to the tumor as, unlike native proteins, they are not subject to the immune-dampening effects of self-tolerance. Therefore, mutated proteins are more likely to be immunogenic and are also more specific for the tumor cells compared to normal cells of the patient. The mutated proteins can be referred to as neoantigens. The term “neoantigen” or “neoantigenic” means a class of tumor antigens that arises from a tumor-specific mutation(s) which alters the amino acid sequence of genome encoded proteins.

[0112] The present invention provides for improved HLA epitope prediction, methods and products for use therein. Provided herein are methods and tools for improved HLA epitope prediction. These are of interest, for example, for use in the production of suitable neoantigen-comprising peptides as described further herein.

[0113] The prediction tools can be used to select subject specific peptides that are presented by a tumor for any neoplasia. By “neoplasia” is meant any disease that is caused by or results in inappropriately high levels of cell division, inappropriately low levels of apoptosis, or both. For example, cancer is an example of a neoplasia. Examples of cancers include, without limitation, leukemia (e.g., acute leukemia, acute lymphocytic leukemia, acute myelocytic leukemia, acute myeloblastic leukemia, acute promyelocytic leukemia, acute myelomonocytic leukemia, acute monocytic leukemia, acute erythroleukemia, chronic leukemia, chronic myelocytic leukemia, chronic lymphocytic leukemia), polycythemia vera, lymphoma (e.g., Hodgkin's disease, non-Hodgkin's disease), Waldenstrom's macroglobulinemia, heavy chain disease, and solid tumors such as sarcomas and carcinomas (e.g., fibrosarcoma, myxosarcoma, liposarcoma, chondrosarcoma, osteogenic sarcoma, chordoma, angiosarcoma, endotheliosarcoma, lymphangiosarcoma, lymphangioendotheliosarcoma, synovioma, mesothelioma, Ewing's tumor, leiomyosarcoma, rhabdomyosarcoma, colon carcinoma, pancreatic cancer, breast cancer, ovarian cancer, prostate cancer, squamous cell carcinoma, basal cell carcinoma, adenocarcinoma, sweat gland carcinoma, sebaceous gland carcinoma, papillary carcinoma, papillary adenocarcinomas, cystadenocarcinoma, medullary carcinoma, bronchogenic carcinoma, renal cell carcinoma, hepatoma, nile duct carcinoma, choriocarcinoma, seminoma, embryonal carcinoma, Wilm's tumor, cervical cancer, uterine cancer, testicular cancer, lung carcinoma, small cell lung carcinoma, bladder carcinoma, epithelial carcinoma, glioma, astrocytoma, medulloblastoma, craniopharyngioma, ependymoma, pinealoma, hemangioblastoma, acoustic neuroma, oligodenroglioma, schwannoma, meningioma, melanoma, neuroblastoma, and retinoblastoma). Lymphoproliferative disorders are also considered to be proliferative diseases.

### Autoimmune Diseases

[0114] In certain embodiments, self-antigen peptides that bind to HLA alleles are identified or predicted. In certain embodiments, the self-antigens are aberrantly targeted by the host immune system. As used throughout the present specification, the terms “autoimmune disease” or “autoimmune disorder” are used interchangeably refer to a diseases or disorders caused by an immune response against a self-tissue or tissue component (self-antigen) and include a self-antibody response and/or cell-mediated response. The terms encompass organ-specific autoimmune diseases, in which an autoimmune response is directed against a single tissue, as well as non-organ specific autoimmune diseases, in which an autoimmune response is directed against a component present in two or more, several or many organs throughout the body.

[0115] Examples of autoimmune diseases include but are not limited to acute disseminated encephalomyelitis (ADEM); Addison's disease; ankylosing spondylitis; antiphospholipid antibody syndrome (APS); aplastic anemia; autoimmune gastritis; autoimmune hepatitis; autoimmune thrombocytopenia; Behcet's disease; coeliac disease; dermatomyositis; diabetes mellitus type I; Goodpasture's syndrome; Graves' disease; Guillain-Barré syndrome (GBS); Hashimoto's disease; idiopathic thrombocytopenic purpura; inflammatory bowel disease (IBD) including Crohn's disease and ulcerative colitis; mixed connective tissue disease; multiple sclerosis (MS); myasthenia gravis; opsoclonus myoclonus syndrome (OMS); optic neuritis; Ord's thyroiditis; pemphigus; pernicious anaemia; polyarteritis nodosa; polymyositis; primary biliary cirrhosis; primary myoxedema; psoriasis; rheumatic fever; rheumatoid arthritis; Reiter's syndrome; scleroderma; Sjögren's syndrome; systemic lupus erythematosus; Takayasu's arteritis; temporal arteritis; vitiligo; warm autoimmune hemolytic anemia; or Wegener's granulomatosis.

### Infections

[0116] In certain embodiments, peptides arising from an infectious agent (e.g., virus, bacteria, or any pathogen) that bind to subject specific HLA alleles are identified or predicted. In certain embodiments, the infectious agent mutates to express peptides capable of binding different HLA-alleles. Thus, peptides for generating an immunological composition or vaccine require prediction of novel peptide binding to subject specific HLA alleles.

[0117] Examples of pathogenic bacteria include without limitation any one or more of (or any combination of) Acinetobacter baumanii, Actinobacillus sp., Actinomycetes, Actinomyces sp. (such as Actinomyces israelii and Actinomyces naeslundii), Aeromonas sp. (such as Aeromonas hydrophila, Aeromonas veronii biovar sobria (Aeromonas sobria), and Aeromonas caviae), Anaplasma phagocytophilum, Anaplasma marginate, Alcaligenes xylosoxidans, Acinetobacter baumanii, Actinobacillus actinomycetemcomitans, Bacillus sp. (such as Bacillus anthracis, Bacillus cereus, Bacillus subtilis, Bacillus thuringiensis, and Bacillus stearothermophilus), Bacteroides sp. (such as Bacteroides Bartonella sp. (such as Bartonella bacilliformis and Bartonella henselae, Bifidobacterium sp., Bordetella sp. (such as Bordetella pertussis, Bordetella parapertussis, and Bordetella bronchiseptica), Borrelia sp. (such as Borrelia recurrentis, and Borrelia burgdorferi), Brucella sp. (such as Brucella abortus, Brucella canis, Brucella melintensis and Brucella suis), Burkholderia sp. (such as Burkholderia pseudomallei and Burkholderia cepacia), Campylobacter sp. (such as Campylobacter jejuni, Campylobacter coli, Campylobacter lari and Campylobacter fetus), Capnocytophaga sp., Cardiobacterium hominis, Chlamydia trachomatis, Chlamydophila pneumoniae, Chlamydophila psittaci, Citrobacter sp. Coxiella burnetii, Corynebacterium sp. (such as, Corynebacterium diphtherias, Corynebacterium jeikeum and Corynebacterium), Clostridium sp. (such as Clostridium perfringens, Clostridium difficile, Clostridium botulinum and Clostridium tetani), Eikenella corrodens, Enterobacter sp. (such as Enterobacter aerogenes, Enterobacter agglomerans, Enterobacter cloacae and Escherichia coli, including opportunistic Escherichia coli, such as enterotoxigenic E. coli, enteroinvasive E. coli, enteropathogenic E. coli, enterohemorrhagic E. coli, enteroaggregative E. coli and uropathogenic E. coli) Enterococcus sp. (such as Enterococcus faecalis and Enterococcus faecium) Ehrlichia sp. (such as Ehrlichia chafeensia and Ehrlichia canis), Erysipelothrix rhusiopathiae, Eubacterium sp., Francisella tularensis, Fusobacterium nucleatum, Gardnerella vaginalis, Gemella morbillorum, Haemophilus sp. (such as Haemophilus influenzae, Haemophilus ducreyi, Haemophilus aegyptius, Haemophilus parainfluenzae, Haemophilus haemolyticus and Haemophilus parahaemolyticus, Helicobacter sp. (such as Helicobacter pylori, Helicobacter cinaedi and Helicobacter fennelliae), Kingella kingii, Klebsiella sp. (such as Klebsiella pneumoniae, Klebsiella granulomatis and Klebsiella oxytoca), Lactobacillus sp., Listeria monocytogenes, Leptospira interrogans, Legionella pneumophila, Leptospira interrogans, Peptostreptococcus sp., Mannheimia hemolytica, Moraxella catarrhalis, Morganella sp., Mobiluncus sp., Micrococcus sp., Mycobacterium sp. (such as Mycobacterium leprae, Mycobacterium tuberculosis, Mycobacterium paratuberculosis, Mycobacterium intracellulare, Mycobacterium avium, Mycobacterium bovis, and Mycobacterium marinum), Mycoplasm sp. (such as Mycoplasma pneumoniae, Mycoplasma hominis, and Mycoplasma genitalium), Nocardia sp. (such as Nocardia asteroides, Nocardia cyriacigeorgica and Nocardia brasiliensis), Neisseria sp. (such as Neisseria gonorrhoeae and Neisseria meningitidis), Pasteurella multocida, Plesiomonas shigelloides. Prevotella sp., Porphyromonas sp., Prevotella melaninogenica, Proteus sp. (such as Proteus vulgaris and Proteus mirabilis), Providencia sp. (such as Providencia alcalifaciens, Providencia rettgeri and Providencia stuartii), Pseudomonas aeruginosa, Propionibacterium acnes, Rhodococcus equi, Rickettsia sp. (such as Rickettsia rickettsii, Rickettsia akari and Rickettsia prowazekii, Orientia tsutsugamushi (formerly: Rickettsia tsutsugamushi) and Rickettsia typhi), Rhodococcus sp., Serratia marcescens, Stenotrophomonas maltophilia, Salmonella sp. (such as Salmonella enterica, Salmonella typhi, Salmonella paratyphi, Salmonella enteritidis, Salmonella cholerasuis and Salmonella typhimurium), Serratia sp. (such as Serratia marcesans and Serratia liquifaciens), Shigella sp. (such as Shigella dysenteriae, Shigella flexneri, Shigella boydii and Shigella sonnei), Staphylococcus sp. (such as Staphylococcus aureus, Staphylococcus epidermidis, Staphylococcus hemolyticus, Staphylococcus saprophyticus), Streptococcus sp. (such as Streptococcus pneumoniae (for example chloramphenicol-resistant serotype 4 Streptococcus pneumoniae, spectinomycin-resistant serotype 6B Streptococcus pneumoniae, streptomycin-resistant serotype 9V Streptococcus pneumoniae, erythromycin-resistant serotype 14 Streptococcus pneumoniae, optochin-resistant serotype 14 Streptococcus pneumoniae, rifampicin-resistant serotype 18C Streptococcus pneumoniae, tetracycline-resistant serotype 19F Streptococcus pneumoniae, penicillin-resistant serotype 19F Streptococcus pneumoniae, and trimethoprim-resistant serotype 23F Streptococcus pneumoniae, chloramphenicol-resistant serotype 4 Streptococcus pneumoniae, spectinomycin-resistant serotype 6B Streptococcus pneumoniae, streptomycin-resistant serotype 9V Streptococcus pneumoniae, optochin-resistant serotype 14 Streptococcus pneumoniae, rifampicin-resistant serotype 18C Streptococcus pneumoniae, penicillin-resistant serotype 19F Streptococcus pneumoniae, or trimethoprim-resistant serotype 23F Streptococcus pneumoniae), Streptococcus agalactiae, Streptococcus mutans, Streptococcus pyogenes, Group A streptococci, Streptococcus pyogenes, Group B streptococci, Streptococcus agalactiae, Group C streptococci, Streptococcus anginosus, Streptococcus equismilis, Group D streptococci, Streptococcus bovis, Group F streptococci, and Streptococcus anginosus Group G streptococci), Spirillum minus, Streptobacillus moniliformi, Treponema sp. (such as Treponema carateum, Treponema petenue, Treponema pallidum and Treponema endemicum, Tropheryma whippelii, Ureaplasma urealyticum, Veillonella sp., Vibrio sp. (such as Vibrio cholerae, Vibrio parahemolyticus, Vibrio vulnificus, Vibrio parahaemolyticus, Vibrio vulnificus, Vibrio alginolyticus, Vibrio mimicus, Vibrio hollisae, Vibrio fluvialis, Vibrio metchnikovii, Vibrio damsela and Vibrio furnisii), Yersinia sp. (such as Yersinia enterocolitica, Yersinia pestis, and Yersinia pseudotuberculosis) and Xanthomonas maltophilia among others.

[0118] Examples of fungi include without limitation any one or more of (or any combination of), Aspergillus, Blastomyces, Candidiasis, Coccidiodomycosis, Cryptococcus neoformans, Cryptococcus gatti, Histoplasma, Mucroymcosis, Pneumocystis, Sporothrix, fungal eye infections ringwork, Exserohilum, and Cladosporium. In certain example embodiments, the fungus is a yeast. Examples of yeast include without limitation one or more of (or any combination of), Aspergillus species, a Geotrichum species, a Saccharomyces species, a Hansenula species, a Candida species, a Kluyveromyces species, a Debaryomyces species, a Pichia species, or combination thereof. In certain example embodiments, the fungus is a mold. Example molds include, but are not limited to, a Penicillium species, a Cladosporium species, a Byssochlamys species, or a combination thereof.

[0119] In certain example embodiments, the pathogen may be a virus. The virus may be a DNA virus, a RNA virus, or a retrovirus. Example of RNA viruses include one or more of (or any combination of) Coronaviridae virus, a Picornaviridae virus, a Caliciviridae virus, a Flaviviridae virus, a Togaviridae virus, a Bornaviridae, a Filoviridae, a Paramyxoviridae, a Pneumoviridae, a Rhabdoviridae, an Arenaviridae, a Bunyaviridae, an Orthomyxoviridae, or a Deltavirus. In certain example embodiments, the virus is Coronavirus, SARS, Poliovirus, Rhinovirus, Hepatitis A, Norwalk virus, Yellow fever virus, West Nile virus, Hepatitis C virus, Dengue fever virus, Zika virus, Rubella virus, Ross River virus, Sindbis virus, Chikungunya virus, Borna disease virus, Ebola virus, Marburg virus, Measles virus, Mumps virus, Nipah virus, Hendra virus, Newcastle disease virus, Human respiratory syncytial virus, Rabies virus, Lassa virus, Hantavirus, Crimean-Congo hemorrhagic fever virus, Influenza, or Hepatitis D virus.

[0120] In certain example embodiments, the virus may be a retrovirus. Example retroviruses include one or more of or any combination of viruses of the Genus Alpharetrovirus, Betaretrovirus, Gammaretrovirus, Deltaretrovirus, Epsilonretrovirus, Lentivirus, Spumavirus, or the Family Metaviridae, Pseudoviridae, and Retroviridae (including HIV), Hepadnaviridae (including Hepatitis B virus), and Caulimoviridae (including Cauliflower mosaic virus).

[0121] In certain example embodiments, the virus is a DNA virus. Example DNA viruses that include one or more of (or any combination of) viruses from the Family Myoviridae, Podoviridae, Siphoviridae, Alloherpesviridae, Herpesviridae (including human herpes virus, and Varicella Zoster virus), Malocoherpesviridae, Lipothrixviridae, Rudiviridae, Adenoviridae, Ampullaviridae, Ascoviridae, Asfarviridae (including African swine fever virus), Baculoviridae, Cicaudaviridae, Clavaviridae, Corticoviridae, Fuselloviridae, Globuloviridae, Guttaviridae, Hytrosaviridae, Iridoviridae, Maseilleviridae, Mimiviridae, Nudiviridae, Nimaviridae, Pandoraviridae, Papillomaviridae, Phycodnaviridae, Plasmaviridae, Polydnaviruses, Polyomaviridae (including Simian virus 40, JC virus, BK virus), Poxviridae (including Cowpox and smallpox), Sphaerolipoviridae, Tectiviridae, Turriviridae, Dinodnavirus, Salterprovirus, Rhizidovirus, among others.

[0122] In certain example embodiments, the pathogen may be a protozoon. Examples of protozoa include without limitation any one or more of (or any combination of), Euglenozoa, Heterolobosea, Diplomonadida, Amoebozoa, Blastocystic, and Apicomplexa. Example Euglenoza include, but are not limited to, Trypanosoma cruzi (Chagas disease), T. brucei gambiense, T. brucei rhodesiense, Leishmania braziliensis, L. infantum, L. mexicana, L. major, L. tropica, and L. donovani. Example Heterolobosea include, but are not limited to, Naegleria fowleri. Example Diplomonadid include, but are not limited to, Giardia intestinalis (G. lamblia, G. duodenalis). Example Amoebozoa include, but are not limited to, Acanthamoeba castellanii, Balamuthia madrillaris, Entamoeba histolytica. Example Blastocystis include, but are not limited to, Blastocystic hominis. Example Apicomplexa include, but are not limited to, Babesia microti, Cryptosporidium parvum, Cyclospora cayetanensis, Plasmodium falciparum, P. vivax, P. ovale, P. malariae, and Toxoplasma gondii.

### Therapeutic Compositions and Methods of Use

### Vaccines and Immunological Compositions

[0123] In certain embodiments, the peptides identified according to the present invention are used in a vaccine or immunological composition to treat any disease or condition described herein (e.g., tumor, autoimmunity, infection, transplant). The term “vaccine” or “immunological composition” are used interchangeably and are meant to refer in the present context to a pooled sample of one or more antigenic peptides, for example at least one, at least two, at least three, at least four, at least five, or more antigenic peptides. A “vaccine” is to be understood as including a protective vaccine, which is a composition for generating immunity for the prophylaxis and/or treatment of diseases (e.g., neoplasia/tumor). A “vaccine” is also to be understood as including a tolerizing vaccine, which is a composition for reducing immunity for the prophylaxis and/or treatment of diseases (e.g., autoimmune disease). A tolerizing vaccine may be formulated with antigenic epitopes specific for an allergen or for an autoimmunity antigen identified according to the present invention. A protective vaccine may be formulated with antigenic epitopes specific for a pathogen or for a cancer cell. Accordingly, vaccines are medicaments which comprise antigens and are intended to be used in humans or animals for generating specific defense and protective substance by vaccination. A “vaccine composition” can include a pharmaceutically acceptable excipient, carrier or diluent.

[0124] The vaccine may include one or more peptides identified according to the present invention. For example, 1 to 10 peptides. Ranges provided herein are understood to be shorthand for all of the values within the range. For example, a range of 1 to 50 is understood to include any number, combination of numbers, or sub-range from the group consisting of 1, 2, 3, 4, 5, 6, 7, 8, 9, 10, 11, 12, 13, 14, 15, 16, 17, 18, 19, 20, 21, 22, 23, 24, 25, 26, 27, 28, 29, 30, 31, 32, 33, 34, 35, 36, 37, 38, 39, 40, 41, 42, 43, 44, 45, 46, 47, 48, 49, or 50. With respect to sub-ranges, “nested sub-ranges” that extend from either end point of the range are specifically contemplated. For example, a nested sub-range of an exemplary range of 1 to 50 may comprise 1 to 10, 1 to 20, 1 to 30, and 1 to 40 in one direction, or 50 to 40, 50 to 30, 50 to 20, and 50 to 10 in the other direction.

[0125] As used herein, the terms “prevent,” “preventing,” “prevention,” “prophylactic treatment,” and the like, refer to reducing the probability of developing a disease or condition in a subject, who does not have, but is at risk of or susceptible to developing a disease or condition.

[0126] The vaccine of the present invention may ameliorate a disease as described herein. By “ameliorate” is meant decrease, suppress, attenuate, diminish, arrest, or stabilize the development or progression of a disease (e.g., a neoplasia, tumor, autoimmunity, infection, etc.).

[0127] The terms “treat,” “treated,” “treating,” “treatment,” and the like are meant to refer to reducing or ameliorating a disorder and/or symptoms associated therewith (e.g., a neoplasia or tumor). “Treating” may refer to administration of the therapy to a subject after the onset, or suspected onset, of a cancer. “Treating” includes the concepts of “alleviating”, which refers to lessening the frequency of occurrence or recurrence, or the severity, of any symptoms or other ill effects related to a cancer and/or the side effects associated with cancer therapy. The term “treating” also encompasses the concept of “managing” which refers to reducing the severity of a particular disease or disorder in a patient or delaying its recurrence, e.g., lengthening the period of remission in a patient who had suffered from the disease. It is appreciated that, although not precluded, treating a disorder or condition does not require that the disorder, condition, or symptoms associated therewith be completely eliminated.

[0128] The term “therapeutic effect” refers to some extent of relief of one or more of the symptoms of a disorder (e.g., a neoplasia or tumor) or its associated pathology. “Therapeutically effective amount” as used herein refers to an amount of an agent which is effective, upon single or multiple dose administration to the cell or subject, in prolonging the survivability of the patient with such a disorder, reducing one or more signs or symptoms of the disorder, preventing or delaying, and the like beyond that expected in the absence of such treatment. “Therapeutically effective amount” is intended to qualify the amount required to achieve a therapeutic effect. A physician or veterinarian having ordinary skill in the art can readily determine and prescribe the “therapeutically effective amount” (e.g., ED50) of the pharmaceutical composition required. For example, the physician or veterinarian could start doses of the compounds of the invention employed in a pharmaceutical composition at levels lower than that required in order to achieve the desired therapeutic effect and gradually increase the dosage until the desired effect is achieved.

[0129] In certain embodiments, a protective vaccine is used to treat cancer. Additional examples of cancers and cancer conditions that can be treated with the therapy of this document include, but are not limited to a patient in need thereof that has been diagnosed as having cancer, or at risk of developing cancer. The subject may have a solid tumor such as breast, ovarian, prostate, lung, kidney, gastric, colon, testicular, head and neck, pancreas, brain, melanoma, and other tumors of tissue organs and hematological tumors, such as lymphomas and leukemias, including acute myelogenous leukemia, chronic myelogenous leukemia, chronic lymphocytic leukemia, T cell lymphocytic leukemia, and B cell lymphomas, tumors of the brain and central nervous system (e.g., tumors of the meninges, brain, spinal cord, cranial nerves and other parts of the CNS, such as glioblastomas or medulla blastomas); head and/or neck cancer, breast tumors, tumors of the circulatory system (e.g., heart, mediastinum and pleura, and other intrathoracic organs, vascular tumors, and tumor-associated vascular tissue); tumors of the blood and lymphatic system (e.g., Hodgkin's disease, Non-Hodgkin's disease lymphoma, Burkitt's lymphoma, AIDS-related lymphomas, malignant immunoproliferative diseases, multiple myeloma, and malignant plasma cell neoplasms, lymphoid leukemia, myeloid leukemia, acute or chronic lymphocytic leukemia, monocytic leukemia, other leukemias of specific cell type, leukemia of unspecified cell type, unspecified malignant neoplasms of lymphoid, hematopoietic and related tissues, such as diffuse large cell lymphoma, T-cell lymphoma or cutaneous T-cell lymphoma); tumors of the excretory system (e.g., kidney, renal pelvis, ureter, bladder, and other urinary organs); tumors of the gastrointestinal tract (e.g., esophagus, stomach, small intestine, colon, colorectal, rectosigmoid junction, rectum, anus, and anal canal); tumors involving the liver and intrahepatic bile ducts, gall bladder, and other parts of the biliary tract, pancreas, and other digestive organs; tumors of the oral cavity (e.g., lip, tongue, gum, floor of mouth, palate, parotid gland, salivary glands, tonsil, oropharynx, nasopharynx, puriform sinus, hypopharynx, and other sites of the oral cavity); tumors of the reproductive system (e.g., vulva, vagina, Cervix uteri, uterus, ovary, and other sites associated with female genital organs, placenta, penis, prostate, testis, and other sites associated with male genital organs); tumors of the respiratory tract (e.g., nasal cavity, middle ear, accessory sinuses, larynx, trachea, bronchus and lung, such as small cell lung cancer and non-small cell lung cancer); tumors of the skeletal system (e.g., bone and articular cartilage of limbs, bone articular cartilage and other sites); tumors of the skin (e.g., malignant melanoma of the skin, non-melanoma skin cancer, basal cell carcinoma of skin, squamous cell carcinoma of skin, mesothelioma, Kaposi's sarcoma); and tumors involving other tissues including peripheral nerves and autonomic nervous system, connective and soft tissue, retroperitoneoum and peritoneum, eye, thyroid, adrenal gland, and other endocrine glands and related structures, secondary and unspecified malignant neoplasms of lymph nodes, secondary malignant neoplasm of respiratory and digestive systems and secondary malignant neoplasm of other sites. Thus the population of subjects described herein may be suffering from one of the above cancer types. In other embodiments, the population of subjects may be all subjects suffering from solid tumors, or all subjects suffering from liquid tumors.

[0130] Of special interest is the treatment of Non-Hodgkin's Lymphoma (NHL), clear cell Renal Cell Carcinoma (ccRCC), metastatic melanoma, sarcoma, leukemia or a cancer of the bladder, colon, brain, breast, head and neck, endometrium, lung, ovary, pancreas or prostate. In certain embodiments, the melanoma is high risk melanoma.

[0131] Cancers that can be treated using the therapy described herein may include among others cases which are refractory to treatment with other chemotherapeutics. The term “refractory, as used herein refers to a cancer (and/or metastases thereof), which shows no or only weak antiproliferative response (e.g., no or only weak inhibition of tumor growth) after treatment with another chemotherapeutic agent. These are cancers that cannot be treated satisfactorily with other chemotherapeutics. Refractory cancers encompass not only (i) cancers where one or more chemotherapeutics have already failed during treatment of a patient, but also (ii) cancers that can be shown to be refractory by other means, e.g., biopsy and culture in the presence of chemotherapeutics.

[0132] The therapy described herein is also applicable to the treatment of patients in need thereof who have not been previously treated.

[0133] The therapy described herein is also applicable where the subject has no detectable neoplasia but is at high risk for disease recurrence.

[0134] Also of special interest is the treatment of patients in need thereof who have undergone Autologous Hematopoietic Stem Cell Transplant (AHSCT), and in particular patients who demonstrate residual disease after undergoing AHSCT. The post-AHSCT setting is characterized by a low volume of residual disease, the infusion of immune cells to a situation of homeostatic expansion, and the absence of any standard relapse-delaying therapy. These features provide a unique opportunity to use the claimed neoplastic vaccine or immunogenic composition compositions to delay disease relapse.

[0135] In certain embodiments, the vaccine as described herein can promote tolerance or dampen an inappropriate, unwanted, or undesirable immune response, thereby permitting treatment of autoimmune disease, as described herein, and/or conditions associated with transplants (e.g., graft vs. host disease). Immune tolerance, or immunological tolerance, or immunotolerance, is a state of unresponsiveness of the immune system to substances or tissue that have the capacity to elicit an immune response in given organism. Immune recognition of non-self-antigens typically complicates transplantation and engrafting of foreign tissue from an organism of the same species (allografts), resulting in graft reaction. In certain embodiments, a state of tolerance can be induced, either by previous exposure to the antigen of the donor in a manner that causes immune tolerance rather than sensitization in the recipient. Antigen-specific immune tolerance (ASI) is a promising approach to treat or prevent autoimmune disorders, however, there is a need to identify proper peptides (see, e.g., Shakya and Nandakumar, Antigen-Specific Tolerization and Targeted Delivery as Therapeutic Strategies for Autoimmune Diseases. Trends Biotechnol. 2018 July; 36(7):686-699; and Pozsgay et al., Antigen-specific immunotherapies in rheumatic diseases. Nat Rev Rheumatol. 2017 September; 13(9):525-537). In certain embodiments, approaches include the use of tolerizing peptides coupled to MHC constructs and/or nanocompounds, tolerizing dendritic cells (see, e.g., Wei et al., Development and Functional Characterization of Murine Tolerogenic Dendritic Cells. J Vis Exp. 2018 May 18; (135)), and antigen-specific vaccines.

[0136] The present invention is based, at least in part, on the ability to present the immune system of the patient with one or more HLA allele specific peptides. In certain embodiments, the the immune system of the patient is presented with a pool of tumor specific neoantigens. The application further provides novel neoantigenic peptides identified by the methods provided herein. Accordingly, provided herein are immunogenic compositions comprising a peptide having a sequence selected from XLXX₄XX₆X₇XX₉ (SEQ ID NO:30); wherein one or more of X₄ is E or D, X₆ is L, V, or I, X₇ is I, V, or A, and X is L or V, and wherein X is any amino acid; XLXDXXX₇XX₉ (SEQ ID NO:31), wherein one or more of X₇ is L and X₉ is Y or F, and wherein X is any amino acid; XX₂X₃X₄XXXXY (SEQ ID NO:32), wherein one or more of X₂ is T, S, or L, X₃ is D or E and X₇ is I, V, or A, and wherein X is any amino acid; XLXXXX₆XXX₉ (SEQ ID NO:33); wherein one or more of X₆ is L or V and X₉ is V or L, and wherein X is any amino acid; XLXX₄XX₆XXX₉ (SEQ ID NO:34), wherein one or more of X₄ is E or D, X₆ is L or V and X₉ is V or L, and wherein X is any amino acid; XLDXXXXXX₉ (SEQ ID NO:35), wherein X₉ is L or V, and wherein X is any amino acid; XXXXXXLXX₉ (SEQ ID NO:36), wherein one or more of X₂ is L or V and X₉ is K, Y or R, and wherein X is any amino acid; XiX₂XXXXXXR (SEQ ID NO:37), wherein one or more of X₁ is R or A and X₂ is V or L, and wherein X is any amino acid; EX₂XXXXXXX₉ (SEQ ID NO:38), wherein one or more of X₂ is V, T, or A and X is V or L, and wherein X is any amino acid; XX₂XRXXXXX₉ (SEQ ID NO:39), wherein one or more of X₂ is P or A and X₉ is Y, F, or L, and wherein X is any amino acid; X₁EXXLXXXX₉ (SEQ ID NO:40), wherein one or more of X₁ is A or E and X₉ is F, W, or L, and wherein X is any amino acid; X₁EXXLXLXX₉ (SEQ ID NO:41), wherein one or more of X₁ is A or E and X₉ is F, W, or L, and wherein X is any amino acid; DX₂XXXXXXX₉ (SEQ ID NO:42), wherein one or more of X₂ is P or A and X₉ is I, V, or L, and wherein X is any amino acid; and X₁YXXXXXXX₉ (SEQ ID NO:43), wherein one or more of Xi is M, W, or V and X9 is F or L, and wherein X is any amino acid.

### Producing Antigenic Peptides

[0137] One of skill in the art from this disclosure and the knowledge in the art will appreciate that there are a variety of ways in which to produce such tumor specific neoantigens or any other antigens. In general, such tumor specific neoantigens or antigens may be produced either in vitro or in vivo. Tumor specific neoantigens or antigens may be produced in vitro as peptides or polypeptides, which may then be formulated into a neoplasia vaccine or immunogenic composition and administered to a subject. As described in further detail herein, such in vitro production may occur by a variety of methods known to one of skill in the art such as, for example, peptide synthesis or expression of a peptide/polypeptide from a DNA or RNA molecule in any of a variety of bacterial, eukaryotic, or viral recombinant expression systems, followed by purification of the expressed peptide/polypeptide. Alternatively, tumor specific neoantigens or antigens may be produced in vivo by introducing molecules (e.g., DNA, RNA, viral expression systems, and the like) that encode tumor specific neoantigens or antigens into a subject, whereupon the encoded tumor specific neoantigens or antigens are expressed. The methods of in vitro and in vivo production of neoantigens or antigens is also further described herein as it relates to pharmaceutical compositions and methods of delivery of the therapy. By an isolated “polypeptide” or “peptide” is meant a polypeptide that has been separated from components that naturally accompany it. Typically, the polypeptide is isolated when it is at least 60%, by weight, free from the proteins and naturally-occurring organic molecules with which it is naturally associated. Preferably, the preparation is at least 75%, more preferably at least 90%, and most preferably at least 99%, by weight, a polypeptide. An isolated polypeptide may be obtained, for example, by extraction from a natural source, by expression of a recombinant nucleic acid encoding such a polypeptide; or by chemically synthesizing the protein. Purity can be measured by any appropriate method, for example, column chromatography, polyacrylamide gel electrophoresis, or by HPLC analysis.

[0138] In certain embodiments, the present invention includes modified neoantigenic or antigenic peptides. As used herein in reference to peptides, the terms “modified”, “modification” and the like refer to one or more changes that enhance a desired property of the antigenic peptide, where the change does not alter the primary amino acid sequence of the antigenic peptide. “Modification” includes a covalent chemical modification that does not alter the primary amino acid sequence of the neoantigenic peptide itself. Such desired properties include, for example, prolonging the in vivo half-life, increasing the stability, reducing the clearance, altering the immunogenicity or allergenicity, enabling the raising of particular antibodies, cellular targeting, antigen uptake, antigen processing, MHC affinity, MHC stability, or antigen presentation. Changes to an antigenic peptide that may be carried out include, but are not limited to, conjugation to a carrier protein, conjugation to a ligand, conjugation to an antibody, PEGylation, polysialylation HESylation, recombinant PEG mimetics, Fc fusion, albumin fusion, nanoparticle attachment, nanoparticulate encapsulation, cholesterol fusion, iron fusion, acylation, amidation, glycosylation, side chain oxidation, phosphorylation, biotinylation, the addition of a surface active material, the addition of amino acid mimetics, or the addition of unnatural amino acids. Modified peptides also include analogs. By “analog” is meant a molecule that is not identical, but has analogous functional or structural features. For example, a tumor specific neo-antigen polypeptide analog retains the biological activity of a corresponding naturally-occurring tumor specific neo-antigen polypeptide, while having certain biochemical modifications that enhance the analog's function relative to a naturally-occurring polypeptide. Such biochemical modifications could increase the analog's protease resistance, membrane permeability, or half-life, without altering, for example, ligand binding. An analog may include an unnatural amino acid.

[0139] The recitation of a listing of chemical groups in any definition of a variable herein includes definitions of that variable as any single group or combination of listed groups. The recitation of an embodiment for a variable or aspect herein includes that embodiment as any single embodiment or in combination with any other embodiments or portions thereof.

[0140] Modified peptides may include a spacer or a linker. The terms “spacer” or “linker” as used in reference to a fusion protein refers to a peptide that joins the proteins comprising a fusion protein. Generally, a spacer has no specific biological activity other than to join or to preserve some minimum distance or other spatial relationship between the proteins or RNA sequences. However, in certain embodiments, the constituent amino acids of a spacer may be selected to influence some property of the molecule such as the folding, net charge, or hydrophobicity of the molecule.

[0141] Suitable linkers for use in an embodiment of the present invention are well known to those of skill in the art and include, but are not limited to, straight or branched-chain carbon linkers, heterocyclic carbon linkers, or peptide linkers. The linker is used to separate two neoantigenic peptides by a distance sufficient to ensure that, in a preferred embodiment, each neoantigenic peptide properly folds. Preferred peptide linker sequences adopt a flexible extended conformation and do not exhibit a propensity for developing an ordered secondary structure. Typical amino acids in flexible protein regions include Gly, Asn and Ser. Virtually any permutation of amino acid sequences containing Gly, Asn and Ser would be expected to satisfy the above criteria for a linker sequence. Other near neutral amino acids, such as Thr and Ala, also may be used in the linker sequence. Still other amino acid sequences that may be used as linkers are disclosed in Maratea et al. (1985), Gene 40: 39-46; Murphy et al. (1986) Proc. Nat'l. Acad. Sci. USA 83: 8258-62; U.S. Pat. Nos. 4,935,233; and 4,751,180.

[0142] The clinical effectiveness of protein therapeutics is often limited by short plasma half-life and susceptibility to protease degradation. Studies of various therapeutic proteins (e.g., filgrastim) have shown that such difficulties may be overcome by various modifications, including conjugating or linking the polypeptide sequence to any of a variety of non-proteinaceous polymers, e.g., polyethylene glycol (PEG), polypropylene glycol, or polyoxyalkylenes (see, for example, typically via a linking moiety covalently bound to both the protein and the nonproteinaceous polymer, e.g., a PEG). Such PEG-conjugated biomolecules have been shown to possess clinically useful properties, including better physical and thermal stability, protection against susceptibility to enzymatic degradation, increased solubility, longer in vivo circulating half-life and decreased clearance, reduced immunogenicity and antigenicity, and reduced toxicity.

[0143] PEGs suitable for conjugation to a polypeptide sequence are generally soluble in water at room temperature, and have the general formula R(0-CH₂—CH₂)ₙO—R, where R is hydrogen or a protective group such as an alkyl or an alkanol group, and where n is an integer from 1 to 1000. When R is a protective group, it generally has from 1 to 8 carbons. The PEG conjugated to the polypeptide sequence can be linear or branched. Branched PEG derivatives, “star-PEGs” and multi-armed PEGs are contemplated by the present disclosure. A molecular weight of the PEG used in the present disclosure is not restricted to any particular range, but certain embodiments have a molecular weight between 500 and 20,000 while other embodiments have a molecular weight between 4,000 and 10,000. The present disclosure also contemplates compositions of conjugates wherein the PEGs have different n values and thus the various different PEGs are present in specific ratios. For example, some compositions comprise a mixture of conjugates where n=1, 2, 3 and 4. In some compositions, the percentage of conjugates where n=1 is 18-25%, the percentage of conjugates where n=2 is 50-66%, the percentage of conjugates where n=3 is 12-16%, and the percentage of conjugates where n=4 is up to 5%. Such compositions can be produced by reaction conditions and purification methods know in the art. For example, cation exchange chromatography may be used to separate conjugates, and a fraction is then identified which contains the conjugate having, for example, the desired number of PEGs attached, purified free from unmodified protein sequences and from conjugates having other numbers of PEGs attached.

[0144] PEG may be bound to a polypeptide of the present disclosure via a terminal reactive group (a “spacer”). The spacer is, for example, a terminal reactive group which mediates a bond between the free amino or carboxyl groups of one or more of the polypeptide sequences and polyethylene glycol. The PEG having the spacer which may be bound to the free amino group includes N-hydroxysuccinylimide polyethylene glycol which may be prepared by activating succinic acid ester of polyethylene glycol with N-hydroxy succinylimide. Another activated polyethylene glycol which may be bound to a free amino group is 2,4-bis(0-methoxypolyethyleneglycol)-6-chloro-s-triazine which may be prepared by reacting polyethylene glycol monomethyl ether with cyanuric chloride. The activated polyethylene glycol which is bound to the free carboxyl group includes polyoxyethylenediamine.

[0145] Conjugation of one or more of the polypeptide sequences of the present disclosure to PEG having a spacer may be carried out by various conventional methods. For example, the conjugation reaction can be carried out in solution at a pH of from 5 to 10, at temperature from 4° C. to room temperature, for 30 minutes to 20 hours, utilizing a molar ratio of reagent to protein of from 4:1 to 30:1. Reaction conditions may be selected to direct the reaction towards producing predominantly a desired degree of substitution. In general, low temperature, low pH (e.g., pH=5), and short reaction time tend to decrease the number of PEGs attached, whereas high temperature, neutral to high pH (e.g., pH>7), and longer reaction time tend to increase the number of PEGs attached. Various means known in the art may be used to terminate the reaction. In some embodiments the reaction is terminated by acidifying the reaction mixture and freezing at, e.g., −20° C.

[0146] The present disclosure also contemplates the use of PEG Mimetics. Recombinant PEG mimetics have been developed that retain the attributes of PEG (e.g., enhanced serum half-life) while conferring several additional advantageous properties. By way of example, simple polypeptide chains (comprising, for example, Ala, Glu, Gly, Pro, Ser and Thr) capable of forming an extended conformation similar to PEG can be produced recombinantly already fused to the peptide or protein drug of interest (e.g., Amunix' XTEN technology; Mountain View, Calif.). This obviates the need for an additional conjugation step during the manufacturing process. Moreover, established molecular biology techniques enable control of the side chain composition of the polypeptide chains, allowing optimization of immunogenicity and manufacturing properties.

[0147] For purposes of the present disclosure, “glycosylation” is meant to broadly refer to the enzymatic process that attaches glycans to proteins, lipids or other organic molecules. The use of the term “glycosylation” in conjunction with the present disclosure is generally intended to mean adding or deleting one or more carbohydrate moieties (either by removing the underlying glycosylation site or by deleting the glycosylation by chemical and/or enzymatic means), and/or adding one or more glycosylation sites that may or may not be present in the native sequence. In addition, the phrase includes qualitative changes in the glycosylation of the native proteins involving a change in the nature and proportions of the various carbohydrate moieties present. Glycosylation can dramatically affect the physical properties of proteins and can also be important in protein stability, secretion, and subcellular localization. Proper glycosylation can be essential for biological activity. In fact, some genes from eucaryotic organisms, when expressed in bacteria (e.g., E. coli) which lack cellular processes for glycosylating proteins, yield proteins that are recovered with little or no activity by virtue of their lack of glycosylation.

[0148] Addition of glycosylation sites can be accomplished by altering the amino acid sequence. The alteration to the polypeptide may be made, for example, by the addition of, or substitution by, one or more serine or threonine residues (for O-linked glycosylation sites) or asparagine residues (for N-linked glycosylation sites). The structures of N-linked and O-linked oligosaccharides and the sugar residues found in each type may be different. One type of sugar that is commonly found on both is N-acetylneuraminic acid (hereafter referred to as sialic acid). Sialic acid is usually the terminal residue of both N-linked and O-linked oligosaccharides and, by virtue of its negative charge, may confer acidic properties to the glycoprotein. A particular embodiment of the present disclosure comprises the generation and use of N-glycosylation variants.

[0149] The polypeptide sequences of the present disclosure may optionally be altered through changes at the DNA level, particularly by mutating the DNA encoding the polypeptide at preselected bases such that codons are generated that will translate into the desired amino acids. Another means of increasing the number of carbohydrate moieties on the polypeptide is by chemical or enzymatic coupling of glycosides to the polypeptide.

[0150] Removal of carbohydrates may be accomplished chemically or enzymatically, or by substitution of codons encoding amino acid residues that are glycosylated. Chemical deglycosylation techniques are known, and enzymatic cleavage of carbohydrate moieties on polypeptides can be achieved by the use of a variety of endo- and exo-glycosidases.

[0151] Dihydrofolate reductase (DHFR)—deficient Chinese Hamster Ovary (CHO) cells are a commonly used host cell for the production of recombinant glycoproteins. These cells do not express the enzyme beta-galactoside alpha-2,6-sialyltransferase and therefore do not add sialic acid in the alpha-2,6 linkage to N-linked oligosaccharides of glycoproteins produced in these cells.

[0152] The present disclosure also contemplates the use of polysialylation, the conjugation of peptides and proteins to the naturally occurring, biodegradable a-(2→8) linked polysialic acid (“PSA”) in order to improve their stability and in vivo pharmacokinetics. PSA is a biodegradable, non-toxic natural polymer that is highly hydrophilic, giving it a high apparent molecular weight in the blood which increases its serum half-life. In addition, polysialylation of a range of peptide and protein therapeutics has led to markedly reduced proteolysis, retention of activity in vivo activity, and reduction in immunogenicity and antigenicity (see, e.g., G. Gregoriadis et al., Int. J. Pharmaceutics 300(1-2): 125-30). As with modifications with other conjugates (e.g., PEG), various techniques for site-specific polysialylation are available (see, e.g., T. Lindhout et al., PNAS 108(18)7397-7402 (2011)).

[0153] Additional suitable components and molecules for conjugation include, for example, thyroglobulin; albumins such as human serum albumin (HAS); tetanus toxoid; Diphtheria toxoid; polyamino acids such as poly(D-lysine:D-glutamic acid); VP6 polypeptides of rotaviruses; influenza virus hemaglutinin, influenza virus nucleoprotein; Keyhole Limpet Hemocyanin (KLH); and hepatitis B virus core protein and surface antigen; or any combination of the foregoing.

[0154] Fusion of albumin to one or more polypeptides of the present disclosure can, for example, be achieved by genetic manipulation, such that the DNA coding for HSA, or a fragment thereof, is joined to the DNA coding for the one or more polypeptide sequences. Thereafter, a suitable host can be transformed or transfected with the fused nucleotide sequences in the form of, for example, a suitable plasmid, so as to express a fusion polypeptide. The expression may be effected in vitro from, for example, prokaryotic or eukaryotic cells, or in vivo from, for example, a transgenic organism. In some embodiments of the present disclosure, the expression of the fusion protein is performed in mammalian cell lines, for example, CHO cell lines. Transformation is used broadly herein to refer to the genetic alteration of a cell resulting from the direct uptake, incorporation and expression of exogenous genetic material (exogenous DNA) from its surroundings and taken up through the cell membrane(s). Transformation occurs naturally in some species of bacteria, but it can also be effected by artificial means in other cells.

[0155] Furthermore, albumin itself may be modified to extend its circulating half-life. Fusion of the modified albumin to one or more Polypeptides can be attained by the genetic manipulation techniques described above or by chemical conjugation; the resulting fusion molecule has a half-life that exceeds that of fusions with non-modified albumin. (See WO2011/051489).

[0156] Several albumin—binding strategies have been developed as alternatives for direct fusion, including albumin binding through a conjugated fatty acid chain (acylation). Because serum albumin is a transport protein for fatty acids, these natural ligands with albumin-binding activity have been used for half-life extension of small protein therapeutics. For example, insulin determir (LEVEMIR), an approved product for diabetes, comprises a myristyl chain conjugated to a genetically-modified insulin, resulting in a long-acting insulin analog.

[0157] Another type of modification is to conjugate (e.g., link) one or more additional components or molecules at the N- and/or C-terminus of a polypeptide sequence, such as another protein (e.g., a protein having an amino acid sequence heterologous to the subject protein), or a carrier molecule. Thus, an exemplary polypeptide sequence can be provided as a conjugate with another component or molecule. A conjugate modification may result in a polypeptide sequence that retains activity with an additional or complementary function or activity of the second molecule. For example, a polypeptide sequence may be conjugated to a molecule, e.g., to facilitate solubility, storage, in vivo or shelf half-life or stability, reduction in immunogenicity, delayed or controlled release in vivo, etc. Other functions or activities include a conjugate that reduces toxicity relative to an unconjugated polypeptide sequence, a conjugate that targets a type of cell or organ more efficiently than an unconjugated polypeptide sequence, or a drug to further counter the causes or effects associated with a disorder or disease as set forth herein (e.g., diabetes).

[0158] A Polypeptide may also be conjugated to large, slowly metabolized macromolecules such as proteins; polysaccharides, such as sepharose, agarose, cellulose, cellulose beads; polymeric amino acids such as polyglutamic acid, polylysine; amino acid copolymers; inactivated virus particles; inactivated bacterial toxins such as toxoid from diphtheria, tetanus, cholera, leukotoxin molecules; inactivated bacteria; and dendritic cells.

[0159] Additional candidate components and molecules for conjugation include those suitable for isolation or purification. Particular non-limiting examples include binding molecules, such as biotin (biotin-avidin specific binding pair), an antibody, a receptor, a ligand, a lectin, or molecules that comprise a solid support, including, for example, plastic or polystyrene beads, plates or beads, magnetic beads, test strips, and membranes.

[0160] Purification methods such as cation exchange chromatography may be used to separate conjugates by charge difference, which effectively separates conjugates into their various molecular weights. For example, the cation exchange column can be loaded and then washed with −20 mM sodium acetate, pH−4, and then eluted with a linear (0 M to 0.5 M) NaCl gradient buffered at a pH from about 3 to 5.5, e.g., at pH−4.5. The content of the fractions obtained by cation exchange chromatography may be identified by molecular weight using conventional methods, for example, mass spectroscopy, SDS-PAGE, or other known methods for separating molecular entities by molecular weight.

[0161] In certain embodiments, the amino- or carboxyl-terminus of a polypeptide sequence of the present disclosure can be fused with an immunoglobulin Fc region (e.g., human Fc) to form a fusion conjugate (or fusion molecule). Fc fusion conjugates have been shown to increase the systemic half-life of biopharmaceuticals, and thus the biopharmaceutical product may require less frequent administration. Fc binds to the neonatal Fc receptor (FcRn) in endothelial cells that line the blood vessels, and, upon binding, the Fc fusion molecule is protected from degradation and re-released into the circulation, keeping the molecule in circulation longer. This Fc binding is believed to be the mechanism by which endogenous IgG retains its long plasma half-life. More recent Fc-fusion technology links a single copy of a biopharmaceutical to the Fc region of an antibody to optimize the pharmacokinetic and pharmacodynamic properties of the biopharmaceutical as compared to traditional Fc-fusion conjugates.

[0162] The present disclosure contemplates the use of other modifications, currently known or developed in the future, of the Polypeptides to improve one or more properties. One such method for prolonging the circulation half-life, increasing the stability, reducing the clearance, or altering the immunogenicity or allergenicity of a polypeptide of the present disclosure involves modification of the polypeptide sequences by hesylation, which utilizes hydroxyethyl starch derivatives linked to other molecules in order to modify the molecule's characteristics. Various aspects of hesylation are described in, for example, U.S. Patent Appln. Nos. 2007/0134197 and 2006/0258607.

### In Vitro Peptide/Polypeptide Synthesis

[0163] Proteins or peptides may be made by any technique known to those of skill in the art, including the expression of proteins, polypeptides or peptides through standard molecular biological techniques, the isolation of proteins or peptides from natural sources, in vitro translation, or the chemical synthesis of proteins or peptides. The nucleotide and protein, polypeptide and peptide sequences corresponding to various genes have been previously disclosed, and may be found at computerized databases known to those of ordinary skill in the art. One such database is the National Center for Biotechnology Information's Genbank and GenPept databases located at the National Institutes of Health website. The coding regions for known genes may be amplified and/or expressed using the techniques disclosed herein or as would be known to those of ordinary skill in the art. Alternatively, various commercial preparations of proteins, polypeptides and peptides are known to those of skill in the art.

[0164] Peptides can be readily synthesized chemically utilizing reagents that are free of contaminating bacterial or animal substances (Merrifield R B: Solid phase peptide synthesis. I. The synthesis of a tetrapeptide. J. Am. Chem. Soc. 85:2149-54, 1963). In certain embodiments, neoantigenic peptides are prepared by (1) parallel solid-phase synthesis on multi-channel instruments using uniform synthesis and cleavage conditions; (2) purification over a RP-HPLC column with column stripping; and re-washing, but not replacement, between peptides; followed by (3) analysis with a limited set of the most informative assays. The Good Manufacturing Practices (GMP) footprint can be defined around the set of peptides for an individual patient, thus requiring suite changeover procedures only between syntheses of peptides for different patients.

[0165] Alternatively, a nucleic acid (e.g., a polynucleotide) encoding a neoantigenic peptide of the invention may be used to produce the neoantigenic peptide in vitro. The polynucleotide may be, e.g., DNA, cDNA, PNA, CNA, RNA, either single- and/or double-stranded, or native or stabilized forms of polynucleotides, such as e.g. polynucleotides with a phosphorothiate backbone, or combinations thereof and it may or may not contain introns so long as it codes for the peptide. In one embodiment in vitro translation is used to produce the peptide. Many exemplary systems exist that one skilled in the art could utilize (e.g., Retic Lysate IVT Kit, Life Technologies, Waltham, Mass.).

[0166] An expression vector capable of expressing a polypeptide can also be prepared. Expression vectors for different cell types are well known in the art and can be selected without undue experimentation. Generally, the DNA is inserted into an expression vector, such as a plasmid, in proper orientation and correct reading frame for expression. If necessary, the DNA may be linked to the appropriate transcriptional and translational regulatory control nucleotide sequences recognized by the desired host (e.g., bacteria), although such controls are generally available in the expression vector. The vector is then introduced into the host bacteria for cloning using standard techniques (see, e.g., Sambrook et al. (1989) Molecular Cloning, A Laboratory Manual, Cold Spring Harbor Laboratory, Cold Spring Harbor, N.Y.).

[0167] Expression vectors comprising the isolated polynucleotides, as well as host cells containing the expression vectors, are also contemplated. The neoantigenic peptides may be provided in the form of RNA or cDNA molecules encoding the desired neoantigenic peptides. One or more neoantigenic peptides of the invention may be encoded by a single expression vector.

[0168] The term “polynucleotide encoding a polypeptide” encompasses a polynucleotide which includes only coding sequences for the polypeptide as well as a polynucleotide which includes additional coding and/or non-coding sequences. Polynucleotides can be in the form of RNA or in the form of DNA. DNA includes cDNA, genomic DNA, and synthetic DNA; and can be double-stranded or single-stranded, and if single stranded can be the coding strand or non-coding (anti-sense) strand.

[0169] In embodiments, the polynucleotides may comprise the coding sequence for the tumor specific neoantigenic peptide fused in the same reading frame to a polynucleotide which aids, for example, in expression and/or secretion of a polypeptide from a host cell (e.g., a leader sequence which functions as a secretory sequence for controlling transport of a polypeptide from the cell). The polypeptide having a leader sequence is a preprotein and can have the leader sequence cleaved by the host cell to form the mature form of the polypeptide.

[0170] In embodiments, the polynucleotides can comprise the coding sequence for the tumor specific neoantigenic peptide fused in the same reading frame to a marker sequence that allows, for example, for purification of the encoded polypeptide, which may then be incorporated into the personalized neoplasia vaccine or immunogenic composition. For example, the marker sequence can be a hexa-histidine tag supplied by a pQE-9 vector to provide for purification of the mature polypeptide fused to the marker in the case of a bacterial host, or the marker sequence can be a hemagglutinin (HA) tag derived from the influenza hemagglutinin protein when a mammalian host (e.g., COS-7 cells) is used. Additional tags include, but are not limited to, Calmodulin tags, FLAG tags, Myc tags, S tags, SBP tags, Softag 1, Softag 3, V5 tag, Xpress tag, Isopeptag, SpyTag, Biotin Carboxyl Carrier Protein (BCCP) tags, GST tags, fluorescent protein tags (e.g., green fluorescent protein tags), maltose binding protein tags, Nus tags, Strep-tag, thioredoxin tag, TC tag, Ty tag, and the like.

[0171] In embodiments, the polynucleotides may comprise the coding sequence for one or more of the tumor specific neoantigenic peptides fused in the same reading frame to create a single concatamerized neoantigenic peptide construct capable of producing multiple neoantigenic peptides.

[0172] In certain embodiments, isolated nucleic acid molecules having a nucleotide sequence at least 60% identical, at least 65% identical, at least 70% identical, at least 75% identical, at least 80%) identical, at least 85% identical, at least 90% identical, at least 95% identical, or at least 96%), 97%, 98% or 99% identical to a polynucleotide encoding a tumor specific neoantigenic peptide of the present invention, can be provided. By a polynucleotide having a nucleotide sequence at least, for example, 95% “identical” to a reference nucleotide sequence is intended that the nucleotide sequence of the polynucleotide is identical to the reference sequence except that the polynucleotide sequence can include up to five point mutations per each 100 nucleotides of the reference nucleotide sequence. In other words, to obtain a polynucleotide having a nucleotide sequence at least 95% identical to a reference nucleotide sequence, up to 5% of the nucleotides in the reference sequence can be deleted or substituted with another nucleotide, or a number of nucleotides up to 5% of the total nucleotides in the reference sequence can be inserted into the reference sequence. These mutations of the reference sequence can occur at the amino- or carboxy-terminal positions of the reference nucleotide sequence or anywhere between those terminal positions, interspersed either individually among nucleotides in the reference sequence or in one or more contiguous groups within the reference sequence.

[0173] As a practical matter, whether any particular nucleic acid molecule is at least 80% identical, at least 85% identical, at least 90% identical, and in some embodiments, at least 95%, 96%), 97%), 98%), or 99% identical to a reference sequence can be determined conventionally using known computer programs such as the Bestfit program (Wisconsin Sequence Analysis Package, Version 8 for Unix, Genetics Computer Group, University Research Park, 575 Science Drive, Madison, Wis. 53711). Bestfit uses the local homology algorithm of Smith and Waterman, Advances in Applied Mathematics 2:482-489 (1981), to find the best segment of homology between two sequences. When using Bestfit or any other sequence alignment program to determine whether a particular sequence is, for instance, 95% identical to a reference sequence according to the present invention, the parameters are set such that the percentage of identity is calculated over the full length of the reference nucleotide sequence and that gaps in homology of up to 5%> of the total number of nucleotides in the reference sequence are allowed.

[0174] The isolated tumor specific neoantigenic peptides described herein can be produced in vitro (e.g., in the laboratory) by any suitable method known in the art. Such methods range from direct protein synthetic methods to constructing a DNA sequence encoding isolated polypeptide sequences and expressing those sequences in a suitable transformed host. In some embodiments, a DNA sequence is constructed using recombinant technology by isolating or synthesizing a DNA sequence encoding a wild-type protein of interest. Optionally, the sequence can be mutagenized by site-specific mutagenesis to provide functional analogs thereof. See, e.g. Zoeller et al., Proc. Nat'l. Acad. Sci. USA 81:5662-5066 (1984) and U.S. Pat. No. 4,588,585.

[0175] In embodiments, a DNA sequence encoding a polypeptide of interest would be constructed by chemical synthesis using an oligonucleotide synthesizer. Such oligonucleotides can be designed based on the amino acid sequence of the desired polypeptide and selecting those codons that are favored in the host cell in which the recombinant polypeptide of interest is produced. Standard methods can be applied to synthesize an isolated polynucleotide sequence encoding an isolated polypeptide of interest. For example, a complete amino acid sequence can be used to construct a back-translated gene. Further, a DNA oligomer containing a nucleotide sequence coding for the particular isolated polypeptide can be synthesized. For example, several small oligonucleotides coding for portions of the desired polypeptide can be synthesized and then ligated. The individual oligonucleotides typically contain 5′ or 3′ overhangs for complementary assembly.

[0176] Once assembled (e.g., by synthesis, site-directed mutagenesis, or another method), the polynucleotide sequences encoding a particular isolated polypeptide of interest is inserted into an expression vector and optionally operatively linked to an expression control sequence appropriate for expression of the protein in a desired host. Proper assembly can be confirmed by nucleotide sequencing, restriction mapping, and expression of a biologically active polypeptide in a suitable host. As well known in the art, in order to obtain high expression levels of a transfected gene in a host, the gene can be operatively linked to transcriptional and translational expression control sequences that are functional in the chosen expression host.

[0177] Recombinant expression vectors may be used to amplify and express DNA encoding the tumor specific neoantigenic peptides. Recombinant expression vectors are replicable DNA constructs which have synthetic or cDNA-derived DNA fragments encoding a tumor specific neoantigenic peptide or a bioequivalent analog operatively linked to suitable transcriptional or translational regulatory elements derived from mammalian, microbial, viral or insect genes. A transcriptional unit generally comprises an assembly of (1) a genetic element or elements having a regulatory role in gene expression, for example, transcriptional promoters or enhancers, (2) a structural or coding sequence which is transcribed into mRNA and translated into protein, and (3) appropriate transcription and translation initiation and termination sequences, as described in detail herein. Such regulatory elements can include an operator sequence to control transcription. The ability to replicate in a host, usually conferred by an origin of replication, and a selection gene to facilitate recognition of transformants can additionally be incorporated. DNA regions are operatively linked when they are functionally related to each other. For example, DNA for a signal peptide (secretory leader) is operatively linked to DNA for a polypeptide if it is expressed as a precursor which participates in the secretion of the polypeptide; a promoter is operatively linked to a coding sequence if it controls the transcription of the sequence; or a ribosome binding site is operatively linked to a coding sequence if it is positioned so as to permit translation. Generally, operatively linked means contiguous, and in the case of secretory leaders, means contiguous and in reading frame. Structural elements intended for use in yeast expression systems include a leader sequence enabling extracellular secretion of translated protein by a host cell. Alternatively, where recombinant protein is expressed without a leader or transport sequence, it can include an N-terminal methionine residue. This residue can optionally be subsequently cleaved from the expressed recombinant protein to provide a final product.

[0178] Useful expression vectors for eukaryotic hosts, especially mammals or humans include, for example, vectors comprising expression control sequences from SV40, bovine papilloma virus, adenovirus and cytomegalovirus. Useful expression vectors for bacterial hosts include known bacterial plasmids, such as plasmids from Escherichia coli, including pCR 1, pBR322, pMB9 and their derivatives, wider host range plasmids, such as MI 3 and filamentous single-stranded DNA phages.

[0179] Suitable host cells for expression of a polypeptide include prokaryotes, yeast, insect or higher eukaryotic cells under the control of appropriate promoters. Prokaryotes include gram negative or gram positive organisms, for example E. coli or bacilli. Higher eukaryotic cells include established cell lines of mammalian origin. Cell-free translation systems could also be employed. Appropriate cloning and expression vectors for use with bacterial, fungal, yeast, and mammalian cellular hosts are well known in the art (see Pouwels et al., Cloning Vectors: A Laboratory Manual, Elsevier, N.Y., 1985).

[0180] Various mammalian or insect cell culture systems are also advantageously employed to express recombinant protein. Expression of recombinant proteins in mammalian cells can be performed because such proteins are generally correctly folded, appropriately modified and completely functional. Examples of suitable mammalian host cell lines include the COS-7 lines of monkey kidney cells, described by Gluzman (Cell 23: 175, 1981), and other cell lines capable of expressing an appropriate vector including, for example, L cells, C127, 3T3, Chinese hamster ovary (CHO), 293, HeLa and BHK cell lines. Mammalian expression vectors can comprise nontranscribed elements such as an origin of replication, a suitable promoter and enhancer linked to the gene to be expressed, and other 5′ or 3′ flanking nontranscribed sequences, and 5′ or 3′ nontranslated sequences, such as necessary ribosome binding sites, a polyadenylation site, splice donor and acceptor sites, and transcriptional termination sequences. Baculovirus systems for production of heterologous proteins in insect cells are reviewed by Luckow and Summers, Bio/Technology 6:47 (1988).

[0181] The proteins produced by a transformed host can be purified according to any suitable method. Such standard methods include chromatography (e.g., ion exchange, affinity and sizing column chromatography, and the like), centrifugation, differential solubility, or by any other standard technique for protein purification. Affinity tags such as hexahistidine, maltose binding domain, influenza coat sequence, glutathione-S-transf erase, and the like can be attached to the protein to allow easy purification by passage over an appropriate affinity column. Isolated proteins can also be physically characterized using such techniques as proteolysis, nuclear magnetic resonance and x-ray crystallography.

[0182] For example, supernatants from systems which secrete recombinant protein into culture media can be first concentrated using a commercially available protein concentration filter, for example, an Amicon or Millipore Pellicon ultrafiltration unit. Following the concentration step, the concentrate can be applied to a suitable purification matrix. Alternatively, an anion exchange resin can be employed, for example, a matrix or substrate having pendant diethylaminoethyl (DEAE) groups. The matrices can be acrylamide, agarose, dextran, cellulose or other types commonly employed in protein purification. Alternatively, a cation exchange step can be employed. Suitable cation exchangers include various insoluble matrices comprising sulfopropyl or carboxymethyl groups. Finally, one or more reversed-phase high performance liquid chromatography (RP-ffPLC) steps employing hydrophobic RP-FTPLC media, e.g., silica gel having pendant methyl or other aliphatic groups, can be employed to further purify a cancer stem cell protein-Fc composition. Some or all of the foregoing purification steps, in various combinations, can also be employed to provide a homogeneous recombinant protein. Recombinant protein produced in bacterial culture can be isolated, for example, by initial extraction from cell pellets, followed by one or more concentration, salting-out, aqueous ion exchange or size exclusion chromatography steps. High performance liquid chromatography (HPLC) can be employed for final purification steps. Microbial cells employed in expression of a recombinant protein can be disrupted by any convenient method, including freeze-thaw cycling, sonication, mechanical disruption, or use of cell lysing agents.

### In Vivo Peptide/Polypeptide Synthesis

[0183] The present invention also contemplates the use of nucleic acid molecules as vehicles for delivering neoantigenic peptides/polypeptides to the subject in need thereof, in vivo, in the form of, e.g., DNA/RNA vaccines (see, e.g., WO2012/159643, and WO2012/159754, hereby incorporated by reference in their entirety).

[0184] In one embodiment antigens may be administered to a patient in need thereof by use of a plasmid. These are plasmids which usually consist of a strong viral promoter to drive the in vivo transcription and translation of the gene (or complementary DNA) of interest (Mor, et al., (1995), The Journal of Immunology 155 (4): 2039-2046). Intron A may sometimes be included to improve mRNA stability and hence increase protein expression (Leitner et al. (1997), The Journal of Immunology 159 (12): 6112-6119). Plasmids also include a strong polyadenylation/transcriptional termination signal, such as bovine growth hormone or rabbit beta-globulin polyadenylation sequences (Alarcon et al., (1999), Adv. Parasitol. Advances in Parasitology 42: 343-410; Robinson et al., (2000). Adv. Virus Res. Advances in Virus Research 55: 1-74; Bohm et al., (1996). Journal of Immunological Methods 193 (1): 29-40.). Multi cistronic vectors are sometimes constructed to express more than one immunogen, or to express an immunogen and an immunostimulatory protein (Lewis et al., (1999). Advances in Virus Research (Academic Press) 54: 129-88).

[0185] Because the plasmid is the “vehicle” from which the immunogen is expressed, optimising vector design for maximal protein expression is essential (Lewis et al., (1999). Advances in Virus Research (Academic Press) 54: 129-88). One way of enhancing protein expression is by optimising the codon usage of pathogenic mRNAs for eukaryotic cells. Another consideration is the choice of promoter. Such promoters may be the SV40 promoter or Rous Sarcoma Virus (RSV). Plasmids may be introduced into animal tissues by a number of different methods. The two most popular approaches are injection of DNA in saline, using a standard hypodermic needle, and gene gun delivery. A schematic outline of the construction of a DNA vaccine plasmid and its subsequent delivery by these two methods into a host is illustrated at Scientific American (Weiner et al., (1999) Scientific American 281 (1): 34-41). Injection in saline is normally conducted intramuscularly (EVI) in skeletal muscle, or intradermally (ID), with DNA being delivered to the extracellular spaces. This can be assisted by el ectrop oration by temporarily damaging muscle fibres with myotoxins such as bupivacaine; or by using hypertonic solutions of saline or sucrose (Alarcon et al., (1999). Adv. Parasitol. Advances in Parasitology 42: 343-410). Immune responses to this method of delivery can be affected by many factors, including needle type, needle alignment, speed of injection, volume of injection, muscle type, and age, sex and physiological condition of the animal being injected (Alarcon et al., (1999). Adv. Parasitol. Advances in Parasitology 42: 343-410).

[0186] Gene gun delivery, the other commonly used method of delivery, ballistically accelerates plasmid DNA (pDNA) that has been adsorbed onto gold or tungsten microparticles into the target cells, using compressed helium as an accelerant (Alarcon et al., (1999). Adv. Parasitol. Advances in Parasitology 42: 343-410; Lewis et al., (1999). Advances in Virus Research (Academic Press) 54: 129-88).

[0187] Alternative delivery methods may include aerosol instillation of naked DNA on mucosal surfaces, such as the nasal and lung mucosa, (Lewis et al., (1999). Advances in Virus Research (Academic Press) 54: 129-88) and topical administration of pDNA to the eye and vaginal mucosa (Lewis et al., (1999) Advances in Virus Research (Academic Press) 54: 129-88). Mucosal surface delivery has also been achieved using cationic liposome-DNA preparations, biodegradable microspheres, attenuated Shigella or Listeria vectors for oral administration to the intestinal mucosa, and recombinant adenovirus vectors. DNA or RNA may also be delivered to cells following mild mechanical disruption of the cell membrane, temporarily permeabilizing the cells. Such a mild mechanical disruption of the membrane can be accomplished by gently forcing cells through a small aperture (Ex Vivo Cytosolic Delivery of Functional Macromolecules to Immune Cells, Sharei et al, PLOS ONE|DOI: 10.1371/journal.pone.O1 18803 Apr. 13, 2015).

[0188] The method of delivery determines the dose of DNA required to raise an effective immune response. Saline injections require variable amounts of DNA, from 10 μg-1 mg, whereas gene gun deliveries require 100 to 1000 times less DNA than intramuscular saline injection to raise an effective immune response. Generally, 0.2 μg-20 μg are required, although quantities as low as 16 ng have been reported. These quantities vary from species to species, with mice, for example, requiring approximately 10 times less DNA than primates. Saline injections require more DNA because the DNA is delivered to the extracellular spaces of the target tissue (normally muscle), where it has to overcome physical barriers (such as the basal lamina and large amounts of connective tissue, to mention a few) before it is taken up by the cells, while gene gun deliveries bombard DNA directly into the cells, resulting in less “wastage” (See e.g., Sedegah et al., (1994). Proceedings of the National Academy of Sciences of the United States of America 91 (21): 9866-9870; Daheshia et al., (1997). The Journal of Immunology 159 (4): 1945-1952; Chen et al., (1998). The Journal of Immunology 160 (5): 2425-2432; Sizemore (1995) Science 270 (5234): 299-302; Fynan et al., (1993) Proc. Natl. Acad. Sci. U.S.A. 90 (24): 11478-82).

[0189] In one embodiment, a neoplasia vaccine or immunogenic composition may include separate DNA plasmids encoding, for example, one or more neoantigenic peptides/polypeptides as identified in according to the invention. As discussed herein, the exact choice of expression vectors can depend upon the peptide/polypeptides to be expressed, and is well within the skill of the ordinary artisan. The expected persistence of the DNA constructs (e.g., in an episomal, non-replicating, non-integrated form in the muscle cells) is expected to provide an increased duration of protection.

[0190] One or more antigenic peptides of the invention may be encoded and expressed in vivo using a viral based system (e.g., an adenovirus system, an adeno associated virus (AAV) vector, a poxvirus, or a lentivirus). In one embodiment, the neoplasia vaccine or immunogenic composition may include a viral based vector for use in a human patient in need thereof, such as, for example, an adenovirus (see, e.g., Baden et al. First-in-human evaluation of the safety and immunogenicity of a recombinant adenovirus serotype 26 HIV-1 Env vaccine (IPCAVD 001). J Infect Dis. 2013 Jan. 15; 207(2):240-7, hereby incorporated by reference in its entirety). Plasmids that can be used for adeno associated virus, adenovirus, and lentivirus delivery have been described previously (see e.g., U.S. Pat. Nos. 6,955,808 and 6,943,019, and U.S. Patent application No. 20080254008, hereby incorporated by reference). The peptides and polypeptides of the invention can also be expressed by a vector, e.g., a nucleic acid molecule as herein-discussed, e.g., RNA or a DNA plasmid, a viral vector such as a poxvirus, e.g., orthopox virus, avipox virus, or adenovirus, AAV or lentivirus. This approach involves the use of a vector to express nucleotide sequences that encode the peptide of the invention. Upon introduction into an acutely or chronically infected host or into a noninfected host, the vector expresses the immunogenic peptide, and thereby elicits a host CTL response.

[0191] Among vectors that may be used in the practice of the invention, integration in the host genome of a cell is possible with retrovirus gene transfer methods, often resulting in long term expression of the inserted transgene. In a preferred embodiment the retrovirus is a lentivirus. Additionally, high transduction efficiencies have been observed in many different cell types and target tissues. The tropism of a retrovirus can be altered by incorporating foreign envelope proteins, expanding the potential target population of target cells. A retrovirus can also be engineered to allow for conditional expression of the inserted transgene, such that only certain cell types are infected by the lentivirus. Cell type specific promoters can be used to target expression in specific cell types. Lentiviral vectors are retroviral vectors (and hence both lentiviral and retroviral vectors may be used in the practice of the invention). Moreover, lentiviral vectors are preferred as they are able to transduce or infect non-dividing cells and typically produce high viral titers. Selection of a retroviral gene transfer system may therefore depend on the target tissue. Retroviral vectors are comprised of cis-acting long terminal repeats with packaging capacity for up to 6-10 kb of foreign sequence. The minimum cis-acting LTRs are sufficient for replication and packaging of the vectors, which are then used to integrate the desired nucleic acid into the target cell to provide permanent expression. Widely used retroviral vectors that may be used in the practice of the invention include those based upon murine leukemia virus (MuLV), gibbon ape leukemia virus (GaLV), Simian Immuno deficiency virus (SIV), human immuno deficiency virus (HIV), and combinations thereof (see, e.g., Buchscher et al., (1992) J. Virol. 66:2731-2739; Johann et al., (1992) J. Virol. 66: 1635-1640; Sommnerfelt et al., (1990) Virol. 176:58-59; Wilson et al., (1998) J. Virol. 63:2374-2378; Miller et al., (1991) J. Virol. 65:2220-2224; PCT/US94/05700).

[0192] Also useful in the practice of the invention is a minimal non-primate lentiviral vector, such as a lentiviral vector based on the equine infectious anemia virus (EIAV) (see, e.g., Balagaan, (2006) J Gene Med; 8: 275-285, Published online 21 Nov. 2005 in Wiley InterScience (www.interscience.wiley.com). DOI: 10.1002/jgm.845). The vectors may have cytomegalovirus (CMV) promoter driving expression of the target gene. Accordingly, the invention contemplates amongst vector(s) useful in the practice of the invention: viral vectors, including retroviral vectors and lentiviral vectors.

[0193] Lentiviral vectors have been disclosed as in the treatment for Parkinson's Disease, see, e.g., US Patent Publication No. 20120295960 and U.S. Pat. Nos. 7,303,910 and 7,351,585. Lentiviral vectors have also been disclosed for delivery to the Brain, see, e.g., US Patent Publication Nos. US20110293571; US20040013648, US20070025970, US20090111106 and U.S. Pat. No. 7,259,015. In another embodiment lentiviral vectors are used to deliver vectors to the brain of those being treated for a disease.

[0194] As to lentivirus vector systems useful in the practice of the invention, mention is made of U.S. Pat. Nos. 6,428,953, 6,165,782, 6,013,516, 5,994,136, 6,312,682, and 7,198,784, and documents cited therein.

[0195] In an embodiment herein the delivery is via an lentivirus. Zou et al. administered about 10 μ\hat{ι} of a recombinant lentivirus having a titer of 1×10⁹ transducing units (TU)/ml by an intrathecal catheter. These sort of dosages can be adapted or extrapolated to use of a retroviral or lentiviral vector in the present invention. For transduction in tissues such as the brain, it is necessary to use very small volumes, so the viral preparation is concentrated by ultracentrifugation. The resulting preparation should have at least 10⁸ TU/ml, preferably from 10⁸ to 10⁹ TU/ml, more preferably at least 10⁹ TU/ml. Other methods of concentration such as ultrafiltration or binding to and elution from a matrix may be used.

[0196] In other embodiments the amount of lentivirus administered may be 1.×.10⁵ or about 1.×.10⁵ plaque forming units (PFU), 5.×.10⁵ or about 5.×.10⁵ PFU, 1.×.10⁶ or about 1.×lO⁶ PFU, 5.×.10⁶ or about 5.×.10⁶ PFU, 1.×.10⁷ or about 1.×.10⁷PFU, 5.×.10⁷ or about 5.×.10⁷ PFU, 1.×.10⁸ or about 1.×.10⁸ PFU, 5.×.10⁸ or about 5.×.10⁸ PFU, 1.×.10⁹ or about 1.×.10⁹ PFU, 5.×.10⁹ or about 5.×.10⁹ PFU, 1.×.10¹⁰ or about 1.×.10¹⁰ PFU or 5.×.10¹⁰ or about 5.×.10¹⁰ PFU as total single dosage for an average human of 75 kg or adjusted for the weight and size and species of the subject. One of skill in the art can determine suitable dosage. Suitable dosages for a virus can be determined empirically. Also useful in the practice of the invention is an adenovirus vector. One advantage is the ability of recombinant adenoviruses to efficiently transfer and express recombinant genes in a variety of mammalian cells and tissues in vitro and in vivo, resulting in the high expression of the transferred nucleic acids. Further, the ability to productively infect quiescent cells, expands the utility of recombinant adenoviral vectors. In addition, high expression levels ensure that the products of the nucleic acids will be expressed to sufficient levels to generate an immune response (see e.g., U.S. Pat. No. 7,029,848, hereby incorporated by reference).

[0197] As to adenovirus vectors useful in the practice of the invention, mention is made of U.S. Pat. No. 6,955,808. The adenovirus vector used can be selected from the group consisting of the Ad5, Ad35, Adl 1, C6, and C7 vectors. The sequence of the Adenovirus 5 (“Ad5”) genome has been published. (Chroboczek, J., Bieber, F., and Jacrot, B. (1992) The Sequence of the Genome of Adenovirus Type 5 and Its Comparison with the Genome of Adenovirus Type 2, Virology 186, 280-285; the contents if which is hereby incorporated by reference). Ad35 vectors are described in U.S. Pat. Nos. 6,974,695, 6,913,922, and 6,869,794. Adl 1 vectors are described in U.S. Pat. No. 6,913,922. C6 adenovirus vectors are described in U.S. Pat. Nos. 6,780,407; 6,537,594; 6,309,647; 6,265, 189; 6,156,567; 6,090,393; 5,942,235 and 5,833,975. C7 vectors are described in U.S. Pat. No. 6,277,558. Adenovirus vectors that are E1-defective or deleted, E3-defective or deleted, and/or E4-defective or deleted may also be used. Certain adenoviruses having mutations in the E1 region have improved safety margin because E1-defective adenovirus mutants are replication-defective in non-permissive cells, or, at the very least, are highly attenuated. Adenoviruses having mutations in the E3 region may have enhanced the immunogenicity by disrupting the mechanism whereby adenovirus down-regulates MHC class I molecules. Adenoviruses having E4 mutations may have reduced immunogenicity of the adenovirus vector because of suppression of late gene expression. Such vectors may be particularly useful when repeated re-vaccination utilizing the same vector is desired. Adenovirus vectors that are deleted or mutated in E1, E3, E4, E1 and E3, and E1 and E4 can be used in accordance with the present invention. Furthermore, “gutless” adenovirus vectors, in which all viral genes are deleted, can also be used in accordance with the present invention. Such vectors require a helper virus for their replication and require a special human 293 cell line expressing both E1 a and Cre, a condition that does not exist in natural environment. Such “gutless” vectors are non-immunogenic and thus the vectors may be inoculated multiple times for re-vaccination. The “gutless” adenovirus vectors can be used for insertion of heterologous inserts/genes such as the transgenes of the present invention, and can even be used for co-delivery of a large number of heterologous inserts/genes.

[0198] In an embodiment herein the delivery is via an adenovirus, which may be at a single booster dose containing at least 1×10⁵ particles (also referred to as particle units, pu) of adenoviral vector. In an embodiment herein, the dose preferably is at least about 1×10⁶ particles (for example, about 1×10⁶-1×10¹² particles), more preferably at least about 1×10⁷ particles, more preferably at least about 1×10⁸ particles (e.g., about 1×10⁸-1×10¹¹ particles or about 1×10⁸-1×10¹² particles), and most preferably at least about 1×10⁹ particles (e.g., about 1×10⁹-1×10¹⁰ particles or about 1×10⁹-1×10¹² particles), or even at least about 1×10¹⁹ particles (e.g., about 1×10¹⁹-1×10¹² particles) of the adenoviral vector. Alternatively, the dose comprises no more than about 1×10¹⁴ particles, preferably no more than about 1×10¹³ particles, even more preferably no more than about 1×10¹² particles, even more preferably no more than about 1×10¹¹ particles, and most preferably no more than about 1×10¹⁰ particles (e.g., no more than about 1×10⁹ articles). Thus, the dose may contain a single dose of adenoviral vector with, for example, about 1×10⁶ particle units (pu), about 2×10⁶ pu, about 4×10⁶ pu, about 1×10⁷ pu, about 2×10 pu, about 4×10 pu, about 1×10 pu, about 2×10 pu, about 4×10 pu, about 1×10⁹ pu, about 2×10⁹ pu, about 4×10⁹ pu, about 1×10¹⁰ pu, about 2×10¹⁰ pu, about 4×10¹⁰ pu, about 1×10¹¹ pu, about 2×10¹¹ pu, about 4×10¹¹ pu, about 1×10¹² pu, about 2×10¹² pu, or about 4×10¹² pu of adenoviral vector. See, for example, the adenoviral vectors in U.S. Pat. No. 8,454,972 B2 to Nabel, et. al., granted on Jun. 4, 2013; incorporated by reference herein, and the dosages at col 29, lines 36-58 thereof. In an embodiment herein, the adenovirus is delivered via multiple doses.

[0199] In terms of in vivo delivery, AAV is advantageous over other viral vectors due to low toxicity and low probability of causing insertional mutagenesis because it doesn't integrate into the host genome. AAV has a packaging limit of 4.5 or 4.75 Kb. Constructs larger than 4.5 or 4.75 Kb result in significantly reduced virus production. There are many promoters that can be used to drive nucleic acid molecule expression. AAV ITR can serve as a promoter and is advantageous for eliminating the need for an additional promoter element. For ubiquitous expression, the following promoters can be used: CMV, CAG, CBh, PGK, SV40, Ferritin heavy or light chains, etc. For brain expression, the following promoters can be used: Synapsinl for all neurons, CaMKIIalpha for excitatory neurons, GAD67 or GAD65 or VGAT for GABAergic neurons, etc. Promoters used to drive RNA synthesis can include: Pol III promoters such as U6 or HI. The use of a Pol II promoter and intronic cassettes can be used to express guide RNA (gRNA).

[0200] With regard to AAV vectors useful in the practice of the invention, mention is made of U.S. Pat. Nos. 5,658,785, 7,115,391, 7,172,893, 6,953,690, 6,936,466, 6,924,128, 6,893,865, 6,793,926, 6,537,540, 6,475,769 and 6,258,595, and documents cited therein.

[0201] As to AAV, the AAV can be AAV1, AAV2, AAV5 or any combination thereof. One can select the AAV with regard to the cells to be targeted; e.g., one can select AAV serotypes 1, 2, 5 or a hybrid capsid AAV1, AAV2, AAV5 or any combination thereof for targeting brain or neuronal cells; and one can select AAV4 for targeting cardiac tissue. AAV8 is useful for delivery to the liver. The above promoters and vectors are preferred individually.

[0202] In an embodiment herein, the delivery is via an AAV. A therapeutically effective dosage for in vivo delivery of the AAV to a human is believed to be in the range of from about 20 to about 50 ml of saline solution containing from about 1×10¹⁰ to about 1×10⁵⁰ functional AAV/ml solution. The dosage may be adjusted to balance the therapeutic benefit against any side effects. In an embodiment herein, the AAV dose is generally in the range of concentrations from about 1×10 to 1×10 genomes AAV, from about 1×10 to 1×10 genomes AAV, from about 1×10¹⁰ to about 1×10¹⁶ genomes, or about 1×10¹¹ to about 1×10¹⁶ genomes AAV. A human dosage may be about 1×10¹³ genomes AAV. Such concentrations may be delivered in from about 0.001 ml to about 100 ml, about 0.05 to about 50 ml, or about 10 to about 25 ml of a carrier solution. In a preferred embodiment, AAV is used with a titer of about 2×10¹³ viral genomes/milliliter, and each of the striatal hemispheres of a mouse receives one 500 nanoliter injection. Other effective dosages can be readily established by one of ordinary skill in the art through routine trials establishing dose response curves. See, for example, U.S. Pat. No. 8,404,658 B2 to Hajjar, et al., granted on Mar. 26, 2013, at col. 27, lines 45-60.

[0203] In another embodiment effectively activating a cellular immune response for a neoplasia vaccine or immunogenic composition can be achieved by expressing the relevant antigens in a vaccine or immunogenic composition in a non-pathogenic microorganism. Well-known examples of such microorganisms are Mycobacterium bovis BCG, Salmonella and Pseudomona (See, U.S. Pat. No. 6,991,797, hereby incorporated by reference in its entirety). In another embodiment a Poxvirus is used in the neoplasia vaccine or immunogenic composition. These include orthopoxvirus, avipox, vaccinia, MVA, NYVAC, canarypox, ALVAC, fowlpox, TROVAC, etc. (see e.g., Verardi et al., Hum Vaccin Immunother. 2012 July; 8(7):961-70; and Moss, Vaccine. 2013; 31(39): 4220-4222). Poxvirus expression vectors were described in 1982 and quickly became widely used for vaccine development as well as research in numerous fields. Advantages of the vectors include simple construction, ability to accommodate large amounts of foreign DNA and high expression levels.

[0204] Information concerning poxviruses that may be used in the practice of the invention, such as Chordopoxvirinae subfamily poxviruses (poxviruses of vertebrates), for instance, orthopoxviruses and avipoxviruses, e.g., vaccinia virus (e.g., Wyeth Strain, WR Strain (e.g., ATCC® VR-1354), Copenhagen Strain, NYVAC, NYVAC. 1, NYVAC.2, MVA, MVA-BN), canarypox virus (e.g., Wheatley C93 Strain, ALVAC), fowlpox virus (e.g., FP9 Strain, Webster Strain, TROVAC), dovepox, pigeonpox, quailpox, and raccoon pox, inter alia, synthetic or non-naturally occurring recombinants thereof, uses thereof, and methods for making and using such recombinants may be found in scientific and patent literature, such as: U.S. Pat. Nos. 4,603,112, 4,769,330, 5,110,587, 5,174,993, 5,364,773, 5,762,938, 5,494,807, 5,766,597, 7,767,449, 6,780,407, 6,537,594, 6,265,189, 6,214,353, 6,130,066, 6,004,777, 5,990,091, 5,942,235, 5,833,975, 5,766,597, 5,756, 101, 7,045,313, 6,780,417, 8,470,598, 8,372,622, 8,268,329, 8,268,325, 8,236,560, 8,163,293, 7,964,398, 7,964,396, 7,964,395, 7,939,086, 7,923,017, 7,897,156, 7,892,533, 7,628,980, 7,459,270, 7,445,924, 7,384,644, 7,335,364, 7,189,536, 7,097,842, 6,913,752, 6,761,893, 6,682,743, 5,770,212, 5,766,882, and 5,989,562, and Panicali, D. Proc. Natl. Acad. Sci. 1982; 79; 4927-493, Panicali D. Proc. Natl. Acad. Sci. 1983; 80(17): 5364-8, Mackett, M. Proc. Natl. Acad. Sci. 1982; 79: 7415-7419, Smith G L. Proc. Natl. Acad. Sci. 1983; 80(23): 7155-9, Smith G L. Nature 1983; 302: 490-5, Sullivan V J. Gen. Vir. 1987; 68: 2587-98, Perkus M Journal of Leukocyte Biology 1995; 58: 1-13, Yilma T D. Vaccine 1989; 7: 484-485, Brochier B. Nature 1991; 354: 520-22, Wiktor, T J. Proc. Natl Acd. Sci. 1984; 81: 7194-8, Rupprecht, C E. Proc. Natl Acd. Sci. 1986; 83: 7947-50, Poulet, H Vaccine 2007; 25 (July): 5606-12, Weyer J. Vaccine 2009; 27 (November): 7198-201, Buller, R M Nature 1985; 317(6040): 813-5, Buller R M. J. Virol. 1988; 62(3):866-74, Flexner, C. Nature 1987; 330(6145): 259-62, Shida, H. J. Virol. 1988; 62(12): 4474-80, Kotwal, G J. J. Virol. 1989; 63(2): 600-6, Child, S J. Virology 1990; 174(2): 625-9, Mayr A. Zentralbl Bakteriol 1978; 167(5,6): 375-9, Antoine G. Virology. 1998; 244(2): 365-96, Wyatt, L S. Virology 1998; 251(2): 334-42, Sancho, M C. J. Virol. 2002; 76(16); 8313-34, Gallego-Gomez, J C. J. Virol. 2003; 77(19); 10606-22), Goebel S J. Virology 1990; (a,b) 179: 247-66, Tartaglia, J. Virol. 1992; 188(1): 217-32, Najera J L. J. Virol. 2006; 80(12): 6033-47, Najera, J L. J. Virol. 2006; 80: 6033-6047, Gomez, C E. J. Gen. Virol. 2007; 88: 2473-78, Mooij, P. Jour. Of Virol. 2008; 82: 2975-2988, Gomez, C E. Curr. Gene Ther. 2011; 11: 189-217, Cox, W. Virology 1993; 195: 845-50, Perkus, M. Jour. Of Leukocyte Biology 1995; 58: 1-13, Blanchard T J. J Gen Virology 1998; 79(5): 1159-67, Amara R. Science 2001; 292: 69-74, Hel, Z., J. Immunol. 2001; 167: 7180-9, Gherardi M M. J. Virol. 2003; 77: 7048-57, Didierlaurent, A. Vaccine 2004; 22: 3395-3403, Bissht H. Proc. Nat. Aca. Sci. 2004; 101: 6641-46, McCurdy L H. Clin. Inf. Dis 2004; 38: 1749-53, Earl P L. Nature 2004; 428: 182-85, Chen Z. J. Virol. 2005; 79: 2678-2688, Najera J L. J. Virol. 2006; 80(12): 6033-47, Nam J H. Acta. Virol. 2007; 51: 125-30, Antonis A F. Vaccine 2007; 25: 4818-4827, B Weyer J. Vaccine 2007; 25: 4213-22, Ferrier-Rembert A. Vaccine 2008; 26(14): 1794-804, Corbett M. Proc. Natl. Acad. Sci. 2008; 105(6): 2046-51, Kaufman H L., J. Clin. Oncol. 2004; 22: 2122-32, Amato, R J. Clin. Cancer Res. 2008; 14(22): 7504-10, Dreicer R. Invest New Drugs 2009; 27(4): 379-86, Kantoff P W. J. Clin. Oncol. 2010, 28, 1099-1 105, Amato R J. J. Clin. Can. Res. 2010; 16(22): 5539-47, Kim, D W. Hum. Vaccine. 2010; 6: 784-791, Oudard, S. Cancer Immunol. Immunother. 2011; 60: 261-71, Wyatt, L S. Aids Res. Hum. Retroviruses. 2004; 20: 645-53, Gomez, C E. Virus Research 2004; 105: 11-22, Webster, D P. Proc. Natl. Acad. Sci. 2005; 102: 4836-4, Huang, X. Vaccine 2007; 25: 8874-84, Gomez, C E. Vaccine 2007a; 25: 2863-85, Esteban M. Hum. Vaccine 2009; 5: 867-871, Gomez, C E. Curr. Gene therapy 2008; 8(2): 97-120, Whelan, K T. Plos one 2009; 4(6): 5934, Scriba, T J. Eur. Jour. Immuno. 2010; 40(1): 279-90, Corbett, M. Proc. Natl. Acad. Sci. 2008; 105: 2046-2051, Midgley, C M. J. Gen. Virol. 2008; 89: 2992-97, Von Krempelhuber, A. Vaccine 2010; 28: 1209-16, Perreau, M. J. Of Virol. 2011; October: 9854-62, Pantaleo, G. Curr Opin HIV-AIDS. 2010; 5: 391-396, each of which is incorporated herein by reference.

[0205] In another embodiment the vaccinia virus is used in the neoplasia vaccine or immunogenic composition to express a neoantigen. (Rolph et al., Recombinant viruses as vaccines and immunological tools. Curr Opin Immunol 9:517-524, 1997). The recombinant vaccinia virus is able to replicate within the cytoplasm of the infected host cell and the polypeptide of interest can therefore induce an immune response. Moreover, Poxviruses have been widely used as vaccine or immunogenic composition vectors because of their ability to target encoded antigens for processing by the major histocompatibility complex class I pathway by directly infecting immune cells, in particular antigen-presenting cells, but also due to their ability to self-adjuvant.

[0206] In another embodiment ALVAC is used as a vector in a neoplasia vaccine or immunogenic composition. ALVAC is a canarypox virus that can be modified to express foreign transgenes and has been used as a method for vaccination against both prokaryotic and eukaryotic antigens (Honig H, Lee D S, Conkright W, et al. Phase I clinical trial of a recombinant canarypoxvirus (ALVAC) vaccine expressing human carcinoembryonic antigen and the B7.1 co-stimulatory molecule. Cancer Immunol Immunother 2000; 49:504-14; von Mehren M, Arlen P, Tsang K Y, et al. Pilot study of a dual gene recombinant avipox vaccine containing both carcinoembryonic antigen (CEA) and B7.1 transgenes in patients with recurrent CEA-expressing adenocarcinomas. Clin Cancer Res 2000; 6:2219-28; Musey L, Ding Y, Elizaga M, et al. HIV-1 vaccination administered intramuscularly can induce both systemic and mucosal T cell immunity in HIV-1-uninfected individuals. J Immunol 2003; 171: 1094-101; Paoletti E. Applications of pox virus vectors to vaccination: an update. Proc Natl Acad Sci USA 1996; 93: 11349-53; U.S. Pat. No. 7,255,862). In a phase I clinical trial, an ALVAC virus expressing the tumor antigen CEA showed an excellent safety profile and resulted in increased CEA-specific T-cell responses in selected patients; objective clinical responses, however, were not observed (Marshall J L, Hawkins M J, Tsang K Y, et al. Phase I study in cancer patients of a replication-defective avipox recombinant vaccine that expresses human carcinoembryonic antigen. J Clin Oncol 1999; 17:332-7).

[0207] In another embodiment a Modified Vaccinia Ankara (MVA) virus may be used as a viral vector for a neoantigen vaccine or immunogenic composition. MVA is a member of the Orthopoxvirus family and has been generated by about 570 serial passages on chicken embryo fibroblasts of the Ankara strain of Vaccinia virus (CVA) (for review see Mayr, A., et al., Infection 3, 6-14, 1975). As a consequence of these passages, the resulting MVA virus contains 31 kilobases less genomic information compared to CVA, and is highly host-cell restricted (Meyer, H. et al., J. Gen. Virol. 72, 1031-1038, 1991). MVA is characterized by its extreme attenuation, namely, by a diminished virulence or infectious ability, but still holds an excellent immunogenicity. When tested in a variety of animal models, MVA was proven to be avirulent, even in immuno-suppressed individuals. Moreover, MVA-BN®-HER2 is a candidate immunotherapy designed for the treatment of HER-2-positive breast cancer and is currently in clinical trials. (Mandl et al., Cancer Immunol Immunother. January 2012; 61(1): 19-29). Methods to make and use recombinant MVA has been described (e.g., see U.S. Pat. Nos. 8,309,098 and 5, 185,146 hereby incorporated in its entirety).

[0208] In another embodiment the modified Copenhagen strain of vaccinia virus, NYVAC and NYVAC variations are used as a vector (see U.S. Pat. No. 7,255,862; PCT WO 95/30018; U.S. Pat. Nos. 5,364,773 and 5,494,807, hereby incorporated by reference in its entirety).

[0209] In one embodiment recombinant viral particles of the vaccine or immunogenic composition are administered to patients in need thereof. Dosages of expressed neoantigen can range from a few to a few hundred micrograms, e.g., 5 to 500 μg. The vaccine or immunogenic composition can be administered in any suitable amount to achieve expression at these dosage levels. The viral particles can be administered to a patient in need thereof or transfected into cells in an amount of about at least 10^{3 5} pfu; thus, the viral particles are preferably administered to a patient in need thereof or infected or transfected into cells in at least about 10⁴ pfu to about 10⁶ pfu; however, a patient in need thereof can be administered at least about 10⁸ pfu such that a more preferred amount for administration can be at least about 10⁷ pfu to about 10⁹ pfu. Doses as to NYVAC are applicable as to ALVAC, MVA, MVA-BN, and avipoxes, such as canarypox and fowlpox.

### Vaccine or Immunogenic Composition Adjuvant

[0210] Effective vaccine or immunogenic compositions advantageously include a strong adjuvant to initiate an immune response. As described herein, poly-ICLC, an agonist of TLR3 and the RNA helicase-domains of MDA5 and RIG3, has shown several desirable properties for a vaccine or immunogenic composition adjuvant. These properties include the induction of local and systemic activation of immune cells in vivo, production of stimulatory chemokines and cytokines, and stimulation of antigen-presentation by DCs. Furthermore, poly-ICLC can induce durable CD4+ and CD8+ responses in humans. Importantly, striking similarities in the upregulation of transcriptional and signal transduction pathways were seen in subjects vaccinated with poly-ICLC and in volunteers who had received the highly effective, replication-competent yellow fever vaccine. Furthermore, >90% of ovarian carcinoma patients immunized with poly-ICLC in combination with a NY-ESO-1 peptide vaccine (in addition to Montanide) showed induction of CD4+ and CD8+ T cell, as well as antibody responses to the peptide in a recent phase 1 study. At the same time, poly-ICLC has been extensively tested in more than 25 clinical trials to date and exhibited a relatively benign toxicity profile. In addition to a powerful and specific immunogen the neoantigen peptides may be combined with an adjuvant (e.g., poly-ICLC) or another anti-neoplastic agent. Without being bound by theory, these neoantigens are expected to bypass central thymic tolerance (thus allowing stronger anti-tumor T cell response), while reducing the potential for autoimmunity (e.g., by avoiding targeting of normal self-antigens). An effective immune response advantageously includes a strong adjuvant to activate the immune system (Speiser and Romero, Molecularly defined vaccines for cancer immunotherapy, and protective T cell immunity Seminars in Immunol 22: 144 (2010)). For example, Toll-like receptors (TLRs) have emerged as powerful sensors of microbial and viral pathogen “danger signals”, effectively inducing the innate immune system, and in turn, the adaptive immune system (Bhardwaj and Gnjatic, TLR AGONISTS: Are They Good Adjuvants? Cancer J. 16:382-391 (2010)). Among the TLR agonists, poly-ICLC (a synthetic double-stranded RNA mimic) is one of the most potent activators of myeloid-derived dendritic cells. In a human volunteer study, poly-ICLC has been shown to be safe and to induce a gene expression profile in peripheral blood cells comparable to that induced by one of the most potent live attenuated viral vaccines, the yellow fever vaccine YF-17D (Caskey et al, Synthetic double-stranded RNA induces innate immune responses similar to a live viral vaccine in humans J Exp Med 208:2357 (2011)). In a preferred embodiment Hiltonol®, a GMP preparation of poly-ICLC prepared by Oncovir, Inc, is utilized as the adjuvant. In other embodiments, other adjuvants described herein are envisioned. For instance oil-in-water, water-in-oil or multiphasic W/O/W; see, e.g., U.S. Pat. No. 7,608,279 and Aucouturier et al, Vaccine 19 (2001), 2666-2672, and documents cited therein.

### Pharmaceutical Compositions/Methods of Delivery

[0211] The present invention is also directed to pharmaceutical compositions comprising an effective amount of one or more antigenic peptides as described herein (including a pharmaceutically acceptable salt, thereof), optionally in combination with a pharmaceutically acceptable carrier, excipient or additive.

[0212] The term “pharmaceutically acceptable” refers to approved or approvable by a regulatory agency of the Federal or a state government or listed in the U.S. Pharmacopeia or other generally recognized pharmacopeia for use in animals, including humans.

[0213] A “pharmaceutically acceptable excipient, carrier or diluent” refers to an excipient, carrier or diluent that can be administered to a subject, together with an agent, and which does not destroy the pharmacological activity thereof and is nontoxic when administered in doses sufficient to deliver a therapeutic amount of the agent.

[0214] A “pharmaceutically acceptable salt” of pooled tumor specific neoantigens as recited herein may be an acid or base salt that is generally considered in the art to be suitable for use in contact with the tissues of human beings or animals without excessive toxicity, irritation, allergic response, or other problem or complication. Such salts include mineral and organic acid salts of basic residues such as amines, as well as alkali or organic salts of acidic residues such as carboxylic acids. Specific pharmaceutical salts include, but are not limited to, salts of acids such as hydrochloric, phosphoric, hydrobromic, malic, glycolic, fumaric, sulfuric, sulfamic, sulfanilic, formic, toluenesulfonic, methanesulfonic, benzene sulfonic, ethane disulfonic, 2-hydroxyethylsulfonic, nitric, benzoic, 2-acetoxybenzoic, citric, tartaric, lactic, stearic, salicylic, glutamic, ascorbic, pamoic, succinic, fumaric, maleic, propionic, hydroxymaleic, hydroiodic, phenylacetic, alkanoic such as acetic, HOOC—(CH2)n-COOH where n is 0-4, and the like. Similarly, pharmaceutically acceptable cations include, but are not limited to sodium, potassium, calcium, aluminum, lithium and ammonium. Those of ordinary skill in the art will recognize from this disclosure and the knowledge in the art that further pharmaceutically acceptable salts for the pooled tumor specific neoantigens provided herein, including those listed by Remington's Pharmaceutical Sciences, 17th ed., Mack Publishing Company, Easton, Pa., p. 1418 (1985). In general, a pharmaceutically acceptable acid or base salt can be synthesized from a parent compound that contains a basic or acidic moiety by any conventional chemical method. Briefly, such salts can be prepared by reacting the free acid or base forms of these compounds with a stoichiometric amount of the appropriate base or acid in an appropriate solvent.

[0215] When administered as a combination, the therapeutic agents (i.e. the neoantigenic peptides) can be formulated as separate compositions that are given at the same time or different times, or the therapeutic agents can be given as a single composition.

[0216] The compositions may be administered once daily, twice daily, once every two days, once every three days, once every four days, once every five days, once every six days, once every seven days, once every two weeks, once every three weeks, once every four weeks, once every two months, once every six months, or once per year. The dosing interval can be adjusted according to the needs of individual patients. For longer intervals of administration, extended release or depot formulations can be used.

[0217] The compositions of the invention can be used to treat diseases and disease conditions that are acute, and may also be used for treatment of chronic conditions. In particular, the compositions of the invention are used in methods to treat or prevent a neoplasia. In certain embodiments, the compounds of the invention are administered for time periods exceeding two weeks, three weeks, one month, two months, three months, four months, five months, six months, one year, two years, three years, four years, or five years, ten years, or fifteen years; or for example, any time period range in days, months or years in which the low end of the range is any time period between 14 days and 15 years and the upper end of the range is between 15 days and 20 years (e.g., 4 weeks and 15 years, 6 months and 20 years). In some cases, it may be advantageous for the compounds of the invention to be administered for the remainder of the patient's life. In preferred embodiments, the patient is monitored to check the progression of the disease or disorder, and the dose is adjusted accordingly. In preferred embodiments, treatment according to the invention is effective for at least two weeks, three weeks, one month, two months, three months, four months, five months, six months, one year, two years, three years, four years, or five years, ten years, fifteen years, twenty years, or for the remainder of the subject's life.

[0218] Surgical resection uses surgery to remove abnormal tissue in cancer, such as mediastinal, neurogenic, or germ cell tumors, or thymoma. In certain embodiments, administration of the composition is initiated following tumor resection. In other embodiments, administration of the neoplasia vaccine or immunogenic composition is initiated 1, 2, 3, 4, 5, 6, 7, 8, 9, 10, 11, 12, 13, 14, 15 or more weeks after tumor resection. Preferably, administration of the neoplasia vaccine or immunogenic composition is initiated 4, 5, 6, 7, 8, 9, 10, 11 or 12 weeks after tumor resection.

[0219] In certain embodiments, the vaccine of the present invention is administered to a subject one or more times. In certain embodiments, a subject is primed with a vaccine and then boosted after the initial vaccination. The term “prime/boost” or “prime/boost dosing regimen” is meant to refer to the successive administrations of a vaccine or immunogenic or immunological compositions. The priming administration (priming) is the administration of a first vaccine or immunogenic or immunological composition type and may comprise one, two or more administrations. The boost administration is the second administration of a vaccine or immunogenic or immunological composition type and may comprise one, two or more administrations, and, for instance, may comprise or consist essentially of annual administrations. In certain embodiments, administration of the neoplasia vaccine or immunogenic composition is in a prime/boost dosing regimen.

[0220] In certain embodiments, administration of the neoplasia vaccine or immunogenic composition is in a prime/boost dosing regimen, for example administration of the neoplasia vaccine or immunogenic composition at weeks 1, 2, 3 or 4 as a prime and administration of the neoplasia vaccine or immunogenic composition is at months 2, 3 or 4 as a boost. In another embodiment heterologous prime-boost strategies are used to elicit a greater cytotoxic T-cell response (see Schneider et al., Induction of CD8+ T cells using heterologous prime-boost immunisation strategies, Immunological Reviews Volume 170, Issue 1, pages 29-38, August 1999). In another embodiment DNA encoding neoantigens is used to prime followed by a protein boost. In another embodiment protein is used to prime followed by boosting with a virus encoding the neoantigen. In another embodiment a virus encoding the neoantigen is used to prime and another virus is used to boost. In another embodiment protein is used to prime and DNA is used to boost. In a preferred embodiment a DNA vaccine or immunogenic composition is used to prime a T-cell response and a recombinant viral vaccine or immunogenic composition is used to boost the response. In another preferred embodiment a viral vaccine or immunogenic composition is coadministered with a protein or DNA vaccine or immunogenic composition to act as an adjuvant for the protein or DNA vaccine or immunogenic composition. The patient can then be boosted with either the viral vaccine or immunogenic composition, protein, or DNA vaccine or immunogenic composition (see Hutchings et al., Combination of protein and viral vaccines induces potent cellular and humoral immune responses and enhanced protection from murine malaria challenge. Infect Immun. 2007 December; 75(12):5819-26. Epub 2007 Oct. 1). The pharmaceutical compositions can be processed in accordance with conventional methods of pharmacy to produce medicinal agents for administration to patients in need thereof, including humans and other mammals.

[0221] Modifications of the neoantigenic peptides can affect the solubility, bioavailability and rate of metabolism of the peptides, thus providing control over the delivery of the active species. Solubility can be assessed by preparing the neoantigenic peptide and testing according to known methods well within the routine practitioner's skill in the art.

[0222] In certain embodiments of the pharmaceutical composition the pharmaceutically acceptable carrier comprises water. In certain embodiments, the pharmaceutically acceptable carrier further comprises dextrose. In certain embodiments, the pharmaceutically acceptable carrier further comprises dimethylsulfoxide. In certain embodiments, the pharmaceutical composition further comprises an immunomodulator or adjuvant. In certain embodiments, the immunodulator or adjuvant is selected from the group consisting of poly-ICLC, STING agonist, 1018 ISS, aluminum salts, Amplivax, AS15, BCG, CP-870,893, CpG7909, CyaA, dSLEVI, GM-CSF, IC30, IC31, Imiquimod, ImuFact FMP321, IS Patch, ISS, ISCOMATRLX, Juvlmmune, LipoVac, MF59, monophosphoryl lipid A, Montanide IMS 1312, Montanide ISA 206, Montanide ISA 50V, Montanide ISA-51, OK-432, OM-174, OM-197-MP-EC, ONTAK, PEPTEL, vector system, PLGA microparticles, resiquimod, SRL172, Virosomes and other Virus-like particles, YF-17D, VEGF trap, R848, beta-glucan, Pam3Cys, and Aquila's QS21 stimulon. In certain embodiments, the immunomodulator or adjuvant comprises poly-ICLC.

[0223] Xanthenone derivatives such as, for example, Vadimezan or AsA404 (also known as 5,6-dimethylaxanthenone-4-acetic acid (DMXAA)), may also be used as adjuvants according to embodiments of the invention. Alternatively, such derivatives may also be administered in parallel to the vaccine or immunogenic composition of the invention, for example via systemic or intratumoral delivery, to stimulate immunity at the tumor site. Without being bound by theory, it is believed that such xanthenone derivatives act by stimulating interferon (IFN) production via the stimulator of IFN gene ISTING) receptor (see e.g., Conlon et al. (2013) Mouse, but not Human STING, Binds and Signals in Response to the Vascular Disrupting Agent 5,6-Dimethylxanthenone-4-Acetic Acid, Journal of Immunology, 190:5216-25 and Kim et al. (2013) Anticancer Flavonoids are Mouse-Selective STING Agonists, 8: 1396-1401). The vaccine or immunological composition may also include an adjuvant compound chosen from the acrylic or methacrylic polymers and the copolymers of maleic anhydride and an alkenyl derivative. It is in particular a polymer of acrylic or methacrylic acid cross-linked with a polyalkenyl ether of a sugar or polyalcohol (carbomer), in particular cross-linked with an allyl sucrose or with allylpentaerythritol. It may also be a copolymer of maleic anhydride and ethylene cross-linked, for example, with divinyl ether (see U.S. Pat. No. 6,713,068 hereby incorporated by reference in its entirety).

[0224] In certain embodiments, the pH modifier can stabilize the adjuvant or immunomodulator as described herein.

[0225] In certain embodiments, a pharmaceutical composition comprises: one to five peptides, dimethylsulfoxide (DMSO), dextrose, water, succinate, poly I: poly C, poly-L-lysine, carboxymethylcellulose, and chloride. In certain embodiments, each of the one to five peptides is present at a concentration of 300 m/ml. In certain embodiments, the pharmaceutical composition comprises <3% DMSO by volume. In certain embodiments, the pharmaceutical composition comprises 3.6-3.7% dextrose in water. In certain embodiments, the pharmaceutical composition comprises 3.6-3.7 mM succinate (e.g., as sodium succinate) or a salt thereof. In certain embodiments, the pharmaceutical composition comprises 0.5 mg/ml poly I: poly C. In certain embodiments, the pharmaceutical composition comprises 0.375 mg/ml poly-L-Lysine. In certain embodiments, the pharmaceutical composition comprises 1.25 mg/ml sodium carboxymethylcellulose. In certain embodiments, the pharmaceutical composition comprises 0.225% sodium chloride.

[0226] Pharmaceutical compositions comprise the herein-described tumor specific neoantigenic peptides in a therapeutically effective amount for treating diseases and conditions (e.g., a neoplasia/tumor), which have been described herein, optionally in combination with a pharmaceutically acceptable additive, carrier and/or excipient. One of ordinary skill in the art from this disclosure and the knowledge in the art will recognize that a therapeutically effective amount of one of more compounds according to the present invention may vary with the condition to be treated, its severity, the treatment regimen to be employed, the pharmacokinetics of the agent used, as well as the patient (animal or human) treated.

[0227] To prepare the pharmaceutical compositions according to the present invention, a therapeutically effective amount of one or more of the compounds according to the present invention is preferably intimately admixed with a pharmaceutically acceptable carrier according to conventional pharmaceutical compounding techniques to produce a dose. A carrier may take a wide variety of forms depending on the form of preparation desired for administration, e.g., ocular, oral, topical or parenteral, including gels, creams ointments, lotions and time released implantable preparations, among numerous others. In preparing pharmaceutical compositions in oral dosage form, any of the usual pharmaceutical media may be used. Thus, for liquid oral preparations such as suspensions, elixirs and solutions, suitable carriers and additives including water, glycols, oils, alcohols, flavoring agents, preservatives, coloring agents and the like may be used. For solid oral preparations such as powders, tablets, capsules, and for solid preparations such as suppositories, suitable carriers and additives including starches, sugar carriers, such as dextrose, mannitol, lactose and related carriers, diluents, granulating agents, lubricants, binders, disintegrating agents and the like may be used. If desired, the tablets or capsules may be enteric-coated or sustained release by standard techniques.

[0228] The active compound is included in the pharmaceutically acceptable carrier or diluent in an amount sufficient to deliver to a patient a therapeutically effective amount for the desired indication, without causing serious toxic effects in the patient treated.

[0229] Oral compositions generally include an inert diluent or an edible carrier. They may be enclosed in gelatin capsules or compressed into tablets. For the purpose of oral therapeutic administration, the active compound or its prodrug derivative can be incorporated with excipients and used in the form of tablets, troches, or capsules. Pharmaceutically compatible binding agents, and/or adjuvant materials can be included as part of the composition.

[0230] The tablets, pills, capsules, troches and the like can contain any of the following ingredients, or compounds of a similar nature: a binder such as microcrystalline cellulose, gum tragacanth or gelatin; an excipient such as starch or lactose, a dispersing agent such as alginic acid or corn starch; a lubricant such as magnesium stearate; a glidant such as colloidal silicon dioxide; a sweetening agent such as sucrose or saccharin; or a flavoring agent such as peppermint, methyl salicylate, or orange flavoring. When the dosage unit form is a capsule, it can contain, in addition to material herein discussed, a liquid carrier such as a fatty oil. In addition, dosage unit forms can contain various other materials which modify the physical form of the dosage unit, for example, coatings of sugar, shellac, or enteric agents. Formulations of the present invention suitable for oral administration may be presented as discrete units such as capsules, cachets or tablets each containing a predetermined amount of the active ingredient; as a powder or granules; as a solution or a suspension in an aqueous liquid or a non-aqueous liquid; or as an oil-in-water liquid emulsion or a water-in-oil emulsion and as a bolus, etc.

[0231] A tablet may be made by compression or molding, optionally with one or more accessory ingredients. Compressed tablets may be prepared by compressing in a suitable machine the active ingredient in a free-flowing form such as a powder or granules, optionally mixed with a binder, lubricant, inert diluent, preservative, surface-active or dispersing agent. Molded tablets may be made by molding in a suitable machine a mixture of the powdered compound moistened with an inert liquid diluent. The tablets optionally may be coated or scored and may be formulated so as to provide slow or controlled release of the active ingredient therein.

[0232] Methods of formulating such slow or controlled release compositions of pharmaceutically active ingredients, are known in the art and described in several issued US patents, some of which include, but are not limited to, U.S. Pat. Nos. 3,870,790; 4,226,859; 4,369,172; 4,842,866 and 5,705,190, the disclosures of which are incorporated herein by reference in their entireties. Coatings can be used for delivery of compounds to the intestine (see, e.g., U.S. Pat. Nos. 6,638,534, 5,541,171, 5,217,720, and 6,569,457, and references cited therein).

[0233] The active compound or pharmaceutically acceptable salt thereof may also be administered as a component of an elixir, suspension, syrup, wafer, chewing gum or the like. A syrup may contain, in addition to the active compounds, sucrose or fructose as a sweetening agent and certain preservatives, dyes and colorings and flavors.

[0234] Solutions or suspensions used for ocular, parenteral, intradermal, subcutaneous, or topical application can include the following components: a sterile diluent such as water for injection, saline solution, fixed oils, polyethylene glycols, glycerine, propylene glycol or other synthetic solvents; antibacterial agents such as benzyl alcohol or methyl parabens; antioxidants such as ascorbic acid or sodium bisulfate; chelating agents such as ethylenediaminetetraacetic acid; buffers such as acetates, citrates or phosphates; and agents for the adjustment of tonicity such as sodium chloride or dextrose. In certain embodiments, the pharmaceutically acceptable carrier is an aqueous solvent, i.e., a solvent comprising water, optionally with additional co-solvents. Exemplary pharmaceutically acceptable carriers include water, buffer solutions in water (such as phosphate-buffered saline (PBS), and 5% dextrose in water (D5W). In certain embodiments, the aqueous solvent further comprises dimethyl sulfoxide (DMSO), e.g., in an amount of about 1-4%, or 1-3%. In certain embodiments, the pharmaceutically acceptable carrier is isotonic (i.e., has substantially the same osmotic pressure as a body fluid such as plasma).

[0235] In one embodiment, the active compounds are prepared with carriers that protect the compound against rapid elimination from the body, such as a controlled release formulation, including implants and microencapsulated delivery systems. Biodegradable, biocompatible polymers can be used, such as ethylene vinyl acetate, polyanhydrides, polyglycolic acid, collagen, polyorthoesters, polylactic acid, and polylactic-co-glycolic acid (PLGA). Methods for preparation of such formulations are within the ambit of the skilled artisan in view of this disclosure and the knowledge in the art.

[0236] A skilled artisan from this disclosure and the knowledge in the art recognizes that in addition to tablets, other dosage forms can be formulated to provide slow or controlled release of the active ingredient. Such dosage forms include, but are not limited to, capsules, granulations and gel-caps.

[0237] Liposomal suspensions may also be pharmaceutically acceptable carriers. These may be prepared according to methods known to those skilled in the art. For example, liposomal formulations may be prepared by dissolving appropriate lipid(s) in an inorganic solvent that is then evaporated, leaving behind a thin film of dried lipid on the surface of the container. An aqueous solution of the active compound are then introduced into the container. The container is then swirled by hand to free lipid material from the sides of the container and to disperse lipid aggregates, thereby forming the liposomal suspension. Other methods of preparation well known by those of ordinary skill may also be used in this aspect of the present invention.

[0238] The formulations may conveniently be presented in unit dosage form and may be prepared by conventional pharmaceutical techniques. Such techniques include the step of bringing into association the active ingredient and the pharmaceutical carrier(s) or excipient(s). In general, the formulations are prepared by uniformly and intimately bringing into association the active ingredient with liquid carriers or finely divided solid carriers or both, and then, if necessary, shaping the product.

[0239] Formulations and compositions suitable for topical administration in the mouth include lozenges comprising the ingredients in a flavored basis, usually sucrose and acacia or tragacanth; pastilles comprising the active ingredient in an inert basis such as gelatin and glycerin, or sucrose and acacia; and mouthwashes comprising the ingredient to be administered in a suitable liquid carrier.

[0240] Formulations suitable for topical administration to the skin may be presented as ointments, creams, gels and pastes comprising the ingredient to be administered in a pharmaceutical acceptable carrier. A preferred topical delivery system is a transdermal patch containing the ingredient to be administered.

[0241] Formulations for rectal administration may be presented as a suppository with a suitable base comprising, for example, cocoa butter or a salicylate.

[0242] Formulations suitable for nasal administration, wherein the carrier is a solid, include a coarse powder having a particle size, for example, in the range of 20 to 500 microns which is administered in the manner in which snuff is administered, i.e., by rapid inhalation through the nasal passage from a container of the powder held close up to the nose. Suitable formulations, wherein the carrier is a liquid, for administration, as for example, a nasal spray or as nasal drops, include aqueous or oily solutions of the active ingredient.

[0243] Formulations suitable for vaginal administration may be presented as pessaries, tampons, creams, gels, pastes, foams or spray formulations containing in addition to the active ingredient such carriers as are known in the art to be appropriate.

[0244] The parenteral preparation can be enclosed in ampoules, disposable syringes or multiple dose vials made of glass or plastic. If administered intravenously, preferred carriers include, for example, physiological saline or phosphate buffered saline (PBS).

[0245] For parenteral formulations, the carrier usually comprises sterile water or aqueous sodium chloride solution, though other ingredients including those which aid dispersion may be included. Of course, where sterile water is to be used and maintained as sterile, the compositions and carriers are also sterilized. Injectable suspensions may also be prepared, in which case appropriate liquid carriers, suspending agents and the like may be employed. Formulations suitable for parenteral administration include aqueous and non-aqueous sterile injection solutions which may contain antioxidants, buffers, bacteriostats and solutes which render the formulation isotonic with the blood of the intended recipient; and aqueous and non-aqueous sterile suspensions which may include suspending agents and thickening agents. The formulations may be presented in unit-dose or multi-dose containers, for example, sealed ampules and vials, and may be stored in a freeze-dried (lyophilized) condition requiring only the addition of the sterile liquid carrier, for example, water for injections, immediately prior to use. Extemporaneous injection solutions and suspensions may be prepared from sterile powders, granules and tablets of the kind previously described.

[0246] Administration of the active compound may range from continuous (intravenous drip) to several oral administrations per day (for example, Q.I.D.) and may include oral, topical, eye or ocular, parenteral, intramuscular, intravenous, sub-cutaneous, transdermal (which may include a penetration enhancement agent), buccal and suppository administration, among other routes of administration, including through an eye or ocular route.

[0247] The neoplasia vaccine or immunogenic composition, and any additional agents, may be administered by injection, orally, parenterally, by inhalation spray, rectally, vaginally, or topically in dosage unit formulations containing conventional pharmaceutically acceptable carriers, adjuvants, and vehicles. The term parenteral as used herein includes, into a lymph node or nodes, subcutaneous, intravenous, intramuscular, intrasternal, infusion techniques, intraperitoneally, eye or ocular, intravitreal, intrabuccal, transdermal, intranasal, into the brain, including intracranial and intradural, into the joints, including ankles, knees, hips, shoulders, elbows, wrists, directly into tumors, and the like, and in suppository form.

[0248] In certain embodiments, the vaccine or immunogenic composition is administered intravenously or subcutaneously. Various techniques can be used for providing the subject compositions at the site of interest, such as injection, use of catheters, trocars, projectiles, pluronic gel, stents, sustained drug release polymers or other device which provides for internal access. Where an organ or tissue is accessible because of removal from the patient, such organ or tissue may be bathed in a medium containing the subject compositions, the subject compositions may be painted onto the organ, or may be applied in any convenient way.

[0249] The tumor specific neoantigenic peptides may be administered through a device suitable for the controlled and sustained release of a composition effective in obtaining a desired local or systemic physiological or pharmacological effect. The method includes positioning the sustained released drug delivery system at an area wherein release of the agent is desired and allowing the agent to pass through the device to the desired area of treatment.

[0250] The tumor specific neoantigenic peptides may be utilized in combination with at least one known other therapeutic agent, or a pharmaceutically acceptable salt of said agent. Examples of known therapeutic agents which can be used for combination therapy include, but are not limited to, corticosteroids (e.g., cortisone, prednisone, dexamethasone), non-steroidal antiinflammatory drugs (NSAIDS) (e.g., ibuprofen, celecoxib, aspirin, indomethicin, naproxen), alkylating agents such as busulfan, cis-platin, mitomycin C, and carboplatin; antimitotic agents such as colchicine, vinblastine, paclitaxel, and docetaxel; topo I inhibitors such as camptothecin and topotecan; topo II inhibitors such as doxorubicin and etoposide; and/or RNA/DNA antimetabolites such as 5-azacytidine, 5-fluorouracil and methotrexate; DNA antimetabolites such as 5-fluoro-2′-deoxy-uridine, ara-C, hydroxyurea and thioguanine; antibodies such as HERCEPTIN and RITUXAN.

[0251] It should be understood that in addition to the ingredients particularly mentioned herein, the formulations of the present invention may include other agents conventional in the art having regard to the type of formulation in question, for example, those suitable for oral administration may include flavoring agents.

[0252] Pharmaceutically acceptable salt forms may be the preferred chemical form of compounds according to the present invention for inclusion in pharmaceutical compositions according to the present invention.

[0253] The present compounds or their derivatives, including prodrug forms of these agents, can be provided in the form of pharmaceutically acceptable salts. As used herein, the term pharmaceutically acceptable salts or complexes refers to appropriate salts or complexes of the active compounds according to the present invention which retain the desired biological activity of the parent compound and exhibit limited toxicological effects to normal cells. Nonlimiting examples of such salts are (a) acid addition salts formed with inorganic acids (for example, hydrochloric acid, hydrobromic acid, sulfuric acid, phosphoric acid, nitric acid, and the like), and salts formed with organic acids such as acetic acid, oxalic acid, tartaric acid, succinic acid, malic acid, ascorbic acid, benzoic acid, tannic acid, pamoic acid, alginic acid, and polyglutamic acid, among others; (b) base addition salts formed with metal cations such as zinc, calcium, sodium, potassium, and the like, among numerous others.

[0254] The compounds herein are commercially available or can be synthesized. As can be appreciated by the skilled artisan, further methods of synthesizing the compounds of the formulae herein is evident to those of ordinary skill in the art. Additionally, the various synthetic steps may be performed in an alternate sequence or order to give the desired compounds. Synthetic chemistry transformations and protecting group methodologies (protection and deprotection) useful in synthesizing the compounds described herein are known in the art and include, for example, those such as described in R. Larock, Comprehensive Organic Transformations, 2nd. Ed., Wiley-VCH Publishers (1999); T. W. Greene and P. G. M. Wuts, Protective Groups in Organic Synthesis, 3rd. Ed., John Wiley and Sons (1999); L. Fieser and M. Fieser, Fieser and Fieser's Reagents for Organic Synthesis, John Wiley and Sons (1999); and L. Paquette, ed., Encyclopedia of Reagents for Organic Synthesis, John Wiley and Sons (1995), and subsequent editions thereof.

[0255] The additional agents that may be included with the tumor specific neo-antigenic peptides of this invention may contain one or more asymmetric centers and thus occur as racemates and racemic mixtures, single enantiomers, individual diastereomers and diastereomeric mixtures. All such isomeric forms of these compounds are expressly included in the present invention. The compounds of this invention may also be represented in multiple tautomeric forms, in such instances, the invention expressly includes all tautomeric forms of the compounds described herein (e.g., alkylation of a ring system may result in alkylation at multiple sites, the invention expressly includes all such reaction products). All such isomeric forms of such compounds are expressly included in the present invention. All crystal forms of the compounds described herein are expressly included in the present invention.

[0256] Dosage. When the agents described herein are administered as pharmaceuticals to humans or animals, they can be given per se or as a pharmaceutical composition containing active ingredient in combination with a pharmaceutically acceptable carrier, excipient, or diluent.

[0257] Actual dosage levels and time course of administration of the active ingredients in the pharmaceutical compositions of the invention can be varied so as to obtain an amount of the active ingredient which is effective to achieve the desired therapeutic response for a particular patient, composition, and mode of administration, without being toxic to the patient. Generally, agents or pharmaceutical compositions of the invention are administered in an amount sufficient to reduce or eliminate symptoms associated with neoplasia, e.g. cancer or tumors.

[0258] A preferred dose of an agent is the maximum that a patient can tolerate and not develop serious or unacceptable side effects. Exemplary dose ranges include 0.01 mg to 250 mg per day, 0.01 mg to 100 mg per day, 1 mg to 100 mg per day, 10 mg to 100 mg per day, 1 mg to 10 mg per day, and 0.01 mg to 10 mg per day. A preferred dose of an agent is the maximum that a patient can tolerate and not develop serious or unacceptable side effects. In embodiments, the agent is administered at a concentration of about 10 micrograms to about 100 mg per kilogram of body weight per day, about 0.1 to about 10 mg/kg per day, or about 1.0 mg to about 10 mg/kg of body weight per day.

[0259] In embodiments, the pharmaceutical composition comprises an agent in an amount ranging between 1 and 10 mg, such as 1, 2, 3, 4, 5, 6, 7, 8, 9, or 10 mg.

[0260] In embodiments, the therapeutically effective dosage produces a serum concentration of an agent of from about 0.1 ng/ml to about 50-100 mg/ml. The pharmaceutical compositions 5 typically should provide a dosage of from about 0.001 mg to about 2000 mg of compound per kilogram of body weight per day. For example, dosages for systemic administration to a human patient can range from 1-10 mg/kg, 20-80 mg/kg, 5-50 mg/kg, 75-150 mg/kg, 100-500 mg/kg, 250-750 mg/kg, 500-1000 mg/kg, 1-10 mg/kg, 5-50 mg/kg, 25-75 mg/kg, 50-100 mg/kg, 100-250 mg/kg, 50-100 mg/kg, 250-500 mg/kg, 500-750 mg/kg, 750-1000 mg/kg, 1000-1500 mg/kg, 10 1500-2000 mg/kg, 5 mg/kg, 20 mg/kg, 50 mg/kg, 100 mg/kg, 500 mg/kg, 1000 mg/kg, 1500 mg/kg, or 2000 mg/kg. Pharmaceutical dosage unit forms are prepared to provide from about 1 mg to about 5000 mg, for example from about 100 to about 2500 mg of the compound or a combination of essential ingredients per dosage unit form.

[0261] In embodiments, about 50 nM to about I μM of an agent is administered to a subject. In related embodiments, about 50-100 nM, 50-250 nM, 100-500 nM, 250-500 nM, 250-750 nM, 500-750 nM, 500 nM to I μM, or 750 nM to I μM of an agent is administered to a subject.

[0262] Determination of an effective amount is well within the capability of those skilled in the art, especially in light of the detailed disclosure provided herein. Generally, an efficacious or effective amount of an agent is determined by first administering a low dose of the agent(s) and then incrementally increasing the administered dose or dosages until a desired effect (e.g., reduce or eliminate symptoms associated with viral infection or autoimmune disease) is observed in the treated subject, with minimal or acceptable toxic side effects. Applicable methods for determining an appropriate dose and dosing schedule for administration of a pharmaceutical composition of the present invention are described, for example, in Goodman and Gilman's The Pharmacological Basis of Therapeutics, Goodman et al., eds., 11th Edition, McGraw-Hill 2005, and Remington: The Science and Practice of Pharmacy, 20th and 21st Editions, Gennaro and University of the Sciences in Philadelphia, Eds., Lippencott Williams & Wilkins (2003 and 2005), each of which is hereby incorporated by reference.

[0263] Preferred unit dosage formulations are those containing a daily dose or unit, daily sub-dose, as herein discussed, or an appropriate fraction thereof, of the administered ingredient.

[0264] The dosage regimen for treating a disorder or a disease with the tumor specific neoantigenic peptides of this invention and/or compositions of this invention is based on a variety of factors, including the type of disease, the age, weight, sex, medical condition of the patient, the severity of the condition, the route of administration, and the particular compound employed. Thus, the dosage regimen may vary widely, but can be determined routinely using standard methods.

[0265] The amounts and dosage regimens administered to a subject can depend on a number of factors, such as the mode of administration, the nature of the condition being treated, the body weight of the subject being treated and the judgment of the prescribing physician; all such factors being within the ambit of the skilled artisan from this disclosure and the knowledge in the art.

[0266] The amount of compound included within therapeutically active formulations according to the present invention is an effective amount for treating the disease or condition. In general, a therapeutically effective amount of the present preferred compound in dosage form usually ranges from slightly less than about 0.025 mg/kg/day to about 2.5 g/kg/day, preferably about 0.1 mg/kg/day to about 100 mg/kg/day of the patient or considerably more, depending upon the compound used, the condition or infection treated and the route of administration, although exceptions to this dosage range may be contemplated by the present invention. In its most preferred form, compounds according to the present invention are administered in amounts ranging from about 1 mg/kg/day to about 100 mg/kg/day. The dosage of the compound can depend on the condition being treated, the particular compound, and other clinical factors such as weight and condition of the patient and the route of administration of the compound. It is to be understood that the present invention has application for both human and veterinary use.

[0267] For oral administration to humans, a dosage of between approximately 0.1 to 100 mg/kg/day, preferably between approximately 1 and 100 mg/kg/day, is generally sufficient.

[0268] Where drug delivery is systemic rather than topical, this dosage range generally produces effective blood level concentrations of active compound ranging from less than about 0.04 to about 400 micrograms/cc or more of blood in the patient. The compound is conveniently administered in any suitable unit dosage form, including but not limited to one containing 0.001 to 3000 mg, preferably 0.05 to 500 mg of active ingredient per unit dosage form. An oral dosage of 10-250 mg is usually convenient.

[0269] According to certain exemplary embodiments, the vaccine or immunogenic composition is administered at a dose of about 10 μg to 1 mg per neoantigenic peptide. According to certain exemplary embodiments, the vaccine or immunogenic composition is administered at an average weekly dose level of about 10 μg to 2000 μg per neoantigenic peptide.

[0270] The concentration of active compound in the drug composition will depend on absorption, distribution, inactivation, and excretion rates of the drug as well as other factors known to those of skill in the art. It is to be noted that dosage values will also vary with the severity of the condition to be alleviated. It is to be further understood that for any particular subject, specific dosage regimens should be adjusted over time according to the individual need and the professional judgment of the person administering or supervising the administration of the compositions, and that the concentration ranges set forth herein are exemplary only and are not intended to limit the scope or practice of the claimed composition. The active ingredient may be administered at once, or may be divided into a number of smaller doses to be administered at varying intervals of time.

[0271] The invention provides for pharmaceutical compositions containing at least one tumor specific neoantigen described herein. In embodiments, the pharmaceutical compositions contain a pharmaceutically acceptable carrier, excipient, or diluent, which includes any pharmaceutical agent that does not itself induce the production of an immune response harmful to a subject receiving the composition, and which may be administered without undue toxicity. As used herein, the term “pharmaceutically acceptable” means being approved by a regulatory agency of the Federal or a state government or listed in the U.S. Pharmacopia, European Pharmacopia or other generally recognized pharmacopia for use in mammals, and more particularly in humans. These compositions can be useful for treating and/or preventing viral infection and/or autoimmune disease.

[0272] A thorough discussion of pharmaceutically acceptable carriers, diluents, and other excipients is presented in Remington's Pharmaceutical Sciences (17th ed., Mack Publishing Company) and Remington: The Science and Practice of Pharmacy (21st ed., Lippincott Williams & Wilkins), which are hereby incorporated by reference. The formulation of the pharmaceutical composition should suit the mode of administration. In embodiments, the pharmaceutical composition is suitable for administration to humans, and can be sterile, non-particulate and/or non-pyrogenic.

[0273] Pharmaceutically acceptable carriers, excipients, or diluents include, but are not limited, to saline, buffered saline, dextrose, water, glycerol, ethanol, sterile isotonic aqueous buffer, and combinations thereof.

[0274] Wetting agents, emulsifiers and lubricants, such as sodium lauryl sulfate and magnesium stearate, as well as coloring agents, release agents, coating agents, sweetening, flavoring and perfuming agents, preservatives, and antioxidants can also be present in the compositions.

[0275] Examples of pharmaceutically-acceptable antioxidants include, but are not limited to: (1) water soluble antioxidants, such as ascorbic acid, cysteine hydrochloride, sodium bisulfate, sodium metabi sulfite, sodium sulfite and the like; (2) oil-soluble antioxidants, such as ascorbyl palmitate, butylated hydroxyanisole (BHA), butylated hydroxytoluene (BHT), lecithin, propyl gallate, alpha-tocopherol, and the like; and (3) metal chelating agents, such as citric acid, ethylenediamine tetraacetic acid (EDTA), sorbitol, tartaric acid, phosphoric acid, and the like.

[0276] In embodiments, the pharmaceutical composition is provided in a solid form, such as a lyophilized powder suitable for reconstitution, a liquid solution, suspension, emulsion, tablet, pill, capsule, sustained release formulation, or powder.

[0277] In embodiments, the pharmaceutical composition is supplied in liquid form, for example, in a sealed container indicating the quantity and concentration of the active ingredient in the pharmaceutical composition. In related embodiments, the liquid form of the pharmaceutical composition is supplied in a hermetically sealed container. Methods for formulating the pharmaceutical compositions of the present invention are conventional and well known in the art (see Remington and Remington's). One of skill in the art can readily formulate a pharmaceutical composition having the desired characteristics (e.g., route of administration, biosafety, and release profile).

[0278] Methods for preparing the pharmaceutical compositions include the step of bringing into association the active ingredient with a pharmaceutically acceptable carrier and, optionally, one or more accessory ingredients. The pharmaceutical compositions can be prepared by uniformly and intimately bringing into association the active ingredient with liquid carriers, or finely divided solid carriers, or both, and then, if necessary, shaping the product. Additional methodology for preparing the pharmaceutical compositions, including the preparation of multilayer dosage forms, are described in Ansel's Pharmaceutical Dosage Forms and Drug Delivery Systems (9th ed., Lippincott Williams & Wilkins), which is hereby incorporated by reference.

[0279] Pharmaceutical compositions suitable for oral administration can be in the form of capsules, cachets, pills, tablets, lozenges (using a flavored basis, usually sucrose and acacia or tragacanth), powders, granules, or as a solution or a suspension in an aqueous or non-aqueous liquid, or as an oil-in-water or water-in-oil liquid emulsion, or as an elixir or syrup, or as pastilles (using an inert base, such as gelatin and glycerin, or sucrose and acacia) and/or as mouth washes and the like, each containing a predetermined amount of a compound(s) described herein, a derivative thereof, or a pharmaceutically acceptable salt or prodrug thereof as the active ingredient(s). The active ingredient can also be administered as a bolus, electuary, or paste.

[0280] In solid dosage forms for oral administration (e.g., capsules, tablets, pills, dragees, powders, granules and the like), the active ingredient is mixed with one or more pharmaceutically acceptable carriers, excipients, or diluents, such as sodium citrate or dicalcium phosphate, and/or any of the following: (1) fillers or extenders, such as starches, lactose, sucrose, glucose, mannitol, and/or silicic acid; (2) binders, such as, for example, carboxymethylcellulose, alginates, gelatin, polyvinyl pyrrolidone, sucrose and/or acacia; (3) humectants, such as glycerol; (4) disintegrating agents, such as agar-agar, calcium carbonate, potato or tapioca starch, alginic acid, certain silicates, and sodium carbonate; (5) solution retarding agents, such as paraffin; (6) absorption accelerators, such as quaternary ammonium compounds; (7) wetting agents, such as, for example, acetyl alcohol and glycerol monostearate; (8) absorbents, such as kaolin and bentonite clay; (9) lubricants, such a talc, calcium stearate, magnesium stearate, solid polyethylene glycols, sodium lauryl sulfate, and mixtures thereof; and (10) coloring agents. In the case of capsules, tablets, and pills, the pharmaceutical compositions can also comprise buffering agents. Solid compositions of a similar type can also be prepared using fillers in soft and hard-filled gelatin capsules, and excipients such as lactose or milk sugars, as well as high molecular weight polyethylene glycols and the like.

[0281] A tablet can be made by compression or molding, optionally with one or more accessory ingredients. Compressed tablets can be prepared using binders (for example, gelatin or hydroxypropylmethyl cellulose), lubricants, inert diluents, preservatives, disintegrants (for example, sodium starch glycolate or cross-linked sodium carboxymethyl cellulose), surface-actives, and/or dispersing agents. Molded tablets can be made by molding in a suitable machine a mixture of the powdered active ingredient moistened with an inert liquid diluent.

[0282] The tablets and other solid dosage forms, such as dragees, capsules, pills, and granules, can optionally be scored or prepared with coatings and shells, such as enteric coatings and other coatings well known in the art.

[0283] In some embodiments, in order to prolong the effect of an active ingredient, it is desirable to slow the absorption of the compound from subcutaneous or intramuscular injection. This can be accomplished by the use of a liquid suspension of crystalline or amorphous material having poor water solubility. The rate of absorption of the active ingredient then depends upon its rate of dissolution which, in turn, can depend upon crystal size and crystalline form. Alternatively, delayed absorption of a parenterally-administered active ingredient is accomplished by dissolving or suspending the compound in an oil vehicle. In addition, prolonged absorption of the injectable pharmaceutical form can be brought about by the inclusion of agents that delay absorption such as aluminum monostearate and gelatin.

[0284] Controlled release parenteral compositions can be in form of aqueous suspensions, microspheres, microcapsules, magnetic microspheres, oil solutions, oil suspensions, emulsions, or the active ingredient can be incorporated in biocompatible carrier(s), liposomes, nanoparticles, implants or infusion devices.

[0285] Materials for use in the preparation of microspheres and/or microcapsules include biodegradable/bioerodible polymers such as polyglactin, poly-(isobutyl cyanoacrylate), poly(2-hydroxy ethyl-L-glutamine) and poly(lactic acid). Biocompatible carriers which can be used when formulating a controlled release parenteral formulation include carbohydrates such as dextrans, proteins such as albumin, lipoproteins or antibodies.

[0286] Materials for use in implants can be non-biodegradable, e.g., polydimethylsiloxane, or biodegradable such as, e.g., poly(caprolactone), poly(lactic acid), poly(glycolic acid) or poly(ortho esters).

[0287] In embodiments, the active ingredient(s) are administered by aerosol. This is accomplished by preparing an aqueous aerosol, liposomal preparation, or solid particles containing the compound. A nonaqueous (e.g., fluorocarbon propellant) suspension can be used. The pharmaceutical composition can also be administered using a sonic nebulizer, which would minimize exposing the agent to shear, which can result in degradation of the compound.

[0288] Ordinarily, an aqueous aerosol is made by formulating an aqueous solution or suspension of the active ingredient(s) together with conventional pharmaceutically-acceptable carriers and stabilizers. The carriers and stabilizers vary with the requirements of the particular compound, but typically include nonionic surfactants (Tweens, Pluronics, or polyethylene glycol), innocuous proteins like serum albumin, sorbitan esters, oleic acid, lecithin, amino acids such as glycine, buffers, salts, sugars or sugar alcohols. Aerosols generally are prepared from isotonic solutions.

[0289] Dosage forms for topical or transdermal administration of an active ingredient(s) includes powders, sprays, ointments, pastes, creams, lotions, gels, solutions, patches and inhalants. The active ingredient(s) can be mixed under sterile conditions with a pharmaceutically acceptable carrier, and with any preservatives, buffers, or propellants as appropriate.

[0290] Transdermal patches suitable for use in the present invention are disclosed in Transdermal Drug Delivery: Developmental Issues and Research Initiatives (Marcel Dekker Inc., 1989) and U.S. Pat. Nos. 4,743,249, 4,906,169, 5,198,223, 4,816,540, 5,422,119, 5,023,084, which are hereby incorporated by reference. The transdermal patch can also be any transdermal patch well known in the art, including transscrotal patches. Pharmaceutical compositions in such transdermal patches can contain one or more absorption enhancers or skin permeation enhancers well known in the art (see, e.g., U.S. Pat. Nos. 4,379,454 and 4,973,468, which are hereby incorporated by reference). Transdermal therapeutic systems for use in the present invention can be based on iontophoresis, diffusion, or a combination of these two effects. Transdermal patches have the added advantage of providing controlled delivery of active ingredient(s) to the body. Such dosage forms can be made by dissolving or dispersing the active ingredient(s) in a proper medium. Absorption enhancers can also be used to increase the flux of the active ingredient across the skin. The rate of such flux can be controlled by either providing a rate controlling membrane or dispersing the active ingredient(s) in a polymer matrix or gel.

[0291] Such pharmaceutical compositions can be in the form of creams, ointments, lotions, liniments, gels, hydrogels, solutions, suspensions, sticks, sprays, pastes, plasters and other kinds of transdermal drug delivery systems. The compositions can also include pharmaceutically acceptable carriers or excipients such as emulsifying agents, antioxidants, buffering agents, preservatives, humectants, penetration enhancers, chelating agents, gel-forming agents, ointment bases, perfumes, and skin protective agents.

[0292] Examples of emulsifying agents include, but are not limited to, naturally occurring gums, e.g. gum acacia or gum tragacanth, naturally occurring phosphatides, e.g. soybean lecithin and sorbitan monooleate derivatives.

[0293] Examples of antioxidants include, but are not limited to, butylated hydroxy anisole (BHA), ascorbic acid and derivatives thereof, tocopherol and derivatives thereof, and cysteine.

[0294] Examples of preservatives include, but are not limited to, parabens, such as methyl or propyl p-hydroxybenzoate and benzalkonium chloride.

[0295] Examples of humectants include, but are not limited to, glycerin, propylene glycol, sorbitol and urea.

[0296] Examples of penetration enhancers include, but are not limited to, propylene glycol, DMSO, triethanolamine, N,N-dimethylacetamide, N,N-dimethylformamide, 2-pyrrolidone and derivatives thereof, tetrahydrofurfuryl alcohol, propylene glycol, diethylene glycol monoethyl or monomethyl ether with propylene glycol monolaurate or methyl laurate, eucalyptol, lecithin, TRANSCUTOL, and AZO E.

[0297] Examples of chelating agents include, but are not limited to, sodium EDTA, citric acid and phosphoric acid.

[0298] Examples of gel forming agents include, but are not limited to, Carbopol, cellulose derivatives, bentonite, alginates, gelatin and polyvinylpyrrolidone. In addition to the active ingredient(s), the ointments, pastes, creams, and gels of the present invention can contain excipients, such as animal and vegetable fats, oils, waxes, paraffins, starch, tragacanth, cellulose derivatives, polyethylene glycols, silicones, bentonites, silicic acid, talc and zinc oxide, or mixtures thereof.

[0299] Powders and sprays can contain excipients such as lactose, talc, silicic acid, aluminum hydroxide, calcium silicates and polyamide powder, or mixtures of these substances. Sprays can additionally contain customary propellants, such as chlorofluorohydrocarbons, and volatile unsubstituted hydrocarbons, such as butane and propane.

[0300] Injectable depot forms are made by forming microencapsule matrices of compound(s) of the invention in biodegradable polymers such as polylactide-polyglycolide. Depending on the ratio of compound to polymer, and the nature of the particular polymer employed, the rate of compound release can be controlled. Examples of other biodegradable polymers include poly(orthoesters) and poly(anhydrides). Depot injectable formulations are also prepared by entrapping the drug in liposomes or microemulsions which are compatible with body tissue.

[0301] Subcutaneous implants are well known in the art and are suitable for use in the present invention. Subcutaneous implantation methods are preferably non-irritating and mechanically resilient. The implants can be of matrix type, of reservoir type, or hybrids thereof. In matrix type devices, the carrier material can be porous or non-porous, solid or semi-solid, and permeable or impermeable to the active compound or compounds. The carrier material can be biodegradable or may slowly erode after administration. In some instances, the matrix is non-degradable but instead relies on the diffusion of the active compound through the matrix for the carrier material to degrade. Alternative subcutaneous implant methods utilize reservoir devices where the active compound or compounds are surrounded by a rate controlling membrane, e.g., a membrane independent of component concentration (possessing zero-order kinetics). Devices consisting of a matrix surrounded by a rate controlling membrane also suitable for use.

[0302] Both reservoir and matrix type devices can contain materials such as polydimethylsiloxane, such as SILASTIC, or other silicone rubbers. Matrix materials can be insoluble polypropylene, polyethylene, polyvinyl chloride, ethylvinyl acetate, polystyrene and polymethacrylate, as well as glycerol esters of the glycerol palmitostearate, glycerol stearate, and glycerol behenate type. Materials can be hydrophobic or hydrophilic polymers and optionally contain solubilizing agents. Subcutaneous implant devices can be slow-release capsules made with any suitable polymer, e.g., as described in U.S. Pat. Nos. 5,035,891 and 4,210,644, which are hereby incorporated by reference.

[0303] In general, at least four different approaches are applicable in order to provide rate control over the release and transdermal permeation of a drug compound. These approaches are: membrane-moderated systems, adhesive diffusion-controlled systems, matrix dispersion-type systems and microreservoir systems. It is appreciated that a controlled release percutaneous and/or topical composition can be obtained by using a suitable mixture of these approaches.

[0304] In a membrane-moderated system, the active ingredient is present in a reservoir which is totally encapsulated in a shallow compartment molded from a drug-impermeable laminate, such as a metallic plastic laminate, and a rate-controlling polymeric membrane such as a microporous or a non-porous polymeric membrane, e.g., ethylene-vinyl acetate copolymer. The active ingredient is released through the rate controlling polymeric membrane. In the drug reservoir, the active ingredient can either be dispersed in a solid polymer matrix or suspended in an unleachable, viscous liquid medium such as silicone fluid. On the external surface of the polymeric membrane, a thin layer of an adhesive polymer is applied to achieve an intimate contact of the transdermal system with the skin surface. The adhesive polymer is preferably a polymer which is hypoallergenic and compatible with the active drug substance.

[0305] In an adhesive diffusion-controlled system, a reservoir of the active ingredient is formed by directly dispersing the active ingredient in an adhesive polymer and then by, e.g., solvent casting, spreading the adhesive containing the active ingredient onto a flat sheet of substantially drug-impermeable metallic plastic backing to form a thin drug reservoir layer.

[0306] A matrix dispersion-type system is characterized in that a reservoir of the active ingredient is formed by substantially homogeneously dispersing the active ingredient in a hydrophilic or lipophilic polymer matrix. The drug-containing polymer is then molded into disc with a substantially well-defined surface area and controlled thickness. The adhesive polymer is spread along the circumference to form a strip of adhesive around the disc.

[0307] A microreservoir system can be considered as a combination of the reservoir and matrix dispersion type systems. In this case, the reservoir of the active substance is formed by first suspending the drug solids in an aqueous solution of water-soluble polymer and then dispersing the drug suspension in a lipophilic polymer to form a multiplicity of unleachable, microscopic spheres of drug reservoirs.

[0308] Any of the herein-described controlled release, extended release, and sustained release compositions can be formulated to release the active ingredient in about 30 minutes to about 1 week, in about 30 minutes to about 72 hours, in about 30 minutes to 24 hours, in about 30 minutes to 12 hours, in about 30 minutes to 6 hours, in about 30 minutes to 4 hours, and in about 3 hours to 10 hours. In embodiments, an effective concentration of the active ingredient(s) is sustained in a subject for 4 hours, 6 hours, 8 hours, 10 hours, 12 hours, 16 hours, 24 hours, 48 hours, 72 hours, or more after administration of the pharmaceutical compositions to the subject.

[0309] Vaccine or immunogenic compositions. The present invention is directed in some aspects to pharmaceutical compositions suitable for the prevention or treatment of cancer. In one embodiment, the composition comprises at least an immunogenic composition, e.g., a neoplasia vaccine or immunogenic composition capable of raising a specific T-cell response. The neoplasia vaccine or immunogenic composition comprises neoantigenic peptides and/or neoantigenic polypeptides corresponding to tumor specific neoantigens as described herein.

[0310] A suitable neoplasia vaccine or immunogenic composition can preferably contain a plurality of tumor specific neoantigenic peptides. In an embodiment, the vaccine or immunogenic composition can include between 1 and 100 sets of peptides, more preferably between 1 and 50 such peptides, even more preferably between 10 and 30 sets peptides, even more preferably between 15 and 25 peptides. According to another preferred embodiment, the vaccine or immunogenic composition can include at least one peptides, more preferably 2, 3, 4, or 5 peptides, In certain embodiments, the vaccine or immunogenic composition can comprise 5, 6, 7, 8, 9, 10, 11, 12, 13, 14, 15, 16, 17, 18, 19, 20, 21, 22, 23, 24, 25, 26, 27, 28, 29, or 30 different peptides.

[0311] The optimum amount of each peptide to be included in the vaccine or immunogenic composition and the optimum dosing regimen can be determined by one skilled in the art without undue experimentation. For example, the peptide or its variant may be prepared for intravenous (i.v.) injection, sub-cutaneous (s.c.) injection, intradermal (i.d.) injection, intraperitoneal (i.p.) injection, intramuscular (i.m.) injection. Preferred methods of peptide injection include s.c, i.d., i.p., i.m., and i.v. Preferred methods of DNA injection include i.d., i.m., s.c, i.p. and i.v. For example, doses of between 1 and 500 mg 50 μg and 1.5 mg, preferably 10 μg to 500 of peptide or DNA may be given and can depend from the respective peptide or DNA. Doses of this range were successfully used in previous trials (Brunsvig P F, et al., Cancer Immunol Immunother. 2006; 55(12): 1553-1564; M. Staehler, et al., ASCO meeting 2007; Abstract No 3017). Other methods of administration of the vaccine or immunogenic composition are known to those skilled in the art.

[0312] In one embodiment of the present invention the different tumor specific neoantigenic peptides and/or polypeptides are selected for use in the neoplasia vaccine or immunogenic composition so as to maximize the likelihood of generating an immune attack against the neoplasias/tumors in a high proportion of subjects in the population. Without being bound by theory, it is believed that the inclusion of a diversity of tumor specific neoantigenic peptides can generate a broad scale immune attack against a neoplasia/tumor. In one embodiment, the selected tumor specific neoantigenic peptides/polypeptides are encoded by missense mutations. In a second embodiment, the selected tumor specific neoantigenic peptides/polypeptides are encoded by a combination of missense mutations and neoORF mutations. In a third embodiment, the selected tumor specific neoantigenic peptides/polypeptides are encoded by neoORF mutations.

[0313] In one embodiment in which the selected tumor specific neoantigenic peptides/polypeptides are encoded by missense mutations, the peptides and/or polypeptides are chosen based on their capability to associate with the MHC molecules of a high proportion of subjects in the population. Peptides/polypeptides derived from neoOR mutations can also be selected on the basis of their capability to associate with the MHC molecules of the patient population.

[0314] The vaccine or immunogenic composition is capable of raising a specific cytotoxic T-cells response and/or a specific helper T-cell response.

[0315] The vaccine or immunogenic composition can further comprise an adjuvant and/or a carrier. Examples of useful adjuvants and carriers are given herein. The peptides and/or polypeptides in the composition can be associated with a carrier such as, e.g., a protein or an antigen-presenting cell such as e.g. a dendritic cell (DC) capable of presenting the peptide to a T-cell. Adjuvants are any substance whose admixture into the vaccine or immunogenic composition increases or otherwise modifies the immune response to the mutant peptide. Carriers are scaffold structures, for example a polypeptide or a polysaccharide, to which the neoantigenic peptides, is capable of being associated. Optionally, adjuvants are conjugated covalently or non-covalently to the peptides or polypeptides of the invention.

[0316] The ability of an adjuvant to increase the immune response to an antigen is typically manifested by a significant increase in immune-mediated reaction, or reduction in disease symptoms. For example, an increase in humoral immunity is typically manifested by a significant increase in the titer of antibodies raised to the antigen, and an increase in T-cell activity is typically manifested in increased cell proliferation, or cellular cytotoxicity, or cytokine secretion. An adjuvant may also alter an immune response, for example, by changing a primarily humoral or Th2 response into a primarily cellular, or Th1 response.

[0317] Suitable adjuvants include, but are not limited to 1018 ISS, aluminum salts, Amplivax, AS15, BCG, CP-870,893, CpG7909, CyaA, dSLEVI, GM-CSF, IC30, IC31, Imiquimod, ImuFact FMP321, IS Patch, ISS, ISCOMATRIX, Juvlmmune, LipoVac, MF59, monophosphoryl lipid A, Montanide FMS 1312, Montanide ISA 206, Montanide ISA 50V, Montanide ISA-51, OK-432, OM-174, OM-197-MP-EC, ONTAK, PEPTEL. vector system, PLG microparticles, resiquimod, SRL172, Virosomes and other Virus-like particles, YF-17D, VEGF trap, R848, beta-glucan, Pam3Cys, Aquila's QS21 stimulon (Aquila Biotech, Worcester, Mass., USA) which is derived from saponin, mycobacterial extracts and synthetic bacterial cell wall mimics, and other proprietary adjuvants such as Ribi's Detox. Quil or Superfos. Several immunological adjuvants (e.g., MF59) specific for dendritic cells and their preparation have been described previously (Dupuis M, et al., Cell Immunol. 1998; 186(1): 18-27; Allison A C; Dev Biol Stand. 1998; 92:3-11). Also cytokines may be used. Several cytokines have been directly linked to influencing dendritic cell migration to lymphoid tissues (e.g., TNF-alpha), accelerating the maturation of dendritic cells into efficient antigen-presenting cells for T-lymphocytes (e.g., GM-CSF, IL-1 and IL-4) (U.S. Pat. No. 5,849,589, specifically incorporated herein by reference in its entirety) and acting as immunoadjuvants (e.g., IL-12) (Gabrilovich D I, et al., J Immunother Emphasi s Tumor Immunol. 1996 (6):414-418).

[0318] Toll like receptors (TLRs) may also be used as adjuvants, and are important members of the family of pattern recognition receptors (PRRs) which recognize conserved motifs shared by many micro-organisms, termed “pathogen-associated molecular patterns” (PAMPS). Recognition of these “danger signals” activates multiple elements of the innate and adaptive immune system. TLRs are expressed by cells of the innate and adaptive immune systems such as dendritic cells (DCs), macrophages, T and B cells, mast cells, and granulocytes and are localized in different cellular compartments, such as the plasma membrane, lysosomes, endosomes, and endolysosomes. Different TLRs recognize distinct PAMPS. For example, TLR4 is activated by LPS contained in bacterial cell walls, TLR9 is activated by unmethylated bacterial or viral CpG DNA, and TLR3 is activated by double stranded RNA. TLR ligand binding leads to the activation of one or more intracellular signaling pathways, ultimately resulting in the production of many key molecules associated with inflammation and immunity (particularly the transcription factor NF-κB and the Type-I interferons). TLR mediated DC activation leads to enhanced DC activation, phagocytosis, upregulation of activation and co-stimulation markers such as CD80, CD83, and CD86, expression of CCR7 allowing migration of DC to draining lymph nodes and facilitating antigen presentation to T cells, as well as increased secretion of cytokines such as type I interferons, IL-12, and IL-6. All of these downstream events are critical for the induction of an adaptive immune response.

[0319] Among the most promising cancer vaccine or immunogenic composition adjuvants currently in clinical development are the TLR9 agonist CpG and the synthetic double-stranded RNA (dsRNA) TLR3 ligand poly-ICLC. In preclinical studies poly-ICLC appears to be the most potent TLR adjuvant when compared to LPS and CpG due to its induction of pro-inflammatory cytokines and lack of stimulation of IL-10, as well as maintenance of high levels of co-stimulatory molecules in DCsl. Furthermore, poly-ICLC was recently directly compared to CpG in non-human primates (rhesus macaques) as adjuvant for a protein vaccine or immunogenic composition consisting of human papillomavirus (HPV)16 capsomers (Stahl-Hennig C, Eisenblatter M, Jasny E, et al. Synthetic double-stranded RNAs are adjuvants for the induction of T helper 1 and humoral immune responses to human papillomavirus in rhesus macaques. PLoS pathogens. April 2009; 5(4)).

[0320] CpG immuno stimulatory oligonucleotides have also been reported to enhance the effects of adjuvants in a vaccine or immunogenic composition setting. Without being bound by theory, CpG oligonucleotides act by activating the innate (non-adaptive) immune system via Toll-like receptors (TLR), mainly TLR9. CpG triggered TLR9 activation enhances antigen-specific humoral and cellular responses to a wide variety of antigens, including peptide or protein antigens, live or killed viruses, dendritic cell vaccines, autologous cellular vaccines and polysaccharide conjugates in both prophylactic and therapeutic vaccines. More importantly, it enhances dendritic cell maturation and differentiation, resulting in enhanced activation of Th1 cells and strong cytotoxic T-lymphocyte (CTL) generation, even in the absence of CD4 T-cell help. The Th1 bias induced by TLR9 stimulation is maintained even in the presence of vaccine adjuvants such as alum or incomplete Freund's adjuvant (IF A) that normally promote a Th2 bias. CpG oligonucleotides show even greater adjuvant activity when formulated or co-administered with other adjuvants or in formulations such as microparticles, nano particles, lipid emulsions or similar formulations, which are especially necessary for inducing a strong response when the antigen is relatively weak. They also accelerate the immune response and enabled the antigen doses to be reduced by approximately two orders of magnitude, with comparable antibody responses to the full-dose vaccine without CpG in some experiments (Arthur M. Krieg, Nature Reviews, Drug Discovery, 5, Jun. 2006, 471-484). U.S. Pat. No. 6,406,705 B1 describes the combined use of CpG oligonucleotides, non-nucleic acid adjuvants and an antigen to induce an antigen-specific immune response. A commercially available CpG TLR9 antagonist is dSLEVI (double Stem Loop Immunomodulator) by Mologen (Berlin, GERMANY), which is a preferred component of the pharmaceutical composition of the present invention. Other TLR binding molecules such as RNA binding TLR 7, TLR 8 and/or TLR 9 may also be used.

[0321] Other examples of useful adjuvants include, but are not limited to, chemically modified CpGs (e.g. CpR, Idera), Poly(I:C)(e.g. polyi:CI2U), non-CpG bacterial DNA or RNA as well as immunoactive small molecules and antibodies such as cyclophosphamide, sunitinib, bevacizumab, celebrex, NCX-4016, sildenafil, tadalafil, vardenafil, sorafinib, XL-999, CP-547632, pazopanib, ZD2171, AZD2171, ipilimumab, tremelimumab, and SC58175, which may act therapeutically and/or as an adjuvant. The amounts and concentrations of adjuvants and additives useful in the context of the present invention can readily be determined by the skilled artisan without undue experimentation. Additional adjuvants include colony-stimulating factors, such as Granulocyte Macrophage Colony Stimulating Factor (GM-CSF, sargramostim).

[0322] Poly-ICLC is a synthetically prepared double-stranded RNA consisting of polyl and polyC strands of average length of about 5000 nucleotides, which has been stabilized to thermal denaturation and hydrolysis by serum nucleases by the addition of polylysine and carboxymethylcellulose. The compound activates TLR3 and the RNA helicase-domain of MDA5, both members of the PAMP family, leading to DC and natural killer (NK) cell activation and production of a “natural mix” of type I interferons, cytokines, and chemokines. Furthermore, poly-ICLC exerts a more direct, broad host-targeted anti-infectious and possibly antitumor effect mediated by the two IFN-inducible nuclear enzyme systems, the 2′5′-OAS and the Pl/eIF2a kinase, also known as the PKR (4-6), as well as RIG-I helicase and MDA5.

[0323] In rodents and non-human primates, poly-ICLC was shown to enhance T cell responses to viral antigens, cross-priming, and the induction of tumor-, virus-, and autoantigen-specific CD8+ T-cells. In a recent study in non-human primates, poly-ICLC was found to be essential for the generation of antibody responses and T-cell immunity to DC targeted or non-targeted HIV Gag p24 protein, emphasizing its effectiveness as a vaccine adjuvant.

[0324] In human subjects, transcriptional analysis of serial whole blood samples revealed similar gene expression profiles among the 8 healthy human volunteers receiving one single s.c. administration of poly-ICLC and differential expression of up to 212 genes between these 8 subjects versus 4 subjects receiving placebo. Remarkably, comparison of the poly-ICLC gene expression data to previous data from volunteers immunized with the highly effective yellow fever vaccine YF17D showed that a large number of transcriptional and signal transduction canonical pathways, including those of the innate immune system, were similarly upregulated at peak time points.

[0325] More recently, an immunologic analysis was reported on patients with ovarian, fallopian tube, and primary peritoneal cancer in second or third complete clinical remission who were treated on a phase 1 study of subcutaneous vaccination with synthetic overlapping long peptides (OLP) from the cancer testis antigen NY-ESO-1 alone or with Montanide-ISA-51, or with 1.4 mg poly-ICLC and Montanide. The generation of NY-ESO-1-specific CD4+ and CD8+ T-cell and antibody responses were markedly enhanced with the addition of poly-ICLC and Montanide compared to OLP alone or OLP and Montanide.

[0326] A vaccine or immunogenic composition according to the present invention may comprise more than one different adjuvant. Furthermore, the invention encompasses a therapeutic composition comprising any adjuvant substance including any of those herein discussed. It is also contemplated that the peptide or polypeptide, and the adjuvant can be administered separately in any appropriate sequence. A carrier may be present independently of an adjuvant. The carrier may be covalently linked to the antigen. A carrier can also be added to the antigen by inserting DNA encoding the carrier in frame with DNA encoding the antigen. The function of a carrier can for example be to confer stability, to increase the biological activity, or to increase serum half-life. Extension of the half-life can help to reduce the number of applications and to lower doses, thus are beneficial for therapeutic but also economic reasons. Furthermore, a carrier may aid presenting peptides to T-cells. The carrier may be any suitable carrier known to the person skilled in the art, for example a protein or an antigen presenting cell. A carrier protein could be but is not limited to keyhole limpet hemocyanin, serum proteins such as transferrin, bovine serum albumin, human serum albumin, thyroglobulin or ovalbumin, immunoglobulins, or hormones, such as insulin or palmitic acid. For immunization of humans, the carrier may be a physiologically acceptable carrier acceptable to humans and safe. However, tetanus toxoid and/or diptheria toxoid are suitable carriers in one embodiment of the invention. Alternatively, the carrier may be dextrans for example sepharose.

[0327] Cytotoxic T-cells (CTLs) recognize an antigen in the form of a peptide bound to an MHC molecule rather than the intact foreign antigen itself. The MHC molecule itself is located at the cell surface of an antigen presenting cell. Thus, an activation of CTLs is only possible if a trimeric complex of peptide antigen, MHC molecule, and APC is present. Correspondingly, it may enhance the immune response if not only the peptide is used for activation of CTLs, but if additionally APCs with the respective MHC molecule are added. Therefore, in some embodiments the vaccine or immunogenic composition according to the present invention additionally contains at least one antigen presenting cell.

[0328] The antigen-presenting cell (or stimulator cell) typically has an MHC class I or II molecule on its surface, and in one embodiment is substantially incapable of itself loading the MHC class I or II molecule with the selected antigen. As is described in more detail herein, the MHC class I or II molecule may readily be loaded with the selected antigen in vitro.

[0329] CD8+ cell activity may be augmented through the use of CD4+ cells. The identification of CD4 T+ cell epitopes for tumor antigens has attracted interest because many immune based therapies against cancer may be more effective if both CD8+ and CD4+T lymphocytes are used to target a patient's tumor. CD4+ cells are capable of enhancing CD8 T cell responses. Many studies in animal models have clearly demonstrated better results when both CD4+ and CD8+ T cells participate in anti-tumor responses (see e.g., Nishimura et al. (1999) Distinct role of antigen-specific T helper type 1 (TH1) and Th2 cells in tumor eradication in vivo. J Ex Med 190:617-27). Universal CD4+ T cell epitopes have been identified that are applicable to developing therapies against different types of cancer (see e.g., Kobayashi et al. (2008) Current Opinion in Immunology 20:221-27). For example, an HLA-DR restricted helper peptide from tetanus toxoid was used in melanoma vaccines to activate CD4+ T cells non-specifically (see e.g., Slingluff et al. (2007) Immunologic and Clinical Outcomes of a Randomized Phase II Trial of Two Multipeptide Vaccines for Melanoma in the Adjuvant Setting, Clinical Cancer Research 13(21):6386-95). It is contemplated within the scope of the invention that such CD4+ cells may be applicable at three levels that vary in their tumor specificity: 1) a broad level in which universal CD4+ epitopes (e.g., tetanus toxoid) may be used to augment CD8+ cells; 2) an intermediate level in which native, tumor-associated CD4+ epitopes may be used to augment CD8+ cells; and 3) a patient specific level in which neoantigen CD4+ epitopes may be used to augment CD8+ cells in a patient specific manner. Although current algorithms for predicting CD4 epitopes are limited in accuracy, it is a reasonable expectation that many long peptides containing predicted CD8 neoepitopes will also include CD4 epitopes. CD4 epitopes are longer than CD8 epitopes and typically are 10-12 amino acids in length although some can be longer (Kreiter et al, Mutant MHC Class II epitopes drive therapeutic immune responses to cancer, Nature (2015). Thus the neoanti genie epitopes described herein, either in the form of long peptides (>25 amino acids) or nucleic acids encoding such long peptides, may also boost CD4 responses in a tumor and patient-specific manner (level (3) above).

[0330] CD8+ cell immunity may also be generated with neoantigen loaded dendritic cell (DC) vaccine. DCs are potent antigen-presenting cells that initiate T cell immunity and can be used as cancer vaccines when loaded with one or more peptides of interest, for example, by direct peptide injection. For example, patients that were newly diagnosed with metastatic melanoma were shown to be immunized against 3 HLA-A*0201-restricted gplOO melanoma antigen-derived peptides with autologous peptide pulsed CD40L/IFN-g-activated mature DCs via an IL-12p70-producing patient DC vaccine (see e.g., Carreno et al (2013) L-12p70-producing patient DC vaccine elicits Tel-polarized immunity, Journal of Clinical Investigation, 123(8):3383-94 and Ali et al. (2009) In situ regulation of DC subsets and T cells mediates tumor regression in mice, Cancer Immunotherapy, 1(8): 1-10). It is contemplated within the scope of the invention that neoantigen loaded DCs may be prepared using the synthetic TLR 3 agonist Polyinosinic-Polycytidylic Acid-poly-L-lysine Carboxymethylcellulose (Poly-ICLC) to stimulate the DCs. Poly-ICLC is a potent individual maturation stimulus for human DCs as assessed by an upregulation of CD83 and CD86, induction of interleukin-12 (IL-12), tumor necrosis factor (TNF), interferon gamma-induced protein 10 (IP-10), interleukin 1 (IL-1), and type I interferons (IFN), and minimal interleukin 10 (IL-10) production. DCs may be differentiated from frozen peripheral blood mononuclear cells (PBMCs) obtained by leukapheresis, while PBMCs may be isolated by Ficoll gradient centrifugation and frozen in aliquots.

[0331] Illustratively, the following 7 day activation protocol may be used. Day 1—PBMCs are thawed and plated onto tissue culture flasks to select for monocytes which adhere to the plastic surface after 1-2 hr incubation at 37° C. in the tissue culture incubator. After incubation, the lymphocytes are washed off and the adherent monocytes are cultured for 5 days in the presence of interleukin-4 (IL-4) and granulocyte macrophage-colony stimulating factor (GM-CSF) to differentiate to immature DCs. On Day 6, immature DCs are pulsed with the keyhole limpet hemocyanin (KLH) protein which serves as a control for the quality of the vaccine and may boost the immunogenicity of the vaccine. The DCs are stimulated to mature, loaded with peptide antigens, and incubated overnight. On Day 7, the cells are washed, and frozen in 1 ml aliquots containing 4-20×10(6) cells using a controlled-rate freezer. Lot release testing for the batches of DCs may be performed to meet minimum specifications before the DCs are injected into patients (see e.g., Sabado et al. (2013) Preparation of tumor antigen-loaded mature dendritic cells for immunotherapy, J. Vis Exp. August 1; (78). doi: 10.3791/50085).

[0332] A DC vaccine may be incorporated into a scaffold system to facilitate delivery to a patient. Therapeutic treatment of a patients neoplasia with a DC vaccine may utilize a biomaterial system that releases factors that recruit host dendritic cells into the device, differentiates the resident, immature DCs by locally presenting adjuvants (e.g., danger signals) while releasing antigen, and promotes the release of activated, antigen loaded DCs to the lymph nodes (or desired site of action) where the DCs may interact with T cells to generate a potent cytotoxic T lymphocyte response to the cancer neoantigens. Implantable biomaterials may be used to generate a potent cytotoxic T lymphocyte response against a neoplasia in a patient specific manner. The biomaterial-resident dendritic cells may then be activated by exposing them to danger signals mimicking infection, in concert with release of antigen from the biomaterial. The activated dendritic cells then migrate from the biomaterials to lymph nodes to induce a cytotoxic T effector response. This approach has previously been demonstrated to lead to regression of established melanoma in preclinical studies using a lysate prepared from tumor biopsies (see e.g., Ali et al. (2209) In situ regulation of DC subsets and T cells mediates tumor regression in mice, Cancer Immunotherapy 1(8): 1-10; Ali et al. (2009) Infection-mimicking materials to program dendritic cells in situ. Nat Mater 8: 151-8), and such a vaccine is currently being tested in a Phase I clinical trial recently initiated at the Dana-Farber Cancer Institute. This approach has also been shown to lead to regression of glioblastoma, as well as the induction of a potent memory response to prevent relapse, using the C6 rat glioma model.24 in the current proposal. The ability of such an implantable, biomatrix vaccine delivery scaffold to amplify and sustain tumor specific dendritic cell activation may lead to more robust anti-tumor immunosensitization than can be achieved by traditional subcutaneous or intra-nodal vaccine administrations.

[0333] The present invention may include any method for loading a neoantigenic peptide onto a dendritic cell. One such method applicable to the present invention is a microfluidic intracellular delivery system. Such systems cause temporary membrane disruption by rapid mechanical deformation of human and mouse immune cells, thus allowing the intracellular delivery of biomolecules (Sharei et al., 2015, PLOS ONE).

[0334] Preferably, the antigen presenting cells are dendritic cells. Suitably, the dendritic cells are autologous dendritic cells that are pulsed with the neoantigenic peptide. The peptide may be any suitable peptide that gives rise to an appropriate T-cell response. T-cell therapy using autologous dendritic cells pulsed with peptides from a tumor associated antigen is disclosed in Murphy et al. (1996) The Prostate 29, 371-380 and Tjua et al. (1997) The Prostate 32, 272-278. In certain embodiments the dendritic cells are targeted using CD141, DEC205, or XCR1 markers. CD141+ XCR1+DCs were identified as a subset that may be better suited to the induction of anti-tumor responses (Bachem et al., J. Exp. Med. 207, 1273-1281 (2010); Crozat et al., J. Exp. Med. 207, 1283-1292 (2010); and Gallois & Bhardwaj, Nature Med. 16, 854-856 (2010)).

[0335] Thus, in one embodiment of the present invention the vaccine or immunogenic composition containing at least one antigen presenting cell is pulsed or loaded with one or more peptides of the present invention. Alternatively, peripheral blood mononuclear cells (PBMCs) isolated from a patient may be loaded with peptides ex vivo and injected back into the patient. As an alternative the antigen presenting cell comprises an expression construct encoding a peptide of the present invention. The polynucleotide may be any suitable polynucleotide and it is preferred that it is capable of transducing the dendritic cell, thus resulting in the presentation of a peptide and induction of immunity.

[0336] The inventive pharmaceutical composition may be compiled so that the selection, number and/or amount of peptides present in the composition covers a high proportion of subjects in the population. The selection may be dependent on the specific type of cancer, the status of the disease, earlier treatment regimens, and, of course, the HLA-haplotypes present in the patient population.

[0337] Pharmaceutical compositions comprising the peptide of the invention may be administered to an individual already suffering from cancer. In therapeutic applications, compositions are administered to a patient in an amount sufficient to elicit an effective CTL response to the tumor antigen and to cure or at least partially arrest symptoms and/or complications. An amount adequate to accomplish this is defined as “therapeutically effective dose.” Amounts effective for this use can depend on, e.g., the peptide composition, the manner of administration, the stage and severity of the disease being treated, the weight and general state of health of the patient, and the judgment of the prescribing physician, but generally range for the initial immunization (that is for therapeutic or prophylactic administration) from about 1.0 μg to about 50,000 μg of peptide for a 70 kg patient, followed by boosting dosages or from about 1.0 μg to about 10,000 μg of peptide pursuant to a boosting regimen over weeks to months depending upon the patient's response and condition and possibly by measuring specific CTL activity in the patient's blood. It should be kept in mind that the peptide and compositions of the present invention may generally be employed in serious disease states, that is, life-threatening or potentially life threatening situations, especially when the cancer has metastasized. For therapeutic use, administration should begin as soon as possible after the detection or surgical removal of tumors. This is followed by boosting doses until at least symptoms are substantially abated and for a period thereafter.

[0338] The pharmaceutical compositions (e.g., vaccine compositions) for therapeutic treatment are intended for parenteral, topical, nasal, oral or local administration. Preferably, the pharmaceutical compositions are administered parenterally, e.g., intravenously, subcutaneously, intradermally, or intramuscularly. The compositions may be administered at the site of surgical excision to induce a local immune response to the tumor. The invention provides compositions for parenteral administration which comprise a solution of the peptides and vaccine or immunogenic compositions are dissolved or suspended in an acceptable carrier, preferably an aqueous carrier. A variety of aqueous carriers may be used, e.g., water, buffered water, 0.9% saline, 0.3% glycine, hyaluronic acid and the like. These compositions may be sterilized by conventional, well known sterilization techniques, or may be sterile filtered. The resulting aqueous solutions may be packaged for use as is, or lyophilized, the lyophilized preparation being combined with a sterile solution prior to administration. The compositions may contain pharmaceutically acceptable auxiliary substances as required to approximate physiological conditions, such as pH adjusting and buffering agents, tonicity adjusting agents, wetting agents and the like, for example, sodium acetate, sodium lactate, sodium chloride, potassium chloride, calcium chloride, sorbitan monolaurate, triethanolamine oleate, etc.

[0339] A liposome suspension containing a peptide may be administered intravenously, locally, topically, etc. in a dose which varies according to, inter alia, the manner of administration, the peptide being delivered, and the stage of the disease being treated. For targeting to the immune cells, a ligand, such as, e.g., antibodies or fragments thereof specific for cell surface determinants of the desired immune system cells, can be incorporated into the liposome.

[0340] For solid compositions, conventional or nanoparticle nontoxic solid carriers may be used which include, for example, pharmaceutical grades of mannitol, lactose, starch, magnesium stearate, sodium saccharin, talcum, cellulose, glucose, sucrose, magnesium carbonate, and the like. For oral administration, a pharmaceutically acceptable nontoxic composition is formed by incorporating any of the normally employed excipients, such as those carriers previously listed, and generally 10-95% of active ingredient, that is, one or more peptides of the invention, and more preferably at a concentration of 25%-75%.

[0341] For aerosol administration, the immunogenic peptides are preferably supplied in finely divided form along with a surfactant and propellant. Typical percentages of peptides are 0.01%-20% by weight, preferably 1%-10%. The surfactant can, of course, be nontoxic, and preferably soluble in the propellant. Representative of such agents are the esters or partial esters of fatty acids containing from 6 to 22 carbon atoms, such as caproic, octanoic, lauric, palmitic, stearic, linoleic, linolenic, olesteric and oleic acids with an aliphatic polyhydric alcohol or its cyclic anhydride. Mixed esters, such as mixed or natural glycerides may be employed. The surfactant may constitute 0.1%-20% by weight of the composition, preferably 0.25-5%. The balance of the composition is ordinarily propellant. A carrier can also be included as desired, as with, e.g., lecithin for intranasal delivery.

[0342] The peptides and polypeptides of the invention can be readily synthesized chemically utilizing reagents that are free of contaminating bacterial or animal substances (Merrifield R B: Solid phase peptide synthesis. I. The synthesis of a tetrapeptide. J. Am. Chem. Soc. 85:2149-54, 1963).

[0343] The peptides and polypeptides of the invention can also be expressed by a vector, e.g., a nucleic acid molecule as herein-discussed, e.g., RNA or a DNA plasmid, a viral vector such as a poxvirus, e.g., orthopox virus, avipox virus, or adenovirus, AAV or lentivirus. This approach involves the use of a vector to express nucleotide sequences that encode the peptide of the invention. Upon introduction into an acutely or chronically infected host or into a noninfected host, the vector expresses the immunogenic peptide, and thereby elicits a host CTL response.

[0344] For therapeutic or immunization purposes, nucleic acids encoding the peptide of the invention and optionally one or more of the peptides described herein can also be administered to the patient. A number of methods are conveniently used to deliver the nucleic acids to the patient. For instance, the nucleic acid can be delivered directly, as “naked DNA”. This approach is described, for instance, in Wolff et al., Science 247: 1465-1468 (1990) as well as U.S. Pat. Nos. 5,580,859 and 5,589,466. The nucleic acids can also be administered using ballistic delivery as described, for instance, in U.S. Pat. No. 5,204,253. Particles comprised solely of DNA can be administered. Alternatively, DNA can be adhered to particles, such as gold particles. Generally, a plasmid for a vaccine or immunological composition can comprise DNA encoding an antigen (e.g., one or more neoantigens) operatively linked to regulatory sequences which control expression or expression and secretion of the antigen from a host cell, e.g., a mammalian cell; for instance, from upstream to downstream, DNA for a promoter, such as a mammalian virus promoter (e.g., a CMV promoter such as an hCMV or mCMV promoter, e.g., an early-intermediate promoter, or an SV40 promoter—see documents cited or incorporated herein for useful promoters), DNA for a eukaryotic leader peptide for secretion (e.g., tissue plasminogen activator), DNA for the neoantigen(s), and DNA encoding a terminator (e.g., the 3′ UTR transcriptional terminator from the gene encoding Bovine Growth Hormone or bGH polyA). A composition can contain more than one plasmid or vector, whereby each vector contains and expresses a different neoantigen. Mention is also made of Wasmoen U.S. Pat. No. 5,849,303, and Dale U.S. Pat. No. 5,811,104, whose text may be useful. DNA or DNA plasmid formulations can be formulated with or inside cationic lipids; and, as to cationic lipids, as well as adjuvants, mention is also made of Loosmore U.S. Patent Application 2003/0104008. Also, teachings in Audonnet U.S. Pat. Nos. 6,228,846 and 6,159,477 may be relied upon for DNA plasmid teachings that can be employed in constructing and using DNA plasmids that contain and express in vivo.

[0345] The nucleic acids can also be delivered complexed to cationic compounds, such as cationic lipids. Lipid-mediated gene delivery methods are described, for instance, in W01996/18372; WO 1993/24640; Mannino & Gould-Fogerite, BioTechniques 6(7): 682-691 (1988); U.S. Pat. No. 5,279,833; WO 1991/06309; and Feigner et al., Proc. Natl. Acad. Sci. USA 84: 7413-7414 (1987).

[0346] RNA encoding the peptide of interest (e.g., mRNA) can also be used for delivery (see, e.g., Kiken et al, 2011; Su et al, 2011; see also U.S. Pat. No. 8,278,036; Halabi et al. J Clin Oncol (2003) 21: 1232-1237; Petsch et al, Nature Biotechnology 2012 Dec. 7; 30(12): 1210-6).

[0347] Viral vectors as described herein can also be used to deliver the neoantigenic peptides of the invention. Vectors can be administered so as to have in vivo expression and response akin to doses and/or responses elicited by antigen administration.

[0348] A preferred means of administering nucleic acids encoding the peptide of the invention uses minigene constructs encoding multiple epitopes. To create a DNA sequence encoding the selected CTL epitopes (minigene) for expression in human cells, the amino acid sequences of the epitopes are reverse translated. A human codon usage table is used to guide the codon choice for each amino acid. These epitope-encoding DNA sequences are directly adjoined, creating a continuous polypeptide sequence. To optimize expression and/or immunogenicity, additional elements can be incorporated into the minigene design. Examples of amino acid sequence that could be reverse translated and included in the minigene sequence include: helper T lymphocyte, epitopes, a leader (signal) sequence, and an endoplasmic reticulum retention signal. In addition, MHC presentation of CTL epitopes may be improved by including synthetic (e.g. poly-alanine) or naturally-occurring flanking sequences adjacent to the CTL epitopes.

[0349] The minigene sequence is converted to DNA by assembling oligonucleotides that encode the plus and minus strands of the minigene. Overlapping oligonucleotides (30-100 bases long) are synthesized, phosphorylated, purified and annealed under appropriate conditions using well known techniques. The ends of the oligonucleotides are joined using T4 DNA ligase. This synthetic minigene, encoding the CTL epitope polypeptide, can then cloned into a desired expression vector.

[0350] Standard regulatory sequences well known to those of skill in the art are included in the vector to ensure expression in the target cells. Several vector elements are required: a promoter with a down-stream cloning site for minigene insertion; a polyadenylation signal for efficient transcription termination; an E. coli origin of replication; and an E. coli selectable marker (e.g. ampicillin or kanamycin resistance). Numerous promoters can be used for this purpose, e.g., the human cytomegalovirus (hCMV) promoter. See, U.S. Pat. Nos. 5,580,859 and 5,589,466 for other suitable promoter sequences.

[0351] Additional vector modifications may be desired to optimize minigene expression and immunogenicity. In some cases, introns are required for efficient gene expression, and one or more synthetic or naturally-occurring introns could be incorporated into the transcribed region of the minigene. The inclusion of mRNA stabilization sequences can also be considered for increasing minigene expression. It has recently been proposed that immuno stimulatory sequences (ISSs or CpGs) play a role in the immunogenicity of DNA′ vaccines. These sequences could be included in the vector, outside the minigene coding sequence, if found to enhance immunogenicity.

[0352] In some embodiments, a bicistronic expression vector, to allow production of the minigene-encoded epitopes and a second protein included to enhance or decrease immunogenicity can be used. Examples of proteins or polypeptides that could beneficially enhance the immune response if co-expressed include cytokines (e.g., IL2, IL12, GM-CSF), cytokine-inducing molecules (e.g. LeIF) or costimulatory molecules. Helper (HTL) epitopes could be joined to intracellular targeting signals and expressed separately from the CTL epitopes. This would allow direction of the HTL epitopes to a cell compartment different than the CTL epitopes. If required, this could facilitate more efficient entry of HTL epitopes into the MHC class II pathway, thereby improving CTL induction. In contrast to CTL induction, specifically decreasing the immune response by co-expression of immunosuppressive molecules (e.g. TGF-β) may be beneficial in certain diseases.

[0353] Once an expression vector is selected, the minigene is cloned into the polylinker region downstream of the promoter. This plasmid is transformed into an appropriate E. coli strain, and DNA is prepared using standard techniques. The orientation and DNA sequence of the minigene, as well as all other elements included in the vector, are confirmed using restriction mapping and DNA sequence analysis. Bacterial cells harboring the correct plasmid can be stored as a master cell bank and a working cell bank.

[0354] Purified plasmid DNA can be prepared for injection using a variety of formulations. The simplest of these is reconstitution of lyophilized DNA in sterile phosphate-buffer saline (PBS). A variety of methods have been described, and new techniques may become available. As noted herein, nucleic acids are conveniently formulated with cationic lipids. In addition, glycolipids, fusogenic liposomes, peptides and compounds referred to collectively as protective, interactive, non-condensing (PINC) could also be complexed to purified plasmid DNA to influence variables such as stability, intramuscular dispersion, or trafficking to specific organs or cell types.

[0355] Target cell sensitization can be used as a functional assay for expression and MHC class I presentation of minigene-encoded CTL epitopes. The plasmid DNA is introduced into a mammalian cell line that is suitable as a target for standard CTL chromium release assays. The transfection method used is dependent on the final formulation. Electroporation can be used for “naked” DNA, whereas cationic lipids allow direct in vitro transfection. A plasmid expressing green fluorescent protein (GFP) can be co-transfected to allow enrichment of transfected cells using fluorescence activated cell sorting (FACS). These cells are then chromium-51 labeled and used as target cells for epitope-specific CTL lines. Cytolysis, detected by 51 Cr release, indicates production of MHC presentation of mini gene-encoded CTL epitopes.

[0356] In vivo immunogenicity is a second approach for functional testing of minigene DNA formulations. Transgenic mice expressing appropriate human MHC molecules are immunized with the DNA product. The dose and route of administration are formulation dependent (e.g. FM for DNA in PBS, IP for lipid-complexed DNA). Twenty-one days after immunization, splenocytes are harvested and restimulated for 1 week in the presence of peptides encoding each epitope being tested. These effector cells (CTLs) are assayed for cytolysis of peptide-loaded, chromium-51 labeled target cells using standard techniques. Lysis of target cells sensitized by MHC loading of peptides corresponding to minigene-encoded epitopes demonstrates DNA vaccine function for in vivo induction of CTLs.

[0357] Peptides may be used to elicit CTL ex vivo, as well. The resulting CTL, can be used to treat chronic tumors in patients in need thereof that do not respond to other conventional forms of therapy, or does not respond to a peptide vaccine approach of therapy. Ex vivo CTL responses to a particular tumor antigen are induced by incubating in tissue culture the patient's CTL precursor cells (CTLp) together with a source of antigen-presenting cells (APC) and the appropriate peptide. After an appropriate incubation time (typically 1-4 weeks), in which the CTLp are activated and mature and expand into effector CTL, the cells are infused back into the patient, where they destroy their specific target cell (i.e., a tumor cell). In order to optimize the in vitro conditions for the generation of specific cytotoxic T cells, the culture of stimulator cells are maintained in an appropriate serum-free medium.

[0358] Prior to incubation of the stimulator cells with the cells to be activated, e.g., precursor CD8+ cells, an amount of antigenic peptide is added to the stimulator cell culture, of sufficient quantity to become loaded onto the human Class I molecules to be expressed on the surface of the stimulator cells. In the present invention, a sufficient amount of peptide is an amount that allows about 200, and preferably 200 or more, human Class I MHC molecules loaded with peptide to be expressed on the surface of each stimulator cell. Preferably, the stimulator cells are incubated with >2 μg/ml peptide. For example, the stimulator cells are incubates with >3, 4, 5, 10, 15, or more μg/ml peptide.

[0359] Resting or precursor CD8+ cells are then incubated in culture with the appropriate stimulator cells for a time period sufficient to activate the CD8+ cells. Preferably, the CD8+ cells are activated in an antigen-specific manner. The ratio of resting or precursor CD8+(effector) cells to stimulator cells may vary from individual to individual and may further depend upon variables such as the amenability of an individual's lymphocytes to culturing conditions and the nature and severity of the disease condition or other condition for which the within-described treatment modality is used. Preferably, however, the lymphocyte: stimulator cell ratio is in the range of about 30:1 to 300:1. The effector/stimulator culture may be maintained for as long a time as is necessary to stimulate a therapeutically useable or effective number of CD8+ cells.

[0360] The induction of CTL in vitro requires the specific recognition of peptides that are bound to allele specific MHC class I molecules on APC. The number of specific MHC/peptide complexes per APC is crucial for the stimulation of CTL, particularly in primary immune responses. While small amounts of peptide/MHC complexes per cell are sufficient to render a cell susceptible to lysis by CTL, or to stimulate a secondary CTL response, the successful activation of a CTL precursor (pCTL) during primary response requires a significantly higher number of MHC/peptide complexes. Peptide loading of empty major histocompatability complex molecules on cells allows the induction of primary cytotoxic T lymphocyte responses.

[0361] Since mutant cell lines do not exist for every human MHC allele, it is advantageous to use a technique to remove endogenous MHC-associated peptides from the surface of APC, followed by loading the resulting empty MHC molecules with the immunogenic peptides of interest. The use of non-transformed (non-tumorigenic), noninfected cells, and preferably, autologous cells of patients as APC is desirable for the design of CTL induction protocols directed towards development of ex vivo CTL therapies. This application discloses methods for stripping the endogenous MHC-associated peptides from the surface of APC followed by the loading of desired peptides.

[0362] A stable MHC class I molecule is a trimeric complex formed of the following elements: 1) a peptide usually of 8-10 residues, 2) a transmembrane heavy polymorphic protein chain which bears the peptide-binding site in its a1 and a2 domains, and 3) a non-covalently associated non-polymorphic light chain, p2microglobulin. Removing the bound peptides and/or dissociating the p2microglobulin from the complex renders the MHC class I molecules nonfunctional and unstable, resulting in rapid degradation. All MHC class I molecules isolated from PBMCs have endogenous peptides bound to them. Therefore, the first step is to remove all endogenous peptides bound to MHC class I molecules on the APC without causing their degradation before exogenous peptides can be added to them.

[0363] Two possible ways to free up MHC class I molecules of bound peptides include lowering the culture temperature from 37° C. to 26° C. overnight to destablize p2microglobulin and stripping the endogenous peptides from the cell using a mild acid treatment. The methods release previously bound peptides into the extracellular environment allowing new exogenous peptides to bind to the empty class I molecules. The cold-temperature incubation method enables exogenous peptides to bind efficiently to the MHC complex, but requires an overnight incubation at 26° C. which may slow the cell's metabolic rate. It is also likely that cells not actively synthesizing MHC molecules (e.g., resting PBMC) would not produce high amounts of empty surface MHC molecules by the cold temperature procedure.

[0364] Harsh acid stripping involves extraction of the peptides with trifluoroacetic acid, pH 2, or acid denaturation of the immunoaffinity purified class I-peptide complexes. These methods are not feasible for CTL induction, since it is important to remove the endogenous peptides while preserving APC viability and an optimal metabolic state which is critical for antigen presentation. Mild acid solutions of pH 3 such as glycine or citrate-phosphate buffers have been used to identify endogenous peptides and to identify tumor associated T cell epitopes. The treatment is especially effective, in that only the MHC class I molecules are destabilized (and associated peptides released), while other surface antigens remain intact, including MHC class II molecules. Most importantly, treatment of cells with the mild acid solutions do not affect the cell's viability or metabolic state. The mild acid treatment is rapid since the stripping of the endogenous peptides occurs in two minutes at 4° C. and the APC is ready to perform its function after the appropriate peptides are loaded. The technique is utilized herein to make peptide-specific APCs for the generation of primary antigen-specific CTL. The resulting APC are efficient in inducing peptide-specific CD8+ CTL.

[0365] Activated CD8+ cells may be effectively separated from the stimulator cells using one of a variety of known methods. For example, monoclonal antibodies specific for the stimulator cells, for the peptides loaded onto the stimulator cells, or for the CD8+ cells (or a segment thereof) may be utilized to bind their appropriate complementary ligand. Antibody-tagged molecules may then be extracted from the stimulator-effector cell admixture via appropriate means, e.g., via well-known immunoprecipitation or immunoassay methods.

[0366] Effective, cytotoxic amounts of the activated CD8+ cells can vary between in vitro and in vivo uses, as well as with the amount and type of cells that are the ultimate target of these killer cells. The amount can also vary depending on the condition of the patient and should be determined via consideration of all appropriate factors by the practitioner. Preferably, however, about 1×10⁶ to about 1×10¹², more preferably about 1×10⁸ to about 1×10¹¹, and even more preferably, about 1×10⁹ to about 1×10¹⁰ activated CD8+ cells are utilized for adult humans, compared to about 5×10⁶-5×10⁷ cells used in mice.

[0367] Preferably, as discussed herein, the activated CD 8+ cells are harvested from the cell culture prior to administration of the CD8+ cells to the individual being treated. It is important to note, however, that unlike other present and proposed treatment modalities, the present method uses a cell culture system that is not tumorigenic. Therefore, if complete separation of stimulator cells and activated CD8+ cells are not achieved, there is no inherent danger known to be associated with the administration of a small number of stimulator cells, whereas administration of mammalian tumor-promoting cells may be extremely hazardous.

[0368] Methods of re-introducing cellular components are known in the art and include procedures such as those exemplified in U.S. Pat. No. 4,844,893 to Honsik, et al. and U.S. Pat. No. 4,690,915 to Rosenberg. For example, administration of activated CD8+ cells via intravenous infusion is appropriate.

[0369] The practice of the present invention employs, unless otherwise indicated, conventional techniques of molecular biology (including recombinant techniques), microbiology, cell biology, biochemistry and immunology, which are well within the purview of the skilled artisan. Such techniques are explained fully in the literature, such as, “Molecular Cloning: A Laboratory Manual”, second edition (Sambrook, 1989); “Oligonucleotide Synthesis” (Gait, 1984); “Animal Cell Culture” (Freshney, 1987); “Methods in Enzymology” “Handbook of Experimental Immunology” (Wei, 1996); “Gene Transfer Vectors for Mammalian Cells” (Miller and Calos, 1987); “Current Protocols in Molecular Biology” (Ausubel, 1987); “PCR: The Polymerase Chain Reaction”, (Mullis, 1994); “Current Protocols in Immunology” (Coligan, 1991). These techniques are applicable to the production of the polynucleotides and polypeptides of the invention, and, as such, may be considered in making and practicing the invention. Particularly useful techniques for particular embodiments are discussed in the sections that follow.

[0370] The present invention provides methods of inducing a neoplasia/tumor specific immune response in a subject, vaccinating against a neoplasia/tumor, treating, alleviating a symptom of cancer, preventing or treating an infection, treating an autoimmune disease, or preventing transplant rejection in a subject by administering the subject a plurality of antigenic peptides or composition of the invention. According to the invention, the herein-described vaccine or immunogenic composition may be used for a patient that has been diagnosed as having cancer, or at risk of developing cancer.

[0371] The claimed combination of the invention is administered in an amount sufficient to induce a CTL response.

[0372] Any compositions or methods provided herein can be combined with one or more of any of the other compositions and methods provided herein.

[0373] The tumor specific neoantigen peptides and pharmaceutical compositions described herein can also be administered in a combination therapy with another agent, for example a therapeutic agent. By “agent” is meant any small molecule chemical compound, antibody, nucleic acid molecule, or polypeptide, or fragments thereof. In certain embodiments, the additional agents can be, but are not limited to, chemotherapeutic agents, anti-angiogenesis agents and agents that reduce immune-suppression.

[0374] “Combination therapy” is intended to embrace administration of therapeutic agents (e.g. neoantigenic peptides described herein) in a sequential manner, that is, wherein each therapeutic agent is administered at a different time, as well as administration of these therapeutic agents, or at least two of the therapeutic agents, in a substantially simultaneous manner. Substantially simultaneous administration can be accomplished, for example, by administering to the subject a single capsule having a fixed ratio of each therapeutic agent or in multiple, single capsules for each of the therapeutic agents. For example, one combination of the present invention may comprise a pooled sample of neoantigenic peptides administered at the same or different times, or they can be formulated as a single, co-formulated pharmaceutical composition comprising the peptides. As another example, a combination of the present invention (e.g., a pooled sample of tumor specific neoantigens) may be formulated as separate pharmaceutical compositions that can be administered at the same or different time. As used herein, the term “simultaneously” is meant to refer to administration of one or more agents at the same time. For example, in certain embodiments, the neoantigenic peptides are administered simultaneously. Simultaneously includes administration contemporaneously, that is during the same period of time. In certain embodiments, the one or more agents are administered simultaneously in the same hour, or simultaneously in the same day. Sequential or substantially simultaneous administration of each therapeutic agent can be effected by any appropriate route including, but not limited to, oral routes, intravenous routes, sub-cutaneous routes, intramuscular routes, direct absorption through mucous membrane tissues (e.g., nasal, mouth, vaginal, and rectal), and ocular routes (e.g., intravitreal, intraocular, etc.). The therapeutic agents can be administered by the same route or by different routes. For example, one component of a particular combination may be administered by intravenous injection while the other component(s) of the combination may be administered orally. The components may be administered in any therapeutically effective sequence. The phrase “combination” embraces groups of compounds or non-drug therapies useful as part of a combination therapy.

[0375] The neoplasia vaccine or immunogenic composition can be administered before, during, or after administration of the additional agent. In embodiments, the neoplasia vaccine or immunogenic composition is administered before the first administration of the additional agent. In other embodiments, the neoplasia vaccine or immunogenic composition is administered after the first administration of the additional therapeutic agent (e.g., 1, 2, 3, 4, 5, 6, 7, 8, 9, 10, 11, 12, 13, 14 days or more). In embodiments, the neoplasia vaccine or immunogenic composition is administered simultaneously with the first administration of the additional therapeutic agent.

[0376] The therapeutic agent is for example, a chemotherapeutic or biotherapeutic agent, radiation, or immunotherapy. Any suitable therapeutic treatment for a particular cancer may be administered. Examples of chemotherapeutic and biotherapeutic agents include, but are not limited to, an angiogenesis inhibitor, such ashydroxy angiostatin K1-3, DL-a-Difluorom ethyl-ornithine, endostatin, fumagillin, genistein, minocycline, staurosporine, and thalidomide; a DNA intercaltor/cross-linker, such as Bleomycin, Carboplatin, Carmustine, Chlorambucil, Cyclophosphamide, cis-Diammineplatinum(II) dichloride (Cisplatin), Melphalan, Mitoxantrone, and Oxaliplatin; a DNA synthesis inhibitor, such as (±)-Amethopterin (Methotrexate), 3-Amino-1,2,4-benzotriazine 1,4-di oxide, Aminopterin, Cytosine β-D-arabinofuranoside, 5-Fluoro-5′-deoxyuridine, 5-Fluorouracil, Ganciclovir, Hydroxyurea, and Mitomycin C; a DNA-RNA transcription regulator, such as Actinomycin D, Daunorubicin, Doxorubicin, Homoharringtonine, and Idarubicin; an enzyme inhibitor, such as S(+)-Camptothecin, Curcumin, (−)-Deguelin, 5,6-Dichlorobenzimidazole I-β-D-ribofuranoside, Etoposide, Formestane, Fostriecin, Hispidin, 2-Imino-1-imidazoli-dineacetic acid (Cyclocreatine), Mevinolin, Trichostatin A, Tyrphostin AG 34, and Tyrphostin AG 879; a gene regulator, such as 5-Aza-2′-deoxycytidine, 5-Azacytidine, Cholecalciferol (Vitamin D3), 4-Hydroxytamoxifen, Melatonin, Mifepristone, Raloxifene, all trans-Retinal (Vitamin A aldehyde), Retinoic acid all trans (Vitamin A acid), 9-cis-Retinoic Acid, 13-cis-Retinoic acid, Retinol (Vitamin A), Tamoxifen, and Troglitazone; a microtubule inhibitor, such as Colchicine, docetaxel, Dolastatin 15, Nocodazole, Paclitaxel, Podophyllotoxin, Rhizoxin, Vinblastine, Vincristine, Vindesine, and Vinorelbine (Navelbine); and an unclassified therapeutic agent, such as 17-(Allylamino)-17-demethoxygeldanamycin, 4-Amino-1,8-naphthalimide, Apigenin, Brefeldin A, Cimetidine, Dichloromethylene-diphosphonic acid, Leuprolide (Leuprorelin), Luteinizing Hormone-Releasing Hormone, Pifithrin-a, Rapamycin, Sex hormone-binding globulin, Thapsigargin, and Urinary trypsin inhibitor fragment (Bikunin). The therapeutic agent may be altretamine, amifostine, asparaginase, capecitabine, cladribine, cisapride, cytarabine, dacarbazine (DTIC), dactinomycin, dronabinol, epoetin alpha, filgrastim, fludarabine, gemcitabine, granisetron, ifosfamide, irinotecan, lansoprazole, levamisole, leucovorin, megestrol, mesna, metoclopramide, mitotane, omeprazole, ondansetron, pilocarpine, prochloroperazine, or topotecan hydrochloride. The therapeutic agent may be a monoclonal antibody or small molecule such as rituximab (Rituxan®), alemtuzumab (Campath®), Bevacizumab (Avastin®), Cetuximab (Erbitux®), panitumumab (Vectibix®), and trastuzumab (Herceptin®), Vemurafenib (Zelboraf®) imatinib mesylate (Gleevec®), erlotinib (Tarceva®), gefitinib (Iressa®), Vismodegib (Erivedge™), 90Y-ibritumomab tiuxetan, 1311-tositumomab, ado-trastuzumab emtansine, lapatinib (Tykerb®), pertuzumab (Perjeta™), ado-trastuzumab emtansine (Kadcyla™) regorafenib (Stivarga®), sunitinib (Sutent®), Denosumab (Xgeva®), sorafenib (Nexavar®), pazopanib (Votrient®), axitinib (Inlyta®), dasatinib (Sprycel®), nilotinib (Tasigna®), bosutinib (Bosulif®), ofatumumab (Arzerra®), obinutuzumab (Gazyva™), ibrutinib (Imbruvica™) idelalisib (Zydelig®), crizotinib (Xalkori®), erlotinib (Tarceva®), afatinib dimaleate (Gilotrif®), ceritinib (LDK378/Zykadia), Tositumomab and 1311-tositumomab (Bexxar®), ibritumomab tiuxetan (Zevalin®), brentuximab vedotin (Adcetris®), bortezomib (Velcade®), siltuximab (Sylvant™), trametinib (Mekinist®), dabrafenib (Tafinlar®), pembrolizumab (Keytruda®), carfilzomib (Kyprolis®), Ramucirumab (Cyramza™), Cabozantinib (Cometriq™), vandetanib (Caprelsa®), Optionally, the therapeutic agent is a neoantigen. The therapeutic agent may be a cytokine such as interferons (INFs), interleukins (ILs), or hematopoietic growth factors. The therapeutic agent may be INF-a, IL-2, Aldesleukin, IL-2, Erythropoietin, Granulocyte-macrophage colony-stimulating factor (GM-CSF) or granulocyte colony-stimulating factor. The therapeutic agent may be a targeted therapy such as toremifene (Fareston®), fulvestrant (Faslodex®), anastrozole (Arimidex®), exemestane (Aromasin®), letrozole (Femara®), ziv-aflibercept (Zaltrap®), Alitretinoin (Panretin®), temsirolimus (Torisel®), Tretinoin (Vesanoid®), denileukin diftitox (Ontak®), vonnostat (Zolinza®), romidepsin (Istodax®), bexarotene (Targretin®), pralatrexate (Folotyn®), lenaliomide (Revlimid®), belinostat (Beleodaq™), lenaliomide (Revlimid®), pomalidomide (Pomalyst®), Cabazitaxel (Jevtana®), enzalutamide (Xtandi®), abiraterone acetate (Zytiga®), radium 223 chloride (Xofigo®), or everolimus (Afinitor®). Aditionally, the therapeutic agent may be an epigenetic targeted drug such as FIDAC inhibitors, kinase inhibitors, DNA methyltransferase inhibitors, histone demethylase inhibitors, or histone methylation inhibitors. The epigenetic drugs may be Azacitidine (Vidaza), Decitabine (Dacogen), Vorinostat (Zolinza), Romidepsin (Istodax), or Ruxolitinib (Jakafi). For prostate cancer treatment, a preferred chemotherapeutic agent with which anti-CTLA-4 can be combined is paclitaxel (TAXOL).

[0377] In certain embodiments, the one or more additional agents are one or more anti-glucocorticoid-induced tumor necrosis factor family receptor (GITR) agonistic antibodies. GITR is a costimulatory molecule for T lymphocytes, modulates innate and adaptive immune system and has been found to participate in a variety of immune responses and inflammatory processes. GITR was originally described by Nocentini et al. after being cloned from dexamethasone-treated murine T cell hybridomas (Nocentini et al. Proc Natl Acad Sci USA 94:6216-6221.1997). Unlike CD28 and CTLA-4, GITR has a very low basal expression on naive CD4+ and CD8+ T cells (Ronchetti et al. Eur J Immunol 34:613-622. 2004). The observation that GITR stimulation has immunostimulatory effects in vitro and induced autoimmunity in vivo prompted the investigation of the antitumor potency of triggering this pathway. A review of Modulation Of Ctla 4 And Gitr For Cancer Immunotherapy can be found in Cancer Immunology and Immunotherapy (Avogadri et al. Current Topics in Microbiology and Immunology 344. 2011). Other agents that can contribute to relief of immune suppression include checkpoint inhibitors targeted at another member of the CD28/CTLA4 Ig superfamily such as BTLA, LAG3, ICOS, PDL1 or KIR (Page et a, Annual Review of Medicine 65:27 (2014)). In further additional embodiments, the checkpoint inhibitor is targeted at a member of the TNFR superfamily such as CD40, OX40, CD 137, GITR, CD27 or TEVI-3. In some cases targeting a checkpoint inhibitor is accomplished with an inhibitory antibody or similar molecule. In other cases, it is accomplished with an agonist for the target; examples of this class include the stimulatory targets OX40 and GITR.

[0378] In certain embodiments, the one or more additional agents are synergistic in that they increase immunogenicity after treatment. In one embodiment the additional agent allows for lower toxicity and/or lower discomfort due to lower doses of the additional therapeutic agents or any components of the combination therapy described herein. In another embodiment the additional agent results in longer lifespan due to increased effectiveness of the combination therapy described herein. Chemotherapeutic treatments that enhance the immunological response in a patient have been reviewed (Zitvogel et al., Immunological aspects of cancer chemotherapy. Nat Rev Immunol. 2008 January; 8(1):59-73). Additionally, chemotherapeutic agents can be administered safely with immunotherapy without inhibiting vaccine specific T-cell responses (Perez et al., A new era in anticancer peptide vaccines. Cancer May 2010). In one embodiment the additional agent is administered to increase the efficacy of the therapy described herein. In one embodiment the additional agent is a chemotherapy treatment. In one embodiment low doses of chemotherapy potentiate delayed-type hypersensitivity (DTH) responses. In one embodiment the chemotheray agent targets regulatory T-cells. In one embodiment cyclophosphamide is the therapeutic agent. In one embodiment cyclophosphamide is administered prior to vaccination. In one embodiment cyclophosphamide is administered as a single dose before vaccination (Walter et al., Multipeptide immune response to cancer vaccine IMA901 after single-dose cyclophosphamide associates with longer patient survival. Nature Medicine; 18:8 2012). In another embodiment, cyclophosphamide is administered according to a metronomic program, where a daily dose is administered for one month (Ghiringhelli et al., Metronomic cyclophosphamide regimen selectively depletes CD4+CD25+ regulatory T cells and restores T and NK effector functions in end stage cancer patients. Cancer Immunol Immunother 2007 56:641-648). In another embodiment taxanes are administered before vaccination to enhance T-cell and NK-cell functions (Zitvogel et al., 2008, Nat. Rev. Immunol., 8(1):59-73). In another embodiment a low dose of a chemotherapeutic agent is administered with the therapy described herein. In one embodiment the chemotherapeutic agent is estramustine. In one embodiment the cancer is hormone resistant prostate cancer. A >50% decrease in serum prostate specific antigen (PSA) was seen in 8.7% of advanced hormone refractory prostate cancer patients by personalized vaccination alone, whereas such a decrease was seen in 54% of patients when the personalized vaccination was combined with a low dose of estramustine (Itoh et al., Personalized peptide vaccines: A new therapeutic modality for cancer. Cancer Sci 2006; 97: 970-976). In another embodiment glucocorticoids are administered with or before the therapy described herein (Zitvogel et al., 2008, Nat. Rev. Immunol., 8(1):59-73). In another embodiment glucocorticoids are administered after the therapy described herein. In another embodiment Gemcitabine is administered before, simultaneously, or after the therapy described herein to enhance the frequency of tumor specific CTL precursors (Zitvogel et al., 2008, Nat. Rev. Immunol., 8(1):59-73). In another embodiment 5-fluorouracil is administered with the therapy described herein as synergistic effects were seen with a peptide based vaccine (Zitvogel et al., 2008, Nat. Rev. Immunol., 8(1):59-73). In another embodiment an inhibitor of Braf, such as Vemurafenib, is used as an additional agent. Braf inhibition has been shown to be associated with an increase in melanoma antigen expression and T-cell infiltrate and a decrease in immunosuppressive cytokines in tumors of treated patients (Frederick et al., BRAF inhibition is associated with enhanced melanoma antigen expression and a more favorable tumor microenvironment in patients with metastatic melanoma. Clin Cancer Res. 2013; 19: 1225-1231). In another embodiment an inhibitor of tyrosine kinases is used as an additional agent. In one embodiment the tyrosine kinase inhibitor is used before vaccination with the therapy described herein. In one embodiment the tyrosine kinase inhibitor is used simultaneously with the therapy described herein. In another embodiment the tyrosine kinase inhibitor is used to create a more immune permissive environment. In another embodiment the tyrosine kinase inhibitor is sunitinib or imatinib mesylate. It has previously been shown that favorable outcomes could be achieved with sequential administration of continuous daily dosing of sunitinib and recombinant vaccine (Farsaci et al., Consequence of dose scheduling of sunitinib on host immune response elements and vaccine combination therapy. Int J Cancer; 130: 1948-1959). Sunitinib has also been shown to reverse type-1 immune suppression using a daily dose of 50 mg/day (Finke et al., Sunitinib Reverses Type-1 Immune Suppression and Decreases T-Regulatory Cells in Renal Cell Carcinoma Patients. Clin Cancer Res 2008; 14(20)). In another embodiment targeted therapies are administered in combination with the therapy described herein. Doses of targeted therapies has been described previously (Alvarez, Present and future evolution of advanced breast cancer therapy. Breast Cancer Research 2010, 12(Suppl 2): S1). In another embodiment temozolomide is administered with the therapy described herein. In one embodiment temozolomide is administered at 200 mg/day for 5 days every fourth week of a combination therapy with the therapy described herein. Results of a similar strategy have been shown to have low toxicity (Kyte et al., Tel om erase Peptide Vaccination Combined with Temozolomide: A Clinical Trial in Stage IV Melanoma Patients. Clin Cancer Res; 17(13) 2011). In another embodiment the therapy is administered with an additional therapeutic agent that results in lymphopenia. In one embodiment the additional agent is temozolomide. An immune response can still be induced under these conditions (Sampson et al., Greater chemotherapy-induced lymphopenia enhances tumor-specific immune responses that eliminate EGFRvIII-expressing tumor cells in patients with glioblastoma. Neuro-Oncology 13(3):324-333, 2011).

[0379] Patients in need thereof may receive a series of priming vaccinations with a mixture of tumor-specific peptides. Additionally, over a 4 week period the priming may be followed by two boosts during a maintenance phase. All vaccinations are subcutaneously delivered. The vaccine or immunogenic composition is evaluated for safety, tolerability, immune response and clinical effect in patients and for feasibility of producing vaccine or immunogenic composition and successfully initiating vaccination within an appropriate time frame. The first cohort can consist of 5 patients, and after safety is adequately demonstrated, an additional cohort of 10 patients may be enrolled. Peripheral blood is extensively monitored for peptide-specific T-cell responses and patients are followed for up to two years to assess disease recurrence.

[0380] Administering a combination therapy consistent with standard of care. In another aspect, the therapy described herein provides selecting the appropriate point to administer a combination therapy in relation to and within the standard of care for the cancer being treated for a patient in need thereof. The studies described herein show that the combination therapy can be effectively administered even within the standard of care that includes surgery, radiation, or chemotherapy. The standards of care for the most common cancers can be found on the web site of National Cancer Institute (www.cancer.gov/cancertopics). The standard of care is the current treatment that is accepted by medical experts as a proper treatment for a certain type of disease and that is widely used by healthcare professionals. Standard or care is also called best practice, standard medical care, and standard therapy. Standards of Care for cancer generally include surgery, lymph node removal, radiation, chemotherapy, targeted therapies, antibodies targeting the tumor, and immunotherapy. Immunotherapy can include checkpoint blockers (CBP), chimeric antigen receptors (CARs), and adoptive T-cell therapy. The combination therapy described herein can be incorporated within the standard of care. The combination therapy described herein may also be administered where the standard of care has changed due to advances in medicine.

[0381] Incorporation of the combination therapy described herein may depend on a treatment step in the standard of care that can lead to activation of the immune system. Treatment steps that can activate and function synergistically with the combination therapy have been described herein. The therapy can be advantageously administered simultaneously or after a treatment that activates the immune system.

[0382] Incorporation of the combination therapy described herein may depend on a treatment step in the standard of care that causes the immune system to be suppressed. Such treatment steps may include irradiation, high doses of alkylating agents and/or methotrexate, steroids such as glucosteroids, surgery, such as to remove the lymph nodes, imatinib mesylate, high doses of T F, and taxanes (Zitvogel et al., 2008, Nat. Rev. Immunol., 8(1):59-73). The combination therapy may be administered before such steps or may be administered after.

[0383] In one embodiment the combination therapy may be administered after bone marrow transplants and peripheral blood stem cell transplantation. Bone marrow transplantation and peripheral blood stem cell transplantation are procedures that restore stem cells that were destroyed by high doses of chemotherapy and/or radiation therapy. After being treated with high-dose anticancer drugs and/or radiation, the patient receives harvested stem cells, which travel to the bone marrow and begin to produce new blood cells. A “mini-transplant” uses lower, less toxic doses of chemotherapy and/or radiation to prepare the patient for transplant. A “tandem transplant” involves two sequential courses of high-dose chemotherapy and stem cell transplant. In autologous transplants, patients receive their own stem cells. In syngeneic transplants, patients receive stem cells from their identical twin. In allogeneic transplants, patients receive stem cells from their brother, sister, or parent. A person who is not related to the patient (an unrelated donor) also may be used. In some types of leukemia, the graft-versus-tumor (GVT) effect that occurs after allogeneic BMT and PBSCT is crucial to the effectiveness of the treatment. GVT occurs when white blood cells from the donor (the graft) identify the cancer cells that remain in the patient's body after the chemotherapy and/or radiation therapy (the tumor) as foreign and attack them. Immunotherapy with the combination therapy described herein can take advantage of this by vaccinating after a transplant. Additionally, the transferred cells may be presented with neoantigens of the combination therapy described herein before transplantation.

[0384] In one embodiment the combination therapy is administered to a patient in need thereof with a cancer that requires surgery. In one embodiment the combination therapy described herein is administered to a patient in need thereof in a cancer where the standard of care is primarily surgery followed by treatment to remove possible micro-metastases, such as breast cancer. Breast cancer is commonly treated by various combinations of surgery, radiation therapy, chemotherapy, and hormone therapy based on the stage and grade of the cancer. Adjuvant therapy for breast cancer is any treatment given after primary therapy to increase the chance of long-term survival. Neoadjuvant therapy is treatment given before primary therapy. Adjuvant therapy for breast cancer is any treatment given after primary therapy to increase the chance of long-term disease-free survival. Primary therapy is the main treatment used to reduce or eliminate the cancer. Primary therapy for breast cancer usually includes surgery, a mastectomy (removal of the breast) or a lumpectomy (surgery to remove the tumor and a small amount of normal tissue around it; a type of breast-conserving surgery). During either type of surgery, one or more nearby lymph nodes are also removed to see if cancer cells have spread to the lymphatic system. When a woman has breast-conserving surgery, primary therapy almost always includes radiation therapy. Even in early-stage breast cancer, cells may break away from the primary tumor and spread to other parts of the body (metastasize). Therefore, doctors give adjuvant therapy to kill any cancer cells that may have spread, even if they cannot be detected by imaging or laboratory tests.

[0385] In one embodiment the combination therapy is administered consistent with the standard of care for Ductal carcinoma in situ (DCIS). The standard of care for this breast cancer type is: 1. Breast-conserving surgery and radiation therapy with or without tamoxifen; 2. Total mastectomy with or without tamoxifen; 3. Breast-conserving surgery without radiation therapy. The combination therapy may be administered before breast conserving surgery or total mastectomy to shrink the tumor before surgery. In another embodiment the combination therapy can be administered as an adjuvant therapy to remove any remaining cancer cells.

[0386] In another embodiment patients diagnosed with stage I, II, IIIA, and Operable IIIC breast cancer are treated with the combination therapy as described herein. The standard of care for this breast cancer type is: 1. Local-regional treatment: Breast-conserving therapy (lumpectomy, breast radiation, and surgical staging of the axilla), Modified radical mastectomy (removal of the entire breast with level I-II axillary dissection) with or without breast reconstruction, Sentinel node biopsy. 2. Adjuvant radiation therapy postmastectomy in axillary node-positive tumors: For one to three nodes: unclear role for regional radiation (infra/supraclavicular nodes, internal mammary nodes, axillary nodes, and chest wall). For more than four nodes or extranodal involvement: regional radiation is advised. 3. Adjuvant systemic therapy. In one embodiment the combination therapy is administered as a neoadjuvant therapy to shrink the tumor. In another embodiment the combination is administered as an adjuvant systemic therapy.

[0387] In another embodiment patients diagnosed with inoperable stage IIIB or IIIC or inflammatory breast cancer are treated with the combination therapy as described herein. The standard of care for this breast cancer type is: 1. Multimodality therapy delivered with curative intent is the standard of care for patients with clinical stage IIIB disease. 2. Initial surgery is generally limited to biopsy to permit the determination of histology, estrogen-receptor (ER) and progesterone-receptor (PR) levels, and human epidermal growth factor receptor 2 (HER2/neu) overexpression. Initial treatment with anthracycline-based chemotherapy and/or taxane-based therapy is standard. For patients who respond to neoadjuvant chemotherapy, local therapy may consist of total mastectomy with axillary lymph node dissection followed by postoperative radiation therapy to the chest wall and regional lymphatics. Breast-conserving therapy can be considered in patients with a good partial or complete response to neoadjuvant chemotherapy. Subsequent systemic therapy may consist of further chemotherapy. Hormone therapy should be administered to patients whose tumors are ER-positive or unknown. All patients should be considered candidates for clinical trials to evaluate the most appropriate fashion in which to administer the various components of multimodality regimens.

[0388] In one embodiment the combination therapy is administered as part of the various components of multimodality regimens. In another embodiment the combination therapy is administered before, simultaneously with, or after the multimodality regimens. In another embodiment the combination therapy is administered based on synergism between the modalities. In another embodiment the combination therapy is administered after treatment with anthracycline-based chemotherapy and/or taxane-based therapy (Zitvogel et al., 2008, Nat. Rev. Immunol., 8(1):59-73). Treatment after administering the combination therapy may negatively affect dividing effector T-cells. The combination therapy may also be administered after radiation.

[0389] In another embodiment the combination therapy described herein is used in the treatment in a cancer where the standard of care is primarily not surgery and is primarily based on systemic treatments, such as Chronic Lymphocytic Leukemia (CLL).

[0390] In another embodiment patients diagnosed with stage I, II, III, and IV Chronic Lymphocytic Leukemia are treated with the combination therapy as described herein. The standard of care for this cancer type is: 1. Observation in asymptomatic or minimally affected patients, 2. Rituximab, 3. Ofatumomab, 4. Oral alkylating agents with or without corticosteroids, 5. Fludarabine, 2-chlorodeoxyadenosine, or pentostatin, 6. Bendamustine, 7. Lenalidomide and 8. Combination chemotherapy. Combination chemotherapy regimens include the following: Fludarabine plus cyclophosphamide plus rituximab. o Fludarabine plus rituximab as seen in the CLB-9712 and CLB-9011 trials, o Fludarabine plus cyclophosphamide versus fludarabine plus cyclophosphamide plus rituximab, Pentostatin plus cyclophosphamide plus rituximab as seen in the MAYO-MC0183 trial, for example, Ofatumumab plus fludarabine plus cyclophosphamide, CVP: cyclophosphamide plus vincristine plus prednisone, CHOP: cyclophosphamide plus doxorubicin plus vincristine plus prednisone, Fludarabine plus cyclophosphamide versus fludarabine as seen in the E2997 trial [NCT00003764] and the LRF-CLL4 trial, for example, Fludarabine plus chlorambucil as seen in the CLB-9011 trial, for example. 9. Involved-field radiation therapy. 10. Alemtuzumab 11. Bone marrow and peripheral stem cell transplantations are under clinical evaluation. 12. Ibrutinib

[0391] In one embodiment the combination therapy is administered before, simultaneously with or after treatment with Rituximab or Ofatumomab. As these are monoclonal antibodies that target B-cells, treatment with the combination therapy may be synergistic. In another embodiment the combination therapy is administered after treatment with oral alkylating agents with or without corticosteroids, and Fludarabine, 2-chlorodeoxyadenosine, or pentostatin, as these treatments may negatively affect the immune system if administered before. In one embodiment bendamustine is administered with the combination therapy in low doses based on the results for prostate cancer described herein. In one embodiment the combination therapy is administered after treatment with bendamustine.

[0392] In another embodiment, therapies targeted to specific recurrent mutations in genes that include extracellular domains are used in the treatment of a patient in need thereof suffering from cancer. The genes may advantageously be well-expressed genes. Well expressed may be expressed in “transcripts per million” (TPM). A TPM greater than 100 is considered well expressed. Well expressed genes may be FGFR3, ERBB3, EGFR, MUC4, PDGFRA, MMP12, TMEM52, and PODXL. The therapies may be a ligand capable of binding to an extracellular neoantigen epitope. Such ligands are well known in the art and may include therapeutic antibodies or fragments thereof, antibody-drug conjugates, engineered T cells, or aptamers. Engineered T cells may be chimeric antigen receptors (CARs). Antibodies may be fully humanized, humanized, or chimeric. The antibody fragments may be a nanobody, Fab, Fab′, (Fab′)2, Fv, ScFv, diabody, triabody, tetrabody, Bis-scFv, minibody, Fab2, or Fab3 fragment. Antibodies may be developed against tumor-specific neoepitopes using known methods in the art.

### Adoptive Cell Transfer (ACT)

[0393] In certain embodiments, immune cells specific to an identified antigenic peptide that binds to a subject specific HLA allele is used in treatment. For example, CD8+ T cells that express a TCR or CAR specific for the peptide, or dendritic cells that are loaded with one or more peptides are transferred to a subject in need thereof. As used herein, “ACT”, “adoptive cell therapy” and “adoptive cell transfer” may be used interchangeably. In certain embodiments, Adoptive cell therapy (ACT) can refer to the transfer of cells to a patient with the goal of transferring the functionality and characteristics into the new host by engraftment of the cells (see, e.g., Mettananda et al., Editing an α-globin enhancer in primary human hematopoietic stem cells as a treatment for β-thalassemia, Nat Commun. 2017 Sep. 4; 8(1):424). As used herein, the term “engraft” or “engraftment” refers to the process of cell incorporation into a tissue of interest in vivo through contact with existing cells of the tissue. Adoptive cell therapy (ACT) can refer to the transfer of cells, most commonly immune-derived cells, back into the same patient or into a new recipient host with the goal of transferring the immunologic functionality and characteristics into the new host. If possible, use of autologous cells helps the recipient by minimizing GVHD issues. The adoptive transfer of autologous tumor infiltrating lymphocytes (TIL) (Besser et al., (2010) Clin. Cancer Res 16 (9) 2646-55; Dudley et al., (2002) Science 298 (5594): 850-4; and Dudley et al., (2005) Journal of Clinical Oncology 23 (10): 2346-57.) or genetically re-directed peripheral blood mononuclear cells (Johnson et al., (2009) Blood 114 (3): 535-46; and Morgan et al., (2006) Science 314(5796) 126-9) has been used to successfully treat patients with advanced solid tumors, including melanoma and colorectal carcinoma, as well as patients with CD19-expressing hematologic malignancies (Kalos et al., (2011) Science Translational Medicine 3 (95): 95ra73). In certain embodiments, allogenic cells immune cells are transferred (see, e.g., Ren et al., (2017) Clin Cancer Res 23 (9) 2255-2266). As described further herein, allogenic cells can be edited to reduce alloreactivity and prevent graft-versus-host disease. Thus, use of allogenic cells allows for cells to be obtained from healthy donors and prepared for use in patients as opposed to preparing autologous cells from a patient after diagnosis.

[0394] Aspects of the invention involve the adoptive transfer of immune system cells, such as T cells, specific for selected antigens, such as tumor associated antigens or tumor specific neoantigens (see, e.g., Maus et al., 2014, Adoptive Immunotherapy for Cancer or Viruses, Annual Review of Immunology, Vol. 32: 189-225; Rosenberg and Restifo, 2015, Adoptive cell transfer as personalized immunotherapy for human cancer, Science Vol. 348 no. 6230 pp. 62-68; Restifo et al., 2015, Adoptive immunotherapy for cancer: harnessing the T cell response. Nat. Rev. Immunol. 12(4): 269-281; and Jenson and Riddell, 2014, Design and implementation of adoptive therapy with chimeric antigen receptor-modified T cells. Immunol Rev. 257(1): 127-144; and Rajasagi et al., 2014, Systematic identification of personal tumor-specific neoantigens in chronic lymphocytic leukemia. Blood. 2014 Jul. 17; 124(3):453-62).

[0395] In certain embodiments, an antigen (such as a tumor antigen) to be targeted in adoptive cell therapy (such as particularly CAR or TCR T-cell therapy) of a disease (such as particularly of tumor or cancer) may be selected from a group consisting of: B cell maturation antigen (BCMA) (see, e.g., Friedman et al., Effective Targeting of Multiple BCMA-Expressing Hematological Malignancies by Anti-BCMA CAR T Cells, Hum Gene Ther. 2018 Mar. 8; Berdeja J G, et al. Durable clinical responses in heavily pretreated patients with relapsed/refractory multiple myeloma: updated results from a multicenter study of bb2121 anti-Bcma CAR T cell therapy. Blood. 2017; 130:740; and Mouhieddine and Ghobrial, Immunotherapy in Multiple Myeloma: The Era of CAR T Cell Therapy, Hematologist, May-June 2018, Volume 15, issue 3); PSA (prostate-specific antigen); prostate-specific membrane antigen (PSMA); PSCA (Prostate stem cell antigen); Tyrosine-protein kinase transmembrane receptor ROR1; fibroblast activation protein (FAP); Tumor-associated glycoprotein 72 (TAG72); Carcinoembryonic antigen (CEA); Epithelial cell adhesion molecule (EPCAM); Mesothelin; Human Epidermal growth factor Receptor 2 (ERBB2 (Her2/neu)); Prostate; Prostatic acid phosphatase (PAP); elongation factor 2 mutant (ELF2M); Insulin-like growth factor 1 receptor (IGF-1R); gplOO; BCR-ABL (breakpoint cluster region-Abelson); tyrosinase; New York esophageal squamous cell carcinoma 1 (NY-ESO-1); κ-light chain, LAGE (L antigen); MAGE (melanoma antigen); Melanoma-associated antigen 1 (MAGE-A1); MAGE A3; MAGE A6; legumain; Human papillomavirus (HPV) E6; HPV E7; prostein; survivin; PCTA1 (Galectin 8); Melan-A/MART-1; Ras mutant; TRP-1 (tyrosinase related protein 1, or gp75); Tyrosinase-related Protein 2 (TRP2); TRP-2/INT2 (TRP-2/intron 2); RAGE (renal antigen); receptor for advanced glycation end products 1 (RAGE1); Renal ubiquitous 1, 2 (RU1, RU2); intestinal carboxyl esterase (iCE); Heat shock protein 70-2 (HSP70-2) mutant; thyroid stimulating hormone receptor (TSHR); CD123; CD171; CD19; CD20; CD22; CD26; CD30; CD33; CD44v7/8 (cluster of differentiation 44, exons 7/8); CD53; CD92; CD100; CD148; CD150; CD200; CD261; CD262; CD362; CS-1 (CD2 subset 1, CRACC, SLAMF7, CD319, and 19A24); C-type lectin-like molecule-1 (CLL-1); ganglioside GD3 (aNeu5Ac(2-8)aNeu5Ac(2-3)bDGalp(1-4)bDGlcp(1-1)Cer); Tn antigen (Tn Ag); Fms-Like Tyrosine Kinase 3 (FLT3); CD38; CD138; CD44v6; B7H3 (CD276); KIT (CD117); Interleukin-13 receptor subunit alpha-2 (IL-13Ra2); Interleukin 11 receptor alpha (IL-11Ra); prostate stem cell antigen (PSCA); Protease Serine 21 (PRSS21); vascular endothelial growth factor receptor 2 (VEGFR2); Lewis(Y) antigen; CD24; Platelet-derived growth factor receptor beta (PDGFR-beta); stage-specific embryonic antigen-4 (SSEA-4); Mucin 1, cell surface associated (MUC1); mucin 16 (MUC16); epidermal growth factor receptor (EGFR); epidermal growth factor receptor variant III (EGFRvIII); neural cell adhesion molecule (NCAM); carbonic anhydrase IX (CAIX); Proteasome (Prosome, Macropain) Subunit, Beta Type, 9 (LMP2); ephrin type-A receptor 2 (EphA2); Ephrin B2; Fucosyl GM1; sialyl Lewis adhesion molecule (sLe); ganglioside GM3 (aNeu5Ac(2-3)bDGalp(1-4)bDGlcp(1-1)Cer); TGS5; high molecular weight-melanoma-associated antigen (HMWMAA); o-acetyl-GD2 ganglioside (OAcGD2); Folate receptor alpha; Folate receptor beta; tumor endothelial marker 1 (TEM1/CD248); tumor endothelial marker 7-related (TEM7R); claudin 6 (CLDN6); G protein-coupled receptor class C group 5, member D (GPRC5D); chromosome X open reading frame 61 (CXORF61); CD97; CD179a; anaplastic lymphoma kinase (ALK); Polysialic acid; placenta-specific 1 (PLAC1); hexasaccharide portion of globoH glycoceramide (GloboH); mammary gland differentiation antigen (NY-BR-1); uroplakin 2 (UPK2); Hepatitis A virus cellular receptor 1 (HAVCR1); adrenoceptor beta 3 (ADRB3); pannexin 3 (PANX3); G protein-coupled receptor 20 (GPR20); lymphocyte antigen 6 complex, locus K 9 (LY6K); Olfactory receptor 51E2 (OR51E2); TCR Gamma Alternate Reading Frame Protein (TARP); Wilms tumor protein (WT1); ETS translocation-variant gene 6, located on chromosome 12p (ETV6-AML); sperm protein 17 (SPA17); X Antigen Family, Member 1A (XAGE1); angiopoietin-binding cell surface receptor 2 (Tie 2); CT (cancer/testis (antigen)); melanoma cancer testis antigen-1 (MAD-CT-1); melanoma cancer testis antigen-2 (MAD-CT-2); Fos-related antigen 1; p53; p53 mutant; human Telomerase reverse transcriptase (hTERT); sarcoma translocation breakpoints; melanoma inhibitor of apoptosis (ML-IAP); ERG (transmembrane protease, serine 2 (TMPRSS2) ETS fusion gene); N-Acetyl glucosaminyl-transferase V (NA17); paired box protein Pax-3 (PAX3); Androgen receptor; Cyclin B1; Cyclin D1; v-myc avian myelocytomatosis viral oncogene neuroblastoma derived homolog (MYCN); Ras Homolog Family Member C (RhoC); Cytochrome P450 1B1 (CYP1B1); CCCTC-Binding Factor (Zinc Finger Protein)-Like (BORIS); Squamous Cell Carcinoma Antigen Recognized By T Cells-1 or 3 (SART1, SART3); Paired box protein Pax-5 (PAX5); proacrosin binding protein sp32 (OY-TES1); lymphocyte-specific protein tyrosine kinase (LCK); A kinase anchor protein 4 (AKAP-4); synovial sarcoma, X breakpoint-1, -2, -3 or -4 (SSX1, SSX2, SSX3, SSX4); CD79a; CD79b; CD72; Leukocyte-associated immunoglobulin-like receptor 1 (LAIR1); Fc fragment of IgA receptor (FCAR); Leukocyte immunoglobulin-like receptor subfamily A member 2 (LILRA2); CD300 molecule-like family member f (CD300LF); C-type lectin domain family 12 member A (CLEC12A); bone marrow stromal cell antigen 2 (BST2); EGF-like module-containing mucin-like hormone receptor-like 2 (EMR2); lymphocyte antigen 75 (LY75); Glypican-3 (GPC3); Fc receptor-like 5 (FCRLS); mouse double minute 2 homolog (MDM2); livin; alphafetoprotein (AFP); transmembrane activator and CAML Interactor (TACI); B-cell activating factor receptor (BAFF-R); V-Ki-ras2 Kirsten rat sarcoma viral oncogene homolog (KRAS); immunoglobulin lambda-like polypeptide 1 (IGLL1); 707-AP (707 alanine proline); ART-4 (adenocarcinoma antigen recognized by T4 cells); BAGE (B antigen; b-catenin/m, b-catenin/mutated); CAMEL (CTL-recognized antigen on melanoma); CAP1 (carcinoembryonic antigen peptide 1); CASP-8 (caspase-8); CDCl27m (cell-division cycle 27 mutated); CDK4/m (cycline-dependent kinase 4 mutated); Cyp-B (cyclophilin B); DAM (differentiation antigen melanoma); EGP-2 (epithelial glycoprotein 2); EGP-40 (epithelial glycoprotein 40); Erbb2, 3, 4 (erythroblastic leukemia viral oncogene homolog-2, -3, 4); FBP (folate binding protein); fAchR (Fetal acetylcholine receptor); G250 (glycoprotein 250); GAGE (G antigen); GnT-V (N-acetylglucosaminyltransferase V); HAGE (helicose antigen); ULA-A (human leukocyte antigen-A); HST2 (human signet ring tumor 2); KIAA0205; KDR (kinase insert domain receptor); LDLR/FUT (low density lipid receptor/GDP L-fucose: b-D-galactosidase 2-a-L fucosyltransferase); L1CAM (L1 cell adhesion molecule); MC1R (melanocortin 1 receptor); Myosin/m (myosin mutated); MUM-1, -2, -3 (melanoma ubiquitous mutated 1, 2, 3); NA88-A (NA cDNA clone of patient M88); KG2D (Natural killer group 2, member D) ligands; oncofetal antigen (h5T4); p190 minor bcr-abl (protein of 190KD bcr-abl); Pml/RARa (promyelocytic leukaemia/retinoic acid receptor a); PRAME (preferentially expressed antigen of melanoma); SAGE (sarcoma antigen); TEL/AML1 (translocation Ets-family leukemia/acute myeloid leukemia 1); TPI/m (triosephosphate isomerase mutated); CD70; and any combination thereof.

[0396] In certain embodiments, an antigen to be targeted in adoptive cell therapy (such as particularly CAR or TCR T-cell therapy) of a disease (such as particularly of tumor or cancer) is a tumor-specific antigen (TSA).

[0397] In certain embodiments, an antigen to be targeted in adoptive cell therapy (such as particularly CAR or TCR T-cell therapy) of a disease (such as particularly of tumor or cancer) is a neoantigen.

[0398] In certain embodiments, an antigen to be targeted in adoptive cell therapy (such as particularly CAR or TCR T-cell therapy) of a disease (such as particularly of tumor or cancer) is a tumor-associated antigen (TAA).

[0399] In certain embodiments, an antigen to be targeted in adoptive cell therapy (such as particularly CAR or TCR T-cell therapy) of a disease (such as particularly of tumor or cancer) is a universal tumor antigen. In certain preferred embodiments, the universal tumor antigen is selected from the group consisting of: a human telomerase reverse transcriptase (hTERT), survivin, mouse double minute 2 homolog (MDM2), cytochrome P450 1B1 (CYP1B), HER2/neu, Wilms' tumor gene 1 (WT1), livin, alphafetoprotein (AFP), carcinoembryonic antigen (CEA), mucin 16 (MUC16), MUC1, prostate-specific membrane antigen (PSMA), p53, cyclin (D1), and any combinations thereof.

[0400] In certain embodiments, an antigen (such as a tumor antigen) to be targeted in adoptive cell therapy (such as particularly CAR or TCR T-cell therapy) of a disease (such as particularly of tumor or cancer) may be selected from a group consisting of: CD19, BCMA, CD70, CLL-1, MAGE A3, MAGE A6, HPV E6, HPV E7, WT1, CD22, CD171, ROR1, MUC16, and SSX2. In certain preferred embodiments, the antigen may be CD19. For example, CD19 may be targeted in hematologic malignancies, such as in lymphomas, more particularly in B-cell lymphomas, such as without limitation in diffuse large B-cell lymphoma, primary mediastinal b-cell lymphoma, transformed follicular lymphoma, marginal zone lymphoma, mantle cell lymphoma, acute lymphoblastic leukemia including adult and pediatric ALL, non-Hodgkin lymphoma, indolent non-Hodgkin lymphoma, or chronic lymphocytic leukemia. For example, BCMA may be targeted in multiple myeloma or plasma cell leukemia (see, e.g., 2018 American Association for Cancer Research (AACR) Annual meeting Poster: Allogeneic Chimeric Antigen Receptor T Cells Targeting B Cell Maturation Antigen). For example, CLL1 may be targeted in acute myeloid leukemia. For example, MAGE A3, MAGE A6, SSX2, and/or KRAS may be targeted in solid tumors. For example, HPV E6 and/or HPV E7 may be targeted in cervical cancer or head and neck cancer. For example, WT1 may be targeted in acute myeloid leukemia (AML), myelodysplastic syndromes (MDS), chronic myeloid leukemia (CML), non-small cell lung cancer, breast, pancreatic, ovarian or colorectal cancers, or mesothelioma. For example, CD22 may be targeted in B cell malignancies, including non-Hodgkin lymphoma, diffuse large B-cell lymphoma, or acute lymphoblastic leukemia. For example, CD171 may be targeted in neuroblastoma, glioblastoma, or lung, pancreatic, or ovarian cancers. For example, ROR1 may be targeted in ROR1+malignancies, including non-small cell lung cancer, triple negative breast cancer, pancreatic cancer, prostate cancer, ALL, chronic lymphocytic leukemia, or mantle cell lymphoma. For example, MUC16 may be targeted in MUC16ecto+ epithelial ovarian, fallopian tube or primary peritoneal cancer. For example, CD70 may be targeted in both hematologic malignancies as well as in solid cancers such as renal cell carcinoma (RCC), gliomas (e.g., GBM), and head and neck cancers (HNSCC). CD70 is expressed in both hematologic malignancies as well as in solid cancers, while its expression in normal tissues is restricted to a subset of lymphoid cell types (see, e.g., 2018 American Association for Cancer Research (AACR) Annual meeting Poster: Allogeneic CRISPR Engineered Anti-CD70 CAR-T Cells Demonstrate Potent Preclinical Activity Against Both Solid and Hematological Cancer Cells).

[0401] Various strategies may for example be employed to genetically modify T cells by altering the specificity of the T cell receptor (TCR) for example by introducing new TCR α and β chains with selected peptide specificity (see U.S. Pat. No. 8,697,854; PCT Patent Publications: WO2003020763, WO2004033685, WO2004044004, WO2005114215, WO2006000830, WO2008038002, WO2008039818, WO2004074322, WO2005113595, WO2006125962, WO2013166321, WO2013039889, WO2014018863, WO2014083173; U.S. Pat. No. 8,088,379).

[0402] As an alternative to, or addition to, TCR modifications, chimeric antigen receptors (CARs) may be used in order to generate immunoresponsive cells, such as T cells, specific for selected targets, such as malignant cells, with a wide variety of receptor chimera constructs having been described (see U.S. Pat. Nos. 5,843,728; 5,851,828; 5,912,170; 6,004,811; 6,284,240; 6,392,013; 6,410,014; 6,753,162; 8,211,422; and, PCT Publication WO9215322).

[0403] In general, CARs are comprised of an extracellular domain, a transmembrane domain, and an intracellular domain, wherein the extracellular domain comprises an antigen-binding domain that is specific for a predetermined target. While the antigen-binding domain of a CAR is often an antibody or antibody fragment (e.g., a single chain variable fragment, scFv), the binding domain is not particularly limited so long as it results in specific recognition of a target. For example, in some embodiments, the antigen-binding domain may comprise a receptor, such that the CAR is capable of binding to the ligand of the receptor. Alternatively, the antigen-binding domain may comprise a ligand, such that the CAR is capable of binding the endogenous receptor of that ligand.

[0404] The antigen-binding domain of a CAR is generally separated from the transmembrane domain by a hinge or spacer. The spacer is also not particularly limited, and it is designed to provide the CAR with flexibility. For example, a spacer domain may comprise a portion of a human Fc domain, including a portion of the CH3 domain, or the hinge region of any immunoglobulin, such as IgA, IgD, IgE, IgG, or IgM, or variants thereof. Furthermore, the hinge region may be modified so as to prevent off-target binding by FcRs or other potential interfering objects. For example, the hinge may comprise an IgG4 Fc domain with or without a S228P, L235E, and/or N297Q mutation (according to Kabat numbering) in order to decrease binding to FcRs. Additional spacers/hinges include, but are not limited to, CD4, CD8, and CD28 hinge regions.

[0405] The transmembrane domain of a CAR may be derived either from a natural or from a synthetic source. Where the source is natural, the domain may be derived from any membrane bound or transmembrane protein. Transmembrane regions of particular use in this disclosure may be derived from CD8, CD28, CD3, CD45, CD4, CD5, CD5, CD9, CD 16, CD22, CD33, CD37, CD64, CD80, CD86, CD 134, CD137, CD 154, TCR. Alternatively, the transmembrane domain may be synthetic, in which case it will comprise predominantly hydrophobic residues such as leucine and valine. Preferably a triplet of phenylalanine, tryptophan and valine will be found at each end of a synthetic transmembrane domain. Optionally, a short oligo- or polypeptide linker, preferably between 2 and 10 amino acids in length may form the linkage between the transmembrane domain and the cytoplasmic signaling domain of the CAR. A glycine-serine doublet provides a particularly suitable linker.

[0406] Alternative CAR constructs may be characterized as belonging to successive generations. First-generation CARs typically consist of a single-chain variable fragment of an antibody specific for an antigen, for example comprising a VL linked to a VH of a specific antibody, linked by a flexible linker, for example by a CD8α hinge domain and a CD8α transmembrane domain, to the transmembrane and intracellular signaling domains of either CD3ζ or FcRγ (scFv-CD3ζ or scFv-FcRγ; see U.S. Pat. Nos. 7,741,465; 5,912,172; 5,906,936). Second-generation CARs incorporate the intracellular domains of one or more costimulatory molecules, such as CD28, OX40 (CD134), or 4-1BB (CD137) within the endodomain (for example scFv-CD28/OX40/4-1BB-CD3ζ; see U.S. Pat. Nos. 8,911,993; 8,916,381; 8,975,071; 9,101,584; 9,102,760; 9,102,761). Third-generation CARs include a combination of costimulatory endodomains, such a CD3ζ-chain, CD97, GDI 1a-CD18, CD2, ICOS, CD27, CD154, CDS, OX40, 4-1BB, CD2, CD7, LIGHT, LFA-1, NKG2C, B7-H3, CD30, CD40, PD-1, or CD28 signaling domains (for example scFv-CD28-4-1BB-CD3ζ or scFv-CD28-OX40-CD3ζ; see U.S. Pat. Nos. 8,906,682; 8,399,645; 5,686,281; PCT Publication No. WO2014134165; PCT Publication No. WO2012079000). In certain embodiments, the primary signaling domain comprises a functional signaling domain of a protein selected from the group consisting of CD3 zeta, CD3 gamma, CD3 delta, CD3 epsilon, common FcR gamma (FCERIG), FcR beta (Fc Epsilon Rib), CD79a, CD79b, Fc gamma RIIa, DAP10, and DAP12. In certain preferred embodiments, the primary signaling domain comprises a functional signaling domain of CD3ζ or FcRγ. In certain embodiments, the one or more costimulatory signaling domains comprise a functional signaling domain of a protein selected, each independently, from the group consisting of: CD27, CD28, 4-1BB (CD137), OX40, CD30, CD40, PD-1, ICOS, lymphocyte function-associated antigen-1 (LFA-1), CD2, CD7, LIGHT, NKG2C, B7-H3, a ligand that specifically binds with CD83, CDS, ICAM-1, GITR, BAFFR, HVEM (LIGHTR), SLAMF7, NKp80 (KLRF1), CD160, CD19, CD4, CD8 alpha, CD8 beta, IL2R beta, IL2R gamma, IL7R alpha, ITGA4, VLA1, CD49a, ITGA4, IA4, CD49D, ITGA6, VLA-6, CD49f, ITGAD, CD11d, ITGAE, CD103, ITGAL, CD11a, LFA-1, ITGAM, CD11b, ITGAX, CD11c, ITGB1, CD29, ITGB2, CD18, ITGB7, TNFR2, TRANCE/RANKL, DNAM1 (CD226), SLAMF4 (CD244, 2B4), CD84, CD96 (Tactile), CEACAM1, CRTAM, Ly9 (CD229), CD160 (BY55), PSGL1, CD100 (SEMA4D), CD69, SLAMF6 (NTB-A, Ly108), SLAM (SLAMF1, CD150, IPO-3), BLAME (SLAMF8), SELPLG (CD162), LTBR, LAT, GADS, SLP-76, PAG/Cbp, NKp44, NKp30, NKp46, and NKG2D. In certain embodiments, the one or more costimulatory signaling domains comprise a functional signaling domain of a protein selected, each independently, from the group consisting of: 4-1BB, CD27, and CD28. In certain embodiments, a chimeric antigen receptor may have the design as described in U.S. Pat. No. 7,446,190, comprising an intracellular domain of CD3 chain (such as amino acid residues 52-163 of the human CD3 zeta chain, as shown in SEQ ID NO: 14 of U.S. Pat. No. 7,446,190), a signaling region from CD28 and an antigen-binding element (or portion or domain; such as scFv). The CD28 portion, when between the zeta chain portion and the antigen-binding element, may suitably include the transmembrane and signaling domains of CD28 (such as amino acid residues 114-220 of SEQ ID NO: 10, full sequence shown in SEQ ID NO: 6 of U.S. Pat. No. 7,446,190; these can include the following portion of CD28 as set forth in Genbank identifier NM_006139 (sequence version 1, 2 or 3): IEVMYPPPYLDNEKSNGTIIHVKGKHLCPSPLFPGPSKPFWVLVVVGGVLACYSLLVTVA FIIFWVRSKRSRLLHSDYMNMTPRRPGPTRKHYQPYAPPRDFAAYRS)). Alternatively, when the zeta sequence lies between the CD28 sequence and the antigen-binding element, intracellular domain of CD28 can be used alone (such as amino sequence set forth in SEQ ID NO: 9 of U.S. Pat. No. 7,446,190). Hence, certain embodiments employ a CAR comprising (a) a zeta chain portion comprising the intracellular domain of human CD3ζ chain, (b) a costimulatory signaling region, and (c) an antigen-binding element (or portion or domain), wherein the costimulatory signaling region comprises the amino acid sequence encoded by SEQ ID NO: 6 of U.S. Pat. No. 7,446,190.

[0407] Alternatively, costimulation may be orchestrated by expressing CARs in antigen-specific T cells, chosen so as to be activated and expanded following engagement of their native αβTCR, for example by antigen on professional antigen-presenting cells, with attendant costimulation. In addition, additional engineered receptors may be provided on the immunoresponsive cells, for example to improve targeting of a T-cell attack and/or minimize side effects

[0408] By means of an example and without limitation, Kochenderfer et al., (2009) J Immunother. 32 (7): 689-702 described anti-CD19 chimeric antigen receptors (CAR). FMC63-28Z CAR contained a single chain variable region moiety (scFv) recognizing CD19 derived from the FMC63 mouse hybridoma (described in Nicholson et al., (1997) Molecular Immunology 34: 1157-1165), a portion of the human CD28 molecule, and the intracellular component of the human TCR-ζ molecule. FMC63-CD828BBZ CAR contained the FMC63 scFv, the hinge and transmembrane regions of the CD8 molecule, the cytoplasmic portions of CD28 and 4-1BB, and the cytoplasmic component of the TCR-ζ molecule. The exact sequence of the CD28 molecule included in the FMC63-28Z CAR corresponded to Genbank identifier NM_006139; the sequence included all amino acids starting with the amino acid sequence IEVMYPPPY and continuing all the way to the carboxy-terminus of the protein. To encode the anti-CD19 scFv component of the vector, the authors designed a DNA sequence which was based on a portion of a previously published CAR (Cooper et al., (2003) Blood 101: 1637-1644). This sequence encoded the following components in frame from the 5′ end to the 3′ end: an XhoI site, the human granulocyte-macrophage colony-stimulating factor (GM-CSF) receptor α-chain signal sequence, the FMC63 light chain variable region (as in Nicholson et al., supra), a linker peptide (as in Cooper et al., supra), the FMC63 heavy chain variable region (as in Nicholson et al., supra), and a NotI site. A plasmid encoding this sequence was digested with XhoI and NotI. To form the MSGV-FMC63-28Z retroviral vector, the XhoI and NotI-digested fragment encoding the FMC63 scFv was ligated into a second XhoI and NotI-digested fragment that encoded the MSGV retroviral backbone (as in Hughes et al., (2005) Human Gene Therapy 16: 457-472) as well as part of the extracellular portion of human CD28, the entire transmembrane and cytoplasmic portion of human CD28, and the cytoplasmic portion of the human TCR-ζ molecule (as in Maher et al., 2002) Nature Biotechnology 20: 70-75). The FMC63-28Z CAR is included in the KTE-C19 (axicabtagene ciloleucel) anti-CD19 CAR-T therapy product in development by Kite Pharma, Inc. for the treatment of inter alia patients with relapsed/refractory aggressive B-cell non-Hodgkin lymphoma (NHL). Accordingly, in certain embodiments, cells intended for adoptive cell therapies, more particularly immunoresponsive cells such as T cells, may express the FMC63-28Z CAR as described by Kochenderfer et al. (supra). Hence, in certain embodiments, cells intended for adoptive cell therapies, more particularly immunoresponsive cells such as T cells, may comprise a CAR comprising an extracellular antigen-binding element (or portion or domain; such as scFv) that specifically binds to an antigen, an intracellular signaling domain comprising an intracellular domain of a CD3ζ chain, and a costimulatory signaling region comprising a signaling domain of CD28. Preferably, the CD28 amino acid sequence is as set forth in Genbank identifier NM_006139 (sequence version 1, 2 or 3) starting with the amino acid sequence IEVMYPPPY and continuing all the way to the carboxy-terminus of the protein. The sequence is reproduced herein: IEVMYPPPYLDNEKSNGTIIHVKGKHLCPSPLFPGPSKPFWVLVVVGGVLACYSLLVTVA FIIFWVRSKRSRLLHSDYMNMTPRRPGPTRKHYQPYAPPRDFAAYRS. Preferably, the antigen is CD19, more preferably the antigen-binding element is an anti-CD19 scFv, even more preferably the anti-CD19 scFv as described by Kochenderfer et al. (supra).

[0409] Additional anti-CD19 CARs are further described in WO2015187528. More particularly Example 1 and Table 1 of WO2015187528, incorporated by reference herein, demonstrate the generation of anti-CD19 CARs based on a fully human anti-CD19 monoclonal antibody (47G4, as described in US20100104509) and murine anti-CD19 monoclonal antibody (as described in Nicholson et al. and explained above). Various combinations of a signal sequence (human CD8-alpha or GM-CSF receptor), extracellular and transmembrane regions (human CD8-alpha) and intracellular T-cell signalling domains (CD28-CD3ζ; 4-1BB-CD3ζ; CD27-CD3ζ; CD28-CD27-CD3ζ, 4-1BB-CD27-CD3ζ; CD27-4-1BB-CD3ζ; CD28-CD27-FcεRI gamma chain; or CD28-FcεRI gamma chain) were disclosed. Hence, in certain embodiments, cells intended for adoptive cell therapies, more particularly immunoresponsive cells such as T cells, may comprise a CAR comprising an extracellular antigen-binding element that specifically binds to an antigen, an extracellular and transmembrane region as set forth in Table 1 of WO2015187528 and an intracellular T-cell signalling domain as set forth in Table 1 of WO2015187528. Preferably, the antigen is CD19, more preferably the antigen-binding element is an anti-CD19 scFv, even more preferably the mouse or human anti-CD19 scFv as described in Example 1 of WO2015187528. In certain embodiments, the CAR comprises, consists essentially of or consists of an amino acid sequence of SEQ ID NO: 1, SEQ ID NO: 2, SEQ ID NO: 3, SEQ ID NO: 4, SEQ ID NO: 5, SEQ ID NO: 6, SEQ ID NO: 7, SEQ ID NO: 8, SEQ ID NO: 9, SEQ ID NO: 10, SEQ ID NO: 11, SEQ ID NO: 12, or SEQ ID NO: 13 as set forth in Table 1 of WO2015187528.

[0410] By means of an example and without limitation, chimeric antigen receptor that recognizes the CD70 antigen is described in WO2012058460A2 (see also, Park et al., CD70 as a target for chimeric antigen receptor T cells in head and neck squamous cell carcinoma, Oral Oncol. 2018 March; 78:145-150; and Jin et al., CD70, a novel target of CAR T-cell therapy for gliomas, Neuro Oncol. 2018 Jan. 10; 20(1):55-65). CD70 is expressed by diffuse large B-cell and follicular lymphoma and also by the malignant cells of Hodgkins lymphoma, Waldenstrom's macroglobulinemia and multiple myeloma, and by HTLV-1- and EBV-associated malignancies. (Agathanggelou et al. Am. J. Pathol. 1995; 147: 1152-1160; Hunter et al., Blood 2004; 104:4881. 26; Lens et al., J Immunol. 2005; 174:6212-6219; Baba et al., J Virol. 2008; 82:3843-3852.) In addition, CD70 is expressed by non-hematological malignancies such as renal cell carcinoma and glioblastoma. (Junker et al., J Urol. 2005; 173:2150-2153; Chahlavi et al., Cancer Res 2005; 65:5428-5438) Physiologically, CD70 expression is transient and restricted to a subset of highly activated T, B, and dendritic cells.

[0411] By means of an example and without limitation, chimeric antigen receptor that recognizes BCMA has been described (see, e.g., US20160046724A1; WO2016014789A2; WO2017211900A1; WO2015158671A1; US20180085444A1; WO2018028647A1; US20170283504A1; and WO2013154760A1).

[0412] In certain embodiments, the immune cell may, in addition to a CAR or exogenous TCR as described herein, further comprise a chimeric inhibitory receptor (inhibitory CAR) that specifically binds to a second target antigen and is capable of inducing an inhibitory or immunosuppressive or repressive signal to the cell upon recognition of the second target antigen. In certain embodiments, the chimeric inhibitory receptor comprises an extracellular antigen-binding element (or portion or domain) configured to specifically bind to a target antigen, a transmembrane domain, and an intracellular immunosuppressive or repressive signaling domain. In certain embodiments, the second target antigen is an antigen that is not expressed on the surface of a cancer cell or infected cell or the expression of which is downregulated on a cancer cell or an infected cell. In certain embodiments, the second target antigen is an MHC-class I molecule. In certain embodiments, the intracellular signaling domain comprises a functional signaling portion of an immune checkpoint molecule, such as for example PD-1 or CTLA4. Advantageously, the inclusion of such inhibitory CAR reduces the chance of the engineered immune cells attacking non-target (e.g., non-cancer) tissues.

[0413] Alternatively, T-cells expressing CARs may be further modified to reduce or eliminate expression of endogenous TCRs in order to reduce off-target effects. Reduction or elimination of endogenous TCRs can reduce off-target effects and increase the effectiveness of the T cells (U.S. Pat. No. 9,181,527). T cells stably lacking expression of a functional TCR may be produced using a variety of approaches. T cells internalize, sort, and degrade the entire T cell receptor as a complex, with a half-life of about 10 hours in resting T cells and 3 hours in stimulated T cells (von Essen, M. et al. 2004. J. Immunol. 173:384-393). Proper functioning of the TCR complex requires the proper stoichiometric ratio of the proteins that compose the TCR complex. TCR function also requires two functioning TCR zeta proteins with ITAM motifs. The activation of the TCR upon engagement of its MHC-peptide ligand requires the engagement of several TCRs on the same T cell, which all must signal properly. Thus, if a TCR complex is destabilized with proteins that do not associate properly or cannot signal optimally, the T cell will not become activated sufficiently to begin a cellular response.

[0414] Accordingly, in some embodiments, TCR expression may eliminated using RNA interference (e.g., shRNA, siRNA, miRNA, etc.), CRISPR, or other methods that target the nucleic acids encoding specific TCRs (e.g., TCR-α and TCR-β) and/or CD3 chains in primary T cells. By blocking expression of one or more of these proteins, the T cell will no longer produce one or more of the key components of the TCR complex, thereby destabilizing the TCR complex and preventing cell surface expression of a functional TCR.

[0415] In some instances, CAR may also comprise a switch mechanism for controlling expression and/or activation of the CAR. For example, a CAR may comprise an extracellular, transmembrane, and intracellular domain, in which the extracellular domain comprises a target-specific binding element that comprises a label, binding domain, or tag that is specific for a molecule other than the target antigen that is expressed on or by a target cell. In such embodiments, the specificity of the CAR is provided by a second construct that comprises a target antigen binding domain (e.g., an scFv or a bispecific antibody that is specific for both the target antigen and the label or tag on the CAR) and a domain that is recognized by or binds to the label, binding domain, or tag on the CAR. See, e.g., WO 2013/044225, WO 2016/000304, WO 2015/057834, WO 2015/057852, WO 2016/070061, U.S. Pat. No. 9,233,125, US 2016/0129109. In this way, a T-cell that expresses the CAR can be administered to a subject, but the CAR cannot bind its target antigen until the second composition comprising an antigen-specific binding domain is administered.

[0416] Alternative switch mechanisms include CARs that require multimerization in order to activate their signaling function (see, e.g., US 2015/0368342, US 2016/0175359, US 2015/0368360) and/or an exogenous signal, such as a small molecule drug (US 2016/0166613, Yung et al., Science, 2015), in order to elicit a T-cell response. Some CARs may also comprise a “suicide switch” to induce cell death of the CAR T-cells following treatment (Buddee et al., PLoS One, 2013) or to downregulate expression of the CAR following binding to the target antigen (WO 2016/011210).

[0417] Alternative techniques may be used to transform target immunoresponsive cells, such as protoplast fusion, lipofection, transfection or electroporation. A wide variety of vectors may be used, such as retroviral vectors, lentiviral vectors, adenoviral vectors, adeno-associated viral vectors, plasmids or transposons, such as a Sleeping Beauty transposon (see U.S. Pat. Nos. 6,489,458; 7,148,203; 7,160,682; 7,985,739; 8,227,432), may be used to introduce CARs, for example using 2nd generation antigen-specific CARs signaling through CD3ζ and either CD28 or CD137. Viral vectors may for example include vectors based on HIV, SV40, EBV, HSV or BPV.

[0418] Cells that are targeted for transformation may for example include T cells, Natural Killer (NK) cells, cytotoxic T lymphocytes (CTL), regulatory T cells, human embryonic stem cells, tumor-infiltrating lymphocytes (TIL) or a pluripotent stem cell from which lymphoid cells may be differentiated. T cells expressing a desired CAR may for example be selected through co-culture with γ-irradiated activating and propagating cells (AaPC), which co-express the cancer antigen and co-stimulatory molecules. The engineered CAR T-cells may be expanded, for example by co-culture on AaPC in presence of soluble factors, such as IL-2 and IL-21. This expansion may for example be carried out so as to provide memory CAR+ T cells (which may for example be assayed by non-enzymatic digital array and/or multi-panel flow cytometry). In this way, CAR T cells may be provided that have specific cytotoxic activity against antigen-bearing tumors (optionally in conjunction with production of desired chemokines such as interferon-γ). CART cells of this kind may for example be used in animal models, for example to treat tumor xenografts.

[0419] In certain embodiments, ACT includes co-transferring CD4+Th1 cells and CD8+ CTLs to induce a synergistic antitumour response (see, e.g., Li et al., Adoptive cell therapy with CD4+T helper 1 cells and CD8+ cytotoxic T cells enhances complete rejection of an established tumour, leading to generation of endogenous memory responses to non-targeted tumour epitopes. Clin Transl Immunology. 2017 October; 6(10): e160).

[0420] In certain embodiments, Th17 cells are transferred to a subject in need thereof. Th17 cells have been reported to directly eradicate melanoma tumors in mice to a greater extent than Th1 cells (Muranski P, et al., Tumor-specific Th17-polarized cells eradicate large established melanoma. Blood. 2008 Jul. 15; 112(2):362-73; and Martin-Orozco N, et al., T helper 17 cells promote cytotoxic T cell activation in tumor immunity. Immunity. 2009 Nov. 20; 31(5):787-98). Those studies involved an adoptive T cell transfer (ACT) therapy approach, which takes advantage of CD4⁺ T cells that express a TCR recognizing tyrosinase tumor antigen. Exploitation of the TCR leads to rapid expansion of Th17 populations to large numbers ex vivo for reinfusion into the autologous tumor-bearing hosts.

[0421] In certain embodiments, ACT may include autologous iPSC-based vaccines, such as irradiated iPSCs in autologous anti-tumor vaccines (see e.g., Kooreman, Nigel G. et al., Autologous iPSC-Based Vaccines Elicit Anti-tumor Responses In Vivo, Cell Stem Cell 22, 1-13, 2018, doi.org/10.1016/j.stem.2018.01.016).

[0422] Unlike T-cell receptors (TCRs) that are MHC restricted, CARs can potentially bind any cell surface-expressed antigen and can thus be more universally used to treat patients (see Irving et al., Engineering Chimeric Antigen Receptor T-Cells for Racing in Solid Tumors: Don't Forget the Fuel, Front. Immunol., 3 Apr. 2017, doi.org/10.3389/fimmu.2017.00267). In certain embodiments, in the absence of endogenous T-cell infiltrate (e.g., due to aberrant antigen processing and presentation), which precludes the use of TIL therapy and immune checkpoint blockade, the transfer of CAR T-cells may be used to treat patients (see, e.g., Hinrichs C S, Rosenberg S A. Exploiting the curative potential of adoptive T-cell therapy for cancer. Immunol Rev (2014) 257(1):56-71. doi:10.1111/imr.12132).

[0423] Approaches such as the foregoing may be adapted to provide methods of treating and/or increasing survival of a subject having a disease, such as a neoplasia, for example by administering an effective amount of an immunoresponsive cell comprising an antigen recognizing receptor that binds a selected antigen, wherein the binding activates the immunoresponsive cell, thereby treating or preventing the disease (such as a neoplasia, a pathogen infection, an autoimmune disorder, or an allogeneic transplant reaction).

[0424] In certain embodiments, the treatment can be administered after lymphodepleting pretreatment in the form of chemotherapy (typically a combination of cyclophosphamide and fludarabine) or radiation therapy. Initial studies in ACT had short lived responses and the transferred cells did not persist in vivo for very long (Houot et al., T-cell-based immunotherapy: adoptive cell transfer and checkpoint inhibition. Cancer Immunol Res (2015) 3(10):1115-22; and Kamta et al., Advancing Cancer Therapy with Present and Emerging Immuno-Oncology Approaches. Front. Oncol. (2017) 7:64). Immune suppressor cells like Tregs and MDSCs may attenuate the activity of transferred cells by outcompeting them for the necessary cytokines. Not being bound by a theory lymphodepleting pretreatment may eliminate the suppressor cells allowing the TILs to persist.

[0425] In one embodiment, the treatment can be administrated into patients undergoing an immunosuppressive treatment (e.g., glucocorticoid treatment). The cells or population of cells, may be made resistant to at least one immunosuppressive agent due to the inactivation of a gene encoding a receptor for such immunosuppressive agent. In certain embodiments, the immunosuppressive treatment provides for the selection and expansion of the immunoresponsive T cells within the patient.

[0426] In certain embodiments, the treatment can be administered before primary treatment (e.g., surgery or radiation therapy) to shrink a tumor before the primary treatment. In another embodiment, the treatment can be administered after primary treatment to remove any remaining cancer cells.

[0427] In certain embodiments, immunometabolic barriers can be targeted therapeutically prior to and/or during ACT to enhance responses to ACT or CAR T-cell therapy and to support endogenous immunity (see, e.g., Irving et al., Engineering Chimeric Antigen Receptor T-Cells for Racing in Solid Tumors: Don't Forget the Fuel, Front. Immunol., 3 Apr. 2017, doi.org/10.3389/fimmu.2017.00267).

[0428] The administration of cells or population of cells, such as immune system cells or cell populations, such as more particularly immunoresponsive cells or cell populations, as disclosed herein may be carried out in any convenient manner, including by aerosol inhalation, injection, ingestion, transfusion, implantation or transplantation. The cells or population of cells may be administered to a patient subcutaneously, intradermally, intratumorally, intranodally, intramedullary, intramuscularly, intrathecally, by intravenous or intralymphatic injection, or intraperitoneally. In some embodiments, the disclosed CARs may be delivered or administered into a cavity formed by the resection of tumor tissue (i.e. intracavity delivery) or directly into a tumor prior to resection (i.e. intratumoral delivery). In one embodiment, the cell compositions of the present invention are preferably administered by intravenous injection.

[0429] The administration of the cells or population of cells can consist of the administration of 10⁴-10⁹ cells per kg body weight, preferably 10⁵ to 10⁶ cells/kg body weight including all integer values of cell numbers within those ranges. Dosing in CAR T cell therapies may for example involve administration of from 10⁶ to 10⁹ cells/kg, with or without a course of lymphodepletion, for example with cyclophosphamide. The cells or population of cells can be administrated in one or more doses. In another embodiment, the effective amount of cells are administrated as a single dose. In another embodiment, the effective amount of cells are administrated as more than one dose over a period time. Timing of administration is within the judgment of managing physician and depends on the clinical condition of the patient. The cells or population of cells may be obtained from any source, such as a blood bank or a donor. While individual needs vary, determination of optimal ranges of effective amounts of a given cell type for a particular disease or conditions are within the skill of one in the art. An effective amount means an amount which provides a therapeutic or prophylactic benefit. The dosage administrated will be dependent upon the age, health and weight of the recipient, kind of concurrent treatment, if any, frequency of treatment and the nature of the effect desired.

[0430] In another embodiment, the effective amount of cells or composition comprising those cells are administrated parenterally. The administration can be an intravenous administration. The administration can be directly done by injection within a tumor.

[0431] To guard against possible adverse reactions, engineered immunoresponsive cells may be equipped with a transgenic safety switch, in the form of a transgene that renders the cells vulnerable to exposure to a specific signal. For example, the herpes simplex viral thymidine kinase (TK) gene may be used in this way, for example by introduction into allogeneic T lymphocytes used as donor lymphocyte infusions following stem cell transplantation (Greco, et al., Improving the safety of cell therapy with the TK-suicide gene. Front. Pharmacol. 2015; 6: 95). In such cells, administration of a nucleoside prodrug such as ganciclovir or acyclovir causes cell death. Alternative safety switch constructs include inducible caspase 9, for example triggered by administration of a small-molecule dimerizer that brings together two nonfunctional icasp9 molecules to form the active enzyme. A wide variety of alternative approaches to implementing cellular proliferation controls have been described (see U.S. Patent Publication No. 20130071414; PCT Patent Publication WO2011146862; PCT Patent Publication WO2014011987; PCT Patent Publication WO2013040371; Zhou et al. BLOOD, 2014, 123/25:3895-3905; Di Stasi et al., The New England Journal of Medicine 2011; 365:1673-1683; Sadelain M, The New England Journal of Medicine 2011; 365:1735-173; Ramos et al., Stem Cells 28(6):1107-15 (2010)).

[0432] In a further refinement of adoptive therapies, genome editing may be used to tailor immunoresponsive cells to alternative implementations, for example providing edited CAR T cells (see Poirot et al., 2015, Multiplex genome edited T-cell manufacturing platform for “off-the-shelf” adoptive T-cell immunotherapies, Cancer Res 75 (18): 3853; Ren et al., 2017, Multiplex genome editing to generate universal CAR T cells resistant to PD1 inhibition, Clin Cancer Res. 2017 May 1; 23(9):2255-2266. doi: 10.1158/1078-0432.CCR-16-1300. Epub 2016 Nov. 4; Qasim et al., 2017, Molecular remission of infant B-ALL after infusion of universal TALEN gene-edited CART cells, Sci Transl Med. 2017 Jan. 25; 9(374); Legut, et al., 2018, CRISPR-mediated TCR replacement generates superior anticancer transgenic T cells. Blood, 131(3), 311-322; and Georgiadis et al., Long Terminal Repeat CRISPR-CAR-Coupled “Universal” T Cells Mediate Potent Anti-leukemic Effects, Molecular Therapy, In Press, Corrected Proof, Available online 6 Mar. 2018). Cells may be edited using any CRISPR system and method of use thereof as described herein. CRISPR systems may be delivered to an immune cell by any method described herein. In preferred embodiments, cells are edited ex vivo and transferred to a subject in need thereof. Immunoresponsive cells, CAR T cells or any cells used for adoptive cell transfer may be edited. Editing may be performed for example to insert or knock-in an exogenous gene, such as an exogenous gene encoding a CAR or a TCR, at a preselected locus in a cell (e.g. TRAC locus); to eliminate potential alloreactive T-cell receptors (TCR) or to prevent inappropriate pairing between endogenous and exogenous TCR chains, such as to knock-out or knock-down expression of an endogenous TCR in a cell; to disrupt the target of a chemotherapeutic agent in a cell; to block an immune checkpoint, such as to knock-out or knock-down expression of an immune checkpoint protein or receptor in a cell; to knock-out or knock-down expression of other gene or genes in a cell, the reduced expression or lack of expression of which can enhance the efficacy of adoptive therapies using the cell; to knock-out or knock-down expression of an endogenous gene in a cell, said endogenous gene encoding an antigen targeted by an exogenous CAR or TCR; to knock-out or knock-down expression of one or more MHC constituent proteins in a cell; to activate a T cell; to modulate cells such that the cells are resistant to exhaustion or dysfunction; and/or increase the differentiation and/or proliferation of functionally exhausted or dysfunctional CD8+ T-cells (see PCT Patent Publications: WO2013176915, WO2014059173, WO2014172606, WO2014184744, and WO2014191128).

[0433] In certain embodiments, editing may result in inactivation of a gene. By inactivating a gene, it is intended that the gene of interest is not expressed in a functional protein form. In a particular embodiment, the CRISPR system specifically catalyzes cleavage in one targeted gene thereby inactivating said targeted gene. The nucleic acid strand breaks caused are commonly repaired through the distinct mechanisms of homologous recombination or non-homologous end joining (NHEJ). However, NHEJ is an imperfect repair process that often results in changes to the DNA sequence at the site of the cleavage. Repair via non-homologous end joining (NHEJ) often results in small insertions or deletions (Indel) and can be used for the creation of specific gene knockouts. Cells in which a cleavage induced mutagenesis event has occurred can be identified and/or selected by well-known methods in the art. In certain embodiments, homology directed repair (HDR) is used to concurrently inactivate a gene (e.g., TRAC) and insert an endogenous TCR or CAR into the inactivated locus.

[0434] Hence, in certain embodiments, editing of cells (such as by CRISPR/Cas), particularly cells intended for adoptive cell therapies, more particularly immunoresponsive cells such as T cells, may be performed to insert or knock-in an exogenous gene, such as an exogenous gene encoding a CAR or a TCR, at a preselected locus in a cell. Conventionally, nucleic acid molecules encoding CARs or TCRs are transfected or transduced to cells using randomly integrating vectors, which, depending on the site of integration, may lead to clonal expansion, oncogenic transformation, variegated transgene expression and/or transcriptional silencing of the transgene. Directing of transgene(s) to a specific locus in a cell can minimize or avoid such risks and advantageously provide for uniform expression of the transgene(s) by the cells. Without limitation, suitable ‘safe harbor’ loci for directed transgene integration include CCR5 or AAVS1. Homology-directed repair (HDR) strategies are known and described elsewhere in this specification allowing to insert transgenes into desired loci (e.g., TRAC locus).

[0435] Further suitable loci for insertion of transgenes, in particular CAR or exogenous TCR transgenes, include without limitation loci comprising genes coding for constituents of endogenous T-cell receptor, such as T-cell receptor alpha locus (TRA) or T-cell receptor beta locus (TRB), for example T-cell receptor alpha constant (TRAC) locus, T-cell receptor beta constant 1 (TRBC1) locus or T-cell receptor beta constant 2 (TRBC1) locus. Advantageously, insertion of a transgene into such locus can simultaneously achieve expression of the transgene, potentially controlled by the endogenous promoter, and knock-out expression of the endogenous TCR. This approach has been exemplified in Eyquem et al., (2017) Nature 543: 113-117, wherein the authors used CRISPR/Cas9 gene editing to knock-in a DNA molecule encoding a CD19-specific CAR into the TRAC locus downstream of the endogenous promoter; the CAR-T cells obtained by CRISPR were significantly superior in terms of reduced tonic CAR signaling and exhaustion.

[0436] T cell receptors (TCR) are cell surface receptors that participate in the activation of T cells in response to the presentation of antigen. The TCR is generally made from two chains, α and β, which assemble to form a heterodimer and associates with the CD3-transducing subunits to form the T cell receptor complex present on the cell surface. Each α and β chain of the TCR consists of an immunoglobulin-like N-terminal variable (V) and constant (C) region, a hydrophobic transmembrane domain, and a short cytoplasmic region. As for immunoglobulin molecules, the variable region of the α and β chains are generated by V(D)J recombination, creating a large diversity of antigen specificities within the population of T cells. However, in contrast to immunoglobulins that recognize intact antigen, T cells are activated by processed peptide fragments in association with an MHC molecule, introducing an extra dimension to antigen recognition by T cells, known as MHC restriction. Recognition of MHC disparities between the donor and recipient through the T cell receptor leads to T cell proliferation and the potential development of graft versus host disease (GVHD). The inactivation of TCRα or TCRβ can result in the elimination of the TCR from the surface of T cells preventing recognition of alloantigen and thus GVHD. However, TCR disruption generally results in the elimination of the CD3 signaling component and alters the means of further T cell expansion.

[0437] Hence, in certain embodiments, editing of cells (such as by CRISPR/Cas), particularly cells intended for adoptive cell therapies, more particularly immunoresponsive cells such as T cells, may be performed to knock-out or knock-down expression of an endogenous TCR in a cell. For example, NHEJ-based or HDR-based gene editing approaches can be employed to disrupt the endogenous TCR alpha and/or beta chain genes. For example, gene editing system or systems, such as CRISPR/Cas system or systems, can be designed to target a sequence found within the TCR beta chain conserved between the beta 1 and beta 2 constant region genes (TRBC1 and TRBC2) and/or to target the constant region of the TCR alpha chain (TRAC) gene.

[0438] Allogeneic cells are rapidly rejected by the host immune system. It has been demonstrated that, allogeneic leukocytes present in non-irradiated blood products will persist for no more than 5 to 6 days (Boni, Muranski et al. 2008 Blood 1; 112(12):4746-54). Thus, to prevent rejection of allogeneic cells, the host's immune system usually has to be suppressed to some extent. However, in the case of adoptive cell transfer the use of immunosuppressive drugs also have a detrimental effect on the introduced therapeutic T cells. Therefore, to effectively use an adoptive immunotherapy approach in these conditions, the introduced cells would need to be resistant to the immunosuppressive treatment. Thus, in a particular embodiment, the present invention further comprises a step of modifying T cells to make them resistant to an immunosuppressive agent, preferably by inactivating at least one gene encoding a target for an immunosuppressive agent. An immunosuppressive agent is an agent that suppresses immune function by one of several mechanisms of action. An immunosuppressive agent can be, but is not limited to a calcineurin inhibitor, a target of rapamycin, an interleukin-2 receptor α-chain blocker, an inhibitor of inosine monophosphate dehydrogenase, an inhibitor of dihydrofolic acid reductase, a corticosteroid or an immunosuppressive antimetabolite. The present invention allows conferring immunosuppressive resistance to T cells for immunotherapy by inactivating the target of the immunosuppressive agent in T cells. As non-limiting examples, targets for an immunosuppressive agent can be a receptor for an immunosuppressive agent such as: CD52, glucocorticoid receptor (GR), a FKBP family gene member and a cyclophilin family gene member.

[0439] In certain embodiments, editing of cells (such as by CRISPR/Cas), particularly cells intended for adoptive cell therapies, more particularly immunoresponsive cells such as T cells, may be performed to block an immune checkpoint, such as to knock-out or knock-down expression of an immune checkpoint protein or receptor in a cell. Immune checkpoints are inhibitory pathways that slow down or stop immune reactions and prevent excessive tissue damage from uncontrolled activity of immune cells. In certain embodiments, the immune checkpoint targeted is the programmed death-1 (PD-1 or CD279) gene (PDCD1). In other embodiments, the immune checkpoint targeted is cytotoxic T-lymphocyte-associated antigen (CTLA-4). In additional embodiments, the immune checkpoint targeted is another member of the CD28 and CTLA4 Ig superfamily such as BTLA, LAG3, ICOS, PDL1 or KIR. In further additional embodiments, the immune checkpoint targeted is a member of the TNFR superfamily such as CD40, OX40, CD137, GITR, CD27 or TIM-3.

[0440] Additional immune checkpoints include Src homology 2 domain-containing protein tyrosine phosphatase 1 (SHP-1) (Watson H A, et al., SHP-1: the next checkpoint target for cancer immunotherapy? Biochem Soc Trans. 2016 Apr. 15; 44(2):356-62). SHP-1 is a widely expressed inhibitory protein tyrosine phosphatase (PTP). In T-cells, it is a negative regulator of antigen-dependent activation and proliferation. It is a cytosolic protein, and therefore not amenable to antibody-mediated therapies, but its role in activation and proliferation makes it an attractive target for genetic manipulation in adoptive transfer strategies, such as chimeric antigen receptor (CAR) T cells. Immune checkpoints may also include T cell immunoreceptor with Ig and ITIM domains (TIGIT/Vstm3/WUCAM/VSIG9) and VISTA (Le Mercier I, et al., (2015) Beyond CTLA-4 and PD-1, the generation Z of negative checkpoint regulators. Front. Immunol. 6:418).

[0441] WO2014172606 relates to the use of MT1 and/or MT2 inhibitors to increase proliferation and/or activity of exhausted CD8+ T-cells and to decrease CD8+ T-cell exhaustion (e.g., decrease functionally exhausted or unresponsive CD8+ immune cells). In certain embodiments, metallothioneins are targeted by gene editing in adoptively transferred T cells.

[0442] In certain embodiments, targets of gene editing may be at least one targeted locus involved in the expression of an immune checkpoint protein. Such targets may include, but are not limited to CTLA4, PPP2CA, PPP2CB, PTPN6, PTPN22, PDCD1, ICOS (CD278), PDL1, KIR, LAG3, HAVCR2, BTLA, CD160, TIGIT, CD96, CRTAM, LAIR1, SIGLEC7, SIGLEC9, CD244 (2B4), TNFRSF10B, TNFRSF10A, CASP8, CASP10, CASP3, CASP6, CASP7, FADD, FAS, TGFBRII, TGFRBRI, SMAD2, SMAD3, SMAD4, SMAD10, SKI, SKIL, TGIF1, IL10RA, IL10RB, HMOX2, IL6R, IL6ST, EIF2AK4, CSK, PAG1, SIT1, FOXP3, PRDM1, BATF, VISTA, GUCY1A2, GUCY1A3, GUCY1B2, GUCY1B3, MT1, MT2, CD40, OX40, CD137, GITR, CD27, SHP-1, TIM-3, CEACAM-1, CEACAM-3, or CEACAM-5. In preferred embodiments, the gene locus involved in the expression of PD-1 or CTLA-4 genes is targeted. In other preferred embodiments, combinations of genes are targeted, such as but not limited to PD-1 and TIGIT.

[0443] By means of an example and without limitation, WO2016196388 concerns an engineered T cell comprising (a) a genetically engineered antigen receptor that specifically binds to an antigen, which receptor may be a CAR; and (b) a disrupted gene encoding a PD-L1, an agent for disruption of a gene encoding a PD-L1, and/or disruption of a gene encoding PD-L1, wherein the disruption of the gene may be mediated by a gene editing nuclease, a zinc finger nuclease (ZFN), CRISPR/Cas9 and/or TALEN. WO2015142675 relates to immune effector cells comprising a CAR in combination with an agent (such as CRISPR, TALEN or ZFN) that increases the efficacy of the immune effector cells in the treatment of cancer, wherein the agent may inhibit an immune inhibitory molecule, such as PD1, PD-L1, CTLA-4, TIM-3, LAG-3, VISTA, BTLA, TIGIT, LAIR1, CD160, 2B4, TGFR beta, CEACAM-1, CEACAM-3, or CEACAM-5. Ren et al., (2017) Clin Cancer Res 23 (9) 2255-2266 performed lentiviral delivery of CAR and electro-transfer of Cas9 mRNA and gRNAs targeting endogenous TCR, β-2 microglobulin (B2M) and PD1 simultaneously, to generate gene-disrupted allogeneic CAR T cells deficient of TCR, HLA class I molecule and PD1.

[0444] In certain embodiments, cells may be engineered to express a CAR, wherein expression and/or function of methylcytosine dioxygenase genes (TET1, TET2 and/or TET3) in the cells has been reduced or eliminated, such as by CRISPR, ZNF or TALEN (for example, as described in WO201704916).

[0445] In certain embodiments, editing of cells (such as by CRISPR/Cas), particularly cells intended for adoptive cell therapies, more particularly immunoresponsive cells such as T cells, may be performed to knock-out or knock-down expression of an endogenous gene in a cell, said endogenous gene encoding an antigen targeted by an exogenous CAR or TCR, thereby reducing the likelihood of targeting of the engineered cells. In certain embodiments, the targeted antigen may be one or more antigen selected from the group consisting of CD38, CD138, CS-1, CD33, CD26, CD30, CD53, CD92, CD100, CD148, CD150, CD200, CD261, CD262, CD362, human telomerase reverse transcriptase (hTERT), survivin, mouse double minute 2 homolog (MDM2), cytochrome P450 1B1 (CYP1B), HER2/neu, Wilms' tumor gene 1 (WT1), livin, alphafetoprotein (AFP), carcinoembryonic antigen (CEA), mucin 16 (MUC16), MUC1, prostate-specific membrane antigen (PSMA), p53, cyclin (D1), B cell maturation antigen (BCMA), transmembrane activator and CAML Interactor (TACI), and B-cell activating factor receptor (BAFF-R) (for example, as described in WO2016011210 and WO2017011804).

[0446] In certain embodiments, editing of cells (such as by CRISPR/Cas), particularly cells intended for adoptive cell therapies, more particularly immunoresponsive cells such as T cells, may be performed to knock-out or knock-down expression of one or more MHC constituent proteins, such as one or more HLA proteins and/or beta-2 microglobulin (B2M), in a cell, whereby rejection of non-autologous (e.g., allogeneic) cells by the recipient's immune system can be reduced or avoided. In preferred embodiments, one or more HLA class I proteins, such as HLA-A, B and/or C, and/or B2M may be knocked-out or knocked-down. Preferably, B2M may be knocked-out or knocked-down. By means of an example, Ren et al., (2017) Clin Cancer Res 23 (9) 2255-2266 performed lentiviral delivery of CAR and electro-transfer of Cas9 mRNA and gRNAs targeting endogenous TCR, β-2 microglobulin (B2M) and PD1 simultaneously, to generate gene-disrupted allogeneic CAR T cells deficient of TCR, HLA class I molecule and PD1.

[0447] In other embodiments, at least two genes are edited. Pairs of genes may include, but are not limited to PD1 and TCRα, PD1 and TCRβ, CTLA-4 and TCRα, CTLA-4 and TCRβ, LAG3 and TCRα, LAG3 and TCRβ, Tim3 and TCRα, Tim3 and TCRβ, BTLA and TCRα, BTLA and TCRβ, BY55 and TCRα, BY55 and TCRβ, TIGIT and TCRα, TIGIT and TCRβ, B7H5 and TCRα, B7H5 and TCRβ, LAIR1 and TCRα, LAIR1 and TCRβ, SIGLEC10 and TCRα, SIGLEC10 and TCRβ, 2B4 and TCRα, 2B4 and TCRβ, B2M and TCRα, B2M and TCRβ.

[0448] In certain embodiments, a cell may be multiply edited (multiplex genome editing) as taught herein to (1) knock-out or knock-down expression of an endogenous TCR (for example, TRBC1, TRBC2 and/or TRAC), (2) knock-out or knock-down expression of an immune checkpoint protein or receptor (for example PD1, PD-L1 and/or CTLA4); and (3) knock-out or knock-down expression of one or more MHC constituent proteins (for example, HLA-A, B and/or C, and/or B2M, preferably B2M).

[0449] Whether prior to or after genetic modification of the T cells, the T cells can be activated and expanded generally using methods as described, for example, in U.S. Pat. Nos. 6,352,694; 6,534,055; 6,905,680; 5,858,358; 6,887,466; 6,905,681; 7,144,575; 7,232,566; 7,175,843; 5,883,223; 6,905,874; 6,797,514; 6,867,041; and 7,572,631. T cells can be expanded in vitro or in vivo.

[0450] Immune cells may be obtained using any method known in the art. In one embodiment, allogenic T cells may be obtained from healthy subjects. In one embodiment T cells that have infiltrated a tumor are isolated. T cells may be removed during surgery. T cells may be isolated after removal of tumor tissue by biopsy. T cells may be isolated by any means known in the art. In one embodiment, T cells are obtained by apheresis. In one embodiment, the method may comprise obtaining a bulk population of T cells from a tumor sample by any suitable method known in the art. For example, a bulk population of T cells can be obtained from a tumor sample by dissociating the tumor sample into a cell suspension from which specific cell populations can be selected. Suitable methods of obtaining a bulk population of T cells may include, but are not limited to, any one or more of mechanically dissociating (e.g., mincing) the tumor, enzymatically dissociating (e.g., digesting) the tumor, and aspiration (e.g., as with a needle).

[0451] The bulk population of T cells obtained from a tumor sample may comprise any suitable type of T cell. Preferably, the bulk population of T cells obtained from a tumor sample comprises tumor infiltrating lymphocytes (TILs).

[0452] The tumor sample may be obtained from any mammal. Unless stated otherwise, as used herein, the term “mammal” refers to any mammal including, but not limited to, mammals of the order Logomorpha, such as rabbits; the order Carnivora, including Felines (cats) and Canines (dogs); the order Artiodactyla, including Bovines (cows) and Swines (pigs); or of the order Perssodactyla, including Equines (horses). The mammals may be non-human primates, e.g., of the order Primates, Ceboids, or Simoids (monkeys) or of the order Anthropoids (humans and apes). In some embodiments, the mammal may be a mammal of the order Rodentia, such as mice and hamsters. Preferably, the mammal is a non-human primate or a human. An especially preferred mammal is the human.

[0453] T cells can be obtained from a number of sources, including peripheral blood mononuclear cells (PBMC), bone marrow, lymph node tissue, spleen tissue, and tumors. In certain embodiments of the present invention, T cells can be obtained from a unit of blood collected from a subject using any number of techniques known to the skilled artisan, such as Ficoll separation. In one preferred embodiment, cells from the circulating blood of an individual are obtained by apheresis or leukapheresis. The apheresis product typically contains lymphocytes, including T cells, monocytes, granulocytes, B cells, other nucleated white blood cells, red blood cells, and platelets. In one embodiment, the cells collected by apheresis may be washed to remove the plasma fraction and to place the cells in an appropriate buffer or media for subsequent processing steps. In one embodiment of the invention, the cells are washed with phosphate buffered saline (PBS). In an alternative embodiment, the wash solution lacks calcium and may lack magnesium or may lack many if not all divalent cations. Initial activation steps in the absence of calcium lead to magnified activation. As those of ordinary skill in the art would readily appreciate a washing step may be accomplished by methods known to those in the art, such as by using a semi-automated “flow-through” centrifuge (for example, the Cobe 2991 cell processor) according to the manufacturer's instructions. After washing, the cells may be resuspended in a variety of biocompatible buffers, such as, for example, Ca-free, Mg-free PBS. Alternatively, the undesirable components of the apheresis sample may be removed and the cells directly resuspended in culture media.

[0454] In another embodiment, T cells are isolated from peripheral blood lymphocytes by lysing the red blood cells and depleting the monocytes, for example, by centrifugation through a PERCOLL™ gradient. A specific subpopulation of T cells, such as CD28+, CD4+, CDC, CD45RA+, and CD45RO+ T cells, can be further isolated by positive or negative selection techniques. For example, in one preferred embodiment, T cells are isolated by incubation with anti-CD3/anti-CD28 (i.e., 3×28)-conjugated beads, such as DYNABEADS® M-450 CD3/CD28 T, or XCYTE DYNABEADS™ for a time period sufficient for positive selection of the desired T cells. In one embodiment, the time period is about 30 minutes. In a further embodiment, the time period ranges from 30 minutes to 36 hours or longer and all integer values there between. In a further embodiment, the time period is at least 1, 2, 3, 4, 5, or 6 hours. In yet another preferred embodiment, the time period is 10 to 24 hours. In one preferred embodiment, the incubation time period is 24 hours. For isolation of T cells from patients with leukemia, use of longer incubation times, such as 24 hours, can increase cell yield. Longer incubation times may be used to isolate T cells in any situation where there are few T cells as compared to other cell types, such in isolating tumor infiltrating lymphocytes (TIL) from tumor tissue or from immunocompromised individuals. Further, use of longer incubation times can increase the efficiency of capture of CD8+ T cells.

[0455] Enrichment of a T cell population by negative selection can be accomplished with a combination of antibodies directed to surface markers unique to the negatively selected cells. A preferred method is cell sorting and/or selection via negative magnetic immunoadherence or flow cytometry that uses a cocktail of monoclonal antibodies directed to cell surface markers present on the cells negatively selected. For example, to enrich for CD4+ cells by negative selection, a monoclonal antibody cocktail typically includes antibodies to CD14, CD20, CD11b, CD16, HLA-DR, and CD8.

[0456] Further, monocyte populations (i.e., CD14+ cells) may be depleted from blood preparations by a variety of methodologies, including anti-CD14 coated beads or columns, or utilization of the phagocytotic activity of these cells to facilitate removal. Accordingly, in one embodiment, the invention uses paramagnetic particles of a size sufficient to be engulfed by phagocytotic monocytes. In certain embodiments, the paramagnetic particles are commercially available beads, for example, those produced by Life Technologies under the trade name Dynabeads™. In one embodiment, other non-specific cells are removed by coating the paramagnetic particles with “irrelevant” proteins (e.g., serum proteins or antibodies). Irrelevant proteins and antibodies include those proteins and antibodies or fragments thereof that do not specifically target the T cells to be isolated. In certain embodiments, the irrelevant beads include beads coated with sheep anti-mouse antibodies, goat anti-mouse antibodies, and human serum albumin.

[0457] In brief, such depletion of monocytes is performed by preincubating T cells isolated from whole blood, apheresed peripheral blood, or tumors with one or more varieties of irrelevant or non-antibody coupled paramagnetic particles at any amount that allows for removal of monocytes (approximately a 20:1 bead:cell ratio) for about 30 minutes to 2 hours at 22 to 37 degrees C., followed by magnetic removal of cells which have attached to or engulfed the paramagnetic particles. Such separation can be performed using standard methods available in the art. For example, any magnetic separation methodology may be used including a variety of which are commercially available, (e.g., DYNAL® Magnetic Particle Concentrator (DYNAL MPC®)). Assurance of requisite depletion can be monitored by a variety of methodologies known to those of ordinary skill in the art, including flow cytometric analysis of CD14 positive cells, before and after depletion.

[0458] For isolation of a desired population of cells by positive or negative selection, the concentration of cells and surface (e.g., particles such as beads) can be varied. In certain embodiments, it may be desirable to significantly decrease the volume in which beads and cells are mixed together (i.e., increase the concentration of cells), to ensure maximum contact of cells and beads. For example, in one embodiment, a concentration of 2 billion cells/ml is used. In one embodiment, a concentration of 1 billion cells/ml is used. In a further embodiment, greater than 100 million cells/ml is used. In a further embodiment, a concentration of cells of 10, 15, 20, 25, 30, 35, 40, 45, or 50 million cells/ml is used. In yet another embodiment, a concentration of cells from 75, 80, 85, 90, 95, or 100 million cells/ml is used. In further embodiments, concentrations of 125 or 150 million cells/ml can be used. Using high concentrations can result in increased cell yield, cell activation, and cell expansion. Further, use of high cell concentrations allows more efficient capture of cells that may weakly express target antigens of interest, such as CD28-negative T cells, or from samples where there are many tumor cells present (i.e., leukemic blood, tumor tissue, etc). Such populations of cells may have therapeutic value and would be desirable to obtain. For example, using high concentration of cells allows more efficient selection of CD8+ T cells that normally have weaker CD28 expression.

[0459] In a related embodiment, it may be desirable to use lower concentrations of cells. By significantly diluting the mixture of T cells and surface (e.g., particles such as beads), interactions between the particles and cells is minimized. This selects for cells that express high amounts of desired antigens to be bound to the particles. For example, CD4+ T cells express higher levels of CD28 and are more efficiently captured than CD8+ T cells in dilute concentrations. In one embodiment, the concentration of cells used is 5×10⁶/ml. In other embodiments, the concentration used can be from about 1×10⁵/ml to 1×10⁶/ml, and any integer value in between.

[0460] T cells can also be frozen. Wishing not to be bound by theory, the freeze and subsequent thaw step provides a more uniform product by removing granulocytes and to some extent monocytes in the cell population. After a washing step to remove plasma and platelets, the cells may be suspended in a freezing solution. While many freezing solutions and parameters are known in the art and will be useful in this context, one method involves using PBS containing 20% DMSO and 8% human serum albumin, or other suitable cell freezing media, the cells then are frozen to −80° C. at a rate of 1° per minute and stored in the vapor phase of a liquid nitrogen storage tank. Other methods of controlled freezing may be used as well as uncontrolled freezing immediately at −20° C. or in liquid nitrogen.

[0461] T cells for use in the present invention may also be antigen-specific T cells. For example, tumor-specific T cells can be used. In certain embodiments, antigen-specific T cells can be isolated from a patient of interest, such as a patient afflicted with a cancer or an infectious disease. In one embodiment, neoepitopes are determined for a subject and T cells specific to these antigens are isolated. Antigen-specific cells for use in expansion may also be generated in vitro using any number of methods known in the art, for example, as described in U.S. Patent Publication No. US 20040224402 entitled, Generation and Isolation of Antigen-Specific T Cells, or in U.S. Pat. No. 6,040,177. Antigen-specific cells for use in the present invention may also be generated using any number of methods known in the art, for example, as described in Current Protocols in Immunology, or Current Protocols in Cell Biology, both published by John Wiley & Sons, Inc., Boston, Mass.

[0462] In a related embodiment, it may be desirable to sort or otherwise positively select (e.g. via magnetic selection) the antigen specific cells prior to or following one or two rounds of expansion. Sorting or positively selecting antigen-specific cells can be carried out using peptide-MHC tetramers (Altman, et al., Science. 1996 Oct. 4; 274(5284):94-6). In another embodiment, the adaptable tetramer technology approach is used (Andersen et al., 2012 Nat Protoc. 7:891-902). Tetramers are limited by the need to utilize predicted binding peptides based on prior hypotheses, and the restriction to specific HLAs. Peptide-MHC tetramers can be generated using techniques known in the art and can be made with any MHC molecule of interest and any antigen of interest as described herein. Specific epitopes to be used in this context can be identified using numerous assays known in the art. For example, the ability of a polypeptide to bind to MHC class I may be evaluated indirectly by monitoring the ability to promote incorporation of ¹²⁵I labeled β2-microglobulin (β2 m) into MHC class I/β2 m/peptide heterotrimeric complexes (see Parker et al., J. Immunol. 152:163, 1994).

[0463] In one embodiment cells are directly labeled with an epitope-specific reagent for isolation by flow cytometry followed by characterization of phenotype and TCRs. In one embodiment, T cells are isolated by contacting with T cell specific antibodies. Sorting of antigen-specific T cells, or generally any cells of the present invention, can be carried out using any of a variety of commercially available cell sorters, including, but not limited to, MoFlo sorter (DakoCytomation, Fort Collins, Colo.), FACSAria™, FACSArray™, FACSVantage™, BD™ LSR II, and FACSCalibur™ (BD Biosciences, San Jose, Calif.).

[0464] In a preferred embodiment, the method comprises selecting cells that also express CD3. The method may comprise specifically selecting the cells in any suitable manner. Preferably, the selecting is carried out using flow cytometry. The flow cytometry may be carried out using any suitable method known in the art. The flow cytometry may employ any suitable antibodies and stains. Preferably, the antibody is chosen such that it specifically recognizes and binds to the particular biomarker being selected. For example, the specific selection of CD3, CD8, TIM-3, LAG-3, 4-1BB, or PD-1 may be carried out using anti-CD3, anti-CD8, anti-TIM-3, anti-LAG-3, anti-4-1BB, or anti-PD-1 antibodies, respectively. The antibody or antibodies may be conjugated to a bead (e.g., a magnetic bead) or to a fluorochrome. Preferably, the flow cytometry is fluorescence-activated cell sorting (FACS). TCRs expressed on T cells can be selected based on reactivity to autologous tumors. Additionally, T cells that are reactive to tumors can be selected for based on markers using the methods described in patent publication Nos. WO2014133567 and WO2014133568, herein incorporated by reference in their entirety. Additionally, activated T cells can be selected for based on surface expression of CD107a.

[0465] In one embodiment of the invention, the method further comprises expanding the numbers of T cells in the enriched cell population. Such methods are described in U.S. Pat. No. 8,637,307 and is herein incorporated by reference in its entirety. The numbers of T cells may be increased at least about 3-fold (or 4-, 5-, 6-, 7-, 8-, or 9-fold), more preferably at least about 10-fold (or 20-, 30-, 40-, 50-, 60-, 70-, 80-, or 90-fold), more preferably at least about 100-fold, more preferably at least about 1,000 fold, or most preferably at least about 100,000-fold. The numbers of T cells may be expanded using any suitable method known in the art. Exemplary methods of expanding the numbers of cells are described in patent publication No. WO 2003057171, U.S. Pat. No. 8,034,334, and U.S. Patent Application Publication No. 2012/0244133, each of which is incorporated herein by reference.

[0466] In one embodiment, ex vivo T cell expansion can be performed by isolation of T cells and subsequent stimulation or activation followed by further expansion. In one embodiment of the invention, the T cells may be stimulated or activated by a single agent. In another embodiment, T cells are stimulated or activated with two agents, one that induces a primary signal and a second that is a co-stimulatory signal. Ligands useful for stimulating a single signal or stimulating a primary signal and an accessory molecule that stimulates a second signal may be used in soluble form. Ligands may be attached to the surface of a cell, to an Engineered Multivalent Signaling Platform (EMSP), or immobilized on a surface. In a preferred embodiment both primary and secondary agents are co-immobilized on a surface, for example a bead or a cell. In one embodiment, the molecule providing the primary activation signal may be a CD3 ligand, and the co-stimulatory molecule may be a CD28 ligand or 4-1BB ligand.

[0467] In certain embodiments, T cells comprising a CAR or an exogenous TCR, may be manufactured as described in WO2015120096, by a method comprising: enriching a population of lymphocytes obtained from a donor subject; stimulating the population of lymphocytes with one or more T-cell stimulating agents to produce a population of activated T cells, wherein the stimulation is performed in a closed system using serum-free culture medium; transducing the population of activated T cells with a viral vector comprising a nucleic acid molecule which encodes the CAR or TCR, using a single cycle transduction to produce a population of transduced T cells, wherein the transduction is performed in a closed system using serum-free culture medium; and expanding the population of transduced T cells for a predetermined time to produce a population of engineered T cells, wherein the expansion is performed in a closed system using serum-free culture medium. In certain embodiments, T cells comprising a CAR or an exogenous TCR, may be manufactured as described in WO2015120096, by a method comprising: obtaining a population of lymphocytes; stimulating the population of lymphocytes with one or more stimulating agents to produce a population of activated T cells, wherein the stimulation is performed in a closed system using serum-free culture medium; transducing the population of activated T cells with a viral vector comprising a nucleic acid molecule which encodes the CAR or TCR, using at least one cycle transduction to produce a population of transduced T cells, wherein the transduction is performed in a closed system using serum-free culture medium; and expanding the population of transduced T cells to produce a population of engineered T cells, wherein the expansion is performed in a closed system using serum-free culture medium. The predetermined time for expanding the population of transduced T cells may be 3 days. The time from enriching the population of lymphocytes to producing the engineered T cells may be 6 days. The closed system may be a closed bag system. Further provided is population of T cells comprising a CAR or an exogenous TCR obtainable or obtained by said method, and a pharmaceutical composition comprising such cells.

[0468] In certain embodiments, T cell maturation or differentiation in vitro may be delayed or inhibited by the method as described in WO2017070395, comprising contacting one or more T cells from a subject in need of a T cell therapy with an AKT inhibitor (such as, e.g., one or a combination of two or more AKT inhibitors disclosed in claim 8 of WO2017070395) and at least one of exogenous Interleukin-7 (IL-7) and exogenous Interleukin-15 (IL-15), wherein the resulting T cells exhibit delayed maturation or differentiation, and/or wherein the resulting T cells exhibit improved T cell function (such as, e.g., increased T cell proliferation; increased cytokine production; and/or increased cytolytic activity) relative to a T cell function of a T cell cultured in the absence of an AKT inhibitor.

[0469] In certain embodiments, a patient in need of a T cell therapy may be conditioned by a method as described in WO2016191756 comprising administering to the patient a dose of cyclophosphamide between 200 mg/m2/day and 2000 mg/m2/day and a dose of fludarabine between 20 mg/m2/day and 900 mg/m²/day.

### Vaccine or Immunogenic Composition Kits and Co-Packaging

[0470] In an aspect, the invention provides kits containing any one or more of the elements discussed herein to allow administration of the therapy. Elements may be provided individually or in combinations, and may be provided in any suitable container, such as a vial, a bottle, or a tube. In some embodiments, the kit includes instructions in one or more languages, for example in more than one language. In some embodiments, a kit comprises one or more reagents for use in a process utilizing one or more of the elements described herein. Reagents may be provided in any suitable container. For example, a kit may provide one or more delivery or storage buffers. Reagents may be provided in a form that is usable in a particular process, or in a form that requires addition of one or more other components before use (e.g. in concentrate or lyophilized form). A buffer can be any buffer, including but not limited to a sodium carbonate buffer, a sodium bicarbonate buffer, a borate buffer, a Tris buffer, a MOPS buffer, a HEPES buffer, and combinations thereof. In some embodiments, the buffer is alkaline. In some embodiments, the buffer has a pH from about 7 to about 10. In some embodiments, the kit comprises one or more of the vectors, proteins and/or one or more of the polynucleotides described herein. The kit may advantageously allow the provision of all elements of the systems of the invention. Kits can involve vector(s) and/or particle(s) and/or nanoparticle(s) containing or encoding RNA(s) for 1-50 or more neoantigen mutations to be administered to an animal, mammal, primate, rodent, etc., with such a kit including instructions for administering to such a eukaryote; and such a kit can optionally include any of the anti-cancer agents described herein. The kit may include any of the components above (e.g. vector(s) and/or particle(s) and/or nanoparticle(s) containing or encoding RNA(s) for 1-50 or more neoantigen mutations, neoantigen proteins or peptides) as well as instructions for use with any of the methods of the present invention. In one embodiment the kit contains at least one vial with an immunogenic composition or vaccine. In one embodiment the kit contains at least one vial with an immunogenic composition or vaccine and at least one vial with an anticancer agent. In one embodiment kits may comprise ready to use components that are mixed and ready to administer. In one aspect a kit contains a ready to use immunogenic or vaccine composition and a ready to use anti-cancer agent. The ready to use immunogenic or vaccine composition may comprise separate vials containing different pools of immunogenic compositions. The immunogenic compositions may comprise one vial containing a viral vector or DNA plasmid and the other vial may comprise immunogenic protein. The ready to use anticancer agent may comprise a cocktail of anticancer agents or a single anticancer agent. Separate vials may contain different anticancer agents. In another embodiment a kit may contain a ready to use anti-cancer agent and an immunogenic composition or vaccine in a ready to be reconstituted form. The immunogenic or vaccine composition may be freeze dried or lyophilized. The kit may comprise a separate vial with a reconstitution buffer that can be added to the lyophilized composition so that it is ready to administer. The buffer may advantageously comprise an adjuvant or emulsion according to the present invention. In another embodiment the kit may comprise a ready to reconstitute anticancer agent and a ready to reconstitute immunogenic composition or vaccine. In this aspect both may be lyophilized. In this aspect separate reconstitution buffers for each may be included in the kit. The buffer may advantageously comprise an adjuvant or emulsion according to the present invention. In another embodiment the kit may comprise single vials containing a dose of immunogenic composition and anti-cancer agent that are administered together. In another aspect multiple vials are included so that one vial is administered according to a treatment timeline. One vial may only contain the anti-cancer agent for one dose of treatment, another may contain both the anti-cancer agent and immunogenic composition for another dose of treatment, and one vial may only contain the immunogenic composition for yet another dose. In a further aspect the vials are labeled for their proper administration to a patient in need thereof. The immunogen or anti-cancer agents of any embodiment may be in a lyophilized form, a dried form or in aqueous solution as described herein. The immunogen may be a live attenuated virus, protein, or nucleic acid as described herein.

[0471] In one embodiment the anticancer agent is one that enhances the immune system to enhance the effectiveness of the immunogenic composition or vaccine. In a preferred embodiment the anti-cancer agent is a checkpoint inhibitor. In another embodiment the kit contains multiple vials of immunogenic compositions and anti-cancer agents to be administered at different time intervals along a treatment plan. In another embodiment the kit may comprise separate vials for an immunogenic composition for use in priming an immune response and another immunogenic composition to be used for boosting. In one aspect the priming immunogenic composition could be DNA or a viral vector and the boosting immunogenic composition may be protein. Either composition may be lyophilized or ready for administering. In another embodiment different cocktails of anti-cancer agents containing at least one anticancer agent are included in different vials for administration in a treatment plan.

[0472] Although the present invention and its advantages have been described in detail, it should be understood that various changes, substitutions and alterations can be made herein without departing from the spirit and scope of the invention as defined in the appended claims.

[0473] Further embodiments are illustrated in the following Examples which are given for illustrative purposes only and are not intended to limit the scope of the invention.

### EXAMPLES

### Example 1—Experimental Procedures

[0474] Cell Culture and HLA-Peptide Immunopurification. Applicants tested mono-allelic B cells generated by transduction of B721.221 cells with a retroviral vector coding a single class I HLA allele as described previously (Reche P A, Keskin D B, Hussey R E, Ancuta P, Gabuzda D, Reinherz E L. Elicitation from virus-naive individuals of cytotoxic T lymphocytes directed against conserved HIV-1 epitopes. Med Immunol. 2006; 5:1) (cells expressing HLA-A*02:01, -A*24:02, and -B*44:03 were purchased from the Fred Hutchinson Research Cell Bank, University of Washington; cells expressing HLA-A*03:01 were a gift from Dr. Marcus Altfeld and Dr. Wilfredo F. Garcia-Beltran, Ragon Institute; others were a gift from Dr. E. L. Reinherz, Dana Farber Cancer Institute). Cell lines were confirmed by standard molecular typing (Brigham and Women's Hospital Tissue Typing Laboratory). HLA-peptide immunopurifcation is described in the Supplemental Experimental Procedures of Abelin et al., Mass Spectrometry Profiling of HLA-Associated Peptidomes in Mono-allelic Cells Enables More Accurate Epitope Prediction. Immunity. 2017 Feb. 21; 46(2):315-326.

[0475] HLA-Peptide Sequencing by Tandem Mass Spectrometry. All nanoLC-ESI-MS/MS analyses employed the same LC separation conditions, instrument parameters, and data analytics described in the Supplemental Experimental Procedures of Abelin et al., Mass Spectrometry Profiling of HLA-Associated Peptidomes in Mono-allelic Cells Enables More Accurate Epitope Prediction. Immunity. 2017 Feb. 21; 46(2):315-326. The original mass spectra may be downloaded from MassIVE (massive.ucsd.edu) under the identifier MassIVE: MSV000080527. The data are directly accessible via ftp://massive.ucsd.edu/MSV000080527.

[0476] Sequence Properties of MS-Identified Peptides Compared to IEDB. A curated set of previously identified class I HLA-bound peptides was downloaded from the Immune Epitope Database (IEDB) at www.iedb.org/(accessed on Oct. 26, 2015) (Vita R, Overton J A, Greenbaum J A, Ponomarenko J, Clark J D, Cantrell J R, Wheeler D K, Gabbard J L, Hix D, Sette A, Peters B. The immune epitope database (IEDB) 3.0. Nucleic Acids Res. 2015; 43:D405-D412). For each allele, IEDB peptides with a measured affinity <500 nM were compared to MS peptides in terms of their length and positional amino acid frequencies. In addition, a metric was defined for the pairwise “distance” between 9-mers (a Hamming distance calculated with an amino acid substitution matrix [Kim Y, Sidney J, Pinilla C, Sette A, Peters B. Derivation of an amino acid similarity matrix for peptide: MHC binding and its application as a Bayesian prior. BMC Bioinformatics. 2009; 10:394] and inversely weighted according to positional entropy) and used for clustering MS and IEDB peptides in a two-dimensional representation. A machine-learning approach (Supplemental Experimental Procedures of Abelin et al., Mass Spectrometry Profiling of HLA-Associated Peptidomes in Mono-allelic Cells Enables More Accurate Epitope Prediction. Immunity. 2017 Feb. 21; 46(2):315-326) identified peptides with motifs favored in the MS but that were poor-scoring according to NetMHCpan 2.8; the MHC-binding affinities for these peptides were determined by competitive binding per gel filtration protocol (Sidney J, Southwood S, Oseroff C, del Guercio M F, Sette A, Grey H M. Measurement of MHC/peptide interactions by gel filtration. Curr Protoc Immunol Chapter. 2001; 18:3).

[0477] Peptide Processing Analyses. For each MS hit, the upstream ten amino acids and downstream ten amino acids were determined. Sequence context was likewise determined for decoy peptides (100 per hit; selected randomly from the proteome and matched according to their first two and last two amino acids). Relative amino acid frequencies were determined at each position upstream and downstream of hits and decoys. Additional previously published MS datasets were analyzed in the same manner. For comparison, peptides with high and low NetChop scores (top 25% and bottom 25% of 1 million randomly selected sites in the genome) were compared, and the motif most favored by NetChop was derived.

[0478] Relationship between Expression and Affinity. RNA was isolated from B721.221 cells expressing HLA-A*29:02, B*51:01, B*54:01, and B*57:01 (RNeasy mini kit, QIAGEN), processed to cDNA (Nextera XT kit; Smart-seq2 protocol), sequenced (HiSeq2500, Rapid Run mode; 50 bp paired-end), and aligned (bowtie2-2.2.1 (Langmead B, Salzberg S L. Fast gapped-read alignment with Bowtie 2. Nat Methods. 2012; 9:357-359); UCSC hg19 annotation). Applicants averaged transcript expression (RSEM-1.2.19 [Li B, Dewey C N. RSEM: Accurate transcript quantification from RNA-Seq data with or without a reference genome. BMC Bioinformatics. 2011; 12:323]; GEO: GSE93315) across the four cell lines and made adjustments by dropping non-coding transcripts and rescaling TPM values to sum to one million. Applicants determined expression of each peptide source protein by summing all transcripts containing the peptide.

[0479] Impact of Processing Pathways. MS peptides were compared to decoys (ten decoys per MS peptide; each from a different gene; matched per transcript expression) in terms of various features potentially related to peptide processing: UNIPROT localization (www.uniprot.org), distance from protein N terminus, source protein stability index (Guruprasad K, Reddy B V B, Pandit M W. Correlation between stability of a protein and its dipeptide composition: a novel approach for predicting in vivo stability of a protein from its primary sequence. Protein Eng. 1990; 4:155-161), intrinsically disordered sequence content (http://d2p2.pro) (Oates M E, Romero P, Ishida T, Ghalwash M, Mizianty M J, Xue B, Dosztányi Z, Uversky V N, Obradovic Z, Kurgan L, et al. D²P²: Database of disordered protein predictions. Nucleic Acids Res. 2013; 41:D508-D516), count of known ubiquitination sites (Eichmann M, de Ru A, van Veelen P A, Peakman M, Kronenberg-Versteeg D. Identification and characterisation of peptide binding motifs of six autoimmune disease-associated human leukocyte antigen-class I molecules including HLA-B*39:06. Tissue Antigens. 2014; 84:378-388; Krönke J, Fink E C, Hollenbach P W, MacBeth K J, Hurst S N, Udeshi N D, Chamberlain P P, Mani D R, Man H W, Gandhi A K, et al. Lenalidomide induces ubiquitination and degradation of CK1α in del(5q) MDS. Nature. 2015; 523:183-188; Udeshi N D, Mani D R, Eisenhaure T, Mertins P, Jaffe J D, Clauser K R, Hacohen N, Carr S A. Methods for quantification of in vivo changes in protein ubiquitination following proteasome and deubiquitinase inhibition. Mol Cell Proteomics. 2012; 11:148-159), and physical interaction with known protein turnover regulators (Behrends C, Sowa M E, Gygi S P, Harper J W. Network organization of the human autophagy system. Nature. 2010; 466:68-76).

[0480] Development of New Epitope-Selection Algorithms. For each allele, Applicants trained neural-network classifiers (one hidden layer with 50 units) (by using Theano (Theano Development Team, 2016); 5-fold cross-validation) to differentiate MS 9-mers from random decoy 9-mers by using different input feature schemes: dummy encoding, BLOSUM62, PMBEC (Kim Y, Sidney J, Pinilla C, Sette A, Peters B. Derivation of an amino acid similarity matrix for peptide: MHC binding and its application as a Bayesian prior. BMC Bioinformatics. 2009; 10:394), biochemical properties (Bremel R D, Homan E J. An integrated approach to epitope analysis I: Dimensional reduction, visualization and prediction of MHC binding using amino acid principal components and regression approaches. Immunome Res. 2010; 6:7), and peptide-level features (Osorio D, Rondón-Villarreal P, Tones R. Peptides: Calculate indices and theoretical physicochemical properties of peptides and protein sequences. 2014 CRAN.R-project.org/package=Peptides. R Package Version 1.1.0); Applicants averaged the results of these models to obtain a single prediction (called MSIntrinsic). Applicants made a second prediction (MSIntrinsicEC) by adding expression and MS-trained cleavability. Applicants validated performance on external data by measuring PPV (fraction of true MS peptides among the top-scoring 0.1%, where decoys are present at 999:1). For multi-allelic datasets, the evaluation excluded any MS peptides that obviously belonged to an HLA-A or HLA-B allele other than the one in question (e.g., when predicting for A01:01 for a cell line with genotype A01:01/A02:01/B35:01/B44:02, Applicants excluded MS-observed peptides with NetMHCPan 2.8 scores worse than 1,000 nM for A01:01 and better than 150 nM for A02:01, B35:01, or B44:02).

### Example 2—Improved Prediction of Endogenously Presented HLA Class I Epitopes in Human Tumors Based on 95 Mono-Allelic Peptidomes

[0481] Antigen discovery is a high priority for developing cancer immunotherapies, but remains challenging because of inter-individual variation in tumor-specific antigens and rules of antigen presentation. To enable prediction of endogenous HLA-associated peptides across a large fraction of the human population, we used mass spectrometry (MS) to profile >185,000 peptides eluted from 95 HLA-A, B, C and G mono-allelic cell lines. In addition to identifying canonical peptide motifs for each of these HLA alleles, we found unique and shared binding submotifs across alleles, and distinct motifs associated with different peptide lengths. Based on the full dataset of peptides and quantitative gene expression, we learned allele-and-length-specific and pan-allele-pan-length models that integrate transcript abundance and peptide processing. These models predicted endogenous HLA-associated ligands with a 2-fold improvement in positive predictive value compared to existing tools and correctly identified >75% of HLA-bound peptides that were observed experimentally in 11 patient tumor cell lines by MS. More accurate prediction of class I epitopes will enable antigen discovery in cancer as well as infections, autoimmunity and other immune-related conditions.

[0482] The HLA genes are the most polymorphic across the human population, with more than 16,200 distinct class I alleles as of May 2019 (Lefranc et al. 2015; Robinson et al. 2015). Short peptides (8-11mers) bound to the diverse array of class I HLA molecules (HLA-A, -B, -C, and -G) arise from endogenous or foreign proteins that are cleaved by the proteasome and peptidases of the endoplasmic reticulum prior to loading and display by surface HLA class I proteins to cytotoxic T cell lymphocytes (CTLs). Given the diversity in HLA binding, an important question is whether one can accurately predict if a peptide is presented by a specific HLA allele. The accuracy of computational models that predict binding between peptides and HLA alleles, especially HLA-A and -B alleles, has been improving (Jurtz et al. 2017; Abelin et al. 2017; O'Donnell et al. 2018; Gfeller et al. 2018; Bulik-Sullivan et al. 2018). In the field of cancer, these tools are now increasingly used in conjunction with next-generation DNA sequencing of tumors to identify immunogenic cancer neoantigens, which arise from tumor-specific somatic mutations. They have accelerated epitope discovery, as they enable experimental efforts to focus on a narrower list of epitopes with predicted high binding scores. However, even with widely used algorithms such as NetMHCpan (Jurtz et al. 2017; Nielsen and Andreatta 2016), the numbers of falsely discovered binders increase once the predicted binding affinity decreases (i.e. IC50>100 nM)(Rajasagi et al. 2014). Furthermore, while these algorithms are designed to predict the binding affinity of peptides to individual HLA molecules—the final step of antigen presentation, they do not account for intracellular availability of the peptide precursors or their processing by proteases. Finally, because previous research has focused exclusively on the few alleles highly expressed by Caucasian populations, existing algorithms have uneven accuracy in the prediction of epitopes binding to less common alleles in Caucasians, or those highly prevalent in other populations.

[0483] Detection and sequencing of HLA-binding peptides by liquid chromatography-tandem mass spectrometry (LC-MS/MS) has the unique advantage that information on endogenously processed and presented peptides from a cell can be directly learned. Characterization of HLA-bound peptides eluted from a limited set of cell lines engineered to express single HLA alleles could reveal novel allele-specific peptide motifs and be used to train predictive algorithms for endogenous allele-specific peptide presentation (Abelin et al. 2017). Here, Applicant greatly expanded the dataset and identified and characterized 186,464 eluted peptides from 95 HLA-A, -B, -C and -G alleles. Applicant included HLA-G peptidomes since this HLA was implicated in maternal-fetal tolerance and was also upregulated in many cancers (de Kruijf et al. 2010; Zhang et al. 2017). Altogether, these data provided the opportunity to compare peptide length preferences, and the spectrum of distinct and shared submotifs across HLA class I alleles, revealing the diversity and complexity of endogenous HLA ligands. Using this information, Applicant trained novel allele-and-length-specific and pan-allele-pan-length predictors, which identified 2-fold more peptides than conventional prediction tools, when evaluating peptides directly detected by MS from 11 patient-derived tumor cell lines generated from diverse malignancies. The datasets of HLA-binding peptides from mono-allelic cells and patient-derived tumors, as well as the prediction models and interactive web tools are all made publicly available.

### Results

[0484] Systematic LC-MS/MS Profiling of HLA Class I Ligands from Mono-Allelic Cell Lines

[0485] Applicant engineered 79 cell lines expressing a single HLA class I allele by stably transfecting individual HLA-A, -B, -C, or -G alleles into the HLA-null B721.221 cell line (FIG. 26A), adding to the 16 lines (Abelin et al. 2017). Surface expression of the alleles was confirmed by flow cytometric detection (FIG. 26B; FIG. 32A). Altogether, the collection of 95 cell lines (31 HLA-A, 40 HLA-B, 21 HLA-C and 3 HLA-G) covered at least one allele in 95% of individuals worldwide for each HLA-A, —B and for HLA-C alleles, respectively (FIG. 26C)(Dawson et al. 2001; Gragert et al. 2013; Solberg et al. 2008).

[0486] HLA-bound peptides for each engineered cell line were isolated by HLA immunopurification, analyzed by high-resolution LC-MS/MS and sequences identified by a ‘no-enzyme’ specificity database search at 1% FDR. Applicant identified a median of 1860 peptides per allele (range 692-4,033), or a total of 186,464 peptides across the 95 alleles after excluding non-specifically bound peptides (see, e.g., A*01:01 (SEQ ID Nos: 44-1120); A*02:01 (SEQ ID Nos: 1121-4202); A*02:02 (SEQ ID Nos: 4203-7373); A*02:03 (SEQ ID Nos: 7374-9953); A*02:04 (SEQ ID Nos: 9954-11940); A*02:05 (SEQ ID Nos: 11941-14981); A*02:06 (SEQ ID Nos: 14982-17191); A*02:07 (SEQ ID Nos: 117192-20710); A*02:11 (SEQ ID Nos: 20711-22696); A*03:01 (SEQ ID Nos: 22697-24233); A*11:01 (SEQ ID Nos: 24234-27505); A*11:02 (SEQ ID Nos: 27506-29812); A*23:01 (SEQ ID Nos: 29813-32133); A*24:02 (SEQ ID Nos: 32134-34347); A*24:07 (SEQ ID Nos: 34348-35681); A*25:01 (SEQ ID Nos: 35682-36682); A*26:01 (SEQ ID Nos: 36683-37957); A*29:02 (SEQ ID Nos: 37958-38921); A*30:01 (SEQ ID Nos: 38922-40029); A*30:02 (SEQ ID Nos: 40030-42114); A*31:01 (SEQ ID Nos: 42115-42919); A*32:01 (SEQ ID Nos: 42920-44874); A*33:01 (SEQ ID Nos: 44875-46761); A*33:03 (SEQ ID Nos: 46762-49053); A*34:01 (SEQ ID Nos: 49054-50948); A*34:02 (SEQ ID Nos: 50949-53677); A*36:01 (SEQ ID Nos: 53678-55165); A*66:01 (SEQ ID Nos: 55166-56901); A*68:01 (SEQ ID Nos: 56902-58374); A*68:02 (SEQ ID Nos: 58375-59804); A*74:01 (SEQ ID Nos: 59805-61821); B*07:02 (SEQ ID Nos: 61822-63473); B*07:04 (SEQ ID Nos: 63474-64885); B*08:01 (SEQ ID Nos: 64886-65609); B*13:01 (SEQ ID Nos: 65610-69419); B*13:02 (SEQ ID Nos: 69420-71587); B*14:02 (SEQ ID Nos: 71588-72970); B*15:01 (SEQ ID Nos: 72971-76378); B*15:02 (SEQ ID Nos: 76379-77762); B*15:03 (SEQ ID Nos: 77763-80458); B*15:10 (SEQ ID Nos: 80459-81940); B*15:17 (SEQ ID Nos: 81941-83632); B*18:01 (SEQ ID Nos: 83633-85593); B*27.05 (SEQ ID Nos: 85594-87076); B*35:01 (SEQ ID Nos: 87077-87772); B*35:03 (SEQ ID Nos: 87773-89157); B*35:07 (SEQ ID Nos: 89158-90977); B*37:01 (SEQ ID Nos: 90978-92452); B*38:01 (SEQ ID Nos: 92453-94858); B*38:02 (SEQ ID Nos: 94859-97742); B*40:01 (SEQ ID Nos: 97743-100731); B*40:02 (SEQ ID Nos: 100732-104409); B*40:06 (SEQ ID Nos: 104410-106653); B*42:01 (SEQ ID Nos: 106612-019885); B*44:02 (SEQ ID Nos: 109886-110903); B*44:03 (SEQ ID Nos: 110904-111749); B*45:01 (SEQ ID Nos: 111750-113153); B*46:01 (SEQ ID Nos: 113154-114113); B*49:01 (SEQ ID Nos: 114114-117833); B*50:01 (SEQ ID Nos: 117834-118468); B*51:01 (SEQ ID Nos: 118469-119991); B*52:01 (SEQ ID Nos: 119992-121525); B*53:01 (SEQ ID Nos: 121526-123560); 54:01 (SEQ ID Nos: 123561-124684); B*55:01 (SEQ ID Nos: 124685-126136); B*55:02 (SEQ ID Nos: 126137-127557); B*56:01 (SEQ ID Nos: 127558-129239); B*57:01 (SEQ ID Nos: 129240-130274); B*57:03 (SEQ ID Nos: 130275-132636); B*58:01 (SEQ ID Nos: 132637-134577); B*58:02 (SEQ ID Nos: 134578-135530); C*01:02 (SEQ ID Nos: 135531-136878); C*02:02 (SEQ ID Nos: 136879-137802); C*03:02 (SEQ ID Nos: 137803-138984); C*03:03 (SEQ ID Nos: 138985-141074); C*03:04 (SEQ ID Nos: 141075-143394); C*04:01 (SEQ ID Nos: 143395-145236); C*04:03 (SEQ ID Nos: 145237-146269); C*05:01 (SEQ ID Nos: 146270-147708); C*06:02 (SEQ ID Nos: 147709-149028); C*07:01 (SEQ ID Nos: 149029-149822); C*07:02 (SEQ ID Nos: 149823-150900); C*07:04 (SEQ ID Nos: 150901-151615); C*08:01 (SEQ ID Nos: 151616-153388); C*08:02 (SEQ ID Nos: 153389-156499); C*12:02 (SEQ ID Nos: 156500-157889); C*12:03 (SEQ ID Nos: 157890-160043); C*14:02 (SEQ ID Nos: 160044-161408); C*14:03 (SEQ ID Nos: 161409-164186); C*15:02 (SEQ ID Nos: 164187-167475); C*16:01 (SEQ ID Nos: 167476-170317); C*17:01 (SEQ ID Nos: 170318-171281); G*01:01 (SEQ ID Nos: 171282-172073); G*01:03 (SEQ ID Nos: 172074-172742) and G*01:04 (SEQ ID Nos: 172743-173477); and FIG. 32B), and covering more peptides containing cysteine by adding carbamidomethylation of cysteine into the sample processing workflow. Most of the observed modifications, representing 12% of total identified peptides, could be explained by sample processing artifacts such as oxidation of methionine (FIGS. 32C-32D). The HLA-bound peptides Applicant identified mapped to 10,649 human genes (with >2 HLA-associated peptides per gene), which represent 91% of human gene products detected by LC-MS/MS in an extensively fractionated proteome of the B721.221 cell line (with >2 unique peptides per gene), and 89% of transcribed genes (with >2 transcripts per million (TPM) from RNA-seq) (FIG. 26C; FIG. 32E). While the majority of proteins were represented by more than one HLA peptide, the top 50 most frequently detected proteins in the proteome analysis were large, highly abundant, and consistently observed as eluted peptides across HLA-A, —B, and -C alleles (FIG. 32F). Notably, 1,517 genes represented by HLA-bound peptides were not detected in either of the two expression data sets, suggesting they had very low RNA and protein levels. The respective peptides are reliable identifications because they had peptide identification metrics comparable to the rest of the dataset (FIG. 32G). Subsetting the dataset of peptides to sets of 6 alleles matched to patient-derived melanoma cell lines (Ott et al. 2017) usually recovered 4,000-5,000 genes (FIG. 32H). Applicant concluded that all expressed proteins could undergo processing and presentation by HLA class I molecules, a far higher proportion than previously appreciated (Pearson et al. 2016).

[0487] The newly generated data nearly doubles the HLA ligands recorded in the Immune Epitope Database (IEDB) which holds 208,885 ligands from 157 human class I alleles, with a mean of 200 peptides per allele (range 1-24,594). Peptides for 80 of 95 alleles were available in IEDB; however, 33 of 95 alleles had fewer than 100 known binders, which hindered reliable motif deduction and accurate de novo prediction (FIG. 26D). For the 15 previously uncharacterized alleles, Applicant identified 1,845 peptides per allele on average (range 693-4,022). From the compiled dataset, Applicant systematically assessed the length distribution, positional entropy, residue frequencies, binding motif, and sub-motif clusters of HLA-bound peptides per allele (FIG. 32I-32L) and created an interactive website for data exploration (mhc.tools). Altogether, these data and tools greatly expand the current knowledge of HLA class I-bound peptides and are publicly available. These tools provide further information on the identified peptides as discussed herein and in sequence listing.

Identification of HLA Binding Motifs and Sub-Motifs that were Shared Across Alleles

[0488] Since the numbers of peptide identifications per allele were only weakly correlated with surface HLA levels (Spearman's ρ=0.44, p<0.001, n=79 newly generated cell lines), differential binding potential likely contributes to the variation in peptide numbers (FIG. 32M-32N). To better understand the basis for differential binding, Applicant compared HLA alleles based on the motifs of their observed ligands and the physicochemical properties of binding pocket residues in the HLA protein. By computing pairwise correlations between the peptide binding motif of each allele (represented as a vector of frequencies of the 20 amino acids at every position), Applicant found groups of alleles sharing unique HLA-A and -B motifs (FIG. 27A-left). HLA alleles belonging to supertypes such as HLA-A*02 clustered together (FIG. 27A-inset ii) as did split antigen serotypes such as HLA-B*54,55,56 and HLA-A*23,24 (FIG. 27A-inset i, iv) (Sette and Sidney 1998; Robinson et al. 2015; Robinson et al. 2000). The pairwise correlations showed minimal motif sharing outside of the dominant groups (mean motif correlation of each HLA-A allele to all other -A alleles; and each HLA-B allelle to all other -B alleles was 0.28 and 0.25, respectively, FIG. 27B-left). HLA-C motifs were more similar to each other (mean correlation 0.51), thus sharing more overlapping motifs, consistent with previous studies indicating that HLA-C (and HLA-G) alleles were more evolutionarily recent, with less divergence amongst alleles (Parham, P. & Moffett, A. Variable NK cell receptors and their MHC class I ligands in immunity, reproduction and human evolution. Nat. Rev. Immunol. 13, 133-144 (2013)). The patterns of similarity revealed by binding motifs were mirrored by similarities in the HLA binding clefts, quantified by physicochemical properties of HLA residues in contact with the ligand (FIG. 27A-right; FIG. 27B-right). To assess the agreement of the two approaches, for each allele, Applicant counted the number of neighboring alleles in motif space analysis that were also proximal in pocket space (FIG. 33A). This correspondence maps the rules of ligand preference onto HLA protein sequence and serves as the basis for creating pan-allele predictors that rely on transfer learning from characterized to uncharacterized alleles (Nielsen et al. 2007).

[0489] To delineate allele similarity at finer granularity, Applicant decomposed each aggregate motif per allele into submotifs by computing inter-peptide distances, projecting them onto 2-dimensional space of peptide coordinates and clustering the peptides, obtaining 1,133 submotifs (≥20 peptides per cluster) across the 95 alleles (FIG. 33B). More than half of the clusters containing motifs originating from HLA-A or -B alleles were contributed solely by either HLA-A alleles or HLA-B alleles (FIG. 27C). For example, the motif xVxxxxxxR was found to be shared across subclusters amongst the −11:01, −11:02, −31:01, −33:03, −34:01, −34:02, −66:01, −68:01, and −74:01 alleles of HLA−A; likewise, the motif xPxxxxxxV was shared by subclusters amongst the −07:02, −07:04, −35:03, 42:01, 51:01, −54:01, −55:01, −55:02 and −56:01 alleles of HLA-B. The majority of submotifs that included HLA-C alleles overlapped with subclusters from HLA-A and/or -B alleles (e.g. xYxxxxxxL is shared amongst A*23:01, A*24:02, A*24:07, C*04:01, C*07:02, C*14:03; xAxxxxxxY was shared amongst B*15:01, B*15:02, B*15:03, B*15:17, B*35:03, B*35:07, B*46:01, B*53:01, C*02:02, C*03:02, C*12:01, C*12:03, C*16:01) (FIG. 27D, FIG. 33C), further reinforcing the notion that HLA-A and -B alleles had more divergent structure than the evolutionarily ‘younger’ HLA-C alleles. The overlaps in submotifs across alleles lended itself as the basis for optimizing epitope selection such that a minimal set of epitopes covers an optimal set of multiple alleles and thus individuals.

Length-Specific Differences in Ligand Preferences were Detectable Among HLA Alleles and Loci

[0490] Preferences for varying peptide lengths were observed for specific alleles, with 9-mer peptides as the prevailing HLA ligand length. Unbiased evaluation of length distributions per allele in the dataset of 12,970 8-mers, 111,898 9-mers, 29,956 10-mers, and 18,202 11-mers (FIG. 28A), revealed that 9-mers were consistently the predominant length across alleles, except for a small number of HLA-B alleles that preferred 8-mers. After 9-mers, 10- and 11-mers were frequently found for HLA-A and -B alleles with B alleles having greater variation in length preferences, while 8-mers predominated for HLA-C alleles (p<0.001 all comparisons, Welch's two sample t-test). Applicant also found length-specific variations in motifs. To systematically identify potential length-specific binding motifs, Applicant generated pseudo motifs by dropping middle residues from 10- and 11-mers to compare to 9-mers or from 9-mers to compare to 8-mers, and evaluated the changes in frequency and entropy at every peptide position (FIG. 28B). This analysis yielded 26 differences across HLA-A, —B, and C alleles (20 8-mer, 2 10-mer, and 4 11-mer motifs) out of 178 motifs with at least 100 identified 8-, 10-, or 11-mer peptides, that had an absolute difference in residue frequency with the true 9-mer motif of >0.25 or an absolute difference in entropy of >0.2 at any position (FIGS. 28B-28C). The most notable changes in entropy were at position 5 for 8-mers compared to 9-mers (p<10-8, FIG. 34A). This residue position was implicated in structural changes of certain HLA-alleles upon binding as it allowed embedding of these short peptides in the cleft (Rist et al. 2013; Maenaka et al. 2000). For example, Applicant found the A*33:01 8-mer motif (n=112) to had a strong preference for proline and isoleucine at position 5 which is absent in the 9-, 10-, or 11-mer motifs. B*14:02 8-mers (n=401) were enriched in histidine at position 5 and lacked tyrosine enrichment at position 2 compared to the 9-mer motif (n=913). C*01:02 gained proline as an additional anchor residue in position 3 for all lengths, 8-mers (n=164) had glycine or alanine preference at position 5 whereas most 10-mers (n=224) contained leucine (11-mers alanine and leucine) instead of alanine or serine in position 2. Selected peptides were confirmed as strong binders in in vitro binding assays, despite poor predicted affinity by NetMHC (FIGS. 28D-28E; FIG. 34B). Collectively, these observations motivated a more explicit approach of modeling HLA peptide binding characteristics of different lengths.

### Peptide-Extrinsic Properties Varied Per HLA and Length

[0491] Since HLA-bound peptides captured from the cell surface were reflective of the cell-endogenous processes that shape the ligandome, Applicant assessed whether HLA-A, —B, —C, and -G ligands of different peptide lengths were preferentially derived from peptides with variable extrinsic properties. Applicant found that HLA-C bound peptides were biased towards higher expression and hydrophobicity (p<1×10-10, Welch's two sample t-test; FIG. 28F). HLA-C also showed a preference toward peptides with poorer proteasome cleavability scores (p=1×10-10; Welch's two sample t-test), although an examination of peptide properties stratified by length revealed that this is likely driven by the higher frequency of 8-mer peptides bound by HLA-C alleles as they were observed to have lower cleavage scores (FIGS. 28f-28G; FIG. 34A). These observations agreed with prior structural analyses that have reported more shallow HLA-C binding clefts (Kaur et al. 2017), as higher abundance and elevated hydrophobicity of cognate peptides could compensate for decreased binding stability. Applicant noted that HLA-G peptides had an even stronger bias towards lower cleavability scores (p<1×10⁻¹⁰; Welch's two sample t-test), possibly due to the lack of HLA-G training data for the cleavability predictor and may suggest differential protease activity in shaping the HLA-G ligandome (Celik et al. 2018). Other differences with smaller effect sizes were also observed which altogether prompted us to model extrinsic properties per HLA loci in pan-allele predictors.

### Interferon Stimulation had Minimal Impact on Peptide Trimming Signatures

[0492] Exposure to inflammation can impact proteasomal processing preferences, but the extent to which it alters the HLA-associated peptidome in normal and cancerous human tissues has not been completely elucidated. Therefore, Applicant generated a series of patient tumor cell lines, derived from melanoma (MEL; n=4), glioblastoma (GBM; n=3) and clear cell renal cell carcinoma (ccRCC; n=1) specimens (FIG. 29A), and assessed the effect of IFNγ stimulation on the processing of HLA-bound ligands. As expected, full proteome analysis of one of the GBM samples revealed IFNγ treatment to result in elevated expression of immunoproteasome-specific subunits (PSMB8, PSMB9, PSMB10) and genes involved in interferon regulating pathways (e.g., STAT1, STAT2, STAT4, IRF1, IRF9), along with reduced expression of constitutive proteasome subunits (e.g. PSMB5, PSMB7) (FIG. 29B). Likewise, for all 7 IFNγ-matched samples, Applicant observed an increase of 2.4-5.6% in peptides derived from IFNγ-response genes post stimulation. Applicant also analyzed external datasets from lung epithelial cell lines exposed to IFNγ and TNFα (Javitt et al. 2019) and primary skin fibroblast tissues (Bassani-Sternberg et al. 2015). Finally, Applicant sequenced and examined eluted ligands from a normal primary skin sample.

[0493] To assess proteolytic cleavage preferences in the untreated and treated dataset, Applicant calculated the enrichment of residues upstream and downstream of observed peptides in the protein sequence versus a set of decoys drawn from the proteome, controlling for HLA motif biases by matching the first two and last two decoy positions to observed peptides (FIG. 29F). As before, in the untreated dataset (FIG. 29D-top), Applicant observed an enrichment for A, K, S and R as downstream residues as well as in peptides derived from protein C-terminus (indicated by ‘-’) (Abelin et al. 2017). Upstream residues R and K were not enriched after Applicant removed potential tryptic peptide contaminants from the datasets. Proline on the other hand was depleted at both termini in all samples, likely due to steric hindrance. Acidic residues (E, D), as well as certain hydrophobic residues (I, L, F, W) were underrepresented downstream of HLA-associated peptides.

[0494] Applicant observed strong correlations between proteasomal signatures of untreated and IFNγ-treated samples suggesting that immunoproteasome activation has minimal impact on the processing of HLA-presented ligands in malignant cells (FIG. 29D-29E; Spearman's ρ>0.76). Consistently, cleavage preferences in IFNγ-treated and untreated tumor samples had similar differences when compared to non-cancerous primary skin and fibroblast tissues (FIG. 29E; FIG. 35A). Applicant also considered whether IFNγ alters the proportions of allele utilization, especially with regard to C-terminal anchors (see FIG. 31A-31D).

### Generation and Performance of Allele-and-Length-Specific and Pan-Allele-Pan-Length Predictive Models of Antigen Presentation

[0495] Multivariate models incorporating endogenous HLA-presentation descriptors, such as peptide source abundance and likelihood of proteasomal cleavage, outperform affinity-trained predictors (Abelin et al. 2017; and Bassani-Sternberg, et al. 2015). With the extended dataset of 95 alleles, Applicant re-evaluated the predictive contribution of these variables (FIG. 36A-36B) and also assessed two other features: 1) gene presentation bias; and 2) translation quantification via ribosome profiling. Presentation bias quantified the discrepancy between expected and observed number of MS-identified peptides per gene in a given set of samples and can boost recall of lowly expressed peptides (Bulik-Sullivan et al. 2018), while ribosomal profiling captures actively translated mRNA molecules and could provide a more accurate proxy for peptide precursor abundance (Methods). Additionally, Applicant utilized the MS-trained predictors as the first variable, instead of NetMHC affinity, in order to account for any MS data properties which might have overestimated the contribution of cleavability which was the first MS data-based feature in the previous analysis. To evaluate predictive power, Applicant constructed evaluation datasets consisting of the observed allele- and length-specific binders in the MS data (n) along with 999*n random decoys from the human proteome and considered the fraction of true binders in the top 0.1% peptides in the evaluation dataset ranked by prediction scores (i.e., positive predictive value (PPV)). The MS models trained on peptide sequence features alone (described herein) achieved an average PPV across the 95 alleles of 47% (FIG. 30A). Integrating RNA-seq as a proxy for peptide abundance boosted PPV to 60%, while protein abundance (iBAQ) achieved 54% PPV, respectively. Combining RNA-seq with Ribo-seq reached a PPV of 61% (Ribo-seq data not shown). Protein presentation bias and cleavability were the next most predictive variables adding 2.9% and 1.5% to PPV. Based on these results, Applicant trained prediction models that integrate intrinsic peptide features (MSintrinsic, or MSi) with extrinsic properties: cleavability (C), expression (E) and gene presentation bias (B).

[0496] The observed length-specific binding motifs (FIG. 28A-28G) in conjunction with the high frequency of non-9-mer presentation for some alleles motivated the generation of length-specific binding predictors, trained exclusively on ligands of specific lengths (8-, 9-, 10-, or 11-mers), without ‘borrowing’ information from 9-mer peptides for other lengths (FIG. 30B-left). Additionally, to enable prediction for any HLA allele (beyond the MS dataset), Applicant built a pan-allele-pan-length model (panMSintrinsic or panMSi, FIG. 30B-right). Model performance was compared against the most recent version of NetMHCpan, 4.0 (Jurtz et al. 2017), as it incorporated training data derived from binding affinity (BA) or MS-sequenced eluted peptide (EL) datasets (including previously published 16 alleles), as well as against MHCflurry, reported to outperform NetMHC, especially for non-9-mers (O'Donnell et al. 2018). In a standard 5-fold cross validation (CV) of the length-specific models, Applicant found an average improvement in the MS-based peptide sequence-only models (MSi) across lengths of 2.2-, 1.9- and 1.5-fold compared to MHCflurry (for overlapping alleles), NetMHCpan4.0-BA and NetMHCpan4.0-EL (95 alleles), respectively (FIG. 30C). Models which additionally integrated cleavability (MSiC) added +2.6% to PPV, cleavability and expression (MSiCE) an additional +9.3%, or cleavability expression and gene presentation bias (MSiCEB) a further +1.1% PPV, ultimately achieving 2.7-, 2.4-, and 1.8-fold improvements compared to the benchmark algorithms, and with MSiCEB contributing an additional 1.1% to PPV. Length-specific models for 8-, 10- and 11-mers outperformed the corresponding non-length-specific models currently used (FIG. 30C) with average increases of +15, +18, +26, and +27% PPV for MSi, MSiC, MSiCE and MSiCEB over NetMHCpan4.0-EL, respectively. The largest benefits were observed for 8-mer models, which was not unexpected since 8-mer motifs were most different from 9-mer motifs (FIG. 28B-left). Ultimately, MSiCEB achieved 2.7-, 2.4- and 1.8-fold improvements compared to the three benchmark algorithms.

[0497] Although the performance of the pan-allele pan-length models was on average highly comparable to non-pan models (mean and median differences −2% PPV) and improvements over the non-pan models were observed for over 35% of allele-length combinations, Applicant also noted several cases with considerable decrease in predictive power (FIG. 30C). As anticipated, the subpar performance of pan models in these cases largely coincided with alleles for which non-9-mer motifs were different from the 9-mer motif (FIG. 28B). Compared to prior algorithms, the largest gains in PPV were observed for poorly characterized alleles (+20% PPV for HLA-C and +38% for HLA-G for MSi against NetMHCpan4.0-EL as the best scoring amongst the benchmark algorithms), but gains were also observed for all other alleles (+12% for HLA-A and +14% for HLA-B), even when only the 16 previously profiled alleles were considered (+9% for HLA-A and +5% for HLA-B). Length-specific models for 8-, 10-, and 11-mers outperformed the corresponding non-length-specific models currently used (FIG. 30C) with average increases of +15, +18, +26, and +27% PPV for MSi, MSiC, MSiCE, respectively. The largest benefits were observed for 8-mer models, which was not unexpected since 8-mer motifs were most different from 9-mer motifs (FIG. 28B-left).

[0498] Applicant proposed PPV at 0.1% of the top hits as a more suitable metric to evaluate HLA presentation predictors⁴ because of the importance of assessing true positive rates at the realistic 0.1% prevalence of binders (the approximate rate of true binders among random 9-mers; Methods). A recent study quantified model performance using a different version of PPV, where the fraction of true positive calls out of all predictions necessary to retrieve 40% of the true binders is calculated, and the hits:decoys ratio in the evaluation set was modified from 1:999 to a 1:10000⁷ (i.e. ‘PPV at 40% recall’). Due to these differences, the two metrics are not directly comparable. Using a PPV at 40% recall, Applicant found that MSi outperforms MHCflurry, NetMHCpan-BA and NetMHCpan-EL by 5-, 4-, and 2-fold, while MSiCEB achieved 12-, 10-, and 6-fold improvements (FIG. 30D). Finally, Applicant observed similar gains in PPV compared to MHCflurry and NetMHCpan when evaluating an external dataset of HLA-C and -G binders (Di Marco et al. 2017) (FIG. 30E). In summary, Applicant observed a 2× improvement in PPV (using the top 0.1% of the dataset) compared to existing predictors, which corresponds to a 6-12× gain at 40% recall.

### Motif Complexity and Motif Abundance Largely Explained PPV Variability

[0499] Applicant observed that some allele models were harder to learn than others, with 9-mer-specific models (MSi) PPV values ranging from 37% to 68%. This variation was not readily explained by the amount of training data available as model performance plateaus at several hundred peptides (Abelin et al. 2017) and more than 375 9-mer peptides were identified for all alleles. Since PPVs after the addition of endogenous features (MSiCEB) were strongly correlated with PPVs achieved with the simple model (Pearson's correlation=0.92, p-value<2.2×10⁻¹⁶), and since Applicant observed differences in the allele-specific motifs and sub-motifs (FIG. 32D; FIG. 33B), Applicant posited that PPV variability was driven by differential complexity in the peptide repertoire of each allele. To account for the information content of the main binding motif, Applicant summed the entropy along each peptide position, expecting that higher information content implies more easily-learned motifs. Similarly, Applicant considered all sub-motifs identified per allele by summing positional entropies over the sub-motifs, each weighted by the number of supporting peptides, and the number of submotifs normalized by the total number of peptides. Finally, Applicant utilized the natural frequency of amino acids to model the abundance of each binding motif since motifs that are more likely to occur are also more likely to contribute potential binders to the random decoy set and thereby decrease PPV. To assess if these variables were predictive of PPV, Applicant used a multivariate linear model fit, controlling for the size of the training data (Methods). PPVs predicted by the multivariate linear model strongly correlated to actual PPV values (Pearson's ρ=0.8, p-value<2e−16; FIG. 30F). The number of peptides identified per allele was not predictive, while the entropy of the main motif, and the number and entropy of submotifs were positively associated with PPV, and motif abundance strongly negatively contributed to PPV. Based on the model coefficients Applicant estimated that motif abundance could be responsible for ˜3.4% of the unexplained PPV. An additional 1% could be due to false positive MS identification at 1% FDR (FIG. 30G). Overall, these findings suggested that limitations in prediction accuracy can be in large part attributed to motif complexity and abundance.

Peptides Proposed to be Derived from Proteasomal Splicing have Poor Predicted Binding Scores

[0500] Peptides derived from proteasomally-ligated fragments (‘spliced peptides’) have been recently proposed as a major component of the HLA ligandome (Liepe et al. 2016; Faridi et al. 2018). Since the collection of mono-allelic data covered the HLA alleles evaluated in those studies, Applicant compared the binding potential of reported linear and splice-proposed peptide sets using the de novo predictors. Consistent with previous analyses (Mylonas et al. 2018; Rolfs et al. 2018), Applicant found that the majority of splice-proposed peptides had poor predicted binding. For example, 81% of canonical linear peptides described in Liepe et al. had an HLA-binding likelihood score >0.75 but only 28% of the splice-proposed peptides reported were recovered at the same threshold (FIG. 35B-left; Methods). Similarly, 84% of the linear peptides described in Faridi et al. had an HLA-binding likelihood score >0.75, while only 36% cis- and 37% trans-splice-proposed peptides reported satisfied the same cutoff (FIG. 35B-right). While spliced peptides have been reported to make up 30% of the HLA class I peptidome (Liepe et al. 2016), our computational results suggest that no more than 11% (37% of 30%) of presented HLA ligands could be derived from spliced peptides, a number previously shown likely to be further diminished by factors such as ambiguity in peptide spectral matches and variability in sequence database search strategies (Mylonas et al. 2018).

Leading Sensitivity Performance of MS-Trained Integrative Algorithms Validates in HLA-Associated Peptidomes from Patient-Derived Tumors

[0501] To evaluate the utility of the predictive models for clinical samples, Applicant assessed their sensitivity to retrieve HLA-bound peptides observed on patient-derived tumor cell lines. To this end Applicant (i) used MS to identify 51,531 HLA-associated peptides from 11 tumor samples (3 chronic lymphocytic leukemia, 1 ovarian, 3 glioblastoma, 4 melanoma) and utilized external peptide datasets from 4 melanoma (Bassani-Sternberg et al. 2016) and 27 ovarian (Schuster et al. 2017) tumors; (ii) predicted the likelihood that each observed peptide is presented per HLA allele per sample; (iii) compared the proportions of correctly predicted peptides amongst a large set of random genomic peptides relative to 3 established tools (FIG. 31A). The mono-allelic dataset covered 50 of 57 unique HLA alleles found amongst the 42 patient samples used in the evaluation. For covered alleles, predictions were made with the allele-and-length-specific models, while missing alleles were scored by the pan-allele-pan-length predictors. Observed ligands which scored better than 99.9% of random peptides for at least one allele (top 0.1 percentile) were considered as correct identifications. Across malignancies, Applicant consistently observed a higher proportion of observed peptides predicted by the MS-based models compared to existing algorithms (FIG. 31B, FIG. 37). At the 0.1 percentile threshold, 26% of observed peptides were called by MHCflurry, followed by 31% and 46% predicted by NetMHCpan4.0-BA and -EL, respectively, compared to 56%, 60%, 77%, and 78% predicted by MSi, MSiC, MSiCE, and MSiCEB, on average across all samples.

Allele Contribution to Peptide Presentation Varied by Individual and Changed with IFNγ Stimulation

[0502] Since MS-detected epitopes were assigned to the best-scoring HLA-allele(s), this allowed calculation of allele frequency among the presented peptides (FIG. 31C). Notably, 3% of peptides on average were uniquely assigned to C alleles and an additional 6% of peptides were compatible with a C allele jointly with other alleles, thus suggesting that HLA-C has the potential to harbor neoantigens. In all 6 samples for which Applicant profiled HLA-associated peptidomes +/−IFNγ treatment, Applicant observed a shift towards towards HLA-B presentation (p=0.007, Wilcoxon signed-rank test), consistent with HLA-B having two IFNγ-inducible promoter elements (Javitt et al. 2019; Girdlestone 1995). An IFNγ-induced shift in peptide presentation from tryptic-like to chymotryptic-like peptides was demonstrated using the UWB.1 289 cell line which expresses HLA class I alleles of C-terminal tryptic motifs (A*03:01, A*68:01) and C-terminal chymotryptic-like motifs (B*07:02) (Chong et al. 2018). Although the proposed cause was different, their result is consistent with the demonstration of a more general HLA-A to HLA-B presentation shift. Consequently, Applicant further examined the +/−IFNγ patient-derived tumor cell line data and the HLA-B allele combinations of each and found elevated presentation for alleles with both tryptic and chymotryptic C-terminal preferences, suggesting that HLA-B upregulation could be at least in part responsible for a shift in presentation from tryptic-like to chymotryptic-like peptides which was observed in a cell line with a C-terminal chymotryptic-like HLA-B motif (Chong, C. et al. 2018). Finally, the contribution of each allele to the antigen repertoire varied by patient suggesting that profiling of endogenous tumor epitopes can inform allele specific contribution to an individual's HLA ligandome and further guide peptide vaccine selection.

### DISCUSSION

[0503] The current study demonstrated the superior performance of HLA class I predictors trained on large-scale data of peptides eluted from cellular HLA proteins, consistent with growing appreciation of the value of MS derived datasets for the development of epitope prediction algorithms (Gfeller et al. 2018; Bulik-Sullivan et al. 2018; O'Donnell et al. 2018; Jurtz et al. 2017). For example, while earlier versions of NetMHCpan relied on binding affinity data from curated datasets, more recent versions incorporated eluted peptides from MS data to train predictors and demonstrated improved performance (Jurtz et al. 2017). Using an optimized, high-throughput experimental workflow, Applicant eluted peptides from immunoprecipitated HLA proteins and used high performance mass spectrometry followed by a refined database searching approach to build the largest dataset to date of HLA ligands eluted from single HLA-expressing cell lines. The resulting dataset of >185,000 peptides from 95 alleles greatly expands available knowledge of the human HLA-associated peptidome (Vita et al. 2015), such that at least 95% of individuals worldwide have at least one of their A, B, and C alleles within the dataset. All data are publicly available, thus providing a valuable resource for the scientific community including mass spectrometrists, immunologists as well as basic biologists. To facilitate access to the data, Applicant generated a first-in-class web-based tool for data visualization and interactive exploration and have made the predictors publicly available.

[0504] The large dataset afforded an unprecedented opportunity to gain more comprehensive insights into the basis of peptide presentation by HLA-A, -B, -C and -G alleles, each of which impacted how Applicant designed and trained the models. First, Applicant ascertained that peptide presentation does access the entire proteome for potential sources of antigen, in contrast to previous reports (Pearson et al. 2016), which relied on a small number of peptides. Second, the analysis revealed 101 peptide submotifs detected within and amongst alleles, many of which were shared across the 95 HLA alleles. Applicant observed strong similarity in physicochemical features of the HLA-C alleles along with their greater promiscuity in binding peptides, compared to the more divergent HLA-A and -B alleles. Moreover, HLA-C alleles only rarely had unique submotif clusters that were not also shared with HLA-A and B alleles, consistent with their recent evolutionary history (Parham and Moffett, 2013). This may increase competition with HLA-A and B alleles for peptides and may explain the observation that HLA-C epitopes originate from more highly expressed genes. Indeed, the degree of complexity and entropy of each allele was a strong determining feature for accuracy in prediction. Third, Applicant detected not only differences in length preference of the HLA bound peptides based on allele, but that ˜10% of alleles displayed changes in epitope based on length. Altogether, the detailed knowledge that Applicant gained from the extensive dataset enabled us to generate allele-and-length-specific and pan-allele-pan-length prediction models. Applicant demonstrated that the models outperformed state of the art algorithms, most prominently for understudied alleles or those with length-specific preferences. Fourth, Applicant found no major impact on proteasomal cleavage preferences across primary tumor cells of different lineages when exposed to IFNγ. While IFNγ signaling broadly modulated gene expression thereby altering the genes that HLA ligands derive from and increases presentation on HLA-B owing to its upregulation (Javitt et al. 2019), Applicant did not observe prominent differences in favored protease cleavage sites in malignant cells. This is consistent with the expression of both constitutive and immunoproteasome subunits in cancers and supports the application of a unified cleavability predictor.

[0505] Although other investigators have begun to incorporate MS data into their predictors (Jurtz et al. 2017; O'Donnell et al. 2018; Bulik-Sullivan et al. 2018; Gfeller et al. 2018), the validations on internal and external mono-allelic data as well as primary tumor ligandomes reveal that Applicant's models perform better at predicting HLA-presented epitopes compared to current tools. This can be attributed to several factors: (i) Applicant's models are the only ones trained exclusively on MS data of eluted peptides from mono-allelic cell lines; (ii) Applicant integrated several critical endogenous features, such as peptide cleavage and gene expression and make this integrated tool freely available; (iii) Applicant rich dataset reliably captured not only allele-but also length-specific motifs, widely covering the space of HLA binding preferences, and when available, Applicant preferentially predicted with allele-and-length-specific models for their demonstrated accuracy over pan-allele-pan-length predictors which were employed for uncharacterized alleles.

[0506] Despite improvements in epitope prediction, Applicant recognizes that further innovations are required if we are to achieve near perfect accuracy. Applicant offers evidence that allele complexity and motif abundance may partially drive the observed variability in prediction power across alleles. The former implies a benefit in obtaining even larger training datasets, while the latter necessitates techniques to determine non-binders at large scale to collect reliable true negative datasets against which to evaluate model performance. Other innovations that could further boost prediction accuracy include increased LC-MS/MS instrument sensitivity and the development of reliable methods for de novo HLA peptide identification. Pertinent to peptide presentation prediction in tumor cells, better accuracy can be achieved by taking into account the uneven allele utilization and weighting predictions accordingly. While Applicant includes expression as a variable in the predictions, it is important to note that RNA-seq of tumors may not be representative of all clones and usually includes non-malignant cells, making it necessary to purify malignant cells for expression measurements. Finally, Applicant emphasizes that the models do not predict whether the HLA-presented peptides can interact with the T cell receptors in an individual, a problem that remains unsolved.

### Data Availability

[0507] The original mass spectra, the protein sequence database, and tables of peptide spectrum matches for each allele have been deposited in the public proteomics repository MassIVE and are accessible at ftp://MSV?@massive.ucsd.edu when providing the dataset password: immunopeptidome. If requested, also provide the username: MSV?. Data for 16 initial alleles can be downloaded from MassIVE under the identifier MassIVE: MSV000080527.

### B721.221 RNA Seq Data is Deposited GSE131267.

[0508] Melanoma RNA-seq data are deposited in dbGaP (www.ncbi.nlm.nih.gov/projects/gap/cgi-bin/study.cgi?study_id=phs001451.v1.p1, (Ott et al. 2017)). Glioblastoma bulk RNA-seq data are available through dbGaP (www.ncbi.nlm.nih.gov/gap) with accession number phs001519.v1.p1 ref.

### Methods

[0509] Generation of HLA-A, B and C single allele cell lines. Single HLA allele-expressing cDNA vectors in a pcDNA-3 backbone were ordered from GenScript@. The HLA class I deficient B721.221 cell line was transfected with the HLA allele expression vectors using lipofectamine, as described previously (Ott, P. A. et al. 2017; and Pearson, H. et al. 2016). Cell lines with stable surface HLA expression were generated first through selection using 800 μg/ml G418 (Thermo Scientific), followed by enrichment of HLA positive cells through up to 2 serial rounds of fluorescence-activated cell sorting (FACS) and isolation using a pan-HLA antibody (W6/32; Santa Cruz) on a FACSAria II instrument (BD Biosciences). Priority was given to HLA alleles with lack of binding data in public databases or over 1% frequency in the US organ donor registry populations13.

[0510] Generation of primary human samples. All human tissues were obtained through DFCI or Partners Healthcare approved IRB protocols. Conditions for growth and in vitro propagation of melanoma and GBM tumor cell lines and of monocyte-derived dendritic cells were described previously15,37. PBMC from patients with chronic lymphocytic leukemia (CLL) were enriched for CD19 positive CLL tumor cells and were used in IP/MS analysis. Tumor specimens from patients with clear cell renal cell carcinoma (ccRCC) were collected following informed consent for enrollment on a tissue collection research protocol approved by the Dana-Farber/Harvard Cancer Center Institutional Review Board (IRB). Surgically resected ccRCC tumor tissue was mechanically dissociated with scalpels, and then enzymatically dissociated using a mixture of collagenase D (Roche), Dispase (STEMCELL Technologies), and DNase I (New England BioLabs) at room temperature, and filtered through a 100 micron cell strainer using the sterile plunger of a syringe. Red blood cells were lysed using ammonium-chloride-potassium buffer (Gibco). The cell suspension was stained for viability (Zombie Aqua; BioLegend), anti-CD45 (BV605; BD Biosciences), and anti-carbonic anhydrase IX (PE; R&D Systems). Viable, CD45-negative, CAIX-positive tumor cells were isolated by FACS (BD FACSAria II cell sorter; BD Biosciences). Cells were cultured in a specialized growth medium consisting of OptiMEM GlutaMax media (Gibco), 5% fetal bovine serum, 1 mM sodium pyruvate (Gibco), 100 units/mL penicillin and streptomycin, 50 micrograms/mL gentamicin, 5 micrograms/mL insulin (Sigma), and 5 ng/mL epidermal growth factor (Sigma). Following successive passages, CAIX expression was confirmed by flow cytometry (anti-CAIX, PE-conjugated; R&D Systems) and by immunohistochemical analysis of a cell pellet. Ovarian cancer patient-derived cells were propagated within a xenograft model, which was generated by serial passaging of tumor cells from a patient with advanced ovarian cancer. These cells originated from solid tumor or pleural effusion (3 million cells/mouse) that were injected orthotopically in the abdominal cavity in NOD-SCID mice (8-week old, Jackson labs). Tumor growth was monitored weekly by observing mice for signs of abdominal distension. Cells were harvested 4 months after initial injection and banked for future experiments. For interferon stimulation, cultured cells were stimulated with 2000 Unit/ml of IFNg (Peprotech) for 3 days and were used in IP/MS analysis.

[0511] For primary tumors and patient cell lines, HLA-peptide complexes were immunoprecipitated from 0.1 to 0.2 g tissue or up to 50 million cells. Solid tumor samples were dissociated using tissue homogenizer (Fisher Scientific 150) and HLA complexes were enriched as described above. 10 mm skin punch biopsies were obtained from healthy human skin discarded during skin surgeries. Subcutaneous fat was removed and remaining skin was snap frozen prior to processing. For skin HLA immunoprecipitations, frozen samples were dissociated in lysis buffer using TissueRaptor™ before immunoprecipitation (Qiagen).

[0512] HLA peptide enrichment and LC-MS/MS analysis. Soluble lysates from up to 50 million single HLA expressing B721-221 cells were immunoprecipitated with W6/32 antibody (sc-32235, Santa Cruz) as described previously (Abelin, J. G. et al.2017). 10 mM iodoacetamide was added to the lysis buffer to alkylate cysteines for 71 alleles. Peptides of up to three IPs were combined, acid eluted either on StageTips or SepPak cartridges32, and analyzed in technical duplicates using LC-MS/MS. Peptides were resuspended in 3% ACN, 5% FA and loaded onto an analytical column (20-30 cm, 1.9 μm C18 Reprosil beads (Dr. Maisch HPLC GmbH), packed in-house PicoFrit 75 μM inner diameter, 10 μM emitter (New Objective)). Peptides were eluted with a linear gradient (EasyNanoLC 1000 or 1200, Thermo Scientific) ranging from 6-30% Buffer B (either 0.1% FA or 0.5% AcOH and 80% or 90% ACN) over 84 min, 30-90% B over 9 min and held at 90% Buffer B for 5 min at 200 nl/min. During data dependent acquisition, peptides were analyzed on a QExactive Plus (QE+), QExactive HF (QE-HF) or Fusion Lumos (Thermo Scientific). Full scan MS was acquired at a resolution of 70,000 (QE+) or 60,000 (QE-HF and Lumos) from 300-1,800 m/z or 300-1,700 m/z (Lumos). AGC target was set to 1e6 and 5 msec max injection time for QE type instruments and 4e5 and 50 ms for Lumos. The top 10 (Lumos, QE+), 12 (QE+), 15 (QE-HF) precursors per cycle were subjected to HCD fragmentation at resolution 17,500 (QE+) or 15,000 (QE-HF, Lumos). The isolation width was set to 1.7 m/z with a 0.3 m/z offset for QE and 1.0 m.z and no offset for Lumos, the collision energy was set to optimal for the instrument used ranging from 25 to 30 NCE, AGC target was 5E4 and max fill time 120 ms (QE+ and Lumos) or 100 ms (QE-HF). For Lumos measurements, precursors of 800-1700 m/z were also subjected to fragmentation if they were singly charged. Dynamic exclusion was enabled with a duration of 15 sec (QE+), 10 secs (QE-HF) or 5 sec (Lumos). Up to four IPs were combined, acid eluted and analyzed in inject replicates.

[0513] HLA peptide identification using Spectrum Mill. Mass spectra were interpreted using the Spectrum Mill software package v6.1 pre-Release (Agilent Technologies, Santa Clara, Calif.). MS/MS spectra were excluded from searching if they did not have a precursor MH+ in the range of 600-4000, had a precursor charge >5, or had a minimum of <5 detected peaks. Merging of similar spectra with the same precursor m/z acquired in the same chromatographic peak was disabled. Prior to searches, all MS/MS spectra had to pass the spectral quality filter with a sequence tag length >2 (i.e. minimum of 4 masses separated by the in-chain masses of 3 amino acids). MS/MS spectra were searched against a protein sequence database that contained 98,298 entries, including all UCSC Genome Browser genes with hg19 annotation of the genome and its protein coding transcripts (63,691 entries), common human virus sequences (30,181 entries), recurrently mutated proteins observed in tumors from 26 tissues (4,167 entries), as well as 259 common laboratory contaminants including proteins present in cell culture media and immunoprecipitation reagents. Mutation files for 26 tumor tissue types were obtained from the Broad GDAC portal (gdac.broadinstitute.org). Recurrent mutations in the coding region within each of the 26 tumor types (frequency=3 for stomach adenocarcinoma, uterine corpus endometrial carcinoma; frequency=5 for adrenocortical carcinoma, pancreatic adenocarcinoma, melanoma; frequency=2 for rest) were included. MS/MS search parameters included: no-enzyme specificity; fixed modification: cysteinylation of cysteine; variable modifications: carbamidomethylation of cysteine, oxidation of methionine, and pyroglutamic acid at peptide N-terminal glutamine; precursor mass tolerance of ±10 ppm; product mass tolerance of ±10 ppm, and a minimum matched peak intensity of 30%. Variable modification of carbamidomethylation of cysteine was only used for HLA alleles that included an alkylation step (performed in 2017 or later). Peptide spectrum matches (PSMs) for individual spectra were automatically designated as confidently assigned using the Spectrum Mill autovalidation module to apply target-decoy based FDR estimation at the PSM level of <1% FDR. Peptide auto-validation was done separately for each HLA allele with an auto thresholds strategy to optimize score and delta Rank1-Rank2 score thresholds separately for each precursor charge state (1 thru 4) across all LC-MS/MS runs for an HLA allele. Score threshold determination also required that peptides had a minimum sequence length of 7, and PSMs had a minimum backbone cleavage score (BCS) of 5. BCS is a peptide sequence coverage metric and the BCS threshold enforces a uniformly higher minimum sequence coverage for each PSM, at least 4 or 5 residues of unambiguous sequence. The BCS score is a sum after assigning a 1 or 0 between each pair of adjacent AA's in the sequence (max score is peptide length-1). To receive a score, cleavage of the peptide backbone must be supported by the presence of a primary ion type for HCD: b, y, or internal ion C-terminus (i.e. if the internal ion is for PWN then BCS is credited only for the backbone bond after the N). The BCS metric serves to decrease false-positives associated with spectra having fragmentation in a limited portion of the peptide that yields multiple ion types. PSMs were consolidated to the peptide level to generate lists of confidently observed peptides for each allele using the Spectrum Mill Protein/Peptide summary module's Peptide-Distinct mode with filtering distinct peptides set to case sensitive. A distinct peptide was the single highest scoring PSM of a peptide detected for each allele. MS/MS spectra for a particular peptide may have been recorded multiple times (e.g. as different precursor charge states, from replicate IPs, from replicate LC-MS/MS injections). Different modification states observed for a peptide were each reported when containing amino acids configured to allow variable modification; a lowercase letter indicates the variable modification (C-cysteinylated, c-carbamidomethylated).

[0514] MS/MS data from patient derived cell lines was handled as described above except that they were searched against the database mentioned above with further inclusion of patient specific neoantigen sequences (Ott, P. A. et al. 2017; and Keskin, D. B. et al. 2019).

[0515] Filtering of MS-identified peptides. The list of LC-MS/MS identified peptides was filtered to remove potential contaminants in the following ways: (1) peptides observed in negative controls runs (blank beads and blank IPs); (2) peptides originating from the following species: ‘STRSG’, ‘HEVBR’, ‘ANGIO432’, ‘ANGIO394’, ‘ANGIO785’, ‘ANGIO530’, ‘ACHLY’, ‘PIG’, ‘ANGIO523’, ‘RABIT’, ‘STAAU’, ‘CHICK’, ‘Pierce-iRT’, ‘SOYBN’, ‘SHEEP’ as common laboratory contaminants including proteins present immunoprecipitation reagents. Note that BOVINE peptides derived from cell culture media were not excluded as they appear to have undergone processing and presentation and exhibit anchor residue motifs consistent with the human peptides observed for each allele; (3) peptides which were also identified in a tryptically-digested full proteome Jurkat sample; (4) peptides for which both the preceding and C-term amino acids were tryptic residues (R or K); (5) all possible leader peptides of lengths 8-11 from HLA-A, -B, -C, and -G (first exon, n=410) as they are likely to be presented by HLA-E; (6) peptides with negative deltaFwRevScore as likely falling in the 1% false positive MS identifications; (7) peptides identified for 20 or more of the 95 alleles (n=168); (8) peptides identified as potential C*01:02 contaminants in other alleles due to residual C*01:02 expression in B721.221 (n=383). These peptides were identified by scoring all peptides with the allele-specific C*01:02 model and selecting those with predicted likelihood binding score >0.95 that were also outlier for the allele (mean distance to the nearest 10 peptides >90 percentile).

[0516] RNA sequencing and quantification of B721.221 mono allelic cell lines and patient cell lines. RNA from 721.221 cells expressing HLA-C*04:01 and C*07:01 was isolated using RNeasy mini kit (QIAGEN). The Nextera XT kit from Illumina and the Smart-seq2 protocol were employed to generate full length cDNA and sequencing libraries that were sequenced with (38 bp paired-end) on a Nextseq 550 (Ilumina). The data were deposited in the NCBI Gene Expression Omnibus (GEO accession number GSE131267). This new data was used in conjunction with RNA-seq data from four previously sequenced alleles: HLA-A*29:02, B*51:01, B*54:01, and B*57:01 (GSE93315)4.

[0517] RNA-Seq data were aligned to the UCSC transcriptome annotation (hg19, downloaded June 2015) using Bowtie2 (bowtie2-2.2.1, default parameters38 and gene expression was quantified using to RSEM (rsem-1.2.19, default parameters39. Transcripts per million (TPM) values were averaged across alleles and the expression of each peptide was determined as the sum of the expression of the transcripts containing that peptide.

[0518] RNA-seq data from melanoma and glioblastoma patient cell lines were available in dbGaP (www.ncbi.nlm.nih.gov/projects/gap/cgi-bin/study.cgi?study_id=phs001451.v1.p1)15 and (www.ncbi.nlm.nih.gov/projects/gap/cgi-bin/study.cgi?study_id=phs001519.v1.p1)37.

[0519] Deep proteome profiling of the B721.221 cell line and GBM 114512-BT145. Protein expression of B721.221 and GBMH4152-BT145 cell line was assessed as described previously40. Briefly, cell pellets of B721 expressing A*03:01, B*55:01 and C*07:01 as well as pellets of H4512-BT145 with and without IFNγ treatment were lysed in 8M Urea and digested to peptides using LysC and Trypsin (Promega). For GBM, peptides were labeled with TMT before pooling (Thermo Fisher), B721 analysis was performed labelfree with a 1:1:1 mix using the three monoallelic cell lines. 100 μg peptides were pooled and separated into 24 fractions using offline high pH reversed phase fractionation. One μg per fraction was loaded onto an analytical column (20-30 cm, 1.9 um C18 Reprosil beads (Dr. Maisch), packed in-house PicoFrit 75 uM inner diameter, 10 uM emitter (New Objective)). Peptides were eluted with a linear gradient (EasyNanoLC 1000 or 1200, Thermo Scientific) ranging from 6-30% Buffer B (either 0.1% FA or 0.5% AcOH and 80% or 90% ACN) over 84 min, 30-90% B over 9 min and held at 90% Buffer B for 5 min at 200 nl/min. During data dependent acquisition, peptides were analyzed on a Fusion Lumos (Thermo Scientific). Full scan MS was acquired at a 60,000 from 300-1,800 m/z. AGC target was set to 4e5 and 50 ms. The top 20 precursors per cycle were subjected to HCD fragmentation at 15,000 resolution with an isolation width of 0.7 m/z, 30 NCE, 3e4 AGC target and 50 ms max injection time. For TMT experiments, resolution was set to 60,000 and 34NCE. Dynamic exclusion was enabled with a duration of 45 sec.

[0520] Spectra were searched using Spectrum Mill against the above database, specifying Trypsin/P as digestion enzyme, allowing 4 missed cleavages. Carbamidomethylation was set to fixed, acetylation at the protein N-terminus, oxidized methionine, pyroglutamic acid, deamidated asparagine and pyrocarbamidomethyl cysteine were set as variable modifications. Match tolerances were set to 20 ppm on MS1 and MS2 level. Peptides were filtered to 1% FDR and rolled up into protein groups. For comparison to RNAseq and HLA peptide data, proteins were collapsed to gene level using human identifiers only and filtered for two unique peptides per gene. For label free quantitation, the summed intensities of observed peptides for a given protein was divided by the theoretical count of tryptic peptides in that protein (iBAQ)⁴¹. For the GBM experiment in FIG. 29B, the ratio of protein level TMT intensity of the 127 channel over the 126 channel was used to evaluate relative protein changes in protein expression upon IFNγ treatment in the GBM sample.

[0521] Calculation of HLA Allele population frequencies, related to FIGS. 26A-26D. The HLA-A, —B, and -C allele frequencies are based on a meta-analysis of high-resolution HLA allele frequency data describing 497 population samples representing approximately 66,800 individuals from throughout the world¹⁴. The cumulative phenotypic frequency (CPF) of the alleles was calculated using CPF=1−(1−Σ_{i∈C}pᵢ)², assuming Hardy-Weinberg proportions for the genotypes¹², where pᵢ is the population frequency of the i^{th} alleles within a subset of HLA-A, -B, or C alleles, denoted C.

[0522] The top 13 alleles (from A*24:02 to A*34:01) cover more than 95% and the top 29 alleles cover almost 100% of the population, the 39 B-alleles cover more than 95% of the population, the top 13 alleles (from C*07:02 to C*14:02) cover more than 95% of the population and the top 22 alleles cover almost 100% of the population. Frequencies were taken from pypop.org/popdata/2008/byfreq-A.php.html, pypop.org/popdata/2008/byfreq-B.php.html, www.pypop.org/popdata/2008/byfreq-C.php.

[0523] Immune Epitope Database (IEDB) data access and preparation, related to FIGS. 26A-26D. A curated set of previously identified HLA class I ligand was downloaded from the Immune Epitope Database (IEDB) at www.iedb.org/downloader.php?file_name=doc/mhc_ligand_full.zip (accessed on Jun. 14, 2018)³⁶. Records were filtered to MHC allele class=I, Epitope Object Type=Linear peptide, and Allele Name consistent with human HLA class I nomenclature with 4-digit typing (i.e. regex: “\hat{ }HLA-[ABCG]\\*[0-9]{2}:[0-9]{2}$”). Peptides with quantitative measurements in units other than nM were removed and so were the following three assay types due to detected inconsistency between predicted (NetMHC 3.0) and actual affinity: “purified MHC/direct/radioactivity/dissociation constant KD”, “purified MHC/direct/fluorescence/half maximal effective concentration (EC50)” and “cellular MHC/direct/fluorescence/half maximal effective concentration (EC50)”. A peptide was considered a binder if it had a quantitative affinity of <500 nM or qualitative label of “Positive”, “Positive-High”, “Positive-Intermediate”, or “Positive-Low”. In cases where multiple records are available for the same {peptide, allele} pair, Applicant either took the mean affinity or removed the peptide when the difference between the maximum and minimum log-transformed affinities (1−log(nM)/log(50000)) was >0.2. Similarly, peptides with multiple qualitative records were removed if the same number of positive and negative labels were found or kept otherwise. Previously published data for 16 HLA-A and B alles was removed from the analysis of IEDB counts (PubMedID=28228285).

[0524] Computational Analyses of MS-Identified and IEDB Peptides, Related to FIGS. 26A-26d.

### Sequence Logo Plots

[0525] To capture and compare binding motifs between groups of peptides, sequence logo plots were generated using the motifStack R package for MS-identified peptides (FIG. 32I) and IEDB peptides (FIG. 32J) of length 8, 9, 10, and 11. Sequence logos are a standard way of representing the frequency of each of the 20 amino acids at each peptide position together with the information content (entropy) at each peptide position: the overall height of each position is determined by the entropy at that position and the height of each amino acid within is scaled according to its frequency.

### Entropy

[0526] The entropy at each peptide position (i.e.1 through n for n-mer peptides, n∈{8,9,10,11}) was calculated for each allele based on all MS-identified peptides identified for that allele (MS entropy) and then similarly for all IEDB binders (nM<500) (IEDB entropy). The computation was performed with MolecularEntropy( ) function from HDMD R package, where entropy values are normalized by log(20) such that entropy of 0 indicates a position with no variation while entropy of 1 indicates that all amino acids are equally likely to be observed at that position (FIG. 32K).

### Peptide Distance

[0527] The following peptide distance metric was defined and computed between every pair of peptides of given length in the MS and IEDB sets:

$$D ( A , {s}_{1} , {s}_{2} ) = \frac{1}{L} {\sum }_{i = 1}^{L} dist PMBEC ( {s}_{1 i} , {s}_{2 i} ) * ( 1 - {H}_{A i} )$$

[0528] where s₁ and s₂ are peptide sequences; L is the length of the peptide sequences, n∈{8,9,10,11}; distPMBEC=maxPMBEC−PMBEC is a 20×20 matrix of residue dissimilarities derived from a pre-computed matrix of residue similarities biased by their HLA binding properties⁴², H_{Ai} is the [0,1]-scaled entropy at position i for the allele A associated with s₁ and s₂, computed from the MS data.

[0529] Peptide Distance Visualization and Sub-Clustering of Binding Motifs

[0530] Pairwise peptide distance matrices per allele and per length (8-11) were computed between every pair of peptides in the MS and IEDB datasets as described above. Since the matrix contains relative peptide distances rather than absolute Cartesian coordinates, Applicant used non-metric multidimensional scaling (NMDS) to visualize the peptides in two demotions, revealing the sub-groups of peptides that make up the main motif (nmds( ) function from ecodist R package) (FIG. 32K). Density based clustering was then performed on the two-dimensional projection to assign peptides to clusters (submotifs) (dbscan( ) function from dbscan R package) (FIG. 32K, FIG. 33B).

[0531] Allele similarity analyses, related to FIGS. 27A-27D. To assess which alleles are similar to each other Applicant considered similarity according to the observed binding motifs (peptide space) as well as similarity according to the HLA binding grooves (HLA binding pocket or HLA protein space). Similarity in peptide space was evaluated by tabulating the frequency of each of the 20 amino acids at each position along the peptide sequence (1 through 9) per allele, forming a vector of size 20*9=180. The pairwise correlations of these frequency vectors were used to quantify similarity (FIG. 27A).

[0532] To evaluate similarity in HLA binding pocket space, HLA protein sequences were downloaded from IMGT®, the international ImMunoGeneTics information System® www.imgt.org (http://hla.alleles.org/alleles/text_index.html, accessed May 5, 2018) and aligned. From the full HLA protein sequences we selected positions which are in contact with the peptide (within a distance of 2 Å) or positions that are most frequently mutated across alleles to represent the binding pocket: {7, 9, 13, 24, 31, 45, 59, 62, 63, 65, 66, 67, 69, 70, 71, 73, 74, 76, 77, 80, 81, 84, 95, 97, 99, 110, 114, 116, 118, 138, 143, 147, 150, 152, 156, 158, 159, 163, 167, 171} (FIG. 27B). The residue at each position of the binding pocket was featurized by its amino acid physical properties encoded as 10 Kidera Factors (available from R package Peptides v2.4, data(AAdata))⁴³ and 3 principal components derived from a dimensionality reduction of a large set of physicochemical properties⁴⁴. The full binding pocket was represented by the concatenated list of positions and allele similarity was assessed by Euclidean distance.

[0533] Given the two approaches to evaluating allele similarity (motif space and pocket space), we assessed how well they agree by identifying the closest neighbors for each allele in motif space and the closest neighbors for each allele in pocket space and counting how many of the former are also found in the latter (FIG. 33A). The closest neighbor in motif space were considered to be alleles with correlation greater than 97.5% of all pairwise correlations. Analogously, closest neighbor alleles in pocket space were considered to be alleles within distance less than 97.5% of all pairwise distances.

[0534] Analysis of submotifs across alleles, related to FIGS. 27A-27D. Grouping the 9-mer peptides identified for each allele into sub-motifs (see Peptide distance visualization and sub-clustering of binding motifs) identified 1133 sub-motifs across the 95 alleles supported by at least 20 peptides (FIG. 27D, FIG. 33C). To determine whether any of those sub-motifs are shared by two or more alleles, each sub-motif was represented as a vector of amino acid frequencies per peptide position (analogously to main motifs representation in allele similarity analysis), projected onto two dimensions (umap( ) function from R package umap v0.2)45, and clustered (dbscan( ) function from dbscan R package). This approach identified 101 distinct clusters of sub-motifs with 1-22 alleles participating in each (FIGS. 27C and 27D, FIGS. 33B, 33C).

[0535] Evaluation and validation of length-dependent motif differences, related to FIGS. 28A-28G. To compare 8-mer motifs to 9-mer motifs, Applicant generated pseudo 8-mer motifs from 9-mers by dropping middle residues (positions 4, 5, or 6). To compare 10- and 11-mer motifs to 9-mers Applicant generated pseudo 9-mer motifs by dropping middle residues from 10-mers (positions 5 or 6) and 11-mers (positions 5 and 6, or 6 and 7). The pseudo motif which was most similar to the true motif was used to evaluate the change in frequency and entropy at every peptide position. 8-, 10-, or 11-mer motifs with at least 100 identified peptides, that had an absolute difference in residue frequency with the true motif of >0.25 or an absolute difference in entropy of >0.2 at any position were considered as different. For example, if proline is observed at position 5 in 5% of peptides associated with motif1 but 40% of peptides associated with motif2 the absolute difference in frequency is |0.05-0.40|=0.35>0.25, thus deeming motif1 and motif2 different.

[0536] To experimentally validate the observed length-specific motifs Applicant selected 18 peptides from 3 alleles representing 4 length-specific motifs that were predicted to be strong binders by the algorithm (MSi) but weak binders according to NetMHCpan-4.0 and tested them for binding in in vitro binding assays. Peptide affinity measurements were performed at Immunitrack, Copenhaegen, Denmark employing their NeoScreen platform as previously described⁴⁶.

[0537] Computation valdition of IFNγ treatment response, related to FIGS. 29A-29F. For each MEL, GBM, and ccRCC sample with and without IFNγ treatment Applicant counted the number of MS-identified HLA-bound peptides that match to IFNγ-induced genes using entries in the HALLMARK_INTERFERON_GAMMA_RESPONSE geneset46 (downloaded from http://software.broadinstitute.org/gsea/msigdb/download_geneset.jsp?geneSetName=HALLMARK_INTERFERON_GAMMA_RESPONSE&fileType=txt). The fraction of peptides that map to IFNγ genes in untreated vs treated samples was used as a proxy for confirming IFNγ response.

[0538] Analysis of Peptide Processing Signatures, Related to FIGS. 29A-29F.

[0539] The analysis of preferred cleavage residues upstream and downstream of each MS-identified peptide was performed as in Abelin et al, 2017. Briefly, for each MS-identified peptide (hit), the 3 upstream and 3 downstream amino acids were determined (context), with protein termini denoted as “-”. To construct a background set, each hit was matched to 100 random human peptides that have the same first two and last two amino acids as the hit (to control for presentation biases). Peptide processing preferences were identified by calculating the relative enrichment of each amino acid at each context position (percent change in hits over decoys) and significance was assessed by chi-squared test. (FIGS. 29D, 29E).

[0540] This approach was applied to all MEL, GBM, and ccRCC+/−IFNγ samples profiled in this study to compare peptide processing signatures with and without IFNγ stimulation. In addition, a published datasets of lung cancer cells, untreated (UT) or treated with TNFα and IFNγ (T+I), was utilized in this analysis25. As the reported peptides were identified using MaxQuant with match between runs enabled, all peptides have an intensity value in both conditions. Thus, to derive the two processing signatures Applicant took peptides with log 10 median intensity >6 from either UT (‘-IFNγ’ signature) or T+I (‘+IFNγ’ signature) condition.

[0541] PPV vs PPV at 40% Recall, related to FIGS. 30A-30G. To evaluate predictive power, we constructed datasets consisting of the observed allele- and length-specific binders in our MS data (n) along with 999*n random decoys from the human proteome and considered the fraction of correctly predicted binders in the top 0.1% of the dataset (i.e. positive predictive value,

$$P P V = \frac{true positive calls}{all positive calls} = \frac{true positive calls}{n} ) .$$

We advocated for the PPV evaluation metric in Abelin et al.⁴, over the commonly used AUC, because it is better suited for the HLA presentation prediction problem space where a relatively small number of true binders need to be identified amongst an excess of non-binders. Each HLA allele is expected to present a repertoire of approximately ˜10,000 peptides^{36,48-51} among the 1.1×10⁷ 9-mer peptides in the proteome, meaning that approximately only 1 out of a thousand peptides (0.1%) gets presented.

[0542] The definition of PPV described above is equivalent to PPV at recall=PPV % since the number of positive calls equals the number of true positives. A different version of this metric used recently to quantify algorithm performance is PPV at recall=40%, that is

$$P P {V}_{40 \% Recall} = \frac{true positive calls}{all positive calls} = \frac{true positive calls}{\begin{matrix}positive calls when 40 \% of \\ the n true positives have been called\end{matrix}} 7.$$

In addition, Bulik-Sullivan et al. used a dataset with a ratio of 1 hit:10,000 decoys for the evaluation of single-allele dataset, rather than a ratio of 1:999 used by us, which reduced PPV. Due to these differences, model performance evaluated with PPV is not comparable to model performance evaluated with PPV_{40% recall, h:d=1:10000} (FIG. 30D).

[0543] Assessment of Predictive Contribution of Variables, Related to FIGS. 30A-30G.

[0544] The potential contribution of intracellular signals to predicting endogenously-presented peptides was assessed by building multivariate logistic regression models with various combinations of the following features4:

[0545] RNA-seq expression—the level of expression of each peptide was determined as the sum of the expression of the transcripts containing that peptide, and log-transformed (log₂(TPM+1)).

[0546] Ribo-seq expression—the translation level of each peptide was derived from Ribo-seq data from mono-allelic B721.221 cells analogously to RNA-seq quantification.

[0547] Protein expression—iBAQ values, calculated by summing the intensities of observed peptides for a given gene by the theoretical count of tryptic peptides in the gene⁴¹, were log-transformed (with zeros set to one tenth the minimum observed iBAQ value).

[0548] Cleavability likelihood: the cleavability score of each peptide was predicted by a de novo cleavability predictor trained on external multi-allelic MS-data⁴.

[0549] Presentation bias—the HLA-presentation bias of each gene was calculated based on the log ratio of observed to expected MS-identified peptides. The number of observed peptides per gene was the count of unique 9-mers in the collection of B721.221 mono-allelic MS data that map to the gene (protein IDs and GeneSymbol IDs were mapped via tables kgProtAlias, kgXref available from genome.ucsc.edu/cgi-bin/hgTables). The number of expected peptides per gene was defined as all possible unique 9-mers tiled along the length of the protein, multiplied by the expression level of the corresponding gene (to account for the increased likelihood of observing a peptide with higher expression), and scaled to sum to the total number of observed peptides.

[0550] Localization—the cellular localization of each peptide was assigned according to the localization(s) of its source protein(s). Protein localization information was obtained from Uniprot (ftp.uniprot.org/pub/databases/uniprot/current_release/knowledgebase/complete/uniprot_sprot.dat.gz) and Uniprot IDs were mapped to UCSC annotations via the following tables ftp.uniprot.org/pub/databases/uniprot/current_release/knowledgebase/idmapping/by_organism/HUMAN 9606_idmapping.dat.gz, genome.ucsc.edu/cgi-bin/hgTables kgProtAlias, kgXref. Protein localization categories were represented by 7 binary variables corresponding to “Cell Membrane” (if the localization field contained the text “cell membrane”), “Mitochondria” (“mitochondr”), “Nucleus” (“nude”), “Cytoplasm” (“cytoplasm”), “ER” (“Endoplasmic reticulum”), “Secreted” (“secret”), “Late Endosome” (“late endo”).

[0551] The first feature in each multivariate model was the predicted likelihood of peptide-HLA binding according to the MS-based models (MSi, see next section). The cumulative contribution of each endogenous variable was evaluated by iteratively adding them to the multivariate model one at a time. The most informative feature was retained in the model and the process was repeated with the remaining variables. Multivariate models were built for each allele, utilizing 9-mer peptides only, and performance was evaluated by PPV (see previous section). The incremental gain in average PPV across the 95 alleles was considered as the contribution of each variable.

[0552] Prediction of Cleavability, Related to FIG. 30.

[0553] A novel cleavability predictor based on MS data was developed as previously described⁴. Briefly, a neural network model was trained on previously published HLA-IP MS identifications³² where a negative set was generated by selecting 10 length- and termini-matched (first two and last two positions) peptides from the human proteome per positive. To ensure that targets and decoys would be drawn from a similar set of source genes, the 10 were selected at random (with replacement) using a probability weight proportional to the number of positive training examples mapping to the source transcript. Each training example is a sequence that captures 30 upstream residues, the peptide, and 30 downstream residues. Residues were binary encoded (i.e. isA, isC, isD, isE, isF, isG, isH, isl, isK, isL, isM, isN, isP, isQ, isR, isS, isT, isV, isW, isY, and isBlank) where isBlank represents a transcript termini, and also represented by their properties (i.e. pKA, volume, and polarity (www.proteinsandproteomics.org/content/free/tables_1/table08.pdf)). Featurized positions included U3, U2, U1, N1, N2, N3, C3, C2, C1, D1, D2, and D3 as well as a weighted average of positions U30 . . . U4 (W=1 . . . 27), a weighted average of positions D4 . . . D30 (W=27 . . . 1), and an unweighted average of positions N3 . . . C3. These data were used to train a neural network (2 hidden layers of 50 and 10 nodes; 20% dropout for regularization; keras neural networks library (github.com/fchollet/keras)).

[0554] Assessment of predictive contribution of variables, related to FIG. 30. The potential contribution of intracellular signals to predicting endogenously-presented peptides was assessed by building multivariate logistic regression models with various combinations of the following features⁴:
[0555] 1. RNA-seq expression—the level of expression of each peptide was determined as the sum of the expression of the transcripts containing that peptide, and log-transformed (log₂(TPM+1)).
[0556] 2. Ribo-seq expression—the translation level of each peptide was derived from Ribo-seq data from mono-allelic B721.221 cells analogously to RNA-seq quantification.
[0557] 3. Protein expression—iBAQ values, calculated by summing the intensities of observed peptides for a given gene by the theoretical count of tryptic peptides in the gene⁴¹, were log-transformed (with zeros set to one tenth the minimum observed iBAQ value).
[0558] 4. Cleavability likelihood: the cleavability score of each peptide was predicted by a de novo cleavability predictor trained on external multi-allelic MS-data as in our previous work⁴ (described in the previous section). When a peptide could be mapped to multiple source proteins the average of the cleavability scores was taken.
[0559] 5. Presentation bias—the HLA-presentation bias of each gene was calculated based on the log ratio of observed to expected MS-identified peptides. The number of observed peptides per gene was the count of unique 9-mers in the collection of B721.221 mono-allelic MS data that map to the gene (protein IDs and GeneSymbol IDs were mapped via tables kgProtAlias, kgXref available from genome.ucsc.edu/cgi-bin/hgTables). The number of expected peptides per gene was defined as all possible unique 9-mers tiled along the length of the protein, multiplied by the expression level of the corresponding gene (to account for the increased likelihood of observing a peptide with higher expression), and scaled to sum to the total number of observed peptides.
[0560] 6. Localization—the cellular localization of each peptide was assigned according to the localization(s) of its source protein(s). Protein localization information was obtained from Uniprot (ftp.uniprot.org/pub/databases/uniprot/current_release/knowledgebase/complete/uniprot_sprot.dat.gz) and Uniprot IDs were mapped to UCSC annotations via the following tables ftp.uniprot.org/pub/databases/uniprot/current_release/knowledgebase/idmapping/by_organism/HUMAN_9606_idmapping.dat.gz, https://genome.ucsc.edu/cgi-bin/hgTables kgProtAlias, kgXref. Protein localization categories were represented by 7 binary variables corresponding to “Cell Membrane” (if the localization field contained the text “cell membrane”), “Mitochondria” (“mitochondr”), “Nucleus” (“nude”), “Cytoplasm” (“cytoplasm”), “ER” (“Endoplasmic reticulum”), “Secreted” (“secret”), “Late Endosome” (“late endo”).

[0561] The first feature in each multivariate model was the predicted likelihood of peptide-HLA binding according to our MS-based machine leaning models (MSi, see next section). We utilized our MS-trained predictors as the first variable, instead of NetMHC affinity, in order to account for any MS data properties which might have overestimated the contribution of cleavability which was the first MS data-based feature in our previous analysis. The cumulative contribution of each endogenous variable was evaluated by iteratively adding them to the multivariate model one at a time. The most informative feature was retained in the model and the process was repeated with the remaining variables. Multivariate models were built for each allele, utilizing 9-mer peptides only, and performance was evaluated by PPV (see previous section). The incremental gain in average PPV across the 95 alleles was considered as the contribution of each variable.

[0562] Development of Integrative HLA-Binding Prediction Models.

### Overview of Model Training Procedure

[0563] Machine learning models were created to predict the likelihood that a given peptide will be endogenously presented by a given HLA class I molecule. The positive training set consisted of MS-identified peptides from the set of 95 B721.221 mono-allelic cell lines (hits). The negative set consisted of random peptides drawn from the human proteome which did not overlap with the hits (decoys). Note that one decoys set was used for training and a separate non-overlapping decoy set was used for evaluation. The number of positive and negative training examples were balanced by sampling 10× #hits decoys, and sampling the hits 10 times with replacement (this was done after splitting the data into folds to ensure that each hit is only present in one unique fold). Training was carried out in a standard 5-fold cross validation (CV) procedure: training data was split into 5 equal parts, each part was left out one at a time and a model was trained on the remaining 4 parts, obtaining 5 models each of which is evaluated on its corresponding left out set. The 5-fold CV training was repeated 3 times with different model initialization random seeds. The final predictions score for each peptide was the average of the 3 initializations. Neural network models were trained using the Theano and keras python libraries.

### Allele-and-Length-Specific Models

[0564] To build models that are both allele- and length-specific only the MS-hits identified for that particular allele and length were used to train the model. This was done for each of the 95 alleles and for lengths 8, 9, 10, and 11 where at least 40 peptides were identified. The MSIntrinsic (or MSi) neural network models were fully-connected with one hidden layer of size 50 and tanh activation. Training was carried out in batches of size 30, for 10 epochs, and early-stopping determined by evaluating on a 20% hold-out partition of the training set to avoid overfitting. Three different models were trained with three different encodings of the peptide sequence: (1) one-hot (a.k.a. Binary or dummy) encoding; (2) similarity encoding using the blosum62 matrix; (3) similarity encoding based on the PMBEC matrix⁴². In addition to the peptide sequence encoding features, the MSi models included the following features:
[0565] 1. Amino acid properties—each peptide residue was represented by the first three principal components derived from a dimensionality reduction of a large set of physicochemical properties⁴⁴.
[0566] 2. Peptide-level characteristic—8 peptide-level features were computed with the R package peptides: “boman”, “hmoment”, “hydrophobicity”, “helixbend”, “sidechain”, “xstr”, “partspec”, “pkc”

[0567] The logit-transformed output scores from MSi models were used as input features to train logistic regression models that integrate endogenous signals: MSiC models were trained with two features (MSi scores, and cleavability), MSiCE were trained with three input features (MSi scores, cleavability, and expression), and MSiCEB were trained with four input features (MSi scores, cleavability, expression, and presentation bias). Note that despite expression having a larger predictive contribution over cleavability, the cleavability feature is incorporated first to the integrative models (i.e. MSiC, MSiCE instead of MSiE, MSiEC) to allow for samples which lack expression data to utilize the cleavability since upstream and downstream peptide context sequences are readily available from the source protein.

### Pan-Allele-Pan-Length Models

[0568] Pan models were trained similarly with some differences. A single panMSi model was trained with all 8-11-mer peptides identified across the 95 alleles. The panMSi neural networks had additional input features to describe the binding pocket of the HLA protein—each binding pocket residue was represented with 10 Kidera factors and 3 PCs (see Allele similarity analyses, related to FIGS. 27A-27D). The size of the hidden layer was 250, batch size was 5000, and the hidden layer activation function was rectified linear unit (ReLU). Training proceeded for 15 epochs with early-stopping determined by lack of improvement in 4 consecutive epochs.

[0569] To construct integrative pan models Applicant considered the four HLA genes (HLA-A, HLA-B, HLA-C, and HLA-G) and the four lengths (8, 9, 10, 11) separately: linear panMSiC, panMSiCE, and panMSiCEB models were trained for all HLA-A alleles and peptides of length 8, all HLA-A alleles and peptides of length 9, all HLA-A alleles and peptides of length 10, and all HLA-A alleles and peptides of length 10, and analogously for HLA-B, C, and G.

### Modelling PPV Variability, Related to FIGS. 30A-30G

[0570] A linear regression model was trained to predict the achieved PPV (MSi, 9-mer models) given the following variables:
[0571] 1. The total number of 9-mer hits observed for the allele
[0572] 2. The sum of entropies at positions 1 through 9 (main motif entropy)
[0573] 3. The number of identified submotifs for the allele
[0574] 4. The sum of submotif entropies
[0575] 5. Estimated abundance of the binding motif calculated by weighting the frequency of each residue at each peptide position by the natural abundance frequency of each of the 20 amino acids.

[0576] Evaluation of model performance in multi-allelic samples, related to FIGS. 31A-31D. To evaluate model performance in multi-allelic patient samples, each tumor-presented peptide was scored for binding to each of the sample-specific HLA alleles. To compare scores for different alleles, each score was converted to percentile rank. To this end, empirical cumulative distribution functions (R package stats, function ecdf( )) were computed for each model (including benchmark algorithms) from the scores of a background set of 1e6 random decoys. Each decoy set was constructed such that it contains proportions of 8, 9, 10, and 11-mers that are equal to the observed length distribution for the allele (or the HLA gene in the case of pan models). A peptide was considered to be correctly identified as a binder if the predicted binding score for at least one of the alleles in the sample was better than 99.9% of the scores in the corresponding decoy set (0.1 percentile rank; evolution was also performed at different rank thresholds, FIG. 36). This approach is very similar to the % Ranks introduced by NetMHC8). A peptide was assigned to the allele(s) for which it had % rank score <0.1, where assignment to more than one allele was allowed.

[0577] Data availability. The original mass spectra for 79 newly described mono-allelic datasets, the protein sequence database, and tables of peptide spectrum matches for all 95 alleles have been deposited in the public proteomics repository MassIVE (massive.ucsd.edu) and are accessible at ftp://MSV000084172@massive.ucsd.edu when providing the dataset password: monoallelic. If requested, also provide the username: MSV000084172. Mass spectrometry data for the 16 previously published mono-allelic datasets in MassIVE can be downloaded at ftp://massive.ucsd.edu/MSV000080527. Datasets for the patient samples are accessible at ftp://MSV000084198@massive.ucsd.edu when providing the dataset username: MSV000084198 and password: patients.

[0578] B721.221 RNA seq data for HLA-C(C*04:01, C*07:01) is deposited under GEO: GSE131267. Melanoma RNA-seq data are deposited in dbGaP (www.ncbi.nlm.nih.gov/projects/gap/cgi-bin/study.cgi?study_id=phs001451.v1.p1¹⁵). Glioblastoma bulk RNA-seq data are available through dbGaP (www.ncbi.nlm.nih.gov/gap) with accession number phs001519.v1.p1³⁷.

### REFERENCES

[0579] 1. Lefranc, M.-P. et al. IMGT®, the international ImMunoGeneTics information System® 25 years on. Nucleic Acids Res. 43, D413-22 (2015).
[0580] 2. Robinson, J. et al. The IPD and IMGT/HLA database: allele variant databases. Nucleic Acids Res. 43, D423-31 (2015).
[0581] 3. Jurtz, V. et al. NetMHCpan-4.0: Improved Peptide-MHC Class I Interaction Predictions Integrating Eluted Ligand and Peptide Binding Affinity Data. The Journal of Immunology 199, 3360-3368 (2017).
[0582] 4. Abelin, J. G. et al. Mass Spectrometry Profiling of HLA-Associated Peptidomes in Mono-allelic Cells Enables More Accurate Epitope Prediction. Immunity 46, 315-326 (2017).
[0583] 5. O'Donnell, T. J. et al. MHCflurry: Open-Source Class I MHC Binding Affinity Prediction. Cell Syst 7, 129-132.e4 (2018).
[0584] 6. Gfeller, D. et al. The Length Distribution and Multiple Specificity of Naturally Presented HLA-I Ligands. J Immunol. 201, 3705-3716 (2018).
[0585] 7. Bulik-Sullivan, B. et al. Deep learning using tumor HLA peptide mass spectrometry datasets improves neoantigen identification. Nat. Biotechnol. (2018). doi:10.1038/nbt.4313
[0586] 8. Nielsen, M. & Andreatta, M. NetMHCpan-3.0; improved prediction of binding to MHC class I molecules integrating information from multiple receptor and peptide length datasets. Genome Med. 8, 33 (2016).
[0587] 9. Rajasagi, M. et al. Systematic identification of personal tumor-specific neoantigens in chronic lymphocytic leukemia. Blood 124, 453-462 (2014).
[0588] 10. de Kruijf, E. M. et al. HLA-E and HLA-G expression in classical HLA class I-negative tumors is of prognostic value for clinical outcome of early breast cancer patients. J. Immunol. 185, 7452-7459 (2010).
[0589] 11. Zhang, R.-L. et al. Predictive value of different proportion of lesion HLA-G expression in colorectal cancer. Oncotarget 8, 107441-107451 (2017).
[0590] 12. Dawson, D. V., Ozgur, M., Sari, K., Ghanayem, M. & Kostyu, D. D. Ramifications of HLA class I polymorphism and population genetics for vaccine development. Genet. Epidemiol. 20, 87-106 (2001).
[0591] 13. Gragert, L., Madbouly, A., Freeman, J. & Maiers, M. Six-locus high resolution HLA haplotype frequencies derived from mixed-resolution DNA typing for the entire US donor registry. Hum. Immunol. 74, 1313-1320 (2013).
[0592] 14. Solberg, 0. D. et al. Balancing selection and heterogeneity across the classical human leukocyte antigen loci: a meta-analytic review of 497 population studies. Hum. Immunol. 69, 443-464 (2008).
[0593] 15. Ott, P. A. et al. An immunogenic personal neoantigen vaccine for patients with melanoma. Nature 547, 217-221 (2017).
[0594] 16. Pearson, H. et al. MHC class I-associated peptides derive from selective regions of the human genome. J Clin. Invest. 126, 4690-4701 (2016).
[0595] 17. Sette, A. & Sidney, J. HLA supertypes and supermotifs: a functional perspective on HLA polymorphism. Curr. Opin. Immunol. 10, 478-482 (1998).
[0596] 18. Robinson, J., Malik, A., Parham, P., Bodmer, J. G. & Marsh, S. G. E. IMGT/HLA Database—a sequence database for the human major histocompatibility complex. Tissue Antigens 55, 280-287 (2000).
[0597] 19. Parham, P. & Moffett, A. Variable NK cell receptors and their MHC class I ligands in immunity, reproduction and human evolution. Nat. Rev. Immunol. 13, 133-144 (2013).
[0598] 20. Nielsen, M. et al. NetMHCpan, a method for quantitative predictions of peptide binding to any HLA-A and -B locus protein of known sequence. PLoS One 2, e796 (2007).
[0599] 21. Rist, M. J. et al. HLA peptide length preferences control CD8+ T cell responses. J. Immunol. 191, 561-571 (2013).
[0600] 22. Maenaka, K. et al. Nonstandard Peptide Binding Revealed by Crystal Structures of HLA-B*5101 Complexed with HIV Immunodominant Epitopes. The Journal of Immunology 165, 3260-3267 (2000).
[0601] 23. Kaur, G. et al. Structural and regulatory diversity shape HLA-C protein expression levels. Nat. Commun. 8, 15924 (2017).
[0602] 24. Celik, A. A., Simper, G. S., Hiemisch, W., Blasczyk, R. & Bade-Döding, C. HLA-G peptide preferences change in transformed cells: impact on the binding motif. Immunogenetics 70, 485-494 (2018).
[0603] 25. Javitt, A. et al. Pro-inflammatory Cytokines Alter the Immunopeptidome Landscape by Modulation of HLA-B Expression. Front. Immunol. 10, 141 (2019).
[0604] 26. Bassani-Sternberg, M., Pletscher-Frankild, S., Jensen, L. J. & Mann, M. Mass spectrometry of human leukocyte antigen class I peptidomes reveals strong effects of protein abundance and turnover on antigen presentation. Mol. Cell. Proteomics 14, 658-673 (2015).
[0605] 27. Liepe, J. et al. A large fraction of HLA class I ligands are proteasome-generated spliced peptides. Science 354, 354-358 (2016).
[0606] 28. Faridi, P. et al. A subset of HLA-I peptides are not genomically templated: Evidence for cis- and trans-spliced peptide ligands. Sci Immunol 3, (2018).
[0607] 29. Mylonas, R. et al. Estimating the contribution of proteasomal spliced peptides to the HLA-I ligandome. Mol. Cell. Proteomics 17, 2347-2357 (2018).
[0608] 30. Rolfs, Z., Solntsev, S. K., Shortreed, M. R., Frey, B. L. & Smith, L. M. Global Identification of Post-Translationally Spliced Peptides with Neo-Fusion. J. Proteome Res. (2018). doi:10.1021/acs.jproteome.8b00651
[0609] 31. Di Marco, M. et al. Unveiling the Peptide Motifs of HLA-C and HLA-G from Naturally Presented Peptides and Generation of Binding Prediction Matrices. J. Immunol. 199, 2639-2651 (2017).
[0610] 32. Bassani-Sternberg, M. et al. Direct identification of clinically relevant neoepitopes presented on native human melanoma tissue by mass spectrometry. Nat. Commun. 7, 13404 (2016).
[0611] 33. Schuster, H. et al. The immunopeptidomic landscape of ovarian carcinomas. Proc. Natl. Acad. Sci. U.S.A 114, E9942-E9951 (2017).
[0612] 34. Girdlestone, J. Regulation of HLA Class I Loci by Interferons. Immunobiology 193, 229-237 (1995).
[0613] 35. Chong, C. et al. High-throughput and Sensitive Immunopeptidomics Platform Reveals Profound Interferonγ-Mediated Remodeling of the Human Leukocyte Antigen (HLA) Ligandome. Mol. Cell. Proteomics 17, 533-548 (2018).
[0614] 36. Vita, R. et al. The immune epitope database (IEDB) 3.0. Nucleic Acids Res. 43, D405-12 (2015).
[0615] 37. Keskin, D. B. et al. Neoantigen vaccine generates intratumoral T cell responses in phase Ib glioblastoma trial. Nature 565, 234-239 (2019).
[0616] 38. Langmead, B. & Salzberg, S. L. Fast gapped-read alignment with Bowtie 2. Nat. Methods 9, 357-359 (2012).
[0617] 39. Li, B. & Dewey, C. N. RSEM: accurate transcript quantification from RNA-Seq data with or without a reference genome. BMC Bioinformatics 12, 323 (2011).
[0618] 40. Mertins, P. et al. Reproducible workflow for multiplexed deep-scale proteome and phosphoproteome analysis of tumor tissues by liquid chromatography-mass spectrometry. Nat. Protoc. 13, 1632-1661 (2018).
[0619] 41. Ishihama, Y. et al. Exponentially modified protein abundance index (emPAI) for estimation of absolute protein amount in proteomics by the number of sequenced peptides per protein. Mol. Cell. Proteomics 4, 1265-1272 (2005).
[0620] 42. Kim, Y., Sidney, J., Pinilla, C., Sette, A. & Peters, B. Derivation of an amino acid similarity matrix for peptide: MHC binding and its application as a Bayesian prior. BMC Bioinformatics 10, 394 (2009).
[0621] 43. Kidera, A., Konishi, Y., Oka, M., Ooi, T. & Scheraga, H. A. Statistical analysis of the physical properties of the 20 naturally occurring amino acids. J. Protein Chem. 4, 23-55 (1985).
[0622] 44. Bremel, R. D. & Homan, E. J. An integrated approach to epitope analysis I: Dimensional reduction, visualization and prediction of MHC binding using amino acid principal components and regression approaches. Immunome Res. 6, 7 (2010).
[0623] 45. McInnes, L., Healy, J. & Melville, J. UMAP: Uniform Manifold Approximation and Projection for Dimension Reduction. arXiv [stat.ML] (2018).
[0624] 46. Harndahl, M. et al. Peptide binding to HLA class I molecules: homogenous, high-throughput screening, and affinity assays. J. Biomol. Screen. 14, 173-180 (2009).
[0625] 47. Liberzon, A. et al. The Molecular Signatures Database (MSigDB) hallmark gene set collection. Cell Syst 1, 417-425 (2015).
[0626] 48. Bassani-Sternberg, M., Pletscher-Frankild, S., Jensen, L. J. & Mann, M. Mass Spectrometry of Human Leukocyte Antigen Class I Peptidomes Reveals Strong Effects of Protein Abundance and Turnover on Antigen Presentation. Molecular & Cellular Proteomics 14, 658-673 (2015).
[0627] 49. Hunt, D. F. et al. Characterization of peptides bound to the class I MHC molecule HLA-A2.1 by mass spectrometry. Science 255, 1261-1263 (1992).
[0628] 50. Rammensee, H. G., Friede, T. & Stevanoviic, S. MHC ligands and peptide motifs: first listing. Immunogenetics 41, 178-228 (1995).
[0629] 51. Rammensee, H., Bachmann, J., Emmerich, N. P., Bachor, O. A. & Stevanović, S. SYFPEITHI: database for MHC ligands and peptide motifs. Immunogenetics 50, 213-219 (1999).

[0630] Various modifications and variations of the described methods, pharmaceutical compositions, and kits of the invention will be apparent to those skilled in the art without departing from the scope and spirit of the invention. Although the invention has been described in connection with specific embodiments, it will be understood that it is capable of further modifications and that the invention as claimed should not be unduly limited to such specific embodiments. Indeed, various modifications of the described modes for carrying out the invention that are obvious to those skilled in the art are intended to be within the scope of the invention. This application is intended to cover any variations, uses, or adaptations of the invention following, in general, the principles of the invention and including such departures from the present disclosure come within known customary practice within the art to which the invention pertains and may be applied to the essential features herein before set forth.

1. A method of generating an HLA allele specific binding peptide sequence database comprising:
(a) providing a population of cells expressing a single HLA allele;
(b) isolating HLA-peptide complexes from said cells;
(c) isolating peptides from said HLA-peptide complexes; and
(d) sequencing said peptides,
wherein the HLA allele is selected from the group consisting of: A*01:01; A*02:01; A*02:02; A*02:03; A*02:04; A*02:05; A*02:06; A*02:07; A*02:11; A*03:01; A*11:01; A*11:02; A*23:01; A*24:02; A*24:07; A*25:01; A*26:01; A*29:02; A*30:01; A*30:02; A*31:01; A*32:01; A*33:01; A*33:03; A*34:01; A*34:02; A*36:01; A*66:01; A*68:01; A*68:02; A*74:01; B*07:02; B*07:04; B*08:01; B*13:01; B*13:02; B*14:02; B*15:01; B*15:02; B*15:03; B*15:10; B*15:17; B*18:01; B*27.05; B*35:01; B*35:03; B*35:07; B*37:01; B*38:01; B*38:02; B*40:01; B*40:02; B*40:06; B*42:01; B*44:02; B*44:03; B*45:01; B*46:01; B*49:01; B*50:01; B*51:01; B*52:01; B*53:01; 54:01; B*55:01; B*55:02; B*56:01; B*57:01; B*57:03; B*58:01; B*58:02; C*01:02; C*02:02; C*03:02; C*03:03; C*03:04; C*04:01; C*04:03; C*05:01; C*06:02; C*07:01; C*07:02; C*07:04; C*08:01; C*08:02; C*12:02; C*12:03; C*14:02; C*14:03; C*15:02; C*16:01; C*17:01; G*01:01; G*01:03 and G*01:04.

2. The method of claim 1, wherein said sequencing is performed by LC-MS/MS; and/or
wherein the population of cells comprises at least 10⁶ cells; and/or
wherein the cells are dendritic cells, macrophages or B-cells; and/or
wherein the cells are tumor cells, cells targeted in an autoimmune disease, or infected cells; and/or
wherein the cells are contacted with an agent or condition prior to isolating said HLA-peptide complexes from said cells, preferably, wherein said agent or condition is an inflammatory cytokine, a chemical agent, a therapeutic agent or radiation; and/or
which said method comprises carrying out steps (a) to (d) for different HLA alleles.

3-8. (canceled)

9. An HLA-allele specific binding peptide sequence database obtained by carrying out the method of claim 1 and repeating the method one or more times using a different HLA allele.

10. A method for generating a prediction algorithm for identifying HLA-allele specific binding peptides, which method comprises: training a machine with the peptide sequence database of claim 9, preferably,
wherein the database comprises HLA-alleles and peptide sequences selected from the group consisting of: A*01:01 (SEQ ID Nos: 44-1120); A*02:01 (SEQ ID Nos: 1121-4202); A*02:02 (SEQ ID Nos: 4203-7373); A*02:03 (SEQ ID Nos: 7374-9953); A*02:04 (SEQ ID Nos: 9954-11940); A*02:05 (SEQ ID Nos: 11941-14981); A*02:06 (SEQ ID Nos: 14982-17191); A*02:07 (SEQ ID Nos: 117192-20710); A*02:11 (SEQ ID Nos: 20711-22696); A*03:01 (SEQ ID Nos: 22697-24233); A*11:01 (SEQ ID Nos: 24234-27505); A*11:02 (SEQ ID Nos: 27506-29812); A*23:01 (SEQ ID Nos: 29813-32133); A*24:02 (SEQ ID Nos: 32134-34347); A*24:07 (SEQ ID Nos: 34348-35681); A*25:01 (SEQ ID Nos: 35682-36682); A*26:01 (SEQ ID Nos: 36683-37957); A*29:02 (SEQ ID Nos: 37958-38921); A*30:01 (SEQ ID Nos: 38922-40029); A*30:02 (SEQ ID Nos: 40030-42114); A*31:01 (SEQ ID Nos: 42115-42919); A*32:01 (SEQ ID Nos: 42920-44874); A*33:01 (SEQ ID Nos: 44875-46761); A*33:03 (SEQ ID Nos: 46762-49053); A*34:01 (SEQ ID Nos: 49054-50948); A*34:02 (SEQ ID Nos: 50949-53677); A*36:01 (SEQ ID Nos: 53678-55165); A*66:01 (SEQ ID Nos: 55166-56901); A*68:01 (SEQ ID Nos: 56902-58374); A*68:02 (SEQ ID Nos: 58375-59804); A*74:01 (SEQ ID Nos: 59805-61821); B*07:02 (SEQ ID Nos: 61822-63473); B*07:04 (SEQ ID Nos: 63474-64885); B*08:01 (SEQ ID Nos: 64886-65609); B*13:01 (SEQ ID Nos: 65610-69419); B*13:02 (SEQ ID Nos: 69420-71587); B*14:02 (SEQ ID Nos: 71588-72970); B*15:01 (SEQ ID Nos: 72971-76378); B*15:02 (SEQ ID Nos: 76379-77762); B*15:03 (SEQ ID Nos: 77763-80458); B*15:10 (SEQ ID Nos: 80459-81940); B*15:17 (SEQ ID Nos: 81941-83632); B*18:01 (SEQ ID Nos: 83633-85593); B*27.05 (SEQ ID Nos: 85594-87076); B*35:01 (SEQ ID Nos: 87077-87772); B*35:03 (SEQ ID Nos: 87773-89157); B*35:07 (SEQ ID Nos: 89158-90977); B*37:01 (SEQ ID Nos: 90978-92452); B*38:01 (SEQ ID Nos: 92453-94858); B*38:02 (SEQ ID Nos: 94859-97742); B*40:01 (SEQ ID Nos: 97743-100731); B*40:02 (SEQ ID Nos: 100732-104409); B*40:06 (SEQ ID Nos: 104410-106653); B*42:01 (SEQ ID Nos: 106612-019885); B*44:02 (SEQ ID Nos: 109886-110903); B*44:03 (SEQ ID Nos: 110904-111749); B*45:01 (SEQ ID Nos: 111750-113153); B*46:01 (SEQ ID Nos: 113154-114113); B*49:01 (SEQ ID Nos: 114114-117833); B*50:01 (SEQ ID Nos: 117834-118468); B*51:01 (SEQ ID Nos: 118469-119991); B*52:01 (SEQ ID Nos: 119992-121525); B*53:01 (SEQ ID Nos: 121526-123560); 54:01 (SEQ ID Nos: 123561-124684); B*55:01 (SEQ ID Nos: 124685-126136); B*55:02 (SEQ ID Nos: 126137-127557); B*56:01 (SEQ ID Nos: 127558-129239); B*57:01 (SEQ ID Nos: 129240-130274); B*57:03 (SEQ ID Nos: 130275-132636); B*58:01 (SEQ ID Nos: 132637-134577); B*58:02 (SEQ ID Nos: 134578-135530); C*01:02 (SEQ ID Nos: 135531-136878); C*02:02 (SEQ ID Nos: 136879-137802); C*03:02 (SEQ ID Nos: 137803-138984); C*03:03 (SEQ ID Nos: 138985-141074); C*03:04 (SEQ ID Nos: 141075-143394); C*04:01 (SEQ ID Nos: 143395-145236); C*04:03 (SEQ ID Nos: 145237-146269); C*05:01 (SEQ ID Nos: 146270-147708); C*06:02 (SEQ ID Nos: 147709-149028); C*07:01 (SEQ ID Nos: 149029-149822); C*07:02 (SEQ ID Nos: 149823-150900); C*07:04 (SEQ ID Nos: 150901-151615); C*08:01 (SEQ ID Nos: 151616-153388); C*08:02 (SEQ ID Nos: 153389-156499); C*12:02 (SEQ ID Nos: 156500-157889); C*12:03 (SEQ ID Nos: 157890-160043); C*14:02 (SEQ ID Nos: 160044-161408); C*14:03 (SEQ ID Nos: 161409-164186); C*15:02 (SEQ ID Nos: 164187-167475); C*16:01 (SEQ ID Nos: 167476-170317); C*17:01 (SEQ ID Nos: 170318-171281); G*01:01 (SEQ ID Nos: 171282-172073); G*01:03 (SEQ ID Nos: 172074-172742) and G*01:04 (SEQ ID Nos: 172743-173477).

11. (canceled)

12. The method of claim 10, further comprising identifying HLA-allele specific binding peptides that bind to one or more additional HLA-alleles; and/or
wherein the machine combines one or more linear models, support vector machines, decision trees, and neural networks; and/or
wherein the variables used to train the machine comprise one or more variables selected from the group consisting of peptide sequence, amino acid physical properties, peptide physical properties, expression level of the rce protein of a peptide within a cell, protein stability, protein translation rate, protein degradation rate, translational efficiencies from ribosomal profiling, protein cleavability, protein localization, motifs of host proteins that facilitate TAP transport, whether host protein is subject to autophagy, motifs that favor ribosomal stalling, protein features that favor nonsense-mediated mRNA decay (NMD) and peptide cleavability, preferably, wherein the method comprises determining the expression level of the source protein within a cell; and wherein the source protein expression is one of the predictive variables used by the machine; and/or
wherein the method comprises generating a consensus sequence from HLA-allele specific binding peptides.

13-14. (canceled)

15. The method of claim 12, wherein the expression level of the source protein of a peptide within a cell comprises determining the protein levels and/or transcripts of the source protein; and/or
wherein protein features that favor nonsense-mediated mRNA decay (NMD) comprise a long 3′ UTR and stop codon >50 nt upstream of last exon-exon junction; and/or
wherein motifs that favor ribosomal stalling comprise polyproline stretches.

16-20. (canceled)

21. The method of claim 12, wherein the HLA-allele specific binding peptides are 8 amino acids in length; or
wherein the HLA-allele specific binding peptides are 9 amino acids in length; or
wherein the HLA-allele specific binding peptides are 10 amino acids in length; or
wherein the HLA-allele specific binding peptides are 11 amino acids in length; or
wherein the HLA-allele specific binding peptides are any combination of peptides selected from the group consisting of 8, 9, 10 and 11 amino acids in length; or
wherein the HLA-allele is an HLA-A allele; or
wherein the HLA-allele is an HLA-B allele; or
wherein the HLA-allele is an HLA-C allele; or
wherein the HLA-allele is an HLA-G allele; or
wherein the consensus sequence comprises a sequence logo of FIGS. 10-13.

22-30. (canceled)

31. A method for identifying HLA-allele specific binding peptides, which method comprises analyzing the sequence of a peptide with a machine which has been trained with a peptide sequence database obtained by carrying out the method of claim 1 for said HLA-allele or a database obtained by carrying out the method of claim 1 for a combination of two or more HLA-alleles.

32. A method of identifying one or more suitable peptides for preparing an immunogenic composition for a subject in need thereof, said method comprising selecting one or more peptides determined as capable of binding one or more HLA proteins of the subject, wherein the ability of the one or more peptides to bind an HLA protein of the subject is determined by analyzing the sequence of peptide with a machine which has been trained with a peptide sequence database obtained by carrying out the method of claim 1.

33. The method of claim 32, wherein the one or more peptides selected bind to HLA-allele motifs that are shared across two or more HLA-alleles, preferably,
wherein the HLA-allele motif is shared across the −11:01, −11:02, −31:01, −33:03, −34:01, −34:02, −66:01, −68:01, and/or −74:01 alleles of HLA-A, more preferably, wherein the HLA-allele motif is xVxxxxxxR, or
wherein the HLA-allele motif is shared across the −07:02, −07:04, −35:03, 42:01, 51:01, −54:01, −55:01, −55:02, and/or −56:01 alleles of HLA-B, more preferably, wherein the HLA-allele motif is xPxxxxxxV, or
wherein the HLA-allele motif is shared across the A*23:01, A*24:02, A*24:07, C*04:01, C*07:02, and/or C*14:03 alleles, more preferably, wherein the HLA-allele motif is xYxxxxxxL, or
wherein the HLA-allele motif is shared across the B*15:01, B*15:02, B*15:03, B*15:17, B*35:03, B*35:07, B*46:01, B*53:01, C*02:02, C*03:02, C*12:01, C*12:03, and/or C*16:01 alleles, more preferably, wherein the HLA-allele motif is xAxxxxxxY.

34-41. (canceled)

42. The method of claim 32, wherein the subject is suffering from a disease or condition, preferably, wherein the disease or condition is selected from the group consisting of cancer, an infection, an autoimmune disease, and a transplant.

43. (canceled)

44. The method of claim 42, wherein the peptides are identified by nucleic acid sequencing of a sample obtained from the subject, wherein the sample comprises tumor cells, infected cells, cells targeted by the autoimmune response, or cells to be transplanted, preferably,
wherein the sequencing comprises RNA sequencing to determine proteins expressed in the sample; or
wherein the sequencing comprises whole genome or whole exome sequencing to determine non-silent somatic mutations.

45-46. (canceled)

47. A method of identifying a subject-specific peptide for preparing a subject-specific immunogenic composition, wherein the subject has a tumor and the subject specific peptide is specific to the subject and the subject's tumor, said method comprising:
(a) nucleic acid sequencing of a sample of the subject's tumor and a non-tumor sample of the subject;
(b) determining based on the nucleic acid sequencing non-silent mutations present in the genome of cancer cells of the subject but not in normal tissue from the subject,
(c) selecting from the identified non-silent mutations one or more subject-specific peptides, each having a different tumor neo-epitope that is an epitope specific to the tumor of the subject and each having a predictive score indicative of binding an HLA protein of the subject,
wherein said predictive score is determined by analyzing the sequence of peptides derived from the non-silent mutations by carrying out the method of claim 31, or
by comparing the sequence of peptides derived from the non-silent mutations to a consensus sequence of HLA-allele specific binding peptides, wherein the consensus sequence comprises a sequence logo of FIGS. 10-13.

48. (canceled)

49. The method of claim 47, wherein the nucleic acid sequencing comprises whole genome or whole exome sequencing; and/or
wherein the non-silent mutation comprises a point, splice-site, frameshift, read-through, neoORF, or gene-fusion mutation.

50. (canceled)

51. A method of identifying a plurality of subject-specific peptides for preparing a subject-specific immunogenic composition, said method comprising selecting a plurality of subject-specific peptides, each having a different tumor neo-epitope that is an epitope specific to the tumor of the subject and each having a predictive score indicative of binding an HLA protein of the subject, wherein said predictive score is determined by analyzing the sequence of peptides derived from the non-silent mutations by carrying out the method of claim 31.

52. An immunogenic composition for use in a method of inducing a tumor specific or infection specific immune response or inducing immune tolerance, said immunogenic composition comprising two or more peptides identified with the method of claim 31 and a pharmaceutically acceptable carrier; or
comprising autologous dendritic cells or antigen presenting cells that have been pulsed with the two or more peptides identified with the method of claim 31; or
comprising at least one vector capable of expressing two or more peptides identified with the method of claim 31, preferably, wherein the vector is a viral vector.

53-55. (canceled)

56. An immune cell specific for a peptide identified with the method of claim 31, preferably,
wherein the immune cell is a CD8+ T cell; and/or
wherein the immune cell expresses a chimeric antigen receptor (CAR) or exogenous T cell receptor (TCR) specific to the peptide; or
wherein the immune cell is a dendritic cell loaded with the peptide.

57-59. (canceled)

The application's sequence listing, which the Patent Office published only in electronic form, follows.

SEQUENCE LISTING (173477 sequences)

SEQ ID NO: 1 - protein, 9 aa, Artificial Sequence
  Synthetic Peptide
FLWPEAFLY

SEQ ID NO: 2 - protein, 9 aa, Artificial Sequence
  Synthetic Peptide
YVPEHWEYY

SEQ ID NO: 3 - protein, 9 aa, Artificial Sequence
  Synthetic Peptide
KLDLLEQEY

SEQ ID NO: 4 - protein, 9 aa, Artificial Sequence
  Synthetic Peptide
TTDGYLLRL

SEQ ID NO: 5 - protein, 9 aa, Artificial Sequence
  Synthetic Peptide
DTEFPNFKY

SEQ ID NO: 6 - protein, 9 aa, Artificial Sequence
  Synthetic Peptide
ATDGKVLLW

SEQ ID NO: 7 - protein, 9 aa, Artificial Sequence
  Synthetic Peptide
DGLLRVLTV

SEQ ID NO: 8 - protein, 9 aa, Artificial Sequence
  Synthetic Peptide
DAPLNIRSI

SEQ ID NO: 9 - protein, 9 aa, Artificial Sequence
  Synthetic Peptide
DGLRDLPSI

SEQ ID NO: 10 - protein, 9 aa, Artificial Sequence
  Synthetic Peptide
DGYVVKETI

SEQ ID NO: 11 - protein, 9 aa, Artificial Sequence
  Synthetic Peptide
DGRLVINRV

SEQ ID NO: 12 - protein, 9 aa, Artificial Sequence
  Synthetic Peptide
DAYPQRIKF

SEQ ID NO: 13 - protein, 9 aa, Artificial Sequence
  Synthetic Peptide
IIYPTPKVV

SEQ ID NO: 14 - protein, 9 aa, Artificial Sequence
  Synthetic Peptide
VPPLVPKVL

SEQ ID NO: 15 - protein, 9 aa, Artificial Sequence
  Synthetic Peptide
TPESKIRFV

SEQ ID NO: 16 - protein, 9 aa, Artificial Sequence
  Synthetic Peptide
VALLVGEKV

SEQ ID NO: 17 - protein, 9 aa, Artificial Sequence
  Synthetic Peptide
YIIEREPLI

SEQ ID NO: 18 - protein, 9 aa, Artificial Sequence
  Synthetic Peptide
FYPELKLAY

SEQ ID NO: 19 - protein, 9 aa, Artificial Sequence
  Synthetic Peptide
HFLDRHLVF

SEQ ID NO: 20 - protein, 9 aa, Artificial Sequence
  Synthetic Peptide
YLPALKVEY

SEQ ID NO: 21 - protein, 9 aa, Artificial Sequence
  Synthetic Peptide
LPLDIQIFY

SEQ ID NO: 22 - protein, 9 aa, Artificial Sequence
  Synthetic Peptide
ALSDLALHF

SEQ ID NO: 23 - protein, 9 aa, Artificial Sequence
  Synthetic Peptide
GLDDKLLHY

SEQ ID NO: 24 - protein, 9 aa, Artificial Sequence
  Synthetic Peptide
GLPDLVAKY

SEQ ID NO: 25 - protein, 9 aa, Artificial Sequence
  Synthetic Peptide
YPVYQPVGP

SEQ ID NO: 26 - protein, 9 aa, Artificial Sequence
  Synthetic Peptide
YGFVNYVTA

SEQ ID NO: 27 - protein, 9 aa, Artificial Sequence
  Synthetic Peptide
FVEILIPVA

SEQ ID NO: 28 - protein, 9 aa, Artificial Sequence
  Synthetic Peptide
FPKETFEGP

SEQ ID NO: 29 - protein, 9 aa, Artificial Sequence
  Synthetic Peptide
SAPVNFISA

SEQ ID NO: 30 - protein, 31 aa, Artificial Sequence
  Synthetic Peptide
  MISC_FEATURE (1)..(1): Xaa = any amino acid
  MISC_FEATURE (3)..(3): Xaa = any amino acid
  MISC_FEATURE (4)..(7): Xaa = E or D
  MISC_FEATURE (8)..(8): Xaa = any amino acid
  MISC_FEATURE (9)..(14): Xaa = L, V, or I
  MISC_FEATURE (15)..(21): Xaa = I, V, or A
  MISC_FEATURE (22)..(22): Xaa = any amino acid
  MISC_FEATURE (23)..(31): Xaa = L or V
XLXXXXXXXXXXXXXXXXXXXXXXXXXXXXX

SEQ ID NO: 31 - protein, 9 aa, Artificial Sequence
  Synthetic Peptide
  MISC_FEATURE (1)..(1): Xaa = any amino acid
  MISC_FEATURE (3)..(3): Xaa = any amino acid
  MISC_FEATURE (5)..(6): Xaa = any amino acid
  MISC_FEATURE (7)..(7): Xaa = L
  MISC_FEATURE (8)..(8): Xaa = any amino acid
  MISC_FEATURE (9)..(9): Xaa = Y or F
XLXDXXXXX

SEQ ID NO: 32 - protein, 9 aa, Artificial Sequence
  Synthetic Peptide
  MISC_FEATURE (1)..(1): Xaa = any amino acid
  MISC_FEATURE (2)..(2): Xaa = T, S, or L
  MISC_FEATURE (3)..(3): Xaa = D or E
  MISC_FEATURE (4)..(4): Xaa = I, V, or A
  MISC_FEATURE (5)..(8): Xaa = any amino acid
XXXXXXXXY

SEQ ID NO: 33 - protein, 9 aa, Artificial Sequence
  Synthetic Peptide
  MISC_FEATURE (1)..(1): Xaa = any amino acid
  MISC_FEATURE (3)..(5): Xaa = any amino acid
  MISC_FEATURE (6)..(6): Xaa = L or V
  MISC_FEATURE (7)..(8): Xaa = any amino acid
  MISC_FEATURE (9)..(9): Xaa = V or L
XLXXXXXXX

SEQ ID NO: 34 - protein, 9 aa, Artificial Sequence
  Synthetic Peptide
  MISC_FEATURE (1)..(1): Xaa = any amino acid
  MISC_FEATURE (3)..(3): Xaa = any amino acid
  MISC_FEATURE (4)..(4): Xaa = E or D
  MISC_FEATURE (5)..(5): Xaa = any amino acid
  MISC_FEATURE (6)..(6): Xaa = L or V
  MISC_FEATURE (7)..(8): Xaa = any amino acid
  MISC_FEATURE (9)..(9): Xaa = V or L
XLXXXXXXX

SEQ ID NO: 35 - protein, 9 aa, Artificial Sequence
  Synthetic Peptide
  MISC_FEATURE (1)..(1): Xaa = any amino acid
  MISC_FEATURE (4)..(8): Xaa = any amino acid
  MISC_FEATURE (9)..(9): Xaa = L or V
XLDXXXXXX

SEQ ID NO: 36 - protein, 9 aa, Artificial Sequence
  Synthetic Peptide
  MISC_FEATURE (1)..(6): Xaa = any amino acid
  MISC_FEATURE (8)..(8): Xaa = any amino acid
  MISC_FEATURE (9)..(9): Xaa = K, Y or R
XXXXXXLXX

SEQ ID NO: 37 - protein, 9 aa, Artificial Sequence
  Synthetic Peptide
  MISC_FEATURE (1)..(1): Xaa = any amino acid
  MISC_FEATURE (2)..(2): Xaa = R or A
  MISC_FEATURE (3)..(8): Xaa = any amino acid
XXXXXXXXR

SEQ ID NO: 38 - protein, 9 aa, Artificial Sequence
  Synthetic Peptide
  MISC_FEATURE (2)..(2): Xaa = V, T, or A
  MISC_FEATURE (3)..(8): Xaa = any amino acid
  MISC_FEATURE (9)..(9): Xaa = V or L
EXXXXXXXX

SEQ ID NO: 39 - protein, 9 aa, Artificial Sequence
  Synthetic Peptide
  MISC_FEATURE (1)..(1): Xaa = any amino acid
  MISC_FEATURE (2)..(2): Xaa = P or A
  MISC_FEATURE (3)..(3): Xaa = any amino acid
  MISC_FEATURE (5)..(8): Xaa = any amino acid
  MISC_FEATURE (9)..(9): Xaa = Y, F, or L
XXXRXXXXX

SEQ ID NO: 40 - protein, 9 aa, Artificial Sequence
  Synthetic Peptide
  MISC_FEATURE (1)..(1): Xaa = A or E
  MISC_FEATURE (3)..(4): Xaa = any amino acid
  MISC_FEATURE (6)..(8): Xaa = any amino acid
  MISC_FEATURE (9)..(9): Xaa = F, W, or L
XEXXLXXXX

SEQ ID NO: 41 - protein, 9 aa, Artificial Sequence
  Synthetic Peptide
  MISC_FEATURE (1)..(1): Xaa = A or E
  MISC_FEATURE (3)..(4): Xaa = any amino acid
  MISC_FEATURE (6)..(6): Xaa = any amino acid
  MISC_FEATURE (8)..(8): Xaa = any amino acid
  MISC_FEATURE (9)..(9): Xaa = F, W, or L
XEXXLXLXX

SEQ ID NO: 42 - protein, 9 aa, Artificial Sequence
  Synthetic Peptide
  MISC_FEATURE (2)..(2): Xaa = P or A
  MISC_FEATURE (3)..(8): Xaa = any amino acid
  MISC_FEATURE (9)..(9): Xaa = I, V, or L
DXXXXXXXX

SEQ ID NO: 43 - protein, 9 aa, Artificial Sequence
  Synthetic Peptide
  MISC_FEATURE (1)..(1): Xaa = M, W, or V
  MISC_FEATURE (3)..(8): Xaa = any amino acid
  MISC_FEATURE (9)..(9): Xaa = F or L
XYXXXXXXX

SEQ ID NO: 44 - protein, 8 aa, Homo Sapiens
ADMGHLKY

SEQ ID NO: 45 - protein, 8 aa, Homo Sapiens
ELDDTLKY

SEQ ID NO: 46 - protein, 8 aa, Homo Sapiens
FSDNIEFY

SEQ ID NO: 47 - protein, 8 aa, Homo Sapiens
FTELAILY

SEQ ID NO: 48 - protein, 8 aa, Homo Sapiens
GLDEPLLK

SEQ ID NO: 49 - protein, 8 aa, Homo Sapiens
GLDQPLLK

SEQ ID NO: 50 - protein, 8 aa, Homo Sapiens
HIDFAIQY

SEQ ID NO: 51 - protein, 8 aa, Homo Sapiens
HIDLGIKY

SEQ ID NO: 52 - protein, 8 aa, Homo Sapiens
ITDIHIKY

SEQ ID NO: 53 - protein, 8 aa, Homo Sapiens
ITDIVNKY

SEQ ID NO: 54 - protein, 8 aa, Homo Sapiens
ITDLPIKL

SEQ ID NO: 55 - protein, 8 aa, Homo Sapiens
IVDEAIYY

SEQ ID NO: 56 - protein, 8 aa, Homo Sapiens
LIQSAVLY

SEQ ID NO: 57 - protein, 8 aa, Homo Sapiens
LKDDLLLY

SEQ ID NO: 58 - protein, 8 aa, Homo Sapiens
LLDLMKNL

SEQ ID NO: 59 - protein, 8 aa, Homo Sapiens
LLDSSLEY

SEQ ID NO: 60 - protein, 8 aa, Homo Sapiens
LLDVGLRY

SEQ ID NO: 61 - protein, 8 aa, Homo Sapiens
LSDIGLEY

SEQ ID NO: 62 - protein, 8 aa, Homo Sapiens
LTDEGLLY

SEQ ID NO: 63 - protein, 8 aa, Homo Sapiens
LTDFIQKY

SEQ ID NO: 64 - protein, 8 aa, Homo Sapiens
LTDIGVLY

SEQ ID NO: 65 - protein, 8 aa, Homo Sapiens
LTDIIAAY

SEQ ID NO: 66 - protein, 8 aa, Homo Sapiens
LTEILDRY

SEQ ID NO: 67 - protein, 8 aa, Homo Sapiens
LVDDPLEY

SEQ ID NO: 68 - protein, 8 aa, Homo Sapiens
MSDVNLKY

SEQ ID NO: 69 - protein, 8 aa, Homo Sapiens
NIDYPVLY

SEQ ID NO: 70 - protein, 8 aa, Homo Sapiens
NTDSPLRY

SEQ ID NO: 71 - protein, 8 aa, Homo Sapiens
QTDINLPY

SEQ ID NO: 72 - protein, 8 aa, Homo Sapiens
TIDIGVKY

SEQ ID NO: 73 - protein, 8 aa, Homo Sapiens
VADMALHY

SEQ ID NO: 74 - protein, 8 aa, Homo Sapiens
VLDGTIEY

SEQ ID NO: 75 - protein, 8 aa, Homo Sapiens
VLDIPSKY

SEQ ID NO: 76 - protein, 8 aa, Homo Sapiens
WTDLALQY

SEQ ID NO: 77 - protein, 8 aa, Homo Sapiens
YADLSLKY

SEQ ID NO: 78 - protein, 8 aa, Homo Sapiens
YLDFINHY

SEQ ID NO: 79 - protein, 8 aa, Homo Sapiens
YLDQISRY

SEQ ID NO: 80 - protein, 8 aa, Homo Sapiens
YTDVSTRY

SEQ ID NO: 81 - protein, 9 aa, Homo Sapiens
AADIFYSRY

SEQ ID NO: 82 - protein, 9 aa, Homo Sapiens
AADLNLVLY

SEQ ID NO: 83 - protein, 9 aa, Homo Sapiens
AADLVEALY

SEQ ID NO: 84 - protein, 9 aa, Homo Sapiens
AIDEDVLRY

SEQ ID NO: 85 - protein, 9 aa, Homo Sapiens
AIDLLKEIY

SEQ ID NO: 86 - protein, 9 aa, Homo Sapiens
AIDQLHLEY

SEQ ID NO: 87 - protein, 9 aa, Homo Sapiens
AIDRLVNIY

SEQ ID NO: 88 - protein, 9 aa, Homo Sapiens
ALDAAVLAY

SEQ ID NO: 89 - protein, 9 aa, Homo Sapiens
ALDDFTICY

SEQ ID NO: 90 - protein, 9 aa, Homo Sapiens
ALDSHILDY

SEQ ID NO: 91 - protein, 9 aa, Homo Sapiens
ALDTLIIEY

SEQ ID NO: 92 - protein, 9 aa, Homo Sapiens
ALDVVNLVY

SEQ ID NO: 93 - protein, 9 aa, Homo Sapiens
AMDVYKNLY

SEQ ID NO: 94 - protein, 9 aa, Homo Sapiens
ASAVIGLLY

SEQ ID NO: 95 - protein, 9 aa, Homo Sapiens
ASDMLQLEY

SEQ ID NO: 96 - protein, 9 aa, Homo Sapiens
ASDPFFRHY

SEQ ID NO: 97 - protein, 9 aa, Homo Sapiens
ASDPYQVHV

SEQ ID NO: 98 - protein, 9 aa, Homo Sapiens
ASDSIVLFY

SEQ ID NO: 99 - protein, 9 aa, Homo Sapiens
ASDYFDQLY

SEQ ID NO: 100 - protein, 9 aa, Homo Sapiens
ASEDSVLLY

SEQ ID NO: 101 - protein, 9 aa, Homo Sapiens
ASETGFLTY

SEQ ID NO: 102 - protein, 9 aa, Homo Sapiens
ASEYDQIRY

SEQ ID NO: 103 - protein, 9 aa, Homo Sapiens
ATALFSFLY

SEQ ID NO: 104 - protein, 9 aa, Homo Sapiens
ATDFDVLSY

SEQ ID NO: 105 - protein, 9 aa, Homo Sapiens
ATDFKFAMY

SEQ ID NO: 106 - protein, 9 aa, Homo Sapiens
ATDGKVLLW

SEQ ID NO: 107 - protein, 9 aa, Homo Sapiens
ATDIKITVY

SEQ ID NO: 108 - protein, 9 aa, Homo Sapiens
ATDLAQHLY

SEQ ID NO: 109 - protein, 9 aa, Homo Sapiens
ATDLAYYLV

SEQ ID NO: 110 - protein, 9 aa, Homo Sapiens
ATDPNILSL

SEQ ID NO: 111 - protein, 9 aa, Homo Sapiens
ATDRWYDEY

SEQ ID NO: 112 - protein, 9 aa, Homo Sapiens
ATDYTFAMY

SEQ ID NO: 113 - protein, 9 aa, Homo Sapiens
ATEFIMNEY

SEQ ID NO: 114 - protein, 9 aa, Homo Sapiens
ATEVLMWFY

SEQ ID NO: 115 - protein, 9 aa, Homo Sapiens
ATSKVALVY

SEQ ID NO: 116 - protein, 9 aa, Homo Sapiens
AVDPGLLGY

SEQ ID NO: 117 - protein, 9 aa, Homo Sapiens
AVDPRFLAY

SEQ ID NO: 118 - protein, 9 aa, Homo Sapiens
CLDHVISYY

SEQ ID NO: 119 - protein, 9 aa, Homo Sapiens
DIDIRKDLY

SEQ ID NO: 120 - protein, 9 aa, Homo Sapiens
DIDIRPGLY

SEQ ID NO: 121 - protein, 9 aa, Homo Sapiens
DLDEIVARY

SEQ ID NO: 122 - protein, 9 aa, Homo Sapiens
DLDLSPLEY

SEQ ID NO: 123 - protein, 9 aa, Homo Sapiens
DLDSRVLYY

SEQ ID NO: 124 - protein, 9 aa, Homo Sapiens
DMDKVLLKY

SEQ ID NO: 125 - protein, 9 aa, Homo Sapiens
DSDMQTLVY

SEQ ID NO: 126 - protein, 9 aa, Homo Sapiens
DSDPWVLMV

SEQ ID NO: 127 - protein, 9 aa, Homo Sapiens
DSEGYLLFY

SEQ ID NO: 128 - protein, 9 aa, Homo Sapiens
DSERFFIRY

SEQ ID NO: 129 - protein, 9 aa, Homo Sapiens
DTDHYFLRY

SEQ ID NO: 130 - protein, 9 aa, Homo Sapiens
DTDISLIRY

SEQ ID NO: 131 - protein, 9 aa, Homo Sapiens
DTDRFVLLV

SEQ ID NO: 132 - protein, 9 aa, Homo Sapiens
DTEFPNFKY

SEQ ID NO: 133 - protein, 9 aa, Homo Sapiens
DVDIRKDLY

SEQ ID NO: 134 - protein, 9 aa, Homo Sapiens
EIDILRTLY

SEQ ID NO: 135 - protein, 9 aa, Homo Sapiens
ELDVVREIY

SEQ ID NO: 136 - protein, 9 aa, Homo Sapiens
ELERLTSLY

SEQ ID NO: 137 - protein, 9 aa, Homo Sapiens
EPFLFNFLY

SEQ ID NO: 138 - protein, 9 aa, Homo Sapiens
ESDLDYIQY

SEQ ID NO: 139 - protein, 9 aa, Homo Sapiens
ESSSVVLRY

SEQ ID NO: 140 - protein, 9 aa, Homo Sapiens
ETALLVDRY

SEQ ID NO: 141 - protein, 9 aa, Homo Sapiens
ETELDGLRY

SEQ ID NO: 142 - protein, 9 aa, Homo Sapiens
ETEPVFWYY

SEQ ID NO: 143 - protein, 9 aa, Homo Sapiens
ETTFLVDKY

SEQ ID NO: 144 - protein, 9 aa, Homo Sapiens
EVDPDTILK

SEQ ID NO: 145 - protein, 9 aa, Homo Sapiens
FADDMYSLY

SEQ ID NO: 146 - protein, 9 aa, Homo Sapiens
FADEGSIFY

SEQ ID NO: 147 - protein, 9 aa, Homo Sapiens
FADFDGVLY

SEQ ID NO: 148 - protein, 9 aa, Homo Sapiens
FADGFVLVY

SEQ ID NO: 149 - protein, 9 aa, Homo Sapiens
FAEAHYLSY

SEQ ID NO: 150 - protein, 9 aa, Homo Sapiens
FAEMIQPEY

SEQ ID NO: 151 - protein, 9 aa, Homo Sapiens
FIDAQFEAY

SEQ ID NO: 152 - protein, 9 aa, Homo Sapiens
FIDASRLVY

SEQ ID NO: 153 - protein, 9 aa, Homo Sapiens
FIDFLIDTY

SEQ ID NO: 154 - protein, 9 aa, Homo Sapiens
FIDLNYMVY

SEQ ID NO: 155 - protein, 9 aa, Homo Sapiens
FIDSIIAKY

SEQ ID NO: 156 - protein, 9 aa, Homo Sapiens
FIEERLLMY

SEQ ID NO: 157 - protein, 9 aa, Homo Sapiens
FIEEYVTAY

SEQ ID NO: 158 - protein, 9 aa, Homo Sapiens
FLDDFESKY

SEQ ID NO: 159 - protein, 9 aa, Homo Sapiens
FLDLVNYVY

SEQ ID NO: 160 - protein, 9 aa, Homo Sapiens
FLDTDTICY

SEQ ID NO: 161 - protein, 9 aa, Homo Sapiens
FLEETNCLY

SEQ ID NO: 162 - protein, 9 aa, Homo Sapiens
FLEPLGLAY

SEQ ID NO: 163 - protein, 9 aa, Homo Sapiens
FLEQVHQLY

SEQ ID NO: 164 - protein, 9 aa, Homo Sapiens
FLNDSYLKY

SEQ ID NO: 165 - protein, 9 aa, Homo Sapiens
FLWPEAFLY

SEQ ID NO: 166 - protein, 9 aa, Homo Sapiens
FMDDYIFTY

SEQ ID NO: 167 - protein, 9 aa, Homo Sapiens
FMDVSNPFY

SEQ ID NO: 168 - protein, 9 aa, Homo Sapiens
FSDIHDFEY

SEQ ID NO: 169 - protein, 9 aa, Homo Sapiens
FSDPNFLAH

SEQ ID NO: 170 - protein, 9 aa, Homo Sapiens
FSDTGNFGF

SEQ ID NO: 171 - protein, 9 aa, Homo Sapiens
FSDYPPLGR

SEQ ID NO: 172 - protein, 9 aa, Homo Sapiens
FSEACWEVY

SEQ ID NO: 173 - protein, 9 aa, Homo Sapiens
FSEEDFRLY

SEQ ID NO: 174 - protein, 9 aa, Homo Sapiens
FSEEQLNRY

SEQ ID NO: 175 - protein, 9 aa, Homo Sapiens
FSEFLINTY

SEQ ID NO: 176 - protein, 9 aa, Homo Sapiens
FSEIDLEKY

SEQ ID NO: 177 - protein, 9 aa, Homo Sapiens
FSELSACLY

SEQ ID NO: 178 - protein, 9 aa, Homo Sapiens
FSENTLQFY

SEQ ID NO: 179 - protein, 9 aa, Homo Sapiens
FSEPRAIFY

SEQ ID NO: 180 - protein, 9 aa, Homo Sapiens
FTAEFSSRY

SEQ ID NO: 181 - protein, 9 aa, Homo Sapiens
FTAKSPLMY

SEQ ID NO: 182 - protein, 9 aa, Homo Sapiens
FTDIDGQVY

SEQ ID NO: 183 - protein, 9 aa, Homo Sapiens
FTDTSIILF

SEQ ID NO: 184 - protein, 9 aa, Homo Sapiens
FTEEDVKFY

SEQ ID NO: 185 - protein, 9 aa, Homo Sapiens
FTEIKNLLV

SEQ ID NO: 186 - protein, 9 aa, Homo Sapiens
FTSMTRLYY

SEQ ID NO: 187 - protein, 9 aa, Homo Sapiens
FVDDQQTFF

SEQ ID NO: 188 - protein, 9 aa, Homo Sapiens
FVDDYTVRV

SEQ ID NO: 189 - protein, 9 aa, Homo Sapiens
FVDILTNWY

SEQ ID NO: 190 - protein, 9 aa, Homo Sapiens
FVDPAQITM

SEQ ID NO: 191 - protein, 9 aa, Homo Sapiens
FVDPLVTNY

SEQ ID NO: 192 - protein, 9 aa, Homo Sapiens
FVEPVGLNY

SEQ ID NO: 193 - protein, 9 aa, Homo Sapiens
FVEPYFDEY

SEQ ID NO: 194 - protein, 9 aa, Homo Sapiens
FVETESVRY

SEQ ID NO: 195 - protein, 9 aa, Homo Sapiens
FVEVGRVAY

SEQ ID NO: 196 - protein, 9 aa, Homo Sapiens
GLDDKLLHY

SEQ ID NO: 197 - protein, 9 aa, Homo Sapiens
GLDEVIFSY

SEQ ID NO: 198 - protein, 9 aa, Homo Sapiens
GSDPVFRFY

SEQ ID NO: 199 - protein, 9 aa, Homo Sapiens
GSEYLKLGY

SEQ ID NO: 200 - protein, 9 aa, Homo Sapiens
GTDELRLLY

SEQ ID NO: 201 - protein, 9 aa, Homo Sapiens
GTDLSIFKY

SEQ ID NO: 202 - protein, 9 aa, Homo Sapiens
GTEFTTILY

SEQ ID NO: 203 - protein, 9 aa, Homo Sapiens
GTELLSLVY

SEQ ID NO: 204 - protein, 9 aa, Homo Sapiens
GTLDSVLRY

SEQ ID NO: 205 - protein, 9 aa, Homo Sapiens
GTVYEDLRY

SEQ ID NO: 206 - protein, 9 aa, Homo Sapiens
HLDAELDAY

SEQ ID NO: 207 - protein, 9 aa, Homo Sapiens
HLDLGILYY

SEQ ID NO: 208 - protein, 9 aa, Homo Sapiens
HSALLALRY

SEQ ID NO: 209 - protein, 9 aa, Homo Sapiens
HSDLHILDF

SEQ ID NO: 210 - protein, 9 aa, Homo Sapiens
HSDPSILGY

SEQ ID NO: 211 - protein, 9 aa, Homo Sapiens
HSDTIQWLY

SEQ ID NO: 212 - protein, 9 aa, Homo Sapiens
HSELLEDYY

SEQ ID NO: 213 - protein, 9 aa, Homo Sapiens
HSEYHTLLY

SEQ ID NO: 214 - protein, 9 aa, Homo Sapiens
HTDILKEKY

SEQ ID NO: 215 - protein, 9 aa, Homo Sapiens
HTDQLVLIF

SEQ ID NO: 216 - protein, 9 aa, Homo Sapiens
HTDVGLLEY

SEQ ID NO: 217 - protein, 9 aa, Homo Sapiens
HTDWLLDLY

SEQ ID NO: 218 - protein, 9 aa, Homo Sapiens
IADMGHLKY

SEQ ID NO: 219 - protein, 9 aa, Homo Sapiens
IIDYLTDHY

SEQ ID NO: 220 - protein, 9 aa, Homo Sapiens
IIEAQYLRY

SEQ ID NO: 221 - protein, 9 aa, Homo Sapiens
ILDDFREAY

SEQ ID NO: 222 - protein, 9 aa, Homo Sapiens
ILDEFLQTY

SEQ ID NO: 223 - protein, 9 aa, Homo Sapiens
ILDEVIMGY

SEQ ID NO: 224 - protein, 9 aa, Homo Sapiens
ILDIPNQLY

SEQ ID NO: 225 - protein, 9 aa, Homo Sapiens
ILDVLKQGY

SEQ ID NO: 226 - protein, 9 aa, Homo Sapiens
ISDLIRDSY

SEQ ID NO: 227 - protein, 9 aa, Homo Sapiens
ISDLNELLK

SEQ ID NO: 228 - protein, 9 aa, Homo Sapiens
ISDRLIGIY

SEQ ID NO: 229 - protein, 9 aa, Homo Sapiens
ISDSYFPRY

SEQ ID NO: 230 - protein, 9 aa, Homo Sapiens
ISEELVQKY

SEQ ID NO: 231 - protein, 9 aa, Homo Sapiens
ISEVGTIRY

SEQ ID NO: 232 - protein, 9 aa, Homo Sapiens
ITDDLHFYV

SEQ ID NO: 233 - protein, 9 aa, Homo Sapiens
ITDHGSLIY

SEQ ID NO: 234 - protein, 9 aa, Homo Sapiens
ITDQGIEFY

SEQ ID NO: 235 - protein, 9 aa, Homo Sapiens
ITGDVEVVL

SEQ ID NO: 236 - protein, 9 aa, Homo Sapiens
ITQGTPLKY

SEQ ID NO: 237 - protein, 9 aa, Homo Sapiens
IVDEFAMRY

SEQ ID NO: 238 - protein, 9 aa, Homo Sapiens
IVDHIHFQY

SEQ ID NO: 239 - protein, 9 aa, Homo Sapiens
IVDNPADFY

SEQ ID NO: 240 - protein, 9 aa, Homo Sapiens
IVDSLTEMY

SEQ ID NO: 241 - protein, 9 aa, Homo Sapiens
KIDALQLEY

SEQ ID NO: 242 - protein, 9 aa, Homo Sapiens
KLDDLHTLY

SEQ ID NO: 243 - protein, 9 aa, Homo Sapiens
KLDLLEQEY

SEQ ID NO: 244 - protein, 9 aa, Homo Sapiens
KLDQLIEFY

SEQ ID NO: 245 - protein, 9 aa, Homo Sapiens
KLDSLLLFY

SEQ ID NO: 246 - protein, 9 aa, Homo Sapiens
KLDTLCDLY

SEQ ID NO: 247 - protein, 9 aa, Homo Sapiens
KMDDLNLHY

SEQ ID NO: 248 - protein, 9 aa, Homo Sapiens
KSDGSFIGY

SEQ ID NO: 249 - protein, 9 aa, Homo Sapiens
KSDLFFHDY

SEQ ID NO: 250 - protein, 9 aa, Homo Sapiens
KSDPFLVFY

SEQ ID NO: 251 - protein, 9 aa, Homo Sapiens
KSDVHLNFY

SEQ ID NO: 252 - protein, 9 aa, Homo Sapiens
KSELGLNFY

SEQ ID NO: 253 - protein, 9 aa, Homo Sapiens
KTDHFIFTY

SEQ ID NO: 254 - protein, 9 aa, Homo Sapiens
LADELITVY

SEQ ID NO: 255 - protein, 9 aa, Homo Sapiens
LADIYRELY

SEQ ID NO: 256 - protein, 9 aa, Homo Sapiens
LADLKVQLY

SEQ ID NO: 257 - protein, 9 aa, Homo Sapiens
LADLSCLVY

SEQ ID NO: 258 - protein, 9 aa, Homo Sapiens
LADQIFAYY

SEQ ID NO: 259 - protein, 9 aa, Homo Sapiens
LAEEITLHY

SEQ ID NO: 260 - protein, 9 aa, Homo Sapiens
LAELNQILY

SEQ ID NO: 261 - protein, 9 aa, Homo Sapiens
LAEWKSLEY

SEQ ID NO: 262 - protein, 9 aa, Homo Sapiens
LAEYDLDKY

SEQ ID NO: 263 - protein, 9 aa, Homo Sapiens
LDALIDTYL

SEQ ID NO: 264 - protein, 9 aa, Homo Sapiens
LIDLAIDTY

SEQ ID NO: 265 - protein, 9 aa, Homo Sapiens
LIDNSFNRY

SEQ ID NO: 266 - protein, 9 aa, Homo Sapiens
LIDPDLTQY

SEQ ID NO: 267 - protein, 9 aa, Homo Sapiens
LIDPNTLQV

SEQ ID NO: 268 - protein, 9 aa, Homo Sapiens
LIDTLLDGY

SEQ ID NO: 269 - protein, 9 aa, Homo Sapiens
LIDVGTGYY

SEQ ID NO: 270 - protein, 9 aa, Homo Sapiens
LIDYDMVHY

SEQ ID NO: 271 - protein, 9 aa, Homo Sapiens
LIEEALQKY

SEQ ID NO: 272 - protein, 9 aa, Homo Sapiens
LLDAVLIDY

SEQ ID NO: 273 - protein, 9 aa, Homo Sapiens
LLDDMNHCY

SEQ ID NO: 274 - protein, 9 aa, Homo Sapiens
LLDDSVRVY

SEQ ID NO: 275 - protein, 9 aa, Homo Sapiens
LLDDTGLAY

SEQ ID NO: 276 - protein, 9 aa, Homo Sapiens
LLDEHHISY

SEQ ID NO: 277 - protein, 9 aa, Homo Sapiens
LLDFADVTY

SEQ ID NO: 278 - protein, 9 aa, Homo Sapiens
LLDFSYEQY

SEQ ID NO: 279 - protein, 9 aa, Homo Sapiens
LLDGFLVNY

SEQ ID NO: 280 - protein, 9 aa, Homo Sapiens
LLDHLSIVY

SEQ ID NO: 281 - protein, 9 aa, Homo Sapiens
LLDIGSLDY

SEQ ID NO: 282 - protein, 9 aa, Homo Sapiens
LLDISGVLY

SEQ ID NO: 283 - protein, 9 aa, Homo Sapiens
LLDPASFEY

SEQ ID NO: 284 - protein, 9 aa, Homo Sapiens
LLDPSVFHV

SEQ ID NO: 285 - protein, 9 aa, Homo Sapiens
LLDTELDLY

SEQ ID NO: 286 - protein, 9 aa, Homo Sapiens
LLDTNRYLY

SEQ ID NO: 287 - protein, 9 aa, Homo Sapiens
LLDVTPLSL

SEQ ID NO: 288 - protein, 9 aa, Homo Sapiens
LLEELPILY

SEQ ID NO: 289 - protein, 9 aa, Homo Sapiens
LLEGLTVVY

SEQ ID NO: 290 - protein, 9 aa, Homo Sapiens
LLEKEILFY

SEQ ID NO: 291 - protein, 9 aa, Homo Sapiens
LLELLHELY

SEQ ID NO: 292 - protein, 9 aa, Homo Sapiens
LLSTYLERY

SEQ ID NO: 293 - protein, 9 aa, Homo Sapiens
LLYESPERY

SEQ ID NO: 294 - protein, 9 aa, Homo Sapiens
LMDIFGDRY

SEQ ID NO: 295 - protein, 9 aa, Homo Sapiens
LQDICPLLY

SEQ ID NO: 296 - protein, 9 aa, Homo Sapiens
LSDFGLERY

SEQ ID NO: 297 - protein, 9 aa, Homo Sapiens
LSDHSIRSF

SEQ ID NO: 298 - protein, 9 aa, Homo Sapiens
LSDIDSRYI

SEQ ID NO: 299 - protein, 9 aa, Homo Sapiens
LSDIERQIY

SEQ ID NO: 300 - protein, 9 aa, Homo Sapiens
LSDILRFIY

SEQ ID NO: 301 - protein, 9 aa, Homo Sapiens
LSDIVIEKY

SEQ ID NO: 302 - protein, 9 aa, Homo Sapiens
LSDLGKLSY

SEQ ID NO: 303 - protein, 9 aa, Homo Sapiens
LSDLGLISY

SEQ ID NO: 304 - protein, 9 aa, Homo Sapiens
LSDLGRLSY

SEQ ID NO: 305 - protein, 9 aa, Homo Sapiens
LSDLLDWKY

SEQ ID NO: 306 - protein, 9 aa, Homo Sapiens
LSDPMWPQY

SEQ ID NO: 307 - protein, 9 aa, Homo Sapiens
LSDPVHLTV

SEQ ID NO: 308 - protein, 9 aa, Homo Sapiens
LSDSFSDLY

SEQ ID NO: 309 - protein, 9 aa, Homo Sapiens
LSDSLFLEV

SEQ ID NO: 310 - protein, 9 aa, Homo Sapiens
LSEAFHEEY

SEQ ID NO: 311 - protein, 9 aa, Homo Sapiens
LSEDVRFYY

SEQ ID NO: 312 - protein, 9 aa, Homo Sapiens
LSEEGLLVY

SEQ ID NO: 313 - protein, 9 aa, Homo Sapiens
LSEERVWEY

SEQ ID NO: 314 - protein, 9 aa, Homo Sapiens
LSELAALCY

SEQ ID NO: 315 - protein, 9 aa, Homo Sapiens
LSEPSSLQY

SEQ ID NO: 316 - protein, 9 aa, Homo Sapiens
LSEQLLNNY

SEQ ID NO: 317 - protein, 9 aa, Homo Sapiens
LSEWQKELY

SEQ ID NO: 318 - protein, 9 aa, Homo Sapiens
LSGFELELY

SEQ ID NO: 319 - protein, 9 aa, Homo Sapiens
LTALGKLLY

SEQ ID NO: 320 - protein, 9 aa, Homo Sapiens
LTDDDLLRY

SEQ ID NO: 321 - protein, 9 aa, Homo Sapiens
LTDDELFQY

SEQ ID NO: 322 - protein, 9 aa, Homo Sapiens
LTDFDIRFY

SEQ ID NO: 323 - protein, 9 aa, Homo Sapiens
LTDFIREEY

SEQ ID NO: 324 - protein, 9 aa, Homo Sapiens
LTDGHPLTL

SEQ ID NO: 325 - protein, 9 aa, Homo Sapiens
LTDNRYLLL

SEQ ID NO: 326 - protein, 9 aa, Homo Sapiens
LTDNVMITV

SEQ ID NO: 327 - protein, 9 aa, Homo Sapiens
LTDPAIVKV

SEQ ID NO: 328 - protein, 9 aa, Homo Sapiens
LTDPNYLCL

SEQ ID NO: 329 - protein, 9 aa, Homo Sapiens
LTDRLASLY

SEQ ID NO: 330 - protein, 9 aa, Homo Sapiens
LTDRLQLTL

SEQ ID NO: 331 - protein, 9 aa, Homo Sapiens
LTDTFTAYY

SEQ ID NO: 332 - protein, 9 aa, Homo Sapiens
LTDTFYYRL

SEQ ID NO: 333 - protein, 9 aa, Homo Sapiens
LTDTTILQV

SEQ ID NO: 334 - protein, 9 aa, Homo Sapiens
LTDYDIRFY

SEQ ID NO: 335 - protein, 9 aa, Homo Sapiens
LTEEFRLNY

SEQ ID NO: 336 - protein, 9 aa, Homo Sapiens
LTEFKFIWY

SEQ ID NO: 337 - protein, 9 aa, Homo Sapiens
LTEGPHLYY

SEQ ID NO: 338 - protein, 9 aa, Homo Sapiens
LTEIKGSVY

SEQ ID NO: 339 - protein, 9 aa, Homo Sapiens
LTEKNWFHY

SEQ ID NO: 340 - protein, 9 aa, Homo Sapiens
LTELMFEHY

SEQ ID NO: 341 - protein, 9 aa, Homo Sapiens
LTELPDWSY

SEQ ID NO: 342 - protein, 9 aa, Homo Sapiens
LTEPTGLLY

SEQ ID NO: 343 - protein, 9 aa, Homo Sapiens
LTEQRALLY

SEQ ID NO: 344 - protein, 9 aa, Homo Sapiens
LTEQYNEQY

SEQ ID NO: 345 - protein, 9 aa, Homo Sapiens
LTEYLSTHY

SEQ ID NO: 346 - protein, 9 aa, Homo Sapiens
LTHSLVLHY

SEQ ID NO: 347 - protein, 9 aa, Homo Sapiens
LTHWEQLDY

SEQ ID NO: 348 - protein, 9 aa, Homo Sapiens
LTLSILDRY

SEQ ID NO: 349 - protein, 9 aa, Homo Sapiens
LVDEWLDSY

SEQ ID NO: 350 - protein, 9 aa, Homo Sapiens
LVDGYNVHY

SEQ ID NO: 351 - protein, 9 aa, Homo Sapiens
LVDHFMELY

SEQ ID NO: 352 - protein, 9 aa, Homo Sapiens
LVDLAPLGY

SEQ ID NO: 353 - protein, 9 aa, Homo Sapiens
LVDLYILTY

SEQ ID NO: 354 - protein, 9 aa, Homo Sapiens
LVDPSVYGY

SEQ ID NO: 355 - protein, 9 aa, Homo Sapiens
LVERLQALY

SEQ ID NO: 356 - protein, 9 aa, Homo Sapiens
MIDPSGVSY

SEQ ID NO: 357 - protein, 9 aa, Homo Sapiens
MIDVTKSYY

SEQ ID NO: 358 - protein, 9 aa, Homo Sapiens
MIEPRTLQY

SEQ ID NO: 359 - protein, 9 aa, Homo Sapiens
MLDHQPPQY

SEQ ID NO: 360 - protein, 9 aa, Homo Sapiens
MSEIADLTY

SEQ ID NO: 361 - protein, 9 aa, Homo Sapiens
MSELLFECY

SEQ ID NO: 362 - protein, 9 aa, Homo Sapiens
MSMVANLLY

SEQ ID NO: 363 - protein, 9 aa, Homo Sapiens
MTDEWFSEY

SEQ ID NO: 364 - protein, 9 aa, Homo Sapiens
MTDPIRILV

SEQ ID NO: 365 - protein, 9 aa, Homo Sapiens
MTDTYLLNL

SEQ ID NO: 366 - protein, 9 aa, Homo Sapiens
MTEKFLFLY

SEQ ID NO: 367 - protein, 9 aa, Homo Sapiens
MTHNLLLNY

SEQ ID NO: 368 - protein, 9 aa, Homo Sapiens
MVDFAMDVY

SEQ ID NO: 369 - protein, 9 aa, Homo Sapiens
MVDIIETVY

SEQ ID NO: 370 - protein, 9 aa, Homo Sapiens
MVDPFHTLF

SEQ ID NO: 371 - protein, 9 aa, Homo Sapiens
MVDPLLTKY

SEQ ID NO: 372 - protein, 9 aa, Homo Sapiens
NIDNFLSRY

SEQ ID NO: 373 - protein, 9 aa, Homo Sapiens
NLDFLDLGY

SEQ ID NO: 374 - protein, 9 aa, Homo Sapiens
NLDFQMEQY

SEQ ID NO: 375 - protein, 9 aa, Homo Sapiens
NLDIERPTY

SEQ ID NO: 376 - protein, 9 aa, Homo Sapiens
NLDIIQQEY

SEQ ID NO: 377 - protein, 9 aa, Homo Sapiens
NLDPKITEY

SEQ ID NO: 378 - protein, 9 aa, Homo Sapiens
NLDPLTETY

SEQ ID NO: 379 - protein, 9 aa, Homo Sapiens
NLEEISNYY

SEQ ID NO: 380 - protein, 9 aa, Homo Sapiens
NSDLNNLLF

SEQ ID NO: 381 - protein, 9 aa, Homo Sapiens
NSDVSLLNY

SEQ ID NO: 382 - protein, 9 aa, Homo Sapiens
NSDWHLVNY

SEQ ID NO: 383 - protein, 9 aa, Homo Sapiens
NSELSCQLY

SEQ ID NO: 384 - protein, 9 aa, Homo Sapiens
NSLFLTDLY

SEQ ID NO: 385 - protein, 9 aa, Homo Sapiens
NTDFRYFIY

SEQ ID NO: 386 - protein, 9 aa, Homo Sapiens
NTDLVFGQY

SEQ ID NO: 387 - protein, 9 aa, Homo Sapiens
NTDSPLRYV

SEQ ID NO: 388 - protein, 9 aa, Homo Sapiens
NTEEFITVY

SEQ ID NO: 389 - protein, 9 aa, Homo Sapiens
NTQPIPILY

SEQ ID NO: 390 - protein, 9 aa, Homo Sapiens
NVDAILEEY

SEQ ID NO: 391 - protein, 9 aa, Homo Sapiens
NVDESLLGY

SEQ ID NO: 392 - protein, 9 aa, Homo Sapiens
PLDQTPLFY

SEQ ID NO: 393 - protein, 9 aa, Homo Sapiens
PSDLLVNVY

SEQ ID NO: 394 - protein, 9 aa, Homo Sapiens
PSDPQVILY

SEQ ID NO: 395 - protein, 9 aa, Homo Sapiens
PTAVVPLRY

SEQ ID NO: 396 - protein, 9 aa, Homo Sapiens
PTDPKVVVY

SEQ ID NO: 397 - protein, 9 aa, Homo Sapiens
PTDVLKIVY

SEQ ID NO: 398 - protein, 9 aa, Homo Sapiens
QADIARMLY

SEQ ID NO: 399 - protein, 9 aa, Homo Sapiens
QIEEAGWSY

SEQ ID NO: 400 - protein, 9 aa, Homo Sapiens
QLDAELLRY

SEQ ID NO: 401 - protein, 9 aa, Homo Sapiens
QLDRISVYY

SEQ ID NO: 402 - protein, 9 aa, Homo Sapiens
QLEHLQSKY

SEQ ID NO: 403 - protein, 9 aa, Homo Sapiens
QMDLLQEFY

SEQ ID NO: 404 - protein, 9 aa, Homo Sapiens
QSDYFRALY

SEQ ID NO: 405 - protein, 9 aa, Homo Sapiens
QSELVGQLY

SEQ ID NO: 406 - protein, 9 aa, Homo Sapiens
QSERQLLLY

SEQ ID NO: 407 - protein, 9 aa, Homo Sapiens
QTDHLFFKY

SEQ ID NO: 408 - protein, 9 aa, Homo Sapiens
QTDINLPYL

SEQ ID NO: 409 - protein, 9 aa, Homo Sapiens
QTDKLKELY

SEQ ID NO: 410 - protein, 9 aa, Homo Sapiens
QTDNIIYVY

SEQ ID NO: 411 - protein, 9 aa, Homo Sapiens
QTDPTLLSV

SEQ ID NO: 412 - protein, 9 aa, Homo Sapiens
QTDQLVLIF

SEQ ID NO: 413 - protein, 9 aa, Homo Sapiens
QTPIVPLLY

SEQ ID NO: 414 - protein, 9 aa, Homo Sapiens
RADQELLMY

SEQ ID NO: 415 - protein, 9 aa, Homo Sapiens
RIDLIPSLY

SEQ ID NO: 416 - protein, 9 aa, Homo Sapiens
RIEKQFLLY

SEQ ID NO: 417 - protein, 9 aa, Homo Sapiens
RLDAVTLLY

SEQ ID NO: 418 - protein, 9 aa, Homo Sapiens
RLDINTNTY

SEQ ID NO: 419 - protein, 9 aa, Homo Sapiens
RLDSLTTLY

SEQ ID NO: 420 - protein, 9 aa, Homo Sapiens
RMDNIYFEY

SEQ ID NO: 421 - protein, 9 aa, Homo Sapiens
RSDFFTSFY

SEQ ID NO: 422 - protein, 9 aa, Homo Sapiens
RSDVEILGY

SEQ ID NO: 423 - protein, 9 aa, Homo Sapiens
RTDGILALY

SEQ ID NO: 424 - protein, 9 aa, Homo Sapiens
RTDPIPIVV

SEQ ID NO: 425 - protein, 9 aa, Homo Sapiens
RTEPFQDGY

SEQ ID NO: 426 - protein, 9 aa, Homo Sapiens
RTEYTITMY

SEQ ID NO: 427 - protein, 9 aa, Homo Sapiens
RVDELLEKY

SEQ ID NO: 428 - protein, 9 aa, Homo Sapiens
RVDFQGMEY

SEQ ID NO: 429 - protein, 9 aa, Homo Sapiens
RVDQSLLLY

SEQ ID NO: 430 - protein, 9 aa, Homo Sapiens
SADLVALSY

SEQ ID NO: 431 - protein, 9 aa, Homo Sapiens
SADQVALVY

SEQ ID NO: 432 - protein, 9 aa, Homo Sapiens
SADSFQSFY

SEQ ID NO: 433 - protein, 9 aa, Homo Sapiens
SLEIRALLY

SEQ ID NO: 434 - protein, 9 aa, Homo Sapiens
SMDEKVELY

SEQ ID NO: 435 - protein, 9 aa, Homo Sapiens
SSDPKVLTL

SEQ ID NO: 436 - protein, 9 aa, Homo Sapiens
SSDVLVFDY

SEQ ID NO: 437 - protein, 9 aa, Homo Sapiens
SSDYVEIHY

SEQ ID NO: 438 - protein, 9 aa, Homo Sapiens
SSEELPLYY

SEQ ID NO: 439 - protein, 9 aa, Homo Sapiens
SSELFTLTY

SEQ ID NO: 440 - protein, 9 aa, Homo Sapiens
SSEQLFLRY

SEQ ID NO: 441 - protein, 9 aa, Homo Sapiens
SSEQTFMYY

SEQ ID NO: 442 - protein, 9 aa, Homo Sapiens
STDHIPILY

SEQ ID NO: 443 - protein, 9 aa, Homo Sapiens
STDWHVVNY

SEQ ID NO: 444 - protein, 9 aa, Homo Sapiens
STELNHLGY

SEQ ID NO: 445 - protein, 9 aa, Homo Sapiens
SVDSQILYY

SEQ ID NO: 446 - protein, 9 aa, Homo Sapiens
SVEEFVERY

SEQ ID NO: 447 - protein, 9 aa, Homo Sapiens
SVEESVLLY

SEQ ID NO: 448 - protein, 9 aa, Homo Sapiens
TADHNLLLY

SEQ ID NO: 449 - protein, 9 aa, Homo Sapiens
TDDLTTWLY

SEQ ID NO: 450 - protein, 9 aa, Homo Sapiens
TEPPPLLVY

SEQ ID NO: 451 - protein, 9 aa, Homo Sapiens
TLDLIDEAY

SEQ ID NO: 452 - protein, 9 aa, Homo Sapiens
TLDTKPGLY

SEQ ID NO: 453 - protein, 9 aa, Homo Sapiens
TSDELQFGY

SEQ ID NO: 454 - protein, 9 aa, Homo Sapiens
TSEDRFIQY

SEQ ID NO: 455 - protein, 9 aa, Homo Sapiens
TSEGLKLYY

SEQ ID NO: 456 - protein, 9 aa, Homo Sapiens
TTDFIFNLY

SEQ ID NO: 457 - protein, 9 aa, Homo Sapiens
TTDFIYQLY

SEQ ID NO: 458 - protein, 9 aa, Homo Sapiens
TTDGYLLRL

SEQ ID NO: 459 - protein, 9 aa, Homo Sapiens
TTDLELIKY

SEQ ID NO: 460 - protein, 9 aa, Homo Sapiens
TTEFLYNLY

SEQ ID NO: 461 - protein, 9 aa, Homo Sapiens
TTEIETLLL

SEQ ID NO: 462 - protein, 9 aa, Homo Sapiens
TTEVHPELY

SEQ ID NO: 463 - protein, 9 aa, Homo Sapiens
TVDEHVWFY

SEQ ID NO: 464 - protein, 9 aa, Homo Sapiens
TVDRVVLLY

SEQ ID NO: 465 - protein, 9 aa, Homo Sapiens
VADKVHLMY

SEQ ID NO: 466 - protein, 9 aa, Homo Sapiens
VADLHLYLY

SEQ ID NO: 467 - protein, 9 aa, Homo Sapiens
VADVHQYFY

SEQ ID NO: 468 - protein, 9 aa, Homo Sapiens
VGDLAELLY

SEQ ID NO: 469 - protein, 9 aa, Homo Sapiens
VIDWHNYGY

SEQ ID NO: 470 - protein, 9 aa, Homo Sapiens
VLDEAFQRY

SEQ ID NO: 471 - protein, 9 aa, Homo Sapiens
VLDELKHYY

SEQ ID NO: 472 - protein, 9 aa, Homo Sapiens
VLDELSVTY

SEQ ID NO: 473 - protein, 9 aa, Homo Sapiens
VLDFGDLTY

SEQ ID NO: 474 - protein, 9 aa, Homo Sapiens
VLDILLEQY

SEQ ID NO: 475 - protein, 9 aa, Homo Sapiens
VLDIQNNLY

SEQ ID NO: 476 - protein, 9 aa, Homo Sapiens
VLDNPSPFY

SEQ ID NO: 477 - protein, 9 aa, Homo Sapiens
VLDPKVGFY

SEQ ID NO: 478 - protein, 9 aa, Homo Sapiens
VLDPYLLKY

SEQ ID NO: 479 - protein, 9 aa, Homo Sapiens
VLDRLTFDY

SEQ ID NO: 480 - protein, 9 aa, Homo Sapiens
VLDSFLQGY

SEQ ID NO: 481 - protein, 9 aa, Homo Sapiens
VLDSLLVQY

SEQ ID NO: 482 - protein, 9 aa, Homo Sapiens
VLDVVYLVY

SEQ ID NO: 483 - protein, 9 aa, Homo Sapiens
VMDTLGIPY

SEQ ID NO: 484 - protein, 9 aa, Homo Sapiens
VMDVKPVDY

SEQ ID NO: 485 - protein, 9 aa, Homo Sapiens
VSDELRQWY

SEQ ID NO: 486 - protein, 9 aa, Homo Sapiens
VSDFGLSRY

SEQ ID NO: 487 - protein, 9 aa, Homo Sapiens
VSDPVGVLY

SEQ ID NO: 488 - protein, 9 aa, Homo Sapiens
VSDRYRFLY

SEQ ID NO: 489 - protein, 9 aa, Homo Sapiens
VSDYLRQSY

SEQ ID NO: 490 - protein, 9 aa, Homo Sapiens
VSEQELLRY

SEQ ID NO: 491 - protein, 9 aa, Homo Sapiens
VTDAVALRV

SEQ ID NO: 492 - protein, 9 aa, Homo Sapiens
VTDFIAPGY

SEQ ID NO: 493 - protein, 9 aa, Homo Sapiens
VTDHLGVVY

SEQ ID NO: 494 - protein, 9 aa, Homo Sapiens
VTDIHQLSF

SEQ ID NO: 495 - protein, 9 aa, Homo Sapiens
VTDLLKELV

SEQ ID NO: 496 - protein, 9 aa, Homo Sapiens
VTEEIFLEY

SEQ ID NO: 497 - protein, 9 aa, Homo Sapiens
VTEIMSMGY

SEQ ID NO: 498 - protein, 9 aa, Homo Sapiens
VTEIRQYFY

SEQ ID NO: 499 - protein, 9 aa, Homo Sapiens
VTEKDLLLY

SEQ ID NO: 500 - protein, 9 aa, Homo Sapiens
VTELHVISY

SEQ ID NO: 501 - protein, 9 aa, Homo Sapiens
VTENVVNLY

SEQ ID NO: 502 - protein, 9 aa, Homo Sapiens
VTETNVFFY

SEQ ID NO: 503 - protein, 9 aa, Homo Sapiens
VTFPEFLRY

SEQ ID NO: 504 - protein, 9 aa, Homo Sapiens
VVDDWIESY

SEQ ID NO: 505 - protein, 9 aa, Homo Sapiens
VVDGFNVLY

SEQ ID NO: 506 - protein, 9 aa, Homo Sapiens
VVDRIYSLY

SEQ ID NO: 507 - protein, 9 aa, Homo Sapiens
VVELDLLEY

SEQ ID NO: 508 - protein, 9 aa, Homo Sapiens
WIDPFEVSY

SEQ ID NO: 509 - protein, 9 aa, Homo Sapiens
WLESVRLEY

SEQ ID NO: 510 - protein, 9 aa, Homo Sapiens
WSEITELLY

SEQ ID NO: 511 - protein, 9 aa, Homo Sapiens
WSEPQSLCY

SEQ ID NO: 512 - protein, 9 aa, Homo Sapiens
WSERLMTAY

SEQ ID NO: 513 - protein, 9 aa, Homo Sapiens
WTDINVVVY

SEQ ID NO: 514 - protein, 9 aa, Homo Sapiens
WTDNRELTY

SEQ ID NO: 515 - protein, 9 aa, Homo Sapiens
WVDPYEVSY

SEQ ID NO: 516 - protein, 9 aa, Homo Sapiens
WVDSDQLLY

SEQ ID NO: 517 - protein, 9 aa, Homo Sapiens
YAALHGEFY

SEQ ID NO: 518 - protein, 9 aa, Homo Sapiens
YADPVNAHY

SEQ ID NO: 519 - protein, 9 aa, Homo Sapiens
YIDAQFEAY

SEQ ID NO: 520 - protein, 9 aa, Homo Sapiens
YIDAQFENY

SEQ ID NO: 521 - protein, 9 aa, Homo Sapiens
YIDDVFHAL

SEQ ID NO: 522 - protein, 9 aa, Homo Sapiens
YIDEQFERY

SEQ ID NO: 523 - protein, 9 aa, Homo Sapiens
YIDPIAMEY

SEQ ID NO: 524 - protein, 9 aa, Homo Sapiens
YIDSKFEDY

SEQ ID NO: 525 - protein, 9 aa, Homo Sapiens
YIEEFLQQY

SEQ ID NO: 526 - protein, 9 aa, Homo Sapiens
YLDDPDLKY

SEQ ID NO: 527 - protein, 9 aa, Homo Sapiens
YLDGTLAIY

SEQ ID NO: 528 - protein, 9 aa, Homo Sapiens
YLDQISRYY

SEQ ID NO: 529 - protein, 9 aa, Homo Sapiens
YLDTVPEVY

SEQ ID NO: 530 - protein, 9 aa, Homo Sapiens
YLDYDDTRY

SEQ ID NO: 531 - protein, 9 aa, Homo Sapiens
YLEETSIRY

SEQ ID NO: 532 - protein, 9 aa, Homo Sapiens
YLEQLHQLY

SEQ ID NO: 533 - protein, 9 aa, Homo Sapiens
YLEQLILKY

SEQ ID NO: 534 - protein, 9 aa, Homo Sapiens
YLERGKLFY

SEQ ID NO: 535 - protein, 9 aa, Homo Sapiens
YLETVAAYY

SEQ ID NO: 536 - protein, 9 aa, Homo Sapiens
YMDDYIFTY

SEQ ID NO: 537 - protein, 9 aa, Homo Sapiens
YMELYTHVY

SEQ ID NO: 538 - protein, 9 aa, Homo Sapiens
YQDLLQLQY

SEQ ID NO: 539 - protein, 9 aa, Homo Sapiens
YSAAWAEYY

SEQ ID NO: 540 - protein, 9 aa, Homo Sapiens
YSDFFTDCY

SEQ ID NO: 541 - protein, 9 aa, Homo Sapiens
YSDKYGLGY

SEQ ID NO: 542 - protein, 9 aa, Homo Sapiens
YSDLHAFYY

SEQ ID NO: 543 - protein, 9 aa, Homo Sapiens
YSQDYQQFY

SEQ ID NO: 544 - protein, 9 aa, Homo Sapiens
YSQELSLLY

SEQ ID NO: 545 - protein, 9 aa, Homo Sapiens
YSSPYPQEY

SEQ ID NO: 546 - protein, 9 aa, Homo Sapiens
YSTDENFRY

SEQ ID NO: 547 - protein, 9 aa, Homo Sapiens
YTAVVPLVY

SEQ ID NO: 548 - protein, 9 aa, Homo Sapiens
YTDATPLRV

SEQ ID NO: 549 - protein, 9 aa, Homo Sapiens
YTDCIPQLM

SEQ ID NO: 550 - protein, 9 aa, Homo Sapiens
YTDIPKIIY

SEQ ID NO: 551 - protein, 9 aa, Homo Sapiens
YTDIVGLLL

SEQ ID NO: 552 - protein, 9 aa, Homo Sapiens
YTDKIMTYL

SEQ ID NO: 553 - protein, 9 aa, Homo Sapiens
YTDKVVIGM

SEQ ID NO: 554 - protein, 9 aa, Homo Sapiens
YTDNLVRVW

SEQ ID NO: 555 - protein, 9 aa, Homo Sapiens
YTDTGLWGL

SEQ ID NO: 556 - protein, 9 aa, Homo Sapiens
YTEIDWKAY

SEQ ID NO: 557 - protein, 9 aa, Homo Sapiens
YTELEAIMY

SEQ ID NO: 558 - protein, 9 aa, Homo Sapiens
YTELLAQVY

SEQ ID NO: 559 - protein, 9 aa, Homo Sapiens
YTFPNGAKY

SEQ ID NO: 560 - protein, 9 aa, Homo Sapiens
YTGTPDWLY

SEQ ID NO: 561 - protein, 9 aa, Homo Sapiens
YTGVQILLY

SEQ ID NO: 562 - protein, 9 aa, Homo Sapiens
YTLLDVLYY

SEQ ID NO: 563 - protein, 9 aa, Homo Sapiens
YTMKEVLFY

SEQ ID NO: 564 - protein, 9 aa, Homo Sapiens
YTSDYFISY

SEQ ID NO: 565 - protein, 9 aa, Homo Sapiens
YVDDVFLRV

SEQ ID NO: 566 - protein, 9 aa, Homo Sapiens
YVDPQFLTY

SEQ ID NO: 567 - protein, 9 aa, Homo Sapiens
YVEKFALNY

SEQ ID NO: 568 - protein, 9 aa, Homo Sapiens
YVPEHWEYY

SEQ ID NO: 569 - protein, 10 aa, Homo Sapiens
AIDHNQMFQY

SEQ ID NO: 570 - protein, 10 aa, Homo Sapiens
AIDNSRNILY

SEQ ID NO: 571 - protein, 10 aa, Homo Sapiens
ALDDFTICYF

SEQ ID NO: 572 - protein, 10 aa, Homo Sapiens
ALDENGNLWY

SEQ ID NO: 573 - protein, 10 aa, Homo Sapiens
ALDGGFQMHY

SEQ ID NO: 574 - protein, 10 aa, Homo Sapiens
ALDSHILDYY

SEQ ID NO: 575 - protein, 10 aa, Homo Sapiens
ALDTINILLY

SEQ ID NO: 576 - protein, 10 aa, Homo Sapiens
ALDYLIGGLY

SEQ ID NO: 577 - protein, 10 aa, Homo Sapiens
ASAITGYLSY

SEQ ID NO: 578 - protein, 10 aa, Homo Sapiens
ASDAAPLQYL

SEQ ID NO: 579 - protein, 10 aa, Homo Sapiens
ASDALDKIRY

SEQ ID NO: 580 - protein, 10 aa, Homo Sapiens
ASEAEMRLFY

SEQ ID NO: 581 - protein, 10 aa, Homo Sapiens
ASEFGNHYLY

SEQ ID NO: 582 - protein, 10 aa, Homo Sapiens
ASEFPGAQHY

SEQ ID NO: 583 - protein, 10 aa, Homo Sapiens
ASEMILVLEY

SEQ ID NO: 584 - protein, 10 aa, Homo Sapiens
ATDLDVANFY

SEQ ID NO: 585 - protein, 10 aa, Homo Sapiens
ATDLIRISQY

SEQ ID NO: 586 - protein, 10 aa, Homo Sapiens
ATDLVVLDRY

SEQ ID NO: 587 - protein, 10 aa, Homo Sapiens
ATEDPWKTNY

SEQ ID NO: 588 - protein, 10 aa, Homo Sapiens
ATEQVSWGHY

SEQ ID NO: 589 - protein, 10 aa, Homo Sapiens
ATESVSLYYY

SEQ ID NO: 590 - protein, 10 aa, Homo Sapiens
AVDFAERHGY

SEQ ID NO: 591 - protein, 10 aa, Homo Sapiens
AVDPTSGQLY

SEQ ID NO: 592 - protein, 10 aa, Homo Sapiens
DADYPLRVLY

SEQ ID NO: 593 - protein, 10 aa, Homo Sapiens
DDTHYLLYIY

SEQ ID NO: 594 - protein, 10 aa, Homo Sapiens
DLDYGFLSNY

SEQ ID NO: 595 - protein, 10 aa, Homo Sapiens
DLEKEAPWEY

SEQ ID NO: 596 - protein, 10 aa, Homo Sapiens
DTDFYILDKY

SEQ ID NO: 597 - protein, 10 aa, Homo Sapiens
DTEKELQALY

SEQ ID NO: 598 - protein, 10 aa, Homo Sapiens
DTEPPPLLVY

SEQ ID NO: 599 - protein, 10 aa, Homo Sapiens
DVDHGNFFTY

SEQ ID NO: 600 - protein, 10 aa, Homo Sapiens
EAEPHPLWEY

SEQ ID NO: 601 - protein, 10 aa, Homo Sapiens
EAEWQTRWFY

SEQ ID NO: 602 - protein, 10 aa, Homo Sapiens
EIDHAEYYLY

SEQ ID NO: 603 - protein, 10 aa, Homo Sapiens
EIDIPHVWLY

SEQ ID NO: 604 - protein, 10 aa, Homo Sapiens
EIDNELFQFY

SEQ ID NO: 605 - protein, 10 aa, Homo Sapiens
ELDGFGLYLY

SEQ ID NO: 606 - protein, 10 aa, Homo Sapiens
ELDQRLFENY

SEQ ID NO: 607 - protein, 10 aa, Homo Sapiens
ESEFEMKVYY

SEQ ID NO: 608 - protein, 10 aa, Homo Sapiens
ESENVVCHFY

SEQ ID NO: 609 - protein, 10 aa, Homo Sapiens
ESQLPEKVEY

SEQ ID NO: 610 - protein, 10 aa, Homo Sapiens
ETDEKDFYLY

SEQ ID NO: 611 - protein, 10 aa, Homo Sapiens
ETEEGIYWRY

SEQ ID NO: 612 - protein, 10 aa, Homo Sapiens
ETEREYFNRY

SEQ ID NO: 613 - protein, 10 aa, Homo Sapiens
FGEKNGSWLY

SEQ ID NO: 614 - protein, 10 aa, Homo Sapiens
FIDIFTSNTY

SEQ ID NO: 615 - protein, 10 aa, Homo Sapiens
FLDDGHTFNY

SEQ ID NO: 616 - protein, 10 aa, Homo Sapiens
FLDKVVGLQK

SEQ ID NO: 617 - protein, 10 aa, Homo Sapiens
FLDNPDAFYY

SEQ ID NO: 618 - protein, 10 aa, Homo Sapiens
FLDPAQRDLY

SEQ ID NO: 619 - protein, 10 aa, Homo Sapiens
FLDTNETPYF

SEQ ID NO: 620 - protein, 10 aa, Homo Sapiens
FLDTQLESTY

SEQ ID NO: 621 - protein, 10 aa, Homo Sapiens
FLEAIENNKY

SEQ ID NO: 622 - protein, 10 aa, Homo Sapiens
FLSFPTTKTY

SEQ ID NO: 623 - protein, 10 aa, Homo Sapiens
FMDPASALYR

SEQ ID NO: 624 - protein, 10 aa, Homo Sapiens
FMDPEMETRY

SEQ ID NO: 625 - protein, 10 aa, Homo Sapiens
FMDSVIFTLY

SEQ ID NO: 626 - protein, 10 aa, Homo Sapiens
FMEKETPLRY

SEQ ID NO: 627 - protein, 10 aa, Homo Sapiens
FSDNDKLYLY

SEQ ID NO: 628 - protein, 10 aa, Homo Sapiens
FSDPGQPMSF

SEQ ID NO: 629 - protein, 10 aa, Homo Sapiens
FSDVISFILY

SEQ ID NO: 630 - protein, 10 aa, Homo Sapiens
FSDYPPLGRF

SEQ ID NO: 631 - protein, 10 aa, Homo Sapiens
FSEDGEYFAY

SEQ ID NO: 632 - protein, 10 aa, Homo Sapiens
FSEFTGVWKY

SEQ ID NO: 633 - protein, 10 aa, Homo Sapiens
FTDESYLELY

SEQ ID NO: 634 - protein, 10 aa, Homo Sapiens
FTDGDAALEF

SEQ ID NO: 635 - protein, 10 aa, Homo Sapiens
FTDNFSFNTY

SEQ ID NO: 636 - protein, 10 aa, Homo Sapiens
FTDVNSILRY

SEQ ID NO: 637 - protein, 10 aa, Homo Sapiens
FTDVPSIQIY

SEQ ID NO: 638 - protein, 10 aa, Homo Sapiens
FTEHEIQEWY

SEQ ID NO: 639 - protein, 10 aa, Homo Sapiens
FTEIKVGVAY

SEQ ID NO: 640 - protein, 10 aa, Homo Sapiens
FVDPYPVNKY

SEQ ID NO: 641 - protein, 10 aa, Homo Sapiens
GIDSRYFDLY

SEQ ID NO: 642 - protein, 10 aa, Homo Sapiens
GMDEVYNLFY

SEQ ID NO: 643 - protein, 10 aa, Homo Sapiens
GSDEPAFMYY

SEQ ID NO: 644 - protein, 10 aa, Homo Sapiens
GSDPLGLIAY

SEQ ID NO: 645 - protein, 10 aa, Homo Sapiens
GTEIAASLLY

SEQ ID NO: 646 - protein, 10 aa, Homo Sapiens
GTELGNELFY

SEQ ID NO: 647 - protein, 10 aa, Homo Sapiens
GVDLTGPQLY

SEQ ID NO: 648 - protein, 10 aa, Homo Sapiens
GVDVTGPHLY

SEQ ID NO: 649 - protein, 10 aa, Homo Sapiens
HIDCGSLLGY

SEQ ID NO: 650 - protein, 10 aa, Homo Sapiens
HLDEAQRLLY

SEQ ID NO: 651 - protein, 10 aa, Homo Sapiens
HLDIAQQNLY

SEQ ID NO: 652 - protein, 10 aa, Homo Sapiens
HLDPSQRALY

SEQ ID NO: 653 - protein, 10 aa, Homo Sapiens
HTDAVWGLAY

SEQ ID NO: 654 - protein, 10 aa, Homo Sapiens
HTDDPLTWDY

SEQ ID NO: 655 - protein, 10 aa, Homo Sapiens
HTDHHMFFDY

SEQ ID NO: 656 - protein, 10 aa, Homo Sapiens
HTELDTAFMY

SEQ ID NO: 657 - protein, 10 aa, Homo Sapiens
HVEEISELFY

SEQ ID NO: 658 - protein, 10 aa, Homo Sapiens
IADSNYNWFY

SEQ ID NO: 659 - protein, 10 aa, Homo Sapiens
IIDVVRSGYY

SEQ ID NO: 660 - protein, 10 aa, Homo Sapiens
ILDIPNQLYY

SEQ ID NO: 661 - protein, 10 aa, Homo Sapiens
ILEVDLKNGY

SEQ ID NO: 662 - protein, 10 aa, Homo Sapiens
ISDGKEYLFY

SEQ ID NO: 663 - protein, 10 aa, Homo Sapiens
ISDPFYGPWY

SEQ ID NO: 664 - protein, 10 aa, Homo Sapiens
ISEAGKDLLY

SEQ ID NO: 665 - protein, 10 aa, Homo Sapiens
ISEYAADIFY

SEQ ID NO: 666 - protein, 10 aa, Homo Sapiens
ISSEELPLYY

SEQ ID NO: 667 - protein, 10 aa, Homo Sapiens
ITDIQIPLDY

SEQ ID NO: 668 - protein, 10 aa, Homo Sapiens
ITDPDPDIRY

SEQ ID NO: 669 - protein, 10 aa, Homo Sapiens
ITDSAGHILY

SEQ ID NO: 670 - protein, 10 aa, Homo Sapiens
ITDVSWRLEY

SEQ ID NO: 671 - protein, 10 aa, Homo Sapiens
IVDAEWNILY

SEQ ID NO: 672 - protein, 10 aa, Homo Sapiens
IVDDFFIGRY

SEQ ID NO: 673 - protein, 10 aa, Homo Sapiens
KLDRSVFTAY

SEQ ID NO: 674 - protein, 10 aa, Homo Sapiens
KSDSGKPYYY

SEQ ID NO: 675 - protein, 10 aa, Homo Sapiens
KTDDLTMVLY

SEQ ID NO: 676 - protein, 10 aa, Homo Sapiens
KTELQFSDYY

SEQ ID NO: 677 - protein, 10 aa, Homo Sapiens
LADVNNIGKY

SEQ ID NO: 678 - protein, 10 aa, Homo Sapiens
LIDADPYLKY

SEQ ID NO: 679 - protein, 10 aa, Homo Sapiens
LIDQDARDLY

SEQ ID NO: 680 - protein, 10 aa, Homo Sapiens
LIDSRPFVEY

SEQ ID NO: 681 - protein, 10 aa, Homo Sapiens
LIVEPGPPGP

SEQ ID NO: 682 - protein, 10 aa, Homo Sapiens
LLDDAQRLLY

SEQ ID NO: 683 - protein, 10 aa, Homo Sapiens
LLDEAQRLLY

SEQ ID NO: 684 - protein, 10 aa, Homo Sapiens
LLDELLQKGY

SEQ ID NO: 685 - protein, 10 aa, Homo Sapiens
LLDFQEFTLY

SEQ ID NO: 686 - protein, 10 aa, Homo Sapiens
LLDKPVFSFY

SEQ ID NO: 687 - protein, 10 aa, Homo Sapiens
LLDLDEELRY

SEQ ID NO: 688 - protein, 10 aa, Homo Sapiens
LLDPAQKILY

SEQ ID NO: 689 - protein, 10 aa, Homo Sapiens
LLDPAQRTLY

SEQ ID NO: 690 - protein, 10 aa, Homo Sapiens
LLDPASFEYL

SEQ ID NO: 691 - protein, 10 aa, Homo Sapiens
LLDPGQRNIY

SEQ ID NO: 692 - protein, 10 aa, Homo Sapiens
LLDPRSYHTY

SEQ ID NO: 693 - protein, 10 aa, Homo Sapiens
LLDPSQKNLY

SEQ ID NO: 694 - protein, 10 aa, Homo Sapiens
LLDQGQLNKY

SEQ ID NO: 695 - protein, 10 aa, Homo Sapiens
LLDSDEPLVY

SEQ ID NO: 696 - protein, 10 aa, Homo Sapiens
LLDSSQKNLY

SEQ ID NO: 697 - protein, 10 aa, Homo Sapiens
LLDTAQRALY

SEQ ID NO: 698 - protein, 10 aa, Homo Sapiens
LLDTNRYLYF

SEQ ID NO: 699 - protein, 10 aa, Homo Sapiens
LLDTPAQLWY

SEQ ID NO: 700 - protein, 10 aa, Homo Sapiens
LLDTPVKTQY

SEQ ID NO: 701 - protein, 10 aa, Homo Sapiens
LLDTTEKYLY

SEQ ID NO: 702 - protein, 10 aa, Homo Sapiens
LLEDKHFQSY

SEQ ID NO: 703 - protein, 10 aa, Homo Sapiens
LLEIAQTHYY

SEQ ID NO: 704 - protein, 10 aa, Homo Sapiens
LLEVDATSKY

SEQ ID NO: 705 - protein, 10 aa, Homo Sapiens
LMEEVQTLYY

SEQ ID NO: 706 - protein, 10 aa, Homo Sapiens
LSDHLINQGY

SEQ ID NO: 707 - protein, 10 aa, Homo Sapiens
LSDIASALRY

SEQ ID NO: 708 - protein, 10 aa, Homo Sapiens
LSDIGSGIRY

SEQ ID NO: 709 - protein, 10 aa, Homo Sapiens
LSDISVVSNY

SEQ ID NO: 710 - protein, 10 aa, Homo Sapiens
LSDPCPGLYL

SEQ ID NO: 711 - protein, 10 aa, Homo Sapiens
LSDVDAFIAY

SEQ ID NO: 712 - protein, 10 aa, Homo Sapiens
LSDVFPGVQY

SEQ ID NO: 713 - protein, 10 aa, Homo Sapiens
LSEEGLLRLY

SEQ ID NO: 714 - protein, 10 aa, Homo Sapiens
LSEINKPNFY

SEQ ID NO: 715 - protein, 10 aa, Homo Sapiens
LSLARGLDYY

SEQ ID NO: 716 - protein, 10 aa, Homo Sapiens
LSSLPTQMDY

SEQ ID NO: 717 - protein, 10 aa, Homo Sapiens
LTDDGNKWLY

SEQ ID NO: 718 - protein, 10 aa, Homo Sapiens
LTDDGRVFLW

SEQ ID NO: 719 - protein, 10 aa, Homo Sapiens
LTDEQIRFLY

SEQ ID NO: 720 - protein, 10 aa, Homo Sapiens
LTDGVSQIHY

SEQ ID NO: 721 - protein, 10 aa, Homo Sapiens
LTDIFQHDTY

SEQ ID NO: 722 - protein, 10 aa, Homo Sapiens
LTDILGIEDY

SEQ ID NO: 723 - protein, 10 aa, Homo Sapiens
LTDITKGVQY

SEQ ID NO: 724 - protein, 10 aa, Homo Sapiens
LTDLEIKFQY

SEQ ID NO: 725 - protein, 10 aa, Homo Sapiens
LTDLVDDNYF

SEQ ID NO: 726 - protein, 10 aa, Homo Sapiens
LTDPIQGTEY

SEQ ID NO: 727 - protein, 10 aa, Homo Sapiens
LTDPMFRGIY

SEQ ID NO: 728 - protein, 10 aa, Homo Sapiens
LTDTFTAYYR

SEQ ID NO: 729 - protein, 10 aa, Homo Sapiens
LTDYFLKDEY

SEQ ID NO: 730 - protein, 10 aa, Homo Sapiens
LTEHSSMPVE

SEQ ID NO: 731 - protein, 10 aa, Homo Sapiens
LTEITKGWLY

SEQ ID NO: 732 - protein, 10 aa, Homo Sapiens
LTELPPLDDY

SEQ ID NO: 733 - protein, 10 aa, Homo Sapiens
LTETIYKNYY

SEQ ID NO: 734 - protein, 10 aa, Homo Sapiens
LTEVDNYHFY

SEQ ID NO: 735 - protein, 10 aa, Homo Sapiens
LTEYFLNDKY

SEQ ID NO: 736 - protein, 10 aa, Homo Sapiens
LTLGRVEDFY

SEQ ID NO: 737 - protein, 10 aa, Homo Sapiens
LTWDGFPLHY

SEQ ID NO: 738 - protein, 10 aa, Homo Sapiens
LVDAFVEHRY

SEQ ID NO: 739 - protein, 10 aa, Homo Sapiens
LVDDGWILAY

SEQ ID NO: 740 - protein, 10 aa, Homo Sapiens
LVDHGDISFY

SEQ ID NO: 741 - protein, 10 aa, Homo Sapiens
LVDPWTPHLY

SEQ ID NO: 742 - protein, 10 aa, Homo Sapiens
LVDQNIFSFY

SEQ ID NO: 743 - protein, 10 aa, Homo Sapiens
LVDSKGFDEY

SEQ ID NO: 744 - protein, 10 aa, Homo Sapiens
LVEEVQLNFY

SEQ ID NO: 745 - protein, 10 aa, Homo Sapiens
LVEVEGDNRY

SEQ ID NO: 746 - protein, 10 aa, Homo Sapiens
MAELGPLNKY

SEQ ID NO: 747 - protein, 10 aa, Homo Sapiens
MLEAGILDTY

SEQ ID NO: 748 - protein, 10 aa, Homo Sapiens
MSDLLSPILY

SEQ ID NO: 749 - protein, 10 aa, Homo Sapiens
MSDSYLPSYY

SEQ ID NO: 750 - protein, 10 aa, Homo Sapiens
MSEIEAKVRY

SEQ ID NO: 751 - protein, 10 aa, Homo Sapiens
MTDLYPPELF

SEQ ID NO: 752 - protein, 10 aa, Homo Sapiens
MTDPNVALTF

SEQ ID NO: 753 - protein, 10 aa, Homo Sapiens
MTELYDYPKY

SEQ ID NO: 754 - protein, 10 aa, Homo Sapiens
NADVALVNFY

SEQ ID NO: 755 - protein, 10 aa, Homo Sapiens
NIDIPEGNWY

SEQ ID NO: 756 - protein, 10 aa, Homo Sapiens
NIDLVSKLLY

SEQ ID NO: 757 - protein, 10 aa, Homo Sapiens
NIEAAKDLLY

SEQ ID NO: 758 - protein, 10 aa, Homo Sapiens
NLDQATRVAY

SEQ ID NO: 759 - protein, 10 aa, Homo Sapiens
NMDTFSNLLY

SEQ ID NO: 760 - protein, 10 aa, Homo Sapiens
NSESGYILFY

SEQ ID NO: 761 - protein, 10 aa, Homo Sapiens
NTDFWKTLRY

SEQ ID NO: 762 - protein, 10 aa, Homo Sapiens
NTDGFLLPKY

SEQ ID NO: 763 - protein, 10 aa, Homo Sapiens
NTDHLTTVLY

SEQ ID NO: 764 - protein, 10 aa, Homo Sapiens
NTDHQTQLLY

SEQ ID NO: 765 - protein, 10 aa, Homo Sapiens
NTDLWIVMEY

SEQ ID NO: 766 - protein, 10 aa, Homo Sapiens
NTDPSIVMTY

SEQ ID NO: 767 - protein, 10 aa, Homo Sapiens
NTDPWAGYRY

SEQ ID NO: 768 - protein, 10 aa, Homo Sapiens
NTDSLDWALY

SEQ ID NO: 769 - protein, 10 aa, Homo Sapiens
NTEVLKNMGY

SEQ ID NO: 770 - protein, 10 aa, Homo Sapiens
NVDGTHWLEY

SEQ ID NO: 771 - protein, 10 aa, Homo Sapiens
NVDTESALLY

SEQ ID NO: 772 - protein, 10 aa, Homo Sapiens
PLDHLKPLEY

SEQ ID NO: 773 - protein, 10 aa, Homo Sapiens
PSDIFMVMEY

SEQ ID NO: 774 - protein, 10 aa, Homo Sapiens
PSDLTVGQFY

SEQ ID NO: 775 - protein, 10 aa, Homo Sapiens
PTEISQSLLY

SEQ ID NO: 776 - protein, 10 aa, Homo Sapiens
QAEILLSNHY

SEQ ID NO: 777 - protein, 10 aa, Homo Sapiens
QLDLAQRTLY

SEQ ID NO: 778 - protein, 10 aa, Homo Sapiens
QLDTRVSEFY

SEQ ID NO: 779 - protein, 10 aa, Homo Sapiens
QSDPWQQELY

SEQ ID NO: 780 - protein, 10 aa, Homo Sapiens
QSELQSQVRY

SEQ ID NO: 781 - protein, 10 aa, Homo Sapiens
QTEIRLRLHY

SEQ ID NO: 782 - protein, 10 aa, Homo Sapiens
QTENLGVVYY

SEQ ID NO: 783 - protein, 10 aa, Homo Sapiens
QTESQQIRYF

SEQ ID NO: 784 - protein, 10 aa, Homo Sapiens
QTVAWFPLYY

SEQ ID NO: 785 - protein, 10 aa, Homo Sapiens
QVDPLSALKY

SEQ ID NO: 786 - protein, 10 aa, Homo Sapiens
QVDPNYAYAY

SEQ ID NO: 787 - protein, 10 aa, Homo Sapiens
RLDTPLYFSY

SEQ ID NO: 788 - protein, 10 aa, Homo Sapiens
RLDVLVNNAY

SEQ ID NO: 789 - protein, 10 aa, Homo Sapiens
RLEIEPEWAY

SEQ ID NO: 790 - protein, 10 aa, Homo Sapiens
RTDAILLGHY

SEQ ID NO: 791 - protein, 10 aa, Homo Sapiens
RTELPQFVSY

SEQ ID NO: 792 - protein, 10 aa, Homo Sapiens
RVDPAKGLFY

SEQ ID NO: 793 - protein, 10 aa, Homo Sapiens
RVDPIGPLSY

SEQ ID NO: 794 - protein, 10 aa, Homo Sapiens
RVDPNGFFLY

SEQ ID NO: 795 - protein, 10 aa, Homo Sapiens
RVDVFTNLGY

SEQ ID NO: 796 - protein, 10 aa, Homo Sapiens
SADVPLVVEY

SEQ ID NO: 797 - protein, 10 aa, Homo Sapiens
SIDVAGNLDY

SEQ ID NO: 798 - protein, 10 aa, Homo Sapiens
SLDSPSYVLY

SEQ ID NO: 799 - protein, 10 aa, Homo Sapiens
SLDVGGPLRY

SEQ ID NO: 800 - protein, 10 aa, Homo Sapiens
SSDEVNFLVY

SEQ ID NO: 801 - protein, 10 aa, Homo Sapiens
SSDFLEFVNY

SEQ ID NO: 802 - protein, 10 aa, Homo Sapiens
SSDSVGGFRY

SEQ ID NO: 803 - protein, 10 aa, Homo Sapiens
SSDYSIFDNY

SEQ ID NO: 804 - protein, 10 aa, Homo Sapiens
SSEDLMKELY

SEQ ID NO: 805 - protein, 10 aa, Homo Sapiens
SSEELLSLKY

SEQ ID NO: 806 - protein, 10 aa, Homo Sapiens
SSESLNHLLY

SEQ ID NO: 807 - protein, 10 aa, Homo Sapiens
STDDPMQFHY

SEQ ID NO: 808 - protein, 10 aa, Homo Sapiens
STDKAEYTFY

SEQ ID NO: 809 - protein, 10 aa, Homo Sapiens
STDKFKTDFY

SEQ ID NO: 810 - protein, 10 aa, Homo Sapiens
STDLQDYTYY

SEQ ID NO: 811 - protein, 10 aa, Homo Sapiens
STDPREALQY

SEQ ID NO: 812 - protein, 10 aa, Homo Sapiens
STDPSVLGKY

SEQ ID NO: 813 - protein, 10 aa, Homo Sapiens
STDTSLKIFY

SEQ ID NO: 814 - protein, 10 aa, Homo Sapiens
STEEARFLTY

SEQ ID NO: 815 - protein, 10 aa, Homo Sapiens
STESMDFLKY

SEQ ID NO: 816 - protein, 10 aa, Homo Sapiens
SVDPHGFISY

SEQ ID NO: 817 - protein, 10 aa, Homo Sapiens
SVDSNLLSDY

SEQ ID NO: 818 - protein, 10 aa, Homo Sapiens
TADHNLLLYE

SEQ ID NO: 819 - protein, 10 aa, Homo Sapiens
TADTLMGLRY

SEQ ID NO: 820 - protein, 10 aa, Homo Sapiens
TIDDFRNQVY

SEQ ID NO: 821 - protein, 10 aa, Homo Sapiens
TLAVAAGLYY

SEQ ID NO: 822 - protein, 10 aa, Homo Sapiens
TLDAGKFQIY

SEQ ID NO: 823 - protein, 10 aa, Homo Sapiens
TLDAVKFSQY

SEQ ID NO: 824 - protein, 10 aa, Homo Sapiens
TLDLPHFDEY

SEQ ID NO: 825 - protein, 10 aa, Homo Sapiens
TLDPNFLDAY

SEQ ID NO: 826 - protein, 10 aa, Homo Sapiens
TLDPQTGLFY

SEQ ID NO: 827 - protein, 10 aa, Homo Sapiens
TMDIPGCLLY

SEQ ID NO: 828 - protein, 10 aa, Homo Sapiens
TSDDPWLTAY

SEQ ID NO: 829 - protein, 10 aa, Homo Sapiens
TSDELEDLRY

SEQ ID NO: 830 - protein, 10 aa, Homo Sapiens
TSDQATLLLY

SEQ ID NO: 831 - protein, 10 aa, Homo Sapiens
TSDTQWGWFY

SEQ ID NO: 832 - protein, 10 aa, Homo Sapiens
TSDVPGKLIY

SEQ ID NO: 833 - protein, 10 aa, Homo Sapiens
TSEPKPFLYY

SEQ ID NO: 834 - protein, 10 aa, Homo Sapiens
TTDCLQILAY

SEQ ID NO: 835 - protein, 10 aa, Homo Sapiens
TTDCSFIFLY

SEQ ID NO: 836 - protein, 10 aa, Homo Sapiens
TTDDWKDFLY

SEQ ID NO: 837 - protein, 10 aa, Homo Sapiens
TTDLSFLDKY

SEQ ID NO: 838 - protein, 10 aa, Homo Sapiens
TTEESLRNYY

SEQ ID NO: 839 - protein, 10 aa, Homo Sapiens
TTEETLTMLY

SEQ ID NO: 840 - protein, 10 aa, Homo Sapiens
TTEILRSMLY

SEQ ID NO: 841 - protein, 10 aa, Homo Sapiens
TTSHLMGMFY

SEQ ID NO: 842 - protein, 10 aa, Homo Sapiens
TVDNVQPLLY

SEQ ID NO: 843 - protein, 10 aa, Homo Sapiens
TVDPASLWEY

SEQ ID NO: 844 - protein, 10 aa, Homo Sapiens
TVEDPVTVEY

SEQ ID NO: 845 - protein, 10 aa, Homo Sapiens
VIDSAELQAY

SEQ ID NO: 846 - protein, 10 aa, Homo Sapiens
VIDVNKVVEY

SEQ ID NO: 847 - protein, 10 aa, Homo Sapiens
VLDPYLLKYF

SEQ ID NO: 848 - protein, 10 aa, Homo Sapiens
VLEHVPLLLY

SEQ ID NO: 849 - protein, 10 aa, Homo Sapiens
VSDGIIAPGY

SEQ ID NO: 850 - protein, 10 aa, Homo Sapiens
VSDSKQFTYY

SEQ ID NO: 851 - protein, 10 aa, Homo Sapiens
VSDYYSQLIY

SEQ ID NO: 852 - protein, 10 aa, Homo Sapiens
VSERDVYLTY

SEQ ID NO: 853 - protein, 10 aa, Homo Sapiens
VTDDLVCLVY

SEQ ID NO: 854 - protein, 10 aa, Homo Sapiens
VTDHLGVVYY

SEQ ID NO: 855 - protein, 10 aa, Homo Sapiens
VTDQNKIVTY

SEQ ID NO: 856 - protein, 10 aa, Homo Sapiens
VTDTGALYLY

SEQ ID NO: 857 - protein, 10 aa, Homo Sapiens
VTEEPQRLFY

SEQ ID NO: 858 - protein, 10 aa, Homo Sapiens
VTENLRLSLY

SEQ ID NO: 859 - protein, 10 aa, Homo Sapiens
VVDVPEFLVY

SEQ ID NO: 860 - protein, 10 aa, Homo Sapiens
VVEQLKDWLY

SEQ ID NO: 861 - protein, 10 aa, Homo Sapiens
WLDRLGESKY

SEQ ID NO: 862 - protein, 10 aa, Homo Sapiens
WLEEGIHWQY

SEQ ID NO: 863 - protein, 10 aa, Homo Sapiens
WSDYSDNLKY

SEQ ID NO: 864 - protein, 10 aa, Homo Sapiens
WSEPFYQETY

SEQ ID NO: 865 - protein, 10 aa, Homo Sapiens
WTDILSHGRY

SEQ ID NO: 866 - protein, 10 aa, Homo Sapiens
WVDDQRPENY

SEQ ID NO: 867 - protein, 10 aa, Homo Sapiens
WVDVAHLVLY

SEQ ID NO: 868 - protein, 10 aa, Homo Sapiens
YADGESFLGY

SEQ ID NO: 869 - protein, 10 aa, Homo Sapiens
YADNQVMHFY

SEQ ID NO: 870 - protein, 10 aa, Homo Sapiens
YADPYRQLQY

SEQ ID NO: 871 - protein, 10 aa, Homo Sapiens
YADTFGDINY

SEQ ID NO: 872 - protein, 10 aa, Homo Sapiens
YIDPIAMEYY

SEQ ID NO: 873 - protein, 10 aa, Homo Sapiens
YLAQDFFDRY

SEQ ID NO: 874 - protein, 10 aa, Homo Sapiens
YLDKEDTFFY

SEQ ID NO: 875 - protein, 10 aa, Homo Sapiens
YLDLLLGNCY

SEQ ID NO: 876 - protein, 10 aa, Homo Sapiens
YLDNVIGHSY

SEQ ID NO: 877 - protein, 10 aa, Homo Sapiens
YLDPVQRDLY

SEQ ID NO: 878 - protein, 10 aa, Homo Sapiens
YLDSIPPGQY

SEQ ID NO: 879 - protein, 10 aa, Homo Sapiens
YLENLEKLMY

SEQ ID NO: 880 - protein, 10 aa, Homo Sapiens
YLEREDFFFY

SEQ ID NO: 881 - protein, 10 aa, Homo Sapiens
YSDAFLNDSY

SEQ ID NO: 882 - protein, 10 aa, Homo Sapiens
YSDEFGNLDF

SEQ ID NO: 883 - protein, 10 aa, Homo Sapiens
YSDFPFHEDY

SEQ ID NO: 884 - protein, 10 aa, Homo Sapiens
YSDKYFDEHY

SEQ ID NO: 885 - protein, 10 aa, Homo Sapiens
YSDSGLFGIY

SEQ ID NO: 886 - protein, 10 aa, Homo Sapiens
YSDSLVQKGY

SEQ ID NO: 887 - protein, 10 aa, Homo Sapiens
YSEDHIIGAY

SEQ ID NO: 888 - protein, 10 aa, Homo Sapiens
YSEIKDFLSY

SEQ ID NO: 889 - protein, 10 aa, Homo Sapiens
YSESSQLLYL

SEQ ID NO: 890 - protein, 10 aa, Homo Sapiens
YSETLLSYFY

SEQ ID NO: 891 - protein, 10 aa, Homo Sapiens
YSEVYPGQQY

SEQ ID NO: 892 - protein, 10 aa, Homo Sapiens
YSFLDKMSFY

SEQ ID NO: 893 - protein, 10 aa, Homo Sapiens
YTDFDGTRVY

SEQ ID NO: 894 - protein, 10 aa, Homo Sapiens
YTDIINIFLY

SEQ ID NO: 895 - protein, 10 aa, Homo Sapiens
YTDLLRLFEY

SEQ ID NO: 896 - protein, 10 aa, Homo Sapiens
YTDTGLWGLY

SEQ ID NO: 897 - protein, 10 aa, Homo Sapiens
YTEDSPGLKV

SEQ ID NO: 898 - protein, 10 aa, Homo Sapiens
YTEEFDFKEY

SEQ ID NO: 899 - protein, 10 aa, Homo Sapiens
YTEPNYWIRY

SEQ ID NO: 900 - protein, 10 aa, Homo Sapiens
YTESWRWSAY

SEQ ID NO: 901 - protein, 10 aa, Homo Sapiens
YTFGTKEPLY

SEQ ID NO: 902 - protein, 10 aa, Homo Sapiens
YTIYRPDEGY

SEQ ID NO: 903 - protein, 10 aa, Homo Sapiens
YTLYRPEEGY

SEQ ID NO: 904 - protein, 10 aa, Homo Sapiens
YTSNLAYSFY

SEQ ID NO: 905 - protein, 10 aa, Homo Sapiens
YTSYPMHDFY

SEQ ID NO: 906 - protein, 10 aa, Homo Sapiens
YVDDASWMRY

SEQ ID NO: 907 - protein, 10 aa, Homo Sapiens
YVDPQFLTYM

SEQ ID NO: 908 - protein, 10 aa, Homo Sapiens
YVDQAELEKY

SEQ ID NO: 909 - protein, 10 aa, Homo Sapiens
YVDQVLQLVY

SEQ ID NO: 910 - protein, 11 aa, Homo Sapiens
AIMELDDTLKY

SEQ ID NO: 911 - protein, 11 aa, Homo Sapiens
ALDESFLGTLY

SEQ ID NO: 912 - protein, 11 aa, Homo Sapiens
ASDKETYELRY

SEQ ID NO: 913 - protein, 11 aa, Homo Sapiens
ATDIFSYLVEY

SEQ ID NO: 914 - protein, 11 aa, Homo Sapiens
ATDIQVLALTY

SEQ ID NO: 915 - protein, 11 aa, Homo Sapiens
ATEESFFILKY

SEQ ID NO: 916 - protein, 11 aa, Homo Sapiens
ATELDAWLAKY

SEQ ID NO: 917 - protein, 11 aa, Homo Sapiens
ATESILHFAGY

SEQ ID NO: 918 - protein, 11 aa, Homo Sapiens
ATESPLDFTKY

SEQ ID NO: 919 - protein, 11 aa, Homo Sapiens
ATEVDSRWQEY

SEQ ID NO: 920 - protein, 11 aa, Homo Sapiens
ATQLAADLLKY

SEQ ID NO: 921 - protein, 11 aa, Homo Sapiens
ATVFRTVLDYY

SEQ ID NO: 922 - protein, 11 aa, Homo Sapiens
AVDVNNMLHLY

SEQ ID NO: 923 - protein, 11 aa, Homo Sapiens
CLEPQITPSYY

SEQ ID NO: 924 - protein, 11 aa, Homo Sapiens
CSDKMSLLLVY

SEQ ID NO: 925 - protein, 11 aa, Homo Sapiens
DSDHLTIYNAY

SEQ ID NO: 926 - protein, 11 aa, Homo Sapiens
DSDLLDSQVQY

SEQ ID NO: 927 - protein, 11 aa, Homo Sapiens
DTDIVDEAIYY

SEQ ID NO: 928 - protein, 11 aa, Homo Sapiens
DTELKQVAYIY

SEQ ID NO: 929 - protein, 11 aa, Homo Sapiens
EADGAAWVLLY

SEQ ID NO: 930 - protein, 11 aa, Homo Sapiens
EIDGRSISLYY

SEQ ID NO: 931 - protein, 11 aa, Homo Sapiens
ELDIGDATQVY

SEQ ID NO: 932 - protein, 11 aa, Homo Sapiens
ELDISDSKIRY

SEQ ID NO: 933 - protein, 11 aa, Homo Sapiens
ELDPAVMDQFY

SEQ ID NO: 934 - protein, 11 aa, Homo Sapiens
ELDPLTGEWHY

SEQ ID NO: 935 - protein, 11 aa, Homo Sapiens
ELDPMAMTQKY

SEQ ID NO: 936 - protein, 11 aa, Homo Sapiens
ESAFRKLDELY

SEQ ID NO: 937 - protein, 11 aa, Homo Sapiens
ETDEKDFYLYY

SEQ ID NO: 938 - protein, 11 aa, Homo Sapiens
ETDLLDIRSEY

SEQ ID NO: 939 - protein, 11 aa, Homo Sapiens
ETEEDKFLLLY

SEQ ID NO: 940 - protein, 11 aa, Homo Sapiens
ETELISTTANY

SEQ ID NO: 941 - protein, 11 aa, Homo Sapiens
ETERFRELLLY

SEQ ID NO: 942 - protein, 11 aa, Homo Sapiens
ETEVYEGALLY

SEQ ID NO: 943 - protein, 11 aa, Homo Sapiens
ETFLTSPEELY

SEQ ID NO: 944 - protein, 11 aa, Homo Sapiens
FADQLIAAGHY

SEQ ID NO: 945 - protein, 11 aa, Homo Sapiens
FIDHDITSQLY

SEQ ID NO: 946 - protein, 11 aa, Homo Sapiens
FIDSQRVWAEY

SEQ ID NO: 947 - protein, 11 aa, Homo Sapiens
FIDVDDERWHY

SEQ ID NO: 948 - protein, 11 aa, Homo Sapiens
FIEESRQLLSY

SEQ ID NO: 949 - protein, 11 aa, Homo Sapiens
FLDASGAKLDY

SEQ ID NO: 950 - protein, 11 aa, Homo Sapiens
FLDPASAGIGY

SEQ ID NO: 951 - protein, 11 aa, Homo Sapiens
FLDPITGTFRY

SEQ ID NO: 952 - protein, 11 aa, Homo Sapiens
FLEDAIAVTRY

SEQ ID NO: 953 - protein, 11 aa, Homo Sapiens
FLEIVSEKSRY

SEQ ID NO: 954 - protein, 11 aa, Homo Sapiens
FMDPGPEGKLY

SEQ ID NO: 955 - protein, 11 aa, Homo Sapiens
FSDIHAGELYF

SEQ ID NO: 956 - protein, 11 aa, Homo Sapiens
FSDLNLEAHMY

SEQ ID NO: 957 - protein, 11 aa, Homo Sapiens
FSDPFTGGGRY

SEQ ID NO: 958 - protein, 11 aa, Homo Sapiens
FSEDRPFAVGY

SEQ ID NO: 959 - protein, 11 aa, Homo Sapiens
FSEEKIQYLVY

SEQ ID NO: 960 - protein, 11 aa, Homo Sapiens
FSEPDFVAKFY

SEQ ID NO: 961 - protein, 11 aa, Homo Sapiens
FSEPFHLIVSY

SEQ ID NO: 962 - protein, 11 aa, Homo Sapiens
FSEPSFITESY

SEQ ID NO: 963 - protein, 11 aa, Homo Sapiens
FSQPENQNLLY

SEQ ID NO: 964 - protein, 11 aa, Homo Sapiens
FTDEEGYGRYL

SEQ ID NO: 965 - protein, 11 aa, Homo Sapiens
FTEIGIHLNAY

SEQ ID NO: 966 - protein, 11 aa, Homo Sapiens
FTENDKEYQEY

SEQ ID NO: 967 - protein, 11 aa, Homo Sapiens
FVAEPDNKNVY

SEQ ID NO: 968 - protein, 11 aa, Homo Sapiens
FVEENLQHWSY

SEQ ID NO: 969 - protein, 11 aa, Homo Sapiens
FVESSTSVLRY

SEQ ID NO: 970 - protein, 11 aa, Homo Sapiens
GSDITSITERY

SEQ ID NO: 971 - protein, 11 aa, Homo Sapiens
GTDRTGFTFKY

SEQ ID NO: 972 - protein, 11 aa, Homo Sapiens
HIDFGGTSVWY

SEQ ID NO: 973 - protein, 11 aa, Homo Sapiens
HLDDQMTLLQY

SEQ ID NO: 974 - protein, 11 aa, Homo Sapiens
HLDFNLDKTLY

SEQ ID NO: 975 - protein, 11 aa, Homo Sapiens
HSDELTSLLGY

SEQ ID NO: 976 - protein, 11 aa, Homo Sapiens
HSEVLIDLTEY

SEQ ID NO: 977 - protein, 11 aa, Homo Sapiens
HTDIQEYIGCY

SEQ ID NO: 978 - protein, 11 aa, Homo Sapiens
IIDLAGDTVRY

SEQ ID NO: 979 - protein, 11 aa, Homo Sapiens
ILDNADVLSQY

SEQ ID NO: 980 - protein, 11 aa, Homo Sapiens
IMDSTEAQLRY

SEQ ID NO: 981 - protein, 11 aa, Homo Sapiens
ISDAAQLPHDY

SEQ ID NO: 982 - protein, 11 aa, Homo Sapiens
ISEPWTQRSFY

SEQ ID NO: 983 - protein, 11 aa, Homo Sapiens
ISEQTGKELLY

SEQ ID NO: 984 - protein, 11 aa, Homo Sapiens
ISESIKELQFY

SEQ ID NO: 985 - protein, 11 aa, Homo Sapiens
ISETPIIGNKY

SEQ ID NO: 986 - protein, 11 aa, Homo Sapiens
ISSENLLDAVY

SEQ ID NO: 987 - protein, 11 aa, Homo Sapiens
ISYGPDWKDFY

SEQ ID NO: 988 - protein, 11 aa, Homo Sapiens
ITDDQFDFHTY

SEQ ID NO: 989 - protein, 11 aa, Homo Sapiens
ITDFINILHRY

SEQ ID NO: 990 - protein, 11 aa, Homo Sapiens
ITDLPDHLLSY

SEQ ID NO: 991 - protein, 11 aa, Homo Sapiens
ITELLYKDGRY

SEQ ID NO: 992 - protein, 11 aa, Homo Sapiens
KSDVEAIFSKY

SEQ ID NO: 993 - protein, 11 aa, Homo Sapiens
KSDVETIFSKY

SEQ ID NO: 994 - protein, 11 aa, Homo Sapiens
KTDMVEKALLY

SEQ ID NO: 995 - protein, 11 aa, Homo Sapiens
KTEDPDLPAFY

SEQ ID NO: 996 - protein, 11 aa, Homo Sapiens
KTELERAFGYY

SEQ ID NO: 997 - protein, 11 aa, Homo Sapiens
KTETEPVFWYY

SEQ ID NO: 998 - protein, 11 aa, Homo Sapiens
LIEEGGLQHLY

SEQ ID NO: 999 - protein, 11 aa, Homo Sapiens
LIEPHYQPWSY

SEQ ID NO: 1000 - protein, 11 aa, Homo Sapiens
LINYIEMHGLY

SEQ ID NO: 1001 - protein, 11 aa, Homo Sapiens
LLDIEQDTYRY

SEQ ID NO: 1002 - protein, 11 aa, Homo Sapiens
LLDKGVYGLLY

SEQ ID NO: 1003 - protein, 11 aa, Homo Sapiens
LLDPKYGMFRY

SEQ ID NO: 1004 - protein, 11 aa, Homo Sapiens
LLDPSITLGQY

SEQ ID NO: 1005 - protein, 11 aa, Homo Sapiens
LLDPSVFHVKY

SEQ ID NO: 1006 - protein, 11 aa, Homo Sapiens
LLEDFLEHEGY

SEQ ID NO: 1007 - protein, 11 aa, Homo Sapiens
LLEGDIHGQYY

SEQ ID NO: 1008 - protein, 11 aa, Homo Sapiens
LLENDVSTLGY

SEQ ID NO: 1009 - protein, 11 aa, Homo Sapiens
LQERNPENWAY

SEQ ID NO: 1010 - protein, 11 aa, Homo Sapiens
LSDEHVQFLVY

SEQ ID NO: 1011 - protein, 11 aa, Homo Sapiens
LSDIASALRYL

SEQ ID NO: 1012 - protein, 11 aa, Homo Sapiens
LSDIASLKALY

SEQ ID NO: 1013 - protein, 11 aa, Homo Sapiens
LSDIGSGIRYL

SEQ ID NO: 1014 - protein, 11 aa, Homo Sapiens
LSDTKYLEMIY

SEQ ID NO: 1015 - protein, 11 aa, Homo Sapiens
LSELAPSLPSY

SEQ ID NO: 1016 - protein, 11 aa, Homo Sapiens
LSELFHSRNYY

SEQ ID NO: 1017 - protein, 11 aa, Homo Sapiens
LSEPEEAAALY

SEQ ID NO: 1018 - protein, 11 aa, Homo Sapiens
LTDDHVQFLIY

SEQ ID NO: 1019 - protein, 11 aa, Homo Sapiens
LTDHTVTFLQY

SEQ ID NO: 1020 - protein, 11 aa, Homo Sapiens
LTDIHGNVLQY

SEQ ID NO: 1021 - protein, 11 aa, Homo Sapiens
LTDLVDDNYFY

SEQ ID NO: 1022 - protein, 11 aa, Homo Sapiens
LTDRLWFKSTY

SEQ ID NO: 1023 - protein, 11 aa, Homo Sapiens
LTDYDIRFYMY

SEQ ID NO: 1024 - protein, 11 aa, Homo Sapiens
LTEINRSFKEY

SEQ ID NO: 1025 - protein, 11 aa, Homo Sapiens
LTELLERAAFY

SEQ ID NO: 1026 - protein, 11 aa, Homo Sapiens
LTFVPSAEDFY

SEQ ID NO: 1027 - protein, 11 aa, Homo Sapiens
LVDNSIRELQY

SEQ ID NO: 1028 - protein, 11 aa, Homo Sapiens
MIEIAGVKLLY

SEQ ID NO: 1029 - protein, 11 aa, Homo Sapiens
MTDEIFHDVAY

SEQ ID NO: 1030 - protein, 11 aa, Homo Sapiens
NSDTNIRWNNY

SEQ ID NO: 1031 - protein, 11 aa, Homo Sapiens
NSDYLALLQAY

SEQ ID NO: 1032 - protein, 11 aa, Homo Sapiens
NSYWVGEDSTY

SEQ ID NO: 1033 - protein, 11 aa, Homo Sapiens
NTEVLLSHLSY

SEQ ID NO: 1034 - protein, 11 aa, Homo Sapiens
NTSPLLGDARF

SEQ ID NO: 1035 - protein, 11 aa, Homo Sapiens
PSDPRYHEVHY

SEQ ID NO: 1036 - protein, 11 aa, Homo Sapiens
PTDATLNRLLY

SEQ ID NO: 1037 - protein, 11 aa, Homo Sapiens
PTDYADIMMGY

SEQ ID NO: 1038 - protein, 11 aa, Homo Sapiens
QADPTKLELLY

SEQ ID NO: 1039 - protein, 11 aa, Homo Sapiens
QLDVAGRVMQY

SEQ ID NO: 1040 - protein, 11 aa, Homo Sapiens
QLEDGRTLSDY

SEQ ID NO: 1041 - protein, 11 aa, Homo Sapiens
QLEWDDSTLSY

SEQ ID NO: 1042 - protein, 11 aa, Homo Sapiens
QSDIVSTMEHY

SEQ ID NO: 1043 - protein, 11 aa, Homo Sapiens
QSEEARRLLGY

SEQ ID NO: 1044 - protein, 11 aa, Homo Sapiens
QTDIQGALSAY

SEQ ID NO: 1045 - protein, 11 aa, Homo Sapiens
QTETGTPYMLY

SEQ ID NO: 1046 - protein, 11 aa, Homo Sapiens
RADPEAGLLLY

SEQ ID NO: 1047 - protein, 11 aa, Homo Sapiens
RIDTRNELESY

SEQ ID NO: 1048 - protein, 11 aa, Homo Sapiens
RIEEGTYGVVY

SEQ ID NO: 1049 - protein, 11 aa, Homo Sapiens
RLETELDGLRY

SEQ ID NO: 1050 - protein, 11 aa, Homo Sapiens
RSDSYVELSQY

SEQ ID NO: 1051 - protein, 11 aa, Homo Sapiens
RTEIIEDLAFY

SEQ ID NO: 1052 - protein, 11 aa, Homo Sapiens
RTELAIKLLEY

SEQ ID NO: 1053 - protein, 11 aa, Homo Sapiens
SIDPGADLSQY

SEQ ID NO: 1054 - protein, 11 aa, Homo Sapiens
SSDGAISLLTY

SEQ ID NO: 1055 - protein, 11 aa, Homo Sapiens
SSDQCAVQLFY

SEQ ID NO: 1056 - protein, 11 aa, Homo Sapiens
SSDTADFRDLY

SEQ ID NO: 1057 - protein, 11 aa, Homo Sapiens
SSDVIRLIMQY

SEQ ID NO: 1058 - protein, 11 aa, Homo Sapiens
SSELATEVHFY

SEQ ID NO: 1059 - protein, 11 aa, Homo Sapiens
SSEQVVDLLRY

SEQ ID NO: 1060 - protein, 11 aa, Homo Sapiens
SSEVVTVFQYY

SEQ ID NO: 1061 - protein, 11 aa, Homo Sapiens
SSEYHYVGGFY

SEQ ID NO: 1062 - protein, 11 aa, Homo Sapiens
STDVSDLLHQY

SEQ ID NO: 1063 - protein, 11 aa, Homo Sapiens
TADHNLLLYEA

SEQ ID NO: 1064 - protein, 11 aa, Homo Sapiens
TIDKATGILLY

SEQ ID NO: 1065 - protein, 11 aa, Homo Sapiens
TSDHFETIMKY

SEQ ID NO: 1066 - protein, 11 aa, Homo Sapiens
TSEQLDDILKY

SEQ ID NO: 1067 - protein, 11 aa, Homo Sapiens
TSETPDYLLKY

SEQ ID NO: 1068 - protein, 11 aa, Homo Sapiens
TTDFPGNYSGY

SEQ ID NO: 1069 - protein, 11 aa, Homo Sapiens
TTDLFGRDLSY

SEQ ID NO: 1070 - protein, 11 aa, Homo Sapiens
TVEELTDTFYY

SEQ ID NO: 1071 - protein, 11 aa, Homo Sapiens
VIDPESGNTLY

SEQ ID NO: 1072 - protein, 11 aa, Homo Sapiens
VLDINSIDNLY

SEQ ID NO: 1073 - protein, 11 aa, Homo Sapiens
VLDSEGYLLFY

SEQ ID NO: 1074 - protein, 11 aa, Homo Sapiens
VLDVISLVDKY

SEQ ID NO: 1075 - protein, 11 aa, Homo Sapiens
VLETNLTGTFY

SEQ ID NO: 1076 - protein, 11 aa, Homo Sapiens
VSENVTQYLQY

SEQ ID NO: 1077 - protein, 11 aa, Homo Sapiens
VTDGAILGKLY

SEQ ID NO: 1078 - protein, 11 aa, Homo Sapiens
VTDPRVVDLLV

SEQ ID NO: 1079 - protein, 11 aa, Homo Sapiens
VTDSGPTFNYL

SEQ ID NO: 1080 - protein, 11 aa, Homo Sapiens
VTDSGRTVILY

SEQ ID NO: 1081 - protein, 11 aa, Homo Sapiens
VTEFEDIKSGY

SEQ ID NO: 1082 - protein, 11 aa, Homo Sapiens
VTEGGEPYRLY

SEQ ID NO: 1083 - protein, 11 aa, Homo Sapiens
VTEGLTDVILY

SEQ ID NO: 1084 - protein, 11 aa, Homo Sapiens
VTEGLVDVILY

SEQ ID NO: 1085 - protein, 11 aa, Homo Sapiens
VTEITDDLHFY

SEQ ID NO: 1086 - protein, 11 aa, Homo Sapiens
VTEQLDAGVRY

SEQ ID NO: 1087 - protein, 11 aa, Homo Sapiens
VTESPAKFALY

SEQ ID NO: 1088 - protein, 11 aa, Homo Sapiens
VVDIQGVGDLY

SEQ ID NO: 1089 - protein, 11 aa, Homo Sapiens
VVDPFSKKDWY

SEQ ID NO: 1090 - protein, 11 aa, Homo Sapiens
VVEQGPSFAFY

SEQ ID NO: 1091 - protein, 11 aa, Homo Sapiens
YADQLKEYLFY

SEQ ID NO: 1092 - protein, 11 aa, Homo Sapiens
YIDQGRNPQLY

SEQ ID NO: 1093 - protein, 11 aa, Homo Sapiens
YIEDRPLHMLY

SEQ ID NO: 1094 - protein, 11 aa, Homo Sapiens
YIEFHSQSGFY

SEQ ID NO: 1095 - protein, 11 aa, Homo Sapiens
YLDLKSDEWEY

SEQ ID NO: 1096 - protein, 11 aa, Homo Sapiens
YLDPSLNSLVY

SEQ ID NO: 1097 - protein, 11 aa, Homo Sapiens
YLDSIPPGQYM

SEQ ID NO: 1098 - protein, 11 aa, Homo Sapiens
YLDWAYRSGGY

SEQ ID NO: 1099 - protein, 11 aa, Homo Sapiens
YLEDKVYLTGY

SEQ ID NO: 1100 - protein, 11 aa, Homo Sapiens
YLFEPHSGEEY

SEQ ID NO: 1101 - protein, 11 aa, Homo Sapiens
YLQNWSHVLSY

SEQ ID NO: 1102 - protein, 11 aa, Homo Sapiens
YLWSAIEIFRY

SEQ ID NO: 1103 - protein, 11 aa, Homo Sapiens
YQDPDATSLKY

SEQ ID NO: 1104 - protein, 11 aa, Homo Sapiens
YSAEPLPELCY

SEQ ID NO: 1105 - protein, 11 aa, Homo Sapiens
YSDVAKGILQY

SEQ ID NO: 1106 - protein, 11 aa, Homo Sapiens
YSDVSGLLANY

SEQ ID NO: 1107 - protein, 11 aa, Homo Sapiens
YSEDRIGLADY

SEQ ID NO: 1108 - protein, 11 aa, Homo Sapiens
YSEYPPFSHRY

SEQ ID NO: 1109 - protein, 11 aa, Homo Sapiens
YSGLLLPDAQY

SEQ ID NO: 1110 - protein, 11 aa, Homo Sapiens
YSGYIFDYDYY

SEQ ID NO: 1111 - protein, 11 aa, Homo Sapiens
YSVYRTVIEYY

SEQ ID NO: 1112 - protein, 11 aa, Homo Sapiens
YTADGKEVLEY

SEQ ID NO: 1113 - protein, 11 aa, Homo Sapiens
YTDHLQSYVIY

SEQ ID NO: 1114 - protein, 11 aa, Homo Sapiens
YTDTGLWGLYM

SEQ ID NO: 1115 - protein, 11 aa, Homo Sapiens
YTEAEEFFVKY

SEQ ID NO: 1116 - protein, 11 aa, Homo Sapiens
YTEDEIYELSY

SEQ ID NO: 1117 - protein, 11 aa, Homo Sapiens
YTEFVPQIPGY

SEQ ID NO: 1118 - protein, 11 aa, Homo Sapiens
YTELTTAIRTY

SEQ ID NO: 1119 - protein, 11 aa, Homo Sapiens
YTEQLLRGLSY

SEQ ID NO: 1120 - protein, 11 aa, Homo Sapiens
YTFSSIEREEY

SEQ ID NO: 1121 - protein, 8 aa, Homo Sapiens
AIRNDEEL

SEQ ID NO: 1122 - protein, 8 aa, Homo Sapiens
ALFKAWAL

SEQ ID NO: 1123 - protein, 8 aa, Homo Sapiens
ALGFVYKL

SEQ ID NO: 1124 - protein, 8 aa, Homo Sapiens
ALGSVVAV

SEQ ID NO: 1125 - protein, 8 aa, Homo Sapiens
FIMVMHIK

SEQ ID NO: 1126 - protein, 8 aa, Homo Sapiens
FLFRITQV

SEQ ID NO: 1127 - protein, 8 aa, Homo Sapiens
FLGKIYQI

SEQ ID NO: 1128 - protein, 8 aa, Homo Sapiens
FLYKVVQV

SEQ ID NO: 1129 - protein, 8 aa, Homo Sapiens
FSDIPNPI

SEQ ID NO: 1130 - protein, 8 aa, Homo Sapiens
GLGPTFKL

SEQ ID NO: 1131 - protein, 8 aa, Homo Sapiens
GLGRVWAV

SEQ ID NO: 1132 - protein, 8 aa, Homo Sapiens
IFVEAVLR

SEQ ID NO: 1133 - protein, 8 aa, Homo Sapiens
ILGPTFTL

SEQ ID NO: 1134 - protein, 8 aa, Homo Sapiens
LLGQVFQV

SEQ ID NO: 1135 - protein, 8 aa, Homo Sapiens
LLPAIVHI

SEQ ID NO: 1136 - protein, 8 aa, Homo Sapiens
LMEHIHKL

SEQ ID NO: 1137 - protein, 8 aa, Homo Sapiens
PINGNGKQ

SEQ ID NO: 1138 - protein, 8 aa, Homo Sapiens
PLGYEIQL

SEQ ID NO: 1139 - protein, 8 aa, Homo Sapiens
QEPVLGPV

SEQ ID NO: 1140 - protein, 8 aa, Homo Sapiens
SLFKIWLV

SEQ ID NO: 1141 - protein, 8 aa, Homo Sapiens
SLGKVFGV

SEQ ID NO: 1142 - protein, 8 aa, Homo Sapiens
SLLEHHKI

SEQ ID NO: 1143 - protein, 8 aa, Homo Sapiens
VLGTVIGV

SEQ ID NO: 1144 - protein, 8 aa, Homo Sapiens
VPPFLQPE

SEQ ID NO: 1145 - protein, 8 aa, Homo Sapiens
VREIAQDF

SEQ ID NO: 1146 - protein, 8 aa, Homo Sapiens
VYPFPGPI

SEQ ID NO: 1147 - protein, 8 aa, Homo Sapiens
WPQLFLLL

SEQ ID NO: 1148 - protein, 8 aa, Homo Sapiens
YLFHVQEV

SEQ ID NO: 1149 - protein, 8 aa, Homo Sapiens
YLFKVVLI

SEQ ID NO: 1150 - protein, 8 aa, Homo Sapiens
YLGQVTTI

SEQ ID NO: 1151 - protein, 9 aa, Homo Sapiens
AAAPVVPAV

SEQ ID NO: 1152 - protein, 9 aa, Homo Sapiens
AALPNVYEV

SEQ ID NO: 1153 - protein, 9 aa, Homo Sapiens
AIAPIIAAV

SEQ ID NO: 1154 - protein, 9 aa, Homo Sapiens
AIFSAIIFL

SEQ ID NO: 1155 - protein, 9 aa, Homo Sapiens
AIIEYMPLL

SEQ ID NO: 1156 - protein, 9 aa, Homo Sapiens
AIISELVSI

SEQ ID NO: 1157 - protein, 9 aa, Homo Sapiens
AILHLLVSL

SEQ ID NO: 1158 - protein, 9 aa, Homo Sapiens
AILKYIETL

SEQ ID NO: 1159 - protein, 9 aa, Homo Sapiens
AILPTSIFL

SEQ ID NO: 1160 - protein, 9 aa, Homo Sapiens
AILTTLIHL

SEQ ID NO: 1161 - protein, 9 aa, Homo Sapiens
AILTVVPKI

SEQ ID NO: 1162 - protein, 9 aa, Homo Sapiens
AIMDIVIKV

SEQ ID NO: 1163 - protein, 9 aa, Homo Sapiens
AIMDLLLRL

SEQ ID NO: 1164 - protein, 9 aa, Homo Sapiens
AIQDKLFQV

SEQ ID NO: 1165 - protein, 9 aa, Homo Sapiens
AIVDKVPSV

SEQ ID NO: 1166 - protein, 9 aa, Homo Sapiens
AIVRSLPSV

SEQ ID NO: 1167 - protein, 9 aa, Homo Sapiens
AIWDGLILL

SEQ ID NO: 1168 - protein, 9 aa, Homo Sapiens
ALAAALAHI

SEQ ID NO: 1169 - protein, 9 aa, Homo Sapiens
ALAALHVTL

SEQ ID NO: 1170 - protein, 9 aa, Homo Sapiens
ALAATVFCV

SEQ ID NO: 1171 - protein, 9 aa, Homo Sapiens
ALADFAELI

SEQ ID NO: 1172 - protein, 9 aa, Homo Sapiens
ALADFLPVM

SEQ ID NO: 1173 - protein, 9 aa, Homo Sapiens
ALADLLLAL

SEQ ID NO: 1174 - protein, 9 aa, Homo Sapiens
ALADTLVLL

SEQ ID NO: 1175 - protein, 9 aa, Homo Sapiens
ALAEALKEV

SEQ ID NO: 1176 - protein, 9 aa, Homo Sapiens
ALAEEVEQV

SEQ ID NO: 1177 - protein, 9 aa, Homo Sapiens
ALAEGQLRL

SEQ ID NO: 1178 - protein, 9 aa, Homo Sapiens
ALAERLDIV

SEQ ID NO: 1179 - protein, 9 aa, Homo Sapiens
ALAGVSFEI

SEQ ID NO: 1180 - protein, 9 aa, Homo Sapiens
ALAKEIDSV

SEQ ID NO: 1181 - protein, 9 aa, Homo Sapiens
ALAKIEIKL

SEQ ID NO: 1182 - protein, 9 aa, Homo Sapiens
ALAKLVEAI

SEQ ID NO: 1183 - protein, 9 aa, Homo Sapiens
ALANHLIKV

SEQ ID NO: 1184 - protein, 9 aa, Homo Sapiens
ALANKLFGA

SEQ ID NO: 1185 - protein, 9 aa, Homo Sapiens
ALANLFVIV

SEQ ID NO: 1186 - protein, 9 aa, Homo Sapiens
ALANQIPTV

SEQ ID NO: 1187 - protein, 9 aa, Homo Sapiens
ALAPAPPQV

SEQ ID NO: 1188 - protein, 9 aa, Homo Sapiens
ALAPGLPTA

SEQ ID NO: 1189 - protein, 9 aa, Homo Sapiens
ALAPGVRAV

SEQ ID NO: 1190 - protein, 9 aa, Homo Sapiens
ALAQRLLEV

SEQ ID NO: 1191 - protein, 9 aa, Homo Sapiens
ALARLVLRL

SEQ ID NO: 1192 - protein, 9 aa, Homo Sapiens
ALASVIKEL

SEQ ID NO: 1193 - protein, 9 aa, Homo Sapiens
ALASVIMGL

SEQ ID NO: 1194 - protein, 9 aa, Homo Sapiens
ALATLIHQV

SEQ ID NO: 1195 - protein, 9 aa, Homo Sapiens
ALAWLDVTL

SEQ ID NO: 1196 - protein, 9 aa, Homo Sapiens
ALDDFSISV

SEQ ID NO: 1197 - protein, 9 aa, Homo Sapiens
ALDDMISTL

SEQ ID NO: 1198 - protein, 9 aa, Homo Sapiens
ALDEQLVQV

SEQ ID NO: 1199 - protein, 9 aa, Homo Sapiens
ALDEVFTKV

SEQ ID NO: 1200 - protein, 9 aa, Homo Sapiens
ALDEVIFSL

SEQ ID NO: 1201 - protein, 9 aa, Homo Sapiens
ALDFFVPAL

SEQ ID NO: 1202 - protein, 9 aa, Homo Sapiens
ALDGFLFVV

SEQ ID NO: 1203 - protein, 9 aa, Homo Sapiens
ALDILITNV

SEQ ID NO: 1204 - protein, 9 aa, Homo Sapiens
ALDIMIPMV

SEQ ID NO: 1205 - protein, 9 aa, Homo Sapiens
ALDKATVLL

SEQ ID NO: 1206 - protein, 9 aa, Homo Sapiens
ALDNGLFTL

SEQ ID NO: 1207 - protein, 9 aa, Homo Sapiens
ALDPNIATL

SEQ ID NO: 1208 - protein, 9 aa, Homo Sapiens
ALDQEIIEV

SEQ ID NO: 1209 - protein, 9 aa, Homo Sapiens
ALDSQVPKV

SEQ ID NO: 1210 - protein, 9 aa, Homo Sapiens
ALEPIDITV

SEQ ID NO: 1211 - protein, 9 aa, Homo Sapiens
ALFDAQAQV

SEQ ID NO: 1212 - protein, 9 aa, Homo Sapiens
ALFEEVPEL

SEQ ID NO: 1213 - protein, 9 aa, Homo Sapiens
ALFEGKVQL

SEQ ID NO: 1214 - protein, 9 aa, Homo Sapiens
ALFGIPMAL

SEQ ID NO: 1215 - protein, 9 aa, Homo Sapiens
ALFGTILEL

SEQ ID NO: 1216 - protein, 9 aa, Homo Sapiens
ALFPERITV

SEQ ID NO: 1217 - protein, 9 aa, Homo Sapiens
ALFPGVALL

SEQ ID NO: 1218 - protein, 9 aa, Homo Sapiens
ALFQHITAL

SEQ ID NO: 1219 - protein, 9 aa, Homo Sapiens
ALFQRPPLI

SEQ ID NO: 1220 - protein, 9 aa, Homo Sapiens
ALFSFLYHL

SEQ ID NO: 1221 - protein, 9 aa, Homo Sapiens
ALHDILTEI

SEQ ID NO: 1222 - protein, 9 aa, Homo Sapiens
ALHDQLFYL

SEQ ID NO: 1223 - protein, 9 aa, Homo Sapiens
ALHHAVIFL

SEQ ID NO: 1224 - protein, 9 aa, Homo Sapiens
ALIDRMVNL

SEQ ID NO: 1225 - protein, 9 aa, Homo Sapiens
ALIEKLVEL

SEQ ID NO: 1226 - protein, 9 aa, Homo Sapiens
ALIFRRIYL

SEQ ID NO: 1227 - protein, 9 aa, Homo Sapiens
ALINNIVEI

SEQ ID NO: 1228 - protein, 9 aa, Homo Sapiens
ALITRIFGV

SEQ ID NO: 1229 - protein, 9 aa, Homo Sapiens
ALKDFVASI

SEQ ID NO: 1230 - protein, 9 aa, Homo Sapiens
ALKDLINEA

SEQ ID NO: 1231 - protein, 9 aa, Homo Sapiens
ALLADEFAL

SEQ ID NO: 1232 - protein, 9 aa, Homo Sapiens
ALLAELEKI

SEQ ID NO: 1233 - protein, 9 aa, Homo Sapiens
ALLAGSEYL

SEQ ID NO: 1234 - protein, 9 aa, Homo Sapiens
ALLAKILQI

SEQ ID NO: 1235 - protein, 9 aa, Homo Sapiens
ALLALLPEL

SEQ ID NO: 1236 - protein, 9 aa, Homo Sapiens
ALLAYTLGV

SEQ ID NO: 1237 - protein, 9 aa, Homo Sapiens
ALLDFLWDL

SEQ ID NO: 1238 - protein, 9 aa, Homo Sapiens
ALLDGRVQL

SEQ ID NO: 1239 - protein, 9 aa, Homo Sapiens
ALLDIIRSL

SEQ ID NO: 1240 - protein, 9 aa, Homo Sapiens
ALLDKLYAL

SEQ ID NO: 1241 - protein, 9 aa, Homo Sapiens
ALLDNNIGL

SEQ ID NO: 1242 - protein, 9 aa, Homo Sapiens
ALLDQLHTL

SEQ ID NO: 1243 - protein, 9 aa, Homo Sapiens
ALLDRIVSV

SEQ ID NO: 1244 - protein, 9 aa, Homo Sapiens
ALLDSAHLL

SEQ ID NO: 1245 - protein, 9 aa, Homo Sapiens
ALLDSFITI

SEQ ID NO: 1246 - protein, 9 aa, Homo Sapiens
ALLDWVTSV

SEQ ID NO: 1247 - protein, 9 aa, Homo Sapiens
ALLEEVKAL

SEQ ID NO: 1248 - protein, 9 aa, Homo Sapiens
ALLEGLTVV

SEQ ID NO: 1249 - protein, 9 aa, Homo Sapiens
ALLEGVKNV

SEQ ID NO: 1250 - protein, 9 aa, Homo Sapiens
ALLEKLTEL

SEQ ID NO: 1251 - protein, 9 aa, Homo Sapiens
ALLELLHEL

SEQ ID NO: 1252 - protein, 9 aa, Homo Sapiens
ALLEMDARL

SEQ ID NO: 1253 - protein, 9 aa, Homo Sapiens
ALLEQVNAL

SEQ ID NO: 1254 - protein, 9 aa, Homo Sapiens
ALLERGYSL

SEQ ID NO: 1255 - protein, 9 aa, Homo Sapiens
ALLETNPYL

SEQ ID NO: 1256 - protein, 9 aa, Homo Sapiens
ALLETVNRL

SEQ ID NO: 1257 - protein, 9 aa, Homo Sapiens
ALLGDLTKA

SEQ ID NO: 1258 - protein, 9 aa, Homo Sapiens
ALLGILQHV

SEQ ID NO: 1259 - protein, 9 aa, Homo Sapiens
ALLGKIEKV

SEQ ID NO: 1260 - protein, 9 aa, Homo Sapiens
ALLGKLDAI

SEQ ID NO: 1261 - protein, 9 aa, Homo Sapiens
ALLGYLQEV

SEQ ID NO: 1262 - protein, 9 aa, Homo Sapiens
ALLICLPEV

SEQ ID NO: 1263 - protein, 9 aa, Homo Sapiens
ALLKGLAAV

SEQ ID NO: 1264 - protein, 9 aa, Homo Sapiens
ALLKQIQEA

SEQ ID NO: 1265 - protein, 9 aa, Homo Sapiens
ALLNGEYLL

SEQ ID NO: 1266 - protein, 9 aa, Homo Sapiens
ALLNTINYL

SEQ ID NO: 1267 - protein, 9 aa, Homo Sapiens
ALLNVELEL

SEQ ID NO: 1268 - protein, 9 aa, Homo Sapiens
ALLPDLPAL

SEQ ID NO: 1269 - protein, 9 aa, Homo Sapiens
ALLPGNFTV

SEQ ID NO: 1270 - protein, 9 aa, Homo Sapiens
ALLPLLERV

SEQ ID NO: 1271 - protein, 9 aa, Homo Sapiens
ALLPQNHKL

SEQ ID NO: 1272 - protein, 9 aa, Homo Sapiens
ALLPSSPTL

SEQ ID NO: 1273 - protein, 9 aa, Homo Sapiens
ALLPVDIFL

SEQ ID NO: 1274 - protein, 9 aa, Homo Sapiens
ALLQEIVNI

SEQ ID NO: 1275 - protein, 9 aa, Homo Sapiens
ALLQQPLFL

SEQ ID NO: 1276 - protein, 9 aa, Homo Sapiens
ALLQQVHSA

SEQ ID NO: 1277 - protein, 9 aa, Homo Sapiens
ALLQRLEAL

SEQ ID NO: 1278 - protein, 9 aa, Homo Sapiens
ALLRFYVRV

SEQ ID NO: 1279 - protein, 9 aa, Homo Sapiens
ALLRLLPGL

SEQ ID NO: 1280 - protein, 9 aa, Homo Sapiens
ALLRVTPFI

SEQ ID NO: 1281 - protein, 9 aa, Homo Sapiens
ALLSAVTRL

SEQ ID NO: 1282 - protein, 9 aa, Homo Sapiens
ALLSGIVSI

SEQ ID NO: 1283 - protein, 9 aa, Homo Sapiens
ALLSGLREA

SEQ ID NO: 1284 - protein, 9 aa, Homo Sapiens
ALLSIIATV

SEQ ID NO: 1285 - protein, 9 aa, Homo Sapiens
ALLSRLEQI

SEQ ID NO: 1286 - protein, 9 aa, Homo Sapiens
ALLTVVSQV

SEQ ID NO: 1287 - protein, 9 aa, Homo Sapiens
ALLTYLEQV

SEQ ID NO: 1288 - protein, 9 aa, Homo Sapiens
ALLVRLQEV

SEQ ID NO: 1289 - protein, 9 aa, Homo Sapiens
ALMADMVYV

SEQ ID NO: 1290 - protein, 9 aa, Homo Sapiens
ALMDEVVKA

SEQ ID NO: 1291 - protein, 9 aa, Homo Sapiens
ALMDFAYTA

SEQ ID NO: 1292 - protein, 9 aa, Homo Sapiens
ALMEALVLI

SEQ ID NO: 1293 - protein, 9 aa, Homo Sapiens
ALMEEILKL

SEQ ID NO: 1294 - protein, 9 aa, Homo Sapiens
ALMELFPKL

SEQ ID NO: 1295 - protein, 9 aa, Homo Sapiens
ALMNIPVLV

SEQ ID NO: 1296 - protein, 9 aa, Homo Sapiens
ALMPQLVQL

SEQ ID NO: 1297 - protein, 9 aa, Homo Sapiens
ALMPVLNQV

SEQ ID NO: 1298 - protein, 9 aa, Homo Sapiens
ALNDCIYSV

SEQ ID NO: 1299 - protein, 9 aa, Homo Sapiens
ALNEKLVNL

SEQ ID NO: 1300 - protein, 9 aa, Homo Sapiens
ALNELLQHV

SEQ ID NO: 1301 - protein, 9 aa, Homo Sapiens
ALNENINQV

SEQ ID NO: 1302 - protein, 9 aa, Homo Sapiens
ALNEQIARL

SEQ ID NO: 1303 - protein, 9 aa, Homo Sapiens
ALNGKLYIV

SEQ ID NO: 1304 - protein, 9 aa, Homo Sapiens
ALNNLLHSL

SEQ ID NO: 1305 - protein, 9 aa, Homo Sapiens
ALNSKILSV

SEQ ID NO: 1306 - protein, 9 aa, Homo Sapiens
ALPEDLVEV

SEQ ID NO: 1307 - protein, 9 aa, Homo Sapiens
ALPPVLTTV

SEQ ID NO: 1308 - protein, 9 aa, Homo Sapiens
ALQALVVTL

SEQ ID NO: 1309 - protein, 9 aa, Homo Sapiens
ALQDFLLSV

SEQ ID NO: 1310 - protein, 9 aa, Homo Sapiens
ALQEKLWNV

SEQ ID NO: 1311 - protein, 9 aa, Homo Sapiens
ALQEMVHQV

SEQ ID NO: 1312 - protein, 9 aa, Homo Sapiens
ALQERLDGL

SEQ ID NO: 1313 - protein, 9 aa, Homo Sapiens
ALQESIPDI

SEQ ID NO: 1314 - protein, 9 aa, Homo Sapiens
ALQESLVQI

SEQ ID NO: 1315 - protein, 9 aa, Homo Sapiens
ALQSLLHLL

SEQ ID NO: 1316 - protein, 9 aa, Homo Sapiens
ALQTIQLFL

SEQ ID NO: 1317 - protein, 9 aa, Homo Sapiens
ALQTKLETL

SEQ ID NO: 1318 - protein, 9 aa, Homo Sapiens
ALRDVSEEL

SEQ ID NO: 1319 - protein, 9 aa, Homo Sapiens
ALRVFVESV

SEQ ID NO: 1320 - protein, 9 aa, Homo Sapiens
ALSASLITV

SEQ ID NO: 1321 - protein, 9 aa, Homo Sapiens
ALSDIFQAV

SEQ ID NO: 1322 - protein, 9 aa, Homo Sapiens
ALSDLEITL

SEQ ID NO: 1323 - protein, 9 aa, Homo Sapiens
ALSDSIHTV

SEQ ID NO: 1324 - protein, 9 aa, Homo Sapiens
ALSDYDLVL

SEQ ID NO: 1325 - protein, 9 aa, Homo Sapiens
ALSEELVQL

SEQ ID NO: 1326 - protein, 9 aa, Homo Sapiens
ALSEKIVSV

SEQ ID NO: 1327 - protein, 9 aa, Homo Sapiens
ALSELIILT

SEQ ID NO: 1328 - protein, 9 aa, Homo Sapiens
ALSEMVEYI

SEQ ID NO: 1329 - protein, 9 aa, Homo Sapiens
ALSGHLETV

SEQ ID NO: 1330 - protein, 9 aa, Homo Sapiens
ALSGLAVRL

SEQ ID NO: 1331 - protein, 9 aa, Homo Sapiens
ALSNLEVKL

SEQ ID NO: 1332 - protein, 9 aa, Homo Sapiens
ALSPHNILL

SEQ ID NO: 1333 - protein, 9 aa, Homo Sapiens
ALSQDIPEI

SEQ ID NO: 1334 - protein, 9 aa, Homo Sapiens
ALSQINTKL

SEQ ID NO: 1335 - protein, 9 aa, Homo Sapiens
ALSQLVPCV

SEQ ID NO: 1336 - protein, 9 aa, Homo Sapiens
ALSRLLPGL

SEQ ID NO: 1337 - protein, 9 aa, Homo Sapiens
ALSSLAVVV

SEQ ID NO: 1338 - protein, 9 aa, Homo Sapiens
ALSSLIHAL

SEQ ID NO: 1339 - protein, 9 aa, Homo Sapiens
ALSSLLVFL

SEQ ID NO: 1340 - protein, 9 aa, Homo Sapiens
ALSSVIKEL

SEQ ID NO: 1341 - protein, 9 aa, Homo Sapiens
ALTDFVRSV

SEQ ID NO: 1342 - protein, 9 aa, Homo Sapiens
ALTDVILCV

SEQ ID NO: 1343 - protein, 9 aa, Homo Sapiens
ALTELLAKI

SEQ ID NO: 1344 - protein, 9 aa, Homo Sapiens
ALTERLALI

SEQ ID NO: 1345 - protein, 9 aa, Homo Sapiens
ALTEYTLYL

SEQ ID NO: 1346 - protein, 9 aa, Homo Sapiens
ALTGYLHTI

SEQ ID NO: 1347 - protein, 9 aa, Homo Sapiens
ALTLNLTEV

SEQ ID NO: 1348 - protein, 9 aa, Homo Sapiens
ALTPVVVTL

SEQ ID NO: 1349 - protein, 9 aa, Homo Sapiens
ALTSLLKTV

SEQ ID NO: 1350 - protein, 9 aa, Homo Sapiens
ALTSVVVTL

SEQ ID NO: 1351 - protein, 9 aa, Homo Sapiens
ALTWLIPTL

SEQ ID NO: 1352 - protein, 9 aa, Homo Sapiens
ALVDCSVAL

SEQ ID NO: 1353 - protein, 9 aa, Homo Sapiens
ALVDHVAEL

SEQ ID NO: 1354 - protein, 9 aa, Homo Sapiens
ALVDQLWKL

SEQ ID NO: 1355 - protein, 9 aa, Homo Sapiens
ALVEKLESL

SEQ ID NO: 1356 - protein, 9 aa, Homo Sapiens
ALVESLEYV

SEQ ID NO: 1357 - protein, 9 aa, Homo Sapiens
ALVESLITV

SEQ ID NO: 1358 - protein, 9 aa, Homo Sapiens
ALVFELHYV

SEQ ID NO: 1359 - protein, 9 aa, Homo Sapiens
ALVNVQIPL

SEQ ID NO: 1360 - protein, 9 aa, Homo Sapiens
ALVSSLHLL

SEQ ID NO: 1361 - protein, 9 aa, Homo Sapiens
ALVSTIIMV

SEQ ID NO: 1362 - protein, 9 aa, Homo Sapiens
ALVSYLIRL

SEQ ID NO: 1363 - protein, 9 aa, Homo Sapiens
ALWAGLLTL

SEQ ID NO: 1364 - protein, 9 aa, Homo Sapiens
ALWAKSPGV

SEQ ID NO: 1365 - protein, 9 aa, Homo Sapiens
ALWDKLFNL

SEQ ID NO: 1366 - protein, 9 aa, Homo Sapiens
ALWGEDAEL

SEQ ID NO: 1367 - protein, 9 aa, Homo Sapiens
ALWGFFPVL

SEQ ID NO: 1368 - protein, 9 aa, Homo Sapiens
ALWLVSPLL

SEQ ID NO: 1369 - protein, 9 aa, Homo Sapiens
ALWNEEALL

SEQ ID NO: 1370 - protein, 9 aa, Homo Sapiens
ALWSLPLYL

SEQ ID NO: 1371 - protein, 9 aa, Homo Sapiens
ALYASRLYL

SEQ ID NO: 1372 - protein, 9 aa, Homo Sapiens
ALYAVIEKA

SEQ ID NO: 1373 - protein, 9 aa, Homo Sapiens
ALYDNVEKL

SEQ ID NO: 1374 - protein, 9 aa, Homo Sapiens
ALYGKLLKL

SEQ ID NO: 1375 - protein, 9 aa, Homo Sapiens
ALYGQPLLL

SEQ ID NO: 1376 - protein, 9 aa, Homo Sapiens
ALYHLAIKL

SEQ ID NO: 1377 - protein, 9 aa, Homo Sapiens
ALYNWLIQV

SEQ ID NO: 1378 - protein, 9 aa, Homo Sapiens
ALYPNVVQV

SEQ ID NO: 1379 - protein, 9 aa, Homo Sapiens
ALYSELLAV

SEQ ID NO: 1380 - protein, 9 aa, Homo Sapiens
ALYSKGILL

SEQ ID NO: 1381 - protein, 9 aa, Homo Sapiens
ALYTVIETV

SEQ ID NO: 1382 - protein, 9 aa, Homo Sapiens
ALYVAVVNV

SEQ ID NO: 1383 - protein, 9 aa, Homo Sapiens
AMFENFVSV

SEQ ID NO: 1384 - protein, 9 aa, Homo Sapiens
AMFGKLMTI

SEQ ID NO: 1385 - protein, 9 aa, Homo Sapiens
AMIDQVLEL

SEQ ID NO: 1386 - protein, 9 aa, Homo Sapiens
AMIELVERL

SEQ ID NO: 1387 - protein, 9 aa, Homo Sapiens
AMIERITFI

SEQ ID NO: 1388 - protein, 9 aa, Homo Sapiens
AMLAVLHTV

SEQ ID NO: 1389 - protein, 9 aa, Homo Sapiens
AMLPSITNV

SEQ ID NO: 1390 - protein, 9 aa, Homo Sapiens
AMLRLIPSL

SEQ ID NO: 1391 - protein, 9 aa, Homo Sapiens
AMLTVLHEI

SEQ ID NO: 1392 - protein, 9 aa, Homo Sapiens
AMNSQILEV

SEQ ID NO: 1393 - protein, 9 aa, Homo Sapiens
AMQEYIAVV

SEQ ID NO: 1394 - protein, 9 aa, Homo Sapiens
AMTLVNKTL

SEQ ID NO: 1395 - protein, 9 aa, Homo Sapiens
AMWEHPITA

SEQ ID NO: 1396 - protein, 9 aa, Homo Sapiens
AMYVYPPNV

SEQ ID NO: 1397 - protein, 9 aa, Homo Sapiens
AQFGYYFRV

SEQ ID NO: 1398 - protein, 9 aa, Homo Sapiens
AQILELPYA

SEQ ID NO: 1399 - protein, 9 aa, Homo Sapiens
AQMDYQLRL

SEQ ID NO: 1400 - protein, 9 aa, Homo Sapiens
ATIGELAQV

SEQ ID NO: 1401 - protein, 9 aa, Homo Sapiens
ATMPVVPSV

SEQ ID NO: 1402 - protein, 9 aa, Homo Sapiens
AVANIVNSV

SEQ ID NO: 1403 - protein, 9 aa, Homo Sapiens
AVLGFSFRL

SEQ ID NO: 1404 - protein, 9 aa, Homo Sapiens
AVLPFSPAL

SEQ ID NO: 1405 - protein, 9 aa, Homo Sapiens
AVMDTLVSV

SEQ ID NO: 1406 - protein, 9 aa, Homo Sapiens
AVMEQIPEI

SEQ ID NO: 1407 - protein, 9 aa, Homo Sapiens
AVMLHSFTL

SEQ ID NO: 1408 - protein, 9 aa, Homo Sapiens
CILPNIEAV

SEQ ID NO: 1409 - protein, 9 aa, Homo Sapiens
CLADAVVKI

SEQ ID NO: 1410 - protein, 9 aa, Homo Sapiens
CLYEIYPEL

SEQ ID NO: 1411 - protein, 9 aa, Homo Sapiens
CVIFSLEEL

SEQ ID NO: 1412 - protein, 9 aa, Homo Sapiens
DIETGQQTV

SEQ ID NO: 1413 - protein, 9 aa, Homo Sapiens
EIQYLKDLI

SEQ ID NO: 1414 - protein, 9 aa, Homo Sapiens
ELFSSPPAV

SEQ ID NO: 1415 - protein, 9 aa, Homo Sapiens
ELKPFIEEL

SEQ ID NO: 1416 - protein, 9 aa, Homo Sapiens
ELSDVLIYL

SEQ ID NO: 1417 - protein, 9 aa, Homo Sapiens
EMVELRILL

SEQ ID NO: 1418 - protein, 9 aa, Homo Sapiens
ETLDPGPPL

SEQ ID NO: 1419 - protein, 9 aa, Homo Sapiens
EVISKLYAV

SEQ ID NO: 1420 - protein, 9 aa, Homo Sapiens
FAIPMIHAV

SEQ ID NO: 1421 - protein, 9 aa, Homo Sapiens
FAMEIDPSL

SEQ ID NO: 1422 - protein, 9 aa, Homo Sapiens
FASHVSPEV

SEQ ID NO: 1423 - protein, 9 aa, Homo Sapiens
FFMERSWSV

SEQ ID NO: 1424 - protein, 9 aa, Homo Sapiens
FGLARAFGV

SEQ ID NO: 1425 - protein, 9 aa, Homo Sapiens
FIADLVVGL

SEQ ID NO: 1426 - protein, 9 aa, Homo Sapiens
FIDDANYSV

SEQ ID NO: 1427 - protein, 9 aa, Homo Sapiens
FIDEYVETV

SEQ ID NO: 1428 - protein, 9 aa, Homo Sapiens
FIFDGLHKA

SEQ ID NO: 1429 - protein, 9 aa, Homo Sapiens
FIFSDTHEL

SEQ ID NO: 1430 - protein, 9 aa, Homo Sapiens
FIINGIEKV

SEQ ID NO: 1431 - protein, 9 aa, Homo Sapiens
FIIQGLRSV

SEQ ID NO: 1432 - protein, 9 aa, Homo Sapiens
FILAAIYHL

SEQ ID NO: 1433 - protein, 9 aa, Homo Sapiens
FILEKIEYL

SEQ ID NO: 1434 - protein, 9 aa, Homo Sapiens
FILPHISTA

SEQ ID NO: 1435 - protein, 9 aa, Homo Sapiens
FILPKEIAV

SEQ ID NO: 1436 - protein, 9 aa, Homo Sapiens
FILPYIHKA

SEQ ID NO: 1437 - protein, 9 aa, Homo Sapiens
FINIVVHSV

SEQ ID NO: 1438 - protein, 9 aa, Homo Sapiens
FIQEIEHAL

SEQ ID NO: 1439 - protein, 9 aa, Homo Sapiens
FISEFEHRV

SEQ ID NO: 1440 - protein, 9 aa, Homo Sapiens
FIWENIHTL

SEQ ID NO: 1441 - protein, 9 aa, Homo Sapiens
FIWPMLIHI

SEQ ID NO: 1442 - protein, 9 aa, Homo Sapiens
FLADIVQKL

SEQ ID NO: 1443 - protein, 9 aa, Homo Sapiens
FLADPSAFV

SEQ ID NO: 1444 - protein, 9 aa, Homo Sapiens
FLAGAVTSV

SEQ ID NO: 1445 - protein, 9 aa, Homo Sapiens
FLAKLIAQA

SEQ ID NO: 1446 - protein, 9 aa, Homo Sapiens
FLANIGTSV

SEQ ID NO: 1447 - protein, 9 aa, Homo Sapiens
FLANVSTVL

SEQ ID NO: 1448 - protein, 9 aa, Homo Sapiens
FLAPRLLSL

SEQ ID NO: 1449 - protein, 9 aa, Homo Sapiens
FLAQRAVEL

SEQ ID NO: 1450 - protein, 9 aa, Homo Sapiens
FLASILEEL

SEQ ID NO: 1451 - protein, 9 aa, Homo Sapiens
FLASLDRAK

SEQ ID NO: 1452 - protein, 9 aa, Homo Sapiens
FLAVKPDGV

SEQ ID NO: 1453 - protein, 9 aa, Homo Sapiens
FLDATLTSV

SEQ ID NO: 1454 - protein, 9 aa, Homo Sapiens
FLDDVVHSL

SEQ ID NO: 1455 - protein, 9 aa, Homo Sapiens
FLDENVHFA

SEQ ID NO: 1456 - protein, 9 aa, Homo Sapiens
FLDENVHFF

SEQ ID NO: 1457 - protein, 9 aa, Homo Sapiens
FLDEPTNHL

SEQ ID NO: 1458 - protein, 9 aa, Homo Sapiens
FLDERTPRL

SEQ ID NO: 1459 - protein, 9 aa, Homo Sapiens
FLDGNELTL

SEQ ID NO: 1460 - protein, 9 aa, Homo Sapiens
FLDGNEMTL

SEQ ID NO: 1461 - protein, 9 aa, Homo Sapiens
FLDGYVSQL

SEQ ID NO: 1462 - protein, 9 aa, Homo Sapiens
FLDHIIASV

SEQ ID NO: 1463 - protein, 9 aa, Homo Sapiens
FLDHVMYTI

SEQ ID NO: 1464 - protein, 9 aa, Homo Sapiens
FLDIVELLL

SEQ ID NO: 1465 - protein, 9 aa, Homo Sapiens
FLDKQGFYV

SEQ ID NO: 1466 - protein, 9 aa, Homo Sapiens
FLDLGPPGI

SEQ ID NO: 1467 - protein, 9 aa, Homo Sapiens
FLDMTNWNL

SEQ ID NO: 1468 - protein, 9 aa, Homo Sapiens
FLDNGPKTI

SEQ ID NO: 1469 - protein, 9 aa, Homo Sapiens
FLDNLHINL

SEQ ID NO: 1470 - protein, 9 aa, Homo Sapiens
FLDNSLDTV

SEQ ID NO: 1471 - protein, 9 aa, Homo Sapiens
FLDPRPLTV

SEQ ID NO: 1472 - protein, 9 aa, Homo Sapiens
FLDSAYFRL

SEQ ID NO: 1473 - protein, 9 aa, Homo Sapiens
FLDSLIYGA

SEQ ID NO: 1474 - protein, 9 aa, Homo Sapiens
FLDSTSPLL

SEQ ID NO: 1475 - protein, 9 aa, Homo Sapiens
FLEEEVYPL

SEQ ID NO: 1476 - protein, 9 aa, Homo Sapiens
FLEKLLPPV

SEQ ID NO: 1477 - protein, 9 aa, Homo Sapiens
FLEPVNPRL

SEQ ID NO: 1478 - protein, 9 aa, Homo Sapiens
FLETNVPLL

SEQ ID NO: 1479 - protein, 9 aa, Homo Sapiens
FLFDHLLTL

SEQ ID NO: 1480 - protein, 9 aa, Homo Sapiens
FLFDRPMHV

SEQ ID NO: 1481 - protein, 9 aa, Homo Sapiens
FLFDTQHFI

SEQ ID NO: 1482 - protein, 9 aa, Homo Sapiens
FLFELPSRL

SEQ ID NO: 1483 - protein, 9 aa, Homo Sapiens
FLFEPVVKA

SEQ ID NO: 1484 - protein, 9 aa, Homo Sapiens
FLFGEVHKA

SEQ ID NO: 1485 - protein, 9 aa, Homo Sapiens
FLFGYPKRL

SEQ ID NO: 1486 - protein, 9 aa, Homo Sapiens
FLFLDRTYV

SEQ ID NO: 1487 - protein, 9 aa, Homo Sapiens
FLFNKVVNL

SEQ ID NO: 1488 - protein, 9 aa, Homo Sapiens
FLFNLPLNI

SEQ ID NO: 1489 - protein, 9 aa, Homo Sapiens
FLFNYDYTL

SEQ ID NO: 1490 - protein, 9 aa, Homo Sapiens
FLFPHSVLV

SEQ ID NO: 1491 - protein, 9 aa, Homo Sapiens
FLFPVYPLI

SEQ ID NO: 1492 - protein, 9 aa, Homo Sapiens
FLFQEPRSI

SEQ ID NO: 1493 - protein, 9 aa, Homo Sapiens
FLFQEVLVI

SEQ ID NO: 1494 - protein, 9 aa, Homo Sapiens
FLFQFIPYM

SEQ ID NO: 1495 - protein, 9 aa, Homo Sapiens
FLFRDILEL

SEQ ID NO: 1496 - protein, 9 aa, Homo Sapiens
FLFSKFIEL

SEQ ID NO: 1497 - protein, 9 aa, Homo Sapiens
FLFVDPELV

SEQ ID NO: 1498 - protein, 9 aa, Homo Sapiens
FLGEKIASV

SEQ ID NO: 1499 - protein, 9 aa, Homo Sapiens
FLGIHVFLV

SEQ ID NO: 1500 - protein, 9 aa, Homo Sapiens
FLGIYLLTI

SEQ ID NO: 1501 - protein, 9 aa, Homo Sapiens
FLGNLDITV

SEQ ID NO: 1502 - protein, 9 aa, Homo Sapiens
FLGSFIDHV

SEQ ID NO: 1503 - protein, 9 aa, Homo Sapiens
FLHAADVVL

SEQ ID NO: 1504 - protein, 9 aa, Homo Sapiens
FLHAVDVVL

SEQ ID NO: 1505 - protein, 9 aa, Homo Sapiens
FLHDNMVEI

SEQ ID NO: 1506 - protein, 9 aa, Homo Sapiens
FLHEATVRL

SEQ ID NO: 1507 - protein, 9 aa, Homo Sapiens
FLHESLILL

SEQ ID NO: 1508 - protein, 9 aa, Homo Sapiens
FLHEVLWEL

SEQ ID NO: 1509 - protein, 9 aa, Homo Sapiens
FLIAALDVL

SEQ ID NO: 1510 - protein, 9 aa, Homo Sapiens
FLIEEQKIV

SEQ ID NO: 1511 - protein, 9 aa, Homo Sapiens
FLINFIHTL

SEQ ID NO: 1512 - protein, 9 aa, Homo Sapiens
FLIPAVELI

SEQ ID NO: 1513 - protein, 9 aa, Homo Sapiens
FLIPFVITV

SEQ ID NO: 1514 - protein, 9 aa, Homo Sapiens
FLIPIYHQV

SEQ ID NO: 1515 - protein, 9 aa, Homo Sapiens
FLIPKFFEL

SEQ ID NO: 1516 - protein, 9 aa, Homo Sapiens
FLIPYFIFL

SEQ ID NO: 1517 - protein, 9 aa, Homo Sapiens
FLIRESETL

SEQ ID NO: 1518 - protein, 9 aa, Homo Sapiens
FLIRNIPVI

SEQ ID NO: 1519 - protein, 9 aa, Homo Sapiens
FLISRLIKL

SEQ ID NO: 1520 - protein, 9 aa, Homo Sapiens
FLITILDHL

SEQ ID NO: 1521 - protein, 9 aa, Homo Sapiens
FLKDLVASV

SEQ ID NO: 1522 - protein, 9 aa, Homo Sapiens
FLKNELDNV

SEQ ID NO: 1523 - protein, 9 aa, Homo Sapiens
FLLALEPEL

SEQ ID NO: 1524 - protein, 9 aa, Homo Sapiens
FLLALGHFL

SEQ ID NO: 1525 - protein, 9 aa, Homo Sapiens
FLLDHGASL

SEQ ID NO: 1526 - protein, 9 aa, Homo Sapiens
FLLDKALLI

SEQ ID NO: 1527 - protein, 9 aa, Homo Sapiens
FLLDKKIGV

SEQ ID NO: 1528 - protein, 9 aa, Homo Sapiens
FLLEGIRSL

SEQ ID NO: 1529 - protein, 9 aa, Homo Sapiens
FLLEIRQTL

SEQ ID NO: 1530 - protein, 9 aa, Homo Sapiens
FLLEKGYEV

SEQ ID NO: 1531 - protein, 9 aa, Homo Sapiens
FLLEKPFSV

SEQ ID NO: 1532 - protein, 9 aa, Homo Sapiens
FLLENSSKV

SEQ ID NO: 1533 - protein, 9 aa, Homo Sapiens
FLLEREQLL

SEQ ID NO: 1534 - protein, 9 aa, Homo Sapiens
FLLFINHRL

SEQ ID NO: 1535 - protein, 9 aa, Homo Sapiens
FLLGEHLLL

SEQ ID NO: 1536 - protein, 9 aa, Homo Sapiens
FLLGKEVSL

SEQ ID NO: 1537 - protein, 9 aa, Homo Sapiens
FLLHIQQQV

SEQ ID NO: 1538 - protein, 9 aa, Homo Sapiens
FLLPDVIRI

SEQ ID NO: 1539 - protein, 9 aa, Homo Sapiens
FLLPFAALL

SEQ ID NO: 1540 - protein, 9 aa, Homo Sapiens
FLLPGHTRL

SEQ ID NO: 1541 - protein, 9 aa, Homo Sapiens
FLLPILSQI

SEQ ID NO: 1542 - protein, 9 aa, Homo Sapiens
FLLPKVQSI

SEQ ID NO: 1543 - protein, 9 aa, Homo Sapiens
FLLPLRIAL

SEQ ID NO: 1544 - protein, 9 aa, Homo Sapiens
FLLPMFERL

SEQ ID NO: 1545 - protein, 9 aa, Homo Sapiens
FLLPTGVYL

SEQ ID NO: 1546 - protein, 9 aa, Homo Sapiens
FLLPVAVKL

SEQ ID NO: 1547 - protein, 9 aa, Homo Sapiens
FLLPVINEM

SEQ ID NO: 1548 - protein, 9 aa, Homo Sapiens
FLLQHQTFL

SEQ ID NO: 1549 - protein, 9 aa, Homo Sapiens
FLLQLHWRL

SEQ ID NO: 1550 - protein, 9 aa, Homo Sapiens
FLLQLQEEL

SEQ ID NO: 1551 - protein, 9 aa, Homo Sapiens
FLMDFIHQV

SEQ ID NO: 1552 - protein, 9 aa, Homo Sapiens
FLMEEVHMI

SEQ ID NO: 1553 - protein, 9 aa, Homo Sapiens
FLMWFIETA

SEQ ID NO: 1554 - protein, 9 aa, Homo Sapiens
FLNDEVWNL

SEQ ID NO: 1555 - protein, 9 aa, Homo Sapiens
FLNDIFERI

SEQ ID NO: 1556 - protein, 9 aa, Homo Sapiens
FLNGEVIRL

SEQ ID NO: 1557 - protein, 9 aa, Homo Sapiens
FLNGLEILL

SEQ ID NO: 1558 - protein, 9 aa, Homo Sapiens
FLNKLVILV

SEQ ID NO: 1559 - protein, 9 aa, Homo Sapiens
FLNNQEYVL

SEQ ID NO: 1560 - protein, 9 aa, Homo Sapiens
FLPAGIVAV

SEQ ID NO: 1561 - protein, 9 aa, Homo Sapiens
FLPARFYQA

SEQ ID NO: 1562 - protein, 9 aa, Homo Sapiens
FLPEAFDFI

SEQ ID NO: 1563 - protein, 9 aa, Homo Sapiens
FLPEAPAEL

SEQ ID NO: 1564 - protein, 9 aa, Homo Sapiens
FLPEPMGTA

SEQ ID NO: 1565 - protein, 9 aa, Homo Sapiens
FLPESVAVV

SEQ ID NO: 1566 - protein, 9 aa, Homo Sapiens
FLPLIVNTV

SEQ ID NO: 1567 - protein, 9 aa, Homo Sapiens
FLPPAQVTV

SEQ ID NO: 1568 - protein, 9 aa, Homo Sapiens
FLPPLPTSV

SEQ ID NO: 1569 - protein, 9 aa, Homo Sapiens
FLPPPFPPP

SEQ ID NO: 1570 - protein, 9 aa, Homo Sapiens
FLPPSFPIV

SEQ ID NO: 1571 - protein, 9 aa, Homo Sapiens
FLPPYTFQI

SEQ ID NO: 1572 - protein, 9 aa, Homo Sapiens
FLPQKIIYL

SEQ ID NO: 1573 - protein, 9 aa, Homo Sapiens
FLPQVVVTV

SEQ ID NO: 1574 - protein, 9 aa, Homo Sapiens
FLPRKFPSL

SEQ ID NO: 1575 - protein, 9 aa, Homo Sapiens
FLPSYIIDV

SEQ ID NO: 1576 - protein, 9 aa, Homo Sapiens
FLQEHNTTL

SEQ ID NO: 1577 - protein, 9 aa, Homo Sapiens
FLQEKSPAV

SEQ ID NO: 1578 - protein, 9 aa, Homo Sapiens
FLQEYGLSV

SEQ ID NO: 1579 - protein, 9 aa, Homo Sapiens
FLQEYVANL

SEQ ID NO: 1580 - protein, 9 aa, Homo Sapiens
FLQLAVDKV

SEQ ID NO: 1581 - protein, 9 aa, Homo Sapiens
FLQNVQILL

SEQ ID NO: 1582 - protein, 9 aa, Homo Sapiens
FLQPELVKL

SEQ ID NO: 1583 - protein, 9 aa, Homo Sapiens
FLQPGGYHV

SEQ ID NO: 1584 - protein, 9 aa, Homo Sapiens
FLREYFERL

SEQ ID NO: 1585 - protein, 9 aa, Homo Sapiens
FLRNINEYL

SEQ ID NO: 1586 - protein, 9 aa, Homo Sapiens
FLSDIPETV

SEQ ID NO: 1587 - protein, 9 aa, Homo Sapiens
FLSEKLERI

SEQ ID NO: 1588 - protein, 9 aa, Homo Sapiens
FLSELQYYL

SEQ ID NO: 1589 - protein, 9 aa, Homo Sapiens
FLSELTQQL

SEQ ID NO: 1590 - protein, 9 aa, Homo Sapiens
FLSEVFAQL

SEQ ID NO: 1591 - protein, 9 aa, Homo Sapiens
FLSEVFHQA

SEQ ID NO: 1592 - protein, 9 aa, Homo Sapiens
FLSGAKIWL

SEQ ID NO: 1593 - protein, 9 aa, Homo Sapiens
FLSGYYVTL

SEQ ID NO: 1594 - protein, 9 aa, Homo Sapiens
FLSHIPITL

SEQ ID NO: 1595 - protein, 9 aa, Homo Sapiens
FLSLINVGL

SEQ ID NO: 1596 - protein, 9 aa, Homo Sapiens
FLSNDTVQL

SEQ ID NO: 1597 - protein, 9 aa, Homo Sapiens
FLSNIFQAL

SEQ ID NO: 1598 - protein, 9 aa, Homo Sapiens
FLSPFNMIL

SEQ ID NO: 1599 - protein, 9 aa, Homo Sapiens
FLSPWPPAV

SEQ ID NO: 1600 - protein, 9 aa, Homo Sapiens
FLSSVIQNL

SEQ ID NO: 1601 - protein, 9 aa, Homo Sapiens
FLSTINVGL

SEQ ID NO: 1602 - protein, 9 aa, Homo Sapiens
FLSTLEHHL

SEQ ID NO: 1603 - protein, 9 aa, Homo Sapiens
FLSTSIAQL

SEQ ID NO: 1604 - protein, 9 aa, Homo Sapiens
FLSVTIINL

SEQ ID NO: 1605 - protein, 9 aa, Homo Sapiens
FLTAAIILL

SEQ ID NO: 1606 - protein, 9 aa, Homo Sapiens
FLTDREVRL

SEQ ID NO: 1607 - protein, 9 aa, Homo Sapiens
FLTEFINYI

SEQ ID NO: 1608 - protein, 9 aa, Homo Sapiens
FLTELVISL

SEQ ID NO: 1609 - protein, 9 aa, Homo Sapiens
FLTGVTTEL

SEQ ID NO: 1610 - protein, 9 aa, Homo Sapiens
FLTKQEILL

SEQ ID NO: 1611 - protein, 9 aa, Homo Sapiens
FLVDIMEHL

SEQ ID NO: 1612 - protein, 9 aa, Homo Sapiens
FLVDSQFMV

SEQ ID NO: 1613 - protein, 9 aa, Homo Sapiens
FLVEHNLVL

SEQ ID NO: 1614 - protein, 9 aa, Homo Sapiens
FLVGERVTL

SEQ ID NO: 1615 - protein, 9 aa, Homo Sapiens
FLVLDVVYL

SEQ ID NO: 1616 - protein, 9 aa, Homo Sapiens
FLVNSDLTL

SEQ ID NO: 1617 - protein, 9 aa, Homo Sapiens
FLVQNIHTL

SEQ ID NO: 1618 - protein, 9 aa, Homo Sapiens
FLVTVIHTL

SEQ ID NO: 1619 - protein, 9 aa, Homo Sapiens
FLWERPTLL

SEQ ID NO: 1620 - protein, 9 aa, Homo Sapiens
FLWPKEVEL

SEQ ID NO: 1621 - protein, 9 aa, Homo Sapiens
FLYAGHIFL

SEQ ID NO: 1622 - protein, 9 aa, Homo Sapiens
FLYDDNQRV

SEQ ID NO: 1623 - protein, 9 aa, Homo Sapiens
FLYDTHQNL

SEQ ID NO: 1624 - protein, 9 aa, Homo Sapiens
FLYFEDHGL

SEQ ID NO: 1625 - protein, 9 aa, Homo Sapiens
FLYIRQLAI

SEQ ID NO: 1626 - protein, 9 aa, Homo Sapiens
FLYPFLHTV

SEQ ID NO: 1627 - protein, 9 aa, Homo Sapiens
FLYPFPLAL

SEQ ID NO: 1628 - protein, 9 aa, Homo Sapiens
FLYQYSTRL

SEQ ID NO: 1629 - protein, 9 aa, Homo Sapiens
FLYSDEVQI

SEQ ID NO: 1630 - protein, 9 aa, Homo Sapiens
FLYSLLMKL

SEQ ID NO: 1631 - protein, 9 aa, Homo Sapiens
FLYWHLEDL

SEQ ID NO: 1632 - protein, 9 aa, Homo Sapiens
FMATIAEGL

SEQ ID NO: 1633 - protein, 9 aa, Homo Sapiens
FMFGQKLNV

SEQ ID NO: 1634 - protein, 9 aa, Homo Sapiens
FMFQEALKL

SEQ ID NO: 1635 - protein, 9 aa, Homo Sapiens
FMLGNYINL

SEQ ID NO: 1636 - protein, 9 aa, Homo Sapiens
FMLKDMLYL

SEQ ID NO: 1637 - protein, 9 aa, Homo Sapiens
FMLPDPQNI

SEQ ID NO: 1638 - protein, 9 aa, Homo Sapiens
FMSEYLIEL

SEQ ID NO: 1639 - protein, 9 aa, Homo Sapiens
FMTTNVPNV

SEQ ID NO: 1640 - protein, 9 aa, Homo Sapiens
FMVEKGPTL

SEQ ID NO: 1641 - protein, 9 aa, Homo Sapiens
FQDENYLYL

SEQ ID NO: 1642 - protein, 9 aa, Homo Sapiens
FQDPVPLTV

SEQ ID NO: 1643 - protein, 9 aa, Homo Sapiens
FQIGPVAGV

SEQ ID NO: 1644 - protein, 9 aa, Homo Sapiens
FQLPIRFNL

SEQ ID NO: 1645 - protein, 9 aa, Homo Sapiens
FQMEQIVYC

SEQ ID NO: 1646 - protein, 9 aa, Homo Sapiens
FQTDLIYNL

SEQ ID NO: 1647 - protein, 9 aa, Homo Sapiens
FTAEFLEKV

SEQ ID NO: 1648 - protein, 9 aa, Homo Sapiens
FTWEGLYNV

SEQ ID NO: 1649 - protein, 9 aa, Homo Sapiens
FVARMIPKV

SEQ ID NO: 1650 - protein, 9 aa, Homo Sapiens
FVDDYTVRV

SEQ ID NO: 1651 - protein, 9 aa, Homo Sapiens
FVDEFLTYL

SEQ ID NO: 1652 - protein, 9 aa, Homo Sapiens
FVDGLTFKV

SEQ ID NO: 1653 - protein, 9 aa, Homo Sapiens
FVFPGELLL

SEQ ID NO: 1654 - protein, 9 aa, Homo Sapiens
FVFSFPVSV

SEQ ID NO: 1655 - protein, 9 aa, Homo Sapiens
FVHDLVLYL

SEQ ID NO: 1656 - protein, 9 aa, Homo Sapiens
FVIAELVNV

SEQ ID NO: 1657 - protein, 9 aa, Homo Sapiens
FVIDLQTRL

SEQ ID NO: 1658 - protein, 9 aa, Homo Sapiens
FVIPVVQAL

SEQ ID NO: 1659 - protein, 9 aa, Homo Sapiens
FVIRNIVEA

SEQ ID NO: 1660 - protein, 9 aa, Homo Sapiens
FVLPELPSV

SEQ ID NO: 1661 - protein, 9 aa, Homo Sapiens
FVLPVATQI

SEQ ID NO: 1662 - protein, 9 aa, Homo Sapiens
FVMETFVHL

SEQ ID NO: 1663 - protein, 9 aa, Homo Sapiens
FVPDTPVGV

SEQ ID NO: 1664 - protein, 9 aa, Homo Sapiens
GELYLIPFA

SEQ ID NO: 1665 - protein, 9 aa, Homo Sapiens
GIAELVPGV

SEQ ID NO: 1666 - protein, 9 aa, Homo Sapiens
GIMKKAYEL

SEQ ID NO: 1667 - protein, 9 aa, Homo Sapiens
GIWGFIKGV

SEQ ID NO: 1668 - protein, 9 aa, Homo Sapiens
GLAAFRAFL

SEQ ID NO: 1669 - protein, 9 aa, Homo Sapiens
GLAATLYSL

SEQ ID NO: 1670 - protein, 9 aa, Homo Sapiens
GLAEFQENV

SEQ ID NO: 1671 - protein, 9 aa, Homo Sapiens
GLAEILVLV

SEQ ID NO: 1672 - protein, 9 aa, Homo Sapiens
GLAHFVNEI

SEQ ID NO: 1673 - protein, 9 aa, Homo Sapiens
GLAKLIADV

SEQ ID NO: 1674 - protein, 9 aa, Homo Sapiens
GLAKRVWSL

SEQ ID NO: 1675 - protein, 9 aa, Homo Sapiens
GLAPHLEQI

SEQ ID NO: 1676 - protein, 9 aa, Homo Sapiens
GLAPKPVQV

SEQ ID NO: 1677 - protein, 9 aa, Homo Sapiens
GLAPLHIQL

SEQ ID NO: 1678 - protein, 9 aa, Homo Sapiens
GLATDVQTV

SEQ ID NO: 1679 - protein, 9 aa, Homo Sapiens
GLDDLLLFL

SEQ ID NO: 1680 - protein, 9 aa, Homo Sapiens
GLDELFVQV

SEQ ID NO: 1681 - protein, 9 aa, Homo Sapiens
GLDIPTVQV

SEQ ID NO: 1682 - protein, 9 aa, Homo Sapiens
GLDNINVFL

SEQ ID NO: 1683 - protein, 9 aa, Homo Sapiens
GLDSYLPEL

SEQ ID NO: 1684 - protein, 9 aa, Homo Sapiens
GLFARIIMI

SEQ ID NO: 1685 - protein, 9 aa, Homo Sapiens
GLFDQHFRL

SEQ ID NO: 1686 - protein, 9 aa, Homo Sapiens
GLFDQQLAL

SEQ ID NO: 1687 - protein, 9 aa, Homo Sapiens
GLFDTAISL

SEQ ID NO: 1688 - protein, 9 aa, Homo Sapiens
GLFGVPLCL

SEQ ID NO: 1689 - protein, 9 aa, Homo Sapiens
GLFGYLVFL

SEQ ID NO: 1690 - protein, 9 aa, Homo Sapiens
GLFHFPTPL

SEQ ID NO: 1691 - protein, 9 aa, Homo Sapiens
GLFMGLVLV

SEQ ID NO: 1692 - protein, 9 aa, Homo Sapiens
GLFPTSHSV

SEQ ID NO: 1693 - protein, 9 aa, Homo Sapiens
GLFPWTPKL

SEQ ID NO: 1694 - protein, 9 aa, Homo Sapiens
GLFQGKTPL

SEQ ID NO: 1695 - protein, 9 aa, Homo Sapiens
GLFSAKLFL

SEQ ID NO: 1696 - protein, 9 aa, Homo Sapiens
GLGPNLVGV

SEQ ID NO: 1697 - protein, 9 aa, Homo Sapiens
GLHGWAFTL

SEQ ID NO: 1698 - protein, 9 aa, Homo Sapiens
GLHNVVYGI

SEQ ID NO: 1699 - protein, 9 aa, Homo Sapiens
GLHSYFITV

SEQ ID NO: 1700 - protein, 9 aa, Homo Sapiens
GLIDEIYGI

SEQ ID NO: 1701 - protein, 9 aa, Homo Sapiens
GLIDENPGL

SEQ ID NO: 1702 - protein, 9 aa, Homo Sapiens
GLIDFAIQL

SEQ ID NO: 1703 - protein, 9 aa, Homo Sapiens
GLIDHQTYL

SEQ ID NO: 1704 - protein, 9 aa, Homo Sapiens
GLIDKVNEL

SEQ ID NO: 1705 - protein, 9 aa, Homo Sapiens
GLIDRQVTV

SEQ ID NO: 1706 - protein, 9 aa, Homo Sapiens
GLIDVHVHL

SEQ ID NO: 1707 - protein, 9 aa, Homo Sapiens
GLIEILKKV

SEQ ID NO: 1708 - protein, 9 aa, Homo Sapiens
GLIEKNIEL

SEQ ID NO: 1709 - protein, 9 aa, Homo Sapiens
GLIENPALL

SEQ ID NO: 1710 - protein, 9 aa, Homo Sapiens
GLIGQLDEV

SEQ ID NO: 1711 - protein, 9 aa, Homo Sapiens
GLKEGIPAL

SEQ ID NO: 1712 - protein, 9 aa, Homo Sapiens
GLKHDIARV

SEQ ID NO: 1713 - protein, 9 aa, Homo Sapiens
GLLAKIFEL

SEQ ID NO: 1714 - protein, 9 aa, Homo Sapiens
GLLDAVTYL

SEQ ID NO: 1715 - protein, 9 aa, Homo Sapiens
GLLDLPFRV

SEQ ID NO: 1716 - protein, 9 aa, Homo Sapiens
GLLDRIMQL

SEQ ID NO: 1717 - protein, 9 aa, Homo Sapiens
GLLEEAYTL

SEQ ID NO: 1718 - protein, 9 aa, Homo Sapiens
GLLEGLVEV

SEQ ID NO: 1719 - protein, 9 aa, Homo Sapiens
GLLEIVTSV

SEQ ID NO: 1720 - protein, 9 aa, Homo Sapiens
GLLENIPRV

SEQ ID NO: 1721 - protein, 9 aa, Homo Sapiens
GLLENIRQL

SEQ ID NO: 1722 - protein, 9 aa, Homo Sapiens
GLLERVKEL

SEQ ID NO: 1723 - protein, 9 aa, Homo Sapiens
GLLGNVAEV

SEQ ID NO: 1724 - protein, 9 aa, Homo Sapiens
GLLGNVVNI

SEQ ID NO: 1725 - protein, 9 aa, Homo Sapiens
GLLGYLHFV

SEQ ID NO: 1726 - protein, 9 aa, Homo Sapiens
GLLHLTLLL

SEQ ID NO: 1727 - protein, 9 aa, Homo Sapiens
GLLNNIAEV

SEQ ID NO: 1728 - protein, 9 aa, Homo Sapiens
GLLPDVPSL

SEQ ID NO: 1729 - protein, 9 aa, Homo Sapiens
GLLRIIPYL

SEQ ID NO: 1730 - protein, 9 aa, Homo Sapiens
GLLRLAIRL

SEQ ID NO: 1731 - protein, 9 aa, Homo Sapiens
GLLSIFTKV

SEQ ID NO: 1732 - protein, 9 aa, Homo Sapiens
GLLTEIRAV

SEQ ID NO: 1733 - protein, 9 aa, Homo Sapiens
GLMDTVKKV

SEQ ID NO: 1734 - protein, 9 aa, Homo Sapiens
GLMEDLLKL

SEQ ID NO: 1735 - protein, 9 aa, Homo Sapiens
GLMGISSTL

SEQ ID NO: 1736 - protein, 9 aa, Homo Sapiens
GLMRKVPRV

SEQ ID NO: 1737 - protein, 9 aa, Homo Sapiens
GLMTTVHAI

SEQ ID NO: 1738 - protein, 9 aa, Homo Sapiens
GLNEEIARV

SEQ ID NO: 1739 - protein, 9 aa, Homo Sapiens
GLNEFVVKF

SEQ ID NO: 1740 - protein, 9 aa, Homo Sapiens
GLPELVIQL

SEQ ID NO: 1741 - protein, 9 aa, Homo Sapiens
GLQEYVEAV

SEQ ID NO: 1742 - protein, 9 aa, Homo Sapiens
GLSDLRLEL

SEQ ID NO: 1743 - protein, 9 aa, Homo Sapiens
GLSETILAV

SEQ ID NO: 1744 - protein, 9 aa, Homo Sapiens
GLSGIIPTL

SEQ ID NO: 1745 - protein, 9 aa, Homo Sapiens
GLSQVAVTV

SEQ ID NO: 1746 - protein, 9 aa, Homo Sapiens
GLSSLSIHL

SEQ ID NO: 1747 - protein, 9 aa, Homo Sapiens
GLSVIIPHV

SEQ ID NO: 1748 - protein, 9 aa, Homo Sapiens
GLTEALHFV

SEQ ID NO: 1749 - protein, 9 aa, Homo Sapiens
GLTPHLTMV

SEQ ID NO: 1750 - protein, 9 aa, Homo Sapiens
GLTSAIQAV

SEQ ID NO: 1751 - protein, 9 aa, Homo Sapiens
GLVDQLVKA

SEQ ID NO: 1752 - protein, 9 aa, Homo Sapiens
GLVGSLQEV

SEQ ID NO: 1753 - protein, 9 aa, Homo Sapiens
GLVNYQISV

SEQ ID NO: 1754 - protein, 9 aa, Homo Sapiens
GLVPFLVSV

SEQ ID NO: 1755 - protein, 9 aa, Homo Sapiens
GLWGHALLL

SEQ ID NO: 1756 - protein, 9 aa, Homo Sapiens
GLWGPVHEL

SEQ ID NO: 1757 - protein, 9 aa, Homo Sapiens
GLYELVWRV

SEQ ID NO: 1758 - protein, 9 aa, Homo Sapiens
GLYGAIFRL

SEQ ID NO: 1759 - protein, 9 aa, Homo Sapiens
GLYGLIVAL

SEQ ID NO: 1760 - protein, 9 aa, Homo Sapiens
GLYPNLIQV

SEQ ID NO: 1761 - protein, 9 aa, Homo Sapiens
GLYQGQVLV

SEQ ID NO: 1762 - protein, 9 aa, Homo Sapiens
GLYSGVTTV

SEQ ID NO: 1763 - protein, 9 aa, Homo Sapiens
GMAERIPEL

SEQ ID NO: 1764 - protein, 9 aa, Homo Sapiens
GMDRYLIYV

SEQ ID NO: 1765 - protein, 9 aa, Homo Sapiens
GMMSVDPRL

SEQ ID NO: 1766 - protein, 9 aa, Homo Sapiens
GMYIFLHTV

SEQ ID NO: 1767 - protein, 9 aa, Homo Sapiens
GQIEVVPEV

SEQ ID NO: 1768 - protein, 9 aa, Homo Sapiens
GTIGLIHAV

SEQ ID NO: 1769 - protein, 9 aa, Homo Sapiens
GVKQLIVGV

SEQ ID NO: 1770 - protein, 9 aa, Homo Sapiens
GVLPNIQAV

SEQ ID NO: 1771 - protein, 9 aa, Homo Sapiens
GVQDFVPFV

SEQ ID NO: 1772 - protein, 9 aa, Homo Sapiens
HIFKDKVVL

SEQ ID NO: 1773 - protein, 9 aa, Homo Sapiens
HIIENIVAV

SEQ ID NO: 1774 - protein, 9 aa, Homo Sapiens
HILDFSPSL

SEQ ID NO: 1775 - protein, 9 aa, Homo Sapiens
HILECEFYL

SEQ ID NO: 1776 - protein, 9 aa, Homo Sapiens
HILQLLTTV

SEQ ID NO: 1777 - protein, 9 aa, Homo Sapiens
HLAELIAEL

SEQ ID NO: 1778 - protein, 9 aa, Homo Sapiens
HLAIKLEQV

SEQ ID NO: 1779 - protein, 9 aa, Homo Sapiens
HLANIVERV

SEQ ID NO: 1780 - protein, 9 aa, Homo Sapiens
HLDATKLLL

SEQ ID NO: 1781 - protein, 9 aa, Homo Sapiens
HLFDAFVSV

SEQ ID NO: 1782 - protein, 9 aa, Homo Sapiens
HLFGALVLL

SEQ ID NO: 1783 - protein, 9 aa, Homo Sapiens
HLFTATINL

SEQ ID NO: 1784 - protein, 9 aa, Homo Sapiens
HLGDFLVFL

SEQ ID NO: 1785 - protein, 9 aa, Homo Sapiens
HLIEPLANA

SEQ ID NO: 1786 - protein, 9 aa, Homo Sapiens
HLIHEVTKV

SEQ ID NO: 1787 - protein, 9 aa, Homo Sapiens
HLINYIIFL

SEQ ID NO: 1788 - protein, 9 aa, Homo Sapiens
HLISTINTV

SEQ ID NO: 1789 - protein, 9 aa, Homo Sapiens
HLLDIYIQL

SEQ ID NO: 1790 - protein, 9 aa, Homo Sapiens
HLLEEPIYL

SEQ ID NO: 1791 - protein, 9 aa, Homo Sapiens
HLLGDQISL

SEQ ID NO: 1792 - protein, 9 aa, Homo Sapiens
HLLGDVVFL

SEQ ID NO: 1793 - protein, 9 aa, Homo Sapiens
HLLHTVPAL

SEQ ID NO: 1794 - protein, 9 aa, Homo Sapiens
HLLNESPML

SEQ ID NO: 1795 - protein, 9 aa, Homo Sapiens
HLSDAIVEV

SEQ ID NO: 1796 - protein, 9 aa, Homo Sapiens
HLSIINEYL

SEQ ID NO: 1797 - protein, 9 aa, Homo Sapiens
HLSNIPPSV

SEQ ID NO: 1798 - protein, 9 aa, Homo Sapiens
HLSVVSVTV

SEQ ID NO: 1799 - protein, 9 aa, Homo Sapiens
HLTDITLKV

SEQ ID NO: 1800 - protein, 9 aa, Homo Sapiens
HLTYLNVYL

SEQ ID NO: 1801 - protein, 9 aa, Homo Sapiens
HLVPEVPTV

SEQ ID NO: 1802 - protein, 9 aa, Homo Sapiens
HLWAELVFL

SEQ ID NO: 1803 - protein, 9 aa, Homo Sapiens
HLWRGIVSI

SEQ ID NO: 1804 - protein, 9 aa, Homo Sapiens
HLWSYLITL

SEQ ID NO: 1805 - protein, 9 aa, Homo Sapiens
HLYDIHVTV

SEQ ID NO: 1806 - protein, 9 aa, Homo Sapiens
HVLDVIHEV

SEQ ID NO: 1807 - protein, 9 aa, Homo Sapiens
IAEMRIPAL

SEQ ID NO: 1808 - protein, 9 aa, Homo Sapiens
IAPPVPLKA

SEQ ID NO: 1809 - protein, 9 aa, Homo Sapiens
IAQEILKVV

SEQ ID NO: 1810 - protein, 9 aa, Homo Sapiens
IIADNIIFL

SEQ ID NO: 1811 - protein, 9 aa, Homo Sapiens
IIDGKIFCV

SEQ ID NO: 1812 - protein, 9 aa, Homo Sapiens
IIFVPVPQL

SEQ ID NO: 1813 - protein, 9 aa, Homo Sapiens
IIIDSVPEV

SEQ ID NO: 1814 - protein, 9 aa, Homo Sapiens
IIIPEIQKV

SEQ ID NO: 1815 - protein, 9 aa, Homo Sapiens
ILAAHVPTL

SEQ ID NO: 1816 - protein, 9 aa, Homo Sapiens
ILAAVETRL

SEQ ID NO: 1817 - protein, 9 aa, Homo Sapiens
ILADIVISA

SEQ ID NO: 1818 - protein, 9 aa, Homo Sapiens
ILAEGITIV

SEQ ID NO: 1819 - protein, 9 aa, Homo Sapiens
ILAELLLRV

SEQ ID NO: 1820 - protein, 9 aa, Homo Sapiens
ILAKEVEIV

SEQ ID NO: 1821 - protein, 9 aa, Homo Sapiens
ILAPVVKEI

SEQ ID NO: 1822 - protein, 9 aa, Homo Sapiens
ILAQIMPFL

SEQ ID NO: 1823 - protein, 9 aa, Homo Sapiens
ILAQQPLSV

SEQ ID NO: 1824 - protein, 9 aa, Homo Sapiens
ILASIFETV

SEQ ID NO: 1825 - protein, 9 aa, Homo Sapiens
ILDCIYNEV

SEQ ID NO: 1826 - protein, 9 aa, Homo Sapiens
ILDDIGHGV

SEQ ID NO: 1827 - protein, 9 aa, Homo Sapiens
ILDDSHLLV

SEQ ID NO: 1828 - protein, 9 aa, Homo Sapiens
ILDEPTNHL

SEQ ID NO: 1829 - protein, 9 aa, Homo Sapiens
ILDEPTNNL

SEQ ID NO: 1830 - protein, 9 aa, Homo Sapiens
ILDEVIFKL

SEQ ID NO: 1831 - protein, 9 aa, Homo Sapiens
ILDGNQLHI

SEQ ID NO: 1832 - protein, 9 aa, Homo Sapiens
ILDHEVPSL

SEQ ID NO: 1833 - protein, 9 aa, Homo Sapiens
ILDKKVEKV

SEQ ID NO: 1834 - protein, 9 aa, Homo Sapiens
ILDPCIYRV

SEQ ID NO: 1835 - protein, 9 aa, Homo Sapiens
ILDQKINEV

SEQ ID NO: 1836 - protein, 9 aa, Homo Sapiens
ILDSRLIAA

SEQ ID NO: 1837 - protein, 9 aa, Homo Sapiens
ILDVTVVYL

SEQ ID NO: 1838 - protein, 9 aa, Homo Sapiens
ILEENIPVL

SEQ ID NO: 1839 - protein, 9 aa, Homo Sapiens
ILEPSLYTV

SEQ ID NO: 1840 - protein, 9 aa, Homo Sapiens
ILFGHENRV

SEQ ID NO: 1841 - protein, 9 aa, Homo Sapiens
ILFNRVLGV

SEQ ID NO: 1842 - protein, 9 aa, Homo Sapiens
ILFPLRFTL

SEQ ID NO: 1843 - protein, 9 aa, Homo Sapiens
ILGDFLVAV

SEQ ID NO: 1844 - protein, 9 aa, Homo Sapiens
ILGIQPPSV

SEQ ID NO: 1845 - protein, 9 aa, Homo Sapiens
ILGPKPQGV

SEQ ID NO: 1846 - protein, 9 aa, Homo Sapiens
ILGTHNITV

SEQ ID NO: 1847 - protein, 9 aa, Homo Sapiens
ILHDAVVFL

SEQ ID NO: 1848 - protein, 9 aa, Homo Sapiens
ILHDDEVTV

SEQ ID NO: 1849 - protein, 9 aa, Homo Sapiens
ILHGLVAAV

SEQ ID NO: 1850 - protein, 9 aa, Homo Sapiens
ILHSVTTNL

SEQ ID NO: 1851 - protein, 9 aa, Homo Sapiens
ILIDWLVQV

SEQ ID NO: 1852 - protein, 9 aa, Homo Sapiens
ILIETKLVL

SEQ ID NO: 1853 - protein, 9 aa, Homo Sapiens
ILIGRIKNV

SEQ ID NO: 1854 - protein, 9 aa, Homo Sapiens
ILIRPLVSV

SEQ ID NO: 1855 - protein, 9 aa, Homo Sapiens
ILISKLLGA

SEQ ID NO: 1856 - protein, 9 aa, Homo Sapiens
ILITNVVCV

SEQ ID NO: 1857 - protein, 9 aa, Homo Sapiens
ILLAEVDKV

SEQ ID NO: 1858 - protein, 9 aa, Homo Sapiens
ILLAEVPTM

SEQ ID NO: 1859 - protein, 9 aa, Homo Sapiens
ILLDIHIFM

SEQ ID NO: 1860 - protein, 9 aa, Homo Sapiens
ILLDQTVRV

SEQ ID NO: 1861 - protein, 9 aa, Homo Sapiens
ILLDRLLYL

SEQ ID NO: 1862 - protein, 9 aa, Homo Sapiens
ILLEGTMNL

SEQ ID NO: 1863 - protein, 9 aa, Homo Sapiens
ILLEHNYAL

SEQ ID NO: 1864 - protein, 9 aa, Homo Sapiens
ILLKDILSV

SEQ ID NO: 1865 - protein, 9 aa, Homo Sapiens
ILLLPLHTG

SEQ ID NO: 1866 - protein, 9 aa, Homo Sapiens
ILLPYVSKV

SEQ ID NO: 1867 - protein, 9 aa, Homo Sapiens
ILLQGRLYL

SEQ ID NO: 1868 - protein, 9 aa, Homo Sapiens
ILLSVPLLV

SEQ ID NO: 1869 - protein, 9 aa, Homo Sapiens
ILMEHIHKL

SEQ ID NO: 1870 - protein, 9 aa, Homo Sapiens
ILMGVLKEV

SEQ ID NO: 1871 - protein, 9 aa, Homo Sapiens
ILMTLTVKV

SEQ ID NO: 1872 - protein, 9 aa, Homo Sapiens
ILNEIVNFV

SEQ ID NO: 1873 - protein, 9 aa, Homo Sapiens
ILNEVDISV

SEQ ID NO: 1874 - protein, 9 aa, Homo Sapiens
ILNKQEFFV

SEQ ID NO: 1875 - protein, 9 aa, Homo Sapiens
ILNNKIPEA

SEQ ID NO: 1876 - protein, 9 aa, Homo Sapiens
ILNPEVVTV

SEQ ID NO: 1877 - protein, 9 aa, Homo Sapiens
ILNPVTTKL

SEQ ID NO: 1878 - protein, 9 aa, Homo Sapiens
ILNPYNLFL

SEQ ID NO: 1879 - protein, 9 aa, Homo Sapiens
ILNSTTIEI

SEQ ID NO: 1880 - protein, 9 aa, Homo Sapiens
ILNTLNITV

SEQ ID NO: 1881 - protein, 9 aa, Homo Sapiens
ILNYVLVRV

SEQ ID NO: 1882 - protein, 9 aa, Homo Sapiens
ILPERFLAV

SEQ ID NO: 1883 - protein, 9 aa, Homo Sapiens
ILQDRLNQV

SEQ ID NO: 1884 - protein, 9 aa, Homo Sapiens
ILQEREYRL

SEQ ID NO: 1885 - protein, 9 aa, Homo Sapiens
ILQNKIDLV

SEQ ID NO: 1886 - protein, 9 aa, Homo Sapiens
ILQQHIATV

SEQ ID NO: 1887 - protein, 9 aa, Homo Sapiens
ILSEFSSKL

SEQ ID NO: 1888 - protein, 9 aa, Homo Sapiens
ILSEIKEAV

SEQ ID NO: 1889 - protein, 9 aa, Homo Sapiens
ILSELAPSL

SEQ ID NO: 1890 - protein, 9 aa, Homo Sapiens
ILSESLHSL

SEQ ID NO: 1891 - protein, 9 aa, Homo Sapiens
ILSEVQQAV

SEQ ID NO: 1892 - protein, 9 aa, Homo Sapiens
ILSGVIRSV

SEQ ID NO: 1893 - protein, 9 aa, Homo Sapiens
ILSPTVVSI

SEQ ID NO: 1894 - protein, 9 aa, Homo Sapiens
ILSQYITFV

SEQ ID NO: 1895 - protein, 9 aa, Homo Sapiens
ILSVFIPSL

SEQ ID NO: 1896 - protein, 9 aa, Homo Sapiens
ILTDITKGV

SEQ ID NO: 1897 - protein, 9 aa, Homo Sapiens
ILTEAIKAA

SEQ ID NO: 1898 - protein, 9 aa, Homo Sapiens
ILTESEIKL

SEQ ID NO: 1899 - protein, 9 aa, Homo Sapiens
ILTKILYLI

SEQ ID NO: 1900 - protein, 9 aa, Homo Sapiens
ILTNVVPKM

SEQ ID NO: 1901 - protein, 9 aa, Homo Sapiens
ILTSDVPQI

SEQ ID NO: 1902 - protein, 9 aa, Homo Sapiens
ILVDTVWAL

SEQ ID NO: 1903 - protein, 9 aa, Homo Sapiens
ILVDWLVQV

SEQ ID NO: 1904 - protein, 9 aa, Homo Sapiens
ILVGLLHMV

SEQ ID NO: 1905 - protein, 9 aa, Homo Sapiens
ILWDTLLRL

SEQ ID NO: 1906 - protein, 9 aa, Homo Sapiens
ILWEHLEIL

SEQ ID NO: 1907 - protein, 9 aa, Homo Sapiens
ILWETVPSM

SEQ ID NO: 1908 - protein, 9 aa, Homo Sapiens
ILWSEAIFL

SEQ ID NO: 1909 - protein, 9 aa, Homo Sapiens
ILWSHLELL

SEQ ID NO: 1910 - protein, 9 aa, Homo Sapiens
ILYDKLEKI

SEQ ID NO: 1911 - protein, 9 aa, Homo Sapiens
ILYGKIIHL

SEQ ID NO: 1912 - protein, 9 aa, Homo Sapiens
IMDATNILV

SEQ ID NO: 1913 - protein, 9 aa, Homo Sapiens
IMEDIILTL

SEQ ID NO: 1914 - protein, 9 aa, Homo Sapiens
IMFRGEVRL

SEQ ID NO: 1915 - protein, 9 aa, Homo Sapiens
IMLEALERV

SEQ ID NO: 1916 - protein, 9 aa, Homo Sapiens
IQHDLIFSL

SEQ ID NO: 1917 - protein, 9 aa, Homo Sapiens
IQIMKVEEI

SEQ ID NO: 1918 - protein, 9 aa, Homo Sapiens
IQVTKVTQV

SEQ ID NO: 1919 - protein, 9 aa, Homo Sapiens
IRKLPFQRL

SEQ ID NO: 1920 - protein, 9 aa, Homo Sapiens
ISLLVTIKI

SEQ ID NO: 1921 - protein, 9 aa, Homo Sapiens
ISTEVNPKL

SEQ ID NO: 1922 - protein, 9 aa, Homo Sapiens
ITTDVLYTI

SEQ ID NO: 1923 - protein, 9 aa, Homo Sapiens
IVIGVLHQL

SEQ ID NO: 1924 - protein, 9 aa, Homo Sapiens
IVMEHVVFL

SEQ ID NO: 1925 - protein, 9 aa, Homo Sapiens
IVMETVPVL

SEQ ID NO: 1926 - protein, 9 aa, Homo Sapiens
IVVDNVPQV

SEQ ID NO: 1927 - protein, 9 aa, Homo Sapiens
IVWNGPVGV

SEQ ID NO: 1928 - protein, 9 aa, Homo Sapiens
KIADFGWSV

SEQ ID NO: 1929 - protein, 9 aa, Homo Sapiens
KIAELLENV

SEQ ID NO: 1930 - protein, 9 aa, Homo Sapiens
KIAENVLHL

SEQ ID NO: 1931 - protein, 9 aa, Homo Sapiens
KIAPNTPQL

SEQ ID NO: 1932 - protein, 9 aa, Homo Sapiens
KILDYEVTL

SEQ ID NO: 1933 - protein, 9 aa, Homo Sapiens
KILEDVVGV

SEQ ID NO: 1934 - protein, 9 aa, Homo Sapiens
KILPDLNTV

SEQ ID NO: 1935 - protein, 9 aa, Homo Sapiens
KILPTLEAV

SEQ ID NO: 1936 - protein, 9 aa, Homo Sapiens
KILPVMVTL

SEQ ID NO: 1937 - protein, 9 aa, Homo Sapiens
KILQELPSV

SEQ ID NO: 1938 - protein, 9 aa, Homo Sapiens
KILSELFTV

SEQ ID NO: 1939 - protein, 9 aa, Homo Sapiens
KIMDYSLLL

SEQ ID NO: 1940 - protein, 9 aa, Homo Sapiens
KISEVVELL

SEQ ID NO: 1941 - protein, 9 aa, Homo Sapiens
KISTITPQI

SEQ ID NO: 1942 - protein, 9 aa, Homo Sapiens
KISVIVETV

SEQ ID NO: 1943 - protein, 9 aa, Homo Sapiens
KIVDFSYSV

SEQ ID NO: 1944 - protein, 9 aa, Homo Sapiens
KIYEGQVEV

SEQ ID NO: 1945 - protein, 9 aa, Homo Sapiens
KLAAVVNNL

SEQ ID NO: 1946 - protein, 9 aa, Homo Sapiens
KLAEALPSL

SEQ ID NO: 1947 - protein, 9 aa, Homo Sapiens
KLAEFIDFL

SEQ ID NO: 1948 - protein, 9 aa, Homo Sapiens
KLAEGVLDV

SEQ ID NO: 1949 - protein, 9 aa, Homo Sapiens
KLDAFVEGV

SEQ ID NO: 1950 - protein, 9 aa, Homo Sapiens
KLDDYVYYV

SEQ ID NO: 1951 - protein, 9 aa, Homo Sapiens
KLDHVVTII

SEQ ID NO: 1952 - protein, 9 aa, Homo Sapiens
KLDWHRFNL

SEQ ID NO: 1953 - protein, 9 aa, Homo Sapiens
KLEEIIHQI

SEQ ID NO: 1954 - protein, 9 aa, Homo Sapiens
KLFDAPLSI

SEQ ID NO: 1955 - protein, 9 aa, Homo Sapiens
KLFDRPQEL

SEQ ID NO: 1956 - protein, 9 aa, Homo Sapiens
KLFGETTLV

SEQ ID NO: 1957 - protein, 9 aa, Homo Sapiens
KLFGMIITI

SEQ ID NO: 1958 - protein, 9 aa, Homo Sapiens
KLFIGGLNV

SEQ ID NO: 1959 - protein, 9 aa, Homo Sapiens
KLFNEFIQL

SEQ ID NO: 1960 - protein, 9 aa, Homo Sapiens
KLFPFYFHI

SEQ ID NO: 1961 - protein, 9 aa, Homo Sapiens
KLFQGQLVL

SEQ ID NO: 1962 - protein, 9 aa, Homo Sapiens
KLFSELPLA

SEQ ID NO: 1963 - protein, 9 aa, Homo Sapiens
KLFSILSTV

SEQ ID NO: 1964 - protein, 9 aa, Homo Sapiens
KLGEIVTTI

SEQ ID NO: 1965 - protein, 9 aa, Homo Sapiens
KLGLKPLEV

SEQ ID NO: 1966 - protein, 9 aa, Homo Sapiens
KLHDINAQL

SEQ ID NO: 1967 - protein, 9 aa, Homo Sapiens
KLHGVNINV

SEQ ID NO: 1968 - protein, 9 aa, Homo Sapiens
KLIDYIYTA

SEQ ID NO: 1969 - protein, 9 aa, Homo Sapiens
KLIEELETL

SEQ ID NO: 1970 - protein, 9 aa, Homo Sapiens
KLIFSVEAV

SEQ ID NO: 1971 - protein, 9 aa, Homo Sapiens
KLILLITQV

SEQ ID NO: 1972 - protein, 9 aa, Homo Sapiens
KLIPLLLQL

SEQ ID NO: 1973 - protein, 9 aa, Homo Sapiens
KLIPQLPTL

SEQ ID NO: 1974 - protein, 9 aa, Homo Sapiens
KLIQESPTV

SEQ ID NO: 1975 - protein, 9 aa, Homo Sapiens
KLIQNVFEI

SEQ ID NO: 1976 - protein, 9 aa, Homo Sapiens
KLISELQKL

SEQ ID NO: 1977 - protein, 9 aa, Homo Sapiens
KLLAVIHEL

SEQ ID NO: 1978 - protein, 9 aa, Homo Sapiens
KLLDIRSYL

SEQ ID NO: 1979 - protein, 9 aa, Homo Sapiens
KLLDLQVRV

SEQ ID NO: 1980 - protein, 9 aa, Homo Sapiens
KLLDQMPSL

SEQ ID NO: 1981 - protein, 9 aa, Homo Sapiens
KLLDVVHPA

SEQ ID NO: 1982 - protein, 9 aa, Homo Sapiens
KLLEAEQSL

SEQ ID NO: 1983 - protein, 9 aa, Homo Sapiens
KLLEPVLLL

SEQ ID NO: 1984 - protein, 9 aa, Homo Sapiens
KLLEYIEEI

SEQ ID NO: 1985 - protein, 9 aa, Homo Sapiens
KLLFWVTEV

SEQ ID NO: 1986 - protein, 9 aa, Homo Sapiens
KLLGELHTL

SEQ ID NO: 1987 - protein, 9 aa, Homo Sapiens
KLLPETVTI

SEQ ID NO: 1988 - protein, 9 aa, Homo Sapiens
KLLPQLTYL

SEQ ID NO: 1989 - protein, 9 aa, Homo Sapiens
KLLPSVTEL

SEQ ID NO: 1990 - protein, 9 aa, Homo Sapiens
KLLQFYPSL

SEQ ID NO: 1991 - protein, 9 aa, Homo Sapiens
KLLSKFYEL

SEQ ID NO: 1992 - protein, 9 aa, Homo Sapiens
KLLTEVHAA

SEQ ID NO: 1993 - protein, 9 aa, Homo Sapiens
KLMAPDISL

SEQ ID NO: 1994 - protein, 9 aa, Homo Sapiens
KLMDEVAGI

SEQ ID NO: 1995 - protein, 9 aa, Homo Sapiens
KLMDQLEAL

SEQ ID NO: 1996 - protein, 9 aa, Homo Sapiens
KLMELLEEI

SEQ ID NO: 1997 - protein, 9 aa, Homo Sapiens
KLMELYERL

SEQ ID NO: 1998 - protein, 9 aa, Homo Sapiens
KLMTALVNV

SEQ ID NO: 1999 - protein, 9 aa, Homo Sapiens
KLNATNIEL

SEQ ID NO: 2000 - protein, 9 aa, Homo Sapiens
KLNPGIAYV

SEQ ID NO: 2001 - protein, 9 aa, Homo Sapiens
KLNPQQFEV

SEQ ID NO: 2002 - protein, 9 aa, Homo Sapiens
KLPEKWESV

SEQ ID NO: 2003 - protein, 9 aa, Homo Sapiens
KLQDGLLHI

SEQ ID NO: 2004 - protein, 9 aa, Homo Sapiens
KLQDQIFNL

SEQ ID NO: 2005 - protein, 9 aa, Homo Sapiens
KLQEFLQTL

SEQ ID NO: 2006 - protein, 9 aa, Homo Sapiens
KLQELNYNL

SEQ ID NO: 2007 - protein, 9 aa, Homo Sapiens
KLQEQIFHL

SEQ ID NO: 2008 - protein, 9 aa, Homo Sapiens
KLSDLQTQL

SEQ ID NO: 2009 - protein, 9 aa, Homo Sapiens
KLSEIPLTL

SEQ ID NO: 2010 - protein, 9 aa, Homo Sapiens
KLSFIIRTV

SEQ ID NO: 2011 - protein, 9 aa, Homo Sapiens
KLTDNLVAL

SEQ ID NO: 2012 - protein, 9 aa, Homo Sapiens
KLTENLVAL

SEQ ID NO: 2013 - protein, 9 aa, Homo Sapiens
KLTVVLEAV

SEQ ID NO: 2014 - protein, 9 aa, Homo Sapiens
KLVDCIIEV

SEQ ID NO: 2015 - protein, 9 aa, Homo Sapiens
KLVELPYTV

SEQ ID NO: 2016 - protein, 9 aa, Homo Sapiens
KLVKEVIAV

SEQ ID NO: 2017 - protein, 9 aa, Homo Sapiens
KLVNILVQL

SEQ ID NO: 2018 - protein, 9 aa, Homo Sapiens
KLWADRISL

SEQ ID NO: 2019 - protein, 9 aa, Homo Sapiens
KLWDLLYKL

SEQ ID NO: 2020 - protein, 9 aa, Homo Sapiens
KLWQTPLHV

SEQ ID NO: 2021 - protein, 9 aa, Homo Sapiens
KLWSETFDV

SEQ ID NO: 2022 - protein, 9 aa, Homo Sapiens
KLWSFFIYL

SEQ ID NO: 2023 - protein, 9 aa, Homo Sapiens
KLWSRSLKL

SEQ ID NO: 2024 - protein, 9 aa, Homo Sapiens
KLYDGFQYL

SEQ ID NO: 2025 - protein, 9 aa, Homo Sapiens
KLYELYLQL

SEQ ID NO: 2026 - protein, 9 aa, Homo Sapiens
KLYGKPIRV

SEQ ID NO: 2027 - protein, 9 aa, Homo Sapiens
KMADIEYRL

SEQ ID NO: 2028 - protein, 9 aa, Homo Sapiens
KMAEMLVEL

SEQ ID NO: 2029 - protein, 9 aa, Homo Sapiens
KMAPALRKV

SEQ ID NO: 2030 - protein, 9 aa, Homo Sapiens
KMDEVLYSI

SEQ ID NO: 2031 - protein, 9 aa, Homo Sapiens
KMDPIISRV

SEQ ID NO: 2032 - protein, 9 aa, Homo Sapiens
KMLEKLPEL

SEQ ID NO: 2033 - protein, 9 aa, Homo Sapiens
KMLGLTVSL

SEQ ID NO: 2034 - protein, 9 aa, Homo Sapiens
KMMDVTVTI

SEQ ID NO: 2035 - protein, 9 aa, Homo Sapiens
KMMELFIRL

SEQ ID NO: 2036 - protein, 9 aa, Homo Sapiens
KMVSIQITL

SEQ ID NO: 2037 - protein, 9 aa, Homo Sapiens
KMWEEAISL

SEQ ID NO: 2038 - protein, 9 aa, Homo Sapiens
KQVSDLISV

SEQ ID NO: 2039 - protein, 9 aa, Homo Sapiens
KTFNLIPAV

SEQ ID NO: 2040 - protein, 9 aa, Homo Sapiens
KTLEGEFSV

SEQ ID NO: 2041 - protein, 9 aa, Homo Sapiens
KVADLVLML

SEQ ID NO: 2042 - protein, 9 aa, Homo Sapiens
KVADYIPQL

SEQ ID NO: 2043 - protein, 9 aa, Homo Sapiens
KVAPAPAVV

SEQ ID NO: 2044 - protein, 9 aa, Homo Sapiens
KVIDEIYRV

SEQ ID NO: 2045 - protein, 9 aa, Homo Sapiens
KVIDYVPGI

SEQ ID NO: 2046 - protein, 9 aa, Homo Sapiens
KVIEINPYL

SEQ ID NO: 2047 - protein, 9 aa, Homo Sapiens
KVLDFEHFL

SEQ ID NO: 2048 - protein, 9 aa, Homo Sapiens
KVLDLKINL

SEQ ID NO: 2049 - protein, 9 aa, Homo Sapiens
KVLDLRINL

SEQ ID NO: 2050 - protein, 9 aa, Homo Sapiens
KVLERVNAV

SEQ ID NO: 2051 - protein, 9 aa, Homo Sapiens
KVLETLVTV

SEQ ID NO: 2052 - protein, 9 aa, Homo Sapiens
KVLGIVVGV

SEQ ID NO: 2053 - protein, 9 aa, Homo Sapiens
KVLNKVITV

SEQ ID NO: 2054 - protein, 9 aa, Homo Sapiens
KVLSKEFHL

SEQ ID NO: 2055 - protein, 9 aa, Homo Sapiens
KVMELLVHL

SEQ ID NO: 2056 - protein, 9 aa, Homo Sapiens
KVWGNVVTV

SEQ ID NO: 2057 - protein, 9 aa, Homo Sapiens
LASVIIPTI

SEQ ID NO: 2058 - protein, 9 aa, Homo Sapiens
LDTNADKQL

SEQ ID NO: 2059 - protein, 9 aa, Homo Sapiens
LGPPPPLRV

SEQ ID NO: 2060 - protein, 9 aa, Homo Sapiens
LIAGTAVVG

SEQ ID NO: 2061 - protein, 9 aa, Homo Sapiens
LIDEQILCV

SEQ ID NO: 2062 - protein, 9 aa, Homo Sapiens
LIDPNTLQV

SEQ ID NO: 2063 - protein, 9 aa, Homo Sapiens
LIFFYIIYL

SEQ ID NO: 2064 - protein, 9 aa, Homo Sapiens
LIGEFLEKV

SEQ ID NO: 2065 - protein, 9 aa, Homo Sapiens
LIGSLIPTI

SEQ ID NO: 2066 - protein, 9 aa, Homo Sapiens
LILGKLHYV

SEQ ID NO: 2067 - protein, 9 aa, Homo Sapiens
LIQLGVLPA

SEQ ID NO: 2068 - protein, 9 aa, Homo Sapiens
LISESFLTV

SEQ ID NO: 2069 - protein, 9 aa, Homo Sapiens
LISQIVSSI

SEQ ID NO: 2070 - protein, 9 aa, Homo Sapiens
LIWPLLSTV

SEQ ID NO: 2071 - protein, 9 aa, Homo Sapiens
LIYSGKLLL

SEQ ID NO: 2072 - protein, 9 aa, Homo Sapiens
LLADELITV

SEQ ID NO: 2073 - protein, 9 aa, Homo Sapiens
LLADLLHNV

SEQ ID NO: 2074 - protein, 9 aa, Homo Sapiens
LLADVETFV

SEQ ID NO: 2075 - protein, 9 aa, Homo Sapiens
LLAEAKYYL

SEQ ID NO: 2076 - protein, 9 aa, Homo Sapiens
LLAEKIYKI

SEQ ID NO: 2077 - protein, 9 aa, Homo Sapiens
LLAEKVEEI

SEQ ID NO: 2078 - protein, 9 aa, Homo Sapiens
LLAEKVEQL

SEQ ID NO: 2079 - protein, 9 aa, Homo Sapiens
LLAELLTHL

SEQ ID NO: 2080 - protein, 9 aa, Homo Sapiens
LLAELPASV

SEQ ID NO: 2081 - protein, 9 aa, Homo Sapiens
LLAEPVPGI

SEQ ID NO: 2082 - protein, 9 aa, Homo Sapiens
LLAEQGYEV

SEQ ID NO: 2083 - protein, 9 aa, Homo Sapiens
LLAESVTEV

SEQ ID NO: 2084 - protein, 9 aa, Homo Sapiens
LLAETHYQL

SEQ ID NO: 2085 - protein, 9 aa, Homo Sapiens
LLAEVIENL

SEQ ID NO: 2086 - protein, 9 aa, Homo Sapiens
LLAGLHVLL

SEQ ID NO: 2087 - protein, 9 aa, Homo Sapiens
LLAHVTLEL

SEQ ID NO: 2088 - protein, 9 aa, Homo Sapiens
LLANKVPAA

SEQ ID NO: 2089 - protein, 9 aa, Homo Sapiens
LLAPIRVLL

SEQ ID NO: 2090 - protein, 9 aa, Homo Sapiens
LLAPIVFVL

SEQ ID NO: 2091 - protein, 9 aa, Homo Sapiens
LLAPKLNEA

SEQ ID NO: 2092 - protein, 9 aa, Homo Sapiens
LLASEVPQL

SEQ ID NO: 2093 - protein, 9 aa, Homo Sapiens
LLATEVVTV

SEQ ID NO: 2094 - protein, 9 aa, Homo Sapiens
LLATVLQAV

SEQ ID NO: 2095 - protein, 9 aa, Homo Sapiens
LLDATQHTL

SEQ ID NO: 2096 - protein, 9 aa, Homo Sapiens
LLDDSLVSI

SEQ ID NO: 2097 - protein, 9 aa, Homo Sapiens
LLDDTTVTL

SEQ ID NO: 2098 - protein, 9 aa, Homo Sapiens
LLDGCRIYL

SEQ ID NO: 2099 - protein, 9 aa, Homo Sapiens
LLDHAPPEI

SEQ ID NO: 2100 - protein, 9 aa, Homo Sapiens
LLDHVLLTL

SEQ ID NO: 2101 - protein, 9 aa, Homo Sapiens
LLDIIKSTV

SEQ ID NO: 2102 - protein, 9 aa, Homo Sapiens
LLDLHSYLL

SEQ ID NO: 2103 - protein, 9 aa, Homo Sapiens
LLDNTDIHL

SEQ ID NO: 2104 - protein, 9 aa, Homo Sapiens
LLDPSVFHV

SEQ ID NO: 2105 - protein, 9 aa, Homo Sapiens
LLDRFLATV

SEQ ID NO: 2106 - protein, 9 aa, Homo Sapiens
LLDSAPLNV

SEQ ID NO: 2107 - protein, 9 aa, Homo Sapiens
LLDSAVYYL

SEQ ID NO: 2108 - protein, 9 aa, Homo Sapiens
LLDTVLVNL

SEQ ID NO: 2109 - protein, 9 aa, Homo Sapiens
LLDTVTMQV

SEQ ID NO: 2110 - protein, 9 aa, Homo Sapiens
LLDVPTAAV

SEQ ID NO: 2111 - protein, 9 aa, Homo Sapiens
LLDVTPLSL

SEQ ID NO: 2112 - protein, 9 aa, Homo Sapiens
LLDVVHPAA

SEQ ID NO: 2113 - protein, 9 aa, Homo Sapiens
LLEGSEIYL

SEQ ID NO: 2114 - protein, 9 aa, Homo Sapiens
LLEPFVHQV

SEQ ID NO: 2115 - protein, 9 aa, Homo Sapiens
LLFDEYHKL

SEQ ID NO: 2116 - protein, 9 aa, Homo Sapiens
LLFDQAYQM

SEQ ID NO: 2117 - protein, 9 aa, Homo Sapiens
LLFDRPMHV

SEQ ID NO: 2118 - protein, 9 aa, Homo Sapiens
LLFDSVIHL

SEQ ID NO: 2119 - protein, 9 aa, Homo Sapiens
LLFEGIARI

SEQ ID NO: 2120 - protein, 9 aa, Homo Sapiens
LLFPGKVTV

SEQ ID NO: 2121 - protein, 9 aa, Homo Sapiens
LLFTWEELI

SEQ ID NO: 2122 - protein, 9 aa, Homo Sapiens
LLGGDVVSV

SEQ ID NO: 2123 - protein, 9 aa, Homo Sapiens
LLGPKPFPL

SEQ ID NO: 2124 - protein, 9 aa, Homo Sapiens
LLGPPPVGV

SEQ ID NO: 2125 - protein, 9 aa, Homo Sapiens
LLGPRLVLA

SEQ ID NO: 2126 - protein, 9 aa, Homo Sapiens
LLHDGIPVV

SEQ ID NO: 2127 - protein, 9 aa, Homo Sapiens
LLHSFVDSV

SEQ ID NO: 2128 - protein, 9 aa, Homo Sapiens
LLIDHRFLL

SEQ ID NO: 2129 - protein, 9 aa, Homo Sapiens
LLIERILLL

SEQ ID NO: 2130 - protein, 9 aa, Homo Sapiens
LLIGATMQV

SEQ ID NO: 2131 - protein, 9 aa, Homo Sapiens
LLIGHLERV

SEQ ID NO: 2132 - protein, 9 aa, Homo Sapiens
LLIGLLKSL

SEQ ID NO: 2133 - protein, 9 aa, Homo Sapiens
LLIGTDVSL

SEQ ID NO: 2134 - protein, 9 aa, Homo Sapiens
LLIKQVVEV

SEQ ID NO: 2135 - protein, 9 aa, Homo Sapiens
LLIPFTIFM

SEQ ID NO: 2136 - protein, 9 aa, Homo Sapiens
LLIPGLATA

SEQ ID NO: 2137 - protein, 9 aa, Homo Sapiens
LLIPIHLEV

SEQ ID NO: 2138 - protein, 9 aa, Homo Sapiens
LLITGTLHQ

SEQ ID NO: 2139 - protein, 9 aa, Homo Sapiens
LLLAAPAQA

SEQ ID NO: 2140 - protein, 9 aa, Homo Sapiens
LLLAATPGL

SEQ ID NO: 2141 - protein, 9 aa, Homo Sapiens
LLLAHIIAL

SEQ ID NO: 2142 - protein, 9 aa, Homo Sapiens
LLLDAKLLV

SEQ ID NO: 2143 - protein, 9 aa, Homo Sapiens
LLLDIMPGL

SEQ ID NO: 2144 - protein, 9 aa, Homo Sapiens
LLLDKPETV

SEQ ID NO: 2145 - protein, 9 aa, Homo Sapiens
LLLDMQNRL

SEQ ID NO: 2146 - protein, 9 aa, Homo Sapiens
LLLDRIASV

SEQ ID NO: 2147 - protein, 9 aa, Homo Sapiens
LLLDVPTAA

SEQ ID NO: 2148 - protein, 9 aa, Homo Sapiens
LLLEAVWHL

SEQ ID NO: 2149 - protein, 9 aa, Homo Sapiens
LLLEILHEI

SEQ ID NO: 2150 - protein, 9 aa, Homo Sapiens
LLLGERVAL

SEQ ID NO: 2151 - protein, 9 aa, Homo Sapiens
LLLGQLVEV

SEQ ID NO: 2152 - protein, 9 aa, Homo Sapiens
LLLKGVEAV

SEQ ID NO: 2153 - protein, 9 aa, Homo Sapiens
LLLNAVLTV

SEQ ID NO: 2154 - protein, 9 aa, Homo Sapiens
LLLNELPSV

SEQ ID NO: 2155 - protein, 9 aa, Homo Sapiens
LLLPGLETV

SEQ ID NO: 2156 - protein, 9 aa, Homo Sapiens
LLLPGSHYL

SEQ ID NO: 2157 - protein, 9 aa, Homo Sapiens
LLLPILVTV

SEQ ID NO: 2158 - protein, 9 aa, Homo Sapiens
LLLSLLPAL

SEQ ID NO: 2159 - protein, 9 aa, Homo Sapiens
LLLSVLPQL

SEQ ID NO: 2160 - protein, 9 aa, Homo Sapiens
LLMATILHL

SEQ ID NO: 2161 - protein, 9 aa, Homo Sapiens
LLMDRVDEM

SEQ ID NO: 2162 - protein, 9 aa, Homo Sapiens
LLMEEFAFL

SEQ ID NO: 2163 - protein, 9 aa, Homo Sapiens
LLMEHIFKL

SEQ ID NO: 2164 - protein, 9 aa, Homo Sapiens
LLMEHIQEI

SEQ ID NO: 2165 - protein, 9 aa, Homo Sapiens
LLMVLSPRL

SEQ ID NO: 2166 - protein, 9 aa, Homo Sapiens
LLNEQELQL

SEQ ID NO: 2167 - protein, 9 aa, Homo Sapiens
LLNKSIIRV

SEQ ID NO: 2168 - protein, 9 aa, Homo Sapiens
LLNPVVEFV

SEQ ID NO: 2169 - protein, 9 aa, Homo Sapiens
LLPDEIADV

SEQ ID NO: 2170 - protein, 9 aa, Homo Sapiens
LLPDHTYSV

SEQ ID NO: 2171 - protein, 9 aa, Homo Sapiens
LLPDIVTCV

SEQ ID NO: 2172 - protein, 9 aa, Homo Sapiens
LLPEGPPAI

SEQ ID NO: 2173 - protein, 9 aa, Homo Sapiens
LLPIKTVGV

SEQ ID NO: 2174 - protein, 9 aa, Homo Sapiens
LLPNAVYKV

SEQ ID NO: 2175 - protein, 9 aa, Homo Sapiens
LLPPAPPHA

SEQ ID NO: 2176 - protein, 9 aa, Homo Sapiens
LLPPPPCPA

SEQ ID NO: 2177 - protein, 9 aa, Homo Sapiens
LLPPVTLAA

SEQ ID NO: 2178 - protein, 9 aa, Homo Sapiens
LLPTGVFQV

SEQ ID NO: 2179 - protein, 9 aa, Homo Sapiens
LLQDHPWLL

SEQ ID NO: 2180 - protein, 9 aa, Homo Sapiens
LLQDIILQV

SEQ ID NO: 2181 - protein, 9 aa, Homo Sapiens
LLQDKQFEL

SEQ ID NO: 2182 - protein, 9 aa, Homo Sapiens
LLQDRLVSV

SEQ ID NO: 2183 - protein, 9 aa, Homo Sapiens
LLQESLAQA

SEQ ID NO: 2184 - protein, 9 aa, Homo Sapiens
LLQEVEHQL

SEQ ID NO: 2185 - protein, 9 aa, Homo Sapiens
LLQNNLPAV

SEQ ID NO: 2186 - protein, 9 aa, Homo Sapiens
LLQQELTEA

SEQ ID NO: 2187 - protein, 9 aa, Homo Sapiens
LLREKVEFL

SEQ ID NO: 2188 - protein, 9 aa, Homo Sapiens
LLSAEPVPA

SEQ ID NO: 2189 - protein, 9 aa, Homo Sapiens
LLSDTKLEL

SEQ ID NO: 2190 - protein, 9 aa, Homo Sapiens
LLSEDFVSV

SEQ ID NO: 2191 - protein, 9 aa, Homo Sapiens
LLSEHVIAI

SEQ ID NO: 2192 - protein, 9 aa, Homo Sapiens
LLSGFVPLL

SEQ ID NO: 2193 - protein, 9 aa, Homo Sapiens
LLSGQLPTI

SEQ ID NO: 2194 - protein, 9 aa, Homo Sapiens
LLSHVIVAL

SEQ ID NO: 2195 - protein, 9 aa, Homo Sapiens
LLSKVLIYL

SEQ ID NO: 2196 - protein, 9 aa, Homo Sapiens
LLSPVVPQI

SEQ ID NO: 2197 - protein, 9 aa, Homo Sapiens
LLSSIVEEL

SEQ ID NO: 2198 - protein, 9 aa, Homo Sapiens
LLSSVSIAL

SEQ ID NO: 2199 - protein, 9 aa, Homo Sapiens
LLSSVTAEL

SEQ ID NO: 2200 - protein, 9 aa, Homo Sapiens
LLTDIKVKL

SEQ ID NO: 2201 - protein, 9 aa, Homo Sapiens
LLTDILVFL

SEQ ID NO: 2202 - protein, 9 aa, Homo Sapiens
LLTEIRAVV

SEQ ID NO: 2203 - protein, 9 aa, Homo Sapiens
LLTLVPPLV

SEQ ID NO: 2204 - protein, 9 aa, Homo Sapiens
LLVDVEPKV

SEQ ID NO: 2205 - protein, 9 aa, Homo Sapiens
LLVGFVHYL

SEQ ID NO: 2206 - protein, 9 aa, Homo Sapiens
LLWDKIHKL

SEQ ID NO: 2207 - protein, 9 aa, Homo Sapiens
LLWERVEKL

SEQ ID NO: 2208 - protein, 9 aa, Homo Sapiens
LLWGDLIWL

SEQ ID NO: 2209 - protein, 9 aa, Homo Sapiens
LLWPGAALL

SEQ ID NO: 2210 - protein, 9 aa, Homo Sapiens
LLWWLQPRL

SEQ ID NO: 2211 - protein, 9 aa, Homo Sapiens
LLYDNVPGA

SEQ ID NO: 2212 - protein, 9 aa, Homo Sapiens
LLYDQPLQV

SEQ ID NO: 2213 - protein, 9 aa, Homo Sapiens
LLYEKGISL

SEQ ID NO: 2214 - protein, 9 aa, Homo Sapiens
LLYGHTVTV

SEQ ID NO: 2215 - protein, 9 aa, Homo Sapiens
LLYGKYVSV

SEQ ID NO: 2216 - protein, 9 aa, Homo Sapiens
LLYGSIPKA

SEQ ID NO: 2217 - protein, 9 aa, Homo Sapiens
LLYHYWIAV

SEQ ID NO: 2218 - protein, 9 aa, Homo Sapiens
LLYVNVIGL

SEQ ID NO: 2219 - protein, 9 aa, Homo Sapiens
LLYYGVVTL

SEQ ID NO: 2220 - protein, 9 aa, Homo Sapiens
LLYYQTNYL

SEQ ID NO: 2221 - protein, 9 aa, Homo Sapiens
LMAAEIPNI

SEQ ID NO: 2222 - protein, 9 aa, Homo Sapiens
LMNAVVQTV

SEQ ID NO: 2223 - protein, 9 aa, Homo Sapiens
LMTDVLVFL

SEQ ID NO: 2224 - protein, 9 aa, Homo Sapiens
LMVDHVTEV

SEQ ID NO: 2225 - protein, 9 aa, Homo Sapiens
LMYPYIFHV

SEQ ID NO: 2226 - protein, 9 aa, Homo Sapiens
LPINGNGKQ

SEQ ID NO: 2227 - protein, 9 aa, Homo Sapiens
LPLVVVLTI

SEQ ID NO: 2228 - protein, 9 aa, Homo Sapiens
LQFDGIHVV

SEQ ID NO: 2229 - protein, 9 aa, Homo Sapiens
LQLDKEFQL

SEQ ID NO: 2230 - protein, 9 aa, Homo Sapiens
LQWDKVLRL

SEQ ID NO: 2231 - protein, 9 aa, Homo Sapiens
LSEVLELVL

SEQ ID NO: 2232 - protein, 9 aa, Homo Sapiens
LSLDALLTV

SEQ ID NO: 2233 - protein, 9 aa, Homo Sapiens
LSLENLEKI

SEQ ID NO: 2234 - protein, 9 aa, Homo Sapiens
LTFPVRDGV

SEQ ID NO: 2235 - protein, 9 aa, Homo Sapiens
LTRQLVHIF

SEQ ID NO: 2236 - protein, 9 aa, Homo Sapiens
LVLPVLVFL

SEQ ID NO: 2237 - protein, 9 aa, Homo Sapiens
MIRKEELEI

SEQ ID NO: 2238 - protein, 9 aa, Homo Sapiens
MITDVVPEV

SEQ ID NO: 2239 - protein, 9 aa, Homo Sapiens
MIWKGLIVL

SEQ ID NO: 2240 - protein, 9 aa, Homo Sapiens
MLADIPVTI

SEQ ID NO: 2241 - protein, 9 aa, Homo Sapiens
MLAEKLPNL

SEQ ID NO: 2242 - protein, 9 aa, Homo Sapiens
MLAGFITTL

SEQ ID NO: 2243 - protein, 9 aa, Homo Sapiens
MLANDIARL

SEQ ID NO: 2244 - protein, 9 aa, Homo Sapiens
MLATRVFSL

SEQ ID NO: 2245 - protein, 9 aa, Homo Sapiens
MLAWINESL

SEQ ID NO: 2246 - protein, 9 aa, Homo Sapiens
MLDEILLQL

SEQ ID NO: 2247 - protein, 9 aa, Homo Sapiens
MLDMSVPAV

SEQ ID NO: 2248 - protein, 9 aa, Homo Sapiens
MLDSLRIYL

SEQ ID NO: 2249 - protein, 9 aa, Homo Sapiens
MLFGHPLLV

SEQ ID NO: 2250 - protein, 9 aa, Homo Sapiens
MLFPGSIAL

SEQ ID NO: 2251 - protein, 9 aa, Homo Sapiens
MLHSVTLFL

SEQ ID NO: 2252 - protein, 9 aa, Homo Sapiens
MLIGEIFEL

SEQ ID NO: 2253 - protein, 9 aa, Homo Sapiens
MLLATLLLL

SEQ ID NO: 2254 - protein, 9 aa, Homo Sapiens
MLLDFIQHI

SEQ ID NO: 2255 - protein, 9 aa, Homo Sapiens
MLLSSLVSL

SEQ ID NO: 2256 - protein, 9 aa, Homo Sapiens
MLLSVPLLL

SEQ ID NO: 2257 - protein, 9 aa, Homo Sapiens
MLLTKLPTI

SEQ ID NO: 2258 - protein, 9 aa, Homo Sapiens
MLNEHDFEV

SEQ ID NO: 2259 - protein, 9 aa, Homo Sapiens
MLPPPPLTA

SEQ ID NO: 2260 - protein, 9 aa, Homo Sapiens
MLQDSIHVV

SEQ ID NO: 2261 - protein, 9 aa, Homo Sapiens
MLSPFISSV

SEQ ID NO: 2262 - protein, 9 aa, Homo Sapiens
MLTGISPFL

SEQ ID NO: 2263 - protein, 9 aa, Homo Sapiens
MLYDIVPVV

SEQ ID NO: 2264 - protein, 9 aa, Homo Sapiens
MLYEKLLTA

SEQ ID NO: 2265 - protein, 9 aa, Homo Sapiens
MMLDDLLQL

SEQ ID NO: 2266 - protein, 9 aa, Homo Sapiens
MMMALLVPL

SEQ ID NO: 2267 - protein, 9 aa, Homo Sapiens
MTLGQIYYL

SEQ ID NO: 2268 - protein, 9 aa, Homo Sapiens
MVDGTLLLL

SEQ ID NO: 2269 - protein, 9 aa, Homo Sapiens
MVIALILFL

SEQ ID NO: 2270 - protein, 9 aa, Homo Sapiens
MVLPLLIFV

SEQ ID NO: 2271 - protein, 9 aa, Homo Sapiens
NIFPYPVGV

SEQ ID NO: 2272 - protein, 9 aa, Homo Sapiens
NIIELVHQV

SEQ ID NO: 2273 - protein, 9 aa, Homo Sapiens
NILDFVVVV

SEQ ID NO: 2274 - protein, 9 aa, Homo Sapiens
NIMDFKLFL

SEQ ID NO: 2275 - protein, 9 aa, Homo Sapiens
NIMDIKIGL

SEQ ID NO: 2276 - protein, 9 aa, Homo Sapiens
NIPLLPMEQ

SEQ ID NO: 2277 - protein, 9 aa, Homo Sapiens
NIVEKLREV

SEQ ID NO: 2278 - protein, 9 aa, Homo Sapiens
NIWNINLQL

SEQ ID NO: 2279 - protein, 9 aa, Homo Sapiens
NLAEKLIGV

SEQ ID NO: 2280 - protein, 9 aa, Homo Sapiens
NLAENISRV

SEQ ID NO: 2281 - protein, 9 aa, Homo Sapiens
NLAEVVERV

SEQ ID NO: 2282 - protein, 9 aa, Homo Sapiens
NLANVVLLL

SEQ ID NO: 2283 - protein, 9 aa, Homo Sapiens
NLASFIEQV

SEQ ID NO: 2284 - protein, 9 aa, Homo Sapiens
NLDFNPPHV

SEQ ID NO: 2285 - protein, 9 aa, Homo Sapiens
NLDNPIQTV

SEQ ID NO: 2286 - protein, 9 aa, Homo Sapiens
NLDPAVHEV

SEQ ID NO: 2287 - protein, 9 aa, Homo Sapiens
NLFAQTYGL

SEQ ID NO: 2288 - protein, 9 aa, Homo Sapiens
NLFEWHFTV

SEQ ID NO: 2289 - protein, 9 aa, Homo Sapiens
NLFHYLTEV

SEQ ID NO: 2290 - protein, 9 aa, Homo Sapiens
NLFKLEVRL

SEQ ID NO: 2291 - protein, 9 aa, Homo Sapiens
NLFNKYPAL

SEQ ID NO: 2292 - protein, 9 aa, Homo Sapiens
NLFNRYPAL

SEQ ID NO: 2293 - protein, 9 aa, Homo Sapiens
NLFSREFRA

SEQ ID NO: 2294 - protein, 9 aa, Homo Sapiens
NLGDFLIFL

SEQ ID NO: 2295 - protein, 9 aa, Homo Sapiens
NLIANVLYL

SEQ ID NO: 2296 - protein, 9 aa, Homo Sapiens
NLIEVNEEV

SEQ ID NO: 2297 - protein, 9 aa, Homo Sapiens
NLISALEEA

SEQ ID NO: 2298 - protein, 9 aa, Homo Sapiens
NLLDLLTEV

SEQ ID NO: 2299 - protein, 9 aa, Homo Sapiens
NLLDPPPEV

SEQ ID NO: 2300 - protein, 9 aa, Homo Sapiens
NLLEALLEL

SEQ ID NO: 2301 - protein, 9 aa, Homo Sapiens
NLLEEVFHL

SEQ ID NO: 2302 - protein, 9 aa, Homo Sapiens
NLLEIAPHL

SEQ ID NO: 2303 - protein, 9 aa, Homo Sapiens
NLLELFVQL

SEQ ID NO: 2304 - protein, 9 aa, Homo Sapiens
NLLEQFILL

SEQ ID NO: 2305 - protein, 9 aa, Homo Sapiens
NLLGMIFSM

SEQ ID NO: 2306 - protein, 9 aa, Homo Sapiens
NLLKLIAEV

SEQ ID NO: 2307 - protein, 9 aa, Homo Sapiens
NLLPKLHIV

SEQ ID NO: 2308 - protein, 9 aa, Homo Sapiens
NLLRRLWVV

SEQ ID NO: 2309 - protein, 9 aa, Homo Sapiens
NLLTHIENV

SEQ ID NO: 2310 - protein, 9 aa, Homo Sapiens
NLMELLIMI

SEQ ID NO: 2311 - protein, 9 aa, Homo Sapiens
NLMEMVAQL

SEQ ID NO: 2312 - protein, 9 aa, Homo Sapiens
NLNSIVPSV

SEQ ID NO: 2313 - protein, 9 aa, Homo Sapiens
NLQVTQPTV

SEQ ID NO: 2314 - protein, 9 aa, Homo Sapiens
NLVAIPVYV

SEQ ID NO: 2315 - protein, 9 aa, Homo Sapiens
NLVEKTPAL

SEQ ID NO: 2316 - protein, 9 aa, Homo Sapiens
NLVPMIIHL

SEQ ID NO: 2317 - protein, 9 aa, Homo Sapiens
NLVRELLAV

SEQ ID NO: 2318 - protein, 9 aa, Homo Sapiens
NLWSLVAKV

SEQ ID NO: 2319 - protein, 9 aa, Homo Sapiens
NLYPFVKTV

SEQ ID NO: 2320 - protein, 9 aa, Homo Sapiens
NMLEAVHTI

SEQ ID NO: 2321 - protein, 9 aa, Homo Sapiens
NMLNLAVHL

SEQ ID NO: 2322 - protein, 9 aa, Homo Sapiens
NMLPQIFRV

SEQ ID NO: 2323 - protein, 9 aa, Homo Sapiens
NMVAKVDEV

SEQ ID NO: 2324 - protein, 9 aa, Homo Sapiens
NMVDIIHSV

SEQ ID NO: 2325 - protein, 9 aa, Homo Sapiens
NMYGKVVTV

SEQ ID NO: 2326 - protein, 9 aa, Homo Sapiens
NQFPGFKEV

SEQ ID NO: 2327 - protein, 9 aa, Homo Sapiens
NQIDFIICL

SEQ ID NO: 2328 - protein, 9 aa, Homo Sapiens
PLGPAPVSV

SEQ ID NO: 2329 - protein, 9 aa, Homo Sapiens
PLLDLHIEL

SEQ ID NO: 2330 - protein, 9 aa, Homo Sapiens
PRFIKIIEV

SEQ ID NO: 2331 - protein, 9 aa, Homo Sapiens
QEQNQEQPI

SEQ ID NO: 2332 - protein, 9 aa, Homo Sapiens
QILEAIPQV

SEQ ID NO: 2333 - protein, 9 aa, Homo Sapiens
QIMDYLLCL

SEQ ID NO: 2334 - protein, 9 aa, Homo Sapiens
QLDDLKVEL

SEQ ID NO: 2335 - protein, 9 aa, Homo Sapiens
QLDTVNFFL

SEQ ID NO: 2336 - protein, 9 aa, Homo Sapiens
QLFEDLVYL

SEQ ID NO: 2337 - protein, 9 aa, Homo Sapiens
QLFEKQLQL

SEQ ID NO: 2338 - protein, 9 aa, Homo Sapiens
QLFQGVLTL

SEQ ID NO: 2339 - protein, 9 aa, Homo Sapiens
QLFYTKIFL

SEQ ID NO: 2340 - protein, 9 aa, Homo Sapiens
QLGDFLIKV

SEQ ID NO: 2341 - protein, 9 aa, Homo Sapiens
QLIDIIHTA

SEQ ID NO: 2342 - protein, 9 aa, Homo Sapiens
QLIDKVWQL

SEQ ID NO: 2343 - protein, 9 aa, Homo Sapiens
QLIDYERQL

SEQ ID NO: 2344 - protein, 9 aa, Homo Sapiens
QLINLSILL

SEQ ID NO: 2345 - protein, 9 aa, Homo Sapiens
QLIPKLIFL

SEQ ID NO: 2346 - protein, 9 aa, Homo Sapiens
QLLAILPEA

SEQ ID NO: 2347 - protein, 9 aa, Homo Sapiens
QLLDLMHTL

SEQ ID NO: 2348 - protein, 9 aa, Homo Sapiens
QLLDQVEQI

SEQ ID NO: 2349 - protein, 9 aa, Homo Sapiens
QLLEKVIEL

SEQ ID NO: 2350 - protein, 9 aa, Homo Sapiens
QLLEKVPTL

SEQ ID NO: 2351 - protein, 9 aa, Homo Sapiens
QLLGGVRAV

SEQ ID NO: 2352 - protein, 9 aa, Homo Sapiens
QLLGLIQRV

SEQ ID NO: 2353 - protein, 9 aa, Homo Sapiens
QLLPLIVNL

SEQ ID NO: 2354 - protein, 9 aa, Homo Sapiens
QLLPNLRAV

SEQ ID NO: 2355 - protein, 9 aa, Homo Sapiens
QLLPNVTTV

SEQ ID NO: 2356 - protein, 9 aa, Homo Sapiens
QLLQHVQAV

SEQ ID NO: 2357 - protein, 9 aa, Homo Sapiens
QLLTAIVKL

SEQ ID NO: 2358 - protein, 9 aa, Homo Sapiens
QLMEQVAQL

SEQ ID NO: 2359 - protein, 9 aa, Homo Sapiens
QLMPLPVKV

SEQ ID NO: 2360 - protein, 9 aa, Homo Sapiens
QLMQQMIQL

SEQ ID NO: 2361 - protein, 9 aa, Homo Sapiens
QLNDVAHLV

SEQ ID NO: 2362 - protein, 9 aa, Homo Sapiens
QLNEKVAQL

SEQ ID NO: 2363 - protein, 9 aa, Homo Sapiens
QLPNFAFSV

SEQ ID NO: 2364 - protein, 9 aa, Homo Sapiens
QLQDFDWQV

SEQ ID NO: 2365 - protein, 9 aa, Homo Sapiens
QLSDVAEKL

SEQ ID NO: 2366 - protein, 9 aa, Homo Sapiens
QLSEVFIQL

SEQ ID NO: 2367 - protein, 9 aa, Homo Sapiens
QLSPVLLYL

SEQ ID NO: 2368 - protein, 9 aa, Homo Sapiens
QLSQIVPKV

SEQ ID NO: 2369 - protein, 9 aa, Homo Sapiens
QLSTVITQV

SEQ ID NO: 2370 - protein, 9 aa, Homo Sapiens
QLTDLNVQL

SEQ ID NO: 2371 - protein, 9 aa, Homo Sapiens
QLTEMLPSI

SEQ ID NO: 2372 - protein, 9 aa, Homo Sapiens
QLTNVILHL

SEQ ID NO: 2373 - protein, 9 aa, Homo Sapiens
QLVDFQWKL

SEQ ID NO: 2374 - protein, 9 aa, Homo Sapiens
QLVDIIEKV

SEQ ID NO: 2375 - protein, 9 aa, Homo Sapiens
QLVDTTVEL

SEQ ID NO: 2376 - protein, 9 aa, Homo Sapiens
QLVEQVEQI

SEQ ID NO: 2377 - protein, 9 aa, Homo Sapiens
QLVPALAKV

SEQ ID NO: 2378 - protein, 9 aa, Homo Sapiens
QLVQRVASV

SEQ ID NO: 2379 - protein, 9 aa, Homo Sapiens
QLVRDLLEV

SEQ ID NO: 2380 - protein, 9 aa, Homo Sapiens
QLWFREFFL

SEQ ID NO: 2381 - protein, 9 aa, Homo Sapiens
QLWHFILEL

SEQ ID NO: 2382 - protein, 9 aa, Homo Sapiens
QLWNNYFHL

SEQ ID NO: 2383 - protein, 9 aa, Homo Sapiens
QLYLKLWNL

SEQ ID NO: 2384 - protein, 9 aa, Homo Sapiens
QLYNQIIKL

SEQ ID NO: 2385 - protein, 9 aa, Homo Sapiens
QLYNSLIFL

SEQ ID NO: 2386 - protein, 9 aa, Homo Sapiens
QLYQLFHYL

SEQ ID NO: 2387 - protein, 9 aa, Homo Sapiens
QLYSVDVTL

SEQ ID NO: 2388 - protein, 9 aa, Homo Sapiens
QMFQYFITV

SEQ ID NO: 2389 - protein, 9 aa, Homo Sapiens
QMISRIEYI

SEQ ID NO: 2390 - protein, 9 aa, Homo Sapiens
QMISRIEYV

SEQ ID NO: 2391 - protein, 9 aa, Homo Sapiens
QMLELITRL

SEQ ID NO: 2392 - protein, 9 aa, Homo Sapiens
QQIGKVVQV

SEQ ID NO: 2393 - protein, 9 aa, Homo Sapiens
QVIPVLPQV

SEQ ID NO: 2394 - protein, 9 aa, Homo Sapiens
RDLLLWLLL

SEQ ID NO: 2395 - protein, 9 aa, Homo Sapiens
RIADLSYTV

SEQ ID NO: 2396 - protein, 9 aa, Homo Sapiens
RIIDTVAQV

SEQ ID NO: 2397 - protein, 9 aa, Homo Sapiens
RIIDVVYNA

SEQ ID NO: 2398 - protein, 9 aa, Homo Sapiens
RILDILEYI

SEQ ID NO: 2399 - protein, 9 aa, Homo Sapiens
RILDYVINL

SEQ ID NO: 2400 - protein, 9 aa, Homo Sapiens
RIMNLTVML

SEQ ID NO: 2401 - protein, 9 aa, Homo Sapiens
RISDVHFSV

SEQ ID NO: 2402 - protein, 9 aa, Homo Sapiens
RISTINILL

SEQ ID NO: 2403 - protein, 9 aa, Homo Sapiens
RIYKYIHKV

SEQ ID NO: 2404 - protein, 9 aa, Homo Sapiens
RLAELLVSV

SEQ ID NO: 2405 - protein, 9 aa, Homo Sapiens
RLAHYIDRV

SEQ ID NO: 2406 - protein, 9 aa, Homo Sapiens
RLAQHITYV

SEQ ID NO: 2407 - protein, 9 aa, Homo Sapiens
RLAVYIDKV

SEQ ID NO: 2408 - protein, 9 aa, Homo Sapiens
RLAVYIDRV

SEQ ID NO: 2409 - protein, 9 aa, Homo Sapiens
RLDDSLLYL

SEQ ID NO: 2410 - protein, 9 aa, Homo Sapiens
RLDETIQAI

SEQ ID NO: 2411 - protein, 9 aa, Homo Sapiens
RLFDDVPQV

SEQ ID NO: 2412 - protein, 9 aa, Homo Sapiens
RLFDEPQLA

SEQ ID NO: 2413 - protein, 9 aa, Homo Sapiens
RLFDWLVSV

SEQ ID NO: 2414 - protein, 9 aa, Homo Sapiens
RLFEGNALL

SEQ ID NO: 2415 - protein, 9 aa, Homo Sapiens
RLFENYIEL

SEQ ID NO: 2416 - protein, 9 aa, Homo Sapiens
RLFESSQYL

SEQ ID NO: 2417 - protein, 9 aa, Homo Sapiens
RLFEVPHEL

SEQ ID NO: 2418 - protein, 9 aa, Homo Sapiens
RLGDAILSV

SEQ ID NO: 2419 - protein, 9 aa, Homo Sapiens
RLGPVPPGL

SEQ ID NO: 2420 - protein, 9 aa, Homo Sapiens
RLHDVLMEL

SEQ ID NO: 2421 - protein, 9 aa, Homo Sapiens
RLIALSFGL

SEQ ID NO: 2422 - protein, 9 aa, Homo Sapiens
RLIAQRYLL

SEQ ID NO: 2423 - protein, 9 aa, Homo Sapiens
RLIEESVTV

SEQ ID NO: 2424 - protein, 9 aa, Homo Sapiens
RLIESLFTI

SEQ ID NO: 2425 - protein, 9 aa, Homo Sapiens
RLINQVLEL

SEQ ID NO: 2426 - protein, 9 aa, Homo Sapiens
RLIPTLVSI

SEQ ID NO: 2427 - protein, 9 aa, Homo Sapiens
RLLAQVPGL

SEQ ID NO: 2428 - protein, 9 aa, Homo Sapiens
RLLATIVML

SEQ ID NO: 2429 - protein, 9 aa, Homo Sapiens
RLLDGAFKL

SEQ ID NO: 2430 - protein, 9 aa, Homo Sapiens
RLLDKWVEL

SEQ ID NO: 2431 - protein, 9 aa, Homo Sapiens
RLLDRKVLL

SEQ ID NO: 2432 - protein, 9 aa, Homo Sapiens
RLLDYVATV

SEQ ID NO: 2433 - protein, 9 aa, Homo Sapiens
RLLDYVVNI

SEQ ID NO: 2434 - protein, 9 aa, Homo Sapiens
RLLEGVNQL

SEQ ID NO: 2435 - protein, 9 aa, Homo Sapiens
RLLEIDPYL

SEQ ID NO: 2436 - protein, 9 aa, Homo Sapiens
RLLELETRL

SEQ ID NO: 2437 - protein, 9 aa, Homo Sapiens
RLLENMTEV

SEQ ID NO: 2438 - protein, 9 aa, Homo Sapiens
RLLEQKVEL

SEQ ID NO: 2439 - protein, 9 aa, Homo Sapiens
RLLEQLQEI

SEQ ID NO: 2440 - protein, 9 aa, Homo Sapiens
RLLEVPVML

SEQ ID NO: 2441 - protein, 9 aa, Homo Sapiens
RLLGYVATL

SEQ ID NO: 2442 - protein, 9 aa, Homo Sapiens
RLLKSKLYL

SEQ ID NO: 2443 - protein, 9 aa, Homo Sapiens
RLLNFDTEL

SEQ ID NO: 2444 - protein, 9 aa, Homo Sapiens
RLLNFQRQL

SEQ ID NO: 2445 - protein, 9 aa, Homo Sapiens
RLLPALASV

SEQ ID NO: 2446 - protein, 9 aa, Homo Sapiens
RLLPQVDSV

SEQ ID NO: 2447 - protein, 9 aa, Homo Sapiens
RLLQAVALV

SEQ ID NO: 2448 - protein, 9 aa, Homo Sapiens
RLLQTLPQL

SEQ ID NO: 2449 - protein, 9 aa, Homo Sapiens
RLLYQLVFL

SEQ ID NO: 2450 - protein, 9 aa, Homo Sapiens
RLMEPIYLV

SEQ ID NO: 2451 - protein, 9 aa, Homo Sapiens
RLNEAAVTV

SEQ ID NO: 2452 - protein, 9 aa, Homo Sapiens
RLPDLIIFL

SEQ ID NO: 2453 - protein, 9 aa, Homo Sapiens
RLPEAIEEV

SEQ ID NO: 2454 - protein, 9 aa, Homo Sapiens
RLPEIYIQL

SEQ ID NO: 2455 - protein, 9 aa, Homo Sapiens
RLPPPFPGL

SEQ ID NO: 2456 - protein, 9 aa, Homo Sapiens
RLQDAIAKV

SEQ ID NO: 2457 - protein, 9 aa, Homo Sapiens
RLQEEINEV

SEQ ID NO: 2458 - protein, 9 aa, Homo Sapiens
RLQEFIDEV

SEQ ID NO: 2459 - protein, 9 aa, Homo Sapiens
RLSDAQIYV

SEQ ID NO: 2460 - protein, 9 aa, Homo Sapiens
RLSDVQIYV

SEQ ID NO: 2461 - protein, 9 aa, Homo Sapiens
RLSEVQASL

SEQ ID NO: 2462 - protein, 9 aa, Homo Sapiens
RLSPVSPAL

SEQ ID NO: 2463 - protein, 9 aa, Homo Sapiens
RLSSVNAEV

SEQ ID NO: 2464 - protein, 9 aa, Homo Sapiens
RLTDFLDCV

SEQ ID NO: 2465 - protein, 9 aa, Homo Sapiens
RLTDYISKV

SEQ ID NO: 2466 - protein, 9 aa, Homo Sapiens
RLTDYVAFL

SEQ ID NO: 2467 - protein, 9 aa, Homo Sapiens
RLTPKLMEV

SEQ ID NO: 2468 - protein, 9 aa, Homo Sapiens
RLVDLDWRV

SEQ ID NO: 2469 - protein, 9 aa, Homo Sapiens
RLVEIQYEL

SEQ ID NO: 2470 - protein, 9 aa, Homo Sapiens
RLVPFLVEL

SEQ ID NO: 2471 - protein, 9 aa, Homo Sapiens
RLVPFLVFV

SEQ ID NO: 2472 - protein, 9 aa, Homo Sapiens
RLWEGAISI

SEQ ID NO: 2473 - protein, 9 aa, Homo Sapiens
RLWEKLTLL

SEQ ID NO: 2474 - protein, 9 aa, Homo Sapiens
RLWEYLLEL

SEQ ID NO: 2475 - protein, 9 aa, Homo Sapiens
RLWGEPVNL

SEQ ID NO: 2476 - protein, 9 aa, Homo Sapiens
RLWNETVEL

SEQ ID NO: 2477 - protein, 9 aa, Homo Sapiens
RLYHELVGL

SEQ ID NO: 2478 - protein, 9 aa, Homo Sapiens
RLYHITDQV

SEQ ID NO: 2479 - protein, 9 aa, Homo Sapiens
RMDELFVLI

SEQ ID NO: 2480 - protein, 9 aa, Homo Sapiens
RMFDGKFVV

SEQ ID NO: 2481 - protein, 9 aa, Homo Sapiens
RMFPGEVAL

SEQ ID NO: 2482 - protein, 9 aa, Homo Sapiens
RMLPHAPGV

SEQ ID NO: 2483 - protein, 9 aa, Homo Sapiens
RMLSELPAL

SEQ ID NO: 2484 - protein, 9 aa, Homo Sapiens
RMLYMIEQV

SEQ ID NO: 2485 - protein, 9 aa, Homo Sapiens
RMVHILTSV

SEQ ID NO: 2486 - protein, 9 aa, Homo Sapiens
RQFLFHWTV

SEQ ID NO: 2487 - protein, 9 aa, Homo Sapiens
RQIEYYFSV

SEQ ID NO: 2488 - protein, 9 aa, Homo Sapiens
RTIEYLEEV

SEQ ID NO: 2489 - protein, 9 aa, Homo Sapiens
RTLDLPIYV

SEQ ID NO: 2490 - protein, 9 aa, Homo Sapiens
RVIGTLEEV

SEQ ID NO: 2491 - protein, 9 aa, Homo Sapiens
RVLDVILEV

SEQ ID NO: 2492 - protein, 9 aa, Homo Sapiens
RVLEELEGV

SEQ ID NO: 2493 - protein, 9 aa, Homo Sapiens
RVMELFFTV

SEQ ID NO: 2494 - protein, 9 aa, Homo Sapiens
SDPFTHLAP

SEQ ID NO: 2495 - protein, 9 aa, Homo Sapiens
SIAAVLPKV

SEQ ID NO: 2496 - protein, 9 aa, Homo Sapiens
SIAEVVHQL

SEQ ID NO: 2497 - protein, 9 aa, Homo Sapiens
SIHDVTFQV

SEQ ID NO: 2498 - protein, 9 aa, Homo Sapiens
SIIDWLNSV

SEQ ID NO: 2499 - protein, 9 aa, Homo Sapiens
SIIGRLLEV

SEQ ID NO: 2500 - protein, 9 aa, Homo Sapiens
SIISNLDEV

SEQ ID NO: 2501 - protein, 9 aa, Homo Sapiens
SILADRILL

SEQ ID NO: 2502 - protein, 9 aa, Homo Sapiens
SILDQVWNI

SEQ ID NO: 2503 - protein, 9 aa, Homo Sapiens
SILEDPPSI

SEQ ID NO: 2504 - protein, 9 aa, Homo Sapiens
SILEHQIQV

SEQ ID NO: 2505 - protein, 9 aa, Homo Sapiens
SILHDVVEV

SEQ ID NO: 2506 - protein, 9 aa, Homo Sapiens
SILKKVLEA

SEQ ID NO: 2507 - protein, 9 aa, Homo Sapiens
SILQTLILV

SEQ ID NO: 2508 - protein, 9 aa, Homo Sapiens
SILRHVAEV

SEQ ID NO: 2509 - protein, 9 aa, Homo Sapiens
SILSLVTKI

SEQ ID NO: 2510 - protein, 9 aa, Homo Sapiens
SIMDYVVFV

SEQ ID NO: 2511 - protein, 9 aa, Homo Sapiens
SISDVIAQV

SEQ ID NO: 2512 - protein, 9 aa, Homo Sapiens
SISPIVLYL

SEQ ID NO: 2513 - protein, 9 aa, Homo Sapiens
SIYQFLIAV

SEQ ID NO: 2514 - protein, 9 aa, Homo Sapiens
SLAADIPRL

SEQ ID NO: 2515 - protein, 9 aa, Homo Sapiens
SLAANTFTI

SEQ ID NO: 2516 - protein, 9 aa, Homo Sapiens
SLADIAQKL

SEQ ID NO: 2517 - protein, 9 aa, Homo Sapiens
SLADLYFRA

SEQ ID NO: 2518 - protein, 9 aa, Homo Sapiens
SLADVHIEV

SEQ ID NO: 2519 - protein, 9 aa, Homo Sapiens
SLADYITAA

SEQ ID NO: 2520 - protein, 9 aa, Homo Sapiens
SLAEFVQSL

SEQ ID NO: 2521 - protein, 9 aa, Homo Sapiens
SLAEGRLYL

SEQ ID NO: 2522 - protein, 9 aa, Homo Sapiens
SLAEKIQAL

SEQ ID NO: 2523 - protein, 9 aa, Homo Sapiens
SLAELIQAL

SEQ ID NO: 2524 - protein, 9 aa, Homo Sapiens
SLAELVHAV

SEQ ID NO: 2525 - protein, 9 aa, Homo Sapiens
SLAEPRVSV

SEQ ID NO: 2526 - protein, 9 aa, Homo Sapiens
SLAERVDRL

SEQ ID NO: 2527 - protein, 9 aa, Homo Sapiens
SLAEVLQQL

SEQ ID NO: 2528 - protein, 9 aa, Homo Sapiens
SLAEVNTQL

SEQ ID NO: 2529 - protein, 9 aa, Homo Sapiens
SLAGFLLSV

SEQ ID NO: 2530 - protein, 9 aa, Homo Sapiens
SLAGGIIGV

SEQ ID NO: 2531 - protein, 9 aa, Homo Sapiens
SLAPIIVHV

SEQ ID NO: 2532 - protein, 9 aa, Homo Sapiens
SLAPIIVYI

SEQ ID NO: 2533 - protein, 9 aa, Homo Sapiens
SLAPLFFKL

SEQ ID NO: 2534 - protein, 9 aa, Homo Sapiens
SLAPVLCGI

SEQ ID NO: 2535 - protein, 9 aa, Homo Sapiens
SLAQVVMKV

SEQ ID NO: 2536 - protein, 9 aa, Homo Sapiens
SLAQYLINA

SEQ ID NO: 2537 - protein, 9 aa, Homo Sapiens
SLAQYLINV

SEQ ID NO: 2538 - protein, 9 aa, Homo Sapiens
SLAQYNPKL

SEQ ID NO: 2539 - protein, 9 aa, Homo Sapiens
SLASFIPAV

SEQ ID NO: 2540 - protein, 9 aa, Homo Sapiens
SLASLLAKV

SEQ ID NO: 2541 - protein, 9 aa, Homo Sapiens
SLASLLVSV

SEQ ID NO: 2542 - protein, 9 aa, Homo Sapiens
SLASVFVRL

SEQ ID NO: 2543 - protein, 9 aa, Homo Sapiens
SLASVIFLL

SEQ ID NO: 2544 - protein, 9 aa, Homo Sapiens
SLATSLPRL

SEQ ID NO: 2545 - protein, 9 aa, Homo Sapiens
SLAVSSPRL

SEQ ID NO: 2546 - protein, 9 aa, Homo Sapiens
SLAWDVPAA

SEQ ID NO: 2547 - protein, 9 aa, Homo Sapiens
SLDAKEIYL

SEQ ID NO: 2548 - protein, 9 aa, Homo Sapiens
SLDEGIEQV

SEQ ID NO: 2549 - protein, 9 aa, Homo Sapiens
SLDGAPIGV

SEQ ID NO: 2550 - protein, 9 aa, Homo Sapiens
SLDGFTIQV

SEQ ID NO: 2551 - protein, 9 aa, Homo Sapiens
SLDPTLPSV

SEQ ID NO: 2552 - protein, 9 aa, Homo Sapiens
SLDSTLHAV

SEQ ID NO: 2553 - protein, 9 aa, Homo Sapiens
SLDWQMVFL

SEQ ID NO: 2554 - protein, 9 aa, Homo Sapiens
SLEENLPCI

SEQ ID NO: 2555 - protein, 9 aa, Homo Sapiens
SLFDARVHL

SEQ ID NO: 2556 - protein, 9 aa, Homo Sapiens
SLFDAVSSL

SEQ ID NO: 2557 - protein, 9 aa, Homo Sapiens
SLFDLNFQA

SEQ ID NO: 2558 - protein, 9 aa, Homo Sapiens
SLFEGTWYL

SEQ ID NO: 2559 - protein, 9 aa, Homo Sapiens
SLFGGSVKL

SEQ ID NO: 2560 - protein, 9 aa, Homo Sapiens
SLFGNIKGA

SEQ ID NO: 2561 - protein, 9 aa, Homo Sapiens
SLFGQEVYC

SEQ ID NO: 2562 - protein, 9 aa, Homo Sapiens
SLFKLIVKV

SEQ ID NO: 2563 - protein, 9 aa, Homo Sapiens
SLFPAELAL

SEQ ID NO: 2564 - protein, 9 aa, Homo Sapiens
SLFPGKLEV

SEQ ID NO: 2565 - protein, 9 aa, Homo Sapiens
SLFPGQVVI

SEQ ID NO: 2566 - protein, 9 aa, Homo Sapiens
SLFPHAICL

SEQ ID NO: 2567 - protein, 9 aa, Homo Sapiens
SLFRVITEV

SEQ ID NO: 2568 - protein, 9 aa, Homo Sapiens
SLFSAVHKI

SEQ ID NO: 2569 - protein, 9 aa, Homo Sapiens
SLFSGKPEV

SEQ ID NO: 2570 - protein, 9 aa, Homo Sapiens
SLFSMLHQA

SEQ ID NO: 2571 - protein, 9 aa, Homo Sapiens
SLFSSPPEI

SEQ ID NO: 2572 - protein, 9 aa, Homo Sapiens
SLFSVIVRV

SEQ ID NO: 2573 - protein, 9 aa, Homo Sapiens
SLGEFHVRL

SEQ ID NO: 2574 - protein, 9 aa, Homo Sapiens
SLGRFEITV

SEQ ID NO: 2575 - protein, 9 aa, Homo Sapiens
SLHDAIMIV

SEQ ID NO: 2576 - protein, 9 aa, Homo Sapiens
SLHFLILYV

SEQ ID NO: 2577 - protein, 9 aa, Homo Sapiens
SLHSVIIQL

SEQ ID NO: 2578 - protein, 9 aa, Homo Sapiens
SLIAGVIRV

SEQ ID NO: 2579 - protein, 9 aa, Homo Sapiens
SLIAKVATA

SEQ ID NO: 2580 - protein, 9 aa, Homo Sapiens
SLIARLERL

SEQ ID NO: 2581 - protein, 9 aa, Homo Sapiens
SLIDADPYL

SEQ ID NO: 2582 - protein, 9 aa, Homo Sapiens
SLIDFLRVV

SEQ ID NO: 2583 - protein, 9 aa, Homo Sapiens
SLIDILVAL

SEQ ID NO: 2584 - protein, 9 aa, Homo Sapiens
SLIDIVTEI

SEQ ID NO: 2585 - protein, 9 aa, Homo Sapiens
SLIDQFFGV

SEQ ID NO: 2586 - protein, 9 aa, Homo Sapiens
SLIEDLILL

SEQ ID NO: 2587 - protein, 9 aa, Homo Sapiens
SLIEHLQGL

SEQ ID NO: 2588 - protein, 9 aa, Homo Sapiens
SLIEKIPTA

SEQ ID NO: 2589 - protein, 9 aa, Homo Sapiens
SLIEKLWQT

SEQ ID NO: 2590 - protein, 9 aa, Homo Sapiens
SLIEKVTQL

SEQ ID NO: 2591 - protein, 9 aa, Homo Sapiens
SLIEKYFSV

SEQ ID NO: 2592 - protein, 9 aa, Homo Sapiens
SLIEQTTAL

SEQ ID NO: 2593 - protein, 9 aa, Homo Sapiens
SLIEVVIGL

SEQ ID NO: 2594 - protein, 9 aa, Homo Sapiens
SLIEYCIEL

SEQ ID NO: 2595 - protein, 9 aa, Homo Sapiens
SLIFKLEEL

SEQ ID NO: 2596 - protein, 9 aa, Homo Sapiens
SLIGHLQTL

SEQ ID NO: 2597 - protein, 9 aa, Homo Sapiens
SLIGNLHLA

SEQ ID NO: 2598 - protein, 9 aa, Homo Sapiens
SLIHDVINL

SEQ ID NO: 2599 - protein, 9 aa, Homo Sapiens
SLIHGLWNL

SEQ ID NO: 2600 - protein, 9 aa, Homo Sapiens
SLIKHKIML

SEQ ID NO: 2601 - protein, 9 aa, Homo Sapiens
SLIKKIKDV

SEQ ID NO: 2602 - protein, 9 aa, Homo Sapiens
SLIKQIPRI

SEQ ID NO: 2603 - protein, 9 aa, Homo Sapiens
SLIKYFLFV

SEQ ID NO: 2604 - protein, 9 aa, Homo Sapiens
SLIPIISGV

SEQ ID NO: 2605 - protein, 9 aa, Homo Sapiens
SLIPTSPQV

SEQ ID NO: 2606 - protein, 9 aa, Homo Sapiens
SLIRIVPVV

SEQ ID NO: 2607 - protein, 9 aa, Homo Sapiens
SLIRNLEQL

SEQ ID NO: 2608 - protein, 9 aa, Homo Sapiens
SLIRSVVAL

SEQ ID NO: 2609 - protein, 9 aa, Homo Sapiens
SLISINNKL

SEQ ID NO: 2610 - protein, 9 aa, Homo Sapiens
SLISVIHLI

SEQ ID NO: 2611 - protein, 9 aa, Homo Sapiens
SLITPLQAV

SEQ ID NO: 2612 - protein, 9 aa, Homo Sapiens
SLITRLLEV

SEQ ID NO: 2613 - protein, 9 aa, Homo Sapiens
SLLACEFLL

SEQ ID NO: 2614 - protein, 9 aa, Homo Sapiens
SLLASLHTL

SEQ ID NO: 2615 - protein, 9 aa, Homo Sapiens
SLLDCTFRL

SEQ ID NO: 2616 - protein, 9 aa, Homo Sapiens
SLLDDLHSA

SEQ ID NO: 2617 - protein, 9 aa, Homo Sapiens
SLLDEFYKL

SEQ ID NO: 2618 - protein, 9 aa, Homo Sapiens
SLLDELLEV

SEQ ID NO: 2619 - protein, 9 aa, Homo Sapiens
SLLDEVLNV

SEQ ID NO: 2620 - protein, 9 aa, Homo Sapiens
SLLDGHFVL

SEQ ID NO: 2621 - protein, 9 aa, Homo Sapiens
SLLDIIEKV

SEQ ID NO: 2622 - protein, 9 aa, Homo Sapiens
SLLDLEQKL

SEQ ID NO: 2623 - protein, 9 aa, Homo Sapiens
SLLDNLLTI

SEQ ID NO: 2624 - protein, 9 aa, Homo Sapiens
SLLDPVPEV

SEQ ID NO: 2625 - protein, 9 aa, Homo Sapiens
SLLDSVVGL

SEQ ID NO: 2626 - protein, 9 aa, Homo Sapiens
SLLDTLVLL

SEQ ID NO: 2627 - protein, 9 aa, Homo Sapiens
SLLEAVSFL

SEQ ID NO: 2628 - protein, 9 aa, Homo Sapiens
SLLEFNTTV

SEQ ID NO: 2629 - protein, 9 aa, Homo Sapiens
SLLEHLSHV

SEQ ID NO: 2630 - protein, 9 aa, Homo Sapiens
SLLEKLSAL

SEQ ID NO: 2631 - protein, 9 aa, Homo Sapiens
SLLEKSLGL

SEQ ID NO: 2632 - protein, 9 aa, Homo Sapiens
SLLENIAKA

SEQ ID NO: 2633 - protein, 9 aa, Homo Sapiens
SLLEPFVYL

SEQ ID NO: 2634 - protein, 9 aa, Homo Sapiens
SLLESVQKL

SEQ ID NO: 2635 - protein, 9 aa, Homo Sapiens
SLLEWCQEV

SEQ ID NO: 2636 - protein, 9 aa, Homo Sapiens
SLLGATVTV

SEQ ID NO: 2637 - protein, 9 aa, Homo Sapiens
SLLGFVATV

SEQ ID NO: 2638 - protein, 9 aa, Homo Sapiens
SLLGFVYKL

SEQ ID NO: 2639 - protein, 9 aa, Homo Sapiens
SLLGGNIRL

SEQ ID NO: 2640 - protein, 9 aa, Homo Sapiens
SLLGHLMIV

SEQ ID NO: 2641 - protein, 9 aa, Homo Sapiens
SLLGHVIRL

SEQ ID NO: 2642 - protein, 9 aa, Homo Sapiens
SLLKDLAEI

SEQ ID NO: 2643 - protein, 9 aa, Homo Sapiens
SLLLLQLLL

SEQ ID NO: 2644 - protein, 9 aa, Homo Sapiens
SLLMSIHNI

SEQ ID NO: 2645 - protein, 9 aa, Homo Sapiens
SLLNVVMDL

SEQ ID NO: 2646 - protein, 9 aa, Homo Sapiens
SLLPAIVEL

SEQ ID NO: 2647 - protein, 9 aa, Homo Sapiens
SLLPAQYNL

SEQ ID NO: 2648 - protein, 9 aa, Homo Sapiens
SLLPFLKAV

SEQ ID NO: 2649 - protein, 9 aa, Homo Sapiens
SLLPFWYTL

SEQ ID NO: 2650 - protein, 9 aa, Homo Sapiens
SLLPSVPAL

SEQ ID NO: 2651 - protein, 9 aa, Homo Sapiens
SLLPTSPRL

SEQ ID NO: 2652 - protein, 9 aa, Homo Sapiens
SLLPYLPML

SEQ ID NO: 2653 - protein, 9 aa, Homo Sapiens
SLLQALNEV

SEQ ID NO: 2654 - protein, 9 aa, Homo Sapiens
SLLQEGIYL

SEQ ID NO: 2655 - protein, 9 aa, Homo Sapiens
SLLQLWLTL

SEQ ID NO: 2656 - protein, 9 aa, Homo Sapiens
SLLQTLYKV

SEQ ID NO: 2657 - protein, 9 aa, Homo Sapiens
SLLQTQHAL

SEQ ID NO: 2658 - protein, 9 aa, Homo Sapiens
SLLQVLISI

SEQ ID NO: 2659 - protein, 9 aa, Homo Sapiens
SLLRDVPLA

SEQ ID NO: 2660 - protein, 9 aa, Homo Sapiens
SLLRSIFTV

SEQ ID NO: 2661 - protein, 9 aa, Homo Sapiens
SLLRVGWSV

SEQ ID NO: 2662 - protein, 9 aa, Homo Sapiens
SLLSDIIAL

SEQ ID NO: 2663 - protein, 9 aa, Homo Sapiens
SLLSELQHA

SEQ ID NO: 2664 - protein, 9 aa, Homo Sapiens
SLLSHVEQL

SEQ ID NO: 2665 - protein, 9 aa, Homo Sapiens
SLLSHVIVA

SEQ ID NO: 2666 - protein, 9 aa, Homo Sapiens
SLLSQQPFL

SEQ ID NO: 2667 - protein, 9 aa, Homo Sapiens
SLLSSVFKL

SEQ ID NO: 2668 - protein, 9 aa, Homo Sapiens
SLLSVFSLV

SEQ ID NO: 2669 - protein, 9 aa, Homo Sapiens
SLLSVSHAL

SEQ ID NO: 2670 - protein, 9 aa, Homo Sapiens
SLLTAISEV

SEQ ID NO: 2671 - protein, 9 aa, Homo Sapiens
SLLTSTVQV

SEQ ID NO: 2672 - protein, 9 aa, Homo Sapiens
SLLVHNVSV

SEQ ID NO: 2673 - protein, 9 aa, Homo Sapiens
SLLYNVPAV

SEQ ID NO: 2674 - protein, 9 aa, Homo Sapiens
SLMALILFL

SEQ ID NO: 2675 - protein, 9 aa, Homo Sapiens
SLMDLQERL

SEQ ID NO: 2676 - protein, 9 aa, Homo Sapiens
SLMDLTLLL

SEQ ID NO: 2677 - protein, 9 aa, Homo Sapiens
SLMEILYTL

SEQ ID NO: 2678 - protein, 9 aa, Homo Sapiens
SLMEKISKL

SEQ ID NO: 2679 - protein, 9 aa, Homo Sapiens
SLMLVTVEL

SEQ ID NO: 2680 - protein, 9 aa, Homo Sapiens
SLMMTIINL

SEQ ID NO: 2681 - protein, 9 aa, Homo Sapiens
SLMSHAIEL

SEQ ID NO: 2682 - protein, 9 aa, Homo Sapiens
SLMVPVFVV

SEQ ID NO: 2683 - protein, 9 aa, Homo Sapiens
SLNELRVLL

SEQ ID NO: 2684 - protein, 9 aa, Homo Sapiens
SLNEYQPKL

SEQ ID NO: 2685 - protein, 9 aa, Homo Sapiens
SLNGLEVHL

SEQ ID NO: 2686 - protein, 9 aa, Homo Sapiens
SLNLAPPTV

SEQ ID NO: 2687 - protein, 9 aa, Homo Sapiens
SLPDHLPSV

SEQ ID NO: 2688 - protein, 9 aa, Homo Sapiens
SLPDIKVYL

SEQ ID NO: 2689 - protein, 9 aa, Homo Sapiens
SLPELVHAV

SEQ ID NO: 2690 - protein, 9 aa, Homo Sapiens
SLQDEIQRV

SEQ ID NO: 2691 - protein, 9 aa, Homo Sapiens
SLQEEIAFL

SEQ ID NO: 2692 - protein, 9 aa, Homo Sapiens
SLQEFLAAL

SEQ ID NO: 2693 - protein, 9 aa, Homo Sapiens
SLQEKLWAI

SEQ ID NO: 2694 - protein, 9 aa, Homo Sapiens
SLQELLIQV

SEQ ID NO: 2695 - protein, 9 aa, Homo Sapiens
SLQETIQSL

SEQ ID NO: 2696 - protein, 9 aa, Homo Sapiens
SLQSLIISV

SEQ ID NO: 2697 - protein, 9 aa, Homo Sapiens
SLQSTILGV

SEQ ID NO: 2698 - protein, 9 aa, Homo Sapiens
SLSAFTPAL

SEQ ID NO: 2699 - protein, 9 aa, Homo Sapiens
SLSDTVEKL

SEQ ID NO: 2700 - protein, 9 aa, Homo Sapiens
SLSEKQYFL

SEQ ID NO: 2701 - protein, 9 aa, Homo Sapiens
SLSEKTVLL

SEQ ID NO: 2702 - protein, 9 aa, Homo Sapiens
SLSEYDQCL

SEQ ID NO: 2703 - protein, 9 aa, Homo Sapiens
SLSFLVPSL

SEQ ID NO: 2704 - protein, 9 aa, Homo Sapiens
SLSFMNPRL

SEQ ID NO: 2705 - protein, 9 aa, Homo Sapiens
SLSFVSPSL

SEQ ID NO: 2706 - protein, 9 aa, Homo Sapiens
SLSGELREV

SEQ ID NO: 2707 - protein, 9 aa, Homo Sapiens
SLSHLVPAL

SEQ ID NO: 2708 - protein, 9 aa, Homo Sapiens
SLSPIYPAA

SEQ ID NO: 2709 - protein, 9 aa, Homo Sapiens
SLSSFLHGV

SEQ ID NO: 2710 - protein, 9 aa, Homo Sapiens
SLSSLELFL

SEQ ID NO: 2711 - protein, 9 aa, Homo Sapiens
SLSSLVVQL

SEQ ID NO: 2712 - protein, 9 aa, Homo Sapiens
SLSSVLSHV

SEQ ID NO: 2713 - protein, 9 aa, Homo Sapiens
SLSTCIPAI

SEQ ID NO: 2714 - protein, 9 aa, Homo Sapiens
SLSTVFVVL

SEQ ID NO: 2715 - protein, 9 aa, Homo Sapiens
SLTRHQFYL

SEQ ID NO: 2716 - protein, 9 aa, Homo Sapiens
SLTSVVLTL

SEQ ID NO: 2717 - protein, 9 aa, Homo Sapiens
SLVAILQSV

SEQ ID NO: 2718 - protein, 9 aa, Homo Sapiens
SLVDASWEL

SEQ ID NO: 2719 - protein, 9 aa, Homo Sapiens
SLVDTVYAL

SEQ ID NO: 2720 - protein, 9 aa, Homo Sapiens
SLVEIILHV

SEQ ID NO: 2721 - protein, 9 aa, Homo Sapiens
SLVELLVQL

SEQ ID NO: 2722 - protein, 9 aa, Homo Sapiens
SLVEQLTMV

SEQ ID NO: 2723 - protein, 9 aa, Homo Sapiens
SLVGLLLYL

SEQ ID NO: 2724 - protein, 9 aa, Homo Sapiens
SLVHINIFL

SEQ ID NO: 2725 - protein, 9 aa, Homo Sapiens
SLVNQVPKI

SEQ ID NO: 2726 - protein, 9 aa, Homo Sapiens
SLVNVVPKL

SEQ ID NO: 2727 - protein, 9 aa, Homo Sapiens
SLVQRVETI

SEQ ID NO: 2728 - protein, 9 aa, Homo Sapiens
SLVYLCYTV

SEQ ID NO: 2729 - protein, 9 aa, Homo Sapiens
SLWFKPEEL

SEQ ID NO: 2730 - protein, 9 aa, Homo Sapiens
SLWGGDVVL

SEQ ID NO: 2731 - protein, 9 aa, Homo Sapiens
SLWGTHVVV

SEQ ID NO: 2732 - protein, 9 aa, Homo Sapiens
SLWHLPLLL

SEQ ID NO: 2733 - protein, 9 aa, Homo Sapiens
SLWKEVSEL

SEQ ID NO: 2734 - protein, 9 aa, Homo Sapiens
SLWKGLVGI

SEQ ID NO: 2735 - protein, 9 aa, Homo Sapiens
SLWPMTFGL

SEQ ID NO: 2736 - protein, 9 aa, Homo Sapiens
SLWSIISKV

SEQ ID NO: 2737 - protein, 9 aa, Homo Sapiens
SLYDWNVKL

SEQ ID NO: 2738 - protein, 9 aa, Homo Sapiens
SLYDYNPNL

SEQ ID NO: 2739 - protein, 9 aa, Homo Sapiens
SLYEMVSRV

SEQ ID NO: 2740 - protein, 9 aa, Homo Sapiens
SLYGGTITI

SEQ ID NO: 2741 - protein, 9 aa, Homo Sapiens
SLYGYLRGA

SEQ ID NO: 2742 - protein, 9 aa, Homo Sapiens
SLYHIYVAL

SEQ ID NO: 2743 - protein, 9 aa, Homo Sapiens
SLYHVESTV

SEQ ID NO: 2744 - protein, 9 aa, Homo Sapiens
SLYIKDIWL

SEQ ID NO: 2745 - protein, 9 aa, Homo Sapiens
SLYKGLLSV

SEQ ID NO: 2746 - protein, 9 aa, Homo Sapiens
SLYREILFL

SEQ ID NO: 2747 - protein, 9 aa, Homo Sapiens
SMAELDIKL

SEQ ID NO: 2748 - protein, 9 aa, Homo Sapiens
SMAPYVLNV

SEQ ID NO: 2749 - protein, 9 aa, Homo Sapiens
SMAVVIPEA

SEQ ID NO: 2750 - protein, 9 aa, Homo Sapiens
SMFGAGLTV

SEQ ID NO: 2751 - protein, 9 aa, Homo Sapiens
SMHQILLYL

SEQ ID NO: 2752 - protein, 9 aa, Homo Sapiens
SMLDDLRNV

SEQ ID NO: 2753 - protein, 9 aa, Homo Sapiens
SMLEPVPEL

SEQ ID NO: 2754 - protein, 9 aa, Homo Sapiens
SMLLEIIFL

SEQ ID NO: 2755 - protein, 9 aa, Homo Sapiens
SMLNRILAV

SEQ ID NO: 2756 - protein, 9 aa, Homo Sapiens
SMLPVPPAV

SEQ ID NO: 2757 - protein, 9 aa, Homo Sapiens
SMLQKTWLL

SEQ ID NO: 2758 - protein, 9 aa, Homo Sapiens
SMLTLPLSL

SEQ ID NO: 2759 - protein, 9 aa, Homo Sapiens
SMMALLVQL

SEQ ID NO: 2760 - protein, 9 aa, Homo Sapiens
SMMQTLLTV

SEQ ID NO: 2761 - protein, 9 aa, Homo Sapiens
SMSADVPLV

SEQ ID NO: 2762 - protein, 9 aa, Homo Sapiens
SMTLAIHEI

SEQ ID NO: 2763 - protein, 9 aa, Homo Sapiens
SMTLVNVLV

SEQ ID NO: 2764 - protein, 9 aa, Homo Sapiens
SMVDVVMLL

SEQ ID NO: 2765 - protein, 9 aa, Homo Sapiens
SMYDKVLML

SEQ ID NO: 2766 - protein, 9 aa, Homo Sapiens
SQTFVNPHV

SEQ ID NO: 2767 - protein, 9 aa, Homo Sapiens
STLHLVLRL

SEQ ID NO: 2768 - protein, 9 aa, Homo Sapiens
SVFAGVVGV

SEQ ID NO: 2769 - protein, 9 aa, Homo Sapiens
SVIEQIVYV

SEQ ID NO: 2770 - protein, 9 aa, Homo Sapiens
SVIEQLFFV

SEQ ID NO: 2771 - protein, 9 aa, Homo Sapiens
SVIQNLRTV

SEQ ID NO: 2772 - protein, 9 aa, Homo Sapiens
SVITQVFHV

SEQ ID NO: 2773 - protein, 9 aa, Homo Sapiens
SVLDLLVQL

SEQ ID NO: 2774 - protein, 9 aa, Homo Sapiens
SVLDLVVAL

SEQ ID NO: 2775 - protein, 9 aa, Homo Sapiens
SVLDQKILL

SEQ ID NO: 2776 - protein, 9 aa, Homo Sapiens
SVLGAITSV

SEQ ID NO: 2777 - protein, 9 aa, Homo Sapiens
SVLGKIWKL

SEQ ID NO: 2778 - protein, 9 aa, Homo Sapiens
SVLKSIQEV

SEQ ID NO: 2779 - protein, 9 aa, Homo Sapiens
SVLVSPPAV

SEQ ID NO: 2780 - protein, 9 aa, Homo Sapiens
SVMELLQGV

SEQ ID NO: 2781 - protein, 9 aa, Homo Sapiens
SVMSILPKI

SEQ ID NO: 2782 - protein, 9 aa, Homo Sapiens
TIDDIVLTI

SEQ ID NO: 2783 - protein, 9 aa, Homo Sapiens
TILKRLFRV

SEQ ID NO: 2784 - protein, 9 aa, Homo Sapiens
TILPKVMQV

SEQ ID NO: 2785 - protein, 9 aa, Homo Sapiens
TIMELLIMV

SEQ ID NO: 2786 - protein, 9 aa, Homo Sapiens
TIMPKDIQL

SEQ ID NO: 2787 - protein, 9 aa, Homo Sapiens
TLAAIAVHL

SEQ ID NO: 2788 - protein, 9 aa, Homo Sapiens
TLADLVHHV

SEQ ID NO: 2789 - protein, 9 aa, Homo Sapiens
TLADVLYHV

SEQ ID NO: 2790 - protein, 9 aa, Homo Sapiens
TLADYLHLL

SEQ ID NO: 2791 - protein, 9 aa, Homo Sapiens
TLAEKIQTI

SEQ ID NO: 2792 - protein, 9 aa, Homo Sapiens
TLAELHISL

SEQ ID NO: 2793 - protein, 9 aa, Homo Sapiens
TLAELLVLL

SEQ ID NO: 2794 - protein, 9 aa, Homo Sapiens
TLAETLVNL

SEQ ID NO: 2795 - protein, 9 aa, Homo Sapiens
TLAFVSPSL

SEQ ID NO: 2796 - protein, 9 aa, Homo Sapiens
TLAGDVHIV

SEQ ID NO: 2797 - protein, 9 aa, Homo Sapiens
TLCDLYETL

SEQ ID NO: 2798 - protein, 9 aa, Homo Sapiens
TLDAGNIKL

SEQ ID NO: 2799 - protein, 9 aa, Homo Sapiens
TLDDLIAAV

SEQ ID NO: 2800 - protein, 9 aa, Homo Sapiens
TLDEKIEKV

SEQ ID NO: 2801 - protein, 9 aa, Homo Sapiens
TLDGSLHAV

SEQ ID NO: 2802 - protein, 9 aa, Homo Sapiens
TLENIIATV

SEQ ID NO: 2803 - protein, 9 aa, Homo Sapiens
TLFDYEVRL

SEQ ID NO: 2804 - protein, 9 aa, Homo Sapiens
TLFGLTPTL

SEQ ID NO: 2805 - protein, 9 aa, Homo Sapiens
TLFPSKIGV

SEQ ID NO: 2806 - protein, 9 aa, Homo Sapiens
TLFPVRLLV

SEQ ID NO: 2807 - protein, 9 aa, Homo Sapiens
TLFTKELVL

SEQ ID NO: 2808 - protein, 9 aa, Homo Sapiens
TLGDAHIYL

SEQ ID NO: 2809 - protein, 9 aa, Homo Sapiens
TLGNVLVTV

SEQ ID NO: 2810 - protein, 9 aa, Homo Sapiens
TLGVIPESV

SEQ ID NO: 2811 - protein, 9 aa, Homo Sapiens
TLHSIIISL

SEQ ID NO: 2812 - protein, 9 aa, Homo Sapiens
TLIAAILYL

SEQ ID NO: 2813 - protein, 9 aa, Homo Sapiens
TLIEDILGV

SEQ ID NO: 2814 - protein, 9 aa, Homo Sapiens
TLIGLSIKV

SEQ ID NO: 2815 - protein, 9 aa, Homo Sapiens
TLIGYFVGL

SEQ ID NO: 2816 - protein, 9 aa, Homo Sapiens
TLINLLLKV

SEQ ID NO: 2817 - protein, 9 aa, Homo Sapiens
TLISELVQA

SEQ ID NO: 2818 - protein, 9 aa, Homo Sapiens
TLISRLPAV

SEQ ID NO: 2819 - protein, 9 aa, Homo Sapiens
TLKDTITSV

SEQ ID NO: 2820 - protein, 9 aa, Homo Sapiens
TLLDFINAV

SEQ ID NO: 2821 - protein, 9 aa, Homo Sapiens
TLLDRMVHL

SEQ ID NO: 2822 - protein, 9 aa, Homo Sapiens
TLLESIRQA

SEQ ID NO: 2823 - protein, 9 aa, Homo Sapiens
TLLGHEFVL

SEQ ID NO: 2824 - protein, 9 aa, Homo Sapiens
TLLGHLDYI

SEQ ID NO: 2825 - protein, 9 aa, Homo Sapiens
TLLGKEIKI

SEQ ID NO: 2826 - protein, 9 aa, Homo Sapiens
TLLGKVVAL

SEQ ID NO: 2827 - protein, 9 aa, Homo Sapiens
TLLGNIHAV

SEQ ID NO: 2828 - protein, 9 aa, Homo Sapiens
TLLGSYIEL

SEQ ID NO: 2829 - protein, 9 aa, Homo Sapiens
TLLGVTVTV

SEQ ID NO: 2830 - protein, 9 aa, Homo Sapiens
TLLHFLVEI

SEQ ID NO: 2831 - protein, 9 aa, Homo Sapiens
TLLHLAVSL

SEQ ID NO: 2832 - protein, 9 aa, Homo Sapiens
TLLIQVPRI

SEQ ID NO: 2833 - protein, 9 aa, Homo Sapiens
TLLKQLKEA

SEQ ID NO: 2834 - protein, 9 aa, Homo Sapiens
TLLKSIPLV

SEQ ID NO: 2835 - protein, 9 aa, Homo Sapiens
TLLNVIKSV

SEQ ID NO: 2836 - protein, 9 aa, Homo Sapiens
TLLPTLYEI

SEQ ID NO: 2837 - protein, 9 aa, Homo Sapiens
TLLRLLYEA

SEQ ID NO: 2838 - protein, 9 aa, Homo Sapiens
TLLSNIQGV

SEQ ID NO: 2839 - protein, 9 aa, Homo Sapiens
TLLTAIVKL

SEQ ID NO: 2840 - protein, 9 aa, Homo Sapiens
TLLTKPVEI

SEQ ID NO: 2841 - protein, 9 aa, Homo Sapiens
TLLVVVPKL

SEQ ID NO: 2842 - protein, 9 aa, Homo Sapiens
TLMAEMHVV

SEQ ID NO: 2843 - protein, 9 aa, Homo Sapiens
TLMEEVLLL

SEQ ID NO: 2844 - protein, 9 aa, Homo Sapiens
TLNDREYQL

SEQ ID NO: 2845 - protein, 9 aa, Homo Sapiens
TLNEKLFLL

SEQ ID NO: 2846 - protein, 9 aa, Homo Sapiens
TLNEKLTAL

SEQ ID NO: 2847 - protein, 9 aa, Homo Sapiens
TLNNLEIFL

SEQ ID NO: 2848 - protein, 9 aa, Homo Sapiens
TLNNWLATV

SEQ ID NO: 2849 - protein, 9 aa, Homo Sapiens
TLPDTILTV

SEQ ID NO: 2850 - protein, 9 aa, Homo Sapiens
TLPNIYVTL

SEQ ID NO: 2851 - protein, 9 aa, Homo Sapiens
TLQDIVYKL

SEQ ID NO: 2852 - protein, 9 aa, Homo Sapiens
TLQEFLERI

SEQ ID NO: 2853 - protein, 9 aa, Homo Sapiens
TLQEVVTGV

SEQ ID NO: 2854 - protein, 9 aa, Homo Sapiens
TLQPTLVAV

SEQ ID NO: 2855 - protein, 9 aa, Homo Sapiens
TLSDIMVSL

SEQ ID NO: 2856 - protein, 9 aa, Homo Sapiens
TLSDIVVTL

SEQ ID NO: 2857 - protein, 9 aa, Homo Sapiens
TLSDLRVYL

SEQ ID NO: 2858 - protein, 9 aa, Homo Sapiens
TLSDVLDRV

SEQ ID NO: 2859 - protein, 9 aa, Homo Sapiens
TLSDVVVGL

SEQ ID NO: 2860 - protein, 9 aa, Homo Sapiens
TLSEVTNQL

SEQ ID NO: 2861 - protein, 9 aa, Homo Sapiens
TLSKIVPHI

SEQ ID NO: 2862 - protein, 9 aa, Homo Sapiens
TLSNLWIFL

SEQ ID NO: 2863 - protein, 9 aa, Homo Sapiens
TLSPLLLFL

SEQ ID NO: 2864 - protein, 9 aa, Homo Sapiens
TLSPRPPLI

SEQ ID NO: 2865 - protein, 9 aa, Homo Sapiens
TLSQVIPMV

SEQ ID NO: 2866 - protein, 9 aa, Homo Sapiens
TLSTVISKV

SEQ ID NO: 2867 - protein, 9 aa, Homo Sapiens
TLTGKTITL

SEQ ID NO: 2868 - protein, 9 aa, Homo Sapiens
TLTNIIHNL

SEQ ID NO: 2869 - protein, 9 aa, Homo Sapiens
TLTNVIHNL

SEQ ID NO: 2870 - protein, 9 aa, Homo Sapiens
TLTSKLYSL

SEQ ID NO: 2871 - protein, 9 aa, Homo Sapiens
TLTSNIPEI

SEQ ID NO: 2872 - protein, 9 aa, Homo Sapiens
TLVDEVFRI

SEQ ID NO: 2873 - protein, 9 aa, Homo Sapiens
TLVDFPLHL

SEQ ID NO: 2874 - protein, 9 aa, Homo Sapiens
TLVEAIKQV

SEQ ID NO: 2875 - protein, 9 aa, Homo Sapiens
TLVTWLQCV

SEQ ID NO: 2876 - protein, 9 aa, Homo Sapiens
TLVYHVVGV

SEQ ID NO: 2877 - protein, 9 aa, Homo Sapiens
TLWGFVPFV

SEQ ID NO: 2878 - protein, 9 aa, Homo Sapiens
TLWGGLLRL

SEQ ID NO: 2879 - protein, 9 aa, Homo Sapiens
TLWNEIERL

SEQ ID NO: 2880 - protein, 9 aa, Homo Sapiens
TLWNQELYI

SEQ ID NO: 2881 - protein, 9 aa, Homo Sapiens
TLWQIVINI

SEQ ID NO: 2882 - protein, 9 aa, Homo Sapiens
TLWRGPVVV

SEQ ID NO: 2883 - protein, 9 aa, Homo Sapiens
TLWVDPCEV

SEQ ID NO: 2884 - protein, 9 aa, Homo Sapiens
TLWVDPYEV

SEQ ID NO: 2885 - protein, 9 aa, Homo Sapiens
TLWYKIFTT

SEQ ID NO: 2886 - protein, 9 aa, Homo Sapiens
TLWYRAPEV

SEQ ID NO: 2887 - protein, 9 aa, Homo Sapiens
TLWYRSPEV

SEQ ID NO: 2888 - protein, 9 aa, Homo Sapiens
TLWYVPLSL

SEQ ID NO: 2889 - protein, 9 aa, Homo Sapiens
TLYGSQIKL

SEQ ID NO: 2890 - protein, 9 aa, Homo Sapiens
TLYHLRLLV

SEQ ID NO: 2891 - protein, 9 aa, Homo Sapiens
TLYSGLDEV

SEQ ID NO: 2892 - protein, 9 aa, Homo Sapiens
TMADQIVTV

SEQ ID NO: 2893 - protein, 9 aa, Homo Sapiens
TMFEFAFHL

SEQ ID NO: 2894 - protein, 9 aa, Homo Sapiens
TMGFEVPGV

SEQ ID NO: 2895 - protein, 9 aa, Homo Sapiens
TMINAIPVA

SEQ ID NO: 2896 - protein, 9 aa, Homo Sapiens
TMLELLLRL

SEQ ID NO: 2897 - protein, 9 aa, Homo Sapiens
TMLGVSHVV

SEQ ID NO: 2898 - protein, 9 aa, Homo Sapiens
TMLSLEFHL

SEQ ID NO: 2899 - protein, 9 aa, Homo Sapiens
TMVDRIEEV

SEQ ID NO: 2900 - protein, 9 aa, Homo Sapiens
TQILSVPKV

SEQ ID NO: 2901 - protein, 9 aa, Homo Sapiens
TTFPRPVTV

SEQ ID NO: 2902 - protein, 9 aa, Homo Sapiens
TVAPFNPTV

SEQ ID NO: 2903 - protein, 9 aa, Homo Sapiens
TVFEGRIYV

SEQ ID NO: 2904 - protein, 9 aa, Homo Sapiens
TVFEHTFHV

SEQ ID NO: 2905 - protein, 9 aa, Homo Sapiens
TVIRDPPSI

SEQ ID NO: 2906 - protein, 9 aa, Homo Sapiens
TVLDAIYEV

SEQ ID NO: 2907 - protein, 9 aa, Homo Sapiens
TVLEKVYEL

SEQ ID NO: 2908 - protein, 9 aa, Homo Sapiens
TVLGKIWKL

SEQ ID NO: 2909 - protein, 9 aa, Homo Sapiens
TVLPFVSTV

SEQ ID NO: 2910 - protein, 9 aa, Homo Sapiens
TVMDEIHTV

SEQ ID NO: 2911 - protein, 9 aa, Homo Sapiens
TVMGKIFAV

SEQ ID NO: 2912 - protein, 9 aa, Homo Sapiens
TVPPVFVSV

SEQ ID NO: 2913 - protein, 9 aa, Homo Sapiens
TVTTVILEV

SEQ ID NO: 2914 - protein, 9 aa, Homo Sapiens
VAPFPEVFG

SEQ ID NO: 2915 - protein, 9 aa, Homo Sapiens
VIDGHIYAV

SEQ ID NO: 2916 - protein, 9 aa, Homo Sapiens
VIFDLPTTV

SEQ ID NO: 2917 - protein, 9 aa, Homo Sapiens
VIIPLLHTV

SEQ ID NO: 2918 - protein, 9 aa, Homo Sapiens
VILDPVHSV

SEQ ID NO: 2919 - protein, 9 aa, Homo Sapiens
VILPTVHEV

SEQ ID NO: 2920 - protein, 9 aa, Homo Sapiens
VITETVVEV

SEQ ID NO: 2921 - protein, 9 aa, Homo Sapiens
VKNLLPKSI

SEQ ID NO: 2922 - protein, 9 aa, Homo Sapiens
VLADALKSI

SEQ ID NO: 2923 - protein, 9 aa, Homo Sapiens
VLADFEAGL

SEQ ID NO: 2924 - protein, 9 aa, Homo Sapiens
VLADLKVQL

SEQ ID NO: 2925 - protein, 9 aa, Homo Sapiens
VLADQEVRL

SEQ ID NO: 2926 - protein, 9 aa, Homo Sapiens
VLADQVWTL

SEQ ID NO: 2927 - protein, 9 aa, Homo Sapiens
VLAETLTQV

SEQ ID NO: 2928 - protein, 9 aa, Homo Sapiens
VLAFLVHEL

SEQ ID NO: 2929 - protein, 9 aa, Homo Sapiens
VLAHTILGV

SEQ ID NO: 2930 - protein, 9 aa, Homo Sapiens
VLASLIIRL

SEQ ID NO: 2931 - protein, 9 aa, Homo Sapiens
VLAWGLLNV

SEQ ID NO: 2932 - protein, 9 aa, Homo Sapiens
VLAYFLPEA

SEQ ID NO: 2933 - protein, 9 aa, Homo Sapiens
VLDDKLVFV

SEQ ID NO: 2934 - protein, 9 aa, Homo Sapiens
VLDDKLYVV

SEQ ID NO: 2935 - protein, 9 aa, Homo Sapiens
VLDELPPLI

SEQ ID NO: 2936 - protein, 9 aa, Homo Sapiens
VLDSVDVRL

SEQ ID NO: 2937 - protein, 9 aa, Homo Sapiens
VLEDLEVTV

SEQ ID NO: 2938 - protein, 9 aa, Homo Sapiens
VLFELKLLL

SEQ ID NO: 2939 - protein, 9 aa, Homo Sapiens
VLFESQFSV

SEQ ID NO: 2940 - protein, 9 aa, Homo Sapiens
VLFEVAWEV

SEQ ID NO: 2941 - protein, 9 aa, Homo Sapiens
VLFGFVPET

SEQ ID NO: 2942 - protein, 9 aa, Homo Sapiens
VLFGKPMVV

SEQ ID NO: 2943 - protein, 9 aa, Homo Sapiens
VLFGLLREV

SEQ ID NO: 2944 - protein, 9 aa, Homo Sapiens
VLFHNLPSL

SEQ ID NO: 2945 - protein, 9 aa, Homo Sapiens
VLFTGVKEV

SEQ ID NO: 2946 - protein, 9 aa, Homo Sapiens
VLFTITKTV

SEQ ID NO: 2947 - protein, 9 aa, Homo Sapiens
VLGPKIEAV

SEQ ID NO: 2948 - protein, 9 aa, Homo Sapiens
VLHEGTNFV

SEQ ID NO: 2949 - protein, 9 aa, Homo Sapiens
VLIANLEKL

SEQ ID NO: 2950 - protein, 9 aa, Homo Sapiens
VLIDYQRNV

SEQ ID NO: 2951 - protein, 9 aa, Homo Sapiens
VLIETLVTL

SEQ ID NO: 2952 - protein, 9 aa, Homo Sapiens
VLIGHSYGV

SEQ ID NO: 2953 - protein, 9 aa, Homo Sapiens
VLIGSNHSL

SEQ ID NO: 2954 - protein, 9 aa, Homo Sapiens
VLIKWFPEV

SEQ ID NO: 2955 - protein, 9 aa, Homo Sapiens
VLIPKLPQL

SEQ ID NO: 2956 - protein, 9 aa, Homo Sapiens
VLITTLITA

SEQ ID NO: 2957 - protein, 9 aa, Homo Sapiens
VLKEIVERV

SEQ ID NO: 2958 - protein, 9 aa, Homo Sapiens
VLKVFLENV

SEQ ID NO: 2959 - protein, 9 aa, Homo Sapiens
VLLDHLSLA

SEQ ID NO: 2960 - protein, 9 aa, Homo Sapiens
VLLDSVEKL

SEQ ID NO: 2961 - protein, 9 aa, Homo Sapiens
VLLESKILL

SEQ ID NO: 2962 - protein, 9 aa, Homo Sapiens
VLLFIEHSV

SEQ ID NO: 2963 - protein, 9 aa, Homo Sapiens
VLLGHIFYV

SEQ ID NO: 2964 - protein, 9 aa, Homo Sapiens
VLLGKVYVV

SEQ ID NO: 2965 - protein, 9 aa, Homo Sapiens
VLLHVSVLL

SEQ ID NO: 2966 - protein, 9 aa, Homo Sapiens
VLLKIVEQI

SEQ ID NO: 2967 - protein, 9 aa, Homo Sapiens
VLLRVLILL

SEQ ID NO: 2968 - protein, 9 aa, Homo Sapiens
VLLSEILHL

SEQ ID NO: 2969 - protein, 9 aa, Homo Sapiens
VLLSHLSYL

SEQ ID NO: 2970 - protein, 9 aa, Homo Sapiens
VLLSTIHEL

SEQ ID NO: 2971 - protein, 9 aa, Homo Sapiens
VLLTGLHAV

SEQ ID NO: 2972 - protein, 9 aa, Homo Sapiens
VLLTMIARV

SEQ ID NO: 2973 - protein, 9 aa, Homo Sapiens
VLLTRLENV

SEQ ID NO: 2974 - protein, 9 aa, Homo Sapiens
VLMDGSVKL

SEQ ID NO: 2975 - protein, 9 aa, Homo Sapiens
VLMDLKALL

SEQ ID NO: 2976 - protein, 9 aa, Homo Sapiens
VLMDRLPSL

SEQ ID NO: 2977 - protein, 9 aa, Homo Sapiens
VLMEIIAKV

SEQ ID NO: 2978 - protein, 9 aa, Homo Sapiens
VLMEKPDVV

SEQ ID NO: 2979 - protein, 9 aa, Homo Sapiens
VLMEMSYRL

SEQ ID NO: 2980 - protein, 9 aa, Homo Sapiens
VLMENIVYL

SEQ ID NO: 2981 - protein, 9 aa, Homo Sapiens
VLMGQLYVV

SEQ ID NO: 2982 - protein, 9 aa, Homo Sapiens
VLMPWIHEL

SEQ ID NO: 2983 - protein, 9 aa, Homo Sapiens
VLMTEDIKL

SEQ ID NO: 2984 - protein, 9 aa, Homo Sapiens
VLMWEIYSL

SEQ ID NO: 2985 - protein, 9 aa, Homo Sapiens
VLNEYFHNV

SEQ ID NO: 2986 - protein, 9 aa, Homo Sapiens
VLNNVVIHL

SEQ ID NO: 2987 - protein, 9 aa, Homo Sapiens
VLQDIQVML

SEQ ID NO: 2988 - protein, 9 aa, Homo Sapiens
VLQDTVEQL

SEQ ID NO: 2989 - protein, 9 aa, Homo Sapiens
VLQEKIEVV

SEQ ID NO: 2990 - protein, 9 aa, Homo Sapiens
VLQEKVPEI

SEQ ID NO: 2991 - protein, 9 aa, Homo Sapiens
VLQNVAFSV

SEQ ID NO: 2992 - protein, 9 aa, Homo Sapiens
VLQQHLETL

SEQ ID NO: 2993 - protein, 9 aa, Homo Sapiens
VLQRSLVTV

SEQ ID NO: 2994 - protein, 9 aa, Homo Sapiens
VLQYVVPEV

SEQ ID NO: 2995 - protein, 9 aa, Homo Sapiens
VLSDIIQNL

SEQ ID NO: 2996 - protein, 9 aa, Homo Sapiens
VLSDVIPSI

SEQ ID NO: 2997 - protein, 9 aa, Homo Sapiens
VLSELAARL

SEQ ID NO: 2998 - protein, 9 aa, Homo Sapiens
VLSELLWQV

SEQ ID NO: 2999 - protein, 9 aa, Homo Sapiens
VLSNVEVTL

SEQ ID NO: 3000 - protein, 9 aa, Homo Sapiens
VLSTGVPTV

SEQ ID NO: 3001 - protein, 9 aa, Homo Sapiens
VLTESPPSL

SEQ ID NO: 3002 - protein, 9 aa, Homo Sapiens
VLTGILEQV

SEQ ID NO: 3003 - protein, 9 aa, Homo Sapiens
VLTNKLLTV

SEQ ID NO: 3004 - protein, 9 aa, Homo Sapiens
VLTSVTEAL

SEQ ID NO: 3005 - protein, 9 aa, Homo Sapiens
VLVAELVGV

SEQ ID NO: 3006 - protein, 9 aa, Homo Sapiens
VLVDRTIYI

SEQ ID NO: 3007 - protein, 9 aa, Homo Sapiens
VLVQVSPSL

SEQ ID NO: 3008 - protein, 9 aa, Homo Sapiens
VLVSFAYKV

SEQ ID NO: 3009 - protein, 9 aa, Homo Sapiens
VLWDRTFSL

SEQ ID NO: 3010 - protein, 9 aa, Homo Sapiens
VLWFKPVEL

SEQ ID NO: 3011 - protein, 9 aa, Homo Sapiens
VLWGETVHL

SEQ ID NO: 3012 - protein, 9 aa, Homo Sapiens
VLWKEILFL

SEQ ID NO: 3013 - protein, 9 aa, Homo Sapiens
VLWNKTVTA

SEQ ID NO: 3014 - protein, 9 aa, Homo Sapiens
VLWPESISV

SEQ ID NO: 3015 - protein, 9 aa, Homo Sapiens
VLYDRPLKI

SEQ ID NO: 3016 - protein, 9 aa, Homo Sapiens
VLYENALKL

SEQ ID NO: 3017 - protein, 9 aa, Homo Sapiens
VLYENKVAV

SEQ ID NO: 3018 - protein, 9 aa, Homo Sapiens
VLYPHPPLA

SEQ ID NO: 3019 - protein, 9 aa, Homo Sapiens
VLYSIAEKV

SEQ ID NO: 3020 - protein, 9 aa, Homo Sapiens
VLYTGDFRL

SEQ ID NO: 3021 - protein, 9 aa, Homo Sapiens
VLYTGVVRV

SEQ ID NO: 3022 - protein, 9 aa, Homo Sapiens
VMAPRTLVL

SEQ ID NO: 3023 - protein, 9 aa, Homo Sapiens
VMDAALLLI

SEQ ID NO: 3024 - protein, 9 aa, Homo Sapiens
VMDSKIVQV

SEQ ID NO: 3025 - protein, 9 aa, Homo Sapiens
VMFKTPVSI

SEQ ID NO: 3026 - protein, 9 aa, Homo Sapiens
VMLDVPIRL

SEQ ID NO: 3027 - protein, 9 aa, Homo Sapiens
VMLQINPKL

SEQ ID NO: 3028 - protein, 9 aa, Homo Sapiens
VMTLVSTYL

SEQ ID NO: 3029 - protein, 9 aa, Homo Sapiens
VMYGKVYRI

SEQ ID NO: 3030 - protein, 9 aa, Homo Sapiens
VPQLEIVPN

SEQ ID NO: 3031 - protein, 9 aa, Homo Sapiens
VQIGDIVTV

SEQ ID NO: 3032 - protein, 9 aa, Homo Sapiens
VTEGVIVPE

SEQ ID NO: 3033 - protein, 9 aa, Homo Sapiens
VTESFLLAV

SEQ ID NO: 3034 - protein, 9 aa, Homo Sapiens
VTLDGIPEV

SEQ ID NO: 3035 - protein, 9 aa, Homo Sapiens
VTRDLVSEV

SEQ ID NO: 3036 - protein, 9 aa, Homo Sapiens
VTTDIQVKV

SEQ ID NO: 3037 - protein, 9 aa, Homo Sapiens
VVAEFVPLI

SEQ ID NO: 3038 - protein, 9 aa, Homo Sapiens
VVLNATWLV

SEQ ID NO: 3039 - protein, 9 aa, Homo Sapiens
VVLPAPPAV

SEQ ID NO: 3040 - protein, 9 aa, Homo Sapiens
VVPPFLQPE

SEQ ID NO: 3041 - protein, 9 aa, Homo Sapiens
VVVGDLVEV

SEQ ID NO: 3042 - protein, 9 aa, Homo Sapiens
VVWGTVIRV

SEQ ID NO: 3043 - protein, 9 aa, Homo Sapiens
VVWLVAVIV

SEQ ID NO: 3044 - protein, 9 aa, Homo Sapiens
WLLQKNPQL

SEQ ID NO: 3045 - protein, 9 aa, Homo Sapiens
WLMPVIPAL

SEQ ID NO: 3046 - protein, 9 aa, Homo Sapiens
WLPEVMILV

SEQ ID NO: 3047 - protein, 9 aa, Homo Sapiens
WLSTSIPEA

SEQ ID NO: 3048 - protein, 9 aa, Homo Sapiens
WLTPVIPAL

SEQ ID NO: 3049 - protein, 9 aa, Homo Sapiens
WLVDHVYAI

SEQ ID NO: 3050 - protein, 9 aa, Homo Sapiens
WMLEQLRQV

SEQ ID NO: 3051 - protein, 9 aa, Homo Sapiens
YAFNMKATV

SEQ ID NO: 3052 - protein, 9 aa, Homo Sapiens
YAFPKSITV

SEQ ID NO: 3053 - protein, 9 aa, Homo Sapiens
YALNHTLSV

SEQ ID NO: 3054 - protein, 9 aa, Homo Sapiens
YGLPVVVKL

SEQ ID NO: 3055 - protein, 9 aa, Homo Sapiens
YIAGFFLTV

SEQ ID NO: 3056 - protein, 9 aa, Homo Sapiens
YIALKLVAV

SEQ ID NO: 3057 - protein, 9 aa, Homo Sapiens
YIFEEPFTI

SEQ ID NO: 3058 - protein, 9 aa, Homo Sapiens
YIFTTPKSV

SEQ ID NO: 3059 - protein, 9 aa, Homo Sapiens
YIGEVLVSV

SEQ ID NO: 3060 - protein, 9 aa, Homo Sapiens
YIIEREPLI

SEQ ID NO: 3061 - protein, 9 aa, Homo Sapiens
YILDLQVVL

SEQ ID NO: 3062 - protein, 9 aa, Homo Sapiens
YILGDNFTV

SEQ ID NO: 3063 - protein, 9 aa, Homo Sapiens
YILKIVPTV

SEQ ID NO: 3064 - protein, 9 aa, Homo Sapiens
YIWDRHYNI

SEQ ID NO: 3065 - protein, 9 aa, Homo Sapiens
YIYKDTIQV

SEQ ID NO: 3066 - protein, 9 aa, Homo Sapiens
YLADIFTKL

SEQ ID NO: 3067 - protein, 9 aa, Homo Sapiens
YLADLYHFV

SEQ ID NO: 3068 - protein, 9 aa, Homo Sapiens
YLADVTNAL

SEQ ID NO: 3069 - protein, 9 aa, Homo Sapiens
YLAHFIEGL

SEQ ID NO: 3070 - protein, 9 aa, Homo Sapiens
YLAHLAHHL

SEQ ID NO: 3071 - protein, 9 aa, Homo Sapiens
YLAIVWPVV

SEQ ID NO: 3072 - protein, 9 aa, Homo Sapiens
YLAKVKSLL

SEQ ID NO: 3073 - protein, 9 aa, Homo Sapiens
YLAPFLRNV

SEQ ID NO: 3074 - protein, 9 aa, Homo Sapiens
YLAPHVRTL

SEQ ID NO: 3075 - protein, 9 aa, Homo Sapiens
YLASLIRSV

SEQ ID NO: 3076 - protein, 9 aa, Homo Sapiens
YLATFALKV

SEQ ID NO: 3077 - protein, 9 aa, Homo Sapiens
YLDASLITV

SEQ ID NO: 3078 - protein, 9 aa, Homo Sapiens
YLDEYIARM

SEQ ID NO: 3079 - protein, 9 aa, Homo Sapiens
YLDFTNPKV

SEQ ID NO: 3080 - protein, 9 aa, Homo Sapiens
YLDIINLFL

SEQ ID NO: 3081 - protein, 9 aa, Homo Sapiens
YLDKTFYNL

SEQ ID NO: 3082 - protein, 9 aa, Homo Sapiens
YLDNGVVFV

SEQ ID NO: 3083 - protein, 9 aa, Homo Sapiens
YLDPAQRGV

SEQ ID NO: 3084 - protein, 9 aa, Homo Sapiens
YLDPRITVA

SEQ ID NO: 3085 - protein, 9 aa, Homo Sapiens
YLDQRELLL

SEQ ID NO: 3086 - protein, 9 aa, Homo Sapiens
YLDRFLAGV

SEQ ID NO: 3087 - protein, 9 aa, Homo Sapiens
YLDRLIPQA

SEQ ID NO: 3088 - protein, 9 aa, Homo Sapiens
YLEEILVRV

SEQ ID NO: 3089 - protein, 9 aa, Homo Sapiens
YLEPKLTQV

SEQ ID NO: 3090 - protein, 9 aa, Homo Sapiens
YLEPYLKEV

SEQ ID NO: 3091 - protein, 9 aa, Homo Sapiens
YLFAVNIKL

SEQ ID NO: 3092 - protein, 9 aa, Homo Sapiens
YLFERIKEL

SEQ ID NO: 3093 - protein, 9 aa, Homo Sapiens
YLFERTFNL

SEQ ID NO: 3094 - protein, 9 aa, Homo Sapiens
YLFGRNPDL

SEQ ID NO: 3095 - protein, 9 aa, Homo Sapiens
YLFPGIPEL

SEQ ID NO: 3096 - protein, 9 aa, Homo Sapiens
YLFQLLQGL

SEQ ID NO: 3097 - protein, 9 aa, Homo Sapiens
YLFTIINSL

SEQ ID NO: 3098 - protein, 9 aa, Homo Sapiens
YLGDFADTL

SEQ ID NO: 3099 - protein, 9 aa, Homo Sapiens
YLGIVELLV

SEQ ID NO: 3100 - protein, 9 aa, Homo Sapiens
YLGNINPQM

SEQ ID NO: 3101 - protein, 9 aa, Homo Sapiens
YLGPHIASV

SEQ ID NO: 3102 - protein, 9 aa, Homo Sapiens
YLGPVSPSL

SEQ ID NO: 3103 - protein, 9 aa, Homo Sapiens
YLHDFLKYL

SEQ ID NO: 3104 - protein, 9 aa, Homo Sapiens
YLHEDIPGL

SEQ ID NO: 3105 - protein, 9 aa, Homo Sapiens
YLHNQGIGV

SEQ ID NO: 3106 - protein, 9 aa, Homo Sapiens
YLHSGQVAL

SEQ ID NO: 3107 - protein, 9 aa, Homo Sapiens
YLHSQVVSV

SEQ ID NO: 3108 - protein, 9 aa, Homo Sapiens
YLHSYLTYI

SEQ ID NO: 3109 - protein, 9 aa, Homo Sapiens
YLHTNVALV

SEQ ID NO: 3110 - protein, 9 aa, Homo Sapiens
YLIARVMLL

SEQ ID NO: 3111 - protein, 9 aa, Homo Sapiens
YLIASIDHL

SEQ ID NO: 3112 - protein, 9 aa, Homo Sapiens
YLIEPDVEL

SEQ ID NO: 3113 - protein, 9 aa, Homo Sapiens
YLIKYIAIV

SEQ ID NO: 3114 - protein, 9 aa, Homo Sapiens
YLINEIDRI

SEQ ID NO: 3115 - protein, 9 aa, Homo Sapiens
YLISELEAA

SEQ ID NO: 3116 - protein, 9 aa, Homo Sapiens
YLITLLEHL

SEQ ID NO: 3117 - protein, 9 aa, Homo Sapiens
YLITSVELL

SEQ ID NO: 3118 - protein, 9 aa, Homo Sapiens
YLKDLIEEV

SEQ ID NO: 3119 - protein, 9 aa, Homo Sapiens
YLLDLHSYL

SEQ ID NO: 3120 - protein, 9 aa, Homo Sapiens
YLLDLLRLP

SEQ ID NO: 3121 - protein, 9 aa, Homo Sapiens
YLLDQHILI

SEQ ID NO: 3122 - protein, 9 aa, Homo Sapiens
YLLEKFVAV

SEQ ID NO: 3123 - protein, 9 aa, Homo Sapiens
YLLEKSRIV

SEQ ID NO: 3124 - protein, 9 aa, Homo Sapiens
YLLESVNKL

SEQ ID NO: 3125 - protein, 9 aa, Homo Sapiens
YLLGHDIRI

SEQ ID NO: 3126 - protein, 9 aa, Homo Sapiens
YLLLKTHQL

SEQ ID NO: 3127 - protein, 9 aa, Homo Sapiens
YLLPAGYSL

SEQ ID NO: 3128 - protein, 9 aa, Homo Sapiens
YLLPAIVHI

SEQ ID NO: 3129 - protein, 9 aa, Homo Sapiens
YLLPESVDL

SEQ ID NO: 3130 - protein, 9 aa, Homo Sapiens
YLLPYENLL

SEQ ID NO: 3131 - protein, 9 aa, Homo Sapiens
YLLQRAVEV

SEQ ID NO: 3132 - protein, 9 aa, Homo Sapiens
YLLREWVNL

SEQ ID NO: 3133 - protein, 9 aa, Homo Sapiens
YLLRSLDYV

SEQ ID NO: 3134 - protein, 9 aa, Homo Sapiens
YLLTESSKL

SEQ ID NO: 3135 - protein, 9 aa, Homo Sapiens
YLLYSLIFV

SEQ ID NO: 3136 - protein, 9 aa, Homo Sapiens
YLMEVTHDL

SEQ ID NO: 3137 - protein, 9 aa, Homo Sapiens
YLMVENIRL

SEQ ID NO: 3138 - protein, 9 aa, Homo Sapiens
YLNALVHLI

SEQ ID NO: 3139 - protein, 9 aa, Homo Sapiens
YLNDGLWHM

SEQ ID NO: 3140 - protein, 9 aa, Homo Sapiens
YLNDLHEVL

SEQ ID NO: 3141 - protein, 9 aa, Homo Sapiens
YLNDRVDEL

SEQ ID NO: 3142 - protein, 9 aa, Homo Sapiens
YLNHLEPPV

SEQ ID NO: 3143 - protein, 9 aa, Homo Sapiens
YLNLIELFL

SEQ ID NO: 3144 - protein, 9 aa, Homo Sapiens
YLNSVVQVL

SEQ ID NO: 3145 - protein, 9 aa, Homo Sapiens
YLPEDFIRV

SEQ ID NO: 3146 - protein, 9 aa, Homo Sapiens
YLPHAPPFA

SEQ ID NO: 3147 - protein, 9 aa, Homo Sapiens
YLPHYIPGV

SEQ ID NO: 3148 - protein, 9 aa, Homo Sapiens
YLPPATQVV

SEQ ID NO: 3149 - protein, 9 aa, Homo Sapiens
YLPPGFLSA

SEQ ID NO: 3150 - protein, 9 aa, Homo Sapiens
YLPVKIEQV

SEQ ID NO: 3151 - protein, 9 aa, Homo Sapiens
YLPYPIHQV

SEQ ID NO: 3152 - protein, 9 aa, Homo Sapiens
YLQDYTDRV

SEQ ID NO: 3153 - protein, 9 aa, Homo Sapiens
YLQNWSHVL

SEQ ID NO: 3154 - protein, 9 aa, Homo Sapiens
YLQPKLLGI

SEQ ID NO: 3155 - protein, 9 aa, Homo Sapiens
YLQQVNHKL

SEQ ID NO: 3156 - protein, 9 aa, Homo Sapiens
YLSAKVEAL

SEQ ID NO: 3157 - protein, 9 aa, Homo Sapiens
YLSDNVHLV

SEQ ID NO: 3158 - protein, 9 aa, Homo Sapiens
YLSEAGAYL

SEQ ID NO: 3159 - protein, 9 aa, Homo Sapiens
YLSEKVLAA

SEQ ID NO: 3160 - protein, 9 aa, Homo Sapiens
YLSGIAHFL

SEQ ID NO: 3161 - protein, 9 aa, Homo Sapiens
YLSKIIPAL

SEQ ID NO: 3162 - protein, 9 aa, Homo Sapiens
YLSLLNQQL

SEQ ID NO: 3163 - protein, 9 aa, Homo Sapiens
YLSNVDVYL

SEQ ID NO: 3164 - protein, 9 aa, Homo Sapiens
YLSPDLSKV

SEQ ID NO: 3165 - protein, 9 aa, Homo Sapiens
YLSPKLWAL

SEQ ID NO: 3166 - protein, 9 aa, Homo Sapiens
YLSSVITTI

SEQ ID NO: 3167 - protein, 9 aa, Homo Sapiens
YLSTCIDQV

SEQ ID NO: 3168 - protein, 9 aa, Homo Sapiens
YLSVKIWDL

SEQ ID NO: 3169 - protein, 9 aa, Homo Sapiens
YLSVKVWDL

SEQ ID NO: 3170 - protein, 9 aa, Homo Sapiens
YLTAEILEL

SEQ ID NO: 3171 - protein, 9 aa, Homo Sapiens
YLTAEVLEL

SEQ ID NO: 3172 - protein, 9 aa, Homo Sapiens
YLTDLQVSL

SEQ ID NO: 3173 - protein, 9 aa, Homo Sapiens
YLTDRVMTV

SEQ ID NO: 3174 - protein, 9 aa, Homo Sapiens
YLTGYNFTL

SEQ ID NO: 3175 - protein, 9 aa, Homo Sapiens
YLTHDSPSV

SEQ ID NO: 3176 - protein, 9 aa, Homo Sapiens
YLTPLILTL

SEQ ID NO: 3177 - protein, 9 aa, Homo Sapiens
YLTSQLPPL

SEQ ID NO: 3178 - protein, 9 aa, Homo Sapiens
YLTYILLHL

SEQ ID NO: 3179 - protein, 9 aa, Homo Sapiens
YLVAEKVTV

SEQ ID NO: 3180 - protein, 9 aa, Homo Sapiens
YLVDFTQKI

SEQ ID NO: 3181 - protein, 9 aa, Homo Sapiens
YLVEDIQHI

SEQ ID NO: 3182 - protein, 9 aa, Homo Sapiens
YLVELSSLL

SEQ ID NO: 3183 - protein, 9 aa, Homo Sapiens
YLVNDIYEL

SEQ ID NO: 3184 - protein, 9 aa, Homo Sapiens
YLVPELDGV

SEQ ID NO: 3185 - protein, 9 aa, Homo Sapiens
YLVSNVIEL

SEQ ID NO: 3186 - protein, 9 aa, Homo Sapiens
YLVTKVVAV

SEQ ID NO: 3187 - protein, 9 aa, Homo Sapiens
YLVTSIAKA

SEQ ID NO: 3188 - protein, 9 aa, Homo Sapiens
YLVVKIEKV

SEQ ID NO: 3189 - protein, 9 aa, Homo Sapiens
YLVYILNEL

SEQ ID NO: 3190 - protein, 9 aa, Homo Sapiens
YLWLKLNQV

SEQ ID NO: 3191 - protein, 9 aa, Homo Sapiens
YLWNLQVKL

SEQ ID NO: 3192 - protein, 9 aa, Homo Sapiens
YLWQGVRVA

SEQ ID NO: 3193 - protein, 9 aa, Homo Sapiens
YLYCGQEGL

SEQ ID NO: 3194 - protein, 9 aa, Homo Sapiens
YLYDLNHTL

SEQ ID NO: 3195 - protein, 9 aa, Homo Sapiens
YLYDRLLRI

SEQ ID NO: 3196 - protein, 9 aa, Homo Sapiens
YLYEHNFAF

SEQ ID NO: 3197 - protein, 9 aa, Homo Sapiens
YLYKYLWRL

SEQ ID NO: 3198 - protein, 9 aa, Homo Sapiens
YLYNEGLSV

SEQ ID NO: 3199 - protein, 9 aa, Homo Sapiens
YLYPDITRL

SEQ ID NO: 3200 - protein, 9 aa, Homo Sapiens
YLYSLEVQL

SEQ ID NO: 3201 - protein, 9 aa, Homo Sapiens
YLYTKEQLL

SEQ ID NO: 3202 - protein, 9 aa, Homo Sapiens
YMAELIERL

SEQ ID NO: 3203 - protein, 9 aa, Homo Sapiens
YMAPEVVEA

SEQ ID NO: 3204 - protein, 9 aa, Homo Sapiens
YMDQWVPVI

SEQ ID NO: 3205 - protein, 9 aa, Homo Sapiens
YMDTLNIFM

SEQ ID NO: 3206 - protein, 9 aa, Homo Sapiens
YMFEAREFL

SEQ ID NO: 3207 - protein, 9 aa, Homo Sapiens
YMFEEVPIV

SEQ ID NO: 3208 - protein, 9 aa, Homo Sapiens
YMIAHITGL

SEQ ID NO: 3209 - protein, 9 aa, Homo Sapiens
YMLDLQKQL

SEQ ID NO: 3210 - protein, 9 aa, Homo Sapiens
YMLEHVITL

SEQ ID NO: 3211 - protein, 9 aa, Homo Sapiens
YMVHIQVTL

SEQ ID NO: 3212 - protein, 9 aa, Homo Sapiens
YPFPGPIPN

SEQ ID NO: 3213 - protein, 9 aa, Homo Sapiens
YQEPVLGPV

SEQ ID NO: 3214 - protein, 9 aa, Homo Sapiens
YQLEEIQRV

SEQ ID NO: 3215 - protein, 9 aa, Homo Sapiens
YQSELELRV

SEQ ID NO: 3216 - protein, 9 aa, Homo Sapiens
YQSGVVVLV

SEQ ID NO: 3217 - protein, 9 aa, Homo Sapiens
YQVGQLYSV

SEQ ID NO: 3218 - protein, 9 aa, Homo Sapiens
YQYPVIIHL

SEQ ID NO: 3219 - protein, 9 aa, Homo Sapiens
YTLDSILFL

SEQ ID NO: 3220 - protein, 9 aa, Homo Sapiens
YTSPVNPAV

SEQ ID NO: 3221 - protein, 9 aa, Homo Sapiens
YTWEEVFRV

SEQ ID NO: 3222 - protein, 9 aa, Homo Sapiens
YVINDLTAV

SEQ ID NO: 3223 - protein, 9 aa, Homo Sapiens
YVLDLAAKV

SEQ ID NO: 3224 - protein, 9 aa, Homo Sapiens
YVLEGLKSV

SEQ ID NO: 3225 - protein, 9 aa, Homo Sapiens
YVLKYLFEV

SEQ ID NO: 3226 - protein, 9 aa, Homo Sapiens
YVLPLIIIL

SEQ ID NO: 3227 - protein, 9 aa, Homo Sapiens
YVLPVVSYI

SEQ ID NO: 3228 - protein, 9 aa, Homo Sapiens
YVVPFVAKV

SEQ ID NO: 3229 - protein, 9 aa, Homo Sapiens
YVYEYLLHV

SEQ ID NO: 3230 - protein, 10 aa, Homo Sapiens
AIIDGKIFCV

SEQ ID NO: 3231 - protein, 10 aa, Homo Sapiens
AIMGFIGFFV

SEQ ID NO: 3232 - protein, 10 aa, Homo Sapiens
ALAEIAKAEL

SEQ ID NO: 3233 - protein, 10 aa, Homo Sapiens
ALAKPPVVSV

SEQ ID NO: 3234 - protein, 10 aa, Homo Sapiens
ALALIYNEAL

SEQ ID NO: 3235 - protein, 10 aa, Homo Sapiens
ALDAGAVYTL

SEQ ID NO: 3236 - protein, 10 aa, Homo Sapiens
ALDPAAQAFL

SEQ ID NO: 3237 - protein, 10 aa, Homo Sapiens
ALDVQGIYRV

SEQ ID NO: 3238 - protein, 10 aa, Homo Sapiens
ALFNTRIPRV

SEQ ID NO: 3239 - protein, 10 aa, Homo Sapiens
ALFPAPLAQI

SEQ ID NO: 3240 - protein, 10 aa, Homo Sapiens
ALFTFSPLTV

SEQ ID NO: 3241 - protein, 10 aa, Homo Sapiens
ALFTKVLENV

SEQ ID NO: 3242 - protein, 10 aa, Homo Sapiens
ALGDKFLLRV

SEQ ID NO: 3243 - protein, 10 aa, Homo Sapiens
ALIDEQILCV

SEQ ID NO: 3244 - protein, 10 aa, Homo Sapiens
ALIENLTHQI

SEQ ID NO: 3245 - protein, 10 aa, Homo Sapiens
ALIPIPLAVI

SEQ ID NO: 3246 - protein, 10 aa, Homo Sapiens
ALLAGPLRPA

SEQ ID NO: 3247 - protein, 10 aa, Homo Sapiens
ALLDGRLQVV

SEQ ID NO: 3248 - protein, 10 aa, Homo Sapiens
ALLDQALSNA

SEQ ID NO: 3249 - protein, 10 aa, Homo Sapiens
ALLDVTPKAV

SEQ ID NO: 3250 - protein, 10 aa, Homo Sapiens
ALLEDSCHYL

SEQ ID NO: 3251 - protein, 10 aa, Homo Sapiens
ALLELVPWRA

SEQ ID NO: 3252 - protein, 10 aa, Homo Sapiens
ALLESVLRHV

SEQ ID NO: 3253 - protein, 10 aa, Homo Sapiens
ALLETNPYLL

SEQ ID NO: 3254 - protein, 10 aa, Homo Sapiens
ALLGYEMVQV

SEQ ID NO: 3255 - protein, 10 aa, Homo Sapiens
ALLNAILHSA

SEQ ID NO: 3256 - protein, 10 aa, Homo Sapiens
ALLNFLLPTI

SEQ ID NO: 3257 - protein, 10 aa, Homo Sapiens
ALLSLDPAAV

SEQ ID NO: 3258 - protein, 10 aa, Homo Sapiens
ALLSLHFLFV

SEQ ID NO: 3259 - protein, 10 aa, Homo Sapiens
ALLTGIISKA

SEQ ID NO: 3260 - protein, 10 aa, Homo Sapiens
ALMDNPTLYL

SEQ ID NO: 3261 - protein, 10 aa, Homo Sapiens
ALQDVPLSSV

SEQ ID NO: 3262 - protein, 10 aa, Homo Sapiens
ALQPGTLQLI

SEQ ID NO: 3263 - protein, 10 aa, Homo Sapiens
ALSKEGIVAL

SEQ ID NO: 3264 - protein, 10 aa, Homo Sapiens
ALTGIPLPLI

SEQ ID NO: 3265 - protein, 10 aa, Homo Sapiens
ALVDHLNVGV

SEQ ID NO: 3266 - protein, 10 aa, Homo Sapiens
ALVDQRELYL

SEQ ID NO: 3267 - protein, 10 aa, Homo Sapiens
ALVLGPLKSV

SEQ ID NO: 3268 - protein, 10 aa, Homo Sapiens
ALVQITLPTV

SEQ ID NO: 3269 - protein, 10 aa, Homo Sapiens
ALWEDEGVRA

SEQ ID NO: 3270 - protein, 10 aa, Homo Sapiens
ALWGFFPVLL

SEQ ID NO: 3271 - protein, 10 aa, Homo Sapiens
ALWKGRPLSV

SEQ ID NO: 3272 - protein, 10 aa, Homo Sapiens
ALWVSQPPEI

SEQ ID NO: 3273 - protein, 10 aa, Homo Sapiens
ALYDVRTILL

SEQ ID NO: 3274 - protein, 10 aa, Homo Sapiens
ALYELEGTTV

SEQ ID NO: 3275 - protein, 10 aa, Homo Sapiens
ALYEYQPLQI

SEQ ID NO: 3276 - protein, 10 aa, Homo Sapiens
ALYPGQLVQL

SEQ ID NO: 3277 - protein, 10 aa, Homo Sapiens
ALYTGFSILV

SEQ ID NO: 3278 - protein, 10 aa, Homo Sapiens
AMADAGILRL

SEQ ID NO: 3279 - protein, 10 aa, Homo Sapiens
AMAHVAGFTV

SEQ ID NO: 3280 - protein, 10 aa, Homo Sapiens
AMFDHIPVGV

SEQ ID NO: 3281 - protein, 10 aa, Homo Sapiens
AMPPPPPQGV

SEQ ID NO: 3282 - protein, 10 aa, Homo Sapiens
AVFTGIFDSV

SEQ ID NO: 3283 - protein, 10 aa, Homo Sapiens
AVIDVGINRV

SEQ ID NO: 3284 - protein, 10 aa, Homo Sapiens
AVLQGKLAEV

SEQ ID NO: 3285 - protein, 10 aa, Homo Sapiens
CLMGKGMKRV

SEQ ID NO: 3286 - protein, 10 aa, Homo Sapiens
DTNADKQLSF

SEQ ID NO: 3287 - protein, 10 aa, Homo Sapiens
ELFPHSLLSV

SEQ ID NO: 3288 - protein, 10 aa, Homo Sapiens
FIDKFTPPVV

SEQ ID NO: 3289 - protein, 10 aa, Homo Sapiens
FIFDVHVHEV

SEQ ID NO: 3290 - protein, 10 aa, Homo Sapiens
FIFEKKLAQA

SEQ ID NO: 3291 - protein, 10 aa, Homo Sapiens
FIFPASNVYL

SEQ ID NO: 3292 - protein, 10 aa, Homo Sapiens
FIFSEKPVFV

SEQ ID NO: 3293 - protein, 10 aa, Homo Sapiens
FIIEKQPPQV

SEQ ID NO: 3294 - protein, 10 aa, Homo Sapiens
FIMEGPLTRI

SEQ ID NO: 3295 - protein, 10 aa, Homo Sapiens
FIMEGTLTRV

SEQ ID NO: 3296 - protein, 10 aa, Homo Sapiens
FIYHGEVPQA

SEQ ID NO: 3297 - protein, 10 aa, Homo Sapiens
FIYQGKIPIA

SEQ ID NO: 3298 - protein, 10 aa, Homo Sapiens
FLADVDKLKL

SEQ ID NO: 3299 - protein, 10 aa, Homo Sapiens
FLAEDALNTV

SEQ ID NO: 3300 - protein, 10 aa, Homo Sapiens
FLAEDPKVTL

SEQ ID NO: 3301 - protein, 10 aa, Homo Sapiens
FLAEEGFYKF

SEQ ID NO: 3302 - protein, 10 aa, Homo Sapiens
FLAEHPNVTL

SEQ ID NO: 3303 - protein, 10 aa, Homo Sapiens
FLAERLYAEV

SEQ ID NO: 3304 - protein, 10 aa, Homo Sapiens
FLDPNNIPKA

SEQ ID NO: 3305 - protein, 10 aa, Homo Sapiens
FLEGQIHPEL

SEQ ID NO: 3306 - protein, 10 aa, Homo Sapiens
FLFASTILHL

SEQ ID NO: 3307 - protein, 10 aa, Homo Sapiens
FLFDGSPTYV

SEQ ID NO: 3308 - protein, 10 aa, Homo Sapiens
FLFDNDFPAL

SEQ ID NO: 3309 - protein, 10 aa, Homo Sapiens
FLFGEEPSKL

SEQ ID NO: 3310 - protein, 10 aa, Homo Sapiens
FLGEKYIRRV

SEQ ID NO: 3311 - protein, 10 aa, Homo Sapiens
FLGENISNFL

SEQ ID NO: 3312 - protein, 10 aa, Homo Sapiens
FLHDHVDLQV

SEQ ID NO: 3313 - protein, 10 aa, Homo Sapiens
FLIEEQKIVV

SEQ ID NO: 3314 - protein, 10 aa, Homo Sapiens
FLIGILLREV

SEQ ID NO: 3315 - protein, 10 aa, Homo Sapiens
FLIGPKLYEA

SEQ ID NO: 3316 - protein, 10 aa, Homo Sapiens
FLIPFETRQL

SEQ ID NO: 3317 - protein, 10 aa, Homo Sapiens
FLLDGFPRTV

SEQ ID NO: 3318 - protein, 10 aa, Homo Sapiens
FLLDGKVLSL

SEQ ID NO: 3319 - protein, 10 aa, Homo Sapiens
FLLEDDIHVS

SEQ ID NO: 3320 - protein, 10 aa, Homo Sapiens
FLLEPGNLEV

SEQ ID NO: 3321 - protein, 10 aa, Homo Sapiens
FLLGPRLVLA

SEQ ID NO: 3322 - protein, 10 aa, Homo Sapiens
FLLPDGLVRL

SEQ ID NO: 3323 - protein, 10 aa, Homo Sapiens
FLLPHPGLKV

SEQ ID NO: 3324 - protein, 10 aa, Homo Sapiens
FLLPHPGLQV

SEQ ID NO: 3325 - protein, 10 aa, Homo Sapiens
FLLPIKTVGV

SEQ ID NO: 3326 - protein, 10 aa, Homo Sapiens
FLLPLLIEKV

SEQ ID NO: 3327 - protein, 10 aa, Homo Sapiens
FLLPSEVPAL

SEQ ID NO: 3328 - protein, 10 aa, Homo Sapiens
FLLPTGLSSL

SEQ ID NO: 3329 - protein, 10 aa, Homo Sapiens
FLLQINDILL

SEQ ID NO: 3330 - protein, 10 aa, Homo Sapiens
FLLQQHLISA

SEQ ID NO: 3331 - protein, 10 aa, Homo Sapiens
FLLSLRGAGA

SEQ ID NO: 3332 - protein, 10 aa, Homo Sapiens
FLMQYPGRSL

SEQ ID NO: 3333 - protein, 10 aa, Homo Sapiens
FLNEDLEVKI

SEQ ID NO: 3334 - protein, 10 aa, Homo Sapiens
FLPSHSLDTV

SEQ ID NO: 3335 - protein, 10 aa, Homo Sapiens
FLQEEPGQLL

SEQ ID NO: 3336 - protein, 10 aa, Homo Sapiens
FLQEGDLISA

SEQ ID NO: 3337 - protein, 10 aa, Homo Sapiens
FLQENTHVRL

SEQ ID NO: 3338 - protein, 10 aa, Homo Sapiens
FLRDMPDPLL

SEQ ID NO: 3339 - protein, 10 aa, Homo Sapiens
FLSDGTIISV

SEQ ID NO: 3340 - protein, 10 aa, Homo Sapiens
FLSEHPNVTL

SEQ ID NO: 3341 - protein, 10 aa, Homo Sapiens
FLSTLHEVYL

SEQ ID NO: 3342 - protein, 10 aa, Homo Sapiens
FLTDMPDILL

SEQ ID NO: 3343 - protein, 10 aa, Homo Sapiens
FLTEIENLFL

SEQ ID NO: 3344 - protein, 10 aa, Homo Sapiens
FLVDGPRVQL

SEQ ID NO: 3345 - protein, 10 aa, Homo Sapiens
FLVEEEDLFL

SEQ ID NO: 3346 - protein, 10 aa, Homo Sapiens
FLVEKQPPQV

SEQ ID NO: 3347 - protein, 10 aa, Homo Sapiens
FLVSSDLTYV

SEQ ID NO: 3348 - protein, 10 aa, Homo Sapiens
FLWDEGFHQL

SEQ ID NO: 3349 - protein, 10 aa, Homo Sapiens
FLWERPTLLV

SEQ ID NO: 3350 - protein, 10 aa, Homo Sapiens
FLWEYGDLHL

SEQ ID NO: 3351 - protein, 10 aa, Homo Sapiens
FLWPGLNVPL

SEQ ID NO: 3352 - protein, 10 aa, Homo Sapiens
FLWTEKFPSL

SEQ ID NO: 3353 - protein, 10 aa, Homo Sapiens
FLWVGATPHL

SEQ ID NO: 3354 - protein, 10 aa, Homo Sapiens
FLYAAQPELL

SEQ ID NO: 3355 - protein, 10 aa, Homo Sapiens
FLYIGDIVSL

SEQ ID NO: 3356 - protein, 10 aa, Homo Sapiens
FLYKEKLVSV

SEQ ID NO: 3357 - protein, 10 aa, Homo Sapiens
FLYPFPLALF

SEQ ID NO: 3358 - protein, 10 aa, Homo Sapiens
FLYQRLVVGA

SEQ ID NO: 3359 - protein, 10 aa, Homo Sapiens
FMDPQKMPYL

SEQ ID NO: 3360 - protein, 10 aa, Homo Sapiens
FMFDEKLVTV

SEQ ID NO: 3361 - protein, 10 aa, Homo Sapiens
FMQDPMEIFV

SEQ ID NO: 3362 - protein, 10 aa, Homo Sapiens
FMQDPMEVFV

SEQ ID NO: 3363 - protein, 10 aa, Homo Sapiens
FMYNFQLVTL

SEQ ID NO: 3364 - protein, 10 aa, Homo Sapiens
FQWDSDNIYL

SEQ ID NO: 3365 - protein, 10 aa, Homo Sapiens
FVADEGICYL

SEQ ID NO: 3366 - protein, 10 aa, Homo Sapiens
FVDKTVLPFV

SEQ ID NO: 3367 - protein, 10 aa, Homo Sapiens
FVDPNGKISL

SEQ ID NO: 3368 - protein, 10 aa, Homo Sapiens
FVFDRPLPVS

SEQ ID NO: 3369 - protein, 10 aa, Homo Sapiens
FVMEGEPPKL

SEQ ID NO: 3370 - protein, 10 aa, Homo Sapiens
GIFGGHIRSV

SEQ ID NO: 3371 - protein, 10 aa, Homo Sapiens
GIIDGVIQMV

SEQ ID NO: 3372 - protein, 10 aa, Homo Sapiens
GILGIQPPSV

SEQ ID NO: 3373 - protein, 10 aa, Homo Sapiens
GLAAGGIVAV

SEQ ID NO: 3374 - protein, 10 aa, Homo Sapiens
GLAPFLLNAV

SEQ ID NO: 3375 - protein, 10 aa, Homo Sapiens
GLAPGGLAVV

SEQ ID NO: 3376 - protein, 10 aa, Homo Sapiens
GLDDIKDLKV

SEQ ID NO: 3377 - protein, 10 aa, Homo Sapiens
GLIDVKPLGV

SEQ ID NO: 3378 - protein, 10 aa, Homo Sapiens
GLIEWLENTV

SEQ ID NO: 3379 - protein, 10 aa, Homo Sapiens
GLIGVGLINV

SEQ ID NO: 3380 - protein, 10 aa, Homo Sapiens
GLLGDIAIHL

SEQ ID NO: 3381 - protein, 10 aa, Homo Sapiens
GLLNRPNPLL

SEQ ID NO: 3382 - protein, 10 aa, Homo Sapiens
GLLPGCVYHV

SEQ ID NO: 3383 - protein, 10 aa, Homo Sapiens
GLMGAGIAQV

SEQ ID NO: 3384 - protein, 10 aa, Homo Sapiens
GLPRFGIEMV

SEQ ID NO: 3385 - protein, 10 aa, Homo Sapiens
GLSPLRPPSV

SEQ ID NO: 3386 - protein, 10 aa, Homo Sapiens
GLSTEGIYRV

SEQ ID NO: 3387 - protein, 10 aa, Homo Sapiens
GLTGQRLLGV

SEQ ID NO: 3388 - protein, 10 aa, Homo Sapiens
GLVKEGLVMV

SEQ ID NO: 3389 - protein, 10 aa, Homo Sapiens
GLWGQSVPTA

SEQ ID NO: 3390 - protein, 10 aa, Homo Sapiens
GLWHGMFANV

SEQ ID NO: 3391 - protein, 10 aa, Homo Sapiens
GLYDGPVCEV

SEQ ID NO: 3392 - protein, 10 aa, Homo Sapiens
GLYEFPLNKV

SEQ ID NO: 3393 - protein, 10 aa, Homo Sapiens
GLYEGLDWLA

SEQ ID NO: 3394 - protein, 10 aa, Homo Sapiens
GMASLNLPAV

SEQ ID NO: 3395 - protein, 10 aa, Homo Sapiens
GMFKNLLKEV

SEQ ID NO: 3396 - protein, 10 aa, Homo Sapiens
GQFPSYLETV

SEQ ID NO: 3397 - protein, 10 aa, Homo Sapiens
GVIDGHIYAV

SEQ ID NO: 3398 - protein, 10 aa, Homo Sapiens
HLLDFPNIVI

SEQ ID NO: 3399 - protein, 10 aa, Homo Sapiens
HLLPGDELYL

SEQ ID NO: 3400 - protein, 10 aa, Homo Sapiens
HLLPTAPTTV

SEQ ID NO: 3401 - protein, 10 aa, Homo Sapiens
HLLSGQLPTI

SEQ ID NO: 3402 - protein, 10 aa, Homo Sapiens
ILAPCKLETV

SEQ ID NO: 3403 - protein, 10 aa, Homo Sapiens
ILEEGKEILV

SEQ ID NO: 3404 - protein, 10 aa, Homo Sapiens
ILFDHMVPLV

SEQ ID NO: 3405 - protein, 10 aa, Homo Sapiens
ILFPDIIARA

SEQ ID NO: 3406 - protein, 10 aa, Homo Sapiens
ILIDLRRGCA

SEQ ID NO: 3407 - protein, 10 aa, Homo Sapiens
ILLDISFPGL

SEQ ID NO: 3408 - protein, 10 aa, Homo Sapiens
ILLDKLLIRL

SEQ ID NO: 3409 - protein, 10 aa, Homo Sapiens
ILLDNDHYAM

SEQ ID NO: 3410 - protein, 10 aa, Homo Sapiens
ILLSGASPFL

SEQ ID NO: 3411 - protein, 10 aa, Homo Sapiens
ILMSYDHVEL

SEQ ID NO: 3412 - protein, 10 aa, Homo Sapiens
ILNEFPGHGL

SEQ ID NO: 3413 - protein, 10 aa, Homo Sapiens
ILQDLQPFLV

SEQ ID NO: 3414 - protein, 10 aa, Homo Sapiens
ILSGIGVSQV

SEQ ID NO: 3415 - protein, 10 aa, Homo Sapiens
ILSHINTVFV

SEQ ID NO: 3416 - protein, 10 aa, Homo Sapiens
ILWSERPTKV

SEQ ID NO: 3417 - protein, 10 aa, Homo Sapiens
ILYDIPDIRL

SEQ ID NO: 3418 - protein, 10 aa, Homo Sapiens
IMLKGDNITL

SEQ ID NO: 3419 - protein, 10 aa, Homo Sapiens
KIFDEILVNA

SEQ ID NO: 3420 - protein, 10 aa, Homo Sapiens
KIFQELVEGV

SEQ ID NO: 3421 - protein, 10 aa, Homo Sapiens
KIFSGVFVKV

SEQ ID NO: 3422 - protein, 10 aa, Homo Sapiens
KIFTEDLPEV

SEQ ID NO: 3423 - protein, 10 aa, Homo Sapiens
KIGDFGLATV

SEQ ID NO: 3424 - protein, 10 aa, Homo Sapiens
KILEDIGLYL

SEQ ID NO: 3425 - protein, 10 aa, Homo Sapiens
KIMDATNILV

SEQ ID NO: 3426 - protein, 10 aa, Homo Sapiens
KIVSEIRGKV

SEQ ID NO: 3427 - protein, 10 aa, Homo Sapiens
KIWDVSVNSV

SEQ ID NO: 3428 - protein, 10 aa, Homo Sapiens
KLADIQIEQL

SEQ ID NO: 3429 - protein, 10 aa, Homo Sapiens
KLADISINYV

SEQ ID NO: 3430 - protein, 10 aa, Homo Sapiens
KLAELKQECL

SEQ ID NO: 3431 - protein, 10 aa, Homo Sapiens
KLAENIDAQL

SEQ ID NO: 3432 - protein, 10 aa, Homo Sapiens
KLFEGLKFFL

SEQ ID NO: 3433 - protein, 10 aa, Homo Sapiens
KLFPQETLFL

SEQ ID NO: 3434 - protein, 10 aa, Homo Sapiens
KLFTNDCIFL

SEQ ID NO: 3435 - protein, 10 aa, Homo Sapiens
KLHDVELHQV

SEQ ID NO: 3436 - protein, 10 aa, Homo Sapiens
KLIDGQVIQL

SEQ ID NO: 3437 - protein, 10 aa, Homo Sapiens
KLIEKLDIKL

SEQ ID NO: 3438 - protein, 10 aa, Homo Sapiens
KLIQLPVVYV

SEQ ID NO: 3439 - protein, 10 aa, Homo Sapiens
KLKPGDLVGV

SEQ ID NO: 3440 - protein, 10 aa, Homo Sapiens
KLLDEAIQAV

SEQ ID NO: 3441 - protein, 10 aa, Homo Sapiens
KLLDFQEFTL

SEQ ID NO: 3442 - protein, 10 aa, Homo Sapiens
KLLDIPGLEV

SEQ ID NO: 3443 - protein, 10 aa, Homo Sapiens
KLLDPEDISV

SEQ ID NO: 3444 - protein, 10 aa, Homo Sapiens
KLLEEQGIFL

SEQ ID NO: 3445 - protein, 10 aa, Homo Sapiens
KLLEGQVIQL

SEQ ID NO: 3446 - protein, 10 aa, Homo Sapiens
KLLEPVPVSV

SEQ ID NO: 3447 - protein, 10 aa, Homo Sapiens
KLLEVNGVAL

SEQ ID NO: 3448 - protein, 10 aa, Homo Sapiens
KLLEVQILEV

SEQ ID NO: 3449 - protein, 10 aa, Homo Sapiens
KLLEVVQPCL

SEQ ID NO: 3450 - protein, 10 aa, Homo Sapiens
KLMDLDVEQL

SEQ ID NO: 3451 - protein, 10 aa, Homo Sapiens
KLQEFELPYV

SEQ ID NO: 3452 - protein, 10 aa, Homo Sapiens
KLTDQTLIYL

SEQ ID NO: 3453 - protein, 10 aa, Homo Sapiens
KLTDVGIATL

SEQ ID NO: 3454 - protein, 10 aa, Homo Sapiens
KLVEFDFLGA

SEQ ID NO: 3455 - protein, 10 aa, Homo Sapiens
KLWDIINVNI

SEQ ID NO: 3456 - protein, 10 aa, Homo Sapiens
KLWDISEVMV

SEQ ID NO: 3457 - protein, 10 aa, Homo Sapiens
KLWDNELQYV

SEQ ID NO: 3458 - protein, 10 aa, Homo Sapiens
KLWEFFQVDV

SEQ ID NO: 3459 - protein, 10 aa, Homo Sapiens
KLWEMDNMLI

SEQ ID NO: 3460 - protein, 10 aa, Homo Sapiens
KLYDIDVAKV

SEQ ID NO: 3461 - protein, 10 aa, Homo Sapiens
KLYESLLPFA

SEQ ID NO: 3462 - protein, 10 aa, Homo Sapiens
KLYHQWLSTV

SEQ ID NO: 3463 - protein, 10 aa, Homo Sapiens
KLYNPENIYL

SEQ ID NO: 3464 - protein, 10 aa, Homo Sapiens
KLYPQLPAEI

SEQ ID NO: 3465 - protein, 10 aa, Homo Sapiens
KMFESFIESV

SEQ ID NO: 3466 - protein, 10 aa, Homo Sapiens
KMLDEILLQL

SEQ ID NO: 3467 - protein, 10 aa, Homo Sapiens
KMLEIDPQKV

SEQ ID NO: 3468 - protein, 10 aa, Homo Sapiens
KMYEEFLSKV

SEQ ID NO: 3469 - protein, 10 aa, Homo Sapiens
KQLDDLKVEL

SEQ ID NO: 3470 - protein, 10 aa, Homo Sapiens
KQMEQISQFL

SEQ ID NO: 3471 - protein, 10 aa, Homo Sapiens
KQVDFLNWEV

SEQ ID NO: 3472 - protein, 10 aa, Homo Sapiens
KVFDPVPVGV

SEQ ID NO: 3473 - protein, 10 aa, Homo Sapiens
KVGNFKFIYV

SEQ ID NO: 3474 - protein, 10 aa, Homo Sapiens
KVGSFKFIYV

SEQ ID NO: 3475 - protein, 10 aa, Homo Sapiens
KVLDSFCEGL

SEQ ID NO: 3476 - protein, 10 aa, Homo Sapiens
KVPQLEIVPN

SEQ ID NO: 3477 - protein, 10 aa, Homo Sapiens
LDTNADKQLS

SEQ ID NO: 3478 - protein, 10 aa, Homo Sapiens
LFLAILRLSL

SEQ ID NO: 3479 - protein, 10 aa, Homo Sapiens
LGAPGILGLP

SEQ ID NO: 3480 - protein, 10 aa, Homo Sapiens
LGPVRGPFPI

SEQ ID NO: 3481 - protein, 10 aa, Homo Sapiens
LIKEVDIYTV

SEQ ID NO: 3482 - protein, 10 aa, Homo Sapiens
LILEKQPAYV

SEQ ID NO: 3483 - protein, 10 aa, Homo Sapiens
LILPHVDIQL

SEQ ID NO: 3484 - protein, 10 aa, Homo Sapiens
LLAEIGAVTL

SEQ ID NO: 3485 - protein, 10 aa, Homo Sapiens
LLAELREYNL

SEQ ID NO: 3486 - protein, 10 aa, Homo Sapiens
LLDEHGHVRI

SEQ ID NO: 3487 - protein, 10 aa, Homo Sapiens
LLFEADTITL

SEQ ID NO: 3488 - protein, 10 aa, Homo Sapiens
LLFEGEKITI

SEQ ID NO: 3489 - protein, 10 aa, Homo Sapiens
LLFERELHSV

SEQ ID NO: 3490 - protein, 10 aa, Homo Sapiens
LLFGKIGYYL

SEQ ID NO: 3491 - protein, 10 aa, Homo Sapiens
LLFPHPVNQV

SEQ ID NO: 3492 - protein, 10 aa, Homo Sapiens
LLLDTEGFVK

SEQ ID NO: 3493 - protein, 10 aa, Homo Sapiens
LLLDVPTAAV

SEQ ID NO: 3494 - protein, 10 aa, Homo Sapiens
LLLDVTPLSL

SEQ ID NO: 3495 - protein, 10 aa, Homo Sapiens
LLLPPPPCPA

SEQ ID NO: 3496 - protein, 10 aa, Homo Sapiens
LLLSAEPVPA

SEQ ID NO: 3497 - protein, 10 aa, Homo Sapiens
LLPDYYLVTV

SEQ ID NO: 3498 - protein, 10 aa, Homo Sapiens
LLSAAEPVPA

SEQ ID NO: 3499 - protein, 10 aa, Homo Sapiens
LLSHSLLVTL

SEQ ID NO: 3500 - protein, 10 aa, Homo Sapiens
LLWDVPAPSL

SEQ ID NO: 3501 - protein, 10 aa, Homo Sapiens
LLWPGAALLV

SEQ ID NO: 3502 - protein, 10 aa, Homo Sapiens
LLYDDKGVGL

SEQ ID NO: 3503 - protein, 10 aa, Homo Sapiens
LLYDFQLINV

SEQ ID NO: 3504 - protein, 10 aa, Homo Sapiens
LLYEDALYTV

SEQ ID NO: 3505 - protein, 10 aa, Homo Sapiens
LLYEDIPDKV

SEQ ID NO: 3506 - protein, 10 aa, Homo Sapiens
LLYQGPHNTL

SEQ ID NO: 3507 - protein, 10 aa, Homo Sapiens
LMVELLKVFV

SEQ ID NO: 3508 - protein, 10 aa, Homo Sapiens
LTIEDGIFEV

SEQ ID NO: 3509 - protein, 10 aa, Homo Sapiens
MLLEIPYMAA

SEQ ID NO: 3510 - protein, 10 aa, Homo Sapiens
NLLSKVLIYL

SEQ ID NO: 3511 - protein, 10 aa, Homo Sapiens
QLDENANVQL

SEQ ID NO: 3512 - protein, 10 aa, Homo Sapiens
QLEEEGITFV

SEQ ID NO: 3513 - protein, 10 aa, Homo Sapiens
QLHAGSLVSV

SEQ ID NO: 3514 - protein, 10 aa, Homo Sapiens
QLIDYKILGL

SEQ ID NO: 3515 - protein, 10 aa, Homo Sapiens
QVFPGLLERV

SEQ ID NO: 3516 - protein, 10 aa, Homo Sapiens
RIADGLPVAV

SEQ ID NO: 3517 - protein, 10 aa, Homo Sapiens
RIINGIIISV

SEQ ID NO: 3518 - protein, 10 aa, Homo Sapiens
RLADLEALKV

SEQ ID NO: 3519 - protein, 10 aa, Homo Sapiens
RLAQEGIYTL

SEQ ID NO: 3520 - protein, 10 aa, Homo Sapiens
RLDELGGVYL

SEQ ID NO: 3521 - protein, 10 aa, Homo Sapiens
RLFADILNDV

SEQ ID NO: 3522 - protein, 10 aa, Homo Sapiens
RLFNDPVAMV

SEQ ID NO: 3523 - protein, 10 aa, Homo Sapiens
RLFPGAPPTA

SEQ ID NO: 3524 - protein, 10 aa, Homo Sapiens
RLIDDMVAQV

SEQ ID NO: 3525 - protein, 10 aa, Homo Sapiens
RLLAETHYQL

SEQ ID NO: 3526 - protein, 10 aa, Homo Sapiens
RLLDEEISRV

SEQ ID NO: 3527 - protein, 10 aa, Homo Sapiens
RLLDLENIQI

SEQ ID NO: 3528 - protein, 10 aa, Homo Sapiens
RLLEEEGVSL

SEQ ID NO: 3529 - protein, 10 aa, Homo Sapiens
RLLEGYEIYV

SEQ ID NO: 3530 - protein, 10 aa, Homo Sapiens
RLLENMTEVV

SEQ ID NO: 3531 - protein, 10 aa, Homo Sapiens
RLLGNVLVVV

SEQ ID NO: 3532 - protein, 10 aa, Homo Sapiens
RLLILENILL

SEQ ID NO: 3533 - protein, 10 aa, Homo Sapiens
RLMNLPLHSV

SEQ ID NO: 3534 - protein, 10 aa, Homo Sapiens
RLMQGDEICL

SEQ ID NO: 3535 - protein, 10 aa, Homo Sapiens
RLPDIPLRQV

SEQ ID NO: 3536 - protein, 10 aa, Homo Sapiens
RLQEDPPAGV

SEQ ID NO: 3537 - protein, 10 aa, Homo Sapiens
RLQEDPPVGV

SEQ ID NO: 3538 - protein, 10 aa, Homo Sapiens
RLSEFIPAVF

SEQ ID NO: 3539 - protein, 10 aa, Homo Sapiens
RLYPWGVVEV

SEQ ID NO: 3540 - protein, 10 aa, Homo Sapiens
RLYQSNLVLV

SEQ ID NO: 3541 - protein, 10 aa, Homo Sapiens
RMFDGKFVVA

SEQ ID NO: 3542 - protein, 10 aa, Homo Sapiens
RMIKEKLCYV

SEQ ID NO: 3543 - protein, 10 aa, Homo Sapiens
RQYPWGVVQV

SEQ ID NO: 3544 - protein, 10 aa, Homo Sapiens
RVAPEEHPVL

SEQ ID NO: 3545 - protein, 10 aa, Homo Sapiens
RVLDFDPMAV

SEQ ID NO: 3546 - protein, 10 aa, Homo Sapiens
SIMEMQAMEV

SEQ ID NO: 3547 - protein, 10 aa, Homo Sapiens
SIYGGFLLGV

SEQ ID NO: 3548 - protein, 10 aa, Homo Sapiens
SLADLQNDEV

SEQ ID NO: 3549 - protein, 10 aa, Homo Sapiens
SLAELKGFEV

SEQ ID NO: 3550 - protein, 10 aa, Homo Sapiens
SLAETDKITL

SEQ ID NO: 3551 - protein, 10 aa, Homo Sapiens
SLAEVAGLQV

SEQ ID NO: 3552 - protein, 10 aa, Homo Sapiens
SLAPDTRLFV

SEQ ID NO: 3553 - protein, 10 aa, Homo Sapiens
SLEGIPLAQV

SEQ ID NO: 3554 - protein, 10 aa, Homo Sapiens
SLFAGGMLRV

SEQ ID NO: 3555 - protein, 10 aa, Homo Sapiens
SLFAGQPLTI

SEQ ID NO: 3556 - protein, 10 aa, Homo Sapiens
SLFAQRLKTL

SEQ ID NO: 3557 - protein, 10 aa, Homo Sapiens
SLFEKGLKNV

SEQ ID NO: 3558 - protein, 10 aa, Homo Sapiens
SLFGSPPTSV

SEQ ID NO: 3559 - protein, 10 aa, Homo Sapiens
SLFPGKLEVV

SEQ ID NO: 3560 - protein, 10 aa, Homo Sapiens
SLFPHNPQFI

SEQ ID NO: 3561 - protein, 10 aa, Homo Sapiens
SLFSHSLISI

SEQ ID NO: 3562 - protein, 10 aa, Homo Sapiens
SLIEDLILLL

SEQ ID NO: 3563 - protein, 10 aa, Homo Sapiens
SLINVGLISV

SEQ ID NO: 3564 - protein, 10 aa, Homo Sapiens
SLIPEGPPQV

SEQ ID NO: 3565 - protein, 10 aa, Homo Sapiens
SLISIKRLTL

SEQ ID NO: 3566 - protein, 10 aa, Homo Sapiens
SLLDRFLATV

SEQ ID NO: 3567 - protein, 10 aa, Homo Sapiens
SLLDTSSVLV

SEQ ID NO: 3568 - protein, 10 aa, Homo Sapiens
SLLEKELESV

SEQ ID NO: 3569 - protein, 10 aa, Homo Sapiens
SLLEKQQIYL

SEQ ID NO: 3570 - protein, 10 aa, Homo Sapiens
SLLEQGLVEA

SEQ ID NO: 3571 - protein, 10 aa, Homo Sapiens
SLLGGDVVSV

SEQ ID NO: 3572 - protein, 10 aa, Homo Sapiens
SLLGPPPVGV

SEQ ID NO: 3573 - protein, 10 aa, Homo Sapiens
SLLGPSIDSV

SEQ ID NO: 3574 - protein, 10 aa, Homo Sapiens
SLLPEGPPAI

SEQ ID NO: 3575 - protein, 10 aa, Homo Sapiens
SLLPVKPVEI

SEQ ID NO: 3576 - protein, 10 aa, Homo Sapiens
SLLSGRISTL

SEQ ID NO: 3577 - protein, 10 aa, Homo Sapiens
SLLSLLPLFL

SEQ ID NO: 3578 - protein, 10 aa, Homo Sapiens
SLMDHTIPEV

SEQ ID NO: 3579 - protein, 10 aa, Homo Sapiens
SLMEDQVLQL

SEQ ID NO: 3580 - protein, 10 aa, Homo Sapiens
SLMQYETPGF

SEQ ID NO: 3581 - protein, 10 aa, Homo Sapiens
SLPDFGISYV

SEQ ID NO: 3582 - protein, 10 aa, Homo Sapiens
SLQEEKLIYV

SEQ ID NO: 3583 - protein, 10 aa, Homo Sapiens
SLTIDGIYYV

SEQ ID NO: 3584 - protein, 10 aa, Homo Sapiens
SLVQGELVTA

SEQ ID NO: 3585 - protein, 10 aa, Homo Sapiens
SLVYPFPGPI

SEQ ID NO: 3586 - protein, 10 aa, Homo Sapiens
SLYEGIDFYT

SEQ ID NO: 3587 - protein, 10 aa, Homo Sapiens
SLYGHKLPVI

SEQ ID NO: 3588 - protein, 10 aa, Homo Sapiens
SQFQQEFPSL

SEQ ID NO: 3589 - protein, 10 aa, Homo Sapiens
SQYDYILPQV

SEQ ID NO: 3590 - protein, 10 aa, Homo Sapiens
SVAPFALPTV

SEQ ID NO: 3591 - protein, 10 aa, Homo Sapiens
TIPDFIFANV

SEQ ID NO: 3592 - protein, 10 aa, Homo Sapiens
TLAEIAKAEL

SEQ ID NO: 3593 - protein, 10 aa, Homo Sapiens
TLAEIAKVEL

SEQ ID NO: 3594 - protein, 10 aa, Homo Sapiens
TLATDILMGV

SEQ ID NO: 3595 - protein, 10 aa, Homo Sapiens
TLFPGKVHSL

SEQ ID NO: 3596 - protein, 10 aa, Homo Sapiens
TLHGLQQYYV

SEQ ID NO: 3597 - protein, 10 aa, Homo Sapiens
TLIEDEIATI

SEQ ID NO: 3598 - protein, 10 aa, Homo Sapiens
TLIHSDLTSV

SEQ ID NO: 3599 - protein, 10 aa, Homo Sapiens
TLLDGKLVLL

SEQ ID NO: 3600 - protein, 10 aa, Homo Sapiens
TLLEDGTFKV

SEQ ID NO: 3601 - protein, 10 aa, Homo Sapiens
TLLPGEGPFL

SEQ ID NO: 3602 - protein, 10 aa, Homo Sapiens
TLMEQPLTTL

SEQ ID NO: 3603 - protein, 10 aa, Homo Sapiens
TLMNLGGLAV

SEQ ID NO: 3604 - protein, 10 aa, Homo Sapiens
TLNDGVVVQV

SEQ ID NO: 3605 - protein, 10 aa, Homo Sapiens
TLSDGVVVQV

SEQ ID NO: 3606 - protein, 10 aa, Homo Sapiens
TLTEEGVIKV

SEQ ID NO: 3607 - protein, 10 aa, Homo Sapiens
TLYERGFENI

SEQ ID NO: 3608 - protein, 10 aa, Homo Sapiens
TLYPLHILFV

SEQ ID NO: 3609 - protein, 10 aa, Homo Sapiens
TMLHLTDIQL

SEQ ID NO: 3610 - protein, 10 aa, Homo Sapiens
TMQELIGLYV

SEQ ID NO: 3611 - protein, 10 aa, Homo Sapiens
TVYGGYLCSV

SEQ ID NO: 3612 - protein, 10 aa, Homo Sapiens
VLADRGVCLI

SEQ ID NO: 3613 - protein, 10 aa, Homo Sapiens
VLDELKNMKC

SEQ ID NO: 3614 - protein, 10 aa, Homo Sapiens
VLFDDELLMV

SEQ ID NO: 3615 - protein, 10 aa, Homo Sapiens
VLFDVSIMAV

SEQ ID NO: 3616 - protein, 10 aa, Homo Sapiens
VLFEGRTVQL

SEQ ID NO: 3617 - protein, 10 aa, Homo Sapiens
VLFEKEVNEV

SEQ ID NO: 3618 - protein, 10 aa, Homo Sapiens
VLFGAVITGA

SEQ ID NO: 3619 - protein, 10 aa, Homo Sapiens
VLFQEALWHV

SEQ ID NO: 3620 - protein, 10 aa, Homo Sapiens
VLIEGSINSV

SEQ ID NO: 3621 - protein, 10 aa, Homo Sapiens
VLIGEFLEKV

SEQ ID NO: 3622 - protein, 10 aa, Homo Sapiens
VLIKNLLVSV

SEQ ID NO: 3623 - protein, 10 aa, Homo Sapiens
VLINGQMVKL

SEQ ID NO: 3624 - protein, 10 aa, Homo Sapiens
VLIRDLNFEV

SEQ ID NO: 3625 - protein, 10 aa, Homo Sapiens
VLLDYHLNYL

SEQ ID NO: 3626 - protein, 10 aa, Homo Sapiens
VLLEPFVHQV

SEQ ID NO: 3627 - protein, 10 aa, Homo Sapiens
VLLEQPTWQL

SEQ ID NO: 3628 - protein, 10 aa, Homo Sapiens
VLLEYHIAYL

SEQ ID NO: 3629 - protein, 10 aa, Homo Sapiens
VLLHFKHIYL

SEQ ID NO: 3630 - protein, 10 aa, Homo Sapiens
VLLKARLVPA

SEQ ID NO: 3631 - protein, 10 aa, Homo Sapiens
VLLNEILEQV

SEQ ID NO: 3632 - protein, 10 aa, Homo Sapiens
VLLTDILVFL

SEQ ID NO: 3633 - protein, 10 aa, Homo Sapiens
VLMDLKALLL

SEQ ID NO: 3634 - protein, 10 aa, Homo Sapiens
VLMEKPDVVV

SEQ ID NO: 3635 - protein, 10 aa, Homo Sapiens
VLMQDSRLYL

SEQ ID NO: 3636 - protein, 10 aa, Homo Sapiens
VLPNFLPYNV

SEQ ID NO: 3637 - protein, 10 aa, Homo Sapiens
VLVPYEPPQV

SEQ ID NO: 3638 - protein, 10 aa, Homo Sapiens
VLWDRTFSLF

SEQ ID NO: 3639 - protein, 10 aa, Homo Sapiens
VLYEKDIQLF

SEQ ID NO: 3640 - protein, 10 aa, Homo Sapiens
VLYPASPHGV

SEQ ID NO: 3641 - protein, 10 aa, Homo Sapiens
VLYPHEPTAV

SEQ ID NO: 3642 - protein, 10 aa, Homo Sapiens
VMFGGKQVVV

SEQ ID NO: 3643 - protein, 10 aa, Homo Sapiens
VMFRTPLASV

SEQ ID NO: 3644 - protein, 10 aa, Homo Sapiens
VMIAGKVAVV

SEQ ID NO: 3645 - protein, 10 aa, Homo Sapiens
VVPPFLQPEV

SEQ ID NO: 3646 - protein, 10 aa, Homo Sapiens
VYPFPGPIPN

SEQ ID NO: 3647 - protein, 10 aa, Homo Sapiens
WLLPYNGVTV

SEQ ID NO: 3648 - protein, 10 aa, Homo Sapiens
WNVSLFSILL

SEQ ID NO: 3649 - protein, 10 aa, Homo Sapiens
YAYDGKDYIA

SEQ ID NO: 3650 - protein, 10 aa, Homo Sapiens
YIMDNKLAQI

SEQ ID NO: 3651 - protein, 10 aa, Homo Sapiens
YIYDKDMEII

SEQ ID NO: 3652 - protein, 10 aa, Homo Sapiens
YLAEKYEWDV

SEQ ID NO: 3653 - protein, 10 aa, Homo Sapiens
YLAELVTPIL

SEQ ID NO: 3654 - protein, 10 aa, Homo Sapiens
YLARIQGFQV

SEQ ID NO: 3655 - protein, 10 aa, Homo Sapiens
YLATVTGIAV

SEQ ID NO: 3656 - protein, 10 aa, Homo Sapiens
YLDGHLITTV

SEQ ID NO: 3657 - protein, 10 aa, Homo Sapiens
YLDHTADVQL

SEQ ID NO: 3658 - protein, 10 aa, Homo Sapiens
YLDIKGLLDV

SEQ ID NO: 3659 - protein, 10 aa, Homo Sapiens
YLDLFGDPSV

SEQ ID NO: 3660 - protein, 10 aa, Homo Sapiens
YLDPRLAFTV

SEQ ID NO: 3661 - protein, 10 aa, Homo Sapiens
YLDQGTQIFL

SEQ ID NO: 3662 - protein, 10 aa, Homo Sapiens
YLFDIQLPNI

SEQ ID NO: 3663 - protein, 10 aa, Homo Sapiens
YLFDRNGVCL

SEQ ID NO: 3664 - protein, 10 aa, Homo Sapiens
YLFEIRDWRL

SEQ ID NO: 3665 - protein, 10 aa, Homo Sapiens
YLFGERLLEC

SEQ ID NO: 3666 - protein, 10 aa, Homo Sapiens
YLFGKEMYQV

SEQ ID NO: 3667 - protein, 10 aa, Homo Sapiens
YLFPGIPELL

SEQ ID NO: 3668 - protein, 10 aa, Homo Sapiens
YLGLLENVRV

SEQ ID NO: 3669 - protein, 10 aa, Homo Sapiens
YLIDIKTIAI

SEQ ID NO: 3670 - protein, 10 aa, Homo Sapiens
YLIDRDPTYF

SEQ ID NO: 3671 - protein, 10 aa, Homo Sapiens
YLILHLISTV

SEQ ID NO: 3672 - protein, 10 aa, Homo Sapiens
YLINFEIRSL

SEQ ID NO: 3673 - protein, 10 aa, Homo Sapiens
YLIPDIDLKL

SEQ ID NO: 3674 - protein, 10 aa, Homo Sapiens
YLIQSVPAEL

SEQ ID NO: 3675 - protein, 10 aa, Homo Sapiens
YLITGNLEKL

SEQ ID NO: 3676 - protein, 10 aa, Homo Sapiens
YLLDHLHLEL

SEQ ID NO: 3677 - protein, 10 aa, Homo Sapiens
YLLDKETLRL

SEQ ID NO: 3678 - protein, 10 aa, Homo Sapiens
YLLDLHSYLL

SEQ ID NO: 3679 - protein, 10 aa, Homo Sapiens
YLLDMPLWYL

SEQ ID NO: 3680 - protein, 10 aa, Homo Sapiens
YLLDYPNNLL

SEQ ID NO: 3681 - protein, 10 aa, Homo Sapiens
YLLEEILDKV

SEQ ID NO: 3682 - protein, 10 aa, Homo Sapiens
YLLEEKIASL

SEQ ID NO: 3683 - protein, 10 aa, Homo Sapiens
YLLEQDFPGM

SEQ ID NO: 3684 - protein, 10 aa, Homo Sapiens
YLLQEPPRTV

SEQ ID NO: 3685 - protein, 10 aa, Homo Sapiens
YLLTHPPPIM

SEQ ID NO: 3686 - protein, 10 aa, Homo Sapiens
YLMEGSYNKV

SEQ ID NO: 3687 - protein, 10 aa, Homo Sapiens
YLMEQNVTKL

SEQ ID NO: 3688 - protein, 10 aa, Homo Sapiens
YLMNLNIMTV

SEQ ID NO: 3689 - protein, 10 aa, Homo Sapiens
YLMQNWEHVL

SEQ ID NO: 3690 - protein, 10 aa, Homo Sapiens
YLNDLHEVLL

SEQ ID NO: 3691 - protein, 10 aa, Homo Sapiens
YLQEVPILTL

SEQ ID NO: 3692 - protein, 10 aa, Homo Sapiens
YLSDIPLHDA

SEQ ID NO: 3693 - protein, 10 aa, Homo Sapiens
YLSHNGIEVI

SEQ ID NO: 3694 - protein, 10 aa, Homo Sapiens
YLTNEGIQYL

SEQ ID NO: 3695 - protein, 10 aa, Homo Sapiens
YLTTLRALYL

SEQ ID NO: 3696 - protein, 10 aa, Homo Sapiens
YLVEINKILL

SEQ ID NO: 3697 - protein, 10 aa, Homo Sapiens
YLVGDELWVV

SEQ ID NO: 3698 - protein, 10 aa, Homo Sapiens
YLWDLDHGFA

SEQ ID NO: 3699 - protein, 10 aa, Homo Sapiens
YLWEHIFEGL

SEQ ID NO: 3700 - protein, 10 aa, Homo Sapiens
YLWHIPLSYV

SEQ ID NO: 3701 - protein, 10 aa, Homo Sapiens
YLYGQTTTYL

SEQ ID NO: 3702 - protein, 10 aa, Homo Sapiens
YLYPIKNLEM

SEQ ID NO: 3703 - protein, 10 aa, Homo Sapiens
YLYSNKLQSL

SEQ ID NO: 3704 - protein, 10 aa, Homo Sapiens
YMFEEVPIVI

SEQ ID NO: 3705 - protein, 10 aa, Homo Sapiens
YMFPDTMLQA

SEQ ID NO: 3706 - protein, 10 aa, Homo Sapiens
YMIDNVILLI

SEQ ID NO: 3707 - protein, 10 aa, Homo Sapiens
YMLPDGTYCL

SEQ ID NO: 3708 - protein, 10 aa, Homo Sapiens
YVFENTVATV

SEQ ID NO: 3709 - protein, 10 aa, Homo Sapiens
YVLEDLEVTV

SEQ ID NO: 3710 - protein, 10 aa, Homo Sapiens
YVMEYRELFL

SEQ ID NO: 3711 - protein, 10 aa, Homo Sapiens
YVYDKDIEQI

SEQ ID NO: 3712 - protein, 11 aa, Homo Sapiens
AALEEADKMFL

SEQ ID NO: 3713 - protein, 11 aa, Homo Sapiens
AIAPCEVTVPA

SEQ ID NO: 3714 - protein, 11 aa, Homo Sapiens
AILGITESFQV

SEQ ID NO: 3715 - protein, 11 aa, Homo Sapiens
ALAAPDIVPAL

SEQ ID NO: 3716 - protein, 11 aa, Homo Sapiens
ALADKELLPSV

SEQ ID NO: 3717 - protein, 11 aa, Homo Sapiens
ALADLQEAVKL

SEQ ID NO: 3718 - protein, 11 aa, Homo Sapiens
ALDPLADKILI

SEQ ID NO: 3719 - protein, 11 aa, Homo Sapiens
ALDRQTATQLL

SEQ ID NO: 3720 - protein, 11 aa, Homo Sapiens
ALDTLEDDMTI

SEQ ID NO: 3721 - protein, 11 aa, Homo Sapiens
ALFARPDLLLL

SEQ ID NO: 3722 - protein, 11 aa, Homo Sapiens
ALFASGLIHRV

SEQ ID NO: 3723 - protein, 11 aa, Homo Sapiens
ALFEESGLIRI

SEQ ID NO: 3724 - protein, 11 aa, Homo Sapiens
ALFEQKGPVYV

SEQ ID NO: 3725 - protein, 11 aa, Homo Sapiens
ALFGSDDCLSV

SEQ ID NO: 3726 - protein, 11 aa, Homo Sapiens
ALFPHLLQPVL

SEQ ID NO: 3727 - protein, 11 aa, Homo Sapiens
ALFPVAEDISL

SEQ ID NO: 3728 - protein, 11 aa, Homo Sapiens
ALGEEALLRYV

SEQ ID NO: 3729 - protein, 11 aa, Homo Sapiens
ALGFYPAEITL

SEQ ID NO: 3730 - protein, 11 aa, Homo Sapiens
ALIEAEKVAQV

SEQ ID NO: 3731 - protein, 11 aa, Homo Sapiens
ALIEVPDGFTA

SEQ ID NO: 3732 - protein, 11 aa, Homo Sapiens
ALILEPSLYTV

SEQ ID NO: 3733 - protein, 11 aa, Homo Sapiens
ALINNIVEIRV

SEQ ID NO: 3734 - protein, 11 aa, Homo Sapiens
ALKRQGRTLYG

SEQ ID NO: 3735 - protein, 11 aa, Homo Sapiens
ALLAGSEYLKL

SEQ ID NO: 3736 - protein, 11 aa, Homo Sapiens
ALLDVSNNYGI

SEQ ID NO: 3737 - protein, 11 aa, Homo Sapiens
ALLEADVNIKL

SEQ ID NO: 3738 - protein, 11 aa, Homo Sapiens
ALLEENSTPQL

SEQ ID NO: 3739 - protein, 11 aa, Homo Sapiens
ALLEKPGELSL

SEQ ID NO: 3740 - protein, 11 aa, Homo Sapiens
ALLENMEGLFL

SEQ ID NO: 3741 - protein, 11 aa, Homo Sapiens
ALLEPEFILKA

SEQ ID NO: 3742 - protein, 11 aa, Homo Sapiens
ALLGAGCDPEL

SEQ ID NO: 3743 - protein, 11 aa, Homo Sapiens
ALLGGNVRMML

SEQ ID NO: 3744 - protein, 11 aa, Homo Sapiens
ALLGKLDAINV

SEQ ID NO: 3745 - protein, 11 aa, Homo Sapiens
ALLKNPKILLL

SEQ ID NO: 3746 - protein, 11 aa, Homo Sapiens
ALLNGEYLLAA

SEQ ID NO: 3747 - protein, 11 aa, Homo Sapiens
ALMEQVAHQTI

SEQ ID NO: 3748 - protein, 11 aa, Homo Sapiens
ALNEEAGRLLL

SEQ ID NO: 3749 - protein, 11 aa, Homo Sapiens
ALPEVLAVIQV

SEQ ID NO: 3750 - protein, 11 aa, Homo Sapiens
ALQEAIDAIFL

SEQ ID NO: 3751 - protein, 11 aa, Homo Sapiens
ALSEAMGLFCL

SEQ ID NO: 3752 - protein, 11 aa, Homo Sapiens
ALSEEGLLVYL

SEQ ID NO: 3753 - protein, 11 aa, Homo Sapiens
ALSNSDVIRQV

SEQ ID NO: 3754 - protein, 11 aa, Homo Sapiens
ALWDIETGQQT

SEQ ID NO: 3755 - protein, 11 aa, Homo Sapiens
ALWENPESGEL

SEQ ID NO: 3756 - protein, 11 aa, Homo Sapiens
ALYLGAKAIQL

SEQ ID NO: 3757 - protein, 11 aa, Homo Sapiens
ALYNDISHMKI

SEQ ID NO: 3758 - protein, 11 aa, Homo Sapiens
AMASLGALALL

SEQ ID NO: 3759 - protein, 11 aa, Homo Sapiens
AMFESSQNVLL

SEQ ID NO: 3760 - protein, 11 aa, Homo Sapiens
AMLENASDIKL

SEQ ID NO: 3761 - protein, 11 aa, Homo Sapiens
AMSNLVPPVEL

SEQ ID NO: 3762 - protein, 11 aa, Homo Sapiens
AQAEVYKELRL

SEQ ID NO: 3763 - protein, 11 aa, Homo Sapiens
AVLDGADCIML

SEQ ID NO: 3764 - protein, 11 aa, Homo Sapiens
AVMAPRTLVLL

SEQ ID NO: 3765 - protein, 11 aa, Homo Sapiens
CLIKEVDIYTV

SEQ ID NO: 3766 - protein, 11 aa, Homo Sapiens
CLYELPENIRV

SEQ ID NO: 3767 - protein, 11 aa, Homo Sapiens
CLYPHIDKQYL

SEQ ID NO: 3768 - protein, 11 aa, Homo Sapiens
DAAHGAWILII

SEQ ID NO: 3769 - protein, 11 aa, Homo Sapiens
FIDVGLAGGAV

SEQ ID NO: 3770 - protein, 11 aa, Homo Sapiens
FIWKSGGDLTL

SEQ ID NO: 3771 - protein, 11 aa, Homo Sapiens
FLADPSAFVAA

SEQ ID NO: 3772 - protein, 11 aa, Homo Sapiens
FLAEGLRNENL

SEQ ID NO: 3773 - protein, 11 aa, Homo Sapiens
FLAELPGSLSL

SEQ ID NO: 3774 - protein, 11 aa, Homo Sapiens
FLAHDQAVRTL

SEQ ID NO: 3775 - protein, 11 aa, Homo Sapiens
FLAPDNSLLLA

SEQ ID NO: 3776 - protein, 11 aa, Homo Sapiens
FLASESLIKQI

SEQ ID NO: 3777 - protein, 11 aa, Homo Sapiens
FLDPGGPMMKL

SEQ ID NO: 3778 - protein, 11 aa, Homo Sapiens
FLDPHTTQTFV

SEQ ID NO: 3779 - protein, 11 aa, Homo Sapiens
FLFDCPGQVEL

SEQ ID NO: 3780 - protein, 11 aa, Homo Sapiens
FLFDGSPTYVL

SEQ ID NO: 3781 - protein, 11 aa, Homo Sapiens
FLFDIPKILDL

SEQ ID NO: 3782 - protein, 11 aa, Homo Sapiens
FLFEPVVKAFL

SEQ ID NO: 3783 - protein, 11 aa, Homo Sapiens
FLFNTENKLLL

SEQ ID NO: 3784 - protein, 11 aa, Homo Sapiens
FLFVDPELVSA

SEQ ID NO: 3785 - protein, 11 aa, Homo Sapiens
FLGCIGAVNEV

SEQ ID NO: 3786 - protein, 11 aa, Homo Sapiens
FLHDDNMNFRV

SEQ ID NO: 3787 - protein, 11 aa, Homo Sapiens
FLHEESILERV

SEQ ID NO: 3788 - protein, 11 aa, Homo Sapiens
FLIEPEHVNTV

SEQ ID NO: 3789 - protein, 11 aa, Homo Sapiens
FLIILPKELQA

SEQ ID NO: 3790 - protein, 11 aa, Homo Sapiens
FLINSSGDIFL

SEQ ID NO: 3791 - protein, 11 aa, Homo Sapiens
FLLDKPQDLSI

SEQ ID NO: 3792 - protein, 11 aa, Homo Sapiens
FLLDPVKGERL

SEQ ID NO: 3793 - protein, 11 aa, Homo Sapiens
FLLDPYKYMTL

SEQ ID NO: 3794 - protein, 11 aa, Homo Sapiens
FLLEQEKTQAL

SEQ ID NO: 3795 - protein, 11 aa, Homo Sapiens
FLLFEGEKITI

SEQ ID NO: 3796 - protein, 11 aa, Homo Sapiens
FLLGPEGQHLL

SEQ ID NO: 3797 - protein, 11 aa, Homo Sapiens
FLLLPDAEAQL

SEQ ID NO: 3798 - protein, 11 aa, Homo Sapiens
FLLPHPGLKVA

SEQ ID NO: 3799 - protein, 11 aa, Homo Sapiens
FLLPKVQSIQL

SEQ ID NO: 3800 - protein, 11 aa, Homo Sapiens
FLLRVGADPAL

SEQ ID NO: 3801 - protein, 11 aa, Homo Sapiens
FLMENGSITSI

SEQ ID NO: 3802 - protein, 11 aa, Homo Sapiens
FLMKNSDLYGA

SEQ ID NO: 3803 - protein, 11 aa, Homo Sapiens
FLMRVMDIPYL

SEQ ID NO: 3804 - protein, 11 aa, Homo Sapiens
FLPDPSALQNL

SEQ ID NO: 3805 - protein, 11 aa, Homo Sapiens
FLPETRIMTSV

SEQ ID NO: 3806 - protein, 11 aa, Homo Sapiens
FLPPEHTIVYI

SEQ ID NO: 3807 - protein, 11 aa, Homo Sapiens
FLSDAEIIQLV

SEQ ID NO: 3808 - protein, 11 aa, Homo Sapiens
FLSEEGGHVAV

SEQ ID NO: 3809 - protein, 11 aa, Homo Sapiens
FLSEVWNTHTL

SEQ ID NO: 3810 - protein, 11 aa, Homo Sapiens
FLTDSNNIKEV

SEQ ID NO: 3811 - protein, 11 aa, Homo Sapiens
FLVEPQEDTRL

SEQ ID NO: 3812 - protein, 11 aa, Homo Sapiens
FLVPIESIERA

SEQ ID NO: 3813 - protein, 11 aa, Homo Sapiens
FLWDPAKRTSV

SEQ ID NO: 3814 - protein, 11 aa, Homo Sapiens
FLWDVPSNWTL

SEQ ID NO: 3815 - protein, 11 aa, Homo Sapiens
FLWEYGDLHLF

SEQ ID NO: 3816 - protein, 11 aa, Homo Sapiens
FLWQEGHSAFA

SEQ ID NO: 3817 - protein, 11 aa, Homo Sapiens
FLYDHIQPVRA

SEQ ID NO: 3818 - protein, 11 aa, Homo Sapiens
FMIDASVHPTL

SEQ ID NO: 3819 - protein, 11 aa, Homo Sapiens
FMLETVDSVKL

SEQ ID NO: 3820 - protein, 11 aa, Homo Sapiens
FMLPDPQNISL

SEQ ID NO: 3821 - protein, 11 aa, Homo Sapiens
FQFVGIENIHV

SEQ ID NO: 3822 - protein, 11 aa, Homo Sapiens
FQHEENLLQQV

SEQ ID NO: 3823 - protein, 11 aa, Homo Sapiens
FVQEVVQSQQV

SEQ ID NO: 3824 - protein, 11 aa, Homo Sapiens
FVQPFGPQYEV

SEQ ID NO: 3825 - protein, 11 aa, Homo Sapiens
FVYDPLVDWTA

SEQ ID NO: 3826 - protein, 11 aa, Homo Sapiens
GILTKELLHSV

SEQ ID NO: 3827 - protein, 11 aa, Homo Sapiens
GLADASLLKKV

SEQ ID NO: 3828 - protein, 11 aa, Homo Sapiens
GLADNTVIAKV

SEQ ID NO: 3829 - protein, 11 aa, Homo Sapiens
GLAPPQHLIRV

SEQ ID NO: 3830 - protein, 11 aa, Homo Sapiens
GLDNAVSLFQV

SEQ ID NO: 3831 - protein, 11 aa, Homo Sapiens
GLDPLGYEIQL

SEQ ID NO: 3832 - protein, 11 aa, Homo Sapiens
GLDPQGDRSFL

SEQ ID NO: 3833 - protein, 11 aa, Homo Sapiens
GLDSNLKYILV

SEQ ID NO: 3834 - protein, 11 aa, Homo Sapiens
GLFERDKLIFL

SEQ ID NO: 3835 - protein, 11 aa, Homo Sapiens
GLFHLGEFVNV

SEQ ID NO: 3836 - protein, 11 aa, Homo Sapiens
GLFTLSHITQL

SEQ ID NO: 3837 - protein, 11 aa, Homo Sapiens
GLGEGFQTVRV

SEQ ID NO: 3838 - protein, 11 aa, Homo Sapiens
GLIDIENPNRV

SEQ ID NO: 3839 - protein, 11 aa, Homo Sapiens
GLIDTKELEPL

SEQ ID NO: 3840 - protein, 11 aa, Homo Sapiens
GLIEDHFDVTV

SEQ ID NO: 3841 - protein, 11 aa, Homo Sapiens
GLIPIHADPRL

SEQ ID NO: 3842 - protein, 11 aa, Homo Sapiens
GLISFSDYIFL

SEQ ID NO: 3843 - protein, 11 aa, Homo Sapiens
GLLAGDRLVEV

SEQ ID NO: 3844 - protein, 11 aa, Homo Sapiens
GLLDGGVDILL

SEQ ID NO: 3845 - protein, 11 aa, Homo Sapiens
GLLDLPFRVGV

SEQ ID NO: 3846 - protein, 11 aa, Homo Sapiens
GLLESRLDPYL

SEQ ID NO: 3847 - protein, 11 aa, Homo Sapiens
GLLGPFSFLLL

SEQ ID NO: 3848 - protein, 11 aa, Homo Sapiens
GLLPEHFLFLA

SEQ ID NO: 3849 - protein, 11 aa, Homo Sapiens
GLLPEPNILQL

SEQ ID NO: 3850 - protein, 11 aa, Homo Sapiens
GLLPSKIRINL

SEQ ID NO: 3851 - protein, 11 aa, Homo Sapiens
GLLQINDKIAL

SEQ ID NO: 3852 - protein, 11 aa, Homo Sapiens
GLLQQPSALML

SEQ ID NO: 3853 - protein, 11 aa, Homo Sapiens
GLLYPTEDYKV

SEQ ID NO: 3854 - protein, 11 aa, Homo Sapiens
GLMDEKLLHNV

SEQ ID NO: 3855 - protein, 11 aa, Homo Sapiens
GLTSTDLLFHL

SEQ ID NO: 3856 - protein, 11 aa, Homo Sapiens
GLWEDGRSTLL

SEQ ID NO: 3857 - protein, 11 aa, Homo Sapiens
GLWEIENNPTV

SEQ ID NO: 3858 - protein, 11 aa, Homo Sapiens
GLWGPEEEPHL

SEQ ID NO: 3859 - protein, 11 aa, Homo Sapiens
GLYDSQNPPTV

SEQ ID NO: 3860 - protein, 11 aa, Homo Sapiens
GMWNPNAPVFL

SEQ ID NO: 3861 - protein, 11 aa, Homo Sapiens
GMYGKIAVMEL

SEQ ID NO: 3862 - protein, 11 aa, Homo Sapiens
GQSELASRLTL

SEQ ID NO: 3863 - protein, 11 aa, Homo Sapiens
GVAESIHLWEV

SEQ ID NO: 3864 - protein, 11 aa, Homo Sapiens
GVAPSRAIYFA

SEQ ID NO: 3865 - protein, 11 aa, Homo Sapiens
GVLEMERLHYI

SEQ ID NO: 3866 - protein, 11 aa, Homo Sapiens
HAVYRDDLKKL

SEQ ID NO: 3867 - protein, 11 aa, Homo Sapiens
HEQLSVAEITN

SEQ ID NO: 3868 - protein, 11 aa, Homo Sapiens
HLFEDAYLLTL

SEQ ID NO: 3869 - protein, 11 aa, Homo Sapiens
HLLGEGAFAQV

SEQ ID NO: 3870 - protein, 11 aa, Homo Sapiens
HLMEENMIVYV

SEQ ID NO: 3871 - protein, 11 aa, Homo Sapiens
HLYSSIEHLTT

SEQ ID NO: 3872 - protein, 11 aa, Homo Sapiens
HVYDGKFLARV

SEQ ID NO: 3873 - protein, 11 aa, Homo Sapiens
IDVNMGEVLLV

SEQ ID NO: 3874 - protein, 11 aa, Homo Sapiens
IILEEGKEILV

SEQ ID NO: 3875 - protein, 11 aa, Homo Sapiens
ILDDTAKNLRV

SEQ ID NO: 3876 - protein, 11 aa, Homo Sapiens
ILDEMSHKLRL

SEQ ID NO: 3877 - protein, 11 aa, Homo Sapiens
ILENPPEEMKL

SEQ ID NO: 3878 - protein, 11 aa, Homo Sapiens
ILFDCPGQIEL

SEQ ID NO: 3879 - protein, 11 aa, Homo Sapiens
ILGPPPPSFHL

SEQ ID NO: 3880 - protein, 11 aa, Homo Sapiens
ILIEKEYLERV

SEQ ID NO: 3881 - protein, 11 aa, Homo Sapiens
ILINDAGEVRL

SEQ ID NO: 3882 - protein, 11 aa, Homo Sapiens
ILISVDGKVYL

SEQ ID NO: 3883 - protein, 11 aa, Homo Sapiens
ILLAEGRLVNL

SEQ ID NO: 3884 - protein, 11 aa, Homo Sapiens
ILLDDHGHIRI

SEQ ID NO: 3885 - protein, 11 aa, Homo Sapiens
ILLDDNMQIRL

SEQ ID NO: 3886 - protein, 11 aa, Homo Sapiens
ILLDDQFQPKL

SEQ ID NO: 3887 - protein, 11 aa, Homo Sapiens
ILLDDTGLAYI

SEQ ID NO: 3888 - protein, 11 aa, Homo Sapiens
ILLDEEGHIKI

SEQ ID NO: 3889 - protein, 11 aa, Homo Sapiens
ILLDERGQIKL

SEQ ID NO: 3890 - protein, 11 aa, Homo Sapiens
ILLDHEKEWKL

SEQ ID NO: 3891 - protein, 11 aa, Homo Sapiens
ILLNIEHRIML

SEQ ID NO: 3892 - protein, 11 aa, Homo Sapiens
ILLNNSGQIKL

SEQ ID NO: 3893 - protein, 11 aa, Homo Sapiens
ILLNPAYDVYL

SEQ ID NO: 3894 - protein, 11 aa, Homo Sapiens
ILLPEPSIRSV

SEQ ID NO: 3895 - protein, 11 aa, Homo Sapiens
ILLQENGHIYV

SEQ ID NO: 3896 - protein, 11 aa, Homo Sapiens
ILLSEEDLQML

SEQ ID NO: 3897 - protein, 11 aa, Homo Sapiens
ILLSEPGLVKL

SEQ ID NO: 3898 - protein, 11 aa, Homo Sapiens
ILLTEPGQVKL

SEQ ID NO: 3899 - protein, 11 aa, Homo Sapiens
ILLTSTELFQL

SEQ ID NO: 3900 - protein, 11 aa, Homo Sapiens
ILMEHIHKLKA

SEQ ID NO: 3901 - protein, 11 aa, Homo Sapiens
ILMSPNSYIKL

SEQ ID NO: 3902 - protein, 11 aa, Homo Sapiens
ILYSKTEHLGL

SEQ ID NO: 3903 - protein, 11 aa, Homo Sapiens
IMLSEKHLISV

SEQ ID NO: 3904 - protein, 11 aa, Homo Sapiens
IQDELGGKITV

SEQ ID NO: 3905 - protein, 11 aa, Homo Sapiens
ISERYGPVFTI

SEQ ID NO: 3906 - protein, 11 aa, Homo Sapiens
ISLPGEMVTLG

SEQ ID NO: 3907 - protein, 11 aa, Homo Sapiens
ISYAIMFLYIS

SEQ ID NO: 3908 - protein, 11 aa, Homo Sapiens
IVLPAGALHQV

SEQ ID NO: 3909 - protein, 11 aa, Homo Sapiens
KIGDFGLVTSL

SEQ ID NO: 3910 - protein, 11 aa, Homo Sapiens
KIMDYSLLVGI

SEQ ID NO: 3911 - protein, 11 aa, Homo Sapiens
KIMTEKELLAV

SEQ ID NO: 3912 - protein, 11 aa, Homo Sapiens
KIWDLKERTNV

SEQ ID NO: 3913 - protein, 11 aa, Homo Sapiens
KIWDVSVNSVV

SEQ ID NO: 3914 - protein, 11 aa, Homo Sapiens
KIWEELSVLEV

SEQ ID NO: 3915 - protein, 11 aa, Homo Sapiens
KLADDVDLEQV

SEQ ID NO: 3916 - protein, 11 aa, Homo Sapiens
KLADFGDAVQL

SEQ ID NO: 3917 - protein, 11 aa, Homo Sapiens
KLAPITYPQGL

SEQ ID NO: 3918 - protein, 11 aa, Homo Sapiens
KLDDLTQDLTV

SEQ ID NO: 3919 - protein, 11 aa, Homo Sapiens
KLDTVSSKIEL

SEQ ID NO: 3920 - protein, 11 aa, Homo Sapiens
KLFADAGLVCI

SEQ ID NO: 3921 - protein, 11 aa, Homo Sapiens
KLFDLDEKLML

SEQ ID NO: 3922 - protein, 11 aa, Homo Sapiens
KLFDRPQELKL

SEQ ID NO: 3923 - protein, 11 aa, Homo Sapiens
KLFNESHGIFL

SEQ ID NO: 3924 - protein, 11 aa, Homo Sapiens
KLFPGFEIETV

SEQ ID NO: 3925 - protein, 11 aa, Homo Sapiens
KLFTQIFGVGV

SEQ ID NO: 3926 - protein, 11 aa, Homo Sapiens
KLGDFGLLVEL

SEQ ID NO: 3927 - protein, 11 aa, Homo Sapiens
KLGEFAKVLEL

SEQ ID NO: 3928 - protein, 11 aa, Homo Sapiens
KLGHTDILVGV

SEQ ID NO: 3929 - protein, 11 aa, Homo Sapiens
KLIDETQDMLL

SEQ ID NO: 3930 - protein, 11 aa, Homo Sapiens
KLIDFGSGALL

SEQ ID NO: 3931 - protein, 11 aa, Homo Sapiens
KLIDLSQVMYL

SEQ ID NO: 3932 - protein, 11 aa, Homo Sapiens
KLIGDPNLEFV

SEQ ID NO: 3933 - protein, 11 aa, Homo Sapiens
KLLDELPIAKV

SEQ ID NO: 3934 - protein, 11 aa, Homo Sapiens
KLLDFGSLSNL

SEQ ID NO: 3935 - protein, 11 aa, Homo Sapiens
KLLDISELDMV

SEQ ID NO: 3936 - protein, 11 aa, Homo Sapiens
KLLDLSDSTSV

SEQ ID NO: 3937 - protein, 11 aa, Homo Sapiens
KLLDMVGKVQI

SEQ ID NO: 3938 - protein, 11 aa, Homo Sapiens
KLLDTMVDTFL

SEQ ID NO: 3939 - protein, 11 aa, Homo Sapiens
KLLETELLQEI

SEQ ID NO: 3940 - protein, 11 aa, Homo Sapiens
KLLEVSDDPQV

SEQ ID NO: 3941 - protein, 11 aa, Homo Sapiens
KLLSHSLLVTL

SEQ ID NO: 3942 - protein, 11 aa, Homo Sapiens
KLMDEVAGIVA

SEQ ID NO: 3943 - protein, 11 aa, Homo Sapiens
KLMNDDTLVNV

SEQ ID NO: 3944 - protein, 11 aa, Homo Sapiens
KLSLVAAMLLL

SEQ ID NO: 3945 - protein, 11 aa, Homo Sapiens
KLWDPRTPCNA

SEQ ID NO: 3946 - protein, 11 aa, Homo Sapiens
KLWNVAAPLYL

SEQ ID NO: 3947 - protein, 11 aa, Homo Sapiens
KLWTGGLDNTV

SEQ ID NO: 3948 - protein, 11 aa, Homo Sapiens
KLYQEVEIASV

SEQ ID NO: 3949 - protein, 11 aa, Homo Sapiens
KMDASLGNLFA

SEQ ID NO: 3950 - protein, 11 aa, Homo Sapiens
KMDDPDYWRTV

SEQ ID NO: 3951 - protein, 11 aa, Homo Sapiens
KMDDPTVNWSI

SEQ ID NO: 3952 - protein, 11 aa, Homo Sapiens
KMFDLNGDGEV

SEQ ID NO: 3953 - protein, 11 aa, Homo Sapiens
KMYEKIDLTLL

SEQ ID NO: 3954 - protein, 11 aa, Homo Sapiens
KMYGYVDTLLT

SEQ ID NO: 3955 - protein, 11 aa, Homo Sapiens
KVLEPSETLVV

SEQ ID NO: 3956 - protein, 11 aa, Homo Sapiens
KVLEVTEEFGV

SEQ ID NO: 3957 - protein, 11 aa, Homo Sapiens
KVLRESGLKYV

SEQ ID NO: 3958 - protein, 11 aa, Homo Sapiens
KVPQLEIVPNS

SEQ ID NO: 3959 - protein, 11 aa, Homo Sapiens
LILNVDGLIGV

SEQ ID NO: 3960 - protein, 11 aa, Homo Sapiens
LLAGFAFLTGV

SEQ ID NO: 3961 - protein, 11 aa, Homo Sapiens
LLAILPEAARA

SEQ ID NO: 3962 - protein, 11 aa, Homo Sapiens
LLDEIENIKQV

SEQ ID NO: 3963 - protein, 11 aa, Homo Sapiens
LLDEPTNHLDL

SEQ ID NO: 3964 - protein, 11 aa, Homo Sapiens
LLDPNVKSIFV

SEQ ID NO: 3965 - protein, 11 aa, Homo Sapiens
LLFDHLEPIEL

SEQ ID NO: 3966 - protein, 11 aa, Homo Sapiens
LLFEGEKKITI

SEQ ID NO: 3967 - protein, 11 aa, Homo Sapiens
LLFEHSDIVVI

SEQ ID NO: 3968 - protein, 11 aa, Homo Sapiens
LLFGKIGYYLV

SEQ ID NO: 3969 - protein, 11 aa, Homo Sapiens
LLFHHPNILEL

SEQ ID NO: 3970 - protein, 11 aa, Homo Sapiens
LLFPQIEGIKI

SEQ ID NO: 3971 - protein, 11 aa, Homo Sapiens
LLGELPRLLLL

SEQ ID NO: 3972 - protein, 11 aa, Homo Sapiens
LLIDDKGTIKL

SEQ ID NO: 3973 - protein, 11 aa, Homo Sapiens
LLIGHLERVTV

SEQ ID NO: 3974 - protein, 11 aa, Homo Sapiens
LLLAAARLAAA

SEQ ID NO: 3975 - protein, 11 aa, Homo Sapiens
LLLDENGVLKL

SEQ ID NO: 3976 - protein, 11 aa, Homo Sapiens
LLLDERQDVHL

SEQ ID NO: 3977 - protein, 11 aa, Homo Sapiens
LLLEEGGLVQV

SEQ ID NO: 3978 - protein, 11 aa, Homo Sapiens
LLLEPGSLYIL

SEQ ID NO: 3979 - protein, 11 aa, Homo Sapiens
LLLLDTVTMQV

SEQ ID NO: 3980 - protein, 11 aa, Homo Sapiens
LLLNEEALAQI

SEQ ID NO: 3981 - protein, 11 aa, Homo Sapiens
LLLPDYYLVTV

SEQ ID NO: 3982 - protein, 11 aa, Homo Sapiens
LLLPEHVLVKI

SEQ ID NO: 3983 - protein, 11 aa, Homo Sapiens
LLLTDQHLYKL

SEQ ID NO: 3984 - protein, 11 aa, Homo Sapiens
LLLYEEGLRVV

SEQ ID NO: 3985 - protein, 11 aa, Homo Sapiens
LLMPSSEDLLL

SEQ ID NO: 3986 - protein, 11 aa, Homo Sapiens
LLPDVGAIVTC

SEQ ID NO: 3987 - protein, 11 aa, Homo Sapiens
LLPGVDVLLEV

SEQ ID NO: 3988 - protein, 11 aa, Homo Sapiens
LLVPTSGIYFV

SEQ ID NO: 3989 - protein, 11 aa, Homo Sapiens
LLYDLADQLHA

SEQ ID NO: 3990 - protein, 11 aa, Homo Sapiens
LLYEDIGTSRV

SEQ ID NO: 3991 - protein, 11 aa, Homo Sapiens
LLYQEGAKMAV

SEQ ID NO: 3992 - protein, 11 aa, Homo Sapiens
LMWELEKKSAV

SEQ ID NO: 3993 - protein, 11 aa, Homo Sapiens
LSLSSETKPKL

SEQ ID NO: 3994 - protein, 11 aa, Homo Sapiens
LVDQPHSLLSI

SEQ ID NO: 3995 - protein, 11 aa, Homo Sapiens
LVVDEGSLVSV

SEQ ID NO: 3996 - protein, 11 aa, Homo Sapiens
MHQPHQPLPPT

SEQ ID NO: 3997 - protein, 11 aa, Homo Sapiens
MLFENMGAYTV

SEQ ID NO: 3998 - protein, 11 aa, Homo Sapiens
MLFGHPLLVSV

SEQ ID NO: 3999 - protein, 11 aa, Homo Sapiens
MTLPVDAVISV

SEQ ID NO: 4000 - protein, 11 aa, Homo Sapiens
NIASIGSTIFL

SEQ ID NO: 4001 - protein, 11 aa, Homo Sapiens
NIFPNPEATFV

SEQ ID NO: 4002 - protein, 11 aa, Homo Sapiens
NIIEAINELLV

SEQ ID NO: 4003 - protein, 11 aa, Homo Sapiens
NIMDIKIGLLV

SEQ ID NO: 4004 - protein, 11 aa, Homo Sapiens
NLAGENILNPL

SEQ ID NO: 4005 - protein, 11 aa, Homo Sapiens
NLASFIEQVAV

SEQ ID NO: 4006 - protein, 11 aa, Homo Sapiens
NLFEIITADEV

SEQ ID NO: 4007 - protein, 11 aa, Homo Sapiens
NLFEWAKNSPL

SEQ ID NO: 4008 - protein, 11 aa, Homo Sapiens
NLLDLNQKLQL

SEQ ID NO: 4009 - protein, 11 aa, Homo Sapiens
NLMNNPQIQQL

SEQ ID NO: 4010 - protein, 11 aa, Homo Sapiens
NLMPQMKTLYL

SEQ ID NO: 4011 - protein, 11 aa, Homo Sapiens
NLPAPHIMPGV

SEQ ID NO: 4012 - protein, 11 aa, Homo Sapiens
NMLDVNGLFTL

SEQ ID NO: 4013 - protein, 11 aa, Homo Sapiens
NMYEGVGRMFI

SEQ ID NO: 4014 - protein, 11 aa, Homo Sapiens
QLLPQGIVPAL

SEQ ID NO: 4015 - protein, 11 aa, Homo Sapiens
QLQPTDALLCV

SEQ ID NO: 4016 - protein, 11 aa, Homo Sapiens
QMLEAIKALEV

SEQ ID NO: 4017 - protein, 11 aa, Homo Sapiens
QMLPLNTNIRL

SEQ ID NO: 4018 - protein, 11 aa, Homo Sapiens
QMMQNPQILAA

SEQ ID NO: 4019 - protein, 11 aa, Homo Sapiens
QMWELSAVARV

SEQ ID NO: 4020 - protein, 11 aa, Homo Sapiens
QQLDSKFLEQV

SEQ ID NO: 4021 - protein, 11 aa, Homo Sapiens
RIAGIRGIQGV

SEQ ID NO: 4022 - protein, 11 aa, Homo Sapiens
RILDIDIPMSV

SEQ ID NO: 4023 - protein, 11 aa, Homo Sapiens
RLAEALPKQSV

SEQ ID NO: 4024 - protein, 11 aa, Homo Sapiens
RLAETLAQIYL

SEQ ID NO: 4025 - protein, 11 aa, Homo Sapiens
RLAEVGQYEQV

SEQ ID NO: 4026 - protein, 11 aa, Homo Sapiens
RLFDDSTVTTV

SEQ ID NO: 4027 - protein, 11 aa, Homo Sapiens
RLFDEPQLASL

SEQ ID NO: 4028 - protein, 11 aa, Homo Sapiens
RLFEVPHELVA

SEQ ID NO: 4029 - protein, 11 aa, Homo Sapiens
RLFHDSAVTSV

SEQ ID NO: 4030 - protein, 11 aa, Homo Sapiens
RLFLGIHVFLV

SEQ ID NO: 4031 - protein, 11 aa, Homo Sapiens
RLFNDPVAMVL

SEQ ID NO: 4032 - protein, 11 aa, Homo Sapiens
RLGEAEGLMKV

SEQ ID NO: 4033 - protein, 11 aa, Homo Sapiens
RLIDDEVRILI

SEQ ID NO: 4034 - protein, 11 aa, Homo Sapiens
RLIQGDQILSV

SEQ ID NO: 4035 - protein, 11 aa, Homo Sapiens
RLLEEGVLRQI

SEQ ID NO: 4036 - protein, 11 aa, Homo Sapiens
RLLEIPAVSHV

SEQ ID NO: 4037 - protein, 11 aa, Homo Sapiens
RLLEPAQVQQL

SEQ ID NO: 4038 - protein, 11 aa, Homo Sapiens
RLLEVNQQSLL

SEQ ID NO: 4039 - protein, 11 aa, Homo Sapiens
RLLEVTNTIRV

SEQ ID NO: 4040 - protein, 11 aa, Homo Sapiens
RLLPGDIILKV

SEQ ID NO: 4041 - protein, 11 aa, Homo Sapiens
RLLPPGAVVAV

SEQ ID NO: 4042 - protein, 11 aa, Homo Sapiens
RLLQETMYMTV

SEQ ID NO: 4043 - protein, 11 aa, Homo Sapiens
RLMEPIYLVEI

SEQ ID NO: 4044 - protein, 11 aa, Homo Sapiens
RLMNDMTAVAL

SEQ ID NO: 4045 - protein, 11 aa, Homo Sapiens
RLMNETTAVAL

SEQ ID NO: 4046 - protein, 11 aa, Homo Sapiens
RLPNRALLVNV

SEQ ID NO: 4047 - protein, 11 aa, Homo Sapiens
RLQETEGMVAV

SEQ ID NO: 4048 - protein, 11 aa, Homo Sapiens
RLWDHATMTEV

SEQ ID NO: 4049 - protein, 11 aa, Homo Sapiens
RLWDLTTGTTT

SEQ ID NO: 4050 - protein, 11 aa, Homo Sapiens
RLYSGISGLEL

SEQ ID NO: 4051 - protein, 11 aa, Homo Sapiens
RMANRDLLSSV

SEQ ID NO: 4052 - protein, 11 aa, Homo Sapiens
RMFDMGFEYQV

SEQ ID NO: 4053 - protein, 11 aa, Homo Sapiens
RMGGFGSIIQL

SEQ ID NO: 4054 - protein, 11 aa, Homo Sapiens
RMLDMGFEPQI

SEQ ID NO: 4055 - protein, 11 aa, Homo Sapiens
RMLEDRDLFVM

SEQ ID NO: 4056 - protein, 11 aa, Homo Sapiens
RQISIRGIVGV

SEQ ID NO: 4057 - protein, 11 aa, Homo Sapiens
RQLEEEGITFV

SEQ ID NO: 4058 - protein, 11 aa, Homo Sapiens
RVDPNGSRYLL

SEQ ID NO: 4059 - protein, 11 aa, Homo Sapiens
RVIDDSLVVGV

SEQ ID NO: 4060 - protein, 11 aa, Homo Sapiens
RVLPPSALQSV

SEQ ID NO: 4061 - protein, 11 aa, Homo Sapiens
RVMEEIRNLTV

SEQ ID NO: 4062 - protein, 11 aa, Homo Sapiens
RVMEELPLMLL

SEQ ID NO: 4063 - protein, 11 aa, Homo Sapiens
SIGKPSLFISV

SEQ ID NO: 4064 - protein, 11 aa, Homo Sapiens
SIQQSIERLLV

SEQ ID NO: 4065 - protein, 11 aa, Homo Sapiens
SLADIAQKLQL

SEQ ID NO: 4066 - protein, 11 aa, Homo Sapiens
SLAELDEKISA

SEQ ID NO: 4067 - protein, 11 aa, Homo Sapiens
SLAERVDRLQV

SEQ ID NO: 4068 - protein, 11 aa, Homo Sapiens
SLAGDVALQQL

SEQ ID NO: 4069 - protein, 11 aa, Homo Sapiens
SLAVLGGKLYV

SEQ ID NO: 4070 - protein, 11 aa, Homo Sapiens
SLDAAAGMLYL

SEQ ID NO: 4071 - protein, 11 aa, Homo Sapiens
SLFGGSVKLAL

SEQ ID NO: 4072 - protein, 11 aa, Homo Sapiens
SLFQGVEFHYV

SEQ ID NO: 4073 - protein, 11 aa, Homo Sapiens
SLFSEETPVVL

SEQ ID NO: 4074 - protein, 11 aa, Homo Sapiens
SLIDDNNEINL

SEQ ID NO: 4075 - protein, 11 aa, Homo Sapiens
SLIDMRGIETV

SEQ ID NO: 4076 - protein, 11 aa, Homo Sapiens
SLINLPANSTI

SEQ ID NO: 4077 - protein, 11 aa, Homo Sapiens
SLINVNDLSFV

SEQ ID NO: 4078 - protein, 11 aa, Homo Sapiens
SLLDIIEKVMA

SEQ ID NO: 4079 - protein, 11 aa, Homo Sapiens
SLLEDKGLAEV

SEQ ID NO: 4080 - protein, 11 aa, Homo Sapiens
SLLESNKDLLL

SEQ ID NO: 4081 - protein, 11 aa, Homo Sapiens
SLLESSRSQEL

SEQ ID NO: 4082 - protein, 11 aa, Homo Sapiens
SLLEVNEESTV

SEQ ID NO: 4083 - protein, 11 aa, Homo Sapiens
SLLGDDALVQV

SEQ ID NO: 4084 - protein, 11 aa, Homo Sapiens
SLLGGNIRLLL

SEQ ID NO: 4085 - protein, 11 aa, Homo Sapiens
SLLHLGALYGI

SEQ ID NO: 4086 - protein, 11 aa, Homo Sapiens
SLLKEPQKVQL

SEQ ID NO: 4087 - protein, 11 aa, Homo Sapiens
SLLPADCQIHL

SEQ ID NO: 4088 - protein, 11 aa, Homo Sapiens
SLLPEYVVPYM

SEQ ID NO: 4089 - protein, 11 aa, Homo Sapiens
SLLPGNLVEKV

SEQ ID NO: 4090 - protein, 11 aa, Homo Sapiens
SLLPPDALVGL

SEQ ID NO: 4091 - protein, 11 aa, Homo Sapiens
SLLPPTALVGL

SEQ ID NO: 4092 - protein, 11 aa, Homo Sapiens
SLLPVDIRQYL

SEQ ID NO: 4093 - protein, 11 aa, Homo Sapiens
SLLRRVSVTAV

SEQ ID NO: 4094 - protein, 11 aa, Homo Sapiens
SLLSNDLKLNL

SEQ ID NO: 4095 - protein, 11 aa, Homo Sapiens
SLMDPNKFLLL

SEQ ID NO: 4096 - protein, 11 aa, Homo Sapiens
SLMEESGICKV

SEQ ID NO: 4097 - protein, 11 aa, Homo Sapiens
SLMEKVRNMAL

SEQ ID NO: 4098 - protein, 11 aa, Homo Sapiens
SLMHDVYGMLL

SEQ ID NO: 4099 - protein, 11 aa, Homo Sapiens
SLMPHFKSMYL

SEQ ID NO: 4100 - protein, 11 aa, Homo Sapiens
SLQEFVKAFYL

SEQ ID NO: 4101 - protein, 11 aa, Homo Sapiens
SLVENIERLKV

SEQ ID NO: 4102 - protein, 11 aa, Homo Sapiens
SLVSPASFENV

SEQ ID NO: 4103 - protein, 11 aa, Homo Sapiens
SLWSLTHLTAL

SEQ ID NO: 4104 - protein, 11 aa, Homo Sapiens
SLYDQAEKLVS

SEQ ID NO: 4105 - protein, 11 aa, Homo Sapiens
SMADIPLGFGV

SEQ ID NO: 4106 - protein, 11 aa, Homo Sapiens
SMAPGLVIQAV

SEQ ID NO: 4107 - protein, 11 aa, Homo Sapiens
SQLDISDPYKV

SEQ ID NO: 4108 - protein, 11 aa, Homo Sapiens
SQLDISEPYKV

SEQ ID NO: 4109 - protein, 11 aa, Homo Sapiens
STFDHPELVKL

SEQ ID NO: 4110 - protein, 11 aa, Homo Sapiens
SVIDHIHLISV

SEQ ID NO: 4111 - protein, 11 aa, Homo Sapiens
TEDELQDKIHP

SEQ ID NO: 4112 - protein, 11 aa, Homo Sapiens
TIAEGLTLAQV

SEQ ID NO: 4113 - protein, 11 aa, Homo Sapiens
TIIDLPGITRV

SEQ ID NO: 4114 - protein, 11 aa, Homo Sapiens
TLADLRVLFGI

SEQ ID NO: 4115 - protein, 11 aa, Homo Sapiens
TLFHDPWKLLI

SEQ ID NO: 4116 - protein, 11 aa, Homo Sapiens
TLIDLPGITKV

SEQ ID NO: 4117 - protein, 11 aa, Homo Sapiens
TLIGLSIKVKL

SEQ ID NO: 4118 - protein, 11 aa, Homo Sapiens
TLLAAEFLKQV

SEQ ID NO: 4119 - protein, 11 aa, Homo Sapiens
TLLADQGEIRV

SEQ ID NO: 4120 - protein, 11 aa, Homo Sapiens
TLLDASEKLKL

SEQ ID NO: 4121 - protein, 11 aa, Homo Sapiens
TLLDNTDTISI

SEQ ID NO: 4122 - protein, 11 aa, Homo Sapiens
TLLDPNEKYLL

SEQ ID NO: 4123 - protein, 11 aa, Homo Sapiens
TLLDSVLVTLV

SEQ ID NO: 4124 - protein, 11 aa, Homo Sapiens
TLLEEIRDLAL

SEQ ID NO: 4125 - protein, 11 aa, Homo Sapiens
TLLHAGGLARA

SEQ ID NO: 4126 - protein, 11 aa, Homo Sapiens
TLMEEVLLLGL

SEQ ID NO: 4127 - protein, 11 aa, Homo Sapiens
TLMEQTLPVTV

SEQ ID NO: 4128 - protein, 11 aa, Homo Sapiens
TLVDNISTMAL

SEQ ID NO: 4129 - protein, 11 aa, Homo Sapiens
TLWYRAPEVLL

SEQ ID NO: 4130 - protein, 11 aa, Homo Sapiens
TLYDIAHTPGV

SEQ ID NO: 4131 - protein, 11 aa, Homo Sapiens
TLYKDVRDLLA

SEQ ID NO: 4132 - protein, 11 aa, Homo Sapiens
TLYNPERTITV

SEQ ID NO: 4133 - protein, 11 aa, Homo Sapiens
TMAKESSIIGV

SEQ ID NO: 4134 - protein, 11 aa, Homo Sapiens
VILDIPLLFET

SEQ ID NO: 4135 - protein, 11 aa, Homo Sapiens
VLFDVTGQVRL

SEQ ID NO: 4136 - protein, 11 aa, Homo Sapiens
VLFENTDSVHL

SEQ ID NO: 4137 - protein, 11 aa, Homo Sapiens
VLFGWPSLVFV

SEQ ID NO: 4138 - protein, 11 aa, Homo Sapiens
VLFPSAEVALL

SEQ ID NO: 4139 - protein, 11 aa, Homo Sapiens
VLFSSPPVILL

SEQ ID NO: 4140 - protein, 11 aa, Homo Sapiens
VLFSVADRLRL

SEQ ID NO: 4141 - protein, 11 aa, Homo Sapiens
VLGGKAFLEHL

SEQ ID NO: 4142 - protein, 11 aa, Homo Sapiens
VLIDTPGQIEV

SEQ ID NO: 4143 - protein, 11 aa, Homo Sapiens
VLIDVGTGYYV

SEQ ID NO: 4144 - protein, 11 aa, Homo Sapiens
VLLDVNGHIRL

SEQ ID NO: 4145 - protein, 11 aa, Homo Sapiens
VLLEEGEAQRL

SEQ ID NO: 4146 - protein, 11 aa, Homo Sapiens
VLLFEADTITL

SEQ ID NO: 4147 - protein, 11 aa, Homo Sapiens
VLLFERELHSV

SEQ ID NO: 4148 - protein, 11 aa, Homo Sapiens
VLLPAAGLLQL

SEQ ID NO: 4149 - protein, 11 aa, Homo Sapiens
VLLPDERTISL

SEQ ID NO: 4150 - protein, 11 aa, Homo Sapiens
VLLPEGGITAI

SEQ ID NO: 4151 - protein, 11 aa, Homo Sapiens
VLLSEQGDVKL

SEQ ID NO: 4152 - protein, 11 aa, Homo Sapiens
VLLSHPDPLHL

SEQ ID NO: 4153 - protein, 11 aa, Homo Sapiens
VLLVEHALSKV

SEQ ID NO: 4154 - protein, 11 aa, Homo Sapiens
VLMEDRLTNRL

SEQ ID NO: 4155 - protein, 11 aa, Homo Sapiens
VLMNQPPQIAP

SEQ ID NO: 4156 - protein, 11 aa, Homo Sapiens
VLVDDDGIKVV

SEQ ID NO: 4157 - protein, 11 aa, Homo Sapiens
VLWDLVDRIGI

SEQ ID NO: 4158 - protein, 11 aa, Homo Sapiens
VLYNEIEYAQA

SEQ ID NO: 4159 - protein, 11 aa, Homo Sapiens
VMFEDGVLMRL

SEQ ID NO: 4160 - protein, 11 aa, Homo Sapiens
VMFKKIKSFEV

SEQ ID NO: 4161 - protein, 11 aa, Homo Sapiens
VMQDPEFLQSV

SEQ ID NO: 4162 - protein, 11 aa, Homo Sapiens
VVLEGASLETV

SEQ ID NO: 4163 - protein, 11 aa, Homo Sapiens
WLIEDGKVVTV

SEQ ID NO: 4164 - protein, 11 aa, Homo Sapiens
YAYDGKDYIAL

SEQ ID NO: 4165 - protein, 11 aa, Homo Sapiens
YIFPLDDKAAV

SEQ ID NO: 4166 - protein, 11 aa, Homo Sapiens
YIMEPSIFNTL

SEQ ID NO: 4167 - protein, 11 aa, Homo Sapiens
YKVPQLEIVPN

SEQ ID NO: 4168 - protein, 11 aa, Homo Sapiens
YLADPAKFPEA

SEQ ID NO: 4169 - protein, 11 aa, Homo Sapiens
YLAGLHANIAV

SEQ ID NO: 4170 - protein, 11 aa, Homo Sapiens
YLDVSVGKIVA

SEQ ID NO: 4171 - protein, 11 aa, Homo Sapiens
YLFDVQRNNIA

SEQ ID NO: 4172 - protein, 11 aa, Homo Sapiens
YLHDQNPDAAL

SEQ ID NO: 4173 - protein, 11 aa, Homo Sapiens
YLIGQHVTAAL

SEQ ID NO: 4174 - protein, 11 aa, Homo Sapiens
YLINNPNQISL

SEQ ID NO: 4175 - protein, 11 aa, Homo Sapiens
YLIPFTGIVGL

SEQ ID NO: 4176 - protein, 11 aa, Homo Sapiens
YLIPLLERLDL

SEQ ID NO: 4177 - protein, 11 aa, Homo Sapiens
YLISQVEGHQV

SEQ ID NO: 4178 - protein, 11 aa, Homo Sapiens
YLLDIGCGTGL

SEQ ID NO: 4179 - protein, 11 aa, Homo Sapiens
YLLEQTPEQQA

SEQ ID NO: 4180 - protein, 11 aa, Homo Sapiens
YLLNDASLISV

SEQ ID NO: 4181 - protein, 11 aa, Homo Sapiens
YLLPKDQGITL

SEQ ID NO: 4182 - protein, 11 aa, Homo Sapiens
YLLPSGGSVTL

SEQ ID NO: 4183 - protein, 11 aa, Homo Sapiens
YLLSEKDLILA

SEQ ID NO: 4184 - protein, 11 aa, Homo Sapiens
YLMDINGKMWL

SEQ ID NO: 4185 - protein, 11 aa, Homo Sapiens
YLNETFSELRL

SEQ ID NO: 4186 - protein, 11 aa, Homo Sapiens
YLPDIIKDQKA

SEQ ID NO: 4187 - protein, 11 aa, Homo Sapiens
YLQDQHLLLTV

SEQ ID NO: 4188 - protein, 11 aa, Homo Sapiens
YLQEHAQEVVL

SEQ ID NO: 4189 - protein, 11 aa, Homo Sapiens
YLSDPCPGLYL

SEQ ID NO: 4190 - protein, 11 aa, Homo Sapiens
YLSEDVFQHAV

SEQ ID NO: 4191 - protein, 11 aa, Homo Sapiens
YLSELSEHVKL

SEQ ID NO: 4192 - protein, 11 aa, Homo Sapiens
YLYESGETEKL

SEQ ID NO: 4193 - protein, 11 aa, Homo Sapiens
YMGEEKLIASV

SEQ ID NO: 4194 - protein, 11 aa, Homo Sapiens
YMIGSEVGNYL

SEQ ID NO: 4195 - protein, 11 aa, Homo Sapiens
YQDPLDPTRSV

SEQ ID NO: 4196 - protein, 11 aa, Homo Sapiens
YQFDKVGILTL

SEQ ID NO: 4197 - protein, 11 aa, Homo Sapiens
YQFDSALLPAV

SEQ ID NO: 4198 - protein, 11 aa, Homo Sapiens
YQFGEIRTITV

SEQ ID NO: 4199 - protein, 11 aa, Homo Sapiens
YQLEIPENFTT

SEQ ID NO: 4200 - protein, 11 aa, Homo Sapiens
YTLPIASSIRL

SEQ ID NO: 4201 - protein, 11 aa, Homo Sapiens
YVIAYIRDLAL

SEQ ID NO: 4202 - protein, 11 aa, Homo Sapiens
YVIDPIKGLKL

SEQ ID NO: 4203 - protein, 8 aa, Homo Sapiens
ALFKAWAL

SEQ ID NO: 4204 - protein, 8 aa, Homo Sapiens
ALKDLLCH

SEQ ID NO: 4205 - protein, 8 aa, Homo Sapiens
ALNRNEIL

SEQ ID NO: 4206 - protein, 8 aa, Homo Sapiens
ASGLIHRV

SEQ ID NO: 4207 - protein, 8 aa, Homo Sapiens
EEQLQQIR

SEQ ID NO: 4208 - protein, 8 aa, Homo Sapiens
EESNYELE

SEQ ID NO: 4209 - protein, 8 aa, Homo Sapiens
EKSPLQTI

SEQ ID NO: 4210 - protein, 8 aa, Homo Sapiens
FGEEPSKL

SEQ ID NO: 4211 - protein, 8 aa, Homo Sapiens
FGGHIRSV

SEQ ID NO: 4212 - protein, 8 aa, Homo Sapiens
FNEKSKEL

SEQ ID NO: 4213 - protein, 8 aa, Homo Sapiens
GKDAVEDL

SEQ ID NO: 4214 - protein, 8 aa, Homo Sapiens
GLFKTDRV

SEQ ID NO: 4215 - protein, 8 aa, Homo Sapiens
GLGPVEYL

SEQ ID NO: 4216 - protein, 8 aa, Homo Sapiens
HLLQWLLL

SEQ ID NO: 4217 - protein, 8 aa, Homo Sapiens
ILGPTFTL

SEQ ID NO: 4218 - protein, 8 aa, Homo Sapiens
ILTDHQYL

SEQ ID NO: 4219 - protein, 8 aa, Homo Sapiens
IRLENEIQ

SEQ ID NO: 4220 - protein, 8 aa, Homo Sapiens
ISDLEHRL

SEQ ID NO: 4221 - protein, 8 aa, Homo Sapiens
ISSEKVVP

SEQ ID NO: 4222 - protein, 8 aa, Homo Sapiens
KLGPAIKL

SEQ ID NO: 4223 - protein, 8 aa, Homo Sapiens
LAETEGRY

SEQ ID NO: 4224 - protein, 8 aa, Homo Sapiens
LAGHDNRV

SEQ ID NO: 4225 - protein, 8 aa, Homo Sapiens
LAPHVRTL

SEQ ID NO: 4226 - protein, 8 aa, Homo Sapiens
LFGEVHKA

SEQ ID NO: 4227 - protein, 8 aa, Homo Sapiens
LFGHENRV

SEQ ID NO: 4228 - protein, 8 aa, Homo Sapiens
LKDKIEKA

SEQ ID NO: 4229 - protein, 8 aa, Homo Sapiens
LKGDVEKL

SEQ ID NO: 4230 - protein, 8 aa, Homo Sapiens
LKKEQENL

SEQ ID NO: 4231 - protein, 8 aa, Homo Sapiens
LKPEVDKL

SEQ ID NO: 4232 - protein, 8 aa, Homo Sapiens
LLAGSEYL

SEQ ID NO: 4233 - protein, 8 aa, Homo Sapiens
LLGPEHPL

SEQ ID NO: 4234 - protein, 8 aa, Homo Sapiens
LLYSYERA

SEQ ID NO: 4235 - protein, 8 aa, Homo Sapiens
LMEHIHKL

SEQ ID NO: 4236 - protein, 8 aa, Homo Sapiens
LNEKINHL

SEQ ID NO: 4237 - protein, 8 aa, Homo Sapiens
LNPHLRQL

SEQ ID NO: 4238 - protein, 8 aa, Homo Sapiens
LQEREYRL

SEQ ID NO: 4239 - protein, 8 aa, Homo Sapiens
LQQAKDEI

SEQ ID NO: 4240 - protein, 8 aa, Homo Sapiens
LQQAKEDL

SEQ ID NO: 4241 - protein, 8 aa, Homo Sapiens
LSSHVRGV

SEQ ID NO: 4242 - protein, 8 aa, Homo Sapiens
LYSKTEHL

SEQ ID NO: 4243 - protein, 8 aa, Homo Sapiens
NNRSLDLD

SEQ ID NO: 4244 - protein, 8 aa, Homo Sapiens
SFSKAFGQ

SEQ ID NO: 4245 - protein, 8 aa, Homo Sapiens
SKEEAEAL

SEQ ID NO: 4246 - protein, 8 aa, Homo Sapiens
STGDVNVE

SEQ ID NO: 4247 - protein, 8 aa, Homo Sapiens
TEELAYLK

SEQ ID NO: 4248 - protein, 8 aa, Homo Sapiens
VSLTACKV

SEQ ID NO: 4249 - protein, 8 aa, Homo Sapiens
VSQINHKL

SEQ ID NO: 4250 - protein, 8 aa, Homo Sapiens
YDKDHYKL

SEQ ID NO: 4251 - protein, 8 aa, Homo Sapiens
YEEIAQRS

SEQ ID NO: 4252 - protein, 8 aa, Homo Sapiens
YGVDLHHA

SEQ ID NO: 4253 - protein, 8 aa, Homo Sapiens
YGVDLHKA

SEQ ID NO: 4254 - protein, 8 aa, Homo Sapiens
YLFHVQEV

SEQ ID NO: 4255 - protein, 9 aa, Homo Sapiens
AAADIVNFL

SEQ ID NO: 4256 - protein, 9 aa, Homo Sapiens
ADASLLKKV

SEQ ID NO: 4257 - protein, 9 aa, Homo Sapiens
AENEFVTIK

SEQ ID NO: 4258 - protein, 9 aa, Homo Sapiens
AFADIIHSL

SEQ ID NO: 4259 - protein, 9 aa, Homo Sapiens
AIADHYMQV

SEQ ID NO: 4260 - protein, 9 aa, Homo Sapiens
AIAPNTNNL

SEQ ID NO: 4261 - protein, 9 aa, Homo Sapiens
AICPNNHEV

SEQ ID NO: 4262 - protein, 9 aa, Homo Sapiens
AISEMTDKL

SEQ ID NO: 4263 - protein, 9 aa, Homo Sapiens
ALAAALAHI

SEQ ID NO: 4264 - protein, 9 aa, Homo Sapiens
ALAAKECSL

SEQ ID NO: 4265 - protein, 9 aa, Homo Sapiens
ALAALHVTL

SEQ ID NO: 4266 - protein, 9 aa, Homo Sapiens
ALAALVYCV

SEQ ID NO: 4267 - protein, 9 aa, Homo Sapiens
ALADGVQKV

SEQ ID NO: 4268 - protein, 9 aa, Homo Sapiens
ALADKHATL

SEQ ID NO: 4269 - protein, 9 aa, Homo Sapiens
ALADLQEAV

SEQ ID NO: 4270 - protein, 9 aa, Homo Sapiens
ALADVLRRL

SEQ ID NO: 4271 - protein, 9 aa, Homo Sapiens
ALADVMSQL

SEQ ID NO: 4272 - protein, 9 aa, Homo Sapiens
ALAEALKEV

SEQ ID NO: 4273 - protein, 9 aa, Homo Sapiens
ALAEALRLL

SEQ ID NO: 4274 - protein, 9 aa, Homo Sapiens
ALAEDPQEL

SEQ ID NO: 4275 - protein, 9 aa, Homo Sapiens
ALAEEVEQV

SEQ ID NO: 4276 - protein, 9 aa, Homo Sapiens
ALAEGCPRL

SEQ ID NO: 4277 - protein, 9 aa, Homo Sapiens
ALAEGQLRL

SEQ ID NO: 4278 - protein, 9 aa, Homo Sapiens
ALAEKLDRL

SEQ ID NO: 4279 - protein, 9 aa, Homo Sapiens
ALAEKVKEA

SEQ ID NO: 4280 - protein, 9 aa, Homo Sapiens
ALAELSESL

SEQ ID NO: 4281 - protein, 9 aa, Homo Sapiens
ALAELTKRL

SEQ ID NO: 4282 - protein, 9 aa, Homo Sapiens
ALAEMDRQL

SEQ ID NO: 4283 - protein, 9 aa, Homo Sapiens
ALAERLDIV

SEQ ID NO: 4284 - protein, 9 aa, Homo Sapiens
ALAERQQLI

SEQ ID NO: 4285 - protein, 9 aa, Homo Sapiens
ALAERQSEL

SEQ ID NO: 4286 - protein, 9 aa, Homo Sapiens
ALAEYACKL

SEQ ID NO: 4287 - protein, 9 aa, Homo Sapiens
ALAEYSRLL

SEQ ID NO: 4288 - protein, 9 aa, Homo Sapiens
ALAFSDCRL

SEQ ID NO: 4289 - protein, 9 aa, Homo Sapiens
ALAFVLQHL

SEQ ID NO: 4290 - protein, 9 aa, Homo Sapiens
ALAGLGHEI

SEQ ID NO: 4291 - protein, 9 aa, Homo Sapiens
ALAILLQKL

SEQ ID NO: 4292 - protein, 9 aa, Homo Sapiens
ALAKAPFAA

SEQ ID NO: 4293 - protein, 9 aa, Homo Sapiens
ALAKHLIKI

SEQ ID NO: 4294 - protein, 9 aa, Homo Sapiens
ALAKIDAEL

SEQ ID NO: 4295 - protein, 9 aa, Homo Sapiens
ALAKIEIKL

SEQ ID NO: 4296 - protein, 9 aa, Homo Sapiens
ALAKLVEAI

SEQ ID NO: 4297 - protein, 9 aa, Homo Sapiens
ALAKNSPGL

SEQ ID NO: 4298 - protein, 9 aa, Homo Sapiens
ALAKTEVSL

SEQ ID NO: 4299 - protein, 9 aa, Homo Sapiens
ALANHLIKV

SEQ ID NO: 4300 - protein, 9 aa, Homo Sapiens
ALANLADML

SEQ ID NO: 4301 - protein, 9 aa, Homo Sapiens
ALANMHESL

SEQ ID NO: 4302 - protein, 9 aa, Homo Sapiens
ALAPHEEYI

SEQ ID NO: 4303 - protein, 9 aa, Homo Sapiens
ALAPHLDDA

SEQ ID NO: 4304 - protein, 9 aa, Homo Sapiens
ALAPLLSSL

SEQ ID NO: 4305 - protein, 9 aa, Homo Sapiens
ALAPSTMKI

SEQ ID NO: 4306 - protein, 9 aa, Homo Sapiens
ALAPYLDLL

SEQ ID NO: 4307 - protein, 9 aa, Homo Sapiens
ALAQAVQRA

SEQ ID NO: 4308 - protein, 9 aa, Homo Sapiens
ALAQHQTKL

SEQ ID NO: 4309 - protein, 9 aa, Homo Sapiens
ALAQIPQKV

SEQ ID NO: 4310 - protein, 9 aa, Homo Sapiens
ALASISHVA

SEQ ID NO: 4311 - protein, 9 aa, Homo Sapiens
ALASLENHV

SEQ ID NO: 4312 - protein, 9 aa, Homo Sapiens
ALASVIKEL

SEQ ID NO: 4313 - protein, 9 aa, Homo Sapiens
ALATHILSL

SEQ ID NO: 4314 - protein, 9 aa, Homo Sapiens
ALATLIHQV

SEQ ID NO: 4315 - protein, 9 aa, Homo Sapiens
ALAVFPSLL

SEQ ID NO: 4316 - protein, 9 aa, Homo Sapiens
ALAVMVDHL

SEQ ID NO: 4317 - protein, 9 aa, Homo Sapiens
ALAWNAEQL

SEQ ID NO: 4318 - protein, 9 aa, Homo Sapiens
ALCALVYRL

SEQ ID NO: 4319 - protein, 9 aa, Homo Sapiens
ALCMGNHEL

SEQ ID NO: 4320 - protein, 9 aa, Homo Sapiens
ALCPAAQGL

SEQ ID NO: 4321 - protein, 9 aa, Homo Sapiens
ALCPHLKTL

SEQ ID NO: 4322 - protein, 9 aa, Homo Sapiens
ALCPQVINA

SEQ ID NO: 4323 - protein, 9 aa, Homo Sapiens
ALCPRIHEV

SEQ ID NO: 4324 - protein, 9 aa, Homo Sapiens
ALCRLVELL

SEQ ID NO: 4325 - protein, 9 aa, Homo Sapiens
ALCTKVPEL

SEQ ID NO: 4326 - protein, 9 aa, Homo Sapiens
ALCVIRNLI

SEQ ID NO: 4327 - protein, 9 aa, Homo Sapiens
ALDDRLYCV

SEQ ID NO: 4328 - protein, 9 aa, Homo Sapiens
ALDKITASL

SEQ ID NO: 4329 - protein, 9 aa, Homo Sapiens
ALFDAQAQV

SEQ ID NO: 4330 - protein, 9 aa, Homo Sapiens
ALFEEVPEL

SEQ ID NO: 4331 - protein, 9 aa, Homo Sapiens
ALFEGKVQL

SEQ ID NO: 4332 - protein, 9 aa, Homo Sapiens
ALFNGAQKL

SEQ ID NO: 4333 - protein, 9 aa, Homo Sapiens
ALFPGVALL

SEQ ID NO: 4334 - protein, 9 aa, Homo Sapiens
ALFQHITAL

SEQ ID NO: 4335 - protein, 9 aa, Homo Sapiens
ALFSFLYHL

SEQ ID NO: 4336 - protein, 9 aa, Homo Sapiens
ALFWEQHDL

SEQ ID NO: 4337 - protein, 9 aa, Homo Sapiens
ALFYFASKL

SEQ ID NO: 4338 - protein, 9 aa, Homo Sapiens
ALGECYEKL

SEQ ID NO: 4339 - protein, 9 aa, Homo Sapiens
ALGEPLYRV

SEQ ID NO: 4340 - protein, 9 aa, Homo Sapiens
ALGNIVHGL

SEQ ID NO: 4341 - protein, 9 aa, Homo Sapiens
ALGPKPQGL

SEQ ID NO: 4342 - protein, 9 aa, Homo Sapiens
ALGSLCQRL

SEQ ID NO: 4343 - protein, 9 aa, Homo Sapiens
ALGWATAEL

SEQ ID NO: 4344 - protein, 9 aa, Homo Sapiens
ALHAQVERL

SEQ ID NO: 4345 - protein, 9 aa, Homo Sapiens
ALHDHLATI

SEQ ID NO: 4346 - protein, 9 aa, Homo Sapiens
ALHDILTEI

SEQ ID NO: 4347 - protein, 9 aa, Homo Sapiens
ALHDLLQHV

SEQ ID NO: 4348 - protein, 9 aa, Homo Sapiens
ALHDQLFYL

SEQ ID NO: 4349 - protein, 9 aa, Homo Sapiens
ALHDQLNRL

SEQ ID NO: 4350 - protein, 9 aa, Homo Sapiens
ALHDQSQEL

SEQ ID NO: 4351 - protein, 9 aa, Homo Sapiens
ALHDRAPQL

SEQ ID NO: 4352 - protein, 9 aa, Homo Sapiens
ALHDSSDYL

SEQ ID NO: 4353 - protein, 9 aa, Homo Sapiens
ALHEKEETL

SEQ ID NO: 4354 - protein, 9 aa, Homo Sapiens
ALHENCSQL

SEQ ID NO: 4355 - protein, 9 aa, Homo Sapiens
ALHHAVIFL

SEQ ID NO: 4356 - protein, 9 aa, Homo Sapiens
ALHILVHEL

SEQ ID NO: 4357 - protein, 9 aa, Homo Sapiens
ALHNFIDGL

SEQ ID NO: 4358 - protein, 9 aa, Homo Sapiens
ALHPHTPKV

SEQ ID NO: 4359 - protein, 9 aa, Homo Sapiens
ALHPVQFYL

SEQ ID NO: 4360 - protein, 9 aa, Homo Sapiens
ALHSLTACL

SEQ ID NO: 4361 - protein, 9 aa, Homo Sapiens
ALHSVEVEL

SEQ ID NO: 4362 - protein, 9 aa, Homo Sapiens
ALHWFLNQV

SEQ ID NO: 4363 - protein, 9 aa, Homo Sapiens
ALIDRMVNL

SEQ ID NO: 4364 - protein, 9 aa, Homo Sapiens
ALIEDEHNL

SEQ ID NO: 4365 - protein, 9 aa, Homo Sapiens
ALIEKLVEL

SEQ ID NO: 4366 - protein, 9 aa, Homo Sapiens
ALIGQCIHI

SEQ ID NO: 4367 - protein, 9 aa, Homo Sapiens
ALIPVINKL

SEQ ID NO: 4368 - protein, 9 aa, Homo Sapiens
ALKDEIDVL

SEQ ID NO: 4369 - protein, 9 aa, Homo Sapiens
ALKDEVQEL

SEQ ID NO: 4370 - protein, 9 aa, Homo Sapiens
ALKDKIEKA

SEQ ID NO: 4371 - protein, 9 aa, Homo Sapiens
ALKDLINEA

SEQ ID NO: 4372 - protein, 9 aa, Homo Sapiens
ALKEKIHEL

SEQ ID NO: 4373 - protein, 9 aa, Homo Sapiens
ALKEKVIKA

SEQ ID NO: 4374 - protein, 9 aa, Homo Sapiens
ALKERADSL

SEQ ID NO: 4375 - protein, 9 aa, Homo Sapiens
ALKERVDEL

SEQ ID NO: 4376 - protein, 9 aa, Homo Sapiens
ALKKALAAA

SEQ ID NO: 4377 - protein, 9 aa, Homo Sapiens
ALKKNLEKI

SEQ ID NO: 4378 - protein, 9 aa, Homo Sapiens
ALKNDLVEA

SEQ ID NO: 4379 - protein, 9 aa, Homo Sapiens
ALKPEVDKL

SEQ ID NO: 4380 - protein, 9 aa, Homo Sapiens
ALKSHIMAA

SEQ ID NO: 4381 - protein, 9 aa, Homo Sapiens
ALLDKLYAL

SEQ ID NO: 4382 - protein, 9 aa, Homo Sapiens
ALMADMVYV

SEQ ID NO: 4383 - protein, 9 aa, Homo Sapiens
ALMAQEQKL

SEQ ID NO: 4384 - protein, 9 aa, Homo Sapiens
ALMDEVVKA

SEQ ID NO: 4385 - protein, 9 aa, Homo Sapiens
ALMDQVHHM

SEQ ID NO: 4386 - protein, 9 aa, Homo Sapiens
ALMKHPQFL

SEQ ID NO: 4387 - protein, 9 aa, Homo Sapiens
ALMPKQATV

SEQ ID NO: 4388 - protein, 9 aa, Homo Sapiens
ALMPQLVQL

SEQ ID NO: 4389 - protein, 9 aa, Homo Sapiens
ALMPVLNQV

SEQ ID NO: 4390 - protein, 9 aa, Homo Sapiens
ALNAITKKL

SEQ ID NO: 4391 - protein, 9 aa, Homo Sapiens
ALNDCIYSV

SEQ ID NO: 4392 - protein, 9 aa, Homo Sapiens
ALNDEIRQL

SEQ ID NO: 4393 - protein, 9 aa, Homo Sapiens
ALNDHFVKL

SEQ ID NO: 4394 - protein, 9 aa, Homo Sapiens
ALNEHMTSL

SEQ ID NO: 4395 - protein, 9 aa, Homo Sapiens
ALNEKLVNL

SEQ ID NO: 4396 - protein, 9 aa, Homo Sapiens
ALNELLQHV

SEQ ID NO: 4397 - protein, 9 aa, Homo Sapiens
ALNENIDRV

SEQ ID NO: 4398 - protein, 9 aa, Homo Sapiens
ALNENINQV

SEQ ID NO: 4399 - protein, 9 aa, Homo Sapiens
ALNEQIARL

SEQ ID NO: 4400 - protein, 9 aa, Homo Sapiens
ALNGHVEMV

SEQ ID NO: 4401 - protein, 9 aa, Homo Sapiens
ALNGKLYIV

SEQ ID NO: 4402 - protein, 9 aa, Homo Sapiens
ALNHVVQLL

SEQ ID NO: 4403 - protein, 9 aa, Homo Sapiens
ALNIATHVL

SEQ ID NO: 4404 - protein, 9 aa, Homo Sapiens
ALNNHVEVA

SEQ ID NO: 4405 - protein, 9 aa, Homo Sapiens
ALNNLLHSL

SEQ ID NO: 4406 - protein, 9 aa, Homo Sapiens
ALNQYYVHL

SEQ ID NO: 4407 - protein, 9 aa, Homo Sapiens
ALNRSVQVV

SEQ ID NO: 4408 - protein, 9 aa, Homo Sapiens
ALNSAIDKM

SEQ ID NO: 4409 - protein, 9 aa, Homo Sapiens
ALNSKDAAL

SEQ ID NO: 4410 - protein, 9 aa, Homo Sapiens
ALPDWCEQL

SEQ ID NO: 4411 - protein, 9 aa, Homo Sapiens
ALPELEHNL

SEQ ID NO: 4412 - protein, 9 aa, Homo Sapiens
ALQEKLQYL

SEQ ID NO: 4413 - protein, 9 aa, Homo Sapiens
ALQEKLWNV

SEQ ID NO: 4414 - protein, 9 aa, Homo Sapiens
ALQEMVHQV

SEQ ID NO: 4415 - protein, 9 aa, Homo Sapiens
ALQERLDGL

SEQ ID NO: 4416 - protein, 9 aa, Homo Sapiens
ALQSLLHLL

SEQ ID NO: 4417 - protein, 9 aa, Homo Sapiens
ALRDVSEEL

SEQ ID NO: 4418 - protein, 9 aa, Homo Sapiens
ALREENEQL

SEQ ID NO: 4419 - protein, 9 aa, Homo Sapiens
ALRETVNAL

SEQ ID NO: 4420 - protein, 9 aa, Homo Sapiens
ALRGEIETV

SEQ ID NO: 4421 - protein, 9 aa, Homo Sapiens
ALRPEVERL

SEQ ID NO: 4422 - protein, 9 aa, Homo Sapiens
ALSAIHQKL

SEQ ID NO: 4423 - protein, 9 aa, Homo Sapiens
ALSALNPLL

SEQ ID NO: 4424 - protein, 9 aa, Homo Sapiens
ALSALTARL

SEQ ID NO: 4425 - protein, 9 aa, Homo Sapiens
ALSDGVHKI

SEQ ID NO: 4426 - protein, 9 aa, Homo Sapiens
ALSDHHVYL

SEQ ID NO: 4427 - protein, 9 aa, Homo Sapiens
ALSDIFQAV

SEQ ID NO: 4428 - protein, 9 aa, Homo Sapiens
ALSDLRCNL

SEQ ID NO: 4429 - protein, 9 aa, Homo Sapiens
ALSDSIHTV

SEQ ID NO: 4430 - protein, 9 aa, Homo Sapiens
ALSDTEQRL

SEQ ID NO: 4431 - protein, 9 aa, Homo Sapiens
ALSECAVTL

SEQ ID NO: 4432 - protein, 9 aa, Homo Sapiens
ALSEDINLI

SEQ ID NO: 4433 - protein, 9 aa, Homo Sapiens
ALSEELVQL

SEQ ID NO: 4434 - protein, 9 aa, Homo Sapiens
ALSEKIVSV

SEQ ID NO: 4435 - protein, 9 aa, Homo Sapiens
ALSEKLARL

SEQ ID NO: 4436 - protein, 9 aa, Homo Sapiens
ALSEMVEYI

SEQ ID NO: 4437 - protein, 9 aa, Homo Sapiens
ALSFIRDEV

SEQ ID NO: 4438 - protein, 9 aa, Homo Sapiens
ALSFKTGIA

SEQ ID NO: 4439 - protein, 9 aa, Homo Sapiens
ALSGFGYRL

SEQ ID NO: 4440 - protein, 9 aa, Homo Sapiens
ALSGHLETV

SEQ ID NO: 4441 - protein, 9 aa, Homo Sapiens
ALSGHVSTV

SEQ ID NO: 4442 - protein, 9 aa, Homo Sapiens
ALSHLSTTV

SEQ ID NO: 4443 - protein, 9 aa, Homo Sapiens
ALSIQNYHL

SEQ ID NO: 4444 - protein, 9 aa, Homo Sapiens
ALSKFTSHL

SEQ ID NO: 4445 - protein, 9 aa, Homo Sapiens
ALSKIIAVL

SEQ ID NO: 4446 - protein, 9 aa, Homo Sapiens
ALSLVSCKL

SEQ ID NO: 4447 - protein, 9 aa, Homo Sapiens
ALSMIIKSL

SEQ ID NO: 4448 - protein, 9 aa, Homo Sapiens
ALSNHLNAV

SEQ ID NO: 4449 - protein, 9 aa, Homo Sapiens
ALSNLEVKL

SEQ ID NO: 4450 - protein, 9 aa, Homo Sapiens
ALSNMVAAL

SEQ ID NO: 4451 - protein, 9 aa, Homo Sapiens
ALSPHNILL

SEQ ID NO: 4452 - protein, 9 aa, Homo Sapiens
ALSPLGQLL

SEQ ID NO: 4453 - protein, 9 aa, Homo Sapiens
ALSPLQSTL

SEQ ID NO: 4454 - protein, 9 aa, Homo Sapiens
ALSPNNHEV

SEQ ID NO: 4455 - protein, 9 aa, Homo Sapiens
ALSPNYDHV

SEQ ID NO: 4456 - protein, 9 aa, Homo Sapiens
ALSPQLQQL

SEQ ID NO: 4457 - protein, 9 aa, Homo Sapiens
ALSQINTKL

SEQ ID NO: 4458 - protein, 9 aa, Homo Sapiens
ALSRALSQL

SEQ ID NO: 4459 - protein, 9 aa, Homo Sapiens
ALSRIKRHL

SEQ ID NO: 4460 - protein, 9 aa, Homo Sapiens
ALSRVSVNV

SEQ ID NO: 4461 - protein, 9 aa, Homo Sapiens
ALSSFAHCL

SEQ ID NO: 4462 - protein, 9 aa, Homo Sapiens
ALSSKVQQL

SEQ ID NO: 4463 - protein, 9 aa, Homo Sapiens
ALSSLAVVV

SEQ ID NO: 4464 - protein, 9 aa, Homo Sapiens
ALSSLIHAL

SEQ ID NO: 4465 - protein, 9 aa, Homo Sapiens
ALSSLLQQL

SEQ ID NO: 4466 - protein, 9 aa, Homo Sapiens
ALSSSQAEV

SEQ ID NO: 4467 - protein, 9 aa, Homo Sapiens
ALSSVIKEL

SEQ ID NO: 4468 - protein, 9 aa, Homo Sapiens
ALSTNTTKV

SEQ ID NO: 4469 - protein, 9 aa, Homo Sapiens
ALSTQRDFL

SEQ ID NO: 4470 - protein, 9 aa, Homo Sapiens
ALTEIQEFI

SEQ ID NO: 4471 - protein, 9 aa, Homo Sapiens
ALTELGYNV

SEQ ID NO: 4472 - protein, 9 aa, Homo Sapiens
ALTELLAKI

SEQ ID NO: 4473 - protein, 9 aa, Homo Sapiens
ALTELNTKV

SEQ ID NO: 4474 - protein, 9 aa, Homo Sapiens
ALTELREML

SEQ ID NO: 4475 - protein, 9 aa, Homo Sapiens
ALTHIDHSL

SEQ ID NO: 4476 - protein, 9 aa, Homo Sapiens
ALTRVIYNL

SEQ ID NO: 4477 - protein, 9 aa, Homo Sapiens
ALVDHVAEL

SEQ ID NO: 4478 - protein, 9 aa, Homo Sapiens
ALVEQSQKL

SEQ ID NO: 4479 - protein, 9 aa, Homo Sapiens
ALVGFCDEV

SEQ ID NO: 4480 - protein, 9 aa, Homo Sapiens
ALVQDLAKA

SEQ ID NO: 4481 - protein, 9 aa, Homo Sapiens
ALVSSLHLL

SEQ ID NO: 4482 - protein, 9 aa, Homo Sapiens
ALWDKLFNL

SEQ ID NO: 4483 - protein, 9 aa, Homo Sapiens
ALYAVIEKA

SEQ ID NO: 4484 - protein, 9 aa, Homo Sapiens
ALYDNVEKL

SEQ ID NO: 4485 - protein, 9 aa, Homo Sapiens
ALYGHTQAV

SEQ ID NO: 4486 - protein, 9 aa, Homo Sapiens
ALYHLAIKL

SEQ ID NO: 4487 - protein, 9 aa, Homo Sapiens
ALYPVLEKA

SEQ ID NO: 4488 - protein, 9 aa, Homo Sapiens
ALYSAEHGL

SEQ ID NO: 4489 - protein, 9 aa, Homo Sapiens
ALYTATEKL

SEQ ID NO: 4490 - protein, 9 aa, Homo Sapiens
ALYTVLHRL

SEQ ID NO: 4491 - protein, 9 aa, Homo Sapiens
AMAATYSAL

SEQ ID NO: 4492 - protein, 9 aa, Homo Sapiens
AMADLEQKV

SEQ ID NO: 4493 - protein, 9 aa, Homo Sapiens
AMAKIQAKI

SEQ ID NO: 4494 - protein, 9 aa, Homo Sapiens
AMAMVDHCL

SEQ ID NO: 4495 - protein, 9 aa, Homo Sapiens
AMAPGTVTV

SEQ ID NO: 4496 - protein, 9 aa, Homo Sapiens
AMASIINRL

SEQ ID NO: 4497 - protein, 9 aa, Homo Sapiens
AMASLYDRI

SEQ ID NO: 4498 - protein, 9 aa, Homo Sapiens
AMFDFSEKL

SEQ ID NO: 4499 - protein, 9 aa, Homo Sapiens
AMFGKLMTI

SEQ ID NO: 4500 - protein, 9 aa, Homo Sapiens
AMHGFSVTL

SEQ ID NO: 4501 - protein, 9 aa, Homo Sapiens
AMIELVERL

SEQ ID NO: 4502 - protein, 9 aa, Homo Sapiens
AMIKGLQVL

SEQ ID NO: 4503 - protein, 9 aa, Homo Sapiens
AMKKVVQQL

SEQ ID NO: 4504 - protein, 9 aa, Homo Sapiens
AMMAKAEYL

SEQ ID NO: 4505 - protein, 9 aa, Homo Sapiens
AMNGHTAAV

SEQ ID NO: 4506 - protein, 9 aa, Homo Sapiens
AMNGHVPAV

SEQ ID NO: 4507 - protein, 9 aa, Homo Sapiens
AMRAFADAL

SEQ ID NO: 4508 - protein, 9 aa, Homo Sapiens
AMSSKFFLV

SEQ ID NO: 4509 - protein, 9 aa, Homo Sapiens
AMTKDNNLL

SEQ ID NO: 4510 - protein, 9 aa, Homo Sapiens
AQADLAYQL

SEQ ID NO: 4511 - protein, 9 aa, Homo Sapiens
AQAELQHVL

SEQ ID NO: 4512 - protein, 9 aa, Homo Sapiens
AQAEVYKEL

SEQ ID NO: 4513 - protein, 9 aa, Homo Sapiens
AQAKIYWNL

SEQ ID NO: 4514 - protein, 9 aa, Homo Sapiens
ATADYICKV

SEQ ID NO: 4515 - protein, 9 aa, Homo Sapiens
ATCGHINLV

SEQ ID NO: 4516 - protein, 9 aa, Homo Sapiens
ATFARIWYL

SEQ ID NO: 4517 - protein, 9 aa, Homo Sapiens
ATSDLNIKV

SEQ ID NO: 4518 - protein, 9 aa, Homo Sapiens
ATSGLDHQL

SEQ ID NO: 4519 - protein, 9 aa, Homo Sapiens
ATSYLSHQL

SEQ ID NO: 4520 - protein, 9 aa, Homo Sapiens
AVADLQTRL

SEQ ID NO: 4521 - protein, 9 aa, Homo Sapiens
AVAEINAVM

SEQ ID NO: 4522 - protein, 9 aa, Homo Sapiens
AVAELNYGL

SEQ ID NO: 4523 - protein, 9 aa, Homo Sapiens
AVAGLPHAV

SEQ ID NO: 4524 - protein, 9 aa, Homo Sapiens
AVANIVNSV

SEQ ID NO: 4525 - protein, 9 aa, Homo Sapiens
AVASFVTQL

SEQ ID NO: 4526 - protein, 9 aa, Homo Sapiens
AVASKTYNL

SEQ ID NO: 4527 - protein, 9 aa, Homo Sapiens
AVCGYLVEL

SEQ ID NO: 4528 - protein, 9 aa, Homo Sapiens
AVSDHEATL

SEQ ID NO: 4529 - protein, 9 aa, Homo Sapiens
AVSDILEKL

SEQ ID NO: 4530 - protein, 9 aa, Homo Sapiens
CLYGNVEKV

SEQ ID NO: 4531 - protein, 9 aa, Homo Sapiens
CTAGTLHNL

SEQ ID NO: 4532 - protein, 9 aa, Homo Sapiens
DILRALEKL

SEQ ID NO: 4533 - protein, 9 aa, Homo Sapiens
EALSLLHTL

SEQ ID NO: 4534 - protein, 9 aa, Homo Sapiens
EGPEGLKLI

SEQ ID NO: 4535 - protein, 9 aa, Homo Sapiens
ELAEIYAKL

SEQ ID NO: 4536 - protein, 9 aa, Homo Sapiens
ELAELHANL

SEQ ID NO: 4537 - protein, 9 aa, Homo Sapiens
ELANLYHHV

SEQ ID NO: 4538 - protein, 9 aa, Homo Sapiens
ELAQLYHHV

SEQ ID NO: 4539 - protein, 9 aa, Homo Sapiens
ELKPFIEEL

SEQ ID NO: 4540 - protein, 9 aa, Homo Sapiens
ELSDVLIYL

SEQ ID NO: 4541 - protein, 9 aa, Homo Sapiens
ELSEISERL

SEQ ID NO: 4542 - protein, 9 aa, Homo Sapiens
ELSEKNFQL

SEQ ID NO: 4543 - protein, 9 aa, Homo Sapiens
ELSHINARL

SEQ ID NO: 4544 - protein, 9 aa, Homo Sapiens
ELSKIIQKV

SEQ ID NO: 4545 - protein, 9 aa, Homo Sapiens
ELSYLAHNL

SEQ ID NO: 4546 - protein, 9 aa, Homo Sapiens
FACEKNENL

SEQ ID NO: 4547 - protein, 9 aa, Homo Sapiens
FASGLIHRV

SEQ ID NO: 4548 - protein, 9 aa, Homo Sapiens
FASTILHLV

SEQ ID NO: 4549 - protein, 9 aa, Homo Sapiens
FDKATYDKL

SEQ ID NO: 4550 - protein, 9 aa, Homo Sapiens
FIADHCPTL

SEQ ID NO: 4551 - protein, 9 aa, Homo Sapiens
FIAEHYMFL

SEQ ID NO: 4552 - protein, 9 aa, Homo Sapiens
FIAHFQDNL

SEQ ID NO: 4553 - protein, 9 aa, Homo Sapiens
FIAPSGHGL

SEQ ID NO: 4554 - protein, 9 aa, Homo Sapiens
FIAPTGHSL

SEQ ID NO: 4555 - protein, 9 aa, Homo Sapiens
FICPITREL

SEQ ID NO: 4556 - protein, 9 aa, Homo Sapiens
FIFSDTHEL

SEQ ID NO: 4557 - protein, 9 aa, Homo Sapiens
FIGDVIHNA

SEQ ID NO: 4558 - protein, 9 aa, Homo Sapiens
FISALVDEL

SEQ ID NO: 4559 - protein, 9 aa, Homo Sapiens
FISEFEHRV

SEQ ID NO: 4560 - protein, 9 aa, Homo Sapiens
FISGHTSEL

SEQ ID NO: 4561 - protein, 9 aa, Homo Sapiens
FISHLFMQL

SEQ ID NO: 4562 - protein, 9 aa, Homo Sapiens
FISPFGHGL

SEQ ID NO: 4563 - protein, 9 aa, Homo Sapiens
FISPTGHSL

SEQ ID NO: 4564 - protein, 9 aa, Homo Sapiens
FLADAKWIL

SEQ ID NO: 4565 - protein, 9 aa, Homo Sapiens
FLADDLGGL

SEQ ID NO: 4566 - protein, 9 aa, Homo Sapiens
FLADIVQKL

SEQ ID NO: 4567 - protein, 9 aa, Homo Sapiens
FLADNHHQV

SEQ ID NO: 4568 - protein, 9 aa, Homo Sapiens
FLADPSAFV

SEQ ID NO: 4569 - protein, 9 aa, Homo Sapiens
FLADPVSNM

SEQ ID NO: 4570 - protein, 9 aa, Homo Sapiens
FLAEAARSL

SEQ ID NO: 4571 - protein, 9 aa, Homo Sapiens
FLAEHDYGL

SEQ ID NO: 4572 - protein, 9 aa, Homo Sapiens
FLAEIFKKI

SEQ ID NO: 4573 - protein, 9 aa, Homo Sapiens
FLAESCATL

SEQ ID NO: 4574 - protein, 9 aa, Homo Sapiens
FLAGAVTSV

SEQ ID NO: 4575 - protein, 9 aa, Homo Sapiens
FLAHIYTEL

SEQ ID NO: 4576 - protein, 9 aa, Homo Sapiens
FLAITTDCL

SEQ ID NO: 4577 - protein, 9 aa, Homo Sapiens
FLAKDFNFL

SEQ ID NO: 4578 - protein, 9 aa, Homo Sapiens
FLAKLIAQA

SEQ ID NO: 4579 - protein, 9 aa, Homo Sapiens
FLAKMTNGF

SEQ ID NO: 4580 - protein, 9 aa, Homo Sapiens
FLAPGTCVV

SEQ ID NO: 4581 - protein, 9 aa, Homo Sapiens
FLAQENMRL

SEQ ID NO: 4582 - protein, 9 aa, Homo Sapiens
FLAQHFDKL

SEQ ID NO: 4583 - protein, 9 aa, Homo Sapiens
FLAQRAVEL

SEQ ID NO: 4584 - protein, 9 aa, Homo Sapiens
FLASDVQQL

SEQ ID NO: 4585 - protein, 9 aa, Homo Sapiens
FLASLDRAK

SEQ ID NO: 4586 - protein, 9 aa, Homo Sapiens
FLASSEEKL

SEQ ID NO: 4587 - protein, 9 aa, Homo Sapiens
FLATRNDNI

SEQ ID NO: 4588 - protein, 9 aa, Homo Sapiens
FLCARLLDL

SEQ ID NO: 4589 - protein, 9 aa, Homo Sapiens
FLCKDLWVA

SEQ ID NO: 4590 - protein, 9 aa, Homo Sapiens
FLCNEAKNL

SEQ ID NO: 4591 - protein, 9 aa, Homo Sapiens
FLCNFLIKM

SEQ ID NO: 4592 - protein, 9 aa, Homo Sapiens
FLCPFHLSV

SEQ ID NO: 4593 - protein, 9 aa, Homo Sapiens
FLCTLQKKL

SEQ ID NO: 4594 - protein, 9 aa, Homo Sapiens
FLCVVSKEL

SEQ ID NO: 4595 - protein, 9 aa, Homo Sapiens
FLCVVSREL

SEQ ID NO: 4596 - protein, 9 aa, Homo Sapiens
FLDDLSQKL

SEQ ID NO: 4597 - protein, 9 aa, Homo Sapiens
FLDEKTHEL

SEQ ID NO: 4598 - protein, 9 aa, Homo Sapiens
FLDNLHINL

SEQ ID NO: 4599 - protein, 9 aa, Homo Sapiens
FLECGKTNL

SEQ ID NO: 4600 - protein, 9 aa, Homo Sapiens
FLEESRNQL

SEQ ID NO: 4601 - protein, 9 aa, Homo Sapiens
FLESGKTNL

SEQ ID NO: 4602 - protein, 9 aa, Homo Sapiens
FLETKTQAL

SEQ ID NO: 4603 - protein, 9 aa, Homo Sapiens
FLETNVPLL

SEQ ID NO: 4604 - protein, 9 aa, Homo Sapiens
FLFDHLLTL

SEQ ID NO: 4605 - protein, 9 aa, Homo Sapiens
FLFDRPMHV

SEQ ID NO: 4606 - protein, 9 aa, Homo Sapiens
FLFDTQHFI

SEQ ID NO: 4607 - protein, 9 aa, Homo Sapiens
FLFELPSRL

SEQ ID NO: 4608 - protein, 9 aa, Homo Sapiens
FLFEPVVKA

SEQ ID NO: 4609 - protein, 9 aa, Homo Sapiens
FLFGEVHKA

SEQ ID NO: 4610 - protein, 9 aa, Homo Sapiens
FLFGYPKRL

SEQ ID NO: 4611 - protein, 9 aa, Homo Sapiens
FLFLDRTYV

SEQ ID NO: 4612 - protein, 9 aa, Homo Sapiens
FLFNKVVNL

SEQ ID NO: 4613 - protein, 9 aa, Homo Sapiens
FLFNTENKL

SEQ ID NO: 4614 - protein, 9 aa, Homo Sapiens
FLFSDVCRV

SEQ ID NO: 4615 - protein, 9 aa, Homo Sapiens
FLFSKFIEL

SEQ ID NO: 4616 - protein, 9 aa, Homo Sapiens
FLFTTPCRL

SEQ ID NO: 4617 - protein, 9 aa, Homo Sapiens
FLGDLSHLL

SEQ ID NO: 4618 - protein, 9 aa, Homo Sapiens
FLGDYVENL

SEQ ID NO: 4619 - protein, 9 aa, Homo Sapiens
FLGEINDRL

SEQ ID NO: 4620 - protein, 9 aa, Homo Sapiens
FLGNFQDNL

SEQ ID NO: 4621 - protein, 9 aa, Homo Sapiens
FLGPWPAAS

SEQ ID NO: 4622 - protein, 9 aa, Homo Sapiens
FLGSFIDHV

SEQ ID NO: 4623 - protein, 9 aa, Homo Sapiens
FLGYMVHRL

SEQ ID NO: 4624 - protein, 9 aa, Homo Sapiens
FLHANHERL

SEQ ID NO: 4625 - protein, 9 aa, Homo Sapiens
FLHDHQAEL

SEQ ID NO: 4626 - protein, 9 aa, Homo Sapiens
FLHDNMVEI

SEQ ID NO: 4627 - protein, 9 aa, Homo Sapiens
FLHEATARL

SEQ ID NO: 4628 - protein, 9 aa, Homo Sapiens
FLHEATVRL

SEQ ID NO: 4629 - protein, 9 aa, Homo Sapiens
FLHEKLESL

SEQ ID NO: 4630 - protein, 9 aa, Homo Sapiens
FLHELEEKM

SEQ ID NO: 4631 - protein, 9 aa, Homo Sapiens
FLHVGQAGL

SEQ ID NO: 4632 - protein, 9 aa, Homo Sapiens
FLIGQGAHV

SEQ ID NO: 4633 - protein, 9 aa, Homo Sapiens
FLINFIHTL

SEQ ID NO: 4634 - protein, 9 aa, Homo Sapiens
FLIPIYHQV

SEQ ID NO: 4635 - protein, 9 aa, Homo Sapiens
FLIRESETL

SEQ ID NO: 4636 - protein, 9 aa, Homo Sapiens
FLITILDHL

SEQ ID NO: 4637 - protein, 9 aa, Homo Sapiens
FLKEELVAA

SEQ ID NO: 4638 - protein, 9 aa, Homo Sapiens
FLKEGCELI

SEQ ID NO: 4639 - protein, 9 aa, Homo Sapiens
FLKENGEKL

SEQ ID NO: 4640 - protein, 9 aa, Homo Sapiens
FLKNELDNV

SEQ ID NO: 4641 - protein, 9 aa, Homo Sapiens
FLKNEVERL

SEQ ID NO: 4642 - protein, 9 aa, Homo Sapiens
FLKSNFEYL

SEQ ID NO: 4643 - protein, 9 aa, Homo Sapiens
FLLEKGYEV

SEQ ID NO: 4644 - protein, 9 aa, Homo Sapiens
FLMDFIHQV

SEQ ID NO: 4645 - protein, 9 aa, Homo Sapiens
FLMEEVHMI

SEQ ID NO: 4646 - protein, 9 aa, Homo Sapiens
FLMGPVKQL

SEQ ID NO: 4647 - protein, 9 aa, Homo Sapiens
FLMNEVIKL

SEQ ID NO: 4648 - protein, 9 aa, Homo Sapiens
FLMPTSSEL

SEQ ID NO: 4649 - protein, 9 aa, Homo Sapiens
FLMRHLVHM

SEQ ID NO: 4650 - protein, 9 aa, Homo Sapiens
FLNAKCESA

SEQ ID NO: 4651 - protein, 9 aa, Homo Sapiens
FLNASANKL

SEQ ID NO: 4652 - protein, 9 aa, Homo Sapiens
FLNDEVWNL

SEQ ID NO: 4653 - protein, 9 aa, Homo Sapiens
FLNDPGHLL

SEQ ID NO: 4654 - protein, 9 aa, Homo Sapiens
FLNEDLNQL

SEQ ID NO: 4655 - protein, 9 aa, Homo Sapiens
FLNEEVKSL

SEQ ID NO: 4656 - protein, 9 aa, Homo Sapiens
FLNELIKVL

SEQ ID NO: 4657 - protein, 9 aa, Homo Sapiens
FLNGEVIRL

SEQ ID NO: 4658 - protein, 9 aa, Homo Sapiens
FLNGIIDRI

SEQ ID NO: 4659 - protein, 9 aa, Homo Sapiens
FLNGVCTNI

SEQ ID NO: 4660 - protein, 9 aa, Homo Sapiens
FLNHCLEHL

SEQ ID NO: 4661 - protein, 9 aa, Homo Sapiens
FLNKEILEL

SEQ ID NO: 4662 - protein, 9 aa, Homo Sapiens
FLNKEITSV

SEQ ID NO: 4663 - protein, 9 aa, Homo Sapiens
FLNKLIPVL

SEQ ID NO: 4664 - protein, 9 aa, Homo Sapiens
FLNKYILSL

SEQ ID NO: 4665 - protein, 9 aa, Homo Sapiens
FLNMVCVKL

SEQ ID NO: 4666 - protein, 9 aa, Homo Sapiens
FLNNQEYVL

SEQ ID NO: 4667 - protein, 9 aa, Homo Sapiens
FLNNQIKEL

SEQ ID NO: 4668 - protein, 9 aa, Homo Sapiens
FLNRSIQKL

SEQ ID NO: 4669 - protein, 9 aa, Homo Sapiens
FLPDGCDHL

SEQ ID NO: 4670 - protein, 9 aa, Homo Sapiens
FLPEVIYKM

SEQ ID NO: 4671 - protein, 9 aa, Homo Sapiens
FLPGICKEL

SEQ ID NO: 4672 - protein, 9 aa, Homo Sapiens
FLPLHYDYL

SEQ ID NO: 4673 - protein, 9 aa, Homo Sapiens
FLPLIVNTV

SEQ ID NO: 4674 - protein, 9 aa, Homo Sapiens
FLPQKIIYL

SEQ ID NO: 4675 - protein, 9 aa, Homo Sapiens
FLPSHYNYL

SEQ ID NO: 4676 - protein, 9 aa, Homo Sapiens
FLPSYIIDV

SEQ ID NO: 4677 - protein, 9 aa, Homo Sapiens
FLPTILNQL

SEQ ID NO: 4678 - protein, 9 aa, Homo Sapiens
FLQEHNTTL

SEQ ID NO: 4679 - protein, 9 aa, Homo Sapiens
FLQEKSPAV

SEQ ID NO: 4680 - protein, 9 aa, Homo Sapiens
FLQEYVANL

SEQ ID NO: 4681 - protein, 9 aa, Homo Sapiens
FLQKLISQL

SEQ ID NO: 4682 - protein, 9 aa, Homo Sapiens
FLQPELVKL

SEQ ID NO: 4683 - protein, 9 aa, Homo Sapiens
FLQPGGYHV

SEQ ID NO: 4684 - protein, 9 aa, Homo Sapiens
FLQPNKCFL

SEQ ID NO: 4685 - protein, 9 aa, Homo Sapiens
FLQRFIDPL

SEQ ID NO: 4686 - protein, 9 aa, Homo Sapiens
FLRDNLEWL

SEQ ID NO: 4687 - protein, 9 aa, Homo Sapiens
FLREWVESM

SEQ ID NO: 4688 - protein, 9 aa, Homo Sapiens
FLRNINEYL

SEQ ID NO: 4689 - protein, 9 aa, Homo Sapiens
FLSDHVQEM

SEQ ID NO: 4690 - protein, 9 aa, Homo Sapiens
FLSDLRDML

SEQ ID NO: 4691 - protein, 9 aa, Homo Sapiens
FLSEEGGHV

SEQ ID NO: 4692 - protein, 9 aa, Homo Sapiens
FLSEKDSLL

SEQ ID NO: 4693 - protein, 9 aa, Homo Sapiens
FLSEKLERI

SEQ ID NO: 4694 - protein, 9 aa, Homo Sapiens
FLSELTQQL

SEQ ID NO: 4695 - protein, 9 aa, Homo Sapiens
FLSETCKYL

SEQ ID NO: 4696 - protein, 9 aa, Homo Sapiens
FLSEVFHQA

SEQ ID NO: 4697 - protein, 9 aa, Homo Sapiens
FLSGYYVTL

SEQ ID NO: 4698 - protein, 9 aa, Homo Sapiens
FLSHIPITL

SEQ ID NO: 4699 - protein, 9 aa, Homo Sapiens
FLSILCNNL

SEQ ID NO: 4700 - protein, 9 aa, Homo Sapiens
FLSKDISYL

SEQ ID NO: 4701 - protein, 9 aa, Homo Sapiens
FLSKIEEKL

SEQ ID NO: 4702 - protein, 9 aa, Homo Sapiens
FLSKRLSKA

SEQ ID NO: 4703 - protein, 9 aa, Homo Sapiens
FLSLIGEKV

SEQ ID NO: 4704 - protein, 9 aa, Homo Sapiens
FLSNDTVQL

SEQ ID NO: 4705 - protein, 9 aa, Homo Sapiens
FLSPDKLSL

SEQ ID NO: 4706 - protein, 9 aa, Homo Sapiens
FLSPVDNHM

SEQ ID NO: 4707 - protein, 9 aa, Homo Sapiens
FLSQRETLL

SEQ ID NO: 4708 - protein, 9 aa, Homo Sapiens
FLSQTGHGV

SEQ ID NO: 4709 - protein, 9 aa, Homo Sapiens
FLSRQFESL

SEQ ID NO: 4710 - protein, 9 aa, Homo Sapiens
FLSSFEEKI

SEQ ID NO: 4711 - protein, 9 aa, Homo Sapiens
FLSSSNLSL

SEQ ID NO: 4712 - protein, 9 aa, Homo Sapiens
FLSSVIQNL

SEQ ID NO: 4713 - protein, 9 aa, Homo Sapiens
FLSTLEHHL

SEQ ID NO: 4714 - protein, 9 aa, Homo Sapiens
FLSTNEGKL

SEQ ID NO: 4715 - protein, 9 aa, Homo Sapiens
FLTDREVRL

SEQ ID NO: 4716 - protein, 9 aa, Homo Sapiens
FLTDTSHLL

SEQ ID NO: 4717 - protein, 9 aa, Homo Sapiens
FLTEFINYI

SEQ ID NO: 4718 - protein, 9 aa, Homo Sapiens
FLTEHNSNV

SEQ ID NO: 4719 - protein, 9 aa, Homo Sapiens
FLTGVTTEL

SEQ ID NO: 4720 - protein, 9 aa, Homo Sapiens
FLTKIHEML

SEQ ID NO: 4721 - protein, 9 aa, Homo Sapiens
FLTPLRNFI

SEQ ID NO: 4722 - protein, 9 aa, Homo Sapiens
FLTPLRNIF

SEQ ID NO: 4723 - protein, 9 aa, Homo Sapiens
FLTRIISQL

SEQ ID NO: 4724 - protein, 9 aa, Homo Sapiens
FLVAENERL

SEQ ID NO: 4725 - protein, 9 aa, Homo Sapiens
FLVDGVCTV

SEQ ID NO: 4726 - protein, 9 aa, Homo Sapiens
FLVDIMEHL

SEQ ID NO: 4727 - protein, 9 aa, Homo Sapiens
FLVEHNLVL

SEQ ID NO: 4728 - protein, 9 aa, Homo Sapiens
FLVEHVLTL

SEQ ID NO: 4729 - protein, 9 aa, Homo Sapiens
FLVPTFEQL

SEQ ID NO: 4730 - protein, 9 aa, Homo Sapiens
FLVQNIHTL

SEQ ID NO: 4731 - protein, 9 aa, Homo Sapiens
FLVTVIHTL

SEQ ID NO: 4732 - protein, 9 aa, Homo Sapiens
FLYAGHIFL

SEQ ID NO: 4733 - protein, 9 aa, Homo Sapiens
FLYDDNQRV

SEQ ID NO: 4734 - protein, 9 aa, Homo Sapiens
FLYDTHQNL

SEQ ID NO: 4735 - protein, 9 aa, Homo Sapiens
FLYFEDHGL

SEQ ID NO: 4736 - protein, 9 aa, Homo Sapiens
FLYPFLHTV

SEQ ID NO: 4737 - protein, 9 aa, Homo Sapiens
FLYQYSTRL

SEQ ID NO: 4738 - protein, 9 aa, Homo Sapiens
FMADCPHTI

SEQ ID NO: 4739 - protein, 9 aa, Homo Sapiens
FMAPKAWTV

SEQ ID NO: 4740 - protein, 9 aa, Homo Sapiens
FMAPLQEKV

SEQ ID NO: 4741 - protein, 9 aa, Homo Sapiens
FMAPYTHFT

SEQ ID NO: 4742 - protein, 9 aa, Homo Sapiens
FMASHLDYL

SEQ ID NO: 4743 - protein, 9 aa, Homo Sapiens
FMATIAEGL

SEQ ID NO: 4744 - protein, 9 aa, Homo Sapiens
FMCDKIYQV

SEQ ID NO: 4745 - protein, 9 aa, Homo Sapiens
FMHQIIDQV

SEQ ID NO: 4746 - protein, 9 aa, Homo Sapiens
FMIKHSQKL

SEQ ID NO: 4747 - protein, 9 aa, Homo Sapiens
FMKKYIHVA

SEQ ID NO: 4748 - protein, 9 aa, Homo Sapiens
FMKNKVEQL

SEQ ID NO: 4749 - protein, 9 aa, Homo Sapiens
FMMDKTNIL

SEQ ID NO: 4750 - protein, 9 aa, Homo Sapiens
FMMPRIVNV

SEQ ID NO: 4751 - protein, 9 aa, Homo Sapiens
FMNDAIEKA

SEQ ID NO: 4752 - protein, 9 aa, Homo Sapiens
FMNPHLISV

SEQ ID NO: 4753 - protein, 9 aa, Homo Sapiens
FMNSAIQCL

SEQ ID NO: 4754 - protein, 9 aa, Homo Sapiens
FMNSVIQSL

SEQ ID NO: 4755 - protein, 9 aa, Homo Sapiens
FMSDLMKAL

SEQ ID NO: 4756 - protein, 9 aa, Homo Sapiens
FMSEISDEF

SEQ ID NO: 4757 - protein, 9 aa, Homo Sapiens
FMSLLEEKL

SEQ ID NO: 4758 - protein, 9 aa, Homo Sapiens
FQAEIAQLM

SEQ ID NO: 4759 - protein, 9 aa, Homo Sapiens
FQATIVKAV

SEQ ID NO: 4760 - protein, 9 aa, Homo Sapiens
FQSDTNAML

SEQ ID NO: 4761 - protein, 9 aa, Homo Sapiens
FQTDLIYNL

SEQ ID NO: 4762 - protein, 9 aa, Homo Sapiens
FTADFVRQL

SEQ ID NO: 4763 - protein, 9 aa, Homo Sapiens
FTAEKTDEL

SEQ ID NO: 4764 - protein, 9 aa, Homo Sapiens
FTAWCNSHL

SEQ ID NO: 4765 - protein, 9 aa, Homo Sapiens
FVADFADKL

SEQ ID NO: 4766 - protein, 9 aa, Homo Sapiens
FVDDYTVRV

SEQ ID NO: 4767 - protein, 9 aa, Homo Sapiens
FVIDLQTRL

SEQ ID NO: 4768 - protein, 9 aa, Homo Sapiens
FVIRNIVEA

SEQ ID NO: 4769 - protein, 9 aa, Homo Sapiens
FVNDIFERI

SEQ ID NO: 4770 - protein, 9 aa, Homo Sapiens
FVPEIFHRI

SEQ ID NO: 4771 - protein, 9 aa, Homo Sapiens
GAADIDHKL

SEQ ID NO: 4772 - protein, 9 aa, Homo Sapiens
GEILARQEL

SEQ ID NO: 4773 - protein, 9 aa, Homo Sapiens
GIADLAHLL

SEQ ID NO: 4774 - protein, 9 aa, Homo Sapiens
GIAKHIQKL

SEQ ID NO: 4775 - protein, 9 aa, Homo Sapiens
GIAPCNNRL

SEQ ID NO: 4776 - protein, 9 aa, Homo Sapiens
GIMKKAYEL

SEQ ID NO: 4777 - protein, 9 aa, Homo Sapiens
GLAAENQEL

SEQ ID NO: 4778 - protein, 9 aa, Homo Sapiens
GLAAFRAFL

SEQ ID NO: 4779 - protein, 9 aa, Homo Sapiens
GLADKVYFL

SEQ ID NO: 4780 - protein, 9 aa, Homo Sapiens
GLADRCPAL

SEQ ID NO: 4781 - protein, 9 aa, Homo Sapiens
GLAEDSPKM

SEQ ID NO: 4782 - protein, 9 aa, Homo Sapiens
GLAEFQENV

SEQ ID NO: 4783 - protein, 9 aa, Homo Sapiens
GLAELGHRL

SEQ ID NO: 4784 - protein, 9 aa, Homo Sapiens
GLAENKSTL

SEQ ID NO: 4785 - protein, 9 aa, Homo Sapiens
GLAGPLHGL

SEQ ID NO: 4786 - protein, 9 aa, Homo Sapiens
GLAHSLQHL

SEQ ID NO: 4787 - protein, 9 aa, Homo Sapiens
GLAKAVASV

SEQ ID NO: 4788 - protein, 9 aa, Homo Sapiens
GLAKRVWSL

SEQ ID NO: 4789 - protein, 9 aa, Homo Sapiens
GLALALNKL

SEQ ID NO: 4790 - protein, 9 aa, Homo Sapiens
GLALIAERL

SEQ ID NO: 4791 - protein, 9 aa, Homo Sapiens
GLAMKLQNL

SEQ ID NO: 4792 - protein, 9 aa, Homo Sapiens
GLAPFTEGI

SEQ ID NO: 4793 - protein, 9 aa, Homo Sapiens
GLAPKPVQV

SEQ ID NO: 4794 - protein, 9 aa, Homo Sapiens
GLAPLHIQL

SEQ ID NO: 4795 - protein, 9 aa, Homo Sapiens
GLAPNSNKV

SEQ ID NO: 4796 - protein, 9 aa, Homo Sapiens
GLAPQIHDL

SEQ ID NO: 4797 - protein, 9 aa, Homo Sapiens
GLAQKVDPA

SEQ ID NO: 4798 - protein, 9 aa, Homo Sapiens
GLARLLSRL

SEQ ID NO: 4799 - protein, 9 aa, Homo Sapiens
GLASKAAEL

SEQ ID NO: 4800 - protein, 9 aa, Homo Sapiens
GLATDVQTV

SEQ ID NO: 4801 - protein, 9 aa, Homo Sapiens
GLAVLKHVL

SEQ ID NO: 4802 - protein, 9 aa, Homo Sapiens
GLAVSEHRL

SEQ ID NO: 4803 - protein, 9 aa, Homo Sapiens
GLCERLVSL

SEQ ID NO: 4804 - protein, 9 aa, Homo Sapiens
GLCPHVVVL

SEQ ID NO: 4805 - protein, 9 aa, Homo Sapiens
GLCSRVSTL

SEQ ID NO: 4806 - protein, 9 aa, Homo Sapiens
GLFDQHFRL

SEQ ID NO: 4807 - protein, 9 aa, Homo Sapiens
GLFEAAHVL

SEQ ID NO: 4808 - protein, 9 aa, Homo Sapiens
GLFGHCQNV

SEQ ID NO: 4809 - protein, 9 aa, Homo Sapiens
GLFHGNEML

SEQ ID NO: 4810 - protein, 9 aa, Homo Sapiens
GLFPWTPKL

SEQ ID NO: 4811 - protein, 9 aa, Homo Sapiens
GLFQGKTPL

SEQ ID NO: 4812 - protein, 9 aa, Homo Sapiens
GLFQHICTA

SEQ ID NO: 4813 - protein, 9 aa, Homo Sapiens
GLGPHPCFL

SEQ ID NO: 4814 - protein, 9 aa, Homo Sapiens
GLHDGIQRV

SEQ ID NO: 4815 - protein, 9 aa, Homo Sapiens
GLHENSVRL

SEQ ID NO: 4816 - protein, 9 aa, Homo Sapiens
GLHTVLSKL

SEQ ID NO: 4817 - protein, 9 aa, Homo Sapiens
GLIDHQTYL

SEQ ID NO: 4818 - protein, 9 aa, Homo Sapiens
GLIDKVNEL

SEQ ID NO: 4819 - protein, 9 aa, Homo Sapiens
GLIDRQVTV

SEQ ID NO: 4820 - protein, 9 aa, Homo Sapiens
GLIDVHVHL

SEQ ID NO: 4821 - protein, 9 aa, Homo Sapiens
GLIEILKKV

SEQ ID NO: 4822 - protein, 9 aa, Homo Sapiens
GLIEKNIEL

SEQ ID NO: 4823 - protein, 9 aa, Homo Sapiens
GLIENPALL

SEQ ID NO: 4824 - protein, 9 aa, Homo Sapiens
GLKDKIHHV

SEQ ID NO: 4825 - protein, 9 aa, Homo Sapiens
GLKEGIPAL

SEQ ID NO: 4826 - protein, 9 aa, Homo Sapiens
GLKELSEYV

SEQ ID NO: 4827 - protein, 9 aa, Homo Sapiens
GLKKVIQKV

SEQ ID NO: 4828 - protein, 9 aa, Homo Sapiens
GLKNGVPAV

SEQ ID NO: 4829 - protein, 9 aa, Homo Sapiens
GLKRELEAL

SEQ ID NO: 4830 - protein, 9 aa, Homo Sapiens
GLLGYLHFV

SEQ ID NO: 4831 - protein, 9 aa, Homo Sapiens
GLMKDTHTV

SEQ ID NO: 4832 - protein, 9 aa, Homo Sapiens
GLMRKVPRV

SEQ ID NO: 4833 - protein, 9 aa, Homo Sapiens
GLNDFIQKI

SEQ ID NO: 4834 - protein, 9 aa, Homo Sapiens
GLNDLQTQL

SEQ ID NO: 4835 - protein, 9 aa, Homo Sapiens
GLNEEIARV

SEQ ID NO: 4836 - protein, 9 aa, Homo Sapiens
GLNGHLTKL

SEQ ID NO: 4837 - protein, 9 aa, Homo Sapiens
GLNSIVHKA

SEQ ID NO: 4838 - protein, 9 aa, Homo Sapiens
GLQEAQYRL

SEQ ID NO: 4839 - protein, 9 aa, Homo Sapiens
GLQEGTHEL

SEQ ID NO: 4840 - protein, 9 aa, Homo Sapiens
GLREKAEYL

SEQ ID NO: 4841 - protein, 9 aa, Homo Sapiens
GLRHQVEQL

SEQ ID NO: 4842 - protein, 9 aa, Homo Sapiens
GLSAFLHAI

SEQ ID NO: 4843 - protein, 9 aa, Homo Sapiens
GLSDIHHRM

SEQ ID NO: 4844 - protein, 9 aa, Homo Sapiens
GLSDLRLEL

SEQ ID NO: 4845 - protein, 9 aa, Homo Sapiens
GLSDVFDNL

SEQ ID NO: 4846 - protein, 9 aa, Homo Sapiens
GLSEAMNEL

SEQ ID NO: 4847 - protein, 9 aa, Homo Sapiens
GLSEPIFQL

SEQ ID NO: 4848 - protein, 9 aa, Homo Sapiens
GLSEQIREL

SEQ ID NO: 4849 - protein, 9 aa, Homo Sapiens
GLSERDINL

SEQ ID NO: 4850 - protein, 9 aa, Homo Sapiens
GLSESSVKV

SEQ ID NO: 4851 - protein, 9 aa, Homo Sapiens
GLSGFHTYL

SEQ ID NO: 4852 - protein, 9 aa, Homo Sapiens
GLSHHIHAL

SEQ ID NO: 4853 - protein, 9 aa, Homo Sapiens
GLSHLQQSL

SEQ ID NO: 4854 - protein, 9 aa, Homo Sapiens
GLSHVDYAL

SEQ ID NO: 4855 - protein, 9 aa, Homo Sapiens
GLSHVLNRL

SEQ ID NO: 4856 - protein, 9 aa, Homo Sapiens
GLSIFIYRL

SEQ ID NO: 4857 - protein, 9 aa, Homo Sapiens
GLSNHIAAL

SEQ ID NO: 4858 - protein, 9 aa, Homo Sapiens
GLSNLFCGV

SEQ ID NO: 4859 - protein, 9 aa, Homo Sapiens
GLSNTVMRL

SEQ ID NO: 4860 - protein, 9 aa, Homo Sapiens
GLSPEIHTL

SEQ ID NO: 4861 - protein, 9 aa, Homo Sapiens
GLSPLLQKI

SEQ ID NO: 4862 - protein, 9 aa, Homo Sapiens
GLSPNESKL

SEQ ID NO: 4863 - protein, 9 aa, Homo Sapiens
GLSPSIDTL

SEQ ID NO: 4864 - protein, 9 aa, Homo Sapiens
GLSPSIQTL

SEQ ID NO: 4865 - protein, 9 aa, Homo Sapiens
GLSPTVAVL

SEQ ID NO: 4866 - protein, 9 aa, Homo Sapiens
GLSQITNQL

SEQ ID NO: 4867 - protein, 9 aa, Homo Sapiens
GLSSFDSKL

SEQ ID NO: 4868 - protein, 9 aa, Homo Sapiens
GLSSLCEHL

SEQ ID NO: 4869 - protein, 9 aa, Homo Sapiens
GLSSSVHML

SEQ ID NO: 4870 - protein, 9 aa, Homo Sapiens
GLSVVEHRL

SEQ ID NO: 4871 - protein, 9 aa, Homo Sapiens
GLSYIYNTV

SEQ ID NO: 4872 - protein, 9 aa, Homo Sapiens
GLTPFVFRL

SEQ ID NO: 4873 - protein, 9 aa, Homo Sapiens
GLTRFTDQL

SEQ ID NO: 4874 - protein, 9 aa, Homo Sapiens
GLVVVNHYL

SEQ ID NO: 4875 - protein, 9 aa, Homo Sapiens
GLYELVWRV

SEQ ID NO: 4876 - protein, 9 aa, Homo Sapiens
GLYGAIFRL

SEQ ID NO: 4877 - protein, 9 aa, Homo Sapiens
GLYGKVEGL

SEQ ID NO: 4878 - protein, 9 aa, Homo Sapiens
GLYTGQEYV

SEQ ID NO: 4879 - protein, 9 aa, Homo Sapiens
GMAPFVRTL

SEQ ID NO: 4880 - protein, 9 aa, Homo Sapiens
GMAQKTWEL

SEQ ID NO: 4881 - protein, 9 aa, Homo Sapiens
GMASVISRL

SEQ ID NO: 4882 - protein, 9 aa, Homo Sapiens
GMFQRLDKL

SEQ ID NO: 4883 - protein, 9 aa, Homo Sapiens
GMNKFLSQL

SEQ ID NO: 4884 - protein, 9 aa, Homo Sapiens
GQAEVLNFL

SEQ ID NO: 4885 - protein, 9 aa, Homo Sapiens
GVAEKTQLL

SEQ ID NO: 4886 - protein, 9 aa, Homo Sapiens
GVGPVPARA

SEQ ID NO: 4887 - protein, 9 aa, Homo Sapiens
GVSAITCYL

SEQ ID NO: 4888 - protein, 9 aa, Homo Sapiens
GVSDLVCFV

SEQ ID NO: 4889 - protein, 9 aa, Homo Sapiens
HIADIVHTL

SEQ ID NO: 4890 - protein, 9 aa, Homo Sapiens
HIPDVITYL

SEQ ID NO: 4891 - protein, 9 aa, Homo Sapiens
HIPNIFQKI

SEQ ID NO: 4892 - protein, 9 aa, Homo Sapiens
HISRLLQEL

SEQ ID NO: 4893 - protein, 9 aa, Homo Sapiens
HLAAIATEL

SEQ ID NO: 4894 - protein, 9 aa, Homo Sapiens
HLADFTPRL

SEQ ID NO: 4895 - protein, 9 aa, Homo Sapiens
HLAEALEQL

SEQ ID NO: 4896 - protein, 9 aa, Homo Sapiens
HLAEALHQA

SEQ ID NO: 4897 - protein, 9 aa, Homo Sapiens
HLAEHSLQV

SEQ ID NO: 4898 - protein, 9 aa, Homo Sapiens
HLAEIKRKL

SEQ ID NO: 4899 - protein, 9 aa, Homo Sapiens
HLAEKTSSL

SEQ ID NO: 4900 - protein, 9 aa, Homo Sapiens
HLAELIAEL

SEQ ID NO: 4901 - protein, 9 aa, Homo Sapiens
HLAELQEKI

SEQ ID NO: 4902 - protein, 9 aa, Homo Sapiens
HLAESESLL

SEQ ID NO: 4903 - protein, 9 aa, Homo Sapiens
HLAEVLERV

SEQ ID NO: 4904 - protein, 9 aa, Homo Sapiens
HLAEVSAEV

SEQ ID NO: 4905 - protein, 9 aa, Homo Sapiens
HLAIKLEQV

SEQ ID NO: 4906 - protein, 9 aa, Homo Sapiens
HLAKLYDNL

SEQ ID NO: 4907 - protein, 9 aa, Homo Sapiens
HLAKVTAEV

SEQ ID NO: 4908 - protein, 9 aa, Homo Sapiens
HLANIVERL

SEQ ID NO: 4909 - protein, 9 aa, Homo Sapiens
HLANIVERV

SEQ ID NO: 4910 - protein, 9 aa, Homo Sapiens
HLANTYISV

SEQ ID NO: 4911 - protein, 9 aa, Homo Sapiens
HLAPENFYI

SEQ ID NO: 4912 - protein, 9 aa, Homo Sapiens
HLAPLWPFL

SEQ ID NO: 4913 - protein, 9 aa, Homo Sapiens
HLAQSLHKL

SEQ ID NO: 4914 - protein, 9 aa, Homo Sapiens
HLASIHGYL

SEQ ID NO: 4915 - protein, 9 aa, Homo Sapiens
HLASKIEEA

SEQ ID NO: 4916 - protein, 9 aa, Homo Sapiens
HLAVNDFEL

SEQ ID NO: 4917 - protein, 9 aa, Homo Sapiens
HLAVVAPRL

SEQ ID NO: 4918 - protein, 9 aa, Homo Sapiens
HLCANLMQL

SEQ ID NO: 4919 - protein, 9 aa, Homo Sapiens
HLCEHIWTL

SEQ ID NO: 4920 - protein, 9 aa, Homo Sapiens
HLCELLPRL

SEQ ID NO: 4921 - protein, 9 aa, Homo Sapiens
HLCGHVDTI

SEQ ID NO: 4922 - protein, 9 aa, Homo Sapiens
HLCSMNETL

SEQ ID NO: 4923 - protein, 9 aa, Homo Sapiens
HLFEDAYLL

SEQ ID NO: 4924 - protein, 9 aa, Homo Sapiens
HLFNVAHTL

SEQ ID NO: 4925 - protein, 9 aa, Homo Sapiens
HLFRKFHYL

SEQ ID NO: 4926 - protein, 9 aa, Homo Sapiens
HLGEYQAAV

SEQ ID NO: 4927 - protein, 9 aa, Homo Sapiens
HLGHILFLL

SEQ ID NO: 4928 - protein, 9 aa, Homo Sapiens
HLGQIENYL

SEQ ID NO: 4929 - protein, 9 aa, Homo Sapiens
HLKDGVPGL

SEQ ID NO: 4930 - protein, 9 aa, Homo Sapiens
HLKVHIERV

SEQ ID NO: 4931 - protein, 9 aa, Homo Sapiens
HLMNHMNLL

SEQ ID NO: 4932 - protein, 9 aa, Homo Sapiens
HLNATVNNL

SEQ ID NO: 4933 - protein, 9 aa, Homo Sapiens
HLNEHLYNM

SEQ ID NO: 4934 - protein, 9 aa, Homo Sapiens
HLNGHIKQV

SEQ ID NO: 4935 - protein, 9 aa, Homo Sapiens
HLNGKVSHL

SEQ ID NO: 4936 - protein, 9 aa, Homo Sapiens
HLNMFIQNL

SEQ ID NO: 4937 - protein, 9 aa, Homo Sapiens
HLNPHTNMV

SEQ ID NO: 4938 - protein, 9 aa, Homo Sapiens
HLPDFVKQL

SEQ ID NO: 4939 - protein, 9 aa, Homo Sapiens
HLPDVCVNL

SEQ ID NO: 4940 - protein, 9 aa, Homo Sapiens
HLPSDFTPA

SEQ ID NO: 4941 - protein, 9 aa, Homo Sapiens
HLSAILEAL

SEQ ID NO: 4942 - protein, 9 aa, Homo Sapiens
HLSDHLSEL

SEQ ID NO: 4943 - protein, 9 aa, Homo Sapiens
HLSDMLQQL

SEQ ID NO: 4944 - protein, 9 aa, Homo Sapiens
HLSEETVML

SEQ ID NO: 4945 - protein, 9 aa, Homo Sapiens
HLSELNTKL

SEQ ID NO: 4946 - protein, 9 aa, Homo Sapiens
HLSELVQQI

SEQ ID NO: 4947 - protein, 9 aa, Homo Sapiens
HLSHIKESV

SEQ ID NO: 4948 - protein, 9 aa, Homo Sapiens
HLSIINEYL

SEQ ID NO: 4949 - protein, 9 aa, Homo Sapiens
HLSKIETRI

SEQ ID NO: 4950 - protein, 9 aa, Homo Sapiens
HLSNILSEV

SEQ ID NO: 4951 - protein, 9 aa, Homo Sapiens
HLSNMEVQV

SEQ ID NO: 4952 - protein, 9 aa, Homo Sapiens
HLSNYQYLL

SEQ ID NO: 4953 - protein, 9 aa, Homo Sapiens
HLSSIEVLI

SEQ ID NO: 4954 - protein, 9 aa, Homo Sapiens
HLSSLIAQL

SEQ ID NO: 4955 - protein, 9 aa, Homo Sapiens
HLSTSLDNL

SEQ ID NO: 4956 - protein, 9 aa, Homo Sapiens
HLSTVEFLL

SEQ ID NO: 4957 - protein, 9 aa, Homo Sapiens
HLTDITLKV

SEQ ID NO: 4958 - protein, 9 aa, Homo Sapiens
HLVDFDCHL

SEQ ID NO: 4959 - protein, 9 aa, Homo Sapiens
HLYSSIEHL

SEQ ID NO: 4960 - protein, 9 aa, Homo Sapiens
HMGDILYKL

SEQ ID NO: 4961 - protein, 9 aa, Homo Sapiens
HMSEICTEL

SEQ ID NO: 4962 - protein, 9 aa, Homo Sapiens
HQAQIDHYL

SEQ ID NO: 4963 - protein, 9 aa, Homo Sapiens
HVVDFFNRV

SEQ ID NO: 4964 - protein, 9 aa, Homo Sapiens
IAREFSPDL

SEQ ID NO: 4965 - protein, 9 aa, Homo Sapiens
IIADNIIFL

SEQ ID NO: 4966 - protein, 9 aa, Homo Sapiens
IIFVPVPQL

SEQ ID NO: 4967 - protein, 9 aa, Homo Sapiens
IIKGKVEEV

SEQ ID NO: 4968 - protein, 9 aa, Homo Sapiens
IISELDRQI

SEQ ID NO: 4969 - protein, 9 aa, Homo Sapiens
IIVDIFHGL

SEQ ID NO: 4970 - protein, 9 aa, Homo Sapiens
IKEPIWETL

SEQ ID NO: 4971 - protein, 9 aa, Homo Sapiens
ILAAETDRL

SEQ ID NO: 4972 - protein, 9 aa, Homo Sapiens
ILAAHVPTL

SEQ ID NO: 4973 - protein, 9 aa, Homo Sapiens
ILAAIVNHL

SEQ ID NO: 4974 - protein, 9 aa, Homo Sapiens
ILAALQERL

SEQ ID NO: 4975 - protein, 9 aa, Homo Sapiens
ILAAVETRL

SEQ ID NO: 4976 - protein, 9 aa, Homo Sapiens
ILADATAKM

SEQ ID NO: 4977 - protein, 9 aa, Homo Sapiens
ILADATEQV

SEQ ID NO: 4978 - protein, 9 aa, Homo Sapiens
ILADCTLIL

SEQ ID NO: 4979 - protein, 9 aa, Homo Sapiens
ILADIQSHM

SEQ ID NO: 4980 - protein, 9 aa, Homo Sapiens
ILADIVISA

SEQ ID NO: 4981 - protein, 9 aa, Homo Sapiens
ILADKTRQL

SEQ ID NO: 4982 - protein, 9 aa, Homo Sapiens
ILADLEDYL

SEQ ID NO: 4983 - protein, 9 aa, Homo Sapiens
ILAEIARIL

SEQ ID NO: 4984 - protein, 9 aa, Homo Sapiens
ILAELLLRV

SEQ ID NO: 4985 - protein, 9 aa, Homo Sapiens
ILAETQPEL

SEQ ID NO: 4986 - protein, 9 aa, Homo Sapiens
ILAHEIHVL

SEQ ID NO: 4987 - protein, 9 aa, Homo Sapiens
ILANDGVLL

SEQ ID NO: 4988 - protein, 9 aa, Homo Sapiens
ILANHAIKL

SEQ ID NO: 4989 - protein, 9 aa, Homo Sapiens
ILANNCPAL

SEQ ID NO: 4990 - protein, 9 aa, Homo Sapiens
ILAPTVQEL

SEQ ID NO: 4991 - protein, 9 aa, Homo Sapiens
ILAPVVKEI

SEQ ID NO: 4992 - protein, 9 aa, Homo Sapiens
ILAQQPDRL

SEQ ID NO: 4993 - protein, 9 aa, Homo Sapiens
ILASEETYL

SEQ ID NO: 4994 - protein, 9 aa, Homo Sapiens
ILASLLRNL

SEQ ID NO: 4995 - protein, 9 aa, Homo Sapiens
ILATNTQKV

SEQ ID NO: 4996 - protein, 9 aa, Homo Sapiens
ILATPLQNL

SEQ ID NO: 4997 - protein, 9 aa, Homo Sapiens
ILATRTQNV

SEQ ID NO: 4998 - protein, 9 aa, Homo Sapiens
ILCEHPNQV

SEQ ID NO: 4999 - protein, 9 aa, Homo Sapiens
ILCELINKL

SEQ ID NO: 5000 - protein, 9 aa, Homo Sapiens
ILDCIYNEV

SEQ ID NO: 5001 - protein, 9 aa, Homo Sapiens
ILFGHENRV

SEQ ID NO: 5002 - protein, 9 aa, Homo Sapiens
ILGPIPSHM

SEQ ID NO: 5003 - protein, 9 aa, Homo Sapiens
ILGPKPQGV

SEQ ID NO: 5004 - protein, 9 aa, Homo Sapiens
ILGPQGNTI

SEQ ID NO: 5005 - protein, 9 aa, Homo Sapiens
ILGTHNITV

SEQ ID NO: 5006 - protein, 9 aa, Homo Sapiens
ILHANPQLL

SEQ ID NO: 5007 - protein, 9 aa, Homo Sapiens
ILHDDCAFL

SEQ ID NO: 5008 - protein, 9 aa, Homo Sapiens
ILHDDEVTV

SEQ ID NO: 5009 - protein, 9 aa, Homo Sapiens
ILHDIDCLL

SEQ ID NO: 5010 - protein, 9 aa, Homo Sapiens
ILHGEVNKV

SEQ ID NO: 5011 - protein, 9 aa, Homo Sapiens
ILHHEYFLL

SEQ ID NO: 5012 - protein, 9 aa, Homo Sapiens
ILHHVNIGL

SEQ ID NO: 5013 - protein, 9 aa, Homo Sapiens
ILHPEVQTL

SEQ ID NO: 5014 - protein, 9 aa, Homo Sapiens
ILHRVIQEL

SEQ ID NO: 5015 - protein, 9 aa, Homo Sapiens
ILHSVTTNL

SEQ ID NO: 5016 - protein, 9 aa, Homo Sapiens
ILHTDVVYL

SEQ ID NO: 5017 - protein, 9 aa, Homo Sapiens
ILIGKENLL

SEQ ID NO: 5018 - protein, 9 aa, Homo Sapiens
ILINKADLL

SEQ ID NO: 5019 - protein, 9 aa, Homo Sapiens
ILKARLEYL

SEQ ID NO: 5020 - protein, 9 aa, Homo Sapiens
ILKDDNHSL

SEQ ID NO: 5021 - protein, 9 aa, Homo Sapiens
ILKEDSPGL

SEQ ID NO: 5022 - protein, 9 aa, Homo Sapiens
ILKEISPLL

SEQ ID NO: 5023 - protein, 9 aa, Homo Sapiens
ILKGQIQEA

SEQ ID NO: 5024 - protein, 9 aa, Homo Sapiens
ILKKVLEAL

SEQ ID NO: 5025 - protein, 9 aa, Homo Sapiens
ILKSHVEKL

SEQ ID NO: 5026 - protein, 9 aa, Homo Sapiens
ILLEHNYAL

SEQ ID NO: 5027 - protein, 9 aa, Homo Sapiens
ILMDKERLL

SEQ ID NO: 5028 - protein, 9 aa, Homo Sapiens
ILMEHIHKL

SEQ ID NO: 5029 - protein, 9 aa, Homo Sapiens
ILMGVLKEV

SEQ ID NO: 5030 - protein, 9 aa, Homo Sapiens
ILMSLQKVL

SEQ ID NO: 5031 - protein, 9 aa, Homo Sapiens
ILNDNINLL

SEQ ID NO: 5032 - protein, 9 aa, Homo Sapiens
ILNEIVNFV

SEQ ID NO: 5033 - protein, 9 aa, Homo Sapiens
ILNERVELL

SEQ ID NO: 5034 - protein, 9 aa, Homo Sapiens
ILNNKIPEA

SEQ ID NO: 5035 - protein, 9 aa, Homo Sapiens
ILNNLKAFL

SEQ ID NO: 5036 - protein, 9 aa, Homo Sapiens
ILNNNLNTL

SEQ ID NO: 5037 - protein, 9 aa, Homo Sapiens
ILNPEVVTV

SEQ ID NO: 5038 - protein, 9 aa, Homo Sapiens
ILNSMVSKL

SEQ ID NO: 5039 - protein, 9 aa, Homo Sapiens
ILNSNEHLL

SEQ ID NO: 5040 - protein, 9 aa, Homo Sapiens
ILNTTLDLL

SEQ ID NO: 5041 - protein, 9 aa, Homo Sapiens
ILNYVLVRV

SEQ ID NO: 5042 - protein, 9 aa, Homo Sapiens
ILQDGRIFI

SEQ ID NO: 5043 - protein, 9 aa, Homo Sapiens
ILQEREYRL

SEQ ID NO: 5044 - protein, 9 aa, Homo Sapiens
ILQNKIDLV

SEQ ID NO: 5045 - protein, 9 aa, Homo Sapiens
ILRDTSEDL

SEQ ID NO: 5046 - protein, 9 aa, Homo Sapiens
ILREDPAYL

SEQ ID NO: 5047 - protein, 9 aa, Homo Sapiens
ILSAFVDRL

SEQ ID NO: 5048 - protein, 9 aa, Homo Sapiens
ILSAIEHKA

SEQ ID NO: 5049 - protein, 9 aa, Homo Sapiens
ILSALVTRL

SEQ ID NO: 5050 - protein, 9 aa, Homo Sapiens
ILSDACSKL

SEQ ID NO: 5051 - protein, 9 aa, Homo Sapiens
ILSDDCATL

SEQ ID NO: 5052 - protein, 9 aa, Homo Sapiens
ILSDKNSSV

SEQ ID NO: 5053 - protein, 9 aa, Homo Sapiens
ILSDVASRL

SEQ ID NO: 5054 - protein, 9 aa, Homo Sapiens
ILSDVQRKV

SEQ ID NO: 5055 - protein, 9 aa, Homo Sapiens
ILSEFSSKL

SEQ ID NO: 5056 - protein, 9 aa, Homo Sapiens
ILSEIKEAV

SEQ ID NO: 5057 - protein, 9 aa, Homo Sapiens
ILSELAPSL

SEQ ID NO: 5058 - protein, 9 aa, Homo Sapiens
ILSELVEKI

SEQ ID NO: 5059 - protein, 9 aa, Homo Sapiens
ILSESLHSL

SEQ ID NO: 5060 - protein, 9 aa, Homo Sapiens
ILSEVERNL

SEQ ID NO: 5061 - protein, 9 aa, Homo Sapiens
ILSEVQQAV

SEQ ID NO: 5062 - protein, 9 aa, Homo Sapiens
ILSGVIRSV

SEQ ID NO: 5063 - protein, 9 aa, Homo Sapiens
ILSGVVTKM

SEQ ID NO: 5064 - protein, 9 aa, Homo Sapiens
ILSHIKASL

SEQ ID NO: 5065 - protein, 9 aa, Homo Sapiens
ILSHLSSEL

SEQ ID NO: 5066 - protein, 9 aa, Homo Sapiens
ILSKKQNEL

SEQ ID NO: 5067 - protein, 9 aa, Homo Sapiens
ILSPSLDFV

SEQ ID NO: 5068 - protein, 9 aa, Homo Sapiens
ILSPWGAEV

SEQ ID NO: 5069 - protein, 9 aa, Homo Sapiens
ILSQYITFV

SEQ ID NO: 5070 - protein, 9 aa, Homo Sapiens
ILSSFESRL

SEQ ID NO: 5071 - protein, 9 aa, Homo Sapiens
ILTDITKGV

SEQ ID NO: 5072 - protein, 9 aa, Homo Sapiens
ILTESENKL

SEQ ID NO: 5073 - protein, 9 aa, Homo Sapiens
ILTSYINEL

SEQ ID NO: 5074 - protein, 9 aa, Homo Sapiens
ILTTLIHLV

SEQ ID NO: 5075 - protein, 9 aa, Homo Sapiens
ILYDDDERL

SEQ ID NO: 5076 - protein, 9 aa, Homo Sapiens
ILYDKLEKI

SEQ ID NO: 5077 - protein, 9 aa, Homo Sapiens
ILYDLQQNL

SEQ ID NO: 5078 - protein, 9 aa, Homo Sapiens
ILYGEVEKL

SEQ ID NO: 5079 - protein, 9 aa, Homo Sapiens
ILYGKIIHL

SEQ ID NO: 5080 - protein, 9 aa, Homo Sapiens
ILYSKTEHL

SEQ ID NO: 5081 - protein, 9 aa, Homo Sapiens
IMAKQVEQL

SEQ ID NO: 5082 - protein, 9 aa, Homo Sapiens
IMHDCVVKL

SEQ ID NO: 5083 - protein, 9 aa, Homo Sapiens
IMNGHVDCV

SEQ ID NO: 5084 - protein, 9 aa, Homo Sapiens
IMSGRTDRL

SEQ ID NO: 5085 - protein, 9 aa, Homo Sapiens
ISSDAVLQR

SEQ ID NO: 5086 - protein, 9 aa, Homo Sapiens
ISTLITNLI

SEQ ID NO: 5087 - protein, 9 aa, Homo Sapiens
ITAPIEAQV

SEQ ID NO: 5088 - protein, 9 aa, Homo Sapiens
ITKELIEII

SEQ ID NO: 5089 - protein, 9 aa, Homo Sapiens
ITNEIVDYI

SEQ ID NO: 5090 - protein, 9 aa, Homo Sapiens
ITQIEHEVS

SEQ ID NO: 5091 - protein, 9 aa, Homo Sapiens
ITSELVSKI

SEQ ID NO: 5092 - protein, 9 aa, Homo Sapiens
IVAKHTSAL

SEQ ID NO: 5093 - protein, 9 aa, Homo Sapiens
IVHEALYFL

SEQ ID NO: 5094 - protein, 9 aa, Homo Sapiens
IVSEKTDKL

SEQ ID NO: 5095 - protein, 9 aa, Homo Sapiens
KAAVMVHQL

SEQ ID NO: 5096 - protein, 9 aa, Homo Sapiens
KIADFGWSV

SEQ ID NO: 5097 - protein, 9 aa, Homo Sapiens
KIADTSNML

SEQ ID NO: 5098 - protein, 9 aa, Homo Sapiens
KIAEGVNSL

SEQ ID NO: 5099 - protein, 9 aa, Homo Sapiens
KIAEIEAEM

SEQ ID NO: 5100 - protein, 9 aa, Homo Sapiens
KIAEIKSLL

SEQ ID NO: 5101 - protein, 9 aa, Homo Sapiens
KIAEKTAAL

SEQ ID NO: 5102 - protein, 9 aa, Homo Sapiens
KIAELNANL

SEQ ID NO: 5103 - protein, 9 aa, Homo Sapiens
KIAELNTKL

SEQ ID NO: 5104 - protein, 9 aa, Homo Sapiens
KIAFIFNNL

SEQ ID NO: 5105 - protein, 9 aa, Homo Sapiens
KIAGSSPRL

SEQ ID NO: 5106 - protein, 9 aa, Homo Sapiens
KIAGYVTHL

SEQ ID NO: 5107 - protein, 9 aa, Homo Sapiens
KIAKESQFL

SEQ ID NO: 5108 - protein, 9 aa, Homo Sapiens
KIAPNTPQL

SEQ ID NO: 5109 - protein, 9 aa, Homo Sapiens
KICDYLFNV

SEQ ID NO: 5110 - protein, 9 aa, Homo Sapiens
KICELQARL

SEQ ID NO: 5111 - protein, 9 aa, Homo Sapiens
KICEMLSLL

SEQ ID NO: 5112 - protein, 9 aa, Homo Sapiens
KIIDFIYTA

SEQ ID NO: 5113 - protein, 9 aa, Homo Sapiens
KIKEGAENL

SEQ ID NO: 5114 - protein, 9 aa, Homo Sapiens
KIQKVKEAL

SEQ ID NO: 5115 - protein, 9 aa, Homo Sapiens
KISDIQSQL

SEQ ID NO: 5116 - protein, 9 aa, Homo Sapiens
KISELTTEV

SEQ ID NO: 5117 - protein, 9 aa, Homo Sapiens
KISEVVELL

SEQ ID NO: 5118 - protein, 9 aa, Homo Sapiens
KITDLQNQL

SEQ ID NO: 5119 - protein, 9 aa, Homo Sapiens
KLAAAISEV

SEQ ID NO: 5120 - protein, 9 aa, Homo Sapiens
KLAAVVNNL

SEQ ID NO: 5121 - protein, 9 aa, Homo Sapiens
KLADAKIFL

SEQ ID NO: 5122 - protein, 9 aa, Homo Sapiens
KLADFGTCM

SEQ ID NO: 5123 - protein, 9 aa, Homo Sapiens
KLADICKNL

SEQ ID NO: 5124 - protein, 9 aa, Homo Sapiens
KLADKLYNL

SEQ ID NO: 5125 - protein, 9 aa, Homo Sapiens
KLADLQKQV

SEQ ID NO: 5126 - protein, 9 aa, Homo Sapiens
KLADQCTGL

SEQ ID NO: 5127 - protein, 9 aa, Homo Sapiens
KLADQYPHL

SEQ ID NO: 5128 - protein, 9 aa, Homo Sapiens
KLAEAHVNL

SEQ ID NO: 5129 - protein, 9 aa, Homo Sapiens
KLAECQDQL

SEQ ID NO: 5130 - protein, 9 aa, Homo Sapiens
KLAEFIDFL

SEQ ID NO: 5131 - protein, 9 aa, Homo Sapiens
KLAEGVQLL

SEQ ID NO: 5132 - protein, 9 aa, Homo Sapiens
KLAEIRHEV

SEQ ID NO: 5133 - protein, 9 aa, Homo Sapiens
KLAEIVKQV

SEQ ID NO: 5134 - protein, 9 aa, Homo Sapiens
KLAELARQL

SEQ ID NO: 5135 - protein, 9 aa, Homo Sapiens
KLAENACTL

SEQ ID NO: 5136 - protein, 9 aa, Homo Sapiens
KLAENEITL

SEQ ID NO: 5137 - protein, 9 aa, Homo Sapiens
KLAEQYESF

SEQ ID NO: 5138 - protein, 9 aa, Homo Sapiens
KLAESKVSV

SEQ ID NO: 5139 - protein, 9 aa, Homo Sapiens
KLAESVEKA

SEQ ID NO: 5140 - protein, 9 aa, Homo Sapiens
KLAEVDKCL

SEQ ID NO: 5141 - protein, 9 aa, Homo Sapiens
KLAEVSQNI

SEQ ID NO: 5142 - protein, 9 aa, Homo Sapiens
KLAGLVEEL

SEQ ID NO: 5143 - protein, 9 aa, Homo Sapiens
KLAKLQAQV

SEQ ID NO: 5144 - protein, 9 aa, Homo Sapiens
KLALEQQQL

SEQ ID NO: 5145 - protein, 9 aa, Homo Sapiens
KLAQALHEM

SEQ ID NO: 5146 - protein, 9 aa, Homo Sapiens
KLAQQQAAL

SEQ ID NO: 5147 - protein, 9 aa, Homo Sapiens
KLAQQSQAL

SEQ ID NO: 5148 - protein, 9 aa, Homo Sapiens
KLAQSVQKL

SEQ ID NO: 5149 - protein, 9 aa, Homo Sapiens
KLCDIIVHI

SEQ ID NO: 5150 - protein, 9 aa, Homo Sapiens
KLCDVTLKI

SEQ ID NO: 5151 - protein, 9 aa, Homo Sapiens
KLCDVTTGL

SEQ ID NO: 5152 - protein, 9 aa, Homo Sapiens
KLCEGFNEV

SEQ ID NO: 5153 - protein, 9 aa, Homo Sapiens
KLCEKIINI

SEQ ID NO: 5154 - protein, 9 aa, Homo Sapiens
KLCERIEGL

SEQ ID NO: 5155 - protein, 9 aa, Homo Sapiens
KLCERVTKV

SEQ ID NO: 5156 - protein, 9 aa, Homo Sapiens
KLCKLQEAL

SEQ ID NO: 5157 - protein, 9 aa, Homo Sapiens
KLCPTNQEV

SEQ ID NO: 5158 - protein, 9 aa, Homo Sapiens
KLCSFQEEM

SEQ ID NO: 5159 - protein, 9 aa, Homo Sapiens
KLCSSAETL

SEQ ID NO: 5160 - protein, 9 aa, Homo Sapiens
KLDDCTLQL

SEQ ID NO: 5161 - protein, 9 aa, Homo Sapiens
KLDDIVQHI

SEQ ID NO: 5162 - protein, 9 aa, Homo Sapiens
KLEDGPKFL

SEQ ID NO: 5163 - protein, 9 aa, Homo Sapiens
KLFDASHSL

SEQ ID NO: 5164 - protein, 9 aa, Homo Sapiens
KLFDLDEKL

SEQ ID NO: 5165 - protein, 9 aa, Homo Sapiens
KLFDQANKL

SEQ ID NO: 5166 - protein, 9 aa, Homo Sapiens
KLFDRPQEL

SEQ ID NO: 5167 - protein, 9 aa, Homo Sapiens
KLFDTQHRV

SEQ ID NO: 5168 - protein, 9 aa, Homo Sapiens
KLFDTQQFL

SEQ ID NO: 5169 - protein, 9 aa, Homo Sapiens
KLFEKSTGL

SEQ ID NO: 5170 - protein, 9 aa, Homo Sapiens
KLFEKVKEV

SEQ ID NO: 5171 - protein, 9 aa, Homo Sapiens
KLFGHLTSA

SEQ ID NO: 5172 - protein, 9 aa, Homo Sapiens
KLFGMIITI

SEQ ID NO: 5173 - protein, 9 aa, Homo Sapiens
KLFGQPPCA

SEQ ID NO: 5174 - protein, 9 aa, Homo Sapiens
KLFPYEEHL

SEQ ID NO: 5175 - protein, 9 aa, Homo Sapiens
KLFSLEHFL

SEQ ID NO: 5176 - protein, 9 aa, Homo Sapiens
KLFSYCVKV

SEQ ID NO: 5177 - protein, 9 aa, Homo Sapiens
KLGAVFNQV

SEQ ID NO: 5178 - protein, 9 aa, Homo Sapiens
KLGDLMVLL

SEQ ID NO: 5179 - protein, 9 aa, Homo Sapiens
KLGEILANL

SEQ ID NO: 5180 - protein, 9 aa, Homo Sapiens
KLGEIVTTI

SEQ ID NO: 5181 - protein, 9 aa, Homo Sapiens
KLGPAGTTI

SEQ ID NO: 5182 - protein, 9 aa, Homo Sapiens
KLGPAPKTL

SEQ ID NO: 5183 - protein, 9 aa, Homo Sapiens
KLHAVVETL

SEQ ID NO: 5184 - protein, 9 aa, Homo Sapiens
KLHDINAQL

SEQ ID NO: 5185 - protein, 9 aa, Homo Sapiens
KLHDRLAQL

SEQ ID NO: 5186 - protein, 9 aa, Homo Sapiens
KLHDVEHVL

SEQ ID NO: 5187 - protein, 9 aa, Homo Sapiens
KLHEEIEHL

SEQ ID NO: 5188 - protein, 9 aa, Homo Sapiens
KLHGVNINV

SEQ ID NO: 5189 - protein, 9 aa, Homo Sapiens
KLHYVVTEV

SEQ ID NO: 5190 - protein, 9 aa, Homo Sapiens
KLIANNTTV

SEQ ID NO: 5191 - protein, 9 aa, Homo Sapiens
KLIDDVHRL

SEQ ID NO: 5192 - protein, 9 aa, Homo Sapiens
KLIDKLDSL

SEQ ID NO: 5193 - protein, 9 aa, Homo Sapiens
KLIDRTESL

SEQ ID NO: 5194 - protein, 9 aa, Homo Sapiens
KLIEECTDL

SEQ ID NO: 5195 - protein, 9 aa, Homo Sapiens
KLIEKNYFL

SEQ ID NO: 5196 - protein, 9 aa, Homo Sapiens
KLIGQVHEV

SEQ ID NO: 5197 - protein, 9 aa, Homo Sapiens
KLIKSLEAA

SEQ ID NO: 5198 - protein, 9 aa, Homo Sapiens
KLIPFLEKL

SEQ ID NO: 5199 - protein, 9 aa, Homo Sapiens
KLIPLCHQL

SEQ ID NO: 5200 - protein, 9 aa, Homo Sapiens
KLISDINKA

SEQ ID NO: 5201 - protein, 9 aa, Homo Sapiens
KLISELQKL

SEQ ID NO: 5202 - protein, 9 aa, Homo Sapiens
KLKDSEAEL

SEQ ID NO: 5203 - protein, 9 aa, Homo Sapiens
KLKEDLAKA

SEQ ID NO: 5204 - protein, 9 aa, Homo Sapiens
KLKEEIDLL

SEQ ID NO: 5205 - protein, 9 aa, Homo Sapiens
KLKEYVDCL

SEQ ID NO: 5206 - protein, 9 aa, Homo Sapiens
KLKKEIEEL

SEQ ID NO: 5207 - protein, 9 aa, Homo Sapiens
KLKNVIHKI

SEQ ID NO: 5208 - protein, 9 aa, Homo Sapiens
KLKSAIEQA

SEQ ID NO: 5209 - protein, 9 aa, Homo Sapiens
KLLDVVHPA

SEQ ID NO: 5210 - protein, 9 aa, Homo Sapiens
KLMDHIYAV

SEQ ID NO: 5211 - protein, 9 aa, Homo Sapiens
KLMDKVVRL

SEQ ID NO: 5212 - protein, 9 aa, Homo Sapiens
KLMDQLEAL

SEQ ID NO: 5213 - protein, 9 aa, Homo Sapiens
KLMEEIREL

SEQ ID NO: 5214 - protein, 9 aa, Homo Sapiens
KLMELLEEI

SEQ ID NO: 5215 - protein, 9 aa, Homo Sapiens
KLMELYERL

SEQ ID NO: 5216 - protein, 9 aa, Homo Sapiens
KLMGQIHQI

SEQ ID NO: 5217 - protein, 9 aa, Homo Sapiens
KLMQQQQEV

SEQ ID NO: 5218 - protein, 9 aa, Homo Sapiens
KLNAKLAEL

SEQ ID NO: 5219 - protein, 9 aa, Homo Sapiens
KLNATNIEL

SEQ ID NO: 5220 - protein, 9 aa, Homo Sapiens
KLNDALDRL

SEQ ID NO: 5221 - protein, 9 aa, Homo Sapiens
KLNDLIQRL

SEQ ID NO: 5222 - protein, 9 aa, Homo Sapiens
KLNDLNSSV

SEQ ID NO: 5223 - protein, 9 aa, Homo Sapiens
KLNDTYVNV

SEQ ID NO: 5224 - protein, 9 aa, Homo Sapiens
KLNEIVDQI

SEQ ID NO: 5225 - protein, 9 aa, Homo Sapiens
KLNEQQSVL

SEQ ID NO: 5226 - protein, 9 aa, Homo Sapiens
KLNERLAKL

SEQ ID NO: 5227 - protein, 9 aa, Homo Sapiens
KLNFFIHNL

SEQ ID NO: 5228 - protein, 9 aa, Homo Sapiens
KLNFIVTGL

SEQ ID NO: 5229 - protein, 9 aa, Homo Sapiens
KLNGNLEKI

SEQ ID NO: 5230 - protein, 9 aa, Homo Sapiens
KLNHLLERL

SEQ ID NO: 5231 - protein, 9 aa, Homo Sapiens
KLNPGIAYV

SEQ ID NO: 5232 - protein, 9 aa, Homo Sapiens
KLNPQQFEV

SEQ ID NO: 5233 - protein, 9 aa, Homo Sapiens
KLNTLVQKL

SEQ ID NO: 5234 - protein, 9 aa, Homo Sapiens
KLQEFLQTL

SEQ ID NO: 5235 - protein, 9 aa, Homo Sapiens
KLQEKIQEL

SEQ ID NO: 5236 - protein, 9 aa, Homo Sapiens
KLQELNYNL

SEQ ID NO: 5237 - protein, 9 aa, Homo Sapiens
KLQEQIFHL

SEQ ID NO: 5238 - protein, 9 aa, Homo Sapiens
KLQEVLDYL

SEQ ID NO: 5239 - protein, 9 aa, Homo Sapiens
KLRDSLELL

SEQ ID NO: 5240 - protein, 9 aa, Homo Sapiens
KLREDLERL

SEQ ID NO: 5241 - protein, 9 aa, Homo Sapiens
KLSDLDNKL

SEQ ID NO: 5242 - protein, 9 aa, Homo Sapiens
KLSDLYYDI

SEQ ID NO: 5243 - protein, 9 aa, Homo Sapiens
KLSDNILKL

SEQ ID NO: 5244 - protein, 9 aa, Homo Sapiens
KLSDQANTL

SEQ ID NO: 5245 - protein, 9 aa, Homo Sapiens
KLSDSRIAL

SEQ ID NO: 5246 - protein, 9 aa, Homo Sapiens
KLSEATREL

SEQ ID NO: 5247 - protein, 9 aa, Homo Sapiens
KLSEDIDLL

SEQ ID NO: 5248 - protein, 9 aa, Homo Sapiens
KLSEECNSL

SEQ ID NO: 5249 - protein, 9 aa, Homo Sapiens
KLSEENRHL

SEQ ID NO: 5250 - protein, 9 aa, Homo Sapiens
KLSEFDVEM

SEQ ID NO: 5251 - protein, 9 aa, Homo Sapiens
KLSEIPLTL

SEQ ID NO: 5252 - protein, 9 aa, Homo Sapiens
KLSEKIDQL

SEQ ID NO: 5253 - protein, 9 aa, Homo Sapiens
KLSELQLRV

SEQ ID NO: 5254 - protein, 9 aa, Homo Sapiens
KLSEQKEQL

SEQ ID NO: 5255 - protein, 9 aa, Homo Sapiens
KLSEVERSL

SEQ ID NO: 5256 - protein, 9 aa, Homo Sapiens
KLSEVNKRL

SEQ ID NO: 5257 - protein, 9 aa, Homo Sapiens
KLSFIIRTV

SEQ ID NO: 5258 - protein, 9 aa, Homo Sapiens
KLSGKLYLV

SEQ ID NO: 5259 - protein, 9 aa, Homo Sapiens
KLSGLTTNV

SEQ ID NO: 5260 - protein, 9 aa, Homo Sapiens
KLSGVLDEL

SEQ ID NO: 5261 - protein, 9 aa, Homo Sapiens
KLSHYLTLL

SEQ ID NO: 5262 - protein, 9 aa, Homo Sapiens
KLSLNMDNL

SEQ ID NO: 5263 - protein, 9 aa, Homo Sapiens
KLSLVAAML

SEQ ID NO: 5264 - protein, 9 aa, Homo Sapiens
KLSQIRKQL

SEQ ID NO: 5265 - protein, 9 aa, Homo Sapiens
KLSQLEEHL

SEQ ID NO: 5266 - protein, 9 aa, Homo Sapiens
KLSQNISEL

SEQ ID NO: 5267 - protein, 9 aa, Homo Sapiens
KLSQYLIQL

SEQ ID NO: 5268 - protein, 9 aa, Homo Sapiens
KLSSHEEAL

SEQ ID NO: 5269 - protein, 9 aa, Homo Sapiens
KLSSTQQSL

SEQ ID NO: 5270 - protein, 9 aa, Homo Sapiens
KLTAFVNTL

SEQ ID NO: 5271 - protein, 9 aa, Homo Sapiens
KLTDIQIEL

SEQ ID NO: 5272 - protein, 9 aa, Homo Sapiens
KLTEENTTL

SEQ ID NO: 5273 - protein, 9 aa, Homo Sapiens
KLTEIRHEV

SEQ ID NO: 5274 - protein, 9 aa, Homo Sapiens
KLTESNQKL

SEQ ID NO: 5275 - protein, 9 aa, Homo Sapiens
KLTGIKHEL

SEQ ID NO: 5276 - protein, 9 aa, Homo Sapiens
KLTQILSYL

SEQ ID NO: 5277 - protein, 9 aa, Homo Sapiens
KLVDCIIEV

SEQ ID NO: 5278 - protein, 9 aa, Homo Sapiens
KLVEYIVKA

SEQ ID NO: 5279 - protein, 9 aa, Homo Sapiens
KLVPWSQCL

SEQ ID NO: 5280 - protein, 9 aa, Homo Sapiens
KLVQIEYAL

SEQ ID NO: 5281 - protein, 9 aa, Homo Sapiens
KLYDGFQYL

SEQ ID NO: 5282 - protein, 9 aa, Homo Sapiens
KLYEAVPQL

SEQ ID NO: 5283 - protein, 9 aa, Homo Sapiens
KLYSEMEQL

SEQ ID NO: 5284 - protein, 9 aa, Homo Sapiens
KLYSSEQLL

SEQ ID NO: 5285 - protein, 9 aa, Homo Sapiens
KMADIEYRL

SEQ ID NO: 5286 - protein, 9 aa, Homo Sapiens
KMADILEKI

SEQ ID NO: 5287 - protein, 9 aa, Homo Sapiens
KMADMYTRL

SEQ ID NO: 5288 - protein, 9 aa, Homo Sapiens
KMAECYTML

SEQ ID NO: 5289 - protein, 9 aa, Homo Sapiens
KMAEIKVKL

SEQ ID NO: 5290 - protein, 9 aa, Homo Sapiens
KMAEMLVEL

SEQ ID NO: 5291 - protein, 9 aa, Homo Sapiens
KMAIITTHL

SEQ ID NO: 5292 - protein, 9 aa, Homo Sapiens
KMAQALEEL

SEQ ID NO: 5293 - protein, 9 aa, Homo Sapiens
KMCDHLIRA

SEQ ID NO: 5294 - protein, 9 aa, Homo Sapiens
KMFFLIDKV

SEQ ID NO: 5295 - protein, 9 aa, Homo Sapiens
KMKAIVEKL

SEQ ID NO: 5296 - protein, 9 aa, Homo Sapiens
KMKDTVQKL

SEQ ID NO: 5297 - protein, 9 aa, Homo Sapiens
KMKETLQNV

SEQ ID NO: 5298 - protein, 9 aa, Homo Sapiens
KMKSVIENA

SEQ ID NO: 5299 - protein, 9 aa, Homo Sapiens
KMMDKVEFV

SEQ ID NO: 5300 - protein, 9 aa, Homo Sapiens
KMNAKLEEL

SEQ ID NO: 5301 - protein, 9 aa, Homo Sapiens
KMNEKIASL

SEQ ID NO: 5302 - protein, 9 aa, Homo Sapiens
KMNEKLYTV

SEQ ID NO: 5303 - protein, 9 aa, Homo Sapiens
KMNGKVWDL

SEQ ID NO: 5304 - protein, 9 aa, Homo Sapiens
KMPEINAKV

SEQ ID NO: 5305 - protein, 9 aa, Homo Sapiens
KMSEKILLL

SEQ ID NO: 5306 - protein, 9 aa, Homo Sapiens
KMSELQTYV

SEQ ID NO: 5307 - protein, 9 aa, Homo Sapiens
KMSELRVTL

SEQ ID NO: 5308 - protein, 9 aa, Homo Sapiens
KMSSLLERL

SEQ ID NO: 5309 - protein, 9 aa, Homo Sapiens
KMVEKCWKL

SEQ ID NO: 5310 - protein, 9 aa, Homo Sapiens
KMYGYVDTL

SEQ ID NO: 5311 - protein, 9 aa, Homo Sapiens
KQAEIVKRL

SEQ ID NO: 5312 - protein, 9 aa, Homo Sapiens
KSQQLTDFI

SEQ ID NO: 5313 - protein, 9 aa, Homo Sapiens
KTADICQML

SEQ ID NO: 5314 - protein, 9 aa, Homo Sapiens
KTAEFLSKL

SEQ ID NO: 5315 - protein, 9 aa, Homo Sapiens
KTAEMNEKL

SEQ ID NO: 5316 - protein, 9 aa, Homo Sapiens
KTAFYSFYL

SEQ ID NO: 5317 - protein, 9 aa, Homo Sapiens
KTASINQNV

SEQ ID NO: 5318 - protein, 9 aa, Homo Sapiens
KTIDYIQFL

SEQ ID NO: 5319 - protein, 9 aa, Homo Sapiens
KTSDFNTFL

SEQ ID NO: 5320 - protein, 9 aa, Homo Sapiens
KVADLVLML

SEQ ID NO: 5321 - protein, 9 aa, Homo Sapiens
KVAELFEKL

SEQ ID NO: 5322 - protein, 9 aa, Homo Sapiens
KVASLLHQV

SEQ ID NO: 5323 - protein, 9 aa, Homo Sapiens
KVSDILLRL

SEQ ID NO: 5324 - protein, 9 aa, Homo Sapiens
KVSELTERL

SEQ ID NO: 5325 - protein, 9 aa, Homo Sapiens
KVSELVQFL

SEQ ID NO: 5326 - protein, 9 aa, Homo Sapiens
KVSQLIHHL

SEQ ID NO: 5327 - protein, 9 aa, Homo Sapiens
LFNKQLESI

SEQ ID NO: 5328 - protein, 9 aa, Homo Sapiens
LFPGKVHSL

SEQ ID NO: 5329 - protein, 9 aa, Homo Sapiens
LIADLKYEL

SEQ ID NO: 5330 - protein, 9 aa, Homo Sapiens
LIAKVIQNL

SEQ ID NO: 5331 - protein, 9 aa, Homo Sapiens
LICGFIIKL

SEQ ID NO: 5332 - protein, 9 aa, Homo Sapiens
LIPMIIHQL

SEQ ID NO: 5333 - protein, 9 aa, Homo Sapiens
LIQGKDLLI

SEQ ID NO: 5334 - protein, 9 aa, Homo Sapiens
LISDLEHRL

SEQ ID NO: 5335 - protein, 9 aa, Homo Sapiens
LISEIEYRL

SEQ ID NO: 5336 - protein, 9 aa, Homo Sapiens
LISPLVQLL

SEQ ID NO: 5337 - protein, 9 aa, Homo Sapiens
LLADERNEL

SEQ ID NO: 5338 - protein, 9 aa, Homo Sapiens
LLADKVLKL

SEQ ID NO: 5339 - protein, 9 aa, Homo Sapiens
LLADLARRL

SEQ ID NO: 5340 - protein, 9 aa, Homo Sapiens
LLADLKTMV

SEQ ID NO: 5341 - protein, 9 aa, Homo Sapiens
LLADRSMEL

SEQ ID NO: 5342 - protein, 9 aa, Homo Sapiens
LLAEAESEL

SEQ ID NO: 5343 - protein, 9 aa, Homo Sapiens
LLAEAKYYL

SEQ ID NO: 5344 - protein, 9 aa, Homo Sapiens
LLAEALNQV

SEQ ID NO: 5345 - protein, 9 aa, Homo Sapiens
LLAEENQRL

SEQ ID NO: 5346 - protein, 9 aa, Homo Sapiens
LLAEHIKSL

SEQ ID NO: 5347 - protein, 9 aa, Homo Sapiens
LLAEKEEKL

SEQ ID NO: 5348 - protein, 9 aa, Homo Sapiens
LLAEKIYKI

SEQ ID NO: 5349 - protein, 9 aa, Homo Sapiens
LLAEKVEQL

SEQ ID NO: 5350 - protein, 9 aa, Homo Sapiens
LLAELEGKL

SEQ ID NO: 5351 - protein, 9 aa, Homo Sapiens
LLAELLTHL

SEQ ID NO: 5352 - protein, 9 aa, Homo Sapiens
LLAELTKTL

SEQ ID NO: 5353 - protein, 9 aa, Homo Sapiens
LLAETHYQL

SEQ ID NO: 5354 - protein, 9 aa, Homo Sapiens
LLAEVIENL

SEQ ID NO: 5355 - protein, 9 aa, Homo Sapiens
LLAFVQTHL

SEQ ID NO: 5356 - protein, 9 aa, Homo Sapiens
LLAGQRHLL

SEQ ID NO: 5357 - protein, 9 aa, Homo Sapiens
LLAKKISQL

SEQ ID NO: 5358 - protein, 9 aa, Homo Sapiens
LLAKLLSQL

SEQ ID NO: 5359 - protein, 9 aa, Homo Sapiens
LLANKVPAA

SEQ ID NO: 5360 - protein, 9 aa, Homo Sapiens
LLANSIHGL

SEQ ID NO: 5361 - protein, 9 aa, Homo Sapiens
LLAPAPAQA

SEQ ID NO: 5362 - protein, 9 aa, Homo Sapiens
LLAPIRVLL

SEQ ID NO: 5363 - protein, 9 aa, Homo Sapiens
LLAPISEQI

SEQ ID NO: 5364 - protein, 9 aa, Homo Sapiens
LLAPKLNEA

SEQ ID NO: 5365 - protein, 9 aa, Homo Sapiens
LLAQTTHFL

SEQ ID NO: 5366 - protein, 9 aa, Homo Sapiens
LLASFGDRV

SEQ ID NO: 5367 - protein, 9 aa, Homo Sapiens
LLASLVKRL

SEQ ID NO: 5368 - protein, 9 aa, Homo Sapiens
LLATEIERL

SEQ ID NO: 5369 - protein, 9 aa, Homo Sapiens
LLATKNSHL

SEQ ID NO: 5370 - protein, 9 aa, Homo Sapiens
LLAVQSNKI

SEQ ID NO: 5371 - protein, 9 aa, Homo Sapiens
LLCDIVLHV

SEQ ID NO: 5372 - protein, 9 aa, Homo Sapiens
LLCDLINKL

SEQ ID NO: 5373 - protein, 9 aa, Homo Sapiens
LLCEHAEKL

SEQ ID NO: 5374 - protein, 9 aa, Homo Sapiens
LLCGSLTRL

SEQ ID NO: 5375 - protein, 9 aa, Homo Sapiens
LLCSLVKTI

SEQ ID NO: 5376 - protein, 9 aa, Homo Sapiens
LLDSCTKLL

SEQ ID NO: 5377 - protein, 9 aa, Homo Sapiens
LLEDSCHYL

SEQ ID NO: 5378 - protein, 9 aa, Homo Sapiens
LLFDEYHKL

SEQ ID NO: 5379 - protein, 9 aa, Homo Sapiens
LLFDQNDKV

SEQ ID NO: 5380 - protein, 9 aa, Homo Sapiens
LLFDRPMHV

SEQ ID NO: 5381 - protein, 9 aa, Homo Sapiens
LLFERATFL

SEQ ID NO: 5382 - protein, 9 aa, Homo Sapiens
LLFSHEEEL

SEQ ID NO: 5383 - protein, 9 aa, Homo Sapiens
LLFSKTYKL

SEQ ID NO: 5384 - protein, 9 aa, Homo Sapiens
LLFSKVERL

SEQ ID NO: 5385 - protein, 9 aa, Homo Sapiens
LLGDMEWRL

SEQ ID NO: 5386 - protein, 9 aa, Homo Sapiens
LLGPEGQHL

SEQ ID NO: 5387 - protein, 9 aa, Homo Sapiens
LLGPKPFPL

SEQ ID NO: 5388 - protein, 9 aa, Homo Sapiens
LLGPNGPAV

SEQ ID NO: 5389 - protein, 9 aa, Homo Sapiens
LLGPPPVGV

SEQ ID NO: 5390 - protein, 9 aa, Homo Sapiens
LLGPRLVLA

SEQ ID NO: 5391 - protein, 9 aa, Homo Sapiens
LLGPSIDSV

SEQ ID NO: 5392 - protein, 9 aa, Homo Sapiens
LLGWIQNKI

SEQ ID NO: 5393 - protein, 9 aa, Homo Sapiens
LLHDQIEKL

SEQ ID NO: 5394 - protein, 9 aa, Homo Sapiens
LLHEENFSV

SEQ ID NO: 5395 - protein, 9 aa, Homo Sapiens
LLHEKLYEL

SEQ ID NO: 5396 - protein, 9 aa, Homo Sapiens
LLHERVNEL

SEQ ID NO: 5397 - protein, 9 aa, Homo Sapiens
LLHFQSQFL

SEQ ID NO: 5398 - protein, 9 aa, Homo Sapiens
LLHGHIVEL

SEQ ID NO: 5399 - protein, 9 aa, Homo Sapiens
LLHGLECVV

SEQ ID NO: 5400 - protein, 9 aa, Homo Sapiens
LLHGLNTSL

SEQ ID NO: 5401 - protein, 9 aa, Homo Sapiens
LLHNCVQEL

SEQ ID NO: 5402 - protein, 9 aa, Homo Sapiens
LLHSFVDSV

SEQ ID NO: 5403 - protein, 9 aa, Homo Sapiens
LLIDKTENL

SEQ ID NO: 5404 - protein, 9 aa, Homo Sapiens
LLIEKCNTV

SEQ ID NO: 5405 - protein, 9 aa, Homo Sapiens
LLIGHLERV

SEQ ID NO: 5406 - protein, 9 aa, Homo Sapiens
LLIPGLATA

SEQ ID NO: 5407 - protein, 9 aa, Homo Sapiens
LLISESQKL

SEQ ID NO: 5408 - protein, 9 aa, Homo Sapiens
LLKDCTDSL

SEQ ID NO: 5409 - protein, 9 aa, Homo Sapiens
LLKDSIVQL

SEQ ID NO: 5410 - protein, 9 aa, Homo Sapiens
LLKNHLETL

SEQ ID NO: 5411 - protein, 9 aa, Homo Sapiens
LLKQGQDNL

SEQ ID NO: 5412 - protein, 9 aa, Homo Sapiens
LLMDRVDEM

SEQ ID NO: 5413 - protein, 9 aa, Homo Sapiens
LLMEHIQEI

SEQ ID NO: 5414 - protein, 9 aa, Homo Sapiens
LLMRLLQQL

SEQ ID NO: 5415 - protein, 9 aa, Homo Sapiens
LLNDFEERL

SEQ ID NO: 5416 - protein, 9 aa, Homo Sapiens
LLNDHIYVV

SEQ ID NO: 5417 - protein, 9 aa, Homo Sapiens
LLNDLEARL

SEQ ID NO: 5418 - protein, 9 aa, Homo Sapiens
LLNECREML

SEQ ID NO: 5419 - protein, 9 aa, Homo Sapiens
LLNEILEQV

SEQ ID NO: 5420 - protein, 9 aa, Homo Sapiens
LLNETRDML

SEQ ID NO: 5421 - protein, 9 aa, Homo Sapiens
LLNGMTQKL

SEQ ID NO: 5422 - protein, 9 aa, Homo Sapiens
LLNHRIFQL

SEQ ID NO: 5423 - protein, 9 aa, Homo Sapiens
LLNKAPEYL

SEQ ID NO: 5424 - protein, 9 aa, Homo Sapiens
LLNKEENTL

SEQ ID NO: 5425 - protein, 9 aa, Homo Sapiens
LLNKSIIRV

SEQ ID NO: 5426 - protein, 9 aa, Homo Sapiens
LLNNAFEEL

SEQ ID NO: 5427 - protein, 9 aa, Homo Sapiens
LLNNSDERL

SEQ ID NO: 5428 - protein, 9 aa, Homo Sapiens
LLNPHLRQL

SEQ ID NO: 5429 - protein, 9 aa, Homo Sapiens
LLNPSLQKV

SEQ ID NO: 5430 - protein, 9 aa, Homo Sapiens
LLNSATTSL

SEQ ID NO: 5431 - protein, 9 aa, Homo Sapiens
LLNSEVHML

SEQ ID NO: 5432 - protein, 9 aa, Homo Sapiens
LLNSKEAAL

SEQ ID NO: 5433 - protein, 9 aa, Homo Sapiens
LLPDIISRL

SEQ ID NO: 5434 - protein, 9 aa, Homo Sapiens
LLPDIVTCV

SEQ ID NO: 5435 - protein, 9 aa, Homo Sapiens
LLPDLIQKV

SEQ ID NO: 5436 - protein, 9 aa, Homo Sapiens
LLPDNVHYV

SEQ ID NO: 5437 - protein, 9 aa, Homo Sapiens
LLPEICHFL

SEQ ID NO: 5438 - protein, 9 aa, Homo Sapiens
LLQDHPWLL

SEQ ID NO: 5439 - protein, 9 aa, Homo Sapiens
LLQDKQFEL

SEQ ID NO: 5440 - protein, 9 aa, Homo Sapiens
LLQEKVNQL

SEQ ID NO: 5441 - protein, 9 aa, Homo Sapiens
LLQESLAQA

SEQ ID NO: 5442 - protein, 9 aa, Homo Sapiens
LLQEVEHQL

SEQ ID NO: 5443 - protein, 9 aa, Homo Sapiens
LLREKVEFL

SEQ ID NO: 5444 - protein, 9 aa, Homo Sapiens
LLSAAENFL

SEQ ID NO: 5445 - protein, 9 aa, Homo Sapiens
LLSAAVCRA

SEQ ID NO: 5446 - protein, 9 aa, Homo Sapiens
LLSAEPVPA

SEQ ID NO: 5447 - protein, 9 aa, Homo Sapiens
LLSAIHNSL

SEQ ID NO: 5448 - protein, 9 aa, Homo Sapiens
LLSDCVRHL

SEQ ID NO: 5449 - protein, 9 aa, Homo Sapiens
LLSDIERQI

SEQ ID NO: 5450 - protein, 9 aa, Homo Sapiens
LLSDLTKQI

SEQ ID NO: 5451 - protein, 9 aa, Homo Sapiens
LLSDSSLHL

SEQ ID NO: 5452 - protein, 9 aa, Homo Sapiens
LLSDTVQHL

SEQ ID NO: 5453 - protein, 9 aa, Homo Sapiens
LLSDVRFVL

SEQ ID NO: 5454 - protein, 9 aa, Homo Sapiens
LLSDYGYHL

SEQ ID NO: 5455 - protein, 9 aa, Homo Sapiens
LLSDYIRLI

SEQ ID NO: 5456 - protein, 9 aa, Homo Sapiens
LLSEAVQKI

SEQ ID NO: 5457 - protein, 9 aa, Homo Sapiens
LLSEEEYHL

SEQ ID NO: 5458 - protein, 9 aa, Homo Sapiens
LLSEHVIAI

SEQ ID NO: 5459 - protein, 9 aa, Homo Sapiens
LLSEIEEHL

SEQ ID NO: 5460 - protein, 9 aa, Homo Sapiens
LLSELLEHL

SEQ ID NO: 5461 - protein, 9 aa, Homo Sapiens
LLSESNERL

SEQ ID NO: 5462 - protein, 9 aa, Homo Sapiens
LLSGERVQL

SEQ ID NO: 5463 - protein, 9 aa, Homo Sapiens
LLSGQLNTL

SEQ ID NO: 5464 - protein, 9 aa, Homo Sapiens
LLSGRISTL

SEQ ID NO: 5465 - protein, 9 aa, Homo Sapiens
LLSHVEQLL

SEQ ID NO: 5466 - protein, 9 aa, Homo Sapiens
LLSHVIVAL

SEQ ID NO: 5467 - protein, 9 aa, Homo Sapiens
LLSKAVQCL

SEQ ID NO: 5468 - protein, 9 aa, Homo Sapiens
LLSKFLTNL

SEQ ID NO: 5469 - protein, 9 aa, Homo Sapiens
LLSKSIEQL

SEQ ID NO: 5470 - protein, 9 aa, Homo Sapiens
LLSKVLIYL

SEQ ID NO: 5471 - protein, 9 aa, Homo Sapiens
LLSLIDEKL

SEQ ID NO: 5472 - protein, 9 aa, Homo Sapiens
LLSNLFHGM

SEQ ID NO: 5473 - protein, 9 aa, Homo Sapiens
LLSNLYDKL

SEQ ID NO: 5474 - protein, 9 aa, Homo Sapiens
LLSNNNQAL

SEQ ID NO: 5475 - protein, 9 aa, Homo Sapiens
LLSPHNPAL

SEQ ID NO: 5476 - protein, 9 aa, Homo Sapiens
LLSPHSQVL

SEQ ID NO: 5477 - protein, 9 aa, Homo Sapiens
LLSPSNEKL

SEQ ID NO: 5478 - protein, 9 aa, Homo Sapiens
LLSPTQHHV

SEQ ID NO: 5479 - protein, 9 aa, Homo Sapiens
LLSQAQYHV

SEQ ID NO: 5480 - protein, 9 aa, Homo Sapiens
LLSQSVHYL

SEQ ID NO: 5481 - protein, 9 aa, Homo Sapiens
LLSSHVRGV

SEQ ID NO: 5482 - protein, 9 aa, Homo Sapiens
LLSSIEDKV

SEQ ID NO: 5483 - protein, 9 aa, Homo Sapiens
LLSSIVEEL

SEQ ID NO: 5484 - protein, 9 aa, Homo Sapiens
LLSSVDQPL

SEQ ID NO: 5485 - protein, 9 aa, Homo Sapiens
LLSTVVRTL

SEQ ID NO: 5486 - protein, 9 aa, Homo Sapiens
LLSTYICKV

SEQ ID NO: 5487 - protein, 9 aa, Homo Sapiens
LLTDFCTHL

SEQ ID NO: 5488 - protein, 9 aa, Homo Sapiens
LLTDLQDHL

SEQ ID NO: 5489 - protein, 9 aa, Homo Sapiens
LLTEIRAVV

SEQ ID NO: 5490 - protein, 9 aa, Homo Sapiens
LLTELSNSL

SEQ ID NO: 5491 - protein, 9 aa, Homo Sapiens
LLTEQIHSL

SEQ ID NO: 5492 - protein, 9 aa, Homo Sapiens
LLVGFVHYL

SEQ ID NO: 5493 - protein, 9 aa, Homo Sapiens
LLYPRQEVV

SEQ ID NO: 5494 - protein, 9 aa, Homo Sapiens
LLYYQTNYL

SEQ ID NO: 5495 - protein, 9 aa, Homo Sapiens
LMAHAVTQL

SEQ ID NO: 5496 - protein, 9 aa, Homo Sapiens
LMCKKLTKL

SEQ ID NO: 5497 - protein, 9 aa, Homo Sapiens
LMKDLADEL

SEQ ID NO: 5498 - protein, 9 aa, Homo Sapiens
LMKQYIEFV

SEQ ID NO: 5499 - protein, 9 aa, Homo Sapiens
LMNAVVQTV

SEQ ID NO: 5500 - protein, 9 aa, Homo Sapiens
LMNPMVPGL

SEQ ID NO: 5501 - protein, 9 aa, Homo Sapiens
LMNQMNARL

SEQ ID NO: 5502 - protein, 9 aa, Homo Sapiens
LMSALAARL

SEQ ID NO: 5503 - protein, 9 aa, Homo Sapiens
LMSDLFNKL

SEQ ID NO: 5504 - protein, 9 aa, Homo Sapiens
LMVDHVTEV

SEQ ID NO: 5505 - protein, 9 aa, Homo Sapiens
LNKNLEEKL

SEQ ID NO: 5506 - protein, 9 aa, Homo Sapiens
LSRNHLSSI

SEQ ID NO: 5507 - protein, 9 aa, Homo Sapiens
LTADAHHYL

SEQ ID NO: 5508 - protein, 9 aa, Homo Sapiens
LTNDWEDHL

SEQ ID NO: 5509 - protein, 9 aa, Homo Sapiens
LTRVTLDIL

SEQ ID NO: 5510 - protein, 9 aa, Homo Sapiens
LTSELITHI

SEQ ID NO: 5511 - protein, 9 aa, Homo Sapiens
LTSVINQKL

SEQ ID NO: 5512 - protein, 9 aa, Homo Sapiens
LVAEIITHL

SEQ ID NO: 5513 - protein, 9 aa, Homo Sapiens
LVPEFVHSI

SEQ ID NO: 5514 - protein, 9 aa, Homo Sapiens
LVRTLRVLL

SEQ ID NO: 5515 - protein, 9 aa, Homo Sapiens
LYEKDIEEL

SEQ ID NO: 5516 - protein, 9 aa, Homo Sapiens
LYGPKIDRA

SEQ ID NO: 5517 - protein, 9 aa, Homo Sapiens
MIADIHCMI

SEQ ID NO: 5518 - protein, 9 aa, Homo Sapiens
MIYDSLDYA

SEQ ID NO: 5519 - protein, 9 aa, Homo Sapiens
MLADIPVTI

SEQ ID NO: 5520 - protein, 9 aa, Homo Sapiens
MLAECQENL

SEQ ID NO: 5521 - protein, 9 aa, Homo Sapiens
MLAEMAMKV

SEQ ID NO: 5522 - protein, 9 aa, Homo Sapiens
MLAGFITTL

SEQ ID NO: 5523 - protein, 9 aa, Homo Sapiens
MLAKHVITL

SEQ ID NO: 5524 - protein, 9 aa, Homo Sapiens
MLAKLMSEL

SEQ ID NO: 5525 - protein, 9 aa, Homo Sapiens
MLANDIARL

SEQ ID NO: 5526 - protein, 9 aa, Homo Sapiens
MLANKNASL

SEQ ID NO: 5527 - protein, 9 aa, Homo Sapiens
MLAQDSHLL

SEQ ID NO: 5528 - protein, 9 aa, Homo Sapiens
MLASAVEKL

SEQ ID NO: 5529 - protein, 9 aa, Homo Sapiens
MLASMFHSL

SEQ ID NO: 5530 - protein, 9 aa, Homo Sapiens
MLATRVFSL

SEQ ID NO: 5531 - protein, 9 aa, Homo Sapiens
MLAWINESL

SEQ ID NO: 5532 - protein, 9 aa, Homo Sapiens
MLFTGGYGL

SEQ ID NO: 5533 - protein, 9 aa, Homo Sapiens
MLHEKTSKL

SEQ ID NO: 5534 - protein, 9 aa, Homo Sapiens
MLHSKLSQL

SEQ ID NO: 5535 - protein, 9 aa, Homo Sapiens
MLHTVTDMV

SEQ ID NO: 5536 - protein, 9 aa, Homo Sapiens
MLIEDVDAL

SEQ ID NO: 5537 - protein, 9 aa, Homo Sapiens
MLIQENQEL

SEQ ID NO: 5538 - protein, 9 aa, Homo Sapiens
MLMTVIYLL

SEQ ID NO: 5539 - protein, 9 aa, Homo Sapiens
MLNEHDFEV

SEQ ID NO: 5540 - protein, 9 aa, Homo Sapiens
MLPGFLHRL

SEQ ID NO: 5541 - protein, 9 aa, Homo Sapiens
MLPSILNQL

SEQ ID NO: 5542 - protein, 9 aa, Homo Sapiens
MLRNACERL

SEQ ID NO: 5543 - protein, 9 aa, Homo Sapiens
MLSAIQSEV

SEQ ID NO: 5544 - protein, 9 aa, Homo Sapiens
MLSDNTAKL

SEQ ID NO: 5545 - protein, 9 aa, Homo Sapiens
MLSDRLTFL

SEQ ID NO: 5546 - protein, 9 aa, Homo Sapiens
MLSEHTSKL

SEQ ID NO: 5547 - protein, 9 aa, Homo Sapiens
MLSESSSFL

SEQ ID NO: 5548 - protein, 9 aa, Homo Sapiens
MLSQLIQQL

SEQ ID NO: 5549 - protein, 9 aa, Homo Sapiens
MLSRIEKQL

SEQ ID NO: 5550 - protein, 9 aa, Homo Sapiens
MLSSIKCVL

SEQ ID NO: 5551 - protein, 9 aa, Homo Sapiens
MLSVAEHFL

SEQ ID NO: 5552 - protein, 9 aa, Homo Sapiens
MLTEIEHKV

SEQ ID NO: 5553 - protein, 9 aa, Homo Sapiens
MLYEKLLTA

SEQ ID NO: 5554 - protein, 9 aa, Homo Sapiens
MMADMYNRM

SEQ ID NO: 5555 - protein, 9 aa, Homo Sapiens
MMNEKLDQL

SEQ ID NO: 5556 - protein, 9 aa, Homo Sapiens
MMSQKIQQL

SEQ ID NO: 5557 - protein, 9 aa, Homo Sapiens
MTSEIHNTV

SEQ ID NO: 5558 - protein, 9 aa, Homo Sapiens
MTSNIVQCL

SEQ ID NO: 5559 - protein, 9 aa, Homo Sapiens
MVAEILHHL

SEQ ID NO: 5560 - protein, 9 aa, Homo Sapiens
NIAETLHFL

SEQ ID NO: 5561 - protein, 9 aa, Homo Sapiens
NITELVNYL

SEQ ID NO: 5562 - protein, 9 aa, Homo Sapiens
NLAAATDQL

SEQ ID NO: 5563 - protein, 9 aa, Homo Sapiens
NLAEAQQKL

SEQ ID NO: 5564 - protein, 9 aa, Homo Sapiens
NLAEDIMRL

SEQ ID NO: 5565 - protein, 9 aa, Homo Sapiens
NLAEKPKTV

SEQ ID NO: 5566 - protein, 9 aa, Homo Sapiens
NLAENISRV

SEQ ID NO: 5567 - protein, 9 aa, Homo Sapiens
NLAEQHLGL

SEQ ID NO: 5568 - protein, 9 aa, Homo Sapiens
NLAGISERL

SEQ ID NO: 5569 - protein, 9 aa, Homo Sapiens
NLAGVYSEV

SEQ ID NO: 5570 - protein, 9 aa, Homo Sapiens
NLAHKTYSL

SEQ ID NO: 5571 - protein, 9 aa, Homo Sapiens
NLAKCIVSV

SEQ ID NO: 5572 - protein, 9 aa, Homo Sapiens
NLAKFNQVL

SEQ ID NO: 5573 - protein, 9 aa, Homo Sapiens
NLAKITQQM

SEQ ID NO: 5574 - protein, 9 aa, Homo Sapiens
NLAPFNTAL

SEQ ID NO: 5575 - protein, 9 aa, Homo Sapiens
NLASFIEQV

SEQ ID NO: 5576 - protein, 9 aa, Homo Sapiens
NLASKIEEA

SEQ ID NO: 5577 - protein, 9 aa, Homo Sapiens
NLCGINQKL

SEQ ID NO: 5578 - protein, 9 aa, Homo Sapiens
NLCRSNQLL

SEQ ID NO: 5579 - protein, 9 aa, Homo Sapiens
NLFHYLTEV

SEQ ID NO: 5580 - protein, 9 aa, Homo Sapiens
NLFKHLAKA

SEQ ID NO: 5581 - protein, 9 aa, Homo Sapiens
NLFKKVYLL

SEQ ID NO: 5582 - protein, 9 aa, Homo Sapiens
NLISALEEA

SEQ ID NO: 5583 - protein, 9 aa, Homo Sapiens
NLKEAIETI

SEQ ID NO: 5584 - protein, 9 aa, Homo Sapiens
NLKEGLQYL

SEQ ID NO: 5585 - protein, 9 aa, Homo Sapiens
NLMEIVKKL

SEQ ID NO: 5586 - protein, 9 aa, Homo Sapiens
NLNEKINHL

SEQ ID NO: 5587 - protein, 9 aa, Homo Sapiens
NLNGTLHEL

SEQ ID NO: 5588 - protein, 9 aa, Homo Sapiens
NLPAFVNRL

SEQ ID NO: 5589 - protein, 9 aa, Homo Sapiens
NLSDIQNVL

SEQ ID NO: 5590 - protein, 9 aa, Homo Sapiens
NLSDLLEKL

SEQ ID NO: 5591 - protein, 9 aa, Homo Sapiens
NLSDMVHKI

SEQ ID NO: 5592 - protein, 9 aa, Homo Sapiens
NLSEIESRL

SEQ ID NO: 5593 - protein, 9 aa, Homo Sapiens
NLSNFLIHL

SEQ ID NO: 5594 - protein, 9 aa, Homo Sapiens
NLSSIRAML

SEQ ID NO: 5595 - protein, 9 aa, Homo Sapiens
NLSSITSHL

SEQ ID NO: 5596 - protein, 9 aa, Homo Sapiens
NLSTIKQLL

SEQ ID NO: 5597 - protein, 9 aa, Homo Sapiens
NLSTKTEAV

SEQ ID NO: 5598 - protein, 9 aa, Homo Sapiens
NLTDICTQL

SEQ ID NO: 5599 - protein, 9 aa, Homo Sapiens
NLVEKTPAL

SEQ ID NO: 5600 - protein, 9 aa, Homo Sapiens
NLVTFGHSL

SEQ ID NO: 5601 - protein, 9 aa, Homo Sapiens
NLYGLLHGL

SEQ ID NO: 5602 - protein, 9 aa, Homo Sapiens
NLYPETFAL

SEQ ID NO: 5603 - protein, 9 aa, Homo Sapiens
NLYPGCENV

SEQ ID NO: 5604 - protein, 9 aa, Homo Sapiens
NMAAFTTTL

SEQ ID NO: 5605 - protein, 9 aa, Homo Sapiens
NMAEIMAKA

SEQ ID NO: 5606 - protein, 9 aa, Homo Sapiens
NMASFVRQL

SEQ ID NO: 5607 - protein, 9 aa, Homo Sapiens
NMSEFVCNL

SEQ ID NO: 5608 - protein, 9 aa, Homo Sapiens
NQAVILYHL

SEQ ID NO: 5609 - protein, 9 aa, Homo Sapiens
NTAEIQHCL

SEQ ID NO: 5610 - protein, 9 aa, Homo Sapiens
NVIERLQEA

SEQ ID NO: 5611 - protein, 9 aa, Homo Sapiens
PLAPFNQLL

SEQ ID NO: 5612 - protein, 9 aa, Homo Sapiens
PLGPAPVSV

SEQ ID NO: 5613 - protein, 9 aa, Homo Sapiens
QAADLAYQL

SEQ ID NO: 5614 - protein, 9 aa, Homo Sapiens
QIADLQQKL

SEQ ID NO: 5615 - protein, 9 aa, Homo Sapiens
QLAAYRDLL

SEQ ID NO: 5616 - protein, 9 aa, Homo Sapiens
QLAESVDVL

SEQ ID NO: 5617 - protein, 9 aa, Homo Sapiens
QLAGFSHQI

SEQ ID NO: 5618 - protein, 9 aa, Homo Sapiens
QLAGLQQEL

SEQ ID NO: 5619 - protein, 9 aa, Homo Sapiens
QLALVIARL

SEQ ID NO: 5620 - protein, 9 aa, Homo Sapiens
QLANFCRIL

SEQ ID NO: 5621 - protein, 9 aa, Homo Sapiens
QLANFQEML

SEQ ID NO: 5622 - protein, 9 aa, Homo Sapiens
QLAPIWDKL

SEQ ID NO: 5623 - protein, 9 aa, Homo Sapiens
QLAPVFQRV

SEQ ID NO: 5624 - protein, 9 aa, Homo Sapiens
QLAQFVHEV

SEQ ID NO: 5625 - protein, 9 aa, Homo Sapiens
QLAWFDTDL

SEQ ID NO: 5626 - protein, 9 aa, Homo Sapiens
QLCDLETKL

SEQ ID NO: 5627 - protein, 9 aa, Homo Sapiens
QLCDLNAEL

SEQ ID NO: 5628 - protein, 9 aa, Homo Sapiens
QLCEDIIQL

SEQ ID NO: 5629 - protein, 9 aa, Homo Sapiens
QLFETDHNL

SEQ ID NO: 5630 - protein, 9 aa, Homo Sapiens
QLFSEIHNL

SEQ ID NO: 5631 - protein, 9 aa, Homo Sapiens
QLHEKTSQL

SEQ ID NO: 5632 - protein, 9 aa, Homo Sapiens
QLIDIIHTA

SEQ ID NO: 5633 - protein, 9 aa, Homo Sapiens
QLIDKVWQL

SEQ ID NO: 5634 - protein, 9 aa, Homo Sapiens
QLIDLDHKL

SEQ ID NO: 5635 - protein, 9 aa, Homo Sapiens
QLIDYERQL

SEQ ID NO: 5636 - protein, 9 aa, Homo Sapiens
QLKHKLEQL

SEQ ID NO: 5637 - protein, 9 aa, Homo Sapiens
QLMEQVAQL

SEQ ID NO: 5638 - protein, 9 aa, Homo Sapiens
QLMGEIAKA

SEQ ID NO: 5639 - protein, 9 aa, Homo Sapiens
QLNDVAHLV

SEQ ID NO: 5640 - protein, 9 aa, Homo Sapiens
QLNEKVAQL

SEQ ID NO: 5641 - protein, 9 aa, Homo Sapiens
QLNELQAQL

SEQ ID NO: 5642 - protein, 9 aa, Homo Sapiens
QLNEQLVTL

SEQ ID NO: 5643 - protein, 9 aa, Homo Sapiens
QLNEQVHSL

SEQ ID NO: 5644 - protein, 9 aa, Homo Sapiens
QLNETLTKL

SEQ ID NO: 5645 - protein, 9 aa, Homo Sapiens
QLNEVIEKL

SEQ ID NO: 5646 - protein, 9 aa, Homo Sapiens
QLNRYIEKL

SEQ ID NO: 5647 - protein, 9 aa, Homo Sapiens
QLNTKVAKL

SEQ ID NO: 5648 - protein, 9 aa, Homo Sapiens
QLNVVIHQL

SEQ ID NO: 5649 - protein, 9 aa, Homo Sapiens
QLREQSEQL

SEQ ID NO: 5650 - protein, 9 aa, Homo Sapiens
QLRNVIERL

SEQ ID NO: 5651 - protein, 9 aa, Homo Sapiens
QLSDVAEKL

SEQ ID NO: 5652 - protein, 9 aa, Homo Sapiens
QLSEIPAEL

SEQ ID NO: 5653 - protein, 9 aa, Homo Sapiens
QLSEVFIQL

SEQ ID NO: 5654 - protein, 9 aa, Homo Sapiens
QLSPVLLYL

SEQ ID NO: 5655 - protein, 9 aa, Homo Sapiens
QLSQLQKQL

SEQ ID NO: 5656 - protein, 9 aa, Homo Sapiens
QLSQVLHRL

SEQ ID NO: 5657 - protein, 9 aa, Homo Sapiens
QLSSYEDKL

SEQ ID NO: 5658 - protein, 9 aa, Homo Sapiens
QLSTIRSFL

SEQ ID NO: 5659 - protein, 9 aa, Homo Sapiens
QLSTVITQV

SEQ ID NO: 5660 - protein, 9 aa, Homo Sapiens
QLSWLINRL

SEQ ID NO: 5661 - protein, 9 aa, Homo Sapiens
QLVDFQWKL

SEQ ID NO: 5662 - protein, 9 aa, Homo Sapiens
QLVDIIEKV

SEQ ID NO: 5663 - protein, 9 aa, Homo Sapiens
QLYEGKEQM

SEQ ID NO: 5664 - protein, 9 aa, Homo Sapiens
QLYLKLWNL

SEQ ID NO: 5665 - protein, 9 aa, Homo Sapiens
QMAEIAVNA

SEQ ID NO: 5666 - protein, 9 aa, Homo Sapiens
QMAELHSKL

SEQ ID NO: 5667 - protein, 9 aa, Homo Sapiens
QMAGLLARL

SEQ ID NO: 5668 - protein, 9 aa, Homo Sapiens
QMAKLNQQM

SEQ ID NO: 5669 - protein, 9 aa, Homo Sapiens
QMAQIVERL

SEQ ID NO: 5670 - protein, 9 aa, Homo Sapiens
QMISRIEYV

SEQ ID NO: 5671 - protein, 9 aa, Homo Sapiens
QMSEIEAKV

SEQ ID NO: 5672 - protein, 9 aa, Homo Sapiens
QMSEQVHTL

SEQ ID NO: 5673 - protein, 9 aa, Homo Sapiens
QQKAALQEL

SEQ ID NO: 5674 - protein, 9 aa, Homo Sapiens
QVCAIIERV

SEQ ID NO: 5675 - protein, 9 aa, Homo Sapiens
QVSNLIHYL

SEQ ID NO: 5676 - protein, 9 aa, Homo Sapiens
RAADVLVYL

SEQ ID NO: 5677 - protein, 9 aa, Homo Sapiens
RFPGLNENL

SEQ ID NO: 5678 - protein, 9 aa, Homo Sapiens
RIAEFTTNL

SEQ ID NO: 5679 - protein, 9 aa, Homo Sapiens
RIAELLTEL

SEQ ID NO: 5680 - protein, 9 aa, Homo Sapiens
RIAEYAFKL

SEQ ID NO: 5681 - protein, 9 aa, Homo Sapiens
RIALYCHQL

SEQ ID NO: 5682 - protein, 9 aa, Homo Sapiens
RIIDTVAQV

SEQ ID NO: 5683 - protein, 9 aa, Homo Sapiens
RISPLCHNL

SEQ ID NO: 5684 - protein, 9 aa, Homo Sapiens
RISTINILL

SEQ ID NO: 5685 - protein, 9 aa, Homo Sapiens
RLAACVNLI

SEQ ID NO: 5686 - protein, 9 aa, Homo Sapiens
RLAAFYSQV

SEQ ID NO: 5687 - protein, 9 aa, Homo Sapiens
RLAAIKNAM

SEQ ID NO: 5688 - protein, 9 aa, Homo Sapiens
RLAALEQNV

SEQ ID NO: 5689 - protein, 9 aa, Homo Sapiens
RLAALQHRL

SEQ ID NO: 5690 - protein, 9 aa, Homo Sapiens
RLAAMANNL

SEQ ID NO: 5691 - protein, 9 aa, Homo Sapiens
RLAAYISGL

SEQ ID NO: 5692 - protein, 9 aa, Homo Sapiens
RLADKSVLV

SEQ ID NO: 5693 - protein, 9 aa, Homo Sapiens
RLAEHIVSM

SEQ ID NO: 5694 - protein, 9 aa, Homo Sapiens
RLAELEEFI

SEQ ID NO: 5695 - protein, 9 aa, Homo Sapiens
RLAELERKL

SEQ ID NO: 5696 - protein, 9 aa, Homo Sapiens
RLAELQEQL

SEQ ID NO: 5697 - protein, 9 aa, Homo Sapiens
RLAEMCRSL

SEQ ID NO: 5698 - protein, 9 aa, Homo Sapiens
RLAEPSQML

SEQ ID NO: 5699 - protein, 9 aa, Homo Sapiens
RLAEQIATL

SEQ ID NO: 5700 - protein, 9 aa, Homo Sapiens
RLAEQQPLL

SEQ ID NO: 5701 - protein, 9 aa, Homo Sapiens
RLAETQEEI

SEQ ID NO: 5702 - protein, 9 aa, Homo Sapiens
RLAEVEEKL

SEQ ID NO: 5703 - protein, 9 aa, Homo Sapiens
RLAEVKDSL

SEQ ID NO: 5704 - protein, 9 aa, Homo Sapiens
RLAEVKGNL

SEQ ID NO: 5705 - protein, 9 aa, Homo Sapiens
RLAEVNTKL

SEQ ID NO: 5706 - protein, 9 aa, Homo Sapiens
RLAEVVHEL

SEQ ID NO: 5707 - protein, 9 aa, Homo Sapiens
RLAHHLVAL

SEQ ID NO: 5708 - protein, 9 aa, Homo Sapiens
RLAHVGPRL

SEQ ID NO: 5709 - protein, 9 aa, Homo Sapiens
RLAHYIDRV

SEQ ID NO: 5710 - protein, 9 aa, Homo Sapiens
RLAKKLQQL

SEQ ID NO: 5711 - protein, 9 aa, Homo Sapiens
RLAKLNKEL

SEQ ID NO: 5712 - protein, 9 aa, Homo Sapiens
RLAKVVKTL

SEQ ID NO: 5713 - protein, 9 aa, Homo Sapiens
RLAKYNQLL

SEQ ID NO: 5714 - protein, 9 aa, Homo Sapiens
RLALVISEL

SEQ ID NO: 5715 - protein, 9 aa, Homo Sapiens
RLAPAQWFL

SEQ ID NO: 5716 - protein, 9 aa, Homo Sapiens
RLAPTLSQL

SEQ ID NO: 5717 - protein, 9 aa, Homo Sapiens
RLAPYIIDL

SEQ ID NO: 5718 - protein, 9 aa, Homo Sapiens
RLAQEAVTL

SEQ ID NO: 5719 - protein, 9 aa, Homo Sapiens
RLAQHITYV

SEQ ID NO: 5720 - protein, 9 aa, Homo Sapiens
RLAQICSSI

SEQ ID NO: 5721 - protein, 9 aa, Homo Sapiens
RLASMATLL

SEQ ID NO: 5722 - protein, 9 aa, Homo Sapiens
RLASVAQEL

SEQ ID NO: 5723 - protein, 9 aa, Homo Sapiens
RLATALQKL

SEQ ID NO: 5724 - protein, 9 aa, Homo Sapiens
RLATKYHTV

SEQ ID NO: 5725 - protein, 9 aa, Homo Sapiens
RLATLNEKL

SEQ ID NO: 5726 - protein, 9 aa, Homo Sapiens
RLAVYIDKV

SEQ ID NO: 5727 - protein, 9 aa, Homo Sapiens
RLAVYIDRV

SEQ ID NO: 5728 - protein, 9 aa, Homo Sapiens
RLCEIFTRM

SEQ ID NO: 5729 - protein, 9 aa, Homo Sapiens
RLCPLVEHL

SEQ ID NO: 5730 - protein, 9 aa, Homo Sapiens
RLFAVLEQL

SEQ ID NO: 5731 - protein, 9 aa, Homo Sapiens
RLFDEPQLA

SEQ ID NO: 5732 - protein, 9 aa, Homo Sapiens
RLFEGNALL

SEQ ID NO: 5733 - protein, 9 aa, Homo Sapiens
RLFESINNL

SEQ ID NO: 5734 - protein, 9 aa, Homo Sapiens
RLFESSQYL

SEQ ID NO: 5735 - protein, 9 aa, Homo Sapiens
RLFEVPHEL

SEQ ID NO: 5736 - protein, 9 aa, Homo Sapiens
RLFHKTVYL

SEQ ID NO: 5737 - protein, 9 aa, Homo Sapiens
RLFPGSSFL

SEQ ID NO: 5738 - protein, 9 aa, Homo Sapiens
RLFTQEYIL

SEQ ID NO: 5739 - protein, 9 aa, Homo Sapiens
RLGPPPSHA

SEQ ID NO: 5740 - protein, 9 aa, Homo Sapiens
RLGPSVVGL

SEQ ID NO: 5741 - protein, 9 aa, Homo Sapiens
RLGPVPPGL

SEQ ID NO: 5742 - protein, 9 aa, Homo Sapiens
RLGPVPSGL

SEQ ID NO: 5743 - protein, 9 aa, Homo Sapiens
RLGSVNENL

SEQ ID NO: 5744 - protein, 9 aa, Homo Sapiens
RLHDVLMEL

SEQ ID NO: 5745 - protein, 9 aa, Homo Sapiens
RLIDLHTNV

SEQ ID NO: 5746 - protein, 9 aa, Homo Sapiens
RLIEEENML

SEQ ID NO: 5747 - protein, 9 aa, Homo Sapiens
RLIEHCDHI

SEQ ID NO: 5748 - protein, 9 aa, Homo Sapiens
RLIEQEEYL

SEQ ID NO: 5749 - protein, 9 aa, Homo Sapiens
RLIESLFTI

SEQ ID NO: 5750 - protein, 9 aa, Homo Sapiens
RLKEKVDSL

SEQ ID NO: 5751 - protein, 9 aa, Homo Sapiens
RLKPALETL

SEQ ID NO: 5752 - protein, 9 aa, Homo Sapiens
RLKPEIQCV

SEQ ID NO: 5753 - protein, 9 aa, Homo Sapiens
RLKQEIERL

SEQ ID NO: 5754 - protein, 9 aa, Homo Sapiens
RLMEICESL

SEQ ID NO: 5755 - protein, 9 aa, Homo Sapiens
RLMNDMTAV

SEQ ID NO: 5756 - protein, 9 aa, Homo Sapiens
RLMNETTAV

SEQ ID NO: 5757 - protein, 9 aa, Homo Sapiens
RLNDGNEYL

SEQ ID NO: 5758 - protein, 9 aa, Homo Sapiens
RLNDTIQLL

SEQ ID NO: 5759 - protein, 9 aa, Homo Sapiens
RLNEAAVTV

SEQ ID NO: 5760 - protein, 9 aa, Homo Sapiens
RLNEIEAAL

SEQ ID NO: 5761 - protein, 9 aa, Homo Sapiens
RLNEKHDFL

SEQ ID NO: 5762 - protein, 9 aa, Homo Sapiens
RLNEKNYEL

SEQ ID NO: 5763 - protein, 9 aa, Homo Sapiens
RLNEVIRTL

SEQ ID NO: 5764 - protein, 9 aa, Homo Sapiens
RLNKKVVLL

SEQ ID NO: 5765 - protein, 9 aa, Homo Sapiens
RLNKVISEL

SEQ ID NO: 5766 - protein, 9 aa, Homo Sapiens
RLNSRIEHL

SEQ ID NO: 5767 - protein, 9 aa, Homo Sapiens
RLPEIYIQL

SEQ ID NO: 5768 - protein, 9 aa, Homo Sapiens
RLREVSEKL

SEQ ID NO: 5769 - protein, 9 aa, Homo Sapiens
RLSDAQIYV

SEQ ID NO: 5770 - protein, 9 aa, Homo Sapiens
RLSDFTESL

SEQ ID NO: 5771 - protein, 9 aa, Homo Sapiens
RLSDLYHRL

SEQ ID NO: 5772 - protein, 9 aa, Homo Sapiens
RLSDTVDKL

SEQ ID NO: 5773 - protein, 9 aa, Homo Sapiens
RLSDVQIYV

SEQ ID NO: 5774 - protein, 9 aa, Homo Sapiens
RLSDYLFTL

SEQ ID NO: 5775 - protein, 9 aa, Homo Sapiens
RLSEEIDQL

SEQ ID NO: 5776 - protein, 9 aa, Homo Sapiens
RLSETDFKV

SEQ ID NO: 5777 - protein, 9 aa, Homo Sapiens
RLSETVDKL

SEQ ID NO: 5778 - protein, 9 aa, Homo Sapiens
RLSEVQASL

SEQ ID NO: 5779 - protein, 9 aa, Homo Sapiens
RLSINTQLL

SEQ ID NO: 5780 - protein, 9 aa, Homo Sapiens
RLSPIENFL

SEQ ID NO: 5781 - protein, 9 aa, Homo Sapiens
RLSPVSPAL

SEQ ID NO: 5782 - protein, 9 aa, Homo Sapiens
RLSSVNAEV

SEQ ID NO: 5783 - protein, 9 aa, Homo Sapiens
RLSTALARL

SEQ ID NO: 5784 - protein, 9 aa, Homo Sapiens
RLSVSTETL

SEQ ID NO: 5785 - protein, 9 aa, Homo Sapiens
RLTDYVAFL

SEQ ID NO: 5786 - protein, 9 aa, Homo Sapiens
RLTEYIHCL

SEQ ID NO: 5787 - protein, 9 aa, Homo Sapiens
RLVEIQYEL

SEQ ID NO: 5788 - protein, 9 aa, Homo Sapiens
RLYHITDQV

SEQ ID NO: 5789 - protein, 9 aa, Homo Sapiens
RLYQECEKL

SEQ ID NO: 5790 - protein, 9 aa, Homo Sapiens
RLYSVSYLL

SEQ ID NO: 5791 - protein, 9 aa, Homo Sapiens
RMADLSELL

SEQ ID NO: 5792 - protein, 9 aa, Homo Sapiens
RMADSTTML

SEQ ID NO: 5793 - protein, 9 aa, Homo Sapiens
RMASRVDAV

SEQ ID NO: 5794 - protein, 9 aa, Homo Sapiens
RMAVLNEQV

SEQ ID NO: 5795 - protein, 9 aa, Homo Sapiens
RMIDIQTRM

SEQ ID NO: 5796 - protein, 9 aa, Homo Sapiens
RMKEFLDSL

SEQ ID NO: 5797 - protein, 9 aa, Homo Sapiens
RMNEAVQAL

SEQ ID NO: 5798 - protein, 9 aa, Homo Sapiens
RMSDDVHSL

SEQ ID NO: 5799 - protein, 9 aa, Homo Sapiens
RQADKVWRL

SEQ ID NO: 5800 - protein, 9 aa, Homo Sapiens
RQIDKIQCA

SEQ ID NO: 5801 - protein, 9 aa, Homo Sapiens
RVADILTQL

SEQ ID NO: 5802 - protein, 9 aa, Homo Sapiens
RVSELQVLL

SEQ ID NO: 5803 - protein, 9 aa, Homo Sapiens
SAADLVHFL

SEQ ID NO: 5804 - protein, 9 aa, Homo Sapiens
SAAELNYGL

SEQ ID NO: 5805 - protein, 9 aa, Homo Sapiens
SDPFTHLAP

SEQ ID NO: 5806 - protein, 9 aa, Homo Sapiens
SIAAFIQRL

SEQ ID NO: 5807 - protein, 9 aa, Homo Sapiens
SIAECLTYL

SEQ ID NO: 5808 - protein, 9 aa, Homo Sapiens
SIAEMGAYV

SEQ ID NO: 5809 - protein, 9 aa, Homo Sapiens
SIAEQAHEL

SEQ ID NO: 5810 - protein, 9 aa, Homo Sapiens
SIAEVSQNL

SEQ ID NO: 5811 - protein, 9 aa, Homo Sapiens
SIAEVVHQL

SEQ ID NO: 5812 - protein, 9 aa, Homo Sapiens
SIAGIFKEV

SEQ ID NO: 5813 - protein, 9 aa, Homo Sapiens
SICGTLHSV

SEQ ID NO: 5814 - protein, 9 aa, Homo Sapiens
SIFEFVHAL

SEQ ID NO: 5815 - protein, 9 aa, Homo Sapiens
SIHDLEQRI

SEQ ID NO: 5816 - protein, 9 aa, Homo Sapiens
SIHEFCINL

SEQ ID NO: 5817 - protein, 9 aa, Homo Sapiens
SIPEINHRL

SEQ ID NO: 5818 - protein, 9 aa, Homo Sapiens
SIPELQNFL

SEQ ID NO: 5819 - protein, 9 aa, Homo Sapiens
SISDVIAQV

SEQ ID NO: 5820 - protein, 9 aa, Homo Sapiens
SISELSARL

SEQ ID NO: 5821 - protein, 9 aa, Homo Sapiens
SLAADIPRL

SEQ ID NO: 5822 - protein, 9 aa, Homo Sapiens
SLADCIPLL

SEQ ID NO: 5823 - protein, 9 aa, Homo Sapiens
SLADFEKAL

SEQ ID NO: 5824 - protein, 9 aa, Homo Sapiens
SLADFMQEV

SEQ ID NO: 5825 - protein, 9 aa, Homo Sapiens
SLADHEYTA

SEQ ID NO: 5826 - protein, 9 aa, Homo Sapiens
SLADIAQKL

SEQ ID NO: 5827 - protein, 9 aa, Homo Sapiens
SLADIKESM

SEQ ID NO: 5828 - protein, 9 aa, Homo Sapiens
SLADLYFRA

SEQ ID NO: 5829 - protein, 9 aa, Homo Sapiens
SLADSLYNL

SEQ ID NO: 5830 - protein, 9 aa, Homo Sapiens
SLADVHIEV

SEQ ID NO: 5831 - protein, 9 aa, Homo Sapiens
SLAEEHEGL

SEQ ID NO: 5832 - protein, 9 aa, Homo Sapiens
SLAEETRAL

SEQ ID NO: 5833 - protein, 9 aa, Homo Sapiens
SLAEFVQSL

SEQ ID NO: 5834 - protein, 9 aa, Homo Sapiens
SLAEGRLYL

SEQ ID NO: 5835 - protein, 9 aa, Homo Sapiens
SLAEHHEVL

SEQ ID NO: 5836 - protein, 9 aa, Homo Sapiens
SLAEHQANL

SEQ ID NO: 5837 - protein, 9 aa, Homo Sapiens
SLAEIFKVL

SEQ ID NO: 5838 - protein, 9 aa, Homo Sapiens
SLAEIHSNM

SEQ ID NO: 5839 - protein, 9 aa, Homo Sapiens
SLAEKETHL

SEQ ID NO: 5840 - protein, 9 aa, Homo Sapiens
SLAEKIQAL

SEQ ID NO: 5841 - protein, 9 aa, Homo Sapiens
SLAELDEKI

SEQ ID NO: 5842 - protein, 9 aa, Homo Sapiens
SLAELEKRL

SEQ ID NO: 5843 - protein, 9 aa, Homo Sapiens
SLAELIQAL

SEQ ID NO: 5844 - protein, 9 aa, Homo Sapiens
SLAELRNQM

SEQ ID NO: 5845 - protein, 9 aa, Homo Sapiens
SLAERSSLL

SEQ ID NO: 5846 - protein, 9 aa, Homo Sapiens
SLAERVDRL

SEQ ID NO: 5847 - protein, 9 aa, Homo Sapiens
SLAESLDQA

SEQ ID NO: 5848 - protein, 9 aa, Homo Sapiens
SLAEVLQQL

SEQ ID NO: 5849 - protein, 9 aa, Homo Sapiens
SLAEVNTQL

SEQ ID NO: 5850 - protein, 9 aa, Homo Sapiens
SLAEVQCHL

SEQ ID NO: 5851 - protein, 9 aa, Homo Sapiens
SLAGKIQKL

SEQ ID NO: 5852 - protein, 9 aa, Homo Sapiens
SLAGNTYQL

SEQ ID NO: 5853 - protein, 9 aa, Homo Sapiens
SLAGQTYAV

SEQ ID NO: 5854 - protein, 9 aa, Homo Sapiens
SLAKALCYI

SEQ ID NO: 5855 - protein, 9 aa, Homo Sapiens
SLAKIPATL

SEQ ID NO: 5856 - protein, 9 aa, Homo Sapiens
SLAKIYTEA

SEQ ID NO: 5857 - protein, 9 aa, Homo Sapiens
SLAKTISKI

SEQ ID NO: 5858 - protein, 9 aa, Homo Sapiens
SLANETHQL

SEQ ID NO: 5859 - protein, 9 aa, Homo Sapiens
SLANIIRQL

SEQ ID NO: 5860 - protein, 9 aa, Homo Sapiens
SLAPHFNSL

SEQ ID NO: 5861 - protein, 9 aa, Homo Sapiens
SLAPIIVHV

SEQ ID NO: 5862 - protein, 9 aa, Homo Sapiens
SLAPLFFKL

SEQ ID NO: 5863 - protein, 9 aa, Homo Sapiens
SLAPLKEEL

SEQ ID NO: 5864 - protein, 9 aa, Homo Sapiens
SLAPYRDYL

SEQ ID NO: 5865 - protein, 9 aa, Homo Sapiens
SLAQALQEL

SEQ ID NO: 5866 - protein, 9 aa, Homo Sapiens
SLAQMVSGL

SEQ ID NO: 5867 - protein, 9 aa, Homo Sapiens
SLAQYLINA

SEQ ID NO: 5868 - protein, 9 aa, Homo Sapiens
SLAQYLINV

SEQ ID NO: 5869 - protein, 9 aa, Homo Sapiens
SLAQYNPKL

SEQ ID NO: 5870 - protein, 9 aa, Homo Sapiens
SLARHLMTL

SEQ ID NO: 5871 - protein, 9 aa, Homo Sapiens
SLARILSLL

SEQ ID NO: 5872 - protein, 9 aa, Homo Sapiens
SLASCLSRL

SEQ ID NO: 5873 - protein, 9 aa, Homo Sapiens
SLASHDSTL

SEQ ID NO: 5874 - protein, 9 aa, Homo Sapiens
SLASHIQSL

SEQ ID NO: 5875 - protein, 9 aa, Homo Sapiens
SLASIQELL

SEQ ID NO: 5876 - protein, 9 aa, Homo Sapiens
SLASKLSRL

SEQ ID NO: 5877 - protein, 9 aa, Homo Sapiens
SLASLTEKI

SEQ ID NO: 5878 - protein, 9 aa, Homo Sapiens
SLASTLSKL

SEQ ID NO: 5879 - protein, 9 aa, Homo Sapiens
SLATHLQEL

SEQ ID NO: 5880 - protein, 9 aa, Homo Sapiens
SLATHVKKL

SEQ ID NO: 5881 - protein, 9 aa, Homo Sapiens
SLATMIDRI

SEQ ID NO: 5882 - protein, 9 aa, Homo Sapiens
SLATRISTL

SEQ ID NO: 5883 - protein, 9 aa, Homo Sapiens
SLATSLPRL

SEQ ID NO: 5884 - protein, 9 aa, Homo Sapiens
SLATVKKQL

SEQ ID NO: 5885 - protein, 9 aa, Homo Sapiens
SLAVDSSFL

SEQ ID NO: 5886 - protein, 9 aa, Homo Sapiens
SLAVHTDKV

SEQ ID NO: 5887 - protein, 9 aa, Homo Sapiens
SLAVSSPRL

SEQ ID NO: 5888 - protein, 9 aa, Homo Sapiens
SLAWDVPAA

SEQ ID NO: 5889 - protein, 9 aa, Homo Sapiens
SLCDLKSRL

SEQ ID NO: 5890 - protein, 9 aa, Homo Sapiens
SLCHLDLQL

SEQ ID NO: 5891 - protein, 9 aa, Homo Sapiens
SLCHVLPDL

SEQ ID NO: 5892 - protein, 9 aa, Homo Sapiens
SLCNSIISL

SEQ ID NO: 5893 - protein, 9 aa, Homo Sapiens
SLCPDLMEI

SEQ ID NO: 5894 - protein, 9 aa, Homo Sapiens
SLCPSLISL

SEQ ID NO: 5895 - protein, 9 aa, Homo Sapiens
SLCQEINRV

SEQ ID NO: 5896 - protein, 9 aa, Homo Sapiens
SLCQRLVKL

SEQ ID NO: 5897 - protein, 9 aa, Homo Sapiens
SLDQIFETL

SEQ ID NO: 5898 - protein, 9 aa, Homo Sapiens
SLFAQCEAV

SEQ ID NO: 5899 - protein, 9 aa, Homo Sapiens
SLFDAVSSL

SEQ ID NO: 5900 - protein, 9 aa, Homo Sapiens
SLFEGTWYL

SEQ ID NO: 5901 - protein, 9 aa, Homo Sapiens
SLFERLVKV

SEQ ID NO: 5902 - protein, 9 aa, Homo Sapiens
SLFERLVVL

SEQ ID NO: 5903 - protein, 9 aa, Homo Sapiens
SLFGGSVKL

SEQ ID NO: 5904 - protein, 9 aa, Homo Sapiens
SLFGGTSGL

SEQ ID NO: 5905 - protein, 9 aa, Homo Sapiens
SLFGNIKGA

SEQ ID NO: 5906 - protein, 9 aa, Homo Sapiens
SLFHYSEYL

SEQ ID NO: 5907 - protein, 9 aa, Homo Sapiens
SLFKGICAL

SEQ ID NO: 5908 - protein, 9 aa, Homo Sapiens
SLFKLIVKV

SEQ ID NO: 5909 - protein, 9 aa, Homo Sapiens
SLFKRLYSL

SEQ ID NO: 5910 - protein, 9 aa, Homo Sapiens
SLFNGSHYL

SEQ ID NO: 5911 - protein, 9 aa, Homo Sapiens
SLFPHAICL

SEQ ID NO: 5912 - protein, 9 aa, Homo Sapiens
SLFRVITEV

SEQ ID NO: 5913 - protein, 9 aa, Homo Sapiens
SLFSAVHKI

SEQ ID NO: 5914 - protein, 9 aa, Homo Sapiens
SLFSKENVL

SEQ ID NO: 5915 - protein, 9 aa, Homo Sapiens
SLGDIYFKL

SEQ ID NO: 5916 - protein, 9 aa, Homo Sapiens
SLGPQPLVA

SEQ ID NO: 5917 - protein, 9 aa, Homo Sapiens
SLGSFICKL

SEQ ID NO: 5918 - protein, 9 aa, Homo Sapiens
SLGSINQRL

SEQ ID NO: 5919 - protein, 9 aa, Homo Sapiens
SLGSIYTRL

SEQ ID NO: 5920 - protein, 9 aa, Homo Sapiens
SLHDAIMIV

SEQ ID NO: 5921 - protein, 9 aa, Homo Sapiens
SLHDTVTTL

SEQ ID NO: 5922 - protein, 9 aa, Homo Sapiens
SLHDVLFEL

SEQ ID NO: 5923 - protein, 9 aa, Homo Sapiens
SLHEFLVNL

SEQ ID NO: 5924 - protein, 9 aa, Homo Sapiens
SLHHLINAL

SEQ ID NO: 5925 - protein, 9 aa, Homo Sapiens
SLHPGSSAL

SEQ ID NO: 5926 - protein, 9 aa, Homo Sapiens
SLHSVIIQL

SEQ ID NO: 5927 - protein, 9 aa, Homo Sapiens
SLHSVVQTL

SEQ ID NO: 5928 - protein, 9 aa, Homo Sapiens
SLIAKVATA

SEQ ID NO: 5929 - protein, 9 aa, Homo Sapiens
SLIDGIKRA

SEQ ID NO: 5930 - protein, 9 aa, Homo Sapiens
SLIDKTTAA

SEQ ID NO: 5931 - protein, 9 aa, Homo Sapiens
SLIEKIPTA

SEQ ID NO: 5932 - protein, 9 aa, Homo Sapiens
SLIEKSCQL

SEQ ID NO: 5933 - protein, 9 aa, Homo Sapiens
SLIEKVTQL

SEQ ID NO: 5934 - protein, 9 aa, Homo Sapiens
SLIEQTTAL

SEQ ID NO: 5935 - protein, 9 aa, Homo Sapiens
SLIFKLEEL

SEQ ID NO: 5936 - protein, 9 aa, Homo Sapiens
SLIGHLQTL

SEQ ID NO: 5937 - protein, 9 aa, Homo Sapiens
SLIKQSAQL

SEQ ID NO: 5938 - protein, 9 aa, Homo Sapiens
SLINENQSL

SEQ ID NO: 5939 - protein, 9 aa, Homo Sapiens
SLIRNLEQL

SEQ ID NO: 5940 - protein, 9 aa, Homo Sapiens
SLIRSVVAL

SEQ ID NO: 5941 - protein, 9 aa, Homo Sapiens
SLISGIIRA

SEQ ID NO: 5942 - protein, 9 aa, Homo Sapiens
SLISINNKL

SEQ ID NO: 5943 - protein, 9 aa, Homo Sapiens
SLITRLLEV

SEQ ID NO: 5944 - protein, 9 aa, Homo Sapiens
SLKAHVQEV

SEQ ID NO: 5945 - protein, 9 aa, Homo Sapiens
SLKDDLTKL

SEQ ID NO: 5946 - protein, 9 aa, Homo Sapiens
SLKDGNAFL

SEQ ID NO: 5947 - protein, 9 aa, Homo Sapiens
SLKDKVENL

SEQ ID NO: 5948 - protein, 9 aa, Homo Sapiens
SLKDRIHCV

SEQ ID NO: 5949 - protein, 9 aa, Homo Sapiens
SLKEALQKA

SEQ ID NO: 5950 - protein, 9 aa, Homo Sapiens
SLKEDIQKA

SEQ ID NO: 5951 - protein, 9 aa, Homo Sapiens
SLKETIEEL

SEQ ID NO: 5952 - protein, 9 aa, Homo Sapiens
SLKGTLDNL

SEQ ID NO: 5953 - protein, 9 aa, Homo Sapiens
SLKLECDKL

SEQ ID NO: 5954 - protein, 9 aa, Homo Sapiens
SLKLGLDKA

SEQ ID NO: 5955 - protein, 9 aa, Homo Sapiens
SLKNRIESV

SEQ ID NO: 5956 - protein, 9 aa, Homo Sapiens
SLKQELEQL

SEQ ID NO: 5957 - protein, 9 aa, Homo Sapiens
SLKQETQGL

SEQ ID NO: 5958 - protein, 9 aa, Homo Sapiens
SLKRMLEKL

SEQ ID NO: 5959 - protein, 9 aa, Homo Sapiens
SLKRSLEQA

SEQ ID NO: 5960 - protein, 9 aa, Homo Sapiens
SLKSEAESL

SEQ ID NO: 5961 - protein, 9 aa, Homo Sapiens
SLKSKLEHA

SEQ ID NO: 5962 - protein, 9 aa, Homo Sapiens
SLKTLLECV

SEQ ID NO: 5963 - protein, 9 aa, Homo Sapiens
SLLDLEQKL

SEQ ID NO: 5964 - protein, 9 aa, Homo Sapiens
SLLQTQHAL

SEQ ID NO: 5965 - protein, 9 aa, Homo Sapiens
SLMDLQERL

SEQ ID NO: 5966 - protein, 9 aa, Homo Sapiens
SLMEKISKL

SEQ ID NO: 5967 - protein, 9 aa, Homo Sapiens
SLMGTLSKL

SEQ ID NO: 5968 - protein, 9 aa, Homo Sapiens
SLMKLVSDL

SEQ ID NO: 5969 - protein, 9 aa, Homo Sapiens
SLMPEEEFL

SEQ ID NO: 5970 - protein, 9 aa, Homo Sapiens
SLMPKMHLL

SEQ ID NO: 5971 - protein, 9 aa, Homo Sapiens
SLMSHAIEL

SEQ ID NO: 5972 - protein, 9 aa, Homo Sapiens
SLNEREQEL

SEQ ID NO: 5973 - protein, 9 aa, Homo Sapiens
SLNGLEVHL

SEQ ID NO: 5974 - protein, 9 aa, Homo Sapiens
SLNHFTHSV

SEQ ID NO: 5975 - protein, 9 aa, Homo Sapiens
SLNHLLNYV

SEQ ID NO: 5976 - protein, 9 aa, Homo Sapiens
SLNKHVEAV

SEQ ID NO: 5977 - protein, 9 aa, Homo Sapiens
SLNKQIAQL

SEQ ID NO: 5978 - protein, 9 aa, Homo Sapiens
SLNKQIETV

SEQ ID NO: 5979 - protein, 9 aa, Homo Sapiens
SLNKRVEEL

SEQ ID NO: 5980 - protein, 9 aa, Homo Sapiens
SLNKSLQNL

SEQ ID NO: 5981 - protein, 9 aa, Homo Sapiens
SLNPLIQML

SEQ ID NO: 5982 - protein, 9 aa, Homo Sapiens
SLNPMSDKL

SEQ ID NO: 5983 - protein, 9 aa, Homo Sapiens
SLPDFCHKF

SEQ ID NO: 5984 - protein, 9 aa, Homo Sapiens
SLPDIKVYL

SEQ ID NO: 5985 - protein, 9 aa, Homo Sapiens
SLQEEIAFL

SEQ ID NO: 5986 - protein, 9 aa, Homo Sapiens
SLQEGSYLL

SEQ ID NO: 5987 - protein, 9 aa, Homo Sapiens
SLREACETV

SEQ ID NO: 5988 - protein, 9 aa, Homo Sapiens
SLREQLEGV

SEQ ID NO: 5989 - protein, 9 aa, Homo Sapiens
SLRERIEFL

SEQ ID NO: 5990 - protein, 9 aa, Homo Sapiens
SLRPAVERL

SEQ ID NO: 5991 - protein, 9 aa, Homo Sapiens
SLSAIFNNV

SEQ ID NO: 5992 - protein, 9 aa, Homo Sapiens
SLSASHNQL

SEQ ID NO: 5993 - protein, 9 aa, Homo Sapiens
SLSDARDAL

SEQ ID NO: 5994 - protein, 9 aa, Homo Sapiens
SLSDAVQRL

SEQ ID NO: 5995 - protein, 9 aa, Homo Sapiens
SLSDIEWHI

SEQ ID NO: 5996 - protein, 9 aa, Homo Sapiens
SLSDRDSYL

SEQ ID NO: 5997 - protein, 9 aa, Homo Sapiens
SLSDTHDRL

SEQ ID NO: 5998 - protein, 9 aa, Homo Sapiens
SLSDTVEKL

SEQ ID NO: 5999 - protein, 9 aa, Homo Sapiens
SLSDVQHNI

SEQ ID NO: 6000 - protein, 9 aa, Homo Sapiens
SLSEELAKL

SEQ ID NO: 6001 - protein, 9 aa, Homo Sapiens
SLSEIEKLL

SEQ ID NO: 6002 - protein, 9 aa, Homo Sapiens
SLSEKQYFL

SEQ ID NO: 6003 - protein, 9 aa, Homo Sapiens
SLSEKTVLL

SEQ ID NO: 6004 - protein, 9 aa, Homo Sapiens
SLSELRQHL

SEQ ID NO: 6005 - protein, 9 aa, Homo Sapiens
SLSENQSLL

SEQ ID NO: 6006 - protein, 9 aa, Homo Sapiens
SLSERIMQL

SEQ ID NO: 6007 - protein, 9 aa, Homo Sapiens
SLSESWYNL

SEQ ID NO: 6008 - protein, 9 aa, Homo Sapiens
SLSETNKGL

SEQ ID NO: 6009 - protein, 9 aa, Homo Sapiens
SLSEVRECL

SEQ ID NO: 6010 - protein, 9 aa, Homo Sapiens
SLSEYDQCL

SEQ ID NO: 6011 - protein, 9 aa, Homo Sapiens
SLSEYRQSL

SEQ ID NO: 6012 - protein, 9 aa, Homo Sapiens
SLSEYVSRM

SEQ ID NO: 6013 - protein, 9 aa, Homo Sapiens
SLSFMNPRL

SEQ ID NO: 6014 - protein, 9 aa, Homo Sapiens
SLSGKIQKL

SEQ ID NO: 6015 - protein, 9 aa, Homo Sapiens
SLSGYINYL

SEQ ID NO: 6016 - protein, 9 aa, Homo Sapiens
SLSHINAYA

SEQ ID NO: 6017 - protein, 9 aa, Homo Sapiens
SLSLHNNLL

SEQ ID NO: 6018 - protein, 9 aa, Homo Sapiens
SLSLNNNKL

SEQ ID NO: 6019 - protein, 9 aa, Homo Sapiens
SLSNIVRNL

SEQ ID NO: 6020 - protein, 9 aa, Homo Sapiens
SLSNSLHKV

SEQ ID NO: 6021 - protein, 9 aa, Homo Sapiens
SLSNVQETL

SEQ ID NO: 6022 - protein, 9 aa, Homo Sapiens
SLSPFNDVV

SEQ ID NO: 6023 - protein, 9 aa, Homo Sapiens
SLSPGTHLL

SEQ ID NO: 6024 - protein, 9 aa, Homo Sapiens
SLSQASHAV

SEQ ID NO: 6025 - protein, 9 aa, Homo Sapiens
SLSQHINWV

SEQ ID NO: 6026 - protein, 9 aa, Homo Sapiens
SLSQHNDFL

SEQ ID NO: 6027 - protein, 9 aa, Homo Sapiens
SLSQVFLHL

SEQ ID NO: 6028 - protein, 9 aa, Homo Sapiens
SLSQVLQRL

SEQ ID NO: 6029 - protein, 9 aa, Homo Sapiens
SLSRSVQQL

SEQ ID NO: 6030 - protein, 9 aa, Homo Sapiens
SLSRVLTEL

SEQ ID NO: 6031 - protein, 9 aa, Homo Sapiens
SLSSCFAQL

SEQ ID NO: 6032 - protein, 9 aa, Homo Sapiens
SLSSFLERL

SEQ ID NO: 6033 - protein, 9 aa, Homo Sapiens
SLSSHQSSL

SEQ ID NO: 6034 - protein, 9 aa, Homo Sapiens
SLSSLLVKL

SEQ ID NO: 6035 - protein, 9 aa, Homo Sapiens
SLSSVLSHV

SEQ ID NO: 6036 - protein, 9 aa, Homo Sapiens
SLSTLQQQL

SEQ ID NO: 6037 - protein, 9 aa, Homo Sapiens
SLSTVFVVL

SEQ ID NO: 6038 - protein, 9 aa, Homo Sapiens
SLTAHLHQA

SEQ ID NO: 6039 - protein, 9 aa, Homo Sapiens
SLTEYIHHL

SEQ ID NO: 6040 - protein, 9 aa, Homo Sapiens
SLTSEIHFL

SEQ ID NO: 6041 - protein, 9 aa, Homo Sapiens
SLVDIYSQL

SEQ ID NO: 6042 - protein, 9 aa, Homo Sapiens
SLVDQSAAL

SEQ ID NO: 6043 - protein, 9 aa, Homo Sapiens
SLVEIRNFL

SEQ ID NO: 6044 - protein, 9 aa, Homo Sapiens
SLYDQAEKL

SEQ ID NO: 6045 - protein, 9 aa, Homo Sapiens
SLYDWNVKL

SEQ ID NO: 6046 - protein, 9 aa, Homo Sapiens
SLYDYNPNL

SEQ ID NO: 6047 - protein, 9 aa, Homo Sapiens
SLYEENNKL

SEQ ID NO: 6048 - protein, 9 aa, Homo Sapiens
SLYEMVSRV

SEQ ID NO: 6049 - protein, 9 aa, Homo Sapiens
SLYGASPGL

SEQ ID NO: 6050 - protein, 9 aa, Homo Sapiens
SLYHGYELL

SEQ ID NO: 6051 - protein, 9 aa, Homo Sapiens
SLYSQVHQI

SEQ ID NO: 6052 - protein, 9 aa, Homo Sapiens
SMAAFVPAA

SEQ ID NO: 6053 - protein, 9 aa, Homo Sapiens
SMAALTSHL

SEQ ID NO: 6054 - protein, 9 aa, Homo Sapiens
SMAEILRSL

SEQ ID NO: 6055 - protein, 9 aa, Homo Sapiens
SMAEVDAAM

SEQ ID NO: 6056 - protein, 9 aa, Homo Sapiens
SMASVLEQL

SEQ ID NO: 6057 - protein, 9 aa, Homo Sapiens
SMAVVIPEA

SEQ ID NO: 6058 - protein, 9 aa, Homo Sapiens
SMCILLDHL

SEQ ID NO: 6059 - protein, 9 aa, Homo Sapiens
SMEEIFQHL

SEQ ID NO: 6060 - protein, 9 aa, Homo Sapiens
SMFEFSEKL

SEQ ID NO: 6061 - protein, 9 aa, Homo Sapiens
SMISKLKQA

SEQ ID NO: 6062 - protein, 9 aa, Homo Sapiens
SMKDDLERV

SEQ ID NO: 6063 - protein, 9 aa, Homo Sapiens
SMMDRMFAL

SEQ ID NO: 6064 - protein, 9 aa, Homo Sapiens
SMMDVDHQI

SEQ ID NO: 6065 - protein, 9 aa, Homo Sapiens
SMPELHNFL

SEQ ID NO: 6066 - protein, 9 aa, Homo Sapiens
SMSADVPLV

SEQ ID NO: 6067 - protein, 9 aa, Homo Sapiens
SMSAVVQEL

SEQ ID NO: 6068 - protein, 9 aa, Homo Sapiens
SMTSIRQFV

SEQ ID NO: 6069 - protein, 9 aa, Homo Sapiens
SMYGKEELL

SEQ ID NO: 6070 - protein, 9 aa, Homo Sapiens
SMYSKPECL

SEQ ID NO: 6071 - protein, 9 aa, Homo Sapiens
SQAEIEARL

SEQ ID NO: 6072 - protein, 9 aa, Homo Sapiens
SQAGLNQKL

SEQ ID NO: 6073 - protein, 9 aa, Homo Sapiens
SQCSAQHYV

SEQ ID NO: 6074 - protein, 9 aa, Homo Sapiens
SQIQKVEPA

SEQ ID NO: 6075 - protein, 9 aa, Homo Sapiens
SSLLEKGLD

SEQ ID NO: 6076 - protein, 9 aa, Homo Sapiens
STCEFVRTL

SEQ ID NO: 6077 - protein, 9 aa, Homo Sapiens
STSKWNHLL

SEQ ID NO: 6078 - protein, 9 aa, Homo Sapiens
STSNIQVGL

SEQ ID NO: 6079 - protein, 9 aa, Homo Sapiens
SVADLAHVL

SEQ ID NO: 6080 - protein, 9 aa, Homo Sapiens
SVAELQSRL

SEQ ID NO: 6081 - protein, 9 aa, Homo Sapiens
SVAESLNYV

SEQ ID NO: 6082 - protein, 9 aa, Homo Sapiens
SVAKTSQLL

SEQ ID NO: 6083 - protein, 9 aa, Homo Sapiens
SVAMHTNYL

SEQ ID NO: 6084 - protein, 9 aa, Homo Sapiens
SVANHNSFL

SEQ ID NO: 6085 - protein, 9 aa, Homo Sapiens
SVAPFADYL

SEQ ID NO: 6086 - protein, 9 aa, Homo Sapiens
SVAPFDQNL

SEQ ID NO: 6087 - protein, 9 aa, Homo Sapiens
SVAQLEARL

SEQ ID NO: 6088 - protein, 9 aa, Homo Sapiens
SVNPYIVKL

SEQ ID NO: 6089 - protein, 9 aa, Homo Sapiens
SVSHITQHL

SEQ ID NO: 6090 - protein, 9 aa, Homo Sapiens
SVSKLIHYV

SEQ ID NO: 6091 - protein, 9 aa, Homo Sapiens
SVSQINHKL

SEQ ID NO: 6092 - protein, 9 aa, Homo Sapiens
SVSSVVHYL

SEQ ID NO: 6093 - protein, 9 aa, Homo Sapiens
SVTYDLSKL

SEQ ID NO: 6094 - protein, 9 aa, Homo Sapiens
TICEHLQYL

SEQ ID NO: 6095 - protein, 9 aa, Homo Sapiens
TLAAIIEHL

SEQ ID NO: 6096 - protein, 9 aa, Homo Sapiens
TLAAVIRKL

SEQ ID NO: 6097 - protein, 9 aa, Homo Sapiens
TLAAVLQRI

SEQ ID NO: 6098 - protein, 9 aa, Homo Sapiens
TLADFKNVL

SEQ ID NO: 6099 - protein, 9 aa, Homo Sapiens
TLADIYREL

SEQ ID NO: 6100 - protein, 9 aa, Homo Sapiens
TLADLVHHV

SEQ ID NO: 6101 - protein, 9 aa, Homo Sapiens
TLADMATRL

SEQ ID NO: 6102 - protein, 9 aa, Homo Sapiens
TLADVLYHV

SEQ ID NO: 6103 - protein, 9 aa, Homo Sapiens
TLADYLHLL

SEQ ID NO: 6104 - protein, 9 aa, Homo Sapiens
TLAEAGAKI

SEQ ID NO: 6105 - protein, 9 aa, Homo Sapiens
TLAEHQQLI

SEQ ID NO: 6106 - protein, 9 aa, Homo Sapiens
TLAEKIQTI

SEQ ID NO: 6107 - protein, 9 aa, Homo Sapiens
TLAELQNNM

SEQ ID NO: 6108 - protein, 9 aa, Homo Sapiens
TLAEQRDEL

SEQ ID NO: 6109 - protein, 9 aa, Homo Sapiens
TLAESSDHV

SEQ ID NO: 6110 - protein, 9 aa, Homo Sapiens
TLAETIQGL

SEQ ID NO: 6111 - protein, 9 aa, Homo Sapiens
TLAETLVNL

SEQ ID NO: 6112 - protein, 9 aa, Homo Sapiens
TLAEVSTRL

SEQ ID NO: 6113 - protein, 9 aa, Homo Sapiens
TLAFVSPSL

SEQ ID NO: 6114 - protein, 9 aa, Homo Sapiens
TLAGLHVRL

SEQ ID NO: 6115 - protein, 9 aa, Homo Sapiens
TLAHIHYGV

SEQ ID NO: 6116 - protein, 9 aa, Homo Sapiens
TLAKCLYEL

SEQ ID NO: 6117 - protein, 9 aa, Homo Sapiens
TLAKYLMEL

SEQ ID NO: 6118 - protein, 9 aa, Homo Sapiens
TLALLTHRL

SEQ ID NO: 6119 - protein, 9 aa, Homo Sapiens
TLANVIRQL

SEQ ID NO: 6120 - protein, 9 aa, Homo Sapiens
TLAPTWEEL

SEQ ID NO: 6121 - protein, 9 aa, Homo Sapiens
TLAQHSVEL

SEQ ID NO: 6122 - protein, 9 aa, Homo Sapiens
TLAQIHKGL

SEQ ID NO: 6123 - protein, 9 aa, Homo Sapiens
TLASIIKEV

SEQ ID NO: 6124 - protein, 9 aa, Homo Sapiens
TLASKVDQL

SEQ ID NO: 6125 - protein, 9 aa, Homo Sapiens
TLASSLHTL

SEQ ID NO: 6126 - protein, 9 aa, Homo Sapiens
TLATLHTAL

SEQ ID NO: 6127 - protein, 9 aa, Homo Sapiens
TLCDLYETL

SEQ ID NO: 6128 - protein, 9 aa, Homo Sapiens
TLCDVILMV

SEQ ID NO: 6129 - protein, 9 aa, Homo Sapiens
TLCDVTLRV

SEQ ID NO: 6130 - protein, 9 aa, Homo Sapiens
TLCLIQNKL

SEQ ID NO: 6131 - protein, 9 aa, Homo Sapiens
TLCPAIHKL

SEQ ID NO: 6132 - protein, 9 aa, Homo Sapiens
TLCQFHNQV

SEQ ID NO: 6133 - protein, 9 aa, Homo Sapiens
TLCQTQMKL

SEQ ID NO: 6134 - protein, 9 aa, Homo Sapiens
TLFAGAHEL

SEQ ID NO: 6135 - protein, 9 aa, Homo Sapiens
TLFDYEVRL

SEQ ID NO: 6136 - protein, 9 aa, Homo Sapiens
TLFFQQNAL

SEQ ID NO: 6137 - protein, 9 aa, Homo Sapiens
TLFPGTDHI

SEQ ID NO: 6138 - protein, 9 aa, Homo Sapiens
TLFPSKIGV

SEQ ID NO: 6139 - protein, 9 aa, Homo Sapiens
TLGPKPFQL

SEQ ID NO: 6140 - protein, 9 aa, Homo Sapiens
TLHALCNLL

SEQ ID NO: 6141 - protein, 9 aa, Homo Sapiens
TLHSLISEL

SEQ ID NO: 6142 - protein, 9 aa, Homo Sapiens
TLHSVDQYL

SEQ ID NO: 6143 - protein, 9 aa, Homo Sapiens
TLIEDILGV

SEQ ID NO: 6144 - protein, 9 aa, Homo Sapiens
TLISELVQA

SEQ ID NO: 6145 - protein, 9 aa, Homo Sapiens
TLKEEVNEL

SEQ ID NO: 6146 - protein, 9 aa, Homo Sapiens
TLKEEVQKL

SEQ ID NO: 6147 - protein, 9 aa, Homo Sapiens
TLKETNEEL

SEQ ID NO: 6148 - protein, 9 aa, Homo Sapiens
TLKEYLESL

SEQ ID NO: 6149 - protein, 9 aa, Homo Sapiens
TLKITLDNA

SEQ ID NO: 6150 - protein, 9 aa, Homo Sapiens
TLKQGIERV

SEQ ID NO: 6151 - protein, 9 aa, Homo Sapiens
TLKRKLDQV

SEQ ID NO: 6152 - protein, 9 aa, Homo Sapiens
TLKRQLDEV

SEQ ID NO: 6153 - protein, 9 aa, Homo Sapiens
TLKRTIEAL

SEQ ID NO: 6154 - protein, 9 aa, Homo Sapiens
TLKSTVEAL

SEQ ID NO: 6155 - protein, 9 aa, Homo Sapiens
TLLEKDYFL

SEQ ID NO: 6156 - protein, 9 aa, Homo Sapiens
TLMEALHYM

SEQ ID NO: 6157 - protein, 9 aa, Homo Sapiens
TLNDKVEFL

SEQ ID NO: 6158 - protein, 9 aa, Homo Sapiens
TLNDREYQL

SEQ ID NO: 6159 - protein, 9 aa, Homo Sapiens
TLNEKLFLL

SEQ ID NO: 6160 - protein, 9 aa, Homo Sapiens
TLNEKLTAL

SEQ ID NO: 6161 - protein, 9 aa, Homo Sapiens
TLNEMSHKL

SEQ ID NO: 6162 - protein, 9 aa, Homo Sapiens
TLNKFIEEL

SEQ ID NO: 6163 - protein, 9 aa, Homo Sapiens
TLNKFTEEL

SEQ ID NO: 6164 - protein, 9 aa, Homo Sapiens
TLNKLIKRL

SEQ ID NO: 6165 - protein, 9 aa, Homo Sapiens
TLNNLVEKL

SEQ ID NO: 6166 - protein, 9 aa, Homo Sapiens
TLNSFIHVL

SEQ ID NO: 6167 - protein, 9 aa, Homo Sapiens
TLNSHLNKV

SEQ ID NO: 6168 - protein, 9 aa, Homo Sapiens
TLQDIVYKL

SEQ ID NO: 6169 - protein, 9 aa, Homo Sapiens
TLQEKIHRL

SEQ ID NO: 6170 - protein, 9 aa, Homo Sapiens
TLREHLERL

SEQ ID NO: 6171 - protein, 9 aa, Homo Sapiens
TLSDFAVRL

SEQ ID NO: 6172 - protein, 9 aa, Homo Sapiens
TLSDIKALI

SEQ ID NO: 6173 - protein, 9 aa, Homo Sapiens
TLSDIMVSL

SEQ ID NO: 6174 - protein, 9 aa, Homo Sapiens
TLSDLRVYL

SEQ ID NO: 6175 - protein, 9 aa, Homo Sapiens
TLSDMEYRL

SEQ ID NO: 6176 - protein, 9 aa, Homo Sapiens
TLSDVLDRV

SEQ ID NO: 6177 - protein, 9 aa, Homo Sapiens
TLSDVLSRL

SEQ ID NO: 6178 - protein, 9 aa, Homo Sapiens
TLSDVVVGL

SEQ ID NO: 6179 - protein, 9 aa, Homo Sapiens
TLSDYTTCL

SEQ ID NO: 6180 - protein, 9 aa, Homo Sapiens
TLSEKLDLL

SEQ ID NO: 6181 - protein, 9 aa, Homo Sapiens
TLSELKTVL

SEQ ID NO: 6182 - protein, 9 aa, Homo Sapiens
TLSERLWGL

SEQ ID NO: 6183 - protein, 9 aa, Homo Sapiens
TLSEVLTKI

SEQ ID NO: 6184 - protein, 9 aa, Homo Sapiens
TLSEVNRYL

SEQ ID NO: 6185 - protein, 9 aa, Homo Sapiens
TLSEVTNQL

SEQ ID NO: 6186 - protein, 9 aa, Homo Sapiens
TLSGHSQEV

SEQ ID NO: 6187 - protein, 9 aa, Homo Sapiens
TLSGHTNAV

SEQ ID NO: 6188 - protein, 9 aa, Homo Sapiens
TLSGLQHVL

SEQ ID NO: 6189 - protein, 9 aa, Homo Sapiens
TLSPVNHSL

SEQ ID NO: 6190 - protein, 9 aa, Homo Sapiens
TLSQITNNI

SEQ ID NO: 6191 - protein, 9 aa, Homo Sapiens
TLSSFITKI

SEQ ID NO: 6192 - protein, 9 aa, Homo Sapiens
TLSSIRHMI

SEQ ID NO: 6193 - protein, 9 aa, Homo Sapiens
TLSSQISRL

SEQ ID NO: 6194 - protein, 9 aa, Homo Sapiens
TLSSVASKL

SEQ ID NO: 6195 - protein, 9 aa, Homo Sapiens
TLSTQQNTL

SEQ ID NO: 6196 - protein, 9 aa, Homo Sapiens
TLSTVISKV

SEQ ID NO: 6197 - protein, 9 aa, Homo Sapiens
TLSVIRDYL

SEQ ID NO: 6198 - protein, 9 aa, Homo Sapiens
TLTDIEQKV

SEQ ID NO: 6199 - protein, 9 aa, Homo Sapiens
TLTEICRRL

SEQ ID NO: 6200 - protein, 9 aa, Homo Sapiens
TLTELRAFL

SEQ ID NO: 6201 - protein, 9 aa, Homo Sapiens
TLTEYCSTL

SEQ ID NO: 6202 - protein, 9 aa, Homo Sapiens
TLTNIIHNL

SEQ ID NO: 6203 - protein, 9 aa, Homo Sapiens
TLTNVIHNL

SEQ ID NO: 6204 - protein, 9 aa, Homo Sapiens
TLVDFDNHL

SEQ ID NO: 6205 - protein, 9 aa, Homo Sapiens
TLYDHVDEV

SEQ ID NO: 6206 - protein, 9 aa, Homo Sapiens
TLYEHNNEL

SEQ ID NO: 6207 - protein, 9 aa, Homo Sapiens
TMAIIVNKL

SEQ ID NO: 6208 - protein, 9 aa, Homo Sapiens
TMASVCHTL

SEQ ID NO: 6209 - protein, 9 aa, Homo Sapiens
TMGPRPAAA

SEQ ID NO: 6210 - protein, 9 aa, Homo Sapiens
TMIEICEKL

SEQ ID NO: 6211 - protein, 9 aa, Homo Sapiens
TMINAIPVA

SEQ ID NO: 6212 - protein, 9 aa, Homo Sapiens
TMKTYVEKV

SEQ ID NO: 6213 - protein, 9 aa, Homo Sapiens
TMPDLYHLL

SEQ ID NO: 6214 - protein, 9 aa, Homo Sapiens
TTSDIDYAL

SEQ ID NO: 6215 - protein, 9 aa, Homo Sapiens
TVADHIQKV

SEQ ID NO: 6216 - protein, 9 aa, Homo Sapiens
TVAEINATM

SEQ ID NO: 6217 - protein, 9 aa, Homo Sapiens
TVAELVQFL

SEQ ID NO: 6218 - protein, 9 aa, Homo Sapiens
TVAPFNPTV

SEQ ID NO: 6219 - protein, 9 aa, Homo Sapiens
VIAAVSHEL

SEQ ID NO: 6220 - protein, 9 aa, Homo Sapiens
VIAEILRGV

SEQ ID NO: 6221 - protein, 9 aa, Homo Sapiens
VIAEQIQHL

SEQ ID NO: 6222 - protein, 9 aa, Homo Sapiens
VIANINNCL

SEQ ID NO: 6223 - protein, 9 aa, Homo Sapiens
VISGINEKL

SEQ ID NO: 6224 - protein, 9 aa, Homo Sapiens
VISPLNQLL

SEQ ID NO: 6225 - protein, 9 aa, Homo Sapiens
VISSIRNFL

SEQ ID NO: 6226 - protein, 9 aa, Homo Sapiens
VLAAITSHM

SEQ ID NO: 6227 - protein, 9 aa, Homo Sapiens
VLADACWAL

SEQ ID NO: 6228 - protein, 9 aa, Homo Sapiens
VLADFEAGL

SEQ ID NO: 6229 - protein, 9 aa, Homo Sapiens
VLADIAKQV

SEQ ID NO: 6230 - protein, 9 aa, Homo Sapiens
VLADLKVQL

SEQ ID NO: 6231 - protein, 9 aa, Homo Sapiens
VLADQEVRL

SEQ ID NO: 6232 - protein, 9 aa, Homo Sapiens
VLADQVWTL

SEQ ID NO: 6233 - protein, 9 aa, Homo Sapiens
VLADTCWAI

SEQ ID NO: 6234 - protein, 9 aa, Homo Sapiens
VLADTKELV

SEQ ID NO: 6235 - protein, 9 aa, Homo Sapiens
VLAEAVTGL

SEQ ID NO: 6236 - protein, 9 aa, Homo Sapiens
VLAEIPQQV

SEQ ID NO: 6237 - protein, 9 aa, Homo Sapiens
VLAEKCPNL

SEQ ID NO: 6238 - protein, 9 aa, Homo Sapiens
VLAELVRLG

SEQ ID NO: 6239 - protein, 9 aa, Homo Sapiens
VLAEQLHQA

SEQ ID NO: 6240 - protein, 9 aa, Homo Sapiens
VLAERCVLL

SEQ ID NO: 6241 - protein, 9 aa, Homo Sapiens
VLAESYEKI

SEQ ID NO: 6242 - protein, 9 aa, Homo Sapiens
VLAEVPTQL

SEQ ID NO: 6243 - protein, 9 aa, Homo Sapiens
VLAFLVHEL

SEQ ID NO: 6244 - protein, 9 aa, Homo Sapiens
VLAFVLDHL

SEQ ID NO: 6245 - protein, 9 aa, Homo Sapiens
VLAGFVNGL

SEQ ID NO: 6246 - protein, 9 aa, Homo Sapiens
VLAGHDNRV

SEQ ID NO: 6247 - protein, 9 aa, Homo Sapiens
VLAGVSQQL

SEQ ID NO: 6248 - protein, 9 aa, Homo Sapiens
VLAHTILGV

SEQ ID NO: 6249 - protein, 9 aa, Homo Sapiens
VLAHVTNRL

SEQ ID NO: 6250 - protein, 9 aa, Homo Sapiens
VLAHYADVL

SEQ ID NO: 6251 - protein, 9 aa, Homo Sapiens
VLAKIVNYM

SEQ ID NO: 6252 - protein, 9 aa, Homo Sapiens
VLAKQLVHL

SEQ ID NO: 6253 - protein, 9 aa, Homo Sapiens
VLAPLGFTL

SEQ ID NO: 6254 - protein, 9 aa, Homo Sapiens
VLAPMFERL

SEQ ID NO: 6255 - protein, 9 aa, Homo Sapiens
VLAQQIATL

SEQ ID NO: 6256 - protein, 9 aa, Homo Sapiens
VLAQVFTEL

SEQ ID NO: 6257 - protein, 9 aa, Homo Sapiens
VLARTIEYL

SEQ ID NO: 6258 - protein, 9 aa, Homo Sapiens
VLASHYIHI

SEQ ID NO: 6259 - protein, 9 aa, Homo Sapiens
VLASLIIRL

SEQ ID NO: 6260 - protein, 9 aa, Homo Sapiens
VLATFVHML

SEQ ID NO: 6261 - protein, 9 aa, Homo Sapiens
VLATLLNNL

SEQ ID NO: 6262 - protein, 9 aa, Homo Sapiens
VLAWVKEKV

SEQ ID NO: 6263 - protein, 9 aa, Homo Sapiens
VLAYFLPEA

SEQ ID NO: 6264 - protein, 9 aa, Homo Sapiens
VLCELINAL

SEQ ID NO: 6265 - protein, 9 aa, Homo Sapiens
VLCGAVKQL

SEQ ID NO: 6266 - protein, 9 aa, Homo Sapiens
VLCSQQWKL

SEQ ID NO: 6267 - protein, 9 aa, Homo Sapiens
VLCTDSQGL

SEQ ID NO: 6268 - protein, 9 aa, Homo Sapiens
VLDDKDYFL

SEQ ID NO: 6269 - protein, 9 aa, Homo Sapiens
VLDSFCEGL

SEQ ID NO: 6270 - protein, 9 aa, Homo Sapiens
VLFDHVGCL

SEQ ID NO: 6271 - protein, 9 aa, Homo Sapiens
VLFGLLREV

SEQ ID NO: 6272 - protein, 9 aa, Homo Sapiens
VLFGVETHV

SEQ ID NO: 6273 - protein, 9 aa, Homo Sapiens
VLFNKLTYL

SEQ ID NO: 6274 - protein, 9 aa, Homo Sapiens
VLFPGTDHI

SEQ ID NO: 6275 - protein, 9 aa, Homo Sapiens
VLFPGYTHL

SEQ ID NO: 6276 - protein, 9 aa, Homo Sapiens
VLGEKTSNL

SEQ ID NO: 6277 - protein, 9 aa, Homo Sapiens
VLGPGPPPL

SEQ ID NO: 6278 - protein, 9 aa, Homo Sapiens
VLGPKIEAV

SEQ ID NO: 6279 - protein, 9 aa, Homo Sapiens
VLGTNSFVK

SEQ ID NO: 6280 - protein, 9 aa, Homo Sapiens
VLGTSNFKV

SEQ ID NO: 6281 - protein, 9 aa, Homo Sapiens
VLHDISSLL

SEQ ID NO: 6282 - protein, 9 aa, Homo Sapiens
VLHEGTNFV

SEQ ID NO: 6283 - protein, 9 aa, Homo Sapiens
VLHEHIQRL

SEQ ID NO: 6284 - protein, 9 aa, Homo Sapiens
VLHRNIDRL

SEQ ID NO: 6285 - protein, 9 aa, Homo Sapiens
VLHRNLIYL

SEQ ID NO: 6286 - protein, 9 aa, Homo Sapiens
VLHVKTESL

SEQ ID NO: 6287 - protein, 9 aa, Homo Sapiens
VLHYFVEFL

SEQ ID NO: 6288 - protein, 9 aa, Homo Sapiens
VLIDYQRNV

SEQ ID NO: 6289 - protein, 9 aa, Homo Sapiens
VLIGSEHGL

SEQ ID NO: 6290 - protein, 9 aa, Homo Sapiens
VLIGSNHSL

SEQ ID NO: 6291 - protein, 9 aa, Homo Sapiens
VLIPKLPQL

SEQ ID NO: 6292 - protein, 9 aa, Homo Sapiens
VLIRRIHKV

SEQ ID NO: 6293 - protein, 9 aa, Homo Sapiens
VLKDYIAYA

SEQ ID NO: 6294 - protein, 9 aa, Homo Sapiens
VLKEIVERV

SEQ ID NO: 6295 - protein, 9 aa, Homo Sapiens
VLKEKLDSL

SEQ ID NO: 6296 - protein, 9 aa, Homo Sapiens
VLKENADFL

SEQ ID NO: 6297 - protein, 9 aa, Homo Sapiens
VLKESLDQL

SEQ ID NO: 6298 - protein, 9 aa, Homo Sapiens
VLKEYLDNV

SEQ ID NO: 6299 - protein, 9 aa, Homo Sapiens
VLKGDVEKL

SEQ ID NO: 6300 - protein, 9 aa, Homo Sapiens
VLKKHTEYL

SEQ ID NO: 6301 - protein, 9 aa, Homo Sapiens
VLKVFLENV

SEQ ID NO: 6302 - protein, 9 aa, Homo Sapiens
VLMDRLPSL

SEQ ID NO: 6303 - protein, 9 aa, Homo Sapiens
VLMEMSYRL

SEQ ID NO: 6304 - protein, 9 aa, Homo Sapiens
VLMENIVYL

SEQ ID NO: 6305 - protein, 9 aa, Homo Sapiens
VLMEYIRSL

SEQ ID NO: 6306 - protein, 9 aa, Homo Sapiens
VLMKALEYL

SEQ ID NO: 6307 - protein, 9 aa, Homo Sapiens
VLMPWIHEL

SEQ ID NO: 6308 - protein, 9 aa, Homo Sapiens
VLNARIQKA

SEQ ID NO: 6309 - protein, 9 aa, Homo Sapiens
VLNAYVTHL

SEQ ID NO: 6310 - protein, 9 aa, Homo Sapiens
VLNEDVRNL

SEQ ID NO: 6311 - protein, 9 aa, Homo Sapiens
VLNEKLEQL

SEQ ID NO: 6312 - protein, 9 aa, Homo Sapiens
VLNEYFHNV

SEQ ID NO: 6313 - protein, 9 aa, Homo Sapiens
VLNNVVIHL

SEQ ID NO: 6314 - protein, 9 aa, Homo Sapiens
VLQDQVDEL

SEQ ID NO: 6315 - protein, 9 aa, Homo Sapiens
VLQDTVEQL

SEQ ID NO: 6316 - protein, 9 aa, Homo Sapiens
VLQNGGDKL

SEQ ID NO: 6317 - protein, 9 aa, Homo Sapiens
VLREGAESL

SEQ ID NO: 6318 - protein, 9 aa, Homo Sapiens
VLSALLTRI

SEQ ID NO: 6319 - protein, 9 aa, Homo Sapiens
VLSDEFSHL

SEQ ID NO: 6320 - protein, 9 aa, Homo Sapiens
VLSDIIQNL

SEQ ID NO: 6321 - protein, 9 aa, Homo Sapiens
VLSDLSTKL

SEQ ID NO: 6322 - protein, 9 aa, Homo Sapiens
VLSEKIDSL

SEQ ID NO: 6323 - protein, 9 aa, Homo Sapiens
VLSEKVSQL

SEQ ID NO: 6324 - protein, 9 aa, Homo Sapiens
VLSELAARL

SEQ ID NO: 6325 - protein, 9 aa, Homo Sapiens
VLSELLWQV

SEQ ID NO: 6326 - protein, 9 aa, Homo Sapiens
VLSEQQNGL

SEQ ID NO: 6327 - protein, 9 aa, Homo Sapiens
VLSESKCNL

SEQ ID NO: 6328 - protein, 9 aa, Homo Sapiens
VLSEVECHL

SEQ ID NO: 6329 - protein, 9 aa, Homo Sapiens
VLSHMNDVL

SEQ ID NO: 6330 - protein, 9 aa, Homo Sapiens
VLSKHNNEL

SEQ ID NO: 6331 - protein, 9 aa, Homo Sapiens
VLSNNIDHL

SEQ ID NO: 6332 - protein, 9 aa, Homo Sapiens
VLSNVEVTL

SEQ ID NO: 6333 - protein, 9 aa, Homo Sapiens
VLSQHFQTV

SEQ ID NO: 6334 - protein, 9 aa, Homo Sapiens
VLSQSQHSL

SEQ ID NO: 6335 - protein, 9 aa, Homo Sapiens
VLSRINQRL

SEQ ID NO: 6336 - protein, 9 aa, Homo Sapiens
VLSRLVESL

SEQ ID NO: 6337 - protein, 9 aa, Homo Sapiens
VLSSGTQAV

SEQ ID NO: 6338 - protein, 9 aa, Homo Sapiens
VLSSIEGRV

SEQ ID NO: 6339 - protein, 9 aa, Homo Sapiens
VLSTCEHRL

SEQ ID NO: 6340 - protein, 9 aa, Homo Sapiens
VLTEHSEEL

SEQ ID NO: 6341 - protein, 9 aa, Homo Sapiens
VLTEHVAAA

SEQ ID NO: 6342 - protein, 9 aa, Homo Sapiens
VLVDQTTGL

SEQ ID NO: 6343 - protein, 9 aa, Homo Sapiens
VLWDRTFSL

SEQ ID NO: 6344 - protein, 9 aa, Homo Sapiens
VLYDRIQAA

SEQ ID NO: 6345 - protein, 9 aa, Homo Sapiens
VLYPGCDTL

SEQ ID NO: 6346 - protein, 9 aa, Homo Sapiens
VMADIRELI

SEQ ID NO: 6347 - protein, 9 aa, Homo Sapiens
VMAEGTAVL

SEQ ID NO: 6348 - protein, 9 aa, Homo Sapiens
VMAELAKEL

SEQ ID NO: 6349 - protein, 9 aa, Homo Sapiens
VMAPRTLVL

SEQ ID NO: 6350 - protein, 9 aa, Homo Sapiens
VMAQILEHL

SEQ ID NO: 6351 - protein, 9 aa, Homo Sapiens
VMIQHVENL

SEQ ID NO: 6352 - protein, 9 aa, Homo Sapiens
VMKKIIETV

SEQ ID NO: 6353 - protein, 9 aa, Homo Sapiens
VMNEKLHRL

SEQ ID NO: 6354 - protein, 9 aa, Homo Sapiens
VMVDIHDQL

SEQ ID NO: 6355 - protein, 9 aa, Homo Sapiens
VMVEQSEKL

SEQ ID NO: 6356 - protein, 9 aa, Homo Sapiens
VMYGKVYRI

SEQ ID NO: 6357 - protein, 9 aa, Homo Sapiens
VTRDLVSEV

SEQ ID NO: 6358 - protein, 9 aa, Homo Sapiens
VVADLFHSL

SEQ ID NO: 6359 - protein, 9 aa, Homo Sapiens
VVCGLIFRL

SEQ ID NO: 6360 - protein, 9 aa, Homo Sapiens
WAGCALGAL

SEQ ID NO: 6361 - protein, 9 aa, Homo Sapiens
WLAEETSSL

SEQ ID NO: 6362 - protein, 9 aa, Homo Sapiens
WLAEKLPTL

SEQ ID NO: 6363 - protein, 9 aa, Homo Sapiens
WLAETTHAL

SEQ ID NO: 6364 - protein, 9 aa, Homo Sapiens
WLAEVEDKL

SEQ ID NO: 6365 - protein, 9 aa, Homo Sapiens
WLHESTNLL

SEQ ID NO: 6366 - protein, 9 aa, Homo Sapiens
WLHGLESQI

SEQ ID NO: 6367 - protein, 9 aa, Homo Sapiens
WLVDHVYAI

SEQ ID NO: 6368 - protein, 9 aa, Homo Sapiens
YASGINVNL

SEQ ID NO: 6369 - protein, 9 aa, Homo Sapiens
YAYDGKDYI

SEQ ID NO: 6370 - protein, 9 aa, Homo Sapiens
YGAEALERM

SEQ ID NO: 6371 - protein, 9 aa, Homo Sapiens
YIAEEYSRL

SEQ ID NO: 6372 - protein, 9 aa, Homo Sapiens
YIAHLRQIL

SEQ ID NO: 6373 - protein, 9 aa, Homo Sapiens
YIAPLKALV

SEQ ID NO: 6374 - protein, 9 aa, Homo Sapiens
YIAPMTEKL

SEQ ID NO: 6375 - protein, 9 aa, Homo Sapiens
YIATIHSRL

SEQ ID NO: 6376 - protein, 9 aa, Homo Sapiens
YICDYHKNL

SEQ ID NO: 6377 - protein, 9 aa, Homo Sapiens
YIFAVAHRL

SEQ ID NO: 6378 - protein, 9 aa, Homo Sapiens
YIFDNCHEL

SEQ ID NO: 6379 - protein, 9 aa, Homo Sapiens
YISECLKKL

SEQ ID NO: 6380 - protein, 9 aa, Homo Sapiens
YISNATHML

SEQ ID NO: 6381 - protein, 9 aa, Homo Sapiens
YLADIFTKL

SEQ ID NO: 6382 - protein, 9 aa, Homo Sapiens
YLADLFKHL

SEQ ID NO: 6383 - protein, 9 aa, Homo Sapiens
YLADLYHFV

SEQ ID NO: 6384 - protein, 9 aa, Homo Sapiens
YLAGEAPTL

SEQ ID NO: 6385 - protein, 9 aa, Homo Sapiens
YLAGLHANI

SEQ ID NO: 6386 - protein, 9 aa, Homo Sapiens
YLAGQIARA

SEQ ID NO: 6387 - protein, 9 aa, Homo Sapiens
YLAHFIEGL

SEQ ID NO: 6388 - protein, 9 aa, Homo Sapiens
YLAHLAHHL

SEQ ID NO: 6389 - protein, 9 aa, Homo Sapiens
YLAKVKSLL

SEQ ID NO: 6390 - protein, 9 aa, Homo Sapiens
YLANGQTKV

SEQ ID NO: 6391 - protein, 9 aa, Homo Sapiens
YLAPENGYL

SEQ ID NO: 6392 - protein, 9 aa, Homo Sapiens
YLAPFLRNV

SEQ ID NO: 6393 - protein, 9 aa, Homo Sapiens
YLAPHVRTL

SEQ ID NO: 6394 - protein, 9 aa, Homo Sapiens
YLAPSNQSV

SEQ ID NO: 6395 - protein, 9 aa, Homo Sapiens
YLAQHYDKI

SEQ ID NO: 6396 - protein, 9 aa, Homo Sapiens
YLAQVYQHL

SEQ ID NO: 6397 - protein, 9 aa, Homo Sapiens
YLARFLEGL

SEQ ID NO: 6398 - protein, 9 aa, Homo Sapiens
YLASLEKKL

SEQ ID NO: 6399 - protein, 9 aa, Homo Sapiens
YLASLIRSV

SEQ ID NO: 6400 - protein, 9 aa, Homo Sapiens
YLATLTEKM

SEQ ID NO: 6401 - protein, 9 aa, Homo Sapiens
YLATVRSDL

SEQ ID NO: 6402 - protein, 9 aa, Homo Sapiens
YLCDEQKEL

SEQ ID NO: 6403 - protein, 9 aa, Homo Sapiens
YLCMKTLLL

SEQ ID NO: 6404 - protein, 9 aa, Homo Sapiens
YLCYEVERL

SEQ ID NO: 6405 - protein, 9 aa, Homo Sapiens
YLEDGFAYV

SEQ ID NO: 6406 - protein, 9 aa, Homo Sapiens
YLEDILAKL

SEQ ID NO: 6407 - protein, 9 aa, Homo Sapiens
YLEEAPKFL

SEQ ID NO: 6408 - protein, 9 aa, Homo Sapiens
YLENGKETL

SEQ ID NO: 6409 - protein, 9 aa, Homo Sapiens
YLFCDDHKL

SEQ ID NO: 6410 - protein, 9 aa, Homo Sapiens
YLFERIKEL

SEQ ID NO: 6411 - protein, 9 aa, Homo Sapiens
YLFKCPQSV

SEQ ID NO: 6412 - protein, 9 aa, Homo Sapiens
YLFNSVVNV

SEQ ID NO: 6413 - protein, 9 aa, Homo Sapiens
YLFTIINSL

SEQ ID NO: 6414 - protein, 9 aa, Homo Sapiens
YLFTSPQRV

SEQ ID NO: 6415 - protein, 9 aa, Homo Sapiens
YLGDVSERV

SEQ ID NO: 6416 - protein, 9 aa, Homo Sapiens
YLGEQIQKL

SEQ ID NO: 6417 - protein, 9 aa, Homo Sapiens
YLGHLQQYV

SEQ ID NO: 6418 - protein, 9 aa, Homo Sapiens
YLGNINPQM

SEQ ID NO: 6419 - protein, 9 aa, Homo Sapiens
YLGPHIASV

SEQ ID NO: 6420 - protein, 9 aa, Homo Sapiens
YLGQIQHIL

SEQ ID NO: 6421 - protein, 9 aa, Homo Sapiens
YLGRLAHEV

SEQ ID NO: 6422 - protein, 9 aa, Homo Sapiens
YLGTVAARL

SEQ ID NO: 6423 - protein, 9 aa, Homo Sapiens
YLHDFLKYL

SEQ ID NO: 6424 - protein, 9 aa, Homo Sapiens
YLHEFRDKL

SEQ ID NO: 6425 - protein, 9 aa, Homo Sapiens
YLHHILRQL

SEQ ID NO: 6426 - protein, 9 aa, Homo Sapiens
YLHNQGIGV

SEQ ID NO: 6427 - protein, 9 aa, Homo Sapiens
YLHREVVEL

SEQ ID NO: 6428 - protein, 9 aa, Homo Sapiens
YLHSGQVAL

SEQ ID NO: 6429 - protein, 9 aa, Homo Sapiens
YLHSQVVSV

SEQ ID NO: 6430 - protein, 9 aa, Homo Sapiens
YLHSYLTYI

SEQ ID NO: 6431 - protein, 9 aa, Homo Sapiens
YLHTNVALV

SEQ ID NO: 6432 - protein, 9 aa, Homo Sapiens
YLHTYESEI

SEQ ID NO: 6433 - protein, 9 aa, Homo Sapiens
YLIASIDHL

SEQ ID NO: 6434 - protein, 9 aa, Homo Sapiens
YLICEDYKL

SEQ ID NO: 6435 - protein, 9 aa, Homo Sapiens
YLIKDIRFL

SEQ ID NO: 6436 - protein, 9 aa, Homo Sapiens
YLINEIDRI

SEQ ID NO: 6437 - protein, 9 aa, Homo Sapiens
YLIPFSSKL

SEQ ID NO: 6438 - protein, 9 aa, Homo Sapiens
YLIPLLERL

SEQ ID NO: 6439 - protein, 9 aa, Homo Sapiens
YLIPNIKHL

SEQ ID NO: 6440 - protein, 9 aa, Homo Sapiens
YLITLLEHL

SEQ ID NO: 6441 - protein, 9 aa, Homo Sapiens
YLKDEIEEL

SEQ ID NO: 6442 - protein, 9 aa, Homo Sapiens
YLKDGDVML

SEQ ID NO: 6443 - protein, 9 aa, Homo Sapiens
YLKDIVENL

SEQ ID NO: 6444 - protein, 9 aa, Homo Sapiens
YLKDKLDET

SEQ ID NO: 6445 - protein, 9 aa, Homo Sapiens
YLKDLIEEV

SEQ ID NO: 6446 - protein, 9 aa, Homo Sapiens
YLKEAVTTL

SEQ ID NO: 6447 - protein, 9 aa, Homo Sapiens
YLKEETQLL

SEQ ID NO: 6448 - protein, 9 aa, Homo Sapiens
YLKEILEQL

SEQ ID NO: 6449 - protein, 9 aa, Homo Sapiens
YLKEILQDL

SEQ ID NO: 6450 - protein, 9 aa, Homo Sapiens
YLKLRCDLL

SEQ ID NO: 6451 - protein, 9 aa, Homo Sapiens
YLKSSDNRL

SEQ ID NO: 6452 - protein, 9 aa, Homo Sapiens
YLKVLVDSL

SEQ ID NO: 6453 - protein, 9 aa, Homo Sapiens
YLLDLHSYL

SEQ ID NO: 6454 - protein, 9 aa, Homo Sapiens
YLLESVNKL

SEQ ID NO: 6455 - protein, 9 aa, Homo Sapiens
YLLPAIVHI

SEQ ID NO: 6456 - protein, 9 aa, Homo Sapiens
YLMEVTHDL

SEQ ID NO: 6457 - protein, 9 aa, Homo Sapiens
YLNALVHLI

SEQ ID NO: 6458 - protein, 9 aa, Homo Sapiens
YLNCIVEKV

SEQ ID NO: 6459 - protein, 9 aa, Homo Sapiens
YLNDFTHEI

SEQ ID NO: 6460 - protein, 9 aa, Homo Sapiens
YLNDGLWHM

SEQ ID NO: 6461 - protein, 9 aa, Homo Sapiens
YLNDLHEVL

SEQ ID NO: 6462 - protein, 9 aa, Homo Sapiens
YLNDLIHSV

SEQ ID NO: 6463 - protein, 9 aa, Homo Sapiens
YLNEQGDRV

SEQ ID NO: 6464 - protein, 9 aa, Homo Sapiens
YLNHLIQGL

SEQ ID NO: 6465 - protein, 9 aa, Homo Sapiens
YLNISRNLL

SEQ ID NO: 6466 - protein, 9 aa, Homo Sapiens
YLNKEIEEA

SEQ ID NO: 6467 - protein, 9 aa, Homo Sapiens
YLNKHIQKV

SEQ ID NO: 6468 - protein, 9 aa, Homo Sapiens
YLNNVVEQL

SEQ ID NO: 6469 - protein, 9 aa, Homo Sapiens
YLNPLERKL

SEQ ID NO: 6470 - protein, 9 aa, Homo Sapiens
YLNQHIEHV

SEQ ID NO: 6471 - protein, 9 aa, Homo Sapiens
YLNQHVNRI

SEQ ID NO: 6472 - protein, 9 aa, Homo Sapiens
YLNSILQHA

SEQ ID NO: 6473 - protein, 9 aa, Homo Sapiens
YLNSILQVL

SEQ ID NO: 6474 - protein, 9 aa, Homo Sapiens
YLNVQVKEL

SEQ ID NO: 6475 - protein, 9 aa, Homo Sapiens
YLPDIQERL

SEQ ID NO: 6476 - protein, 9 aa, Homo Sapiens
YLPEVKDLL

SEQ ID NO: 6477 - protein, 9 aa, Homo Sapiens
YLPQLFYHL

SEQ ID NO: 6478 - protein, 9 aa, Homo Sapiens
YLPTHTSLL

SEQ ID NO: 6479 - protein, 9 aa, Homo Sapiens
YLPTLWVKL

SEQ ID NO: 6480 - protein, 9 aa, Homo Sapiens
YLPYPIHQV

SEQ ID NO: 6481 - protein, 9 aa, Homo Sapiens
YLQAHTQSV

SEQ ID NO: 6482 - protein, 9 aa, Homo Sapiens
YLQCKLEQL

SEQ ID NO: 6483 - protein, 9 aa, Homo Sapiens
YLQDTMNHV

SEQ ID NO: 6484 - protein, 9 aa, Homo Sapiens
YLQDYTDRV

SEQ ID NO: 6485 - protein, 9 aa, Homo Sapiens
YLQEHAQEV

SEQ ID NO: 6486 - protein, 9 aa, Homo Sapiens
YLQEIQTQL

SEQ ID NO: 6487 - protein, 9 aa, Homo Sapiens
YLQEKLHAL

SEQ ID NO: 6488 - protein, 9 aa, Homo Sapiens
YLQGLEARL

SEQ ID NO: 6489 - protein, 9 aa, Homo Sapiens
YLQIHPQEL

SEQ ID NO: 6490 - protein, 9 aa, Homo Sapiens
YLQQVNHKL

SEQ ID NO: 6491 - protein, 9 aa, Homo Sapiens
YLQSEPCYV

SEQ ID NO: 6492 - protein, 9 aa, Homo Sapiens
YLQSITPCL

SEQ ID NO: 6493 - protein, 9 aa, Homo Sapiens
YLRKLTELL

SEQ ID NO: 6494 - protein, 9 aa, Homo Sapiens
YLSADHELL

SEQ ID NO: 6495 - protein, 9 aa, Homo Sapiens
YLSAKVEAL

SEQ ID NO: 6496 - protein, 9 aa, Homo Sapiens
YLSDNVHLV

SEQ ID NO: 6497 - protein, 9 aa, Homo Sapiens
YLSDPCPGL

SEQ ID NO: 6498 - protein, 9 aa, Homo Sapiens
YLSDSLRNL

SEQ ID NO: 6499 - protein, 9 aa, Homo Sapiens
YLSDYDNSL

SEQ ID NO: 6500 - protein, 9 aa, Homo Sapiens
YLSEAGASL

SEQ ID NO: 6501 - protein, 9 aa, Homo Sapiens
YLSEAGAYL

SEQ ID NO: 6502 - protein, 9 aa, Homo Sapiens
YLSEEVQAV

SEQ ID NO: 6503 - protein, 9 aa, Homo Sapiens
YLSEKVLAA

SEQ ID NO: 6504 - protein, 9 aa, Homo Sapiens
YLSELSEHV

SEQ ID NO: 6505 - protein, 9 aa, Homo Sapiens
YLSEQQEKL

SEQ ID NO: 6506 - protein, 9 aa, Homo Sapiens
YLSGIAHFL

SEQ ID NO: 6507 - protein, 9 aa, Homo Sapiens
YLSGYGVEL

SEQ ID NO: 6508 - protein, 9 aa, Homo Sapiens
YLSHIATEM

SEQ ID NO: 6509 - protein, 9 aa, Homo Sapiens
YLSKELASL

SEQ ID NO: 6510 - protein, 9 aa, Homo Sapiens
YLSKIIPAL

SEQ ID NO: 6511 - protein, 9 aa, Homo Sapiens
YLSKSLEKL

SEQ ID NO: 6512 - protein, 9 aa, Homo Sapiens
YLSLLNQQL

SEQ ID NO: 6513 - protein, 9 aa, Homo Sapiens
YLSNADERL

SEQ ID NO: 6514 - protein, 9 aa, Homo Sapiens
YLSPDLSKI

SEQ ID NO: 6515 - protein, 9 aa, Homo Sapiens
YLSPDLSKV

SEQ ID NO: 6516 - protein, 9 aa, Homo Sapiens
YLSPKLWAL

SEQ ID NO: 6517 - protein, 9 aa, Homo Sapiens
YLSQQQNMM

SEQ ID NO: 6518 - protein, 9 aa, Homo Sapiens
YLSSIQHLL

SEQ ID NO: 6519 - protein, 9 aa, Homo Sapiens
YLSSKLKQL

SEQ ID NO: 6520 - protein, 9 aa, Homo Sapiens
YLSSLQPRL

SEQ ID NO: 6521 - protein, 9 aa, Homo Sapiens
YLSTQVDRL

SEQ ID NO: 6522 - protein, 9 aa, Homo Sapiens
YLSVKIWDL

SEQ ID NO: 6523 - protein, 9 aa, Homo Sapiens
YLSWKAHRL

SEQ ID NO: 6524 - protein, 9 aa, Homo Sapiens
YLTAATHGL

SEQ ID NO: 6525 - protein, 9 aa, Homo Sapiens
YLTDRVMTV

SEQ ID NO: 6526 - protein, 9 aa, Homo Sapiens
YLTELIDRF

SEQ ID NO: 6527 - protein, 9 aa, Homo Sapiens
YLTHDSPSV

SEQ ID NO: 6528 - protein, 9 aa, Homo Sapiens
YLTPQSNHL

SEQ ID NO: 6529 - protein, 9 aa, Homo Sapiens
YLTRLLQSL

SEQ ID NO: 6530 - protein, 9 aa, Homo Sapiens
YLVDFTQKI

SEQ ID NO: 6531 - protein, 9 aa, Homo Sapiens
YLVEDIQHI

SEQ ID NO: 6532 - protein, 9 aa, Homo Sapiens
YLVKIFEEL

SEQ ID NO: 6533 - protein, 9 aa, Homo Sapiens
YLVKREDYL

SEQ ID NO: 6534 - protein, 9 aa, Homo Sapiens
YLVPELDGV

SEQ ID NO: 6535 - protein, 9 aa, Homo Sapiens
YLVTSIAKA

SEQ ID NO: 6536 - protein, 9 aa, Homo Sapiens
YLVVKIEKV

SEQ ID NO: 6537 - protein, 9 aa, Homo Sapiens
YLVYILNEL

SEQ ID NO: 6538 - protein, 9 aa, Homo Sapiens
YLWSRVEKL

SEQ ID NO: 6539 - protein, 9 aa, Homo Sapiens
YLYCGQEGL

SEQ ID NO: 6540 - protein, 9 aa, Homo Sapiens
YLYDLNHTL

SEQ ID NO: 6541 - protein, 9 aa, Homo Sapiens
YLYPDITRL

SEQ ID NO: 6542 - protein, 9 aa, Homo Sapiens
YLYTKEQLL

SEQ ID NO: 6543 - protein, 9 aa, Homo Sapiens
YLYVDKNFI

SEQ ID NO: 6544 - protein, 9 aa, Homo Sapiens
YMAAYIENA

SEQ ID NO: 6545 - protein, 9 aa, Homo Sapiens
YMAELIERL

SEQ ID NO: 6546 - protein, 9 aa, Homo Sapiens
YMAEREDEL

SEQ ID NO: 6547 - protein, 9 aa, Homo Sapiens
YMAKVIEKL

SEQ ID NO: 6548 - protein, 9 aa, Homo Sapiens
YMAPEVVEA

SEQ ID NO: 6549 - protein, 9 aa, Homo Sapiens
YMEEIYHRI

SEQ ID NO: 6550 - protein, 9 aa, Homo Sapiens
YMFEAREFL

SEQ ID NO: 6551 - protein, 9 aa, Homo Sapiens
YMHFLENQV

SEQ ID NO: 6552 - protein, 9 aa, Homo Sapiens
YMIAHITGL

SEQ ID NO: 6553 - protein, 9 aa, Homo Sapiens
YMLDLQKQL

SEQ ID NO: 6554 - protein, 9 aa, Homo Sapiens
YMLEHVITL

SEQ ID NO: 6555 - protein, 9 aa, Homo Sapiens
YMMPVNSEV

SEQ ID NO: 6556 - protein, 9 aa, Homo Sapiens
YMNAALQAL

SEQ ID NO: 6557 - protein, 9 aa, Homo Sapiens
YMNHIMVSV

SEQ ID NO: 6558 - protein, 9 aa, Homo Sapiens
YMNNDLIGL

SEQ ID NO: 6559 - protein, 9 aa, Homo Sapiens
YMNSVIQQL

SEQ ID NO: 6560 - protein, 9 aa, Homo Sapiens
YMRDKLDTL

SEQ ID NO: 6561 - protein, 9 aa, Homo Sapiens
YMSDSFINV

SEQ ID NO: 6562 - protein, 9 aa, Homo Sapiens
YMYEKESEL

SEQ ID NO: 6563 - protein, 9 aa, Homo Sapiens
YQAEIPDRL

SEQ ID NO: 6564 - protein, 9 aa, Homo Sapiens
YQFSKNFSL

SEQ ID NO: 6565 - protein, 9 aa, Homo Sapiens
YQNQEIHNL

SEQ ID NO: 6566 - protein, 9 aa, Homo Sapiens
YSAPCTYEL

SEQ ID NO: 6567 - protein, 9 aa, Homo Sapiens
YTAEIKQNL

SEQ ID NO: 6568 - protein, 9 aa, Homo Sapiens
YTCERNDQL

SEQ ID NO: 6569 - protein, 9 aa, Homo Sapiens
YTMEELHQL

SEQ ID NO: 6570 - protein, 9 aa, Homo Sapiens
YTNEKLQQL

SEQ ID NO: 6571 - protein, 9 aa, Homo Sapiens
YTSDLHFQV

SEQ ID NO: 6572 - protein, 9 aa, Homo Sapiens
YTSEVQAIL

SEQ ID NO: 6573 - protein, 9 aa, Homo Sapiens
YVAELIQQL

SEQ ID NO: 6574 - protein, 9 aa, Homo Sapiens
YVAEREDEL

SEQ ID NO: 6575 - protein, 9 aa, Homo Sapiens
YVAPHLNNL

SEQ ID NO: 6576 - protein, 9 aa, Homo Sapiens
YVASNQHEV

SEQ ID NO: 6577 - protein, 9 aa, Homo Sapiens
YVFPGVTRL

SEQ ID NO: 6578 - protein, 9 aa, Homo Sapiens
YVKDRVEKV

SEQ ID NO: 6579 - protein, 9 aa, Homo Sapiens
YVSEILEKV

SEQ ID NO: 6580 - protein, 9 aa, Homo Sapiens
YVSKYINYI

SEQ ID NO: 6581 - protein, 9 aa, Homo Sapiens
YVVPFVAKV

SEQ ID NO: 6582 - protein, 9 aa, Homo Sapiens
YVYSGVETL

SEQ ID NO: 6583 - protein, 10 aa, Homo Sapiens
AAFEFDIHQV

SEQ ID NO: 6584 - protein, 10 aa, Homo Sapiens
AIFDRVLTEL

SEQ ID NO: 6585 - protein, 10 aa, Homo Sapiens
AIIDGKIFCV

SEQ ID NO: 6586 - protein, 10 aa, Homo Sapiens
ALADGVTMQV

SEQ ID NO: 6587 - protein, 10 aa, Homo Sapiens
ALADGVVSQA

SEQ ID NO: 6588 - protein, 10 aa, Homo Sapiens
ALADIAQSQL

SEQ ID NO: 6589 - protein, 10 aa, Homo Sapiens
ALADVAYYTM

SEQ ID NO: 6590 - protein, 10 aa, Homo Sapiens
ALAEASGDFI

SEQ ID NO: 6591 - protein, 10 aa, Homo Sapiens
ALAEFLQRKL

SEQ ID NO: 6592 - protein, 10 aa, Homo Sapiens
ALAEIAKAEL

SEQ ID NO: 6593 - protein, 10 aa, Homo Sapiens
ALAGFQQRAL

SEQ ID NO: 6594 - protein, 10 aa, Homo Sapiens
ALAKAIEKNV

SEQ ID NO: 6595 - protein, 10 aa, Homo Sapiens
ALAPMEAAKV

SEQ ID NO: 6596 - protein, 10 aa, Homo Sapiens
ALARFRQAQL

SEQ ID NO: 6597 - protein, 10 aa, Homo Sapiens
ALASGKIAAA

SEQ ID NO: 6598 - protein, 10 aa, Homo Sapiens
ALAYIMDNKL

SEQ ID NO: 6599 - protein, 10 aa, Homo Sapiens
ALCDIKQAYT

SEQ ID NO: 6600 - protein, 10 aa, Homo Sapiens
ALCEENMRGV

SEQ ID NO: 6601 - protein, 10 aa, Homo Sapiens
ALEGSTQPLL

SEQ ID NO: 6602 - protein, 10 aa, Homo Sapiens
ALFMYKPKKV

SEQ ID NO: 6603 - protein, 10 aa, Homo Sapiens
ALFPAPLAQI

SEQ ID NO: 6604 - protein, 10 aa, Homo Sapiens
ALFPELPKSA

SEQ ID NO: 6605 - protein, 10 aa, Homo Sapiens
ALFPGCERGL

SEQ ID NO: 6606 - protein, 10 aa, Homo Sapiens
ALFPGDVDRL

SEQ ID NO: 6607 - protein, 10 aa, Homo Sapiens
ALFPKDVDRL

SEQ ID NO: 6608 - protein, 10 aa, Homo Sapiens
ALFQPHLINV

SEQ ID NO: 6609 - protein, 10 aa, Homo Sapiens
ALFQRPPLIA

SEQ ID NO: 6610 - protein, 10 aa, Homo Sapiens
ALFRDKVVAL

SEQ ID NO: 6611 - protein, 10 aa, Homo Sapiens
ALFSDTPANA

SEQ ID NO: 6612 - protein, 10 aa, Homo Sapiens
ALFSEKSVGL

SEQ ID NO: 6613 - protein, 10 aa, Homo Sapiens
ALIDEQILCV

SEQ ID NO: 6614 - protein, 10 aa, Homo Sapiens
ALIERGTAKL

SEQ ID NO: 6615 - protein, 10 aa, Homo Sapiens
ALKSGKLVTA

SEQ ID NO: 6616 - protein, 10 aa, Homo Sapiens
ALLEDSCHYL

SEQ ID NO: 6617 - protein, 10 aa, Homo Sapiens
ALMAGCIQEA

SEQ ID NO: 6618 - protein, 10 aa, Homo Sapiens
ALMAHAMEEV

SEQ ID NO: 6619 - protein, 10 aa, Homo Sapiens
ALNPNEIQRA

SEQ ID NO: 6620 - protein, 10 aa, Homo Sapiens
ALPDIKVLTL

SEQ ID NO: 6621 - protein, 10 aa, Homo Sapiens
ALQEACEAYL

SEQ ID NO: 6622 - protein, 10 aa, Homo Sapiens
ALQEASEAYL

SEQ ID NO: 6623 - protein, 10 aa, Homo Sapiens
ALSDLALHFL

SEQ ID NO: 6624 - protein, 10 aa, Homo Sapiens
ALSELSDLHA

SEQ ID NO: 6625 - protein, 10 aa, Homo Sapiens
ALSGLDMVGV

SEQ ID NO: 6626 - protein, 10 aa, Homo Sapiens
ALSGVTSHGL

SEQ ID NO: 6627 - protein, 10 aa, Homo Sapiens
ALSPVPSHWM

SEQ ID NO: 6628 - protein, 10 aa, Homo Sapiens
ALSQAREHQL

SEQ ID NO: 6629 - protein, 10 aa, Homo Sapiens
ALSSDKIAAL

SEQ ID NO: 6630 - protein, 10 aa, Homo Sapiens
ALVDGPCTQV

SEQ ID NO: 6631 - protein, 10 aa, Homo Sapiens
ALYDHLMDFL

SEQ ID NO: 6632 - protein, 10 aa, Homo Sapiens
ALYEKDNTYL

SEQ ID NO: 6633 - protein, 10 aa, Homo Sapiens
ALYHFSSSEL

SEQ ID NO: 6634 - protein, 10 aa, Homo Sapiens
ALYNKEMECL

SEQ ID NO: 6635 - protein, 10 aa, Homo Sapiens
ALYPGQLVQL

SEQ ID NO: 6636 - protein, 10 aa, Homo Sapiens
ALYPMAQCHL

SEQ ID NO: 6637 - protein, 10 aa, Homo Sapiens
ALYQKLITSA

SEQ ID NO: 6638 - protein, 10 aa, Homo Sapiens
AMFDHIPVGV

SEQ ID NO: 6639 - protein, 10 aa, Homo Sapiens
AMFEPDMQEA

SEQ ID NO: 6640 - protein, 10 aa, Homo Sapiens
AMFPDTIPRV

SEQ ID NO: 6641 - protein, 10 aa, Homo Sapiens
AMIAVVPGYI

SEQ ID NO: 6642 - protein, 10 aa, Homo Sapiens
AMYPDQVQLL

SEQ ID NO: 6643 - protein, 10 aa, Homo Sapiens
AQAEIEQYRL

SEQ ID NO: 6644 - protein, 10 aa, Homo Sapiens
AQYEEIANRS

SEQ ID NO: 6645 - protein, 10 aa, Homo Sapiens
AQYEHDLEVA

SEQ ID NO: 6646 - protein, 10 aa, Homo Sapiens
AVFDKTLAEL

SEQ ID NO: 6647 - protein, 10 aa, Homo Sapiens
AVGADAAYVF

SEQ ID NO: 6648 - protein, 10 aa, Homo Sapiens
AVYEGHVSCV

SEQ ID NO: 6649 - protein, 10 aa, Homo Sapiens
ELADIKQAYL

SEQ ID NO: 6650 - protein, 10 aa, Homo Sapiens
FAYDGKDYLT

SEQ ID NO: 6651 - protein, 10 aa, Homo Sapiens
FAYPNRPDVL

SEQ ID NO: 6652 - protein, 10 aa, Homo Sapiens
FGYPFRLNEA

SEQ ID NO: 6653 - protein, 10 aa, Homo Sapiens
FICDYELHEL

SEQ ID NO: 6654 - protein, 10 aa, Homo Sapiens
FIFEKKLAQA

SEQ ID NO: 6655 - protein, 10 aa, Homo Sapiens
FIFSEKPVFV

SEQ ID NO: 6656 - protein, 10 aa, Homo Sapiens
FIYHGEVPQA

SEQ ID NO: 6657 - protein, 10 aa, Homo Sapiens
FLAEDALNTV

SEQ ID NO: 6658 - protein, 10 aa, Homo Sapiens
FLAEDPKVTL

SEQ ID NO: 6659 - protein, 10 aa, Homo Sapiens
FLAEEGFYKF

SEQ ID NO: 6660 - protein, 10 aa, Homo Sapiens
FLAEEKHLHV

SEQ ID NO: 6661 - protein, 10 aa, Homo Sapiens
FLAEHDYGLF

SEQ ID NO: 6662 - protein, 10 aa, Homo Sapiens
FLAEHPNVTL

SEQ ID NO: 6663 - protein, 10 aa, Homo Sapiens
FLAERLYAEV

SEQ ID NO: 6664 - protein, 10 aa, Homo Sapiens
FLAPISSSKL

SEQ ID NO: 6665 - protein, 10 aa, Homo Sapiens
FLARHSNVNL

SEQ ID NO: 6666 - protein, 10 aa, Homo Sapiens
FLASDLDQKM

SEQ ID NO: 6667 - protein, 10 aa, Homo Sapiens
FLASVVDPRV

SEQ ID NO: 6668 - protein, 10 aa, Homo Sapiens
FLCNEAKNLL

SEQ ID NO: 6669 - protein, 10 aa, Homo Sapiens
FLFDEEMEQM

SEQ ID NO: 6670 - protein, 10 aa, Homo Sapiens
FLFDGSPTYV

SEQ ID NO: 6671 - protein, 10 aa, Homo Sapiens
FLFGEEPSKL

SEQ ID NO: 6672 - protein, 10 aa, Homo Sapiens
FLFNLPDQKA

SEQ ID NO: 6673 - protein, 10 aa, Homo Sapiens
FLFNTENKLL

SEQ ID NO: 6674 - protein, 10 aa, Homo Sapiens
FLFPNKESLI

SEQ ID NO: 6675 - protein, 10 aa, Homo Sapiens
FLGENISNFL

SEQ ID NO: 6676 - protein, 10 aa, Homo Sapiens
FLHDHVDLQV

SEQ ID NO: 6677 - protein, 10 aa, Homo Sapiens
FLHETGGAMV

SEQ ID NO: 6678 - protein, 10 aa, Homo Sapiens
FLHWYTGEGM

SEQ ID NO: 6679 - protein, 10 aa, Homo Sapiens
FLIDKNGCVV

SEQ ID NO: 6680 - protein, 10 aa, Homo Sapiens
FLIEEQKIVV

SEQ ID NO: 6681 - protein, 10 aa, Homo Sapiens
FLIEGTISRA

SEQ ID NO: 6682 - protein, 10 aa, Homo Sapiens
FLIGPKLYEA

SEQ ID NO: 6683 - protein, 10 aa, Homo Sapiens
FLIPFETRQL

SEQ ID NO: 6684 - protein, 10 aa, Homo Sapiens
FLKNEKGQYI

SEQ ID NO: 6685 - protein, 10 aa, Homo Sapiens
FLKPDDIQYF

SEQ ID NO: 6686 - protein, 10 aa, Homo Sapiens
FLKQGEDHCL

SEQ ID NO: 6687 - protein, 10 aa, Homo Sapiens
FLLPIKTVGV

SEQ ID NO: 6688 - protein, 10 aa, Homo Sapiens
FLNPDEVHAI

SEQ ID NO: 6689 - protein, 10 aa, Homo Sapiens
FLPEFAGTQL

SEQ ID NO: 6690 - protein, 10 aa, Homo Sapiens
FLPSHSLDTV

SEQ ID NO: 6691 - protein, 10 aa, Homo Sapiens
FLQEEPGQLL

SEQ ID NO: 6692 - protein, 10 aa, Homo Sapiens
FLQEGDLISA

SEQ ID NO: 6693 - protein, 10 aa, Homo Sapiens
FLQENTHVRL

SEQ ID NO: 6694 - protein, 10 aa, Homo Sapiens
FLQPGGYHVL

SEQ ID NO: 6695 - protein, 10 aa, Homo Sapiens
FLSDAEIIQL

SEQ ID NO: 6696 - protein, 10 aa, Homo Sapiens
FLSDIPSSQI

SEQ ID NO: 6697 - protein, 10 aa, Homo Sapiens
FLSEHPNVTL

SEQ ID NO: 6698 - protein, 10 aa, Homo Sapiens
FLSEVSENKL

SEQ ID NO: 6699 - protein, 10 aa, Homo Sapiens
FLSPKVDPSL

SEQ ID NO: 6700 - protein, 10 aa, Homo Sapiens
FLSQEHQQQV

SEQ ID NO: 6701 - protein, 10 aa, Homo Sapiens
FLSQIESDCL

SEQ ID NO: 6702 - protein, 10 aa, Homo Sapiens
FLSQIESDRL

SEQ ID NO: 6703 - protein, 10 aa, Homo Sapiens
FLSTLHEVYL

SEQ ID NO: 6704 - protein, 10 aa, Homo Sapiens
FLSYCPGMGV

SEQ ID NO: 6705 - protein, 10 aa, Homo Sapiens
FLWPDEDSRL

SEQ ID NO: 6706 - protein, 10 aa, Homo Sapiens
FLWVGATPHL

SEQ ID NO: 6707 - protein, 10 aa, Homo Sapiens
FLYAAQPELL

SEQ ID NO: 6708 - protein, 10 aa, Homo Sapiens
FLYEKLDRKV

SEQ ID NO: 6709 - protein, 10 aa, Homo Sapiens
FLYGSNAAFL

SEQ ID NO: 6710 - protein, 10 aa, Homo Sapiens
FLYKEKLVSV

SEQ ID NO: 6711 - protein, 10 aa, Homo Sapiens
FLYNHGIGTL

SEQ ID NO: 6712 - protein, 10 aa, Homo Sapiens
FLYPGKNGRL

SEQ ID NO: 6713 - protein, 10 aa, Homo Sapiens
FLYQQQGRLD

SEQ ID NO: 6714 - protein, 10 aa, Homo Sapiens
FLYTGEGDTV

SEQ ID NO: 6715 - protein, 10 aa, Homo Sapiens
FMAEHLEETL

SEQ ID NO: 6716 - protein, 10 aa, Homo Sapiens
FMAPIDHTTM

SEQ ID NO: 6717 - protein, 10 aa, Homo Sapiens
FMFDEKLVTV

SEQ ID NO: 6718 - protein, 10 aa, Homo Sapiens
FMFEGHDTTA

SEQ ID NO: 6719 - protein, 10 aa, Homo Sapiens
FMIDRDNSVF

SEQ ID NO: 6720 - protein, 10 aa, Homo Sapiens
FMKPGKVVLV

SEQ ID NO: 6721 - protein, 10 aa, Homo Sapiens
FQYESKVFYL

SEQ ID NO: 6722 - protein, 10 aa, Homo Sapiens
FQYPCYQEGL

SEQ ID NO: 6723 - protein, 10 aa, Homo Sapiens
FTFEGKLEAA

SEQ ID NO: 6724 - protein, 10 aa, Homo Sapiens
FVFDRPLPVS

SEQ ID NO: 6725 - protein, 10 aa, Homo Sapiens
FVYGGPQVQL

SEQ ID NO: 6726 - protein, 10 aa, Homo Sapiens
GIFGGHIRSV

SEQ ID NO: 6727 - protein, 10 aa, Homo Sapiens
GISDLAQHYL

SEQ ID NO: 6728 - protein, 10 aa, Homo Sapiens
GLAAGRTFLL

SEQ ID NO: 6729 - protein, 10 aa, Homo Sapiens
GLAGVKIAEV

SEQ ID NO: 6730 - protein, 10 aa, Homo Sapiens
GLAKRPGALL

SEQ ID NO: 6731 - protein, 10 aa, Homo Sapiens
GLAPLGEYRL

SEQ ID NO: 6732 - protein, 10 aa, Homo Sapiens
GLFGETLRAA

SEQ ID NO: 6733 - protein, 10 aa, Homo Sapiens
GLFGKELHKV

SEQ ID NO: 6734 - protein, 10 aa, Homo Sapiens
GLFPGGRHEL

SEQ ID NO: 6735 - protein, 10 aa, Homo Sapiens
GLFSNDIPHV

SEQ ID NO: 6736 - protein, 10 aa, Homo Sapiens
GLFTGLTPRL

SEQ ID NO: 6737 - protein, 10 aa, Homo Sapiens
GLIDDLQHCL

SEQ ID NO: 6738 - protein, 10 aa, Homo Sapiens
GLIDVKPLGV

SEQ ID NO: 6739 - protein, 10 aa, Homo Sapiens
GLIGVGLINV

SEQ ID NO: 6740 - protein, 10 aa, Homo Sapiens
GLKPGQDANL

SEQ ID NO: 6741 - protein, 10 aa, Homo Sapiens
GLSDHIQEEL

SEQ ID NO: 6742 - protein, 10 aa, Homo Sapiens
GLSDTATYKV

SEQ ID NO: 6743 - protein, 10 aa, Homo Sapiens
GLSKIVEHQV

SEQ ID NO: 6744 - protein, 10 aa, Homo Sapiens
GLSSLRDLNV

SEQ ID NO: 6745 - protein, 10 aa, Homo Sapiens
GLVAFEPHAL

SEQ ID NO: 6746 - protein, 10 aa, Homo Sapiens
GLWRGEEVTL

SEQ ID NO: 6747 - protein, 10 aa, Homo Sapiens
GLYDGPVCEV

SEQ ID NO: 6748 - protein, 10 aa, Homo Sapiens
GLYDKTCQFL

SEQ ID NO: 6749 - protein, 10 aa, Homo Sapiens
GLYEFPLNKV

SEQ ID NO: 6750 - protein, 10 aa, Homo Sapiens
GLYHFRDQIL

SEQ ID NO: 6751 - protein, 10 aa, Homo Sapiens
GLYPFRVNSA

SEQ ID NO: 6752 - protein, 10 aa, Homo Sapiens
GLYSDRISEL

SEQ ID NO: 6753 - protein, 10 aa, Homo Sapiens
GLYTGEVTEI

SEQ ID NO: 6754 - protein, 10 aa, Homo Sapiens
GMADICKNYI

SEQ ID NO: 6755 - protein, 10 aa, Homo Sapiens
GMAEFLDKHV

SEQ ID NO: 6756 - protein, 10 aa, Homo Sapiens
GMFKNLLKEV

SEQ ID NO: 6757 - protein, 10 aa, Homo Sapiens
GMYELKPECA

SEQ ID NO: 6758 - protein, 10 aa, Homo Sapiens
GMYYGRDVNV

SEQ ID NO: 6759 - protein, 10 aa, Homo Sapiens
GQFPSYLETV

SEQ ID NO: 6760 - protein, 10 aa, Homo Sapiens
GQYEGHEAEL

SEQ ID NO: 6761 - protein, 10 aa, Homo Sapiens
GVYGGSVHEA

SEQ ID NO: 6762 - protein, 10 aa, Homo Sapiens
HKDYIFLLLI

SEQ ID NO: 6763 - protein, 10 aa, Homo Sapiens
HLADLADFAL

SEQ ID NO: 6764 - protein, 10 aa, Homo Sapiens
HLAPFTDEQL

SEQ ID NO: 6765 - protein, 10 aa, Homo Sapiens
HLFDHVVNRV

SEQ ID NO: 6766 - protein, 10 aa, Homo Sapiens
HLFPGENCTL

SEQ ID NO: 6767 - protein, 10 aa, Homo Sapiens
HLFSGHLSTL

SEQ ID NO: 6768 - protein, 10 aa, Homo Sapiens
HLKEDQTEYL

SEQ ID NO: 6769 - protein, 10 aa, Homo Sapiens
HLNPNGHHFL

SEQ ID NO: 6770 - protein, 10 aa, Homo Sapiens
IGASVDPAGV

SEQ ID NO: 6771 - protein, 10 aa, Homo Sapiens
ILADCKASEV

SEQ ID NO: 6772 - protein, 10 aa, Homo Sapiens
ILADEQDVHM

SEQ ID NO: 6773 - protein, 10 aa, Homo Sapiens
ILADHPDAPM

SEQ ID NO: 6774 - protein, 10 aa, Homo Sapiens
ILAPCKLETV

SEQ ID NO: 6775 - protein, 10 aa, Homo Sapiens
ILAQVASEHL

SEQ ID NO: 6776 - protein, 10 aa, Homo Sapiens
ILCEALQHNL

SEQ ID NO: 6777 - protein, 10 aa, Homo Sapiens
ILDEIEEHNI

SEQ ID NO: 6778 - protein, 10 aa, Homo Sapiens
ILEEGKEILV

SEQ ID NO: 6779 - protein, 10 aa, Homo Sapiens
ILFNKKENAL

SEQ ID NO: 6780 - protein, 10 aa, Homo Sapiens
ILFPDIIARA

SEQ ID NO: 6781 - protein, 10 aa, Homo Sapiens
ILFSEGLIKA

SEQ ID NO: 6782 - protein, 10 aa, Homo Sapiens
ILIDENDNKI

SEQ ID NO: 6783 - protein, 10 aa, Homo Sapiens
ILKDVIPPLE

SEQ ID NO: 6784 - protein, 10 aa, Homo Sapiens
ILSDRQQHAL

SEQ ID NO: 6785 - protein, 10 aa, Homo Sapiens
ILSHINTVFV

SEQ ID NO: 6786 - protein, 10 aa, Homo Sapiens
ILSTIDRELL

SEQ ID NO: 6787 - protein, 10 aa, Homo Sapiens
ILYDKDHYKL

SEQ ID NO: 6788 - protein, 10 aa, Homo Sapiens
ILYPAAIVTI

SEQ ID NO: 6789 - protein, 10 aa, Homo Sapiens
IMAEGKQHAL

SEQ ID NO: 6790 - protein, 10 aa, Homo Sapiens
IMNEAKDFYL

SEQ ID NO: 6791 - protein, 10 aa, Homo Sapiens
IMWGYKDPLV

SEQ ID NO: 6792 - protein, 10 aa, Homo Sapiens
IVFNGPHLLL

SEQ ID NO: 6793 - protein, 10 aa, Homo Sapiens
KDKGAICTKL

SEQ ID NO: 6794 - protein, 10 aa, Homo Sapiens
KIADFGLARI

SEQ ID NO: 6795 - protein, 10 aa, Homo Sapiens
KIADFGLARV

SEQ ID NO: 6796 - protein, 10 aa, Homo Sapiens
KIFDEILVNA

SEQ ID NO: 6797 - protein, 10 aa, Homo Sapiens
KLADFGLARA

SEQ ID NO: 6798 - protein, 10 aa, Homo Sapiens
KLADIQIEQL

SEQ ID NO: 6799 - protein, 10 aa, Homo Sapiens
KLADISINYV

SEQ ID NO: 6800 - protein, 10 aa, Homo Sapiens
KLAEAERVGL

SEQ ID NO: 6801 - protein, 10 aa, Homo Sapiens
KLAEGAGIQL

SEQ ID NO: 6802 - protein, 10 aa, Homo Sapiens
KLAELKQECL

SEQ ID NO: 6803 - protein, 10 aa, Homo Sapiens
KLAENIDAQL

SEQ ID NO: 6804 - protein, 10 aa, Homo Sapiens
KLAGLEGAKL

SEQ ID NO: 6805 - protein, 10 aa, Homo Sapiens
KLAPNQTKEL

SEQ ID NO: 6806 - protein, 10 aa, Homo Sapiens
KLCEGFNEVL

SEQ ID NO: 6807 - protein, 10 aa, Homo Sapiens
KLFADAVQEL

SEQ ID NO: 6808 - protein, 10 aa, Homo Sapiens
KLFDDKLQNC

SEQ ID NO: 6809 - protein, 10 aa, Homo Sapiens
KLFEGENEHL

SEQ ID NO: 6810 - protein, 10 aa, Homo Sapiens
KLFEPYVVHV

SEQ ID NO: 6811 - protein, 10 aa, Homo Sapiens
KLFNEHIEAL

SEQ ID NO: 6812 - protein, 10 aa, Homo Sapiens
KLFNGTFLKA

SEQ ID NO: 6813 - protein, 10 aa, Homo Sapiens
KLFPDTPLAL

SEQ ID NO: 6814 - protein, 10 aa, Homo Sapiens
KLFPQETLFL

SEQ ID NO: 6815 - protein, 10 aa, Homo Sapiens
KLFPWAQIRL

SEQ ID NO: 6816 - protein, 10 aa, Homo Sapiens
KLFPYIQKGL

SEQ ID NO: 6817 - protein, 10 aa, Homo Sapiens
KLFQLPTPPL

SEQ ID NO: 6818 - protein, 10 aa, Homo Sapiens
KLFQSKLIKA

SEQ ID NO: 6819 - protein, 10 aa, Homo Sapiens
KLFSEGLFSA

SEQ ID NO: 6820 - protein, 10 aa, Homo Sapiens
KLFSKCILGA

SEQ ID NO: 6821 - protein, 10 aa, Homo Sapiens
KLFTDGDAAL

SEQ ID NO: 6822 - protein, 10 aa, Homo Sapiens
KLFTNDCIFL

SEQ ID NO: 6823 - protein, 10 aa, Homo Sapiens
KLFVGFLNRA

SEQ ID NO: 6824 - protein, 10 aa, Homo Sapiens
KLFVGLEHAV

SEQ ID NO: 6825 - protein, 10 aa, Homo Sapiens
KLHDVELHQV

SEQ ID NO: 6826 - protein, 10 aa, Homo Sapiens
KLIDGQVIQL

SEQ ID NO: 6827 - protein, 10 aa, Homo Sapiens
KLKPGDLVGV

SEQ ID NO: 6828 - protein, 10 aa, Homo Sapiens
KLMDLDVEQL

SEQ ID NO: 6829 - protein, 10 aa, Homo Sapiens
KLMDLRNEYL

SEQ ID NO: 6830 - protein, 10 aa, Homo Sapiens
KLMKEDGTTL

SEQ ID NO: 6831 - protein, 10 aa, Homo Sapiens
KLNPAANHRL

SEQ ID NO: 6832 - protein, 10 aa, Homo Sapiens
KLPDFLTAKL

SEQ ID NO: 6833 - protein, 10 aa, Homo Sapiens
KLQDAEIARL

SEQ ID NO: 6834 - protein, 10 aa, Homo Sapiens
KLSDISGQEM

SEQ ID NO: 6835 - protein, 10 aa, Homo Sapiens
KLSDLLKYYL

SEQ ID NO: 6836 - protein, 10 aa, Homo Sapiens
KLSDLQSVNV

SEQ ID NO: 6837 - protein, 10 aa, Homo Sapiens
KLTEMRGIYA

SEQ ID NO: 6838 - protein, 10 aa, Homo Sapiens
KLYDIDVAKV

SEQ ID NO: 6839 - protein, 10 aa, Homo Sapiens
KLYEGKTKEV

SEQ ID NO: 6840 - protein, 10 aa, Homo Sapiens
KLYEKKLLKL

SEQ ID NO: 6841 - protein, 10 aa, Homo Sapiens
KLYQYYLDHL

SEQ ID NO: 6842 - protein, 10 aa, Homo Sapiens
KLYTGKPNLV

SEQ ID NO: 6843 - protein, 10 aa, Homo Sapiens
KLYTGLEYDL

SEQ ID NO: 6844 - protein, 10 aa, Homo Sapiens
KMADIEYRLS

SEQ ID NO: 6845 - protein, 10 aa, Homo Sapiens
KMADIGGHAI

SEQ ID NO: 6846 - protein, 10 aa, Homo Sapiens
KMAEFLDWSL

SEQ ID NO: 6847 - protein, 10 aa, Homo Sapiens
KMFAEEEAEL

SEQ ID NO: 6848 - protein, 10 aa, Homo Sapiens
KMFESFIESV

SEQ ID NO: 6849 - protein, 10 aa, Homo Sapiens
KMFGAKDSEL

SEQ ID NO: 6850 - protein, 10 aa, Homo Sapiens
KMFLGDNAHL

SEQ ID NO: 6851 - protein, 10 aa, Homo Sapiens
KMFNQDIEKL

SEQ ID NO: 6852 - protein, 10 aa, Homo Sapiens
KMPDFGQVTV

SEQ ID NO: 6853 - protein, 10 aa, Homo Sapiens
KMYEEFLSKV

SEQ ID NO: 6854 - protein, 10 aa, Homo Sapiens
KMYGYVDTLL

SEQ ID NO: 6855 - protein, 10 aa, Homo Sapiens
KMYNKEVQTV

SEQ ID NO: 6856 - protein, 10 aa, Homo Sapiens
KQAEINENNV

SEQ ID NO: 6857 - protein, 10 aa, Homo Sapiens
KQFEGSTSFV

SEQ ID NO: 6858 - protein, 10 aa, Homo Sapiens
KQFPLIISSV

SEQ ID NO: 6859 - protein, 10 aa, Homo Sapiens
KVFELDLVTL

SEQ ID NO: 6860 - protein, 10 aa, Homo Sapiens
KVFQGTDEQL

SEQ ID NO: 6861 - protein, 10 aa, Homo Sapiens
KVFSGALQEA

SEQ ID NO: 6862 - protein, 10 aa, Homo Sapiens
LAIREACIKL

SEQ ID NO: 6863 - protein, 10 aa, Homo Sapiens
LEAQARVHQL

SEQ ID NO: 6864 - protein, 10 aa, Homo Sapiens
LFDKATYDKL

SEQ ID NO: 6865 - protein, 10 aa, Homo Sapiens
LFLHAGIVLP

SEQ ID NO: 6866 - protein, 10 aa, Homo Sapiens
LIAEENALRG

SEQ ID NO: 6867 - protein, 10 aa, Homo Sapiens
LLADCNDHQM

SEQ ID NO: 6868 - protein, 10 aa, Homo Sapiens
LLAEDDELHL

SEQ ID NO: 6869 - protein, 10 aa, Homo Sapiens
LLAEIGAVTL

SEQ ID NO: 6870 - protein, 10 aa, Homo Sapiens
LLAELREYNL

SEQ ID NO: 6871 - protein, 10 aa, Homo Sapiens
LLAWFPLQEA

SEQ ID NO: 6872 - protein, 10 aa, Homo Sapiens
LLFDDIDHNM

SEQ ID NO: 6873 - protein, 10 aa, Homo Sapiens
LLFEGEKITI

SEQ ID NO: 6874 - protein, 10 aa, Homo Sapiens
LLFGKIGYYL

SEQ ID NO: 6875 - protein, 10 aa, Homo Sapiens
LLFPHPVNQV

SEQ ID NO: 6876 - protein, 10 aa, Homo Sapiens
LLFPSDVQTL

SEQ ID NO: 6877 - protein, 10 aa, Homo Sapiens
LLHAGGLARA

SEQ ID NO: 6878 - protein, 10 aa, Homo Sapiens
LLNPAYDVYL

SEQ ID NO: 6879 - protein, 10 aa, Homo Sapiens
LLPDQPPYHL

SEQ ID NO: 6880 - protein, 10 aa, Homo Sapiens
LLSAAEPVPA

SEQ ID NO: 6881 - protein, 10 aa, Homo Sapiens
LLSEHGEVKL

SEQ ID NO: 6882 - protein, 10 aa, Homo Sapiens
LLSEQGDVKL

SEQ ID NO: 6883 - protein, 10 aa, Homo Sapiens
LLSHSLLVTL

SEQ ID NO: 6884 - protein, 10 aa, Homo Sapiens
LLYDDKGVGL

SEQ ID NO: 6885 - protein, 10 aa, Homo Sapiens
LLYEDIPDKV

SEQ ID NO: 6886 - protein, 10 aa, Homo Sapiens
LLYGGDLHSA

SEQ ID NO: 6887 - protein, 10 aa, Homo Sapiens
LLYPCIDSHL

SEQ ID NO: 6888 - protein, 10 aa, Homo Sapiens
LLYQGPHNTL

SEQ ID NO: 6889 - protein, 10 aa, Homo Sapiens
LMPYFLLTQA

SEQ ID NO: 6890 - protein, 10 aa, Homo Sapiens
LTFRDPLALL

SEQ ID NO: 6891 - protein, 10 aa, Homo Sapiens
LTGQRVLDAL

SEQ ID NO: 6892 - protein, 10 aa, Homo Sapiens
LVYEGQLSQA

SEQ ID NO: 6893 - protein, 10 aa, Homo Sapiens
MLFSGQGSLL

SEQ ID NO: 6894 - protein, 10 aa, Homo Sapiens
MMFGGKQVVV

SEQ ID NO: 6895 - protein, 10 aa, Homo Sapiens
NDMRQEYEQL

SEQ ID NO: 6896 - protein, 10 aa, Homo Sapiens
NIAEGLRALL

SEQ ID NO: 6897 - protein, 10 aa, Homo Sapiens
NIKNIPIPTL

SEQ ID NO: 6898 - protein, 10 aa, Homo Sapiens
NLFDLGGQYL

SEQ ID NO: 6899 - protein, 10 aa, Homo Sapiens
NLFPSNLVVA

SEQ ID NO: 6900 - protein, 10 aa, Homo Sapiens
NLYSKMLAKV

SEQ ID NO: 6901 - protein, 10 aa, Homo Sapiens
NNMRSQYEQL

SEQ ID NO: 6902 - protein, 10 aa, Homo Sapiens
QLFDNDRTQL

SEQ ID NO: 6903 - protein, 10 aa, Homo Sapiens
QLFQDEVAKA

SEQ ID NO: 6904 - protein, 10 aa, Homo Sapiens
QLIGIQDGYL

SEQ ID NO: 6905 - protein, 10 aa, Homo Sapiens
QLSNGEPHFL

SEQ ID NO: 6906 - protein, 10 aa, Homo Sapiens
QLYPENSEQL

SEQ ID NO: 6907 - protein, 10 aa, Homo Sapiens
QLYRGLGGQL

SEQ ID NO: 6908 - protein, 10 aa, Homo Sapiens
QVFPGLLERV

SEQ ID NO: 6909 - protein, 10 aa, Homo Sapiens
RAILPHAGLL

SEQ ID NO: 6910 - protein, 10 aa, Homo Sapiens
RIFGKKQMRI

SEQ ID NO: 6911 - protein, 10 aa, Homo Sapiens
RLANKIEHEL

SEQ ID NO: 6912 - protein, 10 aa, Homo Sapiens
RLCDSKGAYL

SEQ ID NO: 6913 - protein, 10 aa, Homo Sapiens
RLFADILNDV

SEQ ID NO: 6914 - protein, 10 aa, Homo Sapiens
RLFEGTGARL

SEQ ID NO: 6915 - protein, 10 aa, Homo Sapiens
RLFNDPVAMV

SEQ ID NO: 6916 - protein, 10 aa, Homo Sapiens
RLFNEHLVSA

SEQ ID NO: 6917 - protein, 10 aa, Homo Sapiens
RLFPGAPPTA

SEQ ID NO: 6918 - protein, 10 aa, Homo Sapiens
RLFQQKLDEL

SEQ ID NO: 6919 - protein, 10 aa, Homo Sapiens
RLFSKSIETL

SEQ ID NO: 6920 - protein, 10 aa, Homo Sapiens
RLFTDVIICV

SEQ ID NO: 6921 - protein, 10 aa, Homo Sapiens
RLFTEKILRA

SEQ ID NO: 6922 - protein, 10 aa, Homo Sapiens
RLIDDMVAQA

SEQ ID NO: 6923 - protein, 10 aa, Homo Sapiens
RLIDDMVAQV

SEQ ID NO: 6924 - protein, 10 aa, Homo Sapiens
RLKEEGNEQF

SEQ ID NO: 6925 - protein, 10 aa, Homo Sapiens
RLMNLPLHSV

SEQ ID NO: 6926 - protein, 10 aa, Homo Sapiens
RLMQGDEICL

SEQ ID NO: 6927 - protein, 10 aa, Homo Sapiens
RLPDINIYQL

SEQ ID NO: 6928 - protein, 10 aa, Homo Sapiens
RLYHEDHPQL

SEQ ID NO: 6929 - protein, 10 aa, Homo Sapiens
RLYPEGLAQL

SEQ ID NO: 6930 - protein, 10 aa, Homo Sapiens
RLYPFKNDEV

SEQ ID NO: 6931 - protein, 10 aa, Homo Sapiens
RLYPWGVVEV

SEQ ID NO: 6932 - protein, 10 aa, Homo Sapiens
RMFADDLHNL

SEQ ID NO: 6933 - protein, 10 aa, Homo Sapiens
RMFDGKFVVA

SEQ ID NO: 6934 - protein, 10 aa, Homo Sapiens
RMYPFQIHSI

SEQ ID NO: 6935 - protein, 10 aa, Homo Sapiens
RQYPWGVAEV

SEQ ID NO: 6936 - protein, 10 aa, Homo Sapiens
SIPDIEQPNV

SEQ ID NO: 6937 - protein, 10 aa, Homo Sapiens
SIQLHGAKLL

SEQ ID NO: 6938 - protein, 10 aa, Homo Sapiens
SIYPLHDVFV

SEQ ID NO: 6939 - protein, 10 aa, Homo Sapiens
SLADGRDRPL

SEQ ID NO: 6940 - protein, 10 aa, Homo Sapiens
SLADLQNDEV

SEQ ID NO: 6941 - protein, 10 aa, Homo Sapiens
SLADVDPMQL

SEQ ID NO: 6942 - protein, 10 aa, Homo Sapiens
SLADVMSEQL

SEQ ID NO: 6943 - protein, 10 aa, Homo Sapiens
SLAETDKITL

SEQ ID NO: 6944 - protein, 10 aa, Homo Sapiens
SLAGIPSPSL

SEQ ID NO: 6945 - protein, 10 aa, Homo Sapiens
SLANLDTNKL

SEQ ID NO: 6946 - protein, 10 aa, Homo Sapiens
SLANNPQYKL

SEQ ID NO: 6947 - protein, 10 aa, Homo Sapiens
SLAPDGRTFV

SEQ ID NO: 6948 - protein, 10 aa, Homo Sapiens
SLAPDTRLFV

SEQ ID NO: 6949 - protein, 10 aa, Homo Sapiens
SLAPNIISQL

SEQ ID NO: 6950 - protein, 10 aa, Homo Sapiens
SLAPNSRYYL

SEQ ID NO: 6951 - protein, 10 aa, Homo Sapiens
SLCDSPHQNL

SEQ ID NO: 6952 - protein, 10 aa, Homo Sapiens
SLFAGGMLRV

SEQ ID NO: 6953 - protein, 10 aa, Homo Sapiens
SLFAQRLKTL

SEQ ID NO: 6954 - protein, 10 aa, Homo Sapiens
SLFDAKERTV

SEQ ID NO: 6955 - protein, 10 aa, Homo Sapiens
SLFEGKALGL

SEQ ID NO: 6956 - protein, 10 aa, Homo Sapiens
SLFEKATDEL

SEQ ID NO: 6957 - protein, 10 aa, Homo Sapiens
SLFEKGLKNV

SEQ ID NO: 6958 - protein, 10 aa, Homo Sapiens
SLFGEAPQNL

SEQ ID NO: 6959 - protein, 10 aa, Homo Sapiens
SLFGGSVKLA

SEQ ID NO: 6960 - protein, 10 aa, Homo Sapiens
SLFGQDVKAV

SEQ ID NO: 6961 - protein, 10 aa, Homo Sapiens
SLFGQKHNAV

SEQ ID NO: 6962 - protein, 10 aa, Homo Sapiens
SLFGYSPAAA

SEQ ID NO: 6963 - protein, 10 aa, Homo Sapiens
SLFNGALDQA

SEQ ID NO: 6964 - protein, 10 aa, Homo Sapiens
SLFPGKLEVV

SEQ ID NO: 6965 - protein, 10 aa, Homo Sapiens
SLFPHNPQFI

SEQ ID NO: 6966 - protein, 10 aa, Homo Sapiens
SLFSGILKEM

SEQ ID NO: 6967 - protein, 10 aa, Homo Sapiens
SLFSGKPEVL

SEQ ID NO: 6968 - protein, 10 aa, Homo Sapiens
SLFSHSLISI

SEQ ID NO: 6969 - protein, 10 aa, Homo Sapiens
SLINVGLISV

SEQ ID NO: 6970 - protein, 10 aa, Homo Sapiens
SLKPGKIDHL

SEQ ID NO: 6971 - protein, 10 aa, Homo Sapiens
SLPDFGISYV

SEQ ID NO: 6972 - protein, 10 aa, Homo Sapiens
SLSDLHKFCL

SEQ ID NO: 6973 - protein, 10 aa, Homo Sapiens
SLSDLTGSLL

SEQ ID NO: 6974 - protein, 10 aa, Homo Sapiens
SLSELQISYV

SEQ ID NO: 6975 - protein, 10 aa, Homo Sapiens
SLSNIQQHSV

SEQ ID NO: 6976 - protein, 10 aa, Homo Sapiens
SLYGDLDSAL

SEQ ID NO: 6977 - protein, 10 aa, Homo Sapiens
SLYGGDSKFL

SEQ ID NO: 6978 - protein, 10 aa, Homo Sapiens
SLYSEKEVFI

SEQ ID NO: 6979 - protein, 10 aa, Homo Sapiens
SMFGKLIDLA

SEQ ID NO: 6980 - protein, 10 aa, Homo Sapiens
SMFTSNLKEA

SEQ ID NO: 6981 - protein, 10 aa, Homo Sapiens
SMKEVDEQML

SEQ ID NO: 6982 - protein, 10 aa, Homo Sapiens
SMYGVDLHHA

SEQ ID NO: 6983 - protein, 10 aa, Homo Sapiens
SMYGVDLHKA

SEQ ID NO: 6984 - protein, 10 aa, Homo Sapiens
SMYPIALTRA

SEQ ID NO: 6985 - protein, 10 aa, Homo Sapiens
SMYPTRIEGA

SEQ ID NO: 6986 - protein, 10 aa, Homo Sapiens
STFPGAEHCL

SEQ ID NO: 6987 - protein, 10 aa, Homo Sapiens
SVFGGKNIHV

SEQ ID NO: 6988 - protein, 10 aa, Homo Sapiens
TIPDFIFANV

SEQ ID NO: 6989 - protein, 10 aa, Homo Sapiens
TLADFCDQQL

SEQ ID NO: 6990 - protein, 10 aa, Homo Sapiens
TLADSVGHHL

SEQ ID NO: 6991 - protein, 10 aa, Homo Sapiens
TLAEIAKAEL

SEQ ID NO: 6992 - protein, 10 aa, Homo Sapiens
TLAEIAKVEL

SEQ ID NO: 6993 - protein, 10 aa, Homo Sapiens
TLAEVPEHVL

SEQ ID NO: 6994 - protein, 10 aa, Homo Sapiens
TLFAGYTDNL

SEQ ID NO: 6995 - protein, 10 aa, Homo Sapiens
TLFDHAPDKL

SEQ ID NO: 6996 - protein, 10 aa, Homo Sapiens
TLFKGFGDRL

SEQ ID NO: 6997 - protein, 10 aa, Homo Sapiens
TLFPGKVHSL

SEQ ID NO: 6998 - protein, 10 aa, Homo Sapiens
TLFPKDVQLA

SEQ ID NO: 6999 - protein, 10 aa, Homo Sapiens
TLFPVRLLVA

SEQ ID NO: 7000 - protein, 10 aa, Homo Sapiens
TLFQHQIIHA

SEQ ID NO: 7001 - protein, 10 aa, Homo Sapiens
TLHGLQQYYV

SEQ ID NO: 7002 - protein, 10 aa, Homo Sapiens
TLIDDKPYCA

SEQ ID NO: 7003 - protein, 10 aa, Homo Sapiens
TLYEVKSENL

SEQ ID NO: 7004 - protein, 10 aa, Homo Sapiens
TLYPLHILFV

SEQ ID NO: 7005 - protein, 10 aa, Homo Sapiens
TMYPGIADRM

SEQ ID NO: 7006 - protein, 10 aa, Homo Sapiens
TMYPGLPSRL

SEQ ID NO: 7007 - protein, 10 aa, Homo Sapiens
TVQGLSLQEL

SEQ ID NO: 7008 - protein, 10 aa, Homo Sapiens
TVYGGYLCSV

SEQ ID NO: 7009 - protein, 10 aa, Homo Sapiens
VDGAYMTKVD

SEQ ID NO: 7010 - protein, 10 aa, Homo Sapiens
VLADVMDDQL

SEQ ID NO: 7011 - protein, 10 aa, Homo Sapiens
VLAEIDPKQL

SEQ ID NO: 7012 - protein, 10 aa, Homo Sapiens
VLAEIPEQFL

SEQ ID NO: 7013 - protein, 10 aa, Homo Sapiens
VLAGLQHPNI

SEQ ID NO: 7014 - protein, 10 aa, Homo Sapiens
VLANGLDNKL

SEQ ID NO: 7015 - protein, 10 aa, Homo Sapiens
VLEGRAQPQL

SEQ ID NO: 7016 - protein, 10 aa, Homo Sapiens
VLFDDELLMV

SEQ ID NO: 7017 - protein, 10 aa, Homo Sapiens
VLFDKVCEHL

SEQ ID NO: 7018 - protein, 10 aa, Homo Sapiens
VLFEDAVAHI

SEQ ID NO: 7019 - protein, 10 aa, Homo Sapiens
VLFEGRTVQL

SEQ ID NO: 7020 - protein, 10 aa, Homo Sapiens
VLFEHAVGYA

SEQ ID NO: 7021 - protein, 10 aa, Homo Sapiens
VLFEKEVNEV

SEQ ID NO: 7022 - protein, 10 aa, Homo Sapiens
VLFGAVITGA

SEQ ID NO: 7023 - protein, 10 aa, Homo Sapiens
VLFGQVVRGL

SEQ ID NO: 7024 - protein, 10 aa, Homo Sapiens
VLFGREVSPA

SEQ ID NO: 7025 - protein, 10 aa, Homo Sapiens
VLFKAQLEKA

SEQ ID NO: 7026 - protein, 10 aa, Homo Sapiens
VLFPESPARA

SEQ ID NO: 7027 - protein, 10 aa, Homo Sapiens
VLIGGKPDRV

SEQ ID NO: 7028 - protein, 10 aa, Homo Sapiens
VLKEEASDYL

SEQ ID NO: 7029 - protein, 10 aa, Homo Sapiens
VLKEGSEYRV

SEQ ID NO: 7030 - protein, 10 aa, Homo Sapiens
VLPNFLPYNV

SEQ ID NO: 7031 - protein, 10 aa, Homo Sapiens
VLSAADKGNV

SEQ ID NO: 7032 - protein, 10 aa, Homo Sapiens
VLSDIKSIGL

SEQ ID NO: 7033 - protein, 10 aa, Homo Sapiens
VLYGGLLEHL

SEQ ID NO: 7034 - protein, 10 aa, Homo Sapiens
VLYGPKIDRA

SEQ ID NO: 7035 - protein, 10 aa, Homo Sapiens
VLYPASPHGV

SEQ ID NO: 7036 - protein, 10 aa, Homo Sapiens
VLYPHEPTAV

SEQ ID NO: 7037 - protein, 10 aa, Homo Sapiens
VMFGGKQVVV

SEQ ID NO: 7038 - protein, 10 aa, Homo Sapiens
VMFRTPLASV

SEQ ID NO: 7039 - protein, 10 aa, Homo Sapiens
VMIAGKVAVV

SEQ ID NO: 7040 - protein, 10 aa, Homo Sapiens
VTLWICGLKL

SEQ ID NO: 7041 - protein, 10 aa, Homo Sapiens
WLKEHVEPVF

SEQ ID NO: 7042 - protein, 10 aa, Homo Sapiens
YAYDGKDYIA

SEQ ID NO: 7043 - protein, 10 aa, Homo Sapiens
YDAEISQIHQ

SEQ ID NO: 7044 - protein, 10 aa, Homo Sapiens
YIFEGLGHLI

SEQ ID NO: 7045 - protein, 10 aa, Homo Sapiens
YIYDKDMEII

SEQ ID NO: 7046 - protein, 10 aa, Homo Sapiens
YLADTTHTSL

SEQ ID NO: 7047 - protein, 10 aa, Homo Sapiens
YLAELVTPIL

SEQ ID NO: 7048 - protein, 10 aa, Homo Sapiens
YLAPGDYHCF

SEQ ID NO: 7049 - protein, 10 aa, Homo Sapiens
YLAREGLIRA

SEQ ID NO: 7050 - protein, 10 aa, Homo Sapiens
YLASDEITTV

SEQ ID NO: 7051 - protein, 10 aa, Homo Sapiens
YLDEDTIYHL

SEQ ID NO: 7052 - protein, 10 aa, Homo Sapiens
YLDIKGLLDV

SEQ ID NO: 7053 - protein, 10 aa, Homo Sapiens
YLEGTKAQYL

SEQ ID NO: 7054 - protein, 10 aa, Homo Sapiens
YLEKGKETLL

SEQ ID NO: 7055 - protein, 10 aa, Homo Sapiens
YLFDRNGVCL

SEQ ID NO: 7056 - protein, 10 aa, Homo Sapiens
YLFEQVQHNL

SEQ ID NO: 7057 - protein, 10 aa, Homo Sapiens
YLHESTQDEL

SEQ ID NO: 7058 - protein, 10 aa, Homo Sapiens
YLIDEPSAYL

SEQ ID NO: 7059 - protein, 10 aa, Homo Sapiens
YLIDFKHHFM

SEQ ID NO: 7060 - protein, 10 aa, Homo Sapiens
YLIDRDPTYF

SEQ ID NO: 7061 - protein, 10 aa, Homo Sapiens
YLINSPVVRA

SEQ ID NO: 7062 - protein, 10 aa, Homo Sapiens
YLIQSVPAEL

SEQ ID NO: 7063 - protein, 10 aa, Homo Sapiens
YLITGNLEKL

SEQ ID NO: 7064 - protein, 10 aa, Homo Sapiens
YLKDGPYITA

SEQ ID NO: 7065 - protein, 10 aa, Homo Sapiens
YLKGGVADAL

SEQ ID NO: 7066 - protein, 10 aa, Homo Sapiens
YLMEGSYNKV

SEQ ID NO: 7067 - protein, 10 aa, Homo Sapiens
YLMEQNVTKL

SEQ ID NO: 7068 - protein, 10 aa, Homo Sapiens
YLNDLHEVLL

SEQ ID NO: 7069 - protein, 10 aa, Homo Sapiens
YLNKAGIVQA

SEQ ID NO: 7070 - protein, 10 aa, Homo Sapiens
YLNKDTHDQL

SEQ ID NO: 7071 - protein, 10 aa, Homo Sapiens
YLNKNALTTL

SEQ ID NO: 7072 - protein, 10 aa, Homo Sapiens
YLPENKPCYL

SEQ ID NO: 7073 - protein, 10 aa, Homo Sapiens
YLSDEGHYWV

SEQ ID NO: 7074 - protein, 10 aa, Homo Sapiens
YLSDIPIHNA

SEQ ID NO: 7075 - protein, 10 aa, Homo Sapiens
YLSDIPLHDA

SEQ ID NO: 7076 - protein, 10 aa, Homo Sapiens
YLSEIEMAKA

SEQ ID NO: 7077 - protein, 10 aa, Homo Sapiens
YLSEVGDTQV

SEQ ID NO: 7078 - protein, 10 aa, Homo Sapiens
YLSQEHQQQV

SEQ ID NO: 7079 - protein, 10 aa, Homo Sapiens
YLYGQTTTYL

SEQ ID NO: 7080 - protein, 10 aa, Homo Sapiens
YLYKQPAEHL

SEQ ID NO: 7081 - protein, 10 aa, Homo Sapiens
YLYNWKCPSM

SEQ ID NO: 7082 - protein, 10 aa, Homo Sapiens
YLYPIKNLEM

SEQ ID NO: 7083 - protein, 10 aa, Homo Sapiens
YMFEEVPIVI

SEQ ID NO: 7084 - protein, 10 aa, Homo Sapiens
YMFPDTMLQA

SEQ ID NO: 7085 - protein, 10 aa, Homo Sapiens
YMFQHIEESF

SEQ ID NO: 7086 - protein, 10 aa, Homo Sapiens
YMYEKESELI

SEQ ID NO: 7087 - protein, 10 aa, Homo Sapiens
YQAPDIDVQL

SEQ ID NO: 7088 - protein, 10 aa, Homo Sapiens
YQWDDPDPRL

SEQ ID NO: 7089 - protein, 10 aa, Homo Sapiens
YVFDGKPPQL

SEQ ID NO: 7090 - protein, 10 aa, Homo Sapiens
YVFEGKMLEA

SEQ ID NO: 7091 - protein, 11 aa, Homo Sapiens
AEQNRKDAEAW

SEQ ID NO: 7092 - protein, 11 aa, Homo Sapiens
AEQRGELAIKD

SEQ ID NO: 7093 - protein, 11 aa, Homo Sapiens
AGGVQRQEVVC

SEQ ID NO: 7094 - protein, 11 aa, Homo Sapiens
ALADILSEPTM

SEQ ID NO: 7095 - protein, 11 aa, Homo Sapiens
ALADKELLPSV

SEQ ID NO: 7096 - protein, 11 aa, Homo Sapiens
ALADVPELARL

SEQ ID NO: 7097 - protein, 11 aa, Homo Sapiens
ALAEMLKENKV

SEQ ID NO: 7098 - protein, 11 aa, Homo Sapiens
ALAEMPDSAAA

SEQ ID NO: 7099 - protein, 11 aa, Homo Sapiens
ALAGPEVEAHL

SEQ ID NO: 7100 - protein, 11 aa, Homo Sapiens
ALAHEKFTKEL

SEQ ID NO: 7101 - protein, 11 aa, Homo Sapiens
ALANRKIGHFL

SEQ ID NO: 7102 - protein, 11 aa, Homo Sapiens
ALCDPTVASRL

SEQ ID NO: 7103 - protein, 11 aa, Homo Sapiens
ALCPQVINAAL

SEQ ID NO: 7104 - protein, 11 aa, Homo Sapiens
ALCSEAALQAI

SEQ ID NO: 7105 - protein, 11 aa, Homo Sapiens
ALEEPDDQNRI

SEQ ID NO: 7106 - protein, 11 aa, Homo Sapiens
ALFDCDGNGEL

SEQ ID NO: 7107 - protein, 11 aa, Homo Sapiens
ALFDEQHREEM

SEQ ID NO: 7108 - protein, 11 aa, Homo Sapiens
ALFEAAREVTL

SEQ ID NO: 7109 - protein, 11 aa, Homo Sapiens
ALFEQKGPVYV

SEQ ID NO: 7110 - protein, 11 aa, Homo Sapiens
ALFNKGGSVFL

SEQ ID NO: 7111 - protein, 11 aa, Homo Sapiens
ALFPENFHQNL

SEQ ID NO: 7112 - protein, 11 aa, Homo Sapiens
ALFPHLLQPVL

SEQ ID NO: 7113 - protein, 11 aa, Homo Sapiens
ALFSKAEEQLL

SEQ ID NO: 7114 - protein, 11 aa, Homo Sapiens
ALFWADKVASL

SEQ ID NO: 7115 - protein, 11 aa, Homo Sapiens
ALGEEALLRYV

SEQ ID NO: 7116 - protein, 11 aa, Homo Sapiens
ALGTDAEGQKV

SEQ ID NO: 7117 - protein, 11 aa, Homo Sapiens
ALIEAEKVAQV

SEQ ID NO: 7118 - protein, 11 aa, Homo Sapiens
ALKEDDPKAAL

SEQ ID NO: 7119 - protein, 11 aa, Homo Sapiens
ALKELMEIEEV

SEQ ID NO: 7120 - protein, 11 aa, Homo Sapiens
ALNARGGGNQV

SEQ ID NO: 7121 - protein, 11 aa, Homo Sapiens
ALPSEELNRQL

SEQ ID NO: 7122 - protein, 11 aa, Homo Sapiens
ALQEACEAYLV

SEQ ID NO: 7123 - protein, 11 aa, Homo Sapiens
ALQEASEAYLV

SEQ ID NO: 7124 - protein, 11 aa, Homo Sapiens
ALSDIEKNYQL

SEQ ID NO: 7125 - protein, 11 aa, Homo Sapiens
ALTDITNLNHL

SEQ ID NO: 7126 - protein, 11 aa, Homo Sapiens
ALYILGDKAQL

SEQ ID NO: 7127 - protein, 11 aa, Homo Sapiens
AMASLGALALL

SEQ ID NO: 7128 - protein, 11 aa, Homo Sapiens
AMATESILHFA

SEQ ID NO: 7129 - protein, 11 aa, Homo Sapiens
AVADENQNHHL

SEQ ID NO: 7130 - protein, 11 aa, Homo Sapiens
AVAGPEMQVKL

SEQ ID NO: 7131 - protein, 11 aa, Homo Sapiens
AVEDLESVGKG

SEQ ID NO: 7132 - protein, 11 aa, Homo Sapiens
FIADSHQNFAL

SEQ ID NO: 7133 - protein, 11 aa, Homo Sapiens
FICEQDHQNFL

SEQ ID NO: 7134 - protein, 11 aa, Homo Sapiens
FLADPDTVNHL

SEQ ID NO: 7135 - protein, 11 aa, Homo Sapiens
FLADPSAFVAA

SEQ ID NO: 7136 - protein, 11 aa, Homo Sapiens
FLADRGVDNTF

SEQ ID NO: 7137 - protein, 11 aa, Homo Sapiens
FLAEEKHLHVL

SEQ ID NO: 7138 - protein, 11 aa, Homo Sapiens
FLAEGLRNENL

SEQ ID NO: 7139 - protein, 11 aa, Homo Sapiens
FLAEIEALEKM

SEQ ID NO: 7140 - protein, 11 aa, Homo Sapiens
FLAHDQAVRTL

SEQ ID NO: 7141 - protein, 11 aa, Homo Sapiens
FLANNPFSCKL

SEQ ID NO: 7142 - protein, 11 aa, Homo Sapiens
FLASESLIKQI

SEQ ID NO: 7143 - protein, 11 aa, Homo Sapiens
FLCEPRNGHAL

SEQ ID NO: 7144 - protein, 11 aa, Homo Sapiens
FLFDGSPTYVL

SEQ ID NO: 7145 - protein, 11 aa, Homo Sapiens
FLFNELKGETM

SEQ ID NO: 7146 - protein, 11 aa, Homo Sapiens
FLFSEKPEKNL

SEQ ID NO: 7147 - protein, 11 aa, Homo Sapiens
FLGQTEAQYHL

SEQ ID NO: 7148 - protein, 11 aa, Homo Sapiens
FLHEESILERV

SEQ ID NO: 7149 - protein, 11 aa, Homo Sapiens
FLIDIVPRDEL

SEQ ID NO: 7150 - protein, 11 aa, Homo Sapiens
FLIEPEHVNTV

SEQ ID NO: 7151 - protein, 11 aa, Homo Sapiens
FLIGDEAATHL

SEQ ID NO: 7152 - protein, 11 aa, Homo Sapiens
FLIGQGAHVGA

SEQ ID NO: 7153 - protein, 11 aa, Homo Sapiens
FLKEDSQSCRV

SEQ ID NO: 7154 - protein, 11 aa, Homo Sapiens
FLLGPEGQHLL

SEQ ID NO: 7155 - protein, 11 aa, Homo Sapiens
FLNDTTKPVGL

SEQ ID NO: 7156 - protein, 11 aa, Homo Sapiens
FLNEHPGGEEV

SEQ ID NO: 7157 - protein, 11 aa, Homo Sapiens
FLNSVTDIHQL

SEQ ID NO: 7158 - protein, 11 aa, Homo Sapiens
FLPDPSALQNL

SEQ ID NO: 7159 - protein, 11 aa, Homo Sapiens
FLPETRIMTSV

SEQ ID NO: 7160 - protein, 11 aa, Homo Sapiens
FLPPEHTIVYI

SEQ ID NO: 7161 - protein, 11 aa, Homo Sapiens
FLSEEGGHVAV

SEQ ID NO: 7162 - protein, 11 aa, Homo Sapiens
FLSPHQLQQHL

SEQ ID NO: 7163 - protein, 11 aa, Homo Sapiens
FLSPLNPAHQL

SEQ ID NO: 7164 - protein, 11 aa, Homo Sapiens
FLTAAKKARAG

SEQ ID NO: 7165 - protein, 11 aa, Homo Sapiens
FLVGEAARALS

SEQ ID NO: 7166 - protein, 11 aa, Homo Sapiens
FLYPAAQLQHL

SEQ ID NO: 7167 - protein, 11 aa, Homo Sapiens
FLYQQQGRLDK

SEQ ID NO: 7168 - protein, 11 aa, Homo Sapiens
FLYSSGDKEQL

SEQ ID NO: 7169 - protein, 11 aa, Homo Sapiens
FMIDASVHPTL

SEQ ID NO: 7170 - protein, 11 aa, Homo Sapiens
FQHEENLLQQV

SEQ ID NO: 7171 - protein, 11 aa, Homo Sapiens
FVADEELVHLL

SEQ ID NO: 7172 - protein, 11 aa, Homo Sapiens
FVANDSTLFTL

SEQ ID NO: 7173 - protein, 11 aa, Homo Sapiens
GLADASLLKKV

SEQ ID NO: 7174 - protein, 11 aa, Homo Sapiens
GLADNTVIAKV

SEQ ID NO: 7175 - protein, 11 aa, Homo Sapiens
GLADPSALTQA

SEQ ID NO: 7176 - protein, 11 aa, Homo Sapiens
GLAEDIDKGEV

SEQ ID NO: 7177 - protein, 11 aa, Homo Sapiens
GLAPPQHLIRV

SEQ ID NO: 7178 - protein, 11 aa, Homo Sapiens
GLAPSKSTVYV

SEQ ID NO: 7179 - protein, 11 aa, Homo Sapiens
GLATTQINNKA

SEQ ID NO: 7180 - protein, 11 aa, Homo Sapiens
GLFAHPSLWQL

SEQ ID NO: 7181 - protein, 11 aa, Homo Sapiens
GLFDYNSQQQL

SEQ ID NO: 7182 - protein, 11 aa, Homo Sapiens
GLFSDPESQTL

SEQ ID NO: 7183 - protein, 11 aa, Homo Sapiens
GLIDIENPNRV

SEQ ID NO: 7184 - protein, 11 aa, Homo Sapiens
GLIDTKELEPL

SEQ ID NO: 7185 - protein, 11 aa, Homo Sapiens
GLPPEYLQVHL

SEQ ID NO: 7186 - protein, 11 aa, Homo Sapiens
GLTSTDLLFHL

SEQ ID NO: 7187 - protein, 11 aa, Homo Sapiens
GLVDEKALAQA

SEQ ID NO: 7188 - protein, 11 aa, Homo Sapiens
GLYDSQNPPTV

SEQ ID NO: 7189 - protein, 11 aa, Homo Sapiens
GLYEAIADHYM

SEQ ID NO: 7190 - protein, 11 aa, Homo Sapiens
GLYGIKDDVFL

SEQ ID NO: 7191 - protein, 11 aa, Homo Sapiens
GMAGPAAEITV

SEQ ID NO: 7192 - protein, 11 aa, Homo Sapiens
GQMDTKGLVRA

SEQ ID NO: 7193 - protein, 11 aa, Homo Sapiens
HLADLPVEPHL

SEQ ID NO: 7194 - protein, 11 aa, Homo Sapiens
HLNENIEKGLL

SEQ ID NO: 7195 - protein, 11 aa, Homo Sapiens
IIADPKTDHRL

SEQ ID NO: 7196 - protein, 11 aa, Homo Sapiens
ILADIIQNSTL

SEQ ID NO: 7197 - protein, 11 aa, Homo Sapiens
ILADLHSADQL

SEQ ID NO: 7198 - protein, 11 aa, Homo Sapiens
ILADMADVYKL

SEQ ID NO: 7199 - protein, 11 aa, Homo Sapiens
ILANDGVLLAA

SEQ ID NO: 7200 - protein, 11 aa, Homo Sapiens
ILAPAGSLPKI

SEQ ID NO: 7201 - protein, 11 aa, Homo Sapiens
ILAQITGTEHL

SEQ ID NO: 7202 - protein, 11 aa, Homo Sapiens
ILFDCPGQIEL

SEQ ID NO: 7203 - protein, 11 aa, Homo Sapiens
ILIHEDSMNLL

SEQ ID NO: 7204 - protein, 11 aa, Homo Sapiens
ILKEADQKEQF

SEQ ID NO: 7205 - protein, 11 aa, Homo Sapiens
ILKNMTEAEKA

SEQ ID NO: 7206 - protein, 11 aa, Homo Sapiens
ILNDPSQSEVM

SEQ ID NO: 7207 - protein, 11 aa, Homo Sapiens
ILNSVRATDTL

SEQ ID NO: 7208 - protein, 11 aa, Homo Sapiens
ILRDTSEDLGL

SEQ ID NO: 7209 - protein, 11 aa, Homo Sapiens
IMFDDIGRNFL

SEQ ID NO: 7210 - protein, 11 aa, Homo Sapiens
ISERYGPVFTI

SEQ ID NO: 7211 - protein, 11 aa, Homo Sapiens
ITAPIEAQVRL

SEQ ID NO: 7212 - protein, 11 aa, Homo Sapiens
ITQIEHEVSSS

SEQ ID NO: 7213 - protein, 11 aa, Homo Sapiens
KIIDEDGLLNL

SEQ ID NO: 7214 - protein, 11 aa, Homo Sapiens
KKDVDNAYMIK

SEQ ID NO: 7215 - protein, 11 aa, Homo Sapiens
KLADDVDLEQV

SEQ ID NO: 7216 - protein, 11 aa, Homo Sapiens
KLADFGDAVQL

SEQ ID NO: 7217 - protein, 11 aa, Homo Sapiens
KLADFGVAGQL

SEQ ID NO: 7218 - protein, 11 aa, Homo Sapiens
KLADMNQEYQL

SEQ ID NO: 7219 - protein, 11 aa, Homo Sapiens
KLANILFTQEL

SEQ ID NO: 7220 - protein, 11 aa, Homo Sapiens
KLAPITYPQGL

SEQ ID NO: 7221 - protein, 11 aa, Homo Sapiens
KLATLNIHDYL

SEQ ID NO: 7222 - protein, 11 aa, Homo Sapiens
KLFDRPQELKL

SEQ ID NO: 7223 - protein, 11 aa, Homo Sapiens
KLFNESHGIFL

SEQ ID NO: 7224 - protein, 11 aa, Homo Sapiens
KLFPGFEIETV

SEQ ID NO: 7225 - protein, 11 aa, Homo Sapiens
KLFTAESLIGL

SEQ ID NO: 7226 - protein, 11 aa, Homo Sapiens
KLIDETQDMLL

SEQ ID NO: 7227 - protein, 11 aa, Homo Sapiens
KLIDFGSGALL

SEQ ID NO: 7228 - protein, 11 aa, Homo Sapiens
KLIDLSQVMYL

SEQ ID NO: 7229 - protein, 11 aa, Homo Sapiens
KLIECGWKDQL

SEQ ID NO: 7230 - protein, 11 aa, Homo Sapiens
KLIEVDDERKL

SEQ ID NO: 7231 - protein, 11 aa, Homo Sapiens
KLIGVHCTHGL

SEQ ID NO: 7232 - protein, 11 aa, Homo Sapiens
KLKEKTEQETL

SEQ ID NO: 7233 - protein, 11 aa, Homo Sapiens
KLKEQREAELL

SEQ ID NO: 7234 - protein, 11 aa, Homo Sapiens
KLKKVDKIEEL

SEQ ID NO: 7235 - protein, 11 aa, Homo Sapiens
KLSEPSSLQYL

SEQ ID NO: 7236 - protein, 11 aa, Homo Sapiens
KLYDKIDPEKL

SEQ ID NO: 7237 - protein, 11 aa, Homo Sapiens
KLYDNLLEQNL

SEQ ID NO: 7238 - protein, 11 aa, Homo Sapiens
KMADEDALRKI

SEQ ID NO: 7239 - protein, 11 aa, Homo Sapiens
KMAEEKLTHKM

SEQ ID NO: 7240 - protein, 11 aa, Homo Sapiens
KMAGIEITEEM

SEQ ID NO: 7241 - protein, 11 aa, Homo Sapiens
KMPQSMPEYAL

SEQ ID NO: 7242 - protein, 11 aa, Homo Sapiens
KTAEAQLAYEL

SEQ ID NO: 7243 - protein, 11 aa, Homo Sapiens
KVMNEKLQHCM

SEQ ID NO: 7244 - protein, 11 aa, Homo Sapiens
LLAANNLLAGL

SEQ ID NO: 7245 - protein, 11 aa, Homo Sapiens
LLADVVLQPRL

SEQ ID NO: 7246 - protein, 11 aa, Homo Sapiens
LLAELPASVHA

SEQ ID NO: 7247 - protein, 11 aa, Homo Sapiens
LLAETHYQLGL

SEQ ID NO: 7248 - protein, 11 aa, Homo Sapiens
LLFDHLEPIEL

SEQ ID NO: 7249 - protein, 11 aa, Homo Sapiens
LLGERVALNTL

SEQ ID NO: 7250 - protein, 11 aa, Homo Sapiens
LLIDDKGTIKL

SEQ ID NO: 7251 - protein, 11 aa, Homo Sapiens
LLNEPDGTFLL

SEQ ID NO: 7252 - protein, 11 aa, Homo Sapiens
LLQELTDIDTL

SEQ ID NO: 7253 - protein, 11 aa, Homo Sapiens
LLSHSLLVTLA

SEQ ID NO: 7254 - protein, 11 aa, Homo Sapiens
LLVEPSRNDLL

SEQ ID NO: 7255 - protein, 11 aa, Homo Sapiens
LMAEQEKTLAL

SEQ ID NO: 7256 - protein, 11 aa, Homo Sapiens
LSLSSETKPKL

SEQ ID NO: 7257 - protein, 11 aa, Homo Sapiens
MLIEEGGLQHL

SEQ ID NO: 7258 - protein, 11 aa, Homo Sapiens
MQAPRAALVFA

SEQ ID NO: 7259 - protein, 11 aa, Homo Sapiens
NLAGENILNPL

SEQ ID NO: 7260 - protein, 11 aa, Homo Sapiens
NLFEWAKNSPL

SEQ ID NO: 7261 - protein, 11 aa, Homo Sapiens
PLADAHLTKKL

SEQ ID NO: 7262 - protein, 11 aa, Homo Sapiens
QLPESAYMHQL

SEQ ID NO: 7263 - protein, 11 aa, Homo Sapiens
RLADLKQLWGL

SEQ ID NO: 7264 - protein, 11 aa, Homo Sapiens
RLAELTVDEFL

SEQ ID NO: 7265 - protein, 11 aa, Homo Sapiens
RLAEVGQYEQV

SEQ ID NO: 7266 - protein, 11 aa, Homo Sapiens
RLAPGYINQEV

SEQ ID NO: 7267 - protein, 11 aa, Homo Sapiens
RLAQDYLQCVL

SEQ ID NO: 7268 - protein, 11 aa, Homo Sapiens
RLFDANKAELF

SEQ ID NO: 7269 - protein, 11 aa, Homo Sapiens
RLFDDSTVTTV

SEQ ID NO: 7270 - protein, 11 aa, Homo Sapiens
RLFEAQGKPEL

SEQ ID NO: 7271 - protein, 11 aa, Homo Sapiens
RLFGPVDSEQL

SEQ ID NO: 7272 - protein, 11 aa, Homo Sapiens
RLFNVDRHVGM

SEQ ID NO: 7273 - protein, 11 aa, Homo Sapiens
RLIGDAAKNQL

SEQ ID NO: 7274 - protein, 11 aa, Homo Sapiens
RLIGDAAKNQV

SEQ ID NO: 7275 - protein, 11 aa, Homo Sapiens
RLKEDVEKNLA

SEQ ID NO: 7276 - protein, 11 aa, Homo Sapiens
RLPPDTLLQQV

SEQ ID NO: 7277 - protein, 11 aa, Homo Sapiens
RLPPEGILHNV

SEQ ID NO: 7278 - protein, 11 aa, Homo Sapiens
RLQETEGMVAV

SEQ ID NO: 7279 - protein, 11 aa, Homo Sapiens
RLVEDIFQQNV

SEQ ID NO: 7280 - protein, 11 aa, Homo Sapiens
RLYEAYLPETF

SEQ ID NO: 7281 - protein, 11 aa, Homo Sapiens
RLYHEADKTYM

SEQ ID NO: 7282 - protein, 11 aa, Homo Sapiens
RMANRDLLSSV

SEQ ID NO: 7283 - protein, 11 aa, Homo Sapiens
RMIDIEGKGHL

SEQ ID NO: 7284 - protein, 11 aa, Homo Sapiens
RVANQDLQVQL

SEQ ID NO: 7285 - protein, 11 aa, Homo Sapiens
RVDPNGSRYLL

SEQ ID NO: 7286 - protein, 11 aa, Homo Sapiens
SIAKAGILTTL

SEQ ID NO: 7287 - protein, 11 aa, Homo Sapiens
SIAPENLQHDI

SEQ ID NO: 7288 - protein, 11 aa, Homo Sapiens
SLAAVEKLHHL

SEQ ID NO: 7289 - protein, 11 aa, Homo Sapiens
SLADDSVLERL

SEQ ID NO: 7290 - protein, 11 aa, Homo Sapiens
SLAEEKLQASV

SEQ ID NO: 7291 - protein, 11 aa, Homo Sapiens
SLAGDVALQQL

SEQ ID NO: 7292 - protein, 11 aa, Homo Sapiens
SLAKDELGYCL

SEQ ID NO: 7293 - protein, 11 aa, Homo Sapiens
SLAMLSKAHRA

SEQ ID NO: 7294 - protein, 11 aa, Homo Sapiens
SLAQAHILKKA

SEQ ID NO: 7295 - protein, 11 aa, Homo Sapiens
SLARAALQELL

SEQ ID NO: 7296 - protein, 11 aa, Homo Sapiens
SLAVEKLSHWL

SEQ ID NO: 7297 - protein, 11 aa, Homo Sapiens
SLFQGVEFHYV

SEQ ID NO: 7298 - protein, 11 aa, Homo Sapiens
SLMEESGICKV

SEQ ID NO: 7299 - protein, 11 aa, Homo Sapiens
SLNEFGEKWEL

SEQ ID NO: 7300 - protein, 11 aa, Homo Sapiens
SLNQQGAHSAL

SEQ ID NO: 7301 - protein, 11 aa, Homo Sapiens
SLPKNDLLQRL

SEQ ID NO: 7302 - protein, 11 aa, Homo Sapiens
SLSAAQLQHLL

SEQ ID NO: 7303 - protein, 11 aa, Homo Sapiens
SLSADKFQVLL

SEQ ID NO: 7304 - protein, 11 aa, Homo Sapiens
SLSDDRLNHLL

SEQ ID NO: 7305 - protein, 11 aa, Homo Sapiens
SLSGISLQKKL

SEQ ID NO: 7306 - protein, 11 aa, Homo Sapiens
SLVEGEAVHLA

SEQ ID NO: 7307 - protein, 11 aa, Homo Sapiens
SLVESHLSDQL

SEQ ID NO: 7308 - protein, 11 aa, Homo Sapiens
SMADIPLGFGV

SEQ ID NO: 7309 - protein, 11 aa, Homo Sapiens
SMADMDMSHSL

SEQ ID NO: 7310 - protein, 11 aa, Homo Sapiens
SMDNNRSLDLD

SEQ ID NO: 7311 - protein, 11 aa, Homo Sapiens
SMKETSYEEAL

SEQ ID NO: 7312 - protein, 11 aa, Homo Sapiens
SQAGKGLMHHL

SEQ ID NO: 7313 - protein, 11 aa, Homo Sapiens
SVAEGRALMSV

SEQ ID NO: 7314 - protein, 11 aa, Homo Sapiens
SVAEINGTMNA

SEQ ID NO: 7315 - protein, 11 aa, Homo Sapiens
SVAPDTINNHV

SEQ ID NO: 7316 - protein, 11 aa, Homo Sapiens
SVAPKNALVQL

SEQ ID NO: 7317 - protein, 11 aa, Homo Sapiens
SVASAQLQEKL

SEQ ID NO: 7318 - protein, 11 aa, Homo Sapiens
SVVNEDFLHDL

SEQ ID NO: 7319 - protein, 11 aa, Homo Sapiens
SVYDGHGGEEV

SEQ ID NO: 7320 - protein, 11 aa, Homo Sapiens
TEELNREVATN

SEQ ID NO: 7321 - protein, 11 aa, Homo Sapiens
TIIDLPGITRV

SEQ ID NO: 7322 - protein, 11 aa, Homo Sapiens
TLADCNLLPKL

SEQ ID NO: 7323 - protein, 11 aa, Homo Sapiens
TLADCSLLPKL

SEQ ID NO: 7324 - protein, 11 aa, Homo Sapiens
TLAEPPAKGLL

SEQ ID NO: 7325 - protein, 11 aa, Homo Sapiens
TLAGHTLTAEL

SEQ ID NO: 7326 - protein, 11 aa, Homo Sapiens
TLFPAIEKNIV

SEQ ID NO: 7327 - protein, 11 aa, Homo Sapiens
TLIDLPGHESL

SEQ ID NO: 7328 - protein, 11 aa, Homo Sapiens
TLIDLPGITKV

SEQ ID NO: 7329 - protein, 11 aa, Homo Sapiens
TLIRSDAVALV

SEQ ID NO: 7330 - protein, 11 aa, Homo Sapiens
TLKELTVREYL

SEQ ID NO: 7331 - protein, 11 aa, Homo Sapiens
TLMPEKLSHKL

SEQ ID NO: 7332 - protein, 11 aa, Homo Sapiens
TLYDIAHTPGV

SEQ ID NO: 7333 - protein, 11 aa, Homo Sapiens
TMAKESSIIGV

SEQ ID NO: 7334 - protein, 11 aa, Homo Sapiens
TVASLGAQTLP

SEQ ID NO: 7335 - protein, 11 aa, Homo Sapiens
VLAEDEEMNRM

SEQ ID NO: 7336 - protein, 11 aa, Homo Sapiens
VLAERESLYQL

SEQ ID NO: 7337 - protein, 11 aa, Homo Sapiens
VLAQDPENQAL

SEQ ID NO: 7338 - protein, 11 aa, Homo Sapiens
VLFDKATYDKL

SEQ ID NO: 7339 - protein, 11 aa, Homo Sapiens
VLFPHMPCAYL

SEQ ID NO: 7340 - protein, 11 aa, Homo Sapiens
VLKAIEQADLL

SEQ ID NO: 7341 - protein, 11 aa, Homo Sapiens
VLMEDRLTNRL

SEQ ID NO: 7342 - protein, 11 aa, Homo Sapiens
VLNEFDAIQKA

SEQ ID NO: 7343 - protein, 11 aa, Homo Sapiens
VLSPADKTNVK

SEQ ID NO: 7344 - protein, 11 aa, Homo Sapiens
VLSPQELQKVL

SEQ ID NO: 7345 - protein, 11 aa, Homo Sapiens
VLVEDSNNHHL

SEQ ID NO: 7346 - protein, 11 aa, Homo Sapiens
VLVSESLMCKI

SEQ ID NO: 7347 - protein, 11 aa, Homo Sapiens
VMFECDKGFYL

SEQ ID NO: 7348 - protein, 11 aa, Homo Sapiens
VMQDPEFLQSV

SEQ ID NO: 7349 - protein, 11 aa, Homo Sapiens
VTIKKDVDGAY

SEQ ID NO: 7350 - protein, 11 aa, Homo Sapiens
VVAESELQKEL

SEQ ID NO: 7351 - protein, 11 aa, Homo Sapiens
WLANEGLITRL

SEQ ID NO: 7352 - protein, 11 aa, Homo Sapiens
WLIEDGKVVTV

SEQ ID NO: 7353 - protein, 11 aa, Homo Sapiens
YAYDGKDYIAL

SEQ ID NO: 7354 - protein, 11 aa, Homo Sapiens
YIATITDKELL

SEQ ID NO: 7355 - protein, 11 aa, Homo Sapiens
YLAEAKKGETL

SEQ ID NO: 7356 - protein, 11 aa, Homo Sapiens
YLAPFLRNVEL

SEQ ID NO: 7357 - protein, 11 aa, Homo Sapiens
YLFDVQRNNIA

SEQ ID NO: 7358 - protein, 11 aa, Homo Sapiens
YLFEQVQHNLL

SEQ ID NO: 7359 - protein, 11 aa, Homo Sapiens
YLGDGPLQHYI

SEQ ID NO: 7360 - protein, 11 aa, Homo Sapiens
YLHDQNPDAAL

SEQ ID NO: 7361 - protein, 11 aa, Homo Sapiens
YLISQVEGHQV

SEQ ID NO: 7362 - protein, 11 aa, Homo Sapiens
YLKGGVADALL

SEQ ID NO: 7363 - protein, 11 aa, Homo Sapiens
YLLDIGCGTGL

SEQ ID NO: 7364 - protein, 11 aa, Homo Sapiens
YLNPDQSGEFM

SEQ ID NO: 7365 - protein, 11 aa, Homo Sapiens
YLNPKGDSARA

SEQ ID NO: 7366 - protein, 11 aa, Homo Sapiens
YLSEDVFQHAV

SEQ ID NO: 7367 - protein, 11 aa, Homo Sapiens
YLSQEHQQQVL

SEQ ID NO: 7368 - protein, 11 aa, Homo Sapiens
YLTPESFDQKV

SEQ ID NO: 7369 - protein, 11 aa, Homo Sapiens
YLVDDSFSQAL

SEQ ID NO: 7370 - protein, 11 aa, Homo Sapiens
YLYESGETEKL

SEQ ID NO: 7371 - protein, 11 aa, Homo Sapiens
YMATSGLDHQL

SEQ ID NO: 7372 - protein, 11 aa, Homo Sapiens
YMGEEKLIASV

SEQ ID NO: 7373 - protein, 11 aa, Homo Sapiens
YMIGSEVGNYL

SEQ ID NO: 7374 - protein, 8 aa, Homo Sapiens
AIHRIIEV

SEQ ID NO: 7375 - protein, 8 aa, Homo Sapiens
ALGHVRYV

SEQ ID NO: 7376 - protein, 8 aa, Homo Sapiens
ALGKILSV

SEQ ID NO: 7377 - protein, 8 aa, Homo Sapiens
ALGNVRTV

SEQ ID NO: 7378 - protein, 8 aa, Homo Sapiens
ALGSVVAV

SEQ ID NO: 7379 - protein, 8 aa, Homo Sapiens
ALHKVIMV

SEQ ID NO: 7380 - protein, 8 aa, Homo Sapiens
FGGHIRSV

SEQ ID NO: 7381 - protein, 8 aa, Homo Sapiens
FIATVREV

SEQ ID NO: 7382 - protein, 8 aa, Homo Sapiens
FLARTVQV

SEQ ID NO: 7383 - protein, 8 aa, Homo Sapiens
FLATIMGV

SEQ ID NO: 7384 - protein, 8 aa, Homo Sapiens
FLFRITQV

SEQ ID NO: 7385 - protein, 8 aa, Homo Sapiens
FLFRLINI

SEQ ID NO: 7386 - protein, 8 aa, Homo Sapiens
FLGKLLEA

SEQ ID NO: 7387 - protein, 8 aa, Homo Sapiens
FLWKITNV

SEQ ID NO: 7388 - protein, 8 aa, Homo Sapiens
FLYKVVQV

SEQ ID NO: 7389 - protein, 8 aa, Homo Sapiens
GLFRTIAL

SEQ ID NO: 7390 - protein, 8 aa, Homo Sapiens
IIRKPVTV

SEQ ID NO: 7391 - protein, 8 aa, Homo Sapiens
ILFHVVAI

SEQ ID NO: 7392 - protein, 8 aa, Homo Sapiens
ILHDVVEV

SEQ ID NO: 7393 - protein, 8 aa, Homo Sapiens
LKDLVKVI

SEQ ID NO: 7394 - protein, 8 aa, Homo Sapiens
LLFWVTEV

SEQ ID NO: 7395 - protein, 8 aa, Homo Sapiens
LMEHIHKL

SEQ ID NO: 7396 - protein, 8 aa, Homo Sapiens
LSSHVRGV

SEQ ID NO: 7397 - protein, 8 aa, Homo Sapiens
MKAFISKV

SEQ ID NO: 7398 - protein, 8 aa, Homo Sapiens
SLGKVFGV

SEQ ID NO: 7399 - protein, 8 aa, Homo Sapiens
TIFRTISV

SEQ ID NO: 7400 - protein, 8 aa, Homo Sapiens
TMFRVEYA

SEQ ID NO: 7401 - protein, 8 aa, Homo Sapiens
VLNKVITV

SEQ ID NO: 7402 - protein, 8 aa, Homo Sapiens
VMYRVIQV

SEQ ID NO: 7403 - protein, 8 aa, Homo Sapiens
YLATVTGI

SEQ ID NO: 7404 - protein, 8 aa, Homo Sapiens
YLFHVQEV

SEQ ID NO: 7405 - protein, 8 aa, Homo Sapiens
YLFKVVLI

SEQ ID NO: 7406 - protein, 8 aa, Homo Sapiens
YLFLVRVV

SEQ ID NO: 7407 - protein, 8 aa, Homo Sapiens
YLGKIKRV

SEQ ID NO: 7408 - protein, 8 aa, Homo Sapiens
YLGKVLEL

SEQ ID NO: 7409 - protein, 8 aa, Homo Sapiens
YLGQVAIL

SEQ ID NO: 7410 - protein, 8 aa, Homo Sapiens
YLGQVTTI

SEQ ID NO: 7411 - protein, 8 aa, Homo Sapiens
YLNFIRGV

SEQ ID NO: 7412 - protein, 8 aa, Homo Sapiens
YLNSVVQV

SEQ ID NO: 7413 - protein, 9 aa, Homo Sapiens
AARPQVVAV

SEQ ID NO: 7414 - protein, 9 aa, Homo Sapiens
ADASLLKKV

SEQ ID NO: 7415 - protein, 9 aa, Homo Sapiens
AIANAISVV

SEQ ID NO: 7416 - protein, 9 aa, Homo Sapiens
AIAPIIAAV

SEQ ID NO: 7417 - protein, 9 aa, Homo Sapiens
AIAYILQGV

SEQ ID NO: 7418 - protein, 9 aa, Homo Sapiens
AIKDNVVIV

SEQ ID NO: 7419 - protein, 9 aa, Homo Sapiens
AIKEILTQV

SEQ ID NO: 7420 - protein, 9 aa, Homo Sapiens
AIKELLDTV

SEQ ID NO: 7421 - protein, 9 aa, Homo Sapiens
AIKKELTQI

SEQ ID NO: 7422 - protein, 9 aa, Homo Sapiens
AIKTELTQI

SEQ ID NO: 7423 - protein, 9 aa, Homo Sapiens
AINPKLLQL

SEQ ID NO: 7424 - protein, 9 aa, Homo Sapiens
AIQDHLLEV

SEQ ID NO: 7425 - protein, 9 aa, Homo Sapiens
AIRDGVIEA

SEQ ID NO: 7426 - protein, 9 aa, Homo Sapiens
AISGIIMGI

SEQ ID NO: 7427 - protein, 9 aa, Homo Sapiens
AIVDKVPSV

SEQ ID NO: 7428 - protein, 9 aa, Homo Sapiens
ALAAALAHI

SEQ ID NO: 7429 - protein, 9 aa, Homo Sapiens
ALAAFISSV

SEQ ID NO: 7430 - protein, 9 aa, Homo Sapiens
ALAATVFCV

SEQ ID NO: 7431 - protein, 9 aa, Homo Sapiens
ALADGVQKV

SEQ ID NO: 7432 - protein, 9 aa, Homo Sapiens
ALADLLLAL

SEQ ID NO: 7433 - protein, 9 aa, Homo Sapiens
ALADVMSQL

SEQ ID NO: 7434 - protein, 9 aa, Homo Sapiens
ALAEALKEV

SEQ ID NO: 7435 - protein, 9 aa, Homo Sapiens
ALAEALRLL

SEQ ID NO: 7436 - protein, 9 aa, Homo Sapiens
ALAEEVEQV

SEQ ID NO: 7437 - protein, 9 aa, Homo Sapiens
ALAELESVL

SEQ ID NO: 7438 - protein, 9 aa, Homo Sapiens
ALAELTKRL

SEQ ID NO: 7439 - protein, 9 aa, Homo Sapiens
ALAGGITMV

SEQ ID NO: 7440 - protein, 9 aa, Homo Sapiens
ALAGIVTNV

SEQ ID NO: 7441 - protein, 9 aa, Homo Sapiens
ALAKAPFAA

SEQ ID NO: 7442 - protein, 9 aa, Homo Sapiens
ALAKHLIKI

SEQ ID NO: 7443 - protein, 9 aa, Homo Sapiens
ALAKKPHII

SEQ ID NO: 7444 - protein, 9 aa, Homo Sapiens
ALAKLVEAI

SEQ ID NO: 7445 - protein, 9 aa, Homo Sapiens
ALANGVSRI

SEQ ID NO: 7446 - protein, 9 aa, Homo Sapiens
ALANHLIKV

SEQ ID NO: 7447 - protein, 9 aa, Homo Sapiens
ALANKLFGA

SEQ ID NO: 7448 - protein, 9 aa, Homo Sapiens
ALANQIPTV

SEQ ID NO: 7449 - protein, 9 aa, Homo Sapiens
ALAPAPPQV

SEQ ID NO: 7450 - protein, 9 aa, Homo Sapiens
ALAPGLPTA

SEQ ID NO: 7451 - protein, 9 aa, Homo Sapiens
ALAPGVRAV

SEQ ID NO: 7452 - protein, 9 aa, Homo Sapiens
ALAPLLSSL

SEQ ID NO: 7453 - protein, 9 aa, Homo Sapiens
ALAPSTMKI

SEQ ID NO: 7454 - protein, 9 aa, Homo Sapiens
ALAQRLLEV

SEQ ID NO: 7455 - protein, 9 aa, Homo Sapiens
ALARPGLTI

SEQ ID NO: 7456 - protein, 9 aa, Homo Sapiens
ALASEPLKV

SEQ ID NO: 7457 - protein, 9 aa, Homo Sapiens
ALASHILTA

SEQ ID NO: 7458 - protein, 9 aa, Homo Sapiens
ALASVIMGL

SEQ ID NO: 7459 - protein, 9 aa, Homo Sapiens
ALATHILSL

SEQ ID NO: 7460 - protein, 9 aa, Homo Sapiens
ALATKLLSL

SEQ ID NO: 7461 - protein, 9 aa, Homo Sapiens
ALATLIHQV

SEQ ID NO: 7462 - protein, 9 aa, Homo Sapiens
ALATSPITV

SEQ ID NO: 7463 - protein, 9 aa, Homo Sapiens
ALAVNISAA

SEQ ID NO: 7464 - protein, 9 aa, Homo Sapiens
ALFEAAREV

SEQ ID NO: 7465 - protein, 9 aa, Homo Sapiens
ALFGALFLA

SEQ ID NO: 7466 - protein, 9 aa, Homo Sapiens
ALFGIPMAL

SEQ ID NO: 7467 - protein, 9 aa, Homo Sapiens
ALFISPALI

SEQ ID NO: 7468 - protein, 9 aa, Homo Sapiens
ALFPGPGNA

SEQ ID NO: 7469 - protein, 9 aa, Homo Sapiens
ALFPGVALL

SEQ ID NO: 7470 - protein, 9 aa, Homo Sapiens
ALFPLLPKV

SEQ ID NO: 7471 - protein, 9 aa, Homo Sapiens
ALFQHITAL

SEQ ID NO: 7472 - protein, 9 aa, Homo Sapiens
ALFQRPPLI

SEQ ID NO: 7473 - protein, 9 aa, Homo Sapiens
ALFVKTKEV

SEQ ID NO: 7474 - protein, 9 aa, Homo Sapiens
ALGPKPQGL

SEQ ID NO: 7475 - protein, 9 aa, Homo Sapiens
ALGPRWALV

SEQ ID NO: 7476 - protein, 9 aa, Homo Sapiens
ALHAAVIAI

SEQ ID NO: 7477 - protein, 9 aa, Homo Sapiens
ALHDHLATI

SEQ ID NO: 7478 - protein, 9 aa, Homo Sapiens
ALHDILTEI

SEQ ID NO: 7479 - protein, 9 aa, Homo Sapiens
ALHGMVALV

SEQ ID NO: 7480 - protein, 9 aa, Homo Sapiens
ALHHRILAL

SEQ ID NO: 7481 - protein, 9 aa, Homo Sapiens
ALHWFLNQV

SEQ ID NO: 7482 - protein, 9 aa, Homo Sapiens
ALIDRMVNL

SEQ ID NO: 7483 - protein, 9 aa, Homo Sapiens
ALIEKLVEL

SEQ ID NO: 7484 - protein, 9 aa, Homo Sapiens
ALIFKIASA

SEQ ID NO: 7485 - protein, 9 aa, Homo Sapiens
ALINNIVEI

SEQ ID NO: 7486 - protein, 9 aa, Homo Sapiens
ALINVLNAL

SEQ ID NO: 7487 - protein, 9 aa, Homo Sapiens
ALIPDLNQI

SEQ ID NO: 7488 - protein, 9 aa, Homo Sapiens
ALIPVINKL

SEQ ID NO: 7489 - protein, 9 aa, Homo Sapiens
ALIQGLKET

SEQ ID NO: 7490 - protein, 9 aa, Homo Sapiens
ALIQQATTV

SEQ ID NO: 7491 - protein, 9 aa, Homo Sapiens
ALIRVISKL

SEQ ID NO: 7492 - protein, 9 aa, Homo Sapiens
ALISQVLEA

SEQ ID NO: 7493 - protein, 9 aa, Homo Sapiens
ALITRIFGV

SEQ ID NO: 7494 - protein, 9 aa, Homo Sapiens
ALKAIVNVI

SEQ ID NO: 7495 - protein, 9 aa, Homo Sapiens
ALKALLRSL

SEQ ID NO: 7496 - protein, 9 aa, Homo Sapiens
ALKATLVES

SEQ ID NO: 7497 - protein, 9 aa, Homo Sapiens
ALKAVLVDL

SEQ ID NO: 7498 - protein, 9 aa, Homo Sapiens
ALKDAMLEL

SEQ ID NO: 7499 - protein, 9 aa, Homo Sapiens
ALKDEVQEL

SEQ ID NO: 7500 - protein, 9 aa, Homo Sapiens
ALKDFVASI

SEQ ID NO: 7501 - protein, 9 aa, Homo Sapiens
ALKDIVINA

SEQ ID NO: 7502 - protein, 9 aa, Homo Sapiens
ALKDLINEA

SEQ ID NO: 7503 - protein, 9 aa, Homo Sapiens
ALKDPVHTV

SEQ ID NO: 7504 - protein, 9 aa, Homo Sapiens
ALKDSILKI

SEQ ID NO: 7505 - protein, 9 aa, Homo Sapiens
ALKDTIGKL

SEQ ID NO: 7506 - protein, 9 aa, Homo Sapiens
ALKEAGVFV

SEQ ID NO: 7507 - protein, 9 aa, Homo Sapiens
ALKECIRAL

SEQ ID NO: 7508 - protein, 9 aa, Homo Sapiens
ALKEIKAEV

SEQ ID NO: 7509 - protein, 9 aa, Homo Sapiens
ALKEIQAEV

SEQ ID NO: 7510 - protein, 9 aa, Homo Sapiens
ALKEITRQL

SEQ ID NO: 7511 - protein, 9 aa, Homo Sapiens
ALKEKIHEL

SEQ ID NO: 7512 - protein, 9 aa, Homo Sapiens
ALKEKVTSL

SEQ ID NO: 7513 - protein, 9 aa, Homo Sapiens
ALKELVSTI

SEQ ID NO: 7514 - protein, 9 aa, Homo Sapiens
ALKGHLYAV

SEQ ID NO: 7515 - protein, 9 aa, Homo Sapiens
ALKKEVGDI

SEQ ID NO: 7516 - protein, 9 aa, Homo Sapiens
ALKKNLEKI

SEQ ID NO: 7517 - protein, 9 aa, Homo Sapiens
ALKKVIIMI

SEQ ID NO: 7518 - protein, 9 aa, Homo Sapiens
ALKLFLREL

SEQ ID NO: 7519 - protein, 9 aa, Homo Sapiens
ALKLRVAVL

SEQ ID NO: 7520 - protein, 9 aa, Homo Sapiens
ALKLVITAL

SEQ ID NO: 7521 - protein, 9 aa, Homo Sapiens
ALKNDLVEA

SEQ ID NO: 7522 - protein, 9 aa, Homo Sapiens
ALKPDLVNV

SEQ ID NO: 7523 - protein, 9 aa, Homo Sapiens
ALKPEVDKL

SEQ ID NO: 7524 - protein, 9 aa, Homo Sapiens
ALKPFLPQL

SEQ ID NO: 7525 - protein, 9 aa, Homo Sapiens
ALKPQVSSI

SEQ ID NO: 7526 - protein, 9 aa, Homo Sapiens
ALKSLLQEA

SEQ ID NO: 7527 - protein, 9 aa, Homo Sapiens
ALLDRIVSV

SEQ ID NO: 7528 - protein, 9 aa, Homo Sapiens
ALLDWVTSV

SEQ ID NO: 7529 - protein, 9 aa, Homo Sapiens
ALLEKPGEL

SEQ ID NO: 7530 - protein, 9 aa, Homo Sapiens
ALLNILSEV

SEQ ID NO: 7531 - protein, 9 aa, Homo Sapiens
ALMADMVYV

SEQ ID NO: 7532 - protein, 9 aa, Homo Sapiens
ALMPVLNQV

SEQ ID NO: 7533 - protein, 9 aa, Homo Sapiens
ALNEHMTSL

SEQ ID NO: 7534 - protein, 9 aa, Homo Sapiens
ALNEKLVNL

SEQ ID NO: 7535 - protein, 9 aa, Homo Sapiens
ALNELLQHV

SEQ ID NO: 7536 - protein, 9 aa, Homo Sapiens
ALNENINQV

SEQ ID NO: 7537 - protein, 9 aa, Homo Sapiens
ALNEQIARL

SEQ ID NO: 7538 - protein, 9 aa, Homo Sapiens
ALNFIISYL

SEQ ID NO: 7539 - protein, 9 aa, Homo Sapiens
ALNGHVEMV

SEQ ID NO: 7540 - protein, 9 aa, Homo Sapiens
ALNGKLYIV

SEQ ID NO: 7541 - protein, 9 aa, Homo Sapiens
ALNLYMHQV

SEQ ID NO: 7542 - protein, 9 aa, Homo Sapiens
ALNNHVEVA

SEQ ID NO: 7543 - protein, 9 aa, Homo Sapiens
ALNPEIVSV

SEQ ID NO: 7544 - protein, 9 aa, Homo Sapiens
ALNPKLTVI

SEQ ID NO: 7545 - protein, 9 aa, Homo Sapiens
ALNRSVQVV

SEQ ID NO: 7546 - protein, 9 aa, Homo Sapiens
ALNSGILTI

SEQ ID NO: 7547 - protein, 9 aa, Homo Sapiens
ALNSKILSV

SEQ ID NO: 7548 - protein, 9 aa, Homo Sapiens
ALPARLTQV

SEQ ID NO: 7549 - protein, 9 aa, Homo Sapiens
ALPEERLSV

SEQ ID NO: 7550 - protein, 9 aa, Homo Sapiens
ALPPVLTTV

SEQ ID NO: 7551 - protein, 9 aa, Homo Sapiens
ALQDFLLSV

SEQ ID NO: 7552 - protein, 9 aa, Homo Sapiens
ALQEKVQAV

SEQ ID NO: 7553 - protein, 9 aa, Homo Sapiens
ALQPHLAAI

SEQ ID NO: 7554 - protein, 9 aa, Homo Sapiens
ALRAGLTLA

SEQ ID NO: 7555 - protein, 9 aa, Homo Sapiens
ALRAQLHQL

SEQ ID NO: 7556 - protein, 9 aa, Homo Sapiens
ALRDMLDQV

SEQ ID NO: 7557 - protein, 9 aa, Homo Sapiens
ALRDQIPEL

SEQ ID NO: 7558 - protein, 9 aa, Homo Sapiens
ALRDVIKAL

SEQ ID NO: 7559 - protein, 9 aa, Homo Sapiens
ALRETVNAL

SEQ ID NO: 7560 - protein, 9 aa, Homo Sapiens
ALRETVVEV

SEQ ID NO: 7561 - protein, 9 aa, Homo Sapiens
ALRGEIETV

SEQ ID NO: 7562 - protein, 9 aa, Homo Sapiens
ALRKEIKQL

SEQ ID NO: 7563 - protein, 9 aa, Homo Sapiens
ALRNWVFQV

SEQ ID NO: 7564 - protein, 9 aa, Homo Sapiens
ALRPGVTGA

SEQ ID NO: 7565 - protein, 9 aa, Homo Sapiens
ALRPSVVSI

SEQ ID NO: 7566 - protein, 9 aa, Homo Sapiens
ALRSFLQAL

SEQ ID NO: 7567 - protein, 9 aa, Homo Sapiens
ALRSILRQI

SEQ ID NO: 7568 - protein, 9 aa, Homo Sapiens
ALRSKLVRL

SEQ ID NO: 7569 - protein, 9 aa, Homo Sapiens
ALRSNLRTV

SEQ ID NO: 7570 - protein, 9 aa, Homo Sapiens
ALRSSPLTV

SEQ ID NO: 7571 - protein, 9 aa, Homo Sapiens
ALRVFVESV

SEQ ID NO: 7572 - protein, 9 aa, Homo Sapiens
ALRVLLVQV

SEQ ID NO: 7573 - protein, 9 aa, Homo Sapiens
ALRVVVALV

SEQ ID NO: 7574 - protein, 9 aa, Homo Sapiens
ALSALTARL

SEQ ID NO: 7575 - protein, 9 aa, Homo Sapiens
ALSASLARV

SEQ ID NO: 7576 - protein, 9 aa, Homo Sapiens
ALSDIFQAV

SEQ ID NO: 7577 - protein, 9 aa, Homo Sapiens
ALSDLEITL

SEQ ID NO: 7578 - protein, 9 aa, Homo Sapiens
ALSDSIHTV

SEQ ID NO: 7579 - protein, 9 aa, Homo Sapiens
ALSEKIVSV

SEQ ID NO: 7580 - protein, 9 aa, Homo Sapiens
ALSEKLARL

SEQ ID NO: 7581 - protein, 9 aa, Homo Sapiens
ALSELATAV

SEQ ID NO: 7582 - protein, 9 aa, Homo Sapiens
ALSELIILT

SEQ ID NO: 7583 - protein, 9 aa, Homo Sapiens
ALSGHLETV

SEQ ID NO: 7584 - protein, 9 aa, Homo Sapiens
ALSGHLGEV

SEQ ID NO: 7585 - protein, 9 aa, Homo Sapiens
ALSGHVSTV

SEQ ID NO: 7586 - protein, 9 aa, Homo Sapiens
ALSNHLNAV

SEQ ID NO: 7587 - protein, 9 aa, Homo Sapiens
ALSNLEVKL

SEQ ID NO: 7588 - protein, 9 aa, Homo Sapiens
ALSPHNILL

SEQ ID NO: 7589 - protein, 9 aa, Homo Sapiens
ALSQINTKL

SEQ ID NO: 7590 - protein, 9 aa, Homo Sapiens
ALSQLVPCV

SEQ ID NO: 7591 - protein, 9 aa, Homo Sapiens
ALSQRTITV

SEQ ID NO: 7592 - protein, 9 aa, Homo Sapiens
ALSSLIHAL

SEQ ID NO: 7593 - protein, 9 aa, Homo Sapiens
ALTALISQV

SEQ ID NO: 7594 - protein, 9 aa, Homo Sapiens
ALTDFVRSV

SEQ ID NO: 7595 - protein, 9 aa, Homo Sapiens
ALTELLAKI

SEQ ID NO: 7596 - protein, 9 aa, Homo Sapiens
ALTLNLTEV

SEQ ID NO: 7597 - protein, 9 aa, Homo Sapiens
ALTRALALA

SEQ ID NO: 7598 - protein, 9 aa, Homo Sapiens
ALTSLLKTV

SEQ ID NO: 7599 - protein, 9 aa, Homo Sapiens
ALVDHVAEL

SEQ ID NO: 7600 - protein, 9 aa, Homo Sapiens
ALVEKLESL

SEQ ID NO: 7601 - protein, 9 aa, Homo Sapiens
ALVLLLTEV

SEQ ID NO: 7602 - protein, 9 aa, Homo Sapiens
ALVLNLLQI

SEQ ID NO: 7603 - protein, 9 aa, Homo Sapiens
ALVQDLAKA

SEQ ID NO: 7604 - protein, 9 aa, Homo Sapiens
ALVSTIQFV

SEQ ID NO: 7605 - protein, 9 aa, Homo Sapiens
ALYGKLLKL

SEQ ID NO: 7606 - protein, 9 aa, Homo Sapiens
ALYNHISEL

SEQ ID NO: 7607 - protein, 9 aa, Homo Sapiens
ALYNWLIQV

SEQ ID NO: 7608 - protein, 9 aa, Homo Sapiens
ALYPNVVQV

SEQ ID NO: 7609 - protein, 9 aa, Homo Sapiens
ALYPVLEKA

SEQ ID NO: 7610 - protein, 9 aa, Homo Sapiens
ALYSELLAV

SEQ ID NO: 7611 - protein, 9 aa, Homo Sapiens
ALYTVIETV

SEQ ID NO: 7612 - protein, 9 aa, Homo Sapiens
ALYVAVVNV

SEQ ID NO: 7613 - protein, 9 aa, Homo Sapiens
AMAASPHAV

SEQ ID NO: 7614 - protein, 9 aa, Homo Sapiens
AMAAVPAKV

SEQ ID NO: 7615 - protein, 9 aa, Homo Sapiens
AMAEMVLQV

SEQ ID NO: 7616 - protein, 9 aa, Homo Sapiens
AMAETLKTL

SEQ ID NO: 7617 - protein, 9 aa, Homo Sapiens
AMAPGTVTV

SEQ ID NO: 7618 - protein, 9 aa, Homo Sapiens
AMFGKLMTI

SEQ ID NO: 7619 - protein, 9 aa, Homo Sapiens
AMIDQVLEL

SEQ ID NO: 7620 - protein, 9 aa, Homo Sapiens
AMIERITFI

SEQ ID NO: 7621 - protein, 9 aa, Homo Sapiens
AMINRFQFV

SEQ ID NO: 7622 - protein, 9 aa, Homo Sapiens
AMKDTLTNI

SEQ ID NO: 7623 - protein, 9 aa, Homo Sapiens
AMKDVLLPL

SEQ ID NO: 7624 - protein, 9 aa, Homo Sapiens
AMKEALVQV

SEQ ID NO: 7625 - protein, 9 aa, Homo Sapiens
AMKKVVQQL

SEQ ID NO: 7626 - protein, 9 aa, Homo Sapiens
AMKPKPLSV

SEQ ID NO: 7627 - protein, 9 aa, Homo Sapiens
AMNDILAQV

SEQ ID NO: 7628 - protein, 9 aa, Homo Sapiens
AMNGHVPAV

SEQ ID NO: 7629 - protein, 9 aa, Homo Sapiens
AMNGKSFSV

SEQ ID NO: 7630 - protein, 9 aa, Homo Sapiens
AMNRFIGAV

SEQ ID NO: 7631 - protein, 9 aa, Homo Sapiens
AMNSQILEV

SEQ ID NO: 7632 - protein, 9 aa, Homo Sapiens
AMQDRYMEV

SEQ ID NO: 7633 - protein, 9 aa, Homo Sapiens
AMQEYIAVV

SEQ ID NO: 7634 - protein, 9 aa, Homo Sapiens
AMQSRLATL

SEQ ID NO: 7635 - protein, 9 aa, Homo Sapiens
AMREEVRQL

SEQ ID NO: 7636 - protein, 9 aa, Homo Sapiens
AMRKLVRSV

SEQ ID NO: 7637 - protein, 9 aa, Homo Sapiens
AMYTLPRQA

SEQ ID NO: 7638 - protein, 9 aa, Homo Sapiens
AMYVYPPNV

SEQ ID NO: 7639 - protein, 9 aa, Homo Sapiens
AQHENVPFI

SEQ ID NO: 7640 - protein, 9 aa, Homo Sapiens
AQHPNIVTV

SEQ ID NO: 7641 - protein, 9 aa, Homo Sapiens
AQIDHYLGL

SEQ ID NO: 7642 - protein, 9 aa, Homo Sapiens
AQIEVVPSA

SEQ ID NO: 7643 - protein, 9 aa, Homo Sapiens
AQIGWIQTV

SEQ ID NO: 7644 - protein, 9 aa, Homo Sapiens
AQILQILTV

SEQ ID NO: 7645 - protein, 9 aa, Homo Sapiens
AQKKLISQV

SEQ ID NO: 7646 - protein, 9 aa, Homo Sapiens
ATIGELAQV

SEQ ID NO: 7647 - protein, 9 aa, Homo Sapiens
ATKGRILTV

SEQ ID NO: 7648 - protein, 9 aa, Homo Sapiens
AVAAVLTQV

SEQ ID NO: 7649 - protein, 9 aa, Homo Sapiens
AVADLQTRL

SEQ ID NO: 7650 - protein, 9 aa, Homo Sapiens
AVANIVNSV

SEQ ID NO: 7651 - protein, 9 aa, Homo Sapiens
AVATFLQSV

SEQ ID NO: 7652 - protein, 9 aa, Homo Sapiens
AVIGLTKSV

SEQ ID NO: 7653 - protein, 9 aa, Homo Sapiens
AVIHYLLQV

SEQ ID NO: 7654 - protein, 9 aa, Homo Sapiens
AVINRVQKV

SEQ ID NO: 7655 - protein, 9 aa, Homo Sapiens
AVITKVKGV

SEQ ID NO: 7656 - protein, 9 aa, Homo Sapiens
AVLTLFTPI

SEQ ID NO: 7657 - protein, 9 aa, Homo Sapiens
AVRDGLRAV

SEQ ID NO: 7658 - protein, 9 aa, Homo Sapiens
AVSDHISKV

SEQ ID NO: 7659 - protein, 9 aa, Homo Sapiens
AVYERVTTI

SEQ ID NO: 7660 - protein, 9 aa, Homo Sapiens
CLADAVVKI

SEQ ID NO: 7661 - protein, 9 aa, Homo Sapiens
CLAVAVGHV

SEQ ID NO: 7662 - protein, 9 aa, Homo Sapiens
CLRPALYEV

SEQ ID NO: 7663 - protein, 9 aa, Homo Sapiens
CLYGNVEKV

SEQ ID NO: 7664 - protein, 9 aa, Homo Sapiens
DTISLSMFV

SEQ ID NO: 7665 - protein, 9 aa, Homo Sapiens
ELAERVPAI

SEQ ID NO: 7666 - protein, 9 aa, Homo Sapiens
ELANKLITV

SEQ ID NO: 7667 - protein, 9 aa, Homo Sapiens
FIAEHYMFL

SEQ ID NO: 7668 - protein, 9 aa, Homo Sapiens
FIAPVTLKV

SEQ ID NO: 7669 - protein, 9 aa, Homo Sapiens
FIAQKILAL

SEQ ID NO: 7670 - protein, 9 aa, Homo Sapiens
FIIGRVIKA

SEQ ID NO: 7671 - protein, 9 aa, Homo Sapiens
FIINGIEKV

SEQ ID NO: 7672 - protein, 9 aa, Homo Sapiens
FIIQGLRSV

SEQ ID NO: 7673 - protein, 9 aa, Homo Sapiens
FIKQILDGV

SEQ ID NO: 7674 - protein, 9 aa, Homo Sapiens
FIMEGGAMV

SEQ ID NO: 7675 - protein, 9 aa, Homo Sapiens
FINSRIITV

SEQ ID NO: 7676 - protein, 9 aa, Homo Sapiens
FIQSIISTV

SEQ ID NO: 7677 - protein, 9 aa, Homo Sapiens
FIREHIEEL

SEQ ID NO: 7678 - protein, 9 aa, Homo Sapiens
FIRELISNA

SEQ ID NO: 7679 - protein, 9 aa, Homo Sapiens
FISEPARTV

SEQ ID NO: 7680 - protein, 9 aa, Homo Sapiens
FISGHTSEL

SEQ ID NO: 7681 - protein, 9 aa, Homo Sapiens
FISSSILYV

SEQ ID NO: 7682 - protein, 9 aa, Homo Sapiens
FLADIVQKL

SEQ ID NO: 7683 - protein, 9 aa, Homo Sapiens
FLADPSAFV

SEQ ID NO: 7684 - protein, 9 aa, Homo Sapiens
FLAEAARSL

SEQ ID NO: 7685 - protein, 9 aa, Homo Sapiens
FLAELPGSL

SEQ ID NO: 7686 - protein, 9 aa, Homo Sapiens
FLAGAVTSV

SEQ ID NO: 7687 - protein, 9 aa, Homo Sapiens
FLAGEIRET

SEQ ID NO: 7688 - protein, 9 aa, Homo Sapiens
FLAKLIAQA

SEQ ID NO: 7689 - protein, 9 aa, Homo Sapiens
FLANIGTSV

SEQ ID NO: 7690 - protein, 9 aa, Homo Sapiens
FLANLHITA

SEQ ID NO: 7691 - protein, 9 aa, Homo Sapiens
FLANVSTVL

SEQ ID NO: 7692 - protein, 9 aa, Homo Sapiens
FLAPLLAKL

SEQ ID NO: 7693 - protein, 9 aa, Homo Sapiens
FLAPRLLSL

SEQ ID NO: 7694 - protein, 9 aa, Homo Sapiens
FLAPWATIA

SEQ ID NO: 7695 - protein, 9 aa, Homo Sapiens
FLAQRAVEL

SEQ ID NO: 7696 - protein, 9 aa, Homo Sapiens
FLAVKPDGV

SEQ ID NO: 7697 - protein, 9 aa, Homo Sapiens
FLAVRVQQV

SEQ ID NO: 7698 - protein, 9 aa, Homo Sapiens
FLAVSLVKV

SEQ ID NO: 7699 - protein, 9 aa, Homo Sapiens
FLAYAIRAA

SEQ ID NO: 7700 - protein, 9 aa, Homo Sapiens
FLEKLLPPV

SEQ ID NO: 7701 - protein, 9 aa, Homo Sapiens
FLEVRVAVV

SEQ ID NO: 7702 - protein, 9 aa, Homo Sapiens
FLFDHLLTL

SEQ ID NO: 7703 - protein, 9 aa, Homo Sapiens
FLFDRPMHV

SEQ ID NO: 7704 - protein, 9 aa, Homo Sapiens
FLFELPSRL

SEQ ID NO: 7705 - protein, 9 aa, Homo Sapiens
FLFEPVVKA

SEQ ID NO: 7706 - protein, 9 aa, Homo Sapiens
FLFGEVHKA

SEQ ID NO: 7707 - protein, 9 aa, Homo Sapiens
FLFGLPLGV

SEQ ID NO: 7708 - protein, 9 aa, Homo Sapiens
FLFGSIRGA

SEQ ID NO: 7709 - protein, 9 aa, Homo Sapiens
FLFGYPKRL

SEQ ID NO: 7710 - protein, 9 aa, Homo Sapiens
FLFNKVVNL

SEQ ID NO: 7711 - protein, 9 aa, Homo Sapiens
FLFNLPLNI

SEQ ID NO: 7712 - protein, 9 aa, Homo Sapiens
FLFPHSVLV

SEQ ID NO: 7713 - protein, 9 aa, Homo Sapiens
FLFQEPRSI

SEQ ID NO: 7714 - protein, 9 aa, Homo Sapiens
FLFQGFRLV

SEQ ID NO: 7715 - protein, 9 aa, Homo Sapiens
FLFTTPCRL

SEQ ID NO: 7716 - protein, 9 aa, Homo Sapiens
FLGEKIASV

SEQ ID NO: 7717 - protein, 9 aa, Homo Sapiens
FLGKLTIPV

SEQ ID NO: 7718 - protein, 9 aa, Homo Sapiens
FLGPWPAAS

SEQ ID NO: 7719 - protein, 9 aa, Homo Sapiens
FLGVIPQFV

SEQ ID NO: 7720 - protein, 9 aa, Homo Sapiens
FLHARLRTA

SEQ ID NO: 7721 - protein, 9 aa, Homo Sapiens
FLHDNMVEI

SEQ ID NO: 7722 - protein, 9 aa, Homo Sapiens
FLHSSVKMV

SEQ ID NO: 7723 - protein, 9 aa, Homo Sapiens
FLHTLVPFL

SEQ ID NO: 7724 - protein, 9 aa, Homo Sapiens
FLIAALDVL

SEQ ID NO: 7725 - protein, 9 aa, Homo Sapiens
FLIEEQKIV

SEQ ID NO: 7726 - protein, 9 aa, Homo Sapiens
FLIGGLLRI

SEQ ID NO: 7727 - protein, 9 aa, Homo Sapiens
FLIGQGAHV

SEQ ID NO: 7728 - protein, 9 aa, Homo Sapiens
FLINFIHTL

SEQ ID NO: 7729 - protein, 9 aa, Homo Sapiens
FLIPFVITV

SEQ ID NO: 7730 - protein, 9 aa, Homo Sapiens
FLIPIYHQV

SEQ ID NO: 7731 - protein, 9 aa, Homo Sapiens
FLIPVLNGL

SEQ ID NO: 7732 - protein, 9 aa, Homo Sapiens
FLIQNVLRL

SEQ ID NO: 7733 - protein, 9 aa, Homo Sapiens
FLISKGANV

SEQ ID NO: 7734 - protein, 9 aa, Homo Sapiens
FLISRLIKL

SEQ ID NO: 7735 - protein, 9 aa, Homo Sapiens
FLITILDHL

SEQ ID NO: 7736 - protein, 9 aa, Homo Sapiens
FLKADVVFL

SEQ ID NO: 7737 - protein, 9 aa, Homo Sapiens
FLKANILGL

SEQ ID NO: 7738 - protein, 9 aa, Homo Sapiens
FLKAWLEYL

SEQ ID NO: 7739 - protein, 9 aa, Homo Sapiens
FLKDISTTL

SEQ ID NO: 7740 - protein, 9 aa, Homo Sapiens
FLKDKFVEI

SEQ ID NO: 7741 - protein, 9 aa, Homo Sapiens
FLKDLVASV

SEQ ID NO: 7742 - protein, 9 aa, Homo Sapiens
FLKEPILNI

SEQ ID NO: 7743 - protein, 9 aa, Homo Sapiens
FLKEQMILV

SEQ ID NO: 7744 - protein, 9 aa, Homo Sapiens
FLKESSKVV

SEQ ID NO: 7745 - protein, 9 aa, Homo Sapiens
FLKGFLTEV

SEQ ID NO: 7746 - protein, 9 aa, Homo Sapiens
FLKGGALGV

SEQ ID NO: 7747 - protein, 9 aa, Homo Sapiens
FLKIDVPTA

SEQ ID NO: 7748 - protein, 9 aa, Homo Sapiens
FLKIIHTSV

SEQ ID NO: 7749 - protein, 9 aa, Homo Sapiens
FLKINVSEL

SEQ ID NO: 7750 - protein, 9 aa, Homo Sapiens
FLKNELDNV

SEQ ID NO: 7751 - protein, 9 aa, Homo Sapiens
FLKNEVERL

SEQ ID NO: 7752 - protein, 9 aa, Homo Sapiens
FLKNEVVKA

SEQ ID NO: 7753 - protein, 9 aa, Homo Sapiens
FLKNYLTNL

SEQ ID NO: 7754 - protein, 9 aa, Homo Sapiens
FLKPGILTG

SEQ ID NO: 7755 - protein, 9 aa, Homo Sapiens
FLKVDLLLV

SEQ ID NO: 7756 - protein, 9 aa, Homo Sapiens
FLLEGIRSL

SEQ ID NO: 7757 - protein, 9 aa, Homo Sapiens
FLLEKPFSV

SEQ ID NO: 7758 - protein, 9 aa, Homo Sapiens
FLLPILSQI

SEQ ID NO: 7759 - protein, 9 aa, Homo Sapiens
FLMDFIHQV

SEQ ID NO: 7760 - protein, 9 aa, Homo Sapiens
FLNEIQQSI

SEQ ID NO: 7761 - protein, 9 aa, Homo Sapiens
FLNELIKVL

SEQ ID NO: 7762 - protein, 9 aa, Homo Sapiens
FLNGLEILL

SEQ ID NO: 7763 - protein, 9 aa, Homo Sapiens
FLNKEILEL

SEQ ID NO: 7764 - protein, 9 aa, Homo Sapiens
FLNKEITSV

SEQ ID NO: 7765 - protein, 9 aa, Homo Sapiens
FLNKLIPVL

SEQ ID NO: 7766 - protein, 9 aa, Homo Sapiens
FLNLGIEQV

SEQ ID NO: 7767 - protein, 9 aa, Homo Sapiens
FLNNQIKEL

SEQ ID NO: 7768 - protein, 9 aa, Homo Sapiens
FLNPAQRAL

SEQ ID NO: 7769 - protein, 9 aa, Homo Sapiens
FLNPGILEA

SEQ ID NO: 7770 - protein, 9 aa, Homo Sapiens
FLPAGIVAV

SEQ ID NO: 7771 - protein, 9 aa, Homo Sapiens
FLPEAPAEL

SEQ ID NO: 7772 - protein, 9 aa, Homo Sapiens
FLPEPMGTA

SEQ ID NO: 7773 - protein, 9 aa, Homo Sapiens
FLPESVAVV

SEQ ID NO: 7774 - protein, 9 aa, Homo Sapiens
FLPIHLLGL

SEQ ID NO: 7775 - protein, 9 aa, Homo Sapiens
FLPLIVNTV

SEQ ID NO: 7776 - protein, 9 aa, Homo Sapiens
FLPSFLSYI

SEQ ID NO: 7777 - protein, 9 aa, Homo Sapiens
FLQEHNTTL

SEQ ID NO: 7778 - protein, 9 aa, Homo Sapiens
FLQEYGLSV

SEQ ID NO: 7779 - protein, 9 aa, Homo Sapiens
FLQPHLDAV

SEQ ID NO: 7780 - protein, 9 aa, Homo Sapiens
FLQTKIATL

SEQ ID NO: 7781 - protein, 9 aa, Homo Sapiens
FLRDNLEWL

SEQ ID NO: 7782 - protein, 9 aa, Homo Sapiens
FLRERLFEA

SEQ ID NO: 7783 - protein, 9 aa, Homo Sapiens
FLREWVESM

SEQ ID NO: 7784 - protein, 9 aa, Homo Sapiens
FLREYFERL

SEQ ID NO: 7785 - protein, 9 aa, Homo Sapiens
FLRPMLQYV

SEQ ID NO: 7786 - protein, 9 aa, Homo Sapiens
FLRSDLIEV

SEQ ID NO: 7787 - protein, 9 aa, Homo Sapiens
FLRSLLGSI

SEQ ID NO: 7788 - protein, 9 aa, Homo Sapiens
FLSAIVSSV

SEQ ID NO: 7789 - protein, 9 aa, Homo Sapiens
FLSEKDSLL

SEQ ID NO: 7790 - protein, 9 aa, Homo Sapiens
FLSEKLERI

SEQ ID NO: 7791 - protein, 9 aa, Homo Sapiens
FLSELQYYL

SEQ ID NO: 7792 - protein, 9 aa, Homo Sapiens
FLSELTQQL

SEQ ID NO: 7793 - protein, 9 aa, Homo Sapiens
FLSLINVGL

SEQ ID NO: 7794 - protein, 9 aa, Homo Sapiens
FLSPLLPLL

SEQ ID NO: 7795 - protein, 9 aa, Homo Sapiens
FLSPLLTLL

SEQ ID NO: 7796 - protein, 9 aa, Homo Sapiens
FLSQTGHGV

SEQ ID NO: 7797 - protein, 9 aa, Homo Sapiens
FLSSVIQNL

SEQ ID NO: 7798 - protein, 9 aa, Homo Sapiens
FLTEFINYI

SEQ ID NO: 7799 - protein, 9 aa, Homo Sapiens
FLTKKLREI

SEQ ID NO: 7800 - protein, 9 aa, Homo Sapiens
FLTVTGKTV

SEQ ID NO: 7801 - protein, 9 aa, Homo Sapiens
FLVERLLHI

SEQ ID NO: 7802 - protein, 9 aa, Homo Sapiens
FLVPVLEAL

SEQ ID NO: 7803 - protein, 9 aa, Homo Sapiens
FLVQNIHTL

SEQ ID NO: 7804 - protein, 9 aa, Homo Sapiens
FLVTVIHTL

SEQ ID NO: 7805 - protein, 9 aa, Homo Sapiens
FLYPFLHTV

SEQ ID NO: 7806 - protein, 9 aa, Homo Sapiens
FLYPFPLAL

SEQ ID NO: 7807 - protein, 9 aa, Homo Sapiens
FLYQILRGL

SEQ ID NO: 7808 - protein, 9 aa, Homo Sapiens
FLYWHLEDL

SEQ ID NO: 7809 - protein, 9 aa, Homo Sapiens
FMAEIRQYI

SEQ ID NO: 7810 - protein, 9 aa, Homo Sapiens
FMASQMLKV

SEQ ID NO: 7811 - protein, 9 aa, Homo Sapiens
FMKKYIHVA

SEQ ID NO: 7812 - protein, 9 aa, Homo Sapiens
FMKPGTLYV

SEQ ID NO: 7813 - protein, 9 aa, Homo Sapiens
FMMPRIVNV

SEQ ID NO: 7814 - protein, 9 aa, Homo Sapiens
FMNDAIEKA

SEQ ID NO: 7815 - protein, 9 aa, Homo Sapiens
FMNPHLISV

SEQ ID NO: 7816 - protein, 9 aa, Homo Sapiens
FMNSVIQSL

SEQ ID NO: 7817 - protein, 9 aa, Homo Sapiens
FMSSHIKSV

SEQ ID NO: 7818 - protein, 9 aa, Homo Sapiens
FMTTNVPNV

SEQ ID NO: 7819 - protein, 9 aa, Homo Sapiens
FMVDRVVDL

SEQ ID NO: 7820 - protein, 9 aa, Homo Sapiens
FQHGVIAAV

SEQ ID NO: 7821 - protein, 9 aa, Homo Sapiens
FQIGKMRYV

SEQ ID NO: 7822 - protein, 9 aa, Homo Sapiens
FQIGPVAGV

SEQ ID NO: 7823 - protein, 9 aa, Homo Sapiens
FQKIQVRLV

SEQ ID NO: 7824 - protein, 9 aa, Homo Sapiens
FQRPNALAV

SEQ ID NO: 7825 - protein, 9 aa, Homo Sapiens
FQRPTIYYV

SEQ ID NO: 7826 - protein, 9 aa, Homo Sapiens
FSPFHASVL

SEQ ID NO: 7827 - protein, 9 aa, Homo Sapiens
FSSPHLVQV

SEQ ID NO: 7828 - protein, 9 aa, Homo Sapiens
FTAAIISRV

SEQ ID NO: 7829 - protein, 9 aa, Homo Sapiens
FTHDWMVFV

SEQ ID NO: 7830 - protein, 9 aa, Homo Sapiens
FTIFRTISV

SEQ ID NO: 7831 - protein, 9 aa, Homo Sapiens
FTNVVKTTV

SEQ ID NO: 7832 - protein, 9 aa, Homo Sapiens
FTSPFCLQV

SEQ ID NO: 7833 - protein, 9 aa, Homo Sapiens
FTVPRVVAV

SEQ ID NO: 7834 - protein, 9 aa, Homo Sapiens
FVADRLRAV

SEQ ID NO: 7835 - protein, 9 aa, Homo Sapiens
FVAKHLKTI

SEQ ID NO: 7836 - protein, 9 aa, Homo Sapiens
FVFKEPQQV

SEQ ID NO: 7837 - protein, 9 aa, Homo Sapiens
FVIAELVNV

SEQ ID NO: 7838 - protein, 9 aa, Homo Sapiens
FVIGHLKGA

SEQ ID NO: 7839 - protein, 9 aa, Homo Sapiens
FVIRNIVEA

SEQ ID NO: 7840 - protein, 9 aa, Homo Sapiens
FVKDSIRLV

SEQ ID NO: 7841 - protein, 9 aa, Homo Sapiens
FVKPAVVTV

SEQ ID NO: 7842 - protein, 9 aa, Homo Sapiens
FVNEIISRI

SEQ ID NO: 7843 - protein, 9 aa, Homo Sapiens
FVRDMIREV

SEQ ID NO: 7844 - protein, 9 aa, Homo Sapiens
FVYFIVREV

SEQ ID NO: 7845 - protein, 9 aa, Homo Sapiens
FVYNLPHTV

SEQ ID NO: 7846 - protein, 9 aa, Homo Sapiens
GFTIILSGL

SEQ ID NO: 7847 - protein, 9 aa, Homo Sapiens
GITDHIVQV

SEQ ID NO: 7848 - protein, 9 aa, Homo Sapiens
GLAAFLKAI

SEQ ID NO: 7849 - protein, 9 aa, Homo Sapiens
GLAAFRAFL

SEQ ID NO: 7850 - protein, 9 aa, Homo Sapiens
GLAAKLMEL

SEQ ID NO: 7851 - protein, 9 aa, Homo Sapiens
GLAARMSQV

SEQ ID NO: 7852 - protein, 9 aa, Homo Sapiens
GLADITQQL

SEQ ID NO: 7853 - protein, 9 aa, Homo Sapiens
GLAEFQSPL

SEQ ID NO: 7854 - protein, 9 aa, Homo Sapiens
GLAEKIRAC

SEQ ID NO: 7855 - protein, 9 aa, Homo Sapiens
GLAERISVL

SEQ ID NO: 7856 - protein, 9 aa, Homo Sapiens
GLAESVSTL

SEQ ID NO: 7857 - protein, 9 aa, Homo Sapiens
GLAFSLNGV

SEQ ID NO: 7858 - protein, 9 aa, Homo Sapiens
GLAGFFASV

SEQ ID NO: 7859 - protein, 9 aa, Homo Sapiens
GLAGPVRGV

SEQ ID NO: 7860 - protein, 9 aa, Homo Sapiens
GLAGSVRGL

SEQ ID NO: 7861 - protein, 9 aa, Homo Sapiens
GLAKAVASV

SEQ ID NO: 7862 - protein, 9 aa, Homo Sapiens
GLAKLIADV

SEQ ID NO: 7863 - protein, 9 aa, Homo Sapiens
GLALLYSGV

SEQ ID NO: 7864 - protein, 9 aa, Homo Sapiens
GLAPGGLAV

SEQ ID NO: 7865 - protein, 9 aa, Homo Sapiens
GLAPHLEQI

SEQ ID NO: 7866 - protein, 9 aa, Homo Sapiens
GLAPKPVQV

SEQ ID NO: 7867 - protein, 9 aa, Homo Sapiens
GLAPLHIQL

SEQ ID NO: 7868 - protein, 9 aa, Homo Sapiens
GLAQFVREI

SEQ ID NO: 7869 - protein, 9 aa, Homo Sapiens
GLAQVITAV

SEQ ID NO: 7870 - protein, 9 aa, Homo Sapiens
GLATDVQTV

SEQ ID NO: 7871 - protein, 9 aa, Homo Sapiens
GLAWIVGRV

SEQ ID NO: 7872 - protein, 9 aa, Homo Sapiens
GLFAGPCKV

SEQ ID NO: 7873 - protein, 9 aa, Homo Sapiens
GLFHFPTPL

SEQ ID NO: 7874 - protein, 9 aa, Homo Sapiens
GLFHHISKL

SEQ ID NO: 7875 - protein, 9 aa, Homo Sapiens
GLFPAPIHV

SEQ ID NO: 7876 - protein, 9 aa, Homo Sapiens
GLFQHICTA

SEQ ID NO: 7877 - protein, 9 aa, Homo Sapiens
GLGPNLVGV

SEQ ID NO: 7878 - protein, 9 aa, Homo Sapiens
GLGPPGRSV

SEQ ID NO: 7879 - protein, 9 aa, Homo Sapiens
GLHANIAVA

SEQ ID NO: 7880 - protein, 9 aa, Homo Sapiens
GLHFKIKPI

SEQ ID NO: 7881 - protein, 9 aa, Homo Sapiens
GLIDHQTYL

SEQ ID NO: 7882 - protein, 9 aa, Homo Sapiens
GLIDKVNEL

SEQ ID NO: 7883 - protein, 9 aa, Homo Sapiens
GLIDRQVTV

SEQ ID NO: 7884 - protein, 9 aa, Homo Sapiens
GLIEIISNA

SEQ ID NO: 7885 - protein, 9 aa, Homo Sapiens
GLIEILKKV

SEQ ID NO: 7886 - protein, 9 aa, Homo Sapiens
GLIENPALL

SEQ ID NO: 7887 - protein, 9 aa, Homo Sapiens
GLIPQLIGV

SEQ ID NO: 7888 - protein, 9 aa, Homo Sapiens
GLIQGVKSV

SEQ ID NO: 7889 - protein, 9 aa, Homo Sapiens
GLISGILRV

SEQ ID NO: 7890 - protein, 9 aa, Homo Sapiens
GLKAFYKGV

SEQ ID NO: 7891 - protein, 9 aa, Homo Sapiens
GLKDAVYFL

SEQ ID NO: 7892 - protein, 9 aa, Homo Sapiens
GLKDGVALL

SEQ ID NO: 7893 - protein, 9 aa, Homo Sapiens
GLKDHIKEI

SEQ ID NO: 7894 - protein, 9 aa, Homo Sapiens
GLKEGIPAL

SEQ ID NO: 7895 - protein, 9 aa, Homo Sapiens
GLKEILPNL

SEQ ID NO: 7896 - protein, 9 aa, Homo Sapiens
GLKELSEYV

SEQ ID NO: 7897 - protein, 9 aa, Homo Sapiens
GLKGRVFEV

SEQ ID NO: 7898 - protein, 9 aa, Homo Sapiens
GLKHDIARV

SEQ ID NO: 7899 - protein, 9 aa, Homo Sapiens
GLKKVIQKV

SEQ ID NO: 7900 - protein, 9 aa, Homo Sapiens
GLKLTLDTI

SEQ ID NO: 7901 - protein, 9 aa, Homo Sapiens
GLKNGVPAV

SEQ ID NO: 7902 - protein, 9 aa, Homo Sapiens
GLKYDVKKV

SEQ ID NO: 7903 - protein, 9 aa, Homo Sapiens
GLLGNVAEV

SEQ ID NO: 7904 - protein, 9 aa, Homo Sapiens
GLLTRLLQV

SEQ ID NO: 7905 - protein, 9 aa, Homo Sapiens
GLMADPMKV

SEQ ID NO: 7906 - protein, 9 aa, Homo Sapiens
GLMDTVKKV

SEQ ID NO: 7907 - protein, 9 aa, Homo Sapiens
GLMRKVPRV

SEQ ID NO: 7908 - protein, 9 aa, Homo Sapiens
GLMTTVHAI

SEQ ID NO: 7909 - protein, 9 aa, Homo Sapiens
GLNEEIARV

SEQ ID NO: 7910 - protein, 9 aa, Homo Sapiens
GLNGHLTKL

SEQ ID NO: 7911 - protein, 9 aa, Homo Sapiens
GLNHWVRAL

SEQ ID NO: 7912 - protein, 9 aa, Homo Sapiens
GLPSFLTEV

SEQ ID NO: 7913 - protein, 9 aa, Homo Sapiens
GLQEYVEAV

SEQ ID NO: 7914 - protein, 9 aa, Homo Sapiens
GLQFPVGRV

SEQ ID NO: 7915 - protein, 9 aa, Homo Sapiens
GLQGRVTTV

SEQ ID NO: 7916 - protein, 9 aa, Homo Sapiens
GLREFVVIA

SEQ ID NO: 7917 - protein, 9 aa, Homo Sapiens
GLRESISKV

SEQ ID NO: 7918 - protein, 9 aa, Homo Sapiens
GLSDLRLEL

SEQ ID NO: 7919 - protein, 9 aa, Homo Sapiens
GLSETILAV

SEQ ID NO: 7920 - protein, 9 aa, Homo Sapiens
GLSFHIASL

SEQ ID NO: 7921 - protein, 9 aa, Homo Sapiens
GLSNFINFI

SEQ ID NO: 7922 - protein, 9 aa, Homo Sapiens
GLSNHIAAL

SEQ ID NO: 7923 - protein, 9 aa, Homo Sapiens
GLSSHVEVV

SEQ ID NO: 7924 - protein, 9 aa, Homo Sapiens
GLSSVVRNV

SEQ ID NO: 7925 - protein, 9 aa, Homo Sapiens
GLTDIRTLV

SEQ ID NO: 7926 - protein, 9 aa, Homo Sapiens
GLTDKVGRV

SEQ ID NO: 7927 - protein, 9 aa, Homo Sapiens
GLTEALHFV

SEQ ID NO: 7928 - protein, 9 aa, Homo Sapiens
GLTEVLKEI

SEQ ID NO: 7929 - protein, 9 aa, Homo Sapiens
GLTPHLTMV

SEQ ID NO: 7930 - protein, 9 aa, Homo Sapiens
GLTSAIQAV

SEQ ID NO: 7931 - protein, 9 aa, Homo Sapiens
GLVGALMHV

SEQ ID NO: 7932 - protein, 9 aa, Homo Sapiens
GLVGSLQEV

SEQ ID NO: 7933 - protein, 9 aa, Homo Sapiens
GLVPFLVSV

SEQ ID NO: 7934 - protein, 9 aa, Homo Sapiens
GLYEGLTWL

SEQ ID NO: 7935 - protein, 9 aa, Homo Sapiens
GLYGLIVAL

SEQ ID NO: 7936 - protein, 9 aa, Homo Sapiens
GLYPAPLKI

SEQ ID NO: 7937 - protein, 9 aa, Homo Sapiens
GLYPKVAKI

SEQ ID NO: 7938 - protein, 9 aa, Homo Sapiens
GLYPNLIQV

SEQ ID NO: 7939 - protein, 9 aa, Homo Sapiens
GLYPSISLL

SEQ ID NO: 7940 - protein, 9 aa, Homo Sapiens
GLYSGVTTV

SEQ ID NO: 7941 - protein, 9 aa, Homo Sapiens
GMAFRVPTA

SEQ ID NO: 7942 - protein, 9 aa, Homo Sapiens
GMASVISRL

SEQ ID NO: 7943 - protein, 9 aa, Homo Sapiens
GMIGLLTFI

SEQ ID NO: 7944 - protein, 9 aa, Homo Sapiens
GMKSIVGEI

SEQ ID NO: 7945 - protein, 9 aa, Homo Sapiens
GMMEALLKV

SEQ ID NO: 7946 - protein, 9 aa, Homo Sapiens
GMYIFLHTV

SEQ ID NO: 7947 - protein, 9 aa, Homo Sapiens
GMYPNLVHV

SEQ ID NO: 7948 - protein, 9 aa, Homo Sapiens
GMYVFLHAV

SEQ ID NO: 7949 - protein, 9 aa, Homo Sapiens
GQIEVVPEV

SEQ ID NO: 7950 - protein, 9 aa, Homo Sapiens
GQISEVVVV

SEQ ID NO: 7951 - protein, 9 aa, Homo Sapiens
GTIGLIHAV

SEQ ID NO: 7952 - protein, 9 aa, Homo Sapiens
GVISKVSTL

SEQ ID NO: 7953 - protein, 9 aa, Homo Sapiens
GVKDKVTLV

SEQ ID NO: 7954 - protein, 9 aa, Homo Sapiens
GVKFNVTTV

SEQ ID NO: 7955 - protein, 9 aa, Homo Sapiens
GVKQLIVGV

SEQ ID NO: 7956 - protein, 9 aa, Homo Sapiens
HIIENIVAV

SEQ ID NO: 7957 - protein, 9 aa, Homo Sapiens
HLAEHSLQV

SEQ ID NO: 7958 - protein, 9 aa, Homo Sapiens
HLAEIFGKV

SEQ ID NO: 7959 - protein, 9 aa, Homo Sapiens
HLAELIAEL

SEQ ID NO: 7960 - protein, 9 aa, Homo Sapiens
HLAGEVLAV

SEQ ID NO: 7961 - protein, 9 aa, Homo Sapiens
HLAIKLEQV

SEQ ID NO: 7962 - protein, 9 aa, Homo Sapiens
HLAKLVSLV

SEQ ID NO: 7963 - protein, 9 aa, Homo Sapiens
HLANIVERV

SEQ ID NO: 7964 - protein, 9 aa, Homo Sapiens
HLAPGLASC

SEQ ID NO: 7965 - protein, 9 aa, Homo Sapiens
HLAPRTPEV

SEQ ID NO: 7966 - protein, 9 aa, Homo Sapiens
HLASIHGYL

SEQ ID NO: 7967 - protein, 9 aa, Homo Sapiens
HLIDFMSEI

SEQ ID NO: 7968 - protein, 9 aa, Homo Sapiens
HLIGDFSKV

SEQ ID NO: 7969 - protein, 9 aa, Homo Sapiens
HLIHEVTKV

SEQ ID NO: 7970 - protein, 9 aa, Homo Sapiens
HLISTINTV

SEQ ID NO: 7971 - protein, 9 aa, Homo Sapiens
HLKDGIMNL

SEQ ID NO: 7972 - protein, 9 aa, Homo Sapiens
HLKDGVPGL

SEQ ID NO: 7973 - protein, 9 aa, Homo Sapiens
HLKDILTSV

SEQ ID NO: 7974 - protein, 9 aa, Homo Sapiens
HLKLFVTRI

SEQ ID NO: 7975 - protein, 9 aa, Homo Sapiens
HLKQQVSGL

SEQ ID NO: 7976 - protein, 9 aa, Homo Sapiens
HLKVHIERV

SEQ ID NO: 7977 - protein, 9 aa, Homo Sapiens
HLRAAVLYV

SEQ ID NO: 7978 - protein, 9 aa, Homo Sapiens
HLRDFLVQI

SEQ ID NO: 7979 - protein, 9 aa, Homo Sapiens
HLRQDLERV

SEQ ID NO: 7980 - protein, 9 aa, Homo Sapiens
HLRRFILSV

SEQ ID NO: 7981 - protein, 9 aa, Homo Sapiens
HLSDAIVEV

SEQ ID NO: 7982 - protein, 9 aa, Homo Sapiens
HLSDHLSEL

SEQ ID NO: 7983 - protein, 9 aa, Homo Sapiens
HLSELNTKL

SEQ ID NO: 7984 - protein, 9 aa, Homo Sapiens
HLSNILSEV

SEQ ID NO: 7985 - protein, 9 aa, Homo Sapiens
HLVDRTTVV

SEQ ID NO: 7986 - protein, 9 aa, Homo Sapiens
HLVPFVGKV

SEQ ID NO: 7987 - protein, 9 aa, Homo Sapiens
HMHIHISTV

SEQ ID NO: 7988 - protein, 9 aa, Homo Sapiens
HMKNFVTKV

SEQ ID NO: 7989 - protein, 9 aa, Homo Sapiens
HMKSFVTRV

SEQ ID NO: 7990 - protein, 9 aa, Homo Sapiens
HQIQNVVTV

SEQ ID NO: 7991 - protein, 9 aa, Homo Sapiens
HQRTFVLEV

SEQ ID NO: 7992 - protein, 9 aa, Homo Sapiens
HQVPAVSSV

SEQ ID NO: 7993 - protein, 9 aa, Homo Sapiens
IASLLLAKL

SEQ ID NO: 7994 - protein, 9 aa, Homo Sapiens
IAVSHVGAV

SEQ ID NO: 7995 - protein, 9 aa, Homo Sapiens
IIFETPLRV

SEQ ID NO: 7996 - protein, 9 aa, Homo Sapiens
IIIDSVPEV

SEQ ID NO: 7997 - protein, 9 aa, Homo Sapiens
IIIGGVATV

SEQ ID NO: 7998 - protein, 9 aa, Homo Sapiens
IIIPEIQKV

SEQ ID NO: 7999 - protein, 9 aa, Homo Sapiens
IIKEVLLEA

SEQ ID NO: 8000 - protein, 9 aa, Homo Sapiens
IIRDILQDV

SEQ ID NO: 8001 - protein, 9 aa, Homo Sapiens
IITDLLRSV

SEQ ID NO: 8002 - protein, 9 aa, Homo Sapiens
IIYPTPKVV

SEQ ID NO: 8003 - protein, 9 aa, Homo Sapiens
ILAAHVPTL

SEQ ID NO: 8004 - protein, 9 aa, Homo Sapiens
ILAAIVNHL

SEQ ID NO: 8005 - protein, 9 aa, Homo Sapiens
ILAAVETRL

SEQ ID NO: 8006 - protein, 9 aa, Homo Sapiens
ILADIQSHM

SEQ ID NO: 8007 - protein, 9 aa, Homo Sapiens
ILADIVISA

SEQ ID NO: 8008 - protein, 9 aa, Homo Sapiens
ILADKTRQL

SEQ ID NO: 8009 - protein, 9 aa, Homo Sapiens
ILADRILLM

SEQ ID NO: 8010 - protein, 9 aa, Homo Sapiens
ILAEGITIV

SEQ ID NO: 8011 - protein, 9 aa, Homo Sapiens
ILAELLLRV

SEQ ID NO: 8012 - protein, 9 aa, Homo Sapiens
ILAFLVPFV

SEQ ID NO: 8013 - protein, 9 aa, Homo Sapiens
ILAFVQGTV

SEQ ID NO: 8014 - protein, 9 aa, Homo Sapiens
ILAMHLIDV

SEQ ID NO: 8015 - protein, 9 aa, Homo Sapiens
ILANIVNAL

SEQ ID NO: 8016 - protein, 9 aa, Homo Sapiens
ILAPVVKEI

SEQ ID NO: 8017 - protein, 9 aa, Homo Sapiens
ILAQQPLSV

SEQ ID NO: 8018 - protein, 9 aa, Homo Sapiens
ILARDILEI

SEQ ID NO: 8019 - protein, 9 aa, Homo Sapiens
ILASLLRNL

SEQ ID NO: 8020 - protein, 9 aa, Homo Sapiens
ILATNTQKV

SEQ ID NO: 8021 - protein, 9 aa, Homo Sapiens
ILFNRVLGV

SEQ ID NO: 8022 - protein, 9 aa, Homo Sapiens
ILGPKPQGV

SEQ ID NO: 8023 - protein, 9 aa, Homo Sapiens
ILHGLVAAV

SEQ ID NO: 8024 - protein, 9 aa, Homo Sapiens
ILHSVTTNL

SEQ ID NO: 8025 - protein, 9 aa, Homo Sapiens
ILIDKTSFV

SEQ ID NO: 8026 - protein, 9 aa, Homo Sapiens
ILIDPIRVV

SEQ ID NO: 8027 - protein, 9 aa, Homo Sapiens
ILIGRIKNV

SEQ ID NO: 8028 - protein, 9 aa, Homo Sapiens
ILINDVLTA

SEQ ID NO: 8029 - protein, 9 aa, Homo Sapiens
ILIPNVETI

SEQ ID NO: 8030 - protein, 9 aa, Homo Sapiens
ILISKLLGA

SEQ ID NO: 8031 - protein, 9 aa, Homo Sapiens
ILITNVVCV

SEQ ID NO: 8032 - protein, 9 aa, Homo Sapiens
ILKAPGTNV

SEQ ID NO: 8033 - protein, 9 aa, Homo Sapiens
ILKDNIKLL

SEQ ID NO: 8034 - protein, 9 aa, Homo Sapiens
ILKEHITQL

SEQ ID NO: 8035 - protein, 9 aa, Homo Sapiens
ILKEISPLL

SEQ ID NO: 8036 - protein, 9 aa, Homo Sapiens
ILKEIVEML

SEQ ID NO: 8037 - protein, 9 aa, Homo Sapiens
ILKEKLRQL

SEQ ID NO: 8038 - protein, 9 aa, Homo Sapiens
ILKEQIREL

SEQ ID NO: 8039 - protein, 9 aa, Homo Sapiens
ILKERIYRL

SEQ ID NO: 8040 - protein, 9 aa, Homo Sapiens
ILKETVRQI

SEQ ID NO: 8041 - protein, 9 aa, Homo Sapiens
ILKKSIRNL

SEQ ID NO: 8042 - protein, 9 aa, Homo Sapiens
ILKKVLEAL

SEQ ID NO: 8043 - protein, 9 aa, Homo Sapiens
ILKNFLYDI

SEQ ID NO: 8044 - protein, 9 aa, Homo Sapiens
ILKQVVNQV

SEQ ID NO: 8045 - protein, 9 aa, Homo Sapiens
ILKSHVEKL

SEQ ID NO: 8046 - protein, 9 aa, Homo Sapiens
ILMEHIHKL

SEQ ID NO: 8047 - protein, 9 aa, Homo Sapiens
ILMGVLKEV

SEQ ID NO: 8048 - protein, 9 aa, Homo Sapiens
ILNDNINLL

SEQ ID NO: 8049 - protein, 9 aa, Homo Sapiens
ILNEIVNFV

SEQ ID NO: 8050 - protein, 9 aa, Homo Sapiens
ILNEVDISV

SEQ ID NO: 8051 - protein, 9 aa, Homo Sapiens
ILNEVQVGV

SEQ ID NO: 8052 - protein, 9 aa, Homo Sapiens
ILNGIVAAL

SEQ ID NO: 8053 - protein, 9 aa, Homo Sapiens
ILNNNLNTL

SEQ ID NO: 8054 - protein, 9 aa, Homo Sapiens
ILNPEVVTV

SEQ ID NO: 8055 - protein, 9 aa, Homo Sapiens
ILNPHGIPL

SEQ ID NO: 8056 - protein, 9 aa, Homo Sapiens
ILNYVLVRV

SEQ ID NO: 8057 - protein, 9 aa, Homo Sapiens
ILPEKVARV

SEQ ID NO: 8058 - protein, 9 aa, Homo Sapiens
ILPERFLAV

SEQ ID NO: 8059 - protein, 9 aa, Homo Sapiens
ILPGFQRTV

SEQ ID NO: 8060 - protein, 9 aa, Homo Sapiens
ILPSNLLTV

SEQ ID NO: 8061 - protein, 9 aa, Homo Sapiens
ILQDRLNQV

SEQ ID NO: 8062 - protein, 9 aa, Homo Sapiens
ILQQHIATV

SEQ ID NO: 8063 - protein, 9 aa, Homo Sapiens
ILRAILLSL

SEQ ID NO: 8064 - protein, 9 aa, Homo Sapiens
ILRDALSDL

SEQ ID NO: 8065 - protein, 9 aa, Homo Sapiens
ILRDLINEA

SEQ ID NO: 8066 - protein, 9 aa, Homo Sapiens
ILRLQVTNV

SEQ ID NO: 8067 - protein, 9 aa, Homo Sapiens
ILRTGLEEV

SEQ ID NO: 8068 - protein, 9 aa, Homo Sapiens
ILSDNLRQV

SEQ ID NO: 8069 - protein, 9 aa, Homo Sapiens
ILSDVASRL

SEQ ID NO: 8070 - protein, 9 aa, Homo Sapiens
ILSEFSSKL

SEQ ID NO: 8071 - protein, 9 aa, Homo Sapiens
ILSEVQQAV

SEQ ID NO: 8072 - protein, 9 aa, Homo Sapiens
ILSGVIRSV

SEQ ID NO: 8073 - protein, 9 aa, Homo Sapiens
ILSHLSSEL

SEQ ID NO: 8074 - protein, 9 aa, Homo Sapiens
ILSPWGAEV

SEQ ID NO: 8075 - protein, 9 aa, Homo Sapiens
ILTDHILET

SEQ ID NO: 8076 - protein, 9 aa, Homo Sapiens
ILTDITKGV

SEQ ID NO: 8077 - protein, 9 aa, Homo Sapiens
ILTETINTV

SEQ ID NO: 8078 - protein, 9 aa, Homo Sapiens
ILTGHTQSV

SEQ ID NO: 8079 - protein, 9 aa, Homo Sapiens
ILTNGLVSV

SEQ ID NO: 8080 - protein, 9 aa, Homo Sapiens
ILVDWLVEV

SEQ ID NO: 8081 - protein, 9 aa, Homo Sapiens
ILVDWLVQV

SEQ ID NO: 8082 - protein, 9 aa, Homo Sapiens
ILVEHISGV

SEQ ID NO: 8083 - protein, 9 aa, Homo Sapiens
ILVGLLHMV

SEQ ID NO: 8084 - protein, 9 aa, Homo Sapiens
ILYDKLEKI

SEQ ID NO: 8085 - protein, 9 aa, Homo Sapiens
ILYGKIIHL

SEQ ID NO: 8086 - protein, 9 aa, Homo Sapiens
ILYPKPKAC

SEQ ID NO: 8087 - protein, 9 aa, Homo Sapiens
IMEGLSAFL

SEQ ID NO: 8088 - protein, 9 aa, Homo Sapiens
IMFQKPVEV

SEQ ID NO: 8089 - protein, 9 aa, Homo Sapiens
IMKEVIPFL

SEQ ID NO: 8090 - protein, 9 aa, Homo Sapiens
IMKGKIKSI

SEQ ID NO: 8091 - protein, 9 aa, Homo Sapiens
IQAERVRGV

SEQ ID NO: 8092 - protein, 9 aa, Homo Sapiens
IQILKTSEV

SEQ ID NO: 8093 - protein, 9 aa, Homo Sapiens
IQIMKVEEI

SEQ ID NO: 8094 - protein, 9 aa, Homo Sapiens
IQVTKVTQV

SEQ ID NO: 8095 - protein, 9 aa, Homo Sapiens
ISISKRSIL

SEQ ID NO: 8096 - protein, 9 aa, Homo Sapiens
ITFSNPKEV

SEQ ID NO: 8097 - protein, 9 aa, Homo Sapiens
ITNEKLAMV

SEQ ID NO: 8098 - protein, 9 aa, Homo Sapiens
IVATKPLYV

SEQ ID NO: 8099 - protein, 9 aa, Homo Sapiens
IVIDGLREL

SEQ ID NO: 8100 - protein, 9 aa, Homo Sapiens
IVIGIIKTV

SEQ ID NO: 8101 - protein, 9 aa, Homo Sapiens
IVKEELALL

SEQ ID NO: 8102 - protein, 9 aa, Homo Sapiens
IVVGRITEV

SEQ ID NO: 8103 - protein, 9 aa, Homo Sapiens
KIADFGWSV

SEQ ID NO: 8104 - protein, 9 aa, Homo Sapiens
KIKEIAVTV

SEQ ID NO: 8105 - protein, 9 aa, Homo Sapiens
KIKIYISQV

SEQ ID NO: 8106 - protein, 9 aa, Homo Sapiens
KINNEIRSV

SEQ ID NO: 8107 - protein, 9 aa, Homo Sapiens
KLAAVVNNL

SEQ ID NO: 8108 - protein, 9 aa, Homo Sapiens
KLAEALPSL

SEQ ID NO: 8109 - protein, 9 aa, Homo Sapiens
KLAEFIDFL

SEQ ID NO: 8110 - protein, 9 aa, Homo Sapiens
KLAEGVLDV

SEQ ID NO: 8111 - protein, 9 aa, Homo Sapiens
KLAEGVQLL

SEQ ID NO: 8112 - protein, 9 aa, Homo Sapiens
KLAEIVKQV

SEQ ID NO: 8113 - protein, 9 aa, Homo Sapiens
KLAEKLTIL

SEQ ID NO: 8114 - protein, 9 aa, Homo Sapiens
KLAEVSQNI

SEQ ID NO: 8115 - protein, 9 aa, Homo Sapiens
KLAKLQAQV

SEQ ID NO: 8116 - protein, 9 aa, Homo Sapiens
KLASKYLHV

SEQ ID NO: 8117 - protein, 9 aa, Homo Sapiens
KLAVRPLSV

SEQ ID NO: 8118 - protein, 9 aa, Homo Sapiens
KLFDAPLSI

SEQ ID NO: 8119 - protein, 9 aa, Homo Sapiens
KLFDRPQEL

SEQ ID NO: 8120 - protein, 9 aa, Homo Sapiens
KLFEKVKEV

SEQ ID NO: 8121 - protein, 9 aa, Homo Sapiens
KLFGHLTSA

SEQ ID NO: 8122 - protein, 9 aa, Homo Sapiens
KLFGMIITI

SEQ ID NO: 8123 - protein, 9 aa, Homo Sapiens
KLFIGGLNV

SEQ ID NO: 8124 - protein, 9 aa, Homo Sapiens
KLFSILSTV

SEQ ID NO: 8125 - protein, 9 aa, Homo Sapiens
KLGEIVTTI

SEQ ID NO: 8126 - protein, 9 aa, Homo Sapiens
KLGLKPLEV

SEQ ID NO: 8127 - protein, 9 aa, Homo Sapiens
KLGPAPKTL

SEQ ID NO: 8128 - protein, 9 aa, Homo Sapiens
KLGPVAVSI

SEQ ID NO: 8129 - protein, 9 aa, Homo Sapiens
KLHGVNINV

SEQ ID NO: 8130 - protein, 9 aa, Homo Sapiens
KLHYVVTEV

SEQ ID NO: 8131 - protein, 9 aa, Homo Sapiens
KLIANLNML

SEQ ID NO: 8132 - protein, 9 aa, Homo Sapiens
KLIANNTTV

SEQ ID NO: 8133 - protein, 9 aa, Homo Sapiens
KLIEELETL

SEQ ID NO: 8134 - protein, 9 aa, Homo Sapiens
KLIFSVEAV

SEQ ID NO: 8135 - protein, 9 aa, Homo Sapiens
KLIGNMALL

SEQ ID NO: 8136 - protein, 9 aa, Homo Sapiens
KLIKSLEAA

SEQ ID NO: 8137 - protein, 9 aa, Homo Sapiens
KLILLITQV

SEQ ID NO: 8138 - protein, 9 aa, Homo Sapiens
KLINQVNTI

SEQ ID NO: 8139 - protein, 9 aa, Homo Sapiens
KLIPQLPTL

SEQ ID NO: 8140 - protein, 9 aa, Homo Sapiens
KLISDINKA

SEQ ID NO: 8141 - protein, 9 aa, Homo Sapiens
KLKDDIRGL

SEQ ID NO: 8142 - protein, 9 aa, Homo Sapiens
KLKDSLRQL

SEQ ID NO: 8143 - protein, 9 aa, Homo Sapiens
KLKGEIAHL

SEQ ID NO: 8144 - protein, 9 aa, Homo Sapiens
KLKKELTGL

SEQ ID NO: 8145 - protein, 9 aa, Homo Sapiens
KLKTALLDI

SEQ ID NO: 8146 - protein, 9 aa, Homo Sapiens
KLMDEVAGI

SEQ ID NO: 8147 - protein, 9 aa, Homo Sapiens
KLMDHIYAV

SEQ ID NO: 8148 - protein, 9 aa, Homo Sapiens
KLMDKVVRL

SEQ ID NO: 8149 - protein, 9 aa, Homo Sapiens
KLMDQLEAL

SEQ ID NO: 8150 - protein, 9 aa, Homo Sapiens
KLMELLEEI

SEQ ID NO: 8151 - protein, 9 aa, Homo Sapiens
KLNAKLAEL

SEQ ID NO: 8152 - protein, 9 aa, Homo Sapiens
KLNFIVTGL

SEQ ID NO: 8153 - protein, 9 aa, Homo Sapiens
KLNPGIAYV

SEQ ID NO: 8154 - protein, 9 aa, Homo Sapiens
KLNTAVRQV

SEQ ID NO: 8155 - protein, 9 aa, Homo Sapiens
KLQEFLQTL

SEQ ID NO: 8156 - protein, 9 aa, Homo Sapiens
KLREDLERL

SEQ ID NO: 8157 - protein, 9 aa, Homo Sapiens
KLREMLIRV

SEQ ID NO: 8158 - protein, 9 aa, Homo Sapiens
KLSFIIRTV

SEQ ID NO: 8159 - protein, 9 aa, Homo Sapiens
KLSSKLSAV

SEQ ID NO: 8160 - protein, 9 aa, Homo Sapiens
KLTAFVNTL

SEQ ID NO: 8161 - protein, 9 aa, Homo Sapiens
KLVDCIIEV

SEQ ID NO: 8162 - protein, 9 aa, Homo Sapiens
KLVGEFLEV

SEQ ID NO: 8163 - protein, 9 aa, Homo Sapiens
KLVPFLKKV

SEQ ID NO: 8164 - protein, 9 aa, Homo Sapiens
KLVTTVTEI

SEQ ID NO: 8165 - protein, 9 aa, Homo Sapiens
KLYNWLRVA

SEQ ID NO: 8166 - protein, 9 aa, Homo Sapiens
KLYPQLSSV

SEQ ID NO: 8167 - protein, 9 aa, Homo Sapiens
KLYTGLREV

SEQ ID NO: 8168 - protein, 9 aa, Homo Sapiens
KMAEMLVEL

SEQ ID NO: 8169 - protein, 9 aa, Homo Sapiens
KMAPALRKV

SEQ ID NO: 8170 - protein, 9 aa, Homo Sapiens
KMKEAVRLV

SEQ ID NO: 8171 - protein, 9 aa, Homo Sapiens
KMKPEVTAL

SEQ ID NO: 8172 - protein, 9 aa, Homo Sapiens
KMMDVTVTI

SEQ ID NO: 8173 - protein, 9 aa, Homo Sapiens
KMNEKIASL

SEQ ID NO: 8174 - protein, 9 aa, Homo Sapiens
KMNEKLYTV

SEQ ID NO: 8175 - protein, 9 aa, Homo Sapiens
KQAFTVAAV

SEQ ID NO: 8176 - protein, 9 aa, Homo Sapiens
KQIDQFLVV

SEQ ID NO: 8177 - protein, 9 aa, Homo Sapiens
KQISTLESV

SEQ ID NO: 8178 - protein, 9 aa, Homo Sapiens
KSIARVLTV

SEQ ID NO: 8179 - protein, 9 aa, Homo Sapiens
KVADLVLML

SEQ ID NO: 8180 - protein, 9 aa, Homo Sapiens
KVAPAPAVV

SEQ ID NO: 8181 - protein, 9 aa, Homo Sapiens
KVASLLHQV

SEQ ID NO: 8182 - protein, 9 aa, Homo Sapiens
KVGPVPVLV

SEQ ID NO: 8183 - protein, 9 aa, Homo Sapiens
KVIDYVPGI

SEQ ID NO: 8184 - protein, 9 aa, Homo Sapiens
KVKDGQLTV

SEQ ID NO: 8185 - protein, 9 aa, Homo Sapiens
KVKDILSKV

SEQ ID NO: 8186 - protein, 9 aa, Homo Sapiens
KVMGTFSTV

SEQ ID NO: 8187 - protein, 9 aa, Homo Sapiens
LAKALHLLK

SEQ ID NO: 8188 - protein, 9 aa, Homo Sapiens
LFNKQLESI

SEQ ID NO: 8189 - protein, 9 aa, Homo Sapiens
LGNISKLDI

SEQ ID NO: 8190 - protein, 9 aa, Homo Sapiens
LIAGTAVVG

SEQ ID NO: 8191 - protein, 9 aa, Homo Sapiens
LIKDIISQV

SEQ ID NO: 8192 - protein, 9 aa, Homo Sapiens
LINPNIATV

SEQ ID NO: 8193 - protein, 9 aa, Homo Sapiens
LISESFLTV

SEQ ID NO: 8194 - protein, 9 aa, Homo Sapiens
LIYGTPRAA

SEQ ID NO: 8195 - protein, 9 aa, Homo Sapiens
LLAAWTARA

SEQ ID NO: 8196 - protein, 9 aa, Homo Sapiens
LLADKVLKL

SEQ ID NO: 8197 - protein, 9 aa, Homo Sapiens
LLADLKTMV

SEQ ID NO: 8198 - protein, 9 aa, Homo Sapiens
LLADLLHNV

SEQ ID NO: 8199 - protein, 9 aa, Homo Sapiens
LLADVETFV

SEQ ID NO: 8200 - protein, 9 aa, Homo Sapiens
LLAEALNQV

SEQ ID NO: 8201 - protein, 9 aa, Homo Sapiens
LLAEGITWV

SEQ ID NO: 8202 - protein, 9 aa, Homo Sapiens
LLAEHIKSL

SEQ ID NO: 8203 - protein, 9 aa, Homo Sapiens
LLAEKVEQL

SEQ ID NO: 8204 - protein, 9 aa, Homo Sapiens
LLAELLTHL

SEQ ID NO: 8205 - protein, 9 aa, Homo Sapiens
LLAELPASV

SEQ ID NO: 8206 - protein, 9 aa, Homo Sapiens
LLAFVVRSV

SEQ ID NO: 8207 - protein, 9 aa, Homo Sapiens
LLAGLLTGL

SEQ ID NO: 8208 - protein, 9 aa, Homo Sapiens
LLAGPLRPA

SEQ ID NO: 8209 - protein, 9 aa, Homo Sapiens
LLAKKISQL

SEQ ID NO: 8210 - protein, 9 aa, Homo Sapiens
LLAKLLSQL

SEQ ID NO: 8211 - protein, 9 aa, Homo Sapiens
LLALHVLEA

SEQ ID NO: 8212 - protein, 9 aa, Homo Sapiens
LLANKVPAA

SEQ ID NO: 8213 - protein, 9 aa, Homo Sapiens
LLAPAPAQA

SEQ ID NO: 8214 - protein, 9 aa, Homo Sapiens
LLAPKLNEA

SEQ ID NO: 8215 - protein, 9 aa, Homo Sapiens
LLAPLAQTV

SEQ ID NO: 8216 - protein, 9 aa, Homo Sapiens
LLASEVPQL

SEQ ID NO: 8217 - protein, 9 aa, Homo Sapiens
LLASINSTV

SEQ ID NO: 8218 - protein, 9 aa, Homo Sapiens
LLATEVVTV

SEQ ID NO: 8219 - protein, 9 aa, Homo Sapiens
LLATVLQAV

SEQ ID NO: 8220 - protein, 9 aa, Homo Sapiens
LLFDRPMHV

SEQ ID NO: 8221 - protein, 9 aa, Homo Sapiens
LLFEGIARI

SEQ ID NO: 8222 - protein, 9 aa, Homo Sapiens
LLFKILSSV

SEQ ID NO: 8223 - protein, 9 aa, Homo Sapiens
LLFPSVMVV

SEQ ID NO: 8224 - protein, 9 aa, Homo Sapiens
LLGPKPFPL

SEQ ID NO: 8225 - protein, 9 aa, Homo Sapiens
LLGPPPVGV

SEQ ID NO: 8226 - protein, 9 aa, Homo Sapiens
LLGPRGIGV

SEQ ID NO: 8227 - protein, 9 aa, Homo Sapiens
LLGPRLVLA

SEQ ID NO: 8228 - protein, 9 aa, Homo Sapiens
LLHDGIPVV

SEQ ID NO: 8229 - protein, 9 aa, Homo Sapiens
LLHFIALTV

SEQ ID NO: 8230 - protein, 9 aa, Homo Sapiens
LLHFSIVSV

SEQ ID NO: 8231 - protein, 9 aa, Homo Sapiens
LLHGHIVEL

SEQ ID NO: 8232 - protein, 9 aa, Homo Sapiens
LLHKGILAV

SEQ ID NO: 8233 - protein, 9 aa, Homo Sapiens
LLHQGGLSV

SEQ ID NO: 8234 - protein, 9 aa, Homo Sapiens
LLHSFVDSV

SEQ ID NO: 8235 - protein, 9 aa, Homo Sapiens
LLHVQPSMV

SEQ ID NO: 8236 - protein, 9 aa, Homo Sapiens
LLIGATMQV

SEQ ID NO: 8237 - protein, 9 aa, Homo Sapiens
LLIGHLERV

SEQ ID NO: 8238 - protein, 9 aa, Homo Sapiens
LLIKQVVEV

SEQ ID NO: 8239 - protein, 9 aa, Homo Sapiens
LLIPGLATA

SEQ ID NO: 8240 - protein, 9 aa, Homo Sapiens
LLIQGVPAV

SEQ ID NO: 8241 - protein, 9 aa, Homo Sapiens
LLKAFIANL

SEQ ID NO: 8242 - protein, 9 aa, Homo Sapiens
LLKDFLRNL

SEQ ID NO: 8243 - protein, 9 aa, Homo Sapiens
LLKDSIVQL

SEQ ID NO: 8244 - protein, 9 aa, Homo Sapiens
LLKDVKISV

SEQ ID NO: 8245 - protein, 9 aa, Homo Sapiens
LLKELRHGV

SEQ ID NO: 8246 - protein, 9 aa, Homo Sapiens
LLKEYIQKL

SEQ ID NO: 8247 - protein, 9 aa, Homo Sapiens
LLKEYLVTL

SEQ ID NO: 8248 - protein, 9 aa, Homo Sapiens
LLKNELLGA

SEQ ID NO: 8249 - protein, 9 aa, Homo Sapiens
LLKNFVELI

SEQ ID NO: 8250 - protein, 9 aa, Homo Sapiens
LLKNPFLSV

SEQ ID NO: 8251 - protein, 9 aa, Homo Sapiens
LLKPELLRA

SEQ ID NO: 8252 - protein, 9 aa, Homo Sapiens
LLKPGLNVV

SEQ ID NO: 8253 - protein, 9 aa, Homo Sapiens
LLKPGLRAV

SEQ ID NO: 8254 - protein, 9 aa, Homo Sapiens
LLKPTLSEI

SEQ ID NO: 8255 - protein, 9 aa, Homo Sapiens
LLKSKLLVL

SEQ ID NO: 8256 - protein, 9 aa, Homo Sapiens
LLKVFVVEA

SEQ ID NO: 8257 - protein, 9 aa, Homo Sapiens
LLKVGILYI

SEQ ID NO: 8258 - protein, 9 aa, Homo Sapiens
LLKYIVIQV

SEQ ID NO: 8259 - protein, 9 aa, Homo Sapiens
LLMEHIQEI

SEQ ID NO: 8260 - protein, 9 aa, Homo Sapiens
LLNDHIYVV

SEQ ID NO: 8261 - protein, 9 aa, Homo Sapiens
LLNDRKVFV

SEQ ID NO: 8262 - protein, 9 aa, Homo Sapiens
LLNKSIIRV

SEQ ID NO: 8263 - protein, 9 aa, Homo Sapiens
LLNPHLRQL

SEQ ID NO: 8264 - protein, 9 aa, Homo Sapiens
LLNPSLQKV

SEQ ID NO: 8265 - protein, 9 aa, Homo Sapiens
LLNQKPLSL

SEQ ID NO: 8266 - protein, 9 aa, Homo Sapiens
LLPDIISRL

SEQ ID NO: 8267 - protein, 9 aa, Homo Sapiens
LLPDIVTCV

SEQ ID NO: 8268 - protein, 9 aa, Homo Sapiens
LLPHPGLQV

SEQ ID NO: 8269 - protein, 9 aa, Homo Sapiens
LLPIKTVGV

SEQ ID NO: 8270 - protein, 9 aa, Homo Sapiens
LLPPPPCPA

SEQ ID NO: 8271 - protein, 9 aa, Homo Sapiens
LLQDAIREV

SEQ ID NO: 8272 - protein, 9 aa, Homo Sapiens
LLQEPPRTV

SEQ ID NO: 8273 - protein, 9 aa, Homo Sapiens
LLQESLAQA

SEQ ID NO: 8274 - protein, 9 aa, Homo Sapiens
LLQPHLERV

SEQ ID NO: 8275 - protein, 9 aa, Homo Sapiens
LLRDQVLGV

SEQ ID NO: 8276 - protein, 9 aa, Homo Sapiens
LLREELQLL

SEQ ID NO: 8277 - protein, 9 aa, Homo Sapiens
LLREKVEFL

SEQ ID NO: 8278 - protein, 9 aa, Homo Sapiens
LLRQEVVAV

SEQ ID NO: 8279 - protein, 9 aa, Homo Sapiens
LLRQGVLGI

SEQ ID NO: 8280 - protein, 9 aa, Homo Sapiens
LLRSIVKQV

SEQ ID NO: 8281 - protein, 9 aa, Homo Sapiens
LLSAEPVPA

SEQ ID NO: 8282 - protein, 9 aa, Homo Sapiens
LLSEHVIAI

SEQ ID NO: 8283 - protein, 9 aa, Homo Sapiens
LLSERFINV

SEQ ID NO: 8284 - protein, 9 aa, Homo Sapiens
LLSERVSNL

SEQ ID NO: 8285 - protein, 9 aa, Homo Sapiens
LLSNLFTTL

SEQ ID NO: 8286 - protein, 9 aa, Homo Sapiens
LLSPHSQVL

SEQ ID NO: 8287 - protein, 9 aa, Homo Sapiens
LLSPVVPQI

SEQ ID NO: 8288 - protein, 9 aa, Homo Sapiens
LLSSHVRGV

SEQ ID NO: 8289 - protein, 9 aa, Homo Sapiens
LLTDGIMRV

SEQ ID NO: 8290 - protein, 9 aa, Homo Sapiens
LLTEIRAVV

SEQ ID NO: 8291 - protein, 9 aa, Homo Sapiens
LLYDQPLQV

SEQ ID NO: 8292 - protein, 9 aa, Homo Sapiens
LLYGKYVSV

SEQ ID NO: 8293 - protein, 9 aa, Homo Sapiens
LLYNRPGTV

SEQ ID NO: 8294 - protein, 9 aa, Homo Sapiens
LMAHAMEEV

SEQ ID NO: 8295 - protein, 9 aa, Homo Sapiens
LMKNTIIAA

SEQ ID NO: 8296 - protein, 9 aa, Homo Sapiens
LMKQYIEFV

SEQ ID NO: 8297 - protein, 9 aa, Homo Sapiens
LMNAVVQTV

SEQ ID NO: 8298 - protein, 9 aa, Homo Sapiens
LMNGLIQGV

SEQ ID NO: 8299 - protein, 9 aa, Homo Sapiens
LMRANITAI

SEQ ID NO: 8300 - protein, 9 aa, Homo Sapiens
LMRPLVVTA

SEQ ID NO: 8301 - protein, 9 aa, Homo Sapiens
LMTKEISSV

SEQ ID NO: 8302 - protein, 9 aa, Homo Sapiens
LMVDHVTEV

SEQ ID NO: 8303 - protein, 9 aa, Homo Sapiens
LMYPYIFHV

SEQ ID NO: 8304 - protein, 9 aa, Homo Sapiens
LQARIAHQI

SEQ ID NO: 8305 - protein, 9 aa, Homo Sapiens
LQFDGIHVV

SEQ ID NO: 8306 - protein, 9 aa, Homo Sapiens
LQIPAILGI

SEQ ID NO: 8307 - protein, 9 aa, Homo Sapiens
LQKEGVIGV

SEQ ID NO: 8308 - protein, 9 aa, Homo Sapiens
LQKPDVVGI

SEQ ID NO: 8309 - protein, 9 aa, Homo Sapiens
LQKYIEIYV

SEQ ID NO: 8310 - protein, 9 aa, Homo Sapiens
LTKDMLLEV

SEQ ID NO: 8311 - protein, 9 aa, Homo Sapiens
LTMEVIRQV

SEQ ID NO: 8312 - protein, 9 aa, Homo Sapiens
LVIDAVREI

SEQ ID NO: 8313 - protein, 9 aa, Homo Sapiens
LVKEGLVMV

SEQ ID NO: 8314 - protein, 9 aa, Homo Sapiens
LVKLRILEL

SEQ ID NO: 8315 - protein, 9 aa, Homo Sapiens
LVVEKPLVS

SEQ ID NO: 8316 - protein, 9 aa, Homo Sapiens
MEIERILGV

SEQ ID NO: 8317 - protein, 9 aa, Homo Sapiens
MIAGKVAVV

SEQ ID NO: 8318 - protein, 9 aa, Homo Sapiens
MIAQTVTAV

SEQ ID NO: 8319 - protein, 9 aa, Homo Sapiens
MIKEKLCYV

SEQ ID NO: 8320 - protein, 9 aa, Homo Sapiens
MLADTVATL

SEQ ID NO: 8321 - protein, 9 aa, Homo Sapiens
MLAEKLPNL

SEQ ID NO: 8322 - protein, 9 aa, Homo Sapiens
MLAGFITTL

SEQ ID NO: 8323 - protein, 9 aa, Homo Sapiens
MLAILLTEV

SEQ ID NO: 8324 - protein, 9 aa, Homo Sapiens
MLAKHVITL

SEQ ID NO: 8325 - protein, 9 aa, Homo Sapiens
MLANDIARL

SEQ ID NO: 8326 - protein, 9 aa, Homo Sapiens
MLFGHPLLV

SEQ ID NO: 8327 - protein, 9 aa, Homo Sapiens
MLIERIVRL

SEQ ID NO: 8328 - protein, 9 aa, Homo Sapiens
MLKDEVRTL

SEQ ID NO: 8329 - protein, 9 aa, Homo Sapiens
MLKPSVTSA

SEQ ID NO: 8330 - protein, 9 aa, Homo Sapiens
MLKSNIVTV

SEQ ID NO: 8331 - protein, 9 aa, Homo Sapiens
MLNVLVRAV

SEQ ID NO: 8332 - protein, 9 aa, Homo Sapiens
MLPVRLATA

SEQ ID NO: 8333 - protein, 9 aa, Homo Sapiens
MLREQVAQL

SEQ ID NO: 8334 - protein, 9 aa, Homo Sapiens
MLRQIIGQA

SEQ ID NO: 8335 - protein, 9 aa, Homo Sapiens
MLRSHVREL

SEQ ID NO: 8336 - protein, 9 aa, Homo Sapiens
MLSAIQSEV

SEQ ID NO: 8337 - protein, 9 aa, Homo Sapiens
MLSDRLTFL

SEQ ID NO: 8338 - protein, 9 aa, Homo Sapiens
MLSEHTSKL

SEQ ID NO: 8339 - protein, 9 aa, Homo Sapiens
MLSPFISSV

SEQ ID NO: 8340 - protein, 9 aa, Homo Sapiens
MLYPKLISL

SEQ ID NO: 8341 - protein, 9 aa, Homo Sapiens
MMKLIINSL

SEQ ID NO: 8342 - protein, 9 aa, Homo Sapiens
MMMALLVPL

SEQ ID NO: 8343 - protein, 9 aa, Homo Sapiens
MMPKYLNFV

SEQ ID NO: 8344 - protein, 9 aa, Homo Sapiens
MMVGDLLEV

SEQ ID NO: 8345 - protein, 9 aa, Homo Sapiens
MQKSVVITL

SEQ ID NO: 8346 - protein, 9 aa, Homo Sapiens
MTYWHLLNA

SEQ ID NO: 8347 - protein, 9 aa, Homo Sapiens
MVAPAVASV

SEQ ID NO: 8348 - protein, 9 aa, Homo Sapiens
NIFPSPNSV

SEQ ID NO: 8349 - protein, 9 aa, Homo Sapiens
NIFPYPVGV

SEQ ID NO: 8350 - protein, 9 aa, Homo Sapiens
NIICGITSV

SEQ ID NO: 8351 - protein, 9 aa, Homo Sapiens
NIKPDIMAV

SEQ ID NO: 8352 - protein, 9 aa, Homo Sapiens
NIKPEIVSV

SEQ ID NO: 8353 - protein, 9 aa, Homo Sapiens
NIRDFLVEI

SEQ ID NO: 8354 - protein, 9 aa, Homo Sapiens
NIVEKLREV

SEQ ID NO: 8355 - protein, 9 aa, Homo Sapiens
NIVERVKEV

SEQ ID NO: 8356 - protein, 9 aa, Homo Sapiens
NLAEKLIGV

SEQ ID NO: 8357 - protein, 9 aa, Homo Sapiens
NLAEKPKTV

SEQ ID NO: 8358 - protein, 9 aa, Homo Sapiens
NLAEKYQTV

SEQ ID NO: 8359 - protein, 9 aa, Homo Sapiens
NLAENISRV

SEQ ID NO: 8360 - protein, 9 aa, Homo Sapiens
NLAEVVERV

SEQ ID NO: 8361 - protein, 9 aa, Homo Sapiens
NLALKLLSV

SEQ ID NO: 8362 - protein, 9 aa, Homo Sapiens
NLARALQQV

SEQ ID NO: 8363 - protein, 9 aa, Homo Sapiens
NLASFIEQV

SEQ ID NO: 8364 - protein, 9 aa, Homo Sapiens
NLFHYLTEV

SEQ ID NO: 8365 - protein, 9 aa, Homo Sapiens
NLFKHLAKA

SEQ ID NO: 8366 - protein, 9 aa, Homo Sapiens
NLIPILKTV

SEQ ID NO: 8367 - protein, 9 aa, Homo Sapiens
NLIPQITSI

SEQ ID NO: 8368 - protein, 9 aa, Homo Sapiens
NLIRSVRTV

SEQ ID NO: 8369 - protein, 9 aa, Homo Sapiens
NLISALEEA

SEQ ID NO: 8370 - protein, 9 aa, Homo Sapiens
NLISQVGRV

SEQ ID NO: 8371 - protein, 9 aa, Homo Sapiens
NLKAHVVAV

SEQ ID NO: 8372 - protein, 9 aa, Homo Sapiens
NLKEAIETI

SEQ ID NO: 8373 - protein, 9 aa, Homo Sapiens
NLKEKIKEL

SEQ ID NO: 8374 - protein, 9 aa, Homo Sapiens
NLKEVLNAV

SEQ ID NO: 8375 - protein, 9 aa, Homo Sapiens
NLKIAVSNI

SEQ ID NO: 8376 - protein, 9 aa, Homo Sapiens
NLKKIFREV

SEQ ID NO: 8377 - protein, 9 aa, Homo Sapiens
NLKLKLTAV

SEQ ID NO: 8378 - protein, 9 aa, Homo Sapiens
NLKPHIQGI

SEQ ID NO: 8379 - protein, 9 aa, Homo Sapiens
NLKPWVLEV

SEQ ID NO: 8380 - protein, 9 aa, Homo Sapiens
NLKQAILQA

SEQ ID NO: 8381 - protein, 9 aa, Homo Sapiens
NLKSCLDNV

SEQ ID NO: 8382 - protein, 9 aa, Homo Sapiens
NLKTTVEGL

SEQ ID NO: 8383 - protein, 9 aa, Homo Sapiens
NLNSHITGL

SEQ ID NO: 8384 - protein, 9 aa, Homo Sapiens
NLNSIVPSV

SEQ ID NO: 8385 - protein, 9 aa, Homo Sapiens
NLPDIVSKV

SEQ ID NO: 8386 - protein, 9 aa, Homo Sapiens
NLQGKILSV

SEQ ID NO: 8387 - protein, 9 aa, Homo Sapiens
NLRDGPITI

SEQ ID NO: 8388 - protein, 9 aa, Homo Sapiens
NLRDIVRVV

SEQ ID NO: 8389 - protein, 9 aa, Homo Sapiens
NLRDWLRVV

SEQ ID NO: 8390 - protein, 9 aa, Homo Sapiens
NLRNAVELA

SEQ ID NO: 8391 - protein, 9 aa, Homo Sapiens
NLSAHIESL

SEQ ID NO: 8392 - protein, 9 aa, Homo Sapiens
NLSGHLLSA

SEQ ID NO: 8393 - protein, 9 aa, Homo Sapiens
NLTENLQYV

SEQ ID NO: 8394 - protein, 9 aa, Homo Sapiens
NLVLSVREV

SEQ ID NO: 8395 - protein, 9 aa, Homo Sapiens
NLVSFLETV

SEQ ID NO: 8396 - protein, 9 aa, Homo Sapiens
NLYPFVKTV

SEQ ID NO: 8397 - protein, 9 aa, Homo Sapiens
NMAELFAVV

SEQ ID NO: 8398 - protein, 9 aa, Homo Sapiens
NMARAVFGV

SEQ ID NO: 8399 - protein, 9 aa, Homo Sapiens
NMKEKINAV

SEQ ID NO: 8400 - protein, 9 aa, Homo Sapiens
NMKTVYVSV

SEQ ID NO: 8401 - protein, 9 aa, Homo Sapiens
NMMSGISSV

SEQ ID NO: 8402 - protein, 9 aa, Homo Sapiens
NMVAKVDEV

SEQ ID NO: 8403 - protein, 9 aa, Homo Sapiens
NMYGKVVTV

SEQ ID NO: 8404 - protein, 9 aa, Homo Sapiens
NVAPIISKV

SEQ ID NO: 8405 - protein, 9 aa, Homo Sapiens
NVIPNVANV

SEQ ID NO: 8406 - protein, 9 aa, Homo Sapiens
PLTGHLLEV

SEQ ID NO: 8407 - protein, 9 aa, Homo Sapiens
QIADIVTSV

SEQ ID NO: 8408 - protein, 9 aa, Homo Sapiens
QIITSVVSV

SEQ ID NO: 8409 - protein, 9 aa, Homo Sapiens
QIKDNLREV

SEQ ID NO: 8410 - protein, 9 aa, Homo Sapiens
QLADGLQYI

SEQ ID NO: 8411 - protein, 9 aa, Homo Sapiens
QLDNSILTV

SEQ ID NO: 8412 - protein, 9 aa, Homo Sapiens
QLFKKPRQV

SEQ ID NO: 8413 - protein, 9 aa, Homo Sapiens
QLIDGILYA

SEQ ID NO: 8414 - protein, 9 aa, Homo Sapiens
QLIDIIHTA

SEQ ID NO: 8415 - protein, 9 aa, Homo Sapiens
QLISKIPHI

SEQ ID NO: 8416 - protein, 9 aa, Homo Sapiens
QLKDFITKL

SEQ ID NO: 8417 - protein, 9 aa, Homo Sapiens
QLKEEIAFL

SEQ ID NO: 8418 - protein, 9 aa, Homo Sapiens
QLKHKLEQL

SEQ ID NO: 8419 - protein, 9 aa, Homo Sapiens
QLMEQVAQL

SEQ ID NO: 8420 - protein, 9 aa, Homo Sapiens
QLMNLIRSV

SEQ ID NO: 8421 - protein, 9 aa, Homo Sapiens
QLNDSIITV

SEQ ID NO: 8422 - protein, 9 aa, Homo Sapiens
QLNEKVAQL

SEQ ID NO: 8423 - protein, 9 aa, Homo Sapiens
QLQGYLRSV

SEQ ID NO: 8424 - protein, 9 aa, Homo Sapiens
QLQNYLRSV

SEQ ID NO: 8425 - protein, 9 aa, Homo Sapiens
QLRPYQMEV

SEQ ID NO: 8426 - protein, 9 aa, Homo Sapiens
QLSPRLLEV

SEQ ID NO: 8427 - protein, 9 aa, Homo Sapiens
QLSTIRSFL

SEQ ID NO: 8428 - protein, 9 aa, Homo Sapiens
QLSTVITQV

SEQ ID NO: 8429 - protein, 9 aa, Homo Sapiens
QLTSNLAQV

SEQ ID NO: 8430 - protein, 9 aa, Homo Sapiens
QLVDIIEKV

SEQ ID NO: 8431 - protein, 9 aa, Homo Sapiens
QLVPALAKV

SEQ ID NO: 8432 - protein, 9 aa, Homo Sapiens
QLVQRVASV

SEQ ID NO: 8433 - protein, 9 aa, Homo Sapiens
QLVRDLLEV

SEQ ID NO: 8434 - protein, 9 aa, Homo Sapiens
QLYQDPRNV

SEQ ID NO: 8435 - protein, 9 aa, Homo Sapiens
QMFEGPLAL

SEQ ID NO: 8436 - protein, 9 aa, Homo Sapiens
QMFSAIAAV

SEQ ID NO: 8437 - protein, 9 aa, Homo Sapiens
QMISRIEYI

SEQ ID NO: 8438 - protein, 9 aa, Homo Sapiens
QMISRIEYV

SEQ ID NO: 8439 - protein, 9 aa, Homo Sapiens
QMREFLEQL

SEQ ID NO: 8440 - protein, 9 aa, Homo Sapiens
QQIDRVVEV

SEQ ID NO: 8441 - protein, 9 aa, Homo Sapiens
QQIGKVVQV

SEQ ID NO: 8442 - protein, 9 aa, Homo Sapiens
QQRLVVVSV

SEQ ID NO: 8443 - protein, 9 aa, Homo Sapiens
QVHGTITGV

SEQ ID NO: 8444 - protein, 9 aa, Homo Sapiens
QVIPQLQTV

SEQ ID NO: 8445 - protein, 9 aa, Homo Sapiens
QVLSRLSTL

SEQ ID NO: 8446 - protein, 9 aa, Homo Sapiens
RIFQTLLEV

SEQ ID NO: 8447 - protein, 9 aa, Homo Sapiens
RIIDTVAQV

SEQ ID NO: 8448 - protein, 9 aa, Homo Sapiens
RIKATVMDV

SEQ ID NO: 8449 - protein, 9 aa, Homo Sapiens
RIKDTVQKL

SEQ ID NO: 8450 - protein, 9 aa, Homo Sapiens
RIKLGIKSL

SEQ ID NO: 8451 - protein, 9 aa, Homo Sapiens
RIRDQLSAV

SEQ ID NO: 8452 - protein, 9 aa, Homo Sapiens
RLAAFYSQV

SEQ ID NO: 8453 - protein, 9 aa, Homo Sapiens
RLAALGRQV

SEQ ID NO: 8454 - protein, 9 aa, Homo Sapiens
RLAEVVHEL

SEQ ID NO: 8455 - protein, 9 aa, Homo Sapiens
RLAHHLVAL

SEQ ID NO: 8456 - protein, 9 aa, Homo Sapiens
RLAHYIDRV

SEQ ID NO: 8457 - protein, 9 aa, Homo Sapiens
RLALVISEL

SEQ ID NO: 8458 - protein, 9 aa, Homo Sapiens
RLANVVRQV

SEQ ID NO: 8459 - protein, 9 aa, Homo Sapiens
RLAPTLSQL

SEQ ID NO: 8460 - protein, 9 aa, Homo Sapiens
RLAQHITYV

SEQ ID NO: 8461 - protein, 9 aa, Homo Sapiens
RLAQLITQA

SEQ ID NO: 8462 - protein, 9 aa, Homo Sapiens
RLASSVLRC

SEQ ID NO: 8463 - protein, 9 aa, Homo Sapiens
RLAVYIDKV

SEQ ID NO: 8464 - protein, 9 aa, Homo Sapiens
RLAVYIDRV

SEQ ID NO: 8465 - protein, 9 aa, Homo Sapiens
RLFDDVPQV

SEQ ID NO: 8466 - protein, 9 aa, Homo Sapiens
RLFDEPQLA

SEQ ID NO: 8467 - protein, 9 aa, Homo Sapiens
RLFEGNALL

SEQ ID NO: 8468 - protein, 9 aa, Homo Sapiens
RLFENLRML

SEQ ID NO: 8469 - protein, 9 aa, Homo Sapiens
RLFEVPHEL

SEQ ID NO: 8470 - protein, 9 aa, Homo Sapiens
RLFFQPHQA

SEQ ID NO: 8471 - protein, 9 aa, Homo Sapiens
RLGPVPPGL

SEQ ID NO: 8472 - protein, 9 aa, Homo Sapiens
RLGPVPSGL

SEQ ID NO: 8473 - protein, 9 aa, Homo Sapiens
RLHEKVNII

SEQ ID NO: 8474 - protein, 9 aa, Homo Sapiens
RLIESLFTI

SEQ ID NO: 8475 - protein, 9 aa, Homo Sapiens
RLINQVLEL

SEQ ID NO: 8476 - protein, 9 aa, Homo Sapiens
RLIPTLVSI

SEQ ID NO: 8477 - protein, 9 aa, Homo Sapiens
RLISETTSV

SEQ ID NO: 8478 - protein, 9 aa, Homo Sapiens
RLKAELARL

SEQ ID NO: 8479 - protein, 9 aa, Homo Sapiens
RLKDIIFDV

SEQ ID NO: 8480 - protein, 9 aa, Homo Sapiens
RLKDYIQQL

SEQ ID NO: 8481 - protein, 9 aa, Homo Sapiens
RLKELLTML

SEQ ID NO: 8482 - protein, 9 aa, Homo Sapiens
RLKENQISV

SEQ ID NO: 8483 - protein, 9 aa, Homo Sapiens
RLKNEITRL

SEQ ID NO: 8484 - protein, 9 aa, Homo Sapiens
RLKPALETL

SEQ ID NO: 8485 - protein, 9 aa, Homo Sapiens
RLLDYVATV

SEQ ID NO: 8486 - protein, 9 aa, Homo Sapiens
RLMNDMTAV

SEQ ID NO: 8487 - protein, 9 aa, Homo Sapiens
RLMNETTAV

SEQ ID NO: 8488 - protein, 9 aa, Homo Sapiens
RLNEAAVTV

SEQ ID NO: 8489 - protein, 9 aa, Homo Sapiens
RLNKVIKSV

SEQ ID NO: 8490 - protein, 9 aa, Homo Sapiens
RLNLVEAFV

SEQ ID NO: 8491 - protein, 9 aa, Homo Sapiens
RLPEAIEEV

SEQ ID NO: 8492 - protein, 9 aa, Homo Sapiens
RLPEIYIQL

SEQ ID NO: 8493 - protein, 9 aa, Homo Sapiens
RLQDAIAKV

SEQ ID NO: 8494 - protein, 9 aa, Homo Sapiens
RLQEEINEV

SEQ ID NO: 8495 - protein, 9 aa, Homo Sapiens
RLQESVMEA

SEQ ID NO: 8496 - protein, 9 aa, Homo Sapiens
RLQEVTHSV

SEQ ID NO: 8497 - protein, 9 aa, Homo Sapiens
RLQGELQAV

SEQ ID NO: 8498 - protein, 9 aa, Homo Sapiens
RLSDVQIYV

SEQ ID NO: 8499 - protein, 9 aa, Homo Sapiens
RLSPIENFL

SEQ ID NO: 8500 - protein, 9 aa, Homo Sapiens
RLSSVNAEV

SEQ ID NO: 8501 - protein, 9 aa, Homo Sapiens
RLTDFLDCV

SEQ ID NO: 8502 - protein, 9 aa, Homo Sapiens
RLTDYISKV

SEQ ID NO: 8503 - protein, 9 aa, Homo Sapiens
RLTDYVAFL

SEQ ID NO: 8504 - protein, 9 aa, Homo Sapiens
RLTPKLMEV

SEQ ID NO: 8505 - protein, 9 aa, Homo Sapiens
RLVPSVNGV

SEQ ID NO: 8506 - protein, 9 aa, Homo Sapiens
RLYGLGTGV

SEQ ID NO: 8507 - protein, 9 aa, Homo Sapiens
RMITAMNTI

SEQ ID NO: 8508 - protein, 9 aa, Homo Sapiens
RMKANIKLV

SEQ ID NO: 8509 - protein, 9 aa, Homo Sapiens
RMKLSLTKV

SEQ ID NO: 8510 - protein, 9 aa, Homo Sapiens
RMVAEIQNV

SEQ ID NO: 8511 - protein, 9 aa, Homo Sapiens
RMVHILTSV

SEQ ID NO: 8512 - protein, 9 aa, Homo Sapiens
RMYSYPARV

SEQ ID NO: 8513 - protein, 9 aa, Homo Sapiens
RQIDQFLVV

SEQ ID NO: 8514 - protein, 9 aa, Homo Sapiens
RVIGTLEEV

SEQ ID NO: 8515 - protein, 9 aa, Homo Sapiens
SIAAVLPKV

SEQ ID NO: 8516 - protein, 9 aa, Homo Sapiens
SIAECLTYL

SEQ ID NO: 8517 - protein, 9 aa, Homo Sapiens
SIAEMGAYV

SEQ ID NO: 8518 - protein, 9 aa, Homo Sapiens
SIAGIFKEV

SEQ ID NO: 8519 - protein, 9 aa, Homo Sapiens
SIAPRMMSV

SEQ ID NO: 8520 - protein, 9 aa, Homo Sapiens
SIAQIISSV

SEQ ID NO: 8521 - protein, 9 aa, Homo Sapiens
SIFASPESV

SEQ ID NO: 8522 - protein, 9 aa, Homo Sapiens
SIFTAPKEI

SEQ ID NO: 8523 - protein, 9 aa, Homo Sapiens
SIHETIPLV

SEQ ID NO: 8524 - protein, 9 aa, Homo Sapiens
SIIDKLVNI

SEQ ID NO: 8525 - protein, 9 aa, Homo Sapiens
SIIDWLNSV

SEQ ID NO: 8526 - protein, 9 aa, Homo Sapiens
SIIGRLLEV

SEQ ID NO: 8527 - protein, 9 aa, Homo Sapiens
SIKAYVSTL

SEQ ID NO: 8528 - protein, 9 aa, Homo Sapiens
SIKDGVMVL

SEQ ID NO: 8529 - protein, 9 aa, Homo Sapiens
SIMDRILQI

SEQ ID NO: 8530 - protein, 9 aa, Homo Sapiens
SIMKNLRRV

SEQ ID NO: 8531 - protein, 9 aa, Homo Sapiens
SINSRLQLV

SEQ ID NO: 8532 - protein, 9 aa, Homo Sapiens
SIRDSVVEI

SEQ ID NO: 8533 - protein, 9 aa, Homo Sapiens
SIRNFLIYV

SEQ ID NO: 8534 - protein, 9 aa, Homo Sapiens
SIYDAIKEV

SEQ ID NO: 8535 - protein, 9 aa, Homo Sapiens
SIYPSPTGV

SEQ ID NO: 8536 - protein, 9 aa, Homo Sapiens
SIYQFLIAV

SEQ ID NO: 8537 - protein, 9 aa, Homo Sapiens
SLAARAIAV

SEQ ID NO: 8538 - protein, 9 aa, Homo Sapiens
SLADCIPLL

SEQ ID NO: 8539 - protein, 9 aa, Homo Sapiens
SLADFMQEV

SEQ ID NO: 8540 - protein, 9 aa, Homo Sapiens
SLADIAQKL

SEQ ID NO: 8541 - protein, 9 aa, Homo Sapiens
SLADVHIEV

SEQ ID NO: 8542 - protein, 9 aa, Homo Sapiens
SLADYITAA

SEQ ID NO: 8543 - protein, 9 aa, Homo Sapiens
SLAEFVQSL

SEQ ID NO: 8544 - protein, 9 aa, Homo Sapiens
SLAEGRLYL

SEQ ID NO: 8545 - protein, 9 aa, Homo Sapiens
SLAEKIQAL

SEQ ID NO: 8546 - protein, 9 aa, Homo Sapiens
SLAELVHAV

SEQ ID NO: 8547 - protein, 9 aa, Homo Sapiens
SLAEPRVSV

SEQ ID NO: 8548 - protein, 9 aa, Homo Sapiens
SLAERSSLL

SEQ ID NO: 8549 - protein, 9 aa, Homo Sapiens
SLAERVDRL

SEQ ID NO: 8550 - protein, 9 aa, Homo Sapiens
SLAEVLQQL

SEQ ID NO: 8551 - protein, 9 aa, Homo Sapiens
SLAEVNTQL

SEQ ID NO: 8552 - protein, 9 aa, Homo Sapiens
SLAGIFTRL

SEQ ID NO: 8553 - protein, 9 aa, Homo Sapiens
SLAGSLRSV

SEQ ID NO: 8554 - protein, 9 aa, Homo Sapiens
SLAKIYTEA

SEQ ID NO: 8555 - protein, 9 aa, Homo Sapiens
SLALLLNYL

SEQ ID NO: 8556 - protein, 9 aa, Homo Sapiens
SLANIIRQL

SEQ ID NO: 8557 - protein, 9 aa, Homo Sapiens
SLAPIIVHV

SEQ ID NO: 8558 - protein, 9 aa, Homo Sapiens
SLAPVLCGI

SEQ ID NO: 8559 - protein, 9 aa, Homo Sapiens
SLAQLLGKI

SEQ ID NO: 8560 - protein, 9 aa, Homo Sapiens
SLAQMVSGL

SEQ ID NO: 8561 - protein, 9 aa, Homo Sapiens
SLAQSIAKI

SEQ ID NO: 8562 - protein, 9 aa, Homo Sapiens
SLAQYLINA

SEQ ID NO: 8563 - protein, 9 aa, Homo Sapiens
SLAQYLINV

SEQ ID NO: 8564 - protein, 9 aa, Homo Sapiens
SLAQYNPKL

SEQ ID NO: 8565 - protein, 9 aa, Homo Sapiens
SLARHLMTL

SEQ ID NO: 8566 - protein, 9 aa, Homo Sapiens
SLARIFTSI

SEQ ID NO: 8567 - protein, 9 aa, Homo Sapiens
SLARILSLL

SEQ ID NO: 8568 - protein, 9 aa, Homo Sapiens
SLASFIPAV

SEQ ID NO: 8569 - protein, 9 aa, Homo Sapiens
SLASHIQSL

SEQ ID NO: 8570 - protein, 9 aa, Homo Sapiens
SLASHVKNL

SEQ ID NO: 8571 - protein, 9 aa, Homo Sapiens
SLASLLAKV

SEQ ID NO: 8572 - protein, 9 aa, Homo Sapiens
SLASLLVSV

SEQ ID NO: 8573 - protein, 9 aa, Homo Sapiens
SLATHLQEL

SEQ ID NO: 8574 - protein, 9 aa, Homo Sapiens
SLATKIQAA

SEQ ID NO: 8575 - protein, 9 aa, Homo Sapiens
SLATRISTL

SEQ ID NO: 8576 - protein, 9 aa, Homo Sapiens
SLATTLTKI

SEQ ID NO: 8577 - protein, 9 aa, Homo Sapiens
SLAVSSPRL

SEQ ID NO: 8578 - protein, 9 aa, Homo Sapiens
SLAWDVPAA

SEQ ID NO: 8579 - protein, 9 aa, Homo Sapiens
SLAWKPLSA

SEQ ID NO: 8580 - protein, 9 aa, Homo Sapiens
SLEKISIAL

SEQ ID NO: 8581 - protein, 9 aa, Homo Sapiens
SLFDAVSSL

SEQ ID NO: 8582 - protein, 9 aa, Homo Sapiens
SLFDIISKI

SEQ ID NO: 8583 - protein, 9 aa, Homo Sapiens
SLFERLVKV

SEQ ID NO: 8584 - protein, 9 aa, Homo Sapiens
SLFGNIKGA

SEQ ID NO: 8585 - protein, 9 aa, Homo Sapiens
SLFHTPKFV

SEQ ID NO: 8586 - protein, 9 aa, Homo Sapiens
SLFIVPSVV

SEQ ID NO: 8587 - protein, 9 aa, Homo Sapiens
SLFLGILSV

SEQ ID NO: 8588 - protein, 9 aa, Homo Sapiens
SLFRHPKQV

SEQ ID NO: 8589 - protein, 9 aa, Homo Sapiens
SLFRVITEV

SEQ ID NO: 8590 - protein, 9 aa, Homo Sapiens
SLFSHLLEI

SEQ ID NO: 8591 - protein, 9 aa, Homo Sapiens
SLFVKLHNV

SEQ ID NO: 8592 - protein, 9 aa, Homo Sapiens
SLGPQPLVA

SEQ ID NO: 8593 - protein, 9 aa, Homo Sapiens
SLGQKISTV

SEQ ID NO: 8594 - protein, 9 aa, Homo Sapiens
SLGRHISQV

SEQ ID NO: 8595 - protein, 9 aa, Homo Sapiens
SLHDAIMIV

SEQ ID NO: 8596 - protein, 9 aa, Homo Sapiens
SLHDALCVV

SEQ ID NO: 8597 - protein, 9 aa, Homo Sapiens
SLHDTVTTL

SEQ ID NO: 8598 - protein, 9 aa, Homo Sapiens
SLHLRIPEI

SEQ ID NO: 8599 - protein, 9 aa, Homo Sapiens
SLHTELNSV

SEQ ID NO: 8600 - protein, 9 aa, Homo Sapiens
SLHVFVLAV

SEQ ID NO: 8601 - protein, 9 aa, Homo Sapiens
SLIAGVIRV

SEQ ID NO: 8602 - protein, 9 aa, Homo Sapiens
SLIAKVATA

SEQ ID NO: 8603 - protein, 9 aa, Homo Sapiens
SLIARLERL

SEQ ID NO: 8604 - protein, 9 aa, Homo Sapiens
SLIDFLRVV

SEQ ID NO: 8605 - protein, 9 aa, Homo Sapiens
SLIDGIKRA

SEQ ID NO: 8606 - protein, 9 aa, Homo Sapiens
SLIDIVTEI

SEQ ID NO: 8607 - protein, 9 aa, Homo Sapiens
SLIDKPTNL

SEQ ID NO: 8608 - protein, 9 aa, Homo Sapiens
SLIDQFFGV

SEQ ID NO: 8609 - protein, 9 aa, Homo Sapiens
SLIEHLQGL

SEQ ID NO: 8610 - protein, 9 aa, Homo Sapiens
SLIEKIPTA

SEQ ID NO: 8611 - protein, 9 aa, Homo Sapiens
SLIEKLWQT

SEQ ID NO: 8612 - protein, 9 aa, Homo Sapiens
SLIEKVTQL

SEQ ID NO: 8613 - protein, 9 aa, Homo Sapiens
SLIEQTTAL

SEQ ID NO: 8614 - protein, 9 aa, Homo Sapiens
SLIFKLEEL

SEQ ID NO: 8615 - protein, 9 aa, Homo Sapiens
SLIGHLQTL

SEQ ID NO: 8616 - protein, 9 aa, Homo Sapiens
SLIGIVCGV

SEQ ID NO: 8617 - protein, 9 aa, Homo Sapiens
SLIGNLHLA

SEQ ID NO: 8618 - protein, 9 aa, Homo Sapiens
SLIKKIKDV

SEQ ID NO: 8619 - protein, 9 aa, Homo Sapiens
SLIKQIPRI

SEQ ID NO: 8620 - protein, 9 aa, Homo Sapiens
SLINNPAFI

SEQ ID NO: 8621 - protein, 9 aa, Homo Sapiens
SLIPIISGV

SEQ ID NO: 8622 - protein, 9 aa, Homo Sapiens
SLIRAMLQV

SEQ ID NO: 8623 - protein, 9 aa, Homo Sapiens
SLIRIVPVV

SEQ ID NO: 8624 - protein, 9 aa, Homo Sapiens
SLIRNLEQL

SEQ ID NO: 8625 - protein, 9 aa, Homo Sapiens
SLISGIIRA

SEQ ID NO: 8626 - protein, 9 aa, Homo Sapiens
SLISVIHLI

SEQ ID NO: 8627 - protein, 9 aa, Homo Sapiens
SLITLIEKV

SEQ ID NO: 8628 - protein, 9 aa, Homo Sapiens
SLITPLQAV

SEQ ID NO: 8629 - protein, 9 aa, Homo Sapiens
SLITRLLEV

SEQ ID NO: 8630 - protein, 9 aa, Homo Sapiens
SLKADLQKL

SEQ ID NO: 8631 - protein, 9 aa, Homo Sapiens
SLKAHVQEV

SEQ ID NO: 8632 - protein, 9 aa, Homo Sapiens
SLKDDLTKL

SEQ ID NO: 8633 - protein, 9 aa, Homo Sapiens
SLKDEVLKI

SEQ ID NO: 8634 - protein, 9 aa, Homo Sapiens
SLKDQLTDL

SEQ ID NO: 8635 - protein, 9 aa, Homo Sapiens
SLKEALQKA

SEQ ID NO: 8636 - protein, 9 aa, Homo Sapiens
SLKEDIQKA

SEQ ID NO: 8637 - protein, 9 aa, Homo Sapiens
SLKEIISSA

SEQ ID NO: 8638 - protein, 9 aa, Homo Sapiens
SLKEIVINV

SEQ ID NO: 8639 - protein, 9 aa, Homo Sapiens
SLKELITEA

SEQ ID NO: 8640 - protein, 9 aa, Homo Sapiens
SLKEMVSKL

SEQ ID NO: 8641 - protein, 9 aa, Homo Sapiens
SLKEQVESI

SEQ ID NO: 8642 - protein, 9 aa, Homo Sapiens
SLKETIEEL

SEQ ID NO: 8643 - protein, 9 aa, Homo Sapiens
SLKEVMTHI

SEQ ID NO: 8644 - protein, 9 aa, Homo Sapiens
SLKGDIVEL

SEQ ID NO: 8645 - protein, 9 aa, Homo Sapiens
SLKGLVKNI

SEQ ID NO: 8646 - protein, 9 aa, Homo Sapiens
SLKGTLDNL

SEQ ID NO: 8647 - protein, 9 aa, Homo Sapiens
SLKHTLLSL

SEQ ID NO: 8648 - protein, 9 aa, Homo Sapiens
SLKISIGNV

SEQ ID NO: 8649 - protein, 9 aa, Homo Sapiens
SLKKAIRQI

SEQ ID NO: 8650 - protein, 9 aa, Homo Sapiens
SLKKLILEV

SEQ ID NO: 8651 - protein, 9 aa, Homo Sapiens
SLKKQLTRV

SEQ ID NO: 8652 - protein, 9 aa, Homo Sapiens
SLKKTISQI

SEQ ID NO: 8653 - protein, 9 aa, Homo Sapiens
SLKLFAKEV

SEQ ID NO: 8654 - protein, 9 aa, Homo Sapiens
SLKMKVVEV

SEQ ID NO: 8655 - protein, 9 aa, Homo Sapiens
SLKNRIESV

SEQ ID NO: 8656 - protein, 9 aa, Homo Sapiens
SLKPEVAQV

SEQ ID NO: 8657 - protein, 9 aa, Homo Sapiens
SLKPKLIEA

SEQ ID NO: 8658 - protein, 9 aa, Homo Sapiens
SLKPLLFEI

SEQ ID NO: 8659 - protein, 9 aa, Homo Sapiens
SLKQELEQL

SEQ ID NO: 8660 - protein, 9 aa, Homo Sapiens
SLKQKILKV

SEQ ID NO: 8661 - protein, 9 aa, Homo Sapiens
SLKQTVVTL

SEQ ID NO: 8662 - protein, 9 aa, Homo Sapiens
SLKQVLTAL

SEQ ID NO: 8663 - protein, 9 aa, Homo Sapiens
SLKRQLQQL

SEQ ID NO: 8664 - protein, 9 aa, Homo Sapiens
SLKSKVLSV

SEQ ID NO: 8665 - protein, 9 aa, Homo Sapiens
SLKSLILTA

SEQ ID NO: 8666 - protein, 9 aa, Homo Sapiens
SLKSNVLNV

SEQ ID NO: 8667 - protein, 9 aa, Homo Sapiens
SLKSNVTSL

SEQ ID NO: 8668 - protein, 9 aa, Homo Sapiens
SLKSSLHTL

SEQ ID NO: 8669 - protein, 9 aa, Homo Sapiens
SLKTAIYRI

SEQ ID NO: 8670 - protein, 9 aa, Homo Sapiens
SLKTFVHTV

SEQ ID NO: 8671 - protein, 9 aa, Homo Sapiens
SLKTLLECV

SEQ ID NO: 8672 - protein, 9 aa, Homo Sapiens
SLKTLLVQL

SEQ ID NO: 8673 - protein, 9 aa, Homo Sapiens
SLKVDVEAL

SEQ ID NO: 8674 - protein, 9 aa, Homo Sapiens
SLKYPYVAV

SEQ ID NO: 8675 - protein, 9 aa, Homo Sapiens
SLKYQTRCI

SEQ ID NO: 8676 - protein, 9 aa, Homo Sapiens
SLLEHLSHV

SEQ ID NO: 8677 - protein, 9 aa, Homo Sapiens
SLLEKLSAL

SEQ ID NO: 8678 - protein, 9 aa, Homo Sapiens
SLLGHLMIV

SEQ ID NO: 8679 - protein, 9 aa, Homo Sapiens
SLLNQPKAV

SEQ ID NO: 8680 - protein, 9 aa, Homo Sapiens
SLMEKISKL

SEQ ID NO: 8681 - protein, 9 aa, Homo Sapiens
SLMGTLSKL

SEQ ID NO: 8682 - protein, 9 aa, Homo Sapiens
SLNEHLQAL

SEQ ID NO: 8683 - protein, 9 aa, Homo Sapiens
SLNKQIAQL

SEQ ID NO: 8684 - protein, 9 aa, Homo Sapiens
SLNKQIETV

SEQ ID NO: 8685 - protein, 9 aa, Homo Sapiens
SLNTGIITV

SEQ ID NO: 8686 - protein, 9 aa, Homo Sapiens
SLNTLTLNV

SEQ ID NO: 8687 - protein, 9 aa, Homo Sapiens
SLPCLLLLV

SEQ ID NO: 8688 - protein, 9 aa, Homo Sapiens
SLPDHLPSV

SEQ ID NO: 8689 - protein, 9 aa, Homo Sapiens
SLPPHILEV

SEQ ID NO: 8690 - protein, 9 aa, Homo Sapiens
SLPTKISRC

SEQ ID NO: 8691 - protein, 9 aa, Homo Sapiens
SLQDEIQRV

SEQ ID NO: 8692 - protein, 9 aa, Homo Sapiens
SLQEKPMEI

SEQ ID NO: 8693 - protein, 9 aa, Homo Sapiens
SLQQRLEYI

SEQ ID NO: 8694 - protein, 9 aa, Homo Sapiens
SLQSTILGV

SEQ ID NO: 8695 - protein, 9 aa, Homo Sapiens
SLQVLLTTV

SEQ ID NO: 8696 - protein, 9 aa, Homo Sapiens
SLRDFTVTV

SEQ ID NO: 8697 - protein, 9 aa, Homo Sapiens
SLRDKVLQL

SEQ ID NO: 8698 - protein, 9 aa, Homo Sapiens
SLRDLIQGL

SEQ ID NO: 8699 - protein, 9 aa, Homo Sapiens
SLRDSVPSL

SEQ ID NO: 8700 - protein, 9 aa, Homo Sapiens
SLREALSFV

SEQ ID NO: 8701 - protein, 9 aa, Homo Sapiens
SLREKIQFI

SEQ ID NO: 8702 - protein, 9 aa, Homo Sapiens
SLREQLEGV

SEQ ID NO: 8703 - protein, 9 aa, Homo Sapiens
SLRGVVQEL

SEQ ID NO: 8704 - protein, 9 aa, Homo Sapiens
SLRNLVVSL

SEQ ID NO: 8705 - protein, 9 aa, Homo Sapiens
SLRPDLLTV

SEQ ID NO: 8706 - protein, 9 aa, Homo Sapiens
SLRPILNTL

SEQ ID NO: 8707 - protein, 9 aa, Homo Sapiens
SLRPTVAEL

SEQ ID NO: 8708 - protein, 9 aa, Homo Sapiens
SLRQSLMKL

SEQ ID NO: 8709 - protein, 9 aa, Homo Sapiens
SLRSIVKSL

SEQ ID NO: 8710 - protein, 9 aa, Homo Sapiens
SLRSSLEVL

SEQ ID NO: 8711 - protein, 9 aa, Homo Sapiens
SLRTSIIEA

SEQ ID NO: 8712 - protein, 9 aa, Homo Sapiens
SLSAIFNNV

SEQ ID NO: 8713 - protein, 9 aa, Homo Sapiens
SLSDHLLRA

SEQ ID NO: 8714 - protein, 9 aa, Homo Sapiens
SLSDHSLGI

SEQ ID NO: 8715 - protein, 9 aa, Homo Sapiens
SLSEILSNI

SEQ ID NO: 8716 - protein, 9 aa, Homo Sapiens
SLSEKTVLL

SEQ ID NO: 8717 - protein, 9 aa, Homo Sapiens
SLSERIMQL

SEQ ID NO: 8718 - protein, 9 aa, Homo Sapiens
SLSEYVSRM

SEQ ID NO: 8719 - protein, 9 aa, Homo Sapiens
SLSGELREV

SEQ ID NO: 8720 - protein, 9 aa, Homo Sapiens
SLSGYINYL

SEQ ID NO: 8721 - protein, 9 aa, Homo Sapiens
SLSHSLLAV

SEQ ID NO: 8722 - protein, 9 aa, Homo Sapiens
SLSKITTTV

SEQ ID NO: 8723 - protein, 9 aa, Homo Sapiens
SLSLHNNLL

SEQ ID NO: 8724 - protein, 9 aa, Homo Sapiens
SLSQHINWV

SEQ ID NO: 8725 - protein, 9 aa, Homo Sapiens
SLSQHNDFL

SEQ ID NO: 8726 - protein, 9 aa, Homo Sapiens
SLSSFLHGV

SEQ ID NO: 8727 - protein, 9 aa, Homo Sapiens
SLSSHMSLL

SEQ ID NO: 8728 - protein, 9 aa, Homo Sapiens
SLSSHVTEL

SEQ ID NO: 8729 - protein, 9 aa, Homo Sapiens
SLSSLELFL

SEQ ID NO: 8730 - protein, 9 aa, Homo Sapiens
SLSSVLSHV

SEQ ID NO: 8731 - protein, 9 aa, Homo Sapiens
SLTAHLRSL

SEQ ID NO: 8732 - protein, 9 aa, Homo Sapiens
SLTGHISTV

SEQ ID NO: 8733 - protein, 9 aa, Homo Sapiens
SLVAILQSV

SEQ ID NO: 8734 - protein, 9 aa, Homo Sapiens
SLVDIYSQL

SEQ ID NO: 8735 - protein, 9 aa, Homo Sapiens
SLVDKTKQV

SEQ ID NO: 8736 - protein, 9 aa, Homo Sapiens
SLVEIILHV

SEQ ID NO: 8737 - protein, 9 aa, Homo Sapiens
SLVELLNQI

SEQ ID NO: 8738 - protein, 9 aa, Homo Sapiens
SLVEQLTMV

SEQ ID NO: 8739 - protein, 9 aa, Homo Sapiens
SLVQRVETI

SEQ ID NO: 8740 - protein, 9 aa, Homo Sapiens
SLVSSLYKV

SEQ ID NO: 8741 - protein, 9 aa, Homo Sapiens
SLVTKINNV

SEQ ID NO: 8742 - protein, 9 aa, Homo Sapiens
SLYEMVSRV

SEQ ID NO: 8743 - protein, 9 aa, Homo Sapiens
SLYGGTITI

SEQ ID NO: 8744 - protein, 9 aa, Homo Sapiens
SLYGYLRGA

SEQ ID NO: 8745 - protein, 9 aa, Homo Sapiens
SLYIRPTFI

SEQ ID NO: 8746 - protein, 9 aa, Homo Sapiens
SLYKGLLSV

SEQ ID NO: 8747 - protein, 9 aa, Homo Sapiens
SLYPKPEAL

SEQ ID NO: 8748 - protein, 9 aa, Homo Sapiens
SLYPSIMMA

SEQ ID NO: 8749 - protein, 9 aa, Homo Sapiens
SLYRDLLRA

SEQ ID NO: 8750 - protein, 9 aa, Homo Sapiens
SMAAIITLL

SEQ ID NO: 8751 - protein, 9 aa, Homo Sapiens
SMAEILRSL

SEQ ID NO: 8752 - protein, 9 aa, Homo Sapiens
SMAKAITGV

SEQ ID NO: 8753 - protein, 9 aa, Homo Sapiens
SMAPSLKEL

SEQ ID NO: 8754 - protein, 9 aa, Homo Sapiens
SMAPYVLNV

SEQ ID NO: 8755 - protein, 9 aa, Homo Sapiens
SMAVVIPEA

SEQ ID NO: 8756 - protein, 9 aa, Homo Sapiens
SMFGAGLTV

SEQ ID NO: 8757 - protein, 9 aa, Homo Sapiens
SMIPALREL

SEQ ID NO: 8758 - protein, 9 aa, Homo Sapiens
SMISKLKQA

SEQ ID NO: 8759 - protein, 9 aa, Homo Sapiens
SMKAFISKV

SEQ ID NO: 8760 - protein, 9 aa, Homo Sapiens
SMKDDLERV

SEQ ID NO: 8761 - protein, 9 aa, Homo Sapiens
SMKENISKL

SEQ ID NO: 8762 - protein, 9 aa, Homo Sapiens
SMKSELSYL

SEQ ID NO: 8763 - protein, 9 aa, Homo Sapiens
SMMQTLLTV

SEQ ID NO: 8764 - protein, 9 aa, Homo Sapiens
SMNTHLKAV

SEQ ID NO: 8765 - protein, 9 aa, Homo Sapiens
SMSADVPLV

SEQ ID NO: 8766 - protein, 9 aa, Homo Sapiens
SMSETVRLV

SEQ ID NO: 8767 - protein, 9 aa, Homo Sapiens
SMYDGLLQA

SEQ ID NO: 8768 - protein, 9 aa, Homo Sapiens
SQISRLQNI

SEQ ID NO: 8769 - protein, 9 aa, Homo Sapiens
SQRTITVGV

SEQ ID NO: 8770 - protein, 9 aa, Homo Sapiens
SQSFQPMTV

SEQ ID NO: 8771 - protein, 9 aa, Homo Sapiens
SSYSRFSSS

SEQ ID NO: 8772 - protein, 9 aa, Homo Sapiens
STAAKIMGV

SEQ ID NO: 8773 - protein, 9 aa, Homo Sapiens
STIAILNSV

SEQ ID NO: 8774 - protein, 9 aa, Homo Sapiens
SVAESLLQV

SEQ ID NO: 8775 - protein, 9 aa, Homo Sapiens
SVAESLNYV

SEQ ID NO: 8776 - protein, 9 aa, Homo Sapiens
SVANHNSFL

SEQ ID NO: 8777 - protein, 9 aa, Homo Sapiens
SVASSVKGV

SEQ ID NO: 8778 - protein, 9 aa, Homo Sapiens
SVASTITGV

SEQ ID NO: 8779 - protein, 9 aa, Homo Sapiens
SVATKLTAV

SEQ ID NO: 8780 - protein, 9 aa, Homo Sapiens
SVFAGVVGV

SEQ ID NO: 8781 - protein, 9 aa, Homo Sapiens
SVHKGFAFV

SEQ ID NO: 8782 - protein, 9 aa, Homo Sapiens
SVILKLSNV

SEQ ID NO: 8783 - protein, 9 aa, Homo Sapiens
SVIPQIQKV

SEQ ID NO: 8784 - protein, 9 aa, Homo Sapiens
SVIQNLRTV

SEQ ID NO: 8785 - protein, 9 aa, Homo Sapiens
SVISHLLRV

SEQ ID NO: 8786 - protein, 9 aa, Homo Sapiens
SVISIMKPV

SEQ ID NO: 8787 - protein, 9 aa, Homo Sapiens
SVISKVNSV

SEQ ID NO: 8788 - protein, 9 aa, Homo Sapiens
SVKEVISAV

SEQ ID NO: 8789 - protein, 9 aa, Homo Sapiens
SVKNGILTI

SEQ ID NO: 8790 - protein, 9 aa, Homo Sapiens
SVKPQILSV

SEQ ID NO: 8791 - protein, 9 aa, Homo Sapiens
SVMELLQGV

SEQ ID NO: 8792 - protein, 9 aa, Homo Sapiens
SVMEYVTAV

SEQ ID NO: 8793 - protein, 9 aa, Homo Sapiens
SVRPAVLQV

SEQ ID NO: 8794 - protein, 9 aa, Homo Sapiens
SVTSHIYQV

SEQ ID NO: 8795 - protein, 9 aa, Homo Sapiens
SVTYDLSKL

SEQ ID NO: 8796 - protein, 9 aa, Homo Sapiens
SVYGKLRKV

SEQ ID NO: 8797 - protein, 9 aa, Homo Sapiens
SVYGSLASV

SEQ ID NO: 8798 - protein, 9 aa, Homo Sapiens
SVYSRVIQV

SEQ ID NO: 8799 - protein, 9 aa, Homo Sapiens
TIDDIVLTI

SEQ ID NO: 8800 - protein, 9 aa, Homo Sapiens
TIFSAPNYC

SEQ ID NO: 8801 - protein, 9 aa, Homo Sapiens
TIIEQVGKV

SEQ ID NO: 8802 - protein, 9 aa, Homo Sapiens
TIKEILGTA

SEQ ID NO: 8803 - protein, 9 aa, Homo Sapiens
TLAAAVPKI

SEQ ID NO: 8804 - protein, 9 aa, Homo Sapiens
TLADIYREL

SEQ ID NO: 8805 - protein, 9 aa, Homo Sapiens
TLADLVHHV

SEQ ID NO: 8806 - protein, 9 aa, Homo Sapiens
TLADMATRL

SEQ ID NO: 8807 - protein, 9 aa, Homo Sapiens
TLADRLLEL

SEQ ID NO: 8808 - protein, 9 aa, Homo Sapiens
TLADVLYHV

SEQ ID NO: 8809 - protein, 9 aa, Homo Sapiens
TLAEHQQLI

SEQ ID NO: 8810 - protein, 9 aa, Homo Sapiens
TLAEKIQTI

SEQ ID NO: 8811 - protein, 9 aa, Homo Sapiens
TLAELHISL

SEQ ID NO: 8812 - protein, 9 aa, Homo Sapiens
TLAELLVLL

SEQ ID NO: 8813 - protein, 9 aa, Homo Sapiens
TLAETLVNL

SEQ ID NO: 8814 - protein, 9 aa, Homo Sapiens
TLAGDVHIV

SEQ ID NO: 8815 - protein, 9 aa, Homo Sapiens
TLAGLIPFV

SEQ ID NO: 8816 - protein, 9 aa, Homo Sapiens
TLAKPPSVV

SEQ ID NO: 8817 - protein, 9 aa, Homo Sapiens
TLAKYLMEL

SEQ ID NO: 8818 - protein, 9 aa, Homo Sapiens
TLANVVTSL

SEQ ID NO: 8819 - protein, 9 aa, Homo Sapiens
TLAPKTLSV

SEQ ID NO: 8820 - protein, 9 aa, Homo Sapiens
TLAQHLSQL

SEQ ID NO: 8821 - protein, 9 aa, Homo Sapiens
TLAQLLTLL

SEQ ID NO: 8822 - protein, 9 aa, Homo Sapiens
TLAQRVKEV

SEQ ID NO: 8823 - protein, 9 aa, Homo Sapiens
TLASIIKEV

SEQ ID NO: 8824 - protein, 9 aa, Homo Sapiens
TLASSLHTL

SEQ ID NO: 8825 - protein, 9 aa, Homo Sapiens
TLFGMITAV

SEQ ID NO: 8826 - protein, 9 aa, Homo Sapiens
TLFNVIKSV

SEQ ID NO: 8827 - protein, 9 aa, Homo Sapiens
TLFQGIKTV

SEQ ID NO: 8828 - protein, 9 aa, Homo Sapiens
TLFYSLREV

SEQ ID NO: 8829 - protein, 9 aa, Homo Sapiens
TLGNVLVTV

SEQ ID NO: 8830 - protein, 9 aa, Homo Sapiens
TLHPQVATI

SEQ ID NO: 8831 - protein, 9 aa, Homo Sapiens
TLHSLISEL

SEQ ID NO: 8832 - protein, 9 aa, Homo Sapiens
TLIALLAHA

SEQ ID NO: 8833 - protein, 9 aa, Homo Sapiens
TLIEDILGV

SEQ ID NO: 8834 - protein, 9 aa, Homo Sapiens
TLIEELKAL

SEQ ID NO: 8835 - protein, 9 aa, Homo Sapiens
TLIEELKTL

SEQ ID NO: 8836 - protein, 9 aa, Homo Sapiens
TLIEKVQEA

SEQ ID NO: 8837 - protein, 9 aa, Homo Sapiens
TLIHQVLEA

SEQ ID NO: 8838 - protein, 9 aa, Homo Sapiens
TLINLLLKV

SEQ ID NO: 8839 - protein, 9 aa, Homo Sapiens
TLIPSVSQV

SEQ ID NO: 8840 - protein, 9 aa, Homo Sapiens
TLISELVQA

SEQ ID NO: 8841 - protein, 9 aa, Homo Sapiens
TLISRLPAV

SEQ ID NO: 8842 - protein, 9 aa, Homo Sapiens
TLKDFVTVL

SEQ ID NO: 8843 - protein, 9 aa, Homo Sapiens
TLKDGIIMI

SEQ ID NO: 8844 - protein, 9 aa, Homo Sapiens
TLKDLLFGV

SEQ ID NO: 8845 - protein, 9 aa, Homo Sapiens
TLKDPIVSI

SEQ ID NO: 8846 - protein, 9 aa, Homo Sapiens
TLKDTITSV

SEQ ID NO: 8847 - protein, 9 aa, Homo Sapiens
TLKEDPGKV

SEQ ID NO: 8848 - protein, 9 aa, Homo Sapiens
TLKEEVQKL

SEQ ID NO: 8849 - protein, 9 aa, Homo Sapiens
TLKEILRYL

SEQ ID NO: 8850 - protein, 9 aa, Homo Sapiens
TLKELTSLV

SEQ ID NO: 8851 - protein, 9 aa, Homo Sapiens
TLKEWTLQV

SEQ ID NO: 8852 - protein, 9 aa, Homo Sapiens
TLKEYLESL

SEQ ID NO: 8853 - protein, 9 aa, Homo Sapiens
TLKKVSVTV

SEQ ID NO: 8854 - protein, 9 aa, Homo Sapiens
TLKMEVISL

SEQ ID NO: 8855 - protein, 9 aa, Homo Sapiens
TLKNWVKEL

SEQ ID NO: 8856 - protein, 9 aa, Homo Sapiens
TLKPAIEEI

SEQ ID NO: 8857 - protein, 9 aa, Homo Sapiens
TLKPGTMSV

SEQ ID NO: 8858 - protein, 9 aa, Homo Sapiens
TLKQGIERV

SEQ ID NO: 8859 - protein, 9 aa, Homo Sapiens
TLKRTIEAL

SEQ ID NO: 8860 - protein, 9 aa, Homo Sapiens
TLKSTVEAL

SEQ ID NO: 8861 - protein, 9 aa, Homo Sapiens
TLKVQELKV

SEQ ID NO: 8862 - protein, 9 aa, Homo Sapiens
TLNEKLTAL

SEQ ID NO: 8863 - protein, 9 aa, Homo Sapiens
TLNFPGRTV

SEQ ID NO: 8864 - protein, 9 aa, Homo Sapiens
TLNNWLATV

SEQ ID NO: 8865 - protein, 9 aa, Homo Sapiens
TLNSKLLKV

SEQ ID NO: 8866 - protein, 9 aa, Homo Sapiens
TLPDTILTV

SEQ ID NO: 8867 - protein, 9 aa, Homo Sapiens
TLQEVVTGV

SEQ ID NO: 8868 - protein, 9 aa, Homo Sapiens
TLQNAVRNV

SEQ ID NO: 8869 - protein, 9 aa, Homo Sapiens
TLREHLERL

SEQ ID NO: 8870 - protein, 9 aa, Homo Sapiens
TLRGHLAKI

SEQ ID NO: 8871 - protein, 9 aa, Homo Sapiens
TLRPALVGV

SEQ ID NO: 8872 - protein, 9 aa, Homo Sapiens
TLSDIMVSL

SEQ ID NO: 8873 - protein, 9 aa, Homo Sapiens
TLSDIVVTL

SEQ ID NO: 8874 - protein, 9 aa, Homo Sapiens
TLSDLRVYL

SEQ ID NO: 8875 - protein, 9 aa, Homo Sapiens
TLSELKTVL

SEQ ID NO: 8876 - protein, 9 aa, Homo Sapiens
TLSEVTNQL

SEQ ID NO: 8877 - protein, 9 aa, Homo Sapiens
TLSPHIQAI

SEQ ID NO: 8878 - protein, 9 aa, Homo Sapiens
TLSPLLLFL

SEQ ID NO: 8879 - protein, 9 aa, Homo Sapiens
TLSSFITKI

SEQ ID NO: 8880 - protein, 9 aa, Homo Sapiens
TLSSIPTAL

SEQ ID NO: 8881 - protein, 9 aa, Homo Sapiens
TLSSQISRL

SEQ ID NO: 8882 - protein, 9 aa, Homo Sapiens
TLSTVISKV

SEQ ID NO: 8883 - protein, 9 aa, Homo Sapiens
TLTAHLSQA

SEQ ID NO: 8884 - protein, 9 aa, Homo Sapiens
TLTERLLGI

SEQ ID NO: 8885 - protein, 9 aa, Homo Sapiens
TLVEAIKQV

SEQ ID NO: 8886 - protein, 9 aa, Homo Sapiens
TLVTWLQCV

SEQ ID NO: 8887 - protein, 9 aa, Homo Sapiens
TLVYHVVGV

SEQ ID NO: 8888 - protein, 9 aa, Homo Sapiens
TLYDMLASI

SEQ ID NO: 8889 - protein, 9 aa, Homo Sapiens
TLYEALKTI

SEQ ID NO: 8890 - protein, 9 aa, Homo Sapiens
TLYEAVREV

SEQ ID NO: 8891 - protein, 9 aa, Homo Sapiens
TLYPAVKSL

SEQ ID NO: 8892 - protein, 9 aa, Homo Sapiens
TMADQIVTV

SEQ ID NO: 8893 - protein, 9 aa, Homo Sapiens
TMAYNITPL

SEQ ID NO: 8894 - protein, 9 aa, Homo Sapiens
TMIGEIAAA

SEQ ID NO: 8895 - protein, 9 aa, Homo Sapiens
TMINAIPVA

SEQ ID NO: 8896 - protein, 9 aa, Homo Sapiens
TMIVSLAAV

SEQ ID NO: 8897 - protein, 9 aa, Homo Sapiens
TMKDHLVRV

SEQ ID NO: 8898 - protein, 9 aa, Homo Sapiens
TMKEVLFYL

SEQ ID NO: 8899 - protein, 9 aa, Homo Sapiens
TMKTNLESL

SEQ ID NO: 8900 - protein, 9 aa, Homo Sapiens
TMKTYVEKV

SEQ ID NO: 8901 - protein, 9 aa, Homo Sapiens
TMVDRIEEV

SEQ ID NO: 8902 - protein, 9 aa, Homo Sapiens
TQILSVPKV

SEQ ID NO: 8903 - protein, 9 aa, Homo Sapiens
TTFPRPVTV

SEQ ID NO: 8904 - protein, 9 aa, Homo Sapiens
TTISKVSQV

SEQ ID NO: 8905 - protein, 9 aa, Homo Sapiens
TVADHIQKV

SEQ ID NO: 8906 - protein, 9 aa, Homo Sapiens
TVFTNPTQV

SEQ ID NO: 8907 - protein, 9 aa, Homo Sapiens
TVIAKVNNV

SEQ ID NO: 8908 - protein, 9 aa, Homo Sapiens
TVKDFVAKV

SEQ ID NO: 8909 - protein, 9 aa, Homo Sapiens
TVMGRIATL

SEQ ID NO: 8910 - protein, 9 aa, Homo Sapiens
VAGLALVGV

SEQ ID NO: 8911 - protein, 9 aa, Homo Sapiens
VIAEILRGV

SEQ ID NO: 8912 - protein, 9 aa, Homo Sapiens
VIAPKITSV

SEQ ID NO: 8913 - protein, 9 aa, Homo Sapiens
VIFDLPTTV

SEQ ID NO: 8914 - protein, 9 aa, Homo Sapiens
VIIPLLHTV

SEQ ID NO: 8915 - protein, 9 aa, Homo Sapiens
VIIPLLSSV

SEQ ID NO: 8916 - protein, 9 aa, Homo Sapiens
VIKALLEVV

SEQ ID NO: 8917 - protein, 9 aa, Homo Sapiens
VIKEDVSEL

SEQ ID NO: 8918 - protein, 9 aa, Homo Sapiens
VIKESVVSI

SEQ ID NO: 8919 - protein, 9 aa, Homo Sapiens
VIKQQLESV

SEQ ID NO: 8920 - protein, 9 aa, Homo Sapiens
VINGNIKTV

SEQ ID NO: 8921 - protein, 9 aa, Homo Sapiens
VIRQITATV

SEQ ID NO: 8922 - protein, 9 aa, Homo Sapiens
VIVEKPLSV

SEQ ID NO: 8923 - protein, 9 aa, Homo Sapiens
VIVHRLLAV

SEQ ID NO: 8924 - protein, 9 aa, Homo Sapiens
VLAAKVLNL

SEQ ID NO: 8925 - protein, 9 aa, Homo Sapiens
VLADALKSI

SEQ ID NO: 8926 - protein, 9 aa, Homo Sapiens
VLADLKVQL

SEQ ID NO: 8927 - protein, 9 aa, Homo Sapiens
VLAEIPQQV

SEQ ID NO: 8928 - protein, 9 aa, Homo Sapiens
VLAERMSTI

SEQ ID NO: 8929 - protein, 9 aa, Homo Sapiens
VLAEVPTQL

SEQ ID NO: 8930 - protein, 9 aa, Homo Sapiens
VLAHTILGV

SEQ ID NO: 8931 - protein, 9 aa, Homo Sapiens
VLAPHLTRA

SEQ ID NO: 8932 - protein, 9 aa, Homo Sapiens
VLAPLIALV

SEQ ID NO: 8933 - protein, 9 aa, Homo Sapiens
VLAPRVLRA

SEQ ID NO: 8934 - protein, 9 aa, Homo Sapiens
VLASLIIRL

SEQ ID NO: 8935 - protein, 9 aa, Homo Sapiens
VLASPWLIL

SEQ ID NO: 8936 - protein, 9 aa, Homo Sapiens
VLATTVGKV

SEQ ID NO: 8937 - protein, 9 aa, Homo Sapiens
VLAVHLNTL

SEQ ID NO: 8938 - protein, 9 aa, Homo Sapiens
VLAVRVVTL

SEQ ID NO: 8939 - protein, 9 aa, Homo Sapiens
VLAWGLLNV

SEQ ID NO: 8940 - protein, 9 aa, Homo Sapiens
VLAWVKEKV

SEQ ID NO: 8941 - protein, 9 aa, Homo Sapiens
VLAYFLPEA

SEQ ID NO: 8942 - protein, 9 aa, Homo Sapiens
VLFDHVGCL

SEQ ID NO: 8943 - protein, 9 aa, Homo Sapiens
VLFDVTGQV

SEQ ID NO: 8944 - protein, 9 aa, Homo Sapiens
VLFGKPMVV

SEQ ID NO: 8945 - protein, 9 aa, Homo Sapiens
VLFGLLREV

SEQ ID NO: 8946 - protein, 9 aa, Homo Sapiens
VLFHNLPSL

SEQ ID NO: 8947 - protein, 9 aa, Homo Sapiens
VLFHQLQEI

SEQ ID NO: 8948 - protein, 9 aa, Homo Sapiens
VLFPLPTPL

SEQ ID NO: 8949 - protein, 9 aa, Homo Sapiens
VLFTGVKEV

SEQ ID NO: 8950 - protein, 9 aa, Homo Sapiens
VLFYAITTL

SEQ ID NO: 8951 - protein, 9 aa, Homo Sapiens
VLHDRIVSV

SEQ ID NO: 8952 - protein, 9 aa, Homo Sapiens
VLHEGTNFV

SEQ ID NO: 8953 - protein, 9 aa, Homo Sapiens
VLHEHIQRL

SEQ ID NO: 8954 - protein, 9 aa, Homo Sapiens
VLHSPGMSV

SEQ ID NO: 8955 - protein, 9 aa, Homo Sapiens
VLHSSPLNV

SEQ ID NO: 8956 - protein, 9 aa, Homo Sapiens
VLIAKVARL

SEQ ID NO: 8957 - protein, 9 aa, Homo Sapiens
VLIANLEKL

SEQ ID NO: 8958 - protein, 9 aa, Homo Sapiens
VLIDYQRNV

SEQ ID NO: 8959 - protein, 9 aa, Homo Sapiens
VLIEILQKA

SEQ ID NO: 8960 - protein, 9 aa, Homo Sapiens
VLIETLVTL

SEQ ID NO: 8961 - protein, 9 aa, Homo Sapiens
VLIPALKTI

SEQ ID NO: 8962 - protein, 9 aa, Homo Sapiens
VLIPKLPQL

SEQ ID NO: 8963 - protein, 9 aa, Homo Sapiens
VLITTLITA

SEQ ID NO: 8964 - protein, 9 aa, Homo Sapiens
VLKDCIVHL

SEQ ID NO: 8965 - protein, 9 aa, Homo Sapiens
VLKDDILEI

SEQ ID NO: 8966 - protein, 9 aa, Homo Sapiens
VLKDFLSGI

SEQ ID NO: 8967 - protein, 9 aa, Homo Sapiens
VLKDLVKVI

SEQ ID NO: 8968 - protein, 9 aa, Homo Sapiens
VLKDYIAYA

SEQ ID NO: 8969 - protein, 9 aa, Homo Sapiens
VLKEIVERV

SEQ ID NO: 8970 - protein, 9 aa, Homo Sapiens
VLKEQIREL

SEQ ID NO: 8971 - protein, 9 aa, Homo Sapiens
VLKEYLDNV

SEQ ID NO: 8972 - protein, 9 aa, Homo Sapiens
VLKGDVEKL

SEQ ID NO: 8973 - protein, 9 aa, Homo Sapiens
VLKPDLIDV

SEQ ID NO: 8974 - protein, 9 aa, Homo Sapiens
VLKPELQTA

SEQ ID NO: 8975 - protein, 9 aa, Homo Sapiens
VLKPVVELL

SEQ ID NO: 8976 - protein, 9 aa, Homo Sapiens
VLKVFLENV

SEQ ID NO: 8977 - protein, 9 aa, Homo Sapiens
VLMDRLPSL

SEQ ID NO: 8978 - protein, 9 aa, Homo Sapiens
VLMEIIAKV

SEQ ID NO: 8979 - protein, 9 aa, Homo Sapiens
VLMEKPDVV

SEQ ID NO: 8980 - protein, 9 aa, Homo Sapiens
VLMENIVYL

SEQ ID NO: 8981 - protein, 9 aa, Homo Sapiens
VLMEYIRSL

SEQ ID NO: 8982 - protein, 9 aa, Homo Sapiens
VLMPNVGEI

SEQ ID NO: 8983 - protein, 9 aa, Homo Sapiens
VLNEYFHNV

SEQ ID NO: 8984 - protein, 9 aa, Homo Sapiens
VLNGKLLLV

SEQ ID NO: 8985 - protein, 9 aa, Homo Sapiens
VLNPLITAV

SEQ ID NO: 8986 - protein, 9 aa, Homo Sapiens
VLQEKIEVV

SEQ ID NO: 8987 - protein, 9 aa, Homo Sapiens
VLQGKLAEV

SEQ ID NO: 8988 - protein, 9 aa, Homo Sapiens
VLRDNIQGI

SEQ ID NO: 8989 - protein, 9 aa, Homo Sapiens
VLREILTTL

SEQ ID NO: 8990 - protein, 9 aa, Homo Sapiens
VLREWLVAV

SEQ ID NO: 8991 - protein, 9 aa, Homo Sapiens
VLRGALEMV

SEQ ID NO: 8992 - protein, 9 aa, Homo Sapiens
VLRGEVAYI

SEQ ID NO: 8993 - protein, 9 aa, Homo Sapiens
VLRGKLQLV

SEQ ID NO: 8994 - protein, 9 aa, Homo Sapiens
VLRPAVLQA

SEQ ID NO: 8995 - protein, 9 aa, Homo Sapiens
VLRPQVTAV

SEQ ID NO: 8996 - protein, 9 aa, Homo Sapiens
VLRVVIPEV

SEQ ID NO: 8997 - protein, 9 aa, Homo Sapiens
VLSDIIQNL

SEQ ID NO: 8998 - protein, 9 aa, Homo Sapiens
VLSDRIAFL

SEQ ID NO: 8999 - protein, 9 aa, Homo Sapiens
VLSEKVSQL

SEQ ID NO: 9000 - protein, 9 aa, Homo Sapiens
VLSELAARL

SEQ ID NO: 9001 - protein, 9 aa, Homo Sapiens
VLSELLWQV

SEQ ID NO: 9002 - protein, 9 aa, Homo Sapiens
VLSGNIKTV

SEQ ID NO: 9003 - protein, 9 aa, Homo Sapiens
VLSQHFQTV

SEQ ID NO: 9004 - protein, 9 aa, Homo Sapiens
VLSSNLRHV

SEQ ID NO: 9005 - protein, 9 aa, Homo Sapiens
VLSTGVPTV

SEQ ID NO: 9006 - protein, 9 aa, Homo Sapiens
VLSTRVTNV

SEQ ID NO: 9007 - protein, 9 aa, Homo Sapiens
VLSWQFSSV

SEQ ID NO: 9008 - protein, 9 aa, Homo Sapiens
VLTEFTREV

SEQ ID NO: 9009 - protein, 9 aa, Homo Sapiens
VLTEHVAAA

SEQ ID NO: 9010 - protein, 9 aa, Homo Sapiens
VLTNKLLTV

SEQ ID NO: 9011 - protein, 9 aa, Homo Sapiens
VLVDRTIYI

SEQ ID NO: 9012 - protein, 9 aa, Homo Sapiens
VLVEHVKNV

SEQ ID NO: 9013 - protein, 9 aa, Homo Sapiens
VLYDPLKRV

SEQ ID NO: 9014 - protein, 9 aa, Homo Sapiens
VLYDQPRHV

SEQ ID NO: 9015 - protein, 9 aa, Homo Sapiens
VLYDRIQAA

SEQ ID NO: 9016 - protein, 9 aa, Homo Sapiens
VLYDRPLKI

SEQ ID NO: 9017 - protein, 9 aa, Homo Sapiens
VLYELLQHI

SEQ ID NO: 9018 - protein, 9 aa, Homo Sapiens
VLYPHPPLA

SEQ ID NO: 9019 - protein, 9 aa, Homo Sapiens
VLYPSLKEI

SEQ ID NO: 9020 - protein, 9 aa, Homo Sapiens
VLYSALISL

SEQ ID NO: 9021 - protein, 9 aa, Homo Sapiens
VLYTGVVRV

SEQ ID NO: 9022 - protein, 9 aa, Homo Sapiens
VMAPRTLVL

SEQ ID NO: 9023 - protein, 9 aa, Homo Sapiens
VMIPVPAGV

SEQ ID NO: 9024 - protein, 9 aa, Homo Sapiens
VMKKIIETV

SEQ ID NO: 9025 - protein, 9 aa, Homo Sapiens
VMKLDLITV

SEQ ID NO: 9026 - protein, 9 aa, Homo Sapiens
VMRAYLQQL

SEQ ID NO: 9027 - protein, 9 aa, Homo Sapiens
VMSERVSGL

SEQ ID NO: 9028 - protein, 9 aa, Homo Sapiens
VMYDLITEL

SEQ ID NO: 9029 - protein, 9 aa, Homo Sapiens
VQIEEVRQV

SEQ ID NO: 9030 - protein, 9 aa, Homo Sapiens
VQIEHISSL

SEQ ID NO: 9031 - protein, 9 aa, Homo Sapiens
VQIGDIVTV

SEQ ID NO: 9032 - protein, 9 aa, Homo Sapiens
VQSNRILGV

SEQ ID NO: 9033 - protein, 9 aa, Homo Sapiens
VQVQQVRSV

SEQ ID NO: 9034 - protein, 9 aa, Homo Sapiens
VQYNEPLKV

SEQ ID NO: 9035 - protein, 9 aa, Homo Sapiens
VSKVKTLTV

SEQ ID NO: 9036 - protein, 9 aa, Homo Sapiens
VVFQKPSGV

SEQ ID NO: 9037 - protein, 9 aa, Homo Sapiens
VVKGTVLTI

SEQ ID NO: 9038 - protein, 9 aa, Homo Sapiens
WIKDKLLHI

SEQ ID NO: 9039 - protein, 9 aa, Homo Sapiens
WLSTSIPEA

SEQ ID NO: 9040 - protein, 9 aa, Homo Sapiens
WMNINLREV

SEQ ID NO: 9041 - protein, 9 aa, Homo Sapiens
WMVPFVNVV

SEQ ID NO: 9042 - protein, 9 aa, Homo Sapiens
YAFAHILTV

SEQ ID NO: 9043 - protein, 9 aa, Homo Sapiens
YAFNMKATV

SEQ ID NO: 9044 - protein, 9 aa, Homo Sapiens
YAIHGVLEV

SEQ ID NO: 9045 - protein, 9 aa, Homo Sapiens
YAIKNIHGV

SEQ ID NO: 9046 - protein, 9 aa, Homo Sapiens
YIAGHPAFV

SEQ ID NO: 9047 - protein, 9 aa, Homo Sapiens
YIALKLVAV

SEQ ID NO: 9048 - protein, 9 aa, Homo Sapiens
YIAPLKALV

SEQ ID NO: 9049 - protein, 9 aa, Homo Sapiens
YIFAHVGQL

SEQ ID NO: 9050 - protein, 9 aa, Homo Sapiens
YIFTTPKSV

SEQ ID NO: 9051 - protein, 9 aa, Homo Sapiens
YIGEVLVSV

SEQ ID NO: 9052 - protein, 9 aa, Homo Sapiens
YIIDVSQSV

SEQ ID NO: 9053 - protein, 9 aa, Homo Sapiens
YIKAAVKNV

SEQ ID NO: 9054 - protein, 9 aa, Homo Sapiens
YIKDYMKSI

SEQ ID NO: 9055 - protein, 9 aa, Homo Sapiens
YIKTELISV

SEQ ID NO: 9056 - protein, 9 aa, Homo Sapiens
YIMSYISRV

SEQ ID NO: 9057 - protein, 9 aa, Homo Sapiens
YIPDFLTLL

SEQ ID NO: 9058 - protein, 9 aa, Homo Sapiens
YIPTFICSV

SEQ ID NO: 9059 - protein, 9 aa, Homo Sapiens
YITGHVLVV

SEQ ID NO: 9060 - protein, 9 aa, Homo Sapiens
YLADIFTKL

SEQ ID NO: 9061 - protein, 9 aa, Homo Sapiens
YLADLYHFV

SEQ ID NO: 9062 - protein, 9 aa, Homo Sapiens
YLADVTNAL

SEQ ID NO: 9063 - protein, 9 aa, Homo Sapiens
YLAFLGNLV

SEQ ID NO: 9064 - protein, 9 aa, Homo Sapiens
YLAKVKSLL

SEQ ID NO: 9065 - protein, 9 aa, Homo Sapiens
YLAPENGYL

SEQ ID NO: 9066 - protein, 9 aa, Homo Sapiens
YLAPFLRNV

SEQ ID NO: 9067 - protein, 9 aa, Homo Sapiens
YLAPHVRTL

SEQ ID NO: 9068 - protein, 9 aa, Homo Sapiens
YLFEEIAKI

SEQ ID NO: 9069 - protein, 9 aa, Homo Sapiens
YLFERIKEL

SEQ ID NO: 9070 - protein, 9 aa, Homo Sapiens
YLFKCPQSV

SEQ ID NO: 9071 - protein, 9 aa, Homo Sapiens
YLFKGLEDL

SEQ ID NO: 9072 - protein, 9 aa, Homo Sapiens
YLFNSVVNV

SEQ ID NO: 9073 - protein, 9 aa, Homo Sapiens
YLGAKPRSL

SEQ ID NO: 9074 - protein, 9 aa, Homo Sapiens
YLGEGPRMV

SEQ ID NO: 9075 - protein, 9 aa, Homo Sapiens
YLGIVELLV

SEQ ID NO: 9076 - protein, 9 aa, Homo Sapiens
YLHDFLKYL

SEQ ID NO: 9077 - protein, 9 aa, Homo Sapiens
YLHHILRQL

SEQ ID NO: 9078 - protein, 9 aa, Homo Sapiens
YLHNQGIGV

SEQ ID NO: 9079 - protein, 9 aa, Homo Sapiens
YLHSQVVSV

SEQ ID NO: 9080 - protein, 9 aa, Homo Sapiens
YLHSYLTYI

SEQ ID NO: 9081 - protein, 9 aa, Homo Sapiens
YLIARVMLL

SEQ ID NO: 9082 - protein, 9 aa, Homo Sapiens
YLIELIDRV

SEQ ID NO: 9083 - protein, 9 aa, Homo Sapiens
YLIKDIRFL

SEQ ID NO: 9084 - protein, 9 aa, Homo Sapiens
YLIKYIAIV

SEQ ID NO: 9085 - protein, 9 aa, Homo Sapiens
YLINEIDRI

SEQ ID NO: 9086 - protein, 9 aa, Homo Sapiens
YLIPNIKHL

SEQ ID NO: 9087 - protein, 9 aa, Homo Sapiens
YLIQLVQVL

SEQ ID NO: 9088 - protein, 9 aa, Homo Sapiens
YLISELEAA

SEQ ID NO: 9089 - protein, 9 aa, Homo Sapiens
YLITHPLAV

SEQ ID NO: 9090 - protein, 9 aa, Homo Sapiens
YLITSVELL

SEQ ID NO: 9091 - protein, 9 aa, Homo Sapiens
YLKDFFSNV

SEQ ID NO: 9092 - protein, 9 aa, Homo Sapiens
YLKDLIEEV

SEQ ID NO: 9093 - protein, 9 aa, Homo Sapiens
YLKEAVTTL

SEQ ID NO: 9094 - protein, 9 aa, Homo Sapiens
YLKEFIHIL

SEQ ID NO: 9095 - protein, 9 aa, Homo Sapiens
YLKEILEQL

SEQ ID NO: 9096 - protein, 9 aa, Homo Sapiens
YLKEILQDL

SEQ ID NO: 9097 - protein, 9 aa, Homo Sapiens
YLKGFLEDL

SEQ ID NO: 9098 - protein, 9 aa, Homo Sapiens
YLKHRLIVV

SEQ ID NO: 9099 - protein, 9 aa, Homo Sapiens
YLKIQLEDI

SEQ ID NO: 9100 - protein, 9 aa, Homo Sapiens
YLKNVVKQI

SEQ ID NO: 9101 - protein, 9 aa, Homo Sapiens
YLKPIQRTI

SEQ ID NO: 9102 - protein, 9 aa, Homo Sapiens
YLKPYFLEA

SEQ ID NO: 9103 - protein, 9 aa, Homo Sapiens
YLLDLHSYL

SEQ ID NO: 9104 - protein, 9 aa, Homo Sapiens
YLLENIAWV

SEQ ID NO: 9105 - protein, 9 aa, Homo Sapiens
YLLESVNKL

SEQ ID NO: 9106 - protein, 9 aa, Homo Sapiens
YLLPAIVHI

SEQ ID NO: 9107 - protein, 9 aa, Homo Sapiens
YLMEVTHDL

SEQ ID NO: 9108 - protein, 9 aa, Homo Sapiens
YLMGERLGV

SEQ ID NO: 9109 - protein, 9 aa, Homo Sapiens
YLNALVHLI

SEQ ID NO: 9110 - protein, 9 aa, Homo Sapiens
YLNENPLRA

SEQ ID NO: 9111 - protein, 9 aa, Homo Sapiens
YLNIKLTDI

SEQ ID NO: 9112 - protein, 9 aa, Homo Sapiens
YLNQHVNRI

SEQ ID NO: 9113 - protein, 9 aa, Homo Sapiens
YLNSILQHA

SEQ ID NO: 9114 - protein, 9 aa, Homo Sapiens
YLNVQVKEL

SEQ ID NO: 9115 - protein, 9 aa, Homo Sapiens
YLPPATQVV

SEQ ID NO: 9116 - protein, 9 aa, Homo Sapiens
YLPSQVSRV

SEQ ID NO: 9117 - protein, 9 aa, Homo Sapiens
YLPTRVTAI

SEQ ID NO: 9118 - protein, 9 aa, Homo Sapiens
YLPVKIEQV

SEQ ID NO: 9119 - protein, 9 aa, Homo Sapiens
YLPYPIHQV

SEQ ID NO: 9120 - protein, 9 aa, Homo Sapiens
YLQPKLLGI

SEQ ID NO: 9121 - protein, 9 aa, Homo Sapiens
YLQSEPCYV

SEQ ID NO: 9122 - protein, 9 aa, Homo Sapiens
YLQTILKEL

SEQ ID NO: 9123 - protein, 9 aa, Homo Sapiens
YLRDLLIRT

SEQ ID NO: 9124 - protein, 9 aa, Homo Sapiens
YLRDYSRTI

SEQ ID NO: 9125 - protein, 9 aa, Homo Sapiens
YLRELLTTM

SEQ ID NO: 9126 - protein, 9 aa, Homo Sapiens
YLRIDLERL

SEQ ID NO: 9127 - protein, 9 aa, Homo Sapiens
YLRSMIPHL

SEQ ID NO: 9128 - protein, 9 aa, Homo Sapiens
YLRTLINEL

SEQ ID NO: 9129 - protein, 9 aa, Homo Sapiens
YLSAKVEAL

SEQ ID NO: 9130 - protein, 9 aa, Homo Sapiens
YLSDNVHLV

SEQ ID NO: 9131 - protein, 9 aa, Homo Sapiens
YLSDSLRNL

SEQ ID NO: 9132 - protein, 9 aa, Homo Sapiens
YLSEATIGL

SEQ ID NO: 9133 - protein, 9 aa, Homo Sapiens
YLSEEVQAV

SEQ ID NO: 9134 - protein, 9 aa, Homo Sapiens
YLSEKVLAA

SEQ ID NO: 9135 - protein, 9 aa, Homo Sapiens
YLSKIIPAL

SEQ ID NO: 9136 - protein, 9 aa, Homo Sapiens
YLSLLNQQL

SEQ ID NO: 9137 - protein, 9 aa, Homo Sapiens
YLSNVDVYL

SEQ ID NO: 9138 - protein, 9 aa, Homo Sapiens
YLSPDLSKI

SEQ ID NO: 9139 - protein, 9 aa, Homo Sapiens
YLSPDLSKV

SEQ ID NO: 9140 - protein, 9 aa, Homo Sapiens
YLSPKLWAL

SEQ ID NO: 9141 - protein, 9 aa, Homo Sapiens
YLSSVITTI

SEQ ID NO: 9142 - protein, 9 aa, Homo Sapiens
YLTAEILEL

SEQ ID NO: 9143 - protein, 9 aa, Homo Sapiens
YLTAEVLEL

SEQ ID NO: 9144 - protein, 9 aa, Homo Sapiens
YLTDRVMTV

SEQ ID NO: 9145 - protein, 9 aa, Homo Sapiens
YLTEVFLHV

SEQ ID NO: 9146 - protein, 9 aa, Homo Sapiens
YLTFLPAEV

SEQ ID NO: 9147 - protein, 9 aa, Homo Sapiens
YLVDSVAKT

SEQ ID NO: 9148 - protein, 9 aa, Homo Sapiens
YLVEDIQHI

SEQ ID NO: 9149 - protein, 9 aa, Homo Sapiens
YLVELSSLL

SEQ ID NO: 9150 - protein, 9 aa, Homo Sapiens
YLVPELDGV

SEQ ID NO: 9151 - protein, 9 aa, Homo Sapiens
YLVSHPNEV

SEQ ID NO: 9152 - protein, 9 aa, Homo Sapiens
YLVTSIAKA

SEQ ID NO: 9153 - protein, 9 aa, Homo Sapiens
YLVVKIEKV

SEQ ID NO: 9154 - protein, 9 aa, Homo Sapiens
YLVYILNEL

SEQ ID NO: 9155 - protein, 9 aa, Homo Sapiens
YLWLKLNQV

SEQ ID NO: 9156 - protein, 9 aa, Homo Sapiens
YLYDRLLRI

SEQ ID NO: 9157 - protein, 9 aa, Homo Sapiens
YLYPDITRL

SEQ ID NO: 9158 - protein, 9 aa, Homo Sapiens
YLYTKEQLL

SEQ ID NO: 9159 - protein, 9 aa, Homo Sapiens
YMADRLLGV

SEQ ID NO: 9160 - protein, 9 aa, Homo Sapiens
YMAELIERL

SEQ ID NO: 9161 - protein, 9 aa, Homo Sapiens
YMAPEVVEA

SEQ ID NO: 9162 - protein, 9 aa, Homo Sapiens
YMIAHITGL

SEQ ID NO: 9163 - protein, 9 aa, Homo Sapiens
YMKDLISYL

SEQ ID NO: 9164 - protein, 9 aa, Homo Sapiens
YMLEHVITL

SEQ ID NO: 9165 - protein, 9 aa, Homo Sapiens
YMNHIMVSV

SEQ ID NO: 9166 - protein, 9 aa, Homo Sapiens
YMSDSFINV

SEQ ID NO: 9167 - protein, 9 aa, Homo Sapiens
YMSEHLLKA

SEQ ID NO: 9168 - protein, 9 aa, Homo Sapiens
YMSPHPSPL

SEQ ID NO: 9169 - protein, 9 aa, Homo Sapiens
YQFGEIRTI

SEQ ID NO: 9170 - protein, 9 aa, Homo Sapiens
YQVGQLYSV

SEQ ID NO: 9171 - protein, 9 aa, Homo Sapiens
YTTDRVMTV

SEQ ID NO: 9172 - protein, 9 aa, Homo Sapiens
YVFPGVTRL

SEQ ID NO: 9173 - protein, 9 aa, Homo Sapiens
YVINDLTAV

SEQ ID NO: 9174 - protein, 9 aa, Homo Sapiens
YVSKYINYI

SEQ ID NO: 9175 - protein, 9 aa, Homo Sapiens
YVSPRILTA

SEQ ID NO: 9176 - protein, 9 aa, Homo Sapiens
YVVPFVAKV

SEQ ID NO: 9177 - protein, 9 aa, Homo Sapiens
YVYEYLLHV

SEQ ID NO: 9178 - protein, 9 aa, Homo Sapiens
YVYKVLKQV

SEQ ID NO: 9179 - protein, 10 aa, Homo Sapiens
AAFEFDIHQV

SEQ ID NO: 9180 - protein, 10 aa, Homo Sapiens
AAFGGNPKSV

SEQ ID NO: 9181 - protein, 10 aa, Homo Sapiens
AAYEGSVAKV

SEQ ID NO: 9182 - protein, 10 aa, Homo Sapiens
AIFDRVLTEL

SEQ ID NO: 9183 - protein, 10 aa, Homo Sapiens
AIFQQPPVGV

SEQ ID NO: 9184 - protein, 10 aa, Homo Sapiens
AIIDGKIFCV

SEQ ID NO: 9185 - protein, 10 aa, Homo Sapiens
AIIEARGVSV

SEQ ID NO: 9186 - protein, 10 aa, Homo Sapiens
AIPGFTINRV

SEQ ID NO: 9187 - protein, 10 aa, Homo Sapiens
ALAARLLQPA

SEQ ID NO: 9188 - protein, 10 aa, Homo Sapiens
ALADWPLWYA

SEQ ID NO: 9189 - protein, 10 aa, Homo Sapiens
ALAEFHVQRV

SEQ ID NO: 9190 - protein, 10 aa, Homo Sapiens
ALAEFLQRKL

SEQ ID NO: 9191 - protein, 10 aa, Homo Sapiens
ALAEIAKAEL

SEQ ID NO: 9192 - protein, 10 aa, Homo Sapiens
ALANLKVSQI

SEQ ID NO: 9193 - protein, 10 aa, Homo Sapiens
ALAPMEAAKV

SEQ ID NO: 9194 - protein, 10 aa, Homo Sapiens
ALAPSPVSGV

SEQ ID NO: 9195 - protein, 10 aa, Homo Sapiens
ALAPWGPVKV

SEQ ID NO: 9196 - protein, 10 aa, Homo Sapiens
ALAPWPIVGL

SEQ ID NO: 9197 - protein, 10 aa, Homo Sapiens
ALASHILTAL

SEQ ID NO: 9198 - protein, 10 aa, Homo Sapiens
ALATIRLLDV

SEQ ID NO: 9199 - protein, 10 aa, Homo Sapiens
ALATWTIQGA

SEQ ID NO: 9200 - protein, 10 aa, Homo Sapiens
ALAVIVPEGV

SEQ ID NO: 9201 - protein, 10 aa, Homo Sapiens
ALCEENMRGV

SEQ ID NO: 9202 - protein, 10 aa, Homo Sapiens
ALFDSGLHPA

SEQ ID NO: 9203 - protein, 10 aa, Homo Sapiens
ALFGAGPASI

SEQ ID NO: 9204 - protein, 10 aa, Homo Sapiens
ALFGIPMALI

SEQ ID NO: 9205 - protein, 10 aa, Homo Sapiens
ALFKNSVSGI

SEQ ID NO: 9206 - protein, 10 aa, Homo Sapiens
ALFMYKPKKV

SEQ ID NO: 9207 - protein, 10 aa, Homo Sapiens
ALFNLDIRRA

SEQ ID NO: 9208 - protein, 10 aa, Homo Sapiens
ALFNRLVPSV

SEQ ID NO: 9209 - protein, 10 aa, Homo Sapiens
ALFPAPLAQI

SEQ ID NO: 9210 - protein, 10 aa, Homo Sapiens
ALFPEFLKEL

SEQ ID NO: 9211 - protein, 10 aa, Homo Sapiens
ALFPHLLQPV

SEQ ID NO: 9212 - protein, 10 aa, Homo Sapiens
ALFQPHLINV

SEQ ID NO: 9213 - protein, 10 aa, Homo Sapiens
ALFQRPPLIA

SEQ ID NO: 9214 - protein, 10 aa, Homo Sapiens
ALFRHEVGYV

SEQ ID NO: 9215 - protein, 10 aa, Homo Sapiens
ALFSDILSGL

SEQ ID NO: 9216 - protein, 10 aa, Homo Sapiens
ALFSDTPANA

SEQ ID NO: 9217 - protein, 10 aa, Homo Sapiens
ALFSGPLVQA

SEQ ID NO: 9218 - protein, 10 aa, Homo Sapiens
ALFTFSPLTV

SEQ ID NO: 9219 - protein, 10 aa, Homo Sapiens
ALFTPQLNNV

SEQ ID NO: 9220 - protein, 10 aa, Homo Sapiens
ALIDEQILCV

SEQ ID NO: 9221 - protein, 10 aa, Homo Sapiens
ALIHRMIEFV

SEQ ID NO: 9222 - protein, 10 aa, Homo Sapiens
ALIPIPLAVI

SEQ ID NO: 9223 - protein, 10 aa, Homo Sapiens
ALKGDGILIV

SEQ ID NO: 9224 - protein, 10 aa, Homo Sapiens
ALKNDLVEAL

SEQ ID NO: 9225 - protein, 10 aa, Homo Sapiens
ALKPQVSSIF

SEQ ID NO: 9226 - protein, 10 aa, Homo Sapiens
ALKSGKLVTA

SEQ ID NO: 9227 - protein, 10 aa, Homo Sapiens
ALLAGPLRPA

SEQ ID NO: 9228 - protein, 10 aa, Homo Sapiens
ALLDVTPKAV

SEQ ID NO: 9229 - protein, 10 aa, Homo Sapiens
ALMAGCIQEA

SEQ ID NO: 9230 - protein, 10 aa, Homo Sapiens
ALMAHAMEEV

SEQ ID NO: 9231 - protein, 10 aa, Homo Sapiens
ALNPNEIQRA

SEQ ID NO: 9232 - protein, 10 aa, Homo Sapiens
ALPHHRVIEV

SEQ ID NO: 9233 - protein, 10 aa, Homo Sapiens
ALREVSIHTV

SEQ ID NO: 9234 - protein, 10 aa, Homo Sapiens
ALRNLPPLRA

SEQ ID NO: 9235 - protein, 10 aa, Homo Sapiens
ALSPITKLSV

SEQ ID NO: 9236 - protein, 10 aa, Homo Sapiens
ALSSNVILHV

SEQ ID NO: 9237 - protein, 10 aa, Homo Sapiens
ALVANIIQNV

SEQ ID NO: 9238 - protein, 10 aa, Homo Sapiens
ALVDGPCTQV

SEQ ID NO: 9239 - protein, 10 aa, Homo Sapiens
ALVDHLNVGV

SEQ ID NO: 9240 - protein, 10 aa, Homo Sapiens
ALVPFSIKPL

SEQ ID NO: 9241 - protein, 10 aa, Homo Sapiens
ALWKGRPLSV

SEQ ID NO: 9242 - protein, 10 aa, Homo Sapiens
ALYASNVRRV

SEQ ID NO: 9243 - protein, 10 aa, Homo Sapiens
ALYCEFINRV

SEQ ID NO: 9244 - protein, 10 aa, Homo Sapiens
ALYDYMPMNA

SEQ ID NO: 9245 - protein, 10 aa, Homo Sapiens
ALYEYQPLQI

SEQ ID NO: 9246 - protein, 10 aa, Homo Sapiens
ALYFFPILTV

SEQ ID NO: 9247 - protein, 10 aa, Homo Sapiens
ALYGYDIRSA

SEQ ID NO: 9248 - protein, 10 aa, Homo Sapiens
ALYNKEMECL

SEQ ID NO: 9249 - protein, 10 aa, Homo Sapiens
ALYPGQLVQL

SEQ ID NO: 9250 - protein, 10 aa, Homo Sapiens
ALYPHFPAHS

SEQ ID NO: 9251 - protein, 10 aa, Homo Sapiens
AMFDHIPVGV

SEQ ID NO: 9252 - protein, 10 aa, Homo Sapiens
AMFLGELSLI

SEQ ID NO: 9253 - protein, 10 aa, Homo Sapiens
AMFPDTIPRV

SEQ ID NO: 9254 - protein, 10 aa, Homo Sapiens
AMFQEQLMTL

SEQ ID NO: 9255 - protein, 10 aa, Homo Sapiens
AMIAVVPGYI

SEQ ID NO: 9256 - protein, 10 aa, Homo Sapiens
AMYGTKLETI

SEQ ID NO: 9257 - protein, 10 aa, Homo Sapiens
AMYPDQVQLL

SEQ ID NO: 9258 - protein, 10 aa, Homo Sapiens
AQAGIKISSV

SEQ ID NO: 9259 - protein, 10 aa, Homo Sapiens
AQAPGVITGV

SEQ ID NO: 9260 - protein, 10 aa, Homo Sapiens
AQFPLQPGKV

SEQ ID NO: 9261 - protein, 10 aa, Homo Sapiens
AQYEHDLEVA

SEQ ID NO: 9262 - protein, 10 aa, Homo Sapiens
AQYGNILKHV

SEQ ID NO: 9263 - protein, 10 aa, Homo Sapiens
AQYVFTIQSI

SEQ ID NO: 9264 - protein, 10 aa, Homo Sapiens
ATFPVAPRYA

SEQ ID NO: 9265 - protein, 10 aa, Homo Sapiens
AVFDKTLAEL

SEQ ID NO: 9266 - protein, 10 aa, Homo Sapiens
AVFERVLSAV

SEQ ID NO: 9267 - protein, 10 aa, Homo Sapiens
AVFPFQPGSV

SEQ ID NO: 9268 - protein, 10 aa, Homo Sapiens
AVFVKPPAGV

SEQ ID NO: 9269 - protein, 10 aa, Homo Sapiens
AVIDVGINRV

SEQ ID NO: 9270 - protein, 10 aa, Homo Sapiens
AVLQGKLAEV

SEQ ID NO: 9271 - protein, 10 aa, Homo Sapiens
AVYEGHVSCV

SEQ ID NO: 9272 - protein, 10 aa, Homo Sapiens
AVYGFKLQSL

SEQ ID NO: 9273 - protein, 10 aa, Homo Sapiens
AVYGFMPAKA

SEQ ID NO: 9274 - protein, 10 aa, Homo Sapiens
CLMGKGMKRV

SEQ ID NO: 9275 - protein, 10 aa, Homo Sapiens
ELFEGIVRQV

SEQ ID NO: 9276 - protein, 10 aa, Homo Sapiens
ELFPHSLLSV

SEQ ID NO: 9277 - protein, 10 aa, Homo Sapiens
EQYEQILAFV

SEQ ID NO: 9278 - protein, 10 aa, Homo Sapiens
FAFALTPQQV

SEQ ID NO: 9279 - protein, 10 aa, Homo Sapiens
FAFTNKITSV

SEQ ID NO: 9280 - protein, 10 aa, Homo Sapiens
FGYDHLILNV

SEQ ID NO: 9281 - protein, 10 aa, Homo Sapiens
FGYPFRLNEA

SEQ ID NO: 9282 - protein, 10 aa, Homo Sapiens
FIFDVHVHEV

SEQ ID NO: 9283 - protein, 10 aa, Homo Sapiens
FIFEKKLAQA

SEQ ID NO: 9284 - protein, 10 aa, Homo Sapiens
FIFPGKLGTL

SEQ ID NO: 9285 - protein, 10 aa, Homo Sapiens
FIFSEKPVFV

SEQ ID NO: 9286 - protein, 10 aa, Homo Sapiens
FIIEKQPPQV

SEQ ID NO: 9287 - protein, 10 aa, Homo Sapiens
FIKDLPIRKV

SEQ ID NO: 9288 - protein, 10 aa, Homo Sapiens
FIKDYPVVSI

SEQ ID NO: 9289 - protein, 10 aa, Homo Sapiens
FIKPPVYVTV

SEQ ID NO: 9290 - protein, 10 aa, Homo Sapiens
FIMEGPLTRI

SEQ ID NO: 9291 - protein, 10 aa, Homo Sapiens
FIMEGTLTRV

SEQ ID NO: 9292 - protein, 10 aa, Homo Sapiens
FIYHGEVPQA

SEQ ID NO: 9293 - protein, 10 aa, Homo Sapiens
FIYPSNMQTM

SEQ ID NO: 9294 - protein, 10 aa, Homo Sapiens
FLAAHIPLFL

SEQ ID NO: 9295 - protein, 10 aa, Homo Sapiens
FLAEAELLNL

SEQ ID NO: 9296 - protein, 10 aa, Homo Sapiens
FLAEDALNTV

SEQ ID NO: 9297 - protein, 10 aa, Homo Sapiens
FLAEHPNVTL

SEQ ID NO: 9298 - protein, 10 aa, Homo Sapiens
FLAERLYAEV

SEQ ID NO: 9299 - protein, 10 aa, Homo Sapiens
FLAQHTMLTL

SEQ ID NO: 9300 - protein, 10 aa, Homo Sapiens
FLFASTILHL

SEQ ID NO: 9301 - protein, 10 aa, Homo Sapiens
FLFDGSPTYV

SEQ ID NO: 9302 - protein, 10 aa, Homo Sapiens
FLFGEEPSKL

SEQ ID NO: 9303 - protein, 10 aa, Homo Sapiens
FLFGYKFSGL

SEQ ID NO: 9304 - protein, 10 aa, Homo Sapiens
FLFPNKESLI

SEQ ID NO: 9305 - protein, 10 aa, Homo Sapiens
FLFPSGPGSL

SEQ ID NO: 9306 - protein, 10 aa, Homo Sapiens
FLHDHVDLQV

SEQ ID NO: 9307 - protein, 10 aa, Homo Sapiens
FLHETGGAMV

SEQ ID NO: 9308 - protein, 10 aa, Homo Sapiens
FLHETGLAMI

SEQ ID NO: 9309 - protein, 10 aa, Homo Sapiens
FLHQRIPQSV

SEQ ID NO: 9310 - protein, 10 aa, Homo Sapiens
FLHWYTGEGM

SEQ ID NO: 9311 - protein, 10 aa, Homo Sapiens
FLIGILLREV

SEQ ID NO: 9312 - protein, 10 aa, Homo Sapiens
FLIGPKLYEA

SEQ ID NO: 9313 - protein, 10 aa, Homo Sapiens
FLIPFETRQL

SEQ ID NO: 9314 - protein, 10 aa, Homo Sapiens
FLITHNPTNA

SEQ ID NO: 9315 - protein, 10 aa, Homo Sapiens
FLKEELVAAV

SEQ ID NO: 9316 - protein, 10 aa, Homo Sapiens
FLKEFENPEV

SEQ ID NO: 9317 - protein, 10 aa, Homo Sapiens
FLKPEKFTKV

SEQ ID NO: 9318 - protein, 10 aa, Homo Sapiens
FLKPLLIGEL

SEQ ID NO: 9319 - protein, 10 aa, Homo Sapiens
FLKSPELVQA

SEQ ID NO: 9320 - protein, 10 aa, Homo Sapiens
FLLDGFPRTV

SEQ ID NO: 9321 - protein, 10 aa, Homo Sapiens
FLLDSAPLNV

SEQ ID NO: 9322 - protein, 10 aa, Homo Sapiens
FLLERKPCTI

SEQ ID NO: 9323 - protein, 10 aa, Homo Sapiens
FLLGHEIAHA

SEQ ID NO: 9324 - protein, 10 aa, Homo Sapiens
FLLPHPGLQV

SEQ ID NO: 9325 - protein, 10 aa, Homo Sapiens
FLLPIKTVGV

SEQ ID NO: 9326 - protein, 10 aa, Homo Sapiens
FLLPLLIEKV

SEQ ID NO: 9327 - protein, 10 aa, Homo Sapiens
FLMEFQVKNV

SEQ ID NO: 9328 - protein, 10 aa, Homo Sapiens
FLMPFPVNYV

SEQ ID NO: 9329 - protein, 10 aa, Homo Sapiens
FLNDSYLKYV

SEQ ID NO: 9330 - protein, 10 aa, Homo Sapiens
FLNQFVVHTV

SEQ ID NO: 9331 - protein, 10 aa, Homo Sapiens
FLPEFAGTQL

SEQ ID NO: 9332 - protein, 10 aa, Homo Sapiens
FLPEFPSCSL

SEQ ID NO: 9333 - protein, 10 aa, Homo Sapiens
FLPQPVPLSV

SEQ ID NO: 9334 - protein, 10 aa, Homo Sapiens
FLPSHSLDTV

SEQ ID NO: 9335 - protein, 10 aa, Homo Sapiens
FLQEGDLISA

SEQ ID NO: 9336 - protein, 10 aa, Homo Sapiens
FLQPIYLKSV

SEQ ID NO: 9337 - protein, 10 aa, Homo Sapiens
FLRDNQLSEV

SEQ ID NO: 9338 - protein, 10 aa, Homo Sapiens
FLRDYTQINV

SEQ ID NO: 9339 - protein, 10 aa, Homo Sapiens
FLRTPEILTV

SEQ ID NO: 9340 - protein, 10 aa, Homo Sapiens
FLSDGTIISV

SEQ ID NO: 9341 - protein, 10 aa, Homo Sapiens
FLSYCPGMGV

SEQ ID NO: 9342 - protein, 10 aa, Homo Sapiens
FLVEHVLTLI

SEQ ID NO: 9343 - protein, 10 aa, Homo Sapiens
FLVEKQPPQV

SEQ ID NO: 9344 - protein, 10 aa, Homo Sapiens
FLWERPTLLV

SEQ ID NO: 9345 - protein, 10 aa, Homo Sapiens
FLWPGLNVPL

SEQ ID NO: 9346 - protein, 10 aa, Homo Sapiens
FLYAAQPELL

SEQ ID NO: 9347 - protein, 10 aa, Homo Sapiens
FLYEKLDRKV

SEQ ID NO: 9348 - protein, 10 aa, Homo Sapiens
FLYIGDIVSL

SEQ ID NO: 9349 - protein, 10 aa, Homo Sapiens
FLYKEKLVSV

SEQ ID NO: 9350 - protein, 10 aa, Homo Sapiens
FLYNEALYSL

SEQ ID NO: 9351 - protein, 10 aa, Homo Sapiens
FLYNHGIGTL

SEQ ID NO: 9352 - protein, 10 aa, Homo Sapiens
FLYPFPLALF

SEQ ID NO: 9353 - protein, 10 aa, Homo Sapiens
FLYQRLVVGA

SEQ ID NO: 9354 - protein, 10 aa, Homo Sapiens
FMAQIRPGES

SEQ ID NO: 9355 - protein, 10 aa, Homo Sapiens
FMFDEKLVTV

SEQ ID NO: 9356 - protein, 10 aa, Homo Sapiens
FMFQRVLVSL

SEQ ID NO: 9357 - protein, 10 aa, Homo Sapiens
FMKPGKVVLV

SEQ ID NO: 9358 - protein, 10 aa, Homo Sapiens
FMTYWHLLNA

SEQ ID NO: 9359 - protein, 10 aa, Homo Sapiens
FMYNFQLVTL

SEQ ID NO: 9360 - protein, 10 aa, Homo Sapiens
FQFPSHVTDV

SEQ ID NO: 9361 - protein, 10 aa, Homo Sapiens
FTFPNRLLTT

SEQ ID NO: 9362 - protein, 10 aa, Homo Sapiens
FTYVGGPRSV

SEQ ID NO: 9363 - protein, 10 aa, Homo Sapiens
FVFDRPLPVS

SEQ ID NO: 9364 - protein, 10 aa, Homo Sapiens
GAAGFALSQV

SEQ ID NO: 9365 - protein, 10 aa, Homo Sapiens
GAFGFQLKEV

SEQ ID NO: 9366 - protein, 10 aa, Homo Sapiens
GIFGGHIRSV

SEQ ID NO: 9367 - protein, 10 aa, Homo Sapiens
GIKDDVFLSV

SEQ ID NO: 9368 - protein, 10 aa, Homo Sapiens
GISPLKPGTV

SEQ ID NO: 9369 - protein, 10 aa, Homo Sapiens
GIYIFIPQNV

SEQ ID NO: 9370 - protein, 10 aa, Homo Sapiens
GIYKDDIAQV

SEQ ID NO: 9371 - protein, 10 aa, Homo Sapiens
GLAAGGIVAV

SEQ ID NO: 9372 - protein, 10 aa, Homo Sapiens
GLAALKMLAV

SEQ ID NO: 9373 - protein, 10 aa, Homo Sapiens
GLAEWVLMEL

SEQ ID NO: 9374 - protein, 10 aa, Homo Sapiens
GLAKRPGALL

SEQ ID NO: 9375 - protein, 10 aa, Homo Sapiens
GLAPAAPLQV

SEQ ID NO: 9376 - protein, 10 aa, Homo Sapiens
GLAPFLLNAV

SEQ ID NO: 9377 - protein, 10 aa, Homo Sapiens
GLAPGGLAVV

SEQ ID NO: 9378 - protein, 10 aa, Homo Sapiens
GLAPNTPGKA

SEQ ID NO: 9379 - protein, 10 aa, Homo Sapiens
GLASIQPSKV

SEQ ID NO: 9380 - protein, 10 aa, Homo Sapiens
GLFGETLRAA

SEQ ID NO: 9381 - protein, 10 aa, Homo Sapiens
GLFGKELHKV

SEQ ID NO: 9382 - protein, 10 aa, Homo Sapiens
GLFGTIISGI

SEQ ID NO: 9383 - protein, 10 aa, Homo Sapiens
GLFNRIIRKV

SEQ ID NO: 9384 - protein, 10 aa, Homo Sapiens
GLFPGAPKGA

SEQ ID NO: 9385 - protein, 10 aa, Homo Sapiens
GLFPGSNATF

SEQ ID NO: 9386 - protein, 10 aa, Homo Sapiens
GLFSNDIPHV

SEQ ID NO: 9387 - protein, 10 aa, Homo Sapiens
GLFWANIRAA

SEQ ID NO: 9388 - protein, 10 aa, Homo Sapiens
GLHSGNFSRV

SEQ ID NO: 9389 - protein, 10 aa, Homo Sapiens
GLIDVKPLGV

SEQ ID NO: 9390 - protein, 10 aa, Homo Sapiens
GLIGVGLINV

SEQ ID NO: 9391 - protein, 10 aa, Homo Sapiens
GLIIRKPVTV

SEQ ID NO: 9392 - protein, 10 aa, Homo Sapiens
GLINTGVLSV

SEQ ID NO: 9393 - protein, 10 aa, Homo Sapiens
GLIRFPLMTI

SEQ ID NO: 9394 - protein, 10 aa, Homo Sapiens
GLIVKEWNSV

SEQ ID NO: 9395 - protein, 10 aa, Homo Sapiens
GLMGAGIAQV

SEQ ID NO: 9396 - protein, 10 aa, Homo Sapiens
GLREDLLRGI

SEQ ID NO: 9397 - protein, 10 aa, Homo Sapiens
GLREQELQVV

SEQ ID NO: 9398 - protein, 10 aa, Homo Sapiens
GLREQGMEVV

SEQ ID NO: 9399 - protein, 10 aa, Homo Sapiens
GLSEEKPLSV

SEQ ID NO: 9400 - protein, 10 aa, Homo Sapiens
GLSEKLLAYV

SEQ ID NO: 9401 - protein, 10 aa, Homo Sapiens
GLSPLRPPSV

SEQ ID NO: 9402 - protein, 10 aa, Homo Sapiens
GLTGQRLLGV

SEQ ID NO: 9403 - protein, 10 aa, Homo Sapiens
GLTGQRVLGV

SEQ ID NO: 9404 - protein, 10 aa, Homo Sapiens
GLTKQYLRYV

SEQ ID NO: 9405 - protein, 10 aa, Homo Sapiens
GLVAFEPHAL

SEQ ID NO: 9406 - protein, 10 aa, Homo Sapiens
GLVDIQPHWV

SEQ ID NO: 9407 - protein, 10 aa, Homo Sapiens
GLVGIIVGTV

SEQ ID NO: 9408 - protein, 10 aa, Homo Sapiens
GLVGIVVGTV

SEQ ID NO: 9409 - protein, 10 aa, Homo Sapiens
GLVPFLVSVL

SEQ ID NO: 9410 - protein, 10 aa, Homo Sapiens
GLWGHPVLAV

SEQ ID NO: 9411 - protein, 10 aa, Homo Sapiens
GLWHGMFANV

SEQ ID NO: 9412 - protein, 10 aa, Homo Sapiens
GLYDGPVCEV

SEQ ID NO: 9413 - protein, 10 aa, Homo Sapiens
GLYEFPLNKV

SEQ ID NO: 9414 - protein, 10 aa, Homo Sapiens
GLYGLIVALI

SEQ ID NO: 9415 - protein, 10 aa, Homo Sapiens
GLYHYYIMEL

SEQ ID NO: 9416 - protein, 10 aa, Homo Sapiens
GLYPFRVNSA

SEQ ID NO: 9417 - protein, 10 aa, Homo Sapiens
GLYQGQVLVI

SEQ ID NO: 9418 - protein, 10 aa, Homo Sapiens
GLYSDRISEL

SEQ ID NO: 9419 - protein, 10 aa, Homo Sapiens
GLYSRQLYVL

SEQ ID NO: 9420 - protein, 10 aa, Homo Sapiens
GLYTGEVTEI

SEQ ID NO: 9421 - protein, 10 aa, Homo Sapiens
GLYYGDVIWV

SEQ ID NO: 9422 - protein, 10 aa, Homo Sapiens
GMAPHSMAVV

SEQ ID NO: 9423 - protein, 10 aa, Homo Sapiens
GMASLNLPAV

SEQ ID NO: 9424 - protein, 10 aa, Homo Sapiens
GMFKNLLKEV

SEQ ID NO: 9425 - protein, 10 aa, Homo Sapiens
GMPLIVPCTV

SEQ ID NO: 9426 - protein, 10 aa, Homo Sapiens
GQFPSYLETV

SEQ ID NO: 9427 - protein, 10 aa, Homo Sapiens
GQYDQPVLAV

SEQ ID NO: 9428 - protein, 10 aa, Homo Sapiens
GTIQVMLLTI

SEQ ID NO: 9429 - protein, 10 aa, Homo Sapiens
GTKDVPITSV

SEQ ID NO: 9430 - protein, 10 aa, Homo Sapiens
GTVAFALTKV

SEQ ID NO: 9431 - protein, 10 aa, Homo Sapiens
GVFGVKIAVV

SEQ ID NO: 9432 - protein, 10 aa, Homo Sapiens
GVFGVKISVV

SEQ ID NO: 9433 - protein, 10 aa, Homo Sapiens
GVIAEILRGV

SEQ ID NO: 9434 - protein, 10 aa, Homo Sapiens
GVIDILPNCV

SEQ ID NO: 9435 - protein, 10 aa, Homo Sapiens
GVYAGRPLSV

SEQ ID NO: 9436 - protein, 10 aa, Homo Sapiens
GVYQGRVSAV

SEQ ID NO: 9437 - protein, 10 aa, Homo Sapiens
HITDFNIATV

SEQ ID NO: 9438 - protein, 10 aa, Homo Sapiens
HLFDHVVNRV

SEQ ID NO: 9439 - protein, 10 aa, Homo Sapiens
HLFDTLPLEV

SEQ ID NO: 9440 - protein, 10 aa, Homo Sapiens
HLFGSTLLGI

SEQ ID NO: 9441 - protein, 10 aa, Homo Sapiens
HLFPGENCTL

SEQ ID NO: 9442 - protein, 10 aa, Homo Sapiens
HLFPKLELSV

SEQ ID NO: 9443 - protein, 10 aa, Homo Sapiens
HLFSGHLSTL

SEQ ID NO: 9444 - protein, 10 aa, Homo Sapiens
HLFSWIPLSA

SEQ ID NO: 9445 - protein, 10 aa, Homo Sapiens
HLLPTAPTTV

SEQ ID NO: 9446 - protein, 10 aa, Homo Sapiens
HLNPMQLMTV

SEQ ID NO: 9447 - protein, 10 aa, Homo Sapiens
HLNPSLLQNV

SEQ ID NO: 9448 - protein, 10 aa, Homo Sapiens
HLYGQNVTMV

SEQ ID NO: 9449 - protein, 10 aa, Homo Sapiens
HLYQQGMLSV

SEQ ID NO: 9450 - protein, 10 aa, Homo Sapiens
HLYSRIPGLL

SEQ ID NO: 9451 - protein, 10 aa, Homo Sapiens
HQYGLPIKSV

SEQ ID NO: 9452 - protein, 10 aa, Homo Sapiens
HVYPAQVQYV

SEQ ID NO: 9453 - protein, 10 aa, Homo Sapiens
IAYDRYIKEV

SEQ ID NO: 9454 - protein, 10 aa, Homo Sapiens
IIKPDPPEGV

SEQ ID NO: 9455 - protein, 10 aa, Homo Sapiens
ILANGALRAV

SEQ ID NO: 9456 - protein, 10 aa, Homo Sapiens
ILAPCKLETV

SEQ ID NO: 9457 - protein, 10 aa, Homo Sapiens
ILFDHMVPLV

SEQ ID NO: 9458 - protein, 10 aa, Homo Sapiens
ILFDYILSQI

SEQ ID NO: 9459 - protein, 10 aa, Homo Sapiens
ILFLGPLMQL

SEQ ID NO: 9460 - protein, 10 aa, Homo Sapiens
ILFPDIIARA

SEQ ID NO: 9461 - protein, 10 aa, Homo Sapiens
ILFPNDPLYA

SEQ ID NO: 9462 - protein, 10 aa, Homo Sapiens
ILFPYIEENV

SEQ ID NO: 9463 - protein, 10 aa, Homo Sapiens
ILFSEGLIKA

SEQ ID NO: 9464 - protein, 10 aa, Homo Sapiens
ILKDVIPPLE

SEQ ID NO: 9465 - protein, 10 aa, Homo Sapiens
ILKEGDLVKI

SEQ ID NO: 9466 - protein, 10 aa, Homo Sapiens
ILKPSTIIGV

SEQ ID NO: 9467 - protein, 10 aa, Homo Sapiens
ILNKALLLGA

SEQ ID NO: 9468 - protein, 10 aa, Homo Sapiens
ILNVDGLIGV

SEQ ID NO: 9469 - protein, 10 aa, Homo Sapiens
ILPGLSVMGV

SEQ ID NO: 9470 - protein, 10 aa, Homo Sapiens
ILRSQKPVMV

SEQ ID NO: 9471 - protein, 10 aa, Homo Sapiens
ILYEHQLGQA

SEQ ID NO: 9472 - protein, 10 aa, Homo Sapiens
ILYKLKLGEI

SEQ ID NO: 9473 - protein, 10 aa, Homo Sapiens
ILYNGLIEEL

SEQ ID NO: 9474 - protein, 10 aa, Homo Sapiens
ILYPEIPRKL

SEQ ID NO: 9475 - protein, 10 aa, Homo Sapiens
ILYPKTLFLL

SEQ ID NO: 9476 - protein, 10 aa, Homo Sapiens
ILYPSTLFLL

SEQ ID NO: 9477 - protein, 10 aa, Homo Sapiens
ILYPYELFQS

SEQ ID NO: 9478 - protein, 10 aa, Homo Sapiens
IMIDPVLGTV

SEQ ID NO: 9479 - protein, 10 aa, Homo Sapiens
IMPAFIFEHI

SEQ ID NO: 9480 - protein, 10 aa, Homo Sapiens
IMTEKELLAV

SEQ ID NO: 9481 - protein, 10 aa, Homo Sapiens
KAYQELLATV

SEQ ID NO: 9482 - protein, 10 aa, Homo Sapiens
KIADFGLARI

SEQ ID NO: 9483 - protein, 10 aa, Homo Sapiens
KIADFGLARV

SEQ ID NO: 9484 - protein, 10 aa, Homo Sapiens
KIFDEILVNA

SEQ ID NO: 9485 - protein, 10 aa, Homo Sapiens
KIGDFGLATV

SEQ ID NO: 9486 - protein, 10 aa, Homo Sapiens
KISDFGLATV

SEQ ID NO: 9487 - protein, 10 aa, Homo Sapiens
KLADFGLARA

SEQ ID NO: 9488 - protein, 10 aa, Homo Sapiens
KLADISINYV

SEQ ID NO: 9489 - protein, 10 aa, Homo Sapiens
KLFDDKLQNC

SEQ ID NO: 9490 - protein, 10 aa, Homo Sapiens
KLFENFLVDI

SEQ ID NO: 9491 - protein, 10 aa, Homo Sapiens
KLFEPYVVHV

SEQ ID NO: 9492 - protein, 10 aa, Homo Sapiens
KLFGHLERGV

SEQ ID NO: 9493 - protein, 10 aa, Homo Sapiens
KLFNGCPLRI

SEQ ID NO: 9494 - protein, 10 aa, Homo Sapiens
KLFPDTPLAL

SEQ ID NO: 9495 - protein, 10 aa, Homo Sapiens
KLFSGVLMDL

SEQ ID NO: 9496 - protein, 10 aa, Homo Sapiens
KLFVEALGQI

SEQ ID NO: 9497 - protein, 10 aa, Homo Sapiens
KLHDFGYRGV

SEQ ID NO: 9498 - protein, 10 aa, Homo Sapiens
KLHDVELHQV

SEQ ID NO: 9499 - protein, 10 aa, Homo Sapiens
KLKETSPLTA

SEQ ID NO: 9500 - protein, 10 aa, Homo Sapiens
KLKPGDLVGV

SEQ ID NO: 9501 - protein, 10 aa, Homo Sapiens
KLREGEITHL

SEQ ID NO: 9502 - protein, 10 aa, Homo Sapiens
KLVEFDFLGA

SEQ ID NO: 9503 - protein, 10 aa, Homo Sapiens
KLVSFTLSDL

SEQ ID NO: 9504 - protein, 10 aa, Homo Sapiens
KLYDIDVAKV

SEQ ID NO: 9505 - protein, 10 aa, Homo Sapiens
KLYEAAVKKV

SEQ ID NO: 9506 - protein, 10 aa, Homo Sapiens
KLYEKKLLKL

SEQ ID NO: 9507 - protein, 10 aa, Homo Sapiens
KLYESLLPFA

SEQ ID NO: 9508 - protein, 10 aa, Homo Sapiens
KLYFPELHMV

SEQ ID NO: 9509 - protein, 10 aa, Homo Sapiens
KLYHQWLSTV

SEQ ID NO: 9510 - protein, 10 aa, Homo Sapiens
KLYPQLPAEI

SEQ ID NO: 9511 - protein, 10 aa, Homo Sapiens
KMFESFIESV

SEQ ID NO: 9512 - protein, 10 aa, Homo Sapiens
KMLEIDPQKV

SEQ ID NO: 9513 - protein, 10 aa, Homo Sapiens
KMPDFGQVTV

SEQ ID NO: 9514 - protein, 10 aa, Homo Sapiens
KMREDVISSI

SEQ ID NO: 9515 - protein, 10 aa, Homo Sapiens
KMYEEFLSKV

SEQ ID NO: 9516 - protein, 10 aa, Homo Sapiens
KQFPLIISSV

SEQ ID NO: 9517 - protein, 10 aa, Homo Sapiens
KQIGYLFISV

SEQ ID NO: 9518 - protein, 10 aa, Homo Sapiens
KTMEDTLMTV

SEQ ID NO: 9519 - protein, 10 aa, Homo Sapiens
KVFDPVPVGV

SEQ ID NO: 9520 - protein, 10 aa, Homo Sapiens
KVFDQYLNFI

SEQ ID NO: 9521 - protein, 10 aa, Homo Sapiens
KVFSGALQEA

SEQ ID NO: 9522 - protein, 10 aa, Homo Sapiens
KVKEPPILRV

SEQ ID NO: 9523 - protein, 10 aa, Homo Sapiens
LIFPAEPAQA

SEQ ID NO: 9524 - protein, 10 aa, Homo Sapiens
LIFSHMLAEI

SEQ ID NO: 9525 - protein, 10 aa, Homo Sapiens
LIKSGQLLGV

SEQ ID NO: 9526 - protein, 10 aa, Homo Sapiens
LILEKQPAYV

SEQ ID NO: 9527 - protein, 10 aa, Homo Sapiens
LINEIKPQSV

SEQ ID NO: 9528 - protein, 10 aa, Homo Sapiens
LLAWFPLQEA

SEQ ID NO: 9529 - protein, 10 aa, Homo Sapiens
LLFEGEKITI

SEQ ID NO: 9530 - protein, 10 aa, Homo Sapiens
LLFERELHSV

SEQ ID NO: 9531 - protein, 10 aa, Homo Sapiens
LLFPHPVNQV

SEQ ID NO: 9532 - protein, 10 aa, Homo Sapiens
LLFPSDVQTL

SEQ ID NO: 9533 - protein, 10 aa, Homo Sapiens
LLFRNAFTSV

SEQ ID NO: 9534 - protein, 10 aa, Homo Sapiens
LLFSKQPSQA

SEQ ID NO: 9535 - protein, 10 aa, Homo Sapiens
LLHAGGLARA

SEQ ID NO: 9536 - protein, 10 aa, Homo Sapiens
LLIDIQPNTL

SEQ ID NO: 9537 - protein, 10 aa, Homo Sapiens
LLLPGVIKTV

SEQ ID NO: 9538 - protein, 10 aa, Homo Sapiens
LLNDASLISV

SEQ ID NO: 9539 - protein, 10 aa, Homo Sapiens
LLNPAVLSTA

SEQ ID NO: 9540 - protein, 10 aa, Homo Sapiens
LLPAHPGAEV

SEQ ID NO: 9541 - protein, 10 aa, Homo Sapiens
LLPGNFTVGV

SEQ ID NO: 9542 - protein, 10 aa, Homo Sapiens
LLRPEGLTSV

SEQ ID NO: 9543 - protein, 10 aa, Homo Sapiens
LLRPGGILAV

SEQ ID NO: 9544 - protein, 10 aa, Homo Sapiens
LLSPHNPALA

SEQ ID NO: 9545 - protein, 10 aa, Homo Sapiens
LLYDDKGVGL

SEQ ID NO: 9546 - protein, 10 aa, Homo Sapiens
LLYDEFVKSV

SEQ ID NO: 9547 - protein, 10 aa, Homo Sapiens
LLYEDALYTV

SEQ ID NO: 9548 - protein, 10 aa, Homo Sapiens
LLYEDIPDKV

SEQ ID NO: 9549 - protein, 10 aa, Homo Sapiens
LLYGSIPKAA

SEQ ID NO: 9550 - protein, 10 aa, Homo Sapiens
LLYPREILIL

SEQ ID NO: 9551 - protein, 10 aa, Homo Sapiens
LLYQEKIRYA

SEQ ID NO: 9552 - protein, 10 aa, Homo Sapiens
LLYQGPHNTL

SEQ ID NO: 9553 - protein, 10 aa, Homo Sapiens
LLYSEIPKKV

SEQ ID NO: 9554 - protein, 10 aa, Homo Sapiens
LMPYFLLTQA

SEQ ID NO: 9555 - protein, 10 aa, Homo Sapiens
LQFDKELRSL

SEQ ID NO: 9556 - protein, 10 aa, Homo Sapiens
LQFNSSLQKV

SEQ ID NO: 9557 - protein, 10 aa, Homo Sapiens
LVKDGFLVEV

SEQ ID NO: 9558 - protein, 10 aa, Homo Sapiens
MLFDKLITNT

SEQ ID NO: 9559 - protein, 10 aa, Homo Sapiens
MLFGGVPKTT

SEQ ID NO: 9560 - protein, 10 aa, Homo Sapiens
MLFPKFLKGL

SEQ ID NO: 9561 - protein, 10 aa, Homo Sapiens
MLYPEVIQQV

SEQ ID NO: 9562 - protein, 10 aa, Homo Sapiens
MQIEHIIENI

SEQ ID NO: 9563 - protein, 10 aa, Homo Sapiens
NLFEHELGAL

SEQ ID NO: 9564 - protein, 10 aa, Homo Sapiens
NLMAPAPSTV

SEQ ID NO: 9565 - protein, 10 aa, Homo Sapiens
NLMNAVVQTV

SEQ ID NO: 9566 - protein, 10 aa, Homo Sapiens
NLVEKTPALV

SEQ ID NO: 9567 - protein, 10 aa, Homo Sapiens
NLYGNIVNNV

SEQ ID NO: 9568 - protein, 10 aa, Homo Sapiens
NLYNLPLKTL

SEQ ID NO: 9569 - protein, 10 aa, Homo Sapiens
QLFQDEVAKA

SEQ ID NO: 9570 - protein, 10 aa, Homo Sapiens
QLHAGSLVSV

SEQ ID NO: 9571 - protein, 10 aa, Homo Sapiens
QLIDYKILGL

SEQ ID NO: 9572 - protein, 10 aa, Homo Sapiens
QLREYQLEGV

SEQ ID NO: 9573 - protein, 10 aa, Homo Sapiens
QLYGPFLIVV

SEQ ID NO: 9574 - protein, 10 aa, Homo Sapiens
QLYIHQMISV

SEQ ID NO: 9575 - protein, 10 aa, Homo Sapiens
QLYKEQLAKL

SEQ ID NO: 9576 - protein, 10 aa, Homo Sapiens
QLYPFAISLI

SEQ ID NO: 9577 - protein, 10 aa, Homo Sapiens
QLYYKEITEA

SEQ ID NO: 9578 - protein, 10 aa, Homo Sapiens
QLYYQVLNFA

SEQ ID NO: 9579 - protein, 10 aa, Homo Sapiens
QMIPFQPRHL

SEQ ID NO: 9580 - protein, 10 aa, Homo Sapiens
QQFPDIPESV

SEQ ID NO: 9581 - protein, 10 aa, Homo Sapiens
QQVDRQLPSL

SEQ ID NO: 9582 - protein, 10 aa, Homo Sapiens
QVFPGLLERV

SEQ ID NO: 9583 - protein, 10 aa, Homo Sapiens
QVYRGALQKV

SEQ ID NO: 9584 - protein, 10 aa, Homo Sapiens
RFFDGELTKV

SEQ ID NO: 9585 - protein, 10 aa, Homo Sapiens
RILAQQPLSV

SEQ ID NO: 9586 - protein, 10 aa, Homo Sapiens
RIYPFLLMVV

SEQ ID NO: 9587 - protein, 10 aa, Homo Sapiens
RLADFNIYQV

SEQ ID NO: 9588 - protein, 10 aa, Homo Sapiens
RLFADILNDV

SEQ ID NO: 9589 - protein, 10 aa, Homo Sapiens
RLFDPDPQKV

SEQ ID NO: 9590 - protein, 10 aa, Homo Sapiens
RLFEWVVNRI

SEQ ID NO: 9591 - protein, 10 aa, Homo Sapiens
RLFHKDLTSL

SEQ ID NO: 9592 - protein, 10 aa, Homo Sapiens
RLFNDPVAMV

SEQ ID NO: 9593 - protein, 10 aa, Homo Sapiens
RLFPGAPPTA

SEQ ID NO: 9594 - protein, 10 aa, Homo Sapiens
RLFQENLGLL

SEQ ID NO: 9595 - protein, 10 aa, Homo Sapiens
RLFTDVIICV

SEQ ID NO: 9596 - protein, 10 aa, Homo Sapiens
RLFYSNIQTV

SEQ ID NO: 9597 - protein, 10 aa, Homo Sapiens
RLIDDMVAQV

SEQ ID NO: 9598 - protein, 10 aa, Homo Sapiens
RLLDEEISRV

SEQ ID NO: 9599 - protein, 10 aa, Homo Sapiens
RLMNLPLHSV

SEQ ID NO: 9600 - protein, 10 aa, Homo Sapiens
RLPDIPLRQV

SEQ ID NO: 9601 - protein, 10 aa, Homo Sapiens
RLPSFAIPYA

SEQ ID NO: 9602 - protein, 10 aa, Homo Sapiens
RLRELQLQEV

SEQ ID NO: 9603 - protein, 10 aa, Homo Sapiens
RLVEFNITGA

SEQ ID NO: 9604 - protein, 10 aa, Homo Sapiens
RLYDGLFKVI

SEQ ID NO: 9605 - protein, 10 aa, Homo Sapiens
RLYEALTPVH

SEQ ID NO: 9606 - protein, 10 aa, Homo Sapiens
RLYPAFMEGI

SEQ ID NO: 9607 - protein, 10 aa, Homo Sapiens
RLYPEGLAQL

SEQ ID NO: 9608 - protein, 10 aa, Homo Sapiens
RLYPELPSQL

SEQ ID NO: 9609 - protein, 10 aa, Homo Sapiens
RLYPEVPEVL

SEQ ID NO: 9610 - protein, 10 aa, Homo Sapiens
RLYPWGVVEV

SEQ ID NO: 9611 - protein, 10 aa, Homo Sapiens
RLYSNDIHAI

SEQ ID NO: 9612 - protein, 10 aa, Homo Sapiens
RLYTVVPRLV

SEQ ID NO: 9613 - protein, 10 aa, Homo Sapiens
RMFDGKFVVA

SEQ ID NO: 9614 - protein, 10 aa, Homo Sapiens
RMFDRIFGQA

SEQ ID NO: 9615 - protein, 10 aa, Homo Sapiens
RMIKEKLCYV

SEQ ID NO: 9616 - protein, 10 aa, Homo Sapiens
RMYPFQIHSI

SEQ ID NO: 9617 - protein, 10 aa, Homo Sapiens
RQYPWGTVQV

SEQ ID NO: 9618 - protein, 10 aa, Homo Sapiens
RQYPWGVAEV

SEQ ID NO: 9619 - protein, 10 aa, Homo Sapiens
RQYPWGVVQV

SEQ ID NO: 9620 - protein, 10 aa, Homo Sapiens
RVFIGNLNTL

SEQ ID NO: 9621 - protein, 10 aa, Homo Sapiens
RVFTGIVTSL

SEQ ID NO: 9622 - protein, 10 aa, Homo Sapiens
RVLDFDPMAV

SEQ ID NO: 9623 - protein, 10 aa, Homo Sapiens
SAAGFPLSGA

SEQ ID NO: 9624 - protein, 10 aa, Homo Sapiens
SGYPGLLNGV

SEQ ID NO: 9625 - protein, 10 aa, Homo Sapiens
SIFDSKVTEI

SEQ ID NO: 9626 - protein, 10 aa, Homo Sapiens
SIFELDPTTL

SEQ ID NO: 9627 - protein, 10 aa, Homo Sapiens
SIPDFPMHLA

SEQ ID NO: 9628 - protein, 10 aa, Homo Sapiens
SISDQSIASV

SEQ ID NO: 9629 - protein, 10 aa, Homo Sapiens
SIYGGFLLGV

SEQ ID NO: 9630 - protein, 10 aa, Homo Sapiens
SIYNGDMEKI

SEQ ID NO: 9631 - protein, 10 aa, Homo Sapiens
SLAEFISERV

SEQ ID NO: 9632 - protein, 10 aa, Homo Sapiens
SLAELKGFEV

SEQ ID NO: 9633 - protein, 10 aa, Homo Sapiens
SLAEVAGLQV

SEQ ID NO: 9634 - protein, 10 aa, Homo Sapiens
SLAHAQLSEV

SEQ ID NO: 9635 - protein, 10 aa, Homo Sapiens
SLAPNIISQL

SEQ ID NO: 9636 - protein, 10 aa, Homo Sapiens
SLASFCFSHI

SEQ ID NO: 9637 - protein, 10 aa, Homo Sapiens
SLASLPPLHV

SEQ ID NO: 9638 - protein, 10 aa, Homo Sapiens
SLFAGGMLRV

SEQ ID NO: 9639 - protein, 10 aa, Homo Sapiens
SLFAGQPLTI

SEQ ID NO: 9640 - protein, 10 aa, Homo Sapiens
SLFAQRLKTL

SEQ ID NO: 9641 - protein, 10 aa, Homo Sapiens
SLFDGFFLTA

SEQ ID NO: 9642 - protein, 10 aa, Homo Sapiens
SLFDQPLSII

SEQ ID NO: 9643 - protein, 10 aa, Homo Sapiens
SLFEGKALGL

SEQ ID NO: 9644 - protein, 10 aa, Homo Sapiens
SLFEKGLKNV

SEQ ID NO: 9645 - protein, 10 aa, Homo Sapiens
SLFEVLPQQV

SEQ ID NO: 9646 - protein, 10 aa, Homo Sapiens
SLFFHVPAGL

SEQ ID NO: 9647 - protein, 10 aa, Homo Sapiens
SLFGGKIAVL

SEQ ID NO: 9648 - protein, 10 aa, Homo Sapiens
SLFGGSVKLA

SEQ ID NO: 9649 - protein, 10 aa, Homo Sapiens
SLFGKNLTTI

SEQ ID NO: 9650 - protein, 10 aa, Homo Sapiens
SLFGQDVKAV

SEQ ID NO: 9651 - protein, 10 aa, Homo Sapiens
SLFGYSPAAA

SEQ ID NO: 9652 - protein, 10 aa, Homo Sapiens
SLFLGRILSL

SEQ ID NO: 9653 - protein, 10 aa, Homo Sapiens
SLFLQTPKIV

SEQ ID NO: 9654 - protein, 10 aa, Homo Sapiens
SLFLRTPKIV

SEQ ID NO: 9655 - protein, 10 aa, Homo Sapiens
SLFPGKLEVV

SEQ ID NO: 9656 - protein, 10 aa, Homo Sapiens
SLFPHNPQFI

SEQ ID NO: 9657 - protein, 10 aa, Homo Sapiens
SLFPLLPQDV

SEQ ID NO: 9658 - protein, 10 aa, Homo Sapiens
SLFSGILKEM

SEQ ID NO: 9659 - protein, 10 aa, Homo Sapiens
SLFSHSLISI

SEQ ID NO: 9660 - protein, 10 aa, Homo Sapiens
SLFTCEPITV

SEQ ID NO: 9661 - protein, 10 aa, Homo Sapiens
SLFVFIPMVV

SEQ ID NO: 9662 - protein, 10 aa, Homo Sapiens
SLFYRDIISI

SEQ ID NO: 9663 - protein, 10 aa, Homo Sapiens
SLIGVSFNSV

SEQ ID NO: 9664 - protein, 10 aa, Homo Sapiens
SLINVGLISV

SEQ ID NO: 9665 - protein, 10 aa, Homo Sapiens
SLIRFPLMTI

SEQ ID NO: 9666 - protein, 10 aa, Homo Sapiens
SLISNPPAMI

SEQ ID NO: 9667 - protein, 10 aa, Homo Sapiens
SLKAPSIATI

SEQ ID NO: 9668 - protein, 10 aa, Homo Sapiens
SLKSIIGIGV

SEQ ID NO: 9669 - protein, 10 aa, Homo Sapiens
SLKTPEIQKV

SEQ ID NO: 9670 - protein, 10 aa, Homo Sapiens
SLLDRFLATV

SEQ ID NO: 9671 - protein, 10 aa, Homo Sapiens
SLLGGDVVSV

SEQ ID NO: 9672 - protein, 10 aa, Homo Sapiens
SLMDHTIPEV

SEQ ID NO: 9673 - protein, 10 aa, Homo Sapiens
SLMTKEISSV

SEQ ID NO: 9674 - protein, 10 aa, Homo Sapiens
SLNPRKLIEV

SEQ ID NO: 9675 - protein, 10 aa, Homo Sapiens
SLPDFGISYV

SEQ ID NO: 9676 - protein, 10 aa, Homo Sapiens
SLQESILAQV

SEQ ID NO: 9677 - protein, 10 aa, Homo Sapiens
SLRPAVLTGV

SEQ ID NO: 9678 - protein, 10 aa, Homo Sapiens
SLRPSVLTSV

SEQ ID NO: 9679 - protein, 10 aa, Homo Sapiens
SLSELQISYV

SEQ ID NO: 9680 - protein, 10 aa, Homo Sapiens
SLVGQHILSV

SEQ ID NO: 9681 - protein, 10 aa, Homo Sapiens
SLVSFIPLNI

SEQ ID NO: 9682 - protein, 10 aa, Homo Sapiens
SLWSSILSEV

SEQ ID NO: 9683 - protein, 10 aa, Homo Sapiens
SLYALHVKAA

SEQ ID NO: 9684 - protein, 10 aa, Homo Sapiens
SLYDNKIQSL

SEQ ID NO: 9685 - protein, 10 aa, Homo Sapiens
SLYDYNPNLA

SEQ ID NO: 9686 - protein, 10 aa, Homo Sapiens
SLYKDAMQYA

SEQ ID NO: 9687 - protein, 10 aa, Homo Sapiens
SLYQGLMRTA

SEQ ID NO: 9688 - protein, 10 aa, Homo Sapiens
SLYSNFLDTL

SEQ ID NO: 9689 - protein, 10 aa, Homo Sapiens
SMIDPPRAAV

SEQ ID NO: 9690 - protein, 10 aa, Homo Sapiens
SMLPATPWGV

SEQ ID NO: 9691 - protein, 10 aa, Homo Sapiens
SMYGVDLHHA

SEQ ID NO: 9692 - protein, 10 aa, Homo Sapiens
SMYGVDLHKA

SEQ ID NO: 9693 - protein, 10 aa, Homo Sapiens
SMYPIALTRA

SEQ ID NO: 9694 - protein, 10 aa, Homo Sapiens
SMYPPHPLTA

SEQ ID NO: 9695 - protein, 10 aa, Homo Sapiens
SMYPTRIEGA

SEQ ID NO: 9696 - protein, 10 aa, Homo Sapiens
SQYDYILPQV

SEQ ID NO: 9697 - protein, 10 aa, Homo Sapiens
SVFDYSINSV

SEQ ID NO: 9698 - protein, 10 aa, Homo Sapiens
SVFERALSSV

SEQ ID NO: 9699 - protein, 10 aa, Homo Sapiens
SVFPNNVVFV

SEQ ID NO: 9700 - protein, 10 aa, Homo Sapiens
SVKDDSILSV

SEQ ID NO: 9701 - protein, 10 aa, Homo Sapiens
SVKDGTILKV

SEQ ID NO: 9702 - protein, 10 aa, Homo Sapiens
SVYKNVILQV

SEQ ID NO: 9703 - protein, 10 aa, Homo Sapiens
TIKSGDLEYV

SEQ ID NO: 9704 - protein, 10 aa, Homo Sapiens
TIPDFIFANV

SEQ ID NO: 9705 - protein, 10 aa, Homo Sapiens
TLATDILMGV

SEQ ID NO: 9706 - protein, 10 aa, Homo Sapiens
TLFGKAILRI

SEQ ID NO: 9707 - protein, 10 aa, Homo Sapiens
TLFPGKVHSL

SEQ ID NO: 9708 - protein, 10 aa, Homo Sapiens
TLFPKDVQLA

SEQ ID NO: 9709 - protein, 10 aa, Homo Sapiens
TLFPVRLLVA

SEQ ID NO: 9710 - protein, 10 aa, Homo Sapiens
TLFSGLLLGL

SEQ ID NO: 9711 - protein, 10 aa, Homo Sapiens
TLHSRFLEGV

SEQ ID NO: 9712 - protein, 10 aa, Homo Sapiens
TLIEDEIATI

SEQ ID NO: 9713 - protein, 10 aa, Homo Sapiens
TLIEKTMQNV

SEQ ID NO: 9714 - protein, 10 aa, Homo Sapiens
TLIGEIFNSV

SEQ ID NO: 9715 - protein, 10 aa, Homo Sapiens
TLIGGLLLHV

SEQ ID NO: 9716 - protein, 10 aa, Homo Sapiens
TLIQYIRPVF

SEQ ID NO: 9717 - protein, 10 aa, Homo Sapiens
TLKEDPVLQV

SEQ ID NO: 9718 - protein, 10 aa, Homo Sapiens
TLKEDWIAYI

SEQ ID NO: 9719 - protein, 10 aa, Homo Sapiens
TLKEEWIAYI

SEQ ID NO: 9720 - protein, 10 aa, Homo Sapiens
TLKGGTILGT

SEQ ID NO: 9721 - protein, 10 aa, Homo Sapiens
TLMDMRLSQV

SEQ ID NO: 9722 - protein, 10 aa, Homo Sapiens
TLNEKLTALE

SEQ ID NO: 9723 - protein, 10 aa, Homo Sapiens
TLPERPLTEV

SEQ ID NO: 9724 - protein, 10 aa, Homo Sapiens
TLPSFSPSAA

SEQ ID NO: 9725 - protein, 10 aa, Homo Sapiens
TLRDAVPATL

SEQ ID NO: 9726 - protein, 10 aa, Homo Sapiens
TLRPSLLPLH

SEQ ID NO: 9727 - protein, 10 aa, Homo Sapiens
TLYKDLKPVL

SEQ ID NO: 9728 - protein, 10 aa, Homo Sapiens
TLYKEILTRA

SEQ ID NO: 9729 - protein, 10 aa, Homo Sapiens
TLYPLHILFV

SEQ ID NO: 9730 - protein, 10 aa, Homo Sapiens
TMITKRLAQV

SEQ ID NO: 9731 - protein, 10 aa, Homo Sapiens
TMKNPSIVGV

SEQ ID NO: 9732 - protein, 10 aa, Homo Sapiens
TMYPGLPSRL

SEQ ID NO: 9733 - protein, 10 aa, Homo Sapiens
TVAPFNPTVC

SEQ ID NO: 9734 - protein, 10 aa, Homo Sapiens
TVFGTALNYV

SEQ ID NO: 9735 - protein, 10 aa, Homo Sapiens
TVFPAGLANV

SEQ ID NO: 9736 - protein, 10 aa, Homo Sapiens
TVFTDHMLTV

SEQ ID NO: 9737 - protein, 10 aa, Homo Sapiens
TVLPVPPLSV

SEQ ID NO: 9738 - protein, 10 aa, Homo Sapiens
TVRPGELLAV

SEQ ID NO: 9739 - protein, 10 aa, Homo Sapiens
TVYGGYLCSV

SEQ ID NO: 9740 - protein, 10 aa, Homo Sapiens
VAATSLLDTL

SEQ ID NO: 9741 - protein, 10 aa, Homo Sapiens
VAPGKDLTKT

SEQ ID NO: 9742 - protein, 10 aa, Homo Sapiens
VLFDDELLMV

SEQ ID NO: 9743 - protein, 10 aa, Homo Sapiens
VLFDVSIMAV

SEQ ID NO: 9744 - protein, 10 aa, Homo Sapiens
VLFEGRTVQL

SEQ ID NO: 9745 - protein, 10 aa, Homo Sapiens
VLFEHAVGYA

SEQ ID NO: 9746 - protein, 10 aa, Homo Sapiens
VLFEKEVNEV

SEQ ID NO: 9747 - protein, 10 aa, Homo Sapiens
VLFENQLLQI

SEQ ID NO: 9748 - protein, 10 aa, Homo Sapiens
VLFGAVITGA

SEQ ID NO: 9749 - protein, 10 aa, Homo Sapiens
VLFGGLIGSA

SEQ ID NO: 9750 - protein, 10 aa, Homo Sapiens
VLFGQVVRGL

SEQ ID NO: 9751 - protein, 10 aa, Homo Sapiens
VLFLDAVREV

SEQ ID NO: 9752 - protein, 10 aa, Homo Sapiens
VLFMKILSGL

SEQ ID NO: 9753 - protein, 10 aa, Homo Sapiens
VLFQEALWHV

SEQ ID NO: 9754 - protein, 10 aa, Homo Sapiens
VLFSCHVRKV

SEQ ID NO: 9755 - protein, 10 aa, Homo Sapiens
VLFSGSLKAI

SEQ ID NO: 9756 - protein, 10 aa, Homo Sapiens
VLFSSHVRKV

SEQ ID NO: 9757 - protein, 10 aa, Homo Sapiens
VLIEGSINSV

SEQ ID NO: 9758 - protein, 10 aa, Homo Sapiens
VLIKNLLVSV

SEQ ID NO: 9759 - protein, 10 aa, Homo Sapiens
VLKPGGLLKV

SEQ ID NO: 9760 - protein, 10 aa, Homo Sapiens
VLKSGNPRGL

SEQ ID NO: 9761 - protein, 10 aa, Homo Sapiens
VLNNAPILCV

SEQ ID NO: 9762 - protein, 10 aa, Homo Sapiens
VLPNFLPYNV

SEQ ID NO: 9763 - protein, 10 aa, Homo Sapiens
VLPRFQPRVL

SEQ ID NO: 9764 - protein, 10 aa, Homo Sapiens
VLRDNIQGIT

SEQ ID NO: 9765 - protein, 10 aa, Homo Sapiens
VLRESGLKYV

SEQ ID NO: 9766 - protein, 10 aa, Homo Sapiens
VLRSLPLVQV

SEQ ID NO: 9767 - protein, 10 aa, Homo Sapiens
VLSSLTPAKV

SEQ ID NO: 9768 - protein, 10 aa, Homo Sapiens
VLYEPPPLSA

SEQ ID NO: 9769 - protein, 10 aa, Homo Sapiens
VLYNQRVEEI

SEQ ID NO: 9770 - protein, 10 aa, Homo Sapiens
VLYPASPHGV

SEQ ID NO: 9771 - protein, 10 aa, Homo Sapiens
VLYPHEPTAV

SEQ ID NO: 9772 - protein, 10 aa, Homo Sapiens
VLYSPGPKQA

SEQ ID NO: 9773 - protein, 10 aa, Homo Sapiens
VMAGFAFSCL

SEQ ID NO: 9774 - protein, 10 aa, Homo Sapiens
VMAPHEPLVV

SEQ ID NO: 9775 - protein, 10 aa, Homo Sapiens
VMFGGKQVVV

SEQ ID NO: 9776 - protein, 10 aa, Homo Sapiens
VMFRTPLASV

SEQ ID NO: 9777 - protein, 10 aa, Homo Sapiens
VMIAGKVAVV

SEQ ID NO: 9778 - protein, 10 aa, Homo Sapiens
VMLESPPKGV

SEQ ID NO: 9779 - protein, 10 aa, Homo Sapiens
VMMENKPMTL

SEQ ID NO: 9780 - protein, 10 aa, Homo Sapiens
VQADFKPATL

SEQ ID NO: 9781 - protein, 10 aa, Homo Sapiens
WITDKELENV

SEQ ID NO: 9782 - protein, 10 aa, Homo Sapiens
WLKEHVEPVF

SEQ ID NO: 9783 - protein, 10 aa, Homo Sapiens
WLKGEFVTTV

SEQ ID NO: 9784 - protein, 10 aa, Homo Sapiens
WLRLQPLTSA

SEQ ID NO: 9785 - protein, 10 aa, Homo Sapiens
YIFGGYNARL

SEQ ID NO: 9786 - protein, 10 aa, Homo Sapiens
YIFNKSVASL

SEQ ID NO: 9787 - protein, 10 aa, Homo Sapiens
YIMDNKLAQI

SEQ ID NO: 9788 - protein, 10 aa, Homo Sapiens
YIMEGVKATI

SEQ ID NO: 9789 - protein, 10 aa, Homo Sapiens
YIRGGIVSQV

SEQ ID NO: 9790 - protein, 10 aa, Homo Sapiens
YISDINPRSV

SEQ ID NO: 9791 - protein, 10 aa, Homo Sapiens
YIYDKDMEII

SEQ ID NO: 9792 - protein, 10 aa, Homo Sapiens
YIYSSKIVRV

SEQ ID NO: 9793 - protein, 10 aa, Homo Sapiens
YLAEFFVNEA

SEQ ID NO: 9794 - protein, 10 aa, Homo Sapiens
YLAELVTPIL

SEQ ID NO: 9795 - protein, 10 aa, Homo Sapiens
YLAPHVRTLY

SEQ ID NO: 9796 - protein, 10 aa, Homo Sapiens
YLATVTGIAV

SEQ ID NO: 9797 - protein, 10 aa, Homo Sapiens
YLDGHLITTV

SEQ ID NO: 9798 - protein, 10 aa, Homo Sapiens
YLEERRVKEV

SEQ ID NO: 9799 - protein, 10 aa, Homo Sapiens
YLFAKNVRSL

SEQ ID NO: 9800 - protein, 10 aa, Homo Sapiens
YLFDIQLPNI

SEQ ID NO: 9801 - protein, 10 aa, Homo Sapiens
YLFDLPLKVL

SEQ ID NO: 9802 - protein, 10 aa, Homo Sapiens
YLFDRNGVCL

SEQ ID NO: 9803 - protein, 10 aa, Homo Sapiens
YLFGERLLEC

SEQ ID NO: 9804 - protein, 10 aa, Homo Sapiens
YLFGKEMYQV

SEQ ID NO: 9805 - protein, 10 aa, Homo Sapiens
YLFITPPKTV

SEQ ID NO: 9806 - protein, 10 aa, Homo Sapiens
YLFPGIPELL

SEQ ID NO: 9807 - protein, 10 aa, Homo Sapiens
YLIDVKFNGT

SEQ ID NO: 9808 - protein, 10 aa, Homo Sapiens
YLILHLISTV

SEQ ID NO: 9809 - protein, 10 aa, Homo Sapiens
YLINFEIRSL

SEQ ID NO: 9810 - protein, 10 aa, Homo Sapiens
YLIQSVPAEL

SEQ ID NO: 9811 - protein, 10 aa, Homo Sapiens
YLKDGPYITA

SEQ ID NO: 9812 - protein, 10 aa, Homo Sapiens
YLKELIEPVL

SEQ ID NO: 9813 - protein, 10 aa, Homo Sapiens
YLKGRTIIGV

SEQ ID NO: 9814 - protein, 10 aa, Homo Sapiens
YLKKEIGQHV

SEQ ID NO: 9815 - protein, 10 aa, Homo Sapiens
YLLECPSAEV

SEQ ID NO: 9816 - protein, 10 aa, Homo Sapiens
YLLGRELMAL

SEQ ID NO: 9817 - protein, 10 aa, Homo Sapiens
YLLPERPATL

SEQ ID NO: 9818 - protein, 10 aa, Homo Sapiens
YLLPERPSYL

SEQ ID NO: 9819 - protein, 10 aa, Homo Sapiens
YLLPGAPADL

SEQ ID NO: 9820 - protein, 10 aa, Homo Sapiens
YLLQEPPRTV

SEQ ID NO: 9821 - protein, 10 aa, Homo Sapiens
YLMEGSYNKV

SEQ ID NO: 9822 - protein, 10 aa, Homo Sapiens
YLNEIKDSVV

SEQ ID NO: 9823 - protein, 10 aa, Homo Sapiens
YLNHIEPLKI

SEQ ID NO: 9824 - protein, 10 aa, Homo Sapiens
YLNKNALTTL

SEQ ID NO: 9825 - protein, 10 aa, Homo Sapiens
YLPDFRFTPF

SEQ ID NO: 9826 - protein, 10 aa, Homo Sapiens
YLRLPEVQGV

SEQ ID NO: 9827 - protein, 10 aa, Homo Sapiens
YLSDIPLHDA

SEQ ID NO: 9828 - protein, 10 aa, Homo Sapiens
YLSFLPLQTV

SEQ ID NO: 9829 - protein, 10 aa, Homo Sapiens
YLTEVFLHVV

SEQ ID NO: 9830 - protein, 10 aa, Homo Sapiens
YLVSKELMSL

SEQ ID NO: 9831 - protein, 10 aa, Homo Sapiens
YLYGQTTTYL

SEQ ID NO: 9832 - protein, 10 aa, Homo Sapiens
YLYPIKNLEM

SEQ ID NO: 9833 - protein, 10 aa, Homo Sapiens
YLYPSTLVRT

SEQ ID NO: 9834 - protein, 10 aa, Homo Sapiens
YLYSNKLQSL

SEQ ID NO: 9835 - protein, 10 aa, Homo Sapiens
YMFCELVTGV

SEQ ID NO: 9836 - protein, 10 aa, Homo Sapiens
YMFEEVPIVI

SEQ ID NO: 9837 - protein, 10 aa, Homo Sapiens
YMFPDTMLQA

SEQ ID NO: 9838 - protein, 10 aa, Homo Sapiens
YMIDNVILLI

SEQ ID NO: 9839 - protein, 10 aa, Homo Sapiens
YMKSEDPLFV

SEQ ID NO: 9840 - protein, 10 aa, Homo Sapiens
YMVSKELRNV

SEQ ID NO: 9841 - protein, 10 aa, Homo Sapiens
YQPDWRFMES

SEQ ID NO: 9842 - protein, 10 aa, Homo Sapiens
YQYMHETITV

SEQ ID NO: 9843 - protein, 10 aa, Homo Sapiens
YTYEELLNRV

SEQ ID NO: 9844 - protein, 10 aa, Homo Sapiens
YTYEFDFSKV

SEQ ID NO: 9845 - protein, 10 aa, Homo Sapiens
YTYESKMAFL

SEQ ID NO: 9846 - protein, 10 aa, Homo Sapiens
YVAGIIPLAV

SEQ ID NO: 9847 - protein, 10 aa, Homo Sapiens
YVFDGKPPQL

SEQ ID NO: 9848 - protein, 10 aa, Homo Sapiens
YVFEGKMLEA

SEQ ID NO: 9849 - protein, 10 aa, Homo Sapiens
YVFENTVATV

SEQ ID NO: 9850 - protein, 10 aa, Homo Sapiens
YVYPQRLNFV

SEQ ID NO: 9851 - protein, 11 aa, Homo Sapiens
ALAPLAIPSAA

SEQ ID NO: 9852 - protein, 11 aa, Homo Sapiens
ALFPHLLQPVL

SEQ ID NO: 9853 - protein, 11 aa, Homo Sapiens
ALGEEALLRYV

SEQ ID NO: 9854 - protein, 11 aa, Homo Sapiens
ALIEAEKVAQV

SEQ ID NO: 9855 - protein, 11 aa, Homo Sapiens
ALKDKIEKAVV

SEQ ID NO: 9856 - protein, 11 aa, Homo Sapiens
ALKEFNEDGAL

SEQ ID NO: 9857 - protein, 11 aa, Homo Sapiens
ALNEITESGRI

SEQ ID NO: 9858 - protein, 11 aa, Homo Sapiens
AMASLGALALL

SEQ ID NO: 9859 - protein, 11 aa, Homo Sapiens
AQADGTLITCV

SEQ ID NO: 9860 - protein, 11 aa, Homo Sapiens
CLYPHIDKQYL

SEQ ID NO: 9861 - protein, 11 aa, Homo Sapiens
FAYDGKDYLTL

SEQ ID NO: 9862 - protein, 11 aa, Homo Sapiens
FIIQGLRSVGA

SEQ ID NO: 9863 - protein, 11 aa, Homo Sapiens
FISAVREGSLV

SEQ ID NO: 9864 - protein, 11 aa, Homo Sapiens
FLAEEKHLHVL

SEQ ID NO: 9865 - protein, 11 aa, Homo Sapiens
FLAPDNSLLLA

SEQ ID NO: 9866 - protein, 11 aa, Homo Sapiens
FLASESLIKQI

SEQ ID NO: 9867 - protein, 11 aa, Homo Sapiens
FLFDGSPTYVL

SEQ ID NO: 9868 - protein, 11 aa, Homo Sapiens
FLIEPEHVNTV

SEQ ID NO: 9869 - protein, 11 aa, Homo Sapiens
FLPETRIMTSV

SEQ ID NO: 9870 - protein, 11 aa, Homo Sapiens
FLPPEHTIVYI

SEQ ID NO: 9871 - protein, 11 aa, Homo Sapiens
FLSEEGGHVAV

SEQ ID NO: 9872 - protein, 11 aa, Homo Sapiens
FLTDSNNIKEV

SEQ ID NO: 9873 - protein, 11 aa, Homo Sapiens
FVRDGQLQPVL

SEQ ID NO: 9874 - protein, 11 aa, Homo Sapiens
GLADASLLKKV

SEQ ID NO: 9875 - protein, 11 aa, Homo Sapiens
GLADNTVIAKV

SEQ ID NO: 9876 - protein, 11 aa, Homo Sapiens
GLFAHPSLWQL

SEQ ID NO: 9877 - protein, 11 aa, Homo Sapiens
GLFGKTVPKTV

SEQ ID NO: 9878 - protein, 11 aa, Homo Sapiens
GLIDIENPNRV

SEQ ID NO: 9879 - protein, 11 aa, Homo Sapiens
GLQIGDKIMQV

SEQ ID NO: 9880 - protein, 11 aa, Homo Sapiens
GMIDRQGLLHV

SEQ ID NO: 9881 - protein, 11 aa, Homo Sapiens
GVAESIHLWEV

SEQ ID NO: 9882 - protein, 11 aa, Homo Sapiens
HVYDGKFLARV

SEQ ID NO: 9883 - protein, 11 aa, Homo Sapiens
ILVGGGALATV

SEQ ID NO: 9884 - protein, 11 aa, Homo Sapiens
ITQIEHEVSSS

SEQ ID NO: 9885 - protein, 11 aa, Homo Sapiens
KLFPGFEIETV

SEQ ID NO: 9886 - protein, 11 aa, Homo Sapiens
KLNDMEPSKAV

SEQ ID NO: 9887 - protein, 11 aa, Homo Sapiens
KLPMSIIIVGV

SEQ ID NO: 9888 - protein, 11 aa, Homo Sapiens
KLYQEVEIASV

SEQ ID NO: 9889 - protein, 11 aa, Homo Sapiens
KMFDLNGDGEV

SEQ ID NO: 9890 - protein, 11 aa, Homo Sapiens
KVAGFNLLMTL

SEQ ID NO: 9891 - protein, 11 aa, Homo Sapiens
LLIDLSRASTL

SEQ ID NO: 9892 - protein, 11 aa, Homo Sapiens
LLLPDYYLVTV

SEQ ID NO: 9893 - protein, 11 aa, Homo Sapiens
LLYEDIGTSRV

SEQ ID NO: 9894 - protein, 11 aa, Homo Sapiens
LLYLGPHIASV

SEQ ID NO: 9895 - protein, 11 aa, Homo Sapiens
LLYPHQVPLVL

SEQ ID NO: 9896 - protein, 11 aa, Homo Sapiens
LMRFLPTEAEV

SEQ ID NO: 9897 - protein, 11 aa, Homo Sapiens
LQENLSEVSQV

SEQ ID NO: 9898 - protein, 11 aa, Homo Sapiens
LVYPEELKPVL

SEQ ID NO: 9899 - protein, 11 aa, Homo Sapiens
MLFENMGAYTV

SEQ ID NO: 9900 - protein, 11 aa, Homo Sapiens
MLYGTGPLCSV

SEQ ID NO: 9901 - protein, 11 aa, Homo Sapiens
NLAGENILNPL

SEQ ID NO: 9902 - protein, 11 aa, Homo Sapiens
NLFDISQSAQT

SEQ ID NO: 9903 - protein, 11 aa, Homo Sapiens
NLFNPSSKSSV

SEQ ID NO: 9904 - protein, 11 aa, Homo Sapiens
QLKEFDGKSLV

SEQ ID NO: 9905 - protein, 11 aa, Homo Sapiens
RIFGESIMIGV

SEQ ID NO: 9906 - protein, 11 aa, Homo Sapiens
RLAELEGREQV

SEQ ID NO: 9907 - protein, 11 aa, Homo Sapiens
RLAPAVLLTGL

SEQ ID NO: 9908 - protein, 11 aa, Homo Sapiens
RLFEMGFAEQL

SEQ ID NO: 9909 - protein, 11 aa, Homo Sapiens
RLPPDTLLQQV

SEQ ID NO: 9910 - protein, 11 aa, Homo Sapiens
RLPPEGILHNV

SEQ ID NO: 9911 - protein, 11 aa, Homo Sapiens
RLQETEGMVAV

SEQ ID NO: 9912 - protein, 11 aa, Homo Sapiens
RMANRDLLSSV

SEQ ID NO: 9913 - protein, 11 aa, Homo Sapiens
RMFDMGFEYQV

SEQ ID NO: 9914 - protein, 11 aa, Homo Sapiens
RVFGSQNLTTV

SEQ ID NO: 9915 - protein, 11 aa, Homo Sapiens
SLAEEKLQASV

SEQ ID NO: 9916 - protein, 11 aa, Homo Sapiens
SLFGSSRVQYV

SEQ ID NO: 9917 - protein, 11 aa, Homo Sapiens
SLFPHNPQFIG

SEQ ID NO: 9918 - protein, 11 aa, Homo Sapiens
SLFQGVEFHYV

SEQ ID NO: 9919 - protein, 11 aa, Homo Sapiens
SLIDMRGIETV

SEQ ID NO: 9920 - protein, 11 aa, Homo Sapiens
SLINLPANSTI

SEQ ID NO: 9921 - protein, 11 aa, Homo Sapiens
SLIPGPALLLV

SEQ ID NO: 9922 - protein, 11 aa, Homo Sapiens
SLMEESGICKV

SEQ ID NO: 9923 - protein, 11 aa, Homo Sapiens
SLRDGSVLQTV

SEQ ID NO: 9924 - protein, 11 aa, Homo Sapiens
SLVENIERLKV

SEQ ID NO: 9925 - protein, 11 aa, Homo Sapiens
SMAPGLVIQAV

SEQ ID NO: 9926 - protein, 11 aa, Homo Sapiens
SVAEGRALMSV

SEQ ID NO: 9927 - protein, 11 aa, Homo Sapiens
SVFTETPSPVL

SEQ ID NO: 9928 - protein, 11 aa, Homo Sapiens
TIIDLPGITRV

SEQ ID NO: 9929 - protein, 11 aa, Homo Sapiens
TLFPAIEKNIV

SEQ ID NO: 9930 - protein, 11 aa, Homo Sapiens
TLFPEEVIATI

SEQ ID NO: 9931 - protein, 11 aa, Homo Sapiens
TLGVKQLIVGV

SEQ ID NO: 9932 - protein, 11 aa, Homo Sapiens
TLIDLPGITKV

SEQ ID NO: 9933 - protein, 11 aa, Homo Sapiens
TLIGFLRSIDQ

SEQ ID NO: 9934 - protein, 11 aa, Homo Sapiens
TLLLTQLSLLQ

SEQ ID NO: 9935 - protein, 11 aa, Homo Sapiens
TLVDLSKMQNV

SEQ ID NO: 9936 - protein, 11 aa, Homo Sapiens
TLYDIAHTPGV

SEQ ID NO: 9937 - protein, 11 aa, Homo Sapiens
TMAKESSIIGV

SEQ ID NO: 9938 - protein, 11 aa, Homo Sapiens
TMFPGVLLPLL

SEQ ID NO: 9939 - protein, 11 aa, Homo Sapiens
VLYENPNLKGV

SEQ ID NO: 9940 - protein, 11 aa, Homo Sapiens
VLYPHEPTAVF

SEQ ID NO: 9941 - protein, 11 aa, Homo Sapiens
VMQDPEFLQSV

SEQ ID NO: 9942 - protein, 11 aa, Homo Sapiens
WLANEGLITRL

SEQ ID NO: 9943 - protein, 11 aa, Homo Sapiens
WLIEDGKVVTV

SEQ ID NO: 9944 - protein, 11 aa, Homo Sapiens
YAFDEAFVREV

SEQ ID NO: 9945 - protein, 11 aa, Homo Sapiens
YIFPLDDKAAV

SEQ ID NO: 9946 - protein, 11 aa, Homo Sapiens
YIMDLRTESLI

SEQ ID NO: 9947 - protein, 11 aa, Homo Sapiens
YLFITPPKTVL

SEQ ID NO: 9948 - protein, 11 aa, Homo Sapiens
YLFNVSDSSAL

SEQ ID NO: 9949 - protein, 11 aa, Homo Sapiens
YLLNDASLISV

SEQ ID NO: 9950 - protein, 11 aa, Homo Sapiens
YLTELLTTQRV

SEQ ID NO: 9951 - protein, 11 aa, Homo Sapiens
YMGEEKLIASV

SEQ ID NO: 9952 - protein, 11 aa, Homo Sapiens
YQFDSALLPAV

SEQ ID NO: 9953 - protein, 11 aa, Homo Sapiens
YVFENTVATVM

SEQ ID NO: 9954 - protein, 8 aa, Homo Sapiens
ALFKAWAL

SEQ ID NO: 9955 - protein, 8 aa, Homo Sapiens
ALGFVYKL

SEQ ID NO: 9956 - protein, 8 aa, Homo Sapiens
EKSPLQTI

SEQ ID NO: 9957 - protein, 8 aa, Homo Sapiens
FLFRPWDV

SEQ ID NO: 9958 - protein, 8 aa, Homo Sapiens
FLGAIFQL

SEQ ID NO: 9959 - protein, 8 aa, Homo Sapiens
FLGKIDEL

SEQ ID NO: 9960 - protein, 8 aa, Homo Sapiens
FLGKIYQI

SEQ ID NO: 9961 - protein, 8 aa, Homo Sapiens
GLFRLWAL

SEQ ID NO: 9962 - protein, 8 aa, Homo Sapiens
GLGPTFKL

SEQ ID NO: 9963 - protein, 8 aa, Homo Sapiens
GLGRIIEL

SEQ ID NO: 9964 - protein, 8 aa, Homo Sapiens
ILGPTFTL

SEQ ID NO: 9965 - protein, 8 aa, Homo Sapiens
ILGSVTFL

SEQ ID NO: 9966 - protein, 8 aa, Homo Sapiens
LMEHIHKL

SEQ ID NO: 9967 - protein, 8 aa, Homo Sapiens
LSEKLARL

SEQ ID NO: 9968 - protein, 8 aa, Homo Sapiens
QLAKEVLI

SEQ ID NO: 9969 - protein, 8 aa, Homo Sapiens
SIAVKFLA

SEQ ID NO: 9970 - protein, 8 aa, Homo Sapiens
SIFKAWAV

SEQ ID NO: 9971 - protein, 8 aa, Homo Sapiens
SLFKIWLV

SEQ ID NO: 9972 - protein, 8 aa, Homo Sapiens
SLGKIFAL

SEQ ID NO: 9973 - protein, 8 aa, Homo Sapiens
SLGKVFGV

SEQ ID NO: 9974 - protein, 8 aa, Homo Sapiens
TLGQIYYL

SEQ ID NO: 9975 - protein, 8 aa, Homo Sapiens
VLGKIWKL

SEQ ID NO: 9976 - protein, 8 aa, Homo Sapiens
VLPRLHQL

SEQ ID NO: 9977 - protein, 8 aa, Homo Sapiens
VMGKIFAV

SEQ ID NO: 9978 - protein, 8 aa, Homo Sapiens
YLGKVLEL

SEQ ID NO: 9979 - protein, 8 aa, Homo Sapiens
YLNFIRGV

SEQ ID NO: 9980 - protein, 9 aa, Homo Sapiens
AAKSWVFGV

SEQ ID NO: 9981 - protein, 9 aa, Homo Sapiens
AALFKAWAL

SEQ ID NO: 9982 - protein, 9 aa, Homo Sapiens
AALPNVYEV

SEQ ID NO: 9983 - protein, 9 aa, Homo Sapiens
AALSKFIAV

SEQ ID NO: 9984 - protein, 9 aa, Homo Sapiens
AALSKIFAV

SEQ ID NO: 9985 - protein, 9 aa, Homo Sapiens
AALSWQYLT

SEQ ID NO: 9986 - protein, 9 aa, Homo Sapiens
AAMPRIYEL

SEQ ID NO: 9987 - protein, 9 aa, Homo Sapiens
AASDFIFLV

SEQ ID NO: 9988 - protein, 9 aa, Homo Sapiens
ADASLLKKV

SEQ ID NO: 9989 - protein, 9 aa, Homo Sapiens
AGHWLGLLL

SEQ ID NO: 9990 - protein, 9 aa, Homo Sapiens
AGLSWYHGV

SEQ ID NO: 9991 - protein, 9 aa, Homo Sapiens
AIIEYMPLL

SEQ ID NO: 9992 - protein, 9 aa, Homo Sapiens
AIIPYIPTL

SEQ ID NO: 9993 - protein, 9 aa, Homo Sapiens
AILKYIETL

SEQ ID NO: 9994 - protein, 9 aa, Homo Sapiens
AILLEIPRL

SEQ ID NO: 9995 - protein, 9 aa, Homo Sapiens
AILPQLFMV

SEQ ID NO: 9996 - protein, 9 aa, Homo Sapiens
AILPSIFCL

SEQ ID NO: 9997 - protein, 9 aa, Homo Sapiens
AILTTLIHL

SEQ ID NO: 9998 - protein, 9 aa, Homo Sapiens
AIMATIPLL

SEQ ID NO: 9999 - protein, 9 aa, Homo Sapiens
AIMDIVIKV

SEQ ID NO: 10000 - protein, 9 aa, Homo Sapiens
AIMDLLLRL

SEQ ID NO: 10001 - protein, 9 aa, Homo Sapiens
AIMKIISAL

SEQ ID NO: 10002 - protein, 9 aa, Homo Sapiens
AIMNVLAEL

SEQ ID NO: 10003 - protein, 9 aa, Homo Sapiens
AIMPTIFNL

SEQ ID NO: 10004 - protein, 9 aa, Homo Sapiens
AIQDKLFQV

SEQ ID NO: 10005 - protein, 9 aa, Homo Sapiens
AIQEQITRV

SEQ ID NO: 10006 - protein, 9 aa, Homo Sapiens
ALAAALAHI

SEQ ID NO: 10007 - protein, 9 aa, Homo Sapiens
ALACWEWLL

SEQ ID NO: 10008 - protein, 9 aa, Homo Sapiens
ALADFAELI

SEQ ID NO: 10009 - protein, 9 aa, Homo Sapiens
ALADFLPVM

SEQ ID NO: 10010 - protein, 9 aa, Homo Sapiens
ALADLLLAL

SEQ ID NO: 10011 - protein, 9 aa, Homo Sapiens
ALALWKELL

SEQ ID NO: 10012 - protein, 9 aa, Homo Sapiens
ALANQIPTV

SEQ ID NO: 10013 - protein, 9 aa, Homo Sapiens
ALAPAPPQV

SEQ ID NO: 10014 - protein, 9 aa, Homo Sapiens
ALAPLLSSL

SEQ ID NO: 10015 - protein, 9 aa, Homo Sapiens
ALAPYLDLL

SEQ ID NO: 10016 - protein, 9 aa, Homo Sapiens
ALAQRLLEV

SEQ ID NO: 10017 - protein, 9 aa, Homo Sapiens
ALARLVLRL

SEQ ID NO: 10018 - protein, 9 aa, Homo Sapiens
ALASVIKEL

SEQ ID NO: 10019 - protein, 9 aa, Homo Sapiens
ALASVIMGL

SEQ ID NO: 10020 - protein, 9 aa, Homo Sapiens
ALATHILSL

SEQ ID NO: 10021 - protein, 9 aa, Homo Sapiens
ALATKLLSL

SEQ ID NO: 10022 - protein, 9 aa, Homo Sapiens
ALATLIHQV

SEQ ID NO: 10023 - protein, 9 aa, Homo Sapiens
ALFDAQAQV

SEQ ID NO: 10024 - protein, 9 aa, Homo Sapiens
ALFEEVPEL

SEQ ID NO: 10025 - protein, 9 aa, Homo Sapiens
ALFEGKVQL

SEQ ID NO: 10026 - protein, 9 aa, Homo Sapiens
ALFETLIQL

SEQ ID NO: 10027 - protein, 9 aa, Homo Sapiens
ALFGIPMAL

SEQ ID NO: 10028 - protein, 9 aa, Homo Sapiens
ALFIRPFML

SEQ ID NO: 10029 - protein, 9 aa, Homo Sapiens
ALFISPALI

SEQ ID NO: 10030 - protein, 9 aa, Homo Sapiens
ALFPGVALL

SEQ ID NO: 10031 - protein, 9 aa, Homo Sapiens
ALFPRLPSI

SEQ ID NO: 10032 - protein, 9 aa, Homo Sapiens
ALFQHITAL

SEQ ID NO: 10033 - protein, 9 aa, Homo Sapiens
ALFQRPPLI

SEQ ID NO: 10034 - protein, 9 aa, Homo Sapiens
ALFSFLYHL

SEQ ID NO: 10035 - protein, 9 aa, Homo Sapiens
ALGEQVIAL

SEQ ID NO: 10036 - protein, 9 aa, Homo Sapiens
ALGGCVFYL

SEQ ID NO: 10037 - protein, 9 aa, Homo Sapiens
ALGKSPFQL

SEQ ID NO: 10038 - protein, 9 aa, Homo Sapiens
ALGNIVHGL

SEQ ID NO: 10039 - protein, 9 aa, Homo Sapiens
ALGPGVPHI

SEQ ID NO: 10040 - protein, 9 aa, Homo Sapiens
ALGQILPQL

SEQ ID NO: 10041 - protein, 9 aa, Homo Sapiens
ALHDILTEI

SEQ ID NO: 10042 - protein, 9 aa, Homo Sapiens
ALHDQLFYL

SEQ ID NO: 10043 - protein, 9 aa, Homo Sapiens
ALHSWFQTL

SEQ ID NO: 10044 - protein, 9 aa, Homo Sapiens
ALHWFLNQV

SEQ ID NO: 10045 - protein, 9 aa, Homo Sapiens
ALIEKLVEL

SEQ ID NO: 10046 - protein, 9 aa, Homo Sapiens
ALINNIVEI

SEQ ID NO: 10047 - protein, 9 aa, Homo Sapiens
ALINVLNAL

SEQ ID NO: 10048 - protein, 9 aa, Homo Sapiens
ALIPVINKL

SEQ ID NO: 10049 - protein, 9 aa, Homo Sapiens
ALIQQATTV

SEQ ID NO: 10050 - protein, 9 aa, Homo Sapiens
ALIRYLETM

SEQ ID NO: 10051 - protein, 9 aa, Homo Sapiens
ALITRIFGV

SEQ ID NO: 10052 - protein, 9 aa, Homo Sapiens
ALIVLIHLL

SEQ ID NO: 10053 - protein, 9 aa, Homo Sapiens
ALKDFVASI

SEQ ID NO: 10054 - protein, 9 aa, Homo Sapiens
ALKPDLVNV

SEQ ID NO: 10055 - protein, 9 aa, Homo Sapiens
ALLAELEKI

SEQ ID NO: 10056 - protein, 9 aa, Homo Sapiens
ALLAKILQI

SEQ ID NO: 10057 - protein, 9 aa, Homo Sapiens
ALLALLPEL

SEQ ID NO: 10058 - protein, 9 aa, Homo Sapiens
ALLARFPNL

SEQ ID NO: 10059 - protein, 9 aa, Homo Sapiens
ALLAYTLGV

SEQ ID NO: 10060 - protein, 9 aa, Homo Sapiens
ALLDIIRSL

SEQ ID NO: 10061 - protein, 9 aa, Homo Sapiens
ALLDKLYAL

SEQ ID NO: 10062 - protein, 9 aa, Homo Sapiens
ALLDQLHTL

SEQ ID NO: 10063 - protein, 9 aa, Homo Sapiens
ALLDRIVSV

SEQ ID NO: 10064 - protein, 9 aa, Homo Sapiens
ALLDSAHLL

SEQ ID NO: 10065 - protein, 9 aa, Homo Sapiens
ALLDWVTSV

SEQ ID NO: 10066 - protein, 9 aa, Homo Sapiens
ALLELLERL

SEQ ID NO: 10067 - protein, 9 aa, Homo Sapiens
ALLELLHEL

SEQ ID NO: 10068 - protein, 9 aa, Homo Sapiens
ALLEQVNAL

SEQ ID NO: 10069 - protein, 9 aa, Homo Sapiens
ALLERGYSL

SEQ ID NO: 10070 - protein, 9 aa, Homo Sapiens
ALLESRVNL

SEQ ID NO: 10071 - protein, 9 aa, Homo Sapiens
ALLETVNRL

SEQ ID NO: 10072 - protein, 9 aa, Homo Sapiens
ALLGILQHV

SEQ ID NO: 10073 - protein, 9 aa, Homo Sapiens
ALLGKLDAI

SEQ ID NO: 10074 - protein, 9 aa, Homo Sapiens
ALLGRLAEL

SEQ ID NO: 10075 - protein, 9 aa, Homo Sapiens
ALLKVNQEL

SEQ ID NO: 10076 - protein, 9 aa, Homo Sapiens
ALLNILSEV

SEQ ID NO: 10077 - protein, 9 aa, Homo Sapiens
ALLNLLPML

SEQ ID NO: 10078 - protein, 9 aa, Homo Sapiens
ALLNTINYL

SEQ ID NO: 10079 - protein, 9 aa, Homo Sapiens
ALLPDLPAL

SEQ ID NO: 10080 - protein, 9 aa, Homo Sapiens
ALLPELSVL

SEQ ID NO: 10081 - protein, 9 aa, Homo Sapiens
ALLPLLERV

SEQ ID NO: 10082 - protein, 9 aa, Homo Sapiens
ALLPSSPTL

SEQ ID NO: 10083 - protein, 9 aa, Homo Sapiens
ALLPWTCAS

SEQ ID NO: 10084 - protein, 9 aa, Homo Sapiens
ALLPYFVYV

SEQ ID NO: 10085 - protein, 9 aa, Homo Sapiens
ALLQALMEL

SEQ ID NO: 10086 - protein, 9 aa, Homo Sapiens
ALLQEIVNI

SEQ ID NO: 10087 - protein, 9 aa, Homo Sapiens
ALLQRLEAL

SEQ ID NO: 10088 - protein, 9 aa, Homo Sapiens
ALLRLLPGL

SEQ ID NO: 10089 - protein, 9 aa, Homo Sapiens
ALLRSLVGL

SEQ ID NO: 10090 - protein, 9 aa, Homo Sapiens
ALLSALHWL

SEQ ID NO: 10091 - protein, 9 aa, Homo Sapiens
ALLSAPWYL

SEQ ID NO: 10092 - protein, 9 aa, Homo Sapiens
ALLSAVTRL

SEQ ID NO: 10093 - protein, 9 aa, Homo Sapiens
ALLSDLHAF

SEQ ID NO: 10094 - protein, 9 aa, Homo Sapiens
ALLSKNLSV

SEQ ID NO: 10095 - protein, 9 aa, Homo Sapiens
ALLSRLEQI

SEQ ID NO: 10096 - protein, 9 aa, Homo Sapiens
ALLSWVNSL

SEQ ID NO: 10097 - protein, 9 aa, Homo Sapiens
ALLTYLEQV

SEQ ID NO: 10098 - protein, 9 aa, Homo Sapiens
ALMEALVLI

SEQ ID NO: 10099 - protein, 9 aa, Homo Sapiens
ALMEEILKL

SEQ ID NO: 10100 - protein, 9 aa, Homo Sapiens
ALMELFPKL

SEQ ID NO: 10101 - protein, 9 aa, Homo Sapiens
ALMHALTDL

SEQ ID NO: 10102 - protein, 9 aa, Homo Sapiens
ALMNLIQYI

SEQ ID NO: 10103 - protein, 9 aa, Homo Sapiens
ALMPQLVQL

SEQ ID NO: 10104 - protein, 9 aa, Homo Sapiens
ALMPTLEAL

SEQ ID NO: 10105 - protein, 9 aa, Homo Sapiens
ALMPVLNQV

SEQ ID NO: 10106 - protein, 9 aa, Homo Sapiens
ALNAVRLLV

SEQ ID NO: 10107 - protein, 9 aa, Homo Sapiens
ALNDCIYSV

SEQ ID NO: 10108 - protein, 9 aa, Homo Sapiens
ALNDEIRQL

SEQ ID NO: 10109 - protein, 9 aa, Homo Sapiens
ALNEKLVNL

SEQ ID NO: 10110 - protein, 9 aa, Homo Sapiens
ALNEQIARL

SEQ ID NO: 10111 - protein, 9 aa, Homo Sapiens
ALNFIISYL

SEQ ID NO: 10112 - protein, 9 aa, Homo Sapiens
ALNGKLYIV

SEQ ID NO: 10113 - protein, 9 aa, Homo Sapiens
ALNIATHVL

SEQ ID NO: 10114 - protein, 9 aa, Homo Sapiens
ALNNLLHSL

SEQ ID NO: 10115 - protein, 9 aa, Homo Sapiens
ALNSKILSV

SEQ ID NO: 10116 - protein, 9 aa, Homo Sapiens
ALPEAIAAL

SEQ ID NO: 10117 - protein, 9 aa, Homo Sapiens
ALQAAIQQL

SEQ ID NO: 10118 - protein, 9 aa, Homo Sapiens
ALQADIDQL

SEQ ID NO: 10119 - protein, 9 aa, Homo Sapiens
ALQAEIAAL

SEQ ID NO: 10120 - protein, 9 aa, Homo Sapiens
ALQALVVTL

SEQ ID NO: 10121 - protein, 9 aa, Homo Sapiens
ALQAQITAL

SEQ ID NO: 10122 - protein, 9 aa, Homo Sapiens
ALQASIVKL

SEQ ID NO: 10123 - protein, 9 aa, Homo Sapiens
ALQDFLLSV

SEQ ID NO: 10124 - protein, 9 aa, Homo Sapiens
ALQDQLLKL

SEQ ID NO: 10125 - protein, 9 aa, Homo Sapiens
ALQEKLWNV

SEQ ID NO: 10126 - protein, 9 aa, Homo Sapiens
ALQELISEL

SEQ ID NO: 10127 - protein, 9 aa, Homo Sapiens
ALQERLDGL

SEQ ID NO: 10128 - protein, 9 aa, Homo Sapiens
ALQGSAWQV

SEQ ID NO: 10129 - protein, 9 aa, Homo Sapiens
ALQIIINCV

SEQ ID NO: 10130 - protein, 9 aa, Homo Sapiens
ALQPSIKFV

SEQ ID NO: 10131 - protein, 9 aa, Homo Sapiens
ALQRIISTL

SEQ ID NO: 10132 - protein, 9 aa, Homo Sapiens
ALQSLLHLL

SEQ ID NO: 10133 - protein, 9 aa, Homo Sapiens
ALQWVVVEV

SEQ ID NO: 10134 - protein, 9 aa, Homo Sapiens
ALRSFLQAL

SEQ ID NO: 10135 - protein, 9 aa, Homo Sapiens
ALSDIFQAV

SEQ ID NO: 10136 - protein, 9 aa, Homo Sapiens
ALSDILINF

SEQ ID NO: 10137 - protein, 9 aa, Homo Sapiens
ALSDLEITL

SEQ ID NO: 10138 - protein, 9 aa, Homo Sapiens
ALSEELVQL

SEQ ID NO: 10139 - protein, 9 aa, Homo Sapiens
ALSEKIVSV

SEQ ID NO: 10140 - protein, 9 aa, Homo Sapiens
ALSEKLARL

SEQ ID NO: 10141 - protein, 9 aa, Homo Sapiens
ALSELTTCL

SEQ ID NO: 10142 - protein, 9 aa, Homo Sapiens
ALSGLAVRL

SEQ ID NO: 10143 - protein, 9 aa, Homo Sapiens
ALSHILTAL

SEQ ID NO: 10144 - protein, 9 aa, Homo Sapiens
ALSIQNYHL

SEQ ID NO: 10145 - protein, 9 aa, Homo Sapiens
ALSLYLFKL

SEQ ID NO: 10146 - protein, 9 aa, Homo Sapiens
ALSMIIKSL

SEQ ID NO: 10147 - protein, 9 aa, Homo Sapiens
ALSNFISQL

SEQ ID NO: 10148 - protein, 9 aa, Homo Sapiens
ALSNLEVKL

SEQ ID NO: 10149 - protein, 9 aa, Homo Sapiens
ALSPHNILL

SEQ ID NO: 10150 - protein, 9 aa, Homo Sapiens
ALSPINIQL

SEQ ID NO: 10151 - protein, 9 aa, Homo Sapiens
ALSPQLQQL

SEQ ID NO: 10152 - protein, 9 aa, Homo Sapiens
ALSSLAVVV

SEQ ID NO: 10153 - protein, 9 aa, Homo Sapiens
ALSSLIHAL

SEQ ID NO: 10154 - protein, 9 aa, Homo Sapiens
ALSSLLQQL

SEQ ID NO: 10155 - protein, 9 aa, Homo Sapiens
ALSSVIKEL

SEQ ID NO: 10156 - protein, 9 aa, Homo Sapiens
ALSYILPYL

SEQ ID NO: 10157 - protein, 9 aa, Homo Sapiens
ALTDVILCV

SEQ ID NO: 10158 - protein, 9 aa, Homo Sapiens
ALTDYITRL

SEQ ID NO: 10159 - protein, 9 aa, Homo Sapiens
ALTELLAKI

SEQ ID NO: 10160 - protein, 9 aa, Homo Sapiens
ALTGYLHTI

SEQ ID NO: 10161 - protein, 9 aa, Homo Sapiens
ALTPVVVTL

SEQ ID NO: 10162 - protein, 9 aa, Homo Sapiens
ALTPVWVLI

SEQ ID NO: 10163 - protein, 9 aa, Homo Sapiens
ALTRVIYNL

SEQ ID NO: 10164 - protein, 9 aa, Homo Sapiens
ALTSEIALL

SEQ ID NO: 10165 - protein, 9 aa, Homo Sapiens
ALTSVVVTL

SEQ ID NO: 10166 - protein, 9 aa, Homo Sapiens
ALTVNLHLL

SEQ ID NO: 10167 - protein, 9 aa, Homo Sapiens
ALTWLIPTL

SEQ ID NO: 10168 - protein, 9 aa, Homo Sapiens
ALVDHVAEL

SEQ ID NO: 10169 - protein, 9 aa, Homo Sapiens
ALVDLIYNM

SEQ ID NO: 10170 - protein, 9 aa, Homo Sapiens
ALVDQLWKL

SEQ ID NO: 10171 - protein, 9 aa, Homo Sapiens
ALVEDIINL

SEQ ID NO: 10172 - protein, 9 aa, Homo Sapiens
ALVNELYSL

SEQ ID NO: 10173 - protein, 9 aa, Homo Sapiens
ALVSSLHLL

SEQ ID NO: 10174 - protein, 9 aa, Homo Sapiens
ALWAGLLTL

SEQ ID NO: 10175 - protein, 9 aa, Homo Sapiens
ALWDKLFNL

SEQ ID NO: 10176 - protein, 9 aa, Homo Sapiens
ALWGFFPVL

SEQ ID NO: 10177 - protein, 9 aa, Homo Sapiens
ALYDNVEKL

SEQ ID NO: 10178 - protein, 9 aa, Homo Sapiens
ALYNWLIQV

SEQ ID NO: 10179 - protein, 9 aa, Homo Sapiens
ALYPNVVQV

SEQ ID NO: 10180 - protein, 9 aa, Homo Sapiens
ALYQSLPTL

SEQ ID NO: 10181 - protein, 9 aa, Homo Sapiens
ALYSELLAV

SEQ ID NO: 10182 - protein, 9 aa, Homo Sapiens
ALYVAVVNV

SEQ ID NO: 10183 - protein, 9 aa, Homo Sapiens
AMASIINRL

SEQ ID NO: 10184 - protein, 9 aa, Homo Sapiens
AMFGKLMTI

SEQ ID NO: 10185 - protein, 9 aa, Homo Sapiens
AMIELVERL

SEQ ID NO: 10186 - protein, 9 aa, Homo Sapiens
AMIERITFI

SEQ ID NO: 10187 - protein, 9 aa, Homo Sapiens
AMLAVLHTV

SEQ ID NO: 10188 - protein, 9 aa, Homo Sapiens
AMLERLLSL

SEQ ID NO: 10189 - protein, 9 aa, Homo Sapiens
AMLGVNPRF

SEQ ID NO: 10190 - protein, 9 aa, Homo Sapiens
AMLLEIPYM

SEQ ID NO: 10191 - protein, 9 aa, Homo Sapiens
AMLPSITNV

SEQ ID NO: 10192 - protein, 9 aa, Homo Sapiens
AMLRLIPSL

SEQ ID NO: 10193 - protein, 9 aa, Homo Sapiens
AMLTVLHEI

SEQ ID NO: 10194 - protein, 9 aa, Homo Sapiens
AMNISVPQV

SEQ ID NO: 10195 - protein, 9 aa, Homo Sapiens
AMQEFLTRL

SEQ ID NO: 10196 - protein, 9 aa, Homo Sapiens
AMQEYIAVV

SEQ ID NO: 10197 - protein, 9 aa, Homo Sapiens
AQAQEVFFL

SEQ ID NO: 10198 - protein, 9 aa, Homo Sapiens
AQFGYYFRV

SEQ ID NO: 10199 - protein, 9 aa, Homo Sapiens
AQIDSIVEL

SEQ ID NO: 10200 - protein, 9 aa, Homo Sapiens
AQIFAIYQL

SEQ ID NO: 10201 - protein, 9 aa, Homo Sapiens
AQIPVVFRL

SEQ ID NO: 10202 - protein, 9 aa, Homo Sapiens
AQQLQIFNL

SEQ ID NO: 10203 - protein, 9 aa, Homo Sapiens
AQRDIIFEL

SEQ ID NO: 10204 - protein, 9 aa, Homo Sapiens
AQVEEIWSL

SEQ ID NO: 10205 - protein, 9 aa, Homo Sapiens
ATFARIWYL

SEQ ID NO: 10206 - protein, 9 aa, Homo Sapiens
ATIGELAQV

SEQ ID NO: 10207 - protein, 9 aa, Homo Sapiens
ATLSVVPQL

SEQ ID NO: 10208 - protein, 9 aa, Homo Sapiens
ATMPDLYHL

SEQ ID NO: 10209 - protein, 9 aa, Homo Sapiens
ATYVFLHTV

SEQ ID NO: 10210 - protein, 9 aa, Homo Sapiens
AVADHLFKL

SEQ ID NO: 10211 - protein, 9 aa, Homo Sapiens
AVADILFLL

SEQ ID NO: 10212 - protein, 9 aa, Homo Sapiens
AVAEQIPLL

SEQ ID NO: 10213 - protein, 9 aa, Homo Sapiens
AVANIVNSV

SEQ ID NO: 10214 - protein, 9 aa, Homo Sapiens
AVAPQVPAL

SEQ ID NO: 10215 - protein, 9 aa, Homo Sapiens
AVASFVTQL

SEQ ID NO: 10216 - protein, 9 aa, Homo Sapiens
AVAVSVPFL

SEQ ID NO: 10217 - protein, 9 aa, Homo Sapiens
AVIEHLERL

SEQ ID NO: 10218 - protein, 9 aa, Homo Sapiens
AVLAVLPRL

SEQ ID NO: 10219 - protein, 9 aa, Homo Sapiens
AVLEEIYLL

SEQ ID NO: 10220 - protein, 9 aa, Homo Sapiens
AVLESIERL

SEQ ID NO: 10221 - protein, 9 aa, Homo Sapiens
AVLHAIYSL

SEQ ID NO: 10222 - protein, 9 aa, Homo Sapiens
AVLPRLHQL

SEQ ID NO: 10223 - protein, 9 aa, Homo Sapiens
AVMEQIPEI

SEQ ID NO: 10224 - protein, 9 aa, Homo Sapiens
AVNPHLFSL

SEQ ID NO: 10225 - protein, 9 aa, Homo Sapiens
AVQEKVFEL

SEQ ID NO: 10226 - protein, 9 aa, Homo Sapiens
AVSNHVFHL

SEQ ID NO: 10227 - protein, 9 aa, Homo Sapiens
AVSNHVFQL

SEQ ID NO: 10228 - protein, 9 aa, Homo Sapiens
DMFHWQATI

SEQ ID NO: 10229 - protein, 9 aa, Homo Sapiens
DQILKLLSL

SEQ ID NO: 10230 - protein, 9 aa, Homo Sapiens
ELIERIPEL

SEQ ID NO: 10231 - protein, 9 aa, Homo Sapiens
ELIPTLPQL

SEQ ID NO: 10232 - protein, 9 aa, Homo Sapiens
ELNPSIPLL

SEQ ID NO: 10233 - protein, 9 aa, Homo Sapiens
ELSDVLIYL

SEQ ID NO: 10234 - protein, 9 aa, Homo Sapiens
ELSEKNFQL

SEQ ID NO: 10235 - protein, 9 aa, Homo Sapiens
ETVLWVVHV

SEQ ID NO: 10236 - protein, 9 aa, Homo Sapiens
FAIPMIHAV

SEQ ID NO: 10237 - protein, 9 aa, Homo Sapiens
FIFSYITAV

SEQ ID NO: 10238 - protein, 9 aa, Homo Sapiens
FIINGIEKV

SEQ ID NO: 10239 - protein, 9 aa, Homo Sapiens
FIIQGLRSV

SEQ ID NO: 10240 - protein, 9 aa, Homo Sapiens
FILEKIEYL

SEQ ID NO: 10241 - protein, 9 aa, Homo Sapiens
FILTHVDQL

SEQ ID NO: 10242 - protein, 9 aa, Homo Sapiens
FINARNWTL

SEQ ID NO: 10243 - protein, 9 aa, Homo Sapiens
FINELITEL

SEQ ID NO: 10244 - protein, 9 aa, Homo Sapiens
FINGDISSL

SEQ ID NO: 10245 - protein, 9 aa, Homo Sapiens
FINIVVHSV

SEQ ID NO: 10246 - protein, 9 aa, Homo Sapiens
FINTVITSL

SEQ ID NO: 10247 - protein, 9 aa, Homo Sapiens
FIQSIISTV

SEQ ID NO: 10248 - protein, 9 aa, Homo Sapiens
FISEFEHRV

SEQ ID NO: 10249 - protein, 9 aa, Homo Sapiens
FIWENIHTL

SEQ ID NO: 10250 - protein, 9 aa, Homo Sapiens
FLADPVSNM

SEQ ID NO: 10251 - protein, 9 aa, Homo Sapiens
FLANVSTVL

SEQ ID NO: 10252 - protein, 9 aa, Homo Sapiens
FLAPWATIA

SEQ ID NO: 10253 - protein, 9 aa, Homo Sapiens
FLAQRAVEL

SEQ ID NO: 10254 - protein, 9 aa, Homo Sapiens
FLDDVVHSL

SEQ ID NO: 10255 - protein, 9 aa, Homo Sapiens
FLEKLLPPV

SEQ ID NO: 10256 - protein, 9 aa, Homo Sapiens
FLETNVPLL

SEQ ID NO: 10257 - protein, 9 aa, Homo Sapiens
FLFDHLLTL

SEQ ID NO: 10258 - protein, 9 aa, Homo Sapiens
FLFELPSRL

SEQ ID NO: 10259 - protein, 9 aa, Homo Sapiens
FLFNAIETM

SEQ ID NO: 10260 - protein, 9 aa, Homo Sapiens
FLFQEPRSI

SEQ ID NO: 10261 - protein, 9 aa, Homo Sapiens
FLFTTPCRL

SEQ ID NO: 10262 - protein, 9 aa, Homo Sapiens
FLGADLPNL

SEQ ID NO: 10263 - protein, 9 aa, Homo Sapiens
FLGDPPPGL

SEQ ID NO: 10264 - protein, 9 aa, Homo Sapiens
FLGIHVFLV

SEQ ID NO: 10265 - protein, 9 aa, Homo Sapiens
FLGTFILKV

SEQ ID NO: 10266 - protein, 9 aa, Homo Sapiens
FLHEATVRL

SEQ ID NO: 10267 - protein, 9 aa, Homo Sapiens
FLINFIHTL

SEQ ID NO: 10268 - protein, 9 aa, Homo Sapiens
FLIPFVITV

SEQ ID NO: 10269 - protein, 9 aa, Homo Sapiens
FLIPKFFEL

SEQ ID NO: 10270 - protein, 9 aa, Homo Sapiens
FLIQNVLRL

SEQ ID NO: 10271 - protein, 9 aa, Homo Sapiens
FLITILDHL

SEQ ID NO: 10272 - protein, 9 aa, Homo Sapiens
FLKDLVASV

SEQ ID NO: 10273 - protein, 9 aa, Homo Sapiens
FLKLSLGLP

SEQ ID NO: 10274 - protein, 9 aa, Homo Sapiens
FLLDKALLI

SEQ ID NO: 10275 - protein, 9 aa, Homo Sapiens
FLLDKKIGV

SEQ ID NO: 10276 - protein, 9 aa, Homo Sapiens
FLLDKPQDL

SEQ ID NO: 10277 - protein, 9 aa, Homo Sapiens
FLLEGIRSL

SEQ ID NO: 10278 - protein, 9 aa, Homo Sapiens
FLLFINHRL

SEQ ID NO: 10279 - protein, 9 aa, Homo Sapiens
FLLHIQQQV

SEQ ID NO: 10280 - protein, 9 aa, Homo Sapiens
FLLKDLSSL

SEQ ID NO: 10281 - protein, 9 aa, Homo Sapiens
FLLPILSQI

SEQ ID NO: 10282 - protein, 9 aa, Homo Sapiens
FLLPKVQSI

SEQ ID NO: 10283 - protein, 9 aa, Homo Sapiens
FLLPLIIVL

SEQ ID NO: 10284 - protein, 9 aa, Homo Sapiens
FLLPLRIAL

SEQ ID NO: 10285 - protein, 9 aa, Homo Sapiens
FLLPVINEM

SEQ ID NO: 10286 - protein, 9 aa, Homo Sapiens
FLMDFIHQV

SEQ ID NO: 10287 - protein, 9 aa, Homo Sapiens
FLMNEVIKL

SEQ ID NO: 10288 - protein, 9 aa, Homo Sapiens
FLNDEVWNL

SEQ ID NO: 10289 - protein, 9 aa, Homo Sapiens
FLNEDLNQL

SEQ ID NO: 10290 - protein, 9 aa, Homo Sapiens
FLNELIKVL

SEQ ID NO: 10291 - protein, 9 aa, Homo Sapiens
FLNGEVIRL

SEQ ID NO: 10292 - protein, 9 aa, Homo Sapiens
FLNKEILEL

SEQ ID NO: 10293 - protein, 9 aa, Homo Sapiens
FLNKLIPVL

SEQ ID NO: 10294 - protein, 9 aa, Homo Sapiens
FLPEAPAEL

SEQ ID NO: 10295 - protein, 9 aa, Homo Sapiens
FLPPYTFQI

SEQ ID NO: 10296 - protein, 9 aa, Homo Sapiens
FLQDYTLLI

SEQ ID NO: 10297 - protein, 9 aa, Homo Sapiens
FLQEYGLSV

SEQ ID NO: 10298 - protein, 9 aa, Homo Sapiens
FLQKLISQL

SEQ ID NO: 10299 - protein, 9 aa, Homo Sapiens
FLQPELVKL

SEQ ID NO: 10300 - protein, 9 aa, Homo Sapiens
FLRDNLEWL

SEQ ID NO: 10301 - protein, 9 aa, Homo Sapiens
FLRELVITI

SEQ ID NO: 10302 - protein, 9 aa, Homo Sapiens
FLREWVESM

SEQ ID NO: 10303 - protein, 9 aa, Homo Sapiens
FLREYFERL

SEQ ID NO: 10304 - protein, 9 aa, Homo Sapiens
FLRNINEYL

SEQ ID NO: 10305 - protein, 9 aa, Homo Sapiens
FLSELTQQL

SEQ ID NO: 10306 - protein, 9 aa, Homo Sapiens
FLSEVFHQA

SEQ ID NO: 10307 - protein, 9 aa, Homo Sapiens
FLSNDTVQL

SEQ ID NO: 10308 - protein, 9 aa, Homo Sapiens
FLSSVIQNL

SEQ ID NO: 10309 - protein, 9 aa, Homo Sapiens
FLTEFINYI

SEQ ID NO: 10310 - protein, 9 aa, Homo Sapiens
FLVDGVCTV

SEQ ID NO: 10311 - protein, 9 aa, Homo Sapiens
FLVDIMEHL

SEQ ID NO: 10312 - protein, 9 aa, Homo Sapiens
FLVEHVLTL

SEQ ID NO: 10313 - protein, 9 aa, Homo Sapiens
FLVPTFEQL

SEQ ID NO: 10314 - protein, 9 aa, Homo Sapiens
FLVPVLEAL

SEQ ID NO: 10315 - protein, 9 aa, Homo Sapiens
FLVTVIHTL

SEQ ID NO: 10316 - protein, 9 aa, Homo Sapiens
FLWERPTLL

SEQ ID NO: 10317 - protein, 9 aa, Homo Sapiens
FLWKEPATM

SEQ ID NO: 10318 - protein, 9 aa, Homo Sapiens
FLYAGHIFL

SEQ ID NO: 10319 - protein, 9 aa, Homo Sapiens
FLYDDNQRV

SEQ ID NO: 10320 - protein, 9 aa, Homo Sapiens
FLYDTHQNL

SEQ ID NO: 10321 - protein, 9 aa, Homo Sapiens
FLYPFPLAL

SEQ ID NO: 10322 - protein, 9 aa, Homo Sapiens
FLYQYSTRL

SEQ ID NO: 10323 - protein, 9 aa, Homo Sapiens
FMIKFPWKL

SEQ ID NO: 10324 - protein, 9 aa, Homo Sapiens
FMLPDPQNI

SEQ ID NO: 10325 - protein, 9 aa, Homo Sapiens
FMNPHLISV

SEQ ID NO: 10326 - protein, 9 aa, Homo Sapiens
FMNSVIQSL

SEQ ID NO: 10327 - protein, 9 aa, Homo Sapiens
FMVDRVVDL

SEQ ID NO: 10328 - protein, 9 aa, Homo Sapiens
FQIRNLPSL

SEQ ID NO: 10329 - protein, 9 aa, Homo Sapiens
FQLEHIMDL

SEQ ID NO: 10330 - protein, 9 aa, Homo Sapiens
FQLPIRFNL

SEQ ID NO: 10331 - protein, 9 aa, Homo Sapiens
FQNPFRSEL

SEQ ID NO: 10332 - protein, 9 aa, Homo Sapiens
FQRPTIYYV

SEQ ID NO: 10333 - protein, 9 aa, Homo Sapiens
FQTDLIYNL

SEQ ID NO: 10334 - protein, 9 aa, Homo Sapiens
FSLENNFLL

SEQ ID NO: 10335 - protein, 9 aa, Homo Sapiens
FTLGDIAQL

SEQ ID NO: 10336 - protein, 9 aa, Homo Sapiens
FTLQDLVCL

SEQ ID NO: 10337 - protein, 9 aa, Homo Sapiens
FTLSHITQL

SEQ ID NO: 10338 - protein, 9 aa, Homo Sapiens
FTNDKIINL

SEQ ID NO: 10339 - protein, 9 aa, Homo Sapiens
FTNHFIPTL

SEQ ID NO: 10340 - protein, 9 aa, Homo Sapiens
FVDDYTVRV

SEQ ID NO: 10341 - protein, 9 aa, Homo Sapiens
FVFPGELLL

SEQ ID NO: 10342 - protein, 9 aa, Homo Sapiens
FVHDLVLYL

SEQ ID NO: 10343 - protein, 9 aa, Homo Sapiens
FVIDLQTRL

SEQ ID NO: 10344 - protein, 9 aa, Homo Sapiens
FVIPVVQAL

SEQ ID NO: 10345 - protein, 9 aa, Homo Sapiens
FVLDKVPFL

SEQ ID NO: 10346 - protein, 9 aa, Homo Sapiens
FVLPELPSV

SEQ ID NO: 10347 - protein, 9 aa, Homo Sapiens
FVLPILQKL

SEQ ID NO: 10348 - protein, 9 aa, Homo Sapiens
FVLQRLVFL

SEQ ID NO: 10349 - protein, 9 aa, Homo Sapiens
FVMEGVKNL

SEQ ID NO: 10350 - protein, 9 aa, Homo Sapiens
FVMETFVHL

SEQ ID NO: 10351 - protein, 9 aa, Homo Sapiens
FVNDIFERI

SEQ ID NO: 10352 - protein, 9 aa, Homo Sapiens
FVNEIISRI

SEQ ID NO: 10353 - protein, 9 aa, Homo Sapiens
FVNFRLYQL

SEQ ID NO: 10354 - protein, 9 aa, Homo Sapiens
GIAPQIQDL

SEQ ID NO: 10355 - protein, 9 aa, Homo Sapiens
GILLRLPQV

SEQ ID NO: 10356 - protein, 9 aa, Homo Sapiens
GILSFLPVL

SEQ ID NO: 10357 - protein, 9 aa, Homo Sapiens
GIMKKAYEL

SEQ ID NO: 10358 - protein, 9 aa, Homo Sapiens
GLAAFRAFL

SEQ ID NO: 10359 - protein, 9 aa, Homo Sapiens
GLAAKLMEL

SEQ ID NO: 10360 - protein, 9 aa, Homo Sapiens
GLAATLYSL

SEQ ID NO: 10361 - protein, 9 aa, Homo Sapiens
GLADKVYFL

SEQ ID NO: 10362 - protein, 9 aa, Homo Sapiens
GLAELYVMV

SEQ ID NO: 10363 - protein, 9 aa, Homo Sapiens
GLAERISVL

SEQ ID NO: 10364 - protein, 9 aa, Homo Sapiens
GLAKLIADV

SEQ ID NO: 10365 - protein, 9 aa, Homo Sapiens
GLAPHLEQI

SEQ ID NO: 10366 - protein, 9 aa, Homo Sapiens
GLAPKPVQV

SEQ ID NO: 10367 - protein, 9 aa, Homo Sapiens
GLAPQIHDL

SEQ ID NO: 10368 - protein, 9 aa, Homo Sapiens
GLAQTLEKL

SEQ ID NO: 10369 - protein, 9 aa, Homo Sapiens
GLATDVQTV

SEQ ID NO: 10370 - protein, 9 aa, Homo Sapiens
GLEEKLPSL

SEQ ID NO: 10371 - protein, 9 aa, Homo Sapiens
GLFAGPCKV

SEQ ID NO: 10372 - protein, 9 aa, Homo Sapiens
GLFDQHFRL

SEQ ID NO: 10373 - protein, 9 aa, Homo Sapiens
GLFPWTPKL

SEQ ID NO: 10374 - protein, 9 aa, Homo Sapiens
GLGSNIFRL

SEQ ID NO: 10375 - protein, 9 aa, Homo Sapiens
GLHGWAFTL

SEQ ID NO: 10376 - protein, 9 aa, Homo Sapiens
GLHSYFITV

SEQ ID NO: 10377 - protein, 9 aa, Homo Sapiens
GLIDEIYGI

SEQ ID NO: 10378 - protein, 9 aa, Homo Sapiens
GLIDENPGL

SEQ ID NO: 10379 - protein, 9 aa, Homo Sapiens
GLIDFAIQL

SEQ ID NO: 10380 - protein, 9 aa, Homo Sapiens
GLIDKVNEL

SEQ ID NO: 10381 - protein, 9 aa, Homo Sapiens
GLIEILKKV

SEQ ID NO: 10382 - protein, 9 aa, Homo Sapiens
GLIENPALL

SEQ ID NO: 10383 - protein, 9 aa, Homo Sapiens
GLIRYISGI

SEQ ID NO: 10384 - protein, 9 aa, Homo Sapiens
GLKDAVYFL

SEQ ID NO: 10385 - protein, 9 aa, Homo Sapiens
GLKDGVALL

SEQ ID NO: 10386 - protein, 9 aa, Homo Sapiens
GLKEGIPAL

SEQ ID NO: 10387 - protein, 9 aa, Homo Sapiens
GLKEILPNL

SEQ ID NO: 10388 - protein, 9 aa, Homo Sapiens
GLLAKIFEL

SEQ ID NO: 10389 - protein, 9 aa, Homo Sapiens
GLLDLPFRV

SEQ ID NO: 10390 - protein, 9 aa, Homo Sapiens
GLLDRIMQL

SEQ ID NO: 10391 - protein, 9 aa, Homo Sapiens
GLLEIVTSV

SEQ ID NO: 10392 - protein, 9 aa, Homo Sapiens
GLLEKLTAI

SEQ ID NO: 10393 - protein, 9 aa, Homo Sapiens
GLLERPVLL

SEQ ID NO: 10394 - protein, 9 aa, Homo Sapiens
GLLERVKEL

SEQ ID NO: 10395 - protein, 9 aa, Homo Sapiens
GLLGYLHFV

SEQ ID NO: 10396 - protein, 9 aa, Homo Sapiens
GLLKTLQKL

SEQ ID NO: 10397 - protein, 9 aa, Homo Sapiens
GLLNVLSQL

SEQ ID NO: 10398 - protein, 9 aa, Homo Sapiens
GLLPDVPSL

SEQ ID NO: 10399 - protein, 9 aa, Homo Sapiens
GLLPKLTAL

SEQ ID NO: 10400 - protein, 9 aa, Homo Sapiens
GLLQNLQHL

SEQ ID NO: 10401 - protein, 9 aa, Homo Sapiens
GLLQQPPAL

SEQ ID NO: 10402 - protein, 9 aa, Homo Sapiens
GLLQQPSAL

SEQ ID NO: 10403 - protein, 9 aa, Homo Sapiens
GLLRELRYL

SEQ ID NO: 10404 - protein, 9 aa, Homo Sapiens
GLLRIIPYL

SEQ ID NO: 10405 - protein, 9 aa, Homo Sapiens
GLLSILRKL

SEQ ID NO: 10406 - protein, 9 aa, Homo Sapiens
GLLTEIRAV

SEQ ID NO: 10407 - protein, 9 aa, Homo Sapiens
GLLTRLLQV

SEQ ID NO: 10408 - protein, 9 aa, Homo Sapiens
GLLTSLFML

SEQ ID NO: 10409 - protein, 9 aa, Homo Sapiens
GLMEDLLKL

SEQ ID NO: 10410 - protein, 9 aa, Homo Sapiens
GLMTSPLNL

SEQ ID NO: 10411 - protein, 9 aa, Homo Sapiens
GLNDFIQKI

SEQ ID NO: 10412 - protein, 9 aa, Homo Sapiens
GLNEEIARV

SEQ ID NO: 10413 - protein, 9 aa, Homo Sapiens
GLNEEITKL

SEQ ID NO: 10414 - protein, 9 aa, Homo Sapiens
GLNEFVVKF

SEQ ID NO: 10415 - protein, 9 aa, Homo Sapiens
GLPEAPPFL

SEQ ID NO: 10416 - protein, 9 aa, Homo Sapiens
GLQDLLFSL

SEQ ID NO: 10417 - protein, 9 aa, Homo Sapiens
GLQEAQYRL

SEQ ID NO: 10418 - protein, 9 aa, Homo Sapiens
GLQKMVALL

SEQ ID NO: 10419 - protein, 9 aa, Homo Sapiens
GLQNDLFSL

SEQ ID NO: 10420 - protein, 9 aa, Homo Sapiens
GLQVKIQRL

SEQ ID NO: 10421 - protein, 9 aa, Homo Sapiens
GLQVYIRQL

SEQ ID NO: 10422 - protein, 9 aa, Homo Sapiens
GLSAFLHAI

SEQ ID NO: 10423 - protein, 9 aa, Homo Sapiens
GLSDLRLEL

SEQ ID NO: 10424 - protein, 9 aa, Homo Sapiens
GLSEPIFQL

SEQ ID NO: 10425 - protein, 9 aa, Homo Sapiens
GLSEQIREL

SEQ ID NO: 10426 - protein, 9 aa, Homo Sapiens
GLSETILAV

SEQ ID NO: 10427 - protein, 9 aa, Homo Sapiens
GLSGIIPTL

SEQ ID NO: 10428 - protein, 9 aa, Homo Sapiens
GLSIFIYRL

SEQ ID NO: 10429 - protein, 9 aa, Homo Sapiens
GLSNHIAAL

SEQ ID NO: 10430 - protein, 9 aa, Homo Sapiens
GLSPEIHTL

SEQ ID NO: 10431 - protein, 9 aa, Homo Sapiens
GLSQVAVTV

SEQ ID NO: 10432 - protein, 9 aa, Homo Sapiens
GLTEALHFV

SEQ ID NO: 10433 - protein, 9 aa, Homo Sapiens
GLTPFVFRL

SEQ ID NO: 10434 - protein, 9 aa, Homo Sapiens
GLVPFLVSV

SEQ ID NO: 10435 - protein, 9 aa, Homo Sapiens
GLWEEAYRV

SEQ ID NO: 10436 - protein, 9 aa, Homo Sapiens
GLWGHALLL

SEQ ID NO: 10437 - protein, 9 aa, Homo Sapiens
GLWGPVHEL

SEQ ID NO: 10438 - protein, 9 aa, Homo Sapiens
GLYEGLTWL

SEQ ID NO: 10439 - protein, 9 aa, Homo Sapiens
GLYELVWRV

SEQ ID NO: 10440 - protein, 9 aa, Homo Sapiens
GLYGAIFRL

SEQ ID NO: 10441 - protein, 9 aa, Homo Sapiens
GLYPNLIQV

SEQ ID NO: 10442 - protein, 9 aa, Homo Sapiens
GMASVISRL

SEQ ID NO: 10443 - protein, 9 aa, Homo Sapiens
GMQIRIHQI

SEQ ID NO: 10444 - protein, 9 aa, Homo Sapiens
GMSEFLRAL

SEQ ID NO: 10445 - protein, 9 aa, Homo Sapiens
GMYIFLHTV

SEQ ID NO: 10446 - protein, 9 aa, Homo Sapiens
GMYPNLVHV

SEQ ID NO: 10447 - protein, 9 aa, Homo Sapiens
GMYVFLHAV

SEQ ID NO: 10448 - protein, 9 aa, Homo Sapiens
GQIEVVPEV

SEQ ID NO: 10449 - protein, 9 aa, Homo Sapiens
GQIGMIQAL

SEQ ID NO: 10450 - protein, 9 aa, Homo Sapiens
GSLNWGYRV

SEQ ID NO: 10451 - protein, 9 aa, Homo Sapiens
GTIGLIHAV

SEQ ID NO: 10452 - protein, 9 aa, Homo Sapiens
GVIATIAFL

SEQ ID NO: 10453 - protein, 9 aa, Homo Sapiens
GVISGLFEL

SEQ ID NO: 10454 - protein, 9 aa, Homo Sapiens
GVLENIFGV

SEQ ID NO: 10455 - protein, 9 aa, Homo Sapiens
GVLPNIQAV

SEQ ID NO: 10456 - protein, 9 aa, Homo Sapiens
GVMESVIAL

SEQ ID NO: 10457 - protein, 9 aa, Homo Sapiens
GVTAIIFCV

SEQ ID NO: 10458 - protein, 9 aa, Homo Sapiens
GVVDGIYRL

SEQ ID NO: 10459 - protein, 9 aa, Homo Sapiens
HIHLWISYI

SEQ ID NO: 10460 - protein, 9 aa, Homo Sapiens
HIIENIVAV

SEQ ID NO: 10461 - protein, 9 aa, Homo Sapiens
HILDILPRL

SEQ ID NO: 10462 - protein, 9 aa, Homo Sapiens
HLAELIAEL

SEQ ID NO: 10463 - protein, 9 aa, Homo Sapiens
HLFDAFVSV

SEQ ID NO: 10464 - protein, 9 aa, Homo Sapiens
HLFLDLPKL

SEQ ID NO: 10465 - protein, 9 aa, Homo Sapiens
HLFSTIPEL

SEQ ID NO: 10466 - protein, 9 aa, Homo Sapiens
HLGDFLVFL

SEQ ID NO: 10467 - protein, 9 aa, Homo Sapiens
HLINYIIFL

SEQ ID NO: 10468 - protein, 9 aa, Homo Sapiens
HLISTINTV

SEQ ID NO: 10469 - protein, 9 aa, Homo Sapiens
HLLDIYIQL

SEQ ID NO: 10470 - protein, 9 aa, Homo Sapiens
HLLDLLARL

SEQ ID NO: 10471 - protein, 9 aa, Homo Sapiens
HLLDQIQTL

SEQ ID NO: 10472 - protein, 9 aa, Homo Sapiens
HLLFWGVLA

SEQ ID NO: 10473 - protein, 9 aa, Homo Sapiens
HLLHEPPAL

SEQ ID NO: 10474 - protein, 9 aa, Homo Sapiens
HLLLFLQQL

SEQ ID NO: 10475 - protein, 9 aa, Homo Sapiens
HLLMELREL

SEQ ID NO: 10476 - protein, 9 aa, Homo Sapiens
HLLPDLHAL

SEQ ID NO: 10477 - protein, 9 aa, Homo Sapiens
HLLPKIENL

SEQ ID NO: 10478 - protein, 9 aa, Homo Sapiens
HLNEHLYNM

SEQ ID NO: 10479 - protein, 9 aa, Homo Sapiens
HLNMFIQNL

SEQ ID NO: 10480 - protein, 9 aa, Homo Sapiens
HLQGQLQTL

SEQ ID NO: 10481 - protein, 9 aa, Homo Sapiens
HLSDHLSEL

SEQ ID NO: 10482 - protein, 9 aa, Homo Sapiens
HLSDMLQQL

SEQ ID NO: 10483 - protein, 9 aa, Homo Sapiens
HLSIINEYL

SEQ ID NO: 10484 - protein, 9 aa, Homo Sapiens
HLSSLIAQL

SEQ ID NO: 10485 - protein, 9 aa, Homo Sapiens
HLSVVSVTV

SEQ ID NO: 10486 - protein, 9 aa, Homo Sapiens
HLTDITLKV

SEQ ID NO: 10487 - protein, 9 aa, Homo Sapiens
HLWNSIHGL

SEQ ID NO: 10488 - protein, 9 aa, Homo Sapiens
HLYDIHVTV

SEQ ID NO: 10489 - protein, 9 aa, Homo Sapiens
HVLSVIWQL

SEQ ID NO: 10490 - protein, 9 aa, Homo Sapiens
HVNPFLPYI

SEQ ID NO: 10491 - protein, 9 aa, Homo Sapiens
HVQDIVFQL

SEQ ID NO: 10492 - protein, 9 aa, Homo Sapiens
IAQEILKVV

SEQ ID NO: 10493 - protein, 9 aa, Homo Sapiens
IIAAWTVRV

SEQ ID NO: 10494 - protein, 9 aa, Homo Sapiens
IIADNIIFL

SEQ ID NO: 10495 - protein, 9 aa, Homo Sapiens
IIEENIPEL

SEQ ID NO: 10496 - protein, 9 aa, Homo Sapiens
IIFVPVPQL

SEQ ID NO: 10497 - protein, 9 aa, Homo Sapiens
IILDALPQL

SEQ ID NO: 10498 - protein, 9 aa, Homo Sapiens
IILDEIHLL

SEQ ID NO: 10499 - protein, 9 aa, Homo Sapiens
IILGKIWDL

SEQ ID NO: 10500 - protein, 9 aa, Homo Sapiens
IIMETVPQL

SEQ ID NO: 10501 - protein, 9 aa, Homo Sapiens
IIQEFLSKV

SEQ ID NO: 10502 - protein, 9 aa, Homo Sapiens
ILAAHVPTL

SEQ ID NO: 10503 - protein, 9 aa, Homo Sapiens
ILAAIVNHL

SEQ ID NO: 10504 - protein, 9 aa, Homo Sapiens
ILADLLPSL

SEQ ID NO: 10505 - protein, 9 aa, Homo Sapiens
ILAELLLRV

SEQ ID NO: 10506 - protein, 9 aa, Homo Sapiens
ILAETQPEL

SEQ ID NO: 10507 - protein, 9 aa, Homo Sapiens
ILAPTVQEL

SEQ ID NO: 10508 - protein, 9 aa, Homo Sapiens
ILAPVVKEI

SEQ ID NO: 10509 - protein, 9 aa, Homo Sapiens
ILASLLRNL

SEQ ID NO: 10510 - protein, 9 aa, Homo Sapiens
ILDEVIFKL

SEQ ID NO: 10511 - protein, 9 aa, Homo Sapiens
ILDQKINEV

SEQ ID NO: 10512 - protein, 9 aa, Homo Sapiens
ILEENIPVL

SEQ ID NO: 10513 - protein, 9 aa, Homo Sapiens
ILEPSLYTV

SEQ ID NO: 10514 - protein, 9 aa, Homo Sapiens
ILFGHENRV

SEQ ID NO: 10515 - protein, 9 aa, Homo Sapiens
ILGIQPPSV

SEQ ID NO: 10516 - protein, 9 aa, Homo Sapiens
ILGVLVPRL

SEQ ID NO: 10517 - protein, 9 aa, Homo Sapiens
ILHGLVAAV

SEQ ID NO: 10518 - protein, 9 aa, Homo Sapiens
ILHSVTTNL

SEQ ID NO: 10519 - protein, 9 aa, Homo Sapiens
ILIHDVPLL

SEQ ID NO: 10520 - protein, 9 aa, Homo Sapiens
ILIKGLAKL

SEQ ID NO: 10521 - protein, 9 aa, Homo Sapiens
ILISTLPSV

SEQ ID NO: 10522 - protein, 9 aa, Homo Sapiens
ILLAELEQL

SEQ ID NO: 10523 - protein, 9 aa, Homo Sapiens
ILLAEVPTM

SEQ ID NO: 10524 - protein, 9 aa, Homo Sapiens
ILLDRLLYL

SEQ ID NO: 10525 - protein, 9 aa, Homo Sapiens
ILLEKILSL

SEQ ID NO: 10526 - protein, 9 aa, Homo Sapiens
ILLGKVQQL

SEQ ID NO: 10527 - protein, 9 aa, Homo Sapiens
ILLGYLDQL

SEQ ID NO: 10528 - protein, 9 aa, Homo Sapiens
ILLKALTNL

SEQ ID NO: 10529 - protein, 9 aa, Homo Sapiens
ILLKDILSV

SEQ ID NO: 10530 - protein, 9 aa, Homo Sapiens
ILLNIIERL

SEQ ID NO: 10531 - protein, 9 aa, Homo Sapiens
ILLPLINQL

SEQ ID NO: 10532 - protein, 9 aa, Homo Sapiens
ILLPYVSKV

SEQ ID NO: 10533 - protein, 9 aa, Homo Sapiens
ILLSGIYNV

SEQ ID NO: 10534 - protein, 9 aa, Homo Sapiens
ILMEHIHKL

SEQ ID NO: 10535 - protein, 9 aa, Homo Sapiens
ILMEQIKLL

SEQ ID NO: 10536 - protein, 9 aa, Homo Sapiens
ILMGVLKEV

SEQ ID NO: 10537 - protein, 9 aa, Homo Sapiens
ILNDNINLL

SEQ ID NO: 10538 - protein, 9 aa, Homo Sapiens
ILNEIVNFV

SEQ ID NO: 10539 - protein, 9 aa, Homo Sapiens
ILNERVELL

SEQ ID NO: 10540 - protein, 9 aa, Homo Sapiens
ILNGIVAAL

SEQ ID NO: 10541 - protein, 9 aa, Homo Sapiens
ILNNNLNTL

SEQ ID NO: 10542 - protein, 9 aa, Homo Sapiens
ILNPEVVTV

SEQ ID NO: 10543 - protein, 9 aa, Homo Sapiens
ILNPVTTKL

SEQ ID NO: 10544 - protein, 9 aa, Homo Sapiens
ILNYVLVRV

SEQ ID NO: 10545 - protein, 9 aa, Homo Sapiens
ILQAELPSL

SEQ ID NO: 10546 - protein, 9 aa, Homo Sapiens
ILQDGRIFI

SEQ ID NO: 10547 - protein, 9 aa, Homo Sapiens
ILQDLVKNL

SEQ ID NO: 10548 - protein, 9 aa, Homo Sapiens
ILQDRLNQV

SEQ ID NO: 10549 - protein, 9 aa, Homo Sapiens
ILQKELSQL

SEQ ID NO: 10550 - protein, 9 aa, Homo Sapiens
ILQNKIDLV

SEQ ID NO: 10551 - protein, 9 aa, Homo Sapiens
ILQRVIDYI

SEQ ID NO: 10552 - protein, 9 aa, Homo Sapiens
ILQSLLETL

SEQ ID NO: 10553 - protein, 9 aa, Homo Sapiens
ILQTLIQRV

SEQ ID NO: 10554 - protein, 9 aa, Homo Sapiens
ILQVGLREL

SEQ ID NO: 10555 - protein, 9 aa, Homo Sapiens
ILRAELEAL

SEQ ID NO: 10556 - protein, 9 aa, Homo Sapiens
ILSESLHSL

SEQ ID NO: 10557 - protein, 9 aa, Homo Sapiens
ILSEVQQAV

SEQ ID NO: 10558 - protein, 9 aa, Homo Sapiens
ILSGVVTKM

SEQ ID NO: 10559 - protein, 9 aa, Homo Sapiens
ILSPNLFQL

SEQ ID NO: 10560 - protein, 9 aa, Homo Sapiens
ILSPWGAEV

SEQ ID NO: 10561 - protein, 9 aa, Homo Sapiens
ILSQYITFV

SEQ ID NO: 10562 - protein, 9 aa, Homo Sapiens
ILSVFIPSL

SEQ ID NO: 10563 - protein, 9 aa, Homo Sapiens
ILTDITKGV

SEQ ID NO: 10564 - protein, 9 aa, Homo Sapiens
ILTNVVPKM

SEQ ID NO: 10565 - protein, 9 aa, Homo Sapiens
ILVDWLVQV

SEQ ID NO: 10566 - protein, 9 aa, Homo Sapiens
ILVSWLPRL

SEQ ID NO: 10567 - protein, 9 aa, Homo Sapiens
ILWEHLEIL

SEQ ID NO: 10568 - protein, 9 aa, Homo Sapiens
ILWESASLL

SEQ ID NO: 10569 - protein, 9 aa, Homo Sapiens
ILWSEAIFL

SEQ ID NO: 10570 - protein, 9 aa, Homo Sapiens
ILYDLQQNL

SEQ ID NO: 10571 - protein, 9 aa, Homo Sapiens
ILYGEVEKL

SEQ ID NO: 10572 - protein, 9 aa, Homo Sapiens
ILYGKIIHL

SEQ ID NO: 10573 - protein, 9 aa, Homo Sapiens
IMEDIILTL

SEQ ID NO: 10574 - protein, 9 aa, Homo Sapiens
IMISVISML

SEQ ID NO: 10575 - protein, 9 aa, Homo Sapiens
IMKEVIPFL

SEQ ID NO: 10576 - protein, 9 aa, Homo Sapiens
IMLEALERV

SEQ ID NO: 10577 - protein, 9 aa, Homo Sapiens
IMTVPPPSV

SEQ ID NO: 10578 - protein, 9 aa, Homo Sapiens
IQHDLIFSL

SEQ ID NO: 10579 - protein, 9 aa, Homo Sapiens
IQIMKVEEI

SEQ ID NO: 10580 - protein, 9 aa, Homo Sapiens
IQQDKIYLL

SEQ ID NO: 10581 - protein, 9 aa, Homo Sapiens
IQVTKVTQV

SEQ ID NO: 10582 - protein, 9 aa, Homo Sapiens
IRQQELENL

SEQ ID NO: 10583 - protein, 9 aa, Homo Sapiens
ISLQHLKQL

SEQ ID NO: 10584 - protein, 9 aa, Homo Sapiens
ISNIVFTSL

SEQ ID NO: 10585 - protein, 9 aa, Homo Sapiens
ITLLWDREV

SEQ ID NO: 10586 - protein, 9 aa, Homo Sapiens
ITQERIVFL

SEQ ID NO: 10587 - protein, 9 aa, Homo Sapiens
IVAPGTFEV

SEQ ID NO: 10588 - protein, 9 aa, Homo Sapiens
IVIEVIPFL

SEQ ID NO: 10589 - protein, 9 aa, Homo Sapiens
IVIGVLHQL

SEQ ID NO: 10590 - protein, 9 aa, Homo Sapiens
IVLDRLIEL

SEQ ID NO: 10591 - protein, 9 aa, Homo Sapiens
KAMELIREL

SEQ ID NO: 10592 - protein, 9 aa, Homo Sapiens
KASPLTFTV

SEQ ID NO: 10593 - protein, 9 aa, Homo Sapiens
KGFKWGFAA

SEQ ID NO: 10594 - protein, 9 aa, Homo Sapiens
KIADFGWSV

SEQ ID NO: 10595 - protein, 9 aa, Homo Sapiens
KIAPNTPQL

SEQ ID NO: 10596 - protein, 9 aa, Homo Sapiens
KIISALPQL

SEQ ID NO: 10597 - protein, 9 aa, Homo Sapiens
KILDVLEEI

SEQ ID NO: 10598 - protein, 9 aa, Homo Sapiens
KILEDVVGV

SEQ ID NO: 10599 - protein, 9 aa, Homo Sapiens
KILETLYTL

SEQ ID NO: 10600 - protein, 9 aa, Homo Sapiens
KILGNLQQL

SEQ ID NO: 10601 - protein, 9 aa, Homo Sapiens
KILPTLEAV

SEQ ID NO: 10602 - protein, 9 aa, Homo Sapiens
KILQELPSV

SEQ ID NO: 10603 - protein, 9 aa, Homo Sapiens
KILSELFTV

SEQ ID NO: 10604 - protein, 9 aa, Homo Sapiens
KINEAIVAV

SEQ ID NO: 10605 - protein, 9 aa, Homo Sapiens
KINEWLTLV

SEQ ID NO: 10606 - protein, 9 aa, Homo Sapiens
KIQAKIPGL

SEQ ID NO: 10607 - protein, 9 aa, Homo Sapiens
KITSCIFQL

SEQ ID NO: 10608 - protein, 9 aa, Homo Sapiens
KIVDFSYSV

SEQ ID NO: 10609 - protein, 9 aa, Homo Sapiens
KIYQWINEL

SEQ ID NO: 10610 - protein, 9 aa, Homo Sapiens
KLAAVVNNL

SEQ ID NO: 10611 - protein, 9 aa, Homo Sapiens
KLAEFIDFL

SEQ ID NO: 10612 - protein, 9 aa, Homo Sapiens
KLAEGVQLL

SEQ ID NO: 10613 - protein, 9 aa, Homo Sapiens
KLFDTQQFL

SEQ ID NO: 10614 - protein, 9 aa, Homo Sapiens
KLFGMIITI

SEQ ID NO: 10615 - protein, 9 aa, Homo Sapiens
KLFIGGLNV

SEQ ID NO: 10616 - protein, 9 aa, Homo Sapiens
KLFVALGPI

SEQ ID NO: 10617 - protein, 9 aa, Homo Sapiens
KLIEELETL

SEQ ID NO: 10618 - protein, 9 aa, Homo Sapiens
KLILLITQV

SEQ ID NO: 10619 - protein, 9 aa, Homo Sapiens
KLIPFLEKL

SEQ ID NO: 10620 - protein, 9 aa, Homo Sapiens
KLIPGLNNL

SEQ ID NO: 10621 - protein, 9 aa, Homo Sapiens
KLIPQLPTL

SEQ ID NO: 10622 - protein, 9 aa, Homo Sapiens
KLIQNVFEI

SEQ ID NO: 10623 - protein, 9 aa, Homo Sapiens
KLISELQKL

SEQ ID NO: 10624 - protein, 9 aa, Homo Sapiens
KLLAVIHEL

SEQ ID NO: 10625 - protein, 9 aa, Homo Sapiens
KLLDILSYL

SEQ ID NO: 10626 - protein, 9 aa, Homo Sapiens
KLLDLIEDL

SEQ ID NO: 10627 - protein, 9 aa, Homo Sapiens
KLLDLMPRL

SEQ ID NO: 10628 - protein, 9 aa, Homo Sapiens
KLLEAISSL

SEQ ID NO: 10629 - protein, 9 aa, Homo Sapiens
KLLEEICNL

SEQ ID NO: 10630 - protein, 9 aa, Homo Sapiens
KLLEEIEFL

SEQ ID NO: 10631 - protein, 9 aa, Homo Sapiens
KLLEPVLLL

SEQ ID NO: 10632 - protein, 9 aa, Homo Sapiens
KLLEYIEEI

SEQ ID NO: 10633 - protein, 9 aa, Homo Sapiens
KLLFWVTEV

SEQ ID NO: 10634 - protein, 9 aa, Homo Sapiens
KLLGELHTL

SEQ ID NO: 10635 - protein, 9 aa, Homo Sapiens
KLLKDLPEL

SEQ ID NO: 10636 - protein, 9 aa, Homo Sapiens
KLLKQVDFL

SEQ ID NO: 10637 - protein, 9 aa, Homo Sapiens
KLLNAINTL

SEQ ID NO: 10638 - protein, 9 aa, Homo Sapiens
KLLNLISKL

SEQ ID NO: 10639 - protein, 9 aa, Homo Sapiens
KLLPGIEVL

SEQ ID NO: 10640 - protein, 9 aa, Homo Sapiens
KLLPQLTYL

SEQ ID NO: 10641 - protein, 9 aa, Homo Sapiens
KLLPSVTEL

SEQ ID NO: 10642 - protein, 9 aa, Homo Sapiens
KLLSEIEFL

SEQ ID NO: 10643 - protein, 9 aa, Homo Sapiens
KLMELLEEI

SEQ ID NO: 10644 - protein, 9 aa, Homo Sapiens
KLNAKLAEL

SEQ ID NO: 10645 - protein, 9 aa, Homo Sapiens
KLNDLIQRL

SEQ ID NO: 10646 - protein, 9 aa, Homo Sapiens
KLNFIVTGL

SEQ ID NO: 10647 - protein, 9 aa, Homo Sapiens
KLNPGIAYV

SEQ ID NO: 10648 - protein, 9 aa, Homo Sapiens
KLNPQQFEV

SEQ ID NO: 10649 - protein, 9 aa, Homo Sapiens
KLQDQIFNL

SEQ ID NO: 10650 - protein, 9 aa, Homo Sapiens
KLQEFLQTL

SEQ ID NO: 10651 - protein, 9 aa, Homo Sapiens
KLQELNYNL

SEQ ID NO: 10652 - protein, 9 aa, Homo Sapiens
KLQEQIFHL

SEQ ID NO: 10653 - protein, 9 aa, Homo Sapiens
KLQEVLDYL

SEQ ID NO: 10654 - protein, 9 aa, Homo Sapiens
KLQNILSQL

SEQ ID NO: 10655 - protein, 9 aa, Homo Sapiens
KLQQELEFL

SEQ ID NO: 10656 - protein, 9 aa, Homo Sapiens
KLQQLFIQL

SEQ ID NO: 10657 - protein, 9 aa, Homo Sapiens
KLREDLERL

SEQ ID NO: 10658 - protein, 9 aa, Homo Sapiens
KLSDLQTQL

SEQ ID NO: 10659 - protein, 9 aa, Homo Sapiens
KLSQYLIQL

SEQ ID NO: 10660 - protein, 9 aa, Homo Sapiens
KLTAFVNTL

SEQ ID NO: 10661 - protein, 9 aa, Homo Sapiens
KLVDCIIEV

SEQ ID NO: 10662 - protein, 9 aa, Homo Sapiens
KLVELPYTV

SEQ ID NO: 10663 - protein, 9 aa, Homo Sapiens
KLWSETFDV

SEQ ID NO: 10664 - protein, 9 aa, Homo Sapiens
KLYPWIHQF

SEQ ID NO: 10665 - protein, 9 aa, Homo Sapiens
KMAEMLVEL

SEQ ID NO: 10666 - protein, 9 aa, Homo Sapiens
KMQETLVGL

SEQ ID NO: 10667 - protein, 9 aa, Homo Sapiens
KMSEKILLL

SEQ ID NO: 10668 - protein, 9 aa, Homo Sapiens
KMWEEAISL

SEQ ID NO: 10669 - protein, 9 aa, Homo Sapiens
KQVEEIFNL

SEQ ID NO: 10670 - protein, 9 aa, Homo Sapiens
KSLDWQIDV

SEQ ID NO: 10671 - protein, 9 aa, Homo Sapiens
KTIDYIQFL

SEQ ID NO: 10672 - protein, 9 aa, Homo Sapiens
KTLGKLWRL

SEQ ID NO: 10673 - protein, 9 aa, Homo Sapiens
KVADLVLML

SEQ ID NO: 10674 - protein, 9 aa, Homo Sapiens
KVLDLKINL

SEQ ID NO: 10675 - protein, 9 aa, Homo Sapiens
KVPEWVDTV

SEQ ID NO: 10676 - protein, 9 aa, Homo Sapiens
KVQEQIFNL

SEQ ID NO: 10677 - protein, 9 aa, Homo Sapiens
KVQEVIFGL

SEQ ID NO: 10678 - protein, 9 aa, Homo Sapiens
LARVILSKI

SEQ ID NO: 10679 - protein, 9 aa, Homo Sapiens
LEAILLQEL

SEQ ID NO: 10680 - protein, 9 aa, Homo Sapiens
LENLIKGRK

SEQ ID NO: 10681 - protein, 9 aa, Homo Sapiens
LGDLKLPEI

SEQ ID NO: 10682 - protein, 9 aa, Homo Sapiens
LGLYRSIFR

SEQ ID NO: 10683 - protein, 9 aa, Homo Sapiens
LIGSLIPTI

SEQ ID NO: 10684 - protein, 9 aa, Homo Sapiens
LILDEVHLL

SEQ ID NO: 10685 - protein, 9 aa, Homo Sapiens
LILPVLPRL

SEQ ID NO: 10686 - protein, 9 aa, Homo Sapiens
LIMELINNV

SEQ ID NO: 10687 - protein, 9 aa, Homo Sapiens
LINELLQVT

SEQ ID NO: 10688 - protein, 9 aa, Homo Sapiens
LINPNIATV

SEQ ID NO: 10689 - protein, 9 aa, Homo Sapiens
LINVPPPFL

SEQ ID NO: 10690 - protein, 9 aa, Homo Sapiens
LIQELIHNL

SEQ ID NO: 10691 - protein, 9 aa, Homo Sapiens
LISKIFPGL

SEQ ID NO: 10692 - protein, 9 aa, Homo Sapiens
LLAAWTARA

SEQ ID NO: 10693 - protein, 9 aa, Homo Sapiens
LLAEKIYKI

SEQ ID NO: 10694 - protein, 9 aa, Homo Sapiens
LLAEKVEQL

SEQ ID NO: 10695 - protein, 9 aa, Homo Sapiens
LLAELLTHL

SEQ ID NO: 10696 - protein, 9 aa, Homo Sapiens
LLAENLPGL

SEQ ID NO: 10697 - protein, 9 aa, Homo Sapiens
LLAEPVPGI

SEQ ID NO: 10698 - protein, 9 aa, Homo Sapiens
LLAETHYQL

SEQ ID NO: 10699 - protein, 9 aa, Homo Sapiens
LLAEVIENL

SEQ ID NO: 10700 - protein, 9 aa, Homo Sapiens
LLAPIVFVL

SEQ ID NO: 10701 - protein, 9 aa, Homo Sapiens
LLASEVPQL

SEQ ID NO: 10702 - protein, 9 aa, Homo Sapiens
LLATEIERL

SEQ ID NO: 10703 - protein, 9 aa, Homo Sapiens
LLATVLQAV

SEQ ID NO: 10704 - protein, 9 aa, Homo Sapiens
LLDVTPLSL

SEQ ID NO: 10705 - protein, 9 aa, Homo Sapiens
LLEESIANL

SEQ ID NO: 10706 - protein, 9 aa, Homo Sapiens
LLELENVPI

SEQ ID NO: 10707 - protein, 9 aa, Homo Sapiens
LLEPEVFHL

SEQ ID NO: 10708 - protein, 9 aa, Homo Sapiens
LLFDRPMHV

SEQ ID NO: 10709 - protein, 9 aa, Homo Sapiens
LLFLQLPLL

SEQ ID NO: 10710 - protein, 9 aa, Homo Sapiens
LLFSFAQAV

SEQ ID NO: 10711 - protein, 9 aa, Homo Sapiens
LLFTWEELI

SEQ ID NO: 10712 - protein, 9 aa, Homo Sapiens
LLGDLLFHI

SEQ ID NO: 10713 - protein, 9 aa, Homo Sapiens
LLGPPPVGV

SEQ ID NO: 10714 - protein, 9 aa, Homo Sapiens
LLHDGIPVV

SEQ ID NO: 10715 - protein, 9 aa, Homo Sapiens
LLIDELNKL

SEQ ID NO: 10716 - protein, 9 aa, Homo Sapiens
LLIERILLL

SEQ ID NO: 10717 - protein, 9 aa, Homo Sapiens
LLIGHLERV

SEQ ID NO: 10718 - protein, 9 aa, Homo Sapiens
LLINQLWQL

SEQ ID NO: 10719 - protein, 9 aa, Homo Sapiens
LLKDSIVQL

SEQ ID NO: 10720 - protein, 9 aa, Homo Sapiens
LLLAAPAQA

SEQ ID NO: 10721 - protein, 9 aa, Homo Sapiens
LLLAHIIAL

SEQ ID NO: 10722 - protein, 9 aa, Homo Sapiens
LLLDILEKL

SEQ ID NO: 10723 - protein, 9 aa, Homo Sapiens
LLLDIMPGL

SEQ ID NO: 10724 - protein, 9 aa, Homo Sapiens
LLLDMQNRL

SEQ ID NO: 10725 - protein, 9 aa, Homo Sapiens
LLLEAVWHL

SEQ ID NO: 10726 - protein, 9 aa, Homo Sapiens
LLLEILHEI

SEQ ID NO: 10727 - protein, 9 aa, Homo Sapiens
LLLNELPSV

SEQ ID NO: 10728 - protein, 9 aa, Homo Sapiens
LLLSLLPAL

SEQ ID NO: 10729 - protein, 9 aa, Homo Sapiens
LLLSVLPQL

SEQ ID NO: 10730 - protein, 9 aa, Homo Sapiens
LLLTLLPQL

SEQ ID NO: 10731 - protein, 9 aa, Homo Sapiens
LLLVGIHLL

SEQ ID NO: 10732 - protein, 9 aa, Homo Sapiens
LLMEHIQEI

SEQ ID NO: 10733 - protein, 9 aa, Homo Sapiens
LLMPSPSHL

SEQ ID NO: 10734 - protein, 9 aa, Homo Sapiens
LLMRLLQQL

SEQ ID NO: 10735 - protein, 9 aa, Homo Sapiens
LLNDRIWLA

SEQ ID NO: 10736 - protein, 9 aa, Homo Sapiens
LLNEILEQV

SEQ ID NO: 10737 - protein, 9 aa, Homo Sapiens
LLNKAPEYL

SEQ ID NO: 10738 - protein, 9 aa, Homo Sapiens
LLNKSIIRV

SEQ ID NO: 10739 - protein, 9 aa, Homo Sapiens
LLNPHLRQL

SEQ ID NO: 10740 - protein, 9 aa, Homo Sapiens
LLNPSLQKV

SEQ ID NO: 10741 - protein, 9 aa, Homo Sapiens
LLNQAPDML

SEQ ID NO: 10742 - protein, 9 aa, Homo Sapiens
LLNSEVHML

SEQ ID NO: 10743 - protein, 9 aa, Homo Sapiens
LLNSGVVHL

SEQ ID NO: 10744 - protein, 9 aa, Homo Sapiens
LLPDNVHYV

SEQ ID NO: 10745 - protein, 9 aa, Homo Sapiens
LLPESIPFL

SEQ ID NO: 10746 - protein, 9 aa, Homo Sapiens
LLPLKLLQL

SEQ ID NO: 10747 - protein, 9 aa, Homo Sapiens
LLPPPPCPA

SEQ ID NO: 10748 - protein, 9 aa, Homo Sapiens
LLQAFISQL

SEQ ID NO: 10749 - protein, 9 aa, Homo Sapiens
LLQAQIQRL

SEQ ID NO: 10750 - protein, 9 aa, Homo Sapiens
LLQDFSRNL

SEQ ID NO: 10751 - protein, 9 aa, Homo Sapiens
LLQDHPWLL

SEQ ID NO: 10752 - protein, 9 aa, Homo Sapiens
LLQDIILQV

SEQ ID NO: 10753 - protein, 9 aa, Homo Sapiens
LLQKVISNL

SEQ ID NO: 10754 - protein, 9 aa, Homo Sapiens
LLQLDVPLL

SEQ ID NO: 10755 - protein, 9 aa, Homo Sapiens
LLQMGLHVL

SEQ ID NO: 10756 - protein, 9 aa, Homo Sapiens
LLQNNLPAV

SEQ ID NO: 10757 - protein, 9 aa, Homo Sapiens
LLQRIIVEL

SEQ ID NO: 10758 - protein, 9 aa, Homo Sapiens
LLQVVLPAL

SEQ ID NO: 10759 - protein, 9 aa, Homo Sapiens
LLRDAIEKL

SEQ ID NO: 10760 - protein, 9 aa, Homo Sapiens
LLRDTINGL

SEQ ID NO: 10761 - protein, 9 aa, Homo Sapiens
LLREELQLL

SEQ ID NO: 10762 - protein, 9 aa, Homo Sapiens
LLREKVEFL

SEQ ID NO: 10763 - protein, 9 aa, Homo Sapiens
LLREQVAQL

SEQ ID NO: 10764 - protein, 9 aa, Homo Sapiens
LLRLQVEEL

SEQ ID NO: 10765 - protein, 9 aa, Homo Sapiens
LLSDVRFVL

SEQ ID NO: 10766 - protein, 9 aa, Homo Sapiens
LLSDYGYHL

SEQ ID NO: 10767 - protein, 9 aa, Homo Sapiens
LLSEHVIAI

SEQ ID NO: 10768 - protein, 9 aa, Homo Sapiens
LLSEILHLL

SEQ ID NO: 10769 - protein, 9 aa, Homo Sapiens
LLSELLEHL

SEQ ID NO: 10770 - protein, 9 aa, Homo Sapiens
LLSHVIVAL

SEQ ID NO: 10771 - protein, 9 aa, Homo Sapiens
LLSPHNPAL

SEQ ID NO: 10772 - protein, 9 aa, Homo Sapiens
LLSPVVPQI

SEQ ID NO: 10773 - protein, 9 aa, Homo Sapiens
LLSQSVHYL

SEQ ID NO: 10774 - protein, 9 aa, Homo Sapiens
LLSRVLFAL

SEQ ID NO: 10775 - protein, 9 aa, Homo Sapiens
LLTEIRAVV

SEQ ID NO: 10776 - protein, 9 aa, Homo Sapiens
LLTEQIHSL

SEQ ID NO: 10777 - protein, 9 aa, Homo Sapiens
LLTNVLETL

SEQ ID NO: 10778 - protein, 9 aa, Homo Sapiens
LLVEEIHRL

SEQ ID NO: 10779 - protein, 9 aa, Homo Sapiens
LLVGFVHYL

SEQ ID NO: 10780 - protein, 9 aa, Homo Sapiens
LLVSLLEHL

SEQ ID NO: 10781 - protein, 9 aa, Homo Sapiens
LLWDYVYQL

SEQ ID NO: 10782 - protein, 9 aa, Homo Sapiens
LLWGNLPEI

SEQ ID NO: 10783 - protein, 9 aa, Homo Sapiens
LLWWLQPRL

SEQ ID NO: 10784 - protein, 9 aa, Homo Sapiens
LMKQYIEFV

SEQ ID NO: 10785 - protein, 9 aa, Homo Sapiens
LMMDPLTGL

SEQ ID NO: 10786 - protein, 9 aa, Homo Sapiens
LMNAVVQTV

SEQ ID NO: 10787 - protein, 9 aa, Homo Sapiens
LMNPMVPGL

SEQ ID NO: 10788 - protein, 9 aa, Homo Sapiens
LMVDHVTEV

SEQ ID NO: 10789 - protein, 9 aa, Homo Sapiens
LMYPYIFHV

SEQ ID NO: 10790 - protein, 9 aa, Homo Sapiens
LQALLPEPL

SEQ ID NO: 10791 - protein, 9 aa, Homo Sapiens
LQKIIQFVE

SEQ ID NO: 10792 - protein, 9 aa, Homo Sapiens
LQLHEIPSL

SEQ ID NO: 10793 - protein, 9 aa, Homo Sapiens
LQLPGLWSV

SEQ ID NO: 10794 - protein, 9 aa, Homo Sapiens
LQNPIIVQL

SEQ ID NO: 10795 - protein, 9 aa, Homo Sapiens
LQVEEVHQL

SEQ ID NO: 10796 - protein, 9 aa, Homo Sapiens
LQWDKVLRL

SEQ ID NO: 10797 - protein, 9 aa, Homo Sapiens
LRINAIYEV

SEQ ID NO: 10798 - protein, 9 aa, Homo Sapiens
LRLLHIEEL

SEQ ID NO: 10799 - protein, 9 aa, Homo Sapiens
LSFSWLFHT

SEQ ID NO: 10800 - protein, 9 aa, Homo Sapiens
LSIKDILEP

SEQ ID NO: 10801 - protein, 9 aa, Homo Sapiens
LSLENLEKI

SEQ ID NO: 10802 - protein, 9 aa, Homo Sapiens
LSLGALVAL

SEQ ID NO: 10803 - protein, 9 aa, Homo Sapiens
LSLPYLQTK

SEQ ID NO: 10804 - protein, 9 aa, Homo Sapiens
LSNHAVAAL

SEQ ID NO: 10805 - protein, 9 aa, Homo Sapiens
LTAEEIFSL

SEQ ID NO: 10806 - protein, 9 aa, Homo Sapiens
LTMEVIRQV

SEQ ID NO: 10807 - protein, 9 aa, Homo Sapiens
LTMPDTPRL

SEQ ID NO: 10808 - protein, 9 aa, Homo Sapiens
LTNDWEDHL

SEQ ID NO: 10809 - protein, 9 aa, Homo Sapiens
LTQEQLHQL

SEQ ID NO: 10810 - protein, 9 aa, Homo Sapiens
LVELALPQL

SEQ ID NO: 10811 - protein, 9 aa, Homo Sapiens
LVLDKLFQL

SEQ ID NO: 10812 - protein, 9 aa, Homo Sapiens
LVLESLLHL

SEQ ID NO: 10813 - protein, 9 aa, Homo Sapiens
LVLRALDTL

SEQ ID NO: 10814 - protein, 9 aa, Homo Sapiens
LVVDWLESI

SEQ ID NO: 10815 - protein, 9 aa, Homo Sapiens
MLAEKLPNL

SEQ ID NO: 10816 - protein, 9 aa, Homo Sapiens
MLANDIARL

SEQ ID NO: 10817 - protein, 9 aa, Homo Sapiens
MLAQLLAEL

SEQ ID NO: 10818 - protein, 9 aa, Homo Sapiens
MLATRVFSL

SEQ ID NO: 10819 - protein, 9 aa, Homo Sapiens
MLFDYKDQL

SEQ ID NO: 10820 - protein, 9 aa, Homo Sapiens
MLHSVTLFL

SEQ ID NO: 10821 - protein, 9 aa, Homo Sapiens
MLIEVIEKL

SEQ ID NO: 10822 - protein, 9 aa, Homo Sapiens
MLIGEIFEL

SEQ ID NO: 10823 - protein, 9 aa, Homo Sapiens
MLLDFIQHI

SEQ ID NO: 10824 - protein, 9 aa, Homo Sapiens
MLLEGLREL

SEQ ID NO: 10825 - protein, 9 aa, Homo Sapiens
MLLSKINSL

SEQ ID NO: 10826 - protein, 9 aa, Homo Sapiens
MLLSSLVSL

SEQ ID NO: 10827 - protein, 9 aa, Homo Sapiens
MLLSVPLLL

SEQ ID NO: 10828 - protein, 9 aa, Homo Sapiens
MLLTKLPTI

SEQ ID NO: 10829 - protein, 9 aa, Homo Sapiens
MLQFYIPEV

SEQ ID NO: 10830 - protein, 9 aa, Homo Sapiens
MLSPFISSV

SEQ ID NO: 10831 - protein, 9 aa, Homo Sapiens
MMLDDLLQL

SEQ ID NO: 10832 - protein, 9 aa, Homo Sapiens
MMMALLVPL

SEQ ID NO: 10833 - protein, 9 aa, Homo Sapiens
MQISFIHQL

SEQ ID NO: 10834 - protein, 9 aa, Homo Sapiens
MTLPNLPRL

SEQ ID NO: 10835 - protein, 9 aa, Homo Sapiens
MVLPVIYEL

SEQ ID NO: 10836 - protein, 9 aa, Homo Sapiens
NIFRWETTI

SEQ ID NO: 10837 - protein, 9 aa, Homo Sapiens
NILELLHRL

SEQ ID NO: 10838 - protein, 9 aa, Homo Sapiens
NILQLGSKL

SEQ ID NO: 10839 - protein, 9 aa, Homo Sapiens
NIVEKLREV

SEQ ID NO: 10840 - protein, 9 aa, Homo Sapiens
NLAAYVPLL

SEQ ID NO: 10841 - protein, 9 aa, Homo Sapiens
NLANVVLLL

SEQ ID NO: 10842 - protein, 9 aa, Homo Sapiens
NLAPVILQL

SEQ ID NO: 10843 - protein, 9 aa, Homo Sapiens
NLASFIEQV

SEQ ID NO: 10844 - protein, 9 aa, Homo Sapiens
NLFEWHFTV

SEQ ID NO: 10845 - protein, 9 aa, Homo Sapiens
NLFHYLTEV

SEQ ID NO: 10846 - protein, 9 aa, Homo Sapiens
NLFKWVGTI

SEQ ID NO: 10847 - protein, 9 aa, Homo Sapiens
NLHHWIDLI

SEQ ID NO: 10848 - protein, 9 aa, Homo Sapiens
NLIGKIEKL

SEQ ID NO: 10849 - protein, 9 aa, Homo Sapiens
NLINNIFEL

SEQ ID NO: 10850 - protein, 9 aa, Homo Sapiens
NLIRWSDQV

SEQ ID NO: 10851 - protein, 9 aa, Homo Sapiens
NLLEEVFHL

SEQ ID NO: 10852 - protein, 9 aa, Homo Sapiens
NLLESLSGL

SEQ ID NO: 10853 - protein, 9 aa, Homo Sapiens
NLLGMIFSM

SEQ ID NO: 10854 - protein, 9 aa, Homo Sapiens
NLLKLIAEV

SEQ ID NO: 10855 - protein, 9 aa, Homo Sapiens
NLLPKLHIV

SEQ ID NO: 10856 - protein, 9 aa, Homo Sapiens
NLLSNIQKL

SEQ ID NO: 10857 - protein, 9 aa, Homo Sapiens
NLLTHVESL

SEQ ID NO: 10858 - protein, 9 aa, Homo Sapiens
NLNEKINHL

SEQ ID NO: 10859 - protein, 9 aa, Homo Sapiens
NLNQFLPEL

SEQ ID NO: 10860 - protein, 9 aa, Homo Sapiens
NLNSIVPSV

SEQ ID NO: 10861 - protein, 9 aa, Homo Sapiens
NLQAVINEV

SEQ ID NO: 10862 - protein, 9 aa, Homo Sapiens
NLSNFLIHL

SEQ ID NO: 10863 - protein, 9 aa, Homo Sapiens
NLYPFVKTV

SEQ ID NO: 10864 - protein, 9 aa, Homo Sapiens
NMVDIIHSV

SEQ ID NO: 10865 - protein, 9 aa, Homo Sapiens
NQNPEVFFL

SEQ ID NO: 10866 - protein, 9 aa, Homo Sapiens
NVFDWGAKA

SEQ ID NO: 10867 - protein, 9 aa, Homo Sapiens
NVQVVIPFL

SEQ ID NO: 10868 - protein, 9 aa, Homo Sapiens
PIRLLAAAA

SEQ ID NO: 10869 - protein, 9 aa, Homo Sapiens
PLSKPLPEL

SEQ ID NO: 10870 - protein, 9 aa, Homo Sapiens
QILDGIHYL

SEQ ID NO: 10871 - protein, 9 aa, Homo Sapiens
QILDGVHYL

SEQ ID NO: 10872 - protein, 9 aa, Homo Sapiens
QILEGVHFL

SEQ ID NO: 10873 - protein, 9 aa, Homo Sapiens
QILFWIQEI

SEQ ID NO: 10874 - protein, 9 aa, Homo Sapiens
QILPTLVRL

SEQ ID NO: 10875 - protein, 9 aa, Homo Sapiens
QIMDYLLCL

SEQ ID NO: 10876 - protein, 9 aa, Homo Sapiens
QLAQFVHEV

SEQ ID NO: 10877 - protein, 9 aa, Homo Sapiens
QLFDQIPEL

SEQ ID NO: 10878 - protein, 9 aa, Homo Sapiens
QLFEDLVYL

SEQ ID NO: 10879 - protein, 9 aa, Homo Sapiens
QLIDKVWQL

SEQ ID NO: 10880 - protein, 9 aa, Homo Sapiens
QLIHEISNL

SEQ ID NO: 10881 - protein, 9 aa, Homo Sapiens
QLIPKLIFL

SEQ ID NO: 10882 - protein, 9 aa, Homo Sapiens
QLIPNVQQL

SEQ ID NO: 10883 - protein, 9 aa, Homo Sapiens
QLITDIPLL

SEQ ID NO: 10884 - protein, 9 aa, Homo Sapiens
QLLANLARL

SEQ ID NO: 10885 - protein, 9 aa, Homo Sapiens
QLLDLMHTL

SEQ ID NO: 10886 - protein, 9 aa, Homo Sapiens
QLLDQIWRT

SEQ ID NO: 10887 - protein, 9 aa, Homo Sapiens
QLLDTIRSL

SEQ ID NO: 10888 - protein, 9 aa, Homo Sapiens
QLLDVLARL

SEQ ID NO: 10889 - protein, 9 aa, Homo Sapiens
QLLEALVAL

SEQ ID NO: 10890 - protein, 9 aa, Homo Sapiens
QLLEFLDRL

SEQ ID NO: 10891 - protein, 9 aa, Homo Sapiens
QLLEKVIEL

SEQ ID NO: 10892 - protein, 9 aa, Homo Sapiens
QLLEKVPTL

SEQ ID NO: 10893 - protein, 9 aa, Homo Sapiens
QLLETLNQL

SEQ ID NO: 10894 - protein, 9 aa, Homo Sapiens
QLLFSLPKL

SEQ ID NO: 10895 - protein, 9 aa, Homo Sapiens
QLLIWIPRL

SEQ ID NO: 10896 - protein, 9 aa, Homo Sapiens
QLLLEPPKL

SEQ ID NO: 10897 - protein, 9 aa, Homo Sapiens
QLLPLIVNL

SEQ ID NO: 10898 - protein, 9 aa, Homo Sapiens
QLLPLLEKV

SEQ ID NO: 10899 - protein, 9 aa, Homo Sapiens
QLLPSIPQL

SEQ ID NO: 10900 - protein, 9 aa, Homo Sapiens
QLLQILQSL

SEQ ID NO: 10901 - protein, 9 aa, Homo Sapiens
QLLQYVYNL

SEQ ID NO: 10902 - protein, 9 aa, Homo Sapiens
QLLRKIQLL

SEQ ID NO: 10903 - protein, 9 aa, Homo Sapiens
QLLSEITRV

SEQ ID NO: 10904 - protein, 9 aa, Homo Sapiens
QLLSYIDRL

SEQ ID NO: 10905 - protein, 9 aa, Homo Sapiens
QLLTAIVKL

SEQ ID NO: 10906 - protein, 9 aa, Homo Sapiens
QLLTQIHLL

SEQ ID NO: 10907 - protein, 9 aa, Homo Sapiens
QLMEQVAQL

SEQ ID NO: 10908 - protein, 9 aa, Homo Sapiens
QLMNLIRSV

SEQ ID NO: 10909 - protein, 9 aa, Homo Sapiens
QLNEKVAQL

SEQ ID NO: 10910 - protein, 9 aa, Homo Sapiens
QLNELQAQL

SEQ ID NO: 10911 - protein, 9 aa, Homo Sapiens
QLNEQLVTL

SEQ ID NO: 10912 - protein, 9 aa, Homo Sapiens
QLNVVIHQL

SEQ ID NO: 10913 - protein, 9 aa, Homo Sapiens
QLPNFAFSV

SEQ ID NO: 10914 - protein, 9 aa, Homo Sapiens
QLQDIVYKL

SEQ ID NO: 10915 - protein, 9 aa, Homo Sapiens
QLQDTLIHL

SEQ ID NO: 10916 - protein, 9 aa, Homo Sapiens
QLQDYIQLL

SEQ ID NO: 10917 - protein, 9 aa, Homo Sapiens
QLQEIIARL

SEQ ID NO: 10918 - protein, 9 aa, Homo Sapiens
QLQGYLRSV

SEQ ID NO: 10919 - protein, 9 aa, Homo Sapiens
QLQNWFTIV

SEQ ID NO: 10920 - protein, 9 aa, Homo Sapiens
QLRDFYFSV

SEQ ID NO: 10921 - protein, 9 aa, Homo Sapiens
QLRNVIERL

SEQ ID NO: 10922 - protein, 9 aa, Homo Sapiens
QLSEVFIQL

SEQ ID NO: 10923 - protein, 9 aa, Homo Sapiens
QLSPVLLYL

SEQ ID NO: 10924 - protein, 9 aa, Homo Sapiens
QLTNVILHL

SEQ ID NO: 10925 - protein, 9 aa, Homo Sapiens
QLVDIIEKV

SEQ ID NO: 10926 - protein, 9 aa, Homo Sapiens
QMISRIEYI

SEQ ID NO: 10927 - protein, 9 aa, Homo Sapiens
QMLELITRL

SEQ ID NO: 10928 - protein, 9 aa, Homo Sapiens
QMREFLEQL

SEQ ID NO: 10929 - protein, 9 aa, Homo Sapiens
QQVQRLPFL

SEQ ID NO: 10930 - protein, 9 aa, Homo Sapiens
QQYQWLEKV

SEQ ID NO: 10931 - protein, 9 aa, Homo Sapiens
RAHEWMFPV

SEQ ID NO: 10932 - protein, 9 aa, Homo Sapiens
RFTEWLHEV

SEQ ID NO: 10933 - protein, 9 aa, Homo Sapiens
RIAEFTTNL

SEQ ID NO: 10934 - protein, 9 aa, Homo Sapiens
RIAEYAFKL

SEQ ID NO: 10935 - protein, 9 aa, Homo Sapiens
RIIDVVYNA

SEQ ID NO: 10936 - protein, 9 aa, Homo Sapiens
RILDILEYI

SEQ ID NO: 10937 - protein, 9 aa, Homo Sapiens
RILDYVINL

SEQ ID NO: 10938 - protein, 9 aa, Homo Sapiens
RIQEELSAL

SEQ ID NO: 10939 - protein, 9 aa, Homo Sapiens
RIQEIIEQL

SEQ ID NO: 10940 - protein, 9 aa, Homo Sapiens
RISDVHFSV

SEQ ID NO: 10941 - protein, 9 aa, Homo Sapiens
RLAEQIATL

SEQ ID NO: 10942 - protein, 9 aa, Homo Sapiens
RLAHYIDRV

SEQ ID NO: 10943 - protein, 9 aa, Homo Sapiens
RLALVISEL

SEQ ID NO: 10944 - protein, 9 aa, Homo Sapiens
RLAPAQWFL

SEQ ID NO: 10945 - protein, 9 aa, Homo Sapiens
RLAPTLSQL

SEQ ID NO: 10946 - protein, 9 aa, Homo Sapiens
RLAQHITYV

SEQ ID NO: 10947 - protein, 9 aa, Homo Sapiens
RLAVYIDRV

SEQ ID NO: 10948 - protein, 9 aa, Homo Sapiens
RLELELLRQ

SEQ ID NO: 10949 - protein, 9 aa, Homo Sapiens
RLFAVLEQL

SEQ ID NO: 10950 - protein, 9 aa, Homo Sapiens
RLFDDVPQV

SEQ ID NO: 10951 - protein, 9 aa, Homo Sapiens
RLFDWLVSV

SEQ ID NO: 10952 - protein, 9 aa, Homo Sapiens
RLFENLRML

SEQ ID NO: 10953 - protein, 9 aa, Homo Sapiens
RLFESINNL

SEQ ID NO: 10954 - protein, 9 aa, Homo Sapiens
RLFEVPHEL

SEQ ID NO: 10955 - protein, 9 aa, Homo Sapiens
RLFSKGFLV

SEQ ID NO: 10956 - protein, 9 aa, Homo Sapiens
RLGCFNLTV

SEQ ID NO: 10957 - protein, 9 aa, Homo Sapiens
RLGPVPPGL

SEQ ID NO: 10958 - protein, 9 aa, Homo Sapiens
RLIEESVTV

SEQ ID NO: 10959 - protein, 9 aa, Homo Sapiens
RLIESLFTI

SEQ ID NO: 10960 - protein, 9 aa, Homo Sapiens
RLINQVLEL

SEQ ID NO: 10961 - protein, 9 aa, Homo Sapiens
RLLATIVML

SEQ ID NO: 10962 - protein, 9 aa, Homo Sapiens
RLLAYISQV

SEQ ID NO: 10963 - protein, 9 aa, Homo Sapiens
RLLDALEFL

SEQ ID NO: 10964 - protein, 9 aa, Homo Sapiens
RLLDGAFKL

SEQ ID NO: 10965 - protein, 9 aa, Homo Sapiens
RLLDRLPSF

SEQ ID NO: 10966 - protein, 9 aa, Homo Sapiens
RLLDSVRAI

SEQ ID NO: 10967 - protein, 9 aa, Homo Sapiens
RLLDVLCEM

SEQ ID NO: 10968 - protein, 9 aa, Homo Sapiens
RLLDWFRSL

SEQ ID NO: 10969 - protein, 9 aa, Homo Sapiens
RLLDYVATV

SEQ ID NO: 10970 - protein, 9 aa, Homo Sapiens
RLLDYVVNI

SEQ ID NO: 10971 - protein, 9 aa, Homo Sapiens
RLLEALQGL

SEQ ID NO: 10972 - protein, 9 aa, Homo Sapiens
RLLEEIHAM

SEQ ID NO: 10973 - protein, 9 aa, Homo Sapiens
RLLEELQRL

SEQ ID NO: 10974 - protein, 9 aa, Homo Sapiens
RLLEFLVAL

SEQ ID NO: 10975 - protein, 9 aa, Homo Sapiens
RLLEGVNQL

SEQ ID NO: 10976 - protein, 9 aa, Homo Sapiens
RLLELLTKL

SEQ ID NO: 10977 - protein, 9 aa, Homo Sapiens
RLLENMTEV

SEQ ID NO: 10978 - protein, 9 aa, Homo Sapiens
RLLEQLQEI

SEQ ID NO: 10979 - protein, 9 aa, Homo Sapiens
RLLESLIRL

SEQ ID NO: 10980 - protein, 9 aa, Homo Sapiens
RLLEVVTSI

SEQ ID NO: 10981 - protein, 9 aa, Homo Sapiens
RLLFQLAQL

SEQ ID NO: 10982 - protein, 9 aa, Homo Sapiens
RLLGYVATL

SEQ ID NO: 10983 - protein, 9 aa, Homo Sapiens
RLLHEVQEL

SEQ ID NO: 10984 - protein, 9 aa, Homo Sapiens
RLLLTLPLL

SEQ ID NO: 10985 - protein, 9 aa, Homo Sapiens
RLLPALTVL

SEQ ID NO: 10986 - protein, 9 aa, Homo Sapiens
RLLPRLLLL

SEQ ID NO: 10987 - protein, 9 aa, Homo Sapiens
RLLPVIFLV

SEQ ID NO: 10988 - protein, 9 aa, Homo Sapiens
RLLSQVRAL

SEQ ID NO: 10989 - protein, 9 aa, Homo Sapiens
RLLVKLQEL

SEQ ID NO: 10990 - protein, 9 aa, Homo Sapiens
RLMAEIQDL

SEQ ID NO: 10991 - protein, 9 aa, Homo Sapiens
RLNELMSQI

SEQ ID NO: 10992 - protein, 9 aa, Homo Sapiens
RLNEVIRTL

SEQ ID NO: 10993 - protein, 9 aa, Homo Sapiens
RLNGVTLNL

SEQ ID NO: 10994 - protein, 9 aa, Homo Sapiens
RLNKVISEL

SEQ ID NO: 10995 - protein, 9 aa, Homo Sapiens
RLNPLVLLL

SEQ ID NO: 10996 - protein, 9 aa, Homo Sapiens
RLPDLIIFL

SEQ ID NO: 10997 - protein, 9 aa, Homo Sapiens
RLPEIYIQL

SEQ ID NO: 10998 - protein, 9 aa, Homo Sapiens
RLQDAIAKV

SEQ ID NO: 10999 - protein, 9 aa, Homo Sapiens
RLQDEIQNM

SEQ ID NO: 11000 - protein, 9 aa, Homo Sapiens
RLQDEIQRL

SEQ ID NO: 11001 - protein, 9 aa, Homo Sapiens
RLQDILWFL

SEQ ID NO: 11002 - protein, 9 aa, Homo Sapiens
RLQEEINEV

SEQ ID NO: 11003 - protein, 9 aa, Homo Sapiens
RLQEFIDEV

SEQ ID NO: 11004 - protein, 9 aa, Homo Sapiens
RLQEMLSLL

SEQ ID NO: 11005 - protein, 9 aa, Homo Sapiens
RLQESFFNL

SEQ ID NO: 11006 - protein, 9 aa, Homo Sapiens
RLQQELMTL

SEQ ID NO: 11007 - protein, 9 aa, Homo Sapiens
RLQQVLTGL

SEQ ID NO: 11008 - protein, 9 aa, Homo Sapiens
RLQSIVAGL

SEQ ID NO: 11009 - protein, 9 aa, Homo Sapiens
RLQTQVFKL

SEQ ID NO: 11010 - protein, 9 aa, Homo Sapiens
RLQTWWHGV

SEQ ID NO: 11011 - protein, 9 aa, Homo Sapiens
RLSDQVLFV

SEQ ID NO: 11012 - protein, 9 aa, Homo Sapiens
RLSDYLFTL

SEQ ID NO: 11013 - protein, 9 aa, Homo Sapiens
RLTDYISKV

SEQ ID NO: 11014 - protein, 9 aa, Homo Sapiens
RLTDYVAFL

SEQ ID NO: 11015 - protein, 9 aa, Homo Sapiens
RLVEIQYEL

SEQ ID NO: 11016 - protein, 9 aa, Homo Sapiens
RLVNWSCTL

SEQ ID NO: 11017 - protein, 9 aa, Homo Sapiens
RLVPFLVEL

SEQ ID NO: 11018 - protein, 9 aa, Homo Sapiens
RLVSWVNLI

SEQ ID NO: 11019 - protein, 9 aa, Homo Sapiens
RLWEGAISI

SEQ ID NO: 11020 - protein, 9 aa, Homo Sapiens
RLWEYLLEL

SEQ ID NO: 11021 - protein, 9 aa, Homo Sapiens
RLWGEPVNL

SEQ ID NO: 11022 - protein, 9 aa, Homo Sapiens
RLYHELVGL

SEQ ID NO: 11023 - protein, 9 aa, Homo Sapiens
RMLPHAPGV

SEQ ID NO: 11024 - protein, 9 aa, Homo Sapiens
RMNQEIVNL

SEQ ID NO: 11025 - protein, 9 aa, Homo Sapiens
RQADKVWRL

SEQ ID NO: 11026 - protein, 9 aa, Homo Sapiens
RQFLFHWTV

SEQ ID NO: 11027 - protein, 9 aa, Homo Sapiens
RQLEAIVRI

SEQ ID NO: 11028 - protein, 9 aa, Homo Sapiens
RSNPKIWNV

SEQ ID NO: 11029 - protein, 9 aa, Homo Sapiens
RTFSWASVT

SEQ ID NO: 11030 - protein, 9 aa, Homo Sapiens
RTISVILFL

SEQ ID NO: 11031 - protein, 9 aa, Homo Sapiens
RTLETLIRL

SEQ ID NO: 11032 - protein, 9 aa, Homo Sapiens
RTLPKLYSL

SEQ ID NO: 11033 - protein, 9 aa, Homo Sapiens
RTMPRIPTL

SEQ ID NO: 11034 - protein, 9 aa, Homo Sapiens
RVFENIVAV

SEQ ID NO: 11035 - protein, 9 aa, Homo Sapiens
RVIDYILDL

SEQ ID NO: 11036 - protein, 9 aa, Homo Sapiens
RVLEMLEAL

SEQ ID NO: 11037 - protein, 9 aa, Homo Sapiens
RVMEEIRNL

SEQ ID NO: 11038 - protein, 9 aa, Homo Sapiens
RVMELFFTV

SEQ ID NO: 11039 - protein, 9 aa, Homo Sapiens
RVMEYINRL

SEQ ID NO: 11040 - protein, 9 aa, Homo Sapiens
RVNQAIWLL

SEQ ID NO: 11041 - protein, 9 aa, Homo Sapiens
RVSDINFTL

SEQ ID NO: 11042 - protein, 9 aa, Homo Sapiens
RVSELLQGL

SEQ ID NO: 11043 - protein, 9 aa, Homo Sapiens
RVVDYLTKL

SEQ ID NO: 11044 - protein, 9 aa, Homo Sapiens
SAFYWIDRV

SEQ ID NO: 11045 - protein, 9 aa, Homo Sapiens
SAIDRIFTL

SEQ ID NO: 11046 - protein, 9 aa, Homo Sapiens
SALFWADKV

SEQ ID NO: 11047 - protein, 9 aa, Homo Sapiens
SALPWNITV

SEQ ID NO: 11048 - protein, 9 aa, Homo Sapiens
SAMELIWNL

SEQ ID NO: 11049 - protein, 9 aa, Homo Sapiens
SAMEVVPAL

SEQ ID NO: 11050 - protein, 9 aa, Homo Sapiens
SIAAFIQRL

SEQ ID NO: 11051 - protein, 9 aa, Homo Sapiens
SIAECLTYL

SEQ ID NO: 11052 - protein, 9 aa, Homo Sapiens
SIAEVVHQL

SEQ ID NO: 11053 - protein, 9 aa, Homo Sapiens
SIATWGIVV

SEQ ID NO: 11054 - protein, 9 aa, Homo Sapiens
SIHDVTFQV

SEQ ID NO: 11055 - protein, 9 aa, Homo Sapiens
SIIDWLNSV

SEQ ID NO: 11056 - protein, 9 aa, Homo Sapiens
SIIEYLPTL

SEQ ID NO: 11057 - protein, 9 aa, Homo Sapiens
SIIGRLLEV

SEQ ID NO: 11058 - protein, 9 aa, Homo Sapiens
SILDGLIHL

SEQ ID NO: 11059 - protein, 9 aa, Homo Sapiens
SILEDPPSI

SEQ ID NO: 11060 - protein, 9 aa, Homo Sapiens
SILEHQIQV

SEQ ID NO: 11061 - protein, 9 aa, Homo Sapiens
SILGMLVGL

SEQ ID NO: 11062 - protein, 9 aa, Homo Sapiens
SILNELIGL

SEQ ID NO: 11063 - protein, 9 aa, Homo Sapiens
SILTQPWRL

SEQ ID NO: 11064 - protein, 9 aa, Homo Sapiens
SILTSIQSL

SEQ ID NO: 11065 - protein, 9 aa, Homo Sapiens
SIMDYVVFV

SEQ ID NO: 11066 - protein, 9 aa, Homo Sapiens
SINDKIIEL

SEQ ID NO: 11067 - protein, 9 aa, Homo Sapiens
SINGVIFGL

SEQ ID NO: 11068 - protein, 9 aa, Homo Sapiens
SIQALIHGL

SEQ ID NO: 11069 - protein, 9 aa, Homo Sapiens
SIQQSIERL

SEQ ID NO: 11070 - protein, 9 aa, Homo Sapiens
SIQSIVPAL

SEQ ID NO: 11071 - protein, 9 aa, Homo Sapiens
SISDVIAQV

SEQ ID NO: 11072 - protein, 9 aa, Homo Sapiens
SISPIVLYL

SEQ ID NO: 11073 - protein, 9 aa, Homo Sapiens
SLAADIPRL

SEQ ID NO: 11074 - protein, 9 aa, Homo Sapiens
SLADCIPLL

SEQ ID NO: 11075 - protein, 9 aa, Homo Sapiens
SLADIAQKL

SEQ ID NO: 11076 - protein, 9 aa, Homo Sapiens
SLADVHIEV

SEQ ID NO: 11077 - protein, 9 aa, Homo Sapiens
SLAEFVQSL

SEQ ID NO: 11078 - protein, 9 aa, Homo Sapiens
SLAEKIQAL

SEQ ID NO: 11079 - protein, 9 aa, Homo Sapiens
SLAELIQAL

SEQ ID NO: 11080 - protein, 9 aa, Homo Sapiens
SLAEVLQQL

SEQ ID NO: 11081 - protein, 9 aa, Homo Sapiens
SLALGLPHL

SEQ ID NO: 11082 - protein, 9 aa, Homo Sapiens
SLAPIIVHV

SEQ ID NO: 11083 - protein, 9 aa, Homo Sapiens
SLAPLFFKL

SEQ ID NO: 11084 - protein, 9 aa, Homo Sapiens
SLAQYLINV

SEQ ID NO: 11085 - protein, 9 aa, Homo Sapiens
SLAQYNPKL

SEQ ID NO: 11086 - protein, 9 aa, Homo Sapiens
SLASFIPAV

SEQ ID NO: 11087 - protein, 9 aa, Homo Sapiens
SLASHIQSL

SEQ ID NO: 11088 - protein, 9 aa, Homo Sapiens
SLASLLVSV

SEQ ID NO: 11089 - protein, 9 aa, Homo Sapiens
SLASNIVNL

SEQ ID NO: 11090 - protein, 9 aa, Homo Sapiens
SLASVIFLL

SEQ ID NO: 11091 - protein, 9 aa, Homo Sapiens
SLATRISTL

SEQ ID NO: 11092 - protein, 9 aa, Homo Sapiens
SLATSLPRL

SEQ ID NO: 11093 - protein, 9 aa, Homo Sapiens
SLFDAVSSL

SEQ ID NO: 11094 - protein, 9 aa, Homo Sapiens
SLFDWNVKL

SEQ ID NO: 11095 - protein, 9 aa, Homo Sapiens
SLFEEMLQV

SEQ ID NO: 11096 - protein, 9 aa, Homo Sapiens
SLFEGTWYL

SEQ ID NO: 11097 - protein, 9 aa, Homo Sapiens
SLFERLVVL

SEQ ID NO: 11098 - protein, 9 aa, Homo Sapiens
SLFEWFHPL

SEQ ID NO: 11099 - protein, 9 aa, Homo Sapiens
SLFGGSVKL

SEQ ID NO: 11100 - protein, 9 aa, Homo Sapiens
SLFPGKLEV

SEQ ID NO: 11101 - protein, 9 aa, Homo Sapiens
SLFRVITEV

SEQ ID NO: 11102 - protein, 9 aa, Homo Sapiens
SLHDAIMIV

SEQ ID NO: 11103 - protein, 9 aa, Homo Sapiens
SLHEFLVNL

SEQ ID NO: 11104 - protein, 9 aa, Homo Sapiens
SLHFLILYV

SEQ ID NO: 11105 - protein, 9 aa, Homo Sapiens
SLHPSLPLL

SEQ ID NO: 11106 - protein, 9 aa, Homo Sapiens
SLHSVIIQL

SEQ ID NO: 11107 - protein, 9 aa, Homo Sapiens
SLHVWKIVV

SEQ ID NO: 11108 - protein, 9 aa, Homo Sapiens
SLIDIVTEI

SEQ ID NO: 11109 - protein, 9 aa, Homo Sapiens
SLIDKPTNL

SEQ ID NO: 11110 - protein, 9 aa, Homo Sapiens
SLIEDLILL

SEQ ID NO: 11111 - protein, 9 aa, Homo Sapiens
SLIEKLWQT

SEQ ID NO: 11112 - protein, 9 aa, Homo Sapiens
SLIEKYFSV

SEQ ID NO: 11113 - protein, 9 aa, Homo Sapiens
SLIFKLEEL

SEQ ID NO: 11114 - protein, 9 aa, Homo Sapiens
SLIGHLQTL

SEQ ID NO: 11115 - protein, 9 aa, Homo Sapiens
SLIHGLWNL

SEQ ID NO: 11116 - protein, 9 aa, Homo Sapiens
SLIKQIPRI

SEQ ID NO: 11117 - protein, 9 aa, Homo Sapiens
SLIKWILIV

SEQ ID NO: 11118 - protein, 9 aa, Homo Sapiens
SLITRLLEV

SEQ ID NO: 11119 - protein, 9 aa, Homo Sapiens
SLKEIVINV

SEQ ID NO: 11120 - protein, 9 aa, Homo Sapiens
SLKETIEEL

SEQ ID NO: 11121 - protein, 9 aa, Homo Sapiens
SLKGTLDNL

SEQ ID NO: 11122 - protein, 9 aa, Homo Sapiens
SLKKFIYAL

SEQ ID NO: 11123 - protein, 9 aa, Homo Sapiens
SLLALLHSL

SEQ ID NO: 11124 - protein, 9 aa, Homo Sapiens
SLLASLHTL

SEQ ID NO: 11125 - protein, 9 aa, Homo Sapiens
SLLDCTFRL

SEQ ID NO: 11126 - protein, 9 aa, Homo Sapiens
SLLDEFYKL

SEQ ID NO: 11127 - protein, 9 aa, Homo Sapiens
SLLDEVLNV

SEQ ID NO: 11128 - protein, 9 aa, Homo Sapiens
SLLDIIEKV

SEQ ID NO: 11129 - protein, 9 aa, Homo Sapiens
SLLDILKRL

SEQ ID NO: 11130 - protein, 9 aa, Homo Sapiens
SLLDPVPEV

SEQ ID NO: 11131 - protein, 9 aa, Homo Sapiens
SLLDQIPEM

SEQ ID NO: 11132 - protein, 9 aa, Homo Sapiens
SLLDQLRKL

SEQ ID NO: 11133 - protein, 9 aa, Homo Sapiens
SLLDSVVGL

SEQ ID NO: 11134 - protein, 9 aa, Homo Sapiens
SLLDTLVLL

SEQ ID NO: 11135 - protein, 9 aa, Homo Sapiens
SLLEALNGL

SEQ ID NO: 11136 - protein, 9 aa, Homo Sapiens
SLLEAVSFL

SEQ ID NO: 11137 - protein, 9 aa, Homo Sapiens
SLLEDLSHI

SEQ ID NO: 11138 - protein, 9 aa, Homo Sapiens
SLLEKLSAL

SEQ ID NO: 11139 - protein, 9 aa, Homo Sapiens
SLLEKPSEL

SEQ ID NO: 11140 - protein, 9 aa, Homo Sapiens
SLLELPHPL

SEQ ID NO: 11141 - protein, 9 aa, Homo Sapiens
SLLESVQKL

SEQ ID NO: 11142 - protein, 9 aa, Homo Sapiens
SLLGHLMIV

SEQ ID NO: 11143 - protein, 9 aa, Homo Sapiens
SLLGKLVSM

SEQ ID NO: 11144 - protein, 9 aa, Homo Sapiens
SLLHMPFTI

SEQ ID NO: 11145 - protein, 9 aa, Homo Sapiens
SLLHTLEEL

SEQ ID NO: 11146 - protein, 9 aa, Homo Sapiens
SLLKDLNFL

SEQ ID NO: 11147 - protein, 9 aa, Homo Sapiens
SLLNEIAFL

SEQ ID NO: 11148 - protein, 9 aa, Homo Sapiens
SLLNFLQHL

SEQ ID NO: 11149 - protein, 9 aa, Homo Sapiens
SLLNWRTKL

SEQ ID NO: 11150 - protein, 9 aa, Homo Sapiens
SLLPAIVEL

SEQ ID NO: 11151 - protein, 9 aa, Homo Sapiens
SLLPFLKAV

SEQ ID NO: 11152 - protein, 9 aa, Homo Sapiens
SLLPTSPRL

SEQ ID NO: 11153 - protein, 9 aa, Homo Sapiens
SLLPYLPML

SEQ ID NO: 11154 - protein, 9 aa, Homo Sapiens
SLLQAPARL

SEQ ID NO: 11155 - protein, 9 aa, Homo Sapiens
SLLQTLYKV

SEQ ID NO: 11156 - protein, 9 aa, Homo Sapiens
SLLRGLSQL

SEQ ID NO: 11157 - protein, 9 aa, Homo Sapiens
SLLRSIFTV

SEQ ID NO: 11158 - protein, 9 aa, Homo Sapiens
SLLRVGWSV

SEQ ID NO: 11159 - protein, 9 aa, Homo Sapiens
SLLSEIQAL

SEQ ID NO: 11160 - protein, 9 aa, Homo Sapiens
SLLSGLVRL

SEQ ID NO: 11161 - protein, 9 aa, Homo Sapiens
SLLSHVEQL

SEQ ID NO: 11162 - protein, 9 aa, Homo Sapiens
SLLSMLQSL

SEQ ID NO: 11163 - protein, 9 aa, Homo Sapiens
SLLSQQPFL

SEQ ID NO: 11164 - protein, 9 aa, Homo Sapiens
SLLSSVFKL

SEQ ID NO: 11165 - protein, 9 aa, Homo Sapiens
SLLTHIQNL

SEQ ID NO: 11166 - protein, 9 aa, Homo Sapiens
SLLTLLTQL

SEQ ID NO: 11167 - protein, 9 aa, Homo Sapiens
SLLTVIEKL

SEQ ID NO: 11168 - protein, 9 aa, Homo Sapiens
SLLYDLENL

SEQ ID NO: 11169 - protein, 9 aa, Homo Sapiens
SLLYHLSEL

SEQ ID NO: 11170 - protein, 9 aa, Homo Sapiens
SLMDLTLLL

SEQ ID NO: 11171 - protein, 9 aa, Homo Sapiens
SLMEILYTL

SEQ ID NO: 11172 - protein, 9 aa, Homo Sapiens
SLMGTLSKL

SEQ ID NO: 11173 - protein, 9 aa, Homo Sapiens
SLMHVPPSL

SEQ ID NO: 11174 - protein, 9 aa, Homo Sapiens
SLMLLIRQL

SEQ ID NO: 11175 - protein, 9 aa, Homo Sapiens
SLMMTIINL

SEQ ID NO: 11176 - protein, 9 aa, Homo Sapiens
SLMSHAIEL

SEQ ID NO: 11177 - protein, 9 aa, Homo Sapiens
SLNHLLNYV

SEQ ID NO: 11178 - protein, 9 aa, Homo Sapiens
SLNIITVTL

SEQ ID NO: 11179 - protein, 9 aa, Homo Sapiens
SLNISLPNL

SEQ ID NO: 11180 - protein, 9 aa, Homo Sapiens
SLNKWIFTV

SEQ ID NO: 11181 - protein, 9 aa, Homo Sapiens
SLNLAPPTV

SEQ ID NO: 11182 - protein, 9 aa, Homo Sapiens
SLNQDIPAF

SEQ ID NO: 11183 - protein, 9 aa, Homo Sapiens
SLPDIKVYL

SEQ ID NO: 11184 - protein, 9 aa, Homo Sapiens
SLQDEIQRV

SEQ ID NO: 11185 - protein, 9 aa, Homo Sapiens
SLQDLIEKV

SEQ ID NO: 11186 - protein, 9 aa, Homo Sapiens
SLQEEIAFL

SEQ ID NO: 11187 - protein, 9 aa, Homo Sapiens
SLQEEIAKL

SEQ ID NO: 11188 - protein, 9 aa, Homo Sapiens
SLQEFINWL

SEQ ID NO: 11189 - protein, 9 aa, Homo Sapiens
SLQEFLRQL

SEQ ID NO: 11190 - protein, 9 aa, Homo Sapiens
SLQEKLWAI

SEQ ID NO: 11191 - protein, 9 aa, Homo Sapiens
SLQETIQSL

SEQ ID NO: 11192 - protein, 9 aa, Homo Sapiens
SLQKEILYL

SEQ ID NO: 11193 - protein, 9 aa, Homo Sapiens
SLQLRIQEL

SEQ ID NO: 11194 - protein, 9 aa, Homo Sapiens
SLQQRTWLI

SEQ ID NO: 11195 - protein, 9 aa, Homo Sapiens
SLQSLIISV

SEQ ID NO: 11196 - protein, 9 aa, Homo Sapiens
SLQSTIQGL

SEQ ID NO: 11197 - protein, 9 aa, Homo Sapiens
SLQTRLIFL

SEQ ID NO: 11198 - protein, 9 aa, Homo Sapiens
SLQYFIPAL

SEQ ID NO: 11199 - protein, 9 aa, Homo Sapiens
SLRDLIQGL

SEQ ID NO: 11200 - protein, 9 aa, Homo Sapiens
SLRQLLHQL

SEQ ID NO: 11201 - protein, 9 aa, Homo Sapiens
SLSAFTPAL

SEQ ID NO: 11202 - protein, 9 aa, Homo Sapiens
SLSDLIYAL

SEQ ID NO: 11203 - protein, 9 aa, Homo Sapiens
SLSDLLVSL

SEQ ID NO: 11204 - protein, 9 aa, Homo Sapiens
SLSDSLFVL

SEQ ID NO: 11205 - protein, 9 aa, Homo Sapiens
SLSDTVEKL

SEQ ID NO: 11206 - protein, 9 aa, Homo Sapiens
SLSEELAKL

SEQ ID NO: 11207 - protein, 9 aa, Homo Sapiens
SLSEKQYFL

SEQ ID NO: 11208 - protein, 9 aa, Homo Sapiens
SLSEKTVLL

SEQ ID NO: 11209 - protein, 9 aa, Homo Sapiens
SLSERIMQL

SEQ ID NO: 11210 - protein, 9 aa, Homo Sapiens
SLSEYVSRM

SEQ ID NO: 11211 - protein, 9 aa, Homo Sapiens
SLSFLVPSL

SEQ ID NO: 11212 - protein, 9 aa, Homo Sapiens
SLSFMNPRL

SEQ ID NO: 11213 - protein, 9 aa, Homo Sapiens
SLSGYINYL

SEQ ID NO: 11214 - protein, 9 aa, Homo Sapiens
SLSHLVPAL

SEQ ID NO: 11215 - protein, 9 aa, Homo Sapiens
SLSQVFLHL

SEQ ID NO: 11216 - protein, 9 aa, Homo Sapiens
SLSSFLERL

SEQ ID NO: 11217 - protein, 9 aa, Homo Sapiens
SLSTVFVVL

SEQ ID NO: 11218 - protein, 9 aa, Homo Sapiens
SLTESIAQL

SEQ ID NO: 11219 - protein, 9 aa, Homo Sapiens
SLTSEIHFL

SEQ ID NO: 11220 - protein, 9 aa, Homo Sapiens
SLVEIILHV

SEQ ID NO: 11221 - protein, 9 aa, Homo Sapiens
SLVNEIFRL

SEQ ID NO: 11222 - protein, 9 aa, Homo Sapiens
SLVNVVPKL

SEQ ID NO: 11223 - protein, 9 aa, Homo Sapiens
SLWFKPEEL

SEQ ID NO: 11224 - protein, 9 aa, Homo Sapiens
SLWKEVSEL

SEQ ID NO: 11225 - protein, 9 aa, Homo Sapiens
SLWPMTFGL

SEQ ID NO: 11226 - protein, 9 aa, Homo Sapiens
SLYDELRNL

SEQ ID NO: 11227 - protein, 9 aa, Homo Sapiens
SLYDWHVKL

SEQ ID NO: 11228 - protein, 9 aa, Homo Sapiens
SLYDWNVKL

SEQ ID NO: 11229 - protein, 9 aa, Homo Sapiens
SLYDYNPNL

SEQ ID NO: 11230 - protein, 9 aa, Homo Sapiens
SLYEMVSRV

SEQ ID NO: 11231 - protein, 9 aa, Homo Sapiens
SMLDDLRNV

SEQ ID NO: 11232 - protein, 9 aa, Homo Sapiens
SMLEPVPEL

SEQ ID NO: 11233 - protein, 9 aa, Homo Sapiens
SMLNRILAV

SEQ ID NO: 11234 - protein, 9 aa, Homo Sapiens
SMLTYPFLL

SEQ ID NO: 11235 - protein, 9 aa, Homo Sapiens
SMTNFISGL

SEQ ID NO: 11236 - protein, 9 aa, Homo Sapiens
SMVDVVMLL

SEQ ID NO: 11237 - protein, 9 aa, Homo Sapiens
SMYDKVLML

SEQ ID NO: 11238 - protein, 9 aa, Homo Sapiens
SPSLKLPLS

SEQ ID NO: 11239 - protein, 9 aa, Homo Sapiens
SQAERLFNL

SEQ ID NO: 11240 - protein, 9 aa, Homo Sapiens
SQAPFIVAL

SEQ ID NO: 11241 - protein, 9 aa, Homo Sapiens
SQPEKVYTL

SEQ ID NO: 11242 - protein, 9 aa, Homo Sapiens
SQVDRLVAL

SEQ ID NO: 11243 - protein, 9 aa, Homo Sapiens
STLHLVLRL

SEQ ID NO: 11244 - protein, 9 aa, Homo Sapiens
STLRVLYNL

SEQ ID NO: 11245 - protein, 9 aa, Homo Sapiens
SVAFKIFEL

SEQ ID NO: 11246 - protein, 9 aa, Homo Sapiens
SVFAGVVGV

SEQ ID NO: 11247 - protein, 9 aa, Homo Sapiens
SVIDHIHLI

SEQ ID NO: 11248 - protein, 9 aa, Homo Sapiens
SVIEQIVYV

SEQ ID NO: 11249 - protein, 9 aa, Homo Sapiens
SVIEQLFFV

SEQ ID NO: 11250 - protein, 9 aa, Homo Sapiens
SVITQVFHV

SEQ ID NO: 11251 - protein, 9 aa, Homo Sapiens
SVLEALSGV

SEQ ID NO: 11252 - protein, 9 aa, Homo Sapiens
SVLELIPEL

SEQ ID NO: 11253 - protein, 9 aa, Homo Sapiens
SVLGKIWKL

SEQ ID NO: 11254 - protein, 9 aa, Homo Sapiens
SVLNVLHSL

SEQ ID NO: 11255 - protein, 9 aa, Homo Sapiens
SVLSKLSQL

SEQ ID NO: 11256 - protein, 9 aa, Homo Sapiens
SVLVSPPAV

SEQ ID NO: 11257 - protein, 9 aa, Homo Sapiens
SVMDRLSYL

SEQ ID NO: 11258 - protein, 9 aa, Homo Sapiens
SVMNSVVSL

SEQ ID NO: 11259 - protein, 9 aa, Homo Sapiens
SVMSILPKI

SEQ ID NO: 11260 - protein, 9 aa, Homo Sapiens
SVNPYIVKL

SEQ ID NO: 11261 - protein, 9 aa, Homo Sapiens
SVSSVVHYL

SEQ ID NO: 11262 - protein, 9 aa, Homo Sapiens
SVVESVFKL

SEQ ID NO: 11263 - protein, 9 aa, Homo Sapiens
SVVSWKTGV

SEQ ID NO: 11264 - protein, 9 aa, Homo Sapiens
SVYPNGHFV

SEQ ID NO: 11265 - protein, 9 aa, Homo Sapiens
SVYSWDIVV

SEQ ID NO: 11266 - protein, 9 aa, Homo Sapiens
TGFPWAFKV

SEQ ID NO: 11267 - protein, 9 aa, Homo Sapiens
TIDDIVLTI

SEQ ID NO: 11268 - protein, 9 aa, Homo Sapiens
TILNLLPRL

SEQ ID NO: 11269 - protein, 9 aa, Homo Sapiens
TILPGLPEL

SEQ ID NO: 11270 - protein, 9 aa, Homo Sapiens
TILSTLANL

SEQ ID NO: 11271 - protein, 9 aa, Homo Sapiens
TINSIIYGL

SEQ ID NO: 11272 - protein, 9 aa, Homo Sapiens
TIQEILPAL

SEQ ID NO: 11273 - protein, 9 aa, Homo Sapiens
TLAAIIEHL

SEQ ID NO: 11274 - protein, 9 aa, Homo Sapiens
TLADLVHHV

SEQ ID NO: 11275 - protein, 9 aa, Homo Sapiens
TLADVLYHV

SEQ ID NO: 11276 - protein, 9 aa, Homo Sapiens
TLADYLHLL

SEQ ID NO: 11277 - protein, 9 aa, Homo Sapiens
TLAELLVLL

SEQ ID NO: 11278 - protein, 9 aa, Homo Sapiens
TLAETIQGL

SEQ ID NO: 11279 - protein, 9 aa, Homo Sapiens
TLAETLVNL

SEQ ID NO: 11280 - protein, 9 aa, Homo Sapiens
TLAKYLMEL

SEQ ID NO: 11281 - protein, 9 aa, Homo Sapiens
TLASSLHTL

SEQ ID NO: 11282 - protein, 9 aa, Homo Sapiens
TLEEIIFKL

SEQ ID NO: 11283 - protein, 9 aa, Homo Sapiens
TLFDYEVRL

SEQ ID NO: 11284 - protein, 9 aa, Homo Sapiens
TLFPSKIGV

SEQ ID NO: 11285 - protein, 9 aa, Homo Sapiens
TLFSVLPEL

SEQ ID NO: 11286 - protein, 9 aa, Homo Sapiens
TLGHILPTL

SEQ ID NO: 11287 - protein, 9 aa, Homo Sapiens
TLHSIIISL

SEQ ID NO: 11288 - protein, 9 aa, Homo Sapiens
TLIEDILGV

SEQ ID NO: 11289 - protein, 9 aa, Homo Sapiens
TLIEELKAL

SEQ ID NO: 11290 - protein, 9 aa, Homo Sapiens
TLIEELKTL

SEQ ID NO: 11291 - protein, 9 aa, Homo Sapiens
TLIGLSIKV

SEQ ID NO: 11292 - protein, 9 aa, Homo Sapiens
TLINKINNL

SEQ ID NO: 11293 - protein, 9 aa, Homo Sapiens
TLIRSIPTM

SEQ ID NO: 11294 - protein, 9 aa, Homo Sapiens
TLKEYLESL

SEQ ID NO: 11295 - protein, 9 aa, Homo Sapiens
TLLAYLEGL

SEQ ID NO: 11296 - protein, 9 aa, Homo Sapiens
TLLDFINAV

SEQ ID NO: 11297 - protein, 9 aa, Homo Sapiens
TLLDWQDSL

SEQ ID NO: 11298 - protein, 9 aa, Homo Sapiens
TLLEALDCI

SEQ ID NO: 11299 - protein, 9 aa, Homo Sapiens
TLLERAFSL

SEQ ID NO: 11300 - protein, 9 aa, Homo Sapiens
TLLGHLDYI

SEQ ID NO: 11301 - protein, 9 aa, Homo Sapiens
TLLGKVVAL

SEQ ID NO: 11302 - protein, 9 aa, Homo Sapiens
TLLHFLAEL

SEQ ID NO: 11303 - protein, 9 aa, Homo Sapiens
TLLHFLVEI

SEQ ID NO: 11304 - protein, 9 aa, Homo Sapiens
TLLIQVPRI

SEQ ID NO: 11305 - protein, 9 aa, Homo Sapiens
TLLPELHLL

SEQ ID NO: 11306 - protein, 9 aa, Homo Sapiens
TLLPTLYEI

SEQ ID NO: 11307 - protein, 9 aa, Homo Sapiens
TLLPVIQFL

SEQ ID NO: 11308 - protein, 9 aa, Homo Sapiens
TLLQNIPSF

SEQ ID NO: 11309 - protein, 9 aa, Homo Sapiens
TLLRALQAL

SEQ ID NO: 11310 - protein, 9 aa, Homo Sapiens
TLLTAIVKL

SEQ ID NO: 11311 - protein, 9 aa, Homo Sapiens
TLLTKPVEI

SEQ ID NO: 11312 - protein, 9 aa, Homo Sapiens
TLLVVVPKL

SEQ ID NO: 11313 - protein, 9 aa, Homo Sapiens
TLMDILPRI

SEQ ID NO: 11314 - protein, 9 aa, Homo Sapiens
TLMEEVLLL

SEQ ID NO: 11315 - protein, 9 aa, Homo Sapiens
TLMSLPTKI

SEQ ID NO: 11316 - protein, 9 aa, Homo Sapiens
TLNDIMTRV

SEQ ID NO: 11317 - protein, 9 aa, Homo Sapiens
TLNDVLAQL

SEQ ID NO: 11318 - protein, 9 aa, Homo Sapiens
TLNEKLTAL

SEQ ID NO: 11319 - protein, 9 aa, Homo Sapiens
TLNKFIEEL

SEQ ID NO: 11320 - protein, 9 aa, Homo Sapiens
TLNNLEIFL

SEQ ID NO: 11321 - protein, 9 aa, Homo Sapiens
TLNNLVEKL

SEQ ID NO: 11322 - protein, 9 aa, Homo Sapiens
TLNSFIHVL

SEQ ID NO: 11323 - protein, 9 aa, Homo Sapiens
TLNSFISVL

SEQ ID NO: 11324 - protein, 9 aa, Homo Sapiens
TLQDIVYKL

SEQ ID NO: 11325 - protein, 9 aa, Homo Sapiens
TLQEFLERI

SEQ ID NO: 11326 - protein, 9 aa, Homo Sapiens
TLQEITFSF

SEQ ID NO: 11327 - protein, 9 aa, Homo Sapiens
TLQEKIHRL

SEQ ID NO: 11328 - protein, 9 aa, Homo Sapiens
TLQEQIEAI

SEQ ID NO: 11329 - protein, 9 aa, Homo Sapiens
TLQEVHFLL

SEQ ID NO: 11330 - protein, 9 aa, Homo Sapiens
TLQEVLTLL

SEQ ID NO: 11331 - protein, 9 aa, Homo Sapiens
TLQKLLRQL

SEQ ID NO: 11332 - protein, 9 aa, Homo Sapiens
TLQQQIQTL

SEQ ID NO: 11333 - protein, 9 aa, Homo Sapiens
TLQQQTFKI

SEQ ID NO: 11334 - protein, 9 aa, Homo Sapiens
TLSDIMVSL

SEQ ID NO: 11335 - protein, 9 aa, Homo Sapiens
TLSDLRVYL

SEQ ID NO: 11336 - protein, 9 aa, Homo Sapiens
TLSDVVVGL

SEQ ID NO: 11337 - protein, 9 aa, Homo Sapiens
TLSEALLQL

SEQ ID NO: 11338 - protein, 9 aa, Homo Sapiens
TLSERLWGL

SEQ ID NO: 11339 - protein, 9 aa, Homo Sapiens
TLSEVTNQL

SEQ ID NO: 11340 - protein, 9 aa, Homo Sapiens
TLSGLLWEL

SEQ ID NO: 11341 - protein, 9 aa, Homo Sapiens
TLSSLVFQL

SEQ ID NO: 11342 - protein, 9 aa, Homo Sapiens
TLTDCVVVV

SEQ ID NO: 11343 - protein, 9 aa, Homo Sapiens
TLTGKTITL

SEQ ID NO: 11344 - protein, 9 aa, Homo Sapiens
TLTKNIVEL

SEQ ID NO: 11345 - protein, 9 aa, Homo Sapiens
TLTNIIHNL

SEQ ID NO: 11346 - protein, 9 aa, Homo Sapiens
TLTSFITSL

SEQ ID NO: 11347 - protein, 9 aa, Homo Sapiens
TLTSKLYSL

SEQ ID NO: 11348 - protein, 9 aa, Homo Sapiens
TLVDEVFRI

SEQ ID NO: 11349 - protein, 9 aa, Homo Sapiens
TLVEAIKQV

SEQ ID NO: 11350 - protein, 9 aa, Homo Sapiens
TLVLTLPTV

SEQ ID NO: 11351 - protein, 9 aa, Homo Sapiens
TLVSWVALT

SEQ ID NO: 11352 - protein, 9 aa, Homo Sapiens
TLVTWLQCV

SEQ ID NO: 11353 - protein, 9 aa, Homo Sapiens
TLVYHVVGV

SEQ ID NO: 11354 - protein, 9 aa, Homo Sapiens
TLWNEIERL

SEQ ID NO: 11355 - protein, 9 aa, Homo Sapiens
TLWPEVQKL

SEQ ID NO: 11356 - protein, 9 aa, Homo Sapiens
TLWVDPYEV

SEQ ID NO: 11357 - protein, 9 aa, Homo Sapiens
TLWYRAPEV

SEQ ID NO: 11358 - protein, 9 aa, Homo Sapiens
TLWYRPPEL

SEQ ID NO: 11359 - protein, 9 aa, Homo Sapiens
TLYEAVREV

SEQ ID NO: 11360 - protein, 9 aa, Homo Sapiens
TMADQIVTV

SEQ ID NO: 11361 - protein, 9 aa, Homo Sapiens
TMIEINPMV

SEQ ID NO: 11362 - protein, 9 aa, Homo Sapiens
TMLDILQTL

SEQ ID NO: 11363 - protein, 9 aa, Homo Sapiens
TMLELINQL

SEQ ID NO: 11364 - protein, 9 aa, Homo Sapiens
TMQDIVYKL

SEQ ID NO: 11365 - protein, 9 aa, Homo Sapiens
TMTGWVHDV

SEQ ID NO: 11366 - protein, 9 aa, Homo Sapiens
TQILSVPKV

SEQ ID NO: 11367 - protein, 9 aa, Homo Sapiens
TQLATIWTL

SEQ ID NO: 11368 - protein, 9 aa, Homo Sapiens
TSMDWLPQL

SEQ ID NO: 11369 - protein, 9 aa, Homo Sapiens
TTVGWDHQV

SEQ ID NO: 11370 - protein, 9 aa, Homo Sapiens
TVAPFNPTV

SEQ ID NO: 11371 - protein, 9 aa, Homo Sapiens
TVFEHTFHV

SEQ ID NO: 11372 - protein, 9 aa, Homo Sapiens
TVIDQIPFL

SEQ ID NO: 11373 - protein, 9 aa, Homo Sapiens
TVLDAIYEV

SEQ ID NO: 11374 - protein, 9 aa, Homo Sapiens
TVLGKIWKL

SEQ ID NO: 11375 - protein, 9 aa, Homo Sapiens
TVLPFVSTV

SEQ ID NO: 11376 - protein, 9 aa, Homo Sapiens
TVNPIIYAL

SEQ ID NO: 11377 - protein, 9 aa, Homo Sapiens
TVQEILPAL

SEQ ID NO: 11378 - protein, 9 aa, Homo Sapiens
TVRIWVPNV

SEQ ID NO: 11379 - protein, 9 aa, Homo Sapiens
TVTGFIPLL

SEQ ID NO: 11380 - protein, 9 aa, Homo Sapiens
VALDILSRI

SEQ ID NO: 11381 - protein, 9 aa, Homo Sapiens
VILKILPTL

SEQ ID NO: 11382 - protein, 9 aa, Homo Sapiens
VILPTVHEV

SEQ ID NO: 11383 - protein, 9 aa, Homo Sapiens
VIQDFINAL

SEQ ID NO: 11384 - protein, 9 aa, Homo Sapiens
VIQELINTV

SEQ ID NO: 11385 - protein, 9 aa, Homo Sapiens
VIQTEVPPL

SEQ ID NO: 11386 - protein, 9 aa, Homo Sapiens
VLADLKVQL

SEQ ID NO: 11387 - protein, 9 aa, Homo Sapiens
VLADQVWTL

SEQ ID NO: 11388 - protein, 9 aa, Homo Sapiens
VLAFLVHEL

SEQ ID NO: 11389 - protein, 9 aa, Homo Sapiens
VLAHTILGV

SEQ ID NO: 11390 - protein, 9 aa, Homo Sapiens
VLAPLGFTL

SEQ ID NO: 11391 - protein, 9 aa, Homo Sapiens
VLAPLIALV

SEQ ID NO: 11392 - protein, 9 aa, Homo Sapiens
VLAQQIATL

SEQ ID NO: 11393 - protein, 9 aa, Homo Sapiens
VLASLIIRL

SEQ ID NO: 11394 - protein, 9 aa, Homo Sapiens
VLATILAQL

SEQ ID NO: 11395 - protein, 9 aa, Homo Sapiens
VLATLLNNL

SEQ ID NO: 11396 - protein, 9 aa, Homo Sapiens
VLAWGLLNV

SEQ ID NO: 11397 - protein, 9 aa, Homo Sapiens
VLFELKLLL

SEQ ID NO: 11398 - protein, 9 aa, Homo Sapiens
VLFGEITRL

SEQ ID NO: 11399 - protein, 9 aa, Homo Sapiens
VLFGKPMVV

SEQ ID NO: 11400 - protein, 9 aa, Homo Sapiens
VLFGLLREV

SEQ ID NO: 11401 - protein, 9 aa, Homo Sapiens
VLFHQLQEI

SEQ ID NO: 11402 - protein, 9 aa, Homo Sapiens
VLFNKLTYL

SEQ ID NO: 11403 - protein, 9 aa, Homo Sapiens
VLFPWQARL

SEQ ID NO: 11404 - protein, 9 aa, Homo Sapiens
VLFSSPPQM

SEQ ID NO: 11405 - protein, 9 aa, Homo Sapiens
VLFTGVKEV

SEQ ID NO: 11406 - protein, 9 aa, Homo Sapiens
VLFYAITTL

SEQ ID NO: 11407 - protein, 9 aa, Homo Sapiens
VLGELVPRL

SEQ ID NO: 11408 - protein, 9 aa, Homo Sapiens
VLGKVIFQV

SEQ ID NO: 11409 - protein, 9 aa, Homo Sapiens
VLGPKIEAV

SEQ ID NO: 11410 - protein, 9 aa, Homo Sapiens
VLGQYIENL

SEQ ID NO: 11411 - protein, 9 aa, Homo Sapiens
VLHDVIYVI

SEQ ID NO: 11412 - protein, 9 aa, Homo Sapiens
VLIANLEKL

SEQ ID NO: 11413 - protein, 9 aa, Homo Sapiens
VLIDYQRNV

SEQ ID NO: 11414 - protein, 9 aa, Homo Sapiens
VLIETLVTL

SEQ ID NO: 11415 - protein, 9 aa, Homo Sapiens
VLIPKLPQL

SEQ ID NO: 11416 - protein, 9 aa, Homo Sapiens
VLIPKMPQL

SEQ ID NO: 11417 - protein, 9 aa, Homo Sapiens
VLKEFIDQM

SEQ ID NO: 11418 - protein, 9 aa, Homo Sapiens
VLKVFLENV

SEQ ID NO: 11419 - protein, 9 aa, Homo Sapiens
VLLDAPIQL

SEQ ID NO: 11420 - protein, 9 aa, Homo Sapiens
VLLEEITNL

SEQ ID NO: 11421 - protein, 9 aa, Homo Sapiens
VLLGHIFYV

SEQ ID NO: 11422 - protein, 9 aa, Homo Sapiens
VLLGKVYVV

SEQ ID NO: 11423 - protein, 9 aa, Homo Sapiens
VLLPGLQKL

SEQ ID NO: 11424 - protein, 9 aa, Homo Sapiens
VLLPKLPQF

SEQ ID NO: 11425 - protein, 9 aa, Homo Sapiens
VLLPWIMNL

SEQ ID NO: 11426 - protein, 9 aa, Homo Sapiens
VLLQVLHVL

SEQ ID NO: 11427 - protein, 9 aa, Homo Sapiens
VLLSALERL

SEQ ID NO: 11428 - protein, 9 aa, Homo Sapiens
VLLSEILHL

SEQ ID NO: 11429 - protein, 9 aa, Homo Sapiens
VLLSHLSYL

SEQ ID NO: 11430 - protein, 9 aa, Homo Sapiens
VLLSPVPEL

SEQ ID NO: 11431 - protein, 9 aa, Homo Sapiens
VLLSTIHEL

SEQ ID NO: 11432 - protein, 9 aa, Homo Sapiens
VLLTWKYLL

SEQ ID NO: 11433 - protein, 9 aa, Homo Sapiens
VLMDHILNL

SEQ ID NO: 11434 - protein, 9 aa, Homo Sapiens
VLMDRLPSL

SEQ ID NO: 11435 - protein, 9 aa, Homo Sapiens
VLMEQIKLL

SEQ ID NO: 11436 - protein, 9 aa, Homo Sapiens
VLMEYIRSL

SEQ ID NO: 11437 - protein, 9 aa, Homo Sapiens
VLMNQPPQI

SEQ ID NO: 11438 - protein, 9 aa, Homo Sapiens
VLNALLPTL

SEQ ID NO: 11439 - protein, 9 aa, Homo Sapiens
VLNDYKWFA

SEQ ID NO: 11440 - protein, 9 aa, Homo Sapiens
VLNEYFHNV

SEQ ID NO: 11441 - protein, 9 aa, Homo Sapiens
VLNGKFANL

SEQ ID NO: 11442 - protein, 9 aa, Homo Sapiens
VLNLVLPNL

SEQ ID NO: 11443 - protein, 9 aa, Homo Sapiens
VLNNVVIHL

SEQ ID NO: 11444 - protein, 9 aa, Homo Sapiens
VLQDFYLEL

SEQ ID NO: 11445 - protein, 9 aa, Homo Sapiens
VLQDIQVML

SEQ ID NO: 11446 - protein, 9 aa, Homo Sapiens
VLQDPIWLL

SEQ ID NO: 11447 - protein, 9 aa, Homo Sapiens
VLQEEPPLL

SEQ ID NO: 11448 - protein, 9 aa, Homo Sapiens
VLQELINVL

SEQ ID NO: 11449 - protein, 9 aa, Homo Sapiens
VLQEWLSHL

SEQ ID NO: 11450 - protein, 9 aa, Homo Sapiens
VLQGAVPTV

SEQ ID NO: 11451 - protein, 9 aa, Homo Sapiens
VLQGLTFTL

SEQ ID NO: 11452 - protein, 9 aa, Homo Sapiens
VLQKLLEKL

SEQ ID NO: 11453 - protein, 9 aa, Homo Sapiens
VLQNVAFSV

SEQ ID NO: 11454 - protein, 9 aa, Homo Sapiens
VLQPQVQSL

SEQ ID NO: 11455 - protein, 9 aa, Homo Sapiens
VLQQHINSL

SEQ ID NO: 11456 - protein, 9 aa, Homo Sapiens
VLQQHLETL

SEQ ID NO: 11457 - protein, 9 aa, Homo Sapiens
VLQQRLIAL

SEQ ID NO: 11458 - protein, 9 aa, Homo Sapiens
VLQRSLVTV

SEQ ID NO: 11459 - protein, 9 aa, Homo Sapiens
VLQVHLNGL

SEQ ID NO: 11460 - protein, 9 aa, Homo Sapiens
VLQYQLQHL

SEQ ID NO: 11461 - protein, 9 aa, Homo Sapiens
VLQYVVPEV

SEQ ID NO: 11462 - protein, 9 aa, Homo Sapiens
VLRDNIQGI

SEQ ID NO: 11463 - protein, 9 aa, Homo Sapiens
VLSDIIQNL

SEQ ID NO: 11464 - protein, 9 aa, Homo Sapiens
VLSEKVSQL

SEQ ID NO: 11465 - protein, 9 aa, Homo Sapiens
VLSELLWQV

SEQ ID NO: 11466 - protein, 9 aa, Homo Sapiens
VLSFTIPSL

SEQ ID NO: 11467 - protein, 9 aa, Homo Sapiens
VLWDRTFSL

SEQ ID NO: 11468 - protein, 9 aa, Homo Sapiens
VLWFKPVEL

SEQ ID NO: 11469 - protein, 9 aa, Homo Sapiens
VLWGETVHL

SEQ ID NO: 11470 - protein, 9 aa, Homo Sapiens
VLYDWKERL

SEQ ID NO: 11471 - protein, 9 aa, Homo Sapiens
VMAPRTLVL

SEQ ID NO: 11472 - protein, 9 aa, Homo Sapiens
VMIPTLPSI

SEQ ID NO: 11473 - protein, 9 aa, Homo Sapiens
VMNPVIQAV

SEQ ID NO: 11474 - protein, 9 aa, Homo Sapiens
VMNSVVSLL

SEQ ID NO: 11475 - protein, 9 aa, Homo Sapiens
VMQDIVYKL

SEQ ID NO: 11476 - protein, 9 aa, Homo Sapiens
VMQTLLSQL

SEQ ID NO: 11477 - protein, 9 aa, Homo Sapiens
VMTLVSTYL

SEQ ID NO: 11478 - protein, 9 aa, Homo Sapiens
VMYDLITEL

SEQ ID NO: 11479 - protein, 9 aa, Homo Sapiens
VQIEHISSL

SEQ ID NO: 11480 - protein, 9 aa, Homo Sapiens
VQIGDIVTV

SEQ ID NO: 11481 - protein, 9 aa, Homo Sapiens
VQTDYVPLL

SEQ ID NO: 11482 - protein, 9 aa, Homo Sapiens
VTLDGIPEV

SEQ ID NO: 11483 - protein, 9 aa, Homo Sapiens
VTQINRLLS

SEQ ID NO: 11484 - protein, 9 aa, Homo Sapiens
VVLEEIPKL

SEQ ID NO: 11485 - protein, 9 aa, Homo Sapiens
VVLNATWLV

SEQ ID NO: 11486 - protein, 9 aa, Homo Sapiens
VVLPAPPAV

SEQ ID NO: 11487 - protein, 9 aa, Homo Sapiens
VVMNVVHQL

SEQ ID NO: 11488 - protein, 9 aa, Homo Sapiens
VVNDVLFAV

SEQ ID NO: 11489 - protein, 9 aa, Homo Sapiens
WAGCALGAL

SEQ ID NO: 11490 - protein, 9 aa, Homo Sapiens
WIQNKIPYL

SEQ ID NO: 11491 - protein, 9 aa, Homo Sapiens
WLAEKLPTL

SEQ ID NO: 11492 - protein, 9 aa, Homo Sapiens
WLMPVIPAL

SEQ ID NO: 11493 - protein, 9 aa, Homo Sapiens
WLQEHVADL

SEQ ID NO: 11494 - protein, 9 aa, Homo Sapiens
WLTPVIPAL

SEQ ID NO: 11495 - protein, 9 aa, Homo Sapiens
WLVDHVYAI

SEQ ID NO: 11496 - protein, 9 aa, Homo Sapiens
YAITTLHNL

SEQ ID NO: 11497 - protein, 9 aa, Homo Sapiens
YALNHTLSV

SEQ ID NO: 11498 - protein, 9 aa, Homo Sapiens
YANAKIYKL

SEQ ID NO: 11499 - protein, 9 aa, Homo Sapiens
YGLDKIEFL

SEQ ID NO: 11500 - protein, 9 aa, Homo Sapiens
YGLPVVVKL

SEQ ID NO: 11501 - protein, 9 aa, Homo Sapiens
YIFEEPFTI

SEQ ID NO: 11502 - protein, 9 aa, Homo Sapiens
YIITEIPSL

SEQ ID NO: 11503 - protein, 9 aa, Homo Sapiens
YILGKFFAL

SEQ ID NO: 11504 - protein, 9 aa, Homo Sapiens
YILPWESEL

SEQ ID NO: 11505 - protein, 9 aa, Homo Sapiens
YIMSYISRV

SEQ ID NO: 11506 - protein, 9 aa, Homo Sapiens
YIQRLLHAL

SEQ ID NO: 11507 - protein, 9 aa, Homo Sapiens
YITRYIASL

SEQ ID NO: 11508 - protein, 9 aa, Homo Sapiens
YIWDRHYNI

SEQ ID NO: 11509 - protein, 9 aa, Homo Sapiens
YLADIFTKL

SEQ ID NO: 11510 - protein, 9 aa, Homo Sapiens
YLADLYHFV

SEQ ID NO: 11511 - protein, 9 aa, Homo Sapiens
YLADVTNAL

SEQ ID NO: 11512 - protein, 9 aa, Homo Sapiens
YLAHFIEGL

SEQ ID NO: 11513 - protein, 9 aa, Homo Sapiens
YLASLIRSV

SEQ ID NO: 11514 - protein, 9 aa, Homo Sapiens
YLDEYIARM

SEQ ID NO: 11515 - protein, 9 aa, Homo Sapiens
YLDFTNPKV

SEQ ID NO: 11516 - protein, 9 aa, Homo Sapiens
YLFERIKEL

SEQ ID NO: 11517 - protein, 9 aa, Homo Sapiens
YLFPGIPEL

SEQ ID NO: 11518 - protein, 9 aa, Homo Sapiens
YLFQLLQGL

SEQ ID NO: 11519 - protein, 9 aa, Homo Sapiens
YLFREPATI

SEQ ID NO: 11520 - protein, 9 aa, Homo Sapiens
YLFTFLNHL

SEQ ID NO: 11521 - protein, 9 aa, Homo Sapiens
YLFTIINSL

SEQ ID NO: 11522 - protein, 9 aa, Homo Sapiens
YLGIVELLV

SEQ ID NO: 11523 - protein, 9 aa, Homo Sapiens
YLGNINPQM

SEQ ID NO: 11524 - protein, 9 aa, Homo Sapiens
YLGPHIASV

SEQ ID NO: 11525 - protein, 9 aa, Homo Sapiens
YLHDFLKYL

SEQ ID NO: 11526 - protein, 9 aa, Homo Sapiens
YLHNQGIGV

SEQ ID NO: 11527 - protein, 9 aa, Homo Sapiens
YLHSQVVSV

SEQ ID NO: 11528 - protein, 9 aa, Homo Sapiens
YLHSYLTYI

SEQ ID NO: 11529 - protein, 9 aa, Homo Sapiens
YLIARVMLL

SEQ ID NO: 11530 - protein, 9 aa, Homo Sapiens
YLIKDIRFL

SEQ ID NO: 11531 - protein, 9 aa, Homo Sapiens
YLIKYIAIV

SEQ ID NO: 11532 - protein, 9 aa, Homo Sapiens
YLINEIDRI

SEQ ID NO: 11533 - protein, 9 aa, Homo Sapiens
YLITLLEHL

SEQ ID NO: 11534 - protein, 9 aa, Homo Sapiens
YLITSVELL

SEQ ID NO: 11535 - protein, 9 aa, Homo Sapiens
YLKDFFSNV

SEQ ID NO: 11536 - protein, 9 aa, Homo Sapiens
YLKDLIEEV

SEQ ID NO: 11537 - protein, 9 aa, Homo Sapiens
YLKEILEQL

SEQ ID NO: 11538 - protein, 9 aa, Homo Sapiens
YLLDLHSYL

SEQ ID NO: 11539 - protein, 9 aa, Homo Sapiens
YLLDLLRLP

SEQ ID NO: 11540 - protein, 9 aa, Homo Sapiens
YLLDYPNNL

SEQ ID NO: 11541 - protein, 9 aa, Homo Sapiens
YLLESVNKL

SEQ ID NO: 11542 - protein, 9 aa, Homo Sapiens
YLLEWIEMA

SEQ ID NO: 11543 - protein, 9 aa, Homo Sapiens
YLLPAIVHI

SEQ ID NO: 11544 - protein, 9 aa, Homo Sapiens
YLLPLLQRL

SEQ ID NO: 11545 - protein, 9 aa, Homo Sapiens
YLLPYENLL

SEQ ID NO: 11546 - protein, 9 aa, Homo Sapiens
YLLQRAVEV

SEQ ID NO: 11547 - protein, 9 aa, Homo Sapiens
YLLSYIQSI

SEQ ID NO: 11548 - protein, 9 aa, Homo Sapiens
YLNDGLWHM

SEQ ID NO: 11549 - protein, 9 aa, Homo Sapiens
YLNDLHEVL

SEQ ID NO: 11550 - protein, 9 aa, Homo Sapiens
YLNDLIHSV

SEQ ID NO: 11551 - protein, 9 aa, Homo Sapiens
YLNEWLQIL

SEQ ID NO: 11552 - protein, 9 aa, Homo Sapiens
YLNHLIQGL

SEQ ID NO: 11553 - protein, 9 aa, Homo Sapiens
YLNSILQVL

SEQ ID NO: 11554 - protein, 9 aa, Homo Sapiens
YLNVQVKEL

SEQ ID NO: 11555 - protein, 9 aa, Homo Sapiens
YLQARFPQL

SEQ ID NO: 11556 - protein, 9 aa, Homo Sapiens
YLQDVIMQV

SEQ ID NO: 11557 - protein, 9 aa, Homo Sapiens
YLQEIQTQL

SEQ ID NO: 11558 - protein, 9 aa, Homo Sapiens
YLQIHPQEL

SEQ ID NO: 11559 - protein, 9 aa, Homo Sapiens
YLQILIEQL

SEQ ID NO: 11560 - protein, 9 aa, Homo Sapiens
YLQNWSHVL

SEQ ID NO: 11561 - protein, 9 aa, Homo Sapiens
YLQPFLAKL

SEQ ID NO: 11562 - protein, 9 aa, Homo Sapiens
YLQSITPCL

SEQ ID NO: 11563 - protein, 9 aa, Homo Sapiens
YLRELLTTM

SEQ ID NO: 11564 - protein, 9 aa, Homo Sapiens
YLRIDLERL

SEQ ID NO: 11565 - protein, 9 aa, Homo Sapiens
YLRLFQENL

SEQ ID NO: 11566 - protein, 9 aa, Homo Sapiens
YLRNLTWTL

SEQ ID NO: 11567 - protein, 9 aa, Homo Sapiens
YLRTLINEL

SEQ ID NO: 11568 - protein, 9 aa, Homo Sapiens
YLSGIIVTL

SEQ ID NO: 11569 - protein, 9 aa, Homo Sapiens
YLSKIIPAL

SEQ ID NO: 11570 - protein, 9 aa, Homo Sapiens
YLSPKLWAL

SEQ ID NO: 11571 - protein, 9 aa, Homo Sapiens
YLSSLQPRL

SEQ ID NO: 11572 - protein, 9 aa, Homo Sapiens
YLSVKIWDL

SEQ ID NO: 11573 - protein, 9 aa, Homo Sapiens
YLTAEILEL

SEQ ID NO: 11574 - protein, 9 aa, Homo Sapiens
YLTAEVLEL

SEQ ID NO: 11575 - protein, 9 aa, Homo Sapiens
YLTDLQVSL

SEQ ID NO: 11576 - protein, 9 aa, Homo Sapiens
YLTDRVMTV

SEQ ID NO: 11577 - protein, 9 aa, Homo Sapiens
YLTEVFLHV

SEQ ID NO: 11578 - protein, 9 aa, Homo Sapiens
YLTPLILTL

SEQ ID NO: 11579 - protein, 9 aa, Homo Sapiens
YLVPELDGV

SEQ ID NO: 11580 - protein, 9 aa, Homo Sapiens
YLVVKIEKV

SEQ ID NO: 11581 - protein, 9 aa, Homo Sapiens
YLVYILNEL

SEQ ID NO: 11582 - protein, 9 aa, Homo Sapiens
YLYDRLLRI

SEQ ID NO: 11583 - protein, 9 aa, Homo Sapiens
YLYFFRVLV

SEQ ID NO: 11584 - protein, 9 aa, Homo Sapiens
YLYPDITRL

SEQ ID NO: 11585 - protein, 9 aa, Homo Sapiens
YMAELIERL

SEQ ID NO: 11586 - protein, 9 aa, Homo Sapiens
YMIAHITGL

SEQ ID NO: 11587 - protein, 9 aa, Homo Sapiens
YMIDNVILL

SEQ ID NO: 11588 - protein, 9 aa, Homo Sapiens
YMLEHVITL

SEQ ID NO: 11589 - protein, 9 aa, Homo Sapiens
YMVHIQVTL

SEQ ID NO: 11590 - protein, 9 aa, Homo Sapiens
YQEEAIPAL

SEQ ID NO: 11591 - protein, 9 aa, Homo Sapiens
YQNIWNINL

SEQ ID NO: 11592 - protein, 9 aa, Homo Sapiens
YQNQEIHNL

SEQ ID NO: 11593 - protein, 9 aa, Homo Sapiens
YQVGVHYEL

SEQ ID NO: 11594 - protein, 9 aa, Homo Sapiens
YQYPVIIHL

SEQ ID NO: 11595 - protein, 9 aa, Homo Sapiens
YSVDRLYEL

SEQ ID NO: 11596 - protein, 9 aa, Homo Sapiens
YTFDPVTKV

SEQ ID NO: 11597 - protein, 9 aa, Homo Sapiens
YTFSEPFHL

SEQ ID NO: 11598 - protein, 9 aa, Homo Sapiens
YTTDFIFNL

SEQ ID NO: 11599 - protein, 9 aa, Homo Sapiens
YTTDFIYQL

SEQ ID NO: 11600 - protein, 9 aa, Homo Sapiens
YTWEEVFRV

SEQ ID NO: 11601 - protein, 9 aa, Homo Sapiens
YVAELIQQL

SEQ ID NO: 11602 - protein, 9 aa, Homo Sapiens
YVLEGLKSV

SEQ ID NO: 11603 - protein, 9 aa, Homo Sapiens
YVQALIFRL

SEQ ID NO: 11604 - protein, 9 aa, Homo Sapiens
YVQDFLNHL

SEQ ID NO: 11605 - protein, 9 aa, Homo Sapiens
YVSPKQFSV

SEQ ID NO: 11606 - protein, 9 aa, Homo Sapiens
YVTEELPQL

SEQ ID NO: 11607 - protein, 9 aa, Homo Sapiens
YVVPFVAKV

SEQ ID NO: 11608 - protein, 9 aa, Homo Sapiens
YVYEYLLHV

SEQ ID NO: 11609 - protein, 10 aa, Homo Sapiens
AIIDGKIFCV

SEQ ID NO: 11610 - protein, 10 aa, Homo Sapiens
AISGVPVLGF

SEQ ID NO: 11611 - protein, 10 aa, Homo Sapiens
ALADGVPVAL

SEQ ID NO: 11612 - protein, 10 aa, Homo Sapiens
ALFPAPLAQI

SEQ ID NO: 11613 - protein, 10 aa, Homo Sapiens
ALIDEQILCV

SEQ ID NO: 11614 - protein, 10 aa, Homo Sapiens
ALLDQLHTLL

SEQ ID NO: 11615 - protein, 10 aa, Homo Sapiens
ALLETNPYLL

SEQ ID NO: 11616 - protein, 10 aa, Homo Sapiens
ALLSGQLNTL

SEQ ID NO: 11617 - protein, 10 aa, Homo Sapiens
ALNEVGIYKL

SEQ ID NO: 11618 - protein, 10 aa, Homo Sapiens
ALNPAALTAL

SEQ ID NO: 11619 - protein, 10 aa, Homo Sapiens
ALNPVANFHL

SEQ ID NO: 11620 - protein, 10 aa, Homo Sapiens
ALSDLALHFL

SEQ ID NO: 11621 - protein, 10 aa, Homo Sapiens
ALTGIPLPLI

SEQ ID NO: 11622 - protein, 10 aa, Homo Sapiens
ALYPGQLVQL

SEQ ID NO: 11623 - protein, 10 aa, Homo Sapiens
ALYTGFSILV

SEQ ID NO: 11624 - protein, 10 aa, Homo Sapiens
AMFDHIPVGV

SEQ ID NO: 11625 - protein, 10 aa, Homo Sapiens
AMFNDYNFVF

SEQ ID NO: 11626 - protein, 10 aa, Homo Sapiens
AVFDKTLAEL

SEQ ID NO: 11627 - protein, 10 aa, Homo Sapiens
FLAEHPNVTL

SEQ ID NO: 11628 - protein, 10 aa, Homo Sapiens
FLAERLYAEV

SEQ ID NO: 11629 - protein, 10 aa, Homo Sapiens
FLDPNARPLV

SEQ ID NO: 11630 - protein, 10 aa, Homo Sapiens
FLFASTILHL

SEQ ID NO: 11631 - protein, 10 aa, Homo Sapiens
FLFDGSPTYV

SEQ ID NO: 11632 - protein, 10 aa, Homo Sapiens
FLFDNDFPAL

SEQ ID NO: 11633 - protein, 10 aa, Homo Sapiens
FLIEEQKIVV

SEQ ID NO: 11634 - protein, 10 aa, Homo Sapiens
FLLDGFPRTV

SEQ ID NO: 11635 - protein, 10 aa, Homo Sapiens
FLLDGKVLSL

SEQ ID NO: 11636 - protein, 10 aa, Homo Sapiens
FLLDSSLRKL

SEQ ID NO: 11637 - protein, 10 aa, Homo Sapiens
FLLEPGNLEV

SEQ ID NO: 11638 - protein, 10 aa, Homo Sapiens
FLLPDGLVRL

SEQ ID NO: 11639 - protein, 10 aa, Homo Sapiens
FLLPHPGLKV

SEQ ID NO: 11640 - protein, 10 aa, Homo Sapiens
FLLPHPGLQV

SEQ ID NO: 11641 - protein, 10 aa, Homo Sapiens
FLLPIKTVGV

SEQ ID NO: 11642 - protein, 10 aa, Homo Sapiens
FLLPTGLSSL

SEQ ID NO: 11643 - protein, 10 aa, Homo Sapiens
FLLSLRGAGA

SEQ ID NO: 11644 - protein, 10 aa, Homo Sapiens
FLQEAQVPFL

SEQ ID NO: 11645 - protein, 10 aa, Homo Sapiens
FLQEGDLISA

SEQ ID NO: 11646 - protein, 10 aa, Homo Sapiens
FLSDGTIISV

SEQ ID NO: 11647 - protein, 10 aa, Homo Sapiens
FLWDEGFHQL

SEQ ID NO: 11648 - protein, 10 aa, Homo Sapiens
FMFDEKLVTV

SEQ ID NO: 11649 - protein, 10 aa, Homo Sapiens
FMIEIAGVKL

SEQ ID NO: 11650 - protein, 10 aa, Homo Sapiens
FMYNFQLVTL

SEQ ID NO: 11651 - protein, 10 aa, Homo Sapiens
GILGIQPPSV

SEQ ID NO: 11652 - protein, 10 aa, Homo Sapiens
GLFSNDIPHV

SEQ ID NO: 11653 - protein, 10 aa, Homo Sapiens
GLGEDIIHQL

SEQ ID NO: 11654 - protein, 10 aa, Homo Sapiens
GLIDVKPLGV

SEQ ID NO: 11655 - protein, 10 aa, Homo Sapiens
GLIEDYEALL

SEQ ID NO: 11656 - protein, 10 aa, Homo Sapiens
GLIGVGLINV

SEQ ID NO: 11657 - protein, 10 aa, Homo Sapiens
GLLDPSVFHV

SEQ ID NO: 11658 - protein, 10 aa, Homo Sapiens
GLLPVPVPAV

SEQ ID NO: 11659 - protein, 10 aa, Homo Sapiens
GLSPVTNLTV

SEQ ID NO: 11660 - protein, 10 aa, Homo Sapiens
GLVGYYIFRV

SEQ ID NO: 11661 - protein, 10 aa, Homo Sapiens
GLWSGPLPRV

SEQ ID NO: 11662 - protein, 10 aa, Homo Sapiens
GLYQEILAQL

SEQ ID NO: 11663 - protein, 10 aa, Homo Sapiens
GVIDGHIYAV

SEQ ID NO: 11664 - protein, 10 aa, Homo Sapiens
HLFSGHLSTL

SEQ ID NO: 11665 - protein, 10 aa, Homo Sapiens
ILAPCKLETV

SEQ ID NO: 11666 - protein, 10 aa, Homo Sapiens
ILFEEYQFQA

SEQ ID NO: 11667 - protein, 10 aa, Homo Sapiens
ILLGNYCVAV

SEQ ID NO: 11668 - protein, 10 aa, Homo Sapiens
ILLPDNVHYV

SEQ ID NO: 11669 - protein, 10 aa, Homo Sapiens
ILNPIFRQNL

SEQ ID NO: 11670 - protein, 10 aa, Homo Sapiens
ILNSLYNENL

SEQ ID NO: 11671 - protein, 10 aa, Homo Sapiens
ILQDLTFVHL

SEQ ID NO: 11672 - protein, 10 aa, Homo Sapiens
ILYDIPDIRL

SEQ ID NO: 11673 - protein, 10 aa, Homo Sapiens
ILYNGLIEEL

SEQ ID NO: 11674 - protein, 10 aa, Homo Sapiens
IQLTQMSLQL

SEQ ID NO: 11675 - protein, 10 aa, Homo Sapiens
KLADIQIEQL

SEQ ID NO: 11676 - protein, 10 aa, Homo Sapiens
KLFDIFSQQV

SEQ ID NO: 11677 - protein, 10 aa, Homo Sapiens
KLFEPYVVHV

SEQ ID NO: 11678 - protein, 10 aa, Homo Sapiens
KLLDAYLLYI

SEQ ID NO: 11679 - protein, 10 aa, Homo Sapiens
KLLDIPGLEV

SEQ ID NO: 11680 - protein, 10 aa, Homo Sapiens
KLLDPEDISV

SEQ ID NO: 11681 - protein, 10 aa, Homo Sapiens
KLLEESIANL

SEQ ID NO: 11682 - protein, 10 aa, Homo Sapiens
KLLEIDIDGV

SEQ ID NO: 11683 - protein, 10 aa, Homo Sapiens
KLLEVQILEV

SEQ ID NO: 11684 - protein, 10 aa, Homo Sapiens
KLMDLDVEQL

SEQ ID NO: 11685 - protein, 10 aa, Homo Sapiens
KLQDAEIARL

SEQ ID NO: 11686 - protein, 10 aa, Homo Sapiens
KLWDIINVNI

SEQ ID NO: 11687 - protein, 10 aa, Homo Sapiens
KLWEMDNMLI

SEQ ID NO: 11688 - protein, 10 aa, Homo Sapiens
KLYDIDVAKV

SEQ ID NO: 11689 - protein, 10 aa, Homo Sapiens
KMLDEILLQL

SEQ ID NO: 11690 - protein, 10 aa, Homo Sapiens
KMYEEFLSKV

SEQ ID NO: 11691 - protein, 10 aa, Homo Sapiens
KVFDPVPVGV

SEQ ID NO: 11692 - protein, 10 aa, Homo Sapiens
KVLNLVLPNL

SEQ ID NO: 11693 - protein, 10 aa, Homo Sapiens
LASALAGLIA

SEQ ID NO: 11694 - protein, 10 aa, Homo Sapiens
LGPLLAGLIS

SEQ ID NO: 11695 - protein, 10 aa, Homo Sapiens
LILDRMLPEL

SEQ ID NO: 11696 - protein, 10 aa, Homo Sapiens
LIMGGTLLAL

SEQ ID NO: 11697 - protein, 10 aa, Homo Sapiens
LIYPWVHVVI

SEQ ID NO: 11698 - protein, 10 aa, Homo Sapiens
LLFEGEKITI

SEQ ID NO: 11699 - protein, 10 aa, Homo Sapiens
LLFPHPVNQV

SEQ ID NO: 11700 - protein, 10 aa, Homo Sapiens
LLKEIKDILK

SEQ ID NO: 11701 - protein, 10 aa, Homo Sapiens
LLLDTEGFVK

SEQ ID NO: 11702 - protein, 10 aa, Homo Sapiens
LLLDVPTAAV

SEQ ID NO: 11703 - protein, 10 aa, Homo Sapiens
LLLDVTPLSL

SEQ ID NO: 11704 - protein, 10 aa, Homo Sapiens
LLLPTGVFQV

SEQ ID NO: 11705 - protein, 10 aa, Homo Sapiens
LLPDQPPYHL

SEQ ID NO: 11706 - protein, 10 aa, Homo Sapiens
LLVSSWDTSV

SEQ ID NO: 11707 - protein, 10 aa, Homo Sapiens
LLYQGPHNTL

SEQ ID NO: 11708 - protein, 10 aa, Homo Sapiens
LVIVSALTFI

SEQ ID NO: 11709 - protein, 10 aa, Homo Sapiens
MLLEIPYMAA

SEQ ID NO: 11710 - protein, 10 aa, Homo Sapiens
MLLPGPLHSL

SEQ ID NO: 11711 - protein, 10 aa, Homo Sapiens
MLLSVPLLLG

SEQ ID NO: 11712 - protein, 10 aa, Homo Sapiens
NLFDLGGQYL

SEQ ID NO: 11713 - protein, 10 aa, Homo Sapiens
NLFEWHFTVR

SEQ ID NO: 11714 - protein, 10 aa, Homo Sapiens
NLIDLDDLYV

SEQ ID NO: 11715 - protein, 10 aa, Homo Sapiens
NLLSDYGYHL

SEQ ID NO: 11716 - protein, 10 aa, Homo Sapiens
QLLPGGLQGL

SEQ ID NO: 11717 - protein, 10 aa, Homo Sapiens
QLYDLTLEYL

SEQ ID NO: 11718 - protein, 10 aa, Homo Sapiens
QLYRGLGGQL

SEQ ID NO: 11719 - protein, 10 aa, Homo Sapiens
QVFPGLLERV

SEQ ID NO: 11720 - protein, 10 aa, Homo Sapiens
RIADGLPVAV

SEQ ID NO: 11721 - protein, 10 aa, Homo Sapiens
RLFNDPVAMV

SEQ ID NO: 11722 - protein, 10 aa, Homo Sapiens
RLLDLENIQI

SEQ ID NO: 11723 - protein, 10 aa, Homo Sapiens
RLLEFELAQL

SEQ ID NO: 11724 - protein, 10 aa, Homo Sapiens
RLLEGYEIYV

SEQ ID NO: 11725 - protein, 10 aa, Homo Sapiens
RLMMDPLTGL

SEQ ID NO: 11726 - protein, 10 aa, Homo Sapiens
RLYPEGLAQL

SEQ ID NO: 11727 - protein, 10 aa, Homo Sapiens
RLYPWGVVEV

SEQ ID NO: 11728 - protein, 10 aa, Homo Sapiens
RMFADDLHNL

SEQ ID NO: 11729 - protein, 10 aa, Homo Sapiens
RVAQLEQVYI

SEQ ID NO: 11730 - protein, 10 aa, Homo Sapiens
SIYGGFLLGV

SEQ ID NO: 11731 - protein, 10 aa, Homo Sapiens
SLADLQNDEV

SEQ ID NO: 11732 - protein, 10 aa, Homo Sapiens
SLAELKGFEV

SEQ ID NO: 11733 - protein, 10 aa, Homo Sapiens
SLAEVAGLQV

SEQ ID NO: 11734 - protein, 10 aa, Homo Sapiens
SLHEWQDINL

SEQ ID NO: 11735 - protein, 10 aa, Homo Sapiens
SLINVGLISV

SEQ ID NO: 11736 - protein, 10 aa, Homo Sapiens
SLLDGVVEKL

SEQ ID NO: 11737 - protein, 10 aa, Homo Sapiens
SLLDMSLVKL

SEQ ID NO: 11738 - protein, 10 aa, Homo Sapiens
SLLDRFLATV

SEQ ID NO: 11739 - protein, 10 aa, Homo Sapiens
SLLELPHPLL

SEQ ID NO: 11740 - protein, 10 aa, Homo Sapiens
SLLGGDVVSV

SEQ ID NO: 11741 - protein, 10 aa, Homo Sapiens
SLLPEGPPAI

SEQ ID NO: 11742 - protein, 10 aa, Homo Sapiens
SLMGPVVHEV

SEQ ID NO: 11743 - protein, 10 aa, Homo Sapiens
SLNQAALYRL

SEQ ID NO: 11744 - protein, 10 aa, Homo Sapiens
SLYDWNVKLL

SEQ ID NO: 11745 - protein, 10 aa, Homo Sapiens
SLYPQFMFHL

SEQ ID NO: 11746 - protein, 10 aa, Homo Sapiens
SMLPGFLHRL

SEQ ID NO: 11747 - protein, 10 aa, Homo Sapiens
SVAVWSGVNV

SEQ ID NO: 11748 - protein, 10 aa, Homo Sapiens
TLAYDKGWRV

SEQ ID NO: 11749 - protein, 10 aa, Homo Sapiens
TLFPGKVHSL

SEQ ID NO: 11750 - protein, 10 aa, Homo Sapiens
TLHGLQQYYV

SEQ ID NO: 11751 - protein, 10 aa, Homo Sapiens
TLIELLLPKL

SEQ ID NO: 11752 - protein, 10 aa, Homo Sapiens
TLLEDGTFKV

SEQ ID NO: 11753 - protein, 10 aa, Homo Sapiens
TLLPQGLPGL

SEQ ID NO: 11754 - protein, 10 aa, Homo Sapiens
TLNQIDSVKV

SEQ ID NO: 11755 - protein, 10 aa, Homo Sapiens
TLWEIAKAEV

SEQ ID NO: 11756 - protein, 10 aa, Homo Sapiens
TLYFSYTHMV

SEQ ID NO: 11757 - protein, 10 aa, Homo Sapiens
VAAKKIIIQR

SEQ ID NO: 11758 - protein, 10 aa, Homo Sapiens
VFGVIISIHG

SEQ ID NO: 11759 - protein, 10 aa, Homo Sapiens
VINDVRDIFL

SEQ ID NO: 11760 - protein, 10 aa, Homo Sapiens
VIWEHDYTSV

SEQ ID NO: 11761 - protein, 10 aa, Homo Sapiens
VLFDDELLMV

SEQ ID NO: 11762 - protein, 10 aa, Homo Sapiens
VLFDVSIMAV

SEQ ID NO: 11763 - protein, 10 aa, Homo Sapiens
VLLEPFVHQV

SEQ ID NO: 11764 - protein, 10 aa, Homo Sapiens
VLLGHILPGL

SEQ ID NO: 11765 - protein, 10 aa, Homo Sapiens
VLWDRTFSLF

SEQ ID NO: 11766 - protein, 10 aa, Homo Sapiens
VPGLYTLEEL

SEQ ID NO: 11767 - protein, 10 aa, Homo Sapiens
YIFEEPFTIR

SEQ ID NO: 11768 - protein, 10 aa, Homo Sapiens
YLAEKYEWDV

SEQ ID NO: 11769 - protein, 10 aa, Homo Sapiens
YLAELVTPIL

SEQ ID NO: 11770 - protein, 10 aa, Homo Sapiens
YLDEYIARMV

SEQ ID NO: 11771 - protein, 10 aa, Homo Sapiens
YLHLDYNFNL

SEQ ID NO: 11772 - protein, 10 aa, Homo Sapiens
YLINFEIRSL

SEQ ID NO: 11773 - protein, 10 aa, Homo Sapiens
YLIPDIDLKL

SEQ ID NO: 11774 - protein, 10 aa, Homo Sapiens
YLITGNLEKL

SEQ ID NO: 11775 - protein, 10 aa, Homo Sapiens
YLLDLHSYLL

SEQ ID NO: 11776 - protein, 10 aa, Homo Sapiens
YLLDMPLWYL

SEQ ID NO: 11777 - protein, 10 aa, Homo Sapiens
YLLEEKIASL

SEQ ID NO: 11778 - protein, 10 aa, Homo Sapiens
YLLQEPPRTV

SEQ ID NO: 11779 - protein, 10 aa, Homo Sapiens
YLLTHPPPIM

SEQ ID NO: 11780 - protein, 10 aa, Homo Sapiens
YLNHIEPLKI

SEQ ID NO: 11781 - protein, 10 aa, Homo Sapiens
YLQEVPILTL

SEQ ID NO: 11782 - protein, 10 aa, Homo Sapiens
YLTNEGIQYL

SEQ ID NO: 11783 - protein, 10 aa, Homo Sapiens
YLYEEYLQAF

SEQ ID NO: 11784 - protein, 10 aa, Homo Sapiens
YMIDNVILLI

SEQ ID NO: 11785 - protein, 10 aa, Homo Sapiens
YQILDGIHYL

SEQ ID NO: 11786 - protein, 10 aa, Homo Sapiens
YVMEYRELFL

SEQ ID NO: 11787 - protein, 11 aa, Homo Sapiens
ALADKELLPSV

SEQ ID NO: 11788 - protein, 11 aa, Homo Sapiens
ALAEALKEVSL

SEQ ID NO: 11789 - protein, 11 aa, Homo Sapiens
ALEEYGPELHV

SEQ ID NO: 11790 - protein, 11 aa, Homo Sapiens
ALFARPDLLLL

SEQ ID NO: 11791 - protein, 11 aa, Homo Sapiens
ALFASGLIHRV

SEQ ID NO: 11792 - protein, 11 aa, Homo Sapiens
ALFEAAREVTL

SEQ ID NO: 11793 - protein, 11 aa, Homo Sapiens
ALFEESGLIRI

SEQ ID NO: 11794 - protein, 11 aa, Homo Sapiens
ALFPHLLQPVL

SEQ ID NO: 11795 - protein, 11 aa, Homo Sapiens
ALGLVVGSHLL

SEQ ID NO: 11796 - protein, 11 aa, Homo Sapiens
ALGNWNPQNAV

SEQ ID NO: 11797 - protein, 11 aa, Homo Sapiens
ALIEAEKVAQV

SEQ ID NO: 11798 - protein, 11 aa, Homo Sapiens
ALILEPSLYTV

SEQ ID NO: 11799 - protein, 11 aa, Homo Sapiens
ALINEEAILNL

SEQ ID NO: 11800 - protein, 11 aa, Homo Sapiens
ALIPETTTLTV

SEQ ID NO: 11801 - protein, 11 aa, Homo Sapiens
ALLAGSEYLKL

SEQ ID NO: 11802 - protein, 11 aa, Homo Sapiens
ALLDAAGVASL

SEQ ID NO: 11803 - protein, 11 aa, Homo Sapiens
ALLDKLYALGL

SEQ ID NO: 11804 - protein, 11 aa, Homo Sapiens
ALLENMEGLFL

SEQ ID NO: 11805 - protein, 11 aa, Homo Sapiens
ALLETSLLHHF

SEQ ID NO: 11806 - protein, 11 aa, Homo Sapiens
ALLLPTGVFQV

SEQ ID NO: 11807 - protein, 11 aa, Homo Sapiens
ALNEEAGRLLL

SEQ ID NO: 11808 - protein, 11 aa, Homo Sapiens
ALSEAMGLFCL

SEQ ID NO: 11809 - protein, 11 aa, Homo Sapiens
ALSPNYDHVVL

SEQ ID NO: 11810 - protein, 11 aa, Homo Sapiens
ALVAVPLGMTV

SEQ ID NO: 11811 - protein, 11 aa, Homo Sapiens
AMASLGALALL

SEQ ID NO: 11812 - protein, 11 aa, Homo Sapiens
AQLDPEALGNI

SEQ ID NO: 11813 - protein, 11 aa, Homo Sapiens
AVMAPRTLVLL

SEQ ID NO: 11814 - protein, 11 aa, Homo Sapiens
DAAHGAWILII

SEQ ID NO: 11815 - protein, 11 aa, Homo Sapiens
FLADPSAFVAA

SEQ ID NO: 11816 - protein, 11 aa, Homo Sapiens
FLAELPGSLSL

SEQ ID NO: 11817 - protein, 11 aa, Homo Sapiens
FLASESLIKQI

SEQ ID NO: 11818 - protein, 11 aa, Homo Sapiens
FLFDGSPTYVL

SEQ ID NO: 11819 - protein, 11 aa, Homo Sapiens
FLFVDPELVSA

SEQ ID NO: 11820 - protein, 11 aa, Homo Sapiens
FLLDKPQDLSI

SEQ ID NO: 11821 - protein, 11 aa, Homo Sapiens
FLLDPYKYMTL

SEQ ID NO: 11822 - protein, 11 aa, Homo Sapiens
FLLEQEKTQAL

SEQ ID NO: 11823 - protein, 11 aa, Homo Sapiens
FLLPKVQSIQL

SEQ ID NO: 11824 - protein, 11 aa, Homo Sapiens
FLNSVTDIHQL

SEQ ID NO: 11825 - protein, 11 aa, Homo Sapiens
FLWDVPSNWTL

SEQ ID NO: 11826 - protein, 11 aa, Homo Sapiens
FMIDASVHPTL

SEQ ID NO: 11827 - protein, 11 aa, Homo Sapiens
FMLPDPQNISL

SEQ ID NO: 11828 - protein, 11 aa, Homo Sapiens
GLADASLLKKV

SEQ ID NO: 11829 - protein, 11 aa, Homo Sapiens
GLADNTVIAKV

SEQ ID NO: 11830 - protein, 11 aa, Homo Sapiens
GLFAHPSLWQL

SEQ ID NO: 11831 - protein, 11 aa, Homo Sapiens
GLIDIENPNRV

SEQ ID NO: 11832 - protein, 11 aa, Homo Sapiens
GLIDTKELEPL

SEQ ID NO: 11833 - protein, 11 aa, Homo Sapiens
GLLDLPFRVGV

SEQ ID NO: 11834 - protein, 11 aa, Homo Sapiens
GLLDPGMLVNI

SEQ ID NO: 11835 - protein, 11 aa, Homo Sapiens
GLLEARGILGL

SEQ ID NO: 11836 - protein, 11 aa, Homo Sapiens
GLLPEPNILQL

SEQ ID NO: 11837 - protein, 11 aa, Homo Sapiens
GLLQINDKIAL

SEQ ID NO: 11838 - protein, 11 aa, Homo Sapiens
GLLQQPSALML

SEQ ID NO: 11839 - protein, 11 aa, Homo Sapiens
GLSLEIGENRL

SEQ ID NO: 11840 - protein, 11 aa, Homo Sapiens
GLTSTDLLFHL

SEQ ID NO: 11841 - protein, 11 aa, Homo Sapiens
GLWEIENNPTV

SEQ ID NO: 11842 - protein, 11 aa, Homo Sapiens
GMLDPLEVHLL

SEQ ID NO: 11843 - protein, 11 aa, Homo Sapiens
GMYGKIAVMEL

SEQ ID NO: 11844 - protein, 11 aa, Homo Sapiens
GQSELASRLTL

SEQ ID NO: 11845 - protein, 11 aa, Homo Sapiens
HLFEDAYLLTL

SEQ ID NO: 11846 - protein, 11 aa, Homo Sapiens
HLQEYTSTLLL

SEQ ID NO: 11847 - protein, 11 aa, Homo Sapiens
HVNPYIGLFFF

SEQ ID NO: 11848 - protein, 11 aa, Homo Sapiens
IDVNMGEVLLV

SEQ ID NO: 11849 - protein, 11 aa, Homo Sapiens
IILEPMDLKII

SEQ ID NO: 11850 - protein, 11 aa, Homo Sapiens
IIQDIDDTHVF

SEQ ID NO: 11851 - protein, 11 aa, Homo Sapiens
ILLAEGRLVNL

SEQ ID NO: 11852 - protein, 11 aa, Homo Sapiens
ILLDDTGLAYI

SEQ ID NO: 11853 - protein, 11 aa, Homo Sapiens
ILLSEPGLVKL

SEQ ID NO: 11854 - protein, 11 aa, Homo Sapiens
ILQNEPLPERL

SEQ ID NO: 11855 - protein, 11 aa, Homo Sapiens
IVLPAGALHQV

SEQ ID NO: 11856 - protein, 11 aa, Homo Sapiens
KIIDEDGLLNL

SEQ ID NO: 11857 - protein, 11 aa, Homo Sapiens
KIVNTPEVIRV

SEQ ID NO: 11858 - protein, 11 aa, Homo Sapiens
KLFDLDEKLML

SEQ ID NO: 11859 - protein, 11 aa, Homo Sapiens
KLFPKGTIFTA

SEQ ID NO: 11860 - protein, 11 aa, Homo Sapiens
KLFSLQDLLLL

SEQ ID NO: 11861 - protein, 11 aa, Homo Sapiens
KLGDFGLLVEL

SEQ ID NO: 11862 - protein, 11 aa, Homo Sapiens
KLGEFAKVLEL

SEQ ID NO: 11863 - protein, 11 aa, Homo Sapiens
KLIDLSQVMYL

SEQ ID NO: 11864 - protein, 11 aa, Homo Sapiens
KLIEVDDERKL

SEQ ID NO: 11865 - protein, 11 aa, Homo Sapiens
KLLDFGSLSNL

SEQ ID NO: 11866 - protein, 11 aa, Homo Sapiens
KLLNIIDLQFL

SEQ ID NO: 11867 - protein, 11 aa, Homo Sapiens
KLLPDTILEKL

SEQ ID NO: 11868 - protein, 11 aa, Homo Sapiens
KLLSHSLLVTL

SEQ ID NO: 11869 - protein, 11 aa, Homo Sapiens
KLSLVAAMLLL

SEQ ID NO: 11870 - protein, 11 aa, Homo Sapiens
KVINTPEVLRV

SEQ ID NO: 11871 - protein, 11 aa, Homo Sapiens
LIGWENQPTTL

SEQ ID NO: 11872 - protein, 11 aa, Homo Sapiens
LKLDDTERRIK

SEQ ID NO: 11873 - protein, 11 aa, Homo Sapiens
LKLFDRPQELK

SEQ ID NO: 11874 - protein, 11 aa, Homo Sapiens
LLIDDKGTIKL

SEQ ID NO: 11875 - protein, 11 aa, Homo Sapiens
LLLEPGSLYIL

SEQ ID NO: 11876 - protein, 11 aa, Homo Sapiens
LLLPDYYLVTV

SEQ ID NO: 11877 - protein, 11 aa, Homo Sapiens
LLYDLADQLHA

SEQ ID NO: 11878 - protein, 11 aa, Homo Sapiens
LVLDPPTDLKF

SEQ ID NO: 11879 - protein, 11 aa, Homo Sapiens
LVLTQEQLHQL

SEQ ID NO: 11880 - protein, 11 aa, Homo Sapiens
MALDIDERHLL

SEQ ID NO: 11881 - protein, 11 aa, Homo Sapiens
NLITYDDRFNL

SEQ ID NO: 11882 - protein, 11 aa, Homo Sapiens
NMLDVNGLFTL

SEQ ID NO: 11883 - protein, 11 aa, Homo Sapiens
RILDIDIPMSV

SEQ ID NO: 11884 - protein, 11 aa, Homo Sapiens
RLFDEPQLASL

SEQ ID NO: 11885 - protein, 11 aa, Homo Sapiens
RLFEASDPYQV

SEQ ID NO: 11886 - protein, 11 aa, Homo Sapiens
RLLAEIGAVTL

SEQ ID NO: 11887 - protein, 11 aa, Homo Sapiens
RLLEEGVLRQI

SEQ ID NO: 11888 - protein, 11 aa, Homo Sapiens
RLLEESLLSLI

SEQ ID NO: 11889 - protein, 11 aa, Homo Sapiens
RLLEPAQVQQL

SEQ ID NO: 11890 - protein, 11 aa, Homo Sapiens
RLLEVTNTIRV

SEQ ID NO: 11891 - protein, 11 aa, Homo Sapiens
RLLPPELLRQL

SEQ ID NO: 11892 - protein, 11 aa, Homo Sapiens
RLLPPGAVVAV

SEQ ID NO: 11893 - protein, 11 aa, Homo Sapiens
RLMEPIYLVEI

SEQ ID NO: 11894 - protein, 11 aa, Homo Sapiens
RLNDFASTVRI

SEQ ID NO: 11895 - protein, 11 aa, Homo Sapiens
RLWTPPEDYRL

SEQ ID NO: 11896 - protein, 11 aa, Homo Sapiens
RMLEDRDLFVM

SEQ ID NO: 11897 - protein, 11 aa, Homo Sapiens
RQLEEEGITFV

SEQ ID NO: 11898 - protein, 11 aa, Homo Sapiens
RVLPPSALQSV

SEQ ID NO: 11899 - protein, 11 aa, Homo Sapiens
SLADDSVLERL

SEQ ID NO: 11900 - protein, 11 aa, Homo Sapiens
SLADIAQKLQL

SEQ ID NO: 11901 - protein, 11 aa, Homo Sapiens
SLFNGSHYLDV

SEQ ID NO: 11902 - protein, 11 aa, Homo Sapiens
SLFQGVEFHYV

SEQ ID NO: 11903 - protein, 11 aa, Homo Sapiens
SLLGDDALVQV

SEQ ID NO: 11904 - protein, 11 aa, Homo Sapiens
SLLHLGALYGI

SEQ ID NO: 11905 - protein, 11 aa, Homo Sapiens
SLLNPPETLNL

SEQ ID NO: 11906 - protein, 11 aa, Homo Sapiens
SLLPPDALVGL

SEQ ID NO: 11907 - protein, 11 aa, Homo Sapiens
SLLPPTALVGL

SEQ ID NO: 11908 - protein, 11 aa, Homo Sapiens
SLLSDYDILSL

SEQ ID NO: 11909 - protein, 11 aa, Homo Sapiens
SLLSPGLLPHL

SEQ ID NO: 11910 - protein, 11 aa, Homo Sapiens
SLMDPNKFLLL

SEQ ID NO: 11911 - protein, 11 aa, Homo Sapiens
SLQDVVKGLFV

SEQ ID NO: 11912 - protein, 11 aa, Homo Sapiens
SLSSEFKNITV

SEQ ID NO: 11913 - protein, 11 aa, Homo Sapiens
SLVENIERLKV

SEQ ID NO: 11914 - protein, 11 aa, Homo Sapiens
SLWEDYPHVHL

SEQ ID NO: 11915 - protein, 11 aa, Homo Sapiens
SMADIPLGFGV

SEQ ID NO: 11916 - protein, 11 aa, Homo Sapiens
SVLPESTLFRL

SEQ ID NO: 11917 - protein, 11 aa, Homo Sapiens
TIIDLPGITRV

SEQ ID NO: 11918 - protein, 11 aa, Homo Sapiens
TLADYLHLLQA

SEQ ID NO: 11919 - protein, 11 aa, Homo Sapiens
TLFHDPWKLLI

SEQ ID NO: 11920 - protein, 11 aa, Homo Sapiens
TLIDLPGITKV

SEQ ID NO: 11921 - protein, 11 aa, Homo Sapiens
TLLAAEFLKQV

SEQ ID NO: 11922 - protein, 11 aa, Homo Sapiens
TLLDAGLPQKV

SEQ ID NO: 11923 - protein, 11 aa, Homo Sapiens
TLLEEIRDLAL

SEQ ID NO: 11924 - protein, 11 aa, Homo Sapiens
TLLEISDLNEL

SEQ ID NO: 11925 - protein, 11 aa, Homo Sapiens
TLQEFLERIHL

SEQ ID NO: 11926 - protein, 11 aa, Homo Sapiens
TLYDIAHTPGV

SEQ ID NO: 11927 - protein, 11 aa, Homo Sapiens
VLFDVTGQVRL

SEQ ID NO: 11928 - protein, 11 aa, Homo Sapiens
VLFEHAVGYAL

SEQ ID NO: 11929 - protein, 11 aa, Homo Sapiens
VLIDVGTGYYV

SEQ ID NO: 11930 - protein, 11 aa, Homo Sapiens
VLLAEGRLLNL

SEQ ID NO: 11931 - protein, 11 aa, Homo Sapiens
VLNEAAQILRL

SEQ ID NO: 11932 - protein, 11 aa, Homo Sapiens
WLIEDGKVVTV

SEQ ID NO: 11933 - protein, 11 aa, Homo Sapiens
YIMEPSIFNTL

SEQ ID NO: 11934 - protein, 11 aa, Homo Sapiens
YLFDVQRNNIA

SEQ ID NO: 11935 - protein, 11 aa, Homo Sapiens
YLISQVEGHQV

SEQ ID NO: 11936 - protein, 11 aa, Homo Sapiens
YLLDIGCGTGL

SEQ ID NO: 11937 - protein, 11 aa, Homo Sapiens
YLLNDASLISV

SEQ ID NO: 11938 - protein, 11 aa, Homo Sapiens
YLNETFSELRL

SEQ ID NO: 11939 - protein, 11 aa, Homo Sapiens
YLSDPCPGLYL

SEQ ID NO: 11940 - protein, 11 aa, Homo Sapiens
YQFDKVGILTL

SEQ ID NO: 11941 - protein, 8 aa, Homo Sapiens
AADIDHKL

SEQ ID NO: 11942 - protein, 8 aa, Homo Sapiens
AIEHLDKI

SEQ ID NO: 11943 - protein, 8 aa, Homo Sapiens
APFPEVFG

SEQ ID NO: 11944 - protein, 8 aa, Homo Sapiens
ASGLIHRV

SEQ ID NO: 11945 - protein, 8 aa, Homo Sapiens
DTNADKQL

SEQ ID NO: 11946 - protein, 8 aa, Homo Sapiens
ELEKRVME

SEQ ID NO: 11947 - protein, 8 aa, Homo Sapiens
ESPPEINT

SEQ ID NO: 11948 - protein, 8 aa, Homo Sapiens
EVDDEALE

SEQ ID NO: 11949 - protein, 8 aa, Homo Sapiens
FDKTLAEL

SEQ ID NO: 11950 - protein, 8 aa, Homo Sapiens
FGGHIRSV

SEQ ID NO: 11951 - protein, 8 aa, Homo Sapiens
FKGKFKEG

SEQ ID NO: 11952 - protein, 8 aa, Homo Sapiens
FNEKSKEL

SEQ ID NO: 11953 - protein, 8 aa, Homo Sapiens
FQSEEQQQ

SEQ ID NO: 11954 - protein, 8 aa, Homo Sapiens
FSDIPNPI

SEQ ID NO: 11955 - protein, 8 aa, Homo Sapiens
FSEGLIKA

SEQ ID NO: 11956 - protein, 8 aa, Homo Sapiens
GAADIDHK

SEQ ID NO: 11957 - protein, 8 aa, Homo Sapiens
GEVPLTPT

SEQ ID NO: 11958 - protein, 8 aa, Homo Sapiens
ISEFEHRV

SEQ ID NO: 11959 - protein, 8 aa, Homo Sapiens
LMEHIHKL

SEQ ID NO: 11960 - protein, 8 aa, Homo Sapiens
LTGLLLLQ

SEQ ID NO: 11961 - protein, 8 aa, Homo Sapiens
NAVPITPT

SEQ ID NO: 11962 - protein, 8 aa, Homo Sapiens
NVPGEIVE

SEQ ID NO: 11963 - protein, 8 aa, Homo Sapiens
PFPGPIPN

SEQ ID NO: 11964 - protein, 8 aa, Homo Sapiens
QAEIVKRL

SEQ ID NO: 11965 - protein, 8 aa, Homo Sapiens
QEPVLGPV

SEQ ID NO: 11966 - protein, 8 aa, Homo Sapiens
STGDVNVE

SEQ ID NO: 11967 - protein, 8 aa, Homo Sapiens
TEDELQDK

SEQ ID NO: 11968 - protein, 8 aa, Homo Sapiens
TEELAYLK

SEQ ID NO: 11969 - protein, 8 aa, Homo Sapiens
TVGPVQKL

SEQ ID NO: 11970 - protein, 8 aa, Homo Sapiens
VADHIQKV

SEQ ID NO: 11971 - protein, 8 aa, Homo Sapiens
VIGIIKTV

SEQ ID NO: 11972 - protein, 8 aa, Homo Sapiens
VPGEIVES

SEQ ID NO: 11973 - protein, 8 aa, Homo Sapiens
VPPFLQPE

SEQ ID NO: 11974 - protein, 8 aa, Homo Sapiens
VQDGIVKA

SEQ ID NO: 11975 - protein, 8 aa, Homo Sapiens
VSLTACKV

SEQ ID NO: 11976 - protein, 8 aa, Homo Sapiens
VSQINHKL

SEQ ID NO: 11977 - protein, 8 aa, Homo Sapiens
YGVDLHKA

SEQ ID NO: 11978 - protein, 9 aa, Homo Sapiens
AAAAAVDPH

SEQ ID NO: 11979 - protein, 9 aa, Homo Sapiens
AAADITSSL

SEQ ID NO: 11980 - protein, 9 aa, Homo Sapiens
AAADIVNFL

SEQ ID NO: 11981 - protein, 9 aa, Homo Sapiens
AAAGVVHAV

SEQ ID NO: 11982 - protein, 9 aa, Homo Sapiens
AAALIIHHV

SEQ ID NO: 11983 - protein, 9 aa, Homo Sapiens
AAAPTANLL

SEQ ID NO: 11984 - protein, 9 aa, Homo Sapiens
AAFGQLHKV

SEQ ID NO: 11985 - protein, 9 aa, Homo Sapiens
AAGPPLVAA

SEQ ID NO: 11986 - protein, 9 aa, Homo Sapiens
AAGPPTHEV

SEQ ID NO: 11987 - protein, 9 aa, Homo Sapiens
AAIENLNEA

SEQ ID NO: 11988 - protein, 9 aa, Homo Sapiens
AAIKIIRQL

SEQ ID NO: 11989 - protein, 9 aa, Homo Sapiens
AAISQVDRL

SEQ ID NO: 11990 - protein, 9 aa, Homo Sapiens
AASPIITLV

SEQ ID NO: 11991 - protein, 9 aa, Homo Sapiens
AATEIVERV

SEQ ID NO: 11992 - protein, 9 aa, Homo Sapiens
AAVEKLHHL

SEQ ID NO: 11993 - protein, 9 aa, Homo Sapiens
AAVRDISEA

SEQ ID NO: 11994 - protein, 9 aa, Homo Sapiens
ADASLLKKV

SEQ ID NO: 11995 - protein, 9 aa, Homo Sapiens
AGAPVYLAA

SEQ ID NO: 11996 - protein, 9 aa, Homo Sapiens
AGAPVYMAA

SEQ ID NO: 11997 - protein, 9 aa, Homo Sapiens
AIAPIIAAV

SEQ ID NO: 11998 - protein, 9 aa, Homo Sapiens
AIATELAQA

SEQ ID NO: 11999 - protein, 9 aa, Homo Sapiens
AICPNNHEV

SEQ ID NO: 12000 - protein, 9 aa, Homo Sapiens
AIFEYIDRL

SEQ ID NO: 12001 - protein, 9 aa, Homo Sapiens
AIIDHIFAS

SEQ ID NO: 12002 - protein, 9 aa, Homo Sapiens
AIIEYMPLL

SEQ ID NO: 12003 - protein, 9 aa, Homo Sapiens
AIIPYIPTL

SEQ ID NO: 12004 - protein, 9 aa, Homo Sapiens
AIISKLVAL

SEQ ID NO: 12005 - protein, 9 aa, Homo Sapiens
AIKEILTQV

SEQ ID NO: 12006 - protein, 9 aa, Homo Sapiens
AIKELLDTV

SEQ ID NO: 12007 - protein, 9 aa, Homo Sapiens
AIKKELTQI

SEQ ID NO: 12008 - protein, 9 aa, Homo Sapiens
AIPDIINEI

SEQ ID NO: 12009 - protein, 9 aa, Homo Sapiens
AIPERVEEI

SEQ ID NO: 12010 - protein, 9 aa, Homo Sapiens
AISEMTDKL

SEQ ID NO: 12011 - protein, 9 aa, Homo Sapiens
AIVDKVPSV

SEQ ID NO: 12012 - protein, 9 aa, Homo Sapiens
AIVDLIHDI

SEQ ID NO: 12013 - protein, 9 aa, Homo Sapiens
AIVKEIVNI

SEQ ID NO: 12014 - protein, 9 aa, Homo Sapiens
ALADFAELI

SEQ ID NO: 12015 - protein, 9 aa, Homo Sapiens
ALADGVQKV

SEQ ID NO: 12016 - protein, 9 aa, Homo Sapiens
ALAEEVEQV

SEQ ID NO: 12017 - protein, 9 aa, Homo Sapiens
ALASVIMGL

SEQ ID NO: 12018 - protein, 9 aa, Homo Sapiens
ALATLIHQV

SEQ ID NO: 12019 - protein, 9 aa, Homo Sapiens
ALFNGAQKL

SEQ ID NO: 12020 - protein, 9 aa, Homo Sapiens
ALFPGVALL

SEQ ID NO: 12021 - protein, 9 aa, Homo Sapiens
ALGPKPQGL

SEQ ID NO: 12022 - protein, 9 aa, Homo Sapiens
ALIEKLVEL

SEQ ID NO: 12023 - protein, 9 aa, Homo Sapiens
ALIPVINKL

SEQ ID NO: 12024 - protein, 9 aa, Homo Sapiens
ALIRVISKL

SEQ ID NO: 12025 - protein, 9 aa, Homo Sapiens
ALKDEVQEL

SEQ ID NO: 12026 - protein, 9 aa, Homo Sapiens
ALKDKIEKA

SEQ ID NO: 12027 - protein, 9 aa, Homo Sapiens
ALKDLINEA

SEQ ID NO: 12028 - protein, 9 aa, Homo Sapiens
ALKERADSL

SEQ ID NO: 12029 - protein, 9 aa, Homo Sapiens
ALKKALAAA

SEQ ID NO: 12030 - protein, 9 aa, Homo Sapiens
ALKKNLEKI

SEQ ID NO: 12031 - protein, 9 aa, Homo Sapiens
ALKPDLVNV

SEQ ID NO: 12032 - protein, 9 aa, Homo Sapiens
ALKPEVDKL

SEQ ID NO: 12033 - protein, 9 aa, Homo Sapiens
ALMDEVVKA

SEQ ID NO: 12034 - protein, 9 aa, Homo Sapiens
ALPDWCEQL

SEQ ID NO: 12035 - protein, 9 aa, Homo Sapiens
ALPEAIAAL

SEQ ID NO: 12036 - protein, 9 aa, Homo Sapiens
ALPRHLHTA

SEQ ID NO: 12037 - protein, 9 aa, Homo Sapiens
ALSPNNHEV

SEQ ID NO: 12038 - protein, 9 aa, Homo Sapiens
ALSSFAHCL

SEQ ID NO: 12039 - protein, 9 aa, Homo Sapiens
ALSSLIHAL

SEQ ID NO: 12040 - protein, 9 aa, Homo Sapiens
ALTHIDHSL

SEQ ID NO: 12041 - protein, 9 aa, Homo Sapiens
ALVDHVAEL

SEQ ID NO: 12042 - protein, 9 aa, Homo Sapiens
ALVGFCDEV

SEQ ID NO: 12043 - protein, 9 aa, Homo Sapiens
ALVQDLAKA

SEQ ID NO: 12044 - protein, 9 aa, Homo Sapiens
ALYAVIEKA

SEQ ID NO: 12045 - protein, 9 aa, Homo Sapiens
ALYDNVEKL

SEQ ID NO: 12046 - protein, 9 aa, Homo Sapiens
AMASIINRL

SEQ ID NO: 12047 - protein, 9 aa, Homo Sapiens
AMIELVERL

SEQ ID NO: 12048 - protein, 9 aa, Homo Sapiens
AMIKGLQVL

SEQ ID NO: 12049 - protein, 9 aa, Homo Sapiens
AMMAKAEYL

SEQ ID NO: 12050 - protein, 9 aa, Homo Sapiens
AQADLAYQL

SEQ ID NO: 12051 - protein, 9 aa, Homo Sapiens
AQAEAAEQL

SEQ ID NO: 12052 - protein, 9 aa, Homo Sapiens
AQAEDYSQL

SEQ ID NO: 12053 - protein, 9 aa, Homo Sapiens
AQAELAQKL

SEQ ID NO: 12054 - protein, 9 aa, Homo Sapiens
AQAELQHVL

SEQ ID NO: 12055 - protein, 9 aa, Homo Sapiens
AQAEVYKEL

SEQ ID NO: 12056 - protein, 9 aa, Homo Sapiens
AQAFIHNSL

SEQ ID NO: 12057 - protein, 9 aa, Homo Sapiens
AQAGLSSGL

SEQ ID NO: 12058 - protein, 9 aa, Homo Sapiens
AQAHMFVKL

SEQ ID NO: 12059 - protein, 9 aa, Homo Sapiens
AQAKIYWNL

SEQ ID NO: 12060 - protein, 9 aa, Homo Sapiens
AQALINRGV

SEQ ID NO: 12061 - protein, 9 aa, Homo Sapiens
AQALIYAEM

SEQ ID NO: 12062 - protein, 9 aa, Homo Sapiens
AQAMIFCHT

SEQ ID NO: 12063 - protein, 9 aa, Homo Sapiens
AQAPDLQRV

SEQ ID NO: 12064 - protein, 9 aa, Homo Sapiens
AQAPIAAVL

SEQ ID NO: 12065 - protein, 9 aa, Homo Sapiens
AQAPPTAQL

SEQ ID NO: 12066 - protein, 9 aa, Homo Sapiens
AQAPPTFRA

SEQ ID NO: 12067 - protein, 9 aa, Homo Sapiens
AQAQEVFFL

SEQ ID NO: 12068 - protein, 9 aa, Homo Sapiens
AQASFRDGL

SEQ ID NO: 12069 - protein, 9 aa, Homo Sapiens
AQASIKQLV

SEQ ID NO: 12070 - protein, 9 aa, Homo Sapiens
AQCPIVERL

SEQ ID NO: 12071 - protein, 9 aa, Homo Sapiens
AQCTLINFL

SEQ ID NO: 12072 - protein, 9 aa, Homo Sapiens
AQFEHTILL

SEQ ID NO: 12073 - protein, 9 aa, Homo Sapiens
AQFGYYFRV

SEQ ID NO: 12074 - protein, 9 aa, Homo Sapiens
AQFKGTQSL

SEQ ID NO: 12075 - protein, 9 aa, Homo Sapiens
AQFPGACGL

SEQ ID NO: 12076 - protein, 9 aa, Homo Sapiens
AQIDHYLGL

SEQ ID NO: 12077 - protein, 9 aa, Homo Sapiens
AQIDQYVGL

SEQ ID NO: 12078 - protein, 9 aa, Homo Sapiens
AQIEAQNRL

SEQ ID NO: 12079 - protein, 9 aa, Homo Sapiens
AQIELLQLL

SEQ ID NO: 12080 - protein, 9 aa, Homo Sapiens
AQIEVVPSA

SEQ ID NO: 12081 - protein, 9 aa, Homo Sapiens
AQIGSYVHV

SEQ ID NO: 12082 - protein, 9 aa, Homo Sapiens
AQIKELEEL

SEQ ID NO: 12083 - protein, 9 aa, Homo Sapiens
AQIKEMVEL

SEQ ID NO: 12084 - protein, 9 aa, Homo Sapiens
AQIKHLARL

SEQ ID NO: 12085 - protein, 9 aa, Homo Sapiens
AQIKVTKEL

SEQ ID NO: 12086 - protein, 9 aa, Homo Sapiens
AQILELPYA

SEQ ID NO: 12087 - protein, 9 aa, Homo Sapiens
AQIPVVFRL

SEQ ID NO: 12088 - protein, 9 aa, Homo Sapiens
AQIPVVKTA

SEQ ID NO: 12089 - protein, 9 aa, Homo Sapiens
AQIRTIAII

SEQ ID NO: 12090 - protein, 9 aa, Homo Sapiens
AQIRYLTQV

SEQ ID NO: 12091 - protein, 9 aa, Homo Sapiens
AQITGTEHL

SEQ ID NO: 12092 - protein, 9 aa, Homo Sapiens
AQQNSGHFL

SEQ ID NO: 12093 - protein, 9 aa, Homo Sapiens
AQSPLCRSL

SEQ ID NO: 12094 - protein, 9 aa, Homo Sapiens
AQSRIALAL

SEQ ID NO: 12095 - protein, 9 aa, Homo Sapiens
AQTTLRNVL

SEQ ID NO: 12096 - protein, 9 aa, Homo Sapiens
AQVALVNEV

SEQ ID NO: 12097 - protein, 9 aa, Homo Sapiens
AQVGKLPCL

SEQ ID NO: 12098 - protein, 9 aa, Homo Sapiens
AQVNLKYLL

SEQ ID NO: 12099 - protein, 9 aa, Homo Sapiens
AQVSKVEAL

SEQ ID NO: 12100 - protein, 9 aa, Homo Sapiens
AQYDGAYKV

SEQ ID NO: 12101 - protein, 9 aa, Homo Sapiens
AQYEHDLEV

SEQ ID NO: 12102 - protein, 9 aa, Homo Sapiens
AQYGKLESL

SEQ ID NO: 12103 - protein, 9 aa, Homo Sapiens
AQYPSEHLI

SEQ ID NO: 12104 - protein, 9 aa, Homo Sapiens
ASSPISHFL

SEQ ID NO: 12105 - protein, 9 aa, Homo Sapiens
ATADYICKV

SEQ ID NO: 12106 - protein, 9 aa, Homo Sapiens
ATAEHAARL

SEQ ID NO: 12107 - protein, 9 aa, Homo Sapiens
ATAHMCQHL

SEQ ID NO: 12108 - protein, 9 aa, Homo Sapiens
ATAPDSQRL

SEQ ID NO: 12109 - protein, 9 aa, Homo Sapiens
ATAPLISGV

SEQ ID NO: 12110 - protein, 9 aa, Homo Sapiens
ATAPLTELL

SEQ ID NO: 12111 - protein, 9 aa, Homo Sapiens
ATAPQTQHV

SEQ ID NO: 12112 - protein, 9 aa, Homo Sapiens
ATCGHINLV

SEQ ID NO: 12113 - protein, 9 aa, Homo Sapiens
ATFKGIVRA

SEQ ID NO: 12114 - protein, 9 aa, Homo Sapiens
ATIDKVVKI

SEQ ID NO: 12115 - protein, 9 aa, Homo Sapiens
ATIQKIPRL

SEQ ID NO: 12116 - protein, 9 aa, Homo Sapiens
ATIRLLDVL

SEQ ID NO: 12117 - protein, 9 aa, Homo Sapiens
ATMERLEKV

SEQ ID NO: 12118 - protein, 9 aa, Homo Sapiens
ATSDLNIKV

SEQ ID NO: 12119 - protein, 9 aa, Homo Sapiens
ATSDLVNAI

SEQ ID NO: 12120 - protein, 9 aa, Homo Sapiens
ATSGLDHQL

SEQ ID NO: 12121 - protein, 9 aa, Homo Sapiens
ATSYLSHQL

SEQ ID NO: 12122 - protein, 9 aa, Homo Sapiens
ATVEEVDAA

SEQ ID NO: 12123 - protein, 9 aa, Homo Sapiens
ATVGEITHA

SEQ ID NO: 12124 - protein, 9 aa, Homo Sapiens
ATYEDIVTL

SEQ ID NO: 12125 - protein, 9 aa, Homo Sapiens
AVAAELVSA

SEQ ID NO: 12126 - protein, 9 aa, Homo Sapiens
AVADKHELL

SEQ ID NO: 12127 - protein, 9 aa, Homo Sapiens
AVADKVHLM

SEQ ID NO: 12128 - protein, 9 aa, Homo Sapiens
AVADLQTRL

SEQ ID NO: 12129 - protein, 9 aa, Homo Sapiens
AVADNVERA

SEQ ID NO: 12130 - protein, 9 aa, Homo Sapiens
AVADTVYRA

SEQ ID NO: 12131 - protein, 9 aa, Homo Sapiens
AVAEINAVM

SEQ ID NO: 12132 - protein, 9 aa, Homo Sapiens
AVAELNYGL

SEQ ID NO: 12133 - protein, 9 aa, Homo Sapiens
AVAEPANAV

SEQ ID NO: 12134 - protein, 9 aa, Homo Sapiens
AVALEVQRL

SEQ ID NO: 12135 - protein, 9 aa, Homo Sapiens
AVANIVNSV

SEQ ID NO: 12136 - protein, 9 aa, Homo Sapiens
AVAQLAQEL

SEQ ID NO: 12137 - protein, 9 aa, Homo Sapiens
AVAQQVQQV

SEQ ID NO: 12138 - protein, 9 aa, Homo Sapiens
AVASALHKL

SEQ ID NO: 12139 - protein, 9 aa, Homo Sapiens
AVASFKHAL

SEQ ID NO: 12140 - protein, 9 aa, Homo Sapiens
AVASFVTQL

SEQ ID NO: 12141 - protein, 9 aa, Homo Sapiens
AVASKTYNL

SEQ ID NO: 12142 - protein, 9 aa, Homo Sapiens
AVATAVQRV

SEQ ID NO: 12143 - protein, 9 aa, Homo Sapiens
AVCEGTWRL

SEQ ID NO: 12144 - protein, 9 aa, Homo Sapiens
AVCGQVQHL

SEQ ID NO: 12145 - protein, 9 aa, Homo Sapiens
AVCNHISSV

SEQ ID NO: 12146 - protein, 9 aa, Homo Sapiens
AVCVLIEKL

SEQ ID NO: 12147 - protein, 9 aa, Homo Sapiens
AVFDKCPEL

SEQ ID NO: 12148 - protein, 9 aa, Homo Sapiens
AVFDNLIQL

SEQ ID NO: 12149 - protein, 9 aa, Homo Sapiens
AVFKELVKL

SEQ ID NO: 12150 - protein, 9 aa, Homo Sapiens
AVGPVHNSV

SEQ ID NO: 12151 - protein, 9 aa, Homo Sapiens
AVIDEIQMI

SEQ ID NO: 12152 - protein, 9 aa, Homo Sapiens
AVIEAEHTL

SEQ ID NO: 12153 - protein, 9 aa, Homo Sapiens
AVIEHLERL

SEQ ID NO: 12154 - protein, 9 aa, Homo Sapiens
AVIEHTNRV

SEQ ID NO: 12155 - protein, 9 aa, Homo Sapiens
AVIEQVKAA

SEQ ID NO: 12156 - protein, 9 aa, Homo Sapiens
AVIGDVIRV

SEQ ID NO: 12157 - protein, 9 aa, Homo Sapiens
AVIKFLELL

SEQ ID NO: 12158 - protein, 9 aa, Homo Sapiens
AVINRVQKV

SEQ ID NO: 12159 - protein, 9 aa, Homo Sapiens
AVINSLEKA

SEQ ID NO: 12160 - protein, 9 aa, Homo Sapiens
AVIRDLNSL

SEQ ID NO: 12161 - protein, 9 aa, Homo Sapiens
AVIREIQNA

SEQ ID NO: 12162 - protein, 9 aa, Homo Sapiens
AVISHIDQT

SEQ ID NO: 12163 - protein, 9 aa, Homo Sapiens
AVISKIEST

SEQ ID NO: 12164 - protein, 9 aa, Homo Sapiens
AVITKVKGV

SEQ ID NO: 12165 - protein, 9 aa, Homo Sapiens
AVKEFLEKL

SEQ ID NO: 12166 - protein, 9 aa, Homo Sapiens
AVKKMLVEA

SEQ ID NO: 12167 - protein, 9 aa, Homo Sapiens
AVKPSVTCV

SEQ ID NO: 12168 - protein, 9 aa, Homo Sapiens
AVNAAVQRV

SEQ ID NO: 12169 - protein, 9 aa, Homo Sapiens
AVNEKINRV

SEQ ID NO: 12170 - protein, 9 aa, Homo Sapiens
AVPAFCQHV

SEQ ID NO: 12171 - protein, 9 aa, Homo Sapiens
AVPEHAARL

SEQ ID NO: 12172 - protein, 9 aa, Homo Sapiens
AVPEIMDRI

SEQ ID NO: 12173 - protein, 9 aa, Homo Sapiens
AVPEKIGQV

SEQ ID NO: 12174 - protein, 9 aa, Homo Sapiens
AVPVIISRA

SEQ ID NO: 12175 - protein, 9 aa, Homo Sapiens
AVSAQVEEL

SEQ ID NO: 12176 - protein, 9 aa, Homo Sapiens
AVSDLCEAL

SEQ ID NO: 12177 - protein, 9 aa, Homo Sapiens
AVSPTVSQL

SEQ ID NO: 12178 - protein, 9 aa, Homo Sapiens
AVSRVLNKL

SEQ ID NO: 12179 - protein, 9 aa, Homo Sapiens
AVTPLNESL

SEQ ID NO: 12180 - protein, 9 aa, Homo Sapiens
AVVAGIAKA

SEQ ID NO: 12181 - protein, 9 aa, Homo Sapiens
AVVETVTTA

SEQ ID NO: 12182 - protein, 9 aa, Homo Sapiens
AVVKTMQAL

SEQ ID NO: 12183 - protein, 9 aa, Homo Sapiens
AVVNSLYKL

SEQ ID NO: 12184 - protein, 9 aa, Homo Sapiens
AVVPKILTV

SEQ ID NO: 12185 - protein, 9 aa, Homo Sapiens
AVVTQVNKV

SEQ ID NO: 12186 - protein, 9 aa, Homo Sapiens
CLYGNVEKV

SEQ ID NO: 12187 - protein, 9 aa, Homo Sapiens
CQFRALYTL

SEQ ID NO: 12188 - protein, 9 aa, Homo Sapiens
CQNAQTFNL

SEQ ID NO: 12189 - protein, 9 aa, Homo Sapiens
CQSGSFDKL

SEQ ID NO: 12190 - protein, 9 aa, Homo Sapiens
CTAGTLHNL

SEQ ID NO: 12191 - protein, 9 aa, Homo Sapiens
CVGPEVEKA

SEQ ID NO: 12192 - protein, 9 aa, Homo Sapiens
DLIGVVEAL

SEQ ID NO: 12193 - protein, 9 aa, Homo Sapiens
DVIEVIEKA

SEQ ID NO: 12194 - protein, 9 aa, Homo Sapiens
EIPEWVHQL

SEQ ID NO: 12195 - protein, 9 aa, Homo Sapiens
EITTLNHKL

SEQ ID NO: 12196 - protein, 9 aa, Homo Sapiens
ELIERIPEL

SEQ ID NO: 12197 - protein, 9 aa, Homo Sapiens
EQAAWYHTL

SEQ ID NO: 12198 - protein, 9 aa, Homo Sapiens
EQADFYRTV

SEQ ID NO: 12199 - protein, 9 aa, Homo Sapiens
EQADIFERV

SEQ ID NO: 12200 - protein, 9 aa, Homo Sapiens
EQAHLWAEL

SEQ ID NO: 12201 - protein, 9 aa, Homo Sapiens
EQIEAIHKA

SEQ ID NO: 12202 - protein, 9 aa, Homo Sapiens
EQSDLVHRI

SEQ ID NO: 12203 - protein, 9 aa, Homo Sapiens
ETADITHAL

SEQ ID NO: 12204 - protein, 9 aa, Homo Sapiens
ETPKNELYN

SEQ ID NO: 12205 - protein, 9 aa, Homo Sapiens
EVDDEALEK

SEQ ID NO: 12206 - protein, 9 aa, Homo Sapiens
EVIGKITAL

SEQ ID NO: 12207 - protein, 9 aa, Homo Sapiens
EVIKELAQI

SEQ ID NO: 12208 - protein, 9 aa, Homo Sapiens
EVISKLYAV

SEQ ID NO: 12209 - protein, 9 aa, Homo Sapiens
FAADLAEEL

SEQ ID NO: 12210 - protein, 9 aa, Homo Sapiens
FACEKNENL

SEQ ID NO: 12211 - protein, 9 aa, Homo Sapiens
FACPKTDSL

SEQ ID NO: 12212 - protein, 9 aa, Homo Sapiens
FAIPLIEKL

SEQ ID NO: 12213 - protein, 9 aa, Homo Sapiens
FAIPLIERL

SEQ ID NO: 12214 - protein, 9 aa, Homo Sapiens
FAITAIKGV

SEQ ID NO: 12215 - protein, 9 aa, Homo Sapiens
FAKMVVDAV

SEQ ID NO: 12216 - protein, 9 aa, Homo Sapiens
FASGLIHRV

SEQ ID NO: 12217 - protein, 9 aa, Homo Sapiens
FASHVSPEV

SEQ ID NO: 12218 - protein, 9 aa, Homo Sapiens
FASTILHLV

SEQ ID NO: 12219 - protein, 9 aa, Homo Sapiens
FGFEITHEV

SEQ ID NO: 12220 - protein, 9 aa, Homo Sapiens
FGVPLIVHV

SEQ ID NO: 12221 - protein, 9 aa, Homo Sapiens
FIADAHEKI

SEQ ID NO: 12222 - protein, 9 aa, Homo Sapiens
FIADHCPTL

SEQ ID NO: 12223 - protein, 9 aa, Homo Sapiens
FIADQLDHL

SEQ ID NO: 12224 - protein, 9 aa, Homo Sapiens
FIAHFQDNL

SEQ ID NO: 12225 - protein, 9 aa, Homo Sapiens
FIAKLLNKL

SEQ ID NO: 12226 - protein, 9 aa, Homo Sapiens
FIAPQCEMI

SEQ ID NO: 12227 - protein, 9 aa, Homo Sapiens
FIAPSGHGL

SEQ ID NO: 12228 - protein, 9 aa, Homo Sapiens
FIAPTGHSL

SEQ ID NO: 12229 - protein, 9 aa, Homo Sapiens
FIFDEAEKL

SEQ ID NO: 12230 - protein, 9 aa, Homo Sapiens
FIFSDTHEL

SEQ ID NO: 12231 - protein, 9 aa, Homo Sapiens
FIIGRVIKA

SEQ ID NO: 12232 - protein, 9 aa, Homo Sapiens
FIINGIEKV

SEQ ID NO: 12233 - protein, 9 aa, Homo Sapiens
FIINGSEKV

SEQ ID NO: 12234 - protein, 9 aa, Homo Sapiens
FIIQGLRSV

SEQ ID NO: 12235 - protein, 9 aa, Homo Sapiens
FIISRTQAL

SEQ ID NO: 12236 - protein, 9 aa, Homo Sapiens
FILEKIEYL

SEQ ID NO: 12237 - protein, 9 aa, Homo Sapiens
FINQDNNTL

SEQ ID NO: 12238 - protein, 9 aa, Homo Sapiens
FIPATGHSL

SEQ ID NO: 12239 - protein, 9 aa, Homo Sapiens
FIPFLQQEV

SEQ ID NO: 12240 - protein, 9 aa, Homo Sapiens
FIPKFITHL

SEQ ID NO: 12241 - protein, 9 aa, Homo Sapiens
FIPYLVVKV

SEQ ID NO: 12242 - protein, 9 aa, Homo Sapiens
FISEFEHRV

SEQ ID NO: 12243 - protein, 9 aa, Homo Sapiens
FISGHTSEL

SEQ ID NO: 12244 - protein, 9 aa, Homo Sapiens
FISPFGHGL

SEQ ID NO: 12245 - protein, 9 aa, Homo Sapiens
FISPTGHSL

SEQ ID NO: 12246 - protein, 9 aa, Homo Sapiens
FITEDKTEL

SEQ ID NO: 12247 - protein, 9 aa, Homo Sapiens
FIVEEIQRI

SEQ ID NO: 12248 - protein, 9 aa, Homo Sapiens
FLADIVQKL

SEQ ID NO: 12249 - protein, 9 aa, Homo Sapiens
FLADNHHQV

SEQ ID NO: 12250 - protein, 9 aa, Homo Sapiens
FLADPSAFV

SEQ ID NO: 12251 - protein, 9 aa, Homo Sapiens
FLAKLIAQA

SEQ ID NO: 12252 - protein, 9 aa, Homo Sapiens
FLAPELPAV

SEQ ID NO: 12253 - protein, 9 aa, Homo Sapiens
FLCPFHLSV

SEQ ID NO: 12254 - protein, 9 aa, Homo Sapiens
FLCVVSKEL

SEQ ID NO: 12255 - protein, 9 aa, Homo Sapiens
FLFEDFSKA

SEQ ID NO: 12256 - protein, 9 aa, Homo Sapiens
FLFGEVHKA

SEQ ID NO: 12257 - protein, 9 aa, Homo Sapiens
FLFSDVCRV

SEQ ID NO: 12258 - protein, 9 aa, Homo Sapiens
FLIPIVNIS

SEQ ID NO: 12259 - protein, 9 aa, Homo Sapiens
FLIPIYHQV

SEQ ID NO: 12260 - protein, 9 aa, Homo Sapiens
FLIQEIKTL

SEQ ID NO: 12261 - protein, 9 aa, Homo Sapiens
FLIRESETL

SEQ ID NO: 12262 - protein, 9 aa, Homo Sapiens
FLITILDHL

SEQ ID NO: 12263 - protein, 9 aa, Homo Sapiens
FLKEGCELI

SEQ ID NO: 12264 - protein, 9 aa, Homo Sapiens
FLKNELDNV

SEQ ID NO: 12265 - protein, 9 aa, Homo Sapiens
FLKNEVERL

SEQ ID NO: 12266 - protein, 9 aa, Homo Sapiens
FLMDFIHQV

SEQ ID NO: 12267 - protein, 9 aa, Homo Sapiens
FLMGPVKQL

SEQ ID NO: 12268 - protein, 9 aa, Homo Sapiens
FLNAKCESA

SEQ ID NO: 12269 - protein, 9 aa, Homo Sapiens
FLPDGCDHL

SEQ ID NO: 12270 - protein, 9 aa, Homo Sapiens
FLPEEQDRL

SEQ ID NO: 12271 - protein, 9 aa, Homo Sapiens
FLPEVIYKM

SEQ ID NO: 12272 - protein, 9 aa, Homo Sapiens
FLPGICKEL

SEQ ID NO: 12273 - protein, 9 aa, Homo Sapiens
FLPKKLDEA

SEQ ID NO: 12274 - protein, 9 aa, Homo Sapiens
FLPLHYDYL

SEQ ID NO: 12275 - protein, 9 aa, Homo Sapiens
FLPLIVNTV

SEQ ID NO: 12276 - protein, 9 aa, Homo Sapiens
FLPQKIIYL

SEQ ID NO: 12277 - protein, 9 aa, Homo Sapiens
FLPSANEHL

SEQ ID NO: 12278 - protein, 9 aa, Homo Sapiens
FLPSHYNYL

SEQ ID NO: 12279 - protein, 9 aa, Homo Sapiens
FLPSYIIDV

SEQ ID NO: 12280 - protein, 9 aa, Homo Sapiens
FLPTILNQL

SEQ ID NO: 12281 - protein, 9 aa, Homo Sapiens
FLPTLLHQA

SEQ ID NO: 12282 - protein, 9 aa, Homo Sapiens
FLSDLRDML

SEQ ID NO: 12283 - protein, 9 aa, Homo Sapiens
FLSELTQQL

SEQ ID NO: 12284 - protein, 9 aa, Homo Sapiens
FLSEVFHQA

SEQ ID NO: 12285 - protein, 9 aa, Homo Sapiens
FLSILCNNL

SEQ ID NO: 12286 - protein, 9 aa, Homo Sapiens
FLSPKVDPS

SEQ ID NO: 12287 - protein, 9 aa, Homo Sapiens
FLSPVDNHM

SEQ ID NO: 12288 - protein, 9 aa, Homo Sapiens
FLSSVIQNL

SEQ ID NO: 12289 - protein, 9 aa, Homo Sapiens
FLSTLEHHL

SEQ ID NO: 12290 - protein, 9 aa, Homo Sapiens
FLVPTFEQL

SEQ ID NO: 12291 - protein, 9 aa, Homo Sapiens
FLVQNIHTL

SEQ ID NO: 12292 - protein, 9 aa, Homo Sapiens
FLVTVIHTL

SEQ ID NO: 12293 - protein, 9 aa, Homo Sapiens
FLYDDNQRV

SEQ ID NO: 12294 - protein, 9 aa, Homo Sapiens
FLYQYSTRL

SEQ ID NO: 12295 - protein, 9 aa, Homo Sapiens
FMATIAEGL

SEQ ID NO: 12296 - protein, 9 aa, Homo Sapiens
FMIKHSQKL

SEQ ID NO: 12297 - protein, 9 aa, Homo Sapiens
FMKKYIHVA

SEQ ID NO: 12298 - protein, 9 aa, Homo Sapiens
FQAAEGHDL

SEQ ID NO: 12299 - protein, 9 aa, Homo Sapiens
FQAEIAQLM

SEQ ID NO: 12300 - protein, 9 aa, Homo Sapiens
FQAEIPVGI

SEQ ID NO: 12301 - protein, 9 aa, Homo Sapiens
FQANEVRKV

SEQ ID NO: 12302 - protein, 9 aa, Homo Sapiens
FQATIVKAV

SEQ ID NO: 12303 - protein, 9 aa, Homo Sapiens
FQCQTKLEL

SEQ ID NO: 12304 - protein, 9 aa, Homo Sapiens
FQDEINWRL

SEQ ID NO: 12305 - protein, 9 aa, Homo Sapiens
FQEADSPTL

SEQ ID NO: 12306 - protein, 9 aa, Homo Sapiens
FQEAIISKL

SEQ ID NO: 12307 - protein, 9 aa, Homo Sapiens
FQFGVPQAL

SEQ ID NO: 12308 - protein, 9 aa, Homo Sapiens
FQHEDLNFL

SEQ ID NO: 12309 - protein, 9 aa, Homo Sapiens
FQHTGIYSV

SEQ ID NO: 12310 - protein, 9 aa, Homo Sapiens
FQIDRSWKA

SEQ ID NO: 12311 - protein, 9 aa, Homo Sapiens
FQIGKMRYV

SEQ ID NO: 12312 - protein, 9 aa, Homo Sapiens
FQIGPCEGI

SEQ ID NO: 12313 - protein, 9 aa, Homo Sapiens
FQIGPVAGV

SEQ ID NO: 12314 - protein, 9 aa, Homo Sapiens
FQIRNLPSL

SEQ ID NO: 12315 - protein, 9 aa, Homo Sapiens
FQIVNPHLL

SEQ ID NO: 12316 - protein, 9 aa, Homo Sapiens
FQMKKVLCL

SEQ ID NO: 12317 - protein, 9 aa, Homo Sapiens
FQMPTPIQM

SEQ ID NO: 12318 - protein, 9 aa, Homo Sapiens
FQNDFLRLL

SEQ ID NO: 12319 - protein, 9 aa, Homo Sapiens
FQNEVARQL

SEQ ID NO: 12320 - protein, 9 aa, Homo Sapiens
FQNNVQVKV

SEQ ID NO: 12321 - protein, 9 aa, Homo Sapiens
FQNPFRSEL

SEQ ID NO: 12322 - protein, 9 aa, Homo Sapiens
FQNPQTHVI

SEQ ID NO: 12323 - protein, 9 aa, Homo Sapiens
FQNSGNVNL

SEQ ID NO: 12324 - protein, 9 aa, Homo Sapiens
FQPPIHQSL

SEQ ID NO: 12325 - protein, 9 aa, Homo Sapiens
FQREAIENA

SEQ ID NO: 12326 - protein, 9 aa, Homo Sapiens
FQSDTNAML

SEQ ID NO: 12327 - protein, 9 aa, Homo Sapiens
FQSFQDHKL

SEQ ID NO: 12328 - protein, 9 aa, Homo Sapiens
FQSFVKDCL

SEQ ID NO: 12329 - protein, 9 aa, Homo Sapiens
FQSILRQDL

SEQ ID NO: 12330 - protein, 9 aa, Homo Sapiens
FQSKENLSV

SEQ ID NO: 12331 - protein, 9 aa, Homo Sapiens
FQSPLFAKA

SEQ ID NO: 12332 - protein, 9 aa, Homo Sapiens
FQSSAVMAL

SEQ ID NO: 12333 - protein, 9 aa, Homo Sapiens
FQSTTGHCV

SEQ ID NO: 12334 - protein, 9 aa, Homo Sapiens
FQTDLIYNL

SEQ ID NO: 12335 - protein, 9 aa, Homo Sapiens
FQTEVGKQL

SEQ ID NO: 12336 - protein, 9 aa, Homo Sapiens
FQTGTNARL

SEQ ID NO: 12337 - protein, 9 aa, Homo Sapiens
FQTIARNAL

SEQ ID NO: 12338 - protein, 9 aa, Homo Sapiens
FQYAKESYI

SEQ ID NO: 12339 - protein, 9 aa, Homo Sapiens
FQYPDTRYL

SEQ ID NO: 12340 - protein, 9 aa, Homo Sapiens
FSIGKMSTA

SEQ ID NO: 12341 - protein, 9 aa, Homo Sapiens
FSPQMCEHL

SEQ ID NO: 12342 - protein, 9 aa, Homo Sapiens
FTAEFLEKV

SEQ ID NO: 12343 - protein, 9 aa, Homo Sapiens
FTAEKTDEL

SEQ ID NO: 12344 - protein, 9 aa, Homo Sapiens
FTAKQLEKL

SEQ ID NO: 12345 - protein, 9 aa, Homo Sapiens
FTAWCNSHL

SEQ ID NO: 12346 - protein, 9 aa, Homo Sapiens
FTFIFCHEL

SEQ ID NO: 12347 - protein, 9 aa, Homo Sapiens
FTFPNIASA

SEQ ID NO: 12348 - protein, 9 aa, Homo Sapiens
FTFSGICRV

SEQ ID NO: 12349 - protein, 9 aa, Homo Sapiens
FTILDVRPA

SEQ ID NO: 12350 - protein, 9 aa, Homo Sapiens
FTIPHTQEA

SEQ ID NO: 12351 - protein, 9 aa, Homo Sapiens
FTNRDCDSL

SEQ ID NO: 12352 - protein, 9 aa, Homo Sapiens
FTPNNIKQV

SEQ ID NO: 12353 - protein, 9 aa, Homo Sapiens
FTPSLSETV

SEQ ID NO: 12354 - protein, 9 aa, Homo Sapiens
FTSPFCLQV

SEQ ID NO: 12355 - protein, 9 aa, Homo Sapiens
FTVDQIRAI

SEQ ID NO: 12356 - protein, 9 aa, Homo Sapiens
FTVSLNHKL

SEQ ID NO: 12357 - protein, 9 aa, Homo Sapiens
FTYATTEKV

SEQ ID NO: 12358 - protein, 9 aa, Homo Sapiens
FTYHHIQEI

SEQ ID NO: 12359 - protein, 9 aa, Homo Sapiens
FVADFADKL

SEQ ID NO: 12360 - protein, 9 aa, Homo Sapiens
FVADGIFKA

SEQ ID NO: 12361 - protein, 9 aa, Homo Sapiens
FVAEGGPEL

SEQ ID NO: 12362 - protein, 9 aa, Homo Sapiens
FVAETSQRI

SEQ ID NO: 12363 - protein, 9 aa, Homo Sapiens
FVANLDYKV

SEQ ID NO: 12364 - protein, 9 aa, Homo Sapiens
FVAPLQEKV

SEQ ID NO: 12365 - protein, 9 aa, Homo Sapiens
FVAPPTAAV

SEQ ID NO: 12366 - protein, 9 aa, Homo Sapiens
FVAPSDIQL

SEQ ID NO: 12367 - protein, 9 aa, Homo Sapiens
FVDDYTVRV

SEQ ID NO: 12368 - protein, 9 aa, Homo Sapiens
FVEEEEHFL

SEQ ID NO: 12369 - protein, 9 aa, Homo Sapiens
FVEPSRQFV

SEQ ID NO: 12370 - protein, 9 aa, Homo Sapiens
FVFPGELLL

SEQ ID NO: 12371 - protein, 9 aa, Homo Sapiens
FVHAQCLEL

SEQ ID NO: 12372 - protein, 9 aa, Homo Sapiens
FVHPGAATV

SEQ ID NO: 12373 - protein, 9 aa, Homo Sapiens
FVIATSTKI

SEQ ID NO: 12374 - protein, 9 aa, Homo Sapiens
FVIDEAHCV

SEQ ID NO: 12375 - protein, 9 aa, Homo Sapiens
FVIDLQTRL

SEQ ID NO: 12376 - protein, 9 aa, Homo Sapiens
FVIETARQL

SEQ ID NO: 12377 - protein, 9 aa, Homo Sapiens
FVIGHLKGA

SEQ ID NO: 12378 - protein, 9 aa, Homo Sapiens
FVIHDMETL

SEQ ID NO: 12379 - protein, 9 aa, Homo Sapiens
FVIRNIVEA

SEQ ID NO: 12380 - protein, 9 aa, Homo Sapiens
FVKEHFDEL

SEQ ID NO: 12381 - protein, 9 aa, Homo Sapiens
FVKELSEAL

SEQ ID NO: 12382 - protein, 9 aa, Homo Sapiens
FVKQGEEEV

SEQ ID NO: 12383 - protein, 9 aa, Homo Sapiens
FVNDIFERI

SEQ ID NO: 12384 - protein, 9 aa, Homo Sapiens
FVNEIISRI

SEQ ID NO: 12385 - protein, 9 aa, Homo Sapiens
FVNPKFEHL

SEQ ID NO: 12386 - protein, 9 aa, Homo Sapiens
FVNYATEKL

SEQ ID NO: 12387 - protein, 9 aa, Homo Sapiens
FVPDLKELL

SEQ ID NO: 12388 - protein, 9 aa, Homo Sapiens
FVPEIFHRI

SEQ ID NO: 12389 - protein, 9 aa, Homo Sapiens
FVPETKEEL

SEQ ID NO: 12390 - protein, 9 aa, Homo Sapiens
FVPFITEHI

SEQ ID NO: 12391 - protein, 9 aa, Homo Sapiens
FVPIKVEQI

SEQ ID NO: 12392 - protein, 9 aa, Homo Sapiens
FVPLFAENL

SEQ ID NO: 12393 - protein, 9 aa, Homo Sapiens
FVSDKDASL

SEQ ID NO: 12394 - protein, 9 aa, Homo Sapiens
FVSDKDTGL

SEQ ID NO: 12395 - protein, 9 aa, Homo Sapiens
FVSRVTECL

SEQ ID NO: 12396 - protein, 9 aa, Homo Sapiens
FVTEEIIPL

SEQ ID NO: 12397 - protein, 9 aa, Homo Sapiens
FVTPLKEAL

SEQ ID NO: 12398 - protein, 9 aa, Homo Sapiens
FVVDCSDKL

SEQ ID NO: 12399 - protein, 9 aa, Homo Sapiens
FVVDEVSNI

SEQ ID NO: 12400 - protein, 9 aa, Homo Sapiens
FVVDHVIKI

SEQ ID NO: 12401 - protein, 9 aa, Homo Sapiens
FVVDIESRL

SEQ ID NO: 12402 - protein, 9 aa, Homo Sapiens
FVVDLSDQV

SEQ ID NO: 12403 - protein, 9 aa, Homo Sapiens
FVVDRSDKL

SEQ ID NO: 12404 - protein, 9 aa, Homo Sapiens
FVVEKIELL

SEQ ID NO: 12405 - protein, 9 aa, Homo Sapiens
FVVHITDVL

SEQ ID NO: 12406 - protein, 9 aa, Homo Sapiens
FVVHTVQFL

SEQ ID NO: 12407 - protein, 9 aa, Homo Sapiens
GAADIDHKL

SEQ ID NO: 12408 - protein, 9 aa, Homo Sapiens
GGFDGTNRL

SEQ ID NO: 12409 - protein, 9 aa, Homo Sapiens
GGIDIYHLL

SEQ ID NO: 12410 - protein, 9 aa, Homo Sapiens
GIADLAHLL

SEQ ID NO: 12411 - protein, 9 aa, Homo Sapiens
GIAPCNNRL

SEQ ID NO: 12412 - protein, 9 aa, Homo Sapiens
GILDRTISV

SEQ ID NO: 12413 - protein, 9 aa, Homo Sapiens
GIPEHADNL

SEQ ID NO: 12414 - protein, 9 aa, Homo Sapiens
GIYAKVDRL

SEQ ID NO: 12415 - protein, 9 aa, Homo Sapiens
GLADITQQL

SEQ ID NO: 12416 - protein, 9 aa, Homo Sapiens
GLAELGHRL

SEQ ID NO: 12417 - protein, 9 aa, Homo Sapiens
GLAHFVNEI

SEQ ID NO: 12418 - protein, 9 aa, Homo Sapiens
GLATDVQTV

SEQ ID NO: 12419 - protein, 9 aa, Homo Sapiens
GLFQHICTA

SEQ ID NO: 12420 - protein, 9 aa, Homo Sapiens
GLIDKVNEL

SEQ ID NO: 12421 - protein, 9 aa, Homo Sapiens
GLIEILKKV

SEQ ID NO: 12422 - protein, 9 aa, Homo Sapiens
GLKDKIHHV

SEQ ID NO: 12423 - protein, 9 aa, Homo Sapiens
GLSHVDYAL

SEQ ID NO: 12424 - protein, 9 aa, Homo Sapiens
GLVKRLHKV

SEQ ID NO: 12425 - protein, 9 aa, Homo Sapiens
GLVPFLVSV

SEQ ID NO: 12426 - protein, 9 aa, Homo Sapiens
GQADLATKV

SEQ ID NO: 12427 - protein, 9 aa, Homo Sapiens
GQADVISKL

SEQ ID NO: 12428 - protein, 9 aa, Homo Sapiens
GQAEVLNFL

SEQ ID NO: 12429 - protein, 9 aa, Homo Sapiens
GQAFLYHQV

SEQ ID NO: 12430 - protein, 9 aa, Homo Sapiens
GQCEWLSRL

SEQ ID NO: 12431 - protein, 9 aa, Homo Sapiens
GQFDRPAGV

SEQ ID NO: 12432 - protein, 9 aa, Homo Sapiens
GQFSEVYKA

SEQ ID NO: 12433 - protein, 9 aa, Homo Sapiens
GQIDLLERL

SEQ ID NO: 12434 - protein, 9 aa, Homo Sapiens
GQIELRTYV

SEQ ID NO: 12435 - protein, 9 aa, Homo Sapiens
GQIGMIQAL

SEQ ID NO: 12436 - protein, 9 aa, Homo Sapiens
GQIKQIIRI

SEQ ID NO: 12437 - protein, 9 aa, Homo Sapiens
GQIPATALL

SEQ ID NO: 12438 - protein, 9 aa, Homo Sapiens
GQIQKVHPA

SEQ ID NO: 12439 - protein, 9 aa, Homo Sapiens
GQMGSFIRL

SEQ ID NO: 12440 - protein, 9 aa, Homo Sapiens
GQQEITNRL

SEQ ID NO: 12441 - protein, 9 aa, Homo Sapiens
GQSALYDAL

SEQ ID NO: 12442 - protein, 9 aa, Homo Sapiens
GQSELASRL

SEQ ID NO: 12443 - protein, 9 aa, Homo Sapiens
GQSKENNYL

SEQ ID NO: 12444 - protein, 9 aa, Homo Sapiens
GQSKVFFRA

SEQ ID NO: 12445 - protein, 9 aa, Homo Sapiens
GQSTVNHSL

SEQ ID NO: 12446 - protein, 9 aa, Homo Sapiens
GQSYVVNRV

SEQ ID NO: 12447 - protein, 9 aa, Homo Sapiens
GQTPVFSKA

SEQ ID NO: 12448 - protein, 9 aa, Homo Sapiens
GRLASLNLR

SEQ ID NO: 12449 - protein, 9 aa, Homo Sapiens
GTIDEIQKL

SEQ ID NO: 12450 - protein, 9 aa, Homo Sapiens
GTIFIIKGV

SEQ ID NO: 12451 - protein, 9 aa, Homo Sapiens
GTIGLIHAI

SEQ ID NO: 12452 - protein, 9 aa, Homo Sapiens
GTIGLIHAV

SEQ ID NO: 12453 - protein, 9 aa, Homo Sapiens
GTIKKINIL

SEQ ID NO: 12454 - protein, 9 aa, Homo Sapiens
GTKALMDEV

SEQ ID NO: 12455 - protein, 9 aa, Homo Sapiens
GTKNRIITA

SEQ ID NO: 12456 - protein, 9 aa, Homo Sapiens
GTVDKLCRV

SEQ ID NO: 12457 - protein, 9 aa, Homo Sapiens
GTYMGEEKL

SEQ ID NO: 12458 - protein, 9 aa, Homo Sapiens
GVADIIDCV

SEQ ID NO: 12459 - protein, 9 aa, Homo Sapiens
GVAEKTQLL

SEQ ID NO: 12460 - protein, 9 aa, Homo Sapiens
GVAVKAHQV

SEQ ID NO: 12461 - protein, 9 aa, Homo Sapiens
GVCDHIISL

SEQ ID NO: 12462 - protein, 9 aa, Homo Sapiens
GVCRHNYRL

SEQ ID NO: 12463 - protein, 9 aa, Homo Sapiens
GVEVAVLRV

SEQ ID NO: 12464 - protein, 9 aa, Homo Sapiens
GVFTTMEKA

SEQ ID NO: 12465 - protein, 9 aa, Homo Sapiens
GVGPVPARA

SEQ ID NO: 12466 - protein, 9 aa, Homo Sapiens
GVIKRTENV

SEQ ID NO: 12467 - protein, 9 aa, Homo Sapiens
GVINRVEKI

SEQ ID NO: 12468 - protein, 9 aa, Homo Sapiens
GVIPHIHKS

SEQ ID NO: 12469 - protein, 9 aa, Homo Sapiens
GVIPKIQCL

SEQ ID NO: 12470 - protein, 9 aa, Homo Sapiens
GVIPTLVKL

SEQ ID NO: 12471 - protein, 9 aa, Homo Sapiens
GVIRSLHSL

SEQ ID NO: 12472 - protein, 9 aa, Homo Sapiens
GVISKVSTL

SEQ ID NO: 12473 - protein, 9 aa, Homo Sapiens
GVISRVEKI

SEQ ID NO: 12474 - protein, 9 aa, Homo Sapiens
GVKKDIEKL

SEQ ID NO: 12475 - protein, 9 aa, Homo Sapiens
GVKQLIVGV

SEQ ID NO: 12476 - protein, 9 aa, Homo Sapiens
GVMPEIAQA

SEQ ID NO: 12477 - protein, 9 aa, Homo Sapiens
GVNPHVNHL

SEQ ID NO: 12478 - protein, 9 aa, Homo Sapiens
GVPVTITSV

SEQ ID NO: 12479 - protein, 9 aa, Homo Sapiens
GVSDVDYSL

SEQ ID NO: 12480 - protein, 9 aa, Homo Sapiens
GVSPVIDEL

SEQ ID NO: 12481 - protein, 9 aa, Homo Sapiens
GVTHVIPVA

SEQ ID NO: 12482 - protein, 9 aa, Homo Sapiens
GVTNFIHML

SEQ ID NO: 12483 - protein, 9 aa, Homo Sapiens
GVVDGIYRL

SEQ ID NO: 12484 - protein, 9 aa, Homo Sapiens
GVVEKLSVL

SEQ ID NO: 12485 - protein, 9 aa, Homo Sapiens
GVVESCEQV

SEQ ID NO: 12486 - protein, 9 aa, Homo Sapiens
GVVEYIDTL

SEQ ID NO: 12487 - protein, 9 aa, Homo Sapiens
GVVGLVNCL

SEQ ID NO: 12488 - protein, 9 aa, Homo Sapiens
GVVKGLQEV

SEQ ID NO: 12489 - protein, 9 aa, Homo Sapiens
GVVPQLVKL

SEQ ID NO: 12490 - protein, 9 aa, Homo Sapiens
GVVPTIQKV

SEQ ID NO: 12491 - protein, 9 aa, Homo Sapiens
GVYGALTKA

SEQ ID NO: 12492 - protein, 9 aa, Homo Sapiens
GVYGDVHRV

SEQ ID NO: 12493 - protein, 9 aa, Homo Sapiens
GVYGDVQRV

SEQ ID NO: 12494 - protein, 9 aa, Homo Sapiens
HAVGDIPGV

SEQ ID NO: 12495 - protein, 9 aa, Homo Sapiens
HAYDGKDYI

SEQ ID NO: 12496 - protein, 9 aa, Homo Sapiens
HIADIVHTL

SEQ ID NO: 12497 - protein, 9 aa, Homo Sapiens
HIADVSHFI

SEQ ID NO: 12498 - protein, 9 aa, Homo Sapiens
HIAEVSQEV

SEQ ID NO: 12499 - protein, 9 aa, Homo Sapiens
HIAHIIELL

SEQ ID NO: 12500 - protein, 9 aa, Homo Sapiens
HIANLCDSL

SEQ ID NO: 12501 - protein, 9 aa, Homo Sapiens
HIFGHIAKA

SEQ ID NO: 12502 - protein, 9 aa, Homo Sapiens
HIIENIVAV

SEQ ID NO: 12503 - protein, 9 aa, Homo Sapiens
HIMPTVHTV

SEQ ID NO: 12504 - protein, 9 aa, Homo Sapiens
HIPDVITYL

SEQ ID NO: 12505 - protein, 9 aa, Homo Sapiens
HIPEEAQKV

SEQ ID NO: 12506 - protein, 9 aa, Homo Sapiens
HIPNIFQKI

SEQ ID NO: 12507 - protein, 9 aa, Homo Sapiens
HIPVFSPAL

SEQ ID NO: 12508 - protein, 9 aa, Homo Sapiens
HISSQNSEL

SEQ ID NO: 12509 - protein, 9 aa, Homo Sapiens
HLANIVERL

SEQ ID NO: 12510 - protein, 9 aa, Homo Sapiens
HLANIVERV

SEQ ID NO: 12511 - protein, 9 aa, Homo Sapiens
HLFETISQA

SEQ ID NO: 12512 - protein, 9 aa, Homo Sapiens
HLIEPLANA

SEQ ID NO: 12513 - protein, 9 aa, Homo Sapiens
HLKNTMETI

SEQ ID NO: 12514 - protein, 9 aa, Homo Sapiens
HLKVHIERV

SEQ ID NO: 12515 - protein, 9 aa, Homo Sapiens
HLPDVCVNL

SEQ ID NO: 12516 - protein, 9 aa, Homo Sapiens
HLPSDFTPA

SEQ ID NO: 12517 - protein, 9 aa, Homo Sapiens
HLSIINEYL

SEQ ID NO: 12518 - protein, 9 aa, Homo Sapiens
HLVPFIHSA

SEQ ID NO: 12519 - protein, 9 aa, Homo Sapiens
HLWTGEEQL

SEQ ID NO: 12520 - protein, 9 aa, Homo Sapiens
HMIRDIQTL

SEQ ID NO: 12521 - protein, 9 aa, Homo Sapiens
HMSEICTEL

SEQ ID NO: 12522 - protein, 9 aa, Homo Sapiens
HQADIGEYV

SEQ ID NO: 12523 - protein, 9 aa, Homo Sapiens
HQAGISDTL

SEQ ID NO: 12524 - protein, 9 aa, Homo Sapiens
HQAQIDHYL

SEQ ID NO: 12525 - protein, 9 aa, Homo Sapiens
HQAVIAEQL

SEQ ID NO: 12526 - protein, 9 aa, Homo Sapiens
HQEGFSIPL

SEQ ID NO: 12527 - protein, 9 aa, Homo Sapiens
HQFESSFEL

SEQ ID NO: 12528 - protein, 9 aa, Homo Sapiens
HQSGIVQLL

SEQ ID NO: 12529 - protein, 9 aa, Homo Sapiens
HQSNVFHHI

SEQ ID NO: 12530 - protein, 9 aa, Homo Sapiens
HQSQAVHGL

SEQ ID NO: 12531 - protein, 9 aa, Homo Sapiens
HQVMVFVHA

SEQ ID NO: 12532 - protein, 9 aa, Homo Sapiens
HTIDTILTV

SEQ ID NO: 12533 - protein, 9 aa, Homo Sapiens
HTIEEIEGL

SEQ ID NO: 12534 - protein, 9 aa, Homo Sapiens
HTILIVEKV

SEQ ID NO: 12535 - protein, 9 aa, Homo Sapiens
HTIPVIQRA

SEQ ID NO: 12536 - protein, 9 aa, Homo Sapiens
HTKEILDTA

SEQ ID NO: 12537 - protein, 9 aa, Homo Sapiens
HTVGELIEV

SEQ ID NO: 12538 - protein, 9 aa, Homo Sapiens
HVANIVEKL

SEQ ID NO: 12539 - protein, 9 aa, Homo Sapiens
HVAPQQNAL

SEQ ID NO: 12540 - protein, 9 aa, Homo Sapiens
HVFDLIQEL

SEQ ID NO: 12541 - protein, 9 aa, Homo Sapiens
HVGIHPSKV

SEQ ID NO: 12542 - protein, 9 aa, Homo Sapiens
HVIEALRRA

SEQ ID NO: 12543 - protein, 9 aa, Homo Sapiens
HVIEKMHHV

SEQ ID NO: 12544 - protein, 9 aa, Homo Sapiens
HVIENLHAA

SEQ ID NO: 12545 - protein, 9 aa, Homo Sapiens
HVIGQIIGA

SEQ ID NO: 12546 - protein, 9 aa, Homo Sapiens
HVIGQLDKL

SEQ ID NO: 12547 - protein, 9 aa, Homo Sapiens
HVIKYLETL

SEQ ID NO: 12548 - protein, 9 aa, Homo Sapiens
HVINHILKA

SEQ ID NO: 12549 - protein, 9 aa, Homo Sapiens
HVIQALESL

SEQ ID NO: 12550 - protein, 9 aa, Homo Sapiens
HVKEECDRL

SEQ ID NO: 12551 - protein, 9 aa, Homo Sapiens
HVKEGMDVV

SEQ ID NO: 12552 - protein, 9 aa, Homo Sapiens
HVKEQLETL

SEQ ID NO: 12553 - protein, 9 aa, Homo Sapiens
HVLDVIHEV

SEQ ID NO: 12554 - protein, 9 aa, Homo Sapiens
HVMEHICKL

SEQ ID NO: 12555 - protein, 9 aa, Homo Sapiens
HVSHLTEKL

SEQ ID NO: 12556 - protein, 9 aa, Homo Sapiens
HVSTYAAFV

SEQ ID NO: 12557 - protein, 9 aa, Homo Sapiens
HVYCKTDRL

SEQ ID NO: 12558 - protein, 9 aa, Homo Sapiens
HVYSGKDLI

SEQ ID NO: 12559 - protein, 9 aa, Homo Sapiens
IAAGIFNDL

SEQ ID NO: 12560 - protein, 9 aa, Homo Sapiens
IAIDNLEKA

SEQ ID NO: 12561 - protein, 9 aa, Homo Sapiens
IASAIVNEL

SEQ ID NO: 12562 - protein, 9 aa, Homo Sapiens
IASPVIAAV

SEQ ID NO: 12563 - protein, 9 aa, Homo Sapiens
IGAEVYHNL

SEQ ID NO: 12564 - protein, 9 aa, Homo Sapiens
IIADCGEYV

SEQ ID NO: 12565 - protein, 9 aa, Homo Sapiens
IIAQIVQKL

SEQ ID NO: 12566 - protein, 9 aa, Homo Sapiens
IIATVDTRL

SEQ ID NO: 12567 - protein, 9 aa, Homo Sapiens
IIIDSVPEV

SEQ ID NO: 12568 - protein, 9 aa, Homo Sapiens
IIIPEIQKV

SEQ ID NO: 12569 - protein, 9 aa, Homo Sapiens
IIKGKVEEV

SEQ ID NO: 12570 - protein, 9 aa, Homo Sapiens
IILDEIHLL

SEQ ID NO: 12571 - protein, 9 aa, Homo Sapiens
IINELCHRL

SEQ ID NO: 12572 - protein, 9 aa, Homo Sapiens
IIPAEIPLA

SEQ ID NO: 12573 - protein, 9 aa, Homo Sapiens
IIPDKVWAV

SEQ ID NO: 12574 - protein, 9 aa, Homo Sapiens
IIPTLCHLL

SEQ ID NO: 12575 - protein, 9 aa, Homo Sapiens
IISPNCEKI

SEQ ID NO: 12576 - protein, 9 aa, Homo Sapiens
IISQVDAKV

SEQ ID NO: 12577 - protein, 9 aa, Homo Sapiens
IIVDIFHGL

SEQ ID NO: 12578 - protein, 9 aa, Homo Sapiens
ILAAIVNHL

SEQ ID NO: 12579 - protein, 9 aa, Homo Sapiens
ILADLEDYL

SEQ ID NO: 12580 - protein, 9 aa, Homo Sapiens
ILAPTVQEL

SEQ ID NO: 12581 - protein, 9 aa, Homo Sapiens
ILCELINKL

SEQ ID NO: 12582 - protein, 9 aa, Homo Sapiens
ILGPKPQGV

SEQ ID NO: 12583 - protein, 9 aa, Homo Sapiens
ILIDEVDKI

SEQ ID NO: 12584 - protein, 9 aa, Homo Sapiens
ILIDPFHKA

SEQ ID NO: 12585 - protein, 9 aa, Homo Sapiens
ILIGRIKNV

SEQ ID NO: 12586 - protein, 9 aa, Homo Sapiens
ILIKGLAKL

SEQ ID NO: 12587 - protein, 9 aa, Homo Sapiens
ILINKADLL

SEQ ID NO: 12588 - protein, 9 aa, Homo Sapiens
ILKEHITQL

SEQ ID NO: 12589 - protein, 9 aa, Homo Sapiens
ILKFGAEEL

SEQ ID NO: 12590 - protein, 9 aa, Homo Sapiens
ILKKIIPTL

SEQ ID NO: 12591 - protein, 9 aa, Homo Sapiens
ILKKVLEAL

SEQ ID NO: 12592 - protein, 9 aa, Homo Sapiens
ILMEHIHKL

SEQ ID NO: 12593 - protein, 9 aa, Homo Sapiens
ILNEIVNFV

SEQ ID NO: 12594 - protein, 9 aa, Homo Sapiens
ILPEELQTL

SEQ ID NO: 12595 - protein, 9 aa, Homo Sapiens
ILPEKVARV

SEQ ID NO: 12596 - protein, 9 aa, Homo Sapiens
ILRAILEVL

SEQ ID NO: 12597 - protein, 9 aa, Homo Sapiens
ILSELVEKI

SEQ ID NO: 12598 - protein, 9 aa, Homo Sapiens
ILSHLSSEL

SEQ ID NO: 12599 - protein, 9 aa, Homo Sapiens
ILTDITKGV

SEQ ID NO: 12600 - protein, 9 aa, Homo Sapiens
ILYDKLEKI

SEQ ID NO: 12601 - protein, 9 aa, Homo Sapiens
ILYGEVEKL

SEQ ID NO: 12602 - protein, 9 aa, Homo Sapiens
ILYSKTEHL

SEQ ID NO: 12603 - protein, 9 aa, Homo Sapiens
IMPKDIQLA

SEQ ID NO: 12604 - protein, 9 aa, Homo Sapiens
INPETLETI

SEQ ID NO: 12605 - protein, 9 aa, Homo Sapiens
IPPLTQTPV

SEQ ID NO: 12606 - protein, 9 aa, Homo Sapiens
IQAEEIMKL

SEQ ID NO: 12607 - protein, 9 aa, Homo Sapiens
IQAEHSYSL

SEQ ID NO: 12608 - protein, 9 aa, Homo Sapiens
IQAGLLSAL

SEQ ID NO: 12609 - protein, 9 aa, Homo Sapiens
IQAHSSDQL

SEQ ID NO: 12610 - protein, 9 aa, Homo Sapiens
IQALPGPFL

SEQ ID NO: 12611 - protein, 9 aa, Homo Sapiens
IQATWYEKL

SEQ ID NO: 12612 - protein, 9 aa, Homo Sapiens
IQEEILVHI

SEQ ID NO: 12613 - protein, 9 aa, Homo Sapiens
IQHDLIFSL

SEQ ID NO: 12614 - protein, 9 aa, Homo Sapiens
IQIGLIDLL

SEQ ID NO: 12615 - protein, 9 aa, Homo Sapiens
IQIMKVEEI

SEQ ID NO: 12616 - protein, 9 aa, Homo Sapiens
IQKEDVPSE

SEQ ID NO: 12617 - protein, 9 aa, Homo Sapiens
IQNEAVNLL

SEQ ID NO: 12618 - protein, 9 aa, Homo Sapiens
IQRTPKIQV

SEQ ID NO: 12619 - protein, 9 aa, Homo Sapiens
IQSPHVAVL

SEQ ID NO: 12620 - protein, 9 aa, Homo Sapiens
IQSRIVYYL

SEQ ID NO: 12621 - protein, 9 aa, Homo Sapiens
IQTELQETV

SEQ ID NO: 12622 - protein, 9 aa, Homo Sapiens
IQTRIKIGL

SEQ ID NO: 12623 - protein, 9 aa, Homo Sapiens
IQVDLADKL

SEQ ID NO: 12624 - protein, 9 aa, Homo Sapiens
IQVQVFEKL

SEQ ID NO: 12625 - protein, 9 aa, Homo Sapiens
IQVTKVTQV

SEQ ID NO: 12626 - protein, 9 aa, Homo Sapiens
IQYDKTNVL

SEQ ID NO: 12627 - protein, 9 aa, Homo Sapiens
IQYELTDRL

SEQ ID NO: 12628 - protein, 9 aa, Homo Sapiens
ITAIEAQHL

SEQ ID NO: 12629 - protein, 9 aa, Homo Sapiens
ITAPIEAQV

SEQ ID NO: 12630 - protein, 9 aa, Homo Sapiens
ITAQQINKL

SEQ ID NO: 12631 - protein, 9 aa, Homo Sapiens
ITFESIEKA

SEQ ID NO: 12632 - protein, 9 aa, Homo Sapiens
ITFPGLHEL

SEQ ID NO: 12633 - protein, 9 aa, Homo Sapiens
ITGPAHWEV

SEQ ID NO: 12634 - protein, 9 aa, Homo Sapiens
ITKDGIEAL

SEQ ID NO: 12635 - protein, 9 aa, Homo Sapiens
ITKDLLDLL

SEQ ID NO: 12636 - protein, 9 aa, Homo Sapiens
ITKEHIQAL

SEQ ID NO: 12637 - protein, 9 aa, Homo Sapiens
ITNTDVDCL

SEQ ID NO: 12638 - protein, 9 aa, Homo Sapiens
ITPETAEKL

SEQ ID NO: 12639 - protein, 9 aa, Homo Sapiens
ITPQTIHGV

SEQ ID NO: 12640 - protein, 9 aa, Homo Sapiens
ITREMVEML

SEQ ID NO: 12641 - protein, 9 aa, Homo Sapiens
ITSELVSKI

SEQ ID NO: 12642 - protein, 9 aa, Homo Sapiens
ITVEKIIKI

SEQ ID NO: 12643 - protein, 9 aa, Homo Sapiens
ITVGDIAQV

SEQ ID NO: 12644 - protein, 9 aa, Homo Sapiens
ITVGPVQKL

SEQ ID NO: 12645 - protein, 9 aa, Homo Sapiens
ITVSIIKEL

SEQ ID NO: 12646 - protein, 9 aa, Homo Sapiens
IVADKDYSV

SEQ ID NO: 12647 - protein, 9 aa, Homo Sapiens
IVADLGSPL

SEQ ID NO: 12648 - protein, 9 aa, Homo Sapiens
IVAEAIEKA

SEQ ID NO: 12649 - protein, 9 aa, Homo Sapiens
IVAKHTSAL

SEQ ID NO: 12650 - protein, 9 aa, Homo Sapiens
IVAPGTFEV

SEQ ID NO: 12651 - protein, 9 aa, Homo Sapiens
IVHEALYFL

SEQ ID NO: 12652 - protein, 9 aa, Homo Sapiens
IVIDGLREL

SEQ ID NO: 12653 - protein, 9 aa, Homo Sapiens
IVIGIIKTV

SEQ ID NO: 12654 - protein, 9 aa, Homo Sapiens
IVIGVLHQL

SEQ ID NO: 12655 - protein, 9 aa, Homo Sapiens
IVIRGLNTI

SEQ ID NO: 12656 - protein, 9 aa, Homo Sapiens
IVISKLTQI

SEQ ID NO: 12657 - protein, 9 aa, Homo Sapiens
IVKEVEAKA

SEQ ID NO: 12658 - protein, 9 aa, Homo Sapiens
IVMEHVVFL

SEQ ID NO: 12659 - protein, 9 aa, Homo Sapiens
IVNDKSQNL

SEQ ID NO: 12660 - protein, 9 aa, Homo Sapiens
IVPDKMQKA

SEQ ID NO: 12661 - protein, 9 aa, Homo Sapiens
IVPHICNLL

SEQ ID NO: 12662 - protein, 9 aa, Homo Sapiens
IVVDAIDVL

SEQ ID NO: 12663 - protein, 9 aa, Homo Sapiens
IVVGDIAQV

SEQ ID NO: 12664 - protein, 9 aa, Homo Sapiens
IVVGRITEV

SEQ ID NO: 12665 - protein, 9 aa, Homo Sapiens
IVVPDVETL

SEQ ID NO: 12666 - protein, 9 aa, Homo Sapiens
KAADIASKV

SEQ ID NO: 12667 - protein, 9 aa, Homo Sapiens
KAADIDQEV

SEQ ID NO: 12668 - protein, 9 aa, Homo Sapiens
KAAVMVHQL

SEQ ID NO: 12669 - protein, 9 aa, Homo Sapiens
KAIDLVTKA

SEQ ID NO: 12670 - protein, 9 aa, Homo Sapiens
KAIEQADLL

SEQ ID NO: 12671 - protein, 9 aa, Homo Sapiens
KAIGSLKEV

SEQ ID NO: 12672 - protein, 9 aa, Homo Sapiens
KAIHNICSV

SEQ ID NO: 12673 - protein, 9 aa, Homo Sapiens
KAISGVHTV

SEQ ID NO: 12674 - protein, 9 aa, Homo Sapiens
KAKVKLDFV

SEQ ID NO: 12675 - protein, 9 aa, Homo Sapiens
KAMEKLESV

SEQ ID NO: 12676 - protein, 9 aa, Homo Sapiens
KAPEMTNEL

SEQ ID NO: 12677 - protein, 9 aa, Homo Sapiens
KASAISIKL

SEQ ID NO: 12678 - protein, 9 aa, Homo Sapiens
KAVETVHNL

SEQ ID NO: 12679 - protein, 9 aa, Homo Sapiens
KAVHVIYTV

SEQ ID NO: 12680 - protein, 9 aa, Homo Sapiens
KDFVTLLTA

SEQ ID NO: 12681 - protein, 9 aa, Homo Sapiens
KIAEGVNSL

SEQ ID NO: 12682 - protein, 9 aa, Homo Sapiens
KIAELNTKL

SEQ ID NO: 12683 - protein, 9 aa, Homo Sapiens
KIAGYVTHL

SEQ ID NO: 12684 - protein, 9 aa, Homo Sapiens
KIAKESQFL

SEQ ID NO: 12685 - protein, 9 aa, Homo Sapiens
KIAPLVKSL

SEQ ID NO: 12686 - protein, 9 aa, Homo Sapiens
KIAPNTPQL

SEQ ID NO: 12687 - protein, 9 aa, Homo Sapiens
KICDYLFNV

SEQ ID NO: 12688 - protein, 9 aa, Homo Sapiens
KIFEDIPTL

SEQ ID NO: 12689 - protein, 9 aa, Homo Sapiens
KIGPALKTV

SEQ ID NO: 12690 - protein, 9 aa, Homo Sapiens
KIIDFIYTA

SEQ ID NO: 12691 - protein, 9 aa, Homo Sapiens
KIIDFLSAL

SEQ ID NO: 12692 - protein, 9 aa, Homo Sapiens
KIIERLDHL

SEQ ID NO: 12693 - protein, 9 aa, Homo Sapiens
KIIGIMEEV

SEQ ID NO: 12694 - protein, 9 aa, Homo Sapiens
KIINNTENL

SEQ ID NO: 12695 - protein, 9 aa, Homo Sapiens
KIIPAIATT

SEQ ID NO: 12696 - protein, 9 aa, Homo Sapiens
KIIQDIETI

SEQ ID NO: 12697 - protein, 9 aa, Homo Sapiens
KIISSAQKV

SEQ ID NO: 12698 - protein, 9 aa, Homo Sapiens
KIKATVEEL

SEQ ID NO: 12699 - protein, 9 aa, Homo Sapiens
KIKDNINCL

SEQ ID NO: 12700 - protein, 9 aa, Homo Sapiens
KIKDYLEEL

SEQ ID NO: 12701 - protein, 9 aa, Homo Sapiens
KIKEGAENL

SEQ ID NO: 12702 - protein, 9 aa, Homo Sapiens
KIKEGVENL

SEQ ID NO: 12703 - protein, 9 aa, Homo Sapiens
KIKEVTEEV

SEQ ID NO: 12704 - protein, 9 aa, Homo Sapiens
KIMEAMEKL

SEQ ID NO: 12705 - protein, 9 aa, Homo Sapiens
KIPDISSFL

SEQ ID NO: 12706 - protein, 9 aa, Homo Sapiens
KIPDIYDCI

SEQ ID NO: 12707 - protein, 9 aa, Homo Sapiens
KIPKHLTDA

SEQ ID NO: 12708 - protein, 9 aa, Homo Sapiens
KIPNFCVLL

SEQ ID NO: 12709 - protein, 9 aa, Homo Sapiens
KIPNTVEEA

SEQ ID NO: 12710 - protein, 9 aa, Homo Sapiens
KIPVEADFL

SEQ ID NO: 12711 - protein, 9 aa, Homo Sapiens
KIQEILTQV

SEQ ID NO: 12712 - protein, 9 aa, Homo Sapiens
KISDIQSQL

SEQ ID NO: 12713 - protein, 9 aa, Homo Sapiens
KITDLQNQL

SEQ ID NO: 12714 - protein, 9 aa, Homo Sapiens
KIVDFSYSV

SEQ ID NO: 12715 - protein, 9 aa, Homo Sapiens
KIYEGQVEV

SEQ ID NO: 12716 - protein, 9 aa, Homo Sapiens
KLAAVVNNL

SEQ ID NO: 12717 - protein, 9 aa, Homo Sapiens
KLADICKNL

SEQ ID NO: 12718 - protein, 9 aa, Homo Sapiens
KLADQCTGL

SEQ ID NO: 12719 - protein, 9 aa, Homo Sapiens
KLAECQDQL

SEQ ID NO: 12720 - protein, 9 aa, Homo Sapiens
KLAEFIDFL

SEQ ID NO: 12721 - protein, 9 aa, Homo Sapiens
KLAEIRHEV

SEQ ID NO: 12722 - protein, 9 aa, Homo Sapiens
KLAESVEKA

SEQ ID NO: 12723 - protein, 9 aa, Homo Sapiens
KLCDVTTGL

SEQ ID NO: 12724 - protein, 9 aa, Homo Sapiens
KLCERVTKV

SEQ ID NO: 12725 - protein, 9 aa, Homo Sapiens
KLCPTNQEV

SEQ ID NO: 12726 - protein, 9 aa, Homo Sapiens
KLFDQANKL

SEQ ID NO: 12727 - protein, 9 aa, Homo Sapiens
KLFDTQQFL

SEQ ID NO: 12728 - protein, 9 aa, Homo Sapiens
KLFEFMHET

SEQ ID NO: 12729 - protein, 9 aa, Homo Sapiens
KLFEKVKEV

SEQ ID NO: 12730 - protein, 9 aa, Homo Sapiens
KLFEQILKA

SEQ ID NO: 12731 - protein, 9 aa, Homo Sapiens
KLFGHLTSA

SEQ ID NO: 12732 - protein, 9 aa, Homo Sapiens
KLGPAPKTL

SEQ ID NO: 12733 - protein, 9 aa, Homo Sapiens
KLIDDVHRL

SEQ ID NO: 12734 - protein, 9 aa, Homo Sapiens
KLIDKLDSL

SEQ ID NO: 12735 - protein, 9 aa, Homo Sapiens
KLIDRTESL

SEQ ID NO: 12736 - protein, 9 aa, Homo Sapiens
KLIESAEEL

SEQ ID NO: 12737 - protein, 9 aa, Homo Sapiens
KLIGQVHEV

SEQ ID NO: 12738 - protein, 9 aa, Homo Sapiens
KLIKGVERL

SEQ ID NO: 12739 - protein, 9 aa, Homo Sapiens
KLIKSLEAA

SEQ ID NO: 12740 - protein, 9 aa, Homo Sapiens
KLILLITQV

SEQ ID NO: 12741 - protein, 9 aa, Homo Sapiens
KLIPFLEKL

SEQ ID NO: 12742 - protein, 9 aa, Homo Sapiens
KLISDINKA

SEQ ID NO: 12743 - protein, 9 aa, Homo Sapiens
KLISELQKL

SEQ ID NO: 12744 - protein, 9 aa, Homo Sapiens
KLKEDLAKA

SEQ ID NO: 12745 - protein, 9 aa, Homo Sapiens
KLKERLHQL

SEQ ID NO: 12746 - protein, 9 aa, Homo Sapiens
KLKEYVDCL

SEQ ID NO: 12747 - protein, 9 aa, Homo Sapiens
KLKKEIEEL

SEQ ID NO: 12748 - protein, 9 aa, Homo Sapiens
KLKKELERL

SEQ ID NO: 12749 - protein, 9 aa, Homo Sapiens
KLKKFLNKL

SEQ ID NO: 12750 - protein, 9 aa, Homo Sapiens
KLKNVIHKI

SEQ ID NO: 12751 - protein, 9 aa, Homo Sapiens
KLKSAIEQA

SEQ ID NO: 12752 - protein, 9 aa, Homo Sapiens
KLLDVVHPA

SEQ ID NO: 12753 - protein, 9 aa, Homo Sapiens
KLMDQLEAL

SEQ ID NO: 12754 - protein, 9 aa, Homo Sapiens
KLMELLEEI

SEQ ID NO: 12755 - protein, 9 aa, Homo Sapiens
KLPEISHRL

SEQ ID NO: 12756 - protein, 9 aa, Homo Sapiens
KLPGNISSL

SEQ ID NO: 12757 - protein, 9 aa, Homo Sapiens
KLPQFCAHL

SEQ ID NO: 12758 - protein, 9 aa, Homo Sapiens
KLREDLERL

SEQ ID NO: 12759 - protein, 9 aa, Homo Sapiens
KLSDLDNKL

SEQ ID NO: 12760 - protein, 9 aa, Homo Sapiens
KLSEECNSL

SEQ ID NO: 12761 - protein, 9 aa, Homo Sapiens
KLSEVNKRL

SEQ ID NO: 12762 - protein, 9 aa, Homo Sapiens
KLSPKAEEV

SEQ ID NO: 12763 - protein, 9 aa, Homo Sapiens
KLTEIRHEV

SEQ ID NO: 12764 - protein, 9 aa, Homo Sapiens
KLVEYIVKA

SEQ ID NO: 12765 - protein, 9 aa, Homo Sapiens
KLYDGFQYL

SEQ ID NO: 12766 - protein, 9 aa, Homo Sapiens
KMADIEYRL

SEQ ID NO: 12767 - protein, 9 aa, Homo Sapiens
KMAECYTML

SEQ ID NO: 12768 - protein, 9 aa, Homo Sapiens
KMAEMLVEL

SEQ ID NO: 12769 - protein, 9 aa, Homo Sapiens
KMIEAIKES

SEQ ID NO: 12770 - protein, 9 aa, Homo Sapiens
KMKETLQNV

SEQ ID NO: 12771 - protein, 9 aa, Homo Sapiens
KMMDKVEFV

SEQ ID NO: 12772 - protein, 9 aa, Homo Sapiens
KMPEINAKV

SEQ ID NO: 12773 - protein, 9 aa, Homo Sapiens
KQADPFASL

SEQ ID NO: 12774 - protein, 9 aa, Homo Sapiens
KQAEAVTAL

SEQ ID NO: 12775 - protein, 9 aa, Homo Sapiens
KQAEILQES

SEQ ID NO: 12776 - protein, 9 aa, Homo Sapiens
KQAEIVKRL

SEQ ID NO: 12777 - protein, 9 aa, Homo Sapiens
KQAETIEKL

SEQ ID NO: 12778 - protein, 9 aa, Homo Sapiens
KQAGLVSKI

SEQ ID NO: 12779 - protein, 9 aa, Homo Sapiens
KQAGLVVKL

SEQ ID NO: 12780 - protein, 9 aa, Homo Sapiens
KQAVLYNAL

SEQ ID NO: 12781 - protein, 9 aa, Homo Sapiens
KQCKYYHGL

SEQ ID NO: 12782 - protein, 9 aa, Homo Sapiens
KQCRLANGL

SEQ ID NO: 12783 - protein, 9 aa, Homo Sapiens
KQFEGTVEI

SEQ ID NO: 12784 - protein, 9 aa, Homo Sapiens
KQFEKQVEL

SEQ ID NO: 12785 - protein, 9 aa, Homo Sapiens
KQFQFGHAL

SEQ ID NO: 12786 - protein, 9 aa, Homo Sapiens
KQGAIYHGL

SEQ ID NO: 12787 - protein, 9 aa, Homo Sapiens
KQGPTGIHV

SEQ ID NO: 12788 - protein, 9 aa, Homo Sapiens
KQGPVATGV

SEQ ID NO: 12789 - protein, 9 aa, Homo Sapiens
KQIDRQLTA

SEQ ID NO: 12790 - protein, 9 aa, Homo Sapiens
KQIDSVNHI

SEQ ID NO: 12791 - protein, 9 aa, Homo Sapiens
KQIDVYRSV

SEQ ID NO: 12792 - protein, 9 aa, Homo Sapiens
KQIEICNRL

SEQ ID NO: 12793 - protein, 9 aa, Homo Sapiens
KQIETGPFL

SEQ ID NO: 12794 - protein, 9 aa, Homo Sapiens
KQIKEIKEV

SEQ ID NO: 12795 - protein, 9 aa, Homo Sapiens
KQIPAITCI

SEQ ID NO: 12796 - protein, 9 aa, Homo Sapiens
KQIQNLQKA

SEQ ID NO: 12797 - protein, 9 aa, Homo Sapiens
KQIVEILTA

SEQ ID NO: 12798 - protein, 9 aa, Homo Sapiens
KQKEHLDTL

SEQ ID NO: 12799 - protein, 9 aa, Homo Sapiens
KQMDHFVGL

SEQ ID NO: 12800 - protein, 9 aa, Homo Sapiens
KQMEKIQPA

SEQ ID NO: 12801 - protein, 9 aa, Homo Sapiens
KQMSISTGL

SEQ ID NO: 12802 - protein, 9 aa, Homo Sapiens
KQPAFTIHV

SEQ ID NO: 12803 - protein, 9 aa, Homo Sapiens
KQSDVMRFL

SEQ ID NO: 12804 - protein, 9 aa, Homo Sapiens
KQSEEHNML

SEQ ID NO: 12805 - protein, 9 aa, Homo Sapiens
KQSNVQILV

SEQ ID NO: 12806 - protein, 9 aa, Homo Sapiens
KQSSVAEEV

SEQ ID NO: 12807 - protein, 9 aa, Homo Sapiens
KQSSVMQRL

SEQ ID NO: 12808 - protein, 9 aa, Homo Sapiens
KQTEIAKRL

SEQ ID NO: 12809 - protein, 9 aa, Homo Sapiens
KQTEVLVTA

SEQ ID NO: 12810 - protein, 9 aa, Homo Sapiens
KQVDLIDLV

SEQ ID NO: 12811 - protein, 9 aa, Homo Sapiens
KQVDVNIKL

SEQ ID NO: 12812 - protein, 9 aa, Homo Sapiens
KQVEAGVCV

SEQ ID NO: 12813 - protein, 9 aa, Homo Sapiens
KQVEEIFNL

SEQ ID NO: 12814 - protein, 9 aa, Homo Sapiens
KQVSDLISV

SEQ ID NO: 12815 - protein, 9 aa, Homo Sapiens
KQYGNEVFL

SEQ ID NO: 12816 - protein, 9 aa, Homo Sapiens
KRISELEAL

SEQ ID NO: 12817 - protein, 9 aa, Homo Sapiens
KSVDFIEKA

SEQ ID NO: 12818 - protein, 9 aa, Homo Sapiens
KTADICQML

SEQ ID NO: 12819 - protein, 9 aa, Homo Sapiens
KTADVVQQA

SEQ ID NO: 12820 - protein, 9 aa, Homo Sapiens
KTAEEVAAL

SEQ ID NO: 12821 - protein, 9 aa, Homo Sapiens
KTAEFLSKL

SEQ ID NO: 12822 - protein, 9 aa, Homo Sapiens
KTAEMNEKL

SEQ ID NO: 12823 - protein, 9 aa, Homo Sapiens
KTAITVEHL

SEQ ID NO: 12824 - protein, 9 aa, Homo Sapiens
KTASINQNV

SEQ ID NO: 12825 - protein, 9 aa, Homo Sapiens
KTAVAIEKV

SEQ ID NO: 12826 - protein, 9 aa, Homo Sapiens
KTFEELEHV

SEQ ID NO: 12827 - protein, 9 aa, Homo Sapiens
KTFEGFCAL

SEQ ID NO: 12828 - protein, 9 aa, Homo Sapiens
KTGPVAKEL

SEQ ID NO: 12829 - protein, 9 aa, Homo Sapiens
KTIDAMKRV

SEQ ID NO: 12830 - protein, 9 aa, Homo Sapiens
KTIDYIQFL

SEQ ID NO: 12831 - protein, 9 aa, Homo Sapiens
KTIETSPSL

SEQ ID NO: 12832 - protein, 9 aa, Homo Sapiens
KTIETVKAA

SEQ ID NO: 12833 - protein, 9 aa, Homo Sapiens
KTIGDLSTL

SEQ ID NO: 12834 - protein, 9 aa, Homo Sapiens
KTIRDIIAL

SEQ ID NO: 12835 - protein, 9 aa, Homo Sapiens
KTKDIVNGL

SEQ ID NO: 12836 - protein, 9 aa, Homo Sapiens
KTKDLLNNV

SEQ ID NO: 12837 - protein, 9 aa, Homo Sapiens
KTKESSEYL

SEQ ID NO: 12838 - protein, 9 aa, Homo Sapiens
KTMETAEKL

SEQ ID NO: 12839 - protein, 9 aa, Homo Sapiens
KTTENCENL

SEQ ID NO: 12840 - protein, 9 aa, Homo Sapiens
KTTTIAVEV

SEQ ID NO: 12841 - protein, 9 aa, Homo Sapiens
KTVAQSQQL

SEQ ID NO: 12842 - protein, 9 aa, Homo Sapiens
KTVEYITKL

SEQ ID NO: 12843 - protein, 9 aa, Homo Sapiens
KTVLELQYV

SEQ ID NO: 12844 - protein, 9 aa, Homo Sapiens
KTVNVITTA

SEQ ID NO: 12845 - protein, 9 aa, Homo Sapiens
KTVQVIVQA

SEQ ID NO: 12846 - protein, 9 aa, Homo Sapiens
KVAEIHQAL

SEQ ID NO: 12847 - protein, 9 aa, Homo Sapiens
KVAEKLEAL

SEQ ID NO: 12848 - protein, 9 aa, Homo Sapiens
KVAELFEKL

SEQ ID NO: 12849 - protein, 9 aa, Homo Sapiens
KVAELKQEL

SEQ ID NO: 12850 - protein, 9 aa, Homo Sapiens
KVAETAVQL

SEQ ID NO: 12851 - protein, 9 aa, Homo Sapiens
KVAGMDVEL

SEQ ID NO: 12852 - protein, 9 aa, Homo Sapiens
KVANYCRQV

SEQ ID NO: 12853 - protein, 9 aa, Homo Sapiens
KVASLLHQV

SEQ ID NO: 12854 - protein, 9 aa, Homo Sapiens
KVCDIVSSL

SEQ ID NO: 12855 - protein, 9 aa, Homo Sapiens
KVFELMTSL

SEQ ID NO: 12856 - protein, 9 aa, Homo Sapiens
KVFGALKGA

SEQ ID NO: 12857 - protein, 9 aa, Homo Sapiens
KVFGDLDQV

SEQ ID NO: 12858 - protein, 9 aa, Homo Sapiens
KVFPSISKL

SEQ ID NO: 12859 - protein, 9 aa, Homo Sapiens
KVGPVPVLV

SEQ ID NO: 12860 - protein, 9 aa, Homo Sapiens
KVIAATNRV

SEQ ID NO: 12861 - protein, 9 aa, Homo Sapiens
KVIDEIYRV

SEQ ID NO: 12862 - protein, 9 aa, Homo Sapiens
KVIDGLETL

SEQ ID NO: 12863 - protein, 9 aa, Homo Sapiens
KVIDTQQKV

SEQ ID NO: 12864 - protein, 9 aa, Homo Sapiens
KVIDVDHGI

SEQ ID NO: 12865 - protein, 9 aa, Homo Sapiens
KVIDYVPGI

SEQ ID NO: 12866 - protein, 9 aa, Homo Sapiens
KVIEDVAFA

SEQ ID NO: 12867 - protein, 9 aa, Homo Sapiens
KVIEELLQT

SEQ ID NO: 12868 - protein, 9 aa, Homo Sapiens
KVIEINPYL

SEQ ID NO: 12869 - protein, 9 aa, Homo Sapiens
KVIEKVLIA

SEQ ID NO: 12870 - protein, 9 aa, Homo Sapiens
KVIESTQDL

SEQ ID NO: 12871 - protein, 9 aa, Homo Sapiens
KVIEVFIRA

SEQ ID NO: 12872 - protein, 9 aa, Homo Sapiens
KVIGIIEHL

SEQ ID NO: 12873 - protein, 9 aa, Homo Sapiens
KVIYVLPML

SEQ ID NO: 12874 - protein, 9 aa, Homo Sapiens
KVKAEVQNL

SEQ ID NO: 12875 - protein, 9 aa, Homo Sapiens
KVKDDVDKL

SEQ ID NO: 12876 - protein, 9 aa, Homo Sapiens
KVKDILSKV

SEQ ID NO: 12877 - protein, 9 aa, Homo Sapiens
KVKDWVERL

SEQ ID NO: 12878 - protein, 9 aa, Homo Sapiens
KVKEFCENL

SEQ ID NO: 12879 - protein, 9 aa, Homo Sapiens
KVKEFLSTL

SEQ ID NO: 12880 - protein, 9 aa, Homo Sapiens
KVKEGMNIV

SEQ ID NO: 12881 - protein, 9 aa, Homo Sapiens
KVKEQLEAA

SEQ ID NO: 12882 - protein, 9 aa, Homo Sapiens
KVKSILNSL

SEQ ID NO: 12883 - protein, 9 aa, Homo Sapiens
KVLERVNAV

SEQ ID NO: 12884 - protein, 9 aa, Homo Sapiens
KVLGKIEKV

SEQ ID NO: 12885 - protein, 9 aa, Homo Sapiens
KVMDDLDRA

SEQ ID NO: 12886 - protein, 9 aa, Homo Sapiens
KVMDEVEKA

SEQ ID NO: 12887 - protein, 9 aa, Homo Sapiens
KVMDVTEKL

SEQ ID NO: 12888 - protein, 9 aa, Homo Sapiens
KVMGTFSTV

SEQ ID NO: 12889 - protein, 9 aa, Homo Sapiens
KVPAGVQEL

SEQ ID NO: 12890 - protein, 9 aa, Homo Sapiens
KVPEIEVTV

SEQ ID NO: 12891 - protein, 9 aa, Homo Sapiens
KVPEIISSI

SEQ ID NO: 12892 - protein, 9 aa, Homo Sapiens
KVPELIRTI

SEQ ID NO: 12893 - protein, 9 aa, Homo Sapiens
KVPEWVDTV

SEQ ID NO: 12894 - protein, 9 aa, Homo Sapiens
KVPEYIKKA

SEQ ID NO: 12895 - protein, 9 aa, Homo Sapiens
KVRETIEAL

SEQ ID NO: 12896 - protein, 9 aa, Homo Sapiens
KVSELKEEL

SEQ ID NO: 12897 - protein, 9 aa, Homo Sapiens
KVSELTERL

SEQ ID NO: 12898 - protein, 9 aa, Homo Sapiens
KVSELVQFL

SEQ ID NO: 12899 - protein, 9 aa, Homo Sapiens
KVSESTHVL

SEQ ID NO: 12900 - protein, 9 aa, Homo Sapiens
KVSQLIHHL

SEQ ID NO: 12901 - protein, 9 aa, Homo Sapiens
KVTDDLVCL

SEQ ID NO: 12902 - protein, 9 aa, Homo Sapiens
KVVALVHAV

SEQ ID NO: 12903 - protein, 9 aa, Homo Sapiens
KVVDRIYSL

SEQ ID NO: 12904 - protein, 9 aa, Homo Sapiens
KVVDVDVKL

SEQ ID NO: 12905 - protein, 9 aa, Homo Sapiens
KVVDVVRNL

SEQ ID NO: 12906 - protein, 9 aa, Homo Sapiens
KVVEDIEYL

SEQ ID NO: 12907 - protein, 9 aa, Homo Sapiens
KVVEELTRI

SEQ ID NO: 12908 - protein, 9 aa, Homo Sapiens
KVVTGVANA

SEQ ID NO: 12909 - protein, 9 aa, Homo Sapiens
KVVTIIPKI

SEQ ID NO: 12910 - protein, 9 aa, Homo Sapiens
KVVVYLQKL

SEQ ID NO: 12911 - protein, 9 aa, Homo Sapiens
KVYENDDQL

SEQ ID NO: 12912 - protein, 9 aa, Homo Sapiens
KVYGSGEKV

SEQ ID NO: 12913 - protein, 9 aa, Homo Sapiens
KVYPVQEAL

SEQ ID NO: 12914 - protein, 9 aa, Homo Sapiens
KVYSKMEKL

SEQ ID NO: 12915 - protein, 9 aa, Homo Sapiens
LAAARLAAA

SEQ ID NO: 12916 - protein, 9 aa, Homo Sapiens
LAADCAHEL

SEQ ID NO: 12917 - protein, 9 aa, Homo Sapiens
LASTLVHSV

SEQ ID NO: 12918 - protein, 9 aa, Homo Sapiens
LDTNADKQL

SEQ ID NO: 12919 - protein, 9 aa, Homo Sapiens
LFNKQLESI

SEQ ID NO: 12920 - protein, 9 aa, Homo Sapiens
LGAEVYHTL

SEQ ID NO: 12921 - protein, 9 aa, Homo Sapiens
LIADLKYEL

SEQ ID NO: 12922 - protein, 9 aa, Homo Sapiens
LIAKINQRL

SEQ ID NO: 12923 - protein, 9 aa, Homo Sapiens
LIAKVIQNL

SEQ ID NO: 12924 - protein, 9 aa, Homo Sapiens
LICGFIIKL

SEQ ID NO: 12925 - protein, 9 aa, Homo Sapiens
LIGPKLYEA

SEQ ID NO: 12926 - protein, 9 aa, Homo Sapiens
LIIEKLLKL

SEQ ID NO: 12927 - protein, 9 aa, Homo Sapiens
LIKKIIECV

SEQ ID NO: 12928 - protein, 9 aa, Homo Sapiens
LIMDICDKV

SEQ ID NO: 12929 - protein, 9 aa, Homo Sapiens
LIPDIDLKL

SEQ ID NO: 12930 - protein, 9 aa, Homo Sapiens
LIPEYLNFI

SEQ ID NO: 12931 - protein, 9 aa, Homo Sapiens
LIPGFTPGL

SEQ ID NO: 12932 - protein, 9 aa, Homo Sapiens
LIPKFVSFL

SEQ ID NO: 12933 - protein, 9 aa, Homo Sapiens
LIPMIIHQL

SEQ ID NO: 12934 - protein, 9 aa, Homo Sapiens
LIPRMCHNV

SEQ ID NO: 12935 - protein, 9 aa, Homo Sapiens
LISDLEHRL

SEQ ID NO: 12936 - protein, 9 aa, Homo Sapiens
LISPLVQLL

SEQ ID NO: 12937 - protein, 9 aa, Homo Sapiens
LIVDQVQKL

SEQ ID NO: 12938 - protein, 9 aa, Homo Sapiens
LLAEENQRL

SEQ ID NO: 12939 - protein, 9 aa, Homo Sapiens
LLAEKVEQL

SEQ ID NO: 12940 - protein, 9 aa, Homo Sapiens
LLAEVIENL

SEQ ID NO: 12941 - protein, 9 aa, Homo Sapiens
LLAPIRVLL

SEQ ID NO: 12942 - protein, 9 aa, Homo Sapiens
LLASIVSEL

SEQ ID NO: 12943 - protein, 9 aa, Homo Sapiens
LLCDLINKL

SEQ ID NO: 12944 - protein, 9 aa, Homo Sapiens
LLEDSCHYL

SEQ ID NO: 12945 - protein, 9 aa, Homo Sapiens
LLGPPPVGV

SEQ ID NO: 12946 - protein, 9 aa, Homo Sapiens
LLGPRLVLA

SEQ ID NO: 12947 - protein, 9 aa, Homo Sapiens
LLIAPMPTA

SEQ ID NO: 12948 - protein, 9 aa, Homo Sapiens
LLIDELNKL

SEQ ID NO: 12949 - protein, 9 aa, Homo Sapiens
LLIEKCNTV

SEQ ID NO: 12950 - protein, 9 aa, Homo Sapiens
LLIPGLATA

SEQ ID NO: 12951 - protein, 9 aa, Homo Sapiens
LLKDSIVQL

SEQ ID NO: 12952 - protein, 9 aa, Homo Sapiens
LLKERLDQI

SEQ ID NO: 12953 - protein, 9 aa, Homo Sapiens
LLKEYLVTL

SEQ ID NO: 12954 - protein, 9 aa, Homo Sapiens
LLKQKMDEL

SEQ ID NO: 12955 - protein, 9 aa, Homo Sapiens
LLMDRVDEM

SEQ ID NO: 12956 - protein, 9 aa, Homo Sapiens
LLMEHIQEI

SEQ ID NO: 12957 - protein, 9 aa, Homo Sapiens
LLNSEVHML

SEQ ID NO: 12958 - protein, 9 aa, Homo Sapiens
LLPDIISRL

SEQ ID NO: 12959 - protein, 9 aa, Homo Sapiens
LLPDIVTCV

SEQ ID NO: 12960 - protein, 9 aa, Homo Sapiens
LLPDLIQKV

SEQ ID NO: 12961 - protein, 9 aa, Homo Sapiens
LLPDNVHYV

SEQ ID NO: 12962 - protein, 9 aa, Homo Sapiens
LLPDQIEKL

SEQ ID NO: 12963 - protein, 9 aa, Homo Sapiens
LLPEDSQKL

SEQ ID NO: 12964 - protein, 9 aa, Homo Sapiens
LLPEELTPL

SEQ ID NO: 12965 - protein, 9 aa, Homo Sapiens
LLPEICHFL

SEQ ID NO: 12966 - protein, 9 aa, Homo Sapiens
LLREKVEFL

SEQ ID NO: 12967 - protein, 9 aa, Homo Sapiens
LLRLQVEEL

SEQ ID NO: 12968 - protein, 9 aa, Homo Sapiens
LLSEIEEHL

SEQ ID NO: 12969 - protein, 9 aa, Homo Sapiens
LLSESNERL

SEQ ID NO: 12970 - protein, 9 aa, Homo Sapiens
LLSPHSQVL

SEQ ID NO: 12971 - protein, 9 aa, Homo Sapiens
LLSPSNEKL

SEQ ID NO: 12972 - protein, 9 aa, Homo Sapiens
LLSSIVEEL

SEQ ID NO: 12973 - protein, 9 aa, Homo Sapiens
LLTELSNSL

SEQ ID NO: 12974 - protein, 9 aa, Homo Sapiens
LLVDEIMRA

SEQ ID NO: 12975 - protein, 9 aa, Homo Sapiens
LLVEEIHRL

SEQ ID NO: 12976 - protein, 9 aa, Homo Sapiens
LLVGDVAQA

SEQ ID NO: 12977 - protein, 9 aa, Homo Sapiens
LLVKELQSL

SEQ ID NO: 12978 - protein, 9 aa, Homo Sapiens
LLYDLADQL

SEQ ID NO: 12979 - protein, 9 aa, Homo Sapiens
LMAHAMEEV

SEQ ID NO: 12980 - protein, 9 aa, Homo Sapiens
LMKDLADEL

SEQ ID NO: 12981 - protein, 9 aa, Homo Sapiens
LMKQYIEFV

SEQ ID NO: 12982 - protein, 9 aa, Homo Sapiens
LMPATLARA

SEQ ID NO: 12983 - protein, 9 aa, Homo Sapiens
LMVDHVTEV

SEQ ID NO: 12984 - protein, 9 aa, Homo Sapiens
LQAAIQKSL

SEQ ID NO: 12985 - protein, 9 aa, Homo Sapiens
LQADLQNGL

SEQ ID NO: 12986 - protein, 9 aa, Homo Sapiens
LQADVISKL

SEQ ID NO: 12987 - protein, 9 aa, Homo Sapiens
LQAEEVARL

SEQ ID NO: 12988 - protein, 9 aa, Homo Sapiens
LQAEPHNSL

SEQ ID NO: 12989 - protein, 9 aa, Homo Sapiens
LQAETSQQL

SEQ ID NO: 12990 - protein, 9 aa, Homo Sapiens
LQAHGADEL

SEQ ID NO: 12991 - protein, 9 aa, Homo Sapiens
LQAHYEDFL

SEQ ID NO: 12992 - protein, 9 aa, Homo Sapiens
LQAILVHEA

SEQ ID NO: 12993 - protein, 9 aa, Homo Sapiens
LQAMVAHEL

SEQ ID NO: 12994 - protein, 9 aa, Homo Sapiens
LQCDTTEKL

SEQ ID NO: 12995 - protein, 9 aa, Homo Sapiens
LQFDKAINA

SEQ ID NO: 12996 - protein, 9 aa, Homo Sapiens
LQFPRPVKL

SEQ ID NO: 12997 - protein, 9 aa, Homo Sapiens
LQFTPQHKL

SEQ ID NO: 12998 - protein, 9 aa, Homo Sapiens
LQHDKLVRL

SEQ ID NO: 12999 - protein, 9 aa, Homo Sapiens
LQIDNARLA

SEQ ID NO: 13000 - protein, 9 aa, Homo Sapiens
LQIKHTQAL

SEQ ID NO: 13001 - protein, 9 aa, Homo Sapiens
LQNAQHDPL

SEQ ID NO: 13002 - protein, 9 aa, Homo Sapiens
LQNPDLVSL

SEQ ID NO: 13003 - protein, 9 aa, Homo Sapiens
LQQEIYQTL

SEQ ID NO: 13004 - protein, 9 aa, Homo Sapiens
LQSAVITKV

SEQ ID NO: 13005 - protein, 9 aa, Homo Sapiens
LQSDVTCQV

SEQ ID NO: 13006 - protein, 9 aa, Homo Sapiens
LQSNITQCL

SEQ ID NO: 13007 - protein, 9 aa, Homo Sapiens
LQSVISHLL

SEQ ID NO: 13008 - protein, 9 aa, Homo Sapiens
LQSVVRCEV

SEQ ID NO: 13009 - protein, 9 aa, Homo Sapiens
LQTDLSDGL

SEQ ID NO: 13010 - protein, 9 aa, Homo Sapiens
LQTEIKNQL

SEQ ID NO: 13011 - protein, 9 aa, Homo Sapiens
LQTSIREEI

SEQ ID NO: 13012 - protein, 9 aa, Homo Sapiens
LQVEEVHQL

SEQ ID NO: 13013 - protein, 9 aa, Homo Sapiens
LQYSFPLQL

SEQ ID NO: 13014 - protein, 9 aa, Homo Sapiens
LQYSRQEGL

SEQ ID NO: 13015 - protein, 9 aa, Homo Sapiens
LSADIFQQV

SEQ ID NO: 13016 - protein, 9 aa, Homo Sapiens
LSVEIVHEL

SEQ ID NO: 13017 - protein, 9 aa, Homo Sapiens
LTADAHHYL

SEQ ID NO: 13018 - protein, 9 aa, Homo Sapiens
LTAEDLFEA

SEQ ID NO: 13019 - protein, 9 aa, Homo Sapiens
LTAEILELA

SEQ ID NO: 13020 - protein, 9 aa, Homo Sapiens
LTAPALALA

SEQ ID NO: 13021 - protein, 9 aa, Homo Sapiens
LTAPLSQRL

SEQ ID NO: 13022 - protein, 9 aa, Homo Sapiens
LTATLMHRL

SEQ ID NO: 13023 - protein, 9 aa, Homo Sapiens
LTATSIDRL

SEQ ID NO: 13024 - protein, 9 aa, Homo Sapiens
LTIEKISAL

SEQ ID NO: 13025 - protein, 9 aa, Homo Sapiens
LTKEKIEEL

SEQ ID NO: 13026 - protein, 9 aa, Homo Sapiens
LTKELLHSV

SEQ ID NO: 13027 - protein, 9 aa, Homo Sapiens
LTKKLLDLV

SEQ ID NO: 13028 - protein, 9 aa, Homo Sapiens
LTKVGAEEL

SEQ ID NO: 13029 - protein, 9 aa, Homo Sapiens
LTMEVIRQV

SEQ ID NO: 13030 - protein, 9 aa, Homo Sapiens
LTNDWEDHL

SEQ ID NO: 13031 - protein, 9 aa, Homo Sapiens
LTNEGIQYL

SEQ ID NO: 13032 - protein, 9 aa, Homo Sapiens
LTPEFSQRL

SEQ ID NO: 13033 - protein, 9 aa, Homo Sapiens
LTSELITHI

SEQ ID NO: 13034 - protein, 9 aa, Homo Sapiens
LTSVINQKL

SEQ ID NO: 13035 - protein, 9 aa, Homo Sapiens
LTTYLQEKL

SEQ ID NO: 13036 - protein, 9 aa, Homo Sapiens
LVADLVQEV

SEQ ID NO: 13037 - protein, 9 aa, Homo Sapiens
LVAEHLDHL

SEQ ID NO: 13038 - protein, 9 aa, Homo Sapiens
LVAEIANVV

SEQ ID NO: 13039 - protein, 9 aa, Homo Sapiens
LVAEIITHL

SEQ ID NO: 13040 - protein, 9 aa, Homo Sapiens
LVAEVTQQL

SEQ ID NO: 13041 - protein, 9 aa, Homo Sapiens
LVAQIVTKV

SEQ ID NO: 13042 - protein, 9 aa, Homo Sapiens
LVASFSERV

SEQ ID NO: 13043 - protein, 9 aa, Homo Sapiens
LVASHLEKL

SEQ ID NO: 13044 - protein, 9 aa, Homo Sapiens
LVEPKLAEL

SEQ ID NO: 13045 - protein, 9 aa, Homo Sapiens
LVFNEILQA

SEQ ID NO: 13046 - protein, 9 aa, Homo Sapiens
LVFPGAQRM

SEQ ID NO: 13047 - protein, 9 aa, Homo Sapiens
LVIDAVREI

SEQ ID NO: 13048 - protein, 9 aa, Homo Sapiens
LVKGSIDEV

SEQ ID NO: 13049 - protein, 9 aa, Homo Sapiens
LVKTDMEKL

SEQ ID NO: 13050 - protein, 9 aa, Homo Sapiens
LVMGDIPAA

SEQ ID NO: 13051 - protein, 9 aa, Homo Sapiens
LVPDVVNEV

SEQ ID NO: 13052 - protein, 9 aa, Homo Sapiens
LVPEFVHSI

SEQ ID NO: 13053 - protein, 9 aa, Homo Sapiens
LVPGHLDQV

SEQ ID NO: 13054 - protein, 9 aa, Homo Sapiens
LVPQNNEKL

SEQ ID NO: 13055 - protein, 9 aa, Homo Sapiens
LVSDANQHV

SEQ ID NO: 13056 - protein, 9 aa, Homo Sapiens
LVSPANQEL

SEQ ID NO: 13057 - protein, 9 aa, Homo Sapiens
LVSQLVHSL

SEQ ID NO: 13058 - protein, 9 aa, Homo Sapiens
LVTHLVTKL

SEQ ID NO: 13059 - protein, 9 aa, Homo Sapiens
LVVEHIEKM

SEQ ID NO: 13060 - protein, 9 aa, Homo Sapiens
LYEKDIEEL

SEQ ID NO: 13061 - protein, 9 aa, Homo Sapiens
LYSEVKEVL

SEQ ID NO: 13062 - protein, 9 aa, Homo Sapiens
MAINSISKL

SEQ ID NO: 13063 - protein, 9 aa, Homo Sapiens
MIADIHCMI

SEQ ID NO: 13064 - protein, 9 aa, Homo Sapiens
MIIENFEAL

SEQ ID NO: 13065 - protein, 9 aa, Homo Sapiens
MIIPSLEEL

SEQ ID NO: 13066 - protein, 9 aa, Homo Sapiens
MIKEKLCYV

SEQ ID NO: 13067 - protein, 9 aa, Homo Sapiens
MIPLLLAAL

SEQ ID NO: 13068 - protein, 9 aa, Homo Sapiens
MLANDIARL

SEQ ID NO: 13069 - protein, 9 aa, Homo Sapiens
MLASAVEKL

SEQ ID NO: 13070 - protein, 9 aa, Homo Sapiens
MLAWINESL

SEQ ID NO: 13071 - protein, 9 aa, Homo Sapiens
MLFPGSIAL

SEQ ID NO: 13072 - protein, 9 aa, Homo Sapiens
MLIEDVDAL

SEQ ID NO: 13073 - protein, 9 aa, Homo Sapiens
MLIEVIEKL

SEQ ID NO: 13074 - protein, 9 aa, Homo Sapiens
MLIKLLEVL

SEQ ID NO: 13075 - protein, 9 aa, Homo Sapiens
MLKEKLAEL

SEQ ID NO: 13076 - protein, 9 aa, Homo Sapiens
MLPGFLHRL

SEQ ID NO: 13077 - protein, 9 aa, Homo Sapiens
MLPKDIAKL

SEQ ID NO: 13078 - protein, 9 aa, Homo Sapiens
MLPLLAALL

SEQ ID NO: 13079 - protein, 9 aa, Homo Sapiens
MLPSILNQL

SEQ ID NO: 13080 - protein, 9 aa, Homo Sapiens
MLSEHTSKL

SEQ ID NO: 13081 - protein, 9 aa, Homo Sapiens
MLVPVIEKL

SEQ ID NO: 13082 - protein, 9 aa, Homo Sapiens
MQAESCYQL

SEQ ID NO: 13083 - protein, 9 aa, Homo Sapiens
MQAHITQAL

SEQ ID NO: 13084 - protein, 9 aa, Homo Sapiens
MQAPLLIAL

SEQ ID NO: 13085 - protein, 9 aa, Homo Sapiens
MQGPIPERI

SEQ ID NO: 13086 - protein, 9 aa, Homo Sapiens
MQISFIHQL

SEQ ID NO: 13087 - protein, 9 aa, Homo Sapiens
MTALVNVAL

SEQ ID NO: 13088 - protein, 9 aa, Homo Sapiens
MTCEQAQLL

SEQ ID NO: 13089 - protein, 9 aa, Homo Sapiens
MTGPGTHQL

SEQ ID NO: 13090 - protein, 9 aa, Homo Sapiens
MTIENMNHL

SEQ ID NO: 13091 - protein, 9 aa, Homo Sapiens
MTKEELNAL

SEQ ID NO: 13092 - protein, 9 aa, Homo Sapiens
MTPEIIQKL

SEQ ID NO: 13093 - protein, 9 aa, Homo Sapiens
MTSEIHNTV

SEQ ID NO: 13094 - protein, 9 aa, Homo Sapiens
MTSNIVQCL

SEQ ID NO: 13095 - protein, 9 aa, Homo Sapiens
MTYWHLLNA

SEQ ID NO: 13096 - protein, 9 aa, Homo Sapiens
MVADKFTEL

SEQ ID NO: 13097 - protein, 9 aa, Homo Sapiens
MVAEILHHL

SEQ ID NO: 13098 - protein, 9 aa, Homo Sapiens
MVAPAVASV

SEQ ID NO: 13099 - protein, 9 aa, Homo Sapiens
MVAQLVQRL

SEQ ID NO: 13100 - protein, 9 aa, Homo Sapiens
MVFNEILQA

SEQ ID NO: 13101 - protein, 9 aa, Homo Sapiens
MVIDVLHPG

SEQ ID NO: 13102 - protein, 9 aa, Homo Sapiens
MVKDALDQL

SEQ ID NO: 13103 - protein, 9 aa, Homo Sapiens
MVMETIEKI

SEQ ID NO: 13104 - protein, 9 aa, Homo Sapiens
MVPEDVPRL

SEQ ID NO: 13105 - protein, 9 aa, Homo Sapiens
MVPETTHEA

SEQ ID NO: 13106 - protein, 9 aa, Homo Sapiens
MVPPNIAEL

SEQ ID NO: 13107 - protein, 9 aa, Homo Sapiens
MVVDIVQEL

SEQ ID NO: 13108 - protein, 9 aa, Homo Sapiens
NAAAIYDLL

SEQ ID NO: 13109 - protein, 9 aa, Homo Sapiens
NAADIENRV

SEQ ID NO: 13110 - protein, 9 aa, Homo Sapiens
NAAEITDKL

SEQ ID NO: 13111 - protein, 9 aa, Homo Sapiens
NAANIFERL

SEQ ID NO: 13112 - protein, 9 aa, Homo Sapiens
NASPVISSV

SEQ ID NO: 13113 - protein, 9 aa, Homo Sapiens
NAVEAIHRA

SEQ ID NO: 13114 - protein, 9 aa, Homo Sapiens
NGLLFKELL

SEQ ID NO: 13115 - protein, 9 aa, Homo Sapiens
NIAILNNNL

SEQ ID NO: 13116 - protein, 9 aa, Homo Sapiens
NIAPIIQKV

SEQ ID NO: 13117 - protein, 9 aa, Homo Sapiens
NIFGPLVKL

SEQ ID NO: 13118 - protein, 9 aa, Homo Sapiens
NIICGITSV

SEQ ID NO: 13119 - protein, 9 aa, Homo Sapiens
NIIDHCEKL

SEQ ID NO: 13120 - protein, 9 aa, Homo Sapiens
NIIEAINEL

SEQ ID NO: 13121 - protein, 9 aa, Homo Sapiens
NIIELVHQV

SEQ ID NO: 13122 - protein, 9 aa, Homo Sapiens
NIIKLIDTV

SEQ ID NO: 13123 - protein, 9 aa, Homo Sapiens
NIIPFCDEV

SEQ ID NO: 13124 - protein, 9 aa, Homo Sapiens
NIIPIIAKA

SEQ ID NO: 13125 - protein, 9 aa, Homo Sapiens
NIIPVIAKA

SEQ ID NO: 13126 - protein, 9 aa, Homo Sapiens
NIIPVIEDA

SEQ ID NO: 13127 - protein, 9 aa, Homo Sapiens
NIIPYITNV

SEQ ID NO: 13128 - protein, 9 aa, Homo Sapiens
NIPEITPFL

SEQ ID NO: 13129 - protein, 9 aa, Homo Sapiens
NIPSFIVRL

SEQ ID NO: 13130 - protein, 9 aa, Homo Sapiens
NITELVNYL

SEQ ID NO: 13131 - protein, 9 aa, Homo Sapiens
NIVEKLREV

SEQ ID NO: 13132 - protein, 9 aa, Homo Sapiens
NIVERVKEV

SEQ ID NO: 13133 - protein, 9 aa, Homo Sapiens
NIVPVIAKA

SEQ ID NO: 13134 - protein, 9 aa, Homo Sapiens
NLFKHLAKA

SEQ ID NO: 13135 - protein, 9 aa, Homo Sapiens
NLIGKIEKL

SEQ ID NO: 13136 - protein, 9 aa, Homo Sapiens
NLKEAIETI

SEQ ID NO: 13137 - protein, 9 aa, Homo Sapiens
NLPAFVNRL

SEQ ID NO: 13138 - protein, 9 aa, Homo Sapiens
NLPSWCDRV

SEQ ID NO: 13139 - protein, 9 aa, Homo Sapiens
NMVAKVDEV

SEQ ID NO: 13140 - protein, 9 aa, Homo Sapiens
NMVDIIHSV

SEQ ID NO: 13141 - protein, 9 aa, Homo Sapiens
NQADTTHPL

SEQ ID NO: 13142 - protein, 9 aa, Homo Sapiens
NQAEPREFL

SEQ ID NO: 13143 - protein, 9 aa, Homo Sapiens
NQAIIKHLL

SEQ ID NO: 13144 - protein, 9 aa, Homo Sapiens
NQAKLIEFL

SEQ ID NO: 13145 - protein, 9 aa, Homo Sapiens
NQAQIEVRL

SEQ ID NO: 13146 - protein, 9 aa, Homo Sapiens
NQAVILYHL

SEQ ID NO: 13147 - protein, 9 aa, Homo Sapiens
NQCELLSQL

SEQ ID NO: 13148 - protein, 9 aa, Homo Sapiens
NQCRFVTGL

SEQ ID NO: 13149 - protein, 9 aa, Homo Sapiens
NQCTVQVRL

SEQ ID NO: 13150 - protein, 9 aa, Homo Sapiens
NQEDFFQRV

SEQ ID NO: 13151 - protein, 9 aa, Homo Sapiens
NQFDYQHGA

SEQ ID NO: 13152 - protein, 9 aa, Homo Sapiens
NQFPGFKEV

SEQ ID NO: 13153 - protein, 9 aa, Homo Sapiens
NQHPDVFYL

SEQ ID NO: 13154 - protein, 9 aa, Homo Sapiens
NQIECHPYL

SEQ ID NO: 13155 - protein, 9 aa, Homo Sapiens
NQIKKIENL

SEQ ID NO: 13156 - protein, 9 aa, Homo Sapiens
NQIPTVNNL

SEQ ID NO: 13157 - protein, 9 aa, Homo Sapiens
NQMSEAHKL

SEQ ID NO: 13158 - protein, 9 aa, Homo Sapiens
NQNPEVFFL

SEQ ID NO: 13159 - protein, 9 aa, Homo Sapiens
NQPEYIQKL

SEQ ID NO: 13160 - protein, 9 aa, Homo Sapiens
NQSDASHLL

SEQ ID NO: 13161 - protein, 9 aa, Homo Sapiens
NQSKIRVTL

SEQ ID NO: 13162 - protein, 9 aa, Homo Sapiens
NQSMLFDKL

SEQ ID NO: 13163 - protein, 9 aa, Homo Sapiens
NQSSVSHCV

SEQ ID NO: 13164 - protein, 9 aa, Homo Sapiens
NQVEALNNL

SEQ ID NO: 13165 - protein, 9 aa, Homo Sapiens
NQYENAEKL

SEQ ID NO: 13166 - protein, 9 aa, Homo Sapiens
NTATIFHEL

SEQ ID NO: 13167 - protein, 9 aa, Homo Sapiens
NTCPYVHNI

SEQ ID NO: 13168 - protein, 9 aa, Homo Sapiens
NTFGYIAKA

SEQ ID NO: 13169 - protein, 9 aa, Homo Sapiens
NTKEVIDRL

SEQ ID NO: 13170 - protein, 9 aa, Homo Sapiens
NTPEYMEKI

SEQ ID NO: 13171 - protein, 9 aa, Homo Sapiens
NTSSHVQEL

SEQ ID NO: 13172 - protein, 9 aa, Homo Sapiens
NVAAVDTNL

SEQ ID NO: 13173 - protein, 9 aa, Homo Sapiens
NVAEINRQV

SEQ ID NO: 13174 - protein, 9 aa, Homo Sapiens
NVAPIISKV

SEQ ID NO: 13175 - protein, 9 aa, Homo Sapiens
NVASIQNYL

SEQ ID NO: 13176 - protein, 9 aa, Homo Sapiens
NVIDNLIVA

SEQ ID NO: 13177 - protein, 9 aa, Homo Sapiens
NVIERLQEA

SEQ ID NO: 13178 - protein, 9 aa, Homo Sapiens
NVIETISSL

SEQ ID NO: 13179 - protein, 9 aa, Homo Sapiens
NVIRLISSL

SEQ ID NO: 13180 - protein, 9 aa, Homo Sapiens
NVIRQLGSL

SEQ ID NO: 13181 - protein, 9 aa, Homo Sapiens
NVKEYLESL

SEQ ID NO: 13182 - protein, 9 aa, Homo Sapiens
NVMEYCQSL

SEQ ID NO: 13183 - protein, 9 aa, Homo Sapiens
NVPDITTGL

SEQ ID NO: 13184 - protein, 9 aa, Homo Sapiens
NVPGEIVES

SEQ ID NO: 13185 - protein, 9 aa, Homo Sapiens
NVPSWCDRI

SEQ ID NO: 13186 - protein, 9 aa, Homo Sapiens
NVTHIDQAL

SEQ ID NO: 13187 - protein, 9 aa, Homo Sapiens
NVVLEIPAA

SEQ ID NO: 13188 - protein, 9 aa, Homo Sapiens
NVVNFIDCL

SEQ ID NO: 13189 - protein, 9 aa, Homo Sapiens
NVVVKIEEA

SEQ ID NO: 13190 - protein, 9 aa, Homo Sapiens
PDPKLLEKV

SEQ ID NO: 13191 - protein, 9 aa, Homo Sapiens
PKEGKVVDA

SEQ ID NO: 13192 - protein, 9 aa, Homo Sapiens
PLGPAPVSV

SEQ ID NO: 13193 - protein, 9 aa, Homo Sapiens
QAADLAYQL

SEQ ID NO: 13194 - protein, 9 aa, Homo Sapiens
QAIDSIHQV

SEQ ID NO: 13195 - protein, 9 aa, Homo Sapiens
QAPDIDVQL

SEQ ID NO: 13196 - protein, 9 aa, Homo Sapiens
QEQNQEQPI

SEQ ID NO: 13197 - protein, 9 aa, Homo Sapiens
QIADIVTSV

SEQ ID NO: 13198 - protein, 9 aa, Homo Sapiens
QIADLQQKL

SEQ ID NO: 13199 - protein, 9 aa, Homo Sapiens
QIAEAVEFL

SEQ ID NO: 13200 - protein, 9 aa, Homo Sapiens
QIFGNIKEA

SEQ ID NO: 13201 - protein, 9 aa, Homo Sapiens
QIHAFVDYL

SEQ ID NO: 13202 - protein, 9 aa, Homo Sapiens
QIIRELQVL

SEQ ID NO: 13203 - protein, 9 aa, Homo Sapiens
QITQINHGL

SEQ ID NO: 13204 - protein, 9 aa, Homo Sapiens
QIVEHLEEL

SEQ ID NO: 13205 - protein, 9 aa, Homo Sapiens
QIVELIEKI

SEQ ID NO: 13206 - protein, 9 aa, Homo Sapiens
QLAQFVHEV

SEQ ID NO: 13207 - protein, 9 aa, Homo Sapiens
QLIDIIHTA

SEQ ID NO: 13208 - protein, 9 aa, Homo Sapiens
QLIDKVWQL

SEQ ID NO: 13209 - protein, 9 aa, Homo Sapiens
QLIPEMQEA

SEQ ID NO: 13210 - protein, 9 aa, Homo Sapiens
QLIRDMVNV

SEQ ID NO: 13211 - protein, 9 aa, Homo Sapiens
QLNEKVAQL

SEQ ID NO: 13212 - protein, 9 aa, Homo Sapiens
QLVDIIEKV

SEQ ID NO: 13213 - protein, 9 aa, Homo Sapiens
QLVESLHKV

SEQ ID NO: 13214 - protein, 9 aa, Homo Sapiens
QMISRIEYI

SEQ ID NO: 13215 - protein, 9 aa, Homo Sapiens
QMISRIEYV

SEQ ID NO: 13216 - protein, 9 aa, Homo Sapiens
QMVKELQEI

SEQ ID NO: 13217 - protein, 9 aa, Homo Sapiens
QQADLQRRL

SEQ ID NO: 13218 - protein, 9 aa, Homo Sapiens
QQAELIQQL

SEQ ID NO: 13219 - protein, 9 aa, Homo Sapiens
QQASILHVL

SEQ ID NO: 13220 - protein, 9 aa, Homo Sapiens
QQIGKVVQV

SEQ ID NO: 13221 - protein, 9 aa, Homo Sapiens
QQIKELEKL

SEQ ID NO: 13222 - protein, 9 aa, Homo Sapiens
QQIKKLEEL

SEQ ID NO: 13223 - protein, 9 aa, Homo Sapiens
QQINKLEEL

SEQ ID NO: 13224 - protein, 9 aa, Homo Sapiens
QQNGSVVRV

SEQ ID NO: 13225 - protein, 9 aa, Homo Sapiens
QQSCLADHL

SEQ ID NO: 13226 - protein, 9 aa, Homo Sapiens
QQSELQSQV

SEQ ID NO: 13227 - protein, 9 aa, Homo Sapiens
QQSETFQFL

SEQ ID NO: 13228 - protein, 9 aa, Homo Sapiens
QQSQLVEKL

SEQ ID NO: 13229 - protein, 9 aa, Homo Sapiens
QQSSIHNVL

SEQ ID NO: 13230 - protein, 9 aa, Homo Sapiens
QQVARMEKL

SEQ ID NO: 13231 - protein, 9 aa, Homo Sapiens
QTGPLPTLV

SEQ ID NO: 13232 - protein, 9 aa, Homo Sapiens
QTIAKLEKA

SEQ ID NO: 13233 - protein, 9 aa, Homo Sapiens
QTIKDIASA

SEQ ID NO: 13234 - protein, 9 aa, Homo Sapiens
QTIQEIRHL

SEQ ID NO: 13235 - protein, 9 aa, Homo Sapiens
QTISALIKA

SEQ ID NO: 13236 - protein, 9 aa, Homo Sapiens
QTKEAIVSA

SEQ ID NO: 13237 - protein, 9 aa, Homo Sapiens
QTPGHTEEL

SEQ ID NO: 13238 - protein, 9 aa, Homo Sapiens
QVAELVKEL

SEQ ID NO: 13239 - protein, 9 aa, Homo Sapiens
QVAERVEAL

SEQ ID NO: 13240 - protein, 9 aa, Homo Sapiens
QVCAHTTRV

SEQ ID NO: 13241 - protein, 9 aa, Homo Sapiens
QVCAIIERV

SEQ ID NO: 13242 - protein, 9 aa, Homo Sapiens
QVFQGTNSL

SEQ ID NO: 13243 - protein, 9 aa, Homo Sapiens
QVGPLPSRL

SEQ ID NO: 13244 - protein, 9 aa, Homo Sapiens
QVGPQIPRA

SEQ ID NO: 13245 - protein, 9 aa, Homo Sapiens
QVIEELFKA

SEQ ID NO: 13246 - protein, 9 aa, Homo Sapiens
QVIEGISRL

SEQ ID NO: 13247 - protein, 9 aa, Homo Sapiens
QVIEKFEAL

SEQ ID NO: 13248 - protein, 9 aa, Homo Sapiens
QVIPQIQSA

SEQ ID NO: 13249 - protein, 9 aa, Homo Sapiens
QVIPQLQTV

SEQ ID NO: 13250 - protein, 9 aa, Homo Sapiens
QVIPVLPQV

SEQ ID NO: 13251 - protein, 9 aa, Homo Sapiens
QVIQSLIAL

SEQ ID NO: 13252 - protein, 9 aa, Homo Sapiens
QVKQHIDAV

SEQ ID NO: 13253 - protein, 9 aa, Homo Sapiens
QVMKFIEKA

SEQ ID NO: 13254 - protein, 9 aa, Homo Sapiens
QVPENTEEL

SEQ ID NO: 13255 - protein, 9 aa, Homo Sapiens
QVPETIETL

SEQ ID NO: 13256 - protein, 9 aa, Homo Sapiens
QVVDHIDSL

SEQ ID NO: 13257 - protein, 9 aa, Homo Sapiens
QVVEKVQEA

SEQ ID NO: 13258 - protein, 9 aa, Homo Sapiens
RAAAMANNL

SEQ ID NO: 13259 - protein, 9 aa, Homo Sapiens
RAADVLVYL

SEQ ID NO: 13260 - protein, 9 aa, Homo Sapiens
RAFGFMTRV

SEQ ID NO: 13261 - protein, 9 aa, Homo Sapiens
RAIDSIHQL

SEQ ID NO: 13262 - protein, 9 aa, Homo Sapiens
RAIELLEKL

SEQ ID NO: 13263 - protein, 9 aa, Homo Sapiens
RAIENIDTL

SEQ ID NO: 13264 - protein, 9 aa, Homo Sapiens
RAIPELTKL

SEQ ID NO: 13265 - protein, 9 aa, Homo Sapiens
RAVEELHKL

SEQ ID NO: 13266 - protein, 9 aa, Homo Sapiens
RIADLSYTV

SEQ ID NO: 13267 - protein, 9 aa, Homo Sapiens
RIAEEVNCL

SEQ ID NO: 13268 - protein, 9 aa, Homo Sapiens
RIAEFTTNL

SEQ ID NO: 13269 - protein, 9 aa, Homo Sapiens
RIAELLTEL

SEQ ID NO: 13270 - protein, 9 aa, Homo Sapiens
RIAEYAFKL

SEQ ID NO: 13271 - protein, 9 aa, Homo Sapiens
RIALYCHQL

SEQ ID NO: 13272 - protein, 9 aa, Homo Sapiens
RIFGGLDML

SEQ ID NO: 13273 - protein, 9 aa, Homo Sapiens
RIFQTLLEV

SEQ ID NO: 13274 - protein, 9 aa, Homo Sapiens
RIIDTVAQV

SEQ ID NO: 13275 - protein, 9 aa, Homo Sapiens
RIIDVVYNA

SEQ ID NO: 13276 - protein, 9 aa, Homo Sapiens
RIKNKIAEL

SEQ ID NO: 13277 - protein, 9 aa, Homo Sapiens
RIMGNIWDA

SEQ ID NO: 13278 - protein, 9 aa, Homo Sapiens
RIPEKVFQA

SEQ ID NO: 13279 - protein, 9 aa, Homo Sapiens
RIPSDIAKL

SEQ ID NO: 13280 - protein, 9 aa, Homo Sapiens
RIPSFVTEL

SEQ ID NO: 13281 - protein, 9 aa, Homo Sapiens
RIQSKLYRA

SEQ ID NO: 13282 - protein, 9 aa, Homo Sapiens
RISTINILL

SEQ ID NO: 13283 - protein, 9 aa, Homo Sapiens
RIVDKLLAL

SEQ ID NO: 13284 - protein, 9 aa, Homo Sapiens
RIYKYIHKV

SEQ ID NO: 13285 - protein, 9 aa, Homo Sapiens
RKYPTLLEV

SEQ ID NO: 13286 - protein, 9 aa, Homo Sapiens
RLAALQHRL

SEQ ID NO: 13287 - protein, 9 aa, Homo Sapiens
RLAAMANNL

SEQ ID NO: 13288 - protein, 9 aa, Homo Sapiens
RLAEQIATL

SEQ ID NO: 13289 - protein, 9 aa, Homo Sapiens
RLAEVVHEL

SEQ ID NO: 13290 - protein, 9 aa, Homo Sapiens
RLAHYIDRV

SEQ ID NO: 13291 - protein, 9 aa, Homo Sapiens
RLAQHITYV

SEQ ID NO: 13292 - protein, 9 aa, Homo Sapiens
RLAVYIDKV

SEQ ID NO: 13293 - protein, 9 aa, Homo Sapiens
RLAVYIDRV

SEQ ID NO: 13294 - protein, 9 aa, Homo Sapiens
RLFEGNALL

SEQ ID NO: 13295 - protein, 9 aa, Homo Sapiens
RLGPVPPGL

SEQ ID NO: 13296 - protein, 9 aa, Homo Sapiens
RLGPVPSGL

SEQ ID NO: 13297 - protein, 9 aa, Homo Sapiens
RLIEHCDHI

SEQ ID NO: 13298 - protein, 9 aa, Homo Sapiens
RLIESLFTI

SEQ ID NO: 13299 - protein, 9 aa, Homo Sapiens
RLIPTLVSI

SEQ ID NO: 13300 - protein, 9 aa, Homo Sapiens
RLKPALETL

SEQ ID NO: 13301 - protein, 9 aa, Homo Sapiens
RLKPEIQCV

SEQ ID NO: 13302 - protein, 9 aa, Homo Sapiens
RLKQEIERL

SEQ ID NO: 13303 - protein, 9 aa, Homo Sapiens
RLMEICESL

SEQ ID NO: 13304 - protein, 9 aa, Homo Sapiens
RLMNDMTAV

SEQ ID NO: 13305 - protein, 9 aa, Homo Sapiens
RLPDIIACA

SEQ ID NO: 13306 - protein, 9 aa, Homo Sapiens
RLPEAIEEV

SEQ ID NO: 13307 - protein, 9 aa, Homo Sapiens
RLPEIYIQL

SEQ ID NO: 13308 - protein, 9 aa, Homo Sapiens
RLPETVHTA

SEQ ID NO: 13309 - protein, 9 aa, Homo Sapiens
RLPLKADFV

SEQ ID NO: 13310 - protein, 9 aa, Homo Sapiens
RLSPIENFL

SEQ ID NO: 13311 - protein, 9 aa, Homo Sapiens
RLSSVNAEV

SEQ ID NO: 13312 - protein, 9 aa, Homo Sapiens
RLVPFLTEL

SEQ ID NO: 13313 - protein, 9 aa, Homo Sapiens
RLYQECEKL

SEQ ID NO: 13314 - protein, 9 aa, Homo Sapiens
RMIGQICEV

SEQ ID NO: 13315 - protein, 9 aa, Homo Sapiens
RMKDALDYL

SEQ ID NO: 13316 - protein, 9 aa, Homo Sapiens
RMKEFLDSL

SEQ ID NO: 13317 - protein, 9 aa, Homo Sapiens
RMVAEIQNV

SEQ ID NO: 13318 - protein, 9 aa, Homo Sapiens
RQADFVQVL

SEQ ID NO: 13319 - protein, 9 aa, Homo Sapiens
RQADKVWRL

SEQ ID NO: 13320 - protein, 9 aa, Homo Sapiens
RQADVEYEL

SEQ ID NO: 13321 - protein, 9 aa, Homo Sapiens
RQAQVAEKL

SEQ ID NO: 13322 - protein, 9 aa, Homo Sapiens
RQFPGSHRV

SEQ ID NO: 13323 - protein, 9 aa, Homo Sapiens
RQFQELNEL

SEQ ID NO: 13324 - protein, 9 aa, Homo Sapiens
RQFQYLHVL

SEQ ID NO: 13325 - protein, 9 aa, Homo Sapiens
RQFSTPFQL

SEQ ID NO: 13326 - protein, 9 aa, Homo Sapiens
RQGPVNQTV

SEQ ID NO: 13327 - protein, 9 aa, Homo Sapiens
RQIDKIQCA

SEQ ID NO: 13328 - protein, 9 aa, Homo Sapiens
RQIDQFLVV

SEQ ID NO: 13329 - protein, 9 aa, Homo Sapiens
RQIDQMVGL

SEQ ID NO: 13330 - protein, 9 aa, Homo Sapiens
RQIEYEYKL

SEQ ID NO: 13331 - protein, 9 aa, Homo Sapiens
RQIEYYFSV

SEQ ID NO: 13332 - protein, 9 aa, Homo Sapiens
RQIKNFHKL

SEQ ID NO: 13333 - protein, 9 aa, Homo Sapiens
RQIQKITNA

SEQ ID NO: 13334 - protein, 9 aa, Homo Sapiens
RQPSLFYHL

SEQ ID NO: 13335 - protein, 9 aa, Homo Sapiens
RQSDLLVKL

SEQ ID NO: 13336 - protein, 9 aa, Homo Sapiens
RQSETYNYL

SEQ ID NO: 13337 - protein, 9 aa, Homo Sapiens
RQSPLTTGL

SEQ ID NO: 13338 - protein, 9 aa, Homo Sapiens
RTAGHMQTL

SEQ ID NO: 13339 - protein, 9 aa, Homo Sapiens
RTFEKDHRL

SEQ ID NO: 13340 - protein, 9 aa, Homo Sapiens
RTFEKIEEV

SEQ ID NO: 13341 - protein, 9 aa, Homo Sapiens
RTIDFVHQV

SEQ ID NO: 13342 - protein, 9 aa, Homo Sapiens
RTIEYLEEV

SEQ ID NO: 13343 - protein, 9 aa, Homo Sapiens
RTIGVITKL

SEQ ID NO: 13344 - protein, 9 aa, Homo Sapiens
RTMENLVEL

SEQ ID NO: 13345 - protein, 9 aa, Homo Sapiens
RTMPRIPTL

SEQ ID NO: 13346 - protein, 9 aa, Homo Sapiens
RTPDLYEKL

SEQ ID NO: 13347 - protein, 9 aa, Homo Sapiens
RTPEAVQKL

SEQ ID NO: 13348 - protein, 9 aa, Homo Sapiens
RTPENHENL

SEQ ID NO: 13349 - protein, 9 aa, Homo Sapiens
RTPYHVNLL

SEQ ID NO: 13350 - protein, 9 aa, Homo Sapiens
RTTEILHHL

SEQ ID NO: 13351 - protein, 9 aa, Homo Sapiens
RTVEKTWKL

SEQ ID NO: 13352 - protein, 9 aa, Homo Sapiens
RTYKNSEEL

SEQ ID NO: 13353 - protein, 9 aa, Homo Sapiens
RVADRLYGV

SEQ ID NO: 13354 - protein, 9 aa, Homo Sapiens
RVAGFNPAL

SEQ ID NO: 13355 - protein, 9 aa, Homo Sapiens
RVANVADVV

SEQ ID NO: 13356 - protein, 9 aa, Homo Sapiens
RVCDYHTKL

SEQ ID NO: 13357 - protein, 9 aa, Homo Sapiens
RVCNQIEFL

SEQ ID NO: 13358 - protein, 9 aa, Homo Sapiens
RVFENIVAV

SEQ ID NO: 13359 - protein, 9 aa, Homo Sapiens
RVFEYMSYL

SEQ ID NO: 13360 - protein, 9 aa, Homo Sapiens
RVFKQFVQA

SEQ ID NO: 13361 - protein, 9 aa, Homo Sapiens
RVIDHSQYL

SEQ ID NO: 13362 - protein, 9 aa, Homo Sapiens
RVIDYILDL

SEQ ID NO: 13363 - protein, 9 aa, Homo Sapiens
RVIEPFSRV

SEQ ID NO: 13364 - protein, 9 aa, Homo Sapiens
RVIGDLDTV

SEQ ID NO: 13365 - protein, 9 aa, Homo Sapiens
RVIGTLEEV

SEQ ID NO: 13366 - protein, 9 aa, Homo Sapiens
RVISELQEA

SEQ ID NO: 13367 - protein, 9 aa, Homo Sapiens
RVIVEVCEV

SEQ ID NO: 13368 - protein, 9 aa, Homo Sapiens
RVKDSLICV

SEQ ID NO: 13369 - protein, 9 aa, Homo Sapiens
RVMEEIRNL

SEQ ID NO: 13370 - protein, 9 aa, Homo Sapiens
RVMEGLHRL

SEQ ID NO: 13371 - protein, 9 aa, Homo Sapiens
RVMEYINRL

SEQ ID NO: 13372 - protein, 9 aa, Homo Sapiens
RVNETTEFL

SEQ ID NO: 13373 - protein, 9 aa, Homo Sapiens
RVPAHISLL

SEQ ID NO: 13374 - protein, 9 aa, Homo Sapiens
RVPDGMVGL

SEQ ID NO: 13375 - protein, 9 aa, Homo Sapiens
RVPELLHRL

SEQ ID NO: 13376 - protein, 9 aa, Homo Sapiens
RVPESIKNA

SEQ ID NO: 13377 - protein, 9 aa, Homo Sapiens
RVPETVADA

SEQ ID NO: 13378 - protein, 9 aa, Homo Sapiens
RVSPECQQL

SEQ ID NO: 13379 - protein, 9 aa, Homo Sapiens
RVVDLITNL

SEQ ID NO: 13380 - protein, 9 aa, Homo Sapiens
RVVDLLNQA

SEQ ID NO: 13381 - protein, 9 aa, Homo Sapiens
RVVDYLTKL

SEQ ID NO: 13382 - protein, 9 aa, Homo Sapiens
RVVGTIDQL

SEQ ID NO: 13383 - protein, 9 aa, Homo Sapiens
RVYEFLDKL

SEQ ID NO: 13384 - protein, 9 aa, Homo Sapiens
SAAALCNNL

SEQ ID NO: 13385 - protein, 9 aa, Homo Sapiens
SAADLVHFL

SEQ ID NO: 13386 - protein, 9 aa, Homo Sapiens
SAAELNYGL

SEQ ID NO: 13387 - protein, 9 aa, Homo Sapiens
SAAPVAHLL

SEQ ID NO: 13388 - protein, 9 aa, Homo Sapiens
SAASICAKV

SEQ ID NO: 13389 - protein, 9 aa, Homo Sapiens
SAFGASHHV

SEQ ID NO: 13390 - protein, 9 aa, Homo Sapiens
SAFGEIETV

SEQ ID NO: 13391 - protein, 9 aa, Homo Sapiens
SAGPPLLAV

SEQ ID NO: 13392 - protein, 9 aa, Homo Sapiens
SAIDRIFTL

SEQ ID NO: 13393 - protein, 9 aa, Homo Sapiens
SAIGYIHSL

SEQ ID NO: 13394 - protein, 9 aa, Homo Sapiens
SAIHTIAHL

SEQ ID NO: 13395 - protein, 9 aa, Homo Sapiens
SAPKYIDYL

SEQ ID NO: 13396 - protein, 9 aa, Homo Sapiens
SAVMALQEA

SEQ ID NO: 13397 - protein, 9 aa, Homo Sapiens
SDPFTHLAP

SEQ ID NO: 13398 - protein, 9 aa, Homo Sapiens
SGITRVEKA

SEQ ID NO: 13399 - protein, 9 aa, Homo Sapiens
SGSEIHVEV

SEQ ID NO: 13400 - protein, 9 aa, Homo Sapiens
SIAAFIQRL

SEQ ID NO: 13401 - protein, 9 aa, Homo Sapiens
SIAEQAHEL

SEQ ID NO: 13402 - protein, 9 aa, Homo Sapiens
SIAEVVHQL

SEQ ID NO: 13403 - protein, 9 aa, Homo Sapiens
SIAPILAEA

SEQ ID NO: 13404 - protein, 9 aa, Homo Sapiens
SIAPIVIFA

SEQ ID NO: 13405 - protein, 9 aa, Homo Sapiens
SIASPDVKL

SEQ ID NO: 13406 - protein, 9 aa, Homo Sapiens
SIFEFVHAL

SEQ ID NO: 13407 - protein, 9 aa, Homo Sapiens
SIFKSLHQV

SEQ ID NO: 13408 - protein, 9 aa, Homo Sapiens
SIHEFCINL

SEQ ID NO: 13409 - protein, 9 aa, Homo Sapiens
SIIGRLLEV

SEQ ID NO: 13410 - protein, 9 aa, Homo Sapiens
SIIHEIDSI

SEQ ID NO: 13411 - protein, 9 aa, Homo Sapiens
SIIKKLAAL

SEQ ID NO: 13412 - protein, 9 aa, Homo Sapiens
SIILHLICL

SEQ ID NO: 13413 - protein, 9 aa, Homo Sapiens
SIIQRLLEV

SEQ ID NO: 13414 - protein, 9 aa, Homo Sapiens
SIPEINHRL

SEQ ID NO: 13415 - protein, 9 aa, Homo Sapiens
SIPELQNFL

SEQ ID NO: 13416 - protein, 9 aa, Homo Sapiens
SIPGFVERL

SEQ ID NO: 13417 - protein, 9 aa, Homo Sapiens
SIPLLINHL

SEQ ID NO: 13418 - protein, 9 aa, Homo Sapiens
SIPSMVDGL

SEQ ID NO: 13419 - protein, 9 aa, Homo Sapiens
SIPTTIYKA

SEQ ID NO: 13420 - protein, 9 aa, Homo Sapiens
SISDVIAQV

SEQ ID NO: 13421 - protein, 9 aa, Homo Sapiens
SISPIVLYL

SEQ ID NO: 13422 - protein, 9 aa, Homo Sapiens
SISSIDREL

SEQ ID NO: 13423 - protein, 9 aa, Homo Sapiens
SIVNHLEFL

SEQ ID NO: 13424 - protein, 9 aa, Homo Sapiens
SIVQDIKRA

SEQ ID NO: 13425 - protein, 9 aa, Homo Sapiens
SIVSSLHQA

SEQ ID NO: 13426 - protein, 9 aa, Homo Sapiens
SIYPKSELL

SEQ ID NO: 13427 - protein, 9 aa, Homo Sapiens
SLADIAQKL

SEQ ID NO: 13428 - protein, 9 aa, Homo Sapiens
SLAEFVQSL

SEQ ID NO: 13429 - protein, 9 aa, Homo Sapiens
SLAELIQAL

SEQ ID NO: 13430 - protein, 9 aa, Homo Sapiens
SLAERVDRL

SEQ ID NO: 13431 - protein, 9 aa, Homo Sapiens
SLANETHQL

SEQ ID NO: 13432 - protein, 9 aa, Homo Sapiens
SLAPLFFKL

SEQ ID NO: 13433 - protein, 9 aa, Homo Sapiens
SLAPYRDYL

SEQ ID NO: 13434 - protein, 9 aa, Homo Sapiens
SLAQYLINV

SEQ ID NO: 13435 - protein, 9 aa, Homo Sapiens
SLASHIQSL

SEQ ID NO: 13436 - protein, 9 aa, Homo Sapiens
SLFERLVVL

SEQ ID NO: 13437 - protein, 9 aa, Homo Sapiens
SLFGNIKGA

SEQ ID NO: 13438 - protein, 9 aa, Homo Sapiens
SLFNGSHYL

SEQ ID NO: 13439 - protein, 9 aa, Homo Sapiens
SLFPHAICL

SEQ ID NO: 13440 - protein, 9 aa, Homo Sapiens
SLIAKVATA

SEQ ID NO: 13441 - protein, 9 aa, Homo Sapiens
SLIDGIKRA

SEQ ID NO: 13442 - protein, 9 aa, Homo Sapiens
SLIEKIPTA

SEQ ID NO: 13443 - protein, 9 aa, Homo Sapiens
SLIFKLEEL

SEQ ID NO: 13444 - protein, 9 aa, Homo Sapiens
SLIGHLQTL

SEQ ID NO: 13445 - protein, 9 aa, Homo Sapiens
SLIKKIKDV

SEQ ID NO: 13446 - protein, 9 aa, Homo Sapiens
SLIKQIPRI

SEQ ID NO: 13447 - protein, 9 aa, Homo Sapiens
SLIRNLEQL

SEQ ID NO: 13448 - protein, 9 aa, Homo Sapiens
SLISGIIRA

SEQ ID NO: 13449 - protein, 9 aa, Homo Sapiens
SLITLIEKV

SEQ ID NO: 13450 - protein, 9 aa, Homo Sapiens
SLITRLLEV

SEQ ID NO: 13451 - protein, 9 aa, Homo Sapiens
SLKDRIHCV

SEQ ID NO: 13452 - protein, 9 aa, Homo Sapiens
SLKEDIQKA

SEQ ID NO: 13453 - protein, 9 aa, Homo Sapiens
SLKETIEEL

SEQ ID NO: 13454 - protein, 9 aa, Homo Sapiens
SLKSKLEHA

SEQ ID NO: 13455 - protein, 9 aa, Homo Sapiens
SLMEKISKL

SEQ ID NO: 13456 - protein, 9 aa, Homo Sapiens
SLNKHVEAV

SEQ ID NO: 13457 - protein, 9 aa, Homo Sapiens
SLPDFCHKF

SEQ ID NO: 13458 - protein, 9 aa, Homo Sapiens
SLPDHHEEL

SEQ ID NO: 13459 - protein, 9 aa, Homo Sapiens
SLPDIKVYL

SEQ ID NO: 13460 - protein, 9 aa, Homo Sapiens
SLPEIDNAL

SEQ ID NO: 13461 - protein, 9 aa, Homo Sapiens
SLPELTHAL

SEQ ID NO: 13462 - protein, 9 aa, Homo Sapiens
SLPSFSEKL

SEQ ID NO: 13463 - protein, 9 aa, Homo Sapiens
SLPYHSQKL

SEQ ID NO: 13464 - protein, 9 aa, Homo Sapiens
SLSDTVEKL

SEQ ID NO: 13465 - protein, 9 aa, Homo Sapiens
SLVDIYSQL

SEQ ID NO: 13466 - protein, 9 aa, Homo Sapiens
SLVENIERL

SEQ ID NO: 13467 - protein, 9 aa, Homo Sapiens
SLVKDVIGA

SEQ ID NO: 13468 - protein, 9 aa, Homo Sapiens
SLYDQAEKL

SEQ ID NO: 13469 - protein, 9 aa, Homo Sapiens
SMEEIFQHL

SEQ ID NO: 13470 - protein, 9 aa, Homo Sapiens
SMISKLKQA

SEQ ID NO: 13471 - protein, 9 aa, Homo Sapiens
SMKDDLERV

SEQ ID NO: 13472 - protein, 9 aa, Homo Sapiens
SMKEELERV

SEQ ID NO: 13473 - protein, 9 aa, Homo Sapiens
SQAAIAELL

SEQ ID NO: 13474 - protein, 9 aa, Homo Sapiens
SQAAVLSQL

SEQ ID NO: 13475 - protein, 9 aa, Homo Sapiens
SQADCAVLI

SEQ ID NO: 13476 - protein, 9 aa, Homo Sapiens
SQADFAEKL

SEQ ID NO: 13477 - protein, 9 aa, Homo Sapiens
SQADVHRQI

SEQ ID NO: 13478 - protein, 9 aa, Homo Sapiens
SQADVHRQV

SEQ ID NO: 13479 - protein, 9 aa, Homo Sapiens
SQAEIEARL

SEQ ID NO: 13480 - protein, 9 aa, Homo Sapiens
SQAEIEQKI

SEQ ID NO: 13481 - protein, 9 aa, Homo Sapiens
SQAETVHGL

SEQ ID NO: 13482 - protein, 9 aa, Homo Sapiens
SQAEWREEV

SEQ ID NO: 13483 - protein, 9 aa, Homo Sapiens
SQAFISHHL

SEQ ID NO: 13484 - protein, 9 aa, Homo Sapiens
SQAGLNQKL

SEQ ID NO: 13485 - protein, 9 aa, Homo Sapiens
SQANIAQVL

SEQ ID NO: 13486 - protein, 9 aa, Homo Sapiens
SQANVVVKI

SEQ ID NO: 13487 - protein, 9 aa, Homo Sapiens
SQAPFIVAL

SEQ ID NO: 13488 - protein, 9 aa, Homo Sapiens
SQAQTLHKV

SEQ ID NO: 13489 - protein, 9 aa, Homo Sapiens
SQATALAKL

SEQ ID NO: 13490 - protein, 9 aa, Homo Sapiens
SQCAKTFSL

SEQ ID NO: 13491 - protein, 9 aa, Homo Sapiens
SQCPHIVRI

SEQ ID NO: 13492 - protein, 9 aa, Homo Sapiens
SQCSAQHYV

SEQ ID NO: 13493 - protein, 9 aa, Homo Sapiens
SQDENYHHL

SEQ ID NO: 13494 - protein, 9 aa, Homo Sapiens
SQEGRPVQV

SEQ ID NO: 13495 - protein, 9 aa, Homo Sapiens
SQFGHVVDI

SEQ ID NO: 13496 - protein, 9 aa, Homo Sapiens
SQFGPIERA

SEQ ID NO: 13497 - protein, 9 aa, Homo Sapiens
SQFGTEHVL

SEQ ID NO: 13498 - protein, 9 aa, Homo Sapiens
SQFGTVEKA

SEQ ID NO: 13499 - protein, 9 aa, Homo Sapiens
SQFPGAITL

SEQ ID NO: 13500 - protein, 9 aa, Homo Sapiens
SQFPTPEAV

SEQ ID NO: 13501 - protein, 9 aa, Homo Sapiens
SQFSGKITV

SEQ ID NO: 13502 - protein, 9 aa, Homo Sapiens
SQFSYQHAI

SEQ ID NO: 13503 - protein, 9 aa, Homo Sapiens
SQHDQVNLL

SEQ ID NO: 13504 - protein, 9 aa, Homo Sapiens
SQHDQVTLL

SEQ ID NO: 13505 - protein, 9 aa, Homo Sapiens
SQHFFCKEV

SEQ ID NO: 13506 - protein, 9 aa, Homo Sapiens
SQIAKIVAA

SEQ ID NO: 13507 - protein, 9 aa, Homo Sapiens
SQIALNEKL

SEQ ID NO: 13508 - protein, 9 aa, Homo Sapiens
SQIDQQNSV

SEQ ID NO: 13509 - protein, 9 aa, Homo Sapiens
SQIEADFRL

SEQ ID NO: 13510 - protein, 9 aa, Homo Sapiens
SQIHDIVLV

SEQ ID NO: 13511 - protein, 9 aa, Homo Sapiens
SQIKYAAKV

SEQ ID NO: 13512 - protein, 9 aa, Homo Sapiens
SQINKFLYL

SEQ ID NO: 13513 - protein, 9 aa, Homo Sapiens
SQIPAQPSV

SEQ ID NO: 13514 - protein, 9 aa, Homo Sapiens
SQIQEFKEA

SEQ ID NO: 13515 - protein, 9 aa, Homo Sapiens
SQIQKVEPA

SEQ ID NO: 13516 - protein, 9 aa, Homo Sapiens
SQIQRLIVA

SEQ ID NO: 13517 - protein, 9 aa, Homo Sapiens
SQIREMETL

SEQ ID NO: 13518 - protein, 9 aa, Homo Sapiens
SQIRETQQL

SEQ ID NO: 13519 - protein, 9 aa, Homo Sapiens
SQITKIPIL

SEQ ID NO: 13520 - protein, 9 aa, Homo Sapiens
SQITSLVTL

SEQ ID NO: 13521 - protein, 9 aa, Homo Sapiens
SQIYCIENA

SEQ ID NO: 13522 - protein, 9 aa, Homo Sapiens
SQIYPVVCV

SEQ ID NO: 13523 - protein, 9 aa, Homo Sapiens
SQMEKIVRI

SEQ ID NO: 13524 - protein, 9 aa, Homo Sapiens
SQMPVPVHV

SEQ ID NO: 13525 - protein, 9 aa, Homo Sapiens
SQPALWHTV

SEQ ID NO: 13526 - protein, 9 aa, Homo Sapiens
SQPDLLHQL

SEQ ID NO: 13527 - protein, 9 aa, Homo Sapiens
SQPEKVYTL

SEQ ID NO: 13528 - protein, 9 aa, Homo Sapiens
SQSELENRL

SEQ ID NO: 13529 - protein, 9 aa, Homo Sapiens
SQSIVWVHA

SEQ ID NO: 13530 - protein, 9 aa, Homo Sapiens
SQSNMTQKV

SEQ ID NO: 13531 - protein, 9 aa, Homo Sapiens
SQSSIQQEL

SEQ ID NO: 13532 - protein, 9 aa, Homo Sapiens
SQSSIRTEA

SEQ ID NO: 13533 - protein, 9 aa, Homo Sapiens
SQSSLIHLV

SEQ ID NO: 13534 - protein, 9 aa, Homo Sapiens
SQSSVHSCL

SEQ ID NO: 13535 - protein, 9 aa, Homo Sapiens
SQSVIHNLL

SEQ ID NO: 13536 - protein, 9 aa, Homo Sapiens
SQSWNVETL

SEQ ID NO: 13537 - protein, 9 aa, Homo Sapiens
SQTDFSQLL

SEQ ID NO: 13538 - protein, 9 aa, Homo Sapiens
SQTDYISRL

SEQ ID NO: 13539 - protein, 9 aa, Homo Sapiens
SQTSVAERL

SEQ ID NO: 13540 - protein, 9 aa, Homo Sapiens
SQTTVYEKL

SEQ ID NO: 13541 - protein, 9 aa, Homo Sapiens
SQVDRLVAL

SEQ ID NO: 13542 - protein, 9 aa, Homo Sapiens
SQVEAHHSL

SEQ ID NO: 13543 - protein, 9 aa, Homo Sapiens
SQVEILQRV

SEQ ID NO: 13544 - protein, 9 aa, Homo Sapiens
SQVGFIDYI

SEQ ID NO: 13545 - protein, 9 aa, Homo Sapiens
SQVPNIVKA

SEQ ID NO: 13546 - protein, 9 aa, Homo Sapiens
SQVSVVHTL

SEQ ID NO: 13547 - protein, 9 aa, Homo Sapiens
SQYPEIIFL

SEQ ID NO: 13548 - protein, 9 aa, Homo Sapiens
SQYPFPVTL

SEQ ID NO: 13549 - protein, 9 aa, Homo Sapiens
SSIEKIVEI

SEQ ID NO: 13550 - protein, 9 aa, Homo Sapiens
STAAKIMGV

SEQ ID NO: 13551 - protein, 9 aa, Homo Sapiens
STAAVIQNV

SEQ ID NO: 13552 - protein, 9 aa, Homo Sapiens
STADVYCKL

SEQ ID NO: 13553 - protein, 9 aa, Homo Sapiens
STCEFVRTL

SEQ ID NO: 13554 - protein, 9 aa, Homo Sapiens
STFGELKTV

SEQ ID NO: 13555 - protein, 9 aa, Homo Sapiens
STGPQPVTV

SEQ ID NO: 13556 - protein, 9 aa, Homo Sapiens
STIAILNSV

SEQ ID NO: 13557 - protein, 9 aa, Homo Sapiens
STIDFLDRA

SEQ ID NO: 13558 - protein, 9 aa, Homo Sapiens
STIKEVAQA

SEQ ID NO: 13559 - protein, 9 aa, Homo Sapiens
STIKTLEEA

SEQ ID NO: 13560 - protein, 9 aa, Homo Sapiens
STIPGIQKI

SEQ ID NO: 13561 - protein, 9 aa, Homo Sapiens
STIQKIKEA

SEQ ID NO: 13562 - protein, 9 aa, Homo Sapiens
STIRLLTSL

SEQ ID NO: 13563 - protein, 9 aa, Homo Sapiens
STSAIIDYL

SEQ ID NO: 13564 - protein, 9 aa, Homo Sapiens
STSKWNHLL

SEQ ID NO: 13565 - protein, 9 aa, Homo Sapiens
STSNLNEKI

SEQ ID NO: 13566 - protein, 9 aa, Homo Sapiens
STVEALQNL

SEQ ID NO: 13567 - protein, 9 aa, Homo Sapiens
STVEKLYAA

SEQ ID NO: 13568 - protein, 9 aa, Homo Sapiens
STVGEIVNL

SEQ ID NO: 13569 - protein, 9 aa, Homo Sapiens
STVRHLQEL

SEQ ID NO: 13570 - protein, 9 aa, Homo Sapiens
SVAAQLTGV

SEQ ID NO: 13571 - protein, 9 aa, Homo Sapiens
SVADLAESI

SEQ ID NO: 13572 - protein, 9 aa, Homo Sapiens
SVADLAHVL

SEQ ID NO: 13573 - protein, 9 aa, Homo Sapiens
SVADLIESM

SEQ ID NO: 13574 - protein, 9 aa, Homo Sapiens
SVAECVERM

SEQ ID NO: 13575 - protein, 9 aa, Homo Sapiens
SVAEIEEAL

SEQ ID NO: 13576 - protein, 9 aa, Homo Sapiens
SVAEKLSKL

SEQ ID NO: 13577 - protein, 9 aa, Homo Sapiens
SVAELQSRL

SEQ ID NO: 13578 - protein, 9 aa, Homo Sapiens
SVAESLNYV

SEQ ID NO: 13579 - protein, 9 aa, Homo Sapiens
SVAETAQTI

SEQ ID NO: 13580 - protein, 9 aa, Homo Sapiens
SVAGKIQKL

SEQ ID NO: 13581 - protein, 9 aa, Homo Sapiens
SVAGSVERV

SEQ ID NO: 13582 - protein, 9 aa, Homo Sapiens
SVAGVVESL

SEQ ID NO: 13583 - protein, 9 aa, Homo Sapiens
SVAKESIPL

SEQ ID NO: 13584 - protein, 9 aa, Homo Sapiens
SVAKTSQLL

SEQ ID NO: 13585 - protein, 9 aa, Homo Sapiens
SVALHVEKL

SEQ ID NO: 13586 - protein, 9 aa, Homo Sapiens
SVALINRAL

SEQ ID NO: 13587 - protein, 9 aa, Homo Sapiens
SVAMHTNYL

SEQ ID NO: 13588 - protein, 9 aa, Homo Sapiens
SVANHNSFL

SEQ ID NO: 13589 - protein, 9 aa, Homo Sapiens
SVAPANSAL

SEQ ID NO: 13590 - protein, 9 aa, Homo Sapiens
SVAPFADYL

SEQ ID NO: 13591 - protein, 9 aa, Homo Sapiens
SVAPFDQNL

SEQ ID NO: 13592 - protein, 9 aa, Homo Sapiens
SVAPLVDHL

SEQ ID NO: 13593 - protein, 9 aa, Homo Sapiens
SVAQLEARL

SEQ ID NO: 13594 - protein, 9 aa, Homo Sapiens
SVAVIHQSL

SEQ ID NO: 13595 - protein, 9 aa, Homo Sapiens
SVAYLINTL

SEQ ID NO: 13596 - protein, 9 aa, Homo Sapiens
SVAYQINAL

SEQ ID NO: 13597 - protein, 9 aa, Homo Sapiens
SVEDMNFRV

SEQ ID NO: 13598 - protein, 9 aa, Homo Sapiens
SVFAGVVGV

SEQ ID NO: 13599 - protein, 9 aa, Homo Sapiens
SVFEGLERL

SEQ ID NO: 13600 - protein, 9 aa, Homo Sapiens
SVFENLEQL

SEQ ID NO: 13601 - protein, 9 aa, Homo Sapiens
SVFGQVERA

SEQ ID NO: 13602 - protein, 9 aa, Homo Sapiens
SVFNHLEEL

SEQ ID NO: 13603 - protein, 9 aa, Homo Sapiens
SVFPYNHRM

SEQ ID NO: 13604 - protein, 9 aa, Homo Sapiens
SVHKGFAFV

SEQ ID NO: 13605 - protein, 9 aa, Homo Sapiens
SVIDHIHLI

SEQ ID NO: 13606 - protein, 9 aa, Homo Sapiens
SVIEAHEQL

SEQ ID NO: 13607 - protein, 9 aa, Homo Sapiens
SVIEQIVYV

SEQ ID NO: 13608 - protein, 9 aa, Homo Sapiens
SVIGSLNGV

SEQ ID NO: 13609 - protein, 9 aa, Homo Sapiens
SVIGVSPAV

SEQ ID NO: 13610 - protein, 9 aa, Homo Sapiens
SVIKELRKA

SEQ ID NO: 13611 - protein, 9 aa, Homo Sapiens
SVIKELRQL

SEQ ID NO: 13612 - protein, 9 aa, Homo Sapiens
SVINEINKI

SEQ ID NO: 13613 - protein, 9 aa, Homo Sapiens
SVIPQIQKV

SEQ ID NO: 13614 - protein, 9 aa, Homo Sapiens
SVIPVINKI

SEQ ID NO: 13615 - protein, 9 aa, Homo Sapiens
SVIQNLRTV

SEQ ID NO: 13616 - protein, 9 aa, Homo Sapiens
SVIQTVNHV

SEQ ID NO: 13617 - protein, 9 aa, Homo Sapiens
SVIRDIGAI

SEQ ID NO: 13618 - protein, 9 aa, Homo Sapiens
SVIRKIPAL

SEQ ID NO: 13619 - protein, 9 aa, Homo Sapiens
SVISHLLRV

SEQ ID NO: 13620 - protein, 9 aa, Homo Sapiens
SVISKVNSV

SEQ ID NO: 13621 - protein, 9 aa, Homo Sapiens
SVISYLKKL

SEQ ID NO: 13622 - protein, 9 aa, Homo Sapiens
SVITQVFHV

SEQ ID NO: 13623 - protein, 9 aa, Homo Sapiens
SVKDSCEGL

SEQ ID NO: 13624 - protein, 9 aa, Homo Sapiens
SVKEQMDQI

SEQ ID NO: 13625 - protein, 9 aa, Homo Sapiens
SVKEQMETI

SEQ ID NO: 13626 - protein, 9 aa, Homo Sapiens
SVKTKIQKL

SEQ ID NO: 13627 - protein, 9 aa, Homo Sapiens
SVLGAITSV

SEQ ID NO: 13628 - protein, 9 aa, Homo Sapiens
SVNPYIVKL

SEQ ID NO: 13629 - protein, 9 aa, Homo Sapiens
SVPDTVHHV

SEQ ID NO: 13630 - protein, 9 aa, Homo Sapiens
SVPDVTHHL

SEQ ID NO: 13631 - protein, 9 aa, Homo Sapiens
SVPEKIERI

SEQ ID NO: 13632 - protein, 9 aa, Homo Sapiens
SVPELCHHV

SEQ ID NO: 13633 - protein, 9 aa, Homo Sapiens
SVPELKDAL

SEQ ID NO: 13634 - protein, 9 aa, Homo Sapiens
SVSAVTEEA

SEQ ID NO: 13635 - protein, 9 aa, Homo Sapiens
SVSDLADKL

SEQ ID NO: 13636 - protein, 9 aa, Homo Sapiens
SVSHITQHL

SEQ ID NO: 13637 - protein, 9 aa, Homo Sapiens
SVSKLIHYV

SEQ ID NO: 13638 - protein, 9 aa, Homo Sapiens
SVSQINHKL

SEQ ID NO: 13639 - protein, 9 aa, Homo Sapiens
SVSSLAERL

SEQ ID NO: 13640 - protein, 9 aa, Homo Sapiens
SVSSVVHYL

SEQ ID NO: 13641 - protein, 9 aa, Homo Sapiens
SVTELIQAA

SEQ ID NO: 13642 - protein, 9 aa, Homo Sapiens
SVTGKIQKL

SEQ ID NO: 13643 - protein, 9 aa, Homo Sapiens
SVTHLNDHL

SEQ ID NO: 13644 - protein, 9 aa, Homo Sapiens
SVTQLRHML

SEQ ID NO: 13645 - protein, 9 aa, Homo Sapiens
SVTTVNKKL

SEQ ID NO: 13646 - protein, 9 aa, Homo Sapiens
SVVAIDNKI

SEQ ID NO: 13647 - protein, 9 aa, Homo Sapiens
SVVDLTCRL

SEQ ID NO: 13648 - protein, 9 aa, Homo Sapiens
SVVELVNKL

SEQ ID NO: 13649 - protein, 9 aa, Homo Sapiens
SVVENLQRL

SEQ ID NO: 13650 - protein, 9 aa, Homo Sapiens
SVVESVFKL

SEQ ID NO: 13651 - protein, 9 aa, Homo Sapiens
SVVGNLHRL

SEQ ID NO: 13652 - protein, 9 aa, Homo Sapiens
SVVGPVKGV

SEQ ID NO: 13653 - protein, 9 aa, Homo Sapiens
SVVHLYELL

SEQ ID NO: 13654 - protein, 9 aa, Homo Sapiens
SVVSSTEKL

SEQ ID NO: 13655 - protein, 9 aa, Homo Sapiens
SVYGKLRKV

SEQ ID NO: 13656 - protein, 9 aa, Homo Sapiens
SVYPNGHFV

SEQ ID NO: 13657 - protein, 9 aa, Homo Sapiens
SVYPTQEEL

SEQ ID NO: 13658 - protein, 9 aa, Homo Sapiens
TIAQLVHAV

SEQ ID NO: 13659 - protein, 9 aa, Homo Sapiens
TIFAKVDRL

SEQ ID NO: 13660 - protein, 9 aa, Homo Sapiens
TIKETADEL

SEQ ID NO: 13661 - protein, 9 aa, Homo Sapiens
TIMPKDIQL

SEQ ID NO: 13662 - protein, 9 aa, Homo Sapiens
TINELNHCL

SEQ ID NO: 13663 - protein, 9 aa, Homo Sapiens
TINGHNAEV

SEQ ID NO: 13664 - protein, 9 aa, Homo Sapiens
TINGHNCEV

SEQ ID NO: 13665 - protein, 9 aa, Homo Sapiens
TIVDALDTL

SEQ ID NO: 13666 - protein, 9 aa, Homo Sapiens
TIVDHINGA

SEQ ID NO: 13667 - protein, 9 aa, Homo Sapiens
TIVEMLHKA

SEQ ID NO: 13668 - protein, 9 aa, Homo Sapiens
TLAAIIEHL

SEQ ID NO: 13669 - protein, 9 aa, Homo Sapiens
TLADLVHHV

SEQ ID NO: 13670 - protein, 9 aa, Homo Sapiens
TLAESSDHV

SEQ ID NO: 13671 - protein, 9 aa, Homo Sapiens
TLCDLYETL

SEQ ID NO: 13672 - protein, 9 aa, Homo Sapiens
TLFAGAHEL

SEQ ID NO: 13673 - protein, 9 aa, Homo Sapiens
TLFGTFHVA

SEQ ID NO: 13674 - protein, 9 aa, Homo Sapiens
TLFPGTDHI

SEQ ID NO: 13675 - protein, 9 aa, Homo Sapiens
TLIEDILGV

SEQ ID NO: 13676 - protein, 9 aa, Homo Sapiens
TLIRSIPTM

SEQ ID NO: 13677 - protein, 9 aa, Homo Sapiens
TLKEEMESL

SEQ ID NO: 13678 - protein, 9 aa, Homo Sapiens
TLKEYLESL

SEQ ID NO: 13679 - protein, 9 aa, Homo Sapiens
TLKITLDNA

SEQ ID NO: 13680 - protein, 9 aa, Homo Sapiens
TLKRQLDEV

SEQ ID NO: 13681 - protein, 9 aa, Homo Sapiens
TLPELVQRL

SEQ ID NO: 13682 - protein, 9 aa, Homo Sapiens
TLSPVNHSL

SEQ ID NO: 13683 - protein, 9 aa, Homo Sapiens
TLVDEVQEL

SEQ ID NO: 13684 - protein, 9 aa, Homo Sapiens
TLVDFDNHL

SEQ ID NO: 13685 - protein, 9 aa, Homo Sapiens
TLYEHNNEL

SEQ ID NO: 13686 - protein, 9 aa, Homo Sapiens
TMAIIVNKL

SEQ ID NO: 13687 - protein, 9 aa, Homo Sapiens
TMIGEIAAA

SEQ ID NO: 13688 - protein, 9 aa, Homo Sapiens
TMKDHLVRV

SEQ ID NO: 13689 - protein, 9 aa, Homo Sapiens
TMVGEIASA

SEQ ID NO: 13690 - protein, 9 aa, Homo Sapiens
TMVQHCEAL

SEQ ID NO: 13691 - protein, 9 aa, Homo Sapiens
TPVVVPPFL

SEQ ID NO: 13692 - protein, 9 aa, Homo Sapiens
TQADMGEKL

SEQ ID NO: 13693 - protein, 9 aa, Homo Sapiens
TQADWQHRV

SEQ ID NO: 13694 - protein, 9 aa, Homo Sapiens
TQAEQAAQL

SEQ ID NO: 13695 - protein, 9 aa, Homo Sapiens
TQAGIVAHI

SEQ ID NO: 13696 - protein, 9 aa, Homo Sapiens
TQAVIFINT

SEQ ID NO: 13697 - protein, 9 aa, Homo Sapiens
TQCELLTQL

SEQ ID NO: 13698 - protein, 9 aa, Homo Sapiens
TQEEIVAKV

SEQ ID NO: 13699 - protein, 9 aa, Homo Sapiens
TQESVFATV

SEQ ID NO: 13700 - protein, 9 aa, Homo Sapiens
TQFLVCYRL

SEQ ID NO: 13701 - protein, 9 aa, Homo Sapiens
TQIDAQNKL

SEQ ID NO: 13702 - protein, 9 aa, Homo Sapiens
TQIDHYVGI

SEQ ID NO: 13703 - protein, 9 aa, Homo Sapiens
TQIDYIHCL

SEQ ID NO: 13704 - protein, 9 aa, Homo Sapiens
TQNGILHML

SEQ ID NO: 13705 - protein, 9 aa, Homo Sapiens
TQTDCYNNL

SEQ ID NO: 13706 - protein, 9 aa, Homo Sapiens
TSAAIYHVL

SEQ ID NO: 13707 - protein, 9 aa, Homo Sapiens
TTAELNYGL

SEQ ID NO: 13708 - protein, 9 aa, Homo Sapiens
TTFESSHYL

SEQ ID NO: 13709 - protein, 9 aa, Homo Sapiens
TTIEAIHGL

SEQ ID NO: 13710 - protein, 9 aa, Homo Sapiens
TTISKVSQV

SEQ ID NO: 13711 - protein, 9 aa, Homo Sapiens
TTPERIAQI

SEQ ID NO: 13712 - protein, 9 aa, Homo Sapiens
TTSDIDYAL

SEQ ID NO: 13713 - protein, 9 aa, Homo Sapiens
TTVSSLHQA

SEQ ID NO: 13714 - protein, 9 aa, Homo Sapiens
TTVTELQKV

SEQ ID NO: 13715 - protein, 9 aa, Homo Sapiens
TVADHIQKV

SEQ ID NO: 13716 - protein, 9 aa, Homo Sapiens
TVADKIHSV

SEQ ID NO: 13717 - protein, 9 aa, Homo Sapiens
TVADVDEKA

SEQ ID NO: 13718 - protein, 9 aa, Homo Sapiens
TVAEINATM

SEQ ID NO: 13719 - protein, 9 aa, Homo Sapiens
TVAEISQFL

SEQ ID NO: 13720 - protein, 9 aa, Homo Sapiens
TVAEKVDAV

SEQ ID NO: 13721 - protein, 9 aa, Homo Sapiens
TVAELVQFL

SEQ ID NO: 13722 - protein, 9 aa, Homo Sapiens
TVAPFNPTV

SEQ ID NO: 13723 - protein, 9 aa, Homo Sapiens
TVDMESTEV

SEQ ID NO: 13724 - protein, 9 aa, Homo Sapiens
TVEDIAARL

SEQ ID NO: 13725 - protein, 9 aa, Homo Sapiens
TVFEHTFHV

SEQ ID NO: 13726 - protein, 9 aa, Homo Sapiens
TVFGNLHQA

SEQ ID NO: 13727 - protein, 9 aa, Homo Sapiens
TVFKNVDLL

SEQ ID NO: 13728 - protein, 9 aa, Homo Sapiens
TVFSHAQTV

SEQ ID NO: 13729 - protein, 9 aa, Homo Sapiens
TVIAKVNNV

SEQ ID NO: 13730 - protein, 9 aa, Homo Sapiens
TVIARIEAL

SEQ ID NO: 13731 - protein, 9 aa, Homo Sapiens
TVIDQIPFL

SEQ ID NO: 13732 - protein, 9 aa, Homo Sapiens
TVIEDCNKV

SEQ ID NO: 13733 - protein, 9 aa, Homo Sapiens
TVIEKVQIA

SEQ ID NO: 13734 - protein, 9 aa, Homo Sapiens
TVIENIHTI

SEQ ID NO: 13735 - protein, 9 aa, Homo Sapiens
TVIHHVHSL

SEQ ID NO: 13736 - protein, 9 aa, Homo Sapiens
TVIKLIERL

SEQ ID NO: 13737 - protein, 9 aa, Homo Sapiens
TVIQFLERI

SEQ ID NO: 13738 - protein, 9 aa, Homo Sapiens
TVIQTVKEV

SEQ ID NO: 13739 - protein, 9 aa, Homo Sapiens
TVIRPFPGL

SEQ ID NO: 13740 - protein, 9 aa, Homo Sapiens
TVKDTMEFI

SEQ ID NO: 13741 - protein, 9 aa, Homo Sapiens
TVKENLDQL

SEQ ID NO: 13742 - protein, 9 aa, Homo Sapiens
TVKNIMDSV

SEQ ID NO: 13743 - protein, 9 aa, Homo Sapiens
TVMDEIHTV

SEQ ID NO: 13744 - protein, 9 aa, Homo Sapiens
TVMGRIATL

SEQ ID NO: 13745 - protein, 9 aa, Homo Sapiens
TVPDEIQEV

SEQ ID NO: 13746 - protein, 9 aa, Homo Sapiens
TVPEHIQQL

SEQ ID NO: 13747 - protein, 9 aa, Homo Sapiens
TVPELTQQV

SEQ ID NO: 13748 - protein, 9 aa, Homo Sapiens
TVPVKIDKV

SEQ ID NO: 13749 - protein, 9 aa, Homo Sapiens
TVREQCEQL

SEQ ID NO: 13750 - protein, 9 aa, Homo Sapiens
TVSPLFQKL

SEQ ID NO: 13751 - protein, 9 aa, Homo Sapiens
TVTELSDFL

SEQ ID NO: 13752 - protein, 9 aa, Homo Sapiens
TVTGKLVHA

SEQ ID NO: 13753 - protein, 9 aa, Homo Sapiens
TVVERLVKV

SEQ ID NO: 13754 - protein, 9 aa, Homo Sapiens
TVVKAISGV

SEQ ID NO: 13755 - protein, 9 aa, Homo Sapiens
TVVMYLHHV

SEQ ID NO: 13756 - protein, 9 aa, Homo Sapiens
TVVPSISKL

SEQ ID NO: 13757 - protein, 9 aa, Homo Sapiens
TVVPWDHAL

SEQ ID NO: 13758 - protein, 9 aa, Homo Sapiens
TVYGGSDEL

SEQ ID NO: 13759 - protein, 9 aa, Homo Sapiens
TVYSGEEKL

SEQ ID NO: 13760 - protein, 9 aa, Homo Sapiens
TYLGAEALL

SEQ ID NO: 13761 - protein, 9 aa, Homo Sapiens
VAAPQVQQV

SEQ ID NO: 13762 - protein, 9 aa, Homo Sapiens
VAAPYIAKA

SEQ ID NO: 13763 - protein, 9 aa, Homo Sapiens
VACGANHTL

SEQ ID NO: 13764 - protein, 9 aa, Homo Sapiens
VACGLNHTL

SEQ ID NO: 13765 - protein, 9 aa, Homo Sapiens
VAIEHLDKI

SEQ ID NO: 13766 - protein, 9 aa, Homo Sapiens
VAPFPEVFG

SEQ ID NO: 13767 - protein, 9 aa, Homo Sapiens
VAVPLYDTL

SEQ ID NO: 13768 - protein, 9 aa, Homo Sapiens
VDAEAVHKL

SEQ ID NO: 13769 - protein, 9 aa, Homo Sapiens
VEELKPTPE

SEQ ID NO: 13770 - protein, 9 aa, Homo Sapiens
VIAAVSHEL

SEQ ID NO: 13771 - protein, 9 aa, Homo Sapiens
VIAEQIQHL

SEQ ID NO: 13772 - protein, 9 aa, Homo Sapiens
VIANINNCL

SEQ ID NO: 13773 - protein, 9 aa, Homo Sapiens
VIAPLTEEL

SEQ ID NO: 13774 - protein, 9 aa, Homo Sapiens
VIIKYLESL

SEQ ID NO: 13775 - protein, 9 aa, Homo Sapiens
VIINQIYEA

SEQ ID NO: 13776 - protein, 9 aa, Homo Sapiens
VIPELAQEL

SEQ ID NO: 13777 - protein, 9 aa, Homo Sapiens
VIPPFCNLL

SEQ ID NO: 13778 - protein, 9 aa, Homo Sapiens
VISGINEKL

SEQ ID NO: 13779 - protein, 9 aa, Homo Sapiens
VISPLNQLL

SEQ ID NO: 13780 - protein, 9 aa, Homo Sapiens
VIVPLYDTL

SEQ ID NO: 13781 - protein, 9 aa, Homo Sapiens
VKPEEHEQV

SEQ ID NO: 13782 - protein, 9 aa, Homo Sapiens
VLAFLVHEL

SEQ ID NO: 13783 - protein, 9 aa, Homo Sapiens
VLAGHDNRV

SEQ ID NO: 13784 - protein, 9 aa, Homo Sapiens
VLAPMFERL

SEQ ID NO: 13785 - protein, 9 aa, Homo Sapiens
VLAYFLPEA

SEQ ID NO: 13786 - protein, 9 aa, Homo Sapiens
VLCELINAL

SEQ ID NO: 13787 - protein, 9 aa, Homo Sapiens
VLFGLLREV

SEQ ID NO: 13788 - protein, 9 aa, Homo Sapiens
VLFNKLTYL

SEQ ID NO: 13789 - protein, 9 aa, Homo Sapiens
VLGPKIEAV

SEQ ID NO: 13790 - protein, 9 aa, Homo Sapiens
VLIDEVESL

SEQ ID NO: 13791 - protein, 9 aa, Homo Sapiens
VLIKTAEEL

SEQ ID NO: 13792 - protein, 9 aa, Homo Sapiens
VLIPKLPQL

SEQ ID NO: 13793 - protein, 9 aa, Homo Sapiens
VLKEIVERV

SEQ ID NO: 13794 - protein, 9 aa, Homo Sapiens
VLKEKLDSL

SEQ ID NO: 13795 - protein, 9 aa, Homo Sapiens
VLKENADFL

SEQ ID NO: 13796 - protein, 9 aa, Homo Sapiens
VLKESLDQL

SEQ ID NO: 13797 - protein, 9 aa, Homo Sapiens
VLKEYLDNV

SEQ ID NO: 13798 - protein, 9 aa, Homo Sapiens
VLKGDVEKL

SEQ ID NO: 13799 - protein, 9 aa, Homo Sapiens
VLKVFLENV

SEQ ID NO: 13800 - protein, 9 aa, Homo Sapiens
VLPAFTSNL

SEQ ID NO: 13801 - protein, 9 aa, Homo Sapiens
VLPETCEEL

SEQ ID NO: 13802 - protein, 9 aa, Homo Sapiens
VLPLLLMAS

SEQ ID NO: 13803 - protein, 9 aa, Homo Sapiens
VLPSIVNEV

SEQ ID NO: 13804 - protein, 9 aa, Homo Sapiens
VLREGAESL

SEQ ID NO: 13805 - protein, 9 aa, Homo Sapiens
VLSDIIQNL

SEQ ID NO: 13806 - protein, 9 aa, Homo Sapiens
VLVEMVQAL

SEQ ID NO: 13807 - protein, 9 aa, Homo Sapiens
VLYGDVEEL

SEQ ID NO: 13808 - protein, 9 aa, Homo Sapiens
VLYPGCDTL

SEQ ID NO: 13809 - protein, 9 aa, Homo Sapiens
VMKKIIETV

SEQ ID NO: 13810 - protein, 9 aa, Homo Sapiens
VPGEIVESL

SEQ ID NO: 13811 - protein, 9 aa, Homo Sapiens
VPQLEIVPN

SEQ ID NO: 13812 - protein, 9 aa, Homo Sapiens
VQADAPHGV

SEQ ID NO: 13813 - protein, 9 aa, Homo Sapiens
VQASHFEGL

SEQ ID NO: 13814 - protein, 9 aa, Homo Sapiens
VQEDFSVRV

SEQ ID NO: 13815 - protein, 9 aa, Homo Sapiens
VQFEHGYRL

SEQ ID NO: 13816 - protein, 9 aa, Homo Sapiens
VQFPSHYTL

SEQ ID NO: 13817 - protein, 9 aa, Homo Sapiens
VQIEEVRQV

SEQ ID NO: 13818 - protein, 9 aa, Homo Sapiens
VQIEHISSL

SEQ ID NO: 13819 - protein, 9 aa, Homo Sapiens
VQIGDIVTV

SEQ ID NO: 13820 - protein, 9 aa, Homo Sapiens
VQIPFFAKL

SEQ ID NO: 13821 - protein, 9 aa, Homo Sapiens
VQLGYSVLS

SEQ ID NO: 13822 - protein, 9 aa, Homo Sapiens
VQNGKVIGV

SEQ ID NO: 13823 - protein, 9 aa, Homo Sapiens
VQPEHIQYL

SEQ ID NO: 13824 - protein, 9 aa, Homo Sapiens
VQSGIKVRL

SEQ ID NO: 13825 - protein, 9 aa, Homo Sapiens
VQSGLRILL

SEQ ID NO: 13826 - protein, 9 aa, Homo Sapiens
VQTAIKSEL

SEQ ID NO: 13827 - protein, 9 aa, Homo Sapiens
VQTEVNREL

SEQ ID NO: 13828 - protein, 9 aa, Homo Sapiens
VQTHFIHTL

SEQ ID NO: 13829 - protein, 9 aa, Homo Sapiens
VSTSHTTIS

SEQ ID NO: 13830 - protein, 9 aa, Homo Sapiens
VTAPKAERL

SEQ ID NO: 13831 - protein, 9 aa, Homo Sapiens
VTFSENHGV

SEQ ID NO: 13832 - protein, 9 aa, Homo Sapiens
VTIEDVQKL

SEQ ID NO: 13833 - protein, 9 aa, Homo Sapiens
VTIRLLETI

SEQ ID NO: 13834 - protein, 9 aa, Homo Sapiens
VTISSIEKL

SEQ ID NO: 13835 - protein, 9 aa, Homo Sapiens
VTQTHIAEA

SEQ ID NO: 13836 - protein, 9 aa, Homo Sapiens
VTVENVQEL

SEQ ID NO: 13837 - protein, 9 aa, Homo Sapiens
VVAEELENV

SEQ ID NO: 13838 - protein, 9 aa, Homo Sapiens
VVAEEVAAL

SEQ ID NO: 13839 - protein, 9 aa, Homo Sapiens
VVAEKIQRI

SEQ ID NO: 13840 - protein, 9 aa, Homo Sapiens
VVAITVQEL

SEQ ID NO: 13841 - protein, 9 aa, Homo Sapiens
VVAPSIIAA

SEQ ID NO: 13842 - protein, 9 aa, Homo Sapiens
VVAQEAQSL

SEQ ID NO: 13843 - protein, 9 aa, Homo Sapiens
VVCGLIFRL

SEQ ID NO: 13844 - protein, 9 aa, Homo Sapiens
VVIGSIRHV

SEQ ID NO: 13845 - protein, 9 aa, Homo Sapiens
VVIKKLNEI

SEQ ID NO: 13846 - protein, 9 aa, Homo Sapiens
VVKEKLTGL

SEQ ID NO: 13847 - protein, 9 aa, Homo Sapiens
VVKGKVEYL

SEQ ID NO: 13848 - protein, 9 aa, Homo Sapiens
VVMETANRV

SEQ ID NO: 13849 - protein, 9 aa, Homo Sapiens
VVMNVVHQL

SEQ ID NO: 13850 - protein, 9 aa, Homo Sapiens
VVNETVEKL

SEQ ID NO: 13851 - protein, 9 aa, Homo Sapiens
VVPDSAHKL

SEQ ID NO: 13852 - protein, 9 aa, Homo Sapiens
VVPPFLQPE

SEQ ID NO: 13853 - protein, 9 aa, Homo Sapiens
VVSAIVDTL

SEQ ID NO: 13854 - protein, 9 aa, Homo Sapiens
VVSGVVSKV

SEQ ID NO: 13855 - protein, 9 aa, Homo Sapiens
VVSPVNVHI

SEQ ID NO: 13856 - protein, 9 aa, Homo Sapiens
VVVDPIQSV

SEQ ID NO: 13857 - protein, 9 aa, Homo Sapiens
VVVGDLVEV

SEQ ID NO: 13858 - protein, 9 aa, Homo Sapiens
VVVGGCERV

SEQ ID NO: 13859 - protein, 9 aa, Homo Sapiens
VVYEDIFDA

SEQ ID NO: 13860 - protein, 9 aa, Homo Sapiens
VVYERCEKL

SEQ ID NO: 13861 - protein, 9 aa, Homo Sapiens
WLVDHVYAI

SEQ ID NO: 13862 - protein, 9 aa, Homo Sapiens
WQYIKTHKL

SEQ ID NO: 13863 - protein, 9 aa, Homo Sapiens
WVAERVELL

SEQ ID NO: 13864 - protein, 9 aa, Homo Sapiens
WVYPFLEHI

SEQ ID NO: 13865 - protein, 9 aa, Homo Sapiens
YAFGGGCEL

SEQ ID NO: 13866 - protein, 9 aa, Homo Sapiens
YAFPKAVSV

SEQ ID NO: 13867 - protein, 9 aa, Homo Sapiens
YAFPKSITV

SEQ ID NO: 13868 - protein, 9 aa, Homo Sapiens
YAFPLAHSL

SEQ ID NO: 13869 - protein, 9 aa, Homo Sapiens
YAFVHMERA

SEQ ID NO: 13870 - protein, 9 aa, Homo Sapiens
YAIEKIERI

SEQ ID NO: 13871 - protein, 9 aa, Homo Sapiens
YAIKNIHGV

SEQ ID NO: 13872 - protein, 9 aa, Homo Sapiens
YAITTLHNL

SEQ ID NO: 13873 - protein, 9 aa, Homo Sapiens
YASENVNKL

SEQ ID NO: 13874 - protein, 9 aa, Homo Sapiens
YASGINVNL

SEQ ID NO: 13875 - protein, 9 aa, Homo Sapiens
YASPDLSKL

SEQ ID NO: 13876 - protein, 9 aa, Homo Sapiens
YAVELFEGL

SEQ ID NO: 13877 - protein, 9 aa, Homo Sapiens
YAYDGKDYI

SEQ ID NO: 13878 - protein, 9 aa, Homo Sapiens
YAYEAVEQL

SEQ ID NO: 13879 - protein, 9 aa, Homo Sapiens
YGAEALERM

SEQ ID NO: 13880 - protein, 9 aa, Homo Sapiens
YGMERVWCV

SEQ ID NO: 13881 - protein, 9 aa, Homo Sapiens
YGSHIQALL

SEQ ID NO: 13882 - protein, 9 aa, Homo Sapiens
YHADIYDKV

SEQ ID NO: 13883 - protein, 9 aa, Homo Sapiens
YIAEEYSRL

SEQ ID NO: 13884 - protein, 9 aa, Homo Sapiens
YIAHLRQIL

SEQ ID NO: 13885 - protein, 9 aa, Homo Sapiens
YIAPLFDKF

SEQ ID NO: 13886 - protein, 9 aa, Homo Sapiens
YIAPLKALV

SEQ ID NO: 13887 - protein, 9 aa, Homo Sapiens
YIATIHSRL

SEQ ID NO: 13888 - protein, 9 aa, Homo Sapiens
YIFDNCHEL

SEQ ID NO: 13889 - protein, 9 aa, Homo Sapiens
YIGPDTPAL

SEQ ID NO: 13890 - protein, 9 aa, Homo Sapiens
YIIELNHMI

SEQ ID NO: 13891 - protein, 9 aa, Homo Sapiens
YIIKDLEKL

SEQ ID NO: 13892 - protein, 9 aa, Homo Sapiens
YIITEIPSL

SEQ ID NO: 13893 - protein, 9 aa, Homo Sapiens
YIKRLLETL

SEQ ID NO: 13894 - protein, 9 aa, Homo Sapiens
YIKTELISV

SEQ ID NO: 13895 - protein, 9 aa, Homo Sapiens
YIMSYISRV

SEQ ID NO: 13896 - protein, 9 aa, Homo Sapiens
YIPEAILNL

SEQ ID NO: 13897 - protein, 9 aa, Homo Sapiens
YIPEHIKKL

SEQ ID NO: 13898 - protein, 9 aa, Homo Sapiens
YIPGVDVKL

SEQ ID NO: 13899 - protein, 9 aa, Homo Sapiens
YIPQIVQAL

SEQ ID NO: 13900 - protein, 9 aa, Homo Sapiens
YIPRTLNEV

SEQ ID NO: 13901 - protein, 9 aa, Homo Sapiens
YIPSVLHDV

SEQ ID NO: 13902 - protein, 9 aa, Homo Sapiens
YIPTELDQV

SEQ ID NO: 13903 - protein, 9 aa, Homo Sapiens
YIPTFICSV

SEQ ID NO: 13904 - protein, 9 aa, Homo Sapiens
YISDGKEYL

SEQ ID NO: 13905 - protein, 9 aa, Homo Sapiens
YITELANAL

SEQ ID NO: 13906 - protein, 9 aa, Homo Sapiens
YIVDLLTHL

SEQ ID NO: 13907 - protein, 9 aa, Homo Sapiens
YIYHGTVKL

SEQ ID NO: 13908 - protein, 9 aa, Homo Sapiens
YLADIFTKL

SEQ ID NO: 13909 - protein, 9 aa, Homo Sapiens
YLADLYHFV

SEQ ID NO: 13910 - protein, 9 aa, Homo Sapiens
YLADVTNAL

SEQ ID NO: 13911 - protein, 9 aa, Homo Sapiens
YLAHAIHQV

SEQ ID NO: 13912 - protein, 9 aa, Homo Sapiens
YLAHFIEGL

SEQ ID NO: 13913 - protein, 9 aa, Homo Sapiens
YLAHLAHHL

SEQ ID NO: 13914 - protein, 9 aa, Homo Sapiens
YLAPHVRTL

SEQ ID NO: 13915 - protein, 9 aa, Homo Sapiens
YLCYEVERL

SEQ ID NO: 13916 - protein, 9 aa, Homo Sapiens
YLEDILAKL

SEQ ID NO: 13917 - protein, 9 aa, Homo Sapiens
YLFCDDHKL

SEQ ID NO: 13918 - protein, 9 aa, Homo Sapiens
YLFERIKEL

SEQ ID NO: 13919 - protein, 9 aa, Homo Sapiens
YLGPHIASV

SEQ ID NO: 13920 - protein, 9 aa, Homo Sapiens
YLIASIDHL

SEQ ID NO: 13921 - protein, 9 aa, Homo Sapiens
YLIELIDRV

SEQ ID NO: 13922 - protein, 9 aa, Homo Sapiens
YLIKDIRFL

SEQ ID NO: 13923 - protein, 9 aa, Homo Sapiens
YLINEIDRI

SEQ ID NO: 13924 - protein, 9 aa, Homo Sapiens
YLIPLLERL

SEQ ID NO: 13925 - protein, 9 aa, Homo Sapiens
YLIPNIKHL

SEQ ID NO: 13926 - protein, 9 aa, Homo Sapiens
YLITLLEHL

SEQ ID NO: 13927 - protein, 9 aa, Homo Sapiens
YLKDEIEEL

SEQ ID NO: 13928 - protein, 9 aa, Homo Sapiens
YLKDKLDET

SEQ ID NO: 13929 - protein, 9 aa, Homo Sapiens
YLKDLIEEV

SEQ ID NO: 13930 - protein, 9 aa, Homo Sapiens
YLKEILEQL

SEQ ID NO: 13931 - protein, 9 aa, Homo Sapiens
YLKSSDNRL

SEQ ID NO: 13932 - protein, 9 aa, Homo Sapiens
YLLESVNKL

SEQ ID NO: 13933 - protein, 9 aa, Homo Sapiens
YLNDFTHEI

SEQ ID NO: 13934 - protein, 9 aa, Homo Sapiens
YLNDLIHSV

SEQ ID NO: 13935 - protein, 9 aa, Homo Sapiens
YLNKHIQKV

SEQ ID NO: 13936 - protein, 9 aa, Homo Sapiens
YLPDIQERL

SEQ ID NO: 13937 - protein, 9 aa, Homo Sapiens
YLPEVKDLL

SEQ ID NO: 13938 - protein, 9 aa, Homo Sapiens
YLPRHSIGL

SEQ ID NO: 13939 - protein, 9 aa, Homo Sapiens
YLPTHTSLL

SEQ ID NO: 13940 - protein, 9 aa, Homo Sapiens
YLPTKLFQA

SEQ ID NO: 13941 - protein, 9 aa, Homo Sapiens
YLPYPIHQV

SEQ ID NO: 13942 - protein, 9 aa, Homo Sapiens
YLSAKVEAL

SEQ ID NO: 13943 - protein, 9 aa, Homo Sapiens
YLSDPCPGL

SEQ ID NO: 13944 - protein, 9 aa, Homo Sapiens
YLSEEVQAV

SEQ ID NO: 13945 - protein, 9 aa, Homo Sapiens
YLSGIAHFL

SEQ ID NO: 13946 - protein, 9 aa, Homo Sapiens
YLSNADERL

SEQ ID NO: 13947 - protein, 9 aa, Homo Sapiens
YLSWKAHRL

SEQ ID NO: 13948 - protein, 9 aa, Homo Sapiens
YLVEDIQHI

SEQ ID NO: 13949 - protein, 9 aa, Homo Sapiens
YLVPELDGV

SEQ ID NO: 13950 - protein, 9 aa, Homo Sapiens
YLVQDLKCL

SEQ ID NO: 13951 - protein, 9 aa, Homo Sapiens
YLVVKIEKV

SEQ ID NO: 13952 - protein, 9 aa, Homo Sapiens
YLYPDITRL

SEQ ID NO: 13953 - protein, 9 aa, Homo Sapiens
YMAELIERL

SEQ ID NO: 13954 - protein, 9 aa, Homo Sapiens
YMAEREDEL

SEQ ID NO: 13955 - protein, 9 aa, Homo Sapiens
YMAPEVVEA

SEQ ID NO: 13956 - protein, 9 aa, Homo Sapiens
YMIAHITGL

SEQ ID NO: 13957 - protein, 9 aa, Homo Sapiens
YQAEAREAL

SEQ ID NO: 13958 - protein, 9 aa, Homo Sapiens
YQAEIPDRL

SEQ ID NO: 13959 - protein, 9 aa, Homo Sapiens
YQAHYGEQL

SEQ ID NO: 13960 - protein, 9 aa, Homo Sapiens
YQALALWKL

SEQ ID NO: 13961 - protein, 9 aa, Homo Sapiens
YQAPDMDTL

SEQ ID NO: 13962 - protein, 9 aa, Homo Sapiens
YQAQHDDEL

SEQ ID NO: 13963 - protein, 9 aa, Homo Sapiens
YQFGEIRTI

SEQ ID NO: 13964 - protein, 9 aa, Homo Sapiens
YQFSKNFSL

SEQ ID NO: 13965 - protein, 9 aa, Homo Sapiens
YQGEGAHHI

SEQ ID NO: 13966 - protein, 9 aa, Homo Sapiens
YQHGGVTGL

SEQ ID NO: 13967 - protein, 9 aa, Homo Sapiens
YQHKEEYQL

SEQ ID NO: 13968 - protein, 9 aa, Homo Sapiens
YQHYMADRL

SEQ ID NO: 13969 - protein, 9 aa, Homo Sapiens
YQIAEQFRV

SEQ ID NO: 13970 - protein, 9 aa, Homo Sapiens
YQIDSVVRA

SEQ ID NO: 13971 - protein, 9 aa, Homo Sapiens
YQIHKEYLL

SEQ ID NO: 13972 - protein, 9 aa, Homo Sapiens
YQIKEMMQL

SEQ ID NO: 13973 - protein, 9 aa, Homo Sapiens
YQIVPSHKL

SEQ ID NO: 13974 - protein, 9 aa, Homo Sapiens
YQNQEIHNL

SEQ ID NO: 13975 - protein, 9 aa, Homo Sapiens
YQPKIQQFL

SEQ ID NO: 13976 - protein, 9 aa, Homo Sapiens
YQQKEIEFL

SEQ ID NO: 13977 - protein, 9 aa, Homo Sapiens
YQQQQQSEL

SEQ ID NO: 13978 - protein, 9 aa, Homo Sapiens
YQRELLETL

SEQ ID NO: 13979 - protein, 9 aa, Homo Sapiens
YQSDFWQHL

SEQ ID NO: 13980 - protein, 9 aa, Homo Sapiens
YQSGCLYRL

SEQ ID NO: 13981 - protein, 9 aa, Homo Sapiens
YQSIEFSRL

SEQ ID NO: 13982 - protein, 9 aa, Homo Sapiens
YQSKVRELI

SEQ ID NO: 13983 - protein, 9 aa, Homo Sapiens
YQTEIGQTL

SEQ ID NO: 13984 - protein, 9 aa, Homo Sapiens
YQTEKGITV

SEQ ID NO: 13985 - protein, 9 aa, Homo Sapiens
YQTPFNKEV

SEQ ID NO: 13986 - protein, 9 aa, Homo Sapiens
YQTPLHLAV

SEQ ID NO: 13987 - protein, 9 aa, Homo Sapiens
YQTQLIQRV

SEQ ID NO: 13988 - protein, 9 aa, Homo Sapiens
YQVDSRTYL

SEQ ID NO: 13989 - protein, 9 aa, Homo Sapiens
YQVEGMEWL

SEQ ID NO: 13990 - protein, 9 aa, Homo Sapiens
YQVGQLYSV

SEQ ID NO: 13991 - protein, 9 aa, Homo Sapiens
YQVGVHYEL

SEQ ID NO: 13992 - protein, 9 aa, Homo Sapiens
YQVVQFNRL

SEQ ID NO: 13993 - protein, 9 aa, Homo Sapiens
YQYPRPLLI

SEQ ID NO: 13994 - protein, 9 aa, Homo Sapiens
YQYPVIIHL

SEQ ID NO: 13995 - protein, 9 aa, Homo Sapiens
YQYTSPDFL

SEQ ID NO: 13996 - protein, 9 aa, Homo Sapiens
YSAAILEYL

SEQ ID NO: 13997 - protein, 9 aa, Homo Sapiens
YSFHKFHYL

SEQ ID NO: 13998 - protein, 9 aa, Homo Sapiens
YSKEGWEYV

SEQ ID NO: 13999 - protein, 9 aa, Homo Sapiens
YTAEIKQNL

SEQ ID NO: 14000 - protein, 9 aa, Homo Sapiens
YTAPTAIRL

SEQ ID NO: 14001 - protein, 9 aa, Homo Sapiens
YTCERNDQL

SEQ ID NO: 14002 - protein, 9 aa, Homo Sapiens
YTFPLAEKV

SEQ ID NO: 14003 - protein, 9 aa, Homo Sapiens
YTIPLAIKL

SEQ ID NO: 14004 - protein, 9 aa, Homo Sapiens
YTIQSIERI

SEQ ID NO: 14005 - protein, 9 aa, Homo Sapiens
YTPEEIEKL

SEQ ID NO: 14006 - protein, 9 aa, Homo Sapiens
YTRESTEFL

SEQ ID NO: 14007 - protein, 9 aa, Homo Sapiens
YTSESGDRL

SEQ ID NO: 14008 - protein, 9 aa, Homo Sapiens
YTSPVNPAV

SEQ ID NO: 14009 - protein, 9 aa, Homo Sapiens
YTSRIVVRL

SEQ ID NO: 14010 - protein, 9 aa, Homo Sapiens
YTTDFIYQL

SEQ ID NO: 14011 - protein, 9 aa, Homo Sapiens
YTVEDIQRL

SEQ ID NO: 14012 - protein, 9 aa, Homo Sapiens
YTVILIERA

SEQ ID NO: 14013 - protein, 9 aa, Homo Sapiens
YVADLGDIL

SEQ ID NO: 14014 - protein, 9 aa, Homo Sapiens
YVADLVHSA

SEQ ID NO: 14015 - protein, 9 aa, Homo Sapiens
YVAEAEEKL

SEQ ID NO: 14016 - protein, 9 aa, Homo Sapiens
YVAELIQQL

SEQ ID NO: 14017 - protein, 9 aa, Homo Sapiens
YVAEREDEL

SEQ ID NO: 14018 - protein, 9 aa, Homo Sapiens
YVAPHLNNL

SEQ ID NO: 14019 - protein, 9 aa, Homo Sapiens
YVASNQHEV

SEQ ID NO: 14020 - protein, 9 aa, Homo Sapiens
YVFPGVTRL

SEQ ID NO: 14021 - protein, 9 aa, Homo Sapiens
YVFSHNHKL

SEQ ID NO: 14022 - protein, 9 aa, Homo Sapiens
YVHMVTHFI

SEQ ID NO: 14023 - protein, 9 aa, Homo Sapiens
YVHPFIFAL

SEQ ID NO: 14024 - protein, 9 aa, Homo Sapiens
YVIAYIRDL

SEQ ID NO: 14025 - protein, 9 aa, Homo Sapiens
YVIELQHVV

SEQ ID NO: 14026 - protein, 9 aa, Homo Sapiens
YVIESDEDL

SEQ ID NO: 14027 - protein, 9 aa, Homo Sapiens
YVIGGFDGL

SEQ ID NO: 14028 - protein, 9 aa, Homo Sapiens
YVINVTTHL

SEQ ID NO: 14029 - protein, 9 aa, Homo Sapiens
YVITDLTQL

SEQ ID NO: 14030 - protein, 9 aa, Homo Sapiens
YVKDRVEKV

SEQ ID NO: 14031 - protein, 9 aa, Homo Sapiens
YVKEELHQL

SEQ ID NO: 14032 - protein, 9 aa, Homo Sapiens
YVNAMNDKI

SEQ ID NO: 14033 - protein, 9 aa, Homo Sapiens
YVNGEIQKA

SEQ ID NO: 14034 - protein, 9 aa, Homo Sapiens
YVPAEVCRL

SEQ ID NO: 14035 - protein, 9 aa, Homo Sapiens
YVPDIVRCV

SEQ ID NO: 14036 - protein, 9 aa, Homo Sapiens
YVPETVYRV

SEQ ID NO: 14037 - protein, 9 aa, Homo Sapiens
YVRDCVEAL

SEQ ID NO: 14038 - protein, 9 aa, Homo Sapiens
YVSEILEKV

SEQ ID NO: 14039 - protein, 9 aa, Homo Sapiens
YVSKYIDYI

SEQ ID NO: 14040 - protein, 9 aa, Homo Sapiens
YVSKYINYI

SEQ ID NO: 14041 - protein, 9 aa, Homo Sapiens
YVSPRILTA

SEQ ID NO: 14042 - protein, 9 aa, Homo Sapiens
YVTEELPQL

SEQ ID NO: 14043 - protein, 9 aa, Homo Sapiens
YVTELAELI

SEQ ID NO: 14044 - protein, 9 aa, Homo Sapiens
YVTELTDRI

SEQ ID NO: 14045 - protein, 9 aa, Homo Sapiens
YVTELTHRI

SEQ ID NO: 14046 - protein, 9 aa, Homo Sapiens
YVTPVNRNV

SEQ ID NO: 14047 - protein, 9 aa, Homo Sapiens
YVTQINRLL

SEQ ID NO: 14048 - protein, 9 aa, Homo Sapiens
YVVAKLDDL

SEQ ID NO: 14049 - protein, 9 aa, Homo Sapiens
YVVDNIDHL

SEQ ID NO: 14050 - protein, 9 aa, Homo Sapiens
YVVPFVAKV

SEQ ID NO: 14051 - protein, 9 aa, Homo Sapiens
YVVPYTIHL

SEQ ID NO: 14052 - protein, 9 aa, Homo Sapiens
YVYEFRDKL

SEQ ID NO: 14053 - protein, 9 aa, Homo Sapiens
YVYEYLLHV

SEQ ID NO: 14054 - protein, 10 aa, Homo Sapiens
AAFDFLLQRV

SEQ ID NO: 14055 - protein, 10 aa, Homo Sapiens
AAFEFDIHQV

SEQ ID NO: 14056 - protein, 10 aa, Homo Sapiens
AAFGGTFKKV

SEQ ID NO: 14057 - protein, 10 aa, Homo Sapiens
AAFGRDLFLA

SEQ ID NO: 14058 - protein, 10 aa, Homo Sapiens
AAFLGHLEVL

SEQ ID NO: 14059 - protein, 10 aa, Homo Sapiens
AAFQETLETL

SEQ ID NO: 14060 - protein, 10 aa, Homo Sapiens
AAFVEELDKV

SEQ ID NO: 14061 - protein, 10 aa, Homo Sapiens
AAFYHHLPAA

SEQ ID NO: 14062 - protein, 10 aa, Homo Sapiens
AALALLFAIH

SEQ ID NO: 14063 - protein, 10 aa, Homo Sapiens
AAYNGHCEAL

SEQ ID NO: 14064 - protein, 10 aa, Homo Sapiens
AAYVGDLQTL

SEQ ID NO: 14065 - protein, 10 aa, Homo Sapiens
AGYQGEITSV

SEQ ID NO: 14066 - protein, 10 aa, Homo Sapiens
AGYTDNLVRV

SEQ ID NO: 14067 - protein, 10 aa, Homo Sapiens
AIFDRVLTEL

SEQ ID NO: 14068 - protein, 10 aa, Homo Sapiens
AIFPFNIHEN

SEQ ID NO: 14069 - protein, 10 aa, Homo Sapiens
AIFSEDLENL

SEQ ID NO: 14070 - protein, 10 aa, Homo Sapiens
AIIANGITKA

SEQ ID NO: 14071 - protein, 10 aa, Homo Sapiens
AIIDGKIFCV

SEQ ID NO: 14072 - protein, 10 aa, Homo Sapiens
AIPGFTINRV

SEQ ID NO: 14073 - protein, 10 aa, Homo Sapiens
AIYDHINEGV

SEQ ID NO: 14074 - protein, 10 aa, Homo Sapiens
ALAPASLTSA

SEQ ID NO: 14075 - protein, 10 aa, Homo Sapiens
ALFPAFIHQS

SEQ ID NO: 14076 - protein, 10 aa, Homo Sapiens
ALFPAPLAQI

SEQ ID NO: 14077 - protein, 10 aa, Homo Sapiens
ALFPGDVDRL

SEQ ID NO: 14078 - protein, 10 aa, Homo Sapiens
ALFQPHLINV

SEQ ID NO: 14079 - protein, 10 aa, Homo Sapiens
ALFTGGMKES

SEQ ID NO: 14080 - protein, 10 aa, Homo Sapiens
ALIDEQILCV

SEQ ID NO: 14081 - protein, 10 aa, Homo Sapiens
ALPDQGIAKA

SEQ ID NO: 14082 - protein, 10 aa, Homo Sapiens
ALYDHLMDFL

SEQ ID NO: 14083 - protein, 10 aa, Homo Sapiens
ALYNKEMECL

SEQ ID NO: 14084 - protein, 10 aa, Homo Sapiens
ALYPGQLVQL

SEQ ID NO: 14085 - protein, 10 aa, Homo Sapiens
AMFDHIPVGV

SEQ ID NO: 14086 - protein, 10 aa, Homo Sapiens
AMFEHEMEES

SEQ ID NO: 14087 - protein, 10 aa, Homo Sapiens
AMFEPDMQEA

SEQ ID NO: 14088 - protein, 10 aa, Homo Sapiens
AQAEDMNVKL

SEQ ID NO: 14089 - protein, 10 aa, Homo Sapiens
AQAEIEQYRL

SEQ ID NO: 14090 - protein, 10 aa, Homo Sapiens
AQAESNKAFL

SEQ ID NO: 14091 - protein, 10 aa, Homo Sapiens
AQAEVYKELR

SEQ ID NO: 14092 - protein, 10 aa, Homo Sapiens
AQAGEFGDRL

SEQ ID NO: 14093 - protein, 10 aa, Homo Sapiens
AQAKEENVGL

SEQ ID NO: 14094 - protein, 10 aa, Homo Sapiens
AQFAEATQRL

SEQ ID NO: 14095 - protein, 10 aa, Homo Sapiens
AQFAQKTEAL

SEQ ID NO: 14096 - protein, 10 aa, Homo Sapiens
AQFEESMIAA

SEQ ID NO: 14097 - protein, 10 aa, Homo Sapiens
AQIAEGMAYI

SEQ ID NO: 14098 - protein, 10 aa, Homo Sapiens
AQIEGGVHGL

SEQ ID NO: 14099 - protein, 10 aa, Homo Sapiens
AQMEVASFLL

SEQ ID NO: 14100 - protein, 10 aa, Homo Sapiens
AQVKPDGTYV

SEQ ID NO: 14101 - protein, 10 aa, Homo Sapiens
AQYEHDLEVA

SEQ ID NO: 14102 - protein, 10 aa, Homo Sapiens
AQYSGAQVRV

SEQ ID NO: 14103 - protein, 10 aa, Homo Sapiens
ASFNDTFVHV

SEQ ID NO: 14104 - protein, 10 aa, Homo Sapiens
ATFPKEIQML

SEQ ID NO: 14105 - protein, 10 aa, Homo Sapiens
ATFPRAMEAL

SEQ ID NO: 14106 - protein, 10 aa, Homo Sapiens
ATYDKLCKEV

SEQ ID NO: 14107 - protein, 10 aa, Homo Sapiens
ATYPYQVVRA

SEQ ID NO: 14108 - protein, 10 aa, Homo Sapiens
ATYTGRVDAV

SEQ ID NO: 14109 - protein, 10 aa, Homo Sapiens
AVFCPNLTEV

SEQ ID NO: 14110 - protein, 10 aa, Homo Sapiens
AVFDDDMEQL

SEQ ID NO: 14111 - protein, 10 aa, Homo Sapiens
AVFDKTLAEL

SEQ ID NO: 14112 - protein, 10 aa, Homo Sapiens
AVFENKIYVV

SEQ ID NO: 14113 - protein, 10 aa, Homo Sapiens
AVFKGKFKEG

SEQ ID NO: 14114 - protein, 10 aa, Homo Sapiens
AVFPDDMPTL

SEQ ID NO: 14115 - protein, 10 aa, Homo Sapiens
AVFPFQPGSV

SEQ ID NO: 14116 - protein, 10 aa, Homo Sapiens
AVFPFQQVSL

SEQ ID NO: 14117 - protein, 10 aa, Homo Sapiens
AVFPSQVNVA

SEQ ID NO: 14118 - protein, 10 aa, Homo Sapiens
AVFQKQMDSL

SEQ ID NO: 14119 - protein, 10 aa, Homo Sapiens
AVFREKILHI

SEQ ID NO: 14120 - protein, 10 aa, Homo Sapiens
AVFTDKDANV

SEQ ID NO: 14121 - protein, 10 aa, Homo Sapiens
AVIDVGINRV

SEQ ID NO: 14122 - protein, 10 aa, Homo Sapiens
AVIEKFAPIK

SEQ ID NO: 14123 - protein, 10 aa, Homo Sapiens
AVIGTRLHAA

SEQ ID NO: 14124 - protein, 10 aa, Homo Sapiens
AVITGAVVAA

SEQ ID NO: 14125 - protein, 10 aa, Homo Sapiens
AVNDFELARA

SEQ ID NO: 14126 - protein, 10 aa, Homo Sapiens
AVPDEIPPLE

SEQ ID NO: 14127 - protein, 10 aa, Homo Sapiens
AVPDGPLQEV

SEQ ID NO: 14128 - protein, 10 aa, Homo Sapiens
AVVTGAVVAA

SEQ ID NO: 14129 - protein, 10 aa, Homo Sapiens
AVYEGHVSCV

SEQ ID NO: 14130 - protein, 10 aa, Homo Sapiens
AVYGFKLQSL

SEQ ID NO: 14131 - protein, 10 aa, Homo Sapiens
AVYSQFITQL

SEQ ID NO: 14132 - protein, 10 aa, Homo Sapiens
CGFGGPLARV

SEQ ID NO: 14133 - protein, 10 aa, Homo Sapiens
CQFYVVNSEL

SEQ ID NO: 14134 - protein, 10 aa, Homo Sapiens
CQHDFQAPYL

SEQ ID NO: 14135 - protein, 10 aa, Homo Sapiens
DIGSESTEDQ

SEQ ID NO: 14136 - protein, 10 aa, Homo Sapiens
DTNADKQLSF

SEQ ID NO: 14137 - protein, 10 aa, Homo Sapiens
EESNYELEGK

SEQ ID NO: 14138 - protein, 10 aa, Homo Sapiens
ELFPAPILRA

SEQ ID NO: 14139 - protein, 10 aa, Homo Sapiens
ELFPIQMEGV

SEQ ID NO: 14140 - protein, 10 aa, Homo Sapiens
FAAPEKDIFL

SEQ ID NO: 14141 - protein, 10 aa, Homo Sapiens
FAFESDLHSL

SEQ ID NO: 14142 - protein, 10 aa, Homo Sapiens
FAFGGLCERL

SEQ ID NO: 14143 - protein, 10 aa, Homo Sapiens
FAFQAEIAQL

SEQ ID NO: 14144 - protein, 10 aa, Homo Sapiens
FAFTNKITSV

SEQ ID NO: 14145 - protein, 10 aa, Homo Sapiens
FAYDGKDYLT

SEQ ID NO: 14146 - protein, 10 aa, Homo Sapiens
FAYPNRPDVL

SEQ ID NO: 14147 - protein, 10 aa, Homo Sapiens
FDGHGGIRAS

SEQ ID NO: 14148 - protein, 10 aa, Homo Sapiens
FGFLGKIDEL

SEQ ID NO: 14149 - protein, 10 aa, Homo Sapiens
FGYDHLILNV

SEQ ID NO: 14150 - protein, 10 aa, Homo Sapiens
FGYDKDTSLL

SEQ ID NO: 14151 - protein, 10 aa, Homo Sapiens
FGYPFRLNEA

SEQ ID NO: 14152 - protein, 10 aa, Homo Sapiens
FICDYELHEL

SEQ ID NO: 14153 - protein, 10 aa, Homo Sapiens
FIFDVHVHEV

SEQ ID NO: 14154 - protein, 10 aa, Homo Sapiens
FIFEKKLAQA

SEQ ID NO: 14155 - protein, 10 aa, Homo Sapiens
FIFPASNVYL

SEQ ID NO: 14156 - protein, 10 aa, Homo Sapiens
FIFSDHIRCI

SEQ ID NO: 14157 - protein, 10 aa, Homo Sapiens
FIFSEGVERA

SEQ ID NO: 14158 - protein, 10 aa, Homo Sapiens
FIFSEKPVFV

SEQ ID NO: 14159 - protein, 10 aa, Homo Sapiens
FIPDSGTEFI

SEQ ID NO: 14160 - protein, 10 aa, Homo Sapiens
FIPEHTNLSL

SEQ ID NO: 14161 - protein, 10 aa, Homo Sapiens
FIPEKEVVQA

SEQ ID NO: 14162 - protein, 10 aa, Homo Sapiens
FIPKEGDDFL

SEQ ID NO: 14163 - protein, 10 aa, Homo Sapiens
FIPPDGNFRL

SEQ ID NO: 14164 - protein, 10 aa, Homo Sapiens
FISDIANDAL

SEQ ID NO: 14165 - protein, 10 aa, Homo Sapiens
FIYHGEVPQA

SEQ ID NO: 14166 - protein, 10 aa, Homo Sapiens
FLAEHPNVTL

SEQ ID NO: 14167 - protein, 10 aa, Homo Sapiens
FLFDEEMEQM

SEQ ID NO: 14168 - protein, 10 aa, Homo Sapiens
FLFDGSPTYV

SEQ ID NO: 14169 - protein, 10 aa, Homo Sapiens
FLFGEEPSKL

SEQ ID NO: 14170 - protein, 10 aa, Homo Sapiens
FLFPNKESLI

SEQ ID NO: 14171 - protein, 10 aa, Homo Sapiens
FLPDGMEARL

SEQ ID NO: 14172 - protein, 10 aa, Homo Sapiens
FLPEAPAELL

SEQ ID NO: 14173 - protein, 10 aa, Homo Sapiens
FLPEFAGTQL

SEQ ID NO: 14174 - protein, 10 aa, Homo Sapiens
FLPESMYERI

SEQ ID NO: 14175 - protein, 10 aa, Homo Sapiens
FLPSHSLDTV

SEQ ID NO: 14176 - protein, 10 aa, Homo Sapiens
FLYKEKLVSV

SEQ ID NO: 14177 - protein, 10 aa, Homo Sapiens
FLYTGEGDTV

SEQ ID NO: 14178 - protein, 10 aa, Homo Sapiens
FMFDEKLVTV

SEQ ID NO: 14179 - protein, 10 aa, Homo Sapiens
FQFEKEPSQL

SEQ ID NO: 14180 - protein, 10 aa, Homo Sapiens
FQIDEDGWRA

SEQ ID NO: 14181 - protein, 10 aa, Homo Sapiens
FQVDIPEHLI

SEQ ID NO: 14182 - protein, 10 aa, Homo Sapiens
FQVKEVDVGL

SEQ ID NO: 14183 - protein, 10 aa, Homo Sapiens
FQVPDWLHHL

SEQ ID NO: 14184 - protein, 10 aa, Homo Sapiens
FQYESKVFYL

SEQ ID NO: 14185 - protein, 10 aa, Homo Sapiens
FQYPCYQEGL

SEQ ID NO: 14186 - protein, 10 aa, Homo Sapiens
FTAPKEIAEI

SEQ ID NO: 14187 - protein, 10 aa, Homo Sapiens
FTFEKTLEEL

SEQ ID NO: 14188 - protein, 10 aa, Homo Sapiens
FTIAEGFVKA

SEQ ID NO: 14189 - protein, 10 aa, Homo Sapiens
FTIGEAITSA

SEQ ID NO: 14190 - protein, 10 aa, Homo Sapiens
FTSDRGFQFV

SEQ ID NO: 14191 - protein, 10 aa, Homo Sapiens
FTYDQDGESL

SEQ ID NO: 14192 - protein, 10 aa, Homo Sapiens
FVADEELVHL

SEQ ID NO: 14193 - protein, 10 aa, Homo Sapiens
FVADEGICYL

SEQ ID NO: 14194 - protein, 10 aa, Homo Sapiens
FVADHPFLFL

SEQ ID NO: 14195 - protein, 10 aa, Homo Sapiens
FVAPPGNISL

SEQ ID NO: 14196 - protein, 10 aa, Homo Sapiens
FVEDTECRTL

SEQ ID NO: 14197 - protein, 10 aa, Homo Sapiens
FVIRNIVEAA

SEQ ID NO: 14198 - protein, 10 aa, Homo Sapiens
FVPESMFDRL

SEQ ID NO: 14199 - protein, 10 aa, Homo Sapiens
FVSPIRPLGL

SEQ ID NO: 14200 - protein, 10 aa, Homo Sapiens
FVYCGKKAQL

SEQ ID NO: 14201 - protein, 10 aa, Homo Sapiens
FVYEMESHAI

SEQ ID NO: 14202 - protein, 10 aa, Homo Sapiens
FVYPLDFART

SEQ ID NO: 14203 - protein, 10 aa, Homo Sapiens
GAFGFQLKEV

SEQ ID NO: 14204 - protein, 10 aa, Homo Sapiens
GAFSDHMALL

SEQ ID NO: 14205 - protein, 10 aa, Homo Sapiens
GIFGGHIRSV

SEQ ID NO: 14206 - protein, 10 aa, Homo Sapiens
GIYKDDIAQV

SEQ ID NO: 14207 - protein, 10 aa, Homo Sapiens
GLFGKELHKV

SEQ ID NO: 14208 - protein, 10 aa, Homo Sapiens
GLYEFPLNKV

SEQ ID NO: 14209 - protein, 10 aa, Homo Sapiens
GLYPFRVNSA

SEQ ID NO: 14210 - protein, 10 aa, Homo Sapiens
GQFAEHLLGA

SEQ ID NO: 14211 - protein, 10 aa, Homo Sapiens
GQFKDIITKV

SEQ ID NO: 14212 - protein, 10 aa, Homo Sapiens
GQFPSYLETV

SEQ ID NO: 14213 - protein, 10 aa, Homo Sapiens
GQYEGHEAEL

SEQ ID NO: 14214 - protein, 10 aa, Homo Sapiens
GQYEGKVSSV

SEQ ID NO: 14215 - protein, 10 aa, Homo Sapiens
GSYPDAILQA

SEQ ID NO: 14216 - protein, 10 aa, Homo Sapiens
GTYADYLAEA

SEQ ID NO: 14217 - protein, 10 aa, Homo Sapiens
GTYQYDLERL

SEQ ID NO: 14218 - protein, 10 aa, Homo Sapiens
GVFEGHTSKV

SEQ ID NO: 14219 - protein, 10 aa, Homo Sapiens
GVFEGKLNVI

SEQ ID NO: 14220 - protein, 10 aa, Homo Sapiens
GVFEPTIVKV

SEQ ID NO: 14221 - protein, 10 aa, Homo Sapiens
GVFPDNFVKL

SEQ ID NO: 14222 - protein, 10 aa, Homo Sapiens
GVFTRDINKA

SEQ ID NO: 14223 - protein, 10 aa, Homo Sapiens
GVFTRDIQRA

SEQ ID NO: 14224 - protein, 10 aa, Homo Sapiens
GVIDGHIYAV

SEQ ID NO: 14225 - protein, 10 aa, Homo Sapiens
GVIDLIFEKA

SEQ ID NO: 14226 - protein, 10 aa, Homo Sapiens
GVIDLVFEKA

SEQ ID NO: 14227 - protein, 10 aa, Homo Sapiens
GVVDGNVARV

SEQ ID NO: 14228 - protein, 10 aa, Homo Sapiens
GVYGGSVHEA

SEQ ID NO: 14229 - protein, 10 aa, Homo Sapiens
GVYTEKVLEA

SEQ ID NO: 14230 - protein, 10 aa, Homo Sapiens
HIPAYKLETL

SEQ ID NO: 14231 - protein, 10 aa, Homo Sapiens
HLFSGHLSTL

SEQ ID NO: 14232 - protein, 10 aa, Homo Sapiens
HLPEGKLLTA

SEQ ID NO: 14233 - protein, 10 aa, Homo Sapiens
HLPSDFTPAV

SEQ ID NO: 14234 - protein, 10 aa, Homo Sapiens
HQAKDFGNYL

SEQ ID NO: 14235 - protein, 10 aa, Homo Sapiens
HQFDQVMPGV

SEQ ID NO: 14236 - protein, 10 aa, Homo Sapiens
HQHEPFLDFL

SEQ ID NO: 14237 - protein, 10 aa, Homo Sapiens
HVFAEKITSL

SEQ ID NO: 14238 - protein, 10 aa, Homo Sapiens
HVMGSALTGA

SEQ ID NO: 14239 - protein, 10 aa, Homo Sapiens
HVVDSPIINA

SEQ ID NO: 14240 - protein, 10 aa, Homo Sapiens
IAFSYELSKL

SEQ ID NO: 14241 - protein, 10 aa, Homo Sapiens
IAYDRYIKEV

SEQ ID NO: 14242 - protein, 10 aa, Homo Sapiens
IGYDYKLEQI

SEQ ID NO: 14243 - protein, 10 aa, Homo Sapiens
IIFDPNILTI

SEQ ID NO: 14244 - protein, 10 aa, Homo Sapiens
IIFDRDLVVT

SEQ ID NO: 14245 - protein, 10 aa, Homo Sapiens
IIPNFSLDKI

SEQ ID NO: 14246 - protein, 10 aa, Homo Sapiens
IIYDFEDPEM

SEQ ID NO: 14247 - protein, 10 aa, Homo Sapiens
IIYNGGNHKL

SEQ ID NO: 14248 - protein, 10 aa, Homo Sapiens
ILADKEVKKA

SEQ ID NO: 14249 - protein, 10 aa, Homo Sapiens
ILAPCKLETV

SEQ ID NO: 14250 - protein, 10 aa, Homo Sapiens
ILFPDIIARA

SEQ ID NO: 14251 - protein, 10 aa, Homo Sapiens
ILFSEGLIKA

SEQ ID NO: 14252 - protein, 10 aa, Homo Sapiens
ILKDVIPPLE

SEQ ID NO: 14253 - protein, 10 aa, Homo Sapiens
ILPDITKDEL

SEQ ID NO: 14254 - protein, 10 aa, Homo Sapiens
ILPEVENDRL

SEQ ID NO: 14255 - protein, 10 aa, Homo Sapiens
IMPAFIFEHI

SEQ ID NO: 14256 - protein, 10 aa, Homo Sapiens
IQSSISGVTA

SEQ ID NO: 14257 - protein, 10 aa, Homo Sapiens
IQVEPVLDYL

SEQ ID NO: 14258 - protein, 10 aa, Homo Sapiens
ITFPGCFTNT

SEQ ID NO: 14259 - protein, 10 aa, Homo Sapiens
ITHDIEEKGV

SEQ ID NO: 14260 - protein, 10 aa, Homo Sapiens
ITPWFKIIAA

SEQ ID NO: 14261 - protein, 10 aa, Homo Sapiens
IVFDSEMDKL

SEQ ID NO: 14262 - protein, 10 aa, Homo Sapiens
IVFPAGILQA

SEQ ID NO: 14263 - protein, 10 aa, Homo Sapiens
IVSPVPESRL

SEQ ID NO: 14264 - protein, 10 aa, Homo Sapiens
KAFDKHMNLI

SEQ ID NO: 14265 - protein, 10 aa, Homo Sapiens
KAFEESLSTL

SEQ ID NO: 14266 - protein, 10 aa, Homo Sapiens
KAFEKELSHA

SEQ ID NO: 14267 - protein, 10 aa, Homo Sapiens
KAFNIRLEEL

SEQ ID NO: 14268 - protein, 10 aa, Homo Sapiens
KAFQEGIAKA

SEQ ID NO: 14269 - protein, 10 aa, Homo Sapiens
KAFSSDLISI

SEQ ID NO: 14270 - protein, 10 aa, Homo Sapiens
KAIEELLKEA

SEQ ID NO: 14271 - protein, 10 aa, Homo Sapiens
KAIRDGVIEA

SEQ ID NO: 14272 - protein, 10 aa, Homo Sapiens
KAYNHHIQEL

SEQ ID NO: 14273 - protein, 10 aa, Homo Sapiens
KAYQDRLAYL

SEQ ID NO: 14274 - protein, 10 aa, Homo Sapiens
KAYQELLATV

SEQ ID NO: 14275 - protein, 10 aa, Homo Sapiens
KAYTDELVEL

SEQ ID NO: 14276 - protein, 10 aa, Homo Sapiens
KAYYHLLEQV

SEQ ID NO: 14277 - protein, 10 aa, Homo Sapiens
KIADFGFSNL

SEQ ID NO: 14278 - protein, 10 aa, Homo Sapiens
KIADFGLAKL

SEQ ID NO: 14279 - protein, 10 aa, Homo Sapiens
KIADFGLARI

SEQ ID NO: 14280 - protein, 10 aa, Homo Sapiens
KIADFGLARV

SEQ ID NO: 14281 - protein, 10 aa, Homo Sapiens
KIFDEILVNA

SEQ ID NO: 14282 - protein, 10 aa, Homo Sapiens
KIFHPNIDEA

SEQ ID NO: 14283 - protein, 10 aa, Homo Sapiens
KIFIDKIYSI

SEQ ID NO: 14284 - protein, 10 aa, Homo Sapiens
KIFLPVLLAA

SEQ ID NO: 14285 - protein, 10 aa, Homo Sapiens
KIFQEALVQI

SEQ ID NO: 14286 - protein, 10 aa, Homo Sapiens
KIFSGVFVKV

SEQ ID NO: 14287 - protein, 10 aa, Homo Sapiens
KIFTDIFHYL

SEQ ID NO: 14288 - protein, 10 aa, Homo Sapiens
KIFTEDLPEV

SEQ ID NO: 14289 - protein, 10 aa, Homo Sapiens
KIFVGNVSAA

SEQ ID NO: 14290 - protein, 10 aa, Homo Sapiens
KIGDFGLATV

SEQ ID NO: 14291 - protein, 10 aa, Homo Sapiens
KIIDETMAQL

SEQ ID NO: 14292 - protein, 10 aa, Homo Sapiens
KIIDRAITSL

SEQ ID NO: 14293 - protein, 10 aa, Homo Sapiens
KIIEENITSA

SEQ ID NO: 14294 - protein, 10 aa, Homo Sapiens
KIIETDFEKA

SEQ ID NO: 14295 - protein, 10 aa, Homo Sapiens
KIIYIVHDEV

SEQ ID NO: 14296 - protein, 10 aa, Homo Sapiens
KIKDYLEELW

SEQ ID NO: 14297 - protein, 10 aa, Homo Sapiens
KIPDEINDRV

SEQ ID NO: 14298 - protein, 10 aa, Homo Sapiens
KIPELDMTEV

SEQ ID NO: 14299 - protein, 10 aa, Homo Sapiens
KIPKKGFVEV

SEQ ID NO: 14300 - protein, 10 aa, Homo Sapiens
KIPNFDVREI

SEQ ID NO: 14301 - protein, 10 aa, Homo Sapiens
KISDFGLATV

SEQ ID NO: 14302 - protein, 10 aa, Homo Sapiens
KIYDEETAEL

SEQ ID NO: 14303 - protein, 10 aa, Homo Sapiens
KIYEHHIKVL

SEQ ID NO: 14304 - protein, 10 aa, Homo Sapiens
KIYERTMAVL

SEQ ID NO: 14305 - protein, 10 aa, Homo Sapiens
KLADIQIEQL

SEQ ID NO: 14306 - protein, 10 aa, Homo Sapiens
KLFDDMMYEL

SEQ ID NO: 14307 - protein, 10 aa, Homo Sapiens
KLFEGENEHL

SEQ ID NO: 14308 - protein, 10 aa, Homo Sapiens
KLFKDDMEKL

SEQ ID NO: 14309 - protein, 10 aa, Homo Sapiens
KLFNEHIEAL

SEQ ID NO: 14310 - protein, 10 aa, Homo Sapiens
KLFNGTFLKA

SEQ ID NO: 14311 - protein, 10 aa, Homo Sapiens
KLFPHHIGEL

SEQ ID NO: 14312 - protein, 10 aa, Homo Sapiens
KLFPQETLFL

SEQ ID NO: 14313 - protein, 10 aa, Homo Sapiens
KLFQSKLIKA

SEQ ID NO: 14314 - protein, 10 aa, Homo Sapiens
KLFSEGLFSA

SEQ ID NO: 14315 - protein, 10 aa, Homo Sapiens
KLFTNDCIFL

SEQ ID NO: 14316 - protein, 10 aa, Homo Sapiens
KLFVGFLNRA

SEQ ID NO: 14317 - protein, 10 aa, Homo Sapiens
KLHDVELHQV

SEQ ID NO: 14318 - protein, 10 aa, Homo Sapiens
KLKPGDLVGV

SEQ ID NO: 14319 - protein, 10 aa, Homo Sapiens
KLPDFESRYV

SEQ ID NO: 14320 - protein, 10 aa, Homo Sapiens
KLPDFLTAKL

SEQ ID NO: 14321 - protein, 10 aa, Homo Sapiens
KLPEFYDETL

SEQ ID NO: 14322 - protein, 10 aa, Homo Sapiens
KLVEFDFLGA

SEQ ID NO: 14323 - protein, 10 aa, Homo Sapiens
KLYDIDVAKV

SEQ ID NO: 14324 - protein, 10 aa, Homo Sapiens
KLYEGKTKEV

SEQ ID NO: 14325 - protein, 10 aa, Homo Sapiens
KLYEKKLLKL

SEQ ID NO: 14326 - protein, 10 aa, Homo Sapiens
KLYQYYLDHL

SEQ ID NO: 14327 - protein, 10 aa, Homo Sapiens
KMFEVDMKIA

SEQ ID NO: 14328 - protein, 10 aa, Homo Sapiens
KMFNQDIEKL

SEQ ID NO: 14329 - protein, 10 aa, Homo Sapiens
KMYEEFLSKV

SEQ ID NO: 14330 - protein, 10 aa, Homo Sapiens
KQAEIVKRLN

SEQ ID NO: 14331 - protein, 10 aa, Homo Sapiens
KQFDDVLIYL

SEQ ID NO: 14332 - protein, 10 aa, Homo Sapiens
KQFEGSTSFV

SEQ ID NO: 14333 - protein, 10 aa, Homo Sapiens
KQFEPNDFYL

SEQ ID NO: 14334 - protein, 10 aa, Homo Sapiens
KQFPLIISSV

SEQ ID NO: 14335 - protein, 10 aa, Homo Sapiens
KQFSENIYEA

SEQ ID NO: 14336 - protein, 10 aa, Homo Sapiens
KQIESDRQNL

SEQ ID NO: 14337 - protein, 10 aa, Homo Sapiens
KQMEQISQFL

SEQ ID NO: 14338 - protein, 10 aa, Homo Sapiens
KQYGITGENV

SEQ ID NO: 14339 - protein, 10 aa, Homo Sapiens
KQYKGIIDCV

SEQ ID NO: 14340 - protein, 10 aa, Homo Sapiens
KQYPYNNLYL

SEQ ID NO: 14341 - protein, 10 aa, Homo Sapiens
KSFDAVLEAL

SEQ ID NO: 14342 - protein, 10 aa, Homo Sapiens
KTAPGKIEKV

SEQ ID NO: 14343 - protein, 10 aa, Homo Sapiens
KTFEDNLIEA

SEQ ID NO: 14344 - protein, 10 aa, Homo Sapiens
KTFEDYLHNV

SEQ ID NO: 14345 - protein, 10 aa, Homo Sapiens
KTFEEKLTPL

SEQ ID NO: 14346 - protein, 10 aa, Homo Sapiens
KTFPEIIDYL

SEQ ID NO: 14347 - protein, 10 aa, Homo Sapiens
KTFSEILNRV

SEQ ID NO: 14348 - protein, 10 aa, Homo Sapiens
KTFSYPLDLL

SEQ ID NO: 14349 - protein, 10 aa, Homo Sapiens
KTFTVPIVEV

SEQ ID NO: 14350 - protein, 10 aa, Homo Sapiens
KTIEDDLVSA

SEQ ID NO: 14351 - protein, 10 aa, Homo Sapiens
KTIEDTLMTV

SEQ ID NO: 14352 - protein, 10 aa, Homo Sapiens
KTMEDTLMTV

SEQ ID NO: 14353 - protein, 10 aa, Homo Sapiens
KTPDFESTGL

SEQ ID NO: 14354 - protein, 10 aa, Homo Sapiens
KTYEAALETI

SEQ ID NO: 14355 - protein, 10 aa, Homo Sapiens
KVFDFAGEEV

SEQ ID NO: 14356 - protein, 10 aa, Homo Sapiens
KVFDPVPVGV

SEQ ID NO: 14357 - protein, 10 aa, Homo Sapiens
KVFEEKTQHL

SEQ ID NO: 14358 - protein, 10 aa, Homo Sapiens
KVFEHDSVEL

SEQ ID NO: 14359 - protein, 10 aa, Homo Sapiens
KVFEHFLENL

SEQ ID NO: 14360 - protein, 10 aa, Homo Sapiens
KVFELDLVTL

SEQ ID NO: 14361 - protein, 10 aa, Homo Sapiens
KVFFDLMREI

SEQ ID NO: 14362 - protein, 10 aa, Homo Sapiens
KVFGDILDFA

SEQ ID NO: 14363 - protein, 10 aa, Homo Sapiens
KVFNGEGEQI

SEQ ID NO: 14364 - protein, 10 aa, Homo Sapiens
KVFQERINCL

SEQ ID NO: 14365 - protein, 10 aa, Homo Sapiens
KVFQGQLDCL

SEQ ID NO: 14366 - protein, 10 aa, Homo Sapiens
KVFQGTDEQL

SEQ ID NO: 14367 - protein, 10 aa, Homo Sapiens
KVFSDVMEDL

SEQ ID NO: 14368 - protein, 10 aa, Homo Sapiens
KVFSEKLDHL

SEQ ID NO: 14369 - protein, 10 aa, Homo Sapiens
KVFYTELLNL

SEQ ID NO: 14370 - protein, 10 aa, Homo Sapiens
KVGNFKFIYV

SEQ ID NO: 14371 - protein, 10 aa, Homo Sapiens
KVIQEIWPVL

SEQ ID NO: 14372 - protein, 10 aa, Homo Sapiens
KVLDSFCEGL

SEQ ID NO: 14373 - protein, 10 aa, Homo Sapiens
KVMDLSIVRL

SEQ ID NO: 14374 - protein, 10 aa, Homo Sapiens
KVPDFPSKRL

SEQ ID NO: 14375 - protein, 10 aa, Homo Sapiens
KVVDSLYNKA

SEQ ID NO: 14376 - protein, 10 aa, Homo Sapiens
KVVEDGILKL

SEQ ID NO: 14377 - protein, 10 aa, Homo Sapiens
KVYVDDIYVI

SEQ ID NO: 14378 - protein, 10 aa, Homo Sapiens
LAYSGKLEEL

SEQ ID NO: 14379 - protein, 10 aa, Homo Sapiens
LFLHAGIVLP

SEQ ID NO: 14380 - protein, 10 aa, Homo Sapiens
LGAGARIQAL

SEQ ID NO: 14381 - protein, 10 aa, Homo Sapiens
LIAEENALRG

SEQ ID NO: 14382 - protein, 10 aa, Homo Sapiens
LIFPKEFETA

SEQ ID NO: 14383 - protein, 10 aa, Homo Sapiens
LIFSHMLAEI

SEQ ID NO: 14384 - protein, 10 aa, Homo Sapiens
LIIQAGIKEV

SEQ ID NO: 14385 - protein, 10 aa, Homo Sapiens
LLAARVVEEL

SEQ ID NO: 14386 - protein, 10 aa, Homo Sapiens
LLFPSDVQTL

SEQ ID NO: 14387 - protein, 10 aa, Homo Sapiens
LLFSESLKQL

SEQ ID NO: 14388 - protein, 10 aa, Homo Sapiens
LLPDYYLVTV

SEQ ID NO: 14389 - protein, 10 aa, Homo Sapiens
LMPYFLLTQA

SEQ ID NO: 14390 - protein, 10 aa, Homo Sapiens
LQADLSSFKS

SEQ ID NO: 14391 - protein, 10 aa, Homo Sapiens
LQAEAFQARL

SEQ ID NO: 14392 - protein, 10 aa, Homo Sapiens
LQAGDILHRV

SEQ ID NO: 14393 - protein, 10 aa, Homo Sapiens
LQFDKAINAA

SEQ ID NO: 14394 - protein, 10 aa, Homo Sapiens
LQIEDFEARI

SEQ ID NO: 14395 - protein, 10 aa, Homo Sapiens
LTFEHEMEKA

SEQ ID NO: 14396 - protein, 10 aa, Homo Sapiens
LTFPEKVNKA

SEQ ID NO: 14397 - protein, 10 aa, Homo Sapiens
LTFRDPLALL

SEQ ID NO: 14398 - protein, 10 aa, Homo Sapiens
LTFVAPIYGA

SEQ ID NO: 14399 - protein, 10 aa, Homo Sapiens
LTGQRVLDAL

SEQ ID NO: 14400 - protein, 10 aa, Homo Sapiens
LTIEDGIFEV

SEQ ID NO: 14401 - protein, 10 aa, Homo Sapiens
LTNQEDLPEV

SEQ ID NO: 14402 - protein, 10 aa, Homo Sapiens
LVFDTAIAHL

SEQ ID NO: 14403 - protein, 10 aa, Homo Sapiens
LVFLEGLKSA

SEQ ID NO: 14404 - protein, 10 aa, Homo Sapiens
LVFPGQVAQL

SEQ ID NO: 14405 - protein, 10 aa, Homo Sapiens
LVFPHDSSAL

SEQ ID NO: 14406 - protein, 10 aa, Homo Sapiens
LVPETIHDEL

SEQ ID NO: 14407 - protein, 10 aa, Homo Sapiens
LVYDGKIYTL

SEQ ID NO: 14408 - protein, 10 aa, Homo Sapiens
LVYEGQLSQA

SEQ ID NO: 14409 - protein, 10 aa, Homo Sapiens
LVYHEDMTAT

SEQ ID NO: 14410 - protein, 10 aa, Homo Sapiens
LVYPNNDPVM

SEQ ID NO: 14411 - protein, 10 aa, Homo Sapiens
LVYQEPIPTA

SEQ ID NO: 14412 - protein, 10 aa, Homo Sapiens
MIFDHEFTKL

SEQ ID NO: 14413 - protein, 10 aa, Homo Sapiens
MIFVDNFVHA

SEQ ID NO: 14414 - protein, 10 aa, Homo Sapiens
MIYEQKIAEL

SEQ ID NO: 14415 - protein, 10 aa, Homo Sapiens
MVAPDKDYFL

SEQ ID NO: 14416 - protein, 10 aa, Homo Sapiens
MVLSSPLALA

SEQ ID NO: 14417 - protein, 10 aa, Homo Sapiens
MVVQDGIVKA

SEQ ID NO: 14418 - protein, 10 aa, Homo Sapiens
MVYDSPLCRL

SEQ ID NO: 14419 - protein, 10 aa, Homo Sapiens
NAFLLPIKTV

SEQ ID NO: 14420 - protein, 10 aa, Homo Sapiens
NAFNQDITAL

SEQ ID NO: 14421 - protein, 10 aa, Homo Sapiens
NIFGEELERL

SEQ ID NO: 14422 - protein, 10 aa, Homo Sapiens
NIFPSNLVSA

SEQ ID NO: 14423 - protein, 10 aa, Homo Sapiens
NIPPLTQTPV

SEQ ID NO: 14424 - protein, 10 aa, Homo Sapiens
NLFPAALVHL

SEQ ID NO: 14425 - protein, 10 aa, Homo Sapiens
NLFPSNLVVA

SEQ ID NO: 14426 - protein, 10 aa, Homo Sapiens
NQIESKAAYV

SEQ ID NO: 14427 - protein, 10 aa, Homo Sapiens
NQIKKIENLE

SEQ ID NO: 14428 - protein, 10 aa, Homo Sapiens
NVFDEAILAA

SEQ ID NO: 14429 - protein, 10 aa, Homo Sapiens
NVPEGLLATV

SEQ ID NO: 14430 - protein, 10 aa, Homo Sapiens
NVPGEIVESL

SEQ ID NO: 14431 - protein, 10 aa, Homo Sapiens
NVPKFGLAHL

SEQ ID NO: 14432 - protein, 10 aa, Homo Sapiens
NVYGFDMSCI

SEQ ID NO: 14433 - protein, 10 aa, Homo Sapiens
QAFSDVILAV

SEQ ID NO: 14434 - protein, 10 aa, Homo Sapiens
QAYQHDLERL

SEQ ID NO: 14435 - protein, 10 aa, Homo Sapiens
QEQNQEQPIR

SEQ ID NO: 14436 - protein, 10 aa, Homo Sapiens
QIFGSHLHKV

SEQ ID NO: 14437 - protein, 10 aa, Homo Sapiens
QIFLRDIEQV

SEQ ID NO: 14438 - protein, 10 aa, Homo Sapiens
QIFNGTFVKL

SEQ ID NO: 14439 - protein, 10 aa, Homo Sapiens
QLFGQDFSHA

SEQ ID NO: 14440 - protein, 10 aa, Homo Sapiens
QLFQDEVAKA

SEQ ID NO: 14441 - protein, 10 aa, Homo Sapiens
QLYKEQLAKL

SEQ ID NO: 14442 - protein, 10 aa, Homo Sapiens
QLYPENSEQL

SEQ ID NO: 14443 - protein, 10 aa, Homo Sapiens
QMYHYDMNTA

SEQ ID NO: 14444 - protein, 10 aa, Homo Sapiens
QSFDSSLHGA

SEQ ID NO: 14445 - protein, 10 aa, Homo Sapiens
QSFPEHMANV

SEQ ID NO: 14446 - protein, 10 aa, Homo Sapiens
QSFTLELERA

SEQ ID NO: 14447 - protein, 10 aa, Homo Sapiens
QTIERMGSGV

SEQ ID NO: 14448 - protein, 10 aa, Homo Sapiens
QTYGQQLQKA

SEQ ID NO: 14449 - protein, 10 aa, Homo Sapiens
QTYHAKLENA

SEQ ID NO: 14450 - protein, 10 aa, Homo Sapiens
QVADIDGQYA

SEQ ID NO: 14451 - protein, 10 aa, Homo Sapiens
QVADILFQTA

SEQ ID NO: 14452 - protein, 10 aa, Homo Sapiens
QVFDQELDAL

SEQ ID NO: 14453 - protein, 10 aa, Homo Sapiens
QVFEGHTHYV

SEQ ID NO: 14454 - protein, 10 aa, Homo Sapiens
QVFPGLLERV

SEQ ID NO: 14455 - protein, 10 aa, Homo Sapiens
RAFADALEVI

SEQ ID NO: 14456 - protein, 10 aa, Homo Sapiens
RAFGGKDIKV

SEQ ID NO: 14457 - protein, 10 aa, Homo Sapiens
RAFHPDLEFV

SEQ ID NO: 14458 - protein, 10 aa, Homo Sapiens
RAFSDPFVEA

SEQ ID NO: 14459 - protein, 10 aa, Homo Sapiens
RAVDGKIAEA

SEQ ID NO: 14460 - protein, 10 aa, Homo Sapiens
RAYDASLAML

SEQ ID NO: 14461 - protein, 10 aa, Homo Sapiens
RAYGRDIVEA

SEQ ID NO: 14462 - protein, 10 aa, Homo Sapiens
RFFDGELTKV

SEQ ID NO: 14463 - protein, 10 aa, Homo Sapiens
RIFPNQTEEL

SEQ ID NO: 14464 - protein, 10 aa, Homo Sapiens
RIFQEQVEKL

SEQ ID NO: 14465 - protein, 10 aa, Homo Sapiens
RIFYPEIEEV

SEQ ID NO: 14466 - protein, 10 aa, Homo Sapiens
RIIDSLFNTV

SEQ ID NO: 14467 - protein, 10 aa, Homo Sapiens
RIIEENIPEL

SEQ ID NO: 14468 - protein, 10 aa, Homo Sapiens
RIPDIVLWPT

SEQ ID NO: 14469 - protein, 10 aa, Homo Sapiens
RIPNFKGSYL

SEQ ID NO: 14470 - protein, 10 aa, Homo Sapiens
RIYPHGLVLL

SEQ ID NO: 14471 - protein, 10 aa, Homo Sapiens
RLFADILNDV

SEQ ID NO: 14472 - protein, 10 aa, Homo Sapiens
RLFHKDLTSL

SEQ ID NO: 14473 - protein, 10 aa, Homo Sapiens
RLFNEHLVSA

SEQ ID NO: 14474 - protein, 10 aa, Homo Sapiens
RLFQQKLDEL

SEQ ID NO: 14475 - protein, 10 aa, Homo Sapiens
RLFSKSIETL

SEQ ID NO: 14476 - protein, 10 aa, Homo Sapiens
RLFTEKILRA

SEQ ID NO: 14477 - protein, 10 aa, Homo Sapiens
RLIDDMVAQA

SEQ ID NO: 14478 - protein, 10 aa, Homo Sapiens
RLIDDMVAQV

SEQ ID NO: 14479 - protein, 10 aa, Homo Sapiens
RLPEHCIEYV

SEQ ID NO: 14480 - protein, 10 aa, Homo Sapiens
RLYDGLFKVI

SEQ ID NO: 14481 - protein, 10 aa, Homo Sapiens
RLYDTHITVL

SEQ ID NO: 14482 - protein, 10 aa, Homo Sapiens
RLYEFDLIDG

SEQ ID NO: 14483 - protein, 10 aa, Homo Sapiens
RLYPAFMEGI

SEQ ID NO: 14484 - protein, 10 aa, Homo Sapiens
RLYPEGLAQL

SEQ ID NO: 14485 - protein, 10 aa, Homo Sapiens
RLYPWGVVEV

SEQ ID NO: 14486 - protein, 10 aa, Homo Sapiens
RMFADDLHNL

SEQ ID NO: 14487 - protein, 10 aa, Homo Sapiens
RMFDGKFVVA

SEQ ID NO: 14488 - protein, 10 aa, Homo Sapiens
RMFDKNLQDL

SEQ ID NO: 14489 - protein, 10 aa, Homo Sapiens
RMISEELVAA

SEQ ID NO: 14490 - protein, 10 aa, Homo Sapiens
RMYPFQIHSI

SEQ ID NO: 14491 - protein, 10 aa, Homo Sapiens
RQFQADLQTA

SEQ ID NO: 14492 - protein, 10 aa, Homo Sapiens
RQFSGARNQL

SEQ ID NO: 14493 - protein, 10 aa, Homo Sapiens
RQIEALDPPM

SEQ ID NO: 14494 - protein, 10 aa, Homo Sapiens
RQTEIYQYVL

SEQ ID NO: 14495 - protein, 10 aa, Homo Sapiens
RQYPWGTVQV

SEQ ID NO: 14496 - protein, 10 aa, Homo Sapiens
RQYPWGVAEV

SEQ ID NO: 14497 - protein, 10 aa, Homo Sapiens
RQYPWGVVQV

SEQ ID NO: 14498 - protein, 10 aa, Homo Sapiens
RSFTTTIHKV

SEQ ID NO: 14499 - protein, 10 aa, Homo Sapiens
RSYDDQLAQI

SEQ ID NO: 14500 - protein, 10 aa, Homo Sapiens
RSYDFEFMQV

SEQ ID NO: 14501 - protein, 10 aa, Homo Sapiens
RTFDRALRAL

SEQ ID NO: 14502 - protein, 10 aa, Homo Sapiens
RTFLGKLNEA

SEQ ID NO: 14503 - protein, 10 aa, Homo Sapiens
RTIDIGVVTA

SEQ ID NO: 14504 - protein, 10 aa, Homo Sapiens
RTITVGVYEA

SEQ ID NO: 14505 - protein, 10 aa, Homo Sapiens
RTVGTPIASV

SEQ ID NO: 14506 - protein, 10 aa, Homo Sapiens
RVAEHHVATL

SEQ ID NO: 14507 - protein, 10 aa, Homo Sapiens
RVFDREIAQM

SEQ ID NO: 14508 - protein, 10 aa, Homo Sapiens
RVFDWIEANL

SEQ ID NO: 14509 - protein, 10 aa, Homo Sapiens
RVFENIVAVL

SEQ ID NO: 14510 - protein, 10 aa, Homo Sapiens
RVFEVSLADL

SEQ ID NO: 14511 - protein, 10 aa, Homo Sapiens
RVFHPAFTKA

SEQ ID NO: 14512 - protein, 10 aa, Homo Sapiens
RVFHYVLDNL

SEQ ID NO: 14513 - protein, 10 aa, Homo Sapiens
RVFIGNLNTA

SEQ ID NO: 14514 - protein, 10 aa, Homo Sapiens
RVFIGNLNTL

SEQ ID NO: 14515 - protein, 10 aa, Homo Sapiens
RVFNFDSVEL

SEQ ID NO: 14516 - protein, 10 aa, Homo Sapiens
RVFNFDVRQL

SEQ ID NO: 14517 - protein, 10 aa, Homo Sapiens
RVFQEFIKMT

SEQ ID NO: 14518 - protein, 10 aa, Homo Sapiens
RVFTGIVTSL

SEQ ID NO: 14519 - protein, 10 aa, Homo Sapiens
RVIEGDVVSA

SEQ ID NO: 14520 - protein, 10 aa, Homo Sapiens
RVIGSVGKKV

SEQ ID NO: 14521 - protein, 10 aa, Homo Sapiens
RVPDFILEKI

SEQ ID NO: 14522 - protein, 10 aa, Homo Sapiens
RVVTHELIHA

SEQ ID NO: 14523 - protein, 10 aa, Homo Sapiens
RVYEIDITDA

SEQ ID NO: 14524 - protein, 10 aa, Homo Sapiens
RVYGGLTTKV

SEQ ID NO: 14525 - protein, 10 aa, Homo Sapiens
SAAGFPLSGA

SEQ ID NO: 14526 - protein, 10 aa, Homo Sapiens
SAFEDEIVSL

SEQ ID NO: 14527 - protein, 10 aa, Homo Sapiens
SDVSLTACKV

SEQ ID NO: 14528 - protein, 10 aa, Homo Sapiens
SIFDAVLKGV

SEQ ID NO: 14529 - protein, 10 aa, Homo Sapiens
SIFEGGATEL

SEQ ID NO: 14530 - protein, 10 aa, Homo Sapiens
SIPDFPMHLA

SEQ ID NO: 14531 - protein, 10 aa, Homo Sapiens
SIPDIEQPNV

SEQ ID NO: 14532 - protein, 10 aa, Homo Sapiens
SIYNGDMEKI

SEQ ID NO: 14533 - protein, 10 aa, Homo Sapiens
SIYPLHDVFV

SEQ ID NO: 14534 - protein, 10 aa, Homo Sapiens
SLFAGGMLRV

SEQ ID NO: 14535 - protein, 10 aa, Homo Sapiens
SLFEKGLKNV

SEQ ID NO: 14536 - protein, 10 aa, Homo Sapiens
SLFPGKLEVV

SEQ ID NO: 14537 - protein, 10 aa, Homo Sapiens
SLFPPGLHAI

SEQ ID NO: 14538 - protein, 10 aa, Homo Sapiens
SLFSHSLISI

SEQ ID NO: 14539 - protein, 10 aa, Homo Sapiens
SLFYRDIISI

SEQ ID NO: 14540 - protein, 10 aa, Homo Sapiens
SLINVGLISV

SEQ ID NO: 14541 - protein, 10 aa, Homo Sapiens
SLPDFGISYV

SEQ ID NO: 14542 - protein, 10 aa, Homo Sapiens
SMYGVDLHHA

SEQ ID NO: 14543 - protein, 10 aa, Homo Sapiens
SMYGVDLHKA

SEQ ID NO: 14544 - protein, 10 aa, Homo Sapiens
SQFDEELYKV

SEQ ID NO: 14545 - protein, 10 aa, Homo Sapiens
SQSDMFDQRL

SEQ ID NO: 14546 - protein, 10 aa, Homo Sapiens
SQYPFHVPLL

SEQ ID NO: 14547 - protein, 10 aa, Homo Sapiens
SSFSIEMEKV

SEQ ID NO: 14548 - protein, 10 aa, Homo Sapiens
STFPGAEHCL

SEQ ID NO: 14549 - protein, 10 aa, Homo Sapiens
STFSAPLNKA

SEQ ID NO: 14550 - protein, 10 aa, Homo Sapiens
STYDETLHVA

SEQ ID NO: 14551 - protein, 10 aa, Homo Sapiens
STYEEELAKA

SEQ ID NO: 14552 - protein, 10 aa, Homo Sapiens
SVAEITNACF

SEQ ID NO: 14553 - protein, 10 aa, Homo Sapiens
SVAHWSLDVA

SEQ ID NO: 14554 - protein, 10 aa, Homo Sapiens
SVAKNGVIRA

SEQ ID NO: 14555 - protein, 10 aa, Homo Sapiens
SVFDYSINSV

SEQ ID NO: 14556 - protein, 10 aa, Homo Sapiens
SVFERALSSV

SEQ ID NO: 14557 - protein, 10 aa, Homo Sapiens
SVFGGKNIHV

SEQ ID NO: 14558 - protein, 10 aa, Homo Sapiens
SVFNHAIRHT

SEQ ID NO: 14559 - protein, 10 aa, Homo Sapiens
SVFNIKLVQA

SEQ ID NO: 14560 - protein, 10 aa, Homo Sapiens
SVFVDSLTKA

SEQ ID NO: 14561 - protein, 10 aa, Homo Sapiens
SVIDIINGEA

SEQ ID NO: 14562 - protein, 10 aa, Homo Sapiens
SVIEEMGKEI

SEQ ID NO: 14563 - protein, 10 aa, Homo Sapiens
SVIEENIKCI

SEQ ID NO: 14564 - protein, 10 aa, Homo Sapiens
SVIKVKIHEA

SEQ ID NO: 14565 - protein, 10 aa, Homo Sapiens
SVYKNVILQV

SEQ ID NO: 14566 - protein, 10 aa, Homo Sapiens
TAFDEAIAEL

SEQ ID NO: 14567 - protein, 10 aa, Homo Sapiens
TAFQEALDAA

SEQ ID NO: 14568 - protein, 10 aa, Homo Sapiens
TEDHEEAGPL

SEQ ID NO: 14569 - protein, 10 aa, Homo Sapiens
TIANIPAAAV

SEQ ID NO: 14570 - protein, 10 aa, Homo Sapiens
TIFTGHTAVV

SEQ ID NO: 14571 - protein, 10 aa, Homo Sapiens
TIMPKDIQLA

SEQ ID NO: 14572 - protein, 10 aa, Homo Sapiens
TIPDFIFANV

SEQ ID NO: 14573 - protein, 10 aa, Homo Sapiens
TIPERGTIGV

SEQ ID NO: 14574 - protein, 10 aa, Homo Sapiens
TIPSFLLTRA

SEQ ID NO: 14575 - protein, 10 aa, Homo Sapiens
TISSNVASKA

SEQ ID NO: 14576 - protein, 10 aa, Homo Sapiens
TLAEIAKVEL

SEQ ID NO: 14577 - protein, 10 aa, Homo Sapiens
TLFPGKVHSL

SEQ ID NO: 14578 - protein, 10 aa, Homo Sapiens
TLFPVRLLVA

SEQ ID NO: 14579 - protein, 10 aa, Homo Sapiens
TLFQHQIIHA

SEQ ID NO: 14580 - protein, 10 aa, Homo Sapiens
TLYKEILTRA

SEQ ID NO: 14581 - protein, 10 aa, Homo Sapiens
TLYPLHILFV

SEQ ID NO: 14582 - protein, 10 aa, Homo Sapiens
TQFEGMNHRV

SEQ ID NO: 14583 - protein, 10 aa, Homo Sapiens
TQLGPPYHIL

SEQ ID NO: 14584 - protein, 10 aa, Homo Sapiens
TSFNYAMKEA

SEQ ID NO: 14585 - protein, 10 aa, Homo Sapiens
TTFEHDIQAL

SEQ ID NO: 14586 - protein, 10 aa, Homo Sapiens
TTFGEHLNAV

SEQ ID NO: 14587 - protein, 10 aa, Homo Sapiens
TTFQDELIRA

SEQ ID NO: 14588 - protein, 10 aa, Homo Sapiens
TTFQSHLNKA

SEQ ID NO: 14589 - protein, 10 aa, Homo Sapiens
TTFTWNINHA

SEQ ID NO: 14590 - protein, 10 aa, Homo Sapiens
TTVGKGVTTV

SEQ ID NO: 14591 - protein, 10 aa, Homo Sapiens
TTYEGIFKTL

SEQ ID NO: 14592 - protein, 10 aa, Homo Sapiens
TVADFFIKAV

SEQ ID NO: 14593 - protein, 10 aa, Homo Sapiens
TVFDEAIRAV

SEQ ID NO: 14594 - protein, 10 aa, Homo Sapiens
TVFGTALNYV

SEQ ID NO: 14595 - protein, 10 aa, Homo Sapiens
TVFKYKLIGI

SEQ ID NO: 14596 - protein, 10 aa, Homo Sapiens
TVFSKSFEQV

SEQ ID NO: 14597 - protein, 10 aa, Homo Sapiens
TVFTDHMLTV

SEQ ID NO: 14598 - protein, 10 aa, Homo Sapiens
TVIENIHTII

SEQ ID NO: 14599 - protein, 10 aa, Homo Sapiens
TVIGGGLMGA

SEQ ID NO: 14600 - protein, 10 aa, Homo Sapiens
TVMDSKIVQV

SEQ ID NO: 14601 - protein, 10 aa, Homo Sapiens
TVMPEDLVEA

SEQ ID NO: 14602 - protein, 10 aa, Homo Sapiens
TVYGGYLCSV

SEQ ID NO: 14603 - protein, 10 aa, Homo Sapiens
TVYPGLMITA

SEQ ID NO: 14604 - protein, 10 aa, Homo Sapiens
VIFEENVEHA

SEQ ID NO: 14605 - protein, 10 aa, Homo Sapiens
VIFPEFLKEL

SEQ ID NO: 14606 - protein, 10 aa, Homo Sapiens
VIFTSPIKAL

SEQ ID NO: 14607 - protein, 10 aa, Homo Sapiens
VILEGELERA

SEQ ID NO: 14608 - protein, 10 aa, Homo Sapiens
VIPDIPDHFL

SEQ ID NO: 14609 - protein, 10 aa, Homo Sapiens
VIYDGKECRA

SEQ ID NO: 14610 - protein, 10 aa, Homo Sapiens
VLFDDELLMV

SEQ ID NO: 14611 - protein, 10 aa, Homo Sapiens
VLFDKVCEHL

SEQ ID NO: 14612 - protein, 10 aa, Homo Sapiens
VLFEGRTVQL

SEQ ID NO: 14613 - protein, 10 aa, Homo Sapiens
VLFEKEVNEV

SEQ ID NO: 14614 - protein, 10 aa, Homo Sapiens
VLFKAQLEKA

SEQ ID NO: 14615 - protein, 10 aa, Homo Sapiens
VLFQEALWHV

SEQ ID NO: 14616 - protein, 10 aa, Homo Sapiens
VLFTGLHVYL

SEQ ID NO: 14617 - protein, 10 aa, Homo Sapiens
VLIGEFLEKV

SEQ ID NO: 14618 - protein, 10 aa, Homo Sapiens
VLPNFLPYNV

SEQ ID NO: 14619 - protein, 10 aa, Homo Sapiens
VLSAADKGNV

SEQ ID NO: 14620 - protein, 10 aa, Homo Sapiens
VLYGPKIDRA

SEQ ID NO: 14621 - protein, 10 aa, Homo Sapiens
VLYSLQICKA

SEQ ID NO: 14622 - protein, 10 aa, Homo Sapiens
VLYTGDFRLA

SEQ ID NO: 14623 - protein, 10 aa, Homo Sapiens
VMFGGKQVVV

SEQ ID NO: 14624 - protein, 10 aa, Homo Sapiens
VQFGHAGACA

SEQ ID NO: 14625 - protein, 10 aa, Homo Sapiens
VSFYEHIITV

SEQ ID NO: 14626 - protein, 10 aa, Homo Sapiens
VSKAQQLAEV

SEQ ID NO: 14627 - protein, 10 aa, Homo Sapiens
VTFPRELASL

SEQ ID NO: 14628 - protein, 10 aa, Homo Sapiens
VTPKFFLEEA

SEQ ID NO: 14629 - protein, 10 aa, Homo Sapiens
VTWHGRGDYL

SEQ ID NO: 14630 - protein, 10 aa, Homo Sapiens
VVAAAAAEAK

SEQ ID NO: 14631 - protein, 10 aa, Homo Sapiens
VVAAGGVEKA

SEQ ID NO: 14632 - protein, 10 aa, Homo Sapiens
VVADFGLARL

SEQ ID NO: 14633 - protein, 10 aa, Homo Sapiens
VVAPDNLKQV

SEQ ID NO: 14634 - protein, 10 aa, Homo Sapiens
VVFDCKFIET

SEQ ID NO: 14635 - protein, 10 aa, Homo Sapiens
VVFGGGEARL

SEQ ID NO: 14636 - protein, 10 aa, Homo Sapiens
VVFGPELVSL

SEQ ID NO: 14637 - protein, 10 aa, Homo Sapiens
VVFTDEMAHF

SEQ ID NO: 14638 - protein, 10 aa, Homo Sapiens
VVPPFLQPEV

SEQ ID NO: 14639 - protein, 10 aa, Homo Sapiens
VVYENVSHFL

SEQ ID NO: 14640 - protein, 10 aa, Homo Sapiens
VVYGGGAAEI

SEQ ID NO: 14641 - protein, 10 aa, Homo Sapiens
VVYLQKLDTA

SEQ ID NO: 14642 - protein, 10 aa, Homo Sapiens
YAAPGGLIGV

SEQ ID NO: 14643 - protein, 10 aa, Homo Sapiens
YAAPYKSDFL

SEQ ID NO: 14644 - protein, 10 aa, Homo Sapiens
YAFDLKCDSV

SEQ ID NO: 14645 - protein, 10 aa, Homo Sapiens
YAVDRAITHL

SEQ ID NO: 14646 - protein, 10 aa, Homo Sapiens
YAYDGKDYIA

SEQ ID NO: 14647 - protein, 10 aa, Homo Sapiens
YGYDNVKEYL

SEQ ID NO: 14648 - protein, 10 aa, Homo Sapiens
YIFEGLGHLI

SEQ ID NO: 14649 - protein, 10 aa, Homo Sapiens
YIFPAGGDGL

SEQ ID NO: 14650 - protein, 10 aa, Homo Sapiens
YIIEQGVCYL

SEQ ID NO: 14651 - protein, 10 aa, Homo Sapiens
YIPDEADFLL

SEQ ID NO: 14652 - protein, 10 aa, Homo Sapiens
YIPDGHTKEM

SEQ ID NO: 14653 - protein, 10 aa, Homo Sapiens
YIPDLYNHFL

SEQ ID NO: 14654 - protein, 10 aa, Homo Sapiens
YIPEITSVLL

SEQ ID NO: 14655 - protein, 10 aa, Homo Sapiens
YIPFYGILGA

SEQ ID NO: 14656 - protein, 10 aa, Homo Sapiens
YIPGRQIIEV

SEQ ID NO: 14657 - protein, 10 aa, Homo Sapiens
YIPPMAQPGL

SEQ ID NO: 14658 - protein, 10 aa, Homo Sapiens
YIYDKDMEII

SEQ ID NO: 14659 - protein, 10 aa, Homo Sapiens
YIYNEKIVNG

SEQ ID NO: 14660 - protein, 10 aa, Homo Sapiens
YLFDEIDQAL

SEQ ID NO: 14661 - protein, 10 aa, Homo Sapiens
YLFDRNGVCL

SEQ ID NO: 14662 - protein, 10 aa, Homo Sapiens
YLITGNLEKL

SEQ ID NO: 14663 - protein, 10 aa, Homo Sapiens
YLPENKPCYL

SEQ ID NO: 14664 - protein, 10 aa, Homo Sapiens
YLSDIPLHDA

SEQ ID NO: 14665 - protein, 10 aa, Homo Sapiens
YMFPDTMLQA

SEQ ID NO: 14666 - protein, 10 aa, Homo Sapiens
YQAPDIDVQL

SEQ ID NO: 14667 - protein, 10 aa, Homo Sapiens
YQFIHAADML

SEQ ID NO: 14668 - protein, 10 aa, Homo Sapiens
YQIDAAIVRI

SEQ ID NO: 14669 - protein, 10 aa, Homo Sapiens
YQILDGIHYL

SEQ ID NO: 14670 - protein, 10 aa, Homo Sapiens
YQNEDEKVTL

SEQ ID NO: 14671 - protein, 10 aa, Homo Sapiens
YQPDWRFMES

SEQ ID NO: 14672 - protein, 10 aa, Homo Sapiens
YQQQGRLDKL

SEQ ID NO: 14673 - protein, 10 aa, Homo Sapiens
YQWDDPDPRL

SEQ ID NO: 14674 - protein, 10 aa, Homo Sapiens
YQYMHETITV

SEQ ID NO: 14675 - protein, 10 aa, Homo Sapiens
YSFSRKITEA

SEQ ID NO: 14676 - protein, 10 aa, Homo Sapiens
YSFYLPIAAA

SEQ ID NO: 14677 - protein, 10 aa, Homo Sapiens
YSKYYKTIDD

SEQ ID NO: 14678 - protein, 10 aa, Homo Sapiens
YTFPGWKVGV

SEQ ID NO: 14679 - protein, 10 aa, Homo Sapiens
YTFSEPFHLI

SEQ ID NO: 14680 - protein, 10 aa, Homo Sapiens
YTPEHHLIQA

SEQ ID NO: 14681 - protein, 10 aa, Homo Sapiens
YTYDEAIHSV

SEQ ID NO: 14682 - protein, 10 aa, Homo Sapiens
YTYEEGLSHL

SEQ ID NO: 14683 - protein, 10 aa, Homo Sapiens
YTYEELLNRV

SEQ ID NO: 14684 - protein, 10 aa, Homo Sapiens
YTYEKLLWTT

SEQ ID NO: 14685 - protein, 10 aa, Homo Sapiens
YTYESKMAFL

SEQ ID NO: 14686 - protein, 10 aa, Homo Sapiens
YVAPAYGVYL

SEQ ID NO: 14687 - protein, 10 aa, Homo Sapiens
YVFDVESREL

SEQ ID NO: 14688 - protein, 10 aa, Homo Sapiens
YVFEGKMLEA

SEQ ID NO: 14689 - protein, 10 aa, Homo Sapiens
YVIAYIRDLA

SEQ ID NO: 14690 - protein, 10 aa, Homo Sapiens
YVISEGFLKA

SEQ ID NO: 14691 - protein, 10 aa, Homo Sapiens
YVPDFVLQGI

SEQ ID NO: 14692 - protein, 10 aa, Homo Sapiens
YVVDTGMVKA

SEQ ID NO: 14693 - protein, 10 aa, Homo Sapiens
YVYDKDIEQI

SEQ ID NO: 14694 - protein, 11 aa, Homo Sapiens
AAAAAAAAAAA

SEQ ID NO: 14695 - protein, 11 aa, Homo Sapiens
AAAAAAAAVAA

SEQ ID NO: 14696 - protein, 11 aa, Homo Sapiens
AAAAAAAVTAA

SEQ ID NO: 14697 - protein, 11 aa, Homo Sapiens
AAAAAAPAAPA

SEQ ID NO: 14698 - protein, 11 aa, Homo Sapiens
AAAAAPALAAA

SEQ ID NO: 14699 - protein, 11 aa, Homo Sapiens
AAAAPAAATAA

SEQ ID NO: 14700 - protein, 11 aa, Homo Sapiens
AGAPARAVSAV

SEQ ID NO: 14701 - protein, 11 aa, Homo Sapiens
AIAPCEVTVPA

SEQ ID NO: 14702 - protein, 11 aa, Homo Sapiens
AIFPTPDPAAL

SEQ ID NO: 14703 - protein, 11 aa, Homo Sapiens
AIIPYIPTLIT

SEQ ID NO: 14704 - protein, 11 aa, Homo Sapiens
ALADKELLPSV

SEQ ID NO: 14705 - protein, 11 aa, Homo Sapiens
ALFPHLLQPVL

SEQ ID NO: 14706 - protein, 11 aa, Homo Sapiens
ALIEAEKVAQV

SEQ ID NO: 14707 - protein, 11 aa, Homo Sapiens
APAAAAAAAAA

SEQ ID NO: 14708 - protein, 11 aa, Homo Sapiens
APSFSDIPNPI

SEQ ID NO: 14709 - protein, 11 aa, Homo Sapiens
AQAEVYKELRL

SEQ ID NO: 14710 - protein, 11 aa, Homo Sapiens
AQAPVTKGCYL

SEQ ID NO: 14711 - protein, 11 aa, Homo Sapiens
AQIDSNIAHTV

SEQ ID NO: 14712 - protein, 11 aa, Homo Sapiens
AQYDPAKPNYI

SEQ ID NO: 14713 - protein, 11 aa, Homo Sapiens
ASVSQNAIVSA

SEQ ID NO: 14714 - protein, 11 aa, Homo Sapiens
ATAAKQVAAKP

SEQ ID NO: 14715 - protein, 11 aa, Homo Sapiens
ATVPIRLIINA

SEQ ID NO: 14716 - protein, 11 aa, Homo Sapiens
AVAEEALVDHV

SEQ ID NO: 14717 - protein, 11 aa, Homo Sapiens
AVANEEGFVRL

SEQ ID NO: 14718 - protein, 11 aa, Homo Sapiens
AVARVGAVASA

SEQ ID NO: 14719 - protein, 11 aa, Homo Sapiens
AVCDASKVVTV

SEQ ID NO: 14720 - protein, 11 aa, Homo Sapiens
AVIEAEKIAQV

SEQ ID NO: 14721 - protein, 11 aa, Homo Sapiens
AVISSAGTHSV

SEQ ID NO: 14722 - protein, 11 aa, Homo Sapiens
AVIVPEGVHAL

SEQ ID NO: 14723 - protein, 11 aa, Homo Sapiens
AVPEGDWFCTV

SEQ ID NO: 14724 - protein, 11 aa, Homo Sapiens
AVPKEGKVVDA

SEQ ID NO: 14725 - protein, 11 aa, Homo Sapiens
AVPQPGAFQRA

SEQ ID NO: 14726 - protein, 11 aa, Homo Sapiens
AVPREELFVTS

SEQ ID NO: 14727 - protein, 11 aa, Homo Sapiens
AVPSAGSVQRV

SEQ ID NO: 14728 - protein, 11 aa, Homo Sapiens
AVVDEGDVVEV

SEQ ID NO: 14729 - protein, 11 aa, Homo Sapiens
AVVGSTCDVKV

SEQ ID NO: 14730 - protein, 11 aa, Homo Sapiens
AVVSPPALHNA

SEQ ID NO: 14731 - protein, 11 aa, Homo Sapiens
FAEDVGSNKGA

SEQ ID NO: 14732 - protein, 11 aa, Homo Sapiens
FAYDGKDYLTL

SEQ ID NO: 14733 - protein, 11 aa, Homo Sapiens
FAYDPSNYEYL

SEQ ID NO: 14734 - protein, 11 aa, Homo Sapiens
FGIDRDAIAQA

SEQ ID NO: 14735 - protein, 11 aa, Homo Sapiens
FICEQDHQNFL

SEQ ID NO: 14736 - protein, 11 aa, Homo Sapiens
FIFEKKLAQAL

SEQ ID NO: 14737 - protein, 11 aa, Homo Sapiens
FIIGPGGVVNL

SEQ ID NO: 14738 - protein, 11 aa, Homo Sapiens
FIIQGLRSVGA

SEQ ID NO: 14739 - protein, 11 aa, Homo Sapiens
FIPLPSAVVQA

SEQ ID NO: 14740 - protein, 11 aa, Homo Sapiens
FLADPSAFVAA

SEQ ID NO: 14741 - protein, 11 aa, Homo Sapiens
FLASESLIKQI

SEQ ID NO: 14742 - protein, 11 aa, Homo Sapiens
FLIEPEHVNTV

SEQ ID NO: 14743 - protein, 11 aa, Homo Sapiens
FLPDPSALQNL

SEQ ID NO: 14744 - protein, 11 aa, Homo Sapiens
FLPETRIMTSV

SEQ ID NO: 14745 - protein, 11 aa, Homo Sapiens
FLPPEHTIVYI

SEQ ID NO: 14746 - protein, 11 aa, Homo Sapiens
FLVGEAARALS

SEQ ID NO: 14747 - protein, 11 aa, Homo Sapiens
FLVPAEPCRKA

SEQ ID NO: 14748 - protein, 11 aa, Homo Sapiens
FLVPIESIERA

SEQ ID NO: 14749 - protein, 11 aa, Homo Sapiens
FQAHKEAIREA

SEQ ID NO: 14750 - protein, 11 aa, Homo Sapiens
FQAVHVQGEDL

SEQ ID NO: 14751 - protein, 11 aa, Homo Sapiens
FQKADGVPVYL

SEQ ID NO: 14752 - protein, 11 aa, Homo Sapiens
FQVEHFSQEEL

SEQ ID NO: 14753 - protein, 11 aa, Homo Sapiens
FQVENDQERFL

SEQ ID NO: 14754 - protein, 11 aa, Homo Sapiens
FQYASTDMDKV

SEQ ID NO: 14755 - protein, 11 aa, Homo Sapiens
FQYDDSGNTFF

SEQ ID NO: 14756 - protein, 11 aa, Homo Sapiens
FSVSPQAVYTA

SEQ ID NO: 14757 - protein, 11 aa, Homo Sapiens
FTCDEGHGIFV

SEQ ID NO: 14758 - protein, 11 aa, Homo Sapiens
FTYPKGAGEML

SEQ ID NO: 14759 - protein, 11 aa, Homo Sapiens
FVADEELVHLL

SEQ ID NO: 14760 - protein, 11 aa, Homo Sapiens
FVADILKGENL

SEQ ID NO: 14761 - protein, 11 aa, Homo Sapiens
FVAGVLPFKVA

SEQ ID NO: 14762 - protein, 11 aa, Homo Sapiens
FVPEPSSTMGL

SEQ ID NO: 14763 - protein, 11 aa, Homo Sapiens
FVPGSQVVVQA

SEQ ID NO: 14764 - protein, 11 aa, Homo Sapiens
FVTEGSHFVEA

SEQ ID NO: 14765 - protein, 11 aa, Homo Sapiens
FVVYENVSHFL

SEQ ID NO: 14766 - protein, 11 aa, Homo Sapiens
GAADKSAVVAA

SEQ ID NO: 14767 - protein, 11 aa, Homo Sapiens
GLADASLLKKV

SEQ ID NO: 14768 - protein, 11 aa, Homo Sapiens
GLVDEKALAQA

SEQ ID NO: 14769 - protein, 11 aa, Homo Sapiens
GQMDTKGLVRA

SEQ ID NO: 14770 - protein, 11 aa, Homo Sapiens
GQVEEKLLQKL

SEQ ID NO: 14771 - protein, 11 aa, Homo Sapiens
GTIDEIQKLHI

SEQ ID NO: 14772 - protein, 11 aa, Homo Sapiens
GVAPSRAIYFA

SEQ ID NO: 14773 - protein, 11 aa, Homo Sapiens
GVPSATEIIKA

SEQ ID NO: 14774 - protein, 11 aa, Homo Sapiens
GVVDPRAISVL

SEQ ID NO: 14775 - protein, 11 aa, Homo Sapiens
GVVNKPATFTV

SEQ ID NO: 14776 - protein, 11 aa, Homo Sapiens
GVYDGTEIHEA

SEQ ID NO: 14777 - protein, 11 aa, Homo Sapiens
GVYNGKTFNQV

SEQ ID NO: 14778 - protein, 11 aa, Homo Sapiens
HQIEAVDGEEL

SEQ ID NO: 14779 - protein, 11 aa, Homo Sapiens
HVIDLDDATFL

SEQ ID NO: 14780 - protein, 11 aa, Homo Sapiens
HVISADAIEAL

SEQ ID NO: 14781 - protein, 11 aa, Homo Sapiens
HVPSTDLILNV

SEQ ID NO: 14782 - protein, 11 aa, Homo Sapiens
HVYDGKFLARV

SEQ ID NO: 14783 - protein, 11 aa, Homo Sapiens
ILVGENLVCKV

SEQ ID NO: 14784 - protein, 11 aa, Homo Sapiens
IMPNGDHIVSA

SEQ ID NO: 14785 - protein, 11 aa, Homo Sapiens
IQAEHSESGQL

SEQ ID NO: 14786 - protein, 11 aa, Homo Sapiens
IQEEEDEKQRL

SEQ ID NO: 14787 - protein, 11 aa, Homo Sapiens
IQYIPTELDQV

SEQ ID NO: 14788 - protein, 11 aa, Homo Sapiens
ITQIEHEVSSS

SEQ ID NO: 14789 - protein, 11 aa, Homo Sapiens
IVADDRFTKSI

SEQ ID NO: 14790 - protein, 11 aa, Homo Sapiens
IVAECNAVRQA

SEQ ID NO: 14791 - protein, 11 aa, Homo Sapiens
IVAGQRCIKKL

SEQ ID NO: 14792 - protein, 11 aa, Homo Sapiens
IVISAAGIPNL

SEQ ID NO: 14793 - protein, 11 aa, Homo Sapiens
KAMTEDGFLAV

SEQ ID NO: 14794 - protein, 11 aa, Homo Sapiens
KAVDAEPVLKA

SEQ ID NO: 14795 - protein, 11 aa, Homo Sapiens
KAVPKSAVQQV

SEQ ID NO: 14796 - protein, 11 aa, Homo Sapiens
KAVWAKGIRNV

SEQ ID NO: 14797 - protein, 11 aa, Homo Sapiens
KIFDENELELL

SEQ ID NO: 14798 - protein, 11 aa, Homo Sapiens
KIIDEDGLLNL

SEQ ID NO: 14799 - protein, 11 aa, Homo Sapiens
KIIEKDAMIKV

SEQ ID NO: 14800 - protein, 11 aa, Homo Sapiens
KISDFGLATVF

SEQ ID NO: 14801 - protein, 11 aa, Homo Sapiens
KIYPEEITPLL

SEQ ID NO: 14802 - protein, 11 aa, Homo Sapiens
KKDVDNAYMIK

SEQ ID NO: 14803 - protein, 11 aa, Homo Sapiens
KLADFGLARAF

SEQ ID NO: 14804 - protein, 11 aa, Homo Sapiens
KLFPGFEIETV

SEQ ID NO: 14805 - protein, 11 aa, Homo Sapiens
KLFTAESLIGL

SEQ ID NO: 14806 - protein, 11 aa, Homo Sapiens
KLPKQPVIVKA

SEQ ID NO: 14807 - protein, 11 aa, Homo Sapiens
KLYQRDLEVAL

SEQ ID NO: 14808 - protein, 11 aa, Homo Sapiens
KMAEEKLTHKM

SEQ ID NO: 14809 - protein, 11 aa, Homo Sapiens
KQADLYISEGL

SEQ ID NO: 14810 - protein, 11 aa, Homo Sapiens
KQIESDRQNLL

SEQ ID NO: 14811 - protein, 11 aa, Homo Sapiens
KSADEVLFTGV

SEQ ID NO: 14812 - protein, 11 aa, Homo Sapiens
KTAAEDAIRNL

SEQ ID NO: 14813 - protein, 11 aa, Homo Sapiens
KTAEAQLAYEL

SEQ ID NO: 14814 - protein, 11 aa, Homo Sapiens
KTATELSTVYL

SEQ ID NO: 14815 - protein, 11 aa, Homo Sapiens
KTPIESLFIEA

SEQ ID NO: 14816 - protein, 11 aa, Homo Sapiens
KTYDTSFLDFL

SEQ ID NO: 14817 - protein, 11 aa, Homo Sapiens
KVFPSEITDTV

SEQ ID NO: 14818 - protein, 11 aa, Homo Sapiens
KVFSGALQEAL

SEQ ID NO: 14819 - protein, 11 aa, Homo Sapiens
KVIDIEGCAHI

SEQ ID NO: 14820 - protein, 11 aa, Homo Sapiens
KVIEDVAFACA

SEQ ID NO: 14821 - protein, 11 aa, Homo Sapiens
KVITDIAGVIP

SEQ ID NO: 14822 - protein, 11 aa, Homo Sapiens
KVVDAKTIFTG

SEQ ID NO: 14823 - protein, 11 aa, Homo Sapiens
KVVDEEAMEKV

SEQ ID NO: 14824 - protein, 11 aa, Homo Sapiens
KVVGFDAVMRV

SEQ ID NO: 14825 - protein, 11 aa, Homo Sapiens
KVVVVQAISAL

SEQ ID NO: 14826 - protein, 11 aa, Homo Sapiens
LIIDENGVHEL

SEQ ID NO: 14827 - protein, 11 aa, Homo Sapiens
LLFDHLEPIEL

SEQ ID NO: 14828 - protein, 11 aa, Homo Sapiens
LLSHSLLVTLA

SEQ ID NO: 14829 - protein, 11 aa, Homo Sapiens
LPAAAAAAAAA

SEQ ID NO: 14830 - protein, 11 aa, Homo Sapiens
LQIEDFEARIA

SEQ ID NO: 14831 - protein, 11 aa, Homo Sapiens
LQKKIEENERL

SEQ ID NO: 14832 - protein, 11 aa, Homo Sapiens
LQMEPDNVNAL

SEQ ID NO: 14833 - protein, 11 aa, Homo Sapiens
LSRSSALASKA

SEQ ID NO: 14834 - protein, 11 aa, Homo Sapiens
LTAPEDVFSKL

SEQ ID NO: 14835 - protein, 11 aa, Homo Sapiens
LTAPPEALLMV

SEQ ID NO: 14836 - protein, 11 aa, Homo Sapiens
LTFDGKRMRKA

SEQ ID NO: 14837 - protein, 11 aa, Homo Sapiens
LVYDQQREVYV

SEQ ID NO: 14838 - protein, 11 aa, Homo Sapiens
LVYPEELKPVL

SEQ ID NO: 14839 - protein, 11 aa, Homo Sapiens
MQAPRAALVFA

SEQ ID NO: 14840 - protein, 11 aa, Homo Sapiens
MVPEPKIIDAA

SEQ ID NO: 14841 - protein, 11 aa, Homo Sapiens
NAAPRIALHTA

SEQ ID NO: 14842 - protein, 11 aa, Homo Sapiens
NAVSEALIREV

SEQ ID NO: 14843 - protein, 11 aa, Homo Sapiens
NEEVVLNDVMI

SEQ ID NO: 14844 - protein, 11 aa, Homo Sapiens
NQIEDNDDFQL

SEQ ID NO: 14845 - protein, 11 aa, Homo Sapiens
NQIGDAGVQHL

SEQ ID NO: 14846 - protein, 11 aa, Homo Sapiens
NQIQAHSSDQL

SEQ ID NO: 14847 - protein, 11 aa, Homo Sapiens
NTAPDDLIRYA

SEQ ID NO: 14848 - protein, 11 aa, Homo Sapiens
NTISEQAVKAS

SEQ ID NO: 14849 - protein, 11 aa, Homo Sapiens
NVIQSTAVTTV

SEQ ID NO: 14850 - protein, 11 aa, Homo Sapiens
NVVFEKAIQRT

SEQ ID NO: 14851 - protein, 11 aa, Homo Sapiens
PAAAAAAAAAP

SEQ ID NO: 14852 - protein, 11 aa, Homo Sapiens
PAASAAAALAP

SEQ ID NO: 14853 - protein, 11 aa, Homo Sapiens
PGIGGAPTLNP

SEQ ID NO: 14854 - protein, 11 aa, Homo Sapiens
QQIPASDTQQL

SEQ ID NO: 14855 - protein, 11 aa, Homo Sapiens
QQIRKLIKDGL

SEQ ID NO: 14856 - protein, 11 aa, Homo Sapiens
QTAPEEAFIKL

SEQ ID NO: 14857 - protein, 11 aa, Homo Sapiens
QVFDAKNMMAA

SEQ ID NO: 14858 - protein, 11 aa, Homo Sapiens
QVISQAAVVHA

SEQ ID NO: 14859 - protein, 11 aa, Homo Sapiens
QVPEEQVLNAA

SEQ ID NO: 14860 - protein, 11 aa, Homo Sapiens
QVPQANTIVQA

SEQ ID NO: 14861 - protein, 11 aa, Homo Sapiens
QVSDPESTVAV

SEQ ID NO: 14862 - protein, 11 aa, Homo Sapiens
RAAMEALVVEV

SEQ ID NO: 14863 - protein, 11 aa, Homo Sapiens
RIFGESIMIGV

SEQ ID NO: 14864 - protein, 11 aa, Homo Sapiens
RIIDEEGVESI

SEQ ID NO: 14865 - protein, 11 aa, Homo Sapiens
RIIDKNGIHDL

SEQ ID NO: 14866 - protein, 11 aa, Homo Sapiens
RLFDDSTVTTV

SEQ ID NO: 14867 - protein, 11 aa, Homo Sapiens
RLFDRGDFYTA

SEQ ID NO: 14868 - protein, 11 aa, Homo Sapiens
RLFTSEKMVKA

SEQ ID NO: 14869 - protein, 11 aa, Homo Sapiens
RLIGDAAKNQV

SEQ ID NO: 14870 - protein, 11 aa, Homo Sapiens
RLPGSGAVQAA

SEQ ID NO: 14871 - protein, 11 aa, Homo Sapiens
RLPPDTLLQQV

SEQ ID NO: 14872 - protein, 11 aa, Homo Sapiens
RLPPEGILHNV

SEQ ID NO: 14873 - protein, 11 aa, Homo Sapiens
RQPEPTKFDYL

SEQ ID NO: 14874 - protein, 11 aa, Homo Sapiens
RSVTKQAIREA

SEQ ID NO: 14875 - protein, 11 aa, Homo Sapiens
RTFDETVSTYV

SEQ ID NO: 14876 - protein, 11 aa, Homo Sapiens
RTFPEVMIPVF

SEQ ID NO: 14877 - protein, 11 aa, Homo Sapiens
RTPPPELLQTL

SEQ ID NO: 14878 - protein, 11 aa, Homo Sapiens
RTPSSASTVSV

SEQ ID NO: 14879 - protein, 11 aa, Homo Sapiens
RTVEENILKKA

SEQ ID NO: 14880 - protein, 11 aa, Homo Sapiens
RTVETEAVQML

SEQ ID NO: 14881 - protein, 11 aa, Homo Sapiens
RVAAQGFVVGA

SEQ ID NO: 14882 - protein, 11 aa, Homo Sapiens
RVAEELALEQA

SEQ ID NO: 14883 - protein, 11 aa, Homo Sapiens
RVFGSQNLTTV

SEQ ID NO: 14884 - protein, 11 aa, Homo Sapiens
RVFIGNLNTAI

SEQ ID NO: 14885 - protein, 11 aa, Homo Sapiens
RVFNRPRIETL

SEQ ID NO: 14886 - protein, 11 aa, Homo Sapiens
RVFPEKGYSFV

SEQ ID NO: 14887 - protein, 11 aa, Homo Sapiens
RVFSDIIYTVA

SEQ ID NO: 14888 - protein, 11 aa, Homo Sapiens
RVFTEANLVSV

SEQ ID NO: 14889 - protein, 11 aa, Homo Sapiens
RVFTTQELVQA

SEQ ID NO: 14890 - protein, 11 aa, Homo Sapiens
RVGPIEATSFI

SEQ ID NO: 14891 - protein, 11 aa, Homo Sapiens
RVIDDSLVVGV

SEQ ID NO: 14892 - protein, 11 aa, Homo Sapiens
RVIDREGVYEI

SEQ ID NO: 14893 - protein, 11 aa, Homo Sapiens
RVIEEAKTAFL

SEQ ID NO: 14894 - protein, 11 aa, Homo Sapiens
RVIEGDVVSAL

SEQ ID NO: 14895 - protein, 11 aa, Homo Sapiens
RVINKEHVLAA

SEQ ID NO: 14896 - protein, 11 aa, Homo Sapiens
RVPAHAVVVRA

SEQ ID NO: 14897 - protein, 11 aa, Homo Sapiens
RVQEPGAVLLA

SEQ ID NO: 14898 - protein, 11 aa, Homo Sapiens
SAAPGSAAPAA

SEQ ID NO: 14899 - protein, 11 aa, Homo Sapiens
SIIEQLDPVSF

SEQ ID NO: 14900 - protein, 11 aa, Homo Sapiens
SLAGDVALQQL

SEQ ID NO: 14901 - protein, 11 aa, Homo Sapiens
SLMEESGICKV

SEQ ID NO: 14902 - protein, 11 aa, Homo Sapiens
SLPQNIPPLTQ

SEQ ID NO: 14903 - protein, 11 aa, Homo Sapiens
SQAAEELITRI

SEQ ID NO: 14904 - protein, 11 aa, Homo Sapiens
SQAGKGLMHHL

SEQ ID NO: 14905 - protein, 11 aa, Homo Sapiens
SQATELITQAL

SEQ ID NO: 14906 - protein, 11 aa, Homo Sapiens
SQHDLSQSAFL

SEQ ID NO: 14907 - protein, 11 aa, Homo Sapiens
SQICAKAVRDA

SEQ ID NO: 14908 - protein, 11 aa, Homo Sapiens
SQIDPSSIERA

SEQ ID NO: 14909 - protein, 11 aa, Homo Sapiens
SQIGIEATTRA

SEQ ID NO: 14910 - protein, 11 aa, Homo Sapiens
SQITAIEAQHL

SEQ ID NO: 14911 - protein, 11 aa, Homo Sapiens
STVDAEAVHKL

SEQ ID NO: 14912 - protein, 11 aa, Homo Sapiens
SVAEGRALMSV

SEQ ID NO: 14913 - protein, 11 aa, Homo Sapiens
SVAGDALTRHL

SEQ ID NO: 14914 - protein, 11 aa, Homo Sapiens
SVANADIINAA

SEQ ID NO: 14915 - protein, 11 aa, Homo Sapiens
SVAPDTINNHV

SEQ ID NO: 14916 - protein, 11 aa, Homo Sapiens
SVAPKNALVQL

SEQ ID NO: 14917 - protein, 11 aa, Homo Sapiens
SVAPSPAVDKA

SEQ ID NO: 14918 - protein, 11 aa, Homo Sapiens
SVIDPPAVNLA

SEQ ID NO: 14919 - protein, 11 aa, Homo Sapiens
SVIEQGGIQTV

SEQ ID NO: 14920 - protein, 11 aa, Homo Sapiens
SVIPVINKIDL

SEQ ID NO: 14921 - protein, 11 aa, Homo Sapiens
SVIWDKAVVTG

SEQ ID NO: 14922 - protein, 11 aa, Homo Sapiens
SVPEKIERIEL

SEQ ID NO: 14923 - protein, 11 aa, Homo Sapiens
SVPGQTAVTAA

SEQ ID NO: 14924 - protein, 11 aa, Homo Sapiens
SVPGRGTVVTG

SEQ ID NO: 14925 - protein, 11 aa, Homo Sapiens
SVPNKDVFQEL

SEQ ID NO: 14926 - protein, 11 aa, Homo Sapiens
SVPPPDITYTL

SEQ ID NO: 14927 - protein, 11 aa, Homo Sapiens
SVSDAPVHITA

SEQ ID NO: 14928 - protein, 11 aa, Homo Sapiens
SVVKKSLITFV

SEQ ID NO: 14929 - protein, 11 aa, Homo Sapiens
SVYDGHGGEEV

SEQ ID NO: 14930 - protein, 11 aa, Homo Sapiens
SVYDSISMETL

SEQ ID NO: 14931 - protein, 11 aa, Homo Sapiens
TAAPAAAAAAA

SEQ ID NO: 14932 - protein, 11 aa, Homo Sapiens
TDAPSFSDIPN

SEQ ID NO: 14933 - protein, 11 aa, Homo Sapiens
TIIDLPGITRV

SEQ ID NO: 14934 - protein, 11 aa, Homo Sapiens
TLIDLPGITKV

SEQ ID NO: 14935 - protein, 11 aa, Homo Sapiens
TLIRSDAVALV

SEQ ID NO: 14936 - protein, 11 aa, Homo Sapiens
TMAKESSIIGV

SEQ ID NO: 14937 - protein, 11 aa, Homo Sapiens
TQAESAQSNRL

SEQ ID NO: 14938 - protein, 11 aa, Homo Sapiens
TQANPGKGEGL

SEQ ID NO: 14939 - protein, 11 aa, Homo Sapiens
TQFGGKRPFGV

SEQ ID NO: 14940 - protein, 11 aa, Homo Sapiens
TQMNAELNYKV

SEQ ID NO: 14941 - protein, 11 aa, Homo Sapiens
TQTPVVVPPFL

SEQ ID NO: 14942 - protein, 11 aa, Homo Sapiens
TVAPPQGVVKA

SEQ ID NO: 14943 - protein, 11 aa, Homo Sapiens
TVISEDSVVKA

SEQ ID NO: 14944 - protein, 11 aa, Homo Sapiens
TVPKPDVVVQV

SEQ ID NO: 14945 - protein, 11 aa, Homo Sapiens
TVYGGYLCSVR

SEQ ID NO: 14946 - protein, 11 aa, Homo Sapiens
VGCISVTVPSM

SEQ ID NO: 14947 - protein, 11 aa, Homo Sapiens
VISAAGIPNLI

SEQ ID NO: 14948 - protein, 11 aa, Homo Sapiens
VQKELSDMDYL

SEQ ID NO: 14949 - protein, 11 aa, Homo Sapiens
VTHNEQLCYQL

SEQ ID NO: 14950 - protein, 11 aa, Homo Sapiens
VVAEARATPFL

SEQ ID NO: 14951 - protein, 11 aa, Homo Sapiens
VVASDKETYEL

SEQ ID NO: 14952 - protein, 11 aa, Homo Sapiens
VVATEKNVIAA

SEQ ID NO: 14953 - protein, 11 aa, Homo Sapiens
VVITEKGISDL

SEQ ID NO: 14954 - protein, 11 aa, Homo Sapiens
VVPPFLQPEVM

SEQ ID NO: 14955 - protein, 11 aa, Homo Sapiens
WLANEGLITRL

SEQ ID NO: 14956 - protein, 11 aa, Homo Sapiens
WLIEDGKVVTV

SEQ ID NO: 14957 - protein, 11 aa, Homo Sapiens
YAYDGKDYIAL

SEQ ID NO: 14958 - protein, 11 aa, Homo Sapiens
YEDIAQKSKAE

SEQ ID NO: 14959 - protein, 11 aa, Homo Sapiens
YGAEALERMFL

SEQ ID NO: 14960 - protein, 11 aa, Homo Sapiens
YIPEVELNHKL

SEQ ID NO: 14961 - protein, 11 aa, Homo Sapiens
YIPYEAGTYSL

SEQ ID NO: 14962 - protein, 11 aa, Homo Sapiens
YIYDGKTGEKV

SEQ ID NO: 14963 - protein, 11 aa, Homo Sapiens
YIYDKDMEIIA

SEQ ID NO: 14964 - protein, 11 aa, Homo Sapiens
YLPDIIKDQKA

SEQ ID NO: 14965 - protein, 11 aa, Homo Sapiens
YLPEADSILFL

SEQ ID NO: 14966 - protein, 11 aa, Homo Sapiens
YLYESGETEKL

SEQ ID NO: 14967 - protein, 11 aa, Homo Sapiens
YQAEINDLENL

SEQ ID NO: 14968 - protein, 11 aa, Homo Sapiens
YQAKENDFDRL

SEQ ID NO: 14969 - protein, 11 aa, Homo Sapiens
YQANITETQRL

SEQ ID NO: 14970 - protein, 11 aa, Homo Sapiens
YQIDPDACFSA

SEQ ID NO: 14971 - protein, 11 aa, Homo Sapiens
YQIEHYSMDDL

SEQ ID NO: 14972 - protein, 11 aa, Homo Sapiens
YQIGEKGAVKV

SEQ ID NO: 14973 - protein, 11 aa, Homo Sapiens
YQIPTENSMTA

SEQ ID NO: 14974 - protein, 11 aa, Homo Sapiens
YQPDEPLTQFL

SEQ ID NO: 14975 - protein, 11 aa, Homo Sapiens
YTIGEVPISFV

SEQ ID NO: 14976 - protein, 11 aa, Homo Sapiens
YTPEHHLIQAV

SEQ ID NO: 14977 - protein, 11 aa, Homo Sapiens
YTSPEEIDAQL

SEQ ID NO: 14978 - protein, 11 aa, Homo Sapiens
YVEDGKGIRRV

SEQ ID NO: 14979 - protein, 11 aa, Homo Sapiens
YVIDSTDEERL

SEQ ID NO: 14980 - protein, 11 aa, Homo Sapiens
YVIEPHSMEFA

SEQ ID NO: 14981 - protein, 11 aa, Homo Sapiens
YVSPEDLEAQL

SEQ ID NO: 14982 - protein, 8 aa, Homo Sapiens
AIEHLDKI

SEQ ID NO: 14983 - protein, 8 aa, Homo Sapiens
FSPVGSVL

SEQ ID NO: 14984 - protein, 8 aa, Homo Sapiens
GVGPIRKV

SEQ ID NO: 14985 - protein, 8 aa, Homo Sapiens
LDKKVEKV

SEQ ID NO: 14986 - protein, 8 aa, Homo Sapiens
LMEHIHKL

SEQ ID NO: 14987 - protein, 8 aa, Homo Sapiens
LPSDFTPA

SEQ ID NO: 14988 - protein, 8 aa, Homo Sapiens
PDIKVLTL

SEQ ID NO: 14989 - protein, 8 aa, Homo Sapiens
TEAPLNPK

SEQ ID NO: 14990 - protein, 8 aa, Homo Sapiens
TLHLVLRL

SEQ ID NO: 14991 - protein, 8 aa, Homo Sapiens
VSLTACKV

SEQ ID NO: 14992 - protein, 8 aa, Homo Sapiens
WVWLSVCL

SEQ ID NO: 14993 - protein, 9 aa, Homo Sapiens
AAAAVIPTV

SEQ ID NO: 14994 - protein, 9 aa, Homo Sapiens
AAAGVVHAV

SEQ ID NO: 14995 - protein, 9 aa, Homo Sapiens
AAALIIHHV

SEQ ID NO: 14996 - protein, 9 aa, Homo Sapiens
AAFHNFIKV

SEQ ID NO: 14997 - protein, 9 aa, Homo Sapiens
AAIEIFEKV

SEQ ID NO: 14998 - protein, 9 aa, Homo Sapiens
AAIENLNEA

SEQ ID NO: 14999 - protein, 9 aa, Homo Sapiens
AAIPSLLNA

SEQ ID NO: 15000 - protein, 9 aa, Homo Sapiens
AALNGLYRV

SEQ ID NO: 15001 - protein, 9 aa, Homo Sapiens
AALPNVYEV

SEQ ID NO: 15002 - protein, 9 aa, Homo Sapiens
AALPSDPRL

SEQ ID NO: 15003 - protein, 9 aa, Homo Sapiens
AALTSDPAV

SEQ ID NO: 15004 - protein, 9 aa, Homo Sapiens
AAMYELVRV

SEQ ID NO: 15005 - protein, 9 aa, Homo Sapiens
AASGHFICV

SEQ ID NO: 15006 - protein, 9 aa, Homo Sapiens
AATEIVERV

SEQ ID NO: 15007 - protein, 9 aa, Homo Sapiens
AATNEVPEV

SEQ ID NO: 15008 - protein, 9 aa, Homo Sapiens
AAVDAVARV

SEQ ID NO: 15009 - protein, 9 aa, Homo Sapiens
AAVRDISEA

SEQ ID NO: 15010 - protein, 9 aa, Homo Sapiens
AICPNNHEV

SEQ ID NO: 15011 - protein, 9 aa, Homo Sapiens
AIIDHIFAS

SEQ ID NO: 15012 - protein, 9 aa, Homo Sapiens
AIIEYMPLL

SEQ ID NO: 15013 - protein, 9 aa, Homo Sapiens
AIISKLVAL

SEQ ID NO: 15014 - protein, 9 aa, Homo Sapiens
AILELDEHL

SEQ ID NO: 15015 - protein, 9 aa, Homo Sapiens
AILKELVTL

SEQ ID NO: 15016 - protein, 9 aa, Homo Sapiens
AILSQFEKV

SEQ ID NO: 15017 - protein, 9 aa, Homo Sapiens
AIMDIVIKV

SEQ ID NO: 15018 - protein, 9 aa, Homo Sapiens
AIMDLLLRL

SEQ ID NO: 15019 - protein, 9 aa, Homo Sapiens
AIQDKLFQV

SEQ ID NO: 15020 - protein, 9 aa, Homo Sapiens
AIVDHLVAL

SEQ ID NO: 15021 - protein, 9 aa, Homo Sapiens
AIVDKVPSV

SEQ ID NO: 15022 - protein, 9 aa, Homo Sapiens
AIVDLIHDI

SEQ ID NO: 15023 - protein, 9 aa, Homo Sapiens
AIVKEIVNI

SEQ ID NO: 15024 - protein, 9 aa, Homo Sapiens
AIVRSLPSV

SEQ ID NO: 15025 - protein, 9 aa, Homo Sapiens
ALAEALKEV

SEQ ID NO: 15026 - protein, 9 aa, Homo Sapiens
ALAEEVEQV

SEQ ID NO: 15027 - protein, 9 aa, Homo Sapiens
ALAEKFKEL

SEQ ID NO: 15028 - protein, 9 aa, Homo Sapiens
ALANHLIKV

SEQ ID NO: 15029 - protein, 9 aa, Homo Sapiens
ALATLIHQV

SEQ ID NO: 15030 - protein, 9 aa, Homo Sapiens
ALDDRLYCV

SEQ ID NO: 15031 - protein, 9 aa, Homo Sapiens
ALHSWFQTL

SEQ ID NO: 15032 - protein, 9 aa, Homo Sapiens
ALIEKLVEL

SEQ ID NO: 15033 - protein, 9 aa, Homo Sapiens
ALIGQCIHI

SEQ ID NO: 15034 - protein, 9 aa, Homo Sapiens
ALITRIFGV

SEQ ID NO: 15035 - protein, 9 aa, Homo Sapiens
ALLDKLYAL

SEQ ID NO: 15036 - protein, 9 aa, Homo Sapiens
ALLDRIVSV

SEQ ID NO: 15037 - protein, 9 aa, Homo Sapiens
ALLDVFREA

SEQ ID NO: 15038 - protein, 9 aa, Homo Sapiens
ALLGDLTKA

SEQ ID NO: 15039 - protein, 9 aa, Homo Sapiens
ALLGILQHV

SEQ ID NO: 15040 - protein, 9 aa, Homo Sapiens
ALLGKIEKV

SEQ ID NO: 15041 - protein, 9 aa, Homo Sapiens
ALLQQVHSA

SEQ ID NO: 15042 - protein, 9 aa, Homo Sapiens
ALLQRLEAL

SEQ ID NO: 15043 - protein, 9 aa, Homo Sapiens
ALLSRLEQI

SEQ ID NO: 15044 - protein, 9 aa, Homo Sapiens
ALLVRLQEV

SEQ ID NO: 15045 - protein, 9 aa, Homo Sapiens
ALMDEVVKA

SEQ ID NO: 15046 - protein, 9 aa, Homo Sapiens
ALMPVLNQV

SEQ ID NO: 15047 - protein, 9 aa, Homo Sapiens
ALPEDLVEV

SEQ ID NO: 15048 - protein, 9 aa, Homo Sapiens
ALPHVVPTL

SEQ ID NO: 15049 - protein, 9 aa, Homo Sapiens
ALPKELPLI

SEQ ID NO: 15050 - protein, 9 aa, Homo Sapiens
ALPPVLTTV

SEQ ID NO: 15051 - protein, 9 aa, Homo Sapiens
ALQEKLWNV

SEQ ID NO: 15052 - protein, 9 aa, Homo Sapiens
ALSDSIHTV

SEQ ID NO: 15053 - protein, 9 aa, Homo Sapiens
ALTDVILCV

SEQ ID NO: 15054 - protein, 9 aa, Homo Sapiens
ALTELLAKI

SEQ ID NO: 15055 - protein, 9 aa, Homo Sapiens
ALVDHVAEL

SEQ ID NO: 15056 - protein, 9 aa, Homo Sapiens
ALVDQLWKL

SEQ ID NO: 15057 - protein, 9 aa, Homo Sapiens
ALVQDLAKA

SEQ ID NO: 15058 - protein, 9 aa, Homo Sapiens
AMFRPFVEV

SEQ ID NO: 15059 - protein, 9 aa, Homo Sapiens
AMLTVLHEI

SEQ ID NO: 15060 - protein, 9 aa, Homo Sapiens
AQAEVYKEL

SEQ ID NO: 15061 - protein, 9 aa, Homo Sapiens
AQAPDLQRV

SEQ ID NO: 15062 - protein, 9 aa, Homo Sapiens
AQAQEVFFL

SEQ ID NO: 15063 - protein, 9 aa, Homo Sapiens
AQCPIVERL

SEQ ID NO: 15064 - protein, 9 aa, Homo Sapiens
AQDEHLITF

SEQ ID NO: 15065 - protein, 9 aa, Homo Sapiens
AQDFRVLYV

SEQ ID NO: 15066 - protein, 9 aa, Homo Sapiens
AQFEHTILL

SEQ ID NO: 15067 - protein, 9 aa, Homo Sapiens
AQFEHTLLV

SEQ ID NO: 15068 - protein, 9 aa, Homo Sapiens
AQFPESFTV

SEQ ID NO: 15069 - protein, 9 aa, Homo Sapiens
AQHSVPLQL

SEQ ID NO: 15070 - protein, 9 aa, Homo Sapiens
AQIDHYLGL

SEQ ID NO: 15071 - protein, 9 aa, Homo Sapiens
AQIEAFVRL

SEQ ID NO: 15072 - protein, 9 aa, Homo Sapiens
AQIEVVPSA

SEQ ID NO: 15073 - protein, 9 aa, Homo Sapiens
AQIGSYVHV

SEQ ID NO: 15074 - protein, 9 aa, Homo Sapiens
AQIHDLVLV

SEQ ID NO: 15075 - protein, 9 aa, Homo Sapiens
AQIKELEEL

SEQ ID NO: 15076 - protein, 9 aa, Homo Sapiens
AQIKEMVEL

SEQ ID NO: 15077 - protein, 9 aa, Homo Sapiens
AQIKHLARL

SEQ ID NO: 15078 - protein, 9 aa, Homo Sapiens
AQIPVVFRL

SEQ ID NO: 15079 - protein, 9 aa, Homo Sapiens
AQIRYLTQV

SEQ ID NO: 15080 - protein, 9 aa, Homo Sapiens
AQITQKIGV

SEQ ID NO: 15081 - protein, 9 aa, Homo Sapiens
AQLELISRI

SEQ ID NO: 15082 - protein, 9 aa, Homo Sapiens
AQLENPAAV

SEQ ID NO: 15083 - protein, 9 aa, Homo Sapiens
AQLGAVVAV

SEQ ID NO: 15084 - protein, 9 aa, Homo Sapiens
AQLPLKVEV

SEQ ID NO: 15085 - protein, 9 aa, Homo Sapiens
AQLPSLLSV

SEQ ID NO: 15086 - protein, 9 aa, Homo Sapiens
AQLRQYHRL

SEQ ID NO: 15087 - protein, 9 aa, Homo Sapiens
AQLSEKISL

SEQ ID NO: 15088 - protein, 9 aa, Homo Sapiens
AQQELKLLL

SEQ ID NO: 15089 - protein, 9 aa, Homo Sapiens
AQRKHFPSV

SEQ ID NO: 15090 - protein, 9 aa, Homo Sapiens
AQSESILKV

SEQ ID NO: 15091 - protein, 9 aa, Homo Sapiens
AQSLATPVV

SEQ ID NO: 15092 - protein, 9 aa, Homo Sapiens
AQVALVNEV

SEQ ID NO: 15093 - protein, 9 aa, Homo Sapiens
AQVGKLPCL

SEQ ID NO: 15094 - protein, 9 aa, Homo Sapiens
AQVHHFMEL

SEQ ID NO: 15095 - protein, 9 aa, Homo Sapiens
AQVMWFEKL

SEQ ID NO: 15096 - protein, 9 aa, Homo Sapiens
AQVSKVEAL

SEQ ID NO: 15097 - protein, 9 aa, Homo Sapiens
AQWHEQILV

SEQ ID NO: 15098 - protein, 9 aa, Homo Sapiens
AQYDGAYKV

SEQ ID NO: 15099 - protein, 9 aa, Homo Sapiens
AQYDRQIRL

SEQ ID NO: 15100 - protein, 9 aa, Homo Sapiens
AQYEHDLEV

SEQ ID NO: 15101 - protein, 9 aa, Homo Sapiens
ASIDILHSI

SEQ ID NO: 15102 - protein, 9 aa, Homo Sapiens
ASVPKVETV

SEQ ID NO: 15103 - protein, 9 aa, Homo Sapiens
ATADYICKV

SEQ ID NO: 15104 - protein, 9 aa, Homo Sapiens
ATAPLISGV

SEQ ID NO: 15105 - protein, 9 aa, Homo Sapiens
ATASNLVKV

SEQ ID NO: 15106 - protein, 9 aa, Homo Sapiens
ATDKNDPHL

SEQ ID NO: 15107 - protein, 9 aa, Homo Sapiens
ATDPTIHTV

SEQ ID NO: 15108 - protein, 9 aa, Homo Sapiens
ATGENLPRV

SEQ ID NO: 15109 - protein, 9 aa, Homo Sapiens
ATHGRFLEI

SEQ ID NO: 15110 - protein, 9 aa, Homo Sapiens
ATIDKVVKI

SEQ ID NO: 15111 - protein, 9 aa, Homo Sapiens
ATINEVVQV

SEQ ID NO: 15112 - protein, 9 aa, Homo Sapiens
ATLEKVIEI

SEQ ID NO: 15113 - protein, 9 aa, Homo Sapiens
ATLKELTSL

SEQ ID NO: 15114 - protein, 9 aa, Homo Sapiens
ATLNIIHSV

SEQ ID NO: 15115 - protein, 9 aa, Homo Sapiens
ATLNSFIHV

SEQ ID NO: 15116 - protein, 9 aa, Homo Sapiens
ATMPVVPSV

SEQ ID NO: 15117 - protein, 9 aa, Homo Sapiens
ATQTQFFHV

SEQ ID NO: 15118 - protein, 9 aa, Homo Sapiens
ATVPGLLKV

SEQ ID NO: 15119 - protein, 9 aa, Homo Sapiens
ATYVFLHTV

SEQ ID NO: 15120 - protein, 9 aa, Homo Sapiens
AVADDFCKV

SEQ ID NO: 15121 - protein, 9 aa, Homo Sapiens
AVAELNYGL

SEQ ID NO: 15122 - protein, 9 aa, Homo Sapiens
AVAKHFVAL

SEQ ID NO: 15123 - protein, 9 aa, Homo Sapiens
AVAPQVPAL

SEQ ID NO: 15124 - protein, 9 aa, Homo Sapiens
AVCEGTWRL

SEQ ID NO: 15125 - protein, 9 aa, Homo Sapiens
AVCNHISSV

SEQ ID NO: 15126 - protein, 9 aa, Homo Sapiens
AVCPLVVRL

SEQ ID NO: 15127 - protein, 9 aa, Homo Sapiens
AVDLTLPKV

SEQ ID NO: 15128 - protein, 9 aa, Homo Sapiens
AVFASFLWH

SEQ ID NO: 15129 - protein, 9 aa, Homo Sapiens
AVFKELVKL

SEQ ID NO: 15130 - protein, 9 aa, Homo Sapiens
AVFPHLTVV

SEQ ID NO: 15131 - protein, 9 aa, Homo Sapiens
AVGPVHNSV

SEQ ID NO: 15132 - protein, 9 aa, Homo Sapiens
AVHDSFVAV

SEQ ID NO: 15133 - protein, 9 aa, Homo Sapiens
AVHEDIVAV

SEQ ID NO: 15134 - protein, 9 aa, Homo Sapiens
AVHETLVAV

SEQ ID NO: 15135 - protein, 9 aa, Homo Sapiens
AVIDEIQMI

SEQ ID NO: 15136 - protein, 9 aa, Homo Sapiens
AVIEHLERL

SEQ ID NO: 15137 - protein, 9 aa, Homo Sapiens
AVIEHTNRV

SEQ ID NO: 15138 - protein, 9 aa, Homo Sapiens
AVIGDVIRV

SEQ ID NO: 15139 - protein, 9 aa, Homo Sapiens
AVIGSTEEL

SEQ ID NO: 15140 - protein, 9 aa, Homo Sapiens
AVIHEAPAV

SEQ ID NO: 15141 - protein, 9 aa, Homo Sapiens
AVIHYLLQV

SEQ ID NO: 15142 - protein, 9 aa, Homo Sapiens
AVIKFLELL

SEQ ID NO: 15143 - protein, 9 aa, Homo Sapiens
AVIKGLTYL

SEQ ID NO: 15144 - protein, 9 aa, Homo Sapiens
AVINRVQKV

SEQ ID NO: 15145 - protein, 9 aa, Homo Sapiens
AVIPETEAV

SEQ ID NO: 15146 - protein, 9 aa, Homo Sapiens
AVIQGLETL

SEQ ID NO: 15147 - protein, 9 aa, Homo Sapiens
AVIRDLNSL

SEQ ID NO: 15148 - protein, 9 aa, Homo Sapiens
AVIREIQNA

SEQ ID NO: 15149 - protein, 9 aa, Homo Sapiens
AVISKFWKS

SEQ ID NO: 15150 - protein, 9 aa, Homo Sapiens
AVITKVKGV

SEQ ID NO: 15151 - protein, 9 aa, Homo Sapiens
AVIVEVHAA

SEQ ID NO: 15152 - protein, 9 aa, Homo Sapiens
AVLDFCYHL

SEQ ID NO: 15153 - protein, 9 aa, Homo Sapiens
AVLDLVHSA

SEQ ID NO: 15154 - protein, 9 aa, Homo Sapiens
AVLDRMHSL

SEQ ID NO: 15155 - protein, 9 aa, Homo Sapiens
AVLEHMEEL

SEQ ID NO: 15156 - protein, 9 aa, Homo Sapiens
AVLERLVDI

SEQ ID NO: 15157 - protein, 9 aa, Homo Sapiens
AVLNALDKI

SEQ ID NO: 15158 - protein, 9 aa, Homo Sapiens
AVLPFSPAL

SEQ ID NO: 15159 - protein, 9 aa, Homo Sapiens
AVLPHVDQV

SEQ ID NO: 15160 - protein, 9 aa, Homo Sapiens
AVMEQIPEI

SEQ ID NO: 15161 - protein, 9 aa, Homo Sapiens
AVMKQFAFV

SEQ ID NO: 15162 - protein, 9 aa, Homo Sapiens
AVMLHSFTL

SEQ ID NO: 15163 - protein, 9 aa, Homo Sapiens
AVPEIMDRI

SEQ ID NO: 15164 - protein, 9 aa, Homo Sapiens
AVPEKIGQV

SEQ ID NO: 15165 - protein, 9 aa, Homo Sapiens
AVPFSLDSV

SEQ ID NO: 15166 - protein, 9 aa, Homo Sapiens
AVPSWFVRV

SEQ ID NO: 15167 - protein, 9 aa, Homo Sapiens
AVQDFLHEI

SEQ ID NO: 15168 - protein, 9 aa, Homo Sapiens
AVQEKVFEL

SEQ ID NO: 15169 - protein, 9 aa, Homo Sapiens
AVRSHFTKV

SEQ ID NO: 15170 - protein, 9 aa, Homo Sapiens
AVSDGVIKV

SEQ ID NO: 15171 - protein, 9 aa, Homo Sapiens
AVTEAFVRL

SEQ ID NO: 15172 - protein, 9 aa, Homo Sapiens
AVTNVGHAV

SEQ ID NO: 15173 - protein, 9 aa, Homo Sapiens
AVTPELEGV

SEQ ID NO: 15174 - protein, 9 aa, Homo Sapiens
AVVEFLTSV

SEQ ID NO: 15175 - protein, 9 aa, Homo Sapiens
AVVPGLLEV

SEQ ID NO: 15176 - protein, 9 aa, Homo Sapiens
AVVPKILTV

SEQ ID NO: 15177 - protein, 9 aa, Homo Sapiens
AVVPKTKEV

SEQ ID NO: 15178 - protein, 9 aa, Homo Sapiens
AVVTQVNKV

SEQ ID NO: 15179 - protein, 9 aa, Homo Sapiens
CTTPHLHSI

SEQ ID NO: 15180 - protein, 9 aa, Homo Sapiens
DKKNKVLEV

SEQ ID NO: 15181 - protein, 9 aa, Homo Sapiens
DLNQKAWDI

SEQ ID NO: 15182 - protein, 9 aa, Homo Sapiens
EIYKEFFEV

SEQ ID NO: 15183 - protein, 9 aa, Homo Sapiens
ELKPFIEEL

SEQ ID NO: 15184 - protein, 9 aa, Homo Sapiens
EPYGHLGPA

SEQ ID NO: 15185 - protein, 9 aa, Homo Sapiens
EQIAEFKEA

SEQ ID NO: 15186 - protein, 9 aa, Homo Sapiens
EQIKDIFYI

SEQ ID NO: 15187 - protein, 9 aa, Homo Sapiens
EQIKFFEEV

SEQ ID NO: 15188 - protein, 9 aa, Homo Sapiens
EQVDKFFPL

SEQ ID NO: 15189 - protein, 9 aa, Homo Sapiens
ERTPHFALV

SEQ ID NO: 15190 - protein, 9 aa, Homo Sapiens
EVIEKFDYV

SEQ ID NO: 15191 - protein, 9 aa, Homo Sapiens
EVIKELAQI

SEQ ID NO: 15192 - protein, 9 aa, Homo Sapiens
EVIRELAGI

SEQ ID NO: 15193 - protein, 9 aa, Homo Sapiens
EVISKLYAV

SEQ ID NO: 15194 - protein, 9 aa, Homo Sapiens
EVITKFINV

SEQ ID NO: 15195 - protein, 9 aa, Homo Sapiens
EVVERLLSV

SEQ ID NO: 15196 - protein, 9 aa, Homo Sapiens
FAHVIFQNV

SEQ ID NO: 15197 - protein, 9 aa, Homo Sapiens
FAIPLIEKL

SEQ ID NO: 15198 - protein, 9 aa, Homo Sapiens
FAIPMIHAV

SEQ ID NO: 15199 - protein, 9 aa, Homo Sapiens
FAITAIKGV

SEQ ID NO: 15200 - protein, 9 aa, Homo Sapiens
FALGPVASV

SEQ ID NO: 15201 - protein, 9 aa, Homo Sapiens
FAMEIDPSL

SEQ ID NO: 15202 - protein, 9 aa, Homo Sapiens
FAPEKLQEL

SEQ ID NO: 15203 - protein, 9 aa, Homo Sapiens
FASHVSPEV

SEQ ID NO: 15204 - protein, 9 aa, Homo Sapiens
FASPKIDSV

SEQ ID NO: 15205 - protein, 9 aa, Homo Sapiens
FGIDLDTRV

SEQ ID NO: 15206 - protein, 9 aa, Homo Sapiens
FGLARAFGV

SEQ ID NO: 15207 - protein, 9 aa, Homo Sapiens
FGVPLIVHV

SEQ ID NO: 15208 - protein, 9 aa, Homo Sapiens
FGYVDFESA

SEQ ID NO: 15209 - protein, 9 aa, Homo Sapiens
FIDDANYSV

SEQ ID NO: 15210 - protein, 9 aa, Homo Sapiens
FIDEYVETV

SEQ ID NO: 15211 - protein, 9 aa, Homo Sapiens
FIFSDTHEL

SEQ ID NO: 15212 - protein, 9 aa, Homo Sapiens
FIHQHFVEV

SEQ ID NO: 15213 - protein, 9 aa, Homo Sapiens
FIINGIEKV

SEQ ID NO: 15214 - protein, 9 aa, Homo Sapiens
FIIQGLRSV

SEQ ID NO: 15215 - protein, 9 aa, Homo Sapiens
FIISDFESV

SEQ ID NO: 15216 - protein, 9 aa, Homo Sapiens
FILKKLDSI

SEQ ID NO: 15217 - protein, 9 aa, Homo Sapiens
FILPHISTA

SEQ ID NO: 15218 - protein, 9 aa, Homo Sapiens
FIPYLVVKV

SEQ ID NO: 15219 - protein, 9 aa, Homo Sapiens
FIVEEIQRI

SEQ ID NO: 15220 - protein, 9 aa, Homo Sapiens
FIVHTIEEI

SEQ ID NO: 15221 - protein, 9 aa, Homo Sapiens
FLAGAVTSV

SEQ ID NO: 15222 - protein, 9 aa, Homo Sapiens
FLCPFHLSV

SEQ ID NO: 15223 - protein, 9 aa, Homo Sapiens
FLDKNDHSL

SEQ ID NO: 15224 - protein, 9 aa, Homo Sapiens
FLDNSFEKV

SEQ ID NO: 15225 - protein, 9 aa, Homo Sapiens
FLEKLLPPV

SEQ ID NO: 15226 - protein, 9 aa, Homo Sapiens
FLEPVNPRL

SEQ ID NO: 15227 - protein, 9 aa, Homo Sapiens
FLFEDFSKA

SEQ ID NO: 15228 - protein, 9 aa, Homo Sapiens
FLFSKFIEL

SEQ ID NO: 15229 - protein, 9 aa, Homo Sapiens
FLGEKIASV

SEQ ID NO: 15230 - protein, 9 aa, Homo Sapiens
FLGTFILKV

SEQ ID NO: 15231 - protein, 9 aa, Homo Sapiens
FLHDNMVEI

SEQ ID NO: 15232 - protein, 9 aa, Homo Sapiens
FLIRESETL

SEQ ID NO: 15233 - protein, 9 aa, Homo Sapiens
FLITILDHL

SEQ ID NO: 15234 - protein, 9 aa, Homo Sapiens
FLKDKFVEI

SEQ ID NO: 15235 - protein, 9 aa, Homo Sapiens
FLKNELDNV

SEQ ID NO: 15236 - protein, 9 aa, Homo Sapiens
FLLDKKIGV

SEQ ID NO: 15237 - protein, 9 aa, Homo Sapiens
FLLEKGYEV

SEQ ID NO: 15238 - protein, 9 aa, Homo Sapiens
FLLHIQQQV

SEQ ID NO: 15239 - protein, 9 aa, Homo Sapiens
FLLPDVIRI

SEQ ID NO: 15240 - protein, 9 aa, Homo Sapiens
FLLPKVQSI

SEQ ID NO: 15241 - protein, 9 aa, Homo Sapiens
FLLPVINEM

SEQ ID NO: 15242 - protein, 9 aa, Homo Sapiens
FLMDFIHQV

SEQ ID NO: 15243 - protein, 9 aa, Homo Sapiens
FLPAGIVAV

SEQ ID NO: 15244 - protein, 9 aa, Homo Sapiens
FLPARFYQA

SEQ ID NO: 15245 - protein, 9 aa, Homo Sapiens
FLPHELPLL

SEQ ID NO: 15246 - protein, 9 aa, Homo Sapiens
FLPLKWSLA

SEQ ID NO: 15247 - protein, 9 aa, Homo Sapiens
FLPRKFPSL

SEQ ID NO: 15248 - protein, 9 aa, Homo Sapiens
FLPSYIIDV

SEQ ID NO: 15249 - protein, 9 aa, Homo Sapiens
FLPTLLHQA

SEQ ID NO: 15250 - protein, 9 aa, Homo Sapiens
FLPVKLIFV

SEQ ID NO: 15251 - protein, 9 aa, Homo Sapiens
FLQPELVKL

SEQ ID NO: 15252 - protein, 9 aa, Homo Sapiens
FLQPHLDAV

SEQ ID NO: 15253 - protein, 9 aa, Homo Sapiens
FLREYFERL

SEQ ID NO: 15254 - protein, 9 aa, Homo Sapiens
FLSEVFHQA

SEQ ID NO: 15255 - protein, 9 aa, Homo Sapiens
FLVDGVCTV

SEQ ID NO: 15256 - protein, 9 aa, Homo Sapiens
FLVPTFEQL

SEQ ID NO: 15257 - protein, 9 aa, Homo Sapiens
FLVQNIHTL

SEQ ID NO: 15258 - protein, 9 aa, Homo Sapiens
FLVTVIHTL

SEQ ID NO: 15259 - protein, 9 aa, Homo Sapiens
FMTTNVPNV

SEQ ID NO: 15260 - protein, 9 aa, Homo Sapiens
FQAEIAQLM

SEQ ID NO: 15261 - protein, 9 aa, Homo Sapiens
FQATIVKAV

SEQ ID NO: 15262 - protein, 9 aa, Homo Sapiens
FQDDRYLYM

SEQ ID NO: 15263 - protein, 9 aa, Homo Sapiens
FQDEINWRL

SEQ ID NO: 15264 - protein, 9 aa, Homo Sapiens
FQDENHLYL

SEQ ID NO: 15265 - protein, 9 aa, Homo Sapiens
FQDGTKATF

SEQ ID NO: 15266 - protein, 9 aa, Homo Sapiens
FQDKNRPCL

SEQ ID NO: 15267 - protein, 9 aa, Homo Sapiens
FQDPVPLTV

SEQ ID NO: 15268 - protein, 9 aa, Homo Sapiens
FQEADSPTL

SEQ ID NO: 15269 - protein, 9 aa, Homo Sapiens
FQGVEFHYV

SEQ ID NO: 15270 - protein, 9 aa, Homo Sapiens
FQHTGIYSV

SEQ ID NO: 15271 - protein, 9 aa, Homo Sapiens
FQIGPCEGI

SEQ ID NO: 15272 - protein, 9 aa, Homo Sapiens
FQIGPVAGV

SEQ ID NO: 15273 - protein, 9 aa, Homo Sapiens
FQIVNPHLL

SEQ ID NO: 15274 - protein, 9 aa, Homo Sapiens
FQLEHIMDL

SEQ ID NO: 15275 - protein, 9 aa, Homo Sapiens
FQLPIRFNL

SEQ ID NO: 15276 - protein, 9 aa, Homo Sapiens
FQLTQGDQL

SEQ ID NO: 15277 - protein, 9 aa, Homo Sapiens
FQPPGPQAV

SEQ ID NO: 15278 - protein, 9 aa, Homo Sapiens
FQSSAVMAL

SEQ ID NO: 15279 - protein, 9 aa, Homo Sapiens
FQSTTGHCV

SEQ ID NO: 15280 - protein, 9 aa, Homo Sapiens
FQTEGKLYL

SEQ ID NO: 15281 - protein, 9 aa, Homo Sapiens
FQTEVGKQL

SEQ ID NO: 15282 - protein, 9 aa, Homo Sapiens
FSPFHASVL

SEQ ID NO: 15283 - protein, 9 aa, Homo Sapiens
FSSPHLVQV

SEQ ID NO: 15284 - protein, 9 aa, Homo Sapiens
FTAEFLEKV

SEQ ID NO: 15285 - protein, 9 aa, Homo Sapiens
FTAGHLIGL

SEQ ID NO: 15286 - protein, 9 aa, Homo Sapiens
FTEGELMSV

SEQ ID NO: 15287 - protein, 9 aa, Homo Sapiens
FTFSGICRV

SEQ ID NO: 15288 - protein, 9 aa, Homo Sapiens
FTHKEFEQL

SEQ ID NO: 15289 - protein, 9 aa, Homo Sapiens
FTIDVDKKL

SEQ ID NO: 15290 - protein, 9 aa, Homo Sapiens
FTIFRTISV

SEQ ID NO: 15291 - protein, 9 aa, Homo Sapiens
FTILDVRPA

SEQ ID NO: 15292 - protein, 9 aa, Homo Sapiens
FTLPLTDQV

SEQ ID NO: 15293 - protein, 9 aa, Homo Sapiens
FTMDDVVKV

SEQ ID NO: 15294 - protein, 9 aa, Homo Sapiens
FTPNNIKQV

SEQ ID NO: 15295 - protein, 9 aa, Homo Sapiens
FTVDKDITL

SEQ ID NO: 15296 - protein, 9 aa, Homo Sapiens
FTVDQIRAI

SEQ ID NO: 15297 - protein, 9 aa, Homo Sapiens
FTVPRVVAV

SEQ ID NO: 15298 - protein, 9 aa, Homo Sapiens
FVAKHLKTI

SEQ ID NO: 15299 - protein, 9 aa, Homo Sapiens
FVAPPTAAV

SEQ ID NO: 15300 - protein, 9 aa, Homo Sapiens
FVARMIPKV

SEQ ID NO: 15301 - protein, 9 aa, Homo Sapiens
FVCDIRPEI

SEQ ID NO: 15302 - protein, 9 aa, Homo Sapiens
FVDDYTVRV

SEQ ID NO: 15303 - protein, 9 aa, Homo Sapiens
FVDEYDPTI

SEQ ID NO: 15304 - protein, 9 aa, Homo Sapiens
FVDGLTFKV

SEQ ID NO: 15305 - protein, 9 aa, Homo Sapiens
FVDIVDAKL

SEQ ID NO: 15306 - protein, 9 aa, Homo Sapiens
FVDPAQITM

SEQ ID NO: 15307 - protein, 9 aa, Homo Sapiens
FVDRGFYSV

SEQ ID NO: 15308 - protein, 9 aa, Homo Sapiens
FVEEEEHFL

SEQ ID NO: 15309 - protein, 9 aa, Homo Sapiens
FVEPSRQFV

SEQ ID NO: 15310 - protein, 9 aa, Homo Sapiens
FVHDLVLYL

SEQ ID NO: 15311 - protein, 9 aa, Homo Sapiens
FVHPGAATV

SEQ ID NO: 15312 - protein, 9 aa, Homo Sapiens
FVIDEAHCV

SEQ ID NO: 15313 - protein, 9 aa, Homo Sapiens
FVIDLQTRL

SEQ ID NO: 15314 - protein, 9 aa, Homo Sapiens
FVIGHLKGA

SEQ ID NO: 15315 - protein, 9 aa, Homo Sapiens
FVIRNIVEA

SEQ ID NO: 15316 - protein, 9 aa, Homo Sapiens
FVKEHFDEL

SEQ ID NO: 15317 - protein, 9 aa, Homo Sapiens
FVLDKVPFL

SEQ ID NO: 15318 - protein, 9 aa, Homo Sapiens
FVLPELPSV

SEQ ID NO: 15319 - protein, 9 aa, Homo Sapiens
FVLPILQKL

SEQ ID NO: 15320 - protein, 9 aa, Homo Sapiens
FVLPVATQI

SEQ ID NO: 15321 - protein, 9 aa, Homo Sapiens
FVLQHICYI

SEQ ID NO: 15322 - protein, 9 aa, Homo Sapiens
FVMETFVHL

SEQ ID NO: 15323 - protein, 9 aa, Homo Sapiens
FVNDIFERI

SEQ ID NO: 15324 - protein, 9 aa, Homo Sapiens
FVPEIFHRI

SEQ ID NO: 15325 - protein, 9 aa, Homo Sapiens
FVPIKVEQI

SEQ ID NO: 15326 - protein, 9 aa, Homo Sapiens
FVPRSFDEL

SEQ ID NO: 15327 - protein, 9 aa, Homo Sapiens
FVVDEVHLI

SEQ ID NO: 15328 - protein, 9 aa, Homo Sapiens
FVVDEVSNI

SEQ ID NO: 15329 - protein, 9 aa, Homo Sapiens
FVVDHVIKI

SEQ ID NO: 15330 - protein, 9 aa, Homo Sapiens
FVVDIESRL

SEQ ID NO: 15331 - protein, 9 aa, Homo Sapiens
FVVDRLIAL

SEQ ID NO: 15332 - protein, 9 aa, Homo Sapiens
FVVDRSDKL

SEQ ID NO: 15333 - protein, 9 aa, Homo Sapiens
FVVEKIELL

SEQ ID NO: 15334 - protein, 9 aa, Homo Sapiens
FVWSGTAEA

SEQ ID NO: 15335 - protein, 9 aa, Homo Sapiens
GAAKDLPGV

SEQ ID NO: 15336 - protein, 9 aa, Homo Sapiens
GAASRIPGV

SEQ ID NO: 15337 - protein, 9 aa, Homo Sapiens
GAFQEFPQV

SEQ ID NO: 15338 - protein, 9 aa, Homo Sapiens
GAFVHFHGV

SEQ ID NO: 15339 - protein, 9 aa, Homo Sapiens
GAIQVLPKL

SEQ ID NO: 15340 - protein, 9 aa, Homo Sapiens
GIIDAFHQI

SEQ ID NO: 15341 - protein, 9 aa, Homo Sapiens
GILLRLPQV

SEQ ID NO: 15342 - protein, 9 aa, Homo Sapiens
GILSHINTV

SEQ ID NO: 15343 - protein, 9 aa, Homo Sapiens
GIMDRFLQV

SEQ ID NO: 15344 - protein, 9 aa, Homo Sapiens
GIPAEVPHI

SEQ ID NO: 15345 - protein, 9 aa, Homo Sapiens
GIYTGFIKV

SEQ ID NO: 15346 - protein, 9 aa, Homo Sapiens
GLIEILKKV

SEQ ID NO: 15347 - protein, 9 aa, Homo Sapiens
GLLTEIRAV

SEQ ID NO: 15348 - protein, 9 aa, Homo Sapiens
GLPTSVPQI

SEQ ID NO: 15349 - protein, 9 aa, Homo Sapiens
GPPPPGKPQ

SEQ ID NO: 15350 - protein, 9 aa, Homo Sapiens
GQDEPLIHV

SEQ ID NO: 15351 - protein, 9 aa, Homo Sapiens
GQDVGRYQV

SEQ ID NO: 15352 - protein, 9 aa, Homo Sapiens
GQFDRPAGV

SEQ ID NO: 15353 - protein, 9 aa, Homo Sapiens
GQIDLLERL

SEQ ID NO: 15354 - protein, 9 aa, Homo Sapiens
GQIELRTYV

SEQ ID NO: 15355 - protein, 9 aa, Homo Sapiens
GQIEVVPEV

SEQ ID NO: 15356 - protein, 9 aa, Homo Sapiens
GQIRNLESA

SEQ ID NO: 15357 - protein, 9 aa, Homo Sapiens
GQISEVVVV

SEQ ID NO: 15358 - protein, 9 aa, Homo Sapiens
GQLDKVVEL

SEQ ID NO: 15359 - protein, 9 aa, Homo Sapiens
GQLEFRALL

SEQ ID NO: 15360 - protein, 9 aa, Homo Sapiens
GQLPNLQTV

SEQ ID NO: 15361 - protein, 9 aa, Homo Sapiens
GQMGSFIRL

SEQ ID NO: 15362 - protein, 9 aa, Homo Sapiens
GQSYVVNRV

SEQ ID NO: 15363 - protein, 9 aa, Homo Sapiens
GQTGVIRSV

SEQ ID NO: 15364 - protein, 9 aa, Homo Sapiens
GQTITISRV

SEQ ID NO: 15365 - protein, 9 aa, Homo Sapiens
GQTQVEIKV

SEQ ID NO: 15366 - protein, 9 aa, Homo Sapiens
GQTTVQVRV

SEQ ID NO: 15367 - protein, 9 aa, Homo Sapiens
GQVDMDIKL

SEQ ID NO: 15368 - protein, 9 aa, Homo Sapiens
GQVPPLQSV

SEQ ID NO: 15369 - protein, 9 aa, Homo Sapiens
GQWASVIRV

SEQ ID NO: 15370 - protein, 9 aa, Homo Sapiens
GQWGRAWEV

SEQ ID NO: 15371 - protein, 9 aa, Homo Sapiens
GTAAVFNAV

SEQ ID NO: 15372 - protein, 9 aa, Homo Sapiens
GTIDEIQKL

SEQ ID NO: 15373 - protein, 9 aa, Homo Sapiens
GTIFIIKGV

SEQ ID NO: 15374 - protein, 9 aa, Homo Sapiens
GTIGLIHAI

SEQ ID NO: 15375 - protein, 9 aa, Homo Sapiens
GTIGLIHAV

SEQ ID NO: 15376 - protein, 9 aa, Homo Sapiens
GTIKKFLSL

SEQ ID NO: 15377 - protein, 9 aa, Homo Sapiens
GTIKVLELV

SEQ ID NO: 15378 - protein, 9 aa, Homo Sapiens
GTITQVIKV

SEQ ID NO: 15379 - protein, 9 aa, Homo Sapiens
GTITTFEHA

SEQ ID NO: 15380 - protein, 9 aa, Homo Sapiens
GTPEKVFTV

SEQ ID NO: 15381 - protein, 9 aa, Homo Sapiens
GTVDKLCRV

SEQ ID NO: 15382 - protein, 9 aa, Homo Sapiens
GTVRFFNSV

SEQ ID NO: 15383 - protein, 9 aa, Homo Sapiens
GTYTGFIKV

SEQ ID NO: 15384 - protein, 9 aa, Homo Sapiens
GVADIIDCV

SEQ ID NO: 15385 - protein, 9 aa, Homo Sapiens
GVAPGFQVV

SEQ ID NO: 15386 - protein, 9 aa, Homo Sapiens
GVARHFNYV

SEQ ID NO: 15387 - protein, 9 aa, Homo Sapiens
GVARLFTKV

SEQ ID NO: 15388 - protein, 9 aa, Homo Sapiens
GVCKEVFQL

SEQ ID NO: 15389 - protein, 9 aa, Homo Sapiens
GVDVTLPRV

SEQ ID NO: 15390 - protein, 9 aa, Homo Sapiens
GVGPVPARA

SEQ ID NO: 15391 - protein, 9 aa, Homo Sapiens
GVHGNFPRL

SEQ ID NO: 15392 - protein, 9 aa, Homo Sapiens
GVIDACIKL

SEQ ID NO: 15393 - protein, 9 aa, Homo Sapiens
GVIDACVKL

SEQ ID NO: 15394 - protein, 9 aa, Homo Sapiens
GVIEKLLTS

SEQ ID NO: 15395 - protein, 9 aa, Homo Sapiens
GVIGKFIYA

SEQ ID NO: 15396 - protein, 9 aa, Homo Sapiens
GVIKRTENV

SEQ ID NO: 15397 - protein, 9 aa, Homo Sapiens
GVINRVEKI

SEQ ID NO: 15398 - protein, 9 aa, Homo Sapiens
GVINSFVHV

SEQ ID NO: 15399 - protein, 9 aa, Homo Sapiens
GVIPTLVKL

SEQ ID NO: 15400 - protein, 9 aa, Homo Sapiens
GVKEKFTMV

SEQ ID NO: 15401 - protein, 9 aa, Homo Sapiens
GVLDKLRSV

SEQ ID NO: 15402 - protein, 9 aa, Homo Sapiens
GVLDTLTKV

SEQ ID NO: 15403 - protein, 9 aa, Homo Sapiens
GVLIKLFCV

SEQ ID NO: 15404 - protein, 9 aa, Homo Sapiens
GVLPNIQAV

SEQ ID NO: 15405 - protein, 9 aa, Homo Sapiens
GVLPQLSMV

SEQ ID NO: 15406 - protein, 9 aa, Homo Sapiens
GVMYGFKGV

SEQ ID NO: 15407 - protein, 9 aa, Homo Sapiens
GVPARLPAV

SEQ ID NO: 15408 - protein, 9 aa, Homo Sapiens
GVPELLQKI

SEQ ID NO: 15409 - protein, 9 aa, Homo Sapiens
GVPEWFHGA

SEQ ID NO: 15410 - protein, 9 aa, Homo Sapiens
GVPQALFGV

SEQ ID NO: 15411 - protein, 9 aa, Homo Sapiens
GVPRTFKEI

SEQ ID NO: 15412 - protein, 9 aa, Homo Sapiens
GVPTKVFNV

SEQ ID NO: 15413 - protein, 9 aa, Homo Sapiens
GVPVTITSV

SEQ ID NO: 15414 - protein, 9 aa, Homo Sapiens
GVSDVDYSL

SEQ ID NO: 15415 - protein, 9 aa, Homo Sapiens
GVVEKLSVL

SEQ ID NO: 15416 - protein, 9 aa, Homo Sapiens
GVVGEVTQV

SEQ ID NO: 15417 - protein, 9 aa, Homo Sapiens
GVVIHLPGL

SEQ ID NO: 15418 - protein, 9 aa, Homo Sapiens
GVVPQLVKL

SEQ ID NO: 15419 - protein, 9 aa, Homo Sapiens
GVVPTIQKV

SEQ ID NO: 15420 - protein, 9 aa, Homo Sapiens
GVYGDVHRV

SEQ ID NO: 15421 - protein, 9 aa, Homo Sapiens
HALGLLYHV

SEQ ID NO: 15422 - protein, 9 aa, Homo Sapiens
HAVGDIPGV

SEQ ID NO: 15423 - protein, 9 aa, Homo Sapiens
HIIENIVAV

SEQ ID NO: 15424 - protein, 9 aa, Homo Sapiens
HILKDVSGV

SEQ ID NO: 15425 - protein, 9 aa, Homo Sapiens
HIMPTVHTV

SEQ ID NO: 15426 - protein, 9 aa, Homo Sapiens
HIPDVITYL

SEQ ID NO: 15427 - protein, 9 aa, Homo Sapiens
HIPNIFQKI

SEQ ID NO: 15428 - protein, 9 aa, Homo Sapiens
HLAIKLEQV

SEQ ID NO: 15429 - protein, 9 aa, Homo Sapiens
HLANIVERV

SEQ ID NO: 15430 - protein, 9 aa, Homo Sapiens
HLFRKFHYL

SEQ ID NO: 15431 - protein, 9 aa, Homo Sapiens
HLIGDFSKV

SEQ ID NO: 15432 - protein, 9 aa, Homo Sapiens
HLIHEVTKV

SEQ ID NO: 15433 - protein, 9 aa, Homo Sapiens
HLLERVDQV

SEQ ID NO: 15434 - protein, 9 aa, Homo Sapiens
HLPEELAEL

SEQ ID NO: 15435 - protein, 9 aa, Homo Sapiens
HLPPTFHAV

SEQ ID NO: 15436 - protein, 9 aa, Homo Sapiens
HLPSDFTPA

SEQ ID NO: 15437 - protein, 9 aa, Homo Sapiens
HLVPEVPTV

SEQ ID NO: 15438 - protein, 9 aa, Homo Sapiens
HMAKAFKEV

SEQ ID NO: 15439 - protein, 9 aa, Homo Sapiens
HMVTHFIQA

SEQ ID NO: 15440 - protein, 9 aa, Homo Sapiens
HQDGIHILV

SEQ ID NO: 15441 - protein, 9 aa, Homo Sapiens
HQFESSFEL

SEQ ID NO: 15442 - protein, 9 aa, Homo Sapiens
HQHEYFFLI

SEQ ID NO: 15443 - protein, 9 aa, Homo Sapiens
HQIDLIVQL

SEQ ID NO: 15444 - protein, 9 aa, Homo Sapiens
HQILTPFLL

SEQ ID NO: 15445 - protein, 9 aa, Homo Sapiens
HQLALISQL

SEQ ID NO: 15446 - protein, 9 aa, Homo Sapiens
HQLNICSKV

SEQ ID NO: 15447 - protein, 9 aa, Homo Sapiens
HQTQVSQRL

SEQ ID NO: 15448 - protein, 9 aa, Homo Sapiens
HQVPAVSSV

SEQ ID NO: 15449 - protein, 9 aa, Homo Sapiens
HSIPVTVEV

SEQ ID NO: 15450 - protein, 9 aa, Homo Sapiens
HTAQKFFTV

SEQ ID NO: 15451 - protein, 9 aa, Homo Sapiens
HTCLHLASI

SEQ ID NO: 15452 - protein, 9 aa, Homo Sapiens
HTIDTILTV

SEQ ID NO: 15453 - protein, 9 aa, Homo Sapiens
HTILIVEKV

SEQ ID NO: 15454 - protein, 9 aa, Homo Sapiens
HTPQNLITV

SEQ ID NO: 15455 - protein, 9 aa, Homo Sapiens
HTVEDLVKV

SEQ ID NO: 15456 - protein, 9 aa, Homo Sapiens
HTVGELIEV

SEQ ID NO: 15457 - protein, 9 aa, Homo Sapiens
HVESKVYAV

SEQ ID NO: 15458 - protein, 9 aa, Homo Sapiens
HVICVTPKL

SEQ ID NO: 15459 - protein, 9 aa, Homo Sapiens
HVIEALRRA

SEQ ID NO: 15460 - protein, 9 aa, Homo Sapiens
HVIEKMHHV

SEQ ID NO: 15461 - protein, 9 aa, Homo Sapiens
HVIENLHAA

SEQ ID NO: 15462 - protein, 9 aa, Homo Sapiens
HVIKYLETL

SEQ ID NO: 15463 - protein, 9 aa, Homo Sapiens
HVIQALESL

SEQ ID NO: 15464 - protein, 9 aa, Homo Sapiens
HVLDTLIQL

SEQ ID NO: 15465 - protein, 9 aa, Homo Sapiens
HVLDVIHEV

SEQ ID NO: 15466 - protein, 9 aa, Homo Sapiens
HVLEEVQQV

SEQ ID NO: 15467 - protein, 9 aa, Homo Sapiens
HVLKQLERV

SEQ ID NO: 15468 - protein, 9 aa, Homo Sapiens
HVLPGVCQV

SEQ ID NO: 15469 - protein, 9 aa, Homo Sapiens
HVPAAVPLV

SEQ ID NO: 15470 - protein, 9 aa, Homo Sapiens
HVVDFFNRV

SEQ ID NO: 15471 - protein, 9 aa, Homo Sapiens
HVVEILVET

SEQ ID NO: 15472 - protein, 9 aa, Homo Sapiens
HVVERLFEI

SEQ ID NO: 15473 - protein, 9 aa, Homo Sapiens
HVVHQIPAV

SEQ ID NO: 15474 - protein, 9 aa, Homo Sapiens
HVYDLFEKA

SEQ ID NO: 15475 - protein, 9 aa, Homo Sapiens
IADDADPRV

SEQ ID NO: 15476 - protein, 9 aa, Homo Sapiens
IASPVIAAV

SEQ ID NO: 15477 - protein, 9 aa, Homo Sapiens
IDDKGTIKL

SEQ ID NO: 15478 - protein, 9 aa, Homo Sapiens
IIDGKIFCV

SEQ ID NO: 15479 - protein, 9 aa, Homo Sapiens
IIINHVISV

SEQ ID NO: 15480 - protein, 9 aa, Homo Sapiens
IIIPEIQKV

SEQ ID NO: 15481 - protein, 9 aa, Homo Sapiens
IILDEAHNV

SEQ ID NO: 15482 - protein, 9 aa, Homo Sapiens
IILDEIHLL

SEQ ID NO: 15483 - protein, 9 aa, Homo Sapiens
IILPEDIEL

SEQ ID NO: 15484 - protein, 9 aa, Homo Sapiens
IIPDKVWAV

SEQ ID NO: 15485 - protein, 9 aa, Homo Sapiens
IIQQAFINV

SEQ ID NO: 15486 - protein, 9 aa, Homo Sapiens
IISQVDAKV

SEQ ID NO: 15487 - protein, 9 aa, Homo Sapiens
IITDLLRSV

SEQ ID NO: 15488 - protein, 9 aa, Homo Sapiens
IITKDLFQV

SEQ ID NO: 15489 - protein, 9 aa, Homo Sapiens
IIVKEVCTV

SEQ ID NO: 15490 - protein, 9 aa, Homo Sapiens
IIVSIVHSV

SEQ ID NO: 15491 - protein, 9 aa, Homo Sapiens
ILDKKVEKV

SEQ ID NO: 15492 - protein, 9 aa, Homo Sapiens
ILDQKINEV

SEQ ID NO: 15493 - protein, 9 aa, Homo Sapiens
ILEKKVEKV

SEQ ID NO: 15494 - protein, 9 aa, Homo Sapiens
ILIPVLDRI

SEQ ID NO: 15495 - protein, 9 aa, Homo Sapiens
ILISKLLGA

SEQ ID NO: 15496 - protein, 9 aa, Homo Sapiens
ILLAELEQL

SEQ ID NO: 15497 - protein, 9 aa, Homo Sapiens
ILLAEVDKV

SEQ ID NO: 15498 - protein, 9 aa, Homo Sapiens
ILLAEVPTM

SEQ ID NO: 15499 - protein, 9 aa, Homo Sapiens
ILLDQTVRV

SEQ ID NO: 15500 - protein, 9 aa, Homo Sapiens
ILLKDILSV

SEQ ID NO: 15501 - protein, 9 aa, Homo Sapiens
ILMEHIHKL

SEQ ID NO: 15502 - protein, 9 aa, Homo Sapiens
ILPDDLPEL

SEQ ID NO: 15503 - protein, 9 aa, Homo Sapiens
ILPEELQTL

SEQ ID NO: 15504 - protein, 9 aa, Homo Sapiens
ILPEKVARV

SEQ ID NO: 15505 - protein, 9 aa, Homo Sapiens
ILPSNLLTV

SEQ ID NO: 15506 - protein, 9 aa, Homo Sapiens
ILQDRLNQV

SEQ ID NO: 15507 - protein, 9 aa, Homo Sapiens
ILRAILEVL

SEQ ID NO: 15508 - protein, 9 aa, Homo Sapiens
ILTDITKGV

SEQ ID NO: 15509 - protein, 9 aa, Homo Sapiens
ILYDKLEKI

SEQ ID NO: 15510 - protein, 9 aa, Homo Sapiens
IMLEALERV

SEQ ID NO: 15511 - protein, 9 aa, Homo Sapiens
IQAERVRGV

SEQ ID NO: 15512 - protein, 9 aa, Homo Sapiens
IQDKCVPLV

SEQ ID NO: 15513 - protein, 9 aa, Homo Sapiens
IQEAVYKNV

SEQ ID NO: 15514 - protein, 9 aa, Homo Sapiens
IQHDLIFSL

SEQ ID NO: 15515 - protein, 9 aa, Homo Sapiens
IQHSEFEEV

SEQ ID NO: 15516 - protein, 9 aa, Homo Sapiens
IQIMKVEEI

SEQ ID NO: 15517 - protein, 9 aa, Homo Sapiens
IQLEHLNIV

SEQ ID NO: 15518 - protein, 9 aa, Homo Sapiens
IQLNGRYYL

SEQ ID NO: 15519 - protein, 9 aa, Homo Sapiens
IQLPSVNTV

SEQ ID NO: 15520 - protein, 9 aa, Homo Sapiens
IQPDNIVYV

SEQ ID NO: 15521 - protein, 9 aa, Homo Sapiens
IQTAVRLLL

SEQ ID NO: 15522 - protein, 9 aa, Homo Sapiens
IQTELQETV

SEQ ID NO: 15523 - protein, 9 aa, Homo Sapiens
IQTLVKEGL

SEQ ID NO: 15524 - protein, 9 aa, Homo Sapiens
IQVQVFEKL

SEQ ID NO: 15525 - protein, 9 aa, Homo Sapiens
IQVTKVTQV

SEQ ID NO: 15526 - protein, 9 aa, Homo Sapiens
IQWDKSMCV

SEQ ID NO: 15527 - protein, 9 aa, Homo Sapiens
IQYDKTNVL

SEQ ID NO: 15528 - protein, 9 aa, Homo Sapiens
IQYIRPVFV

SEQ ID NO: 15529 - protein, 9 aa, Homo Sapiens
ISDRPSLSV

SEQ ID NO: 15530 - protein, 9 aa, Homo Sapiens
ISTEVNPKL

SEQ ID NO: 15531 - protein, 9 aa, Homo Sapiens
ITAPIEAQV

SEQ ID NO: 15532 - protein, 9 aa, Homo Sapiens
ITDPANEKL

SEQ ID NO: 15533 - protein, 9 aa, Homo Sapiens
ITEKWLPEI

SEQ ID NO: 15534 - protein, 9 aa, Homo Sapiens
ITFESIEKA

SEQ ID NO: 15535 - protein, 9 aa, Homo Sapiens
ITINDIVHV

SEQ ID NO: 15536 - protein, 9 aa, Homo Sapiens
ITPDEFHFV

SEQ ID NO: 15537 - protein, 9 aa, Homo Sapiens
ITPENLPQI

SEQ ID NO: 15538 - protein, 9 aa, Homo Sapiens
ITPGGFSSV

SEQ ID NO: 15539 - protein, 9 aa, Homo Sapiens
ITPQKLPSL

SEQ ID NO: 15540 - protein, 9 aa, Homo Sapiens
ITPQTIHGV

SEQ ID NO: 15541 - protein, 9 aa, Homo Sapiens
ITTDVLYTI

SEQ ID NO: 15542 - protein, 9 aa, Homo Sapiens
ITVEKIIKI

SEQ ID NO: 15543 - protein, 9 aa, Homo Sapiens
ITVKGLEVV

SEQ ID NO: 15544 - protein, 9 aa, Homo Sapiens
IVAESLQQV

SEQ ID NO: 15545 - protein, 9 aa, Homo Sapiens
IVAPGTFEV

SEQ ID NO: 15546 - protein, 9 aa, Homo Sapiens
IVDQTNVKL

SEQ ID NO: 15547 - protein, 9 aa, Homo Sapiens
IVHSVFEFL

SEQ ID NO: 15548 - protein, 9 aa, Homo Sapiens
IVIDGLREL

SEQ ID NO: 15549 - protein, 9 aa, Homo Sapiens
IVIGIIKTV

SEQ ID NO: 15550 - protein, 9 aa, Homo Sapiens
IVIGVLHQL

SEQ ID NO: 15551 - protein, 9 aa, Homo Sapiens
IVIRGLNTI

SEQ ID NO: 15552 - protein, 9 aa, Homo Sapiens
IVISKLTQI

SEQ ID NO: 15553 - protein, 9 aa, Homo Sapiens
IVLDRLIEL

SEQ ID NO: 15554 - protein, 9 aa, Homo Sapiens
IVLDRVPAF

SEQ ID NO: 15555 - protein, 9 aa, Homo Sapiens
IVLPEDLQL

SEQ ID NO: 15556 - protein, 9 aa, Homo Sapiens
IVMEHVVFL

SEQ ID NO: 15557 - protein, 9 aa, Homo Sapiens
IVMQEVETV

SEQ ID NO: 15558 - protein, 9 aa, Homo Sapiens
IVNWVNETL

SEQ ID NO: 15559 - protein, 9 aa, Homo Sapiens
IVPATLPQL

SEQ ID NO: 15560 - protein, 9 aa, Homo Sapiens
IVTEELIVV

SEQ ID NO: 15561 - protein, 9 aa, Homo Sapiens
IVVGRITEV

SEQ ID NO: 15562 - protein, 9 aa, Homo Sapiens
IVWQEDPRL

SEQ ID NO: 15563 - protein, 9 aa, Homo Sapiens
KAIDIYEQV

SEQ ID NO: 15564 - protein, 9 aa, Homo Sapiens
KAIEVLLTL

SEQ ID NO: 15565 - protein, 9 aa, Homo Sapiens
KAIGSLKEV

SEQ ID NO: 15566 - protein, 9 aa, Homo Sapiens
KAISGVHTV

SEQ ID NO: 15567 - protein, 9 aa, Homo Sapiens
KALAKLDHV

SEQ ID NO: 15568 - protein, 9 aa, Homo Sapiens
KALDKIAEI

SEQ ID NO: 15569 - protein, 9 aa, Homo Sapiens
KALESIEYV

SEQ ID NO: 15570 - protein, 9 aa, Homo Sapiens
KALETLRQV

SEQ ID NO: 15571 - protein, 9 aa, Homo Sapiens
KALQFLEEV

SEQ ID NO: 15572 - protein, 9 aa, Homo Sapiens
KAMDDTFYL

SEQ ID NO: 15573 - protein, 9 aa, Homo Sapiens
KATGKLFAV

SEQ ID NO: 15574 - protein, 9 aa, Homo Sapiens
KAVDIVKQV

SEQ ID NO: 15575 - protein, 9 aa, Homo Sapiens
KAVELLVEL

SEQ ID NO: 15576 - protein, 9 aa, Homo Sapiens
KAVHVIYTV

SEQ ID NO: 15577 - protein, 9 aa, Homo Sapiens
KICDYLFNV

SEQ ID NO: 15578 - protein, 9 aa, Homo Sapiens
KICEVDLVI

SEQ ID NO: 15579 - protein, 9 aa, Homo Sapiens
KIEKELETV

SEQ ID NO: 15580 - protein, 9 aa, Homo Sapiens
KIFEDIPTL

SEQ ID NO: 15581 - protein, 9 aa, Homo Sapiens
KIFHINPRL

SEQ ID NO: 15582 - protein, 9 aa, Homo Sapiens
KIFPALCTV

SEQ ID NO: 15583 - protein, 9 aa, Homo Sapiens
KIHSSFRSL

SEQ ID NO: 15584 - protein, 9 aa, Homo Sapiens
KIIDFIYTA

SEQ ID NO: 15585 - protein, 9 aa, Homo Sapiens
KIIDIQEKV

SEQ ID NO: 15586 - protein, 9 aa, Homo Sapiens
KIIGIMEEV

SEQ ID NO: 15587 - protein, 9 aa, Homo Sapiens
KILAAILHL

SEQ ID NO: 15588 - protein, 9 aa, Homo Sapiens
KILDLETQL

SEQ ID NO: 15589 - protein, 9 aa, Homo Sapiens
KILDVLEEI

SEQ ID NO: 15590 - protein, 9 aa, Homo Sapiens
KILEDVVGV

SEQ ID NO: 15591 - protein, 9 aa, Homo Sapiens
KILEELQKV

SEQ ID NO: 15592 - protein, 9 aa, Homo Sapiens
KILETLYTL

SEQ ID NO: 15593 - protein, 9 aa, Homo Sapiens
KILPDLNTV

SEQ ID NO: 15594 - protein, 9 aa, Homo Sapiens
KILPTLEAV

SEQ ID NO: 15595 - protein, 9 aa, Homo Sapiens
KILPVMVTL

SEQ ID NO: 15596 - protein, 9 aa, Homo Sapiens
KILQELPSV

SEQ ID NO: 15597 - protein, 9 aa, Homo Sapiens
KILSELFTV

SEQ ID NO: 15598 - protein, 9 aa, Homo Sapiens
KILTKLLEV

SEQ ID NO: 15599 - protein, 9 aa, Homo Sapiens
KIMEAMEKL

SEQ ID NO: 15600 - protein, 9 aa, Homo Sapiens
KIPQVLVKL

SEQ ID NO: 15601 - protein, 9 aa, Homo Sapiens
KIQEILTQV

SEQ ID NO: 15602 - protein, 9 aa, Homo Sapiens
KITEDFRAL

SEQ ID NO: 15603 - protein, 9 aa, Homo Sapiens
KIVDFSYSV

SEQ ID NO: 15604 - protein, 9 aa, Homo Sapiens
KIVKWDRDM

SEQ ID NO: 15605 - protein, 9 aa, Homo Sapiens
KIVPVEITI

SEQ ID NO: 15606 - protein, 9 aa, Homo Sapiens
KIYEGAYHV

SEQ ID NO: 15607 - protein, 9 aa, Homo Sapiens
KIYEGQVEV

SEQ ID NO: 15608 - protein, 9 aa, Homo Sapiens
KLAPPLVTL

SEQ ID NO: 15609 - protein, 9 aa, Homo Sapiens
KLCDIIVHI

SEQ ID NO: 15610 - protein, 9 aa, Homo Sapiens
KLFEKVKEV

SEQ ID NO: 15611 - protein, 9 aa, Homo Sapiens
KLFNEFIQL

SEQ ID NO: 15612 - protein, 9 aa, Homo Sapiens
KLHEYFPEM

SEQ ID NO: 15613 - protein, 9 aa, Homo Sapiens
KLHGVNINV

SEQ ID NO: 15614 - protein, 9 aa, Homo Sapiens
KLHLGFIEI

SEQ ID NO: 15615 - protein, 9 aa, Homo Sapiens
KLHPHFAKV

SEQ ID NO: 15616 - protein, 9 aa, Homo Sapiens
KLHVDFRNV

SEQ ID NO: 15617 - protein, 9 aa, Homo Sapiens
KLIDDVHRL

SEQ ID NO: 15618 - protein, 9 aa, Homo Sapiens
KLIDRTESL

SEQ ID NO: 15619 - protein, 9 aa, Homo Sapiens
KLIEELETL

SEQ ID NO: 15620 - protein, 9 aa, Homo Sapiens
KLILLITQV

SEQ ID NO: 15621 - protein, 9 aa, Homo Sapiens
KLIPFLEKL

SEQ ID NO: 15622 - protein, 9 aa, Homo Sapiens
KLIPQLPTL

SEQ ID NO: 15623 - protein, 9 aa, Homo Sapiens
KLIQNVFEI

SEQ ID NO: 15624 - protein, 9 aa, Homo Sapiens
KLISELQKL

SEQ ID NO: 15625 - protein, 9 aa, Homo Sapiens
KLITSFLEL

SEQ ID NO: 15626 - protein, 9 aa, Homo Sapiens
KLLDQMPSL

SEQ ID NO: 15627 - protein, 9 aa, Homo Sapiens
KLLDVVHPA

SEQ ID NO: 15628 - protein, 9 aa, Homo Sapiens
KLLEPVLLL

SEQ ID NO: 15629 - protein, 9 aa, Homo Sapiens
KLLERVSAI

SEQ ID NO: 15630 - protein, 9 aa, Homo Sapiens
KLLEYIEEI

SEQ ID NO: 15631 - protein, 9 aa, Homo Sapiens
KLLFWVTEV

SEQ ID NO: 15632 - protein, 9 aa, Homo Sapiens
KLLGELHTL

SEQ ID NO: 15633 - protein, 9 aa, Homo Sapiens
KLLGNIKNV

SEQ ID NO: 15634 - protein, 9 aa, Homo Sapiens
KLLKDLPEL

SEQ ID NO: 15635 - protein, 9 aa, Homo Sapiens
KLLKLFQGV

SEQ ID NO: 15636 - protein, 9 aa, Homo Sapiens
KLLPQLTYL

SEQ ID NO: 15637 - protein, 9 aa, Homo Sapiens
KLLSKFYEL

SEQ ID NO: 15638 - protein, 9 aa, Homo Sapiens
KLLTEVHAA

SEQ ID NO: 15639 - protein, 9 aa, Homo Sapiens
KLMDHIYAV

SEQ ID NO: 15640 - protein, 9 aa, Homo Sapiens
KLMELLEEI

SEQ ID NO: 15641 - protein, 9 aa, Homo Sapiens
KLPEKWESV

SEQ ID NO: 15642 - protein, 9 aa, Homo Sapiens
KLPSNLPQL

SEQ ID NO: 15643 - protein, 9 aa, Homo Sapiens
KLVDCIIEV

SEQ ID NO: 15644 - protein, 9 aa, Homo Sapiens
KLVEYIVKA

SEQ ID NO: 15645 - protein, 9 aa, Homo Sapiens
KLVGEFLEV

SEQ ID NO: 15646 - protein, 9 aa, Homo Sapiens
KLVKEVIAV

SEQ ID NO: 15647 - protein, 9 aa, Homo Sapiens
KLVTTVTEI

SEQ ID NO: 15648 - protein, 9 aa, Homo Sapiens
KLYTDFDEI

SEQ ID NO: 15649 - protein, 9 aa, Homo Sapiens
KMAEMLVEL

SEQ ID NO: 15650 - protein, 9 aa, Homo Sapiens
KMAPALRKV

SEQ ID NO: 15651 - protein, 9 aa, Homo Sapiens
KMLEKLPEL

SEQ ID NO: 15652 - protein, 9 aa, Homo Sapiens
KMMDVTVTI

SEQ ID NO: 15653 - protein, 9 aa, Homo Sapiens
KMNEKLYTV

SEQ ID NO: 15654 - protein, 9 aa, Homo Sapiens
KMPDDVWLV

SEQ ID NO: 15655 - protein, 9 aa, Homo Sapiens
KQADPFASL

SEQ ID NO: 15656 - protein, 9 aa, Homo Sapiens
KQAEIVKRL

SEQ ID NO: 15657 - protein, 9 aa, Homo Sapiens
KQDSLVINL

SEQ ID NO: 15658 - protein, 9 aa, Homo Sapiens
KQFEGTVEI

SEQ ID NO: 15659 - protein, 9 aa, Homo Sapiens
KQFEKQVEL

SEQ ID NO: 15660 - protein, 9 aa, Homo Sapiens
KQFELALQL

SEQ ID NO: 15661 - protein, 9 aa, Homo Sapiens
KQHGVNVSV

SEQ ID NO: 15662 - protein, 9 aa, Homo Sapiens
KQIDPVLQV

SEQ ID NO: 15663 - protein, 9 aa, Homo Sapiens
KQIDQFLVV

SEQ ID NO: 15664 - protein, 9 aa, Homo Sapiens
KQIDVYRSV

SEQ ID NO: 15665 - protein, 9 aa, Homo Sapiens
KQIETGPFL

SEQ ID NO: 15666 - protein, 9 aa, Homo Sapiens
KQIQEDWEL

SEQ ID NO: 15667 - protein, 9 aa, Homo Sapiens
KQLDDLKGA

SEQ ID NO: 15668 - protein, 9 aa, Homo Sapiens
KQLDENISL

SEQ ID NO: 15669 - protein, 9 aa, Homo Sapiens
KQLEDGRTL

SEQ ID NO: 15670 - protein, 9 aa, Homo Sapiens
KQLEEAIQL

SEQ ID NO: 15671 - protein, 9 aa, Homo Sapiens
KQLEVVHTL

SEQ ID NO: 15672 - protein, 9 aa, Homo Sapiens
KQLNFLTKL

SEQ ID NO: 15673 - protein, 9 aa, Homo Sapiens
KQLNHFWEI

SEQ ID NO: 15674 - protein, 9 aa, Homo Sapiens
KQMDHFVGL

SEQ ID NO: 15675 - protein, 9 aa, Homo Sapiens
KQMSISTGL

SEQ ID NO: 15676 - protein, 9 aa, Homo Sapiens
KQPRWMETV

SEQ ID NO: 15677 - protein, 9 aa, Homo Sapiens
KQQDHFFQA

SEQ ID NO: 15678 - protein, 9 aa, Homo Sapiens
KQTDLEITV

SEQ ID NO: 15679 - protein, 9 aa, Homo Sapiens
KQTEIAKRL

SEQ ID NO: 15680 - protein, 9 aa, Homo Sapiens
KQVEAGVCV

SEQ ID NO: 15681 - protein, 9 aa, Homo Sapiens
KQVEEIFNL

SEQ ID NO: 15682 - protein, 9 aa, Homo Sapiens
KQYGNEVFL

SEQ ID NO: 15683 - protein, 9 aa, Homo Sapiens
KSIDTFFGV

SEQ ID NO: 15684 - protein, 9 aa, Homo Sapiens
KSLSVVTEV

SEQ ID NO: 15685 - protein, 9 aa, Homo Sapiens
KSMESFLKV

SEQ ID NO: 15686 - protein, 9 aa, Homo Sapiens
KTAEFLSKL

SEQ ID NO: 15687 - protein, 9 aa, Homo Sapiens
KTAEMNEKL

SEQ ID NO: 15688 - protein, 9 aa, Homo Sapiens
KTAENFRAL

SEQ ID NO: 15689 - protein, 9 aa, Homo Sapiens
KTAVAIEKV

SEQ ID NO: 15690 - protein, 9 aa, Homo Sapiens
KTFEGFCAL

SEQ ID NO: 15691 - protein, 9 aa, Homo Sapiens
KTFNLIPAV

SEQ ID NO: 15692 - protein, 9 aa, Homo Sapiens
KTGEVLHEV

SEQ ID NO: 15693 - protein, 9 aa, Homo Sapiens
KTIDAMKRV

SEQ ID NO: 15694 - protein, 9 aa, Homo Sapiens
KTIDGILLL

SEQ ID NO: 15695 - protein, 9 aa, Homo Sapiens
KTIENFLVV

SEQ ID NO: 15696 - protein, 9 aa, Homo Sapiens
KTIETSPSL

SEQ ID NO: 15697 - protein, 9 aa, Homo Sapiens
KTLEGEFSV

SEQ ID NO: 15698 - protein, 9 aa, Homo Sapiens
KTLERSYLL

SEQ ID NO: 15699 - protein, 9 aa, Homo Sapiens
KTLGKLWRL

SEQ ID NO: 15700 - protein, 9 aa, Homo Sapiens
KTLPNAICV

SEQ ID NO: 15701 - protein, 9 aa, Homo Sapiens
KTLPVAFKV

SEQ ID NO: 15702 - protein, 9 aa, Homo Sapiens
KTMTDTYLL

SEQ ID NO: 15703 - protein, 9 aa, Homo Sapiens
KTNVKFLAI

SEQ ID NO: 15704 - protein, 9 aa, Homo Sapiens
KTTTIAVEV

SEQ ID NO: 15705 - protein, 9 aa, Homo Sapiens
KTVLELQYV

SEQ ID NO: 15706 - protein, 9 aa, Homo Sapiens
KTVPLLSKV

SEQ ID NO: 15707 - protein, 9 aa, Homo Sapiens
KVADGFKVV

SEQ ID NO: 15708 - protein, 9 aa, Homo Sapiens
KVADGLVKV

SEQ ID NO: 15709 - protein, 9 aa, Homo Sapiens
KVAEKLEAL

SEQ ID NO: 15710 - protein, 9 aa, Homo Sapiens
KVAELFEKL

SEQ ID NO: 15711 - protein, 9 aa, Homo Sapiens
KVASLLHQV

SEQ ID NO: 15712 - protein, 9 aa, Homo Sapiens
KVDENFDCV

SEQ ID NO: 15713 - protein, 9 aa, Homo Sapiens
KVEETFQCI

SEQ ID NO: 15714 - protein, 9 aa, Homo Sapiens
KVEGVLASV

SEQ ID NO: 15715 - protein, 9 aa, Homo Sapiens
KVFDYDFGL

SEQ ID NO: 15716 - protein, 9 aa, Homo Sapiens
KVFGNEIKL

SEQ ID NO: 15717 - protein, 9 aa, Homo Sapiens
KVIDEIYRV

SEQ ID NO: 15718 - protein, 9 aa, Homo Sapiens
KVIDGLETL

SEQ ID NO: 15719 - protein, 9 aa, Homo Sapiens
KVIDTQQKV

SEQ ID NO: 15720 - protein, 9 aa, Homo Sapiens
KVIDYVPGI

SEQ ID NO: 15721 - protein, 9 aa, Homo Sapiens
KVIEINPYL

SEQ ID NO: 15722 - protein, 9 aa, Homo Sapiens
KVIESFIKA

SEQ ID NO: 15723 - protein, 9 aa, Homo Sapiens
KVIESTQDL

SEQ ID NO: 15724 - protein, 9 aa, Homo Sapiens
KVIEVFIRA

SEQ ID NO: 15725 - protein, 9 aa, Homo Sapiens
KVIKILITI

SEQ ID NO: 15726 - protein, 9 aa, Homo Sapiens
KVIKTLTEI

SEQ ID NO: 15727 - protein, 9 aa, Homo Sapiens
KVIVRFLTV

SEQ ID NO: 15728 - protein, 9 aa, Homo Sapiens
KVIYVLPML

SEQ ID NO: 15729 - protein, 9 aa, Homo Sapiens
KVKEFFEKL

SEQ ID NO: 15730 - protein, 9 aa, Homo Sapiens
KVLDFEHFL

SEQ ID NO: 15731 - protein, 9 aa, Homo Sapiens
KVLDILQHI

SEQ ID NO: 15732 - protein, 9 aa, Homo Sapiens
KVLDLKINL

SEQ ID NO: 15733 - protein, 9 aa, Homo Sapiens
KVLDLRINL

SEQ ID NO: 15734 - protein, 9 aa, Homo Sapiens
KVLDVLWEL

SEQ ID NO: 15735 - protein, 9 aa, Homo Sapiens
KVLEGMEVV

SEQ ID NO: 15736 - protein, 9 aa, Homo Sapiens
KVLEHVPLL

SEQ ID NO: 15737 - protein, 9 aa, Homo Sapiens
KVLEILHRV

SEQ ID NO: 15738 - protein, 9 aa, Homo Sapiens
KVLELDPAL

SEQ ID NO: 15739 - protein, 9 aa, Homo Sapiens
KVLERVNAV

SEQ ID NO: 15740 - protein, 9 aa, Homo Sapiens
KVLGKIEKV

SEQ ID NO: 15741 - protein, 9 aa, Homo Sapiens
KVLNKVITV

SEQ ID NO: 15742 - protein, 9 aa, Homo Sapiens
KVLQGLIEV

SEQ ID NO: 15743 - protein, 9 aa, Homo Sapiens
KVLQHMKAV

SEQ ID NO: 15744 - protein, 9 aa, Homo Sapiens
KVMDEVEKA

SEQ ID NO: 15745 - protein, 9 aa, Homo Sapiens
KVMDVTEKL

SEQ ID NO: 15746 - protein, 9 aa, Homo Sapiens
KVMELLVHL

SEQ ID NO: 15747 - protein, 9 aa, Homo Sapiens
KVPDVLPVL

SEQ ID NO: 15748 - protein, 9 aa, Homo Sapiens
KVPEIEVTV

SEQ ID NO: 15749 - protein, 9 aa, Homo Sapiens
KVPEIISSI

SEQ ID NO: 15750 - protein, 9 aa, Homo Sapiens
KVPEWVDTV

SEQ ID NO: 15751 - protein, 9 aa, Homo Sapiens
KVPFSVPKI

SEQ ID NO: 15752 - protein, 9 aa, Homo Sapiens
KVTDDLVCL

SEQ ID NO: 15753 - protein, 9 aa, Homo Sapiens
KVTEAFDYL

SEQ ID NO: 15754 - protein, 9 aa, Homo Sapiens
KVVALVHAV

SEQ ID NO: 15755 - protein, 9 aa, Homo Sapiens
KVVDVDVKL

SEQ ID NO: 15756 - protein, 9 aa, Homo Sapiens
KVVDVVRNL

SEQ ID NO: 15757 - protein, 9 aa, Homo Sapiens
KVVEELTRI

SEQ ID NO: 15758 - protein, 9 aa, Homo Sapiens
KVVNIVPVI

SEQ ID NO: 15759 - protein, 9 aa, Homo Sapiens
KVVRVLEML

SEQ ID NO: 15760 - protein, 9 aa, Homo Sapiens
KVVSNLPAI

SEQ ID NO: 15761 - protein, 9 aa, Homo Sapiens
KVVSVLHHL

SEQ ID NO: 15762 - protein, 9 aa, Homo Sapiens
KVVTIIPKI

SEQ ID NO: 15763 - protein, 9 aa, Homo Sapiens
KVVVYLQKL

SEQ ID NO: 15764 - protein, 9 aa, Homo Sapiens
LAAARLAAA

SEQ ID NO: 15765 - protein, 9 aa, Homo Sapiens
LAAEFLKQV

SEQ ID NO: 15766 - protein, 9 aa, Homo Sapiens
LAAKHFIDV

SEQ ID NO: 15767 - protein, 9 aa, Homo Sapiens
LAIKDIPEV

SEQ ID NO: 15768 - protein, 9 aa, Homo Sapiens
LGCRVFTTV

SEQ ID NO: 15769 - protein, 9 aa, Homo Sapiens
LIDENDNKI

SEQ ID NO: 15770 - protein, 9 aa, Homo Sapiens
LIDEQILCV

SEQ ID NO: 15771 - protein, 9 aa, Homo Sapiens
LIGEFLEKV

SEQ ID NO: 15772 - protein, 9 aa, Homo Sapiens
LILDPIFKV

SEQ ID NO: 15773 - protein, 9 aa, Homo Sapiens
LILKDMVKV

SEQ ID NO: 15774 - protein, 9 aa, Homo Sapiens
LIPDIDLKL

SEQ ID NO: 15775 - protein, 9 aa, Homo Sapiens
LIPEYLNFI

SEQ ID NO: 15776 - protein, 9 aa, Homo Sapiens
LIYSGKLLL

SEQ ID NO: 15777 - protein, 9 aa, Homo Sapiens
LLDPSVFHV

SEQ ID NO: 15778 - protein, 9 aa, Homo Sapiens
LLDRFLATV

SEQ ID NO: 15779 - protein, 9 aa, Homo Sapiens
LLFSAFSRA

SEQ ID NO: 15780 - protein, 9 aa, Homo Sapiens
LLGPPPVGV

SEQ ID NO: 15781 - protein, 9 aa, Homo Sapiens
LLGPRLVLA

SEQ ID NO: 15782 - protein, 9 aa, Homo Sapiens
LLIDELNKL

SEQ ID NO: 15783 - protein, 9 aa, Homo Sapiens
LLIPGLATA

SEQ ID NO: 15784 - protein, 9 aa, Homo Sapiens
LLLEILHEI

SEQ ID NO: 15785 - protein, 9 aa, Homo Sapiens
LLLETLPEL

SEQ ID NO: 15786 - protein, 9 aa, Homo Sapiens
LLLKGVEAV

SEQ ID NO: 15787 - protein, 9 aa, Homo Sapiens
LLLPDVIKV

SEQ ID NO: 15788 - protein, 9 aa, Homo Sapiens
LLMEHIQEI

SEQ ID NO: 15789 - protein, 9 aa, Homo Sapiens
LLNEILEQV

SEQ ID NO: 15790 - protein, 9 aa, Homo Sapiens
LLPDEIADV

SEQ ID NO: 15791 - protein, 9 aa, Homo Sapiens
LLPDIVTCV

SEQ ID NO: 15792 - protein, 9 aa, Homo Sapiens
LLPDLIQKV

SEQ ID NO: 15793 - protein, 9 aa, Homo Sapiens
LLPDNFIAA

SEQ ID NO: 15794 - protein, 9 aa, Homo Sapiens
LLPDNVHYV

SEQ ID NO: 15795 - protein, 9 aa, Homo Sapiens
LLPEHFLFL

SEQ ID NO: 15796 - protein, 9 aa, Homo Sapiens
LLPHILPLL

SEQ ID NO: 15797 - protein, 9 aa, Homo Sapiens
LLPKAMIEV

SEQ ID NO: 15798 - protein, 9 aa, Homo Sapiens
LLPNAVYKV

SEQ ID NO: 15799 - protein, 9 aa, Homo Sapiens
LLQNNLPAV

SEQ ID NO: 15800 - protein, 9 aa, Homo Sapiens
LLTDGIMRV

SEQ ID NO: 15801 - protein, 9 aa, Homo Sapiens
LLVDEFLKV

SEQ ID NO: 15802 - protein, 9 aa, Homo Sapiens
LLVGVDEKL

SEQ ID NO: 15803 - protein, 9 aa, Homo Sapiens
LLVKELQSL

SEQ ID NO: 15804 - protein, 9 aa, Homo Sapiens
LMAHAMEEV

SEQ ID NO: 15805 - protein, 9 aa, Homo Sapiens
LMDHTIPEV

SEQ ID NO: 15806 - protein, 9 aa, Homo Sapiens
LMQTEVHHV

SEQ ID NO: 15807 - protein, 9 aa, Homo Sapiens
LMVDHVTEV

SEQ ID NO: 15808 - protein, 9 aa, Homo Sapiens
LQDDAHPTL

SEQ ID NO: 15809 - protein, 9 aa, Homo Sapiens
LQEDPPAGV

SEQ ID NO: 15810 - protein, 9 aa, Homo Sapiens
LQEDPPVGV

SEQ ID NO: 15811 - protein, 9 aa, Homo Sapiens
LQEEPVEGF

SEQ ID NO: 15812 - protein, 9 aa, Homo Sapiens
LQFDGIHVV

SEQ ID NO: 15813 - protein, 9 aa, Homo Sapiens
LQFDKAINA

SEQ ID NO: 15814 - protein, 9 aa, Homo Sapiens
LQLDKEFQL

SEQ ID NO: 15815 - protein, 9 aa, Homo Sapiens
LQLEAIHKV

SEQ ID NO: 15816 - protein, 9 aa, Homo Sapiens
LQLELHCQV

SEQ ID NO: 15817 - protein, 9 aa, Homo Sapiens
LQQEIYQTL

SEQ ID NO: 15818 - protein, 9 aa, Homo Sapiens
LQTEIKNQL

SEQ ID NO: 15819 - protein, 9 aa, Homo Sapiens
LQTPLDIRL

SEQ ID NO: 15820 - protein, 9 aa, Homo Sapiens
LQTSIREEI

SEQ ID NO: 15821 - protein, 9 aa, Homo Sapiens
LQWDKVLRL

SEQ ID NO: 15822 - protein, 9 aa, Homo Sapiens
LQYSFPLQL

SEQ ID NO: 15823 - protein, 9 aa, Homo Sapiens
LRLLHIEEL

SEQ ID NO: 15824 - protein, 9 aa, Homo Sapiens
LSLENLEKI

SEQ ID NO: 15825 - protein, 9 aa, Homo Sapiens
LSLIKDLGL

SEQ ID NO: 15826 - protein, 9 aa, Homo Sapiens
LTDPAIVKV

SEQ ID NO: 15827 - protein, 9 aa, Homo Sapiens
LTLTKIIEA

SEQ ID NO: 15828 - protein, 9 aa, Homo Sapiens
LTMEVIRQV

SEQ ID NO: 15829 - protein, 9 aa, Homo Sapiens
LTMPDTPRL

SEQ ID NO: 15830 - protein, 9 aa, Homo Sapiens
LTPDKIYHV

SEQ ID NO: 15831 - protein, 9 aa, Homo Sapiens
LTPEKFDKL

SEQ ID NO: 15832 - protein, 9 aa, Homo Sapiens
LTPERFHNL

SEQ ID NO: 15833 - protein, 9 aa, Homo Sapiens
LTPKLFHEV

SEQ ID NO: 15834 - protein, 9 aa, Homo Sapiens
LTPVRLPSI

SEQ ID NO: 15835 - protein, 9 aa, Homo Sapiens
LTTCISAHV

SEQ ID NO: 15836 - protein, 9 aa, Homo Sapiens
LTTEVHPEL

SEQ ID NO: 15837 - protein, 9 aa, Homo Sapiens
LVAPPLPAA

SEQ ID NO: 15838 - protein, 9 aa, Homo Sapiens
LVAVELEKV

SEQ ID NO: 15839 - protein, 9 aa, Homo Sapiens
LVDSNNPKI

SEQ ID NO: 15840 - protein, 9 aa, Homo Sapiens
LVHDLFQKV

SEQ ID NO: 15841 - protein, 9 aa, Homo Sapiens
LVIDAVREI

SEQ ID NO: 15842 - protein, 9 aa, Homo Sapiens
LVLDALMRV

SEQ ID NO: 15843 - protein, 9 aa, Homo Sapiens
LVLDKLFQL

SEQ ID NO: 15844 - protein, 9 aa, Homo Sapiens
LVPDVVNEV

SEQ ID NO: 15845 - protein, 9 aa, Homo Sapiens
LVPEFVHSI

SEQ ID NO: 15846 - protein, 9 aa, Homo Sapiens
LVPGHLDQV

SEQ ID NO: 15847 - protein, 9 aa, Homo Sapiens
LVSQYFQTV

SEQ ID NO: 15848 - protein, 9 aa, Homo Sapiens
LVVDWDHHL

SEQ ID NO: 15849 - protein, 9 aa, Homo Sapiens
LVYKNFPQL

SEQ ID NO: 15850 - protein, 9 aa, Homo Sapiens
MALGSDPRV

SEQ ID NO: 15851 - protein, 9 aa, Homo Sapiens
MGVDKIIPV

SEQ ID NO: 15852 - protein, 9 aa, Homo Sapiens
MIIENFEAL

SEQ ID NO: 15853 - protein, 9 aa, Homo Sapiens
MIIKLITSV

SEQ ID NO: 15854 - protein, 9 aa, Homo Sapiens
MIIPSLEEL

SEQ ID NO: 15855 - protein, 9 aa, Homo Sapiens
MILKNIEKI

SEQ ID NO: 15856 - protein, 9 aa, Homo Sapiens
MIPQIMPSI

SEQ ID NO: 15857 - protein, 9 aa, Homo Sapiens
MISLEIPQV

SEQ ID NO: 15858 - protein, 9 aa, Homo Sapiens
MITDVVPEV

SEQ ID NO: 15859 - protein, 9 aa, Homo Sapiens
MIWKGLIVL

SEQ ID NO: 15860 - protein, 9 aa, Homo Sapiens
MLHPIFEEA

SEQ ID NO: 15861 - protein, 9 aa, Homo Sapiens
MLIKLLEVL

SEQ ID NO: 15862 - protein, 9 aa, Homo Sapiens
MLLDVMHTV

SEQ ID NO: 15863 - protein, 9 aa, Homo Sapiens
MQDDNQVMV

SEQ ID NO: 15864 - protein, 9 aa, Homo Sapiens
MQDPMEIFV

SEQ ID NO: 15865 - protein, 9 aa, Homo Sapiens
MTDDKITEV

SEQ ID NO: 15866 - protein, 9 aa, Homo Sapiens
MTDPIRILV

SEQ ID NO: 15867 - protein, 9 aa, Homo Sapiens
MTLEGDIRL

SEQ ID NO: 15868 - protein, 9 aa, Homo Sapiens
MTYWHLLNA

SEQ ID NO: 15869 - protein, 9 aa, Homo Sapiens
MVADKFTEL

SEQ ID NO: 15870 - protein, 9 aa, Homo Sapiens
MVADRFSEL

SEQ ID NO: 15871 - protein, 9 aa, Homo Sapiens
MVAPAVASV

SEQ ID NO: 15872 - protein, 9 aa, Homo Sapiens
MVDGTLLLL

SEQ ID NO: 15873 - protein, 9 aa, Homo Sapiens
MVIDVLHPG

SEQ ID NO: 15874 - protein, 9 aa, Homo Sapiens
MVMETIEKI

SEQ ID NO: 15875 - protein, 9 aa, Homo Sapiens
MVPEDVPRL

SEQ ID NO: 15876 - protein, 9 aa, Homo Sapiens
MVVESVERI

SEQ ID NO: 15877 - protein, 9 aa, Homo Sapiens
NAAQKMQTV

SEQ ID NO: 15878 - protein, 9 aa, Homo Sapiens
NAIDRLVNI

SEQ ID NO: 15879 - protein, 9 aa, Homo Sapiens
NAIEKVFKV

SEQ ID NO: 15880 - protein, 9 aa, Homo Sapiens
NAIETMPCV

SEQ ID NO: 15881 - protein, 9 aa, Homo Sapiens
NALDKVLSV

SEQ ID NO: 15882 - protein, 9 aa, Homo Sapiens
NALRELETV

SEQ ID NO: 15883 - protein, 9 aa, Homo Sapiens
NAVGPLESV

SEQ ID NO: 15884 - protein, 9 aa, Homo Sapiens
NAVVELVTV

SEQ ID NO: 15885 - protein, 9 aa, Homo Sapiens
NGFPVFATV

SEQ ID NO: 15886 - protein, 9 aa, Homo Sapiens
NIANHFFTV

SEQ ID NO: 15887 - protein, 9 aa, Homo Sapiens
NIICGITSV

SEQ ID NO: 15888 - protein, 9 aa, Homo Sapiens
NIIELVHQV

SEQ ID NO: 15889 - protein, 9 aa, Homo Sapiens
NIIPIIAKA

SEQ ID NO: 15890 - protein, 9 aa, Homo Sapiens
NIIPRFVQV

SEQ ID NO: 15891 - protein, 9 aa, Homo Sapiens
NIIPYITNV

SEQ ID NO: 15892 - protein, 9 aa, Homo Sapiens
NIPVHLPNI

SEQ ID NO: 15893 - protein, 9 aa, Homo Sapiens
NIPVRFIEA

SEQ ID NO: 15894 - protein, 9 aa, Homo Sapiens
NIVDKFVIV

SEQ ID NO: 15895 - protein, 9 aa, Homo Sapiens
NIVEKLREV

SEQ ID NO: 15896 - protein, 9 aa, Homo Sapiens
NIVERLKEV

SEQ ID NO: 15897 - protein, 9 aa, Homo Sapiens
NIVERVKEV

SEQ ID NO: 15898 - protein, 9 aa, Homo Sapiens
NIVPVIAKA

SEQ ID NO: 15899 - protein, 9 aa, Homo Sapiens
NLAEKLIGV

SEQ ID NO: 15900 - protein, 9 aa, Homo Sapiens
NLAKCIVSV

SEQ ID NO: 15901 - protein, 9 aa, Homo Sapiens
NLIPILKTV

SEQ ID NO: 15902 - protein, 9 aa, Homo Sapiens
NLLKLIAEV

SEQ ID NO: 15903 - protein, 9 aa, Homo Sapiens
NLLPKLHIV

SEQ ID NO: 15904 - protein, 9 aa, Homo Sapiens
NLNPEFISV

SEQ ID NO: 15905 - protein, 9 aa, Homo Sapiens
NLPDEIYHV

SEQ ID NO: 15906 - protein, 9 aa, Homo Sapiens
NLVPMIIHL

SEQ ID NO: 15907 - protein, 9 aa, Homo Sapiens
NMLPQIFRV

SEQ ID NO: 15908 - protein, 9 aa, Homo Sapiens
NMVAKVDEV

SEQ ID NO: 15909 - protein, 9 aa, Homo Sapiens
NMVDIIHSV

SEQ ID NO: 15910 - protein, 9 aa, Homo Sapiens
NQAAQLWKV

SEQ ID NO: 15911 - protein, 9 aa, Homo Sapiens
NQCTVQVRL

SEQ ID NO: 15912 - protein, 9 aa, Homo Sapiens
NQFPGFKEV

SEQ ID NO: 15913 - protein, 9 aa, Homo Sapiens
NQIDHEVTV

SEQ ID NO: 15914 - protein, 9 aa, Homo Sapiens
NQIECHPYL

SEQ ID NO: 15915 - protein, 9 aa, Homo Sapiens
NQIKDQIKL

SEQ ID NO: 15916 - protein, 9 aa, Homo Sapiens
NQIKKIENL

SEQ ID NO: 15917 - protein, 9 aa, Homo Sapiens
NQITQLESL

SEQ ID NO: 15918 - protein, 9 aa, Homo Sapiens
NQLDGIHLL

SEQ ID NO: 15919 - protein, 9 aa, Homo Sapiens
NQLDSLMGL

SEQ ID NO: 15920 - protein, 9 aa, Homo Sapiens
NQLEAEIHL

SEQ ID NO: 15921 - protein, 9 aa, Homo Sapiens
NQLKTLQEV

SEQ ID NO: 15922 - protein, 9 aa, Homo Sapiens
NQMPTQPQV

SEQ ID NO: 15923 - protein, 9 aa, Homo Sapiens
NQPGVLIQV

SEQ ID NO: 15924 - protein, 9 aa, Homo Sapiens
NQTPVTLQV

SEQ ID NO: 15925 - protein, 9 aa, Homo Sapiens
NQVEALNNL

SEQ ID NO: 15926 - protein, 9 aa, Homo Sapiens
NQVEIKPEM

SEQ ID NO: 15927 - protein, 9 aa, Homo Sapiens
NQVETLEKL

SEQ ID NO: 15928 - protein, 9 aa, Homo Sapiens
NQVLNLIKA

SEQ ID NO: 15929 - protein, 9 aa, Homo Sapiens
NQVPKLLYL

SEQ ID NO: 15930 - protein, 9 aa, Homo Sapiens
NQYRLIVNV

SEQ ID NO: 15931 - protein, 9 aa, Homo Sapiens
NTAQGFRTV

SEQ ID NO: 15932 - protein, 9 aa, Homo Sapiens
NTCPYVHNI

SEQ ID NO: 15933 - protein, 9 aa, Homo Sapiens
NTIPLFVQL

SEQ ID NO: 15934 - protein, 9 aa, Homo Sapiens
NTPEYMEKI

SEQ ID NO: 15935 - protein, 9 aa, Homo Sapiens
NVIDNLIVA

SEQ ID NO: 15936 - protein, 9 aa, Homo Sapiens
NVIERLQEA

SEQ ID NO: 15937 - protein, 9 aa, Homo Sapiens
NVIKVSVYL

SEQ ID NO: 15938 - protein, 9 aa, Homo Sapiens
NVIPNVANV

SEQ ID NO: 15939 - protein, 9 aa, Homo Sapiens
NVIQTVPNL

SEQ ID NO: 15940 - protein, 9 aa, Homo Sapiens
NVKEMWTEV

SEQ ID NO: 15941 - protein, 9 aa, Homo Sapiens
NVLDHFSEL

SEQ ID NO: 15942 - protein, 9 aa, Homo Sapiens
NVLRDFTCV

SEQ ID NO: 15943 - protein, 9 aa, Homo Sapiens
NVPDSFNEV

SEQ ID NO: 15944 - protein, 9 aa, Homo Sapiens
NVPSHLPQV

SEQ ID NO: 15945 - protein, 9 aa, Homo Sapiens
NVTEYVVRV

SEQ ID NO: 15946 - protein, 9 aa, Homo Sapiens
NVVDNLVVV

SEQ ID NO: 15947 - protein, 9 aa, Homo Sapiens
NVVDVFHAV

SEQ ID NO: 15948 - protein, 9 aa, Homo Sapiens
NVVLEIPAA

SEQ ID NO: 15949 - protein, 9 aa, Homo Sapiens
NVVNRLTSV

SEQ ID NO: 15950 - protein, 9 aa, Homo Sapiens
PDPKLLEKV

SEQ ID NO: 15951 - protein, 9 aa, Homo Sapiens
PKFLTEVLL

SEQ ID NO: 15952 - protein, 9 aa, Homo Sapiens
PRFIKIIEV

SEQ ID NO: 15953 - protein, 9 aa, Homo Sapiens
PSIVHRKCF

SEQ ID NO: 15954 - protein, 9 aa, Homo Sapiens
QALSELHTV

SEQ ID NO: 15955 - protein, 9 aa, Homo Sapiens
QALSPLLSV

SEQ ID NO: 15956 - protein, 9 aa, Homo Sapiens
QAPQPQSSL

SEQ ID NO: 15957 - protein, 9 aa, Homo Sapiens
QGIGKLASV

SEQ ID NO: 15958 - protein, 9 aa, Homo Sapiens
QIIRELQVL

SEQ ID NO: 15959 - protein, 9 aa, Homo Sapiens
QILDGIHYL

SEQ ID NO: 15960 - protein, 9 aa, Homo Sapiens
QILDGVHYL

SEQ ID NO: 15961 - protein, 9 aa, Homo Sapiens
QILEDTHKV

SEQ ID NO: 15962 - protein, 9 aa, Homo Sapiens
QILEGVHFL

SEQ ID NO: 15963 - protein, 9 aa, Homo Sapiens
QILEGVHYL

SEQ ID NO: 15964 - protein, 9 aa, Homo Sapiens
QILVQVKEV

SEQ ID NO: 15965 - protein, 9 aa, Homo Sapiens
QIPQVLNQV

SEQ ID NO: 15966 - protein, 9 aa, Homo Sapiens
QIVEHLEEL

SEQ ID NO: 15967 - protein, 9 aa, Homo Sapiens
QIVERVIAV

SEQ ID NO: 15968 - protein, 9 aa, Homo Sapiens
QLAPVFQRV

SEQ ID NO: 15969 - protein, 9 aa, Homo Sapiens
QLAQFVHEV

SEQ ID NO: 15970 - protein, 9 aa, Homo Sapiens
QLIDIIHTA

SEQ ID NO: 15971 - protein, 9 aa, Homo Sapiens
QLIDKVWQL

SEQ ID NO: 15972 - protein, 9 aa, Homo Sapiens
QLIPKLIFL

SEQ ID NO: 15973 - protein, 9 aa, Homo Sapiens
QLIRDMVNV

SEQ ID NO: 15974 - protein, 9 aa, Homo Sapiens
QLLAILPEA

SEQ ID NO: 15975 - protein, 9 aa, Homo Sapiens
QLLDQVEQI

SEQ ID NO: 15976 - protein, 9 aa, Homo Sapiens
QLLEKVPTL

SEQ ID NO: 15977 - protein, 9 aa, Homo Sapiens
QLLPLLEKV

SEQ ID NO: 15978 - protein, 9 aa, Homo Sapiens
QLPELFHKI

SEQ ID NO: 15979 - protein, 9 aa, Homo Sapiens
QLREAFEQL

SEQ ID NO: 15980 - protein, 9 aa, Homo Sapiens
QLSPRLLEV

SEQ ID NO: 15981 - protein, 9 aa, Homo Sapiens
QLVDIIEKV

SEQ ID NO: 15982 - protein, 9 aa, Homo Sapiens
QLVEQVEQI

SEQ ID NO: 15983 - protein, 9 aa, Homo Sapiens
QLVPALAKV

SEQ ID NO: 15984 - protein, 9 aa, Homo Sapiens
QLVRDLLEV

SEQ ID NO: 15985 - protein, 9 aa, Homo Sapiens
QMISRIEYI

SEQ ID NO: 15986 - protein, 9 aa, Homo Sapiens
QMISRIEYV

SEQ ID NO: 15987 - protein, 9 aa, Homo Sapiens
QMVKELQEI

SEQ ID NO: 15988 - protein, 9 aa, Homo Sapiens
QQHPAFSGV

SEQ ID NO: 15989 - protein, 9 aa, Homo Sapiens
QQIAYEIHL

SEQ ID NO: 15990 - protein, 9 aa, Homo Sapiens
QQIDRVVEV

SEQ ID NO: 15991 - protein, 9 aa, Homo Sapiens
QQIGKVVQV

SEQ ID NO: 15992 - protein, 9 aa, Homo Sapiens
QQIKELEKL

SEQ ID NO: 15993 - protein, 9 aa, Homo Sapiens
QQIKKLEEL

SEQ ID NO: 15994 - protein, 9 aa, Homo Sapiens
QQINKLEEL

SEQ ID NO: 15995 - protein, 9 aa, Homo Sapiens
QQVQRLPFL

SEQ ID NO: 15996 - protein, 9 aa, Homo Sapiens
QQYNSFVSL

SEQ ID NO: 15997 - protein, 9 aa, Homo Sapiens
QSLEYLEQV

SEQ ID NO: 15998 - protein, 9 aa, Homo Sapiens
QTHSVFVNV

SEQ ID NO: 15999 - protein, 9 aa, Homo Sapiens
QTISALIKA

SEQ ID NO: 16000 - protein, 9 aa, Homo Sapiens
QTLSQLPQV

SEQ ID NO: 16001 - protein, 9 aa, Homo Sapiens
QTPEFFQDV

SEQ ID NO: 16002 - protein, 9 aa, Homo Sapiens
QTPQRLLEV

SEQ ID NO: 16003 - protein, 9 aa, Homo Sapiens
QVAFDFTKV

SEQ ID NO: 16004 - protein, 9 aa, Homo Sapiens
QVASTLKQV

SEQ ID NO: 16005 - protein, 9 aa, Homo Sapiens
QVCAIIERV

SEQ ID NO: 16006 - protein, 9 aa, Homo Sapiens
QVEQQLANI

SEQ ID NO: 16007 - protein, 9 aa, Homo Sapiens
QVIEKFEAL

SEQ ID NO: 16008 - protein, 9 aa, Homo Sapiens
QVIPQFQTV

SEQ ID NO: 16009 - protein, 9 aa, Homo Sapiens
QVIPQLQTV

SEQ ID NO: 16010 - protein, 9 aa, Homo Sapiens
QVIPVLPQV

SEQ ID NO: 16011 - protein, 9 aa, Homo Sapiens
QVIQSLIAL

SEQ ID NO: 16012 - protein, 9 aa, Homo Sapiens
QVLEDFPTI

SEQ ID NO: 16013 - protein, 9 aa, Homo Sapiens
QVLEELTEL

SEQ ID NO: 16014 - protein, 9 aa, Homo Sapiens
QVLGAIERA

SEQ ID NO: 16015 - protein, 9 aa, Homo Sapiens
QVLGKIERA

SEQ ID NO: 16016 - protein, 9 aa, Homo Sapiens
QVLGRVNLV

SEQ ID NO: 16017 - protein, 9 aa, Homo Sapiens
QVLKDLVKV

SEQ ID NO: 16018 - protein, 9 aa, Homo Sapiens
QVLPHLLEV

SEQ ID NO: 16019 - protein, 9 aa, Homo Sapiens
QVLSEVSRV

SEQ ID NO: 16020 - protein, 9 aa, Homo Sapiens
QVMDEVIKV

SEQ ID NO: 16021 - protein, 9 aa, Homo Sapiens
QVMGKVPTI

SEQ ID NO: 16022 - protein, 9 aa, Homo Sapiens
QVMKFIEKA

SEQ ID NO: 16023 - protein, 9 aa, Homo Sapiens
QVNDAFTHV

SEQ ID NO: 16024 - protein, 9 aa, Homo Sapiens
QVPDDLPNV

SEQ ID NO: 16025 - protein, 9 aa, Homo Sapiens
QVPEKLDVV

SEQ ID NO: 16026 - protein, 9 aa, Homo Sapiens
QVTPEFRTV

SEQ ID NO: 16027 - protein, 9 aa, Homo Sapiens
QVVPVLVHL

SEQ ID NO: 16028 - protein, 9 aa, Homo Sapiens
QVVVLLHDV

SEQ ID NO: 16029 - protein, 9 aa, Homo Sapiens
RAADVLVYL

SEQ ID NO: 16030 - protein, 9 aa, Homo Sapiens
RAAKKLWKV

SEQ ID NO: 16031 - protein, 9 aa, Homo Sapiens
RAIELLEKL

SEQ ID NO: 16032 - protein, 9 aa, Homo Sapiens
RAIPELTKL

SEQ ID NO: 16033 - protein, 9 aa, Homo Sapiens
RALDVNVAL

SEQ ID NO: 16034 - protein, 9 aa, Homo Sapiens
RAVEELHKL

SEQ ID NO: 16035 - protein, 9 aa, Homo Sapiens
RETLLTLRI

SEQ ID NO: 16036 - protein, 9 aa, Homo Sapiens
RIADQFLGA

SEQ ID NO: 16037 - protein, 9 aa, Homo Sapiens
RIADSFQVI

SEQ ID NO: 16038 - protein, 9 aa, Homo Sapiens
RIAELLTEL

SEQ ID NO: 16039 - protein, 9 aa, Homo Sapiens
RICPIDITL

SEQ ID NO: 16040 - protein, 9 aa, Homo Sapiens
RIFLEFERV

SEQ ID NO: 16041 - protein, 9 aa, Homo Sapiens
RIFQTLLEV

SEQ ID NO: 16042 - protein, 9 aa, Homo Sapiens
RIIDCAFTV

SEQ ID NO: 16043 - protein, 9 aa, Homo Sapiens
RIIDTVAQV

SEQ ID NO: 16044 - protein, 9 aa, Homo Sapiens
RIIDVVYNA

SEQ ID NO: 16045 - protein, 9 aa, Homo Sapiens
RIKDEFQLL

SEQ ID NO: 16046 - protein, 9 aa, Homo Sapiens
RIPAYFVTV

SEQ ID NO: 16047 - protein, 9 aa, Homo Sapiens
RIPEKVFQA

SEQ ID NO: 16048 - protein, 9 aa, Homo Sapiens
RIPIAVSGV

SEQ ID NO: 16049 - protein, 9 aa, Homo Sapiens
RIQSKLYRA

SEQ ID NO: 16050 - protein, 9 aa, Homo Sapiens
RIVDGMFAV

SEQ ID NO: 16051 - protein, 9 aa, Homo Sapiens
RIVDILLKV

SEQ ID NO: 16052 - protein, 9 aa, Homo Sapiens
RIVPVDIYI

SEQ ID NO: 16053 - protein, 9 aa, Homo Sapiens
RIYKYIHKV

SEQ ID NO: 16054 - protein, 9 aa, Homo Sapiens
RLAQHITYV

SEQ ID NO: 16055 - protein, 9 aa, Homo Sapiens
RLDEAFDFV

SEQ ID NO: 16056 - protein, 9 aa, Homo Sapiens
RLFEGNALL

SEQ ID NO: 16057 - protein, 9 aa, Homo Sapiens
RLFHSFEEL

SEQ ID NO: 16058 - protein, 9 aa, Homo Sapiens
RLIEETISI

SEQ ID NO: 16059 - protein, 9 aa, Homo Sapiens
RLIESLFTI

SEQ ID NO: 16060 - protein, 9 aa, Homo Sapiens
RLIPTLVSI

SEQ ID NO: 16061 - protein, 9 aa, Homo Sapiens
RLISKFDTV

SEQ ID NO: 16062 - protein, 9 aa, Homo Sapiens
RLKEAFDYI

SEQ ID NO: 16063 - protein, 9 aa, Homo Sapiens
RLLDGAFKL

SEQ ID NO: 16064 - protein, 9 aa, Homo Sapiens
RLLDYVATV

SEQ ID NO: 16065 - protein, 9 aa, Homo Sapiens
RLLDYVVNI

SEQ ID NO: 16066 - protein, 9 aa, Homo Sapiens
RLLENMTEV

SEQ ID NO: 16067 - protein, 9 aa, Homo Sapiens
RLMNDMTAV

SEQ ID NO: 16068 - protein, 9 aa, Homo Sapiens
RLMNETTAV

SEQ ID NO: 16069 - protein, 9 aa, Homo Sapiens
RLPDLIKEV

SEQ ID NO: 16070 - protein, 9 aa, Homo Sapiens
RLPEAIEEV

SEQ ID NO: 16071 - protein, 9 aa, Homo Sapiens
RLPEIYIQL

SEQ ID NO: 16072 - protein, 9 aa, Homo Sapiens
RLQDAIAKV

SEQ ID NO: 16073 - protein, 9 aa, Homo Sapiens
RLQEEINEV

SEQ ID NO: 16074 - protein, 9 aa, Homo Sapiens
RLQEVTHSV

SEQ ID NO: 16075 - protein, 9 aa, Homo Sapiens
RLQGELQAV

SEQ ID NO: 16076 - protein, 9 aa, Homo Sapiens
RLTDYISKV

SEQ ID NO: 16077 - protein, 9 aa, Homo Sapiens
RLTEEFQNV

SEQ ID NO: 16078 - protein, 9 aa, Homo Sapiens
RLTPKLMEV

SEQ ID NO: 16079 - protein, 9 aa, Homo Sapiens
RLVPFLTEL

SEQ ID NO: 16080 - protein, 9 aa, Homo Sapiens
RMFLSFPTT

SEQ ID NO: 16081 - protein, 9 aa, Homo Sapiens
RMLHFLTAV

SEQ ID NO: 16082 - protein, 9 aa, Homo Sapiens
RMLIKLLEV

SEQ ID NO: 16083 - protein, 9 aa, Homo Sapiens
RMLPHAPGV

SEQ ID NO: 16084 - protein, 9 aa, Homo Sapiens
RQADKVWRL

SEQ ID NO: 16085 - protein, 9 aa, Homo Sapiens
RQEDLIMKV

SEQ ID NO: 16086 - protein, 9 aa, Homo Sapiens
RQHEIVLKV

SEQ ID NO: 16087 - protein, 9 aa, Homo Sapiens
RQIDKIQCA

SEQ ID NO: 16088 - protein, 9 aa, Homo Sapiens
RQIDQFLVV

SEQ ID NO: 16089 - protein, 9 aa, Homo Sapiens
RQIEYEYKL

SEQ ID NO: 16090 - protein, 9 aa, Homo Sapiens
RQLDSMIQL

SEQ ID NO: 16091 - protein, 9 aa, Homo Sapiens
RQLDTETNL

SEQ ID NO: 16092 - protein, 9 aa, Homo Sapiens
RQLEAIVRI

SEQ ID NO: 16093 - protein, 9 aa, Homo Sapiens
RQLEKLKEV

SEQ ID NO: 16094 - protein, 9 aa, Homo Sapiens
RQLESLIRL

SEQ ID NO: 16095 - protein, 9 aa, Homo Sapiens
RQLESMIRL

SEQ ID NO: 16096 - protein, 9 aa, Homo Sapiens
RQLSALHRA

SEQ ID NO: 16097 - protein, 9 aa, Homo Sapiens
RQVDVVITC

SEQ ID NO: 16098 - protein, 9 aa, Homo Sapiens
RQVTGVTRV

SEQ ID NO: 16099 - protein, 9 aa, Homo Sapiens
RSINKLIRI

SEQ ID NO: 16100 - protein, 9 aa, Homo Sapiens
RSVPHLQKV

SEQ ID NO: 16101 - protein, 9 aa, Homo Sapiens
RTFEEFQEL

SEQ ID NO: 16102 - protein, 9 aa, Homo Sapiens
RTFEKIEEV

SEQ ID NO: 16103 - protein, 9 aa, Homo Sapiens
RTIEYLEEV

SEQ ID NO: 16104 - protein, 9 aa, Homo Sapiens
RTLAEIAKV

SEQ ID NO: 16105 - protein, 9 aa, Homo Sapiens
RTLDEAVGV

SEQ ID NO: 16106 - protein, 9 aa, Homo Sapiens
RTLDFDPLL

SEQ ID NO: 16107 - protein, 9 aa, Homo Sapiens
RTLETLIRL

SEQ ID NO: 16108 - protein, 9 aa, Homo Sapiens
RTMENLVEL

SEQ ID NO: 16109 - protein, 9 aa, Homo Sapiens
RTNSTFNQV

SEQ ID NO: 16110 - protein, 9 aa, Homo Sapiens
RTPEGLYQV

SEQ ID NO: 16111 - protein, 9 aa, Homo Sapiens
RTVEKTWKL

SEQ ID NO: 16112 - protein, 9 aa, Homo Sapiens
RTVELFYDV

SEQ ID NO: 16113 - protein, 9 aa, Homo Sapiens
RTVPVFESV

SEQ ID NO: 16114 - protein, 9 aa, Homo Sapiens
RVCEIQATL

SEQ ID NO: 16115 - protein, 9 aa, Homo Sapiens
RVDKNAPTV

SEQ ID NO: 16116 - protein, 9 aa, Homo Sapiens
RVDPVNFKL

SEQ ID NO: 16117 - protein, 9 aa, Homo Sapiens
RVEPVTTSV

SEQ ID NO: 16118 - protein, 9 aa, Homo Sapiens
RVFENIVAV

SEQ ID NO: 16119 - protein, 9 aa, Homo Sapiens
RVFKQFVQA

SEQ ID NO: 16120 - protein, 9 aa, Homo Sapiens
RVHDYDMRV

SEQ ID NO: 16121 - protein, 9 aa, Homo Sapiens
RVIDLRAEL

SEQ ID NO: 16122 - protein, 9 aa, Homo Sapiens
RVIDYAVKI

SEQ ID NO: 16123 - protein, 9 aa, Homo Sapiens
RVIDYILDL

SEQ ID NO: 16124 - protein, 9 aa, Homo Sapiens
RVIEPFSRV

SEQ ID NO: 16125 - protein, 9 aa, Homo Sapiens
RVIGTLEEV

SEQ ID NO: 16126 - protein, 9 aa, Homo Sapiens
RVIVEVCEV

SEQ ID NO: 16127 - protein, 9 aa, Homo Sapiens
RVLDLAEQV

SEQ ID NO: 16128 - protein, 9 aa, Homo Sapiens
RVLDNIKAV

SEQ ID NO: 16129 - protein, 9 aa, Homo Sapiens
RVLDTNIQL

SEQ ID NO: 16130 - protein, 9 aa, Homo Sapiens
RVLEELETL

SEQ ID NO: 16131 - protein, 9 aa, Homo Sapiens
RVLELIPQI

SEQ ID NO: 16132 - protein, 9 aa, Homo Sapiens
RVLEMLEAL

SEQ ID NO: 16133 - protein, 9 aa, Homo Sapiens
RVLEVVNHV

SEQ ID NO: 16134 - protein, 9 aa, Homo Sapiens
RVLKEFHQA

SEQ ID NO: 16135 - protein, 9 aa, Homo Sapiens
RVMELFFTV

SEQ ID NO: 16136 - protein, 9 aa, Homo Sapiens
RVMEYINRL

SEQ ID NO: 16137 - protein, 9 aa, Homo Sapiens
RVNKAFVNV

SEQ ID NO: 16138 - protein, 9 aa, Homo Sapiens
RVQDLFCSV

SEQ ID NO: 16139 - protein, 9 aa, Homo Sapiens
RVTECLTTV

SEQ ID NO: 16140 - protein, 9 aa, Homo Sapiens
RVTNVKVTL

SEQ ID NO: 16141 - protein, 9 aa, Homo Sapiens
RVTVVFSTV

SEQ ID NO: 16142 - protein, 9 aa, Homo Sapiens
RVVDLITNL

SEQ ID NO: 16143 - protein, 9 aa, Homo Sapiens
RVVDLLNQA

SEQ ID NO: 16144 - protein, 9 aa, Homo Sapiens
RVVDYLTKL

SEQ ID NO: 16145 - protein, 9 aa, Homo Sapiens
RVVEKFLKI

SEQ ID NO: 16146 - protein, 9 aa, Homo Sapiens
RVYEEFTKV

SEQ ID NO: 16147 - protein, 9 aa, Homo Sapiens
SAAHAIVSV

SEQ ID NO: 16148 - protein, 9 aa, Homo Sapiens
SAFDHFASV

SEQ ID NO: 16149 - protein, 9 aa, Homo Sapiens
SAHKYFPVV

SEQ ID NO: 16150 - protein, 9 aa, Homo Sapiens
SAIKELDTL

SEQ ID NO: 16151 - protein, 9 aa, Homo Sapiens
SALEELVNV

SEQ ID NO: 16152 - protein, 9 aa, Homo Sapiens
SALHRIIEV

SEQ ID NO: 16153 - protein, 9 aa, Homo Sapiens
SALRVNPAL

SEQ ID NO: 16154 - protein, 9 aa, Homo Sapiens
SAMEVVPAL

SEQ ID NO: 16155 - protein, 9 aa, Homo Sapiens
SASGPLHSV

SEQ ID NO: 16156 - protein, 9 aa, Homo Sapiens
SAVCKLDSV

SEQ ID NO: 16157 - protein, 9 aa, Homo Sapiens
SAVFHLEHA

SEQ ID NO: 16158 - protein, 9 aa, Homo Sapiens
SAVPKVMKV

SEQ ID NO: 16159 - protein, 9 aa, Homo Sapiens
SAVTNIPHV

SEQ ID NO: 16160 - protein, 9 aa, Homo Sapiens
SGLLKVWQV

SEQ ID NO: 16161 - protein, 9 aa, Homo Sapiens
SIAAVLPKV

SEQ ID NO: 16162 - protein, 9 aa, Homo Sapiens
SIAGIFKEV

SEQ ID NO: 16163 - protein, 9 aa, Homo Sapiens
SIAPRMMSV

SEQ ID NO: 16164 - protein, 9 aa, Homo Sapiens
SIIDEFLHI

SEQ ID NO: 16165 - protein, 9 aa, Homo Sapiens
SIIGRLLEV

SEQ ID NO: 16166 - protein, 9 aa, Homo Sapiens
SIIKKLAAL

SEQ ID NO: 16167 - protein, 9 aa, Homo Sapiens
SIIQRLLEV

SEQ ID NO: 16168 - protein, 9 aa, Homo Sapiens
SILEHQIQV

SEQ ID NO: 16169 - protein, 9 aa, Homo Sapiens
SILEKFIRV

SEQ ID NO: 16170 - protein, 9 aa, Homo Sapiens
SILGKFAVV

SEQ ID NO: 16171 - protein, 9 aa, Homo Sapiens
SILHDVVEV

SEQ ID NO: 16172 - protein, 9 aa, Homo Sapiens
SILKKVLEA

SEQ ID NO: 16173 - protein, 9 aa, Homo Sapiens
SILQTLILV

SEQ ID NO: 16174 - protein, 9 aa, Homo Sapiens
SILRHVAEV

SEQ ID NO: 16175 - protein, 9 aa, Homo Sapiens
SIMKNLRRV

SEQ ID NO: 16176 - protein, 9 aa, Homo Sapiens
SINSRFAKV

SEQ ID NO: 16177 - protein, 9 aa, Homo Sapiens
SIPHEVPQI

SEQ ID NO: 16178 - protein, 9 aa, Homo Sapiens
SITSELHAV

SEQ ID NO: 16179 - protein, 9 aa, Homo Sapiens
SIVNHLEFL

SEQ ID NO: 16180 - protein, 9 aa, Homo Sapiens
SLAQYLINV

SEQ ID NO: 16181 - protein, 9 aa, Homo Sapiens
SLHSKFIKV

SEQ ID NO: 16182 - protein, 9 aa, Homo Sapiens
SLHSKFIRV

SEQ ID NO: 16183 - protein, 9 aa, Homo Sapiens
SLIEKIPTA

SEQ ID NO: 16184 - protein, 9 aa, Homo Sapiens
SLIEKLWQT

SEQ ID NO: 16185 - protein, 9 aa, Homo Sapiens
SLIEKVTQL

SEQ ID NO: 16186 - protein, 9 aa, Homo Sapiens
SLIEKYFSV

SEQ ID NO: 16187 - protein, 9 aa, Homo Sapiens
SLIFKLEEL

SEQ ID NO: 16188 - protein, 9 aa, Homo Sapiens
SLIGHLQTL

SEQ ID NO: 16189 - protein, 9 aa, Homo Sapiens
SLIKKIKDV

SEQ ID NO: 16190 - protein, 9 aa, Homo Sapiens
SLIKQIPRI

SEQ ID NO: 16191 - protein, 9 aa, Homo Sapiens
SLIRIVPVV

SEQ ID NO: 16192 - protein, 9 aa, Homo Sapiens
SLIRNLEQL

SEQ ID NO: 16193 - protein, 9 aa, Homo Sapiens
SLITLIEKV

SEQ ID NO: 16194 - protein, 9 aa, Homo Sapiens
SLITRLLEV

SEQ ID NO: 16195 - protein, 9 aa, Homo Sapiens
SLLDCTFRL

SEQ ID NO: 16196 - protein, 9 aa, Homo Sapiens
SLLDIIEKV

SEQ ID NO: 16197 - protein, 9 aa, Homo Sapiens
SLLEHLSHV

SEQ ID NO: 16198 - protein, 9 aa, Homo Sapiens
SLLENIAKA

SEQ ID NO: 16199 - protein, 9 aa, Homo Sapiens
SLLGHLMIV

SEQ ID NO: 16200 - protein, 9 aa, Homo Sapiens
SLLKRLRKA

SEQ ID NO: 16201 - protein, 9 aa, Homo Sapiens
SLLPFLKAV

SEQ ID NO: 16202 - protein, 9 aa, Homo Sapiens
SLLQTLYKV

SEQ ID NO: 16203 - protein, 9 aa, Homo Sapiens
SLLRHLEKV

SEQ ID NO: 16204 - protein, 9 aa, Homo Sapiens
SLLRRKLAK

SEQ ID NO: 16205 - protein, 9 aa, Homo Sapiens
SLLYNVPAV

SEQ ID NO: 16206 - protein, 9 aa, Homo Sapiens
SLMKDFPGA

SEQ ID NO: 16207 - protein, 9 aa, Homo Sapiens
SLPDHLPSV

SEQ ID NO: 16208 - protein, 9 aa, Homo Sapiens
SLPDIKVYL

SEQ ID NO: 16209 - protein, 9 aa, Homo Sapiens
SLPEELNRV

SEQ ID NO: 16210 - protein, 9 aa, Homo Sapiens
SLPEILKEV

SEQ ID NO: 16211 - protein, 9 aa, Homo Sapiens
SLPKEQPAV

SEQ ID NO: 16212 - protein, 9 aa, Homo Sapiens
SLPKKLALL

SEQ ID NO: 16213 - protein, 9 aa, Homo Sapiens
SLPKKLECI

SEQ ID NO: 16214 - protein, 9 aa, Homo Sapiens
SLQEKLWAI

SEQ ID NO: 16215 - protein, 9 aa, Homo Sapiens
SLVDEFKEL

SEQ ID NO: 16216 - protein, 9 aa, Homo Sapiens
SLVEQLTMV

SEQ ID NO: 16217 - protein, 9 aa, Homo Sapiens
SLVGKLEGT

SEQ ID NO: 16218 - protein, 9 aa, Homo Sapiens
SMLDDLRNV

SEQ ID NO: 16219 - protein, 9 aa, Homo Sapiens
SQAQTLHKV

SEQ ID NO: 16220 - protein, 9 aa, Homo Sapiens
SQCPHIVRI

SEQ ID NO: 16221 - protein, 9 aa, Homo Sapiens
SQCQKLWKL

SEQ ID NO: 16222 - protein, 9 aa, Homo Sapiens
SQDENYHHL

SEQ ID NO: 16223 - protein, 9 aa, Homo Sapiens
SQDEVRENI

SEQ ID NO: 16224 - protein, 9 aa, Homo Sapiens
SQDPEFHKV

SEQ ID NO: 16225 - protein, 9 aa, Homo Sapiens
SQDPGTHVV

SEQ ID NO: 16226 - protein, 9 aa, Homo Sapiens
SQEGRPVQV

SEQ ID NO: 16227 - protein, 9 aa, Homo Sapiens
SQEPVAHTV

SEQ ID NO: 16228 - protein, 9 aa, Homo Sapiens
SQFGTVEKA

SEQ ID NO: 16229 - protein, 9 aa, Homo Sapiens
SQFNKEILL

SEQ ID NO: 16230 - protein, 9 aa, Homo Sapiens
SQFPEEILL

SEQ ID NO: 16231 - protein, 9 aa, Homo Sapiens
SQFPGAITL

SEQ ID NO: 16232 - protein, 9 aa, Homo Sapiens
SQFPTPEAV

SEQ ID NO: 16233 - protein, 9 aa, Homo Sapiens
SQFSGKITV

SEQ ID NO: 16234 - protein, 9 aa, Homo Sapiens
SQHEEFLEL

SEQ ID NO: 16235 - protein, 9 aa, Homo Sapiens
SQHGVFSEA

SEQ ID NO: 16236 - protein, 9 aa, Homo Sapiens
SQHGVIIQL

SEQ ID NO: 16237 - protein, 9 aa, Homo Sapiens
SQIDQQNSV

SEQ ID NO: 16238 - protein, 9 aa, Homo Sapiens
SQIEADFRL

SEQ ID NO: 16239 - protein, 9 aa, Homo Sapiens
SQIHDIVLV

SEQ ID NO: 16240 - protein, 9 aa, Homo Sapiens
SQIKSLCNL

SEQ ID NO: 16241 - protein, 9 aa, Homo Sapiens
SQIKYAAKV

SEQ ID NO: 16242 - protein, 9 aa, Homo Sapiens
SQINKFLYL

SEQ ID NO: 16243 - protein, 9 aa, Homo Sapiens
SQIPAQPSV

SEQ ID NO: 16244 - protein, 9 aa, Homo Sapiens
SQIQEFKEA

SEQ ID NO: 16245 - protein, 9 aa, Homo Sapiens
SQIQKVEPA

SEQ ID NO: 16246 - protein, 9 aa, Homo Sapiens
SQIRETQQL

SEQ ID NO: 16247 - protein, 9 aa, Homo Sapiens
SQISQPICL

SEQ ID NO: 16248 - protein, 9 aa, Homo Sapiens
SQITSLVTL

SEQ ID NO: 16249 - protein, 9 aa, Homo Sapiens
SQIYPVVCV

SEQ ID NO: 16250 - protein, 9 aa, Homo Sapiens
SQLDIQIKA

SEQ ID NO: 16251 - protein, 9 aa, Homo Sapiens
SQLDRTVCI

SEQ ID NO: 16252 - protein, 9 aa, Homo Sapiens
SQLDTLIQV

SEQ ID NO: 16253 - protein, 9 aa, Homo Sapiens
SQLDVPFKV

SEQ ID NO: 16254 - protein, 9 aa, Homo Sapiens
SQLEDAIRL

SEQ ID NO: 16255 - protein, 9 aa, Homo Sapiens
SQLKWLDRV

SEQ ID NO: 16256 - protein, 9 aa, Homo Sapiens
SQLNIWIRV

SEQ ID NO: 16257 - protein, 9 aa, Homo Sapiens
SQLPNFWKL

SEQ ID NO: 16258 - protein, 9 aa, Homo Sapiens
SQLVACTKV

SEQ ID NO: 16259 - protein, 9 aa, Homo Sapiens
SQLWKLPGL

SEQ ID NO: 16260 - protein, 9 aa, Homo Sapiens
SQMPTVIYV

SEQ ID NO: 16261 - protein, 9 aa, Homo Sapiens
SQPEKVYTL

SEQ ID NO: 16262 - protein, 9 aa, Homo Sapiens
SQPGTFPAV

SEQ ID NO: 16263 - protein, 9 aa, Homo Sapiens
SQPPVQVSV

SEQ ID NO: 16264 - protein, 9 aa, Homo Sapiens
SQSKNFMNV

SEQ ID NO: 16265 - protein, 9 aa, Homo Sapiens
SQSSLIHLV

SEQ ID NO: 16266 - protein, 9 aa, Homo Sapiens
SQTDFSQLL

SEQ ID NO: 16267 - protein, 9 aa, Homo Sapiens
SQTFVNPHV

SEQ ID NO: 16268 - protein, 9 aa, Homo Sapiens
SQTKVVELL

SEQ ID NO: 16269 - protein, 9 aa, Homo Sapiens
SQTSVAERL

SEQ ID NO: 16270 - protein, 9 aa, Homo Sapiens
SQTTVYEKL

SEQ ID NO: 16271 - protein, 9 aa, Homo Sapiens
SQVALLEQV

SEQ ID NO: 16272 - protein, 9 aa, Homo Sapiens
SQVDQLLNI

SEQ ID NO: 16273 - protein, 9 aa, Homo Sapiens
SQVDRLVAL

SEQ ID NO: 16274 - protein, 9 aa, Homo Sapiens
SQVDVAVKI

SEQ ID NO: 16275 - protein, 9 aa, Homo Sapiens
SQVEDLERV

SEQ ID NO: 16276 - protein, 9 aa, Homo Sapiens
SQVEGEHQL

SEQ ID NO: 16277 - protein, 9 aa, Homo Sapiens
SQVEILQRV

SEQ ID NO: 16278 - protein, 9 aa, Homo Sapiens
SQVEPLPSL

SEQ ID NO: 16279 - protein, 9 aa, Homo Sapiens
SQVFKLYTA

SEQ ID NO: 16280 - protein, 9 aa, Homo Sapiens
SQVPEVTTV

SEQ ID NO: 16281 - protein, 9 aa, Homo Sapiens
SQVPHLPVL

SEQ ID NO: 16282 - protein, 9 aa, Homo Sapiens
SQVTVAVRV

SEQ ID NO: 16283 - protein, 9 aa, Homo Sapiens
SQWDSPMRV

SEQ ID NO: 16284 - protein, 9 aa, Homo Sapiens
SQWEDIHVV

SEQ ID NO: 16285 - protein, 9 aa, Homo Sapiens
SQYPEIIFL

SEQ ID NO: 16286 - protein, 9 aa, Homo Sapiens
SQYPFPVTL

SEQ ID NO: 16287 - protein, 9 aa, Homo Sapiens
SSAPGLTSV

SEQ ID NO: 16288 - protein, 9 aa, Homo Sapiens
SSIEHLTTL

SEQ ID NO: 16289 - protein, 9 aa, Homo Sapiens
STAAKIMGV

SEQ ID NO: 16290 - protein, 9 aa, Homo Sapiens
STHEFLHEV

SEQ ID NO: 16291 - protein, 9 aa, Homo Sapiens
STIAILNSV

SEQ ID NO: 16292 - protein, 9 aa, Homo Sapiens
STIEEFSYI

SEQ ID NO: 16293 - protein, 9 aa, Homo Sapiens
STIKEVAQA

SEQ ID NO: 16294 - protein, 9 aa, Homo Sapiens
STIRLLTSL

SEQ ID NO: 16295 - protein, 9 aa, Homo Sapiens
STIVQVLEV

SEQ ID NO: 16296 - protein, 9 aa, Homo Sapiens
STLHLVLRL

SEQ ID NO: 16297 - protein, 9 aa, Homo Sapiens
STLPDVTEV

SEQ ID NO: 16298 - protein, 9 aa, Homo Sapiens
STLVQVQQV

SEQ ID NO: 16299 - protein, 9 aa, Homo Sapiens
STTPYLQSV

SEQ ID NO: 16300 - protein, 9 aa, Homo Sapiens
STVEKLYAA

SEQ ID NO: 16301 - protein, 9 aa, Homo Sapiens
STVFHVPDV

SEQ ID NO: 16302 - protein, 9 aa, Homo Sapiens
STVKVLIRL

SEQ ID NO: 16303 - protein, 9 aa, Homo Sapiens
STYKFFEVI

SEQ ID NO: 16304 - protein, 9 aa, Homo Sapiens
SVAAQLTGV

SEQ ID NO: 16305 - protein, 9 aa, Homo Sapiens
SVADYFKQI

SEQ ID NO: 16306 - protein, 9 aa, Homo Sapiens
SVAEKLSKL

SEQ ID NO: 16307 - protein, 9 aa, Homo Sapiens
SVAESLLQV

SEQ ID NO: 16308 - protein, 9 aa, Homo Sapiens
SVAESLNYV

SEQ ID NO: 16309 - protein, 9 aa, Homo Sapiens
SVAGSVERV

SEQ ID NO: 16310 - protein, 9 aa, Homo Sapiens
SVALVIHNV

SEQ ID NO: 16311 - protein, 9 aa, Homo Sapiens
SVAPEFRRL

SEQ ID NO: 16312 - protein, 9 aa, Homo Sapiens
SVASSVKGV

SEQ ID NO: 16313 - protein, 9 aa, Homo Sapiens
SVATKLTAV

SEQ ID NO: 16314 - protein, 9 aa, Homo Sapiens
SVDSHFQEV

SEQ ID NO: 16315 - protein, 9 aa, Homo Sapiens
SVFAGVVGV

SEQ ID NO: 16316 - protein, 9 aa, Homo Sapiens
SVFKDFYEL

SEQ ID NO: 16317 - protein, 9 aa, Homo Sapiens
SVFKGCLTL

SEQ ID NO: 16318 - protein, 9 aa, Homo Sapiens
SVHKGFAFV

SEQ ID NO: 16319 - protein, 9 aa, Homo Sapiens
SVIDHIHLI

SEQ ID NO: 16320 - protein, 9 aa, Homo Sapiens
SVIEQIVYV

SEQ ID NO: 16321 - protein, 9 aa, Homo Sapiens
SVIGSLNGV

SEQ ID NO: 16322 - protein, 9 aa, Homo Sapiens
SVIGVSPAV

SEQ ID NO: 16323 - protein, 9 aa, Homo Sapiens
SVIKELRKA

SEQ ID NO: 16324 - protein, 9 aa, Homo Sapiens
SVIKELRQL

SEQ ID NO: 16325 - protein, 9 aa, Homo Sapiens
SVINEINKI

SEQ ID NO: 16326 - protein, 9 aa, Homo Sapiens
SVIPQIQKV

SEQ ID NO: 16327 - protein, 9 aa, Homo Sapiens
SVIPVINKI

SEQ ID NO: 16328 - protein, 9 aa, Homo Sapiens
SVIQKFVLL

SEQ ID NO: 16329 - protein, 9 aa, Homo Sapiens
SVIQNLRTV

SEQ ID NO: 16330 - protein, 9 aa, Homo Sapiens
SVIQVFQQL

SEQ ID NO: 16331 - protein, 9 aa, Homo Sapiens
SVIRKIPAL

SEQ ID NO: 16332 - protein, 9 aa, Homo Sapiens
SVISHLLRV

SEQ ID NO: 16333 - protein, 9 aa, Homo Sapiens
SVITQVFHV

SEQ ID NO: 16334 - protein, 9 aa, Homo Sapiens
SVIYTIEAV

SEQ ID NO: 16335 - protein, 9 aa, Homo Sapiens
SVLDDFYTA

SEQ ID NO: 16336 - protein, 9 aa, Homo Sapiens
SVLDQKILL

SEQ ID NO: 16337 - protein, 9 aa, Homo Sapiens
SVLDSTAKV

SEQ ID NO: 16338 - protein, 9 aa, Homo Sapiens
SVLEDFYTA

SEQ ID NO: 16339 - protein, 9 aa, Homo Sapiens
SVLGAITSV

SEQ ID NO: 16340 - protein, 9 aa, Homo Sapiens
SVLGKIWKL

SEQ ID NO: 16341 - protein, 9 aa, Homo Sapiens
SVLGKVNEI

SEQ ID NO: 16342 - protein, 9 aa, Homo Sapiens
SVLKDVSKV

SEQ ID NO: 16343 - protein, 9 aa, Homo Sapiens
SVLKNVPGL

SEQ ID NO: 16344 - protein, 9 aa, Homo Sapiens
SVLKSIQEV

SEQ ID NO: 16345 - protein, 9 aa, Homo Sapiens
SVLKSLVEI

SEQ ID NO: 16346 - protein, 9 aa, Homo Sapiens
SVLKSTPQV

SEQ ID NO: 16347 - protein, 9 aa, Homo Sapiens
SVLLVVQKV

SEQ ID NO: 16348 - protein, 9 aa, Homo Sapiens
SVLNVLHSL

SEQ ID NO: 16349 - protein, 9 aa, Homo Sapiens
SVLQSIEKI

SEQ ID NO: 16350 - protein, 9 aa, Homo Sapiens
SVLVKLLEV

SEQ ID NO: 16351 - protein, 9 aa, Homo Sapiens
SVMEYVTAV

SEQ ID NO: 16352 - protein, 9 aa, Homo Sapiens
SVMGNIIHV

SEQ ID NO: 16353 - protein, 9 aa, Homo Sapiens
SVMSILPKI

SEQ ID NO: 16354 - protein, 9 aa, Homo Sapiens
SVPAKLPEI

SEQ ID NO: 16355 - protein, 9 aa, Homo Sapiens
SVPATVPSI

SEQ ID NO: 16356 - protein, 9 aa, Homo Sapiens
SVPDTVHHV

SEQ ID NO: 16357 - protein, 9 aa, Homo Sapiens
SVPELCHHV

SEQ ID NO: 16358 - protein, 9 aa, Homo Sapiens
SVPIDLQKV

SEQ ID NO: 16359 - protein, 9 aa, Homo Sapiens
SVPIEIPTI

SEQ ID NO: 16360 - protein, 9 aa, Homo Sapiens
SVPKELVAL

SEQ ID NO: 16361 - protein, 9 aa, Homo Sapiens
SVPLKVPGL

SEQ ID NO: 16362 - protein, 9 aa, Homo Sapiens
SVQEFFTDV

SEQ ID NO: 16363 - protein, 9 aa, Homo Sapiens
SVQRSFTQV

SEQ ID NO: 16364 - protein, 9 aa, Homo Sapiens
SVSSVNPSV

SEQ ID NO: 16365 - protein, 9 aa, Homo Sapiens
SVTFVAEQV

SEQ ID NO: 16366 - protein, 9 aa, Homo Sapiens
SVTSHIYQV

SEQ ID NO: 16367 - protein, 9 aa, Homo Sapiens
SVTTVNKKL

SEQ ID NO: 16368 - protein, 9 aa, Homo Sapiens
SVVDGTPLV

SEQ ID NO: 16369 - protein, 9 aa, Homo Sapiens
SVVDHFNRI

SEQ ID NO: 16370 - protein, 9 aa, Homo Sapiens
SVVDIKLLL

SEQ ID NO: 16371 - protein, 9 aa, Homo Sapiens
SVVDLTCRL

SEQ ID NO: 16372 - protein, 9 aa, Homo Sapiens
SVVESVFKL

SEQ ID NO: 16373 - protein, 9 aa, Homo Sapiens
SVVGHDVSV

SEQ ID NO: 16374 - protein, 9 aa, Homo Sapiens
SVVGPVKGV

SEQ ID NO: 16375 - protein, 9 aa, Homo Sapiens
SVVKVLTEL

SEQ ID NO: 16376 - protein, 9 aa, Homo Sapiens
SVVPDVRSV

SEQ ID NO: 16377 - protein, 9 aa, Homo Sapiens
SVVQGTLGV

SEQ ID NO: 16378 - protein, 9 aa, Homo Sapiens
SVVSFLLRV

SEQ ID NO: 16379 - protein, 9 aa, Homo Sapiens
SVWTKVEGV

SEQ ID NO: 16380 - protein, 9 aa, Homo Sapiens
SVYGKLRKV

SEQ ID NO: 16381 - protein, 9 aa, Homo Sapiens
SVYPNGHFV

SEQ ID NO: 16382 - protein, 9 aa, Homo Sapiens
TAAEKLHKV

SEQ ID NO: 16383 - protein, 9 aa, Homo Sapiens
TAIELIPSV

SEQ ID NO: 16384 - protein, 9 aa, Homo Sapiens
TAIHNFPTV

SEQ ID NO: 16385 - protein, 9 aa, Homo Sapiens
TAIKMIPGV

SEQ ID NO: 16386 - protein, 9 aa, Homo Sapiens
TALKDVVKV

SEQ ID NO: 16387 - protein, 9 aa, Homo Sapiens
TALLKIEGV

SEQ ID NO: 16388 - protein, 9 aa, Homo Sapiens
TIDPSNPMV

SEQ ID NO: 16389 - protein, 9 aa, Homo Sapiens
TIHVGFDAV

SEQ ID NO: 16390 - protein, 9 aa, Homo Sapiens
TILEKCFKV

SEQ ID NO: 16391 - protein, 9 aa, Homo Sapiens
TILKRLFRV

SEQ ID NO: 16392 - protein, 9 aa, Homo Sapiens
TILPKVMQV

SEQ ID NO: 16393 - protein, 9 aa, Homo Sapiens
TILRLLQQV

SEQ ID NO: 16394 - protein, 9 aa, Homo Sapiens
TIMPKDIQL

SEQ ID NO: 16395 - protein, 9 aa, Homo Sapiens
TIPEAFRGV

SEQ ID NO: 16396 - protein, 9 aa, Homo Sapiens
TIPEIIIKV

SEQ ID NO: 16397 - protein, 9 aa, Homo Sapiens
TIPEILPKL

SEQ ID NO: 16398 - protein, 9 aa, Homo Sapiens
TIVDKVKEV

SEQ ID NO: 16399 - protein, 9 aa, Homo Sapiens
TIVEMLHKA

SEQ ID NO: 16400 - protein, 9 aa, Homo Sapiens
TIYKDFVYI

SEQ ID NO: 16401 - protein, 9 aa, Homo Sapiens
TLADLVHHV

SEQ ID NO: 16402 - protein, 9 aa, Homo Sapiens
TLADVLYHV

SEQ ID NO: 16403 - protein, 9 aa, Homo Sapiens
TLALKFENA

SEQ ID NO: 16404 - protein, 9 aa, Homo Sapiens
TLCDVILMV

SEQ ID NO: 16405 - protein, 9 aa, Homo Sapiens
TLCDVTLRV

SEQ ID NO: 16406 - protein, 9 aa, Homo Sapiens
TLFGTFHVA

SEQ ID NO: 16407 - protein, 9 aa, Homo Sapiens
TLIEDILGV

SEQ ID NO: 16408 - protein, 9 aa, Homo Sapiens
TLIEELKAL

SEQ ID NO: 16409 - protein, 9 aa, Homo Sapiens
TLIEVMPKI

SEQ ID NO: 16410 - protein, 9 aa, Homo Sapiens
TLISELVQA

SEQ ID NO: 16411 - protein, 9 aa, Homo Sapiens
TLLGHLDYI

SEQ ID NO: 16412 - protein, 9 aa, Homo Sapiens
TLLKDAAKV

SEQ ID NO: 16413 - protein, 9 aa, Homo Sapiens
TLLKKVWKV

SEQ ID NO: 16414 - protein, 9 aa, Homo Sapiens
TLLKQLKEA

SEQ ID NO: 16415 - protein, 9 aa, Homo Sapiens
TLLNVIKSV

SEQ ID NO: 16416 - protein, 9 aa, Homo Sapiens
TLLRLLYEA

SEQ ID NO: 16417 - protein, 9 aa, Homo Sapiens
TLMIKFEEA

SEQ ID NO: 16418 - protein, 9 aa, Homo Sapiens
TLPEIFEAA

SEQ ID NO: 16419 - protein, 9 aa, Homo Sapiens
TLPVAFKVV

SEQ ID NO: 16420 - protein, 9 aa, Homo Sapiens
TLQEFLERI

SEQ ID NO: 16421 - protein, 9 aa, Homo Sapiens
TLVDEVFRI

SEQ ID NO: 16422 - protein, 9 aa, Homo Sapiens
TLVEAIKQV

SEQ ID NO: 16423 - protein, 9 aa, Homo Sapiens
TLVYHVVGV

SEQ ID NO: 16424 - protein, 9 aa, Homo Sapiens
TMIGEIAAA

SEQ ID NO: 16425 - protein, 9 aa, Homo Sapiens
TQAPPLHTA

SEQ ID NO: 16426 - protein, 9 aa, Homo Sapiens
TQCELLTQL

SEQ ID NO: 16427 - protein, 9 aa, Homo Sapiens
TQDGTPITV

SEQ ID NO: 16428 - protein, 9 aa, Homo Sapiens
TQDTQLITV

SEQ ID NO: 16429 - protein, 9 aa, Homo Sapiens
TQIDHYVGI

SEQ ID NO: 16430 - protein, 9 aa, Homo Sapiens
TQIKHFESL

SEQ ID NO: 16431 - protein, 9 aa, Homo Sapiens
TQILSVPKV

SEQ ID NO: 16432 - protein, 9 aa, Homo Sapiens
TQLDRAHGV

SEQ ID NO: 16433 - protein, 9 aa, Homo Sapiens
TQLESSWEL

SEQ ID NO: 16434 - protein, 9 aa, Homo Sapiens
TQLNMFQTL

SEQ ID NO: 16435 - protein, 9 aa, Homo Sapiens
TQLQTTQSV

SEQ ID NO: 16436 - protein, 9 aa, Homo Sapiens
TQMIKAWQV

SEQ ID NO: 16437 - protein, 9 aa, Homo Sapiens
TQTAVITRI

SEQ ID NO: 16438 - protein, 9 aa, Homo Sapiens
TQVELLTRL

SEQ ID NO: 16439 - protein, 9 aa, Homo Sapiens
TQVTALIKL

SEQ ID NO: 16440 - protein, 9 aa, Homo Sapiens
TTARAFAVV

SEQ ID NO: 16441 - protein, 9 aa, Homo Sapiens
TTDGKLPEV

SEQ ID NO: 16442 - protein, 9 aa, Homo Sapiens
TTISKVSQV

SEQ ID NO: 16443 - protein, 9 aa, Homo Sapiens
TTISRFEAL

SEQ ID NO: 16444 - protein, 9 aa, Homo Sapiens
TTLGHLEKA

SEQ ID NO: 16445 - protein, 9 aa, Homo Sapiens
TTLPGLLTV

SEQ ID NO: 16446 - protein, 9 aa, Homo Sapiens
TTTFIDPRL

SEQ ID NO: 16447 - protein, 9 aa, Homo Sapiens
TTVDHFWGL

SEQ ID NO: 16448 - protein, 9 aa, Homo Sapiens
TTVKKFFSA

SEQ ID NO: 16449 - protein, 9 aa, Homo Sapiens
TTVPTVHHV

SEQ ID NO: 16450 - protein, 9 aa, Homo Sapiens
TTVQKVARV

SEQ ID NO: 16451 - protein, 9 aa, Homo Sapiens
TTVSSLHQA

SEQ ID NO: 16452 - protein, 9 aa, Homo Sapiens
TVADHIQKV

SEQ ID NO: 16453 - protein, 9 aa, Homo Sapiens
TVADKIHSV

SEQ ID NO: 16454 - protein, 9 aa, Homo Sapiens
TVADTFEKV

SEQ ID NO: 16455 - protein, 9 aa, Homo Sapiens
TVAEKVDAV

SEQ ID NO: 16456 - protein, 9 aa, Homo Sapiens
TVAPFNPTV

SEQ ID NO: 16457 - protein, 9 aa, Homo Sapiens
TVCHVVIVV

SEQ ID NO: 16458 - protein, 9 aa, Homo Sapiens
TVFEHTFHV

SEQ ID NO: 16459 - protein, 9 aa, Homo Sapiens
TVFGNLHQA

SEQ ID NO: 16460 - protein, 9 aa, Homo Sapiens
TVFSHAQTV

SEQ ID NO: 16461 - protein, 9 aa, Homo Sapiens
TVHDKFLAL

SEQ ID NO: 16462 - protein, 9 aa, Homo Sapiens
TVIAKVNNV

SEQ ID NO: 16463 - protein, 9 aa, Homo Sapiens
TVIATNILL

SEQ ID NO: 16464 - protein, 9 aa, Homo Sapiens
TVIDQIPFL

SEQ ID NO: 16465 - protein, 9 aa, Homo Sapiens
TVIENIHTI

SEQ ID NO: 16466 - protein, 9 aa, Homo Sapiens
TVIPLNERL

SEQ ID NO: 16467 - protein, 9 aa, Homo Sapiens
TVIQFLERI

SEQ ID NO: 16468 - protein, 9 aa, Homo Sapiens
TVISILNTI

SEQ ID NO: 16469 - protein, 9 aa, Homo Sapiens
TVLDKTLSV

SEQ ID NO: 16470 - protein, 9 aa, Homo Sapiens
TVLEAVHDL

SEQ ID NO: 16471 - protein, 9 aa, Homo Sapiens
TVLEKVYEL

SEQ ID NO: 16472 - protein, 9 aa, Homo Sapiens
TVLERVEGA

SEQ ID NO: 16473 - protein, 9 aa, Homo Sapiens
TVLGKIWKL

SEQ ID NO: 16474 - protein, 9 aa, Homo Sapiens
TVLKKVSGV

SEQ ID NO: 16475 - protein, 9 aa, Homo Sapiens
TVLPFVSTV

SEQ ID NO: 16476 - protein, 9 aa, Homo Sapiens
TVLQELINV

SEQ ID NO: 16477 - protein, 9 aa, Homo Sapiens
TVLQQIDSV

SEQ ID NO: 16478 - protein, 9 aa, Homo Sapiens
TVMDEIHTV

SEQ ID NO: 16479 - protein, 9 aa, Homo Sapiens
TVMGKIFAV

SEQ ID NO: 16480 - protein, 9 aa, Homo Sapiens
TVMGRIATL

SEQ ID NO: 16481 - protein, 9 aa, Homo Sapiens
TVPVKIDKV

SEQ ID NO: 16482 - protein, 9 aa, Homo Sapiens
TVRELFEEL

SEQ ID NO: 16483 - protein, 9 aa, Homo Sapiens
TVREQCEQL

SEQ ID NO: 16484 - protein, 9 aa, Homo Sapiens
TVSPDRLEL

SEQ ID NO: 16485 - protein, 9 aa, Homo Sapiens
TVTGKLVHA

SEQ ID NO: 16486 - protein, 9 aa, Homo Sapiens
TVTNAVVTV

SEQ ID NO: 16487 - protein, 9 aa, Homo Sapiens
TVVAAIQAV

SEQ ID NO: 16488 - protein, 9 aa, Homo Sapiens
TVVERLVKV

SEQ ID NO: 16489 - protein, 9 aa, Homo Sapiens
TVVGKTYGL

SEQ ID NO: 16490 - protein, 9 aa, Homo Sapiens
TVVGRLEGL

SEQ ID NO: 16491 - protein, 9 aa, Homo Sapiens
TVVKAISGV

SEQ ID NO: 16492 - protein, 9 aa, Homo Sapiens
TVVMYLHHV

SEQ ID NO: 16493 - protein, 9 aa, Homo Sapiens
TVVNFLIRV

SEQ ID NO: 16494 - protein, 9 aa, Homo Sapiens
TVVPWDHAL

SEQ ID NO: 16495 - protein, 9 aa, Homo Sapiens
TVYEGFISA

SEQ ID NO: 16496 - protein, 9 aa, Homo Sapiens
TVYRELPCV

SEQ ID NO: 16497 - protein, 9 aa, Homo Sapiens
VAGPSFETV

SEQ ID NO: 16498 - protein, 9 aa, Homo Sapiens
VAIAGLMEV

SEQ ID NO: 16499 - protein, 9 aa, Homo Sapiens
VAIEHLDKI

SEQ ID NO: 16500 - protein, 9 aa, Homo Sapiens
VALDKVIEI

SEQ ID NO: 16501 - protein, 9 aa, Homo Sapiens
VAPLPRSAL

SEQ ID NO: 16502 - protein, 9 aa, Homo Sapiens
VATWVDETL

SEQ ID NO: 16503 - protein, 9 aa, Homo Sapiens
VAYEEFEKV

SEQ ID NO: 16504 - protein, 9 aa, Homo Sapiens
VGLKDRSIL

SEQ ID NO: 16505 - protein, 9 aa, Homo Sapiens
VGLVLMEGV

SEQ ID NO: 16506 - protein, 9 aa, Homo Sapiens
VIAEILRGV

SEQ ID NO: 16507 - protein, 9 aa, Homo Sapiens
VIFTKFDEV

SEQ ID NO: 16508 - protein, 9 aa, Homo Sapiens
VIIEKTYSL

SEQ ID NO: 16509 - protein, 9 aa, Homo Sapiens
VIIKGLEEI

SEQ ID NO: 16510 - protein, 9 aa, Homo Sapiens
VIIKYLESL

SEQ ID NO: 16511 - protein, 9 aa, Homo Sapiens
VIINQIYEA

SEQ ID NO: 16512 - protein, 9 aa, Homo Sapiens
VIIPLLHTV

SEQ ID NO: 16513 - protein, 9 aa, Homo Sapiens
VIIRTLLQA

SEQ ID NO: 16514 - protein, 9 aa, Homo Sapiens
VILPTVHEV

SEQ ID NO: 16515 - protein, 9 aa, Homo Sapiens
VILQNIHLV

SEQ ID NO: 16516 - protein, 9 aa, Homo Sapiens
VIPEKFQHI

SEQ ID NO: 16517 - protein, 9 aa, Homo Sapiens
VIPGKVEEV

SEQ ID NO: 16518 - protein, 9 aa, Homo Sapiens
VITETVVEV

SEQ ID NO: 16519 - protein, 9 aa, Homo Sapiens
VIVELIYKV

SEQ ID NO: 16520 - protein, 9 aa, Homo Sapiens
VIWKALIHL

SEQ ID NO: 16521 - protein, 9 aa, Homo Sapiens
VLAYFLPEA

SEQ ID NO: 16522 - protein, 9 aa, Homo Sapiens
VLDDKLVFV

SEQ ID NO: 16523 - protein, 9 aa, Homo Sapiens
VLDSFCEGL

SEQ ID NO: 16524 - protein, 9 aa, Homo Sapiens
VLDSVDVRL

SEQ ID NO: 16525 - protein, 9 aa, Homo Sapiens
VLFGLLREV

SEQ ID NO: 16526 - protein, 9 aa, Homo Sapiens
VLIANLEKL

SEQ ID NO: 16527 - protein, 9 aa, Homo Sapiens
VLIKWFPEV

SEQ ID NO: 16528 - protein, 9 aa, Homo Sapiens
VLIPKLPQL

SEQ ID NO: 16529 - protein, 9 aa, Homo Sapiens
VLIRELWNT

SEQ ID NO: 16530 - protein, 9 aa, Homo Sapiens
VLKVFLENV

SEQ ID NO: 16531 - protein, 9 aa, Homo Sapiens
VLLGHIFYV

SEQ ID NO: 16532 - protein, 9 aa, Homo Sapiens
VLLGKVYVV

SEQ ID NO: 16533 - protein, 9 aa, Homo Sapiens
VLMDRLPSL

SEQ ID NO: 16534 - protein, 9 aa, Homo Sapiens
VLMTEDIKL

SEQ ID NO: 16535 - protein, 9 aa, Homo Sapiens
VLNEYFHNV

SEQ ID NO: 16536 - protein, 9 aa, Homo Sapiens
VLPAEFFEV

SEQ ID NO: 16537 - protein, 9 aa, Homo Sapiens
VLPDDLSGV

SEQ ID NO: 16538 - protein, 9 aa, Homo Sapiens
VLQGKLAEV

SEQ ID NO: 16539 - protein, 9 aa, Homo Sapiens
VLWDRTFSL

SEQ ID NO: 16540 - protein, 9 aa, Homo Sapiens
VMAPRTLVL

SEQ ID NO: 16541 - protein, 9 aa, Homo Sapiens
VMPEAVPEV

SEQ ID NO: 16542 - protein, 9 aa, Homo Sapiens
VQADAPHGV

SEQ ID NO: 16543 - protein, 9 aa, Homo Sapiens
VQASHFEGL

SEQ ID NO: 16544 - protein, 9 aa, Homo Sapiens
VQDEFLEKL

SEQ ID NO: 16545 - protein, 9 aa, Homo Sapiens
VQDENVRGV

SEQ ID NO: 16546 - protein, 9 aa, Homo Sapiens
VQDRFEVNV

SEQ ID NO: 16547 - protein, 9 aa, Homo Sapiens
VQIEEKLLL

SEQ ID NO: 16548 - protein, 9 aa, Homo Sapiens
VQIGDIVTV

SEQ ID NO: 16549 - protein, 9 aa, Homo Sapiens
VQIPFFAKL

SEQ ID NO: 16550 - protein, 9 aa, Homo Sapiens
VQLGYSVLS

SEQ ID NO: 16551 - protein, 9 aa, Homo Sapiens
VQNDTLLQV

SEQ ID NO: 16552 - protein, 9 aa, Homo Sapiens
VQPEAQAKV

SEQ ID NO: 16553 - protein, 9 aa, Homo Sapiens
VQSGLRILL

SEQ ID NO: 16554 - protein, 9 aa, Homo Sapiens
VQSNRILGV

SEQ ID NO: 16555 - protein, 9 aa, Homo Sapiens
VQTDVLVRV

SEQ ID NO: 16556 - protein, 9 aa, Homo Sapiens
VQTDYVPLL

SEQ ID NO: 16557 - protein, 9 aa, Homo Sapiens
VQTEVNREL

SEQ ID NO: 16558 - protein, 9 aa, Homo Sapiens
VQTNDLKEV

SEQ ID NO: 16559 - protein, 9 aa, Homo Sapiens
VQVEDIVFL

SEQ ID NO: 16560 - protein, 9 aa, Homo Sapiens
VQVPVPVTV

SEQ ID NO: 16561 - protein, 9 aa, Homo Sapiens
VQYNEPLKV

SEQ ID NO: 16562 - protein, 9 aa, Homo Sapiens
VSTEVDARL

SEQ ID NO: 16563 - protein, 9 aa, Homo Sapiens
VTAGKVPEV

SEQ ID NO: 16564 - protein, 9 aa, Homo Sapiens
VTIRLLETI

SEQ ID NO: 16565 - protein, 9 aa, Homo Sapiens
VTITGIVKV

SEQ ID NO: 16566 - protein, 9 aa, Homo Sapiens
VTPKEFREI

SEQ ID NO: 16567 - protein, 9 aa, Homo Sapiens
VTTAVTEKV

SEQ ID NO: 16568 - protein, 9 aa, Homo Sapiens
VTVKGVTQV

SEQ ID NO: 16569 - protein, 9 aa, Homo Sapiens
VTYPGELLL

SEQ ID NO: 16570 - protein, 9 aa, Homo Sapiens
VVADETPAV

SEQ ID NO: 16571 - protein, 9 aa, Homo Sapiens
VVAEELENV

SEQ ID NO: 16572 - protein, 9 aa, Homo Sapiens
VVAGRFIEV

SEQ ID NO: 16573 - protein, 9 aa, Homo Sapiens
VVCGLIFRL

SEQ ID NO: 16574 - protein, 9 aa, Homo Sapiens
VVDAVVTQV

SEQ ID NO: 16575 - protein, 9 aa, Homo Sapiens
VVDEKLPGL

SEQ ID NO: 16576 - protein, 9 aa, Homo Sapiens
VVDGAFKEV

SEQ ID NO: 16577 - protein, 9 aa, Homo Sapiens
VVDPNDPQM

SEQ ID NO: 16578 - protein, 9 aa, Homo Sapiens
VVHDGFEGL

SEQ ID NO: 16579 - protein, 9 aa, Homo Sapiens
VVIKKLNEI

SEQ ID NO: 16580 - protein, 9 aa, Homo Sapiens
VVLEEIPKL

SEQ ID NO: 16581 - protein, 9 aa, Homo Sapiens
VVLPLELKL

SEQ ID NO: 16582 - protein, 9 aa, Homo Sapiens
VVLPTLAVV

SEQ ID NO: 16583 - protein, 9 aa, Homo Sapiens
VVMEELLKV

SEQ ID NO: 16584 - protein, 9 aa, Homo Sapiens
VVMETANRV

SEQ ID NO: 16585 - protein, 9 aa, Homo Sapiens
VVMNVVHQL

SEQ ID NO: 16586 - protein, 9 aa, Homo Sapiens
VVPAALKVV

SEQ ID NO: 16587 - protein, 9 aa, Homo Sapiens
VVPDKISEV

SEQ ID NO: 16588 - protein, 9 aa, Homo Sapiens
VVPEVIFKI

SEQ ID NO: 16589 - protein, 9 aa, Homo Sapiens
VVPQQLLTV

SEQ ID NO: 16590 - protein, 9 aa, Homo Sapiens
VVQPLLVSV

SEQ ID NO: 16591 - protein, 9 aa, Homo Sapiens
VVSEGVPRI

SEQ ID NO: 16592 - protein, 9 aa, Homo Sapiens
VVTGGVQSV

SEQ ID NO: 16593 - protein, 9 aa, Homo Sapiens
VVVDPIQSV

SEQ ID NO: 16594 - protein, 9 aa, Homo Sapiens
VVVGDLVEV

SEQ ID NO: 16595 - protein, 9 aa, Homo Sapiens
WLAEKLPTL

SEQ ID NO: 16596 - protein, 9 aa, Homo Sapiens
WLVDHVYAI

SEQ ID NO: 16597 - protein, 9 aa, Homo Sapiens
YAAELIERV

SEQ ID NO: 16598 - protein, 9 aa, Homo Sapiens
YAAEMIPKL

SEQ ID NO: 16599 - protein, 9 aa, Homo Sapiens
YAFNMKATV

SEQ ID NO: 16600 - protein, 9 aa, Homo Sapiens
YAFPKAVSV

SEQ ID NO: 16601 - protein, 9 aa, Homo Sapiens
YAFPKSITV

SEQ ID NO: 16602 - protein, 9 aa, Homo Sapiens
YAIEVDPVL

SEQ ID NO: 16603 - protein, 9 aa, Homo Sapiens
YAIHGVLEV

SEQ ID NO: 16604 - protein, 9 aa, Homo Sapiens
YAIKNIHGV

SEQ ID NO: 16605 - protein, 9 aa, Homo Sapiens
YAITTLHNL

SEQ ID NO: 16606 - protein, 9 aa, Homo Sapiens
YALNHTLSV

SEQ ID NO: 16607 - protein, 9 aa, Homo Sapiens
YAYDGKDYI

SEQ ID NO: 16608 - protein, 9 aa, Homo Sapiens
YGAEALERM

SEQ ID NO: 16609 - protein, 9 aa, Homo Sapiens
YGIPRLEKI

SEQ ID NO: 16610 - protein, 9 aa, Homo Sapiens
YGLDKIEFL

SEQ ID NO: 16611 - protein, 9 aa, Homo Sapiens
YGLPVVVKL

SEQ ID NO: 16612 - protein, 9 aa, Homo Sapiens
YGMERVWCV

SEQ ID NO: 16613 - protein, 9 aa, Homo Sapiens
YGVTTIVRV

SEQ ID NO: 16614 - protein, 9 aa, Homo Sapiens
YIDHGDPQV

SEQ ID NO: 16615 - protein, 9 aa, Homo Sapiens
YIFDNCHEL

SEQ ID NO: 16616 - protein, 9 aa, Homo Sapiens
YIHVHFLEV

SEQ ID NO: 16617 - protein, 9 aa, Homo Sapiens
YIIEVNARL

SEQ ID NO: 16618 - protein, 9 aa, Homo Sapiens
YIITEIPSL

SEQ ID NO: 16619 - protein, 9 aa, Homo Sapiens
YILLEDPQL

SEQ ID NO: 16620 - protein, 9 aa, Homo Sapiens
YIPSVLHDV

SEQ ID NO: 16621 - protein, 9 aa, Homo Sapiens
YIPTELDQV

SEQ ID NO: 16622 - protein, 9 aa, Homo Sapiens
YIPTFICSV

SEQ ID NO: 16623 - protein, 9 aa, Homo Sapiens
YIVDLLTHL

SEQ ID NO: 16624 - protein, 9 aa, Homo Sapiens
YIYMHFGEV

SEQ ID NO: 16625 - protein, 9 aa, Homo Sapiens
YLDFTNPKV

SEQ ID NO: 16626 - protein, 9 aa, Homo Sapiens
YLHSQVVSV

SEQ ID NO: 16627 - protein, 9 aa, Homo Sapiens
YLINEIDRI

SEQ ID NO: 16628 - protein, 9 aa, Homo Sapiens
YLIPLLERL

SEQ ID NO: 16629 - protein, 9 aa, Homo Sapiens
YLITLLEHL

SEQ ID NO: 16630 - protein, 9 aa, Homo Sapiens
YLKDFFSNV

SEQ ID NO: 16631 - protein, 9 aa, Homo Sapiens
YLLDLHSYL

SEQ ID NO: 16632 - protein, 9 aa, Homo Sapiens
YLLDQHILI

SEQ ID NO: 16633 - protein, 9 aa, Homo Sapiens
YLLESVNKL

SEQ ID NO: 16634 - protein, 9 aa, Homo Sapiens
YLLPAIVHI

SEQ ID NO: 16635 - protein, 9 aa, Homo Sapiens
YLPAVFEEV

SEQ ID NO: 16636 - protein, 9 aa, Homo Sapiens
YLPPGFLSA

SEQ ID NO: 16637 - protein, 9 aa, Homo Sapiens
YLPTKLFQA

SEQ ID NO: 16638 - protein, 9 aa, Homo Sapiens
YLPVKIEQV

SEQ ID NO: 16639 - protein, 9 aa, Homo Sapiens
YLPYPIHQV

SEQ ID NO: 16640 - protein, 9 aa, Homo Sapiens
YLSEEVQAV

SEQ ID NO: 16641 - protein, 9 aa, Homo Sapiens
YLSPDLSKV

SEQ ID NO: 16642 - protein, 9 aa, Homo Sapiens
YLSPKLWAL

SEQ ID NO: 16643 - protein, 9 aa, Homo Sapiens
YLTDRVMTV

SEQ ID NO: 16644 - protein, 9 aa, Homo Sapiens
YLTHDSPSV

SEQ ID NO: 16645 - protein, 9 aa, Homo Sapiens
YLTKKFAEL

SEQ ID NO: 16646 - protein, 9 aa, Homo Sapiens
YLVEDIQHI

SEQ ID NO: 16647 - protein, 9 aa, Homo Sapiens
YLVKIFEEL

SEQ ID NO: 16648 - protein, 9 aa, Homo Sapiens
YLVPELDGV

SEQ ID NO: 16649 - protein, 9 aa, Homo Sapiens
YLVVKIEKV

SEQ ID NO: 16650 - protein, 9 aa, Homo Sapiens
YMAPEVVEA

SEQ ID NO: 16651 - protein, 9 aa, Homo Sapiens
YMIAHITGL

SEQ ID NO: 16652 - protein, 9 aa, Homo Sapiens
YQDLLNVKM

SEQ ID NO: 16653 - protein, 9 aa, Homo Sapiens
YQDTHPERL

SEQ ID NO: 16654 - protein, 9 aa, Homo Sapiens
YQDTPGVKM

SEQ ID NO: 16655 - protein, 9 aa, Homo Sapiens
YQFENFPGL

SEQ ID NO: 16656 - protein, 9 aa, Homo Sapiens
YQFGEIRTI

SEQ ID NO: 16657 - protein, 9 aa, Homo Sapiens
YQHGIFQSI

SEQ ID NO: 16658 - protein, 9 aa, Homo Sapiens
YQIDKLIKT

SEQ ID NO: 16659 - protein, 9 aa, Homo Sapiens
YQLGELVKV

SEQ ID NO: 16660 - protein, 9 aa, Homo Sapiens
YQLSKEYTL

SEQ ID NO: 16661 - protein, 9 aa, Homo Sapiens
YQPYEIPAV

SEQ ID NO: 16662 - protein, 9 aa, Homo Sapiens
YQSELELRV

SEQ ID NO: 16663 - protein, 9 aa, Homo Sapiens
YQTALHLAV

SEQ ID NO: 16664 - protein, 9 aa, Homo Sapiens
YQTEIGQTL

SEQ ID NO: 16665 - protein, 9 aa, Homo Sapiens
YQTEKGITV

SEQ ID NO: 16666 - protein, 9 aa, Homo Sapiens
YQTPFNKEV

SEQ ID NO: 16667 - protein, 9 aa, Homo Sapiens
YQTPLELKL

SEQ ID NO: 16668 - protein, 9 aa, Homo Sapiens
YQTPLHLAV

SEQ ID NO: 16669 - protein, 9 aa, Homo Sapiens
YQVGVHYEL

SEQ ID NO: 16670 - protein, 9 aa, Homo Sapiens
YQYPVIIHL

SEQ ID NO: 16671 - protein, 9 aa, Homo Sapiens
YSFHKFHYL

SEQ ID NO: 16672 - protein, 9 aa, Homo Sapiens
YSLEKVFGI

SEQ ID NO: 16673 - protein, 9 aa, Homo Sapiens
YSVDRLYEL

SEQ ID NO: 16674 - protein, 9 aa, Homo Sapiens
YTIDSDWRF

SEQ ID NO: 16675 - protein, 9 aa, Homo Sapiens
YTIPLAIKL

SEQ ID NO: 16676 - protein, 9 aa, Homo Sapiens
YTLREVDTV

SEQ ID NO: 16677 - protein, 9 aa, Homo Sapiens
YTMEELHQL

SEQ ID NO: 16678 - protein, 9 aa, Homo Sapiens
YTSDHFETI

SEQ ID NO: 16679 - protein, 9 aa, Homo Sapiens
YTSGTFRTV

SEQ ID NO: 16680 - protein, 9 aa, Homo Sapiens
YTSPDFLYV

SEQ ID NO: 16681 - protein, 9 aa, Homo Sapiens
YTSPVNPAV

SEQ ID NO: 16682 - protein, 9 aa, Homo Sapiens
YTTDRVMTV

SEQ ID NO: 16683 - protein, 9 aa, Homo Sapiens
YTVEDIQRL

SEQ ID NO: 16684 - protein, 9 aa, Homo Sapiens
YTWEEVFRV

SEQ ID NO: 16685 - protein, 9 aa, Homo Sapiens
YVDPLDPSF

SEQ ID NO: 16686 - protein, 9 aa, Homo Sapiens
YVDPVNKVL

SEQ ID NO: 16687 - protein, 9 aa, Homo Sapiens
YVEPLKLYL

SEQ ID NO: 16688 - protein, 9 aa, Homo Sapiens
YVFPGVTRL

SEQ ID NO: 16689 - protein, 9 aa, Homo Sapiens
YVIGGFDGL

SEQ ID NO: 16690 - protein, 9 aa, Homo Sapiens
YVINVTTHL

SEQ ID NO: 16691 - protein, 9 aa, Homo Sapiens
YVLDDLIVA

SEQ ID NO: 16692 - protein, 9 aa, Homo Sapiens
YVLDLAAKV

SEQ ID NO: 16693 - protein, 9 aa, Homo Sapiens
YVLEGLKSV

SEQ ID NO: 16694 - protein, 9 aa, Homo Sapiens
YVLPEVSKV

SEQ ID NO: 16695 - protein, 9 aa, Homo Sapiens
YVPETVYRV

SEQ ID NO: 16696 - protein, 9 aa, Homo Sapiens
YVPPELITL

SEQ ID NO: 16697 - protein, 9 aa, Homo Sapiens
YVPTSYVEV

SEQ ID NO: 16698 - protein, 9 aa, Homo Sapiens
YVSEILEKV

SEQ ID NO: 16699 - protein, 9 aa, Homo Sapiens
YVSGELEHV

SEQ ID NO: 16700 - protein, 9 aa, Homo Sapiens
YVTEELPQL

SEQ ID NO: 16701 - protein, 9 aa, Homo Sapiens
YVTPVNRNV

SEQ ID NO: 16702 - protein, 9 aa, Homo Sapiens
YVTSVILHI

SEQ ID NO: 16703 - protein, 9 aa, Homo Sapiens
YVVPFVAKV

SEQ ID NO: 16704 - protein, 9 aa, Homo Sapiens
YVYEYLLHV

SEQ ID NO: 16705 - protein, 10 aa, Homo Sapiens
AAFEFDIHQV

SEQ ID NO: 16706 - protein, 10 aa, Homo Sapiens
AAFYHHLPAA

SEQ ID NO: 16707 - protein, 10 aa, Homo Sapiens
AALDFKLAAA

SEQ ID NO: 16708 - protein, 10 aa, Homo Sapiens
AATGGGIVRV

SEQ ID NO: 16709 - protein, 10 aa, Homo Sapiens
AIDPHLLLSV

SEQ ID NO: 16710 - protein, 10 aa, Homo Sapiens
AIIDGKIFCV

SEQ ID NO: 16711 - protein, 10 aa, Homo Sapiens
ALCEENMRGV

SEQ ID NO: 16712 - protein, 10 aa, Homo Sapiens
ALIDEQILCV

SEQ ID NO: 16713 - protein, 10 aa, Homo Sapiens
ALMAHAMEEV

SEQ ID NO: 16714 - protein, 10 aa, Homo Sapiens
ALPDQGIAKA

SEQ ID NO: 16715 - protein, 10 aa, Homo Sapiens
ALPEILFAKV

SEQ ID NO: 16716 - protein, 10 aa, Homo Sapiens
ALSKEGIVAL

SEQ ID NO: 16717 - protein, 10 aa, Homo Sapiens
ALYPGQLVQL

SEQ ID NO: 16718 - protein, 10 aa, Homo Sapiens
AMFDHIPVGV

SEQ ID NO: 16719 - protein, 10 aa, Homo Sapiens
AQAELQQHDV

SEQ ID NO: 16720 - protein, 10 aa, Homo Sapiens
AQDEERQASL

SEQ ID NO: 16721 - protein, 10 aa, Homo Sapiens
AQDEHLITFF

SEQ ID NO: 16722 - protein, 10 aa, Homo Sapiens
AQFPRFSPVL

SEQ ID NO: 16723 - protein, 10 aa, Homo Sapiens
AQHDPLLTGV

SEQ ID NO: 16724 - protein, 10 aa, Homo Sapiens
AQIEDLQVKL

SEQ ID NO: 16725 - protein, 10 aa, Homo Sapiens
AQMDYYGTRL

SEQ ID NO: 16726 - protein, 10 aa, Homo Sapiens
AQWDIGIAHA

SEQ ID NO: 16727 - protein, 10 aa, Homo Sapiens
AQYEHDLEVA

SEQ ID NO: 16728 - protein, 10 aa, Homo Sapiens
ASFNDTFVHV

SEQ ID NO: 16729 - protein, 10 aa, Homo Sapiens
ASLDKFLANV

SEQ ID NO: 16730 - protein, 10 aa, Homo Sapiens
ATPEGIFLRV

SEQ ID NO: 16731 - protein, 10 aa, Homo Sapiens
ATYDKLCKEV

SEQ ID NO: 16732 - protein, 10 aa, Homo Sapiens
AVFDKTLAEL

SEQ ID NO: 16733 - protein, 10 aa, Homo Sapiens
AVFKGKFKEG

SEQ ID NO: 16734 - protein, 10 aa, Homo Sapiens
AVFPDDMPTL

SEQ ID NO: 16735 - protein, 10 aa, Homo Sapiens
AVIDVGINRV

SEQ ID NO: 16736 - protein, 10 aa, Homo Sapiens
AVIEKFAPIK

SEQ ID NO: 16737 - protein, 10 aa, Homo Sapiens
AVLDGRELRV

SEQ ID NO: 16738 - protein, 10 aa, Homo Sapiens
AVLDKEIIQL

SEQ ID NO: 16739 - protein, 10 aa, Homo Sapiens
AVLPEMENQV

SEQ ID NO: 16740 - protein, 10 aa, Homo Sapiens
AVPDEIPPLE

SEQ ID NO: 16741 - protein, 10 aa, Homo Sapiens
AVPEKLQPLL

SEQ ID NO: 16742 - protein, 10 aa, Homo Sapiens
AVVDGAFKEV

SEQ ID NO: 16743 - protein, 10 aa, Homo Sapiens
AVYEGHVSCV

SEQ ID NO: 16744 - protein, 10 aa, Homo Sapiens
FAAPEKDIFL

SEQ ID NO: 16745 - protein, 10 aa, Homo Sapiens
FAFESDLHSL

SEQ ID NO: 16746 - protein, 10 aa, Homo Sapiens
FAYDGKDYLT

SEQ ID NO: 16747 - protein, 10 aa, Homo Sapiens
FGYPFRLNEA

SEQ ID NO: 16748 - protein, 10 aa, Homo Sapiens
FIASKGVKLV

SEQ ID NO: 16749 - protein, 10 aa, Homo Sapiens
FICDYELHEL

SEQ ID NO: 16750 - protein, 10 aa, Homo Sapiens
FICPVVGLEM

SEQ ID NO: 16751 - protein, 10 aa, Homo Sapiens
FIFDVHVHEV

SEQ ID NO: 16752 - protein, 10 aa, Homo Sapiens
FIFEKKLAQA

SEQ ID NO: 16753 - protein, 10 aa, Homo Sapiens
FILNGDFERL

SEQ ID NO: 16754 - protein, 10 aa, Homo Sapiens
FIMEGTLTRV

SEQ ID NO: 16755 - protein, 10 aa, Homo Sapiens
FISGAGILRL

SEQ ID NO: 16756 - protein, 10 aa, Homo Sapiens
FIYHGEVPQA

SEQ ID NO: 16757 - protein, 10 aa, Homo Sapiens
FLFDGSPTYV

SEQ ID NO: 16758 - protein, 10 aa, Homo Sapiens
FLLGPRLVLA

SEQ ID NO: 16759 - protein, 10 aa, Homo Sapiens
FLLPHPGLKV

SEQ ID NO: 16760 - protein, 10 aa, Homo Sapiens
FLLPHPGLQV

SEQ ID NO: 16761 - protein, 10 aa, Homo Sapiens
FLLPIKTVGV

SEQ ID NO: 16762 - protein, 10 aa, Homo Sapiens
FLPSHSLDTV

SEQ ID NO: 16763 - protein, 10 aa, Homo Sapiens
FLQEGDLISA

SEQ ID NO: 16764 - protein, 10 aa, Homo Sapiens
FLYTGEGDTV

SEQ ID NO: 16765 - protein, 10 aa, Homo Sapiens
FMFDEKLVTV

SEQ ID NO: 16766 - protein, 10 aa, Homo Sapiens
FQVKEVDVGL

SEQ ID NO: 16767 - protein, 10 aa, Homo Sapiens
FQYESKVFYL

SEQ ID NO: 16768 - protein, 10 aa, Homo Sapiens
FSWEGAFQHV

SEQ ID NO: 16769 - protein, 10 aa, Homo Sapiens
FTIPEAFRGV

SEQ ID NO: 16770 - protein, 10 aa, Homo Sapiens
FTPDVKVWEV

SEQ ID NO: 16771 - protein, 10 aa, Homo Sapiens
FTSDRGFQFV

SEQ ID NO: 16772 - protein, 10 aa, Homo Sapiens
FVADEELVHL

SEQ ID NO: 16773 - protein, 10 aa, Homo Sapiens
FVADEGICYL

SEQ ID NO: 16774 - protein, 10 aa, Homo Sapiens
FVDKTVLPFV

SEQ ID NO: 16775 - protein, 10 aa, Homo Sapiens
FVDPNGKISL

SEQ ID NO: 16776 - protein, 10 aa, Homo Sapiens
FVDPSQDHAL

SEQ ID NO: 16777 - protein, 10 aa, Homo Sapiens
FVEDTECRTL

SEQ ID NO: 16778 - protein, 10 aa, Homo Sapiens
FVLDEADEML

SEQ ID NO: 16779 - protein, 10 aa, Homo Sapiens
FVLHSPGMSV

SEQ ID NO: 16780 - protein, 10 aa, Homo Sapiens
FVYPLDFART

SEQ ID NO: 16781 - protein, 10 aa, Homo Sapiens
GIFPKSFIHI

SEQ ID NO: 16782 - protein, 10 aa, Homo Sapiens
GIFSAEFLKV

SEQ ID NO: 16783 - protein, 10 aa, Homo Sapiens
GLAGVKIAEV

SEQ ID NO: 16784 - protein, 10 aa, Homo Sapiens
GLIGVGLINV

SEQ ID NO: 16785 - protein, 10 aa, Homo Sapiens
GLPRFGIEMV

SEQ ID NO: 16786 - protein, 10 aa, Homo Sapiens
GLSTEGIYRV

SEQ ID NO: 16787 - protein, 10 aa, Homo Sapiens
GPPPPPGKPQ

SEQ ID NO: 16788 - protein, 10 aa, Homo Sapiens
GQIEDLKIHL

SEQ ID NO: 16789 - protein, 10 aa, Homo Sapiens
GQWSQGLISA

SEQ ID NO: 16790 - protein, 10 aa, Homo Sapiens
GQYEPHFDFA

SEQ ID NO: 16791 - protein, 10 aa, Homo Sapiens
GVFEGKLNVI

SEQ ID NO: 16792 - protein, 10 aa, Homo Sapiens
GVFPDNFVKL

SEQ ID NO: 16793 - protein, 10 aa, Homo Sapiens
GVIAEILRGV

SEQ ID NO: 16794 - protein, 10 aa, Homo Sapiens
GVIDGHIYAV

SEQ ID NO: 16795 - protein, 10 aa, Homo Sapiens
GVIDLIFEKA

SEQ ID NO: 16796 - protein, 10 aa, Homo Sapiens
GVIGGDNIRL

SEQ ID NO: 16797 - protein, 10 aa, Homo Sapiens
GVLDSVDVRL

SEQ ID NO: 16798 - protein, 10 aa, Homo Sapiens
GVLFHNLPSL

SEQ ID NO: 16799 - protein, 10 aa, Homo Sapiens
GVLKVFLENV

SEQ ID NO: 16800 - protein, 10 aa, Homo Sapiens
GVPSTAIREI

SEQ ID NO: 16801 - protein, 10 aa, Homo Sapiens
HGFAGYFETV

SEQ ID NO: 16802 - protein, 10 aa, Homo Sapiens
HIYHQHFDSV

SEQ ID NO: 16803 - protein, 10 aa, Homo Sapiens
HLPGSSNSPA

SEQ ID NO: 16804 - protein, 10 aa, Homo Sapiens
HLPSDFTPAV

SEQ ID NO: 16805 - protein, 10 aa, Homo Sapiens
HLYEEKFESI

SEQ ID NO: 16806 - protein, 10 aa, Homo Sapiens
HQLENLSNFI

SEQ ID NO: 16807 - protein, 10 aa, Homo Sapiens
HTLGDAHIYL

SEQ ID NO: 16808 - protein, 10 aa, Homo Sapiens
HVLDVIHEVL

SEQ ID NO: 16809 - protein, 10 aa, Homo Sapiens
IIMLEALERV

SEQ ID NO: 16810 - protein, 10 aa, Homo Sapiens
ILAPCKLETV

SEQ ID NO: 16811 - protein, 10 aa, Homo Sapiens
ILITGGIVAT

SEQ ID NO: 16812 - protein, 10 aa, Homo Sapiens
ITFPGCFTNT

SEQ ID NO: 16813 - protein, 10 aa, Homo Sapiens
IVDKSGVVRV

SEQ ID NO: 16814 - protein, 10 aa, Homo Sapiens
IVPDLDLQQV

SEQ ID NO: 16815 - protein, 10 aa, Homo Sapiens
KAIRDGVIEA

SEQ ID NO: 16816 - protein, 10 aa, Homo Sapiens
KALPDSMVSV

SEQ ID NO: 16817 - protein, 10 aa, Homo Sapiens
KAYQELLATV

SEQ ID NO: 16818 - protein, 10 aa, Homo Sapiens
KAYYHLLEQV

SEQ ID NO: 16819 - protein, 10 aa, Homo Sapiens
KIADFGLARV

SEQ ID NO: 16820 - protein, 10 aa, Homo Sapiens
KICDFGLARV

SEQ ID NO: 16821 - protein, 10 aa, Homo Sapiens
KIDEHHFVAV

SEQ ID NO: 16822 - protein, 10 aa, Homo Sapiens
KIFDEILVNA

SEQ ID NO: 16823 - protein, 10 aa, Homo Sapiens
KIFSGVFVKV

SEQ ID NO: 16824 - protein, 10 aa, Homo Sapiens
KIGDFGLATV

SEQ ID NO: 16825 - protein, 10 aa, Homo Sapiens
KIIETDFEKA

SEQ ID NO: 16826 - protein, 10 aa, Homo Sapiens
KIIYIVHDEV

SEQ ID NO: 16827 - protein, 10 aa, Homo Sapiens
KLFNGTFLKA

SEQ ID NO: 16828 - protein, 10 aa, Homo Sapiens
KLHDVELHQV

SEQ ID NO: 16829 - protein, 10 aa, Homo Sapiens
KLIEKLDIKL

SEQ ID NO: 16830 - protein, 10 aa, Homo Sapiens
KLLDEAIQAV

SEQ ID NO: 16831 - protein, 10 aa, Homo Sapiens
KLLDPEDISV

SEQ ID NO: 16832 - protein, 10 aa, Homo Sapiens
KLLEVNGVAL

SEQ ID NO: 16833 - protein, 10 aa, Homo Sapiens
KLLVSGFWGV

SEQ ID NO: 16834 - protein, 10 aa, Homo Sapiens
KLVEFDFLGA

SEQ ID NO: 16835 - protein, 10 aa, Homo Sapiens
KLYDIDVAKV

SEQ ID NO: 16836 - protein, 10 aa, Homo Sapiens
KMIEDLQNEL

SEQ ID NO: 16837 - protein, 10 aa, Homo Sapiens
KMYEEFLSKV

SEQ ID NO: 16838 - protein, 10 aa, Homo Sapiens
KQFDDVLIYL

SEQ ID NO: 16839 - protein, 10 aa, Homo Sapiens
KQFEPNDFYL

SEQ ID NO: 16840 - protein, 10 aa, Homo Sapiens
KQLDDLKVEL

SEQ ID NO: 16841 - protein, 10 aa, Homo Sapiens
KQLEETNLQL

SEQ ID NO: 16842 - protein, 10 aa, Homo Sapiens
KQMEQISQFL

SEQ ID NO: 16843 - protein, 10 aa, Homo Sapiens
KQVDLENVWL

SEQ ID NO: 16844 - protein, 10 aa, Homo Sapiens
KSIDFPLTKV

SEQ ID NO: 16845 - protein, 10 aa, Homo Sapiens
KTIEDDLVSA

SEQ ID NO: 16846 - protein, 10 aa, Homo Sapiens
KTIEDTLMTV

SEQ ID NO: 16847 - protein, 10 aa, Homo Sapiens
KTIEGITVTV

SEQ ID NO: 16848 - protein, 10 aa, Homo Sapiens
KTLQEFLERI

SEQ ID NO: 16849 - protein, 10 aa, Homo Sapiens
KTLTGKTITL

SEQ ID NO: 16850 - protein, 10 aa, Homo Sapiens
KTMEDTLMTV

SEQ ID NO: 16851 - protein, 10 aa, Homo Sapiens
KTYEAALETI

SEQ ID NO: 16852 - protein, 10 aa, Homo Sapiens
KVAGRVIVEV

SEQ ID NO: 16853 - protein, 10 aa, Homo Sapiens
KVFDPVPVGV

SEQ ID NO: 16854 - protein, 10 aa, Homo Sapiens
KVFELDLVTL

SEQ ID NO: 16855 - protein, 10 aa, Homo Sapiens
KVGNFKFIYV

SEQ ID NO: 16856 - protein, 10 aa, Homo Sapiens
KVIEAIRVEL

SEQ ID NO: 16857 - protein, 10 aa, Homo Sapiens
KVLDIMPLTL

SEQ ID NO: 16858 - protein, 10 aa, Homo Sapiens
KVLDQKEHRL

SEQ ID NO: 16859 - protein, 10 aa, Homo Sapiens
KVLDSFCEGL

SEQ ID NO: 16860 - protein, 10 aa, Homo Sapiens
KVLEDCNIVL

SEQ ID NO: 16861 - protein, 10 aa, Homo Sapiens
KVLEFERVYL

SEQ ID NO: 16862 - protein, 10 aa, Homo Sapiens
KVLGEAMTGI

SEQ ID NO: 16863 - protein, 10 aa, Homo Sapiens
KVSNSGITRV

SEQ ID NO: 16864 - protein, 10 aa, Homo Sapiens
KVVEDGILKL

SEQ ID NO: 16865 - protein, 10 aa, Homo Sapiens
LADPSAFVAA

SEQ ID NO: 16866 - protein, 10 aa, Homo Sapiens
LAFEEEFGRV

SEQ ID NO: 16867 - protein, 10 aa, Homo Sapiens
LFLHAGIVLP

SEQ ID NO: 16868 - protein, 10 aa, Homo Sapiens
LIFPKEFETA

SEQ ID NO: 16869 - protein, 10 aa, Homo Sapiens
LILEGNDIEL

SEQ ID NO: 16870 - protein, 10 aa, Homo Sapiens
LILPHVDIQL

SEQ ID NO: 16871 - protein, 10 aa, Homo Sapiens
LIPDEVFDAV

SEQ ID NO: 16872 - protein, 10 aa, Homo Sapiens
LLLDVPTAAV

SEQ ID NO: 16873 - protein, 10 aa, Homo Sapiens
LLPELRDWGV

SEQ ID NO: 16874 - protein, 10 aa, Homo Sapiens
LLPSEGIVHL

SEQ ID NO: 16875 - protein, 10 aa, Homo Sapiens
LNGQKLLEQV

SEQ ID NO: 16876 - protein, 10 aa, Homo Sapiens
LQIEDFEARI

SEQ ID NO: 16877 - protein, 10 aa, Homo Sapiens
LTIEDGIFEV

SEQ ID NO: 16878 - protein, 10 aa, Homo Sapiens
LTNQEDLPEV

SEQ ID NO: 16879 - protein, 10 aa, Homo Sapiens
LVYEGQLSQA

SEQ ID NO: 16880 - protein, 10 aa, Homo Sapiens
LVYQEPIPTA

SEQ ID NO: 16881 - protein, 10 aa, Homo Sapiens
MQAERIFSEV

SEQ ID NO: 16882 - protein, 10 aa, Homo Sapiens
MQLEDLKQQL

SEQ ID NO: 16883 - protein, 10 aa, Homo Sapiens
MVLLGVLGSL

SEQ ID NO: 16884 - protein, 10 aa, Homo Sapiens
MVLSSPLALA

SEQ ID NO: 16885 - protein, 10 aa, Homo Sapiens
MVVQDGIVKA

SEQ ID NO: 16886 - protein, 10 aa, Homo Sapiens
NIFQLPFKHV

SEQ ID NO: 16887 - protein, 10 aa, Homo Sapiens
NITDKGIIAL

SEQ ID NO: 16888 - protein, 10 aa, Homo Sapiens
NQAKDSIVSV

SEQ ID NO: 16889 - protein, 10 aa, Homo Sapiens
NQIGAKFWEV

SEQ ID NO: 16890 - protein, 10 aa, Homo Sapiens
NQWDGTQHGV

SEQ ID NO: 16891 - protein, 10 aa, Homo Sapiens
NVPEGLLATV

SEQ ID NO: 16892 - protein, 10 aa, Homo Sapiens
QGVVTTLENV

SEQ ID NO: 16893 - protein, 10 aa, Homo Sapiens
QIFNGTFVKL

SEQ ID NO: 16894 - protein, 10 aa, Homo Sapiens
QLEEEGITFV

SEQ ID NO: 16895 - protein, 10 aa, Homo Sapiens
QQFQEPFVAV

SEQ ID NO: 16896 - protein, 10 aa, Homo Sapiens
QSLAGGIIGV

SEQ ID NO: 16897 - protein, 10 aa, Homo Sapiens
QVFPGLLERV

SEQ ID NO: 16898 - protein, 10 aa, Homo Sapiens
QVMPGNIVFV

SEQ ID NO: 16899 - protein, 10 aa, Homo Sapiens
QVVDEKLPGL

SEQ ID NO: 16900 - protein, 10 aa, Homo Sapiens
QVYRGALQKV

SEQ ID NO: 16901 - protein, 10 aa, Homo Sapiens
RAFHPDLEFV

SEQ ID NO: 16902 - protein, 10 aa, Homo Sapiens
RIIDSLFNTV

SEQ ID NO: 16903 - protein, 10 aa, Homo Sapiens
RLLDEEISRV

SEQ ID NO: 16904 - protein, 10 aa, Homo Sapiens
RLLDLENIQI

SEQ ID NO: 16905 - protein, 10 aa, Homo Sapiens
RLLSEDFVSV

SEQ ID NO: 16906 - protein, 10 aa, Homo Sapiens
RLPEHVTVQV

SEQ ID NO: 16907 - protein, 10 aa, Homo Sapiens
RLYDGLFKVI

SEQ ID NO: 16908 - protein, 10 aa, Homo Sapiens
RLYPAFMEGI

SEQ ID NO: 16909 - protein, 10 aa, Homo Sapiens
RLYPEGLAQL

SEQ ID NO: 16910 - protein, 10 aa, Homo Sapiens
RLYPWGVVEV

SEQ ID NO: 16911 - protein, 10 aa, Homo Sapiens
RMFDGKFVVA

SEQ ID NO: 16912 - protein, 10 aa, Homo Sapiens
RQPDSGISSI

SEQ ID NO: 16913 - protein, 10 aa, Homo Sapiens
RQVEDLQATF

SEQ ID NO: 16914 - protein, 10 aa, Homo Sapiens
RQYPWGVAEV

SEQ ID NO: 16915 - protein, 10 aa, Homo Sapiens
RSYDFEFMQV

SEQ ID NO: 16916 - protein, 10 aa, Homo Sapiens
RTADGEFMAV

SEQ ID NO: 16917 - protein, 10 aa, Homo Sapiens
RTVEAFLKEA

SEQ ID NO: 16918 - protein, 10 aa, Homo Sapiens
RVAEVIFPTA

SEQ ID NO: 16919 - protein, 10 aa, Homo Sapiens
RVAQLEQVYI

SEQ ID NO: 16920 - protein, 10 aa, Homo Sapiens
RVFIGNLNTL

SEQ ID NO: 16921 - protein, 10 aa, Homo Sapiens
RVIQKALESI

SEQ ID NO: 16922 - protein, 10 aa, Homo Sapiens
RVLDFDPMAV

SEQ ID NO: 16923 - protein, 10 aa, Homo Sapiens
RVLEKLGVTV

SEQ ID NO: 16924 - protein, 10 aa, Homo Sapiens
RVLGENAIAV

SEQ ID NO: 16925 - protein, 10 aa, Homo Sapiens
RVLGPKIEAV

SEQ ID NO: 16926 - protein, 10 aa, Homo Sapiens
RVPSDPFTGV

SEQ ID NO: 16927 - protein, 10 aa, Homo Sapiens
RVVDELDNQM

SEQ ID NO: 16928 - protein, 10 aa, Homo Sapiens
SIIGKKGESV

SEQ ID NO: 16929 - protein, 10 aa, Homo Sapiens
SIPDFPMHLA

SEQ ID NO: 16930 - protein, 10 aa, Homo Sapiens
SIPEGALVAV

SEQ ID NO: 16931 - protein, 10 aa, Homo Sapiens
SIYNGDMEKI

SEQ ID NO: 16932 - protein, 10 aa, Homo Sapiens
SLADLQNDEV

SEQ ID NO: 16933 - protein, 10 aa, Homo Sapiens
SLAELKGFEV

SEQ ID NO: 16934 - protein, 10 aa, Homo Sapiens
SLFAGGMLRV

SEQ ID NO: 16935 - protein, 10 aa, Homo Sapiens
SLINVGLISV

SEQ ID NO: 16936 - protein, 10 aa, Homo Sapiens
SLLDRFLATV

SEQ ID NO: 16937 - protein, 10 aa, Homo Sapiens
SLLGGDVVSV

SEQ ID NO: 16938 - protein, 10 aa, Homo Sapiens
SLPDFGISYV

SEQ ID NO: 16939 - protein, 10 aa, Homo Sapiens
SLVAVELEKV

SEQ ID NO: 16940 - protein, 10 aa, Homo Sapiens
SQFQQEFPSL

SEQ ID NO: 16941 - protein, 10 aa, Homo Sapiens
SQIEDVRLFL

SEQ ID NO: 16942 - protein, 10 aa, Homo Sapiens
SQVDDLKAKL

SEQ ID NO: 16943 - protein, 10 aa, Homo Sapiens
SQVDRLVALA

SEQ ID NO: 16944 - protein, 10 aa, Homo Sapiens
SQYEEQFVTL

SEQ ID NO: 16945 - protein, 10 aa, Homo Sapiens
STLDGSLHAV

SEQ ID NO: 16946 - protein, 10 aa, Homo Sapiens
SVCDIQLNQV

SEQ ID NO: 16947 - protein, 10 aa, Homo Sapiens
SVCSKAFVNV

SEQ ID NO: 16948 - protein, 10 aa, Homo Sapiens
SVFGGKNIHV

SEQ ID NO: 16949 - protein, 10 aa, Homo Sapiens
SVLDDKLVFV

SEQ ID NO: 16950 - protein, 10 aa, Homo Sapiens
SVLDEEIAKA

SEQ ID NO: 16951 - protein, 10 aa, Homo Sapiens
SVLGQAMEKV

SEQ ID NO: 16952 - protein, 10 aa, Homo Sapiens
SVPEDLTVHV

SEQ ID NO: 16953 - protein, 10 aa, Homo Sapiens
SVTSEGIKAV

SEQ ID NO: 16954 - protein, 10 aa, Homo Sapiens
SVVTGGVQSV

SEQ ID NO: 16955 - protein, 10 aa, Homo Sapiens
TLITDGMRSV

SEQ ID NO: 16956 - protein, 10 aa, Homo Sapiens
TLPKLGVHKV

SEQ ID NO: 16957 - protein, 10 aa, Homo Sapiens
TLQKEGVIGV

SEQ ID NO: 16958 - protein, 10 aa, Homo Sapiens
TLTEEGVIKV

SEQ ID NO: 16959 - protein, 10 aa, Homo Sapiens
TLYERGFENI

SEQ ID NO: 16960 - protein, 10 aa, Homo Sapiens
TQLGPPYHIL

SEQ ID NO: 16961 - protein, 10 aa, Homo Sapiens
TQYERDFERI

SEQ ID NO: 16962 - protein, 10 aa, Homo Sapiens
TTLDEKIEKV

SEQ ID NO: 16963 - protein, 10 aa, Homo Sapiens
TTLEGHLAKV

SEQ ID NO: 16964 - protein, 10 aa, Homo Sapiens
TTVGKGVTTV

SEQ ID NO: 16965 - protein, 10 aa, Homo Sapiens
TTYEGIFKTL

SEQ ID NO: 16966 - protein, 10 aa, Homo Sapiens
TVFDEAIRAV

SEQ ID NO: 16967 - protein, 10 aa, Homo Sapiens
TVFGTALNYV

SEQ ID NO: 16968 - protein, 10 aa, Homo Sapiens
TVFSKSFEQV

SEQ ID NO: 16969 - protein, 10 aa, Homo Sapiens
TVFTDHMLTV

SEQ ID NO: 16970 - protein, 10 aa, Homo Sapiens
TVLDIHDNQL

SEQ ID NO: 16971 - protein, 10 aa, Homo Sapiens
TVLEEIGNRV

SEQ ID NO: 16972 - protein, 10 aa, Homo Sapiens
TVLKAQFPSV

SEQ ID NO: 16973 - protein, 10 aa, Homo Sapiens
TVMDSKIVQV

SEQ ID NO: 16974 - protein, 10 aa, Homo Sapiens
TVMGAEIRHV

SEQ ID NO: 16975 - protein, 10 aa, Homo Sapiens
TVMPEDLVEA

SEQ ID NO: 16976 - protein, 10 aa, Homo Sapiens
TVTITGIVKV

SEQ ID NO: 16977 - protein, 10 aa, Homo Sapiens
TVYPGLMITA

SEQ ID NO: 16978 - protein, 10 aa, Homo Sapiens
TVYSHLFDHV

SEQ ID NO: 16979 - protein, 10 aa, Homo Sapiens
VILEGELERA

SEQ ID NO: 16980 - protein, 10 aa, Homo Sapiens
VLFDDELLMV

SEQ ID NO: 16981 - protein, 10 aa, Homo Sapiens
VLIGEFLEKV

SEQ ID NO: 16982 - protein, 10 aa, Homo Sapiens
VLLKARLVPA

SEQ ID NO: 16983 - protein, 10 aa, Homo Sapiens
VLSAADKGNV

SEQ ID NO: 16984 - protein, 10 aa, Homo Sapiens
VQLDLTGIFM

SEQ ID NO: 16985 - protein, 10 aa, Homo Sapiens
VQLEATEWRL

SEQ ID NO: 16986 - protein, 10 aa, Homo Sapiens
VQLPDGGWGL

SEQ ID NO: 16987 - protein, 10 aa, Homo Sapiens
VQWENSFVSV

SEQ ID NO: 16988 - protein, 10 aa, Homo Sapiens
VTAPSGILDV

SEQ ID NO: 16989 - protein, 10 aa, Homo Sapiens
VVAAAAAEAK

SEQ ID NO: 16990 - protein, 10 aa, Homo Sapiens
VVAPDNLKQV

SEQ ID NO: 16991 - protein, 10 aa, Homo Sapiens
VVDPNDPQML

SEQ ID NO: 16992 - protein, 10 aa, Homo Sapiens
VVFDCKFIET

SEQ ID NO: 16993 - protein, 10 aa, Homo Sapiens
VVINFDFPKL

SEQ ID NO: 16994 - protein, 10 aa, Homo Sapiens
VVIPGKVEEV

SEQ ID NO: 16995 - protein, 10 aa, Homo Sapiens
VVSPSSFENV

SEQ ID NO: 16996 - protein, 10 aa, Homo Sapiens
VVVDLGLIRV

SEQ ID NO: 16997 - protein, 10 aa, Homo Sapiens
YAAPGGLIGV

SEQ ID NO: 16998 - protein, 10 aa, Homo Sapiens
YAFDLKCDSV

SEQ ID NO: 16999 - protein, 10 aa, Homo Sapiens
YAVELVNDSL

SEQ ID NO: 17000 - protein, 10 aa, Homo Sapiens
YAYDGKDYIA

SEQ ID NO: 17001 - protein, 10 aa, Homo Sapiens
YIDPSGFVKA

SEQ ID NO: 17002 - protein, 10 aa, Homo Sapiens
YIIEQGVCYL

SEQ ID NO: 17003 - protein, 10 aa, Homo Sapiens
YIPGRQIIEV

SEQ ID NO: 17004 - protein, 10 aa, Homo Sapiens
YIYDKDMEII

SEQ ID NO: 17005 - protein, 10 aa, Homo Sapiens
YLPESSFIGA

SEQ ID NO: 17006 - protein, 10 aa, Homo Sapiens
YLTNEGIQYL

SEQ ID NO: 17007 - protein, 10 aa, Homo Sapiens
YMFPDTMLQA

SEQ ID NO: 17008 - protein, 10 aa, Homo Sapiens
YQAPDIDVQL

SEQ ID NO: 17009 - protein, 10 aa, Homo Sapiens
YTFSEPFHLI

SEQ ID NO: 17010 - protein, 10 aa, Homo Sapiens
YTVEDLATQL

SEQ ID NO: 17011 - protein, 10 aa, Homo Sapiens
YTYEELLNRV

SEQ ID NO: 17012 - protein, 10 aa, Homo Sapiens
YVFEGKMLEA

SEQ ID NO: 17013 - protein, 10 aa, Homo Sapiens
YVMEYRELFL

SEQ ID NO: 17014 - protein, 10 aa, Homo Sapiens
YVPDFVLQGI

SEQ ID NO: 17015 - protein, 10 aa, Homo Sapiens
YVPHEILRKV

SEQ ID NO: 17016 - protein, 11 aa, Homo Sapiens
AALEEADKMFL

SEQ ID NO: 17017 - protein, 11 aa, Homo Sapiens
AAVPGKTFVNI

SEQ ID NO: 17018 - protein, 11 aa, Homo Sapiens
ADINGLRQVLD

SEQ ID NO: 17019 - protein, 11 aa, Homo Sapiens
AEQRGELAIKD

SEQ ID NO: 17020 - protein, 11 aa, Homo Sapiens
ALADKELLPSV

SEQ ID NO: 17021 - protein, 11 aa, Homo Sapiens
AQAEVYKELRL

SEQ ID NO: 17022 - protein, 11 aa, Homo Sapiens
AQFHPTEDLVV

SEQ ID NO: 17023 - protein, 11 aa, Homo Sapiens
AQIDSNIAHTV

SEQ ID NO: 17024 - protein, 11 aa, Homo Sapiens
AQIEAKFYEEV

SEQ ID NO: 17025 - protein, 11 aa, Homo Sapiens
AQLDPEALGNI

SEQ ID NO: 17026 - protein, 11 aa, Homo Sapiens
ASQVPNPAAAA

SEQ ID NO: 17027 - protein, 11 aa, Homo Sapiens
ATAAGDVIKAA

SEQ ID NO: 17028 - protein, 11 aa, Homo Sapiens
ATADDIRALLI

SEQ ID NO: 17029 - protein, 11 aa, Homo Sapiens
ATVGGGTVIGV

SEQ ID NO: 17030 - protein, 11 aa, Homo Sapiens
AVADFDECIRL

SEQ ID NO: 17031 - protein, 11 aa, Homo Sapiens
AVALERTFVGA

SEQ ID NO: 17032 - protein, 11 aa, Homo Sapiens
AVEAKKTYVRD

SEQ ID NO: 17033 - protein, 11 aa, Homo Sapiens
AVIHEAPAVLL

SEQ ID NO: 17034 - protein, 11 aa, Homo Sapiens
AVPEGDWFCTV

SEQ ID NO: 17035 - protein, 11 aa, Homo Sapiens
AVVDEGDVVEV

SEQ ID NO: 17036 - protein, 11 aa, Homo Sapiens
FAEDVGSNKGA

SEQ ID NO: 17037 - protein, 11 aa, Homo Sapiens
FAYDGKDYLTL

SEQ ID NO: 17038 - protein, 11 aa, Homo Sapiens
FIIQGLRSVGA

SEQ ID NO: 17039 - protein, 11 aa, Homo Sapiens
FIPLPSAVVQA

SEQ ID NO: 17040 - protein, 11 aa, Homo Sapiens
FLADPSAFVAA

SEQ ID NO: 17041 - protein, 11 aa, Homo Sapiens
FLASESLIKQI

SEQ ID NO: 17042 - protein, 11 aa, Homo Sapiens
FLPDPSALQNL

SEQ ID NO: 17043 - protein, 11 aa, Homo Sapiens
FLPETRIMTSV

SEQ ID NO: 17044 - protein, 11 aa, Homo Sapiens
FLTDSNNIKEV

SEQ ID NO: 17045 - protein, 11 aa, Homo Sapiens
FQDEVAKAQQL

SEQ ID NO: 17046 - protein, 11 aa, Homo Sapiens
FQVENDQERFL

SEQ ID NO: 17047 - protein, 11 aa, Homo Sapiens
FTIDEELVQRV

SEQ ID NO: 17048 - protein, 11 aa, Homo Sapiens
FTVPLSTEAAL

SEQ ID NO: 17049 - protein, 11 aa, Homo Sapiens
FVLDHEDGLNL

SEQ ID NO: 17050 - protein, 11 aa, Homo Sapiens
FVTEGSHFVEA

SEQ ID NO: 17051 - protein, 11 aa, Homo Sapiens
FVYPLDFARTR

SEQ ID NO: 17052 - protein, 11 aa, Homo Sapiens
GIAASGHFICV

SEQ ID NO: 17053 - protein, 11 aa, Homo Sapiens
GLADASLLKKV

SEQ ID NO: 17054 - protein, 11 aa, Homo Sapiens
GLADNTVIAKV

SEQ ID NO: 17055 - protein, 11 aa, Homo Sapiens
GPPPPPPGKPQ

SEQ ID NO: 17056 - protein, 11 aa, Homo Sapiens
GQLDTPGVHNV

SEQ ID NO: 17057 - protein, 11 aa, Homo Sapiens
GVAESIHLWEV

SEQ ID NO: 17058 - protein, 11 aa, Homo Sapiens
GVAGGSILKGV

SEQ ID NO: 17059 - protein, 11 aa, Homo Sapiens
GVIGGGVFQAI

SEQ ID NO: 17060 - protein, 11 aa, Homo Sapiens
GVLSSDGVWRV

SEQ ID NO: 17061 - protein, 11 aa, Homo Sapiens
GVPNASVIMQV

SEQ ID NO: 17062 - protein, 11 aa, Homo Sapiens
GVVDPRAISVL

SEQ ID NO: 17063 - protein, 11 aa, Homo Sapiens
GVVEGKALSEL

SEQ ID NO: 17064 - protein, 11 aa, Homo Sapiens
GVYNGKTFNQV

SEQ ID NO: 17065 - protein, 11 aa, Homo Sapiens
HQIEAVDGEEL

SEQ ID NO: 17066 - protein, 11 aa, Homo Sapiens
HQIPEFDNLYL

SEQ ID NO: 17067 - protein, 11 aa, Homo Sapiens
HVYDGKFLARV

SEQ ID NO: 17068 - protein, 11 aa, Homo Sapiens
IILEEGKEILV

SEQ ID NO: 17069 - protein, 11 aa, Homo Sapiens
ILAPAGSLPKI

SEQ ID NO: 17070 - protein, 11 aa, Homo Sapiens
ILLPEPSIRSV

SEQ ID NO: 17071 - protein, 11 aa, Homo Sapiens
IQEEEDEKQRL

SEQ ID NO: 17072 - protein, 11 aa, Homo Sapiens
IQLPSEKAIFL

SEQ ID NO: 17073 - protein, 11 aa, Homo Sapiens
IQWESTRPVLA

SEQ ID NO: 17074 - protein, 11 aa, Homo Sapiens
IQYIPTELDQV

SEQ ID NO: 17075 - protein, 11 aa, Homo Sapiens
ITLPEGSVISL

SEQ ID NO: 17076 - protein, 11 aa, Homo Sapiens
ITPENLPQILL

SEQ ID NO: 17077 - protein, 11 aa, Homo Sapiens
IVPKEEGVISV

SEQ ID NO: 17078 - protein, 11 aa, Homo Sapiens
IVSTEKTILAV

SEQ ID NO: 17079 - protein, 11 aa, Homo Sapiens
KAINQGGLTSV

SEQ ID NO: 17080 - protein, 11 aa, Homo Sapiens
KALDDTQVKTV

SEQ ID NO: 17081 - protein, 11 aa, Homo Sapiens
KAMTEDGFLAV

SEQ ID NO: 17082 - protein, 11 aa, Homo Sapiens
KIIDEDGLLNL

SEQ ID NO: 17083 - protein, 11 aa, Homo Sapiens
KIMTEKELLAV

SEQ ID NO: 17084 - protein, 11 aa, Homo Sapiens
KLADDVDLEQV

SEQ ID NO: 17085 - protein, 11 aa, Homo Sapiens
KMADEDALRKI

SEQ ID NO: 17086 - protein, 11 aa, Homo Sapiens
KMDASLGNLFA

SEQ ID NO: 17087 - protein, 11 aa, Homo Sapiens
KQIDELDILRL

SEQ ID NO: 17088 - protein, 11 aa, Homo Sapiens
KQLEAIDQLHL

SEQ ID NO: 17089 - protein, 11 aa, Homo Sapiens
KQLSDTSIIAV

SEQ ID NO: 17090 - protein, 11 aa, Homo Sapiens
KQVEEIFNLKF

SEQ ID NO: 17091 - protein, 11 aa, Homo Sapiens
KSADEVLFTGV

SEQ ID NO: 17092 - protein, 11 aa, Homo Sapiens
KTAAEDAIRNL

SEQ ID NO: 17093 - protein, 11 aa, Homo Sapiens
KTSESSTILVV

SEQ ID NO: 17094 - protein, 11 aa, Homo Sapiens
KTVEGRELQSV

SEQ ID NO: 17095 - protein, 11 aa, Homo Sapiens
KVFPSEITDTV

SEQ ID NO: 17096 - protein, 11 aa, Homo Sapiens
KVIDPATATSV

SEQ ID NO: 17097 - protein, 11 aa, Homo Sapiens
KVLEPSETLVV

SEQ ID NO: 17098 - protein, 11 aa, Homo Sapiens
KVPEELVFASL

SEQ ID NO: 17099 - protein, 11 aa, Homo Sapiens
KVVDVVRNLVF

SEQ ID NO: 17100 - protein, 11 aa, Homo Sapiens
KVVEDIEYLKF

SEQ ID NO: 17101 - protein, 11 aa, Homo Sapiens
LLDPNVKSIFV

SEQ ID NO: 17102 - protein, 11 aa, Homo Sapiens
LLIDDKGTIKL

SEQ ID NO: 17103 - protein, 11 aa, Homo Sapiens
LLLPDQPPYHL

SEQ ID NO: 17104 - protein, 11 aa, Homo Sapiens
LQLDPAQIYRV

SEQ ID NO: 17105 - protein, 11 aa, Homo Sapiens
LSLSSETKPKL

SEQ ID NO: 17106 - protein, 11 aa, Homo Sapiens
LTAPEDVFSKL

SEQ ID NO: 17107 - protein, 11 aa, Homo Sapiens
LVYPEELKPVL

SEQ ID NO: 17108 - protein, 11 aa, Homo Sapiens
NLPDEEIFQQL

SEQ ID NO: 17109 - protein, 11 aa, Homo Sapiens
NQIEDNDDFQL

SEQ ID NO: 17110 - protein, 11 aa, Homo Sapiens
NQQLPIESQMV

SEQ ID NO: 17111 - protein, 11 aa, Homo Sapiens
QQIGEKIFASI

SEQ ID NO: 17112 - protein, 11 aa, Homo Sapiens
QQIPASDTQQL

SEQ ID NO: 17113 - protein, 11 aa, Homo Sapiens
QQLDSKFLEQV

SEQ ID NO: 17114 - protein, 11 aa, Homo Sapiens
QQMKDIEKLRL

SEQ ID NO: 17115 - protein, 11 aa, Homo Sapiens
QTAPEEAFIKL

SEQ ID NO: 17116 - protein, 11 aa, Homo Sapiens
QVHGTITGVDV

SEQ ID NO: 17117 - protein, 11 aa, Homo Sapiens
QVISQAAVVHA

SEQ ID NO: 17118 - protein, 11 aa, Homo Sapiens
QVLEDFPTISL

SEQ ID NO: 17119 - protein, 11 aa, Homo Sapiens
QVPEEQVLNAA

SEQ ID NO: 17120 - protein, 11 aa, Homo Sapiens
RGLDDIKDLKV

SEQ ID NO: 17121 - protein, 11 aa, Homo Sapiens
RIFGESIMIGV

SEQ ID NO: 17122 - protein, 11 aa, Homo Sapiens
RILDIDIPMSV

SEQ ID NO: 17123 - protein, 11 aa, Homo Sapiens
RLLPPGAVVAV

SEQ ID NO: 17124 - protein, 11 aa, Homo Sapiens
RLPPDTLLQQV

SEQ ID NO: 17125 - protein, 11 aa, Homo Sapiens
RLVQGSILKKV

SEQ ID NO: 17126 - protein, 11 aa, Homo Sapiens
RQLEEEGITFV

SEQ ID NO: 17127 - protein, 11 aa, Homo Sapiens
RTFDETVSTYV

SEQ ID NO: 17128 - protein, 11 aa, Homo Sapiens
RTIGVITKLDL

SEQ ID NO: 17129 - protein, 11 aa, Homo Sapiens
RVAGAAKLVVA

SEQ ID NO: 17130 - protein, 11 aa, Homo Sapiens
RVIDDSLVVGV

SEQ ID NO: 17131 - protein, 11 aa, Homo Sapiens
RVLPGQAVTGV

SEQ ID NO: 17132 - protein, 11 aa, Homo Sapiens
RVLPPSALQSV

SEQ ID NO: 17133 - protein, 11 aa, Homo Sapiens
RVMEKGSLKCA

SEQ ID NO: 17134 - protein, 11 aa, Homo Sapiens
SALPDIKVLTL

SEQ ID NO: 17135 - protein, 11 aa, Homo Sapiens
SLLGDDALVQV

SEQ ID NO: 17136 - protein, 11 aa, Homo Sapiens
SLMEESGICKV

SEQ ID NO: 17137 - protein, 11 aa, Homo Sapiens
SMLAEDAIKAA

SEQ ID NO: 17138 - protein, 11 aa, Homo Sapiens
SQADCAVLIVA

SEQ ID NO: 17139 - protein, 11 aa, Homo Sapiens
SQIDPSSIERA

SEQ ID NO: 17140 - protein, 11 aa, Homo Sapiens
SQITAIEAQHL

SEQ ID NO: 17141 - protein, 11 aa, Homo Sapiens
SQLDISDPYKV

SEQ ID NO: 17142 - protein, 11 aa, Homo Sapiens
SQLDISEPYKV

SEQ ID NO: 17143 - protein, 11 aa, Homo Sapiens
SQLDSPKALYL

SEQ ID NO: 17144 - protein, 11 aa, Homo Sapiens
SQLPPLREIIL

SEQ ID NO: 17145 - protein, 11 aa, Homo Sapiens
STLTEEGVIKV

SEQ ID NO: 17146 - protein, 11 aa, Homo Sapiens
SVAEGRALMSV

SEQ ID NO: 17147 - protein, 11 aa, Homo Sapiens
SVAPDTINNHV

SEQ ID NO: 17148 - protein, 11 aa, Homo Sapiens
SVAPKNALVQL

SEQ ID NO: 17149 - protein, 11 aa, Homo Sapiens
SVAPSPAVDKA

SEQ ID NO: 17150 - protein, 11 aa, Homo Sapiens
SVIPVINKIDL

SEQ ID NO: 17151 - protein, 11 aa, Homo Sapiens
SVLDDNKLLTL

SEQ ID NO: 17152 - protein, 11 aa, Homo Sapiens
SVPESTVLKKV

SEQ ID NO: 17153 - protein, 11 aa, Homo Sapiens
SVPKEHILPSL

SEQ ID NO: 17154 - protein, 11 aa, Homo Sapiens
SVPNKDVFQEL

SEQ ID NO: 17155 - protein, 11 aa, Homo Sapiens
SVVSPSSFENV

SEQ ID NO: 17156 - protein, 11 aa, Homo Sapiens
SVYDGHGGEEV

SEQ ID NO: 17157 - protein, 11 aa, Homo Sapiens
TIAEGLTLAQV

SEQ ID NO: 17158 - protein, 11 aa, Homo Sapiens
TIIDLPGITRV

SEQ ID NO: 17159 - protein, 11 aa, Homo Sapiens
TLIDLPGITKV

SEQ ID NO: 17160 - protein, 11 aa, Homo Sapiens
TMAKESSIIGV

SEQ ID NO: 17161 - protein, 11 aa, Homo Sapiens
TQFGGKRPFGV

SEQ ID NO: 17162 - protein, 11 aa, Homo Sapiens
TQVEASEESAL

SEQ ID NO: 17163 - protein, 11 aa, Homo Sapiens
TVATENEVFRV

SEQ ID NO: 17164 - protein, 11 aa, Homo Sapiens
TVISEDSVVKA

SEQ ID NO: 17165 - protein, 11 aa, Homo Sapiens
TVLAIDAIHQL

SEQ ID NO: 17166 - protein, 11 aa, Homo Sapiens
TVPKPDVVVQV

SEQ ID NO: 17167 - protein, 11 aa, Homo Sapiens
TVVEDGSLPQV

SEQ ID NO: 17168 - protein, 11 aa, Homo Sapiens
VIIDDHPEVTV

SEQ ID NO: 17169 - protein, 11 aa, Homo Sapiens
VIPEPSKLPYI

SEQ ID NO: 17170 - protein, 11 aa, Homo Sapiens
VLLPEGGITAI

SEQ ID NO: 17171 - protein, 11 aa, Homo Sapiens
VQCETLEDLKI

SEQ ID NO: 17172 - protein, 11 aa, Homo Sapiens
VQDELHSVLGL

SEQ ID NO: 17173 - protein, 11 aa, Homo Sapiens
VQIDDSYLVEA

SEQ ID NO: 17174 - protein, 11 aa, Homo Sapiens
VQPNGKIFKKV

SEQ ID NO: 17175 - protein, 11 aa, Homo Sapiens
VVAESEALQSL

SEQ ID NO: 17176 - protein, 11 aa, Homo Sapiens
VVLENEAVRAA

SEQ ID NO: 17177 - protein, 11 aa, Homo Sapiens
VVLGEFGVRNV

SEQ ID NO: 17178 - protein, 11 aa, Homo Sapiens
VVVNDMEQLRL

SEQ ID NO: 17179 - protein, 11 aa, Homo Sapiens
YALEEHENQRL

SEQ ID NO: 17180 - protein, 11 aa, Homo Sapiens
YAYDGKDYIAL

SEQ ID NO: 17181 - protein, 11 aa, Homo Sapiens
YGAEALERMFL

SEQ ID NO: 17182 - protein, 11 aa, Homo Sapiens
YGIKDDVFLSV

SEQ ID NO: 17183 - protein, 11 aa, Homo Sapiens
YLASDEITTVR

SEQ ID NO: 17184 - protein, 11 aa, Homo Sapiens
YQFNPMESIKL

SEQ ID NO: 17185 - protein, 11 aa, Homo Sapiens
YQIDPDACFSA

SEQ ID NO: 17186 - protein, 11 aa, Homo Sapiens
YQLDPTASISA

SEQ ID NO: 17187 - protein, 11 aa, Homo Sapiens
YQLEIPENFTT

SEQ ID NO: 17188 - protein, 11 aa, Homo Sapiens
YQVEGMEWLRM

SEQ ID NO: 17189 - protein, 11 aa, Homo Sapiens
YVEDGKGIRRV

SEQ ID NO: 17190 - protein, 11 aa, Homo Sapiens
YVIDPIKGLKL

SEQ ID NO: 17191 - protein, 11 aa, Homo Sapiens
YVIDSTDEERL

SEQ ID NO: 17192 - protein, 8 aa, Homo Sapiens
ALPNVYEV

SEQ ID NO: 17193 - protein, 8 aa, Homo Sapiens
AVDLYKSL

SEQ ID NO: 17194 - protein, 8 aa, Homo Sapiens
AVPPIWSV

SEQ ID NO: 17195 - protein, 8 aa, Homo Sapiens
FLDDPQAV

SEQ ID NO: 17196 - protein, 8 aa, Homo Sapiens
FLDKPTLL

SEQ ID NO: 17197 - protein, 8 aa, Homo Sapiens
FLDPPHML

SEQ ID NO: 17198 - protein, 8 aa, Homo Sapiens
FLDVYYNL

SEQ ID NO: 17199 - protein, 8 aa, Homo Sapiens
FLPLLHHM

SEQ ID NO: 17200 - protein, 8 aa, Homo Sapiens
FLPNPVAV

SEQ ID NO: 17201 - protein, 8 aa, Homo Sapiens
FVPPVFVV

SEQ ID NO: 17202 - protein, 8 aa, Homo Sapiens
GLPPVFGL

SEQ ID NO: 17203 - protein, 8 aa, Homo Sapiens
IIPEGTWI

SEQ ID NO: 17204 - protein, 8 aa, Homo Sapiens
IIPPLFTV

SEQ ID NO: 17205 - protein, 8 aa, Homo Sapiens
ILDEVISL

SEQ ID NO: 17206 - protein, 8 aa, Homo Sapiens
ILKKCFKI

SEQ ID NO: 17207 - protein, 8 aa, Homo Sapiens
ILPPLLQL

SEQ ID NO: 17208 - protein, 8 aa, Homo Sapiens
ILPPPVHV

SEQ ID NO: 17209 - protein, 8 aa, Homo Sapiens
KLPDVYGV

SEQ ID NO: 17210 - protein, 8 aa, Homo Sapiens
KLPELWAL

SEQ ID NO: 17211 - protein, 8 aa, Homo Sapiens
KLPGVYEV

SEQ ID NO: 17212 - protein, 8 aa, Homo Sapiens
KLPPLPAV

SEQ ID NO: 17213 - protein, 8 aa, Homo Sapiens
KLWDPFSL

SEQ ID NO: 17214 - protein, 8 aa, Homo Sapiens
LAFCFITF

SEQ ID NO: 17215 - protein, 8 aa, Homo Sapiens
LEPDELAG

SEQ ID NO: 17216 - protein, 8 aa, Homo Sapiens
LLPPAFHL

SEQ ID NO: 17217 - protein, 8 aa, Homo Sapiens
LLPPIVKL

SEQ ID NO: 17218 - protein, 8 aa, Homo Sapiens
LLPPPTLL

SEQ ID NO: 17219 - protein, 8 aa, Homo Sapiens
LLPPTVSL

SEQ ID NO: 17220 - protein, 8 aa, Homo Sapiens
LLPPVFNI

SEQ ID NO: 17221 - protein, 8 aa, Homo Sapiens
LLVTWKQV

SEQ ID NO: 17222 - protein, 8 aa, Homo Sapiens
LMEHIHKL

SEQ ID NO: 17223 - protein, 8 aa, Homo Sapiens
PLGYEIQL

SEQ ID NO: 17224 - protein, 8 aa, Homo Sapiens
RLPELARV

SEQ ID NO: 17225 - protein, 8 aa, Homo Sapiens
SQPPVFKV

SEQ ID NO: 17226 - protein, 8 aa, Homo Sapiens
TEDELQDK

SEQ ID NO: 17227 - protein, 8 aa, Homo Sapiens
TTPPIWHL

SEQ ID NO: 17228 - protein, 8 aa, Homo Sapiens
VLPPTVYL

SEQ ID NO: 17229 - protein, 8 aa, Homo Sapiens
YLDEGFLL

SEQ ID NO: 17230 - protein, 9 aa, Homo Sapiens
AADEVFSHI

SEQ ID NO: 17231 - protein, 9 aa, Homo Sapiens
AADEVLAVL

SEQ ID NO: 17232 - protein, 9 aa, Homo Sapiens
AAPDIVPAL

SEQ ID NO: 17233 - protein, 9 aa, Homo Sapiens
AAPGGLIGV

SEQ ID NO: 17234 - protein, 9 aa, Homo Sapiens
AAPPAFPEV

SEQ ID NO: 17235 - protein, 9 aa, Homo Sapiens
AAPPEMYEV

SEQ ID NO: 17236 - protein, 9 aa, Homo Sapiens
AAPPNFHFV

SEQ ID NO: 17237 - protein, 9 aa, Homo Sapiens
AAPPPSVTV

SEQ ID NO: 17238 - protein, 9 aa, Homo Sapiens
AAPPTLPLV

SEQ ID NO: 17239 - protein, 9 aa, Homo Sapiens
AGDPVILYV

SEQ ID NO: 17240 - protein, 9 aa, Homo Sapiens
AIAPIIAAV

SEQ ID NO: 17241 - protein, 9 aa, Homo Sapiens
AIDAIFLTT

SEQ ID NO: 17242 - protein, 9 aa, Homo Sapiens
AIDDIYFQA

SEQ ID NO: 17243 - protein, 9 aa, Homo Sapiens
AIDDVDIDL

SEQ ID NO: 17244 - protein, 9 aa, Homo Sapiens
AIDEISKSL

SEQ ID NO: 17245 - protein, 9 aa, Homo Sapiens
AIDEISLFL

SEQ ID NO: 17246 - protein, 9 aa, Homo Sapiens
AIDEISQQL

SEQ ID NO: 17247 - protein, 9 aa, Homo Sapiens
AIDLIVQHV

SEQ ID NO: 17248 - protein, 9 aa, Homo Sapiens
AIDNQYTPL

SEQ ID NO: 17249 - protein, 9 aa, Homo Sapiens
AIDSLRDLR

SEQ ID NO: 17250 - protein, 9 aa, Homo Sapiens
AIEDLVKFV

SEQ ID NO: 17251 - protein, 9 aa, Homo Sapiens
AIEDTIFYL

SEQ ID NO: 17252 - protein, 9 aa, Homo Sapiens
AIFAVMSRV

SEQ ID NO: 17253 - protein, 9 aa, Homo Sapiens
AIIALFHLL

SEQ ID NO: 17254 - protein, 9 aa, Homo Sapiens
AIIDKYIKL

SEQ ID NO: 17255 - protein, 9 aa, Homo Sapiens
AIIEYMPLL

SEQ ID NO: 17256 - protein, 9 aa, Homo Sapiens
AIIGVLLNL

SEQ ID NO: 17257 - protein, 9 aa, Homo Sapiens
AILEKMPLV

SEQ ID NO: 17258 - protein, 9 aa, Homo Sapiens
AIMDIVIKV

SEQ ID NO: 17259 - protein, 9 aa, Homo Sapiens
AINPKLLQL

SEQ ID NO: 17260 - protein, 9 aa, Homo Sapiens
AIPENLPPL

SEQ ID NO: 17261 - protein, 9 aa, Homo Sapiens
AIPGVVEKV

SEQ ID NO: 17262 - protein, 9 aa, Homo Sapiens
AIQDKLFQV

SEQ ID NO: 17263 - protein, 9 aa, Homo Sapiens
AIVDKVPSV

SEQ ID NO: 17264 - protein, 9 aa, Homo Sapiens
AIVRSLPSV

SEQ ID NO: 17265 - protein, 9 aa, Homo Sapiens
AIYHVIMSV

SEQ ID NO: 17266 - protein, 9 aa, Homo Sapiens
ALAEALKEV

SEQ ID NO: 17267 - protein, 9 aa, Homo Sapiens
ALAEEVEQV

SEQ ID NO: 17268 - protein, 9 aa, Homo Sapiens
ALAEKFKEL

SEQ ID NO: 17269 - protein, 9 aa, Homo Sapiens
ALANQIPTV

SEQ ID NO: 17270 - protein, 9 aa, Homo Sapiens
ALATLIHQV

SEQ ID NO: 17271 - protein, 9 aa, Homo Sapiens
ALDATHQQL

SEQ ID NO: 17272 - protein, 9 aa, Homo Sapiens
ALDDEFITV

SEQ ID NO: 17273 - protein, 9 aa, Homo Sapiens
ALDDFSISV

SEQ ID NO: 17274 - protein, 9 aa, Homo Sapiens
ALDDFYKML

SEQ ID NO: 17275 - protein, 9 aa, Homo Sapiens
ALDDIIYRA

SEQ ID NO: 17276 - protein, 9 aa, Homo Sapiens
ALDDLIDTL

SEQ ID NO: 17277 - protein, 9 aa, Homo Sapiens
ALDDMISTL

SEQ ID NO: 17278 - protein, 9 aa, Homo Sapiens
ALDDRPQVL

SEQ ID NO: 17279 - protein, 9 aa, Homo Sapiens
ALDEEYLKV

SEQ ID NO: 17280 - protein, 9 aa, Homo Sapiens
ALDEFATKL

SEQ ID NO: 17281 - protein, 9 aa, Homo Sapiens
ALDEFFDIM

SEQ ID NO: 17282 - protein, 9 aa, Homo Sapiens
ALDEIAWLF

SEQ ID NO: 17283 - protein, 9 aa, Homo Sapiens
ALDENMDLL

SEQ ID NO: 17284 - protein, 9 aa, Homo Sapiens
ALDEPTTNL

SEQ ID NO: 17285 - protein, 9 aa, Homo Sapiens
ALDEQLVQV

SEQ ID NO: 17286 - protein, 9 aa, Homo Sapiens
ALDERSTIL

SEQ ID NO: 17287 - protein, 9 aa, Homo Sapiens
ALDEVFTKV

SEQ ID NO: 17288 - protein, 9 aa, Homo Sapiens
ALDEVIFSL

SEQ ID NO: 17289 - protein, 9 aa, Homo Sapiens
ALDEVVLKF

SEQ ID NO: 17290 - protein, 9 aa, Homo Sapiens
ALDGAWLMV

SEQ ID NO: 17291 - protein, 9 aa, Homo Sapiens
ALDGFLFVV

SEQ ID NO: 17292 - protein, 9 aa, Homo Sapiens
ALDGFVMVL

SEQ ID NO: 17293 - protein, 9 aa, Homo Sapiens
ALDHMVEYV

SEQ ID NO: 17294 - protein, 9 aa, Homo Sapiens
ALDILITNV

SEQ ID NO: 17295 - protein, 9 aa, Homo Sapiens
ALDKATVLL

SEQ ID NO: 17296 - protein, 9 aa, Homo Sapiens
ALDKIFNKV

SEQ ID NO: 17297 - protein, 9 aa, Homo Sapiens
ALDKITASL

SEQ ID NO: 17298 - protein, 9 aa, Homo Sapiens
ALDKVIEIV

SEQ ID NO: 17299 - protein, 9 aa, Homo Sapiens
ALDKWTNQL

SEQ ID NO: 17300 - protein, 9 aa, Homo Sapiens
ALDLKTLYL

SEQ ID NO: 17301 - protein, 9 aa, Homo Sapiens
ALDNDNYNL

SEQ ID NO: 17302 - protein, 9 aa, Homo Sapiens
ALDNFLDKL

SEQ ID NO: 17303 - protein, 9 aa, Homo Sapiens
ALDNGLFTL

SEQ ID NO: 17304 - protein, 9 aa, Homo Sapiens
ALDNNPLLL

SEQ ID NO: 17305 - protein, 9 aa, Homo Sapiens
ALDNVDARM

SEQ ID NO: 17306 - protein, 9 aa, Homo Sapiens
ALDPADQHL

SEQ ID NO: 17307 - protein, 9 aa, Homo Sapiens
ALDPASISV

SEQ ID NO: 17308 - protein, 9 aa, Homo Sapiens
ALDPMSVLL

SEQ ID NO: 17309 - protein, 9 aa, Homo Sapiens
ALDPNIATL

SEQ ID NO: 17310 - protein, 9 aa, Homo Sapiens
ALDPPGPTL

SEQ ID NO: 17311 - protein, 9 aa, Homo Sapiens
ALDQAYMRI

SEQ ID NO: 17312 - protein, 9 aa, Homo Sapiens
ALDQEIIEV

SEQ ID NO: 17313 - protein, 9 aa, Homo Sapiens
ALDQFLEGI

SEQ ID NO: 17314 - protein, 9 aa, Homo Sapiens
ALDREVQYL

SEQ ID NO: 17315 - protein, 9 aa, Homo Sapiens
ALDRIVEYL

SEQ ID NO: 17316 - protein, 9 aa, Homo Sapiens
ALDSAYKEL

SEQ ID NO: 17317 - protein, 9 aa, Homo Sapiens
ALDSGFNSV

SEQ ID NO: 17318 - protein, 9 aa, Homo Sapiens
ALDSKANNL

SEQ ID NO: 17319 - protein, 9 aa, Homo Sapiens
ALDSLVLQM

SEQ ID NO: 17320 - protein, 9 aa, Homo Sapiens
ALDTGWNEL

SEQ ID NO: 17321 - protein, 9 aa, Homo Sapiens
ALDTINILL

SEQ ID NO: 17322 - protein, 9 aa, Homo Sapiens
ALDTSNVMV

SEQ ID NO: 17323 - protein, 9 aa, Homo Sapiens
ALDTTRHEL

SEQ ID NO: 17324 - protein, 9 aa, Homo Sapiens
ALDTVWREL

SEQ ID NO: 17325 - protein, 9 aa, Homo Sapiens
ALDVMVSTF

SEQ ID NO: 17326 - protein, 9 aa, Homo Sapiens
ALDVPHAEL

SEQ ID NO: 17327 - protein, 9 aa, Homo Sapiens
ALDVPNTML

SEQ ID NO: 17328 - protein, 9 aa, Homo Sapiens
ALDVSFNKF

SEQ ID NO: 17329 - protein, 9 aa, Homo Sapiens
ALDVSHNLL

SEQ ID NO: 17330 - protein, 9 aa, Homo Sapiens
ALDWVTKKL

SEQ ID NO: 17331 - protein, 9 aa, Homo Sapiens
ALDYIVPCM

SEQ ID NO: 17332 - protein, 9 aa, Homo Sapiens
ALDYLQVSL

SEQ ID NO: 17333 - protein, 9 aa, Homo Sapiens
ALDYRPLYL

SEQ ID NO: 17334 - protein, 9 aa, Homo Sapiens
ALEAVVISV

SEQ ID NO: 17335 - protein, 9 aa, Homo Sapiens
ALEDMFDAL

SEQ ID NO: 17336 - protein, 9 aa, Homo Sapiens
ALEDRVWEL

SEQ ID NO: 17337 - protein, 9 aa, Homo Sapiens
ALEEELAGL

SEQ ID NO: 17338 - protein, 9 aa, Homo Sapiens
ALEEITKNM

SEQ ID NO: 17339 - protein, 9 aa, Homo Sapiens
ALEELTKAL

SEQ ID NO: 17340 - protein, 9 aa, Homo Sapiens
ALEEYVICV

SEQ ID NO: 17341 - protein, 9 aa, Homo Sapiens
ALESFLKQV

SEQ ID NO: 17342 - protein, 9 aa, Homo Sapiens
ALEVLVKGV

SEQ ID NO: 17343 - protein, 9 aa, Homo Sapiens
ALFDAQAQV

SEQ ID NO: 17344 - protein, 9 aa, Homo Sapiens
ALFEEVPEL

SEQ ID NO: 17345 - protein, 9 aa, Homo Sapiens
ALFGALFLA

SEQ ID NO: 17346 - protein, 9 aa, Homo Sapiens
ALFPSTAQA

SEQ ID NO: 17347 - protein, 9 aa, Homo Sapiens
ALFVKTKEV

SEQ ID NO: 17348 - protein, 9 aa, Homo Sapiens
ALHDILTEI

SEQ ID NO: 17349 - protein, 9 aa, Homo Sapiens
ALHDQLFYL

SEQ ID NO: 17350 - protein, 9 aa, Homo Sapiens
ALHEIYSYI

SEQ ID NO: 17351 - protein, 9 aa, Homo Sapiens
ALIEKLVEL

SEQ ID NO: 17352 - protein, 9 aa, Homo Sapiens
ALIQQATTV

SEQ ID NO: 17353 - protein, 9 aa, Homo Sapiens
ALITRIFGV

SEQ ID NO: 17354 - protein, 9 aa, Homo Sapiens
ALLDKLYAL

SEQ ID NO: 17355 - protein, 9 aa, Homo Sapiens
ALLDRIVSV

SEQ ID NO: 17356 - protein, 9 aa, Homo Sapiens
ALLELLHEL

SEQ ID NO: 17357 - protein, 9 aa, Homo Sapiens
ALLETVNRL

SEQ ID NO: 17358 - protein, 9 aa, Homo Sapiens
ALLNILSEV

SEQ ID NO: 17359 - protein, 9 aa, Homo Sapiens
ALLPYFVYV

SEQ ID NO: 17360 - protein, 9 aa, Homo Sapiens
ALLTYLEQV

SEQ ID NO: 17361 - protein, 9 aa, Homo Sapiens
ALMADMVYV

SEQ ID NO: 17362 - protein, 9 aa, Homo Sapiens
ALMPVLNQV

SEQ ID NO: 17363 - protein, 9 aa, Homo Sapiens
ALNEKLVNL

SEQ ID NO: 17364 - protein, 9 aa, Homo Sapiens
ALNELLQHV

SEQ ID NO: 17365 - protein, 9 aa, Homo Sapiens
ALNENINQV

SEQ ID NO: 17366 - protein, 9 aa, Homo Sapiens
ALNEQIARL

SEQ ID NO: 17367 - protein, 9 aa, Homo Sapiens
ALPATVWSL

SEQ ID NO: 17368 - protein, 9 aa, Homo Sapiens
ALPDSMVSV

SEQ ID NO: 17369 - protein, 9 aa, Homo Sapiens
ALPDWCEQL

SEQ ID NO: 17370 - protein, 9 aa, Homo Sapiens
ALPEAIAAL

SEQ ID NO: 17371 - protein, 9 aa, Homo Sapiens
ALPEDLVEV

SEQ ID NO: 17372 - protein, 9 aa, Homo Sapiens
ALPEEVQEL

SEQ ID NO: 17373 - protein, 9 aa, Homo Sapiens
ALPEMEIHL

SEQ ID NO: 17374 - protein, 9 aa, Homo Sapiens
ALPENPPAI

SEQ ID NO: 17375 - protein, 9 aa, Homo Sapiens
ALPENVILV

SEQ ID NO: 17376 - protein, 9 aa, Homo Sapiens
ALPEVLAVI

SEQ ID NO: 17377 - protein, 9 aa, Homo Sapiens
ALPGATVTL

SEQ ID NO: 17378 - protein, 9 aa, Homo Sapiens
ALPGKPPFL

SEQ ID NO: 17379 - protein, 9 aa, Homo Sapiens
ALPGPPAQL

SEQ ID NO: 17380 - protein, 9 aa, Homo Sapiens
ALPGVAVSM

SEQ ID NO: 17381 - protein, 9 aa, Homo Sapiens
ALPGVGPKM

SEQ ID NO: 17382 - protein, 9 aa, Homo Sapiens
ALPHVVPTL

SEQ ID NO: 17383 - protein, 9 aa, Homo Sapiens
ALPKIILAV

SEQ ID NO: 17384 - protein, 9 aa, Homo Sapiens
ALPNGVPKA

SEQ ID NO: 17385 - protein, 9 aa, Homo Sapiens
ALPNVYEVI

SEQ ID NO: 17386 - protein, 9 aa, Homo Sapiens
ALPPDLSYI

SEQ ID NO: 17387 - protein, 9 aa, Homo Sapiens
ALPPKPRFL

SEQ ID NO: 17388 - protein, 9 aa, Homo Sapiens
ALPPPPPAA

SEQ ID NO: 17389 - protein, 9 aa, Homo Sapiens
ALPPVLTTV

SEQ ID NO: 17390 - protein, 9 aa, Homo Sapiens
ALPPYAPKL

SEQ ID NO: 17391 - protein, 9 aa, Homo Sapiens
ALPQEFAAL

SEQ ID NO: 17392 - protein, 9 aa, Homo Sapiens
ALPQFFNNV

SEQ ID NO: 17393 - protein, 9 aa, Homo Sapiens
ALPRLLPAL

SEQ ID NO: 17394 - protein, 9 aa, Homo Sapiens
ALPTASPGL

SEQ ID NO: 17395 - protein, 9 aa, Homo Sapiens
ALPTLIPSV

SEQ ID NO: 17396 - protein, 9 aa, Homo Sapiens
ALPTVLVGV

SEQ ID NO: 17397 - protein, 9 aa, Homo Sapiens
ALPVKLIGM

SEQ ID NO: 17398 - protein, 9 aa, Homo Sapiens
ALPVSLPQI

SEQ ID NO: 17399 - protein, 9 aa, Homo Sapiens
ALQEKLWNV

SEQ ID NO: 17400 - protein, 9 aa, Homo Sapiens
ALQEMVHQV

SEQ ID NO: 17401 - protein, 9 aa, Homo Sapiens
ALSDIFQAV

SEQ ID NO: 17402 - protein, 9 aa, Homo Sapiens
ALSEKIVSV

SEQ ID NO: 17403 - protein, 9 aa, Homo Sapiens
ALSFKTGIA

SEQ ID NO: 17404 - protein, 9 aa, Homo Sapiens
ALTPVVVTL

SEQ ID NO: 17405 - protein, 9 aa, Homo Sapiens
ALWDKLFNL

SEQ ID NO: 17406 - protein, 9 aa, Homo Sapiens
ALWEALLNT

SEQ ID NO: 17407 - protein, 9 aa, Homo Sapiens
ALWGFFPVL

SEQ ID NO: 17408 - protein, 9 aa, Homo Sapiens
ALWSLPLYL

SEQ ID NO: 17409 - protein, 9 aa, Homo Sapiens
ALYAVIEKA

SEQ ID NO: 17410 - protein, 9 aa, Homo Sapiens
ALYPVLEKA

SEQ ID NO: 17411 - protein, 9 aa, Homo Sapiens
ALYPVVSAA

SEQ ID NO: 17412 - protein, 9 aa, Homo Sapiens
ALYVAVVNV

SEQ ID NO: 17413 - protein, 9 aa, Homo Sapiens
AMDLIISTL

SEQ ID NO: 17414 - protein, 9 aa, Homo Sapiens
AMDPAVPNM

SEQ ID NO: 17415 - protein, 9 aa, Homo Sapiens
AMDPIAELL

SEQ ID NO: 17416 - protein, 9 aa, Homo Sapiens
AMDSVLHTL

SEQ ID NO: 17417 - protein, 9 aa, Homo Sapiens
AMDVVYALK

SEQ ID NO: 17418 - protein, 9 aa, Homo Sapiens
AMFENFVSV

SEQ ID NO: 17419 - protein, 9 aa, Homo Sapiens
AMINRFQFV

SEQ ID NO: 17420 - protein, 9 aa, Homo Sapiens
AMNDILAQV

SEQ ID NO: 17421 - protein, 9 aa, Homo Sapiens
AMPDSPAEV

SEQ ID NO: 17422 - protein, 9 aa, Homo Sapiens
AMPQPVPTA

SEQ ID NO: 17423 - protein, 9 aa, Homo Sapiens
AMPQTVYGV

SEQ ID NO: 17424 - protein, 9 aa, Homo Sapiens
AMPSWFDII

SEQ ID NO: 17425 - protein, 9 aa, Homo Sapiens
AMQDRYMEV

SEQ ID NO: 17426 - protein, 9 aa, Homo Sapiens
AQPPWLPGL

SEQ ID NO: 17427 - protein, 9 aa, Homo Sapiens
AQPVGFLTV

SEQ ID NO: 17428 - protein, 9 aa, Homo Sapiens
ASPPLITNV

SEQ ID NO: 17429 - protein, 9 aa, Homo Sapiens
ATDAILATL

SEQ ID NO: 17430 - protein, 9 aa, Homo Sapiens
ATDDSLHQL

SEQ ID NO: 17431 - protein, 9 aa, Homo Sapiens
ATDNIILTV

SEQ ID NO: 17432 - protein, 9 aa, Homo Sapiens
ATDPVYKTV

SEQ ID NO: 17433 - protein, 9 aa, Homo Sapiens
ATMPVVPSV

SEQ ID NO: 17434 - protein, 9 aa, Homo Sapiens
ATPHPFPAV

SEQ ID NO: 17435 - protein, 9 aa, Homo Sapiens
ATPMPTPSV

SEQ ID NO: 17436 - protein, 9 aa, Homo Sapiens
AVDAAIAAL

SEQ ID NO: 17437 - protein, 9 aa, Homo Sapiens
AVDAFFTAV

SEQ ID NO: 17438 - protein, 9 aa, Homo Sapiens
AVDAIFTRI

SEQ ID NO: 17439 - protein, 9 aa, Homo Sapiens
AVDAIMLEL

SEQ ID NO: 17440 - protein, 9 aa, Homo Sapiens
AVDALIDSM

SEQ ID NO: 17441 - protein, 9 aa, Homo Sapiens
AVDAVEEFL

SEQ ID NO: 17442 - protein, 9 aa, Homo Sapiens
AVDAVIAEL

SEQ ID NO: 17443 - protein, 9 aa, Homo Sapiens
AVDDFIEKL

SEQ ID NO: 17444 - protein, 9 aa, Homo Sapiens
AVDDIMVTL

SEQ ID NO: 17445 - protein, 9 aa, Homo Sapiens
AVDDVPFSI

SEQ ID NO: 17446 - protein, 9 aa, Homo Sapiens
AVDEAVILL

SEQ ID NO: 17447 - protein, 9 aa, Homo Sapiens
AVDEFLLLL

SEQ ID NO: 17448 - protein, 9 aa, Homo Sapiens
AVDEFYSKI

SEQ ID NO: 17449 - protein, 9 aa, Homo Sapiens
AVDELFTSL

SEQ ID NO: 17450 - protein, 9 aa, Homo Sapiens
AVDEVVLKF

SEQ ID NO: 17451 - protein, 9 aa, Homo Sapiens
AVDGHFLCL

SEQ ID NO: 17452 - protein, 9 aa, Homo Sapiens
AVDGISLHL

SEQ ID NO: 17453 - protein, 9 aa, Homo Sapiens
AVDGVIFQL

SEQ ID NO: 17454 - protein, 9 aa, Homo Sapiens
AVDGVIISL

SEQ ID NO: 17455 - protein, 9 aa, Homo Sapiens
AVDMVVTEV

SEQ ID NO: 17456 - protein, 9 aa, Homo Sapiens
AVDNILLKL

SEQ ID NO: 17457 - protein, 9 aa, Homo Sapiens
AVDNLVERL

SEQ ID NO: 17458 - protein, 9 aa, Homo Sapiens
AVDNVAHTI

SEQ ID NO: 17459 - protein, 9 aa, Homo Sapiens
AVDPGLPSV

SEQ ID NO: 17460 - protein, 9 aa, Homo Sapiens
AVDPLLALL

SEQ ID NO: 17461 - protein, 9 aa, Homo Sapiens
AVDQVIKAV

SEQ ID NO: 17462 - protein, 9 aa, Homo Sapiens
AVDRAITHL

SEQ ID NO: 17463 - protein, 9 aa, Homo Sapiens
AVDSVLVKL

SEQ ID NO: 17464 - protein, 9 aa, Homo Sapiens
AVDSVVSLL

SEQ ID NO: 17465 - protein, 9 aa, Homo Sapiens
AVDTIVAIM

SEQ ID NO: 17466 - protein, 9 aa, Homo Sapiens
AVDVVAIGL

SEQ ID NO: 17467 - protein, 9 aa, Homo Sapiens
AVDWIFSHI

SEQ ID NO: 17468 - protein, 9 aa, Homo Sapiens
AVDWLHELL

SEQ ID NO: 17469 - protein, 9 aa, Homo Sapiens
AVDYFFVEL

SEQ ID NO: 17470 - protein, 9 aa, Homo Sapiens
AVDYITVAL

SEQ ID NO: 17471 - protein, 9 aa, Homo Sapiens
AVDYVIRHL

SEQ ID NO: 17472 - protein, 9 aa, Homo Sapiens
AVEAIVKNV

SEQ ID NO: 17473 - protein, 9 aa, Homo Sapiens
AVFGLTTCI

SEQ ID NO: 17474 - protein, 9 aa, Homo Sapiens
AVFPHLTVV

SEQ ID NO: 17475 - protein, 9 aa, Homo Sapiens
AVHETLVAV

SEQ ID NO: 17476 - protein, 9 aa, Homo Sapiens
AVHKLLTLI

SEQ ID NO: 17477 - protein, 9 aa, Homo Sapiens
AVLDVLLCL

SEQ ID NO: 17478 - protein, 9 aa, Homo Sapiens
AVMDTLVSV

SEQ ID NO: 17479 - protein, 9 aa, Homo Sapiens
AVPATLPEL

SEQ ID NO: 17480 - protein, 9 aa, Homo Sapiens
AVPAVLPSF

SEQ ID NO: 17481 - protein, 9 aa, Homo Sapiens
AVPEVAVYL

SEQ ID NO: 17482 - protein, 9 aa, Homo Sapiens
AVPFSLDSV

SEQ ID NO: 17483 - protein, 9 aa, Homo Sapiens
AVPPPPAPL

SEQ ID NO: 17484 - protein, 9 aa, Homo Sapiens
AVPSWFVRV

SEQ ID NO: 17485 - protein, 9 aa, Homo Sapiens
AVVAHAYYL

SEQ ID NO: 17486 - protein, 9 aa, Homo Sapiens
AVVAPTSTV

SEQ ID NO: 17487 - protein, 9 aa, Homo Sapiens
AVVEFLTSV

SEQ ID NO: 17488 - protein, 9 aa, Homo Sapiens
AVVPPVNGV

SEQ ID NO: 17489 - protein, 9 aa, Homo Sapiens
CLEKEVAAL

SEQ ID NO: 17490 - protein, 9 aa, Homo Sapiens
CLPPLVPAI

SEQ ID NO: 17491 - protein, 9 aa, Homo Sapiens
CLYEIYPEL

SEQ ID NO: 17492 - protein, 9 aa, Homo Sapiens
DLDDLYVHL

SEQ ID NO: 17493 - protein, 9 aa, Homo Sapiens
EIKDKTAEL

SEQ ID NO: 17494 - protein, 9 aa, Homo Sapiens
ELDKIYETL

SEQ ID NO: 17495 - protein, 9 aa, Homo Sapiens
ELDNMFVHL

SEQ ID NO: 17496 - protein, 9 aa, Homo Sapiens
ELPDYYLTI

SEQ ID NO: 17497 - protein, 9 aa, Homo Sapiens
ELPKYLPAL

SEQ ID NO: 17498 - protein, 9 aa, Homo Sapiens
EMPSVFQNV

SEQ ID NO: 17499 - protein, 9 aa, Homo Sapiens
ETLDPGPPL

SEQ ID NO: 17500 - protein, 9 aa, Homo Sapiens
EVDDILAAV

SEQ ID NO: 17501 - protein, 9 aa, Homo Sapiens
EVISKLYAV

SEQ ID NO: 17502 - protein, 9 aa, Homo Sapiens
FADAVQELL

SEQ ID NO: 17503 - protein, 9 aa, Homo Sapiens
FADGVILLL

SEQ ID NO: 17504 - protein, 9 aa, Homo Sapiens
FADGVYLVL

SEQ ID NO: 17505 - protein, 9 aa, Homo Sapiens
FADPIAANL

SEQ ID NO: 17506 - protein, 9 aa, Homo Sapiens
FAIPMIHAV

SEQ ID NO: 17507 - protein, 9 aa, Homo Sapiens
FAPGDLPEL

SEQ ID NO: 17508 - protein, 9 aa, Homo Sapiens
FAPPQPVAA

SEQ ID NO: 17509 - protein, 9 aa, Homo Sapiens
FASPTQVFF

SEQ ID NO: 17510 - protein, 9 aa, Homo Sapiens
FAVTEYPTL

SEQ ID NO: 17511 - protein, 9 aa, Homo Sapiens
FGPAKLPRL

SEQ ID NO: 17512 - protein, 9 aa, Homo Sapiens
FGPPIPKGV

SEQ ID NO: 17513 - protein, 9 aa, Homo Sapiens
FGVPLIVHV

SEQ ID NO: 17514 - protein, 9 aa, Homo Sapiens
FIDAVYKLL

SEQ ID NO: 17515 - protein, 9 aa, Homo Sapiens
FIDDANYSV

SEQ ID NO: 17516 - protein, 9 aa, Homo Sapiens
FIDDIELMF

SEQ ID NO: 17517 - protein, 9 aa, Homo Sapiens
FIDDLPQEI

SEQ ID NO: 17518 - protein, 9 aa, Homo Sapiens
FIDDVVSAV

SEQ ID NO: 17519 - protein, 9 aa, Homo Sapiens
FIDEAYVEV

SEQ ID NO: 17520 - protein, 9 aa, Homo Sapiens
FIDEELEKM

SEQ ID NO: 17521 - protein, 9 aa, Homo Sapiens
FIDEYVETV

SEQ ID NO: 17522 - protein, 9 aa, Homo Sapiens
FIDFTYVRV

SEQ ID NO: 17523 - protein, 9 aa, Homo Sapiens
FIDGHFVEM

SEQ ID NO: 17524 - protein, 9 aa, Homo Sapiens
FIDGNVESL

SEQ ID NO: 17525 - protein, 9 aa, Homo Sapiens
FIDIVVENL

SEQ ID NO: 17526 - protein, 9 aa, Homo Sapiens
FIDKNNDLL

SEQ ID NO: 17527 - protein, 9 aa, Homo Sapiens
FIDKQLELL

SEQ ID NO: 17528 - protein, 9 aa, Homo Sapiens
FIDNLDERL

SEQ ID NO: 17529 - protein, 9 aa, Homo Sapiens
FIDQQQFYL

SEQ ID NO: 17530 - protein, 9 aa, Homo Sapiens
FIDSVLVKI

SEQ ID NO: 17531 - protein, 9 aa, Homo Sapiens
FIDTAQHML

SEQ ID NO: 17532 - protein, 9 aa, Homo Sapiens
FIDTLHHTL

SEQ ID NO: 17533 - protein, 9 aa, Homo Sapiens
FIDVGGYKL

SEQ ID NO: 17534 - protein, 9 aa, Homo Sapiens
FIEDIVKLI

SEQ ID NO: 17535 - protein, 9 aa, Homo Sapiens
FIEDYLKRV

SEQ ID NO: 17536 - protein, 9 aa, Homo Sapiens
FIFSDTHEL

SEQ ID NO: 17537 - protein, 9 aa, Homo Sapiens
FIHQHFVEV

SEQ ID NO: 17538 - protein, 9 aa, Homo Sapiens
FIIQGLRSV

SEQ ID NO: 17539 - protein, 9 aa, Homo Sapiens
FILDFYEKV

SEQ ID NO: 17540 - protein, 9 aa, Homo Sapiens
FILEKIEYL

SEQ ID NO: 17541 - protein, 9 aa, Homo Sapiens
FILGPSHHV

SEQ ID NO: 17542 - protein, 9 aa, Homo Sapiens
FILPIGATV

SEQ ID NO: 17543 - protein, 9 aa, Homo Sapiens
FINEKKYHL

SEQ ID NO: 17544 - protein, 9 aa, Homo Sapiens
FINELITEL

SEQ ID NO: 17545 - protein, 9 aa, Homo Sapiens
FINIVVHSV

SEQ ID NO: 17546 - protein, 9 aa, Homo Sapiens
FINPPIGTV

SEQ ID NO: 17547 - protein, 9 aa, Homo Sapiens
FIPDQPFRV

SEQ ID NO: 17548 - protein, 9 aa, Homo Sapiens
FIPLPFAEA

SEQ ID NO: 17549 - protein, 9 aa, Homo Sapiens
FIPPAFTNV

SEQ ID NO: 17550 - protein, 9 aa, Homo Sapiens
FIQSIISTV

SEQ ID NO: 17551 - protein, 9 aa, Homo Sapiens
FISEFEHRV

SEQ ID NO: 17552 - protein, 9 aa, Homo Sapiens
FISNVKTAL

SEQ ID NO: 17553 - protein, 9 aa, Homo Sapiens
FIVEETLPL

SEQ ID NO: 17554 - protein, 9 aa, Homo Sapiens
FIWPMLIHI

SEQ ID NO: 17555 - protein, 9 aa, Homo Sapiens
FLAHIYTEL

SEQ ID NO: 17556 - protein, 9 aa, Homo Sapiens
FLANVSTVL

SEQ ID NO: 17557 - protein, 9 aa, Homo Sapiens
FLDALIVSM

SEQ ID NO: 17558 - protein, 9 aa, Homo Sapiens
FLDAPAVRV

SEQ ID NO: 17559 - protein, 9 aa, Homo Sapiens
FLDASGAKL

SEQ ID NO: 17560 - protein, 9 aa, Homo Sapiens
FLDDFIACV

SEQ ID NO: 17561 - protein, 9 aa, Homo Sapiens
FLDDLFVFM

SEQ ID NO: 17562 - protein, 9 aa, Homo Sapiens
FLDDLGLKF

SEQ ID NO: 17563 - protein, 9 aa, Homo Sapiens
FLDDLSQKL

SEQ ID NO: 17564 - protein, 9 aa, Homo Sapiens
FLDDNQIIT

SEQ ID NO: 17565 - protein, 9 aa, Homo Sapiens
FLDDPIWRG

SEQ ID NO: 17566 - protein, 9 aa, Homo Sapiens
FLDDQETRL

SEQ ID NO: 17567 - protein, 9 aa, Homo Sapiens
FLDDSTLRF

SEQ ID NO: 17568 - protein, 9 aa, Homo Sapiens
FLDDVVHSL

SEQ ID NO: 17569 - protein, 9 aa, Homo Sapiens
FLDEDDMSL

SEQ ID NO: 17570 - protein, 9 aa, Homo Sapiens
FLDEEVKLI

SEQ ID NO: 17571 - protein, 9 aa, Homo Sapiens
FLDEFVTFL

SEQ ID NO: 17572 - protein, 9 aa, Homo Sapiens
FLDEKTHEL

SEQ ID NO: 17573 - protein, 9 aa, Homo Sapiens
FLDELAQKL

SEQ ID NO: 17574 - protein, 9 aa, Homo Sapiens
FLDENVHFA

SEQ ID NO: 17575 - protein, 9 aa, Homo Sapiens
FLDENVHFF

SEQ ID NO: 17576 - protein, 9 aa, Homo Sapiens
FLDEPTNHL

SEQ ID NO: 17577 - protein, 9 aa, Homo Sapiens
FLDERTPRL

SEQ ID NO: 17578 - protein, 9 aa, Homo Sapiens
FLDEWLYKF

SEQ ID NO: 17579 - protein, 9 aa, Homo Sapiens
FLDFAPHYF

SEQ ID NO: 17580 - protein, 9 aa, Homo Sapiens
FLDFLWHNM

SEQ ID NO: 17581 - protein, 9 aa, Homo Sapiens
FLDGIYKTI

SEQ ID NO: 17582 - protein, 9 aa, Homo Sapiens
FLDGNELTL

SEQ ID NO: 17583 - protein, 9 aa, Homo Sapiens
FLDGNEMTL

SEQ ID NO: 17584 - protein, 9 aa, Homo Sapiens
FLDGYVSQL

SEQ ID NO: 17585 - protein, 9 aa, Homo Sapiens
FLDHEMVFL

SEQ ID NO: 17586 - protein, 9 aa, Homo Sapiens
FLDHIIASV

SEQ ID NO: 17587 - protein, 9 aa, Homo Sapiens
FLDHLYVGI

SEQ ID NO: 17588 - protein, 9 aa, Homo Sapiens
FLDHVMYTI

SEQ ID NO: 17589 - protein, 9 aa, Homo Sapiens
FLDHVRTSF

SEQ ID NO: 17590 - protein, 9 aa, Homo Sapiens
FLDISRPKM

SEQ ID NO: 17591 - protein, 9 aa, Homo Sapiens
FLDKELTGL

SEQ ID NO: 17592 - protein, 9 aa, Homo Sapiens
FLDKILVKL

SEQ ID NO: 17593 - protein, 9 aa, Homo Sapiens
FLDKQGFYV

SEQ ID NO: 17594 - protein, 9 aa, Homo Sapiens
FLDKVANGL

SEQ ID NO: 17595 - protein, 9 aa, Homo Sapiens
FLDLGPPGI

SEQ ID NO: 17596 - protein, 9 aa, Homo Sapiens
FLDLGYNRL

SEQ ID NO: 17597 - protein, 9 aa, Homo Sapiens
FLDLLQERI

SEQ ID NO: 17598 - protein, 9 aa, Homo Sapiens
FLDLPEPLL

SEQ ID NO: 17599 - protein, 9 aa, Homo Sapiens
FLDLPVDTL

SEQ ID NO: 17600 - protein, 9 aa, Homo Sapiens
FLDLTQLEL

SEQ ID NO: 17601 - protein, 9 aa, Homo Sapiens
FLDMNFQSL

SEQ ID NO: 17602 - protein, 9 aa, Homo Sapiens
FLDMTNWNL

SEQ ID NO: 17603 - protein, 9 aa, Homo Sapiens
FLDNERHEV

SEQ ID NO: 17604 - protein, 9 aa, Homo Sapiens
FLDNLHINL

SEQ ID NO: 17605 - protein, 9 aa, Homo Sapiens
FLDNMFHVL

SEQ ID NO: 17606 - protein, 9 aa, Homo Sapiens
FLDNSFEKV

SEQ ID NO: 17607 - protein, 9 aa, Homo Sapiens
FLDNSLDTV

SEQ ID NO: 17608 - protein, 9 aa, Homo Sapiens
FLDPDMYSL

SEQ ID NO: 17609 - protein, 9 aa, Homo Sapiens
FLDPGGPMM

SEQ ID NO: 17610 - protein, 9 aa, Homo Sapiens
FLDPIMSTL

SEQ ID NO: 17611 - protein, 9 aa, Homo Sapiens
FLDPITGTF

SEQ ID NO: 17612 - protein, 9 aa, Homo Sapiens
FLDQHGHNL

SEQ ID NO: 17613 - protein, 9 aa, Homo Sapiens
FLDQHPFSF

SEQ ID NO: 17614 - protein, 9 aa, Homo Sapiens
FLDQQAILF

SEQ ID NO: 17615 - protein, 9 aa, Homo Sapiens
FLDQVAHKL

SEQ ID NO: 17616 - protein, 9 aa, Homo Sapiens
FLDQVTGFL

SEQ ID NO: 17617 - protein, 9 aa, Homo Sapiens
FLDRESIKL

SEQ ID NO: 17618 - protein, 9 aa, Homo Sapiens
FLDRPQQWL

SEQ ID NO: 17619 - protein, 9 aa, Homo Sapiens
FLDSAYFRL

SEQ ID NO: 17620 - protein, 9 aa, Homo Sapiens
FLDSELSML

SEQ ID NO: 17621 - protein, 9 aa, Homo Sapiens
FLDSEVSEL

SEQ ID NO: 17622 - protein, 9 aa, Homo Sapiens
FLDSLIYGA

SEQ ID NO: 17623 - protein, 9 aa, Homo Sapiens
FLDSLRDLI

SEQ ID NO: 17624 - protein, 9 aa, Homo Sapiens
FLDSQTATF

SEQ ID NO: 17625 - protein, 9 aa, Homo Sapiens
FLDSSTLQL

SEQ ID NO: 17626 - protein, 9 aa, Homo Sapiens
FLDSTSPLL

SEQ ID NO: 17627 - protein, 9 aa, Homo Sapiens
FLDTIATRF

SEQ ID NO: 17628 - protein, 9 aa, Homo Sapiens
FLDTIKSNL

SEQ ID NO: 17629 - protein, 9 aa, Homo Sapiens
FLDTLKDLI

SEQ ID NO: 17630 - protein, 9 aa, Homo Sapiens
FLDTLLEEL

SEQ ID NO: 17631 - protein, 9 aa, Homo Sapiens
FLDVDFEKL

SEQ ID NO: 17632 - protein, 9 aa, Homo Sapiens
FLDWPQGTF

SEQ ID NO: 17633 - protein, 9 aa, Homo Sapiens
FLDYQLDEL

SEQ ID NO: 17634 - protein, 9 aa, Homo Sapiens
FLDYTTDNM

SEQ ID NO: 17635 - protein, 9 aa, Homo Sapiens
FLEDLVPYL

SEQ ID NO: 17636 - protein, 9 aa, Homo Sapiens
FLEEEVYPL

SEQ ID NO: 17637 - protein, 9 aa, Homo Sapiens
FLEEISPHL

SEQ ID NO: 17638 - protein, 9 aa, Homo Sapiens
FLEENISEV

SEQ ID NO: 17639 - protein, 9 aa, Homo Sapiens
FLEEYTSQL

SEQ ID NO: 17640 - protein, 9 aa, Homo Sapiens
FLEKLLPPV

SEQ ID NO: 17641 - protein, 9 aa, Homo Sapiens
FLENEHQQL

SEQ ID NO: 17642 - protein, 9 aa, Homo Sapiens
FLESCPPDL

SEQ ID NO: 17643 - protein, 9 aa, Homo Sapiens
FLETNVPLL

SEQ ID NO: 17644 - protein, 9 aa, Homo Sapiens
FLFDHLLTL

SEQ ID NO: 17645 - protein, 9 aa, Homo Sapiens
FLFDRPMHV

SEQ ID NO: 17646 - protein, 9 aa, Homo Sapiens
FLFDTQHFI

SEQ ID NO: 17647 - protein, 9 aa, Homo Sapiens
FLFEDFSKA

SEQ ID NO: 17648 - protein, 9 aa, Homo Sapiens
FLFELPSRL

SEQ ID NO: 17649 - protein, 9 aa, Homo Sapiens
FLFEPVVKA

SEQ ID NO: 17650 - protein, 9 aa, Homo Sapiens
FLFGEVHKA

SEQ ID NO: 17651 - protein, 9 aa, Homo Sapiens
FLFLDRTYV

SEQ ID NO: 17652 - protein, 9 aa, Homo Sapiens
FLFNTENKL

SEQ ID NO: 17653 - protein, 9 aa, Homo Sapiens
FLFPVYPLI

SEQ ID NO: 17654 - protein, 9 aa, Homo Sapiens
FLFSKFIEL

SEQ ID NO: 17655 - protein, 9 aa, Homo Sapiens
FLGDPPPGL

SEQ ID NO: 17656 - protein, 9 aa, Homo Sapiens
FLGEKIASV

SEQ ID NO: 17657 - protein, 9 aa, Homo Sapiens
FLGIHVFLV

SEQ ID NO: 17658 - protein, 9 aa, Homo Sapiens
FLHEATARL

SEQ ID NO: 17659 - protein, 9 aa, Homo Sapiens
FLHEATVRL

SEQ ID NO: 17660 - protein, 9 aa, Homo Sapiens
FLHEVLWEL

SEQ ID NO: 17661 - protein, 9 aa, Homo Sapiens
FLIAQLPKL

SEQ ID NO: 17662 - protein, 9 aa, Homo Sapiens
FLIEEQKIV

SEQ ID NO: 17663 - protein, 9 aa, Homo Sapiens
FLIGQGAHV

SEQ ID NO: 17664 - protein, 9 aa, Homo Sapiens
FLINFIHTL

SEQ ID NO: 17665 - protein, 9 aa, Homo Sapiens
FLIPIYHQV

SEQ ID NO: 17666 - protein, 9 aa, Homo Sapiens
FLIPKFFEL

SEQ ID NO: 17667 - protein, 9 aa, Homo Sapiens
FLKDKFVEI

SEQ ID NO: 17668 - protein, 9 aa, Homo Sapiens
FLLDKKIGV

SEQ ID NO: 17669 - protein, 9 aa, Homo Sapiens
FLLEKGYEV

SEQ ID NO: 17670 - protein, 9 aa, Homo Sapiens
FLLEKPFSV

SEQ ID NO: 17671 - protein, 9 aa, Homo Sapiens
FLLETVVRV

SEQ ID NO: 17672 - protein, 9 aa, Homo Sapiens
FLLHIQQQV

SEQ ID NO: 17673 - protein, 9 aa, Homo Sapiens
FLLPILSQI

SEQ ID NO: 17674 - protein, 9 aa, Homo Sapiens
FLLPKFHGV

SEQ ID NO: 17675 - protein, 9 aa, Homo Sapiens
FLLPMFERL

SEQ ID NO: 17676 - protein, 9 aa, Homo Sapiens
FLLPVIMRA

SEQ ID NO: 17677 - protein, 9 aa, Homo Sapiens
FLLPVINEM

SEQ ID NO: 17678 - protein, 9 aa, Homo Sapiens
FLLQHQTFL

SEQ ID NO: 17679 - protein, 9 aa, Homo Sapiens
FLLVTEVHL

SEQ ID NO: 17680 - protein, 9 aa, Homo Sapiens
FLMDFIHQV

SEQ ID NO: 17681 - protein, 9 aa, Homo Sapiens
FLMNEVIKL

SEQ ID NO: 17682 - protein, 9 aa, Homo Sapiens
FLNDEVWNL

SEQ ID NO: 17683 - protein, 9 aa, Homo Sapiens
FLNDIFERI

SEQ ID NO: 17684 - protein, 9 aa, Homo Sapiens
FLNDPGHLL

SEQ ID NO: 17685 - protein, 9 aa, Homo Sapiens
FLNKEITSV

SEQ ID NO: 17686 - protein, 9 aa, Homo Sapiens
FLPAGIVAV

SEQ ID NO: 17687 - protein, 9 aa, Homo Sapiens
FLPALITAV

SEQ ID NO: 17688 - protein, 9 aa, Homo Sapiens
FLPDHPIVL

SEQ ID NO: 17689 - protein, 9 aa, Homo Sapiens
FLPDLQITM

SEQ ID NO: 17690 - protein, 9 aa, Homo Sapiens
FLPEAFDFI

SEQ ID NO: 17691 - protein, 9 aa, Homo Sapiens
FLPEALDFV

SEQ ID NO: 17692 - protein, 9 aa, Homo Sapiens
FLPEAPAEL

SEQ ID NO: 17693 - protein, 9 aa, Homo Sapiens
FLPEEFMKT

SEQ ID NO: 17694 - protein, 9 aa, Homo Sapiens
FLPEEQDRL

SEQ ID NO: 17695 - protein, 9 aa, Homo Sapiens
FLPEGVNKL

SEQ ID NO: 17696 - protein, 9 aa, Homo Sapiens
FLPEPMGTA

SEQ ID NO: 17697 - protein, 9 aa, Homo Sapiens
FLPESVAVV

SEQ ID NO: 17698 - protein, 9 aa, Homo Sapiens
FLPESYLLL

SEQ ID NO: 17699 - protein, 9 aa, Homo Sapiens
FLPEVIYKM

SEQ ID NO: 17700 - protein, 9 aa, Homo Sapiens
FLPFLTTEV

SEQ ID NO: 17701 - protein, 9 aa, Homo Sapiens
FLPFPLPLF

SEQ ID NO: 17702 - protein, 9 aa, Homo Sapiens
FLPFSFEHI

SEQ ID NO: 17703 - protein, 9 aa, Homo Sapiens
FLPHELPLL

SEQ ID NO: 17704 - protein, 9 aa, Homo Sapiens
FLPLHYDYL

SEQ ID NO: 17705 - protein, 9 aa, Homo Sapiens
FLPLIHVYL

SEQ ID NO: 17706 - protein, 9 aa, Homo Sapiens
FLPLIVNTV

SEQ ID NO: 17707 - protein, 9 aa, Homo Sapiens
FLPLKWSLA

SEQ ID NO: 17708 - protein, 9 aa, Homo Sapiens
FLPLPVVQL

SEQ ID NO: 17709 - protein, 9 aa, Homo Sapiens
FLPNAPKAL

SEQ ID NO: 17710 - protein, 9 aa, Homo Sapiens
FLPPAQVTV

SEQ ID NO: 17711 - protein, 9 aa, Homo Sapiens
FLPPEVNQL

SEQ ID NO: 17712 - protein, 9 aa, Homo Sapiens
FLPPFPAHL

SEQ ID NO: 17713 - protein, 9 aa, Homo Sapiens
FLPPGDFLV

SEQ ID NO: 17714 - protein, 9 aa, Homo Sapiens
FLPPLPTSV

SEQ ID NO: 17715 - protein, 9 aa, Homo Sapiens
FLPPNMQGL

SEQ ID NO: 17716 - protein, 9 aa, Homo Sapiens
FLPPPFPPP

SEQ ID NO: 17717 - protein, 9 aa, Homo Sapiens
FLPPSFPIV

SEQ ID NO: 17718 - protein, 9 aa, Homo Sapiens
FLPPVLLKL

SEQ ID NO: 17719 - protein, 9 aa, Homo Sapiens
FLPPYTFQI

SEQ ID NO: 17720 - protein, 9 aa, Homo Sapiens
FLPQEEPVV

SEQ ID NO: 17721 - protein, 9 aa, Homo Sapiens
FLPQIEAAL

SEQ ID NO: 17722 - protein, 9 aa, Homo Sapiens
FLPQKIIYL

SEQ ID NO: 17723 - protein, 9 aa, Homo Sapiens
FLPQVVVTV

SEQ ID NO: 17724 - protein, 9 aa, Homo Sapiens
FLPRKFPSL

SEQ ID NO: 17725 - protein, 9 aa, Homo Sapiens
FLPSANEHL

SEQ ID NO: 17726 - protein, 9 aa, Homo Sapiens
FLPSHYNYL

SEQ ID NO: 17727 - protein, 9 aa, Homo Sapiens
FLPSYIIDV

SEQ ID NO: 17728 - protein, 9 aa, Homo Sapiens
FLPTILNQL

SEQ ID NO: 17729 - protein, 9 aa, Homo Sapiens
FLPTLLHQA

SEQ ID NO: 17730 - protein, 9 aa, Homo Sapiens
FLPTTGTKL

SEQ ID NO: 17731 - protein, 9 aa, Homo Sapiens
FLPVGFVTL

SEQ ID NO: 17732 - protein, 9 aa, Homo Sapiens
FLPVKLIFV

SEQ ID NO: 17733 - protein, 9 aa, Homo Sapiens
FLQDTIEEM

SEQ ID NO: 17734 - protein, 9 aa, Homo Sapiens
FLQEQLVEL

SEQ ID NO: 17735 - protein, 9 aa, Homo Sapiens
FLQPELVKL

SEQ ID NO: 17736 - protein, 9 aa, Homo Sapiens
FLQRFIDPL

SEQ ID NO: 17737 - protein, 9 aa, Homo Sapiens
FLREYFERL

SEQ ID NO: 17738 - protein, 9 aa, Homo Sapiens
FLSELQYYL

SEQ ID NO: 17739 - protein, 9 aa, Homo Sapiens
FLSELTQQL

SEQ ID NO: 17740 - protein, 9 aa, Homo Sapiens
FLSEVFAQL

SEQ ID NO: 17741 - protein, 9 aa, Homo Sapiens
FLSSVIQNL

SEQ ID NO: 17742 - protein, 9 aa, Homo Sapiens
FLTAVAHRL

SEQ ID NO: 17743 - protein, 9 aa, Homo Sapiens
FLTEFINYI

SEQ ID NO: 17744 - protein, 9 aa, Homo Sapiens
FLTEINSTV

SEQ ID NO: 17745 - protein, 9 aa, Homo Sapiens
FLVDIMEHL

SEQ ID NO: 17746 - protein, 9 aa, Homo Sapiens
FLVDKYEIL

SEQ ID NO: 17747 - protein, 9 aa, Homo Sapiens
FLVHNVKEL

SEQ ID NO: 17748 - protein, 9 aa, Homo Sapiens
FLVPTFEQL

SEQ ID NO: 17749 - protein, 9 aa, Homo Sapiens
FLVTVIHTL

SEQ ID NO: 17750 - protein, 9 aa, Homo Sapiens
FLWEAESHA

SEQ ID NO: 17751 - protein, 9 aa, Homo Sapiens
FLWERPTLL

SEQ ID NO: 17752 - protein, 9 aa, Homo Sapiens
FLYDDNQRV

SEQ ID NO: 17753 - protein, 9 aa, Homo Sapiens
FLYNPLTRV

SEQ ID NO: 17754 - protein, 9 aa, Homo Sapiens
FLYPFLHTV

SEQ ID NO: 17755 - protein, 9 aa, Homo Sapiens
FLYPFPLAL

SEQ ID NO: 17756 - protein, 9 aa, Homo Sapiens
FMDESTQCF

SEQ ID NO: 17757 - protein, 9 aa, Homo Sapiens
FMDGIQISL

SEQ ID NO: 17758 - protein, 9 aa, Homo Sapiens
FMDSVIFTL

SEQ ID NO: 17759 - protein, 9 aa, Homo Sapiens
FMLSISPRL

SEQ ID NO: 17760 - protein, 9 aa, Homo Sapiens
FMMPQSLGV

SEQ ID NO: 17761 - protein, 9 aa, Homo Sapiens
FMNPHLISV

SEQ ID NO: 17762 - protein, 9 aa, Homo Sapiens
FMSEYLIEL

SEQ ID NO: 17763 - protein, 9 aa, Homo Sapiens
FMVEKGPTL

SEQ ID NO: 17764 - protein, 9 aa, Homo Sapiens
FQDDDQTRV

SEQ ID NO: 17765 - protein, 9 aa, Homo Sapiens
FQDEINWRL

SEQ ID NO: 17766 - protein, 9 aa, Homo Sapiens
FQDIIWVKL

SEQ ID NO: 17767 - protein, 9 aa, Homo Sapiens
FQDPVPLTV

SEQ ID NO: 17768 - protein, 9 aa, Homo Sapiens
FQDQVLDLL

SEQ ID NO: 17769 - protein, 9 aa, Homo Sapiens
FQDSVFNDL

SEQ ID NO: 17770 - protein, 9 aa, Homo Sapiens
FQVDEIYTV

SEQ ID NO: 17771 - protein, 9 aa, Homo Sapiens
FSDEILLHI

SEQ ID NO: 17772 - protein, 9 aa, Homo Sapiens
FSDEIRHNL

SEQ ID NO: 17773 - protein, 9 aa, Homo Sapiens
FSPEDSPSV

SEQ ID NO: 17774 - protein, 9 aa, Homo Sapiens
FTDDQWLNV

SEQ ID NO: 17775 - protein, 9 aa, Homo Sapiens
FTDERIFML

SEQ ID NO: 17776 - protein, 9 aa, Homo Sapiens
FTDGITNKL

SEQ ID NO: 17777 - protein, 9 aa, Homo Sapiens
FTDIVTVQV

SEQ ID NO: 17778 - protein, 9 aa, Homo Sapiens
FVDAITELL

SEQ ID NO: 17779 - protein, 9 aa, Homo Sapiens
FVDATKERL

SEQ ID NO: 17780 - protein, 9 aa, Homo Sapiens
FVDDQQTFF

SEQ ID NO: 17781 - protein, 9 aa, Homo Sapiens
FVDDYTVRV

SEQ ID NO: 17782 - protein, 9 aa, Homo Sapiens
FVDEFLTYL

SEQ ID NO: 17783 - protein, 9 aa, Homo Sapiens
FVDEGIKTL

SEQ ID NO: 17784 - protein, 9 aa, Homo Sapiens
FVDEGKATV

SEQ ID NO: 17785 - protein, 9 aa, Homo Sapiens
FVDEILTSL

SEQ ID NO: 17786 - protein, 9 aa, Homo Sapiens
FVDELRITL

SEQ ID NO: 17787 - protein, 9 aa, Homo Sapiens
FVDESHIRM

SEQ ID NO: 17788 - protein, 9 aa, Homo Sapiens
FVDGLHEKL

SEQ ID NO: 17789 - protein, 9 aa, Homo Sapiens
FVDGLNFSL

SEQ ID NO: 17790 - protein, 9 aa, Homo Sapiens
FVDGLTFKV

SEQ ID NO: 17791 - protein, 9 aa, Homo Sapiens
FVDIVDAKL

SEQ ID NO: 17792 - protein, 9 aa, Homo Sapiens
FVDIVKVLL

SEQ ID NO: 17793 - protein, 9 aa, Homo Sapiens
FVDKLFESL

SEQ ID NO: 17794 - protein, 9 aa, Homo Sapiens
FVDKYSISL

SEQ ID NO: 17795 - protein, 9 aa, Homo Sapiens
FVDLEPTVI

SEQ ID NO: 17796 - protein, 9 aa, Homo Sapiens
FVDLIIKHI

SEQ ID NO: 17797 - protein, 9 aa, Homo Sapiens
FVDPAQITM

SEQ ID NO: 17798 - protein, 9 aa, Homo Sapiens
FVDPVLNQL

SEQ ID NO: 17799 - protein, 9 aa, Homo Sapiens
FVDQLVEGL

SEQ ID NO: 17800 - protein, 9 aa, Homo Sapiens
FVDRGFYSV

SEQ ID NO: 17801 - protein, 9 aa, Homo Sapiens
FVEEEEHFL

SEQ ID NO: 17802 - protein, 9 aa, Homo Sapiens
FVEETVYLL

SEQ ID NO: 17803 - protein, 9 aa, Homo Sapiens
FVEGVVKKV

SEQ ID NO: 17804 - protein, 9 aa, Homo Sapiens
FVEPFVILL

SEQ ID NO: 17805 - protein, 9 aa, Homo Sapiens
FVHDLVLYL

SEQ ID NO: 17806 - protein, 9 aa, Homo Sapiens
FVIAELVNV

SEQ ID NO: 17807 - protein, 9 aa, Homo Sapiens
FVIDLQTRL

SEQ ID NO: 17808 - protein, 9 aa, Homo Sapiens
FVLDKVPFL

SEQ ID NO: 17809 - protein, 9 aa, Homo Sapiens
FVLPELPSV

SEQ ID NO: 17810 - protein, 9 aa, Homo Sapiens
FVLPILQKL

SEQ ID NO: 17811 - protein, 9 aa, Homo Sapiens
FVLPVATQI

SEQ ID NO: 17812 - protein, 9 aa, Homo Sapiens
FVMETFVHL

SEQ ID NO: 17813 - protein, 9 aa, Homo Sapiens
FVNDIFERI

SEQ ID NO: 17814 - protein, 9 aa, Homo Sapiens
FVNEIISRI

SEQ ID NO: 17815 - protein, 9 aa, Homo Sapiens
FVPAPWLSV

SEQ ID NO: 17816 - protein, 9 aa, Homo Sapiens
FVPDTPVGV

SEQ ID NO: 17817 - protein, 9 aa, Homo Sapiens
FVPEIFHRI

SEQ ID NO: 17818 - protein, 9 aa, Homo Sapiens
FVPEKNFRV

SEQ ID NO: 17819 - protein, 9 aa, Homo Sapiens
FVPPTFKSV

SEQ ID NO: 17820 - protein, 9 aa, Homo Sapiens
GADAIYDHI

SEQ ID NO: 17821 - protein, 9 aa, Homo Sapiens
GAPDFLAHV

SEQ ID NO: 17822 - protein, 9 aa, Homo Sapiens
GAPVYLAAV

SEQ ID NO: 17823 - protein, 9 aa, Homo Sapiens
GIDDLHISL

SEQ ID NO: 17824 - protein, 9 aa, Homo Sapiens
GIDRIISQV

SEQ ID NO: 17825 - protein, 9 aa, Homo Sapiens
GIIDAFHQI

SEQ ID NO: 17826 - protein, 9 aa, Homo Sapiens
GIMKKAYEL

SEQ ID NO: 17827 - protein, 9 aa, Homo Sapiens
GIPDALPTV

SEQ ID NO: 17828 - protein, 9 aa, Homo Sapiens
GIVGVFVKL

SEQ ID NO: 17829 - protein, 9 aa, Homo Sapiens
GLDAIITQL

SEQ ID NO: 17830 - protein, 9 aa, Homo Sapiens
GLDAIVTQL

SEQ ID NO: 17831 - protein, 9 aa, Homo Sapiens
GLDALKVTV

SEQ ID NO: 17832 - protein, 9 aa, Homo Sapiens
GLDDIQTLI

SEQ ID NO: 17833 - protein, 9 aa, Homo Sapiens
GLDDLLLFL

SEQ ID NO: 17834 - protein, 9 aa, Homo Sapiens
GLDDMKANL

SEQ ID NO: 17835 - protein, 9 aa, Homo Sapiens
GLDDVITDL

SEQ ID NO: 17836 - protein, 9 aa, Homo Sapiens
GLDEAFSRL

SEQ ID NO: 17837 - protein, 9 aa, Homo Sapiens
GLDEALYNV

SEQ ID NO: 17838 - protein, 9 aa, Homo Sapiens
GLDELFVQV

SEQ ID NO: 17839 - protein, 9 aa, Homo Sapiens
GLDESKAKL

SEQ ID NO: 17840 - protein, 9 aa, Homo Sapiens
GLDEVVRLL

SEQ ID NO: 17841 - protein, 9 aa, Homo Sapiens
GLDGPPPTV

SEQ ID NO: 17842 - protein, 9 aa, Homo Sapiens
GLDHIVDKV

SEQ ID NO: 17843 - protein, 9 aa, Homo Sapiens
GLDIITNKV

SEQ ID NO: 17844 - protein, 9 aa, Homo Sapiens
GLDIPTVQV

SEQ ID NO: 17845 - protein, 9 aa, Homo Sapiens
GLDISSPGM

SEQ ID NO: 17846 - protein, 9 aa, Homo Sapiens
GLDLISVRL

SEQ ID NO: 17847 - protein, 9 aa, Homo Sapiens
GLDNETHFL

SEQ ID NO: 17848 - protein, 9 aa, Homo Sapiens
GLDNINVFL

SEQ ID NO: 17849 - protein, 9 aa, Homo Sapiens
GLDNLYKKV

SEQ ID NO: 17850 - protein, 9 aa, Homo Sapiens
GLDPARVNV

SEQ ID NO: 17851 - protein, 9 aa, Homo Sapiens
GLDQQFAGL

SEQ ID NO: 17852 - protein, 9 aa, Homo Sapiens
GLDRLNVTV

SEQ ID NO: 17853 - protein, 9 aa, Homo Sapiens
GLDSFYEYL

SEQ ID NO: 17854 - protein, 9 aa, Homo Sapiens
GLDTILQNL

SEQ ID NO: 17855 - protein, 9 aa, Homo Sapiens
GLDTVVALL

SEQ ID NO: 17856 - protein, 9 aa, Homo Sapiens
GLFPTSHSV

SEQ ID NO: 17857 - protein, 9 aa, Homo Sapiens
GLFTVFTGV

SEQ ID NO: 17858 - protein, 9 aa, Homo Sapiens
GLIDKVNEL

SEQ ID NO: 17859 - protein, 9 aa, Homo Sapiens
GLIDVHVHL

SEQ ID NO: 17860 - protein, 9 aa, Homo Sapiens
GLIEILKKV

SEQ ID NO: 17861 - protein, 9 aa, Homo Sapiens
GLIEKFYVI

SEQ ID NO: 17862 - protein, 9 aa, Homo Sapiens
GLKEGIPAL

SEQ ID NO: 17863 - protein, 9 aa, Homo Sapiens
GLLEIVTSV

SEQ ID NO: 17864 - protein, 9 aa, Homo Sapiens
GLLGYLHFV

SEQ ID NO: 17865 - protein, 9 aa, Homo Sapiens
GLLSIFTKV

SEQ ID NO: 17866 - protein, 9 aa, Homo Sapiens
GLMRKVPRV

SEQ ID NO: 17867 - protein, 9 aa, Homo Sapiens
GLNEEIARV

SEQ ID NO: 17868 - protein, 9 aa, Homo Sapiens
GLPDNISSV

SEQ ID NO: 17869 - protein, 9 aa, Homo Sapiens
GLPEAPPFL

SEQ ID NO: 17870 - protein, 9 aa, Homo Sapiens
GLPEITPKL

SEQ ID NO: 17871 - protein, 9 aa, Homo Sapiens
GLPELVIQL

SEQ ID NO: 17872 - protein, 9 aa, Homo Sapiens
GLPGVMPNI

SEQ ID NO: 17873 - protein, 9 aa, Homo Sapiens
GLPHWVPAL

SEQ ID NO: 17874 - protein, 9 aa, Homo Sapiens
GLPKKFVDI

SEQ ID NO: 17875 - protein, 9 aa, Homo Sapiens
GLPPAMQKV

SEQ ID NO: 17876 - protein, 9 aa, Homo Sapiens
GLPSDFHTA

SEQ ID NO: 17877 - protein, 9 aa, Homo Sapiens
GLPSFLTEV

SEQ ID NO: 17878 - protein, 9 aa, Homo Sapiens
GLPTRLPEI

SEQ ID NO: 17879 - protein, 9 aa, Homo Sapiens
GLPTSVPQI

SEQ ID NO: 17880 - protein, 9 aa, Homo Sapiens
GLPWRFEEL

SEQ ID NO: 17881 - protein, 9 aa, Homo Sapiens
GLSAFLHAI

SEQ ID NO: 17882 - protein, 9 aa, Homo Sapiens
GLVPFLVSV

SEQ ID NO: 17883 - protein, 9 aa, Homo Sapiens
GLWEEAYRV

SEQ ID NO: 17884 - protein, 9 aa, Homo Sapiens
GLWPVYEGV

SEQ ID NO: 17885 - protein, 9 aa, Homo Sapiens
GLYELVWRV

SEQ ID NO: 17886 - protein, 9 aa, Homo Sapiens
GMDDIFSHI

SEQ ID NO: 17887 - protein, 9 aa, Homo Sapiens
GMDEVYNLF

SEQ ID NO: 17888 - protein, 9 aa, Homo Sapiens
GMDLVVKTV

SEQ ID NO: 17889 - protein, 9 aa, Homo Sapiens
GMPDFLEKL

SEQ ID NO: 17890 - protein, 9 aa, Homo Sapiens
GMPGALPSL

SEQ ID NO: 17891 - protein, 9 aa, Homo Sapiens
GMYIFLHTV

SEQ ID NO: 17892 - protein, 9 aa, Homo Sapiens
GQIEVVPEV

SEQ ID NO: 17893 - protein, 9 aa, Homo Sapiens
GVDDAFYTL

SEQ ID NO: 17894 - protein, 9 aa, Homo Sapiens
GVDDLDFFI

SEQ ID NO: 17895 - protein, 9 aa, Homo Sapiens
GVDNIFILV

SEQ ID NO: 17896 - protein, 9 aa, Homo Sapiens
GVIATIAFL

SEQ ID NO: 17897 - protein, 9 aa, Homo Sapiens
GVIELYVKL

SEQ ID NO: 17898 - protein, 9 aa, Homo Sapiens
GVPQALFGV

SEQ ID NO: 17899 - protein, 9 aa, Homo Sapiens
HEKIWFDKF

SEQ ID NO: 17900 - protein, 9 aa, Homo Sapiens
HIDAVSLLL

SEQ ID NO: 17901 - protein, 9 aa, Homo Sapiens
HIDETYLMF

SEQ ID NO: 17902 - protein, 9 aa, Homo Sapiens
HIDNFLEQL

SEQ ID NO: 17903 - protein, 9 aa, Homo Sapiens
HIDSFIENL

SEQ ID NO: 17904 - protein, 9 aa, Homo Sapiens
HIDTILHVL

SEQ ID NO: 17905 - protein, 9 aa, Homo Sapiens
HIDTVINAL

SEQ ID NO: 17906 - protein, 9 aa, Homo Sapiens
HIDVITAEM

SEQ ID NO: 17907 - protein, 9 aa, Homo Sapiens
HIIENIVAV

SEQ ID NO: 17908 - protein, 9 aa, Homo Sapiens
HIPDVITYL

SEQ ID NO: 17909 - protein, 9 aa, Homo Sapiens
HIPEVYLIV

SEQ ID NO: 17910 - protein, 9 aa, Homo Sapiens
HIWDPLTNV

SEQ ID NO: 17911 - protein, 9 aa, Homo Sapiens
HLDATKLLL

SEQ ID NO: 17912 - protein, 9 aa, Homo Sapiens
HLDDILQHV

SEQ ID NO: 17913 - protein, 9 aa, Homo Sapiens
HLDDLFFTL

SEQ ID NO: 17914 - protein, 9 aa, Homo Sapiens
HLDDQMTLL

SEQ ID NO: 17915 - protein, 9 aa, Homo Sapiens
HLDEAIHVL

SEQ ID NO: 17916 - protein, 9 aa, Homo Sapiens
HLDEARTLL

SEQ ID NO: 17917 - protein, 9 aa, Homo Sapiens
HLDEDQQEL

SEQ ID NO: 17918 - protein, 9 aa, Homo Sapiens
HLDEVFLEL

SEQ ID NO: 17919 - protein, 9 aa, Homo Sapiens
HLDGIVQVL

SEQ ID NO: 17920 - protein, 9 aa, Homo Sapiens
HLDGVHVVF

SEQ ID NO: 17921 - protein, 9 aa, Homo Sapiens
HLDMVLPEV

SEQ ID NO: 17922 - protein, 9 aa, Homo Sapiens
HLDNISNNL

SEQ ID NO: 17923 - protein, 9 aa, Homo Sapiens
HLDPGPIYM

SEQ ID NO: 17924 - protein, 9 aa, Homo Sapiens
HLDQIIPRM

SEQ ID NO: 17925 - protein, 9 aa, Homo Sapiens
HLDRTMYLL

SEQ ID NO: 17926 - protein, 9 aa, Homo Sapiens
HLDSMNVSL

SEQ ID NO: 17927 - protein, 9 aa, Homo Sapiens
HLDVQPAAL

SEQ ID NO: 17928 - protein, 9 aa, Homo Sapiens
HLDYITEKL

SEQ ID NO: 17929 - protein, 9 aa, Homo Sapiens
HLFDAFVSV

SEQ ID NO: 17930 - protein, 9 aa, Homo Sapiens
HLFETISQA

SEQ ID NO: 17931 - protein, 9 aa, Homo Sapiens
HLIEPLANA

SEQ ID NO: 17932 - protein, 9 aa, Homo Sapiens
HLLDIYIQL

SEQ ID NO: 17933 - protein, 9 aa, Homo Sapiens
HLPDMHSEL

SEQ ID NO: 17934 - protein, 9 aa, Homo Sapiens
HLPDVCVNL

SEQ ID NO: 17935 - protein, 9 aa, Homo Sapiens
HLPEQAFYM

SEQ ID NO: 17936 - protein, 9 aa, Homo Sapiens
HLPLPGPTL

SEQ ID NO: 17937 - protein, 9 aa, Homo Sapiens
HLPPPPKLL

SEQ ID NO: 17938 - protein, 9 aa, Homo Sapiens
HLPPTFHAV

SEQ ID NO: 17939 - protein, 9 aa, Homo Sapiens
HLPYLFHVV

SEQ ID NO: 17940 - protein, 9 aa, Homo Sapiens
HLWAELVFL

SEQ ID NO: 17941 - protein, 9 aa, Homo Sapiens
HMDTFIETF

SEQ ID NO: 17942 - protein, 9 aa, Homo Sapiens
HMMPDLPNV

SEQ ID NO: 17943 - protein, 9 aa, Homo Sapiens
HVDDVSSAL

SEQ ID NO: 17944 - protein, 9 aa, Homo Sapiens
HVDEFIDEL

SEQ ID NO: 17945 - protein, 9 aa, Homo Sapiens
HVDEIKEFL

SEQ ID NO: 17946 - protein, 9 aa, Homo Sapiens
HVDGVAVTL

SEQ ID NO: 17947 - protein, 9 aa, Homo Sapiens
HVDKLYQKL

SEQ ID NO: 17948 - protein, 9 aa, Homo Sapiens
HVDPGPTPI

SEQ ID NO: 17949 - protein, 9 aa, Homo Sapiens
HVIEKMHHV

SEQ ID NO: 17950 - protein, 9 aa, Homo Sapiens
HVLDVIHEV

SEQ ID NO: 17951 - protein, 9 aa, Homo Sapiens
HYGPGWVSM

SEQ ID NO: 17952 - protein, 9 aa, Homo Sapiens
IADNVFLFL

SEQ ID NO: 17953 - protein, 9 aa, Homo Sapiens
IAPPEAEGV

SEQ ID NO: 17954 - protein, 9 aa, Homo Sapiens
IAPPVPLKA

SEQ ID NO: 17955 - protein, 9 aa, Homo Sapiens
IDAPGHRDF

SEQ ID NO: 17956 - protein, 9 aa, Homo Sapiens
IIDDALVRL

SEQ ID NO: 17957 - protein, 9 aa, Homo Sapiens
IIDDKPIGL

SEQ ID NO: 17958 - protein, 9 aa, Homo Sapiens
IIDDNHAIV

SEQ ID NO: 17959 - protein, 9 aa, Homo Sapiens
IIDDTIFNL

SEQ ID NO: 17960 - protein, 9 aa, Homo Sapiens
IIDDVDSFL

SEQ ID NO: 17961 - protein, 9 aa, Homo Sapiens
IIDDVMKEL

SEQ ID NO: 17962 - protein, 9 aa, Homo Sapiens
IIDEADRMI

SEQ ID NO: 17963 - protein, 9 aa, Homo Sapiens
IIDEFEQKL

SEQ ID NO: 17964 - protein, 9 aa, Homo Sapiens
IIDEFIYQF

SEQ ID NO: 17965 - protein, 9 aa, Homo Sapiens
IIDEITPKL

SEQ ID NO: 17966 - protein, 9 aa, Homo Sapiens
IIDEKGPVM

SEQ ID NO: 17967 - protein, 9 aa, Homo Sapiens
IIDEKKYYL

SEQ ID NO: 17968 - protein, 9 aa, Homo Sapiens
IIDELIKKL

SEQ ID NO: 17969 - protein, 9 aa, Homo Sapiens
IIDEQPLIF

SEQ ID NO: 17970 - protein, 9 aa, Homo Sapiens
IIDETMAQL

SEQ ID NO: 17971 - protein, 9 aa, Homo Sapiens
IIDEVVNKF

SEQ ID NO: 17972 - protein, 9 aa, Homo Sapiens
IIDGKIFCV

SEQ ID NO: 17973 - protein, 9 aa, Homo Sapiens
IIDGLFMEI

SEQ ID NO: 17974 - protein, 9 aa, Homo Sapiens
IIDGVIQMV

SEQ ID NO: 17975 - protein, 9 aa, Homo Sapiens
IIDGVKVQV

SEQ ID NO: 17976 - protein, 9 aa, Homo Sapiens
IIDLVLDRI

SEQ ID NO: 17977 - protein, 9 aa, Homo Sapiens
IIDNILQRI

SEQ ID NO: 17978 - protein, 9 aa, Homo Sapiens
IIDPVALEI

SEQ ID NO: 17979 - protein, 9 aa, Homo Sapiens
IIDQIQDAL

SEQ ID NO: 17980 - protein, 9 aa, Homo Sapiens
IIDQVNPEL

SEQ ID NO: 17981 - protein, 9 aa, Homo Sapiens
IIDSLFNTV

SEQ ID NO: 17982 - protein, 9 aa, Homo Sapiens
IIDTLITKL

SEQ ID NO: 17983 - protein, 9 aa, Homo Sapiens
IIEDKTFGL

SEQ ID NO: 17984 - protein, 9 aa, Homo Sapiens
IIEENIPEL

SEQ ID NO: 17985 - protein, 9 aa, Homo Sapiens
IIFVPVPQL

SEQ ID NO: 17986 - protein, 9 aa, Homo Sapiens
IIIDSVPEV

SEQ ID NO: 17987 - protein, 9 aa, Homo Sapiens
IIIPEIQKV

SEQ ID NO: 17988 - protein, 9 aa, Homo Sapiens
IILDEIHLL

SEQ ID NO: 17989 - protein, 9 aa, Homo Sapiens
IINEPTAAA

SEQ ID NO: 17990 - protein, 9 aa, Homo Sapiens
IIPDKVWAV

SEQ ID NO: 17991 - protein, 9 aa, Homo Sapiens
IIVDIFHGL

SEQ ID NO: 17992 - protein, 9 aa, Homo Sapiens
IKEPIWETL

SEQ ID NO: 17993 - protein, 9 aa, Homo Sapiens
ILDAAGANL

SEQ ID NO: 17994 - protein, 9 aa, Homo Sapiens
ILDACTFAL

SEQ ID NO: 17995 - protein, 9 aa, Homo Sapiens
ILDAGGHNV

SEQ ID NO: 17996 - protein, 9 aa, Homo Sapiens
ILDAVVVVV

SEQ ID NO: 17997 - protein, 9 aa, Homo Sapiens
ILDCIYNEV

SEQ ID NO: 17998 - protein, 9 aa, Homo Sapiens
ILDDFRMHF

SEQ ID NO: 17999 - protein, 9 aa, Homo Sapiens
ILDDIFASL

SEQ ID NO: 18000 - protein, 9 aa, Homo Sapiens
ILDDIGHGV

SEQ ID NO: 18001 - protein, 9 aa, Homo Sapiens
ILDDIIASV

SEQ ID NO: 18002 - protein, 9 aa, Homo Sapiens
ILDDLFLHT

SEQ ID NO: 18003 - protein, 9 aa, Homo Sapiens
ILDDPGKKV

SEQ ID NO: 18004 - protein, 9 aa, Homo Sapiens
ILDDSALYL

SEQ ID NO: 18005 - protein, 9 aa, Homo Sapiens
ILDDSHLLV

SEQ ID NO: 18006 - protein, 9 aa, Homo Sapiens
ILDDSPKEI

SEQ ID NO: 18007 - protein, 9 aa, Homo Sapiens
ILDDVAMVL

SEQ ID NO: 18008 - protein, 9 aa, Homo Sapiens
ILDEADKLL

SEQ ID NO: 18009 - protein, 9 aa, Homo Sapiens
ILDEAERSL

SEQ ID NO: 18010 - protein, 9 aa, Homo Sapiens
ILDEATSAL

SEQ ID NO: 18011 - protein, 9 aa, Homo Sapiens
ILDEEKFNV

SEQ ID NO: 18012 - protein, 9 aa, Homo Sapiens
ILDELAEKL

SEQ ID NO: 18013 - protein, 9 aa, Homo Sapiens
ILDELVKSL

SEQ ID NO: 18014 - protein, 9 aa, Homo Sapiens
ILDEMSHKL

SEQ ID NO: 18015 - protein, 9 aa, Homo Sapiens
ILDEPTNHL

SEQ ID NO: 18016 - protein, 9 aa, Homo Sapiens
ILDEPTNNL

SEQ ID NO: 18017 - protein, 9 aa, Homo Sapiens
ILDEQGRTV

SEQ ID NO: 18018 - protein, 9 aa, Homo Sapiens
ILDEQLYSF

SEQ ID NO: 18019 - protein, 9 aa, Homo Sapiens
ILDESHERV

SEQ ID NO: 18020 - protein, 9 aa, Homo Sapiens
ILDETVNSV

SEQ ID NO: 18021 - protein, 9 aa, Homo Sapiens
ILDEVDAAL

SEQ ID NO: 18022 - protein, 9 aa, Homo Sapiens
ILDEVDVHI

SEQ ID NO: 18023 - protein, 9 aa, Homo Sapiens
ILDEVIFKL

SEQ ID NO: 18024 - protein, 9 aa, Homo Sapiens
ILDEVIMGY

SEQ ID NO: 18025 - protein, 9 aa, Homo Sapiens
ILDGIIREL

SEQ ID NO: 18026 - protein, 9 aa, Homo Sapiens
ILDGNQLHI

SEQ ID NO: 18027 - protein, 9 aa, Homo Sapiens
ILDHEVPSL

SEQ ID NO: 18028 - protein, 9 aa, Homo Sapiens
ILDIIFQDF

SEQ ID NO: 18029 - protein, 9 aa, Homo Sapiens
ILDIPFHQV

SEQ ID NO: 18030 - protein, 9 aa, Homo Sapiens
ILDIPTHTI

SEQ ID NO: 18031 - protein, 9 aa, Homo Sapiens
ILDISEHTL

SEQ ID NO: 18032 - protein, 9 aa, Homo Sapiens
ILDISFNLL

SEQ ID NO: 18033 - protein, 9 aa, Homo Sapiens
ILDKEINRL

SEQ ID NO: 18034 - protein, 9 aa, Homo Sapiens
ILDKFTEEV

SEQ ID NO: 18035 - protein, 9 aa, Homo Sapiens
ILDKIVQKV

SEQ ID NO: 18036 - protein, 9 aa, Homo Sapiens
ILDKKVEKV

SEQ ID NO: 18037 - protein, 9 aa, Homo Sapiens
ILDKVLTAM

SEQ ID NO: 18038 - protein, 9 aa, Homo Sapiens
ILDKYPLAV

SEQ ID NO: 18039 - protein, 9 aa, Homo Sapiens
ILDLIQVFV

SEQ ID NO: 18040 - protein, 9 aa, Homo Sapiens
ILDMTAVLL

SEQ ID NO: 18041 - protein, 9 aa, Homo Sapiens
ILDNPVVQL

SEQ ID NO: 18042 - protein, 9 aa, Homo Sapiens
ILDNVQVVL

SEQ ID NO: 18043 - protein, 9 aa, Homo Sapiens
ILDPEGLAL

SEQ ID NO: 18044 - protein, 9 aa, Homo Sapiens
ILDPFILVF

SEQ ID NO: 18045 - protein, 9 aa, Homo Sapiens
ILDPFQYQL

SEQ ID NO: 18046 - protein, 9 aa, Homo Sapiens
ILDPHVVLL

SEQ ID NO: 18047 - protein, 9 aa, Homo Sapiens
ILDPIFKVF

SEQ ID NO: 18048 - protein, 9 aa, Homo Sapiens
ILDQKINEV

SEQ ID NO: 18049 - protein, 9 aa, Homo Sapiens
ILDQVWNIF

SEQ ID NO: 18050 - protein, 9 aa, Homo Sapiens
ILDSHAATL

SEQ ID NO: 18051 - protein, 9 aa, Homo Sapiens
ILDSQTVVL

SEQ ID NO: 18052 - protein, 9 aa, Homo Sapiens
ILDSSPEKL

SEQ ID NO: 18053 - protein, 9 aa, Homo Sapiens
ILDSVASVV

SEQ ID NO: 18054 - protein, 9 aa, Homo Sapiens
ILDTLKTQL

SEQ ID NO: 18055 - protein, 9 aa, Homo Sapiens
ILDTLVFAF

SEQ ID NO: 18056 - protein, 9 aa, Homo Sapiens
ILDTMYPEL

SEQ ID NO: 18057 - protein, 9 aa, Homo Sapiens
ILDVNPQAL

SEQ ID NO: 18058 - protein, 9 aa, Homo Sapiens
ILDVSVKTV

SEQ ID NO: 18059 - protein, 9 aa, Homo Sapiens
ILDVSWNSL

SEQ ID NO: 18060 - protein, 9 aa, Homo Sapiens
ILDVTVVYL

SEQ ID NO: 18061 - protein, 9 aa, Homo Sapiens
ILDWHFANL

SEQ ID NO: 18062 - protein, 9 aa, Homo Sapiens
ILDWKFDRV

SEQ ID NO: 18063 - protein, 9 aa, Homo Sapiens
ILDYSWEKL

SEQ ID NO: 18064 - protein, 9 aa, Homo Sapiens
ILEENIPVL

SEQ ID NO: 18065 - protein, 9 aa, Homo Sapiens
ILEKYIKFV

SEQ ID NO: 18066 - protein, 9 aa, Homo Sapiens
ILGPKPQGV

SEQ ID NO: 18067 - protein, 9 aa, Homo Sapiens
ILHDDEVTV

SEQ ID NO: 18068 - protein, 9 aa, Homo Sapiens
ILHSVTTNL

SEQ ID NO: 18069 - protein, 9 aa, Homo Sapiens
ILHTLLTLV

SEQ ID NO: 18070 - protein, 9 aa, Homo Sapiens
ILIDPFHKA

SEQ ID NO: 18071 - protein, 9 aa, Homo Sapiens
ILIDWLVQV

SEQ ID NO: 18072 - protein, 9 aa, Homo Sapiens
ILIRPLVSV

SEQ ID NO: 18073 - protein, 9 aa, Homo Sapiens
ILLAEVPTM

SEQ ID NO: 18074 - protein, 9 aa, Homo Sapiens
ILMEHIHKL

SEQ ID NO: 18075 - protein, 9 aa, Homo Sapiens
ILMGVLKEV

SEQ ID NO: 18076 - protein, 9 aa, Homo Sapiens
ILNDNINLL

SEQ ID NO: 18077 - protein, 9 aa, Homo Sapiens
ILNEIVNFV

SEQ ID NO: 18078 - protein, 9 aa, Homo Sapiens
ILNPEVVTV

SEQ ID NO: 18079 - protein, 9 aa, Homo Sapiens
ILNPVTTKL

SEQ ID NO: 18080 - protein, 9 aa, Homo Sapiens
ILNTIYEKV

SEQ ID NO: 18081 - protein, 9 aa, Homo Sapiens
ILPDDLPEL

SEQ ID NO: 18082 - protein, 9 aa, Homo Sapiens
ILPDDPRQM

SEQ ID NO: 18083 - protein, 9 aa, Homo Sapiens
ILPDMLKNA

SEQ ID NO: 18084 - protein, 9 aa, Homo Sapiens
ILPDTYQHL

SEQ ID NO: 18085 - protein, 9 aa, Homo Sapiens
ILPEAFSNL

SEQ ID NO: 18086 - protein, 9 aa, Homo Sapiens
ILPEEITNL

SEQ ID NO: 18087 - protein, 9 aa, Homo Sapiens
ILPEELQTL

SEQ ID NO: 18088 - protein, 9 aa, Homo Sapiens
ILPEIIPIL

SEQ ID NO: 18089 - protein, 9 aa, Homo Sapiens
ILPEKVARV

SEQ ID NO: 18090 - protein, 9 aa, Homo Sapiens
ILPEQGLQV

SEQ ID NO: 18091 - protein, 9 aa, Homo Sapiens
ILPERAEEA

SEQ ID NO: 18092 - protein, 9 aa, Homo Sapiens
ILPHSPINV

SEQ ID NO: 18093 - protein, 9 aa, Homo Sapiens
ILPHVDIQL

SEQ ID NO: 18094 - protein, 9 aa, Homo Sapiens
ILPIKFPHL

SEQ ID NO: 18095 - protein, 9 aa, Homo Sapiens
ILPIMFPSL

SEQ ID NO: 18096 - protein, 9 aa, Homo Sapiens
ILPKILQDV

SEQ ID NO: 18097 - protein, 9 aa, Homo Sapiens
ILPKPLTKV

SEQ ID NO: 18098 - protein, 9 aa, Homo Sapiens
ILPKSLISV

SEQ ID NO: 18099 - protein, 9 aa, Homo Sapiens
ILPKYVQQV

SEQ ID NO: 18100 - protein, 9 aa, Homo Sapiens
ILPMSLLSV

SEQ ID NO: 18101 - protein, 9 aa, Homo Sapiens
ILPPDIGKL

SEQ ID NO: 18102 - protein, 9 aa, Homo Sapiens
ILPPFIWTL

SEQ ID NO: 18103 - protein, 9 aa, Homo Sapiens
ILPPSAHEL

SEQ ID NO: 18104 - protein, 9 aa, Homo Sapiens
ILPPTILTL

SEQ ID NO: 18105 - protein, 9 aa, Homo Sapiens
ILPQDLERA

SEQ ID NO: 18106 - protein, 9 aa, Homo Sapiens
ILPQESPAL

SEQ ID NO: 18107 - protein, 9 aa, Homo Sapiens
ILPQHLYNI

SEQ ID NO: 18108 - protein, 9 aa, Homo Sapiens
ILPSDIIQL

SEQ ID NO: 18109 - protein, 9 aa, Homo Sapiens
ILPSNLLTV

SEQ ID NO: 18110 - protein, 9 aa, Homo Sapiens
ILPTLVIKL

SEQ ID NO: 18111 - protein, 9 aa, Homo Sapiens
ILPVPAFNV

SEQ ID NO: 18112 - protein, 9 aa, Homo Sapiens
ILQERIEEM

SEQ ID NO: 18113 - protein, 9 aa, Homo Sapiens
ILSQYITFV

SEQ ID NO: 18114 - protein, 9 aa, Homo Sapiens
ILTDITKGV

SEQ ID NO: 18115 - protein, 9 aa, Homo Sapiens
ILVDTVWAL

SEQ ID NO: 18116 - protein, 9 aa, Homo Sapiens
ILVDWLVQV

SEQ ID NO: 18117 - protein, 9 aa, Homo Sapiens
ILVEKFPFV

SEQ ID NO: 18118 - protein, 9 aa, Homo Sapiens
ILWDTLLRL

SEQ ID NO: 18119 - protein, 9 aa, Homo Sapiens
ILWEHLEIL

SEQ ID NO: 18120 - protein, 9 aa, Homo Sapiens
ILYDKYFSL

SEQ ID NO: 18121 - protein, 9 aa, Homo Sapiens
IMDATNILV

SEQ ID NO: 18122 - protein, 9 aa, Homo Sapiens
IMDDEFQLL

SEQ ID NO: 18123 - protein, 9 aa, Homo Sapiens
IMDDKSLNI

SEQ ID NO: 18124 - protein, 9 aa, Homo Sapiens
IMDHVEESL

SEQ ID NO: 18125 - protein, 9 aa, Homo Sapiens
IMDILNIKI

SEQ ID NO: 18126 - protein, 9 aa, Homo Sapiens
IMDRIYKNV

SEQ ID NO: 18127 - protein, 9 aa, Homo Sapiens
IMDSLFDKL

SEQ ID NO: 18128 - protein, 9 aa, Homo Sapiens
IMDSLFQSF

SEQ ID NO: 18129 - protein, 9 aa, Homo Sapiens
IMEDIILTL

SEQ ID NO: 18130 - protein, 9 aa, Homo Sapiens
IMLEALERV

SEQ ID NO: 18131 - protein, 9 aa, Homo Sapiens
IMPKDIQLA

SEQ ID NO: 18132 - protein, 9 aa, Homo Sapiens
IMPTIFNLI

SEQ ID NO: 18133 - protein, 9 aa, Homo Sapiens
IPPLTQTPV

SEQ ID NO: 18134 - protein, 9 aa, Homo Sapiens
IQDDAVHTL

SEQ ID NO: 18135 - protein, 9 aa, Homo Sapiens
IQDEEFYTL

SEQ ID NO: 18136 - protein, 9 aa, Homo Sapiens
IQDEIVDFL

SEQ ID NO: 18137 - protein, 9 aa, Homo Sapiens
IQPDNIVYV

SEQ ID NO: 18138 - protein, 9 aa, Homo Sapiens
IQPPFVPTL

SEQ ID NO: 18139 - protein, 9 aa, Homo Sapiens
ISDGVIYSI

SEQ ID NO: 18140 - protein, 9 aa, Homo Sapiens
ITDDLHFYV

SEQ ID NO: 18141 - protein, 9 aa, Homo Sapiens
ITPDEFHFV

SEQ ID NO: 18142 - protein, 9 aa, Homo Sapiens
ITPENLPQI

SEQ ID NO: 18143 - protein, 9 aa, Homo Sapiens
ITPEPFHHV

SEQ ID NO: 18144 - protein, 9 aa, Homo Sapiens
ITPQKLPSL

SEQ ID NO: 18145 - protein, 9 aa, Homo Sapiens
ITPQTIHGV

SEQ ID NO: 18146 - protein, 9 aa, Homo Sapiens
IVDAFLQQL

SEQ ID NO: 18147 - protein, 9 aa, Homo Sapiens
IVDAVIEQV

SEQ ID NO: 18148 - protein, 9 aa, Homo Sapiens
IVDDKFFKL

SEQ ID NO: 18149 - protein, 9 aa, Homo Sapiens
IVDDWLNLL

SEQ ID NO: 18150 - protein, 9 aa, Homo Sapiens
IVDEAIYYF

SEQ ID NO: 18151 - protein, 9 aa, Homo Sapiens
IVDELKQEV

SEQ ID NO: 18152 - protein, 9 aa, Homo Sapiens
IVDEPTFKV

SEQ ID NO: 18153 - protein, 9 aa, Homo Sapiens
IVDEVNGLI

SEQ ID NO: 18154 - protein, 9 aa, Homo Sapiens
IVDGVVQSI

SEQ ID NO: 18155 - protein, 9 aa, Homo Sapiens
IVDNVNQAL

SEQ ID NO: 18156 - protein, 9 aa, Homo Sapiens
IVDPFQILV

SEQ ID NO: 18157 - protein, 9 aa, Homo Sapiens
IVDPVDSTL

SEQ ID NO: 18158 - protein, 9 aa, Homo Sapiens
IVDQTIEKV

SEQ ID NO: 18159 - protein, 9 aa, Homo Sapiens
IVDQVMVTL

SEQ ID NO: 18160 - protein, 9 aa, Homo Sapiens
IVDSVFVNL

SEQ ID NO: 18161 - protein, 9 aa, Homo Sapiens
IVHELNTTV

SEQ ID NO: 18162 - protein, 9 aa, Homo Sapiens
IVMEHVVFL

SEQ ID NO: 18163 - protein, 9 aa, Homo Sapiens
IVPHLVPLL

SEQ ID NO: 18164 - protein, 9 aa, Homo Sapiens
IVVDNVPQV

SEQ ID NO: 18165 - protein, 9 aa, Homo Sapiens
KADSVVVLL

SEQ ID NO: 18166 - protein, 9 aa, Homo Sapiens
KAPDFLPLL

SEQ ID NO: 18167 - protein, 9 aa, Homo Sapiens
KDYPFYLTV

SEQ ID NO: 18168 - protein, 9 aa, Homo Sapiens
KGDDVIVFL

SEQ ID NO: 18169 - protein, 9 aa, Homo Sapiens
KHLDVVTLL

SEQ ID NO: 18170 - protein, 9 aa, Homo Sapiens
KIAPNTPQL

SEQ ID NO: 18171 - protein, 9 aa, Homo Sapiens
KIDDFPNEL

SEQ ID NO: 18172 - protein, 9 aa, Homo Sapiens
KIDDILQTL

SEQ ID NO: 18173 - protein, 9 aa, Homo Sapiens
KIDDKPVKI

SEQ ID NO: 18174 - protein, 9 aa, Homo Sapiens
KIDDMMFVL

SEQ ID NO: 18175 - protein, 9 aa, Homo Sapiens
KIDDTIRYL

SEQ ID NO: 18176 - protein, 9 aa, Homo Sapiens
KIDDVLHTL

SEQ ID NO: 18177 - protein, 9 aa, Homo Sapiens
KIDGVEDML

SEQ ID NO: 18178 - protein, 9 aa, Homo Sapiens
KIDHILDAL

SEQ ID NO: 18179 - protein, 9 aa, Homo Sapiens
KIDKFFKQL

SEQ ID NO: 18180 - protein, 9 aa, Homo Sapiens
KIDSILEVV

SEQ ID NO: 18181 - protein, 9 aa, Homo Sapiens
KIDSVAVNI

SEQ ID NO: 18182 - protein, 9 aa, Homo Sapiens
KIDYFLEYF

SEQ ID NO: 18183 - protein, 9 aa, Homo Sapiens
KIEDLIKYL

SEQ ID NO: 18184 - protein, 9 aa, Homo Sapiens
KIIDIQEKV

SEQ ID NO: 18185 - protein, 9 aa, Homo Sapiens
KIIEYSVYL

SEQ ID NO: 18186 - protein, 9 aa, Homo Sapiens
KIISALPQL

SEQ ID NO: 18187 - protein, 9 aa, Homo Sapiens
KILPDLNTV

SEQ ID NO: 18188 - protein, 9 aa, Homo Sapiens
KILPTLEAV

SEQ ID NO: 18189 - protein, 9 aa, Homo Sapiens
KILPVMVTL

SEQ ID NO: 18190 - protein, 9 aa, Homo Sapiens
KILQELPSV

SEQ ID NO: 18191 - protein, 9 aa, Homo Sapiens
KILSELFTV

SEQ ID NO: 18192 - protein, 9 aa, Homo Sapiens
KINDTIYEV

SEQ ID NO: 18193 - protein, 9 aa, Homo Sapiens
KIPTPIVGV

SEQ ID NO: 18194 - protein, 9 aa, Homo Sapiens
KIQEILTQV

SEQ ID NO: 18195 - protein, 9 aa, Homo Sapiens
KIVDFSYSV

SEQ ID NO: 18196 - protein, 9 aa, Homo Sapiens
KIVPIAIQL

SEQ ID NO: 18197 - protein, 9 aa, Homo Sapiens
KIVPVEITI

SEQ ID NO: 18198 - protein, 9 aa, Homo Sapiens
KIVVVTAGV

SEQ ID NO: 18199 - protein, 9 aa, Homo Sapiens
KIWAPTAEA

SEQ ID NO: 18200 - protein, 9 aa, Homo Sapiens
KIYEGAYHV

SEQ ID NO: 18201 - protein, 9 aa, Homo Sapiens
KLDAFVEGV

SEQ ID NO: 18202 - protein, 9 aa, Homo Sapiens
KLDAILKNV

SEQ ID NO: 18203 - protein, 9 aa, Homo Sapiens
KLDDIVQHI

SEQ ID NO: 18204 - protein, 9 aa, Homo Sapiens
KLDDLTQDL

SEQ ID NO: 18205 - protein, 9 aa, Homo Sapiens
KLDDMLSEL

SEQ ID NO: 18206 - protein, 9 aa, Homo Sapiens
KLDDYVYYV

SEQ ID NO: 18207 - protein, 9 aa, Homo Sapiens
KLDEDVKMI

SEQ ID NO: 18208 - protein, 9 aa, Homo Sapiens
KLDEFGEQL

SEQ ID NO: 18209 - protein, 9 aa, Homo Sapiens
KLDEILKEI

SEQ ID NO: 18210 - protein, 9 aa, Homo Sapiens
KLDGLIHRF

SEQ ID NO: 18211 - protein, 9 aa, Homo Sapiens
KLDHVVTII

SEQ ID NO: 18212 - protein, 9 aa, Homo Sapiens
KLDNLMLEL

SEQ ID NO: 18213 - protein, 9 aa, Homo Sapiens
KLDPYVQRL

SEQ ID NO: 18214 - protein, 9 aa, Homo Sapiens
KLDQVLSKV

SEQ ID NO: 18215 - protein, 9 aa, Homo Sapiens
KLDSPRVTV

SEQ ID NO: 18216 - protein, 9 aa, Homo Sapiens
KLDVGNAEV

SEQ ID NO: 18217 - protein, 9 aa, Homo Sapiens
KLDVQFSGL

SEQ ID NO: 18218 - protein, 9 aa, Homo Sapiens
KLDWVEVGL

SEQ ID NO: 18219 - protein, 9 aa, Homo Sapiens
KLEDFIKNL

SEQ ID NO: 18220 - protein, 9 aa, Homo Sapiens
KLEEFVNGL

SEQ ID NO: 18221 - protein, 9 aa, Homo Sapiens
KLEEIIHQI

SEQ ID NO: 18222 - protein, 9 aa, Homo Sapiens
KLFDTQQFL

SEQ ID NO: 18223 - protein, 9 aa, Homo Sapiens
KLFEKVKEV

SEQ ID NO: 18224 - protein, 9 aa, Homo Sapiens
KLFGMIITI

SEQ ID NO: 18225 - protein, 9 aa, Homo Sapiens
KLFNVTSTL

SEQ ID NO: 18226 - protein, 9 aa, Homo Sapiens
KLHGVNINV

SEQ ID NO: 18227 - protein, 9 aa, Homo Sapiens
KLHYVVTEV

SEQ ID NO: 18228 - protein, 9 aa, Homo Sapiens
KLIEELETL

SEQ ID NO: 18229 - protein, 9 aa, Homo Sapiens
KLILLITQV

SEQ ID NO: 18230 - protein, 9 aa, Homo Sapiens
KLISSYYNV

SEQ ID NO: 18231 - protein, 9 aa, Homo Sapiens
KLLAVIHEL

SEQ ID NO: 18232 - protein, 9 aa, Homo Sapiens
KLLDILSYL

SEQ ID NO: 18233 - protein, 9 aa, Homo Sapiens
KLLDLQVRV

SEQ ID NO: 18234 - protein, 9 aa, Homo Sapiens
KLLDVVHPA

SEQ ID NO: 18235 - protein, 9 aa, Homo Sapiens
KLLEKLYKV

SEQ ID NO: 18236 - protein, 9 aa, Homo Sapiens
KLLEVQPQV

SEQ ID NO: 18237 - protein, 9 aa, Homo Sapiens
KLLEVYEQL

SEQ ID NO: 18238 - protein, 9 aa, Homo Sapiens
KLLFWVTEV

SEQ ID NO: 18239 - protein, 9 aa, Homo Sapiens
KLLPQLTYL

SEQ ID NO: 18240 - protein, 9 aa, Homo Sapiens
KLMDHIYAV

SEQ ID NO: 18241 - protein, 9 aa, Homo Sapiens
KLMDQLEAL

SEQ ID NO: 18242 - protein, 9 aa, Homo Sapiens
KLMELLEEI

SEQ ID NO: 18243 - protein, 9 aa, Homo Sapiens
KLMTALVNV

SEQ ID NO: 18244 - protein, 9 aa, Homo Sapiens
KLNAKLAEL

SEQ ID NO: 18245 - protein, 9 aa, Homo Sapiens
KLPAELQEL

SEQ ID NO: 18246 - protein, 9 aa, Homo Sapiens
KLPAPLPGL

SEQ ID NO: 18247 - protein, 9 aa, Homo Sapiens
KLPDGTWNL

SEQ ID NO: 18248 - protein, 9 aa, Homo Sapiens
KLPEDIMKL

SEQ ID NO: 18249 - protein, 9 aa, Homo Sapiens
KLPEISHRL

SEQ ID NO: 18250 - protein, 9 aa, Homo Sapiens
KLPEKWESV

SEQ ID NO: 18251 - protein, 9 aa, Homo Sapiens
KLPEPSASL

SEQ ID NO: 18252 - protein, 9 aa, Homo Sapiens
KLPGEGAAL

SEQ ID NO: 18253 - protein, 9 aa, Homo Sapiens
KLPGLLMTI

SEQ ID NO: 18254 - protein, 9 aa, Homo Sapiens
KLPGLQATV

SEQ ID NO: 18255 - protein, 9 aa, Homo Sapiens
KLPGNISSL

SEQ ID NO: 18256 - protein, 9 aa, Homo Sapiens
KLPIPDPGV

SEQ ID NO: 18257 - protein, 9 aa, Homo Sapiens
KLPKPLEKV

SEQ ID NO: 18258 - protein, 9 aa, Homo Sapiens
KLPNFGFVV

SEQ ID NO: 18259 - protein, 9 aa, Homo Sapiens
KLPPLPLTL

SEQ ID NO: 18260 - protein, 9 aa, Homo Sapiens
KLPPPPPQA

SEQ ID NO: 18261 - protein, 9 aa, Homo Sapiens
KLPSFLANV

SEQ ID NO: 18262 - protein, 9 aa, Homo Sapiens
KLPSNLPQL

SEQ ID NO: 18263 - protein, 9 aa, Homo Sapiens
KLPSTLTGL

SEQ ID NO: 18264 - protein, 9 aa, Homo Sapiens
KLPTPTSSV

SEQ ID NO: 18265 - protein, 9 aa, Homo Sapiens
KLQDQIFNL

SEQ ID NO: 18266 - protein, 9 aa, Homo Sapiens
KLQEFLQTL

SEQ ID NO: 18267 - protein, 9 aa, Homo Sapiens
KLQEKIQEL

SEQ ID NO: 18268 - protein, 9 aa, Homo Sapiens
KLQEQIFHL

SEQ ID NO: 18269 - protein, 9 aa, Homo Sapiens
KLQEVLDYL

SEQ ID NO: 18270 - protein, 9 aa, Homo Sapiens
KLVDCIIEV

SEQ ID NO: 18271 - protein, 9 aa, Homo Sapiens
KLVGEFLEV

SEQ ID NO: 18272 - protein, 9 aa, Homo Sapiens
KLWPEASKV

SEQ ID NO: 18273 - protein, 9 aa, Homo Sapiens
KLWQTPLHV

SEQ ID NO: 18274 - protein, 9 aa, Homo Sapiens
KLWSETFDV

SEQ ID NO: 18275 - protein, 9 aa, Homo Sapiens
KLYSISSQV

SEQ ID NO: 18276 - protein, 9 aa, Homo Sapiens
KMDPIISRV

SEQ ID NO: 18277 - protein, 9 aa, Homo Sapiens
KMDPVAYRV

SEQ ID NO: 18278 - protein, 9 aa, Homo Sapiens
KMDWIFHTI

SEQ ID NO: 18279 - protein, 9 aa, Homo Sapiens
KMDYPEMGL

SEQ ID NO: 18280 - protein, 9 aa, Homo Sapiens
KMPDDVWLV

SEQ ID NO: 18281 - protein, 9 aa, Homo Sapiens
KMPDVELFV

SEQ ID NO: 18282 - protein, 9 aa, Homo Sapiens
KMPEGTFLV

SEQ ID NO: 18283 - protein, 9 aa, Homo Sapiens
KMPEINAKV

SEQ ID NO: 18284 - protein, 9 aa, Homo Sapiens
KMPRLIAKV

SEQ ID NO: 18285 - protein, 9 aa, Homo Sapiens
KQPEDYFYL

SEQ ID NO: 18286 - protein, 9 aa, Homo Sapiens
KSPEGLLGV

SEQ ID NO: 18287 - protein, 9 aa, Homo Sapiens
KSPLNFSTV

SEQ ID NO: 18288 - protein, 9 aa, Homo Sapiens
KTDVVVNSV

SEQ ID NO: 18289 - protein, 9 aa, Homo Sapiens
KVDDARALL

SEQ ID NO: 18290 - protein, 9 aa, Homo Sapiens
KVDEAIALF

SEQ ID NO: 18291 - protein, 9 aa, Homo Sapiens
KVDEIFGQL

SEQ ID NO: 18292 - protein, 9 aa, Homo Sapiens
KVDELTTEI

SEQ ID NO: 18293 - protein, 9 aa, Homo Sapiens
KVDFIFEQV

SEQ ID NO: 18294 - protein, 9 aa, Homo Sapiens
KVDILYNNI

SEQ ID NO: 18295 - protein, 9 aa, Homo Sapiens
KVDKIITPL

SEQ ID NO: 18296 - protein, 9 aa, Homo Sapiens
KVDKLYAGL

SEQ ID NO: 18297 - protein, 9 aa, Homo Sapiens
KVDLAVVEV

SEQ ID NO: 18298 - protein, 9 aa, Homo Sapiens
KVDPLFTEL

SEQ ID NO: 18299 - protein, 9 aa, Homo Sapiens
KVDPMAIVV

SEQ ID NO: 18300 - protein, 9 aa, Homo Sapiens
KVDPSGVSL

SEQ ID NO: 18301 - protein, 9 aa, Homo Sapiens
KVDTVWVNV

SEQ ID NO: 18302 - protein, 9 aa, Homo Sapiens
KVDWLTEKM

SEQ ID NO: 18303 - protein, 9 aa, Homo Sapiens
KVIDEIYRV

SEQ ID NO: 18304 - protein, 9 aa, Homo Sapiens
KVIDYVPGI

SEQ ID NO: 18305 - protein, 9 aa, Homo Sapiens
KVIVRFLTV

SEQ ID NO: 18306 - protein, 9 aa, Homo Sapiens
KVLELQTEL

SEQ ID NO: 18307 - protein, 9 aa, Homo Sapiens
KVLGIVVGV

SEQ ID NO: 18308 - protein, 9 aa, Homo Sapiens
KVPDVLPVL

SEQ ID NO: 18309 - protein, 9 aa, Homo Sapiens
KVPEIEVTV

SEQ ID NO: 18310 - protein, 9 aa, Homo Sapiens
KVPEIISSI

SEQ ID NO: 18311 - protein, 9 aa, Homo Sapiens
KVPEWVDTV

SEQ ID NO: 18312 - protein, 9 aa, Homo Sapiens
KVQEQIFNL

SEQ ID NO: 18313 - protein, 9 aa, Homo Sapiens
KVVALVHAV

SEQ ID NO: 18314 - protein, 9 aa, Homo Sapiens
KVVDVDVKL

SEQ ID NO: 18315 - protein, 9 aa, Homo Sapiens
KVVIFLPQV

SEQ ID NO: 18316 - protein, 9 aa, Homo Sapiens
KVVPTFEAV

SEQ ID NO: 18317 - protein, 9 aa, Homo Sapiens
KVWGNVVTV

SEQ ID NO: 18318 - protein, 9 aa, Homo Sapiens
LADEVITVF

SEQ ID NO: 18319 - protein, 9 aa, Homo Sapiens
LADGIFETL

SEQ ID NO: 18320 - protein, 9 aa, Homo Sapiens
LAPEIVIKV

SEQ ID NO: 18321 - protein, 9 aa, Homo Sapiens
LAPELFVNV

SEQ ID NO: 18322 - protein, 9 aa, Homo Sapiens
LAPNIISQL

SEQ ID NO: 18323 - protein, 9 aa, Homo Sapiens
LAPPASPGI

SEQ ID NO: 18324 - protein, 9 aa, Homo Sapiens
LAPPPPPGL

SEQ ID NO: 18325 - protein, 9 aa, Homo Sapiens
LEDGNFLKL

SEQ ID NO: 18326 - protein, 9 aa, Homo Sapiens
LENDKILQI

SEQ ID NO: 18327 - protein, 9 aa, Homo Sapiens
LGPPPPLRV

SEQ ID NO: 18328 - protein, 9 aa, Homo Sapiens
LIDDILEKI

SEQ ID NO: 18329 - protein, 9 aa, Homo Sapiens
LIDDLKSEL

SEQ ID NO: 18330 - protein, 9 aa, Homo Sapiens
LIDDLQHCL

SEQ ID NO: 18331 - protein, 9 aa, Homo Sapiens
LIDDVHRLF

SEQ ID NO: 18332 - protein, 9 aa, Homo Sapiens
LIDEDVYRL

SEQ ID NO: 18333 - protein, 9 aa, Homo Sapiens
LIDEGSHMV

SEQ ID NO: 18334 - protein, 9 aa, Homo Sapiens
LIDELHRHL

SEQ ID NO: 18335 - protein, 9 aa, Homo Sapiens
LIDELNQAL

SEQ ID NO: 18336 - protein, 9 aa, Homo Sapiens
LIDEMVNTI

SEQ ID NO: 18337 - protein, 9 aa, Homo Sapiens
LIDEPSAYL

SEQ ID NO: 18338 - protein, 9 aa, Homo Sapiens
LIDEQILCV

SEQ ID NO: 18339 - protein, 9 aa, Homo Sapiens
LIDESVHAL

SEQ ID NO: 18340 - protein, 9 aa, Homo Sapiens
LIDGQVIQL

SEQ ID NO: 18341 - protein, 9 aa, Homo Sapiens
LIDIFIINL

SEQ ID NO: 18342 - protein, 9 aa, Homo Sapiens
LIDKIIEYL

SEQ ID NO: 18343 - protein, 9 aa, Homo Sapiens
LIDNHQVTV

SEQ ID NO: 18344 - protein, 9 aa, Homo Sapiens
LIDPFHKAI

SEQ ID NO: 18345 - protein, 9 aa, Homo Sapiens
LIDPNTLQV

SEQ ID NO: 18346 - protein, 9 aa, Homo Sapiens
LIDQKVYEL

SEQ ID NO: 18347 - protein, 9 aa, Homo Sapiens
LIDTSRHYL

SEQ ID NO: 18348 - protein, 9 aa, Homo Sapiens
LIDYTLEFL

SEQ ID NO: 18349 - protein, 9 aa, Homo Sapiens
LIGEFLEKV

SEQ ID NO: 18350 - protein, 9 aa, Homo Sapiens
LILDPIFKV

SEQ ID NO: 18351 - protein, 9 aa, Homo Sapiens
LILNDFPSV

SEQ ID NO: 18352 - protein, 9 aa, Homo Sapiens
LIPEGPPQV

SEQ ID NO: 18353 - protein, 9 aa, Homo Sapiens
LIPEVFTYF

SEQ ID NO: 18354 - protein, 9 aa, Homo Sapiens
LIPEYLNFI

SEQ ID NO: 18355 - protein, 9 aa, Homo Sapiens
LIPPPGEQL

SEQ ID NO: 18356 - protein, 9 aa, Homo Sapiens
LIPPPLAPI

SEQ ID NO: 18357 - protein, 9 aa, Homo Sapiens
LISESFLTV

SEQ ID NO: 18358 - protein, 9 aa, Homo Sapiens
LITAILVKV

SEQ ID NO: 18359 - protein, 9 aa, Homo Sapiens
LIWPLLSTV

SEQ ID NO: 18360 - protein, 9 aa, Homo Sapiens
LIYEETRGV

SEQ ID NO: 18361 - protein, 9 aa, Homo Sapiens
LLAELLTHL

SEQ ID NO: 18362 - protein, 9 aa, Homo Sapiens
LLASEVPQL

SEQ ID NO: 18363 - protein, 9 aa, Homo Sapiens
LLDAFSIKL

SEQ ID NO: 18364 - protein, 9 aa, Homo Sapiens
LLDAGFLFL

SEQ ID NO: 18365 - protein, 9 aa, Homo Sapiens
LLDALQHEL

SEQ ID NO: 18366 - protein, 9 aa, Homo Sapiens
LLDANFTVV

SEQ ID NO: 18367 - protein, 9 aa, Homo Sapiens
LLDATQHTL

SEQ ID NO: 18368 - protein, 9 aa, Homo Sapiens
LLDAYLLYI

SEQ ID NO: 18369 - protein, 9 aa, Homo Sapiens
LLDDAKARL

SEQ ID NO: 18370 - protein, 9 aa, Homo Sapiens
LLDDIFAQL

SEQ ID NO: 18371 - protein, 9 aa, Homo Sapiens
LLDDIFIRL

SEQ ID NO: 18372 - protein, 9 aa, Homo Sapiens
LLDDKAQAL

SEQ ID NO: 18373 - protein, 9 aa, Homo Sapiens
LLDDNFASI

SEQ ID NO: 18374 - protein, 9 aa, Homo Sapiens
LLDDNRELL

SEQ ID NO: 18375 - protein, 9 aa, Homo Sapiens
LLDDRKLEL

SEQ ID NO: 18376 - protein, 9 aa, Homo Sapiens
LLDDSLVSI

SEQ ID NO: 18377 - protein, 9 aa, Homo Sapiens
LLDDTTVTL

SEQ ID NO: 18378 - protein, 9 aa, Homo Sapiens
LLDEAIQAV

SEQ ID NO: 18379 - protein, 9 aa, Homo Sapiens
LLDEAQVTL

SEQ ID NO: 18380 - protein, 9 aa, Homo Sapiens
LLDEEISRV

SEQ ID NO: 18381 - protein, 9 aa, Homo Sapiens
LLDEFTTKL

SEQ ID NO: 18382 - protein, 9 aa, Homo Sapiens
LLDEFYKLV

SEQ ID NO: 18383 - protein, 9 aa, Homo Sapiens
LLDELVQSL

SEQ ID NO: 18384 - protein, 9 aa, Homo Sapiens
LLDEMKFSL

SEQ ID NO: 18385 - protein, 9 aa, Homo Sapiens
LLDENLLKM

SEQ ID NO: 18386 - protein, 9 aa, Homo Sapiens
LLDEPFLQF

SEQ ID NO: 18387 - protein, 9 aa, Homo Sapiens
LLDEPTNML

SEQ ID NO: 18388 - protein, 9 aa, Homo Sapiens
LLDEQFAVL

SEQ ID NO: 18389 - protein, 9 aa, Homo Sapiens
LLDEQTSLL

SEQ ID NO: 18390 - protein, 9 aa, Homo Sapiens
LLDERLVTL

SEQ ID NO: 18391 - protein, 9 aa, Homo Sapiens
LLDESRPLF

SEQ ID NO: 18392 - protein, 9 aa, Homo Sapiens
LLDEVIQEF

SEQ ID NO: 18393 - protein, 9 aa, Homo Sapiens
LLDEVLHTM

SEQ ID NO: 18394 - protein, 9 aa, Homo Sapiens
LLDEVLNVM

SEQ ID NO: 18395 - protein, 9 aa, Homo Sapiens
LLDEVMKSL

SEQ ID NO: 18396 - protein, 9 aa, Homo Sapiens
LLDFNFEQL

SEQ ID NO: 18397 - protein, 9 aa, Homo Sapiens
LLDFVKPEF

SEQ ID NO: 18398 - protein, 9 aa, Homo Sapiens
LLDGFPRTL

SEQ ID NO: 18399 - protein, 9 aa, Homo Sapiens
LLDGFPRTV

SEQ ID NO: 18400 - protein, 9 aa, Homo Sapiens
LLDGKVLSL

SEQ ID NO: 18401 - protein, 9 aa, Homo Sapiens
LLDGLHEDL

SEQ ID NO: 18402 - protein, 9 aa, Homo Sapiens
LLDGNPFRV

SEQ ID NO: 18403 - protein, 9 aa, Homo Sapiens
LLDGVIFGA

SEQ ID NO: 18404 - protein, 9 aa, Homo Sapiens
LLDGVPVAL

SEQ ID NO: 18405 - protein, 9 aa, Homo Sapiens
LLDGVVEKL

SEQ ID NO: 18406 - protein, 9 aa, Homo Sapiens
LLDHDAFVL

SEQ ID NO: 18407 - protein, 9 aa, Homo Sapiens
LLDHLHLEL

SEQ ID NO: 18408 - protein, 9 aa, Homo Sapiens
LLDHVLLTL

SEQ ID NO: 18409 - protein, 9 aa, Homo Sapiens
LLDKLLIRL

SEQ ID NO: 18410 - protein, 9 aa, Homo Sapiens
LLDKLQTYL

SEQ ID NO: 18411 - protein, 9 aa, Homo Sapiens
LLDKNCHLL

SEQ ID NO: 18412 - protein, 9 aa, Homo Sapiens
LLDKVYSSV

SEQ ID NO: 18413 - protein, 9 aa, Homo Sapiens
LLDKYFGSV

SEQ ID NO: 18414 - protein, 9 aa, Homo Sapiens
LLDLALEGM

SEQ ID NO: 18415 - protein, 9 aa, Homo Sapiens
LLDLHSYLL

SEQ ID NO: 18416 - protein, 9 aa, Homo Sapiens
LLDLMIAKI

SEQ ID NO: 18417 - protein, 9 aa, Homo Sapiens
LLDLSFAYM

SEQ ID NO: 18418 - protein, 9 aa, Homo Sapiens
LLDMPLWYL

SEQ ID NO: 18419 - protein, 9 aa, Homo Sapiens
LLDMSLVKL

SEQ ID NO: 18420 - protein, 9 aa, Homo Sapiens
LLDMSYEQL

SEQ ID NO: 18421 - protein, 9 aa, Homo Sapiens
LLDNDHYAM

SEQ ID NO: 18422 - protein, 9 aa, Homo Sapiens
LLDNIIQHM

SEQ ID NO: 18423 - protein, 9 aa, Homo Sapiens
LLDNTDIHL

SEQ ID NO: 18424 - protein, 9 aa, Homo Sapiens
LLDNVTVLI

SEQ ID NO: 18425 - protein, 9 aa, Homo Sapiens
LLDNVVNCL

SEQ ID NO: 18426 - protein, 9 aa, Homo Sapiens
LLDPASHKL

SEQ ID NO: 18427 - protein, 9 aa, Homo Sapiens
LLDPPRPNL

SEQ ID NO: 18428 - protein, 9 aa, Homo Sapiens
LLDPSVFHV

SEQ ID NO: 18429 - protein, 9 aa, Homo Sapiens
LLDQEINRL

SEQ ID NO: 18430 - protein, 9 aa, Homo Sapiens
LLDQINSTF

SEQ ID NO: 18431 - protein, 9 aa, Homo Sapiens
LLDQSDPGL

SEQ ID NO: 18432 - protein, 9 aa, Homo Sapiens
LLDQVQTVL

SEQ ID NO: 18433 - protein, 9 aa, Homo Sapiens
LLDRFLATV

SEQ ID NO: 18434 - protein, 9 aa, Homo Sapiens
LLDRILPKL

SEQ ID NO: 18435 - protein, 9 aa, Homo Sapiens
LLDRMVHLL

SEQ ID NO: 18436 - protein, 9 aa, Homo Sapiens
LLDRVITNV

SEQ ID NO: 18437 - protein, 9 aa, Homo Sapiens
LLDSAPLNV

SEQ ID NO: 18438 - protein, 9 aa, Homo Sapiens
LLDSCTKLL

SEQ ID NO: 18439 - protein, 9 aa, Homo Sapiens
LLDSGAFHL

SEQ ID NO: 18440 - protein, 9 aa, Homo Sapiens
LLDSMHEVV

SEQ ID NO: 18441 - protein, 9 aa, Homo Sapiens
LLDSPGKVL

SEQ ID NO: 18442 - protein, 9 aa, Homo Sapiens
LLDSPYARV

SEQ ID NO: 18443 - protein, 9 aa, Homo Sapiens
LLDSQSHHL

SEQ ID NO: 18444 - protein, 9 aa, Homo Sapiens
LLDSSHSEL

SEQ ID NO: 18445 - protein, 9 aa, Homo Sapiens
LLDSTQKYL

SEQ ID NO: 18446 - protein, 9 aa, Homo Sapiens
LLDSVEVGL

SEQ ID NO: 18447 - protein, 9 aa, Homo Sapiens
LLDSVLVTL

SEQ ID NO: 18448 - protein, 9 aa, Homo Sapiens
LLDTADVAL

SEQ ID NO: 18449 - protein, 9 aa, Homo Sapiens
LLDTIRDEI

SEQ ID NO: 18450 - protein, 9 aa, Homo Sapiens
LLDTMVDTF

SEQ ID NO: 18451 - protein, 9 aa, Homo Sapiens
LLDTSSVLV

SEQ ID NO: 18452 - protein, 9 aa, Homo Sapiens
LLDTTQKYL

SEQ ID NO: 18453 - protein, 9 aa, Homo Sapiens
LLDTVLVNL

SEQ ID NO: 18454 - protein, 9 aa, Homo Sapiens
LLDTVNNVF

SEQ ID NO: 18455 - protein, 9 aa, Homo Sapiens
LLDTVTMQV

SEQ ID NO: 18456 - protein, 9 aa, Homo Sapiens
LLDTVYKGI

SEQ ID NO: 18457 - protein, 9 aa, Homo Sapiens
LLDVFYNRL

SEQ ID NO: 18458 - protein, 9 aa, Homo Sapiens
LLDVMFSSV

SEQ ID NO: 18459 - protein, 9 aa, Homo Sapiens
LLDVPTAAV

SEQ ID NO: 18460 - protein, 9 aa, Homo Sapiens
LLDVTPLSL

SEQ ID NO: 18461 - protein, 9 aa, Homo Sapiens
LLDVVHPAA

SEQ ID NO: 18462 - protein, 9 aa, Homo Sapiens
LLDYGFYLL

SEQ ID NO: 18463 - protein, 9 aa, Homo Sapiens
LLDYHLNYL

SEQ ID NO: 18464 - protein, 9 aa, Homo Sapiens
LLDYPNNLL

SEQ ID NO: 18465 - protein, 9 aa, Homo Sapiens
LLDYSFQHL

SEQ ID NO: 18466 - protein, 9 aa, Homo Sapiens
LLEDYFVPL

SEQ ID NO: 18467 - protein, 9 aa, Homo Sapiens
LLEEFVFQV

SEQ ID NO: 18468 - protein, 9 aa, Homo Sapiens
LLEEKIASL

SEQ ID NO: 18469 - protein, 9 aa, Homo Sapiens
LLEEQYFEL

SEQ ID NO: 18470 - protein, 9 aa, Homo Sapiens
LLEESIANL

SEQ ID NO: 18471 - protein, 9 aa, Homo Sapiens
LLEPFVHQV

SEQ ID NO: 18472 - protein, 9 aa, Homo Sapiens
LLEQQLWGV

SEQ ID NO: 18473 - protein, 9 aa, Homo Sapiens
LLERAIESL

SEQ ID NO: 18474 - protein, 9 aa, Homo Sapiens
LLEYHIAYL

SEQ ID NO: 18475 - protein, 9 aa, Homo Sapiens
LLFDLIPVV

SEQ ID NO: 18476 - protein, 9 aa, Homo Sapiens
LLFDPLGGV

SEQ ID NO: 18477 - protein, 9 aa, Homo Sapiens
LLFDRPMHV

SEQ ID NO: 18478 - protein, 9 aa, Homo Sapiens
LLFDSVIHL

SEQ ID NO: 18479 - protein, 9 aa, Homo Sapiens
LLFDVHTTL

SEQ ID NO: 18480 - protein, 9 aa, Homo Sapiens
LLFSAFSRA

SEQ ID NO: 18481 - protein, 9 aa, Homo Sapiens
LLGEVLTQL

SEQ ID NO: 18482 - protein, 9 aa, Homo Sapiens
LLGPKPFPL

SEQ ID NO: 18483 - protein, 9 aa, Homo Sapiens
LLGPPPVGV

SEQ ID NO: 18484 - protein, 9 aa, Homo Sapiens
LLHEKLYEL

SEQ ID NO: 18485 - protein, 9 aa, Homo Sapiens
LLHELLTHV

SEQ ID NO: 18486 - protein, 9 aa, Homo Sapiens
LLIAPMPTA

SEQ ID NO: 18487 - protein, 9 aa, Homo Sapiens
LLIDLFKYL

SEQ ID NO: 18488 - protein, 9 aa, Homo Sapiens
LLIGATMQV

SEQ ID NO: 18489 - protein, 9 aa, Homo Sapiens
LLIGHLERV

SEQ ID NO: 18490 - protein, 9 aa, Homo Sapiens
LLIPGLATA

SEQ ID NO: 18491 - protein, 9 aa, Homo Sapiens
LLKDSIVQL

SEQ ID NO: 18492 - protein, 9 aa, Homo Sapiens
LLLAATPGL

SEQ ID NO: 18493 - protein, 9 aa, Homo Sapiens
LLLDRIASV

SEQ ID NO: 18494 - protein, 9 aa, Homo Sapiens
LLLEAVWHL

SEQ ID NO: 18495 - protein, 9 aa, Homo Sapiens
LLLEILHEI

SEQ ID NO: 18496 - protein, 9 aa, Homo Sapiens
LLLNELPSV

SEQ ID NO: 18497 - protein, 9 aa, Homo Sapiens
LLLPILVTV

SEQ ID NO: 18498 - protein, 9 aa, Homo Sapiens
LLLPKLPTL

SEQ ID NO: 18499 - protein, 9 aa, Homo Sapiens
LLMDRVDEM

SEQ ID NO: 18500 - protein, 9 aa, Homo Sapiens
LLMEHIFKL

SEQ ID NO: 18501 - protein, 9 aa, Homo Sapiens
LLMEHIQEI

SEQ ID NO: 18502 - protein, 9 aa, Homo Sapiens
LLNEILEQV

SEQ ID NO: 18503 - protein, 9 aa, Homo Sapiens
LLPAVKVFL

SEQ ID NO: 18504 - protein, 9 aa, Homo Sapiens
LLPAVVMHL

SEQ ID NO: 18505 - protein, 9 aa, Homo Sapiens
LLPDEIADV

SEQ ID NO: 18506 - protein, 9 aa, Homo Sapiens
LLPDHTYSV

SEQ ID NO: 18507 - protein, 9 aa, Homo Sapiens
LLPDIISRL

SEQ ID NO: 18508 - protein, 9 aa, Homo Sapiens
LLPDIVTCV

SEQ ID NO: 18509 - protein, 9 aa, Homo Sapiens
LLPDKWFDI

SEQ ID NO: 18510 - protein, 9 aa, Homo Sapiens
LLPDLAAKA

SEQ ID NO: 18511 - protein, 9 aa, Homo Sapiens
LLPDLIQKV

SEQ ID NO: 18512 - protein, 9 aa, Homo Sapiens
LLPDMEATL

SEQ ID NO: 18513 - protein, 9 aa, Homo Sapiens
LLPDNFIAA

SEQ ID NO: 18514 - protein, 9 aa, Homo Sapiens
LLPDNVHYV

SEQ ID NO: 18515 - protein, 9 aa, Homo Sapiens
LLPDPLYSL

SEQ ID NO: 18516 - protein, 9 aa, Homo Sapiens
LLPDQIEKL

SEQ ID NO: 18517 - protein, 9 aa, Homo Sapiens
LLPDTNVLL

SEQ ID NO: 18518 - protein, 9 aa, Homo Sapiens
LLPDVFDDL

SEQ ID NO: 18519 - protein, 9 aa, Homo Sapiens
LLPEDFLML

SEQ ID NO: 18520 - protein, 9 aa, Homo Sapiens
LLPEDSQKL

SEQ ID NO: 18521 - protein, 9 aa, Homo Sapiens
LLPEEFISL

SEQ ID NO: 18522 - protein, 9 aa, Homo Sapiens
LLPEEQVYL

SEQ ID NO: 18523 - protein, 9 aa, Homo Sapiens
LLPEGPPAI

SEQ ID NO: 18524 - protein, 9 aa, Homo Sapiens
LLPEHFLFL

SEQ ID NO: 18525 - protein, 9 aa, Homo Sapiens
LLPEIMPGL

SEQ ID NO: 18526 - protein, 9 aa, Homo Sapiens
LLPELLSAL

SEQ ID NO: 18527 - protein, 9 aa, Homo Sapiens
LLPENTFIV

SEQ ID NO: 18528 - protein, 9 aa, Homo Sapiens
LLPEPLVSI

SEQ ID NO: 18529 - protein, 9 aa, Homo Sapiens
LLPERPSYL

SEQ ID NO: 18530 - protein, 9 aa, Homo Sapiens
LLPESIPFL

SEQ ID NO: 18531 - protein, 9 aa, Homo Sapiens
LLPEVEAYL

SEQ ID NO: 18532 - protein, 9 aa, Homo Sapiens
LLPEYHQRV

SEQ ID NO: 18533 - protein, 9 aa, Homo Sapiens
LLPEYLPYA

SEQ ID NO: 18534 - protein, 9 aa, Homo Sapiens
LLPGFLQAV

SEQ ID NO: 18535 - protein, 9 aa, Homo Sapiens
LLPGLLKTI

SEQ ID NO: 18536 - protein, 9 aa, Homo Sapiens
LLPGPVTLV

SEQ ID NO: 18537 - protein, 9 aa, Homo Sapiens
LLPGVIKTV

SEQ ID NO: 18538 - protein, 9 aa, Homo Sapiens
LLPHILPLL

SEQ ID NO: 18539 - protein, 9 aa, Homo Sapiens
LLPHLLPAL

SEQ ID NO: 18540 - protein, 9 aa, Homo Sapiens
LLPHPGLKV

SEQ ID NO: 18541 - protein, 9 aa, Homo Sapiens
LLPHPGLQV

SEQ ID NO: 18542 - protein, 9 aa, Homo Sapiens
LLPIILTAL

SEQ ID NO: 18543 - protein, 9 aa, Homo Sapiens
LLPIKTVGV

SEQ ID NO: 18544 - protein, 9 aa, Homo Sapiens
LLPIYAVTV

SEQ ID NO: 18545 - protein, 9 aa, Homo Sapiens
LLPKAMIEV

SEQ ID NO: 18546 - protein, 9 aa, Homo Sapiens
LLPKEIVKV

SEQ ID NO: 18547 - protein, 9 aa, Homo Sapiens
LLPKHPHLV

SEQ ID NO: 18548 - protein, 9 aa, Homo Sapiens
LLPLFLAQL

SEQ ID NO: 18549 - protein, 9 aa, Homo Sapiens
LLPLLIQTV

SEQ ID NO: 18550 - protein, 9 aa, Homo Sapiens
LLPLPFEEL

SEQ ID NO: 18551 - protein, 9 aa, Homo Sapiens
LLPNAVYKV

SEQ ID NO: 18552 - protein, 9 aa, Homo Sapiens
LLPPAPPHA

SEQ ID NO: 18553 - protein, 9 aa, Homo Sapiens
LLPPLLHTL

SEQ ID NO: 18554 - protein, 9 aa, Homo Sapiens
LLPPPGSCA

SEQ ID NO: 18555 - protein, 9 aa, Homo Sapiens
LLPPPHQGL

SEQ ID NO: 18556 - protein, 9 aa, Homo Sapiens
LLPPPMKEL

SEQ ID NO: 18557 - protein, 9 aa, Homo Sapiens
LLPPPPCPA

SEQ ID NO: 18558 - protein, 9 aa, Homo Sapiens
LLPPPPQML

SEQ ID NO: 18559 - protein, 9 aa, Homo Sapiens
LLPPPPSSL

SEQ ID NO: 18560 - protein, 9 aa, Homo Sapiens
LLPPVTLAA

SEQ ID NO: 18561 - protein, 9 aa, Homo Sapiens
LLPPVVWLL

SEQ ID NO: 18562 - protein, 9 aa, Homo Sapiens
LLPPWVIYL

SEQ ID NO: 18563 - protein, 9 aa, Homo Sapiens
LLPPYICQL

SEQ ID NO: 18564 - protein, 9 aa, Homo Sapiens
LLPQDVHLL

SEQ ID NO: 18565 - protein, 9 aa, Homo Sapiens
LLPQGLPGL

SEQ ID NO: 18566 - protein, 9 aa, Homo Sapiens
LLPQIFVKM

SEQ ID NO: 18567 - protein, 9 aa, Homo Sapiens
LLPQILENL

SEQ ID NO: 18568 - protein, 9 aa, Homo Sapiens
LLPQQLPEC

SEQ ID NO: 18569 - protein, 9 aa, Homo Sapiens
LLPQQSYSL

SEQ ID NO: 18570 - protein, 9 aa, Homo Sapiens
LLPSDVARL

SEQ ID NO: 18571 - protein, 9 aa, Homo Sapiens
LLPSEVPAL

SEQ ID NO: 18572 - protein, 9 aa, Homo Sapiens
LLPSKLASV

SEQ ID NO: 18573 - protein, 9 aa, Homo Sapiens
LLPSPTPGL

SEQ ID NO: 18574 - protein, 9 aa, Homo Sapiens
LLPSVRQEV

SEQ ID NO: 18575 - protein, 9 aa, Homo Sapiens
LLPTAPTTV

SEQ ID NO: 18576 - protein, 9 aa, Homo Sapiens
LLPTGVFQV

SEQ ID NO: 18577 - protein, 9 aa, Homo Sapiens
LLPTIVEKV

SEQ ID NO: 18578 - protein, 9 aa, Homo Sapiens
LLPVITKEL

SEQ ID NO: 18579 - protein, 9 aa, Homo Sapiens
LLPVPVPAV

SEQ ID NO: 18580 - protein, 9 aa, Homo Sapiens
LLPYVLENV

SEQ ID NO: 18581 - protein, 9 aa, Homo Sapiens
LLQDIILQV

SEQ ID NO: 18582 - protein, 9 aa, Homo Sapiens
LLQDKQFEL

SEQ ID NO: 18583 - protein, 9 aa, Homo Sapiens
LLQPVTPSL

SEQ ID NO: 18584 - protein, 9 aa, Homo Sapiens
LLQQRLEEL

SEQ ID NO: 18585 - protein, 9 aa, Homo Sapiens
LLREKVEFL

SEQ ID NO: 18586 - protein, 9 aa, Homo Sapiens
LLRLPTPTV

SEQ ID NO: 18587 - protein, 9 aa, Homo Sapiens
LLSAEPVPA

SEQ ID NO: 18588 - protein, 9 aa, Homo Sapiens
LLSEILHLL

SEQ ID NO: 18589 - protein, 9 aa, Homo Sapiens
LLTDILVFL

SEQ ID NO: 18590 - protein, 9 aa, Homo Sapiens
LLTEQIHSL

SEQ ID NO: 18591 - protein, 9 aa, Homo Sapiens
LLVDEFLKV

SEQ ID NO: 18592 - protein, 9 aa, Homo Sapiens
LLVDYYVKI

SEQ ID NO: 18593 - protein, 9 aa, Homo Sapiens
LLVGFVHYL

SEQ ID NO: 18594 - protein, 9 aa, Homo Sapiens
LLVPVICQI

SEQ ID NO: 18595 - protein, 9 aa, Homo Sapiens
LLWDYVYQL

SEQ ID NO: 18596 - protein, 9 aa, Homo Sapiens
LLWGDLIWL

SEQ ID NO: 18597 - protein, 9 aa, Homo Sapiens
LLWKSGPVV

SEQ ID NO: 18598 - protein, 9 aa, Homo Sapiens
LLYDNVPGA

SEQ ID NO: 18599 - protein, 9 aa, Homo Sapiens
LLYENITFV

SEQ ID NO: 18600 - protein, 9 aa, Homo Sapiens
LLYEQYAIV

SEQ ID NO: 18601 - protein, 9 aa, Homo Sapiens
LLYGHTVTV

SEQ ID NO: 18602 - protein, 9 aa, Homo Sapiens
LLYGKYVSV

SEQ ID NO: 18603 - protein, 9 aa, Homo Sapiens
LLYHYWIAV

SEQ ID NO: 18604 - protein, 9 aa, Homo Sapiens
LMDAIQTNF

SEQ ID NO: 18605 - protein, 9 aa, Homo Sapiens
LMDESVLKF

SEQ ID NO: 18606 - protein, 9 aa, Homo Sapiens
LMDEVIKSM

SEQ ID NO: 18607 - protein, 9 aa, Homo Sapiens
LMDLDVEQL

SEQ ID NO: 18608 - protein, 9 aa, Homo Sapiens
LMDNPTLYL

SEQ ID NO: 18609 - protein, 9 aa, Homo Sapiens
LMDSIVKNV

SEQ ID NO: 18610 - protein, 9 aa, Homo Sapiens
LMDSNLPRL

SEQ ID NO: 18611 - protein, 9 aa, Homo Sapiens
LMDWIEAQI

SEQ ID NO: 18612 - protein, 9 aa, Homo Sapiens
LMNPMVPGL

SEQ ID NO: 18613 - protein, 9 aa, Homo Sapiens
LMPATLARA

SEQ ID NO: 18614 - protein, 9 aa, Homo Sapiens
LMPMPSLGF

SEQ ID NO: 18615 - protein, 9 aa, Homo Sapiens
LMPQVLTTL

SEQ ID NO: 18616 - protein, 9 aa, Homo Sapiens
LMPWVQETL

SEQ ID NO: 18617 - protein, 9 aa, Homo Sapiens
LMQTEFHHV

SEQ ID NO: 18618 - protein, 9 aa, Homo Sapiens
LMTDVLVFL

SEQ ID NO: 18619 - protein, 9 aa, Homo Sapiens
LMVDHVTEV

SEQ ID NO: 18620 - protein, 9 aa, Homo Sapiens
LMVPVFVVL

SEQ ID NO: 18621 - protein, 9 aa, Homo Sapiens
LMYPYIFHV

SEQ ID NO: 18622 - protein, 9 aa, Homo Sapiens
LQDDFYLNL

SEQ ID NO: 18623 - protein, 9 aa, Homo Sapiens
LQDDIPTTF

SEQ ID NO: 18624 - protein, 9 aa, Homo Sapiens
LQDELFELL

SEQ ID NO: 18625 - protein, 9 aa, Homo Sapiens
LQNDLYITV

SEQ ID NO: 18626 - protein, 9 aa, Homo Sapiens
LQPDKVPEI

SEQ ID NO: 18627 - protein, 9 aa, Homo Sapiens
LRDEFLVKI

SEQ ID NO: 18628 - protein, 9 aa, Homo Sapiens
LSDNIFTHF

SEQ ID NO: 18629 - protein, 9 aa, Homo Sapiens
LSDPIVNTL

SEQ ID NO: 18630 - protein, 9 aa, Homo Sapiens
LSPDYLPAM

SEQ ID NO: 18631 - protein, 9 aa, Homo Sapiens
LSPEFFTSV

SEQ ID NO: 18632 - protein, 9 aa, Homo Sapiens
LSPGLLPHL

SEQ ID NO: 18633 - protein, 9 aa, Homo Sapiens
LTDNVMITV

SEQ ID NO: 18634 - protein, 9 aa, Homo Sapiens
LTDQTLIYL

SEQ ID NO: 18635 - protein, 9 aa, Homo Sapiens
LTDTFYYRL

SEQ ID NO: 18636 - protein, 9 aa, Homo Sapiens
LTPKLFHEV

SEQ ID NO: 18637 - protein, 9 aa, Homo Sapiens
LTPVRLPSI

SEQ ID NO: 18638 - protein, 9 aa, Homo Sapiens
LVDAIHNQL

SEQ ID NO: 18639 - protein, 9 aa, Homo Sapiens
LVDDFRIRL

SEQ ID NO: 18640 - protein, 9 aa, Homo Sapiens
LVDDHFVEL

SEQ ID NO: 18641 - protein, 9 aa, Homo Sapiens
LVDDLVDSL

SEQ ID NO: 18642 - protein, 9 aa, Homo Sapiens
LVDDNYFYL

SEQ ID NO: 18643 - protein, 9 aa, Homo Sapiens
LVDDSVNNV

SEQ ID NO: 18644 - protein, 9 aa, Homo Sapiens
LVDDYTFNV

SEQ ID NO: 18645 - protein, 9 aa, Homo Sapiens
LVDEAKNYL

SEQ ID NO: 18646 - protein, 9 aa, Homo Sapiens
LVDEIMMTL

SEQ ID NO: 18647 - protein, 9 aa, Homo Sapiens
LVDENFTEL

SEQ ID NO: 18648 - protein, 9 aa, Homo Sapiens
LVDENQFTL

SEQ ID NO: 18649 - protein, 9 aa, Homo Sapiens
LVDEPLLKL

SEQ ID NO: 18650 - protein, 9 aa, Homo Sapiens
LVDEVMLTL

SEQ ID NO: 18651 - protein, 9 aa, Homo Sapiens
LVDFVIHFM

SEQ ID NO: 18652 - protein, 9 aa, Homo Sapiens
LVDGPCTQV

SEQ ID NO: 18653 - protein, 9 aa, Homo Sapiens
LVDGQIFCL

SEQ ID NO: 18654 - protein, 9 aa, Homo Sapiens
LVDHLNVGV

SEQ ID NO: 18655 - protein, 9 aa, Homo Sapiens
LVDMVNDGV

SEQ ID NO: 18656 - protein, 9 aa, Homo Sapiens
LVDNIQQHF

SEQ ID NO: 18657 - protein, 9 aa, Homo Sapiens
LVDPHFAQV

SEQ ID NO: 18658 - protein, 9 aa, Homo Sapiens
LVDPLNMHV

SEQ ID NO: 18659 - protein, 9 aa, Homo Sapiens
LVDQRELYL

SEQ ID NO: 18660 - protein, 9 aa, Homo Sapiens
LVDSTVVHI

SEQ ID NO: 18661 - protein, 9 aa, Homo Sapiens
LVDSVLDVV

SEQ ID NO: 18662 - protein, 9 aa, Homo Sapiens
LVDTNFINF

SEQ ID NO: 18663 - protein, 9 aa, Homo Sapiens
LVDTSYKTL

SEQ ID NO: 18664 - protein, 9 aa, Homo Sapiens
LVDVIEDKL

SEQ ID NO: 18665 - protein, 9 aa, Homo Sapiens
LVEINKILL

SEQ ID NO: 18666 - protein, 9 aa, Homo Sapiens
LVELALPQL

SEQ ID NO: 18667 - protein, 9 aa, Homo Sapiens
LVFEGIMEV

SEQ ID NO: 18668 - protein, 9 aa, Homo Sapiens
LVFRPITTV

SEQ ID NO: 18669 - protein, 9 aa, Homo Sapiens
LVIARLPSV

SEQ ID NO: 18670 - protein, 9 aa, Homo Sapiens
LVIDVIHEV

SEQ ID NO: 18671 - protein, 9 aa, Homo Sapiens
LVLPVLVFL

SEQ ID NO: 18672 - protein, 9 aa, Homo Sapiens
LVNEKFWKV

SEQ ID NO: 18673 - protein, 9 aa, Homo Sapiens
LVPDVVNEV

SEQ ID NO: 18674 - protein, 9 aa, Homo Sapiens
LVPGHLDQV

SEQ ID NO: 18675 - protein, 9 aa, Homo Sapiens
LVPPTPAEI

SEQ ID NO: 18676 - protein, 9 aa, Homo Sapiens
LVPSDFLSV

SEQ ID NO: 18677 - protein, 9 aa, Homo Sapiens
LVQDILLNV

SEQ ID NO: 18678 - protein, 9 aa, Homo Sapiens
LVSDLLSEL

SEQ ID NO: 18679 - protein, 9 aa, Homo Sapiens
LVYEAIIMV

SEQ ID NO: 18680 - protein, 9 aa, Homo Sapiens
MAPPTIPSA

SEQ ID NO: 18681 - protein, 9 aa, Homo Sapiens
MAPTLLPEL

SEQ ID NO: 18682 - protein, 9 aa, Homo Sapiens
MIDDTYQCL

SEQ ID NO: 18683 - protein, 9 aa, Homo Sapiens
MIDMPVERM

SEQ ID NO: 18684 - protein, 9 aa, Homo Sapiens
MIDNVILLI

SEQ ID NO: 18685 - protein, 9 aa, Homo Sapiens
MIDPDIYLL

SEQ ID NO: 18686 - protein, 9 aa, Homo Sapiens
MIDPPRAAV

SEQ ID NO: 18687 - protein, 9 aa, Homo Sapiens
MIIENFEAL

SEQ ID NO: 18688 - protein, 9 aa, Homo Sapiens
MIPTFTALL

SEQ ID NO: 18689 - protein, 9 aa, Homo Sapiens
MLAEKLPNL

SEQ ID NO: 18690 - protein, 9 aa, Homo Sapiens
MLDAALATL

SEQ ID NO: 18691 - protein, 9 aa, Homo Sapiens
MLDAAVIKM

SEQ ID NO: 18692 - protein, 9 aa, Homo Sapiens
MLDAIPMML

SEQ ID NO: 18693 - protein, 9 aa, Homo Sapiens
MLDEILEDV

SEQ ID NO: 18694 - protein, 9 aa, Homo Sapiens
MLDEILLQL

SEQ ID NO: 18695 - protein, 9 aa, Homo Sapiens
MLDEMKDNL

SEQ ID NO: 18696 - protein, 9 aa, Homo Sapiens
MLDEPTNHL

SEQ ID NO: 18697 - protein, 9 aa, Homo Sapiens
MLDKLVDGL

SEQ ID NO: 18698 - protein, 9 aa, Homo Sapiens
MLDNSFERL

SEQ ID NO: 18699 - protein, 9 aa, Homo Sapiens
MLDPLEVHL

SEQ ID NO: 18700 - protein, 9 aa, Homo Sapiens
MLDQINSCL

SEQ ID NO: 18701 - protein, 9 aa, Homo Sapiens
MLDSLRIYL

SEQ ID NO: 18702 - protein, 9 aa, Homo Sapiens
MLDSTFSIL

SEQ ID NO: 18703 - protein, 9 aa, Homo Sapiens
MLDSVEKLL

SEQ ID NO: 18704 - protein, 9 aa, Homo Sapiens
MLEEVFHNL

SEQ ID NO: 18705 - protein, 9 aa, Homo Sapiens
MLFDKFRSV

SEQ ID NO: 18706 - protein, 9 aa, Homo Sapiens
MLFGHPLLV

SEQ ID NO: 18707 - protein, 9 aa, Homo Sapiens
MLFGTYMKV

SEQ ID NO: 18708 - protein, 9 aa, Homo Sapiens
MLFSIRSFV

SEQ ID NO: 18709 - protein, 9 aa, Homo Sapiens
MLGERLFPL

SEQ ID NO: 18710 - protein, 9 aa, Homo Sapiens
MLGIPALLL

SEQ ID NO: 18711 - protein, 9 aa, Homo Sapiens
MLHSVTLFL

SEQ ID NO: 18712 - protein, 9 aa, Homo Sapiens
MLIEVIEKL

SEQ ID NO: 18713 - protein, 9 aa, Homo Sapiens
MLIGEIFEL

SEQ ID NO: 18714 - protein, 9 aa, Homo Sapiens
MLLDVMHTV

SEQ ID NO: 18715 - protein, 9 aa, Homo Sapiens
MLPASLIQA

SEQ ID NO: 18716 - protein, 9 aa, Homo Sapiens
MLPATPWGV

SEQ ID NO: 18717 - protein, 9 aa, Homo Sapiens
MLPDQEYKV

SEQ ID NO: 18718 - protein, 9 aa, Homo Sapiens
MLPEFYKTV

SEQ ID NO: 18719 - protein, 9 aa, Homo Sapiens
MLPEKLRPL

SEQ ID NO: 18720 - protein, 9 aa, Homo Sapiens
MLPENVAYL

SEQ ID NO: 18721 - protein, 9 aa, Homo Sapiens
MLPGFLHRL

SEQ ID NO: 18722 - protein, 9 aa, Homo Sapiens
MLPGILSQL

SEQ ID NO: 18723 - protein, 9 aa, Homo Sapiens
MLPGLALLL

SEQ ID NO: 18724 - protein, 9 aa, Homo Sapiens
MLPKDIAKL

SEQ ID NO: 18725 - protein, 9 aa, Homo Sapiens
MLPLLLTAV

SEQ ID NO: 18726 - protein, 9 aa, Homo Sapiens
MLPPPPLTA

SEQ ID NO: 18727 - protein, 9 aa, Homo Sapiens
MLPPVLTHL

SEQ ID NO: 18728 - protein, 9 aa, Homo Sapiens
MLPSILNQL

SEQ ID NO: 18729 - protein, 9 aa, Homo Sapiens
MLPSILVLL

SEQ ID NO: 18730 - protein, 9 aa, Homo Sapiens
MLPVRLATA

SEQ ID NO: 18731 - protein, 9 aa, Homo Sapiens
MLQPYMPTV

SEQ ID NO: 18732 - protein, 9 aa, Homo Sapiens
MLYEFFVKV

SEQ ID NO: 18733 - protein, 9 aa, Homo Sapiens
MMDRIVTGL

SEQ ID NO: 18734 - protein, 9 aa, Homo Sapiens
MMDSLFLKL

SEQ ID NO: 18735 - protein, 9 aa, Homo Sapiens
MMDTVISLL

SEQ ID NO: 18736 - protein, 9 aa, Homo Sapiens
MMLDDLLQL

SEQ ID NO: 18737 - protein, 9 aa, Homo Sapiens
MMPAVFHTV

SEQ ID NO: 18738 - protein, 9 aa, Homo Sapiens
MMPDGTLGL

SEQ ID NO: 18739 - protein, 9 aa, Homo Sapiens
MMPKYLNFV

SEQ ID NO: 18740 - protein, 9 aa, Homo Sapiens
MMPLKVWEL

SEQ ID NO: 18741 - protein, 9 aa, Homo Sapiens
MMPPPPAAM

SEQ ID NO: 18742 - protein, 9 aa, Homo Sapiens
MMPPPPMGM

SEQ ID NO: 18743 - protein, 9 aa, Homo Sapiens
MMPPPVGMV

SEQ ID NO: 18744 - protein, 9 aa, Homo Sapiens
MMPSRFDDL

SEQ ID NO: 18745 - protein, 9 aa, Homo Sapiens
MMPTRFEDL

SEQ ID NO: 18746 - protein, 9 aa, Homo Sapiens
MMVGDLLEV

SEQ ID NO: 18747 - protein, 9 aa, Homo Sapiens
MQPWALPTV

SEQ ID NO: 18748 - protein, 9 aa, Homo Sapiens
MTDEIFHDV

SEQ ID NO: 18749 - protein, 9 aa, Homo Sapiens
MVAPAVASV

SEQ ID NO: 18750 - protein, 9 aa, Homo Sapiens
MVDDRLVTM

SEQ ID NO: 18751 - protein, 9 aa, Homo Sapiens
MVDDVFYIV

SEQ ID NO: 18752 - protein, 9 aa, Homo Sapiens
MVDELFAEI

SEQ ID NO: 18753 - protein, 9 aa, Homo Sapiens
MVDERTDYL

SEQ ID NO: 18754 - protein, 9 aa, Homo Sapiens
MVDGKPVNL

SEQ ID NO: 18755 - protein, 9 aa, Homo Sapiens
MVDGLRITF

SEQ ID NO: 18756 - protein, 9 aa, Homo Sapiens
MVDPFHTLF

SEQ ID NO: 18757 - protein, 9 aa, Homo Sapiens
MVDSKPVNL

SEQ ID NO: 18758 - protein, 9 aa, Homo Sapiens
MVDTFLQKL

SEQ ID NO: 18759 - protein, 9 aa, Homo Sapiens
MVDVIFADV

SEQ ID NO: 18760 - protein, 9 aa, Homo Sapiens
MVDVIWRQL

SEQ ID NO: 18761 - protein, 9 aa, Homo Sapiens
MVPEDVPRL

SEQ ID NO: 18762 - protein, 9 aa, Homo Sapiens
MVVDIVQEL

SEQ ID NO: 18763 - protein, 9 aa, Homo Sapiens
MVWEGLNVV

SEQ ID NO: 18764 - protein, 9 aa, Homo Sapiens
NADAIVVKL

SEQ ID NO: 18765 - protein, 9 aa, Homo Sapiens
NAPKWVPSL

SEQ ID NO: 18766 - protein, 9 aa, Homo Sapiens
NGPELLPRV

SEQ ID NO: 18767 - protein, 9 aa, Homo Sapiens
NIDDVVRFL

SEQ ID NO: 18768 - protein, 9 aa, Homo Sapiens
NIDEAITLL

SEQ ID NO: 18769 - protein, 9 aa, Homo Sapiens
NIDEAYKIL

SEQ ID NO: 18770 - protein, 9 aa, Homo Sapiens
NIDEIYKAL

SEQ ID NO: 18771 - protein, 9 aa, Homo Sapiens
NIDELITFL

SEQ ID NO: 18772 - protein, 9 aa, Homo Sapiens
NIDEVVNKI

SEQ ID NO: 18773 - protein, 9 aa, Homo Sapiens
NIDHLLLNL

SEQ ID NO: 18774 - protein, 9 aa, Homo Sapiens
NIDLVVKEL

SEQ ID NO: 18775 - protein, 9 aa, Homo Sapiens
NIDNVPLLV

SEQ ID NO: 18776 - protein, 9 aa, Homo Sapiens
NIDSIFIVL

SEQ ID NO: 18777 - protein, 9 aa, Homo Sapiens
NIDSIIQRL

SEQ ID NO: 18778 - protein, 9 aa, Homo Sapiens
NIDTFIEHL

SEQ ID NO: 18779 - protein, 9 aa, Homo Sapiens
NIDTIYDRF

SEQ ID NO: 18780 - protein, 9 aa, Homo Sapiens
NIFPYPVGV

SEQ ID NO: 18781 - protein, 9 aa, Homo Sapiens
NIIPRFVQV

SEQ ID NO: 18782 - protein, 9 aa, Homo Sapiens
NIIPYITNV

SEQ ID NO: 18783 - protein, 9 aa, Homo Sapiens
NIPEITPFL

SEQ ID NO: 18784 - protein, 9 aa, Homo Sapiens
NIPLPLGTV

SEQ ID NO: 18785 - protein, 9 aa, Homo Sapiens
NIPVHLPNI

SEQ ID NO: 18786 - protein, 9 aa, Homo Sapiens
NIVEKLREV

SEQ ID NO: 18787 - protein, 9 aa, Homo Sapiens
NIVERVKEV

SEQ ID NO: 18788 - protein, 9 aa, Homo Sapiens
NIVPVIAKA

SEQ ID NO: 18789 - protein, 9 aa, Homo Sapiens
NIYAVKTAV

SEQ ID NO: 18790 - protein, 9 aa, Homo Sapiens
NLDAAVYQV

SEQ ID NO: 18791 - protein, 9 aa, Homo Sapiens
NLDALLNQL

SEQ ID NO: 18792 - protein, 9 aa, Homo Sapiens
NLDALTQHL

SEQ ID NO: 18793 - protein, 9 aa, Homo Sapiens
NLDDIYHFM

SEQ ID NO: 18794 - protein, 9 aa, Homo Sapiens
NLDDVGVRL

SEQ ID NO: 18795 - protein, 9 aa, Homo Sapiens
NLDELSMGL

SEQ ID NO: 18796 - protein, 9 aa, Homo Sapiens
NLDEVFKVM

SEQ ID NO: 18797 - protein, 9 aa, Homo Sapiens
NLDFVLSFL

SEQ ID NO: 18798 - protein, 9 aa, Homo Sapiens
NLDHVYNRL

SEQ ID NO: 18799 - protein, 9 aa, Homo Sapiens
NLDIVIIGI

SEQ ID NO: 18800 - protein, 9 aa, Homo Sapiens
NLDKAFEKL

SEQ ID NO: 18801 - protein, 9 aa, Homo Sapiens
NLDKLYHGL

SEQ ID NO: 18802 - protein, 9 aa, Homo Sapiens
NLDKVVEYL

SEQ ID NO: 18803 - protein, 9 aa, Homo Sapiens
NLDLAVLEL

SEQ ID NO: 18804 - protein, 9 aa, Homo Sapiens
NLDNAFAHV

SEQ ID NO: 18805 - protein, 9 aa, Homo Sapiens
NLDNPIQTV

SEQ ID NO: 18806 - protein, 9 aa, Homo Sapiens
NLDPAVHEV

SEQ ID NO: 18807 - protein, 9 aa, Homo Sapiens
NLDPIALKL

SEQ ID NO: 18808 - protein, 9 aa, Homo Sapiens
NLDPLVYLL

SEQ ID NO: 18809 - protein, 9 aa, Homo Sapiens
NLDRFYQQV

SEQ ID NO: 18810 - protein, 9 aa, Homo Sapiens
NLDRLIQNV

SEQ ID NO: 18811 - protein, 9 aa, Homo Sapiens
NLDSIIGRL

SEQ ID NO: 18812 - protein, 9 aa, Homo Sapiens
NLDYAILKL

SEQ ID NO: 18813 - protein, 9 aa, Homo Sapiens
NLFEWHFTV

SEQ ID NO: 18814 - protein, 9 aa, Homo Sapiens
NLFHYLTEV

SEQ ID NO: 18815 - protein, 9 aa, Homo Sapiens
NLFPPMLTV

SEQ ID NO: 18816 - protein, 9 aa, Homo Sapiens
NLHEVYETA

SEQ ID NO: 18817 - protein, 9 aa, Homo Sapiens
NLLDLLTEV

SEQ ID NO: 18818 - protein, 9 aa, Homo Sapiens
NLLKLIAEV

SEQ ID NO: 18819 - protein, 9 aa, Homo Sapiens
NLPAATFQV

SEQ ID NO: 18820 - protein, 9 aa, Homo Sapiens
NLPDEIYHV

SEQ ID NO: 18821 - protein, 9 aa, Homo Sapiens
NLPDIVSKV

SEQ ID NO: 18822 - protein, 9 aa, Homo Sapiens
NLPEELRKV

SEQ ID NO: 18823 - protein, 9 aa, Homo Sapiens
NLPEETNEL

SEQ ID NO: 18824 - protein, 9 aa, Homo Sapiens
NLPEETNEM

SEQ ID NO: 18825 - protein, 9 aa, Homo Sapiens
NLPELKTAV

SEQ ID NO: 18826 - protein, 9 aa, Homo Sapiens
NLPEQFHRA

SEQ ID NO: 18827 - protein, 9 aa, Homo Sapiens
NLPGVLPAL

SEQ ID NO: 18828 - protein, 9 aa, Homo Sapiens
NLPLPIPTV

SEQ ID NO: 18829 - protein, 9 aa, Homo Sapiens
NLPPDLVNV

SEQ ID NO: 18830 - protein, 9 aa, Homo Sapiens
NLPPHIIRL

SEQ ID NO: 18831 - protein, 9 aa, Homo Sapiens
NLPSILLKV

SEQ ID NO: 18832 - protein, 9 aa, Homo Sapiens
NLPSPSPTV

SEQ ID NO: 18833 - protein, 9 aa, Homo Sapiens
NLPTFLVEL

SEQ ID NO: 18834 - protein, 9 aa, Homo Sapiens
NLPTIFVYL

SEQ ID NO: 18835 - protein, 9 aa, Homo Sapiens
NLPTILVEI

SEQ ID NO: 18836 - protein, 9 aa, Homo Sapiens
NLPVFQPGV

SEQ ID NO: 18837 - protein, 9 aa, Homo Sapiens
NLPWKFEHI

SEQ ID NO: 18838 - protein, 9 aa, Homo Sapiens
NLPWYLPSA

SEQ ID NO: 18839 - protein, 9 aa, Homo Sapiens
NLWSLVAKV

SEQ ID NO: 18840 - protein, 9 aa, Homo Sapiens
NLYPFVKTV

SEQ ID NO: 18841 - protein, 9 aa, Homo Sapiens
NMDDVIYYV

SEQ ID NO: 18842 - protein, 9 aa, Homo Sapiens
NMDFVFDRM

SEQ ID NO: 18843 - protein, 9 aa, Homo Sapiens
NMDKIYIVM

SEQ ID NO: 18844 - protein, 9 aa, Homo Sapiens
NMDSVFKEL

SEQ ID NO: 18845 - protein, 9 aa, Homo Sapiens
NMDWVSTQL

SEQ ID NO: 18846 - protein, 9 aa, Homo Sapiens
NMLPQIFRV

SEQ ID NO: 18847 - protein, 9 aa, Homo Sapiens
NMPPVPHGM

SEQ ID NO: 18848 - protein, 9 aa, Homo Sapiens
NMPVSFEVI

SEQ ID NO: 18849 - protein, 9 aa, Homo Sapiens
NMVAKVDEV

SEQ ID NO: 18850 - protein, 9 aa, Homo Sapiens
NMVDIIHSV

SEQ ID NO: 18851 - protein, 9 aa, Homo Sapiens
NMYGKVVTV

SEQ ID NO: 18852 - protein, 9 aa, Homo Sapiens
NQPGVLIQV

SEQ ID NO: 18853 - protein, 9 aa, Homo Sapiens
NVDAIVVSV

SEQ ID NO: 18854 - protein, 9 aa, Homo Sapiens
NVDAVISKI

SEQ ID NO: 18855 - protein, 9 aa, Homo Sapiens
NVDEAVLHF

SEQ ID NO: 18856 - protein, 9 aa, Homo Sapiens
NVDEGIYQL

SEQ ID NO: 18857 - protein, 9 aa, Homo Sapiens
NVDEIFLKL

SEQ ID NO: 18858 - protein, 9 aa, Homo Sapiens
NVDGHLYEL

SEQ ID NO: 18859 - protein, 9 aa, Homo Sapiens
NVDGLLVQL

SEQ ID NO: 18860 - protein, 9 aa, Homo Sapiens
NVDKVFFDL

SEQ ID NO: 18861 - protein, 9 aa, Homo Sapiens
NVDNQAVLL

SEQ ID NO: 18862 - protein, 9 aa, Homo Sapiens
NVDQAFHEL

SEQ ID NO: 18863 - protein, 9 aa, Homo Sapiens
NVDQAVATL

SEQ ID NO: 18864 - protein, 9 aa, Homo Sapiens
NVDRVFQEV

SEQ ID NO: 18865 - protein, 9 aa, Homo Sapiens
NVDSLITRL

SEQ ID NO: 18866 - protein, 9 aa, Homo Sapiens
NVDTPVSTL

SEQ ID NO: 18867 - protein, 9 aa, Homo Sapiens
NVDTVLMEL

SEQ ID NO: 18868 - protein, 9 aa, Homo Sapiens
NVDYIIQEL

SEQ ID NO: 18869 - protein, 9 aa, Homo Sapiens
NVPDSFNEV

SEQ ID NO: 18870 - protein, 9 aa, Homo Sapiens
NVPDVYTQI

SEQ ID NO: 18871 - protein, 9 aa, Homo Sapiens
NVPEIMPKL

SEQ ID NO: 18872 - protein, 9 aa, Homo Sapiens
NVPGEIVES

SEQ ID NO: 18873 - protein, 9 aa, Homo Sapiens
NVPGLYIAV

SEQ ID NO: 18874 - protein, 9 aa, Homo Sapiens
NVPYPLPKI

SEQ ID NO: 18875 - protein, 9 aa, Homo Sapiens
NVVDVFHAV

SEQ ID NO: 18876 - protein, 9 aa, Homo Sapiens
PLWESGPTV

SEQ ID NO: 18877 - protein, 9 aa, Homo Sapiens
PSSVPLLAW

SEQ ID NO: 18878 - protein, 9 aa, Homo Sapiens
QAPDIDVQL

SEQ ID NO: 18879 - protein, 9 aa, Homo Sapiens
QAPGVITGV

SEQ ID NO: 18880 - protein, 9 aa, Homo Sapiens
QAPGVLPSA

SEQ ID NO: 18881 - protein, 9 aa, Homo Sapiens
QAPQVLPQV

SEQ ID NO: 18882 - protein, 9 aa, Homo Sapiens
QEQNQEQPI

SEQ ID NO: 18883 - protein, 9 aa, Homo Sapiens
QIDDLYSTI

SEQ ID NO: 18884 - protein, 9 aa, Homo Sapiens
QIDDVTIKI

SEQ ID NO: 18885 - protein, 9 aa, Homo Sapiens
QIDEVLSHF

SEQ ID NO: 18886 - protein, 9 aa, Homo Sapiens
QIDGLISQL

SEQ ID NO: 18887 - protein, 9 aa, Homo Sapiens
QIDSIHLLL

SEQ ID NO: 18888 - protein, 9 aa, Homo Sapiens
QLAELLPSV

SEQ ID NO: 18889 - protein, 9 aa, Homo Sapiens
QLAPVFQRV

SEQ ID NO: 18890 - protein, 9 aa, Homo Sapiens
QLDDLKVEL

SEQ ID NO: 18891 - protein, 9 aa, Homo Sapiens
QLDDQYSRF

SEQ ID NO: 18892 - protein, 9 aa, Homo Sapiens
QLDDSILNI

SEQ ID NO: 18893 - protein, 9 aa, Homo Sapiens
QLDDVFRQL

SEQ ID NO: 18894 - protein, 9 aa, Homo Sapiens
QLDELMAHL

SEQ ID NO: 18895 - protein, 9 aa, Homo Sapiens
QLDEVRQAM

SEQ ID NO: 18896 - protein, 9 aa, Homo Sapiens
QLDGDPKEV

SEQ ID NO: 18897 - protein, 9 aa, Homo Sapiens
QLDGIHVTI

SEQ ID NO: 18898 - protein, 9 aa, Homo Sapiens
QLDGVRTGL

SEQ ID NO: 18899 - protein, 9 aa, Homo Sapiens
QLDIIIHSL

SEQ ID NO: 18900 - protein, 9 aa, Homo Sapiens
QLDLVVKYL

SEQ ID NO: 18901 - protein, 9 aa, Homo Sapiens
QLDPLFERV

SEQ ID NO: 18902 - protein, 9 aa, Homo Sapiens
QLDPLPTTL

SEQ ID NO: 18903 - protein, 9 aa, Homo Sapiens
QLDPLVVEL

SEQ ID NO: 18904 - protein, 9 aa, Homo Sapiens
QLDQVTAKL

SEQ ID NO: 18905 - protein, 9 aa, Homo Sapiens
QLDRIIAKL

SEQ ID NO: 18906 - protein, 9 aa, Homo Sapiens
QLDSAVKNL

SEQ ID NO: 18907 - protein, 9 aa, Homo Sapiens
QLDSHVHAV

SEQ ID NO: 18908 - protein, 9 aa, Homo Sapiens
QLDSVRVWL

SEQ ID NO: 18909 - protein, 9 aa, Homo Sapiens
QLDVPVVKV

SEQ ID NO: 18910 - protein, 9 aa, Homo Sapiens
QLEGFFLHL

SEQ ID NO: 18911 - protein, 9 aa, Homo Sapiens
QLFEDLVYL

SEQ ID NO: 18912 - protein, 9 aa, Homo Sapiens
QLIDKVWQL

SEQ ID NO: 18913 - protein, 9 aa, Homo Sapiens
QLMEQVAQL

SEQ ID NO: 18914 - protein, 9 aa, Homo Sapiens
QLNEKVAQL

SEQ ID NO: 18915 - protein, 9 aa, Homo Sapiens
QLPDIYPDL

SEQ ID NO: 18916 - protein, 9 aa, Homo Sapiens
QLPDLLLQA

SEQ ID NO: 18917 - protein, 9 aa, Homo Sapiens
QLPEGASAV

SEQ ID NO: 18918 - protein, 9 aa, Homo Sapiens
QLPEKVEYV

SEQ ID NO: 18919 - protein, 9 aa, Homo Sapiens
QLPELFHKI

SEQ ID NO: 18920 - protein, 9 aa, Homo Sapiens
QLPEPLPGL

SEQ ID NO: 18921 - protein, 9 aa, Homo Sapiens
QLPEQPLFL

SEQ ID NO: 18922 - protein, 9 aa, Homo Sapiens
QLPNFAFSV

SEQ ID NO: 18923 - protein, 9 aa, Homo Sapiens
QLPNHVVNV

SEQ ID NO: 18924 - protein, 9 aa, Homo Sapiens
QLPNKAVEV

SEQ ID NO: 18925 - protein, 9 aa, Homo Sapiens
QLRDFYFSV

SEQ ID NO: 18926 - protein, 9 aa, Homo Sapiens
QLSEVFIQL

SEQ ID NO: 18927 - protein, 9 aa, Homo Sapiens
QLSPVLLYL

SEQ ID NO: 18928 - protein, 9 aa, Homo Sapiens
QLVDIIEKV

SEQ ID NO: 18929 - protein, 9 aa, Homo Sapiens
QLVPALAKV

SEQ ID NO: 18930 - protein, 9 aa, Homo Sapiens
QLWNIFNQV

SEQ ID NO: 18931 - protein, 9 aa, Homo Sapiens
QLWNNYFHL

SEQ ID NO: 18932 - protein, 9 aa, Homo Sapiens
QMDDLRAQI

SEQ ID NO: 18933 - protein, 9 aa, Homo Sapiens
QMDIIVSEV

SEQ ID NO: 18934 - protein, 9 aa, Homo Sapiens
QMPETTETV

SEQ ID NO: 18935 - protein, 9 aa, Homo Sapiens
QMPSFLQSV

SEQ ID NO: 18936 - protein, 9 aa, Homo Sapiens
QPHQPLPPT

SEQ ID NO: 18937 - protein, 9 aa, Homo Sapiens
QQPDLLPSA

SEQ ID NO: 18938 - protein, 9 aa, Homo Sapiens
QTHSVFVNV

SEQ ID NO: 18939 - protein, 9 aa, Homo Sapiens
QVDAQLLTV

SEQ ID NO: 18940 - protein, 9 aa, Homo Sapiens
QVDDIRSFL

SEQ ID NO: 18941 - protein, 9 aa, Homo Sapiens
QVDDLKAKL

SEQ ID NO: 18942 - protein, 9 aa, Homo Sapiens
QVDEFRFLL

SEQ ID NO: 18943 - protein, 9 aa, Homo Sapiens
QVDEVVDIM

SEQ ID NO: 18944 - protein, 9 aa, Homo Sapiens
QVDHVFREV

SEQ ID NO: 18945 - protein, 9 aa, Homo Sapiens
QVDPDTHLL

SEQ ID NO: 18946 - protein, 9 aa, Homo Sapiens
QVDSINALL

SEQ ID NO: 18947 - protein, 9 aa, Homo Sapiens
QVDSLIMQI

SEQ ID NO: 18948 - protein, 9 aa, Homo Sapiens
QVEDLEVKI

SEQ ID NO: 18949 - protein, 9 aa, Homo Sapiens
QVIPVLPQV

SEQ ID NO: 18950 - protein, 9 aa, Homo Sapiens
QVPDDLPNV

SEQ ID NO: 18951 - protein, 9 aa, Homo Sapiens
QVPEKLDVV

SEQ ID NO: 18952 - protein, 9 aa, Homo Sapiens
QVPEPPPKV

SEQ ID NO: 18953 - protein, 9 aa, Homo Sapiens
RAPEFLPEV

SEQ ID NO: 18954 - protein, 9 aa, Homo Sapiens
REVIAGPLL

SEQ ID NO: 18955 - protein, 9 aa, Homo Sapiens
RGPASVPSV

SEQ ID NO: 18956 - protein, 9 aa, Homo Sapiens
RIAELLTEL

SEQ ID NO: 18957 - protein, 9 aa, Homo Sapiens
RIDAFVQSL

SEQ ID NO: 18958 - protein, 9 aa, Homo Sapiens
RIDAVTPTL

SEQ ID NO: 18959 - protein, 9 aa, Homo Sapiens
RIDDLQMVL

SEQ ID NO: 18960 - protein, 9 aa, Homo Sapiens
RIDEIASNL

SEQ ID NO: 18961 - protein, 9 aa, Homo Sapiens
RIDEINKEL

SEQ ID NO: 18962 - protein, 9 aa, Homo Sapiens
RIDGVLIRM

SEQ ID NO: 18963 - protein, 9 aa, Homo Sapiens
RIDGVSLLV

SEQ ID NO: 18964 - protein, 9 aa, Homo Sapiens
RIDQVNQLL

SEQ ID NO: 18965 - protein, 9 aa, Homo Sapiens
RIFNESTSV

SEQ ID NO: 18966 - protein, 9 aa, Homo Sapiens
RIFQTLLEV

SEQ ID NO: 18967 - protein, 9 aa, Homo Sapiens
RIIEAAHQV

SEQ ID NO: 18968 - protein, 9 aa, Homo Sapiens
RILDYVINL

SEQ ID NO: 18969 - protein, 9 aa, Homo Sapiens
RIMEFTTTL

SEQ ID NO: 18970 - protein, 9 aa, Homo Sapiens
RIPAIFSPA

SEQ ID NO: 18971 - protein, 9 aa, Homo Sapiens
RIPAYFVTV

SEQ ID NO: 18972 - protein, 9 aa, Homo Sapiens
RIPIAVSGV

SEQ ID NO: 18973 - protein, 9 aa, Homo Sapiens
RISDVHFSV

SEQ ID NO: 18974 - protein, 9 aa, Homo Sapiens
RIVDVYENL

SEQ ID NO: 18975 - protein, 9 aa, Homo Sapiens
RIWDPVLSV

SEQ ID NO: 18976 - protein, 9 aa, Homo Sapiens
RKYPTLLEV

SEQ ID NO: 18977 - protein, 9 aa, Homo Sapiens
RLAPDYDAL

SEQ ID NO: 18978 - protein, 9 aa, Homo Sapiens
RLDAMFRAF

SEQ ID NO: 18979 - protein, 9 aa, Homo Sapiens
RLDAVLQRI

SEQ ID NO: 18980 - protein, 9 aa, Homo Sapiens
RLDDAIHVL

SEQ ID NO: 18981 - protein, 9 aa, Homo Sapiens
RLDDVSNDV

SEQ ID NO: 18982 - protein, 9 aa, Homo Sapiens
RLDEAAQRL

SEQ ID NO: 18983 - protein, 9 aa, Homo Sapiens
RLDEAFDFV

SEQ ID NO: 18984 - protein, 9 aa, Homo Sapiens
RLDEARQML

SEQ ID NO: 18985 - protein, 9 aa, Homo Sapiens
RLDEILSRI

SEQ ID NO: 18986 - protein, 9 aa, Homo Sapiens
RLDETIQAI

SEQ ID NO: 18987 - protein, 9 aa, Homo Sapiens
RLDEVLRTL

SEQ ID NO: 18988 - protein, 9 aa, Homo Sapiens
RLDEVPASL

SEQ ID NO: 18989 - protein, 9 aa, Homo Sapiens
RLDFVLTSL

SEQ ID NO: 18990 - protein, 9 aa, Homo Sapiens
RLDIVHENL

SEQ ID NO: 18991 - protein, 9 aa, Homo Sapiens
RLDLIAQQM

SEQ ID NO: 18992 - protein, 9 aa, Homo Sapiens
RLDLIYPMV

SEQ ID NO: 18993 - protein, 9 aa, Homo Sapiens
RLDLLITYL

SEQ ID NO: 18994 - protein, 9 aa, Homo Sapiens
RLDNGQVGL

SEQ ID NO: 18995 - protein, 9 aa, Homo Sapiens
RLDNITQVM

SEQ ID NO: 18996 - protein, 9 aa, Homo Sapiens
RLDNLKAHL

SEQ ID NO: 18997 - protein, 9 aa, Homo Sapiens
RLDPHPELL

SEQ ID NO: 18998 - protein, 9 aa, Homo Sapiens
RLDPTAVNI

SEQ ID NO: 18999 - protein, 9 aa, Homo Sapiens
RLDQVEQEL

SEQ ID NO: 19000 - protein, 9 aa, Homo Sapiens
RLDSFLSQL

SEQ ID NO: 19001 - protein, 9 aa, Homo Sapiens
RLDWPIERL

SEQ ID NO: 19002 - protein, 9 aa, Homo Sapiens
RLDWPVRTL

SEQ ID NO: 19003 - protein, 9 aa, Homo Sapiens
RLFDWLVSV

SEQ ID NO: 19004 - protein, 9 aa, Homo Sapiens
RLGPVPPGL

SEQ ID NO: 19005 - protein, 9 aa, Homo Sapiens
RLIAQRYLL

SEQ ID NO: 19006 - protein, 9 aa, Homo Sapiens
RLIESLFTI

SEQ ID NO: 19007 - protein, 9 aa, Homo Sapiens
RLISKFDTV

SEQ ID NO: 19008 - protein, 9 aa, Homo Sapiens
RLLDYVATV

SEQ ID NO: 19009 - protein, 9 aa, Homo Sapiens
RLLENMTEV

SEQ ID NO: 19010 - protein, 9 aa, Homo Sapiens
RLNEAAVTV

SEQ ID NO: 19011 - protein, 9 aa, Homo Sapiens
RLPAWQPIL

SEQ ID NO: 19012 - protein, 9 aa, Homo Sapiens
RLPDGFTQL

SEQ ID NO: 19013 - protein, 9 aa, Homo Sapiens
RLPDGWSQV

SEQ ID NO: 19014 - protein, 9 aa, Homo Sapiens
RLPDLIKEV

SEQ ID NO: 19015 - protein, 9 aa, Homo Sapiens
RLPDPFAKI

SEQ ID NO: 19016 - protein, 9 aa, Homo Sapiens
RLPDQFSKL

SEQ ID NO: 19017 - protein, 9 aa, Homo Sapiens
RLPEAIEEV

SEQ ID NO: 19018 - protein, 9 aa, Homo Sapiens
RLPEIYIQL

SEQ ID NO: 19019 - protein, 9 aa, Homo Sapiens
RLPEPTTRL

SEQ ID NO: 19020 - protein, 9 aa, Homo Sapiens
RLPEQPVDV

SEQ ID NO: 19021 - protein, 9 aa, Homo Sapiens
RLPESVERL

SEQ ID NO: 19022 - protein, 9 aa, Homo Sapiens
RLPFLFTLV

SEQ ID NO: 19023 - protein, 9 aa, Homo Sapiens
RLPGIPITV

SEQ ID NO: 19024 - protein, 9 aa, Homo Sapiens
RLPGPLGTV

SEQ ID NO: 19025 - protein, 9 aa, Homo Sapiens
RLPLISVAL

SEQ ID NO: 19026 - protein, 9 aa, Homo Sapiens
RLPPATLTL

SEQ ID NO: 19027 - protein, 9 aa, Homo Sapiens
RLPPDFFGV

SEQ ID NO: 19028 - protein, 9 aa, Homo Sapiens
RLPPGFNDV

SEQ ID NO: 19029 - protein, 9 aa, Homo Sapiens
RLPPGPAGL

SEQ ID NO: 19030 - protein, 9 aa, Homo Sapiens
RLPPLLSPL

SEQ ID NO: 19031 - protein, 9 aa, Homo Sapiens
RLPPPFPGL

SEQ ID NO: 19032 - protein, 9 aa, Homo Sapiens
RLPTRLPEI

SEQ ID NO: 19033 - protein, 9 aa, Homo Sapiens
RLPWVNPYM

SEQ ID NO: 19034 - protein, 9 aa, Homo Sapiens
RLQDAIAKV

SEQ ID NO: 19035 - protein, 9 aa, Homo Sapiens
RLQEEINEV

SEQ ID NO: 19036 - protein, 9 aa, Homo Sapiens
RLQEEVHLL

SEQ ID NO: 19037 - protein, 9 aa, Homo Sapiens
RLQEFIDEV

SEQ ID NO: 19038 - protein, 9 aa, Homo Sapiens
RLTEEFQNV

SEQ ID NO: 19039 - protein, 9 aa, Homo Sapiens
RLWEKLTLL

SEQ ID NO: 19040 - protein, 9 aa, Homo Sapiens
RLYHITDQV

SEQ ID NO: 19041 - protein, 9 aa, Homo Sapiens
RMDEEFTKI

SEQ ID NO: 19042 - protein, 9 aa, Homo Sapiens
RMDELFVLI

SEQ ID NO: 19043 - protein, 9 aa, Homo Sapiens
RMLPHAPGV

SEQ ID NO: 19044 - protein, 9 aa, Homo Sapiens
RSDDIYNQV

SEQ ID NO: 19045 - protein, 9 aa, Homo Sapiens
RVDALNDEI

SEQ ID NO: 19046 - protein, 9 aa, Homo Sapiens
RVDAVASKV

SEQ ID NO: 19047 - protein, 9 aa, Homo Sapiens
RVDDIFSDL

SEQ ID NO: 19048 - protein, 9 aa, Homo Sapiens
RVDDLYTLL

SEQ ID NO: 19049 - protein, 9 aa, Homo Sapiens
RVDDVYSVL

SEQ ID NO: 19050 - protein, 9 aa, Homo Sapiens
RVDEEPTTL

SEQ ID NO: 19051 - protein, 9 aa, Homo Sapiens
RVDGLLHQL

SEQ ID NO: 19052 - protein, 9 aa, Homo Sapiens
RVDKITEYL

SEQ ID NO: 19053 - protein, 9 aa, Homo Sapiens
RVDNFVIAL

SEQ ID NO: 19054 - protein, 9 aa, Homo Sapiens
RVDNLAVVM

SEQ ID NO: 19055 - protein, 9 aa, Homo Sapiens
RVDPVYIHL

SEQ ID NO: 19056 - protein, 9 aa, Homo Sapiens
RVDRIILLF

SEQ ID NO: 19057 - protein, 9 aa, Homo Sapiens
RVDSFNEEV

SEQ ID NO: 19058 - protein, 9 aa, Homo Sapiens
RVMELFFTV

SEQ ID NO: 19059 - protein, 9 aa, Homo Sapiens
RVPPPPQSV

SEQ ID NO: 19060 - protein, 9 aa, Homo Sapiens
RVPPVPPNV

SEQ ID NO: 19061 - protein, 9 aa, Homo Sapiens
SAPAVLLYV

SEQ ID NO: 19062 - protein, 9 aa, Homo Sapiens
SAPPPVVSV

SEQ ID NO: 19063 - protein, 9 aa, Homo Sapiens
SFPDSLPEV

SEQ ID NO: 19064 - protein, 9 aa, Homo Sapiens
SFYEHIITV

SEQ ID NO: 19065 - protein, 9 aa, Homo Sapiens
SGPGVVLYL

SEQ ID NO: 19066 - protein, 9 aa, Homo Sapiens
SIAAVLPKV

SEQ ID NO: 19067 - protein, 9 aa, Homo Sapiens
SIAEVVHQL

SEQ ID NO: 19068 - protein, 9 aa, Homo Sapiens
SIDDLPTVL

SEQ ID NO: 19069 - protein, 9 aa, Homo Sapiens
SIDDVDSKL

SEQ ID NO: 19070 - protein, 9 aa, Homo Sapiens
SIDDVVKKL

SEQ ID NO: 19071 - protein, 9 aa, Homo Sapiens
SIDEAYVDL

SEQ ID NO: 19072 - protein, 9 aa, Homo Sapiens
SIDEIVQRV

SEQ ID NO: 19073 - protein, 9 aa, Homo Sapiens
SIDFPLTKV

SEQ ID NO: 19074 - protein, 9 aa, Homo Sapiens
SIDPVPTSI

SEQ ID NO: 19075 - protein, 9 aa, Homo Sapiens
SIDPVTVSI

SEQ ID NO: 19076 - protein, 9 aa, Homo Sapiens
SIDQALAQL

SEQ ID NO: 19077 - protein, 9 aa, Homo Sapiens
SIDQFSIRL

SEQ ID NO: 19078 - protein, 9 aa, Homo Sapiens
SIDRNPPQL

SEQ ID NO: 19079 - protein, 9 aa, Homo Sapiens
SIDTLIFTL

SEQ ID NO: 19080 - protein, 9 aa, Homo Sapiens
SIHDVTFQV

SEQ ID NO: 19081 - protein, 9 aa, Homo Sapiens
SIIEYLPTL

SEQ ID NO: 19082 - protein, 9 aa, Homo Sapiens
SIIGRLLEV

SEQ ID NO: 19083 - protein, 9 aa, Homo Sapiens
SIIPPLFTV

SEQ ID NO: 19084 - protein, 9 aa, Homo Sapiens
SIIQRLLEV

SEQ ID NO: 19085 - protein, 9 aa, Homo Sapiens
SILSLVTKI

SEQ ID NO: 19086 - protein, 9 aa, Homo Sapiens
SIMDYVVFV

SEQ ID NO: 19087 - protein, 9 aa, Homo Sapiens
SIPELQNFL

SEQ ID NO: 19088 - protein, 9 aa, Homo Sapiens
SIPGGPVRL

SEQ ID NO: 19089 - protein, 9 aa, Homo Sapiens
SIPIFLPEV

SEQ ID NO: 19090 - protein, 9 aa, Homo Sapiens
SIPNRIPKI

SEQ ID NO: 19091 - protein, 9 aa, Homo Sapiens
SIPPPPPPA

SEQ ID NO: 19092 - protein, 9 aa, Homo Sapiens
SISDVIAQV

SEQ ID NO: 19093 - protein, 9 aa, Homo Sapiens
SLADLYFRA

SEQ ID NO: 19094 - protein, 9 aa, Homo Sapiens
SLAEFVQSL

SEQ ID NO: 19095 - protein, 9 aa, Homo Sapiens
SLASFIPAV

SEQ ID NO: 19096 - protein, 9 aa, Homo Sapiens
SLDAFLVAL

SEQ ID NO: 19097 - protein, 9 aa, Homo Sapiens
SLDAIIEFL

SEQ ID NO: 19098 - protein, 9 aa, Homo Sapiens
SLDALLSQV

SEQ ID NO: 19099 - protein, 9 aa, Homo Sapiens
SLDAVMPHL

SEQ ID NO: 19100 - protein, 9 aa, Homo Sapiens
SLDDLLQRL

SEQ ID NO: 19101 - protein, 9 aa, Homo Sapiens
SLDDVGEKL

SEQ ID NO: 19102 - protein, 9 aa, Homo Sapiens
SLDDVMDYL

SEQ ID NO: 19103 - protein, 9 aa, Homo Sapiens
SLDEAQFVL

SEQ ID NO: 19104 - protein, 9 aa, Homo Sapiens
SLDEAYLNI

SEQ ID NO: 19105 - protein, 9 aa, Homo Sapiens
SLDEAYRFV

SEQ ID NO: 19106 - protein, 9 aa, Homo Sapiens
SLDEKQNLV

SEQ ID NO: 19107 - protein, 9 aa, Homo Sapiens
SLDEPYEKV

SEQ ID NO: 19108 - protein, 9 aa, Homo Sapiens
SLDEVDHKI

SEQ ID NO: 19109 - protein, 9 aa, Homo Sapiens
SLDFLIELL

SEQ ID NO: 19110 - protein, 9 aa, Homo Sapiens
SLDGFTIQV

SEQ ID NO: 19111 - protein, 9 aa, Homo Sapiens
SLDGKAIKV

SEQ ID NO: 19112 - protein, 9 aa, Homo Sapiens
SLDGRPPSL

SEQ ID NO: 19113 - protein, 9 aa, Homo Sapiens
SLDHDIFQL

SEQ ID NO: 19114 - protein, 9 aa, Homo Sapiens
SLDIPATYL

SEQ ID NO: 19115 - protein, 9 aa, Homo Sapiens
SLDKDIVAL

SEQ ID NO: 19116 - protein, 9 aa, Homo Sapiens
SLDKDPLLL

SEQ ID NO: 19117 - protein, 9 aa, Homo Sapiens
SLDKFYKQV

SEQ ID NO: 19118 - protein, 9 aa, Homo Sapiens
SLDLIYRDL

SEQ ID NO: 19119 - protein, 9 aa, Homo Sapiens
SLDLPHSEL

SEQ ID NO: 19120 - protein, 9 aa, Homo Sapiens
SLDLVAAAL

SEQ ID NO: 19121 - protein, 9 aa, Homo Sapiens
SLDNLKASV

SEQ ID NO: 19122 - protein, 9 aa, Homo Sapiens
SLDPKTNTL

SEQ ID NO: 19123 - protein, 9 aa, Homo Sapiens
SLDPTLPSV

SEQ ID NO: 19124 - protein, 9 aa, Homo Sapiens
SLDQIFETL

SEQ ID NO: 19125 - protein, 9 aa, Homo Sapiens
SLDQLVQAL

SEQ ID NO: 19126 - protein, 9 aa, Homo Sapiens
SLDQPTQTV

SEQ ID NO: 19127 - protein, 9 aa, Homo Sapiens
SLDQSIISF

SEQ ID NO: 19128 - protein, 9 aa, Homo Sapiens
SLDRFYEMF

SEQ ID NO: 19129 - protein, 9 aa, Homo Sapiens
SLDRIFAGF

SEQ ID NO: 19130 - protein, 9 aa, Homo Sapiens
SLDRIYNML

SEQ ID NO: 19131 - protein, 9 aa, Homo Sapiens
SLDRPFTNL

SEQ ID NO: 19132 - protein, 9 aa, Homo Sapiens
SLDSDPWVL

SEQ ID NO: 19133 - protein, 9 aa, Homo Sapiens
SLDSSGFSL

SEQ ID NO: 19134 - protein, 9 aa, Homo Sapiens
SLDSVHLQM

SEQ ID NO: 19135 - protein, 9 aa, Homo Sapiens
SLDTALAEL

SEQ ID NO: 19136 - protein, 9 aa, Homo Sapiens
SLDTEYWKL

SEQ ID NO: 19137 - protein, 9 aa, Homo Sapiens
SLDTQYSKV

SEQ ID NO: 19138 - protein, 9 aa, Homo Sapiens
SLDWHPNNV

SEQ ID NO: 19139 - protein, 9 aa, Homo Sapiens
SLEDFVTCL

SEQ ID NO: 19140 - protein, 9 aa, Homo Sapiens
SLEELIKWL

SEQ ID NO: 19141 - protein, 9 aa, Homo Sapiens
SLENIYKEL

SEQ ID NO: 19142 - protein, 9 aa, Homo Sapiens
SLFDIISKI

SEQ ID NO: 19143 - protein, 9 aa, Homo Sapiens
SLFEEMLQV

SEQ ID NO: 19144 - protein, 9 aa, Homo Sapiens
SLFEGTWYL

SEQ ID NO: 19145 - protein, 9 aa, Homo Sapiens
SLFRVITEV

SEQ ID NO: 19146 - protein, 9 aa, Homo Sapiens
SLFSVIVRV

SEQ ID NO: 19147 - protein, 9 aa, Homo Sapiens
SLHEFLVNL

SEQ ID NO: 19148 - protein, 9 aa, Homo Sapiens
SLHFLILYV

SEQ ID NO: 19149 - protein, 9 aa, Homo Sapiens
SLIDIVTEI

SEQ ID NO: 19150 - protein, 9 aa, Homo Sapiens
SLIDKLYNI

SEQ ID NO: 19151 - protein, 9 aa, Homo Sapiens
SLIDQFFGV

SEQ ID NO: 19152 - protein, 9 aa, Homo Sapiens
SLIEKYFSV

SEQ ID NO: 19153 - protein, 9 aa, Homo Sapiens
SLIEQTTAL

SEQ ID NO: 19154 - protein, 9 aa, Homo Sapiens
SLIEYCIEL

SEQ ID NO: 19155 - protein, 9 aa, Homo Sapiens
SLIGHLQTL

SEQ ID NO: 19156 - protein, 9 aa, Homo Sapiens
SLITRLLEV

SEQ ID NO: 19157 - protein, 9 aa, Homo Sapiens
SLLDIIEKV

SEQ ID NO: 19158 - protein, 9 aa, Homo Sapiens
SLLEHLSHV

SEQ ID NO: 19159 - protein, 9 aa, Homo Sapiens
SLNEYQPKL

SEQ ID NO: 19160 - protein, 9 aa, Homo Sapiens
SLPAGPPGV

SEQ ID NO: 19161 - protein, 9 aa, Homo Sapiens
SLPAKFKKL

SEQ ID NO: 19162 - protein, 9 aa, Homo Sapiens
SLPALLFKA

SEQ ID NO: 19163 - protein, 9 aa, Homo Sapiens
SLPDHLPSV

SEQ ID NO: 19164 - protein, 9 aa, Homo Sapiens
SLPDIKVYL

SEQ ID NO: 19165 - protein, 9 aa, Homo Sapiens
SLPDISAEI

SEQ ID NO: 19166 - protein, 9 aa, Homo Sapiens
SLPDPVLGA

SEQ ID NO: 19167 - protein, 9 aa, Homo Sapiens
SLPEDFYHF

SEQ ID NO: 19168 - protein, 9 aa, Homo Sapiens
SLPEELNRV

SEQ ID NO: 19169 - protein, 9 aa, Homo Sapiens
SLPEELPLL

SEQ ID NO: 19170 - protein, 9 aa, Homo Sapiens
SLPEFQESV

SEQ ID NO: 19171 - protein, 9 aa, Homo Sapiens
SLPEILKEV

SEQ ID NO: 19172 - protein, 9 aa, Homo Sapiens
SLPEIVPPM

SEQ ID NO: 19173 - protein, 9 aa, Homo Sapiens
SLPELTHAL

SEQ ID NO: 19174 - protein, 9 aa, Homo Sapiens
SLPENTVQV

SEQ ID NO: 19175 - protein, 9 aa, Homo Sapiens
SLPEVGTKL

SEQ ID NO: 19176 - protein, 9 aa, Homo Sapiens
SLPFQVANV

SEQ ID NO: 19177 - protein, 9 aa, Homo Sapiens
SLPGNFFYL

SEQ ID NO: 19178 - protein, 9 aa, Homo Sapiens
SLPGTLPVL

SEQ ID NO: 19179 - protein, 9 aa, Homo Sapiens
SLPHQLPEA

SEQ ID NO: 19180 - protein, 9 aa, Homo Sapiens
SLPKDLQAV

SEQ ID NO: 19181 - protein, 9 aa, Homo Sapiens
SLPKKLALL

SEQ ID NO: 19182 - protein, 9 aa, Homo Sapiens
SLPLFIVTL

SEQ ID NO: 19183 - protein, 9 aa, Homo Sapiens
SLPLYFVSA

SEQ ID NO: 19184 - protein, 9 aa, Homo Sapiens
SLPNVFSAL

SEQ ID NO: 19185 - protein, 9 aa, Homo Sapiens
SLPPHILEV

SEQ ID NO: 19186 - protein, 9 aa, Homo Sapiens
SLPPLLAAA

SEQ ID NO: 19187 - protein, 9 aa, Homo Sapiens
SLPPLPRKV

SEQ ID NO: 19188 - protein, 9 aa, Homo Sapiens
SLPPVPPRL

SEQ ID NO: 19189 - protein, 9 aa, Homo Sapiens
SLPRAFPAL

SEQ ID NO: 19190 - protein, 9 aa, Homo Sapiens
SLPRHTFGL

SEQ ID NO: 19191 - protein, 9 aa, Homo Sapiens
SLPSPFLRA

SEQ ID NO: 19192 - protein, 9 aa, Homo Sapiens
SLPSVAVGV

SEQ ID NO: 19193 - protein, 9 aa, Homo Sapiens
SLPVEVQEV

SEQ ID NO: 19194 - protein, 9 aa, Homo Sapiens
SLQDEIQRV

SEQ ID NO: 19195 - protein, 9 aa, Homo Sapiens
SLQEEIAFL

SEQ ID NO: 19196 - protein, 9 aa, Homo Sapiens
SLQEFLAAL

SEQ ID NO: 19197 - protein, 9 aa, Homo Sapiens
SLQEKLWAI

SEQ ID NO: 19198 - protein, 9 aa, Homo Sapiens
SLQETIQSL

SEQ ID NO: 19199 - protein, 9 aa, Homo Sapiens
SLSAIFNNV

SEQ ID NO: 19200 - protein, 9 aa, Homo Sapiens
SLSDTVEKL

SEQ ID NO: 19201 - protein, 9 aa, Homo Sapiens
SLSQVFLHL

SEQ ID NO: 19202 - protein, 9 aa, Homo Sapiens
SLSTVFVVL

SEQ ID NO: 19203 - protein, 9 aa, Homo Sapiens
SLVAILQSV

SEQ ID NO: 19204 - protein, 9 aa, Homo Sapiens
SLVEIILHV

SEQ ID NO: 19205 - protein, 9 aa, Homo Sapiens
SLVEQLTMV

SEQ ID NO: 19206 - protein, 9 aa, Homo Sapiens
SLVPVYVKV

SEQ ID NO: 19207 - protein, 9 aa, Homo Sapiens
SLWPMTFGL

SEQ ID NO: 19208 - protein, 9 aa, Homo Sapiens
SLWSIISKV

SEQ ID NO: 19209 - protein, 9 aa, Homo Sapiens
SLYEMVSRV

SEQ ID NO: 19210 - protein, 9 aa, Homo Sapiens
SLYHVESTV

SEQ ID NO: 19211 - protein, 9 aa, Homo Sapiens
SMDDHKLSL

SEQ ID NO: 19212 - protein, 9 aa, Homo Sapiens
SMDEINKQL

SEQ ID NO: 19213 - protein, 9 aa, Homo Sapiens
SMDFVLLNF

SEQ ID NO: 19214 - protein, 9 aa, Homo Sapiens
SMDHIQAEL

SEQ ID NO: 19215 - protein, 9 aa, Homo Sapiens
SMDPLPVFL

SEQ ID NO: 19216 - protein, 9 aa, Homo Sapiens
SMDSFYKVL

SEQ ID NO: 19217 - protein, 9 aa, Homo Sapiens
SMDSSHVSL

SEQ ID NO: 19218 - protein, 9 aa, Homo Sapiens
SMDTIVGML

SEQ ID NO: 19219 - protein, 9 aa, Homo Sapiens
SMDTLLATL

SEQ ID NO: 19220 - protein, 9 aa, Homo Sapiens
SMEEIFQHL

SEQ ID NO: 19221 - protein, 9 aa, Homo Sapiens
SMMQTLLTV

SEQ ID NO: 19222 - protein, 9 aa, Homo Sapiens
SMPDFDLHL

SEQ ID NO: 19223 - protein, 9 aa, Homo Sapiens
SMPDFDLNL

SEQ ID NO: 19224 - protein, 9 aa, Homo Sapiens
SMPDVDLHL

SEQ ID NO: 19225 - protein, 9 aa, Homo Sapiens
SMPDVDLHV

SEQ ID NO: 19226 - protein, 9 aa, Homo Sapiens
SMPDVELNL

SEQ ID NO: 19227 - protein, 9 aa, Homo Sapiens
SMPEQAHKV

SEQ ID NO: 19228 - protein, 9 aa, Homo Sapiens
SMPLSFPSL

SEQ ID NO: 19229 - protein, 9 aa, Homo Sapiens
SMPPAFPRL

SEQ ID NO: 19230 - protein, 9 aa, Homo Sapiens
SMPPVYPSV

SEQ ID NO: 19231 - protein, 9 aa, Homo Sapiens
SMPSDQYEL

SEQ ID NO: 19232 - protein, 9 aa, Homo Sapiens
SMPSFTARL

SEQ ID NO: 19233 - protein, 9 aa, Homo Sapiens
SMPTQLHSL

SEQ ID NO: 19234 - protein, 9 aa, Homo Sapiens
SMVDVVMLL

SEQ ID NO: 19235 - protein, 9 aa, Homo Sapiens
SQPEKVYTL

SEQ ID NO: 19236 - protein, 9 aa, Homo Sapiens
SQPEVLVPI

SEQ ID NO: 19237 - protein, 9 aa, Homo Sapiens
SQPPVQVSV

SEQ ID NO: 19238 - protein, 9 aa, Homo Sapiens
SQPWEVPFV

SEQ ID NO: 19239 - protein, 9 aa, Homo Sapiens
SSDAVFIQL

SEQ ID NO: 19240 - protein, 9 aa, Homo Sapiens
SSIPPVFQL

SEQ ID NO: 19241 - protein, 9 aa, Homo Sapiens
SSPETLPSL

SEQ ID NO: 19242 - protein, 9 aa, Homo Sapiens
SVDDIVKGI

SEQ ID NO: 19243 - protein, 9 aa, Homo Sapiens
SVDDLVEKL

SEQ ID NO: 19244 - protein, 9 aa, Homo Sapiens
SVDDTIVAL

SEQ ID NO: 19245 - protein, 9 aa, Homo Sapiens
SVDDVLSHF

SEQ ID NO: 19246 - protein, 9 aa, Homo Sapiens
SVDEEFQKL

SEQ ID NO: 19247 - protein, 9 aa, Homo Sapiens
SVDELFAEI

SEQ ID NO: 19248 - protein, 9 aa, Homo Sapiens
SVDELFQKV

SEQ ID NO: 19249 - protein, 9 aa, Homo Sapiens
SVDETTQAM

SEQ ID NO: 19250 - protein, 9 aa, Homo Sapiens
SVDEVARQL

SEQ ID NO: 19251 - protein, 9 aa, Homo Sapiens
SVDEVEISV

SEQ ID NO: 19252 - protein, 9 aa, Homo Sapiens
SVDEVLEML

SEQ ID NO: 19253 - protein, 9 aa, Homo Sapiens
SVDGVIKEV

SEQ ID NO: 19254 - protein, 9 aa, Homo Sapiens
SVDNLFVVV

SEQ ID NO: 19255 - protein, 9 aa, Homo Sapiens
SVDPFYEML

SEQ ID NO: 19256 - protein, 9 aa, Homo Sapiens
SVDPLPAGL

SEQ ID NO: 19257 - protein, 9 aa, Homo Sapiens
SVDPQFLKL

SEQ ID NO: 19258 - protein, 9 aa, Homo Sapiens
SVDPVAADL

SEQ ID NO: 19259 - protein, 9 aa, Homo Sapiens
SVDPVLSIL

SEQ ID NO: 19260 - protein, 9 aa, Homo Sapiens
SVDQISLQV

SEQ ID NO: 19261 - protein, 9 aa, Homo Sapiens
SVDSHFCHL

SEQ ID NO: 19262 - protein, 9 aa, Homo Sapiens
SVDSHFQEV

SEQ ID NO: 19263 - protein, 9 aa, Homo Sapiens
SVDSHFSHL

SEQ ID NO: 19264 - protein, 9 aa, Homo Sapiens
SVDSVLTAL

SEQ ID NO: 19265 - protein, 9 aa, Homo Sapiens
SVDSVSNNL

SEQ ID NO: 19266 - protein, 9 aa, Homo Sapiens
SVEEVLKTV

SEQ ID NO: 19267 - protein, 9 aa, Homo Sapiens
SVIEQIVYV

SEQ ID NO: 19268 - protein, 9 aa, Homo Sapiens
SVIEQLFFV

SEQ ID NO: 19269 - protein, 9 aa, Homo Sapiens
SVISVVSYL

SEQ ID NO: 19270 - protein, 9 aa, Homo Sapiens
SVLDLVVAL

SEQ ID NO: 19271 - protein, 9 aa, Homo Sapiens
SVLEALSGV

SEQ ID NO: 19272 - protein, 9 aa, Homo Sapiens
SVNGVFKEV

SEQ ID NO: 19273 - protein, 9 aa, Homo Sapiens
SVNPYIVKL

SEQ ID NO: 19274 - protein, 9 aa, Homo Sapiens
SVPATVPSI

SEQ ID NO: 19275 - protein, 9 aa, Homo Sapiens
SVPDLAPML

SEQ ID NO: 19276 - protein, 9 aa, Homo Sapiens
SVPDTLPTA

SEQ ID NO: 19277 - protein, 9 aa, Homo Sapiens
SVPDVTHHL

SEQ ID NO: 19278 - protein, 9 aa, Homo Sapiens
SVPHIYIQV

SEQ ID NO: 19279 - protein, 9 aa, Homo Sapiens
SVPMPLPTV

SEQ ID NO: 19280 - protein, 9 aa, Homo Sapiens
SVPPPLTSV

SEQ ID NO: 19281 - protein, 9 aa, Homo Sapiens
SVPQSLPSL

SEQ ID NO: 19282 - protein, 9 aa, Homo Sapiens
SVVDIKLLL

SEQ ID NO: 19283 - protein, 9 aa, Homo Sapiens
SVVDVFAQL

SEQ ID NO: 19284 - protein, 9 aa, Homo Sapiens
SVVEQAWKL

SEQ ID NO: 19285 - protein, 9 aa, Homo Sapiens
SVVESVFKL

SEQ ID NO: 19286 - protein, 9 aa, Homo Sapiens
SVVGPVKGV

SEQ ID NO: 19287 - protein, 9 aa, Homo Sapiens
TADEVHYFL

SEQ ID NO: 19288 - protein, 9 aa, Homo Sapiens
TAPPNAYTV

SEQ ID NO: 19289 - protein, 9 aa, Homo Sapiens
TIDDIAQSL

SEQ ID NO: 19290 - protein, 9 aa, Homo Sapiens
TIDDLEDKL

SEQ ID NO: 19291 - protein, 9 aa, Homo Sapiens
TIDDLEEKL

SEQ ID NO: 19292 - protein, 9 aa, Homo Sapiens
TIDDLIDKL

SEQ ID NO: 19293 - protein, 9 aa, Homo Sapiens
TIDDVVYVI

SEQ ID NO: 19294 - protein, 9 aa, Homo Sapiens
TIDPIPHQL

SEQ ID NO: 19295 - protein, 9 aa, Homo Sapiens
TILEYLTYL

SEQ ID NO: 19296 - protein, 9 aa, Homo Sapiens
TIPEIIIKV

SEQ ID NO: 19297 - protein, 9 aa, Homo Sapiens
TIPEILPKL

SEQ ID NO: 19298 - protein, 9 aa, Homo Sapiens
TISPIIKLL

SEQ ID NO: 19299 - protein, 9 aa, Homo Sapiens
TITDIISAL

SEQ ID NO: 19300 - protein, 9 aa, Homo Sapiens
TLADVLYHV

SEQ ID NO: 19301 - protein, 9 aa, Homo Sapiens
TLDAGNIKL

SEQ ID NO: 19302 - protein, 9 aa, Homo Sapiens
TLDDIKEWL

SEQ ID NO: 19303 - protein, 9 aa, Homo Sapiens
TLDDIMAAV

SEQ ID NO: 19304 - protein, 9 aa, Homo Sapiens
TLDDLIAAV

SEQ ID NO: 19305 - protein, 9 aa, Homo Sapiens
TLDDLYPMM

SEQ ID NO: 19306 - protein, 9 aa, Homo Sapiens
TLDEKIEKV

SEQ ID NO: 19307 - protein, 9 aa, Homo Sapiens
TLDELGIHL

SEQ ID NO: 19308 - protein, 9 aa, Homo Sapiens
TLDEQVLSF

SEQ ID NO: 19309 - protein, 9 aa, Homo Sapiens
TLDEVTVTI

SEQ ID NO: 19310 - protein, 9 aa, Homo Sapiens
TLDGKVQYL

SEQ ID NO: 19311 - protein, 9 aa, Homo Sapiens
TLDGSLHAV

SEQ ID NO: 19312 - protein, 9 aa, Homo Sapiens
TLDGVYPTL

SEQ ID NO: 19313 - protein, 9 aa, Homo Sapiens
TLDKIMILF

SEQ ID NO: 19314 - protein, 9 aa, Homo Sapiens
TLDKSWWTL

SEQ ID NO: 19315 - protein, 9 aa, Homo Sapiens
TLDNIFLCV

SEQ ID NO: 19316 - protein, 9 aa, Homo Sapiens
TLDNILSHI

SEQ ID NO: 19317 - protein, 9 aa, Homo Sapiens
TLDPEPQHL

SEQ ID NO: 19318 - protein, 9 aa, Homo Sapiens
TLDPLISQL

SEQ ID NO: 19319 - protein, 9 aa, Homo Sapiens
TLDPVEKAL

SEQ ID NO: 19320 - protein, 9 aa, Homo Sapiens
TLDQINQEL

SEQ ID NO: 19321 - protein, 9 aa, Homo Sapiens
TLDQTLNEL

SEQ ID NO: 19322 - protein, 9 aa, Homo Sapiens
TLDSFYEML

SEQ ID NO: 19323 - protein, 9 aa, Homo Sapiens
TLDSICDSL

SEQ ID NO: 19324 - protein, 9 aa, Homo Sapiens
TLDSILFLL

SEQ ID NO: 19325 - protein, 9 aa, Homo Sapiens
TLDTIYPVL

SEQ ID NO: 19326 - protein, 9 aa, Homo Sapiens
TLDVITVML

SEQ ID NO: 19327 - protein, 9 aa, Homo Sapiens
TLDVQIQHV

SEQ ID NO: 19328 - protein, 9 aa, Homo Sapiens
TLEDIYNQV

SEQ ID NO: 19329 - protein, 9 aa, Homo Sapiens
TLEEIIFKL

SEQ ID NO: 19330 - protein, 9 aa, Homo Sapiens
TLEEVFIEV

SEQ ID NO: 19331 - protein, 9 aa, Homo Sapiens
TLFNVIKSV

SEQ ID NO: 19332 - protein, 9 aa, Homo Sapiens
TLHSIIISL

SEQ ID NO: 19333 - protein, 9 aa, Homo Sapiens
TLIDLYEQV

SEQ ID NO: 19334 - protein, 9 aa, Homo Sapiens
TLIEDILGV

SEQ ID NO: 19335 - protein, 9 aa, Homo Sapiens
TLIGYFVGL

SEQ ID NO: 19336 - protein, 9 aa, Homo Sapiens
TLISRLPAV

SEQ ID NO: 19337 - protein, 9 aa, Homo Sapiens
TLMDILPRI

SEQ ID NO: 19338 - protein, 9 aa, Homo Sapiens
TLMIKFEEA

SEQ ID NO: 19339 - protein, 9 aa, Homo Sapiens
TLNEKLTAL

SEQ ID NO: 19340 - protein, 9 aa, Homo Sapiens
TLNSFIHVL

SEQ ID NO: 19341 - protein, 9 aa, Homo Sapiens
TLPDLVPQL

SEQ ID NO: 19342 - protein, 9 aa, Homo Sapiens
TLPEAIHFL

SEQ ID NO: 19343 - protein, 9 aa, Homo Sapiens
TLPEDISQL

SEQ ID NO: 19344 - protein, 9 aa, Homo Sapiens
TLPEENYQV

SEQ ID NO: 19345 - protein, 9 aa, Homo Sapiens
TLPELTFLL

SEQ ID NO: 19346 - protein, 9 aa, Homo Sapiens
TLPFQLSSV

SEQ ID NO: 19347 - protein, 9 aa, Homo Sapiens
TLPGHIQAV

SEQ ID NO: 19348 - protein, 9 aa, Homo Sapiens
TLPNIYVTL

SEQ ID NO: 19349 - protein, 9 aa, Homo Sapiens
TLPPESTQV

SEQ ID NO: 19350 - protein, 9 aa, Homo Sapiens
TLPPPPSGL

SEQ ID NO: 19351 - protein, 9 aa, Homo Sapiens
TLPVAFKVV

SEQ ID NO: 19352 - protein, 9 aa, Homo Sapiens
TLPVDFVTA

SEQ ID NO: 19353 - protein, 9 aa, Homo Sapiens
TLPVSFAQL

SEQ ID NO: 19354 - protein, 9 aa, Homo Sapiens
TLPYVAPEL

SEQ ID NO: 19355 - protein, 9 aa, Homo Sapiens
TLQEFLERI

SEQ ID NO: 19356 - protein, 9 aa, Homo Sapiens
TLQEKIHRL

SEQ ID NO: 19357 - protein, 9 aa, Homo Sapiens
TLSDLRVYL

SEQ ID NO: 19358 - protein, 9 aa, Homo Sapiens
TLSDVVVGL

SEQ ID NO: 19359 - protein, 9 aa, Homo Sapiens
TLSERLWGL

SEQ ID NO: 19360 - protein, 9 aa, Homo Sapiens
TLVLTLPTV

SEQ ID NO: 19361 - protein, 9 aa, Homo Sapiens
TLWVDPYEV

SEQ ID NO: 19362 - protein, 9 aa, Homo Sapiens
TLYEAVREV

SEQ ID NO: 19363 - protein, 9 aa, Homo Sapiens
TMDALLARL

SEQ ID NO: 19364 - protein, 9 aa, Homo Sapiens
TMDDFRWAL

SEQ ID NO: 19365 - protein, 9 aa, Homo Sapiens
TMDDLTTAL

SEQ ID NO: 19366 - protein, 9 aa, Homo Sapiens
TMDEFRQHL

SEQ ID NO: 19367 - protein, 9 aa, Homo Sapiens
TMDPFVDRI

SEQ ID NO: 19368 - protein, 9 aa, Homo Sapiens
TMPDLYHLL

SEQ ID NO: 19369 - protein, 9 aa, Homo Sapiens
TMPSDVLEV

SEQ ID NO: 19370 - protein, 9 aa, Homo Sapiens
TMPTSLPNL

SEQ ID NO: 19371 - protein, 9 aa, Homo Sapiens
TPGNRIVYL

SEQ ID NO: 19372 - protein, 9 aa, Homo Sapiens
TQPQRLPQL

SEQ ID NO: 19373 - protein, 9 aa, Homo Sapiens
TTDGVYEGV

SEQ ID NO: 19374 - protein, 9 aa, Homo Sapiens
TVDALVLRF

SEQ ID NO: 19375 - protein, 9 aa, Homo Sapiens
TVDDLQAKL

SEQ ID NO: 19376 - protein, 9 aa, Homo Sapiens
TVDDLVAEI

SEQ ID NO: 19377 - protein, 9 aa, Homo Sapiens
TVDELMMRL

SEQ ID NO: 19378 - protein, 9 aa, Homo Sapiens
TVDEVVQWL

SEQ ID NO: 19379 - protein, 9 aa, Homo Sapiens
TVDKILEAL

SEQ ID NO: 19380 - protein, 9 aa, Homo Sapiens
TVDLVINQL

SEQ ID NO: 19381 - protein, 9 aa, Homo Sapiens
TVDPVIVEA

SEQ ID NO: 19382 - protein, 9 aa, Homo Sapiens
TVDQVLSEV

SEQ ID NO: 19383 - protein, 9 aa, Homo Sapiens
TVFEHTFHV

SEQ ID NO: 19384 - protein, 9 aa, Homo Sapiens
TVIDYFHQL

SEQ ID NO: 19385 - protein, 9 aa, Homo Sapiens
TVLPFVSTV

SEQ ID NO: 19386 - protein, 9 aa, Homo Sapiens
TVNPIIYAL

SEQ ID NO: 19387 - protein, 9 aa, Homo Sapiens
TVPPPPAAA

SEQ ID NO: 19388 - protein, 9 aa, Homo Sapiens
TVPPVFVSV

SEQ ID NO: 19389 - protein, 9 aa, Homo Sapiens
VADAIRTSL

SEQ ID NO: 19390 - protein, 9 aa, Homo Sapiens
VADLVGFLL

SEQ ID NO: 19391 - protein, 9 aa, Homo Sapiens
VADNLAIQL

SEQ ID NO: 19392 - protein, 9 aa, Homo Sapiens
VADQIVTKL

SEQ ID NO: 19393 - protein, 9 aa, Homo Sapiens
VADTVYRAL

SEQ ID NO: 19394 - protein, 9 aa, Homo Sapiens
VADWVYNEL

SEQ ID NO: 19395 - protein, 9 aa, Homo Sapiens
VAPALAPKV

SEQ ID NO: 19396 - protein, 9 aa, Homo Sapiens
VAPDEIPYL

SEQ ID NO: 19397 - protein, 9 aa, Homo Sapiens
VAPEEHPVL

SEQ ID NO: 19398 - protein, 9 aa, Homo Sapiens
VAPESFEYI

SEQ ID NO: 19399 - protein, 9 aa, Homo Sapiens
VAPNDIPLV

SEQ ID NO: 19400 - protein, 9 aa, Homo Sapiens
VAPPKAHEV

SEQ ID NO: 19401 - protein, 9 aa, Homo Sapiens
VAVGVIKAV

SEQ ID NO: 19402 - protein, 9 aa, Homo Sapiens
VETGVLKPG

SEQ ID NO: 19403 - protein, 9 aa, Homo Sapiens
VFRTDLITA

SEQ ID NO: 19404 - protein, 9 aa, Homo Sapiens
VGPEELPVV

SEQ ID NO: 19405 - protein, 9 aa, Homo Sapiens
VIDAVTHAL

SEQ ID NO: 19406 - protein, 9 aa, Homo Sapiens
VIDDLVYSI

SEQ ID NO: 19407 - protein, 9 aa, Homo Sapiens
VIDEIYRVL

SEQ ID NO: 19408 - protein, 9 aa, Homo Sapiens
VIDGHIYAV

SEQ ID NO: 19409 - protein, 9 aa, Homo Sapiens
VIDKLVVHL

SEQ ID NO: 19410 - protein, 9 aa, Homo Sapiens
VIDLITIKL

SEQ ID NO: 19411 - protein, 9 aa, Homo Sapiens
VIDPPAVNL

SEQ ID NO: 19412 - protein, 9 aa, Homo Sapiens
VIDPVPAAV

SEQ ID NO: 19413 - protein, 9 aa, Homo Sapiens
VIDQIAETL

SEQ ID NO: 19414 - protein, 9 aa, Homo Sapiens
VIDQKVYEI

SEQ ID NO: 19415 - protein, 9 aa, Homo Sapiens
VIDRILYKL

SEQ ID NO: 19416 - protein, 9 aa, Homo Sapiens
VIDSLTVKI

SEQ ID NO: 19417 - protein, 9 aa, Homo Sapiens
VIDTPVFEL

SEQ ID NO: 19418 - protein, 9 aa, Homo Sapiens
VIFDLPTTV

SEQ ID NO: 19419 - protein, 9 aa, Homo Sapiens
VIHATVTSV

SEQ ID NO: 19420 - protein, 9 aa, Homo Sapiens
VIIPLLHTV

SEQ ID NO: 19421 - protein, 9 aa, Homo Sapiens
VILDPVHSV

SEQ ID NO: 19422 - protein, 9 aa, Homo Sapiens
VIPEKFQHI

SEQ ID NO: 19423 - protein, 9 aa, Homo Sapiens
VIPGMFKEV

SEQ ID NO: 19424 - protein, 9 aa, Homo Sapiens
VIPTNVPEL

SEQ ID NO: 19425 - protein, 9 aa, Homo Sapiens
VLDAHFLVL

SEQ ID NO: 19426 - protein, 9 aa, Homo Sapiens
VLDAITQEL

SEQ ID NO: 19427 - protein, 9 aa, Homo Sapiens
VLDAMFERI

SEQ ID NO: 19428 - protein, 9 aa, Homo Sapiens
VLDDILEKI

SEQ ID NO: 19429 - protein, 9 aa, Homo Sapiens
VLDDKDYFL

SEQ ID NO: 19430 - protein, 9 aa, Homo Sapiens
VLDDKLVFV

SEQ ID NO: 19431 - protein, 9 aa, Homo Sapiens
VLDDLLYAV

SEQ ID NO: 19432 - protein, 9 aa, Homo Sapiens
VLDDSTAKL

SEQ ID NO: 19433 - protein, 9 aa, Homo Sapiens
VLDDVGHGV

SEQ ID NO: 19434 - protein, 9 aa, Homo Sapiens
VLDEADEML

SEQ ID NO: 19435 - protein, 9 aa, Homo Sapiens
VLDEADKLL

SEQ ID NO: 19436 - protein, 9 aa, Homo Sapiens
VLDEADRMI

SEQ ID NO: 19437 - protein, 9 aa, Homo Sapiens
VLDEADVMI

SEQ ID NO: 19438 - protein, 9 aa, Homo Sapiens
VLDEFYSSL

SEQ ID NO: 19439 - protein, 9 aa, Homo Sapiens
VLDEGKMKL

SEQ ID NO: 19440 - protein, 9 aa, Homo Sapiens
VLDEGSASV

SEQ ID NO: 19441 - protein, 9 aa, Homo Sapiens
VLDEIDAAL

SEQ ID NO: 19442 - protein, 9 aa, Homo Sapiens
VLDELDMEL

SEQ ID NO: 19443 - protein, 9 aa, Homo Sapiens
VLDELGLSL

SEQ ID NO: 19444 - protein, 9 aa, Homo Sapiens
VLDELPPLI

SEQ ID NO: 19445 - protein, 9 aa, Homo Sapiens
VLDEPGQDL

SEQ ID NO: 19446 - protein, 9 aa, Homo Sapiens
VLDEQLNEF

SEQ ID NO: 19447 - protein, 9 aa, Homo Sapiens
VLDEVDQML

SEQ ID NO: 19448 - protein, 9 aa, Homo Sapiens
VLDEVVTVL

SEQ ID NO: 19449 - protein, 9 aa, Homo Sapiens
VLDFIEDYL

SEQ ID NO: 19450 - protein, 9 aa, Homo Sapiens
VLDGLEFKV

SEQ ID NO: 19451 - protein, 9 aa, Homo Sapiens
VLDGLHNEL

SEQ ID NO: 19452 - protein, 9 aa, Homo Sapiens
VLDGLLHGL

SEQ ID NO: 19453 - protein, 9 aa, Homo Sapiens
VLDGLLYVV

SEQ ID NO: 19454 - protein, 9 aa, Homo Sapiens
VLDGRGHLL

SEQ ID NO: 19455 - protein, 9 aa, Homo Sapiens
VLDGTIEYM

SEQ ID NO: 19456 - protein, 9 aa, Homo Sapiens
VLDGVKAEL

SEQ ID NO: 19457 - protein, 9 aa, Homo Sapiens
VLDGVLMEL

SEQ ID NO: 19458 - protein, 9 aa, Homo Sapiens
VLDHSLESL

SEQ ID NO: 19459 - protein, 9 aa, Homo Sapiens
VLDHTYQEL

SEQ ID NO: 19460 - protein, 9 aa, Homo Sapiens
VLDIMPLTL

SEQ ID NO: 19461 - protein, 9 aa, Homo Sapiens
VLDKEIIQL

SEQ ID NO: 19462 - protein, 9 aa, Homo Sapiens
VLDKLLLYL

SEQ ID NO: 19463 - protein, 9 aa, Homo Sapiens
VLDLSWNKL

SEQ ID NO: 19464 - protein, 9 aa, Homo Sapiens
VLDLTYNNL

SEQ ID NO: 19465 - protein, 9 aa, Homo Sapiens
VLDNIKAVF

SEQ ID NO: 19466 - protein, 9 aa, Homo Sapiens
VLDNIPKLL

SEQ ID NO: 19467 - protein, 9 aa, Homo Sapiens
VLDNLLAFV

SEQ ID NO: 19468 - protein, 9 aa, Homo Sapiens
VLDNNSVRL

SEQ ID NO: 19469 - protein, 9 aa, Homo Sapiens
VLDNPHHGF

SEQ ID NO: 19470 - protein, 9 aa, Homo Sapiens
VLDNPTPEM

SEQ ID NO: 19471 - protein, 9 aa, Homo Sapiens
VLDNVKMNL

SEQ ID NO: 19472 - protein, 9 aa, Homo Sapiens
VLDPESVEL

SEQ ID NO: 19473 - protein, 9 aa, Homo Sapiens
VLDPKPPPL

SEQ ID NO: 19474 - protein, 9 aa, Homo Sapiens
VLDQVEARL

SEQ ID NO: 19475 - protein, 9 aa, Homo Sapiens
VLDSAFEQL

SEQ ID NO: 19476 - protein, 9 aa, Homo Sapiens
VLDSFVEKL

SEQ ID NO: 19477 - protein, 9 aa, Homo Sapiens
VLDSIIWAF

SEQ ID NO: 19478 - protein, 9 aa, Homo Sapiens
VLDSLLLTL

SEQ ID NO: 19479 - protein, 9 aa, Homo Sapiens
VLDSLNARM

SEQ ID NO: 19480 - protein, 9 aa, Homo Sapiens
VLDVIHEVL

SEQ ID NO: 19481 - protein, 9 aa, Homo Sapiens
VLEEFVPEI

SEQ ID NO: 19482 - protein, 9 aa, Homo Sapiens
VLEELYKKV

SEQ ID NO: 19483 - protein, 9 aa, Homo Sapiens
VLEEQIERL

SEQ ID NO: 19484 - protein, 9 aa, Homo Sapiens
VLFDVTGQV

SEQ ID NO: 19485 - protein, 9 aa, Homo Sapiens
VLFELKLLL

SEQ ID NO: 19486 - protein, 9 aa, Homo Sapiens
VLFGLLREV

SEQ ID NO: 19487 - protein, 9 aa, Homo Sapiens
VLFGVETHV

SEQ ID NO: 19488 - protein, 9 aa, Homo Sapiens
VLFNKLTYL

SEQ ID NO: 19489 - protein, 9 aa, Homo Sapiens
VLIDYQRNV

SEQ ID NO: 19490 - protein, 9 aa, Homo Sapiens
VLIETLVTL

SEQ ID NO: 19491 - protein, 9 aa, Homo Sapiens
VLIKWFPEV

SEQ ID NO: 19492 - protein, 9 aa, Homo Sapiens
VLIPKLPQL

SEQ ID NO: 19493 - protein, 9 aa, Homo Sapiens
VLISKLPYI

SEQ ID NO: 19494 - protein, 9 aa, Homo Sapiens
VLLGHIFYV

SEQ ID NO: 19495 - protein, 9 aa, Homo Sapiens
VLLSTIHEL

SEQ ID NO: 19496 - protein, 9 aa, Homo Sapiens
VLMDRLPSL

SEQ ID NO: 19497 - protein, 9 aa, Homo Sapiens
VLMEIIAKV

SEQ ID NO: 19498 - protein, 9 aa, Homo Sapiens
VLMEMSYRL

SEQ ID NO: 19499 - protein, 9 aa, Homo Sapiens
VLMENIVYL

SEQ ID NO: 19500 - protein, 9 aa, Homo Sapiens
VLNEYFHNV

SEQ ID NO: 19501 - protein, 9 aa, Homo Sapiens
VLPAEFFEV

SEQ ID NO: 19502 - protein, 9 aa, Homo Sapiens
VLPAFTSNL

SEQ ID NO: 19503 - protein, 9 aa, Homo Sapiens
VLPAVLTRL

SEQ ID NO: 19504 - protein, 9 aa, Homo Sapiens
VLPAVSLEV

SEQ ID NO: 19505 - protein, 9 aa, Homo Sapiens
VLPDEICNL

SEQ ID NO: 19506 - protein, 9 aa, Homo Sapiens
VLPDLVVEI

SEQ ID NO: 19507 - protein, 9 aa, Homo Sapiens
VLPEHLILV

SEQ ID NO: 19508 - protein, 9 aa, Homo Sapiens
VLPESLPVL

SEQ ID NO: 19509 - protein, 9 aa, Homo Sapiens
VLPETCEEL

SEQ ID NO: 19510 - protein, 9 aa, Homo Sapiens
VLPGLIHKV

SEQ ID NO: 19511 - protein, 9 aa, Homo Sapiens
VLPGPVETV

SEQ ID NO: 19512 - protein, 9 aa, Homo Sapiens
VLPKLYVKL

SEQ ID NO: 19513 - protein, 9 aa, Homo Sapiens
VLPLAFTRL

SEQ ID NO: 19514 - protein, 9 aa, Homo Sapiens
VLPNIHPEL

SEQ ID NO: 19515 - protein, 9 aa, Homo Sapiens
VLPNIQAVL

SEQ ID NO: 19516 - protein, 9 aa, Homo Sapiens
VLPNPPQAV

SEQ ID NO: 19517 - protein, 9 aa, Homo Sapiens
VLPPEPVQL

SEQ ID NO: 19518 - protein, 9 aa, Homo Sapiens
VLPPFSTKV

SEQ ID NO: 19519 - protein, 9 aa, Homo Sapiens
VLPPHPQQL

SEQ ID NO: 19520 - protein, 9 aa, Homo Sapiens
VLPPPPTTL

SEQ ID NO: 19521 - protein, 9 aa, Homo Sapiens
VLPPQSQEV

SEQ ID NO: 19522 - protein, 9 aa, Homo Sapiens
VLPSITTEI

SEQ ID NO: 19523 - protein, 9 aa, Homo Sapiens
VLPSIVNEV

SEQ ID NO: 19524 - protein, 9 aa, Homo Sapiens
VLPSNTPNV

SEQ ID NO: 19525 - protein, 9 aa, Homo Sapiens
VLPSPGPAL

SEQ ID NO: 19526 - protein, 9 aa, Homo Sapiens
VLPWVLLTL

SEQ ID NO: 19527 - protein, 9 aa, Homo Sapiens
VLPYLVPKL

SEQ ID NO: 19528 - protein, 9 aa, Homo Sapiens
VLQSVFTSV

SEQ ID NO: 19529 - protein, 9 aa, Homo Sapiens
VLSDIIQNL

SEQ ID NO: 19530 - protein, 9 aa, Homo Sapiens
VLSELLWQV

SEQ ID NO: 19531 - protein, 9 aa, Homo Sapiens
VLVAELVGV

SEQ ID NO: 19532 - protein, 9 aa, Homo Sapiens
VLVDAFSHV

SEQ ID NO: 19533 - protein, 9 aa, Homo Sapiens
VLWDRTFSL

SEQ ID NO: 19534 - protein, 9 aa, Homo Sapiens
VLWIPAFMV

SEQ ID NO: 19535 - protein, 9 aa, Homo Sapiens
VLWKEILFL

SEQ ID NO: 19536 - protein, 9 aa, Homo Sapiens
VLWPESISV

SEQ ID NO: 19537 - protein, 9 aa, Homo Sapiens
VLWSVLQQI

SEQ ID NO: 19538 - protein, 9 aa, Homo Sapiens
VLYDPVVGC

SEQ ID NO: 19539 - protein, 9 aa, Homo Sapiens
VLYELFTYI

SEQ ID NO: 19540 - protein, 9 aa, Homo Sapiens
VLYHVETEV

SEQ ID NO: 19541 - protein, 9 aa, Homo Sapiens
VLYSIAEKV

SEQ ID NO: 19542 - protein, 9 aa, Homo Sapiens
VLYSVMTLV

SEQ ID NO: 19543 - protein, 9 aa, Homo Sapiens
VMAPRTLVL

SEQ ID NO: 19544 - protein, 9 aa, Homo Sapiens
VMDAALLLI

SEQ ID NO: 19545 - protein, 9 aa, Homo Sapiens
VMDEIHTVL

SEQ ID NO: 19546 - protein, 9 aa, Homo Sapiens
VMDKLFDEL

SEQ ID NO: 19547 - protein, 9 aa, Homo Sapiens
VMDKQYEIL

SEQ ID NO: 19548 - protein, 9 aa, Homo Sapiens
VMDLLVLGL

SEQ ID NO: 19549 - protein, 9 aa, Homo Sapiens
VMDLSIVRL

SEQ ID NO: 19550 - protein, 9 aa, Homo Sapiens
VMDSKIVQV

SEQ ID NO: 19551 - protein, 9 aa, Homo Sapiens
VMDVVVKSV

SEQ ID NO: 19552 - protein, 9 aa, Homo Sapiens
VMEDLYNYI

SEQ ID NO: 19553 - protein, 9 aa, Homo Sapiens
VMINQFVLA

SEQ ID NO: 19554 - protein, 9 aa, Homo Sapiens
VMPAGVDKI

SEQ ID NO: 19555 - protein, 9 aa, Homo Sapiens
VMPEAVPEV

SEQ ID NO: 19556 - protein, 9 aa, Homo Sapiens
VMPEDLVEA

SEQ ID NO: 19557 - protein, 9 aa, Homo Sapiens
VMPGNIVFV

SEQ ID NO: 19558 - protein, 9 aa, Homo Sapiens
VMPHANMNV

SEQ ID NO: 19559 - protein, 9 aa, Homo Sapiens
VMPHTTPEL

SEQ ID NO: 19560 - protein, 9 aa, Homo Sapiens
VMPSSFFLL

SEQ ID NO: 19561 - protein, 9 aa, Homo Sapiens
VMYDLITEL

SEQ ID NO: 19562 - protein, 9 aa, Homo Sapiens
VPQLEIVPN

SEQ ID NO: 19563 - protein, 9 aa, Homo Sapiens
VQDEFLEKL

SEQ ID NO: 19564 - protein, 9 aa, Homo Sapiens
VQPEEFVAI

SEQ ID NO: 19565 - protein, 9 aa, Homo Sapiens
VQPEHIQYL

SEQ ID NO: 19566 - protein, 9 aa, Homo Sapiens
VQPIKLARV

SEQ ID NO: 19567 - protein, 9 aa, Homo Sapiens
VQPLELPMV

SEQ ID NO: 19568 - protein, 9 aa, Homo Sapiens
VSDNIIAKL

SEQ ID NO: 19569 - protein, 9 aa, Homo Sapiens
VSPSSFENV

SEQ ID NO: 19570 - protein, 9 aa, Homo Sapiens
VTDAVALRV

SEQ ID NO: 19571 - protein, 9 aa, Homo Sapiens
VTDEVFNFL

SEQ ID NO: 19572 - protein, 9 aa, Homo Sapiens
VVDAIPVFL

SEQ ID NO: 19573 - protein, 9 aa, Homo Sapiens
VVDALNQGL

SEQ ID NO: 19574 - protein, 9 aa, Homo Sapiens
VVDAVVTQV

SEQ ID NO: 19575 - protein, 9 aa, Homo Sapiens
VVDDIVSKL

SEQ ID NO: 19576 - protein, 9 aa, Homo Sapiens
VVDDLLDQI

SEQ ID NO: 19577 - protein, 9 aa, Homo Sapiens
VVDEELSKL

SEQ ID NO: 19578 - protein, 9 aa, Homo Sapiens
VVDEIAAKL

SEQ ID NO: 19579 - protein, 9 aa, Homo Sapiens
VVDEIYFKV

SEQ ID NO: 19580 - protein, 9 aa, Homo Sapiens
VVDEKISAM

SEQ ID NO: 19581 - protein, 9 aa, Homo Sapiens
VVDEKLPGL

SEQ ID NO: 19582 - protein, 9 aa, Homo Sapiens
VVDEVIQNC

SEQ ID NO: 19583 - protein, 9 aa, Homo Sapiens
VVDFVAATL

SEQ ID NO: 19584 - protein, 9 aa, Homo Sapiens
VVDGAFKEV

SEQ ID NO: 19585 - protein, 9 aa, Homo Sapiens
VVDGNFEEV

SEQ ID NO: 19586 - protein, 9 aa, Homo Sapiens
VVDHLLLRL

SEQ ID NO: 19587 - protein, 9 aa, Homo Sapiens
VVDHVFPLL

SEQ ID NO: 19588 - protein, 9 aa, Homo Sapiens
VVDNLLFKL

SEQ ID NO: 19589 - protein, 9 aa, Homo Sapiens
VVDPIVSNF

SEQ ID NO: 19590 - protein, 9 aa, Homo Sapiens
VVDPNQVNV

SEQ ID NO: 19591 - protein, 9 aa, Homo Sapiens
VVDQVVAFL

SEQ ID NO: 19592 - protein, 9 aa, Homo Sapiens
VVDRFVEFL

SEQ ID NO: 19593 - protein, 9 aa, Homo Sapiens
VVDSIMTAL

SEQ ID NO: 19594 - protein, 9 aa, Homo Sapiens
VVDSSNTAL

SEQ ID NO: 19595 - protein, 9 aa, Homo Sapiens
VVDWLYHHV

SEQ ID NO: 19596 - protein, 9 aa, Homo Sapiens
VVDWLYHNV

SEQ ID NO: 19597 - protein, 9 aa, Homo Sapiens
VVDWLYTHV

SEQ ID NO: 19598 - protein, 9 aa, Homo Sapiens
VVFPTITLV

SEQ ID NO: 19599 - protein, 9 aa, Homo Sapiens
VVPAALKVV

SEQ ID NO: 19600 - protein, 9 aa, Homo Sapiens
VVPDKISEV

SEQ ID NO: 19601 - protein, 9 aa, Homo Sapiens
VVPPFLQPE

SEQ ID NO: 19602 - protein, 9 aa, Homo Sapiens
VVPQLFITV

SEQ ID NO: 19603 - protein, 9 aa, Homo Sapiens
VVPQQLLTV

SEQ ID NO: 19604 - protein, 9 aa, Homo Sapiens
VVPSYIPLV

SEQ ID NO: 19605 - protein, 9 aa, Homo Sapiens
VVVDPIQSV

SEQ ID NO: 19606 - protein, 9 aa, Homo Sapiens
VVVGDLVEV

SEQ ID NO: 19607 - protein, 9 aa, Homo Sapiens
VVWGTVIRV

SEQ ID NO: 19608 - protein, 9 aa, Homo Sapiens
WIDDTSAFV

SEQ ID NO: 19609 - protein, 9 aa, Homo Sapiens
WLDDVEERL

SEQ ID NO: 19610 - protein, 9 aa, Homo Sapiens
WLDEVRLTL

SEQ ID NO: 19611 - protein, 9 aa, Homo Sapiens
WLDGSPVTL

SEQ ID NO: 19612 - protein, 9 aa, Homo Sapiens
WLDNIIDLV

SEQ ID NO: 19613 - protein, 9 aa, Homo Sapiens
WLDSVHQLL

SEQ ID NO: 19614 - protein, 9 aa, Homo Sapiens
WLEENVHEV

SEQ ID NO: 19615 - protein, 9 aa, Homo Sapiens
WLPEPGLGL

SEQ ID NO: 19616 - protein, 9 aa, Homo Sapiens
WLPEVMILV

SEQ ID NO: 19617 - protein, 9 aa, Homo Sapiens
WLPNHVVFL

SEQ ID NO: 19618 - protein, 9 aa, Homo Sapiens
WVDDAIWRL

SEQ ID NO: 19619 - protein, 9 aa, Homo Sapiens
WVDEINRHV

SEQ ID NO: 19620 - protein, 9 aa, Homo Sapiens
WVDEMQVQL

SEQ ID NO: 19621 - protein, 9 aa, Homo Sapiens
WVLEPQEGV

SEQ ID NO: 19622 - protein, 9 aa, Homo Sapiens
YADPVTDLL

SEQ ID NO: 19623 - protein, 9 aa, Homo Sapiens
YADQLKEYL

SEQ ID NO: 19624 - protein, 9 aa, Homo Sapiens
YCPEVNVMV

SEQ ID NO: 19625 - protein, 9 aa, Homo Sapiens
YGDEIAIEL

SEQ ID NO: 19626 - protein, 9 aa, Homo Sapiens
YGLPVVVKL

SEQ ID NO: 19627 - protein, 9 aa, Homo Sapiens
YGPGLTHGV

SEQ ID NO: 19628 - protein, 9 aa, Homo Sapiens
YIDAHPETI

SEQ ID NO: 19629 - protein, 9 aa, Homo Sapiens
YIDDITVTT

SEQ ID NO: 19630 - protein, 9 aa, Homo Sapiens
YIDDLVVIL

SEQ ID NO: 19631 - protein, 9 aa, Homo Sapiens
YIDDTLTMV

SEQ ID NO: 19632 - protein, 9 aa, Homo Sapiens
YIDDVFHAL

SEQ ID NO: 19633 - protein, 9 aa, Homo Sapiens
YIDEGRLVL

SEQ ID NO: 19634 - protein, 9 aa, Homo Sapiens
YIDGILIKT

SEQ ID NO: 19635 - protein, 9 aa, Homo Sapiens
YIDHGDPQV

SEQ ID NO: 19636 - protein, 9 aa, Homo Sapiens
YIDKDLEYV

SEQ ID NO: 19637 - protein, 9 aa, Homo Sapiens
YIDKDMIHI

SEQ ID NO: 19638 - protein, 9 aa, Homo Sapiens
YIDKIKKYV

SEQ ID NO: 19639 - protein, 9 aa, Homo Sapiens
YIDLPPPRL

SEQ ID NO: 19640 - protein, 9 aa, Homo Sapiens
YIDNLLVRV

SEQ ID NO: 19641 - protein, 9 aa, Homo Sapiens
YIDQGIAEL

SEQ ID NO: 19642 - protein, 9 aa, Homo Sapiens
YIDQRIHEL

SEQ ID NO: 19643 - protein, 9 aa, Homo Sapiens
YIDRIHIFF

SEQ ID NO: 19644 - protein, 9 aa, Homo Sapiens
YIDRIIVAI

SEQ ID NO: 19645 - protein, 9 aa, Homo Sapiens
YIDRPLPYL

SEQ ID NO: 19646 - protein, 9 aa, Homo Sapiens
YIDSIPKTL

SEQ ID NO: 19647 - protein, 9 aa, Homo Sapiens
YIDTFFEDL

SEQ ID NO: 19648 - protein, 9 aa, Homo Sapiens
YIEDLKKFL

SEQ ID NO: 19649 - protein, 9 aa, Homo Sapiens
YIEEAIEKL

SEQ ID NO: 19650 - protein, 9 aa, Homo Sapiens
YIFEEPFTI

SEQ ID NO: 19651 - protein, 9 aa, Homo Sapiens
YIFQPQQSV

SEQ ID NO: 19652 - protein, 9 aa, Homo Sapiens
YIGEVLVSV

SEQ ID NO: 19653 - protein, 9 aa, Homo Sapiens
YIIDVSQSV

SEQ ID NO: 19654 - protein, 9 aa, Homo Sapiens
YIIEVNARL

SEQ ID NO: 19655 - protein, 9 aa, Homo Sapiens
YIIPVVLFL

SEQ ID NO: 19656 - protein, 9 aa, Homo Sapiens
YIISVKGIK

SEQ ID NO: 19657 - protein, 9 aa, Homo Sapiens
YIMSYISRV

SEQ ID NO: 19658 - protein, 9 aa, Homo Sapiens
YIPHPFLVV

SEQ ID NO: 19659 - protein, 9 aa, Homo Sapiens
YIPSVLHDV

SEQ ID NO: 19660 - protein, 9 aa, Homo Sapiens
YIPSYFDFV

SEQ ID NO: 19661 - protein, 9 aa, Homo Sapiens
YIPTELDQV

SEQ ID NO: 19662 - protein, 9 aa, Homo Sapiens
YIPTFICSV

SEQ ID NO: 19663 - protein, 9 aa, Homo Sapiens
YIVDLLTHL

SEQ ID NO: 19664 - protein, 9 aa, Homo Sapiens
YLADIFTKL

SEQ ID NO: 19665 - protein, 9 aa, Homo Sapiens
YLADLYHFV

SEQ ID NO: 19666 - protein, 9 aa, Homo Sapiens
YLADVTNAL

SEQ ID NO: 19667 - protein, 9 aa, Homo Sapiens
YLDAIKLLL

SEQ ID NO: 19668 - protein, 9 aa, Homo Sapiens
YLDAIRSGL

SEQ ID NO: 19669 - protein, 9 aa, Homo Sapiens
YLDCVMHDL

SEQ ID NO: 19670 - protein, 9 aa, Homo Sapiens
YLDDLLPKL

SEQ ID NO: 19671 - protein, 9 aa, Homo Sapiens
YLDDPDLKY

SEQ ID NO: 19672 - protein, 9 aa, Homo Sapiens
YLDEDTIYH

SEQ ID NO: 19673 - protein, 9 aa, Homo Sapiens
YLDEELMVL

SEQ ID NO: 19674 - protein, 9 aa, Homo Sapiens
YLDEIVKEV

SEQ ID NO: 19675 - protein, 9 aa, Homo Sapiens
YLDEPIKIG

SEQ ID NO: 19676 - protein, 9 aa, Homo Sapiens
YLDEYIARM

SEQ ID NO: 19677 - protein, 9 aa, Homo Sapiens
YLDFTNPKV

SEQ ID NO: 19678 - protein, 9 aa, Homo Sapiens
YLDGVHTVF

SEQ ID NO: 19679 - protein, 9 aa, Homo Sapiens
YLDHFSRAL

SEQ ID NO: 19680 - protein, 9 aa, Homo Sapiens
YLDIINLFL

SEQ ID NO: 19681 - protein, 9 aa, Homo Sapiens
YLDIVKLLL

SEQ ID NO: 19682 - protein, 9 aa, Homo Sapiens
YLDKFIRLL

SEQ ID NO: 19683 - protein, 9 aa, Homo Sapiens
YLDKIRDLL

SEQ ID NO: 19684 - protein, 9 aa, Homo Sapiens
YLDKMNNNI

SEQ ID NO: 19685 - protein, 9 aa, Homo Sapiens
YLDKTFYNL

SEQ ID NO: 19686 - protein, 9 aa, Homo Sapiens
YLDLILNDF

SEQ ID NO: 19687 - protein, 9 aa, Homo Sapiens
YLDLRSFQM

SEQ ID NO: 19688 - protein, 9 aa, Homo Sapiens
YLDNFWPDL

SEQ ID NO: 19689 - protein, 9 aa, Homo Sapiens
YLDNGVVFV

SEQ ID NO: 19690 - protein, 9 aa, Homo Sapiens
YLDNLLVRF

SEQ ID NO: 19691 - protein, 9 aa, Homo Sapiens
YLDPAQRGV

SEQ ID NO: 19692 - protein, 9 aa, Homo Sapiens
YLDPLWHQL

SEQ ID NO: 19693 - protein, 9 aa, Homo Sapiens
YLDPNYQSI

SEQ ID NO: 19694 - protein, 9 aa, Homo Sapiens
YLDPVQRDL

SEQ ID NO: 19695 - protein, 9 aa, Homo Sapiens
YLDQLNHIL

SEQ ID NO: 19696 - protein, 9 aa, Homo Sapiens
YLDQLTQIL

SEQ ID NO: 19697 - protein, 9 aa, Homo Sapiens
YLDQVKIRF

SEQ ID NO: 19698 - protein, 9 aa, Homo Sapiens
YLDQVKLQF

SEQ ID NO: 19699 - protein, 9 aa, Homo Sapiens
YLDRFLAGV

SEQ ID NO: 19700 - protein, 9 aa, Homo Sapiens
YLDRKLLTL

SEQ ID NO: 19701 - protein, 9 aa, Homo Sapiens
YLDSIDCSL

SEQ ID NO: 19702 - protein, 9 aa, Homo Sapiens
YLDSMYIML

SEQ ID NO: 19703 - protein, 9 aa, Homo Sapiens
YLDSPLVRF

SEQ ID NO: 19704 - protein, 9 aa, Homo Sapiens
YLDTINRSV

SEQ ID NO: 19705 - protein, 9 aa, Homo Sapiens
YLDTLYRYA

SEQ ID NO: 19706 - protein, 9 aa, Homo Sapiens
YLDTVCLNM

SEQ ID NO: 19707 - protein, 9 aa, Homo Sapiens
YLDVAEAFL

SEQ ID NO: 19708 - protein, 9 aa, Homo Sapiens
YLDVKFEYL

SEQ ID NO: 19709 - protein, 9 aa, Homo Sapiens
YLDVSVGKI

SEQ ID NO: 19710 - protein, 9 aa, Homo Sapiens
YLDWDVSEL

SEQ ID NO: 19711 - protein, 9 aa, Homo Sapiens
YLDWTIERV

SEQ ID NO: 19712 - protein, 9 aa, Homo Sapiens
YLEAIHNFV

SEQ ID NO: 19713 - protein, 9 aa, Homo Sapiens
YLEDFITNI

SEQ ID NO: 19714 - protein, 9 aa, Homo Sapiens
YLEDILAKL

SEQ ID NO: 19715 - protein, 9 aa, Homo Sapiens
YLEEAAERL

SEQ ID NO: 19716 - protein, 9 aa, Homo Sapiens
YLEEAPKFL

SEQ ID NO: 19717 - protein, 9 aa, Homo Sapiens
YLEEILVRV

SEQ ID NO: 19718 - protein, 9 aa, Homo Sapiens
YLEEPLTQV

SEQ ID NO: 19719 - protein, 9 aa, Homo Sapiens
YLEERLIEL

SEQ ID NO: 19720 - protein, 9 aa, Homo Sapiens
YLEPYLKEV

SEQ ID NO: 19721 - protein, 9 aa, Homo Sapiens
YLEQKVVEL

SEQ ID NO: 19722 - protein, 9 aa, Homo Sapiens
YLEVFSDKF

SEQ ID NO: 19723 - protein, 9 aa, Homo Sapiens
YLFAVNIKL

SEQ ID NO: 19724 - protein, 9 aa, Homo Sapiens
YLFDLPLKV

SEQ ID NO: 19725 - protein, 9 aa, Homo Sapiens
YLFEEIAKI

SEQ ID NO: 19726 - protein, 9 aa, Homo Sapiens
YLFEPVAKA

SEQ ID NO: 19727 - protein, 9 aa, Homo Sapiens
YLFERIKEL

SEQ ID NO: 19728 - protein, 9 aa, Homo Sapiens
YLFERTFNL

SEQ ID NO: 19729 - protein, 9 aa, Homo Sapiens
YLFIVKNEL

SEQ ID NO: 19730 - protein, 9 aa, Homo Sapiens
YLFTIINSL

SEQ ID NO: 19731 - protein, 9 aa, Homo Sapiens
YLFTSPQRV

SEQ ID NO: 19732 - protein, 9 aa, Homo Sapiens
YLGRLAHEV

SEQ ID NO: 19733 - protein, 9 aa, Homo Sapiens
YLHDFLKYL

SEQ ID NO: 19734 - protein, 9 aa, Homo Sapiens
YLHETLETI

SEQ ID NO: 19735 - protein, 9 aa, Homo Sapiens
YLHNQGIGV

SEQ ID NO: 19736 - protein, 9 aa, Homo Sapiens
YLHSQVVSV

SEQ ID NO: 19737 - protein, 9 aa, Homo Sapiens
YLHSYLTYI

SEQ ID NO: 19738 - protein, 9 aa, Homo Sapiens
YLHWLLTNI

SEQ ID NO: 19739 - protein, 9 aa, Homo Sapiens
YLIELIDRV

SEQ ID NO: 19740 - protein, 9 aa, Homo Sapiens
YLITLLEHL

SEQ ID NO: 19741 - protein, 9 aa, Homo Sapiens
YLKDFFSNV

SEQ ID NO: 19742 - protein, 9 aa, Homo Sapiens
YLLDLHSYL

SEQ ID NO: 19743 - protein, 9 aa, Homo Sapiens
YLLDLLRLP

SEQ ID NO: 19744 - protein, 9 aa, Homo Sapiens
YLLDQHILI

SEQ ID NO: 19745 - protein, 9 aa, Homo Sapiens
YLLDRLPEM

SEQ ID NO: 19746 - protein, 9 aa, Homo Sapiens
YLLEKFVAV

SEQ ID NO: 19747 - protein, 9 aa, Homo Sapiens
YLLESVNKL

SEQ ID NO: 19748 - protein, 9 aa, Homo Sapiens
YLLHIFMEA

SEQ ID NO: 19749 - protein, 9 aa, Homo Sapiens
YLLPAIVHI

SEQ ID NO: 19750 - protein, 9 aa, Homo Sapiens
YLMEVTHDL

SEQ ID NO: 19751 - protein, 9 aa, Homo Sapiens
YLNDFTHEI

SEQ ID NO: 19752 - protein, 9 aa, Homo Sapiens
YLNDGLWHM

SEQ ID NO: 19753 - protein, 9 aa, Homo Sapiens
YLNDLHEVL

SEQ ID NO: 19754 - protein, 9 aa, Homo Sapiens
YLNDRVDEL

SEQ ID NO: 19755 - protein, 9 aa, Homo Sapiens
YLNETFSEL

SEQ ID NO: 19756 - protein, 9 aa, Homo Sapiens
YLNHLEPPV

SEQ ID NO: 19757 - protein, 9 aa, Homo Sapiens
YLNVQVKEL

SEQ ID NO: 19758 - protein, 9 aa, Homo Sapiens
YLPDAVKGL

SEQ ID NO: 19759 - protein, 9 aa, Homo Sapiens
YLPDIQERL

SEQ ID NO: 19760 - protein, 9 aa, Homo Sapiens
YLPDKLPKV

SEQ ID NO: 19761 - protein, 9 aa, Homo Sapiens
YLPEDFIRV

SEQ ID NO: 19762 - protein, 9 aa, Homo Sapiens
YLPEELAAL

SEQ ID NO: 19763 - protein, 9 aa, Homo Sapiens
YLPEWKENI

SEQ ID NO: 19764 - protein, 9 aa, Homo Sapiens
YLPFIMELL

SEQ ID NO: 19765 - protein, 9 aa, Homo Sapiens
YLPGGTTGL

SEQ ID NO: 19766 - protein, 9 aa, Homo Sapiens
YLPGLFYRV

SEQ ID NO: 19767 - protein, 9 aa, Homo Sapiens
YLPHAPPFA

SEQ ID NO: 19768 - protein, 9 aa, Homo Sapiens
YLPLYVARL

SEQ ID NO: 19769 - protein, 9 aa, Homo Sapiens
YLPPATQVV

SEQ ID NO: 19770 - protein, 9 aa, Homo Sapiens
YLPPGFLSA

SEQ ID NO: 19771 - protein, 9 aa, Homo Sapiens
YLPPGVIAL

SEQ ID NO: 19772 - protein, 9 aa, Homo Sapiens
YLPPSVASI

SEQ ID NO: 19773 - protein, 9 aa, Homo Sapiens
YLPPTVITI

SEQ ID NO: 19774 - protein, 9 aa, Homo Sapiens
YLPQLFYHL

SEQ ID NO: 19775 - protein, 9 aa, Homo Sapiens
YLPQLIPHM

SEQ ID NO: 19776 - protein, 9 aa, Homo Sapiens
YLPRHSIGL

SEQ ID NO: 19777 - protein, 9 aa, Homo Sapiens
YLPSAILQL

SEQ ID NO: 19778 - protein, 9 aa, Homo Sapiens
YLPSFFTKL

SEQ ID NO: 19779 - protein, 9 aa, Homo Sapiens
YLPSQVSRV

SEQ ID NO: 19780 - protein, 9 aa, Homo Sapiens
YLPSSFPVL

SEQ ID NO: 19781 - protein, 9 aa, Homo Sapiens
YLPTHTSLL

SEQ ID NO: 19782 - protein, 9 aa, Homo Sapiens
YLPTKLAAV

SEQ ID NO: 19783 - protein, 9 aa, Homo Sapiens
YLPTLWVKL

SEQ ID NO: 19784 - protein, 9 aa, Homo Sapiens
YLPVGSHNL

SEQ ID NO: 19785 - protein, 9 aa, Homo Sapiens
YLPVKIEQV

SEQ ID NO: 19786 - protein, 9 aa, Homo Sapiens
YLPYPIHQV

SEQ ID NO: 19787 - protein, 9 aa, Homo Sapiens
YLQDVIMQV

SEQ ID NO: 19788 - protein, 9 aa, Homo Sapiens
YLQEIQTQL

SEQ ID NO: 19789 - protein, 9 aa, Homo Sapiens
YLQEVIDVL

SEQ ID NO: 19790 - protein, 9 aa, Homo Sapiens
YLQPFLAKL

SEQ ID NO: 19791 - protein, 9 aa, Homo Sapiens
YLSAKVEAL

SEQ ID NO: 19792 - protein, 9 aa, Homo Sapiens
YLSDNVHLV

SEQ ID NO: 19793 - protein, 9 aa, Homo Sapiens
YLSDPCPGL

SEQ ID NO: 19794 - protein, 9 aa, Homo Sapiens
YLSEEVQAV

SEQ ID NO: 19795 - protein, 9 aa, Homo Sapiens
YLSELSEHV

SEQ ID NO: 19796 - protein, 9 aa, Homo Sapiens
YLSGIAHFL

SEQ ID NO: 19797 - protein, 9 aa, Homo Sapiens
YLSKIIPAL

SEQ ID NO: 19798 - protein, 9 aa, Homo Sapiens
YLSPKLWAL

SEQ ID NO: 19799 - protein, 9 aa, Homo Sapiens
YLSPTFKEV

SEQ ID NO: 19800 - protein, 9 aa, Homo Sapiens
YLSVKIWDL

SEQ ID NO: 19801 - protein, 9 aa, Homo Sapiens
YLTAEILEL

SEQ ID NO: 19802 - protein, 9 aa, Homo Sapiens
YLTDRVMTV

SEQ ID NO: 19803 - protein, 9 aa, Homo Sapiens
YLTEVFLHV

SEQ ID NO: 19804 - protein, 9 aa, Homo Sapiens
YLTHDSPSV

SEQ ID NO: 19805 - protein, 9 aa, Homo Sapiens
YLTKKFAEL

SEQ ID NO: 19806 - protein, 9 aa, Homo Sapiens
YLTPLILTL

SEQ ID NO: 19807 - protein, 9 aa, Homo Sapiens
YLVEDIQHI

SEQ ID NO: 19808 - protein, 9 aa, Homo Sapiens
YLVNDIYEL

SEQ ID NO: 19809 - protein, 9 aa, Homo Sapiens
YLVPELDGV

SEQ ID NO: 19810 - protein, 9 aa, Homo Sapiens
YLVVKIEKV

SEQ ID NO: 19811 - protein, 9 aa, Homo Sapiens
YLWLKLNQV

SEQ ID NO: 19812 - protein, 9 aa, Homo Sapiens
YLWNLQVKL

SEQ ID NO: 19813 - protein, 9 aa, Homo Sapiens
YLYKYLWRL

SEQ ID NO: 19814 - protein, 9 aa, Homo Sapiens
YLYVRAHGV

SEQ ID NO: 19815 - protein, 9 aa, Homo Sapiens
YMAELIERL

SEQ ID NO: 19816 - protein, 9 aa, Homo Sapiens
YMDAPKAAL

SEQ ID NO: 19817 - protein, 9 aa, Homo Sapiens
YMDNDYAKL

SEQ ID NO: 19818 - protein, 9 aa, Homo Sapiens
YMDQIIEYL

SEQ ID NO: 19819 - protein, 9 aa, Homo Sapiens
YMDTLNIFM

SEQ ID NO: 19820 - protein, 9 aa, Homo Sapiens
YMEEIYHRI

SEQ ID NO: 19821 - protein, 9 aa, Homo Sapiens
YMENFIEHL

SEQ ID NO: 19822 - protein, 9 aa, Homo Sapiens
YMIAHITGL

SEQ ID NO: 19823 - protein, 9 aa, Homo Sapiens
YMNHIMVSV

SEQ ID NO: 19824 - protein, 9 aa, Homo Sapiens
YMPDLHPAA

SEQ ID NO: 19825 - protein, 9 aa, Homo Sapiens
YMPPPYASL

SEQ ID NO: 19826 - protein, 9 aa, Homo Sapiens
YMPPTSEAA

SEQ ID NO: 19827 - protein, 9 aa, Homo Sapiens
YMPQNPHII

SEQ ID NO: 19828 - protein, 9 aa, Homo Sapiens
YMSDSFINV

SEQ ID NO: 19829 - protein, 9 aa, Homo Sapiens
YMSPHPSPL

SEQ ID NO: 19830 - protein, 9 aa, Homo Sapiens
YMVHIQVTL

SEQ ID NO: 19831 - protein, 9 aa, Homo Sapiens
YPFPGPIPN

SEQ ID NO: 19832 - protein, 9 aa, Homo Sapiens
YQPYEIPAV

SEQ ID NO: 19833 - protein, 9 aa, Homo Sapiens
YQVGQLYSV

SEQ ID NO: 19834 - protein, 9 aa, Homo Sapiens
YSDDIPHAL

SEQ ID NO: 19835 - protein, 9 aa, Homo Sapiens
YTDKIMTYL

SEQ ID NO: 19836 - protein, 9 aa, Homo Sapiens
YTPPPPPTA

SEQ ID NO: 19837 - protein, 9 aa, Homo Sapiens
YTWEEVFRV

SEQ ID NO: 19838 - protein, 9 aa, Homo Sapiens
YVDAVGQFL

SEQ ID NO: 19839 - protein, 9 aa, Homo Sapiens
YVDDFGVSV

SEQ ID NO: 19840 - protein, 9 aa, Homo Sapiens
YVDDGLISL

SEQ ID NO: 19841 - protein, 9 aa, Homo Sapiens
YVDDVFLRV

SEQ ID NO: 19842 - protein, 9 aa, Homo Sapiens
YVDDVISRI

SEQ ID NO: 19843 - protein, 9 aa, Homo Sapiens
YVDEVMTRL

SEQ ID NO: 19844 - protein, 9 aa, Homo Sapiens
YVDGSTLQL

SEQ ID NO: 19845 - protein, 9 aa, Homo Sapiens
YVDKFYRSL

SEQ ID NO: 19846 - protein, 9 aa, Homo Sapiens
YVDNRFFTL

SEQ ID NO: 19847 - protein, 9 aa, Homo Sapiens
YVDPVNKVL

SEQ ID NO: 19848 - protein, 9 aa, Homo Sapiens
YVDRGYFSI

SEQ ID NO: 19849 - protein, 9 aa, Homo Sapiens
YVDRVFHAI

SEQ ID NO: 19850 - protein, 9 aa, Homo Sapiens
YVDRVTEFL

SEQ ID NO: 19851 - protein, 9 aa, Homo Sapiens
YVDSIQRKL

SEQ ID NO: 19852 - protein, 9 aa, Homo Sapiens
YVDTAVRHV

SEQ ID NO: 19853 - protein, 9 aa, Homo Sapiens
YVDTLLTML

SEQ ID NO: 19854 - protein, 9 aa, Homo Sapiens
YVDVVKVLL

SEQ ID NO: 19855 - protein, 9 aa, Homo Sapiens
YVEPLKLYL

SEQ ID NO: 19856 - protein, 9 aa, Homo Sapiens
YVFPGVTRL

SEQ ID NO: 19857 - protein, 9 aa, Homo Sapiens
YVINVTTHL

SEQ ID NO: 19858 - protein, 9 aa, Homo Sapiens
YVIPCFDSV

SEQ ID NO: 19859 - protein, 9 aa, Homo Sapiens
YVLDLAAKV

SEQ ID NO: 19860 - protein, 9 aa, Homo Sapiens
YVLPVVSYI

SEQ ID NO: 19861 - protein, 9 aa, Homo Sapiens
YVNLPTIAL

SEQ ID NO: 19862 - protein, 9 aa, Homo Sapiens
YVPATKVFL

SEQ ID NO: 19863 - protein, 9 aa, Homo Sapiens
YVPETVYRV

SEQ ID NO: 19864 - protein, 9 aa, Homo Sapiens
YVPPPFAAA

SEQ ID NO: 19865 - protein, 9 aa, Homo Sapiens
YVPTSYVEV

SEQ ID NO: 19866 - protein, 9 aa, Homo Sapiens
YVSEILEKV

SEQ ID NO: 19867 - protein, 9 aa, Homo Sapiens
YVSPKQFSV

SEQ ID NO: 19868 - protein, 9 aa, Homo Sapiens
YVTEELPQL

SEQ ID NO: 19869 - protein, 9 aa, Homo Sapiens
YVVKETIGV

SEQ ID NO: 19870 - protein, 9 aa, Homo Sapiens
YVVPFVAKV

SEQ ID NO: 19871 - protein, 9 aa, Homo Sapiens
YVWPNVFET

SEQ ID NO: 19872 - protein, 9 aa, Homo Sapiens
YVYEYLLHV

SEQ ID NO: 19873 - protein, 9 aa, Homo Sapiens
YVYKVLKQV

SEQ ID NO: 19874 - protein, 10 aa, Homo Sapiens
AGVAPPPTAG

SEQ ID NO: 19875 - protein, 10 aa, Homo Sapiens
ALDDFSISVL

SEQ ID NO: 19876 - protein, 10 aa, Homo Sapiens
ALDDHHALHL

SEQ ID NO: 19877 - protein, 10 aa, Homo Sapiens
ALDDPTPDYM

SEQ ID NO: 19878 - protein, 10 aa, Homo Sapiens
ALDDVTLPRL

SEQ ID NO: 19879 - protein, 10 aa, Homo Sapiens
ALDEAQGVGL

SEQ ID NO: 19880 - protein, 10 aa, Homo Sapiens
ALDEATKYAL

SEQ ID NO: 19881 - protein, 10 aa, Homo Sapiens
ALDEGDIALL

SEQ ID NO: 19882 - protein, 10 aa, Homo Sapiens
ALDEGRSILL

SEQ ID NO: 19883 - protein, 10 aa, Homo Sapiens
ALDEPLARRF

SEQ ID NO: 19884 - protein, 10 aa, Homo Sapiens
ALDEPPYLTV

SEQ ID NO: 19885 - protein, 10 aa, Homo Sapiens
ALDESHNQNL

SEQ ID NO: 19886 - protein, 10 aa, Homo Sapiens
ALDKIDQQYL

SEQ ID NO: 19887 - protein, 10 aa, Homo Sapiens
ALDLVYGNAL

SEQ ID NO: 19888 - protein, 10 aa, Homo Sapiens
ALDSLSWLLL

SEQ ID NO: 19889 - protein, 10 aa, Homo Sapiens
ALDTGFSLNL

SEQ ID NO: 19890 - protein, 10 aa, Homo Sapiens
ALDTLYIMGL

SEQ ID NO: 19891 - protein, 10 aa, Homo Sapiens
ALDTPVMVHM

SEQ ID NO: 19892 - protein, 10 aa, Homo Sapiens
ALDVANKIGI

SEQ ID NO: 19893 - protein, 10 aa, Homo Sapiens
ALEEADKMFL

SEQ ID NO: 19894 - protein, 10 aa, Homo Sapiens
ALPDIKVLTL

SEQ ID NO: 19895 - protein, 10 aa, Homo Sapiens
ALPDQGIAKA

SEQ ID NO: 19896 - protein, 10 aa, Homo Sapiens
ALPEILFAKV

SEQ ID NO: 19897 - protein, 10 aa, Homo Sapiens
ALPELYFQKV

SEQ ID NO: 19898 - protein, 10 aa, Homo Sapiens
ALPQTLPEIF

SEQ ID NO: 19899 - protein, 10 aa, Homo Sapiens
ALPRLLPALA

SEQ ID NO: 19900 - protein, 10 aa, Homo Sapiens
ALPTIAFAFV

SEQ ID NO: 19901 - protein, 10 aa, Homo Sapiens
ALQDVPLSSV

SEQ ID NO: 19902 - protein, 10 aa, Homo Sapiens
ALWEDEGVRA

SEQ ID NO: 19903 - protein, 10 aa, Homo Sapiens
AMPPPPPQGV

SEQ ID NO: 19904 - protein, 10 aa, Homo Sapiens
ASLDKFLANV

SEQ ID NO: 19905 - protein, 10 aa, Homo Sapiens
ASPGSGIVPV

SEQ ID NO: 19906 - protein, 10 aa, Homo Sapiens
AVDEDRKMYL

SEQ ID NO: 19907 - protein, 10 aa, Homo Sapiens
AVDPNRAVPL

SEQ ID NO: 19908 - protein, 10 aa, Homo Sapiens
AVDPVFQAKM

SEQ ID NO: 19909 - protein, 10 aa, Homo Sapiens
AVDVEGLYTL

SEQ ID NO: 19910 - protein, 10 aa, Homo Sapiens
AVPELPGPSV

SEQ ID NO: 19911 - protein, 10 aa, Homo Sapiens
FADGVYLVLL

SEQ ID NO: 19912 - protein, 10 aa, Homo Sapiens
FADPIYQAGL

SEQ ID NO: 19913 - protein, 10 aa, Homo Sapiens
FAPAVGPALG

SEQ ID NO: 19914 - protein, 10 aa, Homo Sapiens
FAPVNVTTEV

SEQ ID NO: 19915 - protein, 10 aa, Homo Sapiens
FGPEEDTAYL

SEQ ID NO: 19916 - protein, 10 aa, Homo Sapiens
FIDDVVSAVL

SEQ ID NO: 19917 - protein, 10 aa, Homo Sapiens
FIDEGVNIGL

SEQ ID NO: 19918 - protein, 10 aa, Homo Sapiens
FIDKFTPPVV

SEQ ID NO: 19919 - protein, 10 aa, Homo Sapiens
FIPPDGNFRL

SEQ ID NO: 19920 - protein, 10 aa, Homo Sapiens
FLDAVHQNRL

SEQ ID NO: 19921 - protein, 10 aa, Homo Sapiens
FLDDAFRKNL

SEQ ID NO: 19922 - protein, 10 aa, Homo Sapiens
FLDDVFEVKL

SEQ ID NO: 19923 - protein, 10 aa, Homo Sapiens
FLDDVVHSLL

SEQ ID NO: 19924 - protein, 10 aa, Homo Sapiens
FLDEAAARLL

SEQ ID NO: 19925 - protein, 10 aa, Homo Sapiens
FLDEHHSVNF

SEQ ID NO: 19926 - protein, 10 aa, Homo Sapiens
FLDEKTHELL

SEQ ID NO: 19927 - protein, 10 aa, Homo Sapiens
FLDFLTRPEL

SEQ ID NO: 19928 - protein, 10 aa, Homo Sapiens
FLDHIGGTRL

SEQ ID NO: 19929 - protein, 10 aa, Homo Sapiens
FLDHPEIYRS

SEQ ID NO: 19930 - protein, 10 aa, Homo Sapiens
FLDKPEDVLL

SEQ ID NO: 19931 - protein, 10 aa, Homo Sapiens
FLDLIPQDTL

SEQ ID NO: 19932 - protein, 10 aa, Homo Sapiens
FLDLLKDAGL

SEQ ID NO: 19933 - protein, 10 aa, Homo Sapiens
FLDNLHINLL

SEQ ID NO: 19934 - protein, 10 aa, Homo Sapiens
FLDPEIKAFL

SEQ ID NO: 19935 - protein, 10 aa, Homo Sapiens
FLDPPPYETL

SEQ ID NO: 19936 - protein, 10 aa, Homo Sapiens
FLDPPYSRVI

SEQ ID NO: 19937 - protein, 10 aa, Homo Sapiens
FLDPVIKTSF

SEQ ID NO: 19938 - protein, 10 aa, Homo Sapiens
FLDSLPDVKI

SEQ ID NO: 19939 - protein, 10 aa, Homo Sapiens
FLDSPNKYSL

SEQ ID NO: 19940 - protein, 10 aa, Homo Sapiens
FLDTISDFHL

SEQ ID NO: 19941 - protein, 10 aa, Homo Sapiens
FLFDGSPTYV

SEQ ID NO: 19942 - protein, 10 aa, Homo Sapiens
FLIEEQKIVV

SEQ ID NO: 19943 - protein, 10 aa, Homo Sapiens
FLLDGFPRTV

SEQ ID NO: 19944 - protein, 10 aa, Homo Sapiens
FLLEPGNLEV

SEQ ID NO: 19945 - protein, 10 aa, Homo Sapiens
FLLSLRGAGA

SEQ ID NO: 19946 - protein, 10 aa, Homo Sapiens
FLPDEPYIKV

SEQ ID NO: 19947 - protein, 10 aa, Homo Sapiens
FLPDGMEARL

SEQ ID NO: 19948 - protein, 10 aa, Homo Sapiens
FLPDHINIVL

SEQ ID NO: 19949 - protein, 10 aa, Homo Sapiens
FLPEAPAELL

SEQ ID NO: 19950 - protein, 10 aa, Homo Sapiens
FLPEGQDIGA

SEQ ID NO: 19951 - protein, 10 aa, Homo Sapiens
FLPESKIIFL

SEQ ID NO: 19952 - protein, 10 aa, Homo Sapiens
FLPPDPTYTL

SEQ ID NO: 19953 - protein, 10 aa, Homo Sapiens
FLPPEPTYTV

SEQ ID NO: 19954 - protein, 10 aa, Homo Sapiens
FLPPGYKIEV

SEQ ID NO: 19955 - protein, 10 aa, Homo Sapiens
FLPRKFPSLR

SEQ ID NO: 19956 - protein, 10 aa, Homo Sapiens
FLPSHSLDTV

SEQ ID NO: 19957 - protein, 10 aa, Homo Sapiens
FLSEHPNVTL

SEQ ID NO: 19958 - protein, 10 aa, Homo Sapiens
FLWERPTLLV

SEQ ID NO: 19959 - protein, 10 aa, Homo Sapiens
FMDDTSRSII

SEQ ID NO: 19960 - protein, 10 aa, Homo Sapiens
FMDDVGQTLL

SEQ ID NO: 19961 - protein, 10 aa, Homo Sapiens
FMDPGPEGKL

SEQ ID NO: 19962 - protein, 10 aa, Homo Sapiens
FMDTLSDLKM

SEQ ID NO: 19963 - protein, 10 aa, Homo Sapiens
FMFDEKLVTV

SEQ ID NO: 19964 - protein, 10 aa, Homo Sapiens
FVDDETKLTL

SEQ ID NO: 19965 - protein, 10 aa, Homo Sapiens
FVDDGTETHF

SEQ ID NO: 19966 - protein, 10 aa, Homo Sapiens
FVDDVTIEDL

SEQ ID NO: 19967 - protein, 10 aa, Homo Sapiens
FVDEVHAVGL

SEQ ID NO: 19968 - protein, 10 aa, Homo Sapiens
FVDLLDGENL

SEQ ID NO: 19969 - protein, 10 aa, Homo Sapiens
FVDMVARPSM

SEQ ID NO: 19970 - protein, 10 aa, Homo Sapiens
FVDNPVGTGF

SEQ ID NO: 19971 - protein, 10 aa, Homo Sapiens
FVDPNGKISL

SEQ ID NO: 19972 - protein, 10 aa, Homo Sapiens
FVDTDADTRL

SEQ ID NO: 19973 - protein, 10 aa, Homo Sapiens
FVDTDSDIRL

SEQ ID NO: 19974 - protein, 10 aa, Homo Sapiens
FVDTDSDVRL

SEQ ID NO: 19975 - protein, 10 aa, Homo Sapiens
FVDYVAVEQL

SEQ ID NO: 19976 - protein, 10 aa, Homo Sapiens
GIDPPRGVLM

SEQ ID NO: 19977 - protein, 10 aa, Homo Sapiens
GLASRKPLVL

SEQ ID NO: 19978 - protein, 10 aa, Homo Sapiens
GLDDIKDLKV

SEQ ID NO: 19979 - protein, 10 aa, Homo Sapiens
GLDEAKEILL

SEQ ID NO: 19980 - protein, 10 aa, Homo Sapiens
GLDEVIFSYV

SEQ ID NO: 19981 - protein, 10 aa, Homo Sapiens
GLDPNKPPEL

SEQ ID NO: 19982 - protein, 10 aa, Homo Sapiens
GLDPVGRIQM

SEQ ID NO: 19983 - protein, 10 aa, Homo Sapiens
GLDQQYDIYL

SEQ ID NO: 19984 - protein, 10 aa, Homo Sapiens
GLPGPPYHSL

SEQ ID NO: 19985 - protein, 10 aa, Homo Sapiens
GLPRFGIEMV

SEQ ID NO: 19986 - protein, 10 aa, Homo Sapiens
GLYDGPVCEV

SEQ ID NO: 19987 - protein, 10 aa, Homo Sapiens
GVTLDLIEKI

SEQ ID NO: 19988 - protein, 10 aa, Homo Sapiens
HLDEDKHFVV

SEQ ID NO: 19989 - protein, 10 aa, Homo Sapiens
HLDLPSNNNL

SEQ ID NO: 19990 - protein, 10 aa, Homo Sapiens
HLDPSLANYL

SEQ ID NO: 19991 - protein, 10 aa, Homo Sapiens
HLDSMDWLEL

SEQ ID NO: 19992 - protein, 10 aa, Homo Sapiens
HLDYVDTERI

SEQ ID NO: 19993 - protein, 10 aa, Homo Sapiens
HLPEQAFYMV

SEQ ID NO: 19994 - protein, 10 aa, Homo Sapiens
HQPHQPLPPT

SEQ ID NO: 19995 - protein, 10 aa, Homo Sapiens
HVDEFIDELL

SEQ ID NO: 19996 - protein, 10 aa, Homo Sapiens
HVDGIHLHVA

SEQ ID NO: 19997 - protein, 10 aa, Homo Sapiens
IIDAIVDFSS

SEQ ID NO: 19998 - protein, 10 aa, Homo Sapiens
IIDDHPEVTV

SEQ ID NO: 19999 - protein, 10 aa, Homo Sapiens
IIDEDGLLNL

SEQ ID NO: 20000 - protein, 10 aa, Homo Sapiens
IIDNSQGFYV

SEQ ID NO: 20001 - protein, 10 aa, Homo Sapiens
IIDPNHEIEF

SEQ ID NO: 20002 - protein, 10 aa, Homo Sapiens
IIDQHTFEVL

SEQ ID NO: 20003 - protein, 10 aa, Homo Sapiens
IIEENIPELL

SEQ ID NO: 20004 - protein, 10 aa, Homo Sapiens
IIEQLDPVSF

SEQ ID NO: 20005 - protein, 10 aa, Homo Sapiens
IISNPRDIQM

SEQ ID NO: 20006 - protein, 10 aa, Homo Sapiens
ILDACTFALL

SEQ ID NO: 20007 - protein, 10 aa, Homo Sapiens
ILDDLFLHTL

SEQ ID NO: 20008 - protein, 10 aa, Homo Sapiens
ILDDSFIEGV

SEQ ID NO: 20009 - protein, 10 aa, Homo Sapiens
ILDDVSLTHL

SEQ ID NO: 20010 - protein, 10 aa, Homo Sapiens
ILDEAHERTI

SEQ ID NO: 20011 - protein, 10 aa, Homo Sapiens
ILDEDKESTF

SEQ ID NO: 20012 - protein, 10 aa, Homo Sapiens
ILDESDHITM

SEQ ID NO: 20013 - protein, 10 aa, Homo Sapiens
ILDESHERVF

SEQ ID NO: 20014 - protein, 10 aa, Homo Sapiens
ILDETQHLDI

SEQ ID NO: 20015 - protein, 10 aa, Homo Sapiens
ILDGISNIKL

SEQ ID NO: 20016 - protein, 10 aa, Homo Sapiens
ILDKVILPQL

SEQ ID NO: 20017 - protein, 10 aa, Homo Sapiens
ILDNVIQPLV

SEQ ID NO: 20018 - protein, 10 aa, Homo Sapiens
ILDPFILVFL

SEQ ID NO: 20019 - protein, 10 aa, Homo Sapiens
ILDQPYDVNL

SEQ ID NO: 20020 - protein, 10 aa, Homo Sapiens
ILFVITKPDV

SEQ ID NO: 20021 - protein, 10 aa, Homo Sapiens
ILPDDIGAAL

SEQ ID NO: 20022 - protein, 10 aa, Homo Sapiens
ILPDITKDEL

SEQ ID NO: 20023 - protein, 10 aa, Homo Sapiens
ILPEAQDYFL

SEQ ID NO: 20024 - protein, 10 aa, Homo Sapiens
ILPEELQAWV

SEQ ID NO: 20025 - protein, 10 aa, Homo Sapiens
ILPEVENDRL

SEQ ID NO: 20026 - protein, 10 aa, Homo Sapiens
ILPGLSVMGV

SEQ ID NO: 20027 - protein, 10 aa, Homo Sapiens
ILPLMKFLEV

SEQ ID NO: 20028 - protein, 10 aa, Homo Sapiens
ILPPDHLNGV

SEQ ID NO: 20029 - protein, 10 aa, Homo Sapiens
ILPYSFIIGV

SEQ ID NO: 20030 - protein, 10 aa, Homo Sapiens
ILWEHLEQMI

SEQ ID NO: 20031 - protein, 10 aa, Homo Sapiens
ILWQLTGSAA

SEQ ID NO: 20032 - protein, 10 aa, Homo Sapiens
IMDTPGHVNF

SEQ ID NO: 20033 - protein, 10 aa, Homo Sapiens
IMPAFIFEHI

SEQ ID NO: 20034 - protein, 10 aa, Homo Sapiens
IQLTQMSLQL

SEQ ID NO: 20035 - protein, 10 aa, Homo Sapiens
ITPENLPQIL

SEQ ID NO: 20036 - protein, 10 aa, Homo Sapiens
IVDLIHDIQI

SEQ ID NO: 20037 - protein, 10 aa, Homo Sapiens
IVDSFDDMNL

SEQ ID NO: 20038 - protein, 10 aa, Homo Sapiens
IVPDDFETML

SEQ ID NO: 20039 - protein, 10 aa, Homo Sapiens
KIDAFHYVQL

SEQ ID NO: 20040 - protein, 10 aa, Homo Sapiens
KIDDILQTLL

SEQ ID NO: 20041 - protein, 10 aa, Homo Sapiens
KIDEHHFVAV

SEQ ID NO: 20042 - protein, 10 aa, Homo Sapiens
KIDPDLGYSF

SEQ ID NO: 20043 - protein, 10 aa, Homo Sapiens
KIDPDYSVYV

SEQ ID NO: 20044 - protein, 10 aa, Homo Sapiens
KIFDEILVNA

SEQ ID NO: 20045 - protein, 10 aa, Homo Sapiens
KIFSGVFVKV

SEQ ID NO: 20046 - protein, 10 aa, Homo Sapiens
KIIEDLGVHF

SEQ ID NO: 20047 - protein, 10 aa, Homo Sapiens
KLDDIFEPVL

SEQ ID NO: 20048 - protein, 10 aa, Homo Sapiens
KLDDIVQHIY

SEQ ID NO: 20049 - protein, 10 aa, Homo Sapiens
KLDDLYQQKI

SEQ ID NO: 20050 - protein, 10 aa, Homo Sapiens
KLDEALAQYF

SEQ ID NO: 20051 - protein, 10 aa, Homo Sapiens
KLDEIYVAGL

SEQ ID NO: 20052 - protein, 10 aa, Homo Sapiens
KLDFANNVQL

SEQ ID NO: 20053 - protein, 10 aa, Homo Sapiens
KLDSPAGTAL

SEQ ID NO: 20054 - protein, 10 aa, Homo Sapiens
KLEDVLPLAF

SEQ ID NO: 20055 - protein, 10 aa, Homo Sapiens
KLPDLPQNSV

SEQ ID NO: 20056 - protein, 10 aa, Homo Sapiens
KLPEDFAVVF

SEQ ID NO: 20057 - protein, 10 aa, Homo Sapiens
KLPEPLEDGL

SEQ ID NO: 20058 - protein, 10 aa, Homo Sapiens
KLPPVLAIQL

SEQ ID NO: 20059 - protein, 10 aa, Homo Sapiens
KLPWPEWMGV

SEQ ID NO: 20060 - protein, 10 aa, Homo Sapiens
KLQEFELPYV

SEQ ID NO: 20061 - protein, 10 aa, Homo Sapiens
KLWDPFSLEE

SEQ ID NO: 20062 - protein, 10 aa, Homo Sapiens
KLWEMDNMLI

SEQ ID NO: 20063 - protein, 10 aa, Homo Sapiens
KLYNPENIYL

SEQ ID NO: 20064 - protein, 10 aa, Homo Sapiens
KMDEVLYSIA

SEQ ID NO: 20065 - protein, 10 aa, Homo Sapiens
KMIEDLQNEL

SEQ ID NO: 20066 - protein, 10 aa, Homo Sapiens
KMPDFGQVTV

SEQ ID NO: 20067 - protein, 10 aa, Homo Sapiens
KMPEVITIHL

SEQ ID NO: 20068 - protein, 10 aa, Homo Sapiens
KMPSGEFARI

SEQ ID NO: 20069 - protein, 10 aa, Homo Sapiens
KVDDVVKRLL

SEQ ID NO: 20070 - protein, 10 aa, Homo Sapiens
KVDFPTAIGM

SEQ ID NO: 20071 - protein, 10 aa, Homo Sapiens
KVDPLFTELL

SEQ ID NO: 20072 - protein, 10 aa, Homo Sapiens
KVDPVVFVTL

SEQ ID NO: 20073 - protein, 10 aa, Homo Sapiens
KVFDPVPVGV

SEQ ID NO: 20074 - protein, 10 aa, Homo Sapiens
KVPQLEIVPN

SEQ ID NO: 20075 - protein, 10 aa, Homo Sapiens
LAPSHGLVSV

SEQ ID NO: 20076 - protein, 10 aa, Homo Sapiens
LIDDLHSQML

SEQ ID NO: 20077 - protein, 10 aa, Homo Sapiens
LIDENYLDRL

SEQ ID NO: 20078 - protein, 10 aa, Homo Sapiens
LIDESVHALF

SEQ ID NO: 20079 - protein, 10 aa, Homo Sapiens
LIDWINDVLV

SEQ ID NO: 20080 - protein, 10 aa, Homo Sapiens
LIFDQSGTYL

SEQ ID NO: 20081 - protein, 10 aa, Homo Sapiens
LISGVGIFMM

SEQ ID NO: 20082 - protein, 10 aa, Homo Sapiens
LLDADMNIKI

SEQ ID NO: 20083 - protein, 10 aa, Homo Sapiens
LLDDHGHIRI

SEQ ID NO: 20084 - protein, 10 aa, Homo Sapiens
LLDDNMQIRL

SEQ ID NO: 20085 - protein, 10 aa, Homo Sapiens
LLDDRHDSGL

SEQ ID NO: 20086 - protein, 10 aa, Homo Sapiens
LLDDSLVSIF

SEQ ID NO: 20087 - protein, 10 aa, Homo Sapiens
LLDEARNYHL

SEQ ID NO: 20088 - protein, 10 aa, Homo Sapiens
LLDEDLRQTV

SEQ ID NO: 20089 - protein, 10 aa, Homo Sapiens
LLDEEGHIKI

SEQ ID NO: 20090 - protein, 10 aa, Homo Sapiens
LLDEEGTFSL

SEQ ID NO: 20091 - protein, 10 aa, Homo Sapiens
LLDEEVSRTL

SEQ ID NO: 20092 - protein, 10 aa, Homo Sapiens
LLDELTHEFL

SEQ ID NO: 20093 - protein, 10 aa, Homo Sapiens
LLDENGVLKL

SEQ ID NO: 20094 - protein, 10 aa, Homo Sapiens
LLDEPYLDRL

SEQ ID NO: 20095 - protein, 10 aa, Homo Sapiens
LLDEVALEGL

SEQ ID NO: 20096 - protein, 10 aa, Homo Sapiens
LLDHLSIVYV

SEQ ID NO: 20097 - protein, 10 aa, Homo Sapiens
LLDHPNGDGL

SEQ ID NO: 20098 - protein, 10 aa, Homo Sapiens
LLDKLYALGL

SEQ ID NO: 20099 - protein, 10 aa, Homo Sapiens
LLDLPFRVGV

SEQ ID NO: 20100 - protein, 10 aa, Homo Sapiens
LLDNNIGLVL

SEQ ID NO: 20101 - protein, 10 aa, Homo Sapiens
LLDPNIYRTM

SEQ ID NO: 20102 - protein, 10 aa, Homo Sapiens
LLDSGAFHLL

SEQ ID NO: 20103 - protein, 10 aa, Homo Sapiens
LLDSPGKVLL

SEQ ID NO: 20104 - protein, 10 aa, Homo Sapiens
LLDTMVDTFL

SEQ ID NO: 20105 - protein, 10 aa, Homo Sapiens
LLDYIDKEII

SEQ ID NO: 20106 - protein, 10 aa, Homo Sapiens
LLNPAYDVYL

SEQ ID NO: 20107 - protein, 10 aa, Homo Sapiens
LLPDDKLTLF

SEQ ID NO: 20108 - protein, 10 aa, Homo Sapiens
LLPDQPPYHL

SEQ ID NO: 20109 - protein, 10 aa, Homo Sapiens
LLPDTILEKL

SEQ ID NO: 20110 - protein, 10 aa, Homo Sapiens
LLPDYYLVTV

SEQ ID NO: 20111 - protein, 10 aa, Homo Sapiens
LLPEDTPPFL

SEQ ID NO: 20112 - protein, 10 aa, Homo Sapiens
LLPEEPVSQL

SEQ ID NO: 20113 - protein, 10 aa, Homo Sapiens
LLPEGGITAI

SEQ ID NO: 20114 - protein, 10 aa, Homo Sapiens
LLPEIMPGLI

SEQ ID NO: 20115 - protein, 10 aa, Homo Sapiens
LLPELRDWGV

SEQ ID NO: 20116 - protein, 10 aa, Homo Sapiens
LLPENLKEGL

SEQ ID NO: 20117 - protein, 10 aa, Homo Sapiens
LLPEPNILQL

SEQ ID NO: 20118 - protein, 10 aa, Homo Sapiens
LLPEYVVPYM

SEQ ID NO: 20119 - protein, 10 aa, Homo Sapiens
LLPLLLPALA

SEQ ID NO: 20120 - protein, 10 aa, Homo Sapiens
LLPPDALVGL

SEQ ID NO: 20121 - protein, 10 aa, Homo Sapiens
LLPPEPDYSL

SEQ ID NO: 20122 - protein, 10 aa, Homo Sapiens
LLPSEGIVHL

SEQ ID NO: 20123 - protein, 10 aa, Homo Sapiens
LLPVDIRQYL

SEQ ID NO: 20124 - protein, 10 aa, Homo Sapiens
LMDTLFNTKF

SEQ ID NO: 20125 - protein, 10 aa, Homo Sapiens
LMPRPLPYHL

SEQ ID NO: 20126 - protein, 10 aa, Homo Sapiens
LVDDIGDVTI

SEQ ID NO: 20127 - protein, 10 aa, Homo Sapiens
LVDEIMRAGM

SEQ ID NO: 20128 - protein, 10 aa, Homo Sapiens
LVDHAYETYF

SEQ ID NO: 20129 - protein, 10 aa, Homo Sapiens
LVDNITGQRL

SEQ ID NO: 20130 - protein, 10 aa, Homo Sapiens
LVDNNFQHSV

SEQ ID NO: 20131 - protein, 10 aa, Homo Sapiens
LVPDLSNFYA

SEQ ID NO: 20132 - protein, 10 aa, Homo Sapiens
LVPTSGIYFV

SEQ ID NO: 20133 - protein, 10 aa, Homo Sapiens
MLPDPQNISL

SEQ ID NO: 20134 - protein, 10 aa, Homo Sapiens
MLPHAPGVQM

SEQ ID NO: 20135 - protein, 10 aa, Homo Sapiens
MLPHYEPIPF

SEQ ID NO: 20136 - protein, 10 aa, Homo Sapiens
MVDEVSGKVL

SEQ ID NO: 20137 - protein, 10 aa, Homo Sapiens
MVDGTLLLLL

SEQ ID NO: 20138 - protein, 10 aa, Homo Sapiens
MVDPVTGDKL

SEQ ID NO: 20139 - protein, 10 aa, Homo Sapiens
NIDEIYKALS

SEQ ID NO: 20140 - protein, 10 aa, Homo Sapiens
NIDETYGVNV

SEQ ID NO: 20141 - protein, 10 aa, Homo Sapiens
NIDSIIQRLL

SEQ ID NO: 20142 - protein, 10 aa, Homo Sapiens
NIPAFLPNVL

SEQ ID NO: 20143 - protein, 10 aa, Homo Sapiens
NIPPHLQWEV

SEQ ID NO: 20144 - protein, 10 aa, Homo Sapiens
NLDVPHSYSV

SEQ ID NO: 20145 - protein, 10 aa, Homo Sapiens
NLDVPTFVSF

SEQ ID NO: 20146 - protein, 10 aa, Homo Sapiens
NLPEAGDSRV

SEQ ID NO: 20147 - protein, 10 aa, Homo Sapiens
NLPEYLPFVL

SEQ ID NO: 20148 - protein, 10 aa, Homo Sapiens
NMDSVFKELL

SEQ ID NO: 20149 - protein, 10 aa, Homo Sapiens
NVDKVFFDLM

SEQ ID NO: 20150 - protein, 10 aa, Homo Sapiens
NVDSLITRLL

SEQ ID NO: 20151 - protein, 10 aa, Homo Sapiens
NVIGEPFLNV

SEQ ID NO: 20152 - protein, 10 aa, Homo Sapiens
NVPEGLLATV

SEQ ID NO: 20153 - protein, 10 aa, Homo Sapiens
PGKMGEPGLP

SEQ ID NO: 20154 - protein, 10 aa, Homo Sapiens
QIDGVTEDKL

SEQ ID NO: 20155 - protein, 10 aa, Homo Sapiens
QLDDLYLIAI

SEQ ID NO: 20156 - protein, 10 aa, Homo Sapiens
QLDEARGLLL

SEQ ID NO: 20157 - protein, 10 aa, Homo Sapiens
QMPETTETVL

SEQ ID NO: 20158 - protein, 10 aa, Homo Sapiens
QVDKVNFHMF

SEQ ID NO: 20159 - protein, 10 aa, Homo Sapiens
RGPPQPLPAV

SEQ ID NO: 20160 - protein, 10 aa, Homo Sapiens
RIDPFVRTFL

SEQ ID NO: 20161 - protein, 10 aa, Homo Sapiens
RIKELPELWL

SEQ ID NO: 20162 - protein, 10 aa, Homo Sapiens
RLDDFWSLKL

SEQ ID NO: 20163 - protein, 10 aa, Homo Sapiens
RLDDLFLESF

SEQ ID NO: 20164 - protein, 10 aa, Homo Sapiens
RLDDSSFLGL

SEQ ID NO: 20165 - protein, 10 aa, Homo Sapiens
RLDEALRLYL

SEQ ID NO: 20166 - protein, 10 aa, Homo Sapiens
RLDEIFQTGL

SEQ ID NO: 20167 - protein, 10 aa, Homo Sapiens
RLDELGGVYL

SEQ ID NO: 20168 - protein, 10 aa, Homo Sapiens
RLDEPLASYI

SEQ ID NO: 20169 - protein, 10 aa, Homo Sapiens
RLDESAFVGL

SEQ ID NO: 20170 - protein, 10 aa, Homo Sapiens
RLPDPFTPNL

SEQ ID NO: 20171 - protein, 10 aa, Homo Sapiens
RLPEASVHRA

SEQ ID NO: 20172 - protein, 10 aa, Homo Sapiens
RLPPEYASTV

SEQ ID NO: 20173 - protein, 10 aa, Homo Sapiens
RLQEDPPVGV

SEQ ID NO: 20174 - protein, 10 aa, Homo Sapiens
RLYEITIEVF

SEQ ID NO: 20175 - protein, 10 aa, Homo Sapiens
RMDPLEAIQL

SEQ ID NO: 20176 - protein, 10 aa, Homo Sapiens
RMDPVNNINV

SEQ ID NO: 20177 - protein, 10 aa, Homo Sapiens
RVDESLNIKV

SEQ ID NO: 20178 - protein, 10 aa, Homo Sapiens
RVDEVFEDAF

SEQ ID NO: 20179 - protein, 10 aa, Homo Sapiens
RVPSDPFTGV

SEQ ID NO: 20180 - protein, 10 aa, Homo Sapiens
SADPFYWMRV

SEQ ID NO: 20181 - protein, 10 aa, Homo Sapiens
SIIEYLPTLR

SEQ ID NO: 20182 - protein, 10 aa, Homo Sapiens
SISTLELFTV

SEQ ID NO: 20183 - protein, 10 aa, Homo Sapiens
SIVDLPVHQL

SEQ ID NO: 20184 - protein, 10 aa, Homo Sapiens
SLAGLGAYQL

SEQ ID NO: 20185 - protein, 10 aa, Homo Sapiens
SLDDIYMIGV

SEQ ID NO: 20186 - protein, 10 aa, Homo Sapiens
SLDDLTNLVV

SEQ ID NO: 20187 - protein, 10 aa, Homo Sapiens
SLDDPNRISL

SEQ ID NO: 20188 - protein, 10 aa, Homo Sapiens
SLDDVEGMSV

SEQ ID NO: 20189 - protein, 10 aa, Homo Sapiens
SLDEAIDMRF

SEQ ID NO: 20190 - protein, 10 aa, Homo Sapiens
SLDEPLDLKL

SEQ ID NO: 20191 - protein, 10 aa, Homo Sapiens
SLDEPSVKTM

SEQ ID NO: 20192 - protein, 10 aa, Homo Sapiens
SLDEQYKHQL

SEQ ID NO: 20193 - protein, 10 aa, Homo Sapiens
SLDERIYVKM

SEQ ID NO: 20194 - protein, 10 aa, Homo Sapiens
SLDGLAVVNV

SEQ ID NO: 20195 - protein, 10 aa, Homo Sapiens
SLDPSRPVTF

SEQ ID NO: 20196 - protein, 10 aa, Homo Sapiens
SLDSLGDVFL

SEQ ID NO: 20197 - protein, 10 aa, Homo Sapiens
SLDSVFSDKL

SEQ ID NO: 20198 - protein, 10 aa, Homo Sapiens
SLEGIPLAQV

SEQ ID NO: 20199 - protein, 10 aa, Homo Sapiens
SLEKSVLLEL

SEQ ID NO: 20200 - protein, 10 aa, Homo Sapiens
SLKDMDLVEV

SEQ ID NO: 20201 - protein, 10 aa, Homo Sapiens
SLLELPHPLL

SEQ ID NO: 20202 - protein, 10 aa, Homo Sapiens
SLPDFGISYV

SEQ ID NO: 20203 - protein, 10 aa, Homo Sapiens
SLPEVLNHNL

SEQ ID NO: 20204 - protein, 10 aa, Homo Sapiens
SLPGTDLPSL

SEQ ID NO: 20205 - protein, 10 aa, Homo Sapiens
SLPSSPPPQL

SEQ ID NO: 20206 - protein, 10 aa, Homo Sapiens
SLRDLPAQLL

SEQ ID NO: 20207 - protein, 10 aa, Homo Sapiens
SLSELQISYV

SEQ ID NO: 20208 - protein, 10 aa, Homo Sapiens
SLWEDFSQSL

SEQ ID NO: 20209 - protein, 10 aa, Homo Sapiens
SLYLGEVFTQ

SEQ ID NO: 20210 - protein, 10 aa, Homo Sapiens
SVDDIHFLVL

SEQ ID NO: 20211 - protein, 10 aa, Homo Sapiens
SVDEDFCHYL

SEQ ID NO: 20212 - protein, 10 aa, Homo Sapiens
SVDEDYDLRL

SEQ ID NO: 20213 - protein, 10 aa, Homo Sapiens
SVDEVYEFIP

SEQ ID NO: 20214 - protein, 10 aa, Homo Sapiens
SVDVADLIGL

SEQ ID NO: 20215 - protein, 10 aa, Homo Sapiens
SVVGIPVFRV

SEQ ID NO: 20216 - protein, 10 aa, Homo Sapiens
TIDEGYVYGL

SEQ ID NO: 20217 - protein, 10 aa, Homo Sapiens
TIDPFWDISL

SEQ ID NO: 20218 - protein, 10 aa, Homo Sapiens
TIDPIPHQLL

SEQ ID NO: 20219 - protein, 10 aa, Homo Sapiens
TIPDFIFANV

SEQ ID NO: 20220 - protein, 10 aa, Homo Sapiens
TLDALFNIMM

SEQ ID NO: 20221 - protein, 10 aa, Homo Sapiens
TLDEIIDNHI

SEQ ID NO: 20222 - protein, 10 aa, Homo Sapiens
TLDGLPPLRL

SEQ ID NO: 20223 - protein, 10 aa, Homo Sapiens
TLDGLTKIQV

SEQ ID NO: 20224 - protein, 10 aa, Homo Sapiens
TLPEPVGTQV

SEQ ID NO: 20225 - protein, 10 aa, Homo Sapiens
TLPEVVGCEL

SEQ ID NO: 20226 - protein, 10 aa, Homo Sapiens
TLSEPRQAEI

SEQ ID NO: 20227 - protein, 10 aa, Homo Sapiens
TLWEIAKAEV

SEQ ID NO: 20228 - protein, 10 aa, Homo Sapiens
TPGNRIVYLY

SEQ ID NO: 20229 - protein, 10 aa, Homo Sapiens
TPVQTVTIVQ

SEQ ID NO: 20230 - protein, 10 aa, Homo Sapiens
TTEGIPVLIV

SEQ ID NO: 20231 - protein, 10 aa, Homo Sapiens
TVDDPYATFV

SEQ ID NO: 20232 - protein, 10 aa, Homo Sapiens
TVDPETQARL

SEQ ID NO: 20233 - protein, 10 aa, Homo Sapiens
TVDPYFHDRV

SEQ ID NO: 20234 - protein, 10 aa, Homo Sapiens
VELVDESLFD

SEQ ID NO: 20235 - protein, 10 aa, Homo Sapiens
VIDEIGKMEL

SEQ ID NO: 20236 - protein, 10 aa, Homo Sapiens
VLDDKDYFLF

SEQ ID NO: 20237 - protein, 10 aa, Homo Sapiens
VLDDPKHIQL

SEQ ID NO: 20238 - protein, 10 aa, Homo Sapiens
VLDDPKSAGV

SEQ ID NO: 20239 - protein, 10 aa, Homo Sapiens
VLDDVPVQGF

SEQ ID NO: 20240 - protein, 10 aa, Homo Sapiens
VLDENKNTAL

SEQ ID NO: 20241 - protein, 10 aa, Homo Sapiens
VLDETRTAYI

SEQ ID NO: 20242 - protein, 10 aa, Homo Sapiens
VLDFGRPIAM

SEQ ID NO: 20243 - protein, 10 aa, Homo Sapiens
VLDIPQERGL

SEQ ID NO: 20244 - protein, 10 aa, Homo Sapiens
VLDPDEGIRF

SEQ ID NO: 20245 - protein, 10 aa, Homo Sapiens
VLDPDLRMTF

SEQ ID NO: 20246 - protein, 10 aa, Homo Sapiens
VLDPPTDLKF

SEQ ID NO: 20247 - protein, 10 aa, Homo Sapiens
VLDSEYLVTL

SEQ ID NO: 20248 - protein, 10 aa, Homo Sapiens
VLDTGASIHL

SEQ ID NO: 20249 - protein, 10 aa, Homo Sapiens
VLPAEFFEVL

SEQ ID NO: 20250 - protein, 10 aa, Homo Sapiens
VLPAGALHQV

SEQ ID NO: 20251 - protein, 10 aa, Homo Sapiens
VLPDSVEIGL

SEQ ID NO: 20252 - protein, 10 aa, Homo Sapiens
VLPEIDPVLF

SEQ ID NO: 20253 - protein, 10 aa, Homo Sapiens
VLPELDDLTV

SEQ ID NO: 20254 - protein, 10 aa, Homo Sapiens
VLPLRGFLGI

SEQ ID NO: 20255 - protein, 10 aa, Homo Sapiens
VLPNFLPYNV

SEQ ID NO: 20256 - protein, 10 aa, Homo Sapiens
VLPPDVLTRV

SEQ ID NO: 20257 - protein, 10 aa, Homo Sapiens
VLPPSALQSV

SEQ ID NO: 20258 - protein, 10 aa, Homo Sapiens
VLPPVPTEGL

SEQ ID NO: 20259 - protein, 10 aa, Homo Sapiens
VMDHVSDSFL

SEQ ID NO: 20260 - protein, 10 aa, Homo Sapiens
VMDKLSSIRL

SEQ ID NO: 20261 - protein, 10 aa, Homo Sapiens
VMDSAFKVYL

SEQ ID NO: 20262 - protein, 10 aa, Homo Sapiens
VPEEQIFPVL

SEQ ID NO: 20263 - protein, 10 aa, Homo Sapiens
VQPFFDNIFV

SEQ ID NO: 20264 - protein, 10 aa, Homo Sapiens
VVDDGVEHTI

SEQ ID NO: 20265 - protein, 10 aa, Homo Sapiens
VVDDSNEHML

SEQ ID NO: 20266 - protein, 10 aa, Homo Sapiens
VVDGVHGAFI

SEQ ID NO: 20267 - protein, 10 aa, Homo Sapiens
VVDHLLDIYI

SEQ ID NO: 20268 - protein, 10 aa, Homo Sapiens
VVDPETDEQL

SEQ ID NO: 20269 - protein, 10 aa, Homo Sapiens
VVDPIVSNFL

SEQ ID NO: 20270 - protein, 10 aa, Homo Sapiens
VVPDTSRIYV

SEQ ID NO: 20271 - protein, 10 aa, Homo Sapiens
VVPPFLQPEV

SEQ ID NO: 20272 - protein, 10 aa, Homo Sapiens
VVVPPFLQPE

SEQ ID NO: 20273 - protein, 10 aa, Homo Sapiens
YDNEFGYSNR

SEQ ID NO: 20274 - protein, 10 aa, Homo Sapiens
YIAGEYTLLL

SEQ ID NO: 20275 - protein, 10 aa, Homo Sapiens
YIDAQFEAYL

SEQ ID NO: 20276 - protein, 10 aa, Homo Sapiens
YIDAQFENYL

SEQ ID NO: 20277 - protein, 10 aa, Homo Sapiens
YIDDLGHLHV

SEQ ID NO: 20278 - protein, 10 aa, Homo Sapiens
YIDEEGVRYV

SEQ ID NO: 20279 - protein, 10 aa, Homo Sapiens
YIDEQFERYL

SEQ ID NO: 20280 - protein, 10 aa, Homo Sapiens
YIDEVIIEQF

SEQ ID NO: 20281 - protein, 10 aa, Homo Sapiens
YIDSKFEDYL

SEQ ID NO: 20282 - protein, 10 aa, Homo Sapiens
YIPFYGILGA

SEQ ID NO: 20283 - protein, 10 aa, Homo Sapiens
YLDAIYDVTV

SEQ ID NO: 20284 - protein, 10 aa, Homo Sapiens
YLDEDTIYHL

SEQ ID NO: 20285 - protein, 10 aa, Homo Sapiens
YLDEEFHQSL

SEQ ID NO: 20286 - protein, 10 aa, Homo Sapiens
YLDEEFVLRV

SEQ ID NO: 20287 - protein, 10 aa, Homo Sapiens
YLDFIKEVGF

SEQ ID NO: 20288 - protein, 10 aa, Homo Sapiens
YLDHTADVQL

SEQ ID NO: 20289 - protein, 10 aa, Homo Sapiens
YLDIKGLLDV

SEQ ID NO: 20290 - protein, 10 aa, Homo Sapiens
YLDKDLKQYM

SEQ ID NO: 20291 - protein, 10 aa, Homo Sapiens
YLDPLVFREF

SEQ ID NO: 20292 - protein, 10 aa, Homo Sapiens
YLDQGTQIFL

SEQ ID NO: 20293 - protein, 10 aa, Homo Sapiens
YLDQISRYYI

SEQ ID NO: 20294 - protein, 10 aa, Homo Sapiens
YLDSIYFNRF

SEQ ID NO: 20295 - protein, 10 aa, Homo Sapiens
YLIPDIDLKL

SEQ ID NO: 20296 - protein, 10 aa, Homo Sapiens
YLLDMPLWYL

SEQ ID NO: 20297 - protein, 10 aa, Homo Sapiens
YLPAVFEEVL

SEQ ID NO: 20298 - protein, 10 aa, Homo Sapiens
YLPEDFIRVG

SEQ ID NO: 20299 - protein, 10 aa, Homo Sapiens
YLPEDFMESL

SEQ ID NO: 20300 - protein, 10 aa, Homo Sapiens
YLPPEFTAGL

SEQ ID NO: 20301 - protein, 10 aa, Homo Sapiens
YLWDLDHGFA

SEQ ID NO: 20302 - protein, 10 aa, Homo Sapiens
YLYEVSQLKD

SEQ ID NO: 20303 - protein, 10 aa, Homo Sapiens
YMDNPQNLAM

SEQ ID NO: 20304 - protein, 10 aa, Homo Sapiens
YMDPEGDWFL

SEQ ID NO: 20305 - protein, 10 aa, Homo Sapiens
YMDSPQSIGF

SEQ ID NO: 20306 - protein, 10 aa, Homo Sapiens
YVAPAYGVYL

SEQ ID NO: 20307 - protein, 10 aa, Homo Sapiens
YVDAAYKPGM

SEQ ID NO: 20308 - protein, 10 aa, Homo Sapiens
YVDAGTPMYL

SEQ ID NO: 20309 - protein, 10 aa, Homo Sapiens
YVDATYREGM

SEQ ID NO: 20310 - protein, 10 aa, Homo Sapiens
YVDDTQFLRF

SEQ ID NO: 20311 - protein, 10 aa, Homo Sapiens
YVDDTQFVRF

SEQ ID NO: 20312 - protein, 10 aa, Homo Sapiens
YVDDVFLRVL

SEQ ID NO: 20313 - protein, 10 aa, Homo Sapiens
YVDEAGTVKL

SEQ ID NO: 20314 - protein, 10 aa, Homo Sapiens
YVDEASKKEI

SEQ ID NO: 20315 - protein, 10 aa, Homo Sapiens
YVDPQFLTYM

SEQ ID NO: 20316 - protein, 10 aa, Homo Sapiens
YVDPSPDYCL

SEQ ID NO: 20317 - protein, 10 aa, Homo Sapiens
YVDPSTDERL

SEQ ID NO: 20318 - protein, 10 aa, Homo Sapiens
YVDSEGIVRM

SEQ ID NO: 20319 - protein, 10 aa, Homo Sapiens
YVPVHFDASV

SEQ ID NO: 20320 - protein, 11 aa, Homo Sapiens
AIDEALAALHV

SEQ ID NO: 20321 - protein, 11 aa, Homo Sapiens
ALADKELLPSV

SEQ ID NO: 20322 - protein, 11 aa, Homo Sapiens
ALDEADRMIDM

SEQ ID NO: 20323 - protein, 11 aa, Homo Sapiens
ALDEDFAPAKL

SEQ ID NO: 20324 - protein, 11 aa, Homo Sapiens
ALDEGDAQKTL

SEQ ID NO: 20325 - protein, 11 aa, Homo Sapiens
ALDETGKETFL

SEQ ID NO: 20326 - protein, 11 aa, Homo Sapiens
ALDKATVLLSM

SEQ ID NO: 20327 - protein, 11 aa, Homo Sapiens
ALDNVDARMYM

SEQ ID NO: 20328 - protein, 11 aa, Homo Sapiens
ALDNVLPSAQL

SEQ ID NO: 20329 - protein, 11 aa, Homo Sapiens
ALDPAAQAFLL

SEQ ID NO: 20330 - protein, 11 aa, Homo Sapiens
ALDPLADKILI

SEQ ID NO: 20331 - protein, 11 aa, Homo Sapiens
ALDPSFPRMNL

SEQ ID NO: 20332 - protein, 11 aa, Homo Sapiens
ALDPSLDNHQV

SEQ ID NO: 20333 - protein, 11 aa, Homo Sapiens
ALDRQTATQLL

SEQ ID NO: 20334 - protein, 11 aa, Homo Sapiens
ALDTIRPEHVL

SEQ ID NO: 20335 - protein, 11 aa, Homo Sapiens
ALDWVSREQSV

SEQ ID NO: 20336 - protein, 11 aa, Homo Sapiens
ALEPHINAQIM

SEQ ID NO: 20337 - protein, 11 aa, Homo Sapiens
ALFASGLIHRV

SEQ ID NO: 20338 - protein, 11 aa, Homo Sapiens
ALGNTGHEIGR

SEQ ID NO: 20339 - protein, 11 aa, Homo Sapiens
ALIEAEKVAQV

SEQ ID NO: 20340 - protein, 11 aa, Homo Sapiens
ALLEADVNIKL

SEQ ID NO: 20341 - protein, 11 aa, Homo Sapiens
ALPDLTKVIQL

SEQ ID NO: 20342 - protein, 11 aa, Homo Sapiens
ALPDTDVLYMT

SEQ ID NO: 20343 - protein, 11 aa, Homo Sapiens
ALPEIFTELEI

SEQ ID NO: 20344 - protein, 11 aa, Homo Sapiens
ALPEPQEAQKL

SEQ ID NO: 20345 - protein, 11 aa, Homo Sapiens
ALPESGSSLAL

SEQ ID NO: 20346 - protein, 11 aa, Homo Sapiens
ALPEVLAVIQV

SEQ ID NO: 20347 - protein, 11 aa, Homo Sapiens
ALPKAGKFGPA

SEQ ID NO: 20348 - protein, 11 aa, Homo Sapiens
ALPKELPLISS

SEQ ID NO: 20349 - protein, 11 aa, Homo Sapiens
ALPPAIQEEVL

SEQ ID NO: 20350 - protein, 11 aa, Homo Sapiens
ALPPDVTTQSV

SEQ ID NO: 20351 - protein, 11 aa, Homo Sapiens
ALPTEAAILTL

SEQ ID NO: 20352 - protein, 11 aa, Homo Sapiens
ALQEASEAYLV

SEQ ID NO: 20353 - protein, 11 aa, Homo Sapiens
ALWENPESGEL

SEQ ID NO: 20354 - protein, 11 aa, Homo Sapiens
ALWHDAENQTV

SEQ ID NO: 20355 - protein, 11 aa, Homo Sapiens
AMPGEDLKFNL

SEQ ID NO: 20356 - protein, 11 aa, Homo Sapiens
AMPNIAVGQNV

SEQ ID NO: 20357 - protein, 11 aa, Homo Sapiens
AQPPWLPGLEA

SEQ ID NO: 20358 - protein, 11 aa, Homo Sapiens
AVDPVADIATL

SEQ ID NO: 20359 - protein, 11 aa, Homo Sapiens
AVPDEILIEAV

SEQ ID NO: 20360 - protein, 11 aa, Homo Sapiens
AVPGPGGIWSV

SEQ ID NO: 20361 - protein, 11 aa, Homo Sapiens
AYIDDFDLGQI

SEQ ID NO: 20362 - protein, 11 aa, Homo Sapiens
FAVTEYPTLKF

SEQ ID NO: 20363 - protein, 11 aa, Homo Sapiens
FIDDLADLSCL

SEQ ID NO: 20364 - protein, 11 aa, Homo Sapiens
FIDETSDIENL

SEQ ID NO: 20365 - protein, 11 aa, Homo Sapiens
FIDMPDAAHGI

SEQ ID NO: 20366 - protein, 11 aa, Homo Sapiens
FIDPSSGLAFF

SEQ ID NO: 20367 - protein, 11 aa, Homo Sapiens
FIPLPSAVVQA

SEQ ID NO: 20368 - protein, 11 aa, Homo Sapiens
FLADPSAFVAA

SEQ ID NO: 20369 - protein, 11 aa, Homo Sapiens
FLDDFESKYSF

SEQ ID NO: 20370 - protein, 11 aa, Homo Sapiens
FLDDGFLVPTF

SEQ ID NO: 20371 - protein, 11 aa, Homo Sapiens
FLDELGQHISL

SEQ ID NO: 20372 - protein, 11 aa, Homo Sapiens
FLDENIGGVAV

SEQ ID NO: 20373 - protein, 11 aa, Homo Sapiens
FLDEPTNHLDI

SEQ ID NO: 20374 - protein, 11 aa, Homo Sapiens
FLDESRSTQYM

SEQ ID NO: 20375 - protein, 11 aa, Homo Sapiens
FLDEVSRQQEL

SEQ ID NO: 20376 - protein, 11 aa, Homo Sapiens
FLDITNPKAVL

SEQ ID NO: 20377 - protein, 11 aa, Homo Sapiens
FLDNPGILSEL

SEQ ID NO: 20378 - protein, 11 aa, Homo Sapiens
FLDPGGPMMKL

SEQ ID NO: 20379 - protein, 11 aa, Homo Sapiens
FLDTNETPYFM

SEQ ID NO: 20380 - protein, 11 aa, Homo Sapiens
FLFEPVVKAFL

SEQ ID NO: 20381 - protein, 11 aa, Homo Sapiens
FLIEPEHVNTV

SEQ ID NO: 20382 - protein, 11 aa, Homo Sapiens
FLLDPVKGERL

SEQ ID NO: 20383 - protein, 11 aa, Homo Sapiens
FLLDPYKYMTL

SEQ ID NO: 20384 - protein, 11 aa, Homo Sapiens
FLLEQEKTQAL

SEQ ID NO: 20385 - protein, 11 aa, Homo Sapiens
FLPDANSSVLL

SEQ ID NO: 20386 - protein, 11 aa, Homo Sapiens
FLPDPSALQNL

SEQ ID NO: 20387 - protein, 11 aa, Homo Sapiens
FLPDQDQRSQL

SEQ ID NO: 20388 - protein, 11 aa, Homo Sapiens
FLPEALDFVGV

SEQ ID NO: 20389 - protein, 11 aa, Homo Sapiens
FLPEGAETDLL

SEQ ID NO: 20390 - protein, 11 aa, Homo Sapiens
FLPEPMGTANI

SEQ ID NO: 20391 - protein, 11 aa, Homo Sapiens
FLPETRIMTSV

SEQ ID NO: 20392 - protein, 11 aa, Homo Sapiens
FLPPEHTIVYI

SEQ ID NO: 20393 - protein, 11 aa, Homo Sapiens
FLPPITPPEKF

SEQ ID NO: 20394 - protein, 11 aa, Homo Sapiens
FLPSADEIYDC

SEQ ID NO: 20395 - protein, 11 aa, Homo Sapiens
FLVEPQEDTRL

SEQ ID NO: 20396 - protein, 11 aa, Homo Sapiens
FLWDVPSNWTL

SEQ ID NO: 20397 - protein, 11 aa, Homo Sapiens
FMDDTSRSIIR

SEQ ID NO: 20398 - protein, 11 aa, Homo Sapiens
FMPVSSLIVGV

SEQ ID NO: 20399 - protein, 11 aa, Homo Sapiens
FVDDSGRYLAI

SEQ ID NO: 20400 - protein, 11 aa, Homo Sapiens
FVDDVSEEELL

SEQ ID NO: 20401 - protein, 11 aa, Homo Sapiens
FVDEGKATVRL

SEQ ID NO: 20402 - protein, 11 aa, Homo Sapiens
FVDGVSTVARF

SEQ ID NO: 20403 - protein, 11 aa, Homo Sapiens
FVDPAQITMKV

SEQ ID NO: 20404 - protein, 11 aa, Homo Sapiens
FVDSPSSGTHL

SEQ ID NO: 20405 - protein, 11 aa, Homo Sapiens
FVPEPSSTMGL

SEQ ID NO: 20406 - protein, 11 aa, Homo Sapiens
FVPPPLDQEEM

SEQ ID NO: 20407 - protein, 11 aa, Homo Sapiens
FVQEVVQSQQV

SEQ ID NO: 20408 - protein, 11 aa, Homo Sapiens
FVYKGGKIYKV

SEQ ID NO: 20409 - protein, 11 aa, Homo Sapiens
GLDISHISQRL

SEQ ID NO: 20410 - protein, 11 aa, Homo Sapiens
GLDPLGYEIQL

SEQ ID NO: 20411 - protein, 11 aa, Homo Sapiens
GLPDAPRNLQL

SEQ ID NO: 20412 - protein, 11 aa, Homo Sapiens
GLPDIDSKMLM

SEQ ID NO: 20413 - protein, 11 aa, Homo Sapiens
GLPEEIEELRV

SEQ ID NO: 20414 - protein, 11 aa, Homo Sapiens
GLPGPEGIVGI

SEQ ID NO: 20415 - protein, 11 aa, Homo Sapiens
GLPGVGIMPTV

SEQ ID NO: 20416 - protein, 11 aa, Homo Sapiens
GLPQEVLNENL

SEQ ID NO: 20417 - protein, 11 aa, Homo Sapiens
GLPTRLPEIML

SEQ ID NO: 20418 - protein, 11 aa, Homo Sapiens
GLWEIENNPTV

SEQ ID NO: 20419 - protein, 11 aa, Homo Sapiens
GVDAETMHTLL

SEQ ID NO: 20420 - protein, 11 aa, Homo Sapiens
HDISPQAPTHF

SEQ ID NO: 20421 - protein, 11 aa, Homo Sapiens
HIDLPNEQARL

SEQ ID NO: 20422 - protein, 11 aa, Homo Sapiens
HIPGPGGIEGV

SEQ ID NO: 20423 - protein, 11 aa, Homo Sapiens
HLDLPSNNNLV

SEQ ID NO: 20424 - protein, 11 aa, Homo Sapiens
HLMEENMIVYV

SEQ ID NO: 20425 - protein, 11 aa, Homo Sapiens
HLPLPEQIHKA

SEQ ID NO: 20426 - protein, 11 aa, Homo Sapiens
HLPPEIVPATL

SEQ ID NO: 20427 - protein, 11 aa, Homo Sapiens
HVPSTDLILNV

SEQ ID NO: 20428 - protein, 11 aa, Homo Sapiens
IAPENLPPLTP

SEQ ID NO: 20429 - protein, 11 aa, Homo Sapiens
IIDDPNLVVKI

SEQ ID NO: 20430 - protein, 11 aa, Homo Sapiens
IIDDVMKELNF

SEQ ID NO: 20431 - protein, 11 aa, Homo Sapiens
IIDPADTRLVL

SEQ ID NO: 20432 - protein, 11 aa, Homo Sapiens
IIDTPISEMGF

SEQ ID NO: 20433 - protein, 11 aa, Homo Sapiens
IILPEMVGSMV

SEQ ID NO: 20434 - protein, 11 aa, Homo Sapiens
IIPASIPGSEV

SEQ ID NO: 20435 - protein, 11 aa, Homo Sapiens
IIPDPVVAPSI

SEQ ID NO: 20436 - protein, 11 aa, Homo Sapiens
ILDDDTIITTL

SEQ ID NO: 20437 - protein, 11 aa, Homo Sapiens
ILDDTAKNLRV

SEQ ID NO: 20438 - protein, 11 aa, Homo Sapiens
ILDDVSLTHLT

SEQ ID NO: 20439 - protein, 11 aa, Homo Sapiens
ILDEMSHKLRL

SEQ ID NO: 20440 - protein, 11 aa, Homo Sapiens
ILDEPTNHLDM

SEQ ID NO: 20441 - protein, 11 aa, Homo Sapiens
ILDESGKKFAM

SEQ ID NO: 20442 - protein, 11 aa, Homo Sapiens
ILDESHYKELL

SEQ ID NO: 20443 - protein, 11 aa, Homo Sapiens
ILDPAYPDITL

SEQ ID NO: 20444 - protein, 11 aa, Homo Sapiens
ILDPVDPTNNV

SEQ ID NO: 20445 - protein, 11 aa, Homo Sapiens
ILDRVADGMVF

SEQ ID NO: 20446 - protein, 11 aa, Homo Sapiens
ILLEAGAFVNV

SEQ ID NO: 20447 - protein, 11 aa, Homo Sapiens
ILNDPSQSEVM

SEQ ID NO: 20448 - protein, 11 aa, Homo Sapiens
ILPDDPRQMTL

SEQ ID NO: 20449 - protein, 11 aa, Homo Sapiens
ILPDGEDFLAV

SEQ ID NO: 20450 - protein, 11 aa, Homo Sapiens
ILPDGSIFSRV

SEQ ID NO: 20451 - protein, 11 aa, Homo Sapiens
ILPDITKDELF

SEQ ID NO: 20452 - protein, 11 aa, Homo Sapiens
ILPEHSVLQNI

SEQ ID NO: 20453 - protein, 11 aa, Homo Sapiens
ILPENFKDSRL

SEQ ID NO: 20454 - protein, 11 aa, Homo Sapiens
ILPEVKVEGEL

SEQ ID NO: 20455 - protein, 11 aa, Homo Sapiens
ILPKIKAIPQL

SEQ ID NO: 20456 - protein, 11 aa, Homo Sapiens
ILPNEDDKFTV

SEQ ID NO: 20457 - protein, 11 aa, Homo Sapiens
ILPNIEAVSNV

SEQ ID NO: 20458 - protein, 11 aa, Homo Sapiens
ILPPQDLSHYI

SEQ ID NO: 20459 - protein, 11 aa, Homo Sapiens
ILRDPLQTDTL

SEQ ID NO: 20460 - protein, 11 aa, Homo Sapiens
ILWAASKSQLL

SEQ ID NO: 20461 - protein, 11 aa, Homo Sapiens
ILYDERSVHKV

SEQ ID NO: 20462 - protein, 11 aa, Homo Sapiens
IMDDPAGNSYL

SEQ ID NO: 20463 - protein, 11 aa, Homo Sapiens
IMPNGDHIVSA

SEQ ID NO: 20464 - protein, 11 aa, Homo Sapiens
IMPPHSITQTV

SEQ ID NO: 20465 - protein, 11 aa, Homo Sapiens
ITPENLPQILL

SEQ ID NO: 20466 - protein, 11 aa, Homo Sapiens
IVDEPTFKVLL

SEQ ID NO: 20467 - protein, 11 aa, Homo Sapiens
IVDEVNGLISM

SEQ ID NO: 20468 - protein, 11 aa, Homo Sapiens
IVDPTGEEEHL

SEQ ID NO: 20469 - protein, 11 aa, Homo Sapiens
IVDVIDQNRAL

SEQ ID NO: 20470 - protein, 11 aa, Homo Sapiens
IVLPAGALHQV

SEQ ID NO: 20471 - protein, 11 aa, Homo Sapiens
IVPKEEGVISV

SEQ ID NO: 20472 - protein, 11 aa, Homo Sapiens
KIMTEKELLAV

SEQ ID NO: 20473 - protein, 11 aa, Homo Sapiens
KIVETIEELKV

SEQ ID NO: 20474 - protein, 11 aa, Homo Sapiens
KIWDLKERTNV

SEQ ID NO: 20475 - protein, 11 aa, Homo Sapiens
KLDDTYIKAYL

SEQ ID NO: 20476 - protein, 11 aa, Homo Sapiens
KLDENSAFLQF

SEQ ID NO: 20477 - protein, 11 aa, Homo Sapiens
KLIEVDDERKL

SEQ ID NO: 20478 - protein, 11 aa, Homo Sapiens
KLPEPQSFSSA

SEQ ID NO: 20479 - protein, 11 aa, Homo Sapiens
KLPETHQLLQL

SEQ ID NO: 20480 - protein, 11 aa, Homo Sapiens
KLPMSIIIVGV

SEQ ID NO: 20481 - protein, 11 aa, Homo Sapiens
KLPQPEAVVAL

SEQ ID NO: 20482 - protein, 11 aa, Homo Sapiens
KLPSETIFVGC

SEQ ID NO: 20483 - protein, 11 aa, Homo Sapiens
KLWTGGLDNTV

SEQ ID NO: 20484 - protein, 11 aa, Homo Sapiens
KMDDPDYWRTV

SEQ ID NO: 20485 - protein, 11 aa, Homo Sapiens
KMDEVLYSIAE

SEQ ID NO: 20486 - protein, 11 aa, Homo Sapiens
KMPDVELFVNL

SEQ ID NO: 20487 - protein, 11 aa, Homo Sapiens
KMPEVIPILEV

SEQ ID NO: 20488 - protein, 11 aa, Homo Sapiens
KMPQSMPEYAL

SEQ ID NO: 20489 - protein, 11 aa, Homo Sapiens
KMPSRFPPVVF

SEQ ID NO: 20490 - protein, 11 aa, Homo Sapiens
KQPPIDNIIRA

SEQ ID NO: 20491 - protein, 11 aa, Homo Sapiens
KVDENHSEFTL

SEQ ID NO: 20492 - protein, 11 aa, Homo Sapiens
KVDSPTVNTTL

SEQ ID NO: 20493 - protein, 11 aa, Homo Sapiens
KVDTVWVNVGG

SEQ ID NO: 20494 - protein, 11 aa, Homo Sapiens
KVFDSHPVLHV

SEQ ID NO: 20495 - protein, 11 aa, Homo Sapiens
KVFPSEITDTV

SEQ ID NO: 20496 - protein, 11 aa, Homo Sapiens
KVLEPSETLVV

SEQ ID NO: 20497 - protein, 11 aa, Homo Sapiens
KVPAEEVLVAV

SEQ ID NO: 20498 - protein, 11 aa, Homo Sapiens
KVVDVVRNLVF

SEQ ID NO: 20499 - protein, 11 aa, Homo Sapiens
LAPDCEIIQEV

SEQ ID NO: 20500 - protein, 11 aa, Homo Sapiens
LIDEGETDWKL

SEQ ID NO: 20501 - protein, 11 aa, Homo Sapiens
LIDEGHAATQL

SEQ ID NO: 20502 - protein, 11 aa, Homo Sapiens
LIDSPLHNTFL

SEQ ID NO: 20503 - protein, 11 aa, Homo Sapiens
LLDDPTNAHFI

SEQ ID NO: 20504 - protein, 11 aa, Homo Sapiens
LLDELIKSGQL

SEQ ID NO: 20505 - protein, 11 aa, Homo Sapiens
LLDENNVSSYL

SEQ ID NO: 20506 - protein, 11 aa, Homo Sapiens
LLDEPTNHLDL

SEQ ID NO: 20507 - protein, 11 aa, Homo Sapiens
LLDPSIIEAKM

SEQ ID NO: 20508 - protein, 11 aa, Homo Sapiens
LLDQPVLEQRL

SEQ ID NO: 20509 - protein, 11 aa, Homo Sapiens
LLDSHLPEEAL

SEQ ID NO: 20510 - protein, 11 aa, Homo Sapiens
LLEDTNTFRGV

SEQ ID NO: 20511 - protein, 11 aa, Homo Sapiens
LLEDVTWKYTA

SEQ ID NO: 20512 - protein, 11 aa, Homo Sapiens
LLIDDKGTIKL

SEQ ID NO: 20513 - protein, 11 aa, Homo Sapiens
LLLPDYYLVTV

SEQ ID NO: 20514 - protein, 11 aa, Homo Sapiens
LLNEPDGTFLL

SEQ ID NO: 20515 - protein, 11 aa, Homo Sapiens
LLPAASELAHV

SEQ ID NO: 20516 - protein, 11 aa, Homo Sapiens
LLPDEDALPFL

SEQ ID NO: 20517 - protein, 11 aa, Homo Sapiens
LLPDPRELIEI

SEQ ID NO: 20518 - protein, 11 aa, Homo Sapiens
LLPDTAKQQEL

SEQ ID NO: 20519 - protein, 11 aa, Homo Sapiens
LLPDVGAIVTC

SEQ ID NO: 20520 - protein, 11 aa, Homo Sapiens
LLPEEEQLWAA

SEQ ID NO: 20521 - protein, 11 aa, Homo Sapiens
LLPEEIKSSFL

SEQ ID NO: 20522 - protein, 11 aa, Homo Sapiens
LLPEGPPAIAN

SEQ ID NO: 20523 - protein, 11 aa, Homo Sapiens
LLPELTNPDEL

SEQ ID NO: 20524 - protein, 11 aa, Homo Sapiens
LLPEPNILQLL

SEQ ID NO: 20525 - protein, 11 aa, Homo Sapiens
LLPESVDLECV

SEQ ID NO: 20526 - protein, 11 aa, Homo Sapiens
LLPGELAKHAV

SEQ ID NO: 20527 - protein, 11 aa, Homo Sapiens
LLPGSEAGVSV

SEQ ID NO: 20528 - protein, 11 aa, Homo Sapiens
LLPPDESLHSL

SEQ ID NO: 20529 - protein, 11 aa, Homo Sapiens
LLPPLESLATV

SEQ ID NO: 20530 - protein, 11 aa, Homo Sapiens
LLPPPMKELRV

SEQ ID NO: 20531 - protein, 11 aa, Homo Sapiens
LLPQDKKEYRL

SEQ ID NO: 20532 - protein, 11 aa, Homo Sapiens
LLPSRPEVPNI

SEQ ID NO: 20533 - protein, 11 aa, Homo Sapiens
LLPVDKAFYEA

SEQ ID NO: 20534 - protein, 11 aa, Homo Sapiens
LLVEPSRNDLL

SEQ ID NO: 20535 - protein, 11 aa, Homo Sapiens
LLVPTSGIYFV

SEQ ID NO: 20536 - protein, 11 aa, Homo Sapiens
LLWDVVTGQSV

SEQ ID NO: 20537 - protein, 11 aa, Homo Sapiens
LLYDLADQLHA

SEQ ID NO: 20538 - protein, 11 aa, Homo Sapiens
LMPDQTAMHEV

SEQ ID NO: 20539 - protein, 11 aa, Homo Sapiens
LMPQLNAIIAA

SEQ ID NO: 20540 - protein, 11 aa, Homo Sapiens
LQPDEDTIFFV

SEQ ID NO: 20541 - protein, 11 aa, Homo Sapiens
LVDDLSDRVYL

SEQ ID NO: 20542 - protein, 11 aa, Homo Sapiens
LVDHLNVGVAQ

SEQ ID NO: 20543 - protein, 11 aa, Homo Sapiens
MAPSETQFSHL

SEQ ID NO: 20544 - protein, 11 aa, Homo Sapiens
MHQPHQPLPPT

SEQ ID NO: 20545 - protein, 11 aa, Homo Sapiens
MIDPVLGTVGF

SEQ ID NO: 20546 - protein, 11 aa, Homo Sapiens
MIILPEMVGSM

SEQ ID NO: 20547 - protein, 11 aa, Homo Sapiens
MLDEMKDNLLL

SEQ ID NO: 20548 - protein, 11 aa, Homo Sapiens
MLDEPTNHLDL

SEQ ID NO: 20549 - protein, 11 aa, Homo Sapiens
MLDSGADYLHL

SEQ ID NO: 20550 - protein, 11 aa, Homo Sapiens
MLFENMGAYTV

SEQ ID NO: 20551 - protein, 11 aa, Homo Sapiens
MLPETREIYEL

SEQ ID NO: 20552 - protein, 11 aa, Homo Sapiens
MLPNQAQSPHL

SEQ ID NO: 20553 - protein, 11 aa, Homo Sapiens
MMPEEKLVEAL

SEQ ID NO: 20554 - protein, 11 aa, Homo Sapiens
MTLPVDAVISV

SEQ ID NO: 20555 - protein, 11 aa, Homo Sapiens
NIDDVVRFLDS

SEQ ID NO: 20556 - protein, 11 aa, Homo Sapiens
NIDEIYKALSR

SEQ ID NO: 20557 - protein, 11 aa, Homo Sapiens
NIIEAINELLV

SEQ ID NO: 20558 - protein, 11 aa, Homo Sapiens
NILEDLETLRL

SEQ ID NO: 20559 - protein, 11 aa, Homo Sapiens
NIPDVVPGSHL

SEQ ID NO: 20560 - protein, 11 aa, Homo Sapiens
NIVEKIDFDSV

SEQ ID NO: 20561 - protein, 11 aa, Homo Sapiens
NLDVPHSYSVL

SEQ ID NO: 20562 - protein, 11 aa, Homo Sapiens
NLPAPHIMPGV

SEQ ID NO: 20563 - protein, 11 aa, Homo Sapiens
NLPDEEIFQQL

SEQ ID NO: 20564 - protein, 11 aa, Homo Sapiens
NLPEETNEMML

SEQ ID NO: 20565 - protein, 11 aa, Homo Sapiens
NLPMSVIIVGV

SEQ ID NO: 20566 - protein, 11 aa, Homo Sapiens
NLPNTNSILGV

SEQ ID NO: 20567 - protein, 11 aa, Homo Sapiens
NLPYKVTQDEL

SEQ ID NO: 20568 - protein, 11 aa, Homo Sapiens
NQPPEDGISSV

SEQ ID NO: 20569 - protein, 11 aa, Homo Sapiens
PMFIVNTNVPR

SEQ ID NO: 20570 - protein, 11 aa, Homo Sapiens
QIDDLYSTIKV

SEQ ID NO: 20571 - protein, 11 aa, Homo Sapiens
QLDQPSWSGRL

SEQ ID NO: 20572 - protein, 11 aa, Homo Sapiens
QLPESAYMHQL

SEQ ID NO: 20573 - protein, 11 aa, Homo Sapiens
QLPPVIKNMAF

SEQ ID NO: 20574 - protein, 11 aa, Homo Sapiens
QMLEAIKALEV

SEQ ID NO: 20575 - protein, 11 aa, Homo Sapiens
QVDEVVDIMRV

SEQ ID NO: 20576 - protein, 11 aa, Homo Sapiens
RIFGESIMIGV

SEQ ID NO: 20577 - protein, 11 aa, Homo Sapiens
RIFPPETSASV

SEQ ID NO: 20578 - protein, 11 aa, Homo Sapiens
RIIDVIDKELI

SEQ ID NO: 20579 - protein, 11 aa, Homo Sapiens
RILDIDIPMSV

SEQ ID NO: 20580 - protein, 11 aa, Homo Sapiens
RLDDVSNDVRM

SEQ ID NO: 20581 - protein, 11 aa, Homo Sapiens
RLDEALQGSAL

SEQ ID NO: 20582 - protein, 11 aa, Homo Sapiens
RLDEPLASYIF

SEQ ID NO: 20583 - protein, 11 aa, Homo Sapiens
RLFDDSTVTTV

SEQ ID NO: 20584 - protein, 11 aa, Homo Sapiens
RLFPVPGSGLV

SEQ ID NO: 20585 - protein, 11 aa, Homo Sapiens
RLLEPAQVQQL

SEQ ID NO: 20586 - protein, 11 aa, Homo Sapiens
RLLPPGAVVAV

SEQ ID NO: 20587 - protein, 11 aa, Homo Sapiens
RLPAAGVGDMV

SEQ ID NO: 20588 - protein, 11 aa, Homo Sapiens
RLPDMEMVINV

SEQ ID NO: 20589 - protein, 11 aa, Homo Sapiens
RLPETIDLGAL

SEQ ID NO: 20590 - protein, 11 aa, Homo Sapiens
RLPGGNEIGMV

SEQ ID NO: 20591 - protein, 11 aa, Homo Sapiens
RLPGSGAVQAA

SEQ ID NO: 20592 - protein, 11 aa, Homo Sapiens
RLPMSIIIVGV

SEQ ID NO: 20593 - protein, 11 aa, Homo Sapiens
RLPNRALLVNV

SEQ ID NO: 20594 - protein, 11 aa, Homo Sapiens
RLPPDTLLQQV

SEQ ID NO: 20595 - protein, 11 aa, Homo Sapiens
RLPPEGILHNV

SEQ ID NO: 20596 - protein, 11 aa, Homo Sapiens
RLPPEIFGDAL

SEQ ID NO: 20597 - protein, 11 aa, Homo Sapiens
RLPPPFPGLEP

SEQ ID NO: 20598 - protein, 11 aa, Homo Sapiens
RMPPPANLPSL

SEQ ID NO: 20599 - protein, 11 aa, Homo Sapiens
RVIDDSLVVGV

SEQ ID NO: 20600 - protein, 11 aa, Homo Sapiens
RVLPPSALQSV

SEQ ID NO: 20601 - protein, 11 aa, Homo Sapiens
RVPPVVPAQTV

SEQ ID NO: 20602 - protein, 11 aa, Homo Sapiens
SAINEVVTREY

SEQ ID NO: 20603 - protein, 11 aa, Homo Sapiens
SFSDYPPLGRF

SEQ ID NO: 20604 - protein, 11 aa, Homo Sapiens
SIDKTGENFRL

SEQ ID NO: 20605 - protein, 11 aa, Homo Sapiens
SIPPVLKAELL

SEQ ID NO: 20606 - protein, 11 aa, Homo Sapiens
SLDDSAKKVLL

SEQ ID NO: 20607 - protein, 11 aa, Homo Sapiens
SLDEAYLNITK

SEQ ID NO: 20608 - protein, 11 aa, Homo Sapiens
SLDELIQSQQI

SEQ ID NO: 20609 - protein, 11 aa, Homo Sapiens
SLDESGEHMGV

SEQ ID NO: 20610 - protein, 11 aa, Homo Sapiens
SLDPDIDTLKL

SEQ ID NO: 20611 - protein, 11 aa, Homo Sapiens
SLMMPAVFHTV

SEQ ID NO: 20612 - protein, 11 aa, Homo Sapiens
SLPDDISVVKV

SEQ ID NO: 20613 - protein, 11 aa, Homo Sapiens
SLPDPNLITFL

SEQ ID NO: 20614 - protein, 11 aa, Homo Sapiens
SLPDSGVVEYL

SEQ ID NO: 20615 - protein, 11 aa, Homo Sapiens
SLPELSASAEL

SEQ ID NO: 20616 - protein, 11 aa, Homo Sapiens
SLPESDKIAEI

SEQ ID NO: 20617 - protein, 11 aa, Homo Sapiens
SLPESSLTDLL

SEQ ID NO: 20618 - protein, 11 aa, Homo Sapiens
SLPESTLLQAV

SEQ ID NO: 20619 - protein, 11 aa, Homo Sapiens
SLPGQGVIYNV

SEQ ID NO: 20620 - protein, 11 aa, Homo Sapiens
SLPNEEIVQKI

SEQ ID NO: 20621 - protein, 11 aa, Homo Sapiens
SLPNTSEAQKI

SEQ ID NO: 20622 - protein, 11 aa, Homo Sapiens
SLPPVIDKMNI

SEQ ID NO: 20623 - protein, 11 aa, Homo Sapiens
SLPSASHFSQL

SEQ ID NO: 20624 - protein, 11 aa, Homo Sapiens
SLPSSKEVAEL

SEQ ID NO: 20625 - protein, 11 aa, Homo Sapiens
SLPSVPVFLEV

SEQ ID NO: 20626 - protein, 11 aa, Homo Sapiens
SMPTSGALDRV

SEQ ID NO: 20627 - protein, 11 aa, Homo Sapiens
SNGLNITDGAF

SEQ ID NO: 20628 - protein, 11 aa, Homo Sapiens
SSVEVRSDWEV

SEQ ID NO: 20629 - protein, 11 aa, Homo Sapiens
SVDDIVKGINS

SEQ ID NO: 20630 - protein, 11 aa, Homo Sapiens
SVPDPELIDLI

SEQ ID NO: 20631 - protein, 11 aa, Homo Sapiens
SVPESTVLKKV

SEQ ID NO: 20632 - protein, 11 aa, Homo Sapiens
SVPGKDAIYSL

SEQ ID NO: 20633 - protein, 11 aa, Homo Sapiens
SVTDTNVILSM

SEQ ID NO: 20634 - protein, 11 aa, Homo Sapiens
SVVPQLTGGSV

SEQ ID NO: 20635 - protein, 11 aa, Homo Sapiens
SVVPVPEGYSV

SEQ ID NO: 20636 - protein, 11 aa, Homo Sapiens
TADPLSLLRNV

SEQ ID NO: 20637 - protein, 11 aa, Homo Sapiens
TANGGLALASI

SEQ ID NO: 20638 - protein, 11 aa, Homo Sapiens
TAQVIILNHPG

SEQ ID NO: 20639 - protein, 11 aa, Homo Sapiens
THAVVTVPAYF

SEQ ID NO: 20640 - protein, 11 aa, Homo Sapiens
TIPEAWVGQEV

SEQ ID NO: 20641 - protein, 11 aa, Homo Sapiens
TLDENHSIWQL

SEQ ID NO: 20642 - protein, 11 aa, Homo Sapiens
TLDEPIWRTEL

SEQ ID NO: 20643 - protein, 11 aa, Homo Sapiens
TLDMPDEEFRF

SEQ ID NO: 20644 - protein, 11 aa, Homo Sapiens
TLLDPNEKYLL

SEQ ID NO: 20645 - protein, 11 aa, Homo Sapiens
TLPHSSAFTPL

SEQ ID NO: 20646 - protein, 11 aa, Homo Sapiens
TLPPVLPGSHI

SEQ ID NO: 20647 - protein, 11 aa, Homo Sapiens
TLPSTVAVTSV

SEQ ID NO: 20648 - protein, 11 aa, Homo Sapiens
TLPTREVFLEA

SEQ ID NO: 20649 - protein, 11 aa, Homo Sapiens
TMPDGQQVLTV

SEQ ID NO: 20650 - protein, 11 aa, Homo Sapiens
TVFSHAQTVVL

SEQ ID NO: 20651 - protein, 11 aa, Homo Sapiens
TVPDTRELPSI

SEQ ID NO: 20652 - protein, 11 aa, Homo Sapiens
TVPKPDVVVQV

SEQ ID NO: 20653 - protein, 11 aa, Homo Sapiens
VAPDGHIFLEA

SEQ ID NO: 20654 - protein, 11 aa, Homo Sapiens
VGPPETSLHTV

SEQ ID NO: 20655 - protein, 11 aa, Homo Sapiens
VIDDLVYSIID

SEQ ID NO: 20656 - protein, 11 aa, Homo Sapiens
VIDEIGKMELF

SEQ ID NO: 20657 - protein, 11 aa, Homo Sapiens
VIIDDHPEVTV

SEQ ID NO: 20658 - protein, 11 aa, Homo Sapiens
VILESDPQQVV

SEQ ID NO: 20659 - protein, 11 aa, Homo Sapiens
VIPEPSKLPYI

SEQ ID NO: 20660 - protein, 11 aa, Homo Sapiens
VLDDPELRQGI

SEQ ID NO: 20661 - protein, 11 aa, Homo Sapiens
VLDEADRMIDM

SEQ ID NO: 20662 - protein, 11 aa, Homo Sapiens
VLDFPSSATGL

SEQ ID NO: 20663 - protein, 11 aa, Homo Sapiens
VLDGLSNILKM

SEQ ID NO: 20664 - protein, 11 aa, Homo Sapiens
VLDPPVGNTRL

SEQ ID NO: 20665 - protein, 11 aa, Homo Sapiens
VLDPSHRDISL

SEQ ID NO: 20666 - protein, 11 aa, Homo Sapiens
VLPDQEMLMKL

SEQ ID NO: 20667 - protein, 11 aa, Homo Sapiens
VLPDSGHLHPL

SEQ ID NO: 20668 - protein, 11 aa, Homo Sapiens
VLPPSYASDRL

SEQ ID NO: 20669 - protein, 11 aa, Homo Sapiens
VLWEALRKMGL

SEQ ID NO: 20670 - protein, 11 aa, Homo Sapiens
VMDETHVINQV

SEQ ID NO: 20671 - protein, 11 aa, Homo Sapiens
VMPGEGDLPQM

SEQ ID NO: 20672 - protein, 11 aa, Homo Sapiens
VQPEATQVPLV

SEQ ID NO: 20673 - protein, 11 aa, Homo Sapiens
VTSEPHEVSAL

SEQ ID NO: 20674 - protein, 11 aa, Homo Sapiens
VVDDIVSKLVF

SEQ ID NO: 20675 - protein, 11 aa, Homo Sapiens
VVDDLGQKITL

SEQ ID NO: 20676 - protein, 11 aa, Homo Sapiens
VVDNPQKFALF

SEQ ID NO: 20677 - protein, 11 aa, Homo Sapiens
VVDPVEKTMEL

SEQ ID NO: 20678 - protein, 11 aa, Homo Sapiens
VVDPVTSEHEL

SEQ ID NO: 20679 - protein, 11 aa, Homo Sapiens
VVPDTDVLPSF

SEQ ID NO: 20680 - protein, 11 aa, Homo Sapiens
VVPNAGILPLV

SEQ ID NO: 20681 - protein, 11 aa, Homo Sapiens
VVPPKFLGDSL

SEQ ID NO: 20682 - protein, 11 aa, Homo Sapiens
VVPPPFEQEAL

SEQ ID NO: 20683 - protein, 11 aa, Homo Sapiens
YGMTPDLTISL

SEQ ID NO: 20684 - protein, 11 aa, Homo Sapiens
YIDIADRSQVL

SEQ ID NO: 20685 - protein, 11 aa, Homo Sapiens
YIMEPSIFNTL

SEQ ID NO: 20686 - protein, 11 aa, Homo Sapiens
YLDCGDLSNAL

SEQ ID NO: 20687 - protein, 11 aa, Homo Sapiens
YLDDLNEGVYI

SEQ ID NO: 20688 - protein, 11 aa, Homo Sapiens
YLDEAGRGHSF

SEQ ID NO: 20689 - protein, 11 aa, Homo Sapiens
YLDEAHSIGAL

SEQ ID NO: 20690 - protein, 11 aa, Homo Sapiens
YLDEAYPGKKL

SEQ ID NO: 20691 - protein, 11 aa, Homo Sapiens
YLDPDAQKLDF

SEQ ID NO: 20692 - protein, 11 aa, Homo Sapiens
YLDPPNERLIL

SEQ ID NO: 20693 - protein, 11 aa, Homo Sapiens
YLDQTVVPILL

SEQ ID NO: 20694 - protein, 11 aa, Homo Sapiens
YLDSIPPGQYM

SEQ ID NO: 20695 - protein, 11 aa, Homo Sapiens
YLISQVEGHQV

SEQ ID NO: 20696 - protein, 11 aa, Homo Sapiens
YLNETFSELRL

SEQ ID NO: 20697 - protein, 11 aa, Homo Sapiens
YLPAHIPYQEL

SEQ ID NO: 20698 - protein, 11 aa, Homo Sapiens
YLPDIIKDQKA

SEQ ID NO: 20699 - protein, 11 aa, Homo Sapiens
YLPDTDDRHRI

SEQ ID NO: 20700 - protein, 11 aa, Homo Sapiens
YLPEADSILFL

SEQ ID NO: 20701 - protein, 11 aa, Homo Sapiens
YLPEELRGVDF

SEQ ID NO: 20702 - protein, 11 aa, Homo Sapiens
YLPERQKYEML

SEQ ID NO: 20703 - protein, 11 aa, Homo Sapiens
YLPPEMIEGRM

SEQ ID NO: 20704 - protein, 11 aa, Homo Sapiens
YLPSGESLPQT

SEQ ID NO: 20705 - protein, 11 aa, Homo Sapiens
YMPPSTVLQQI

SEQ ID NO: 20706 - protein, 11 aa, Homo Sapiens
YMPTEMELIEI

SEQ ID NO: 20707 - protein, 11 aa, Homo Sapiens
YVDDVISRIDR

SEQ ID NO: 20708 - protein, 11 aa, Homo Sapiens
YVDTAVRHVLL

SEQ ID NO: 20709 - protein, 11 aa, Homo Sapiens
YVIAYIRDLAL

SEQ ID NO: 20710 - protein, 11 aa, Homo Sapiens
YVIDPIKGLKL

SEQ ID NO: 20711 - protein, 8 aa, Homo Sapiens
AALIIHHV

SEQ ID NO: 20712 - protein, 8 aa, Homo Sapiens
AIGKVYHA

SEQ ID NO: 20713 - protein, 8 aa, Homo Sapiens
ALGKILSV

SEQ ID NO: 20714 - protein, 8 aa, Homo Sapiens
EEQLQQIR

SEQ ID NO: 20715 - protein, 8 aa, Homo Sapiens
FLGAVKNV

SEQ ID NO: 20716 - protein, 8 aa, Homo Sapiens
FLGKIYQI

SEQ ID NO: 20717 - protein, 8 aa, Homo Sapiens
FLWVPRKL

SEQ ID NO: 20718 - protein, 8 aa, Homo Sapiens
FMSQVHSV

SEQ ID NO: 20719 - protein, 8 aa, Homo Sapiens
FNEKSKEL

SEQ ID NO: 20720 - protein, 8 aa, Homo Sapiens
ILGKVYSV

SEQ ID NO: 20721 - protein, 8 aa, Homo Sapiens
ILGPTFTL

SEQ ID NO: 20722 - protein, 8 aa, Homo Sapiens
IWGKVTRA

SEQ ID NO: 20723 - protein, 8 aa, Homo Sapiens
KEHLTEQI

SEQ ID NO: 20724 - protein, 8 aa, Homo Sapiens
KLLEKERL

SEQ ID NO: 20725 - protein, 8 aa, Homo Sapiens
KTGRVYNV

SEQ ID NO: 20726 - protein, 8 aa, Homo Sapiens
LAIKVPPS

SEQ ID NO: 20727 - protein, 8 aa, Homo Sapiens
LAPPPRER

SEQ ID NO: 20728 - protein, 8 aa, Homo Sapiens
LDKKVEKV

SEQ ID NO: 20729 - protein, 8 aa, Homo Sapiens
LFDRPMHV

SEQ ID NO: 20730 - protein, 8 aa, Homo Sapiens
LISLKDWL

SEQ ID NO: 20731 - protein, 8 aa, Homo Sapiens
LLGQVFQV

SEQ ID NO: 20732 - protein, 8 aa, Homo Sapiens
LLPAIVHI

SEQ ID NO: 20733 - protein, 8 aa, Homo Sapiens
LMEHIHKL

SEQ ID NO: 20734 - protein, 8 aa, Homo Sapiens
LTDITKGV

SEQ ID NO: 20735 - protein, 8 aa, Homo Sapiens
LYDWKERL

SEQ ID NO: 20736 - protein, 8 aa, Homo Sapiens
LYGKIIHL

SEQ ID NO: 20737 - protein, 8 aa, Homo Sapiens
MAVIKEKI

SEQ ID NO: 20738 - protein, 8 aa, Homo Sapiens
SLFKIWLV

SEQ ID NO: 20739 - protein, 8 aa, Homo Sapiens
SLGKIFAL

SEQ ID NO: 20740 - protein, 8 aa, Homo Sapiens
SLGKVFGV

SEQ ID NO: 20741 - protein, 8 aa, Homo Sapiens
STGKVFSV

SEQ ID NO: 20742 - protein, 8 aa, Homo Sapiens
TEELAYLK

SEQ ID NO: 20743 - protein, 8 aa, Homo Sapiens
TLASALQV

SEQ ID NO: 20744 - protein, 8 aa, Homo Sapiens
TLGQIYYL

SEQ ID NO: 20745 - protein, 8 aa, Homo Sapiens
VLGKIWKL

SEQ ID NO: 20746 - protein, 8 aa, Homo Sapiens
VSLTACKV

SEQ ID NO: 20747 - protein, 8 aa, Homo Sapiens
YLGQIQHI

SEQ ID NO: 20748 - protein, 9 aa, Homo Sapiens
AAALIIHHV

SEQ ID NO: 20749 - protein, 9 aa, Homo Sapiens
AAPAPAAHV

SEQ ID NO: 20750 - protein, 9 aa, Homo Sapiens
AAPAYSRAL

SEQ ID NO: 20751 - protein, 9 aa, Homo Sapiens
AAPKAGPGV

SEQ ID NO: 20752 - protein, 9 aa, Homo Sapiens
AAPPPSVTV

SEQ ID NO: 20753 - protein, 9 aa, Homo Sapiens
ADASLLKKV

SEQ ID NO: 20754 - protein, 9 aa, Homo Sapiens
AIAPIIAAV

SEQ ID NO: 20755 - protein, 9 aa, Homo Sapiens
AIARICQTV

SEQ ID NO: 20756 - protein, 9 aa, Homo Sapiens
AIAYILQGV

SEQ ID NO: 20757 - protein, 9 aa, Homo Sapiens
AICPNNHEV

SEQ ID NO: 20758 - protein, 9 aa, Homo Sapiens
AILLIDHQV

SEQ ID NO: 20759 - protein, 9 aa, Homo Sapiens
AIMEHAYYA

SEQ ID NO: 20760 - protein, 9 aa, Homo Sapiens
AIQDKLFQV

SEQ ID NO: 20761 - protein, 9 aa, Homo Sapiens
AIRELNEYL

SEQ ID NO: 20762 - protein, 9 aa, Homo Sapiens
AIVDKVPSV

SEQ ID NO: 20763 - protein, 9 aa, Homo Sapiens
AIYGGLCAL

SEQ ID NO: 20764 - protein, 9 aa, Homo Sapiens
AIYHVIMSV

SEQ ID NO: 20765 - protein, 9 aa, Homo Sapiens
ALAAALAHI

SEQ ID NO: 20766 - protein, 9 aa, Homo Sapiens
ALADFLPVM

SEQ ID NO: 20767 - protein, 9 aa, Homo Sapiens
ALADGVQKV

SEQ ID NO: 20768 - protein, 9 aa, Homo Sapiens
ALAEALKEV

SEQ ID NO: 20769 - protein, 9 aa, Homo Sapiens
ALAKLVEAI

SEQ ID NO: 20770 - protein, 9 aa, Homo Sapiens
ALANIAANI

SEQ ID NO: 20771 - protein, 9 aa, Homo Sapiens
ALANQIPTV

SEQ ID NO: 20772 - protein, 9 aa, Homo Sapiens
ALAPAPPQV

SEQ ID NO: 20773 - protein, 9 aa, Homo Sapiens
ALAPAPSLP

SEQ ID NO: 20774 - protein, 9 aa, Homo Sapiens
ALAPPPPAA

SEQ ID NO: 20775 - protein, 9 aa, Homo Sapiens
ALAPTPSAV

SEQ ID NO: 20776 - protein, 9 aa, Homo Sapiens
ALASLENHV

SEQ ID NO: 20777 - protein, 9 aa, Homo Sapiens
ALASVIMGL

SEQ ID NO: 20778 - protein, 9 aa, Homo Sapiens
ALATLIHQV

SEQ ID NO: 20779 - protein, 9 aa, Homo Sapiens
ALCALVYRL

SEQ ID NO: 20780 - protein, 9 aa, Homo Sapiens
ALCDFGHAV

SEQ ID NO: 20781 - protein, 9 aa, Homo Sapiens
ALCDTLITV

SEQ ID NO: 20782 - protein, 9 aa, Homo Sapiens
ALCPRIHEV

SEQ ID NO: 20783 - protein, 9 aa, Homo Sapiens
ALCPRLWDV

SEQ ID NO: 20784 - protein, 9 aa, Homo Sapiens
ALCVIRNLI

SEQ ID NO: 20785 - protein, 9 aa, Homo Sapiens
ALDDRLYCV

SEQ ID NO: 20786 - protein, 9 aa, Homo Sapiens
ALDEICFKV

SEQ ID NO: 20787 - protein, 9 aa, Homo Sapiens
ALDEPTTNL

SEQ ID NO: 20788 - protein, 9 aa, Homo Sapiens
ALDFLKHHL

SEQ ID NO: 20789 - protein, 9 aa, Homo Sapiens
ALDHMVEYV

SEQ ID NO: 20790 - protein, 9 aa, Homo Sapiens
ALDKITASL

SEQ ID NO: 20791 - protein, 9 aa, Homo Sapiens
ALDRIVEYL

SEQ ID NO: 20792 - protein, 9 aa, Homo Sapiens
ALDSQVPKV

SEQ ID NO: 20793 - protein, 9 aa, Homo Sapiens
ALFAGFRAL

SEQ ID NO: 20794 - protein, 9 aa, Homo Sapiens
ALFLLEHQA

SEQ ID NO: 20795 - protein, 9 aa, Homo Sapiens
ALFQHITAL

SEQ ID NO: 20796 - protein, 9 aa, Homo Sapiens
ALFQIEQGI

SEQ ID NO: 20797 - protein, 9 aa, Homo Sapiens
ALFQRPPLI

SEQ ID NO: 20798 - protein, 9 aa, Homo Sapiens
ALFSFLYHL

SEQ ID NO: 20799 - protein, 9 aa, Homo Sapiens
ALFVLPCTI

SEQ ID NO: 20800 - protein, 9 aa, Homo Sapiens
ALGPTGRGV

SEQ ID NO: 20801 - protein, 9 aa, Homo Sapiens
ALGPVPTAI

SEQ ID NO: 20802 - protein, 9 aa, Homo Sapiens
ALHDQLFYL

SEQ ID NO: 20803 - protein, 9 aa, Homo Sapiens
ALHPVQFYL

SEQ ID NO: 20804 - protein, 9 aa, Homo Sapiens
ALIEKLVEL

SEQ ID NO: 20805 - protein, 9 aa, Homo Sapiens
ALITRIFGV

SEQ ID NO: 20806 - protein, 9 aa, Homo Sapiens
ALLDKLYAL

SEQ ID NO: 20807 - protein, 9 aa, Homo Sapiens
ALLDRIVSV

SEQ ID NO: 20808 - protein, 9 aa, Homo Sapiens
ALLELLHEL

SEQ ID NO: 20809 - protein, 9 aa, Homo Sapiens
ALLGILQHV

SEQ ID NO: 20810 - protein, 9 aa, Homo Sapiens
ALLGKIEKV

SEQ ID NO: 20811 - protein, 9 aa, Homo Sapiens
ALLQRLEAL

SEQ ID NO: 20812 - protein, 9 aa, Homo Sapiens
ALLSRLEQI

SEQ ID NO: 20813 - protein, 9 aa, Homo Sapiens
ALMADMVYV

SEQ ID NO: 20814 - protein, 9 aa, Homo Sapiens
ALMDQVHHM

SEQ ID NO: 20815 - protein, 9 aa, Homo Sapiens
ALMEIKQLL

SEQ ID NO: 20816 - protein, 9 aa, Homo Sapiens
ALMPVLNQV

SEQ ID NO: 20817 - protein, 9 aa, Homo Sapiens
ALMPWRYAL

SEQ ID NO: 20818 - protein, 9 aa, Homo Sapiens
ALMQIQQGL

SEQ ID NO: 20819 - protein, 9 aa, Homo Sapiens
ALMSRPAQV

SEQ ID NO: 20820 - protein, 9 aa, Homo Sapiens
ALNDCIYSV

SEQ ID NO: 20821 - protein, 9 aa, Homo Sapiens
ALNDPKMYV

SEQ ID NO: 20822 - protein, 9 aa, Homo Sapiens
ALNEKLVNL

SEQ ID NO: 20823 - protein, 9 aa, Homo Sapiens
ALNELLQHV

SEQ ID NO: 20824 - protein, 9 aa, Homo Sapiens
ALNEQIARL

SEQ ID NO: 20825 - protein, 9 aa, Homo Sapiens
ALNGHVEMV

SEQ ID NO: 20826 - protein, 9 aa, Homo Sapiens
ALPPPPPAA

SEQ ID NO: 20827 - protein, 9 aa, Homo Sapiens
ALPPVLTTV

SEQ ID NO: 20828 - protein, 9 aa, Homo Sapiens
ALQEKLWNV

SEQ ID NO: 20829 - protein, 9 aa, Homo Sapiens
ALQEKVQAV

SEQ ID NO: 20830 - protein, 9 aa, Homo Sapiens
ALSDIFQAV

SEQ ID NO: 20831 - protein, 9 aa, Homo Sapiens
ALSDSIHTV

SEQ ID NO: 20832 - protein, 9 aa, Homo Sapiens
ALSEKIVSV

SEQ ID NO: 20833 - protein, 9 aa, Homo Sapiens
ALSQLVPCV

SEQ ID NO: 20834 - protein, 9 aa, Homo Sapiens
ALSSVIKEL

SEQ ID NO: 20835 - protein, 9 aa, Homo Sapiens
ALTELLAKI

SEQ ID NO: 20836 - protein, 9 aa, Homo Sapiens
ALTRVIYNL

SEQ ID NO: 20837 - protein, 9 aa, Homo Sapiens
ALWAGLLTL

SEQ ID NO: 20838 - protein, 9 aa, Homo Sapiens
ALWDKLFNL

SEQ ID NO: 20839 - protein, 9 aa, Homo Sapiens
ALWEGPSKA

SEQ ID NO: 20840 - protein, 9 aa, Homo Sapiens
ALWGGPISL

SEQ ID NO: 20841 - protein, 9 aa, Homo Sapiens
ALWHVPEHA

SEQ ID NO: 20842 - protein, 9 aa, Homo Sapiens
ALWIPEVSI

SEQ ID NO: 20843 - protein, 9 aa, Homo Sapiens
ALWPVSKQL

SEQ ID NO: 20844 - protein, 9 aa, Homo Sapiens
ALWREVASL

SEQ ID NO: 20845 - protein, 9 aa, Homo Sapiens
ALYAVIEKA

SEQ ID NO: 20846 - protein, 9 aa, Homo Sapiens
ALYDNVEKL

SEQ ID NO: 20847 - protein, 9 aa, Homo Sapiens
ALYPNVVQV

SEQ ID NO: 20848 - protein, 9 aa, Homo Sapiens
ALYTLVNKV

SEQ ID NO: 20849 - protein, 9 aa, Homo Sapiens
ALYTVIETV

SEQ ID NO: 20850 - protein, 9 aa, Homo Sapiens
ALYTVLHRL

SEQ ID NO: 20851 - protein, 9 aa, Homo Sapiens
AMAASPHAV

SEQ ID NO: 20852 - protein, 9 aa, Homo Sapiens
AMAKIQAKI

SEQ ID NO: 20853 - protein, 9 aa, Homo Sapiens
AMAVIKEKI

SEQ ID NO: 20854 - protein, 9 aa, Homo Sapiens
AMFDFSEKL

SEQ ID NO: 20855 - protein, 9 aa, Homo Sapiens
AMFENFVSV

SEQ ID NO: 20856 - protein, 9 aa, Homo Sapiens
AMFERIVKA

SEQ ID NO: 20857 - protein, 9 aa, Homo Sapiens
AMFGKLMTI

SEQ ID NO: 20858 - protein, 9 aa, Homo Sapiens
AMFRPFVEV

SEQ ID NO: 20859 - protein, 9 aa, Homo Sapiens
AMLAVLHTV

SEQ ID NO: 20860 - protein, 9 aa, Homo Sapiens
AMLTVLHEI

SEQ ID NO: 20861 - protein, 9 aa, Homo Sapiens
AMNARPHKV

SEQ ID NO: 20862 - protein, 9 aa, Homo Sapiens
AMNGHVPAV

SEQ ID NO: 20863 - protein, 9 aa, Homo Sapiens
AMTHITEGI

SEQ ID NO: 20864 - protein, 9 aa, Homo Sapiens
AMWANEQAL

SEQ ID NO: 20865 - protein, 9 aa, Homo Sapiens
AMWDLTTAM

SEQ ID NO: 20866 - protein, 9 aa, Homo Sapiens
AMWEHPITA

SEQ ID NO: 20867 - protein, 9 aa, Homo Sapiens
AMYFIQQKV

SEQ ID NO: 20868 - protein, 9 aa, Homo Sapiens
APSFLEGLW

SEQ ID NO: 20869 - protein, 9 aa, Homo Sapiens
AQFRVTEAL

SEQ ID NO: 20870 - protein, 9 aa, Homo Sapiens
AQIEVVPSA

SEQ ID NO: 20871 - protein, 9 aa, Homo Sapiens
AQLPRIFHV

SEQ ID NO: 20872 - protein, 9 aa, Homo Sapiens
AQVSKVEAL

SEQ ID NO: 20873 - protein, 9 aa, Homo Sapiens
AQWLIQRGV

SEQ ID NO: 20874 - protein, 9 aa, Homo Sapiens
AQYENPPHI

SEQ ID NO: 20875 - protein, 9 aa, Homo Sapiens
AQYLINARL

SEQ ID NO: 20876 - protein, 9 aa, Homo Sapiens
ATADYICKV

SEQ ID NO: 20877 - protein, 9 aa, Homo Sapiens
ATDHIKVQV

SEQ ID NO: 20878 - protein, 9 aa, Homo Sapiens
ATFIVKDLL

SEQ ID NO: 20879 - protein, 9 aa, Homo Sapiens
ATFKGIVRA

SEQ ID NO: 20880 - protein, 9 aa, Homo Sapiens
ATLNIIHSV

SEQ ID NO: 20881 - protein, 9 aa, Homo Sapiens
ATMPVVPSV

SEQ ID NO: 20882 - protein, 9 aa, Homo Sapiens
ATPLPAGIS

SEQ ID NO: 20883 - protein, 9 aa, Homo Sapiens
ATYVFLHTV

SEQ ID NO: 20884 - protein, 9 aa, Homo Sapiens
AVANIVNSV

SEQ ID NO: 20885 - protein, 9 aa, Homo Sapiens
AVAWLVAHV

SEQ ID NO: 20886 - protein, 9 aa, Homo Sapiens
AVCGYLVEL

SEQ ID NO: 20887 - protein, 9 aa, Homo Sapiens
AVFGGIYCL

SEQ ID NO: 20888 - protein, 9 aa, Homo Sapiens
AVFKELVKL

SEQ ID NO: 20889 - protein, 9 aa, Homo Sapiens
AVGQISVHV

SEQ ID NO: 20890 - protein, 9 aa, Homo Sapiens
AVMDWKDVL

SEQ ID NO: 20891 - protein, 9 aa, Homo Sapiens
AVPPPLAKA

SEQ ID NO: 20892 - protein, 9 aa, Homo Sapiens
AVWAAVQAV

SEQ ID NO: 20893 - protein, 9 aa, Homo Sapiens
AVYKVSEYA

SEQ ID NO: 20894 - protein, 9 aa, Homo Sapiens
CAPRRKVAL

SEQ ID NO: 20895 - protein, 9 aa, Homo Sapiens
CLWAQIQKL

SEQ ID NO: 20896 - protein, 9 aa, Homo Sapiens
CLYGNVEKV

SEQ ID NO: 20897 - protein, 9 aa, Homo Sapiens
CMAWLVDHV

SEQ ID NO: 20898 - protein, 9 aa, Homo Sapiens
ELKPFIEEL

SEQ ID NO: 20899 - protein, 9 aa, Homo Sapiens
ELMEQVPHI

SEQ ID NO: 20900 - protein, 9 aa, Homo Sapiens
ELYERPPHL

SEQ ID NO: 20901 - protein, 9 aa, Homo Sapiens
EVFEVVERV

SEQ ID NO: 20902 - protein, 9 aa, Homo Sapiens
FAFLISERL

SEQ ID NO: 20903 - protein, 9 aa, Homo Sapiens
FAPPQPVAA

SEQ ID NO: 20904 - protein, 9 aa, Homo Sapiens
FAYTVKYVL

SEQ ID NO: 20905 - protein, 9 aa, Homo Sapiens
FEWENKVTV

SEQ ID NO: 20906 - protein, 9 aa, Homo Sapiens
FGFEITHEV

SEQ ID NO: 20907 - protein, 9 aa, Homo Sapiens
FGPPIPKGV

SEQ ID NO: 20908 - protein, 9 aa, Homo Sapiens
FIIQGLRSV

SEQ ID NO: 20909 - protein, 9 aa, Homo Sapiens
FILANEHNV

SEQ ID NO: 20910 - protein, 9 aa, Homo Sapiens
FILEKIEYL

SEQ ID NO: 20911 - protein, 9 aa, Homo Sapiens
FILQPIHNL

SEQ ID NO: 20912 - protein, 9 aa, Homo Sapiens
FIQEIEHAL

SEQ ID NO: 20913 - protein, 9 aa, Homo Sapiens
FIWENIHTL

SEQ ID NO: 20914 - protein, 9 aa, Homo Sapiens
FIWNMKTNI

SEQ ID NO: 20915 - protein, 9 aa, Homo Sapiens
FIWPMLIHI

SEQ ID NO: 20916 - protein, 9 aa, Homo Sapiens
FLADIVQKL

SEQ ID NO: 20917 - protein, 9 aa, Homo Sapiens
FLADNHHQV

SEQ ID NO: 20918 - protein, 9 aa, Homo Sapiens
FLADPSAFV

SEQ ID NO: 20919 - protein, 9 aa, Homo Sapiens
FLAFILHRL

SEQ ID NO: 20920 - protein, 9 aa, Homo Sapiens
FLAGAVTSV

SEQ ID NO: 20921 - protein, 9 aa, Homo Sapiens
FLAHIYTEL

SEQ ID NO: 20922 - protein, 9 aa, Homo Sapiens
FLAKLIAQA

SEQ ID NO: 20923 - protein, 9 aa, Homo Sapiens
FLANIGTSV

SEQ ID NO: 20924 - protein, 9 aa, Homo Sapiens
FLCPFHLSV

SEQ ID NO: 20925 - protein, 9 aa, Homo Sapiens
FLDDVVHSL

SEQ ID NO: 20926 - protein, 9 aa, Homo Sapiens
FLDEPTNHL

SEQ ID NO: 20927 - protein, 9 aa, Homo Sapiens
FLDHIIASV

SEQ ID NO: 20928 - protein, 9 aa, Homo Sapiens
FLDHVMYTI

SEQ ID NO: 20929 - protein, 9 aa, Homo Sapiens
FLDKQGFYV

SEQ ID NO: 20930 - protein, 9 aa, Homo Sapiens
FLDLLQERI

SEQ ID NO: 20931 - protein, 9 aa, Homo Sapiens
FLDNLHINL

SEQ ID NO: 20932 - protein, 9 aa, Homo Sapiens
FLDSLRDLI

SEQ ID NO: 20933 - protein, 9 aa, Homo Sapiens
FLDTIKSNL

SEQ ID NO: 20934 - protein, 9 aa, Homo Sapiens
FLDTLKDLI

SEQ ID NO: 20935 - protein, 9 aa, Homo Sapiens
FLDTLKVLV

SEQ ID NO: 20936 - protein, 9 aa, Homo Sapiens
FLEDLKSFV

SEQ ID NO: 20937 - protein, 9 aa, Homo Sapiens
FLEEEVYPL

SEQ ID NO: 20938 - protein, 9 aa, Homo Sapiens
FLFDHLLTL

SEQ ID NO: 20939 - protein, 9 aa, Homo Sapiens
FLFDKVVIV

SEQ ID NO: 20940 - protein, 9 aa, Homo Sapiens
FLFDRPMHV

SEQ ID NO: 20941 - protein, 9 aa, Homo Sapiens
FLFDTQHFI

SEQ ID NO: 20942 - protein, 9 aa, Homo Sapiens
FLFELPSRL

SEQ ID NO: 20943 - protein, 9 aa, Homo Sapiens
FLFEPVVKA

SEQ ID NO: 20944 - protein, 9 aa, Homo Sapiens
FLFGEVHKA

SEQ ID NO: 20945 - protein, 9 aa, Homo Sapiens
FLFGSIRGA

SEQ ID NO: 20946 - protein, 9 aa, Homo Sapiens
FLFGYPKRL

SEQ ID NO: 20947 - protein, 9 aa, Homo Sapiens
FLFNKVVNL

SEQ ID NO: 20948 - protein, 9 aa, Homo Sapiens
FLFNTENKL

SEQ ID NO: 20949 - protein, 9 aa, Homo Sapiens
FLFPNKESL

SEQ ID NO: 20950 - protein, 9 aa, Homo Sapiens
FLFQEPRSI

SEQ ID NO: 20951 - protein, 9 aa, Homo Sapiens
FLFQGFRLV

SEQ ID NO: 20952 - protein, 9 aa, Homo Sapiens
FLFSDVCRV

SEQ ID NO: 20953 - protein, 9 aa, Homo Sapiens
FLFSKFIEL

SEQ ID NO: 20954 - protein, 9 aa, Homo Sapiens
FLFTTPCRL

SEQ ID NO: 20955 - protein, 9 aa, Homo Sapiens
FLGSFIDHV

SEQ ID NO: 20956 - protein, 9 aa, Homo Sapiens
FLHDNMVEI

SEQ ID NO: 20957 - protein, 9 aa, Homo Sapiens
FLHPEPFSI

SEQ ID NO: 20958 - protein, 9 aa, Homo Sapiens
FLHRIRQNV

SEQ ID NO: 20959 - protein, 9 aa, Homo Sapiens
FLINFIHTL

SEQ ID NO: 20960 - protein, 9 aa, Homo Sapiens
FLIPIYHQV

SEQ ID NO: 20961 - protein, 9 aa, Homo Sapiens
FLLDKKIGV

SEQ ID NO: 20962 - protein, 9 aa, Homo Sapiens
FLLEGIRSL

SEQ ID NO: 20963 - protein, 9 aa, Homo Sapiens
FLLEKGYEV

SEQ ID NO: 20964 - protein, 9 aa, Homo Sapiens
FLLEKPFSV

SEQ ID NO: 20965 - protein, 9 aa, Homo Sapiens
FLLFINHRL

SEQ ID NO: 20966 - protein, 9 aa, Homo Sapiens
FLLHIQQQV

SEQ ID NO: 20967 - protein, 9 aa, Homo Sapiens
FLLKLIHIL

SEQ ID NO: 20968 - protein, 9 aa, Homo Sapiens
FLLPILSQI

SEQ ID NO: 20969 - protein, 9 aa, Homo Sapiens
FLLPKVQSI

SEQ ID NO: 20970 - protein, 9 aa, Homo Sapiens
FLLQIHEHI

SEQ ID NO: 20971 - protein, 9 aa, Homo Sapiens
FLMDFIHQV

SEQ ID NO: 20972 - protein, 9 aa, Homo Sapiens
FLMEEVHMI

SEQ ID NO: 20973 - protein, 9 aa, Homo Sapiens
FLMELEQPA

SEQ ID NO: 20974 - protein, 9 aa, Homo Sapiens
FLMNEVIKL

SEQ ID NO: 20975 - protein, 9 aa, Homo Sapiens
FLNDEVWNL

SEQ ID NO: 20976 - protein, 9 aa, Homo Sapiens
FLNKEITSV

SEQ ID NO: 20977 - protein, 9 aa, Homo Sapiens
FLNKLIPVL

SEQ ID NO: 20978 - protein, 9 aa, Homo Sapiens
FLNNQIKEL

SEQ ID NO: 20979 - protein, 9 aa, Homo Sapiens
FLPEAPAEL

SEQ ID NO: 20980 - protein, 9 aa, Homo Sapiens
FLPEPMGTA

SEQ ID NO: 20981 - protein, 9 aa, Homo Sapiens
FLPPAQVTV

SEQ ID NO: 20982 - protein, 9 aa, Homo Sapiens
FLPPLPTSV

SEQ ID NO: 20983 - protein, 9 aa, Homo Sapiens
FLQEHNTTL

SEQ ID NO: 20984 - protein, 9 aa, Homo Sapiens
FLQEKSPAV

SEQ ID NO: 20985 - protein, 9 aa, Homo Sapiens
FLQEYVANL

SEQ ID NO: 20986 - protein, 9 aa, Homo Sapiens
FLQKIEALV

SEQ ID NO: 20987 - protein, 9 aa, Homo Sapiens
FLQPELVKL

SEQ ID NO: 20988 - protein, 9 aa, Homo Sapiens
FLQPGGYHV

SEQ ID NO: 20989 - protein, 9 aa, Homo Sapiens
FLQPHLDAV

SEQ ID NO: 20990 - protein, 9 aa, Homo Sapiens
FLRNINEYL

SEQ ID NO: 20991 - protein, 9 aa, Homo Sapiens
FLSEKLERI

SEQ ID NO: 20992 - protein, 9 aa, Homo Sapiens
FLSELTQQL

SEQ ID NO: 20993 - protein, 9 aa, Homo Sapiens
FLSEVFHQA

SEQ ID NO: 20994 - protein, 9 aa, Homo Sapiens
FLSFPTTKT

SEQ ID NO: 20995 - protein, 9 aa, Homo Sapiens
FLSSVIQNL

SEQ ID NO: 20996 - protein, 9 aa, Homo Sapiens
FLVDGVCTV

SEQ ID NO: 20997 - protein, 9 aa, Homo Sapiens
FLVTVIHTL

SEQ ID NO: 20998 - protein, 9 aa, Homo Sapiens
FLWERPTLL

SEQ ID NO: 20999 - protein, 9 aa, Homo Sapiens
FLWKEPATM

SEQ ID NO: 21000 - protein, 9 aa, Homo Sapiens
FLWKITNVT

SEQ ID NO: 21001 - protein, 9 aa, Homo Sapiens
FLYAGHIFL

SEQ ID NO: 21002 - protein, 9 aa, Homo Sapiens
FLYDDNQRV

SEQ ID NO: 21003 - protein, 9 aa, Homo Sapiens
FLYDTHQNL

SEQ ID NO: 21004 - protein, 9 aa, Homo Sapiens
FLYPFLHTV

SEQ ID NO: 21005 - protein, 9 aa, Homo Sapiens
FLYPFPLAL

SEQ ID NO: 21006 - protein, 9 aa, Homo Sapiens
FLYQILRGL

SEQ ID NO: 21007 - protein, 9 aa, Homo Sapiens
FLYSGGHRV

SEQ ID NO: 21008 - protein, 9 aa, Homo Sapiens
FMADCPHTI

SEQ ID NO: 21009 - protein, 9 aa, Homo Sapiens
FMAPKAWTV

SEQ ID NO: 21010 - protein, 9 aa, Homo Sapiens
FMATIAEGL

SEQ ID NO: 21011 - protein, 9 aa, Homo Sapiens
FMCDKIYQV

SEQ ID NO: 21012 - protein, 9 aa, Homo Sapiens
FMLPDPQNI

SEQ ID NO: 21013 - protein, 9 aa, Homo Sapiens
FMMPRIVNV

SEQ ID NO: 21014 - protein, 9 aa, Homo Sapiens
FMNPHLISV

SEQ ID NO: 21015 - protein, 9 aa, Homo Sapiens
FMQAIKENI

SEQ ID NO: 21016 - protein, 9 aa, Homo Sapiens
FMSSHIKSV

SEQ ID NO: 21017 - protein, 9 aa, Homo Sapiens
FMTTNVPNV

SEQ ID NO: 21018 - protein, 9 aa, Homo Sapiens
FQDEINWRL

SEQ ID NO: 21019 - protein, 9 aa, Homo Sapiens
FQHTGIYSV

SEQ ID NO: 21020 - protein, 9 aa, Homo Sapiens
FQIRNLPSL

SEQ ID NO: 21021 - protein, 9 aa, Homo Sapiens
FQLPAPPHI

SEQ ID NO: 21022 - protein, 9 aa, Homo Sapiens
FQLPIRFNL

SEQ ID NO: 21023 - protein, 9 aa, Homo Sapiens
FQWDIMERI

SEQ ID NO: 21024 - protein, 9 aa, Homo Sapiens
FSDEIRHNL

SEQ ID NO: 21025 - protein, 9 aa, Homo Sapiens
FTDVIGHYI

SEQ ID NO: 21026 - protein, 9 aa, Homo Sapiens
FTFSGICRV

SEQ ID NO: 21027 - protein, 9 aa, Homo Sapiens
FTWEGLYNV

SEQ ID NO: 21028 - protein, 9 aa, Homo Sapiens
FTWNMNEKL

SEQ ID NO: 21029 - protein, 9 aa, Homo Sapiens
FTWPIKIQV

SEQ ID NO: 21030 - protein, 9 aa, Homo Sapiens
FTYATTEKV

SEQ ID NO: 21031 - protein, 9 aa, Homo Sapiens
FVAPPTAAV

SEQ ID NO: 21032 - protein, 9 aa, Homo Sapiens
FVARMIPKV

SEQ ID NO: 21033 - protein, 9 aa, Homo Sapiens
FVCDIRPEI

SEQ ID NO: 21034 - protein, 9 aa, Homo Sapiens
FVLDKVPFL

SEQ ID NO: 21035 - protein, 9 aa, Homo Sapiens
FVLPELPSV

SEQ ID NO: 21036 - protein, 9 aa, Homo Sapiens
FVNDIFERI

SEQ ID NO: 21037 - protein, 9 aa, Homo Sapiens
FVPDTPVGV

SEQ ID NO: 21038 - protein, 9 aa, Homo Sapiens
FVWEASHYL

SEQ ID NO: 21039 - protein, 9 aa, Homo Sapiens
GIFETKFQV

SEQ ID NO: 21040 - protein, 9 aa, Homo Sapiens
GIMKKAYEL

SEQ ID NO: 21041 - protein, 9 aa, Homo Sapiens
GIWSITAKV

SEQ ID NO: 21042 - protein, 9 aa, Homo Sapiens
GLADKVYFL

SEQ ID NO: 21043 - protein, 9 aa, Homo Sapiens
GLAKAVASV

SEQ ID NO: 21044 - protein, 9 aa, Homo Sapiens
GLAPKPVQV

SEQ ID NO: 21045 - protein, 9 aa, Homo Sapiens
GLCERLVSL

SEQ ID NO: 21046 - protein, 9 aa, Homo Sapiens
GLDGPPPTV

SEQ ID NO: 21047 - protein, 9 aa, Homo Sapiens
GLDIITNKV

SEQ ID NO: 21048 - protein, 9 aa, Homo Sapiens
GLFHLGEFV

SEQ ID NO: 21049 - protein, 9 aa, Homo Sapiens
GLLENIPRV

SEQ ID NO: 21050 - protein, 9 aa, Homo Sapiens
GLLGYLHFV

SEQ ID NO: 21051 - protein, 9 aa, Homo Sapiens
GLLPDVPSL

SEQ ID NO: 21052 - protein, 9 aa, Homo Sapiens
GLMRKVPRV

SEQ ID NO: 21053 - protein, 9 aa, Homo Sapiens
GLMTTVHAI

SEQ ID NO: 21054 - protein, 9 aa, Homo Sapiens
GLTEALHFV

SEQ ID NO: 21055 - protein, 9 aa, Homo Sapiens
GLWGPVHEL

SEQ ID NO: 21056 - protein, 9 aa, Homo Sapiens
GLYELVWRV

SEQ ID NO: 21057 - protein, 9 aa, Homo Sapiens
GMYIFLHTV

SEQ ID NO: 21058 - protein, 9 aa, Homo Sapiens
GMYPNLVHV

SEQ ID NO: 21059 - protein, 9 aa, Homo Sapiens
GMYVFLHAV

SEQ ID NO: 21060 - protein, 9 aa, Homo Sapiens
GQAPSVFSV

SEQ ID NO: 21061 - protein, 9 aa, Homo Sapiens
GQIEVVPEV

SEQ ID NO: 21062 - protein, 9 aa, Homo Sapiens
GVDDLDFFI

SEQ ID NO: 21063 - protein, 9 aa, Homo Sapiens
GVGPVPARA

SEQ ID NO: 21064 - protein, 9 aa, Homo Sapiens
GVYGDVQRV

SEQ ID NO: 21065 - protein, 9 aa, Homo Sapiens
HIIENIVAV

SEQ ID NO: 21066 - protein, 9 aa, Homo Sapiens
HIWDPLTNV

SEQ ID NO: 21067 - protein, 9 aa, Homo Sapiens
HIYPLSFFL

SEQ ID NO: 21068 - protein, 9 aa, Homo Sapiens
HLAEVLERV

SEQ ID NO: 21069 - protein, 9 aa, Homo Sapiens
HLAEVSAEV

SEQ ID NO: 21070 - protein, 9 aa, Homo Sapiens
HLAHYVPKI

SEQ ID NO: 21071 - protein, 9 aa, Homo Sapiens
HLANIVERL

SEQ ID NO: 21072 - protein, 9 aa, Homo Sapiens
HLANIVERV

SEQ ID NO: 21073 - protein, 9 aa, Homo Sapiens
HLCEHIWTL

SEQ ID NO: 21074 - protein, 9 aa, Homo Sapiens
HLDTLHNFV

SEQ ID NO: 21075 - protein, 9 aa, Homo Sapiens
HLFDLNCKI

SEQ ID NO: 21076 - protein, 9 aa, Homo Sapiens
HLFKITENI

SEQ ID NO: 21077 - protein, 9 aa, Homo Sapiens
HLFNVAHTL

SEQ ID NO: 21078 - protein, 9 aa, Homo Sapiens
HLLHTVPAL

SEQ ID NO: 21079 - protein, 9 aa, Homo Sapiens
HLNEHLYNM

SEQ ID NO: 21080 - protein, 9 aa, Homo Sapiens
HLSDAIVEV

SEQ ID NO: 21081 - protein, 9 aa, Homo Sapiens
HLWRGIVSI

SEQ ID NO: 21082 - protein, 9 aa, Homo Sapiens
HLWSGPRCL

SEQ ID NO: 21083 - protein, 9 aa, Homo Sapiens
HLYDIHVTV

SEQ ID NO: 21084 - protein, 9 aa, Homo Sapiens
HLYRIIQHL

SEQ ID NO: 21085 - protein, 9 aa, Homo Sapiens
HMYKLRTNL

SEQ ID NO: 21086 - protein, 9 aa, Homo Sapiens
HTYHIKNYI

SEQ ID NO: 21087 - protein, 9 aa, Homo Sapiens
HVDEIKEFL

SEQ ID NO: 21088 - protein, 9 aa, Homo Sapiens
HVLDVIHEV

SEQ ID NO: 21089 - protein, 9 aa, Homo Sapiens
IAPPGHTGV

SEQ ID NO: 21090 - protein, 9 aa, Homo Sapiens
IAPPVPLKA

SEQ ID NO: 21091 - protein, 9 aa, Homo Sapiens
IAVVQPEKQ

SEQ ID NO: 21092 - protein, 9 aa, Homo Sapiens
IIDGKIFCV

SEQ ID NO: 21093 - protein, 9 aa, Homo Sapiens
IIHNLGMYV

SEQ ID NO: 21094 - protein, 9 aa, Homo Sapiens
IIYIVHDEV

SEQ ID NO: 21095 - protein, 9 aa, Homo Sapiens
ILAAIVNHL

SEQ ID NO: 21096 - protein, 9 aa, Homo Sapiens
ILCEHPNQV

SEQ ID NO: 21097 - protein, 9 aa, Homo Sapiens
ILCELINKL

SEQ ID NO: 21098 - protein, 9 aa, Homo Sapiens
ILDDIGHGV

SEQ ID NO: 21099 - protein, 9 aa, Homo Sapiens
ILDEPTNHL

SEQ ID NO: 21100 - protein, 9 aa, Homo Sapiens
ILDESHERV

SEQ ID NO: 21101 - protein, 9 aa, Homo Sapiens
ILDEVIFKL

SEQ ID NO: 21102 - protein, 9 aa, Homo Sapiens
ILDKIVQKV

SEQ ID NO: 21103 - protein, 9 aa, Homo Sapiens
ILDKKVEKV

SEQ ID NO: 21104 - protein, 9 aa, Homo Sapiens
ILDLIKKGV

SEQ ID NO: 21105 - protein, 9 aa, Homo Sapiens
ILFDPKTSV

SEQ ID NO: 21106 - protein, 9 aa, Homo Sapiens
ILFNRVLGV

SEQ ID NO: 21107 - protein, 9 aa, Homo Sapiens
ILFPLRFTL

SEQ ID NO: 21108 - protein, 9 aa, Homo Sapiens
ILFYVEHQA

SEQ ID NO: 21109 - protein, 9 aa, Homo Sapiens
ILGPIPSHM

SEQ ID NO: 21110 - protein, 9 aa, Homo Sapiens
ILGPKPQGV

SEQ ID NO: 21111 - protein, 9 aa, Homo Sapiens
ILHEIALGV

SEQ ID NO: 21112 - protein, 9 aa, Homo Sapiens
ILHHVNIGL

SEQ ID NO: 21113 - protein, 9 aa, Homo Sapiens
ILHSVTTNL

SEQ ID NO: 21114 - protein, 9 aa, Homo Sapiens
ILLAEVPTM

SEQ ID NO: 21115 - protein, 9 aa, Homo Sapiens
ILLDNEFHV

SEQ ID NO: 21116 - protein, 9 aa, Homo Sapiens
ILLEMIHSI

SEQ ID NO: 21117 - protein, 9 aa, Homo Sapiens
ILLGCVPSL

SEQ ID NO: 21118 - protein, 9 aa, Homo Sapiens
ILLNIEHRI

SEQ ID NO: 21119 - protein, 9 aa, Homo Sapiens
ILMEHIHKL

SEQ ID NO: 21120 - protein, 9 aa, Homo Sapiens
ILMGVLKEV

SEQ ID NO: 21121 - protein, 9 aa, Homo Sapiens
ILMHHPPQV

SEQ ID NO: 21122 - protein, 9 aa, Homo Sapiens
ILNEIVNFV

SEQ ID NO: 21123 - protein, 9 aa, Homo Sapiens
ILNKQEFFV

SEQ ID NO: 21124 - protein, 9 aa, Homo Sapiens
ILSEIKEAV

SEQ ID NO: 21125 - protein, 9 aa, Homo Sapiens
ILSEVQQAV

SEQ ID NO: 21126 - protein, 9 aa, Homo Sapiens
ILSGVIRSV

SEQ ID NO: 21127 - protein, 9 aa, Homo Sapiens
ILTDITKGV

SEQ ID NO: 21128 - protein, 9 aa, Homo Sapiens
ILWEHCIRL

SEQ ID NO: 21129 - protein, 9 aa, Homo Sapiens
ILWEHLEIL

SEQ ID NO: 21130 - protein, 9 aa, Homo Sapiens
ILWETVPSM

SEQ ID NO: 21131 - protein, 9 aa, Homo Sapiens
ILWSHLELL

SEQ ID NO: 21132 - protein, 9 aa, Homo Sapiens
ILYDKLEKI

SEQ ID NO: 21133 - protein, 9 aa, Homo Sapiens
ILYDLQQNL

SEQ ID NO: 21134 - protein, 9 aa, Homo Sapiens
ILYGEVEKL

SEQ ID NO: 21135 - protein, 9 aa, Homo Sapiens
ILYGKIIHL

SEQ ID NO: 21136 - protein, 9 aa, Homo Sapiens
ILYRVGDGV

SEQ ID NO: 21137 - protein, 9 aa, Homo Sapiens
IMDKLKEYL

SEQ ID NO: 21138 - protein, 9 aa, Homo Sapiens
IMDRIYKNV

SEQ ID NO: 21139 - protein, 9 aa, Homo Sapiens
IMFQKPVEV

SEQ ID NO: 21140 - protein, 9 aa, Homo Sapiens
IMHDCVVKL

SEQ ID NO: 21141 - protein, 9 aa, Homo Sapiens
IMLEALERV

SEQ ID NO: 21142 - protein, 9 aa, Homo Sapiens
IMQLLRDNL

SEQ ID NO: 21143 - protein, 9 aa, Homo Sapiens
IMWPIIAKL

SEQ ID NO: 21144 - protein, 9 aa, Homo Sapiens
IQAERVRGV

SEQ ID NO: 21145 - protein, 9 aa, Homo Sapiens
IQDEIRSVI

SEQ ID NO: 21146 - protein, 9 aa, Homo Sapiens
IQDKCVPLV

SEQ ID NO: 21147 - protein, 9 aa, Homo Sapiens
IQDRAVPSL

SEQ ID NO: 21148 - protein, 9 aa, Homo Sapiens
IQLVHGLKL

SEQ ID NO: 21149 - protein, 9 aa, Homo Sapiens
IQVEKVFSI

SEQ ID NO: 21150 - protein, 9 aa, Homo Sapiens
IQVNCPPAV

SEQ ID NO: 21151 - protein, 9 aa, Homo Sapiens
IQVTKVTQV

SEQ ID NO: 21152 - protein, 9 aa, Homo Sapiens
ISPDVFTHV

SEQ ID NO: 21153 - protein, 9 aa, Homo Sapiens
ITDDLHFYV

SEQ ID NO: 21154 - protein, 9 aa, Homo Sapiens
ITFPVSEEL

SEQ ID NO: 21155 - protein, 9 aa, Homo Sapiens
ITMEIVNKL

SEQ ID NO: 21156 - protein, 9 aa, Homo Sapiens
ITTDVLYTI

SEQ ID NO: 21157 - protein, 9 aa, Homo Sapiens
IVNEPPPKL

SEQ ID NO: 21158 - protein, 9 aa, Homo Sapiens
IVRDIKEKL

SEQ ID NO: 21159 - protein, 9 aa, Homo Sapiens
IVWKIKETV

SEQ ID NO: 21160 - protein, 9 aa, Homo Sapiens
KAAKIRVSV

SEQ ID NO: 21161 - protein, 9 aa, Homo Sapiens
KAAQIKEHL

SEQ ID NO: 21162 - protein, 9 aa, Homo Sapiens
KAFNISTTL

SEQ ID NO: 21163 - protein, 9 aa, Homo Sapiens
KAPPAPLAA

SEQ ID NO: 21164 - protein, 9 aa, Homo Sapiens
KIADFGWSV

SEQ ID NO: 21165 - protein, 9 aa, Homo Sapiens
KIAEIKSLL

SEQ ID NO: 21166 - protein, 9 aa, Homo Sapiens
KIAWISETL

SEQ ID NO: 21167 - protein, 9 aa, Homo Sapiens
KICDYLFNV

SEQ ID NO: 21168 - protein, 9 aa, Homo Sapiens
KIFEFKETL

SEQ ID NO: 21169 - protein, 9 aa, Homo Sapiens
KIFLLKVLL

SEQ ID NO: 21170 - protein, 9 aa, Homo Sapiens
KIFNITDNA

SEQ ID NO: 21171 - protein, 9 aa, Homo Sapiens
KIFNNQEFA

SEQ ID NO: 21172 - protein, 9 aa, Homo Sapiens
KIFPALCTV

SEQ ID NO: 21173 - protein, 9 aa, Homo Sapiens
KIFQVAQEL

SEQ ID NO: 21174 - protein, 9 aa, Homo Sapiens
KIIDIQEKV

SEQ ID NO: 21175 - protein, 9 aa, Homo Sapiens
KILETLYTL

SEQ ID NO: 21176 - protein, 9 aa, Homo Sapiens
KILPTLEAV

SEQ ID NO: 21177 - protein, 9 aa, Homo Sapiens
KIMKLAANI

SEQ ID NO: 21178 - protein, 9 aa, Homo Sapiens
KINEAIVAV

SEQ ID NO: 21179 - protein, 9 aa, Homo Sapiens
KIPTPIVGV

SEQ ID NO: 21180 - protein, 9 aa, Homo Sapiens
KIQEILTQV

SEQ ID NO: 21181 - protein, 9 aa, Homo Sapiens
KISVIVETV

SEQ ID NO: 21182 - protein, 9 aa, Homo Sapiens
KITTVIQHV

SEQ ID NO: 21183 - protein, 9 aa, Homo Sapiens
KIVVVTAGV

SEQ ID NO: 21184 - protein, 9 aa, Homo Sapiens
KIWAPTAEA

SEQ ID NO: 21185 - protein, 9 aa, Homo Sapiens
KIWDLEGKI

SEQ ID NO: 21186 - protein, 9 aa, Homo Sapiens
KIWDPVHRV

SEQ ID NO: 21187 - protein, 9 aa, Homo Sapiens
KIWDVSVNS

SEQ ID NO: 21188 - protein, 9 aa, Homo Sapiens
KIWTPTAKA

SEQ ID NO: 21189 - protein, 9 aa, Homo Sapiens
KIWTSVPYL

SEQ ID NO: 21190 - protein, 9 aa, Homo Sapiens
KIYEGQVEV

SEQ ID NO: 21191 - protein, 9 aa, Homo Sapiens
KIYEHHIKV

SEQ ID NO: 21192 - protein, 9 aa, Homo Sapiens
KIYQWINEL

SEQ ID NO: 21193 - protein, 9 aa, Homo Sapiens
KLAAVVNNL

SEQ ID NO: 21194 - protein, 9 aa, Homo Sapiens
KLADICKNL

SEQ ID NO: 21195 - protein, 9 aa, Homo Sapiens
KLADKLYNL

SEQ ID NO: 21196 - protein, 9 aa, Homo Sapiens
KLAEFIDFL

SEQ ID NO: 21197 - protein, 9 aa, Homo Sapiens
KLAEIRHEV

SEQ ID NO: 21198 - protein, 9 aa, Homo Sapiens
KLAEIVKQV

SEQ ID NO: 21199 - protein, 9 aa, Homo Sapiens
KLAESVEKA

SEQ ID NO: 21200 - protein, 9 aa, Homo Sapiens
KLAEVSQNI

SEQ ID NO: 21201 - protein, 9 aa, Homo Sapiens
KLAKLQAQV

SEQ ID NO: 21202 - protein, 9 aa, Homo Sapiens
KLAKQPETV

SEQ ID NO: 21203 - protein, 9 aa, Homo Sapiens
KLAPPPKKA

SEQ ID NO: 21204 - protein, 9 aa, Homo Sapiens
KLCDIIVHI

SEQ ID NO: 21205 - protein, 9 aa, Homo Sapiens
KLCDVTLKI

SEQ ID NO: 21206 - protein, 9 aa, Homo Sapiens
KLCDVTTGL

SEQ ID NO: 21207 - protein, 9 aa, Homo Sapiens
KLCEGFNEV

SEQ ID NO: 21208 - protein, 9 aa, Homo Sapiens
KLCESLEEL

SEQ ID NO: 21209 - protein, 9 aa, Homo Sapiens
KLCYVGYNI

SEQ ID NO: 21210 - protein, 9 aa, Homo Sapiens
KLDDIVQHI

SEQ ID NO: 21211 - protein, 9 aa, Homo Sapiens
KLDHINMNL

SEQ ID NO: 21212 - protein, 9 aa, Homo Sapiens
KLDLIHESI

SEQ ID NO: 21213 - protein, 9 aa, Homo Sapiens
KLDQVIIHV

SEQ ID NO: 21214 - protein, 9 aa, Homo Sapiens
KLDSPRVTV

SEQ ID NO: 21215 - protein, 9 aa, Homo Sapiens
KLDVQPKCV

SEQ ID NO: 21216 - protein, 9 aa, Homo Sapiens
KLEEIIHQI

SEQ ID NO: 21217 - protein, 9 aa, Homo Sapiens
KLFDAPLSI

SEQ ID NO: 21218 - protein, 9 aa, Homo Sapiens
KLFDLDEKL

SEQ ID NO: 21219 - protein, 9 aa, Homo Sapiens
KLFDLLDVL

SEQ ID NO: 21220 - protein, 9 aa, Homo Sapiens
KLFDRPQEL

SEQ ID NO: 21221 - protein, 9 aa, Homo Sapiens
KLFDTQHRV

SEQ ID NO: 21222 - protein, 9 aa, Homo Sapiens
KLFDTQQFL

SEQ ID NO: 21223 - protein, 9 aa, Homo Sapiens
KLFEKVKEV

SEQ ID NO: 21224 - protein, 9 aa, Homo Sapiens
KLFGHLTSA

SEQ ID NO: 21225 - protein, 9 aa, Homo Sapiens
KLFKAPAYI

SEQ ID NO: 21226 - protein, 9 aa, Homo Sapiens
KLFLVNNKI

SEQ ID NO: 21227 - protein, 9 aa, Homo Sapiens
KLFNVTSTL

SEQ ID NO: 21228 - protein, 9 aa, Homo Sapiens
KLFPFYFHI

SEQ ID NO: 21229 - protein, 9 aa, Homo Sapiens
KLFSILSTV

SEQ ID NO: 21230 - protein, 9 aa, Homo Sapiens
KLFSLEHFL

SEQ ID NO: 21231 - protein, 9 aa, Homo Sapiens
KLFSLQDLL

SEQ ID NO: 21232 - protein, 9 aa, Homo Sapiens
KLFVIAQKI

SEQ ID NO: 21233 - protein, 9 aa, Homo Sapiens
KLGEIVTTI

SEQ ID NO: 21234 - protein, 9 aa, Homo Sapiens
KLGPAPKTL

SEQ ID NO: 21235 - protein, 9 aa, Homo Sapiens
KLGSVPVTV

SEQ ID NO: 21236 - protein, 9 aa, Homo Sapiens
KLHAVVETL

SEQ ID NO: 21237 - protein, 9 aa, Homo Sapiens
KLHDINAQL

SEQ ID NO: 21238 - protein, 9 aa, Homo Sapiens
KLHGVNINV

SEQ ID NO: 21239 - protein, 9 aa, Homo Sapiens
KLHLILDYV

SEQ ID NO: 21240 - protein, 9 aa, Homo Sapiens
KLHYVVTEV

SEQ ID NO: 21241 - protein, 9 aa, Homo Sapiens
KLIDKLDSL

SEQ ID NO: 21242 - protein, 9 aa, Homo Sapiens
KLIEELETL

SEQ ID NO: 21243 - protein, 9 aa, Homo Sapiens
KLIELKAEI

SEQ ID NO: 21244 - protein, 9 aa, Homo Sapiens
KLIGQVHEV

SEQ ID NO: 21245 - protein, 9 aa, Homo Sapiens
KLILLITQV

SEQ ID NO: 21246 - protein, 9 aa, Homo Sapiens
KLISELQKL

SEQ ID NO: 21247 - protein, 9 aa, Homo Sapiens
KLKNVNFEV

SEQ ID NO: 21248 - protein, 9 aa, Homo Sapiens
KLLAVIHEL

SEQ ID NO: 21249 - protein, 9 aa, Homo Sapiens
KLLDIRSYL

SEQ ID NO: 21250 - protein, 9 aa, Homo Sapiens
KLLDKISEL

SEQ ID NO: 21251 - protein, 9 aa, Homo Sapiens
KLLDKISSV

SEQ ID NO: 21252 - protein, 9 aa, Homo Sapiens
KLLDLQVRV

SEQ ID NO: 21253 - protein, 9 aa, Homo Sapiens
KLLDQMPSL

SEQ ID NO: 21254 - protein, 9 aa, Homo Sapiens
KLLDSMHEV

SEQ ID NO: 21255 - protein, 9 aa, Homo Sapiens
KLLDVVHPA

SEQ ID NO: 21256 - protein, 9 aa, Homo Sapiens
KLLEEICNL

SEQ ID NO: 21257 - protein, 9 aa, Homo Sapiens
KLLEIMTRI

SEQ ID NO: 21258 - protein, 9 aa, Homo Sapiens
KLLEKAFSI

SEQ ID NO: 21259 - protein, 9 aa, Homo Sapiens
KLLEKLYKV

SEQ ID NO: 21260 - protein, 9 aa, Homo Sapiens
KLLERVSAI

SEQ ID NO: 21261 - protein, 9 aa, Homo Sapiens
KLLEVYEQL

SEQ ID NO: 21262 - protein, 9 aa, Homo Sapiens
KLLFWVTEV

SEQ ID NO: 21263 - protein, 9 aa, Homo Sapiens
KLLGELHTL

SEQ ID NO: 21264 - protein, 9 aa, Homo Sapiens
KLLGNIKNV

SEQ ID NO: 21265 - protein, 9 aa, Homo Sapiens
KLLKLFQGV

SEQ ID NO: 21266 - protein, 9 aa, Homo Sapiens
KLLNLISKL

SEQ ID NO: 21267 - protein, 9 aa, Homo Sapiens
KLLPQLTYL

SEQ ID NO: 21268 - protein, 9 aa, Homo Sapiens
KLLTEVHAA

SEQ ID NO: 21269 - protein, 9 aa, Homo Sapiens
KLMDHIYAV

SEQ ID NO: 21270 - protein, 9 aa, Homo Sapiens
KLMDQLEAL

SEQ ID NO: 21271 - protein, 9 aa, Homo Sapiens
KLMEEIREL

SEQ ID NO: 21272 - protein, 9 aa, Homo Sapiens
KLMELLEEI

SEQ ID NO: 21273 - protein, 9 aa, Homo Sapiens
KLMELYERL

SEQ ID NO: 21274 - protein, 9 aa, Homo Sapiens
KLMGIVNKV

SEQ ID NO: 21275 - protein, 9 aa, Homo Sapiens
KLMSDLQKL

SEQ ID NO: 21276 - protein, 9 aa, Homo Sapiens
KLMTALVNV

SEQ ID NO: 21277 - protein, 9 aa, Homo Sapiens
KLNDIKEKV

SEQ ID NO: 21278 - protein, 9 aa, Homo Sapiens
KLNDLIQRL

SEQ ID NO: 21279 - protein, 9 aa, Homo Sapiens
KLNEIVDQI

SEQ ID NO: 21280 - protein, 9 aa, Homo Sapiens
KLNLLTEYI

SEQ ID NO: 21281 - protein, 9 aa, Homo Sapiens
KLNNLNKKL

SEQ ID NO: 21282 - protein, 9 aa, Homo Sapiens
KLNPQQFEV

SEQ ID NO: 21283 - protein, 9 aa, Homo Sapiens
KLPPPPPQA

SEQ ID NO: 21284 - protein, 9 aa, Homo Sapiens
KLQDQIFNL

SEQ ID NO: 21285 - protein, 9 aa, Homo Sapiens
KLQEFLQTL

SEQ ID NO: 21286 - protein, 9 aa, Homo Sapiens
KLQEKIQEL

SEQ ID NO: 21287 - protein, 9 aa, Homo Sapiens
KLQELEARV

SEQ ID NO: 21288 - protein, 9 aa, Homo Sapiens
KLQELNYNL

SEQ ID NO: 21289 - protein, 9 aa, Homo Sapiens
KLQEQIFHL

SEQ ID NO: 21290 - protein, 9 aa, Homo Sapiens
KLQEQIHRV

SEQ ID NO: 21291 - protein, 9 aa, Homo Sapiens
KLQEVLDYL

SEQ ID NO: 21292 - protein, 9 aa, Homo Sapiens
KLTEIRHEV

SEQ ID NO: 21293 - protein, 9 aa, Homo Sapiens
KLTENLVAL

SEQ ID NO: 21294 - protein, 9 aa, Homo Sapiens
KLVDCIIEV

SEQ ID NO: 21295 - protein, 9 aa, Homo Sapiens
KLVELPYTV

SEQ ID NO: 21296 - protein, 9 aa, Homo Sapiens
KLWDINAHI

SEQ ID NO: 21297 - protein, 9 aa, Homo Sapiens
KLWDIRDGM

SEQ ID NO: 21298 - protein, 9 aa, Homo Sapiens
KLWDLLYKL

SEQ ID NO: 21299 - protein, 9 aa, Homo Sapiens
KLWDVRDSM

SEQ ID NO: 21300 - protein, 9 aa, Homo Sapiens
KLWDVREGM

SEQ ID NO: 21301 - protein, 9 aa, Homo Sapiens
KLWEAESKL

SEQ ID NO: 21302 - protein, 9 aa, Homo Sapiens
KLWELLYKL

SEQ ID NO: 21303 - protein, 9 aa, Homo Sapiens
KLWEMDNML

SEQ ID NO: 21304 - protein, 9 aa, Homo Sapiens
KLWESPNVL

SEQ ID NO: 21305 - protein, 9 aa, Homo Sapiens
KLWIIMEYL

SEQ ID NO: 21306 - protein, 9 aa, Homo Sapiens
KLWKGARSV

SEQ ID NO: 21307 - protein, 9 aa, Homo Sapiens
KLWNKIWCI

SEQ ID NO: 21308 - protein, 9 aa, Homo Sapiens
KLWPLFVKL

SEQ ID NO: 21309 - protein, 9 aa, Homo Sapiens
KLWQTPLHV

SEQ ID NO: 21310 - protein, 9 aa, Homo Sapiens
KLWTIHELL

SEQ ID NO: 21311 - protein, 9 aa, Homo Sapiens
KLWVPDEEV

SEQ ID NO: 21312 - protein, 9 aa, Homo Sapiens
KLYDGFQYL

SEQ ID NO: 21313 - protein, 9 aa, Homo Sapiens
KLYEAVPQL

SEQ ID NO: 21314 - protein, 9 aa, Homo Sapiens
KLYEQHHVV

SEQ ID NO: 21315 - protein, 9 aa, Homo Sapiens
KLYGKPIRV

SEQ ID NO: 21316 - protein, 9 aa, Homo Sapiens
KLYSISSQV

SEQ ID NO: 21317 - protein, 9 aa, Homo Sapiens
KLYSVSCHL

SEQ ID NO: 21318 - protein, 9 aa, Homo Sapiens
KLYTGLREV

SEQ ID NO: 21319 - protein, 9 aa, Homo Sapiens
KMADIEYRL

SEQ ID NO: 21320 - protein, 9 aa, Homo Sapiens
KMAEIKVKL

SEQ ID NO: 21321 - protein, 9 aa, Homo Sapiens
KMAEMLVEL

SEQ ID NO: 21322 - protein, 9 aa, Homo Sapiens
KMAIITTHL

SEQ ID NO: 21323 - protein, 9 aa, Homo Sapiens
KMAPALRKV

SEQ ID NO: 21324 - protein, 9 aa, Homo Sapiens
KMAPPPKEV

SEQ ID NO: 21325 - protein, 9 aa, Homo Sapiens
KMDEVLYSI

SEQ ID NO: 21326 - protein, 9 aa, Homo Sapiens
KMDLLVEKV

SEQ ID NO: 21327 - protein, 9 aa, Homo Sapiens
KMDWIFHTI

SEQ ID NO: 21328 - protein, 9 aa, Homo Sapiens
KMFEVDMKI

SEQ ID NO: 21329 - protein, 9 aa, Homo Sapiens
KMFFLIDKV

SEQ ID NO: 21330 - protein, 9 aa, Homo Sapiens
KMFFLIEKI

SEQ ID NO: 21331 - protein, 9 aa, Homo Sapiens
KMFKMSEKI

SEQ ID NO: 21332 - protein, 9 aa, Homo Sapiens
KMFQVHQVL

SEQ ID NO: 21333 - protein, 9 aa, Homo Sapiens
KMLAKVKQV

SEQ ID NO: 21334 - protein, 9 aa, Homo Sapiens
KMLDKIISI

SEQ ID NO: 21335 - protein, 9 aa, Homo Sapiens
KMLEKLPEL

SEQ ID NO: 21336 - protein, 9 aa, Homo Sapiens
KMLELTNRL

SEQ ID NO: 21337 - protein, 9 aa, Homo Sapiens
KMMDKVEFV

SEQ ID NO: 21338 - protein, 9 aa, Homo Sapiens
KMMDLEHKV

SEQ ID NO: 21339 - protein, 9 aa, Homo Sapiens
KMMDVTVTI

SEQ ID NO: 21340 - protein, 9 aa, Homo Sapiens
KMMLIVNMV

SEQ ID NO: 21341 - protein, 9 aa, Homo Sapiens
KMNEKIASL

SEQ ID NO: 21342 - protein, 9 aa, Homo Sapiens
KMNEKLYTV

SEQ ID NO: 21343 - protein, 9 aa, Homo Sapiens
KMPEINAKV

SEQ ID NO: 21344 - protein, 9 aa, Homo Sapiens
KMQETLVGL

SEQ ID NO: 21345 - protein, 9 aa, Homo Sapiens
KMVYIYHSL

SEQ ID NO: 21346 - protein, 9 aa, Homo Sapiens
KMWDVSTGM

SEQ ID NO: 21347 - protein, 9 aa, Homo Sapiens
KMWEEAISL

SEQ ID NO: 21348 - protein, 9 aa, Homo Sapiens
KMWENRQNL

SEQ ID NO: 21349 - protein, 9 aa, Homo Sapiens
KMWRDLEQL

SEQ ID NO: 21350 - protein, 9 aa, Homo Sapiens
KMYAVDTRV

SEQ ID NO: 21351 - protein, 9 aa, Homo Sapiens
KQFLVKVLI

SEQ ID NO: 21352 - protein, 9 aa, Homo Sapiens
KQIDSVNHI

SEQ ID NO: 21353 - protein, 9 aa, Homo Sapiens
KQLEVVHTL

SEQ ID NO: 21354 - protein, 9 aa, Homo Sapiens
KQMEKIQPA

SEQ ID NO: 21355 - protein, 9 aa, Homo Sapiens
KQVEEIFNL

SEQ ID NO: 21356 - protein, 9 aa, Homo Sapiens
KQWDVVSYL

SEQ ID NO: 21357 - protein, 9 aa, Homo Sapiens
KSFATKANV

SEQ ID NO: 21358 - protein, 9 aa, Homo Sapiens
KSFSLRAQV

SEQ ID NO: 21359 - protein, 9 aa, Homo Sapiens
KSWRVRYMV

SEQ ID NO: 21360 - protein, 9 aa, Homo Sapiens
KTALIHDGL

SEQ ID NO: 21361 - protein, 9 aa, Homo Sapiens
KTALITEVV

SEQ ID NO: 21362 - protein, 9 aa, Homo Sapiens
KTANITFSL

SEQ ID NO: 21363 - protein, 9 aa, Homo Sapiens
KTASINQNV

SEQ ID NO: 21364 - protein, 9 aa, Homo Sapiens
KTDVVVNSV

SEQ ID NO: 21365 - protein, 9 aa, Homo Sapiens
KTFEGFCAL

SEQ ID NO: 21366 - protein, 9 aa, Homo Sapiens
KTFFTKEYL

SEQ ID NO: 21367 - protein, 9 aa, Homo Sapiens
KTFQMAEYL

SEQ ID NO: 21368 - protein, 9 aa, Homo Sapiens
KTLGKLWRL

SEQ ID NO: 21369 - protein, 9 aa, Homo Sapiens
KTLPVAFKV

SEQ ID NO: 21370 - protein, 9 aa, Homo Sapiens
KTTTIAVEV

SEQ ID NO: 21371 - protein, 9 aa, Homo Sapiens
KTWKVDVVL

SEQ ID NO: 21372 - protein, 9 aa, Homo Sapiens
KTWNPKFTL

SEQ ID NO: 21373 - protein, 9 aa, Homo Sapiens
KTYGVSFFL

SEQ ID NO: 21374 - protein, 9 aa, Homo Sapiens
KVAEAPPNL

SEQ ID NO: 21375 - protein, 9 aa, Homo Sapiens
KVAEITELI

SEQ ID NO: 21376 - protein, 9 aa, Homo Sapiens
KVAELFEKL

SEQ ID NO: 21377 - protein, 9 aa, Homo Sapiens
KVAELKQEL

SEQ ID NO: 21378 - protein, 9 aa, Homo Sapiens
KVAPAPAVV

SEQ ID NO: 21379 - protein, 9 aa, Homo Sapiens
KVASLLHQV

SEQ ID NO: 21380 - protein, 9 aa, Homo Sapiens
KVDTVWVNV

SEQ ID NO: 21381 - protein, 9 aa, Homo Sapiens
KVFELMTSL

SEQ ID NO: 21382 - protein, 9 aa, Homo Sapiens
KVFKLQTSL

SEQ ID NO: 21383 - protein, 9 aa, Homo Sapiens
KVFKLQTTL

SEQ ID NO: 21384 - protein, 9 aa, Homo Sapiens
KVFLHEATV

SEQ ID NO: 21385 - protein, 9 aa, Homo Sapiens
KVGPVPVLV

SEQ ID NO: 21386 - protein, 9 aa, Homo Sapiens
KVHFITDTL

SEQ ID NO: 21387 - protein, 9 aa, Homo Sapiens
KVIDYVPGI

SEQ ID NO: 21388 - protein, 9 aa, Homo Sapiens
KVIPVYVGV

SEQ ID NO: 21389 - protein, 9 aa, Homo Sapiens
KVLDILQHI

SEQ ID NO: 21390 - protein, 9 aa, Homo Sapiens
KVLDLKINL

SEQ ID NO: 21391 - protein, 9 aa, Homo Sapiens
KVLDLRINL

SEQ ID NO: 21392 - protein, 9 aa, Homo Sapiens
KVLDVLWEL

SEQ ID NO: 21393 - protein, 9 aa, Homo Sapiens
KVLEILHRV

SEQ ID NO: 21394 - protein, 9 aa, Homo Sapiens
KVLERVNAV

SEQ ID NO: 21395 - protein, 9 aa, Homo Sapiens
KVLGKIEKV

SEQ ID NO: 21396 - protein, 9 aa, Homo Sapiens
KVMCIEHEI

SEQ ID NO: 21397 - protein, 9 aa, Homo Sapiens
KVMDVTEKL

SEQ ID NO: 21398 - protein, 9 aa, Homo Sapiens
KVMELLVHL

SEQ ID NO: 21399 - protein, 9 aa, Homo Sapiens
KVMNILHRI

SEQ ID NO: 21400 - protein, 9 aa, Homo Sapiens
KVMNWKETL

SEQ ID NO: 21401 - protein, 9 aa, Homo Sapiens
KVPEIEVTV

SEQ ID NO: 21402 - protein, 9 aa, Homo Sapiens
KVQDIKNNL

SEQ ID NO: 21403 - protein, 9 aa, Homo Sapiens
KVSVIQDFV

SEQ ID NO: 21404 - protein, 9 aa, Homo Sapiens
KVVALVHAV

SEQ ID NO: 21405 - protein, 9 aa, Homo Sapiens
KVWAPVQGL

SEQ ID NO: 21406 - protein, 9 aa, Homo Sapiens
KVWDLAQQV

SEQ ID NO: 21407 - protein, 9 aa, Homo Sapiens
KVWKLAEVL

SEQ ID NO: 21408 - protein, 9 aa, Homo Sapiens
KVYPVQEAL

SEQ ID NO: 21409 - protein, 9 aa, Homo Sapiens
KVYQGLYCV

SEQ ID NO: 21410 - protein, 9 aa, Homo Sapiens
LAPEVEVRV

SEQ ID NO: 21411 - protein, 9 aa, Homo Sapiens
LAPPEGQTV

SEQ ID NO: 21412 - protein, 9 aa, Homo Sapiens
LAPPPPTSA

SEQ ID NO: 21413 - protein, 9 aa, Homo Sapiens
LGGQLNVSV

SEQ ID NO: 21414 - protein, 9 aa, Homo Sapiens
LGPPPPLRV

SEQ ID NO: 21415 - protein, 9 aa, Homo Sapiens
LHLKLLDYL

SEQ ID NO: 21416 - protein, 9 aa, Homo Sapiens
LILGKLHYV

SEQ ID NO: 21417 - protein, 9 aa, Homo Sapiens
LIMELINNV

SEQ ID NO: 21418 - protein, 9 aa, Homo Sapiens
LISQIVSSI

SEQ ID NO: 21419 - protein, 9 aa, Homo Sapiens
LIWNIKDEL

SEQ ID NO: 21420 - protein, 9 aa, Homo Sapiens
LIYPWVHVV

SEQ ID NO: 21421 - protein, 9 aa, Homo Sapiens
LKLDIDKSL

SEQ ID NO: 21422 - protein, 9 aa, Homo Sapiens
LLAAWTARA

SEQ ID NO: 21423 - protein, 9 aa, Homo Sapiens
LLADLKTMV

SEQ ID NO: 21424 - protein, 9 aa, Homo Sapiens
LLADLLHNV

SEQ ID NO: 21425 - protein, 9 aa, Homo Sapiens
LLAEAKYYL

SEQ ID NO: 21426 - protein, 9 aa, Homo Sapiens
LLAEKIYKI

SEQ ID NO: 21427 - protein, 9 aa, Homo Sapiens
LLAEKVEQL

SEQ ID NO: 21428 - protein, 9 aa, Homo Sapiens
LLAELLTHL

SEQ ID NO: 21429 - protein, 9 aa, Homo Sapiens
LLAELPASV

SEQ ID NO: 21430 - protein, 9 aa, Homo Sapiens
LLAELQCQL

SEQ ID NO: 21431 - protein, 9 aa, Homo Sapiens
LLAEPVPGI

SEQ ID NO: 21432 - protein, 9 aa, Homo Sapiens
LLAETHYQL

SEQ ID NO: 21433 - protein, 9 aa, Homo Sapiens
LLALMHHSN

SEQ ID NO: 21434 - protein, 9 aa, Homo Sapiens
LLANKVPAA

SEQ ID NO: 21435 - protein, 9 aa, Homo Sapiens
LLAPAPAQA

SEQ ID NO: 21436 - protein, 9 aa, Homo Sapiens
LLAPFCPHL

SEQ ID NO: 21437 - protein, 9 aa, Homo Sapiens
LLASEVPQL

SEQ ID NO: 21438 - protein, 9 aa, Homo Sapiens
LLASINSTV

SEQ ID NO: 21439 - protein, 9 aa, Homo Sapiens
LLCDIVLHV

SEQ ID NO: 21440 - protein, 9 aa, Homo Sapiens
LLDIIKSTV

SEQ ID NO: 21441 - protein, 9 aa, Homo Sapiens
LLDKVYSSV

SEQ ID NO: 21442 - protein, 9 aa, Homo Sapiens
LLDPNVKSI

SEQ ID NO: 21443 - protein, 9 aa, Homo Sapiens
LLDQIRQGI

SEQ ID NO: 21444 - protein, 9 aa, Homo Sapiens
LLDRFLATV

SEQ ID NO: 21445 - protein, 9 aa, Homo Sapiens
LLDSAPLNV

SEQ ID NO: 21446 - protein, 9 aa, Homo Sapiens
LLDTIRDEI

SEQ ID NO: 21447 - protein, 9 aa, Homo Sapiens
LLDVPTAAV

SEQ ID NO: 21448 - protein, 9 aa, Homo Sapiens
LLFDRPMHV

SEQ ID NO: 21449 - protein, 9 aa, Homo Sapiens
LLFDVHTTL

SEQ ID NO: 21450 - protein, 9 aa, Homo Sapiens
LLFEGIARI

SEQ ID NO: 21451 - protein, 9 aa, Homo Sapiens
LLFILKQLV

SEQ ID NO: 21452 - protein, 9 aa, Homo Sapiens
LLGEIPDRL

SEQ ID NO: 21453 - protein, 9 aa, Homo Sapiens
LLGPKPFPL

SEQ ID NO: 21454 - protein, 9 aa, Homo Sapiens
LLGPPPVGV

SEQ ID NO: 21455 - protein, 9 aa, Homo Sapiens
LLGPRLVLA

SEQ ID NO: 21456 - protein, 9 aa, Homo Sapiens
LLHEVIVCV

SEQ ID NO: 21457 - protein, 9 aa, Homo Sapiens
LLHGHIVEL

SEQ ID NO: 21458 - protein, 9 aa, Homo Sapiens
LLHSFVDSV

SEQ ID NO: 21459 - protein, 9 aa, Homo Sapiens
LLIGHLERV

SEQ ID NO: 21460 - protein, 9 aa, Homo Sapiens
LLKELRHGV

SEQ ID NO: 21461 - protein, 9 aa, Homo Sapiens
LLLAHIIAL

SEQ ID NO: 21462 - protein, 9 aa, Homo Sapiens
LLLDVPTAA

SEQ ID NO: 21463 - protein, 9 aa, Homo Sapiens
LLLEILHEI

SEQ ID NO: 21464 - protein, 9 aa, Homo Sapiens
LLMEHIQEI

SEQ ID NO: 21465 - protein, 9 aa, Homo Sapiens
LLNDHIYVV

SEQ ID NO: 21466 - protein, 9 aa, Homo Sapiens
LLNEILEQV

SEQ ID NO: 21467 - protein, 9 aa, Homo Sapiens
LLNHRIFQL

SEQ ID NO: 21468 - protein, 9 aa, Homo Sapiens
LLNKAPEYL

SEQ ID NO: 21469 - protein, 9 aa, Homo Sapiens
LLNKKPHVV

SEQ ID NO: 21470 - protein, 9 aa, Homo Sapiens
LLPGCVYHV

SEQ ID NO: 21471 - protein, 9 aa, Homo Sapiens
LLPHPGLQV

SEQ ID NO: 21472 - protein, 9 aa, Homo Sapiens
LLPPAPPHA

SEQ ID NO: 21473 - protein, 9 aa, Homo Sapiens
LLPPPGSCA

SEQ ID NO: 21474 - protein, 9 aa, Homo Sapiens
LLPPPMKEL

SEQ ID NO: 21475 - protein, 9 aa, Homo Sapiens
LLPPPPCPA

SEQ ID NO: 21476 - protein, 9 aa, Homo Sapiens
LLPPVTLAA

SEQ ID NO: 21477 - protein, 9 aa, Homo Sapiens
LLQDHPWLL

SEQ ID NO: 21478 - protein, 9 aa, Homo Sapiens
LLQDKQFEL

SEQ ID NO: 21479 - protein, 9 aa, Homo Sapiens
LLREKVEFL

SEQ ID NO: 21480 - protein, 9 aa, Homo Sapiens
LLSAEPVPA

SEQ ID NO: 21481 - protein, 9 aa, Homo Sapiens
LLSHVIVAL

SEQ ID NO: 21482 - protein, 9 aa, Homo Sapiens
LLSPVVPQI

SEQ ID NO: 21483 - protein, 9 aa, Homo Sapiens
LLTEIRAVV

SEQ ID NO: 21484 - protein, 9 aa, Homo Sapiens
LLVEVSNIF

SEQ ID NO: 21485 - protein, 9 aa, Homo Sapiens
LLWCPTNGL

SEQ ID NO: 21486 - protein, 9 aa, Homo Sapiens
LLWDKIHKL

SEQ ID NO: 21487 - protein, 9 aa, Homo Sapiens
LLWERVEKL

SEQ ID NO: 21488 - protein, 9 aa, Homo Sapiens
LLWPGAALL

SEQ ID NO: 21489 - protein, 9 aa, Homo Sapiens
LLWTPSVGL

SEQ ID NO: 21490 - protein, 9 aa, Homo Sapiens
LLWVPGCFA

SEQ ID NO: 21491 - protein, 9 aa, Homo Sapiens
LLYDLADQL

SEQ ID NO: 21492 - protein, 9 aa, Homo Sapiens
LLYGHTVTV

SEQ ID NO: 21493 - protein, 9 aa, Homo Sapiens
LMAITRHGV

SEQ ID NO: 21494 - protein, 9 aa, Homo Sapiens
LMAPAPSTV

SEQ ID NO: 21495 - protein, 9 aa, Homo Sapiens
LMDHTIPEV

SEQ ID NO: 21496 - protein, 9 aa, Homo Sapiens
LMDSNLPRL

SEQ ID NO: 21497 - protein, 9 aa, Homo Sapiens
LMGFFPFRV

SEQ ID NO: 21498 - protein, 9 aa, Homo Sapiens
LMGPVVHEV

SEQ ID NO: 21499 - protein, 9 aa, Homo Sapiens
LMMDPLTGL

SEQ ID NO: 21500 - protein, 9 aa, Homo Sapiens
LMNPMVPGL

SEQ ID NO: 21501 - protein, 9 aa, Homo Sapiens
LMQTEVHHV

SEQ ID NO: 21502 - protein, 9 aa, Homo Sapiens
LMTKEISSV

SEQ ID NO: 21503 - protein, 9 aa, Homo Sapiens
LMVDHVTEV

SEQ ID NO: 21504 - protein, 9 aa, Homo Sapiens
LMYAVREEV

SEQ ID NO: 21505 - protein, 9 aa, Homo Sapiens
LMYPYIFHV

SEQ ID NO: 21506 - protein, 9 aa, Homo Sapiens
LQAPELANV

SEQ ID NO: 21507 - protein, 9 aa, Homo Sapiens
LQFDGIHVV

SEQ ID NO: 21508 - protein, 9 aa, Homo Sapiens
LQIDNARLA

SEQ ID NO: 21509 - protein, 9 aa, Homo Sapiens
LQLEAIHKV

SEQ ID NO: 21510 - protein, 9 aa, Homo Sapiens
LQVEEVHQL

SEQ ID NO: 21511 - protein, 9 aa, Homo Sapiens
LRLLKTLET

SEQ ID NO: 21512 - protein, 9 aa, Homo Sapiens
LSLEIGKTL

SEQ ID NO: 21513 - protein, 9 aa, Homo Sapiens
LSLENLEKI

SEQ ID NO: 21514 - protein, 9 aa, Homo Sapiens
LTFPVRDGV

SEQ ID NO: 21515 - protein, 9 aa, Homo Sapiens
LTHLVTAAV

SEQ ID NO: 21516 - protein, 9 aa, Homo Sapiens
LTMEVIRQV

SEQ ID NO: 21517 - protein, 9 aa, Homo Sapiens
LTTCISAHV

SEQ ID NO: 21518 - protein, 9 aa, Homo Sapiens
LTWLIVNHI

SEQ ID NO: 21519 - protein, 9 aa, Homo Sapiens
LVLEIIHRI

SEQ ID NO: 21520 - protein, 9 aa, Homo Sapiens
LVPPVVACV

SEQ ID NO: 21521 - protein, 9 aa, Homo Sapiens
LYIQRSAPL

SEQ ID NO: 21522 - protein, 9 aa, Homo Sapiens
MAPKPGPYV

SEQ ID NO: 21523 - protein, 9 aa, Homo Sapiens
MAPPAHKSI

SEQ ID NO: 21524 - protein, 9 aa, Homo Sapiens
MAPPPPRSV

SEQ ID NO: 21525 - protein, 9 aa, Homo Sapiens
MLAEKLPNL

SEQ ID NO: 21526 - protein, 9 aa, Homo Sapiens
MLAWINESL

SEQ ID NO: 21527 - protein, 9 aa, Homo Sapiens
MLDMSVPAV

SEQ ID NO: 21528 - protein, 9 aa, Homo Sapiens
MLDSLRIYL

SEQ ID NO: 21529 - protein, 9 aa, Homo Sapiens
MLFDKFRSV

SEQ ID NO: 21530 - protein, 9 aa, Homo Sapiens
MLFLGLHNV

SEQ ID NO: 21531 - protein, 9 aa, Homo Sapiens
MLHTVTDMV

SEQ ID NO: 21532 - protein, 9 aa, Homo Sapiens
MLLDFIQHI

SEQ ID NO: 21533 - protein, 9 aa, Homo Sapiens
MLLDVMHTV

SEQ ID NO: 21534 - protein, 9 aa, Homo Sapiens
MLPPPPLTA

SEQ ID NO: 21535 - protein, 9 aa, Homo Sapiens
MLSPFISSV

SEQ ID NO: 21536 - protein, 9 aa, Homo Sapiens
MLVEITERA

SEQ ID NO: 21537 - protein, 9 aa, Homo Sapiens
MMPPPVGMV

SEQ ID NO: 21538 - protein, 9 aa, Homo Sapiens
MMWNNHYIL

SEQ ID NO: 21539 - protein, 9 aa, Homo Sapiens
MQGPIPERI

SEQ ID NO: 21540 - protein, 9 aa, Homo Sapiens
MQWQNVEHV

SEQ ID NO: 21541 - protein, 9 aa, Homo Sapiens
MQWTLTELL

SEQ ID NO: 21542 - protein, 9 aa, Homo Sapiens
MTSEIHNTV

SEQ ID NO: 21543 - protein, 9 aa, Homo Sapiens
MVAEILHHL

SEQ ID NO: 21544 - protein, 9 aa, Homo Sapiens
MVAPAVASV

SEQ ID NO: 21545 - protein, 9 aa, Homo Sapiens
MVDKYIPNI

SEQ ID NO: 21546 - protein, 9 aa, Homo Sapiens
MVWEGLNVV

SEQ ID NO: 21547 - protein, 9 aa, Homo Sapiens
NIFEPHVAV

SEQ ID NO: 21548 - protein, 9 aa, Homo Sapiens
NIFGPLVKL

SEQ ID NO: 21549 - protein, 9 aa, Homo Sapiens
NIFRWETTI

SEQ ID NO: 21550 - protein, 9 aa, Homo Sapiens
NIIELVHQV

SEQ ID NO: 21551 - protein, 9 aa, Homo Sapiens
NILELLHRL

SEQ ID NO: 21552 - protein, 9 aa, Homo Sapiens
NIMDIKIGL

SEQ ID NO: 21553 - protein, 9 aa, Homo Sapiens
NLAEVVERV

SEQ ID NO: 21554 - protein, 9 aa, Homo Sapiens
NLAKCIVSV

SEQ ID NO: 21555 - protein, 9 aa, Homo Sapiens
NLFDRVVTL

SEQ ID NO: 21556 - protein, 9 aa, Homo Sapiens
NLFEWHFTV

SEQ ID NO: 21557 - protein, 9 aa, Homo Sapiens
NLFHYLTEV

SEQ ID NO: 21558 - protein, 9 aa, Homo Sapiens
NLFKHLAKA

SEQ ID NO: 21559 - protein, 9 aa, Homo Sapiens
NLFKLEVRL

SEQ ID NO: 21560 - protein, 9 aa, Homo Sapiens
NLFKWVGTI

SEQ ID NO: 21561 - protein, 9 aa, Homo Sapiens
NLFSLCQKI

SEQ ID NO: 21562 - protein, 9 aa, Homo Sapiens
NLFTVIAHL

SEQ ID NO: 21563 - protein, 9 aa, Homo Sapiens
NLLKLIAEV

SEQ ID NO: 21564 - protein, 9 aa, Homo Sapiens
NLLQIQRNV

SEQ ID NO: 21565 - protein, 9 aa, Homo Sapiens
NLNEKINHL

SEQ ID NO: 21566 - protein, 9 aa, Homo Sapiens
NLNSIVPSV

SEQ ID NO: 21567 - protein, 9 aa, Homo Sapiens
NLWCPTLKV

SEQ ID NO: 21568 - protein, 9 aa, Homo Sapiens
NLWPVPHGL

SEQ ID NO: 21569 - protein, 9 aa, Homo Sapiens
NLWSLVAKV

SEQ ID NO: 21570 - protein, 9 aa, Homo Sapiens
NLYPFVKTV

SEQ ID NO: 21571 - protein, 9 aa, Homo Sapiens
NMAELFAVV

SEQ ID NO: 21572 - protein, 9 aa, Homo Sapiens
NMDELRHQV

SEQ ID NO: 21573 - protein, 9 aa, Homo Sapiens
NMFEISDRL

SEQ ID NO: 21574 - protein, 9 aa, Homo Sapiens
NMVDIIHSV

SEQ ID NO: 21575 - protein, 9 aa, Homo Sapiens
NMYGKVVTV

SEQ ID NO: 21576 - protein, 9 aa, Homo Sapiens
NQYRLIVNV

SEQ ID NO: 21577 - protein, 9 aa, Homo Sapiens
NTCPYVHNI

SEQ ID NO: 21578 - protein, 9 aa, Homo Sapiens
NTWEPEENI

SEQ ID NO: 21579 - protein, 9 aa, Homo Sapiens
NVFHLVATV

SEQ ID NO: 21580 - protein, 9 aa, Homo Sapiens
PDIIKDQKA

SEQ ID NO: 21581 - protein, 9 aa, Homo Sapiens
PDPKLLEKV

SEQ ID NO: 21582 - protein, 9 aa, Homo Sapiens
PGLPRPPGL

SEQ ID NO: 21583 - protein, 9 aa, Homo Sapiens
QAPGVITGV

SEQ ID NO: 21584 - protein, 9 aa, Homo Sapiens
QAPPPPQQV

SEQ ID NO: 21585 - protein, 9 aa, Homo Sapiens
QIAELKMQL

SEQ ID NO: 21586 - protein, 9 aa, Homo Sapiens
QLAQFVHEV

SEQ ID NO: 21587 - protein, 9 aa, Homo Sapiens
QLDDLKVEL

SEQ ID NO: 21588 - protein, 9 aa, Homo Sapiens
QLDIIIHSL

SEQ ID NO: 21589 - protein, 9 aa, Homo Sapiens
QLFEDLVYL

SEQ ID NO: 21590 - protein, 9 aa, Homo Sapiens
QLFEMHEKL

SEQ ID NO: 21591 - protein, 9 aa, Homo Sapiens
QLGPVPVTI

SEQ ID NO: 21592 - protein, 9 aa, Homo Sapiens
QLIDGLEYL

SEQ ID NO: 21593 - protein, 9 aa, Homo Sapiens
QLIDKVWQL

SEQ ID NO: 21594 - protein, 9 aa, Homo Sapiens
QLISKIPHI

SEQ ID NO: 21595 - protein, 9 aa, Homo Sapiens
QLLDLMHTL

SEQ ID NO: 21596 - protein, 9 aa, Homo Sapiens
QLLDVIHYV

SEQ ID NO: 21597 - protein, 9 aa, Homo Sapiens
QLLEKVIEL

SEQ ID NO: 21598 - protein, 9 aa, Homo Sapiens
QLLEKVPTL

SEQ ID NO: 21599 - protein, 9 aa, Homo Sapiens
QLMEQVAQL

SEQ ID NO: 21600 - protein, 9 aa, Homo Sapiens
QLNEKVAQL

SEQ ID NO: 21601 - protein, 9 aa, Homo Sapiens
QLNEQVHSL

SEQ ID NO: 21602 - protein, 9 aa, Homo Sapiens
QLQDRVYAL

SEQ ID NO: 21603 - protein, 9 aa, Homo Sapiens
QLQELVCHV

SEQ ID NO: 21604 - protein, 9 aa, Homo Sapiens
QLVDIIEKV

SEQ ID NO: 21605 - protein, 9 aa, Homo Sapiens
QLWNNYFHL

SEQ ID NO: 21606 - protein, 9 aa, Homo Sapiens
QMAEIAVNA

SEQ ID NO: 21607 - protein, 9 aa, Homo Sapiens
QMAQIVERL

SEQ ID NO: 21608 - protein, 9 aa, Homo Sapiens
QMISRIEYI

SEQ ID NO: 21609 - protein, 9 aa, Homo Sapiens
QMISRIEYV

SEQ ID NO: 21610 - protein, 9 aa, Homo Sapiens
QMLEIHSQV

SEQ ID NO: 21611 - protein, 9 aa, Homo Sapiens
QMMWLMDHI

SEQ ID NO: 21612 - protein, 9 aa, Homo Sapiens
QQINKLEEL

SEQ ID NO: 21613 - protein, 9 aa, Homo Sapiens
QVANVRFNV

SEQ ID NO: 21614 - protein, 9 aa, Homo Sapiens
QVCAIIERV

SEQ ID NO: 21615 - protein, 9 aa, Homo Sapiens
QVLELQHTL

SEQ ID NO: 21616 - protein, 9 aa, Homo Sapiens
QVMQIIEHL

SEQ ID NO: 21617 - protein, 9 aa, Homo Sapiens
RAAEIRETL

SEQ ID NO: 21618 - protein, 9 aa, Homo Sapiens
RAFLVEHNL

SEQ ID NO: 21619 - protein, 9 aa, Homo Sapiens
RIADLSYTV

SEQ ID NO: 21620 - protein, 9 aa, Homo Sapiens
RIAELLTEL

SEQ ID NO: 21621 - protein, 9 aa, Homo Sapiens
RIFDLQNKV

SEQ ID NO: 21622 - protein, 9 aa, Homo Sapiens
RIFLLIQSV

SEQ ID NO: 21623 - protein, 9 aa, Homo Sapiens
RIFVGLCQV

SEQ ID NO: 21624 - protein, 9 aa, Homo Sapiens
RIIDTVAQV

SEQ ID NO: 21625 - protein, 9 aa, Homo Sapiens
RIIDVVYNA

SEQ ID NO: 21626 - protein, 9 aa, Homo Sapiens
RILDILEYI

SEQ ID NO: 21627 - protein, 9 aa, Homo Sapiens
RIMEFTTTL

SEQ ID NO: 21628 - protein, 9 aa, Homo Sapiens
RIMEIVDAI

SEQ ID NO: 21629 - protein, 9 aa, Homo Sapiens
RISDVHFSV

SEQ ID NO: 21630 - protein, 9 aa, Homo Sapiens
RIWDPVLSV

SEQ ID NO: 21631 - protein, 9 aa, Homo Sapiens
RIWDVRTKA

SEQ ID NO: 21632 - protein, 9 aa, Homo Sapiens
RIYKYIHKV

SEQ ID NO: 21633 - protein, 9 aa, Homo Sapiens
RLAALEQNV

SEQ ID NO: 21634 - protein, 9 aa, Homo Sapiens
RLAEAHAKV

SEQ ID NO: 21635 - protein, 9 aa, Homo Sapiens
RLAELEEFI

SEQ ID NO: 21636 - protein, 9 aa, Homo Sapiens
RLAELQEQL

SEQ ID NO: 21637 - protein, 9 aa, Homo Sapiens
RLAEQIATL

SEQ ID NO: 21638 - protein, 9 aa, Homo Sapiens
RLAEVVHEL

SEQ ID NO: 21639 - protein, 9 aa, Homo Sapiens
RLAQHITYV

SEQ ID NO: 21640 - protein, 9 aa, Homo Sapiens
RLAQICSSI

SEQ ID NO: 21641 - protein, 9 aa, Homo Sapiens
RLCQEILGV

SEQ ID NO: 21642 - protein, 9 aa, Homo Sapiens
RLCRLLKPA

SEQ ID NO: 21643 - protein, 9 aa, Homo Sapiens
RLDIVHENL

SEQ ID NO: 21644 - protein, 9 aa, Homo Sapiens
RLDNLKAHL

SEQ ID NO: 21645 - protein, 9 aa, Homo Sapiens
RLDYITAEI

SEQ ID NO: 21646 - protein, 9 aa, Homo Sapiens
RLFAVLEQL

SEQ ID NO: 21647 - protein, 9 aa, Homo Sapiens
RLFDDVPQV

SEQ ID NO: 21648 - protein, 9 aa, Homo Sapiens
RLFESINNL

SEQ ID NO: 21649 - protein, 9 aa, Homo Sapiens
RLFEVPHEL

SEQ ID NO: 21650 - protein, 9 aa, Homo Sapiens
RLGPPPSHA

SEQ ID NO: 21651 - protein, 9 aa, Homo Sapiens
RLGPVPPGL

SEQ ID NO: 21652 - protein, 9 aa, Homo Sapiens
RLGPVPSGL

SEQ ID NO: 21653 - protein, 9 aa, Homo Sapiens
RLIDLHTNV

SEQ ID NO: 21654 - protein, 9 aa, Homo Sapiens
RLIESLFTI

SEQ ID NO: 21655 - protein, 9 aa, Homo Sapiens
RLLDALEFL

SEQ ID NO: 21656 - protein, 9 aa, Homo Sapiens
RLLDMGFEA

SEQ ID NO: 21657 - protein, 9 aa, Homo Sapiens
RLLDVLCEM

SEQ ID NO: 21658 - protein, 9 aa, Homo Sapiens
RLLDYVATV

SEQ ID NO: 21659 - protein, 9 aa, Homo Sapiens
RLLDYVVNI

SEQ ID NO: 21660 - protein, 9 aa, Homo Sapiens
RLLEFLVAL

SEQ ID NO: 21661 - protein, 9 aa, Homo Sapiens
RLLEIPCVI

SEQ ID NO: 21662 - protein, 9 aa, Homo Sapiens
RLLENMTEV

SEQ ID NO: 21663 - protein, 9 aa, Homo Sapiens
RLLESFETM

SEQ ID NO: 21664 - protein, 9 aa, Homo Sapiens
RLLEVQSQV

SEQ ID NO: 21665 - protein, 9 aa, Homo Sapiens
RLLEVTNTI

SEQ ID NO: 21666 - protein, 9 aa, Homo Sapiens
RLLGHIKNV

SEQ ID NO: 21667 - protein, 9 aa, Homo Sapiens
RLLHVKETM

SEQ ID NO: 21668 - protein, 9 aa, Homo Sapiens
RLMEICESL

SEQ ID NO: 21669 - protein, 9 aa, Homo Sapiens
RLMNDMTAV

SEQ ID NO: 21670 - protein, 9 aa, Homo Sapiens
RLMNETTAV

SEQ ID NO: 21671 - protein, 9 aa, Homo Sapiens
RLNEAAVTV

SEQ ID NO: 21672 - protein, 9 aa, Homo Sapiens
RLNKVIKSV

SEQ ID NO: 21673 - protein, 9 aa, Homo Sapiens
RLPEAIEEV

SEQ ID NO: 21674 - protein, 9 aa, Homo Sapiens
RLPEIYIQL

SEQ ID NO: 21675 - protein, 9 aa, Homo Sapiens
RLQDAIAKV

SEQ ID NO: 21676 - protein, 9 aa, Homo Sapiens
RLQEEINEV

SEQ ID NO: 21677 - protein, 9 aa, Homo Sapiens
RLQEVTHSV

SEQ ID NO: 21678 - protein, 9 aa, Homo Sapiens
RLQQLQHRV

SEQ ID NO: 21679 - protein, 9 aa, Homo Sapiens
RLSDAQIYV

SEQ ID NO: 21680 - protein, 9 aa, Homo Sapiens
RLSDVQIYV

SEQ ID NO: 21681 - protein, 9 aa, Homo Sapiens
RLSSVNAEV

SEQ ID NO: 21682 - protein, 9 aa, Homo Sapiens
RLTDYISKV

SEQ ID NO: 21683 - protein, 9 aa, Homo Sapiens
RLVEIQYEL

SEQ ID NO: 21684 - protein, 9 aa, Homo Sapiens
RLWDLTTGT

SEQ ID NO: 21685 - protein, 9 aa, Homo Sapiens
RLWDVHTSA

SEQ ID NO: 21686 - protein, 9 aa, Homo Sapiens
RLWDVSCDL

SEQ ID NO: 21687 - protein, 9 aa, Homo Sapiens
RLWEYLLEL

SEQ ID NO: 21688 - protein, 9 aa, Homo Sapiens
RLWGEPVNL

SEQ ID NO: 21689 - protein, 9 aa, Homo Sapiens
RLWKAIHTA

SEQ ID NO: 21690 - protein, 9 aa, Homo Sapiens
RLWQVQSRL

SEQ ID NO: 21691 - protein, 9 aa, Homo Sapiens
RLYDGLFKV

SEQ ID NO: 21692 - protein, 9 aa, Homo Sapiens
RLYDTHITV

SEQ ID NO: 21693 - protein, 9 aa, Homo Sapiens
RLYEFWWSL

SEQ ID NO: 21694 - protein, 9 aa, Homo Sapiens
RLYGKLAKV

SEQ ID NO: 21695 - protein, 9 aa, Homo Sapiens
RLYGLGTGV

SEQ ID NO: 21696 - protein, 9 aa, Homo Sapiens
RLYHITDQV

SEQ ID NO: 21697 - protein, 9 aa, Homo Sapiens
RLYPLAIQI

SEQ ID NO: 21698 - protein, 9 aa, Homo Sapiens
RLYSVSYLL

SEQ ID NO: 21699 - protein, 9 aa, Homo Sapiens
RMAVLNEQV

SEQ ID NO: 21700 - protein, 9 aa, Homo Sapiens
RMFHIRAVI

SEQ ID NO: 21701 - protein, 9 aa, Homo Sapiens
RMGPPLHTV

SEQ ID NO: 21702 - protein, 9 aa, Homo Sapiens
RMLDSVEKL

SEQ ID NO: 21703 - protein, 9 aa, Homo Sapiens
RMLHFLTAV

SEQ ID NO: 21704 - protein, 9 aa, Homo Sapiens
RMLPHAPGV

SEQ ID NO: 21705 - protein, 9 aa, Homo Sapiens
RMNFPYFYV

SEQ ID NO: 21706 - protein, 9 aa, Homo Sapiens
RMVHILTSV

SEQ ID NO: 21707 - protein, 9 aa, Homo Sapiens
RMWATQGLA

SEQ ID NO: 21708 - protein, 9 aa, Homo Sapiens
RMWEDPMGA

SEQ ID NO: 21709 - protein, 9 aa, Homo Sapiens
RMYELVHRM

SEQ ID NO: 21710 - protein, 9 aa, Homo Sapiens
RQADKVWRL

SEQ ID NO: 21711 - protein, 9 aa, Homo Sapiens
RQLAKIHAI

SEQ ID NO: 21712 - protein, 9 aa, Homo Sapiens
RQLEKLKEV

SEQ ID NO: 21713 - protein, 9 aa, Homo Sapiens
RTFHLLHTV

SEQ ID NO: 21714 - protein, 9 aa, Homo Sapiens
RTFLVGERV

SEQ ID NO: 21715 - protein, 9 aa, Homo Sapiens
RTGEVKWSV

SEQ ID NO: 21716 - protein, 9 aa, Homo Sapiens
RTLPVDFHI

SEQ ID NO: 21717 - protein, 9 aa, Homo Sapiens
RTMEWVQTI

SEQ ID NO: 21718 - protein, 9 aa, Homo Sapiens
RTTEILHHL

SEQ ID NO: 21719 - protein, 9 aa, Homo Sapiens
RVADILTQL

SEQ ID NO: 21720 - protein, 9 aa, Homo Sapiens
RVAVIKWGA

SEQ ID NO: 21721 - protein, 9 aa, Homo Sapiens
RVDKITEYL

SEQ ID NO: 21722 - protein, 9 aa, Homo Sapiens
RVFENIVAV

SEQ ID NO: 21723 - protein, 9 aa, Homo Sapiens
RVLDNIKAV

SEQ ID NO: 21724 - protein, 9 aa, Homo Sapiens
RVLELIPQI

SEQ ID NO: 21725 - protein, 9 aa, Homo Sapiens
RVLEVVNHV

SEQ ID NO: 21726 - protein, 9 aa, Homo Sapiens
RVMELFFTV

SEQ ID NO: 21727 - protein, 9 aa, Homo Sapiens
RVMEYINRL

SEQ ID NO: 21728 - protein, 9 aa, Homo Sapiens
RVPPPPQSV

SEQ ID NO: 21729 - protein, 9 aa, Homo Sapiens
RVQILKDYV

SEQ ID NO: 21730 - protein, 9 aa, Homo Sapiens
RVREITENL

SEQ ID NO: 21731 - protein, 9 aa, Homo Sapiens
RVTFVNFTV

SEQ ID NO: 21732 - protein, 9 aa, Homo Sapiens
RVWQVTIGT

SEQ ID NO: 21733 - protein, 9 aa, Homo Sapiens
RVYEFLDKL

SEQ ID NO: 21734 - protein, 9 aa, Homo Sapiens
RVYNVTQHA

SEQ ID NO: 21735 - protein, 9 aa, Homo Sapiens
SAAEPTPAV

SEQ ID NO: 21736 - protein, 9 aa, Homo Sapiens
SAPASQASL

SEQ ID NO: 21737 - protein, 9 aa, Homo Sapiens
SAPPRPPRA

SEQ ID NO: 21738 - protein, 9 aa, Homo Sapiens
SAWRVISSI

SEQ ID NO: 21739 - protein, 9 aa, Homo Sapiens
SAYLVAEKV

SEQ ID NO: 21740 - protein, 9 aa, Homo Sapiens
SIAECLTYL

SEQ ID NO: 21741 - protein, 9 aa, Homo Sapiens
SIAEMGAYV

SEQ ID NO: 21742 - protein, 9 aa, Homo Sapiens
SIAEVVHQL

SEQ ID NO: 21743 - protein, 9 aa, Homo Sapiens
SICGTLHSV

SEQ ID NO: 21744 - protein, 9 aa, Homo Sapiens
SIFEFVHAL

SEQ ID NO: 21745 - protein, 9 aa, Homo Sapiens
SIHDVTFQV

SEQ ID NO: 21746 - protein, 9 aa, Homo Sapiens
SIHVGQAGV

SEQ ID NO: 21747 - protein, 9 aa, Homo Sapiens
SIIGRLLEV

SEQ ID NO: 21748 - protein, 9 aa, Homo Sapiens
SILEDPPSI

SEQ ID NO: 21749 - protein, 9 aa, Homo Sapiens
SIMQVVNYV

SEQ ID NO: 21750 - protein, 9 aa, Homo Sapiens
SIYPSPTGV

SEQ ID NO: 21751 - protein, 9 aa, Homo Sapiens
SLADCIPLL

SEQ ID NO: 21752 - protein, 9 aa, Homo Sapiens
SLAEPRVSV

SEQ ID NO: 21753 - protein, 9 aa, Homo Sapiens
SLAKIPATL

SEQ ID NO: 21754 - protein, 9 aa, Homo Sapiens
SLAPIIVHV

SEQ ID NO: 21755 - protein, 9 aa, Homo Sapiens
SLAPLFFKL

SEQ ID NO: 21756 - protein, 9 aa, Homo Sapiens
SLAQYLINV

SEQ ID NO: 21757 - protein, 9 aa, Homo Sapiens
SLASFIPAV

SEQ ID NO: 21758 - protein, 9 aa, Homo Sapiens
SLCDLKSRL

SEQ ID NO: 21759 - protein, 9 aa, Homo Sapiens
SLDERPVAV

SEQ ID NO: 21760 - protein, 9 aa, Homo Sapiens
SLDQPTQTV

SEQ ID NO: 21761 - protein, 9 aa, Homo Sapiens
SLDTQPKKV

SEQ ID NO: 21762 - protein, 9 aa, Homo Sapiens
SLEELLHYV

SEQ ID NO: 21763 - protein, 9 aa, Homo Sapiens
SLFDWNVKL

SEQ ID NO: 21764 - protein, 9 aa, Homo Sapiens
SLFERLVKV

SEQ ID NO: 21765 - protein, 9 aa, Homo Sapiens
SLFERLVVL

SEQ ID NO: 21766 - protein, 9 aa, Homo Sapiens
SLFGDVKKL

SEQ ID NO: 21767 - protein, 9 aa, Homo Sapiens
SLFKGICAL

SEQ ID NO: 21768 - protein, 9 aa, Homo Sapiens
SLFKLIVKV

SEQ ID NO: 21769 - protein, 9 aa, Homo Sapiens
SLFNKLVEL

SEQ ID NO: 21770 - protein, 9 aa, Homo Sapiens
SLFRVITEV

SEQ ID NO: 21771 - protein, 9 aa, Homo Sapiens
SLFRWRHQA

SEQ ID NO: 21772 - protein, 9 aa, Homo Sapiens
SLFSVIVRV

SEQ ID NO: 21773 - protein, 9 aa, Homo Sapiens
SLFYLHNEL

SEQ ID NO: 21774 - protein, 9 aa, Homo Sapiens
SLIDKLYNI

SEQ ID NO: 21775 - protein, 9 aa, Homo Sapiens
SLIEKLWQT

SEQ ID NO: 21776 - protein, 9 aa, Homo Sapiens
SLIEKYFSV

SEQ ID NO: 21777 - protein, 9 aa, Homo Sapiens
SLIGHLQTL

SEQ ID NO: 21778 - protein, 9 aa, Homo Sapiens
SLIHGLWNL

SEQ ID NO: 21779 - protein, 9 aa, Homo Sapiens
SLIKQIPRI

SEQ ID NO: 21780 - protein, 9 aa, Homo Sapiens
SLISNPPAM

SEQ ID NO: 21781 - protein, 9 aa, Homo Sapiens
SLITRLLEV

SEQ ID NO: 21782 - protein, 9 aa, Homo Sapiens
SLLDCTFRL

SEQ ID NO: 21783 - protein, 9 aa, Homo Sapiens
SLLDIIEKV

SEQ ID NO: 21784 - protein, 9 aa, Homo Sapiens
SLLDLHTKV

SEQ ID NO: 21785 - protein, 9 aa, Homo Sapiens
SLLDPFAAV

SEQ ID NO: 21786 - protein, 9 aa, Homo Sapiens
SLLDPVPEV

SEQ ID NO: 21787 - protein, 9 aa, Homo Sapiens
SLLEHLSHV

SEQ ID NO: 21788 - protein, 9 aa, Homo Sapiens
SLLEKLSAL

SEQ ID NO: 21789 - protein, 9 aa, Homo Sapiens
SLLENLEKI

SEQ ID NO: 21790 - protein, 9 aa, Homo Sapiens
SLLPAIVEL

SEQ ID NO: 21791 - protein, 9 aa, Homo Sapiens
SLLQTLYKV

SEQ ID NO: 21792 - protein, 9 aa, Homo Sapiens
SLLRHLEKV

SEQ ID NO: 21793 - protein, 9 aa, Homo Sapiens
SLLRLQETL

SEQ ID NO: 21794 - protein, 9 aa, Homo Sapiens
SLLRVGWSV

SEQ ID NO: 21795 - protein, 9 aa, Homo Sapiens
SLLSHVEQL

SEQ ID NO: 21796 - protein, 9 aa, Homo Sapiens
SLLYNVPAV

SEQ ID NO: 21797 - protein, 9 aa, Homo Sapiens
SLMEKISKL

SEQ ID NO: 21798 - protein, 9 aa, Homo Sapiens
SLMHVPPSL

SEQ ID NO: 21799 - protein, 9 aa, Homo Sapiens
SLNKHVEAV

SEQ ID NO: 21800 - protein, 9 aa, Homo Sapiens
SLPAIVSIA

SEQ ID NO: 21801 - protein, 9 aa, Homo Sapiens
SLQEKLWAI

SEQ ID NO: 21802 - protein, 9 aa, Homo Sapiens
SLSKITTTV

SEQ ID NO: 21803 - protein, 9 aa, Homo Sapiens
SLSPIYPAA

SEQ ID NO: 21804 - protein, 9 aa, Homo Sapiens
SLVEIRNFL

SEQ ID NO: 21805 - protein, 9 aa, Homo Sapiens
SLWANPKYV

SEQ ID NO: 21806 - protein, 9 aa, Homo Sapiens
SLWEISKQI

SEQ ID NO: 21807 - protein, 9 aa, Homo Sapiens
SLWFKPEEL

SEQ ID NO: 21808 - protein, 9 aa, Homo Sapiens
SLWGQPAEA

SEQ ID NO: 21809 - protein, 9 aa, Homo Sapiens
SLWHNITVV

SEQ ID NO: 21810 - protein, 9 aa, Homo Sapiens
SLWKEVSEL

SEQ ID NO: 21811 - protein, 9 aa, Homo Sapiens
SLWKGLVGI

SEQ ID NO: 21812 - protein, 9 aa, Homo Sapiens
SLWQNEERA

SEQ ID NO: 21813 - protein, 9 aa, Homo Sapiens
SLWSIISKV

SEQ ID NO: 21814 - protein, 9 aa, Homo Sapiens
SLYALHVKA

SEQ ID NO: 21815 - protein, 9 aa, Homo Sapiens
SLYDWHVKL

SEQ ID NO: 21816 - protein, 9 aa, Homo Sapiens
SLYDWNVKL

SEQ ID NO: 21817 - protein, 9 aa, Homo Sapiens
SLYEMVSRV

SEQ ID NO: 21818 - protein, 9 aa, Homo Sapiens
SLYGQFRVV

SEQ ID NO: 21819 - protein, 9 aa, Homo Sapiens
SLYHVESTV

SEQ ID NO: 21820 - protein, 9 aa, Homo Sapiens
SLYPIAVLI

SEQ ID NO: 21821 - protein, 9 aa, Homo Sapiens
SLYSQVHQI

SEQ ID NO: 21822 - protein, 9 aa, Homo Sapiens
SMAAFVPAA

SEQ ID NO: 21823 - protein, 9 aa, Homo Sapiens
SMFEFSEKL

SEQ ID NO: 21824 - protein, 9 aa, Homo Sapiens
SMFLPPTTV

SEQ ID NO: 21825 - protein, 9 aa, Homo Sapiens
SMHEVVENL

SEQ ID NO: 21826 - protein, 9 aa, Homo Sapiens
SMLDDLRNV

SEQ ID NO: 21827 - protein, 9 aa, Homo Sapiens
SMLEPVPEL

SEQ ID NO: 21828 - protein, 9 aa, Homo Sapiens
SMMDRMFAL

SEQ ID NO: 21829 - protein, 9 aa, Homo Sapiens
SMMDVDHQI

SEQ ID NO: 21830 - protein, 9 aa, Homo Sapiens
SMMKNFFFV

SEQ ID NO: 21831 - protein, 9 aa, Homo Sapiens
SMSADVPLV

SEQ ID NO: 21832 - protein, 9 aa, Homo Sapiens
SMWGSAVYL

SEQ ID NO: 21833 - protein, 9 aa, Homo Sapiens
SMYYNGIGV

SEQ ID NO: 21834 - protein, 9 aa, Homo Sapiens
SPPAILVTV

SEQ ID NO: 21835 - protein, 9 aa, Homo Sapiens
SPVVILPAV

SEQ ID NO: 21836 - protein, 9 aa, Homo Sapiens
SQAERLFNL

SEQ ID NO: 21837 - protein, 9 aa, Homo Sapiens
SQVDRLVAL

SEQ ID NO: 21838 - protein, 9 aa, Homo Sapiens
STLKNVPQV

SEQ ID NO: 21839 - protein, 9 aa, Homo Sapiens
STWEPEENI

SEQ ID NO: 21840 - protein, 9 aa, Homo Sapiens
STWRIMTTL

SEQ ID NO: 21841 - protein, 9 aa, Homo Sapiens
STYPIKNEV

SEQ ID NO: 21842 - protein, 9 aa, Homo Sapiens
SVFAGVVGV

SEQ ID NO: 21843 - protein, 9 aa, Homo Sapiens
SVFEGLERL

SEQ ID NO: 21844 - protein, 9 aa, Homo Sapiens
SVHKGFAFV

SEQ ID NO: 21845 - protein, 9 aa, Homo Sapiens
SVITQVFHV

SEQ ID NO: 21846 - protein, 9 aa, Homo Sapiens
SVLGAITSV

SEQ ID NO: 21847 - protein, 9 aa, Homo Sapiens
SVLGALIGV

SEQ ID NO: 21848 - protein, 9 aa, Homo Sapiens
SVLKVSHSV

SEQ ID NO: 21849 - protein, 9 aa, Homo Sapiens
SVLLITQHL

SEQ ID NO: 21850 - protein, 9 aa, Homo Sapiens
SVLLVEHAL

SEQ ID NO: 21851 - protein, 9 aa, Homo Sapiens
SVLVSPPAV

SEQ ID NO: 21852 - protein, 9 aa, Homo Sapiens
SVMDWKDGV

SEQ ID NO: 21853 - protein, 9 aa, Homo Sapiens
SVMELLQGV

SEQ ID NO: 21854 - protein, 9 aa, Homo Sapiens
SVPDTVHHV

SEQ ID NO: 21855 - protein, 9 aa, Homo Sapiens
SVTQIYHAV

SEQ ID NO: 21856 - protein, 9 aa, Homo Sapiens
SVTSHIYQV

SEQ ID NO: 21857 - protein, 9 aa, Homo Sapiens
SVWFGPKEV

SEQ ID NO: 21858 - protein, 9 aa, Homo Sapiens
SVYGKLRKV

SEQ ID NO: 21859 - protein, 9 aa, Homo Sapiens
SVYGSLASV

SEQ ID NO: 21860 - protein, 9 aa, Homo Sapiens
SVYHKPPSA

SEQ ID NO: 21861 - protein, 9 aa, Homo Sapiens
TAPPIATGV

SEQ ID NO: 21862 - protein, 9 aa, Homo Sapiens
TIFDLSEVL

SEQ ID NO: 21863 - protein, 9 aa, Homo Sapiens
TLAAIIEHL

SEQ ID NO: 21864 - protein, 9 aa, Homo Sapiens
TLADLVHHV

SEQ ID NO: 21865 - protein, 9 aa, Homo Sapiens
TLADVLYHV

SEQ ID NO: 21866 - protein, 9 aa, Homo Sapiens
TLAHIHYGV

SEQ ID NO: 21867 - protein, 9 aa, Homo Sapiens
TLCDLYETL

SEQ ID NO: 21868 - protein, 9 aa, Homo Sapiens
TLCDVILMV

SEQ ID NO: 21869 - protein, 9 aa, Homo Sapiens
TLCDVTLRV

SEQ ID NO: 21870 - protein, 9 aa, Homo Sapiens
TLDGSLHAV

SEQ ID NO: 21871 - protein, 9 aa, Homo Sapiens
TLFNVIKSV

SEQ ID NO: 21872 - protein, 9 aa, Homo Sapiens
TLFPSKIGV

SEQ ID NO: 21873 - protein, 9 aa, Homo Sapiens
TLFRITSNA

SEQ ID NO: 21874 - protein, 9 aa, Homo Sapiens
TLGVIPESV

SEQ ID NO: 21875 - protein, 9 aa, Homo Sapiens
TLLKKVWKV

SEQ ID NO: 21876 - protein, 9 aa, Homo Sapiens
TLNEKLFLL

SEQ ID NO: 21877 - protein, 9 aa, Homo Sapiens
TLNEKLTAL

SEQ ID NO: 21878 - protein, 9 aa, Homo Sapiens
TLPPPPSGL

SEQ ID NO: 21879 - protein, 9 aa, Homo Sapiens
TLQDIVYKL

SEQ ID NO: 21880 - protein, 9 aa, Homo Sapiens
TLQEKIHRL

SEQ ID NO: 21881 - protein, 9 aa, Homo Sapiens
TLSDLRVYL

SEQ ID NO: 21882 - protein, 9 aa, Homo Sapiens
TLSERLWGL

SEQ ID NO: 21883 - protein, 9 aa, Homo Sapiens
TLSKIVPHI

SEQ ID NO: 21884 - protein, 9 aa, Homo Sapiens
TLTNIIHNL

SEQ ID NO: 21885 - protein, 9 aa, Homo Sapiens
TLTNVIHNL

SEQ ID NO: 21886 - protein, 9 aa, Homo Sapiens
TLTSKLYSL

SEQ ID NO: 21887 - protein, 9 aa, Homo Sapiens
TLWDIQKDL

SEQ ID NO: 21888 - protein, 9 aa, Homo Sapiens
TLWGGLLRL

SEQ ID NO: 21889 - protein, 9 aa, Homo Sapiens
TLWGIQKEL

SEQ ID NO: 21890 - protein, 9 aa, Homo Sapiens
TLWPEVQKL

SEQ ID NO: 21891 - protein, 9 aa, Homo Sapiens
TLWVDPYEV

SEQ ID NO: 21892 - protein, 9 aa, Homo Sapiens
TLWYVPLSL

SEQ ID NO: 21893 - protein, 9 aa, Homo Sapiens
TLYDIRAEL

SEQ ID NO: 21894 - protein, 9 aa, Homo Sapiens
TLYEAVREV

SEQ ID NO: 21895 - protein, 9 aa, Homo Sapiens
TLYEMKSQV

SEQ ID NO: 21896 - protein, 9 aa, Homo Sapiens
TLYRLANQL

SEQ ID NO: 21897 - protein, 9 aa, Homo Sapiens
TQILSVPKV

SEQ ID NO: 21898 - protein, 9 aa, Homo Sapiens
TTTHITKTV

SEQ ID NO: 21899 - protein, 9 aa, Homo Sapiens
TVADKIHSV

SEQ ID NO: 21900 - protein, 9 aa, Homo Sapiens
TVAQIKAHV

SEQ ID NO: 21901 - protein, 9 aa, Homo Sapiens
TVAQIKATV

SEQ ID NO: 21902 - protein, 9 aa, Homo Sapiens
TVFEHTFHV

SEQ ID NO: 21903 - protein, 9 aa, Homo Sapiens
TVIAKVNNV

SEQ ID NO: 21904 - protein, 9 aa, Homo Sapiens
TVIRDPPSI

SEQ ID NO: 21905 - protein, 9 aa, Homo Sapiens
TVLLIMHTL

SEQ ID NO: 21906 - protein, 9 aa, Homo Sapiens
TVMGKIFAV

SEQ ID NO: 21907 - protein, 9 aa, Homo Sapiens
TVPPPPAAA

SEQ ID NO: 21908 - protein, 9 aa, Homo Sapiens
TVWHPECFV

SEQ ID NO: 21909 - protein, 9 aa, Homo Sapiens
TVWIPEVGV

SEQ ID NO: 21910 - protein, 9 aa, Homo Sapiens
VAFSVQKEV

SEQ ID NO: 21911 - protein, 9 aa, Homo Sapiens
VAPPARVAP

SEQ ID NO: 21912 - protein, 9 aa, Homo Sapiens
VAPPKAHEV

SEQ ID NO: 21913 - protein, 9 aa, Homo Sapiens
VAPPPPTHL

SEQ ID NO: 21914 - protein, 9 aa, Homo Sapiens
VAPPRGPLP

SEQ ID NO: 21915 - protein, 9 aa, Homo Sapiens
VAWEVANKV

SEQ ID NO: 21916 - protein, 9 aa, Homo Sapiens
VCVPSYLEL

SEQ ID NO: 21917 - protein, 9 aa, Homo Sapiens
VEELKPTPE

SEQ ID NO: 21918 - protein, 9 aa, Homo Sapiens
VIAEILRGV

SEQ ID NO: 21919 - protein, 9 aa, Homo Sapiens
VIDGHIYAV

SEQ ID NO: 21920 - protein, 9 aa, Homo Sapiens
VIHNLATYV

SEQ ID NO: 21921 - protein, 9 aa, Homo Sapiens
VIMWQKHYV

SEQ ID NO: 21922 - protein, 9 aa, Homo Sapiens
VIWGKVTRA

SEQ ID NO: 21923 - protein, 9 aa, Homo Sapiens
VIYDVSHNI

SEQ ID NO: 21924 - protein, 9 aa, Homo Sapiens
VIYTLIHYI

SEQ ID NO: 21925 - protein, 9 aa, Homo Sapiens
VLADQVWTL

SEQ ID NO: 21926 - protein, 9 aa, Homo Sapiens
VLAELKEYA

SEQ ID NO: 21927 - protein, 9 aa, Homo Sapiens
VLCELINAL

SEQ ID NO: 21928 - protein, 9 aa, Homo Sapiens
VLCFTPYHV

SEQ ID NO: 21929 - protein, 9 aa, Homo Sapiens
VLDDKLVFV

SEQ ID NO: 21930 - protein, 9 aa, Homo Sapiens
VLDIIKHIV

SEQ ID NO: 21931 - protein, 9 aa, Homo Sapiens
VLDNPTPEM

SEQ ID NO: 21932 - protein, 9 aa, Homo Sapiens
VLDVIHEVL

SEQ ID NO: 21933 - protein, 9 aa, Homo Sapiens
VLFDVTGQV

SEQ ID NO: 21934 - protein, 9 aa, Homo Sapiens
VLFELSKTV

SEQ ID NO: 21935 - protein, 9 aa, Homo Sapiens
VLFGEITRL

SEQ ID NO: 21936 - protein, 9 aa, Homo Sapiens
VLFGLLREV

SEQ ID NO: 21937 - protein, 9 aa, Homo Sapiens
VLFGVETHV

SEQ ID NO: 21938 - protein, 9 aa, Homo Sapiens
VLFLVAWTV

SEQ ID NO: 21939 - protein, 9 aa, Homo Sapiens
VLFNKLTYL

SEQ ID NO: 21940 - protein, 9 aa, Homo Sapiens
VLFPWQARL

SEQ ID NO: 21941 - protein, 9 aa, Homo Sapiens
VLFSSPPQM

SEQ ID NO: 21942 - protein, 9 aa, Homo Sapiens
VLFTGVKEV

SEQ ID NO: 21943 - protein, 9 aa, Homo Sapiens
VLFTITKTV

SEQ ID NO: 21944 - protein, 9 aa, Homo Sapiens
VLHDRIVSV

SEQ ID NO: 21945 - protein, 9 aa, Homo Sapiens
VLHELTFQA

SEQ ID NO: 21946 - protein, 9 aa, Homo Sapiens
VLIPKLPQL

SEQ ID NO: 21947 - protein, 9 aa, Homo Sapiens
VLISKLPYI

SEQ ID NO: 21948 - protein, 9 aa, Homo Sapiens
VLKEIVERV

SEQ ID NO: 21949 - protein, 9 aa, Homo Sapiens
VLLFIEHSV

SEQ ID NO: 21950 - protein, 9 aa, Homo Sapiens
VLLGHIFYV

SEQ ID NO: 21951 - protein, 9 aa, Homo Sapiens
VLLGKVYVV

SEQ ID NO: 21952 - protein, 9 aa, Homo Sapiens
VLLKIVEQI

SEQ ID NO: 21953 - protein, 9 aa, Homo Sapiens
VLLQIVHFL

SEQ ID NO: 21954 - protein, 9 aa, Homo Sapiens
VLLSTIHEL

SEQ ID NO: 21955 - protein, 9 aa, Homo Sapiens
VLMDLKALL

SEQ ID NO: 21956 - protein, 9 aa, Homo Sapiens
VLMDRLPSL

SEQ ID NO: 21957 - protein, 9 aa, Homo Sapiens
VLMEMSYRL

SEQ ID NO: 21958 - protein, 9 aa, Homo Sapiens
VLMENIVYL

SEQ ID NO: 21959 - protein, 9 aa, Homo Sapiens
VLMNQPPQI

SEQ ID NO: 21960 - protein, 9 aa, Homo Sapiens
VLMPWIHEL

SEQ ID NO: 21961 - protein, 9 aa, Homo Sapiens
VLQGKLAEV

SEQ ID NO: 21962 - protein, 9 aa, Homo Sapiens
VLSELLWQV

SEQ ID NO: 21963 - protein, 9 aa, Homo Sapiens
VLSSPLALA

SEQ ID NO: 21964 - protein, 9 aa, Homo Sapiens
VLTESPPSL

SEQ ID NO: 21965 - protein, 9 aa, Homo Sapiens
VLWAGTPMV

SEQ ID NO: 21966 - protein, 9 aa, Homo Sapiens
VLWDLVDRI

SEQ ID NO: 21967 - protein, 9 aa, Homo Sapiens
VLWDRTFSL

SEQ ID NO: 21968 - protein, 9 aa, Homo Sapiens
VLWFKPVEL

SEQ ID NO: 21969 - protein, 9 aa, Homo Sapiens
VLWLPHWGL

SEQ ID NO: 21970 - protein, 9 aa, Homo Sapiens
VLWSVLQQI

SEQ ID NO: 21971 - protein, 9 aa, Homo Sapiens
VLWTLHSEG

SEQ ID NO: 21972 - protein, 9 aa, Homo Sapiens
VLYDQPRHV

SEQ ID NO: 21973 - protein, 9 aa, Homo Sapiens
VLYDWKERL

SEQ ID NO: 21974 - protein, 9 aa, Homo Sapiens
VLYELLQHI

SEQ ID NO: 21975 - protein, 9 aa, Homo Sapiens
VLYENKVAV

SEQ ID NO: 21976 - protein, 9 aa, Homo Sapiens
VLYHVETEV

SEQ ID NO: 21977 - protein, 9 aa, Homo Sapiens
VLYSIAEKV

SEQ ID NO: 21978 - protein, 9 aa, Homo Sapiens
VMADIRELI

SEQ ID NO: 21979 - protein, 9 aa, Homo Sapiens
VMAPRTLVL

SEQ ID NO: 21980 - protein, 9 aa, Homo Sapiens
VMDSKIVQV

SEQ ID NO: 21981 - protein, 9 aa, Homo Sapiens
VMFKEPVEV

SEQ ID NO: 21982 - protein, 9 aa, Homo Sapiens
VMFKITARA

SEQ ID NO: 21983 - protein, 9 aa, Homo Sapiens
VMGDIPAAV

SEQ ID NO: 21984 - protein, 9 aa, Homo Sapiens
VMPHANMNV

SEQ ID NO: 21985 - protein, 9 aa, Homo Sapiens
VMWSPTHPA

SEQ ID NO: 21986 - protein, 9 aa, Homo Sapiens
VMYDLITEL

SEQ ID NO: 21987 - protein, 9 aa, Homo Sapiens
VMYGKVYRI

SEQ ID NO: 21988 - protein, 9 aa, Homo Sapiens
VQTDYVPLL

SEQ ID NO: 21989 - protein, 9 aa, Homo Sapiens
VQWKVVETL

SEQ ID NO: 21990 - protein, 9 aa, Homo Sapiens
VSAHITEQL

SEQ ID NO: 21991 - protein, 9 aa, Homo Sapiens
VTAEVKHNI

SEQ ID NO: 21992 - protein, 9 aa, Homo Sapiens
VTFVPVSKV

SEQ ID NO: 21993 - protein, 9 aa, Homo Sapiens
VTIKKDVDG

SEQ ID NO: 21994 - protein, 9 aa, Homo Sapiens
VVAAIAISE

SEQ ID NO: 21995 - protein, 9 aa, Homo Sapiens
VVAEFVPLI

SEQ ID NO: 21996 - protein, 9 aa, Homo Sapiens
VVCGLIFRL

SEQ ID NO: 21997 - protein, 9 aa, Homo Sapiens
VVDIIRVNV

SEQ ID NO: 21998 - protein, 9 aa, Homo Sapiens
VVFRLQEFI

SEQ ID NO: 21999 - protein, 9 aa, Homo Sapiens
VVGHITEGV

SEQ ID NO: 22000 - protein, 9 aa, Homo Sapiens
VVLPAPPAV

SEQ ID NO: 22001 - protein, 9 aa, Homo Sapiens
VVMNVVHQL

SEQ ID NO: 22002 - protein, 9 aa, Homo Sapiens
VVWMVPENV

SEQ ID NO: 22003 - protein, 9 aa, Homo Sapiens
VVWPVPENI

SEQ ID NO: 22004 - protein, 9 aa, Homo Sapiens
WKPVGDLLI

SEQ ID NO: 22005 - protein, 9 aa, Homo Sapiens
WLAEKLPTL

SEQ ID NO: 22006 - protein, 9 aa, Homo Sapiens
WLVDHVYAI

SEQ ID NO: 22007 - protein, 9 aa, Homo Sapiens
WLWPFKETV

SEQ ID NO: 22008 - protein, 9 aa, Homo Sapiens
YAAELIERV

SEQ ID NO: 22009 - protein, 9 aa, Homo Sapiens
YAFNMKATV

SEQ ID NO: 22010 - protein, 9 aa, Homo Sapiens
YALYVRDTL

SEQ ID NO: 22011 - protein, 9 aa, Homo Sapiens
YAWEIKDFL

SEQ ID NO: 22012 - protein, 9 aa, Homo Sapiens
YAYDGKDYI

SEQ ID NO: 22013 - protein, 9 aa, Homo Sapiens
YAYETKDAL

SEQ ID NO: 22014 - protein, 9 aa, Homo Sapiens
YGPPVRTEY

SEQ ID NO: 22015 - protein, 9 aa, Homo Sapiens
YIAKITEGV

SEQ ID NO: 22016 - protein, 9 aa, Homo Sapiens
YIAPLKALV

SEQ ID NO: 22017 - protein, 9 aa, Homo Sapiens
YIASLPFQV

SEQ ID NO: 22018 - protein, 9 aa, Homo Sapiens
YIFDNCHEL

SEQ ID NO: 22019 - protein, 9 aa, Homo Sapiens
YIFQPQQSV

SEQ ID NO: 22020 - protein, 9 aa, Homo Sapiens
YIFSVVENL

SEQ ID NO: 22021 - protein, 9 aa, Homo Sapiens
YIIVPPLTL

SEQ ID NO: 22022 - protein, 9 aa, Homo Sapiens
YILLPRIIE

SEQ ID NO: 22023 - protein, 9 aa, Homo Sapiens
YLADIFTKL

SEQ ID NO: 22024 - protein, 9 aa, Homo Sapiens
YLADLYHFV

SEQ ID NO: 22025 - protein, 9 aa, Homo Sapiens
YLADVTNAL

SEQ ID NO: 22026 - protein, 9 aa, Homo Sapiens
YLAGLHANI

SEQ ID NO: 22027 - protein, 9 aa, Homo Sapiens
YLAHLAHHL

SEQ ID NO: 22028 - protein, 9 aa, Homo Sapiens
YLAKHIENI

SEQ ID NO: 22029 - protein, 9 aa, Homo Sapiens
YLAPFLRNV

SEQ ID NO: 22030 - protein, 9 aa, Homo Sapiens
YLATLTEKM

SEQ ID NO: 22031 - protein, 9 aa, Homo Sapiens
YLDAIRSGL

SEQ ID NO: 22032 - protein, 9 aa, Homo Sapiens
YLDEIVKEV

SEQ ID NO: 22033 - protein, 9 aa, Homo Sapiens
YLDKTFYNL

SEQ ID NO: 22034 - protein, 9 aa, Homo Sapiens
YLDPAQRGV

SEQ ID NO: 22035 - protein, 9 aa, Homo Sapiens
YLDQIRQTI

SEQ ID NO: 22036 - protein, 9 aa, Homo Sapiens
YLDTINRSV

SEQ ID NO: 22037 - protein, 9 aa, Homo Sapiens
YLDVVQSNV

SEQ ID NO: 22038 - protein, 9 aa, Homo Sapiens
YLFALQSHL

SEQ ID NO: 22039 - protein, 9 aa, Homo Sapiens
YLFDLPLKV

SEQ ID NO: 22040 - protein, 9 aa, Homo Sapiens
YLFERIKEL

SEQ ID NO: 22041 - protein, 9 aa, Homo Sapiens
YLFILKNQV

SEQ ID NO: 22042 - protein, 9 aa, Homo Sapiens
YLFIVKNEL

SEQ ID NO: 22043 - protein, 9 aa, Homo Sapiens
YLFKCPQSV

SEQ ID NO: 22044 - protein, 9 aa, Homo Sapiens
YLFNSVVNV

SEQ ID NO: 22045 - protein, 9 aa, Homo Sapiens
YLFREPATI

SEQ ID NO: 22046 - protein, 9 aa, Homo Sapiens
YLFSTKTHL

SEQ ID NO: 22047 - protein, 9 aa, Homo Sapiens
YLFTFLNHL

SEQ ID NO: 22048 - protein, 9 aa, Homo Sapiens
YLFTIINSL

SEQ ID NO: 22049 - protein, 9 aa, Homo Sapiens
YLFTSPQRV

SEQ ID NO: 22050 - protein, 9 aa, Homo Sapiens
YLGNINPQM

SEQ ID NO: 22051 - protein, 9 aa, Homo Sapiens
YLGPHIASV

SEQ ID NO: 22052 - protein, 9 aa, Homo Sapiens
YLHEFRDKL

SEQ ID NO: 22053 - protein, 9 aa, Homo Sapiens
YLHNQGIGV

SEQ ID NO: 22054 - protein, 9 aa, Homo Sapiens
YLHSQVVSV

SEQ ID NO: 22055 - protein, 9 aa, Homo Sapiens
YLIELIDRV

SEQ ID NO: 22056 - protein, 9 aa, Homo Sapiens
YLIPLLERL

SEQ ID NO: 22057 - protein, 9 aa, Homo Sapiens
YLITLLEHL

SEQ ID NO: 22058 - protein, 9 aa, Homo Sapiens
YLLDHFLSM

SEQ ID NO: 22059 - protein, 9 aa, Homo Sapiens
YLLDLHSYL

SEQ ID NO: 22060 - protein, 9 aa, Homo Sapiens
YLLDRLPEM

SEQ ID NO: 22061 - protein, 9 aa, Homo Sapiens
YLLEKFVAV

SEQ ID NO: 22062 - protein, 9 aa, Homo Sapiens
YLLESVNKL

SEQ ID NO: 22063 - protein, 9 aa, Homo Sapiens
YLLKINGKV

SEQ ID NO: 22064 - protein, 9 aa, Homo Sapiens
YLLPAIVHI

SEQ ID NO: 22065 - protein, 9 aa, Homo Sapiens
YLMEVTHDL

SEQ ID NO: 22066 - protein, 9 aa, Homo Sapiens
YLNCIVEKV

SEQ ID NO: 22067 - protein, 9 aa, Homo Sapiens
YLNDGLWHM

SEQ ID NO: 22068 - protein, 9 aa, Homo Sapiens
YLNEIKDSV

SEQ ID NO: 22069 - protein, 9 aa, Homo Sapiens
YLNHLIQGL

SEQ ID NO: 22070 - protein, 9 aa, Homo Sapiens
YLNKHIQKV

SEQ ID NO: 22071 - protein, 9 aa, Homo Sapiens
YLNQHIEHV

SEQ ID NO: 22072 - protein, 9 aa, Homo Sapiens
YLPHAPPFA

SEQ ID NO: 22073 - protein, 9 aa, Homo Sapiens
YLPYPIHQV

SEQ ID NO: 22074 - protein, 9 aa, Homo Sapiens
YLQAHTQSV

SEQ ID NO: 22075 - protein, 9 aa, Homo Sapiens
YLQDTMNHV

SEQ ID NO: 22076 - protein, 9 aa, Homo Sapiens
YLQDVIMQV

SEQ ID NO: 22077 - protein, 9 aa, Homo Sapiens
YLQEHAQEV

SEQ ID NO: 22078 - protein, 9 aa, Homo Sapiens
YLQEKLHAL

SEQ ID NO: 22079 - protein, 9 aa, Homo Sapiens
YLQNWSHVL

SEQ ID NO: 22080 - protein, 9 aa, Homo Sapiens
YLQQVNHKL

SEQ ID NO: 22081 - protein, 9 aa, Homo Sapiens
YLRSMIPHL

SEQ ID NO: 22082 - protein, 9 aa, Homo Sapiens
YLSDNVHLV

SEQ ID NO: 22083 - protein, 9 aa, Homo Sapiens
YLSDPCPGL

SEQ ID NO: 22084 - protein, 9 aa, Homo Sapiens
YLSEEVQAV

SEQ ID NO: 22085 - protein, 9 aa, Homo Sapiens
YLSELSEHV

SEQ ID NO: 22086 - protein, 9 aa, Homo Sapiens
YLSKIIPAL

SEQ ID NO: 22087 - protein, 9 aa, Homo Sapiens
YLSPKLWAL

SEQ ID NO: 22088 - protein, 9 aa, Homo Sapiens
YLTDRVMTV

SEQ ID NO: 22089 - protein, 9 aa, Homo Sapiens
YLVEDIQHI

SEQ ID NO: 22090 - protein, 9 aa, Homo Sapiens
YLWQGVRVA

SEQ ID NO: 22091 - protein, 9 aa, Homo Sapiens
YLWSRVEKL

SEQ ID NO: 22092 - protein, 9 aa, Homo Sapiens
YLYDLNHTL

SEQ ID NO: 22093 - protein, 9 aa, Homo Sapiens
YLYDRIRKA

SEQ ID NO: 22094 - protein, 9 aa, Homo Sapiens
YLYDRLLRI

SEQ ID NO: 22095 - protein, 9 aa, Homo Sapiens
YLYDVEVKC

SEQ ID NO: 22096 - protein, 9 aa, Homo Sapiens
YLYPDITRL

SEQ ID NO: 22097 - protein, 9 aa, Homo Sapiens
YLYQILQGI

SEQ ID NO: 22098 - protein, 9 aa, Homo Sapiens
YMADRLLGV

SEQ ID NO: 22099 - protein, 9 aa, Homo Sapiens
YMAELIERL

SEQ ID NO: 22100 - protein, 9 aa, Homo Sapiens
YMAPEVVEA

SEQ ID NO: 22101 - protein, 9 aa, Homo Sapiens
YMDAPKAAL

SEQ ID NO: 22102 - protein, 9 aa, Homo Sapiens
YMDVVKERI

SEQ ID NO: 22103 - protein, 9 aa, Homo Sapiens
YMEEIYHRI

SEQ ID NO: 22104 - protein, 9 aa, Homo Sapiens
YMFEAREFL

SEQ ID NO: 22105 - protein, 9 aa, Homo Sapiens
YMHFLENQV

SEQ ID NO: 22106 - protein, 9 aa, Homo Sapiens
YMIAHITGL

SEQ ID NO: 22107 - protein, 9 aa, Homo Sapiens
YMKDIENYI

SEQ ID NO: 22108 - protein, 9 aa, Homo Sapiens
YMLDLQKQL

SEQ ID NO: 22109 - protein, 9 aa, Homo Sapiens
YMLEHVITL

SEQ ID NO: 22110 - protein, 9 aa, Homo Sapiens
YMMPVNSEV

SEQ ID NO: 22111 - protein, 9 aa, Homo Sapiens
YMNHIMVSV

SEQ ID NO: 22112 - protein, 9 aa, Homo Sapiens
YMPKRGLEV

SEQ ID NO: 22113 - protein, 9 aa, Homo Sapiens
YMPPTSEAA

SEQ ID NO: 22114 - protein, 9 aa, Homo Sapiens
YMSDSFINV

SEQ ID NO: 22115 - protein, 9 aa, Homo Sapiens
YQVGQLYSV

SEQ ID NO: 22116 - protein, 9 aa, Homo Sapiens
YQYPVIIHL

SEQ ID NO: 22117 - protein, 9 aa, Homo Sapiens
YTAEIKQNL

SEQ ID NO: 22118 - protein, 9 aa, Homo Sapiens
YTFDPVTKV

SEQ ID NO: 22119 - protein, 9 aa, Homo Sapiens
YTFNVDQKL

SEQ ID NO: 22120 - protein, 9 aa, Homo Sapiens
YTFPLAEKV

SEQ ID NO: 22121 - protein, 9 aa, Homo Sapiens
YTFPLRINL

SEQ ID NO: 22122 - protein, 9 aa, Homo Sapiens
YTPPAGAKV

SEQ ID NO: 22123 - protein, 9 aa, Homo Sapiens
YTPPPPPTA

SEQ ID NO: 22124 - protein, 9 aa, Homo Sapiens
YVFPGVTRL

SEQ ID NO: 22125 - protein, 9 aa, Homo Sapiens
YVHMVTHFI

SEQ ID NO: 22126 - protein, 9 aa, Homo Sapiens
YVLDLAAKV

SEQ ID NO: 22127 - protein, 9 aa, Homo Sapiens
YVLEGLKSV

SEQ ID NO: 22128 - protein, 9 aa, Homo Sapiens
YVSEILEKV

SEQ ID NO: 22129 - protein, 9 aa, Homo Sapiens
YVTDVLYRV

SEQ ID NO: 22130 - protein, 9 aa, Homo Sapiens
YVWDIKSIM

SEQ ID NO: 22131 - protein, 9 aa, Homo Sapiens
YVYEFRDKL

SEQ ID NO: 22132 - protein, 9 aa, Homo Sapiens
YVYEMRDKL

SEQ ID NO: 22133 - protein, 9 aa, Homo Sapiens
YVYEYLLHV

SEQ ID NO: 22134 - protein, 10 aa, Homo Sapiens
AIIEARGVSV

SEQ ID NO: 22135 - protein, 10 aa, Homo Sapiens
ALAEPAWLHI

SEQ ID NO: 22136 - protein, 10 aa, Homo Sapiens
ALASLKKYGV

SEQ ID NO: 22137 - protein, 10 aa, Homo Sapiens
ALCEENMRGV

SEQ ID NO: 22138 - protein, 10 aa, Homo Sapiens
ALFPAPLAQI

SEQ ID NO: 22139 - protein, 10 aa, Homo Sapiens
ALLDVTPKAV

SEQ ID NO: 22140 - protein, 10 aa, Homo Sapiens
ALLEKGITEA

SEQ ID NO: 22141 - protein, 10 aa, Homo Sapiens
ALLKIEGVYA

SEQ ID NO: 22142 - protein, 10 aa, Homo Sapiens
ALMAHAMEEV

SEQ ID NO: 22143 - protein, 10 aa, Homo Sapiens
ALMEVKMKEM

SEQ ID NO: 22144 - protein, 10 aa, Homo Sapiens
ALPAELLEAL

SEQ ID NO: 22145 - protein, 10 aa, Homo Sapiens
ALSKEGIVAL

SEQ ID NO: 22146 - protein, 10 aa, Homo Sapiens
ALWDLRNLKL

SEQ ID NO: 22147 - protein, 10 aa, Homo Sapiens
ALWDPGPEAA

SEQ ID NO: 22148 - protein, 10 aa, Homo Sapiens
ALWHVPEHAV

SEQ ID NO: 22149 - protein, 10 aa, Homo Sapiens
ALWKNEGFFL

SEQ ID NO: 22150 - protein, 10 aa, Homo Sapiens
ALYDICFRTL

SEQ ID NO: 22151 - protein, 10 aa, Homo Sapiens
ALYPGQLVQL

SEQ ID NO: 22152 - protein, 10 aa, Homo Sapiens
AMFDHIPVGV

SEQ ID NO: 22153 - protein, 10 aa, Homo Sapiens
AMFPDTIPRV

SEQ ID NO: 22154 - protein, 10 aa, Homo Sapiens
AMIAVVPGYI

SEQ ID NO: 22155 - protein, 10 aa, Homo Sapiens
AMPPPPPQGV

SEQ ID NO: 22156 - protein, 10 aa, Homo Sapiens
AQYENPPHIY

SEQ ID NO: 22157 - protein, 10 aa, Homo Sapiens
AVGGIANATI

SEQ ID NO: 22158 - protein, 10 aa, Homo Sapiens
AVPPAPTATV

SEQ ID NO: 22159 - protein, 10 aa, Homo Sapiens
AVWAKGIRNV

SEQ ID NO: 22160 - protein, 10 aa, Homo Sapiens
CLMGKGMKRV

SEQ ID NO: 22161 - protein, 10 aa, Homo Sapiens
FICDYELHEL

SEQ ID NO: 22162 - protein, 10 aa, Homo Sapiens
FIFEKKLAQA

SEQ ID NO: 22163 - protein, 10 aa, Homo Sapiens
FIMEGTLTRV

SEQ ID NO: 22164 - protein, 10 aa, Homo Sapiens
FLADPSAFVA

SEQ ID NO: 22165 - protein, 10 aa, Homo Sapiens
FLCDVTMKSV

SEQ ID NO: 22166 - protein, 10 aa, Homo Sapiens
FLCPFHLSVA

SEQ ID NO: 22167 - protein, 10 aa, Homo Sapiens
FLDPNNIPKA

SEQ ID NO: 22168 - protein, 10 aa, Homo Sapiens
FLFDEEMEQM

SEQ ID NO: 22169 - protein, 10 aa, Homo Sapiens
FLFDGSPTYV

SEQ ID NO: 22170 - protein, 10 aa, Homo Sapiens
FLFDPKKLSV

SEQ ID NO: 22171 - protein, 10 aa, Homo Sapiens
FLHDLKETNI

SEQ ID NO: 22172 - protein, 10 aa, Homo Sapiens
FLHETGGAMV

SEQ ID NO: 22173 - protein, 10 aa, Homo Sapiens
FLLDGFPRTV

SEQ ID NO: 22174 - protein, 10 aa, Homo Sapiens
FLLEPGNLEV

SEQ ID NO: 22175 - protein, 10 aa, Homo Sapiens
FLLNLQNCHL

SEQ ID NO: 22176 - protein, 10 aa, Homo Sapiens
FLLPDGLVRL

SEQ ID NO: 22177 - protein, 10 aa, Homo Sapiens
FLLPHPGLQV

SEQ ID NO: 22178 - protein, 10 aa, Homo Sapiens
FLLPIKTVGV

SEQ ID NO: 22179 - protein, 10 aa, Homo Sapiens
FLLPSEVPAL

SEQ ID NO: 22180 - protein, 10 aa, Homo Sapiens
FLLPTGLSSL

SEQ ID NO: 22181 - protein, 10 aa, Homo Sapiens
FLNDPRRLNV

SEQ ID NO: 22182 - protein, 10 aa, Homo Sapiens
FLWERPTLLV

SEQ ID NO: 22183 - protein, 10 aa, Homo Sapiens
FLYKEKLVSV

SEQ ID NO: 22184 - protein, 10 aa, Homo Sapiens
FMDPQKMPYL

SEQ ID NO: 22185 - protein, 10 aa, Homo Sapiens
FMFDEKLVTV

SEQ ID NO: 22186 - protein, 10 aa, Homo Sapiens
FMQDPMEVFV

SEQ ID NO: 22187 - protein, 10 aa, Homo Sapiens
FQADLSNLHL

SEQ ID NO: 22188 - protein, 10 aa, Homo Sapiens
FQAGSGIYHV

SEQ ID NO: 22189 - protein, 10 aa, Homo Sapiens
FVADEGICYL

SEQ ID NO: 22190 - protein, 10 aa, Homo Sapiens
GLAGVKIAEV

SEQ ID NO: 22191 - protein, 10 aa, Homo Sapiens
GLDDIKDLKV

SEQ ID NO: 22192 - protein, 10 aa, Homo Sapiens
GLFGKELHKV

SEQ ID NO: 22193 - protein, 10 aa, Homo Sapiens
GLIGVGLINV

SEQ ID NO: 22194 - protein, 10 aa, Homo Sapiens
GLWHGMFANV

SEQ ID NO: 22195 - protein, 10 aa, Homo Sapiens
GLWSGPLPRV

SEQ ID NO: 22196 - protein, 10 aa, Homo Sapiens
HLPPVRLAEL

SEQ ID NO: 22197 - protein, 10 aa, Homo Sapiens
HLWDPENSVL

SEQ ID NO: 22198 - protein, 10 aa, Homo Sapiens
HVFDHPWETV

SEQ ID NO: 22199 - protein, 10 aa, Homo Sapiens
IIAEPGRYYV

SEQ ID NO: 22200 - protein, 10 aa, Homo Sapiens
ILAPCKLETV

SEQ ID NO: 22201 - protein, 10 aa, Homo Sapiens
ILFLIAGKIV

SEQ ID NO: 22202 - protein, 10 aa, Homo Sapiens
ILNEFPGHGL

SEQ ID NO: 22203 - protein, 10 aa, Homo Sapiens
ILPSYIPVRV

SEQ ID NO: 22204 - protein, 10 aa, Homo Sapiens
ILQDLTFVHL

SEQ ID NO: 22205 - protein, 10 aa, Homo Sapiens
ILQSKEPAYV

SEQ ID NO: 22206 - protein, 10 aa, Homo Sapiens
ILWSERPTKV

SEQ ID NO: 22207 - protein, 10 aa, Homo Sapiens
ILYDKDHYKL

SEQ ID NO: 22208 - protein, 10 aa, Homo Sapiens
ILYTLPKLGV

SEQ ID NO: 22209 - protein, 10 aa, Homo Sapiens
IMPAFIFEHI

SEQ ID NO: 22210 - protein, 10 aa, Homo Sapiens
KAEGVLLDYL

SEQ ID NO: 22211 - protein, 10 aa, Homo Sapiens
KAPEVPTEGV

SEQ ID NO: 22212 - protein, 10 aa, Homo Sapiens
KICDFGLARV

SEQ ID NO: 22213 - protein, 10 aa, Homo Sapiens
KIFSGVFVKV

SEQ ID NO: 22214 - protein, 10 aa, Homo Sapiens
KIGPITPLEF

SEQ ID NO: 22215 - protein, 10 aa, Homo Sapiens
KILDIGLAYI

SEQ ID NO: 22216 - protein, 10 aa, Homo Sapiens
KIMDLIGIQT

SEQ ID NO: 22217 - protein, 10 aa, Homo Sapiens
KIWDVSVNSV

SEQ ID NO: 22218 - protein, 10 aa, Homo Sapiens
KLFDIFSQQV

SEQ ID NO: 22219 - protein, 10 aa, Homo Sapiens
KLFEGLKFFL

SEQ ID NO: 22220 - protein, 10 aa, Homo Sapiens
KLFPDTPLAL

SEQ ID NO: 22221 - protein, 10 aa, Homo Sapiens
KLHDFGYRGV

SEQ ID NO: 22222 - protein, 10 aa, Homo Sapiens
KLIQLPVVYV

SEQ ID NO: 22223 - protein, 10 aa, Homo Sapiens
KLLDEAIQAV

SEQ ID NO: 22224 - protein, 10 aa, Homo Sapiens
KLLDISELDM

SEQ ID NO: 22225 - protein, 10 aa, Homo Sapiens
KLLDPEDISV

SEQ ID NO: 22226 - protein, 10 aa, Homo Sapiens
KLLEGTIVNV

SEQ ID NO: 22227 - protein, 10 aa, Homo Sapiens
KLLEPVPVSV

SEQ ID NO: 22228 - protein, 10 aa, Homo Sapiens
KLMALGPIRL

SEQ ID NO: 22229 - protein, 10 aa, Homo Sapiens
KLMDLDVEQL

SEQ ID NO: 22230 - protein, 10 aa, Homo Sapiens
KLMDLRNEYL

SEQ ID NO: 22231 - protein, 10 aa, Homo Sapiens
KLMDVGLIAI

SEQ ID NO: 22232 - protein, 10 aa, Homo Sapiens
KLMSLGDIRL

SEQ ID NO: 22233 - protein, 10 aa, Homo Sapiens
KLPAEPPALL

SEQ ID NO: 22234 - protein, 10 aa, Homo Sapiens
KLQDAEIARL

SEQ ID NO: 22235 - protein, 10 aa, Homo Sapiens
KLQDLTDVQI

SEQ ID NO: 22236 - protein, 10 aa, Homo Sapiens
KLQEVGQVSV

SEQ ID NO: 22237 - protein, 10 aa, Homo Sapiens
KLTEMRGIYA

SEQ ID NO: 22238 - protein, 10 aa, Homo Sapiens
KLVELDATGV

SEQ ID NO: 22239 - protein, 10 aa, Homo Sapiens
KLWALPQCQL

SEQ ID NO: 22240 - protein, 10 aa, Homo Sapiens
KLWDIINVNI

SEQ ID NO: 22241 - protein, 10 aa, Homo Sapiens
KLWDIRDGMC

SEQ ID NO: 22242 - protein, 10 aa, Homo Sapiens
KLWDISEVMV

SEQ ID NO: 22243 - protein, 10 aa, Homo Sapiens
KLWDVRDSMC

SEQ ID NO: 22244 - protein, 10 aa, Homo Sapiens
KLWEMDNMLI

SEQ ID NO: 22245 - protein, 10 aa, Homo Sapiens
KLWPLPKALL

SEQ ID NO: 22246 - protein, 10 aa, Homo Sapiens
KLYDIDVAKV

SEQ ID NO: 22247 - protein, 10 aa, Homo Sapiens
KLYDIEQQQI

SEQ ID NO: 22248 - protein, 10 aa, Homo Sapiens
KLYEGKTKEV

SEQ ID NO: 22249 - protein, 10 aa, Homo Sapiens
KLYEKKLLKL

SEQ ID NO: 22250 - protein, 10 aa, Homo Sapiens
KLYNPENIYL

SEQ ID NO: 22251 - protein, 10 aa, Homo Sapiens
KMADIGGHAI

SEQ ID NO: 22252 - protein, 10 aa, Homo Sapiens
KMWEEAISLC

SEQ ID NO: 22253 - protein, 10 aa, Homo Sapiens
KMWENRQNLL

SEQ ID NO: 22254 - protein, 10 aa, Homo Sapiens
KMYEEFLSKV

SEQ ID NO: 22255 - protein, 10 aa, Homo Sapiens
KTLELPHVFV

SEQ ID NO: 22256 - protein, 10 aa, Homo Sapiens
KVADPTPFHI

SEQ ID NO: 22257 - protein, 10 aa, Homo Sapiens
KVARLDNIFL

SEQ ID NO: 22258 - protein, 10 aa, Homo Sapiens
KVFDPVPVGV

SEQ ID NO: 22259 - protein, 10 aa, Homo Sapiens
KVGSFKFIYV

SEQ ID NO: 22260 - protein, 10 aa, Homo Sapiens
KVWDIVGTEL

SEQ ID NO: 22261 - protein, 10 aa, Homo Sapiens
KVWVDGIQRV

SEQ ID NO: 22262 - protein, 10 aa, Homo Sapiens
LANSDPKLAL

SEQ ID NO: 22263 - protein, 10 aa, Homo Sapiens
LAPPPPPAAA

SEQ ID NO: 22264 - protein, 10 aa, Homo Sapiens
LFLHAGIVLP

SEQ ID NO: 22265 - protein, 10 aa, Homo Sapiens
LLDPSTPVHI

SEQ ID NO: 22266 - protein, 10 aa, Homo Sapiens
LLIFTEGAAV

SEQ ID NO: 22267 - protein, 10 aa, Homo Sapiens
LLLDVPTAAV

SEQ ID NO: 22268 - protein, 10 aa, Homo Sapiens
LLLDVTPLSL

SEQ ID NO: 22269 - protein, 10 aa, Homo Sapiens
LLLPFTTTSL

SEQ ID NO: 22270 - protein, 10 aa, Homo Sapiens
LLLPPPPCPA

SEQ ID NO: 22271 - protein, 10 aa, Homo Sapiens
LLLSAEPVPA

SEQ ID NO: 22272 - protein, 10 aa, Homo Sapiens
LLPDQPPYHL

SEQ ID NO: 22273 - protein, 10 aa, Homo Sapiens
LLSAAEPVPA

SEQ ID NO: 22274 - protein, 10 aa, Homo Sapiens
LLWAPAAVRA

SEQ ID NO: 22275 - protein, 10 aa, Homo Sapiens
LLWELVTREV

SEQ ID NO: 22276 - protein, 10 aa, Homo Sapiens
LLWQVIKIGL

SEQ ID NO: 22277 - protein, 10 aa, Homo Sapiens
LMADLEGLHL

SEQ ID NO: 22278 - protein, 10 aa, Homo Sapiens
LMAEMGVHSV

SEQ ID NO: 22279 - protein, 10 aa, Homo Sapiens
LMDPNSPERV

SEQ ID NO: 22280 - protein, 10 aa, Homo Sapiens
LMYPYIFHVL

SEQ ID NO: 22281 - protein, 10 aa, Homo Sapiens
LTFRDPLALL

SEQ ID NO: 22282 - protein, 10 aa, Homo Sapiens
LTWDVKDTLL

SEQ ID NO: 22283 - protein, 10 aa, Homo Sapiens
MLLEIPYMAA

SEQ ID NO: 22284 - protein, 10 aa, Homo Sapiens
MQAERIFSEV

SEQ ID NO: 22285 - protein, 10 aa, Homo Sapiens
MVWEIPDGGL

SEQ ID NO: 22286 - protein, 10 aa, Homo Sapiens
NIPEPVVIGI

SEQ ID NO: 22287 - protein, 10 aa, Homo Sapiens
NLAEPVWKQL

SEQ ID NO: 22288 - protein, 10 aa, Homo Sapiens
NLFDLGGQYL

SEQ ID NO: 22289 - protein, 10 aa, Homo Sapiens
NLQDLARIYI

SEQ ID NO: 22290 - protein, 10 aa, Homo Sapiens
PKIVKWDRDM

SEQ ID NO: 22291 - protein, 10 aa, Homo Sapiens
QLNELRQLGG

SEQ ID NO: 22292 - protein, 10 aa, Homo Sapiens
QLWNKPLVGV

SEQ ID NO: 22293 - protein, 10 aa, Homo Sapiens
QMPTLPPPSV

SEQ ID NO: 22294 - protein, 10 aa, Homo Sapiens
QVFPGLLERV

SEQ ID NO: 22295 - protein, 10 aa, Homo Sapiens
RIWNLEGVQT

SEQ ID NO: 22296 - protein, 10 aa, Homo Sapiens
RLAQEGIYTL

SEQ ID NO: 22297 - protein, 10 aa, Homo Sapiens
RLDELGGVYL

SEQ ID NO: 22298 - protein, 10 aa, Homo Sapiens
RLFDMSGVRL

SEQ ID NO: 22299 - protein, 10 aa, Homo Sapiens
RLISQIVSSI

SEQ ID NO: 22300 - protein, 10 aa, Homo Sapiens
RLLDLENIQI

SEQ ID NO: 22301 - protein, 10 aa, Homo Sapiens
RLLEGYEIYV

SEQ ID NO: 22302 - protein, 10 aa, Homo Sapiens
RLMDQNLKCL

SEQ ID NO: 22303 - protein, 10 aa, Homo Sapiens
RLMNLPLHSV

SEQ ID NO: 22304 - protein, 10 aa, Homo Sapiens
RLPDDDPTAV

SEQ ID NO: 22305 - protein, 10 aa, Homo Sapiens
RLPEHCIEYV

SEQ ID NO: 22306 - protein, 10 aa, Homo Sapiens
RLQEDPPAGV

SEQ ID NO: 22307 - protein, 10 aa, Homo Sapiens
RLQEDPPVGV

SEQ ID NO: 22308 - protein, 10 aa, Homo Sapiens
RLSEFIPAVF

SEQ ID NO: 22309 - protein, 10 aa, Homo Sapiens
RLWDVPLHHL

SEQ ID NO: 22310 - protein, 10 aa, Homo Sapiens
RLYDGLFKVI

SEQ ID NO: 22311 - protein, 10 aa, Homo Sapiens
RLYPEGLAQL

SEQ ID NO: 22312 - protein, 10 aa, Homo Sapiens
RLYPWGVVEV

SEQ ID NO: 22313 - protein, 10 aa, Homo Sapiens
RMFDGKFVVA

SEQ ID NO: 22314 - protein, 10 aa, Homo Sapiens
RMFDIVGTHL

SEQ ID NO: 22315 - protein, 10 aa, Homo Sapiens
RMIKEKLCYV

SEQ ID NO: 22316 - protein, 10 aa, Homo Sapiens
RMYPFQIHSI

SEQ ID NO: 22317 - protein, 10 aa, Homo Sapiens
RQPDSGISSI

SEQ ID NO: 22318 - protein, 10 aa, Homo Sapiens
RTWIEGLTGL

SEQ ID NO: 22319 - protein, 10 aa, Homo Sapiens
RVAQLEQVYI

SEQ ID NO: 22320 - protein, 10 aa, Homo Sapiens
RVMELFFTVH

SEQ ID NO: 22321 - protein, 10 aa, Homo Sapiens
SFGSLAPAPL

SEQ ID NO: 22322 - protein, 10 aa, Homo Sapiens
SIYPLHDVFV

SEQ ID NO: 22323 - protein, 10 aa, Homo Sapiens
SLADLQNDEV

SEQ ID NO: 22324 - protein, 10 aa, Homo Sapiens
SLAELKGFEV

SEQ ID NO: 22325 - protein, 10 aa, Homo Sapiens
SLEGIPLAQV

SEQ ID NO: 22326 - protein, 10 aa, Homo Sapiens
SLFEKGLKNV

SEQ ID NO: 22327 - protein, 10 aa, Homo Sapiens
SLFPGKLEVV

SEQ ID NO: 22328 - protein, 10 aa, Homo Sapiens
SLINVGLISV

SEQ ID NO: 22329 - protein, 10 aa, Homo Sapiens
SLIPEGPPQV

SEQ ID NO: 22330 - protein, 10 aa, Homo Sapiens
SLLDRFLATV

SEQ ID NO: 22331 - protein, 10 aa, Homo Sapiens
SLLPEGPPAI

SEQ ID NO: 22332 - protein, 10 aa, Homo Sapiens
SLPDFGISYV

SEQ ID NO: 22333 - protein, 10 aa, Homo Sapiens
SLYSIRKQYV

SEQ ID NO: 22334 - protein, 10 aa, Homo Sapiens
SMIDPPRAAV

SEQ ID NO: 22335 - protein, 10 aa, Homo Sapiens
SVAEITNACF

SEQ ID NO: 22336 - protein, 10 aa, Homo Sapiens
TAWELPKTYV

SEQ ID NO: 22337 - protein, 10 aa, Homo Sapiens
TLMDMRLSQV

SEQ ID NO: 22338 - protein, 10 aa, Homo Sapiens
TLMNLGGLAV

SEQ ID NO: 22339 - protein, 10 aa, Homo Sapiens
TLQCLEGIHL

SEQ ID NO: 22340 - protein, 10 aa, Homo Sapiens
TLWEIAKAEV

SEQ ID NO: 22341 - protein, 10 aa, Homo Sapiens
TLYERGFENI

SEQ ID NO: 22342 - protein, 10 aa, Homo Sapiens
TVMDSKIVQV

SEQ ID NO: 22343 - protein, 10 aa, Homo Sapiens
TVYGGYLCSV

SEQ ID NO: 22344 - protein, 10 aa, Homo Sapiens
VAPPPPPVEV

SEQ ID NO: 22345 - protein, 10 aa, Homo Sapiens
VICDLKYILI

SEQ ID NO: 22346 - protein, 10 aa, Homo Sapiens
VIWEHDYTSV

SEQ ID NO: 22347 - protein, 10 aa, Homo Sapiens
VLLKARLVPA

SEQ ID NO: 22348 - protein, 10 aa, Homo Sapiens
VLMDLKALLL

SEQ ID NO: 22349 - protein, 10 aa, Homo Sapiens
VLPNFLPYNV

SEQ ID NO: 22350 - protein, 10 aa, Homo Sapiens
VLQNLKGQYV

SEQ ID NO: 22351 - protein, 10 aa, Homo Sapiens
VLWDRTFSLF

SEQ ID NO: 22352 - protein, 10 aa, Homo Sapiens
VLWEVSHKGV

SEQ ID NO: 22353 - protein, 10 aa, Homo Sapiens
VLYPHEPTAV

SEQ ID NO: 22354 - protein, 10 aa, Homo Sapiens
VMLESPPKGV

SEQ ID NO: 22355 - protein, 10 aa, Homo Sapiens
VMMDIGSTRL

SEQ ID NO: 22356 - protein, 10 aa, Homo Sapiens
VPGLYTLEEL

SEQ ID NO: 22357 - protein, 10 aa, Homo Sapiens
VTDIEEIIGV

SEQ ID NO: 22358 - protein, 10 aa, Homo Sapiens
VVWDLDRPLE

SEQ ID NO: 22359 - protein, 10 aa, Homo Sapiens
WAPERPLVGV

SEQ ID NO: 22360 - protein, 10 aa, Homo Sapiens
YAHELPKYGV

SEQ ID NO: 22361 - protein, 10 aa, Homo Sapiens
YAPPPRDYTY

SEQ ID NO: 22362 - protein, 10 aa, Homo Sapiens
YAYDGKDYIA

SEQ ID NO: 22363 - protein, 10 aa, Homo Sapiens
YIYDKDMEII

SEQ ID NO: 22364 - protein, 10 aa, Homo Sapiens
YLARIQGFQV

SEQ ID NO: 22365 - protein, 10 aa, Homo Sapiens
YLDGHLITTV

SEQ ID NO: 22366 - protein, 10 aa, Homo Sapiens
YLDIKGLLDV

SEQ ID NO: 22367 - protein, 10 aa, Homo Sapiens
YLDPRLAFTV

SEQ ID NO: 22368 - protein, 10 aa, Homo Sapiens
YLDPSVLSGV

SEQ ID NO: 22369 - protein, 10 aa, Homo Sapiens
YLFDVQRNNI

SEQ ID NO: 22370 - protein, 10 aa, Homo Sapiens
YLLEQDFPGM

SEQ ID NO: 22371 - protein, 10 aa, Homo Sapiens
YLLQEPPRTV

SEQ ID NO: 22372 - protein, 10 aa, Homo Sapiens
YLLTHPPPIM

SEQ ID NO: 22373 - protein, 10 aa, Homo Sapiens
YLMEGSYNKV

SEQ ID NO: 22374 - protein, 10 aa, Homo Sapiens
YLMQESPPHV

SEQ ID NO: 22375 - protein, 10 aa, Homo Sapiens
YLNDLHEVLL

SEQ ID NO: 22376 - protein, 10 aa, Homo Sapiens
YLTNEGIQYL

SEQ ID NO: 22377 - protein, 10 aa, Homo Sapiens
YLYDLNHTLY

SEQ ID NO: 22378 - protein, 10 aa, Homo Sapiens
YQILDGIHYL

SEQ ID NO: 22379 - protein, 10 aa, Homo Sapiens
YTFPGWKVGV

SEQ ID NO: 22380 - protein, 10 aa, Homo Sapiens
YVADLGAMVV

SEQ ID NO: 22381 - protein, 11 aa, Homo Sapiens
ALADKELLPSV

SEQ ID NO: 22382 - protein, 11 aa, Homo Sapiens
ALAEMLKENKV

SEQ ID NO: 22383 - protein, 11 aa, Homo Sapiens
ALDNVDARMYM

SEQ ID NO: 22384 - protein, 11 aa, Homo Sapiens
ALFARPDLLLL

SEQ ID NO: 22385 - protein, 11 aa, Homo Sapiens
ALFELSRVITL

SEQ ID NO: 22386 - protein, 11 aa, Homo Sapiens
ALFEQKGPVYV

SEQ ID NO: 22387 - protein, 11 aa, Homo Sapiens
ALIEAEKVAQV

SEQ ID NO: 22388 - protein, 11 aa, Homo Sapiens
ALIEVPDGFTA

SEQ ID NO: 22389 - protein, 11 aa, Homo Sapiens
ALKELMEIEEV

SEQ ID NO: 22390 - protein, 11 aa, Homo Sapiens
ALLENGIIHHV

SEQ ID NO: 22391 - protein, 11 aa, Homo Sapiens
ALLEPEFILKA

SEQ ID NO: 22392 - protein, 11 aa, Homo Sapiens
ALLGKLDAINV

SEQ ID NO: 22393 - protein, 11 aa, Homo Sapiens
ALMEQVAHQTI

SEQ ID NO: 22394 - protein, 11 aa, Homo Sapiens
ALQDPECFAHL

SEQ ID NO: 22395 - protein, 11 aa, Homo Sapiens
ALVEIGPRFVL

SEQ ID NO: 22396 - protein, 11 aa, Homo Sapiens
ALWDIETGQQT

SEQ ID NO: 22397 - protein, 11 aa, Homo Sapiens
ALWNMYVEEEV

SEQ ID NO: 22398 - protein, 11 aa, Homo Sapiens
ALYNVDAGHRA

SEQ ID NO: 22399 - protein, 11 aa, Homo Sapiens
AMASLGALALL

SEQ ID NO: 22400 - protein, 11 aa, Homo Sapiens
AQLDPEALGNI

SEQ ID NO: 22401 - protein, 11 aa, Homo Sapiens
AQWAIHPTFNL

SEQ ID NO: 22402 - protein, 11 aa, Homo Sapiens
AVIEAEKIAQV

SEQ ID NO: 22403 - protein, 11 aa, Homo Sapiens
AVMAPRTLVLL

SEQ ID NO: 22404 - protein, 11 aa, Homo Sapiens
CLIKEVDIYTV

SEQ ID NO: 22405 - protein, 11 aa, Homo Sapiens
EMIDPDKFCSL

SEQ ID NO: 22406 - protein, 11 aa, Homo Sapiens
FLADPDTVNHL

SEQ ID NO: 22407 - protein, 11 aa, Homo Sapiens
FLADPSAFVAA

SEQ ID NO: 22408 - protein, 11 aa, Homo Sapiens
FLAELPGSLSL

SEQ ID NO: 22409 - protein, 11 aa, Homo Sapiens
FLASESLIKQI

SEQ ID NO: 22410 - protein, 11 aa, Homo Sapiens
FLDESRSTQYM

SEQ ID NO: 22411 - protein, 11 aa, Homo Sapiens
FLFDGSPTYVL

SEQ ID NO: 22412 - protein, 11 aa, Homo Sapiens
FLIEPEHVNTV

SEQ ID NO: 22413 - protein, 11 aa, Homo Sapiens
FLLDPYKYMTL

SEQ ID NO: 22414 - protein, 11 aa, Homo Sapiens
FLLGPEGQHLL

SEQ ID NO: 22415 - protein, 11 aa, Homo Sapiens
FLNSVTDIHQL

SEQ ID NO: 22416 - protein, 11 aa, Homo Sapiens
FLPDPSALQNL

SEQ ID NO: 22417 - protein, 11 aa, Homo Sapiens
FLSEEGGHVAV

SEQ ID NO: 22418 - protein, 11 aa, Homo Sapiens
FLTDSNNIKEV

SEQ ID NO: 22419 - protein, 11 aa, Homo Sapiens
FLVNPESGYNV

SEQ ID NO: 22420 - protein, 11 aa, Homo Sapiens
FLWDPAKRTSV

SEQ ID NO: 22421 - protein, 11 aa, Homo Sapiens
FLWQHGEESMA

SEQ ID NO: 22422 - protein, 11 aa, Homo Sapiens
FLYQPQYLNAI

SEQ ID NO: 22423 - protein, 11 aa, Homo Sapiens
FVDCPDESWAL

SEQ ID NO: 22424 - protein, 11 aa, Homo Sapiens
FVFPLDKDELL

SEQ ID NO: 22425 - protein, 11 aa, Homo Sapiens
FVIDRPNGTKV

SEQ ID NO: 22426 - protein, 11 aa, Homo Sapiens
FVQEVVQSQQV

SEQ ID NO: 22427 - protein, 11 aa, Homo Sapiens
GLADASLLKKV

SEQ ID NO: 22428 - protein, 11 aa, Homo Sapiens
GLADNTVIAKV

SEQ ID NO: 22429 - protein, 11 aa, Homo Sapiens
GLFAHPSLWQL

SEQ ID NO: 22430 - protein, 11 aa, Homo Sapiens
GLIDTKELEPL

SEQ ID NO: 22431 - protein, 11 aa, Homo Sapiens
GLLAGDRLVEV

SEQ ID NO: 22432 - protein, 11 aa, Homo Sapiens
GLLDPGMLVNI

SEQ ID NO: 22433 - protein, 11 aa, Homo Sapiens
GLLYPTEDYKV

SEQ ID NO: 22434 - protein, 11 aa, Homo Sapiens
GLVDEKALAQA

SEQ ID NO: 22435 - protein, 11 aa, Homo Sapiens
GLWEIENNPTV

SEQ ID NO: 22436 - protein, 11 aa, Homo Sapiens
GMAFLDKRLQV

SEQ ID NO: 22437 - protein, 11 aa, Homo Sapiens
GMYGKIAVMEL

SEQ ID NO: 22438 - protein, 11 aa, Homo Sapiens
HILGIPQSWRL

SEQ ID NO: 22439 - protein, 11 aa, Homo Sapiens
HLFKITENIGC

SEQ ID NO: 22440 - protein, 11 aa, Homo Sapiens
HLIDPNTLQVA

SEQ ID NO: 22441 - protein, 11 aa, Homo Sapiens
HLLGEGAFAQV

SEQ ID NO: 22442 - protein, 11 aa, Homo Sapiens
HLMEENMIVYV

SEQ ID NO: 22443 - protein, 11 aa, Homo Sapiens
HLVSPEALDFL

SEQ ID NO: 22444 - protein, 11 aa, Homo Sapiens
HTDDPLTWDYV

SEQ ID NO: 22445 - protein, 11 aa, Homo Sapiens
HVYDGKFLARV

SEQ ID NO: 22446 - protein, 11 aa, Homo Sapiens
IIFPLNKSWII

SEQ ID NO: 22447 - protein, 11 aa, Homo Sapiens
IIQDIDDTHVF

SEQ ID NO: 22448 - protein, 11 aa, Homo Sapiens
IIWDVSKGQKI

SEQ ID NO: 22449 - protein, 11 aa, Homo Sapiens
ILAPAGSLPKI

SEQ ID NO: 22450 - protein, 11 aa, Homo Sapiens
ILFPPDQFECL

SEQ ID NO: 22451 - protein, 11 aa, Homo Sapiens
ILIEKEYLERV

SEQ ID NO: 22452 - protein, 11 aa, Homo Sapiens
ILLDDTGLAYI

SEQ ID NO: 22453 - protein, 11 aa, Homo Sapiens
ILMEHIHKLKA

SEQ ID NO: 22454 - protein, 11 aa, Homo Sapiens
ILNDPSQSEVM

SEQ ID NO: 22455 - protein, 11 aa, Homo Sapiens
ILPPTRPTDKP

SEQ ID NO: 22456 - protein, 11 aa, Homo Sapiens
ILQDPRLITPL

SEQ ID NO: 22457 - protein, 11 aa, Homo Sapiens
ILSDPSVFSPL

SEQ ID NO: 22458 - protein, 11 aa, Homo Sapiens
ILWAPDEESGV

SEQ ID NO: 22459 - protein, 11 aa, Homo Sapiens
IMAQLPQEQKA

SEQ ID NO: 22460 - protein, 11 aa, Homo Sapiens
IMLSEKHLISV

SEQ ID NO: 22461 - protein, 11 aa, Homo Sapiens
IPCTTLIPTKI

SEQ ID NO: 22462 - protein, 11 aa, Homo Sapiens
IQVSPEIFQFL

SEQ ID NO: 22463 - protein, 11 aa, Homo Sapiens
ISERYGPVFTI

SEQ ID NO: 22464 - protein, 11 aa, Homo Sapiens
IVLPAGALHQV

SEQ ID NO: 22465 - protein, 11 aa, Homo Sapiens
IVSMGSLFPVI

SEQ ID NO: 22466 - protein, 11 aa, Homo Sapiens
KAFSIGSNLNV

SEQ ID NO: 22467 - protein, 11 aa, Homo Sapiens
KFLLTSVFPQL

SEQ ID NO: 22468 - protein, 11 aa, Homo Sapiens
KIFDLDGDECL

SEQ ID NO: 22469 - protein, 11 aa, Homo Sapiens
KIFNITDNAAI

SEQ ID NO: 22470 - protein, 11 aa, Homo Sapiens
KIFPMGDRLYI

SEQ ID NO: 22471 - protein, 11 aa, Homo Sapiens
KIKELNKKEAV

SEQ ID NO: 22472 - protein, 11 aa, Homo Sapiens
KILDVASLEVL

SEQ ID NO: 22473 - protein, 11 aa, Homo Sapiens
KILSTGKYLNV

SEQ ID NO: 22474 - protein, 11 aa, Homo Sapiens
KIMDYSLLVGI

SEQ ID NO: 22475 - protein, 11 aa, Homo Sapiens
KIMTEKELLAV

SEQ ID NO: 22476 - protein, 11 aa, Homo Sapiens
KIWDIKTGQCL

SEQ ID NO: 22477 - protein, 11 aa, Homo Sapiens
KIWDLKERTNV

SEQ ID NO: 22478 - protein, 11 aa, Homo Sapiens
KIWDVSSGKCL

SEQ ID NO: 22479 - protein, 11 aa, Homo Sapiens
KIWDVSVNSVV

SEQ ID NO: 22480 - protein, 11 aa, Homo Sapiens
KIYEPPRYMSV

SEQ ID NO: 22481 - protein, 11 aa, Homo Sapiens
KLADDVDLEQV

SEQ ID NO: 22482 - protein, 11 aa, Homo Sapiens
KLCEYITQTTL

SEQ ID NO: 22483 - protein, 11 aa, Homo Sapiens
KLDDLTQDLTV

SEQ ID NO: 22484 - protein, 11 aa, Homo Sapiens
KLFDLDEKLML

SEQ ID NO: 22485 - protein, 11 aa, Homo Sapiens
KLFDRPQELKL

SEQ ID NO: 22486 - protein, 11 aa, Homo Sapiens
KLFPGFEIETV

SEQ ID NO: 22487 - protein, 11 aa, Homo Sapiens
KLFPLEENNCL

SEQ ID NO: 22488 - protein, 11 aa, Homo Sapiens
KLFVFDERYAL

SEQ ID NO: 22489 - protein, 11 aa, Homo Sapiens
KLGHTDILVGV

SEQ ID NO: 22490 - protein, 11 aa, Homo Sapiens
KLIDFGSGALL

SEQ ID NO: 22491 - protein, 11 aa, Homo Sapiens
KLIDLSQVMYL

SEQ ID NO: 22492 - protein, 11 aa, Homo Sapiens
KLLDFGSLSNL

SEQ ID NO: 22493 - protein, 11 aa, Homo Sapiens
KLLDISELDMV

SEQ ID NO: 22494 - protein, 11 aa, Homo Sapiens
KLLDLKKQLAV

SEQ ID NO: 22495 - protein, 11 aa, Homo Sapiens
KLLDLSDSTSV

SEQ ID NO: 22496 - protein, 11 aa, Homo Sapiens
KLLDMVGKVQI

SEQ ID NO: 22497 - protein, 11 aa, Homo Sapiens
KLLETELLQEI

SEQ ID NO: 22498 - protein, 11 aa, Homo Sapiens
KLLPDTILEKL

SEQ ID NO: 22499 - protein, 11 aa, Homo Sapiens
KLLPGSAIQAL

SEQ ID NO: 22500 - protein, 11 aa, Homo Sapiens
KLLSHSLLVTL

SEQ ID NO: 22501 - protein, 11 aa, Homo Sapiens
KLMDEVAGIVA

SEQ ID NO: 22502 - protein, 11 aa, Homo Sapiens
KLPGRENKTAV

SEQ ID NO: 22503 - protein, 11 aa, Homo Sapiens
KLPTRPASTGV

SEQ ID NO: 22504 - protein, 11 aa, Homo Sapiens
KLSEPSSLQYL

SEQ ID NO: 22505 - protein, 11 aa, Homo Sapiens
KLVEIPTKMRV

SEQ ID NO: 22506 - protein, 11 aa, Homo Sapiens
KLWALPQCQLL

SEQ ID NO: 22507 - protein, 11 aa, Homo Sapiens
KLWDPRTPCNA

SEQ ID NO: 22508 - protein, 11 aa, Homo Sapiens
KLWDPTVGKSL

SEQ ID NO: 22509 - protein, 11 aa, Homo Sapiens
KLWDTETGQCI

SEQ ID NO: 22510 - protein, 11 aa, Homo Sapiens
KLWNVGKPYCL

SEQ ID NO: 22511 - protein, 11 aa, Homo Sapiens
KLWSVPDCNLL

SEQ ID NO: 22512 - protein, 11 aa, Homo Sapiens
KLYRPGSVAYV

SEQ ID NO: 22513 - protein, 11 aa, Homo Sapiens
KMADEDALRKI

SEQ ID NO: 22514 - protein, 11 aa, Homo Sapiens
KMDASLGNLFA

SEQ ID NO: 22515 - protein, 11 aa, Homo Sapiens
KMDDPDYWRTV

SEQ ID NO: 22516 - protein, 11 aa, Homo Sapiens
KMDDPTVNWSI

SEQ ID NO: 22517 - protein, 11 aa, Homo Sapiens
KMFDLNGDGEV

SEQ ID NO: 22518 - protein, 11 aa, Homo Sapiens
KMIEDGKIHTV

SEQ ID NO: 22519 - protein, 11 aa, Homo Sapiens
KMMDPRVLHHM

SEQ ID NO: 22520 - protein, 11 aa, Homo Sapiens
KMWDLSSNQAI

SEQ ID NO: 22521 - protein, 11 aa, Homo Sapiens
KMWDPHNDPNA

SEQ ID NO: 22522 - protein, 11 aa, Homo Sapiens
KQWKFPDGSFI

SEQ ID NO: 22523 - protein, 11 aa, Homo Sapiens
KSYELPDGQVI

SEQ ID NO: 22524 - protein, 11 aa, Homo Sapiens
KTAAEDAIRNL

SEQ ID NO: 22525 - protein, 11 aa, Homo Sapiens
KTLDVDATYEI

SEQ ID NO: 22526 - protein, 11 aa, Homo Sapiens
KTMELNVGNEA

SEQ ID NO: 22527 - protein, 11 aa, Homo Sapiens
KVLEPSETLVV

SEQ ID NO: 22528 - protein, 11 aa, Homo Sapiens
KVLKPDTTYQV

SEQ ID NO: 22529 - protein, 11 aa, Homo Sapiens
KVWDVGTRTCV

SEQ ID NO: 22530 - protein, 11 aa, Homo Sapiens
KVWLIDVSQSV

SEQ ID NO: 22531 - protein, 11 aa, Homo Sapiens
LIPGAEFRCFV

SEQ ID NO: 22532 - protein, 11 aa, Homo Sapiens
LLAELPASVHA

SEQ ID NO: 22533 - protein, 11 aa, Homo Sapiens
LLAILPEAARA

SEQ ID NO: 22534 - protein, 11 aa, Homo Sapiens
LLANTSWTGTV

SEQ ID NO: 22535 - protein, 11 aa, Homo Sapiens
LLDPNVKSIFV

SEQ ID NO: 22536 - protein, 11 aa, Homo Sapiens
LLLEEDNKFCA

SEQ ID NO: 22537 - protein, 11 aa, Homo Sapiens
LLLEPGSLYIL

SEQ ID NO: 22538 - protein, 11 aa, Homo Sapiens
LLLPDYYLVTV

SEQ ID NO: 22539 - protein, 11 aa, Homo Sapiens
LLMEPGAMRFL

SEQ ID NO: 22540 - protein, 11 aa, Homo Sapiens
LLPDPRELIEI

SEQ ID NO: 22541 - protein, 11 aa, Homo Sapiens
LLQELTDIDTL

SEQ ID NO: 22542 - protein, 11 aa, Homo Sapiens
LLSEPSLLRTV

SEQ ID NO: 22543 - protein, 11 aa, Homo Sapiens
LLWDPSTGKQV

SEQ ID NO: 22544 - protein, 11 aa, Homo Sapiens
LLYDLADQLHA

SEQ ID NO: 22545 - protein, 11 aa, Homo Sapiens
LMWELEKKSAV

SEQ ID NO: 22546 - protein, 11 aa, Homo Sapiens
LTAPPEALLMV

SEQ ID NO: 22547 - protein, 11 aa, Homo Sapiens
LVWDLRNMGYV

SEQ ID NO: 22548 - protein, 11 aa, Homo Sapiens
MALDIDERHLL

SEQ ID NO: 22549 - protein, 11 aa, Homo Sapiens
MAMEPDRKAAV

SEQ ID NO: 22550 - protein, 11 aa, Homo Sapiens
MLFEFIDRCTA

SEQ ID NO: 22551 - protein, 11 aa, Homo Sapiens
MLIEEGGLQHL

SEQ ID NO: 22552 - protein, 11 aa, Homo Sapiens
MLLAGLYRTMR

SEQ ID NO: 22553 - protein, 11 aa, Homo Sapiens
MLLDPPPGSHV

SEQ ID NO: 22554 - protein, 11 aa, Homo Sapiens
MLWDLNEGKHL

SEQ ID NO: 22555 - protein, 11 aa, Homo Sapiens
MVFDAKLLSQL

SEQ ID NO: 22556 - protein, 11 aa, Homo Sapiens
MVFKPSDVMLV

SEQ ID NO: 22557 - protein, 11 aa, Homo Sapiens
MVQDPSQFDVL

SEQ ID NO: 22558 - protein, 11 aa, Homo Sapiens
NAIYYYADQIY

SEQ ID NO: 22559 - protein, 11 aa, Homo Sapiens
NGTVAGFELLL

SEQ ID NO: 22560 - protein, 11 aa, Homo Sapiens
NIWRDVGLFGV

SEQ ID NO: 22561 - protein, 11 aa, Homo Sapiens
NLANPKIFRDL

SEQ ID NO: 22562 - protein, 11 aa, Homo Sapiens
NLAPTDVLEAL

SEQ ID NO: 22563 - protein, 11 aa, Homo Sapiens
NLFDISQSAQT

SEQ ID NO: 22564 - protein, 11 aa, Homo Sapiens
NMFKMAKNWSA

SEQ ID NO: 22565 - protein, 11 aa, Homo Sapiens
NMYEGVGRMFI

SEQ ID NO: 22566 - protein, 11 aa, Homo Sapiens
PPCAMAGPPPA

SEQ ID NO: 22567 - protein, 11 aa, Homo Sapiens
QLLDPASFEYL

SEQ ID NO: 22568 - protein, 11 aa, Homo Sapiens
QMLEAIKALEV

SEQ ID NO: 22569 - protein, 11 aa, Homo Sapiens
QMMQNPQILAA

SEQ ID NO: 22570 - protein, 11 aa, Homo Sapiens
QQLDSKFLEQV

SEQ ID NO: 22571 - protein, 11 aa, Homo Sapiens
QQLDTRYLEQL

SEQ ID NO: 22572 - protein, 11 aa, Homo Sapiens
QQWDTSKGEQV

SEQ ID NO: 22573 - protein, 11 aa, Homo Sapiens
QVPEAPGGSAV

SEQ ID NO: 22574 - protein, 11 aa, Homo Sapiens
QVYQLDTGHYL

SEQ ID NO: 22575 - protein, 11 aa, Homo Sapiens
RAPPVRPQNSL

SEQ ID NO: 22576 - protein, 11 aa, Homo Sapiens
RIFILGPSHHV

SEQ ID NO: 22577 - protein, 11 aa, Homo Sapiens
RILDIDIPMSV

SEQ ID NO: 22578 - protein, 11 aa, Homo Sapiens
RLAGADVVLGV

SEQ ID NO: 22579 - protein, 11 aa, Homo Sapiens
RLFEASDPYQV

SEQ ID NO: 22580 - protein, 11 aa, Homo Sapiens
RLFEVPHELVA

SEQ ID NO: 22581 - protein, 11 aa, Homo Sapiens
RLFKIDKEYLL

SEQ ID NO: 22582 - protein, 11 aa, Homo Sapiens
RLFNHPNILRL

SEQ ID NO: 22583 - protein, 11 aa, Homo Sapiens
RLFPLSGHLLL

SEQ ID NO: 22584 - protein, 11 aa, Homo Sapiens
RLFPVPGSGLV

SEQ ID NO: 22585 - protein, 11 aa, Homo Sapiens
RLISLTDENAL

SEQ ID NO: 22586 - protein, 11 aa, Homo Sapiens
RLLEEGVLRQI

SEQ ID NO: 22587 - protein, 11 aa, Homo Sapiens
RLLEIPAVSHV

SEQ ID NO: 22588 - protein, 11 aa, Homo Sapiens
RLLEPADMVLL

SEQ ID NO: 22589 - protein, 11 aa, Homo Sapiens
RLLPPGAVVAV

SEQ ID NO: 22590 - protein, 11 aa, Homo Sapiens
RLLSIKEAFRL

SEQ ID NO: 22591 - protein, 11 aa, Homo Sapiens
RLMEPIYLVEI

SEQ ID NO: 22592 - protein, 11 aa, Homo Sapiens
RLPPEGILHNV

SEQ ID NO: 22593 - protein, 11 aa, Homo Sapiens
RLQETEGMVAV

SEQ ID NO: 22594 - protein, 11 aa, Homo Sapiens
RLVQGSILKKV

SEQ ID NO: 22595 - protein, 11 aa, Homo Sapiens
RLWDCETGKQL

SEQ ID NO: 22596 - protein, 11 aa, Homo Sapiens
RLWDHATMTEV

SEQ ID NO: 22597 - protein, 11 aa, Homo Sapiens
RLWDLENGKQI

SEQ ID NO: 22598 - protein, 11 aa, Homo Sapiens
RLWDLTTGTTT

SEQ ID NO: 22599 - protein, 11 aa, Homo Sapiens
RLWGIPDQARV

SEQ ID NO: 22600 - protein, 11 aa, Homo Sapiens
RLWNMPENNGL

SEQ ID NO: 22601 - protein, 11 aa, Homo Sapiens
RLWTPPEDYRL

SEQ ID NO: 22602 - protein, 11 aa, Homo Sapiens
RMFPTQGFTEI

SEQ ID NO: 22603 - protein, 11 aa, Homo Sapiens
RMNPNSPSITY

SEQ ID NO: 22604 - protein, 11 aa, Homo Sapiens
RQADTKAIQHL

SEQ ID NO: 22605 - protein, 11 aa, Homo Sapiens
RQLEEEGITFV

SEQ ID NO: 22606 - protein, 11 aa, Homo Sapiens
RQPPPRPFLDM

SEQ ID NO: 22607 - protein, 11 aa, Homo Sapiens
RVLDPSKFLKI

SEQ ID NO: 22608 - protein, 11 aa, Homo Sapiens
RVLPPSALQSV

SEQ ID NO: 22609 - protein, 11 aa, Homo Sapiens
RVWDIETGQCL

SEQ ID NO: 22610 - protein, 11 aa, Homo Sapiens
RVWDISTVSSV

SEQ ID NO: 22611 - protein, 11 aa, Homo Sapiens
SLADDSVLERL

SEQ ID NO: 22612 - protein, 11 aa, Homo Sapiens
SLAELDEKISA

SEQ ID NO: 22613 - protein, 11 aa, Homo Sapiens
SLFLFGEVHKA

SEQ ID NO: 22614 - protein, 11 aa, Homo Sapiens
SLFNIKDTQQL

SEQ ID NO: 22615 - protein, 11 aa, Homo Sapiens
SLIDMRGIETV

SEQ ID NO: 22616 - protein, 11 aa, Homo Sapiens
SLLGDDALVQV

SEQ ID NO: 22617 - protein, 11 aa, Homo Sapiens
SLLHLGALYGI

SEQ ID NO: 22618 - protein, 11 aa, Homo Sapiens
SLLNPPETLNL

SEQ ID NO: 22619 - protein, 11 aa, Homo Sapiens
SLLPPDALVGL

SEQ ID NO: 22620 - protein, 11 aa, Homo Sapiens
SLLSPGLLPHL

SEQ ID NO: 22621 - protein, 11 aa, Homo Sapiens
SLMDPNKFLLL

SEQ ID NO: 22622 - protein, 11 aa, Homo Sapiens
SLMEESGICKV

SEQ ID NO: 22623 - protein, 11 aa, Homo Sapiens
SLQDPPGELAV

SEQ ID NO: 22624 - protein, 11 aa, Homo Sapiens
SLVENIERLKV

SEQ ID NO: 22625 - protein, 11 aa, Homo Sapiens
SLVEVNPAYSV

SEQ ID NO: 22626 - protein, 11 aa, Homo Sapiens
SLVSPASFENV

SEQ ID NO: 22627 - protein, 11 aa, Homo Sapiens
SLWEISKQIEG

SEQ ID NO: 22628 - protein, 11 aa, Homo Sapiens
SLWSLEPGKCV

SEQ ID NO: 22629 - protein, 11 aa, Homo Sapiens
SMADIPLGFGV

SEQ ID NO: 22630 - protein, 11 aa, Homo Sapiens
SMMDPNHFLMI

SEQ ID NO: 22631 - protein, 11 aa, Homo Sapiens
SMMPPPVGMVA

SEQ ID NO: 22632 - protein, 11 aa, Homo Sapiens
SQLDISDPYKV

SEQ ID NO: 22633 - protein, 11 aa, Homo Sapiens
SVAALSKIFAV

SEQ ID NO: 22634 - protein, 11 aa, Homo Sapiens
SVAEGRALMSV

SEQ ID NO: 22635 - protein, 11 aa, Homo Sapiens
SVLDPRDLRQL

SEQ ID NO: 22636 - protein, 11 aa, Homo Sapiens
SVLEPQVLNYL

SEQ ID NO: 22637 - protein, 11 aa, Homo Sapiens
SVMQLQEEAHL

SEQ ID NO: 22638 - protein, 11 aa, Homo Sapiens
SVPDPSTRALL

SEQ ID NO: 22639 - protein, 11 aa, Homo Sapiens
SVVSPSSFENV

SEQ ID NO: 22640 - protein, 11 aa, Homo Sapiens
SVYDGKLLIGT

SEQ ID NO: 22641 - protein, 11 aa, Homo Sapiens
TIAEVGKWLQA

SEQ ID NO: 22642 - protein, 11 aa, Homo Sapiens
TIIDLPGITRV

SEQ ID NO: 22643 - protein, 11 aa, Homo Sapiens
TLAEINQKWNL

SEQ ID NO: 22644 - protein, 11 aa, Homo Sapiens
TLFHFGNCFAL

SEQ ID NO: 22645 - protein, 11 aa, Homo Sapiens
TLIDLPGITKV

SEQ ID NO: 22646 - protein, 11 aa, Homo Sapiens
TLLAAEFLKQV

SEQ ID NO: 22647 - protein, 11 aa, Homo Sapiens
TLLDPGRFSKV

SEQ ID NO: 22648 - protein, 11 aa, Homo Sapiens
TLLDPNEKYLL

SEQ ID NO: 22649 - protein, 11 aa, Homo Sapiens
TLMDAELFKKV

SEQ ID NO: 22650 - protein, 11 aa, Homo Sapiens
TLYDIAHTPGV

SEQ ID NO: 22651 - protein, 11 aa, Homo Sapiens
TLYNPERTITV

SEQ ID NO: 22652 - protein, 11 aa, Homo Sapiens
TMAKESSIIGV

SEQ ID NO: 22653 - protein, 11 aa, Homo Sapiens
TTLDVTKLTPL

SEQ ID NO: 22654 - protein, 11 aa, Homo Sapiens
TVADPSVISHL

SEQ ID NO: 22655 - protein, 11 aa, Homo Sapiens
TVFLLEKPFSV

SEQ ID NO: 22656 - protein, 11 aa, Homo Sapiens
TVIRDPPSITP

SEQ ID NO: 22657 - protein, 11 aa, Homo Sapiens
TVWEISQKTVL

SEQ ID NO: 22658 - protein, 11 aa, Homo Sapiens
VAPPEYHRKAV

SEQ ID NO: 22659 - protein, 11 aa, Homo Sapiens
VAPPGGSRKEV

SEQ ID NO: 22660 - protein, 11 aa, Homo Sapiens
VAVDPSILARL

SEQ ID NO: 22661 - protein, 11 aa, Homo Sapiens
VIFILGKEHQL

SEQ ID NO: 22662 - protein, 11 aa, Homo Sapiens
VILFLNKQDLL

SEQ ID NO: 22663 - protein, 11 aa, Homo Sapiens
VLDPKPPPLTL

SEQ ID NO: 22664 - protein, 11 aa, Homo Sapiens
VLIGEGVLTKL

SEQ ID NO: 22665 - protein, 11 aa, Homo Sapiens
VLLEDGVLNHV

SEQ ID NO: 22666 - protein, 11 aa, Homo Sapiens
VLMNQPPQIAP

SEQ ID NO: 22667 - protein, 11 aa, Homo Sapiens
VLMPMERQMSV

SEQ ID NO: 22668 - protein, 11 aa, Homo Sapiens
VLVEPKTAWRL

SEQ ID NO: 22669 - protein, 11 aa, Homo Sapiens
VLWDLVDRIGI

SEQ ID NO: 22670 - protein, 11 aa, Homo Sapiens
VLWDVRSAQAI

SEQ ID NO: 22671 - protein, 11 aa, Homo Sapiens
VLWMAPDGLYA

SEQ ID NO: 22672 - protein, 11 aa, Homo Sapiens
VMFECDKGFYL

SEQ ID NO: 22673 - protein, 11 aa, Homo Sapiens
VMQDPEFLQSV

SEQ ID NO: 22674 - protein, 11 aa, Homo Sapiens
VPAYFTSRDLF

SEQ ID NO: 22675 - protein, 11 aa, Homo Sapiens
VSWGLVKGAEI

SEQ ID NO: 22676 - protein, 11 aa, Homo Sapiens
WLIEDGKVVTV

SEQ ID NO: 22677 - protein, 11 aa, Homo Sapiens
WPLTESQLTFV

SEQ ID NO: 22678 - protein, 11 aa, Homo Sapiens
YAYDGKDYIAL

SEQ ID NO: 22679 - protein, 11 aa, Homo Sapiens
YIFPLDDKAAV

SEQ ID NO: 22680 - protein, 11 aa, Homo Sapiens
YIMEPSIFNTL

SEQ ID NO: 22681 - protein, 11 aa, Homo Sapiens
YIMETVDAQHV

SEQ ID NO: 22682 - protein, 11 aa, Homo Sapiens
YLEELPEKLKL

SEQ ID NO: 22683 - protein, 11 aa, Homo Sapiens
YLFDVQRNNIA

SEQ ID NO: 22684 - protein, 11 aa, Homo Sapiens
YLGITPSITNW

SEQ ID NO: 22685 - protein, 11 aa, Homo Sapiens
YLLDIGCGTGL

SEQ ID NO: 22686 - protein, 11 aa, Homo Sapiens
YLLDPKIADLV

SEQ ID NO: 22687 - protein, 11 aa, Homo Sapiens
YLLEIPKGEMV

SEQ ID NO: 22688 - protein, 11 aa, Homo Sapiens
YLLNDASLISV

SEQ ID NO: 22689 - protein, 11 aa, Homo Sapiens
YLMDINGKMWL

SEQ ID NO: 22690 - protein, 11 aa, Homo Sapiens
YLPDIIKDQKA

SEQ ID NO: 22691 - protein, 11 aa, Homo Sapiens
YQFDKVGILTL

SEQ ID NO: 22692 - protein, 11 aa, Homo Sapiens
YQFDSALLPAV

SEQ ID NO: 22693 - protein, 11 aa, Homo Sapiens
YQFNPAFFQTT

SEQ ID NO: 22694 - protein, 11 aa, Homo Sapiens
YQLEIPENFTT

SEQ ID NO: 22695 - protein, 11 aa, Homo Sapiens
YVIEPHSMEFA

SEQ ID NO: 22696 - protein, 11 aa, Homo Sapiens
YVWDIKSIMSM

SEQ ID NO: 22697 - protein, 8 aa, Homo Sapiens
AEWKATKL

SEQ ID NO: 22698 - protein, 8 aa, Homo Sapiens
FPGTPLKK

SEQ ID NO: 22699 - protein, 8 aa, Homo Sapiens
FSPVGSVL

SEQ ID NO: 22700 - protein, 8 aa, Homo Sapiens
IDHIFASK

SEQ ID NO: 22701 - protein, 8 aa, Homo Sapiens
LNKLGGVK

SEQ ID NO: 22702 - protein, 8 aa, Homo Sapiens
LPWPFRNK

SEQ ID NO: 22703 - protein, 8 aa, Homo Sapiens
MVYVGIPK

SEQ ID NO: 22704 - protein, 8 aa, Homo Sapiens
NAHSNILK

SEQ ID NO: 22705 - protein, 8 aa, Homo Sapiens
PAHGLFLK

SEQ ID NO: 22706 - protein, 8 aa, Homo Sapiens
RIDKPILK

SEQ ID NO: 22707 - protein, 8 aa, Homo Sapiens
RIFIGTFK

SEQ ID NO: 22708 - protein, 9 aa, Homo Sapiens
AAFVPLLLK

SEQ ID NO: 22709 - protein, 9 aa, Homo Sapiens
AAYAWPFYK

SEQ ID NO: 22710 - protein, 9 aa, Homo Sapiens
AAYNVPLPK

SEQ ID NO: 22711 - protein, 9 aa, Homo Sapiens
AIALPVTMK

SEQ ID NO: 22712 - protein, 9 aa, Homo Sapiens
AIFKPVMSK

SEQ ID NO: 22713 - protein, 9 aa, Homo Sapiens
AIFKVLNEK

SEQ ID NO: 22714 - protein, 9 aa, Homo Sapiens
AIFPSPMMY

SEQ ID NO: 22715 - protein, 9 aa, Homo Sapiens
AILDYLITK

SEQ ID NO: 22716 - protein, 9 aa, Homo Sapiens
AILLPQPPK

SEQ ID NO: 22717 - protein, 9 aa, Homo Sapiens
AILSKFLYY

SEQ ID NO: 22718 - protein, 9 aa, Homo Sapiens
AIPGFTINR

SEQ ID NO: 22719 - protein, 9 aa, Homo Sapiens
AISFVLGEK

SEQ ID NO: 22720 - protein, 9 aa, Homo Sapiens
AISWPLLQK

SEQ ID NO: 22721 - protein, 9 aa, Homo Sapiens
AIVAYGLYK

SEQ ID NO: 22722 - protein, 9 aa, Homo Sapiens
AIYGRGIAY

SEQ ID NO: 22723 - protein, 9 aa, Homo Sapiens
ALAEYVIYR

SEQ ID NO: 22724 - protein, 9 aa, Homo Sapiens
ALAGHQLIR

SEQ ID NO: 22725 - protein, 9 aa, Homo Sapiens
ALAGTFHYY

SEQ ID NO: 22726 - protein, 9 aa, Homo Sapiens
ALAIKVLNK

SEQ ID NO: 22727 - protein, 9 aa, Homo Sapiens
ALANVSIEK

SEQ ID NO: 22728 - protein, 9 aa, Homo Sapiens
ALAQARLLY

SEQ ID NO: 22729 - protein, 9 aa, Homo Sapiens
ALAQGVLEH

SEQ ID NO: 22730 - protein, 9 aa, Homo Sapiens
ALARQLLLY

SEQ ID NO: 22731 - protein, 9 aa, Homo Sapiens
ALASRFLKK

SEQ ID NO: 22732 - protein, 9 aa, Homo Sapiens
ALCSRLLEY

SEQ ID NO: 22733 - protein, 9 aa, Homo Sapiens
ALFASGLIH

SEQ ID NO: 22734 - protein, 9 aa, Homo Sapiens
ALFDGVVSK

SEQ ID NO: 22735 - protein, 9 aa, Homo Sapiens
ALFEVPSLK

SEQ ID NO: 22736 - protein, 9 aa, Homo Sapiens
ALFEYIFHH

SEQ ID NO: 22737 - protein, 9 aa, Homo Sapiens
ALFGQPPFK

SEQ ID NO: 22738 - protein, 9 aa, Homo Sapiens
ALFGVVFPH

SEQ ID NO: 22739 - protein, 9 aa, Homo Sapiens
ALFHAQLAY

SEQ ID NO: 22740 - protein, 9 aa, Homo Sapiens
ALFKHILLY

SEQ ID NO: 22741 - protein, 9 aa, Homo Sapiens
ALFKNLLLK

SEQ ID NO: 22742 - protein, 9 aa, Homo Sapiens
ALFSRIFGK

SEQ ID NO: 22743 - protein, 9 aa, Homo Sapiens
ALHLHPLLH

SEQ ID NO: 22744 - protein, 9 aa, Homo Sapiens
ALKTGIVAK

SEQ ID NO: 22745 - protein, 9 aa, Homo Sapiens
ALLDITVTK

SEQ ID NO: 22746 - protein, 9 aa, Homo Sapiens
ALLEVLSQK

SEQ ID NO: 22747 - protein, 9 aa, Homo Sapiens
ALLGTSGLK

SEQ ID NO: 22748 - protein, 9 aa, Homo Sapiens
ALLSPGSPK

SEQ ID NO: 22749 - protein, 9 aa, Homo Sapiens
ALLTGIISK

SEQ ID NO: 22750 - protein, 9 aa, Homo Sapiens
ALLTYMIAH

SEQ ID NO: 22751 - protein, 9 aa, Homo Sapiens
ALMTIFTIK

SEQ ID NO: 22752 - protein, 9 aa, Homo Sapiens
ALNALILAY

SEQ ID NO: 22753 - protein, 9 aa, Homo Sapiens
ALNFSVFYY

SEQ ID NO: 22754 - protein, 9 aa, Homo Sapiens
ALNHKVLHY

SEQ ID NO: 22755 - protein, 9 aa, Homo Sapiens
ALNSKILSV

SEQ ID NO: 22756 - protein, 9 aa, Homo Sapiens
ALNVPISVK

SEQ ID NO: 22757 - protein, 9 aa, Homo Sapiens
ALNVPLHNR

SEQ ID NO: 22758 - protein, 9 aa, Homo Sapiens
ALPALVMSK

SEQ ID NO: 22759 - protein, 9 aa, Homo Sapiens
ALSGFTIFR

SEQ ID NO: 22760 - protein, 9 aa, Homo Sapiens
ALSKTVFYY

SEQ ID NO: 22761 - protein, 9 aa, Homo Sapiens
ALSNPILNK

SEQ ID NO: 22762 - protein, 9 aa, Homo Sapiens
ALTDAYLLY

SEQ ID NO: 22763 - protein, 9 aa, Homo Sapiens
ALWGRTTLK

SEQ ID NO: 22764 - protein, 9 aa, Homo Sapiens
ALWPQIIQK

SEQ ID NO: 22765 - protein, 9 aa, Homo Sapiens
ALWSHLLHY

SEQ ID NO: 22766 - protein, 9 aa, Homo Sapiens
ALWSPGLAK

SEQ ID NO: 22767 - protein, 9 aa, Homo Sapiens
ALYDLAVLK

SEQ ID NO: 22768 - protein, 9 aa, Homo Sapiens
ALYEYARRR

SEQ ID NO: 22769 - protein, 9 aa, Homo Sapiens
ALYFPKNGD

SEQ ID NO: 22770 - protein, 9 aa, Homo Sapiens
ALYFTRGLK

SEQ ID NO: 22771 - protein, 9 aa, Homo Sapiens
ALYGRFTIK

SEQ ID NO: 22772 - protein, 9 aa, Homo Sapiens
ALYGVVNVK

SEQ ID NO: 22773 - protein, 9 aa, Homo Sapiens
ALYKKILKY

SEQ ID NO: 22774 - protein, 9 aa, Homo Sapiens
ALYNIGLTY

SEQ ID NO: 22775 - protein, 9 aa, Homo Sapiens
ALYPHFPAH

SEQ ID NO: 22776 - protein, 9 aa, Homo Sapiens
ALYQPLFDK

SEQ ID NO: 22777 - protein, 9 aa, Homo Sapiens
ALYSVPRNH

SEQ ID NO: 22778 - protein, 9 aa, Homo Sapiens
ALYSVYRQK

SEQ ID NO: 22779 - protein, 9 aa, Homo Sapiens
AMADTFLEH

SEQ ID NO: 22780 - protein, 9 aa, Homo Sapiens
AMFALPAEK

SEQ ID NO: 22781 - protein, 9 aa, Homo Sapiens
AMGDVVIFK

SEQ ID NO: 22782 - protein, 9 aa, Homo Sapiens
AMHGVFLYH

SEQ ID NO: 22783 - protein, 9 aa, Homo Sapiens
AMLDTVVFK

SEQ ID NO: 22784 - protein, 9 aa, Homo Sapiens
AMMAIAIMK

SEQ ID NO: 22785 - protein, 9 aa, Homo Sapiens
AMWTTALLH

SEQ ID NO: 22786 - protein, 9 aa, Homo Sapiens
AQATISFPK

SEQ ID NO: 22787 - protein, 9 aa, Homo Sapiens
AQWQKVLPR

SEQ ID NO: 22788 - protein, 9 aa, Homo Sapiens
AQYGNILKH

SEQ ID NO: 22789 - protein, 9 aa, Homo Sapiens
AQYQFTGIK

SEQ ID NO: 22790 - protein, 9 aa, Homo Sapiens
ASLSRPLNY

SEQ ID NO: 22791 - protein, 9 aa, Homo Sapiens
ASNPAMLLY

SEQ ID NO: 22792 - protein, 9 aa, Homo Sapiens
ASSPPAIPK

SEQ ID NO: 22793 - protein, 9 aa, Homo Sapiens
ASYGLALLH

SEQ ID NO: 22794 - protein, 9 aa, Homo Sapiens
ASYVSPVLK

SEQ ID NO: 22795 - protein, 9 aa, Homo Sapiens
ATAAVIFLH

SEQ ID NO: 22796 - protein, 9 aa, Homo Sapiens
ATADVVILY

SEQ ID NO: 22797 - protein, 9 aa, Homo Sapiens
ATATLIIEH

SEQ ID NO: 22798 - protein, 9 aa, Homo Sapiens
ATFFGEVVK

SEQ ID NO: 22799 - protein, 9 aa, Homo Sapiens
ATFIKAMFK

SEQ ID NO: 22800 - protein, 9 aa, Homo Sapiens
ATFPDPNVK

SEQ ID NO: 22801 - protein, 9 aa, Homo Sapiens
ATFPLSVQK

SEQ ID NO: 22802 - protein, 9 aa, Homo Sapiens
ATFPVAPRY

SEQ ID NO: 22803 - protein, 9 aa, Homo Sapiens
ATFTNVFGK

SEQ ID NO: 22804 - protein, 9 aa, Homo Sapiens
ATFTVMGLK

SEQ ID NO: 22805 - protein, 9 aa, Homo Sapiens
ATIYPVLPK

SEQ ID NO: 22806 - protein, 9 aa, Homo Sapiens
ATLAAVLQR

SEQ ID NO: 22807 - protein, 9 aa, Homo Sapiens
ATLLIFANK

SEQ ID NO: 22808 - protein, 9 aa, Homo Sapiens
ATLTNILEH

SEQ ID NO: 22809 - protein, 9 aa, Homo Sapiens
ATNLVQLYH

SEQ ID NO: 22810 - protein, 9 aa, Homo Sapiens
ATSKVALVY

SEQ ID NO: 22811 - protein, 9 aa, Homo Sapiens
ATSVITIVK

SEQ ID NO: 22812 - protein, 9 aa, Homo Sapiens
ATTLKNRPL

SEQ ID NO: 22813 - protein, 9 aa, Homo Sapiens
ATYPYQVVR

SEQ ID NO: 22814 - protein, 9 aa, Homo Sapiens
AVAAFVLYK

SEQ ID NO: 22815 - protein, 9 aa, Homo Sapiens
AVAEKMLQY

SEQ ID NO: 22816 - protein, 9 aa, Homo Sapiens
AVAIKAMAK

SEQ ID NO: 22817 - protein, 9 aa, Homo Sapiens
AVALPLQTK

SEQ ID NO: 22818 - protein, 9 aa, Homo Sapiens
AVASVPIMY

SEQ ID NO: 22819 - protein, 9 aa, Homo Sapiens
AVATFLIRH

SEQ ID NO: 22820 - protein, 9 aa, Homo Sapiens
AVFEWHITK

SEQ ID NO: 22821 - protein, 9 aa, Homo Sapiens
AVFGVPASK

SEQ ID NO: 22822 - protein, 9 aa, Homo Sapiens
AVFQIILRR

SEQ ID NO: 22823 - protein, 9 aa, Homo Sapiens
AVGALQLTY

SEQ ID NO: 22824 - protein, 9 aa, Homo Sapiens
AVKVPSVFK

SEQ ID NO: 22825 - protein, 9 aa, Homo Sapiens
AVLDLSWNK

SEQ ID NO: 22826 - protein, 9 aa, Homo Sapiens
AVLGFAMYK

SEQ ID NO: 22827 - protein, 9 aa, Homo Sapiens
AVLPAVIPK

SEQ ID NO: 22828 - protein, 9 aa, Homo Sapiens
AVLPSVLNK

SEQ ID NO: 22829 - protein, 9 aa, Homo Sapiens
AVLRIPILY

SEQ ID NO: 22830 - protein, 9 aa, Homo Sapiens
AVLSFSLYR

SEQ ID NO: 22831 - protein, 9 aa, Homo Sapiens
AVLSWKLAK

SEQ ID NO: 22832 - protein, 9 aa, Homo Sapiens
AVLTKQLLH

SEQ ID NO: 22833 - protein, 9 aa, Homo Sapiens
AVNFPFLVK

SEQ ID NO: 22834 - protein, 9 aa, Homo Sapiens
AVNGVQLHY

SEQ ID NO: 22835 - protein, 9 aa, Homo Sapiens
AVNSIFLSH

SEQ ID NO: 22836 - protein, 9 aa, Homo Sapiens
AVRKPIVLK

SEQ ID NO: 22837 - protein, 9 aa, Homo Sapiens
AVSLQQLTY

SEQ ID NO: 22838 - protein, 9 aa, Homo Sapiens
AVSLWAKLK

SEQ ID NO: 22839 - protein, 9 aa, Homo Sapiens
AVSTFAMVK

SEQ ID NO: 22840 - protein, 9 aa, Homo Sapiens
AVWDTCLEY

SEQ ID NO: 22841 - protein, 9 aa, Homo Sapiens
AVYLLPVPK

SEQ ID NO: 22842 - protein, 9 aa, Homo Sapiens
AVYLRALVR

SEQ ID NO: 22843 - protein, 9 aa, Homo Sapiens
AVYPVFLFY

SEQ ID NO: 22844 - protein, 9 aa, Homo Sapiens
AVYSGISLK

SEQ ID NO: 22845 - protein, 9 aa, Homo Sapiens
CLYPRFVQR

SEQ ID NO: 22846 - protein, 9 aa, Homo Sapiens
FINPKPITY

SEQ ID NO: 22847 - protein, 9 aa, Homo Sapiens
FIYLGEVFK

SEQ ID NO: 22848 - protein, 9 aa, Homo Sapiens
FLSAVFFAK

SEQ ID NO: 22849 - protein, 9 aa, Homo Sapiens
FLVPWFIPK

SEQ ID NO: 22850 - protein, 9 aa, Homo Sapiens
FLYAFIGVK

SEQ ID NO: 22851 - protein, 9 aa, Homo Sapiens
FPSLLTNPK

SEQ ID NO: 22852 - protein, 9 aa, Homo Sapiens
FQYDRFFEK

SEQ ID NO: 22853 - protein, 9 aa, Homo Sapiens
FTAPPVLGK

SEQ ID NO: 22854 - protein, 9 aa, Homo Sapiens
GIADFVLKY

SEQ ID NO: 22855 - protein, 9 aa, Homo Sapiens
GIFPGTPLK

SEQ ID NO: 22856 - protein, 9 aa, Homo Sapiens
GIFPLSFVK

SEQ ID NO: 22857 - protein, 9 aa, Homo Sapiens
GIYIGSIMK

SEQ ID NO: 22858 - protein, 9 aa, Homo Sapiens
GLAAFLLQH

SEQ ID NO: 22859 - protein, 9 aa, Homo Sapiens
GLFAHELFY

SEQ ID NO: 22860 - protein, 9 aa, Homo Sapiens
GLFALPFGR

SEQ ID NO: 22861 - protein, 9 aa, Homo Sapiens
GLFGKTVPK

SEQ ID NO: 22862 - protein, 9 aa, Homo Sapiens
GLFNRIIRK

SEQ ID NO: 22863 - protein, 9 aa, Homo Sapiens
GLFTHTIFY

SEQ ID NO: 22864 - protein, 9 aa, Homo Sapiens
GLFVPVIYK

SEQ ID NO: 22865 - protein, 9 aa, Homo Sapiens
GLGEPLALK

SEQ ID NO: 22866 - protein, 9 aa, Homo Sapiens
GLINFGIYK

SEQ ID NO: 22867 - protein, 9 aa, Homo Sapiens
GLLDIILAK

SEQ ID NO: 22868 - protein, 9 aa, Homo Sapiens
GLLSWTLSR

SEQ ID NO: 22869 - protein, 9 aa, Homo Sapiens
GLLTKPIVK

SEQ ID NO: 22870 - protein, 9 aa, Homo Sapiens
GLMGFIVYK

SEQ ID NO: 22871 - protein, 9 aa, Homo Sapiens
GLNLHTLLY

SEQ ID NO: 22872 - protein, 9 aa, Homo Sapiens
GLPFLILFH

SEQ ID NO: 22873 - protein, 9 aa, Homo Sapiens
GLRDPLIFK

SEQ ID NO: 22874 - protein, 9 aa, Homo Sapiens
GLSDIILGK

SEQ ID NO: 22875 - protein, 9 aa, Homo Sapiens
GLTDVILYH

SEQ ID NO: 22876 - protein, 9 aa, Homo Sapiens
GLTVPTSPK

SEQ ID NO: 22877 - protein, 9 aa, Homo Sapiens
GLVDVILYH

SEQ ID NO: 22878 - protein, 9 aa, Homo Sapiens
GLWHMKTYK

SEQ ID NO: 22879 - protein, 9 aa, Homo Sapiens
GLYEFFRAK

SEQ ID NO: 22880 - protein, 9 aa, Homo Sapiens
GLYEFPLNK

SEQ ID NO: 22881 - protein, 9 aa, Homo Sapiens
GLYQDGVFK

SEQ ID NO: 22882 - protein, 9 aa, Homo Sapiens
GQYGNPLNK

SEQ ID NO: 22883 - protein, 9 aa, Homo Sapiens
GSWDGTLRL

SEQ ID NO: 22884 - protein, 9 aa, Homo Sapiens
GTAQLTLLH

SEQ ID NO: 22885 - protein, 9 aa, Homo Sapiens
GTFALNLLK

SEQ ID NO: 22886 - protein, 9 aa, Homo Sapiens
GTKLPGLLK

SEQ ID NO: 22887 - protein, 9 aa, Homo Sapiens
GTLAEFIQK

SEQ ID NO: 22888 - protein, 9 aa, Homo Sapiens
GTLSSWNLK

SEQ ID NO: 22889 - protein, 9 aa, Homo Sapiens
GTMEWIMIK

SEQ ID NO: 22890 - protein, 9 aa, Homo Sapiens
GTMPVSLLK

SEQ ID NO: 22891 - protein, 9 aa, Homo Sapiens
GTMTGMLYK

SEQ ID NO: 22892 - protein, 9 aa, Homo Sapiens
GTSSLFIYK

SEQ ID NO: 22893 - protein, 9 aa, Homo Sapiens
GTYVSSVPR

SEQ ID NO: 22894 - protein, 9 aa, Homo Sapiens
GVADKILKK

SEQ ID NO: 22895 - protein, 9 aa, Homo Sapiens
GVFGFPLGR

SEQ ID NO: 22896 - protein, 9 aa, Homo Sapiens
GVFLSLIQK

SEQ ID NO: 22897 - protein, 9 aa, Homo Sapiens
GVLAWVKEK

SEQ ID NO: 22898 - protein, 9 aa, Homo Sapiens
GVLYPLSSK

SEQ ID NO: 22899 - protein, 9 aa, Homo Sapiens
GVMDYYLKY

SEQ ID NO: 22900 - protein, 9 aa, Homo Sapiens
GVMSPPLSR

SEQ ID NO: 22901 - protein, 9 aa, Homo Sapiens
GVNPYILKK

SEQ ID NO: 22902 - protein, 9 aa, Homo Sapiens
GVSAATFLK

SEQ ID NO: 22903 - protein, 9 aa, Homo Sapiens
GVSSIFIYH

SEQ ID NO: 22904 - protein, 9 aa, Homo Sapiens
HIAENILSY

SEQ ID NO: 22905 - protein, 9 aa, Homo Sapiens
HIFMKVFPK

SEQ ID NO: 22906 - protein, 9 aa, Homo Sapiens
HINGRVLYY

SEQ ID NO: 22907 - protein, 9 aa, Homo Sapiens
HIPLNLSGK

SEQ ID NO: 22908 - protein, 9 aa, Homo Sapiens
HISPNAIFK

SEQ ID NO: 22909 - protein, 9 aa, Homo Sapiens
HLADILSSK

SEQ ID NO: 22910 - protein, 9 aa, Homo Sapiens
HLEDIVRQK

SEQ ID NO: 22911 - protein, 9 aa, Homo Sapiens
HLFDHVVNR

SEQ ID NO: 22912 - protein, 9 aa, Homo Sapiens
HLISPLIQK

SEQ ID NO: 22913 - protein, 9 aa, Homo Sapiens
HLLITNSIK

SEQ ID NO: 22914 - protein, 9 aa, Homo Sapiens
HLTAVTIFY

SEQ ID NO: 22915 - protein, 9 aa, Homo Sapiens
HLYGSLLYY

SEQ ID NO: 22916 - protein, 9 aa, Homo Sapiens
HLYSTILGH

SEQ ID NO: 22917 - protein, 9 aa, Homo Sapiens
HTFGGPLLK

SEQ ID NO: 22918 - protein, 9 aa, Homo Sapiens
HTLEPLIPR

SEQ ID NO: 22919 - protein, 9 aa, Homo Sapiens
HTPQFFIYK

SEQ ID NO: 22920 - protein, 9 aa, Homo Sapiens
HVGISFVPK

SEQ ID NO: 22921 - protein, 9 aa, Homo Sapiens
HVIETLIGK

SEQ ID NO: 22922 - protein, 9 aa, Homo Sapiens
HVPSPAVPK

SEQ ID NO: 22923 - protein, 9 aa, Homo Sapiens
HVVLPVKPK

SEQ ID NO: 22924 - protein, 9 aa, Homo Sapiens
HVYVGNISK

SEQ ID NO: 22925 - protein, 9 aa, Homo Sapiens
IIAKVFLAY

SEQ ID NO: 22926 - protein, 9 aa, Homo Sapiens
IIFDRPLLY

SEQ ID NO: 22927 - protein, 9 aa, Homo Sapiens
IIFQGQSLK

SEQ ID NO: 22928 - protein, 9 aa, Homo Sapiens
IIGTIFIIK

SEQ ID NO: 22929 - protein, 9 aa, Homo Sapiens
IINPFPASK

SEQ ID NO: 22930 - protein, 9 aa, Homo Sapiens
IINSSITTK

SEQ ID NO: 22931 - protein, 9 aa, Homo Sapiens
IITSVLRIS

SEQ ID NO: 22932 - protein, 9 aa, Homo Sapiens
ILAAPGILK

SEQ ID NO: 22933 - protein, 9 aa, Homo Sapiens
ILADMLLYY

SEQ ID NO: 22934 - protein, 9 aa, Homo Sapiens
ILFGGYVAK

SEQ ID NO: 22935 - protein, 9 aa, Homo Sapiens
ILFIRIMPK

SEQ ID NO: 22936 - protein, 9 aa, Homo Sapiens
ILFSEGLIK

SEQ ID NO: 22937 - protein, 9 aa, Homo Sapiens
ILGPMFSGK

SEQ ID NO: 22938 - protein, 9 aa, Homo Sapiens
ILGPNLGDK

SEQ ID NO: 22939 - protein, 9 aa, Homo Sapiens
ILNLKVIDK

SEQ ID NO: 22940 - protein, 9 aa, Homo Sapiens
ILNNKLISK

SEQ ID NO: 22941 - protein, 9 aa, Homo Sapiens
ILNTWISLK

SEQ ID NO: 22942 - protein, 9 aa, Homo Sapiens
ILPYPVSPK

SEQ ID NO: 22943 - protein, 9 aa, Homo Sapiens
ILSGGVFNK

SEQ ID NO: 22944 - protein, 9 aa, Homo Sapiens
ILYCIPLRY

SEQ ID NO: 22945 - protein, 9 aa, Homo Sapiens
ILYIATPNK

SEQ ID NO: 22946 - protein, 9 aa, Homo Sapiens
ILYIRNLPY

SEQ ID NO: 22947 - protein, 9 aa, Homo Sapiens
ILYPVIFHK

SEQ ID NO: 22948 - protein, 9 aa, Homo Sapiens
IQATPLELK

SEQ ID NO: 22949 - protein, 9 aa, Homo Sapiens
IQFSMKLLY

SEQ ID NO: 22950 - protein, 9 aa, Homo Sapiens
IQNDRQLQY

SEQ ID NO: 22951 - protein, 9 aa, Homo Sapiens
IRSSKLIQH

SEQ ID NO: 22952 - protein, 9 aa, Homo Sapiens
ISFGAFVAK

SEQ ID NO: 22953 - protein, 9 aa, Homo Sapiens
ISQEPFVPK

SEQ ID NO: 22954 - protein, 9 aa, Homo Sapiens
ISSIPINLR

SEQ ID NO: 22955 - protein, 9 aa, Homo Sapiens
ITNPKSLLY

SEQ ID NO: 22956 - protein, 9 aa, Homo Sapiens
ITSPVVTQK

SEQ ID NO: 22957 - protein, 9 aa, Homo Sapiens
IVAGSLITK

SEQ ID NO: 22958 - protein, 9 aa, Homo Sapiens
IVALILSTK

SEQ ID NO: 22959 - protein, 9 aa, Homo Sapiens
IVFDPLGGK

SEQ ID NO: 22960 - protein, 9 aa, Homo Sapiens
IVFMPVIGK

SEQ ID NO: 22961 - protein, 9 aa, Homo Sapiens
IVFSLTFFK

SEQ ID NO: 22962 - protein, 9 aa, Homo Sapiens
IVGTVLIIK

SEQ ID NO: 22963 - protein, 9 aa, Homo Sapiens
IVLIFEAPK

SEQ ID NO: 22964 - protein, 9 aa, Homo Sapiens
IVLSAVITK

SEQ ID NO: 22965 - protein, 9 aa, Homo Sapiens
IVNGHTLLV

SEQ ID NO: 22966 - protein, 9 aa, Homo Sapiens
IVNIIVPTK

SEQ ID NO: 22967 - protein, 9 aa, Homo Sapiens
IVSAQNLLK

SEQ ID NO: 22968 - protein, 9 aa, Homo Sapiens
IVSNIRLLH

SEQ ID NO: 22969 - protein, 9 aa, Homo Sapiens
IVSSLRLAY

SEQ ID NO: 22970 - protein, 9 aa, Homo Sapiens
IVTSINFSK

SEQ ID NO: 22971 - protein, 9 aa, Homo Sapiens
IVTSVLLLY

SEQ ID NO: 22972 - protein, 9 aa, Homo Sapiens
IVVPPLPEK

SEQ ID NO: 22973 - protein, 9 aa, Homo Sapiens
IVYPPPPAK

SEQ ID NO: 22974 - protein, 9 aa, Homo Sapiens
KAGEVFIHK

SEQ ID NO: 22975 - protein, 9 aa, Homo Sapiens
KASEVFLQR

SEQ ID NO: 22976 - protein, 9 aa, Homo Sapiens
KFKFPGRQK

SEQ ID NO: 22977 - protein, 9 aa, Homo Sapiens
KIADFGLAR

SEQ ID NO: 22978 - protein, 9 aa, Homo Sapiens
KIADMGHLK

SEQ ID NO: 22979 - protein, 9 aa, Homo Sapiens
KIADRFLLY

SEQ ID NO: 22980 - protein, 9 aa, Homo Sapiens
KIGDFGLTK

SEQ ID NO: 22981 - protein, 9 aa, Homo Sapiens
KILDIGLAY

SEQ ID NO: 22982 - protein, 9 aa, Homo Sapiens
KILSNVISK

SEQ ID NO: 22983 - protein, 9 aa, Homo Sapiens
KIPDWFLNR

SEQ ID NO: 22984 - protein, 9 aa, Homo Sapiens
KISALALLK

SEQ ID NO: 22985 - protein, 9 aa, Homo Sapiens
KISLPPVLK

SEQ ID NO: 22986 - protein, 9 aa, Homo Sapiens
KITAPLINK

SEQ ID NO: 22987 - protein, 9 aa, Homo Sapiens
KIWQNLRLK

SEQ ID NO: 22988 - protein, 9 aa, Homo Sapiens
KIYHISLEY

SEQ ID NO: 22989 - protein, 9 aa, Homo Sapiens
KIYNANYLK

SEQ ID NO: 22990 - protein, 9 aa, Homo Sapiens
KLAEILYYK

SEQ ID NO: 22991 - protein, 9 aa, Homo Sapiens
KLATTILQH

SEQ ID NO: 22992 - protein, 9 aa, Homo Sapiens
KLDGRSLIK

SEQ ID NO: 22993 - protein, 9 aa, Homo Sapiens
KLDGSRLIK

SEQ ID NO: 22994 - protein, 9 aa, Homo Sapiens
KLDRPRFER

SEQ ID NO: 22995 - protein, 9 aa, Homo Sapiens
KLDSVRVLR

SEQ ID NO: 22996 - protein, 9 aa, Homo Sapiens
KLFDKLLEY

SEQ ID NO: 22997 - protein, 9 aa, Homo Sapiens
KLFGFLLEY

SEQ ID NO: 22998 - protein, 9 aa, Homo Sapiens
KLFVGFLNR

SEQ ID NO: 22999 - protein, 9 aa, Homo Sapiens
KLGDIMGVK

SEQ ID NO: 23000 - protein, 9 aa, Homo Sapiens
KLIAWERTK

SEQ ID NO: 23001 - protein, 9 aa, Homo Sapiens
KLLAHPLQR

SEQ ID NO: 23002 - protein, 9 aa, Homo Sapiens
KLLAIPVEK

SEQ ID NO: 23003 - protein, 9 aa, Homo Sapiens
KLLDAYLLY

SEQ ID NO: 23004 - protein, 9 aa, Homo Sapiens
KLLESIFHR

SEQ ID NO: 23005 - protein, 9 aa, Homo Sapiens
KLLEVWFSR

SEQ ID NO: 23006 - protein, 9 aa, Homo Sapiens
KLLGPVLVK

SEQ ID NO: 23007 - protein, 9 aa, Homo Sapiens
KLLPNGFTK

SEQ ID NO: 23008 - protein, 9 aa, Homo Sapiens
KLLPSALQK

SEQ ID NO: 23009 - protein, 9 aa, Homo Sapiens
KLNIPAILR

SEQ ID NO: 23010 - protein, 9 aa, Homo Sapiens
KLNIRPLLR

SEQ ID NO: 23011 - protein, 9 aa, Homo Sapiens
KLPHRLIEK

SEQ ID NO: 23012 - protein, 9 aa, Homo Sapiens
KLPNTVLGK

SEQ ID NO: 23013 - protein, 9 aa, Homo Sapiens
KLPVVGIGK

SEQ ID NO: 23014 - protein, 9 aa, Homo Sapiens
KLRQPFFQK

SEQ ID NO: 23015 - protein, 9 aa, Homo Sapiens
KLSFSQVFK

SEQ ID NO: 23016 - protein, 9 aa, Homo Sapiens
KLTDQTLIY

SEQ ID NO: 23017 - protein, 9 aa, Homo Sapiens
KLVENILAK

SEQ ID NO: 23018 - protein, 9 aa, Homo Sapiens
KLWDNELQY

SEQ ID NO: 23019 - protein, 9 aa, Homo Sapiens
KLYAGQVGY

SEQ ID NO: 23020 - protein, 9 aa, Homo Sapiens
KLYGKPIRV

SEQ ID NO: 23021 - protein, 9 aa, Homo Sapiens
KLYPLPSAR

SEQ ID NO: 23022 - protein, 9 aa, Homo Sapiens
KLYQSIIGY

SEQ ID NO: 23023 - protein, 9 aa, Homo Sapiens
KLYSLFLKY

SEQ ID NO: 23024 - protein, 9 aa, Homo Sapiens
KLYTLPASH

SEQ ID NO: 23025 - protein, 9 aa, Homo Sapiens
KMLRDTLYY

SEQ ID NO: 23026 - protein, 9 aa, Homo Sapiens
KMSSSVISY

SEQ ID NO: 23027 - protein, 9 aa, Homo Sapiens
KQSQILLVY

SEQ ID NO: 23028 - protein, 9 aa, Homo Sapiens
KSSAISLHY

SEQ ID NO: 23029 - protein, 9 aa, Homo Sapiens
KSTAISLFY

SEQ ID NO: 23030 - protein, 9 aa, Homo Sapiens
KTDVTMLLY

SEQ ID NO: 23031 - protein, 9 aa, Homo Sapiens
KTLDHVLTH

SEQ ID NO: 23032 - protein, 9 aa, Homo Sapiens
KTLYLIMEY

SEQ ID NO: 23033 - protein, 9 aa, Homo Sapiens
KTLYPIIGK

SEQ ID NO: 23034 - protein, 9 aa, Homo Sapiens
KTMNIYFPK

SEQ ID NO: 23035 - protein, 9 aa, Homo Sapiens
KTNFRLLKR

SEQ ID NO: 23036 - protein, 9 aa, Homo Sapiens
KTNGKFLIR

SEQ ID NO: 23037 - protein, 9 aa, Homo Sapiens
KTPDFILQV

SEQ ID NO: 23038 - protein, 9 aa, Homo Sapiens
KTSNLLLSH

SEQ ID NO: 23039 - protein, 9 aa, Homo Sapiens
KVADMALHY

SEQ ID NO: 23040 - protein, 9 aa, Homo Sapiens
KVANIILSY

SEQ ID NO: 23041 - protein, 9 aa, Homo Sapiens
KVAPVVITY

SEQ ID NO: 23042 - protein, 9 aa, Homo Sapiens
KVAVKILNR

SEQ ID NO: 23043 - protein, 9 aa, Homo Sapiens
KVAVVLIQK

SEQ ID NO: 23044 - protein, 9 aa, Homo Sapiens
KVCNPIITK

SEQ ID NO: 23045 - protein, 9 aa, Homo Sapiens
KVDAGKLHY

SEQ ID NO: 23046 - protein, 9 aa, Homo Sapiens
KVFERAVQY

SEQ ID NO: 23047 - protein, 9 aa, Homo Sapiens
KVFKQIFSK

SEQ ID NO: 23048 - protein, 9 aa, Homo Sapiens
KVGEVIVTK

SEQ ID NO: 23049 - protein, 9 aa, Homo Sapiens
KVHAYIISY

SEQ ID NO: 23050 - protein, 9 aa, Homo Sapiens
KVLFPLLTK

SEQ ID NO: 23051 - protein, 9 aa, Homo Sapiens
KVLQKFLTY

SEQ ID NO: 23052 - protein, 9 aa, Homo Sapiens
KVLSILLKH

SEQ ID NO: 23053 - protein, 9 aa, Homo Sapiens
KVSDLTIPK

SEQ ID NO: 23054 - protein, 9 aa, Homo Sapiens
KVSDWQVLY

SEQ ID NO: 23055 - protein, 9 aa, Homo Sapiens
KVYENYPTY

SEQ ID NO: 23056 - protein, 9 aa, Homo Sapiens
KVYNIQIRY

SEQ ID NO: 23057 - protein, 9 aa, Homo Sapiens
LAYRGFIFK

SEQ ID NO: 23058 - protein, 9 aa, Homo Sapiens
LIAPIFLHR

SEQ ID NO: 23059 - protein, 9 aa, Homo Sapiens
LISPIILKK

SEQ ID NO: 23060 - protein, 9 aa, Homo Sapiens
LIYKLFTLK

SEQ ID NO: 23061 - protein, 9 aa, Homo Sapiens
LLAKVFITK

SEQ ID NO: 23062 - protein, 9 aa, Homo Sapiens
LLAYTLGVK

SEQ ID NO: 23063 - protein, 9 aa, Homo Sapiens
LLCQWIQSK

SEQ ID NO: 23064 - protein, 9 aa, Homo Sapiens
LLDIIRSLK

SEQ ID NO: 23065 - protein, 9 aa, Homo Sapiens
LLFSATMPK

SEQ ID NO: 23066 - protein, 9 aa, Homo Sapiens
LLGPRVIGK

SEQ ID NO: 23067 - protein, 9 aa, Homo Sapiens
LLKEKEKKM

SEQ ID NO: 23068 - protein, 9 aa, Homo Sapiens
LLKSFFTEK

SEQ ID NO: 23069 - protein, 9 aa, Homo Sapiens
LLLAEPPLK

SEQ ID NO: 23070 - protein, 9 aa, Homo Sapiens
LLLAPAVSK

SEQ ID NO: 23071 - protein, 9 aa, Homo Sapiens
LLPNHVLQK

SEQ ID NO: 23072 - protein, 9 aa, Homo Sapiens
LLPWPFRNK

SEQ ID NO: 23073 - protein, 9 aa, Homo Sapiens
LLTAVQLLY

SEQ ID NO: 23074 - protein, 9 aa, Homo Sapiens
LLWDRILGY

SEQ ID NO: 23075 - protein, 9 aa, Homo Sapiens
LLYEKNLVK

SEQ ID NO: 23076 - protein, 9 aa, Homo Sapiens
LLYGGLLVK

SEQ ID NO: 23077 - protein, 9 aa, Homo Sapiens
LLYKHIVGK

SEQ ID NO: 23078 - protein, 9 aa, Homo Sapiens
LLYPKSLSR

SEQ ID NO: 23079 - protein, 9 aa, Homo Sapiens
LMAISATFK

SEQ ID NO: 23080 - protein, 9 aa, Homo Sapiens
LPALKQTPK

SEQ ID NO: 23081 - protein, 9 aa, Homo Sapiens
LPINGNGKQ

SEQ ID NO: 23082 - protein, 9 aa, Homo Sapiens
LRNLGSLLK

SEQ ID NO: 23083 - protein, 9 aa, Homo Sapiens
LSFDRILKK

SEQ ID NO: 23084 - protein, 9 aa, Homo Sapiens
LSGPRLLFK

SEQ ID NO: 23085 - protein, 9 aa, Homo Sapiens
LSLLPLSEK

SEQ ID NO: 23086 - protein, 9 aa, Homo Sapiens
LSSGAVLYK

SEQ ID NO: 23087 - protein, 9 aa, Homo Sapiens
LSYLKYRSP

SEQ ID NO: 23088 - protein, 9 aa, Homo Sapiens
LTAEAFGFK

SEQ ID NO: 23089 - protein, 9 aa, Homo Sapiens
LTGPVMPVR

SEQ ID NO: 23090 - protein, 9 aa, Homo Sapiens
LTLPETASL

SEQ ID NO: 23091 - protein, 9 aa, Homo Sapiens
LVANFFPKK

SEQ ID NO: 23092 - protein, 9 aa, Homo Sapiens
LVFATMITK

SEQ ID NO: 23093 - protein, 9 aa, Homo Sapiens
LVFWVILLY

SEQ ID NO: 23094 - protein, 9 aa, Homo Sapiens
LVIPFTIKK

SEQ ID NO: 23095 - protein, 9 aa, Homo Sapiens
LVMTHLILK

SEQ ID NO: 23096 - protein, 9 aa, Homo Sapiens
LVSSRILSR

SEQ ID NO: 23097 - protein, 9 aa, Homo Sapiens
MAAAAFAEK

SEQ ID NO: 23098 - protein, 9 aa, Homo Sapiens
MAPLKMLAL

SEQ ID NO: 23099 - protein, 9 aa, Homo Sapiens
MAYLGTITK

SEQ ID NO: 23100 - protein, 9 aa, Homo Sapiens
MIASHLLAY

SEQ ID NO: 23101 - protein, 9 aa, Homo Sapiens
MILPLPLRK

SEQ ID NO: 23102 - protein, 9 aa, Homo Sapiens
MILPNPLYH

SEQ ID NO: 23103 - protein, 9 aa, Homo Sapiens
MLLILMLFK

SEQ ID NO: 23104 - protein, 9 aa, Homo Sapiens
MMFSATFPK

SEQ ID NO: 23105 - protein, 9 aa, Homo Sapiens
MVFGAPVPK

SEQ ID NO: 23106 - protein, 9 aa, Homo Sapiens
NINNPFVFK

SEQ ID NO: 23107 - protein, 9 aa, Homo Sapiens
NKTQTILFY

SEQ ID NO: 23108 - protein, 9 aa, Homo Sapiens
NLATPIAIK

SEQ ID NO: 23109 - protein, 9 aa, Homo Sapiens
PISGWFALK

SEQ ID NO: 23110 - protein, 9 aa, Homo Sapiens
PLYSSPIVK

SEQ ID NO: 23111 - protein, 9 aa, Homo Sapiens
QAADILLYK

SEQ ID NO: 23112 - protein, 9 aa, Homo Sapiens
QIASFILLR

SEQ ID NO: 23113 - protein, 9 aa, Homo Sapiens
QIAVIAIFK

SEQ ID NO: 23114 - protein, 9 aa, Homo Sapiens
QIFIPMVNK

SEQ ID NO: 23115 - protein, 9 aa, Homo Sapiens
QIFKPIISK

SEQ ID NO: 23116 - protein, 9 aa, Homo Sapiens
QIFSEFLLK

SEQ ID NO: 23117 - protein, 9 aa, Homo Sapiens
QILKLLIKF

SEQ ID NO: 23118 - protein, 9 aa, Homo Sapiens
QISEVVVVK

SEQ ID NO: 23119 - protein, 9 aa, Homo Sapiens
QITLPTVQK

SEQ ID NO: 23120 - protein, 9 aa, Homo Sapiens
QIYTYFVYK

SEQ ID NO: 23121 - protein, 9 aa, Homo Sapiens
QKIYIYTLK

SEQ ID NO: 23122 - protein, 9 aa, Homo Sapiens
QLFEVKVFK

SEQ ID NO: 23123 - protein, 9 aa, Homo Sapiens
QLFSFPIKH

SEQ ID NO: 23124 - protein, 9 aa, Homo Sapiens
QLGALFILK

SEQ ID NO: 23125 - protein, 9 aa, Homo Sapiens
QLLLNPLLH

SEQ ID NO: 23126 - protein, 9 aa, Homo Sapiens
QLYEKGLYY

SEQ ID NO: 23127 - protein, 9 aa, Homo Sapiens
QLYPRNFLR

SEQ ID NO: 23128 - protein, 9 aa, Homo Sapiens
QLYSTILSH

SEQ ID NO: 23129 - protein, 9 aa, Homo Sapiens
QLYWSHPRK

SEQ ID NO: 23130 - protein, 9 aa, Homo Sapiens
QTLVRILSH

SEQ ID NO: 23131 - protein, 9 aa, Homo Sapiens
QTYVGITEK

SEQ ID NO: 23132 - protein, 9 aa, Homo Sapiens
QVHAWQLYY

SEQ ID NO: 23133 - protein, 9 aa, Homo Sapiens
QVSVRPLQH

SEQ ID NO: 23134 - protein, 9 aa, Homo Sapiens
QVYMKPPAH

SEQ ID NO: 23135 - protein, 9 aa, Homo Sapiens
RAAPFSLEY

SEQ ID NO: 23136 - protein, 9 aa, Homo Sapiens
RAYPHVFTK

SEQ ID NO: 23137 - protein, 9 aa, Homo Sapiens
RFWTSFFPK

SEQ ID NO: 23138 - protein, 9 aa, Homo Sapiens
RIAEFAFEY

SEQ ID NO: 23139 - protein, 9 aa, Homo Sapiens
RIAEIFMRH

SEQ ID NO: 23140 - protein, 9 aa, Homo Sapiens
RICEILLQY

SEQ ID NO: 23141 - protein, 9 aa, Homo Sapiens
RIFDLGRKK

SEQ ID NO: 23142 - protein, 9 aa, Homo Sapiens
RIFEPPPPK

SEQ ID NO: 23143 - protein, 9 aa, Homo Sapiens
RIFETLQDK

SEQ ID NO: 23144 - protein, 9 aa, Homo Sapiens
RIFNPHLNK

SEQ ID NO: 23145 - protein, 9 aa, Homo Sapiens
RIFTSVPKR

SEQ ID NO: 23146 - protein, 9 aa, Homo Sapiens
RIFVYFITK

SEQ ID NO: 23147 - protein, 9 aa, Homo Sapiens
RIGNFIVKK

SEQ ID NO: 23148 - protein, 9 aa, Homo Sapiens
RIGQVGKFK

SEQ ID NO: 23149 - protein, 9 aa, Homo Sapiens
RIHFHTLVY

SEQ ID NO: 23150 - protein, 9 aa, Homo Sapiens
RIHFPLATY

SEQ ID NO: 23151 - protein, 9 aa, Homo Sapiens
RIIDLVLQK

SEQ ID NO: 23152 - protein, 9 aa, Homo Sapiens
RIIQQPLIY

SEQ ID NO: 23153 - protein, 9 aa, Homo Sapiens
RIKEIFCPK

SEQ ID NO: 23154 - protein, 9 aa, Homo Sapiens
RIKPPWVVK

SEQ ID NO: 23155 - protein, 9 aa, Homo Sapiens
RILFFNTPK

SEQ ID NO: 23156 - protein, 9 aa, Homo Sapiens
RILLPIVQK

SEQ ID NO: 23157 - protein, 9 aa, Homo Sapiens
RILPWSTFR

SEQ ID NO: 23158 - protein, 9 aa, Homo Sapiens
RILSGVVTK

SEQ ID NO: 23159 - protein, 9 aa, Homo Sapiens
RIMENVFQH

SEQ ID NO: 23160 - protein, 9 aa, Homo Sapiens
RIMKKTSLY

SEQ ID NO: 23161 - protein, 9 aa, Homo Sapiens
RIQLPVVSK

SEQ ID NO: 23162 - protein, 9 aa, Homo Sapiens
RISNLIVLH

SEQ ID NO: 23163 - protein, 9 aa, Homo Sapiens
RIYAGGEHY

SEQ ID NO: 23164 - protein, 9 aa, Homo Sapiens
RIYDIFRSK

SEQ ID NO: 23165 - protein, 9 aa, Homo Sapiens
RIYSYVVSR

SEQ ID NO: 23166 - protein, 9 aa, Homo Sapiens
RLADSLIGK

SEQ ID NO: 23167 - protein, 9 aa, Homo Sapiens
RLAEVALAY

SEQ ID NO: 23168 - protein, 9 aa, Homo Sapiens
RLAEVIKNR

SEQ ID NO: 23169 - protein, 9 aa, Homo Sapiens
RLDAVTLLY

SEQ ID NO: 23170 - protein, 9 aa, Homo Sapiens
RLDPNFLLK

SEQ ID NO: 23171 - protein, 9 aa, Homo Sapiens
RLDQPFIPR

SEQ ID NO: 23172 - protein, 9 aa, Homo Sapiens
RLDSRLWPK

SEQ ID NO: 23173 - protein, 9 aa, Homo Sapiens
RLFCVGFTK

SEQ ID NO: 23174 - protein, 9 aa, Homo Sapiens
RLFEWVVNR

SEQ ID NO: 23175 - protein, 9 aa, Homo Sapiens
RLFEYILLY

SEQ ID NO: 23176 - protein, 9 aa, Homo Sapiens
RLFFHCSQY

SEQ ID NO: 23177 - protein, 9 aa, Homo Sapiens
RLFGISLSY

SEQ ID NO: 23178 - protein, 9 aa, Homo Sapiens
RLFGLTKPK

SEQ ID NO: 23179 - protein, 9 aa, Homo Sapiens
RLFGNILDK

SEQ ID NO: 23180 - protein, 9 aa, Homo Sapiens
RLFIGGIPK

SEQ ID NO: 23181 - protein, 9 aa, Homo Sapiens
RLFKDQLVY

SEQ ID NO: 23182 - protein, 9 aa, Homo Sapiens
RLFLFQIQK

SEQ ID NO: 23183 - protein, 9 aa, Homo Sapiens
RLFNAIIHR

SEQ ID NO: 23184 - protein, 9 aa, Homo Sapiens
RLFPGLAIK

SEQ ID NO: 23185 - protein, 9 aa, Homo Sapiens
RLFPPLRQR

SEQ ID NO: 23186 - protein, 9 aa, Homo Sapiens
RLFPYSQYY

SEQ ID NO: 23187 - protein, 9 aa, Homo Sapiens
RLFQCLLHR

SEQ ID NO: 23188 - protein, 9 aa, Homo Sapiens
RLFSVIFKY

SEQ ID NO: 23189 - protein, 9 aa, Homo Sapiens
RLFVGSIPK

SEQ ID NO: 23190 - protein, 9 aa, Homo Sapiens
RLFYDISEK

SEQ ID NO: 23191 - protein, 9 aa, Homo Sapiens
RLGNSLLLK

SEQ ID NO: 23192 - protein, 9 aa, Homo Sapiens
RLHIEALLH

SEQ ID NO: 23193 - protein, 9 aa, Homo Sapiens
RLIAAFEQK

SEQ ID NO: 23194 - protein, 9 aa, Homo Sapiens
RLKLSTWKV

SEQ ID NO: 23195 - protein, 9 aa, Homo Sapiens
RLLETVLGY

SEQ ID NO: 23196 - protein, 9 aa, Homo Sapiens
RLLGNLVVK

SEQ ID NO: 23197 - protein, 9 aa, Homo Sapiens
RLLLIATGK

SEQ ID NO: 23198 - protein, 9 aa, Homo Sapiens
RLLLLLLRY

SEQ ID NO: 23199 - protein, 9 aa, Homo Sapiens
RLLTSLRAK

SEQ ID NO: 23200 - protein, 9 aa, Homo Sapiens
RLMEIYQEK

SEQ ID NO: 23201 - protein, 9 aa, Homo Sapiens
RLMHIQPPK

SEQ ID NO: 23202 - protein, 9 aa, Homo Sapiens
RLMSLPIAK

SEQ ID NO: 23203 - protein, 9 aa, Homo Sapiens
RLNAPLSQM

SEQ ID NO: 23204 - protein, 9 aa, Homo Sapiens
RLNEKMITK

SEQ ID NO: 23205 - protein, 9 aa, Homo Sapiens
RLNIPVSQV

SEQ ID NO: 23206 - protein, 9 aa, Homo Sapiens
RLNLQPLAY

SEQ ID NO: 23207 - protein, 9 aa, Homo Sapiens
RLPAFTLSH

SEQ ID NO: 23208 - protein, 9 aa, Homo Sapiens
RLPEHCIEY

SEQ ID NO: 23209 - protein, 9 aa, Homo Sapiens
RLPLRVVKH

SEQ ID NO: 23210 - protein, 9 aa, Homo Sapiens
RLPPPTILK

SEQ ID NO: 23211 - protein, 9 aa, Homo Sapiens
RLPSATLCY

SEQ ID NO: 23212 - protein, 9 aa, Homo Sapiens
RLPSSTLKR

SEQ ID NO: 23213 - protein, 9 aa, Homo Sapiens
RLQDQHMFY

SEQ ID NO: 23214 - protein, 9 aa, Homo Sapiens
RLQEIFTEK

SEQ ID NO: 23215 - protein, 9 aa, Homo Sapiens
RLQHQQLYY

SEQ ID NO: 23216 - protein, 9 aa, Homo Sapiens
RLSFPNLFK

SEQ ID NO: 23217 - protein, 9 aa, Homo Sapiens
RLSNLALVK

SEQ ID NO: 23218 - protein, 9 aa, Homo Sapiens
RLSPVPVPR

SEQ ID NO: 23219 - protein, 9 aa, Homo Sapiens
RLTTEQILY

SEQ ID NO: 23220 - protein, 9 aa, Homo Sapiens
RLTTPVFGK

SEQ ID NO: 23221 - protein, 9 aa, Homo Sapiens
RLVDLPISK

SEQ ID NO: 23222 - protein, 9 aa, Homo Sapiens
RLVQGSILK

SEQ ID NO: 23223 - protein, 9 aa, Homo Sapiens
RLWFKTNTK

SEQ ID NO: 23224 - protein, 9 aa, Homo Sapiens
RLYEFIVRH

SEQ ID NO: 23225 - protein, 9 aa, Homo Sapiens
RLYERLFQH

SEQ ID NO: 23226 - protein, 9 aa, Homo Sapiens
RLYFSQQTY

SEQ ID NO: 23227 - protein, 9 aa, Homo Sapiens
RLYGGMNYR

SEQ ID NO: 23228 - protein, 9 aa, Homo Sapiens
RLYKPILWR

SEQ ID NO: 23229 - protein, 9 aa, Homo Sapiens
RLYLNVLNR

SEQ ID NO: 23230 - protein, 9 aa, Homo Sapiens
RLYPVFFLK

SEQ ID NO: 23231 - protein, 9 aa, Homo Sapiens
RLYQHAVEY

SEQ ID NO: 23232 - protein, 9 aa, Homo Sapiens
RLYTKFSAR

SEQ ID NO: 23233 - protein, 9 aa, Homo Sapiens
RMFDMGFEY

SEQ ID NO: 23234 - protein, 9 aa, Homo Sapiens
RMNCVLATY

SEQ ID NO: 23235 - protein, 9 aa, Homo Sapiens
RMVEMFLEY

SEQ ID NO: 23236 - protein, 9 aa, Homo Sapiens
RQIDFVLSY

SEQ ID NO: 23237 - protein, 9 aa, Homo Sapiens
RQIPYTMMK

SEQ ID NO: 23238 - protein, 9 aa, Homo Sapiens
RQPEFFFYY

SEQ ID NO: 23239 - protein, 9 aa, Homo Sapiens
RQTATQLLK

SEQ ID NO: 23240 - protein, 9 aa, Homo Sapiens
RQTGIVLNR

SEQ ID NO: 23241 - protein, 9 aa, Homo Sapiens
RQVIPIIGK

SEQ ID NO: 23242 - protein, 9 aa, Homo Sapiens
RQYDKFLTH

SEQ ID NO: 23243 - protein, 9 aa, Homo Sapiens
RQYMHVLQH

SEQ ID NO: 23244 - protein, 9 aa, Homo Sapiens
RSDTPLIYK

SEQ ID NO: 23245 - protein, 9 aa, Homo Sapiens
RSYSDPPLK

SEQ ID NO: 23246 - protein, 9 aa, Homo Sapiens
RTAHVILRY

SEQ ID NO: 23247 - protein, 9 aa, Homo Sapiens
RTAPLLLSY

SEQ ID NO: 23248 - protein, 9 aa, Homo Sapiens
RTAVYSLHK

SEQ ID NO: 23249 - protein, 9 aa, Homo Sapiens
RTEYNLRLK

SEQ ID NO: 23250 - protein, 9 aa, Homo Sapiens
RTFGHLLRY

SEQ ID NO: 23251 - protein, 9 aa, Homo Sapiens
RTFPFSLQY

SEQ ID NO: 23252 - protein, 9 aa, Homo Sapiens
RTFQEVLAY

SEQ ID NO: 23253 - protein, 9 aa, Homo Sapiens
RTIAPIIGR

SEQ ID NO: 23254 - protein, 9 aa, Homo Sapiens
RTIFPLFMK

SEQ ID NO: 23255 - protein, 9 aa, Homo Sapiens
RTIQMFLVY

SEQ ID NO: 23256 - protein, 9 aa, Homo Sapiens
RTLEPLAKK

SEQ ID NO: 23257 - protein, 9 aa, Homo Sapiens
RTLKEILRY

SEQ ID NO: 23258 - protein, 9 aa, Homo Sapiens
RTLPKILSH

SEQ ID NO: 23259 - protein, 9 aa, Homo Sapiens
RTLPVLLLY

SEQ ID NO: 23260 - protein, 9 aa, Homo Sapiens
RTMPIYPTY

SEQ ID NO: 23261 - protein, 9 aa, Homo Sapiens
RTMVKTLEY

SEQ ID NO: 23262 - protein, 9 aa, Homo Sapiens
RTTQILLEY

SEQ ID NO: 23263 - protein, 9 aa, Homo Sapiens
RTTSHLLRY

SEQ ID NO: 23264 - protein, 9 aa, Homo Sapiens
RTWLGYLFY

SEQ ID NO: 23265 - protein, 9 aa, Homo Sapiens
RTYDLYITY

SEQ ID NO: 23266 - protein, 9 aa, Homo Sapiens
RTYDMIQYY

SEQ ID NO: 23267 - protein, 9 aa, Homo Sapiens
RTYYSPVYR

SEQ ID NO: 23268 - protein, 9 aa, Homo Sapiens
RVASPPIKY

SEQ ID NO: 23269 - protein, 9 aa, Homo Sapiens
RVFFPLCGK

SEQ ID NO: 23270 - protein, 9 aa, Homo Sapiens
RVFNIMREK

SEQ ID NO: 23271 - protein, 9 aa, Homo Sapiens
RVFNVFCLY

SEQ ID NO: 23272 - protein, 9 aa, Homo Sapiens
RVFPWFSVK

SEQ ID NO: 23273 - protein, 9 aa, Homo Sapiens
RVFPYSVFY

SEQ ID NO: 23274 - protein, 9 aa, Homo Sapiens
RVFQECLTY

SEQ ID NO: 23275 - protein, 9 aa, Homo Sapiens
RVGDVYIPR

SEQ ID NO: 23276 - protein, 9 aa, Homo Sapiens
RVKEIVINK

SEQ ID NO: 23277 - protein, 9 aa, Homo Sapiens
RVLPEFKKK

SEQ ID NO: 23278 - protein, 9 aa, Homo Sapiens
RVLPYPFTH

SEQ ID NO: 23279 - protein, 9 aa, Homo Sapiens
RVMKALVNR

SEQ ID NO: 23280 - protein, 9 aa, Homo Sapiens
RVNKLICVK

SEQ ID NO: 23281 - protein, 9 aa, Homo Sapiens
RVNVTGIYR

SEQ ID NO: 23282 - protein, 9 aa, Homo Sapiens
RVPDVVLIK

SEQ ID NO: 23283 - protein, 9 aa, Homo Sapiens
RVRDVFEAK

SEQ ID NO: 23284 - protein, 9 aa, Homo Sapiens
RVTDLFIGK

SEQ ID NO: 23285 - protein, 9 aa, Homo Sapiens
RVTPFILKK

SEQ ID NO: 23286 - protein, 9 aa, Homo Sapiens
RVVSYQIRY

SEQ ID NO: 23287 - protein, 9 aa, Homo Sapiens
RVYEVATFY

SEQ ID NO: 23288 - protein, 9 aa, Homo Sapiens
RVYHYFQWR

SEQ ID NO: 23289 - protein, 9 aa, Homo Sapiens
RVYIGRLSY

SEQ ID NO: 23290 - protein, 9 aa, Homo Sapiens
RVYNIYIRR

SEQ ID NO: 23291 - protein, 9 aa, Homo Sapiens
RVYNWDVKR

SEQ ID NO: 23292 - protein, 9 aa, Homo Sapiens
RVYVGSIYY

SEQ ID NO: 23293 - protein, 9 aa, Homo Sapiens
SAFGQAFSK

SEQ ID NO: 23294 - protein, 9 aa, Homo Sapiens
SIAAAVAPK

SEQ ID NO: 23295 - protein, 9 aa, Homo Sapiens
SIAAKILSY

SEQ ID NO: 23296 - protein, 9 aa, Homo Sapiens
SIAPPVPLK

SEQ ID NO: 23297 - protein, 9 aa, Homo Sapiens
SIASWFGLK

SEQ ID NO: 23298 - protein, 9 aa, Homo Sapiens
SIAVPIVLK

SEQ ID NO: 23299 - protein, 9 aa, Homo Sapiens
SIAWFTVFY

SEQ ID NO: 23300 - protein, 9 aa, Homo Sapiens
SIFKQPVTK

SEQ ID NO: 23301 - protein, 9 aa, Homo Sapiens
SIFPYVTTK

SEQ ID NO: 23302 - protein, 9 aa, Homo Sapiens
SIFRTPISK

SEQ ID NO: 23303 - protein, 9 aa, Homo Sapiens
SIFSKFTSK

SEQ ID NO: 23304 - protein, 9 aa, Homo Sapiens
SIFVKILQK

SEQ ID NO: 23305 - protein, 9 aa, Homo Sapiens
SIFVPGTQK

SEQ ID NO: 23306 - protein, 9 aa, Homo Sapiens
SIGDIFLKY

SEQ ID NO: 23307 - protein, 9 aa, Homo Sapiens
SIGQVFLLK

SEQ ID NO: 23308 - protein, 9 aa, Homo Sapiens
SILNNPIVK

SEQ ID NO: 23309 - protein, 9 aa, Homo Sapiens
SILNWVKFK

SEQ ID NO: 23310 - protein, 9 aa, Homo Sapiens
SILPAIFQK

SEQ ID NO: 23311 - protein, 9 aa, Homo Sapiens
SITSVFITK

SEQ ID NO: 23312 - protein, 9 aa, Homo Sapiens
SIWDETLYK

SEQ ID NO: 23313 - protein, 9 aa, Homo Sapiens
SIWDYFIAK

SEQ ID NO: 23314 - protein, 9 aa, Homo Sapiens
SIWSHQMYY

SEQ ID NO: 23315 - protein, 9 aa, Homo Sapiens
SIYFPYVLK

SEQ ID NO: 23316 - protein, 9 aa, Homo Sapiens
SIYPLGDIK

SEQ ID NO: 23317 - protein, 9 aa, Homo Sapiens
SIYVYKVLK

SEQ ID NO: 23318 - protein, 9 aa, Homo Sapiens
SLADFQIEK

SEQ ID NO: 23319 - protein, 9 aa, Homo Sapiens
SLAEILLKK

SEQ ID NO: 23320 - protein, 9 aa, Homo Sapiens
SLAERLLSH

SEQ ID NO: 23321 - protein, 9 aa, Homo Sapiens
SLAPVNIFK

SEQ ID NO: 23322 - protein, 9 aa, Homo Sapiens
SLDIYSRLR

SEQ ID NO: 23323 - protein, 9 aa, Homo Sapiens
SLFEGSLSK

SEQ ID NO: 23324 - protein, 9 aa, Homo Sapiens
SLFGSPVAK

SEQ ID NO: 23325 - protein, 9 aa, Homo Sapiens
SLFHAQLAY

SEQ ID NO: 23326 - protein, 9 aa, Homo Sapiens
SLFNHIYFK

SEQ ID NO: 23327 - protein, 9 aa, Homo Sapiens
SLFNTGFLK

SEQ ID NO: 23328 - protein, 9 aa, Homo Sapiens
SLFSKEAPK

SEQ ID NO: 23329 - protein, 9 aa, Homo Sapiens
SLFSRLFGK

SEQ ID NO: 23330 - protein, 9 aa, Homo Sapiens
SLFTASDYK

SEQ ID NO: 23331 - protein, 9 aa, Homo Sapiens
SLFVPLTVK

SEQ ID NO: 23332 - protein, 9 aa, Homo Sapiens
SLGQVVITK

SEQ ID NO: 23333 - protein, 9 aa, Homo Sapiens
SLGVAALYK

SEQ ID NO: 23334 - protein, 9 aa, Homo Sapiens
SLLDKFLIK

SEQ ID NO: 23335 - protein, 9 aa, Homo Sapiens
SLLGKPLSY

SEQ ID NO: 23336 - protein, 9 aa, Homo Sapiens
SLLGTWIGK

SEQ ID NO: 23337 - protein, 9 aa, Homo Sapiens
SLLGYFPNK

SEQ ID NO: 23338 - protein, 9 aa, Homo Sapiens
SLLHLTLPK

SEQ ID NO: 23339 - protein, 9 aa, Homo Sapiens
SLLNVSTPK

SEQ ID NO: 23340 - protein, 9 aa, Homo Sapiens
SLLPLQPTK

SEQ ID NO: 23341 - protein, 9 aa, Homo Sapiens
SLLSPLLEK

SEQ ID NO: 23342 - protein, 9 aa, Homo Sapiens
SLLSQMLHY

SEQ ID NO: 23343 - protein, 9 aa, Homo Sapiens
SLLSVLIPK

SEQ ID NO: 23344 - protein, 9 aa, Homo Sapiens
SLLYGSIPK

SEQ ID NO: 23345 - protein, 9 aa, Homo Sapiens
SLMHSFILK

SEQ ID NO: 23346 - protein, 9 aa, Homo Sapiens
SLMNVPLFK

SEQ ID NO: 23347 - protein, 9 aa, Homo Sapiens
SLMPWFHGK

SEQ ID NO: 23348 - protein, 9 aa, Homo Sapiens
SLMSVLIPK

SEQ ID NO: 23349 - protein, 9 aa, Homo Sapiens
SLNNKILNR

SEQ ID NO: 23350 - protein, 9 aa, Homo Sapiens
SLNPPIFLK

SEQ ID NO: 23351 - protein, 9 aa, Homo Sapiens
SLNSLLLPK

SEQ ID NO: 23352 - protein, 9 aa, Homo Sapiens
SLNTPGSFR

SEQ ID NO: 23353 - protein, 9 aa, Homo Sapiens
SLSFKVLKH

SEQ ID NO: 23354 - protein, 9 aa, Homo Sapiens
SLSGISLQK

SEQ ID NO: 23355 - protein, 9 aa, Homo Sapiens
SLSPVILIK

SEQ ID NO: 23356 - protein, 9 aa, Homo Sapiens
SLSSPLNPK

SEQ ID NO: 23357 - protein, 9 aa, Homo Sapiens
SLSVPSVSK

SEQ ID NO: 23358 - protein, 9 aa, Homo Sapiens
SLWDRLIFH

SEQ ID NO: 23359 - protein, 9 aa, Homo Sapiens
SLWQFYLSK

SEQ ID NO: 23360 - protein, 9 aa, Homo Sapiens
SLYGPGTNR

SEQ ID NO: 23361 - protein, 9 aa, Homo Sapiens
SLYPKLFQK

SEQ ID NO: 23362 - protein, 9 aa, Homo Sapiens
SLYPQFMFH

SEQ ID NO: 23363 - protein, 9 aa, Homo Sapiens
SLYQYFLSY

SEQ ID NO: 23364 - protein, 9 aa, Homo Sapiens
SLYRNILMY

SEQ ID NO: 23365 - protein, 9 aa, Homo Sapiens
SMFTAILKK

SEQ ID NO: 23366 - protein, 9 aa, Homo Sapiens
SMLEYFINR

SEQ ID NO: 23367 - protein, 9 aa, Homo Sapiens
SMWDYFVAK

SEQ ID NO: 23368 - protein, 9 aa, Homo Sapiens
SSFSGLLRK

SEQ ID NO: 23369 - protein, 9 aa, Homo Sapiens
SSLYIILKK

SEQ ID NO: 23370 - protein, 9 aa, Homo Sapiens
STAAFFLLR

SEQ ID NO: 23371 - protein, 9 aa, Homo Sapiens
STFFYPKLK

SEQ ID NO: 23372 - protein, 9 aa, Homo Sapiens
STFNQVVLK

SEQ ID NO: 23373 - protein, 9 aa, Homo Sapiens
STFSAPLNK

SEQ ID NO: 23374 - protein, 9 aa, Homo Sapiens
STLLNPIPK

SEQ ID NO: 23375 - protein, 9 aa, Homo Sapiens
STLPKPVQK

SEQ ID NO: 23376 - protein, 9 aa, Homo Sapiens
STLPKSLLK

SEQ ID NO: 23377 - protein, 9 aa, Homo Sapiens
STMGYMMAK

SEQ ID NO: 23378 - protein, 9 aa, Homo Sapiens
STYEKALGY

SEQ ID NO: 23379 - protein, 9 aa, Homo Sapiens
SVAKTILKR

SEQ ID NO: 23380 - protein, 9 aa, Homo Sapiens
SVAQLLLSK

SEQ ID NO: 23381 - protein, 9 aa, Homo Sapiens
SVATKLLLY

SEQ ID NO: 23382 - protein, 9 aa, Homo Sapiens
SVAVRVLSY

SEQ ID NO: 23383 - protein, 9 aa, Homo Sapiens
SVFESLIAK

SEQ ID NO: 23384 - protein, 9 aa, Homo Sapiens
SVFGTMPLK

SEQ ID NO: 23385 - protein, 9 aa, Homo Sapiens
SVFNHAIRH

SEQ ID NO: 23386 - protein, 9 aa, Homo Sapiens
SVHWFPVQK

SEQ ID NO: 23387 - protein, 9 aa, Homo Sapiens
SVISSPLLK

SEQ ID NO: 23388 - protein, 9 aa, Homo Sapiens
SVIVQPFSK

SEQ ID NO: 23389 - protein, 9 aa, Homo Sapiens
SVLLFVTKK

SEQ ID NO: 23390 - protein, 9 aa, Homo Sapiens
SVLLPLVAK

SEQ ID NO: 23391 - protein, 9 aa, Homo Sapiens
SVLNFATNR

SEQ ID NO: 23392 - protein, 9 aa, Homo Sapiens
SVLNIPMAK

SEQ ID NO: 23393 - protein, 9 aa, Homo Sapiens
SVLNLVIVK

SEQ ID NO: 23394 - protein, 9 aa, Homo Sapiens
SVLPFQIYY

SEQ ID NO: 23395 - protein, 9 aa, Homo Sapiens
SVLSALTNK

SEQ ID NO: 23396 - protein, 9 aa, Homo Sapiens
SVMGVYVGK

SEQ ID NO: 23397 - protein, 9 aa, Homo Sapiens
SVPAFASSL

SEQ ID NO: 23398 - protein, 9 aa, Homo Sapiens
SVPLPISHK

SEQ ID NO: 23399 - protein, 9 aa, Homo Sapiens
SVPVSLQTL

SEQ ID NO: 23400 - protein, 9 aa, Homo Sapiens
SVSIPSITK

SEQ ID NO: 23401 - protein, 9 aa, Homo Sapiens
SVSNVVITK

SEQ ID NO: 23402 - protein, 9 aa, Homo Sapiens
SVSPFLLGR

SEQ ID NO: 23403 - protein, 9 aa, Homo Sapiens
SVVGLFLRH

SEQ ID NO: 23404 - protein, 9 aa, Homo Sapiens
SVYFPTLRH

SEQ ID NO: 23405 - protein, 9 aa, Homo Sapiens
SVYVYKVLK

SEQ ID NO: 23406 - protein, 9 aa, Homo Sapiens
TIFGKIIRK

SEQ ID NO: 23407 - protein, 9 aa, Homo Sapiens
TIFTARLYY

SEQ ID NO: 23408 - protein, 9 aa, Homo Sapiens
TIFVPNTGK

SEQ ID NO: 23409 - protein, 9 aa, Homo Sapiens
TIGKEIIDL

SEQ ID NO: 23410 - protein, 9 aa, Homo Sapiens
TISAARLYY

SEQ ID NO: 23411 - protein, 9 aa, Homo Sapiens
TISPPLQPK

SEQ ID NO: 23412 - protein, 9 aa, Homo Sapiens
TIYSISSLK

SEQ ID NO: 23413 - protein, 9 aa, Homo Sapiens
TLAAWLINK

SEQ ID NO: 23414 - protein, 9 aa, Homo Sapiens
TLADILLYY

SEQ ID NO: 23415 - protein, 9 aa, Homo Sapiens
TLAFKPIKK

SEQ ID NO: 23416 - protein, 9 aa, Homo Sapiens
TLALWPVSK

SEQ ID NO: 23417 - protein, 9 aa, Homo Sapiens
TLAVNIIAK

SEQ ID NO: 23418 - protein, 9 aa, Homo Sapiens
TLCKPLVPR

SEQ ID NO: 23419 - protein, 9 aa, Homo Sapiens
TLFASIILK

SEQ ID NO: 23420 - protein, 9 aa, Homo Sapiens
TLFGKAILR

SEQ ID NO: 23421 - protein, 9 aa, Homo Sapiens
TLFNLGLTK

SEQ ID NO: 23422 - protein, 9 aa, Homo Sapiens
TLGPALLQK

SEQ ID NO: 23423 - protein, 9 aa, Homo Sapiens
TLLDLMIAK

SEQ ID NO: 23424 - protein, 9 aa, Homo Sapiens
TLLEKQLEY

SEQ ID NO: 23425 - protein, 9 aa, Homo Sapiens
TLPTSTLQY

SEQ ID NO: 23426 - protein, 9 aa, Homo Sapiens
TLQGPVSFK

SEQ ID NO: 23427 - protein, 9 aa, Homo Sapiens
TLSGWILSK

SEQ ID NO: 23428 - protein, 9 aa, Homo Sapiens
TLSNQPLLK

SEQ ID NO: 23429 - protein, 9 aa, Homo Sapiens
TLYFNTQEK

SEQ ID NO: 23430 - protein, 9 aa, Homo Sapiens
TLYISECLK

SEQ ID NO: 23431 - protein, 9 aa, Homo Sapiens
TLYRIFNNK

SEQ ID NO: 23432 - protein, 9 aa, Homo Sapiens
TMCPHILRY

SEQ ID NO: 23433 - protein, 9 aa, Homo Sapiens
TSALPIIQK

SEQ ID NO: 23434 - protein, 9 aa, Homo Sapiens
TSLPPLPFK

SEQ ID NO: 23435 - protein, 9 aa, Homo Sapiens
TTVPHVFSK

SEQ ID NO: 23436 - protein, 9 aa, Homo Sapiens
TVAECVLYY

SEQ ID NO: 23437 - protein, 9 aa, Homo Sapiens
TVAKIILIH

SEQ ID NO: 23438 - protein, 9 aa, Homo Sapiens
TVAVPLVGK

SEQ ID NO: 23439 - protein, 9 aa, Homo Sapiens
TVSDAILRY

SEQ ID NO: 23440 - protein, 9 aa, Homo Sapiens
TVSRFFLYR

SEQ ID NO: 23441 - protein, 9 aa, Homo Sapiens
TVTAQILLK

SEQ ID NO: 23442 - protein, 9 aa, Homo Sapiens
TVTEVLLKY

SEQ ID NO: 23443 - protein, 9 aa, Homo Sapiens
TVTSYVFLK

SEQ ID NO: 23444 - protein, 9 aa, Homo Sapiens
TVWNKPTVK

SEQ ID NO: 23445 - protein, 9 aa, Homo Sapiens
TVYPVAIKY

SEQ ID NO: 23446 - protein, 9 aa, Homo Sapiens
VGLNVFLEK

SEQ ID NO: 23447 - protein, 9 aa, Homo Sapiens
VIFKDFVNK

SEQ ID NO: 23448 - protein, 9 aa, Homo Sapiens
VIIAKVTAK

SEQ ID NO: 23449 - protein, 9 aa, Homo Sapiens
VILFWFPLK

SEQ ID NO: 23450 - protein, 9 aa, Homo Sapiens
VILPPLSPY

SEQ ID NO: 23451 - protein, 9 aa, Homo Sapiens
VIPTNVPEL

SEQ ID NO: 23452 - protein, 9 aa, Homo Sapiens
VISPPTVPK

SEQ ID NO: 23453 - protein, 9 aa, Homo Sapiens
VIYPLAVPK

SEQ ID NO: 23454 - protein, 9 aa, Homo Sapiens
VIYVPLTDK

SEQ ID NO: 23455 - protein, 9 aa, Homo Sapiens
VLADVILLK

SEQ ID NO: 23456 - protein, 9 aa, Homo Sapiens
VLAGTQLLY

SEQ ID NO: 23457 - protein, 9 aa, Homo Sapiens
VLAPVIDLK

SEQ ID NO: 23458 - protein, 9 aa, Homo Sapiens
VLFEHAVGY

SEQ ID NO: 23459 - protein, 9 aa, Homo Sapiens
VLFFHTMRY

SEQ ID NO: 23460 - protein, 9 aa, Homo Sapiens
VLFHNTIYY

SEQ ID NO: 23461 - protein, 9 aa, Homo Sapiens
VLFSATLPK

SEQ ID NO: 23462 - protein, 9 aa, Homo Sapiens
VLFVSVLPF

SEQ ID NO: 23463 - protein, 9 aa, Homo Sapiens
VLGQFLVLK

SEQ ID NO: 23464 - protein, 9 aa, Homo Sapiens
VLGTVVHGK

SEQ ID NO: 23465 - protein, 9 aa, Homo Sapiens
VLMPKVMHY

SEQ ID NO: 23466 - protein, 9 aa, Homo Sapiens
VLNGNPLLH

SEQ ID NO: 23467 - protein, 9 aa, Homo Sapiens
VLNLVIVKK

SEQ ID NO: 23468 - protein, 9 aa, Homo Sapiens
VLNNSLLLH

SEQ ID NO: 23469 - protein, 9 aa, Homo Sapiens
VLNPTPIKR

SEQ ID NO: 23470 - protein, 9 aa, Homo Sapiens
VLPLFVLSK

SEQ ID NO: 23471 - protein, 9 aa, Homo Sapiens
VLPTFILEK

SEQ ID NO: 23472 - protein, 9 aa, Homo Sapiens
VLPTFILER

SEQ ID NO: 23473 - protein, 9 aa, Homo Sapiens
VLSAQQILH

SEQ ID NO: 23474 - protein, 9 aa, Homo Sapiens
VLTTPWKFK

SEQ ID NO: 23475 - protein, 9 aa, Homo Sapiens
VLYDRVLKY

SEQ ID NO: 23476 - protein, 9 aa, Homo Sapiens
VLYLKPLRI

SEQ ID NO: 23477 - protein, 9 aa, Homo Sapiens
VLYNGFTGR

SEQ ID NO: 23478 - protein, 9 aa, Homo Sapiens
VLYQPLFDK

SEQ ID NO: 23479 - protein, 9 aa, Homo Sapiens
VLYSLQICK

SEQ ID NO: 23480 - protein, 9 aa, Homo Sapiens
VMGAYVLLK

SEQ ID NO: 23481 - protein, 9 aa, Homo Sapiens
VMHTPPVLK

SEQ ID NO: 23482 - protein, 9 aa, Homo Sapiens
VMLGTQLLY

SEQ ID NO: 23483 - protein, 9 aa, Homo Sapiens
VSFPIGIYK

SEQ ID NO: 23484 - protein, 9 aa, Homo Sapiens
VSLGTPIMK

SEQ ID NO: 23485 - protein, 9 aa, Homo Sapiens
VTAPIALLK

SEQ ID NO: 23486 - protein, 9 aa, Homo Sapiens
VTFVPGLYK

SEQ ID NO: 23487 - protein, 9 aa, Homo Sapiens
VTISFRIYK

SEQ ID NO: 23488 - protein, 9 aa, Homo Sapiens
VTISIELKK

SEQ ID NO: 23489 - protein, 9 aa, Homo Sapiens
VVCEYIVKK

SEQ ID NO: 23490 - protein, 9 aa, Homo Sapiens
VVDPVVREK

SEQ ID NO: 23491 - protein, 9 aa, Homo Sapiens
VVFPFPVNK

SEQ ID NO: 23492 - protein, 9 aa, Homo Sapiens
VVGAVVFQK

SEQ ID NO: 23493 - protein, 9 aa, Homo Sapiens
VVGPVSLPR

SEQ ID NO: 23494 - protein, 9 aa, Homo Sapiens
VVLYPLVAK

SEQ ID NO: 23495 - protein, 9 aa, Homo Sapiens
VVNEPRIFK

SEQ ID NO: 23496 - protein, 9 aa, Homo Sapiens
VVNSYPLAH

SEQ ID NO: 23497 - protein, 9 aa, Homo Sapiens
VVPPFLQPE

SEQ ID NO: 23498 - protein, 9 aa, Homo Sapiens
VVYAPLSKK

SEQ ID NO: 23499 - protein, 9 aa, Homo Sapiens
VVYEKQMLY

SEQ ID NO: 23500 - protein, 9 aa, Homo Sapiens
VVYPKVIER

SEQ ID NO: 23501 - protein, 9 aa, Homo Sapiens
VVYQYWNTK

SEQ ID NO: 23502 - protein, 9 aa, Homo Sapiens
YCPGMGVAL

SEQ ID NO: 23503 - protein, 9 aa, Homo Sapiens
YIFKVFAEK

SEQ ID NO: 23504 - protein, 9 aa, Homo Sapiens
YILSPLSYK

SEQ ID NO: 23505 - protein, 9 aa, Homo Sapiens
YLYITKVLK

SEQ ID NO: 23506 - protein, 9 aa, Homo Sapiens
YPFPGPIPN

SEQ ID NO: 23507 - protein, 9 aa, Homo Sapiens
YQEPVLGPV

SEQ ID NO: 23508 - protein, 9 aa, Homo Sapiens
YTFDWTMLK

SEQ ID NO: 23509 - protein, 9 aa, Homo Sapiens
YVFPKPFNR

SEQ ID NO: 23510 - protein, 9 aa, Homo Sapiens
YVYFTNELK

SEQ ID NO: 23511 - protein, 10 aa, Homo Sapiens
AIAAVAVALK

SEQ ID NO: 23512 - protein, 10 aa, Homo Sapiens
AIFPATFCQK

SEQ ID NO: 23513 - protein, 10 aa, Homo Sapiens
AIFVPIHLVK

SEQ ID NO: 23514 - protein, 10 aa, Homo Sapiens
AIIDHIFASK

SEQ ID NO: 23515 - protein, 10 aa, Homo Sapiens
AILEYILHQK

SEQ ID NO: 23516 - protein, 10 aa, Homo Sapiens
AIYATIPVYK

SEQ ID NO: 23517 - protein, 10 aa, Homo Sapiens
ALALGVTLLK

SEQ ID NO: 23518 - protein, 10 aa, Homo Sapiens
ALFAKPLKGK

SEQ ID NO: 23519 - protein, 10 aa, Homo Sapiens
ALFKAWALFK

SEQ ID NO: 23520 - protein, 10 aa, Homo Sapiens
ALFKNLLLKK

SEQ ID NO: 23521 - protein, 10 aa, Homo Sapiens
ALIEELLLYK

SEQ ID NO: 23522 - protein, 10 aa, Homo Sapiens
ALIGFPSVGK

SEQ ID NO: 23523 - protein, 10 aa, Homo Sapiens
ALKNPPINTK

SEQ ID NO: 23524 - protein, 10 aa, Homo Sapiens
ALLAYTLGVK

SEQ ID NO: 23525 - protein, 10 aa, Homo Sapiens
ALLPWPFKQK

SEQ ID NO: 23526 - protein, 10 aa, Homo Sapiens
ALLPWPFRNK

SEQ ID NO: 23527 - protein, 10 aa, Homo Sapiens
ALRQEVDTLK

SEQ ID NO: 23528 - protein, 10 aa, Homo Sapiens
ALVFPPLTQR

SEQ ID NO: 23529 - protein, 10 aa, Homo Sapiens
ALWEEQVLQK

SEQ ID NO: 23530 - protein, 10 aa, Homo Sapiens
ALYETPTGWK

SEQ ID NO: 23531 - protein, 10 aa, Homo Sapiens
ALYGNLILRK

SEQ ID NO: 23532 - protein, 10 aa, Homo Sapiens
AMYNQGFIRK

SEQ ID NO: 23533 - protein, 10 aa, Homo Sapiens
AMYSRKAMYK

SEQ ID NO: 23534 - protein, 10 aa, Homo Sapiens
AQKFPFNTPK

SEQ ID NO: 23535 - protein, 10 aa, Homo Sapiens
AQYQFTGIKK

SEQ ID NO: 23536 - protein, 10 aa, Homo Sapiens
ASFDGTFLWK

SEQ ID NO: 23537 - protein, 10 aa, Homo Sapiens
ASLLNVSTPK

SEQ ID NO: 23538 - protein, 10 aa, Homo Sapiens
ATEESFFILK

SEQ ID NO: 23539 - protein, 10 aa, Homo Sapiens
ATGDMSGLLK

SEQ ID NO: 23540 - protein, 10 aa, Homo Sapiens
ATGSWDSFLK

SEQ ID NO: 23541 - protein, 10 aa, Homo Sapiens
ATIGFSLVAK

SEQ ID NO: 23542 - protein, 10 aa, Homo Sapiens
ATLKWILENK

SEQ ID NO: 23543 - protein, 10 aa, Homo Sapiens
ATLSQFYINK

SEQ ID NO: 23544 - protein, 10 aa, Homo Sapiens
ATNKITIIFK

SEQ ID NO: 23545 - protein, 10 aa, Homo Sapiens
ATPLSTLSLK

SEQ ID NO: 23546 - protein, 10 aa, Homo Sapiens
ATQVAVSVPK

SEQ ID NO: 23547 - protein, 10 aa, Homo Sapiens
ATVAVPLVGK

SEQ ID NO: 23548 - protein, 10 aa, Homo Sapiens
ATWATKELRK

SEQ ID NO: 23549 - protein, 10 aa, Homo Sapiens
ATWTYSPLLK

SEQ ID NO: 23550 - protein, 10 aa, Homo Sapiens
AVANIVNSVK

SEQ ID NO: 23551 - protein, 10 aa, Homo Sapiens
AVAVDVAVPK

SEQ ID NO: 23552 - protein, 10 aa, Homo Sapiens
AVFGAGGVGK

SEQ ID NO: 23553 - protein, 10 aa, Homo Sapiens
AVFGVIGSQK

SEQ ID NO: 23554 - protein, 10 aa, Homo Sapiens
AVFPFKPPQR

SEQ ID NO: 23555 - protein, 10 aa, Homo Sapiens
AVFPKPFVEK

SEQ ID NO: 23556 - protein, 10 aa, Homo Sapiens
AVIENPEMLK

SEQ ID NO: 23557 - protein, 10 aa, Homo Sapiens
AVISPPTVPK

SEQ ID NO: 23558 - protein, 10 aa, Homo Sapiens
AVLKHVLTPR

SEQ ID NO: 23559 - protein, 10 aa, Homo Sapiens
AVLPYELRFK

SEQ ID NO: 23560 - protein, 10 aa, Homo Sapiens
AVLRNQIHVK

SEQ ID NO: 23561 - protein, 10 aa, Homo Sapiens
AVLYQPLFDK

SEQ ID NO: 23562 - protein, 10 aa, Homo Sapiens
AVMGAYVLLK

SEQ ID NO: 23563 - protein, 10 aa, Homo Sapiens
AVNAHSNILK

SEQ ID NO: 23564 - protein, 10 aa, Homo Sapiens
AVNEVVAGIK

SEQ ID NO: 23565 - protein, 10 aa, Homo Sapiens
AVNPYFDIPK

SEQ ID NO: 23566 - protein, 10 aa, Homo Sapiens
AVPTNIIAAK

SEQ ID NO: 23567 - protein, 10 aa, Homo Sapiens
AVREEVEILK

SEQ ID NO: 23568 - protein, 10 aa, Homo Sapiens
AVWDVGSHFK

SEQ ID NO: 23569 - protein, 10 aa, Homo Sapiens
DTNADKQLSF

SEQ ID NO: 23570 - protein, 10 aa, Homo Sapiens
FPEILLIVLK

SEQ ID NO: 23571 - protein, 10 aa, Homo Sapiens
FQAPYLLHGK

SEQ ID NO: 23572 - protein, 10 aa, Homo Sapiens
FTFDNVLPGK

SEQ ID NO: 23573 - protein, 10 aa, Homo Sapiens
FVYPGNPLRH

SEQ ID NO: 23574 - protein, 10 aa, Homo Sapiens
GIFPGTPLKK

SEQ ID NO: 23575 - protein, 10 aa, Homo Sapiens
GIISSPLTGK

SEQ ID NO: 23576 - protein, 10 aa, Homo Sapiens
GIKDWVTPYK

SEQ ID NO: 23577 - protein, 10 aa, Homo Sapiens
GIKSGRMIFK

SEQ ID NO: 23578 - protein, 10 aa, Homo Sapiens
GIYPPGSPGK

SEQ ID NO: 23579 - protein, 10 aa, Homo Sapiens
GLAGLPGSPK

SEQ ID NO: 23580 - protein, 10 aa, Homo Sapiens
GLFGGAGVGK

SEQ ID NO: 23581 - protein, 10 aa, Homo Sapiens
GLLEKIATPK

SEQ ID NO: 23582 - protein, 10 aa, Homo Sapiens
GLPLSPGLPK

SEQ ID NO: 23583 - protein, 10 aa, Homo Sapiens
GLRGFPNVLK

SEQ ID NO: 23584 - protein, 10 aa, Homo Sapiens
GLYAGDPVSK

SEQ ID NO: 23585 - protein, 10 aa, Homo Sapiens
GLYGGLPPTH

SEQ ID NO: 23586 - protein, 10 aa, Homo Sapiens
GLYHGQVLCK

SEQ ID NO: 23587 - protein, 10 aa, Homo Sapiens
GNCPERIITL

SEQ ID NO: 23588 - protein, 10 aa, Homo Sapiens
GQFSGFPFEK

SEQ ID NO: 23589 - protein, 10 aa, Homo Sapiens
GSYDPQQIFK

SEQ ID NO: 23590 - protein, 10 aa, Homo Sapiens
GSYNKVFLAK

SEQ ID NO: 23591 - protein, 10 aa, Homo Sapiens
GTAIIQLPSK

SEQ ID NO: 23592 - protein, 10 aa, Homo Sapiens
GTFNRAMLRL

SEQ ID NO: 23593 - protein, 10 aa, Homo Sapiens
GTFQQMWISK

SEQ ID NO: 23594 - protein, 10 aa, Homo Sapiens
GTILIILTGR

SEQ ID NO: 23595 - protein, 10 aa, Homo Sapiens
GTIPGNPYPK

SEQ ID NO: 23596 - protein, 10 aa, Homo Sapiens
GTSHLPGLLK

SEQ ID NO: 23597 - protein, 10 aa, Homo Sapiens
GTWKTPSFPK

SEQ ID NO: 23598 - protein, 10 aa, Homo Sapiens
GVFRGPVLPK

SEQ ID NO: 23599 - protein, 10 aa, Homo Sapiens
GVIGFPNVGK

SEQ ID NO: 23600 - protein, 10 aa, Homo Sapiens
GVLDAILATK

SEQ ID NO: 23601 - protein, 10 aa, Homo Sapiens
GVLPSALNPK

SEQ ID NO: 23602 - protein, 10 aa, Homo Sapiens
HIRESLPALR

SEQ ID NO: 23603 - protein, 10 aa, Homo Sapiens
HLFEHILNGY

SEQ ID NO: 23604 - protein, 10 aa, Homo Sapiens
HLINAFHTPK

SEQ ID NO: 23605 - protein, 10 aa, Homo Sapiens
HLIRAPLAGK

SEQ ID NO: 23606 - protein, 10 aa, Homo Sapiens
HLLDIQGLPK

SEQ ID NO: 23607 - protein, 10 aa, Homo Sapiens
HLLETPLVVK

SEQ ID NO: 23608 - protein, 10 aa, Homo Sapiens
HLYNSLTRNK

SEQ ID NO: 23609 - protein, 10 aa, Homo Sapiens
HTRTPPIIHR

SEQ ID NO: 23610 - protein, 10 aa, Homo Sapiens
HVIETLIGKK

SEQ ID NO: 23611 - protein, 10 aa, Homo Sapiens
HVYDGKFLAR

SEQ ID NO: 23612 - protein, 10 aa, Homo Sapiens
HVYVGNISKK

SEQ ID NO: 23613 - protein, 10 aa, Homo Sapiens
IALWPPVREK

SEQ ID NO: 23614 - protein, 10 aa, Homo Sapiens
IIDEQPLIFK

SEQ ID NO: 23615 - protein, 10 aa, Homo Sapiens
IIFGPPGTGK

SEQ ID NO: 23616 - protein, 10 aa, Homo Sapiens
IIFVGTPVQK

SEQ ID NO: 23617 - protein, 10 aa, Homo Sapiens
IIWLPTGAGK

SEQ ID NO: 23618 - protein, 10 aa, Homo Sapiens
IIYPTAPPRF

SEQ ID NO: 23619 - protein, 10 aa, Homo Sapiens
ILAGLGFTPK

SEQ ID NO: 23620 - protein, 10 aa, Homo Sapiens
ILFPHQPLSR

SEQ ID NO: 23621 - protein, 10 aa, Homo Sapiens
ILFPLRFTLK

SEQ ID NO: 23622 - protein, 10 aa, Homo Sapiens
ILYGPPGTGK

SEQ ID NO: 23623 - protein, 10 aa, Homo Sapiens
ILYSSKLYRF

SEQ ID NO: 23624 - protein, 10 aa, Homo Sapiens
ILYVGSMPLK

SEQ ID NO: 23625 - protein, 10 aa, Homo Sapiens
IQFNPPLSEK

SEQ ID NO: 23626 - protein, 10 aa, Homo Sapiens
IQNVPLSEKI

SEQ ID NO: 23627 - protein, 10 aa, Homo Sapiens
ISAPKPGPLK

SEQ ID NO: 23628 - protein, 10 aa, Homo Sapiens
ISFPATGCQK

SEQ ID NO: 23629 - protein, 10 aa, Homo Sapiens
ITFDVAPSRL

SEQ ID NO: 23630 - protein, 10 aa, Homo Sapiens
ITFGIREDLK

SEQ ID NO: 23631 - protein, 10 aa, Homo Sapiens
ITWERIISHF

SEQ ID NO: 23632 - protein, 10 aa, Homo Sapiens
IVLGLPLWWK

SEQ ID NO: 23633 - protein, 10 aa, Homo Sapiens
IVLYFKLRSK

SEQ ID NO: 23634 - protein, 10 aa, Homo Sapiens
IVNENLVERF

SEQ ID NO: 23635 - protein, 10 aa, Homo Sapiens
IVREDLLSAK

SEQ ID NO: 23636 - protein, 10 aa, Homo Sapiens
IVYAVDFNHK

SEQ ID NO: 23637 - protein, 10 aa, Homo Sapiens
KAFNQGKIFK

SEQ ID NO: 23638 - protein, 10 aa, Homo Sapiens
KASEVFLQRL

SEQ ID NO: 23639 - protein, 10 aa, Homo Sapiens
KIADMGHLKY

SEQ ID NO: 23640 - protein, 10 aa, Homo Sapiens
KIFNVAIPRF

SEQ ID NO: 23641 - protein, 10 aa, Homo Sapiens
KIKEIAVTVK

SEQ ID NO: 23642 - protein, 10 aa, Homo Sapiens
KILNLRFLGK

SEQ ID NO: 23643 - protein, 10 aa, Homo Sapiens
KIRQDSVTKL

SEQ ID NO: 23644 - protein, 10 aa, Homo Sapiens
KITVPASQKL

SEQ ID NO: 23645 - protein, 10 aa, Homo Sapiens
KLADQIFAYY

SEQ ID NO: 23646 - protein, 10 aa, Homo Sapiens
KLAYTLLNKL

SEQ ID NO: 23647 - protein, 10 aa, Homo Sapiens
KLCNIFSTKF

SEQ ID NO: 23648 - protein, 10 aa, Homo Sapiens
KLFDFVNAKK

SEQ ID NO: 23649 - protein, 10 aa, Homo Sapiens
KLFDHAVSKF

SEQ ID NO: 23650 - protein, 10 aa, Homo Sapiens
KLFGETTLVK

SEQ ID NO: 23651 - protein, 10 aa, Homo Sapiens
KLFIPWTNQK

SEQ ID NO: 23652 - protein, 10 aa, Homo Sapiens
KLFNGTFLKA

SEQ ID NO: 23653 - protein, 10 aa, Homo Sapiens
KLFPGSPAIY

SEQ ID NO: 23654 - protein, 10 aa, Homo Sapiens
KLFSELPLAK

SEQ ID NO: 23655 - protein, 10 aa, Homo Sapiens
KLGGVIKEKL

SEQ ID NO: 23656 - protein, 10 aa, Homo Sapiens
KLGIKSLVSK

SEQ ID NO: 23657 - protein, 10 aa, Homo Sapiens
KLIDIVSSQK

SEQ ID NO: 23658 - protein, 10 aa, Homo Sapiens
KLIENPLLRY

SEQ ID NO: 23659 - protein, 10 aa, Homo Sapiens
KLKEGGLIDK

SEQ ID NO: 23660 - protein, 10 aa, Homo Sapiens
KLLNYAPLEK

SEQ ID NO: 23661 - protein, 10 aa, Homo Sapiens
KLMENTFVSK

SEQ ID NO: 23662 - protein, 10 aa, Homo Sapiens
KLNIRPLLRL

SEQ ID NO: 23663 - protein, 10 aa, Homo Sapiens
KLNPQQAPLY

SEQ ID NO: 23664 - protein, 10 aa, Homo Sapiens
KLNPYAKTMR

SEQ ID NO: 23665 - protein, 10 aa, Homo Sapiens
KLNVGGALYY

SEQ ID NO: 23666 - protein, 10 aa, Homo Sapiens
KLPEYFFENK

SEQ ID NO: 23667 - protein, 10 aa, Homo Sapiens
KLPKQPVIVK

SEQ ID NO: 23668 - protein, 10 aa, Homo Sapiens
KLPLPLPPRL

SEQ ID NO: 23669 - protein, 10 aa, Homo Sapiens
KLPTRPGLNK

SEQ ID NO: 23670 - protein, 10 aa, Homo Sapiens
KLREPNFTLK

SEQ ID NO: 23671 - protein, 10 aa, Homo Sapiens
KLVSFGRTLT

SEQ ID NO: 23672 - protein, 10 aa, Homo Sapiens
KLWDEVLSHL

SEQ ID NO: 23673 - protein, 10 aa, Homo Sapiens
KLWLDAYLHK

SEQ ID NO: 23674 - protein, 10 aa, Homo Sapiens
KLYAWELAFK

SEQ ID NO: 23675 - protein, 10 aa, Homo Sapiens
KLYEKKLLKL

SEQ ID NO: 23676 - protein, 10 aa, Homo Sapiens
KLYQEMFAWK

SEQ ID NO: 23677 - protein, 10 aa, Homo Sapiens
KLYQFNPAFF

SEQ ID NO: 23678 - protein, 10 aa, Homo Sapiens
KLYRPGSVAY

SEQ ID NO: 23679 - protein, 10 aa, Homo Sapiens
KLYSKHFTLK

SEQ ID NO: 23680 - protein, 10 aa, Homo Sapiens
KMAEVIGSKL

SEQ ID NO: 23681 - protein, 10 aa, Homo Sapiens
KMALPMPTKR

SEQ ID NO: 23682 - protein, 10 aa, Homo Sapiens
KMHIPLEVRL

SEQ ID NO: 23683 - protein, 10 aa, Homo Sapiens
KMMADYGIRK

SEQ ID NO: 23684 - protein, 10 aa, Homo Sapiens
KMMDVTVTIK

SEQ ID NO: 23685 - protein, 10 aa, Homo Sapiens
KMYEEHLKRM

SEQ ID NO: 23686 - protein, 10 aa, Homo Sapiens
KQFDAVLPGY

SEQ ID NO: 23687 - protein, 10 aa, Homo Sapiens
KSFDTSLIRK

SEQ ID NO: 23688 - protein, 10 aa, Homo Sapiens
KSFPGIPLHH

SEQ ID NO: 23689 - protein, 10 aa, Homo Sapiens
KSKVFFGLLK

SEQ ID NO: 23690 - protein, 10 aa, Homo Sapiens
KSLDQAISRF

SEQ ID NO: 23691 - protein, 10 aa, Homo Sapiens
KSNSIIVSPR

SEQ ID NO: 23692 - protein, 10 aa, Homo Sapiens
KTKELIGSMK

SEQ ID NO: 23693 - protein, 10 aa, Homo Sapiens
KTLDEILQEK

SEQ ID NO: 23694 - protein, 10 aa, Homo Sapiens
KTLERSYLLK

SEQ ID NO: 23695 - protein, 10 aa, Homo Sapiens
KTTAQVLIRF

SEQ ID NO: 23696 - protein, 10 aa, Homo Sapiens
KTYEVSLREK

SEQ ID NO: 23697 - protein, 10 aa, Homo Sapiens
KVCNPIITKL

SEQ ID NO: 23698 - protein, 10 aa, Homo Sapiens
KVFDGIPPPY

SEQ ID NO: 23699 - protein, 10 aa, Homo Sapiens
KVFEVHVRPK

SEQ ID NO: 23700 - protein, 10 aa, Homo Sapiens
KVGFFKRNLK

SEQ ID NO: 23701 - protein, 10 aa, Homo Sapiens
KVKAPPSVPR

SEQ ID NO: 23702 - protein, 10 aa, Homo Sapiens
KVLENIELNK

SEQ ID NO: 23703 - protein, 10 aa, Homo Sapiens
KVLFPLLTKL

SEQ ID NO: 23704 - protein, 10 aa, Homo Sapiens
KVNIIPIIAK

SEQ ID NO: 23705 - protein, 10 aa, Homo Sapiens
KVNIIPVIAK

SEQ ID NO: 23706 - protein, 10 aa, Homo Sapiens
KVNIVPVIAK

SEQ ID NO: 23707 - protein, 10 aa, Homo Sapiens
KVPQLEIVPN

SEQ ID NO: 23708 - protein, 10 aa, Homo Sapiens
KVWSDPFGRK

SEQ ID NO: 23709 - protein, 10 aa, Homo Sapiens
KVYHLASVRL

SEQ ID NO: 23710 - protein, 10 aa, Homo Sapiens
KVYLGDIPLK

SEQ ID NO: 23711 - protein, 10 aa, Homo Sapiens
LADLLVPTKA

SEQ ID NO: 23712 - protein, 10 aa, Homo Sapiens
LAVALAFIIK

SEQ ID NO: 23713 - protein, 10 aa, Homo Sapiens
LIISSMITGV

SEQ ID NO: 23714 - protein, 10 aa, Homo Sapiens
LINPSLIGSK

SEQ ID NO: 23715 - protein, 10 aa, Homo Sapiens
LIYKHTKLLK

SEQ ID NO: 23716 - protein, 10 aa, Homo Sapiens
LIYVAGGLTK

SEQ ID NO: 23717 - protein, 10 aa, Homo Sapiens
LLAEKVLAGK

SEQ ID NO: 23718 - protein, 10 aa, Homo Sapiens
LLFPYILPPK

SEQ ID NO: 23719 - protein, 10 aa, Homo Sapiens
LLFQPLDLLK

SEQ ID NO: 23720 - protein, 10 aa, Homo Sapiens
LLNGKVGSFK

SEQ ID NO: 23721 - protein, 10 aa, Homo Sapiens
LLREQVAQLK

SEQ ID NO: 23722 - protein, 10 aa, Homo Sapiens
LLRVTPFILK

SEQ ID NO: 23723 - protein, 10 aa, Homo Sapiens
LSLGVAALYK

SEQ ID NO: 23724 - protein, 10 aa, Homo Sapiens
LVFINPFGGK

SEQ ID NO: 23725 - protein, 10 aa, Homo Sapiens
LVFPSEIVGK

SEQ ID NO: 23726 - protein, 10 aa, Homo Sapiens
LVNQDILENK

SEQ ID NO: 23727 - protein, 10 aa, Homo Sapiens
MLFPGSIALK

SEQ ID NO: 23728 - protein, 10 aa, Homo Sapiens
MLRQIIGQAK

SEQ ID NO: 23729 - protein, 10 aa, Homo Sapiens
MLYAAEMIPK

SEQ ID NO: 23730 - protein, 10 aa, Homo Sapiens
MLYPAYYSYK

SEQ ID NO: 23731 - protein, 10 aa, Homo Sapiens
MLYQTINSLK

SEQ ID NO: 23732 - protein, 10 aa, Homo Sapiens
MRIFVDIEKL

SEQ ID NO: 23733 - protein, 10 aa, Homo Sapiens
MVYDSPLCRL

SEQ ID NO: 23734 - protein, 10 aa, Homo Sapiens
NVYPSKPLTK

SEQ ID NO: 23735 - protein, 10 aa, Homo Sapiens
QIFVKTLTGK

SEQ ID NO: 23736 - protein, 10 aa, Homo Sapiens
QIPQLPAPPK

SEQ ID NO: 23737 - protein, 10 aa, Homo Sapiens
QLFTDGITNK

SEQ ID NO: 23738 - protein, 10 aa, Homo Sapiens
QLPEAPVIGK

SEQ ID NO: 23739 - protein, 10 aa, Homo Sapiens
QLSQIPLLGK

SEQ ID NO: 23740 - protein, 10 aa, Homo Sapiens
QLYWSHPRKF

SEQ ID NO: 23741 - protein, 10 aa, Homo Sapiens
QSFDKEWVAK

SEQ ID NO: 23742 - protein, 10 aa, Homo Sapiens
QVVSLPLLKP

SEQ ID NO: 23743 - protein, 10 aa, Homo Sapiens
RAFSFSKTPK

SEQ ID NO: 23744 - protein, 10 aa, Homo Sapiens
RIAYFTLPKT

SEQ ID NO: 23745 - protein, 10 aa, Homo Sapiens
RICPILMEKL

SEQ ID NO: 23746 - protein, 10 aa, Homo Sapiens
RIFTLKPVRK

SEQ ID NO: 23747 - protein, 10 aa, Homo Sapiens
RIFVYFITKL

SEQ ID NO: 23748 - protein, 10 aa, Homo Sapiens
RIHPVSTMVK

SEQ ID NO: 23749 - protein, 10 aa, Homo Sapiens
RIIEETLALK

SEQ ID NO: 23750 - protein, 10 aa, Homo Sapiens
RIIPHLPAPK

SEQ ID NO: 23751 - protein, 10 aa, Homo Sapiens
RIKSNQISKL

SEQ ID NO: 23752 - protein, 10 aa, Homo Sapiens
RILKHILTQR

SEQ ID NO: 23753 - protein, 10 aa, Homo Sapiens
RILSGPFVQK

SEQ ID NO: 23754 - protein, 10 aa, Homo Sapiens
RINFYKKTYK

SEQ ID NO: 23755 - protein, 10 aa, Homo Sapiens
RIREPALLSK

SEQ ID NO: 23756 - protein, 10 aa, Homo Sapiens
RISDVHFSVK

SEQ ID NO: 23757 - protein, 10 aa, Homo Sapiens
RITEWVSVCK

SEQ ID NO: 23758 - protein, 10 aa, Homo Sapiens
RIWAAAPNRF

SEQ ID NO: 23759 - protein, 10 aa, Homo Sapiens
RIYDYDPLYK

SEQ ID NO: 23760 - protein, 10 aa, Homo Sapiens
RIYPYAAISY

SEQ ID NO: 23761 - protein, 10 aa, Homo Sapiens
RLAEPSQMLK

SEQ ID NO: 23762 - protein, 10 aa, Homo Sapiens
RLAEVIKNRF

SEQ ID NO: 23763 - protein, 10 aa, Homo Sapiens
RLAEWKATKL

SEQ ID NO: 23764 - protein, 10 aa, Homo Sapiens
RLATSLVEKL

SEQ ID NO: 23765 - protein, 10 aa, Homo Sapiens
RLFCVGFTKK

SEQ ID NO: 23766 - protein, 10 aa, Homo Sapiens
RLFDEGTISK

SEQ ID NO: 23767 - protein, 10 aa, Homo Sapiens
RLFDTPHTPK

SEQ ID NO: 23768 - protein, 10 aa, Homo Sapiens
RLFEGTGARL

SEQ ID NO: 23769 - protein, 10 aa, Homo Sapiens
RLFGTTVTFK

SEQ ID NO: 23770 - protein, 10 aa, Homo Sapiens
RLFIGGIPKM

SEQ ID NO: 23771 - protein, 10 aa, Homo Sapiens
RLFPNSFNDK

SEQ ID NO: 23772 - protein, 10 aa, Homo Sapiens
RLFTSEKMVK

SEQ ID NO: 23773 - protein, 10 aa, Homo Sapiens
RLFTVPWPVK

SEQ ID NO: 23774 - protein, 10 aa, Homo Sapiens
RLGITMKAKL

SEQ ID NO: 23775 - protein, 10 aa, Homo Sapiens
RLIDQKWQRK

SEQ ID NO: 23776 - protein, 10 aa, Homo Sapiens
RLKGDAWVYK

SEQ ID NO: 23777 - protein, 10 aa, Homo Sapiens
RLKPFYLVPK

SEQ ID NO: 23778 - protein, 10 aa, Homo Sapiens
RLKQQTIPLK

SEQ ID NO: 23779 - protein, 10 aa, Homo Sapiens
RLLEYTPTAR

SEQ ID NO: 23780 - protein, 10 aa, Homo Sapiens
RLLLEQILNK

SEQ ID NO: 23781 - protein, 10 aa, Homo Sapiens
RLLLPGELAK

SEQ ID NO: 23782 - protein, 10 aa, Homo Sapiens
RLLSGVPLYK

SEQ ID NO: 23783 - protein, 10 aa, Homo Sapiens
RLLSPPLRPR

SEQ ID NO: 23784 - protein, 10 aa, Homo Sapiens
RLMELFPANK

SEQ ID NO: 23785 - protein, 10 aa, Homo Sapiens
RLNDRYPKKL

SEQ ID NO: 23786 - protein, 10 aa, Homo Sapiens
RLNESTSYKF

SEQ ID NO: 23787 - protein, 10 aa, Homo Sapiens
RLPAFTLSHL

SEQ ID NO: 23788 - protein, 10 aa, Homo Sapiens
RLPKGAVLYK

SEQ ID NO: 23789 - protein, 10 aa, Homo Sapiens
RLPLISGFYK

SEQ ID NO: 23790 - protein, 10 aa, Homo Sapiens
RLQEALNLFK

SEQ ID NO: 23791 - protein, 10 aa, Homo Sapiens
RLRFSEIPMK

SEQ ID NO: 23792 - protein, 10 aa, Homo Sapiens
RLSNIFVIGK

SEQ ID NO: 23793 - protein, 10 aa, Homo Sapiens
RLSNPSLVKK

SEQ ID NO: 23794 - protein, 10 aa, Homo Sapiens
RLSQLKQLLK

SEQ ID NO: 23795 - protein, 10 aa, Homo Sapiens
RLVQGSILKK

SEQ ID NO: 23796 - protein, 10 aa, Homo Sapiens
RLYDWGLRGY

SEQ ID NO: 23797 - protein, 10 aa, Homo Sapiens
RLYFGERNVK

SEQ ID NO: 23798 - protein, 10 aa, Homo Sapiens
RLYFSQQTYY

SEQ ID NO: 23799 - protein, 10 aa, Homo Sapiens
RLYGSSLTRF

SEQ ID NO: 23800 - protein, 10 aa, Homo Sapiens
RLYQHAVEYF

SEQ ID NO: 23801 - protein, 10 aa, Homo Sapiens
RLYQRALQKL

SEQ ID NO: 23802 - protein, 10 aa, Homo Sapiens
RLYQVEYAFK

SEQ ID NO: 23803 - protein, 10 aa, Homo Sapiens
RLYSVSYLLK

SEQ ID NO: 23804 - protein, 10 aa, Homo Sapiens
RLYVPLYSSK

SEQ ID NO: 23805 - protein, 10 aa, Homo Sapiens
RMADFWLTEK

SEQ ID NO: 23806 - protein, 10 aa, Homo Sapiens
RMFAPTKTWR

SEQ ID NO: 23807 - protein, 10 aa, Homo Sapiens
RMFLSFPTTK

SEQ ID NO: 23808 - protein, 10 aa, Homo Sapiens
RMFQDIGVSK

SEQ ID NO: 23809 - protein, 10 aa, Homo Sapiens
RMKDPTFLGK

SEQ ID NO: 23810 - protein, 10 aa, Homo Sapiens
RQYDKFLTHF

SEQ ID NO: 23811 - protein, 10 aa, Homo Sapiens
RSAQPLPLKI

SEQ ID NO: 23812 - protein, 10 aa, Homo Sapiens
RSYDEAILRL

SEQ ID NO: 23813 - protein, 10 aa, Homo Sapiens
RSYSDPPLKF

SEQ ID NO: 23814 - protein, 10 aa, Homo Sapiens
RTAVPSFLTK

SEQ ID NO: 23815 - protein, 10 aa, Homo Sapiens
RTCEWTGLKF

SEQ ID NO: 23816 - protein, 10 aa, Homo Sapiens
RTDDKVIRFK

SEQ ID NO: 23817 - protein, 10 aa, Homo Sapiens
RTDNISFMLK

SEQ ID NO: 23818 - protein, 10 aa, Homo Sapiens
RTFMIKFPWK

SEQ ID NO: 23819 - protein, 10 aa, Homo Sapiens
RTGKPIAVKL

SEQ ID NO: 23820 - protein, 10 aa, Homo Sapiens
RTGPPMGSRF

SEQ ID NO: 23821 - protein, 10 aa, Homo Sapiens
RTLGAIVRQK

SEQ ID NO: 23822 - protein, 10 aa, Homo Sapiens
RTLLGFFLAK

SEQ ID NO: 23823 - protein, 10 aa, Homo Sapiens
RTLSDYNIQK

SEQ ID NO: 23824 - protein, 10 aa, Homo Sapiens
RTLYPLLIKK

SEQ ID NO: 23825 - protein, 10 aa, Homo Sapiens
RVCDIILPRL

SEQ ID NO: 23826 - protein, 10 aa, Homo Sapiens
RVFQGFFTGR

SEQ ID NO: 23827 - protein, 10 aa, Homo Sapiens
RVFTGVVTKL

SEQ ID NO: 23828 - protein, 10 aa, Homo Sapiens
RVKGPGISKF

SEQ ID NO: 23829 - protein, 10 aa, Homo Sapiens
RVKTNLPIFK

SEQ ID NO: 23830 - protein, 10 aa, Homo Sapiens
RVLDFDVKRK

SEQ ID NO: 23831 - protein, 10 aa, Homo Sapiens
RVLDVGFVGR

SEQ ID NO: 23832 - protein, 10 aa, Homo Sapiens
RVLKPGGLLK

SEQ ID NO: 23833 - protein, 10 aa, Homo Sapiens
RVLNKLGGVK

SEQ ID NO: 23834 - protein, 10 aa, Homo Sapiens
RVLPAPILQY

SEQ ID NO: 23835 - protein, 10 aa, Homo Sapiens
RVLPAPMLQY

SEQ ID NO: 23836 - protein, 10 aa, Homo Sapiens
RVLRPLKTIK

SEQ ID NO: 23837 - protein, 10 aa, Homo Sapiens
RVLSERLLHK

SEQ ID NO: 23838 - protein, 10 aa, Homo Sapiens
RVLSKAFSRL

SEQ ID NO: 23839 - protein, 10 aa, Homo Sapiens
RVLYEWFLGK

SEQ ID NO: 23840 - protein, 10 aa, Homo Sapiens
RVSDCIPLSH

SEQ ID NO: 23841 - protein, 10 aa, Homo Sapiens
RVSGLVPSRF

SEQ ID NO: 23842 - protein, 10 aa, Homo Sapiens
RVWDISGLRK

SEQ ID NO: 23843 - protein, 10 aa, Homo Sapiens
RVWDLPGVLK

SEQ ID NO: 23844 - protein, 10 aa, Homo Sapiens
RVWIQGKFQK

SEQ ID NO: 23845 - protein, 10 aa, Homo Sapiens
RVWQVTIGTR

SEQ ID NO: 23846 - protein, 10 aa, Homo Sapiens
SAPGYLPTSL

SEQ ID NO: 23847 - protein, 10 aa, Homo Sapiens
SAYYPSSFPK

SEQ ID NO: 23848 - protein, 10 aa, Homo Sapiens
SIFDGRVVAK

SEQ ID NO: 23849 - protein, 10 aa, Homo Sapiens
SIFFESMPYK

SEQ ID NO: 23850 - protein, 10 aa, Homo Sapiens
SIGSPVGTPK

SEQ ID NO: 23851 - protein, 10 aa, Homo Sapiens
SILDYISTSK

SEQ ID NO: 23852 - protein, 10 aa, Homo Sapiens
SILNTWISLK

SEQ ID NO: 23853 - protein, 10 aa, Homo Sapiens
SILRNPVTNK

SEQ ID NO: 23854 - protein, 10 aa, Homo Sapiens
SISGPISTSK

SEQ ID NO: 23855 - protein, 10 aa, Homo Sapiens
SIWPGGVLPK

SEQ ID NO: 23856 - protein, 10 aa, Homo Sapiens
SIYDVKYLMK

SEQ ID NO: 23857 - protein, 10 aa, Homo Sapiens
SLAGGIIGVK

SEQ ID NO: 23858 - protein, 10 aa, Homo Sapiens
SLFDRQGFLK

SEQ ID NO: 23859 - protein, 10 aa, Homo Sapiens
SLLAKVFITK

SEQ ID NO: 23860 - protein, 10 aa, Homo Sapiens
SLPDFPAAAK

SEQ ID NO: 23861 - protein, 10 aa, Homo Sapiens
SLPDLTTPLK

SEQ ID NO: 23862 - protein, 10 aa, Homo Sapiens
SLPTVIMRNK

SEQ ID NO: 23863 - protein, 10 aa, Homo Sapiens
SLSSPLNPKL

SEQ ID NO: 23864 - protein, 10 aa, Homo Sapiens
SLWQVPYFSK

SEQ ID NO: 23865 - protein, 10 aa, Homo Sapiens
SMFPAAPAPK

SEQ ID NO: 23866 - protein, 10 aa, Homo Sapiens
SMNIPALVGK

SEQ ID NO: 23867 - protein, 10 aa, Homo Sapiens
SQYPNQPTRF

SEQ ID NO: 23868 - protein, 10 aa, Homo Sapiens
SSLSSPLNPK

SEQ ID NO: 23869 - protein, 10 aa, Homo Sapiens
SSNKQILINK

SEQ ID NO: 23870 - protein, 10 aa, Homo Sapiens
STFQQMWISK

SEQ ID NO: 23871 - protein, 10 aa, Homo Sapiens
STYEKALGYF

SEQ ID NO: 23872 - protein, 10 aa, Homo Sapiens
STYISILNQK

SEQ ID NO: 23873 - protein, 10 aa, Homo Sapiens
STYYGSFVTR

SEQ ID NO: 23874 - protein, 10 aa, Homo Sapiens
SVAQQLLNGK

SEQ ID NO: 23875 - protein, 10 aa, Homo Sapiens
SVFAGVVGVK

SEQ ID NO: 23876 - protein, 10 aa, Homo Sapiens
SVFDAYVLPK

SEQ ID NO: 23877 - protein, 10 aa, Homo Sapiens
SVFDFQKAYK

SEQ ID NO: 23878 - protein, 10 aa, Homo Sapiens
SVFQQGMKNK

SEQ ID NO: 23879 - protein, 10 aa, Homo Sapiens
SVHWFPVQKL

SEQ ID NO: 23880 - protein, 10 aa, Homo Sapiens
SVLEPPLFLK

SEQ ID NO: 23881 - protein, 10 aa, Homo Sapiens
SVLQFLGLYK

SEQ ID NO: 23882 - protein, 10 aa, Homo Sapiens
SVYDHQGIFK

SEQ ID NO: 23883 - protein, 10 aa, Homo Sapiens
TIARPTIGNK

SEQ ID NO: 23884 - protein, 10 aa, Homo Sapiens
TLFQLKFTAK

SEQ ID NO: 23885 - protein, 10 aa, Homo Sapiens
TLLDYTYTSK

SEQ ID NO: 23886 - protein, 10 aa, Homo Sapiens
TLLGKPLLGK

SEQ ID NO: 23887 - protein, 10 aa, Homo Sapiens
TLLPMPLSGR

SEQ ID NO: 23888 - protein, 10 aa, Homo Sapiens
TLMTILKNSI

SEQ ID NO: 23889 - protein, 10 aa, Homo Sapiens
TLYISECLKK

SEQ ID NO: 23890 - protein, 10 aa, Homo Sapiens
TLYSNNITKL

SEQ ID NO: 23891 - protein, 10 aa, Homo Sapiens
TLYYQPGLLY

SEQ ID NO: 23892 - protein, 10 aa, Homo Sapiens
TTVPRRLGPK

SEQ ID NO: 23893 - protein, 10 aa, Homo Sapiens
TVAVPLVGKL

SEQ ID NO: 23894 - protein, 10 aa, Homo Sapiens
TVLCQPTGGK

SEQ ID NO: 23895 - protein, 10 aa, Homo Sapiens
TVLGGVLGQK

SEQ ID NO: 23896 - protein, 10 aa, Homo Sapiens
TVYRNPESFK

SEQ ID NO: 23897 - protein, 10 aa, Homo Sapiens
VIIPTAPLYK

SEQ ID NO: 23898 - protein, 10 aa, Homo Sapiens
VILEVQSNPK

SEQ ID NO: 23899 - protein, 10 aa, Homo Sapiens
VISQEPFVPK

SEQ ID NO: 23900 - protein, 10 aa, Homo Sapiens
VIWKYPTMAK

SEQ ID NO: 23901 - protein, 10 aa, Homo Sapiens
VIYYLAFSAK

SEQ ID NO: 23902 - protein, 10 aa, Homo Sapiens
VLFSYSFSYK

SEQ ID NO: 23903 - protein, 10 aa, Homo Sapiens
VLGPNVSIGK

SEQ ID NO: 23904 - protein, 10 aa, Homo Sapiens
VLLGPPGAGK

SEQ ID NO: 23905 - protein, 10 aa, Homo Sapiens
VLLGSLFSRK

SEQ ID NO: 23906 - protein, 10 aa, Homo Sapiens
VLSSFVLAEK

SEQ ID NO: 23907 - protein, 10 aa, Homo Sapiens
VLYDRQGIGR

SEQ ID NO: 23908 - protein, 10 aa, Homo Sapiens
VMLGTQLLYK

SEQ ID NO: 23909 - protein, 10 aa, Homo Sapiens
VSILLGTVPK

SEQ ID NO: 23910 - protein, 10 aa, Homo Sapiens
VTFEKIFSQK

SEQ ID NO: 23911 - protein, 10 aa, Homo Sapiens
VTFRPLFFKL

SEQ ID NO: 23912 - protein, 10 aa, Homo Sapiens
VTLSWKPVQK

SEQ ID NO: 23913 - protein, 10 aa, Homo Sapiens
VTYRNLINKL

SEQ ID NO: 23914 - protein, 10 aa, Homo Sapiens
VVFEKAIQRT

SEQ ID NO: 23915 - protein, 10 aa, Homo Sapiens
VVLGQFLVLK

SEQ ID NO: 23916 - protein, 10 aa, Homo Sapiens
VVNKVPLTGK

SEQ ID NO: 23917 - protein, 10 aa, Homo Sapiens
VVWPQPATTK

SEQ ID NO: 23918 - protein, 10 aa, Homo Sapiens
VVYTSEMALK

SEQ ID NO: 23919 - protein, 10 aa, Homo Sapiens
VVYTSHLQLK

SEQ ID NO: 23920 - protein, 10 aa, Homo Sapiens
YIYDGELVSK

SEQ ID NO: 23921 - protein, 10 aa, Homo Sapiens
YLGEFSITYK

SEQ ID NO: 23922 - protein, 11 aa, Homo Sapiens
AEVNADRITWL

SEQ ID NO: 23923 - protein, 11 aa, Homo Sapiens
AIAQAESLRYK

SEQ ID NO: 23924 - protein, 11 aa, Homo Sapiens
AIFEVNTDLQK

SEQ ID NO: 23925 - protein, 11 aa, Homo Sapiens
AIIPSKKLRNK

SEQ ID NO: 23926 - protein, 11 aa, Homo Sapiens
AIYGGTYMLNK

SEQ ID NO: 23927 - protein, 11 aa, Homo Sapiens
AIYKTPPGIQK

SEQ ID NO: 23928 - protein, 11 aa, Homo Sapiens
AIYLVTSLASK

SEQ ID NO: 23929 - protein, 11 aa, Homo Sapiens
AIYPFLDSPNK

SEQ ID NO: 23930 - protein, 11 aa, Homo Sapiens
ALESSIEQRLK

SEQ ID NO: 23931 - protein, 11 aa, Homo Sapiens
ALFKDSEILRK

SEQ ID NO: 23932 - protein, 11 aa, Homo Sapiens
ALFSSKDFAGK

SEQ ID NO: 23933 - protein, 11 aa, Homo Sapiens
ALFVAFLLRGK

SEQ ID NO: 23934 - protein, 11 aa, Homo Sapiens
ALLDGSNVVFK

SEQ ID NO: 23935 - protein, 11 aa, Homo Sapiens
ALLRVTPFILK

SEQ ID NO: 23936 - protein, 11 aa, Homo Sapiens
ALMPQETQALK

SEQ ID NO: 23937 - protein, 11 aa, Homo Sapiens
ALPVLERLIYK

SEQ ID NO: 23938 - protein, 11 aa, Homo Sapiens
ALRNINLIVQK

SEQ ID NO: 23939 - protein, 11 aa, Homo Sapiens
ALVNQDILENK

SEQ ID NO: 23940 - protein, 11 aa, Homo Sapiens
ALWGGTQPLLK

SEQ ID NO: 23941 - protein, 11 aa, Homo Sapiens
ALYMASQPKNK

SEQ ID NO: 23942 - protein, 11 aa, Homo Sapiens
ALYPEGQAPVK

SEQ ID NO: 23943 - protein, 11 aa, Homo Sapiens
ALYYPELYILK

SEQ ID NO: 23944 - protein, 11 aa, Homo Sapiens
AMFSPPVNSGK

SEQ ID NO: 23945 - protein, 11 aa, Homo Sapiens
AMYDKGPFRSK

SEQ ID NO: 23946 - protein, 11 aa, Homo Sapiens
AQFPSSGRFWK

SEQ ID NO: 23947 - protein, 11 aa, Homo Sapiens
AQYSPQQLAGK

SEQ ID NO: 23948 - protein, 11 aa, Homo Sapiens
ASYEFVQRLLK

SEQ ID NO: 23949 - protein, 11 aa, Homo Sapiens
ATALFGQPPFK

SEQ ID NO: 23950 - protein, 11 aa, Homo Sapiens
ATFRFPGALQH

SEQ ID NO: 23951 - protein, 11 aa, Homo Sapiens
ATLPVLYMLFK

SEQ ID NO: 23952 - protein, 11 aa, Homo Sapiens
ATLSQFYINKL

SEQ ID NO: 23953 - protein, 11 aa, Homo Sapiens
ATRILFFNTPK

SEQ ID NO: 23954 - protein, 11 aa, Homo Sapiens
ATYKGVPFEVK

SEQ ID NO: 23955 - protein, 11 aa, Homo Sapiens
AVADKVHLMYK

SEQ ID NO: 23956 - protein, 11 aa, Homo Sapiens
AVASEDSVLLY

SEQ ID NO: 23957 - protein, 11 aa, Homo Sapiens
AVFPFKPPQRI

SEQ ID NO: 23958 - protein, 11 aa, Homo Sapiens
AVFPSLLTNPK

SEQ ID NO: 23959 - protein, 11 aa, Homo Sapiens
AVFVTSEASLK

SEQ ID NO: 23960 - protein, 11 aa, Homo Sapiens
AVIPEKQLVEK

SEQ ID NO: 23961 - protein, 11 aa, Homo Sapiens
AVLDQQIHLEK

SEQ ID NO: 23962 - protein, 11 aa, Homo Sapiens
AVLGETLIPHY

SEQ ID NO: 23963 - protein, 11 aa, Homo Sapiens
AVLGPNVSIGK

SEQ ID NO: 23964 - protein, 11 aa, Homo Sapiens
AVLNLLYVFSK

SEQ ID NO: 23965 - protein, 11 aa, Homo Sapiens
AVMAESAFSFK

SEQ ID NO: 23966 - protein, 11 aa, Homo Sapiens
AVMDNKNPTIK

SEQ ID NO: 23967 - protein, 11 aa, Homo Sapiens
AVRTLNKVAMK

SEQ ID NO: 23968 - protein, 11 aa, Homo Sapiens
AVVNKVPLTGK

SEQ ID NO: 23969 - protein, 11 aa, Homo Sapiens
AVVPLASVIVK

SEQ ID NO: 23970 - protein, 11 aa, Homo Sapiens
AVYGMLNLTPK

SEQ ID NO: 23971 - protein, 11 aa, Homo Sapiens
AVYSMVEFNGK

SEQ ID NO: 23972 - protein, 11 aa, Homo Sapiens
EIYDPRNPVNK

SEQ ID NO: 23973 - protein, 11 aa, Homo Sapiens
FLYQQQGRLDK

SEQ ID NO: 23974 - protein, 11 aa, Homo Sapiens
GLFQGKTPLRK

SEQ ID NO: 23975 - protein, 11 aa, Homo Sapiens
GLLAAQKVISK

SEQ ID NO: 23976 - protein, 11 aa, Homo Sapiens
GLLNGKVGSFK

SEQ ID NO: 23977 - protein, 11 aa, Homo Sapiens
GLRPGPELIQK

SEQ ID NO: 23978 - protein, 11 aa, Homo Sapiens
GMYLISKYIRK

SEQ ID NO: 23979 - protein, 11 aa, Homo Sapiens
GSYSLPGTLAK

SEQ ID NO: 23980 - protein, 11 aa, Homo Sapiens
GTFVSPEVFLK

SEQ ID NO: 23981 - protein, 11 aa, Homo Sapiens
GTVLGGVLGQK

SEQ ID NO: 23982 - protein, 11 aa, Homo Sapiens
GVIGQDGLLFK

SEQ ID NO: 23983 - protein, 11 aa, Homo Sapiens
GVIPESVILLK

SEQ ID NO: 23984 - protein, 11 aa, Homo Sapiens
HTLDSYRILQK

SEQ ID NO: 23985 - protein, 11 aa, Homo Sapiens
HVLEAQDLIAK

SEQ ID NO: 23986 - protein, 11 aa, Homo Sapiens
IIYDPKLQTPK

SEQ ID NO: 23987 - protein, 11 aa, Homo Sapiens
IIYFARKANMK

SEQ ID NO: 23988 - protein, 11 aa, Homo Sapiens
ILFPRKPSAPK

SEQ ID NO: 23989 - protein, 11 aa, Homo Sapiens
ILFTEDPRVFK

SEQ ID NO: 23990 - protein, 11 aa, Homo Sapiens
ILFVPGEYSLK

SEQ ID NO: 23991 - protein, 11 aa, Homo Sapiens
ILLGGNALSPK

SEQ ID NO: 23992 - protein, 11 aa, Homo Sapiens
ILNSPTVTSIK

SEQ ID NO: 23993 - protein, 11 aa, Homo Sapiens
ILYAQFEIRQK

SEQ ID NO: 23994 - protein, 11 aa, Homo Sapiens
ILYENPNFTGK

SEQ ID NO: 23995 - protein, 11 aa, Homo Sapiens
ITDPHSPSRFR

SEQ ID NO: 23996 - protein, 11 aa, Homo Sapiens
IVFNGPHLLLR

SEQ ID NO: 23997 - protein, 11 aa, Homo Sapiens
IVRTGGHFICK

SEQ ID NO: 23998 - protein, 11 aa, Homo Sapiens
IVYDIAQVNLK

SEQ ID NO: 23999 - protein, 11 aa, Homo Sapiens
IVYLGDYLTVK

SEQ ID NO: 24000 - protein, 11 aa, Homo Sapiens
KILDTERMLAK

SEQ ID NO: 24001 - protein, 11 aa, Homo Sapiens
KILGPQGNTIK

SEQ ID NO: 24002 - protein, 11 aa, Homo Sapiens
KILPVGGIKEK

SEQ ID NO: 24003 - protein, 11 aa, Homo Sapiens
KIYNGLFAISK

SEQ ID NO: 24004 - protein, 11 aa, Homo Sapiens
KLAEQYESFVK

SEQ ID NO: 24005 - protein, 11 aa, Homo Sapiens
KLAPAMKTQKL

SEQ ID NO: 24006 - protein, 11 aa, Homo Sapiens
KLDVDAPRLLK

SEQ ID NO: 24007 - protein, 11 aa, Homo Sapiens
KLFDYSKPSAK

SEQ ID NO: 24008 - protein, 11 aa, Homo Sapiens
KLFEAPNFFQK

SEQ ID NO: 24009 - protein, 11 aa, Homo Sapiens
KLFGPFTRNYY

SEQ ID NO: 24010 - protein, 11 aa, Homo Sapiens
KLFKPGQEAVK

SEQ ID NO: 24011 - protein, 11 aa, Homo Sapiens
KLFLIDFGLAK

SEQ ID NO: 24012 - protein, 11 aa, Homo Sapiens
KLFPGSPAIYK

SEQ ID NO: 24013 - protein, 11 aa, Homo Sapiens
KLFSEGLFSAK

SEQ ID NO: 24014 - protein, 11 aa, Homo Sapiens
KLFSELPLAKK

SEQ ID NO: 24015 - protein, 11 aa, Homo Sapiens
KLFWSQRKITK

SEQ ID NO: 24016 - protein, 11 aa, Homo Sapiens
KLIGEYGLRNK

SEQ ID NO: 24017 - protein, 11 aa, Homo Sapiens
KLISEEDLLRK

SEQ ID NO: 24018 - protein, 11 aa, Homo Sapiens
KLLDEVFFSEK

SEQ ID NO: 24019 - protein, 11 aa, Homo Sapiens
KLLDIRSYLEK

SEQ ID NO: 24020 - protein, 11 aa, Homo Sapiens
KLLDVVHPAAK

SEQ ID NO: 24021 - protein, 11 aa, Homo Sapiens
KLLEPVLLLGK

SEQ ID NO: 24022 - protein, 11 aa, Homo Sapiens
KLLGLPEDYLY

SEQ ID NO: 24023 - protein, 11 aa, Homo Sapiens
KLLQEAEQRLK

SEQ ID NO: 24024 - protein, 11 aa, Homo Sapiens
KLQDFKSFLLK

SEQ ID NO: 24025 - protein, 11 aa, Homo Sapiens
KLRETQGIEKL

SEQ ID NO: 24026 - protein, 11 aa, Homo Sapiens
KLVSFPIGIYK

SEQ ID NO: 24027 - protein, 11 aa, Homo Sapiens
KLYASHSQFIK

SEQ ID NO: 24028 - protein, 11 aa, Homo Sapiens
KLYTKHGTLKY

SEQ ID NO: 24029 - protein, 11 aa, Homo Sapiens
KLYVGSRVVAK

SEQ ID NO: 24030 - protein, 11 aa, Homo Sapiens
KMADKILPQRI

SEQ ID NO: 24031 - protein, 11 aa, Homo Sapiens
KMADKVLPQRI

SEQ ID NO: 24032 - protein, 11 aa, Homo Sapiens
KMLEENTNILK

SEQ ID NO: 24033 - protein, 11 aa, Homo Sapiens
KMQYATGPLLK

SEQ ID NO: 24034 - protein, 11 aa, Homo Sapiens
KQYGNEVFLAK

SEQ ID NO: 24035 - protein, 11 aa, Homo Sapiens
KTAEDAKDFFK

SEQ ID NO: 24036 - protein, 11 aa, Homo Sapiens
KTFDAPPALPK

SEQ ID NO: 24037 - protein, 11 aa, Homo Sapiens
KTFTIKRFLAK

SEQ ID NO: 24038 - protein, 11 aa, Homo Sapiens
KTFTWPSILSK

SEQ ID NO: 24039 - protein, 11 aa, Homo Sapiens
KTIDMELVKRK

SEQ ID NO: 24040 - protein, 11 aa, Homo Sapiens
KTIDYIQFLHK

SEQ ID NO: 24041 - protein, 11 aa, Homo Sapiens
KTLAYRGFIFK

SEQ ID NO: 24042 - protein, 11 aa, Homo Sapiens
KTLDEILQEKK

SEQ ID NO: 24043 - protein, 11 aa, Homo Sapiens
KTLDQAKAVLK

SEQ ID NO: 24044 - protein, 11 aa, Homo Sapiens
KTRTGELINRL

SEQ ID NO: 24045 - protein, 11 aa, Homo Sapiens
KTYGVSFFLVK

SEQ ID NO: 24046 - protein, 11 aa, Homo Sapiens
KTYHALSNLPK

SEQ ID NO: 24047 - protein, 11 aa, Homo Sapiens
KTYIQLLIREK

SEQ ID NO: 24048 - protein, 11 aa, Homo Sapiens
KTYQVTPMTPR

SEQ ID NO: 24049 - protein, 11 aa, Homo Sapiens
KTYYQDRPFFR

SEQ ID NO: 24050 - protein, 11 aa, Homo Sapiens
KVCNPIITKLY

SEQ ID NO: 24051 - protein, 11 aa, Homo Sapiens
KVIDGERVIGR

SEQ ID NO: 24052 - protein, 11 aa, Homo Sapiens
KVISKDLVIER

SEQ ID NO: 24053 - protein, 11 aa, Homo Sapiens
KVLDTIMATKL

SEQ ID NO: 24054 - protein, 11 aa, Homo Sapiens
KVLSIDQRNFK

SEQ ID NO: 24055 - protein, 11 aa, Homo Sapiens
KVMAGSLLLDK

SEQ ID NO: 24056 - protein, 11 aa, Homo Sapiens
KVSSINSRFAK

SEQ ID NO: 24057 - protein, 11 aa, Homo Sapiens
LAYFPYFITYK

SEQ ID NO: 24058 - protein, 11 aa, Homo Sapiens
LILEPSLYTVK

SEQ ID NO: 24059 - protein, 11 aa, Homo Sapiens
LIYEETRGVLK

SEQ ID NO: 24060 - protein, 11 aa, Homo Sapiens
LIYVSVPGSKK

SEQ ID NO: 24061 - protein, 11 aa, Homo Sapiens
LLDIQSSGRAK

SEQ ID NO: 24062 - protein, 11 aa, Homo Sapiens
LLFPSRPGLLK

SEQ ID NO: 24063 - protein, 11 aa, Homo Sapiens
LLFSATMPKKI

SEQ ID NO: 24064 - protein, 11 aa, Homo Sapiens
LLREAESLIAK

SEQ ID NO: 24065 - protein, 11 aa, Homo Sapiens
LVYSSNFQNVK

SEQ ID NO: 24066 - protein, 11 aa, Homo Sapiens
MLMKNTIIAAK

SEQ ID NO: 24067 - protein, 11 aa, Homo Sapiens
MLYGYQVGLFK

SEQ ID NO: 24068 - protein, 11 aa, Homo Sapiens
NVYPNFRPTPK

SEQ ID NO: 24069 - protein, 11 aa, Homo Sapiens
QIREMETLILK

SEQ ID NO: 24070 - protein, 11 aa, Homo Sapiens
QIYAIRQSISK

SEQ ID NO: 24071 - protein, 11 aa, Homo Sapiens
QLFRGDTVLLK

SEQ ID NO: 24072 - protein, 11 aa, Homo Sapiens
QVLCIPSWMAK

SEQ ID NO: 24073 - protein, 11 aa, Homo Sapiens
QVLNADAIVVK

SEQ ID NO: 24074 - protein, 11 aa, Homo Sapiens
QVYISSLALLK

SEQ ID NO: 24075 - protein, 11 aa, Homo Sapiens
RIAGEASRLAH

SEQ ID NO: 24076 - protein, 11 aa, Homo Sapiens
RIFANTESYLK

SEQ ID NO: 24077 - protein, 11 aa, Homo Sapiens
RIFAPNHVVAK

SEQ ID NO: 24078 - protein, 11 aa, Homo Sapiens
RIFDSPEELPK

SEQ ID NO: 24079 - protein, 11 aa, Homo Sapiens
RIKEIAQDALK

SEQ ID NO: 24080 - protein, 11 aa, Homo Sapiens
RIKRALDLNLK

SEQ ID NO: 24081 - protein, 11 aa, Homo Sapiens
RILLDIHIFMK

SEQ ID NO: 24082 - protein, 11 aa, Homo Sapiens
RIMDPDVITGY

SEQ ID NO: 24083 - protein, 11 aa, Homo Sapiens
RIMSETYMLIK

SEQ ID NO: 24084 - protein, 11 aa, Homo Sapiens
RIRDGDFVVLK

SEQ ID NO: 24085 - protein, 11 aa, Homo Sapiens
RIRDLNDEINK

SEQ ID NO: 24086 - protein, 11 aa, Homo Sapiens
RIRNISNTVMK

SEQ ID NO: 24087 - protein, 11 aa, Homo Sapiens
RIVHGDVLTFK

SEQ ID NO: 24088 - protein, 11 aa, Homo Sapiens
RIWEPTYTIMY

SEQ ID NO: 24089 - protein, 11 aa, Homo Sapiens
RIYLDLPQNFK

SEQ ID NO: 24090 - protein, 11 aa, Homo Sapiens
RIYLDMLNVYK

SEQ ID NO: 24091 - protein, 11 aa, Homo Sapiens
RIYSQKIGIKK

SEQ ID NO: 24092 - protein, 11 aa, Homo Sapiens
RLADKSVLVCK

SEQ ID NO: 24093 - protein, 11 aa, Homo Sapiens
RLASLGLKFNK

SEQ ID NO: 24094 - protein, 11 aa, Homo Sapiens
RLDQSRTWLVK

SEQ ID NO: 24095 - protein, 11 aa, Homo Sapiens
RLFAYPDTHRH

SEQ ID NO: 24096 - protein, 11 aa, Homo Sapiens
RLFGLTKPKEK

SEQ ID NO: 24097 - protein, 11 aa, Homo Sapiens
RLFVGSIPKSK

SEQ ID NO: 24098 - protein, 11 aa, Homo Sapiens
RLIAQRYLLQY

SEQ ID NO: 24099 - protein, 11 aa, Homo Sapiens
RLIDLCQPTQK

SEQ ID NO: 24100 - protein, 11 aa, Homo Sapiens
RLIESLFTIQK

SEQ ID NO: 24101 - protein, 11 aa, Homo Sapiens
RLINTQAIFAK

SEQ ID NO: 24102 - protein, 11 aa, Homo Sapiens
RLKAYASPAKL

SEQ ID NO: 24103 - protein, 11 aa, Homo Sapiens
RLLAEPVPGIK

SEQ ID NO: 24104 - protein, 11 aa, Homo Sapiens
RLLAHRVETKM

SEQ ID NO: 24105 - protein, 11 aa, Homo Sapiens
RLLDSEIKIMK

SEQ ID NO: 24106 - protein, 11 aa, Homo Sapiens
RLLGLTGLLSK

SEQ ID NO: 24107 - protein, 11 aa, Homo Sapiens
RLLLETHLPSK

SEQ ID NO: 24108 - protein, 11 aa, Homo Sapiens
RLLPGNATISK

SEQ ID NO: 24109 - protein, 11 aa, Homo Sapiens
RLLPKFSLKEK

SEQ ID NO: 24110 - protein, 11 aa, Homo Sapiens
RLLQDPLGLAY

SEQ ID NO: 24111 - protein, 11 aa, Homo Sapiens
RLLQDVGLVSK

SEQ ID NO: 24112 - protein, 11 aa, Homo Sapiens
RLLSMAKPVYH

SEQ ID NO: 24113 - protein, 11 aa, Homo Sapiens
RLLSPPLRPRL

SEQ ID NO: 24114 - protein, 11 aa, Homo Sapiens
RLLSTPSFWLY

SEQ ID NO: 24115 - protein, 11 aa, Homo Sapiens
RLMEFNSLINK

SEQ ID NO: 24116 - protein, 11 aa, Homo Sapiens
RLMEQQGALLK

SEQ ID NO: 24117 - protein, 11 aa, Homo Sapiens
RLNITYPMLFK

SEQ ID NO: 24118 - protein, 11 aa, Homo Sapiens
RLQDQGLILYH

SEQ ID NO: 24119 - protein, 11 aa, Homo Sapiens
RLRDPDSHIVK

SEQ ID NO: 24120 - protein, 11 aa, Homo Sapiens
RLRELTSIVNR

SEQ ID NO: 24121 - protein, 11 aa, Homo Sapiens
RLRELVPGVPR

SEQ ID NO: 24122 - protein, 11 aa, Homo Sapiens
RLSGVSSNIQK

SEQ ID NO: 24123 - protein, 11 aa, Homo Sapiens
RLVPREIIVEK

SEQ ID NO: 24124 - protein, 11 aa, Homo Sapiens
RLWQTTEEIPK

SEQ ID NO: 24125 - protein, 11 aa, Homo Sapiens
RLYHELVGLAK

SEQ ID NO: 24126 - protein, 11 aa, Homo Sapiens
RLYLNGDGTGK

SEQ ID NO: 24127 - protein, 11 aa, Homo Sapiens
RLYQAVVDARK

SEQ ID NO: 24128 - protein, 11 aa, Homo Sapiens
RLYRPHLASEK

SEQ ID NO: 24129 - protein, 11 aa, Homo Sapiens
RMAPVLPSVLK

SEQ ID NO: 24130 - protein, 11 aa, Homo Sapiens
RMFAPTKTWRR

SEQ ID NO: 24131 - protein, 11 aa, Homo Sapiens
RMFHIRAVILR

SEQ ID NO: 24132 - protein, 11 aa, Homo Sapiens
RMKLPSSVGQK

SEQ ID NO: 24133 - protein, 11 aa, Homo Sapiens
RSFPWQSLEAK

SEQ ID NO: 24134 - protein, 11 aa, Homo Sapiens
RSLSEDVRFYY

SEQ ID NO: 24135 - protein, 11 aa, Homo Sapiens
RSMDPFPWQQK

SEQ ID NO: 24136 - protein, 11 aa, Homo Sapiens
RSYPVTEQRVK

SEQ ID NO: 24137 - protein, 11 aa, Homo Sapiens
RTFSWASVTSK

SEQ ID NO: 24138 - protein, 11 aa, Homo Sapiens
RTISGNVYILK

SEQ ID NO: 24139 - protein, 11 aa, Homo Sapiens
RTLDTIQLAFK

SEQ ID NO: 24140 - protein, 11 aa, Homo Sapiens
RTLGSDSVILK

SEQ ID NO: 24141 - protein, 11 aa, Homo Sapiens
RTLMPEKLSHK

SEQ ID NO: 24142 - protein, 11 aa, Homo Sapiens
RTLNPQMLQKK

SEQ ID NO: 24143 - protein, 11 aa, Homo Sapiens
RTQMPDPKTFK

SEQ ID NO: 24144 - protein, 11 aa, Homo Sapiens
RTRDYASLPPK

SEQ ID NO: 24145 - protein, 11 aa, Homo Sapiens
RTSGSVYITLK

SEQ ID NO: 24146 - protein, 11 aa, Homo Sapiens
RTSPALKTTRL

SEQ ID NO: 24147 - protein, 11 aa, Homo Sapiens
RTVLKNLSLLK

SEQ ID NO: 24148 - protein, 11 aa, Homo Sapiens
RTYGVSFFLVK

SEQ ID NO: 24149 - protein, 11 aa, Homo Sapiens
RVADLVHILTH

SEQ ID NO: 24150 - protein, 11 aa, Homo Sapiens
RVADRLYGVYK

SEQ ID NO: 24151 - protein, 11 aa, Homo Sapiens
RVAPAHGLFLK

SEQ ID NO: 24152 - protein, 11 aa, Homo Sapiens
RVFAAESIIKR

SEQ ID NO: 24153 - protein, 11 aa, Homo Sapiens
RVFEVMLPEKL

SEQ ID NO: 24154 - protein, 11 aa, Homo Sapiens
RVFPVRPGSGR

SEQ ID NO: 24155 - protein, 11 aa, Homo Sapiens
RVFTQLGSVLK

SEQ ID NO: 24156 - protein, 11 aa, Homo Sapiens
RVFTTVGSAEK

SEQ ID NO: 24157 - protein, 11 aa, Homo Sapiens
RVILAGNLLSH

SEQ ID NO: 24158 - protein, 11 aa, Homo Sapiens
RVINEEYKIWK

SEQ ID NO: 24159 - protein, 11 aa, Homo Sapiens
RVIPRITIEMK

SEQ ID NO: 24160 - protein, 11 aa, Homo Sapiens
RVITEEEKNFK

SEQ ID NO: 24161 - protein, 11 aa, Homo Sapiens
RVLDALVAREK

SEQ ID NO: 24162 - protein, 11 aa, Homo Sapiens
RVLIGEGVLTK

SEQ ID NO: 24163 - protein, 11 aa, Homo Sapiens
RVLPSSLMLPK

SEQ ID NO: 24164 - protein, 11 aa, Homo Sapiens
RVLTSGIFETK

SEQ ID NO: 24165 - protein, 11 aa, Homo Sapiens
RVMTQLTLALK

SEQ ID NO: 24166 - protein, 11 aa, Homo Sapiens
RVQEAVESMVK

SEQ ID NO: 24167 - protein, 11 aa, Homo Sapiens
RVQPGLLQWVK

SEQ ID NO: 24168 - protein, 11 aa, Homo Sapiens
RVSPQPMISRL

SEQ ID NO: 24169 - protein, 11 aa, Homo Sapiens
RVSTEVTLAVK

SEQ ID NO: 24170 - protein, 11 aa, Homo Sapiens
RVWDISGLRKK

SEQ ID NO: 24171 - protein, 11 aa, Homo Sapiens
RVWDVESGSLK

SEQ ID NO: 24172 - protein, 11 aa, Homo Sapiens
RVWDVRPFAPK

SEQ ID NO: 24173 - protein, 11 aa, Homo Sapiens
RVWSLMRFLIK

SEQ ID NO: 24174 - protein, 11 aa, Homo Sapiens
RVYDPASPQRR

SEQ ID NO: 24175 - protein, 11 aa, Homo Sapiens
RVYNTDPLKEK

SEQ ID NO: 24176 - protein, 11 aa, Homo Sapiens
RVYSHLKSVLK

SEQ ID NO: 24177 - protein, 11 aa, Homo Sapiens
RVYSPPEWIRY

SEQ ID NO: 24178 - protein, 11 aa, Homo Sapiens
RVYSPPEWISR

SEQ ID NO: 24179 - protein, 11 aa, Homo Sapiens
RVYYVSEKIMK

SEQ ID NO: 24180 - protein, 11 aa, Homo Sapiens
SIFIGGSFILK

SEQ ID NO: 24181 - protein, 11 aa, Homo Sapiens
SIRPVSEVTLK

SEQ ID NO: 24182 - protein, 11 aa, Homo Sapiens
SIYIAYGPNGK

SEQ ID NO: 24183 - protein, 11 aa, Homo Sapiens
SIYRPSKNLDK

SEQ ID NO: 24184 - protein, 11 aa, Homo Sapiens
SLAERSSLLQK

SEQ ID NO: 24185 - protein, 11 aa, Homo Sapiens
SLDIPSQFRSK

SEQ ID NO: 24186 - protein, 11 aa, Homo Sapiens
SLFPGSLKPKL

SEQ ID NO: 24187 - protein, 11 aa, Homo Sapiens
SLFSPAFYTAK

SEQ ID NO: 24188 - protein, 11 aa, Homo Sapiens
SLHPGSSALHY

SEQ ID NO: 24189 - protein, 11 aa, Homo Sapiens
SLSSPLNPKLW

SEQ ID NO: 24190 - protein, 11 aa, Homo Sapiens
SLWESSQELLK

SEQ ID NO: 24191 - protein, 11 aa, Homo Sapiens
SLYDSKIWTTK

SEQ ID NO: 24192 - protein, 11 aa, Homo Sapiens
SLYEMVSRVMK

SEQ ID NO: 24193 - protein, 11 aa, Homo Sapiens
SLYFSTGQNPK

SEQ ID NO: 24194 - protein, 11 aa, Homo Sapiens
SLYQPLQNSSK

SEQ ID NO: 24195 - protein, 11 aa, Homo Sapiens
SMLPGSGSVPK

SEQ ID NO: 24196 - protein, 11 aa, Homo Sapiens
SMMDVDHQIAK

SEQ ID NO: 24197 - protein, 11 aa, Homo Sapiens
STIPPELVKQK

SEQ ID NO: 24198 - protein, 11 aa, Homo Sapiens
STLTSKCLLLK

SEQ ID NO: 24199 - protein, 11 aa, Homo Sapiens
STMYPGLPSRL

SEQ ID NO: 24200 - protein, 11 aa, Homo Sapiens
STYPPEIVVPK

SEQ ID NO: 24201 - protein, 11 aa, Homo Sapiens
SVASAAAVLSH

SEQ ID NO: 24202 - protein, 11 aa, Homo Sapiens
SVFFPESGLAK

SEQ ID NO: 24203 - protein, 11 aa, Homo Sapiens
SVIDRKDLIIK

SEQ ID NO: 24204 - protein, 11 aa, Homo Sapiens
SVIGFRILLLK

SEQ ID NO: 24205 - protein, 11 aa, Homo Sapiens
SVLDMEAITFK

SEQ ID NO: 24206 - protein, 11 aa, Homo Sapiens
SVLDTVLLRPK

SEQ ID NO: 24207 - protein, 11 aa, Homo Sapiens
SVLPEYLKVFK

SEQ ID NO: 24208 - protein, 11 aa, Homo Sapiens
SVQNRQNFVVK

SEQ ID NO: 24209 - protein, 11 aa, Homo Sapiens
TIIGELGLDPG

SEQ ID NO: 24210 - protein, 11 aa, Homo Sapiens
TIMPKDIQLAR

SEQ ID NO: 24211 - protein, 11 aa, Homo Sapiens
TLWDRIGGSFK

SEQ ID NO: 24212 - protein, 11 aa, Homo Sapiens
TLWVIDQGLKK

SEQ ID NO: 24213 - protein, 11 aa, Homo Sapiens
TVAVPLVGKLG

SEQ ID NO: 24214 - protein, 11 aa, Homo Sapiens
TVFDAKRLIGR

SEQ ID NO: 24215 - protein, 11 aa, Homo Sapiens
TVFQYLKMLQK

SEQ ID NO: 24216 - protein, 11 aa, Homo Sapiens
TVIRDVEQQFK

SEQ ID NO: 24217 - protein, 11 aa, Homo Sapiens
TVLGGVYILGK

SEQ ID NO: 24218 - protein, 11 aa, Homo Sapiens
TVMELVKIIYK

SEQ ID NO: 24219 - protein, 11 aa, Homo Sapiens
TVYAFSIENFK

SEQ ID NO: 24220 - protein, 11 aa, Homo Sapiens
VILPPLSPYFK

SEQ ID NO: 24221 - protein, 11 aa, Homo Sapiens
VIYIQAIFRGK

SEQ ID NO: 24222 - protein, 11 aa, Homo Sapiens
VLDPKSKWRSK

SEQ ID NO: 24223 - protein, 11 aa, Homo Sapiens
VLFDTQLIIEK

SEQ ID NO: 24224 - protein, 11 aa, Homo Sapiens
VLFPEGGFLRK

SEQ ID NO: 24225 - protein, 11 aa, Homo Sapiens
VLQAADILLYK

SEQ ID NO: 24226 - protein, 11 aa, Homo Sapiens
VLSLGVAALYK

SEQ ID NO: 24227 - protein, 11 aa, Homo Sapiens
VLSPDSLFTAK

SEQ ID NO: 24228 - protein, 11 aa, Homo Sapiens
VTLSMAYRLLK

SEQ ID NO: 24229 - protein, 11 aa, Homo Sapiens
VVFAVKQYISK

SEQ ID NO: 24230 - protein, 11 aa, Homo Sapiens
VVFDTSLQVKK

SEQ ID NO: 24231 - protein, 11 aa, Homo Sapiens
VVFVIDPGFAK

SEQ ID NO: 24232 - protein, 11 aa, Homo Sapiens
VVQDGITLITK

SEQ ID NO: 24233 - protein, 11 aa, Homo Sapiens
VVYSGLENIKK

SEQ ID NO: 24234 - protein, 8 aa, Homo Sapiens
AHLVHELR

SEQ ID NO: 24235 - protein, 8 aa, Homo Sapiens
AIYGVDTR

SEQ ID NO: 24236 - protein, 8 aa, Homo Sapiens
ASFISMRK

SEQ ID NO: 24237 - protein, 8 aa, Homo Sapiens
ASFVTSNK

SEQ ID NO: 24238 - protein, 8 aa, Homo Sapiens
ASSVPNLK

SEQ ID NO: 24239 - protein, 8 aa, Homo Sapiens
ATGYPLAF

SEQ ID NO: 24240 - protein, 8 aa, Homo Sapiens
ATQEAFMK

SEQ ID NO: 24241 - protein, 8 aa, Homo Sapiens
AVVTADLR

SEQ ID NO: 24242 - protein, 8 aa, Homo Sapiens
AYVNAIEK

SEQ ID NO: 24243 - protein, 8 aa, Homo Sapiens
CGVIGIAQ

SEQ ID NO: 24244 - protein, 8 aa, Homo Sapiens
DGIVSHLK

SEQ ID NO: 24245 - protein, 8 aa, Homo Sapiens
DGRVVEPK

SEQ ID NO: 24246 - protein, 8 aa, Homo Sapiens
EFGLARFK

SEQ ID NO: 24247 - protein, 8 aa, Homo Sapiens
FAGDDAPR

SEQ ID NO: 24248 - protein, 8 aa, Homo Sapiens
FDFQKAYK

SEQ ID NO: 24249 - protein, 8 aa, Homo Sapiens
FDGRVVAK

SEQ ID NO: 24250 - protein, 8 aa, Homo Sapiens
FDKAKLKK

SEQ ID NO: 24251 - protein, 8 aa, Homo Sapiens
FDTQITKK

SEQ ID NO: 24252 - protein, 8 aa, Homo Sapiens
FPKPFVEK

SEQ ID NO: 24253 - protein, 8 aa, Homo Sapiens
FPSEIVGK

SEQ ID NO: 24254 - protein, 8 aa, Homo Sapiens
FQIGSPWR

SEQ ID NO: 24255 - protein, 8 aa, Homo Sapiens
FQQGMKNK

SEQ ID NO: 24256 - protein, 8 aa, Homo Sapiens
FSPVGSVL

SEQ ID NO: 24257 - protein, 8 aa, Homo Sapiens
GDMSGLLK

SEQ ID NO: 24258 - protein, 8 aa, Homo Sapiens
GNMGLAMK

SEQ ID NO: 24259 - protein, 8 aa, Homo Sapiens
GSWDSFLK

SEQ ID NO: 24260 - protein, 8 aa, Homo Sapiens
IDGSVNPK

SEQ ID NO: 24261 - protein, 8 aa, Homo Sapiens
IFKQPVTK

SEQ ID NO: 24262 - protein, 8 aa, Homo Sapiens
IGTIFIIK

SEQ ID NO: 24263 - protein, 8 aa, Homo Sapiens
IKEGSQLK

SEQ ID NO: 24264 - protein, 8 aa, Homo Sapiens
INIVHPKL

SEQ ID NO: 24265 - protein, 8 aa, Homo Sapiens
ISTDPLKR

SEQ ID NO: 24266 - protein, 8 aa, Homo Sapiens
IVLEDGTK

SEQ ID NO: 24267 - protein, 8 aa, Homo Sapiens
LFGGILMK

SEQ ID NO: 24268 - protein, 8 aa, Homo Sapiens
LNLVIVKK

SEQ ID NO: 24269 - protein, 8 aa, Homo Sapiens
LVSLEMGK

SEQ ID NO: 24270 - protein, 8 aa, Homo Sapiens
LYQPLFDK

SEQ ID NO: 24271 - protein, 8 aa, Homo Sapiens
LYWSHPRK

SEQ ID NO: 24272 - protein, 8 aa, Homo Sapiens
MGAYVLLK

SEQ ID NO: 24273 - protein, 8 aa, Homo Sapiens
MLDTVVFK

SEQ ID NO: 24274 - protein, 8 aa, Homo Sapiens
MRVGLVAK

SEQ ID NO: 24275 - protein, 8 aa, Homo Sapiens
NAHSNILK

SEQ ID NO: 24276 - protein, 8 aa, Homo Sapiens
PALKQTPK

SEQ ID NO: 24277 - protein, 8 aa, Homo Sapiens
PANTPLRK

SEQ ID NO: 24278 - protein, 8 aa, Homo Sapiens
PDGKPLVR

SEQ ID NO: 24279 - protein, 8 aa, Homo Sapiens
PEKQLVEK

SEQ ID NO: 24280 - protein, 8 aa, Homo Sapiens
PITIFQER

SEQ ID NO: 24281 - protein, 8 aa, Homo Sapiens
PKDIQLAR

SEQ ID NO: 24282 - protein, 8 aa, Homo Sapiens
PLAGLAPK

SEQ ID NO: 24283 - protein, 8 aa, Homo Sapiens
PLDFPSKK

SEQ ID NO: 24284 - protein, 8 aa, Homo Sapiens
PLVDTHSK

SEQ ID NO: 24285 - protein, 8 aa, Homo Sapiens
PPELVKQK

SEQ ID NO: 24286 - protein, 8 aa, Homo Sapiens
PPLSPYFK

SEQ ID NO: 24287 - protein, 8 aa, Homo Sapiens
PQKPQTNK

SEQ ID NO: 24288 - protein, 8 aa, Homo Sapiens
PSLLTNPK

SEQ ID NO: 24289 - protein, 8 aa, Homo Sapiens
PSTPIAHR

SEQ ID NO: 24290 - protein, 8 aa, Homo Sapiens
PTNIIAAK

SEQ ID NO: 24291 - protein, 8 aa, Homo Sapiens
PTSPIRVK

SEQ ID NO: 24292 - protein, 8 aa, Homo Sapiens
QAESLRYK

SEQ ID NO: 24293 - protein, 8 aa, Homo Sapiens
QILVGVNK

SEQ ID NO: 24294 - protein, 8 aa, Homo Sapiens
QLLAKIYK

SEQ ID NO: 24295 - protein, 8 aa, Homo Sapiens
QSGEQPYK

SEQ ID NO: 24296 - protein, 8 aa, Homo Sapiens
RAKFKQLL

SEQ ID NO: 24297 - protein, 8 aa, Homo Sapiens
RYRVLHKR

SEQ ID NO: 24298 - protein, 8 aa, Homo Sapiens
SDFHPVKK

SEQ ID NO: 24299 - protein, 8 aa, Homo Sapiens
SDVVTAVR

SEQ ID NO: 24300 - protein, 8 aa, Homo Sapiens
SFDKAKLK

SEQ ID NO: 24301 - protein, 8 aa, Homo Sapiens
SFPIGIYK

SEQ ID NO: 24302 - protein, 8 aa, Homo Sapiens
SLDLDVNV

SEQ ID NO: 24303 - protein, 8 aa, Homo Sapiens
SNFKSPVK

SEQ ID NO: 24304 - protein, 8 aa, Homo Sapiens
SPIIIHRL

SEQ ID NO: 24305 - protein, 8 aa, Homo Sapiens
SSDVIIHR

SEQ ID NO: 24306 - protein, 8 aa, Homo Sapiens
SSGKFMYL

SEQ ID NO: 24307 - protein, 8 aa, Homo Sapiens
SSHVPIQK

SEQ ID NO: 24308 - protein, 8 aa, Homo Sapiens
STAFKGEK

SEQ ID NO: 24309 - protein, 8 aa, Homo Sapiens
SVAELDDK

SEQ ID NO: 24310 - protein, 8 aa, Homo Sapiens
SVLGPNAR

SEQ ID NO: 24311 - protein, 8 aa, Homo Sapiens
SVYITLKK

SEQ ID NO: 24312 - protein, 8 aa, Homo Sapiens
TADVHFER

SEQ ID NO: 24313 - protein, 8 aa, Homo Sapiens
TDKSFVEK

SEQ ID NO: 24314 - protein, 8 aa, Homo Sapiens
TEAPLNPK

SEQ ID NO: 24315 - protein, 8 aa, Homo Sapiens
TFYGPVKK

SEQ ID NO: 24316 - protein, 8 aa, Homo Sapiens
TITLYGKS

SEQ ID NO: 24317 - protein, 8 aa, Homo Sapiens
TLDVAVRR

SEQ ID NO: 24318 - protein, 8 aa, Homo Sapiens
TLPKPVQK

SEQ ID NO: 24319 - protein, 8 aa, Homo Sapiens
TNPFRPQK

SEQ ID NO: 24320 - protein, 8 aa, Homo Sapiens
TTLPIRNK

SEQ ID NO: 24321 - protein, 8 aa, Homo Sapiens
TVAGVHVK

SEQ ID NO: 24322 - protein, 8 aa, Homo Sapiens
TVDIFHKK

SEQ ID NO: 24323 - protein, 8 aa, Homo Sapiens
TVLYIVKK

SEQ ID NO: 24324 - protein, 8 aa, Homo Sapiens
VCEYIVKK

SEQ ID NO: 24325 - protein, 8 aa, Homo Sapiens
VGPETLGR

SEQ ID NO: 24326 - protein, 8 aa, Homo Sapiens
VIENLPKK

SEQ ID NO: 24327 - protein, 8 aa, Homo Sapiens
VIHFNNPK

SEQ ID NO: 24328 - protein, 8 aa, Homo Sapiens
VINKVHLK

SEQ ID NO: 24329 - protein, 8 aa, Homo Sapiens
VIPFTIKK

SEQ ID NO: 24330 - protein, 8 aa, Homo Sapiens
VLDFVKQK

SEQ ID NO: 24331 - protein, 8 aa, Homo Sapiens
VMRDPASK

SEQ ID NO: 24332 - protein, 8 aa, Homo Sapiens
VMRDPQTK

SEQ ID NO: 24333 - protein, 8 aa, Homo Sapiens
VNGKVLSK

SEQ ID NO: 24334 - protein, 8 aa, Homo Sapiens
VNMVPFPR

SEQ ID NO: 24335 - protein, 8 aa, Homo Sapiens
VQEFGLAR

SEQ ID NO: 24336 - protein, 8 aa, Homo Sapiens
VQKNKIEK

SEQ ID NO: 24337 - protein, 8 aa, Homo Sapiens
VQVQETVR

SEQ ID NO: 24338 - protein, 8 aa, Homo Sapiens
VSEKQFSK

SEQ ID NO: 24339 - protein, 8 aa, Homo Sapiens
VSLTACKV

SEQ ID NO: 24340 - protein, 8 aa, Homo Sapiens
VSNLSPKL

SEQ ID NO: 24341 - protein, 8 aa, Homo Sapiens
VTLELGGK

SEQ ID NO: 24342 - protein, 8 aa, Homo Sapiens
YCFPGVTL

SEQ ID NO: 24343 - protein, 8 aa, Homo Sapiens
YDHQGIFK

SEQ ID NO: 24344 - protein, 8 aa, Homo Sapiens
YGDVQRVK

SEQ ID NO: 24345 - protein, 9 aa, Homo Sapiens
AAADICFTK

SEQ ID NO: 24346 - protein, 9 aa, Homo Sapiens
AAAKVILKK

SEQ ID NO: 24347 - protein, 9 aa, Homo Sapiens
AAAPVTPLR

SEQ ID NO: 24348 - protein, 9 aa, Homo Sapiens
AAATPAIKK

SEQ ID NO: 24349 - protein, 9 aa, Homo Sapiens
AAATSVLKT

SEQ ID NO: 24350 - protein, 9 aa, Homo Sapiens
AACSKFFYK

SEQ ID NO: 24351 - protein, 9 aa, Homo Sapiens
AAFGGTFKK

SEQ ID NO: 24352 - protein, 9 aa, Homo Sapiens
AAFVPLLLK

SEQ ID NO: 24353 - protein, 9 aa, Homo Sapiens
AAGPPGPFR

SEQ ID NO: 24354 - protein, 9 aa, Homo Sapiens
AAIATIKTK

SEQ ID NO: 24355 - protein, 9 aa, Homo Sapiens
AAISLAFSK

SEQ ID NO: 24356 - protein, 9 aa, Homo Sapiens
AAITLAFSK

SEQ ID NO: 24357 - protein, 9 aa, Homo Sapiens
AALAKAIEK

SEQ ID NO: 24358 - protein, 9 aa, Homo Sapiens
AALDKYAKK

SEQ ID NO: 24359 - protein, 9 aa, Homo Sapiens
AALDWVTKK

SEQ ID NO: 24360 - protein, 9 aa, Homo Sapiens
AALKVLPPT

SEQ ID NO: 24361 - protein, 9 aa, Homo Sapiens
AAMEPLTAR

SEQ ID NO: 24362 - protein, 9 aa, Homo Sapiens
AAMLMPHQK

SEQ ID NO: 24363 - protein, 9 aa, Homo Sapiens
AAVGYIMEK

SEQ ID NO: 24364 - protein, 9 aa, Homo Sapiens
AAYAHELPK

SEQ ID NO: 24365 - protein, 9 aa, Homo Sapiens
AAYAWPFYK

SEQ ID NO: 24366 - protein, 9 aa, Homo Sapiens
AAYNVPLPK

SEQ ID NO: 24367 - protein, 9 aa, Homo Sapiens
ADSWKSLGK

SEQ ID NO: 24368 - protein, 9 aa, Homo Sapiens
AGAAVLPVK

SEQ ID NO: 24369 - protein, 9 aa, Homo Sapiens
AGISFSVKK

SEQ ID NO: 24370 - protein, 9 aa, Homo Sapiens
AGISKRWPK

SEQ ID NO: 24371 - protein, 9 aa, Homo Sapiens
AGMALGIQK

SEQ ID NO: 24372 - protein, 9 aa, Homo Sapiens
AGNFYINDK

SEQ ID NO: 24373 - protein, 9 aa, Homo Sapiens
AGPEPLPPK

SEQ ID NO: 24374 - protein, 9 aa, Homo Sapiens
AIASTLVHK

SEQ ID NO: 24375 - protein, 9 aa, Homo Sapiens
AIDQLHLEY

SEQ ID NO: 24376 - protein, 9 aa, Homo Sapiens
AIFDKSTGK

SEQ ID NO: 24377 - protein, 9 aa, Homo Sapiens
AIFEISYFK

SEQ ID NO: 24378 - protein, 9 aa, Homo Sapiens
AIFKPVMSK

SEQ ID NO: 24379 - protein, 9 aa, Homo Sapiens
AIFPRAFPK

SEQ ID NO: 24380 - protein, 9 aa, Homo Sapiens
AIFTKAYQR

SEQ ID NO: 24381 - protein, 9 aa, Homo Sapiens
AIIDTVINY

SEQ ID NO: 24382 - protein, 9 aa, Homo Sapiens
AIIQHMIKK

SEQ ID NO: 24383 - protein, 9 aa, Homo Sapiens
AIITPPPAK

SEQ ID NO: 24384 - protein, 9 aa, Homo Sapiens
AILDKNFRK

SEQ ID NO: 24385 - protein, 9 aa, Homo Sapiens
AILDYLITK

SEQ ID NO: 24386 - protein, 9 aa, Homo Sapiens
AILLPQPLK

SEQ ID NO: 24387 - protein, 9 aa, Homo Sapiens
AILLPQPPK

SEQ ID NO: 24388 - protein, 9 aa, Homo Sapiens
AILSKFLYY

SEQ ID NO: 24389 - protein, 9 aa, Homo Sapiens
AILTSLIEK

SEQ ID NO: 24390 - protein, 9 aa, Homo Sapiens
AIMDPLPLR

SEQ ID NO: 24391 - protein, 9 aa, Homo Sapiens
AINDKSIVK

SEQ ID NO: 24392 - protein, 9 aa, Homo Sapiens
AIPGFTINR

SEQ ID NO: 24393 - protein, 9 aa, Homo Sapiens
AISEYIATK

SEQ ID NO: 24394 - protein, 9 aa, Homo Sapiens
AIVAYGLYK

SEQ ID NO: 24395 - protein, 9 aa, Homo Sapiens
AIVKLFLKK

SEQ ID NO: 24396 - protein, 9 aa, Homo Sapiens
AIVNFVNQK

SEQ ID NO: 24397 - protein, 9 aa, Homo Sapiens
AIYAKPANK

SEQ ID NO: 24398 - protein, 9 aa, Homo Sapiens
AIYEPKTFK

SEQ ID NO: 24399 - protein, 9 aa, Homo Sapiens
ALASVVIHK

SEQ ID NO: 24400 - protein, 9 aa, Homo Sapiens
ALFDGVVSK

SEQ ID NO: 24401 - protein, 9 aa, Homo Sapiens
ALFSRIFGK

SEQ ID NO: 24402 - protein, 9 aa, Homo Sapiens
ALGAGFSDK

SEQ ID NO: 24403 - protein, 9 aa, Homo Sapiens
ALLDITVTK

SEQ ID NO: 24404 - protein, 9 aa, Homo Sapiens
ALLKWCQKK

SEQ ID NO: 24405 - protein, 9 aa, Homo Sapiens
ALLVKQPPP

SEQ ID NO: 24406 - protein, 9 aa, Homo Sapiens
ALMEKFKKK

SEQ ID NO: 24407 - protein, 9 aa, Homo Sapiens
ALQEIYNQK

SEQ ID NO: 24408 - protein, 9 aa, Homo Sapiens
AMIEVNINK

SEQ ID NO: 24409 - protein, 9 aa, Homo Sapiens
AMLDTVVFK

SEQ ID NO: 24410 - protein, 9 aa, Homo Sapiens
AQADPLVRR

SEQ ID NO: 24411 - protein, 9 aa, Homo Sapiens
AQAESLRYK

SEQ ID NO: 24412 - protein, 9 aa, Homo Sapiens
AQATISFPK

SEQ ID NO: 24413 - protein, 9 aa, Homo Sapiens
AQATVLHLK

SEQ ID NO: 24414 - protein, 9 aa, Homo Sapiens
AQCGKAFPK

SEQ ID NO: 24415 - protein, 9 aa, Homo Sapiens
AQCQIFMEK

SEQ ID NO: 24416 - protein, 9 aa, Homo Sapiens
AQFIPKFFK

SEQ ID NO: 24417 - protein, 9 aa, Homo Sapiens
AQFRQPLKK

SEQ ID NO: 24418 - protein, 9 aa, Homo Sapiens
AQGKPLALK

SEQ ID NO: 24419 - protein, 9 aa, Homo Sapiens
AQIFEPLHK

SEQ ID NO: 24420 - protein, 9 aa, Homo Sapiens
AQIKEHLLK

SEQ ID NO: 24421 - protein, 9 aa, Homo Sapiens
AQINSVFNK

SEQ ID NO: 24422 - protein, 9 aa, Homo Sapiens
AQLLESQQK

SEQ ID NO: 24423 - protein, 9 aa, Homo Sapiens
AQMEGFLNR

SEQ ID NO: 24424 - protein, 9 aa, Homo Sapiens
AQNEKSFFK

SEQ ID NO: 24425 - protein, 9 aa, Homo Sapiens
AQNEPLTQK

SEQ ID NO: 24426 - protein, 9 aa, Homo Sapiens
AQNPSLFVK

SEQ ID NO: 24427 - protein, 9 aa, Homo Sapiens
AQQKVTLPK

SEQ ID NO: 24428 - protein, 9 aa, Homo Sapiens
AQWQKVLPR

SEQ ID NO: 24429 - protein, 9 aa, Homo Sapiens
ASAIPAYSK

SEQ ID NO: 24430 - protein, 9 aa, Homo Sapiens
ASAPVTVKR

SEQ ID NO: 24431 - protein, 9 aa, Homo Sapiens
ASATALVSR

SEQ ID NO: 24432 - protein, 9 aa, Homo Sapiens
ASATVAIPK

SEQ ID NO: 24433 - protein, 9 aa, Homo Sapiens
ASAYSIAQK

SEQ ID NO: 24434 - protein, 9 aa, Homo Sapiens
ASCQYSLLK

SEQ ID NO: 24435 - protein, 9 aa, Homo Sapiens
ASCWIPLLK

SEQ ID NO: 24436 - protein, 9 aa, Homo Sapiens
ASCYLKQGK

SEQ ID NO: 24437 - protein, 9 aa, Homo Sapiens
ASDPHIIIK

SEQ ID NO: 24438 - protein, 9 aa, Homo Sapiens
ASDPTVFHK

SEQ ID NO: 24439 - protein, 9 aa, Homo Sapiens
ASEVLKHLK

SEQ ID NO: 24440 - protein, 9 aa, Homo Sapiens
ASFAFEFPK

SEQ ID NO: 24441 - protein, 9 aa, Homo Sapiens
ASFCGAVFR

SEQ ID NO: 24442 - protein, 9 aa, Homo Sapiens
ASFDKAKLK

SEQ ID NO: 24443 - protein, 9 aa, Homo Sapiens
ASFEPFSNK

SEQ ID NO: 24444 - protein, 9 aa, Homo Sapiens
ASFFGVHPK

SEQ ID NO: 24445 - protein, 9 aa, Homo Sapiens
ASFNDTFVH

SEQ ID NO: 24446 - protein, 9 aa, Homo Sapiens
ASFPKVFIK

SEQ ID NO: 24447 - protein, 9 aa, Homo Sapiens
ASFQSTSVK

SEQ ID NO: 24448 - protein, 9 aa, Homo Sapiens
ASGSTTFTK

SEQ ID NO: 24449 - protein, 9 aa, Homo Sapiens
ASHYIHIVK

SEQ ID NO: 24450 - protein, 9 aa, Homo Sapiens
ASIDATYAK

SEQ ID NO: 24451 - protein, 9 aa, Homo Sapiens
ASIDFRFGK

SEQ ID NO: 24452 - protein, 9 aa, Homo Sapiens
ASIDWLAQR

SEQ ID NO: 24453 - protein, 9 aa, Homo Sapiens
ASIPHVIAR

SEQ ID NO: 24454 - protein, 9 aa, Homo Sapiens
ASIPTILTH

SEQ ID NO: 24455 - protein, 9 aa, Homo Sapiens
ASLADIMAK

SEQ ID NO: 24456 - protein, 9 aa, Homo Sapiens
ASLATTLTK

SEQ ID NO: 24457 - protein, 9 aa, Homo Sapiens
ASLFSVLVR

SEQ ID NO: 24458 - protein, 9 aa, Homo Sapiens
ASLGASVHK

SEQ ID NO: 24459 - protein, 9 aa, Homo Sapiens
ASLGFLVAK

SEQ ID NO: 24460 - protein, 9 aa, Homo Sapiens
ASLGLKFNK

SEQ ID NO: 24461 - protein, 9 aa, Homo Sapiens
ASLGNLFAR

SEQ ID NO: 24462 - protein, 9 aa, Homo Sapiens
ASLIRLVPK

SEQ ID NO: 24463 - protein, 9 aa, Homo Sapiens
ASLPLAVTK

SEQ ID NO: 24464 - protein, 9 aa, Homo Sapiens
ASLPSILQY

SEQ ID NO: 24465 - protein, 9 aa, Homo Sapiens
ASLPVRNAK

SEQ ID NO: 24466 - protein, 9 aa, Homo Sapiens
ASLQSIIHK

SEQ ID NO: 24467 - protein, 9 aa, Homo Sapiens
ASLQSVVHK

SEQ ID NO: 24468 - protein, 9 aa, Homo Sapiens
ASLTDTVNK

SEQ ID NO: 24469 - protein, 9 aa, Homo Sapiens
ASLTNPFGK

SEQ ID NO: 24470 - protein, 9 aa, Homo Sapiens
ASMAIKNPK

SEQ ID NO: 24471 - protein, 9 aa, Homo Sapiens
ASMPVDIAK

SEQ ID NO: 24472 - protein, 9 aa, Homo Sapiens
ASNFKSPVK

SEQ ID NO: 24473 - protein, 9 aa, Homo Sapiens
ASNPAMLLY

SEQ ID NO: 24474 - protein, 9 aa, Homo Sapiens
ASNPATFQR

SEQ ID NO: 24475 - protein, 9 aa, Homo Sapiens
ASQELWLNH

SEQ ID NO: 24476 - protein, 9 aa, Homo Sapiens
ASQGFDFNK

SEQ ID NO: 24477 - protein, 9 aa, Homo Sapiens
ASQGFRFLR

SEQ ID NO: 24478 - protein, 9 aa, Homo Sapiens
ASQPEFPSR

SEQ ID NO: 24479 - protein, 9 aa, Homo Sapiens
ASSASMPYK

SEQ ID NO: 24480 - protein, 9 aa, Homo Sapiens
ASSEDTLLK

SEQ ID NO: 24481 - protein, 9 aa, Homo Sapiens
ASSGTCFPR

SEQ ID NO: 24482 - protein, 9 aa, Homo Sapiens
ASSHVPIQK

SEQ ID NO: 24483 - protein, 9 aa, Homo Sapiens
ASSIFVAPR

SEQ ID NO: 24484 - protein, 9 aa, Homo Sapiens
ASSPPAIPK

SEQ ID NO: 24485 - protein, 9 aa, Homo Sapiens
ASSTPTPIR

SEQ ID NO: 24486 - protein, 9 aa, Homo Sapiens
ASSYIAHLR

SEQ ID NO: 24487 - protein, 9 aa, Homo Sapiens
ASTFVDQCK

SEQ ID NO: 24488 - protein, 9 aa, Homo Sapiens
ASTPPLPRR

SEQ ID NO: 24489 - protein, 9 aa, Homo Sapiens
ASTRTIFKK

SEQ ID NO: 24490 - protein, 9 aa, Homo Sapiens
ASTTVLALK

SEQ ID NO: 24491 - protein, 9 aa, Homo Sapiens
ASVGYAVTK

SEQ ID NO: 24492 - protein, 9 aa, Homo Sapiens
ASVILPILK

SEQ ID NO: 24493 - protein, 9 aa, Homo Sapiens
ASVKAIFSK

SEQ ID NO: 24494 - protein, 9 aa, Homo Sapiens
ASVLNPYVK

SEQ ID NO: 24495 - protein, 9 aa, Homo Sapiens
ASVPAQAPK

SEQ ID NO: 24496 - protein, 9 aa, Homo Sapiens
ASVQPPPRP

SEQ ID NO: 24497 - protein, 9 aa, Homo Sapiens
ASVYQPLKK

SEQ ID NO: 24498 - protein, 9 aa, Homo Sapiens
ASWGGTIEK

SEQ ID NO: 24499 - protein, 9 aa, Homo Sapiens
ASYPEALAK

SEQ ID NO: 24500 - protein, 9 aa, Homo Sapiens
ASYTKIVVK

SEQ ID NO: 24501 - protein, 9 aa, Homo Sapiens
ASYVSPVLK

SEQ ID NO: 24502 - protein, 9 aa, Homo Sapiens
ATAAGDVIK

SEQ ID NO: 24503 - protein, 9 aa, Homo Sapiens
ATADVVILY

SEQ ID NO: 24504 - protein, 9 aa, Homo Sapiens
ATAEECLKH

SEQ ID NO: 24505 - protein, 9 aa, Homo Sapiens
ATAELIMSR

SEQ ID NO: 24506 - protein, 9 aa, Homo Sapiens
ATAGFTIGR

SEQ ID NO: 24507 - protein, 9 aa, Homo Sapiens
ATALEYVYK

SEQ ID NO: 24508 - protein, 9 aa, Homo Sapiens
ATANQIILK

SEQ ID NO: 24509 - protein, 9 aa, Homo Sapiens
ATAPPAPAY

SEQ ID NO: 24510 - protein, 9 aa, Homo Sapiens
ATAQFKINK

SEQ ID NO: 24511 - protein, 9 aa, Homo Sapiens
ATASPIVAR

SEQ ID NO: 24512 - protein, 9 aa, Homo Sapiens
ATATELTTK

SEQ ID NO: 24513 - protein, 9 aa, Homo Sapiens
ATATLIIEH

SEQ ID NO: 24514 - protein, 9 aa, Homo Sapiens
ATATMSLGK

SEQ ID NO: 24515 - protein, 9 aa, Homo Sapiens
ATATQLLQH

SEQ ID NO: 24516 - protein, 9 aa, Homo Sapiens
ATATVYFKR

SEQ ID NO: 24517 - protein, 9 aa, Homo Sapiens
ATCYPDFSK

SEQ ID NO: 24518 - protein, 9 aa, Homo Sapiens
ATDIPSSQK

SEQ ID NO: 24519 - protein, 9 aa, Homo Sapiens
ATDPNILGR

SEQ ID NO: 24520 - protein, 9 aa, Homo Sapiens
ATDPNILSL

SEQ ID NO: 24521 - protein, 9 aa, Homo Sapiens
ATEQPLTAK

SEQ ID NO: 24522 - protein, 9 aa, Homo Sapiens
ATESGMLYH

SEQ ID NO: 24523 - protein, 9 aa, Homo Sapiens
ATESMCFTK

SEQ ID NO: 24524 - protein, 9 aa, Homo Sapiens
ATEVAPLYK

SEQ ID NO: 24525 - protein, 9 aa, Homo Sapiens
ATFFGEVVK

SEQ ID NO: 24526 - protein, 9 aa, Homo Sapiens
ATFHTPFSH

SEQ ID NO: 24527 - protein, 9 aa, Homo Sapiens
ATFLDPRYK

SEQ ID NO: 24528 - protein, 9 aa, Homo Sapiens
ATFLIQLER

SEQ ID NO: 24529 - protein, 9 aa, Homo Sapiens
ATFPDPNVK

SEQ ID NO: 24530 - protein, 9 aa, Homo Sapiens
ATFPGMWER

SEQ ID NO: 24531 - protein, 9 aa, Homo Sapiens
ATFPLSVQK

SEQ ID NO: 24532 - protein, 9 aa, Homo Sapiens
ATFPVAPRY

SEQ ID NO: 24533 - protein, 9 aa, Homo Sapiens
ATFQFTVER

SEQ ID NO: 24534 - protein, 9 aa, Homo Sapiens
ATFSSSHRY

SEQ ID NO: 24535 - protein, 9 aa, Homo Sapiens
ATFSTGERK

SEQ ID NO: 24536 - protein, 9 aa, Homo Sapiens
ATFTGILGK

SEQ ID NO: 24537 - protein, 9 aa, Homo Sapiens
ATFTNVFGK

SEQ ID NO: 24538 - protein, 9 aa, Homo Sapiens
ATFTVMGLK

SEQ ID NO: 24539 - protein, 9 aa, Homo Sapiens
ATFTYFYKK

SEQ ID NO: 24540 - protein, 9 aa, Homo Sapiens
ATFYGPVKK

SEQ ID NO: 24541 - protein, 9 aa, Homo Sapiens
ATGDVALLR

SEQ ID NO: 24542 - protein, 9 aa, Homo Sapiens
ATGESIAVK

SEQ ID NO: 24543 - protein, 9 aa, Homo Sapiens
ATGFLEQLK

SEQ ID NO: 24544 - protein, 9 aa, Homo Sapiens
ATGNWGDQK

SEQ ID NO: 24545 - protein, 9 aa, Homo Sapiens
ATGPPNTSY

SEQ ID NO: 24546 - protein, 9 aa, Homo Sapiens
ATGQWTRFK

SEQ ID NO: 24547 - protein, 9 aa, Homo Sapiens
ATGSVFTGK

SEQ ID NO: 24548 - protein, 9 aa, Homo Sapiens
ATHTAFVAK

SEQ ID NO: 24549 - protein, 9 aa, Homo Sapiens
ATIALMIQR

SEQ ID NO: 24550 - protein, 9 aa, Homo Sapiens
ATIEELTEK

SEQ ID NO: 24551 - protein, 9 aa, Homo Sapiens
ATIGAALGR

SEQ ID NO: 24552 - protein, 9 aa, Homo Sapiens
ATIIDILEY

SEQ ID NO: 24553 - protein, 9 aa, Homo Sapiens
ATIIGEWVK

SEQ ID NO: 24554 - protein, 9 aa, Homo Sapiens
ATIIGQCVR

SEQ ID NO: 24555 - protein, 9 aa, Homo Sapiens
ATIKMTVER

SEQ ID NO: 24556 - protein, 9 aa, Homo Sapiens
ATIMGVRFK

SEQ ID NO: 24557 - protein, 9 aa, Homo Sapiens
ATINYPFEK

SEQ ID NO: 24558 - protein, 9 aa, Homo Sapiens
ATINYSLLR

SEQ ID NO: 24559 - protein, 9 aa, Homo Sapiens
ATIQGAYAR

SEQ ID NO: 24560 - protein, 9 aa, Homo Sapiens
ATIQNETPK

SEQ ID NO: 24561 - protein, 9 aa, Homo Sapiens
ATIRKWLTK

SEQ ID NO: 24562 - protein, 9 aa, Homo Sapiens
ATISFPKRK

SEQ ID NO: 24563 - protein, 9 aa, Homo Sapiens
ATITKVLQK

SEQ ID NO: 24564 - protein, 9 aa, Homo Sapiens
ATIVDLVER

SEQ ID NO: 24565 - protein, 9 aa, Homo Sapiens
ATIVYHLAR

SEQ ID NO: 24566 - protein, 9 aa, Homo Sapiens
ATKAVCVLK

SEQ ID NO: 24567 - protein, 9 aa, Homo Sapiens
ATKIKNYYK

SEQ ID NO: 24568 - protein, 9 aa, Homo Sapiens
ATLAAVLQR

SEQ ID NO: 24569 - protein, 9 aa, Homo Sapiens
ATLDLNAVK

SEQ ID NO: 24570 - protein, 9 aa, Homo Sapiens
ATLDRQLNH

SEQ ID NO: 24571 - protein, 9 aa, Homo Sapiens
ATLDVAVRR

SEQ ID NO: 24572 - protein, 9 aa, Homo Sapiens
ATLEETLVK

SEQ ID NO: 24573 - protein, 9 aa, Homo Sapiens
ATLEIVTDK

SEQ ID NO: 24574 - protein, 9 aa, Homo Sapiens
ATLETILRH

SEQ ID NO: 24575 - protein, 9 aa, Homo Sapiens
ATLFFILRK

SEQ ID NO: 24576 - protein, 9 aa, Homo Sapiens
ATLGAILNR

SEQ ID NO: 24577 - protein, 9 aa, Homo Sapiens
ATLHHVIDK

SEQ ID NO: 24578 - protein, 9 aa, Homo Sapiens
ATLHSFDVK

SEQ ID NO: 24579 - protein, 9 aa, Homo Sapiens
ATLKGLVQK

SEQ ID NO: 24580 - protein, 9 aa, Homo Sapiens
ATLLIFANK

SEQ ID NO: 24581 - protein, 9 aa, Homo Sapiens
ATLNSFIHV

SEQ ID NO: 24582 - protein, 9 aa, Homo Sapiens
ATLNSIVAK

SEQ ID NO: 24583 - protein, 9 aa, Homo Sapiens
ATLNVSTTR

SEQ ID NO: 24584 - protein, 9 aa, Homo Sapiens
ATLQDIIRR

SEQ ID NO: 24585 - protein, 9 aa, Homo Sapiens
ATLQEALAH

SEQ ID NO: 24586 - protein, 9 aa, Homo Sapiens
ATLQNVLRK

SEQ ID NO: 24587 - protein, 9 aa, Homo Sapiens
ATLQYIVGR

SEQ ID NO: 24588 - protein, 9 aa, Homo Sapiens
ATLRLIIRH

SEQ ID NO: 24589 - protein, 9 aa, Homo Sapiens
ATLSICSPK

SEQ ID NO: 24590 - protein, 9 aa, Homo Sapiens
ATLTKDVPK

SEQ ID NO: 24591 - protein, 9 aa, Homo Sapiens
ATLTNILEH

SEQ ID NO: 24592 - protein, 9 aa, Homo Sapiens
ATLWGGLLR

SEQ ID NO: 24593 - protein, 9 aa, Homo Sapiens
ATLYLGWNR

SEQ ID NO: 24594 - protein, 9 aa, Homo Sapiens
ATMEDTVEY

SEQ ID NO: 24595 - protein, 9 aa, Homo Sapiens
ATMPPAVER

SEQ ID NO: 24596 - protein, 9 aa, Homo Sapiens
ATMYNLLAY

SEQ ID NO: 24597 - protein, 9 aa, Homo Sapiens
ATNGAKFLK

SEQ ID NO: 24598 - protein, 9 aa, Homo Sapiens
ATNIDEIYK

SEQ ID NO: 24599 - protein, 9 aa, Homo Sapiens
ATNRSVYFK

SEQ ID NO: 24600 - protein, 9 aa, Homo Sapiens
ATNSSMFLK

SEQ ID NO: 24601 - protein, 9 aa, Homo Sapiens
ATNYITRNK

SEQ ID NO: 24602 - protein, 9 aa, Homo Sapiens
ATPNEIFLK

SEQ ID NO: 24603 - protein, 9 aa, Homo Sapiens
ATPPFTHSK

SEQ ID NO: 24604 - protein, 9 aa, Homo Sapiens
ATPSSSLPK

SEQ ID NO: 24605 - protein, 9 aa, Homo Sapiens
ATQAHSLSY

SEQ ID NO: 24606 - protein, 9 aa, Homo Sapiens
ATQAVFQKR

SEQ ID NO: 24607 - protein, 9 aa, Homo Sapiens
ATQDPAALR

SEQ ID NO: 24608 - protein, 9 aa, Homo Sapiens
ATQERTDLY

SEQ ID NO: 24609 - protein, 9 aa, Homo Sapiens
ATQFENWYK

SEQ ID NO: 24610 - protein, 9 aa, Homo Sapiens
ATQILSVPK

SEQ ID NO: 24611 - protein, 9 aa, Homo Sapiens
ATQLLKLAH

SEQ ID NO: 24612 - protein, 9 aa, Homo Sapiens
ATQQDVFQH

SEQ ID NO: 24613 - protein, 9 aa, Homo Sapiens
ATQSFSTFR

SEQ ID NO: 24614 - protein, 9 aa, Homo Sapiens
ATQTQFFHV

SEQ ID NO: 24615 - protein, 9 aa, Homo Sapiens
ATQTSVVVK

SEQ ID NO: 24616 - protein, 9 aa, Homo Sapiens
ATSAFQTQK

SEQ ID NO: 24617 - protein, 9 aa, Homo Sapiens
ATSAPLVSR

SEQ ID NO: 24618 - protein, 9 aa, Homo Sapiens
ATSAVTVTR

SEQ ID NO: 24619 - protein, 9 aa, Homo Sapiens
ATSDMDIGK

SEQ ID NO: 24620 - protein, 9 aa, Homo Sapiens
ATSEIFASK

SEQ ID NO: 24621 - protein, 9 aa, Homo Sapiens
ATSGVVAVR

SEQ ID NO: 24622 - protein, 9 aa, Homo Sapiens
ATSIPAILK

SEQ ID NO: 24623 - protein, 9 aa, Homo Sapiens
ATSKVALVY

SEQ ID NO: 24624 - protein, 9 aa, Homo Sapiens
ATSLGHFTK

SEQ ID NO: 24625 - protein, 9 aa, Homo Sapiens
ATSLVFKQK

SEQ ID NO: 24626 - protein, 9 aa, Homo Sapiens
ATSPALFNR

SEQ ID NO: 24627 - protein, 9 aa, Homo Sapiens
ATSPGRLFR

SEQ ID NO: 24628 - protein, 9 aa, Homo Sapiens
ATSPIIIHR

SEQ ID NO: 24629 - protein, 9 aa, Homo Sapiens
ATSPLQENR

SEQ ID NO: 24630 - protein, 9 aa, Homo Sapiens
ATSPVVYTR

SEQ ID NO: 24631 - protein, 9 aa, Homo Sapiens
ATSQTLLAK

SEQ ID NO: 24632 - protein, 9 aa, Homo Sapiens
ATSRTYLYR

SEQ ID NO: 24633 - protein, 9 aa, Homo Sapiens
ATSSVSALK

SEQ ID NO: 24634 - protein, 9 aa, Homo Sapiens
ATSVITIVK

SEQ ID NO: 24635 - protein, 9 aa, Homo Sapiens
ATSYLWFKK

SEQ ID NO: 24636 - protein, 9 aa, Homo Sapiens
ATTALAIYH

SEQ ID NO: 24637 - protein, 9 aa, Homo Sapiens
ATTGKILEK

SEQ ID NO: 24638 - protein, 9 aa, Homo Sapiens
ATTLPIRNK

SEQ ID NO: 24639 - protein, 9 aa, Homo Sapiens
ATTPMAVHR

SEQ ID NO: 24640 - protein, 9 aa, Homo Sapiens
ATTQTIMQK

SEQ ID NO: 24641 - protein, 9 aa, Homo Sapiens
ATTSLSLRR

SEQ ID NO: 24642 - protein, 9 aa, Homo Sapiens
ATTTVMNPK

SEQ ID NO: 24643 - protein, 9 aa, Homo Sapiens
ATVAALQEK

SEQ ID NO: 24644 - protein, 9 aa, Homo Sapiens
ATVAGVHVK

SEQ ID NO: 24645 - protein, 9 aa, Homo Sapiens
ATVDIVQKK

SEQ ID NO: 24646 - protein, 9 aa, Homo Sapiens
ATVITTEKR

SEQ ID NO: 24647 - protein, 9 aa, Homo Sapiens
ATVKEQIVK

SEQ ID NO: 24648 - protein, 9 aa, Homo Sapiens
ATVKVPFLK

SEQ ID NO: 24649 - protein, 9 aa, Homo Sapiens
ATVLTSVKK

SEQ ID NO: 24650 - protein, 9 aa, Homo Sapiens
ATVLYIVKK

SEQ ID NO: 24651 - protein, 9 aa, Homo Sapiens
ATVNEIVLK

SEQ ID NO: 24652 - protein, 9 aa, Homo Sapiens
ATVYLIYLK

SEQ ID NO: 24653 - protein, 9 aa, Homo Sapiens
ATYGLNVER

SEQ ID NO: 24654 - protein, 9 aa, Homo Sapiens
ATYILEAGK

SEQ ID NO: 24655 - protein, 9 aa, Homo Sapiens
ATYPMPTAK

SEQ ID NO: 24656 - protein, 9 aa, Homo Sapiens
ATYPYQVVR

SEQ ID NO: 24657 - protein, 9 aa, Homo Sapiens
ATYRDWISK

SEQ ID NO: 24658 - protein, 9 aa, Homo Sapiens
ATYREFVHR

SEQ ID NO: 24659 - protein, 9 aa, Homo Sapiens
ATYSVGMQK

SEQ ID NO: 24660 - protein, 9 aa, Homo Sapiens
ATYTPQAPK

SEQ ID NO: 24661 - protein, 9 aa, Homo Sapiens
ATYYGSLFK

SEQ ID NO: 24662 - protein, 9 aa, Homo Sapiens
AVAAAAYYR

SEQ ID NO: 24663 - protein, 9 aa, Homo Sapiens
AVAAFQVEK

SEQ ID NO: 24664 - protein, 9 aa, Homo Sapiens
AVAAFVLYK

SEQ ID NO: 24665 - protein, 9 aa, Homo Sapiens
AVADAVIEK

SEQ ID NO: 24666 - protein, 9 aa, Homo Sapiens
AVADSVLTK

SEQ ID NO: 24667 - protein, 9 aa, Homo Sapiens
AVAELWLQH

SEQ ID NO: 24668 - protein, 9 aa, Homo Sapiens
AVAHALTEK

SEQ ID NO: 24669 - protein, 9 aa, Homo Sapiens
AVAIKAMAK

SEQ ID NO: 24670 - protein, 9 aa, Homo Sapiens
AVAIPSWGK

SEQ ID NO: 24671 - protein, 9 aa, Homo Sapiens
AVALPLQTK

SEQ ID NO: 24672 - protein, 9 aa, Homo Sapiens
AVAPPAGPR

SEQ ID NO: 24673 - protein, 9 aa, Homo Sapiens
AVASAAKLG

SEQ ID NO: 24674 - protein, 9 aa, Homo Sapiens
AVAVTMGPK

SEQ ID NO: 24675 - protein, 9 aa, Homo Sapiens
AVCEKTFKH

SEQ ID NO: 24676 - protein, 9 aa, Homo Sapiens
AVCEVALDY

SEQ ID NO: 24677 - protein, 9 aa, Homo Sapiens
AVCMPMKRK

SEQ ID NO: 24678 - protein, 9 aa, Homo Sapiens
AVCSDFFNK

SEQ ID NO: 24679 - protein, 9 aa, Homo Sapiens
AVCTLIHRK

SEQ ID NO: 24680 - protein, 9 aa, Homo Sapiens
AVDGEPLGR

SEQ ID NO: 24681 - protein, 9 aa, Homo Sapiens
AVDQIAFQK

SEQ ID NO: 24682 - protein, 9 aa, Homo Sapiens
AVDTAYVAK

SEQ ID NO: 24683 - protein, 9 aa, Homo Sapiens
AVDVSPLRR

SEQ ID NO: 24684 - protein, 9 aa, Homo Sapiens
AVEGTPLPK

SEQ ID NO: 24685 - protein, 9 aa, Homo Sapiens
AVELSRVAK

SEQ ID NO: 24686 - protein, 9 aa, Homo Sapiens
AVFASEVKK

SEQ ID NO: 24687 - protein, 9 aa, Homo Sapiens
AVFEDLSLK

SEQ ID NO: 24688 - protein, 9 aa, Homo Sapiens
AVFEETLEK

SEQ ID NO: 24689 - protein, 9 aa, Homo Sapiens
AVFEWHITK

SEQ ID NO: 24690 - protein, 9 aa, Homo Sapiens
AVFGVPASK

SEQ ID NO: 24691 - protein, 9 aa, Homo Sapiens
AVFLGLARK

SEQ ID NO: 24692 - protein, 9 aa, Homo Sapiens
AVFQIILRR

SEQ ID NO: 24693 - protein, 9 aa, Homo Sapiens
AVGNIKVTK

SEQ ID NO: 24694 - protein, 9 aa, Homo Sapiens
AVGPHLTAK

SEQ ID NO: 24695 - protein, 9 aa, Homo Sapiens
AVGPKVALK

SEQ ID NO: 24696 - protein, 9 aa, Homo Sapiens
AVIDVGINR

SEQ ID NO: 24697 - protein, 9 aa, Homo Sapiens
AVIEDTWHY

SEQ ID NO: 24698 - protein, 9 aa, Homo Sapiens
AVIEFLLDK

SEQ ID NO: 24699 - protein, 9 aa, Homo Sapiens
AVIEHLKQK

SEQ ID NO: 24700 - protein, 9 aa, Homo Sapiens
AVIENLPKK

SEQ ID NO: 24701 - protein, 9 aa, Homo Sapiens
AVIESFVNH

SEQ ID NO: 24702 - protein, 9 aa, Homo Sapiens
AVIGNVQEK

SEQ ID NO: 24703 - protein, 9 aa, Homo Sapiens
AVISQCIYR

SEQ ID NO: 24704 - protein, 9 aa, Homo Sapiens
AVISTILKY

SEQ ID NO: 24705 - protein, 9 aa, Homo Sapiens
AVLDFVKQK

SEQ ID NO: 24706 - protein, 9 aa, Homo Sapiens
AVLDLSWNK

SEQ ID NO: 24707 - protein, 9 aa, Homo Sapiens
AVLDYVMTR

SEQ ID NO: 24708 - protein, 9 aa, Homo Sapiens
AVLEADFAK

SEQ ID NO: 24709 - protein, 9 aa, Homo Sapiens
AVLHTVLLH

SEQ ID NO: 24710 - protein, 9 aa, Homo Sapiens
AVLKHIENK

SEQ ID NO: 24711 - protein, 9 aa, Homo Sapiens
AVLLPQPPK

SEQ ID NO: 24712 - protein, 9 aa, Homo Sapiens
AVLLQWHEK

SEQ ID NO: 24713 - protein, 9 aa, Homo Sapiens
AVLLVFANK

SEQ ID NO: 24714 - protein, 9 aa, Homo Sapiens
AVLNVSNNR

SEQ ID NO: 24715 - protein, 9 aa, Homo Sapiens
AVLPAVIPK

SEQ ID NO: 24716 - protein, 9 aa, Homo Sapiens
AVLPPQPLK

SEQ ID NO: 24717 - protein, 9 aa, Homo Sapiens
AVLPSVLNK

SEQ ID NO: 24718 - protein, 9 aa, Homo Sapiens
AVLPYLLDK

SEQ ID NO: 24719 - protein, 9 aa, Homo Sapiens
AVLSFSLYR

SEQ ID NO: 24720 - protein, 9 aa, Homo Sapiens
AVLSWKLAK

SEQ ID NO: 24721 - protein, 9 aa, Homo Sapiens
AVLTKQLLH

SEQ ID NO: 24722 - protein, 9 aa, Homo Sapiens
AVLYDIILK

SEQ ID NO: 24723 - protein, 9 aa, Homo Sapiens
AVMEMMSQK

SEQ ID NO: 24724 - protein, 9 aa, Homo Sapiens
AVMETLLQR

SEQ ID NO: 24725 - protein, 9 aa, Homo Sapiens
AVMGNPVTR

SEQ ID NO: 24726 - protein, 9 aa, Homo Sapiens
AVMIPGLLR

SEQ ID NO: 24727 - protein, 9 aa, Homo Sapiens
AVMKNQVAR

SEQ ID NO: 24728 - protein, 9 aa, Homo Sapiens
AVMNFVVRY

SEQ ID NO: 24729 - protein, 9 aa, Homo Sapiens
AVMPDGQFK

SEQ ID NO: 24730 - protein, 9 aa, Homo Sapiens
AVMRCLLAY

SEQ ID NO: 24731 - protein, 9 aa, Homo Sapiens
AVMVHQLSK

SEQ ID NO: 24732 - protein, 9 aa, Homo Sapiens
AVNIVCHSK

SEQ ID NO: 24733 - protein, 9 aa, Homo Sapiens
AVNLADPYR

SEQ ID NO: 24734 - protein, 9 aa, Homo Sapiens
AVNLHPIRK

SEQ ID NO: 24735 - protein, 9 aa, Homo Sapiens
AVNMVPFPR

SEQ ID NO: 24736 - protein, 9 aa, Homo Sapiens
AVNNIRLIK

SEQ ID NO: 24737 - protein, 9 aa, Homo Sapiens
AVNNMFVSK

SEQ ID NO: 24738 - protein, 9 aa, Homo Sapiens
AVNSDFYRR

SEQ ID NO: 24739 - protein, 9 aa, Homo Sapiens
AVPRFVQQK

SEQ ID NO: 24740 - protein, 9 aa, Homo Sapiens
AVPRPIPEK

SEQ ID NO: 24741 - protein, 9 aa, Homo Sapiens
AVQHFSLLY

SEQ ID NO: 24742 - protein, 9 aa, Homo Sapiens
AVQRTLLEK

SEQ ID NO: 24743 - protein, 9 aa, Homo Sapiens
AVQVPVKGR

SEQ ID NO: 24744 - protein, 9 aa, Homo Sapiens
AVSAVVHEY

SEQ ID NO: 24745 - protein, 9 aa, Homo Sapiens
AVSSFVFLR

SEQ ID NO: 24746 - protein, 9 aa, Homo Sapiens
AVSSLIRNK

SEQ ID NO: 24747 - protein, 9 aa, Homo Sapiens
AVSTFAMVK

SEQ ID NO: 24748 - protein, 9 aa, Homo Sapiens
AVSTLGISK

SEQ ID NO: 24749 - protein, 9 aa, Homo Sapiens
AVTAFVTFR

SEQ ID NO: 24750 - protein, 9 aa, Homo Sapiens
AVTFPLKSK

SEQ ID NO: 24751 - protein, 9 aa, Homo Sapiens
AVTRFIEEK

SEQ ID NO: 24752 - protein, 9 aa, Homo Sapiens
AVVAATALK

SEQ ID NO: 24753 - protein, 9 aa, Homo Sapiens
AVVDIYHSR

SEQ ID NO: 24754 - protein, 9 aa, Homo Sapiens
AVVEKIHAK

SEQ ID NO: 24755 - protein, 9 aa, Homo Sapiens
AVVEVVRRK

SEQ ID NO: 24756 - protein, 9 aa, Homo Sapiens
AVWDTCLEY

SEQ ID NO: 24757 - protein, 9 aa, Homo Sapiens
AVYDFFIGR

SEQ ID NO: 24758 - protein, 9 aa, Homo Sapiens
AVYDVVRNR

SEQ ID NO: 24759 - protein, 9 aa, Homo Sapiens
AVYEDQVGK

SEQ ID NO: 24760 - protein, 9 aa, Homo Sapiens
AVYEINVLR

SEQ ID NO: 24761 - protein, 9 aa, Homo Sapiens
AVYERHFLR

SEQ ID NO: 24762 - protein, 9 aa, Homo Sapiens
AVYKPPGLK

SEQ ID NO: 24763 - protein, 9 aa, Homo Sapiens
AVYLLPVPK

SEQ ID NO: 24764 - protein, 9 aa, Homo Sapiens
AVYSGISLK

SEQ ID NO: 24765 - protein, 9 aa, Homo Sapiens
AVYTKMMTK

SEQ ID NO: 24766 - protein, 9 aa, Homo Sapiens
CLDAFPNLK

SEQ ID NO: 24767 - protein, 9 aa, Homo Sapiens
CTGSLLKIY

SEQ ID NO: 24768 - protein, 9 aa, Homo Sapiens
DIGLAAWGR

SEQ ID NO: 24769 - protein, 9 aa, Homo Sapiens
DPNVSKKLK

SEQ ID NO: 24770 - protein, 9 aa, Homo Sapiens
EEEVNNLVK

SEQ ID NO: 24771 - protein, 9 aa, Homo Sapiens
EFAEEQLRA

SEQ ID NO: 24772 - protein, 9 aa, Homo Sapiens
EGGPILPKK

SEQ ID NO: 24773 - protein, 9 aa, Homo Sapiens
EIFDGIQPK

SEQ ID NO: 24774 - protein, 9 aa, Homo Sapiens
EIMPPPPKP

SEQ ID NO: 24775 - protein, 9 aa, Homo Sapiens
EIMVEIPAK

SEQ ID NO: 24776 - protein, 9 aa, Homo Sapiens
EKQSCLKFK

SEQ ID NO: 24777 - protein, 9 aa, Homo Sapiens
ELMPPPPPK

SEQ ID NO: 24778 - protein, 9 aa, Homo Sapiens
EQGYDVIAY

SEQ ID NO: 24779 - protein, 9 aa, Homo Sapiens
ETFSGVYKK

SEQ ID NO: 24780 - protein, 9 aa, Homo Sapiens
ETMNIFLEK

SEQ ID NO: 24781 - protein, 9 aa, Homo Sapiens
ETQPPVALK

SEQ ID NO: 24782 - protein, 9 aa, Homo Sapiens
EVNSGFFYK

SEQ ID NO: 24783 - protein, 9 aa, Homo Sapiens
FDDFSHYEK

SEQ ID NO: 24784 - protein, 9 aa, Homo Sapiens
FEPAKGGEK

SEQ ID NO: 24785 - protein, 9 aa, Homo Sapiens
FGAYGGLLK

SEQ ID NO: 24786 - protein, 9 aa, Homo Sapiens
FLSAVFFAK

SEQ ID NO: 24787 - protein, 9 aa, Homo Sapiens
FLTLTKTIA

SEQ ID NO: 24788 - protein, 9 aa, Homo Sapiens
FLYAFIGVK

SEQ ID NO: 24789 - protein, 9 aa, Homo Sapiens
FLYDEVHPK

SEQ ID NO: 24790 - protein, 9 aa, Homo Sapiens
FPSIVGRPR

SEQ ID NO: 24791 - protein, 9 aa, Homo Sapiens
FPSLLTNPK

SEQ ID NO: 24792 - protein, 9 aa, Homo Sapiens
FSPFHASVL

SEQ ID NO: 24793 - protein, 9 aa, Homo Sapiens
FTAPDPGLK

SEQ ID NO: 24794 - protein, 9 aa, Homo Sapiens
FTAPPVLGK

SEQ ID NO: 24795 - protein, 9 aa, Homo Sapiens
FTAPSTVGK

SEQ ID NO: 24796 - protein, 9 aa, Homo Sapiens
FTFFIHNPK

SEQ ID NO: 24797 - protein, 9 aa, Homo Sapiens
FTGPPTFPK

SEQ ID NO: 24798 - protein, 9 aa, Homo Sapiens
FTNERFPLR

SEQ ID NO: 24799 - protein, 9 aa, Homo Sapiens
FTQKPGFPK

SEQ ID NO: 24800 - protein, 9 aa, Homo Sapiens
FTSPPSLFK

SEQ ID NO: 24801 - protein, 9 aa, Homo Sapiens
FVQGIFVEK

SEQ ID NO: 24802 - protein, 9 aa, Homo Sapiens
FVYEPKEQK

SEQ ID NO: 24803 - protein, 9 aa, Homo Sapiens
GAFYKGFIK

SEQ ID NO: 24804 - protein, 9 aa, Homo Sapiens
GAFYKGFVK

SEQ ID NO: 24805 - protein, 9 aa, Homo Sapiens
GAIEKTFTK

SEQ ID NO: 24806 - protein, 9 aa, Homo Sapiens
GAIKVFVNK

SEQ ID NO: 24807 - protein, 9 aa, Homo Sapiens
GALPWFLQK

SEQ ID NO: 24808 - protein, 9 aa, Homo Sapiens
GAMEHFHMK

SEQ ID NO: 24809 - protein, 9 aa, Homo Sapiens
GANIPVTEK

SEQ ID NO: 24810 - protein, 9 aa, Homo Sapiens
GAQPPSILK

SEQ ID NO: 24811 - protein, 9 aa, Homo Sapiens
GAYDGKFEK

SEQ ID NO: 24812 - protein, 9 aa, Homo Sapiens
GCDFTNVVK

SEQ ID NO: 24813 - protein, 9 aa, Homo Sapiens
GDGLIELRK

SEQ ID NO: 24814 - protein, 9 aa, Homo Sapiens
GIADFVLKY

SEQ ID NO: 24815 - protein, 9 aa, Homo Sapiens
GIAPYSYAG

SEQ ID NO: 24816 - protein, 9 aa, Homo Sapiens
GIATTFINK

SEQ ID NO: 24817 - protein, 9 aa, Homo Sapiens
GIFPGTPLK

SEQ ID NO: 24818 - protein, 9 aa, Homo Sapiens
GIFPLSFVK

SEQ ID NO: 24819 - protein, 9 aa, Homo Sapiens
GIFSAEFLK

SEQ ID NO: 24820 - protein, 9 aa, Homo Sapiens
GILKPLPKK

SEQ ID NO: 24821 - protein, 9 aa, Homo Sapiens
GILTVRHLK

SEQ ID NO: 24822 - protein, 9 aa, Homo Sapiens
GIMSPLAKK

SEQ ID NO: 24823 - protein, 9 aa, Homo Sapiens
GINKPGFYK

SEQ ID NO: 24824 - protein, 9 aa, Homo Sapiens
GISETRIEK

SEQ ID NO: 24825 - protein, 9 aa, Homo Sapiens
GIVECLGPK

SEQ ID NO: 24826 - protein, 9 aa, Homo Sapiens
GIYSVIQKK

SEQ ID NO: 24827 - protein, 9 aa, Homo Sapiens
GLGEPLALK

SEQ ID NO: 24828 - protein, 9 aa, Homo Sapiens
GLGPLVPGK

SEQ ID NO: 24829 - protein, 9 aa, Homo Sapiens
GLMGFIVYK

SEQ ID NO: 24830 - protein, 9 aa, Homo Sapiens
GLVPAAPPK

SEQ ID NO: 24831 - protein, 9 aa, Homo Sapiens
GQHTVLLVK

SEQ ID NO: 24832 - protein, 9 aa, Homo Sapiens
GQNIAVVGK

SEQ ID NO: 24833 - protein, 9 aa, Homo Sapiens
GQSPFQQRK

SEQ ID NO: 24834 - protein, 9 aa, Homo Sapiens
GQYGNPLNK

SEQ ID NO: 24835 - protein, 9 aa, Homo Sapiens
GSACIKVTK

SEQ ID NO: 24836 - protein, 9 aa, Homo Sapiens
GSCGPIKVK

SEQ ID NO: 24837 - protein, 9 aa, Homo Sapiens
GSCKVFFKR

SEQ ID NO: 24838 - protein, 9 aa, Homo Sapiens
GSFDVVHVK

SEQ ID NO: 24839 - protein, 9 aa, Homo Sapiens
GSFGKVFLV

SEQ ID NO: 24840 - protein, 9 aa, Homo Sapiens
GSGKVTFPK

SEQ ID NO: 24841 - protein, 9 aa, Homo Sapiens
GSIDIQHLK

SEQ ID NO: 24842 - protein, 9 aa, Homo Sapiens
GSIGGTFAK

SEQ ID NO: 24843 - protein, 9 aa, Homo Sapiens
GSIGSSFPR

SEQ ID NO: 24844 - protein, 9 aa, Homo Sapiens
GSLASVYHK

SEQ ID NO: 24845 - protein, 9 aa, Homo Sapiens
GSLDQVLKK

SEQ ID NO: 24846 - protein, 9 aa, Homo Sapiens
GSLFLQTPK

SEQ ID NO: 24847 - protein, 9 aa, Homo Sapiens
GSLFLRTPK

SEQ ID NO: 24848 - protein, 9 aa, Homo Sapiens
GSLGGQINK

SEQ ID NO: 24849 - protein, 9 aa, Homo Sapiens
GSLKQFLKK

SEQ ID NO: 24850 - protein, 9 aa, Homo Sapiens
GSLLWGLVK

SEQ ID NO: 24851 - protein, 9 aa, Homo Sapiens
GSLQLPPPR

SEQ ID NO: 24852 - protein, 9 aa, Homo Sapiens
GSLRPFVQK

SEQ ID NO: 24853 - protein, 9 aa, Homo Sapiens
GSMEPAFHR

SEQ ID NO: 24854 - protein, 9 aa, Homo Sapiens
GSMEPGFAK

SEQ ID NO: 24855 - protein, 9 aa, Homo Sapiens
GSMGSFSEK

SEQ ID NO: 24856 - protein, 9 aa, Homo Sapiens
GSNGDTFLK

SEQ ID NO: 24857 - protein, 9 aa, Homo Sapiens
GSNGYILNK

SEQ ID NO: 24858 - protein, 9 aa, Homo Sapiens
GSQFFITTK

SEQ ID NO: 24859 - protein, 9 aa, Homo Sapiens
GSSAINILK

SEQ ID NO: 24860 - protein, 9 aa, Homo Sapiens
GSSDVIIHR

SEQ ID NO: 24861 - protein, 9 aa, Homo Sapiens
GSSKIAIQK

SEQ ID NO: 24862 - protein, 9 aa, Homo Sapiens
GSSTIRNLK

SEQ ID NO: 24863 - protein, 9 aa, Homo Sapiens
GSSTPLIPK

SEQ ID NO: 24864 - protein, 9 aa, Homo Sapiens
GSTHVLTPK

SEQ ID NO: 24865 - protein, 9 aa, Homo Sapiens
GSVIIFVDK

SEQ ID NO: 24866 - protein, 9 aa, Homo Sapiens
GSVLLFVTK

SEQ ID NO: 24867 - protein, 9 aa, Homo Sapiens
GSVYITLKK

SEQ ID NO: 24868 - protein, 9 aa, Homo Sapiens
GSWASLVQK

SEQ ID NO: 24869 - protein, 9 aa, Homo Sapiens
GSYFVKDPK

SEQ ID NO: 24870 - protein, 9 aa, Homo Sapiens
GSYSKAFAR

SEQ ID NO: 24871 - protein, 9 aa, Homo Sapiens
GTAACIPQK

SEQ ID NO: 24872 - protein, 9 aa, Homo Sapiens
GTADVHFER

SEQ ID NO: 24873 - protein, 9 aa, Homo Sapiens
GTAEVELKK

SEQ ID NO: 24874 - protein, 9 aa, Homo Sapiens
GTAKSQFLK

SEQ ID NO: 24875 - protein, 9 aa, Homo Sapiens
GTAQLTLLH

SEQ ID NO: 24876 - protein, 9 aa, Homo Sapiens
GTCFGKFTK

SEQ ID NO: 24877 - protein, 9 aa, Homo Sapiens
GTCGVLLRK

SEQ ID NO: 24878 - protein, 9 aa, Homo Sapiens
GTCLLIANK

SEQ ID NO: 24879 - protein, 9 aa, Homo Sapiens
GTCSSVPPR

SEQ ID NO: 24880 - protein, 9 aa, Homo Sapiens
GTDELRLLY

SEQ ID NO: 24881 - protein, 9 aa, Homo Sapiens
GTDEPIFGK

SEQ ID NO: 24882 - protein, 9 aa, Homo Sapiens
GTDPRTILK

SEQ ID NO: 24883 - protein, 9 aa, Homo Sapiens
GTFALNLLK

SEQ ID NO: 24884 - protein, 9 aa, Homo Sapiens
GTFASGPPK

SEQ ID NO: 24885 - protein, 9 aa, Homo Sapiens
GTFEYIRHK

SEQ ID NO: 24886 - protein, 9 aa, Homo Sapiens
GTFGGLGSK

SEQ ID NO: 24887 - protein, 9 aa, Homo Sapiens
GTFGKALRR

SEQ ID NO: 24888 - protein, 9 aa, Homo Sapiens
GTFLEGVAK

SEQ ID NO: 24889 - protein, 9 aa, Homo Sapiens
GTFPRAFKK

SEQ ID NO: 24890 - protein, 9 aa, Homo Sapiens
GTFSRLFQK

SEQ ID NO: 24891 - protein, 9 aa, Homo Sapiens
GTGFCFNTK

SEQ ID NO: 24892 - protein, 9 aa, Homo Sapiens
GTGFTPMVK

SEQ ID NO: 24893 - protein, 9 aa, Homo Sapiens
GTGKTLIGK

SEQ ID NO: 24894 - protein, 9 aa, Homo Sapiens
GTGKTTFVK

SEQ ID NO: 24895 - protein, 9 aa, Homo Sapiens
GTGNLGFPK

SEQ ID NO: 24896 - protein, 9 aa, Homo Sapiens
GTGPLCSGK

SEQ ID NO: 24897 - protein, 9 aa, Homo Sapiens
GTGPNVPPR

SEQ ID NO: 24898 - protein, 9 aa, Homo Sapiens
GTIDVKELK

SEQ ID NO: 24899 - protein, 9 aa, Homo Sapiens
GTIEKVFVK

SEQ ID NO: 24900 - protein, 9 aa, Homo Sapiens
GTIKDIVTR

SEQ ID NO: 24901 - protein, 9 aa, Homo Sapiens
GTINIVHPK

SEQ ID NO: 24902 - protein, 9 aa, Homo Sapiens
GTIPQIFGK

SEQ ID NO: 24903 - protein, 9 aa, Homo Sapiens
GTIPVPKGK

SEQ ID NO: 24904 - protein, 9 aa, Homo Sapiens
GTKLPGLLK

SEQ ID NO: 24905 - protein, 9 aa, Homo Sapiens
GTLAEFIQK

SEQ ID NO: 24906 - protein, 9 aa, Homo Sapiens
GTLASVYHK

SEQ ID NO: 24907 - protein, 9 aa, Homo Sapiens
GTLDSVLRY

SEQ ID NO: 24908 - protein, 9 aa, Homo Sapiens
GTLDYILQR

SEQ ID NO: 24909 - protein, 9 aa, Homo Sapiens
GTLERGILK

SEQ ID NO: 24910 - protein, 9 aa, Homo Sapiens
GTLNQPLTK

SEQ ID NO: 24911 - protein, 9 aa, Homo Sapiens
GTLPAKLLK

SEQ ID NO: 24912 - protein, 9 aa, Homo Sapiens
GTLPKALTK

SEQ ID NO: 24913 - protein, 9 aa, Homo Sapiens
GTLPVSQPK

SEQ ID NO: 24914 - protein, 9 aa, Homo Sapiens
GTLSSWNLK

SEQ ID NO: 24915 - protein, 9 aa, Homo Sapiens
GTMDMSITR

SEQ ID NO: 24916 - protein, 9 aa, Homo Sapiens
GTMEWIMIK

SEQ ID NO: 24917 - protein, 9 aa, Homo Sapiens
GTMPVSLLK

SEQ ID NO: 24918 - protein, 9 aa, Homo Sapiens
GTMRGIIAK

SEQ ID NO: 24919 - protein, 9 aa, Homo Sapiens
GTMTGMLYK

SEQ ID NO: 24920 - protein, 9 aa, Homo Sapiens
GTNDVGALK

SEQ ID NO: 24921 - protein, 9 aa, Homo Sapiens
GTNFTKLEK

SEQ ID NO: 24922 - protein, 9 aa, Homo Sapiens
GTNPGIITK

SEQ ID NO: 24923 - protein, 9 aa, Homo Sapiens
GTNSVICSK

SEQ ID NO: 24924 - protein, 9 aa, Homo Sapiens
GTPEKPLYH

SEQ ID NO: 24925 - protein, 9 aa, Homo Sapiens
GTPETSFNK

SEQ ID NO: 24926 - protein, 9 aa, Homo Sapiens
GTPLETIQK

SEQ ID NO: 24927 - protein, 9 aa, Homo Sapiens
GTQFFEIRK

SEQ ID NO: 24928 - protein, 9 aa, Homo Sapiens
GTQNRPLLR

SEQ ID NO: 24929 - protein, 9 aa, Homo Sapiens
GTQPYFFNK

SEQ ID NO: 24930 - protein, 9 aa, Homo Sapiens
GTQSFVFQR

SEQ ID NO: 24931 - protein, 9 aa, Homo Sapiens
GTQSKAFYK

SEQ ID NO: 24932 - protein, 9 aa, Homo Sapiens
GTQSVTLTH

SEQ ID NO: 24933 - protein, 9 aa, Homo Sapiens
GTRALARCP

SEQ ID NO: 24934 - protein, 9 aa, Homo Sapiens
GTSDEFIEK

SEQ ID NO: 24935 - protein, 9 aa, Homo Sapiens
GTSGLILKR

SEQ ID NO: 24936 - protein, 9 aa, Homo Sapiens
GTSITVPQK

SEQ ID NO: 24937 - protein, 9 aa, Homo Sapiens
GTSPPLTPR

SEQ ID NO: 24938 - protein, 9 aa, Homo Sapiens
GTSQLYVYR

SEQ ID NO: 24939 - protein, 9 aa, Homo Sapiens
GTSSAVSLK

SEQ ID NO: 24940 - protein, 9 aa, Homo Sapiens
GTSSLFIYK

SEQ ID NO: 24941 - protein, 9 aa, Homo Sapiens
GTSSMIVPK

SEQ ID NO: 24942 - protein, 9 aa, Homo Sapiens
GTSSVIVSR

SEQ ID NO: 24943 - protein, 9 aa, Homo Sapiens
GTTAYISLK

SEQ ID NO: 24944 - protein, 9 aa, Homo Sapiens
GTTEWFHLK

SEQ ID NO: 24945 - protein, 9 aa, Homo Sapiens
GTTHNFLYK

SEQ ID NO: 24946 - protein, 9 aa, Homo Sapiens
GTTKVDALK

SEQ ID NO: 24947 - protein, 9 aa, Homo Sapiens
GTTRFAHLK

SEQ ID NO: 24948 - protein, 9 aa, Homo Sapiens
GTTSDQFLR

SEQ ID NO: 24949 - protein, 9 aa, Homo Sapiens
GTTYEGIFK

SEQ ID NO: 24950 - protein, 9 aa, Homo Sapiens
GTVLFEIKK

SEQ ID NO: 24951 - protein, 9 aa, Homo Sapiens
GTVSPLFQK

SEQ ID NO: 24952 - protein, 9 aa, Homo Sapiens
GTVTKVIPK

SEQ ID NO: 24953 - protein, 9 aa, Homo Sapiens
GTYGFWYPK

SEQ ID NO: 24954 - protein, 9 aa, Homo Sapiens
GTYHGMTLK

SEQ ID NO: 24955 - protein, 9 aa, Homo Sapiens
GTYQDRLTK

SEQ ID NO: 24956 - protein, 9 aa, Homo Sapiens
GTYRDANIK

SEQ ID NO: 24957 - protein, 9 aa, Homo Sapiens
GTYSCFWTK

SEQ ID NO: 24958 - protein, 9 aa, Homo Sapiens
GTYSKIMNH

SEQ ID NO: 24959 - protein, 9 aa, Homo Sapiens
GTYTDVTPR

SEQ ID NO: 24960 - protein, 9 aa, Homo Sapiens
GTYVSSVPR

SEQ ID NO: 24961 - protein, 9 aa, Homo Sapiens
GVADALLYR

SEQ ID NO: 24962 - protein, 9 aa, Homo Sapiens
GVADKILKK

SEQ ID NO: 24963 - protein, 9 aa, Homo Sapiens
GVAFIFNQK

SEQ ID NO: 24964 - protein, 9 aa, Homo Sapiens
GVAGGSILK

SEQ ID NO: 24965 - protein, 9 aa, Homo Sapiens
GVANALAHR

SEQ ID NO: 24966 - protein, 9 aa, Homo Sapiens
GVAPALAPK

SEQ ID NO: 24967 - protein, 9 aa, Homo Sapiens
GVAPQPPLK

SEQ ID NO: 24968 - protein, 9 aa, Homo Sapiens
GVDDKFYSK

SEQ ID NO: 24969 - protein, 9 aa, Homo Sapiens
GVDPNQYTK

SEQ ID NO: 24970 - protein, 9 aa, Homo Sapiens
GVFEGHTSK

SEQ ID NO: 24971 - protein, 9 aa, Homo Sapiens
GVFEPTIVK

SEQ ID NO: 24972 - protein, 9 aa, Homo Sapiens
GVFEYFNAK

SEQ ID NO: 24973 - protein, 9 aa, Homo Sapiens
GVFGFPLGR

SEQ ID NO: 24974 - protein, 9 aa, Homo Sapiens
GVGEVLHVK

SEQ ID NO: 24975 - protein, 9 aa, Homo Sapiens
GVIVHIIEK

SEQ ID NO: 24976 - protein, 9 aa, Homo Sapiens
GVLAWVKEK

SEQ ID NO: 24977 - protein, 9 aa, Homo Sapiens
GVLDFFFQK

SEQ ID NO: 24978 - protein, 9 aa, Homo Sapiens
GVLEKPLEK

SEQ ID NO: 24979 - protein, 9 aa, Homo Sapiens
GVLGPIINK

SEQ ID NO: 24980 - protein, 9 aa, Homo Sapiens
GVLTSIFKH

SEQ ID NO: 24981 - protein, 9 aa, Homo Sapiens
GVMPSHFSR

SEQ ID NO: 24982 - protein, 9 aa, Homo Sapiens
GVMSPPLSR

SEQ ID NO: 24983 - protein, 9 aa, Homo Sapiens
GVMTVLIKR

SEQ ID NO: 24984 - protein, 9 aa, Homo Sapiens
GVMVYGIKK

SEQ ID NO: 24985 - protein, 9 aa, Homo Sapiens
GVNPYILKK

SEQ ID NO: 24986 - protein, 9 aa, Homo Sapiens
GVSAAFAVK

SEQ ID NO: 24987 - protein, 9 aa, Homo Sapiens
GVSAATFLK

SEQ ID NO: 24988 - protein, 9 aa, Homo Sapiens
GVSSIFIYH

SEQ ID NO: 24989 - protein, 9 aa, Homo Sapiens
GVSSVIHPK

SEQ ID NO: 24990 - protein, 9 aa, Homo Sapiens
GVTRVTIRK

SEQ ID NO: 24991 - protein, 9 aa, Homo Sapiens
GVTSQFVSK

SEQ ID NO: 24992 - protein, 9 aa, Homo Sapiens
GVVPFSQRK

SEQ ID NO: 24993 - protein, 9 aa, Homo Sapiens
GVVRIYHRK

SEQ ID NO: 24994 - protein, 9 aa, Homo Sapiens
GVYDVVELK

SEQ ID NO: 24995 - protein, 9 aa, Homo Sapiens
HAVPPLVPK

SEQ ID NO: 24996 - protein, 9 aa, Homo Sapiens
HIAEPNYGK

SEQ ID NO: 24997 - protein, 9 aa, Homo Sapiens
HIFMKVFPK

SEQ ID NO: 24998 - protein, 9 aa, Homo Sapiens
HLKMQIEVF

SEQ ID NO: 24999 - protein, 9 aa, Homo Sapiens
HQDFQSYPK

SEQ ID NO: 25000 - protein, 9 aa, Homo Sapiens
HSMDFVAYR

SEQ ID NO: 25001 - protein, 9 aa, Homo Sapiens
HSQPFAWKK

SEQ ID NO: 25002 - protein, 9 aa, Homo Sapiens
HTFGGPLLK

SEQ ID NO: 25003 - protein, 9 aa, Homo Sapiens
HTIDWVREK

SEQ ID NO: 25004 - protein, 9 aa, Homo Sapiens
HTLEPLIPR

SEQ ID NO: 25005 - protein, 9 aa, Homo Sapiens
HTMGFWLTK

SEQ ID NO: 25006 - protein, 9 aa, Homo Sapiens
HTYYKFDYK

SEQ ID NO: 25007 - protein, 9 aa, Homo Sapiens
HVFELVLPK

SEQ ID NO: 25008 - protein, 9 aa, Homo Sapiens
HVIETLIGK

SEQ ID NO: 25009 - protein, 9 aa, Homo Sapiens
HVYKERFPK

SEQ ID NO: 25010 - protein, 9 aa, Homo Sapiens
HVYRERFPK

SEQ ID NO: 25011 - protein, 9 aa, Homo Sapiens
IAQPQLPPK

SEQ ID NO: 25012 - protein, 9 aa, Homo Sapiens
IATQVVVEK

SEQ ID NO: 25013 - protein, 9 aa, Homo Sapiens
IFDGRVVAK

SEQ ID NO: 25014 - protein, 9 aa, Homo Sapiens
IGADSVTLK

SEQ ID NO: 25015 - protein, 9 aa, Homo Sapiens
IIGTIFIIK

SEQ ID NO: 25016 - protein, 9 aa, Homo Sapiens
IIIKPLPGY

SEQ ID NO: 25017 - protein, 9 aa, Homo Sapiens
IINNKNFHK

SEQ ID NO: 25018 - protein, 9 aa, Homo Sapiens
IINSSITTK

SEQ ID NO: 25019 - protein, 9 aa, Homo Sapiens
IISTVEVLK

SEQ ID NO: 25020 - protein, 9 aa, Homo Sapiens
IIYDRDFSY

SEQ ID NO: 25021 - protein, 9 aa, Homo Sapiens
ILAGDVKVK

SEQ ID NO: 25022 - protein, 9 aa, Homo Sapiens
ILGATGTGK

SEQ ID NO: 25023 - protein, 9 aa, Homo Sapiens
ILGPNLGDK

SEQ ID NO: 25024 - protein, 9 aa, Homo Sapiens
ILYDHAHVK

SEQ ID NO: 25025 - protein, 9 aa, Homo Sapiens
INSSIITKK

SEQ ID NO: 25026 - protein, 9 aa, Homo Sapiens
IPEKQLVEK

SEQ ID NO: 25027 - protein, 9 aa, Homo Sapiens
IPPELVKQK

SEQ ID NO: 25028 - protein, 9 aa, Homo Sapiens
IQEEFQHLK

SEQ ID NO: 25029 - protein, 9 aa, Homo Sapiens
IQIISTILK

SEQ ID NO: 25030 - protein, 9 aa, Homo Sapiens
IQNDRQLQY

SEQ ID NO: 25031 - protein, 9 aa, Homo Sapiens
ISAPVVRPK

SEQ ID NO: 25032 - protein, 9 aa, Homo Sapiens
ISASPLTSK

SEQ ID NO: 25033 - protein, 9 aa, Homo Sapiens
ISGPISTSK

SEQ ID NO: 25034 - protein, 9 aa, Homo Sapiens
ISQEPFVPK

SEQ ID NO: 25035 - protein, 9 aa, Homo Sapiens
ISTEPLPGR

SEQ ID NO: 25036 - protein, 9 aa, Homo Sapiens
ISYPLHHPK

SEQ ID NO: 25037 - protein, 9 aa, Homo Sapiens
ITAADILDR

SEQ ID NO: 25038 - protein, 9 aa, Homo Sapiens
ITGPNMGGK

SEQ ID NO: 25039 - protein, 9 aa, Homo Sapiens
ITGPTGVGK

SEQ ID NO: 25040 - protein, 9 aa, Homo Sapiens
ITLPAGTEK

SEQ ID NO: 25041 - protein, 9 aa, Homo Sapiens
ITQGNMQLK

SEQ ID NO: 25042 - protein, 9 aa, Homo Sapiens
ITSPVVTQK

SEQ ID NO: 25043 - protein, 9 aa, Homo Sapiens
ITVAYTIPK

SEQ ID NO: 25044 - protein, 9 aa, Homo Sapiens
ITVGDIGPK

SEQ ID NO: 25045 - protein, 9 aa, Homo Sapiens
IVAGSLITK

SEQ ID NO: 25046 - protein, 9 aa, Homo Sapiens
IVAGTLTNK

SEQ ID NO: 25047 - protein, 9 aa, Homo Sapiens
IVALILSTK

SEQ ID NO: 25048 - protein, 9 aa, Homo Sapiens
IVFDGVPSK

SEQ ID NO: 25049 - protein, 9 aa, Homo Sapiens
IVFMPVIGK

SEQ ID NO: 25050 - protein, 9 aa, Homo Sapiens
IVFNIYHSK

SEQ ID NO: 25051 - protein, 9 aa, Homo Sapiens
IVFSLTFFK

SEQ ID NO: 25052 - protein, 9 aa, Homo Sapiens
IVGTVLIIK

SEQ ID NO: 25053 - protein, 9 aa, Homo Sapiens
IVIETGPLK

SEQ ID NO: 25054 - protein, 9 aa, Homo Sapiens
IVIPPATEK

SEQ ID NO: 25055 - protein, 9 aa, Homo Sapiens
IVNDFAYMK

SEQ ID NO: 25056 - protein, 9 aa, Homo Sapiens
IVSAPVPKK

SEQ ID NO: 25057 - protein, 9 aa, Homo Sapiens
IVSDFTIGR

SEQ ID NO: 25058 - protein, 9 aa, Homo Sapiens
IVSQVKVPK

SEQ ID NO: 25059 - protein, 9 aa, Homo Sapiens
IVSSVRRPM

SEQ ID NO: 25060 - protein, 9 aa, Homo Sapiens
IVTPATILK

SEQ ID NO: 25061 - protein, 9 aa, Homo Sapiens
IVVPPLPEK

SEQ ID NO: 25062 - protein, 9 aa, Homo Sapiens
IVYPPPPAK

SEQ ID NO: 25063 - protein, 9 aa, Homo Sapiens
IWKIKKLIK

SEQ ID NO: 25064 - protein, 9 aa, Homo Sapiens
KAFNVVFEK

SEQ ID NO: 25065 - protein, 9 aa, Homo Sapiens
KAFVGAFKK

SEQ ID NO: 25066 - protein, 9 aa, Homo Sapiens
KAGEVFIHK

SEQ ID NO: 25067 - protein, 9 aa, Homo Sapiens
KALEALVAK

SEQ ID NO: 25068 - protein, 9 aa, Homo Sapiens
KAVDITTPK

SEQ ID NO: 25069 - protein, 9 aa, Homo Sapiens
KIADFGLAR

SEQ ID NO: 25070 - protein, 9 aa, Homo Sapiens
KIADMGHLK

SEQ ID NO: 25071 - protein, 9 aa, Homo Sapiens
KIADRFLLY

SEQ ID NO: 25072 - protein, 9 aa, Homo Sapiens
KIFESRFEK

SEQ ID NO: 25073 - protein, 9 aa, Homo Sapiens
KIIEPIQSR

SEQ ID NO: 25074 - protein, 9 aa, Homo Sapiens
KIIGPFSKK

SEQ ID NO: 25075 - protein, 9 aa, Homo Sapiens
KILGPFHKR

SEQ ID NO: 25076 - protein, 9 aa, Homo Sapiens
KIMEYYEKK

SEQ ID NO: 25077 - protein, 9 aa, Homo Sapiens
KIQPALQEK

SEQ ID NO: 25078 - protein, 9 aa, Homo Sapiens
KITDFLQTK

SEQ ID NO: 25079 - protein, 9 aa, Homo Sapiens
KIYKKFLKK

SEQ ID NO: 25080 - protein, 9 aa, Homo Sapiens
KIYNANYLK

SEQ ID NO: 25081 - protein, 9 aa, Homo Sapiens
KKKPQLPPK

SEQ ID NO: 25082 - protein, 9 aa, Homo Sapiens
KLCGYVIFR

SEQ ID NO: 25083 - protein, 9 aa, Homo Sapiens
KLFDFVNAK

SEQ ID NO: 25084 - protein, 9 aa, Homo Sapiens
KLFNGTFLK

SEQ ID NO: 25085 - protein, 9 aa, Homo Sapiens
KLFNKFIGK

SEQ ID NO: 25086 - protein, 9 aa, Homo Sapiens
KLLDAYLLY

SEQ ID NO: 25087 - protein, 9 aa, Homo Sapiens
KLNEVIVNK

SEQ ID NO: 25088 - protein, 9 aa, Homo Sapiens
KMADIYLKH

SEQ ID NO: 25089 - protein, 9 aa, Homo Sapiens
KQDSNPLYK

SEQ ID NO: 25090 - protein, 9 aa, Homo Sapiens
KQFENPIIK

SEQ ID NO: 25091 - protein, 9 aa, Homo Sapiens
KQFSKRYLK

SEQ ID NO: 25092 - protein, 9 aa, Homo Sapiens
KQQTIPLKK

SEQ ID NO: 25093 - protein, 9 aa, Homo Sapiens
KSFGELVHK

SEQ ID NO: 25094 - protein, 9 aa, Homo Sapiens
KSIDFPLTK

SEQ ID NO: 25095 - protein, 9 aa, Homo Sapiens
KSIGDIFLK

SEQ ID NO: 25096 - protein, 9 aa, Homo Sapiens
KSINEFWNK

SEQ ID NO: 25097 - protein, 9 aa, Homo Sapiens
KSLDLVTMK

SEQ ID NO: 25098 - protein, 9 aa, Homo Sapiens
KSLEAFFLY

SEQ ID NO: 25099 - protein, 9 aa, Homo Sapiens
KSSDFAVLK

SEQ ID NO: 25100 - protein, 9 aa, Homo Sapiens
KTAEISLLK

SEQ ID NO: 25101 - protein, 9 aa, Homo Sapiens
KTCEEILNY

SEQ ID NO: 25102 - protein, 9 aa, Homo Sapiens
KTDLFYERK

SEQ ID NO: 25103 - protein, 9 aa, Homo Sapiens
KTETNVYFK

SEQ ID NO: 25104 - protein, 9 aa, Homo Sapiens
KTETPIVSK

SEQ ID NO: 25105 - protein, 9 aa, Homo Sapiens
KTFNSPNLK

SEQ ID NO: 25106 - protein, 9 aa, Homo Sapiens
KTFPNTIEH

SEQ ID NO: 25107 - protein, 9 aa, Homo Sapiens
KTFPYQHRY

SEQ ID NO: 25108 - protein, 9 aa, Homo Sapiens
KTFWQSVSK

SEQ ID NO: 25109 - protein, 9 aa, Homo Sapiens
KTGEVLDTK

SEQ ID NO: 25110 - protein, 9 aa, Homo Sapiens
KTIDASVSK

SEQ ID NO: 25111 - protein, 9 aa, Homo Sapiens
KTIIFVETK

SEQ ID NO: 25112 - protein, 9 aa, Homo Sapiens
KTIQVPQQK

SEQ ID NO: 25113 - protein, 9 aa, Homo Sapiens
KTISEAWIK

SEQ ID NO: 25114 - protein, 9 aa, Homo Sapiens
KTIVFVETK

SEQ ID NO: 25115 - protein, 9 aa, Homo Sapiens
KTLDHVLTH

SEQ ID NO: 25116 - protein, 9 aa, Homo Sapiens
KTLGPILKK

SEQ ID NO: 25117 - protein, 9 aa, Homo Sapiens
KTLKWLEKK

SEQ ID NO: 25118 - protein, 9 aa, Homo Sapiens
KTLNIFLTK

SEQ ID NO: 25119 - protein, 9 aa, Homo Sapiens
KTLPYPLKK

SEQ ID NO: 25120 - protein, 9 aa, Homo Sapiens
KTLQDIVYK

SEQ ID NO: 25121 - protein, 9 aa, Homo Sapiens
KTLYPIIGK

SEQ ID NO: 25122 - protein, 9 aa, Homo Sapiens
KTMNIYFPK

SEQ ID NO: 25123 - protein, 9 aa, Homo Sapiens
KTMPTTFNR

SEQ ID NO: 25124 - protein, 9 aa, Homo Sapiens
KTNLTSVTK

SEQ ID NO: 25125 - protein, 9 aa, Homo Sapiens
KTQEPFSVR

SEQ ID NO: 25126 - protein, 9 aa, Homo Sapiens
KTSNCVVLK

SEQ ID NO: 25127 - protein, 9 aa, Homo Sapiens
KTSNLLLSH

SEQ ID NO: 25128 - protein, 9 aa, Homo Sapiens
KTSPPVFSK

SEQ ID NO: 25129 - protein, 9 aa, Homo Sapiens
KTTTTIIPK

SEQ ID NO: 25130 - protein, 9 aa, Homo Sapiens
KTVEPLEYY

SEQ ID NO: 25131 - protein, 9 aa, Homo Sapiens
KTVIEPLKK

SEQ ID NO: 25132 - protein, 9 aa, Homo Sapiens
KTYKENFLK

SEQ ID NO: 25133 - protein, 9 aa, Homo Sapiens
KVADMALHY

SEQ ID NO: 25134 - protein, 9 aa, Homo Sapiens
KVAVVLIQK

SEQ ID NO: 25135 - protein, 9 aa, Homo Sapiens
KVCDIYINY

SEQ ID NO: 25136 - protein, 9 aa, Homo Sapiens
KVCMYFTYK

SEQ ID NO: 25137 - protein, 9 aa, Homo Sapiens
KVCNPIITK

SEQ ID NO: 25138 - protein, 9 aa, Homo Sapiens
KVFAGYYTK

SEQ ID NO: 25139 - protein, 9 aa, Homo Sapiens
KVFGGTVHK

SEQ ID NO: 25140 - protein, 9 aa, Homo Sapiens
KVFKQIFSK

SEQ ID NO: 25141 - protein, 9 aa, Homo Sapiens
KVFNQPKAK

SEQ ID NO: 25142 - protein, 9 aa, Homo Sapiens
KVGEVIVTK

SEQ ID NO: 25143 - protein, 9 aa, Homo Sapiens
KVIDLSVNK

SEQ ID NO: 25144 - protein, 9 aa, Homo Sapiens
KVIDPVTGK

SEQ ID NO: 25145 - protein, 9 aa, Homo Sapiens
KVIDRILYK

SEQ ID NO: 25146 - protein, 9 aa, Homo Sapiens
KVIGIAIMK

SEQ ID NO: 25147 - protein, 9 aa, Homo Sapiens
KVLDHFRRK

SEQ ID NO: 25148 - protein, 9 aa, Homo Sapiens
KVLDKLLLY

SEQ ID NO: 25149 - protein, 9 aa, Homo Sapiens
KVLFPLLTK

SEQ ID NO: 25150 - protein, 9 aa, Homo Sapiens
KVLHFFNVK

SEQ ID NO: 25151 - protein, 9 aa, Homo Sapiens
KVMGILINR

SEQ ID NO: 25152 - protein, 9 aa, Homo Sapiens
KVQDIKEVK

SEQ ID NO: 25153 - protein, 9 aa, Homo Sapiens
KVQEYPTLK

SEQ ID NO: 25154 - protein, 9 aa, Homo Sapiens
KVQPPGPVK

SEQ ID NO: 25155 - protein, 9 aa, Homo Sapiens
KVQTAVTMK

SEQ ID NO: 25156 - protein, 9 aa, Homo Sapiens
KVSDLTIPK

SEQ ID NO: 25157 - protein, 9 aa, Homo Sapiens
KVSGDIFSR

SEQ ID NO: 25158 - protein, 9 aa, Homo Sapiens
KVSQVIMEK

SEQ ID NO: 25159 - protein, 9 aa, Homo Sapiens
KVTTSITSK

SEQ ID NO: 25160 - protein, 9 aa, Homo Sapiens
KVVDSLYNK

SEQ ID NO: 25161 - protein, 9 aa, Homo Sapiens
KVVKVTIMK

SEQ ID NO: 25162 - protein, 9 aa, Homo Sapiens
KVVNLPFEK

SEQ ID NO: 25163 - protein, 9 aa, Homo Sapiens
KVYDKAINR

SEQ ID NO: 25164 - protein, 9 aa, Homo Sapiens
KVYGPGVAK

SEQ ID NO: 25165 - protein, 9 aa, Homo Sapiens
KVYNGILEK

SEQ ID NO: 25166 - protein, 9 aa, Homo Sapiens
KVYTPSISK

SEQ ID NO: 25167 - protein, 9 aa, Homo Sapiens
LAAPPALEK

SEQ ID NO: 25168 - protein, 9 aa, Homo Sapiens
LAGQGELNR

SEQ ID NO: 25169 - protein, 9 aa, Homo Sapiens
LDQVLKEAK

SEQ ID NO: 25170 - protein, 9 aa, Homo Sapiens
LEETLVKKK

SEQ ID NO: 25171 - protein, 9 aa, Homo Sapiens
LGCQLISLR

SEQ ID NO: 25172 - protein, 9 aa, Homo Sapiens
LGFTDYPKL

SEQ ID NO: 25173 - protein, 9 aa, Homo Sapiens
LGIPLPEIK

SEQ ID NO: 25174 - protein, 9 aa, Homo Sapiens
LGLTEAQTR

SEQ ID NO: 25175 - protein, 9 aa, Homo Sapiens
LGSSKVLAK

SEQ ID NO: 25176 - protein, 9 aa, Homo Sapiens
LIIYDDLSK

SEQ ID NO: 25177 - protein, 9 aa, Homo Sapiens
LINAFHTPK

SEQ ID NO: 25178 - protein, 9 aa, Homo Sapiens
LIQQATTVK

SEQ ID NO: 25179 - protein, 9 aa, Homo Sapiens
LLIYTEFGK

SEQ ID NO: 25180 - protein, 9 aa, Homo Sapiens
LLLAPAVSK

SEQ ID NO: 25181 - protein, 9 aa, Homo Sapiens
LLPELSVLA

SEQ ID NO: 25182 - protein, 9 aa, Homo Sapiens
LNLQEYQSK

SEQ ID NO: 25183 - protein, 9 aa, Homo Sapiens
LPALKQTPK

SEQ ID NO: 25184 - protein, 9 aa, Homo Sapiens
LPPLSPYFK

SEQ ID NO: 25185 - protein, 9 aa, Homo Sapiens
LQIPIHFPK

SEQ ID NO: 25186 - protein, 9 aa, Homo Sapiens
LQNEPIPER

SEQ ID NO: 25187 - protein, 9 aa, Homo Sapiens
LTEAPLNPK

SEQ ID NO: 25188 - protein, 9 aa, Homo Sapiens
LTGPPGVGK

SEQ ID NO: 25189 - protein, 9 aa, Homo Sapiens
LTGPVMPVR

SEQ ID NO: 25190 - protein, 9 aa, Homo Sapiens
LTIPEIPPK

SEQ ID NO: 25191 - protein, 9 aa, Homo Sapiens
LTMDKLWRK

SEQ ID NO: 25192 - protein, 9 aa, Homo Sapiens
LTMPGGVAK

SEQ ID NO: 25193 - protein, 9 aa, Homo Sapiens
LTNHFSFEK

SEQ ID NO: 25194 - protein, 9 aa, Homo Sapiens
LTTAVITNK

SEQ ID NO: 25195 - protein, 9 aa, Homo Sapiens
LTYEFVKQK

SEQ ID NO: 25196 - protein, 9 aa, Homo Sapiens
LTYNDFINK

SEQ ID NO: 25197 - protein, 9 aa, Homo Sapiens
LVAIPVYVK

SEQ ID NO: 25198 - protein, 9 aa, Homo Sapiens
LVFDVELLK

SEQ ID NO: 25199 - protein, 9 aa, Homo Sapiens
LVFDWNTPK

SEQ ID NO: 25200 - protein, 9 aa, Homo Sapiens
LVFEWTIVK

SEQ ID NO: 25201 - protein, 9 aa, Homo Sapiens
LVGPVPAGR

SEQ ID NO: 25202 - protein, 9 aa, Homo Sapiens
LVIPFAVRK

SEQ ID NO: 25203 - protein, 9 aa, Homo Sapiens
LVIPFTIKK

SEQ ID NO: 25204 - protein, 9 aa, Homo Sapiens
LVLEGAGLR

SEQ ID NO: 25205 - protein, 9 aa, Homo Sapiens
LVLSRTKLT

SEQ ID NO: 25206 - protein, 9 aa, Homo Sapiens
LVMEGHLFK

SEQ ID NO: 25207 - protein, 9 aa, Homo Sapiens
LVMTHLILK

SEQ ID NO: 25208 - protein, 9 aa, Homo Sapiens
LVSPITGEK

SEQ ID NO: 25209 - protein, 9 aa, Homo Sapiens
LVSTPVRTK

SEQ ID NO: 25210 - protein, 9 aa, Homo Sapiens
LVVYPWTQR

SEQ ID NO: 25211 - protein, 9 aa, Homo Sapiens
LVYDVSNPK

SEQ ID NO: 25212 - protein, 9 aa, Homo Sapiens
LVYNGVYQY

SEQ ID NO: 25213 - protein, 9 aa, Homo Sapiens
LYDASFETK

SEQ ID NO: 25214 - protein, 9 aa, Homo Sapiens
LYETPTGWK

SEQ ID NO: 25215 - protein, 9 aa, Homo Sapiens
MAAAAFAEK

SEQ ID NO: 25216 - protein, 9 aa, Homo Sapiens
MAADRSLKK

SEQ ID NO: 25217 - protein, 9 aa, Homo Sapiens
MGDAPDYDR

SEQ ID NO: 25218 - protein, 9 aa, Homo Sapiens
MIFRNQVPK

SEQ ID NO: 25219 - protein, 9 aa, Homo Sapiens
MMFSATFPK

SEQ ID NO: 25220 - protein, 9 aa, Homo Sapiens
MPKDIQLAR

SEQ ID NO: 25221 - protein, 9 aa, Homo Sapiens
MSQDFGWNK

SEQ ID NO: 25222 - protein, 9 aa, Homo Sapiens
MTYAQKIFK

SEQ ID NO: 25223 - protein, 9 aa, Homo Sapiens
MVANLLYEK

SEQ ID NO: 25224 - protein, 9 aa, Homo Sapiens
MVFGAPVPK

SEQ ID NO: 25225 - protein, 9 aa, Homo Sapiens
MVGVNLPQK

SEQ ID NO: 25226 - protein, 9 aa, Homo Sapiens
MVMDKKHFK

SEQ ID NO: 25227 - protein, 9 aa, Homo Sapiens
NAIKWNFTK

SEQ ID NO: 25228 - protein, 9 aa, Homo Sapiens
NFFASPMLK

SEQ ID NO: 25229 - protein, 9 aa, Homo Sapiens
NICSIYNLK

SEQ ID NO: 25230 - protein, 9 aa, Homo Sapiens
NSLIFLKPN

SEQ ID NO: 25231 - protein, 9 aa, Homo Sapiens
NSMGLFLQK

SEQ ID NO: 25232 - protein, 9 aa, Homo Sapiens
NTITPVVGK

SEQ ID NO: 25233 - protein, 9 aa, Homo Sapiens
NTMNITISK

SEQ ID NO: 25234 - protein, 9 aa, Homo Sapiens
NTMNQFVNK

SEQ ID NO: 25235 - protein, 9 aa, Homo Sapiens
NTMQQFLQK

SEQ ID NO: 25236 - protein, 9 aa, Homo Sapiens
NTNTAIELK

SEQ ID NO: 25237 - protein, 9 aa, Homo Sapiens
NVGPLIIKK

SEQ ID NO: 25238 - protein, 9 aa, Homo Sapiens
NVYEVVNPK

SEQ ID NO: 25239 - protein, 9 aa, Homo Sapiens
PEFPLSPPK

SEQ ID NO: 25240 - protein, 9 aa, Homo Sapiens
PISDIIAIK

SEQ ID NO: 25241 - protein, 9 aa, Homo Sapiens
PLDTVTFYK

SEQ ID NO: 25242 - protein, 9 aa, Homo Sapiens
PLSDALLNK

SEQ ID NO: 25243 - protein, 9 aa, Homo Sapiens
PSSETVICR

SEQ ID NO: 25244 - protein, 9 aa, Homo Sapiens
PSSHLPPPK

SEQ ID NO: 25245 - protein, 9 aa, Homo Sapiens
QAADILLYK

SEQ ID NO: 25246 - protein, 9 aa, Homo Sapiens
QAFAQVFNK

SEQ ID NO: 25247 - protein, 9 aa, Homo Sapiens
QAQEVFFLK

SEQ ID NO: 25248 - protein, 9 aa, Homo Sapiens
QASEPAVSL

SEQ ID NO: 25249 - protein, 9 aa, Homo Sapiens
QDGITLITK

SEQ ID NO: 25250 - protein, 9 aa, Homo Sapiens
QEDPDYGIR

SEQ ID NO: 25251 - protein, 9 aa, Homo Sapiens
QEFGLARFK

SEQ ID NO: 25252 - protein, 9 aa, Homo Sapiens
QGEYIAPEK

SEQ ID NO: 25253 - protein, 9 aa, Homo Sapiens
QICDTYNQK

SEQ ID NO: 25254 - protein, 9 aa, Homo Sapiens
QIFKPIISK

SEQ ID NO: 25255 - protein, 9 aa, Homo Sapiens
QIFSEFLLK

SEQ ID NO: 25256 - protein, 9 aa, Homo Sapiens
QIGPAPPLK

SEQ ID NO: 25257 - protein, 9 aa, Homo Sapiens
QINGEIICK

SEQ ID NO: 25258 - protein, 9 aa, Homo Sapiens
QIQDSIVTK

SEQ ID NO: 25259 - protein, 9 aa, Homo Sapiens
QISEVVVVK

SEQ ID NO: 25260 - protein, 9 aa, Homo Sapiens
QITLPTVQK

SEQ ID NO: 25261 - protein, 9 aa, Homo Sapiens
QIYGVFDEK

SEQ ID NO: 25262 - protein, 9 aa, Homo Sapiens
QIYSVVLKK

SEQ ID NO: 25263 - protein, 9 aa, Homo Sapiens
QIYTYFVYK

SEQ ID NO: 25264 - protein, 9 aa, Homo Sapiens
QLYWSHPRK

SEQ ID NO: 25265 - protein, 9 aa, Homo Sapiens
QPNLPPDLR

SEQ ID NO: 25266 - protein, 9 aa, Homo Sapiens
QQLYWSHPR

SEQ ID NO: 25267 - protein, 9 aa, Homo Sapiens
QSCYIIISK

SEQ ID NO: 25268 - protein, 9 aa, Homo Sapiens
QSIFPTIPK

SEQ ID NO: 25269 - protein, 9 aa, Homo Sapiens
QSLEHSWIK

SEQ ID NO: 25270 - protein, 9 aa, Homo Sapiens
QTAADAFYK

SEQ ID NO: 25271 - protein, 9 aa, Homo Sapiens
QTAGNVFLK

SEQ ID NO: 25272 - protein, 9 aa, Homo Sapiens
QTAQIFFTK

SEQ ID NO: 25273 - protein, 9 aa, Homo Sapiens
QTASFALKK

SEQ ID NO: 25274 - protein, 9 aa, Homo Sapiens
QTCRLLLSY

SEQ ID NO: 25275 - protein, 9 aa, Homo Sapiens
QTLSPQMWK

SEQ ID NO: 25276 - protein, 9 aa, Homo Sapiens
QTMSDTTFK

SEQ ID NO: 25277 - protein, 9 aa, Homo Sapiens
QTNPTYLAK

SEQ ID NO: 25278 - protein, 9 aa, Homo Sapiens
QTQPIYLAK

SEQ ID NO: 25279 - protein, 9 aa, Homo Sapiens
QTQSIYIPR

SEQ ID NO: 25280 - protein, 9 aa, Homo Sapiens
QTYGQQLQK

SEQ ID NO: 25281 - protein, 9 aa, Homo Sapiens
QTYVGITEK

SEQ ID NO: 25282 - protein, 9 aa, Homo Sapiens
QVADAFLSK

SEQ ID NO: 25283 - protein, 9 aa, Homo Sapiens
QVADVVVSR

SEQ ID NO: 25284 - protein, 9 aa, Homo Sapiens
QVDPNFYSK

SEQ ID NO: 25285 - protein, 9 aa, Homo Sapiens
QVFEFTEPK

SEQ ID NO: 25286 - protein, 9 aa, Homo Sapiens
QVFEKSPLR

SEQ ID NO: 25287 - protein, 9 aa, Homo Sapiens
QVFQKSLPK

SEQ ID NO: 25288 - protein, 9 aa, Homo Sapiens
QVIDGFFVK

SEQ ID NO: 25289 - protein, 9 aa, Homo Sapiens
QVIPASEPK

SEQ ID NO: 25290 - protein, 9 aa, Homo Sapiens
QVMFPVNSK

SEQ ID NO: 25291 - protein, 9 aa, Homo Sapiens
QVQAAQFAK

SEQ ID NO: 25292 - protein, 9 aa, Homo Sapiens
QVQDCHVLK

SEQ ID NO: 25293 - protein, 9 aa, Homo Sapiens
QVSACAFNK

SEQ ID NO: 25294 - protein, 9 aa, Homo Sapiens
QVVSPGVYK

SEQ ID NO: 25295 - protein, 9 aa, Homo Sapiens
RAAIPIAKR

SEQ ID NO: 25296 - protein, 9 aa, Homo Sapiens
RAAPFSLEY

SEQ ID NO: 25297 - protein, 9 aa, Homo Sapiens
RAISWTMKK

SEQ ID NO: 25298 - protein, 9 aa, Homo Sapiens
RAMEWITAK

SEQ ID NO: 25299 - protein, 9 aa, Homo Sapiens
RAPEPLPPK

SEQ ID NO: 25300 - protein, 9 aa, Homo Sapiens
RAQDLPLKK

SEQ ID NO: 25301 - protein, 9 aa, Homo Sapiens
RAVPFNAPK

SEQ ID NO: 25302 - protein, 9 aa, Homo Sapiens
RAYPHVFTK

SEQ ID NO: 25303 - protein, 9 aa, Homo Sapiens
RDVLPFTLK

SEQ ID NO: 25304 - protein, 9 aa, Homo Sapiens
RFYDRRFLK

SEQ ID NO: 25305 - protein, 9 aa, Homo Sapiens
RGYYRYYNK

SEQ ID NO: 25306 - protein, 9 aa, Homo Sapiens
RIAEFAFEY

SEQ ID NO: 25307 - protein, 9 aa, Homo Sapiens
RICDFGFAK

SEQ ID NO: 25308 - protein, 9 aa, Homo Sapiens
RICEILLQY

SEQ ID NO: 25309 - protein, 9 aa, Homo Sapiens
RIFDLGRKK

SEQ ID NO: 25310 - protein, 9 aa, Homo Sapiens
RIFEPPPPK

SEQ ID NO: 25311 - protein, 9 aa, Homo Sapiens
RIGNFIVKK

SEQ ID NO: 25312 - protein, 9 aa, Homo Sapiens
RIIDEVVNK

SEQ ID NO: 25313 - protein, 9 aa, Homo Sapiens
RIIDLVLQK

SEQ ID NO: 25314 - protein, 9 aa, Homo Sapiens
RIIEPLTSR

SEQ ID NO: 25315 - protein, 9 aa, Homo Sapiens
RIIGVDINK

SEQ ID NO: 25316 - protein, 9 aa, Homo Sapiens
RIIPRHLQL

SEQ ID NO: 25317 - protein, 9 aa, Homo Sapiens
RIKEIFCPK

SEQ ID NO: 25318 - protein, 9 aa, Homo Sapiens
RILACGVAK

SEQ ID NO: 25319 - protein, 9 aa, Homo Sapiens
RILFFNTPK

SEQ ID NO: 25320 - protein, 9 aa, Homo Sapiens
RILGPGLNK

SEQ ID NO: 25321 - protein, 9 aa, Homo Sapiens
RILLPIVQK

SEQ ID NO: 25322 - protein, 9 aa, Homo Sapiens
RIQDLSLLY

SEQ ID NO: 25323 - protein, 9 aa, Homo Sapiens
RIQDVLFLY

SEQ ID NO: 25324 - protein, 9 aa, Homo Sapiens
RIQLPVVSK

SEQ ID NO: 25325 - protein, 9 aa, Homo Sapiens
RIQQIIEGK

SEQ ID NO: 25326 - protein, 9 aa, Homo Sapiens
RITDPTIDK

SEQ ID NO: 25327 - protein, 9 aa, Homo Sapiens
RITTHFELK

SEQ ID NO: 25328 - protein, 9 aa, Homo Sapiens
RIYDIFRSK

SEQ ID NO: 25329 - protein, 9 aa, Homo Sapiens
RIYSYVVSR

SEQ ID NO: 25330 - protein, 9 aa, Homo Sapiens
RLADSLIGK

SEQ ID NO: 25331 - protein, 9 aa, Homo Sapiens
RLFCVGFTK

SEQ ID NO: 25332 - protein, 9 aa, Homo Sapiens
RLFHLHSQK

SEQ ID NO: 25333 - protein, 9 aa, Homo Sapiens
RLFIGGIPK

SEQ ID NO: 25334 - protein, 9 aa, Homo Sapiens
RLFLFQIQK

SEQ ID NO: 25335 - protein, 9 aa, Homo Sapiens
RLFPGLAIK

SEQ ID NO: 25336 - protein, 9 aa, Homo Sapiens
RLFVGSIPK

SEQ ID NO: 25337 - protein, 9 aa, Homo Sapiens
RLMEIYQEK

SEQ ID NO: 25338 - protein, 9 aa, Homo Sapiens
RLQEIFTEK

SEQ ID NO: 25339 - protein, 9 aa, Homo Sapiens
RLVQGSILK

SEQ ID NO: 25340 - protein, 9 aa, Homo Sapiens
RLVRWLLKK

SEQ ID NO: 25341 - protein, 9 aa, Homo Sapiens
RQFWTRTKK

SEQ ID NO: 25342 - protein, 9 aa, Homo Sapiens
RQIPYTMMK

SEQ ID NO: 25343 - protein, 9 aa, Homo Sapiens
RQVIPIIGK

SEQ ID NO: 25344 - protein, 9 aa, Homo Sapiens
RSDTPLIYK

SEQ ID NO: 25345 - protein, 9 aa, Homo Sapiens
RSFEEAFQK

SEQ ID NO: 25346 - protein, 9 aa, Homo Sapiens
RSFSLGVPR

SEQ ID NO: 25347 - protein, 9 aa, Homo Sapiens
RSLDNFFAK

SEQ ID NO: 25348 - protein, 9 aa, Homo Sapiens
RSLDTHVTK

SEQ ID NO: 25349 - protein, 9 aa, Homo Sapiens
RSMHEFSAK

SEQ ID NO: 25350 - protein, 9 aa, Homo Sapiens
RSNPYYIVK

SEQ ID NO: 25351 - protein, 9 aa, Homo Sapiens
RSSFVFVRK

SEQ ID NO: 25352 - protein, 9 aa, Homo Sapiens
RSVSIPAPA

SEQ ID NO: 25353 - protein, 9 aa, Homo Sapiens
RSYSDPPLK

SEQ ID NO: 25354 - protein, 9 aa, Homo Sapiens
RTAHVILRY

SEQ ID NO: 25355 - protein, 9 aa, Homo Sapiens
RTASFAVRK

SEQ ID NO: 25356 - protein, 9 aa, Homo Sapiens
RTAVYSLHK

SEQ ID NO: 25357 - protein, 9 aa, Homo Sapiens
RTDFTPHWK

SEQ ID NO: 25358 - protein, 9 aa, Homo Sapiens
RTFGHLLRY

SEQ ID NO: 25359 - protein, 9 aa, Homo Sapiens
RTFQEVLAY

SEQ ID NO: 25360 - protein, 9 aa, Homo Sapiens
RTFSYIKNK

SEQ ID NO: 25361 - protein, 9 aa, Homo Sapiens
RTFTWLVGK

SEQ ID NO: 25362 - protein, 9 aa, Homo Sapiens
RTGGHFICK

SEQ ID NO: 25363 - protein, 9 aa, Homo Sapiens
RTIAPIIGR

SEQ ID NO: 25364 - protein, 9 aa, Homo Sapiens
RTIDRSVFK

SEQ ID NO: 25365 - protein, 9 aa, Homo Sapiens
RTIFPLFMK

SEQ ID NO: 25366 - protein, 9 aa, Homo Sapiens
RTISETIER

SEQ ID NO: 25367 - protein, 9 aa, Homo Sapiens
RTLEPLAKK

SEQ ID NO: 25368 - protein, 9 aa, Homo Sapiens
RTLKEILRY

SEQ ID NO: 25369 - protein, 9 aa, Homo Sapiens
RTLPVLLLY

SEQ ID NO: 25370 - protein, 9 aa, Homo Sapiens
RTLQEQLEK

SEQ ID NO: 25371 - protein, 9 aa, Homo Sapiens
RTNWPNTGK

SEQ ID NO: 25372 - protein, 9 aa, Homo Sapiens
RTQGLMIMK

SEQ ID NO: 25373 - protein, 9 aa, Homo Sapiens
RTQNVLGEK

SEQ ID NO: 25374 - protein, 9 aa, Homo Sapiens
RTSEIYVHR

SEQ ID NO: 25375 - protein, 9 aa, Homo Sapiens
RTSIPVHSK

SEQ ID NO: 25376 - protein, 9 aa, Homo Sapiens
RTVEDVFLR

SEQ ID NO: 25377 - protein, 9 aa, Homo Sapiens
RTYDMIQYY

SEQ ID NO: 25378 - protein, 9 aa, Homo Sapiens
RTYYSPVYR

SEQ ID NO: 25379 - protein, 9 aa, Homo Sapiens
RVADFTEQY

SEQ ID NO: 25380 - protein, 9 aa, Homo Sapiens
RVAELILHH

SEQ ID NO: 25381 - protein, 9 aa, Homo Sapiens
RVDQIIMAK

SEQ ID NO: 25382 - protein, 9 aa, Homo Sapiens
RVFFPLCGK

SEQ ID NO: 25383 - protein, 9 aa, Homo Sapiens
RVFHPAFTK

SEQ ID NO: 25384 - protein, 9 aa, Homo Sapiens
RVFLRAINK

SEQ ID NO: 25385 - protein, 9 aa, Homo Sapiens
RVFNIMREK

SEQ ID NO: 25386 - protein, 9 aa, Homo Sapiens
RVFNVFCLY

SEQ ID NO: 25387 - protein, 9 aa, Homo Sapiens
RVFPWFSVK

SEQ ID NO: 25388 - protein, 9 aa, Homo Sapiens
RVFQECLTY

SEQ ID NO: 25389 - protein, 9 aa, Homo Sapiens
RVGDVYIPR

SEQ ID NO: 25390 - protein, 9 aa, Homo Sapiens
RVGEFCHNR

SEQ ID NO: 25391 - protein, 9 aa, Homo Sapiens
RVHSIFVLR

SEQ ID NO: 25392 - protein, 9 aa, Homo Sapiens
RVIAKALEK

SEQ ID NO: 25393 - protein, 9 aa, Homo Sapiens
RVIAPPLIK

SEQ ID NO: 25394 - protein, 9 aa, Homo Sapiens
RVISSIEQK

SEQ ID NO: 25395 - protein, 9 aa, Homo Sapiens
RVITALVER

SEQ ID NO: 25396 - protein, 9 aa, Homo Sapiens
RVKLPSGSK

SEQ ID NO: 25397 - protein, 9 aa, Homo Sapiens
RVLEAIQKK

SEQ ID NO: 25398 - protein, 9 aa, Homo Sapiens
RVLEDRALK

SEQ ID NO: 25399 - protein, 9 aa, Homo Sapiens
RVLPEFKKK

SEQ ID NO: 25400 - protein, 9 aa, Homo Sapiens
RVLPYPFTH

SEQ ID NO: 25401 - protein, 9 aa, Homo Sapiens
RVLSKAFSR

SEQ ID NO: 25402 - protein, 9 aa, Homo Sapiens
RVMDVQYNK

SEQ ID NO: 25403 - protein, 9 aa, Homo Sapiens
RVMGIRVLR

SEQ ID NO: 25404 - protein, 9 aa, Homo Sapiens
RVMKALVNR

SEQ ID NO: 25405 - protein, 9 aa, Homo Sapiens
RVMQDIVYK

SEQ ID NO: 25406 - protein, 9 aa, Homo Sapiens
RVNKLICVK

SEQ ID NO: 25407 - protein, 9 aa, Homo Sapiens
RVNKPPYPK

SEQ ID NO: 25408 - protein, 9 aa, Homo Sapiens
RVNVTGIYR

SEQ ID NO: 25409 - protein, 9 aa, Homo Sapiens
RVPDVVLIK

SEQ ID NO: 25410 - protein, 9 aa, Homo Sapiens
RVQGFQVEY

SEQ ID NO: 25411 - protein, 9 aa, Homo Sapiens
RVQVVGTYR

SEQ ID NO: 25412 - protein, 9 aa, Homo Sapiens
RVSYQKLLK

SEQ ID NO: 25413 - protein, 9 aa, Homo Sapiens
RVTDLFIGK

SEQ ID NO: 25414 - protein, 9 aa, Homo Sapiens
RVTPFILKK

SEQ ID NO: 25415 - protein, 9 aa, Homo Sapiens
RVTYPAKAK

SEQ ID NO: 25416 - protein, 9 aa, Homo Sapiens
RVYGGLTTK

SEQ ID NO: 25417 - protein, 9 aa, Homo Sapiens
RVYHYFQWR

SEQ ID NO: 25418 - protein, 9 aa, Homo Sapiens
RVYNIYIRR

SEQ ID NO: 25419 - protein, 9 aa, Homo Sapiens
RVYNWDVKR

SEQ ID NO: 25420 - protein, 9 aa, Homo Sapiens
RVYPESIPR

SEQ ID NO: 25421 - protein, 9 aa, Homo Sapiens
SAAAALVLK

SEQ ID NO: 25422 - protein, 9 aa, Homo Sapiens
SAAPAITCR

SEQ ID NO: 25423 - protein, 9 aa, Homo Sapiens
SAAPSKPAL

SEQ ID NO: 25424 - protein, 9 aa, Homo Sapiens
SAFGQAFSK

SEQ ID NO: 25425 - protein, 9 aa, Homo Sapiens
SAFGVIIEK

SEQ ID NO: 25426 - protein, 9 aa, Homo Sapiens
SAFQHFWNR

SEQ ID NO: 25427 - protein, 9 aa, Homo Sapiens
SAFSTSISK

SEQ ID NO: 25428 - protein, 9 aa, Homo Sapiens
SAFVERVRK

SEQ ID NO: 25429 - protein, 9 aa, Homo Sapiens
SAFYVPFAK

SEQ ID NO: 25430 - protein, 9 aa, Homo Sapiens
SAGPHLPLK

SEQ ID NO: 25431 - protein, 9 aa, Homo Sapiens
SAGPPSLRK

SEQ ID NO: 25432 - protein, 9 aa, Homo Sapiens
SAIRERFPK

SEQ ID NO: 25433 - protein, 9 aa, Homo Sapiens
SALDFLHNK

SEQ ID NO: 25434 - protein, 9 aa, Homo Sapiens
SALDYNEAK

SEQ ID NO: 25435 - protein, 9 aa, Homo Sapiens
SALHIAIEK

SEQ ID NO: 25436 - protein, 9 aa, Homo Sapiens
SALNFPFAR

SEQ ID NO: 25437 - protein, 9 aa, Homo Sapiens
SALSVAPSK

SEQ ID NO: 25438 - protein, 9 aa, Homo Sapiens
SAMERICEK

SEQ ID NO: 25439 - protein, 9 aa, Homo Sapiens
SAMESFIEK

SEQ ID NO: 25440 - protein, 9 aa, Homo Sapiens
SANECISVK

SEQ ID NO: 25441 - protein, 9 aa, Homo Sapiens
SAPASQASL

SEQ ID NO: 25442 - protein, 9 aa, Homo Sapiens
SAQGNVYVK

SEQ ID NO: 25443 - protein, 9 aa, Homo Sapiens
SAQNTKFFK

SEQ ID NO: 25444 - protein, 9 aa, Homo Sapiens
SAQSFFENK

SEQ ID NO: 25445 - protein, 9 aa, Homo Sapiens
SASASLPTK

SEQ ID NO: 25446 - protein, 9 aa, Homo Sapiens
SATQAVFQK

SEQ ID NO: 25447 - protein, 9 aa, Homo Sapiens
SATTSPFFK

SEQ ID NO: 25448 - protein, 9 aa, Homo Sapiens
SAVDPVQMK

SEQ ID NO: 25449 - protein, 9 aa, Homo Sapiens
SAVGTIVKK

SEQ ID NO: 25450 - protein, 9 aa, Homo Sapiens
SAVLFTITK

SEQ ID NO: 25451 - protein, 9 aa, Homo Sapiens
SAVRPVIEK

SEQ ID NO: 25452 - protein, 9 aa, Homo Sapiens
SDQFPLPLK

SEQ ID NO: 25453 - protein, 9 aa, Homo Sapiens
SGATIRIFK

SEQ ID NO: 25454 - protein, 9 aa, Homo Sapiens
SGIQVRYLK

SEQ ID NO: 25455 - protein, 9 aa, Homo Sapiens
SGMDYWIVK

SEQ ID NO: 25456 - protein, 9 aa, Homo Sapiens
SGSNVKIVK

SEQ ID NO: 25457 - protein, 9 aa, Homo Sapiens
SGSPATPLK

SEQ ID NO: 25458 - protein, 9 aa, Homo Sapiens
SGYFKQFQK

SEQ ID NO: 25459 - protein, 9 aa, Homo Sapiens
SIAAAVAPK

SEQ ID NO: 25460 - protein, 9 aa, Homo Sapiens
SIAPPVPLK

SEQ ID NO: 25461 - protein, 9 aa, Homo Sapiens
SICGKMFKK

SEQ ID NO: 25462 - protein, 9 aa, Homo Sapiens
SICGKSFTK

SEQ ID NO: 25463 - protein, 9 aa, Homo Sapiens
SICGKTFNK

SEQ ID NO: 25464 - protein, 9 aa, Homo Sapiens
SIDEHFQPK

SEQ ID NO: 25465 - protein, 9 aa, Homo Sapiens
SIFACPILR

SEQ ID NO: 25466 - protein, 9 aa, Homo Sapiens
SIFHLTEKK

SEQ ID NO: 25467 - protein, 9 aa, Homo Sapiens
SIFKQPVTK

SEQ ID NO: 25468 - protein, 9 aa, Homo Sapiens
SIFPYVTTK

SEQ ID NO: 25469 - protein, 9 aa, Homo Sapiens
SIFRTPISK

SEQ ID NO: 25470 - protein, 9 aa, Homo Sapiens
SIFSKFTSK

SEQ ID NO: 25471 - protein, 9 aa, Homo Sapiens
SIGDIFLKY

SEQ ID NO: 25472 - protein, 9 aa, Homo Sapiens
SIGPSIVCK

SEQ ID NO: 25473 - protein, 9 aa, Homo Sapiens
SIGTPLDPK

SEQ ID NO: 25474 - protein, 9 aa, Homo Sapiens
SIHRPLAYK

SEQ ID NO: 25475 - protein, 9 aa, Homo Sapiens
SIIETLRQK

SEQ ID NO: 25476 - protein, 9 aa, Homo Sapiens
SIIGVTEPR

SEQ ID NO: 25477 - protein, 9 aa, Homo Sapiens
SIINPPIAK

SEQ ID NO: 25478 - protein, 9 aa, Homo Sapiens
SIISVLPWK

SEQ ID NO: 25479 - protein, 9 aa, Homo Sapiens
SILDEVIFK

SEQ ID NO: 25480 - protein, 9 aa, Homo Sapiens
SILKESKYK

SEQ ID NO: 25481 - protein, 9 aa, Homo Sapiens
SILNNPIVK

SEQ ID NO: 25482 - protein, 9 aa, Homo Sapiens
SILNWVKFK

SEQ ID NO: 25483 - protein, 9 aa, Homo Sapiens
SILPAIFQK

SEQ ID NO: 25484 - protein, 9 aa, Homo Sapiens
SILSGGTPK

SEQ ID NO: 25485 - protein, 9 aa, Homo Sapiens
SILSHIHKR

SEQ ID NO: 25486 - protein, 9 aa, Homo Sapiens
SIMDFNSEK

SEQ ID NO: 25487 - protein, 9 aa, Homo Sapiens
SIMKWNRER

SEQ ID NO: 25488 - protein, 9 aa, Homo Sapiens
SIMSSHVMK

SEQ ID NO: 25489 - protein, 9 aa, Homo Sapiens
SIPTFYFPR

SEQ ID NO: 25490 - protein, 9 aa, Homo Sapiens
SIQHPLIKK

SEQ ID NO: 25491 - protein, 9 aa, Homo Sapiens
SISAVVMEK

SEQ ID NO: 25492 - protein, 9 aa, Homo Sapiens
SISEFLLTH

SEQ ID NO: 25493 - protein, 9 aa, Homo Sapiens
SISSPQPGK

SEQ ID NO: 25494 - protein, 9 aa, Homo Sapiens
SITGFFQRK

SEQ ID NO: 25495 - protein, 9 aa, Homo Sapiens
SITSEVFNK

SEQ ID NO: 25496 - protein, 9 aa, Homo Sapiens
SITSVFITK

SEQ ID NO: 25497 - protein, 9 aa, Homo Sapiens
SIWDETLYK

SEQ ID NO: 25498 - protein, 9 aa, Homo Sapiens
SIWDYFIAK

SEQ ID NO: 25499 - protein, 9 aa, Homo Sapiens
SIYFPYVLK

SEQ ID NO: 25500 - protein, 9 aa, Homo Sapiens
SIYVYKVLK

SEQ ID NO: 25501 - protein, 9 aa, Homo Sapiens
SIYYVDVQK

SEQ ID NO: 25502 - protein, 9 aa, Homo Sapiens
SLADFQIEK

SEQ ID NO: 25503 - protein, 9 aa, Homo Sapiens
SLAEILLKK

SEQ ID NO: 25504 - protein, 9 aa, Homo Sapiens
SLAPVNIFK

SEQ ID NO: 25505 - protein, 9 aa, Homo Sapiens
SLFGSPVAK

SEQ ID NO: 25506 - protein, 9 aa, Homo Sapiens
SLFNTGFLK

SEQ ID NO: 25507 - protein, 9 aa, Homo Sapiens
SLFNTIQAL

SEQ ID NO: 25508 - protein, 9 aa, Homo Sapiens
SLFSRLFGK

SEQ ID NO: 25509 - protein, 9 aa, Homo Sapiens
SLGQVVITK

SEQ ID NO: 25510 - protein, 9 aa, Homo Sapiens
SLLGYFPNK

SEQ ID NO: 25511 - protein, 9 aa, Homo Sapiens
SLLNVSTPK

SEQ ID NO: 25512 - protein, 9 aa, Homo Sapiens
SLLRDLTPK

SEQ ID NO: 25513 - protein, 9 aa, Homo Sapiens
SLLSVLIPK

SEQ ID NO: 25514 - protein, 9 aa, Homo Sapiens
SLMHSFILK

SEQ ID NO: 25515 - protein, 9 aa, Homo Sapiens
SLMPWFHGK

SEQ ID NO: 25516 - protein, 9 aa, Homo Sapiens
SLMSVLIPK

SEQ ID NO: 25517 - protein, 9 aa, Homo Sapiens
SLNQAVVSK

SEQ ID NO: 25518 - protein, 9 aa, Homo Sapiens
SLPYPPKTL

SEQ ID NO: 25519 - protein, 9 aa, Homo Sapiens
SLQELFLAH

SEQ ID NO: 25520 - protein, 9 aa, Homo Sapiens
SLQPSISQK

SEQ ID NO: 25521 - protein, 9 aa, Homo Sapiens
SLQRWEHLK

SEQ ID NO: 25522 - protein, 9 aa, Homo Sapiens
SLSPVILIK

SEQ ID NO: 25523 - protein, 9 aa, Homo Sapiens
SLSSPLNPK

SEQ ID NO: 25524 - protein, 9 aa, Homo Sapiens
SLSVPSVSK

SEQ ID NO: 25525 - protein, 9 aa, Homo Sapiens
SLTPVTPQK

SEQ ID NO: 25526 - protein, 9 aa, Homo Sapiens
SLYAHGYLK

SEQ ID NO: 25527 - protein, 9 aa, Homo Sapiens
SLYRCKQLK

SEQ ID NO: 25528 - protein, 9 aa, Homo Sapiens
SLYWLSTQK

SEQ ID NO: 25529 - protein, 9 aa, Homo Sapiens
SNDGATILK

SEQ ID NO: 25530 - protein, 9 aa, Homo Sapiens
SQCEFSMGK

SEQ ID NO: 25531 - protein, 9 aa, Homo Sapiens
SQCGSLIGK

SEQ ID NO: 25532 - protein, 9 aa, Homo Sapiens
SQFSLPVQK

SEQ ID NO: 25533 - protein, 9 aa, Homo Sapiens
SQGPISKPK

SEQ ID NO: 25534 - protein, 9 aa, Homo Sapiens
SQGTPISLK

SEQ ID NO: 25535 - protein, 9 aa, Homo Sapiens
SQGTTKQLP

SEQ ID NO: 25536 - protein, 9 aa, Homo Sapiens
SQISLLIGK

SEQ ID NO: 25537 - protein, 9 aa, Homo Sapiens
SQISTSIQK

SEQ ID NO: 25538 - protein, 9 aa, Homo Sapiens
SQLGIFISK

SEQ ID NO: 25539 - protein, 9 aa, Homo Sapiens
SQMLFYICK

SEQ ID NO: 25540 - protein, 9 aa, Homo Sapiens
SQNPRFYHK

SEQ ID NO: 25541 - protein, 9 aa, Homo Sapiens
SQPGLVHPK

SEQ ID NO: 25542 - protein, 9 aa, Homo Sapiens
SQQKAFFAK

SEQ ID NO: 25543 - protein, 9 aa, Homo Sapiens
SQSDPTFGK

SEQ ID NO: 25544 - protein, 9 aa, Homo Sapiens
SSAGPGLLK

SEQ ID NO: 25545 - protein, 9 aa, Homo Sapiens
SSAHWPIFK

SEQ ID NO: 25546 - protein, 9 aa, Homo Sapiens
SSAPPLTGK

SEQ ID NO: 25547 - protein, 9 aa, Homo Sapiens
SSAPQNIPK

SEQ ID NO: 25548 - protein, 9 aa, Homo Sapiens
SSCPQQWIK

SEQ ID NO: 25549 - protein, 9 aa, Homo Sapiens
SSCQTIIPK

SEQ ID NO: 25550 - protein, 9 aa, Homo Sapiens
SSCSFVVEK

SEQ ID NO: 25551 - protein, 9 aa, Homo Sapiens
SSEAPLVQK

SEQ ID NO: 25552 - protein, 9 aa, Homo Sapiens
SSFEHEFKK

SEQ ID NO: 25553 - protein, 9 aa, Homo Sapiens
SSFGNMIYK

SEQ ID NO: 25554 - protein, 9 aa, Homo Sapiens
SSFGTILRK

SEQ ID NO: 25555 - protein, 9 aa, Homo Sapiens
SSFLIKRNK

SEQ ID NO: 25556 - protein, 9 aa, Homo Sapiens
SSFQFSIQK

SEQ ID NO: 25557 - protein, 9 aa, Homo Sapiens
SSFSGLLRK

SEQ ID NO: 25558 - protein, 9 aa, Homo Sapiens
SSFSSPHMK

SEQ ID NO: 25559 - protein, 9 aa, Homo Sapiens
SSGDIFLEK

SEQ ID NO: 25560 - protein, 9 aa, Homo Sapiens
SSGPASPPR

SEQ ID NO: 25561 - protein, 9 aa, Homo Sapiens
SSGPSTPLK

SEQ ID NO: 25562 - protein, 9 aa, Homo Sapiens
SSGVPNPPK

SEQ ID NO: 25563 - protein, 9 aa, Homo Sapiens
SSHLPPPPK

SEQ ID NO: 25564 - protein, 9 aa, Homo Sapiens
SSIFVAPRK

SEQ ID NO: 25565 - protein, 9 aa, Homo Sapiens
SSIQGQWPK

SEQ ID NO: 25566 - protein, 9 aa, Homo Sapiens
SSIRHMIRK

SEQ ID NO: 25567 - protein, 9 aa, Homo Sapiens
SSITDPLIK

SEQ ID NO: 25568 - protein, 9 aa, Homo Sapiens
SSLDVNVLK

SEQ ID NO: 25569 - protein, 9 aa, Homo Sapiens
SSLDVSLQK

SEQ ID NO: 25570 - protein, 9 aa, Homo Sapiens
SSLFSGILK

SEQ ID NO: 25571 - protein, 9 aa, Homo Sapiens
SSLFSLLSK

SEQ ID NO: 25572 - protein, 9 aa, Homo Sapiens
SSLKGGLLK

SEQ ID NO: 25573 - protein, 9 aa, Homo Sapiens
SSLNHIVEK

SEQ ID NO: 25574 - protein, 9 aa, Homo Sapiens
SSLPGVFKK

SEQ ID NO: 25575 - protein, 9 aa, Homo Sapiens
SSLPKSFKR

SEQ ID NO: 25576 - protein, 9 aa, Homo Sapiens
SSLPRAFQK

SEQ ID NO: 25577 - protein, 9 aa, Homo Sapiens
SSLPTQLFK

SEQ ID NO: 25578 - protein, 9 aa, Homo Sapiens
SSLQEVYHK

SEQ ID NO: 25579 - protein, 9 aa, Homo Sapiens
SSLQPLPPR

SEQ ID NO: 25580 - protein, 9 aa, Homo Sapiens
SSLRSVCFK

SEQ ID NO: 25581 - protein, 9 aa, Homo Sapiens
SSLSLFFRK

SEQ ID NO: 25582 - protein, 9 aa, Homo Sapiens
SSLYIILKK

SEQ ID NO: 25583 - protein, 9 aa, Homo Sapiens
SSMFGTLPR

SEQ ID NO: 25584 - protein, 9 aa, Homo Sapiens
SSMSVSELK

SEQ ID NO: 25585 - protein, 9 aa, Homo Sapiens
SSNFYITEK

SEQ ID NO: 25586 - protein, 9 aa, Homo Sapiens
SSNIFTVAK

SEQ ID NO: 25587 - protein, 9 aa, Homo Sapiens
SSNLPVNNK

SEQ ID NO: 25588 - protein, 9 aa, Homo Sapiens
SSNSYAIKK

SEQ ID NO: 25589 - protein, 9 aa, Homo Sapiens
SSNVAPVKT

SEQ ID NO: 25590 - protein, 9 aa, Homo Sapiens
SSPKSHIIK

SEQ ID NO: 25591 - protein, 9 aa, Homo Sapiens
SSPQAGSSL

SEQ ID NO: 25592 - protein, 9 aa, Homo Sapiens
SSQSLSFPK

SEQ ID NO: 25593 - protein, 9 aa, Homo Sapiens
SSRGPLPVK

SEQ ID NO: 25594 - protein, 9 aa, Homo Sapiens
SSSAEFLEK

SEQ ID NO: 25595 - protein, 9 aa, Homo Sapiens
SSSGISISK

SEQ ID NO: 25596 - protein, 9 aa, Homo Sapiens
SSSNVRVIK

SEQ ID NO: 25597 - protein, 9 aa, Homo Sapiens
SSSPVNVKK

SEQ ID NO: 25598 - protein, 9 aa, Homo Sapiens
SSSSPTFPK

SEQ ID NO: 25599 - protein, 9 aa, Homo Sapiens
SSSSVLINK

SEQ ID NO: 25600 - protein, 9 aa, Homo Sapiens
SSVGSVITK

SEQ ID NO: 25601 - protein, 9 aa, Homo Sapiens
SSVPLLNSK

SEQ ID NO: 25602 - protein, 9 aa, Homo Sapiens
SSVPYSTAK

SEQ ID NO: 25603 - protein, 9 aa, Homo Sapiens
SSVSLPLAK

SEQ ID NO: 25604 - protein, 9 aa, Homo Sapiens
SSVVPSVYK

SEQ ID NO: 25605 - protein, 9 aa, Homo Sapiens
SSYDTAWKK

SEQ ID NO: 25606 - protein, 9 aa, Homo Sapiens
SSYGNQEFK

SEQ ID NO: 25607 - protein, 9 aa, Homo Sapiens
SSYPKQILR

SEQ ID NO: 25608 - protein, 9 aa, Homo Sapiens
SSYPNPVAH

SEQ ID NO: 25609 - protein, 9 aa, Homo Sapiens
SSYPVCVSK

SEQ ID NO: 25610 - protein, 9 aa, Homo Sapiens
SSYQDFYCK

SEQ ID NO: 25611 - protein, 9 aa, Homo Sapiens
SSYREAVFK

SEQ ID NO: 25612 - protein, 9 aa, Homo Sapiens
STAAATVLK

SEQ ID NO: 25613 - protein, 9 aa, Homo Sapiens
STAAFFLLR

SEQ ID NO: 25614 - protein, 9 aa, Homo Sapiens
STAAVGVLK

SEQ ID NO: 25615 - protein, 9 aa, Homo Sapiens
STAAYQPIK

SEQ ID NO: 25616 - protein, 9 aa, Homo Sapiens
STADLIRCK

SEQ ID NO: 25617 - protein, 9 aa, Homo Sapiens
STAKSQFLK

SEQ ID NO: 25618 - protein, 9 aa, Homo Sapiens
STANIDDLK

SEQ ID NO: 25619 - protein, 9 aa, Homo Sapiens
STAPAQLGK

SEQ ID NO: 25620 - protein, 9 aa, Homo Sapiens
STARHLYLR

SEQ ID NO: 25621 - protein, 9 aa, Homo Sapiens
STASELSPK

SEQ ID NO: 25622 - protein, 9 aa, Homo Sapiens
STCLTSGLK

SEQ ID NO: 25623 - protein, 9 aa, Homo Sapiens
STCSPIISK

SEQ ID NO: 25624 - protein, 9 aa, Homo Sapiens
STDNVSITK

SEQ ID NO: 25625 - protein, 9 aa, Homo Sapiens
STDPSVLGK

SEQ ID NO: 25626 - protein, 9 aa, Homo Sapiens
STDSDSFVK

SEQ ID NO: 25627 - protein, 9 aa, Homo Sapiens
STEKIYIRK

SEQ ID NO: 25628 - protein, 9 aa, Homo Sapiens
STEPPYSQK

SEQ ID NO: 25629 - protein, 9 aa, Homo Sapiens
STFDTPYCR

SEQ ID NO: 25630 - protein, 9 aa, Homo Sapiens
STFDTQITK

SEQ ID NO: 25631 - protein, 9 aa, Homo Sapiens
STFFYPKLK

SEQ ID NO: 25632 - protein, 9 aa, Homo Sapiens
STFNQVVLK

SEQ ID NO: 25633 - protein, 9 aa, Homo Sapiens
STFRESFKK

SEQ ID NO: 25634 - protein, 9 aa, Homo Sapiens
STFSAPLNK

SEQ ID NO: 25635 - protein, 9 aa, Homo Sapiens
STFSATWNR

SEQ ID NO: 25636 - protein, 9 aa, Homo Sapiens
STFSEIFKK

SEQ ID NO: 25637 - protein, 9 aa, Homo Sapiens
STGPITKPK

SEQ ID NO: 25638 - protein, 9 aa, Homo Sapiens
STHGTFLNK

SEQ ID NO: 25639 - protein, 9 aa, Homo Sapiens
STICKYYQK

SEQ ID NO: 25640 - protein, 9 aa, Homo Sapiens
STIDCGLVR

SEQ ID NO: 25641 - protein, 9 aa, Homo Sapiens
STIDDTISK

SEQ ID NO: 25642 - protein, 9 aa, Homo Sapiens
STIEYVIQR

SEQ ID NO: 25643 - protein, 9 aa, Homo Sapiens
STIHGKLQE

SEQ ID NO: 25644 - protein, 9 aa, Homo Sapiens
STIPKVLQY

SEQ ID NO: 25645 - protein, 9 aa, Homo Sapiens
STIPPELVK

SEQ ID NO: 25646 - protein, 9 aa, Homo Sapiens
STIRLPHVK

SEQ ID NO: 25647 - protein, 9 aa, Homo Sapiens
STISCVVER

SEQ ID NO: 25648 - protein, 9 aa, Homo Sapiens
STISEVLGR

SEQ ID NO: 25649 - protein, 9 aa, Homo Sapiens
STITKAWKK

SEQ ID NO: 25650 - protein, 9 aa, Homo Sapiens
STITVDQMK

SEQ ID NO: 25651 - protein, 9 aa, Homo Sapiens
STLAVTSQK

SEQ ID NO: 25652 - protein, 9 aa, Homo Sapiens
STLESIYQR

SEQ ID NO: 25653 - protein, 9 aa, Homo Sapiens
STLGHCVLK

SEQ ID NO: 25654 - protein, 9 aa, Homo Sapiens
STLHHVLQR

SEQ ID NO: 25655 - protein, 9 aa, Homo Sapiens
STLLNPIPK

SEQ ID NO: 25656 - protein, 9 aa, Homo Sapiens
STLMSLPTK

SEQ ID NO: 25657 - protein, 9 aa, Homo Sapiens
STLNVGVNK

SEQ ID NO: 25658 - protein, 9 aa, Homo Sapiens
STLPKPVQK

SEQ ID NO: 25659 - protein, 9 aa, Homo Sapiens
STLPKSLLK

SEQ ID NO: 25660 - protein, 9 aa, Homo Sapiens
STLPPVKSK

SEQ ID NO: 25661 - protein, 9 aa, Homo Sapiens
STLPVTVKK

SEQ ID NO: 25662 - protein, 9 aa, Homo Sapiens
STLRDLIFK

SEQ ID NO: 25663 - protein, 9 aa, Homo Sapiens
STLSPIAPR

SEQ ID NO: 25664 - protein, 9 aa, Homo Sapiens
STLSTVISK

SEQ ID NO: 25665 - protein, 9 aa, Homo Sapiens
STLTGVWKK

SEQ ID NO: 25666 - protein, 9 aa, Homo Sapiens
STLTPKIQK

SEQ ID NO: 25667 - protein, 9 aa, Homo Sapiens
STMAIIVNK

SEQ ID NO: 25668 - protein, 9 aa, Homo Sapiens
STMDLVKSK

SEQ ID NO: 25669 - protein, 9 aa, Homo Sapiens
STMEKFFEH

SEQ ID NO: 25670 - protein, 9 aa, Homo Sapiens
STMGYMAAK

SEQ ID NO: 25671 - protein, 9 aa, Homo Sapiens
STMGYMMAK

SEQ ID NO: 25672 - protein, 9 aa, Homo Sapiens
STMPGLPTR

SEQ ID NO: 25673 - protein, 9 aa, Homo Sapiens
STNNWVLIK

SEQ ID NO: 25674 - protein, 9 aa, Homo Sapiens
STNPFRPQK

SEQ ID NO: 25675 - protein, 9 aa, Homo Sapiens
STNSFALNK

SEQ ID NO: 25676 - protein, 9 aa, Homo Sapiens
STNWSDVGK

SEQ ID NO: 25677 - protein, 9 aa, Homo Sapiens
STPETPLTK

SEQ ID NO: 25678 - protein, 9 aa, Homo Sapiens
STPSFSSPK

SEQ ID NO: 25679 - protein, 9 aa, Homo Sapiens
STQPENFLK

SEQ ID NO: 25680 - protein, 9 aa, Homo Sapiens
STQQLQEVK

SEQ ID NO: 25681 - protein, 9 aa, Homo Sapiens
STSCPVVQK

SEQ ID NO: 25682 - protein, 9 aa, Homo Sapiens
STSDSVRLK

SEQ ID NO: 25683 - protein, 9 aa, Homo Sapiens
STSENITQK

SEQ ID NO: 25684 - protein, 9 aa, Homo Sapiens
STSEPLSSK

SEQ ID NO: 25685 - protein, 9 aa, Homo Sapiens
STSLVVPEK

SEQ ID NO: 25686 - protein, 9 aa, Homo Sapiens
STSNSFNLK

SEQ ID NO: 25687 - protein, 9 aa, Homo Sapiens
STSPEIFRK

SEQ ID NO: 25688 - protein, 9 aa, Homo Sapiens
STSPYFLEH

SEQ ID NO: 25689 - protein, 9 aa, Homo Sapiens
STSRVRLFY

SEQ ID NO: 25690 - protein, 9 aa, Homo Sapiens
STSSHCLLY

SEQ ID NO: 25691 - protein, 9 aa, Homo Sapiens
STTRLYLRK

SEQ ID NO: 25692 - protein, 9 aa, Homo Sapiens
STTTTQITK

SEQ ID NO: 25693 - protein, 9 aa, Homo Sapiens
STVEAFFKK

SEQ ID NO: 25694 - protein, 9 aa, Homo Sapiens
STVEKIAMK

SEQ ID NO: 25695 - protein, 9 aa, Homo Sapiens
STVGWASQK

SEQ ID NO: 25696 - protein, 9 aa, Homo Sapiens
STVHEILCK

SEQ ID NO: 25697 - protein, 9 aa, Homo Sapiens
STVLPLYAK

SEQ ID NO: 25698 - protein, 9 aa, Homo Sapiens
STVPPSLRK

SEQ ID NO: 25699 - protein, 9 aa, Homo Sapiens
STVSRFFLY

SEQ ID NO: 25700 - protein, 9 aa, Homo Sapiens
STYFERCLK

SEQ ID NO: 25701 - protein, 9 aa, Homo Sapiens
STYFKKLFK

SEQ ID NO: 25702 - protein, 9 aa, Homo Sapiens
STYKEAFRK

SEQ ID NO: 25703 - protein, 9 aa, Homo Sapiens
SVAALPVCK

SEQ ID NO: 25704 - protein, 9 aa, Homo Sapiens
SVAAPITVR

SEQ ID NO: 25705 - protein, 9 aa, Homo Sapiens
SVAECQLMK

SEQ ID NO: 25706 - protein, 9 aa, Homo Sapiens
SVAGIFNYY

SEQ ID NO: 25707 - protein, 9 aa, Homo Sapiens
SVAKIAQYK

SEQ ID NO: 25708 - protein, 9 aa, Homo Sapiens
SVAKNFFTK

SEQ ID NO: 25709 - protein, 9 aa, Homo Sapiens
SVAKTILKR

SEQ ID NO: 25710 - protein, 9 aa, Homo Sapiens
SVAQCQLMK

SEQ ID NO: 25711 - protein, 9 aa, Homo Sapiens
SVAQLLLSK

SEQ ID NO: 25712 - protein, 9 aa, Homo Sapiens
SVASPFTSK

SEQ ID NO: 25713 - protein, 9 aa, Homo Sapiens
SVATVVYLR

SEQ ID NO: 25714 - protein, 9 aa, Homo Sapiens
SVCFPTSNK

SEQ ID NO: 25715 - protein, 9 aa, Homo Sapiens
SVCGKSFHR

SEQ ID NO: 25716 - protein, 9 aa, Homo Sapiens
SVCGKVFLR

SEQ ID NO: 25717 - protein, 9 aa, Homo Sapiens
SVCVLDLRK

SEQ ID NO: 25718 - protein, 9 aa, Homo Sapiens
SVDKIVIQK

SEQ ID NO: 25719 - protein, 9 aa, Homo Sapiens
SVDLPKHAK

SEQ ID NO: 25720 - protein, 9 aa, Homo Sapiens
SVDPKNYPK

SEQ ID NO: 25721 - protein, 9 aa, Homo Sapiens
SVDPNQYYK

SEQ ID NO: 25722 - protein, 9 aa, Homo Sapiens
SVDRPIIDR

SEQ ID NO: 25723 - protein, 9 aa, Homo Sapiens
SVEEFQVFK

SEQ ID NO: 25724 - protein, 9 aa, Homo Sapiens
SVEIVPICK

SEQ ID NO: 25725 - protein, 9 aa, Homo Sapiens
SVELPIVGK

SEQ ID NO: 25726 - protein, 9 aa, Homo Sapiens
SVEMPLTGK

SEQ ID NO: 25727 - protein, 9 aa, Homo Sapiens
SVESIISPK

SEQ ID NO: 25728 - protein, 9 aa, Homo Sapiens
SVFACPILR

SEQ ID NO: 25729 - protein, 9 aa, Homo Sapiens
SVFAFGENK

SEQ ID NO: 25730 - protein, 9 aa, Homo Sapiens
SVFDFFLEK

SEQ ID NO: 25731 - protein, 9 aa, Homo Sapiens
SVFEKYFQF

SEQ ID NO: 25732 - protein, 9 aa, Homo Sapiens
SVFELTFKR

SEQ ID NO: 25733 - protein, 9 aa, Homo Sapiens
SVFESLIAK

SEQ ID NO: 25734 - protein, 9 aa, Homo Sapiens
SVFGTMPLK

SEQ ID NO: 25735 - protein, 9 aa, Homo Sapiens
SVFKELLGK

SEQ ID NO: 25736 - protein, 9 aa, Homo Sapiens
SVFLALPCK

SEQ ID NO: 25737 - protein, 9 aa, Homo Sapiens
SVFNHAIRH

SEQ ID NO: 25738 - protein, 9 aa, Homo Sapiens
SVFQTTDTK

SEQ ID NO: 25739 - protein, 9 aa, Homo Sapiens
SVFTSVRQK

SEQ ID NO: 25740 - protein, 9 aa, Homo Sapiens
SVFVATFLR

SEQ ID NO: 25741 - protein, 9 aa, Homo Sapiens
SVGMYLISK

SEQ ID NO: 25742 - protein, 9 aa, Homo Sapiens
SVGQTVITK

SEQ ID NO: 25743 - protein, 9 aa, Homo Sapiens
SVGSVITKK

SEQ ID NO: 25744 - protein, 9 aa, Homo Sapiens
SVHWFPVQK

SEQ ID NO: 25745 - protein, 9 aa, Homo Sapiens
SVIAKYPHK

SEQ ID NO: 25746 - protein, 9 aa, Homo Sapiens
SVIDSVTKK

SEQ ID NO: 25747 - protein, 9 aa, Homo Sapiens
SVIELTCTK

SEQ ID NO: 25748 - protein, 9 aa, Homo Sapiens
SVIEQILHY

SEQ ID NO: 25749 - protein, 9 aa, Homo Sapiens
SVIKNVSTK

SEQ ID NO: 25750 - protein, 9 aa, Homo Sapiens
SVIKPFEEK

SEQ ID NO: 25751 - protein, 9 aa, Homo Sapiens
SVILPILKK

SEQ ID NO: 25752 - protein, 9 aa, Homo Sapiens
SVINKVTEK

SEQ ID NO: 25753 - protein, 9 aa, Homo Sapiens
SVINVFVGR

SEQ ID NO: 25754 - protein, 9 aa, Homo Sapiens
SVIPEHPKK

SEQ ID NO: 25755 - protein, 9 aa, Homo Sapiens
SVIPNCQFR

SEQ ID NO: 25756 - protein, 9 aa, Homo Sapiens
SVIRPILKR

SEQ ID NO: 25757 - protein, 9 aa, Homo Sapiens
SVISSPLLK

SEQ ID NO: 25758 - protein, 9 aa, Homo Sapiens
SVITIVKSK

SEQ ID NO: 25759 - protein, 9 aa, Homo Sapiens
SVITQVLNK

SEQ ID NO: 25760 - protein, 9 aa, Homo Sapiens
SVIVQPFSK

SEQ ID NO: 25761 - protein, 9 aa, Homo Sapiens
SVKDYCFAR

SEQ ID NO: 25762 - protein, 9 aa, Homo Sapiens
SVLAETIKK

SEQ ID NO: 25763 - protein, 9 aa, Homo Sapiens
SVLDIETRK

SEQ ID NO: 25764 - protein, 9 aa, Homo Sapiens
SVLDKSLTK

SEQ ID NO: 25765 - protein, 9 aa, Homo Sapiens
SVLDLSVHK

SEQ ID NO: 25766 - protein, 9 aa, Homo Sapiens
SVLDSFLKY

SEQ ID NO: 25767 - protein, 9 aa, Homo Sapiens
SVLDVRSLK

SEQ ID NO: 25768 - protein, 9 aa, Homo Sapiens
SVLDYFSER

SEQ ID NO: 25769 - protein, 9 aa, Homo Sapiens
SVLENFVGR

SEQ ID NO: 25770 - protein, 9 aa, Homo Sapiens
SVLEPGTAK

SEQ ID NO: 25771 - protein, 9 aa, Homo Sapiens
SVLEQSFLR

SEQ ID NO: 25772 - protein, 9 aa, Homo Sapiens
SVLESVKEK

SEQ ID NO: 25773 - protein, 9 aa, Homo Sapiens
SVLEVVSEK

SEQ ID NO: 25774 - protein, 9 aa, Homo Sapiens
SVLGQAMEK

SEQ ID NO: 25775 - protein, 9 aa, Homo Sapiens
SVLHGMVFK

SEQ ID NO: 25776 - protein, 9 aa, Homo Sapiens
SVLIIAWKF

SEQ ID NO: 25777 - protein, 9 aa, Homo Sapiens
SVLLFVTKK

SEQ ID NO: 25778 - protein, 9 aa, Homo Sapiens
SVLNFATNR

SEQ ID NO: 25779 - protein, 9 aa, Homo Sapiens
SVLNIPMAK

SEQ ID NO: 25780 - protein, 9 aa, Homo Sapiens
SVLNLVIVK

SEQ ID NO: 25781 - protein, 9 aa, Homo Sapiens
SVLPFQIYY

SEQ ID NO: 25782 - protein, 9 aa, Homo Sapiens
SVLPWIILH

SEQ ID NO: 25783 - protein, 9 aa, Homo Sapiens
SVLRELFKK

SEQ ID NO: 25784 - protein, 9 aa, Homo Sapiens
SVLSPLLNK

SEQ ID NO: 25785 - protein, 9 aa, Homo Sapiens
SVLSYTSVR

SEQ ID NO: 25786 - protein, 9 aa, Homo Sapiens
SVLTPLLLR

SEQ ID NO: 25787 - protein, 9 aa, Homo Sapiens
SVLWPWINR

SEQ ID NO: 25788 - protein, 9 aa, Homo Sapiens
SVMAQVRQK

SEQ ID NO: 25789 - protein, 9 aa, Homo Sapiens
SVMDHHFRK

SEQ ID NO: 25790 - protein, 9 aa, Homo Sapiens
SVMELARLK

SEQ ID NO: 25791 - protein, 9 aa, Homo Sapiens
SVMGPQEKK

SEQ ID NO: 25792 - protein, 9 aa, Homo Sapiens
SVMGVTVSR

SEQ ID NO: 25793 - protein, 9 aa, Homo Sapiens
SVMRLTISY

SEQ ID NO: 25794 - protein, 9 aa, Homo Sapiens
SVNGIIFVH

SEQ ID NO: 25795 - protein, 9 aa, Homo Sapiens
SVNGKVLSK

SEQ ID NO: 25796 - protein, 9 aa, Homo Sapiens
SVNLKVSPK

SEQ ID NO: 25797 - protein, 9 aa, Homo Sapiens
SVNNPILRK

SEQ ID NO: 25798 - protein, 9 aa, Homo Sapiens
SVNNSIFYR

SEQ ID NO: 25799 - protein, 9 aa, Homo Sapiens
SVNPNCYAK

SEQ ID NO: 25800 - protein, 9 aa, Homo Sapiens
SVNSHIYQR

SEQ ID NO: 25801 - protein, 9 aa, Homo Sapiens
SVPLPISHK

SEQ ID NO: 25802 - protein, 9 aa, Homo Sapiens
SVPSTPIAH

SEQ ID NO: 25803 - protein, 9 aa, Homo Sapiens
SVPTHCLLH

SEQ ID NO: 25804 - protein, 9 aa, Homo Sapiens
SVQAALKLK

SEQ ID NO: 25805 - protein, 9 aa, Homo Sapiens
SVQAPEVAK

SEQ ID NO: 25806 - protein, 9 aa, Homo Sapiens
SVQCMPVAK

SEQ ID NO: 25807 - protein, 9 aa, Homo Sapiens
SVQDGSVLK

SEQ ID NO: 25808 - protein, 9 aa, Homo Sapiens
SVQEGIKFK

SEQ ID NO: 25809 - protein, 9 aa, Homo Sapiens
SVQENIQQK

SEQ ID NO: 25810 - protein, 9 aa, Homo Sapiens
SVQEYFVRK

SEQ ID NO: 25811 - protein, 9 aa, Homo Sapiens
SVQGFFLNH

SEQ ID NO: 25812 - protein, 9 aa, Homo Sapiens
SVQGIIIYR

SEQ ID NO: 25813 - protein, 9 aa, Homo Sapiens
SVQKPKFPK

SEQ ID NO: 25814 - protein, 9 aa, Homo Sapiens
SVQKPLDYY

SEQ ID NO: 25815 - protein, 9 aa, Homo Sapiens
SVQRPGLAR

SEQ ID NO: 25816 - protein, 9 aa, Homo Sapiens
SVQVFGRKK

SEQ ID NO: 25817 - protein, 9 aa, Homo Sapiens
SVQVMALKK

SEQ ID NO: 25818 - protein, 9 aa, Homo Sapiens
SVSAVNLPK

SEQ ID NO: 25819 - protein, 9 aa, Homo Sapiens
SVSDIIRLR

SEQ ID NO: 25820 - protein, 9 aa, Homo Sapiens
SVSDLAPPR

SEQ ID NO: 25821 - protein, 9 aa, Homo Sapiens
SVSDLFNTK

SEQ ID NO: 25822 - protein, 9 aa, Homo Sapiens
SVSDQFYRY

SEQ ID NO: 25823 - protein, 9 aa, Homo Sapiens
SVSEVIEGY

SEQ ID NO: 25824 - protein, 9 aa, Homo Sapiens
SVSEVVVNR

SEQ ID NO: 25825 - protein, 9 aa, Homo Sapiens
SVSGYIYHK

SEQ ID NO: 25826 - protein, 9 aa, Homo Sapiens
SVSISSAVK

SEQ ID NO: 25827 - protein, 9 aa, Homo Sapiens
SVSKLSTPK

SEQ ID NO: 25828 - protein, 9 aa, Homo Sapiens
SVSLPSVKK

SEQ ID NO: 25829 - protein, 9 aa, Homo Sapiens
SVSLPVRKK

SEQ ID NO: 25830 - protein, 9 aa, Homo Sapiens
SVSNVVITK

SEQ ID NO: 25831 - protein, 9 aa, Homo Sapiens
SVSPVVHVR

SEQ ID NO: 25832 - protein, 9 aa, Homo Sapiens
SVSSVSTLK

SEQ ID NO: 25833 - protein, 9 aa, Homo Sapiens
SVSTHLITK

SEQ ID NO: 25834 - protein, 9 aa, Homo Sapiens
SVSTPLIIK

SEQ ID NO: 25835 - protein, 9 aa, Homo Sapiens
SVTEFSEEK

SEQ ID NO: 25836 - protein, 9 aa, Homo Sapiens
SVTNVSVAK

SEQ ID NO: 25837 - protein, 9 aa, Homo Sapiens
SVVEYLLQH

SEQ ID NO: 25838 - protein, 9 aa, Homo Sapiens
SVVGELMYK

SEQ ID NO: 25839 - protein, 9 aa, Homo Sapiens
SVVGLFLRH

SEQ ID NO: 25840 - protein, 9 aa, Homo Sapiens
SVVNSFIEK

SEQ ID NO: 25841 - protein, 9 aa, Homo Sapiens
SVVPSVILK

SEQ ID NO: 25842 - protein, 9 aa, Homo Sapiens
SVVSDILFK

SEQ ID NO: 25843 - protein, 9 aa, Homo Sapiens
SVVSSVTTK

SEQ ID NO: 25844 - protein, 9 aa, Homo Sapiens
SVWHGTLSK

SEQ ID NO: 25845 - protein, 9 aa, Homo Sapiens
SVYGDFSCK

SEQ ID NO: 25846 - protein, 9 aa, Homo Sapiens
SVYGYGVQK

SEQ ID NO: 25847 - protein, 9 aa, Homo Sapiens
SVYVLVRQK

SEQ ID NO: 25848 - protein, 9 aa, Homo Sapiens
SVYVYKVLK

SEQ ID NO: 25849 - protein, 9 aa, Homo Sapiens
TAAGTLIAK

SEQ ID NO: 25850 - protein, 9 aa, Homo Sapiens
TAFENAYLK

SEQ ID NO: 25851 - protein, 9 aa, Homo Sapiens
TAFLLDALK

SEQ ID NO: 25852 - protein, 9 aa, Homo Sapiens
TAGAQVLLR

SEQ ID NO: 25853 - protein, 9 aa, Homo Sapiens
TALDPSVLD

SEQ ID NO: 25854 - protein, 9 aa, Homo Sapiens
TAMPPGTAR

SEQ ID NO: 25855 - protein, 9 aa, Homo Sapiens
TIAASLAFK

SEQ ID NO: 25856 - protein, 9 aa, Homo Sapiens
TIDGSVNPK

SEQ ID NO: 25857 - protein, 9 aa, Homo Sapiens
TIFEERHLK

SEQ ID NO: 25858 - protein, 9 aa, Homo Sapiens
TIFGKIIRK

SEQ ID NO: 25859 - protein, 9 aa, Homo Sapiens
TIFLMGPVK

SEQ ID NO: 25860 - protein, 9 aa, Homo Sapiens
TIKEGSQLK

SEQ ID NO: 25861 - protein, 9 aa, Homo Sapiens
TILEKFKEK

SEQ ID NO: 25862 - protein, 9 aa, Homo Sapiens
TISPPLQPK

SEQ ID NO: 25863 - protein, 9 aa, Homo Sapiens
TITPVVGKK

SEQ ID NO: 25864 - protein, 9 aa, Homo Sapiens
TLAFITKTI

SEQ ID NO: 25865 - protein, 9 aa, Homo Sapiens
TLCKPLVPR

SEQ ID NO: 25866 - protein, 9 aa, Homo Sapiens
TLFYLGKRK

SEQ ID NO: 25867 - protein, 9 aa, Homo Sapiens
TLFYSEIPK

SEQ ID NO: 25868 - protein, 9 aa, Homo Sapiens
TLLDKYWTK

SEQ ID NO: 25869 - protein, 9 aa, Homo Sapiens
TQATIYVHK

SEQ ID NO: 25870 - protein, 9 aa, Homo Sapiens
TQMGPVAAK

SEQ ID NO: 25871 - protein, 9 aa, Homo Sapiens
TSALPIIQK

SEQ ID NO: 25872 - protein, 9 aa, Homo Sapiens
TSETPQPPR

SEQ ID NO: 25873 - protein, 9 aa, Homo Sapiens
TSGAAVIKQ

SEQ ID NO: 25874 - protein, 9 aa, Homo Sapiens
TSIQPGAPK

SEQ ID NO: 25875 - protein, 9 aa, Homo Sapiens
TSLDKFYRK

SEQ ID NO: 25876 - protein, 9 aa, Homo Sapiens
TSLPDFCHK

SEQ ID NO: 25877 - protein, 9 aa, Homo Sapiens
TSLPPLPFK

SEQ ID NO: 25878 - protein, 9 aa, Homo Sapiens
TSLPSAICK

SEQ ID NO: 25879 - protein, 9 aa, Homo Sapiens
TSLSVSTPK

SEQ ID NO: 25880 - protein, 9 aa, Homo Sapiens
TSPIIIHRL

SEQ ID NO: 25881 - protein, 9 aa, Homo Sapiens
TSQPFQVLK

SEQ ID NO: 25882 - protein, 9 aa, Homo Sapiens
TSSQPVIAK

SEQ ID NO: 25883 - protein, 9 aa, Homo Sapiens
TTDCPVPPK

SEQ ID NO: 25884 - protein, 9 aa, Homo Sapiens
TTFPESHLR

SEQ ID NO: 25885 - protein, 9 aa, Homo Sapiens
TTFSPSISK

SEQ ID NO: 25886 - protein, 9 aa, Homo Sapiens
TTFTKIVNK

SEQ ID NO: 25887 - protein, 9 aa, Homo Sapiens
TTGEPATPK

SEQ ID NO: 25888 - protein, 9 aa, Homo Sapiens
TTHQVYVLK

SEQ ID NO: 25889 - protein, 9 aa, Homo Sapiens
TTITSHFAK

SEQ ID NO: 25890 - protein, 9 aa, Homo Sapiens
TTLGHAVLK

SEQ ID NO: 25891 - protein, 9 aa, Homo Sapiens
TTMQALAEK

SEQ ID NO: 25892 - protein, 9 aa, Homo Sapiens
TTNDIVISK

SEQ ID NO: 25893 - protein, 9 aa, Homo Sapiens
TTQDPLSNK

SEQ ID NO: 25894 - protein, 9 aa, Homo Sapiens
TTQQQLPQK

SEQ ID NO: 25895 - protein, 9 aa, Homo Sapiens
TTSNFTFSK

SEQ ID NO: 25896 - protein, 9 aa, Homo Sapiens
TTSVITIVK

SEQ ID NO: 25897 - protein, 9 aa, Homo Sapiens
TTTEPLPEK

SEQ ID NO: 25898 - protein, 9 aa, Homo Sapiens
TTTGHLIYK

SEQ ID NO: 25899 - protein, 9 aa, Homo Sapiens
TTVDIFHKK

SEQ ID NO: 25900 - protein, 9 aa, Homo Sapiens
TTVPHVFSK

SEQ ID NO: 25901 - protein, 9 aa, Homo Sapiens
TVAKSIDLK

SEQ ID NO: 25902 - protein, 9 aa, Homo Sapiens
TVAVPLVGK

SEQ ID NO: 25903 - protein, 9 aa, Homo Sapiens
TVCDFRLSY

SEQ ID NO: 25904 - protein, 9 aa, Homo Sapiens
TVCDLIQSK

SEQ ID NO: 25905 - protein, 9 aa, Homo Sapiens
TVCLTLTAK

SEQ ID NO: 25906 - protein, 9 aa, Homo Sapiens
TVFEHTFHV

SEQ ID NO: 25907 - protein, 9 aa, Homo Sapiens
TVFENLINK

SEQ ID NO: 25908 - protein, 9 aa, Homo Sapiens
TVFGTALNY

SEQ ID NO: 25909 - protein, 9 aa, Homo Sapiens
TVFLSTWNK

SEQ ID NO: 25910 - protein, 9 aa, Homo Sapiens
TVGDVLEAK

SEQ ID NO: 25911 - protein, 9 aa, Homo Sapiens
TVHPKFHYK

SEQ ID NO: 25912 - protein, 9 aa, Homo Sapiens
TVIADICRR

SEQ ID NO: 25913 - protein, 9 aa, Homo Sapiens
TVIHFNNPK

SEQ ID NO: 25914 - protein, 9 aa, Homo Sapiens
TVILPIKKK

SEQ ID NO: 25915 - protein, 9 aa, Homo Sapiens
TVIQDGIKK

SEQ ID NO: 25916 - protein, 9 aa, Homo Sapiens
TVISLLVYK

SEQ ID NO: 25917 - protein, 9 aa, Homo Sapiens
TVLGYFIGR

SEQ ID NO: 25918 - protein, 9 aa, Homo Sapiens
TVLQYVVGR

SEQ ID NO: 25919 - protein, 9 aa, Homo Sapiens
TVLRPSLGK

SEQ ID NO: 25920 - protein, 9 aa, Homo Sapiens
TVLSKLTRK

SEQ ID NO: 25921 - protein, 9 aa, Homo Sapiens
TVMVPSLLR

SEQ ID NO: 25922 - protein, 9 aa, Homo Sapiens
TVNSPAIYK

SEQ ID NO: 25923 - protein, 9 aa, Homo Sapiens
TVNTMNLPK

SEQ ID NO: 25924 - protein, 9 aa, Homo Sapiens
TVPRRLGPK

SEQ ID NO: 25925 - protein, 9 aa, Homo Sapiens
TVQEHLIEK

SEQ ID NO: 25926 - protein, 9 aa, Homo Sapiens
TVQEKTFNK

SEQ ID NO: 25927 - protein, 9 aa, Homo Sapiens
TVQVYIITK

SEQ ID NO: 25928 - protein, 9 aa, Homo Sapiens
TVSADPVVK

SEQ ID NO: 25929 - protein, 9 aa, Homo Sapiens
TVSDAILRY

SEQ ID NO: 25930 - protein, 9 aa, Homo Sapiens
TVSEPAVIK

SEQ ID NO: 25931 - protein, 9 aa, Homo Sapiens
TVSPFAVQK

SEQ ID NO: 25932 - protein, 9 aa, Homo Sapiens
TVTAQILLK

SEQ ID NO: 25933 - protein, 9 aa, Homo Sapiens
TVTEVLLKY

SEQ ID NO: 25934 - protein, 9 aa, Homo Sapiens
TVTSYVFLK

SEQ ID NO: 25935 - protein, 9 aa, Homo Sapiens
TVVDCPVCK

SEQ ID NO: 25936 - protein, 9 aa, Homo Sapiens
TVVDFQIGK

SEQ ID NO: 25937 - protein, 9 aa, Homo Sapiens
TVYECVVEK

SEQ ID NO: 25938 - protein, 9 aa, Homo Sapiens
TVYEEMMAK

SEQ ID NO: 25939 - protein, 9 aa, Homo Sapiens
TVYRGLVQK

SEQ ID NO: 25940 - protein, 9 aa, Homo Sapiens
VAAEKSFNK

SEQ ID NO: 25941 - protein, 9 aa, Homo Sapiens
VAGTPAPPK

SEQ ID NO: 25942 - protein, 9 aa, Homo Sapiens
VAIGDVYFK

SEQ ID NO: 25943 - protein, 9 aa, Homo Sapiens
VAPLPRSAL

SEQ ID NO: 25944 - protein, 9 aa, Homo Sapiens
VASTLPSRQ

SEQ ID NO: 25945 - protein, 9 aa, Homo Sapiens
VASTPISQR

SEQ ID NO: 25946 - protein, 9 aa, Homo Sapiens
VAVDVAVPK

SEQ ID NO: 25947 - protein, 9 aa, Homo Sapiens
VAVETTTPK

SEQ ID NO: 25948 - protein, 9 aa, Homo Sapiens
VAVPLPLHR

SEQ ID NO: 25949 - protein, 9 aa, Homo Sapiens
VAYHQPTLK

SEQ ID NO: 25950 - protein, 9 aa, Homo Sapiens
VFRDPYRFK

SEQ ID NO: 25951 - protein, 9 aa, Homo Sapiens
VGGLDIHKK

SEQ ID NO: 25952 - protein, 9 aa, Homo Sapiens
VGIDIFTGK

SEQ ID NO: 25953 - protein, 9 aa, Homo Sapiens
VGLNVFLEK

SEQ ID NO: 25954 - protein, 9 aa, Homo Sapiens
VGVYRPPPK

SEQ ID NO: 25955 - protein, 9 aa, Homo Sapiens
VICVWKEKK

SEQ ID NO: 25956 - protein, 9 aa, Homo Sapiens
VIFCNTKRK

SEQ ID NO: 25957 - protein, 9 aa, Homo Sapiens
VIFEGFFAH

SEQ ID NO: 25958 - protein, 9 aa, Homo Sapiens
VIFIIICLR

SEQ ID NO: 25959 - protein, 9 aa, Homo Sapiens
VIFINTRRK

SEQ ID NO: 25960 - protein, 9 aa, Homo Sapiens
VIFKDFVNK

SEQ ID NO: 25961 - protein, 9 aa, Homo Sapiens
VIIAKVTAK

SEQ ID NO: 25962 - protein, 9 aa, Homo Sapiens
VILESIFLK

SEQ ID NO: 25963 - protein, 9 aa, Homo Sapiens
VILIDPFHK

SEQ ID NO: 25964 - protein, 9 aa, Homo Sapiens
VILLPQPPK

SEQ ID NO: 25965 - protein, 9 aa, Homo Sapiens
VIMNSLITK

SEQ ID NO: 25966 - protein, 9 aa, Homo Sapiens
VIQDPMGQK

SEQ ID NO: 25967 - protein, 9 aa, Homo Sapiens
VISPPTVPK

SEQ ID NO: 25968 - protein, 9 aa, Homo Sapiens
VISQVFEIK

SEQ ID NO: 25969 - protein, 9 aa, Homo Sapiens
VIYEKTIRK

SEQ ID NO: 25970 - protein, 9 aa, Homo Sapiens
VIYFPPLQK

SEQ ID NO: 25971 - protein, 9 aa, Homo Sapiens
VLAPVIDLK

SEQ ID NO: 25972 - protein, 9 aa, Homo Sapiens
VLGPTPVQK

SEQ ID NO: 25973 - protein, 9 aa, Homo Sapiens
VLKPRCLQK

SEQ ID NO: 25974 - protein, 9 aa, Homo Sapiens
VLKVLSSLK

SEQ ID NO: 25975 - protein, 9 aa, Homo Sapiens
VLQLPLCEK

SEQ ID NO: 25976 - protein, 9 aa, Homo Sapiens
VNKVPLTGK

SEQ ID NO: 25977 - protein, 9 aa, Homo Sapiens
VRMMFNLLR

SEQ ID NO: 25978 - protein, 9 aa, Homo Sapiens
VSAPNIAMK

SEQ ID NO: 25979 - protein, 9 aa, Homo Sapiens
VSFPIGIYK

SEQ ID NO: 25980 - protein, 9 aa, Homo Sapiens
VSFSDVFFK

SEQ ID NO: 25981 - protein, 9 aa, Homo Sapiens
VSGSIQVLK

SEQ ID NO: 25982 - protein, 9 aa, Homo Sapiens
VSLDYAISK

SEQ ID NO: 25983 - protein, 9 aa, Homo Sapiens
VSLGIAVSK

SEQ ID NO: 25984 - protein, 9 aa, Homo Sapiens
VSLGLVVSK

SEQ ID NO: 25985 - protein, 9 aa, Homo Sapiens
VSLGTPIMK

SEQ ID NO: 25986 - protein, 9 aa, Homo Sapiens
VSLWLPVSK

SEQ ID NO: 25987 - protein, 9 aa, Homo Sapiens
VSMDYAISK

SEQ ID NO: 25988 - protein, 9 aa, Homo Sapiens
VSMLNVYLK

SEQ ID NO: 25989 - protein, 9 aa, Homo Sapiens
VSPLATSAL

SEQ ID NO: 25990 - protein, 9 aa, Homo Sapiens
VSQEPFPNK

SEQ ID NO: 25991 - protein, 9 aa, Homo Sapiens
VSQLPLTER

SEQ ID NO: 25992 - protein, 9 aa, Homo Sapiens
VSSPKLAPK

SEQ ID NO: 25993 - protein, 9 aa, Homo Sapiens
VSSWLPLAK

SEQ ID NO: 25994 - protein, 9 aa, Homo Sapiens
VSYVGYFTK

SEQ ID NO: 25995 - protein, 9 aa, Homo Sapiens
VTAPPARNR

SEQ ID NO: 25996 - protein, 9 aa, Homo Sapiens
VTCNFIILR

SEQ ID NO: 25997 - protein, 9 aa, Homo Sapiens
VTDSPRILK

SEQ ID NO: 25998 - protein, 9 aa, Homo Sapiens
VTFEKQWFY

SEQ ID NO: 25999 - protein, 9 aa, Homo Sapiens
VTFGHSLSK

SEQ ID NO: 26000 - protein, 9 aa, Homo Sapiens
VTFVPGLYK

SEQ ID NO: 26001 - protein, 9 aa, Homo Sapiens
VTGPNMGGK

SEQ ID NO: 26002 - protein, 9 aa, Homo Sapiens
VTIIFIYEK

SEQ ID NO: 26003 - protein, 9 aa, Homo Sapiens
VTISFRIYK

SEQ ID NO: 26004 - protein, 9 aa, Homo Sapiens
VTISSIEKK

SEQ ID NO: 26005 - protein, 9 aa, Homo Sapiens
VTISSVEKK

SEQ ID NO: 26006 - protein, 9 aa, Homo Sapiens
VTLDQVLLR

SEQ ID NO: 26007 - protein, 9 aa, Homo Sapiens
VTLELAVYK

SEQ ID NO: 26008 - protein, 9 aa, Homo Sapiens
VTLTTQHVK

SEQ ID NO: 26009 - protein, 9 aa, Homo Sapiens
VTMKQICKK

SEQ ID NO: 26010 - protein, 9 aa, Homo Sapiens
VTMPATETK

SEQ ID NO: 26011 - protein, 9 aa, Homo Sapiens
VTNDFVMLK

SEQ ID NO: 26012 - protein, 9 aa, Homo Sapiens
VTNNVIRLK

SEQ ID NO: 26013 - protein, 9 aa, Homo Sapiens
VTNQPVTPK

SEQ ID NO: 26014 - protein, 9 aa, Homo Sapiens
VTQAPISAR

SEQ ID NO: 26015 - protein, 9 aa, Homo Sapiens
VTSEVPFSK

SEQ ID NO: 26016 - protein, 9 aa, Homo Sapiens
VTSTFIIEK

SEQ ID NO: 26017 - protein, 9 aa, Homo Sapiens
VTSTSLTIK

SEQ ID NO: 26018 - protein, 9 aa, Homo Sapiens
VTTEKRFLK

SEQ ID NO: 26019 - protein, 9 aa, Homo Sapiens
VTTEPSSLK

SEQ ID NO: 26020 - protein, 9 aa, Homo Sapiens
VTVSGGTPK

SEQ ID NO: 26021 - protein, 9 aa, Homo Sapiens
VTWGFPNLK

SEQ ID NO: 26022 - protein, 9 aa, Homo Sapiens
VTYEHLITK

SEQ ID NO: 26023 - protein, 9 aa, Homo Sapiens
VVAAVIWRK

SEQ ID NO: 26024 - protein, 9 aa, Homo Sapiens
VVAAVMWRK

SEQ ID NO: 26025 - protein, 9 aa, Homo Sapiens
VVADISVAK

SEQ ID NO: 26026 - protein, 9 aa, Homo Sapiens
VVAPPGAPK

SEQ ID NO: 26027 - protein, 9 aa, Homo Sapiens
VVAPRLNSR

SEQ ID NO: 26028 - protein, 9 aa, Homo Sapiens
VVAQEPLHR

SEQ ID NO: 26029 - protein, 9 aa, Homo Sapiens
VVAVPLPLH

SEQ ID NO: 26030 - protein, 9 aa, Homo Sapiens
VVCEEPQVK

SEQ ID NO: 26031 - protein, 9 aa, Homo Sapiens
VVCEYIVKK

SEQ ID NO: 26032 - protein, 9 aa, Homo Sapiens
VVCGTPLFK

SEQ ID NO: 26033 - protein, 9 aa, Homo Sapiens
VVDIPIVEK

SEQ ID NO: 26034 - protein, 9 aa, Homo Sapiens
VVDPHSFPR

SEQ ID NO: 26035 - protein, 9 aa, Homo Sapiens
VVDPVVREK

SEQ ID NO: 26036 - protein, 9 aa, Homo Sapiens
VVDQPLPVR

SEQ ID NO: 26037 - protein, 9 aa, Homo Sapiens
VVDYPNSAK

SEQ ID NO: 26038 - protein, 9 aa, Homo Sapiens
VVFEKAIQR

SEQ ID NO: 26039 - protein, 9 aa, Homo Sapiens
VVFVTKFLY

SEQ ID NO: 26040 - protein, 9 aa, Homo Sapiens
VVGAVVFQK

SEQ ID NO: 26041 - protein, 9 aa, Homo Sapiens
VVGLPNVGK

SEQ ID NO: 26042 - protein, 9 aa, Homo Sapiens
VVGPAAEAK

SEQ ID NO: 26043 - protein, 9 aa, Homo Sapiens
VVGPVGAGK

SEQ ID NO: 26044 - protein, 9 aa, Homo Sapiens
VVGPVSLPR

SEQ ID NO: 26045 - protein, 9 aa, Homo Sapiens
VVIGTPTLK

SEQ ID NO: 26046 - protein, 9 aa, Homo Sapiens
VVINFDFPK

SEQ ID NO: 26047 - protein, 9 aa, Homo Sapiens
VVINYSIVK

SEQ ID NO: 26048 - protein, 9 aa, Homo Sapiens
VVLTYIYFK

SEQ ID NO: 26049 - protein, 9 aa, Homo Sapiens
VVLYPLVAK

SEQ ID NO: 26050 - protein, 9 aa, Homo Sapiens
VVMLESPPK

SEQ ID NO: 26051 - protein, 9 aa, Homo Sapiens
VVMRDPASK

SEQ ID NO: 26052 - protein, 9 aa, Homo Sapiens
VVMRDPNTK

SEQ ID NO: 26053 - protein, 9 aa, Homo Sapiens
VVMRDPQTK

SEQ ID NO: 26054 - protein, 9 aa, Homo Sapiens
VVNSYPLAH

SEQ ID NO: 26055 - protein, 9 aa, Homo Sapiens
VVQEVLSIK

SEQ ID NO: 26056 - protein, 9 aa, Homo Sapiens
VVSEKQFSK

SEQ ID NO: 26057 - protein, 9 aa, Homo Sapiens
VVSEVDIAK

SEQ ID NO: 26058 - protein, 9 aa, Homo Sapiens
VVTEHLINK

SEQ ID NO: 26059 - protein, 9 aa, Homo Sapiens
VVVVNPQTK

SEQ ID NO: 26060 - protein, 9 aa, Homo Sapiens
VVYEFSTTK

SEQ ID NO: 26061 - protein, 9 aa, Homo Sapiens
VVYQYWNTK

SEQ ID NO: 26062 - protein, 9 aa, Homo Sapiens
YDHQGIFKR

SEQ ID NO: 26063 - protein, 9 aa, Homo Sapiens
YDRPGASPK

SEQ ID NO: 26064 - protein, 9 aa, Homo Sapiens
YEGHVSCVK

SEQ ID NO: 26065 - protein, 9 aa, Homo Sapiens
YFGIYDTAK

SEQ ID NO: 26066 - protein, 9 aa, Homo Sapiens
YIIKEHFEK

SEQ ID NO: 26067 - protein, 9 aa, Homo Sapiens
YILSPLSYK

SEQ ID NO: 26068 - protein, 9 aa, Homo Sapiens
YIVPPAPEK

SEQ ID NO: 26069 - protein, 9 aa, Homo Sapiens
YLSTCKDSK

SEQ ID NO: 26070 - protein, 9 aa, Homo Sapiens
YLYITKVLK

SEQ ID NO: 26071 - protein, 9 aa, Homo Sapiens
YRPSKNLDK

SEQ ID NO: 26072 - protein, 9 aa, Homo Sapiens
YSFSYKHLK

SEQ ID NO: 26073 - protein, 10 aa, Homo Sapiens
AAAAAATAKR

SEQ ID NO: 26074 - protein, 10 aa, Homo Sapiens
AAFDGGFTVK

SEQ ID NO: 26075 - protein, 10 aa, Homo Sapiens
AAIVAYGLYK

SEQ ID NO: 26076 - protein, 10 aa, Homo Sapiens
AAMKPANLKK

SEQ ID NO: 26077 - protein, 10 aa, Homo Sapiens
AAMLDTVVFK

SEQ ID NO: 26078 - protein, 10 aa, Homo Sapiens
AAQGIGRAFA

SEQ ID NO: 26079 - protein, 10 aa, Homo Sapiens
AAQRGLAVLK

SEQ ID NO: 26080 - protein, 10 aa, Homo Sapiens
AATTPLDVCK

SEQ ID NO: 26081 - protein, 10 aa, Homo Sapiens
AAYAARWVAK

SEQ ID NO: 26082 - protein, 10 aa, Homo Sapiens
ACTMLVSSLR

SEQ ID NO: 26083 - protein, 10 aa, Homo Sapiens
AGDGLIELRK

SEQ ID NO: 26084 - protein, 10 aa, Homo Sapiens
AGFPSIPVGK

SEQ ID NO: 26085 - protein, 10 aa, Homo Sapiens
AGMTGYGMPR

SEQ ID NO: 26086 - protein, 10 aa, Homo Sapiens
AIETMPCVKK

SEQ ID NO: 26087 - protein, 10 aa, Homo Sapiens
AIFKGVFVHR

SEQ ID NO: 26088 - protein, 10 aa, Homo Sapiens
AIFPATFCQK

SEQ ID NO: 26089 - protein, 10 aa, Homo Sapiens
AIFPRAFPKK

SEQ ID NO: 26090 - protein, 10 aa, Homo Sapiens
AIFQEGIQQK

SEQ ID NO: 26091 - protein, 10 aa, Homo Sapiens
AIIDHIFASK

SEQ ID NO: 26092 - protein, 10 aa, Homo Sapiens
AIITPPPAKK

SEQ ID NO: 26093 - protein, 10 aa, Homo Sapiens
AIIVGSIITK

SEQ ID NO: 26094 - protein, 10 aa, Homo Sapiens
AINVNDSVTK

SEQ ID NO: 26095 - protein, 10 aa, Homo Sapiens
AIQDAVGPPK

SEQ ID NO: 26096 - protein, 10 aa, Homo Sapiens
AIQNPTMINK

SEQ ID NO: 26097 - protein, 10 aa, Homo Sapiens
AIYATIPVYK

SEQ ID NO: 26098 - protein, 10 aa, Homo Sapiens
AIYDHINEGK

SEQ ID NO: 26099 - protein, 10 aa, Homo Sapiens
ALADFLPVMK

SEQ ID NO: 26100 - protein, 10 aa, Homo Sapiens
ALFKGDNLPK

SEQ ID NO: 26101 - protein, 10 aa, Homo Sapiens
ALFSWDTVFK

SEQ ID NO: 26102 - protein, 10 aa, Homo Sapiens
ALPDAAPVTK

SEQ ID NO: 26103 - protein, 10 aa, Homo Sapiens
ALPRQAFHSK

SEQ ID NO: 26104 - protein, 10 aa, Homo Sapiens
AQAKFPAVKK

SEQ ID NO: 26105 - protein, 10 aa, Homo Sapiens
AQAQEVFFLK

SEQ ID NO: 26106 - protein, 10 aa, Homo Sapiens
AQARPPGIYK

SEQ ID NO: 26107 - protein, 10 aa, Homo Sapiens
AQCPFLGPPR

SEQ ID NO: 26108 - protein, 10 aa, Homo Sapiens
AQIDIVISNK

SEQ ID NO: 26109 - protein, 10 aa, Homo Sapiens
AQKFPFNTPK

SEQ ID NO: 26110 - protein, 10 aa, Homo Sapiens
AQMRAAINQK

SEQ ID NO: 26111 - protein, 10 aa, Homo Sapiens
AQNNPLPKGK

SEQ ID NO: 26112 - protein, 10 aa, Homo Sapiens
AQNSVIIVDK

SEQ ID NO: 26113 - protein, 10 aa, Homo Sapiens
AQYQFTGIKK

SEQ ID NO: 26114 - protein, 10 aa, Homo Sapiens
ASAAAALVLK

SEQ ID NO: 26115 - protein, 10 aa, Homo Sapiens
ASAAGLLYLH

SEQ ID NO: 26116 - protein, 10 aa, Homo Sapiens
ASADISLERL

SEQ ID NO: 26117 - protein, 10 aa, Homo Sapiens
ASAHFSPVLR

SEQ ID NO: 26118 - protein, 10 aa, Homo Sapiens
ASALPTGSPK

SEQ ID NO: 26119 - protein, 10 aa, Homo Sapiens
ASASASLPTK

SEQ ID NO: 26120 - protein, 10 aa, Homo Sapiens
ASCVPVNNPK

SEQ ID NO: 26121 - protein, 10 aa, Homo Sapiens
ASFDGRISVY

SEQ ID NO: 26122 - protein, 10 aa, Homo Sapiens
ASFDGTFLWK

SEQ ID NO: 26123 - protein, 10 aa, Homo Sapiens
ASFDKAKLKK

SEQ ID NO: 26124 - protein, 10 aa, Homo Sapiens
ASFGSAAPPR

SEQ ID NO: 26125 - protein, 10 aa, Homo Sapiens
ASFPKVFIKK

SEQ ID NO: 26126 - protein, 10 aa, Homo Sapiens
ASFYSVSQPK

SEQ ID NO: 26127 - protein, 10 aa, Homo Sapiens
ASIAAAVAPK

SEQ ID NO: 26128 - protein, 10 aa, Homo Sapiens
ASILPSSWIG

SEQ ID NO: 26129 - protein, 10 aa, Homo Sapiens
ASIQHPLIKK

SEQ ID NO: 26130 - protein, 10 aa, Homo Sapiens
ASIQPSKVGK

SEQ ID NO: 26131 - protein, 10 aa, Homo Sapiens
ASLELPAAKK

SEQ ID NO: 26132 - protein, 10 aa, Homo Sapiens
ASLIDLLVSK

SEQ ID NO: 26133 - protein, 10 aa, Homo Sapiens
ASLMHSFILK

SEQ ID NO: 26134 - protein, 10 aa, Homo Sapiens
ASLVGQTSPK

SEQ ID NO: 26135 - protein, 10 aa, Homo Sapiens
ASMRYTPVGR

SEQ ID NO: 26136 - protein, 10 aa, Homo Sapiens
ASNPCGNIQR

SEQ ID NO: 26137 - protein, 10 aa, Homo Sapiens
ASQCGSLIGK

SEQ ID NO: 26138 - protein, 10 aa, Homo Sapiens
ASQDIIPQLK

SEQ ID NO: 26139 - protein, 10 aa, Homo Sapiens
ASSAPPLTGK

SEQ ID NO: 26140 - protein, 10 aa, Homo Sapiens
ASSARTQNLK

SEQ ID NO: 26141 - protein, 10 aa, Homo Sapiens
ASSGVPNPPK

SEQ ID NO: 26142 - protein, 10 aa, Homo Sapiens
ASSIFVAPRK

SEQ ID NO: 26143 - protein, 10 aa, Homo Sapiens
ASSLQQASLK

SEQ ID NO: 26144 - protein, 10 aa, Homo Sapiens
ASSTIVPSLK

SEQ ID NO: 26145 - protein, 10 aa, Homo Sapiens
ASVAVPKKPE

SEQ ID NO: 26146 - protein, 10 aa, Homo Sapiens
ASVFGTMPLK

SEQ ID NO: 26147 - protein, 10 aa, Homo Sapiens
ASVPYPPLLR

SEQ ID NO: 26148 - protein, 10 aa, Homo Sapiens
ASYAAVPLYR

SEQ ID NO: 26149 - protein, 10 aa, Homo Sapiens
ASYATIILSK

SEQ ID NO: 26150 - protein, 10 aa, Homo Sapiens
ASYMGKENLK

SEQ ID NO: 26151 - protein, 10 aa, Homo Sapiens
ATAAVTAAVK

SEQ ID NO: 26152 - protein, 10 aa, Homo Sapiens
ATAEVLNIGK

SEQ ID NO: 26153 - protein, 10 aa, Homo Sapiens
ATAGIIGVNR

SEQ ID NO: 26154 - protein, 10 aa, Homo Sapiens
ATAIGMPVEK

SEQ ID NO: 26155 - protein, 10 aa, Homo Sapiens
ATALGEQPVK

SEQ ID NO: 26156 - protein, 10 aa, Homo Sapiens
ATALPTGTSK

SEQ ID NO: 26157 - protein, 10 aa, Homo Sapiens
ATAMLQSLLK

SEQ ID NO: 26158 - protein, 10 aa, Homo Sapiens
ATANMLGIRK

SEQ ID NO: 26159 - protein, 10 aa, Homo Sapiens
ATAPLTELLH

SEQ ID NO: 26160 - protein, 10 aa, Homo Sapiens
ATAPPAPAYK

SEQ ID NO: 26161 - protein, 10 aa, Homo Sapiens
ATAQFKINKK

SEQ ID NO: 26162 - protein, 10 aa, Homo Sapiens
ATAQVNPLYK

SEQ ID NO: 26163 - protein, 10 aa, Homo Sapiens
ATASLGVIHK

SEQ ID NO: 26164 - protein, 10 aa, Homo Sapiens
ATATGTEILK

SEQ ID NO: 26165 - protein, 10 aa, Homo Sapiens
ATAYLPMLEK

SEQ ID NO: 26166 - protein, 10 aa, Homo Sapiens
ATCDFPLLNR

SEQ ID NO: 26167 - protein, 10 aa, Homo Sapiens
ATCDHPYIVK

SEQ ID NO: 26168 - protein, 10 aa, Homo Sapiens
ATCLPLSVRR

SEQ ID NO: 26169 - protein, 10 aa, Homo Sapiens
ATDAVGIVLK

SEQ ID NO: 26170 - protein, 10 aa, Homo Sapiens
ATDFAPGFQK

SEQ ID NO: 26171 - protein, 10 aa, Homo Sapiens
ATEGPNIVCK

SEQ ID NO: 26172 - protein, 10 aa, Homo Sapiens
ATFDIWKFRK

SEQ ID NO: 26173 - protein, 10 aa, Homo Sapiens
ATFEKIPFER

SEQ ID NO: 26174 - protein, 10 aa, Homo Sapiens
ATFFEIYSGK

SEQ ID NO: 26175 - protein, 10 aa, Homo Sapiens
ATFPLSVQKF

SEQ ID NO: 26176 - protein, 10 aa, Homo Sapiens
ATFPSSAFLR

SEQ ID NO: 26177 - protein, 10 aa, Homo Sapiens
ATFQFTVERF

SEQ ID NO: 26178 - protein, 10 aa, Homo Sapiens
ATFTNVFGKK

SEQ ID NO: 26179 - protein, 10 aa, Homo Sapiens
ATFTYFYKKF

SEQ ID NO: 26180 - protein, 10 aa, Homo Sapiens
ATGDMSGLLK

SEQ ID NO: 26181 - protein, 10 aa, Homo Sapiens
ATGESIAVKK

SEQ ID NO: 26182 - protein, 10 aa, Homo Sapiens
ATGKWKQISK

SEQ ID NO: 26183 - protein, 10 aa, Homo Sapiens
ATGQWTRFKK

SEQ ID NO: 26184 - protein, 10 aa, Homo Sapiens
ATGSWDSFLK

SEQ ID NO: 26185 - protein, 10 aa, Homo Sapiens
ATIDGSVNPK

SEQ ID NO: 26186 - protein, 10 aa, Homo Sapiens
ATIRNVLREK

SEQ ID NO: 26187 - protein, 10 aa, Homo Sapiens
ATITDKELLK

SEQ ID NO: 26188 - protein, 10 aa, Homo Sapiens
ATKMNELMEK

SEQ ID NO: 26189 - protein, 10 aa, Homo Sapiens
ATLDIDGVRK

SEQ ID NO: 26190 - protein, 10 aa, Homo Sapiens
ATLEETLVKK

SEQ ID NO: 26191 - protein, 10 aa, Homo Sapiens
ATLGAILNRL

SEQ ID NO: 26192 - protein, 10 aa, Homo Sapiens
ATLGLVDIVK

SEQ ID NO: 26193 - protein, 10 aa, Homo Sapiens
ATLGSGNLRQ

SEQ ID NO: 26194 - protein, 10 aa, Homo Sapiens
ATLKWILENK

SEQ ID NO: 26195 - protein, 10 aa, Homo Sapiens
ATLLPDLIQK

SEQ ID NO: 26196 - protein, 10 aa, Homo Sapiens
ATLPKNPPPK

SEQ ID NO: 26197 - protein, 10 aa, Homo Sapiens
ATLPNQPVEK

SEQ ID NO: 26198 - protein, 10 aa, Homo Sapiens
ATLQDIIRRF

SEQ ID NO: 26199 - protein, 10 aa, Homo Sapiens
ATLQESTFSK

SEQ ID NO: 26200 - protein, 10 aa, Homo Sapiens
ATLSLEKLLK

SEQ ID NO: 26201 - protein, 10 aa, Homo Sapiens
ATMEKLALAK

SEQ ID NO: 26202 - protein, 10 aa, Homo Sapiens
ATMELRDQAK

SEQ ID NO: 26203 - protein, 10 aa, Homo Sapiens
ATNAAVTVLR

SEQ ID NO: 26204 - protein, 10 aa, Homo Sapiens
ATNGPPVLVK

SEQ ID NO: 26205 - protein, 10 aa, Homo Sapiens
ATNKITIIFK

SEQ ID NO: 26206 - protein, 10 aa, Homo Sapiens
ATNPESKVFY

SEQ ID NO: 26207 - protein, 10 aa, Homo Sapiens
ATNTVYVFAK

SEQ ID NO: 26208 - protein, 10 aa, Homo Sapiens
ATPELGSSLK

SEQ ID NO: 26209 - protein, 10 aa, Homo Sapiens
ATPEQVGKMK

SEQ ID NO: 26210 - protein, 10 aa, Homo Sapiens
ATPLDFPSKK

SEQ ID NO: 26211 - protein, 10 aa, Homo Sapiens
ATPLSTLSLK

SEQ ID NO: 26212 - protein, 10 aa, Homo Sapiens
ATPNEIFLKK

SEQ ID NO: 26213 - protein, 10 aa, Homo Sapiens
ATPTSPIRVK

SEQ ID NO: 26214 - protein, 10 aa, Homo Sapiens
ATQCGSLIGK

SEQ ID NO: 26215 - protein, 10 aa, Homo Sapiens
ATQDPPLPTR

SEQ ID NO: 26216 - protein, 10 aa, Homo Sapiens
ATQLAADLLK

SEQ ID NO: 26217 - protein, 10 aa, Homo Sapiens
ATQLLKLAHK

SEQ ID NO: 26218 - protein, 10 aa, Homo Sapiens
ATQMVRMILK

SEQ ID NO: 26219 - protein, 10 aa, Homo Sapiens
ATQNSSQFMK

SEQ ID NO: 26220 - protein, 10 aa, Homo Sapiens
ATQSLKEILK

SEQ ID NO: 26221 - protein, 10 aa, Homo Sapiens
ATQTQFFHVK

SEQ ID NO: 26222 - protein, 10 aa, Homo Sapiens
ATQVAVSVPK

SEQ ID NO: 26223 - protein, 10 aa, Homo Sapiens
ATSPIIIHRL

SEQ ID NO: 26224 - protein, 10 aa, Homo Sapiens
ATSPPFQLTK

SEQ ID NO: 26225 - protein, 10 aa, Homo Sapiens
ATSPPGAIPK

SEQ ID NO: 26226 - protein, 10 aa, Homo Sapiens
ATSSDVIEMK

SEQ ID NO: 26227 - protein, 10 aa, Homo Sapiens
ATSSGAGVFK

SEQ ID NO: 26228 - protein, 10 aa, Homo Sapiens
ATSSLDQTVK

SEQ ID NO: 26229 - protein, 10 aa, Homo Sapiens
ATSTASTFVK

SEQ ID NO: 26230 - protein, 10 aa, Homo Sapiens
ATTSNFTFSK

SEQ ID NO: 26231 - protein, 10 aa, Homo Sapiens
ATTSVITIVK

SEQ ID NO: 26232 - protein, 10 aa, Homo Sapiens
ATVAVPLVGK

SEQ ID NO: 26233 - protein, 10 aa, Homo Sapiens
ATVFPSPCQK

SEQ ID NO: 26234 - protein, 10 aa, Homo Sapiens
ATVIFVASQK

SEQ ID NO: 26235 - protein, 10 aa, Homo Sapiens
ATWATKELRK

SEQ ID NO: 26236 - protein, 10 aa, Homo Sapiens
ATYDTTLVEK

SEQ ID NO: 26237 - protein, 10 aa, Homo Sapiens
ATYEDIVTLR

SEQ ID NO: 26238 - protein, 10 aa, Homo Sapiens
ATYGSGFHFH

SEQ ID NO: 26239 - protein, 10 aa, Homo Sapiens
ATYSEDGLLK

SEQ ID NO: 26240 - protein, 10 aa, Homo Sapiens
ATYYGAFIKK

SEQ ID NO: 26241 - protein, 10 aa, Homo Sapiens
AVAALQDLRY

SEQ ID NO: 26242 - protein, 10 aa, Homo Sapiens
AVAEPANAVK

SEQ ID NO: 26243 - protein, 10 aa, Homo Sapiens
AVAEPAVYFK

SEQ ID NO: 26244 - protein, 10 aa, Homo Sapiens
AVALNYGIYK

SEQ ID NO: 26245 - protein, 10 aa, Homo Sapiens
AVANIVNSVK

SEQ ID NO: 26246 - protein, 10 aa, Homo Sapiens
AVAQPTDVVK

SEQ ID NO: 26247 - protein, 10 aa, Homo Sapiens
AVASVTEILK

SEQ ID NO: 26248 - protein, 10 aa, Homo Sapiens
AVATLALLGK

SEQ ID NO: 26249 - protein, 10 aa, Homo Sapiens
AVAVDVAVPK

SEQ ID NO: 26250 - protein, 10 aa, Homo Sapiens
AVCEVALDYK

SEQ ID NO: 26251 - protein, 10 aa, Homo Sapiens
AVDGNTVELK

SEQ ID NO: 26252 - protein, 10 aa, Homo Sapiens
AVDNADPILK

SEQ ID NO: 26253 - protein, 10 aa, Homo Sapiens
AVFDRDINCR

SEQ ID NO: 26254 - protein, 10 aa, Homo Sapiens
AVFGEATNLK

SEQ ID NO: 26255 - protein, 10 aa, Homo Sapiens
AVFGVIGSQK

SEQ ID NO: 26256 - protein, 10 aa, Homo Sapiens
AVFKGIAADK

SEQ ID NO: 26257 - protein, 10 aa, Homo Sapiens
AVFPFKPPQR

SEQ ID NO: 26258 - protein, 10 aa, Homo Sapiens
AVFPKPFVEK

SEQ ID NO: 26259 - protein, 10 aa, Homo Sapiens
AVFTIVFTQK

SEQ ID NO: 26260 - protein, 10 aa, Homo Sapiens
AVIEKFAPIK

SEQ ID NO: 26261 - protein, 10 aa, Homo Sapiens
AVIKEKIEEK

SEQ ID NO: 26262 - protein, 10 aa, Homo Sapiens
AVILESIFLK

SEQ ID NO: 26263 - protein, 10 aa, Homo Sapiens
AVIPCFPYAR

SEQ ID NO: 26264 - protein, 10 aa, Homo Sapiens
AVISDSYFPR

SEQ ID NO: 26265 - protein, 10 aa, Homo Sapiens
AVISPPTVPK

SEQ ID NO: 26266 - protein, 10 aa, Homo Sapiens
AVITNKDVRK

SEQ ID NO: 26267 - protein, 10 aa, Homo Sapiens
AVLDLSWNKL

SEQ ID NO: 26268 - protein, 10 aa, Homo Sapiens
AVLKHVLTPR

SEQ ID NO: 26269 - protein, 10 aa, Homo Sapiens
AVLKQGLPPK

SEQ ID NO: 26270 - protein, 10 aa, Homo Sapiens
AVLNDYSLTK

SEQ ID NO: 26271 - protein, 10 aa, Homo Sapiens
AVLNFKLKKK

SEQ ID NO: 26272 - protein, 10 aa, Homo Sapiens
AVLYQPLFDK

SEQ ID NO: 26273 - protein, 10 aa, Homo Sapiens
AVMDITDIIK

SEQ ID NO: 26274 - protein, 10 aa, Homo Sapiens
AVMDVVKKQK

SEQ ID NO: 26275 - protein, 10 aa, Homo Sapiens
AVMGAYVLLK

SEQ ID NO: 26276 - protein, 10 aa, Homo Sapiens
AVMKIFDAAK

SEQ ID NO: 26277 - protein, 10 aa, Homo Sapiens
AVMSATFAKF

SEQ ID NO: 26278 - protein, 10 aa, Homo Sapiens
AVNAHSNILK

SEQ ID NO: 26279 - protein, 10 aa, Homo Sapiens
AVNMVPFPRL

SEQ ID NO: 26280 - protein, 10 aa, Homo Sapiens
AVNPKEIASK

SEQ ID NO: 26281 - protein, 10 aa, Homo Sapiens
AVNPYFDIPK

SEQ ID NO: 26282 - protein, 10 aa, Homo Sapiens
AVPEAIPTPR

SEQ ID NO: 26283 - protein, 10 aa, Homo Sapiens
AVPNGPQSPK

SEQ ID NO: 26284 - protein, 10 aa, Homo Sapiens
AVPTNIIAAK

SEQ ID NO: 26285 - protein, 10 aa, Homo Sapiens
AVQAITGNFK

SEQ ID NO: 26286 - protein, 10 aa, Homo Sapiens
AVQELLPQYK

SEQ ID NO: 26287 - protein, 10 aa, Homo Sapiens
AVQGAHPVLR

SEQ ID NO: 26288 - protein, 10 aa, Homo Sapiens
AVQKAIPMYK

SEQ ID NO: 26289 - protein, 10 aa, Homo Sapiens
AVREEVEILK

SEQ ID NO: 26290 - protein, 10 aa, Homo Sapiens
AVSDFHPVKK

SEQ ID NO: 26291 - protein, 10 aa, Homo Sapiens
AVSPSLDLSK

SEQ ID NO: 26292 - protein, 10 aa, Homo Sapiens
AVVETVTTAK

SEQ ID NO: 26293 - protein, 10 aa, Homo Sapiens
AVVGAVVFQK

SEQ ID NO: 26294 - protein, 10 aa, Homo Sapiens
AVYADSGNFK

SEQ ID NO: 26295 - protein, 10 aa, Homo Sapiens
AVYGQKEIHR

SEQ ID NO: 26296 - protein, 10 aa, Homo Sapiens
DMALALESAR

SEQ ID NO: 26297 - protein, 10 aa, Homo Sapiens
DSLVFVQTDK

SEQ ID NO: 26298 - protein, 10 aa, Homo Sapiens
DTIGYPVMIR

SEQ ID NO: 26299 - protein, 10 aa, Homo Sapiens
DTNADKQLSF

SEQ ID NO: 26300 - protein, 10 aa, Homo Sapiens
EENLLDFVRF

SEQ ID NO: 26301 - protein, 10 aa, Homo Sapiens
EEQLQQIRAE

SEQ ID NO: 26302 - protein, 10 aa, Homo Sapiens
EVAPPEYHRK

SEQ ID NO: 26303 - protein, 10 aa, Homo Sapiens
FGGETDEATR

SEQ ID NO: 26304 - protein, 10 aa, Homo Sapiens
FTFDNVLPGK

SEQ ID NO: 26305 - protein, 10 aa, Homo Sapiens
FVYKGGKIYK

SEQ ID NO: 26306 - protein, 10 aa, Homo Sapiens
FVYPGNPLRH

SEQ ID NO: 26307 - protein, 10 aa, Homo Sapiens
GAYDQQIWEK

SEQ ID NO: 26308 - protein, 10 aa, Homo Sapiens
GGHYADSYLK

SEQ ID NO: 26309 - protein, 10 aa, Homo Sapiens
GIFPGTPLKK

SEQ ID NO: 26310 - protein, 10 aa, Homo Sapiens
GIISSPLTGK

SEQ ID NO: 26311 - protein, 10 aa, Homo Sapiens
GLAAGTVPEK

SEQ ID NO: 26312 - protein, 10 aa, Homo Sapiens
GLAGLPGSPK

SEQ ID NO: 26313 - protein, 10 aa, Homo Sapiens
GLCASIHLLK

SEQ ID NO: 26314 - protein, 10 aa, Homo Sapiens
GLPPYSPVFK

SEQ ID NO: 26315 - protein, 10 aa, Homo Sapiens
GQCGDILTNK

SEQ ID NO: 26316 - protein, 10 aa, Homo Sapiens
GQFIGPHRIK

SEQ ID NO: 26317 - protein, 10 aa, Homo Sapiens
GQFSGFPFEK

SEQ ID NO: 26318 - protein, 10 aa, Homo Sapiens
GQGTFTKIFK

SEQ ID NO: 26319 - protein, 10 aa, Homo Sapiens
GQIGPAPPLK

SEQ ID NO: 26320 - protein, 10 aa, Homo Sapiens
GQLGVGNYKK

SEQ ID NO: 26321 - protein, 10 aa, Homo Sapiens
GQNVFGSFLK

SEQ ID NO: 26322 - protein, 10 aa, Homo Sapiens
GQPLVVIPPK

SEQ ID NO: 26323 - protein, 10 aa, Homo Sapiens
GSFASIFWLK

SEQ ID NO: 26324 - protein, 10 aa, Homo Sapiens
GSFSENGFIK

SEQ ID NO: 26325 - protein, 10 aa, Homo Sapiens
GSFVGELMYK

SEQ ID NO: 26326 - protein, 10 aa, Homo Sapiens
GSLSGWSSPK

SEQ ID NO: 26327 - protein, 10 aa, Homo Sapiens
GSMCITQFMK

SEQ ID NO: 26328 - protein, 10 aa, Homo Sapiens
GSMSTVVSTK

SEQ ID NO: 26329 - protein, 10 aa, Homo Sapiens
GSSANIPPLK

SEQ ID NO: 26330 - protein, 10 aa, Homo Sapiens
GSTYFERCLK

SEQ ID NO: 26331 - protein, 10 aa, Homo Sapiens
GSVELPIVGK

SEQ ID NO: 26332 - protein, 10 aa, Homo Sapiens
GSYDPQQIFK

SEQ ID NO: 26333 - protein, 10 aa, Homo Sapiens
GSYNKVFLAK

SEQ ID NO: 26334 - protein, 10 aa, Homo Sapiens
GSYTFDPVTK

SEQ ID NO: 26335 - protein, 10 aa, Homo Sapiens
GTAIIQLPSK

SEQ ID NO: 26336 - protein, 10 aa, Homo Sapiens
GTAIKPLPSY

SEQ ID NO: 26337 - protein, 10 aa, Homo Sapiens
GTAPLVAPPR

SEQ ID NO: 26338 - protein, 10 aa, Homo Sapiens
GTASVLQPVK

SEQ ID NO: 26339 - protein, 10 aa, Homo Sapiens
GTDRTGFTFK

SEQ ID NO: 26340 - protein, 10 aa, Homo Sapiens
GTEEAPKVFK

SEQ ID NO: 26341 - protein, 10 aa, Homo Sapiens
GTEEGQQILK

SEQ ID NO: 26342 - protein, 10 aa, Homo Sapiens
GTEPSLGVKK

SEQ ID NO: 26343 - protein, 10 aa, Homo Sapiens
GTFDPDNLEK

SEQ ID NO: 26344 - protein, 10 aa, Homo Sapiens
GTFGKVKVGK

SEQ ID NO: 26345 - protein, 10 aa, Homo Sapiens
GTFPRAFKKL

SEQ ID NO: 26346 - protein, 10 aa, Homo Sapiens
GTFQQMWISK

SEQ ID NO: 26347 - protein, 10 aa, Homo Sapiens
GTHTFDPVTK

SEQ ID NO: 26348 - protein, 10 aa, Homo Sapiens
GTIAGLNVLR

SEQ ID NO: 26349 - protein, 10 aa, Homo Sapiens
GTIGMRPNAK

SEQ ID NO: 26350 - protein, 10 aa, Homo Sapiens
GTIKKINILK

SEQ ID NO: 26351 - protein, 10 aa, Homo Sapiens
GTILGTRSLK

SEQ ID NO: 26352 - protein, 10 aa, Homo Sapiens
GTILIILTGR

SEQ ID NO: 26353 - protein, 10 aa, Homo Sapiens
GTINIVHPKL

SEQ ID NO: 26354 - protein, 10 aa, Homo Sapiens
GTIPGNPYPK

SEQ ID NO: 26355 - protein, 10 aa, Homo Sapiens
GTKGPSNVFK

SEQ ID NO: 26356 - protein, 10 aa, Homo Sapiens
GTLDFYMARL

SEQ ID NO: 26357 - protein, 10 aa, Homo Sapiens
GTLDYILQRC

SEQ ID NO: 26358 - protein, 10 aa, Homo Sapiens
GTLEIPVAQK

SEQ ID NO: 26359 - protein, 10 aa, Homo Sapiens
GTLQPPFTAR

SEQ ID NO: 26360 - protein, 10 aa, Homo Sapiens
GTMAMTVVTK

SEQ ID NO: 26361 - protein, 10 aa, Homo Sapiens
GTMDMSITRL

SEQ ID NO: 26362 - protein, 10 aa, Homo Sapiens
GTMKMHILQK

SEQ ID NO: 26363 - protein, 10 aa, Homo Sapiens
GTMPLRNIFK

SEQ ID NO: 26364 - protein, 10 aa, Homo Sapiens
GTMPRPSIKK

SEQ ID NO: 26365 - protein, 10 aa, Homo Sapiens
GTNSKPCFQK

SEQ ID NO: 26366 - protein, 10 aa, Homo Sapiens
GTNVNMPVSK

SEQ ID NO: 26367 - protein, 10 aa, Homo Sapiens
GTPAGGGFPR

SEQ ID NO: 26368 - protein, 10 aa, Homo Sapiens
GTPLETIQKK

SEQ ID NO: 26369 - protein, 10 aa, Homo Sapiens
GTQPPGKMEY

SEQ ID NO: 26370 - protein, 10 aa, Homo Sapiens
GTSHLPGLLK

SEQ ID NO: 26371 - protein, 10 aa, Homo Sapiens
GTSSVIVSRK

SEQ ID NO: 26372 - protein, 10 aa, Homo Sapiens
GTVDVTPFIK

SEQ ID NO: 26373 - protein, 10 aa, Homo Sapiens
GTVIHFNNPK

SEQ ID NO: 26374 - protein, 10 aa, Homo Sapiens
GTWKTPSFPK

SEQ ID NO: 26375 - protein, 10 aa, Homo Sapiens
GTYADKLSPK

SEQ ID NO: 26376 - protein, 10 aa, Homo Sapiens
GTYGLDSVKK

SEQ ID NO: 26377 - protein, 10 aa, Homo Sapiens
GTYVKPLSNK

SEQ ID NO: 26378 - protein, 10 aa, Homo Sapiens
GVFEGIPTYR

SEQ ID NO: 26379 - protein, 10 aa, Homo Sapiens
GVFRGPVLPK

SEQ ID NO: 26380 - protein, 10 aa, Homo Sapiens
GVIPYFPYSK

SEQ ID NO: 26381 - protein, 10 aa, Homo Sapiens
GVLDAILATK

SEQ ID NO: 26382 - protein, 10 aa, Homo Sapiens
GVMRIGLVAK

SEQ ID NO: 26383 - protein, 10 aa, Homo Sapiens
GVNDAPALKK

SEQ ID NO: 26384 - protein, 10 aa, Homo Sapiens
GVPAQPLGPR

SEQ ID NO: 26385 - protein, 10 aa, Homo Sapiens
GVYGDVHRVK

SEQ ID NO: 26386 - protein, 10 aa, Homo Sapiens
GVYGDVQRVK

SEQ ID NO: 26387 - protein, 10 aa, Homo Sapiens
GVYNLEIVDK

SEQ ID NO: 26388 - protein, 10 aa, Homo Sapiens
HLLETPLVVK

SEQ ID NO: 26389 - protein, 10 aa, Homo Sapiens
HTSSAIPVPK

SEQ ID NO: 26390 - protein, 10 aa, Homo Sapiens
HVYDGKFLAR

SEQ ID NO: 26391 - protein, 10 aa, Homo Sapiens
IAAAKPTPPK

SEQ ID NO: 26392 - protein, 10 aa, Homo Sapiens
IGIDLNKDKF

SEQ ID NO: 26393 - protein, 10 aa, Homo Sapiens
IGLPAGPPKP

SEQ ID NO: 26394 - protein, 10 aa, Homo Sapiens
IIFAEPTPEK

SEQ ID NO: 26395 - protein, 10 aa, Homo Sapiens
IIFVGTPVQK

SEQ ID NO: 26396 - protein, 10 aa, Homo Sapiens
ILPPLSPYFK

SEQ ID NO: 26397 - protein, 10 aa, Homo Sapiens
ILYGPPGTGK

SEQ ID NO: 26398 - protein, 10 aa, Homo Sapiens
IMPKDIQLAR

SEQ ID NO: 26399 - protein, 10 aa, Homo Sapiens
IQFNPPLSEK

SEQ ID NO: 26400 - protein, 10 aa, Homo Sapiens
ISFPATGCQK

SEQ ID NO: 26401 - protein, 10 aa, Homo Sapiens
ISGPPLKAGK

SEQ ID NO: 26402 - protein, 10 aa, Homo Sapiens
ISMDLQLTNK

SEQ ID NO: 26403 - protein, 10 aa, Homo Sapiens
ITIEIPEVLK

SEQ ID NO: 26404 - protein, 10 aa, Homo Sapiens
ITNDGATILK

SEQ ID NO: 26405 - protein, 10 aa, Homo Sapiens
ITPSTQQHLK

SEQ ID NO: 26406 - protein, 10 aa, Homo Sapiens
IVDTGIGMTK

SEQ ID NO: 26407 - protein, 10 aa, Homo Sapiens
IVENPDGTLK

SEQ ID NO: 26408 - protein, 10 aa, Homo Sapiens
IVVDAIDVLK

SEQ ID NO: 26409 - protein, 10 aa, Homo Sapiens
IVYCGQVFEK

SEQ ID NO: 26410 - protein, 10 aa, Homo Sapiens
KAAVTSLFAK

SEQ ID NO: 26411 - protein, 10 aa, Homo Sapiens
KAFMGTPVQK

SEQ ID NO: 26412 - protein, 10 aa, Homo Sapiens
KAFNQGKIFK

SEQ ID NO: 26413 - protein, 10 aa, Homo Sapiens
KAKEPPFVRK

SEQ ID NO: 26414 - protein, 10 aa, Homo Sapiens
KAMDVLPILK

SEQ ID NO: 26415 - protein, 10 aa, Homo Sapiens
KEKMIHENLR

SEQ ID NO: 26416 - protein, 10 aa, Homo Sapiens
KIIYPTAPPR

SEQ ID NO: 26417 - protein, 10 aa, Homo Sapiens
KIMKDILEKK

SEQ ID NO: 26418 - protein, 10 aa, Homo Sapiens
KLFIPWTNQK

SEQ ID NO: 26419 - protein, 10 aa, Homo Sapiens
KLFPGRPPVK

SEQ ID NO: 26420 - protein, 10 aa, Homo Sapiens
KLMENTFVSK

SEQ ID NO: 26421 - protein, 10 aa, Homo Sapiens
KLPPEKFAPK

SEQ ID NO: 26422 - protein, 10 aa, Homo Sapiens
KLPTEKLPPK

SEQ ID NO: 26423 - protein, 10 aa, Homo Sapiens
KQINLWKIYK

SEQ ID NO: 26424 - protein, 10 aa, Homo Sapiens
KSAFLCGVMK

SEQ ID NO: 26425 - protein, 10 aa, Homo Sapiens
KSFDTSLIRK

SEQ ID NO: 26426 - protein, 10 aa, Homo Sapiens
KSFPGIPLHH

SEQ ID NO: 26427 - protein, 10 aa, Homo Sapiens
KSLDQAISRF

SEQ ID NO: 26428 - protein, 10 aa, Homo Sapiens
KSMNANTITK

SEQ ID NO: 26429 - protein, 10 aa, Homo Sapiens
KTALRAQVKK

SEQ ID NO: 26430 - protein, 10 aa, Homo Sapiens
KTFEGNLTTK

SEQ ID NO: 26431 - protein, 10 aa, Homo Sapiens
KTFSEVLAEK

SEQ ID NO: 26432 - protein, 10 aa, Homo Sapiens
KTGFAEGFLK

SEQ ID NO: 26433 - protein, 10 aa, Homo Sapiens
KTIAPALVSK

SEQ ID NO: 26434 - protein, 10 aa, Homo Sapiens
KTIVNIEMIK

SEQ ID NO: 26435 - protein, 10 aa, Homo Sapiens
KTLDEILQEK

SEQ ID NO: 26436 - protein, 10 aa, Homo Sapiens
KTLETNPYVK

SEQ ID NO: 26437 - protein, 10 aa, Homo Sapiens
KTNMPIITSK

SEQ ID NO: 26438 - protein, 10 aa, Homo Sapiens
KTPTSPLKMK

SEQ ID NO: 26439 - protein, 10 aa, Homo Sapiens
KTYGEIFEKF

SEQ ID NO: 26440 - protein, 10 aa, Homo Sapiens
KVCNPIITKL

SEQ ID NO: 26441 - protein, 10 aa, Homo Sapiens
KVFDGIPPPY

SEQ ID NO: 26442 - protein, 10 aa, Homo Sapiens
KVFEVHVRPK

SEQ ID NO: 26443 - protein, 10 aa, Homo Sapiens
KVGEFSGANK

SEQ ID NO: 26444 - protein, 10 aa, Homo Sapiens
KVGENVLPPK

SEQ ID NO: 26445 - protein, 10 aa, Homo Sapiens
KVLDAIIQEK

SEQ ID NO: 26446 - protein, 10 aa, Homo Sapiens
KVLELQSPPK

SEQ ID NO: 26447 - protein, 10 aa, Homo Sapiens
KVLESIEIFK

SEQ ID NO: 26448 - protein, 10 aa, Homo Sapiens
KVMDLSIVRL

SEQ ID NO: 26449 - protein, 10 aa, Homo Sapiens
KVNIIPIIAK

SEQ ID NO: 26450 - protein, 10 aa, Homo Sapiens
KVNIVPVIAK

SEQ ID NO: 26451 - protein, 10 aa, Homo Sapiens
KVQEKYVWNK

SEQ ID NO: 26452 - protein, 10 aa, Homo Sapiens
KVQEMNYIQK

SEQ ID NO: 26453 - protein, 10 aa, Homo Sapiens
KVTEGSFVYK

SEQ ID NO: 26454 - protein, 10 aa, Homo Sapiens
KVVEGSFVYK

SEQ ID NO: 26455 - protein, 10 aa, Homo Sapiens
KVYLGDIPLK

SEQ ID NO: 26456 - protein, 10 aa, Homo Sapiens
LDSCTKLLQK

SEQ ID NO: 26457 - protein, 10 aa, Homo Sapiens
LFVEEVAASL

SEQ ID NO: 26458 - protein, 10 aa, Homo Sapiens
LGGVAHTLQK

SEQ ID NO: 26459 - protein, 10 aa, Homo Sapiens
LLFPYILPPK

SEQ ID NO: 26460 - protein, 10 aa, Homo Sapiens
LLYYSRTMAK

SEQ ID NO: 26461 - protein, 10 aa, Homo Sapiens
LQNEPLPERL

SEQ ID NO: 26462 - protein, 10 aa, Homo Sapiens
LQNPLLVPVK

SEQ ID NO: 26463 - protein, 10 aa, Homo Sapiens
LSLGVAALYK

SEQ ID NO: 26464 - protein, 10 aa, Homo Sapiens
LSLPYPPKTL

SEQ ID NO: 26465 - protein, 10 aa, Homo Sapiens
LSVPGSCYLK

SEQ ID NO: 26466 - protein, 10 aa, Homo Sapiens
LTFEGTGPTK

SEQ ID NO: 26467 - protein, 10 aa, Homo Sapiens
LTNPKTNIQK

SEQ ID NO: 26468 - protein, 10 aa, Homo Sapiens
LVFEAPNQEK

SEQ ID NO: 26469 - protein, 10 aa, Homo Sapiens
LVFPSEIVGK

SEQ ID NO: 26470 - protein, 10 aa, Homo Sapiens
LVQEQPLPEP

SEQ ID NO: 26471 - protein, 10 aa, Homo Sapiens
LVQMVVDGVK

SEQ ID NO: 26472 - protein, 10 aa, Homo Sapiens
LVQRNVNIFK

SEQ ID NO: 26473 - protein, 10 aa, Homo Sapiens
LVYRDRETLK

SEQ ID NO: 26474 - protein, 10 aa, Homo Sapiens
MFQYDSTHGK

SEQ ID NO: 26475 - protein, 10 aa, Homo Sapiens
MGTSPLQIDR

SEQ ID NO: 26476 - protein, 10 aa, Homo Sapiens
MTVSSDQMAK

SEQ ID NO: 26477 - protein, 10 aa, Homo Sapiens
MVYPFTGDHK

SEQ ID NO: 26478 - protein, 10 aa, Homo Sapiens
NSLQRWEHLK

SEQ ID NO: 26479 - protein, 10 aa, Homo Sapiens
NSTFNQVVLK

SEQ ID NO: 26480 - protein, 10 aa, Homo Sapiens
NVSVVDLTCR

SEQ ID NO: 26481 - protein, 10 aa, Homo Sapiens
PEAGGPPIKK

SEQ ID NO: 26482 - protein, 10 aa, Homo Sapiens
PMTLGYWDIR

SEQ ID NO: 26483 - protein, 10 aa, Homo Sapiens
QIPQLPAPPK

SEQ ID NO: 26484 - protein, 10 aa, Homo Sapiens
QLTSENLQSK

SEQ ID NO: 26485 - protein, 10 aa, Homo Sapiens
QSFDKEWVAK

SEQ ID NO: 26486 - protein, 10 aa, Homo Sapiens
QSNPAPQVQK

SEQ ID NO: 26487 - protein, 10 aa, Homo Sapiens
QTIESINLLK

SEQ ID NO: 26488 - protein, 10 aa, Homo Sapiens
QTIPPPYVVR

SEQ ID NO: 26489 - protein, 10 aa, Homo Sapiens
QTSQPFQVLK

SEQ ID NO: 26490 - protein, 10 aa, Homo Sapiens
QVLDVPLTVK

SEQ ID NO: 26491 - protein, 10 aa, Homo Sapiens
QVLTLPLMLK

SEQ ID NO: 26492 - protein, 10 aa, Homo Sapiens
QVQEGTKVLK

SEQ ID NO: 26493 - protein, 10 aa, Homo Sapiens
QVQKPGPLQK

SEQ ID NO: 26494 - protein, 10 aa, Homo Sapiens
QVQPKPSPPR

SEQ ID NO: 26495 - protein, 10 aa, Homo Sapiens
QVWKPSFCFK

SEQ ID NO: 26496 - protein, 10 aa, Homo Sapiens
RAFNDPFIQK

SEQ ID NO: 26497 - protein, 10 aa, Homo Sapiens
RAFSFSKTPK

SEQ ID NO: 26498 - protein, 10 aa, Homo Sapiens
RAMDVEPRAK

SEQ ID NO: 26499 - protein, 10 aa, Homo Sapiens
RGMGELLPTK

SEQ ID NO: 26500 - protein, 10 aa, Homo Sapiens
RGSGLQLLPR

SEQ ID NO: 26501 - protein, 10 aa, Homo Sapiens
RIFTLKPVRK

SEQ ID NO: 26502 - protein, 10 aa, Homo Sapiens
RIIEETLALK

SEQ ID NO: 26503 - protein, 10 aa, Homo Sapiens
RIMDPEIALK

SEQ ID NO: 26504 - protein, 10 aa, Homo Sapiens
RIPGPGTPVK

SEQ ID NO: 26505 - protein, 10 aa, Homo Sapiens
RIQDGLGELK

SEQ ID NO: 26506 - protein, 10 aa, Homo Sapiens
RIYDYDPLYK

SEQ ID NO: 26507 - protein, 10 aa, Homo Sapiens
RLMSLPIAKK

SEQ ID NO: 26508 - protein, 10 aa, Homo Sapiens
RLPLISGFYK

SEQ ID NO: 26509 - protein, 10 aa, Homo Sapiens
RMFLSFPTTK

SEQ ID NO: 26510 - protein, 10 aa, Homo Sapiens
RQAELAQWQK

SEQ ID NO: 26511 - protein, 10 aa, Homo Sapiens
RSAQPLPLKI

SEQ ID NO: 26512 - protein, 10 aa, Homo Sapiens
RSHYFEGVLK

SEQ ID NO: 26513 - protein, 10 aa, Homo Sapiens
RSLDHPNVLK

SEQ ID NO: 26514 - protein, 10 aa, Homo Sapiens
RTAALPTFRK

SEQ ID NO: 26515 - protein, 10 aa, Homo Sapiens
RTATQLAVNK

SEQ ID NO: 26516 - protein, 10 aa, Homo Sapiens
RTAVPSFLTK

SEQ ID NO: 26517 - protein, 10 aa, Homo Sapiens
RTCEWTGLKF

SEQ ID NO: 26518 - protein, 10 aa, Homo Sapiens
RTDDKVIRFK

SEQ ID NO: 26519 - protein, 10 aa, Homo Sapiens
RTFLLQGLLR

SEQ ID NO: 26520 - protein, 10 aa, Homo Sapiens
RTGPPMGSRF

SEQ ID NO: 26521 - protein, 10 aa, Homo Sapiens
RTISETIERL

SEQ ID NO: 26522 - protein, 10 aa, Homo Sapiens
RTLDAKMPRK

SEQ ID NO: 26523 - protein, 10 aa, Homo Sapiens
RTLGAIVRQK

SEQ ID NO: 26524 - protein, 10 aa, Homo Sapiens
RTLSDYNIQK

SEQ ID NO: 26525 - protein, 10 aa, Homo Sapiens
RTSRPLKILR

SEQ ID NO: 26526 - protein, 10 aa, Homo Sapiens
RTVPVGGVVK

SEQ ID NO: 26527 - protein, 10 aa, Homo Sapiens
RTYDREGFKK

SEQ ID NO: 26528 - protein, 10 aa, Homo Sapiens
RVAEALHKLK

SEQ ID NO: 26529 - protein, 10 aa, Homo Sapiens
RVCDAVKALK

SEQ ID NO: 26530 - protein, 10 aa, Homo Sapiens
RVCDIILPRL

SEQ ID NO: 26531 - protein, 10 aa, Homo Sapiens
RVFAAESIIK

SEQ ID NO: 26532 - protein, 10 aa, Homo Sapiens
RVFQETQKLK

SEQ ID NO: 26533 - protein, 10 aa, Homo Sapiens
RVFQGFFTGR

SEQ ID NO: 26534 - protein, 10 aa, Homo Sapiens
RVFRGRFQGR

SEQ ID NO: 26535 - protein, 10 aa, Homo Sapiens
RVFSNKLLEK

SEQ ID NO: 26536 - protein, 10 aa, Homo Sapiens
RVIFTGGVGK

SEQ ID NO: 26537 - protein, 10 aa, Homo Sapiens
RVINSIPLAK

SEQ ID NO: 26538 - protein, 10 aa, Homo Sapiens
RVIYKPIVEK

SEQ ID NO: 26539 - protein, 10 aa, Homo Sapiens
RVLDFDVKRK

SEQ ID NO: 26540 - protein, 10 aa, Homo Sapiens
RVLDPSKFLK

SEQ ID NO: 26541 - protein, 10 aa, Homo Sapiens
RVLDVGFVGR

SEQ ID NO: 26542 - protein, 10 aa, Homo Sapiens
RVLEAAVAAK

SEQ ID NO: 26543 - protein, 10 aa, Homo Sapiens
RVLKPGGLLK

SEQ ID NO: 26544 - protein, 10 aa, Homo Sapiens
RVLNKLGGVK

SEQ ID NO: 26545 - protein, 10 aa, Homo Sapiens
RVLSKAFSRL

SEQ ID NO: 26546 - protein, 10 aa, Homo Sapiens
RVLVRSTTPK

SEQ ID NO: 26547 - protein, 10 aa, Homo Sapiens
RVMDVQYNKF

SEQ ID NO: 26548 - protein, 10 aa, Homo Sapiens
RVNKVIIGTK

SEQ ID NO: 26549 - protein, 10 aa, Homo Sapiens
RVPDVVLIKK

SEQ ID NO: 26550 - protein, 10 aa, Homo Sapiens
RVPLDPLIGK

SEQ ID NO: 26551 - protein, 10 aa, Homo Sapiens
RVPPPPPIAR

SEQ ID NO: 26552 - protein, 10 aa, Homo Sapiens
RVPQAEGPPK

SEQ ID NO: 26553 - protein, 10 aa, Homo Sapiens
RVPVEKPVYK

SEQ ID NO: 26554 - protein, 10 aa, Homo Sapiens
RVSDCIPLSH

SEQ ID NO: 26555 - protein, 10 aa, Homo Sapiens
RVSECLRVLK

SEQ ID NO: 26556 - protein, 10 aa, Homo Sapiens
RVSNVKSVYK

SEQ ID NO: 26557 - protein, 10 aa, Homo Sapiens
RVWDLPGVLK

SEQ ID NO: 26558 - protein, 10 aa, Homo Sapiens
RVWIQGKFQK

SEQ ID NO: 26559 - protein, 10 aa, Homo Sapiens
RVYPESIPRK

SEQ ID NO: 26560 - protein, 10 aa, Homo Sapiens
RVYYVDHVEK

SEQ ID NO: 26561 - protein, 10 aa, Homo Sapiens
SAAEPVPAAR

SEQ ID NO: 26562 - protein, 10 aa, Homo Sapiens
SAFDNVPRKK

SEQ ID NO: 26563 - protein, 10 aa, Homo Sapiens
SAFDRILSSK

SEQ ID NO: 26564 - protein, 10 aa, Homo Sapiens
SAFGGSLPAK

SEQ ID NO: 26565 - protein, 10 aa, Homo Sapiens
SAFGNILSCK

SEQ ID NO: 26566 - protein, 10 aa, Homo Sapiens
SAFHKVLSEK

SEQ ID NO: 26567 - protein, 10 aa, Homo Sapiens
SAFLLLGLFK

SEQ ID NO: 26568 - protein, 10 aa, Homo Sapiens
SAFQAPAVKK

SEQ ID NO: 26569 - protein, 10 aa, Homo Sapiens
SALTGVLSAK

SEQ ID NO: 26570 - protein, 10 aa, Homo Sapiens
SANIGPFLEK

SEQ ID NO: 26571 - protein, 10 aa, Homo Sapiens
SAQGKPLALK

SEQ ID NO: 26572 - protein, 10 aa, Homo Sapiens
SATFPLSVQK

SEQ ID NO: 26573 - protein, 10 aa, Homo Sapiens
SAVHPREIFK

SEQ ID NO: 26574 - protein, 10 aa, Homo Sapiens
SAYLGSEQYK

SEQ ID NO: 26575 - protein, 10 aa, Homo Sapiens
SAYYPSSFPK

SEQ ID NO: 26576 - protein, 10 aa, Homo Sapiens
SCGEFGHIQK

SEQ ID NO: 26577 - protein, 10 aa, Homo Sapiens
SDPNVSKKLK

SEQ ID NO: 26578 - protein, 10 aa, Homo Sapiens
SEATAAILSR

SEQ ID NO: 26579 - protein, 10 aa, Homo Sapiens
SGLVPAAPPK

SEQ ID NO: 26580 - protein, 10 aa, Homo Sapiens
SIAVKSIHRK

SEQ ID NO: 26581 - protein, 10 aa, Homo Sapiens
SIDGRVVEPK

SEQ ID NO: 26582 - protein, 10 aa, Homo Sapiens
SIFDGRVVAK

SEQ ID NO: 26583 - protein, 10 aa, Homo Sapiens
SIFEPVNLPK

SEQ ID NO: 26584 - protein, 10 aa, Homo Sapiens
SIFFESMPYK

SEQ ID NO: 26585 - protein, 10 aa, Homo Sapiens
SIFGGTDMKK

SEQ ID NO: 26586 - protein, 10 aa, Homo Sapiens
SIFVPPFISK

SEQ ID NO: 26587 - protein, 10 aa, Homo Sapiens
SIKIKTDSAK

SEQ ID NO: 26588 - protein, 10 aa, Homo Sapiens
SILDAKPPKK

SEQ ID NO: 26589 - protein, 10 aa, Homo Sapiens
SILEDYANYK

SEQ ID NO: 26590 - protein, 10 aa, Homo Sapiens
SILEKGFIAK

SEQ ID NO: 26591 - protein, 10 aa, Homo Sapiens
SILQGDSPTK

SEQ ID NO: 26592 - protein, 10 aa, Homo Sapiens
SILRNPVTNK

SEQ ID NO: 26593 - protein, 10 aa, Homo Sapiens
SINDKIIELK

SEQ ID NO: 26594 - protein, 10 aa, Homo Sapiens
SIPQKPQTNK

SEQ ID NO: 26595 - protein, 10 aa, Homo Sapiens
SIPVAPTPPR

SEQ ID NO: 26596 - protein, 10 aa, Homo Sapiens
SISGPISTSK

SEQ ID NO: 26597 - protein, 10 aa, Homo Sapiens
SIYDGDEFRK

SEQ ID NO: 26598 - protein, 10 aa, Homo Sapiens
SIYEHEDIKK

SEQ ID NO: 26599 - protein, 10 aa, Homo Sapiens
SLELEHIEVK

SEQ ID NO: 26600 - protein, 10 aa, Homo Sapiens
SLFDRQGFLK

SEQ ID NO: 26601 - protein, 10 aa, Homo Sapiens
SLFNRRVEEK

SEQ ID NO: 26602 - protein, 10 aa, Homo Sapiens
SLFVFFNHPK

SEQ ID NO: 26603 - protein, 10 aa, Homo Sapiens
SLMDRPLCER

SEQ ID NO: 26604 - protein, 10 aa, Homo Sapiens
SLNGEFGYQK

SEQ ID NO: 26605 - protein, 10 aa, Homo Sapiens
SLPANTPLRK

SEQ ID NO: 26606 - protein, 10 aa, Homo Sapiens
SLPDFPAAAK

SEQ ID NO: 26607 - protein, 10 aa, Homo Sapiens
SLPDIPFDPK

SEQ ID NO: 26608 - protein, 10 aa, Homo Sapiens
SLPDLTTPLK

SEQ ID NO: 26609 - protein, 10 aa, Homo Sapiens
SLPLVDTHSK

SEQ ID NO: 26610 - protein, 10 aa, Homo Sapiens
SLPVEVPLNH

SEQ ID NO: 26611 - protein, 10 aa, Homo Sapiens
SLQEVTIHEK

SEQ ID NO: 26612 - protein, 10 aa, Homo Sapiens
SLQQVRQQLK

SEQ ID NO: 26613 - protein, 10 aa, Homo Sapiens
SLWDRLIFHK

SEQ ID NO: 26614 - protein, 10 aa, Homo Sapiens
SMFHNRHLFK

SEQ ID NO: 26615 - protein, 10 aa, Homo Sapiens
SQCDSPYVTK

SEQ ID NO: 26616 - protein, 10 aa, Homo Sapiens
SQEHPVVLTK

SEQ ID NO: 26617 - protein, 10 aa, Homo Sapiens
SQFKGYFIFK

SEQ ID NO: 26618 - protein, 10 aa, Homo Sapiens
SQFSGKITVK

SEQ ID NO: 26619 - protein, 10 aa, Homo Sapiens
SSAPPTPTRL

SEQ ID NO: 26620 - protein, 10 aa, Homo Sapiens
SSDSGSGFWK

SEQ ID NO: 26621 - protein, 10 aa, Homo Sapiens
SSFSVKPFEK

SEQ ID NO: 26622 - protein, 10 aa, Homo Sapiens
SSGEAFHVGK

SEQ ID NO: 26623 - protein, 10 aa, Homo Sapiens
SSLECIAIPK

SEQ ID NO: 26624 - protein, 10 aa, Homo Sapiens
SSLSLVEIYK

SEQ ID NO: 26625 - protein, 10 aa, Homo Sapiens
SSLSSPLNPK

SEQ ID NO: 26626 - protein, 10 aa, Homo Sapiens
SSMAGVYVCK

SEQ ID NO: 26627 - protein, 10 aa, Homo Sapiens
SSMFGTLPRK

SEQ ID NO: 26628 - protein, 10 aa, Homo Sapiens
SSMTQTPALK

SEQ ID NO: 26629 - protein, 10 aa, Homo Sapiens
SSQALGTIPK

SEQ ID NO: 26630 - protein, 10 aa, Homo Sapiens
SSQIPSSVNK

SEQ ID NO: 26631 - protein, 10 aa, Homo Sapiens
SSQQFSGIGR

SEQ ID NO: 26632 - protein, 10 aa, Homo Sapiens
SSVESIISPK

SEQ ID NO: 26633 - protein, 10 aa, Homo Sapiens
SSVGSVITKK

SEQ ID NO: 26634 - protein, 10 aa, Homo Sapiens
SSYYSVLLQK

SEQ ID NO: 26635 - protein, 10 aa, Homo Sapiens
STANYDFVLK

SEQ ID NO: 26636 - protein, 10 aa, Homo Sapiens
STCNTKLTLK

SEQ ID NO: 26637 - protein, 10 aa, Homo Sapiens
STDPAAPNLK

SEQ ID NO: 26638 - protein, 10 aa, Homo Sapiens
STESNMSVPK

SEQ ID NO: 26639 - protein, 10 aa, Homo Sapiens
STFDTQITKK

SEQ ID NO: 26640 - protein, 10 aa, Homo Sapiens
STFIGRAAAK

SEQ ID NO: 26641 - protein, 10 aa, Homo Sapiens
STFLTFPIYK

SEQ ID NO: 26642 - protein, 10 aa, Homo Sapiens
STFNFHPNVR

SEQ ID NO: 26643 - protein, 10 aa, Homo Sapiens
STFNNDILSK

SEQ ID NO: 26644 - protein, 10 aa, Homo Sapiens
STFNQVVLKR

SEQ ID NO: 26645 - protein, 10 aa, Homo Sapiens
STFQQMWISK

SEQ ID NO: 26646 - protein, 10 aa, Homo Sapiens
STFSGGRIPK

SEQ ID NO: 26647 - protein, 10 aa, Homo Sapiens
STGKFEWGSK

SEQ ID NO: 26648 - protein, 10 aa, Homo Sapiens
STIDDTISKF

SEQ ID NO: 26649 - protein, 10 aa, Homo Sapiens
STIFTLDVYK

SEQ ID NO: 26650 - protein, 10 aa, Homo Sapiens
STLFSALLIK

SEQ ID NO: 26651 - protein, 10 aa, Homo Sapiens
STLRSSCLYR

SEQ ID NO: 26652 - protein, 10 aa, Homo Sapiens
STMAIIVNKL

SEQ ID NO: 26653 - protein, 10 aa, Homo Sapiens
STMEGGTLKY

SEQ ID NO: 26654 - protein, 10 aa, Homo Sapiens
STMGYMAAKK

SEQ ID NO: 26655 - protein, 10 aa, Homo Sapiens
STMGYMMAKK

SEQ ID NO: 26656 - protein, 10 aa, Homo Sapiens
STMRPLATAY

SEQ ID NO: 26657 - protein, 10 aa, Homo Sapiens
STMSAEWVSK

SEQ ID NO: 26658 - protein, 10 aa, Homo Sapiens
STMTTPQVLK

SEQ ID NO: 26659 - protein, 10 aa, Homo Sapiens
STNAYMPLLK

SEQ ID NO: 26660 - protein, 10 aa, Homo Sapiens
STNSPVGVSK

SEQ ID NO: 26661 - protein, 10 aa, Homo Sapiens
STPLAGLAPK

SEQ ID NO: 26662 - protein, 10 aa, Homo Sapiens
STPLHVPVPR

SEQ ID NO: 26663 - protein, 10 aa, Homo Sapiens
STQNGPVFAK

SEQ ID NO: 26664 - protein, 10 aa, Homo Sapiens
STSETPQPPR

SEQ ID NO: 26665 - protein, 10 aa, Homo Sapiens
STSPSVALSK

SEQ ID NO: 26666 - protein, 10 aa, Homo Sapiens
STSVVRPFAK

SEQ ID NO: 26667 - protein, 10 aa, Homo Sapiens
STTQVVGILK

SEQ ID NO: 26668 - protein, 10 aa, Homo Sapiens
STVQILGAEK

SEQ ID NO: 26669 - protein, 10 aa, Homo Sapiens
STVSADPVVK

SEQ ID NO: 26670 - protein, 10 aa, Homo Sapiens
STVSPLPSLK

SEQ ID NO: 26671 - protein, 10 aa, Homo Sapiens
STWTGPPAMK

SEQ ID NO: 26672 - protein, 10 aa, Homo Sapiens
STYDGVFIWK

SEQ ID NO: 26673 - protein, 10 aa, Homo Sapiens
STYDLYTIPK

SEQ ID NO: 26674 - protein, 10 aa, Homo Sapiens
STYGTHIHEK

SEQ ID NO: 26675 - protein, 10 aa, Homo Sapiens
STYNLQILTR

SEQ ID NO: 26676 - protein, 10 aa, Homo Sapiens
STYYGSFVTR

SEQ ID NO: 26677 - protein, 10 aa, Homo Sapiens
SVAETAQTIK

SEQ ID NO: 26678 - protein, 10 aa, Homo Sapiens
SVAGGLFVGK

SEQ ID NO: 26679 - protein, 10 aa, Homo Sapiens
SVAPSPAVDK

SEQ ID NO: 26680 - protein, 10 aa, Homo Sapiens
SVASTPISQR

SEQ ID NO: 26681 - protein, 10 aa, Homo Sapiens
SVATCMAILH

SEQ ID NO: 26682 - protein, 10 aa, Homo Sapiens
SVAVLRGIQK

SEQ ID NO: 26683 - protein, 10 aa, Homo Sapiens
SVCEGKGLHR

SEQ ID NO: 26684 - protein, 10 aa, Homo Sapiens
SVEATQPVLK

SEQ ID NO: 26685 - protein, 10 aa, Homo Sapiens
SVFAEERNLK

SEQ ID NO: 26686 - protein, 10 aa, Homo Sapiens
SVFAGVVGVK

SEQ ID NO: 26687 - protein, 10 aa, Homo Sapiens
SVFDAYVLPK

SEQ ID NO: 26688 - protein, 10 aa, Homo Sapiens
SVFDFQKAYK

SEQ ID NO: 26689 - protein, 10 aa, Homo Sapiens
SVFEDPVISK

SEQ ID NO: 26690 - protein, 10 aa, Homo Sapiens
SVFESLIAKK

SEQ ID NO: 26691 - protein, 10 aa, Homo Sapiens
SVFFGGLSIK

SEQ ID NO: 26692 - protein, 10 aa, Homo Sapiens
SVFNEHPSRR

SEQ ID NO: 26693 - protein, 10 aa, Homo Sapiens
SVFPYNHRMK

SEQ ID NO: 26694 - protein, 10 aa, Homo Sapiens
SVFQQGMKNK

SEQ ID NO: 26695 - protein, 10 aa, Homo Sapiens
SVFSDKLHSK

SEQ ID NO: 26696 - protein, 10 aa, Homo Sapiens
SVFSPSFGLK

SEQ ID NO: 26697 - protein, 10 aa, Homo Sapiens
SVGSDLFVFK

SEQ ID NO: 26698 - protein, 10 aa, Homo Sapiens
SVGTEMIITK

SEQ ID NO: 26699 - protein, 10 aa, Homo Sapiens
SVIATTALDK

SEQ ID NO: 26700 - protein, 10 aa, Homo Sapiens
SVIDEPVRLK

SEQ ID NO: 26701 - protein, 10 aa, Homo Sapiens
SVIGDYLARF

SEQ ID NO: 26702 - protein, 10 aa, Homo Sapiens
SVIKEGWLHK

SEQ ID NO: 26703 - protein, 10 aa, Homo Sapiens
SVINPGAIYR

SEQ ID NO: 26704 - protein, 10 aa, Homo Sapiens
SVIRDYLVQK

SEQ ID NO: 26705 - protein, 10 aa, Homo Sapiens
SVISTDPLKR

SEQ ID NO: 26706 - protein, 10 aa, Homo Sapiens
SVITTSAPNK

SEQ ID NO: 26707 - protein, 10 aa, Homo Sapiens
SVKDGAICYK

SEQ ID NO: 26708 - protein, 10 aa, Homo Sapiens
SVLDLSVHKK

SEQ ID NO: 26709 - protein, 10 aa, Homo Sapiens
SVLDWEDLIR

SEQ ID NO: 26710 - protein, 10 aa, Homo Sapiens
SVLEATRVNR

SEQ ID NO: 26711 - protein, 10 aa, Homo Sapiens
SVLEPPLFLK

SEQ ID NO: 26712 - protein, 10 aa, Homo Sapiens
SVLIQKQIFK

SEQ ID NO: 26713 - protein, 10 aa, Homo Sapiens
SVLKEKITFK

SEQ ID NO: 26714 - protein, 10 aa, Homo Sapiens
SVLLQKQILK

SEQ ID NO: 26715 - protein, 10 aa, Homo Sapiens
SVLNLVIVKK

SEQ ID NO: 26716 - protein, 10 aa, Homo Sapiens
SVLNNSLLLH

SEQ ID NO: 26717 - protein, 10 aa, Homo Sapiens
SVLPTIRVPK

SEQ ID NO: 26718 - protein, 10 aa, Homo Sapiens
SVLPTSKPEK

SEQ ID NO: 26719 - protein, 10 aa, Homo Sapiens
SVLPYFVATK

SEQ ID NO: 26720 - protein, 10 aa, Homo Sapiens
SVLYPSSDPK

SEQ ID NO: 26721 - protein, 10 aa, Homo Sapiens
SVMDQEMRVK

SEQ ID NO: 26722 - protein, 10 aa, Homo Sapiens
SVMGVTVSRL

SEQ ID NO: 26723 - protein, 10 aa, Homo Sapiens
SVMLGGRNIK

SEQ ID NO: 26724 - protein, 10 aa, Homo Sapiens
SVMNLDDLTR

SEQ ID NO: 26725 - protein, 10 aa, Homo Sapiens
SVMPAQKITK

SEQ ID NO: 26726 - protein, 10 aa, Homo Sapiens
SVMPKKSILK

SEQ ID NO: 26727 - protein, 10 aa, Homo Sapiens
SVMQKIIPHY

SEQ ID NO: 26728 - protein, 10 aa, Homo Sapiens
SVMRPEQIMK

SEQ ID NO: 26729 - protein, 10 aa, Homo Sapiens
SVMSTVEWNK

SEQ ID NO: 26730 - protein, 10 aa, Homo Sapiens
SVMYPVDSVK

SEQ ID NO: 26731 - protein, 10 aa, Homo Sapiens
SVMYSTLPGR

SEQ ID NO: 26732 - protein, 10 aa, Homo Sapiens
SVNIQALPDK

SEQ ID NO: 26733 - protein, 10 aa, Homo Sapiens
SVNPSVTTIK

SEQ ID NO: 26734 - protein, 10 aa, Homo Sapiens
SVPCSVAPEK

SEQ ID NO: 26735 - protein, 10 aa, Homo Sapiens
SVPDGKPLVR

SEQ ID NO: 26736 - protein, 10 aa, Homo Sapiens
SVPDYGQRLK

SEQ ID NO: 26737 - protein, 10 aa, Homo Sapiens
SVPGYYPSNK

SEQ ID NO: 26738 - protein, 10 aa, Homo Sapiens
SVPNGQTPLK

SEQ ID NO: 26739 - protein, 10 aa, Homo Sapiens
SVPREPIDRK

SEQ ID NO: 26740 - protein, 10 aa, Homo Sapiens
SVPSTPIAHR

SEQ ID NO: 26741 - protein, 10 aa, Homo Sapiens
SVPVAVVPSK

SEQ ID NO: 26742 - protein, 10 aa, Homo Sapiens
SVQEGIKFKK

SEQ ID NO: 26743 - protein, 10 aa, Homo Sapiens
SVQEKGVLLK

SEQ ID NO: 26744 - protein, 10 aa, Homo Sapiens
SVQLPKPVHK

SEQ ID NO: 26745 - protein, 10 aa, Homo Sapiens
SVQTQPAIKK

SEQ ID NO: 26746 - protein, 10 aa, Homo Sapiens
SVQVPEFTPK

SEQ ID NO: 26747 - protein, 10 aa, Homo Sapiens
SVSDLAPPRK

SEQ ID NO: 26748 - protein, 10 aa, Homo Sapiens
SVSNMVHTAK

SEQ ID NO: 26749 - protein, 10 aa, Homo Sapiens
SVSPPIPHLR

SEQ ID NO: 26750 - protein, 10 aa, Homo Sapiens
SVSQPIMVQR

SEQ ID NO: 26751 - protein, 10 aa, Homo Sapiens
SVSSAPTLLK

SEQ ID NO: 26752 - protein, 10 aa, Homo Sapiens
SVSTITRIYR

SEQ ID NO: 26753 - protein, 10 aa, Homo Sapiens
SVTDVKFAPK

SEQ ID NO: 26754 - protein, 10 aa, Homo Sapiens
SVTEAIPVSR

SEQ ID NO: 26755 - protein, 10 aa, Homo Sapiens
SVVGFPFLDK

SEQ ID NO: 26756 - protein, 10 aa, Homo Sapiens
SVYDALPLTR

SEQ ID NO: 26757 - protein, 10 aa, Homo Sapiens
SVYDHQGIFK

SEQ ID NO: 26758 - protein, 10 aa, Homo Sapiens
SVYDLTPGEK

SEQ ID NO: 26759 - protein, 10 aa, Homo Sapiens
SVYGYGVQKR

SEQ ID NO: 26760 - protein, 10 aa, Homo Sapiens
TAGLPTTLGP

SEQ ID NO: 26761 - protein, 10 aa, Homo Sapiens
TALPASPVAR

SEQ ID NO: 26762 - protein, 10 aa, Homo Sapiens
TALVSWLSAK

SEQ ID NO: 26763 - protein, 10 aa, Homo Sapiens
TAMDVVYALK

SEQ ID NO: 26764 - protein, 10 aa, Homo Sapiens
TAYGGKYSVK

SEQ ID NO: 26765 - protein, 10 aa, Homo Sapiens
TEAELLQLEK

SEQ ID NO: 26766 - protein, 10 aa, Homo Sapiens
TIDERAINKK

SEQ ID NO: 26767 - protein, 10 aa, Homo Sapiens
TILAGDVKVK

SEQ ID NO: 26768 - protein, 10 aa, Homo Sapiens
TIQSGEQPYK

SEQ ID NO: 26769 - protein, 10 aa, Homo Sapiens
TQEKNPLPSK

SEQ ID NO: 26770 - protein, 10 aa, Homo Sapiens
TSFDGSLIQK

SEQ ID NO: 26771 - protein, 10 aa, Homo Sapiens
TSLLGYFPNK

SEQ ID NO: 26772 - protein, 10 aa, Homo Sapiens
TSTCSPIISK

SEQ ID NO: 26773 - protein, 10 aa, Homo Sapiens
TTATGVFSLK

SEQ ID NO: 26774 - protein, 10 aa, Homo Sapiens
TTDSGPYFEK

SEQ ID NO: 26775 - protein, 10 aa, Homo Sapiens
TTEGQVQVLK

SEQ ID NO: 26776 - protein, 10 aa, Homo Sapiens
TTISSFPQLK

SEQ ID NO: 26777 - protein, 10 aa, Homo Sapiens
TTLAFKPIKK

SEQ ID NO: 26778 - protein, 10 aa, Homo Sapiens
TTLCKPLVPR

SEQ ID NO: 26779 - protein, 10 aa, Homo Sapiens
TTLPPPLFSK

SEQ ID NO: 26780 - protein, 10 aa, Homo Sapiens
TTNDIVISKL

SEQ ID NO: 26781 - protein, 10 aa, Homo Sapiens
TTSDPPNICK

SEQ ID NO: 26782 - protein, 10 aa, Homo Sapiens
TVAEISQFLK

SEQ ID NO: 26783 - protein, 10 aa, Homo Sapiens
TVAVPLVGKL

SEQ ID NO: 26784 - protein, 10 aa, Homo Sapiens
TVFKNGKVTK

SEQ ID NO: 26785 - protein, 10 aa, Homo Sapiens
TVFREPIICK

SEQ ID NO: 26786 - protein, 10 aa, Homo Sapiens
TVFTEEDFQK

SEQ ID NO: 26787 - protein, 10 aa, Homo Sapiens
TVISGPGTGK

SEQ ID NO: 26788 - protein, 10 aa, Homo Sapiens
TVLCQPTGGK

SEQ ID NO: 26789 - protein, 10 aa, Homo Sapiens
TVQDGRQFLK

SEQ ID NO: 26790 - protein, 10 aa, Homo Sapiens
TVYRNPESFK

SEQ ID NO: 26791 - protein, 10 aa, Homo Sapiens
VAQRDPIIAK

SEQ ID NO: 26792 - protein, 10 aa, Homo Sapiens
VFAAECILSK

SEQ ID NO: 26793 - protein, 10 aa, Homo Sapiens
VFRDPYRFKK

SEQ ID NO: 26794 - protein, 10 aa, Homo Sapiens
VINEVINSPK

SEQ ID NO: 26795 - protein, 10 aa, Homo Sapiens
VLFSAVMVVF

SEQ ID NO: 26796 - protein, 10 aa, Homo Sapiens
VLINVDPCAK

SEQ ID NO: 26797 - protein, 10 aa, Homo Sapiens
VMLGAETEEK

SEQ ID NO: 26798 - protein, 10 aa, Homo Sapiens
VNEAACDIAR

SEQ ID NO: 26799 - protein, 10 aa, Homo Sapiens
VQEFGLARFK

SEQ ID NO: 26800 - protein, 10 aa, Homo Sapiens
VSILLGTVPK

SEQ ID NO: 26801 - protein, 10 aa, Homo Sapiens
VSQIPPMAVK

SEQ ID NO: 26802 - protein, 10 aa, Homo Sapiens
VTDPSIPIRK

SEQ ID NO: 26803 - protein, 10 aa, Homo Sapiens
VTFGSIFGYK

SEQ ID NO: 26804 - protein, 10 aa, Homo Sapiens
VTGSWDQTVK

SEQ ID NO: 26805 - protein, 10 aa, Homo Sapiens
VTGTPELSAK

SEQ ID NO: 26806 - protein, 10 aa, Homo Sapiens
VTHRPPLSPK

SEQ ID NO: 26807 - protein, 10 aa, Homo Sapiens
VTIFIRGGNK

SEQ ID NO: 26808 - protein, 10 aa, Homo Sapiens
VTIIMNDYPK

SEQ ID NO: 26809 - protein, 10 aa, Homo Sapiens
VTIKEGSQLK

SEQ ID NO: 26810 - protein, 10 aa, Homo Sapiens
VTLSWKPVQK

SEQ ID NO: 26811 - protein, 10 aa, Homo Sapiens
VTMGFTGFGK

SEQ ID NO: 26812 - protein, 10 aa, Homo Sapiens
VTNDGATILK

SEQ ID NO: 26813 - protein, 10 aa, Homo Sapiens
VTQTPPYVKK

SEQ ID NO: 26814 - protein, 10 aa, Homo Sapiens
VTTGSEGLLK

SEQ ID NO: 26815 - protein, 10 aa, Homo Sapiens
VTVDGHLIRK

SEQ ID NO: 26816 - protein, 10 aa, Homo Sapiens
VTVDPKYHPK

SEQ ID NO: 26817 - protein, 10 aa, Homo Sapiens
VTVSIANMAV

SEQ ID NO: 26818 - protein, 10 aa, Homo Sapiens
VTYGGDPIPK

SEQ ID NO: 26819 - protein, 10 aa, Homo Sapiens
VTYNGVDNNK

SEQ ID NO: 26820 - protein, 10 aa, Homo Sapiens
VTYSDVGGCK

SEQ ID NO: 26821 - protein, 10 aa, Homo Sapiens
VTYVPVTTFK

SEQ ID NO: 26822 - protein, 10 aa, Homo Sapiens
VVAGYGDVGK

SEQ ID NO: 26823 - protein, 10 aa, Homo Sapiens
VVAVPLPLHR

SEQ ID NO: 26824 - protein, 10 aa, Homo Sapiens
VVCVEGIVTK

SEQ ID NO: 26825 - protein, 10 aa, Homo Sapiens
VVDVPFGGAK

SEQ ID NO: 26826 - protein, 10 aa, Homo Sapiens
VVGVYRPPPK

SEQ ID NO: 26827 - protein, 10 aa, Homo Sapiens
VVINVNNILK

SEQ ID NO: 26828 - protein, 10 aa, Homo Sapiens
VVLGQFLVLK

SEQ ID NO: 26829 - protein, 10 aa, Homo Sapiens
VVMAADRSLK

SEQ ID NO: 26830 - protein, 10 aa, Homo Sapiens
VVMENVGQQK

SEQ ID NO: 26831 - protein, 10 aa, Homo Sapiens
VVMVNQGLTK

SEQ ID NO: 26832 - protein, 10 aa, Homo Sapiens
VVNKVPLTGK

SEQ ID NO: 26833 - protein, 10 aa, Homo Sapiens
VVPKAAIVAR

SEQ ID NO: 26834 - protein, 10 aa, Homo Sapiens
VVQDMLVPMK

SEQ ID NO: 26835 - protein, 10 aa, Homo Sapiens
VVQEPGQVFK

SEQ ID NO: 26836 - protein, 10 aa, Homo Sapiens
VVQNGFFAHK

SEQ ID NO: 26837 - protein, 10 aa, Homo Sapiens
VVVDPIQSVK

SEQ ID NO: 26838 - protein, 10 aa, Homo Sapiens
VVYEDIFDAK

SEQ ID NO: 26839 - protein, 10 aa, Homo Sapiens
VVYPPPVDPK

SEQ ID NO: 26840 - protein, 10 aa, Homo Sapiens
VVYTSHLQLK

SEQ ID NO: 26841 - protein, 10 aa, Homo Sapiens
VYGQKEIHRK

SEQ ID NO: 26842 - protein, 10 aa, Homo Sapiens
YGLAAAVFTK

SEQ ID NO: 26843 - protein, 10 aa, Homo Sapiens
YIYDGELVSK

SEQ ID NO: 26844 - protein, 11 aa, Homo Sapiens
AACYNNQQVFK

SEQ ID NO: 26845 - protein, 11 aa, Homo Sapiens
AALGQVCSSIK

SEQ ID NO: 26846 - protein, 11 aa, Homo Sapiens
AALQSERLVSK

SEQ ID NO: 26847 - protein, 11 aa, Homo Sapiens
AAMNMGRPFQK

SEQ ID NO: 26848 - protein, 11 aa, Homo Sapiens
AANPDPKKLLK

SEQ ID NO: 26849 - protein, 11 aa, Homo Sapiens
AAQDSTDLVAK

SEQ ID NO: 26850 - protein, 11 aa, Homo Sapiens
AASKERSGVSL

SEQ ID NO: 26851 - protein, 11 aa, Homo Sapiens
AATGATPIAGR

SEQ ID NO: 26852 - protein, 11 aa, Homo Sapiens
ADCGLRPLFEK

SEQ ID NO: 26853 - protein, 11 aa, Homo Sapiens
AEAEAHREAEA

SEQ ID NO: 26854 - protein, 11 aa, Homo Sapiens
AELHLVHWNPK

SEQ ID NO: 26855 - protein, 11 aa, Homo Sapiens
AGFDATNILNK

SEQ ID NO: 26856 - protein, 11 aa, Homo Sapiens
AGSSQSLSFPK

SEQ ID NO: 26857 - protein, 11 aa, Homo Sapiens
AIAPPTSLVEK

SEQ ID NO: 26858 - protein, 11 aa, Homo Sapiens
AIAQAESLRYK

SEQ ID NO: 26859 - protein, 11 aa, Homo Sapiens
AIFEVNTDLQK

SEQ ID NO: 26860 - protein, 11 aa, Homo Sapiens
AIFGNADPAQK

SEQ ID NO: 26861 - protein, 11 aa, Homo Sapiens
AIIGKQGQHIK

SEQ ID NO: 26862 - protein, 11 aa, Homo Sapiens
AIIPSKKLRNK

SEQ ID NO: 26863 - protein, 11 aa, Homo Sapiens
AIMDPLPLRTK

SEQ ID NO: 26864 - protein, 11 aa, Homo Sapiens
AIQAEEIMKLK

SEQ ID NO: 26865 - protein, 11 aa, Homo Sapiens
AIQDLKLLANK

SEQ ID NO: 26866 - protein, 11 aa, Homo Sapiens
AIQQADKLLKK

SEQ ID NO: 26867 - protein, 11 aa, Homo Sapiens
AIYDGFDGFAK

SEQ ID NO: 26868 - protein, 11 aa, Homo Sapiens
AIYKTPPGIQK

SEQ ID NO: 26869 - protein, 11 aa, Homo Sapiens
ALFNPDVCWDR

SEQ ID NO: 26870 - protein, 11 aa, Homo Sapiens
ALLDGSNVVFK

SEQ ID NO: 26871 - protein, 11 aa, Homo Sapiens
ALLRVTPFILK

SEQ ID NO: 26872 - protein, 11 aa, Homo Sapiens
ALLSHQDIHNK

SEQ ID NO: 26873 - protein, 11 aa, Homo Sapiens
ALNEANLSNLK

SEQ ID NO: 26874 - protein, 11 aa, Homo Sapiens
ALPLDTVTFYK

SEQ ID NO: 26875 - protein, 11 aa, Homo Sapiens
ALPVLERLIYK

SEQ ID NO: 26876 - protein, 11 aa, Homo Sapiens
AMMNNNDLVRK

SEQ ID NO: 26877 - protein, 11 aa, Homo Sapiens
AQICSSIRTHK

SEQ ID NO: 26878 - protein, 11 aa, Homo Sapiens
AQIENSAAVEK

SEQ ID NO: 26879 - protein, 11 aa, Homo Sapiens
AQIENSAAVQK

SEQ ID NO: 26880 - protein, 11 aa, Homo Sapiens
AQQEHPRPYFK

SEQ ID NO: 26881 - protein, 11 aa, Homo Sapiens
AQYEQDLQHRK

SEQ ID NO: 26882 - protein, 11 aa, Homo Sapiens
AQYSPQQLAGK

SEQ ID NO: 26883 - protein, 11 aa, Homo Sapiens
ASANLGGVPSK

SEQ ID NO: 26884 - protein, 11 aa, Homo Sapiens
ASDPNVSKKLK

SEQ ID NO: 26885 - protein, 11 aa, Homo Sapiens
ASFDATTCIWK

SEQ ID NO: 26886 - protein, 11 aa, Homo Sapiens
ASFLPPSSVKK

SEQ ID NO: 26887 - protein, 11 aa, Homo Sapiens
ASFNAYENHLK

SEQ ID NO: 26888 - protein, 11 aa, Homo Sapiens
ASFTQKGNLLR

SEQ ID NO: 26889 - protein, 11 aa, Homo Sapiens
ASFVPKPGSLK

SEQ ID NO: 26890 - protein, 11 aa, Homo Sapiens
ASHRPIKGILK

SEQ ID NO: 26891 - protein, 11 aa, Homo Sapiens
ASIAGSSIINK

SEQ ID NO: 26892 - protein, 11 aa, Homo Sapiens
ASIEKGGSLPK

SEQ ID NO: 26893 - protein, 11 aa, Homo Sapiens
ASIFVKDNVTK

SEQ ID NO: 26894 - protein, 11 aa, Homo Sapiens
ASIIGVNLATK

SEQ ID NO: 26895 - protein, 11 aa, Homo Sapiens
ASILVKDYILK

SEQ ID NO: 26896 - protein, 11 aa, Homo Sapiens
ASLDISRKWEK

SEQ ID NO: 26897 - protein, 11 aa, Homo Sapiens
ASLFPDSLIVK

SEQ ID NO: 26898 - protein, 11 aa, Homo Sapiens
ASLLDVFVLTR

SEQ ID NO: 26899 - protein, 11 aa, Homo Sapiens
ASLPSESNEPK

SEQ ID NO: 26900 - protein, 11 aa, Homo Sapiens
ASLREEECVMK

SEQ ID NO: 26901 - protein, 11 aa, Homo Sapiens
ASMPDNTAAQK

SEQ ID NO: 26902 - protein, 11 aa, Homo Sapiens
ASPQLLRIIFK

SEQ ID NO: 26903 - protein, 11 aa, Homo Sapiens
ASQEIAEKALK

SEQ ID NO: 26904 - protein, 11 aa, Homo Sapiens
ASSPGGVYATR

SEQ ID NO: 26905 - protein, 11 aa, Homo Sapiens
ASYPGASVDNY

SEQ ID NO: 26906 - protein, 11 aa, Homo Sapiens
ATAAAIGATPR

SEQ ID NO: 26907 - protein, 11 aa, Homo Sapiens
ATAASSSSLEK

SEQ ID NO: 26908 - protein, 11 aa, Homo Sapiens
ATADDFLVFLR

SEQ ID NO: 26909 - protein, 11 aa, Homo Sapiens
ATAGIIGVNRK

SEQ ID NO: 26910 - protein, 11 aa, Homo Sapiens
ATAGKDDCLLK

SEQ ID NO: 26911 - protein, 11 aa, Homo Sapiens
ATALFGQPPFK

SEQ ID NO: 26912 - protein, 11 aa, Homo Sapiens
ATAPPHVTVVR

SEQ ID NO: 26913 - protein, 11 aa, Homo Sapiens
ATASAIEAMKK

SEQ ID NO: 26914 - protein, 11 aa, Homo Sapiens
ATASPFSGLQK

SEQ ID NO: 26915 - protein, 11 aa, Homo Sapiens
ATATANQIILK

SEQ ID NO: 26916 - protein, 11 aa, Homo Sapiens
ATATVAALQEK

SEQ ID NO: 26917 - protein, 11 aa, Homo Sapiens
ATCEQLTYYSK

SEQ ID NO: 26918 - protein, 11 aa, Homo Sapiens
ATCFATKNGIK

SEQ ID NO: 26919 - protein, 11 aa, Homo Sapiens
ATCLPNQTVLK

SEQ ID NO: 26920 - protein, 11 aa, Homo Sapiens
ATDDSLHQLRK

SEQ ID NO: 26921 - protein, 11 aa, Homo Sapiens
ATDELSSALAK

SEQ ID NO: 26922 - protein, 11 aa, Homo Sapiens
ATDPNILGRTW

SEQ ID NO: 26923 - protein, 11 aa, Homo Sapiens
ATETVELHKLK

SEQ ID NO: 26924 - protein, 11 aa, Homo Sapiens
ATFEQPSRQVK

SEQ ID NO: 26925 - protein, 11 aa, Homo Sapiens
ATFNEDVQALK

SEQ ID NO: 26926 - protein, 11 aa, Homo Sapiens
ATFPVAPRYAK

SEQ ID NO: 26927 - protein, 11 aa, Homo Sapiens
ATFRFPGALQH

SEQ ID NO: 26928 - protein, 11 aa, Homo Sapiens
ATGATFAHICK

SEQ ID NO: 26929 - protein, 11 aa, Homo Sapiens
ATGGAGFCINR

SEQ ID NO: 26930 - protein, 11 aa, Homo Sapiens
ATHSSRFIPLK

SEQ ID NO: 26931 - protein, 11 aa, Homo Sapiens
ATIDLNSVLER

SEQ ID NO: 26932 - protein, 11 aa, Homo Sapiens
ATIEVDQIHTH

SEQ ID NO: 26933 - protein, 11 aa, Homo Sapiens
ATIFGPNLLHK

SEQ ID NO: 26934 - protein, 11 aa, Homo Sapiens
ATIGHVEKFLR

SEQ ID NO: 26935 - protein, 11 aa, Homo Sapiens
ATIKDGKSLTK

SEQ ID NO: 26936 - protein, 11 aa, Homo Sapiens
ATILAGDIKVK

SEQ ID NO: 26937 - protein, 11 aa, Homo Sapiens
ATILAGDVKVK

SEQ ID NO: 26938 - protein, 11 aa, Homo Sapiens
ATIRVLEAIQK

SEQ ID NO: 26939 - protein, 11 aa, Homo Sapiens
ATITDKELLKK

SEQ ID NO: 26940 - protein, 11 aa, Homo Sapiens
ATITDKEMLKK

SEQ ID NO: 26941 - protein, 11 aa, Homo Sapiens
ATITERGITSR

SEQ ID NO: 26942 - protein, 11 aa, Homo Sapiens
ATKGPSYEDLY

SEQ ID NO: 26943 - protein, 11 aa, Homo Sapiens
ATLDVGGLVFK

SEQ ID NO: 26944 - protein, 11 aa, Homo Sapiens
ATLEETLVKKK

SEQ ID NO: 26945 - protein, 11 aa, Homo Sapiens
ATLGDLKLVEK

SEQ ID NO: 26946 - protein, 11 aa, Homo Sapiens
ATLIGLSIKVK

SEQ ID NO: 26947 - protein, 11 aa, Homo Sapiens
ATLKDITRRLK

SEQ ID NO: 26948 - protein, 11 aa, Homo Sapiens
ATLLASNEAFK

SEQ ID NO: 26949 - protein, 11 aa, Homo Sapiens
ATLPDLKTMEK

SEQ ID NO: 26950 - protein, 11 aa, Homo Sapiens
ATLSELKTVLK

SEQ ID NO: 26951 - protein, 11 aa, Homo Sapiens
ATLTTTSATSK

SEQ ID NO: 26952 - protein, 11 aa, Homo Sapiens
ATMGETVMSVK

SEQ ID NO: 26953 - protein, 11 aa, Homo Sapiens
ATMKPHPTVQK

SEQ ID NO: 26954 - protein, 11 aa, Homo Sapiens
ATMPASVVGQR

SEQ ID NO: 26955 - protein, 11 aa, Homo Sapiens
ATMSEVEWRGR

SEQ ID NO: 26956 - protein, 11 aa, Homo Sapiens
ATMTIEELLTR

SEQ ID NO: 26957 - protein, 11 aa, Homo Sapiens
ATMVPSVLWPR

SEQ ID NO: 26958 - protein, 11 aa, Homo Sapiens
ATNNLMKLVQK

SEQ ID NO: 26959 - protein, 11 aa, Homo Sapiens
ATPELGSSLKK

SEQ ID NO: 26960 - protein, 11 aa, Homo Sapiens
ATPGADVCFAR

SEQ ID NO: 26961 - protein, 11 aa, Homo Sapiens
ATPSPSNETPK

SEQ ID NO: 26962 - protein, 11 aa, Homo Sapiens
ATQAIFEILEK

SEQ ID NO: 26963 - protein, 11 aa, Homo Sapiens
ATQEGEWKALK

SEQ ID NO: 26964 - protein, 11 aa, Homo Sapiens
ATQGELVRSLK

SEQ ID NO: 26965 - protein, 11 aa, Homo Sapiens
ATQLAADLLKY

SEQ ID NO: 26966 - protein, 11 aa, Homo Sapiens
ATQLPESTSLR

SEQ ID NO: 26967 - protein, 11 aa, Homo Sapiens
ATQMLESMIKK

SEQ ID NO: 26968 - protein, 11 aa, Homo Sapiens
ATQPGTTILQY

SEQ ID NO: 26969 - protein, 11 aa, Homo Sapiens
ATQPWNRIQRR

SEQ ID NO: 26970 - protein, 11 aa, Homo Sapiens
ATQSAQVLLEK

SEQ ID NO: 26971 - protein, 11 aa, Homo Sapiens
ATSDAVGSSLK

SEQ ID NO: 26972 - protein, 11 aa, Homo Sapiens
ATSESIFSTCK

SEQ ID NO: 26973 - protein, 11 aa, Homo Sapiens
ATSIDRLKVFK

SEQ ID NO: 26974 - protein, 11 aa, Homo Sapiens
ATSPHLESLLK

SEQ ID NO: 26975 - protein, 11 aa, Homo Sapiens
ATSYFGKQFLR

SEQ ID NO: 26976 - protein, 11 aa, Homo Sapiens
ATTSELEAINK

SEQ ID NO: 26977 - protein, 11 aa, Homo Sapiens
ATVEETVVRDK

SEQ ID NO: 26978 - protein, 11 aa, Homo Sapiens
ATVGKATGFLK

SEQ ID NO: 26979 - protein, 11 aa, Homo Sapiens
ATVILANHVAK

SEQ ID NO: 26980 - protein, 11 aa, Homo Sapiens
ATVLKEGVLEK

SEQ ID NO: 26981 - protein, 11 aa, Homo Sapiens
ATYAPVISAEK

SEQ ID NO: 26982 - protein, 11 aa, Homo Sapiens
ATYEAGALSLK

SEQ ID NO: 26983 - protein, 11 aa, Homo Sapiens
ATYFDSEVVPR

SEQ ID NO: 26984 - protein, 11 aa, Homo Sapiens
ATYFPSFQGPK

SEQ ID NO: 26985 - protein, 11 aa, Homo Sapiens
ATYHGNKEIVK

SEQ ID NO: 26986 - protein, 11 aa, Homo Sapiens
ATYPDVNNSIK

SEQ ID NO: 26987 - protein, 11 aa, Homo Sapiens
ATYPYQVVRAR

SEQ ID NO: 26988 - protein, 11 aa, Homo Sapiens
AVADKVHLMYK

SEQ ID NO: 26989 - protein, 11 aa, Homo Sapiens
AVAEEVNAILK

SEQ ID NO: 26990 - protein, 11 aa, Homo Sapiens
AVAELKDCIEK

SEQ ID NO: 26991 - protein, 11 aa, Homo Sapiens
AVAEVRAENLK

SEQ ID NO: 26992 - protein, 11 aa, Homo Sapiens
AVAGDFALINK

SEQ ID NO: 26993 - protein, 11 aa, Homo Sapiens
AVAGQELCQPR

SEQ ID NO: 26994 - protein, 11 aa, Homo Sapiens
AVALINAAIQK

SEQ ID NO: 26995 - protein, 11 aa, Homo Sapiens
AVANAQELLQR

SEQ ID NO: 26996 - protein, 11 aa, Homo Sapiens
AVAPVASALEK

SEQ ID NO: 26997 - protein, 11 aa, Homo Sapiens
AVASEDSVLLY

SEQ ID NO: 26998 - protein, 11 aa, Homo Sapiens
AVDPRQGRARG

SEQ ID NO: 26999 - protein, 11 aa, Homo Sapiens
AVELPEASAPK

SEQ ID NO: 27000 - protein, 11 aa, Homo Sapiens
AVFDHPAKIAK

SEQ ID NO: 27001 - protein, 11 aa, Homo Sapiens
AVFILTDNISK

SEQ ID NO: 27002 - protein, 11 aa, Homo Sapiens
AVFISDIRNCK

SEQ ID NO: 27003 - protein, 11 aa, Homo Sapiens
AVFLAEMTVKV

SEQ ID NO: 27004 - protein, 11 aa, Homo Sapiens
AVFPSLLTNPK

SEQ ID NO: 27005 - protein, 11 aa, Homo Sapiens
AVGEVEDSIFK

SEQ ID NO: 27006 - protein, 11 aa, Homo Sapiens
AVHDIAEKLIK

SEQ ID NO: 27007 - protein, 11 aa, Homo Sapiens
AVHEAWAGMLK

SEQ ID NO: 27008 - protein, 11 aa, Homo Sapiens
AVHPQFKEIQK

SEQ ID NO: 27009 - protein, 11 aa, Homo Sapiens
AVHRITPEEAK

SEQ ID NO: 27010 - protein, 11 aa, Homo Sapiens
AVIGADSVTLK

SEQ ID NO: 27011 - protein, 11 aa, Homo Sapiens
AVINAYTEINK

SEQ ID NO: 27012 - protein, 11 aa, Homo Sapiens
AVIPEKQLVEK

SEQ ID NO: 27013 - protein, 11 aa, Homo Sapiens
AVISQCIYRHR

SEQ ID NO: 27014 - protein, 11 aa, Homo Sapiens
AVLEKQDISDK

SEQ ID NO: 27015 - protein, 11 aa, Homo Sapiens
AVLGLGHVRYK

SEQ ID NO: 27016 - protein, 11 aa, Homo Sapiens
AVLKPRRVCVG

SEQ ID NO: 27017 - protein, 11 aa, Homo Sapiens
AVLSKGEIVVK

SEQ ID NO: 27018 - protein, 11 aa, Homo Sapiens
AVLSKSELLTK

SEQ ID NO: 27019 - protein, 11 aa, Homo Sapiens
AVLSSGLTAAR

SEQ ID NO: 27020 - protein, 11 aa, Homo Sapiens
AVLTALDVLQK

SEQ ID NO: 27021 - protein, 11 aa, Homo Sapiens
AVLTHSGFPAK

SEQ ID NO: 27022 - protein, 11 aa, Homo Sapiens
AVMAESAFSFK

SEQ ID NO: 27023 - protein, 11 aa, Homo Sapiens
AVMDGNVITAK

SEQ ID NO: 27024 - protein, 11 aa, Homo Sapiens
AVMDNKNPTIK

SEQ ID NO: 27025 - protein, 11 aa, Homo Sapiens
AVMKDVVLIRK

SEQ ID NO: 27026 - protein, 11 aa, Homo Sapiens
AVPEIMDRIYK

SEQ ID NO: 27027 - protein, 11 aa, Homo Sapiens
AVPEKQDIMKK

SEQ ID NO: 27028 - protein, 11 aa, Homo Sapiens
AVQGISGLPLK

SEQ ID NO: 27029 - protein, 11 aa, Homo Sapiens
AVQLLQFLAPK

SEQ ID NO: 27030 - protein, 11 aa, Homo Sapiens
AVQTAAKELLK

SEQ ID NO: 27031 - protein, 11 aa, Homo Sapiens
AVQVVADVLSK

SEQ ID NO: 27032 - protein, 11 aa, Homo Sapiens
AVSEGTKAVTK

SEQ ID NO: 27033 - protein, 11 aa, Homo Sapiens
AVSKDIANWQK

SEQ ID NO: 27034 - protein, 11 aa, Homo Sapiens
AVSSYISYQQK

SEQ ID NO: 27035 - protein, 11 aa, Homo Sapiens
AVTEAEIQQLK

SEQ ID NO: 27036 - protein, 11 aa, Homo Sapiens
AVVDVRIGMTR

SEQ ID NO: 27037 - protein, 11 aa, Homo Sapiens
AVVGGLDIHKK

SEQ ID NO: 27038 - protein, 11 aa, Homo Sapiens
AVVQVALDKAR

SEQ ID NO: 27039 - protein, 11 aa, Homo Sapiens
AVVVPSGEEQR

SEQ ID NO: 27040 - protein, 11 aa, Homo Sapiens
AVYADSGNFKR

SEQ ID NO: 27041 - protein, 11 aa, Homo Sapiens
AVYDRPGASPK

SEQ ID NO: 27042 - protein, 11 aa, Homo Sapiens
AVYEGHVSCVK

SEQ ID NO: 27043 - protein, 11 aa, Homo Sapiens
AVYELERILNR

SEQ ID NO: 27044 - protein, 11 aa, Homo Sapiens
AVYGMLNLTPK

SEQ ID NO: 27045 - protein, 11 aa, Homo Sapiens
AVYGQKEIHRK

SEQ ID NO: 27046 - protein, 11 aa, Homo Sapiens
AVYGQNDIHHK

SEQ ID NO: 27047 - protein, 11 aa, Homo Sapiens
AVYLSTCKDSK

SEQ ID NO: 27048 - protein, 11 aa, Homo Sapiens
DGWLHTGDIGK

SEQ ID NO: 27049 - protein, 11 aa, Homo Sapiens
ETFAPILYVFK

SEQ ID NO: 27050 - protein, 11 aa, Homo Sapiens
FDVKSGSAVHK

SEQ ID NO: 27051 - protein, 11 aa, Homo Sapiens
FLYSFCQQSRR

SEQ ID NO: 27052 - protein, 11 aa, Homo Sapiens
FSYSFSYKHLK

SEQ ID NO: 27053 - protein, 11 aa, Homo Sapiens
FVAVTSTNAAK

SEQ ID NO: 27054 - protein, 11 aa, Homo Sapiens
GAYSQSPAIKK

SEQ ID NO: 27055 - protein, 11 aa, Homo Sapiens
GHQQLYWSHPR

SEQ ID NO: 27056 - protein, 11 aa, Homo Sapiens
GLLKVHYSDRL

SEQ ID NO: 27057 - protein, 11 aa, Homo Sapiens
GQNPTNAEVLK

SEQ ID NO: 27058 - protein, 11 aa, Homo Sapiens
GSFASIFWLKK

SEQ ID NO: 27059 - protein, 11 aa, Homo Sapiens
GSFEVVSTLIK

SEQ ID NO: 27060 - protein, 11 aa, Homo Sapiens
GSLPGDKIRNK

SEQ ID NO: 27061 - protein, 11 aa, Homo Sapiens
GSLPGGSVISR

SEQ ID NO: 27062 - protein, 11 aa, Homo Sapiens
GSQGVRDFIEK

SEQ ID NO: 27063 - protein, 11 aa, Homo Sapiens
GSSPEQVVRPK

SEQ ID NO: 27064 - protein, 11 aa, Homo Sapiens
GSSSDTYLFKK

SEQ ID NO: 27065 - protein, 11 aa, Homo Sapiens
GSVPNGQTPLK

SEQ ID NO: 27066 - protein, 11 aa, Homo Sapiens
GSYIELPAYLK

SEQ ID NO: 27067 - protein, 11 aa, Homo Sapiens
GTAAIGYLAYK

SEQ ID NO: 27068 - protein, 11 aa, Homo Sapiens
GTAPSKPPLTK

SEQ ID NO: 27069 - protein, 11 aa, Homo Sapiens
GTASVLQPVKK

SEQ ID NO: 27070 - protein, 11 aa, Homo Sapiens
GTAYCTALYLR

SEQ ID NO: 27071 - protein, 11 aa, Homo Sapiens
GTCHNLPGLFR

SEQ ID NO: 27072 - protein, 11 aa, Homo Sapiens
GTEFGGSIYQK

SEQ ID NO: 27073 - protein, 11 aa, Homo Sapiens
GTFASVEQFWR

SEQ ID NO: 27074 - protein, 11 aa, Homo Sapiens
GTFGGLGSKSK

SEQ ID NO: 27075 - protein, 11 aa, Homo Sapiens
GTFIWNKALEK

SEQ ID NO: 27076 - protein, 11 aa, Homo Sapiens
GTFSTVTSTVK

SEQ ID NO: 27077 - protein, 11 aa, Homo Sapiens
GTFVSPEVFLK

SEQ ID NO: 27078 - protein, 11 aa, Homo Sapiens
GTIEKSKLITK

SEQ ID NO: 27079 - protein, 11 aa, Homo Sapiens
GTIFAELATKK

SEQ ID NO: 27080 - protein, 11 aa, Homo Sapiens
GTIFIIKGVRK

SEQ ID NO: 27081 - protein, 11 aa, Homo Sapiens
GTIIVSGSTEK

SEQ ID NO: 27082 - protein, 11 aa, Homo Sapiens
GTIRSRSFIFK

SEQ ID NO: 27083 - protein, 11 aa, Homo Sapiens
GTISLWSIISK

SEQ ID NO: 27084 - protein, 11 aa, Homo Sapiens
GTLGFGDKFKR

SEQ ID NO: 27085 - protein, 11 aa, Homo Sapiens
GTLREYKVVGR

SEQ ID NO: 27086 - protein, 11 aa, Homo Sapiens
GTLSPLDIYPK

SEQ ID NO: 27087 - protein, 11 aa, Homo Sapiens
GTLTVEAPMPK

SEQ ID NO: 27088 - protein, 11 aa, Homo Sapiens
GTMNLGGSLTR

SEQ ID NO: 27089 - protein, 11 aa, Homo Sapiens
GTPGPSITGVP

SEQ ID NO: 27090 - protein, 11 aa, Homo Sapiens
GTQAIAHIHNK

SEQ ID NO: 27091 - protein, 11 aa, Homo Sapiens
GTQTDLFTCGK

SEQ ID NO: 27092 - protein, 11 aa, Homo Sapiens
GTSDRFSRILK

SEQ ID NO: 27093 - protein, 11 aa, Homo Sapiens
GTSPTAETILK

SEQ ID NO: 27094 - protein, 11 aa, Homo Sapiens
GTSSAASSPLK

SEQ ID NO: 27095 - protein, 11 aa, Homo Sapiens
GTVAGAAVLLK

SEQ ID NO: 27096 - protein, 11 aa, Homo Sapiens
GTVDVTPFIKK

SEQ ID NO: 27097 - protein, 11 aa, Homo Sapiens
GTYGLDSVKKK

SEQ ID NO: 27098 - protein, 11 aa, Homo Sapiens
GVAGAVAVFPK

SEQ ID NO: 27099 - protein, 11 aa, Homo Sapiens
GVDSSIFQNPK

SEQ ID NO: 27100 - protein, 11 aa, Homo Sapiens
GVFEGKLNVIK

SEQ ID NO: 27101 - protein, 11 aa, Homo Sapiens
GVFTPGAAFSK

SEQ ID NO: 27102 - protein, 11 aa, Homo Sapiens
GVFWTGSGFAK

SEQ ID NO: 27103 - protein, 11 aa, Homo Sapiens
GVIGLLEPMKK

SEQ ID NO: 27104 - protein, 11 aa, Homo Sapiens
GVIGQDGLLFK

SEQ ID NO: 27105 - protein, 11 aa, Homo Sapiens
GVIPESVILLK

SEQ ID NO: 27106 - protein, 11 aa, Homo Sapiens
GVLGSSKVLAK

SEQ ID NO: 27107 - protein, 11 aa, Homo Sapiens
GVLQLGNIVFK

SEQ ID NO: 27108 - protein, 11 aa, Homo Sapiens
GVQEPGVFISK

SEQ ID NO: 27109 - protein, 11 aa, Homo Sapiens
GVQGFQEFLEK

SEQ ID NO: 27110 - protein, 11 aa, Homo Sapiens
GVRGMDGPQGP

SEQ ID NO: 27111 - protein, 11 aa, Homo Sapiens
HLDIEAFTMDR

SEQ ID NO: 27112 - protein, 11 aa, Homo Sapiens
HLGLPVFNTVK

SEQ ID NO: 27113 - protein, 11 aa, Homo Sapiens
HSIDGRVVEPK

SEQ ID NO: 27114 - protein, 11 aa, Homo Sapiens
HSMDTLLATLK

SEQ ID NO: 27115 - protein, 11 aa, Homo Sapiens
HTLDSYRILQK

SEQ ID NO: 27116 - protein, 11 aa, Homo Sapiens
HTMNVPSLFSK

SEQ ID NO: 27117 - protein, 11 aa, Homo Sapiens
HVLEAQDLIAK

SEQ ID NO: 27118 - protein, 11 aa, Homo Sapiens
HVLEDIAKFFK

SEQ ID NO: 27119 - protein, 11 aa, Homo Sapiens
IGIPSEIISPK

SEQ ID NO: 27120 - protein, 11 aa, Homo Sapiens
IIAEILSVYQK

SEQ ID NO: 27121 - protein, 11 aa, Homo Sapiens
IILEPDKNPKK

SEQ ID NO: 27122 - protein, 11 aa, Homo Sapiens
IIYDPKLQTPK

SEQ ID NO: 27123 - protein, 11 aa, Homo Sapiens
IQEDPDELLFK

SEQ ID NO: 27124 - protein, 11 aa, Homo Sapiens
ISDPTSPLRTR

SEQ ID NO: 27125 - protein, 11 aa, Homo Sapiens
ITDPHSPSRFR

SEQ ID NO: 27126 - protein, 11 aa, Homo Sapiens
KASSEMALYQK

SEQ ID NO: 27127 - protein, 11 aa, Homo Sapiens
KGVPGKEGVPG

SEQ ID NO: 27128 - protein, 11 aa, Homo Sapiens
KILERDQQICK

SEQ ID NO: 27129 - protein, 11 aa, Homo Sapiens
KIPDLKLLVEK

SEQ ID NO: 27130 - protein, 11 aa, Homo Sapiens
KLFPGSPAIYK

SEQ ID NO: 27131 - protein, 11 aa, Homo Sapiens
KLISEEDLLRK

SEQ ID NO: 27132 - protein, 11 aa, Homo Sapiens
KQQAHDLLINK

SEQ ID NO: 27133 - protein, 11 aa, Homo Sapiens
KSFEDRVGTIK

SEQ ID NO: 27134 - protein, 11 aa, Homo Sapiens
KSLGHGLINKK

SEQ ID NO: 27135 - protein, 11 aa, Homo Sapiens
KSLPAEINRMK

SEQ ID NO: 27136 - protein, 11 aa, Homo Sapiens
KTAEDAKDFFK

SEQ ID NO: 27137 - protein, 11 aa, Homo Sapiens
KTFANRVNNLK

SEQ ID NO: 27138 - protein, 11 aa, Homo Sapiens
KTFGETHPFTK

SEQ ID NO: 27139 - protein, 11 aa, Homo Sapiens
KTFTIKRFLAK

SEQ ID NO: 27140 - protein, 11 aa, Homo Sapiens
KTIDMELVKRK

SEQ ID NO: 27141 - protein, 11 aa, Homo Sapiens
KTLAYRGFIFK

SEQ ID NO: 27142 - protein, 11 aa, Homo Sapiens
KTLDEILQEKK

SEQ ID NO: 27143 - protein, 11 aa, Homo Sapiens
KTLDQAKAVLK

SEQ ID NO: 27144 - protein, 11 aa, Homo Sapiens
KTLPADVQNYY

SEQ ID NO: 27145 - protein, 11 aa, Homo Sapiens
KTLPAMLGTGK

SEQ ID NO: 27146 - protein, 11 aa, Homo Sapiens
KTLVAELLILK

SEQ ID NO: 27147 - protein, 11 aa, Homo Sapiens
KTMDVSKVKLK

SEQ ID NO: 27148 - protein, 11 aa, Homo Sapiens
KTMEDTLMTVK

SEQ ID NO: 27149 - protein, 11 aa, Homo Sapiens
KTQEPDNLLFY

SEQ ID NO: 27150 - protein, 11 aa, Homo Sapiens
KTQEPFSVRNK

SEQ ID NO: 27151 - protein, 11 aa, Homo Sapiens
KTSGSNVKIVK

SEQ ID NO: 27152 - protein, 11 aa, Homo Sapiens
KTSTVPPSLRK

SEQ ID NO: 27153 - protein, 11 aa, Homo Sapiens
KTVAGGAWTYK

SEQ ID NO: 27154 - protein, 11 aa, Homo Sapiens
KTYGCVPVANK

SEQ ID NO: 27155 - protein, 11 aa, Homo Sapiens
KTYGVSFFLVK

SEQ ID NO: 27156 - protein, 11 aa, Homo Sapiens
KTYHALSNLPK

SEQ ID NO: 27157 - protein, 11 aa, Homo Sapiens
KTYIPPKGETK

SEQ ID NO: 27158 - protein, 11 aa, Homo Sapiens
KVFDPSCGLPY

SEQ ID NO: 27159 - protein, 11 aa, Homo Sapiens
KVFGNEIKLEK

SEQ ID NO: 27160 - protein, 11 aa, Homo Sapiens
KVFHAERIVRK

SEQ ID NO: 27161 - protein, 11 aa, Homo Sapiens
KVFPEDMAKYR

SEQ ID NO: 27162 - protein, 11 aa, Homo Sapiens
KVFVKSSDLLK

SEQ ID NO: 27163 - protein, 11 aa, Homo Sapiens
KVIDGERVIGR

SEQ ID NO: 27164 - protein, 11 aa, Homo Sapiens
KVITSSSSFAK

SEQ ID NO: 27165 - protein, 11 aa, Homo Sapiens
KVLGQGKWNLK

SEQ ID NO: 27166 - protein, 11 aa, Homo Sapiens
KVLPGDHEYPK

SEQ ID NO: 27167 - protein, 11 aa, Homo Sapiens
KVLPSHLITYK

SEQ ID NO: 27168 - protein, 11 aa, Homo Sapiens
KVNPIQGLASK

SEQ ID NO: 27169 - protein, 11 aa, Homo Sapiens
KVQDVKKTIQK

SEQ ID NO: 27170 - protein, 11 aa, Homo Sapiens
KVSSINSRFAK

SEQ ID NO: 27171 - protein, 11 aa, Homo Sapiens
KVVPEMTEILK

SEQ ID NO: 27172 - protein, 11 aa, Homo Sapiens
KVYEGERPLTK

SEQ ID NO: 27173 - protein, 11 aa, Homo Sapiens
LEVDPNIQAVR

SEQ ID NO: 27174 - protein, 11 aa, Homo Sapiens
LGVDFIDVATK

SEQ ID NO: 27175 - protein, 11 aa, Homo Sapiens
LIIFADCDLNK

SEQ ID NO: 27176 - protein, 11 aa, Homo Sapiens
LISGSLDNIVK

SEQ ID NO: 27177 - protein, 11 aa, Homo Sapiens
LLGASVVPFMK

SEQ ID NO: 27178 - protein, 11 aa, Homo Sapiens
LTGLTVAEYFR

SEQ ID NO: 27179 - protein, 11 aa, Homo Sapiens
LTIQSGEQPYK

SEQ ID NO: 27180 - protein, 11 aa, Homo Sapiens
LVIDNGSGMCK

SEQ ID NO: 27181 - protein, 11 aa, Homo Sapiens
LVMGTDAKMHK

SEQ ID NO: 27182 - protein, 11 aa, Homo Sapiens
LVVDNGSGMCK

SEQ ID NO: 27183 - protein, 11 aa, Homo Sapiens
MPSSPSVLRWP

SEQ ID NO: 27184 - protein, 11 aa, Homo Sapiens
MQIAWSREFLK

SEQ ID NO: 27185 - protein, 11 aa, Homo Sapiens
MTMDKSELVQK

SEQ ID NO: 27186 - protein, 11 aa, Homo Sapiens
NSFDPSKITRK

SEQ ID NO: 27187 - protein, 11 aa, Homo Sapiens
PMFIVNTNVPR

SEQ ID NO: 27188 - protein, 11 aa, Homo Sapiens
PRGSPPPPHAD

SEQ ID NO: 27189 - protein, 11 aa, Homo Sapiens
QIVSVAARMLK

SEQ ID NO: 27190 - protein, 11 aa, Homo Sapiens
QLATPNEIFLK

SEQ ID NO: 27191 - protein, 11 aa, Homo Sapiens
QLFRGDTVLLK

SEQ ID NO: 27192 - protein, 11 aa, Homo Sapiens
QTFPSVSAPSK

SEQ ID NO: 27193 - protein, 11 aa, Homo Sapiens
QTLSLKQLFRK

SEQ ID NO: 27194 - protein, 11 aa, Homo Sapiens
QTMAYNITPLR

SEQ ID NO: 27195 - protein, 11 aa, Homo Sapiens
QTQPATPSLWK

SEQ ID NO: 27196 - protein, 11 aa, Homo Sapiens
QVADSTFTVLK

SEQ ID NO: 27197 - protein, 11 aa, Homo Sapiens
QVLNADAIVVK

SEQ ID NO: 27198 - protein, 11 aa, Homo Sapiens
QVLSAATIVAK

SEQ ID NO: 27199 - protein, 11 aa, Homo Sapiens
QVQPVDGATRK

SEQ ID NO: 27200 - protein, 11 aa, Homo Sapiens
RALDVNVALRK

SEQ ID NO: 27201 - protein, 11 aa, Homo Sapiens
RALPKSYQQPK

SEQ ID NO: 27202 - protein, 11 aa, Homo Sapiens
RGLGVAHLARA

SEQ ID NO: 27203 - protein, 11 aa, Homo Sapiens
RIDPFVRTFLK

SEQ ID NO: 27204 - protein, 11 aa, Homo Sapiens
RIFANTESYLK

SEQ ID NO: 27205 - protein, 11 aa, Homo Sapiens
RIFAPNHVVAK

SEQ ID NO: 27206 - protein, 11 aa, Homo Sapiens
RIFGQANTTLK

SEQ ID NO: 27207 - protein, 11 aa, Homo Sapiens
RIGAEVYHNLK

SEQ ID NO: 27208 - protein, 11 aa, Homo Sapiens
RILEMNDKYVK

SEQ ID NO: 27209 - protein, 11 aa, Homo Sapiens
RIMDPDVITGY

SEQ ID NO: 27210 - protein, 11 aa, Homo Sapiens
RIMLAEILTTK

SEQ ID NO: 27211 - protein, 11 aa, Homo Sapiens
RINEILSNALK

SEQ ID NO: 27212 - protein, 11 aa, Homo Sapiens
RIQEAGTEVVK

SEQ ID NO: 27213 - protein, 11 aa, Homo Sapiens
RIQELEDLLAK

SEQ ID NO: 27214 - protein, 11 aa, Homo Sapiens
RIVLPEDLQLK

SEQ ID NO: 27215 - protein, 11 aa, Homo Sapiens
RLADKSVLVCK

SEQ ID NO: 27216 - protein, 11 aa, Homo Sapiens
RLINTQAIFAK

SEQ ID NO: 27217 - protein, 11 aa, Homo Sapiens
RLLPGNATISK

SEQ ID NO: 27218 - protein, 11 aa, Homo Sapiens
RLPATGTFKAK

SEQ ID NO: 27219 - protein, 11 aa, Homo Sapiens
RLVPREIIVEK

SEQ ID NO: 27220 - protein, 11 aa, Homo Sapiens
RMFAPTKTWRR

SEQ ID NO: 27221 - protein, 11 aa, Homo Sapiens
RQLEEKDRVLK

SEQ ID NO: 27222 - protein, 11 aa, Homo Sapiens
RQLPQCALREK

SEQ ID NO: 27223 - protein, 11 aa, Homo Sapiens
RSFPWQSLEAK

SEQ ID NO: 27224 - protein, 11 aa, Homo Sapiens
RSIQVDGKTIK

SEQ ID NO: 27225 - protein, 11 aa, Homo Sapiens
RSMEAHNILSK

SEQ ID NO: 27226 - protein, 11 aa, Homo Sapiens
RSQEYKIVLRK

SEQ ID NO: 27227 - protein, 11 aa, Homo Sapiens
RSQPSKTLFVK

SEQ ID NO: 27228 - protein, 11 aa, Homo Sapiens
RSYSESEKQWK

SEQ ID NO: 27229 - protein, 11 aa, Homo Sapiens
RTFGNDARFIR

SEQ ID NO: 27230 - protein, 11 aa, Homo Sapiens
RTFQPPATGHK

SEQ ID NO: 27231 - protein, 11 aa, Homo Sapiens
RTFSWASVTSK

SEQ ID NO: 27232 - protein, 11 aa, Homo Sapiens
RTIRYPDPLIK

SEQ ID NO: 27233 - protein, 11 aa, Homo Sapiens
RTISGNVYILK

SEQ ID NO: 27234 - protein, 11 aa, Homo Sapiens
RTIVSIGDPKK

SEQ ID NO: 27235 - protein, 11 aa, Homo Sapiens
RTLGSDSVILK

SEQ ID NO: 27236 - protein, 11 aa, Homo Sapiens
RTLKPEGNILR

SEQ ID NO: 27237 - protein, 11 aa, Homo Sapiens
RTLMPEKLSHK

SEQ ID NO: 27238 - protein, 11 aa, Homo Sapiens
RTLTGQDTMLK

SEQ ID NO: 27239 - protein, 11 aa, Homo Sapiens
RTLTPISGGQR

SEQ ID NO: 27240 - protein, 11 aa, Homo Sapiens
RTMPLLSLHSR

SEQ ID NO: 27241 - protein, 11 aa, Homo Sapiens
RTMSCSDKILR

SEQ ID NO: 27242 - protein, 11 aa, Homo Sapiens
RTMWFAGGFHR

SEQ ID NO: 27243 - protein, 11 aa, Homo Sapiens
RTQMPDPKTFK

SEQ ID NO: 27244 - protein, 11 aa, Homo Sapiens
RTSGSVYITLK

SEQ ID NO: 27245 - protein, 11 aa, Homo Sapiens
RTVLKNLSLLK

SEQ ID NO: 27246 - protein, 11 aa, Homo Sapiens
RTYTEEELNAK

SEQ ID NO: 27247 - protein, 11 aa, Homo Sapiens
RVAAILQGVYK

SEQ ID NO: 27248 - protein, 11 aa, Homo Sapiens
RVADRLYGVYK

SEQ ID NO: 27249 - protein, 11 aa, Homo Sapiens
RVAPAHGLFLK

SEQ ID NO: 27250 - protein, 11 aa, Homo Sapiens
RVAQKKASFLR

SEQ ID NO: 27251 - protein, 11 aa, Homo Sapiens
RVEEGWLSLAK

SEQ ID NO: 27252 - protein, 11 aa, Homo Sapiens
RVFAAESIIKR

SEQ ID NO: 27253 - protein, 11 aa, Homo Sapiens
RVFNETPINPR

SEQ ID NO: 27254 - protein, 11 aa, Homo Sapiens
RVFPMPLPRKA

SEQ ID NO: 27255 - protein, 11 aa, Homo Sapiens
RVFPVRPGSGR

SEQ ID NO: 27256 - protein, 11 aa, Homo Sapiens
RVFQETQKLKK

SEQ ID NO: 27257 - protein, 11 aa, Homo Sapiens
RVFTTVGSAEK

SEQ ID NO: 27258 - protein, 11 aa, Homo Sapiens
RVIDHSQYLCR

SEQ ID NO: 27259 - protein, 11 aa, Homo Sapiens
RVIEDNEYTAR

SEQ ID NO: 27260 - protein, 11 aa, Homo Sapiens
RVINEEYKIWK

SEQ ID NO: 27261 - protein, 11 aa, Homo Sapiens
RVIPRITIEMK

SEQ ID NO: 27262 - protein, 11 aa, Homo Sapiens
RVIQASEKLFK

SEQ ID NO: 27263 - protein, 11 aa, Homo Sapiens
RVISEGMLWKK

SEQ ID NO: 27264 - protein, 11 aa, Homo Sapiens
RVITEEEKNFK

SEQ ID NO: 27265 - protein, 11 aa, Homo Sapiens
RVIVNHRIYYK

SEQ ID NO: 27266 - protein, 11 aa, Homo Sapiens
RVLDALVAREK

SEQ ID NO: 27267 - protein, 11 aa, Homo Sapiens
RVLDTNDRFLR

SEQ ID NO: 27268 - protein, 11 aa, Homo Sapiens
RVLKKQDAFYK

SEQ ID NO: 27269 - protein, 11 aa, Homo Sapiens
RVNETTEFLSK

SEQ ID NO: 27270 - protein, 11 aa, Homo Sapiens
RVPVYAHITHK

SEQ ID NO: 27271 - protein, 11 aa, Homo Sapiens
RVPWVKMILNK

SEQ ID NO: 27272 - protein, 11 aa, Homo Sapiens
RVQEAVESMVK

SEQ ID NO: 27273 - protein, 11 aa, Homo Sapiens
RVQPGLLQWVK

SEQ ID NO: 27274 - protein, 11 aa, Homo Sapiens
RVQPNEAVYTK

SEQ ID NO: 27275 - protein, 11 aa, Homo Sapiens
RVSTEVTLAVK

SEQ ID NO: 27276 - protein, 11 aa, Homo Sapiens
RVVDGKDLTTK

SEQ ID NO: 27277 - protein, 11 aa, Homo Sapiens
RVWDVRPFAPK

SEQ ID NO: 27278 - protein, 11 aa, Homo Sapiens
RVYAENAIRKK

SEQ ID NO: 27279 - protein, 11 aa, Homo Sapiens
RVYDPASPQRR

SEQ ID NO: 27280 - protein, 11 aa, Homo Sapiens
RVYSHLKSVLK

SEQ ID NO: 27281 - protein, 11 aa, Homo Sapiens
RVYSPPEWISR

SEQ ID NO: 27282 - protein, 11 aa, Homo Sapiens
RVYWSTTDARK

SEQ ID NO: 27283 - protein, 11 aa, Homo Sapiens
RVYYVSEKIMK

SEQ ID NO: 27284 - protein, 11 aa, Homo Sapiens
SAAAATAELLK

SEQ ID NO: 27285 - protein, 11 aa, Homo Sapiens
SAEPAAVIVEK

SEQ ID NO: 27286 - protein, 11 aa, Homo Sapiens
SAFKADPKISK

SEQ ID NO: 27287 - protein, 11 aa, Homo Sapiens
SAFPESDNLFK

SEQ ID NO: 27288 - protein, 11 aa, Homo Sapiens
SAIDSVNATSK

SEQ ID NO: 27289 - protein, 11 aa, Homo Sapiens
SAINDKSIVKK

SEQ ID NO: 27290 - protein, 11 aa, Homo Sapiens
SALEGFKVMCK

SEQ ID NO: 27291 - protein, 11 aa, Homo Sapiens
SALTDKAIVKK

SEQ ID NO: 27292 - protein, 11 aa, Homo Sapiens
SALTNKAIVKK

SEQ ID NO: 27293 - protein, 11 aa, Homo Sapiens
SAQELKSLFEK

SEQ ID NO: 27294 - protein, 11 aa, Homo Sapiens
SAYYPSSFPKK

SEQ ID NO: 27295 - protein, 11 aa, Homo Sapiens
SGGPVSLDFVK

SEQ ID NO: 27296 - protein, 11 aa, Homo Sapiens
SIASSASMPYK

SEQ ID NO: 27297 - protein, 11 aa, Homo Sapiens
SICENARRYAK

SEQ ID NO: 27298 - protein, 11 aa, Homo Sapiens
SICFTLGSFAK

SEQ ID NO: 27299 - protein, 11 aa, Homo Sapiens
SIFAGQNDPLK

SEQ ID NO: 27300 - protein, 11 aa, Homo Sapiens
SIFDDFAHYEK

SEQ ID NO: 27301 - protein, 11 aa, Homo Sapiens
SIFDDFSHYEK

SEQ ID NO: 27302 - protein, 11 aa, Homo Sapiens
SIFEPAKGGEK

SEQ ID NO: 27303 - protein, 11 aa, Homo Sapiens
SIFIGGSFILK

SEQ ID NO: 27304 - protein, 11 aa, Homo Sapiens
SIFSGTEKGSK

SEQ ID NO: 27305 - protein, 11 aa, Homo Sapiens
SIHDARSWVPK

SEQ ID NO: 27306 - protein, 11 aa, Homo Sapiens
SIIGKGGQRIK

SEQ ID NO: 27307 - protein, 11 aa, Homo Sapiens
SIIGKKGESVK

SEQ ID NO: 27308 - protein, 11 aa, Homo Sapiens
SIINISSIVGK

SEQ ID NO: 27309 - protein, 11 aa, Homo Sapiens
SIIPRGSLSLK

SEQ ID NO: 27310 - protein, 11 aa, Homo Sapiens
SILASLDTFKK

SEQ ID NO: 27311 - protein, 11 aa, Homo Sapiens
SILEDYANYKK

SEQ ID NO: 27312 - protein, 11 aa, Homo Sapiens
SILGEAEYIQR

SEQ ID NO: 27313 - protein, 11 aa, Homo Sapiens
SILGKGSMRDK

SEQ ID NO: 27314 - protein, 11 aa, Homo Sapiens
SILKTPLPKKI

SEQ ID NO: 27315 - protein, 11 aa, Homo Sapiens
SIMKCDVDIRK

SEQ ID NO: 27316 - protein, 11 aa, Homo Sapiens
SIPEPIDPLFK

SEQ ID NO: 27317 - protein, 11 aa, Homo Sapiens
SIQEPSFRMEK

SEQ ID NO: 27318 - protein, 11 aa, Homo Sapiens
SIQEYWKCVKK

SEQ ID NO: 27319 - protein, 11 aa, Homo Sapiens
SIQGVSTVTVK

SEQ ID NO: 27320 - protein, 11 aa, Homo Sapiens
SISDVGFGMLK

SEQ ID NO: 27321 - protein, 11 aa, Homo Sapiens
SIVDVEGVVRK

SEQ ID NO: 27322 - protein, 11 aa, Homo Sapiens
SIYHTTRLLEK

SEQ ID NO: 27323 - protein, 11 aa, Homo Sapiens
SIYPSSAEVLK

SEQ ID NO: 27324 - protein, 11 aa, Homo Sapiens
SIYRPSKNLDK

SEQ ID NO: 27325 - protein, 11 aa, Homo Sapiens
SLAERSSLLQK

SEQ ID NO: 27326 - protein, 11 aa, Homo Sapiens
SLLTPILGIQK

SEQ ID NO: 27327 - protein, 11 aa, Homo Sapiens
SLYSVPEGQSK

SEQ ID NO: 27328 - protein, 11 aa, Homo Sapiens
SMMDVDHQIAK

SEQ ID NO: 27329 - protein, 11 aa, Homo Sapiens
SQFLAPKAMKK

SEQ ID NO: 27330 - protein, 11 aa, Homo Sapiens
SQLPAEKLPPK

SEQ ID NO: 27331 - protein, 11 aa, Homo Sapiens
SQMIGKKLFTK

SEQ ID NO: 27332 - protein, 11 aa, Homo Sapiens
SSADAILGNPK

SEQ ID NO: 27333 - protein, 11 aa, Homo Sapiens
SSASANDVRKK

SEQ ID NO: 27334 - protein, 11 aa, Homo Sapiens
SSATLNSIVAK

SEQ ID NO: 27335 - protein, 11 aa, Homo Sapiens
SSINEARINAK

SEQ ID NO: 27336 - protein, 11 aa, Homo Sapiens
SSLPKKLALLK

SEQ ID NO: 27337 - protein, 11 aa, Homo Sapiens
SSLPTVGVFAK

SEQ ID NO: 27338 - protein, 11 aa, Homo Sapiens
SSLSAEAIRQR

SEQ ID NO: 27339 - protein, 11 aa, Homo Sapiens
SSLSGEELVTK

SEQ ID NO: 27340 - protein, 11 aa, Homo Sapiens
SSLSGPRLLFK

SEQ ID NO: 27341 - protein, 11 aa, Homo Sapiens
SSMTEEEQIAY

SEQ ID NO: 27342 - protein, 11 aa, Homo Sapiens
SSMVGVNLPQK

SEQ ID NO: 27343 - protein, 11 aa, Homo Sapiens
SSTPATGVFLK

SEQ ID NO: 27344 - protein, 11 aa, Homo Sapiens
STAKPPKEILK

SEQ ID NO: 27345 - protein, 11 aa, Homo Sapiens
STASEDQIVSK

SEQ ID NO: 27346 - protein, 11 aa, Homo Sapiens
STAVVVAELLK

SEQ ID NO: 27347 - protein, 11 aa, Homo Sapiens
STDSSIPWFLR

SEQ ID NO: 27348 - protein, 11 aa, Homo Sapiens
STFEQCQEWLK

SEQ ID NO: 27349 - protein, 11 aa, Homo Sapiens
STFEVNSINPK

SEQ ID NO: 27350 - protein, 11 aa, Homo Sapiens
STFKLKSEVNK

SEQ ID NO: 27351 - protein, 11 aa, Homo Sapiens
STFPGAEHCLR

SEQ ID NO: 27352 - protein, 11 aa, Homo Sapiens
STFQPANKLNK

SEQ ID NO: 27353 - protein, 11 aa, Homo Sapiens
STFQYDRFFEK

SEQ ID NO: 27354 - protein, 11 aa, Homo Sapiens
STFRVDTAVIK

SEQ ID NO: 27355 - protein, 11 aa, Homo Sapiens
STFSTLVTVLK

SEQ ID NO: 27356 - protein, 11 aa, Homo Sapiens
STIAILNSVKK

SEQ ID NO: 27357 - protein, 11 aa, Homo Sapiens
STIDWNKLYRR

SEQ ID NO: 27358 - protein, 11 aa, Homo Sapiens
STIMLDNIVRK

SEQ ID NO: 27359 - protein, 11 aa, Homo Sapiens
STINSIKKVLK

SEQ ID NO: 27360 - protein, 11 aa, Homo Sapiens
STIPPELVKQK

SEQ ID NO: 27361 - protein, 11 aa, Homo Sapiens
STIVNRGITPK

SEQ ID NO: 27362 - protein, 11 aa, Homo Sapiens
STLPALTALQK

SEQ ID NO: 27363 - protein, 11 aa, Homo Sapiens
STLPGQSLIDK

SEQ ID NO: 27364 - protein, 11 aa, Homo Sapiens
STLQVGSLNVK

SEQ ID NO: 27365 - protein, 11 aa, Homo Sapiens
STLTASEIRQR

SEQ ID NO: 27366 - protein, 11 aa, Homo Sapiens
STMELDEALRK

SEQ ID NO: 27367 - protein, 11 aa, Homo Sapiens
STMPHTSGMNR

SEQ ID NO: 27368 - protein, 11 aa, Homo Sapiens
STMVDVRVMKK

SEQ ID NO: 27369 - protein, 11 aa, Homo Sapiens
STMYPGLPSRL

SEQ ID NO: 27370 - protein, 11 aa, Homo Sapiens
STQDTGKLPVK

SEQ ID NO: 27371 - protein, 11 aa, Homo Sapiens
STQLEDSLLGK

SEQ ID NO: 27372 - protein, 11 aa, Homo Sapiens
STQRDLWNIFK

SEQ ID NO: 27373 - protein, 11 aa, Homo Sapiens
STTEELHKYQK

SEQ ID NO: 27374 - protein, 11 aa, Homo Sapiens
STTRSGAIFTK

SEQ ID NO: 27375 - protein, 11 aa, Homo Sapiens
STVGAGAYAYK

SEQ ID NO: 27376 - protein, 11 aa, Homo Sapiens
STYAPIGEVHK

SEQ ID NO: 27377 - protein, 11 aa, Homo Sapiens
STYATTIRDSK

SEQ ID NO: 27378 - protein, 11 aa, Homo Sapiens
STYDETLHVAK

SEQ ID NO: 27379 - protein, 11 aa, Homo Sapiens
STYPPEIVVPK

SEQ ID NO: 27380 - protein, 11 aa, Homo Sapiens
SVADLAESIMK

SEQ ID NO: 27381 - protein, 11 aa, Homo Sapiens
SVAGLKKQFYK

SEQ ID NO: 27382 - protein, 11 aa, Homo Sapiens
SVAIPGFTINR

SEQ ID NO: 27383 - protein, 11 aa, Homo Sapiens
SVASAAAVLSH

SEQ ID NO: 27384 - protein, 11 aa, Homo Sapiens
SVASSRSSVLK

SEQ ID NO: 27385 - protein, 11 aa, Homo Sapiens
SVCSSGPEYLK

SEQ ID NO: 27386 - protein, 11 aa, Homo Sapiens
SVDEESYKTLK

SEQ ID NO: 27387 - protein, 11 aa, Homo Sapiens
SVEERITQVAK

SEQ ID NO: 27388 - protein, 11 aa, Homo Sapiens
SVFDSSSDMEK

SEQ ID NO: 27389 - protein, 11 aa, Homo Sapiens
SVFEVDGKKNK

SEQ ID NO: 27390 - protein, 11 aa, Homo Sapiens
SVFFPESGLAK

SEQ ID NO: 27391 - protein, 11 aa, Homo Sapiens
SVFPSLNMAVK

SEQ ID NO: 27392 - protein, 11 aa, Homo Sapiens
SVFPYNHRMKK

SEQ ID NO: 27393 - protein, 11 aa, Homo Sapiens
SVFQTTDTKSK

SEQ ID NO: 27394 - protein, 11 aa, Homo Sapiens
SVFSPYWLINK

SEQ ID NO: 27395 - protein, 11 aa, Homo Sapiens
SVFTNERFPLR

SEQ ID NO: 27396 - protein, 11 aa, Homo Sapiens
SVGGREILKGK

SEQ ID NO: 27397 - protein, 11 aa, Homo Sapiens
SVIDRKDLIIK

SEQ ID NO: 27398 - protein, 11 aa, Homo Sapiens
SVIGFRILLLK

SEQ ID NO: 27399 - protein, 11 aa, Homo Sapiens
SVISIMKPVRK

SEQ ID NO: 27400 - protein, 11 aa, Homo Sapiens
SVITKKLEDVK

SEQ ID NO: 27401 - protein, 11 aa, Homo Sapiens
SVIVTPLDVVK

SEQ ID NO: 27402 - protein, 11 aa, Homo Sapiens
SVKPGAHLTVK

SEQ ID NO: 27403 - protein, 11 aa, Homo Sapiens
SVKSVPENLLK

SEQ ID NO: 27404 - protein, 11 aa, Homo Sapiens
SVLEARDLAPK

SEQ ID NO: 27405 - protein, 11 aa, Homo Sapiens
SVLEATRVNRR

SEQ ID NO: 27406 - protein, 11 aa, Homo Sapiens
SVLGKDEQINK

SEQ ID NO: 27407 - protein, 11 aa, Homo Sapiens
SVLGKGSMRDK

SEQ ID NO: 27408 - protein, 11 aa, Homo Sapiens
SVLGKVNEIAK

SEQ ID NO: 27409 - protein, 11 aa, Homo Sapiens
SVMEVNSGIYR

SEQ ID NO: 27410 - protein, 11 aa, Homo Sapiens
SVMPKKSILKK

SEQ ID NO: 27411 - protein, 11 aa, Homo Sapiens
SVMVPKSILAK

SEQ ID NO: 27412 - protein, 11 aa, Homo Sapiens
SVNKPGQLVNK

SEQ ID NO: 27413 - protein, 11 aa, Homo Sapiens
SVNKPVIGSLK

SEQ ID NO: 27414 - protein, 11 aa, Homo Sapiens
SVNPGMARWIK

SEQ ID NO: 27415 - protein, 11 aa, Homo Sapiens
SVNVDYSKLKK

SEQ ID NO: 27416 - protein, 11 aa, Homo Sapiens
SVPEAGGPPIK

SEQ ID NO: 27417 - protein, 11 aa, Homo Sapiens
SVPEFPLSPPK

SEQ ID NO: 27418 - protein, 11 aa, Homo Sapiens
SVPEVLGARYE

SEQ ID NO: 27419 - protein, 11 aa, Homo Sapiens
SVPLSDALLNK

SEQ ID NO: 27420 - protein, 11 aa, Homo Sapiens
SVPRDGASYPK

SEQ ID NO: 27421 - protein, 11 aa, Homo Sapiens
SVPSSETVICR

SEQ ID NO: 27422 - protein, 11 aa, Homo Sapiens
SVQGNFDLNSK

SEQ ID NO: 27423 - protein, 11 aa, Homo Sapiens
SVQKEVEKNLK

SEQ ID NO: 27424 - protein, 11 aa, Homo Sapiens
SVQPAANCSIK

SEQ ID NO: 27425 - protein, 11 aa, Homo Sapiens
SVQPSSSLSAR

SEQ ID NO: 27426 - protein, 11 aa, Homo Sapiens
SVQTADHRFLR

SEQ ID NO: 27427 - protein, 11 aa, Homo Sapiens
SVQVPRNLVGK

SEQ ID NO: 27428 - protein, 11 aa, Homo Sapiens
SVSTENGITLK

SEQ ID NO: 27429 - protein, 11 aa, Homo Sapiens
SVYDALPLTRL

SEQ ID NO: 27430 - protein, 11 aa, Homo Sapiens
SVYDHQGIFKR

SEQ ID NO: 27431 - protein, 11 aa, Homo Sapiens
SVYGEWVPVEK

SEQ ID NO: 27432 - protein, 11 aa, Homo Sapiens
SVYGGGGIHEY

SEQ ID NO: 27433 - protein, 11 aa, Homo Sapiens
SVYPMPRVIFR

SEQ ID NO: 27434 - protein, 11 aa, Homo Sapiens
SVYSPESNVRK

SEQ ID NO: 27435 - protein, 11 aa, Homo Sapiens
SVYSPESSVRK

SEQ ID NO: 27436 - protein, 11 aa, Homo Sapiens
SVYSPSGPVNR

SEQ ID NO: 27437 - protein, 11 aa, Homo Sapiens
SVYYNEATGGK

SEQ ID NO: 27438 - protein, 11 aa, Homo Sapiens
SWGSGLDMHTK

SEQ ID NO: 27439 - protein, 11 aa, Homo Sapiens
TAFRNKSMLFK

SEQ ID NO: 27440 - protein, 11 aa, Homo Sapiens
TAGDGLIELRK

SEQ ID NO: 27441 - protein, 11 aa, Homo Sapiens
TIITAESIFYK

SEQ ID NO: 27442 - protein, 11 aa, Homo Sapiens
TIMDRSIILRH

SEQ ID NO: 27443 - protein, 11 aa, Homo Sapiens
TIMPKDIQLAR

SEQ ID NO: 27444 - protein, 11 aa, Homo Sapiens
TIYSEADLRKK

SEQ ID NO: 27445 - protein, 11 aa, Homo Sapiens
TVDKNMPKFNK

SEQ ID NO: 27446 - protein, 11 aa, Homo Sapiens
TVFDAKRLIGR

SEQ ID NO: 27447 - protein, 11 aa, Homo Sapiens
TVFNAHEPFRR

SEQ ID NO: 27448 - protein, 11 aa, Homo Sapiens
TVFPKAKQVKK

SEQ ID NO: 27449 - protein, 11 aa, Homo Sapiens
TVIQLQNIAEK

SEQ ID NO: 27450 - protein, 11 aa, Homo Sapiens
TVIRDVEQQFK

SEQ ID NO: 27451 - protein, 11 aa, Homo Sapiens
TVISAVGTIVK

SEQ ID NO: 27452 - protein, 11 aa, Homo Sapiens
TVISQEPFVPK

SEQ ID NO: 27453 - protein, 11 aa, Homo Sapiens
TVLEKFRYLPK

SEQ ID NO: 27454 - protein, 11 aa, Homo Sapiens
TVLGGVYILGK

SEQ ID NO: 27455 - protein, 11 aa, Homo Sapiens
TVMDEIHTVLK

SEQ ID NO: 27456 - protein, 11 aa, Homo Sapiens
TVMELVKIIYK

SEQ ID NO: 27457 - protein, 11 aa, Homo Sapiens
TVQGDIDAIFK

SEQ ID NO: 27458 - protein, 11 aa, Homo Sapiens
TVQTTEDQILK

SEQ ID NO: 27459 - protein, 11 aa, Homo Sapiens
TVSEVIQGLLK

SEQ ID NO: 27460 - protein, 11 aa, Homo Sapiens
TVYTTLIDVTK

SEQ ID NO: 27461 - protein, 11 aa, Homo Sapiens
VAVAGVVLAKG

SEQ ID NO: 27462 - protein, 11 aa, Homo Sapiens
VILPPLSPYFK

SEQ ID NO: 27463 - protein, 11 aa, Homo Sapiens
VLAPEGSVPNK

SEQ ID NO: 27464 - protein, 11 aa, Homo Sapiens
VLDLSENQLQK

SEQ ID NO: 27465 - protein, 11 aa, Homo Sapiens
VLQAADILLYK

SEQ ID NO: 27466 - protein, 11 aa, Homo Sapiens
VPPVQVSPLIK

SEQ ID NO: 27467 - protein, 11 aa, Homo Sapiens
VQEDQRDLIFK

SEQ ID NO: 27468 - protein, 11 aa, Homo Sapiens
VQFVTGTFIEK

SEQ ID NO: 27469 - protein, 11 aa, Homo Sapiens
VSDPSSPQYGK

SEQ ID NO: 27470 - protein, 11 aa, Homo Sapiens
VSSPVSAWKTS

SEQ ID NO: 27471 - protein, 11 aa, Homo Sapiens
VTDNPRELQVK

SEQ ID NO: 27472 - protein, 11 aa, Homo Sapiens
VTDPSIPIRKK

SEQ ID NO: 27473 - protein, 11 aa, Homo Sapiens
VTEDFTTYINR

SEQ ID NO: 27474 - protein, 11 aa, Homo Sapiens
VTFEDQQKINK

SEQ ID NO: 27475 - protein, 11 aa, Homo Sapiens
VTFPDIIRNYK

SEQ ID NO: 27476 - protein, 11 aa, Homo Sapiens
VTLDKDAYYRR

SEQ ID NO: 27477 - protein, 11 aa, Homo Sapiens
VTMSKKLLIEK

SEQ ID NO: 27478 - protein, 11 aa, Homo Sapiens
VTMTMSSIVMK

SEQ ID NO: 27479 - protein, 11 aa, Homo Sapiens
VTQPSELLQQK

SEQ ID NO: 27480 - protein, 11 aa, Homo Sapiens
VTQPTVGMNFK

SEQ ID NO: 27481 - protein, 11 aa, Homo Sapiens
VTSTESMDFLK

SEQ ID NO: 27482 - protein, 11 aa, Homo Sapiens
VTVGVDGTLYK

SEQ ID NO: 27483 - protein, 11 aa, Homo Sapiens
VVCDNGTGFVK

SEQ ID NO: 27484 - protein, 11 aa, Homo Sapiens
VVCPVSDILYK

SEQ ID NO: 27485 - protein, 11 aa, Homo Sapiens
VVFAVKQYISK

SEQ ID NO: 27486 - protein, 11 aa, Homo Sapiens
VVFDTSLQVKK

SEQ ID NO: 27487 - protein, 11 aa, Homo Sapiens
VVFSGKAYSPK

SEQ ID NO: 27488 - protein, 11 aa, Homo Sapiens
VVFSVTTVDLK

SEQ ID NO: 27489 - protein, 11 aa, Homo Sapiens
VVFVIDPGFAK

SEQ ID NO: 27490 - protein, 11 aa, Homo Sapiens
VVIDLGEAFTK

SEQ ID NO: 27491 - protein, 11 aa, Homo Sapiens
VVIGRSGEMIK

SEQ ID NO: 27492 - protein, 11 aa, Homo Sapiens
VVLGSATLRRK

SEQ ID NO: 27493 - protein, 11 aa, Homo Sapiens
VVMAADRSLKK

SEQ ID NO: 27494 - protein, 11 aa, Homo Sapiens
VVMKASSSLPK

SEQ ID NO: 27495 - protein, 11 aa, Homo Sapiens
VVMNYSEIESK

SEQ ID NO: 27496 - protein, 11 aa, Homo Sapiens
VVMTPVPLFSK

SEQ ID NO: 27497 - protein, 11 aa, Homo Sapiens
VVQDGITLITK

SEQ ID NO: 27498 - protein, 11 aa, Homo Sapiens
VVQSVEKFIQK

SEQ ID NO: 27499 - protein, 11 aa, Homo Sapiens
VVQWADLVICK

SEQ ID NO: 27500 - protein, 11 aa, Homo Sapiens
VVSPSSFENVK

SEQ ID NO: 27501 - protein, 11 aa, Homo Sapiens
VVVDEADTMLK

SEQ ID NO: 27502 - protein, 11 aa, Homo Sapiens
VVVGVYRPPPK

SEQ ID NO: 27503 - protein, 11 aa, Homo Sapiens
VVYSGLENIKK

SEQ ID NO: 27504 - protein, 11 aa, Homo Sapiens
YDGHAGSQVAK

SEQ ID NO: 27505 - protein, 11 aa, Homo Sapiens
YLLGTSLARPC

SEQ ID NO: 27506 - protein, 8 aa, Homo Sapiens
AGGAWTYK

SEQ ID NO: 27507 - protein, 8 aa, Homo Sapiens
EFGLARFK

SEQ ID NO: 27508 - protein, 8 aa, Homo Sapiens
ERQFSSRS

SEQ ID NO: 27509 - protein, 8 aa, Homo Sapiens
FDGRVVAK

SEQ ID NO: 27510 - protein, 8 aa, Homo Sapiens
FDKAKLKK

SEQ ID NO: 27511 - protein, 8 aa, Homo Sapiens
FEDPVISK

SEQ ID NO: 27512 - protein, 8 aa, Homo Sapiens
FPKPFVEK

SEQ ID NO: 27513 - protein, 8 aa, Homo Sapiens
FQQGMKNK

SEQ ID NO: 27514 - protein, 8 aa, Homo Sapiens
GAGAYAYK

SEQ ID NO: 27515 - protein, 8 aa, Homo Sapiens
GSWDSFLK

SEQ ID NO: 27516 - protein, 8 aa, Homo Sapiens
IDGSVNPK

SEQ ID NO: 27517 - protein, 8 aa, Homo Sapiens
IFKQPVTK

SEQ ID NO: 27518 - protein, 8 aa, Homo Sapiens
INIVHPKL

SEQ ID NO: 27519 - protein, 8 aa, Homo Sapiens
KCRLTLQK

SEQ ID NO: 27520 - protein, 8 aa, Homo Sapiens
LGPNLGDK

SEQ ID NO: 27521 - protein, 8 aa, Homo Sapiens
LYDHAHVK

SEQ ID NO: 27522 - protein, 8 aa, Homo Sapiens
MGAYVLLK

SEQ ID NO: 27523 - protein, 8 aa, Homo Sapiens
MLDTVVFK

SEQ ID NO: 27524 - protein, 8 aa, Homo Sapiens
NAHSNILK

SEQ ID NO: 27525 - protein, 8 aa, Homo Sapiens
NDSPALKK

SEQ ID NO: 27526 - protein, 8 aa, Homo Sapiens
PKDIQLAR

SEQ ID NO: 27527 - protein, 8 aa, Homo Sapiens
PLAGLAPK

SEQ ID NO: 27528 - protein, 8 aa, Homo Sapiens
PLDFPSKK

SEQ ID NO: 27529 - protein, 8 aa, Homo Sapiens
PPELVKQK

SEQ ID NO: 27530 - protein, 8 aa, Homo Sapiens
PPLSPYFK

SEQ ID NO: 27531 - protein, 8 aa, Homo Sapiens
PSLLTNPK

SEQ ID NO: 27532 - protein, 8 aa, Homo Sapiens
PSTPIAHR

SEQ ID NO: 27533 - protein, 8 aa, Homo Sapiens
PTNIIAAK

SEQ ID NO: 27534 - protein, 8 aa, Homo Sapiens
PVAPTPPR

SEQ ID NO: 27535 - protein, 8 aa, Homo Sapiens
QNSVKILK

SEQ ID NO: 27536 - protein, 8 aa, Homo Sapiens
QSGEQPYK

SEQ ID NO: 27537 - protein, 8 aa, Homo Sapiens
SDFHPVKK

SEQ ID NO: 27538 - protein, 8 aa, Homo Sapiens
SFDKAKLK

SEQ ID NO: 27539 - protein, 8 aa, Homo Sapiens
SNFKSPVK

SEQ ID NO: 27540 - protein, 8 aa, Homo Sapiens
SSHVPIQK

SEQ ID NO: 27541 - protein, 8 aa, Homo Sapiens
SSPKLAPK

SEQ ID NO: 27542 - protein, 8 aa, Homo Sapiens
TADVHFER

SEQ ID NO: 27543 - protein, 8 aa, Homo Sapiens
TDKSFVEK

SEQ ID NO: 27544 - protein, 8 aa, Homo Sapiens
TEAPLNPK

SEQ ID NO: 27545 - protein, 8 aa, Homo Sapiens
TVDIFHKK

SEQ ID NO: 27546 - protein, 8 aa, Homo Sapiens
TVLYIVKK

SEQ ID NO: 27547 - protein, 8 aa, Homo Sapiens
VCEYIVKK

SEQ ID NO: 27548 - protein, 8 aa, Homo Sapiens
VIHFNNPK

SEQ ID NO: 27549 - protein, 8 aa, Homo Sapiens
VINKVHLK

SEQ ID NO: 27550 - protein, 8 aa, Homo Sapiens
VMRDPASK

SEQ ID NO: 27551 - protein, 8 aa, Homo Sapiens
VMRDPNTK

SEQ ID NO: 27552 - protein, 8 aa, Homo Sapiens
VSDQVQIK

SEQ ID NO: 27553 - protein, 8 aa, Homo Sapiens
VSEKQFSK

SEQ ID NO: 27554 - protein, 8 aa, Homo Sapiens
VSLTACKV

SEQ ID NO: 27555 - protein, 9 aa, Homo Sapiens
AAAKVILKK

SEQ ID NO: 27556 - protein, 9 aa, Homo Sapiens
AAAPVTPLR

SEQ ID NO: 27557 - protein, 9 aa, Homo Sapiens
AAATSVLKT

SEQ ID NO: 27558 - protein, 9 aa, Homo Sapiens
AAIATIKTK

SEQ ID NO: 27559 - protein, 9 aa, Homo Sapiens
AAITLAFSK

SEQ ID NO: 27560 - protein, 9 aa, Homo Sapiens
AALAKAIEK

SEQ ID NO: 27561 - protein, 9 aa, Homo Sapiens
AALDWVTKK

SEQ ID NO: 27562 - protein, 9 aa, Homo Sapiens
AALEKPLSH

SEQ ID NO: 27563 - protein, 9 aa, Homo Sapiens
AALKVLPPT

SEQ ID NO: 27564 - protein, 9 aa, Homo Sapiens
AAMEPLTAR

SEQ ID NO: 27565 - protein, 9 aa, Homo Sapiens
AAMLMPHQK

SEQ ID NO: 27566 - protein, 9 aa, Homo Sapiens
AAPIRLLAA

SEQ ID NO: 27567 - protein, 9 aa, Homo Sapiens
AAVGYIMEK

SEQ ID NO: 27568 - protein, 9 aa, Homo Sapiens
AAYAHELPK

SEQ ID NO: 27569 - protein, 9 aa, Homo Sapiens
AGMALGIQK

SEQ ID NO: 27570 - protein, 9 aa, Homo Sapiens
AGMGFGLER

SEQ ID NO: 27571 - protein, 9 aa, Homo Sapiens
AGPEPLPPK

SEQ ID NO: 27572 - protein, 9 aa, Homo Sapiens
AGVFVDATK

SEQ ID NO: 27573 - protein, 9 aa, Homo Sapiens
AICQWERNK

SEQ ID NO: 27574 - protein, 9 aa, Homo Sapiens
AIFKDLVGK

SEQ ID NO: 27575 - protein, 9 aa, Homo Sapiens
AIFKPVMSK

SEQ ID NO: 27576 - protein, 9 aa, Homo Sapiens
AIFPRAFPK

SEQ ID NO: 27577 - protein, 9 aa, Homo Sapiens
AIFTKAYQR

SEQ ID NO: 27578 - protein, 9 aa, Homo Sapiens
AIIDTVINY

SEQ ID NO: 27579 - protein, 9 aa, Homo Sapiens
AIITPPPAK

SEQ ID NO: 27580 - protein, 9 aa, Homo Sapiens
AILDKNFRK

SEQ ID NO: 27581 - protein, 9 aa, Homo Sapiens
AILDYLITK

SEQ ID NO: 27582 - protein, 9 aa, Homo Sapiens
AILLPQPPK

SEQ ID NO: 27583 - protein, 9 aa, Homo Sapiens
AIMDPLPLR

SEQ ID NO: 27584 - protein, 9 aa, Homo Sapiens
AINDKSIVK

SEQ ID NO: 27585 - protein, 9 aa, Homo Sapiens
AISEYIATK

SEQ ID NO: 27586 - protein, 9 aa, Homo Sapiens
AIVAYGLYK

SEQ ID NO: 27587 - protein, 9 aa, Homo Sapiens
AIVKLFLKK

SEQ ID NO: 27588 - protein, 9 aa, Homo Sapiens
AIYEPKTFK

SEQ ID NO: 27589 - protein, 9 aa, Homo Sapiens
ALFDGVVSK

SEQ ID NO: 27590 - protein, 9 aa, Homo Sapiens
ALFSRIFGK

SEQ ID NO: 27591 - protein, 9 aa, Homo Sapiens
ALLKWCQKK

SEQ ID NO: 27592 - protein, 9 aa, Homo Sapiens
ALMEKFKKK

SEQ ID NO: 27593 - protein, 9 aa, Homo Sapiens
ALQEIYNQK

SEQ ID NO: 27594 - protein, 9 aa, Homo Sapiens
AMIEVNINK

SEQ ID NO: 27595 - protein, 9 aa, Homo Sapiens
AMLDTVVFK

SEQ ID NO: 27596 - protein, 9 aa, Homo Sapiens
AQADPLVRR

SEQ ID NO: 27597 - protein, 9 aa, Homo Sapiens
AQAESLRYK

SEQ ID NO: 27598 - protein, 9 aa, Homo Sapiens
AQATISFPK

SEQ ID NO: 27599 - protein, 9 aa, Homo Sapiens
AQCGKAFPK

SEQ ID NO: 27600 - protein, 9 aa, Homo Sapiens
AQCQIFMEK

SEQ ID NO: 27601 - protein, 9 aa, Homo Sapiens
AQFIPKFFK

SEQ ID NO: 27602 - protein, 9 aa, Homo Sapiens
AQGEMFTVK

SEQ ID NO: 27603 - protein, 9 aa, Homo Sapiens
AQGKPLALK

SEQ ID NO: 27604 - protein, 9 aa, Homo Sapiens
AQIKEHLLK

SEQ ID NO: 27605 - protein, 9 aa, Homo Sapiens
AQNEPLTQK

SEQ ID NO: 27606 - protein, 9 aa, Homo Sapiens
AQNPSLFVK

SEQ ID NO: 27607 - protein, 9 aa, Homo Sapiens
AQQKVTLPK

SEQ ID NO: 27608 - protein, 9 aa, Homo Sapiens
ASAPVTVKR

SEQ ID NO: 27609 - protein, 9 aa, Homo Sapiens
ASATALVSR

SEQ ID NO: 27610 - protein, 9 aa, Homo Sapiens
ASAYSIAQK

SEQ ID NO: 27611 - protein, 9 aa, Homo Sapiens
ASDPHIIIK

SEQ ID NO: 27612 - protein, 9 aa, Homo Sapiens
ASDPTVFHK

SEQ ID NO: 27613 - protein, 9 aa, Homo Sapiens
ASEVLKHLK

SEQ ID NO: 27614 - protein, 9 aa, Homo Sapiens
ASFALKKIK

SEQ ID NO: 27615 - protein, 9 aa, Homo Sapiens
ASFCGAVFR

SEQ ID NO: 27616 - protein, 9 aa, Homo Sapiens
ASFDKAKLK

SEQ ID NO: 27617 - protein, 9 aa, Homo Sapiens
ASFENVRAK

SEQ ID NO: 27618 - protein, 9 aa, Homo Sapiens
ASFFGVHPK

SEQ ID NO: 27619 - protein, 9 aa, Homo Sapiens
ASFNDTFVH

SEQ ID NO: 27620 - protein, 9 aa, Homo Sapiens
ASFPKVFIK

SEQ ID NO: 27621 - protein, 9 aa, Homo Sapiens
ASFQSTSVK

SEQ ID NO: 27622 - protein, 9 aa, Homo Sapiens
ASGSFKLNK

SEQ ID NO: 27623 - protein, 9 aa, Homo Sapiens
ASGSTTFTK

SEQ ID NO: 27624 - protein, 9 aa, Homo Sapiens
ASIDATYAK

SEQ ID NO: 27625 - protein, 9 aa, Homo Sapiens
ASIDWLAQR

SEQ ID NO: 27626 - protein, 9 aa, Homo Sapiens
ASIPHVIAR

SEQ ID NO: 27627 - protein, 9 aa, Homo Sapiens
ASIPTILTH

SEQ ID NO: 27628 - protein, 9 aa, Homo Sapiens
ASIQHPLIK

SEQ ID NO: 27629 - protein, 9 aa, Homo Sapiens
ASLADIMAK

SEQ ID NO: 27630 - protein, 9 aa, Homo Sapiens
ASLATTLTK

SEQ ID NO: 27631 - protein, 9 aa, Homo Sapiens
ASLGASVHK

SEQ ID NO: 27632 - protein, 9 aa, Homo Sapiens
ASLGLKFNK

SEQ ID NO: 27633 - protein, 9 aa, Homo Sapiens
ASLGNLFAR

SEQ ID NO: 27634 - protein, 9 aa, Homo Sapiens
ASLIRLVPK

SEQ ID NO: 27635 - protein, 9 aa, Homo Sapiens
ASLPLAVTK

SEQ ID NO: 27636 - protein, 9 aa, Homo Sapiens
ASLPVRNAK

SEQ ID NO: 27637 - protein, 9 aa, Homo Sapiens
ASLQSVVHK

SEQ ID NO: 27638 - protein, 9 aa, Homo Sapiens
ASLSDREVK

SEQ ID NO: 27639 - protein, 9 aa, Homo Sapiens
ASLTDTVNK

SEQ ID NO: 27640 - protein, 9 aa, Homo Sapiens
ASMAIKNPK

SEQ ID NO: 27641 - protein, 9 aa, Homo Sapiens
ASMPVDIAK

SEQ ID NO: 27642 - protein, 9 aa, Homo Sapiens
ASNFKSPVK

SEQ ID NO: 27643 - protein, 9 aa, Homo Sapiens
ASNGCVLVH

SEQ ID NO: 27644 - protein, 9 aa, Homo Sapiens
ASNPAMLLY

SEQ ID NO: 27645 - protein, 9 aa, Homo Sapiens
ASNPATFQR

SEQ ID NO: 27646 - protein, 9 aa, Homo Sapiens
ASQELWLNH

SEQ ID NO: 27647 - protein, 9 aa, Homo Sapiens
ASQGFRFLR

SEQ ID NO: 27648 - protein, 9 aa, Homo Sapiens
ASSGTCFPR

SEQ ID NO: 27649 - protein, 9 aa, Homo Sapiens
ASSHVPIQK

SEQ ID NO: 27650 - protein, 9 aa, Homo Sapiens
ASSPPAIPK

SEQ ID NO: 27651 - protein, 9 aa, Homo Sapiens
ASSSVSISH

SEQ ID NO: 27652 - protein, 9 aa, Homo Sapiens
ASTFVDQCK

SEQ ID NO: 27653 - protein, 9 aa, Homo Sapiens
ASTPPLPRR

SEQ ID NO: 27654 - protein, 9 aa, Homo Sapiens
ASTRTIFKK

SEQ ID NO: 27655 - protein, 9 aa, Homo Sapiens
ASTTVLALK

SEQ ID NO: 27656 - protein, 9 aa, Homo Sapiens
ASVFQVKLG

SEQ ID NO: 27657 - protein, 9 aa, Homo Sapiens
ASVGYAVTK

SEQ ID NO: 27658 - protein, 9 aa, Homo Sapiens
ASVNTLVNK

SEQ ID NO: 27659 - protein, 9 aa, Homo Sapiens
ASVPAQAPK

SEQ ID NO: 27660 - protein, 9 aa, Homo Sapiens
ASVQPPPRP

SEQ ID NO: 27661 - protein, 9 aa, Homo Sapiens
ASYPQPLLR

SEQ ID NO: 27662 - protein, 9 aa, Homo Sapiens
ASYTKIVVK

SEQ ID NO: 27663 - protein, 9 aa, Homo Sapiens
ATAALLRHK

SEQ ID NO: 27664 - protein, 9 aa, Homo Sapiens
ATAAVIFLH

SEQ ID NO: 27665 - protein, 9 aa, Homo Sapiens
ATAEECLKH

SEQ ID NO: 27666 - protein, 9 aa, Homo Sapiens
ATAELIMSR

SEQ ID NO: 27667 - protein, 9 aa, Homo Sapiens
ATAEVGYNR

SEQ ID NO: 27668 - protein, 9 aa, Homo Sapiens
ATAGFTIGR

SEQ ID NO: 27669 - protein, 9 aa, Homo Sapiens
ATALEYVYK

SEQ ID NO: 27670 - protein, 9 aa, Homo Sapiens
ATANQIILK

SEQ ID NO: 27671 - protein, 9 aa, Homo Sapiens
ATAPPAPAY

SEQ ID NO: 27672 - protein, 9 aa, Homo Sapiens
ATAQFKINK

SEQ ID NO: 27673 - protein, 9 aa, Homo Sapiens
ATASPIVAR

SEQ ID NO: 27674 - protein, 9 aa, Homo Sapiens
ATATELTTK

SEQ ID NO: 27675 - protein, 9 aa, Homo Sapiens
ATATLIIEH

SEQ ID NO: 27676 - protein, 9 aa, Homo Sapiens
ATATPVPPR

SEQ ID NO: 27677 - protein, 9 aa, Homo Sapiens
ATATVYFKR

SEQ ID NO: 27678 - protein, 9 aa, Homo Sapiens
ATCELPLQK

SEQ ID NO: 27679 - protein, 9 aa, Homo Sapiens
ATCLPLSVR

SEQ ID NO: 27680 - protein, 9 aa, Homo Sapiens
ATCYPDFSK

SEQ ID NO: 27681 - protein, 9 aa, Homo Sapiens
ATDIPSSQK

SEQ ID NO: 27682 - protein, 9 aa, Homo Sapiens
ATDPNILGR

SEQ ID NO: 27683 - protein, 9 aa, Homo Sapiens
ATEQPLTAK

SEQ ID NO: 27684 - protein, 9 aa, Homo Sapiens
ATESGMLYH

SEQ ID NO: 27685 - protein, 9 aa, Homo Sapiens
ATEVAPLYK

SEQ ID NO: 27686 - protein, 9 aa, Homo Sapiens
ATFFGEVVK

SEQ ID NO: 27687 - protein, 9 aa, Homo Sapiens
ATFHTPFSH

SEQ ID NO: 27688 - protein, 9 aa, Homo Sapiens
ATFLDPRYK

SEQ ID NO: 27689 - protein, 9 aa, Homo Sapiens
ATFLIQLER

SEQ ID NO: 27690 - protein, 9 aa, Homo Sapiens
ATFPDPNVK

SEQ ID NO: 27691 - protein, 9 aa, Homo Sapiens
ATFPGMWER

SEQ ID NO: 27692 - protein, 9 aa, Homo Sapiens
ATFPLSVQK

SEQ ID NO: 27693 - protein, 9 aa, Homo Sapiens
ATFQFTVER

SEQ ID NO: 27694 - protein, 9 aa, Homo Sapiens
ATFSSSHRY

SEQ ID NO: 27695 - protein, 9 aa, Homo Sapiens
ATFTNVFGK

SEQ ID NO: 27696 - protein, 9 aa, Homo Sapiens
ATFTVMGLK

SEQ ID NO: 27697 - protein, 9 aa, Homo Sapiens
ATFYGPVKK

SEQ ID NO: 27698 - protein, 9 aa, Homo Sapiens
ATGDVALLR

SEQ ID NO: 27699 - protein, 9 aa, Homo Sapiens
ATGESIAVK

SEQ ID NO: 27700 - protein, 9 aa, Homo Sapiens
ATGFLEQLK

SEQ ID NO: 27701 - protein, 9 aa, Homo Sapiens
ATGQLPVKK

SEQ ID NO: 27702 - protein, 9 aa, Homo Sapiens
ATGQWTRFK

SEQ ID NO: 27703 - protein, 9 aa, Homo Sapiens
ATGSVFTGK

SEQ ID NO: 27704 - protein, 9 aa, Homo Sapiens
ATHTAFVAK

SEQ ID NO: 27705 - protein, 9 aa, Homo Sapiens
ATIALMIQR

SEQ ID NO: 27706 - protein, 9 aa, Homo Sapiens
ATIEELTEK

SEQ ID NO: 27707 - protein, 9 aa, Homo Sapiens
ATIEKIRTK

SEQ ID NO: 27708 - protein, 9 aa, Homo Sapiens
ATIKDVFGR

SEQ ID NO: 27709 - protein, 9 aa, Homo Sapiens
ATINYSLLR

SEQ ID NO: 27710 - protein, 9 aa, Homo Sapiens
ATIQGAYAR

SEQ ID NO: 27711 - protein, 9 aa, Homo Sapiens
ATIQNETPK

SEQ ID NO: 27712 - protein, 9 aa, Homo Sapiens
ATISFPKRK

SEQ ID NO: 27713 - protein, 9 aa, Homo Sapiens
ATIVYHLAR

SEQ ID NO: 27714 - protein, 9 aa, Homo Sapiens
ATKIKNYYK

SEQ ID NO: 27715 - protein, 9 aa, Homo Sapiens
ATLAAVLQR

SEQ ID NO: 27716 - protein, 9 aa, Homo Sapiens
ATLDLNAVK

SEQ ID NO: 27717 - protein, 9 aa, Homo Sapiens
ATLDQFYDK

SEQ ID NO: 27718 - protein, 9 aa, Homo Sapiens
ATLDVAVRR

SEQ ID NO: 27719 - protein, 9 aa, Homo Sapiens
ATLEETLVK

SEQ ID NO: 27720 - protein, 9 aa, Homo Sapiens
ATLEIVTDK

SEQ ID NO: 27721 - protein, 9 aa, Homo Sapiens
ATLETILRH

SEQ ID NO: 27722 - protein, 9 aa, Homo Sapiens
ATLFFILRK

SEQ ID NO: 27723 - protein, 9 aa, Homo Sapiens
ATLGAILNR

SEQ ID NO: 27724 - protein, 9 aa, Homo Sapiens
ATLHHVIDK

SEQ ID NO: 27725 - protein, 9 aa, Homo Sapiens
ATLLIFANK

SEQ ID NO: 27726 - protein, 9 aa, Homo Sapiens
ATLNSFIHV

SEQ ID NO: 27727 - protein, 9 aa, Homo Sapiens
ATLNSIVAK

SEQ ID NO: 27728 - protein, 9 aa, Homo Sapiens
ATLNVSTTR

SEQ ID NO: 27729 - protein, 9 aa, Homo Sapiens
ATLQDIIRR

SEQ ID NO: 27730 - protein, 9 aa, Homo Sapiens
ATLQEALAH

SEQ ID NO: 27731 - protein, 9 aa, Homo Sapiens
ATLQNVLRK

SEQ ID NO: 27732 - protein, 9 aa, Homo Sapiens
ATLQYIVGR

SEQ ID NO: 27733 - protein, 9 aa, Homo Sapiens
ATLRLIIRH

SEQ ID NO: 27734 - protein, 9 aa, Homo Sapiens
ATLSICSPK

SEQ ID NO: 27735 - protein, 9 aa, Homo Sapiens
ATLTKDVPK

SEQ ID NO: 27736 - protein, 9 aa, Homo Sapiens
ATLTNILEH

SEQ ID NO: 27737 - protein, 9 aa, Homo Sapiens
ATMEDTVEY

SEQ ID NO: 27738 - protein, 9 aa, Homo Sapiens
ATNGAKFLK

SEQ ID NO: 27739 - protein, 9 aa, Homo Sapiens
ATNSSMFLK

SEQ ID NO: 27740 - protein, 9 aa, Homo Sapiens
ATNYITRNK

SEQ ID NO: 27741 - protein, 9 aa, Homo Sapiens
ATPNEIFLK

SEQ ID NO: 27742 - protein, 9 aa, Homo Sapiens
ATPPFTHSK

SEQ ID NO: 27743 - protein, 9 aa, Homo Sapiens
ATPSSSLPK

SEQ ID NO: 27744 - protein, 9 aa, Homo Sapiens
ATQAHSLSY

SEQ ID NO: 27745 - protein, 9 aa, Homo Sapiens
ATQAVFQKR

SEQ ID NO: 27746 - protein, 9 aa, Homo Sapiens
ATQDPAALR

SEQ ID NO: 27747 - protein, 9 aa, Homo Sapiens
ATQFENWYK

SEQ ID NO: 27748 - protein, 9 aa, Homo Sapiens
ATQILSVPK

SEQ ID NO: 27749 - protein, 9 aa, Homo Sapiens
ATQLLKLAH

SEQ ID NO: 27750 - protein, 9 aa, Homo Sapiens
ATQNQLLFH

SEQ ID NO: 27751 - protein, 9 aa, Homo Sapiens
ATQQDVFQH

SEQ ID NO: 27752 - protein, 9 aa, Homo Sapiens
ATQSFSTFR

SEQ ID NO: 27753 - protein, 9 aa, Homo Sapiens
ATQTSVVVK

SEQ ID NO: 27754 - protein, 9 aa, Homo Sapiens
ATSAPLVSR

SEQ ID NO: 27755 - protein, 9 aa, Homo Sapiens
ATSAVTVTR

SEQ ID NO: 27756 - protein, 9 aa, Homo Sapiens
ATSDMDIGK

SEQ ID NO: 27757 - protein, 9 aa, Homo Sapiens
ATSEIFASK

SEQ ID NO: 27758 - protein, 9 aa, Homo Sapiens
ATSGVVAVR

SEQ ID NO: 27759 - protein, 9 aa, Homo Sapiens
ATSGYCVGR

SEQ ID NO: 27760 - protein, 9 aa, Homo Sapiens
ATSKVALVY

SEQ ID NO: 27761 - protein, 9 aa, Homo Sapiens
ATSLGHFTK

SEQ ID NO: 27762 - protein, 9 aa, Homo Sapiens
ATSLVFKQK

SEQ ID NO: 27763 - protein, 9 aa, Homo Sapiens
ATSNFARVK

SEQ ID NO: 27764 - protein, 9 aa, Homo Sapiens
ATSPALFNR

SEQ ID NO: 27765 - protein, 9 aa, Homo Sapiens
ATSPIIIHR

SEQ ID NO: 27766 - protein, 9 aa, Homo Sapiens
ATSPVVYTR

SEQ ID NO: 27767 - protein, 9 aa, Homo Sapiens
ATSRTYLYR

SEQ ID NO: 27768 - protein, 9 aa, Homo Sapiens
ATSSVSALK

SEQ ID NO: 27769 - protein, 9 aa, Homo Sapiens
ATSTPCVSR

SEQ ID NO: 27770 - protein, 9 aa, Homo Sapiens
ATSVITIVK

SEQ ID NO: 27771 - protein, 9 aa, Homo Sapiens
ATTALAIYH

SEQ ID NO: 27772 - protein, 9 aa, Homo Sapiens
ATTGKILEK

SEQ ID NO: 27773 - protein, 9 aa, Homo Sapiens
ATTLPIRNK

SEQ ID NO: 27774 - protein, 9 aa, Homo Sapiens
ATTPELLLK

SEQ ID NO: 27775 - protein, 9 aa, Homo Sapiens
ATTQTIMQK

SEQ ID NO: 27776 - protein, 9 aa, Homo Sapiens
ATTSLSLRR

SEQ ID NO: 27777 - protein, 9 aa, Homo Sapiens
ATTTVMNPK

SEQ ID NO: 27778 - protein, 9 aa, Homo Sapiens
ATVAALQEK

SEQ ID NO: 27779 - protein, 9 aa, Homo Sapiens
ATVDIVQKK

SEQ ID NO: 27780 - protein, 9 aa, Homo Sapiens
ATVITTEKR

SEQ ID NO: 27781 - protein, 9 aa, Homo Sapiens
ATVKEQIVK

SEQ ID NO: 27782 - protein, 9 aa, Homo Sapiens
ATVLTSVKK

SEQ ID NO: 27783 - protein, 9 aa, Homo Sapiens
ATVLYIVKK

SEQ ID NO: 27784 - protein, 9 aa, Homo Sapiens
ATYERVVYK

SEQ ID NO: 27785 - protein, 9 aa, Homo Sapiens
ATYGLNVER

SEQ ID NO: 27786 - protein, 9 aa, Homo Sapiens
ATYILEAGK

SEQ ID NO: 27787 - protein, 9 aa, Homo Sapiens
ATYPMPTAK

SEQ ID NO: 27788 - protein, 9 aa, Homo Sapiens
ATYPYQVVR

SEQ ID NO: 27789 - protein, 9 aa, Homo Sapiens
ATYSVGMQK

SEQ ID NO: 27790 - protein, 9 aa, Homo Sapiens
ATYTPQAPK

SEQ ID NO: 27791 - protein, 9 aa, Homo Sapiens
AVAAFQVEK

SEQ ID NO: 27792 - protein, 9 aa, Homo Sapiens
AVAAFVLYK

SEQ ID NO: 27793 - protein, 9 aa, Homo Sapiens
AVADAVIEK

SEQ ID NO: 27794 - protein, 9 aa, Homo Sapiens
AVAELWLQH

SEQ ID NO: 27795 - protein, 9 aa, Homo Sapiens
AVAIKAMAK

SEQ ID NO: 27796 - protein, 9 aa, Homo Sapiens
AVAIPSWGK

SEQ ID NO: 27797 - protein, 9 aa, Homo Sapiens
AVALPLQTK

SEQ ID NO: 27798 - protein, 9 aa, Homo Sapiens
AVAPLSASK

SEQ ID NO: 27799 - protein, 9 aa, Homo Sapiens
AVASAAKLG

SEQ ID NO: 27800 - protein, 9 aa, Homo Sapiens
AVAVTMGPK

SEQ ID NO: 27801 - protein, 9 aa, Homo Sapiens
AVCEVALDY

SEQ ID NO: 27802 - protein, 9 aa, Homo Sapiens
AVCSDFFNK

SEQ ID NO: 27803 - protein, 9 aa, Homo Sapiens
AVDQIAFQK

SEQ ID NO: 27804 - protein, 9 aa, Homo Sapiens
AVDTAYVAK

SEQ ID NO: 27805 - protein, 9 aa, Homo Sapiens
AVDVSPLRR

SEQ ID NO: 27806 - protein, 9 aa, Homo Sapiens
AVFASEVKK

SEQ ID NO: 27807 - protein, 9 aa, Homo Sapiens
AVFEDLSLK

SEQ ID NO: 27808 - protein, 9 aa, Homo Sapiens
AVFEETLEK

SEQ ID NO: 27809 - protein, 9 aa, Homo Sapiens
AVFEWHITK

SEQ ID NO: 27810 - protein, 9 aa, Homo Sapiens
AVFGVPASK

SEQ ID NO: 27811 - protein, 9 aa, Homo Sapiens
AVFSKSVQK

SEQ ID NO: 27812 - protein, 9 aa, Homo Sapiens
AVGNIKVTK

SEQ ID NO: 27813 - protein, 9 aa, Homo Sapiens
AVGPHLTAK

SEQ ID NO: 27814 - protein, 9 aa, Homo Sapiens
AVGPKVALK

SEQ ID NO: 27815 - protein, 9 aa, Homo Sapiens
AVIDVGINR

SEQ ID NO: 27816 - protein, 9 aa, Homo Sapiens
AVIEDTWHY

SEQ ID NO: 27817 - protein, 9 aa, Homo Sapiens
AVIEFLLDK

SEQ ID NO: 27818 - protein, 9 aa, Homo Sapiens
AVIENLPKK

SEQ ID NO: 27819 - protein, 9 aa, Homo Sapiens
AVIGNVQEK

SEQ ID NO: 27820 - protein, 9 aa, Homo Sapiens
AVIQVGKEK

SEQ ID NO: 27821 - protein, 9 aa, Homo Sapiens
AVIRGVTTK

SEQ ID NO: 27822 - protein, 9 aa, Homo Sapiens
AVISQCIYR

SEQ ID NO: 27823 - protein, 9 aa, Homo Sapiens
AVLDFVKQK

SEQ ID NO: 27824 - protein, 9 aa, Homo Sapiens
AVLDKVKTK

SEQ ID NO: 27825 - protein, 9 aa, Homo Sapiens
AVLDLSWNK

SEQ ID NO: 27826 - protein, 9 aa, Homo Sapiens
AVLDYVMTR

SEQ ID NO: 27827 - protein, 9 aa, Homo Sapiens
AVLEADFAK

SEQ ID NO: 27828 - protein, 9 aa, Homo Sapiens
AVLGTHKLK

SEQ ID NO: 27829 - protein, 9 aa, Homo Sapiens
AVLKHIENK

SEQ ID NO: 27830 - protein, 9 aa, Homo Sapiens
AVLLPQPPK

SEQ ID NO: 27831 - protein, 9 aa, Homo Sapiens
AVLLVFANK

SEQ ID NO: 27832 - protein, 9 aa, Homo Sapiens
AVLPAVIPK

SEQ ID NO: 27833 - protein, 9 aa, Homo Sapiens
AVLPSVLNK

SEQ ID NO: 27834 - protein, 9 aa, Homo Sapiens
AVLSWKLAK

SEQ ID NO: 27835 - protein, 9 aa, Homo Sapiens
AVMEMMSQK

SEQ ID NO: 27836 - protein, 9 aa, Homo Sapiens
AVMGNPVTR

SEQ ID NO: 27837 - protein, 9 aa, Homo Sapiens
AVMNFVVRY

SEQ ID NO: 27838 - protein, 9 aa, Homo Sapiens
AVMPDGQFK

SEQ ID NO: 27839 - protein, 9 aa, Homo Sapiens
AVMRCLLAY

SEQ ID NO: 27840 - protein, 9 aa, Homo Sapiens
AVNIVCHSK

SEQ ID NO: 27841 - protein, 9 aa, Homo Sapiens
AVNMVPFPR

SEQ ID NO: 27842 - protein, 9 aa, Homo Sapiens
AVQHFSLLY

SEQ ID NO: 27843 - protein, 9 aa, Homo Sapiens
AVQRTLLEK

SEQ ID NO: 27844 - protein, 9 aa, Homo Sapiens
AVSAVVHEY

SEQ ID NO: 27845 - protein, 9 aa, Homo Sapiens
AVSSLIRNK

SEQ ID NO: 27846 - protein, 9 aa, Homo Sapiens
AVSTFAMVK

SEQ ID NO: 27847 - protein, 9 aa, Homo Sapiens
AVSTLGISK

SEQ ID NO: 27848 - protein, 9 aa, Homo Sapiens
AVSTPNTPR

SEQ ID NO: 27849 - protein, 9 aa, Homo Sapiens
AVTAFVTFR

SEQ ID NO: 27850 - protein, 9 aa, Homo Sapiens
AVVAATALK

SEQ ID NO: 27851 - protein, 9 aa, Homo Sapiens
AVVDIYHSR

SEQ ID NO: 27852 - protein, 9 aa, Homo Sapiens
AVWDTCLEY

SEQ ID NO: 27853 - protein, 9 aa, Homo Sapiens
AVYDFFIGR

SEQ ID NO: 27854 - protein, 9 aa, Homo Sapiens
AVYETPTAH

SEQ ID NO: 27855 - protein, 9 aa, Homo Sapiens
AVYLLPVPK

SEQ ID NO: 27856 - protein, 9 aa, Homo Sapiens
AVYTKMMTK

SEQ ID NO: 27857 - protein, 9 aa, Homo Sapiens
DPNVSKKLK

SEQ ID NO: 27858 - protein, 9 aa, Homo Sapiens
EGGPILPKK

SEQ ID NO: 27859 - protein, 9 aa, Homo Sapiens
EIMPPPPKP

SEQ ID NO: 27860 - protein, 9 aa, Homo Sapiens
EKQSCLKFK

SEQ ID NO: 27861 - protein, 9 aa, Homo Sapiens
ELMPPPPPK

SEQ ID NO: 27862 - protein, 9 aa, Homo Sapiens
ETFLLPHLK

SEQ ID NO: 27863 - protein, 9 aa, Homo Sapiens
ETFSGVYKK

SEQ ID NO: 27864 - protein, 9 aa, Homo Sapiens
ETMNIFLEK

SEQ ID NO: 27865 - protein, 9 aa, Homo Sapiens
ETQPPVALK

SEQ ID NO: 27866 - protein, 9 aa, Homo Sapiens
EVNSGFFYK

SEQ ID NO: 27867 - protein, 9 aa, Homo Sapiens
FEPAKGGEK

SEQ ID NO: 27868 - protein, 9 aa, Homo Sapiens
FLSAVFFAK

SEQ ID NO: 27869 - protein, 9 aa, Homo Sapiens
FPSLLTNPK

SEQ ID NO: 27870 - protein, 9 aa, Homo Sapiens
FQYDRFFEK

SEQ ID NO: 27871 - protein, 9 aa, Homo Sapiens
FSTVTSTVK

SEQ ID NO: 27872 - protein, 9 aa, Homo Sapiens
FTAPSTVGK

SEQ ID NO: 27873 - protein, 9 aa, Homo Sapiens
FTNERFPLR

SEQ ID NO: 27874 - protein, 9 aa, Homo Sapiens
FTQKPGFPK

SEQ ID NO: 27875 - protein, 9 aa, Homo Sapiens
FTSPPSLFK

SEQ ID NO: 27876 - protein, 9 aa, Homo Sapiens
FVQGIFVEK

SEQ ID NO: 27877 - protein, 9 aa, Homo Sapiens
GAFYKGFIK

SEQ ID NO: 27878 - protein, 9 aa, Homo Sapiens
GAFYKGFVK

SEQ ID NO: 27879 - protein, 9 aa, Homo Sapiens
GALPYAVGK

SEQ ID NO: 27880 - protein, 9 aa, Homo Sapiens
GANIPVTEK

SEQ ID NO: 27881 - protein, 9 aa, Homo Sapiens
GAQPPSILK

SEQ ID NO: 27882 - protein, 9 aa, Homo Sapiens
GAYDGKFEK

SEQ ID NO: 27883 - protein, 9 aa, Homo Sapiens
GAYGEPRVK

SEQ ID NO: 27884 - protein, 9 aa, Homo Sapiens
GIFPGTPLK

SEQ ID NO: 27885 - protein, 9 aa, Homo Sapiens
GIFSAEFLK

SEQ ID NO: 27886 - protein, 9 aa, Homo Sapiens
GILKPLPKK

SEQ ID NO: 27887 - protein, 9 aa, Homo Sapiens
GILTVRHLK

SEQ ID NO: 27888 - protein, 9 aa, Homo Sapiens
GIMSPLAKK

SEQ ID NO: 27889 - protein, 9 aa, Homo Sapiens
GINKPGFYK

SEQ ID NO: 27890 - protein, 9 aa, Homo Sapiens
GIVECLGPK

SEQ ID NO: 27891 - protein, 9 aa, Homo Sapiens
GIYSVIQKK

SEQ ID NO: 27892 - protein, 9 aa, Homo Sapiens
GIYSVMIQK

SEQ ID NO: 27893 - protein, 9 aa, Homo Sapiens
GLGEPLALK

SEQ ID NO: 27894 - protein, 9 aa, Homo Sapiens
GLGPLVPGK

SEQ ID NO: 27895 - protein, 9 aa, Homo Sapiens
GLMGFIVYK

SEQ ID NO: 27896 - protein, 9 aa, Homo Sapiens
GLVPAAPPK

SEQ ID NO: 27897 - protein, 9 aa, Homo Sapiens
GLYEFPLNK

SEQ ID NO: 27898 - protein, 9 aa, Homo Sapiens
GQCSVPLKK

SEQ ID NO: 27899 - protein, 9 aa, Homo Sapiens
GQFGLSSRK

SEQ ID NO: 27900 - protein, 9 aa, Homo Sapiens
GQHTVLLVK

SEQ ID NO: 27901 - protein, 9 aa, Homo Sapiens
GQSPFQQRK

SEQ ID NO: 27902 - protein, 9 aa, Homo Sapiens
GQYGNPLNK

SEQ ID NO: 27903 - protein, 9 aa, Homo Sapiens
GSACIKVTK

SEQ ID NO: 27904 - protein, 9 aa, Homo Sapiens
GSCGPIKVK

SEQ ID NO: 27905 - protein, 9 aa, Homo Sapiens
GSCKVFFKR

SEQ ID NO: 27906 - protein, 9 aa, Homo Sapiens
GSDLPIIEK

SEQ ID NO: 27907 - protein, 9 aa, Homo Sapiens
GSFKQLTVK

SEQ ID NO: 27908 - protein, 9 aa, Homo Sapiens
GSGKVTFPK

SEQ ID NO: 27909 - protein, 9 aa, Homo Sapiens
GSIDIQHLK

SEQ ID NO: 27910 - protein, 9 aa, Homo Sapiens
GSIGSSFPR

SEQ ID NO: 27911 - protein, 9 aa, Homo Sapiens
GSLASVYHK

SEQ ID NO: 27912 - protein, 9 aa, Homo Sapiens
GSLFLQTPK

SEQ ID NO: 27913 - protein, 9 aa, Homo Sapiens
GSLFLRTPK

SEQ ID NO: 27914 - protein, 9 aa, Homo Sapiens
GSLGGQINK

SEQ ID NO: 27915 - protein, 9 aa, Homo Sapiens
GSLKQFLKK

SEQ ID NO: 27916 - protein, 9 aa, Homo Sapiens
GSLQLPPPR

SEQ ID NO: 27917 - protein, 9 aa, Homo Sapiens
GSLRPFVQK

SEQ ID NO: 27918 - protein, 9 aa, Homo Sapiens
GSMEPAFHR

SEQ ID NO: 27919 - protein, 9 aa, Homo Sapiens
GSMEPGFAK

SEQ ID NO: 27920 - protein, 9 aa, Homo Sapiens
GSMGSFSEK

SEQ ID NO: 27921 - protein, 9 aa, Homo Sapiens
GSNGDTFLK

SEQ ID NO: 27922 - protein, 9 aa, Homo Sapiens
GSNGYILNK

SEQ ID NO: 27923 - protein, 9 aa, Homo Sapiens
GSQFFITTK

SEQ ID NO: 27924 - protein, 9 aa, Homo Sapiens
GSSAINILK

SEQ ID NO: 27925 - protein, 9 aa, Homo Sapiens
GSSDFFTTK

SEQ ID NO: 27926 - protein, 9 aa, Homo Sapiens
GSSDVIIHR

SEQ ID NO: 27927 - protein, 9 aa, Homo Sapiens
GSSKIAIQK

SEQ ID NO: 27928 - protein, 9 aa, Homo Sapiens
GSSTPLIPK

SEQ ID NO: 27929 - protein, 9 aa, Homo Sapiens
GSTHVLTPK

SEQ ID NO: 27930 - protein, 9 aa, Homo Sapiens
GSVYITLKK

SEQ ID NO: 27931 - protein, 9 aa, Homo Sapiens
GSYSKAFAR

SEQ ID NO: 27932 - protein, 9 aa, Homo Sapiens
GTAACIPQK

SEQ ID NO: 27933 - protein, 9 aa, Homo Sapiens
GTADVHFER

SEQ ID NO: 27934 - protein, 9 aa, Homo Sapiens
GTAEVELKK

SEQ ID NO: 27935 - protein, 9 aa, Homo Sapiens
GTAKSQFLK

SEQ ID NO: 27936 - protein, 9 aa, Homo Sapiens
GTAPCPPQR

SEQ ID NO: 27937 - protein, 9 aa, Homo Sapiens
GTATTMVSK

SEQ ID NO: 27938 - protein, 9 aa, Homo Sapiens
GTCFGKFTK

SEQ ID NO: 27939 - protein, 9 aa, Homo Sapiens
GTCLLIANK

SEQ ID NO: 27940 - protein, 9 aa, Homo Sapiens
GTCSSVPPR

SEQ ID NO: 27941 - protein, 9 aa, Homo Sapiens
GTFALNLLK

SEQ ID NO: 27942 - protein, 9 aa, Homo Sapiens
GTFEYIRHK

SEQ ID NO: 27943 - protein, 9 aa, Homo Sapiens
GTFGGLGSK

SEQ ID NO: 27944 - protein, 9 aa, Homo Sapiens
GTFLEGVAK

SEQ ID NO: 27945 - protein, 9 aa, Homo Sapiens
GTFPRAFKK

SEQ ID NO: 27946 - protein, 9 aa, Homo Sapiens
GTFSRLFQK

SEQ ID NO: 27947 - protein, 9 aa, Homo Sapiens
GTGKTLIGK

SEQ ID NO: 27948 - protein, 9 aa, Homo Sapiens
GTGKTTFVK

SEQ ID NO: 27949 - protein, 9 aa, Homo Sapiens
GTGPLCSGK

SEQ ID NO: 27950 - protein, 9 aa, Homo Sapiens
GTGPNVPPR

SEQ ID NO: 27951 - protein, 9 aa, Homo Sapiens
GTIDPWCPK

SEQ ID NO: 27952 - protein, 9 aa, Homo Sapiens
GTIKDIVTR

SEQ ID NO: 27953 - protein, 9 aa, Homo Sapiens
GTINIVHPK

SEQ ID NO: 27954 - protein, 9 aa, Homo Sapiens
GTIPQIFGK

SEQ ID NO: 27955 - protein, 9 aa, Homo Sapiens
GTIPVPKGK

SEQ ID NO: 27956 - protein, 9 aa, Homo Sapiens
GTLAEFIQK

SEQ ID NO: 27957 - protein, 9 aa, Homo Sapiens
GTLASVYHK

SEQ ID NO: 27958 - protein, 9 aa, Homo Sapiens
GTLDFYMAR

SEQ ID NO: 27959 - protein, 9 aa, Homo Sapiens
GTLDSVLRY

SEQ ID NO: 27960 - protein, 9 aa, Homo Sapiens
GTLDYILQR

SEQ ID NO: 27961 - protein, 9 aa, Homo Sapiens
GTLGGMLTR

SEQ ID NO: 27962 - protein, 9 aa, Homo Sapiens
GTLGVAQHR

SEQ ID NO: 27963 - protein, 9 aa, Homo Sapiens
GTLNQPLTK

SEQ ID NO: 27964 - protein, 9 aa, Homo Sapiens
GTLPAKLLK

SEQ ID NO: 27965 - protein, 9 aa, Homo Sapiens
GTLPKALTK

SEQ ID NO: 27966 - protein, 9 aa, Homo Sapiens
GTLPVSQPK

SEQ ID NO: 27967 - protein, 9 aa, Homo Sapiens
GTLSSWNLK

SEQ ID NO: 27968 - protein, 9 aa, Homo Sapiens
GTMDMSITR

SEQ ID NO: 27969 - protein, 9 aa, Homo Sapiens
GTMEWIMIK

SEQ ID NO: 27970 - protein, 9 aa, Homo Sapiens
GTMPVSLLK

SEQ ID NO: 27971 - protein, 9 aa, Homo Sapiens
GTMTGMLYK

SEQ ID NO: 27972 - protein, 9 aa, Homo Sapiens
GTNFTKLEK

SEQ ID NO: 27973 - protein, 9 aa, Homo Sapiens
GTNPGIITK

SEQ ID NO: 27974 - protein, 9 aa, Homo Sapiens
GTNSVICSK

SEQ ID NO: 27975 - protein, 9 aa, Homo Sapiens
GTPEKPLYH

SEQ ID NO: 27976 - protein, 9 aa, Homo Sapiens
GTPLETIQK

SEQ ID NO: 27977 - protein, 9 aa, Homo Sapiens
GTQNRPLLR

SEQ ID NO: 27978 - protein, 9 aa, Homo Sapiens
GTQPYFFNK

SEQ ID NO: 27979 - protein, 9 aa, Homo Sapiens
GTQSFVFQR

SEQ ID NO: 27980 - protein, 9 aa, Homo Sapiens
GTQSKAFYK

SEQ ID NO: 27981 - protein, 9 aa, Homo Sapiens
GTQSVTLTH

SEQ ID NO: 27982 - protein, 9 aa, Homo Sapiens
GTSDEFIEK

SEQ ID NO: 27983 - protein, 9 aa, Homo Sapiens
GTSGLILKR

SEQ ID NO: 27984 - protein, 9 aa, Homo Sapiens
GTSITVPQK

SEQ ID NO: 27985 - protein, 9 aa, Homo Sapiens
GTSPPLTPR

SEQ ID NO: 27986 - protein, 9 aa, Homo Sapiens
GTSSAVSLK

SEQ ID NO: 27987 - protein, 9 aa, Homo Sapiens
GTSSMIVPK

SEQ ID NO: 27988 - protein, 9 aa, Homo Sapiens
GTSSVIVSR

SEQ ID NO: 27989 - protein, 9 aa, Homo Sapiens
GTTAYISLK

SEQ ID NO: 27990 - protein, 9 aa, Homo Sapiens
GTTEWFHLK

SEQ ID NO: 27991 - protein, 9 aa, Homo Sapiens
GTTKVDALK

SEQ ID NO: 27992 - protein, 9 aa, Homo Sapiens
GTTRFAHLK

SEQ ID NO: 27993 - protein, 9 aa, Homo Sapiens
GTTSDQFLR

SEQ ID NO: 27994 - protein, 9 aa, Homo Sapiens
GTVLFEIKK

SEQ ID NO: 27995 - protein, 9 aa, Homo Sapiens
GTVSPLFQK

SEQ ID NO: 27996 - protein, 9 aa, Homo Sapiens
GTVTKVIPK

SEQ ID NO: 27997 - protein, 9 aa, Homo Sapiens
GTWIYSVNK

SEQ ID NO: 27998 - protein, 9 aa, Homo Sapiens
GTYGFWYPK

SEQ ID NO: 27999 - protein, 9 aa, Homo Sapiens
GTYHGMTLK

SEQ ID NO: 28000 - protein, 9 aa, Homo Sapiens
GTYPWVVDR

SEQ ID NO: 28001 - protein, 9 aa, Homo Sapiens
GTYQDRLTK

SEQ ID NO: 28002 - protein, 9 aa, Homo Sapiens
GTYRDANIK

SEQ ID NO: 28003 - protein, 9 aa, Homo Sapiens
GTYSIGKEK

SEQ ID NO: 28004 - protein, 9 aa, Homo Sapiens
GTYSKIMNH

SEQ ID NO: 28005 - protein, 9 aa, Homo Sapiens
GTYTDVTPR

SEQ ID NO: 28006 - protein, 9 aa, Homo Sapiens
GTYVSSVPR

SEQ ID NO: 28007 - protein, 9 aa, Homo Sapiens
GVADKILKK

SEQ ID NO: 28008 - protein, 9 aa, Homo Sapiens
GVAFIFNQK

SEQ ID NO: 28009 - protein, 9 aa, Homo Sapiens
GVAGGSILK

SEQ ID NO: 28010 - protein, 9 aa, Homo Sapiens
GVAGPLGQK

SEQ ID NO: 28011 - protein, 9 aa, Homo Sapiens
GVANALAHR

SEQ ID NO: 28012 - protein, 9 aa, Homo Sapiens
GVCGPPPSK

SEQ ID NO: 28013 - protein, 9 aa, Homo Sapiens
GVCTKITQK

SEQ ID NO: 28014 - protein, 9 aa, Homo Sapiens
GVDDKFYSK

SEQ ID NO: 28015 - protein, 9 aa, Homo Sapiens
GVDPNQYTK

SEQ ID NO: 28016 - protein, 9 aa, Homo Sapiens
GVEGPRTPK

SEQ ID NO: 28017 - protein, 9 aa, Homo Sapiens
GVFEPTIVK

SEQ ID NO: 28018 - protein, 9 aa, Homo Sapiens
GVFEYFNAK

SEQ ID NO: 28019 - protein, 9 aa, Homo Sapiens
GVIIVGNPK

SEQ ID NO: 28020 - protein, 9 aa, Homo Sapiens
GVIVHIIEK

SEQ ID NO: 28021 - protein, 9 aa, Homo Sapiens
GVLAWVKEK

SEQ ID NO: 28022 - protein, 9 aa, Homo Sapiens
GVLGPIINK

SEQ ID NO: 28023 - protein, 9 aa, Homo Sapiens
GVMPSHFSR

SEQ ID NO: 28024 - protein, 9 aa, Homo Sapiens
GVMSPPLSR

SEQ ID NO: 28025 - protein, 9 aa, Homo Sapiens
GVMTVLIKR

SEQ ID NO: 28026 - protein, 9 aa, Homo Sapiens
GVMVYGIKK

SEQ ID NO: 28027 - protein, 9 aa, Homo Sapiens
GVNPYILKK

SEQ ID NO: 28028 - protein, 9 aa, Homo Sapiens
GVSAATFLK

SEQ ID NO: 28029 - protein, 9 aa, Homo Sapiens
GVSSVIHPK

SEQ ID NO: 28030 - protein, 9 aa, Homo Sapiens
GVTRVTIRK

SEQ ID NO: 28031 - protein, 9 aa, Homo Sapiens
GVVPFSQRK

SEQ ID NO: 28032 - protein, 9 aa, Homo Sapiens
GVVRIYHRK

SEQ ID NO: 28033 - protein, 9 aa, Homo Sapiens
GVYDVVELK

SEQ ID NO: 28034 - protein, 9 aa, Homo Sapiens
HAVPPLVPK

SEQ ID NO: 28035 - protein, 9 aa, Homo Sapiens
HIAEPNYGK

SEQ ID NO: 28036 - protein, 9 aa, Homo Sapiens
HIFMKVFPK

SEQ ID NO: 28037 - protein, 9 aa, Homo Sapiens
HSMDFVAYR

SEQ ID NO: 28038 - protein, 9 aa, Homo Sapiens
HSQPFAWKK

SEQ ID NO: 28039 - protein, 9 aa, Homo Sapiens
HTDKGSFLK

SEQ ID NO: 28040 - protein, 9 aa, Homo Sapiens
HTIDWVREK

SEQ ID NO: 28041 - protein, 9 aa, Homo Sapiens
HTLEPLIPR

SEQ ID NO: 28042 - protein, 9 aa, Homo Sapiens
HTSQVLVDK

SEQ ID NO: 28043 - protein, 9 aa, Homo Sapiens
HTYYKFDYK

SEQ ID NO: 28044 - protein, 9 aa, Homo Sapiens
HVIETLIGK

SEQ ID NO: 28045 - protein, 9 aa, Homo Sapiens
HVYRERFPK

SEQ ID NO: 28046 - protein, 9 aa, Homo Sapiens
IAQPQLPPK

SEQ ID NO: 28047 - protein, 9 aa, Homo Sapiens
IIGTIFIIK

SEQ ID NO: 28048 - protein, 9 aa, Homo Sapiens
ILGPNLGDK

SEQ ID NO: 28049 - protein, 9 aa, Homo Sapiens
ILYDHAHVK

SEQ ID NO: 28050 - protein, 9 aa, Homo Sapiens
IPEKQLVEK

SEQ ID NO: 28051 - protein, 9 aa, Homo Sapiens
IQATPLELK

SEQ ID NO: 28052 - protein, 9 aa, Homo Sapiens
IQNVPLSEK

SEQ ID NO: 28053 - protein, 9 aa, Homo Sapiens
ISQEPFVPK

SEQ ID NO: 28054 - protein, 9 aa, Homo Sapiens
ISYPLHHPK

SEQ ID NO: 28055 - protein, 9 aa, Homo Sapiens
ITGPNMGGK

SEQ ID NO: 28056 - protein, 9 aa, Homo Sapiens
ITGPTGVGK

SEQ ID NO: 28057 - protein, 9 aa, Homo Sapiens
ITSPVVTQK

SEQ ID NO: 28058 - protein, 9 aa, Homo Sapiens
ITVAYTIPK

SEQ ID NO: 28059 - protein, 9 aa, Homo Sapiens
ITVGDIGPK

SEQ ID NO: 28060 - protein, 9 aa, Homo Sapiens
IVAGSLITK

SEQ ID NO: 28061 - protein, 9 aa, Homo Sapiens
IVAGTLTNK

SEQ ID NO: 28062 - protein, 9 aa, Homo Sapiens
IVFSLTFFK

SEQ ID NO: 28063 - protein, 9 aa, Homo Sapiens
IVGDPSTAK

SEQ ID NO: 28064 - protein, 9 aa, Homo Sapiens
IVGPNGVGK

SEQ ID NO: 28065 - protein, 9 aa, Homo Sapiens
IVGTVLIIK

SEQ ID NO: 28066 - protein, 9 aa, Homo Sapiens
IVIETGPLK

SEQ ID NO: 28067 - protein, 9 aa, Homo Sapiens
IVIPPATEK

SEQ ID NO: 28068 - protein, 9 aa, Homo Sapiens
IVMETGNTK

SEQ ID NO: 28069 - protein, 9 aa, Homo Sapiens
IVSAPVPKK

SEQ ID NO: 28070 - protein, 9 aa, Homo Sapiens
IVSQVKVPK

SEQ ID NO: 28071 - protein, 9 aa, Homo Sapiens
IVVPPLPEK

SEQ ID NO: 28072 - protein, 9 aa, Homo Sapiens
IVYPPPPAK

SEQ ID NO: 28073 - protein, 9 aa, Homo Sapiens
KAFVGAFKK

SEQ ID NO: 28074 - protein, 9 aa, Homo Sapiens
KAGEVFIHK

SEQ ID NO: 28075 - protein, 9 aa, Homo Sapiens
KAMESCAFK

SEQ ID NO: 28076 - protein, 9 aa, Homo Sapiens
KAVDITTPK

SEQ ID NO: 28077 - protein, 9 aa, Homo Sapiens
KIADMGHLK

SEQ ID NO: 28078 - protein, 9 aa, Homo Sapiens
KIIAPPERK

SEQ ID NO: 28079 - protein, 9 aa, Homo Sapiens
KILGPFHKR

SEQ ID NO: 28080 - protein, 9 aa, Homo Sapiens
KIMEYYEKK

SEQ ID NO: 28081 - protein, 9 aa, Homo Sapiens
KIQPALQEK

SEQ ID NO: 28082 - protein, 9 aa, Homo Sapiens
KITAPLINK

SEQ ID NO: 28083 - protein, 9 aa, Homo Sapiens
KIYNANYLK

SEQ ID NO: 28084 - protein, 9 aa, Homo Sapiens
KLFDFVNAK

SEQ ID NO: 28085 - protein, 9 aa, Homo Sapiens
KLFNGTFLK

SEQ ID NO: 28086 - protein, 9 aa, Homo Sapiens
KLFNKFIGK

SEQ ID NO: 28087 - protein, 9 aa, Homo Sapiens
KLFSEYHEK

SEQ ID NO: 28088 - protein, 9 aa, Homo Sapiens
KNYYQDTPK

SEQ ID NO: 28089 - protein, 9 aa, Homo Sapiens
KQDSNPLYK

SEQ ID NO: 28090 - protein, 9 aa, Homo Sapiens
KQFENPIIK

SEQ ID NO: 28091 - protein, 9 aa, Homo Sapiens
KQFSKRYLK

SEQ ID NO: 28092 - protein, 9 aa, Homo Sapiens
KSFGELVHK

SEQ ID NO: 28093 - protein, 9 aa, Homo Sapiens
KSIDFPLTK

SEQ ID NO: 28094 - protein, 9 aa, Homo Sapiens
KSINEFWNK

SEQ ID NO: 28095 - protein, 9 aa, Homo Sapiens
KSSDFAVLK

SEQ ID NO: 28096 - protein, 9 aa, Homo Sapiens
KSTEILLRK

SEQ ID NO: 28097 - protein, 9 aa, Homo Sapiens
KTAEISLLK

SEQ ID NO: 28098 - protein, 9 aa, Homo Sapiens
KTCEEILNY

SEQ ID NO: 28099 - protein, 9 aa, Homo Sapiens
KTETPIVSK

SEQ ID NO: 28100 - protein, 9 aa, Homo Sapiens
KTFPYQHRY

SEQ ID NO: 28101 - protein, 9 aa, Homo Sapiens
KTFWQSVSK

SEQ ID NO: 28102 - protein, 9 aa, Homo Sapiens
KTIQVPQQK

SEQ ID NO: 28103 - protein, 9 aa, Homo Sapiens
KTISEAWIK

SEQ ID NO: 28104 - protein, 9 aa, Homo Sapiens
KTIVFVETK

SEQ ID NO: 28105 - protein, 9 aa, Homo Sapiens
KTLGPILKK

SEQ ID NO: 28106 - protein, 9 aa, Homo Sapiens
KTLQDIVYK

SEQ ID NO: 28107 - protein, 9 aa, Homo Sapiens
KTLYPIIGK

SEQ ID NO: 28108 - protein, 9 aa, Homo Sapiens
KTMKDFVRR

SEQ ID NO: 28109 - protein, 9 aa, Homo Sapiens
KTMPTTFNR

SEQ ID NO: 28110 - protein, 9 aa, Homo Sapiens
KTNLTSVTK

SEQ ID NO: 28111 - protein, 9 aa, Homo Sapiens
KTQEPFSVR

SEQ ID NO: 28112 - protein, 9 aa, Homo Sapiens
KTSNCVVLK

SEQ ID NO: 28113 - protein, 9 aa, Homo Sapiens
KTSNLLLSH

SEQ ID NO: 28114 - protein, 9 aa, Homo Sapiens
KTSPPVFSK

SEQ ID NO: 28115 - protein, 9 aa, Homo Sapiens
KVAVVLIQK

SEQ ID NO: 28116 - protein, 9 aa, Homo Sapiens
KVCDIYINY

SEQ ID NO: 28117 - protein, 9 aa, Homo Sapiens
KVCMYFTYK

SEQ ID NO: 28118 - protein, 9 aa, Homo Sapiens
KVCNPIITK

SEQ ID NO: 28119 - protein, 9 aa, Homo Sapiens
KVFAGYYTK

SEQ ID NO: 28120 - protein, 9 aa, Homo Sapiens
KVFGGTVHK

SEQ ID NO: 28121 - protein, 9 aa, Homo Sapiens
KVFHRPWRR

SEQ ID NO: 28122 - protein, 9 aa, Homo Sapiens
KVFKQIFSK

SEQ ID NO: 28123 - protein, 9 aa, Homo Sapiens
KVGEVIVTK

SEQ ID NO: 28124 - protein, 9 aa, Homo Sapiens
KVIDPVTGK

SEQ ID NO: 28125 - protein, 9 aa, Homo Sapiens
KVLDHFRRK

SEQ ID NO: 28126 - protein, 9 aa, Homo Sapiens
KVMGILINR

SEQ ID NO: 28127 - protein, 9 aa, Homo Sapiens
KVQPPGPVK

SEQ ID NO: 28128 - protein, 9 aa, Homo Sapiens
KVSDLTIPK

SEQ ID NO: 28129 - protein, 9 aa, Homo Sapiens
KVSGDIFSR

SEQ ID NO: 28130 - protein, 9 aa, Homo Sapiens
KVSQVIMEK

SEQ ID NO: 28131 - protein, 9 aa, Homo Sapiens
KVSTSPLTK

SEQ ID NO: 28132 - protein, 9 aa, Homo Sapiens
KVVDSLYNK

SEQ ID NO: 28133 - protein, 9 aa, Homo Sapiens
KVVKVTIMK

SEQ ID NO: 28134 - protein, 9 aa, Homo Sapiens
KVVNLPFEK

SEQ ID NO: 28135 - protein, 9 aa, Homo Sapiens
KVYGPGVAK

SEQ ID NO: 28136 - protein, 9 aa, Homo Sapiens
KVYNGILEK

SEQ ID NO: 28137 - protein, 9 aa, Homo Sapiens
KVYTPSISK

SEQ ID NO: 28138 - protein, 9 aa, Homo Sapiens
LAAPPALEK

SEQ ID NO: 28139 - protein, 9 aa, Homo Sapiens
LICDVALGK

SEQ ID NO: 28140 - protein, 9 aa, Homo Sapiens
LINAFHTPK

SEQ ID NO: 28141 - protein, 9 aa, Homo Sapiens
LIQQATTVK

SEQ ID NO: 28142 - protein, 9 aa, Homo Sapiens
LPALKQTPK

SEQ ID NO: 28143 - protein, 9 aa, Homo Sapiens
LPPLSPYFK

SEQ ID NO: 28144 - protein, 9 aa, Homo Sapiens
LQNEPIPER

SEQ ID NO: 28145 - protein, 9 aa, Homo Sapiens
LREDGALSI

SEQ ID NO: 28146 - protein, 9 aa, Homo Sapiens
LSQDCFWTK

SEQ ID NO: 28147 - protein, 9 aa, Homo Sapiens
LTDTSKYPK

SEQ ID NO: 28148 - protein, 9 aa, Homo Sapiens
LTEAPLNPK

SEQ ID NO: 28149 - protein, 9 aa, Homo Sapiens
LTGPPGVGK

SEQ ID NO: 28150 - protein, 9 aa, Homo Sapiens
LTGPVMPVR

SEQ ID NO: 28151 - protein, 9 aa, Homo Sapiens
LTIPEIPPK

SEQ ID NO: 28152 - protein, 9 aa, Homo Sapiens
LTMDKLWRK

SEQ ID NO: 28153 - protein, 9 aa, Homo Sapiens
LTMPGGVAK

SEQ ID NO: 28154 - protein, 9 aa, Homo Sapiens
LTNHFSFEK

SEQ ID NO: 28155 - protein, 9 aa, Homo Sapiens
LTTAVITNK

SEQ ID NO: 28156 - protein, 9 aa, Homo Sapiens
LTYEFVKQK

SEQ ID NO: 28157 - protein, 9 aa, Homo Sapiens
LTYNDFINK

SEQ ID NO: 28158 - protein, 9 aa, Homo Sapiens
LVANFFPKK

SEQ ID NO: 28159 - protein, 9 aa, Homo Sapiens
LVFDVELLK

SEQ ID NO: 28160 - protein, 9 aa, Homo Sapiens
LVFDWNTPK

SEQ ID NO: 28161 - protein, 9 aa, Homo Sapiens
LVFEWTIVK

SEQ ID NO: 28162 - protein, 9 aa, Homo Sapiens
LVIDSAVEK

SEQ ID NO: 28163 - protein, 9 aa, Homo Sapiens
LVIPFTIKK

SEQ ID NO: 28164 - protein, 9 aa, Homo Sapiens
LVMEGHLFK

SEQ ID NO: 28165 - protein, 9 aa, Homo Sapiens
LVMTHLILK

SEQ ID NO: 28166 - protein, 9 aa, Homo Sapiens
LVQQSCNYK

SEQ ID NO: 28167 - protein, 9 aa, Homo Sapiens
LVSTPVRTK

SEQ ID NO: 28168 - protein, 9 aa, Homo Sapiens
MAAAAFAEK

SEQ ID NO: 28169 - protein, 9 aa, Homo Sapiens
MIFHSPYCK

SEQ ID NO: 28170 - protein, 9 aa, Homo Sapiens
MMFSATFPK

SEQ ID NO: 28171 - protein, 9 aa, Homo Sapiens
MPKDIQLAR

SEQ ID NO: 28172 - protein, 9 aa, Homo Sapiens
MSQDFGWNK

SEQ ID NO: 28173 - protein, 9 aa, Homo Sapiens
MTYAQKIFK

SEQ ID NO: 28174 - protein, 9 aa, Homo Sapiens
MVANLLYEK

SEQ ID NO: 28175 - protein, 9 aa, Homo Sapiens
MVGVNLPQK

SEQ ID NO: 28176 - protein, 9 aa, Homo Sapiens
MVMDKKHFK

SEQ ID NO: 28177 - protein, 9 aa, Homo Sapiens
MVQQDYFPK

SEQ ID NO: 28178 - protein, 9 aa, Homo Sapiens
NAIKWNFTK

SEQ ID NO: 28179 - protein, 9 aa, Homo Sapiens
NFFASPMLK

SEQ ID NO: 28180 - protein, 9 aa, Homo Sapiens
NICSIYNLK

SEQ ID NO: 28181 - protein, 9 aa, Homo Sapiens
NSLIFLKPN

SEQ ID NO: 28182 - protein, 9 aa, Homo Sapiens
NSMGLFLQK

SEQ ID NO: 28183 - protein, 9 aa, Homo Sapiens
NTMNQFVNK

SEQ ID NO: 28184 - protein, 9 aa, Homo Sapiens
NTMQQFLQK

SEQ ID NO: 28185 - protein, 9 aa, Homo Sapiens
NVGPLIIKK

SEQ ID NO: 28186 - protein, 9 aa, Homo Sapiens
NVYEVVNPK

SEQ ID NO: 28187 - protein, 9 aa, Homo Sapiens
PEFPLSPPK

SEQ ID NO: 28188 - protein, 9 aa, Homo Sapiens
QAADILLYK

SEQ ID NO: 28189 - protein, 9 aa, Homo Sapiens
QAFAQVFNK

SEQ ID NO: 28190 - protein, 9 aa, Homo Sapiens
QAQEVFFLK

SEQ ID NO: 28191 - protein, 9 aa, Homo Sapiens
QEFGLARFK

SEQ ID NO: 28192 - protein, 9 aa, Homo Sapiens
QICDTYNQK

SEQ ID NO: 28193 - protein, 9 aa, Homo Sapiens
QIFIPMVNK

SEQ ID NO: 28194 - protein, 9 aa, Homo Sapiens
QIFKPIISK

SEQ ID NO: 28195 - protein, 9 aa, Homo Sapiens
QIFSEFLLK

SEQ ID NO: 28196 - protein, 9 aa, Homo Sapiens
QIGPAPPLK

SEQ ID NO: 28197 - protein, 9 aa, Homo Sapiens
QINGEIICK

SEQ ID NO: 28198 - protein, 9 aa, Homo Sapiens
QISEVVVVK

SEQ ID NO: 28199 - protein, 9 aa, Homo Sapiens
QITLPTVQK

SEQ ID NO: 28200 - protein, 9 aa, Homo Sapiens
QIYTYFVYK

SEQ ID NO: 28201 - protein, 9 aa, Homo Sapiens
QLYWSHPRK

SEQ ID NO: 28202 - protein, 9 aa, Homo Sapiens
QQLYWSHPR

SEQ ID NO: 28203 - protein, 9 aa, Homo Sapiens
QSCYIIISK

SEQ ID NO: 28204 - protein, 9 aa, Homo Sapiens
QTAGNVFLK

SEQ ID NO: 28205 - protein, 9 aa, Homo Sapiens
QTCRLLLSY

SEQ ID NO: 28206 - protein, 9 aa, Homo Sapiens
QTGPVPPGR

SEQ ID NO: 28207 - protein, 9 aa, Homo Sapiens
QTLSPQMWK

SEQ ID NO: 28208 - protein, 9 aa, Homo Sapiens
QTQPIYLAK

SEQ ID NO: 28209 - protein, 9 aa, Homo Sapiens
QTQSIYIPR

SEQ ID NO: 28210 - protein, 9 aa, Homo Sapiens
QTYGQQLQK

SEQ ID NO: 28211 - protein, 9 aa, Homo Sapiens
QTYVGITEK

SEQ ID NO: 28212 - protein, 9 aa, Homo Sapiens
QVADVVVSR

SEQ ID NO: 28213 - protein, 9 aa, Homo Sapiens
QVDPNFYSK

SEQ ID NO: 28214 - protein, 9 aa, Homo Sapiens
QVFEFTEPK

SEQ ID NO: 28215 - protein, 9 aa, Homo Sapiens
QVFQKSLPK

SEQ ID NO: 28216 - protein, 9 aa, Homo Sapiens
QVIPASEPK

SEQ ID NO: 28217 - protein, 9 aa, Homo Sapiens
QVQAAQFAK

SEQ ID NO: 28218 - protein, 9 aa, Homo Sapiens
QVQDCHVLK

SEQ ID NO: 28219 - protein, 9 aa, Homo Sapiens
QVTDFGFAK

SEQ ID NO: 28220 - protein, 9 aa, Homo Sapiens
RAAIPIAKR

SEQ ID NO: 28221 - protein, 9 aa, Homo Sapiens
RAAPFSLEY

SEQ ID NO: 28222 - protein, 9 aa, Homo Sapiens
RAMEWITAK

SEQ ID NO: 28223 - protein, 9 aa, Homo Sapiens
RAPEPLPPK

SEQ ID NO: 28224 - protein, 9 aa, Homo Sapiens
RAQDLPLKK

SEQ ID NO: 28225 - protein, 9 aa, Homo Sapiens
RAVPFNAPK

SEQ ID NO: 28226 - protein, 9 aa, Homo Sapiens
RAYHLLVKK

SEQ ID NO: 28227 - protein, 9 aa, Homo Sapiens
RAYPHVFTK

SEQ ID NO: 28228 - protein, 9 aa, Homo Sapiens
RESASAKIK

SEQ ID NO: 28229 - protein, 9 aa, Homo Sapiens
RIAEFAFEY

SEQ ID NO: 28230 - protein, 9 aa, Homo Sapiens
RIAKNLVEK

SEQ ID NO: 28231 - protein, 9 aa, Homo Sapiens
RICEILLQY

SEQ ID NO: 28232 - protein, 9 aa, Homo Sapiens
RIFDLGRKK

SEQ ID NO: 28233 - protein, 9 aa, Homo Sapiens
RIFEPPPPK

SEQ ID NO: 28234 - protein, 9 aa, Homo Sapiens
RIIDEVVNK

SEQ ID NO: 28235 - protein, 9 aa, Homo Sapiens
RIIDLVLQK

SEQ ID NO: 28236 - protein, 9 aa, Homo Sapiens
RIIEPLTSR

SEQ ID NO: 28237 - protein, 9 aa, Homo Sapiens
RIKEIFCPK

SEQ ID NO: 28238 - protein, 9 aa, Homo Sapiens
RILACGVAK

SEQ ID NO: 28239 - protein, 9 aa, Homo Sapiens
RILFFNTPK

SEQ ID NO: 28240 - protein, 9 aa, Homo Sapiens
RIQINPQNK

SEQ ID NO: 28241 - protein, 9 aa, Homo Sapiens
RIQLPVVSK

SEQ ID NO: 28242 - protein, 9 aa, Homo Sapiens
RITTHFELK

SEQ ID NO: 28243 - protein, 9 aa, Homo Sapiens
RIYDIFRSK

SEQ ID NO: 28244 - protein, 9 aa, Homo Sapiens
RLADSLIGK

SEQ ID NO: 28245 - protein, 9 aa, Homo Sapiens
RLCDQKFPK

SEQ ID NO: 28246 - protein, 9 aa, Homo Sapiens
RLFCVGFTK

SEQ ID NO: 28247 - protein, 9 aa, Homo Sapiens
RLFHLHSQK

SEQ ID NO: 28248 - protein, 9 aa, Homo Sapiens
RLFLFQIQK

SEQ ID NO: 28249 - protein, 9 aa, Homo Sapiens
RLFVGSIPK

SEQ ID NO: 28250 - protein, 9 aa, Homo Sapiens
RLMEIYQEK

SEQ ID NO: 28251 - protein, 9 aa, Homo Sapiens
RLMSLPIAK

SEQ ID NO: 28252 - protein, 9 aa, Homo Sapiens
RLQEIFTEK

SEQ ID NO: 28253 - protein, 9 aa, Homo Sapiens
RQFWTRTKK

SEQ ID NO: 28254 - protein, 9 aa, Homo Sapiens
RQIPYTMMK

SEQ ID NO: 28255 - protein, 9 aa, Homo Sapiens
RQVIPIIGK

SEQ ID NO: 28256 - protein, 9 aa, Homo Sapiens
RSCVVIIQK

SEQ ID NO: 28257 - protein, 9 aa, Homo Sapiens
RSDTPLIYK

SEQ ID NO: 28258 - protein, 9 aa, Homo Sapiens
RSFEEAFQK

SEQ ID NO: 28259 - protein, 9 aa, Homo Sapiens
RSLDNFFAK

SEQ ID NO: 28260 - protein, 9 aa, Homo Sapiens
RSMHEFSAK

SEQ ID NO: 28261 - protein, 9 aa, Homo Sapiens
RSNPYYIVK

SEQ ID NO: 28262 - protein, 9 aa, Homo Sapiens
RSVSIPAPA

SEQ ID NO: 28263 - protein, 9 aa, Homo Sapiens
RTAHVILRY

SEQ ID NO: 28264 - protein, 9 aa, Homo Sapiens
RTDKRFFLK

SEQ ID NO: 28265 - protein, 9 aa, Homo Sapiens
RTFSYIKNK

SEQ ID NO: 28266 - protein, 9 aa, Homo Sapiens
RTFTWLVGK

SEQ ID NO: 28267 - protein, 9 aa, Homo Sapiens
RTIAPIIGR

SEQ ID NO: 28268 - protein, 9 aa, Homo Sapiens
RTIDRSVFK

SEQ ID NO: 28269 - protein, 9 aa, Homo Sapiens
RTIFPLFMK

SEQ ID NO: 28270 - protein, 9 aa, Homo Sapiens
RTIQTFVKK

SEQ ID NO: 28271 - protein, 9 aa, Homo Sapiens
RTLEPLAKK

SEQ ID NO: 28272 - protein, 9 aa, Homo Sapiens
RTNWPNTGK

SEQ ID NO: 28273 - protein, 9 aa, Homo Sapiens
RTQNVLGEK

SEQ ID NO: 28274 - protein, 9 aa, Homo Sapiens
RTSEIYVHR

SEQ ID NO: 28275 - protein, 9 aa, Homo Sapiens
RTYYSPVYR

SEQ ID NO: 28276 - protein, 9 aa, Homo Sapiens
RVARYFEYK

SEQ ID NO: 28277 - protein, 9 aa, Homo Sapiens
RVFNIMREK

SEQ ID NO: 28278 - protein, 9 aa, Homo Sapiens
RVFPWFSVK

SEQ ID NO: 28279 - protein, 9 aa, Homo Sapiens
RVHSIFVLR

SEQ ID NO: 28280 - protein, 9 aa, Homo Sapiens
RVIAKALEK

SEQ ID NO: 28281 - protein, 9 aa, Homo Sapiens
RVIAPPLIK

SEQ ID NO: 28282 - protein, 9 aa, Homo Sapiens
RVLEDRALK

SEQ ID NO: 28283 - protein, 9 aa, Homo Sapiens
RVLPEFKKK

SEQ ID NO: 28284 - protein, 9 aa, Homo Sapiens
RVLPYPFTH

SEQ ID NO: 28285 - protein, 9 aa, Homo Sapiens
RVLSKAFSR

SEQ ID NO: 28286 - protein, 9 aa, Homo Sapiens
RVMGIRVLR

SEQ ID NO: 28287 - protein, 9 aa, Homo Sapiens
RVMKALVNR

SEQ ID NO: 28288 - protein, 9 aa, Homo Sapiens
RVMQDIVYK

SEQ ID NO: 28289 - protein, 9 aa, Homo Sapiens
RVNKLICVK

SEQ ID NO: 28290 - protein, 9 aa, Homo Sapiens
RVNKPPYPK

SEQ ID NO: 28291 - protein, 9 aa, Homo Sapiens
RVQEVPKLK

SEQ ID NO: 28292 - protein, 9 aa, Homo Sapiens
RVQGFQVEY

SEQ ID NO: 28293 - protein, 9 aa, Homo Sapiens
RVSYQKLLK

SEQ ID NO: 28294 - protein, 9 aa, Homo Sapiens
RVTDLFIGK

SEQ ID NO: 28295 - protein, 9 aa, Homo Sapiens
RVTPFILKK

SEQ ID NO: 28296 - protein, 9 aa, Homo Sapiens
RVVDLLVIK

SEQ ID NO: 28297 - protein, 9 aa, Homo Sapiens
RVYHYFQWR

SEQ ID NO: 28298 - protein, 9 aa, Homo Sapiens
RVYNIYIRR

SEQ ID NO: 28299 - protein, 9 aa, Homo Sapiens
RVYPESIPR

SEQ ID NO: 28300 - protein, 9 aa, Homo Sapiens
SAAAALVLK

SEQ ID NO: 28301 - protein, 9 aa, Homo Sapiens
SAAPAITCR

SEQ ID NO: 28302 - protein, 9 aa, Homo Sapiens
SAAVITPFK

SEQ ID NO: 28303 - protein, 9 aa, Homo Sapiens
SAFGQAFSK

SEQ ID NO: 28304 - protein, 9 aa, Homo Sapiens
SAFGVIIEK

SEQ ID NO: 28305 - protein, 9 aa, Homo Sapiens
SAFQHFWNR

SEQ ID NO: 28306 - protein, 9 aa, Homo Sapiens
SAFSTSISK

SEQ ID NO: 28307 - protein, 9 aa, Homo Sapiens
SAFVERVRK

SEQ ID NO: 28308 - protein, 9 aa, Homo Sapiens
SAFYVPFAK

SEQ ID NO: 28309 - protein, 9 aa, Homo Sapiens
SAGPHLPLK

SEQ ID NO: 28310 - protein, 9 aa, Homo Sapiens
SAGPPSLRK

SEQ ID NO: 28311 - protein, 9 aa, Homo Sapiens
SAITGPVAK

SEQ ID NO: 28312 - protein, 9 aa, Homo Sapiens
SALDFLHNK

SEQ ID NO: 28313 - protein, 9 aa, Homo Sapiens
SALDYNEAK

SEQ ID NO: 28314 - protein, 9 aa, Homo Sapiens
SALGSSSYK

SEQ ID NO: 28315 - protein, 9 aa, Homo Sapiens
SALHIAIEK

SEQ ID NO: 28316 - protein, 9 aa, Homo Sapiens
SALSVAPSK

SEQ ID NO: 28317 - protein, 9 aa, Homo Sapiens
SAMERICEK

SEQ ID NO: 28318 - protein, 9 aa, Homo Sapiens
SAPKPGPLK

SEQ ID NO: 28319 - protein, 9 aa, Homo Sapiens
SAPSSSTPF

SEQ ID NO: 28320 - protein, 9 aa, Homo Sapiens
SAQGNVYVK

SEQ ID NO: 28321 - protein, 9 aa, Homo Sapiens
SAQNTKFFK

SEQ ID NO: 28322 - protein, 9 aa, Homo Sapiens
SAQSFFENK

SEQ ID NO: 28323 - protein, 9 aa, Homo Sapiens
SASASLPTK

SEQ ID NO: 28324 - protein, 9 aa, Homo Sapiens
SATQAVFQK

SEQ ID NO: 28325 - protein, 9 aa, Homo Sapiens
SATTSPFFK

SEQ ID NO: 28326 - protein, 9 aa, Homo Sapiens
SAVDPVQMK

SEQ ID NO: 28327 - protein, 9 aa, Homo Sapiens
SAVGTIVKK

SEQ ID NO: 28328 - protein, 9 aa, Homo Sapiens
SAVLFTITK

SEQ ID NO: 28329 - protein, 9 aa, Homo Sapiens
SAVRPVIEK

SEQ ID NO: 28330 - protein, 9 aa, Homo Sapiens
SDQFPLPLK

SEQ ID NO: 28331 - protein, 9 aa, Homo Sapiens
SGIQVRYLK

SEQ ID NO: 28332 - protein, 9 aa, Homo Sapiens
SGMDYWIVK

SEQ ID NO: 28333 - protein, 9 aa, Homo Sapiens
SGSPATPLK

SEQ ID NO: 28334 - protein, 9 aa, Homo Sapiens
SIAAAVAPK

SEQ ID NO: 28335 - protein, 9 aa, Homo Sapiens
SIAPPVPLK

SEQ ID NO: 28336 - protein, 9 aa, Homo Sapiens
SICGKMFKK

SEQ ID NO: 28337 - protein, 9 aa, Homo Sapiens
SICGKSFTK

SEQ ID NO: 28338 - protein, 9 aa, Homo Sapiens
SICGKTFNK

SEQ ID NO: 28339 - protein, 9 aa, Homo Sapiens
SIDEHFQPK

SEQ ID NO: 28340 - protein, 9 aa, Homo Sapiens
SIFDKIREK

SEQ ID NO: 28341 - protein, 9 aa, Homo Sapiens
SIFKQPVTK

SEQ ID NO: 28342 - protein, 9 aa, Homo Sapiens
SIFPYVTTK

SEQ ID NO: 28343 - protein, 9 aa, Homo Sapiens
SIFRTPISK

SEQ ID NO: 28344 - protein, 9 aa, Homo Sapiens
SIFSKFTSK

SEQ ID NO: 28345 - protein, 9 aa, Homo Sapiens
SIGPSIVCK

SEQ ID NO: 28346 - protein, 9 aa, Homo Sapiens
SIGTPLDPK

SEQ ID NO: 28347 - protein, 9 aa, Homo Sapiens
SIIETLRQK

SEQ ID NO: 28348 - protein, 9 aa, Homo Sapiens
SIISVLPWK

SEQ ID NO: 28349 - protein, 9 aa, Homo Sapiens
SILKESKYK

SEQ ID NO: 28350 - protein, 9 aa, Homo Sapiens
SILNNPIVK

SEQ ID NO: 28351 - protein, 9 aa, Homo Sapiens
SILNWVKFK

SEQ ID NO: 28352 - protein, 9 aa, Homo Sapiens
SILPAIFQK

SEQ ID NO: 28353 - protein, 9 aa, Homo Sapiens
SILSGGTPK

SEQ ID NO: 28354 - protein, 9 aa, Homo Sapiens
SIMDFNSEK

SEQ ID NO: 28355 - protein, 9 aa, Homo Sapiens
SIMKWNRER

SEQ ID NO: 28356 - protein, 9 aa, Homo Sapiens
SIMSSHVMK

SEQ ID NO: 28357 - protein, 9 aa, Homo Sapiens
SIPTFYFPR

SEQ ID NO: 28358 - protein, 9 aa, Homo Sapiens
SIQHPLIKK

SEQ ID NO: 28359 - protein, 9 aa, Homo Sapiens
SISAVVMEK

SEQ ID NO: 28360 - protein, 9 aa, Homo Sapiens
SISSPQPGK

SEQ ID NO: 28361 - protein, 9 aa, Homo Sapiens
SITGFFQRK

SEQ ID NO: 28362 - protein, 9 aa, Homo Sapiens
SITSVFITK

SEQ ID NO: 28363 - protein, 9 aa, Homo Sapiens
SIVSQTIPK

SEQ ID NO: 28364 - protein, 9 aa, Homo Sapiens
SIWDETLYK

SEQ ID NO: 28365 - protein, 9 aa, Homo Sapiens
SIWDYFIAK

SEQ ID NO: 28366 - protein, 9 aa, Homo Sapiens
SIYVYKVLK

SEQ ID NO: 28367 - protein, 9 aa, Homo Sapiens
SIYYVDVQK

SEQ ID NO: 28368 - protein, 9 aa, Homo Sapiens
SLADFQIEK

SEQ ID NO: 28369 - protein, 9 aa, Homo Sapiens
SLAPVNIFK

SEQ ID NO: 28370 - protein, 9 aa, Homo Sapiens
SLFGSPVAK

SEQ ID NO: 28371 - protein, 9 aa, Homo Sapiens
SLFNTGFLK

SEQ ID NO: 28372 - protein, 9 aa, Homo Sapiens
SLFSRLFGK

SEQ ID NO: 28373 - protein, 9 aa, Homo Sapiens
SLGQVVITK

SEQ ID NO: 28374 - protein, 9 aa, Homo Sapiens
SLLGHVYCK

SEQ ID NO: 28375 - protein, 9 aa, Homo Sapiens
SLLGYFPNK

SEQ ID NO: 28376 - protein, 9 aa, Homo Sapiens
SLLNVSTPK

SEQ ID NO: 28377 - protein, 9 aa, Homo Sapiens
SLLRDLTPK

SEQ ID NO: 28378 - protein, 9 aa, Homo Sapiens
SLMHSFILK

SEQ ID NO: 28379 - protein, 9 aa, Homo Sapiens
SLMNVPLFK

SEQ ID NO: 28380 - protein, 9 aa, Homo Sapiens
SLMPWFHGK

SEQ ID NO: 28381 - protein, 9 aa, Homo Sapiens
SLPYPPKTL

SEQ ID NO: 28382 - protein, 9 aa, Homo Sapiens
SLQDYIAVK

SEQ ID NO: 28383 - protein, 9 aa, Homo Sapiens
SLQELFLAH

SEQ ID NO: 28384 - protein, 9 aa, Homo Sapiens
SLQPSISQK

SEQ ID NO: 28385 - protein, 9 aa, Homo Sapiens
SLQRWEHLK

SEQ ID NO: 28386 - protein, 9 aa, Homo Sapiens
SLSEKTWSK

SEQ ID NO: 28387 - protein, 9 aa, Homo Sapiens
SLSPVILIK

SEQ ID NO: 28388 - protein, 9 aa, Homo Sapiens
SLSSPLNPK

SEQ ID NO: 28389 - protein, 9 aa, Homo Sapiens
SLTPVTPQK

SEQ ID NO: 28390 - protein, 9 aa, Homo Sapiens
SLTQKEIAK

SEQ ID NO: 28391 - protein, 9 aa, Homo Sapiens
SLYWLSTQK

SEQ ID NO: 28392 - protein, 9 aa, Homo Sapiens
SMWDYFVAK

SEQ ID NO: 28393 - protein, 9 aa, Homo Sapiens
SNDGATILK

SEQ ID NO: 28394 - protein, 9 aa, Homo Sapiens
SQCGSLIGK

SEQ ID NO: 28395 - protein, 9 aa, Homo Sapiens
SQFSLPVQK

SEQ ID NO: 28396 - protein, 9 aa, Homo Sapiens
SQGTPISLK

SEQ ID NO: 28397 - protein, 9 aa, Homo Sapiens
SQLGIFISK

SEQ ID NO: 28398 - protein, 9 aa, Homo Sapiens
SQMEQFPVK

SEQ ID NO: 28399 - protein, 9 aa, Homo Sapiens
SQNPRFYHK

SEQ ID NO: 28400 - protein, 9 aa, Homo Sapiens
SQPGLVHPK

SEQ ID NO: 28401 - protein, 9 aa, Homo Sapiens
SQQKAFFAK

SEQ ID NO: 28402 - protein, 9 aa, Homo Sapiens
SSAGPGLLK

SEQ ID NO: 28403 - protein, 9 aa, Homo Sapiens
SSAHWPIFK

SEQ ID NO: 28404 - protein, 9 aa, Homo Sapiens
SSAPPLTGK

SEQ ID NO: 28405 - protein, 9 aa, Homo Sapiens
SSAPQNIPK

SEQ ID NO: 28406 - protein, 9 aa, Homo Sapiens
SSCPQQWIK

SEQ ID NO: 28407 - protein, 9 aa, Homo Sapiens
SSCQTIIPK

SEQ ID NO: 28408 - protein, 9 aa, Homo Sapiens
SSFEHEFKK

SEQ ID NO: 28409 - protein, 9 aa, Homo Sapiens
SSFGNMIYK

SEQ ID NO: 28410 - protein, 9 aa, Homo Sapiens
SSFGTILRK

SEQ ID NO: 28411 - protein, 9 aa, Homo Sapiens
SSFLIKRNK

SEQ ID NO: 28412 - protein, 9 aa, Homo Sapiens
SSFPAYMSK

SEQ ID NO: 28413 - protein, 9 aa, Homo Sapiens
SSFQFSIQK

SEQ ID NO: 28414 - protein, 9 aa, Homo Sapiens
SSFSGLLRK

SEQ ID NO: 28415 - protein, 9 aa, Homo Sapiens
SSFSSPHMK

SEQ ID NO: 28416 - protein, 9 aa, Homo Sapiens
SSGDIFLEK

SEQ ID NO: 28417 - protein, 9 aa, Homo Sapiens
SSGPSTPLK

SEQ ID NO: 28418 - protein, 9 aa, Homo Sapiens
SSGVPNPPK

SEQ ID NO: 28419 - protein, 9 aa, Homo Sapiens
SSHLPPPPK

SEQ ID NO: 28420 - protein, 9 aa, Homo Sapiens
SSIFVAPRK

SEQ ID NO: 28421 - protein, 9 aa, Homo Sapiens
SSINSRFAK

SEQ ID NO: 28422 - protein, 9 aa, Homo Sapiens
SSIQGQWPK

SEQ ID NO: 28423 - protein, 9 aa, Homo Sapiens
SSIRHMIRK

SEQ ID NO: 28424 - protein, 9 aa, Homo Sapiens
SSKLLATSK

SEQ ID NO: 28425 - protein, 9 aa, Homo Sapiens
SSLFSLLSK

SEQ ID NO: 28426 - protein, 9 aa, Homo Sapiens
SSLKGGLLK

SEQ ID NO: 28427 - protein, 9 aa, Homo Sapiens
SSLNHIVEK

SEQ ID NO: 28428 - protein, 9 aa, Homo Sapiens
SSLPGVFKK

SEQ ID NO: 28429 - protein, 9 aa, Homo Sapiens
SSLPTQLFK

SEQ ID NO: 28430 - protein, 9 aa, Homo Sapiens
SSLQPLPPR

SEQ ID NO: 28431 - protein, 9 aa, Homo Sapiens
SSLSLFFRK

SEQ ID NO: 28432 - protein, 9 aa, Homo Sapiens
SSLTNDVAK

SEQ ID NO: 28433 - protein, 9 aa, Homo Sapiens
SSLYIILKK

SEQ ID NO: 28434 - protein, 9 aa, Homo Sapiens
SSMFGTLPR

SEQ ID NO: 28435 - protein, 9 aa, Homo Sapiens
SSNFYITEK

SEQ ID NO: 28436 - protein, 9 aa, Homo Sapiens
SSNIFTVAK

SEQ ID NO: 28437 - protein, 9 aa, Homo Sapiens
SSNLPVNNK

SEQ ID NO: 28438 - protein, 9 aa, Homo Sapiens
SSNSYAIKK

SEQ ID NO: 28439 - protein, 9 aa, Homo Sapiens
SSQSLSFPK

SEQ ID NO: 28440 - protein, 9 aa, Homo Sapiens
SSRGPLPVK

SEQ ID NO: 28441 - protein, 9 aa, Homo Sapiens
SSSGSLPPR

SEQ ID NO: 28442 - protein, 9 aa, Homo Sapiens
SSSNVRVIK

SEQ ID NO: 28443 - protein, 9 aa, Homo Sapiens
SSSSPTFPK

SEQ ID NO: 28444 - protein, 9 aa, Homo Sapiens
SSVGSVITK

SEQ ID NO: 28445 - protein, 9 aa, Homo Sapiens
SSVPYSTAK

SEQ ID NO: 28446 - protein, 9 aa, Homo Sapiens
SSVVPSVYK

SEQ ID NO: 28447 - protein, 9 aa, Homo Sapiens
SSYGNQEFK

SEQ ID NO: 28448 - protein, 9 aa, Homo Sapiens
SSYPNPVAH

SEQ ID NO: 28449 - protein, 9 aa, Homo Sapiens
SSYPVCVSK

SEQ ID NO: 28450 - protein, 9 aa, Homo Sapiens
SSYQDFYCK

SEQ ID NO: 28451 - protein, 9 aa, Homo Sapiens
STAAFFLLR

SEQ ID NO: 28452 - protein, 9 aa, Homo Sapiens
STAAVGVLK

SEQ ID NO: 28453 - protein, 9 aa, Homo Sapiens
STADLIRCK

SEQ ID NO: 28454 - protein, 9 aa, Homo Sapiens
STANIDDLK

SEQ ID NO: 28455 - protein, 9 aa, Homo Sapiens
STAPAQLGK

SEQ ID NO: 28456 - protein, 9 aa, Homo Sapiens
STARHLYLR

SEQ ID NO: 28457 - protein, 9 aa, Homo Sapiens
STASELSPK

SEQ ID NO: 28458 - protein, 9 aa, Homo Sapiens
STCSPIISK

SEQ ID NO: 28459 - protein, 9 aa, Homo Sapiens
STDNVSITK

SEQ ID NO: 28460 - protein, 9 aa, Homo Sapiens
STDPSVLGK

SEQ ID NO: 28461 - protein, 9 aa, Homo Sapiens
STDSDSFVK

SEQ ID NO: 28462 - protein, 9 aa, Homo Sapiens
STEEPMPTK

SEQ ID NO: 28463 - protein, 9 aa, Homo Sapiens
STEKIYIRK

SEQ ID NO: 28464 - protein, 9 aa, Homo Sapiens
STEPPYSQK

SEQ ID NO: 28465 - protein, 9 aa, Homo Sapiens
STFDTPYCR

SEQ ID NO: 28466 - protein, 9 aa, Homo Sapiens
STFDTQITK

SEQ ID NO: 28467 - protein, 9 aa, Homo Sapiens
STFFYPKLK

SEQ ID NO: 28468 - protein, 9 aa, Homo Sapiens
STFNQVVLK

SEQ ID NO: 28469 - protein, 9 aa, Homo Sapiens
STFRESFKK

SEQ ID NO: 28470 - protein, 9 aa, Homo Sapiens
STFSAPLNK

SEQ ID NO: 28471 - protein, 9 aa, Homo Sapiens
STFSATWNR

SEQ ID NO: 28472 - protein, 9 aa, Homo Sapiens
STFSEIFKK

SEQ ID NO: 28473 - protein, 9 aa, Homo Sapiens
STGPITKPK

SEQ ID NO: 28474 - protein, 9 aa, Homo Sapiens
STHGTFLNK

SEQ ID NO: 28475 - protein, 9 aa, Homo Sapiens
STIAGSKLK

SEQ ID NO: 28476 - protein, 9 aa, Homo Sapiens
STICKYYQK

SEQ ID NO: 28477 - protein, 9 aa, Homo Sapiens
STIDDTISK

SEQ ID NO: 28478 - protein, 9 aa, Homo Sapiens
STIEYVIQR

SEQ ID NO: 28479 - protein, 9 aa, Homo Sapiens
STIHGKLQE

SEQ ID NO: 28480 - protein, 9 aa, Homo Sapiens
STIPPELVK

SEQ ID NO: 28481 - protein, 9 aa, Homo Sapiens
STIRLPHVK

SEQ ID NO: 28482 - protein, 9 aa, Homo Sapiens
STISEVLGR

SEQ ID NO: 28483 - protein, 9 aa, Homo Sapiens
STLHHVLQR

SEQ ID NO: 28484 - protein, 9 aa, Homo Sapiens
STLMSLPTK

SEQ ID NO: 28485 - protein, 9 aa, Homo Sapiens
STLNVGVNK

SEQ ID NO: 28486 - protein, 9 aa, Homo Sapiens
STLPKPVQK

SEQ ID NO: 28487 - protein, 9 aa, Homo Sapiens
STLPKSLLK

SEQ ID NO: 28488 - protein, 9 aa, Homo Sapiens
STLPPVKSK

SEQ ID NO: 28489 - protein, 9 aa, Homo Sapiens
STLPVTVKK

SEQ ID NO: 28490 - protein, 9 aa, Homo Sapiens
STLSPIAPR

SEQ ID NO: 28491 - protein, 9 aa, Homo Sapiens
STMAIIVNK

SEQ ID NO: 28492 - protein, 9 aa, Homo Sapiens
STMGYMAAK

SEQ ID NO: 28493 - protein, 9 aa, Homo Sapiens
STMGYMMAK

SEQ ID NO: 28494 - protein, 9 aa, Homo Sapiens
STMPGLPTR

SEQ ID NO: 28495 - protein, 9 aa, Homo Sapiens
STNNWVLIK

SEQ ID NO: 28496 - protein, 9 aa, Homo Sapiens
STNPFRPQK

SEQ ID NO: 28497 - protein, 9 aa, Homo Sapiens
STNSFALNK

SEQ ID NO: 28498 - protein, 9 aa, Homo Sapiens
STNSSPVLK

SEQ ID NO: 28499 - protein, 9 aa, Homo Sapiens
STNWSDVGK

SEQ ID NO: 28500 - protein, 9 aa, Homo Sapiens
STPETPLTK

SEQ ID NO: 28501 - protein, 9 aa, Homo Sapiens
STPETTLKP

SEQ ID NO: 28502 - protein, 9 aa, Homo Sapiens
STQPENFLK

SEQ ID NO: 28503 - protein, 9 aa, Homo Sapiens
STQQLQEVK

SEQ ID NO: 28504 - protein, 9 aa, Homo Sapiens
STSCPVVQK

SEQ ID NO: 28505 - protein, 9 aa, Homo Sapiens
STSDSVRLK

SEQ ID NO: 28506 - protein, 9 aa, Homo Sapiens
STSNSFNLK

SEQ ID NO: 28507 - protein, 9 aa, Homo Sapiens
STSPYFLEH

SEQ ID NO: 28508 - protein, 9 aa, Homo Sapiens
STSVPLGDK

SEQ ID NO: 28509 - protein, 9 aa, Homo Sapiens
STTGCVLNK

SEQ ID NO: 28510 - protein, 9 aa, Homo Sapiens
STTRLYLRK

SEQ ID NO: 28511 - protein, 9 aa, Homo Sapiens
STVEAFFKK

SEQ ID NO: 28512 - protein, 9 aa, Homo Sapiens
STVEKIAMK

SEQ ID NO: 28513 - protein, 9 aa, Homo Sapiens
STVGWASQK

SEQ ID NO: 28514 - protein, 9 aa, Homo Sapiens
STVLPLYAK

SEQ ID NO: 28515 - protein, 9 aa, Homo Sapiens
STVPPSLRK

SEQ ID NO: 28516 - protein, 9 aa, Homo Sapiens
STYKEAFRK

SEQ ID NO: 28517 - protein, 9 aa, Homo Sapiens
SVAALPVCK

SEQ ID NO: 28518 - protein, 9 aa, Homo Sapiens
SVAAPITVR

SEQ ID NO: 28519 - protein, 9 aa, Homo Sapiens
SVADPHNLK

SEQ ID NO: 28520 - protein, 9 aa, Homo Sapiens
SVAECQLMK

SEQ ID NO: 28521 - protein, 9 aa, Homo Sapiens
SVAKNFFTK

SEQ ID NO: 28522 - protein, 9 aa, Homo Sapiens
SVAKTILKR

SEQ ID NO: 28523 - protein, 9 aa, Homo Sapiens
SVAQLLLSK

SEQ ID NO: 28524 - protein, 9 aa, Homo Sapiens
SVASKALQK

SEQ ID NO: 28525 - protein, 9 aa, Homo Sapiens
SVASPFTSK

SEQ ID NO: 28526 - protein, 9 aa, Homo Sapiens
SVCGKGFSR

SEQ ID NO: 28527 - protein, 9 aa, Homo Sapiens
SVCVLDLRK

SEQ ID NO: 28528 - protein, 9 aa, Homo Sapiens
SVDKIVIQK

SEQ ID NO: 28529 - protein, 9 aa, Homo Sapiens
SVDLPKHAK

SEQ ID NO: 28530 - protein, 9 aa, Homo Sapiens
SVDPKNYPK

SEQ ID NO: 28531 - protein, 9 aa, Homo Sapiens
SVDPNQYYK

SEQ ID NO: 28532 - protein, 9 aa, Homo Sapiens
SVDRPIIDR

SEQ ID NO: 28533 - protein, 9 aa, Homo Sapiens
SVEEFQVFK

SEQ ID NO: 28534 - protein, 9 aa, Homo Sapiens
SVELPIVGK

SEQ ID NO: 28535 - protein, 9 aa, Homo Sapiens
SVEMPLTGK

SEQ ID NO: 28536 - protein, 9 aa, Homo Sapiens
SVESIISPK

SEQ ID NO: 28537 - protein, 9 aa, Homo Sapiens
SVFACPILR

SEQ ID NO: 28538 - protein, 9 aa, Homo Sapiens
SVFAFGENK

SEQ ID NO: 28539 - protein, 9 aa, Homo Sapiens
SVFGTMPLK

SEQ ID NO: 28540 - protein, 9 aa, Homo Sapiens
SVFKELLGK

SEQ ID NO: 28541 - protein, 9 aa, Homo Sapiens
SVFLALPCK

SEQ ID NO: 28542 - protein, 9 aa, Homo Sapiens
SVFNHAIRH

SEQ ID NO: 28543 - protein, 9 aa, Homo Sapiens
SVFQTTDTK

SEQ ID NO: 28544 - protein, 9 aa, Homo Sapiens
SVFTSVRQK

SEQ ID NO: 28545 - protein, 9 aa, Homo Sapiens
SVFVATFLR

SEQ ID NO: 28546 - protein, 9 aa, Homo Sapiens
SVGQTVITK

SEQ ID NO: 28547 - protein, 9 aa, Homo Sapiens
SVGSVITKK

SEQ ID NO: 28548 - protein, 9 aa, Homo Sapiens
SVHWFPVQK

SEQ ID NO: 28549 - protein, 9 aa, Homo Sapiens
SVIAKYPHK

SEQ ID NO: 28550 - protein, 9 aa, Homo Sapiens
SVIDSVTKK

SEQ ID NO: 28551 - protein, 9 aa, Homo Sapiens
SVIELLLKK

SEQ ID NO: 28552 - protein, 9 aa, Homo Sapiens
SVIELTCTK

SEQ ID NO: 28553 - protein, 9 aa, Homo Sapiens
SVIEQILHY

SEQ ID NO: 28554 - protein, 9 aa, Homo Sapiens
SVIKNVSTK

SEQ ID NO: 28555 - protein, 9 aa, Homo Sapiens
SVILPILKK

SEQ ID NO: 28556 - protein, 9 aa, Homo Sapiens
SVINKVTEK

SEQ ID NO: 28557 - protein, 9 aa, Homo Sapiens
SVINVFVGR

SEQ ID NO: 28558 - protein, 9 aa, Homo Sapiens
SVIPEHPKK

SEQ ID NO: 28559 - protein, 9 aa, Homo Sapiens
SVIRPILKR

SEQ ID NO: 28560 - protein, 9 aa, Homo Sapiens
SVITIVKSK

SEQ ID NO: 28561 - protein, 9 aa, Homo Sapiens
SVITQVLNK

SEQ ID NO: 28562 - protein, 9 aa, Homo Sapiens
SVIVQPFSK

SEQ ID NO: 28563 - protein, 9 aa, Homo Sapiens
SVLAETIKK

SEQ ID NO: 28564 - protein, 9 aa, Homo Sapiens
SVLDKSLTK

SEQ ID NO: 28565 - protein, 9 aa, Homo Sapiens
SVLDLSVHK

SEQ ID NO: 28566 - protein, 9 aa, Homo Sapiens
SVLDSFLKY

SEQ ID NO: 28567 - protein, 9 aa, Homo Sapiens
SVLDYFSER

SEQ ID NO: 28568 - protein, 9 aa, Homo Sapiens
SVLDYGNTK

SEQ ID NO: 28569 - protein, 9 aa, Homo Sapiens
SVLEFLSQK

SEQ ID NO: 28570 - protein, 9 aa, Homo Sapiens
SVLENFVGR

SEQ ID NO: 28571 - protein, 9 aa, Homo Sapiens
SVLEPGTAK

SEQ ID NO: 28572 - protein, 9 aa, Homo Sapiens
SVLEQSFLR

SEQ ID NO: 28573 - protein, 9 aa, Homo Sapiens
SVLEVVSEK

SEQ ID NO: 28574 - protein, 9 aa, Homo Sapiens
SVLGISTPK

SEQ ID NO: 28575 - protein, 9 aa, Homo Sapiens
SVLHGMVFK

SEQ ID NO: 28576 - protein, 9 aa, Homo Sapiens
SVLKGAVTK

SEQ ID NO: 28577 - protein, 9 aa, Homo Sapiens
SVLLFVTKK

SEQ ID NO: 28578 - protein, 9 aa, Homo Sapiens
SVLNFATNR

SEQ ID NO: 28579 - protein, 9 aa, Homo Sapiens
SVLNIPMAK

SEQ ID NO: 28580 - protein, 9 aa, Homo Sapiens
SVLNLVIVK

SEQ ID NO: 28581 - protein, 9 aa, Homo Sapiens
SVLPFQIYY

SEQ ID NO: 28582 - protein, 9 aa, Homo Sapiens
SVLPWIILH

SEQ ID NO: 28583 - protein, 9 aa, Homo Sapiens
SVLSPLLNK

SEQ ID NO: 28584 - protein, 9 aa, Homo Sapiens
SVLWPWINR

SEQ ID NO: 28585 - protein, 9 aa, Homo Sapiens
SVMAQVRQK

SEQ ID NO: 28586 - protein, 9 aa, Homo Sapiens
SVMDHHFRK

SEQ ID NO: 28587 - protein, 9 aa, Homo Sapiens
SVMELARLK

SEQ ID NO: 28588 - protein, 9 aa, Homo Sapiens
SVMGVTVSR

SEQ ID NO: 28589 - protein, 9 aa, Homo Sapiens
SVMRLTISY

SEQ ID NO: 28590 - protein, 9 aa, Homo Sapiens
SVNGKVLSK

SEQ ID NO: 28591 - protein, 9 aa, Homo Sapiens
SVNLKVSPK

SEQ ID NO: 28592 - protein, 9 aa, Homo Sapiens
SVNPNCYAK

SEQ ID NO: 28593 - protein, 9 aa, Homo Sapiens
SVPLPISHK

SEQ ID NO: 28594 - protein, 9 aa, Homo Sapiens
SVPSTPIAH

SEQ ID NO: 28595 - protein, 9 aa, Homo Sapiens
SVQAPEVAK

SEQ ID NO: 28596 - protein, 9 aa, Homo Sapiens
SVQCMPVAK

SEQ ID NO: 28597 - protein, 9 aa, Homo Sapiens
SVQDGSVLK

SEQ ID NO: 28598 - protein, 9 aa, Homo Sapiens
SVQEGIKFK

SEQ ID NO: 28599 - protein, 9 aa, Homo Sapiens
SVQENIQQK

SEQ ID NO: 28600 - protein, 9 aa, Homo Sapiens
SVQEYFVRK

SEQ ID NO: 28601 - protein, 9 aa, Homo Sapiens
SVQGFFLNH

SEQ ID NO: 28602 - protein, 9 aa, Homo Sapiens
SVQGIIIYR

SEQ ID NO: 28603 - protein, 9 aa, Homo Sapiens
SVQKPKFPK

SEQ ID NO: 28604 - protein, 9 aa, Homo Sapiens
SVQKPLDYY

SEQ ID NO: 28605 - protein, 9 aa, Homo Sapiens
SVQVFGRKK

SEQ ID NO: 28606 - protein, 9 aa, Homo Sapiens
SVSAVNLPK

SEQ ID NO: 28607 - protein, 9 aa, Homo Sapiens
SVSDLAPPR

SEQ ID NO: 28608 - protein, 9 aa, Homo Sapiens
SVSDLFNTK

SEQ ID NO: 28609 - protein, 9 aa, Homo Sapiens
SVSDQFYRY

SEQ ID NO: 28610 - protein, 9 aa, Homo Sapiens
SVSEVVVNR

SEQ ID NO: 28611 - protein, 9 aa, Homo Sapiens
SVSGYIYHK

SEQ ID NO: 28612 - protein, 9 aa, Homo Sapiens
SVSKLSTPK

SEQ ID NO: 28613 - protein, 9 aa, Homo Sapiens
SVSLPSVKK

SEQ ID NO: 28614 - protein, 9 aa, Homo Sapiens
SVSLPVRKK

SEQ ID NO: 28615 - protein, 9 aa, Homo Sapiens
SVSNVVITK

SEQ ID NO: 28616 - protein, 9 aa, Homo Sapiens
SVSPVVHVR

SEQ ID NO: 28617 - protein, 9 aa, Homo Sapiens
SVSQKLMAK

SEQ ID NO: 28618 - protein, 9 aa, Homo Sapiens
SVSTHLITK

SEQ ID NO: 28619 - protein, 9 aa, Homo Sapiens
SVSTPLIIK

SEQ ID NO: 28620 - protein, 9 aa, Homo Sapiens
SVTNVSVAK

SEQ ID NO: 28621 - protein, 9 aa, Homo Sapiens
SVVEDMILK

SEQ ID NO: 28622 - protein, 9 aa, Homo Sapiens
SVVGELMYK

SEQ ID NO: 28623 - protein, 9 aa, Homo Sapiens
SVVGLFLRH

SEQ ID NO: 28624 - protein, 9 aa, Homo Sapiens
SVVPSVILK

SEQ ID NO: 28625 - protein, 9 aa, Homo Sapiens
SVVSSVTTK

SEQ ID NO: 28626 - protein, 9 aa, Homo Sapiens
SVWHGTLSK

SEQ ID NO: 28627 - protein, 9 aa, Homo Sapiens
SVYGDFSCK

SEQ ID NO: 28628 - protein, 9 aa, Homo Sapiens
SVYGYGVQK

SEQ ID NO: 28629 - protein, 9 aa, Homo Sapiens
SVYSGIRHK

SEQ ID NO: 28630 - protein, 9 aa, Homo Sapiens
SVYVLVRQK

SEQ ID NO: 28631 - protein, 9 aa, Homo Sapiens
SVYVYKVLK

SEQ ID NO: 28632 - protein, 9 aa, Homo Sapiens
TAMPPGTAR

SEQ ID NO: 28633 - protein, 9 aa, Homo Sapiens
TAQFKINKK

SEQ ID NO: 28634 - protein, 9 aa, Homo Sapiens
TCLKSFIQK

SEQ ID NO: 28635 - protein, 9 aa, Homo Sapiens
TGFSYAFPK

SEQ ID NO: 28636 - protein, 9 aa, Homo Sapiens
TIAASLAFK

SEQ ID NO: 28637 - protein, 9 aa, Homo Sapiens
TIFGKIIRK

SEQ ID NO: 28638 - protein, 9 aa, Homo Sapiens
TIFLMGPVK

SEQ ID NO: 28639 - protein, 9 aa, Homo Sapiens
TIKEGSQLK

SEQ ID NO: 28640 - protein, 9 aa, Homo Sapiens
TILEKFKEK

SEQ ID NO: 28641 - protein, 9 aa, Homo Sapiens
TIRTIDYRK

SEQ ID NO: 28642 - protein, 9 aa, Homo Sapiens
TISPPLQPK

SEQ ID NO: 28643 - protein, 9 aa, Homo Sapiens
TITPVVGKK

SEQ ID NO: 28644 - protein, 9 aa, Homo Sapiens
TLCKPLVPR

SEQ ID NO: 28645 - protein, 9 aa, Homo Sapiens
TLFYSEIPK

SEQ ID NO: 28646 - protein, 9 aa, Homo Sapiens
TLLDKYWTK

SEQ ID NO: 28647 - protein, 9 aa, Homo Sapiens
TQATIYVHK

SEQ ID NO: 28648 - protein, 9 aa, Homo Sapiens
TQCGSLIGK

SEQ ID NO: 28649 - protein, 9 aa, Homo Sapiens
TQMGPVAAK

SEQ ID NO: 28650 - protein, 9 aa, Homo Sapiens
TSALPIIQK

SEQ ID NO: 28651 - protein, 9 aa, Homo Sapiens
TSGAAVIKQ

SEQ ID NO: 28652 - protein, 9 aa, Homo Sapiens
TSIQPGAPK

SEQ ID NO: 28653 - protein, 9 aa, Homo Sapiens
TSLDKFYRK

SEQ ID NO: 28654 - protein, 9 aa, Homo Sapiens
TSLPPLPFK

SEQ ID NO: 28655 - protein, 9 aa, Homo Sapiens
TSLSVSTPK

SEQ ID NO: 28656 - protein, 9 aa, Homo Sapiens
TSPIIIHRL

SEQ ID NO: 28657 - protein, 9 aa, Homo Sapiens
TSQEPSPPK

SEQ ID NO: 28658 - protein, 9 aa, Homo Sapiens
TSSDVIEMK

SEQ ID NO: 28659 - protein, 9 aa, Homo Sapiens
TSSQPVIAK

SEQ ID NO: 28660 - protein, 9 aa, Homo Sapiens
TTDCPVPPK

SEQ ID NO: 28661 - protein, 9 aa, Homo Sapiens
TTFSPSISK

SEQ ID NO: 28662 - protein, 9 aa, Homo Sapiens
TTFTKIVNK

SEQ ID NO: 28663 - protein, 9 aa, Homo Sapiens
TTGEPATPK

SEQ ID NO: 28664 - protein, 9 aa, Homo Sapiens
TTLGHAVLK

SEQ ID NO: 28665 - protein, 9 aa, Homo Sapiens
TTMQALAEK

SEQ ID NO: 28666 - protein, 9 aa, Homo Sapiens
TTNDIVISK

SEQ ID NO: 28667 - protein, 9 aa, Homo Sapiens
TTQDPLSNK

SEQ ID NO: 28668 - protein, 9 aa, Homo Sapiens
TTSNFTFSK

SEQ ID NO: 28669 - protein, 9 aa, Homo Sapiens
TTTGHLIYK

SEQ ID NO: 28670 - protein, 9 aa, Homo Sapiens
TTVDIFHKK

SEQ ID NO: 28671 - protein, 9 aa, Homo Sapiens
TTVPHVFSK

SEQ ID NO: 28672 - protein, 9 aa, Homo Sapiens
TVAKSIDLK

SEQ ID NO: 28673 - protein, 9 aa, Homo Sapiens
TVAVPLVGK

SEQ ID NO: 28674 - protein, 9 aa, Homo Sapiens
TVCDLIQSK

SEQ ID NO: 28675 - protein, 9 aa, Homo Sapiens
TVCLTLTAK

SEQ ID NO: 28676 - protein, 9 aa, Homo Sapiens
TVFEHTFHV

SEQ ID NO: 28677 - protein, 9 aa, Homo Sapiens
TVFENLINK

SEQ ID NO: 28678 - protein, 9 aa, Homo Sapiens
TVFLSTWNK

SEQ ID NO: 28679 - protein, 9 aa, Homo Sapiens
TVHPKFHYK

SEQ ID NO: 28680 - protein, 9 aa, Homo Sapiens
TVIHFNNPK

SEQ ID NO: 28681 - protein, 9 aa, Homo Sapiens
TVILPIKKK

SEQ ID NO: 28682 - protein, 9 aa, Homo Sapiens
TVISLLVYK

SEQ ID NO: 28683 - protein, 9 aa, Homo Sapiens
TVLGYFIGR

SEQ ID NO: 28684 - protein, 9 aa, Homo Sapiens
TVLQYVVGR

SEQ ID NO: 28685 - protein, 9 aa, Homo Sapiens
TVLRPSLGK

SEQ ID NO: 28686 - protein, 9 aa, Homo Sapiens
TVNSPAIYK

SEQ ID NO: 28687 - protein, 9 aa, Homo Sapiens
TVPRRLGPK

SEQ ID NO: 28688 - protein, 9 aa, Homo Sapiens
TVQEHLIEK

SEQ ID NO: 28689 - protein, 9 aa, Homo Sapiens
TVQEKTFNK

SEQ ID NO: 28690 - protein, 9 aa, Homo Sapiens
TVQELAIYK

SEQ ID NO: 28691 - protein, 9 aa, Homo Sapiens
TVQVYIITK

SEQ ID NO: 28692 - protein, 9 aa, Homo Sapiens
TVSADPVVK

SEQ ID NO: 28693 - protein, 9 aa, Homo Sapiens
TVSDAILRY

SEQ ID NO: 28694 - protein, 9 aa, Homo Sapiens
TVSEPAVIK

SEQ ID NO: 28695 - protein, 9 aa, Homo Sapiens
TVTAQILLK

SEQ ID NO: 28696 - protein, 9 aa, Homo Sapiens
TVTSYVFLK

SEQ ID NO: 28697 - protein, 9 aa, Homo Sapiens
TVVDCPVCK

SEQ ID NO: 28698 - protein, 9 aa, Homo Sapiens
TVYECVVEK

SEQ ID NO: 28699 - protein, 9 aa, Homo Sapiens
TVYEEMMAK

SEQ ID NO: 28700 - protein, 9 aa, Homo Sapiens
TVYRGLVQK

SEQ ID NO: 28701 - protein, 9 aa, Homo Sapiens
VAGTPAPPK

SEQ ID NO: 28702 - protein, 9 aa, Homo Sapiens
VASTPISQR

SEQ ID NO: 28703 - protein, 9 aa, Homo Sapiens
VAVDVAVPK

SEQ ID NO: 28704 - protein, 9 aa, Homo Sapiens
VAYHQPTLK

SEQ ID NO: 28705 - protein, 9 aa, Homo Sapiens
VGGSTRIPK

SEQ ID NO: 28706 - protein, 9 aa, Homo Sapiens
VGVYRPPPK

SEQ ID NO: 28707 - protein, 9 aa, Homo Sapiens
VIFCNTKRK

SEQ ID NO: 28708 - protein, 9 aa, Homo Sapiens
VIFIIICLR

SEQ ID NO: 28709 - protein, 9 aa, Homo Sapiens
VIIAKVTAK

SEQ ID NO: 28710 - protein, 9 aa, Homo Sapiens
VILESIFLK

SEQ ID NO: 28711 - protein, 9 aa, Homo Sapiens
VILLPQPPK

SEQ ID NO: 28712 - protein, 9 aa, Homo Sapiens
VIMNSLITK

SEQ ID NO: 28713 - protein, 9 aa, Homo Sapiens
VIQDPMGQK

SEQ ID NO: 28714 - protein, 9 aa, Homo Sapiens
VISPPTVPK

SEQ ID NO: 28715 - protein, 9 aa, Homo Sapiens
VIYFPPLQK

SEQ ID NO: 28716 - protein, 9 aa, Homo Sapiens
VLAPVIDLK

SEQ ID NO: 28717 - protein, 9 aa, Homo Sapiens
VLKVLSSLK

SEQ ID NO: 28718 - protein, 9 aa, Homo Sapiens
VLYENPNLK

SEQ ID NO: 28719 - protein, 9 aa, Homo Sapiens
VNKVPLTGK

SEQ ID NO: 28720 - protein, 9 aa, Homo Sapiens
VQNGSTFVK

SEQ ID NO: 28721 - protein, 9 aa, Homo Sapiens
VSFPIGIYK

SEQ ID NO: 28722 - protein, 9 aa, Homo Sapiens
VSFSDVFFK

SEQ ID NO: 28723 - protein, 9 aa, Homo Sapiens
VSLDYAISK

SEQ ID NO: 28724 - protein, 9 aa, Homo Sapiens
VSLEGEPRK

SEQ ID NO: 28725 - protein, 9 aa, Homo Sapiens
VSLGLVVSK

SEQ ID NO: 28726 - protein, 9 aa, Homo Sapiens
VSLGTPIMK

SEQ ID NO: 28727 - protein, 9 aa, Homo Sapiens
VSLWLPVSK

SEQ ID NO: 28728 - protein, 9 aa, Homo Sapiens
VSMDYAISK

SEQ ID NO: 28729 - protein, 9 aa, Homo Sapiens
VSMLNVYLK

SEQ ID NO: 28730 - protein, 9 aa, Homo Sapiens
VSMPSKYRK

SEQ ID NO: 28731 - protein, 9 aa, Homo Sapiens
VSMPVIQTK

SEQ ID NO: 28732 - protein, 9 aa, Homo Sapiens
VSQEPFPNK

SEQ ID NO: 28733 - protein, 9 aa, Homo Sapiens
VSQLPLTER

SEQ ID NO: 28734 - protein, 9 aa, Homo Sapiens
VSSPKLAPK

SEQ ID NO: 28735 - protein, 9 aa, Homo Sapiens
VSSWLPLAK

SEQ ID NO: 28736 - protein, 9 aa, Homo Sapiens
VTFEKQWFY

SEQ ID NO: 28737 - protein, 9 aa, Homo Sapiens
VTFVPGLYK

SEQ ID NO: 28738 - protein, 9 aa, Homo Sapiens
VTGPNMGGK

SEQ ID NO: 28739 - protein, 9 aa, Homo Sapiens
VTISFRIYK

SEQ ID NO: 28740 - protein, 9 aa, Homo Sapiens
VTISSIEKK

SEQ ID NO: 28741 - protein, 9 aa, Homo Sapiens
VTISTSPPK

SEQ ID NO: 28742 - protein, 9 aa, Homo Sapiens
VTLTTQHVK

SEQ ID NO: 28743 - protein, 9 aa, Homo Sapiens
VTMKQICKK

SEQ ID NO: 28744 - protein, 9 aa, Homo Sapiens
VTMPATETK

SEQ ID NO: 28745 - protein, 9 aa, Homo Sapiens
VTNDFVMLK

SEQ ID NO: 28746 - protein, 9 aa, Homo Sapiens
VTNWDDMEK

SEQ ID NO: 28747 - protein, 9 aa, Homo Sapiens
VTQAPISAR

SEQ ID NO: 28748 - protein, 9 aa, Homo Sapiens
VTQDFMMYR

SEQ ID NO: 28749 - protein, 9 aa, Homo Sapiens
VTQSEIGQK

SEQ ID NO: 28750 - protein, 9 aa, Homo Sapiens
VTSEVPFSK

SEQ ID NO: 28751 - protein, 9 aa, Homo Sapiens
VTSTFIIEK

SEQ ID NO: 28752 - protein, 9 aa, Homo Sapiens
VTSTSLTIK

SEQ ID NO: 28753 - protein, 9 aa, Homo Sapiens
VTTEKRFLK

SEQ ID NO: 28754 - protein, 9 aa, Homo Sapiens
VTVKSAIRR

SEQ ID NO: 28755 - protein, 9 aa, Homo Sapiens
VTVSGGTPK

SEQ ID NO: 28756 - protein, 9 aa, Homo Sapiens
VVAAGGVEK

SEQ ID NO: 28757 - protein, 9 aa, Homo Sapiens
VVAAVIWRK

SEQ ID NO: 28758 - protein, 9 aa, Homo Sapiens
VVAAVMWRK

SEQ ID NO: 28759 - protein, 9 aa, Homo Sapiens
VVAPPGAPK

SEQ ID NO: 28760 - protein, 9 aa, Homo Sapiens
VVCEYIVKK

SEQ ID NO: 28761 - protein, 9 aa, Homo Sapiens
VVDIPIVEK

SEQ ID NO: 28762 - protein, 9 aa, Homo Sapiens
VVDPHSFPR

SEQ ID NO: 28763 - protein, 9 aa, Homo Sapiens
VVDPVVREK

SEQ ID NO: 28764 - protein, 9 aa, Homo Sapiens
VVDQTTLMK

SEQ ID NO: 28765 - protein, 9 aa, Homo Sapiens
VVDYPNSAK

SEQ ID NO: 28766 - protein, 9 aa, Homo Sapiens
VVFEKAIQR

SEQ ID NO: 28767 - protein, 9 aa, Homo Sapiens
VVFTTYTQK

SEQ ID NO: 28768 - protein, 9 aa, Homo Sapiens
VVGAVVFQK

SEQ ID NO: 28769 - protein, 9 aa, Homo Sapiens
VVGLPNVGK

SEQ ID NO: 28770 - protein, 9 aa, Homo Sapiens
VVGPVGAGK

SEQ ID NO: 28771 - protein, 9 aa, Homo Sapiens
VVGPVSLPR

SEQ ID NO: 28772 - protein, 9 aa, Homo Sapiens
VVINFDFPK

SEQ ID NO: 28773 - protein, 9 aa, Homo Sapiens
VVLENAAKK

SEQ ID NO: 28774 - protein, 9 aa, Homo Sapiens
VVLTYIYFK

SEQ ID NO: 28775 - protein, 9 aa, Homo Sapiens
VVLYPLVAK

SEQ ID NO: 28776 - protein, 9 aa, Homo Sapiens
VVMADPKGK

SEQ ID NO: 28777 - protein, 9 aa, Homo Sapiens
VVMLESPPK

SEQ ID NO: 28778 - protein, 9 aa, Homo Sapiens
VVMRDPASK

SEQ ID NO: 28779 - protein, 9 aa, Homo Sapiens
VVMRDPNTK

SEQ ID NO: 28780 - protein, 9 aa, Homo Sapiens
VVMRDPQTK

SEQ ID NO: 28781 - protein, 9 aa, Homo Sapiens
VVQEVLSIK

SEQ ID NO: 28782 - protein, 9 aa, Homo Sapiens
VVSEKQFSK

SEQ ID NO: 28783 - protein, 9 aa, Homo Sapiens
VVVDPILSK

SEQ ID NO: 28784 - protein, 9 aa, Homo Sapiens
VVVVNPQTK

SEQ ID NO: 28785 - protein, 9 aa, Homo Sapiens
VVYQYWNTK

SEQ ID NO: 28786 - protein, 9 aa, Homo Sapiens
YDRPGASPK

SEQ ID NO: 28787 - protein, 9 aa, Homo Sapiens
YEGHVSCVK

SEQ ID NO: 28788 - protein, 9 aa, Homo Sapiens
YILSPLSYK

SEQ ID NO: 28789 - protein, 9 aa, Homo Sapiens
YSFSYKHLK

SEQ ID NO: 28790 - protein, 9 aa, Homo Sapiens
YTAPPLQSK

SEQ ID NO: 28791 - protein, 9 aa, Homo Sapiens
YTLSNSKGP

SEQ ID NO: 28792 - protein, 10 aa, Homo Sapiens
AAAAAATAKR

SEQ ID NO: 28793 - protein, 10 aa, Homo Sapiens
AAFDGGFTVK

SEQ ID NO: 28794 - protein, 10 aa, Homo Sapiens
AAIVAYGLYK

SEQ ID NO: 28795 - protein, 10 aa, Homo Sapiens
AAMLDTVVFK

SEQ ID NO: 28796 - protein, 10 aa, Homo Sapiens
AATTPLDVCK

SEQ ID NO: 28797 - protein, 10 aa, Homo Sapiens
AAYAARWVAK

SEQ ID NO: 28798 - protein, 10 aa, Homo Sapiens
AGDGLIELRK

SEQ ID NO: 28799 - protein, 10 aa, Homo Sapiens
AGFPSIPVGK

SEQ ID NO: 28800 - protein, 10 aa, Homo Sapiens
AIETMPCVKK

SEQ ID NO: 28801 - protein, 10 aa, Homo Sapiens
AIFKGVFVHR

SEQ ID NO: 28802 - protein, 10 aa, Homo Sapiens
AIFPATFCQK

SEQ ID NO: 28803 - protein, 10 aa, Homo Sapiens
AIFPRAFPKK

SEQ ID NO: 28804 - protein, 10 aa, Homo Sapiens
AIIDHIFASK

SEQ ID NO: 28805 - protein, 10 aa, Homo Sapiens
AIIDTVINYK

SEQ ID NO: 28806 - protein, 10 aa, Homo Sapiens
AIIERIPPPK

SEQ ID NO: 28807 - protein, 10 aa, Homo Sapiens
AIITPPPAKK

SEQ ID NO: 28808 - protein, 10 aa, Homo Sapiens
AIQDAVGPPK

SEQ ID NO: 28809 - protein, 10 aa, Homo Sapiens
AIYATIPVYK

SEQ ID NO: 28810 - protein, 10 aa, Homo Sapiens
AIYDHINEGK

SEQ ID NO: 28811 - protein, 10 aa, Homo Sapiens
ALADFLPVMK

SEQ ID NO: 28812 - protein, 10 aa, Homo Sapiens
ALFAKPLKGK

SEQ ID NO: 28813 - protein, 10 aa, Homo Sapiens
ALGALATLNL

SEQ ID NO: 28814 - protein, 10 aa, Homo Sapiens
ALKNPPINTK

SEQ ID NO: 28815 - protein, 10 aa, Homo Sapiens
AQAQEVFFLK

SEQ ID NO: 28816 - protein, 10 aa, Homo Sapiens
AQMRAAINQK

SEQ ID NO: 28817 - protein, 10 aa, Homo Sapiens
AQNNPLPKGK

SEQ ID NO: 28818 - protein, 10 aa, Homo Sapiens
AQNSVIIVDK

SEQ ID NO: 28819 - protein, 10 aa, Homo Sapiens
AQVVMPPIPK

SEQ ID NO: 28820 - protein, 10 aa, Homo Sapiens
AQYQFTGIKK

SEQ ID NO: 28821 - protein, 10 aa, Homo Sapiens
ASAGPPSLRK

SEQ ID NO: 28822 - protein, 10 aa, Homo Sapiens
ASALGSSSYK

SEQ ID NO: 28823 - protein, 10 aa, Homo Sapiens
ASALPTGSPK

SEQ ID NO: 28824 - protein, 10 aa, Homo Sapiens
ASASASLPTK

SEQ ID NO: 28825 - protein, 10 aa, Homo Sapiens
ASCVPVNNPK

SEQ ID NO: 28826 - protein, 10 aa, Homo Sapiens
ASFDGTFLWK

SEQ ID NO: 28827 - protein, 10 aa, Homo Sapiens
ASFDKAKLKK

SEQ ID NO: 28828 - protein, 10 aa, Homo Sapiens
ASFPKVFIKK

SEQ ID NO: 28829 - protein, 10 aa, Homo Sapiens
ASFPSPPLSK

SEQ ID NO: 28830 - protein, 10 aa, Homo Sapiens
ASFYSVSQPK

SEQ ID NO: 28831 - protein, 10 aa, Homo Sapiens
ASIAAAVAPK

SEQ ID NO: 28832 - protein, 10 aa, Homo Sapiens
ASILPSSWIG

SEQ ID NO: 28833 - protein, 10 aa, Homo Sapiens
ASIQHPLIKK

SEQ ID NO: 28834 - protein, 10 aa, Homo Sapiens
ASIQPSKVGK

SEQ ID NO: 28835 - protein, 10 aa, Homo Sapiens
ASLEGKGQLK

SEQ ID NO: 28836 - protein, 10 aa, Homo Sapiens
ASLELPAAKK

SEQ ID NO: 28837 - protein, 10 aa, Homo Sapiens
ASLGGFLAQK

SEQ ID NO: 28838 - protein, 10 aa, Homo Sapiens
ASLHGRIYCK

SEQ ID NO: 28839 - protein, 10 aa, Homo Sapiens
ASLIDLLVSK

SEQ ID NO: 28840 - protein, 10 aa, Homo Sapiens
ASLMHSFILK

SEQ ID NO: 28841 - protein, 10 aa, Homo Sapiens
ASLVGQTSPK

SEQ ID NO: 28842 - protein, 10 aa, Homo Sapiens
ASMRYTPVGR

SEQ ID NO: 28843 - protein, 10 aa, Homo Sapiens
ASNPCGNIQR

SEQ ID NO: 28844 - protein, 10 aa, Homo Sapiens
ASQCGSLIGK

SEQ ID NO: 28845 - protein, 10 aa, Homo Sapiens
ASQDIIPQLK

SEQ ID NO: 28846 - protein, 10 aa, Homo Sapiens
ASSAPPLTGK

SEQ ID NO: 28847 - protein, 10 aa, Homo Sapiens
ASSARTQNLK

SEQ ID NO: 28848 - protein, 10 aa, Homo Sapiens
ASSGVPNPPK

SEQ ID NO: 28849 - protein, 10 aa, Homo Sapiens
ASSIFVAPRK

SEQ ID NO: 28850 - protein, 10 aa, Homo Sapiens
ASSTIVPSLK

SEQ ID NO: 28851 - protein, 10 aa, Homo Sapiens
ASVAALPVCK

SEQ ID NO: 28852 - protein, 10 aa, Homo Sapiens
ASVFGTMPLK

SEQ ID NO: 28853 - protein, 10 aa, Homo Sapiens
ASVNFSEFSK

SEQ ID NO: 28854 - protein, 10 aa, Homo Sapiens
ASVSVTLKGS

SEQ ID NO: 28855 - protein, 10 aa, Homo Sapiens
ASYAAVPLYR

SEQ ID NO: 28856 - protein, 10 aa, Homo Sapiens
ATAAVTAAVK

SEQ ID NO: 28857 - protein, 10 aa, Homo Sapiens
ATAEVLNIGK

SEQ ID NO: 28858 - protein, 10 aa, Homo Sapiens
ATAGIIGVNR

SEQ ID NO: 28859 - protein, 10 aa, Homo Sapiens
ATAIGMPVEK

SEQ ID NO: 28860 - protein, 10 aa, Homo Sapiens
ATALGEQPVK

SEQ ID NO: 28861 - protein, 10 aa, Homo Sapiens
ATALPTGTSK

SEQ ID NO: 28862 - protein, 10 aa, Homo Sapiens
ATAMLQSLLK

SEQ ID NO: 28863 - protein, 10 aa, Homo Sapiens
ATANMLGIRK

SEQ ID NO: 28864 - protein, 10 aa, Homo Sapiens
ATAQFKINKK

SEQ ID NO: 28865 - protein, 10 aa, Homo Sapiens
ATASIPSLVK

SEQ ID NO: 28866 - protein, 10 aa, Homo Sapiens
ATASLGVIHK

SEQ ID NO: 28867 - protein, 10 aa, Homo Sapiens
ATATGTEILK

SEQ ID NO: 28868 - protein, 10 aa, Homo Sapiens
ATAYLPMLEK

SEQ ID NO: 28869 - protein, 10 aa, Homo Sapiens
ATCDFPLLNR

SEQ ID NO: 28870 - protein, 10 aa, Homo Sapiens
ATCDHPYIVK

SEQ ID NO: 28871 - protein, 10 aa, Homo Sapiens
ATCLPLSVRR

SEQ ID NO: 28872 - protein, 10 aa, Homo Sapiens
ATDAAANLTK

SEQ ID NO: 28873 - protein, 10 aa, Homo Sapiens
ATDFAPGFQK

SEQ ID NO: 28874 - protein, 10 aa, Homo Sapiens
ATDFGQTNQK

SEQ ID NO: 28875 - protein, 10 aa, Homo Sapiens
ATDILMGVLK

SEQ ID NO: 28876 - protein, 10 aa, Homo Sapiens
ATEGPNIVCK

SEQ ID NO: 28877 - protein, 10 aa, Homo Sapiens
ATEHIPSPAK

SEQ ID NO: 28878 - protein, 10 aa, Homo Sapiens
ATENPGALIK

SEQ ID NO: 28879 - protein, 10 aa, Homo Sapiens
ATFDIWKFRK

SEQ ID NO: 28880 - protein, 10 aa, Homo Sapiens
ATFEKIPFER

SEQ ID NO: 28881 - protein, 10 aa, Homo Sapiens
ATFPLSVQKF

SEQ ID NO: 28882 - protein, 10 aa, Homo Sapiens
ATFPSSAFLR

SEQ ID NO: 28883 - protein, 10 aa, Homo Sapiens
ATFQFTVERF

SEQ ID NO: 28884 - protein, 10 aa, Homo Sapiens
ATFRVKNPDK

SEQ ID NO: 28885 - protein, 10 aa, Homo Sapiens
ATFTNVFGKK

SEQ ID NO: 28886 - protein, 10 aa, Homo Sapiens
ATFTYFYKKF

SEQ ID NO: 28887 - protein, 10 aa, Homo Sapiens
ATGDMSGLLK

SEQ ID NO: 28888 - protein, 10 aa, Homo Sapiens
ATGESIAVKK

SEQ ID NO: 28889 - protein, 10 aa, Homo Sapiens
ATGKWKQISK

SEQ ID NO: 28890 - protein, 10 aa, Homo Sapiens
ATGQWTRFKK

SEQ ID NO: 28891 - protein, 10 aa, Homo Sapiens
ATGSWDSFLK

SEQ ID NO: 28892 - protein, 10 aa, Homo Sapiens
ATIDGSVNPK

SEQ ID NO: 28893 - protein, 10 aa, Homo Sapiens
ATIRNVLREK

SEQ ID NO: 28894 - protein, 10 aa, Homo Sapiens
ATITDKELLK

SEQ ID NO: 28895 - protein, 10 aa, Homo Sapiens
ATLDIDGVRK

SEQ ID NO: 28896 - protein, 10 aa, Homo Sapiens
ATLEETLVKK

SEQ ID NO: 28897 - protein, 10 aa, Homo Sapiens
ATLGAILNRL

SEQ ID NO: 28898 - protein, 10 aa, Homo Sapiens
ATLGLVDIVK

SEQ ID NO: 28899 - protein, 10 aa, Homo Sapiens
ATLGSGNLRQ

SEQ ID NO: 28900 - protein, 10 aa, Homo Sapiens
ATLKWILENK

SEQ ID NO: 28901 - protein, 10 aa, Homo Sapiens
ATLLPDLIQK

SEQ ID NO: 28902 - protein, 10 aa, Homo Sapiens
ATLPKNPPPK

SEQ ID NO: 28903 - protein, 10 aa, Homo Sapiens
ATLPNQPVEK

SEQ ID NO: 28904 - protein, 10 aa, Homo Sapiens
ATLQESTFSK

SEQ ID NO: 28905 - protein, 10 aa, Homo Sapiens
ATLSLEKLLK

SEQ ID NO: 28906 - protein, 10 aa, Homo Sapiens
ATLYIQMNEK

SEQ ID NO: 28907 - protein, 10 aa, Homo Sapiens
ATMLATGGNR

SEQ ID NO: 28908 - protein, 10 aa, Homo Sapiens
ATMQESLRVK

SEQ ID NO: 28909 - protein, 10 aa, Homo Sapiens
ATNAAVTVLR

SEQ ID NO: 28910 - protein, 10 aa, Homo Sapiens
ATNGPPVLVK

SEQ ID NO: 28911 - protein, 10 aa, Homo Sapiens
ATNKITIIFK

SEQ ID NO: 28912 - protein, 10 aa, Homo Sapiens
ATNPESKVFY

SEQ ID NO: 28913 - protein, 10 aa, Homo Sapiens
ATNTVYVFAK

SEQ ID NO: 28914 - protein, 10 aa, Homo Sapiens
ATPELGSSLK

SEQ ID NO: 28915 - protein, 10 aa, Homo Sapiens
ATPEQVGKMK

SEQ ID NO: 28916 - protein, 10 aa, Homo Sapiens
ATPLDFPSKK

SEQ ID NO: 28917 - protein, 10 aa, Homo Sapiens
ATPLSTLSLK

SEQ ID NO: 28918 - protein, 10 aa, Homo Sapiens
ATPTSPIRVK

SEQ ID NO: 28919 - protein, 10 aa, Homo Sapiens
ATQDPPLPTR

SEQ ID NO: 28920 - protein, 10 aa, Homo Sapiens
ATQLAADLLK

SEQ ID NO: 28921 - protein, 10 aa, Homo Sapiens
ATQLLKLAHK

SEQ ID NO: 28922 - protein, 10 aa, Homo Sapiens
ATQMVRMILK

SEQ ID NO: 28923 - protein, 10 aa, Homo Sapiens
ATQTQFFHVK

SEQ ID NO: 28924 - protein, 10 aa, Homo Sapiens
ATQVAVSVPK

SEQ ID NO: 28925 - protein, 10 aa, Homo Sapiens
ATSPIIIHRL

SEQ ID NO: 28926 - protein, 10 aa, Homo Sapiens
ATSPPFQLTK

SEQ ID NO: 28927 - protein, 10 aa, Homo Sapiens
ATSPPGAIPK

SEQ ID NO: 28928 - protein, 10 aa, Homo Sapiens
ATSSDVIEMK

SEQ ID NO: 28929 - protein, 10 aa, Homo Sapiens
ATSTGGIVNK

SEQ ID NO: 28930 - protein, 10 aa, Homo Sapiens
ATTSNFTFSK

SEQ ID NO: 28931 - protein, 10 aa, Homo Sapiens
ATTSVITIVK

SEQ ID NO: 28932 - protein, 10 aa, Homo Sapiens
ATVAVPLVGK

SEQ ID NO: 28933 - protein, 10 aa, Homo Sapiens
ATVFPSPCQK

SEQ ID NO: 28934 - protein, 10 aa, Homo Sapiens
ATWATKELRK

SEQ ID NO: 28935 - protein, 10 aa, Homo Sapiens
ATYEDIVTLR

SEQ ID NO: 28936 - protein, 10 aa, Homo Sapiens
ATYSEDGLLK

SEQ ID NO: 28937 - protein, 10 aa, Homo Sapiens
ATYYGAFIKK

SEQ ID NO: 28938 - protein, 10 aa, Homo Sapiens
AVAALQDLRY

SEQ ID NO: 28939 - protein, 10 aa, Homo Sapiens
AVALNYGIYK

SEQ ID NO: 28940 - protein, 10 aa, Homo Sapiens
AVANIVNSVK

SEQ ID NO: 28941 - protein, 10 aa, Homo Sapiens
AVAVDVAVPK

SEQ ID NO: 28942 - protein, 10 aa, Homo Sapiens
AVCEVALDYK

SEQ ID NO: 28943 - protein, 10 aa, Homo Sapiens
AVDNADPILK

SEQ ID NO: 28944 - protein, 10 aa, Homo Sapiens
AVFDRDINCR

SEQ ID NO: 28945 - protein, 10 aa, Homo Sapiens
AVFGVIGSQK

SEQ ID NO: 28946 - protein, 10 aa, Homo Sapiens
AVFPKPFVEK

SEQ ID NO: 28947 - protein, 10 aa, Homo Sapiens
AVFRGRMSMK

SEQ ID NO: 28948 - protein, 10 aa, Homo Sapiens
AVIEKFAPIK

SEQ ID NO: 28949 - protein, 10 aa, Homo Sapiens
AVIKEKIEEK

SEQ ID NO: 28950 - protein, 10 aa, Homo Sapiens
AVIPCFPYAR

SEQ ID NO: 28951 - protein, 10 aa, Homo Sapiens
AVISPPTVPK

SEQ ID NO: 28952 - protein, 10 aa, Homo Sapiens
AVITNKDVRK

SEQ ID NO: 28953 - protein, 10 aa, Homo Sapiens
AVIVDKKMQK

SEQ ID NO: 28954 - protein, 10 aa, Homo Sapiens
AVLDLSWNKL

SEQ ID NO: 28955 - protein, 10 aa, Homo Sapiens
AVLNFKLKKK

SEQ ID NO: 28956 - protein, 10 aa, Homo Sapiens
AVLYQPLFDK

SEQ ID NO: 28957 - protein, 10 aa, Homo Sapiens
AVMDITDIIK

SEQ ID NO: 28958 - protein, 10 aa, Homo Sapiens
AVMDVVKKQK

SEQ ID NO: 28959 - protein, 10 aa, Homo Sapiens
AVMGAYVLLK

SEQ ID NO: 28960 - protein, 10 aa, Homo Sapiens
AVMSATFAKF

SEQ ID NO: 28961 - protein, 10 aa, Homo Sapiens
AVNAHSNILK

SEQ ID NO: 28962 - protein, 10 aa, Homo Sapiens
AVNMVPFPRL

SEQ ID NO: 28963 - protein, 10 aa, Homo Sapiens
AVNPKEIASK

SEQ ID NO: 28964 - protein, 10 aa, Homo Sapiens
AVNPYFDIPK

SEQ ID NO: 28965 - protein, 10 aa, Homo Sapiens
AVPNGPQSPK

SEQ ID NO: 28966 - protein, 10 aa, Homo Sapiens
AVPTNIIAAK

SEQ ID NO: 28967 - protein, 10 aa, Homo Sapiens
AVQAITGNFK

SEQ ID NO: 28968 - protein, 10 aa, Homo Sapiens
AVQKAIPMYK

SEQ ID NO: 28969 - protein, 10 aa, Homo Sapiens
AVRGSVVLEK

SEQ ID NO: 28970 - protein, 10 aa, Homo Sapiens
AVSDFHPVKK

SEQ ID NO: 28971 - protein, 10 aa, Homo Sapiens
AVVGPVGAGK

SEQ ID NO: 28972 - protein, 10 aa, Homo Sapiens
AVYADSGNFK

SEQ ID NO: 28973 - protein, 10 aa, Homo Sapiens
AVYGQKEIHR

SEQ ID NO: 28974 - protein, 10 aa, Homo Sapiens
EVAPPEYHRK

SEQ ID NO: 28975 - protein, 10 aa, Homo Sapiens
GAYDQQIWEK

SEQ ID NO: 28976 - protein, 10 aa, Homo Sapiens
GIFPGTPLKK

SEQ ID NO: 28977 - protein, 10 aa, Homo Sapiens
GIISSPLTGK

SEQ ID NO: 28978 - protein, 10 aa, Homo Sapiens
GIVPVPLAEK

SEQ ID NO: 28979 - protein, 10 aa, Homo Sapiens
GLAAGTVPEK

SEQ ID NO: 28980 - protein, 10 aa, Homo Sapiens
GQCGDILTNK

SEQ ID NO: 28981 - protein, 10 aa, Homo Sapiens
GQFIGPHRIK

SEQ ID NO: 28982 - protein, 10 aa, Homo Sapiens
GQFSGFPFEK

SEQ ID NO: 28983 - protein, 10 aa, Homo Sapiens
GQGTFTKIFK

SEQ ID NO: 28984 - protein, 10 aa, Homo Sapiens
GQNVFGSFLK

SEQ ID NO: 28985 - protein, 10 aa, Homo Sapiens
GQPLVVIPPK

SEQ ID NO: 28986 - protein, 10 aa, Homo Sapiens
GSFASIFWLK

SEQ ID NO: 28987 - protein, 10 aa, Homo Sapiens
GSFVGELMYK

SEQ ID NO: 28988 - protein, 10 aa, Homo Sapiens
GSMSTVVSTK

SEQ ID NO: 28989 - protein, 10 aa, Homo Sapiens
GSSANIPPLK

SEQ ID NO: 28990 - protein, 10 aa, Homo Sapiens
GSTYFERCLK

SEQ ID NO: 28991 - protein, 10 aa, Homo Sapiens
GSVELPIVGK

SEQ ID NO: 28992 - protein, 10 aa, Homo Sapiens
GSYDPQQIFK

SEQ ID NO: 28993 - protein, 10 aa, Homo Sapiens
GSYNKVFLAK

SEQ ID NO: 28994 - protein, 10 aa, Homo Sapiens
GSYTFDPVTK

SEQ ID NO: 28995 - protein, 10 aa, Homo Sapiens
GTAIIQLPSK

SEQ ID NO: 28996 - protein, 10 aa, Homo Sapiens
GTAIKPLPSY

SEQ ID NO: 28997 - protein, 10 aa, Homo Sapiens
GTAPLVAPPR

SEQ ID NO: 28998 - protein, 10 aa, Homo Sapiens
GTASVLQPVK

SEQ ID NO: 28999 - protein, 10 aa, Homo Sapiens
GTDRTGFTFK

SEQ ID NO: 29000 - protein, 10 aa, Homo Sapiens
GTEEAPKVFK

SEQ ID NO: 29001 - protein, 10 aa, Homo Sapiens
GTFDPDNLEK

SEQ ID NO: 29002 - protein, 10 aa, Homo Sapiens
GTFPRAFKKL

SEQ ID NO: 29003 - protein, 10 aa, Homo Sapiens
GTFQQMWISK

SEQ ID NO: 29004 - protein, 10 aa, Homo Sapiens
GTIAGLNVLR

SEQ ID NO: 29005 - protein, 10 aa, Homo Sapiens
GTIGMRPNAK

SEQ ID NO: 29006 - protein, 10 aa, Homo Sapiens
GTILGTRSLK

SEQ ID NO: 29007 - protein, 10 aa, Homo Sapiens
GTINIVHPKL

SEQ ID NO: 29008 - protein, 10 aa, Homo Sapiens
GTIPGNPYPK

SEQ ID NO: 29009 - protein, 10 aa, Homo Sapiens
GTKGPSNVFK

SEQ ID NO: 29010 - protein, 10 aa, Homo Sapiens
GTLDYILQRC

SEQ ID NO: 29011 - protein, 10 aa, Homo Sapiens
GTLEIPVAQK

SEQ ID NO: 29012 - protein, 10 aa, Homo Sapiens
GTLQPPFTAR

SEQ ID NO: 29013 - protein, 10 aa, Homo Sapiens
GTMDMSITRL

SEQ ID NO: 29014 - protein, 10 aa, Homo Sapiens
GTMPLRNIFK

SEQ ID NO: 29015 - protein, 10 aa, Homo Sapiens
GTNFPNKIEK

SEQ ID NO: 29016 - protein, 10 aa, Homo Sapiens
GTNSKPCFQK

SEQ ID NO: 29017 - protein, 10 aa, Homo Sapiens
GTNVNMPVSK

SEQ ID NO: 29018 - protein, 10 aa, Homo Sapiens
GTPAGGGFPR

SEQ ID NO: 29019 - protein, 10 aa, Homo Sapiens
GTPLETIQKK

SEQ ID NO: 29020 - protein, 10 aa, Homo Sapiens
GTSHLPGLLK

SEQ ID NO: 29021 - protein, 10 aa, Homo Sapiens
GTSSVIVSRK

SEQ ID NO: 29022 - protein, 10 aa, Homo Sapiens
GTVDVTPFIK

SEQ ID NO: 29023 - protein, 10 aa, Homo Sapiens
GTVIHFNNPK

SEQ ID NO: 29024 - protein, 10 aa, Homo Sapiens
GTYGLDSVKK

SEQ ID NO: 29025 - protein, 10 aa, Homo Sapiens
GTYVKPLSNK

SEQ ID NO: 29026 - protein, 10 aa, Homo Sapiens
GVFEGIPTYR

SEQ ID NO: 29027 - protein, 10 aa, Homo Sapiens
GVFRGPVLPK

SEQ ID NO: 29028 - protein, 10 aa, Homo Sapiens
GVIPYFPYSK

SEQ ID NO: 29029 - protein, 10 aa, Homo Sapiens
GVMRIGLVAK

SEQ ID NO: 29030 - protein, 10 aa, Homo Sapiens
GVNDAPALKK

SEQ ID NO: 29031 - protein, 10 aa, Homo Sapiens
GVNDSPALKK

SEQ ID NO: 29032 - protein, 10 aa, Homo Sapiens
GVPAQPLGPR

SEQ ID NO: 29033 - protein, 10 aa, Homo Sapiens
GVYGDVQRVK

SEQ ID NO: 29034 - protein, 10 aa, Homo Sapiens
GVYNLEIVDK

SEQ ID NO: 29035 - protein, 10 aa, Homo Sapiens
HLLETPLVVK

SEQ ID NO: 29036 - protein, 10 aa, Homo Sapiens
HVYDGKFLAR

SEQ ID NO: 29037 - protein, 10 aa, Homo Sapiens
IAAAKPTPPK

SEQ ID NO: 29038 - protein, 10 aa, Homo Sapiens
IGLPAGPPKP

SEQ ID NO: 29039 - protein, 10 aa, Homo Sapiens
IIFAEPTPEK

SEQ ID NO: 29040 - protein, 10 aa, Homo Sapiens
IIFVGTPVQK

SEQ ID NO: 29041 - protein, 10 aa, Homo Sapiens
IMPKDIQLAR

SEQ ID NO: 29042 - protein, 10 aa, Homo Sapiens
IQFNPPLSEK

SEQ ID NO: 29043 - protein, 10 aa, Homo Sapiens
ISFPATGCQK

SEQ ID NO: 29044 - protein, 10 aa, Homo Sapiens
ISMDLQLTNK

SEQ ID NO: 29045 - protein, 10 aa, Homo Sapiens
ITNDGATILK

SEQ ID NO: 29046 - protein, 10 aa, Homo Sapiens
IVDTGIGMTK

SEQ ID NO: 29047 - protein, 10 aa, Homo Sapiens
IVYCGQVFEK

SEQ ID NO: 29048 - protein, 10 aa, Homo Sapiens
KAFNQGKIFK

SEQ ID NO: 29049 - protein, 10 aa, Homo Sapiens
KAKEPPFVRK

SEQ ID NO: 29050 - protein, 10 aa, Homo Sapiens
KAMDVLPILK

SEQ ID NO: 29051 - protein, 10 aa, Homo Sapiens
KIMKDILEKK

SEQ ID NO: 29052 - protein, 10 aa, Homo Sapiens
KLFPGRPPVK

SEQ ID NO: 29053 - protein, 10 aa, Homo Sapiens
KMMADYGIRK

SEQ ID NO: 29054 - protein, 10 aa, Homo Sapiens
KQGVKSVAGK

SEQ ID NO: 29055 - protein, 10 aa, Homo Sapiens
KQINLWKIYK

SEQ ID NO: 29056 - protein, 10 aa, Homo Sapiens
KSFDTSLIRK

SEQ ID NO: 29057 - protein, 10 aa, Homo Sapiens
KSFPGIPLHH

SEQ ID NO: 29058 - protein, 10 aa, Homo Sapiens
KSLDQAISRF

SEQ ID NO: 29059 - protein, 10 aa, Homo Sapiens
KSMNANTITK

SEQ ID NO: 29060 - protein, 10 aa, Homo Sapiens
KSNGTIIHVK

SEQ ID NO: 29061 - protein, 10 aa, Homo Sapiens
KSPSEPLIPK

SEQ ID NO: 29062 - protein, 10 aa, Homo Sapiens
KTALRAQVKK

SEQ ID NO: 29063 - protein, 10 aa, Homo Sapiens
KTFEGNLTTK

SEQ ID NO: 29064 - protein, 10 aa, Homo Sapiens
KTFSEVLAEK

SEQ ID NO: 29065 - protein, 10 aa, Homo Sapiens
KTIAPALVSK

SEQ ID NO: 29066 - protein, 10 aa, Homo Sapiens
KTIDKKTFYK

SEQ ID NO: 29067 - protein, 10 aa, Homo Sapiens
KTLDEILQEK

SEQ ID NO: 29068 - protein, 10 aa, Homo Sapiens
KTLETNPYVK

SEQ ID NO: 29069 - protein, 10 aa, Homo Sapiens
KTNMPIITSK

SEQ ID NO: 29070 - protein, 10 aa, Homo Sapiens
KTYGEIFEKF

SEQ ID NO: 29071 - protein, 10 aa, Homo Sapiens
KVCNPIITKL

SEQ ID NO: 29072 - protein, 10 aa, Homo Sapiens
KVFDGIPPPY

SEQ ID NO: 29073 - protein, 10 aa, Homo Sapiens
KVGENVLPPK

SEQ ID NO: 29074 - protein, 10 aa, Homo Sapiens
KVKPPHGFQK

SEQ ID NO: 29075 - protein, 10 aa, Homo Sapiens
KVLDAIIQEK

SEQ ID NO: 29076 - protein, 10 aa, Homo Sapiens
KVLELQSPPK

SEQ ID NO: 29077 - protein, 10 aa, Homo Sapiens
KVNIIPIIAK

SEQ ID NO: 29078 - protein, 10 aa, Homo Sapiens
KVNTVPLKNK

SEQ ID NO: 29079 - protein, 10 aa, Homo Sapiens
KVQEMNYIQK

SEQ ID NO: 29080 - protein, 10 aa, Homo Sapiens
KVTEGSFVYK

SEQ ID NO: 29081 - protein, 10 aa, Homo Sapiens
KVVEGSFVYK

SEQ ID NO: 29082 - protein, 10 aa, Homo Sapiens
KVYLGDIPLK

SEQ ID NO: 29083 - protein, 10 aa, Homo Sapiens
LDSCTKLLQK

SEQ ID NO: 29084 - protein, 10 aa, Homo Sapiens
LQNEPLPERL

SEQ ID NO: 29085 - protein, 10 aa, Homo Sapiens
LQNPLLVPVK

SEQ ID NO: 29086 - protein, 10 aa, Homo Sapiens
LSLGVAALYK

SEQ ID NO: 29087 - protein, 10 aa, Homo Sapiens
LTFEGTGPTK

SEQ ID NO: 29088 - protein, 10 aa, Homo Sapiens
LTNPKTNIQK

SEQ ID NO: 29089 - protein, 10 aa, Homo Sapiens
LVFPSEIVGK

SEQ ID NO: 29090 - protein, 10 aa, Homo Sapiens
MQFSGSLHTK

SEQ ID NO: 29091 - protein, 10 aa, Homo Sapiens
MTGGGSKVMK

SEQ ID NO: 29092 - protein, 10 aa, Homo Sapiens
MTTAGKTNQK

SEQ ID NO: 29093 - protein, 10 aa, Homo Sapiens
MVYPFTGDHK

SEQ ID NO: 29094 - protein, 10 aa, Homo Sapiens
NSTFNQVVLK

SEQ ID NO: 29095 - protein, 10 aa, Homo Sapiens
PEAGGPPIKK

SEQ ID NO: 29096 - protein, 10 aa, Homo Sapiens
QIPQLPAPPK

SEQ ID NO: 29097 - protein, 10 aa, Homo Sapiens
QLLSQLKHPN

SEQ ID NO: 29098 - protein, 10 aa, Homo Sapiens
QSFDKEWVAK

SEQ ID NO: 29099 - protein, 10 aa, Homo Sapiens
QSNPAPQVQK

SEQ ID NO: 29100 - protein, 10 aa, Homo Sapiens
QTIPPPYVVR

SEQ ID NO: 29101 - protein, 10 aa, Homo Sapiens
QVQEGTKVLK

SEQ ID NO: 29102 - protein, 10 aa, Homo Sapiens
QVQKPGPLQK

SEQ ID NO: 29103 - protein, 10 aa, Homo Sapiens
QVQPKPSPPR

SEQ ID NO: 29104 - protein, 10 aa, Homo Sapiens
RAAVPDAVGK

SEQ ID NO: 29105 - protein, 10 aa, Homo Sapiens
RAFSFSKTPK

SEQ ID NO: 29106 - protein, 10 aa, Homo Sapiens
RAMDVEPRAK

SEQ ID NO: 29107 - protein, 10 aa, Homo Sapiens
RGMGELLPTK

SEQ ID NO: 29108 - protein, 10 aa, Homo Sapiens
RIFTLKPVRK

SEQ ID NO: 29109 - protein, 10 aa, Homo Sapiens
RIIEETLALK

SEQ ID NO: 29110 - protein, 10 aa, Homo Sapiens
RIMDPEIALK

SEQ ID NO: 29111 - protein, 10 aa, Homo Sapiens
RIQDGLGELK

SEQ ID NO: 29112 - protein, 10 aa, Homo Sapiens
RIYDVGMQLK

SEQ ID NO: 29113 - protein, 10 aa, Homo Sapiens
RLMSLPIAKK

SEQ ID NO: 29114 - protein, 10 aa, Homo Sapiens
RMFLSFPTTK

SEQ ID NO: 29115 - protein, 10 aa, Homo Sapiens
RSAQPLPLKI

SEQ ID NO: 29116 - protein, 10 aa, Homo Sapiens
RTAALPTFRK

SEQ ID NO: 29117 - protein, 10 aa, Homo Sapiens
RTATQLAVNK

SEQ ID NO: 29118 - protein, 10 aa, Homo Sapiens
RTAVPSFLTK

SEQ ID NO: 29119 - protein, 10 aa, Homo Sapiens
RTDDKVIRFK

SEQ ID NO: 29120 - protein, 10 aa, Homo Sapiens
RTFMIKFPWK

SEQ ID NO: 29121 - protein, 10 aa, Homo Sapiens
RTGPPMGSRF

SEQ ID NO: 29122 - protein, 10 aa, Homo Sapiens
RTLDAKMPRK

SEQ ID NO: 29123 - protein, 10 aa, Homo Sapiens
RTLSDYNIQK

SEQ ID NO: 29124 - protein, 10 aa, Homo Sapiens
RTSRPLKILR

SEQ ID NO: 29125 - protein, 10 aa, Homo Sapiens
RTVPVGGVVK

SEQ ID NO: 29126 - protein, 10 aa, Homo Sapiens
RTYDREGFKK

SEQ ID NO: 29127 - protein, 10 aa, Homo Sapiens
RVCDAVKALK

SEQ ID NO: 29128 - protein, 10 aa, Homo Sapiens
RVCDIILPRL

SEQ ID NO: 29129 - protein, 10 aa, Homo Sapiens
RVFQETQKLK

SEQ ID NO: 29130 - protein, 10 aa, Homo Sapiens
RVFTGQAKVK

SEQ ID NO: 29131 - protein, 10 aa, Homo Sapiens
RVINSIPLAK

SEQ ID NO: 29132 - protein, 10 aa, Homo Sapiens
RVIYKPIVEK

SEQ ID NO: 29133 - protein, 10 aa, Homo Sapiens
RVLDFDVKRK

SEQ ID NO: 29134 - protein, 10 aa, Homo Sapiens
RVLDVGFVGR

SEQ ID NO: 29135 - protein, 10 aa, Homo Sapiens
RVLEAAVAAK

SEQ ID NO: 29136 - protein, 10 aa, Homo Sapiens
RVLEALLPLK

SEQ ID NO: 29137 - protein, 10 aa, Homo Sapiens
RVLKPGGLLK

SEQ ID NO: 29138 - protein, 10 aa, Homo Sapiens
RVLSKAFSRL

SEQ ID NO: 29139 - protein, 10 aa, Homo Sapiens
RVMDVQYNKF

SEQ ID NO: 29140 - protein, 10 aa, Homo Sapiens
RVNKVIIGTK

SEQ ID NO: 29141 - protein, 10 aa, Homo Sapiens
RVPLDPLIGK

SEQ ID NO: 29142 - protein, 10 aa, Homo Sapiens
RVPQAEGPPK

SEQ ID NO: 29143 - protein, 10 aa, Homo Sapiens
RVSNVKSVYK

SEQ ID NO: 29144 - protein, 10 aa, Homo Sapiens
RVWDLPGVLK

SEQ ID NO: 29145 - protein, 10 aa, Homo Sapiens
SAAEPVPAAR

SEQ ID NO: 29146 - protein, 10 aa, Homo Sapiens
SAFDRILSSK

SEQ ID NO: 29147 - protein, 10 aa, Homo Sapiens
SAFGNILSCK

SEQ ID NO: 29148 - protein, 10 aa, Homo Sapiens
SAFHKVLSEK

SEQ ID NO: 29149 - protein, 10 aa, Homo Sapiens
SAFLLLGLFK

SEQ ID NO: 29150 - protein, 10 aa, Homo Sapiens
SAFQAPAVKK

SEQ ID NO: 29151 - protein, 10 aa, Homo Sapiens
SALTGVLSAK

SEQ ID NO: 29152 - protein, 10 aa, Homo Sapiens
SANIGPFLEK

SEQ ID NO: 29153 - protein, 10 aa, Homo Sapiens
SAQGKPLALK

SEQ ID NO: 29154 - protein, 10 aa, Homo Sapiens
SAYLGSEQYK

SEQ ID NO: 29155 - protein, 10 aa, Homo Sapiens
SAYYPSSFPK

SEQ ID NO: 29156 - protein, 10 aa, Homo Sapiens
SDPNVSKKLK

SEQ ID NO: 29157 - protein, 10 aa, Homo Sapiens
SGFAGVYFEK

SEQ ID NO: 29158 - protein, 10 aa, Homo Sapiens
SGLVPAAPPK

SEQ ID NO: 29159 - protein, 10 aa, Homo Sapiens
SIAVKSIHRK

SEQ ID NO: 29160 - protein, 10 aa, Homo Sapiens
SIDGRVVEPK

SEQ ID NO: 29161 - protein, 10 aa, Homo Sapiens
SIFDGRVVAK

SEQ ID NO: 29162 - protein, 10 aa, Homo Sapiens
SIFEPVNLPK

SEQ ID NO: 29163 - protein, 10 aa, Homo Sapiens
SIFFESMPYK

SEQ ID NO: 29164 - protein, 10 aa, Homo Sapiens
SIFGGTDMKK

SEQ ID NO: 29165 - protein, 10 aa, Homo Sapiens
SIFVPPFISK

SEQ ID NO: 29166 - protein, 10 aa, Homo Sapiens
SIKIKTDSAK

SEQ ID NO: 29167 - protein, 10 aa, Homo Sapiens
SILEDYANYK

SEQ ID NO: 29168 - protein, 10 aa, Homo Sapiens
SILEKGFIAK

SEQ ID NO: 29169 - protein, 10 aa, Homo Sapiens
SILRNPVTNK

SEQ ID NO: 29170 - protein, 10 aa, Homo Sapiens
SIPQKPQTNK

SEQ ID NO: 29171 - protein, 10 aa, Homo Sapiens
SIPVAPTPPR

SEQ ID NO: 29172 - protein, 10 aa, Homo Sapiens
SIYDGDEFRK

SEQ ID NO: 29173 - protein, 10 aa, Homo Sapiens
SLFDRQGFLK

SEQ ID NO: 29174 - protein, 10 aa, Homo Sapiens
SLFVFFNHPK

SEQ ID NO: 29175 - protein, 10 aa, Homo Sapiens
SLMDRPLCER

SEQ ID NO: 29176 - protein, 10 aa, Homo Sapiens
SLNGEFGYQK

SEQ ID NO: 29177 - protein, 10 aa, Homo Sapiens
SLPANTPLRK

SEQ ID NO: 29178 - protein, 10 aa, Homo Sapiens
SLPDFPAAAK

SEQ ID NO: 29179 - protein, 10 aa, Homo Sapiens
SLPDIPFDPK

SEQ ID NO: 29180 - protein, 10 aa, Homo Sapiens
SLPDLTTPLK

SEQ ID NO: 29181 - protein, 10 aa, Homo Sapiens
SLPEQPCTKK

SEQ ID NO: 29182 - protein, 10 aa, Homo Sapiens
SLPLVDTHSK

SEQ ID NO: 29183 - protein, 10 aa, Homo Sapiens
SLPTVIMRNK

SEQ ID NO: 29184 - protein, 10 aa, Homo Sapiens
SLPVEVPLNH

SEQ ID NO: 29185 - protein, 10 aa, Homo Sapiens
SLQEVTIHEK

SEQ ID NO: 29186 - protein, 10 aa, Homo Sapiens
SQCDSPYVTK

SEQ ID NO: 29187 - protein, 10 aa, Homo Sapiens
SQFKGYFIFK

SEQ ID NO: 29188 - protein, 10 aa, Homo Sapiens
SQFSGKITVK

SEQ ID NO: 29189 - protein, 10 aa, Homo Sapiens
SQPTSLAPEK

SEQ ID NO: 29190 - protein, 10 aa, Homo Sapiens
SSAPPTPTRL

SEQ ID NO: 29191 - protein, 10 aa, Homo Sapiens
SSATTSPFFK

SEQ ID NO: 29192 - protein, 10 aa, Homo Sapiens
SSFSVKPFEK

SEQ ID NO: 29193 - protein, 10 aa, Homo Sapiens
SSLECIAIPK

SEQ ID NO: 29194 - protein, 10 aa, Homo Sapiens
SSLSLVEIYK

SEQ ID NO: 29195 - protein, 10 aa, Homo Sapiens
SSLSSPLNPK

SEQ ID NO: 29196 - protein, 10 aa, Homo Sapiens
SSMAGVYVCK

SEQ ID NO: 29197 - protein, 10 aa, Homo Sapiens
SSMFGTLPRK

SEQ ID NO: 29198 - protein, 10 aa, Homo Sapiens
SSMTQTPALK

SEQ ID NO: 29199 - protein, 10 aa, Homo Sapiens
SSQIPSSVNK

SEQ ID NO: 29200 - protein, 10 aa, Homo Sapiens
SSVESIISPK

SEQ ID NO: 29201 - protein, 10 aa, Homo Sapiens
SSVGSVITKK

SEQ ID NO: 29202 - protein, 10 aa, Homo Sapiens
SSYYSVLLQK

SEQ ID NO: 29203 - protein, 10 aa, Homo Sapiens
STADGSALVK

SEQ ID NO: 29204 - protein, 10 aa, Homo Sapiens
STAMNGNLAK

SEQ ID NO: 29205 - protein, 10 aa, Homo Sapiens
STANIDDLKK

SEQ ID NO: 29206 - protein, 10 aa, Homo Sapiens
STCNTKLTLK

SEQ ID NO: 29207 - protein, 10 aa, Homo Sapiens
STDPAAPNLK

SEQ ID NO: 29208 - protein, 10 aa, Homo Sapiens
STESNMSVPK

SEQ ID NO: 29209 - protein, 10 aa, Homo Sapiens
STFDTQITKK

SEQ ID NO: 29210 - protein, 10 aa, Homo Sapiens
STFLTFPIYK

SEQ ID NO: 29211 - protein, 10 aa, Homo Sapiens
STFNFHPNVR

SEQ ID NO: 29212 - protein, 10 aa, Homo Sapiens
STFNNDILSK

SEQ ID NO: 29213 - protein, 10 aa, Homo Sapiens
STFQQMWISK

SEQ ID NO: 29214 - protein, 10 aa, Homo Sapiens
STFSGGRIPK

SEQ ID NO: 29215 - protein, 10 aa, Homo Sapiens
STGKFEWGSK

SEQ ID NO: 29216 - protein, 10 aa, Homo Sapiens
STGVFTTMEK

SEQ ID NO: 29217 - protein, 10 aa, Homo Sapiens
STIDDTISKF

SEQ ID NO: 29218 - protein, 10 aa, Homo Sapiens
STLEHGTSLK

SEQ ID NO: 29219 - protein, 10 aa, Homo Sapiens
STLFSALLIK

SEQ ID NO: 29220 - protein, 10 aa, Homo Sapiens
STLTNPRQSP

SEQ ID NO: 29221 - protein, 10 aa, Homo Sapiens
STMEGGTLKY

SEQ ID NO: 29222 - protein, 10 aa, Homo Sapiens
STMGYMMAKK

SEQ ID NO: 29223 - protein, 10 aa, Homo Sapiens
STMTTPQVLK

SEQ ID NO: 29224 - protein, 10 aa, Homo Sapiens
STMYPGLPSR

SEQ ID NO: 29225 - protein, 10 aa, Homo Sapiens
STNSPVGVSK

SEQ ID NO: 29226 - protein, 10 aa, Homo Sapiens
STPLAGLAPK

SEQ ID NO: 29227 - protein, 10 aa, Homo Sapiens
STQNGPVFAK

SEQ ID NO: 29228 - protein, 10 aa, Homo Sapiens
STSETPQPPR

SEQ ID NO: 29229 - protein, 10 aa, Homo Sapiens
STSPSVALSK

SEQ ID NO: 29230 - protein, 10 aa, Homo Sapiens
STSVVRPFAK

SEQ ID NO: 29231 - protein, 10 aa, Homo Sapiens
STTQVVGILK

SEQ ID NO: 29232 - protein, 10 aa, Homo Sapiens
STVSADPVVK

SEQ ID NO: 29233 - protein, 10 aa, Homo Sapiens
STWEGIQAGK

SEQ ID NO: 29234 - protein, 10 aa, Homo Sapiens
STWTGPPAMK

SEQ ID NO: 29235 - protein, 10 aa, Homo Sapiens
STYDGVFIWK

SEQ ID NO: 29236 - protein, 10 aa, Homo Sapiens
STYGTHIHEK

SEQ ID NO: 29237 - protein, 10 aa, Homo Sapiens
STYYGSFVTR

SEQ ID NO: 29238 - protein, 10 aa, Homo Sapiens
SVAETAQTIK

SEQ ID NO: 29239 - protein, 10 aa, Homo Sapiens
SVAGGLFVGK

SEQ ID NO: 29240 - protein, 10 aa, Homo Sapiens
SVASTPISQR

SEQ ID NO: 29241 - protein, 10 aa, Homo Sapiens
SVCEGKGLHR

SEQ ID NO: 29242 - protein, 10 aa, Homo Sapiens
SVCPAGMIVK

SEQ ID NO: 29243 - protein, 10 aa, Homo Sapiens
SVFAGVVGVK

SEQ ID NO: 29244 - protein, 10 aa, Homo Sapiens
SVFDAYVLPK

SEQ ID NO: 29245 - protein, 10 aa, Homo Sapiens
SVFDFQKAYK

SEQ ID NO: 29246 - protein, 10 aa, Homo Sapiens
SVFEDPVISK

SEQ ID NO: 29247 - protein, 10 aa, Homo Sapiens
SVFESLIAKK

SEQ ID NO: 29248 - protein, 10 aa, Homo Sapiens
SVFNEHPSRR

SEQ ID NO: 29249 - protein, 10 aa, Homo Sapiens
SVFPYNHRMK

SEQ ID NO: 29250 - protein, 10 aa, Homo Sapiens
SVFQQGMKNK

SEQ ID NO: 29251 - protein, 10 aa, Homo Sapiens
SVFSDKLHSK

SEQ ID NO: 29252 - protein, 10 aa, Homo Sapiens
SVGTEMIITK

SEQ ID NO: 29253 - protein, 10 aa, Homo Sapiens
SVIDEPVRLK

SEQ ID NO: 29254 - protein, 10 aa, Homo Sapiens
SVIKEGWLHK

SEQ ID NO: 29255 - protein, 10 aa, Homo Sapiens
SVINPGAIYR

SEQ ID NO: 29256 - protein, 10 aa, Homo Sapiens
SVIRDYLVQK

SEQ ID NO: 29257 - protein, 10 aa, Homo Sapiens
SVISTDPLKR

SEQ ID NO: 29258 - protein, 10 aa, Homo Sapiens
SVLDLSVHKK

SEQ ID NO: 29259 - protein, 10 aa, Homo Sapiens
SVLDWEDLIR

SEQ ID NO: 29260 - protein, 10 aa, Homo Sapiens
SVLEPPLFLK

SEQ ID NO: 29261 - protein, 10 aa, Homo Sapiens
SVLNLVIVKK

SEQ ID NO: 29262 - protein, 10 aa, Homo Sapiens
SVLPTIRVPK

SEQ ID NO: 29263 - protein, 10 aa, Homo Sapiens
SVLPTSKPEK

SEQ ID NO: 29264 - protein, 10 aa, Homo Sapiens
SVLPYFVATK

SEQ ID NO: 29265 - protein, 10 aa, Homo Sapiens
SVMDQEMRVK

SEQ ID NO: 29266 - protein, 10 aa, Homo Sapiens
SVMLGGRNIK

SEQ ID NO: 29267 - protein, 10 aa, Homo Sapiens
SVMPKKSILK

SEQ ID NO: 29268 - protein, 10 aa, Homo Sapiens
SVMQKIIPHY

SEQ ID NO: 29269 - protein, 10 aa, Homo Sapiens
SVMRPEQIMK

SEQ ID NO: 29270 - protein, 10 aa, Homo Sapiens
SVMSTVEWNK

SEQ ID NO: 29271 - protein, 10 aa, Homo Sapiens
SVMYPVDSVK

SEQ ID NO: 29272 - protein, 10 aa, Homo Sapiens
SVMYSTLPGR

SEQ ID NO: 29273 - protein, 10 aa, Homo Sapiens
SVNIQALPDK

SEQ ID NO: 29274 - protein, 10 aa, Homo Sapiens
SVPREPIDRK

SEQ ID NO: 29275 - protein, 10 aa, Homo Sapiens
SVPSTPIAHR

SEQ ID NO: 29276 - protein, 10 aa, Homo Sapiens
SVPVAVVPSK

SEQ ID NO: 29277 - protein, 10 aa, Homo Sapiens
SVQEGIKFKK

SEQ ID NO: 29278 - protein, 10 aa, Homo Sapiens
SVQIPTGQNK

SEQ ID NO: 29279 - protein, 10 aa, Homo Sapiens
SVQLPKPVHK

SEQ ID NO: 29280 - protein, 10 aa, Homo Sapiens
SVQTQPAIKK

SEQ ID NO: 29281 - protein, 10 aa, Homo Sapiens
SVQVPEFTPK

SEQ ID NO: 29282 - protein, 10 aa, Homo Sapiens
SVSNMVHTAK

SEQ ID NO: 29283 - protein, 10 aa, Homo Sapiens
SVSQPIMVQR

SEQ ID NO: 29284 - protein, 10 aa, Homo Sapiens
SVSTITRIYR

SEQ ID NO: 29285 - protein, 10 aa, Homo Sapiens
SVTDVKFAPK

SEQ ID NO: 29286 - protein, 10 aa, Homo Sapiens
SVVGFPFLDK

SEQ ID NO: 29287 - protein, 10 aa, Homo Sapiens
SVYDALPLTR

SEQ ID NO: 29288 - protein, 10 aa, Homo Sapiens
SVYDHQGIFK

SEQ ID NO: 29289 - protein, 10 aa, Homo Sapiens
TALPASPVAR

SEQ ID NO: 29290 - protein, 10 aa, Homo Sapiens
TAMDVVYALK

SEQ ID NO: 29291 - protein, 10 aa, Homo Sapiens
TIDERAINKK

SEQ ID NO: 29292 - protein, 10 aa, Homo Sapiens
TIDERTINKK

SEQ ID NO: 29293 - protein, 10 aa, Homo Sapiens
TIQSGEQPYK

SEQ ID NO: 29294 - protein, 10 aa, Homo Sapiens
TQEKNPLPSK

SEQ ID NO: 29295 - protein, 10 aa, Homo Sapiens
TSFDGSLIQK

SEQ ID NO: 29296 - protein, 10 aa, Homo Sapiens
TSLLGYFPNK

SEQ ID NO: 29297 - protein, 10 aa, Homo Sapiens
TSTCSPIISK

SEQ ID NO: 29298 - protein, 10 aa, Homo Sapiens
TTATGVFSLK

SEQ ID NO: 29299 - protein, 10 aa, Homo Sapiens
TTISSFPQLK

SEQ ID NO: 29300 - protein, 10 aa, Homo Sapiens
TTLAFKPIKK

SEQ ID NO: 29301 - protein, 10 aa, Homo Sapiens
TTNDIVISKL

SEQ ID NO: 29302 - protein, 10 aa, Homo Sapiens
TTSDPPNICK

SEQ ID NO: 29303 - protein, 10 aa, Homo Sapiens
TTYPQTTIRK

SEQ ID NO: 29304 - protein, 10 aa, Homo Sapiens
TVAEISQFLK

SEQ ID NO: 29305 - protein, 10 aa, Homo Sapiens
TVAVPLVGKL

SEQ ID NO: 29306 - protein, 10 aa, Homo Sapiens
TVFREPIICK

SEQ ID NO: 29307 - protein, 10 aa, Homo Sapiens
TVISGPGTGK

SEQ ID NO: 29308 - protein, 10 aa, Homo Sapiens
TVLCQPTGGK

SEQ ID NO: 29309 - protein, 10 aa, Homo Sapiens
TVQDGRQFLK

SEQ ID NO: 29310 - protein, 10 aa, Homo Sapiens
TVYRNPESFK

SEQ ID NO: 29311 - protein, 10 aa, Homo Sapiens
VLINVDPCAK

SEQ ID NO: 29312 - protein, 10 aa, Homo Sapiens
VQEFGLARFK

SEQ ID NO: 29313 - protein, 10 aa, Homo Sapiens
VSILLGTVPK

SEQ ID NO: 29314 - protein, 10 aa, Homo Sapiens
VSISADGRIS

SEQ ID NO: 29315 - protein, 10 aa, Homo Sapiens
VSQIPPMAVK

SEQ ID NO: 29316 - protein, 10 aa, Homo Sapiens
VTASTGLLWK

SEQ ID NO: 29317 - protein, 10 aa, Homo Sapiens
VTDPSIPIRK

SEQ ID NO: 29318 - protein, 10 aa, Homo Sapiens
VTFGSIFGYK

SEQ ID NO: 29319 - protein, 10 aa, Homo Sapiens
VTGGPWPTRL

SEQ ID NO: 29320 - protein, 10 aa, Homo Sapiens
VTHRPPLSPK

SEQ ID NO: 29321 - protein, 10 aa, Homo Sapiens
VTIFIRGGNK

SEQ ID NO: 29322 - protein, 10 aa, Homo Sapiens
VTIIMNDYPK

SEQ ID NO: 29323 - protein, 10 aa, Homo Sapiens
VTIKEGSQLK

SEQ ID NO: 29324 - protein, 10 aa, Homo Sapiens
VTLSWKPVQK

SEQ ID NO: 29325 - protein, 10 aa, Homo Sapiens
VTMGFTGFGK

SEQ ID NO: 29326 - protein, 10 aa, Homo Sapiens
VTNDGATILK

SEQ ID NO: 29327 - protein, 10 aa, Homo Sapiens
VTTGSEGLLK

SEQ ID NO: 29328 - protein, 10 aa, Homo Sapiens
VTVDGHLIRK

SEQ ID NO: 29329 - protein, 10 aa, Homo Sapiens
VTVDPKYHPK

SEQ ID NO: 29330 - protein, 10 aa, Homo Sapiens
VTYNGVDNNK

SEQ ID NO: 29331 - protein, 10 aa, Homo Sapiens
VTYSDVGGCK

SEQ ID NO: 29332 - protein, 10 aa, Homo Sapiens
VTYVPVTTFK

SEQ ID NO: 29333 - protein, 10 aa, Homo Sapiens
VVCVEGIVTK

SEQ ID NO: 29334 - protein, 10 aa, Homo Sapiens
VVGVYRPPPK

SEQ ID NO: 29335 - protein, 10 aa, Homo Sapiens
VVINVNNILK

SEQ ID NO: 29336 - protein, 10 aa, Homo Sapiens
VVLGQFLVLK

SEQ ID NO: 29337 - protein, 10 aa, Homo Sapiens
VVMAADRSLK

SEQ ID NO: 29338 - protein, 10 aa, Homo Sapiens
VVMENVGQQK

SEQ ID NO: 29339 - protein, 10 aa, Homo Sapiens
VVMVNQGLTK

SEQ ID NO: 29340 - protein, 10 aa, Homo Sapiens
VVNKVPLTGK

SEQ ID NO: 29341 - protein, 10 aa, Homo Sapiens
VVQDMLVPMK

SEQ ID NO: 29342 - protein, 10 aa, Homo Sapiens
VVQEPGQVFK

SEQ ID NO: 29343 - protein, 10 aa, Homo Sapiens
VVVDPIQSVK

SEQ ID NO: 29344 - protein, 10 aa, Homo Sapiens
VVYPPPVDPK

SEQ ID NO: 29345 - protein, 10 aa, Homo Sapiens
VVYTSHLQLK

SEQ ID NO: 29346 - protein, 10 aa, Homo Sapiens
YIYDGELVSK

SEQ ID NO: 29347 - protein, 11 aa, Homo Sapiens
AAMNMGRPFQK

SEQ ID NO: 29348 - protein, 11 aa, Homo Sapiens
AAQDSTDLVAK

SEQ ID NO: 29349 - protein, 11 aa, Homo Sapiens
AGSSQSLSFPK

SEQ ID NO: 29350 - protein, 11 aa, Homo Sapiens
AIAQAESLRYK

SEQ ID NO: 29351 - protein, 11 aa, Homo Sapiens
AIFEVNTDLQK

SEQ ID NO: 29352 - protein, 11 aa, Homo Sapiens
AIIGKQGQHIK

SEQ ID NO: 29353 - protein, 11 aa, Homo Sapiens
AIIPSKKLRNK

SEQ ID NO: 29354 - protein, 11 aa, Homo Sapiens
AILHPSTYLNK

SEQ ID NO: 29355 - protein, 11 aa, Homo Sapiens
AIMDPLPLRTK

SEQ ID NO: 29356 - protein, 11 aa, Homo Sapiens
AIMISTYEFGK

SEQ ID NO: 29357 - protein, 11 aa, Homo Sapiens
AIQAEEIMKLK

SEQ ID NO: 29358 - protein, 11 aa, Homo Sapiens
AIYDGFDGFAK

SEQ ID NO: 29359 - protein, 11 aa, Homo Sapiens
AIYKTPPGIQK

SEQ ID NO: 29360 - protein, 11 aa, Homo Sapiens
ALLDGSNVVFK

SEQ ID NO: 29361 - protein, 11 aa, Homo Sapiens
ALPLDTVTFYK

SEQ ID NO: 29362 - protein, 11 aa, Homo Sapiens
ALQTAADAFYK

SEQ ID NO: 29363 - protein, 11 aa, Homo Sapiens
AMLPYDQYLHR

SEQ ID NO: 29364 - protein, 11 aa, Homo Sapiens
AMMNNNDLVRK

SEQ ID NO: 29365 - protein, 11 aa, Homo Sapiens
AQICSSIRTHK

SEQ ID NO: 29366 - protein, 11 aa, Homo Sapiens
AQIENSAAVEK

SEQ ID NO: 29367 - protein, 11 aa, Homo Sapiens
AQIENSAAVQK

SEQ ID NO: 29368 - protein, 11 aa, Homo Sapiens
AQNNPPVPPKP

SEQ ID NO: 29369 - protein, 11 aa, Homo Sapiens
AQQEHPRPYFK

SEQ ID NO: 29370 - protein, 11 aa, Homo Sapiens
AQYEQDLQHRK

SEQ ID NO: 29371 - protein, 11 aa, Homo Sapiens
AQYSPQQLAGK

SEQ ID NO: 29372 - protein, 11 aa, Homo Sapiens
ASALGSSSYKK

SEQ ID NO: 29373 - protein, 11 aa, Homo Sapiens
ASANLGGVPSK

SEQ ID NO: 29374 - protein, 11 aa, Homo Sapiens
ASDPNVSKKLK

SEQ ID NO: 29375 - protein, 11 aa, Homo Sapiens
ASFDATTCIWK

SEQ ID NO: 29376 - protein, 11 aa, Homo Sapiens
ASFLPPSSVKK

SEQ ID NO: 29377 - protein, 11 aa, Homo Sapiens
ASFNAYENHLK

SEQ ID NO: 29378 - protein, 11 aa, Homo Sapiens
ASFVPKPGSLK

SEQ ID NO: 29379 - protein, 11 aa, Homo Sapiens
ASHRPIKGILK

SEQ ID NO: 29380 - protein, 11 aa, Homo Sapiens
ASIAGSSIINK

SEQ ID NO: 29381 - protein, 11 aa, Homo Sapiens
ASIFVKDNVTK

SEQ ID NO: 29382 - protein, 11 aa, Homo Sapiens
ASIIGVNLATK

SEQ ID NO: 29383 - protein, 11 aa, Homo Sapiens
ASILVKDYILK

SEQ ID NO: 29384 - protein, 11 aa, Homo Sapiens
ASKKTAMAAAK

SEQ ID NO: 29385 - protein, 11 aa, Homo Sapiens
ASLDISRKWEK

SEQ ID NO: 29386 - protein, 11 aa, Homo Sapiens
ASLFPDSLIVK

SEQ ID NO: 29387 - protein, 11 aa, Homo Sapiens
ASLPSESNEPK

SEQ ID NO: 29388 - protein, 11 aa, Homo Sapiens
ASLREEECVMK

SEQ ID NO: 29389 - protein, 11 aa, Homo Sapiens
ASMPDNTAAQK

SEQ ID NO: 29390 - protein, 11 aa, Homo Sapiens
ASQEIAEKALK

SEQ ID NO: 29391 - protein, 11 aa, Homo Sapiens
ATAAAIGATPR

SEQ ID NO: 29392 - protein, 11 aa, Homo Sapiens
ATAASSSSLEK

SEQ ID NO: 29393 - protein, 11 aa, Homo Sapiens
ATAGIIGVNRK

SEQ ID NO: 29394 - protein, 11 aa, Homo Sapiens
ATAGKDDCLLK

SEQ ID NO: 29395 - protein, 11 aa, Homo Sapiens
ATASPFSGLQK

SEQ ID NO: 29396 - protein, 11 aa, Homo Sapiens
ATATVAALQEK

SEQ ID NO: 29397 - protein, 11 aa, Homo Sapiens
ATCEQLTYYSK

SEQ ID NO: 29398 - protein, 11 aa, Homo Sapiens
ATCFATKNGIK

SEQ ID NO: 29399 - protein, 11 aa, Homo Sapiens
ATDDSLHQLRK

SEQ ID NO: 29400 - protein, 11 aa, Homo Sapiens
ATEPPTESLLK

SEQ ID NO: 29401 - protein, 11 aa, Homo Sapiens
ATFKDLLTRHK

SEQ ID NO: 29402 - protein, 11 aa, Homo Sapiens
ATFNEDVQALK

SEQ ID NO: 29403 - protein, 11 aa, Homo Sapiens
ATFPVAPRYAK

SEQ ID NO: 29404 - protein, 11 aa, Homo Sapiens
ATGATFAHICK

SEQ ID NO: 29405 - protein, 11 aa, Homo Sapiens
ATGGAGFCINR

SEQ ID NO: 29406 - protein, 11 aa, Homo Sapiens
ATIDLNSVLER

SEQ ID NO: 29407 - protein, 11 aa, Homo Sapiens
ATIFGPNLLHK

SEQ ID NO: 29408 - protein, 11 aa, Homo Sapiens
ATIGHVEKFLR

SEQ ID NO: 29409 - protein, 11 aa, Homo Sapiens
ATIKDGKSLTK

SEQ ID NO: 29410 - protein, 11 aa, Homo Sapiens
ATILAGDIKVK

SEQ ID NO: 29411 - protein, 11 aa, Homo Sapiens
ATILAGDVKVK

SEQ ID NO: 29412 - protein, 11 aa, Homo Sapiens
ATIRVLEAIQK

SEQ ID NO: 29413 - protein, 11 aa, Homo Sapiens
ATIRVLESVQK

SEQ ID NO: 29414 - protein, 11 aa, Homo Sapiens
ATITDKELLKK

SEQ ID NO: 29415 - protein, 11 aa, Homo Sapiens
ATITDKEMLKK

SEQ ID NO: 29416 - protein, 11 aa, Homo Sapiens
ATITERGITSR

SEQ ID NO: 29417 - protein, 11 aa, Homo Sapiens
ATLEETLVKKK

SEQ ID NO: 29418 - protein, 11 aa, Homo Sapiens
ATLGDLKLVEK

SEQ ID NO: 29419 - protein, 11 aa, Homo Sapiens
ATLKELTSLVK

SEQ ID NO: 29420 - protein, 11 aa, Homo Sapiens
ATLLASNEAFK

SEQ ID NO: 29421 - protein, 11 aa, Homo Sapiens
ATLMPTKDVDK

SEQ ID NO: 29422 - protein, 11 aa, Homo Sapiens
ATLTTTSATSK

SEQ ID NO: 29423 - protein, 11 aa, Homo Sapiens
ATMKPHPTVQK

SEQ ID NO: 29424 - protein, 11 aa, Homo Sapiens
ATMLATGGNRK

SEQ ID NO: 29425 - protein, 11 aa, Homo Sapiens
ATMPASVVGQR

SEQ ID NO: 29426 - protein, 11 aa, Homo Sapiens
ATMSEVEWRGR

SEQ ID NO: 29427 - protein, 11 aa, Homo Sapiens
ATMVPSVLWPR

SEQ ID NO: 29428 - protein, 11 aa, Homo Sapiens
ATNEDSSLLAK

SEQ ID NO: 29429 - protein, 11 aa, Homo Sapiens
ATNNLMKLVQK

SEQ ID NO: 29430 - protein, 11 aa, Homo Sapiens
ATPGADVCFAR

SEQ ID NO: 29431 - protein, 11 aa, Homo Sapiens
ATPSPSNETPK

SEQ ID NO: 29432 - protein, 11 aa, Homo Sapiens
ATQAIFEILEK

SEQ ID NO: 29433 - protein, 11 aa, Homo Sapiens
ATQEGEWKALK

SEQ ID NO: 29434 - protein, 11 aa, Homo Sapiens
ATQLPESTSLR

SEQ ID NO: 29435 - protein, 11 aa, Homo Sapiens
ATQPWNRIQRR

SEQ ID NO: 29436 - protein, 11 aa, Homo Sapiens
ATQSAQVLLEK

SEQ ID NO: 29437 - protein, 11 aa, Homo Sapiens
ATSGCFTTAQK

SEQ ID NO: 29438 - protein, 11 aa, Homo Sapiens
ATSIDRLKVFK

SEQ ID NO: 29439 - protein, 11 aa, Homo Sapiens
ATSPHLESLLK

SEQ ID NO: 29440 - protein, 11 aa, Homo Sapiens
ATSYFGKQFLR

SEQ ID NO: 29441 - protein, 11 aa, Homo Sapiens
ATTSELEAINK

SEQ ID NO: 29442 - protein, 11 aa, Homo Sapiens
ATVGKATGFLK

SEQ ID NO: 29443 - protein, 11 aa, Homo Sapiens
ATYEAGALSLK

SEQ ID NO: 29444 - protein, 11 aa, Homo Sapiens
ATYFDSEVVPR

SEQ ID NO: 29445 - protein, 11 aa, Homo Sapiens
ATYPDVNNSIK

SEQ ID NO: 29446 - protein, 11 aa, Homo Sapiens
ATYPYQVVRAR

SEQ ID NO: 29447 - protein, 11 aa, Homo Sapiens
AVADKVHLMYK

SEQ ID NO: 29448 - protein, 11 aa, Homo Sapiens
AVAEEVNAILK

SEQ ID NO: 29449 - protein, 11 aa, Homo Sapiens
AVAEGAKNVMK

SEQ ID NO: 29450 - protein, 11 aa, Homo Sapiens
AVAELKDCIEK

SEQ ID NO: 29451 - protein, 11 aa, Homo Sapiens
AVAGDFALINK

SEQ ID NO: 29452 - protein, 11 aa, Homo Sapiens
AVAGQELCQPR

SEQ ID NO: 29453 - protein, 11 aa, Homo Sapiens
AVANAQELLQR

SEQ ID NO: 29454 - protein, 11 aa, Homo Sapiens
AVAPVASALEK

SEQ ID NO: 29455 - protein, 11 aa, Homo Sapiens
AVFDHPAKIAK

SEQ ID NO: 29456 - protein, 11 aa, Homo Sapiens
AVFILTDNISK

SEQ ID NO: 29457 - protein, 11 aa, Homo Sapiens
AVFISDIRNCK

SEQ ID NO: 29458 - protein, 11 aa, Homo Sapiens
AVFPSLLTNPK

SEQ ID NO: 29459 - protein, 11 aa, Homo Sapiens
AVHEAWAGMLK

SEQ ID NO: 29460 - protein, 11 aa, Homo Sapiens
AVHRITPEEAK

SEQ ID NO: 29461 - protein, 11 aa, Homo Sapiens
AVIGADSVTLK

SEQ ID NO: 29462 - protein, 11 aa, Homo Sapiens
AVINAYTEINK

SEQ ID NO: 29463 - protein, 11 aa, Homo Sapiens
AVIPEKQLVEK

SEQ ID NO: 29464 - protein, 11 aa, Homo Sapiens
AVISGEALGIK

SEQ ID NO: 29465 - protein, 11 aa, Homo Sapiens
AVISQCIYRHR

SEQ ID NO: 29466 - protein, 11 aa, Homo Sapiens
AVLEKQDISDK

SEQ ID NO: 29467 - protein, 11 aa, Homo Sapiens
AVLTHSGFPAK

SEQ ID NO: 29468 - protein, 11 aa, Homo Sapiens
AVMAESAFSFK

SEQ ID NO: 29469 - protein, 11 aa, Homo Sapiens
AVMDGNVITAK

SEQ ID NO: 29470 - protein, 11 aa, Homo Sapiens
AVMDNKNPTIK

SEQ ID NO: 29471 - protein, 11 aa, Homo Sapiens
AVMKDVVLIRK

SEQ ID NO: 29472 - protein, 11 aa, Homo Sapiens
AVPEIMDRIYK

SEQ ID NO: 29473 - protein, 11 aa, Homo Sapiens
AVQGISGLPLK

SEQ ID NO: 29474 - protein, 11 aa, Homo Sapiens
AVQLLQFLAPK

SEQ ID NO: 29475 - protein, 11 aa, Homo Sapiens
AVQTAAKELLK

SEQ ID NO: 29476 - protein, 11 aa, Homo Sapiens
AVQVVADVLSK

SEQ ID NO: 29477 - protein, 11 aa, Homo Sapiens
AVSEGTKAVTK

SEQ ID NO: 29478 - protein, 11 aa, Homo Sapiens
AVSKDIANWQK

SEQ ID NO: 29479 - protein, 11 aa, Homo Sapiens
AVTEAEIQQLK

SEQ ID NO: 29480 - protein, 11 aa, Homo Sapiens
AVVGGLDIHKK

SEQ ID NO: 29481 - protein, 11 aa, Homo Sapiens
AVVNSPHRQYK

SEQ ID NO: 29482 - protein, 11 aa, Homo Sapiens
AVVPLASVIVK

SEQ ID NO: 29483 - protein, 11 aa, Homo Sapiens
AVVSGESCPGK

SEQ ID NO: 29484 - protein, 11 aa, Homo Sapiens
AVYDRPGASPK

SEQ ID NO: 29485 - protein, 11 aa, Homo Sapiens
AVYEGHVSCVK

SEQ ID NO: 29486 - protein, 11 aa, Homo Sapiens
AVYGMLNLTPK

SEQ ID NO: 29487 - protein, 11 aa, Homo Sapiens
AVYGQKEIHRK

SEQ ID NO: 29488 - protein, 11 aa, Homo Sapiens
AVYGQNDIHHK

SEQ ID NO: 29489 - protein, 11 aa, Homo Sapiens
AVYLSTCKDSK

SEQ ID NO: 29490 - protein, 11 aa, Homo Sapiens
AVYSMVEFNGK

SEQ ID NO: 29491 - protein, 11 aa, Homo Sapiens
DEPQNLIKQNC

SEQ ID NO: 29492 - protein, 11 aa, Homo Sapiens
FDVKSGSAVHK

SEQ ID NO: 29493 - protein, 11 aa, Homo Sapiens
FLYQQQGRLDK

SEQ ID NO: 29494 - protein, 11 aa, Homo Sapiens
FSYSFSYKHLK

SEQ ID NO: 29495 - protein, 11 aa, Homo Sapiens
GAYSQSPAIKK

SEQ ID NO: 29496 - protein, 11 aa, Homo Sapiens
GQNPTNAEVLK

SEQ ID NO: 29497 - protein, 11 aa, Homo Sapiens
GSFASIFWLKK

SEQ ID NO: 29498 - protein, 11 aa, Homo Sapiens
GSLPGDKIRNK

SEQ ID NO: 29499 - protein, 11 aa, Homo Sapiens
GSMPELKKYMK

SEQ ID NO: 29500 - protein, 11 aa, Homo Sapiens
GSSPEQVVRPK

SEQ ID NO: 29501 - protein, 11 aa, Homo Sapiens
GSYIELPAYLK

SEQ ID NO: 29502 - protein, 11 aa, Homo Sapiens
GTAAIGYLAYK

SEQ ID NO: 29503 - protein, 11 aa, Homo Sapiens
GTAPSKPPLTK

SEQ ID NO: 29504 - protein, 11 aa, Homo Sapiens
GTASVLQPVKK

SEQ ID NO: 29505 - protein, 11 aa, Homo Sapiens
GTAYCTALYLR

SEQ ID NO: 29506 - protein, 11 aa, Homo Sapiens
GTCHNLPGLFR

SEQ ID NO: 29507 - protein, 11 aa, Homo Sapiens
GTEFGGSIYQK

SEQ ID NO: 29508 - protein, 11 aa, Homo Sapiens
GTFASVEQFWR

SEQ ID NO: 29509 - protein, 11 aa, Homo Sapiens
GTFEMAKVLCK

SEQ ID NO: 29510 - protein, 11 aa, Homo Sapiens
GTFGGLGSKSK

SEQ ID NO: 29511 - protein, 11 aa, Homo Sapiens
GTFSTVTSTVK

SEQ ID NO: 29512 - protein, 11 aa, Homo Sapiens
GTFVSPEVFLK

SEQ ID NO: 29513 - protein, 11 aa, Homo Sapiens
GTIEKSKLITK

SEQ ID NO: 29514 - protein, 11 aa, Homo Sapiens
GTIFAELATKK

SEQ ID NO: 29515 - protein, 11 aa, Homo Sapiens
GTIFIIKGVRK

SEQ ID NO: 29516 - protein, 11 aa, Homo Sapiens
GTIIVSGSTEK

SEQ ID NO: 29517 - protein, 11 aa, Homo Sapiens
GTIRSRSFIFK

SEQ ID NO: 29518 - protein, 11 aa, Homo Sapiens
GTLREYKVVGR

SEQ ID NO: 29519 - protein, 11 aa, Homo Sapiens
GTLSPLDIYPK

SEQ ID NO: 29520 - protein, 11 aa, Homo Sapiens
GTLTVEAPMPK

SEQ ID NO: 29521 - protein, 11 aa, Homo Sapiens
GTPGPSITGVP

SEQ ID NO: 29522 - protein, 11 aa, Homo Sapiens
GTSDRFSRILK

SEQ ID NO: 29523 - protein, 11 aa, Homo Sapiens
GTVAGAAVLLK

SEQ ID NO: 29524 - protein, 11 aa, Homo Sapiens
GTVDVTPFIKK

SEQ ID NO: 29525 - protein, 11 aa, Homo Sapiens
GTYGLDSVKKK

SEQ ID NO: 29526 - protein, 11 aa, Homo Sapiens
GVAGAVAVFPK

SEQ ID NO: 29527 - protein, 11 aa, Homo Sapiens
GVDSSIFQNPK

SEQ ID NO: 29528 - protein, 11 aa, Homo Sapiens
GVIGLLEPMKK

SEQ ID NO: 29529 - protein, 11 aa, Homo Sapiens
GVIGQDGLLFK

SEQ ID NO: 29530 - protein, 11 aa, Homo Sapiens
GVLGSSKVLAK

SEQ ID NO: 29531 - protein, 11 aa, Homo Sapiens
GVLQLGNIVFK

SEQ ID NO: 29532 - protein, 11 aa, Homo Sapiens
GVMTPCDKILK

SEQ ID NO: 29533 - protein, 11 aa, Homo Sapiens
GVRGMDGPQGP

SEQ ID NO: 29534 - protein, 11 aa, Homo Sapiens
HSIDGRVVEPK

SEQ ID NO: 29535 - protein, 11 aa, Homo Sapiens
HSMDTLLATLK

SEQ ID NO: 29536 - protein, 11 aa, Homo Sapiens
HTLDSYRILQK

SEQ ID NO: 29537 - protein, 11 aa, Homo Sapiens
HTMNVPSLFSK

SEQ ID NO: 29538 - protein, 11 aa, Homo Sapiens
HVLEAQDLIAK

SEQ ID NO: 29539 - protein, 11 aa, Homo Sapiens
IILEPDKNPKK

SEQ ID NO: 29540 - protein, 11 aa, Homo Sapiens
IIYDPKLQTPK

SEQ ID NO: 29541 - protein, 11 aa, Homo Sapiens
ISDPTSPLRTR

SEQ ID NO: 29542 - protein, 11 aa, Homo Sapiens
ITDPHSPSRFR

SEQ ID NO: 29543 - protein, 11 aa, Homo Sapiens
KASSEMALYQK

SEQ ID NO: 29544 - protein, 11 aa, Homo Sapiens
KAYEQAGMMLK

SEQ ID NO: 29545 - protein, 11 aa, Homo Sapiens
KGGGKKSALKK

SEQ ID NO: 29546 - protein, 11 aa, Homo Sapiens
KLFPGSPAIYK

SEQ ID NO: 29547 - protein, 11 aa, Homo Sapiens
KQQAHDLLINK

SEQ ID NO: 29548 - protein, 11 aa, Homo Sapiens
KSLGHGLINKK

SEQ ID NO: 29549 - protein, 11 aa, Homo Sapiens
KSLPAEINRMK

SEQ ID NO: 29550 - protein, 11 aa, Homo Sapiens
KSTTTGHLIYK

SEQ ID NO: 29551 - protein, 11 aa, Homo Sapiens
KTAEDAKDFFK

SEQ ID NO: 29552 - protein, 11 aa, Homo Sapiens
KTFGETHPFTK

SEQ ID NO: 29553 - protein, 11 aa, Homo Sapiens
KTFTIKRFLAK

SEQ ID NO: 29554 - protein, 11 aa, Homo Sapiens
KTIDMELVKRK

SEQ ID NO: 29555 - protein, 11 aa, Homo Sapiens
KTLAYRGFIFK

SEQ ID NO: 29556 - protein, 11 aa, Homo Sapiens
KTLDEILQEKK

SEQ ID NO: 29557 - protein, 11 aa, Homo Sapiens
KTLDQAKAVLK

SEQ ID NO: 29558 - protein, 11 aa, Homo Sapiens
KTLPAMLGTGK

SEQ ID NO: 29559 - protein, 11 aa, Homo Sapiens
KTMEDTLMTVK

SEQ ID NO: 29560 - protein, 11 aa, Homo Sapiens
KTQEPFSVRNK

SEQ ID NO: 29561 - protein, 11 aa, Homo Sapiens
KTSGSNVKIVK

SEQ ID NO: 29562 - protein, 11 aa, Homo Sapiens
KTSTVPPSLRK

SEQ ID NO: 29563 - protein, 11 aa, Homo Sapiens
KTVAGGAWTYK

SEQ ID NO: 29564 - protein, 11 aa, Homo Sapiens
KTYHALSNLPK

SEQ ID NO: 29565 - protein, 11 aa, Homo Sapiens
KTYIPPKGETK

SEQ ID NO: 29566 - protein, 11 aa, Homo Sapiens
KVFHAERIVRK

SEQ ID NO: 29567 - protein, 11 aa, Homo Sapiens
KVFPEDMAKYR

SEQ ID NO: 29568 - protein, 11 aa, Homo Sapiens
KVFVKSSDLLK

SEQ ID NO: 29569 - protein, 11 aa, Homo Sapiens
KVIDGERVIGR

SEQ ID NO: 29570 - protein, 11 aa, Homo Sapiens
KVLDHKDRVLK

SEQ ID NO: 29571 - protein, 11 aa, Homo Sapiens
KVLGQGKWNLK

SEQ ID NO: 29572 - protein, 11 aa, Homo Sapiens
KVLPGDHEYPK

SEQ ID NO: 29573 - protein, 11 aa, Homo Sapiens
KVLSIDQRNFK

SEQ ID NO: 29574 - protein, 11 aa, Homo Sapiens
KVQDVKKTIQK

SEQ ID NO: 29575 - protein, 11 aa, Homo Sapiens
KVSSINSRFAK

SEQ ID NO: 29576 - protein, 11 aa, Homo Sapiens
KVVPEMTEILK

SEQ ID NO: 29577 - protein, 11 aa, Homo Sapiens
KVYEGERPLTK

SEQ ID NO: 29578 - protein, 11 aa, Homo Sapiens
KVYLAQDIKTK

SEQ ID NO: 29579 - protein, 11 aa, Homo Sapiens
LGFLLLWERIE

SEQ ID NO: 29580 - protein, 11 aa, Homo Sapiens
LLGASVVPFMK

SEQ ID NO: 29581 - protein, 11 aa, Homo Sapiens
LTIQSGEQPYK

SEQ ID NO: 29582 - protein, 11 aa, Homo Sapiens
LVIDNGSGMCK

SEQ ID NO: 29583 - protein, 11 aa, Homo Sapiens
LVVDNGSGMCK

SEQ ID NO: 29584 - protein, 11 aa, Homo Sapiens
MQIAWSREFLK

SEQ ID NO: 29585 - protein, 11 aa, Homo Sapiens
MSMVANLLYEK

SEQ ID NO: 29586 - protein, 11 aa, Homo Sapiens
MTMDKSELVQK

SEQ ID NO: 29587 - protein, 11 aa, Homo Sapiens
NTSRESTMYPK

SEQ ID NO: 29588 - protein, 11 aa, Homo Sapiens
PRGSPPPPHAD

SEQ ID NO: 29589 - protein, 11 aa, Homo Sapiens
QIVSVAARMLK

SEQ ID NO: 29590 - protein, 11 aa, Homo Sapiens
QQFAQSTEMLK

SEQ ID NO: 29591 - protein, 11 aa, Homo Sapiens
QTFPSVSAPSK

SEQ ID NO: 29592 - protein, 11 aa, Homo Sapiens
QTMAYNITPLR

SEQ ID NO: 29593 - protein, 11 aa, Homo Sapiens
QVADSTFTVLK

SEQ ID NO: 29594 - protein, 11 aa, Homo Sapiens
QVLNADAIVVK

SEQ ID NO: 29595 - protein, 11 aa, Homo Sapiens
QVLSAATIVAK

SEQ ID NO: 29596 - protein, 11 aa, Homo Sapiens
QVQPVDGATRK

SEQ ID NO: 29597 - protein, 11 aa, Homo Sapiens
RALPKSYQQPK

SEQ ID NO: 29598 - protein, 11 aa, Homo Sapiens
RIFAPNHVVAK

SEQ ID NO: 29599 - protein, 11 aa, Homo Sapiens
RIGAEVYHNLK

SEQ ID NO: 29600 - protein, 11 aa, Homo Sapiens
RILEAWEMNEK

SEQ ID NO: 29601 - protein, 11 aa, Homo Sapiens
RIMDPDVITGY

SEQ ID NO: 29602 - protein, 11 aa, Homo Sapiens
RIMSETYMLIK

SEQ ID NO: 29603 - protein, 11 aa, Homo Sapiens
RIQEAGTEVVK

SEQ ID NO: 29604 - protein, 11 aa, Homo Sapiens
RIQELEDLLAK

SEQ ID NO: 29605 - protein, 11 aa, Homo Sapiens
RLADKSVLVCK

SEQ ID NO: 29606 - protein, 11 aa, Homo Sapiens
RLINTQAIFAK

SEQ ID NO: 29607 - protein, 11 aa, Homo Sapiens
RQLEEKDRVLK

SEQ ID NO: 29608 - protein, 11 aa, Homo Sapiens
RSFPWQSLEAK

SEQ ID NO: 29609 - protein, 11 aa, Homo Sapiens
RSIQVDGKTIK

SEQ ID NO: 29610 - protein, 11 aa, Homo Sapiens
RSMEAHNILSK

SEQ ID NO: 29611 - protein, 11 aa, Homo Sapiens
RSMGDYAQTLK

SEQ ID NO: 29612 - protein, 11 aa, Homo Sapiens
RTFSWASVTSK

SEQ ID NO: 29613 - protein, 11 aa, Homo Sapiens
RTLGSDSVILK

SEQ ID NO: 29614 - protein, 11 aa, Homo Sapiens
RTMPLLSLHSR

SEQ ID NO: 29615 - protein, 11 aa, Homo Sapiens
RTQMPDPKTFK

SEQ ID NO: 29616 - protein, 11 aa, Homo Sapiens
RTSGSVYITLK

SEQ ID NO: 29617 - protein, 11 aa, Homo Sapiens
RVADRLYGVYK

SEQ ID NO: 29618 - protein, 11 aa, Homo Sapiens
RVANHQKDLFR

SEQ ID NO: 29619 - protein, 11 aa, Homo Sapiens
RVAPAHGLFLK

SEQ ID NO: 29620 - protein, 11 aa, Homo Sapiens
RVAPRSGLAAK

SEQ ID NO: 29621 - protein, 11 aa, Homo Sapiens
RVFAAESIIKR

SEQ ID NO: 29622 - protein, 11 aa, Homo Sapiens
RVFQETQKLKK

SEQ ID NO: 29623 - protein, 11 aa, Homo Sapiens
RVFTTVGSAEK

SEQ ID NO: 29624 - protein, 11 aa, Homo Sapiens
RVIEDNEYTAR

SEQ ID NO: 29625 - protein, 11 aa, Homo Sapiens
RVINEEYKIWK

SEQ ID NO: 29626 - protein, 11 aa, Homo Sapiens
RVITEEEKNFK

SEQ ID NO: 29627 - protein, 11 aa, Homo Sapiens
RVIVNHRIYYK

SEQ ID NO: 29628 - protein, 11 aa, Homo Sapiens
RVLDALVAREK

SEQ ID NO: 29629 - protein, 11 aa, Homo Sapiens
RVLDTNDRFLR

SEQ ID NO: 29630 - protein, 11 aa, Homo Sapiens
RVLPSSLMLPK

SEQ ID NO: 29631 - protein, 11 aa, Homo Sapiens
RVPWVKMILNK

SEQ ID NO: 29632 - protein, 11 aa, Homo Sapiens
RVQEAVESMVK

SEQ ID NO: 29633 - protein, 11 aa, Homo Sapiens
RVQPGLLQWVK

SEQ ID NO: 29634 - protein, 11 aa, Homo Sapiens
RVSTEVTLAVK

SEQ ID NO: 29635 - protein, 11 aa, Homo Sapiens
RVVDGKDLTTK

SEQ ID NO: 29636 - protein, 11 aa, Homo Sapiens
RVWPGTKMPGK

SEQ ID NO: 29637 - protein, 11 aa, Homo Sapiens
RVYAENAIRKK

SEQ ID NO: 29638 - protein, 11 aa, Homo Sapiens
RVYDPASPQRR

SEQ ID NO: 29639 - protein, 11 aa, Homo Sapiens
RVYSPPEWISR

SEQ ID NO: 29640 - protein, 11 aa, Homo Sapiens
RVYWSTTDARK

SEQ ID NO: 29641 - protein, 11 aa, Homo Sapiens
SAAAATAELLK

SEQ ID NO: 29642 - protein, 11 aa, Homo Sapiens
SAEPAAVIVEK

SEQ ID NO: 29643 - protein, 11 aa, Homo Sapiens
SAFKADPKISK

SEQ ID NO: 29644 - protein, 11 aa, Homo Sapiens
SAFPESDNLFK

SEQ ID NO: 29645 - protein, 11 aa, Homo Sapiens
SAIDSVNATSK

SEQ ID NO: 29646 - protein, 11 aa, Homo Sapiens
SAINDKSIVKK

SEQ ID NO: 29647 - protein, 11 aa, Homo Sapiens
SALEGFKVMCK

SEQ ID NO: 29648 - protein, 11 aa, Homo Sapiens
SALTDKAIVKK

SEQ ID NO: 29649 - protein, 11 aa, Homo Sapiens
SICENARRYAK

SEQ ID NO: 29650 - protein, 11 aa, Homo Sapiens
SIDERMKKLGK

SEQ ID NO: 29651 - protein, 11 aa, Homo Sapiens
SIFDDFAHYEK

SEQ ID NO: 29652 - protein, 11 aa, Homo Sapiens
SIFDDFSHYEK

SEQ ID NO: 29653 - protein, 11 aa, Homo Sapiens
SIFEPAKGGEK

SEQ ID NO: 29654 - protein, 11 aa, Homo Sapiens
SIFIGGSFILK

SEQ ID NO: 29655 - protein, 11 aa, Homo Sapiens
SIHDARSWVPK

SEQ ID NO: 29656 - protein, 11 aa, Homo Sapiens
SIIGKKGESVK

SEQ ID NO: 29657 - protein, 11 aa, Homo Sapiens
SIIPRGSLSLK

SEQ ID NO: 29658 - protein, 11 aa, Homo Sapiens
SILEDYANYKK

SEQ ID NO: 29659 - protein, 11 aa, Homo Sapiens
SILGEAEYIQR

SEQ ID NO: 29660 - protein, 11 aa, Homo Sapiens
SILKTPLPKKI

SEQ ID NO: 29661 - protein, 11 aa, Homo Sapiens
SIMKCDVDIRK

SEQ ID NO: 29662 - protein, 11 aa, Homo Sapiens
SIPEPIDPLFK

SEQ ID NO: 29663 - protein, 11 aa, Homo Sapiens
SIQEPSFRMEK

SEQ ID NO: 29664 - protein, 11 aa, Homo Sapiens
SIQEYWKCVKK

SEQ ID NO: 29665 - protein, 11 aa, Homo Sapiens
SIQGVSTVTVK

SEQ ID NO: 29666 - protein, 11 aa, Homo Sapiens
SISDVGFGMLK

SEQ ID NO: 29667 - protein, 11 aa, Homo Sapiens
SIYRPSKNLDK

SEQ ID NO: 29668 - protein, 11 aa, Homo Sapiens
SLLTPILGIQK

SEQ ID NO: 29669 - protein, 11 aa, Homo Sapiens
SLYSVPEGQSK

SEQ ID NO: 29670 - protein, 11 aa, Homo Sapiens
SMLPGSGSVPK

SEQ ID NO: 29671 - protein, 11 aa, Homo Sapiens
SMMDVDHQIAK

SEQ ID NO: 29672 - protein, 11 aa, Homo Sapiens
SQFLAPKAMKK

SEQ ID NO: 29673 - protein, 11 aa, Homo Sapiens
SQISSGTQVEK

SEQ ID NO: 29674 - protein, 11 aa, Homo Sapiens
SQMIGKKLFTK

SEQ ID NO: 29675 - protein, 11 aa, Homo Sapiens
SSADAILGNPK

SEQ ID NO: 29676 - protein, 11 aa, Homo Sapiens
SSASALTGLTK

SEQ ID NO: 29677 - protein, 11 aa, Homo Sapiens
SSASANDVRKK

SEQ ID NO: 29678 - protein, 11 aa, Homo Sapiens
SSATLNSIVAK

SEQ ID NO: 29679 - protein, 11 aa, Homo Sapiens
SSINEARINAK

SEQ ID NO: 29680 - protein, 11 aa, Homo Sapiens
SSLPKKLALLK

SEQ ID NO: 29681 - protein, 11 aa, Homo Sapiens
SSLPSEPIFEK

SEQ ID NO: 29682 - protein, 11 aa, Homo Sapiens
SSLPTVGVFAK

SEQ ID NO: 29683 - protein, 11 aa, Homo Sapiens
SSLSAEAIRQR

SEQ ID NO: 29684 - protein, 11 aa, Homo Sapiens
SSLSGEELVTK

SEQ ID NO: 29685 - protein, 11 aa, Homo Sapiens
SSMTEEEQIAY

SEQ ID NO: 29686 - protein, 11 aa, Homo Sapiens
SSMVGVNLPQK

SEQ ID NO: 29687 - protein, 11 aa, Homo Sapiens
STAKPPKEILK

SEQ ID NO: 29688 - protein, 11 aa, Homo Sapiens
STAKVSPLTPK

SEQ ID NO: 29689 - protein, 11 aa, Homo Sapiens
STASEDQIVSK

SEQ ID NO: 29690 - protein, 11 aa, Homo Sapiens
STAVVVAELLK

SEQ ID NO: 29691 - protein, 11 aa, Homo Sapiens
STDPVAASIMK

SEQ ID NO: 29692 - protein, 11 aa, Homo Sapiens
STFEQCQEWLK

SEQ ID NO: 29693 - protein, 11 aa, Homo Sapiens
STFEVNSINPK

SEQ ID NO: 29694 - protein, 11 aa, Homo Sapiens
STFGGLHQHER

SEQ ID NO: 29695 - protein, 11 aa, Homo Sapiens
STFKLKSEVNK

SEQ ID NO: 29696 - protein, 11 aa, Homo Sapiens
STFQPANKLNK

SEQ ID NO: 29697 - protein, 11 aa, Homo Sapiens
STFQYDRFFEK

SEQ ID NO: 29698 - protein, 11 aa, Homo Sapiens
STFSTLVTVLK

SEQ ID NO: 29699 - protein, 11 aa, Homo Sapiens
STIAILNSVKK

SEQ ID NO: 29700 - protein, 11 aa, Homo Sapiens
STIPPELVKQK

SEQ ID NO: 29701 - protein, 11 aa, Homo Sapiens
STLPALTALQK

SEQ ID NO: 29702 - protein, 11 aa, Homo Sapiens
STLPGQSLIDK

SEQ ID NO: 29703 - protein, 11 aa, Homo Sapiens
STMELDEALRK

SEQ ID NO: 29704 - protein, 11 aa, Homo Sapiens
STMKTNLESLK

SEQ ID NO: 29705 - protein, 11 aa, Homo Sapiens
STMPHTSGMNR

SEQ ID NO: 29706 - protein, 11 aa, Homo Sapiens
STMVDVRVMKK

SEQ ID NO: 29707 - protein, 11 aa, Homo Sapiens
STMYPGLPSRL

SEQ ID NO: 29708 - protein, 11 aa, Homo Sapiens
STQLEDSLLGK

SEQ ID NO: 29709 - protein, 11 aa, Homo Sapiens
STQRDLWNIFK

SEQ ID NO: 29710 - protein, 11 aa, Homo Sapiens
STTEELHKYQK

SEQ ID NO: 29711 - protein, 11 aa, Homo Sapiens
STVAPPQGVVK

SEQ ID NO: 29712 - protein, 11 aa, Homo Sapiens
STVGAGAYAYK

SEQ ID NO: 29713 - protein, 11 aa, Homo Sapiens
STYAPIGEVHK

SEQ ID NO: 29714 - protein, 11 aa, Homo Sapiens
STYATTIRDSK

SEQ ID NO: 29715 - protein, 11 aa, Homo Sapiens
STYPAQNGQVK

SEQ ID NO: 29716 - protein, 11 aa, Homo Sapiens
STYPPEIVVPK

SEQ ID NO: 29717 - protein, 11 aa, Homo Sapiens
SVADLAESIMK

SEQ ID NO: 29718 - protein, 11 aa, Homo Sapiens
SVAPARAQPPK

SEQ ID NO: 29719 - protein, 11 aa, Homo Sapiens
SVCSSGPEYLK

SEQ ID NO: 29720 - protein, 11 aa, Homo Sapiens
SVDEESYKTLK

SEQ ID NO: 29721 - protein, 11 aa, Homo Sapiens
SVEERITQVAK

SEQ ID NO: 29722 - protein, 11 aa, Homo Sapiens
SVFDSSSDMEK

SEQ ID NO: 29723 - protein, 11 aa, Homo Sapiens
SVFEVDGKKNK

SEQ ID NO: 29724 - protein, 11 aa, Homo Sapiens
SVFFPESGLAK

SEQ ID NO: 29725 - protein, 11 aa, Homo Sapiens
SVFQTTDTKSK

SEQ ID NO: 29726 - protein, 11 aa, Homo Sapiens
SVFTNERFPLR

SEQ ID NO: 29727 - protein, 11 aa, Homo Sapiens
SVGGREILKGK

SEQ ID NO: 29728 - protein, 11 aa, Homo Sapiens
SVIDRKDLIIK

SEQ ID NO: 29729 - protein, 11 aa, Homo Sapiens
SVIGASSQFTR

SEQ ID NO: 29730 - protein, 11 aa, Homo Sapiens
SVIGFRILLLK

SEQ ID NO: 29731 - protein, 11 aa, Homo Sapiens
SVIISPFPGLK

SEQ ID NO: 29732 - protein, 11 aa, Homo Sapiens
SVISIMKPVRK

SEQ ID NO: 29733 - protein, 11 aa, Homo Sapiens
SVKPGAHLTVK

SEQ ID NO: 29734 - protein, 11 aa, Homo Sapiens
SVKSVPENLLK

SEQ ID NO: 29735 - protein, 11 aa, Homo Sapiens
SVLEATRVNRR

SEQ ID NO: 29736 - protein, 11 aa, Homo Sapiens
SVLGKDEQINK

SEQ ID NO: 29737 - protein, 11 aa, Homo Sapiens
SVLGKGSMRDK

SEQ ID NO: 29738 - protein, 11 aa, Homo Sapiens
SVLGKVNEIAK

SEQ ID NO: 29739 - protein, 11 aa, Homo Sapiens
SVMEVNSGIYR

SEQ ID NO: 29740 - protein, 11 aa, Homo Sapiens
SVNPGMARWIK

SEQ ID NO: 29741 - protein, 11 aa, Homo Sapiens
SVNVDYSKLKK

SEQ ID NO: 29742 - protein, 11 aa, Homo Sapiens
SVPEAGGPPIK

SEQ ID NO: 29743 - protein, 11 aa, Homo Sapiens
SVPEFPLSPPK

SEQ ID NO: 29744 - protein, 11 aa, Homo Sapiens
SVPLSDALLNK

SEQ ID NO: 29745 - protein, 11 aa, Homo Sapiens
SVPRDGASYPK

SEQ ID NO: 29746 - protein, 11 aa, Homo Sapiens
SVPSSETVICR

SEQ ID NO: 29747 - protein, 11 aa, Homo Sapiens
SVQKEVEKNLK

SEQ ID NO: 29748 - protein, 11 aa, Homo Sapiens
SVQPAANCSIK

SEQ ID NO: 29749 - protein, 11 aa, Homo Sapiens
SVQPSSSLSAR

SEQ ID NO: 29750 - protein, 11 aa, Homo Sapiens
SVQTADHRFLR

SEQ ID NO: 29751 - protein, 11 aa, Homo Sapiens
SVQVPRNLVGK

SEQ ID NO: 29752 - protein, 11 aa, Homo Sapiens
SVYDHQGIFKR

SEQ ID NO: 29753 - protein, 11 aa, Homo Sapiens
SVYGEWVPVEK

SEQ ID NO: 29754 - protein, 11 aa, Homo Sapiens
SVYGGGGIHEY

SEQ ID NO: 29755 - protein, 11 aa, Homo Sapiens
SVYPMPRVIFR

SEQ ID NO: 29756 - protein, 11 aa, Homo Sapiens
SVYSETVDLIK

SEQ ID NO: 29757 - protein, 11 aa, Homo Sapiens
SVYSPESNVRK

SEQ ID NO: 29758 - protein, 11 aa, Homo Sapiens
SVYSPESSVRK

SEQ ID NO: 29759 - protein, 11 aa, Homo Sapiens
SVYYNEATGGK

SEQ ID NO: 29760 - protein, 11 aa, Homo Sapiens
TAGDGLIELRK

SEQ ID NO: 29761 - protein, 11 aa, Homo Sapiens
TIFDLSEVLCK

SEQ ID NO: 29762 - protein, 11 aa, Homo Sapiens
TIMPKDIQLAR

SEQ ID NO: 29763 - protein, 11 aa, Homo Sapiens
TTQGELIKHYK

SEQ ID NO: 29764 - protein, 11 aa, Homo Sapiens
TVDKNMPKFNK

SEQ ID NO: 29765 - protein, 11 aa, Homo Sapiens
TVFDAKRLIGR

SEQ ID NO: 29766 - protein, 11 aa, Homo Sapiens
TVFPKAKQVKK

SEQ ID NO: 29767 - protein, 11 aa, Homo Sapiens
TVIQLQNIAEK

SEQ ID NO: 29768 - protein, 11 aa, Homo Sapiens
TVIRDVEQQFK

SEQ ID NO: 29769 - protein, 11 aa, Homo Sapiens
TVISAVGTIVK

SEQ ID NO: 29770 - protein, 11 aa, Homo Sapiens
TVISQEPFVPK

SEQ ID NO: 29771 - protein, 11 aa, Homo Sapiens
TVLEKFRYLPK

SEQ ID NO: 29772 - protein, 11 aa, Homo Sapiens
TVLGGVYILGK

SEQ ID NO: 29773 - protein, 11 aa, Homo Sapiens
TVMELVKIIYK

SEQ ID NO: 29774 - protein, 11 aa, Homo Sapiens
TVSEVIQGLLK

SEQ ID NO: 29775 - protein, 11 aa, Homo Sapiens
TVYPKPEEWPK

SEQ ID NO: 29776 - protein, 11 aa, Homo Sapiens
VAVAGVVLAKG

SEQ ID NO: 29777 - protein, 11 aa, Homo Sapiens
VGLSKCEIKVA

SEQ ID NO: 29778 - protein, 11 aa, Homo Sapiens
VILPPLSPYFK

SEQ ID NO: 29779 - protein, 11 aa, Homo Sapiens
VLAPEGSVPNK

SEQ ID NO: 29780 - protein, 11 aa, Homo Sapiens
VLQAADILLYK

SEQ ID NO: 29781 - protein, 11 aa, Homo Sapiens
VLSAADKGNVK

SEQ ID NO: 29782 - protein, 11 aa, Homo Sapiens
VQEDQRDLIFK

SEQ ID NO: 29783 - protein, 11 aa, Homo Sapiens
VSDPSSPQYGK

SEQ ID NO: 29784 - protein, 11 aa, Homo Sapiens
VSSPVSAWKTS

SEQ ID NO: 29785 - protein, 11 aa, Homo Sapiens
VSTASLTSVPS

SEQ ID NO: 29786 - protein, 11 aa, Homo Sapiens
VTDPSIPIRKK

SEQ ID NO: 29787 - protein, 11 aa, Homo Sapiens
VTFEDQQKINK

SEQ ID NO: 29788 - protein, 11 aa, Homo Sapiens
VTFPDIIRNYK

SEQ ID NO: 29789 - protein, 11 aa, Homo Sapiens
VTLDKDAYYRR

SEQ ID NO: 29790 - protein, 11 aa, Homo Sapiens
VTMSKKLLIEK

SEQ ID NO: 29791 - protein, 11 aa, Homo Sapiens
VTMTMSSIVMK

SEQ ID NO: 29792 - protein, 11 aa, Homo Sapiens
VTQPTVGMNFK

SEQ ID NO: 29793 - protein, 11 aa, Homo Sapiens
VTSTESMDFLK

SEQ ID NO: 29794 - protein, 11 aa, Homo Sapiens
VTVGVDGTLYK

SEQ ID NO: 29795 - protein, 11 aa, Homo Sapiens
VVCDNGTGFVK

SEQ ID NO: 29796 - protein, 11 aa, Homo Sapiens
VVCPVSDILYK

SEQ ID NO: 29797 - protein, 11 aa, Homo Sapiens
VVFAVKQYISK

SEQ ID NO: 29798 - protein, 11 aa, Homo Sapiens
VVFDTSLQVKK

SEQ ID NO: 29799 - protein, 11 aa, Homo Sapiens
VVFSGKAYSPK

SEQ ID NO: 29800 - protein, 11 aa, Homo Sapiens
VVFVIDPGFAK

SEQ ID NO: 29801 - protein, 11 aa, Homo Sapiens
VVIGRSGEMIK

SEQ ID NO: 29802 - protein, 11 aa, Homo Sapiens
VVMAADRSLKK

SEQ ID NO: 29803 - protein, 11 aa, Homo Sapiens
VVMKASSSLPK

SEQ ID NO: 29804 - protein, 11 aa, Homo Sapiens
VVMNYSEIESK

SEQ ID NO: 29805 - protein, 11 aa, Homo Sapiens
VVMTPVPLFSK

SEQ ID NO: 29806 - protein, 11 aa, Homo Sapiens
VVQDGITLITK

SEQ ID NO: 29807 - protein, 11 aa, Homo Sapiens
VVQWADLVICK

SEQ ID NO: 29808 - protein, 11 aa, Homo Sapiens
VVSPSSFENVK

SEQ ID NO: 29809 - protein, 11 aa, Homo Sapiens
VVVDEADTMLK

SEQ ID NO: 29810 - protein, 11 aa, Homo Sapiens
VVVGVYRPPPK

SEQ ID NO: 29811 - protein, 11 aa, Homo Sapiens
VVYSGLENIKK

SEQ ID NO: 29812 - protein, 11 aa, Homo Sapiens
YDGHAGSQVAK

SEQ ID NO: 29813 - protein, 8 aa, Homo Sapiens
APEEHPVL

SEQ ID NO: 29814 - protein, 8 aa, Homo Sapiens
FERELGVK

SEQ ID NO: 29815 - protein, 8 aa, Homo Sapiens
FPTISLEF

SEQ ID NO: 29816 - protein, 8 aa, Homo Sapiens
GLQFPVGR

SEQ ID NO: 29817 - protein, 8 aa, Homo Sapiens
GPPPPGKP

SEQ ID NO: 29818 - protein, 8 aa, Homo Sapiens
IYSKTTRF

SEQ ID NO: 29819 - protein, 8 aa, Homo Sapiens
KYGPIRQI

SEQ ID NO: 29820 - protein, 8 aa, Homo Sapiens
KYGPVFSF

SEQ ID NO: 29821 - protein, 8 aa, Homo Sapiens
KYLHQSIM

SEQ ID NO: 29822 - protein, 8 aa, Homo Sapiens
LLPGELAK

SEQ ID NO: 29823 - protein, 8 aa, Homo Sapiens
LLTTAKNL

SEQ ID NO: 29824 - protein, 8 aa, Homo Sapiens
LPKLYVKL

SEQ ID NO: 29825 - protein, 8 aa, Homo Sapiens
PPPPPGKP

SEQ ID NO: 29826 - protein, 8 aa, Homo Sapiens
QILVGVNK

SEQ ID NO: 29827 - protein, 8 aa, Homo Sapiens
RVDPVNFK

SEQ ID NO: 29828 - protein, 8 aa, Homo Sapiens
VANEVTLN

SEQ ID NO: 29829 - protein, 8 aa, Homo Sapiens
VFFKGFKW

SEQ ID NO: 29830 - protein, 8 aa, Homo Sapiens
VHLTPEEK

SEQ ID NO: 29831 - protein, 8 aa, Homo Sapiens
VSLTACKV

SEQ ID NO: 29832 - protein, 8 aa, Homo Sapiens
WISKQEYD

SEQ ID NO: 29833 - protein, 8 aa, Homo Sapiens
YVHMVTHF

SEQ ID NO: 29834 - protein, 8 aa, Homo Sapiens
YWSHPRKF

SEQ ID NO: 29835 - protein, 9 aa, Homo Sapiens
AAPTSAAAL

SEQ ID NO: 29836 - protein, 9 aa, Homo Sapiens
AAPVPTTTL

SEQ ID NO: 29837 - protein, 9 aa, Homo Sapiens
AFADVSVKF

SEQ ID NO: 29838 - protein, 9 aa, Homo Sapiens
AFIDRHPRL

SEQ ID NO: 29839 - protein, 9 aa, Homo Sapiens
AFIEKHWTF

SEQ ID NO: 29840 - protein, 9 aa, Homo Sapiens
AFIKIKMAF

SEQ ID NO: 29841 - protein, 9 aa, Homo Sapiens
AFIKRTPVI

SEQ ID NO: 29842 - protein, 9 aa, Homo Sapiens
AFINKFVQF

SEQ ID NO: 29843 - protein, 9 aa, Homo Sapiens
AFIPAIDSF

SEQ ID NO: 29844 - protein, 9 aa, Homo Sapiens
AFLDVVSKL

SEQ ID NO: 29845 - protein, 9 aa, Homo Sapiens
AFLTPSYTW

SEQ ID NO: 29846 - protein, 9 aa, Homo Sapiens
AFMKGVFTF

SEQ ID NO: 29847 - protein, 9 aa, Homo Sapiens
AGLDIFAKF

SEQ ID NO: 29848 - protein, 9 aa, Homo Sapiens
AHIGVMVEF

SEQ ID NO: 29849 - protein, 9 aa, Homo Sapiens
ALKKQSWRF

SEQ ID NO: 29850 - protein, 9 aa, Homo Sapiens
ALPDQSFLW

SEQ ID NO: 29851 - protein, 9 aa, Homo Sapiens
ALPKELPLI

SEQ ID NO: 29852 - protein, 9 aa, Homo Sapiens
ALPSKLPTF

SEQ ID NO: 29853 - protein, 9 aa, Homo Sapiens
ALPSKVPAF

SEQ ID NO: 29854 - protein, 9 aa, Homo Sapiens
ALSSVYLLL

SEQ ID NO: 29855 - protein, 9 aa, Homo Sapiens
AMLGVNPRF

SEQ ID NO: 29856 - protein, 9 aa, Homo Sapiens
AMLPLVLHW

SEQ ID NO: 29857 - protein, 9 aa, Homo Sapiens
AQLRQYHRL

SEQ ID NO: 29858 - protein, 9 aa, Homo Sapiens
AYADVQAVL

SEQ ID NO: 29859 - protein, 9 aa, Homo Sapiens
AYAIIKEEL

SEQ ID NO: 29860 - protein, 9 aa, Homo Sapiens
AYALLLQHL

SEQ ID NO: 29861 - protein, 9 aa, Homo Sapiens
AYATHPFKF

SEQ ID NO: 29862 - protein, 9 aa, Homo Sapiens
AYDTVRWEF

SEQ ID NO: 29863 - protein, 9 aa, Homo Sapiens
AYEHKFYEI

SEQ ID NO: 29864 - protein, 9 aa, Homo Sapiens
AYGHFSYEF

SEQ ID NO: 29865 - protein, 9 aa, Homo Sapiens
AYGKDFHLI

SEQ ID NO: 29866 - protein, 9 aa, Homo Sapiens
AYGLVSATF

SEQ ID NO: 29867 - protein, 9 aa, Homo Sapiens
AYGNVFSAF

SEQ ID NO: 29868 - protein, 9 aa, Homo Sapiens
AYGQVVFRL

SEQ ID NO: 29869 - protein, 9 aa, Homo Sapiens
AYGSLFNTI

SEQ ID NO: 29870 - protein, 9 aa, Homo Sapiens
AYGWVSATF

SEQ ID NO: 29871 - protein, 9 aa, Homo Sapiens
AYHNSPAYL

SEQ ID NO: 29872 - protein, 9 aa, Homo Sapiens
AYIADHLGF

SEQ ID NO: 29873 - protein, 9 aa, Homo Sapiens
AYIDYLSHL

SEQ ID NO: 29874 - protein, 9 aa, Homo Sapiens
AYIERMNSI

SEQ ID NO: 29875 - protein, 9 aa, Homo Sapiens
AYIERMNYI

SEQ ID NO: 29876 - protein, 9 aa, Homo Sapiens
AYIFIHRKW

SEQ ID NO: 29877 - protein, 9 aa, Homo Sapiens
AYIGFIQSL

SEQ ID NO: 29878 - protein, 9 aa, Homo Sapiens
AYIHCVSAF

SEQ ID NO: 29879 - protein, 9 aa, Homo Sapiens
AYIKGGWIL

SEQ ID NO: 29880 - protein, 9 aa, Homo Sapiens
AYINKVEEL

SEQ ID NO: 29881 - protein, 9 aa, Homo Sapiens
AYIPKLLQL

SEQ ID NO: 29882 - protein, 9 aa, Homo Sapiens
AYIPLNNYL

SEQ ID NO: 29883 - protein, 9 aa, Homo Sapiens
AYIPTPIYF

SEQ ID NO: 29884 - protein, 9 aa, Homo Sapiens
AYISGLDVF

SEQ ID NO: 29885 - protein, 9 aa, Homo Sapiens
AYITGLCFI

SEQ ID NO: 29886 - protein, 9 aa, Homo Sapiens
AYITQKVEF

SEQ ID NO: 29887 - protein, 9 aa, Homo Sapiens
AYKPGALTF

SEQ ID NO: 29888 - protein, 9 aa, Homo Sapiens
AYKYIQELW

SEQ ID NO: 29889 - protein, 9 aa, Homo Sapiens
AYLAQSPQL

SEQ ID NO: 29890 - protein, 9 aa, Homo Sapiens
AYLCYRFLF

SEQ ID NO: 29891 - protein, 9 aa, Homo Sapiens
AYLDALQTL

SEQ ID NO: 29892 - protein, 9 aa, Homo Sapiens
AYLDKISEL

SEQ ID NO: 29893 - protein, 9 aa, Homo Sapiens
AYLDKSPQF

SEQ ID NO: 29894 - protein, 9 aa, Homo Sapiens
AYLEAHETF

SEQ ID NO: 29895 - protein, 9 aa, Homo Sapiens
AYLEAIHNF

SEQ ID NO: 29896 - protein, 9 aa, Homo Sapiens
AYLEALSHL

SEQ ID NO: 29897 - protein, 9 aa, Homo Sapiens
AYLEAYKEF

SEQ ID NO: 29898 - protein, 9 aa, Homo Sapiens
AYLESFYKF

SEQ ID NO: 29899 - protein, 9 aa, Homo Sapiens
AYLGHGYGF

SEQ ID NO: 29900 - protein, 9 aa, Homo Sapiens
AYLHSHALI

SEQ ID NO: 29901 - protein, 9 aa, Homo Sapiens
AYLHSHNMI

SEQ ID NO: 29902 - protein, 9 aa, Homo Sapiens
AYLIQVHKW

SEQ ID NO: 29903 - protein, 9 aa, Homo Sapiens
AYLKAIVLF

SEQ ID NO: 29904 - protein, 9 aa, Homo Sapiens
AYLKDLQKL

SEQ ID NO: 29905 - protein, 9 aa, Homo Sapiens
AYLKWISQI

SEQ ID NO: 29906 - protein, 9 aa, Homo Sapiens
AYLLFYERI

SEQ ID NO: 29907 - protein, 9 aa, Homo Sapiens
AYLNITKHL

SEQ ID NO: 29908 - protein, 9 aa, Homo Sapiens
AYLPKMMTL

SEQ ID NO: 29909 - protein, 9 aa, Homo Sapiens
AYLPTGKQF

SEQ ID NO: 29910 - protein, 9 aa, Homo Sapiens
AYLPVNESF

SEQ ID NO: 29911 - protein, 9 aa, Homo Sapiens
AYLQLFTKL

SEQ ID NO: 29912 - protein, 9 aa, Homo Sapiens
AYLSKAMEI

SEQ ID NO: 29913 - protein, 9 aa, Homo Sapiens
AYLTEHEKI

SEQ ID NO: 29914 - protein, 9 aa, Homo Sapiens
AYLTHHQRI

SEQ ID NO: 29915 - protein, 9 aa, Homo Sapiens
AYLTLTSRM

SEQ ID NO: 29916 - protein, 9 aa, Homo Sapiens
AYLTVHQRI

SEQ ID NO: 29917 - protein, 9 aa, Homo Sapiens
AYLVNTYAL

SEQ ID NO: 29918 - protein, 9 aa, Homo Sapiens
AYMERMNYI

SEQ ID NO: 29919 - protein, 9 aa, Homo Sapiens
AYMPHTFFI

SEQ ID NO: 29920 - protein, 9 aa, Homo Sapiens
AYNAVVRYF

SEQ ID NO: 29921 - protein, 9 aa, Homo Sapiens
AYNPNTQTF

SEQ ID NO: 29922 - protein, 9 aa, Homo Sapiens
AYPAIRYLL

SEQ ID NO: 29923 - protein, 9 aa, Homo Sapiens
AYPDKNFTL

SEQ ID NO: 29924 - protein, 9 aa, Homo Sapiens
AYPEYLITF

SEQ ID NO: 29925 - protein, 9 aa, Homo Sapiens
AYPHNLMTF

SEQ ID NO: 29926 - protein, 9 aa, Homo Sapiens
AYPTAYPSF

SEQ ID NO: 29927 - protein, 9 aa, Homo Sapiens
AYQDRLAYL

SEQ ID NO: 29928 - protein, 9 aa, Homo Sapiens
AYQHLFYLL

SEQ ID NO: 29929 - protein, 9 aa, Homo Sapiens
AYQSIQNYL

SEQ ID NO: 29930 - protein, 9 aa, Homo Sapiens
AYSEAIFEL

SEQ ID NO: 29931 - protein, 9 aa, Homo Sapiens
AYSNCQHDF

SEQ ID NO: 29932 - protein, 9 aa, Homo Sapiens
AYSPRHYVI

SEQ ID NO: 29933 - protein, 9 aa, Homo Sapiens
AYTDCIPQL

SEQ ID NO: 29934 - protein, 9 aa, Homo Sapiens
AYTLLLHTW

SEQ ID NO: 29935 - protein, 9 aa, Homo Sapiens
AYTPFHAVL

SEQ ID NO: 29936 - protein, 9 aa, Homo Sapiens
AYTPVLNQF

SEQ ID NO: 29937 - protein, 9 aa, Homo Sapiens
AYVDIHTGL

SEQ ID NO: 29938 - protein, 9 aa, Homo Sapiens
AYVDKLEEL

SEQ ID NO: 29939 - protein, 9 aa, Homo Sapiens
AYVEKVEKL

SEQ ID NO: 29940 - protein, 9 aa, Homo Sapiens
AYVELVHHI

SEQ ID NO: 29941 - protein, 9 aa, Homo Sapiens
AYVGDLQTL

SEQ ID NO: 29942 - protein, 9 aa, Homo Sapiens
AYVGDVPIL

SEQ ID NO: 29943 - protein, 9 aa, Homo Sapiens
AYVHMVTHF

SEQ ID NO: 29944 - protein, 9 aa, Homo Sapiens
AYVPGFAHI

SEQ ID NO: 29945 - protein, 9 aa, Homo Sapiens
AYVQIKTIW

SEQ ID NO: 29946 - protein, 9 aa, Homo Sapiens
AYVTLAAHF

SEQ ID NO: 29947 - protein, 9 aa, Homo Sapiens
AYVTVLEGF

SEQ ID NO: 29948 - protein, 9 aa, Homo Sapiens
AYYEHRLQL

SEQ ID NO: 29949 - protein, 9 aa, Homo Sapiens
AYYEIRYQF

SEQ ID NO: 29950 - protein, 9 aa, Homo Sapiens
AYYGNINFF

SEQ ID NO: 29951 - protein, 9 aa, Homo Sapiens
AYYGNISHF

SEQ ID NO: 29952 - protein, 9 aa, Homo Sapiens
CFFTAKTTF

SEQ ID NO: 29953 - protein, 9 aa, Homo Sapiens
CMPVFHPRF

SEQ ID NO: 29954 - protein, 9 aa, Homo Sapiens
CWLPLRASF

SEQ ID NO: 29955 - protein, 9 aa, Homo Sapiens
CYATQSHQW

SEQ ID NO: 29956 - protein, 9 aa, Homo Sapiens
CYGDITIHF

SEQ ID NO: 29957 - protein, 9 aa, Homo Sapiens
CYIKILHQL

SEQ ID NO: 29958 - protein, 9 aa, Homo Sapiens
CYLDKPEEW

SEQ ID NO: 29959 - protein, 9 aa, Homo Sapiens
CYLERHTFL

SEQ ID NO: 29960 - protein, 9 aa, Homo Sapiens
CYLLQVDEF

SEQ ID NO: 29961 - protein, 9 aa, Homo Sapiens
CYLVIIRTL

SEQ ID NO: 29962 - protein, 9 aa, Homo Sapiens
CYNGSTNRF

SEQ ID NO: 29963 - protein, 9 aa, Homo Sapiens
CYNPEFEKL

SEQ ID NO: 29964 - protein, 9 aa, Homo Sapiens
CYNPHTDHW

SEQ ID NO: 29965 - protein, 9 aa, Homo Sapiens
CYNPMTNQW

SEQ ID NO: 29966 - protein, 9 aa, Homo Sapiens
CYQEVSQCF

SEQ ID NO: 29967 - protein, 9 aa, Homo Sapiens
CYTATILKL

SEQ ID NO: 29968 - protein, 9 aa, Homo Sapiens
CYTDFHVDF

SEQ ID NO: 29969 - protein, 9 aa, Homo Sapiens
CYVGVVHRL

SEQ ID NO: 29970 - protein, 9 aa, Homo Sapiens
CYVIYFTKL

SEQ ID NO: 29971 - protein, 9 aa, Homo Sapiens
CYVKDLSRL

SEQ ID NO: 29972 - protein, 9 aa, Homo Sapiens
CYVQPQWVF

SEQ ID NO: 29973 - protein, 9 aa, Homo Sapiens
CYYPFRTFF

SEQ ID NO: 29974 - protein, 9 aa, Homo Sapiens
DESGPSIVH

SEQ ID NO: 29975 - protein, 9 aa, Homo Sapiens
DFPTISLEF

SEQ ID NO: 29976 - protein, 9 aa, Homo Sapiens
DYAEVSNTF

SEQ ID NO: 29977 - protein, 9 aa, Homo Sapiens
DYFVPLHHF

SEQ ID NO: 29978 - protein, 9 aa, Homo Sapiens
DYIAVNPHL

SEQ ID NO: 29979 - protein, 9 aa, Homo Sapiens
DYIDSSWEL

SEQ ID NO: 29980 - protein, 9 aa, Homo Sapiens
DYIDTIWKI

SEQ ID NO: 29981 - protein, 9 aa, Homo Sapiens
DYIPQLAKF

SEQ ID NO: 29982 - protein, 9 aa, Homo Sapiens
DYIQKHPEL

SEQ ID NO: 29983 - protein, 9 aa, Homo Sapiens
DYLKFKEKF

SEQ ID NO: 29984 - protein, 9 aa, Homo Sapiens
DYLPSFCKW

SEQ ID NO: 29985 - protein, 9 aa, Homo Sapiens
DYLQCVLQI

SEQ ID NO: 29986 - protein, 9 aa, Homo Sapiens
DYLQEVPIL

SEQ ID NO: 29987 - protein, 9 aa, Homo Sapiens
DYNFVFTSF

SEQ ID NO: 29988 - protein, 9 aa, Homo Sapiens
DYSSILQKF

SEQ ID NO: 29989 - protein, 9 aa, Homo Sapiens
DYVEGLRVF

SEQ ID NO: 29990 - protein, 9 aa, Homo Sapiens
EFITVHSML

SEQ ID NO: 29991 - protein, 9 aa, Homo Sapiens
EFLKYFGTF

SEQ ID NO: 29992 - protein, 9 aa, Homo Sapiens
EFLPVTPIL

SEQ ID NO: 29993 - protein, 9 aa, Homo Sapiens
EFLRQLLTF

SEQ ID NO: 29994 - protein, 9 aa, Homo Sapiens
EFLTKTAKF

SEQ ID NO: 29995 - protein, 9 aa, Homo Sapiens
EFPSIKTEF

SEQ ID NO: 29996 - protein, 9 aa, Homo Sapiens
EFVAKGHLF

SEQ ID NO: 29997 - protein, 9 aa, Homo Sapiens
ELPKHYFSF

SEQ ID NO: 29998 - protein, 9 aa, Homo Sapiens
EPSVSIPFL

SEQ ID NO: 29999 - protein, 9 aa, Homo Sapiens
EQIKEYHHL

SEQ ID NO: 30000 - protein, 9 aa, Homo Sapiens
EQPETYYKW

SEQ ID NO: 30001 - protein, 9 aa, Homo Sapiens
EWIPLAWKW

SEQ ID NO: 30002 - protein, 9 aa, Homo Sapiens
EWISFGHRF

SEQ ID NO: 30003 - protein, 9 aa, Homo Sapiens
EYAHLFEVF

SEQ ID NO: 30004 - protein, 9 aa, Homo Sapiens
EYATKISRF

SEQ ID NO: 30005 - protein, 9 aa, Homo Sapiens
EYAVLTSTI

SEQ ID NO: 30006 - protein, 9 aa, Homo Sapiens
EYDLIVHQL

SEQ ID NO: 30007 - protein, 9 aa, Homo Sapiens
EYGENFPML

SEQ ID NO: 30008 - protein, 9 aa, Homo Sapiens
EYGQVNHAL

SEQ ID NO: 30009 - protein, 9 aa, Homo Sapiens
EYIAKQFGF

SEQ ID NO: 30010 - protein, 9 aa, Homo Sapiens
EYIAVVKKL

SEQ ID NO: 30011 - protein, 9 aa, Homo Sapiens
EYIDDLFKL

SEQ ID NO: 30012 - protein, 9 aa, Homo Sapiens
EYIDRMIKI

SEQ ID NO: 30013 - protein, 9 aa, Homo Sapiens
EYIHALTLL

SEQ ID NO: 30014 - protein, 9 aa, Homo Sapiens
EYIIEYPHF

SEQ ID NO: 30015 - protein, 9 aa, Homo Sapiens
EYIKFLRSI

SEQ ID NO: 30016 - protein, 9 aa, Homo Sapiens
EYIPKWEQF

SEQ ID NO: 30017 - protein, 9 aa, Homo Sapiens
EYIQFVPLL

SEQ ID NO: 30018 - protein, 9 aa, Homo Sapiens
EYIQKNVQL

SEQ ID NO: 30019 - protein, 9 aa, Homo Sapiens
EYIRSLNQF

SEQ ID NO: 30020 - protein, 9 aa, Homo Sapiens
EYISKTYKI

SEQ ID NO: 30021 - protein, 9 aa, Homo Sapiens
EYISTVKTL

SEQ ID NO: 30022 - protein, 9 aa, Homo Sapiens
EYLARIQGF

SEQ ID NO: 30023 - protein, 9 aa, Homo Sapiens
EYLDDRNTF

SEQ ID NO: 30024 - protein, 9 aa, Homo Sapiens
EYLDKYCSL

SEQ ID NO: 30025 - protein, 9 aa, Homo Sapiens
EYLEAHLKF

SEQ ID NO: 30026 - protein, 9 aa, Homo Sapiens
EYLENALKL

SEQ ID NO: 30027 - protein, 9 aa, Homo Sapiens
EYLERAPEL

SEQ ID NO: 30028 - protein, 9 aa, Homo Sapiens
EYLGKFRRL

SEQ ID NO: 30029 - protein, 9 aa, Homo Sapiens
EYLGSMAKI

SEQ ID NO: 30030 - protein, 9 aa, Homo Sapiens
EYLHFMRKI

SEQ ID NO: 30031 - protein, 9 aa, Homo Sapiens
EYLHQHWIL

SEQ ID NO: 30032 - protein, 9 aa, Homo Sapiens
EYLIKVNEI

SEQ ID NO: 30033 - protein, 9 aa, Homo Sapiens
EYLIVFPKL

SEQ ID NO: 30034 - protein, 9 aa, Homo Sapiens
EYLKIKQSF

SEQ ID NO: 30035 - protein, 9 aa, Homo Sapiens
EYLKLLHSF

SEQ ID NO: 30036 - protein, 9 aa, Homo Sapiens
EYLRQIFRL

SEQ ID NO: 30037 - protein, 9 aa, Homo Sapiens
EYLSTCSKL

SEQ ID NO: 30038 - protein, 9 aa, Homo Sapiens
EYLTKVDKL

SEQ ID NO: 30039 - protein, 9 aa, Homo Sapiens
EYLYFFRVL

SEQ ID NO: 30040 - protein, 9 aa, Homo Sapiens
EYMEHVYLI

SEQ ID NO: 30041 - protein, 9 aa, Homo Sapiens
EYMEVRERI

SEQ ID NO: 30042 - protein, 9 aa, Homo Sapiens
EYMPIKLKI

SEQ ID NO: 30043 - protein, 9 aa, Homo Sapiens
EYNGKIPRF

SEQ ID NO: 30044 - protein, 9 aa, Homo Sapiens
EYNSALPLL

SEQ ID NO: 30045 - protein, 9 aa, Homo Sapiens
EYNSDLHQF

SEQ ID NO: 30046 - protein, 9 aa, Homo Sapiens
EYNTIKDKF

SEQ ID NO: 30047 - protein, 9 aa, Homo Sapiens
EYPHEVPQI

SEQ ID NO: 30048 - protein, 9 aa, Homo Sapiens
EYSKQMQRF

SEQ ID NO: 30049 - protein, 9 aa, Homo Sapiens
EYTDVYPEI

SEQ ID NO: 30050 - protein, 9 aa, Homo Sapiens
EYTGYSFKF

SEQ ID NO: 30051 - protein, 9 aa, Homo Sapiens
EYVANLTNL

SEQ ID NO: 30052 - protein, 9 aa, Homo Sapiens
EYVEKFYRI

SEQ ID NO: 30053 - protein, 9 aa, Homo Sapiens
EYVPGAHQF

SEQ ID NO: 30054 - protein, 9 aa, Homo Sapiens
EYVRELPAF

SEQ ID NO: 30055 - protein, 9 aa, Homo Sapiens
EYVRNQQTI

SEQ ID NO: 30056 - protein, 9 aa, Homo Sapiens
EYVSQHLVF

SEQ ID NO: 30057 - protein, 9 aa, Homo Sapiens
FFIAGRYEF

SEQ ID NO: 30058 - protein, 9 aa, Homo Sapiens
FLPFPLPLF

SEQ ID NO: 30059 - protein, 9 aa, Homo Sapiens
FYAELYHII

SEQ ID NO: 30060 - protein, 9 aa, Homo Sapiens
FYAHIIPFL

SEQ ID NO: 30061 - protein, 9 aa, Homo Sapiens
FYFALRDTL

SEQ ID NO: 30062 - protein, 9 aa, Homo Sapiens
FYGDKMNLF

SEQ ID NO: 30063 - protein, 9 aa, Homo Sapiens
FYHEAVVLF

SEQ ID NO: 30064 - protein, 9 aa, Homo Sapiens
FYHKYFNYL

SEQ ID NO: 30065 - protein, 9 aa, Homo Sapiens
FYIESISYL

SEQ ID NO: 30066 - protein, 9 aa, Homo Sapiens
FYISPVNKL

SEQ ID NO: 30067 - protein, 9 aa, Homo Sapiens
FYITSRTQF

SEQ ID NO: 30068 - protein, 9 aa, Homo Sapiens
FYIWRPLRI

SEQ ID NO: 30069 - protein, 9 aa, Homo Sapiens
FYLLISKTF

SEQ ID NO: 30070 - protein, 9 aa, Homo Sapiens
FYMDTSHLF

SEQ ID NO: 30071 - protein, 9 aa, Homo Sapiens
FYNLLTRTF

SEQ ID NO: 30072 - protein, 9 aa, Homo Sapiens
FYPPKVELF

SEQ ID NO: 30073 - protein, 9 aa, Homo Sapiens
FYQPKIQQF

SEQ ID NO: 30074 - protein, 9 aa, Homo Sapiens
FYQRFPLSF

SEQ ID NO: 30075 - protein, 9 aa, Homo Sapiens
FYSNIQTVI

SEQ ID NO: 30076 - protein, 9 aa, Homo Sapiens
FYVDTVRAF

SEQ ID NO: 30077 - protein, 9 aa, Homo Sapiens
FYVGHIDAF

SEQ ID NO: 30078 - protein, 9 aa, Homo Sapiens
GAPVAAAAL

SEQ ID NO: 30079 - protein, 9 aa, Homo Sapiens
GEYKFQNAL

SEQ ID NO: 30080 - protein, 9 aa, Homo Sapiens
GFAGDDAPR

SEQ ID NO: 30081 - protein, 9 aa, Homo Sapiens
GFLDIDTKF

SEQ ID NO: 30082 - protein, 9 aa, Homo Sapiens
GGPGGVGGL

SEQ ID NO: 30083 - protein, 9 aa, Homo Sapiens
GILCSALQK

SEQ ID NO: 30084 - protein, 9 aa, Homo Sapiens
GPPPPGKPQ

SEQ ID NO: 30085 - protein, 9 aa, Homo Sapiens
GPPPPPGKP

SEQ ID NO: 30086 - protein, 9 aa, Homo Sapiens
GQPEIFYTF

SEQ ID NO: 30087 - protein, 9 aa, Homo Sapiens
GYIEDLKKF

SEQ ID NO: 30088 - protein, 9 aa, Homo Sapiens
GYIERPQLI

SEQ ID NO: 30089 - protein, 9 aa, Homo Sapiens
GYIESVQHI

SEQ ID NO: 30090 - protein, 9 aa, Homo Sapiens
GYIHVTQTF

SEQ ID NO: 30091 - protein, 9 aa, Homo Sapiens
GYIKNKLVF

SEQ ID NO: 30092 - protein, 9 aa, Homo Sapiens
GYIPIYTPF

SEQ ID NO: 30093 - protein, 9 aa, Homo Sapiens
GYLGYTSGF

SEQ ID NO: 30094 - protein, 9 aa, Homo Sapiens
GYLPLAHVL

SEQ ID NO: 30095 - protein, 9 aa, Homo Sapiens
GYLPVQTVL

SEQ ID NO: 30096 - protein, 9 aa, Homo Sapiens
GYLQVFPGL

SEQ ID NO: 30097 - protein, 9 aa, Homo Sapiens
GYPEVALHF

SEQ ID NO: 30098 - protein, 9 aa, Homo Sapiens
GYPLWKVTF

SEQ ID NO: 30099 - protein, 9 aa, Homo Sapiens
GYSEHFVEF

SEQ ID NO: 30100 - protein, 9 aa, Homo Sapiens
GYSPYQLTW

SEQ ID NO: 30101 - protein, 9 aa, Homo Sapiens
GYVKEQFAW

SEQ ID NO: 30102 - protein, 9 aa, Homo Sapiens
HFIAEHYMF

SEQ ID NO: 30103 - protein, 9 aa, Homo Sapiens
HFIECIFHF

SEQ ID NO: 30104 - protein, 9 aa, Homo Sapiens
HFIEIHHHL

SEQ ID NO: 30105 - protein, 9 aa, Homo Sapiens
HFIEKAHTL

SEQ ID NO: 30106 - protein, 9 aa, Homo Sapiens
HFLDRHLVF

SEQ ID NO: 30107 - protein, 9 aa, Homo Sapiens
HFLEQHPLL

SEQ ID NO: 30108 - protein, 9 aa, Homo Sapiens
HWKPGQFVF

SEQ ID NO: 30109 - protein, 9 aa, Homo Sapiens
HWVEFQNKF

SEQ ID NO: 30110 - protein, 9 aa, Homo Sapiens
HYAALAHYF

SEQ ID NO: 30111 - protein, 9 aa, Homo Sapiens
HYCEPYTTW

SEQ ID NO: 30112 - protein, 9 aa, Homo Sapiens
HYFNTPFQL

SEQ ID NO: 30113 - protein, 9 aa, Homo Sapiens
HYHPIVQRF

SEQ ID NO: 30114 - protein, 9 aa, Homo Sapiens
HYILHNSFF

SEQ ID NO: 30115 - protein, 9 aa, Homo Sapiens
HYINEVLFL

SEQ ID NO: 30116 - protein, 9 aa, Homo Sapiens
HYINMPVQF

SEQ ID NO: 30117 - protein, 9 aa, Homo Sapiens
HYIPRAVLL

SEQ ID NO: 30118 - protein, 9 aa, Homo Sapiens
HYIRKYNRF

SEQ ID NO: 30119 - protein, 9 aa, Homo Sapiens
HYITPMMEL

SEQ ID NO: 30120 - protein, 9 aa, Homo Sapiens
HYIYIENQF

SEQ ID NO: 30121 - protein, 9 aa, Homo Sapiens
HYKPTPLYF

SEQ ID NO: 30122 - protein, 9 aa, Homo Sapiens
HYLDVLYKM

SEQ ID NO: 30123 - protein, 9 aa, Homo Sapiens
HYLEHWLSM

SEQ ID NO: 30124 - protein, 9 aa, Homo Sapiens
HYLNVAFDL

SEQ ID NO: 30125 - protein, 9 aa, Homo Sapiens
HYLPVKIIL

SEQ ID NO: 30126 - protein, 9 aa, Homo Sapiens
HYLSYLNNL

SEQ ID NO: 30127 - protein, 9 aa, Homo Sapiens
HYLYQIAHL

SEQ ID NO: 30128 - protein, 9 aa, Homo Sapiens
HYMSINDSF

SEQ ID NO: 30129 - protein, 9 aa, Homo Sapiens
HYNSHYEKF

SEQ ID NO: 30130 - protein, 9 aa, Homo Sapiens
HYNWLIYHL

SEQ ID NO: 30131 - protein, 9 aa, Homo Sapiens
HYPPVQVLF

SEQ ID NO: 30132 - protein, 9 aa, Homo Sapiens
HYSKKWHRF

SEQ ID NO: 30133 - protein, 9 aa, Homo Sapiens
HYSPIYLSF

SEQ ID NO: 30134 - protein, 9 aa, Homo Sapiens
HYTIVFNTF

SEQ ID NO: 30135 - protein, 9 aa, Homo Sapiens
HYTYILEVF

SEQ ID NO: 30136 - protein, 9 aa, Homo Sapiens
HYVEKPSTF

SEQ ID NO: 30137 - protein, 9 aa, Homo Sapiens
HYVPATKVF

SEQ ID NO: 30138 - protein, 9 aa, Homo Sapiens
IEMPCHHLF

SEQ ID NO: 30139 - protein, 9 aa, Homo Sapiens
IFCETRAEW

SEQ ID NO: 30140 - protein, 9 aa, Homo Sapiens
IFFENHPYF

SEQ ID NO: 30141 - protein, 9 aa, Homo Sapiens
IFFPGVSEF

SEQ ID NO: 30142 - protein, 9 aa, Homo Sapiens
IFHDISLRF

SEQ ID NO: 30143 - protein, 9 aa, Homo Sapiens
IFHEVPLKF

SEQ ID NO: 30144 - protein, 9 aa, Homo Sapiens
IFHEVSQLI

SEQ ID NO: 30145 - protein, 9 aa, Homo Sapiens
IFIDEIDSF

SEQ ID NO: 30146 - protein, 9 aa, Homo Sapiens
IFIDKIYSI

SEQ ID NO: 30147 - protein, 9 aa, Homo Sapiens
IFITGTTRI

SEQ ID NO: 30148 - protein, 9 aa, Homo Sapiens
IFKDKPIKL

SEQ ID NO: 30149 - protein, 9 aa, Homo Sapiens
IFLLQALFG

SEQ ID NO: 30150 - protein, 9 aa, Homo Sapiens
IFLNLKTAL

SEQ ID NO: 30151 - protein, 9 aa, Homo Sapiens
IFLSQPILL

SEQ ID NO: 30152 - protein, 9 aa, Homo Sapiens
IFMENRNEF

SEQ ID NO: 30153 - protein, 9 aa, Homo Sapiens
IFMRVATML

SEQ ID NO: 30154 - protein, 9 aa, Homo Sapiens
IFPQSLPKL

SEQ ID NO: 30155 - protein, 9 aa, Homo Sapiens
IFQDVLLQF

SEQ ID NO: 30156 - protein, 9 aa, Homo Sapiens
IFSKIVSLF

SEQ ID NO: 30157 - protein, 9 aa, Homo Sapiens
IFTDLSSRF

SEQ ID NO: 30158 - protein, 9 aa, Homo Sapiens
IFTDVALKF

SEQ ID NO: 30159 - protein, 9 aa, Homo Sapiens
IFTNTVARF

SEQ ID NO: 30160 - protein, 9 aa, Homo Sapiens
IFTPKPTLF

SEQ ID NO: 30161 - protein, 9 aa, Homo Sapiens
IFVARLYYF

SEQ ID NO: 30162 - protein, 9 aa, Homo Sapiens
ILKKKSFTF

SEQ ID NO: 30163 - protein, 9 aa, Homo Sapiens
ILPCQVPVW

SEQ ID NO: 30164 - protein, 9 aa, Homo Sapiens
ILPEKQAEF

SEQ ID NO: 30165 - protein, 9 aa, Homo Sapiens
ILPGSLFRF

SEQ ID NO: 30166 - protein, 9 aa, Homo Sapiens
ILPKVIYRF

SEQ ID NO: 30167 - protein, 9 aa, Homo Sapiens
ILTERGYSF

SEQ ID NO: 30168 - protein, 9 aa, Homo Sapiens
IWIPYCIKL

SEQ ID NO: 30169 - protein, 9 aa, Homo Sapiens
IWISKLPHF

SEQ ID NO: 30170 - protein, 9 aa, Homo Sapiens
IWPEKSFCL

SEQ ID NO: 30171 - protein, 9 aa, Homo Sapiens
IYAAVTPEL

SEQ ID NO: 30172 - protein, 9 aa, Homo Sapiens
IYADVGEEF

SEQ ID NO: 30173 - protein, 9 aa, Homo Sapiens
IYAFVGEKF

SEQ ID NO: 30174 - protein, 9 aa, Homo Sapiens
IYAPKLQEF

SEQ ID NO: 30175 - protein, 9 aa, Homo Sapiens
IYAPPLPSL

SEQ ID NO: 30176 - protein, 9 aa, Homo Sapiens
IYAPQGLLL

SEQ ID NO: 30177 - protein, 9 aa, Homo Sapiens
IYATEAHVF

SEQ ID NO: 30178 - protein, 9 aa, Homo Sapiens
IYDSVKVYF

SEQ ID NO: 30179 - protein, 9 aa, Homo Sapiens
IYEEEPFNF

SEQ ID NO: 30180 - protein, 9 aa, Homo Sapiens
IYEPNFIFF

SEQ ID NO: 30181 - protein, 9 aa, Homo Sapiens
IYFKKPLNI

SEQ ID NO: 30182 - protein, 9 aa, Homo Sapiens
IYFPYVLKI

SEQ ID NO: 30183 - protein, 9 aa, Homo Sapiens
IYGEKTYAF

SEQ ID NO: 30184 - protein, 9 aa, Homo Sapiens
IYGSVPYLL

SEQ ID NO: 30185 - protein, 9 aa, Homo Sapiens
IYGYVAEQF

SEQ ID NO: 30186 - protein, 9 aa, Homo Sapiens
IYHPDIQLL

SEQ ID NO: 30187 - protein, 9 aa, Homo Sapiens
IYHQVAVQF

SEQ ID NO: 30188 - protein, 9 aa, Homo Sapiens
IYHSHHPTL

SEQ ID NO: 30189 - protein, 9 aa, Homo Sapiens
IYIAGHPAF

SEQ ID NO: 30190 - protein, 9 aa, Homo Sapiens
IYIDRFEDL

SEQ ID NO: 30191 - protein, 9 aa, Homo Sapiens
IYIDRGVVF

SEQ ID NO: 30192 - protein, 9 aa, Homo Sapiens
IYIKHPHLF

SEQ ID NO: 30193 - protein, 9 aa, Homo Sapiens
IYIKQIKTF

SEQ ID NO: 30194 - protein, 9 aa, Homo Sapiens
IYKAPSENW

SEQ ID NO: 30195 - protein, 9 aa, Homo Sapiens
IYKCVNTTL

SEQ ID NO: 30196 - protein, 9 aa, Homo Sapiens
IYKEIECSI

SEQ ID NO: 30197 - protein, 9 aa, Homo Sapiens
IYKPVTDFF

SEQ ID NO: 30198 - protein, 9 aa, Homo Sapiens
IYLDELQVI

SEQ ID NO: 30199 - protein, 9 aa, Homo Sapiens
IYLDGIITI

SEQ ID NO: 30200 - protein, 9 aa, Homo Sapiens
IYLDIIHTY

SEQ ID NO: 30201 - protein, 9 aa, Homo Sapiens
IYLDLPQNF

SEQ ID NO: 30202 - protein, 9 aa, Homo Sapiens
IYLDTHFRL

SEQ ID NO: 30203 - protein, 9 aa, Homo Sapiens
IYLEHTESI

SEQ ID NO: 30204 - protein, 9 aa, Homo Sapiens
IYLEKLKTI

SEQ ID NO: 30205 - protein, 9 aa, Homo Sapiens
IYLERFPIF

SEQ ID NO: 30206 - protein, 9 aa, Homo Sapiens
IYLEVIHNL

SEQ ID NO: 30207 - protein, 9 aa, Homo Sapiens
IYLIHHQRF

SEQ ID NO: 30208 - protein, 9 aa, Homo Sapiens
IYLLIHNNF

SEQ ID NO: 30209 - protein, 9 aa, Homo Sapiens
IYLLPRCTF

SEQ ID NO: 30210 - protein, 9 aa, Homo Sapiens
IYLNLLNDL

SEQ ID NO: 30211 - protein, 9 aa, Homo Sapiens
IYLPAAQTM

SEQ ID NO: 30212 - protein, 9 aa, Homo Sapiens
IYLPEVRKI

SEQ ID NO: 30213 - protein, 9 aa, Homo Sapiens
IYLPYLHEW

SEQ ID NO: 30214 - protein, 9 aa, Homo Sapiens
IYLPYLQNW

SEQ ID NO: 30215 - protein, 9 aa, Homo Sapiens
IYLRLLVKL

SEQ ID NO: 30216 - protein, 9 aa, Homo Sapiens
IYLTFPVAM

SEQ ID NO: 30217 - protein, 9 aa, Homo Sapiens
IYMDTLNIF

SEQ ID NO: 30218 - protein, 9 aa, Homo Sapiens
IYNFVESKL

SEQ ID NO: 30219 - protein, 9 aa, Homo Sapiens
IYNGDMEKI

SEQ ID NO: 30220 - protein, 9 aa, Homo Sapiens
IYNGKLFDL

SEQ ID NO: 30221 - protein, 9 aa, Homo Sapiens
IYNHITTRV

SEQ ID NO: 30222 - protein, 9 aa, Homo Sapiens
IYNQVNVVL

SEQ ID NO: 30223 - protein, 9 aa, Homo Sapiens
IYNSQREHF

SEQ ID NO: 30224 - protein, 9 aa, Homo Sapiens
IYNYPEQLF

SEQ ID NO: 30225 - protein, 9 aa, Homo Sapiens
IYPDSFTVL

SEQ ID NO: 30226 - protein, 9 aa, Homo Sapiens
IYPEAVTMF

SEQ ID NO: 30227 - protein, 9 aa, Homo Sapiens
IYPEVVHMF

SEQ ID NO: 30228 - protein, 9 aa, Homo Sapiens
IYPHGLVLL

SEQ ID NO: 30229 - protein, 9 aa, Homo Sapiens
IYPPEVAEF

SEQ ID NO: 30230 - protein, 9 aa, Homo Sapiens
IYPPKLHQF

SEQ ID NO: 30231 - protein, 9 aa, Homo Sapiens
IYPQVLHSL

SEQ ID NO: 30232 - protein, 9 aa, Homo Sapiens
IYPVNAISF

SEQ ID NO: 30233 - protein, 9 aa, Homo Sapiens
IYPWVHVVI

SEQ ID NO: 30234 - protein, 9 aa, Homo Sapiens
IYPYVIQEL

SEQ ID NO: 30235 - protein, 9 aa, Homo Sapiens
IYQDVTLKW

SEQ ID NO: 30236 - protein, 9 aa, Homo Sapiens
IYQKAFEHL

SEQ ID NO: 30237 - protein, 9 aa, Homo Sapiens
IYQKKYLLL

SEQ ID NO: 30238 - protein, 9 aa, Homo Sapiens
IYQKPFQTL

SEQ ID NO: 30239 - protein, 9 aa, Homo Sapiens
IYQRDPLKL

SEQ ID NO: 30240 - protein, 9 aa, Homo Sapiens
IYQRHVYNL

SEQ ID NO: 30241 - protein, 9 aa, Homo Sapiens
IYQWICDNF

SEQ ID NO: 30242 - protein, 9 aa, Homo Sapiens
IYQYIQSRF

SEQ ID NO: 30243 - protein, 9 aa, Homo Sapiens
IYSAERFLI

SEQ ID NO: 30244 - protein, 9 aa, Homo Sapiens
IYSEVATLI

SEQ ID NO: 30245 - protein, 9 aa, Homo Sapiens
IYSFHTLSF

SEQ ID NO: 30246 - protein, 9 aa, Homo Sapiens
IYSPQFSRL

SEQ ID NO: 30247 - protein, 9 aa, Homo Sapiens
IYSTAFDYF

SEQ ID NO: 30248 - protein, 9 aa, Homo Sapiens
IYSTKLYRF

SEQ ID NO: 30249 - protein, 9 aa, Homo Sapiens
IYTDITYSF

SEQ ID NO: 30250 - protein, 9 aa, Homo Sapiens
IYTMIYRNL

SEQ ID NO: 30251 - protein, 9 aa, Homo Sapiens
IYTSSVNRL

SEQ ID NO: 30252 - protein, 9 aa, Homo Sapiens
IYTVLFERL

SEQ ID NO: 30253 - protein, 9 aa, Homo Sapiens
IYVEQKQYI

SEQ ID NO: 30254 - protein, 9 aa, Homo Sapiens
IYVGAKVYF

SEQ ID NO: 30255 - protein, 9 aa, Homo Sapiens
IYVGRVKSF

SEQ ID NO: 30256 - protein, 9 aa, Homo Sapiens
IYVGSSPTL

SEQ ID NO: 30257 - protein, 9 aa, Homo Sapiens
IYVHDLLTF

SEQ ID NO: 30258 - protein, 9 aa, Homo Sapiens
IYVIPQPHF

SEQ ID NO: 30259 - protein, 9 aa, Homo Sapiens
IYVISAETF

SEQ ID NO: 30260 - protein, 9 aa, Homo Sapiens
IYVNMKTDF

SEQ ID NO: 30261 - protein, 9 aa, Homo Sapiens
IYVPSSYHL

SEQ ID NO: 30262 - protein, 9 aa, Homo Sapiens
IYVVGGYSW

SEQ ID NO: 30263 - protein, 9 aa, Homo Sapiens
IYWDGPLAL

SEQ ID NO: 30264 - protein, 9 aa, Homo Sapiens
IYYFKANVF

SEQ ID NO: 30265 - protein, 9 aa, Homo Sapiens
IYYGTQHKM

SEQ ID NO: 30266 - protein, 9 aa, Homo Sapiens
IYYVDVQKF

SEQ ID NO: 30267 - protein, 9 aa, Homo Sapiens
KFAEEFYSF

SEQ ID NO: 30268 - protein, 9 aa, Homo Sapiens
KFCMISATF

SEQ ID NO: 30269 - protein, 9 aa, Homo Sapiens
KFFEEVLLF

SEQ ID NO: 30270 - protein, 9 aa, Homo Sapiens
KFFYQKEHW

SEQ ID NO: 30271 - protein, 9 aa, Homo Sapiens
KFHAIITTF

SEQ ID NO: 30272 - protein, 9 aa, Homo Sapiens
KFIDKQLEL

SEQ ID NO: 30273 - protein, 9 aa, Homo Sapiens
KFIDTTSKF

SEQ ID NO: 30274 - protein, 9 aa, Homo Sapiens
KFIWTNHKF

SEQ ID NO: 30275 - protein, 9 aa, Homo Sapiens
KFLDALISL

SEQ ID NO: 30276 - protein, 9 aa, Homo Sapiens
KFLDEDFVF

SEQ ID NO: 30277 - protein, 9 aa, Homo Sapiens
KFLEQVHQL

SEQ ID NO: 30278 - protein, 9 aa, Homo Sapiens
KFLTKLPEI

SEQ ID NO: 30279 - protein, 9 aa, Homo Sapiens
KFNPVSFTW

SEQ ID NO: 30280 - protein, 9 aa, Homo Sapiens
KFPQFLPKF

SEQ ID NO: 30281 - protein, 9 aa, Homo Sapiens
KFSPRPLKF

SEQ ID NO: 30282 - protein, 9 aa, Homo Sapiens
KFVDILTNW

SEQ ID NO: 30283 - protein, 9 aa, Homo Sapiens
KFVDSTFYL

SEQ ID NO: 30284 - protein, 9 aa, Homo Sapiens
KFVETHPEF

SEQ ID NO: 30285 - protein, 9 aa, Homo Sapiens
KFVNKSYLL

SEQ ID NO: 30286 - protein, 9 aa, Homo Sapiens
KFYGNRHLI

SEQ ID NO: 30287 - protein, 9 aa, Homo Sapiens
KIIPLVVKF

SEQ ID NO: 30288 - protein, 9 aa, Homo Sapiens
KLPANHPLL

SEQ ID NO: 30289 - protein, 9 aa, Homo Sapiens
KLPDVYGVF

SEQ ID NO: 30290 - protein, 9 aa, Homo Sapiens
KLPEKTQTF

SEQ ID NO: 30291 - protein, 9 aa, Homo Sapiens
KLPSNLPQL

SEQ ID NO: 30292 - protein, 9 aa, Homo Sapiens
KLYPWIHQF

SEQ ID NO: 30293 - protein, 9 aa, Homo Sapiens
KMLDNFYNF

SEQ ID NO: 30294 - protein, 9 aa, Homo Sapiens
KMMDVTVTI

SEQ ID NO: 30295 - protein, 9 aa, Homo Sapiens
KMPLSTHRF

SEQ ID NO: 30296 - protein, 9 aa, Homo Sapiens
KQLAVYEEF

SEQ ID NO: 30297 - protein, 9 aa, Homo Sapiens
KQLTWFYTF

SEQ ID NO: 30298 - protein, 9 aa, Homo Sapiens
KQPKYWPVI

SEQ ID NO: 30299 - protein, 9 aa, Homo Sapiens
KTFPFHFMF

SEQ ID NO: 30300 - protein, 9 aa, Homo Sapiens
KWFDFKLFF

SEQ ID NO: 30301 - protein, 9 aa, Homo Sapiens
KWFFQKLRF

SEQ ID NO: 30302 - protein, 9 aa, Homo Sapiens
KWVPCSAKF

SEQ ID NO: 30303 - protein, 9 aa, Homo Sapiens
KYAHMINGF

SEQ ID NO: 30304 - protein, 9 aa, Homo Sapiens
KYAMMFAEL

SEQ ID NO: 30305 - protein, 9 aa, Homo Sapiens
KYAPRFNGF

SEQ ID NO: 30306 - protein, 9 aa, Homo Sapiens
KYCQVIRVI

SEQ ID NO: 30307 - protein, 9 aa, Homo Sapiens
KYEAIQLTF

SEQ ID NO: 30308 - protein, 9 aa, Homo Sapiens
KYEELFPAF

SEQ ID NO: 30309 - protein, 9 aa, Homo Sapiens
KYESIRLLF

SEQ ID NO: 30310 - protein, 9 aa, Homo Sapiens
KYFAKHPRL

SEQ ID NO: 30311 - protein, 9 aa, Homo Sapiens
KYFAQALKL

SEQ ID NO: 30312 - protein, 9 aa, Homo Sapiens
KYFEKQFEL

SEQ ID NO: 30313 - protein, 9 aa, Homo Sapiens
KYFHPPAHL

SEQ ID NO: 30314 - protein, 9 aa, Homo Sapiens
KYFLWEEKF

SEQ ID NO: 30315 - protein, 9 aa, Homo Sapiens
KYFLWVVKF

SEQ ID NO: 30316 - protein, 9 aa, Homo Sapiens
KYFQLDVTL

SEQ ID NO: 30317 - protein, 9 aa, Homo Sapiens
KYGIVLKEF

SEQ ID NO: 30318 - protein, 9 aa, Homo Sapiens
KYGSNVHRI

SEQ ID NO: 30319 - protein, 9 aa, Homo Sapiens
KYIATDFTL

SEQ ID NO: 30320 - protein, 9 aa, Homo Sapiens
KYIDKTIRV

SEQ ID NO: 30321 - protein, 9 aa, Homo Sapiens
KYIDQKFVL

SEQ ID NO: 30322 - protein, 9 aa, Homo Sapiens
KYIDRLIQL

SEQ ID NO: 30323 - protein, 9 aa, Homo Sapiens
KYIDYIFNV

SEQ ID NO: 30324 - protein, 9 aa, Homo Sapiens
KYIEGVSDF

SEQ ID NO: 30325 - protein, 9 aa, Homo Sapiens
KYIESPVLF

SEQ ID NO: 30326 - protein, 9 aa, Homo Sapiens
KYIGENLQL

SEQ ID NO: 30327 - protein, 9 aa, Homo Sapiens
KYIGFLVRL

SEQ ID NO: 30328 - protein, 9 aa, Homo Sapiens
KYIHSANVL

SEQ ID NO: 30329 - protein, 9 aa, Homo Sapiens
KYIKDDFRF

SEQ ID NO: 30330 - protein, 9 aa, Homo Sapiens
KYIMDLERL

SEQ ID NO: 30331 - protein, 9 aa, Homo Sapiens
KYINTDAKF

SEQ ID NO: 30332 - protein, 9 aa, Homo Sapiens
KYIPGTKMI

SEQ ID NO: 30333 - protein, 9 aa, Homo Sapiens
KYIPKQSFL

SEQ ID NO: 30334 - protein, 9 aa, Homo Sapiens
KYIPLPQRV

SEQ ID NO: 30335 - protein, 9 aa, Homo Sapiens
KYIQRQETI

SEQ ID NO: 30336 - protein, 9 aa, Homo Sapiens
KYIQRQQTI

SEQ ID NO: 30337 - protein, 9 aa, Homo Sapiens
KYISGPHEL

SEQ ID NO: 30338 - protein, 9 aa, Homo Sapiens
KYISKPENL

SEQ ID NO: 30339 - protein, 9 aa, Homo Sapiens
KYITDVVKL

SEQ ID NO: 30340 - protein, 9 aa, Homo Sapiens
KYITEVSRW

SEQ ID NO: 30341 - protein, 9 aa, Homo Sapiens
KYITKSFNF

SEQ ID NO: 30342 - protein, 9 aa, Homo Sapiens
KYITQGQLL

SEQ ID NO: 30343 - protein, 9 aa, Homo Sapiens
KYKGIFNGF

SEQ ID NO: 30344 - protein, 9 aa, Homo Sapiens
KYLADLPTL

SEQ ID NO: 30345 - protein, 9 aa, Homo Sapiens
KYLAHLEQL

SEQ ID NO: 30346 - protein, 9 aa, Homo Sapiens
KYLATLERL

SEQ ID NO: 30347 - protein, 9 aa, Homo Sapiens
KYLDIHERM

SEQ ID NO: 30348 - protein, 9 aa, Homo Sapiens
KYLDVKFEY

SEQ ID NO: 30349 - protein, 9 aa, Homo Sapiens
KYLEETNSL

SEQ ID NO: 30350 - protein, 9 aa, Homo Sapiens
KYLEHPLLL

SEQ ID NO: 30351 - protein, 9 aa, Homo Sapiens
KYLELCVDL

SEQ ID NO: 30352 - protein, 9 aa, Homo Sapiens
KYLGKTHNL

SEQ ID NO: 30353 - protein, 9 aa, Homo Sapiens
KYLGLLENL

SEQ ID NO: 30354 - protein, 9 aa, Homo Sapiens
KYLGQLHYL

SEQ ID NO: 30355 - protein, 9 aa, Homo Sapiens
KYLHPPPHL

SEQ ID NO: 30356 - protein, 9 aa, Homo Sapiens
KYLKEVLRI

SEQ ID NO: 30357 - protein, 9 aa, Homo Sapiens
KYLPALDEF

SEQ ID NO: 30358 - protein, 9 aa, Homo Sapiens
KYLPCFTFL

SEQ ID NO: 30359 - protein, 9 aa, Homo Sapiens
KYLPEWSAW

SEQ ID NO: 30360 - protein, 9 aa, Homo Sapiens
KYLPEWTAW

SEQ ID NO: 30361 - protein, 9 aa, Homo Sapiens
KYLQLRNVI

SEQ ID NO: 30362 - protein, 9 aa, Homo Sapiens
KYLQVVGMF

SEQ ID NO: 30363 - protein, 9 aa, Homo Sapiens
KYLSGIAHF

SEQ ID NO: 30364 - protein, 9 aa, Homo Sapiens
KYLSVQGQL

SEQ ID NO: 30365 - protein, 9 aa, Homo Sapiens
KYLTQHERI

SEQ ID NO: 30366 - protein, 9 aa, Homo Sapiens
KYLTVNKRL

SEQ ID NO: 30367 - protein, 9 aa, Homo Sapiens
KYLVIGDLL

SEQ ID NO: 30368 - protein, 9 aa, Homo Sapiens
KYLYQKIMF

SEQ ID NO: 30369 - protein, 9 aa, Homo Sapiens
KYLYVDKNF

SEQ ID NO: 30370 - protein, 9 aa, Homo Sapiens
KYMDINFDF

SEQ ID NO: 30371 - protein, 9 aa, Homo Sapiens
KYMDVQFDF

SEQ ID NO: 30372 - protein, 9 aa, Homo Sapiens
KYMLKANLI

SEQ ID NO: 30373 - protein, 9 aa, Homo Sapiens
KYMVYPQTF

SEQ ID NO: 30374 - protein, 9 aa, Homo Sapiens
KYNANFVTF

SEQ ID NO: 30375 - protein, 9 aa, Homo Sapiens
KYNDNFFGL

SEQ ID NO: 30376 - protein, 9 aa, Homo Sapiens
KYNETFQFI

SEQ ID NO: 30377 - protein, 9 aa, Homo Sapiens
KYNIMLVRL

SEQ ID NO: 30378 - protein, 9 aa, Homo Sapiens
KYNLVTHIL

SEQ ID NO: 30379 - protein, 9 aa, Homo Sapiens
KYNPTWHCI

SEQ ID NO: 30380 - protein, 9 aa, Homo Sapiens
KYPDIISRI

SEQ ID NO: 30381 - protein, 9 aa, Homo Sapiens
KYPDRVPVI

SEQ ID NO: 30382 - protein, 9 aa, Homo Sapiens
KYPENFFLL

SEQ ID NO: 30383 - protein, 9 aa, Homo Sapiens
KYPHYFPLL

SEQ ID NO: 30384 - protein, 9 aa, Homo Sapiens
KYPHYFPVM

SEQ ID NO: 30385 - protein, 9 aa, Homo Sapiens
KYPKVWEGF

SEQ ID NO: 30386 - protein, 9 aa, Homo Sapiens
KYPNVFKKI

SEQ ID NO: 30387 - protein, 9 aa, Homo Sapiens
KYPQLLPGI

SEQ ID NO: 30388 - protein, 9 aa, Homo Sapiens
KYPSPFFVF

SEQ ID NO: 30389 - protein, 9 aa, Homo Sapiens
KYPVHIYRL

SEQ ID NO: 30390 - protein, 9 aa, Homo Sapiens
KYQAVTATL

SEQ ID NO: 30391 - protein, 9 aa, Homo Sapiens
KYQDVYVEL

SEQ ID NO: 30392 - protein, 9 aa, Homo Sapiens
KYQEEFEHF

SEQ ID NO: 30393 - protein, 9 aa, Homo Sapiens
KYQEVTNNL

SEQ ID NO: 30394 - protein, 9 aa, Homo Sapiens
KYQHLKAEF

SEQ ID NO: 30395 - protein, 9 aa, Homo Sapiens
KYQIINEEF

SEQ ID NO: 30396 - protein, 9 aa, Homo Sapiens
KYQKGFSLW

SEQ ID NO: 30397 - protein, 9 aa, Homo Sapiens
KYQRILERL

SEQ ID NO: 30398 - protein, 9 aa, Homo Sapiens
KYSDITIMF

SEQ ID NO: 30399 - protein, 9 aa, Homo Sapiens
KYSEVFEAI

SEQ ID NO: 30400 - protein, 9 aa, Homo Sapiens
KYSPFVVSF

SEQ ID NO: 30401 - protein, 9 aa, Homo Sapiens
KYTGVLTEL

SEQ ID NO: 30402 - protein, 9 aa, Homo Sapiens
KYTKIFNDF

SEQ ID NO: 30403 - protein, 9 aa, Homo Sapiens
KYTPPPHHI

SEQ ID NO: 30404 - protein, 9 aa, Homo Sapiens
KYVDLTVSF

SEQ ID NO: 30405 - protein, 9 aa, Homo Sapiens
KYVHLFPKL

SEQ ID NO: 30406 - protein, 9 aa, Homo Sapiens
KYVKGLISI

SEQ ID NO: 30407 - protein, 9 aa, Homo Sapiens
KYVKIFDNF

SEQ ID NO: 30408 - protein, 9 aa, Homo Sapiens
KYVKVFDKF

SEQ ID NO: 30409 - protein, 9 aa, Homo Sapiens
KYVKVFHKF

SEQ ID NO: 30410 - protein, 9 aa, Homo Sapiens
KYVKVFHKY

SEQ ID NO: 30411 - protein, 9 aa, Homo Sapiens
KYVKVFNKF

SEQ ID NO: 30412 - protein, 9 aa, Homo Sapiens
KYVKVIHKF

SEQ ID NO: 30413 - protein, 9 aa, Homo Sapiens
KYVKVMHKF

SEQ ID NO: 30414 - protein, 9 aa, Homo Sapiens
KYVPLVTGL

SEQ ID NO: 30415 - protein, 9 aa, Homo Sapiens
KYVPYSESF

SEQ ID NO: 30416 - protein, 9 aa, Homo Sapiens
KYVSGEFRF

SEQ ID NO: 30417 - protein, 9 aa, Homo Sapiens
KYVYVVTEL

SEQ ID NO: 30418 - protein, 9 aa, Homo Sapiens
KYWDTFYKI

SEQ ID NO: 30419 - protein, 9 aa, Homo Sapiens
LFIATSQKF

SEQ ID NO: 30420 - protein, 9 aa, Homo Sapiens
LFIDNIFRF

SEQ ID NO: 30421 - protein, 9 aa, Homo Sapiens
LFKNDPLFF

SEQ ID NO: 30422 - protein, 9 aa, Homo Sapiens
LFLDTVSTF

SEQ ID NO: 30423 - protein, 9 aa, Homo Sapiens
LFLPLHELW

SEQ ID NO: 30424 - protein, 9 aa, Homo Sapiens
LFPLVPLHW

SEQ ID NO: 30425 - protein, 9 aa, Homo Sapiens
LFVKDLPQI

SEQ ID NO: 30426 - protein, 9 aa, Homo Sapiens
LLKLRYLIL

SEQ ID NO: 30427 - protein, 9 aa, Homo Sapiens
LLPGKTYSF

SEQ ID NO: 30428 - protein, 9 aa, Homo Sapiens
LLPSRQFGF

SEQ ID NO: 30429 - protein, 9 aa, Homo Sapiens
LMVPVTVVF

SEQ ID NO: 30430 - protein, 9 aa, Homo Sapiens
LVQQMEQLR

SEQ ID NO: 30431 - protein, 9 aa, Homo Sapiens
LWAPRPFNL

SEQ ID NO: 30432 - protein, 9 aa, Homo Sapiens
LWKGTHHAF

SEQ ID NO: 30433 - protein, 9 aa, Homo Sapiens
LWNEVTTSF

SEQ ID NO: 30434 - protein, 9 aa, Homo Sapiens
LWYYGEHLF

SEQ ID NO: 30435 - protein, 9 aa, Homo Sapiens
LYANMFERL

SEQ ID NO: 30436 - protein, 9 aa, Homo Sapiens
LYCEMGSTF

SEQ ID NO: 30437 - protein, 9 aa, Homo Sapiens
LYCGKTLLF

SEQ ID NO: 30438 - protein, 9 aa, Homo Sapiens
LYDIILKNF

SEQ ID NO: 30439 - protein, 9 aa, Homo Sapiens
LYENCFHIL

SEQ ID NO: 30440 - protein, 9 aa, Homo Sapiens
LYEPVWHVW

SEQ ID NO: 30441 - protein, 9 aa, Homo Sapiens
LYFHINQTL

SEQ ID NO: 30442 - protein, 9 aa, Homo Sapiens
LYGRHFNYL

SEQ ID NO: 30443 - protein, 9 aa, Homo Sapiens
LYHDIFSRL

SEQ ID NO: 30444 - protein, 9 aa, Homo Sapiens
LYIDEAHSI

SEQ ID NO: 30445 - protein, 9 aa, Homo Sapiens
LYIDFGGKF

SEQ ID NO: 30446 - protein, 9 aa, Homo Sapiens
LYIDSRQNL

SEQ ID NO: 30447 - protein, 9 aa, Homo Sapiens
LYIGDGYVI

SEQ ID NO: 30448 - protein, 9 aa, Homo Sapiens
LYIGHLTTL

SEQ ID NO: 30449 - protein, 9 aa, Homo Sapiens
LYIGSSKTF

SEQ ID NO: 30450 - protein, 9 aa, Homo Sapiens
LYIKNGQGF

SEQ ID NO: 30451 - protein, 9 aa, Homo Sapiens
LYIPPTHTF

SEQ ID NO: 30452 - protein, 9 aa, Homo Sapiens
LYITEPKTI

SEQ ID NO: 30453 - protein, 9 aa, Homo Sapiens
LYIVEPLKF

SEQ ID NO: 30454 - protein, 9 aa, Homo Sapiens
LYIVHPTMF

SEQ ID NO: 30455 - protein, 9 aa, Homo Sapiens
LYLECSAKF

SEQ ID NO: 30456 - protein, 9 aa, Homo Sapiens
LYLENIDEF

SEQ ID NO: 30457 - protein, 9 aa, Homo Sapiens
LYLGETVRF

SEQ ID NO: 30458 - protein, 9 aa, Homo Sapiens
LYLGLFNRL

SEQ ID NO: 30459 - protein, 9 aa, Homo Sapiens
LYLPSFFTY

SEQ ID NO: 30460 - protein, 9 aa, Homo Sapiens
LYLTIARQL

SEQ ID NO: 30461 - protein, 9 aa, Homo Sapiens
LYMDKFEEF

SEQ ID NO: 30462 - protein, 9 aa, Homo Sapiens
LYMNGMYAF

SEQ ID NO: 30463 - protein, 9 aa, Homo Sapiens
LYNDRMFRI

SEQ ID NO: 30464 - protein, 9 aa, Homo Sapiens
LYNKITSRL

SEQ ID NO: 30465 - protein, 9 aa, Homo Sapiens
LYNRTMVQL

SEQ ID NO: 30466 - protein, 9 aa, Homo Sapiens
LYPDHFHLL

SEQ ID NO: 30467 - protein, 9 aa, Homo Sapiens
LYPEGLAQL

SEQ ID NO: 30468 - protein, 9 aa, Homo Sapiens
LYPEVFEKF

SEQ ID NO: 30469 - protein, 9 aa, Homo Sapiens
LYPLTNYTF

SEQ ID NO: 30470 - protein, 9 aa, Homo Sapiens
LYPQFMFHL

SEQ ID NO: 30471 - protein, 9 aa, Homo Sapiens
LYPRLYPEL

SEQ ID NO: 30472 - protein, 9 aa, Homo Sapiens
LYPSIIQEF

SEQ ID NO: 30473 - protein, 9 aa, Homo Sapiens
LYQDGVFKF

SEQ ID NO: 30474 - protein, 9 aa, Homo Sapiens
LYQDKFPFF

SEQ ID NO: 30475 - protein, 9 aa, Homo Sapiens
LYQEHMAYI

SEQ ID NO: 30476 - protein, 9 aa, Homo Sapiens
LYQFNPAFF

SEQ ID NO: 30477 - protein, 9 aa, Homo Sapiens
LYQRAFQHL

SEQ ID NO: 30478 - protein, 9 aa, Homo Sapiens
LYQTFVVQL

SEQ ID NO: 30479 - protein, 9 aa, Homo Sapiens
LYSAVKTLL

SEQ ID NO: 30480 - protein, 9 aa, Homo Sapiens
LYSEVDVHF

SEQ ID NO: 30481 - protein, 9 aa, Homo Sapiens
LYSPLAEQF

SEQ ID NO: 30482 - protein, 9 aa, Homo Sapiens
LYSSEQLLI

SEQ ID NO: 30483 - protein, 9 aa, Homo Sapiens
LYSSKLYRF

SEQ ID NO: 30484 - protein, 9 aa, Homo Sapiens
LYSTIRPYL

SEQ ID NO: 30485 - protein, 9 aa, Homo Sapiens
LYTEAIKFF

SEQ ID NO: 30486 - protein, 9 aa, Homo Sapiens
LYTEKFEEF

SEQ ID NO: 30487 - protein, 9 aa, Homo Sapiens
LYTHIVTDI

SEQ ID NO: 30488 - protein, 9 aa, Homo Sapiens
LYTPEHHLI

SEQ ID NO: 30489 - protein, 9 aa, Homo Sapiens
LYTPHSWLL

SEQ ID NO: 30490 - protein, 9 aa, Homo Sapiens
LYTPKPQVI

SEQ ID NO: 30491 - protein, 9 aa, Homo Sapiens
LYTPVLIRF

SEQ ID NO: 30492 - protein, 9 aa, Homo Sapiens
LYVDFPQHL

SEQ ID NO: 30493 - protein, 9 aa, Homo Sapiens
LYVGKIPGF

SEQ ID NO: 30494 - protein, 9 aa, Homo Sapiens
LYVPVMITW

SEQ ID NO: 30495 - protein, 9 aa, Homo Sapiens
LYWSHPRKF

SEQ ID NO: 30496 - protein, 9 aa, Homo Sapiens
MFLDRPQQW

SEQ ID NO: 30497 - protein, 9 aa, Homo Sapiens
MWFPVKPKF

SEQ ID NO: 30498 - protein, 9 aa, Homo Sapiens
MYGFVNHAL

SEQ ID NO: 30499 - protein, 9 aa, Homo Sapiens
MYIARQLSF

SEQ ID NO: 30500 - protein, 9 aa, Homo Sapiens
MYIIGGYYW

SEQ ID NO: 30501 - protein, 9 aa, Homo Sapiens
MYLGITPSI

SEQ ID NO: 30502 - protein, 9 aa, Homo Sapiens
MYLKTVDKF

SEQ ID NO: 30503 - protein, 9 aa, Homo Sapiens
MYLVPAAMF

SEQ ID NO: 30504 - protein, 9 aa, Homo Sapiens
MYPYIFHVL

SEQ ID NO: 30505 - protein, 9 aa, Homo Sapiens
MYQEHINEI

SEQ ID NO: 30506 - protein, 9 aa, Homo Sapiens
MYTKLFVGF

SEQ ID NO: 30507 - protein, 9 aa, Homo Sapiens
NFHQSIPSF

SEQ ID NO: 30508 - protein, 9 aa, Homo Sapiens
NFICPALEF

SEQ ID NO: 30509 - protein, 9 aa, Homo Sapiens
NFIPTIVNF

SEQ ID NO: 30510 - protein, 9 aa, Homo Sapiens
NFLSRSFYW

SEQ ID NO: 30511 - protein, 9 aa, Homo Sapiens
NFPGIVTSF

SEQ ID NO: 30512 - protein, 9 aa, Homo Sapiens
NFTNVAATF

SEQ ID NO: 30513 - protein, 9 aa, Homo Sapiens
NFTSTHLLL

SEQ ID NO: 30514 - protein, 9 aa, Homo Sapiens
NHINVMVKF

SEQ ID NO: 30515 - protein, 9 aa, Homo Sapiens
NIHDIKLLF

SEQ ID NO: 30516 - protein, 9 aa, Homo Sapiens
NMTSVTNHF

SEQ ID NO: 30517 - protein, 9 aa, Homo Sapiens
NWVPTAYTW

SEQ ID NO: 30518 - protein, 9 aa, Homo Sapiens
NYAQVLDKF

SEQ ID NO: 30519 - protein, 9 aa, Homo Sapiens
NYASTFTWW

SEQ ID NO: 30520 - protein, 9 aa, Homo Sapiens
NYAWVYYHL

SEQ ID NO: 30521 - protein, 9 aa, Homo Sapiens
NYCNLFNYI

SEQ ID NO: 30522 - protein, 9 aa, Homo Sapiens
NYFHLAVAF

SEQ ID NO: 30523 - protein, 9 aa, Homo Sapiens
NYFIPSHYF

SEQ ID NO: 30524 - protein, 9 aa, Homo Sapiens
NYFLWTEKF

SEQ ID NO: 30525 - protein, 9 aa, Homo Sapiens
NYFPFQWKL

SEQ ID NO: 30526 - protein, 9 aa, Homo Sapiens
NYGHVYAVF

SEQ ID NO: 30527 - protein, 9 aa, Homo Sapiens
NYGQYFTLW

SEQ ID NO: 30528 - protein, 9 aa, Homo Sapiens
NYGRVFSEW

SEQ ID NO: 30529 - protein, 9 aa, Homo Sapiens
NYIDKVRFL

SEQ ID NO: 30530 - protein, 9 aa, Homo Sapiens
NYIEFTRIL

SEQ ID NO: 30531 - protein, 9 aa, Homo Sapiens
NYIEKVVAI

SEQ ID NO: 30532 - protein, 9 aa, Homo Sapiens
NYIGLINRI

SEQ ID NO: 30533 - protein, 9 aa, Homo Sapiens
NYIHVGAQL

SEQ ID NO: 30534 - protein, 9 aa, Homo Sapiens
NYIHWVEDL

SEQ ID NO: 30535 - protein, 9 aa, Homo Sapiens
NYIMKIHNF

SEQ ID NO: 30536 - protein, 9 aa, Homo Sapiens
NYIPYLTKL

SEQ ID NO: 30537 - protein, 9 aa, Homo Sapiens
NYISFYDHL

SEQ ID NO: 30538 - protein, 9 aa, Homo Sapiens
NYISGIQTI

SEQ ID NO: 30539 - protein, 9 aa, Homo Sapiens
NYITAALKL

SEQ ID NO: 30540 - protein, 9 aa, Homo Sapiens
NYKSHHLQL

SEQ ID NO: 30541 - protein, 9 aa, Homo Sapiens
NYLDIKGLL

SEQ ID NO: 30542 - protein, 9 aa, Homo Sapiens
NYLDQIAKF

SEQ ID NO: 30543 - protein, 9 aa, Homo Sapiens
NYLDVATFL

SEQ ID NO: 30544 - protein, 9 aa, Homo Sapiens
NYLHLDYNF

SEQ ID NO: 30545 - protein, 9 aa, Homo Sapiens
NYLKDGPYI

SEQ ID NO: 30546 - protein, 9 aa, Homo Sapiens
NYLPFIMEL

SEQ ID NO: 30547 - protein, 9 aa, Homo Sapiens
NYLPQISHL

SEQ ID NO: 30548 - protein, 9 aa, Homo Sapiens
NYLSHHLTI

SEQ ID NO: 30549 - protein, 9 aa, Homo Sapiens
NYLSIFRKF

SEQ ID NO: 30550 - protein, 9 aa, Homo Sapiens
NYMPGQLTI

SEQ ID NO: 30551 - protein, 9 aa, Homo Sapiens
NYNEKIYEL

SEQ ID NO: 30552 - protein, 9 aa, Homo Sapiens
NYPGIKLQI

SEQ ID NO: 30553 - protein, 9 aa, Homo Sapiens
NYPQSVPRL

SEQ ID NO: 30554 - protein, 9 aa, Homo Sapiens
NYPTKFQYL

SEQ ID NO: 30555 - protein, 9 aa, Homo Sapiens
NYQKRFQNL

SEQ ID NO: 30556 - protein, 9 aa, Homo Sapiens
NYQNVVHKL

SEQ ID NO: 30557 - protein, 9 aa, Homo Sapiens
NYSNIRFQF

SEQ ID NO: 30558 - protein, 9 aa, Homo Sapiens
NYSNVSIHL

SEQ ID NO: 30559 - protein, 9 aa, Homo Sapiens
NYTARFSRF

SEQ ID NO: 30560 - protein, 9 aa, Homo Sapiens
NYTGVQILL

SEQ ID NO: 30561 - protein, 9 aa, Homo Sapiens
NYTLVSHLI

SEQ ID NO: 30562 - protein, 9 aa, Homo Sapiens
NYVDCMKKF

SEQ ID NO: 30563 - protein, 9 aa, Homo Sapiens
NYVDVDPTF

SEQ ID NO: 30564 - protein, 9 aa, Homo Sapiens
NYVEVTRKW

SEQ ID NO: 30565 - protein, 9 aa, Homo Sapiens
NYVKKFQSF

SEQ ID NO: 30566 - protein, 9 aa, Homo Sapiens
NYVQAVEEF

SEQ ID NO: 30567 - protein, 9 aa, Homo Sapiens
NYYEHICHF

SEQ ID NO: 30568 - protein, 9 aa, Homo Sapiens
PAYHSSLMD

SEQ ID NO: 30569 - protein, 9 aa, Homo Sapiens
PFAKPLPTF

SEQ ID NO: 30570 - protein, 9 aa, Homo Sapiens
PFAPAIQTF

SEQ ID NO: 30571 - protein, 9 aa, Homo Sapiens
PFIDSQHVI

SEQ ID NO: 30572 - protein, 9 aa, Homo Sapiens
PFLDIQKRF

SEQ ID NO: 30573 - protein, 9 aa, Homo Sapiens
PFLELHTNF

SEQ ID NO: 30574 - protein, 9 aa, Homo Sapiens
PFLPKPLFF

SEQ ID NO: 30575 - protein, 9 aa, Homo Sapiens
PFLQVIPCF

SEQ ID NO: 30576 - protein, 9 aa, Homo Sapiens
PFTDQIFHF

SEQ ID NO: 30577 - protein, 9 aa, Homo Sapiens
PFVDHVFTF

SEQ ID NO: 30578 - protein, 9 aa, Homo Sapiens
PFYDKPMRI

SEQ ID NO: 30579 - protein, 9 aa, Homo Sapiens
PMNAVTTKF

SEQ ID NO: 30580 - protein, 9 aa, Homo Sapiens
PMYGAGHKF

SEQ ID NO: 30581 - protein, 9 aa, Homo Sapiens
PQPDVFPLF

SEQ ID NO: 30582 - protein, 9 aa, Homo Sapiens
PQYQTWEEF

SEQ ID NO: 30583 - protein, 9 aa, Homo Sapiens
PSIVHRKCF

SEQ ID NO: 30584 - protein, 9 aa, Homo Sapiens
PWLFDAPKF

SEQ ID NO: 30585 - protein, 9 aa, Homo Sapiens
PWYFWGETF

SEQ ID NO: 30586 - protein, 9 aa, Homo Sapiens
PYADQVFRI

SEQ ID NO: 30587 - protein, 9 aa, Homo Sapiens
PYAERVYFL

SEQ ID NO: 30588 - protein, 9 aa, Homo Sapiens
PYCSPPMTF

SEQ ID NO: 30589 - protein, 9 aa, Homo Sapiens
PYFNAPVYL

SEQ ID NO: 30590 - protein, 9 aa, Homo Sapiens
PYHPHPHVF

SEQ ID NO: 30591 - protein, 9 aa, Homo Sapiens
PYITEHTGF

SEQ ID NO: 30592 - protein, 9 aa, Homo Sapiens
PYLDKFFAL

SEQ ID NO: 30593 - protein, 9 aa, Homo Sapiens
PYLDSFYEY

SEQ ID NO: 30594 - protein, 9 aa, Homo Sapiens
PYLFHVVTF

SEQ ID NO: 30595 - protein, 9 aa, Homo Sapiens
PYLGQAPFL

SEQ ID NO: 30596 - protein, 9 aa, Homo Sapiens
PYLPSAHRV

SEQ ID NO: 30597 - protein, 9 aa, Homo Sapiens
PYLQGQVTL

SEQ ID NO: 30598 - protein, 9 aa, Homo Sapiens
PYLSEVLTF

SEQ ID NO: 30599 - protein, 9 aa, Homo Sapiens
PYLSPLVVW

SEQ ID NO: 30600 - protein, 9 aa, Homo Sapiens
PYMSSPCHI

SEQ ID NO: 30601 - protein, 9 aa, Homo Sapiens
PYNAPTVKF

SEQ ID NO: 30602 - protein, 9 aa, Homo Sapiens
PYNDYFEYF

SEQ ID NO: 30603 - protein, 9 aa, Homo Sapiens
PYNHQHEYF

SEQ ID NO: 30604 - protein, 9 aa, Homo Sapiens
PYNPLWAQL

SEQ ID NO: 30605 - protein, 9 aa, Homo Sapiens
PYPPPPPEF

SEQ ID NO: 30606 - protein, 9 aa, Homo Sapiens
PYRGWFPVI

SEQ ID NO: 30607 - protein, 9 aa, Homo Sapiens
PYRLIFEKF

SEQ ID NO: 30608 - protein, 9 aa, Homo Sapiens
PYSDSTAKL

SEQ ID NO: 30609 - protein, 9 aa, Homo Sapiens
PYVDHFLRL

SEQ ID NO: 30610 - protein, 9 aa, Homo Sapiens
PYVDNSYKW

SEQ ID NO: 30611 - protein, 9 aa, Homo Sapiens
PYVDRQNRI

SEQ ID NO: 30612 - protein, 9 aa, Homo Sapiens
PYVGGLEEF

SEQ ID NO: 30613 - protein, 9 aa, Homo Sapiens
PYVNNVPHL

SEQ ID NO: 30614 - protein, 9 aa, Homo Sapiens
PYVRNTPQF

SEQ ID NO: 30615 - protein, 9 aa, Homo Sapiens
PYYQPPYTL

SEQ ID NO: 30616 - protein, 9 aa, Homo Sapiens
PYYSKFILI

SEQ ID NO: 30617 - protein, 9 aa, Homo Sapiens
QFIDKPVCF

SEQ ID NO: 30618 - protein, 9 aa, Homo Sapiens
QFIGYPITL

SEQ ID NO: 30619 - protein, 9 aa, Homo Sapiens
QFVPKSHLF

SEQ ID NO: 30620 - protein, 9 aa, Homo Sapiens
QFVPPLPEW

SEQ ID NO: 30621 - protein, 9 aa, Homo Sapiens
QFYDLKELF

SEQ ID NO: 30622 - protein, 9 aa, Homo Sapiens
QGLDFFPFL

SEQ ID NO: 30623 - protein, 9 aa, Homo Sapiens
QIPEIKQTL

SEQ ID NO: 30624 - protein, 9 aa, Homo Sapiens
QMPTVHYEF

SEQ ID NO: 30625 - protein, 9 aa, Homo Sapiens
QQGGHPRPP

SEQ ID NO: 30626 - protein, 9 aa, Homo Sapiens
QVLDRYHRF

SEQ ID NO: 30627 - protein, 9 aa, Homo Sapiens
QWPELLLRF

SEQ ID NO: 30628 - protein, 9 aa, Homo Sapiens
QYAIISEAW

SEQ ID NO: 30629 - protein, 9 aa, Homo Sapiens
QYAPSTAQF

SEQ ID NO: 30630 - protein, 9 aa, Homo Sapiens
QYASAFHFL

SEQ ID NO: 30631 - protein, 9 aa, Homo Sapiens
QYASRFVQL

SEQ ID NO: 30632 - protein, 9 aa, Homo Sapiens
QYAVLLNRF

SEQ ID NO: 30633 - protein, 9 aa, Homo Sapiens
QYEEQFVTL

SEQ ID NO: 30634 - protein, 9 aa, Homo Sapiens
QYEIWRELF

SEQ ID NO: 30635 - protein, 9 aa, Homo Sapiens
QYEKLFHKW

SEQ ID NO: 30636 - protein, 9 aa, Homo Sapiens
QYEPLFHML

SEQ ID NO: 30637 - protein, 9 aa, Homo Sapiens
QYFPKAPEF

SEQ ID NO: 30638 - protein, 9 aa, Homo Sapiens
QYIDKLNEL

SEQ ID NO: 30639 - protein, 9 aa, Homo Sapiens
QYILFPLRF

SEQ ID NO: 30640 - protein, 9 aa, Homo Sapiens
QYISYIPQI

SEQ ID NO: 30641 - protein, 9 aa, Homo Sapiens
QYLARFDAL

SEQ ID NO: 30642 - protein, 9 aa, Homo Sapiens
QYLECPQYL

SEQ ID NO: 30643 - protein, 9 aa, Homo Sapiens
QYLEEAPKF

SEQ ID NO: 30644 - protein, 9 aa, Homo Sapiens
QYLELAHSL

SEQ ID NO: 30645 - protein, 9 aa, Homo Sapiens
QYLGQIQHI

SEQ ID NO: 30646 - protein, 9 aa, Homo Sapiens
QYLMDNPTF

SEQ ID NO: 30647 - protein, 9 aa, Homo Sapiens
QYLPHVARL

SEQ ID NO: 30648 - protein, 9 aa, Homo Sapiens
QYLQDAYSF

SEQ ID NO: 30649 - protein, 9 aa, Homo Sapiens
QYLTTKEQF

SEQ ID NO: 30650 - protein, 9 aa, Homo Sapiens
QYMERLQLL

SEQ ID NO: 30651 - protein, 9 aa, Homo Sapiens
QYNCLTQRI

SEQ ID NO: 30652 - protein, 9 aa, Homo Sapiens
QYNPKFQTL

SEQ ID NO: 30653 - protein, 9 aa, Homo Sapiens
QYPVIIHLI

SEQ ID NO: 30654 - protein, 9 aa, Homo Sapiens
QYQFLHHTL

SEQ ID NO: 30655 - protein, 9 aa, Homo Sapiens
QYSPLLAAF

SEQ ID NO: 30656 - protein, 9 aa, Homo Sapiens
QYTHKIYHL

SEQ ID NO: 30657 - protein, 9 aa, Homo Sapiens
QYVDFHNQL

SEQ ID NO: 30658 - protein, 9 aa, Homo Sapiens
QYVSAFSKL

SEQ ID NO: 30659 - protein, 9 aa, Homo Sapiens
QYVTQINRL

SEQ ID NO: 30660 - protein, 9 aa, Homo Sapiens
QYVYWLHML

SEQ ID NO: 30661 - protein, 9 aa, Homo Sapiens
RFCDNVWTF

SEQ ID NO: 30662 - protein, 9 aa, Homo Sapiens
RFEEAHFTF

SEQ ID NO: 30663 - protein, 9 aa, Homo Sapiens
RFFHLADLF

SEQ ID NO: 30664 - protein, 9 aa, Homo Sapiens
RFIDAVYKL

SEQ ID NO: 30665 - protein, 9 aa, Homo Sapiens
RFIGATANF

SEQ ID NO: 30666 - protein, 9 aa, Homo Sapiens
RFIGELTKF

SEQ ID NO: 30667 - protein, 9 aa, Homo Sapiens
RFILNLPTF

SEQ ID NO: 30668 - protein, 9 aa, Homo Sapiens
RFIPELINF

SEQ ID NO: 30669 - protein, 9 aa, Homo Sapiens
RFIPYTEEF

SEQ ID NO: 30670 - protein, 9 aa, Homo Sapiens
RFIQVCTQL

SEQ ID NO: 30671 - protein, 9 aa, Homo Sapiens
RFITEKAVF

SEQ ID NO: 30672 - protein, 9 aa, Homo Sapiens
RFLAATFLL

SEQ ID NO: 30673 - protein, 9 aa, Homo Sapiens
RFLEALNHF

SEQ ID NO: 30674 - protein, 9 aa, Homo Sapiens
RFLGLVVCL

SEQ ID NO: 30675 - protein, 9 aa, Homo Sapiens
RFLPEALFL

SEQ ID NO: 30676 - protein, 9 aa, Homo Sapiens
RFLPHGQLL

SEQ ID NO: 30677 - protein, 9 aa, Homo Sapiens
RFMDGHITF

SEQ ID NO: 30678 - protein, 9 aa, Homo Sapiens
RFQEKFFIF

SEQ ID NO: 30679 - protein, 9 aa, Homo Sapiens
RFSLNTVEL

SEQ ID NO: 30680 - protein, 9 aa, Homo Sapiens
RFVAPKTLF

SEQ ID NO: 30681 - protein, 9 aa, Homo Sapiens
RFVMKAHSF

SEQ ID NO: 30682 - protein, 9 aa, Homo Sapiens
RFVNVVPTF

SEQ ID NO: 30683 - protein, 9 aa, Homo Sapiens
RFYAFGRVF

SEQ ID NO: 30684 - protein, 9 aa, Homo Sapiens
RFYLLTEHF

SEQ ID NO: 30685 - protein, 9 aa, Homo Sapiens
RILHTYYKF

SEQ ID NO: 30686 - protein, 9 aa, Homo Sapiens
RILSVKTEF

SEQ ID NO: 30687 - protein, 9 aa, Homo Sapiens
RLIAQRYLL

SEQ ID NO: 30688 - protein, 9 aa, Homo Sapiens
RLLVKLYRF

SEQ ID NO: 30689 - protein, 9 aa, Homo Sapiens
RLPAWQPIL

SEQ ID NO: 30690 - protein, 9 aa, Homo Sapiens
RLPEPLPSW

SEQ ID NO: 30691 - protein, 9 aa, Homo Sapiens
RLPLRLFLI

SEQ ID NO: 30692 - protein, 9 aa, Homo Sapiens
RTINVYPNF

SEQ ID NO: 30693 - protein, 9 aa, Homo Sapiens
RTLLWTELF

SEQ ID NO: 30694 - protein, 9 aa, Homo Sapiens
RVLVVSAKF

SEQ ID NO: 30695 - protein, 9 aa, Homo Sapiens
RVVDIYSKF

SEQ ID NO: 30696 - protein, 9 aa, Homo Sapiens
RWLAQPYYL

SEQ ID NO: 30697 - protein, 9 aa, Homo Sapiens
RWPKKSAEF

SEQ ID NO: 30698 - protein, 9 aa, Homo Sapiens
RYALIMHKL

SEQ ID NO: 30699 - protein, 9 aa, Homo Sapiens
RYASINAHL

SEQ ID NO: 30700 - protein, 9 aa, Homo Sapiens
RYASINTHL

SEQ ID NO: 30701 - protein, 9 aa, Homo Sapiens
RYDEIRRHW

SEQ ID NO: 30702 - protein, 9 aa, Homo Sapiens
RYDKTQLRF

SEQ ID NO: 30703 - protein, 9 aa, Homo Sapiens
RYDNVTILF

SEQ ID NO: 30704 - protein, 9 aa, Homo Sapiens
RYEGKMETL

SEQ ID NO: 30705 - protein, 9 aa, Homo Sapiens
RYEKWIFEF

SEQ ID NO: 30706 - protein, 9 aa, Homo Sapiens
RYFENPQVI

SEQ ID NO: 30707 - protein, 9 aa, Homo Sapiens
RYFIPVSCF

SEQ ID NO: 30708 - protein, 9 aa, Homo Sapiens
RYFKGPELL

SEQ ID NO: 30709 - protein, 9 aa, Homo Sapiens
RYFKTPRKF

SEQ ID NO: 30710 - protein, 9 aa, Homo Sapiens
RYFLPPYTF

SEQ ID NO: 30711 - protein, 9 aa, Homo Sapiens
RYFQPPGTW

SEQ ID NO: 30712 - protein, 9 aa, Homo Sapiens
RYGDCHPVF

SEQ ID NO: 30713 - protein, 9 aa, Homo Sapiens
RYGLVTNEI

SEQ ID NO: 30714 - protein, 9 aa, Homo Sapiens
RYGTVEDLL

SEQ ID NO: 30715 - protein, 9 aa, Homo Sapiens
RYIANTVEL

SEQ ID NO: 30716 - protein, 9 aa, Homo Sapiens
RYIDRIHIF

SEQ ID NO: 30717 - protein, 9 aa, Homo Sapiens
RYIDTHNRV

SEQ ID NO: 30718 - protein, 9 aa, Homo Sapiens
RYIFAKNLF

SEQ ID NO: 30719 - protein, 9 aa, Homo Sapiens
RYIHLENLL

SEQ ID NO: 30720 - protein, 9 aa, Homo Sapiens
RYIKALETL

SEQ ID NO: 30721 - protein, 9 aa, Homo Sapiens
RYILEPFFI

SEQ ID NO: 30722 - protein, 9 aa, Homo Sapiens
RYINNPLLI

SEQ ID NO: 30723 - protein, 9 aa, Homo Sapiens
RYIPDAMNL

SEQ ID NO: 30724 - protein, 9 aa, Homo Sapiens
RYIPHPFLV

SEQ ID NO: 30725 - protein, 9 aa, Homo Sapiens
RYIPTAAAF

SEQ ID NO: 30726 - protein, 9 aa, Homo Sapiens
RYITKGNLF

SEQ ID NO: 30727 - protein, 9 aa, Homo Sapiens
RYIYNREEF

SEQ ID NO: 30728 - protein, 9 aa, Homo Sapiens
RYKLYQEMF

SEQ ID NO: 30729 - protein, 9 aa, Homo Sapiens
RYKQDVERF

SEQ ID NO: 30730 - protein, 9 aa, Homo Sapiens
RYKYQFFNL

SEQ ID NO: 30731 - protein, 9 aa, Homo Sapiens
RYLAEKYEW

SEQ ID NO: 30732 - protein, 9 aa, Homo Sapiens
RYLDEINLL

SEQ ID NO: 30733 - protein, 9 aa, Homo Sapiens
RYLDELMKL

SEQ ID NO: 30734 - protein, 9 aa, Homo Sapiens
RYLDLFTNY

SEQ ID NO: 30735 - protein, 9 aa, Homo Sapiens
RYLDLFTSF

SEQ ID NO: 30736 - protein, 9 aa, Homo Sapiens
RYLDSLKAI

SEQ ID NO: 30737 - protein, 9 aa, Homo Sapiens
RYLEKNVKL

SEQ ID NO: 30738 - protein, 9 aa, Homo Sapiens
RYLEKPMEI

SEQ ID NO: 30739 - protein, 9 aa, Homo Sapiens
RYLEQLHQL

SEQ ID NO: 30740 - protein, 9 aa, Homo Sapiens
RYLERLIKL

SEQ ID NO: 30741 - protein, 9 aa, Homo Sapiens
RYLEVMRKL

SEQ ID NO: 30742 - protein, 9 aa, Homo Sapiens
RYLEYFEKI

SEQ ID NO: 30743 - protein, 9 aa, Homo Sapiens
RYLFVVDRL

SEQ ID NO: 30744 - protein, 9 aa, Homo Sapiens
RYLGKKVQF

SEQ ID NO: 30745 - protein, 9 aa, Homo Sapiens
RYLGKVLEL

SEQ ID NO: 30746 - protein, 9 aa, Homo Sapiens
RYLHKPYLI

SEQ ID NO: 30747 - protein, 9 aa, Homo Sapiens
RYLLKFEQI

SEQ ID NO: 30748 - protein, 9 aa, Homo Sapiens
RYLNEFEEL

SEQ ID NO: 30749 - protein, 9 aa, Homo Sapiens
RYLNFFTKA

SEQ ID NO: 30750 - protein, 9 aa, Homo Sapiens
RYLNKAFHI

SEQ ID NO: 30751 - protein, 9 aa, Homo Sapiens
RYLPDTLLL

SEQ ID NO: 30752 - protein, 9 aa, Homo Sapiens
RYLPHEELF

SEQ ID NO: 30753 - protein, 9 aa, Homo Sapiens
RYLPLNTAL

SEQ ID NO: 30754 - protein, 9 aa, Homo Sapiens
RYLPQCSYF

SEQ ID NO: 30755 - protein, 9 aa, Homo Sapiens
RYLQTLTTI

SEQ ID NO: 30756 - protein, 9 aa, Homo Sapiens
RYLSHFRCV

SEQ ID NO: 30757 - protein, 9 aa, Homo Sapiens
RYLSKATTL

SEQ ID NO: 30758 - protein, 9 aa, Homo Sapiens
RYLSKVLEL

SEQ ID NO: 30759 - protein, 9 aa, Homo Sapiens
RYLTGAWRL

SEQ ID NO: 30760 - protein, 9 aa, Homo Sapiens
RYLTVAAVF

SEQ ID NO: 30761 - protein, 9 aa, Homo Sapiens
RYLVISEKL

SEQ ID NO: 30762 - protein, 9 aa, Homo Sapiens
RYLWATVTI

SEQ ID NO: 30763 - protein, 9 aa, Homo Sapiens
RYMDAWNTV

SEQ ID NO: 30764 - protein, 9 aa, Homo Sapiens
RYMNHMQSL

SEQ ID NO: 30765 - protein, 9 aa, Homo Sapiens
RYMPDICVI

SEQ ID NO: 30766 - protein, 9 aa, Homo Sapiens
RYMPQNPCI

SEQ ID NO: 30767 - protein, 9 aa, Homo Sapiens
RYMPQNPHI

SEQ ID NO: 30768 - protein, 9 aa, Homo Sapiens
RYMVHLLEL

SEQ ID NO: 30769 - protein, 9 aa, Homo Sapiens
RYNEKCFKL

SEQ ID NO: 30770 - protein, 9 aa, Homo Sapiens
RYNHITATY

SEQ ID NO: 30771 - protein, 9 aa, Homo Sapiens
RYNPENNTW

SEQ ID NO: 30772 - protein, 9 aa, Homo Sapiens
RYNPNLNTW

SEQ ID NO: 30773 - protein, 9 aa, Homo Sapiens
RYNSQLLSF

SEQ ID NO: 30774 - protein, 9 aa, Homo Sapiens
RYPAIIYNI

SEQ ID NO: 30775 - protein, 9 aa, Homo Sapiens
RYPCFFNTL

SEQ ID NO: 30776 - protein, 9 aa, Homo Sapiens
RYPDNLKHL

SEQ ID NO: 30777 - protein, 9 aa, Homo Sapiens
RYPDRITLI

SEQ ID NO: 30778 - protein, 9 aa, Homo Sapiens
RYPDSHQLF

SEQ ID NO: 30779 - protein, 9 aa, Homo Sapiens
RYPNKLDTI

SEQ ID NO: 30780 - protein, 9 aa, Homo Sapiens
RYPSLWRRL

SEQ ID NO: 30781 - protein, 9 aa, Homo Sapiens
RYPSNLQLF

SEQ ID NO: 30782 - protein, 9 aa, Homo Sapiens
RYQDAIRVF

SEQ ID NO: 30783 - protein, 9 aa, Homo Sapiens
RYQDIIHSI

SEQ ID NO: 30784 - protein, 9 aa, Homo Sapiens
RYQFIEEAF

SEQ ID NO: 30785 - protein, 9 aa, Homo Sapiens
RYQGVNLYI

SEQ ID NO: 30786 - protein, 9 aa, Homo Sapiens
RYQQWMERF

SEQ ID NO: 30787 - protein, 9 aa, Homo Sapiens
RYQTKFRHL

SEQ ID NO: 30788 - protein, 9 aa, Homo Sapiens
RYQTLYARF

SEQ ID NO: 30789 - protein, 9 aa, Homo Sapiens
RYRPDMPCF

SEQ ID NO: 30790 - protein, 9 aa, Homo Sapiens
RYRPRAPII

SEQ ID NO: 30791 - protein, 9 aa, Homo Sapiens
RYSDSTFTF

SEQ ID NO: 30792 - protein, 9 aa, Homo Sapiens
RYSGNQVLF

SEQ ID NO: 30793 - protein, 9 aa, Homo Sapiens
RYSPVLSRF

SEQ ID NO: 30794 - protein, 9 aa, Homo Sapiens
RYTDVSTRY

SEQ ID NO: 30795 - protein, 9 aa, Homo Sapiens
RYTTEFHEL

SEQ ID NO: 30796 - protein, 9 aa, Homo Sapiens
RYVDKVSNL

SEQ ID NO: 30797 - protein, 9 aa, Homo Sapiens
RYVDQVLQL

SEQ ID NO: 30798 - protein, 9 aa, Homo Sapiens
RYVDRVTEF

SEQ ID NO: 30799 - protein, 9 aa, Homo Sapiens
RYVEIVSQF

SEQ ID NO: 30800 - protein, 9 aa, Homo Sapiens
RYVGFCMKF

SEQ ID NO: 30801 - protein, 9 aa, Homo Sapiens
RYVKKLGDF

SEQ ID NO: 30802 - protein, 9 aa, Homo Sapiens
RYVMTTTTL

SEQ ID NO: 30803 - protein, 9 aa, Homo Sapiens
RYVPRASYF

SEQ ID NO: 30804 - protein, 9 aa, Homo Sapiens
RYVQPMASF

SEQ ID NO: 30805 - protein, 9 aa, Homo Sapiens
RYVWWKKSL

SEQ ID NO: 30806 - protein, 9 aa, Homo Sapiens
RYYGAISKL

SEQ ID NO: 30807 - protein, 9 aa, Homo Sapiens
RYYGNISRF

SEQ ID NO: 30808 - protein, 9 aa, Homo Sapiens
RYYHCAVTL

SEQ ID NO: 30809 - protein, 9 aa, Homo Sapiens
SALEKFFYF

SEQ ID NO: 30810 - protein, 9 aa, Homo Sapiens
SFCDKVMRW

SEQ ID NO: 30811 - protein, 9 aa, Homo Sapiens
SFFLGKVCF

SEQ ID NO: 30812 - protein, 9 aa, Homo Sapiens
SFFRVVPQF

SEQ ID NO: 30813 - protein, 9 aa, Homo Sapiens
SFHNIHNTF

SEQ ID NO: 30814 - protein, 9 aa, Homo Sapiens
SFHQVDFTF

SEQ ID NO: 30815 - protein, 9 aa, Homo Sapiens
SFINSNLKF

SEQ ID NO: 30816 - protein, 9 aa, Homo Sapiens
SFIRTRLLL

SEQ ID NO: 30817 - protein, 9 aa, Homo Sapiens
SFISVGNKF

SEQ ID NO: 30818 - protein, 9 aa, Homo Sapiens
SFITSSWTF

SEQ ID NO: 30819 - protein, 9 aa, Homo Sapiens
SFLATITSF

SEQ ID NO: 30820 - protein, 9 aa, Homo Sapiens
SFLKFHPEL

SEQ ID NO: 30821 - protein, 9 aa, Homo Sapiens
SFLPGNFHF

SEQ ID NO: 30822 - protein, 9 aa, Homo Sapiens
SFLPLAHMF

SEQ ID NO: 30823 - protein, 9 aa, Homo Sapiens
SFLPVHLGF

SEQ ID NO: 30824 - protein, 9 aa, Homo Sapiens
SFLPVVSTF

SEQ ID NO: 30825 - protein, 9 aa, Homo Sapiens
SFLQRFFKF

SEQ ID NO: 30826 - protein, 9 aa, Homo Sapiens
SFMPNSPRF

SEQ ID NO: 30827 - protein, 9 aa, Homo Sapiens
SFSTVHEKF

SEQ ID NO: 30828 - protein, 9 aa, Homo Sapiens
SFSTVTNTF

SEQ ID NO: 30829 - protein, 9 aa, Homo Sapiens
SGPGPAAAL

SEQ ID NO: 30830 - protein, 9 aa, Homo Sapiens
SLPDFCHKF

SEQ ID NO: 30831 - protein, 9 aa, Homo Sapiens
SLPEDFYHF

SEQ ID NO: 30832 - protein, 9 aa, Homo Sapiens
SLPESVPLF

SEQ ID NO: 30833 - protein, 9 aa, Homo Sapiens
SMFHNRHLF

SEQ ID NO: 30834 - protein, 9 aa, Homo Sapiens
SQMKSYQSF

SEQ ID NO: 30835 - protein, 9 aa, Homo Sapiens
SSPAPRTAL

SEQ ID NO: 30836 - protein, 9 aa, Homo Sapiens
SWLPLFPRI

SEQ ID NO: 30837 - protein, 9 aa, Homo Sapiens
SYADQMFLL

SEQ ID NO: 30838 - protein, 9 aa, Homo Sapiens
SYALLTYMI

SEQ ID NO: 30839 - protein, 9 aa, Homo Sapiens
SYANYFIRL

SEQ ID NO: 30840 - protein, 9 aa, Homo Sapiens
SYAQYVHNL

SEQ ID NO: 30841 - protein, 9 aa, Homo Sapiens
SYEYRFLEF

SEQ ID NO: 30842 - protein, 9 aa, Homo Sapiens
SYFPKILTF

SEQ ID NO: 30843 - protein, 9 aa, Homo Sapiens
SYGAWYPLL

SEQ ID NO: 30844 - protein, 9 aa, Homo Sapiens
SYGDILHVI

SEQ ID NO: 30845 - protein, 9 aa, Homo Sapiens
SYGIVLYEL

SEQ ID NO: 30846 - protein, 9 aa, Homo Sapiens
SYGKINILL

SEQ ID NO: 30847 - protein, 9 aa, Homo Sapiens
SYGKVTAEF

SEQ ID NO: 30848 - protein, 9 aa, Homo Sapiens
SYIAHLRQI

SEQ ID NO: 30849 - protein, 9 aa, Homo Sapiens
SYIALPLTL

SEQ ID NO: 30850 - protein, 9 aa, Homo Sapiens
SYIDVAVKL

SEQ ID NO: 30851 - protein, 9 aa, Homo Sapiens
SYIEHIFEI

SEQ ID NO: 30852 - protein, 9 aa, Homo Sapiens
SYIELPAYL

SEQ ID NO: 30853 - protein, 9 aa, Homo Sapiens
SYIGANVRL

SEQ ID NO: 30854 - protein, 9 aa, Homo Sapiens
SYIGVHQQI

SEQ ID NO: 30855 - protein, 9 aa, Homo Sapiens
SYIHYFHCL

SEQ ID NO: 30856 - protein, 9 aa, Homo Sapiens
SYINLNPRL

SEQ ID NO: 30857 - protein, 9 aa, Homo Sapiens
SYIPCSERI

SEQ ID NO: 30858 - protein, 9 aa, Homo Sapiens
SYIPIFPQL

SEQ ID NO: 30859 - protein, 9 aa, Homo Sapiens
SYIPSTVFF

SEQ ID NO: 30860 - protein, 9 aa, Homo Sapiens
SYISRTNQL

SEQ ID NO: 30861 - protein, 9 aa, Homo Sapiens
SYITKPEKW

SEQ ID NO: 30862 - protein, 9 aa, Homo Sapiens
SYLANHTRI

SEQ ID NO: 30863 - protein, 9 aa, Homo Sapiens
SYLAQHIRI

SEQ ID NO: 30864 - protein, 9 aa, Homo Sapiens
SYLAVHKRI

SEQ ID NO: 30865 - protein, 9 aa, Homo Sapiens
SYLDEGFLL

SEQ ID NO: 30866 - protein, 9 aa, Homo Sapiens
SYLDRTEQL

SEQ ID NO: 30867 - protein, 9 aa, Homo Sapiens
SYLDSVHFF

SEQ ID NO: 30868 - protein, 9 aa, Homo Sapiens
SYLDVKQRL

SEQ ID NO: 30869 - protein, 9 aa, Homo Sapiens
SYLEGAVYI

SEQ ID NO: 30870 - protein, 9 aa, Homo Sapiens
SYLEKVVTL

SEQ ID NO: 30871 - protein, 9 aa, Homo Sapiens
SYLENVDHF

SEQ ID NO: 30872 - protein, 9 aa, Homo Sapiens
SYLKEFIHI

SEQ ID NO: 30873 - protein, 9 aa, Homo Sapiens
SYLKQLPHF

SEQ ID NO: 30874 - protein, 9 aa, Homo Sapiens
SYLLFFRAL

SEQ ID NO: 30875 - protein, 9 aa, Homo Sapiens
SYLNQHQRI

SEQ ID NO: 30876 - protein, 9 aa, Homo Sapiens
SYLNSVQRL

SEQ ID NO: 30877 - protein, 9 aa, Homo Sapiens
SYLPHAPPF

SEQ ID NO: 30878 - protein, 9 aa, Homo Sapiens
SYLPISPTF

SEQ ID NO: 30879 - protein, 9 aa, Homo Sapiens
SYLPLAHMF

SEQ ID NO: 30880 - protein, 9 aa, Homo Sapiens
SYLPRIVLL

SEQ ID NO: 30881 - protein, 9 aa, Homo Sapiens
SYLSHQLDF

SEQ ID NO: 30882 - protein, 9 aa, Homo Sapiens
SYLSQHQRI

SEQ ID NO: 30883 - protein, 9 aa, Homo Sapiens
SYLSSILRF

SEQ ID NO: 30884 - protein, 9 aa, Homo Sapiens
SYLSSLSHL

SEQ ID NO: 30885 - protein, 9 aa, Homo Sapiens
SYLSVHTRM

SEQ ID NO: 30886 - protein, 9 aa, Homo Sapiens
SYLTKHKRI

SEQ ID NO: 30887 - protein, 9 aa, Homo Sapiens
SYLTKHQRI

SEQ ID NO: 30888 - protein, 9 aa, Homo Sapiens
SYLTQHQRI

SEQ ID NO: 30889 - protein, 9 aa, Homo Sapiens
SYLTVHKRI

SEQ ID NO: 30890 - protein, 9 aa, Homo Sapiens
SYLTWHQQI

SEQ ID NO: 30891 - protein, 9 aa, Homo Sapiens
SYLVIHERI

SEQ ID NO: 30892 - protein, 9 aa, Homo Sapiens
SYMEVPTYL

SEQ ID NO: 30893 - protein, 9 aa, Homo Sapiens
SYMGHFDLL

SEQ ID NO: 30894 - protein, 9 aa, Homo Sapiens
SYMPTVSHL

SEQ ID NO: 30895 - protein, 9 aa, Homo Sapiens
SYMWTINNF

SEQ ID NO: 30896 - protein, 9 aa, Homo Sapiens
SYNDIYCRF

SEQ ID NO: 30897 - protein, 9 aa, Homo Sapiens
SYNGKLYVF

SEQ ID NO: 30898 - protein, 9 aa, Homo Sapiens
SYNNFFRMF

SEQ ID NO: 30899 - protein, 9 aa, Homo Sapiens
SYNPITHQL

SEQ ID NO: 30900 - protein, 9 aa, Homo Sapiens
SYNPLWLRI

SEQ ID NO: 30901 - protein, 9 aa, Homo Sapiens
SYPDLLPTF

SEQ ID NO: 30902 - protein, 9 aa, Homo Sapiens
SYPDNFLHI

SEQ ID NO: 30903 - protein, 9 aa, Homo Sapiens
SYPGSSYIF

SEQ ID NO: 30904 - protein, 9 aa, Homo Sapiens
SYPTFFPRF

SEQ ID NO: 30905 - protein, 9 aa, Homo Sapiens
SYQDVHLLL

SEQ ID NO: 30906 - protein, 9 aa, Homo Sapiens
SYQKVIELF

SEQ ID NO: 30907 - protein, 9 aa, Homo Sapiens
SYQRAFNEF

SEQ ID NO: 30908 - protein, 9 aa, Homo Sapiens
SYRNIFPIW

SEQ ID NO: 30909 - protein, 9 aa, Homo Sapiens
SYSDPPLKF

SEQ ID NO: 30910 - protein, 9 aa, Homo Sapiens
SYSHIMALI

SEQ ID NO: 30911 - protein, 9 aa, Homo Sapiens
SYSPQAFKF

SEQ ID NO: 30912 - protein, 9 aa, Homo Sapiens
SYTHIQYLF

SEQ ID NO: 30913 - protein, 9 aa, Homo Sapiens
SYTRLFSNF

SEQ ID NO: 30914 - protein, 9 aa, Homo Sapiens
SYTSVKENF

SEQ ID NO: 30915 - protein, 9 aa, Homo Sapiens
SYVETELIF

SEQ ID NO: 30916 - protein, 9 aa, Homo Sapiens
SYVHYVFRL

SEQ ID NO: 30917 - protein, 9 aa, Homo Sapiens
SYVQVTSNF

SEQ ID NO: 30918 - protein, 9 aa, Homo Sapiens
SYVVAMETF

SEQ ID NO: 30919 - protein, 9 aa, Homo Sapiens
SYVWRTYHL

SEQ ID NO: 30920 - protein, 9 aa, Homo Sapiens
SYYKDALRF

SEQ ID NO: 30921 - protein, 9 aa, Homo Sapiens
SYYTVAHAI

SEQ ID NO: 30922 - protein, 9 aa, Homo Sapiens
TDVTFLLIF

SEQ ID NO: 30923 - protein, 9 aa, Homo Sapiens
TEAPLNPKA

SEQ ID NO: 30924 - protein, 9 aa, Homo Sapiens
TFIDAGSNF

SEQ ID NO: 30925 - protein, 9 aa, Homo Sapiens
TFINLMTHI

SEQ ID NO: 30926 - protein, 9 aa, Homo Sapiens
TFISYSVTF

SEQ ID NO: 30927 - protein, 9 aa, Homo Sapiens
TFKDVEVTF

SEQ ID NO: 30928 - protein, 9 aa, Homo Sapiens
TFLHVNPYI

SEQ ID NO: 30929 - protein, 9 aa, Homo Sapiens
TFLNIAEHF

SEQ ID NO: 30930 - protein, 9 aa, Homo Sapiens
TFLPFIHTI

SEQ ID NO: 30931 - protein, 9 aa, Homo Sapiens
TFLPTAIKF

SEQ ID NO: 30932 - protein, 9 aa, Homo Sapiens
TFSDVEAHF

SEQ ID NO: 30933 - protein, 9 aa, Homo Sapiens
TFTDHVMLF

SEQ ID NO: 30934 - protein, 9 aa, Homo Sapiens
TFTFSHATF

SEQ ID NO: 30935 - protein, 9 aa, Homo Sapiens
TLIDIMTRF

SEQ ID NO: 30936 - protein, 9 aa, Homo Sapiens
TLSDIFLLF

SEQ ID NO: 30937 - protein, 9 aa, Homo Sapiens
TMLGKFYHF

SEQ ID NO: 30938 - protein, 9 aa, Homo Sapiens
TPPPPGKPE

SEQ ID NO: 30939 - protein, 9 aa, Homo Sapiens
TQNPNYYNL

SEQ ID NO: 30940 - protein, 9 aa, Homo Sapiens
TWIHKLHKF

SEQ ID NO: 30941 - protein, 9 aa, Homo Sapiens
TWWHGVLAW

SEQ ID NO: 30942 - protein, 9 aa, Homo Sapiens
TYAEKLHRL

SEQ ID NO: 30943 - protein, 9 aa, Homo Sapiens
TYAPVKSFL

SEQ ID NO: 30944 - protein, 9 aa, Homo Sapiens
TYATHVTEI

SEQ ID NO: 30945 - protein, 9 aa, Homo Sapiens
TYFDKNYNL

SEQ ID NO: 30946 - protein, 9 aa, Homo Sapiens
TYFRFQEEI

SEQ ID NO: 30947 - protein, 9 aa, Homo Sapiens
TYFSTPLLL

SEQ ID NO: 30948 - protein, 9 aa, Homo Sapiens
TYGEIFEKF

SEQ ID NO: 30949 - protein, 9 aa, Homo Sapiens
TYGKIDLGF

SEQ ID NO: 30950 - protein, 9 aa, Homo Sapiens
TYGNPNYHW

SEQ ID NO: 30951 - protein, 9 aa, Homo Sapiens
TYGPSFPAF

SEQ ID NO: 30952 - protein, 9 aa, Homo Sapiens
TYGVSFFLV

SEQ ID NO: 30953 - protein, 9 aa, Homo Sapiens
TYHGVFVNI

SEQ ID NO: 30954 - protein, 9 aa, Homo Sapiens
TYHPGVPVF

SEQ ID NO: 30955 - protein, 9 aa, Homo Sapiens
TYIDKKCPF

SEQ ID NO: 30956 - protein, 9 aa, Homo Sapiens
TYIDKSTQL

SEQ ID NO: 30957 - protein, 9 aa, Homo Sapiens
TYIGPSTVF

SEQ ID NO: 30958 - protein, 9 aa, Homo Sapiens
TYIKFINLF

SEQ ID NO: 30959 - protein, 9 aa, Homo Sapiens
TYIKPISKL

SEQ ID NO: 30960 - protein, 9 aa, Homo Sapiens
TYIKSPPFF

SEQ ID NO: 30961 - protein, 9 aa, Homo Sapiens
TYINHVVSV

SEQ ID NO: 30962 - protein, 9 aa, Homo Sapiens
TYINPFVSF

SEQ ID NO: 30963 - protein, 9 aa, Homo Sapiens
TYIQILESF

SEQ ID NO: 30964 - protein, 9 aa, Homo Sapiens
TYIQKIFRM

SEQ ID NO: 30965 - protein, 9 aa, Homo Sapiens
TYIRDFQKI

SEQ ID NO: 30966 - protein, 9 aa, Homo Sapiens
TYISWKEEL

SEQ ID NO: 30967 - protein, 9 aa, Homo Sapiens
TYITSVSRL

SEQ ID NO: 30968 - protein, 9 aa, Homo Sapiens
TYKAFNTFI

SEQ ID NO: 30969 - protein, 9 aa, Homo Sapiens
TYLDIFRDF

SEQ ID NO: 30970 - protein, 9 aa, Homo Sapiens
TYLDKVENI

SEQ ID NO: 30971 - protein, 9 aa, Homo Sapiens
TYLDLLGTW

SEQ ID NO: 30972 - protein, 9 aa, Homo Sapiens
TYLEKAIKI

SEQ ID NO: 30973 - protein, 9 aa, Homo Sapiens
TYLEKFQNL

SEQ ID NO: 30974 - protein, 9 aa, Homo Sapiens
TYLGKYWAI

SEQ ID NO: 30975 - protein, 9 aa, Homo Sapiens
TYLIQHQKI

SEQ ID NO: 30976 - protein, 9 aa, Homo Sapiens
TYLKAVKLF

SEQ ID NO: 30977 - protein, 9 aa, Homo Sapiens
TYLLSVYRL

SEQ ID NO: 30978 - protein, 9 aa, Homo Sapiens
TYLNDFFSY

SEQ ID NO: 30979 - protein, 9 aa, Homo Sapiens
TYLNISRNL

SEQ ID NO: 30980 - protein, 9 aa, Homo Sapiens
TYLNWLVRM

SEQ ID NO: 30981 - protein, 9 aa, Homo Sapiens
TYLPTSPLL

SEQ ID NO: 30982 - protein, 9 aa, Homo Sapiens
TYLRDQHFL

SEQ ID NO: 30983 - protein, 9 aa, Homo Sapiens
TYLRKIPRF

SEQ ID NO: 30984 - protein, 9 aa, Homo Sapiens
TYLSHQEKL

SEQ ID NO: 30985 - protein, 9 aa, Homo Sapiens
TYMPHVHIL

SEQ ID NO: 30986 - protein, 9 aa, Homo Sapiens
TYNMVLNLL

SEQ ID NO: 30987 - protein, 9 aa, Homo Sapiens
TYNQKHSLF

SEQ ID NO: 30988 - protein, 9 aa, Homo Sapiens
TYNYPVHYF

SEQ ID NO: 30989 - protein, 9 aa, Homo Sapiens
TYPDVNNSI

SEQ ID NO: 30990 - protein, 9 aa, Homo Sapiens
TYPENWRAF

SEQ ID NO: 30991 - protein, 9 aa, Homo Sapiens
TYPNYLPLY

SEQ ID NO: 30992 - protein, 9 aa, Homo Sapiens
TYQDIFRDF

SEQ ID NO: 30993 - protein, 9 aa, Homo Sapiens
TYQDIQNTI

SEQ ID NO: 30994 - protein, 9 aa, Homo Sapiens
TYQEVAQKF

SEQ ID NO: 30995 - protein, 9 aa, Homo Sapiens
TYQRWQFTL

SEQ ID NO: 30996 - protein, 9 aa, Homo Sapiens
TYQVLAVTF

SEQ ID NO: 30997 - protein, 9 aa, Homo Sapiens
TYRNVMEQF

SEQ ID NO: 30998 - protein, 9 aa, Homo Sapiens
TYSKKHFRI

SEQ ID NO: 30999 - protein, 9 aa, Homo Sapiens
TYSNFHPLL

SEQ ID NO: 31000 - protein, 9 aa, Homo Sapiens
TYSYSFFHF

SEQ ID NO: 31001 - protein, 9 aa, Homo Sapiens
TYTDRVFFL

SEQ ID NO: 31002 - protein, 9 aa, Homo Sapiens
TYTEFVPQI

SEQ ID NO: 31003 - protein, 9 aa, Homo Sapiens
TYTSYLDKF

SEQ ID NO: 31004 - protein, 9 aa, Homo Sapiens
TYTYEKLLW

SEQ ID NO: 31005 - protein, 9 aa, Homo Sapiens
TYVHSSATI

SEQ ID NO: 31006 - protein, 9 aa, Homo Sapiens
TYVPCLKTL

SEQ ID NO: 31007 - protein, 9 aa, Homo Sapiens
TYVPWPLML

SEQ ID NO: 31008 - protein, 9 aa, Homo Sapiens
TYVRWYTQL

SEQ ID NO: 31009 - protein, 9 aa, Homo Sapiens
TYVSFPLEL

SEQ ID NO: 31010 - protein, 9 aa, Homo Sapiens
TYVSGTLRF

SEQ ID NO: 31011 - protein, 9 aa, Homo Sapiens
TYVTILPEL

SEQ ID NO: 31012 - protein, 9 aa, Homo Sapiens
TYVYFTNEL

SEQ ID NO: 31013 - protein, 9 aa, Homo Sapiens
VANAIIHLF

SEQ ID NO: 31014 - protein, 9 aa, Homo Sapiens
VAPPVSGDL

SEQ ID NO: 31015 - protein, 9 aa, Homo Sapiens
VFADVETHF

SEQ ID NO: 31016 - protein, 9 aa, Homo Sapiens
VFGYHGYTF

SEQ ID NO: 31017 - protein, 9 aa, Homo Sapiens
VFIDGPLAL

SEQ ID NO: 31018 - protein, 9 aa, Homo Sapiens
VFIDHPVHL

SEQ ID NO: 31019 - protein, 9 aa, Homo Sapiens
VFIDKQTNL

SEQ ID NO: 31020 - protein, 9 aa, Homo Sapiens
VFIGNLNTL

SEQ ID NO: 31021 - protein, 9 aa, Homo Sapiens
VFIGTGHLL

SEQ ID NO: 31022 - protein, 9 aa, Homo Sapiens
VFIKYLPEW

SEQ ID NO: 31023 - protein, 9 aa, Homo Sapiens
VFKEKHHSW

SEQ ID NO: 31024 - protein, 9 aa, Homo Sapiens
VFKGAPHEI

SEQ ID NO: 31025 - protein, 9 aa, Homo Sapiens
VFKPIVEKF

SEQ ID NO: 31026 - protein, 9 aa, Homo Sapiens
VFLGQAFTI

SEQ ID NO: 31027 - protein, 9 aa, Homo Sapiens
VFLPGFYHL

SEQ ID NO: 31028 - protein, 9 aa, Homo Sapiens
VFLPIHITY

SEQ ID NO: 31029 - protein, 9 aa, Homo Sapiens
VFLRAINKF

SEQ ID NO: 31030 - protein, 9 aa, Homo Sapiens
VFLTTRQTL

SEQ ID NO: 31031 - protein, 9 aa, Homo Sapiens
VFNDVRLLL

SEQ ID NO: 31032 - protein, 9 aa, Homo Sapiens
VFNGCPLRI

SEQ ID NO: 31033 - protein, 9 aa, Homo Sapiens
VFPDDMPTL

SEQ ID NO: 31034 - protein, 9 aa, Homo Sapiens
VFPDFYLHL

SEQ ID NO: 31035 - protein, 9 aa, Homo Sapiens
VFPDKGYSF

SEQ ID NO: 31036 - protein, 9 aa, Homo Sapiens
VFPEKGYSF

SEQ ID NO: 31037 - protein, 9 aa, Homo Sapiens
VFSTVVIHF

SEQ ID NO: 31038 - protein, 9 aa, Homo Sapiens
VFTAETHNF

SEQ ID NO: 31039 - protein, 9 aa, Homo Sapiens
VFTEVANLF

SEQ ID NO: 31040 - protein, 9 aa, Homo Sapiens
VFTGVVTKL

SEQ ID NO: 31041 - protein, 9 aa, Homo Sapiens
VFTLKPLEF

SEQ ID NO: 31042 - protein, 9 aa, Homo Sapiens
VFTPVTTEI

SEQ ID NO: 31043 - protein, 9 aa, Homo Sapiens
VFTRSELKF

SEQ ID NO: 31044 - protein, 9 aa, Homo Sapiens
VFTSVRQKI

SEQ ID NO: 31045 - protein, 9 aa, Homo Sapiens
VFTYVGALF

SEQ ID NO: 31046 - protein, 9 aa, Homo Sapiens
VFVDRAACF

SEQ ID NO: 31047 - protein, 9 aa, Homo Sapiens
VFVDSVPEF

SEQ ID NO: 31048 - protein, 9 aa, Homo Sapiens
VFVKPLVLF

SEQ ID NO: 31049 - protein, 9 aa, Homo Sapiens
VFVNIQYTL

SEQ ID NO: 31050 - protein, 9 aa, Homo Sapiens
VFYELAHQL

SEQ ID NO: 31051 - protein, 9 aa, Homo Sapiens
VFYPYPQYF

SEQ ID NO: 31052 - protein, 9 aa, Homo Sapiens
VGLGLHPLF

SEQ ID NO: 31053 - protein, 9 aa, Homo Sapiens
VHIDLPLFF

SEQ ID NO: 31054 - protein, 9 aa, Homo Sapiens
VHIPEVYLI

SEQ ID NO: 31055 - protein, 9 aa, Homo Sapiens
VHVGHVVRF

SEQ ID NO: 31056 - protein, 9 aa, Homo Sapiens
VICGVKAEF

SEQ ID NO: 31057 - protein, 9 aa, Homo Sapiens
VIIEKTYSL

SEQ ID NO: 31058 - protein, 9 aa, Homo Sapiens
VITPVLLHF

SEQ ID NO: 31059 - protein, 9 aa, Homo Sapiens
VLHQIFSKF

SEQ ID NO: 31060 - protein, 9 aa, Homo Sapiens
VLIGRKELF

SEQ ID NO: 31061 - protein, 9 aa, Homo Sapiens
VLIPKLPQL

SEQ ID NO: 31062 - protein, 9 aa, Homo Sapiens
VLKSVVAKF

SEQ ID NO: 31063 - protein, 9 aa, Homo Sapiens
VLLPKLPQF

SEQ ID NO: 31064 - protein, 9 aa, Homo Sapiens
VLNNVAHTF

SEQ ID NO: 31065 - protein, 9 aa, Homo Sapiens
VLPESLPVL

SEQ ID NO: 31066 - protein, 9 aa, Homo Sapiens
VLPGHFNTF

SEQ ID NO: 31067 - protein, 9 aa, Homo Sapiens
VLPHFNVLF

SEQ ID NO: 31068 - protein, 9 aa, Homo Sapiens
VLPHLLLCF

SEQ ID NO: 31069 - protein, 9 aa, Homo Sapiens
VLPKCKHEF

SEQ ID NO: 31070 - protein, 9 aa, Homo Sapiens
VLPKLYVKL

SEQ ID NO: 31071 - protein, 9 aa, Homo Sapiens
VLPKQGPLF

SEQ ID NO: 31072 - protein, 9 aa, Homo Sapiens
VLPNIHPEL

SEQ ID NO: 31073 - protein, 9 aa, Homo Sapiens
VLPSAQPVL

SEQ ID NO: 31074 - protein, 9 aa, Homo Sapiens
VLPSVLNKF

SEQ ID NO: 31075 - protein, 9 aa, Homo Sapiens
VLPTEQFHL

SEQ ID NO: 31076 - protein, 9 aa, Homo Sapiens
VMAPRTLVL

SEQ ID NO: 31077 - protein, 9 aa, Homo Sapiens
VMKNQVARF

SEQ ID NO: 31078 - protein, 9 aa, Homo Sapiens
VMKSLTQTF

SEQ ID NO: 31079 - protein, 9 aa, Homo Sapiens
VMTDVHRRF

SEQ ID NO: 31080 - protein, 9 aa, Homo Sapiens
VMYGKVYRI

SEQ ID NO: 31081 - protein, 9 aa, Homo Sapiens
VQAGVTYLF

SEQ ID NO: 31082 - protein, 9 aa, Homo Sapiens
VQPRNWLLF

SEQ ID NO: 31083 - protein, 9 aa, Homo Sapiens
VQPSKYHFL

SEQ ID NO: 31084 - protein, 9 aa, Homo Sapiens
VSEPRYFQL

SEQ ID NO: 31085 - protein, 9 aa, Homo Sapiens
VTYVPVTTF

SEQ ID NO: 31086 - protein, 9 aa, Homo Sapiens
VVYPWTQRF

SEQ ID NO: 31087 - protein, 9 aa, Homo Sapiens
VWIDVGSRF

SEQ ID NO: 31088 - protein, 9 aa, Homo Sapiens
VWIINIGHF

SEQ ID NO: 31089 - protein, 9 aa, Homo Sapiens
VWIYDPVHF

SEQ ID NO: 31090 - protein, 9 aa, Homo Sapiens
VWVINIGHF

SEQ ID NO: 31091 - protein, 9 aa, Homo Sapiens
VYADQPHIF

SEQ ID NO: 31092 - protein, 9 aa, Homo Sapiens
VYAILTHGI

SEQ ID NO: 31093 - protein, 9 aa, Homo Sapiens
VYANGIRNI

SEQ ID NO: 31094 - protein, 9 aa, Homo Sapiens
VYAPFIEKL

SEQ ID NO: 31095 - protein, 9 aa, Homo Sapiens
VYAPPVGGF

SEQ ID NO: 31096 - protein, 9 aa, Homo Sapiens
VYAQVARLF

SEQ ID NO: 31097 - protein, 9 aa, Homo Sapiens
VYCARFVEL

SEQ ID NO: 31098 - protein, 9 aa, Homo Sapiens
VYDSVAFPE

SEQ ID NO: 31099 - protein, 9 aa, Homo Sapiens
VYEAMVPLF

SEQ ID NO: 31100 - protein, 9 aa, Homo Sapiens
VYEDLRYKL

SEQ ID NO: 31101 - protein, 9 aa, Homo Sapiens
VYEDQVGKF

SEQ ID NO: 31102 - protein, 9 aa, Homo Sapiens
VYEEILHQI

SEQ ID NO: 31103 - protein, 9 aa, Homo Sapiens
VYENVSHFL

SEQ ID NO: 31104 - protein, 9 aa, Homo Sapiens
VYEPVSYHV

SEQ ID NO: 31105 - protein, 9 aa, Homo Sapiens
VYERELQTF

SEQ ID NO: 31106 - protein, 9 aa, Homo Sapiens
VYEYVVERF

SEQ ID NO: 31107 - protein, 9 aa, Homo Sapiens
VYFGDPVSL

SEQ ID NO: 31108 - protein, 9 aa, Homo Sapiens
VYFGHWVVM

SEQ ID NO: 31109 - protein, 9 aa, Homo Sapiens
VYGFQWRHF

SEQ ID NO: 31110 - protein, 9 aa, Homo Sapiens
VYGPLPQSF

SEQ ID NO: 31111 - protein, 9 aa, Homo Sapiens
VYGSFASKL

SEQ ID NO: 31112 - protein, 9 aa, Homo Sapiens
VYHKPPNAF

SEQ ID NO: 31113 - protein, 9 aa, Homo Sapiens
VYHKPPSAF

SEQ ID NO: 31114 - protein, 9 aa, Homo Sapiens
VYHNLKNVI

SEQ ID NO: 31115 - protein, 9 aa, Homo Sapiens
VYHSDIPKW

SEQ ID NO: 31116 - protein, 9 aa, Homo Sapiens
VYIAPLKAL

SEQ ID NO: 31117 - protein, 9 aa, Homo Sapiens
VYIDKVRSL

SEQ ID NO: 31118 - protein, 9 aa, Homo Sapiens
VYIDQTMVL

SEQ ID NO: 31119 - protein, 9 aa, Homo Sapiens
VYIDRVRSL

SEQ ID NO: 31120 - protein, 9 aa, Homo Sapiens
VYIEHRLMM

SEQ ID NO: 31121 - protein, 9 aa, Homo Sapiens
VYIHHFDRI

SEQ ID NO: 31122 - protein, 9 aa, Homo Sapiens
VYIKHPVSL

SEQ ID NO: 31123 - protein, 9 aa, Homo Sapiens
VYINEVRVI

SEQ ID NO: 31124 - protein, 9 aa, Homo Sapiens
VYINTAQEF

SEQ ID NO: 31125 - protein, 9 aa, Homo Sapiens
VYIPAHGRL

SEQ ID NO: 31126 - protein, 9 aa, Homo Sapiens
VYIPCIYVL

SEQ ID NO: 31127 - protein, 9 aa, Homo Sapiens
VYIPNKVLI

SEQ ID NO: 31128 - protein, 9 aa, Homo Sapiens
VYISEHEHF

SEQ ID NO: 31129 - protein, 9 aa, Homo Sapiens
VYISNGQVL

SEQ ID NO: 31130 - protein, 9 aa, Homo Sapiens
VYITDKTVL

SEQ ID NO: 31131 - protein, 9 aa, Homo Sapiens
VYITRAQLM

SEQ ID NO: 31132 - protein, 9 aa, Homo Sapiens
VYIVPVIVL

SEQ ID NO: 31133 - protein, 9 aa, Homo Sapiens
VYKDLLVLF

SEQ ID NO: 31134 - protein, 9 aa, Homo Sapiens
VYKDLVLLL

SEQ ID NO: 31135 - protein, 9 aa, Homo Sapiens
VYKDSIYYI

SEQ ID NO: 31136 - protein, 9 aa, Homo Sapiens
VYKKSIFVF

SEQ ID NO: 31137 - protein, 9 aa, Homo Sapiens
VYKKYPNVF

SEQ ID NO: 31138 - protein, 9 aa, Homo Sapiens
VYLDEPIKI

SEQ ID NO: 31139 - protein, 9 aa, Homo Sapiens
VYLDGIVRI

SEQ ID NO: 31140 - protein, 9 aa, Homo Sapiens
VYLDKFIRL

SEQ ID NO: 31141 - protein, 9 aa, Homo Sapiens
VYLEKFMTF

SEQ ID NO: 31142 - protein, 9 aa, Homo Sapiens
VYLHDFQRF

SEQ ID NO: 31143 - protein, 9 aa, Homo Sapiens
VYLHYLPSY

SEQ ID NO: 31144 - protein, 9 aa, Homo Sapiens
VYLIEHPSL

SEQ ID NO: 31145 - protein, 9 aa, Homo Sapiens
VYLKTALGL

SEQ ID NO: 31146 - protein, 9 aa, Homo Sapiens
VYLPLTSHI

SEQ ID NO: 31147 - protein, 9 aa, Homo Sapiens
VYLPMSYCY

SEQ ID NO: 31148 - protein, 9 aa, Homo Sapiens
VYLPRVLDI

SEQ ID NO: 31149 - protein, 9 aa, Homo Sapiens
VYLPTHTSL

SEQ ID NO: 31150 - protein, 9 aa, Homo Sapiens
VYLSNVVLF

SEQ ID NO: 31151 - protein, 9 aa, Homo Sapiens
VYMDWYEKF

SEQ ID NO: 31152 - protein, 9 aa, Homo Sapiens
VYMELSQKL

SEQ ID NO: 31153 - protein, 9 aa, Homo Sapiens
VYMNRVKEI

SEQ ID NO: 31154 - protein, 9 aa, Homo Sapiens
VYNHRFHKI

SEQ ID NO: 31155 - protein, 9 aa, Homo Sapiens
VYNKVHITL

SEQ ID NO: 31156 - protein, 9 aa, Homo Sapiens
VYNPHSDTW

SEQ ID NO: 31157 - protein, 9 aa, Homo Sapiens
VYNPVRAEW

SEQ ID NO: 31158 - protein, 9 aa, Homo Sapiens
VYNYAEQTL

SEQ ID NO: 31159 - protein, 9 aa, Homo Sapiens
VYPADVVLF

SEQ ID NO: 31160 - protein, 9 aa, Homo Sapiens
VYPDGIRHI

SEQ ID NO: 31161 - protein, 9 aa, Homo Sapiens
VYPEESLVI

SEQ ID NO: 31162 - protein, 9 aa, Homo Sapiens
VYPERTPLL

SEQ ID NO: 31163 - protein, 9 aa, Homo Sapiens
VYPGIAVFF

SEQ ID NO: 31164 - protein, 9 aa, Homo Sapiens
VYPGYYLTF

SEQ ID NO: 31165 - protein, 9 aa, Homo Sapiens
VYPLMKEYF

SEQ ID NO: 31166 - protein, 9 aa, Homo Sapiens
VYPNWAIGL

SEQ ID NO: 31167 - protein, 9 aa, Homo Sapiens
VYPPHSHSI

SEQ ID NO: 31168 - protein, 9 aa, Homo Sapiens
VYPPIRHHL

SEQ ID NO: 31169 - protein, 9 aa, Homo Sapiens
VYPPPHQVF

SEQ ID NO: 31170 - protein, 9 aa, Homo Sapiens
VYPSSLSKI

SEQ ID NO: 31171 - protein, 9 aa, Homo Sapiens
VYQEIWIGM

SEQ ID NO: 31172 - protein, 9 aa, Homo Sapiens
VYQHLFTRI

SEQ ID NO: 31173 - protein, 9 aa, Homo Sapiens
VYQLRFQFL

SEQ ID NO: 31174 - protein, 9 aa, Homo Sapiens
VYQSKPATL

SEQ ID NO: 31175 - protein, 9 aa, Homo Sapiens
VYQYMHETI

SEQ ID NO: 31176 - protein, 9 aa, Homo Sapiens
VYSEVHFTL

SEQ ID NO: 31177 - protein, 9 aa, Homo Sapiens
VYSFVTPTF

SEQ ID NO: 31178 - protein, 9 aa, Homo Sapiens
VYSGGVYLF

SEQ ID NO: 31179 - protein, 9 aa, Homo Sapiens
VYSIVPQSW

SEQ ID NO: 31180 - protein, 9 aa, Homo Sapiens
VYSPHVLNL

SEQ ID NO: 31181 - protein, 9 aa, Homo Sapiens
VYSPIRSGL

SEQ ID NO: 31182 - protein, 9 aa, Homo Sapiens
VYSPKSPSL

SEQ ID NO: 31183 - protein, 9 aa, Homo Sapiens
VYSQFITQL

SEQ ID NO: 31184 - protein, 9 aa, Homo Sapiens
VYSTPTPFF

SEQ ID NO: 31185 - protein, 9 aa, Homo Sapiens
VYTATITEI

SEQ ID NO: 31186 - protein, 9 aa, Homo Sapiens
VYTDFAFRI

SEQ ID NO: 31187 - protein, 9 aa, Homo Sapiens
VYTHEVVTL

SEQ ID NO: 31188 - protein, 9 aa, Homo Sapiens
VYTKANPTF

SEQ ID NO: 31189 - protein, 9 aa, Homo Sapiens
VYTKVKCKI

SEQ ID NO: 31190 - protein, 9 aa, Homo Sapiens
VYTSVVEEL

SEQ ID NO: 31191 - protein, 9 aa, Homo Sapiens
VYTTNIQEL

SEQ ID NO: 31192 - protein, 9 aa, Homo Sapiens
VYTTTVHWL

SEQ ID NO: 31193 - protein, 9 aa, Homo Sapiens
VYTVVDEMF

SEQ ID NO: 31194 - protein, 9 aa, Homo Sapiens
VYTWVKQCW

SEQ ID NO: 31195 - protein, 9 aa, Homo Sapiens
VYTYIQSRF

SEQ ID NO: 31196 - protein, 9 aa, Homo Sapiens
VYVAAVREF

SEQ ID NO: 31197 - protein, 9 aa, Homo Sapiens
VYVAIQAVL

SEQ ID NO: 31198 - protein, 9 aa, Homo Sapiens
VYVATRPTI

SEQ ID NO: 31199 - protein, 9 aa, Homo Sapiens
VYVDAVGQF

SEQ ID NO: 31200 - protein, 9 aa, Homo Sapiens
VYVDDIYVI

SEQ ID NO: 31201 - protein, 9 aa, Homo Sapiens
VYVERAEVL

SEQ ID NO: 31202 - protein, 9 aa, Homo Sapiens
VYVERILLL

SEQ ID NO: 31203 - protein, 9 aa, Homo Sapiens
VYVGICRQL

SEQ ID NO: 31204 - protein, 9 aa, Homo Sapiens
VYVKDLSSF

SEQ ID NO: 31205 - protein, 9 aa, Homo Sapiens
VYVKHNISF

SEQ ID NO: 31206 - protein, 9 aa, Homo Sapiens
VYVKHSISF

SEQ ID NO: 31207 - protein, 9 aa, Homo Sapiens
VYVLTVTEI

SEQ ID NO: 31208 - protein, 9 aa, Homo Sapiens
VYVPHIHVW

SEQ ID NO: 31209 - protein, 9 aa, Homo Sapiens
VYVPLKELL

SEQ ID NO: 31210 - protein, 9 aa, Homo Sapiens
VYVQHPITF

SEQ ID NO: 31211 - protein, 9 aa, Homo Sapiens
VYVQNVVKL

SEQ ID NO: 31212 - protein, 9 aa, Homo Sapiens
VYVQPIVSL

SEQ ID NO: 31213 - protein, 9 aa, Homo Sapiens
VYVQPPLEL

SEQ ID NO: 31214 - protein, 9 aa, Homo Sapiens
VYVSDIQEL

SEQ ID NO: 31215 - protein, 9 aa, Homo Sapiens
VYVVGTAHF

SEQ ID NO: 31216 - protein, 9 aa, Homo Sapiens
VYWKIYNSI

SEQ ID NO: 31217 - protein, 9 aa, Homo Sapiens
VYYPELFVW

SEQ ID NO: 31218 - protein, 9 aa, Homo Sapiens
VYYPVRHHL

SEQ ID NO: 31219 - protein, 9 aa, Homo Sapiens
WVQKTIAEN

SEQ ID NO: 31220 - protein, 9 aa, Homo Sapiens
YFIADLPHL

SEQ ID NO: 31221 - protein, 9 aa, Homo Sapiens
YFISHVLAF

SEQ ID NO: 31222 - protein, 9 aa, Homo Sapiens
YFKDTHPKF

SEQ ID NO: 31223 - protein, 9 aa, Homo Sapiens
YFKRYQVKF

SEQ ID NO: 31224 - protein, 9 aa, Homo Sapiens
YFLDKIDVI

SEQ ID NO: 31225 - protein, 9 aa, Homo Sapiens
YFLKGVLVF

SEQ ID NO: 31226 - protein, 9 aa, Homo Sapiens
YFLPDHPEL

SEQ ID NO: 31227 - protein, 9 aa, Homo Sapiens
YFLTTRQTL

SEQ ID NO: 31228 - protein, 9 aa, Homo Sapiens
YFYHGVHKI

SEQ ID NO: 31229 - protein, 9 aa, Homo Sapiens
YGLEKFWAF

SEQ ID NO: 31230 - protein, 9 aa, Homo Sapiens
YQTPRLWLF

SEQ ID NO: 31231 - protein, 9 aa, Homo Sapiens
YVIQKFFEF

SEQ ID NO: 31232 - protein, 9 aa, Homo Sapiens
YWMHVQNTF

SEQ ID NO: 31233 - protein, 9 aa, Homo Sapiens
YYAEVETRI

SEQ ID NO: 31234 - protein, 9 aa, Homo Sapiens
YYAGEFHKM

SEQ ID NO: 31235 - protein, 9 aa, Homo Sapiens
YYCHPPTSW

SEQ ID NO: 31236 - protein, 9 aa, Homo Sapiens
YYDKHFTEF

SEQ ID NO: 31237 - protein, 9 aa, Homo Sapiens
YYEDNKQFF

SEQ ID NO: 31238 - protein, 9 aa, Homo Sapiens
YYEEQHPEL

SEQ ID NO: 31239 - protein, 9 aa, Homo Sapiens
YYEKQFPEI

SEQ ID NO: 31240 - protein, 9 aa, Homo Sapiens
YYFDSYAHF

SEQ ID NO: 31241 - protein, 9 aa, Homo Sapiens
YYFPVKNVI

SEQ ID NO: 31242 - protein, 9 aa, Homo Sapiens
YYGDVIWVI

SEQ ID NO: 31243 - protein, 9 aa, Homo Sapiens
YYGNISHFV

SEQ ID NO: 31244 - protein, 9 aa, Homo Sapiens
YYGQGFPSF

SEQ ID NO: 31245 - protein, 9 aa, Homo Sapiens
YYHARVYEF

SEQ ID NO: 31246 - protein, 9 aa, Homo Sapiens
YYHKVVIRL

SEQ ID NO: 31247 - protein, 9 aa, Homo Sapiens
YYIDCIRQV

SEQ ID NO: 31248 - protein, 9 aa, Homo Sapiens
YYIDKLEYL

SEQ ID NO: 31249 - protein, 9 aa, Homo Sapiens
YYIEGINQL

SEQ ID NO: 31250 - protein, 9 aa, Homo Sapiens
YYIFIPSKF

SEQ ID NO: 31251 - protein, 9 aa, Homo Sapiens
YYIRFFITY

SEQ ID NO: 31252 - protein, 9 aa, Homo Sapiens
YYISPRITF

SEQ ID NO: 31253 - protein, 9 aa, Homo Sapiens
YYITTRAQF

SEQ ID NO: 31254 - protein, 9 aa, Homo Sapiens
YYITTRVQF

SEQ ID NO: 31255 - protein, 9 aa, Homo Sapiens
YYLAEKHLF

SEQ ID NO: 31256 - protein, 9 aa, Homo Sapiens
YYLNDLDRI

SEQ ID NO: 31257 - protein, 9 aa, Homo Sapiens
YYLNDLERI

SEQ ID NO: 31258 - protein, 9 aa, Homo Sapiens
YYLNEIQSF

SEQ ID NO: 31259 - protein, 9 aa, Homo Sapiens
YYLSDSPLL

SEQ ID NO: 31260 - protein, 9 aa, Homo Sapiens
YYLSKIEEL

SEQ ID NO: 31261 - protein, 9 aa, Homo Sapiens
YYLTHGLYL

SEQ ID NO: 31262 - protein, 9 aa, Homo Sapiens
YYPEYKLLF

SEQ ID NO: 31263 - protein, 9 aa, Homo Sapiens
YYQDTPKQI

SEQ ID NO: 31264 - protein, 9 aa, Homo Sapiens
YYQGGKFQF

SEQ ID NO: 31265 - protein, 9 aa, Homo Sapiens
YYQHIVTTL

SEQ ID NO: 31266 - protein, 9 aa, Homo Sapiens
YYQNYFEKL

SEQ ID NO: 31267 - protein, 9 aa, Homo Sapiens
YYRPRFFLL

SEQ ID NO: 31268 - protein, 9 aa, Homo Sapiens
YYSAVDPTK

SEQ ID NO: 31269 - protein, 9 aa, Homo Sapiens
YYSAVTPHL

SEQ ID NO: 31270 - protein, 9 aa, Homo Sapiens
YYSPHGHIL

SEQ ID NO: 31271 - protein, 9 aa, Homo Sapiens
YYTDIMHTL

SEQ ID NO: 31272 - protein, 9 aa, Homo Sapiens
YYTPITPHL

SEQ ID NO: 31273 - protein, 9 aa, Homo Sapiens
YYTSVTPVL

SEQ ID NO: 31274 - protein, 9 aa, Homo Sapiens
YYTTPIYRF

SEQ ID NO: 31275 - protein, 9 aa, Homo Sapiens
YYVRAVLHL

SEQ ID NO: 31276 - protein, 9 aa, Homo Sapiens
YYVRILSTI

SEQ ID NO: 31277 - protein, 9 aa, Homo Sapiens
YYVWLQHTL

SEQ ID NO: 31278 - protein, 9 aa, Homo Sapiens
YYYVGFAYL

SEQ ID NO: 31279 - protein, 10 aa, Homo Sapiens
AFFEGPPFKF

SEQ ID NO: 31280 - protein, 10 aa, Homo Sapiens
AFFGDVVLRF

SEQ ID NO: 31281 - protein, 10 aa, Homo Sapiens
AFFRMKELFF

SEQ ID NO: 31282 - protein, 10 aa, Homo Sapiens
AFIPVLPFIL

SEQ ID NO: 31283 - protein, 10 aa, Homo Sapiens
AFIRVVGSEF

SEQ ID NO: 31284 - protein, 10 aa, Homo Sapiens
AFLDSQTATF

SEQ ID NO: 31285 - protein, 10 aa, Homo Sapiens
AFLTFPGLRL

SEQ ID NO: 31286 - protein, 10 aa, Homo Sapiens
AFNNLENLVF

SEQ ID NO: 31287 - protein, 10 aa, Homo Sapiens
AFVPVIKLCF

SEQ ID NO: 31288 - protein, 10 aa, Homo Sapiens
AICRPLPVTF

SEQ ID NO: 31289 - protein, 10 aa, Homo Sapiens
AIIRGGLTRF

SEQ ID NO: 31290 - protein, 10 aa, Homo Sapiens
ALLAYTLGVK

SEQ ID NO: 31291 - protein, 10 aa, Homo Sapiens
AWAPKPYHKF

SEQ ID NO: 31292 - protein, 10 aa, Homo Sapiens
AWARPLSVSF

SEQ ID NO: 31293 - protein, 10 aa, Homo Sapiens
AYFKRYQVKF

SEQ ID NO: 31294 - protein, 10 aa, Homo Sapiens
AYIAVGSISF

SEQ ID NO: 31295 - protein, 10 aa, Homo Sapiens
AYIQGLKEKF

SEQ ID NO: 31296 - protein, 10 aa, Homo Sapiens
AYLDKKHTIF

SEQ ID NO: 31297 - protein, 10 aa, Homo Sapiens
AYLESFYKFC

SEQ ID NO: 31298 - protein, 10 aa, Homo Sapiens
AYLKLRNWQW

SEQ ID NO: 31299 - protein, 10 aa, Homo Sapiens
AYLPEWKENI

SEQ ID NO: 31300 - protein, 10 aa, Homo Sapiens
AYLPKNTHPF

SEQ ID NO: 31301 - protein, 10 aa, Homo Sapiens
AYLPPLQQVF

SEQ ID NO: 31302 - protein, 10 aa, Homo Sapiens
AYLVHLIQRF

SEQ ID NO: 31303 - protein, 10 aa, Homo Sapiens
AYNDNWFITF

SEQ ID NO: 31304 - protein, 10 aa, Homo Sapiens
AYPPAPFMHI

SEQ ID NO: 31305 - protein, 10 aa, Homo Sapiens
AYSAAKSWVF

SEQ ID NO: 31306 - protein, 10 aa, Homo Sapiens
CFIPGEGHTL

SEQ ID NO: 31307 - protein, 10 aa, Homo Sapiens
CFLTSQNHGF

SEQ ID NO: 31308 - protein, 10 aa, Homo Sapiens
CWLRGVTATF

SEQ ID NO: 31309 - protein, 10 aa, Homo Sapiens
CYKLPDNVTF

SEQ ID NO: 31310 - protein, 10 aa, Homo Sapiens
CYQTLTGIKF

SEQ ID NO: 31311 - protein, 10 aa, Homo Sapiens
DFLNVKNVYF

SEQ ID NO: 31312 - protein, 10 aa, Homo Sapiens
DYIAVNPHLF

SEQ ID NO: 31313 - protein, 10 aa, Homo Sapiens
DYLNEWGNRF

SEQ ID NO: 31314 - protein, 10 aa, Homo Sapiens
DYYPEYKLLF

SEQ ID NO: 31315 - protein, 10 aa, Homo Sapiens
EFLKYFGTFF

SEQ ID NO: 31316 - protein, 10 aa, Homo Sapiens
EFLTDMKQVF

SEQ ID NO: 31317 - protein, 10 aa, Homo Sapiens
EWPKHWPTFI

SEQ ID NO: 31318 - protein, 10 aa, Homo Sapiens
EYIAAFLSHF

SEQ ID NO: 31319 - protein, 10 aa, Homo Sapiens
EYIPDLYNHF

SEQ ID NO: 31320 - protein, 10 aa, Homo Sapiens
EYLFNFDNTF

SEQ ID NO: 31321 - protein, 10 aa, Homo Sapiens
EYLKNVLLQF

SEQ ID NO: 31322 - protein, 10 aa, Homo Sapiens
EYLTAEILEL

SEQ ID NO: 31323 - protein, 10 aa, Homo Sapiens
EYLYPDQTHF

SEQ ID NO: 31324 - protein, 10 aa, Homo Sapiens
EYPDRIMNTF

SEQ ID NO: 31325 - protein, 10 aa, Homo Sapiens
EYSGCWAHGF

SEQ ID NO: 31326 - protein, 10 aa, Homo Sapiens
EYYDKAFDRI

SEQ ID NO: 31327 - protein, 10 aa, Homo Sapiens
EYYDKHFTEF

SEQ ID NO: 31328 - protein, 10 aa, Homo Sapiens
FFIDRDGFLF

SEQ ID NO: 31329 - protein, 10 aa, Homo Sapiens
FFLIGPPLLI

SEQ ID NO: 31330 - protein, 10 aa, Homo Sapiens
FYLAGKLHCF

SEQ ID NO: 31331 - protein, 10 aa, Homo Sapiens
FYLFPNRLEW

SEQ ID NO: 31332 - protein, 10 aa, Homo Sapiens
FYYDGKVMKL

SEQ ID NO: 31333 - protein, 10 aa, Homo Sapiens
GFIMPIEVHF

SEQ ID NO: 31334 - protein, 10 aa, Homo Sapiens
GFVRGICTRF

SEQ ID NO: 31335 - protein, 10 aa, Homo Sapiens
GLIIVGKDPF

SEQ ID NO: 31336 - protein, 10 aa, Homo Sapiens
GPPPHPGKPE

SEQ ID NO: 31337 - protein, 10 aa, Homo Sapiens
GPPPPPGKPQ

SEQ ID NO: 31338 - protein, 10 aa, Homo Sapiens
GPPPPQGKPQ

SEQ ID NO: 31339 - protein, 10 aa, Homo Sapiens
GPSIVHRKCF

SEQ ID NO: 31340 - protein, 10 aa, Homo Sapiens
GWLAEKLPTL

SEQ ID NO: 31341 - protein, 10 aa, Homo Sapiens
GYIDLELPCF

SEQ ID NO: 31342 - protein, 10 aa, Homo Sapiens
GYLRNLTWTL

SEQ ID NO: 31343 - protein, 10 aa, Homo Sapiens
GYTPYGWLQL

SEQ ID NO: 31344 - protein, 10 aa, Homo Sapiens
GYVHPVNLTW

SEQ ID NO: 31345 - protein, 10 aa, Homo Sapiens
GYVPTENLRF

SEQ ID NO: 31346 - protein, 10 aa, Homo Sapiens
GYYNGKWEFL

SEQ ID NO: 31347 - protein, 10 aa, Homo Sapiens
HFIVALKVLF

SEQ ID NO: 31348 - protein, 10 aa, Homo Sapiens
HFLGNFKTKF

SEQ ID NO: 31349 - protein, 10 aa, Homo Sapiens
HFPSPIRLEF

SEQ ID NO: 31350 - protein, 10 aa, Homo Sapiens
HYADVLGLLL

SEQ ID NO: 31351 - protein, 10 aa, Homo Sapiens
HYFDPQYFEF

SEQ ID NO: 31352 - protein, 10 aa, Homo Sapiens
HYIDAGYLGF

SEQ ID NO: 31353 - protein, 10 aa, Homo Sapiens
HYIYIENQFF

SEQ ID NO: 31354 - protein, 10 aa, Homo Sapiens
HYLDKTFYNL

SEQ ID NO: 31355 - protein, 10 aa, Homo Sapiens
HYLPSAILQL

SEQ ID NO: 31356 - protein, 10 aa, Homo Sapiens
HYMPPPYASL

SEQ ID NO: 31357 - protein, 10 aa, Homo Sapiens
HYNNVSCAVF

SEQ ID NO: 31358 - protein, 10 aa, Homo Sapiens
HYQDVSCLQF

SEQ ID NO: 31359 - protein, 10 aa, Homo Sapiens
HYVPATKVFL

SEQ ID NO: 31360 - protein, 10 aa, Homo Sapiens
HYVYSHFLQF

SEQ ID NO: 31361 - protein, 10 aa, Homo Sapiens
IFASIPGLEF

SEQ ID NO: 31362 - protein, 10 aa, Homo Sapiens
IFFGGLVFKF

SEQ ID NO: 31363 - protein, 10 aa, Homo Sapiens
IFIDPGYQTF

SEQ ID NO: 31364 - protein, 10 aa, Homo Sapiens
IFIDRDPTVF

SEQ ID NO: 31365 - protein, 10 aa, Homo Sapiens
IFIRFPKTLF

SEQ ID NO: 31366 - protein, 10 aa, Homo Sapiens
IFIRTPRTLF

SEQ ID NO: 31367 - protein, 10 aa, Homo Sapiens
IFLPILRTGF

SEQ ID NO: 31368 - protein, 10 aa, Homo Sapiens
IFLPPLQGDF

SEQ ID NO: 31369 - protein, 10 aa, Homo Sapiens
IFLPQVLDVF

SEQ ID NO: 31370 - protein, 10 aa, Homo Sapiens
IFPKPPLYTF

SEQ ID NO: 31371 - protein, 10 aa, Homo Sapiens
IFVFGFRTHF

SEQ ID NO: 31372 - protein, 10 aa, Homo Sapiens
IIFNSTNKLF

SEQ ID NO: 31373 - protein, 10 aa, Homo Sapiens
IKYPENFFLL

SEQ ID NO: 31374 - protein, 10 aa, Homo Sapiens
ILPQDVILKF

SEQ ID NO: 31375 - protein, 10 aa, Homo Sapiens
IVLVYITYHW

SEQ ID NO: 31376 - protein, 10 aa, Homo Sapiens
IWPGGVLPKF

SEQ ID NO: 31377 - protein, 10 aa, Homo Sapiens
IYADNQVMHF

SEQ ID NO: 31378 - protein, 10 aa, Homo Sapiens
IYCDAVPYLF

SEQ ID NO: 31379 - protein, 10 aa, Homo Sapiens
IYDSNTGKLI

SEQ ID NO: 31380 - protein, 10 aa, Homo Sapiens
IYFDGDFGHF

SEQ ID NO: 31381 - protein, 10 aa, Homo Sapiens
IYFDGDFGQI

SEQ ID NO: 31382 - protein, 10 aa, Homo Sapiens
IYFDQVLVNI

SEQ ID NO: 31383 - protein, 10 aa, Homo Sapiens
IYGESISSHF

SEQ ID NO: 31384 - protein, 10 aa, Homo Sapiens
IYGHWSIMKW

SEQ ID NO: 31385 - protein, 10 aa, Homo Sapiens
IYHHALHSRW

SEQ ID NO: 31386 - protein, 10 aa, Homo Sapiens
IYHKLKHFKF

SEQ ID NO: 31387 - protein, 10 aa, Homo Sapiens
IYHTGTFAQI

SEQ ID NO: 31388 - protein, 10 aa, Homo Sapiens
IYIDASCLTW

SEQ ID NO: 31389 - protein, 10 aa, Homo Sapiens
IYIDRGVVFV

SEQ ID NO: 31390 - protein, 10 aa, Homo Sapiens
IYISKIVVEF

SEQ ID NO: 31391 - protein, 10 aa, Homo Sapiens
IYISTLKTEF

SEQ ID NO: 31392 - protein, 10 aa, Homo Sapiens
IYKPVTDFFL

SEQ ID NO: 31393 - protein, 10 aa, Homo Sapiens
IYLNNIIPRF

SEQ ID NO: 31394 - protein, 10 aa, Homo Sapiens
IYLQLDCARF

SEQ ID NO: 31395 - protein, 10 aa, Homo Sapiens
IYLTADNLVL

SEQ ID NO: 31396 - protein, 10 aa, Homo Sapiens
IYMVHIQVTL

SEQ ID NO: 31397 - protein, 10 aa, Homo Sapiens
IYNGKLFDLL

SEQ ID NO: 31398 - protein, 10 aa, Homo Sapiens
IYPELQIERF

SEQ ID NO: 31399 - protein, 10 aa, Homo Sapiens
IYPSINPPTL

SEQ ID NO: 31400 - protein, 10 aa, Homo Sapiens
IYPSPTGVLI

SEQ ID NO: 31401 - protein, 10 aa, Homo Sapiens
IYPVDLGDKF

SEQ ID NO: 31402 - protein, 10 aa, Homo Sapiens
IYQDSFEQRF

SEQ ID NO: 31403 - protein, 10 aa, Homo Sapiens
IYSDDLGVTW

SEQ ID NO: 31404 - protein, 10 aa, Homo Sapiens
IYTDMGRFTI

SEQ ID NO: 31405 - protein, 10 aa, Homo Sapiens
IYVPELGMSF

SEQ ID NO: 31406 - protein, 10 aa, Homo Sapiens
IYVQALIFRL

SEQ ID NO: 31407 - protein, 10 aa, Homo Sapiens
IYYTGKYQSL

SEQ ID NO: 31408 - protein, 10 aa, Homo Sapiens
KFIDPIYQVW

SEQ ID NO: 31409 - protein, 10 aa, Homo Sapiens
KFIEGVVLQL

SEQ ID NO: 31410 - protein, 10 aa, Homo Sapiens
KFILALKVLF

SEQ ID NO: 31411 - protein, 10 aa, Homo Sapiens
KFINYVKNCF

SEQ ID NO: 31412 - protein, 10 aa, Homo Sapiens
KFISQALLTF

SEQ ID NO: 31413 - protein, 10 aa, Homo Sapiens
KFLDPITGTF

SEQ ID NO: 31414 - protein, 10 aa, Homo Sapiens
KFLEISRLHF

SEQ ID NO: 31415 - protein, 10 aa, Homo Sapiens
KFLETVELQI

SEQ ID NO: 31416 - protein, 10 aa, Homo Sapiens
KFLPPVLLKL

SEQ ID NO: 31417 - protein, 10 aa, Homo Sapiens
KFLSQLEITF

SEQ ID NO: 31418 - protein, 10 aa, Homo Sapiens
KFLTITPIVL

SEQ ID NO: 31419 - protein, 10 aa, Homo Sapiens
KFMGVQMETF

SEQ ID NO: 31420 - protein, 10 aa, Homo Sapiens
KFMPVEGMVF

SEQ ID NO: 31421 - protein, 10 aa, Homo Sapiens
KFMTHVASQF

SEQ ID NO: 31422 - protein, 10 aa, Homo Sapiens
KLPNFGFVVF

SEQ ID NO: 31423 - protein, 10 aa, Homo Sapiens
KMPKFSMPGF

SEQ ID NO: 31424 - protein, 10 aa, Homo Sapiens
KMPKMKMPKF

SEQ ID NO: 31425 - protein, 10 aa, Homo Sapiens
KMPKMKMPTF

SEQ ID NO: 31426 - protein, 10 aa, Homo Sapiens
KMPKVKMPKF

SEQ ID NO: 31427 - protein, 10 aa, Homo Sapiens
KWIDIKQFVW

SEQ ID NO: 31428 - protein, 10 aa, Homo Sapiens
KWLEKNLPTL

SEQ ID NO: 31429 - protein, 10 aa, Homo Sapiens
KWLPLYGCYF

SEQ ID NO: 31430 - protein, 10 aa, Homo Sapiens
KWNPTAGVAF

SEQ ID NO: 31431 - protein, 10 aa, Homo Sapiens
KYADLSHNRL

SEQ ID NO: 31432 - protein, 10 aa, Homo Sapiens
KYETVIMPVF

SEQ ID NO: 31433 - protein, 10 aa, Homo Sapiens
KYFEVPSVLL

SEQ ID NO: 31434 - protein, 10 aa, Homo Sapiens
KYFSLIPTGF

SEQ ID NO: 31435 - protein, 10 aa, Homo Sapiens
KYFTQFCVKF

SEQ ID NO: 31436 - protein, 10 aa, Homo Sapiens
KYIDQGIAEL

SEQ ID NO: 31437 - protein, 10 aa, Homo Sapiens
KYIERIITRF

SEQ ID NO: 31438 - protein, 10 aa, Homo Sapiens
KYIESPVLFL

SEQ ID NO: 31439 - protein, 10 aa, Homo Sapiens
KYIETTPLTI

SEQ ID NO: 31440 - protein, 10 aa, Homo Sapiens
KYIFKERESF

SEQ ID NO: 31441 - protein, 10 aa, Homo Sapiens
KYIHKVHHEF

SEQ ID NO: 31442 - protein, 10 aa, Homo Sapiens
KYITDWQNVF

SEQ ID NO: 31443 - protein, 10 aa, Homo Sapiens
KYLAIAPPII

SEQ ID NO: 31444 - protein, 10 aa, Homo Sapiens
KYLDIHERMG

SEQ ID NO: 31445 - protein, 10 aa, Homo Sapiens
KYLDTGGDVF

SEQ ID NO: 31446 - protein, 10 aa, Homo Sapiens
KYLDVKFEYL

SEQ ID NO: 31447 - protein, 10 aa, Homo Sapiens
KYLEDFITNI

SEQ ID NO: 31448 - protein, 10 aa, Homo Sapiens
KYLEDMKTYF

SEQ ID NO: 31449 - protein, 10 aa, Homo Sapiens
KYLIKICQEF

SEQ ID NO: 31450 - protein, 10 aa, Homo Sapiens
KYLKPSGNMF

SEQ ID NO: 31451 - protein, 10 aa, Homo Sapiens
KYLKTGFLKW

SEQ ID NO: 31452 - protein, 10 aa, Homo Sapiens
KYLLKLKFNF

SEQ ID NO: 31453 - protein, 10 aa, Homo Sapiens
KYLNQTSRSF

SEQ ID NO: 31454 - protein, 10 aa, Homo Sapiens
KYLPEWTAWL

SEQ ID NO: 31455 - protein, 10 aa, Homo Sapiens
KYLPISHPRF

SEQ ID NO: 31456 - protein, 10 aa, Homo Sapiens
KYLSGIAHFL

SEQ ID NO: 31457 - protein, 10 aa, Homo Sapiens
KYLSVQGQLF

SEQ ID NO: 31458 - protein, 10 aa, Homo Sapiens
KYLTAEAFGF

SEQ ID NO: 31459 - protein, 10 aa, Homo Sapiens
KYLTEGLLQF

SEQ ID NO: 31460 - protein, 10 aa, Homo Sapiens
KYLTQVDILL

SEQ ID NO: 31461 - protein, 10 aa, Homo Sapiens
KYLVIGDLLF

SEQ ID NO: 31462 - protein, 10 aa, Homo Sapiens
KYMDVVKERI

SEQ ID NO: 31463 - protein, 10 aa, Homo Sapiens
KYMSTCRLIL

SEQ ID NO: 31464 - protein, 10 aa, Homo Sapiens
KYMTAVVKLF

SEQ ID NO: 31465 - protein, 10 aa, Homo Sapiens
KYMTPMQQKL

SEQ ID NO: 31466 - protein, 10 aa, Homo Sapiens
KYPHYFPLLK

SEQ ID NO: 31467 - protein, 10 aa, Homo Sapiens
KYPNRGFPKI

SEQ ID NO: 31468 - protein, 10 aa, Homo Sapiens
KYSPNCKLLI

SEQ ID NO: 31469 - protein, 10 aa, Homo Sapiens
KYTEITATYF

SEQ ID NO: 31470 - protein, 10 aa, Homo Sapiens
KYWPVIPLKF

SEQ ID NO: 31471 - protein, 10 aa, Homo Sapiens
KYYDDYRVQL

SEQ ID NO: 31472 - protein, 10 aa, Homo Sapiens
KYYEDNKQFF

SEQ ID NO: 31473 - protein, 10 aa, Homo Sapiens
LFIPSSKLLF

SEQ ID NO: 31474 - protein, 10 aa, Homo Sapiens
LFLKGIGLTL

SEQ ID NO: 31475 - protein, 10 aa, Homo Sapiens
LFLPPNRYIF

SEQ ID NO: 31476 - protein, 10 aa, Homo Sapiens
LFLPRTDYSF

SEQ ID NO: 31477 - protein, 10 aa, Homo Sapiens
LTAFLAEMLL

SEQ ID NO: 31478 - protein, 10 aa, Homo Sapiens
LVAASQAALG

SEQ ID NO: 31479 - protein, 10 aa, Homo Sapiens
LYADVGGKQF

SEQ ID NO: 31480 - protein, 10 aa, Homo Sapiens
LYESRQEVPK

SEQ ID NO: 31481 - protein, 10 aa, Homo Sapiens
LYETPTGWKF

SEQ ID NO: 31482 - protein, 10 aa, Homo Sapiens
LYIDRPLPYL

SEQ ID NO: 31483 - protein, 10 aa, Homo Sapiens
LYIPPTHTFL

SEQ ID NO: 31484 - protein, 10 aa, Homo Sapiens
LYIQRTKSMF

SEQ ID NO: 31485 - protein, 10 aa, Homo Sapiens
LYIYPQSLNF

SEQ ID NO: 31486 - protein, 10 aa, Homo Sapiens
LYKPPPQHMF

SEQ ID NO: 31487 - protein, 10 aa, Homo Sapiens
LYLDKATLIW

SEQ ID NO: 31488 - protein, 10 aa, Homo Sapiens
LYLEPQGTLF

SEQ ID NO: 31489 - protein, 10 aa, Homo Sapiens
LYLKVKGNVF

SEQ ID NO: 31490 - protein, 10 aa, Homo Sapiens
LYNPKITSEL

SEQ ID NO: 31491 - protein, 10 aa, Homo Sapiens
LYPDGVFYDL

SEQ ID NO: 31492 - protein, 10 aa, Homo Sapiens
LYQDQILEKF

SEQ ID NO: 31493 - protein, 10 aa, Homo Sapiens
LYQILQGIVF

SEQ ID NO: 31494 - protein, 10 aa, Homo Sapiens
LYRDVMQETF

SEQ ID NO: 31495 - protein, 10 aa, Homo Sapiens
LYVYPQRLNF

SEQ ID NO: 31496 - protein, 10 aa, Homo Sapiens
MWKEGNRIHF

SEQ ID NO: 31497 - protein, 10 aa, Homo Sapiens
MYIISGLTGF

SEQ ID NO: 31498 - protein, 10 aa, Homo Sapiens
MYINDKLPYF

SEQ ID NO: 31499 - protein, 10 aa, Homo Sapiens
MYIVGQYPRF

SEQ ID NO: 31500 - protein, 10 aa, Homo Sapiens
MYLPEAKESF

SEQ ID NO: 31501 - protein, 10 aa, Homo Sapiens
MYPLKPTWWF

SEQ ID NO: 31502 - protein, 10 aa, Homo Sapiens
NFIDIQFPKW

SEQ ID NO: 31503 - protein, 10 aa, Homo Sapiens
NFLHPINTIF

SEQ ID NO: 31504 - protein, 10 aa, Homo Sapiens
NFLPPIIARF

SEQ ID NO: 31505 - protein, 10 aa, Homo Sapiens
NFPKGMLLRF

SEQ ID NO: 31506 - protein, 10 aa, Homo Sapiens
NFVKKLVSTF

SEQ ID NO: 31507 - protein, 10 aa, Homo Sapiens
NWTTAAPLLL

SEQ ID NO: 31508 - protein, 10 aa, Homo Sapiens
NYIDIVKYVF

SEQ ID NO: 31509 - protein, 10 aa, Homo Sapiens
NYITPNPIFF

SEQ ID NO: 31510 - protein, 10 aa, Homo Sapiens
NYIVPDKQIF

SEQ ID NO: 31511 - protein, 10 aa, Homo Sapiens
NYKDLNGNVF

SEQ ID NO: 31512 - protein, 10 aa, Homo Sapiens
NYLIDFKHHF

SEQ ID NO: 31513 - protein, 10 aa, Homo Sapiens
NYMMDWKNQF

SEQ ID NO: 31514 - protein, 10 aa, Homo Sapiens
NYVNKIKNRF

SEQ ID NO: 31515 - protein, 10 aa, Homo Sapiens
NYVVIGTCTF

SEQ ID NO: 31516 - protein, 10 aa, Homo Sapiens
NYYEVHKELF

SEQ ID NO: 31517 - protein, 10 aa, Homo Sapiens
PFAHLPKSTF

SEQ ID NO: 31518 - protein, 10 aa, Homo Sapiens
PFLPQLQTTF

SEQ ID NO: 31519 - protein, 10 aa, Homo Sapiens
PFLTHLICTF

SEQ ID NO: 31520 - protein, 10 aa, Homo Sapiens
PWVTGKAANF

SEQ ID NO: 31521 - protein, 10 aa, Homo Sapiens
PYAKPIPAQF

SEQ ID NO: 31522 - protein, 10 aa, Homo Sapiens
PYIPLCPLSL

SEQ ID NO: 31523 - protein, 10 aa, Homo Sapiens
PYTDVNIVTI

SEQ ID NO: 31524 - protein, 10 aa, Homo Sapiens
PYYKDILPCL

SEQ ID NO: 31525 - protein, 10 aa, Homo Sapiens
PYYNGPHLNL

SEQ ID NO: 31526 - protein, 10 aa, Homo Sapiens
QFIEPFEEKF

SEQ ID NO: 31527 - protein, 10 aa, Homo Sapiens
QFIPPYVPRF

SEQ ID NO: 31528 - protein, 10 aa, Homo Sapiens
QYLDNLLVRF

SEQ ID NO: 31529 - protein, 10 aa, Homo Sapiens
QYLPAIRALW

SEQ ID NO: 31530 - protein, 10 aa, Homo Sapiens
QYLTFKPQTF

SEQ ID NO: 31531 - protein, 10 aa, Homo Sapiens
QYMEEIYHRI

SEQ ID NO: 31532 - protein, 10 aa, Homo Sapiens
RFCDSSGNSF

SEQ ID NO: 31533 - protein, 10 aa, Homo Sapiens
RFIDHLMVMF

SEQ ID NO: 31534 - protein, 10 aa, Homo Sapiens
RFIFDVGTRL

SEQ ID NO: 31535 - protein, 10 aa, Homo Sapiens
RFIKKLEHTW

SEQ ID NO: 31536 - protein, 10 aa, Homo Sapiens
RFIPKYSTFW

SEQ ID NO: 31537 - protein, 10 aa, Homo Sapiens
RFIRPMGLRF

SEQ ID NO: 31538 - protein, 10 aa, Homo Sapiens
RFKDLGEEHF

SEQ ID NO: 31539 - protein, 10 aa, Homo Sapiens
RFLDDLGLKF

SEQ ID NO: 31540 - protein, 10 aa, Homo Sapiens
RFLDVNSHKI

SEQ ID NO: 31541 - protein, 10 aa, Homo Sapiens
RFLESHWFVW

SEQ ID NO: 31542 - protein, 10 aa, Homo Sapiens
RFLIDIGVKF

SEQ ID NO: 31543 - protein, 10 aa, Homo Sapiens
RFLPHGQLLF

SEQ ID NO: 31544 - protein, 10 aa, Homo Sapiens
RFLSHEDLRF

SEQ ID NO: 31545 - protein, 10 aa, Homo Sapiens
RFLVDQGYSF

SEQ ID NO: 31546 - protein, 10 aa, Homo Sapiens
RFPEELTQTF

SEQ ID NO: 31547 - protein, 10 aa, Homo Sapiens
RMPNSPAPHF

SEQ ID NO: 31548 - protein, 10 aa, Homo Sapiens
RQVADAREKI

SEQ ID NO: 31549 - protein, 10 aa, Homo Sapiens
RVAPEEHPVL

SEQ ID NO: 31550 - protein, 10 aa, Homo Sapiens
RWAGLPRQGF

SEQ ID NO: 31551 - protein, 10 aa, Homo Sapiens
RWFQPAIPSW

SEQ ID NO: 31552 - protein, 10 aa, Homo Sapiens
RWFTHASPTL

SEQ ID NO: 31553 - protein, 10 aa, Homo Sapiens
RWKPASQPTI

SEQ ID NO: 31554 - protein, 10 aa, Homo Sapiens
RWLDGSPVTL

SEQ ID NO: 31555 - protein, 10 aa, Homo Sapiens
RWLDRQLIRL

SEQ ID NO: 31556 - protein, 10 aa, Homo Sapiens
RWSPVRPLVF

SEQ ID NO: 31557 - protein, 10 aa, Homo Sapiens
RYADGPQLYI

SEQ ID NO: 31558 - protein, 10 aa, Homo Sapiens
RYAKIVEIPF

SEQ ID NO: 31559 - protein, 10 aa, Homo Sapiens
RYAVVLNATW

SEQ ID NO: 31560 - protein, 10 aa, Homo Sapiens
RYFDGNLEKL

SEQ ID NO: 31561 - protein, 10 aa, Homo Sapiens
RYFDPANGKF

SEQ ID NO: 31562 - protein, 10 aa, Homo Sapiens
RYFDVGLHNF

SEQ ID NO: 31563 - protein, 10 aa, Homo Sapiens
RYFISHVLAF

SEQ ID NO: 31564 - protein, 10 aa, Homo Sapiens
RYFPTQALNF

SEQ ID NO: 31565 - protein, 10 aa, Homo Sapiens
RYIDRIHIFF

SEQ ID NO: 31566 - protein, 10 aa, Homo Sapiens
RYIHPQQEAF

SEQ ID NO: 31567 - protein, 10 aa, Homo Sapiens
RYIKNPRIVL

SEQ ID NO: 31568 - protein, 10 aa, Homo Sapiens
RYINKALECF

SEQ ID NO: 31569 - protein, 10 aa, Homo Sapiens
RYIPSLPDRI

SEQ ID NO: 31570 - protein, 10 aa, Homo Sapiens
RYIQPWESEF

SEQ ID NO: 31571 - protein, 10 aa, Homo Sapiens
RYKGPGFEYF

SEQ ID NO: 31572 - protein, 10 aa, Homo Sapiens
RYLDLFTNYI

SEQ ID NO: 31573 - protein, 10 aa, Homo Sapiens
RYLDLILNDF

SEQ ID NO: 31574 - protein, 10 aa, Homo Sapiens
RYLDLSNNRL

SEQ ID NO: 31575 - protein, 10 aa, Homo Sapiens
RYLENGKETL

SEQ ID NO: 31576 - protein, 10 aa, Homo Sapiens
RYLHVEGGNF

SEQ ID NO: 31577 - protein, 10 aa, Homo Sapiens
RYLNKAFHIW

SEQ ID NO: 31578 - protein, 10 aa, Homo Sapiens
RYLNSQQQYF

SEQ ID NO: 31579 - protein, 10 aa, Homo Sapiens
RYLPTGSFPF

SEQ ID NO: 31580 - protein, 10 aa, Homo Sapiens
RYLRELPLLF

SEQ ID NO: 31581 - protein, 10 aa, Homo Sapiens
RYLWHIPLTY

SEQ ID NO: 31582 - protein, 10 aa, Homo Sapiens
RYMDQWVPVI

SEQ ID NO: 31583 - protein, 10 aa, Homo Sapiens
RYMPQNPCII

SEQ ID NO: 31584 - protein, 10 aa, Homo Sapiens
RYMPQNPHII

SEQ ID NO: 31585 - protein, 10 aa, Homo Sapiens
RYNHITATYF

SEQ ID NO: 31586 - protein, 10 aa, Homo Sapiens
RYNHIVGCTF

SEQ ID NO: 31587 - protein, 10 aa, Homo Sapiens
RYPDTIALTF

SEQ ID NO: 31588 - protein, 10 aa, Homo Sapiens
RYPNSHTHYF

SEQ ID NO: 31589 - protein, 10 aa, Homo Sapiens
RYPPDIRATF

SEQ ID NO: 31590 - protein, 10 aa, Homo Sapiens
RYPPKSGNYF

SEQ ID NO: 31591 - protein, 10 aa, Homo Sapiens
RYPVCKFPSL

SEQ ID NO: 31592 - protein, 10 aa, Homo Sapiens
RYPVGRFPSL

SEQ ID NO: 31593 - protein, 10 aa, Homo Sapiens
RYQNIWNINL

SEQ ID NO: 31594 - protein, 10 aa, Homo Sapiens
RYSTPHAFTF

SEQ ID NO: 31595 - protein, 10 aa, Homo Sapiens
RYTVGGLETF

SEQ ID NO: 31596 - protein, 10 aa, Homo Sapiens
RYVFQSENTF

SEQ ID NO: 31597 - protein, 10 aa, Homo Sapiens
RYYKNIGLGF

SEQ ID NO: 31598 - protein, 10 aa, Homo Sapiens
SFFKISYLTF

SEQ ID NO: 31599 - protein, 10 aa, Homo Sapiens
SFFKKIGVHF

SEQ ID NO: 31600 - protein, 10 aa, Homo Sapiens
SFHKFHYLTF

SEQ ID NO: 31601 - protein, 10 aa, Homo Sapiens
SFIPDQHMVF

SEQ ID NO: 31602 - protein, 10 aa, Homo Sapiens
SFLDQQAILF

SEQ ID NO: 31603 - protein, 10 aa, Homo Sapiens
SFLDVRNIIL

SEQ ID NO: 31604 - protein, 10 aa, Homo Sapiens
SFLGGIRWGF

SEQ ID NO: 31605 - protein, 10 aa, Homo Sapiens
SFLGVKELSF

SEQ ID NO: 31606 - protein, 10 aa, Homo Sapiens
SFLTHQRFQF

SEQ ID NO: 31607 - protein, 10 aa, Homo Sapiens
SFLYQPDWRF

SEQ ID NO: 31608 - protein, 10 aa, Homo Sapiens
SQEGMVFTRF

SEQ ID NO: 31609 - protein, 10 aa, Homo Sapiens
SWLDGSGLGF

SEQ ID NO: 31610 - protein, 10 aa, Homo Sapiens
SWMELPGLKF

SEQ ID NO: 31611 - protein, 10 aa, Homo Sapiens
SYDPLRIYLF

SEQ ID NO: 31612 - protein, 10 aa, Homo Sapiens
SYFEKGPLTF

SEQ ID NO: 31613 - protein, 10 aa, Homo Sapiens
SYGIIRGLQF

SEQ ID NO: 31614 - protein, 10 aa, Homo Sapiens
SYIAAISARF

SEQ ID NO: 31615 - protein, 10 aa, Homo Sapiens
SYIDRLISVF

SEQ ID NO: 31616 - protein, 10 aa, Homo Sapiens
SYIPYNPQQF

SEQ ID NO: 31617 - protein, 10 aa, Homo Sapiens
SYISTIGVDF

SEQ ID NO: 31618 - protein, 10 aa, Homo Sapiens
SYLDCELTKF

SEQ ID NO: 31619 - protein, 10 aa, Homo Sapiens
SYLDQELTTF

SEQ ID NO: 31620 - protein, 10 aa, Homo Sapiens
SYLDQVKLQF

SEQ ID NO: 31621 - protein, 10 aa, Homo Sapiens
SYLDRCLHKF

SEQ ID NO: 31622 - protein, 10 aa, Homo Sapiens
SYLDVKGNHF

SEQ ID NO: 31623 - protein, 10 aa, Homo Sapiens
SYLEKQVVTF

SEQ ID NO: 31624 - protein, 10 aa, Homo Sapiens
SYLFLGGILM

SEQ ID NO: 31625 - protein, 10 aa, Homo Sapiens
SYLLPGMASF

SEQ ID NO: 31626 - protein, 10 aa, Homo Sapiens
SYLMYNKEHI

SEQ ID NO: 31627 - protein, 10 aa, Homo Sapiens
SYLPHAPPFA

SEQ ID NO: 31628 - protein, 10 aa, Homo Sapiens
SYLPVGSHNL

SEQ ID NO: 31629 - protein, 10 aa, Homo Sapiens
SYLPVGSVSF

SEQ ID NO: 31630 - protein, 10 aa, Homo Sapiens
SYMFVDENTF

SEQ ID NO: 31631 - protein, 10 aa, Homo Sapiens
SYVEPLKLYL

SEQ ID NO: 31632 - protein, 10 aa, Homo Sapiens
SYVKLPPEKF

SEQ ID NO: 31633 - protein, 10 aa, Homo Sapiens
SYVNKIKTRF

SEQ ID NO: 31634 - protein, 10 aa, Homo Sapiens
SYVQRVALEF

SEQ ID NO: 31635 - protein, 10 aa, Homo Sapiens
TFAVTDELVF

SEQ ID NO: 31636 - protein, 10 aa, Homo Sapiens
TFLDTIATRF

SEQ ID NO: 31637 - protein, 10 aa, Homo Sapiens
TFLEHIIPRF

SEQ ID NO: 31638 - protein, 10 aa, Homo Sapiens
TFLEQSKTRF

SEQ ID NO: 31639 - protein, 10 aa, Homo Sapiens
TFVDNIQTAF

SEQ ID NO: 31640 - protein, 10 aa, Homo Sapiens
TFYLIKDIRF

SEQ ID NO: 31641 - protein, 10 aa, Homo Sapiens
TWAEAARLVL

SEQ ID NO: 31642 - protein, 10 aa, Homo Sapiens
TYFNGDLKNF

SEQ ID NO: 31643 - protein, 10 aa, Homo Sapiens
TYIPGTQITF

SEQ ID NO: 31644 - protein, 10 aa, Homo Sapiens
TYIPVVPESL

SEQ ID NO: 31645 - protein, 10 aa, Homo Sapiens
TYIRLYGRKF

SEQ ID NO: 31646 - protein, 10 aa, Homo Sapiens
TYISAIRERF

SEQ ID NO: 31647 - protein, 10 aa, Homo Sapiens
TYKPDVYTYL

SEQ ID NO: 31648 - protein, 10 aa, Homo Sapiens
TYLDDLRSKF

SEQ ID NO: 31649 - protein, 10 aa, Homo Sapiens
TYLDQVKIRF

SEQ ID NO: 31650 - protein, 10 aa, Homo Sapiens
TYLTITDTQL

SEQ ID NO: 31651 - protein, 10 aa, Homo Sapiens
TYMDRVFKQF

SEQ ID NO: 31652 - protein, 10 aa, Homo Sapiens
TYMGHTGAVW

SEQ ID NO: 31653 - protein, 10 aa, Homo Sapiens
TYNKHINISF

SEQ ID NO: 31654 - protein, 10 aa, Homo Sapiens
TYNPNMPFKW

SEQ ID NO: 31655 - protein, 10 aa, Homo Sapiens
TYPQLEGFKF

SEQ ID NO: 31656 - protein, 10 aa, Homo Sapiens
TYQHVPVESF

SEQ ID NO: 31657 - protein, 10 aa, Homo Sapiens
TYQPIQSPTF

SEQ ID NO: 31658 - protein, 10 aa, Homo Sapiens
TYSPALNKMF

SEQ ID NO: 31659 - protein, 10 aa, Homo Sapiens
TYTDVTPRQF

SEQ ID NO: 31660 - protein, 10 aa, Homo Sapiens
TYVSQYYNHF

SEQ ID NO: 31661 - protein, 10 aa, Homo Sapiens
VDVLKDSGRD

SEQ ID NO: 31662 - protein, 10 aa, Homo Sapiens
VFEDPVISKF

SEQ ID NO: 31663 - protein, 10 aa, Homo Sapiens
VFEGIPTYRF

SEQ ID NO: 31664 - protein, 10 aa, Homo Sapiens
VFEKTKRLLF

SEQ ID NO: 31665 - protein, 10 aa, Homo Sapiens
VFEPNNPVCF

SEQ ID NO: 31666 - protein, 10 aa, Homo Sapiens
VFFEVSPVSF

SEQ ID NO: 31667 - protein, 10 aa, Homo Sapiens
VFFKELIQEF

SEQ ID NO: 31668 - protein, 10 aa, Homo Sapiens
VFFKGFKWGF

SEQ ID NO: 31669 - protein, 10 aa, Homo Sapiens
VFHPSQDLVF

SEQ ID NO: 31670 - protein, 10 aa, Homo Sapiens
VFIGKIITNL

SEQ ID NO: 31671 - protein, 10 aa, Homo Sapiens
VFIGNLNTAI

SEQ ID NO: 31672 - protein, 10 aa, Homo Sapiens
VFIKAPESLF

SEQ ID NO: 31673 - protein, 10 aa, Homo Sapiens
VFITDKISSF

SEQ ID NO: 31674 - protein, 10 aa, Homo Sapiens
VFLAVSHSEF

SEQ ID NO: 31675 - protein, 10 aa, Homo Sapiens
VFLPDQGAFF

SEQ ID NO: 31676 - protein, 10 aa, Homo Sapiens
VFLPREDHLF

SEQ ID NO: 31677 - protein, 10 aa, Homo Sapiens
VFPRLHNVLF

SEQ ID NO: 31678 - protein, 10 aa, Homo Sapiens
VFPSIVGRPR

SEQ ID NO: 31679 - protein, 10 aa, Homo Sapiens
VFRTPPYHKM

SEQ ID NO: 31680 - protein, 10 aa, Homo Sapiens
VFVHVYIHHF

SEQ ID NO: 31681 - protein, 10 aa, Homo Sapiens
VHAPPMQLGF

SEQ ID NO: 31682 - protein, 10 aa, Homo Sapiens
VHHGVNQLKF

SEQ ID NO: 31683 - protein, 10 aa, Homo Sapiens
VHMPCLGHTF

SEQ ID NO: 31684 - protein, 10 aa, Homo Sapiens
VINDVRDIFL

SEQ ID NO: 31685 - protein, 10 aa, Homo Sapiens
VLSAADKGNV

SEQ ID NO: 31686 - protein, 10 aa, Homo Sapiens
VQPRNWLLFA

SEQ ID NO: 31687 - protein, 10 aa, Homo Sapiens
VWIKYGAFLL

SEQ ID NO: 31688 - protein, 10 aa, Homo Sapiens
VWIRNIQLGF

SEQ ID NO: 31689 - protein, 10 aa, Homo Sapiens
VWLEEELKTF

SEQ ID NO: 31690 - protein, 10 aa, Homo Sapiens
VWNPRSHEKL

SEQ ID NO: 31691 - protein, 10 aa, Homo Sapiens
VWPTKYGLLF

SEQ ID NO: 31692 - protein, 10 aa, Homo Sapiens
VYADTCFSTI

SEQ ID NO: 31693 - protein, 10 aa, Homo Sapiens
VYAEVSRLLL

SEQ ID NO: 31694 - protein, 10 aa, Homo Sapiens
VYAHIYHQHF

SEQ ID NO: 31695 - protein, 10 aa, Homo Sapiens
VYAVIPAEKF

SEQ ID NO: 31696 - protein, 10 aa, Homo Sapiens
VYFEGSDFKF

SEQ ID NO: 31697 - protein, 10 aa, Homo Sapiens
VYFEGSIYEI

SEQ ID NO: 31698 - protein, 10 aa, Homo Sapiens
VYIHGGGWAL

SEQ ID NO: 31699 - protein, 10 aa, Homo Sapiens
VYIHPSSALF

SEQ ID NO: 31700 - protein, 10 aa, Homo Sapiens
VYIPVLPPHL

SEQ ID NO: 31701 - protein, 10 aa, Homo Sapiens
VYIRGSKIRF

SEQ ID NO: 31702 - protein, 10 aa, Homo Sapiens
VYITNFHVRM

SEQ ID NO: 31703 - protein, 10 aa, Homo Sapiens
VYITNYRLYL

SEQ ID NO: 31704 - protein, 10 aa, Homo Sapiens
VYKAFVMETF

SEQ ID NO: 31705 - protein, 10 aa, Homo Sapiens
VYKDHQTITI

SEQ ID NO: 31706 - protein, 10 aa, Homo Sapiens
VYKDMPETSF

SEQ ID NO: 31707 - protein, 10 aa, Homo Sapiens
VYLAKLGNFF

SEQ ID NO: 31708 - protein, 10 aa, Homo Sapiens
VYLEDSGHTL

SEQ ID NO: 31709 - protein, 10 aa, Homo Sapiens
VYLPDGTASL

SEQ ID NO: 31710 - protein, 10 aa, Homo Sapiens
VYLPGSRQTL

SEQ ID NO: 31711 - protein, 10 aa, Homo Sapiens
VYLPPEAFTF

SEQ ID NO: 31712 - protein, 10 aa, Homo Sapiens
VYLPTHTSLL

SEQ ID NO: 31713 - protein, 10 aa, Homo Sapiens
VYLQNWSHVL

SEQ ID NO: 31714 - protein, 10 aa, Homo Sapiens
VYLRETANAI

SEQ ID NO: 31715 - protein, 10 aa, Homo Sapiens
VYLTIKPLNL

SEQ ID NO: 31716 - protein, 10 aa, Homo Sapiens
VYLWDLDHGF

SEQ ID NO: 31717 - protein, 10 aa, Homo Sapiens
VYNENLVHMI

SEQ ID NO: 31718 - protein, 10 aa, Homo Sapiens
VYNNIMRHYL

SEQ ID NO: 31719 - protein, 10 aa, Homo Sapiens
VYPEKLATKF

SEQ ID NO: 31720 - protein, 10 aa, Homo Sapiens
VYPESIPRKF

SEQ ID NO: 31721 - protein, 10 aa, Homo Sapiens
VYPPGGQPLL

SEQ ID NO: 31722 - protein, 10 aa, Homo Sapiens
VYPSKQFDVL

SEQ ID NO: 31723 - protein, 10 aa, Homo Sapiens
VYQKIHNEKF

SEQ ID NO: 31724 - protein, 10 aa, Homo Sapiens
VYQPMEKLYM

SEQ ID NO: 31725 - protein, 10 aa, Homo Sapiens
VYQPVTTECF

SEQ ID NO: 31726 - protein, 10 aa, Homo Sapiens
VYQTEGIRGF

SEQ ID NO: 31727 - protein, 10 aa, Homo Sapiens
VYRKPKWNHL

SEQ ID NO: 31728 - protein, 10 aa, Homo Sapiens
VYSEVAAYEF

SEQ ID NO: 31729 - protein, 10 aa, Homo Sapiens
VYTPTDTLVF

SEQ ID NO: 31730 - protein, 10 aa, Homo Sapiens
VYTPVDSLVF

SEQ ID NO: 31731 - protein, 10 aa, Homo Sapiens
VYTVVDEMFL

SEQ ID NO: 31732 - protein, 10 aa, Homo Sapiens
VYVDFEGINF

SEQ ID NO: 31733 - protein, 10 aa, Homo Sapiens
VYVEVSKMKI

SEQ ID NO: 31734 - protein, 10 aa, Homo Sapiens
VYVPKEEQLF

SEQ ID NO: 31735 - protein, 10 aa, Homo Sapiens
YFIAPTGHSL

SEQ ID NO: 31736 - protein, 10 aa, Homo Sapiens
YFIPATGHSL

SEQ ID NO: 31737 - protein, 10 aa, Homo Sapiens
YFISPTGHSL

SEQ ID NO: 31738 - protein, 10 aa, Homo Sapiens
YFITPTGHSL

SEQ ID NO: 31739 - protein, 10 aa, Homo Sapiens
YFITVVPTKL

SEQ ID NO: 31740 - protein, 10 aa, Homo Sapiens
YFLSHIPITL

SEQ ID NO: 31741 - protein, 10 aa, Homo Sapiens
YGSKEDPQTF

SEQ ID NO: 31742 - protein, 10 aa, Homo Sapiens
YLQYTDETFR

SEQ ID NO: 31743 - protein, 10 aa, Homo Sapiens
YYDDLKYRYF

SEQ ID NO: 31744 - protein, 10 aa, Homo Sapiens
YYINKISSTL

SEQ ID NO: 31745 - protein, 10 aa, Homo Sapiens
YYIQNGIQSF

SEQ ID NO: 31746 - protein, 10 aa, Homo Sapiens
YYLGSGRETF

SEQ ID NO: 31747 - protein, 10 aa, Homo Sapiens
YYLQGGFNKF

SEQ ID NO: 31748 - protein, 10 aa, Homo Sapiens
YYLQHPPISF

SEQ ID NO: 31749 - protein, 10 aa, Homo Sapiens
YYLQIHPQEL

SEQ ID NO: 31750 - protein, 10 aa, Homo Sapiens
YYPRKYDAKF

SEQ ID NO: 31751 - protein, 10 aa, Homo Sapiens
YYVHKGIWLF

SEQ ID NO: 31752 - protein, 11 aa, Homo Sapiens
AAYPSLHIYTY

SEQ ID NO: 31753 - protein, 11 aa, Homo Sapiens
AFFPKHQDLQF

SEQ ID NO: 31754 - protein, 11 aa, Homo Sapiens
AFIEPPERMEF

SEQ ID NO: 31755 - protein, 11 aa, Homo Sapiens
AFIQAGIFQEF

SEQ ID NO: 31756 - protein, 11 aa, Homo Sapiens
AFLDKQNQVKF

SEQ ID NO: 31757 - protein, 11 aa, Homo Sapiens
AFLEINRQLLF

SEQ ID NO: 31758 - protein, 11 aa, Homo Sapiens
AFLPREAVTRF

SEQ ID NO: 31759 - protein, 11 aa, Homo Sapiens
AFLSEGARVLF

SEQ ID NO: 31760 - protein, 11 aa, Homo Sapiens
AFVPQLRSGKF

SEQ ID NO: 31761 - protein, 11 aa, Homo Sapiens
AWLPAYATPHF

SEQ ID NO: 31762 - protein, 11 aa, Homo Sapiens
AWLPHVADFRW

SEQ ID NO: 31763 - protein, 11 aa, Homo Sapiens
AWNEITGQIKF

SEQ ID NO: 31764 - protein, 11 aa, Homo Sapiens
AYCPNDYHQLF

SEQ ID NO: 31765 - protein, 11 aa, Homo Sapiens
AYDIGNHFNEF

SEQ ID NO: 31766 - protein, 11 aa, Homo Sapiens
AYLECIERITF

SEQ ID NO: 31767 - protein, 11 aa, Homo Sapiens
AYLPKKNGLYL

SEQ ID NO: 31768 - protein, 11 aa, Homo Sapiens
AYLPKNTHPFL

SEQ ID NO: 31769 - protein, 11 aa, Homo Sapiens
AYLPLRLLERL

SEQ ID NO: 31770 - protein, 11 aa, Homo Sapiens
AYLPSGSSAHL

SEQ ID NO: 31771 - protein, 11 aa, Homo Sapiens
AYLPTGKQFLV

SEQ ID NO: 31772 - protein, 11 aa, Homo Sapiens
AYLPVNESFGF

SEQ ID NO: 31773 - protein, 11 aa, Homo Sapiens
AYMELQQKAEF

SEQ ID NO: 31774 - protein, 11 aa, Homo Sapiens
AYMGCDQEYKF

SEQ ID NO: 31775 - protein, 11 aa, Homo Sapiens
AYMQEPLFVEF

SEQ ID NO: 31776 - protein, 11 aa, Homo Sapiens
AYSTVPGYYSW

SEQ ID NO: 31777 - protein, 11 aa, Homo Sapiens
AYYPAQGVQQF

SEQ ID NO: 31778 - protein, 11 aa, Homo Sapiens
CFINQEVKYLF

SEQ ID NO: 31779 - protein, 11 aa, Homo Sapiens
CFLPAGIVAVL

SEQ ID NO: 31780 - protein, 11 aa, Homo Sapiens
CLLYRGDVVPK

SEQ ID NO: 31781 - protein, 11 aa, Homo Sapiens
CWLPRDQKLLL

SEQ ID NO: 31782 - protein, 11 aa, Homo Sapiens
CYNPHTDHWSF

SEQ ID NO: 31783 - protein, 11 aa, Homo Sapiens
DFLPADIQAQF

SEQ ID NO: 31784 - protein, 11 aa, Homo Sapiens
DYIDGILIKTF

SEQ ID NO: 31785 - protein, 11 aa, Homo Sapiens
DYIDPAIMKKL

SEQ ID NO: 31786 - protein, 11 aa, Homo Sapiens
DYVEINIDHKF

SEQ ID NO: 31787 - protein, 11 aa, Homo Sapiens
EALPGPHYYTW

SEQ ID NO: 31788 - protein, 11 aa, Homo Sapiens
EFPNFKYRMIL

SEQ ID NO: 31789 - protein, 11 aa, Homo Sapiens
EWDDRKVRHTF

SEQ ID NO: 31790 - protein, 11 aa, Homo Sapiens
EWSPYTKIFQF

SEQ ID NO: 31791 - protein, 11 aa, Homo Sapiens
EYFGPDFKLHI

SEQ ID NO: 31792 - protein, 11 aa, Homo Sapiens
EYIPEDILKNL

SEQ ID NO: 31793 - protein, 11 aa, Homo Sapiens
EYIPEGEILVI

SEQ ID NO: 31794 - protein, 11 aa, Homo Sapiens
EYLDEEFHQSL

SEQ ID NO: 31795 - protein, 11 aa, Homo Sapiens
EYLDRIGQLFF

SEQ ID NO: 31796 - protein, 11 aa, Homo Sapiens
EYLGANSVVYL

SEQ ID NO: 31797 - protein, 11 aa, Homo Sapiens
EYLHIDQRLVF

SEQ ID NO: 31798 - protein, 11 aa, Homo Sapiens
EYLIRIKGQEF

SEQ ID NO: 31799 - protein, 11 aa, Homo Sapiens
EYLPIGGLAEF

SEQ ID NO: 31800 - protein, 11 aa, Homo Sapiens
EYLTPEEMVTF

SEQ ID NO: 31801 - protein, 11 aa, Homo Sapiens
EYQLIDCAQYF

SEQ ID NO: 31802 - protein, 11 aa, Homo Sapiens
EYVDDTQFLRF

SEQ ID NO: 31803 - protein, 11 aa, Homo Sapiens
EYVEAVSFQHF

SEQ ID NO: 31804 - protein, 11 aa, Homo Sapiens
FHNKFLCFYGF

SEQ ID NO: 31805 - protein, 11 aa, Homo Sapiens
FQTVTDYGKDL

SEQ ID NO: 31806 - protein, 11 aa, Homo Sapiens
FYIPDGSFTNI

SEQ ID NO: 31807 - protein, 11 aa, Homo Sapiens
FYIPPLATHTI

SEQ ID NO: 31808 - protein, 11 aa, Homo Sapiens
FYLNQSTAYHF

SEQ ID NO: 31809 - protein, 11 aa, Homo Sapiens
FYLPKDAVKHL

SEQ ID NO: 31810 - protein, 11 aa, Homo Sapiens
FYLPLDAIKQL

SEQ ID NO: 31811 - protein, 11 aa, Homo Sapiens
FYPEEVSSMVL

SEQ ID NO: 31812 - protein, 11 aa, Homo Sapiens
FYQRFPLSFGF

SEQ ID NO: 31813 - protein, 11 aa, Homo Sapiens
FYVPAEPKLAF

SEQ ID NO: 31814 - protein, 11 aa, Homo Sapiens
GFYPAEITLTW

SEQ ID NO: 31815 - protein, 11 aa, Homo Sapiens
GPPPPPPGKPQ

SEQ ID NO: 31816 - protein, 11 aa, Homo Sapiens
GYLERIDGLDF

SEQ ID NO: 31817 - protein, 11 aa, Homo Sapiens
GYLPLAHVLEL

SEQ ID NO: 31818 - protein, 11 aa, Homo Sapiens
GYLPNQLFRTF

SEQ ID NO: 31819 - protein, 11 aa, Homo Sapiens
GYLSDNIFTHF

SEQ ID NO: 31820 - protein, 11 aa, Homo Sapiens
HRPPPPPGKPE

SEQ ID NO: 31821 - protein, 11 aa, Homo Sapiens
HYFQNTQGLIF

SEQ ID NO: 31822 - protein, 11 aa, Homo Sapiens
HYIEDDCLLRL

SEQ ID NO: 31823 - protein, 11 aa, Homo Sapiens
HYLPARVMEKL

SEQ ID NO: 31824 - protein, 11 aa, Homo Sapiens
HYLTRVEVTEF

SEQ ID NO: 31825 - protein, 11 aa, Homo Sapiens
HYNSDLNNLLF

SEQ ID NO: 31826 - protein, 11 aa, Homo Sapiens
HYVDLKDRPFF

SEQ ID NO: 31827 - protein, 11 aa, Homo Sapiens
IFINLPRSMDF

SEQ ID NO: 31828 - protein, 11 aa, Homo Sapiens
IFINQPQLTKF

SEQ ID NO: 31829 - protein, 11 aa, Homo Sapiens
IFITEKHGNYF

SEQ ID NO: 31830 - protein, 11 aa, Homo Sapiens
IFKPPDPDNTF

SEQ ID NO: 31831 - protein, 11 aa, Homo Sapiens
IFLDPHTTQTF

SEQ ID NO: 31832 - protein, 11 aa, Homo Sapiens
IFLDQKCQNIL

SEQ ID NO: 31833 - protein, 11 aa, Homo Sapiens
IFLYPEDGLQF

SEQ ID NO: 31834 - protein, 11 aa, Homo Sapiens
IFYAGTGNLLL

SEQ ID NO: 31835 - protein, 11 aa, Homo Sapiens
IQLPAALLSRF

SEQ ID NO: 31836 - protein, 11 aa, Homo Sapiens
IYCPPKLQATL

SEQ ID NO: 31837 - protein, 11 aa, Homo Sapiens
IYDHINEGKLW

SEQ ID NO: 31838 - protein, 11 aa, Homo Sapiens
IYDPNLAFLRF

SEQ ID NO: 31839 - protein, 11 aa, Homo Sapiens
IYDTSTDRLLW

SEQ ID NO: 31840 - protein, 11 aa, Homo Sapiens
IYEDPQHHPLL

SEQ ID NO: 31841 - protein, 11 aa, Homo Sapiens
IYEGDESFREL

SEQ ID NO: 31842 - protein, 11 aa, Homo Sapiens
IYEIIDNSQGF

SEQ ID NO: 31843 - protein, 11 aa, Homo Sapiens
IYFGKDIPNMF

SEQ ID NO: 31844 - protein, 11 aa, Homo Sapiens
IYFPEGSGVKI

SEQ ID NO: 31845 - protein, 11 aa, Homo Sapiens
IYFPKKEAVTF

SEQ ID NO: 31846 - protein, 11 aa, Homo Sapiens
IYIKHPHLFKY

SEQ ID NO: 31847 - protein, 11 aa, Homo Sapiens
IYLAPGDYHCF

SEQ ID NO: 31848 - protein, 11 aa, Homo Sapiens
IYLDKMITRNL

SEQ ID NO: 31849 - protein, 11 aa, Homo Sapiens
IYLESKDNQKL

SEQ ID NO: 31850 - protein, 11 aa, Homo Sapiens
IYLNHIEPLKI

SEQ ID NO: 31851 - protein, 11 aa, Homo Sapiens
IYMDPHYCQSF

SEQ ID NO: 31852 - protein, 11 aa, Homo Sapiens
IYNGDMEKILL

SEQ ID NO: 31853 - protein, 11 aa, Homo Sapiens
IYNNIKNFVRF

SEQ ID NO: 31854 - protein, 11 aa, Homo Sapiens
IYNPSMGVSVL

SEQ ID NO: 31855 - protein, 11 aa, Homo Sapiens
IYQDRDQFAKL

SEQ ID NO: 31856 - protein, 11 aa, Homo Sapiens
IYREFREEESL

SEQ ID NO: 31857 - protein, 11 aa, Homo Sapiens
IYSPDHTNNSF

SEQ ID NO: 31858 - protein, 11 aa, Homo Sapiens
IYTVKVEDLTF

SEQ ID NO: 31859 - protein, 11 aa, Homo Sapiens
IYVFDLHGNRF

SEQ ID NO: 31860 - protein, 11 aa, Homo Sapiens
IYVNPANTHQF

SEQ ID NO: 31861 - protein, 11 aa, Homo Sapiens
KFFGKDISTTL

SEQ ID NO: 31862 - protein, 11 aa, Homo Sapiens
KFFGKELSTTL

SEQ ID NO: 31863 - protein, 11 aa, Homo Sapiens
KFIDEQQILHW

SEQ ID NO: 31864 - protein, 11 aa, Homo Sapiens
KFIDPKKIKVF

SEQ ID NO: 31865 - protein, 11 aa, Homo Sapiens
KFIGPDQHRNF

SEQ ID NO: 31866 - protein, 11 aa, Homo Sapiens
KFLDKAKAKKF

SEQ ID NO: 31867 - protein, 11 aa, Homo Sapiens
KFLVTESPAKF

SEQ ID NO: 31868 - protein, 11 aa, Homo Sapiens
KFMDKKLSLKL

SEQ ID NO: 31869 - protein, 11 aa, Homo Sapiens
KFYPPKVELFF

SEQ ID NO: 31870 - protein, 11 aa, Homo Sapiens
KLPEILGKMSF

SEQ ID NO: 31871 - protein, 11 aa, Homo Sapiens
KLVAASQAALG

SEQ ID NO: 31872 - protein, 11 aa, Homo Sapiens
KWCELIPGAEF

SEQ ID NO: 31873 - protein, 11 aa, Homo Sapiens
KWLEPLKNLRF

SEQ ID NO: 31874 - protein, 11 aa, Homo Sapiens
KWLPESESLFL

SEQ ID NO: 31875 - protein, 11 aa, Homo Sapiens
KYAPLHLVPLI

SEQ ID NO: 31876 - protein, 11 aa, Homo Sapiens
KYARVVQKLGF

SEQ ID NO: 31877 - protein, 11 aa, Homo Sapiens
KYEPTNVRYLW

SEQ ID NO: 31878 - protein, 11 aa, Homo Sapiens
KYFAQEALTVL

SEQ ID NO: 31879 - protein, 11 aa, Homo Sapiens
KYGDLLGHLKI

SEQ ID NO: 31880 - protein, 11 aa, Homo Sapiens
KYIDKTIRVKF

SEQ ID NO: 31881 - protein, 11 aa, Homo Sapiens
KYIEEQLLQRI

SEQ ID NO: 31882 - protein, 11 aa, Homo Sapiens
KYIQQTKPLTL

SEQ ID NO: 31883 - protein, 11 aa, Homo Sapiens
KYISKPENLKL

SEQ ID NO: 31884 - protein, 11 aa, Homo Sapiens
KYISPETMVAL

SEQ ID NO: 31885 - protein, 11 aa, Homo Sapiens
KYITQGQLLQF

SEQ ID NO: 31886 - protein, 11 aa, Homo Sapiens
KYKKTTPEYVF

SEQ ID NO: 31887 - protein, 11 aa, Homo Sapiens
KYKNSEINFSF

SEQ ID NO: 31888 - protein, 11 aa, Homo Sapiens
KYLAILGSVTF

SEQ ID NO: 31889 - protein, 11 aa, Homo Sapiens
KYLAKNSATLF

SEQ ID NO: 31890 - protein, 11 aa, Homo Sapiens
KYLDEDTIYHL

SEQ ID NO: 31891 - protein, 11 aa, Homo Sapiens
KYLDEFLLNKI

SEQ ID NO: 31892 - protein, 11 aa, Homo Sapiens
KYLDVHSMHQL

SEQ ID NO: 31893 - protein, 11 aa, Homo Sapiens
KYLEDRGEVTF

SEQ ID NO: 31894 - protein, 11 aa, Homo Sapiens
KYLEESTIRHF

SEQ ID NO: 31895 - protein, 11 aa, Homo Sapiens
KYLIVDEGHRI

SEQ ID NO: 31896 - protein, 11 aa, Homo Sapiens
KYLLADCNEAF

SEQ ID NO: 31897 - protein, 11 aa, Homo Sapiens
KYLNENQLSQL

SEQ ID NO: 31898 - protein, 11 aa, Homo Sapiens
KYLNWDAVFRF

SEQ ID NO: 31899 - protein, 11 aa, Homo Sapiens
KYLPENDLKRL

SEQ ID NO: 31900 - protein, 11 aa, Homo Sapiens
KYLPYNHQHEY

SEQ ID NO: 31901 - protein, 11 aa, Homo Sapiens
KYLYEEYLQAF

SEQ ID NO: 31902 - protein, 11 aa, Homo Sapiens
KYMGIPQIRQL

SEQ ID NO: 31903 - protein, 11 aa, Homo Sapiens
KYMKYEKSYRF

SEQ ID NO: 31904 - protein, 11 aa, Homo Sapiens
KYMPNVKVAVF

SEQ ID NO: 31905 - protein, 11 aa, Homo Sapiens
KYMPSVKVSVF

SEQ ID NO: 31906 - protein, 11 aa, Homo Sapiens
KYPENDLFRKL

SEQ ID NO: 31907 - protein, 11 aa, Homo Sapiens
KYPGHLAAITL

SEQ ID NO: 31908 - protein, 11 aa, Homo Sapiens
KYQEVTNNLEF

SEQ ID NO: 31909 - protein, 11 aa, Homo Sapiens
KYSTKPGSYIF

SEQ ID NO: 31910 - protein, 11 aa, Homo Sapiens
LFIPEHTNLSL

SEQ ID NO: 31911 - protein, 11 aa, Homo Sapiens
LFIPSSKLLFL

SEQ ID NO: 31912 - protein, 11 aa, Homo Sapiens
LFTEATRILFF

SEQ ID NO: 31913 - protein, 11 aa, Homo Sapiens
LYEEGSNKRLF

SEQ ID NO: 31914 - protein, 11 aa, Homo Sapiens
LYIDRPLPYLI

SEQ ID NO: 31915 - protein, 11 aa, Homo Sapiens
LYIGWDKHYGF

SEQ ID NO: 31916 - protein, 11 aa, Homo Sapiens
LYISEAEGLKF

SEQ ID NO: 31917 - protein, 11 aa, Homo Sapiens
LYLEHKGWYSW

SEQ ID NO: 31918 - protein, 11 aa, Homo Sapiens
LYLEHQVRVGF

SEQ ID NO: 31919 - protein, 11 aa, Homo Sapiens
LYPDRELQSQW

SEQ ID NO: 31920 - protein, 11 aa, Homo Sapiens
LYPNIDKDHAF

SEQ ID NO: 31921 - protein, 11 aa, Homo Sapiens
LYYDEKKMANF

SEQ ID NO: 31922 - protein, 11 aa, Homo Sapiens
LYYTWTDGYRF

SEQ ID NO: 31923 - protein, 11 aa, Homo Sapiens
MYIKQVIIQGF

SEQ ID NO: 31924 - protein, 11 aa, Homo Sapiens
NFIPKNLFEQF

SEQ ID NO: 31925 - protein, 11 aa, Homo Sapiens
NFISGAGILRL

SEQ ID NO: 31926 - protein, 11 aa, Homo Sapiens
NFLGYKESVHL

SEQ ID NO: 31927 - protein, 11 aa, Homo Sapiens
NFLHPINTIFF

SEQ ID NO: 31928 - protein, 11 aa, Homo Sapiens
NFVPKNLFEQF

SEQ ID NO: 31929 - protein, 11 aa, Homo Sapiens
NYCEITGMNTL

SEQ ID NO: 31930 - protein, 11 aa, Homo Sapiens
NYFESTDGLIW

SEQ ID NO: 31931 - protein, 11 aa, Homo Sapiens
NYFFDAAKLMF

SEQ ID NO: 31932 - protein, 11 aa, Homo Sapiens
NYIHGSSQAQF

SEQ ID NO: 31933 - protein, 11 aa, Homo Sapiens
NYLAYDIGNHF

SEQ ID NO: 31934 - protein, 11 aa, Homo Sapiens
NYLCPAIINQI

SEQ ID NO: 31935 - protein, 11 aa, Homo Sapiens
NYLDPRITVAW

SEQ ID NO: 31936 - protein, 11 aa, Homo Sapiens
NYLGGEYFARM

SEQ ID NO: 31937 - protein, 11 aa, Homo Sapiens
NYLPAINGIVF

SEQ ID NO: 31938 - protein, 11 aa, Homo Sapiens
NYLPPEMKSFF

SEQ ID NO: 31939 - protein, 11 aa, Homo Sapiens
NYPETLGRLLI

SEQ ID NO: 31940 - protein, 11 aa, Homo Sapiens
NYPPQYLILKL

SEQ ID NO: 31941 - protein, 11 aa, Homo Sapiens
NYSDVMSKLGF

SEQ ID NO: 31942 - protein, 11 aa, Homo Sapiens
NYSGAAEYLYF

SEQ ID NO: 31943 - protein, 11 aa, Homo Sapiens
NYSTVPQKQTL

SEQ ID NO: 31944 - protein, 11 aa, Homo Sapiens
PFIKSQHELLF

SEQ ID NO: 31945 - protein, 11 aa, Homo Sapiens
PFLDIQKRFGL

SEQ ID NO: 31946 - protein, 11 aa, Homo Sapiens
PFLKPDDIQYF

SEQ ID NO: 31947 - protein, 11 aa, Homo Sapiens
PFYGILGALLF

SEQ ID NO: 31948 - protein, 11 aa, Homo Sapiens
PGSYLPSSYSF

SEQ ID NO: 31949 - protein, 11 aa, Homo Sapiens
PLSSLFSLPTF

SEQ ID NO: 31950 - protein, 11 aa, Homo Sapiens
PMFIVNTNVPR

SEQ ID NO: 31951 - protein, 11 aa, Homo Sapiens
PWIPPSSPTTF

SEQ ID NO: 31952 - protein, 11 aa, Homo Sapiens
PYAPSGEIPKF

SEQ ID NO: 31953 - protein, 11 aa, Homo Sapiens
PYMDSPQSIGF

SEQ ID NO: 31954 - protein, 11 aa, Homo Sapiens
PYQATIDGVRF

SEQ ID NO: 31955 - protein, 11 aa, Homo Sapiens
QFLPDHINIVL

SEQ ID NO: 31956 - protein, 11 aa, Homo Sapiens
QGPPPPQGKPQ

SEQ ID NO: 31957 - protein, 11 aa, Homo Sapiens
QWINLKKAYSF

SEQ ID NO: 31958 - protein, 11 aa, Homo Sapiens
QYKLLEPVLLL

SEQ ID NO: 31959 - protein, 11 aa, Homo Sapiens
QYLARFDALVL

SEQ ID NO: 31960 - protein, 11 aa, Homo Sapiens
QYLSIAERAEF

SEQ ID NO: 31961 - protein, 11 aa, Homo Sapiens
QYPDGEVWKKL

SEQ ID NO: 31962 - protein, 11 aa, Homo Sapiens
QYPVYWDHLEF

SEQ ID NO: 31963 - protein, 11 aa, Homo Sapiens
RFAHGTAGLVF

SEQ ID NO: 31964 - protein, 11 aa, Homo Sapiens
RFHVLSKLLSF

SEQ ID NO: 31965 - protein, 11 aa, Homo Sapiens
RFIAPAASLGF

SEQ ID NO: 31966 - protein, 11 aa, Homo Sapiens
RFLAEEGFYKF

SEQ ID NO: 31967 - protein, 11 aa, Homo Sapiens
RFLDGQAVLRL

SEQ ID NO: 31968 - protein, 11 aa, Homo Sapiens
RFLDPRNKISF

SEQ ID NO: 31969 - protein, 11 aa, Homo Sapiens
RFLEQQNKILL

SEQ ID NO: 31970 - protein, 11 aa, Homo Sapiens
RFLKSDIYLNL

SEQ ID NO: 31971 - protein, 11 aa, Homo Sapiens
RFLNDPGHLLW

SEQ ID NO: 31972 - protein, 11 aa, Homo Sapiens
RFLNSSNDHRF

SEQ ID NO: 31973 - protein, 11 aa, Homo Sapiens
RFVPLPASAKW

SEQ ID NO: 31974 - protein, 11 aa, Homo Sapiens
RFVTGNKILRI

SEQ ID NO: 31975 - protein, 11 aa, Homo Sapiens
RILPQDVILKF

SEQ ID NO: 31976 - protein, 11 aa, Homo Sapiens
RWKPPAVNQQF

SEQ ID NO: 31977 - protein, 11 aa, Homo Sapiens
RWLCHPLGQKF

SEQ ID NO: 31978 - protein, 11 aa, Homo Sapiens
RWLPQKNAAQF

SEQ ID NO: 31979 - protein, 11 aa, Homo Sapiens
RYFSEGDKVKI

SEQ ID NO: 31980 - protein, 11 aa, Homo Sapiens
RYIDQKFVQQL

SEQ ID NO: 31981 - protein, 11 aa, Homo Sapiens
RYIEFHSQSGF

SEQ ID NO: 31982 - protein, 11 aa, Homo Sapiens
RYIKNPRIVLL

SEQ ID NO: 31983 - protein, 11 aa, Homo Sapiens
RYISDQLFTNF

SEQ ID NO: 31984 - protein, 11 aa, Homo Sapiens
RYISPDQLADL

SEQ ID NO: 31985 - protein, 11 aa, Homo Sapiens
RYITEALIKKL

SEQ ID NO: 31986 - protein, 11 aa, Homo Sapiens
RYLDSLKAIVF

SEQ ID NO: 31987 - protein, 11 aa, Homo Sapiens
RYLDVSILGKF

SEQ ID NO: 31988 - protein, 11 aa, Homo Sapiens
RYLHNFQGKEI

SEQ ID NO: 31989 - protein, 11 aa, Homo Sapiens
RYLPEDFMESL

SEQ ID NO: 31990 - protein, 11 aa, Homo Sapiens
RYLPKGFLNQF

SEQ ID NO: 31991 - protein, 11 aa, Homo Sapiens
RYLPPATQVVL

SEQ ID NO: 31992 - protein, 11 aa, Homo Sapiens
RYLPTEQEVRF

SEQ ID NO: 31993 - protein, 11 aa, Homo Sapiens
RYLPTGSFPFL

SEQ ID NO: 31994 - protein, 11 aa, Homo Sapiens
RYLRPPNTSLF

SEQ ID NO: 31995 - protein, 11 aa, Homo Sapiens
RYLSPKWIKMF

SEQ ID NO: 31996 - protein, 11 aa, Homo Sapiens
RYLSPKYIKMF

SEQ ID NO: 31997 - protein, 11 aa, Homo Sapiens
RYLYLRGLVYL

SEQ ID NO: 31998 - protein, 11 aa, Homo Sapiens
RYMNHMQSLRF

SEQ ID NO: 31999 - protein, 11 aa, Homo Sapiens
RYMSPMEAQEF

SEQ ID NO: 32000 - protein, 11 aa, Homo Sapiens
RYPDNLKHLYL

SEQ ID NO: 32001 - protein, 11 aa, Homo Sapiens
RYPNGVVVHYF

SEQ ID NO: 32002 - protein, 11 aa, Homo Sapiens
RYPNKLDTITW

SEQ ID NO: 32003 - protein, 11 aa, Homo Sapiens
RYPTSIASLAF

SEQ ID NO: 32004 - protein, 11 aa, Homo Sapiens
RYQEKWDKLLL

SEQ ID NO: 32005 - protein, 11 aa, Homo Sapiens
RYQESLGNTVF

SEQ ID NO: 32006 - protein, 11 aa, Homo Sapiens
RYSGVNQSMLF

SEQ ID NO: 32007 - protein, 11 aa, Homo Sapiens
RYSSDVQEMIL

SEQ ID NO: 32008 - protein, 11 aa, Homo Sapiens
RYTPEQDTMTF

SEQ ID NO: 32009 - protein, 11 aa, Homo Sapiens
RYVASYLLAAL

SEQ ID NO: 32010 - protein, 11 aa, Homo Sapiens
RYVEQKAGITF

SEQ ID NO: 32011 - protein, 11 aa, Homo Sapiens
RYVLYPNNFQF

SEQ ID NO: 32012 - protein, 11 aa, Homo Sapiens
RYVPGLLLSYL

SEQ ID NO: 32013 - protein, 11 aa, Homo Sapiens
RYVQQLQRLSF

SEQ ID NO: 32014 - protein, 11 aa, Homo Sapiens
SFHAASESLKF

SEQ ID NO: 32015 - protein, 11 aa, Homo Sapiens
SFIPSSVPATF

SEQ ID NO: 32016 - protein, 11 aa, Homo Sapiens
SFLHGNASLLF

SEQ ID NO: 32017 - protein, 11 aa, Homo Sapiens
SGPSIVHRKCF

SEQ ID NO: 32018 - protein, 11 aa, Homo Sapiens
SYIDMDKELEF

SEQ ID NO: 32019 - protein, 11 aa, Homo Sapiens
SYIELPAYLKL

SEQ ID NO: 32020 - protein, 11 aa, Homo Sapiens
SYIRPEDIVNF

SEQ ID NO: 32021 - protein, 11 aa, Homo Sapiens
SYISDGKEYLF

SEQ ID NO: 32022 - protein, 11 aa, Homo Sapiens
SYISKEHFGTF

SEQ ID NO: 32023 - protein, 11 aa, Homo Sapiens
SYKPMLNNNSF

SEQ ID NO: 32024 - protein, 11 aa, Homo Sapiens
SYLAVIEGAKF

SEQ ID NO: 32025 - protein, 11 aa, Homo Sapiens
SYLDMSKVIIF

SEQ ID NO: 32026 - protein, 11 aa, Homo Sapiens
SYLENPTSYHL

SEQ ID NO: 32027 - protein, 11 aa, Homo Sapiens
SYLEPGSIRHI

SEQ ID NO: 32028 - protein, 11 aa, Homo Sapiens
SYLEPTSVTNF

SEQ ID NO: 32029 - protein, 11 aa, Homo Sapiens
SYLEREDFFFY

SEQ ID NO: 32030 - protein, 11 aa, Homo Sapiens
SYLERHGLINF

SEQ ID NO: 32031 - protein, 11 aa, Homo Sapiens
SYLPSQVTEMF

SEQ ID NO: 32032 - protein, 11 aa, Homo Sapiens
SYLSGMPECKF

SEQ ID NO: 32033 - protein, 11 aa, Homo Sapiens
SYLSHSEQLVF

SEQ ID NO: 32034 - protein, 11 aa, Homo Sapiens
SYMEVPTYLNF

SEQ ID NO: 32035 - protein, 11 aa, Homo Sapiens
SYPTFFPRFEF

SEQ ID NO: 32036 - protein, 11 aa, Homo Sapiens
SYTPVGLIQNL

SEQ ID NO: 32037 - protein, 11 aa, Homo Sapiens
SYVCPDLVKEF

SEQ ID NO: 32038 - protein, 11 aa, Homo Sapiens
SYVSIASNSTF

SEQ ID NO: 32039 - protein, 11 aa, Homo Sapiens
TFCDSQLRLLF

SEQ ID NO: 32040 - protein, 11 aa, Homo Sapiens
TFEDTGPLLQF

SEQ ID NO: 32041 - protein, 11 aa, Homo Sapiens
TFIRHIALLGF

SEQ ID NO: 32042 - protein, 11 aa, Homo Sapiens
TFLFPIQAKTF

SEQ ID NO: 32043 - protein, 11 aa, Homo Sapiens
TFLPKFLERQF

SEQ ID NO: 32044 - protein, 11 aa, Homo Sapiens
TFPNIASATKF

SEQ ID NO: 32045 - protein, 11 aa, Homo Sapiens
TWFTAGAKLLF

SEQ ID NO: 32046 - protein, 11 aa, Homo Sapiens
TWLVNSAAHLF

SEQ ID NO: 32047 - protein, 11 aa, Homo Sapiens
TWSADSKVLLF

SEQ ID NO: 32048 - protein, 11 aa, Homo Sapiens
TYAELMQTLRF

SEQ ID NO: 32049 - protein, 11 aa, Homo Sapiens
TYECIKEANLF

SEQ ID NO: 32050 - protein, 11 aa, Homo Sapiens
TYEPGFVGIRF

SEQ ID NO: 32051 - protein, 11 aa, Homo Sapiens
TYGDAGLTYTF

SEQ ID NO: 32052 - protein, 11 aa, Homo Sapiens
TYIHALDNGLF

SEQ ID NO: 32053 - protein, 11 aa, Homo Sapiens
TYIPSTQNPAF

SEQ ID NO: 32054 - protein, 11 aa, Homo Sapiens
TYLDLLGTWVF

SEQ ID NO: 32055 - protein, 11 aa, Homo Sapiens
TYLEAHRIVKM

SEQ ID NO: 32056 - protein, 11 aa, Homo Sapiens
TYLEKFQNLTY

SEQ ID NO: 32057 - protein, 11 aa, Homo Sapiens
TYLFPIQVKTF

SEQ ID NO: 32058 - protein, 11 aa, Homo Sapiens
TYLNQEDAVHF

SEQ ID NO: 32059 - protein, 11 aa, Homo Sapiens
TYLPAGQSVLL

SEQ ID NO: 32060 - protein, 11 aa, Homo Sapiens
TYLPREILNLI

SEQ ID NO: 32061 - protein, 11 aa, Homo Sapiens
TYMDAQLFKKV

SEQ ID NO: 32062 - protein, 11 aa, Homo Sapiens
TYPEGLEVLHF

SEQ ID NO: 32063 - protein, 11 aa, Homo Sapiens
TYSDEFGNLDF

SEQ ID NO: 32064 - protein, 11 aa, Homo Sapiens
TYTDVTPRQFF

SEQ ID NO: 32065 - protein, 11 aa, Homo Sapiens
TYVPVTTFKNL

SEQ ID NO: 32066 - protein, 11 aa, Homo Sapiens
VFEDLKKYLKF

SEQ ID NO: 32067 - protein, 11 aa, Homo Sapiens
VFHAHSSVLNF

SEQ ID NO: 32068 - protein, 11 aa, Homo Sapiens
VFIEGADAETF

SEQ ID NO: 32069 - protein, 11 aa, Homo Sapiens
VFIHKDKGFGF

SEQ ID NO: 32070 - protein, 11 aa, Homo Sapiens
VFINKGKGFGF

SEQ ID NO: 32071 - protein, 11 aa, Homo Sapiens
VFLDGNEVYVW

SEQ ID NO: 32072 - protein, 11 aa, Homo Sapiens
VFLTGTDRLQM

SEQ ID NO: 32073 - protein, 11 aa, Homo Sapiens
VFMDSNGIRQF

SEQ ID NO: 32074 - protein, 11 aa, Homo Sapiens
VFMKPGLPTTF

SEQ ID NO: 32075 - protein, 11 aa, Homo Sapiens
VFMPQHIMAIL

SEQ ID NO: 32076 - protein, 11 aa, Homo Sapiens
VFVQKEILDKF

SEQ ID NO: 32077 - protein, 11 aa, Homo Sapiens
VLPDADTLLHF

SEQ ID NO: 32078 - protein, 11 aa, Homo Sapiens
VMIGEDKLIHF

SEQ ID NO: 32079 - protein, 11 aa, Homo Sapiens
VMLGTQLLYKF

SEQ ID NO: 32080 - protein, 11 aa, Homo Sapiens
VVLDDKDYFLF

SEQ ID NO: 32081 - protein, 11 aa, Homo Sapiens
VWIKPGAEQSF

SEQ ID NO: 32082 - protein, 11 aa, Homo Sapiens
VYAHFPINVVI

SEQ ID NO: 32083 - protein, 11 aa, Homo Sapiens
VYAPPVGGFSF

SEQ ID NO: 32084 - protein, 11 aa, Homo Sapiens
VYCGKKAQLNI

SEQ ID NO: 32085 - protein, 11 aa, Homo Sapiens
VYCIPVGTHEF

SEQ ID NO: 32086 - protein, 11 aa, Homo Sapiens
VYEDQVGKFDW

SEQ ID NO: 32087 - protein, 11 aa, Homo Sapiens
VYEEILHQILL

SEQ ID NO: 32088 - protein, 11 aa, Homo Sapiens
VYELERILNRF

SEQ ID NO: 32089 - protein, 11 aa, Homo Sapiens
VYFQARLYHTL

SEQ ID NO: 32090 - protein, 11 aa, Homo Sapiens
VYIKEDKLEKL

SEQ ID NO: 32091 - protein, 11 aa, Homo Sapiens
VYILKGGYERF

SEQ ID NO: 32092 - protein, 11 aa, Homo Sapiens
VYILKGMIDQI

SEQ ID NO: 32093 - protein, 11 aa, Homo Sapiens
VYIPSRVALIL

SEQ ID NO: 32094 - protein, 11 aa, Homo Sapiens
VYISEENFRVM

SEQ ID NO: 32095 - protein, 11 aa, Homo Sapiens
VYISSSAGARW

SEQ ID NO: 32096 - protein, 11 aa, Homo Sapiens
VYITGKEVFSF

SEQ ID NO: 32097 - protein, 11 aa, Homo Sapiens
VYLDGHLITTV

SEQ ID NO: 32098 - protein, 11 aa, Homo Sapiens
VYLDPLVFREF

SEQ ID NO: 32099 - protein, 11 aa, Homo Sapiens
VYLPASSPCTL

SEQ ID NO: 32100 - protein, 11 aa, Homo Sapiens
VYLPEAMPASF

SEQ ID NO: 32101 - protein, 11 aa, Homo Sapiens
VYLTPESKSSF

SEQ ID NO: 32102 - protein, 11 aa, Homo Sapiens
VYMPASSYQSL

SEQ ID NO: 32103 - protein, 11 aa, Homo Sapiens
VYNDIGKEMLL

SEQ ID NO: 32104 - protein, 11 aa, Homo Sapiens
VYNTVSEGTHF

SEQ ID NO: 32105 - protein, 11 aa, Homo Sapiens
VYPANERFWYF

SEQ ID NO: 32106 - protein, 11 aa, Homo Sapiens
VYPASKMFPFI

SEQ ID NO: 32107 - protein, 11 aa, Homo Sapiens
VYPPPHQVFTW

SEQ ID NO: 32108 - protein, 11 aa, Homo Sapiens
VYPSRAVITTM

SEQ ID NO: 32109 - protein, 11 aa, Homo Sapiens
VYQEPIPTAQL

SEQ ID NO: 32110 - protein, 11 aa, Homo Sapiens
VYQVGGVTAYF

SEQ ID NO: 32111 - protein, 11 aa, Homo Sapiens
VYQYGSALAHF

SEQ ID NO: 32112 - protein, 11 aa, Homo Sapiens
VYRRFTEIYEF

SEQ ID NO: 32113 - protein, 11 aa, Homo Sapiens
VYSEAARVLQF

SEQ ID NO: 32114 - protein, 11 aa, Homo Sapiens
VYSPAIKDSTM

SEQ ID NO: 32115 - protein, 11 aa, Homo Sapiens
VYSPLGSAYKL

SEQ ID NO: 32116 - protein, 11 aa, Homo Sapiens
VYSQIPAAVKL

SEQ ID NO: 32117 - protein, 11 aa, Homo Sapiens
VYTPVASRQSL

SEQ ID NO: 32118 - protein, 11 aa, Homo Sapiens
VYVDLGGSHVF

SEQ ID NO: 32119 - protein, 11 aa, Homo Sapiens
VYVIEPHSMEF

SEQ ID NO: 32120 - protein, 11 aa, Homo Sapiens
VYVTSPLVNNF

SEQ ID NO: 32121 - protein, 11 aa, Homo Sapiens
VYVWIYDPVHF

SEQ ID NO: 32122 - protein, 11 aa, Homo Sapiens
WYVHPQVLQSF

SEQ ID NO: 32123 - protein, 11 aa, Homo Sapiens
YFVGKEHANYF

SEQ ID NO: 32124 - protein, 11 aa, Homo Sapiens
YHPSKGYWWHF

SEQ ID NO: 32125 - protein, 11 aa, Homo Sapiens
YWVGEDSTYKF

SEQ ID NO: 32126 - protein, 11 aa, Homo Sapiens
YYEEESCMRYL

SEQ ID NO: 32127 - protein, 11 aa, Homo Sapiens
YYESDTLLHSF

SEQ ID NO: 32128 - protein, 11 aa, Homo Sapiens
YYIEGIENSVF

SEQ ID NO: 32129 - protein, 11 aa, Homo Sapiens
YYLHQNNIVHL

SEQ ID NO: 32130 - protein, 11 aa, Homo Sapiens
YYLPDGSTIEI

SEQ ID NO: 32131 - protein, 11 aa, Homo Sapiens
YYPSTPGRYSI

SEQ ID NO: 32132 - protein, 11 aa, Homo Sapiens
YYSPHGHILVL

SEQ ID NO: 32133 - protein, 11 aa, Homo Sapiens
YYVPRGFWKQF

SEQ ID NO: 32134 - protein, 8 aa, Homo Sapiens
FSPVGSVL

SEQ ID NO: 32135 - protein, 8 aa, Homo Sapiens
FYGHFFRF

SEQ ID NO: 32136 - protein, 8 aa, Homo Sapiens
FYGNVSRF

SEQ ID NO: 32137 - protein, 8 aa, Homo Sapiens
IYTIINSI

SEQ ID NO: 32138 - protein, 8 aa, Homo Sapiens
KYGPIRQI

SEQ ID NO: 32139 - protein, 8 aa, Homo Sapiens
KYGPVFSF

SEQ ID NO: 32140 - protein, 8 aa, Homo Sapiens
LPKLYVKL

SEQ ID NO: 32141 - protein, 8 aa, Homo Sapiens
LYGQVQVF

SEQ ID NO: 32142 - protein, 8 aa, Homo Sapiens
PNLAFLRF

SEQ ID NO: 32143 - protein, 8 aa, Homo Sapiens
RYFKGYFL

SEQ ID NO: 32144 - protein, 8 aa, Homo Sapiens
TYGGSWKF

SEQ ID NO: 32145 - protein, 8 aa, Homo Sapiens
TYGSIALI

SEQ ID NO: 32146 - protein, 8 aa, Homo Sapiens
TYPNTYIF

SEQ ID NO: 32147 - protein, 8 aa, Homo Sapiens
VFFKGFKW

SEQ ID NO: 32148 - protein, 8 aa, Homo Sapiens
VYTTTVHW

SEQ ID NO: 32149 - protein, 8 aa, Homo Sapiens
YVHMVTHF

SEQ ID NO: 32150 - protein, 8 aa, Homo Sapiens
YYNTAVKL

SEQ ID NO: 32151 - protein, 9 aa, Homo Sapiens
AFHPTAQLL

SEQ ID NO: 32152 - protein, 9 aa, Homo Sapiens
AFIEKHWTF

SEQ ID NO: 32153 - protein, 9 aa, Homo Sapiens
AFIQKSNLI

SEQ ID NO: 32154 - protein, 9 aa, Homo Sapiens
AFLKVSSVF

SEQ ID NO: 32155 - protein, 9 aa, Homo Sapiens
AFMVNGQKF

SEQ ID NO: 32156 - protein, 9 aa, Homo Sapiens
AFNPEPLVL

SEQ ID NO: 32157 - protein, 9 aa, Homo Sapiens
ALPAAFHTW

SEQ ID NO: 32158 - protein, 9 aa, Homo Sapiens
ALPKELPLI

SEQ ID NO: 32159 - protein, 9 aa, Homo Sapiens
ALPSKLPTF

SEQ ID NO: 32160 - protein, 9 aa, Homo Sapiens
ALPSKVPAF

SEQ ID NO: 32161 - protein, 9 aa, Homo Sapiens
ALPYFWEHF

SEQ ID NO: 32162 - protein, 9 aa, Homo Sapiens
ALSSVYLLL

SEQ ID NO: 32163 - protein, 9 aa, Homo Sapiens
AWYDRFWLF

SEQ ID NO: 32164 - protein, 9 aa, Homo Sapiens
AYADVQAVL

SEQ ID NO: 32165 - protein, 9 aa, Homo Sapiens
AYAENIALL

SEQ ID NO: 32166 - protein, 9 aa, Homo Sapiens
AYAIIKEEL

SEQ ID NO: 32167 - protein, 9 aa, Homo Sapiens
AYAKFYTLL

SEQ ID NO: 32168 - protein, 9 aa, Homo Sapiens
AYALLLQHL

SEQ ID NO: 32169 - protein, 9 aa, Homo Sapiens
AYDDKIYYF

SEQ ID NO: 32170 - protein, 9 aa, Homo Sapiens
AYDTVRWEF

SEQ ID NO: 32171 - protein, 9 aa, Homo Sapiens
AYDVLFHQW

SEQ ID NO: 32172 - protein, 9 aa, Homo Sapiens
AYFLKPKEL

SEQ ID NO: 32173 - protein, 9 aa, Homo Sapiens
AYFTETEKF

SEQ ID NO: 32174 - protein, 9 aa, Homo Sapiens
AYFYGPIFI

SEQ ID NO: 32175 - protein, 9 aa, Homo Sapiens
AYGASFLSF

SEQ ID NO: 32176 - protein, 9 aa, Homo Sapiens
AYGDIILTF

SEQ ID NO: 32177 - protein, 9 aa, Homo Sapiens
AYGEFLSRL

SEQ ID NO: 32178 - protein, 9 aa, Homo Sapiens
AYGGAFYAF

SEQ ID NO: 32179 - protein, 9 aa, Homo Sapiens
AYGHFSYEF

SEQ ID NO: 32180 - protein, 9 aa, Homo Sapiens
AYGKDFHLI

SEQ ID NO: 32181 - protein, 9 aa, Homo Sapiens
AYGLDFYIL

SEQ ID NO: 32182 - protein, 9 aa, Homo Sapiens
AYGLVSATF

SEQ ID NO: 32183 - protein, 9 aa, Homo Sapiens
AYGNVFSAF

SEQ ID NO: 32184 - protein, 9 aa, Homo Sapiens
AYGQVVFRL

SEQ ID NO: 32185 - protein, 9 aa, Homo Sapiens
AYGSLFNTI

SEQ ID NO: 32186 - protein, 9 aa, Homo Sapiens
AYGWVSATF

SEQ ID NO: 32187 - protein, 9 aa, Homo Sapiens
AYHNSPAYL

SEQ ID NO: 32188 - protein, 9 aa, Homo Sapiens
AYIADHLGF

SEQ ID NO: 32189 - protein, 9 aa, Homo Sapiens
AYIDYLSHL

SEQ ID NO: 32190 - protein, 9 aa, Homo Sapiens
AYIERMNSI

SEQ ID NO: 32191 - protein, 9 aa, Homo Sapiens
AYIERMNYI

SEQ ID NO: 32192 - protein, 9 aa, Homo Sapiens
AYIGFIQSL

SEQ ID NO: 32193 - protein, 9 aa, Homo Sapiens
AYILDTLVF

SEQ ID NO: 32194 - protein, 9 aa, Homo Sapiens
AYINRASLL

SEQ ID NO: 32195 - protein, 9 aa, Homo Sapiens
AYIPKLLQL

SEQ ID NO: 32196 - protein, 9 aa, Homo Sapiens
AYIPTPIYF

SEQ ID NO: 32197 - protein, 9 aa, Homo Sapiens
AYIQESATF

SEQ ID NO: 32198 - protein, 9 aa, Homo Sapiens
AYISGLDVF

SEQ ID NO: 32199 - protein, 9 aa, Homo Sapiens
AYITGLCFI

SEQ ID NO: 32200 - protein, 9 aa, Homo Sapiens
AYKDFLWFF

SEQ ID NO: 32201 - protein, 9 aa, Homo Sapiens
AYKPGALTF

SEQ ID NO: 32202 - protein, 9 aa, Homo Sapiens
AYKPPGFSL

SEQ ID NO: 32203 - protein, 9 aa, Homo Sapiens
AYKYIQELW

SEQ ID NO: 32204 - protein, 9 aa, Homo Sapiens
AYLALFLKL

SEQ ID NO: 32205 - protein, 9 aa, Homo Sapiens
AYLDALQTL

SEQ ID NO: 32206 - protein, 9 aa, Homo Sapiens
AYLDKISEL

SEQ ID NO: 32207 - protein, 9 aa, Homo Sapiens
AYLEAHETF

SEQ ID NO: 32208 - protein, 9 aa, Homo Sapiens
AYLEAIHNF

SEQ ID NO: 32209 - protein, 9 aa, Homo Sapiens
AYLEALSHL

SEQ ID NO: 32210 - protein, 9 aa, Homo Sapiens
AYLEAYKEF

SEQ ID NO: 32211 - protein, 9 aa, Homo Sapiens
AYLECIERI

SEQ ID NO: 32212 - protein, 9 aa, Homo Sapiens
AYLESFYKF

SEQ ID NO: 32213 - protein, 9 aa, Homo Sapiens
AYLIDIKTI

SEQ ID NO: 32214 - protein, 9 aa, Homo Sapiens
AYLITLGKF

SEQ ID NO: 32215 - protein, 9 aa, Homo Sapiens
AYLKAIVLF

SEQ ID NO: 32216 - protein, 9 aa, Homo Sapiens
AYLKEVEQL

SEQ ID NO: 32217 - protein, 9 aa, Homo Sapiens
AYLKFLDQF

SEQ ID NO: 32218 - protein, 9 aa, Homo Sapiens
AYLKWISQI

SEQ ID NO: 32219 - protein, 9 aa, Homo Sapiens
AYLPTGKQF

SEQ ID NO: 32220 - protein, 9 aa, Homo Sapiens
AYLPVNESF

SEQ ID NO: 32221 - protein, 9 aa, Homo Sapiens
AYLQLFTKL

SEQ ID NO: 32222 - protein, 9 aa, Homo Sapiens
AYLQLLNLF

SEQ ID NO: 32223 - protein, 9 aa, Homo Sapiens
AYLSEAMKL

SEQ ID NO: 32224 - protein, 9 aa, Homo Sapiens
AYLSGMLRF

SEQ ID NO: 32225 - protein, 9 aa, Homo Sapiens
AYLSKAMEI

SEQ ID NO: 32226 - protein, 9 aa, Homo Sapiens
AYLVNTYAL

SEQ ID NO: 32227 - protein, 9 aa, Homo Sapiens
AYMAAFNSI

SEQ ID NO: 32228 - protein, 9 aa, Homo Sapiens
AYMEDAPLL

SEQ ID NO: 32229 - protein, 9 aa, Homo Sapiens
AYMKSLLSL

SEQ ID NO: 32230 - protein, 9 aa, Homo Sapiens
AYMPHTFFI

SEQ ID NO: 32231 - protein, 9 aa, Homo Sapiens
AYNDKIVAF

SEQ ID NO: 32232 - protein, 9 aa, Homo Sapiens
AYNPVTHQL

SEQ ID NO: 32233 - protein, 9 aa, Homo Sapiens
AYNRIVDAL

SEQ ID NO: 32234 - protein, 9 aa, Homo Sapiens
AYPEYLITF

SEQ ID NO: 32235 - protein, 9 aa, Homo Sapiens
AYPHNLMTF

SEQ ID NO: 32236 - protein, 9 aa, Homo Sapiens
AYPIIFTAW

SEQ ID NO: 32237 - protein, 9 aa, Homo Sapiens
AYPTAYPSF

SEQ ID NO: 32238 - protein, 9 aa, Homo Sapiens
AYPTVKFYF

SEQ ID NO: 32239 - protein, 9 aa, Homo Sapiens
AYPYNFSNL

SEQ ID NO: 32240 - protein, 9 aa, Homo Sapiens
AYQHAFLYI

SEQ ID NO: 32241 - protein, 9 aa, Homo Sapiens
AYQKQPTIF

SEQ ID NO: 32242 - protein, 9 aa, Homo Sapiens
AYQLMTDVF

SEQ ID NO: 32243 - protein, 9 aa, Homo Sapiens
AYSAKIALF

SEQ ID NO: 32244 - protein, 9 aa, Homo Sapiens
AYSIVAGVF

SEQ ID NO: 32245 - protein, 9 aa, Homo Sapiens
AYSLNFPLL

SEQ ID NO: 32246 - protein, 9 aa, Homo Sapiens
AYSPAIQMF

SEQ ID NO: 32247 - protein, 9 aa, Homo Sapiens
AYSPRFLYI

SEQ ID NO: 32248 - protein, 9 aa, Homo Sapiens
AYSVEHNQL

SEQ ID NO: 32249 - protein, 9 aa, Homo Sapiens
AYSYPIATL

SEQ ID NO: 32250 - protein, 9 aa, Homo Sapiens
AYTDCIPQL

SEQ ID NO: 32251 - protein, 9 aa, Homo Sapiens
AYTLIAPNI

SEQ ID NO: 32252 - protein, 9 aa, Homo Sapiens
AYTLLGHEF

SEQ ID NO: 32253 - protein, 9 aa, Homo Sapiens
AYTLLLHTW

SEQ ID NO: 32254 - protein, 9 aa, Homo Sapiens
AYTPFHAVL

SEQ ID NO: 32255 - protein, 9 aa, Homo Sapiens
AYTPVLNQF

SEQ ID NO: 32256 - protein, 9 aa, Homo Sapiens
AYTPVVVTL

SEQ ID NO: 32257 - protein, 9 aa, Homo Sapiens
AYTSQFVSL

SEQ ID NO: 32258 - protein, 9 aa, Homo Sapiens
AYVGDLQTL

SEQ ID NO: 32259 - protein, 9 aa, Homo Sapiens
AYVGDVPIL

SEQ ID NO: 32260 - protein, 9 aa, Homo Sapiens
AYVGNLPRI

SEQ ID NO: 32261 - protein, 9 aa, Homo Sapiens
AYVHMVTHF

SEQ ID NO: 32262 - protein, 9 aa, Homo Sapiens
AYVPGFAHI

SEQ ID NO: 32263 - protein, 9 aa, Homo Sapiens
AYVTVLEGF

SEQ ID NO: 32264 - protein, 9 aa, Homo Sapiens
AYVVFVSTL

SEQ ID NO: 32265 - protein, 9 aa, Homo Sapiens
AYVVFVTTL

SEQ ID NO: 32266 - protein, 9 aa, Homo Sapiens
CYAELGTTI

SEQ ID NO: 32267 - protein, 9 aa, Homo Sapiens
CYIKILHQL

SEQ ID NO: 32268 - protein, 9 aa, Homo Sapiens
CYLLQVDEF

SEQ ID NO: 32269 - protein, 9 aa, Homo Sapiens
CYNPMTNQW

SEQ ID NO: 32270 - protein, 9 aa, Homo Sapiens
CYVLFSYSF

SEQ ID NO: 32271 - protein, 9 aa, Homo Sapiens
CYVQPQWVF

SEQ ID NO: 32272 - protein, 9 aa, Homo Sapiens
DGAGKYFLW

SEQ ID NO: 32273 - protein, 9 aa, Homo Sapiens
DYAELLQHF

SEQ ID NO: 32274 - protein, 9 aa, Homo Sapiens
DYAVVLNQL

SEQ ID NO: 32275 - protein, 9 aa, Homo Sapiens
DYAYLREHF

SEQ ID NO: 32276 - protein, 9 aa, Homo Sapiens
DYFVPLHHF

SEQ ID NO: 32277 - protein, 9 aa, Homo Sapiens
DYGIVADLF

SEQ ID NO: 32278 - protein, 9 aa, Homo Sapiens
DYIDTIWKI

SEQ ID NO: 32279 - protein, 9 aa, Homo Sapiens
DYILNVMKF

SEQ ID NO: 32280 - protein, 9 aa, Homo Sapiens
DYIPQLAKF

SEQ ID NO: 32281 - protein, 9 aa, Homo Sapiens
DYKNTFPKW

SEQ ID NO: 32282 - protein, 9 aa, Homo Sapiens
DYKPSFPKW

SEQ ID NO: 32283 - protein, 9 aa, Homo Sapiens
DYLEHITSI

SEQ ID NO: 32284 - protein, 9 aa, Homo Sapiens
DYLEWPEYF

SEQ ID NO: 32285 - protein, 9 aa, Homo Sapiens
DYLPSFCKW

SEQ ID NO: 32286 - protein, 9 aa, Homo Sapiens
DYLQEVPIL

SEQ ID NO: 32287 - protein, 9 aa, Homo Sapiens
DYLRDPVTI

SEQ ID NO: 32288 - protein, 9 aa, Homo Sapiens
DYNFVFTSF

SEQ ID NO: 32289 - protein, 9 aa, Homo Sapiens
DYPRYLFEI

SEQ ID NO: 32290 - protein, 9 aa, Homo Sapiens
DYPSKMEYF

SEQ ID NO: 32291 - protein, 9 aa, Homo Sapiens
DYSDIVTTL

SEQ ID NO: 32292 - protein, 9 aa, Homo Sapiens
DYSRIIQSW

SEQ ID NO: 32293 - protein, 9 aa, Homo Sapiens
DYSSILQKF

SEQ ID NO: 32294 - protein, 9 aa, Homo Sapiens
DYVEGLRVF

SEQ ID NO: 32295 - protein, 9 aa, Homo Sapiens
EFLPFHFLL

SEQ ID NO: 32296 - protein, 9 aa, Homo Sapiens
EFLTKTAKF

SEQ ID NO: 32297 - protein, 9 aa, Homo Sapiens
EFMPQGAVF

SEQ ID NO: 32298 - protein, 9 aa, Homo Sapiens
ELPDYYLTI

SEQ ID NO: 32299 - protein, 9 aa, Homo Sapiens
ELPKHYFSF

SEQ ID NO: 32300 - protein, 9 aa, Homo Sapiens
EPSVSIPFL

SEQ ID NO: 32301 - protein, 9 aa, Homo Sapiens
EQPETYYKW

SEQ ID NO: 32302 - protein, 9 aa, Homo Sapiens
EWASRFWLW

SEQ ID NO: 32303 - protein, 9 aa, Homo Sapiens
EWIPLAWKW

SEQ ID NO: 32304 - protein, 9 aa, Homo Sapiens
EWLNKFNTF

SEQ ID NO: 32305 - protein, 9 aa, Homo Sapiens
EYALWNYLF

SEQ ID NO: 32306 - protein, 9 aa, Homo Sapiens
EYAVLTSTI

SEQ ID NO: 32307 - protein, 9 aa, Homo Sapiens
EYAVMLYTW

SEQ ID NO: 32308 - protein, 9 aa, Homo Sapiens
EYDLIVHQL

SEQ ID NO: 32309 - protein, 9 aa, Homo Sapiens
EYDNFFQHL

SEQ ID NO: 32310 - protein, 9 aa, Homo Sapiens
EYGFYHDFF

SEQ ID NO: 32311 - protein, 9 aa, Homo Sapiens
EYGRILTRL

SEQ ID NO: 32312 - protein, 9 aa, Homo Sapiens
EYHTPWYLF

SEQ ID NO: 32313 - protein, 9 aa, Homo Sapiens
EYIIEYPHF

SEQ ID NO: 32314 - protein, 9 aa, Homo Sapiens
EYIKFLRSI

SEQ ID NO: 32315 - protein, 9 aa, Homo Sapiens
EYIPKWEQF

SEQ ID NO: 32316 - protein, 9 aa, Homo Sapiens
EYIQFVPLL

SEQ ID NO: 32317 - protein, 9 aa, Homo Sapiens
EYIQKNVQL

SEQ ID NO: 32318 - protein, 9 aa, Homo Sapiens
EYIRSLNQF

SEQ ID NO: 32319 - protein, 9 aa, Homo Sapiens
EYISTVKTL

SEQ ID NO: 32320 - protein, 9 aa, Homo Sapiens
EYLENALKL

SEQ ID NO: 32321 - protein, 9 aa, Homo Sapiens
EYLERAPEL

SEQ ID NO: 32322 - protein, 9 aa, Homo Sapiens
EYLGSMAKI

SEQ ID NO: 32323 - protein, 9 aa, Homo Sapiens
EYLIKVNEI

SEQ ID NO: 32324 - protein, 9 aa, Homo Sapiens
EYLIVFPKL

SEQ ID NO: 32325 - protein, 9 aa, Homo Sapiens
EYLKLLHSF

SEQ ID NO: 32326 - protein, 9 aa, Homo Sapiens
EYLMQLNTI

SEQ ID NO: 32327 - protein, 9 aa, Homo Sapiens
EYLQEVARI

SEQ ID NO: 32328 - protein, 9 aa, Homo Sapiens
EYLQLLNLL

SEQ ID NO: 32329 - protein, 9 aa, Homo Sapiens
EYLRFLQTI

SEQ ID NO: 32330 - protein, 9 aa, Homo Sapiens
EYLRQIFRL

SEQ ID NO: 32331 - protein, 9 aa, Homo Sapiens
EYLTKVDKL

SEQ ID NO: 32332 - protein, 9 aa, Homo Sapiens
EYLYFFRVL

SEQ ID NO: 32333 - protein, 9 aa, Homo Sapiens
EYMKHTRLF

SEQ ID NO: 32334 - protein, 9 aa, Homo Sapiens
EYMPIKLKI

SEQ ID NO: 32335 - protein, 9 aa, Homo Sapiens
EYNNNFHVL

SEQ ID NO: 32336 - protein, 9 aa, Homo Sapiens
EYNQWFTKL

SEQ ID NO: 32337 - protein, 9 aa, Homo Sapiens
EYNSALPLL

SEQ ID NO: 32338 - protein, 9 aa, Homo Sapiens
EYNSDLHQF

SEQ ID NO: 32339 - protein, 9 aa, Homo Sapiens
EYQIKTNQL

SEQ ID NO: 32340 - protein, 9 aa, Homo Sapiens
EYRPEFSNF

SEQ ID NO: 32341 - protein, 9 aa, Homo Sapiens
EYSIVIQQL

SEQ ID NO: 32342 - protein, 9 aa, Homo Sapiens
EYSKQMQRF

SEQ ID NO: 32343 - protein, 9 aa, Homo Sapiens
EYTAKIALL

SEQ ID NO: 32344 - protein, 9 aa, Homo Sapiens
EYTDVYPEI

SEQ ID NO: 32345 - protein, 9 aa, Homo Sapiens
EYTGYSFKF

SEQ ID NO: 32346 - protein, 9 aa, Homo Sapiens
EYTRALFLL

SEQ ID NO: 32347 - protein, 9 aa, Homo Sapiens
EYTRYLFAL

SEQ ID NO: 32348 - protein, 9 aa, Homo Sapiens
EYTSILHLF

SEQ ID NO: 32349 - protein, 9 aa, Homo Sapiens
EYVANLTNL

SEQ ID NO: 32350 - protein, 9 aa, Homo Sapiens
EYVEKFYRI

SEQ ID NO: 32351 - protein, 9 aa, Homo Sapiens
EYVKFLHKF

SEQ ID NO: 32352 - protein, 9 aa, Homo Sapiens
EYVSQHLVF

SEQ ID NO: 32353 - protein, 9 aa, Homo Sapiens
FFIAGRYEF

SEQ ID NO: 32354 - protein, 9 aa, Homo Sapiens
FFIDQANYF

SEQ ID NO: 32355 - protein, 9 aa, Homo Sapiens
FFKDRHWLF

SEQ ID NO: 32356 - protein, 9 aa, Homo Sapiens
FHISRLFYF

SEQ ID NO: 32357 - protein, 9 aa, Homo Sapiens
FLPFPLPLF

SEQ ID NO: 32358 - protein, 9 aa, Homo Sapiens
FLYAPTILL

SEQ ID NO: 32359 - protein, 9 aa, Homo Sapiens
FSPFHASVL

SEQ ID NO: 32360 - protein, 9 aa, Homo Sapiens
FVITPILLI

SEQ ID NO: 32361 - protein, 9 aa, Homo Sapiens
FWIPYIHNL

SEQ ID NO: 32362 - protein, 9 aa, Homo Sapiens
FYAELYHII

SEQ ID NO: 32363 - protein, 9 aa, Homo Sapiens
FYAHIIPFL

SEQ ID NO: 32364 - protein, 9 aa, Homo Sapiens
FYGDKMNLF

SEQ ID NO: 32365 - protein, 9 aa, Homo Sapiens
FYGKYTAEI

SEQ ID NO: 32366 - protein, 9 aa, Homo Sapiens
FYHDFFTNI

SEQ ID NO: 32367 - protein, 9 aa, Homo Sapiens
FYHEAVVLF

SEQ ID NO: 32368 - protein, 9 aa, Homo Sapiens
FYIESISYL

SEQ ID NO: 32369 - protein, 9 aa, Homo Sapiens
FYINGQYQF

SEQ ID NO: 32370 - protein, 9 aa, Homo Sapiens
FYIPKIQDL

SEQ ID NO: 32371 - protein, 9 aa, Homo Sapiens
FYISPVNKL

SEQ ID NO: 32372 - protein, 9 aa, Homo Sapiens
FYITSRTQF

SEQ ID NO: 32373 - protein, 9 aa, Homo Sapiens
FYLFDLKAF

SEQ ID NO: 32374 - protein, 9 aa, Homo Sapiens
FYLLISKTF

SEQ ID NO: 32375 - protein, 9 aa, Homo Sapiens
FYLPSSPNL

SEQ ID NO: 32376 - protein, 9 aa, Homo Sapiens
FYLRDPIDL

SEQ ID NO: 32377 - protein, 9 aa, Homo Sapiens
FYMDTSHLF

SEQ ID NO: 32378 - protein, 9 aa, Homo Sapiens
FYNLLTRTF

SEQ ID NO: 32379 - protein, 9 aa, Homo Sapiens
FYNPFQFEI

SEQ ID NO: 32380 - protein, 9 aa, Homo Sapiens
FYPIYFRPL

SEQ ID NO: 32381 - protein, 9 aa, Homo Sapiens
FYPPKVELF

SEQ ID NO: 32382 - protein, 9 aa, Homo Sapiens
FYPYGLQTF

SEQ ID NO: 32383 - protein, 9 aa, Homo Sapiens
FYQILIYDF

SEQ ID NO: 32384 - protein, 9 aa, Homo Sapiens
FYQPKIQQF

SEQ ID NO: 32385 - protein, 9 aa, Homo Sapiens
FYQRFPLSF

SEQ ID NO: 32386 - protein, 9 aa, Homo Sapiens
FYSISQERF

SEQ ID NO: 32387 - protein, 9 aa, Homo Sapiens
FYSQPDHLF

SEQ ID NO: 32388 - protein, 9 aa, Homo Sapiens
FYSRLLQKF

SEQ ID NO: 32389 - protein, 9 aa, Homo Sapiens
FYTAIAQAF

SEQ ID NO: 32390 - protein, 9 aa, Homo Sapiens
FYTFPFQQL

SEQ ID NO: 32391 - protein, 9 aa, Homo Sapiens
FYTKDLIVM

SEQ ID NO: 32392 - protein, 9 aa, Homo Sapiens
FYTKRFQEL

SEQ ID NO: 32393 - protein, 9 aa, Homo Sapiens
FYTPAPPGF

SEQ ID NO: 32394 - protein, 9 aa, Homo Sapiens
FYTVIPHNF

SEQ ID NO: 32395 - protein, 9 aa, Homo Sapiens
FYVDTVRAF

SEQ ID NO: 32396 - protein, 9 aa, Homo Sapiens
FYVRGLFSF

SEQ ID NO: 32397 - protein, 9 aa, Homo Sapiens
GFQVKAYTF

SEQ ID NO: 32398 - protein, 9 aa, Homo Sapiens
GHNGWVTQI

SEQ ID NO: 32399 - protein, 9 aa, Homo Sapiens
GYADIVQLL

SEQ ID NO: 32400 - protein, 9 aa, Homo Sapiens
GYASRFIVI

SEQ ID NO: 32401 - protein, 9 aa, Homo Sapiens
GYIERPQLI

SEQ ID NO: 32402 - protein, 9 aa, Homo Sapiens
GYIESVQHI

SEQ ID NO: 32403 - protein, 9 aa, Homo Sapiens
GYIKGIFGF

SEQ ID NO: 32404 - protein, 9 aa, Homo Sapiens
GYLADPAKF

SEQ ID NO: 32405 - protein, 9 aa, Homo Sapiens
GYLPLAHVL

SEQ ID NO: 32406 - protein, 9 aa, Homo Sapiens
GYLRSVFAL

SEQ ID NO: 32407 - protein, 9 aa, Homo Sapiens
GYLTLVPLL

SEQ ID NO: 32408 - protein, 9 aa, Homo Sapiens
GYNVKFDMF

SEQ ID NO: 32409 - protein, 9 aa, Homo Sapiens
GYPEVALHF

SEQ ID NO: 32410 - protein, 9 aa, Homo Sapiens
GYVVWQEVF

SEQ ID NO: 32411 - protein, 9 aa, Homo Sapiens
HAPFTATSL

SEQ ID NO: 32412 - protein, 9 aa, Homo Sapiens
HAPLTNIPL

SEQ ID NO: 32413 - protein, 9 aa, Homo Sapiens
HFHPSVALF

SEQ ID NO: 32414 - protein, 9 aa, Homo Sapiens
HFIEIHHHL

SEQ ID NO: 32415 - protein, 9 aa, Homo Sapiens
HFLDRHLVF

SEQ ID NO: 32416 - protein, 9 aa, Homo Sapiens
HWAEICETF

SEQ ID NO: 32417 - protein, 9 aa, Homo Sapiens
HYAALAHYF

SEQ ID NO: 32418 - protein, 9 aa, Homo Sapiens
HYALNTWLF

SEQ ID NO: 32419 - protein, 9 aa, Homo Sapiens
HYATLYFVF

SEQ ID NO: 32420 - protein, 9 aa, Homo Sapiens
HYFNTPFQL

SEQ ID NO: 32421 - protein, 9 aa, Homo Sapiens
HYHPIVQRF

SEQ ID NO: 32422 - protein, 9 aa, Homo Sapiens
HYIDDLVVI

SEQ ID NO: 32423 - protein, 9 aa, Homo Sapiens
HYILHNSFF

SEQ ID NO: 32424 - protein, 9 aa, Homo Sapiens
HYINMPVQF

SEQ ID NO: 32425 - protein, 9 aa, Homo Sapiens
HYIPRAVLL

SEQ ID NO: 32426 - protein, 9 aa, Homo Sapiens
HYIRKYNRF

SEQ ID NO: 32427 - protein, 9 aa, Homo Sapiens
HYIYIENQF

SEQ ID NO: 32428 - protein, 9 aa, Homo Sapiens
HYKPTPLYF

SEQ ID NO: 32429 - protein, 9 aa, Homo Sapiens
HYLNHWNHF

SEQ ID NO: 32430 - protein, 9 aa, Homo Sapiens
HYLNVAFDL

SEQ ID NO: 32431 - protein, 9 aa, Homo Sapiens
HYLPYYYSI

SEQ ID NO: 32432 - protein, 9 aa, Homo Sapiens
HYNWLIYHL

SEQ ID NO: 32433 - protein, 9 aa, Homo Sapiens
HYPPVQVLF

SEQ ID NO: 32434 - protein, 9 aa, Homo Sapiens
HYSENMFSF

SEQ ID NO: 32435 - protein, 9 aa, Homo Sapiens
HYSFYIETF

SEQ ID NO: 32436 - protein, 9 aa, Homo Sapiens
HYSLFPLLF

SEQ ID NO: 32437 - protein, 9 aa, Homo Sapiens
HYSPIYLSF

SEQ ID NO: 32438 - protein, 9 aa, Homo Sapiens
HYTIVFNTF

SEQ ID NO: 32439 - protein, 9 aa, Homo Sapiens
HYTYILEVF

SEQ ID NO: 32440 - protein, 9 aa, Homo Sapiens
HYVAGLVGI

SEQ ID NO: 32441 - protein, 9 aa, Homo Sapiens
IFFENHPYF

SEQ ID NO: 32442 - protein, 9 aa, Homo Sapiens
IFFPGVSEF

SEQ ID NO: 32443 - protein, 9 aa, Homo Sapiens
IFGVIIDTF

SEQ ID NO: 32444 - protein, 9 aa, Homo Sapiens
IFHDISLRF

SEQ ID NO: 32445 - protein, 9 aa, Homo Sapiens
IFHEVPLKF

SEQ ID NO: 32446 - protein, 9 aa, Homo Sapiens
IFIKDSNSL

SEQ ID NO: 32447 - protein, 9 aa, Homo Sapiens
IFIRNVLLF

SEQ ID NO: 32448 - protein, 9 aa, Homo Sapiens
IFKDKPIKL

SEQ ID NO: 32449 - protein, 9 aa, Homo Sapiens
IFLNKTFQW

SEQ ID NO: 32450 - protein, 9 aa, Homo Sapiens
IFLSQPILL

SEQ ID NO: 32451 - protein, 9 aa, Homo Sapiens
IFLTKANLI

SEQ ID NO: 32452 - protein, 9 aa, Homo Sapiens
IFNGFSVTL

SEQ ID NO: 32453 - protein, 9 aa, Homo Sapiens
IFPLETPAF

SEQ ID NO: 32454 - protein, 9 aa, Homo Sapiens
IFPPSMHFF

SEQ ID NO: 32455 - protein, 9 aa, Homo Sapiens
IFQDVLLQF

SEQ ID NO: 32456 - protein, 9 aa, Homo Sapiens
IFSIKPLQF

SEQ ID NO: 32457 - protein, 9 aa, Homo Sapiens
IFSKIVSLF

SEQ ID NO: 32458 - protein, 9 aa, Homo Sapiens
IFTDIFHYL

SEQ ID NO: 32459 - protein, 9 aa, Homo Sapiens
IFTDLSSRF

SEQ ID NO: 32460 - protein, 9 aa, Homo Sapiens
IFTDVALKF

SEQ ID NO: 32461 - protein, 9 aa, Homo Sapiens
IFTPKPTLF

SEQ ID NO: 32462 - protein, 9 aa, Homo Sapiens
IGVIAYILL

SEQ ID NO: 32463 - protein, 9 aa, Homo Sapiens
IHPSLLPSF

SEQ ID NO: 32464 - protein, 9 aa, Homo Sapiens
IISSVIQKF

SEQ ID NO: 32465 - protein, 9 aa, Homo Sapiens
IITPIHEQW

SEQ ID NO: 32466 - protein, 9 aa, Homo Sapiens
ILGPPPPSF

SEQ ID NO: 32467 - protein, 9 aa, Homo Sapiens
ILPCQVPVW

SEQ ID NO: 32468 - protein, 9 aa, Homo Sapiens
ILPEIIPIL

SEQ ID NO: 32469 - protein, 9 aa, Homo Sapiens
ILPGSLFRF

SEQ ID NO: 32470 - protein, 9 aa, Homo Sapiens
ILPKELQTW

SEQ ID NO: 32471 - protein, 9 aa, Homo Sapiens
ILPPQLALF

SEQ ID NO: 32472 - protein, 9 aa, Homo Sapiens
ILPQFLYQF

SEQ ID NO: 32473 - protein, 9 aa, Homo Sapiens
ILSPLLLLF

SEQ ID NO: 32474 - protein, 9 aa, Homo Sapiens
ILTERGYSF

SEQ ID NO: 32475 - protein, 9 aa, Homo Sapiens
IMPEKFEFW

SEQ ID NO: 32476 - protein, 9 aa, Homo Sapiens
IMPSSSHLF

SEQ ID NO: 32477 - protein, 9 aa, Homo Sapiens
IMPTIFNLI

SEQ ID NO: 32478 - protein, 9 aa, Homo Sapiens
IPPSLNPII

SEQ ID NO: 32479 - protein, 9 aa, Homo Sapiens
IQERAFFLF

SEQ ID NO: 32480 - protein, 9 aa, Homo Sapiens
IQVRYLKII

SEQ ID NO: 32481 - protein, 9 aa, Homo Sapiens
ITPYGYFLI

SEQ ID NO: 32482 - protein, 9 aa, Homo Sapiens
ITSPYLITL

SEQ ID NO: 32483 - protein, 9 aa, Homo Sapiens
IWISKLPHF

SEQ ID NO: 32484 - protein, 9 aa, Homo Sapiens
IWLPFPVLL

SEQ ID NO: 32485 - protein, 9 aa, Homo Sapiens
IWPEKSFCL

SEQ ID NO: 32486 - protein, 9 aa, Homo Sapiens
IWPSSIPNL

SEQ ID NO: 32487 - protein, 9 aa, Homo Sapiens
IYAAFKEVL

SEQ ID NO: 32488 - protein, 9 aa, Homo Sapiens
IYAAVTPEL

SEQ ID NO: 32489 - protein, 9 aa, Homo Sapiens
IYAGQMAVL

SEQ ID NO: 32490 - protein, 9 aa, Homo Sapiens
IYAIHVEGL

SEQ ID NO: 32491 - protein, 9 aa, Homo Sapiens
IYAPPLPSL

SEQ ID NO: 32492 - protein, 9 aa, Homo Sapiens
IYAPQGLLL

SEQ ID NO: 32493 - protein, 9 aa, Homo Sapiens
IYAPTLLVF

SEQ ID NO: 32494 - protein, 9 aa, Homo Sapiens
IYATEAHVF

SEQ ID NO: 32495 - protein, 9 aa, Homo Sapiens
IYATIMDFF

SEQ ID NO: 32496 - protein, 9 aa, Homo Sapiens
IYDIVRNSW

SEQ ID NO: 32497 - protein, 9 aa, Homo Sapiens
IYDSVKVYF

SEQ ID NO: 32498 - protein, 9 aa, Homo Sapiens
IYELAVASF

SEQ ID NO: 32499 - protein, 9 aa, Homo Sapiens
IYELMQTEF

SEQ ID NO: 32500 - protein, 9 aa, Homo Sapiens
IYELRTYKL

SEQ ID NO: 32501 - protein, 9 aa, Homo Sapiens
IYEPNFIFF

SEQ ID NO: 32502 - protein, 9 aa, Homo Sapiens
IYFEYSHAF

SEQ ID NO: 32503 - protein, 9 aa, Homo Sapiens
IYFKNSENL

SEQ ID NO: 32504 - protein, 9 aa, Homo Sapiens
IYFSNTHFF

SEQ ID NO: 32505 - protein, 9 aa, Homo Sapiens
IYGEKTYAF

SEQ ID NO: 32506 - protein, 9 aa, Homo Sapiens
IYGLIVALL

SEQ ID NO: 32507 - protein, 9 aa, Homo Sapiens
IYGYVAEQF

SEQ ID NO: 32508 - protein, 9 aa, Homo Sapiens
IYHDLEQSI

SEQ ID NO: 32509 - protein, 9 aa, Homo Sapiens
IYHGLATLL

SEQ ID NO: 32510 - protein, 9 aa, Homo Sapiens
IYHNGVLEF

SEQ ID NO: 32511 - protein, 9 aa, Homo Sapiens
IYHPNVDKL

SEQ ID NO: 32512 - protein, 9 aa, Homo Sapiens
IYIAGHPAF

SEQ ID NO: 32513 - protein, 9 aa, Homo Sapiens
IYIDRFEDL

SEQ ID NO: 32514 - protein, 9 aa, Homo Sapiens
IYIDRGVVF

SEQ ID NO: 32515 - protein, 9 aa, Homo Sapiens
IYIINVHSM

SEQ ID NO: 32516 - protein, 9 aa, Homo Sapiens
IYIKHPHLF

SEQ ID NO: 32517 - protein, 9 aa, Homo Sapiens
IYIKQIKTF

SEQ ID NO: 32518 - protein, 9 aa, Homo Sapiens
IYILDPELL

SEQ ID NO: 32519 - protein, 9 aa, Homo Sapiens
IYIPSYFDF

SEQ ID NO: 32520 - protein, 9 aa, Homo Sapiens
IYIPTLAVL

SEQ ID NO: 32521 - protein, 9 aa, Homo Sapiens
IYITGSSII

SEQ ID NO: 32522 - protein, 9 aa, Homo Sapiens
IYKEDFNEL

SEQ ID NO: 32523 - protein, 9 aa, Homo Sapiens
IYKIDFVRF

SEQ ID NO: 32524 - protein, 9 aa, Homo Sapiens
IYKPVTDFF

SEQ ID NO: 32525 - protein, 9 aa, Homo Sapiens
IYLDGIITI

SEQ ID NO: 32526 - protein, 9 aa, Homo Sapiens
IYLDLPQNF

SEQ ID NO: 32527 - protein, 9 aa, Homo Sapiens
IYLDSVMCL

SEQ ID NO: 32528 - protein, 9 aa, Homo Sapiens
IYLDTHFRL

SEQ ID NO: 32529 - protein, 9 aa, Homo Sapiens
IYLEKLKTI

SEQ ID NO: 32530 - protein, 9 aa, Homo Sapiens
IYLERFPIF

SEQ ID NO: 32531 - protein, 9 aa, Homo Sapiens
IYLGQLECF

SEQ ID NO: 32532 - protein, 9 aa, Homo Sapiens
IYLLIHNNF

SEQ ID NO: 32533 - protein, 9 aa, Homo Sapiens
IYLPAAQTM

SEQ ID NO: 32534 - protein, 9 aa, Homo Sapiens
IYLPEVRKI

SEQ ID NO: 32535 - protein, 9 aa, Homo Sapiens
IYLPYLHEW

SEQ ID NO: 32536 - protein, 9 aa, Homo Sapiens
IYLPYLQNW

SEQ ID NO: 32537 - protein, 9 aa, Homo Sapiens
IYLRDPVQV

SEQ ID NO: 32538 - protein, 9 aa, Homo Sapiens
IYLRLLVKL

SEQ ID NO: 32539 - protein, 9 aa, Homo Sapiens
IYLTFPVAM

SEQ ID NO: 32540 - protein, 9 aa, Homo Sapiens
IYMDTLNIF

SEQ ID NO: 32541 - protein, 9 aa, Homo Sapiens
IYMFNMTGL

SEQ ID NO: 32542 - protein, 9 aa, Homo Sapiens
IYMNLASHI

SEQ ID NO: 32543 - protein, 9 aa, Homo Sapiens
IYNFPIHAF

SEQ ID NO: 32544 - protein, 9 aa, Homo Sapiens
IYNGDMEKI

SEQ ID NO: 32545 - protein, 9 aa, Homo Sapiens
IYNPAFFKY

SEQ ID NO: 32546 - protein, 9 aa, Homo Sapiens
IYNQVNVVL

SEQ ID NO: 32547 - protein, 9 aa, Homo Sapiens
IYNYPEQLF

SEQ ID NO: 32548 - protein, 9 aa, Homo Sapiens
IYPDSFTVL

SEQ ID NO: 32549 - protein, 9 aa, Homo Sapiens
IYPEVVHMF

SEQ ID NO: 32550 - protein, 9 aa, Homo Sapiens
IYPHGLVLL

SEQ ID NO: 32551 - protein, 9 aa, Homo Sapiens
IYPKLLDNF

SEQ ID NO: 32552 - protein, 9 aa, Homo Sapiens
IYPPKLHQF

SEQ ID NO: 32553 - protein, 9 aa, Homo Sapiens
IYPRAPDLF

SEQ ID NO: 32554 - protein, 9 aa, Homo Sapiens
IYPSIFHVL

SEQ ID NO: 32555 - protein, 9 aa, Homo Sapiens
IYPSLIYII

SEQ ID NO: 32556 - protein, 9 aa, Homo Sapiens
IYPTAPPRF

SEQ ID NO: 32557 - protein, 9 aa, Homo Sapiens
IYPVNAISF

SEQ ID NO: 32558 - protein, 9 aa, Homo Sapiens
IYPWVHVVI

SEQ ID NO: 32559 - protein, 9 aa, Homo Sapiens
IYPYVIQEL

SEQ ID NO: 32560 - protein, 9 aa, Homo Sapiens
IYQDVTLKW

SEQ ID NO: 32561 - protein, 9 aa, Homo Sapiens
IYQDWHSFL

SEQ ID NO: 32562 - protein, 9 aa, Homo Sapiens
IYQEVWNLF

SEQ ID NO: 32563 - protein, 9 aa, Homo Sapiens
IYQKAFEHL

SEQ ID NO: 32564 - protein, 9 aa, Homo Sapiens
IYQKPFQTL

SEQ ID NO: 32565 - protein, 9 aa, Homo Sapiens
IYQQIIQTY

SEQ ID NO: 32566 - protein, 9 aa, Homo Sapiens
IYQQNHMVL

SEQ ID NO: 32567 - protein, 9 aa, Homo Sapiens
IYQRDPLKL

SEQ ID NO: 32568 - protein, 9 aa, Homo Sapiens
IYQRHVYNL

SEQ ID NO: 32569 - protein, 9 aa, Homo Sapiens
IYQRWKDLL

SEQ ID NO: 32570 - protein, 9 aa, Homo Sapiens
IYQWICDNF

SEQ ID NO: 32571 - protein, 9 aa, Homo Sapiens
IYQYIQSRF

SEQ ID NO: 32572 - protein, 9 aa, Homo Sapiens
IYRWFNISF

SEQ ID NO: 32573 - protein, 9 aa, Homo Sapiens
IYSEMIHNL

SEQ ID NO: 32574 - protein, 9 aa, Homo Sapiens
IYSEVATLI

SEQ ID NO: 32575 - protein, 9 aa, Homo Sapiens
IYSIDFTRF

SEQ ID NO: 32576 - protein, 9 aa, Homo Sapiens
IYSTAFDYF

SEQ ID NO: 32577 - protein, 9 aa, Homo Sapiens
IYSTKLYRF

SEQ ID NO: 32578 - protein, 9 aa, Homo Sapiens
IYSWFTRTF

SEQ ID NO: 32579 - protein, 9 aa, Homo Sapiens
IYSYGFATI

SEQ ID NO: 32580 - protein, 9 aa, Homo Sapiens
IYTDIIYIF

SEQ ID NO: 32581 - protein, 9 aa, Homo Sapiens
IYTDITYSF

SEQ ID NO: 32582 - protein, 9 aa, Homo Sapiens
IYTEVRELV

SEQ ID NO: 32583 - protein, 9 aa, Homo Sapiens
IYTFPHASF

SEQ ID NO: 32584 - protein, 9 aa, Homo Sapiens
IYTMIYRNL

SEQ ID NO: 32585 - protein, 9 aa, Homo Sapiens
IYTNQNVVW

SEQ ID NO: 32586 - protein, 9 aa, Homo Sapiens
IYTPIFNEY

SEQ ID NO: 32587 - protein, 9 aa, Homo Sapiens
IYTRLLPAL

SEQ ID NO: 32588 - protein, 9 aa, Homo Sapiens
IYTSSVNRL

SEQ ID NO: 32589 - protein, 9 aa, Homo Sapiens
IYTSWIDCW

SEQ ID NO: 32590 - protein, 9 aa, Homo Sapiens
IYTWIEDHF

SEQ ID NO: 32591 - protein, 9 aa, Homo Sapiens
IYVGRVKSF

SEQ ID NO: 32592 - protein, 9 aa, Homo Sapiens
IYVHDLLTF

SEQ ID NO: 32593 - protein, 9 aa, Homo Sapiens
IYVISAETF

SEQ ID NO: 32594 - protein, 9 aa, Homo Sapiens
IYWDGPLAL

SEQ ID NO: 32595 - protein, 9 aa, Homo Sapiens
IYWTKYYDF

SEQ ID NO: 32596 - protein, 9 aa, Homo Sapiens
IYYFKANVF

SEQ ID NO: 32597 - protein, 9 aa, Homo Sapiens
IYYIDMQKF

SEQ ID NO: 32598 - protein, 9 aa, Homo Sapiens
IYYVDVQKF

SEQ ID NO: 32599 - protein, 9 aa, Homo Sapiens
KAPEPLSSL

SEQ ID NO: 32600 - protein, 9 aa, Homo Sapiens
KFAEEFYSF

SEQ ID NO: 32601 - protein, 9 aa, Homo Sapiens
KFFEEVLLF

SEQ ID NO: 32602 - protein, 9 aa, Homo Sapiens
KFIDTTSKF

SEQ ID NO: 32603 - protein, 9 aa, Homo Sapiens
KFIWTNHKF

SEQ ID NO: 32604 - protein, 9 aa, Homo Sapiens
KFMPVSSLI

SEQ ID NO: 32605 - protein, 9 aa, Homo Sapiens
KFSNVTMLF

SEQ ID NO: 32606 - protein, 9 aa, Homo Sapiens
KFSPNTSQF

SEQ ID NO: 32607 - protein, 9 aa, Homo Sapiens
KFSPRPLKF

SEQ ID NO: 32608 - protein, 9 aa, Homo Sapiens
KFVETHPEF

SEQ ID NO: 32609 - protein, 9 aa, Homo Sapiens
KLPDVYGVF

SEQ ID NO: 32610 - protein, 9 aa, Homo Sapiens
KLPSNLPQL

SEQ ID NO: 32611 - protein, 9 aa, Homo Sapiens
KMLDNFYNF

SEQ ID NO: 32612 - protein, 9 aa, Homo Sapiens
KQALKYFNL

SEQ ID NO: 32613 - protein, 9 aa, Homo Sapiens
KQLTWFYTF

SEQ ID NO: 32614 - protein, 9 aa, Homo Sapiens
KQPEDYFYL

SEQ ID NO: 32615 - protein, 9 aa, Homo Sapiens
KTNHVFFLL

SEQ ID NO: 32616 - protein, 9 aa, Homo Sapiens
KWFDFKLFF

SEQ ID NO: 32617 - protein, 9 aa, Homo Sapiens
KWFFQKLRF

SEQ ID NO: 32618 - protein, 9 aa, Homo Sapiens
KWFTGPQLI

SEQ ID NO: 32619 - protein, 9 aa, Homo Sapiens
KWLTKSFHF

SEQ ID NO: 32620 - protein, 9 aa, Homo Sapiens
KYAMMFAEL

SEQ ID NO: 32621 - protein, 9 aa, Homo Sapiens
KYEELFPAF

SEQ ID NO: 32622 - protein, 9 aa, Homo Sapiens
KYFEKQFEL

SEQ ID NO: 32623 - protein, 9 aa, Homo Sapiens
KYFHPPAHL

SEQ ID NO: 32624 - protein, 9 aa, Homo Sapiens
KYFLWEEKF

SEQ ID NO: 32625 - protein, 9 aa, Homo Sapiens
KYFLWVVKF

SEQ ID NO: 32626 - protein, 9 aa, Homo Sapiens
KYFQLDVTL

SEQ ID NO: 32627 - protein, 9 aa, Homo Sapiens
KYGALVNNF

SEQ ID NO: 32628 - protein, 9 aa, Homo Sapiens
KYGDIIFDF

SEQ ID NO: 32629 - protein, 9 aa, Homo Sapiens
KYGIQMPAF

SEQ ID NO: 32630 - protein, 9 aa, Homo Sapiens
KYGIVLKEF

SEQ ID NO: 32631 - protein, 9 aa, Homo Sapiens
KYGIVQEFF

SEQ ID NO: 32632 - protein, 9 aa, Homo Sapiens
KYGMVTYLL

SEQ ID NO: 32633 - protein, 9 aa, Homo Sapiens
KYIDFDHVF

SEQ ID NO: 32634 - protein, 9 aa, Homo Sapiens
KYIDKTIRV

SEQ ID NO: 32635 - protein, 9 aa, Homo Sapiens
KYIDQKFVL

SEQ ID NO: 32636 - protein, 9 aa, Homo Sapiens
KYIDYIFNV

SEQ ID NO: 32637 - protein, 9 aa, Homo Sapiens
KYIDYLMTW

SEQ ID NO: 32638 - protein, 9 aa, Homo Sapiens
KYIEGVSDF

SEQ ID NO: 32639 - protein, 9 aa, Homo Sapiens
KYIESPVLF

SEQ ID NO: 32640 - protein, 9 aa, Homo Sapiens
KYIHSANVL

SEQ ID NO: 32641 - protein, 9 aa, Homo Sapiens
KYIKDDFRF

SEQ ID NO: 32642 - protein, 9 aa, Homo Sapiens
KYILVVPLI

SEQ ID NO: 32643 - protein, 9 aa, Homo Sapiens
KYIMDLERL

SEQ ID NO: 32644 - protein, 9 aa, Homo Sapiens
KYINTDAKF

SEQ ID NO: 32645 - protein, 9 aa, Homo Sapiens
KYIQEAEML

SEQ ID NO: 32646 - protein, 9 aa, Homo Sapiens
KYIQRQETI

SEQ ID NO: 32647 - protein, 9 aa, Homo Sapiens
KYISGPHEL

SEQ ID NO: 32648 - protein, 9 aa, Homo Sapiens
KYISKPENL

SEQ ID NO: 32649 - protein, 9 aa, Homo Sapiens
KYLADLPTL

SEQ ID NO: 32650 - protein, 9 aa, Homo Sapiens
KYLATLETL

SEQ ID NO: 32651 - protein, 9 aa, Homo Sapiens
KYLEESNFV

SEQ ID NO: 32652 - protein, 9 aa, Homo Sapiens
KYLEHPLLL

SEQ ID NO: 32653 - protein, 9 aa, Homo Sapiens
KYLGQLHYL

SEQ ID NO: 32654 - protein, 9 aa, Homo Sapiens
KYLGQLTSI

SEQ ID NO: 32655 - protein, 9 aa, Homo Sapiens
KYLHPPPHL

SEQ ID NO: 32656 - protein, 9 aa, Homo Sapiens
KYLLHSLVF

SEQ ID NO: 32657 - protein, 9 aa, Homo Sapiens
KYLLSSIQW

SEQ ID NO: 32658 - protein, 9 aa, Homo Sapiens
KYLMALKNL

SEQ ID NO: 32659 - protein, 9 aa, Homo Sapiens
KYLMELTLI

SEQ ID NO: 32660 - protein, 9 aa, Homo Sapiens
KYLPALDEF

SEQ ID NO: 32661 - protein, 9 aa, Homo Sapiens
KYLPEWSAW

SEQ ID NO: 32662 - protein, 9 aa, Homo Sapiens
KYLQSTISF

SEQ ID NO: 32663 - protein, 9 aa, Homo Sapiens
KYLSGIAHF

SEQ ID NO: 32664 - protein, 9 aa, Homo Sapiens
KYLSVQGQL

SEQ ID NO: 32665 - protein, 9 aa, Homo Sapiens
KYLTVKDYL

SEQ ID NO: 32666 - protein, 9 aa, Homo Sapiens
KYLVIGDLL

SEQ ID NO: 32667 - protein, 9 aa, Homo Sapiens
KYMAEALLL

SEQ ID NO: 32668 - protein, 9 aa, Homo Sapiens
KYMDINFDF

SEQ ID NO: 32669 - protein, 9 aa, Homo Sapiens
KYMDVQFDF

SEQ ID NO: 32670 - protein, 9 aa, Homo Sapiens
KYMEDVTQI

SEQ ID NO: 32671 - protein, 9 aa, Homo Sapiens
KYMLKANLI

SEQ ID NO: 32672 - protein, 9 aa, Homo Sapiens
KYMSVIAEL

SEQ ID NO: 32673 - protein, 9 aa, Homo Sapiens
KYMVYPQTF

SEQ ID NO: 32674 - protein, 9 aa, Homo Sapiens
KYNDNFFGL

SEQ ID NO: 32675 - protein, 9 aa, Homo Sapiens
KYNETFQFI

SEQ ID NO: 32676 - protein, 9 aa, Homo Sapiens
KYNFPLVTL

SEQ ID NO: 32677 - protein, 9 aa, Homo Sapiens
KYNKILNKY

SEQ ID NO: 32678 - protein, 9 aa, Homo Sapiens
KYNLINEYF

SEQ ID NO: 32679 - protein, 9 aa, Homo Sapiens
KYNPTWHCI

SEQ ID NO: 32680 - protein, 9 aa, Homo Sapiens
KYPASTVQI

SEQ ID NO: 32681 - protein, 9 aa, Homo Sapiens
KYPDIISRI

SEQ ID NO: 32682 - protein, 9 aa, Homo Sapiens
KYPDRVPVI

SEQ ID NO: 32683 - protein, 9 aa, Homo Sapiens
KYPDYEVTW

SEQ ID NO: 32684 - protein, 9 aa, Homo Sapiens
KYPENFFLL

SEQ ID NO: 32685 - protein, 9 aa, Homo Sapiens
KYPHYFPLL

SEQ ID NO: 32686 - protein, 9 aa, Homo Sapiens
KYPHYFPVM

SEQ ID NO: 32687 - protein, 9 aa, Homo Sapiens
KYPLLLREI

SEQ ID NO: 32688 - protein, 9 aa, Homo Sapiens
KYPNVFKKI

SEQ ID NO: 32689 - protein, 9 aa, Homo Sapiens
KYPQLLPGI

SEQ ID NO: 32690 - protein, 9 aa, Homo Sapiens
KYPSPFFVF

SEQ ID NO: 32691 - protein, 9 aa, Homo Sapiens
KYPYVAVML

SEQ ID NO: 32692 - protein, 9 aa, Homo Sapiens
KYQAVTATL

SEQ ID NO: 32693 - protein, 9 aa, Homo Sapiens
KYQDILNEI

SEQ ID NO: 32694 - protein, 9 aa, Homo Sapiens
KYQELQVLF

SEQ ID NO: 32695 - protein, 9 aa, Homo Sapiens
KYQEVTNNL

SEQ ID NO: 32696 - protein, 9 aa, Homo Sapiens
KYQIINEEF

SEQ ID NO: 32697 - protein, 9 aa, Homo Sapiens
KYQYWAVVF

SEQ ID NO: 32698 - protein, 9 aa, Homo Sapiens
KYSDITIMF

SEQ ID NO: 32699 - protein, 9 aa, Homo Sapiens
KYSEIQQLL

SEQ ID NO: 32700 - protein, 9 aa, Homo Sapiens
KYSEVFEAI

SEQ ID NO: 32701 - protein, 9 aa, Homo Sapiens
KYTDWTEFL

SEQ ID NO: 32702 - protein, 9 aa, Homo Sapiens
KYTGVLTEL

SEQ ID NO: 32703 - protein, 9 aa, Homo Sapiens
KYTKIFNDF

SEQ ID NO: 32704 - protein, 9 aa, Homo Sapiens
KYTPPPHHI

SEQ ID NO: 32705 - protein, 9 aa, Homo Sapiens
KYVENFGLI

SEQ ID NO: 32706 - protein, 9 aa, Homo Sapiens
KYVGAVQML

SEQ ID NO: 32707 - protein, 9 aa, Homo Sapiens
KYVHLFPKL

SEQ ID NO: 32708 - protein, 9 aa, Homo Sapiens
KYVKGLISI

SEQ ID NO: 32709 - protein, 9 aa, Homo Sapiens
KYVKIFDNF

SEQ ID NO: 32710 - protein, 9 aa, Homo Sapiens
KYVKVFDKF

SEQ ID NO: 32711 - protein, 9 aa, Homo Sapiens
KYVKVFHKF

SEQ ID NO: 32712 - protein, 9 aa, Homo Sapiens
KYVSSVLSF

SEQ ID NO: 32713 - protein, 9 aa, Homo Sapiens
KYWDTFYKI

SEQ ID NO: 32714 - protein, 9 aa, Homo Sapiens
LFIATSQKF

SEQ ID NO: 32715 - protein, 9 aa, Homo Sapiens
LFIDNIFRF

SEQ ID NO: 32716 - protein, 9 aa, Homo Sapiens
LFKNDPLFF

SEQ ID NO: 32717 - protein, 9 aa, Homo Sapiens
LFLPYSHFL

SEQ ID NO: 32718 - protein, 9 aa, Homo Sapiens
LFPGKAFSW

SEQ ID NO: 32719 - protein, 9 aa, Homo Sapiens
LIPEEFFQF

SEQ ID NO: 32720 - protein, 9 aa, Homo Sapiens
LIPIIVLLL

SEQ ID NO: 32721 - protein, 9 aa, Homo Sapiens
LLPGKTYSF

SEQ ID NO: 32722 - protein, 9 aa, Homo Sapiens
LLPHILPLL

SEQ ID NO: 32723 - protein, 9 aa, Homo Sapiens
LLPLIYHHL

SEQ ID NO: 32724 - protein, 9 aa, Homo Sapiens
LLPPVVWLL

SEQ ID NO: 32725 - protein, 9 aa, Homo Sapiens
LLPSRQFGF

SEQ ID NO: 32726 - protein, 9 aa, Homo Sapiens
LMSLIINTF

SEQ ID NO: 32727 - protein, 9 aa, Homo Sapiens
LQPERYELW

SEQ ID NO: 32728 - protein, 9 aa, Homo Sapiens
LQPFIYYRF

SEQ ID NO: 32729 - protein, 9 aa, Homo Sapiens
LQPKQFPFL

SEQ ID NO: 32730 - protein, 9 aa, Homo Sapiens
LSTYLVTII

SEQ ID NO: 32731 - protein, 9 aa, Homo Sapiens
LWYYGEHLF

SEQ ID NO: 32732 - protein, 9 aa, Homo Sapiens
LYAFIGVKF

SEQ ID NO: 32733 - protein, 9 aa, Homo Sapiens
LYANMFERL

SEQ ID NO: 32734 - protein, 9 aa, Homo Sapiens
LYDIILKNF

SEQ ID NO: 32735 - protein, 9 aa, Homo Sapiens
LYDIVFKHF

SEQ ID NO: 32736 - protein, 9 aa, Homo Sapiens
LYDPCTVMF

SEQ ID NO: 32737 - protein, 9 aa, Homo Sapiens
LYDPVISKL

SEQ ID NO: 32738 - protein, 9 aa, Homo Sapiens
LYELHVFTF

SEQ ID NO: 32739 - protein, 9 aa, Homo Sapiens
LYEPVWHVW

SEQ ID NO: 32740 - protein, 9 aa, Homo Sapiens
LYEQAFQLL

SEQ ID NO: 32741 - protein, 9 aa, Homo Sapiens
LYFHINQTL

SEQ ID NO: 32742 - protein, 9 aa, Homo Sapiens
LYFLKPSYW

SEQ ID NO: 32743 - protein, 9 aa, Homo Sapiens
LYGKIAEAF

SEQ ID NO: 32744 - protein, 9 aa, Homo Sapiens
LYGMQVLLF

SEQ ID NO: 32745 - protein, 9 aa, Homo Sapiens
LYGNIIDNL

SEQ ID NO: 32746 - protein, 9 aa, Homo Sapiens
LYGPKYTFF

SEQ ID NO: 32747 - protein, 9 aa, Homo Sapiens
LYGRHFNYL

SEQ ID NO: 32748 - protein, 9 aa, Homo Sapiens
LYGRLLVTF

SEQ ID NO: 32749 - protein, 9 aa, Homo Sapiens
LYGRNFNYL

SEQ ID NO: 32750 - protein, 9 aa, Homo Sapiens
LYGTIPQIF

SEQ ID NO: 32751 - protein, 9 aa, Homo Sapiens
LYHDIFSRL

SEQ ID NO: 32752 - protein, 9 aa, Homo Sapiens
LYIDFGGKF

SEQ ID NO: 32753 - protein, 9 aa, Homo Sapiens
LYIGHLTTL

SEQ ID NO: 32754 - protein, 9 aa, Homo Sapiens
LYIGSSKTF

SEQ ID NO: 32755 - protein, 9 aa, Homo Sapiens
LYIISVKGI

SEQ ID NO: 32756 - protein, 9 aa, Homo Sapiens
LYINKANIW

SEQ ID NO: 32757 - protein, 9 aa, Homo Sapiens
LYIPIFSTF

SEQ ID NO: 32758 - protein, 9 aa, Homo Sapiens
LYIPPTHTF

SEQ ID NO: 32759 - protein, 9 aa, Homo Sapiens
LYIPSVDLL

SEQ ID NO: 32760 - protein, 9 aa, Homo Sapiens
LYIQSHYQL

SEQ ID NO: 32761 - protein, 9 aa, Homo Sapiens
LYIVEPLKF

SEQ ID NO: 32762 - protein, 9 aa, Homo Sapiens
LYIVHPTMF

SEQ ID NO: 32763 - protein, 9 aa, Homo Sapiens
LYKDVRDLL

SEQ ID NO: 32764 - protein, 9 aa, Homo Sapiens
LYKELGEYF

SEQ ID NO: 32765 - protein, 9 aa, Homo Sapiens
LYKFSADEF

SEQ ID NO: 32766 - protein, 9 aa, Homo Sapiens
LYLECSAKF

SEQ ID NO: 32767 - protein, 9 aa, Homo Sapiens
LYLKLWNLI

SEQ ID NO: 32768 - protein, 9 aa, Homo Sapiens
LYLLNTTKL

SEQ ID NO: 32769 - protein, 9 aa, Homo Sapiens
LYLPSFFTY

SEQ ID NO: 32770 - protein, 9 aa, Homo Sapiens
LYLTIARQL

SEQ ID NO: 32771 - protein, 9 aa, Homo Sapiens
LYMDKFEEF

SEQ ID NO: 32772 - protein, 9 aa, Homo Sapiens
LYMKNGQGF

SEQ ID NO: 32773 - protein, 9 aa, Homo Sapiens
LYMNGMYAF

SEQ ID NO: 32774 - protein, 9 aa, Homo Sapiens
LYNDRMFRI

SEQ ID NO: 32775 - protein, 9 aa, Homo Sapiens
LYNKIREDF

SEQ ID NO: 32776 - protein, 9 aa, Homo Sapiens
LYNPENIYL

SEQ ID NO: 32777 - protein, 9 aa, Homo Sapiens
LYNPVSFAF

SEQ ID NO: 32778 - protein, 9 aa, Homo Sapiens
LYNRTMVQL

SEQ ID NO: 32779 - protein, 9 aa, Homo Sapiens
LYPAAIVTI

SEQ ID NO: 32780 - protein, 9 aa, Homo Sapiens
LYPCIDSHL

SEQ ID NO: 32781 - protein, 9 aa, Homo Sapiens
LYPDHFHLL

SEQ ID NO: 32782 - protein, 9 aa, Homo Sapiens
LYPEGLAQL

SEQ ID NO: 32783 - protein, 9 aa, Homo Sapiens
LYPEIFEKF

SEQ ID NO: 32784 - protein, 9 aa, Homo Sapiens
LYPEVFEKF

SEQ ID NO: 32785 - protein, 9 aa, Homo Sapiens
LYPFLGIRF

SEQ ID NO: 32786 - protein, 9 aa, Homo Sapiens
LYPGQLVQL

SEQ ID NO: 32787 - protein, 9 aa, Homo Sapiens
LYPGSVYLL

SEQ ID NO: 32788 - protein, 9 aa, Homo Sapiens
LYPHLSTYW

SEQ ID NO: 32789 - protein, 9 aa, Homo Sapiens
LYPLTNYTF

SEQ ID NO: 32790 - protein, 9 aa, Homo Sapiens
LYPPGIELI

SEQ ID NO: 32791 - protein, 9 aa, Homo Sapiens
LYPQFMFHL

SEQ ID NO: 32792 - protein, 9 aa, Homo Sapiens
LYPSKSIIL

SEQ ID NO: 32793 - protein, 9 aa, Homo Sapiens
LYQDGVFKF

SEQ ID NO: 32794 - protein, 9 aa, Homo Sapiens
LYQDHMQYI

SEQ ID NO: 32795 - protein, 9 aa, Homo Sapiens
LYQDKFPFF

SEQ ID NO: 32796 - protein, 9 aa, Homo Sapiens
LYQEHMAYI

SEQ ID NO: 32797 - protein, 9 aa, Homo Sapiens
LYQEILAQL

SEQ ID NO: 32798 - protein, 9 aa, Homo Sapiens
LYQEVFGRL

SEQ ID NO: 32799 - protein, 9 aa, Homo Sapiens
LYQFNPAFF

SEQ ID NO: 32800 - protein, 9 aa, Homo Sapiens
LYQHAVEYF

SEQ ID NO: 32801 - protein, 9 aa, Homo Sapiens
LYQHEINLF

SEQ ID NO: 32802 - protein, 9 aa, Homo Sapiens
LYQLQVNTL

SEQ ID NO: 32803 - protein, 9 aa, Homo Sapiens
LYQRAFQHL

SEQ ID NO: 32804 - protein, 9 aa, Homo Sapiens
LYQVVSQRF

SEQ ID NO: 32805 - protein, 9 aa, Homo Sapiens
LYRQYFEEI

SEQ ID NO: 32806 - protein, 9 aa, Homo Sapiens
LYSAVKTLL

SEQ ID NO: 32807 - protein, 9 aa, Homo Sapiens
LYSEVSHLL

SEQ ID NO: 32808 - protein, 9 aa, Homo Sapiens
LYSGVFVAF

SEQ ID NO: 32809 - protein, 9 aa, Homo Sapiens
LYSHINQTL

SEQ ID NO: 32810 - protein, 9 aa, Homo Sapiens
LYSLKQYFL

SEQ ID NO: 32811 - protein, 9 aa, Homo Sapiens
LYSSKLYRF

SEQ ID NO: 32812 - protein, 9 aa, Homo Sapiens
LYSTIRPYL

SEQ ID NO: 32813 - protein, 9 aa, Homo Sapiens
LYTEAIKFF

SEQ ID NO: 32814 - protein, 9 aa, Homo Sapiens
LYTEKFEEF

SEQ ID NO: 32815 - protein, 9 aa, Homo Sapiens
LYTELFTGF

SEQ ID NO: 32816 - protein, 9 aa, Homo Sapiens
LYTPEHHLI

SEQ ID NO: 32817 - protein, 9 aa, Homo Sapiens
LYTPHSWLL

SEQ ID NO: 32818 - protein, 9 aa, Homo Sapiens
LYTPKPQVI

SEQ ID NO: 32819 - protein, 9 aa, Homo Sapiens
LYTPVLIRF

SEQ ID NO: 32820 - protein, 9 aa, Homo Sapiens
LYTVVVYDF

SEQ ID NO: 32821 - protein, 9 aa, Homo Sapiens
LYVDFPQHL

SEQ ID NO: 32822 - protein, 9 aa, Homo Sapiens
LYVGKIPGF

SEQ ID NO: 32823 - protein, 9 aa, Homo Sapiens
LYVIGGNHF

SEQ ID NO: 32824 - protein, 9 aa, Homo Sapiens
LYVLQVLTF

SEQ ID NO: 32825 - protein, 9 aa, Homo Sapiens
LYVMVNAKF

SEQ ID NO: 32826 - protein, 9 aa, Homo Sapiens
LYVPVMITW

SEQ ID NO: 32827 - protein, 9 aa, Homo Sapiens
LYVVDLKKF

SEQ ID NO: 32828 - protein, 9 aa, Homo Sapiens
LYWSHPRKF

SEQ ID NO: 32829 - protein, 9 aa, Homo Sapiens
MWLPWALLL

SEQ ID NO: 32830 - protein, 9 aa, Homo Sapiens
MYGFVNHAL

SEQ ID NO: 32831 - protein, 9 aa, Homo Sapiens
MYIARQLSF

SEQ ID NO: 32832 - protein, 9 aa, Homo Sapiens
MYIIPVVLF

SEQ ID NO: 32833 - protein, 9 aa, Homo Sapiens
MYLGITPSI

SEQ ID NO: 32834 - protein, 9 aa, Homo Sapiens
MYLGWTPYM

SEQ ID NO: 32835 - protein, 9 aa, Homo Sapiens
MYLKQILYL

SEQ ID NO: 32836 - protein, 9 aa, Homo Sapiens
MYLLDQPVL

SEQ ID NO: 32837 - protein, 9 aa, Homo Sapiens
MYNLFWRHF

SEQ ID NO: 32838 - protein, 9 aa, Homo Sapiens
MYPCNFVSF

SEQ ID NO: 32839 - protein, 9 aa, Homo Sapiens
MYPFQIHSI

SEQ ID NO: 32840 - protein, 9 aa, Homo Sapiens
MYPYIFHVL

SEQ ID NO: 32841 - protein, 9 aa, Homo Sapiens
MYQEHINEI

SEQ ID NO: 32842 - protein, 9 aa, Homo Sapiens
MYSDVWKQL

SEQ ID NO: 32843 - protein, 9 aa, Homo Sapiens
MYTLGITNF

SEQ ID NO: 32844 - protein, 9 aa, Homo Sapiens
MYTPKAEVW

SEQ ID NO: 32845 - protein, 9 aa, Homo Sapiens
MYTVFEHTF

SEQ ID NO: 32846 - protein, 9 aa, Homo Sapiens
NFLSRSFYW

SEQ ID NO: 32847 - protein, 9 aa, Homo Sapiens
NFQIEHHLF

SEQ ID NO: 32848 - protein, 9 aa, Homo Sapiens
NFTNVAATF

SEQ ID NO: 32849 - protein, 9 aa, Homo Sapiens
NMTSVTNHF

SEQ ID NO: 32850 - protein, 9 aa, Homo Sapiens
NYAAALETF

SEQ ID NO: 32851 - protein, 9 aa, Homo Sapiens
NYAENILTL

SEQ ID NO: 32852 - protein, 9 aa, Homo Sapiens
NYALKMFLY

SEQ ID NO: 32853 - protein, 9 aa, Homo Sapiens
NYAPAFTML

SEQ ID NO: 32854 - protein, 9 aa, Homo Sapiens
NYASTFTWW

SEQ ID NO: 32855 - protein, 9 aa, Homo Sapiens
NYATRIVTL

SEQ ID NO: 32856 - protein, 9 aa, Homo Sapiens
NYAWVYYHL

SEQ ID NO: 32857 - protein, 9 aa, Homo Sapiens
NYDKVEKLF

SEQ ID NO: 32858 - protein, 9 aa, Homo Sapiens
NYFAYVQMF

SEQ ID NO: 32859 - protein, 9 aa, Homo Sapiens
NYFIPSHYF

SEQ ID NO: 32860 - protein, 9 aa, Homo Sapiens
NYFLWTEKF

SEQ ID NO: 32861 - protein, 9 aa, Homo Sapiens
NYGQYFTLW

SEQ ID NO: 32862 - protein, 9 aa, Homo Sapiens
NYGRVFSEW

SEQ ID NO: 32863 - protein, 9 aa, Homo Sapiens
NYGTIKWFF

SEQ ID NO: 32864 - protein, 9 aa, Homo Sapiens
NYGVLHVTF

SEQ ID NO: 32865 - protein, 9 aa, Homo Sapiens
NYIDKVRFL

SEQ ID NO: 32866 - protein, 9 aa, Homo Sapiens
NYIEFTRIL

SEQ ID NO: 32867 - protein, 9 aa, Homo Sapiens
NYIEKVVAI

SEQ ID NO: 32868 - protein, 9 aa, Homo Sapiens
NYIFRLSQF

SEQ ID NO: 32869 - protein, 9 aa, Homo Sapiens
NYIHVGAQL

SEQ ID NO: 32870 - protein, 9 aa, Homo Sapiens
NYIHWVEDL

SEQ ID NO: 32871 - protein, 9 aa, Homo Sapiens
NYIKDLNIL

SEQ ID NO: 32872 - protein, 9 aa, Homo Sapiens
NYIKSLSSF

SEQ ID NO: 32873 - protein, 9 aa, Homo Sapiens
NYIMKIHNF

SEQ ID NO: 32874 - protein, 9 aa, Homo Sapiens
NYIMQSHSL

SEQ ID NO: 32875 - protein, 9 aa, Homo Sapiens
NYIPRFWTF

SEQ ID NO: 32876 - protein, 9 aa, Homo Sapiens
NYIPYLTKL

SEQ ID NO: 32877 - protein, 9 aa, Homo Sapiens
NYISFYDHL

SEQ ID NO: 32878 - protein, 9 aa, Homo Sapiens
NYISGIQTI

SEQ ID NO: 32879 - protein, 9 aa, Homo Sapiens
NYITAALKL

SEQ ID NO: 32880 - protein, 9 aa, Homo Sapiens
NYITIKDFL

SEQ ID NO: 32881 - protein, 9 aa, Homo Sapiens
NYKKFYEQF

SEQ ID NO: 32882 - protein, 9 aa, Homo Sapiens
NYKLTSITF

SEQ ID NO: 32883 - protein, 9 aa, Homo Sapiens
NYLDVATFL

SEQ ID NO: 32884 - protein, 9 aa, Homo Sapiens
NYLDWLTSI

SEQ ID NO: 32885 - protein, 9 aa, Homo Sapiens
NYLGAIESW

SEQ ID NO: 32886 - protein, 9 aa, Homo Sapiens
NYLGLTNEL

SEQ ID NO: 32887 - protein, 9 aa, Homo Sapiens
NYLHLDYNF

SEQ ID NO: 32888 - protein, 9 aa, Homo Sapiens
NYLLDMPLW

SEQ ID NO: 32889 - protein, 9 aa, Homo Sapiens
NYLPFIMEL

SEQ ID NO: 32890 - protein, 9 aa, Homo Sapiens
NYLPQISHL

SEQ ID NO: 32891 - protein, 9 aa, Homo Sapiens
NYLSHHLTI

SEQ ID NO: 32892 - protein, 9 aa, Homo Sapiens
NYLSIFRKF

SEQ ID NO: 32893 - protein, 9 aa, Homo Sapiens
NYLVRINEI

SEQ ID NO: 32894 - protein, 9 aa, Homo Sapiens
NYMPGQLTI

SEQ ID NO: 32895 - protein, 9 aa, Homo Sapiens
NYNDRYDEI

SEQ ID NO: 32896 - protein, 9 aa, Homo Sapiens
NYNEKIYEL

SEQ ID NO: 32897 - protein, 9 aa, Homo Sapiens
NYNFDFRSW

SEQ ID NO: 32898 - protein, 9 aa, Homo Sapiens
NYNPAQQAF

SEQ ID NO: 32899 - protein, 9 aa, Homo Sapiens
NYPDEFTKL

SEQ ID NO: 32900 - protein, 9 aa, Homo Sapiens
NYPLLLLTL

SEQ ID NO: 32901 - protein, 9 aa, Homo Sapiens
NYPSAFHSV

SEQ ID NO: 32902 - protein, 9 aa, Homo Sapiens
NYPTKFQYL

SEQ ID NO: 32903 - protein, 9 aa, Homo Sapiens
NYPVWDTQF

SEQ ID NO: 32904 - protein, 9 aa, Homo Sapiens
NYQKRFQNL

SEQ ID NO: 32905 - protein, 9 aa, Homo Sapiens
NYQRLFDFF

SEQ ID NO: 32906 - protein, 9 aa, Homo Sapiens
NYSNIRFQF

SEQ ID NO: 32907 - protein, 9 aa, Homo Sapiens
NYSPYVNYF

SEQ ID NO: 32908 - protein, 9 aa, Homo Sapiens
NYTARFSRF

SEQ ID NO: 32909 - protein, 9 aa, Homo Sapiens
NYTDQWERW

SEQ ID NO: 32910 - protein, 9 aa, Homo Sapiens
NYTDRIQVL

SEQ ID NO: 32911 - protein, 9 aa, Homo Sapiens
NYTEWLQDL

SEQ ID NO: 32912 - protein, 9 aa, Homo Sapiens
NYTKAMRLF

SEQ ID NO: 32913 - protein, 9 aa, Homo Sapiens
NYTLVSHLI

SEQ ID NO: 32914 - protein, 9 aa, Homo Sapiens
NYVDLVSSL

SEQ ID NO: 32915 - protein, 9 aa, Homo Sapiens
NYVEVTRKW

SEQ ID NO: 32916 - protein, 9 aa, Homo Sapiens
NYVKKFQSF

SEQ ID NO: 32917 - protein, 9 aa, Homo Sapiens
NYVQAVEEF

SEQ ID NO: 32918 - protein, 9 aa, Homo Sapiens
NYYAFFKLL

SEQ ID NO: 32919 - protein, 9 aa, Homo Sapiens
PFAKPLPTF

SEQ ID NO: 32920 - protein, 9 aa, Homo Sapiens
PFAPAIQTF

SEQ ID NO: 32921 - protein, 9 aa, Homo Sapiens
PFIDSQHVI

SEQ ID NO: 32922 - protein, 9 aa, Homo Sapiens
PIRLLAAAA

SEQ ID NO: 32923 - protein, 9 aa, Homo Sapiens
PIRVHTIVI

SEQ ID NO: 32924 - protein, 9 aa, Homo Sapiens
PLPESVPVF

SEQ ID NO: 32925 - protein, 9 aa, Homo Sapiens
PQPDVFPLF

SEQ ID NO: 32926 - protein, 9 aa, Homo Sapiens
PTLFNPFLL

SEQ ID NO: 32927 - protein, 9 aa, Homo Sapiens
PVTVRSIIS

SEQ ID NO: 32928 - protein, 9 aa, Homo Sapiens
PWGIKQAGF

SEQ ID NO: 32929 - protein, 9 aa, Homo Sapiens
PWLFDAPKF

SEQ ID NO: 32930 - protein, 9 aa, Homo Sapiens
PYAVLLEAL

SEQ ID NO: 32931 - protein, 9 aa, Homo Sapiens
PYFLPEHIF

SEQ ID NO: 32932 - protein, 9 aa, Homo Sapiens
PYFNAPVYL

SEQ ID NO: 32933 - protein, 9 aa, Homo Sapiens
PYGPPLPSL

SEQ ID NO: 32934 - protein, 9 aa, Homo Sapiens
PYISNIYLI

SEQ ID NO: 32935 - protein, 9 aa, Homo Sapiens
PYKADILYF

SEQ ID NO: 32936 - protein, 9 aa, Homo Sapiens
PYKVTQDEL

SEQ ID NO: 32937 - protein, 9 aa, Homo Sapiens
PYLDNLPNF

SEQ ID NO: 32938 - protein, 9 aa, Homo Sapiens
PYLFHVVTF

SEQ ID NO: 32939 - protein, 9 aa, Homo Sapiens
PYLGQAPFL

SEQ ID NO: 32940 - protein, 9 aa, Homo Sapiens
PYLISGSKF

SEQ ID NO: 32941 - protein, 9 aa, Homo Sapiens
PYLLYSVHM

SEQ ID NO: 32942 - protein, 9 aa, Homo Sapiens
PYLWWKKYI

SEQ ID NO: 32943 - protein, 9 aa, Homo Sapiens
PYMDAVVSL

SEQ ID NO: 32944 - protein, 9 aa, Homo Sapiens
PYNAPTVKF

SEQ ID NO: 32945 - protein, 9 aa, Homo Sapiens
PYNDYFEYF

SEQ ID NO: 32946 - protein, 9 aa, Homo Sapiens
PYQSQIAVF

SEQ ID NO: 32947 - protein, 9 aa, Homo Sapiens
PYSEYFEYF

SEQ ID NO: 32948 - protein, 9 aa, Homo Sapiens
PYSSIDQLL

SEQ ID NO: 32949 - protein, 9 aa, Homo Sapiens
PYSVYLFSF

SEQ ID NO: 32950 - protein, 9 aa, Homo Sapiens
PYTGPFNLL

SEQ ID NO: 32951 - protein, 9 aa, Homo Sapiens
PYVDNSYKW

SEQ ID NO: 32952 - protein, 9 aa, Homo Sapiens
PYVGGLEEF

SEQ ID NO: 32953 - protein, 9 aa, Homo Sapiens
PYVNNVPHL

SEQ ID NO: 32954 - protein, 9 aa, Homo Sapiens
PYYQPPYTL

SEQ ID NO: 32955 - protein, 9 aa, Homo Sapiens
PYYSKFILI

SEQ ID NO: 32956 - protein, 9 aa, Homo Sapiens
QFIDKPVCF

SEQ ID NO: 32957 - protein, 9 aa, Homo Sapiens
QFVPKSHLF

SEQ ID NO: 32958 - protein, 9 aa, Homo Sapiens
QLPELFHKI

SEQ ID NO: 32959 - protein, 9 aa, Homo Sapiens
QLPVVVFTF

SEQ ID NO: 32960 - protein, 9 aa, Homo Sapiens
QWPELLLRF

SEQ ID NO: 32961 - protein, 9 aa, Homo Sapiens
QYASAFHFL

SEQ ID NO: 32962 - protein, 9 aa, Homo Sapiens
QYAVLLNRF

SEQ ID NO: 32963 - protein, 9 aa, Homo Sapiens
QYDGIFYEF

SEQ ID NO: 32964 - protein, 9 aa, Homo Sapiens
QYEPLFHML

SEQ ID NO: 32965 - protein, 9 aa, Homo Sapiens
QYEQVKQLF

SEQ ID NO: 32966 - protein, 9 aa, Homo Sapiens
QYFPKAPEF

SEQ ID NO: 32967 - protein, 9 aa, Homo Sapiens
QYGTFCEKF

SEQ ID NO: 32968 - protein, 9 aa, Homo Sapiens
QYIDKLNEL

SEQ ID NO: 32969 - protein, 9 aa, Homo Sapiens
QYILFPLRF

SEQ ID NO: 32970 - protein, 9 aa, Homo Sapiens
QYLEEAPKF

SEQ ID NO: 32971 - protein, 9 aa, Homo Sapiens
QYLEQSSKL

SEQ ID NO: 32972 - protein, 9 aa, Homo Sapiens
QYLGQIQHI

SEQ ID NO: 32973 - protein, 9 aa, Homo Sapiens
QYLMDNPTF

SEQ ID NO: 32974 - protein, 9 aa, Homo Sapiens
QYLQDAYSF

SEQ ID NO: 32975 - protein, 9 aa, Homo Sapiens
QYMERLQLL

SEQ ID NO: 32976 - protein, 9 aa, Homo Sapiens
QYNPKFQTL

SEQ ID NO: 32977 - protein, 9 aa, Homo Sapiens
QYNTYPIKL

SEQ ID NO: 32978 - protein, 9 aa, Homo Sapiens
QYPFPLPVF

SEQ ID NO: 32979 - protein, 9 aa, Homo Sapiens
QYPGRSLVF

SEQ ID NO: 32980 - protein, 9 aa, Homo Sapiens
QYPNPLPVL

SEQ ID NO: 32981 - protein, 9 aa, Homo Sapiens
QYPVIIHLI

SEQ ID NO: 32982 - protein, 9 aa, Homo Sapiens
QYQFLHHTL

SEQ ID NO: 32983 - protein, 9 aa, Homo Sapiens
QYQIIMTMI

SEQ ID NO: 32984 - protein, 9 aa, Homo Sapiens
QYQNVLTLW

SEQ ID NO: 32985 - protein, 9 aa, Homo Sapiens
QYQPPAPAL

SEQ ID NO: 32986 - protein, 9 aa, Homo Sapiens
QYQVQFWKM

SEQ ID NO: 32987 - protein, 9 aa, Homo Sapiens
QYSNAFDVF

SEQ ID NO: 32988 - protein, 9 aa, Homo Sapiens
QYSPLLAAF

SEQ ID NO: 32989 - protein, 9 aa, Homo Sapiens
QYSYIDFKF

SEQ ID NO: 32990 - protein, 9 aa, Homo Sapiens
QYTDLLRLF

SEQ ID NO: 32991 - protein, 9 aa, Homo Sapiens
QYVDFHNQL

SEQ ID NO: 32992 - protein, 9 aa, Homo Sapiens
QYVHCLFLW

SEQ ID NO: 32993 - protein, 9 aa, Homo Sapiens
QYVSAFSKL

SEQ ID NO: 32994 - protein, 9 aa, Homo Sapiens
QYVTQINRL

SEQ ID NO: 32995 - protein, 9 aa, Homo Sapiens
RFEEAHFTF

SEQ ID NO: 32996 - protein, 9 aa, Homo Sapiens
RFEEKHAYF

SEQ ID NO: 32997 - protein, 9 aa, Homo Sapiens
RFHPTPLLL

SEQ ID NO: 32998 - protein, 9 aa, Homo Sapiens
RFIDAVYKL

SEQ ID NO: 32999 - protein, 9 aa, Homo Sapiens
RFIGATANF

SEQ ID NO: 33000 - protein, 9 aa, Homo Sapiens
RFILNLPTF

SEQ ID NO: 33001 - protein, 9 aa, Homo Sapiens
RFIPYTEEF

SEQ ID NO: 33002 - protein, 9 aa, Homo Sapiens
RFLAATFLL

SEQ ID NO: 33003 - protein, 9 aa, Homo Sapiens
RFLDKALEL

SEQ ID NO: 33004 - protein, 9 aa, Homo Sapiens
RFLPSPVVI

SEQ ID NO: 33005 - protein, 9 aa, Homo Sapiens
RFMDGHITF

SEQ ID NO: 33006 - protein, 9 aa, Homo Sapiens
RFQEKFFIF

SEQ ID NO: 33007 - protein, 9 aa, Homo Sapiens
RFSLNTVEL

SEQ ID NO: 33008 - protein, 9 aa, Homo Sapiens
RISLPLPNF

SEQ ID NO: 33009 - protein, 9 aa, Homo Sapiens
RLPAWQPIL

SEQ ID NO: 33010 - protein, 9 aa, Homo Sapiens
RLPEEWSQW

SEQ ID NO: 33011 - protein, 9 aa, Homo Sapiens
RLPLRLFLI

SEQ ID NO: 33012 - protein, 9 aa, Homo Sapiens
RLPPTPLLL

SEQ ID NO: 33013 - protein, 9 aa, Homo Sapiens
RLPVSIPLF

SEQ ID NO: 33014 - protein, 9 aa, Homo Sapiens
RMPRWYFLL

SEQ ID NO: 33015 - protein, 9 aa, Homo Sapiens
RQPSLFYHL

SEQ ID NO: 33016 - protein, 9 aa, Homo Sapiens
RWLAQPYYL

SEQ ID NO: 33017 - protein, 9 aa, Homo Sapiens
RWPKKSAEF

SEQ ID NO: 33018 - protein, 9 aa, Homo Sapiens
RYAALRELI

SEQ ID NO: 33019 - protein, 9 aa, Homo Sapiens
RYAAQLPAL

SEQ ID NO: 33020 - protein, 9 aa, Homo Sapiens
RYAEAVQLL

SEQ ID NO: 33021 - protein, 9 aa, Homo Sapiens
RYALIMHKL

SEQ ID NO: 33022 - protein, 9 aa, Homo Sapiens
RYASINAHL

SEQ ID NO: 33023 - protein, 9 aa, Homo Sapiens
RYASINTHL

SEQ ID NO: 33024 - protein, 9 aa, Homo Sapiens
RYAVEILTW

SEQ ID NO: 33025 - protein, 9 aa, Homo Sapiens
RYDGQVAVF

SEQ ID NO: 33026 - protein, 9 aa, Homo Sapiens
RYDNVTILF

SEQ ID NO: 33027 - protein, 9 aa, Homo Sapiens
RYEGFFSLW

SEQ ID NO: 33028 - protein, 9 aa, Homo Sapiens
RYEGILYTI

SEQ ID NO: 33029 - protein, 9 aa, Homo Sapiens
RYFENPQVI

SEQ ID NO: 33030 - protein, 9 aa, Homo Sapiens
RYFIDSTNL

SEQ ID NO: 33031 - protein, 9 aa, Homo Sapiens
RYFILPYVI

SEQ ID NO: 33032 - protein, 9 aa, Homo Sapiens
RYFIPVSCF

SEQ ID NO: 33033 - protein, 9 aa, Homo Sapiens
RYFKGPELL

SEQ ID NO: 33034 - protein, 9 aa, Homo Sapiens
RYFKTPRKF

SEQ ID NO: 33035 - protein, 9 aa, Homo Sapiens
RYFLPPYTF

SEQ ID NO: 33036 - protein, 9 aa, Homo Sapiens
RYFQPPGTW

SEQ ID NO: 33037 - protein, 9 aa, Homo Sapiens
RYGLITSLL

SEQ ID NO: 33038 - protein, 9 aa, Homo Sapiens
RYGLVTNEI

SEQ ID NO: 33039 - protein, 9 aa, Homo Sapiens
RYIANTVEL

SEQ ID NO: 33040 - protein, 9 aa, Homo Sapiens
RYIDRIHIF

SEQ ID NO: 33041 - protein, 9 aa, Homo Sapiens
RYIFAKNLF

SEQ ID NO: 33042 - protein, 9 aa, Homo Sapiens
RYIIKKDFF

SEQ ID NO: 33043 - protein, 9 aa, Homo Sapiens
RYILEPFFI

SEQ ID NO: 33044 - protein, 9 aa, Homo Sapiens
RYINNPLLI

SEQ ID NO: 33045 - protein, 9 aa, Homo Sapiens
RYIPDAMNL

SEQ ID NO: 33046 - protein, 9 aa, Homo Sapiens
RYIPHPFLV

SEQ ID NO: 33047 - protein, 9 aa, Homo Sapiens
RYIPTAAAF

SEQ ID NO: 33048 - protein, 9 aa, Homo Sapiens
RYIYNREEF

SEQ ID NO: 33049 - protein, 9 aa, Homo Sapiens
RYKLYQEMF

SEQ ID NO: 33050 - protein, 9 aa, Homo Sapiens
RYKQDVERF

SEQ ID NO: 33051 - protein, 9 aa, Homo Sapiens
RYLDEINLL

SEQ ID NO: 33052 - protein, 9 aa, Homo Sapiens
RYLDELMKL

SEQ ID NO: 33053 - protein, 9 aa, Homo Sapiens
RYLDLFTNY

SEQ ID NO: 33054 - protein, 9 aa, Homo Sapiens
RYLDLFTSF

SEQ ID NO: 33055 - protein, 9 aa, Homo Sapiens
RYLDLLTTW

SEQ ID NO: 33056 - protein, 9 aa, Homo Sapiens
RYLDWRALM

SEQ ID NO: 33057 - protein, 9 aa, Homo Sapiens
RYLEKNVKL

SEQ ID NO: 33058 - protein, 9 aa, Homo Sapiens
RYLEKPMEI

SEQ ID NO: 33059 - protein, 9 aa, Homo Sapiens
RYLELISSI

SEQ ID NO: 33060 - protein, 9 aa, Homo Sapiens
RYLEQLHQL

SEQ ID NO: 33061 - protein, 9 aa, Homo Sapiens
RYLERLIKL

SEQ ID NO: 33062 - protein, 9 aa, Homo Sapiens
RYLEVMRKL

SEQ ID NO: 33063 - protein, 9 aa, Homo Sapiens
RYLEYFEKI

SEQ ID NO: 33064 - protein, 9 aa, Homo Sapiens
RYLGKVLEL

SEQ ID NO: 33065 - protein, 9 aa, Homo Sapiens
RYLIKLLLL

SEQ ID NO: 33066 - protein, 9 aa, Homo Sapiens
RYLLKFEQI

SEQ ID NO: 33067 - protein, 9 aa, Homo Sapiens
RYLLTQELL

SEQ ID NO: 33068 - protein, 9 aa, Homo Sapiens
RYLMENTFF

SEQ ID NO: 33069 - protein, 9 aa, Homo Sapiens
RYLNEFEEL

SEQ ID NO: 33070 - protein, 9 aa, Homo Sapiens
RYLPDTLLL

SEQ ID NO: 33071 - protein, 9 aa, Homo Sapiens
RYLPQCSYF

SEQ ID NO: 33072 - protein, 9 aa, Homo Sapiens
RYLPQTYVV

SEQ ID NO: 33073 - protein, 9 aa, Homo Sapiens
RYLSKVLEL

SEQ ID NO: 33074 - protein, 9 aa, Homo Sapiens
RYLTGAWRL

SEQ ID NO: 33075 - protein, 9 aa, Homo Sapiens
RYLTVAAVF

SEQ ID NO: 33076 - protein, 9 aa, Homo Sapiens
RYLVEVEEL

SEQ ID NO: 33077 - protein, 9 aa, Homo Sapiens
RYLVISEKL

SEQ ID NO: 33078 - protein, 9 aa, Homo Sapiens
RYLWATVTI

SEQ ID NO: 33079 - protein, 9 aa, Homo Sapiens
RYMDAWNTV

SEQ ID NO: 33080 - protein, 9 aa, Homo Sapiens
RYMEVSGNL

SEQ ID NO: 33081 - protein, 9 aa, Homo Sapiens
RYMNHMQSL

SEQ ID NO: 33082 - protein, 9 aa, Homo Sapiens
RYMPQNPCI

SEQ ID NO: 33083 - protein, 9 aa, Homo Sapiens
RYMSINTHL

SEQ ID NO: 33084 - protein, 9 aa, Homo Sapiens
RYMVHLLEL

SEQ ID NO: 33085 - protein, 9 aa, Homo Sapiens
RYNPNLNTW

SEQ ID NO: 33086 - protein, 9 aa, Homo Sapiens
RYNSQLLSF

SEQ ID NO: 33087 - protein, 9 aa, Homo Sapiens
RYPAIIYNI

SEQ ID NO: 33088 - protein, 9 aa, Homo Sapiens
RYPCFFNTL

SEQ ID NO: 33089 - protein, 9 aa, Homo Sapiens
RYPDNLKHL

SEQ ID NO: 33090 - protein, 9 aa, Homo Sapiens
RYPDRITLI

SEQ ID NO: 33091 - protein, 9 aa, Homo Sapiens
RYPDSHQLF

SEQ ID NO: 33092 - protein, 9 aa, Homo Sapiens
RYPNKLDTI

SEQ ID NO: 33093 - protein, 9 aa, Homo Sapiens
RYPNSLPAL

SEQ ID NO: 33094 - protein, 9 aa, Homo Sapiens
RYPSLWRRL

SEQ ID NO: 33095 - protein, 9 aa, Homo Sapiens
RYPSNLQLF

SEQ ID NO: 33096 - protein, 9 aa, Homo Sapiens
RYPTSIASL

SEQ ID NO: 33097 - protein, 9 aa, Homo Sapiens
RYQDAIRVF

SEQ ID NO: 33098 - protein, 9 aa, Homo Sapiens
RYQDIIHSI

SEQ ID NO: 33099 - protein, 9 aa, Homo Sapiens
RYQEMIQKL

SEQ ID NO: 33100 - protein, 9 aa, Homo Sapiens
RYQEVIQEL

SEQ ID NO: 33101 - protein, 9 aa, Homo Sapiens
RYQFIEEAF

SEQ ID NO: 33102 - protein, 9 aa, Homo Sapiens
RYQGVNLYI

SEQ ID NO: 33103 - protein, 9 aa, Homo Sapiens
RYQKSTELL

SEQ ID NO: 33104 - protein, 9 aa, Homo Sapiens
RYQQWMERF

SEQ ID NO: 33105 - protein, 9 aa, Homo Sapiens
RYQTFLQLL

SEQ ID NO: 33106 - protein, 9 aa, Homo Sapiens
RYQTLYARF

SEQ ID NO: 33107 - protein, 9 aa, Homo Sapiens
RYRPDMPCF

SEQ ID NO: 33108 - protein, 9 aa, Homo Sapiens
RYSDSTFTF

SEQ ID NO: 33109 - protein, 9 aa, Homo Sapiens
RYSGNQVLF

SEQ ID NO: 33110 - protein, 9 aa, Homo Sapiens
RYSPVLSRF

SEQ ID NO: 33111 - protein, 9 aa, Homo Sapiens
RYSVFFQSL

SEQ ID NO: 33112 - protein, 9 aa, Homo Sapiens
RYSVFVNEL

SEQ ID NO: 33113 - protein, 9 aa, Homo Sapiens
RYTERVDYL

SEQ ID NO: 33114 - protein, 9 aa, Homo Sapiens
RYTFYVLEF

SEQ ID NO: 33115 - protein, 9 aa, Homo Sapiens
RYTIVQQQI

SEQ ID NO: 33116 - protein, 9 aa, Homo Sapiens
RYTLQASTF

SEQ ID NO: 33117 - protein, 9 aa, Homo Sapiens
RYTPAIDVW

SEQ ID NO: 33118 - protein, 9 aa, Homo Sapiens
RYTQTVDIW

SEQ ID NO: 33119 - protein, 9 aa, Homo Sapiens
RYTRWINQL

SEQ ID NO: 33120 - protein, 9 aa, Homo Sapiens
RYTTEFHEL

SEQ ID NO: 33121 - protein, 9 aa, Homo Sapiens
RYVDQVLQL

SEQ ID NO: 33122 - protein, 9 aa, Homo Sapiens
RYVEIVSQF

SEQ ID NO: 33123 - protein, 9 aa, Homo Sapiens
RYVKKLGDF

SEQ ID NO: 33124 - protein, 9 aa, Homo Sapiens
RYVLYPNNF

SEQ ID NO: 33125 - protein, 9 aa, Homo Sapiens
RYVMTTTTL

SEQ ID NO: 33126 - protein, 9 aa, Homo Sapiens
RYVPRASYF

SEQ ID NO: 33127 - protein, 9 aa, Homo Sapiens
RYVQQLQRL

SEQ ID NO: 33128 - protein, 9 aa, Homo Sapiens
RYVRKFVLM

SEQ ID NO: 33129 - protein, 9 aa, Homo Sapiens
RYVWWKKSL

SEQ ID NO: 33130 - protein, 9 aa, Homo Sapiens
RYYGNISRF

SEQ ID NO: 33131 - protein, 9 aa, Homo Sapiens
SFHNIHNTF

SEQ ID NO: 33132 - protein, 9 aa, Homo Sapiens
SFISGLFNF

SEQ ID NO: 33133 - protein, 9 aa, Homo Sapiens
SFLFVHPEW

SEQ ID NO: 33134 - protein, 9 aa, Homo Sapiens
SFMPNSPRF

SEQ ID NO: 33135 - protein, 9 aa, Homo Sapiens
SFPHPLPSL

SEQ ID NO: 33136 - protein, 9 aa, Homo Sapiens
SFSTVTNTF

SEQ ID NO: 33137 - protein, 9 aa, Homo Sapiens
SFYFFFSSF

SEQ ID NO: 33138 - protein, 9 aa, Homo Sapiens
SIPAFLSSL

SEQ ID NO: 33139 - protein, 9 aa, Homo Sapiens
SLPEDIPVF

SEQ ID NO: 33140 - protein, 9 aa, Homo Sapiens
SLPESVPLF

SEQ ID NO: 33141 - protein, 9 aa, Homo Sapiens
SLPGNFFYL

SEQ ID NO: 33142 - protein, 9 aa, Homo Sapiens
SLPKFYLLF

SEQ ID NO: 33143 - protein, 9 aa, Homo Sapiens
SLTYTLVII

SEQ ID NO: 33144 - protein, 9 aa, Homo Sapiens
SMTRYFYLF

SEQ ID NO: 33145 - protein, 9 aa, Homo Sapiens
SVPVSLQTL

SEQ ID NO: 33146 - protein, 9 aa, Homo Sapiens
SYADNILSF

SEQ ID NO: 33147 - protein, 9 aa, Homo Sapiens
SYADQMFLL

SEQ ID NO: 33148 - protein, 9 aa, Homo Sapiens
SYALLTYMI

SEQ ID NO: 33149 - protein, 9 aa, Homo Sapiens
SYANYFIRL

SEQ ID NO: 33150 - protein, 9 aa, Homo Sapiens
SYAQGFMLL

SEQ ID NO: 33151 - protein, 9 aa, Homo Sapiens
SYAQYVHNL

SEQ ID NO: 33152 - protein, 9 aa, Homo Sapiens
SYELRYFQI

SEQ ID NO: 33153 - protein, 9 aa, Homo Sapiens
SYEYRFLEF

SEQ ID NO: 33154 - protein, 9 aa, Homo Sapiens
SYFGSFSSL

SEQ ID NO: 33155 - protein, 9 aa, Homo Sapiens
SYFIEPVQW

SEQ ID NO: 33156 - protein, 9 aa, Homo Sapiens
SYFPKILTF

SEQ ID NO: 33157 - protein, 9 aa, Homo Sapiens
SYGDILHVI

SEQ ID NO: 33158 - protein, 9 aa, Homo Sapiens
SYGIVLYEL

SEQ ID NO: 33159 - protein, 9 aa, Homo Sapiens
SYGKINILL

SEQ ID NO: 33160 - protein, 9 aa, Homo Sapiens
SYGSVFKAI

SEQ ID NO: 33161 - protein, 9 aa, Homo Sapiens
SYHSEWNLF

SEQ ID NO: 33162 - protein, 9 aa, Homo Sapiens
SYIAHLRQI

SEQ ID NO: 33163 - protein, 9 aa, Homo Sapiens
SYIALPLTL

SEQ ID NO: 33164 - protein, 9 aa, Homo Sapiens
SYIDVAVKL

SEQ ID NO: 33165 - protein, 9 aa, Homo Sapiens
SYIEHIFEI

SEQ ID NO: 33166 - protein, 9 aa, Homo Sapiens
SYIELPAYL

SEQ ID NO: 33167 - protein, 9 aa, Homo Sapiens
SYIGFPVEL

SEQ ID NO: 33168 - protein, 9 aa, Homo Sapiens
SYIHYFHCL

SEQ ID NO: 33169 - protein, 9 aa, Homo Sapiens
SYIHYVFRL

SEQ ID NO: 33170 - protein, 9 aa, Homo Sapiens
SYIISGCLF

SEQ ID NO: 33171 - protein, 9 aa, Homo Sapiens
SYILRLEEI

SEQ ID NO: 33172 - protein, 9 aa, Homo Sapiens
SYIPSTVFF

SEQ ID NO: 33173 - protein, 9 aa, Homo Sapiens
SYIQQINNL

SEQ ID NO: 33174 - protein, 9 aa, Homo Sapiens
SYIQRLVQI

SEQ ID NO: 33175 - protein, 9 aa, Homo Sapiens
SYIQSIPVV

SEQ ID NO: 33176 - protein, 9 aa, Homo Sapiens
SYISKVDVL

SEQ ID NO: 33177 - protein, 9 aa, Homo Sapiens
SYISRTNQL

SEQ ID NO: 33178 - protein, 9 aa, Homo Sapiens
SYITKPEKW

SEQ ID NO: 33179 - protein, 9 aa, Homo Sapiens
SYKPIFSTL

SEQ ID NO: 33180 - protein, 9 aa, Homo Sapiens
SYLCNVTLF

SEQ ID NO: 33181 - protein, 9 aa, Homo Sapiens
SYLDEGFLL

SEQ ID NO: 33182 - protein, 9 aa, Homo Sapiens
SYLDRTEQL

SEQ ID NO: 33183 - protein, 9 aa, Homo Sapiens
SYLDSIHFF

SEQ ID NO: 33184 - protein, 9 aa, Homo Sapiens
SYLEKVVAI

SEQ ID NO: 33185 - protein, 9 aa, Homo Sapiens
SYLEKVVTL

SEQ ID NO: 33186 - protein, 9 aa, Homo Sapiens
SYLELVKSL

SEQ ID NO: 33187 - protein, 9 aa, Homo Sapiens
SYLENVDHF

SEQ ID NO: 33188 - protein, 9 aa, Homo Sapiens
SYLESFYHM

SEQ ID NO: 33189 - protein, 9 aa, Homo Sapiens
SYLGAFFSF

SEQ ID NO: 33190 - protein, 9 aa, Homo Sapiens
SYLHEPAVL

SEQ ID NO: 33191 - protein, 9 aa, Homo Sapiens
SYLIIHQRI

SEQ ID NO: 33192 - protein, 9 aa, Homo Sapiens
SYLITSVEL

SEQ ID NO: 33193 - protein, 9 aa, Homo Sapiens
SYLKEFIHI

SEQ ID NO: 33194 - protein, 9 aa, Homo Sapiens
SYLKQLPHF

SEQ ID NO: 33195 - protein, 9 aa, Homo Sapiens
SYLPHAPPF

SEQ ID NO: 33196 - protein, 9 aa, Homo Sapiens
SYLPISPTF

SEQ ID NO: 33197 - protein, 9 aa, Homo Sapiens
SYLPLAHMF

SEQ ID NO: 33198 - protein, 9 aa, Homo Sapiens
SYLPWFEVF

SEQ ID NO: 33199 - protein, 9 aa, Homo Sapiens
SYLQRLEVL

SEQ ID NO: 33200 - protein, 9 aa, Homo Sapiens
SYLQSLLLF

SEQ ID NO: 33201 - protein, 9 aa, Homo Sapiens
SYLSRLQYF

SEQ ID NO: 33202 - protein, 9 aa, Homo Sapiens
SYLSSILRF

SEQ ID NO: 33203 - protein, 9 aa, Homo Sapiens
SYLSSLSHL

SEQ ID NO: 33204 - protein, 9 aa, Homo Sapiens
SYLTIHHRI

SEQ ID NO: 33205 - protein, 9 aa, Homo Sapiens
SYLTSASSL

SEQ ID NO: 33206 - protein, 9 aa, Homo Sapiens
SYLVQYMQF

SEQ ID NO: 33207 - protein, 9 aa, Homo Sapiens
SYMEVPTYL

SEQ ID NO: 33208 - protein, 9 aa, Homo Sapiens
SYMGHFDLL

SEQ ID NO: 33209 - protein, 9 aa, Homo Sapiens
SYMPTVSHL

SEQ ID NO: 33210 - protein, 9 aa, Homo Sapiens
SYMWTINNF

SEQ ID NO: 33211 - protein, 9 aa, Homo Sapiens
SYNNFFRMF

SEQ ID NO: 33212 - protein, 9 aa, Homo Sapiens
SYNNHAWSF

SEQ ID NO: 33213 - protein, 9 aa, Homo Sapiens
SYNPLWLRI

SEQ ID NO: 33214 - protein, 9 aa, Homo Sapiens
SYPDLLPTF

SEQ ID NO: 33215 - protein, 9 aa, Homo Sapiens
SYPDNFLHI

SEQ ID NO: 33216 - protein, 9 aa, Homo Sapiens
SYPGSSYIF

SEQ ID NO: 33217 - protein, 9 aa, Homo Sapiens
SYPKIIEEF

SEQ ID NO: 33218 - protein, 9 aa, Homo Sapiens
SYPLNSYEL

SEQ ID NO: 33219 - protein, 9 aa, Homo Sapiens
SYPNVFLVF

SEQ ID NO: 33220 - protein, 9 aa, Homo Sapiens
SYPSAFSKL

SEQ ID NO: 33221 - protein, 9 aa, Homo Sapiens
SYPTFFPRF

SEQ ID NO: 33222 - protein, 9 aa, Homo Sapiens
SYQDFFEAI

SEQ ID NO: 33223 - protein, 9 aa, Homo Sapiens
SYQFILNLF

SEQ ID NO: 33224 - protein, 9 aa, Homo Sapiens
SYQKVIELF

SEQ ID NO: 33225 - protein, 9 aa, Homo Sapiens
SYQKVMALW

SEQ ID NO: 33226 - protein, 9 aa, Homo Sapiens
SYQRAFNEF

SEQ ID NO: 33227 - protein, 9 aa, Homo Sapiens
SYRIIYNLF

SEQ ID NO: 33228 - protein, 9 aa, Homo Sapiens
SYSDLVLFF

SEQ ID NO: 33229 - protein, 9 aa, Homo Sapiens
SYSDPPLKF

SEQ ID NO: 33230 - protein, 9 aa, Homo Sapiens
SYSEWLQRL

SEQ ID NO: 33231 - protein, 9 aa, Homo Sapiens
SYSHIMALI

SEQ ID NO: 33232 - protein, 9 aa, Homo Sapiens
SYSMIVNNL

SEQ ID NO: 33233 - protein, 9 aa, Homo Sapiens
SYSSTFHSL

SEQ ID NO: 33234 - protein, 9 aa, Homo Sapiens
SYTALFPQL

SEQ ID NO: 33235 - protein, 9 aa, Homo Sapiens
SYTDVWEKW

SEQ ID NO: 33236 - protein, 9 aa, Homo Sapiens
SYTEYLFLL

SEQ ID NO: 33237 - protein, 9 aa, Homo Sapiens
SYTHIQYLF

SEQ ID NO: 33238 - protein, 9 aa, Homo Sapiens
SYTRLFSNF

SEQ ID NO: 33239 - protein, 9 aa, Homo Sapiens
SYTSVLSRL

SEQ ID NO: 33240 - protein, 9 aa, Homo Sapiens
SYTYLSLGF

SEQ ID NO: 33241 - protein, 9 aa, Homo Sapiens
SYVHYVFRL

SEQ ID NO: 33242 - protein, 9 aa, Homo Sapiens
SYVMWKAGF

SEQ ID NO: 33243 - protein, 9 aa, Homo Sapiens
SYVRSLPFF

SEQ ID NO: 33244 - protein, 9 aa, Homo Sapiens
SYVWRTYHL

SEQ ID NO: 33245 - protein, 9 aa, Homo Sapiens
TFLPFIHTI

SEQ ID NO: 33246 - protein, 9 aa, Homo Sapiens
TFPSLLLVF

SEQ ID NO: 33247 - protein, 9 aa, Homo Sapiens
TFQMKFFYI

SEQ ID NO: 33248 - protein, 9 aa, Homo Sapiens
TFSDVEAHF

SEQ ID NO: 33249 - protein, 9 aa, Homo Sapiens
TFTDHVMLF

SEQ ID NO: 33250 - protein, 9 aa, Homo Sapiens
TFTFSHATF

SEQ ID NO: 33251 - protein, 9 aa, Homo Sapiens
THVGKVNIF

SEQ ID NO: 33252 - protein, 9 aa, Homo Sapiens
TIAEIKNLF

SEQ ID NO: 33253 - protein, 9 aa, Homo Sapiens
TLPFQQFEI

SEQ ID NO: 33254 - protein, 9 aa, Homo Sapiens
TLSDIFLLF

SEQ ID NO: 33255 - protein, 9 aa, Homo Sapiens
TMLGKFYHF

SEQ ID NO: 33256 - protein, 9 aa, Homo Sapiens
TTYPNTYIF

SEQ ID NO: 33257 - protein, 9 aa, Homo Sapiens
TVLICLLSF

SEQ ID NO: 33258 - protein, 9 aa, Homo Sapiens
TVPVRLSSL

SEQ ID NO: 33259 - protein, 9 aa, Homo Sapiens
TYAEKLHRL

SEQ ID NO: 33260 - protein, 9 aa, Homo Sapiens
TYAPAIHQI

SEQ ID NO: 33261 - protein, 9 aa, Homo Sapiens
TYAPVKSFL

SEQ ID NO: 33262 - protein, 9 aa, Homo Sapiens
TYARNLPAF

SEQ ID NO: 33263 - protein, 9 aa, Homo Sapiens
TYDPFHNCW

SEQ ID NO: 33264 - protein, 9 aa, Homo Sapiens
TYELRYFQI

SEQ ID NO: 33265 - protein, 9 aa, Homo Sapiens
TYENLIHVW

SEQ ID NO: 33266 - protein, 9 aa, Homo Sapiens
TYESIFSHF

SEQ ID NO: 33267 - protein, 9 aa, Homo Sapiens
TYFDKNYNL

SEQ ID NO: 33268 - protein, 9 aa, Homo Sapiens
TYFEKNFNL

SEQ ID NO: 33269 - protein, 9 aa, Homo Sapiens
TYFSTPLLL

SEQ ID NO: 33270 - protein, 9 aa, Homo Sapiens
TYGEIFEKF

SEQ ID NO: 33271 - protein, 9 aa, Homo Sapiens
TYGKIDLGF

SEQ ID NO: 33272 - protein, 9 aa, Homo Sapiens
TYGPSFPAF

SEQ ID NO: 33273 - protein, 9 aa, Homo Sapiens
TYGVSFFLV

SEQ ID NO: 33274 - protein, 9 aa, Homo Sapiens
TYHGVFVNI

SEQ ID NO: 33275 - protein, 9 aa, Homo Sapiens
TYHPGVPVF

SEQ ID NO: 33276 - protein, 9 aa, Homo Sapiens
TYIKFINLF

SEQ ID NO: 33277 - protein, 9 aa, Homo Sapiens
TYIKPISKL

SEQ ID NO: 33278 - protein, 9 aa, Homo Sapiens
TYINHVVSV

SEQ ID NO: 33279 - protein, 9 aa, Homo Sapiens
TYINPFVSF

SEQ ID NO: 33280 - protein, 9 aa, Homo Sapiens
TYIQKIFRM

SEQ ID NO: 33281 - protein, 9 aa, Homo Sapiens
TYIQNFRFF

SEQ ID NO: 33282 - protein, 9 aa, Homo Sapiens
TYIRDFQKI

SEQ ID NO: 33283 - protein, 9 aa, Homo Sapiens
TYISWKEEL

SEQ ID NO: 33284 - protein, 9 aa, Homo Sapiens
TYITSVSRL

SEQ ID NO: 33285 - protein, 9 aa, Homo Sapiens
TYKDYVDLF

SEQ ID NO: 33286 - protein, 9 aa, Homo Sapiens
TYKNFFYLI

SEQ ID NO: 33287 - protein, 9 aa, Homo Sapiens
TYKQVVDLI

SEQ ID NO: 33288 - protein, 9 aa, Homo Sapiens
TYLDIFRDF

SEQ ID NO: 33289 - protein, 9 aa, Homo Sapiens
TYLDLLGTW

SEQ ID NO: 33290 - protein, 9 aa, Homo Sapiens
TYLDNGVVF

SEQ ID NO: 33291 - protein, 9 aa, Homo Sapiens
TYLEKAIKI

SEQ ID NO: 33292 - protein, 9 aa, Homo Sapiens
TYLEKAVEV

SEQ ID NO: 33293 - protein, 9 aa, Homo Sapiens
TYLEKFQNL

SEQ ID NO: 33294 - protein, 9 aa, Homo Sapiens
TYLGKYWAI

SEQ ID NO: 33295 - protein, 9 aa, Homo Sapiens
TYLIQHQRI

SEQ ID NO: 33296 - protein, 9 aa, Homo Sapiens
TYLIVTSLL

SEQ ID NO: 33297 - protein, 9 aa, Homo Sapiens
TYLLSVYRL

SEQ ID NO: 33298 - protein, 9 aa, Homo Sapiens
TYLNDFFSY

SEQ ID NO: 33299 - protein, 9 aa, Homo Sapiens
TYLNYVVHL

SEQ ID NO: 33300 - protein, 9 aa, Homo Sapiens
TYLPGIVGL

SEQ ID NO: 33301 - protein, 9 aa, Homo Sapiens
TYLPTSPLL

SEQ ID NO: 33302 - protein, 9 aa, Homo Sapiens
TYLRDQHFL

SEQ ID NO: 33303 - protein, 9 aa, Homo Sapiens
TYLTIFDLF

SEQ ID NO: 33304 - protein, 9 aa, Homo Sapiens
TYLVDMQRF

SEQ ID NO: 33305 - protein, 9 aa, Homo Sapiens
TYMKDLYQL

SEQ ID NO: 33306 - protein, 9 aa, Homo Sapiens
TYMPHVHIL

SEQ ID NO: 33307 - protein, 9 aa, Homo Sapiens
TYNIFAITF

SEQ ID NO: 33308 - protein, 9 aa, Homo Sapiens
TYNLLSERW

SEQ ID NO: 33309 - protein, 9 aa, Homo Sapiens
TYNMVLNLL

SEQ ID NO: 33310 - protein, 9 aa, Homo Sapiens
TYNQKHSLF

SEQ ID NO: 33311 - protein, 9 aa, Homo Sapiens
TYNYPVHYF

SEQ ID NO: 33312 - protein, 9 aa, Homo Sapiens
TYPAELNNI

SEQ ID NO: 33313 - protein, 9 aa, Homo Sapiens
TYPDVNNSI

SEQ ID NO: 33314 - protein, 9 aa, Homo Sapiens
TYPELNSSI

SEQ ID NO: 33315 - protein, 9 aa, Homo Sapiens
TYPENWRAF

SEQ ID NO: 33316 - protein, 9 aa, Homo Sapiens
TYPLIFASI

SEQ ID NO: 33317 - protein, 9 aa, Homo Sapiens
TYQDIFRDF

SEQ ID NO: 33318 - protein, 9 aa, Homo Sapiens
TYQDIQNTI

SEQ ID NO: 33319 - protein, 9 aa, Homo Sapiens
TYQEVAQKF

SEQ ID NO: 33320 - protein, 9 aa, Homo Sapiens
TYQRWQFTL

SEQ ID NO: 33321 - protein, 9 aa, Homo Sapiens
TYQTIIELF

SEQ ID NO: 33322 - protein, 9 aa, Homo Sapiens
TYQVLAVTF

SEQ ID NO: 33323 - protein, 9 aa, Homo Sapiens
TYRNVMEQF

SEQ ID NO: 33324 - protein, 9 aa, Homo Sapiens
TYSYSFFHF

SEQ ID NO: 33325 - protein, 9 aa, Homo Sapiens
TYTDLLSVI

SEQ ID NO: 33326 - protein, 9 aa, Homo Sapiens
TYTDRVFFL

SEQ ID NO: 33327 - protein, 9 aa, Homo Sapiens
TYTEFVPQI

SEQ ID NO: 33328 - protein, 9 aa, Homo Sapiens
TYTMILNLL

SEQ ID NO: 33329 - protein, 9 aa, Homo Sapiens
TYTSYLDKF

SEQ ID NO: 33330 - protein, 9 aa, Homo Sapiens
TYTYEKLLW

SEQ ID NO: 33331 - protein, 9 aa, Homo Sapiens
TYVENLRLL

SEQ ID NO: 33332 - protein, 9 aa, Homo Sapiens
TYVKEIEVW

SEQ ID NO: 33333 - protein, 9 aa, Homo Sapiens
TYVPWPLML

SEQ ID NO: 33334 - protein, 9 aa, Homo Sapiens
TYVRWYTQL

SEQ ID NO: 33335 - protein, 9 aa, Homo Sapiens
TYVSGTLRF

SEQ ID NO: 33336 - protein, 9 aa, Homo Sapiens
TYVTILPEL

SEQ ID NO: 33337 - protein, 9 aa, Homo Sapiens
TYVWVQYVW

SEQ ID NO: 33338 - protein, 9 aa, Homo Sapiens
TYYWGFAAW

SEQ ID NO: 33339 - protein, 9 aa, Homo Sapiens
VANAIIHLF

SEQ ID NO: 33340 - protein, 9 aa, Homo Sapiens
VFAGVFNTF

SEQ ID NO: 33341 - protein, 9 aa, Homo Sapiens
VFGYHGYTF

SEQ ID NO: 33342 - protein, 9 aa, Homo Sapiens
VFIDKQTNL

SEQ ID NO: 33343 - protein, 9 aa, Homo Sapiens
VFIIVPAIF

SEQ ID NO: 33344 - protein, 9 aa, Homo Sapiens
VFIRGGEEF

SEQ ID NO: 33345 - protein, 9 aa, Homo Sapiens
VFKPISSTW

SEQ ID NO: 33346 - protein, 9 aa, Homo Sapiens
VFLPIVVLI

SEQ ID NO: 33347 - protein, 9 aa, Homo Sapiens
VFLRAINKF

SEQ ID NO: 33348 - protein, 9 aa, Homo Sapiens
VFNDVRLLL

SEQ ID NO: 33349 - protein, 9 aa, Homo Sapiens
VFPDDMPTL

SEQ ID NO: 33350 - protein, 9 aa, Homo Sapiens
VFPDKGYSF

SEQ ID NO: 33351 - protein, 9 aa, Homo Sapiens
VFPFRTFYL

SEQ ID NO: 33352 - protein, 9 aa, Homo Sapiens
VFRLQFDEF

SEQ ID NO: 33353 - protein, 9 aa, Homo Sapiens
VFSPDGHLF

SEQ ID NO: 33354 - protein, 9 aa, Homo Sapiens
VFSTVVIHF

SEQ ID NO: 33355 - protein, 9 aa, Homo Sapiens
VFTAFTEEF

SEQ ID NO: 33356 - protein, 9 aa, Homo Sapiens
VFTEVANLF

SEQ ID NO: 33357 - protein, 9 aa, Homo Sapiens
VFTLKPLEF

SEQ ID NO: 33358 - protein, 9 aa, Homo Sapiens
VFTPVTTEI

SEQ ID NO: 33359 - protein, 9 aa, Homo Sapiens
VFTPVVQRI

SEQ ID NO: 33360 - protein, 9 aa, Homo Sapiens
VFTYVGALF

SEQ ID NO: 33361 - protein, 9 aa, Homo Sapiens
VFVDSVPEF

SEQ ID NO: 33362 - protein, 9 aa, Homo Sapiens
VFVEATHVL

SEQ ID NO: 33363 - protein, 9 aa, Homo Sapiens
VFYPYPQYF

SEQ ID NO: 33364 - protein, 9 aa, Homo Sapiens
VGAYILYFF

SEQ ID NO: 33365 - protein, 9 aa, Homo Sapiens
VHILQVPVW

SEQ ID NO: 33366 - protein, 9 aa, Homo Sapiens
VHIPEVYLI

SEQ ID NO: 33367 - protein, 9 aa, Homo Sapiens
VITPVLLHF

SEQ ID NO: 33368 - protein, 9 aa, Homo Sapiens
VLFVVPLII

SEQ ID NO: 33369 - protein, 9 aa, Homo Sapiens
VLIPKLPQL

SEQ ID NO: 33370 - protein, 9 aa, Homo Sapiens
VLNNVAHTF

SEQ ID NO: 33371 - protein, 9 aa, Homo Sapiens
VLPESLPVL

SEQ ID NO: 33372 - protein, 9 aa, Homo Sapiens
VLPGHFNTF

SEQ ID NO: 33373 - protein, 9 aa, Homo Sapiens
VLPILPLLF

SEQ ID NO: 33374 - protein, 9 aa, Homo Sapiens
VLPIRVHTI

SEQ ID NO: 33375 - protein, 9 aa, Homo Sapiens
VLPKLYVKL

SEQ ID NO: 33376 - protein, 9 aa, Homo Sapiens
VLPNTALHL

SEQ ID NO: 33377 - protein, 9 aa, Homo Sapiens
VLPPSVPFF

SEQ ID NO: 33378 - protein, 9 aa, Homo Sapiens
VLPQRFPQF

SEQ ID NO: 33379 - protein, 9 aa, Homo Sapiens
VLPSVLNKF

SEQ ID NO: 33380 - protein, 9 aa, Homo Sapiens
VMADIRELI

SEQ ID NO: 33381 - protein, 9 aa, Homo Sapiens
VMAPRTLVL

SEQ ID NO: 33382 - protein, 9 aa, Homo Sapiens
VMPSSFFLL

SEQ ID NO: 33383 - protein, 9 aa, Homo Sapiens
VMSATFAKF

SEQ ID NO: 33384 - protein, 9 aa, Homo Sapiens
VQAGVTYLF

SEQ ID NO: 33385 - protein, 9 aa, Homo Sapiens
VQPPHLFLW

SEQ ID NO: 33386 - protein, 9 aa, Homo Sapiens
VQPRNWLLF

SEQ ID NO: 33387 - protein, 9 aa, Homo Sapiens
VQPSKYHFL

SEQ ID NO: 33388 - protein, 9 aa, Homo Sapiens
VWGVPIPVF

SEQ ID NO: 33389 - protein, 9 aa, Homo Sapiens
VWIYDPVHF

SEQ ID NO: 33390 - protein, 9 aa, Homo Sapiens
VWLPASVLF

SEQ ID NO: 33391 - protein, 9 aa, Homo Sapiens
VWLPYLYTL

SEQ ID NO: 33392 - protein, 9 aa, Homo Sapiens
VWVPFIYSF

SEQ ID NO: 33393 - protein, 9 aa, Homo Sapiens
VYADKLLNI

SEQ ID NO: 33394 - protein, 9 aa, Homo Sapiens
VYADQPHIF

SEQ ID NO: 33395 - protein, 9 aa, Homo Sapiens
VYAEIMAVL

SEQ ID NO: 33396 - protein, 9 aa, Homo Sapiens
VYAFNLDTF

SEQ ID NO: 33397 - protein, 9 aa, Homo Sapiens
VYAFSIENF

SEQ ID NO: 33398 - protein, 9 aa, Homo Sapiens
VYAGMITVF

SEQ ID NO: 33399 - protein, 9 aa, Homo Sapiens
VYAHFPINV

SEQ ID NO: 33400 - protein, 9 aa, Homo Sapiens
VYAILTHGI

SEQ ID NO: 33401 - protein, 9 aa, Homo Sapiens
VYAKYWIYV

SEQ ID NO: 33402 - protein, 9 aa, Homo Sapiens
VYALKVRTI

SEQ ID NO: 33403 - protein, 9 aa, Homo Sapiens
VYALPTIAF

SEQ ID NO: 33404 - protein, 9 aa, Homo Sapiens
VYALVVVSY

SEQ ID NO: 33405 - protein, 9 aa, Homo Sapiens
VYANGIRNI

SEQ ID NO: 33406 - protein, 9 aa, Homo Sapiens
VYAPFIEKL

SEQ ID NO: 33407 - protein, 9 aa, Homo Sapiens
VYAVPILIF

SEQ ID NO: 33408 - protein, 9 aa, Homo Sapiens
VYAVVRGLF

SEQ ID NO: 33409 - protein, 9 aa, Homo Sapiens
VYDPLFSQL

SEQ ID NO: 33410 - protein, 9 aa, Homo Sapiens
VYDTNPAKF

SEQ ID NO: 33411 - protein, 9 aa, Homo Sapiens
VYDTVFKHF

SEQ ID NO: 33412 - protein, 9 aa, Homo Sapiens
VYEEILHQI

SEQ ID NO: 33413 - protein, 9 aa, Homo Sapiens
VYELSAVLI

SEQ ID NO: 33414 - protein, 9 aa, Homo Sapiens
VYERELQTF

SEQ ID NO: 33415 - protein, 9 aa, Homo Sapiens
VYEYVVERF

SEQ ID NO: 33416 - protein, 9 aa, Homo Sapiens
VYFGDPVSL

SEQ ID NO: 33417 - protein, 9 aa, Homo Sapiens
VYFGHWVVM

SEQ ID NO: 33418 - protein, 9 aa, Homo Sapiens
VYFIGAHNI

SEQ ID NO: 33419 - protein, 9 aa, Homo Sapiens
VYFSAAHAL

SEQ ID NO: 33420 - protein, 9 aa, Homo Sapiens
VYGFQWRHF

SEQ ID NO: 33421 - protein, 9 aa, Homo Sapiens
VYGFVREAL

SEQ ID NO: 33422 - protein, 9 aa, Homo Sapiens
VYGPLPQSF

SEQ ID NO: 33423 - protein, 9 aa, Homo Sapiens
VYGSFASKL

SEQ ID NO: 33424 - protein, 9 aa, Homo Sapiens
VYGVVPISL

SEQ ID NO: 33425 - protein, 9 aa, Homo Sapiens
VYHILKVLF

SEQ ID NO: 33426 - protein, 9 aa, Homo Sapiens
VYHNMPLIW

SEQ ID NO: 33427 - protein, 9 aa, Homo Sapiens
VYHSDIPKW

SEQ ID NO: 33428 - protein, 9 aa, Homo Sapiens
VYIAPLKAL

SEQ ID NO: 33429 - protein, 9 aa, Homo Sapiens
VYIDKVRSL

SEQ ID NO: 33430 - protein, 9 aa, Homo Sapiens
VYIGKLNMI

SEQ ID NO: 33431 - protein, 9 aa, Homo Sapiens
VYIHHFDRI

SEQ ID NO: 33432 - protein, 9 aa, Homo Sapiens
VYIKHPVSL

SEQ ID NO: 33433 - protein, 9 aa, Homo Sapiens
VYINTAQEF

SEQ ID NO: 33434 - protein, 9 aa, Homo Sapiens
VYIPAHGRL

SEQ ID NO: 33435 - protein, 9 aa, Homo Sapiens
VYIPCIYVL

SEQ ID NO: 33436 - protein, 9 aa, Homo Sapiens
VYIPNKVLI

SEQ ID NO: 33437 - protein, 9 aa, Homo Sapiens
VYISEHEHF

SEQ ID NO: 33438 - protein, 9 aa, Homo Sapiens
VYISNGQVL

SEQ ID NO: 33439 - protein, 9 aa, Homo Sapiens
VYITPMEAL

SEQ ID NO: 33440 - protein, 9 aa, Homo Sapiens
VYITRAQLM

SEQ ID NO: 33441 - protein, 9 aa, Homo Sapiens
VYIVPVIVL

SEQ ID NO: 33442 - protein, 9 aa, Homo Sapiens
VYIYRYFFL

SEQ ID NO: 33443 - protein, 9 aa, Homo Sapiens
VYKDSIYYI

SEQ ID NO: 33444 - protein, 9 aa, Homo Sapiens
VYKKSIFVF

SEQ ID NO: 33445 - protein, 9 aa, Homo Sapiens
VYKPAQNSW

SEQ ID NO: 33446 - protein, 9 aa, Homo Sapiens
VYKPPGLKW

SEQ ID NO: 33447 - protein, 9 aa, Homo Sapiens
VYKTHIDVI

SEQ ID NO: 33448 - protein, 9 aa, Homo Sapiens
VYKYPFELI

SEQ ID NO: 33449 - protein, 9 aa, Homo Sapiens
VYLDEPIKI

SEQ ID NO: 33450 - protein, 9 aa, Homo Sapiens
VYLDKFIRL

SEQ ID NO: 33451 - protein, 9 aa, Homo Sapiens
VYLEKFMTF

SEQ ID NO: 33452 - protein, 9 aa, Homo Sapiens
VYLHDFQRF

SEQ ID NO: 33453 - protein, 9 aa, Homo Sapiens
VYLKPSYAF

SEQ ID NO: 33454 - protein, 9 aa, Homo Sapiens
VYLKTALGL

SEQ ID NO: 33455 - protein, 9 aa, Homo Sapiens
VYLPCLQNI

SEQ ID NO: 33456 - protein, 9 aa, Homo Sapiens
VYLPLTSHI

SEQ ID NO: 33457 - protein, 9 aa, Homo Sapiens
VYLPRVLDI

SEQ ID NO: 33458 - protein, 9 aa, Homo Sapiens
VYLPTAFLL

SEQ ID NO: 33459 - protein, 9 aa, Homo Sapiens
VYLPTHTSL

SEQ ID NO: 33460 - protein, 9 aa, Homo Sapiens
VYLSNVVLF

SEQ ID NO: 33461 - protein, 9 aa, Homo Sapiens
VYMDWYEKF

SEQ ID NO: 33462 - protein, 9 aa, Homo Sapiens
VYMGLLAVF

SEQ ID NO: 33463 - protein, 9 aa, Homo Sapiens
VYMIRVYLL

SEQ ID NO: 33464 - protein, 9 aa, Homo Sapiens
VYMNRVKEI

SEQ ID NO: 33465 - protein, 9 aa, Homo Sapiens
VYMPCLYVY

SEQ ID NO: 33466 - protein, 9 aa, Homo Sapiens
VYNENLVHM

SEQ ID NO: 33467 - protein, 9 aa, Homo Sapiens
VYNPELDKW

SEQ ID NO: 33468 - protein, 9 aa, Homo Sapiens
VYNPVRAEW

SEQ ID NO: 33469 - protein, 9 aa, Homo Sapiens
VYPADVVLF

SEQ ID NO: 33470 - protein, 9 aa, Homo Sapiens
VYPAGFVYI

SEQ ID NO: 33471 - protein, 9 aa, Homo Sapiens
VYPAVMVLL

SEQ ID NO: 33472 - protein, 9 aa, Homo Sapiens
VYPDGIRHI

SEQ ID NO: 33473 - protein, 9 aa, Homo Sapiens
VYPEESLVI

SEQ ID NO: 33474 - protein, 9 aa, Homo Sapiens
VYPERTPLL

SEQ ID NO: 33475 - protein, 9 aa, Homo Sapiens
VYPGDPLRF

SEQ ID NO: 33476 - protein, 9 aa, Homo Sapiens
VYPGIAVFF

SEQ ID NO: 33477 - protein, 9 aa, Homo Sapiens
VYPGYYLTF

SEQ ID NO: 33478 - protein, 9 aa, Homo Sapiens
VYPLKFFFL

SEQ ID NO: 33479 - protein, 9 aa, Homo Sapiens
VYPLMKEYF

SEQ ID NO: 33480 - protein, 9 aa, Homo Sapiens
VYPNWAIGL

SEQ ID NO: 33481 - protein, 9 aa, Homo Sapiens
VYPPPHQVF

SEQ ID NO: 33482 - protein, 9 aa, Homo Sapiens
VYPQRLNFV

SEQ ID NO: 33483 - protein, 9 aa, Homo Sapiens
VYPSSLSKI

SEQ ID NO: 33484 - protein, 9 aa, Homo Sapiens
VYPTAVHVL

SEQ ID NO: 33485 - protein, 9 aa, Homo Sapiens
VYPWTQRFF

SEQ ID NO: 33486 - protein, 9 aa, Homo Sapiens
VYQEIWIGM

SEQ ID NO: 33487 - protein, 9 aa, Homo Sapiens
VYQHGLTGF

SEQ ID NO: 33488 - protein, 9 aa, Homo Sapiens
VYQHLFTRI

SEQ ID NO: 33489 - protein, 9 aa, Homo Sapiens
VYQIFDTFF

SEQ ID NO: 33490 - protein, 9 aa, Homo Sapiens
VYQLRFQFL

SEQ ID NO: 33491 - protein, 9 aa, Homo Sapiens
VYQNIFTAM

SEQ ID NO: 33492 - protein, 9 aa, Homo Sapiens
VYQYMHETI

SEQ ID NO: 33493 - protein, 9 aa, Homo Sapiens
VYSAGVYRL

SEQ ID NO: 33494 - protein, 9 aa, Homo Sapiens
VYSFGFERL

SEQ ID NO: 33495 - protein, 9 aa, Homo Sapiens
VYSFVTPTF

SEQ ID NO: 33496 - protein, 9 aa, Homo Sapiens
VYSGGVYLF

SEQ ID NO: 33497 - protein, 9 aa, Homo Sapiens
VYSIISVQL

SEQ ID NO: 33498 - protein, 9 aa, Homo Sapiens
VYSIRLAYL

SEQ ID NO: 33499 - protein, 9 aa, Homo Sapiens
VYSIVPQSW

SEQ ID NO: 33500 - protein, 9 aa, Homo Sapiens
VYSPHVLNL

SEQ ID NO: 33501 - protein, 9 aa, Homo Sapiens
VYSPKSPSL

SEQ ID NO: 33502 - protein, 9 aa, Homo Sapiens
VYSQFITQL

SEQ ID NO: 33503 - protein, 9 aa, Homo Sapiens
VYSRTFTWL

SEQ ID NO: 33504 - protein, 9 aa, Homo Sapiens
VYSTPTPFF

SEQ ID NO: 33505 - protein, 9 aa, Homo Sapiens
VYTDFAFRI

SEQ ID NO: 33506 - protein, 9 aa, Homo Sapiens
VYTDILIGL

SEQ ID NO: 33507 - protein, 9 aa, Homo Sapiens
VYTEAIADI

SEQ ID NO: 33508 - protein, 9 aa, Homo Sapiens
VYTGDALRI

SEQ ID NO: 33509 - protein, 9 aa, Homo Sapiens
VYTGIDHHW

SEQ ID NO: 33510 - protein, 9 aa, Homo Sapiens
VYTIDFNSM

SEQ ID NO: 33511 - protein, 9 aa, Homo Sapiens
VYTKALSSL

SEQ ID NO: 33512 - protein, 9 aa, Homo Sapiens
VYTLDIPVL

SEQ ID NO: 33513 - protein, 9 aa, Homo Sapiens
VYTLLTTHL

SEQ ID NO: 33514 - protein, 9 aa, Homo Sapiens
VYTQHQPFL

SEQ ID NO: 33515 - protein, 9 aa, Homo Sapiens
VYTRHMTWI

SEQ ID NO: 33516 - protein, 9 aa, Homo Sapiens
VYTSVVEEL

SEQ ID NO: 33517 - protein, 9 aa, Homo Sapiens
VYTTNIQEL

SEQ ID NO: 33518 - protein, 9 aa, Homo Sapiens
VYTTTVHWL

SEQ ID NO: 33519 - protein, 9 aa, Homo Sapiens
VYTVVDEMF

SEQ ID NO: 33520 - protein, 9 aa, Homo Sapiens
VYTYIQSRF

SEQ ID NO: 33521 - protein, 9 aa, Homo Sapiens
VYVAALKTL

SEQ ID NO: 33522 - protein, 9 aa, Homo Sapiens
VYVAAVREF

SEQ ID NO: 33523 - protein, 9 aa, Homo Sapiens
VYVAIQAVL

SEQ ID NO: 33524 - protein, 9 aa, Homo Sapiens
VYVATRPTI

SEQ ID NO: 33525 - protein, 9 aa, Homo Sapiens
VYVDAVGQF

SEQ ID NO: 33526 - protein, 9 aa, Homo Sapiens
VYVGFQVQL

SEQ ID NO: 33527 - protein, 9 aa, Homo Sapiens
VYVGTLKLI

SEQ ID NO: 33528 - protein, 9 aa, Homo Sapiens
VYVKDLSSF

SEQ ID NO: 33529 - protein, 9 aa, Homo Sapiens
VYVLTVTEI

SEQ ID NO: 33530 - protein, 9 aa, Homo Sapiens
VYVQELQKL

SEQ ID NO: 33531 - protein, 9 aa, Homo Sapiens
VYVQNVVKL

SEQ ID NO: 33532 - protein, 9 aa, Homo Sapiens
VYVVGTAHF

SEQ ID NO: 33533 - protein, 9 aa, Homo Sapiens
VYWEGYVRF

SEQ ID NO: 33534 - protein, 9 aa, Homo Sapiens
VYWKIYNSI

SEQ ID NO: 33535 - protein, 9 aa, Homo Sapiens
VYWTQLNMF

SEQ ID NO: 33536 - protein, 9 aa, Homo Sapiens
VYYPELFVW

SEQ ID NO: 33537 - protein, 9 aa, Homo Sapiens
VYYPVRHHL

SEQ ID NO: 33538 - protein, 9 aa, Homo Sapiens
WYMDNPQNL

SEQ ID NO: 33539 - protein, 9 aa, Homo Sapiens
YFIADLPHL

SEQ ID NO: 33540 - protein, 9 aa, Homo Sapiens
YFINRSWEW

SEQ ID NO: 33541 - protein, 9 aa, Homo Sapiens
YFIPEFNLF

SEQ ID NO: 33542 - protein, 9 aa, Homo Sapiens
YFISHVLAF

SEQ ID NO: 33543 - protein, 9 aa, Homo Sapiens
YFLDKIDVI

SEQ ID NO: 33544 - protein, 9 aa, Homo Sapiens
YFLKGVLVF

SEQ ID NO: 33545 - protein, 9 aa, Homo Sapiens
YFPPKGYAF

SEQ ID NO: 33546 - protein, 9 aa, Homo Sapiens
YFSSGKYYW

SEQ ID NO: 33547 - protein, 9 aa, Homo Sapiens
YGLVIYAGF

SEQ ID NO: 33548 - protein, 9 aa, Homo Sapiens
YLPHLFPSF

SEQ ID NO: 33549 - protein, 9 aa, Homo Sapiens
YLPPLFWRF

SEQ ID NO: 33550 - protein, 9 aa, Homo Sapiens
YLPSSFPVL

SEQ ID NO: 33551 - protein, 9 aa, Homo Sapiens
YLPTLWVKL

SEQ ID NO: 33552 - protein, 9 aa, Homo Sapiens
YQTPRLWLF

SEQ ID NO: 33553 - protein, 9 aa, Homo Sapiens
YVIQKFFEF

SEQ ID NO: 33554 - protein, 9 aa, Homo Sapiens
YWIDIQLRW

SEQ ID NO: 33555 - protein, 9 aa, Homo Sapiens
YWMHVQNTF

SEQ ID NO: 33556 - protein, 9 aa, Homo Sapiens
YWPDVIHSF

SEQ ID NO: 33557 - protein, 9 aa, Homo Sapiens
YWPVIPLKF

SEQ ID NO: 33558 - protein, 9 aa, Homo Sapiens
YYAEVETRI

SEQ ID NO: 33559 - protein, 9 aa, Homo Sapiens
YYASDVWSF

SEQ ID NO: 33560 - protein, 9 aa, Homo Sapiens
YYASIAKAF

SEQ ID NO: 33561 - protein, 9 aa, Homo Sapiens
YYAVCQNLL

SEQ ID NO: 33562 - protein, 9 aa, Homo Sapiens
YYDKAFDRI

SEQ ID NO: 33563 - protein, 9 aa, Homo Sapiens
YYDKHFTEF

SEQ ID NO: 33564 - protein, 9 aa, Homo Sapiens
YYDPHQATF

SEQ ID NO: 33565 - protein, 9 aa, Homo Sapiens
YYDPKHVIF

SEQ ID NO: 33566 - protein, 9 aa, Homo Sapiens
YYEDNKQFF

SEQ ID NO: 33567 - protein, 9 aa, Homo Sapiens
YYEEQHPEL

SEQ ID NO: 33568 - protein, 9 aa, Homo Sapiens
YYEKQFPEI

SEQ ID NO: 33569 - protein, 9 aa, Homo Sapiens
YYEVHKELF

SEQ ID NO: 33570 - protein, 9 aa, Homo Sapiens
YYEYNHDLF

SEQ ID NO: 33571 - protein, 9 aa, Homo Sapiens
YYFDSYAHF

SEQ ID NO: 33572 - protein, 9 aa, Homo Sapiens
YYFPVKNVI

SEQ ID NO: 33573 - protein, 9 aa, Homo Sapiens
YYFSKLIEF

SEQ ID NO: 33574 - protein, 9 aa, Homo Sapiens
YYGDVIWVI

SEQ ID NO: 33575 - protein, 9 aa, Homo Sapiens
YYGEHLFML

SEQ ID NO: 33576 - protein, 9 aa, Homo Sapiens
YYGILQEKI

SEQ ID NO: 33577 - protein, 9 aa, Homo Sapiens
YYGLYRDLF

SEQ ID NO: 33578 - protein, 9 aa, Homo Sapiens
YYIDCIRQV

SEQ ID NO: 33579 - protein, 9 aa, Homo Sapiens
YYIDKLEYL

SEQ ID NO: 33580 - protein, 9 aa, Homo Sapiens
YYIFIPSKF

SEQ ID NO: 33581 - protein, 9 aa, Homo Sapiens
YYIIYRNVF

SEQ ID NO: 33582 - protein, 9 aa, Homo Sapiens
YYIRFFITY

SEQ ID NO: 33583 - protein, 9 aa, Homo Sapiens
YYISPRITF

SEQ ID NO: 33584 - protein, 9 aa, Homo Sapiens
YYITTRAQF

SEQ ID NO: 33585 - protein, 9 aa, Homo Sapiens
YYKQFFDRV

SEQ ID NO: 33586 - protein, 9 aa, Homo Sapiens
YYLDHSILL

SEQ ID NO: 33587 - protein, 9 aa, Homo Sapiens
YYLGKILEM

SEQ ID NO: 33588 - protein, 9 aa, Homo Sapiens
YYLNDLDRI

SEQ ID NO: 33589 - protein, 9 aa, Homo Sapiens
YYLNDLERI

SEQ ID NO: 33590 - protein, 9 aa, Homo Sapiens
YYLNEIQSF

SEQ ID NO: 33591 - protein, 9 aa, Homo Sapiens
YYLNLIELF

SEQ ID NO: 33592 - protein, 9 aa, Homo Sapiens
YYLNRTHML

SEQ ID NO: 33593 - protein, 9 aa, Homo Sapiens
YYLSKIEEL

SEQ ID NO: 33594 - protein, 9 aa, Homo Sapiens
YYLSYIEEW

SEQ ID NO: 33595 - protein, 9 aa, Homo Sapiens
YYLTFVQEL

SEQ ID NO: 33596 - protein, 9 aa, Homo Sapiens
YYLTHGLYL

SEQ ID NO: 33597 - protein, 9 aa, Homo Sapiens
YYMDYLAAL

SEQ ID NO: 33598 - protein, 9 aa, Homo Sapiens
YYMELTKLL

SEQ ID NO: 33599 - protein, 9 aa, Homo Sapiens
YYNGKWEFL

SEQ ID NO: 33600 - protein, 9 aa, Homo Sapiens
YYNGMVVFW

SEQ ID NO: 33601 - protein, 9 aa, Homo Sapiens
YYNKVSTVF

SEQ ID NO: 33602 - protein, 9 aa, Homo Sapiens
YYPELAFQF

SEQ ID NO: 33603 - protein, 9 aa, Homo Sapiens
YYPEYKLLF

SEQ ID NO: 33604 - protein, 9 aa, Homo Sapiens
YYQDTPKQI

SEQ ID NO: 33605 - protein, 9 aa, Homo Sapiens
YYQEVLQQL

SEQ ID NO: 33606 - protein, 9 aa, Homo Sapiens
YYQEYPMSI

SEQ ID NO: 33607 - protein, 9 aa, Homo Sapiens
YYQHIVTTL

SEQ ID NO: 33608 - protein, 9 aa, Homo Sapiens
YYQNYFEKL

SEQ ID NO: 33609 - protein, 9 aa, Homo Sapiens
YYQPLVHLL

SEQ ID NO: 33610 - protein, 9 aa, Homo Sapiens
YYQSSVQYL

SEQ ID NO: 33611 - protein, 9 aa, Homo Sapiens
YYQTDLVNI

SEQ ID NO: 33612 - protein, 9 aa, Homo Sapiens
YYRIFTWRF

SEQ ID NO: 33613 - protein, 9 aa, Homo Sapiens
YYRPRFFLL

SEQ ID NO: 33614 - protein, 9 aa, Homo Sapiens
YYSAVTPHL

SEQ ID NO: 33615 - protein, 9 aa, Homo Sapiens
YYSLIKMVF

SEQ ID NO: 33616 - protein, 9 aa, Homo Sapiens
YYSPHGHIL

SEQ ID NO: 33617 - protein, 9 aa, Homo Sapiens
YYTDFLITL

SEQ ID NO: 33618 - protein, 9 aa, Homo Sapiens
YYTDIMHTL

SEQ ID NO: 33619 - protein, 9 aa, Homo Sapiens
YYTEFPTVL

SEQ ID NO: 33620 - protein, 9 aa, Homo Sapiens
YYTKVYQEI

SEQ ID NO: 33621 - protein, 9 aa, Homo Sapiens
YYTPITPHL

SEQ ID NO: 33622 - protein, 9 aa, Homo Sapiens
YYTREVMLI

SEQ ID NO: 33623 - protein, 9 aa, Homo Sapiens
YYVNGTYRL

SEQ ID NO: 33624 - protein, 9 aa, Homo Sapiens
YYVRAVLHL

SEQ ID NO: 33625 - protein, 9 aa, Homo Sapiens
YYVRAWVVF

SEQ ID NO: 33626 - protein, 9 aa, Homo Sapiens
YYVWLQHTL

SEQ ID NO: 33627 - protein, 9 aa, Homo Sapiens
YYWQTSAKW

SEQ ID NO: 33628 - protein, 9 aa, Homo Sapiens
YYYINYTTI

SEQ ID NO: 33629 - protein, 10 aa, Homo Sapiens
AFFGDVVLRF

SEQ ID NO: 33630 - protein, 10 aa, Homo Sapiens
AFLYNDQLIW

SEQ ID NO: 33631 - protein, 10 aa, Homo Sapiens
AWAPKPYHKF

SEQ ID NO: 33632 - protein, 10 aa, Homo Sapiens
AYADLVKQAW

SEQ ID NO: 33633 - protein, 10 aa, Homo Sapiens
AYAELIKQMW

SEQ ID NO: 33634 - protein, 10 aa, Homo Sapiens
AYAPQGWIAF

SEQ ID NO: 33635 - protein, 10 aa, Homo Sapiens
AYARIGNSYF

SEQ ID NO: 33636 - protein, 10 aa, Homo Sapiens
AYFKRYQVKF

SEQ ID NO: 33637 - protein, 10 aa, Homo Sapiens
AYFPELIANF

SEQ ID NO: 33638 - protein, 10 aa, Homo Sapiens
AYGELRAMVL

SEQ ID NO: 33639 - protein, 10 aa, Homo Sapiens
AYGHFGRDSF

SEQ ID NO: 33640 - protein, 10 aa, Homo Sapiens
AYIAVGSISF

SEQ ID NO: 33641 - protein, 10 aa, Homo Sapiens
AYLDKKHTIF

SEQ ID NO: 33642 - protein, 10 aa, Homo Sapiens
AYLESFYKFC

SEQ ID NO: 33643 - protein, 10 aa, Homo Sapiens
AYLPEWKENI

SEQ ID NO: 33644 - protein, 10 aa, Homo Sapiens
AYLPPLQQVF

SEQ ID NO: 33645 - protein, 10 aa, Homo Sapiens
AYMDAPKAAL

SEQ ID NO: 33646 - protein, 10 aa, Homo Sapiens
AYMRSLFDYF

SEQ ID NO: 33647 - protein, 10 aa, Homo Sapiens
AYNDNWFITF

SEQ ID NO: 33648 - protein, 10 aa, Homo Sapiens
AYNEGIINLL

SEQ ID NO: 33649 - protein, 10 aa, Homo Sapiens
AYNPMARDLF

SEQ ID NO: 33650 - protein, 10 aa, Homo Sapiens
AYPDFAPQKF

SEQ ID NO: 33651 - protein, 10 aa, Homo Sapiens
AYPPAPFMHI

SEQ ID NO: 33652 - protein, 10 aa, Homo Sapiens
AYSAAKSWVF

SEQ ID NO: 33653 - protein, 10 aa, Homo Sapiens
AYVKGGLSTF

SEQ ID NO: 33654 - protein, 10 aa, Homo Sapiens
DYAAIRDNYF

SEQ ID NO: 33655 - protein, 10 aa, Homo Sapiens
DYMNLLGMIF

SEQ ID NO: 33656 - protein, 10 aa, Homo Sapiens
DYYPEYKLLF

SEQ ID NO: 33657 - protein, 10 aa, Homo Sapiens
EYIAAFLSHF

SEQ ID NO: 33658 - protein, 10 aa, Homo Sapiens
EYIPDLYNHF

SEQ ID NO: 33659 - protein, 10 aa, Homo Sapiens
EYLKNVLLQF

SEQ ID NO: 33660 - protein, 10 aa, Homo Sapiens
EYNSDLHQFF

SEQ ID NO: 33661 - protein, 10 aa, Homo Sapiens
EYPDRIMNTF

SEQ ID NO: 33662 - protein, 10 aa, Homo Sapiens
EYPLSCFALF

SEQ ID NO: 33663 - protein, 10 aa, Homo Sapiens
EYPRSLFPSL

SEQ ID NO: 33664 - protein, 10 aa, Homo Sapiens
EYSKYLQQAF

SEQ ID NO: 33665 - protein, 10 aa, Homo Sapiens
EYYDKAFDRI

SEQ ID NO: 33666 - protein, 10 aa, Homo Sapiens
FFLIGPPLLI

SEQ ID NO: 33667 - protein, 10 aa, Homo Sapiens
FYIDKDMIHI

SEQ ID NO: 33668 - protein, 10 aa, Homo Sapiens
FYINVEREEW

SEQ ID NO: 33669 - protein, 10 aa, Homo Sapiens
FYLFPNRLEW

SEQ ID NO: 33670 - protein, 10 aa, Homo Sapiens
FYNQVSTPLL

SEQ ID NO: 33671 - protein, 10 aa, Homo Sapiens
FYPPHPDYTW

SEQ ID NO: 33672 - protein, 10 aa, Homo Sapiens
FYQKEHWNYF

SEQ ID NO: 33673 - protein, 10 aa, Homo Sapiens
FYSEILDKKF

SEQ ID NO: 33674 - protein, 10 aa, Homo Sapiens
GFIMPIEVHF

SEQ ID NO: 33675 - protein, 10 aa, Homo Sapiens
GYPETLVNLI

SEQ ID NO: 33676 - protein, 10 aa, Homo Sapiens
GYTPDWIFLL

SEQ ID NO: 33677 - protein, 10 aa, Homo Sapiens
GYYNGKWEFL

SEQ ID NO: 33678 - protein, 10 aa, Homo Sapiens
HYFDPQYFEF

SEQ ID NO: 33679 - protein, 10 aa, Homo Sapiens
HYIDAGYLGF

SEQ ID NO: 33680 - protein, 10 aa, Homo Sapiens
HYIYIENQFF

SEQ ID NO: 33681 - protein, 10 aa, Homo Sapiens
HYMPPPYASL

SEQ ID NO: 33682 - protein, 10 aa, Homo Sapiens
HYQDVSCLQF

SEQ ID NO: 33683 - protein, 10 aa, Homo Sapiens
IFFGGLVFKF

SEQ ID NO: 33684 - protein, 10 aa, Homo Sapiens
IFHPTQPWVF

SEQ ID NO: 33685 - protein, 10 aa, Homo Sapiens
IFIDPGYQTF

SEQ ID NO: 33686 - protein, 10 aa, Homo Sapiens
IFIQNSKLYF

SEQ ID NO: 33687 - protein, 10 aa, Homo Sapiens
IFLPILRTGF

SEQ ID NO: 33688 - protein, 10 aa, Homo Sapiens
IFPKPPLYTF

SEQ ID NO: 33689 - protein, 10 aa, Homo Sapiens
IFTDLYYLTF

SEQ ID NO: 33690 - protein, 10 aa, Homo Sapiens
IKYPENFFLL

SEQ ID NO: 33691 - protein, 10 aa, Homo Sapiens
IWPPFQPPAW

SEQ ID NO: 33692 - protein, 10 aa, Homo Sapiens
IYADLNQNDF

SEQ ID NO: 33693 - protein, 10 aa, Homo Sapiens
IYADNQVMHF

SEQ ID NO: 33694 - protein, 10 aa, Homo Sapiens
IYADYIAPLF

SEQ ID NO: 33695 - protein, 10 aa, Homo Sapiens
IYAGAIKSSF

SEQ ID NO: 33696 - protein, 10 aa, Homo Sapiens
IYAGVGEFSF

SEQ ID NO: 33697 - protein, 10 aa, Homo Sapiens
IYANFNRIIL

SEQ ID NO: 33698 - protein, 10 aa, Homo Sapiens
IYFASVSETF

SEQ ID NO: 33699 - protein, 10 aa, Homo Sapiens
IYFDQVLVNI

SEQ ID NO: 33700 - protein, 10 aa, Homo Sapiens
IYFKNSENLW

SEQ ID NO: 33701 - protein, 10 aa, Homo Sapiens
IYFRSYKLLL

SEQ ID NO: 33702 - protein, 10 aa, Homo Sapiens
IYGEKLQFIF

SEQ ID NO: 33703 - protein, 10 aa, Homo Sapiens
IYGHWSIMKW

SEQ ID NO: 33704 - protein, 10 aa, Homo Sapiens
IYHNPTANSF

SEQ ID NO: 33705 - protein, 10 aa, Homo Sapiens
IYHTGTFAQI

SEQ ID NO: 33706 - protein, 10 aa, Homo Sapiens
IYIDASCLTW

SEQ ID NO: 33707 - protein, 10 aa, Homo Sapiens
IYISKIVVEF

SEQ ID NO: 33708 - protein, 10 aa, Homo Sapiens
IYISTLKTEF

SEQ ID NO: 33709 - protein, 10 aa, Homo Sapiens
IYKDLPFETL

SEQ ID NO: 33710 - protein, 10 aa, Homo Sapiens
IYKPVTDFFL

SEQ ID NO: 33711 - protein, 10 aa, Homo Sapiens
IYLDTHFRLL

SEQ ID NO: 33712 - protein, 10 aa, Homo Sapiens
IYLTADNLVL

SEQ ID NO: 33713 - protein, 10 aa, Homo Sapiens
IYLTFPVAMF

SEQ ID NO: 33714 - protein, 10 aa, Homo Sapiens
IYMDTLNIFM

SEQ ID NO: 33715 - protein, 10 aa, Homo Sapiens
IYMVHIQVTL

SEQ ID NO: 33716 - protein, 10 aa, Homo Sapiens
IYNGKLFDLL

SEQ ID NO: 33717 - protein, 10 aa, Homo Sapiens
IYPDLLGLQW

SEQ ID NO: 33718 - protein, 10 aa, Homo Sapiens
IYPELQIERF

SEQ ID NO: 33719 - protein, 10 aa, Homo Sapiens
IYPEYILPGI

SEQ ID NO: 33720 - protein, 10 aa, Homo Sapiens
IYPLHELALW

SEQ ID NO: 33721 - protein, 10 aa, Homo Sapiens
IYPRTQLPTW

SEQ ID NO: 33722 - protein, 10 aa, Homo Sapiens
IYPSKWIARL

SEQ ID NO: 33723 - protein, 10 aa, Homo Sapiens
IYPSPTGVLI

SEQ ID NO: 33724 - protein, 10 aa, Homo Sapiens
IYPVDLGDKF

SEQ ID NO: 33725 - protein, 10 aa, Homo Sapiens
IYQDSFEQRF

SEQ ID NO: 33726 - protein, 10 aa, Homo Sapiens
IYSDDLGVTW

SEQ ID NO: 33727 - protein, 10 aa, Homo Sapiens
IYSDTQFPSL

SEQ ID NO: 33728 - protein, 10 aa, Homo Sapiens
IYSPLLFKYF

SEQ ID NO: 33729 - protein, 10 aa, Homo Sapiens
IYSTLLQNNI

SEQ ID NO: 33730 - protein, 10 aa, Homo Sapiens
IYTDMGRFTI

SEQ ID NO: 33731 - protein, 10 aa, Homo Sapiens
IYTEMTGKLI

SEQ ID NO: 33732 - protein, 10 aa, Homo Sapiens
IYVQALIFRL

SEQ ID NO: 33733 - protein, 10 aa, Homo Sapiens
IYYTGKYQSL

SEQ ID NO: 33734 - protein, 10 aa, Homo Sapiens
KFIDPIYQVW

SEQ ID NO: 33735 - protein, 10 aa, Homo Sapiens
KFILALKVLF

SEQ ID NO: 33736 - protein, 10 aa, Homo Sapiens
KFLEHTNFEF

SEQ ID NO: 33737 - protein, 10 aa, Homo Sapiens
KFMGVQMETF

SEQ ID NO: 33738 - protein, 10 aa, Homo Sapiens
KFMPVEGMVF

SEQ ID NO: 33739 - protein, 10 aa, Homo Sapiens
KLPNFGFVVF

SEQ ID NO: 33740 - protein, 10 aa, Homo Sapiens
KMPKMKMPTF

SEQ ID NO: 33741 - protein, 10 aa, Homo Sapiens
KWNPTAGVAF

SEQ ID NO: 33742 - protein, 10 aa, Homo Sapiens
KWYDRRDYVF

SEQ ID NO: 33743 - protein, 10 aa, Homo Sapiens
KYFEVPSVLL

SEQ ID NO: 33744 - protein, 10 aa, Homo Sapiens
KYIDQGIAEL

SEQ ID NO: 33745 - protein, 10 aa, Homo Sapiens
KYIERIITRF

SEQ ID NO: 33746 - protein, 10 aa, Homo Sapiens
KYIESPVLFL

SEQ ID NO: 33747 - protein, 10 aa, Homo Sapiens
KYIETTPLTI

SEQ ID NO: 33748 - protein, 10 aa, Homo Sapiens
KYITDWQNVF

SEQ ID NO: 33749 - protein, 10 aa, Homo Sapiens
KYLADPSNLF

SEQ ID NO: 33750 - protein, 10 aa, Homo Sapiens
KYLDVKFEYL

SEQ ID NO: 33751 - protein, 10 aa, Homo Sapiens
KYLEDFITNI

SEQ ID NO: 33752 - protein, 10 aa, Homo Sapiens
KYLEDMKTYF

SEQ ID NO: 33753 - protein, 10 aa, Homo Sapiens
KYLKPSGNMF

SEQ ID NO: 33754 - protein, 10 aa, Homo Sapiens
KYLLTPVNFF

SEQ ID NO: 33755 - protein, 10 aa, Homo Sapiens
KYLPEWTAWL

SEQ ID NO: 33756 - protein, 10 aa, Homo Sapiens
KYLSVQGQLF

SEQ ID NO: 33757 - protein, 10 aa, Homo Sapiens
KYLTEGLLQF

SEQ ID NO: 33758 - protein, 10 aa, Homo Sapiens
KYLTQVDILL

SEQ ID NO: 33759 - protein, 10 aa, Homo Sapiens
KYLVIGDLLF

SEQ ID NO: 33760 - protein, 10 aa, Homo Sapiens
KYMDVVKERI

SEQ ID NO: 33761 - protein, 10 aa, Homo Sapiens
KYMTAVVKLF

SEQ ID NO: 33762 - protein, 10 aa, Homo Sapiens
KYNIYSPLLF

SEQ ID NO: 33763 - protein, 10 aa, Homo Sapiens
KYPDLFQVNL

SEQ ID NO: 33764 - protein, 10 aa, Homo Sapiens
KYPGFLLNNF

SEQ ID NO: 33765 - protein, 10 aa, Homo Sapiens
KYQILNNEVF

SEQ ID NO: 33766 - protein, 10 aa, Homo Sapiens
KYTEITATYF

SEQ ID NO: 33767 - protein, 10 aa, Homo Sapiens
KYWDVPPPGF

SEQ ID NO: 33768 - protein, 10 aa, Homo Sapiens
KYYEDNKQFF

SEQ ID NO: 33769 - protein, 10 aa, Homo Sapiens
LFFYPLDFTF

SEQ ID NO: 33770 - protein, 10 aa, Homo Sapiens
LFLPFPLPLF

SEQ ID NO: 33771 - protein, 10 aa, Homo Sapiens
LFLPRTDYSF

SEQ ID NO: 33772 - protein, 10 aa, Homo Sapiens
LYAANPGQLF

SEQ ID NO: 33773 - protein, 10 aa, Homo Sapiens
LYADVGGKQF

SEQ ID NO: 33774 - protein, 10 aa, Homo Sapiens
LYAEIRDKNF

SEQ ID NO: 33775 - protein, 10 aa, Homo Sapiens
LYAQLVQQRF

SEQ ID NO: 33776 - protein, 10 aa, Homo Sapiens
LYAVLVHTGF

SEQ ID NO: 33777 - protein, 10 aa, Homo Sapiens
LYGELCALLF

SEQ ID NO: 33778 - protein, 10 aa, Homo Sapiens
LYIDRPLPYL

SEQ ID NO: 33779 - protein, 10 aa, Homo Sapiens
LYIPPTHTFL

SEQ ID NO: 33780 - protein, 10 aa, Homo Sapiens
LYIQTDHLFF

SEQ ID NO: 33781 - protein, 10 aa, Homo Sapiens
LYIYPQSLNF

SEQ ID NO: 33782 - protein, 10 aa, Homo Sapiens
LYLDKATLIW

SEQ ID NO: 33783 - protein, 10 aa, Homo Sapiens
LYLEPQGTLF

SEQ ID NO: 33784 - protein, 10 aa, Homo Sapiens
LYLKVKGNVF

SEQ ID NO: 33785 - protein, 10 aa, Homo Sapiens
LYMVNGPPHF

SEQ ID NO: 33786 - protein, 10 aa, Homo Sapiens
LYNKDAVIEF

SEQ ID NO: 33787 - protein, 10 aa, Homo Sapiens
LYNPKITSEL

SEQ ID NO: 33788 - protein, 10 aa, Homo Sapiens
LYPDGVFYDL

SEQ ID NO: 33789 - protein, 10 aa, Homo Sapiens
LYPHIDKQYL

SEQ ID NO: 33790 - protein, 10 aa, Homo Sapiens
LYPRLKVLAF

SEQ ID NO: 33791 - protein, 10 aa, Homo Sapiens
LYQDQILEKF

SEQ ID NO: 33792 - protein, 10 aa, Homo Sapiens
LYQILQGIVF

SEQ ID NO: 33793 - protein, 10 aa, Homo Sapiens
LYQPNFNTNF

SEQ ID NO: 33794 - protein, 10 aa, Homo Sapiens
LYRDVMRETF

SEQ ID NO: 33795 - protein, 10 aa, Homo Sapiens
LYRDVTLETF

SEQ ID NO: 33796 - protein, 10 aa, Homo Sapiens
LYSILDEVIF

SEQ ID NO: 33797 - protein, 10 aa, Homo Sapiens
LYVPALSALW

SEQ ID NO: 33798 - protein, 10 aa, Homo Sapiens
LYVYPQRLNF

SEQ ID NO: 33799 - protein, 10 aa, Homo Sapiens
MFQTAVGHSF

SEQ ID NO: 33800 - protein, 10 aa, Homo Sapiens
MWKEGNRIHF

SEQ ID NO: 33801 - protein, 10 aa, Homo Sapiens
MWSPTHPALF

SEQ ID NO: 33802 - protein, 10 aa, Homo Sapiens
MYGDYKYTYW

SEQ ID NO: 33803 - protein, 10 aa, Homo Sapiens
MYINDKLPYF

SEQ ID NO: 33804 - protein, 10 aa, Homo Sapiens
MYIVGQYPRF

SEQ ID NO: 33805 - protein, 10 aa, Homo Sapiens
MYLPEAKESF

SEQ ID NO: 33806 - protein, 10 aa, Homo Sapiens
MYMENFIEHL

SEQ ID NO: 33807 - protein, 10 aa, Homo Sapiens
MYPGLQVYTF

SEQ ID NO: 33808 - protein, 10 aa, Homo Sapiens
MYPRLGGFVM

SEQ ID NO: 33809 - protein, 10 aa, Homo Sapiens
NFLHPINTIF

SEQ ID NO: 33810 - protein, 10 aa, Homo Sapiens
NPIHYNITSI

SEQ ID NO: 33811 - protein, 10 aa, Homo Sapiens
NYAGRWDVLI

SEQ ID NO: 33812 - protein, 10 aa, Homo Sapiens
NYATGQWTRF

SEQ ID NO: 33813 - protein, 10 aa, Homo Sapiens
NYFIPEFNLF

SEQ ID NO: 33814 - protein, 10 aa, Homo Sapiens
NYGDYFNVFF

SEQ ID NO: 33815 - protein, 10 aa, Homo Sapiens
NYIDIVKYVF

SEQ ID NO: 33816 - protein, 10 aa, Homo Sapiens
NYIEKNMERF

SEQ ID NO: 33817 - protein, 10 aa, Homo Sapiens
NYITPNPIFF

SEQ ID NO: 33818 - protein, 10 aa, Homo Sapiens
NYIVPDKQIF

SEQ ID NO: 33819 - protein, 10 aa, Homo Sapiens
NYKDLNGNVF

SEQ ID NO: 33820 - protein, 10 aa, Homo Sapiens
NYKNPDQVYL

SEQ ID NO: 33821 - protein, 10 aa, Homo Sapiens
NYKPPNAEEF

SEQ ID NO: 33822 - protein, 10 aa, Homo Sapiens
NYLLESPHRF

SEQ ID NO: 33823 - protein, 10 aa, Homo Sapiens
NYMMDWKNQF

SEQ ID NO: 33824 - protein, 10 aa, Homo Sapiens
NYPDRNLPTI

SEQ ID NO: 33825 - protein, 10 aa, Homo Sapiens
NYVVIGTCTF

SEQ ID NO: 33826 - protein, 10 aa, Homo Sapiens
NYYEVHKELF

SEQ ID NO: 33827 - protein, 10 aa, Homo Sapiens
PFHPPLQLFF

SEQ ID NO: 33828 - protein, 10 aa, Homo Sapiens
PFYRGERITF

SEQ ID NO: 33829 - protein, 10 aa, Homo Sapiens
PGALLKYIGP

SEQ ID NO: 33830 - protein, 10 aa, Homo Sapiens
PWFAGNKITF

SEQ ID NO: 33831 - protein, 10 aa, Homo Sapiens
PYAKPIPAQF

SEQ ID NO: 33832 - protein, 10 aa, Homo Sapiens
PYNPIIGETF

SEQ ID NO: 33833 - protein, 10 aa, Homo Sapiens
PYSEPMPLSF

SEQ ID NO: 33834 - protein, 10 aa, Homo Sapiens
PYSPRFLEVF

SEQ ID NO: 33835 - protein, 10 aa, Homo Sapiens
PYTDVNIVTI

SEQ ID NO: 33836 - protein, 10 aa, Homo Sapiens
QVYMDWYEKF

SEQ ID NO: 33837 - protein, 10 aa, Homo Sapiens
QYFDSRGMFI

SEQ ID NO: 33838 - protein, 10 aa, Homo Sapiens
QYFSSGKYYW

SEQ ID NO: 33839 - protein, 10 aa, Homo Sapiens
QYGSALAHFF

SEQ ID NO: 33840 - protein, 10 aa, Homo Sapiens
QYLDNLLVRF

SEQ ID NO: 33841 - protein, 10 aa, Homo Sapiens
QYLHRFAAYF

SEQ ID NO: 33842 - protein, 10 aa, Homo Sapiens
QYLPAIRALW

SEQ ID NO: 33843 - protein, 10 aa, Homo Sapiens
QYLTFKPQTF

SEQ ID NO: 33844 - protein, 10 aa, Homo Sapiens
QYMEEIYHRI

SEQ ID NO: 33845 - protein, 10 aa, Homo Sapiens
QYNPKFQTLF

SEQ ID NO: 33846 - protein, 10 aa, Homo Sapiens
QYNTYPIKLF

SEQ ID NO: 33847 - protein, 10 aa, Homo Sapiens
QYPVIIHLIW

SEQ ID NO: 33848 - protein, 10 aa, Homo Sapiens
QYSDALEHLL

SEQ ID NO: 33849 - protein, 10 aa, Homo Sapiens
QYSNNIRQLL

SEQ ID NO: 33850 - protein, 10 aa, Homo Sapiens
QYWEAQGWTF

SEQ ID NO: 33851 - protein, 10 aa, Homo Sapiens
RFLDDLGLKF

SEQ ID NO: 33852 - protein, 10 aa, Homo Sapiens
RFLESHWFVW

SEQ ID NO: 33853 - protein, 10 aa, Homo Sapiens
RFPEELTQTF

SEQ ID NO: 33854 - protein, 10 aa, Homo Sapiens
RLDLPPYPSF

SEQ ID NO: 33855 - protein, 10 aa, Homo Sapiens
RLFDPINLVF

SEQ ID NO: 33856 - protein, 10 aa, Homo Sapiens
RWFQPAIPSW

SEQ ID NO: 33857 - protein, 10 aa, Homo Sapiens
RWFTHASPTL

SEQ ID NO: 33858 - protein, 10 aa, Homo Sapiens
RWLAQPYYLL

SEQ ID NO: 33859 - protein, 10 aa, Homo Sapiens
RWLDGSPVTL

SEQ ID NO: 33860 - protein, 10 aa, Homo Sapiens
RWSPVRPLVF

SEQ ID NO: 33861 - protein, 10 aa, Homo Sapiens
RWSTISENLF

SEQ ID NO: 33862 - protein, 10 aa, Homo Sapiens
RYAEEVGIFF

SEQ ID NO: 33863 - protein, 10 aa, Homo Sapiens
RYAKIVEIPF

SEQ ID NO: 33864 - protein, 10 aa, Homo Sapiens
RYAVVLNATW

SEQ ID NO: 33865 - protein, 10 aa, Homo Sapiens
RYFDPANGKF

SEQ ID NO: 33866 - protein, 10 aa, Homo Sapiens
RYFDVGLHNF

SEQ ID NO: 33867 - protein, 10 aa, Homo Sapiens
RYFISHVLAF

SEQ ID NO: 33868 - protein, 10 aa, Homo Sapiens
RYFPTQALNF

SEQ ID NO: 33869 - protein, 10 aa, Homo Sapiens
RYIDRIHIFF

SEQ ID NO: 33870 - protein, 10 aa, Homo Sapiens
RYIHPQQEAF

SEQ ID NO: 33871 - protein, 10 aa, Homo Sapiens
RYIPSLPDRI

SEQ ID NO: 33872 - protein, 10 aa, Homo Sapiens
RYIQPWESEF

SEQ ID NO: 33873 - protein, 10 aa, Homo Sapiens
RYIQWVEENF

SEQ ID NO: 33874 - protein, 10 aa, Homo Sapiens
RYKGPGFEYF

SEQ ID NO: 33875 - protein, 10 aa, Homo Sapiens
RYLDLILNDF

SEQ ID NO: 33876 - protein, 10 aa, Homo Sapiens
RYLENGKETL

SEQ ID NO: 33877 - protein, 10 aa, Homo Sapiens
RYLNKAFHIW

SEQ ID NO: 33878 - protein, 10 aa, Homo Sapiens
RYLNSQQQYF

SEQ ID NO: 33879 - protein, 10 aa, Homo Sapiens
RYLPTGSFPF

SEQ ID NO: 33880 - protein, 10 aa, Homo Sapiens
RYLRELPLLF

SEQ ID NO: 33881 - protein, 10 aa, Homo Sapiens
RYMDQWVPVI

SEQ ID NO: 33882 - protein, 10 aa, Homo Sapiens
RYMPQNPCII

SEQ ID NO: 33883 - protein, 10 aa, Homo Sapiens
RYMPQNPHII

SEQ ID NO: 33884 - protein, 10 aa, Homo Sapiens
RYPDNLKHLY

SEQ ID NO: 33885 - protein, 10 aa, Homo Sapiens
RYPDTIALTF

SEQ ID NO: 33886 - protein, 10 aa, Homo Sapiens
RYPNSHTHYF

SEQ ID NO: 33887 - protein, 10 aa, Homo Sapiens
RYPPDIRATF

SEQ ID NO: 33888 - protein, 10 aa, Homo Sapiens
RYPPKSGNYF

SEQ ID NO: 33889 - protein, 10 aa, Homo Sapiens
RYPVCKFPSL

SEQ ID NO: 33890 - protein, 10 aa, Homo Sapiens
RYPVGRFPSL

SEQ ID NO: 33891 - protein, 10 aa, Homo Sapiens
RYQNIWNINL

SEQ ID NO: 33892 - protein, 10 aa, Homo Sapiens
RYSNLILNLF

SEQ ID NO: 33893 - protein, 10 aa, Homo Sapiens
RYSTPHAFTF

SEQ ID NO: 33894 - protein, 10 aa, Homo Sapiens
RYTDIDYQVF

SEQ ID NO: 33895 - protein, 10 aa, Homo Sapiens
RYTVGGLETF

SEQ ID NO: 33896 - protein, 10 aa, Homo Sapiens
RYVFQSENTF

SEQ ID NO: 33897 - protein, 10 aa, Homo Sapiens
RYYDVPIATL

SEQ ID NO: 33898 - protein, 10 aa, Homo Sapiens
SFFKISYLTF

SEQ ID NO: 33899 - protein, 10 aa, Homo Sapiens
SWMELPGLKF

SEQ ID NO: 33900 - protein, 10 aa, Homo Sapiens
SYASLQQNKW

SEQ ID NO: 33901 - protein, 10 aa, Homo Sapiens
SYDPLRIYLF

SEQ ID NO: 33902 - protein, 10 aa, Homo Sapiens
SYFEHNLETW

SEQ ID NO: 33903 - protein, 10 aa, Homo Sapiens
SYFEKGPLTF

SEQ ID NO: 33904 - protein, 10 aa, Homo Sapiens
SYIDRLISVF

SEQ ID NO: 33905 - protein, 10 aa, Homo Sapiens
SYIPYNPQQF

SEQ ID NO: 33906 - protein, 10 aa, Homo Sapiens
SYKPAPFFVL

SEQ ID NO: 33907 - protein, 10 aa, Homo Sapiens
SYLDCELTKF

SEQ ID NO: 33908 - protein, 10 aa, Homo Sapiens
SYLDQVKLQF

SEQ ID NO: 33909 - protein, 10 aa, Homo Sapiens
SYLEKQVVTF

SEQ ID NO: 33910 - protein, 10 aa, Homo Sapiens
SYLLPAIVHI

SEQ ID NO: 33911 - protein, 10 aa, Homo Sapiens
SYLLPGMASF

SEQ ID NO: 33912 - protein, 10 aa, Homo Sapiens
SYLMYNKEHI

SEQ ID NO: 33913 - protein, 10 aa, Homo Sapiens
SYLPVGSVSF

SEQ ID NO: 33914 - protein, 10 aa, Homo Sapiens
SYMFVDENTF

SEQ ID NO: 33915 - protein, 10 aa, Homo Sapiens
SYMPARVVVF

SEQ ID NO: 33916 - protein, 10 aa, Homo Sapiens
SYNHFAAIYF

SEQ ID NO: 33917 - protein, 10 aa, Homo Sapiens
SYPELVKMVW

SEQ ID NO: 33918 - protein, 10 aa, Homo Sapiens
SYPQEVIPTF

SEQ ID NO: 33919 - protein, 10 aa, Homo Sapiens
SYVDKNLELF

SEQ ID NO: 33920 - protein, 10 aa, Homo Sapiens
TFAVTDELVF

SEQ ID NO: 33921 - protein, 10 aa, Homo Sapiens
TWFNQPARKI

SEQ ID NO: 33922 - protein, 10 aa, Homo Sapiens
TWFPKTPMLF

SEQ ID NO: 33923 - protein, 10 aa, Homo Sapiens
TWYPVSIPAF

SEQ ID NO: 33924 - protein, 10 aa, Homo Sapiens
TYFNGDLKNF

SEQ ID NO: 33925 - protein, 10 aa, Homo Sapiens
TYIIPRSVLF

SEQ ID NO: 33926 - protein, 10 aa, Homo Sapiens
TYIPGTQITF

SEQ ID NO: 33927 - protein, 10 aa, Homo Sapiens
TYIPPLLVAF

SEQ ID NO: 33928 - protein, 10 aa, Homo Sapiens
TYIRLYGRKF

SEQ ID NO: 33929 - protein, 10 aa, Homo Sapiens
TYLDQVKIRF

SEQ ID NO: 33930 - protein, 10 aa, Homo Sapiens
TYMDRVFKQF

SEQ ID NO: 33931 - protein, 10 aa, Homo Sapiens
TYMGHTGAVW

SEQ ID NO: 33932 - protein, 10 aa, Homo Sapiens
TYNEPGSQVF

SEQ ID NO: 33933 - protein, 10 aa, Homo Sapiens
TYNKHINISF

SEQ ID NO: 33934 - protein, 10 aa, Homo Sapiens
TYNPNMPFKW

SEQ ID NO: 33935 - protein, 10 aa, Homo Sapiens
TYPQLEGFKF

SEQ ID NO: 33936 - protein, 10 aa, Homo Sapiens
TYQHVPVESF

SEQ ID NO: 33937 - protein, 10 aa, Homo Sapiens
TYRPLNDVHI

SEQ ID NO: 33938 - protein, 10 aa, Homo Sapiens
TYSPALNKMF

SEQ ID NO: 33939 - protein, 10 aa, Homo Sapiens
TYTDVTPRQF

SEQ ID NO: 33940 - protein, 10 aa, Homo Sapiens
TYTSYLDKFF

SEQ ID NO: 33941 - protein, 10 aa, Homo Sapiens
VFDTAIAHLF

SEQ ID NO: 33942 - protein, 10 aa, Homo Sapiens
VFFKELIQEF

SEQ ID NO: 33943 - protein, 10 aa, Homo Sapiens
VFFKGFKWGF

SEQ ID NO: 33944 - protein, 10 aa, Homo Sapiens
VFHPSQDLVF

SEQ ID NO: 33945 - protein, 10 aa, Homo Sapiens
VFINVPTVSF

SEQ ID NO: 33946 - protein, 10 aa, Homo Sapiens
VFLNLHTLKF

SEQ ID NO: 33947 - protein, 10 aa, Homo Sapiens
VFLPREDHLF

SEQ ID NO: 33948 - protein, 10 aa, Homo Sapiens
VFMFPVGLYY

SEQ ID NO: 33949 - protein, 10 aa, Homo Sapiens
VFPRLHNVLF

SEQ ID NO: 33950 - protein, 10 aa, Homo Sapiens
VFVQGPAWQF

SEQ ID NO: 33951 - protein, 10 aa, Homo Sapiens
VQPRNWLLFA

SEQ ID NO: 33952 - protein, 10 aa, Homo Sapiens
VSAAGLVQGL

SEQ ID NO: 33953 - protein, 10 aa, Homo Sapiens
VWDTAGQEKF

SEQ ID NO: 33954 - protein, 10 aa, Homo Sapiens
VWFPDMMPTW

SEQ ID NO: 33955 - protein, 10 aa, Homo Sapiens
VWLEEELKTF

SEQ ID NO: 33956 - protein, 10 aa, Homo Sapiens
VWNPRSHEKL

SEQ ID NO: 33957 - protein, 10 aa, Homo Sapiens
VWTPIPVLTW

SEQ ID NO: 33958 - protein, 10 aa, Homo Sapiens
VYAALQRQLL

SEQ ID NO: 33959 - protein, 10 aa, Homo Sapiens
VYADTCFSTI

SEQ ID NO: 33960 - protein, 10 aa, Homo Sapiens
VYAEVSRLLL

SEQ ID NO: 33961 - protein, 10 aa, Homo Sapiens
VYAHIYHQHF

SEQ ID NO: 33962 - protein, 10 aa, Homo Sapiens
VYAILTHGIF

SEQ ID NO: 33963 - protein, 10 aa, Homo Sapiens
VYAVIPAEKF

SEQ ID NO: 33964 - protein, 10 aa, Homo Sapiens
VYDDMAFRYL

SEQ ID NO: 33965 - protein, 10 aa, Homo Sapiens
VYDPSLKTLL

SEQ ID NO: 33966 - protein, 10 aa, Homo Sapiens
VYFEGSDFKF

SEQ ID NO: 33967 - protein, 10 aa, Homo Sapiens
VYFEGSIYEI

SEQ ID NO: 33968 - protein, 10 aa, Homo Sapiens
VYFPALTSLL

SEQ ID NO: 33969 - protein, 10 aa, Homo Sapiens
VYIHPSSALF

SEQ ID NO: 33970 - protein, 10 aa, Homo Sapiens
VYILPAAYFW

SEQ ID NO: 33971 - protein, 10 aa, Homo Sapiens
VYIPVLPPHL

SEQ ID NO: 33972 - protein, 10 aa, Homo Sapiens
VYIRGSKIRF

SEQ ID NO: 33973 - protein, 10 aa, Homo Sapiens
VYITNFHVRM

SEQ ID NO: 33974 - protein, 10 aa, Homo Sapiens
VYITNYRLYL

SEQ ID NO: 33975 - protein, 10 aa, Homo Sapiens
VYKAFVMETF

SEQ ID NO: 33976 - protein, 10 aa, Homo Sapiens
VYKDSFELKF

SEQ ID NO: 33977 - protein, 10 aa, Homo Sapiens
VYLAKLGNFF

SEQ ID NO: 33978 - protein, 10 aa, Homo Sapiens
VYLDRKLLTL

SEQ ID NO: 33979 - protein, 10 aa, Homo Sapiens
VYLGLPIFRF

SEQ ID NO: 33980 - protein, 10 aa, Homo Sapiens
VYLPCLQNIF

SEQ ID NO: 33981 - protein, 10 aa, Homo Sapiens
VYLPGSRQTL

SEQ ID NO: 33982 - protein, 10 aa, Homo Sapiens
VYLPPEAFTF

SEQ ID NO: 33983 - protein, 10 aa, Homo Sapiens
VYLQNWSHVL

SEQ ID NO: 33984 - protein, 10 aa, Homo Sapiens
VYLTIKPLNL

SEQ ID NO: 33985 - protein, 10 aa, Homo Sapiens
VYNEKIHDLL

SEQ ID NO: 33986 - protein, 10 aa, Homo Sapiens
VYNENLVHMI

SEQ ID NO: 33987 - protein, 10 aa, Homo Sapiens
VYNEQIRDLL

SEQ ID NO: 33988 - protein, 10 aa, Homo Sapiens
VYNIHLAVNF

SEQ ID NO: 33989 - protein, 10 aa, Homo Sapiens
VYNNIMRHYL

SEQ ID NO: 33990 - protein, 10 aa, Homo Sapiens
VYNPLLFDKL

SEQ ID NO: 33991 - protein, 10 aa, Homo Sapiens
VYNSWKNNKF

SEQ ID NO: 33992 - protein, 10 aa, Homo Sapiens
VYPDTVALTF

SEQ ID NO: 33993 - protein, 10 aa, Homo Sapiens
VYPEKLATKF

SEQ ID NO: 33994 - protein, 10 aa, Homo Sapiens
VYPESIPRKF

SEQ ID NO: 33995 - protein, 10 aa, Homo Sapiens
VYPLYTIVFI

SEQ ID NO: 33996 - protein, 10 aa, Homo Sapiens
VYQPVTTECF

SEQ ID NO: 33997 - protein, 10 aa, Homo Sapiens
VYSAAILEYL

SEQ ID NO: 33998 - protein, 10 aa, Homo Sapiens
VYSDLHAFYY

SEQ ID NO: 33999 - protein, 10 aa, Homo Sapiens
VYSEVAAYEF

SEQ ID NO: 34000 - protein, 10 aa, Homo Sapiens
VYSIINGIVF

SEQ ID NO: 34001 - protein, 10 aa, Homo Sapiens
VYSPNMRWII

SEQ ID NO: 34002 - protein, 10 aa, Homo Sapiens
VYTLDIPVLF

SEQ ID NO: 34003 - protein, 10 aa, Homo Sapiens
VYTPTDTLVF

SEQ ID NO: 34004 - protein, 10 aa, Homo Sapiens
VYTPVDSLVF

SEQ ID NO: 34005 - protein, 10 aa, Homo Sapiens
VYTVVDEMFL

SEQ ID NO: 34006 - protein, 10 aa, Homo Sapiens
VYVDFEGINF

SEQ ID NO: 34007 - protein, 10 aa, Homo Sapiens
VYVPKEEQLF

SEQ ID NO: 34008 - protein, 10 aa, Homo Sapiens
WYPFFRGVTI

SEQ ID NO: 34009 - protein, 10 aa, Homo Sapiens
YFFDAAKLMF

SEQ ID NO: 34010 - protein, 10 aa, Homo Sapiens
YFISPQGLKF

SEQ ID NO: 34011 - protein, 10 aa, Homo Sapiens
YFISPTGHSL

SEQ ID NO: 34012 - protein, 10 aa, Homo Sapiens
YNILRGIGKL

SEQ ID NO: 34013 - protein, 10 aa, Homo Sapiens
YWKIYNSIYI

SEQ ID NO: 34014 - protein, 10 aa, Homo Sapiens
YYDDLKYRYF

SEQ ID NO: 34015 - protein, 10 aa, Homo Sapiens
YYFEGIKQTF

SEQ ID NO: 34016 - protein, 10 aa, Homo Sapiens
YYGPLNLLTF

SEQ ID NO: 34017 - protein, 10 aa, Homo Sapiens
YYIDDVFHAL

SEQ ID NO: 34018 - protein, 10 aa, Homo Sapiens
YYINKISSTL

SEQ ID NO: 34019 - protein, 10 aa, Homo Sapiens
YYIQNGIQSF

SEQ ID NO: 34020 - protein, 10 aa, Homo Sapiens
YYLQGGFNKF

SEQ ID NO: 34021 - protein, 10 aa, Homo Sapiens
YYLQHPPISF

SEQ ID NO: 34022 - protein, 10 aa, Homo Sapiens
YYLTPDGQRF

SEQ ID NO: 34023 - protein, 10 aa, Homo Sapiens
YYMELTKLLL

SEQ ID NO: 34024 - protein, 10 aa, Homo Sapiens
YYMKDLPTSF

SEQ ID NO: 34025 - protein, 10 aa, Homo Sapiens
YYMTPRDFLF

SEQ ID NO: 34026 - protein, 10 aa, Homo Sapiens
YYNAAGFNKL

SEQ ID NO: 34027 - protein, 10 aa, Homo Sapiens
YYNKVSTVFW

SEQ ID NO: 34028 - protein, 10 aa, Homo Sapiens
YYPAQGVQQF

SEQ ID NO: 34029 - protein, 10 aa, Homo Sapiens
YYQTPRLWLF

SEQ ID NO: 34030 - protein, 10 aa, Homo Sapiens
YYSHLEGARF

SEQ ID NO: 34031 - protein, 10 aa, Homo Sapiens
YYTWTDGYRF

SEQ ID NO: 34032 - protein, 11 aa, Homo Sapiens
AFLDKQNQVKF

SEQ ID NO: 34033 - protein, 11 aa, Homo Sapiens
AFLEINRQLLF

SEQ ID NO: 34034 - protein, 11 aa, Homo Sapiens
ARLQQLLFVIF

SEQ ID NO: 34035 - protein, 11 aa, Homo Sapiens
AWLPHVADFRW

SEQ ID NO: 34036 - protein, 11 aa, Homo Sapiens
AYAPQGWIAFF

SEQ ID NO: 34037 - protein, 11 aa, Homo Sapiens
AYATFIVTNYW

SEQ ID NO: 34038 - protein, 11 aa, Homo Sapiens
AYIPLNNYLVF

SEQ ID NO: 34039 - protein, 11 aa, Homo Sapiens
AYLECIERITF

SEQ ID NO: 34040 - protein, 11 aa, Homo Sapiens
AYLPVNESFGF

SEQ ID NO: 34041 - protein, 11 aa, Homo Sapiens
AYMELQQKAEF

SEQ ID NO: 34042 - protein, 11 aa, Homo Sapiens
AYMQEPLFVEF

SEQ ID NO: 34043 - protein, 11 aa, Homo Sapiens
AYPPAPFMHIL

SEQ ID NO: 34044 - protein, 11 aa, Homo Sapiens
AYSTAPGYYSW

SEQ ID NO: 34045 - protein, 11 aa, Homo Sapiens
AYSTVPGYYSW

SEQ ID NO: 34046 - protein, 11 aa, Homo Sapiens
AYYPAQGVQQF

SEQ ID NO: 34047 - protein, 11 aa, Homo Sapiens
AYYSHLEGARF

SEQ ID NO: 34048 - protein, 11 aa, Homo Sapiens
DYIDGILIKTF

SEQ ID NO: 34049 - protein, 11 aa, Homo Sapiens
DYLDSIYFNRF

SEQ ID NO: 34050 - protein, 11 aa, Homo Sapiens
DYVPPELITLF

SEQ ID NO: 34051 - protein, 11 aa, Homo Sapiens
EFPDKVFAEKW

SEQ ID NO: 34052 - protein, 11 aa, Homo Sapiens
EWSPYTKIFQF

SEQ ID NO: 34053 - protein, 11 aa, Homo Sapiens
EYFRVPDSATF

SEQ ID NO: 34054 - protein, 11 aa, Homo Sapiens
EYIPEGEILVI

SEQ ID NO: 34055 - protein, 11 aa, Homo Sapiens
EYLDRIGQLFF

SEQ ID NO: 34056 - protein, 11 aa, Homo Sapiens
EYLPIGGLAEF

SEQ ID NO: 34057 - protein, 11 aa, Homo Sapiens
EYLSKQDLLFL

SEQ ID NO: 34058 - protein, 11 aa, Homo Sapiens
EYLTPEEMVTF

SEQ ID NO: 34059 - protein, 11 aa, Homo Sapiens
EYMLEKSFYQF

SEQ ID NO: 34060 - protein, 11 aa, Homo Sapiens
EYMPGGDLVNL

SEQ ID NO: 34061 - protein, 11 aa, Homo Sapiens
EYMRSGLYSTF

SEQ ID NO: 34062 - protein, 11 aa, Homo Sapiens
EYQLIDCAQYF

SEQ ID NO: 34063 - protein, 11 aa, Homo Sapiens
EYSLFPGQVVI

SEQ ID NO: 34064 - protein, 11 aa, Homo Sapiens
EYVDDTQFLRF

SEQ ID NO: 34065 - protein, 11 aa, Homo Sapiens
FYIPDGSFTNI

SEQ ID NO: 34066 - protein, 11 aa, Homo Sapiens
FYIPPLATHTI

SEQ ID NO: 34067 - protein, 11 aa, Homo Sapiens
FYLNQSTAYHF

SEQ ID NO: 34068 - protein, 11 aa, Homo Sapiens
FYLPGLAPVNF

SEQ ID NO: 34069 - protein, 11 aa, Homo Sapiens
FYLPKDAVKHL

SEQ ID NO: 34070 - protein, 11 aa, Homo Sapiens
FYLPLDAIKQL

SEQ ID NO: 34071 - protein, 11 aa, Homo Sapiens
FYPEEVSSMVL

SEQ ID NO: 34072 - protein, 11 aa, Homo Sapiens
FYQPDLKYLSF

SEQ ID NO: 34073 - protein, 11 aa, Homo Sapiens
FYVPAEPKLAF

SEQ ID NO: 34074 - protein, 11 aa, Homo Sapiens
GFYPAEITLTW

SEQ ID NO: 34075 - protein, 11 aa, Homo Sapiens
GWLPPELLGLW

SEQ ID NO: 34076 - protein, 11 aa, Homo Sapiens
GWYDEEHPLVF

SEQ ID NO: 34077 - protein, 11 aa, Homo Sapiens
GYADKNLIAKW

SEQ ID NO: 34078 - protein, 11 aa, Homo Sapiens
GYLPNQLFRTF

SEQ ID NO: 34079 - protein, 11 aa, Homo Sapiens
HYNSDLNNLLF

SEQ ID NO: 34080 - protein, 11 aa, Homo Sapiens
HYSQELSLLYL

SEQ ID NO: 34081 - protein, 11 aa, Homo Sapiens
HYVDLKDRPFF

SEQ ID NO: 34082 - protein, 11 aa, Homo Sapiens
IFITEKHGNYF

SEQ ID NO: 34083 - protein, 11 aa, Homo Sapiens
IFKPPDPDNTF

SEQ ID NO: 34084 - protein, 11 aa, Homo Sapiens
IFLDPHTTQTF

SEQ ID NO: 34085 - protein, 11 aa, Homo Sapiens
IFSPTSNLLLL

SEQ ID NO: 34086 - protein, 11 aa, Homo Sapiens
IFSQKLGYLLF

SEQ ID NO: 34087 - protein, 11 aa, Homo Sapiens
IFSTITSKMNL

SEQ ID NO: 34088 - protein, 11 aa, Homo Sapiens
IYAKVDRLEAF

SEQ ID NO: 34089 - protein, 11 aa, Homo Sapiens
IYDHINEGKLW

SEQ ID NO: 34090 - protein, 11 aa, Homo Sapiens
IYDPNLAFLRF

SEQ ID NO: 34091 - protein, 11 aa, Homo Sapiens
IYDTSTDRLLW

SEQ ID NO: 34092 - protein, 11 aa, Homo Sapiens
IYEIIDNSQGF

SEQ ID NO: 34093 - protein, 11 aa, Homo Sapiens
IYFPEGSGVKI

SEQ ID NO: 34094 - protein, 11 aa, Homo Sapiens
IYFPKKEAVTF

SEQ ID NO: 34095 - protein, 11 aa, Homo Sapiens
IYLAPGDYHCF

SEQ ID NO: 34096 - protein, 11 aa, Homo Sapiens
IYLLENGLNLF

SEQ ID NO: 34097 - protein, 11 aa, Homo Sapiens
IYLNHIEPLKI

SEQ ID NO: 34098 - protein, 11 aa, Homo Sapiens
IYLPEADSILF

SEQ ID NO: 34099 - protein, 11 aa, Homo Sapiens
IYLPIANVARI

SEQ ID NO: 34100 - protein, 11 aa, Homo Sapiens
IYMEDGLIKQI

SEQ ID NO: 34101 - protein, 11 aa, Homo Sapiens
IYNGDMEKILL

SEQ ID NO: 34102 - protein, 11 aa, Homo Sapiens
IYPATIASIDF

SEQ ID NO: 34103 - protein, 11 aa, Homo Sapiens
IYPPINVLPSL

SEQ ID NO: 34104 - protein, 11 aa, Homo Sapiens
IYPSNMQTMLL

SEQ ID NO: 34105 - protein, 11 aa, Homo Sapiens
IYPTGLFTPEL

SEQ ID NO: 34106 - protein, 11 aa, Homo Sapiens
IYQDRDQFAKL

SEQ ID NO: 34107 - protein, 11 aa, Homo Sapiens
IYQEIILANHF

SEQ ID NO: 34108 - protein, 11 aa, Homo Sapiens
IYREFREEESL

SEQ ID NO: 34109 - protein, 11 aa, Homo Sapiens
IYRGPFADENF

SEQ ID NO: 34110 - protein, 11 aa, Homo Sapiens
IYSEVMEALKL

SEQ ID NO: 34111 - protein, 11 aa, Homo Sapiens
IYSPDHSSNNF

SEQ ID NO: 34112 - protein, 11 aa, Homo Sapiens
IYSPDHTNNSF

SEQ ID NO: 34113 - protein, 11 aa, Homo Sapiens
IYSRIDRLEAF

SEQ ID NO: 34114 - protein, 11 aa, Homo Sapiens
IYSTLVTCVTF

SEQ ID NO: 34115 - protein, 11 aa, Homo Sapiens
IYSVFRNAASF

SEQ ID NO: 34116 - protein, 11 aa, Homo Sapiens
IYTDQAGQWRI

SEQ ID NO: 34117 - protein, 11 aa, Homo Sapiens
IYTHGLALLGF

SEQ ID NO: 34118 - protein, 11 aa, Homo Sapiens
IYTVKVEDLTF

SEQ ID NO: 34119 - protein, 11 aa, Homo Sapiens
IYVGIESNHLL

SEQ ID NO: 34120 - protein, 11 aa, Homo Sapiens
IYVNPANTHQF

SEQ ID NO: 34121 - protein, 11 aa, Homo Sapiens
KFYPPKVELFF

SEQ ID NO: 34122 - protein, 11 aa, Homo Sapiens
KIKYPENFFLL

SEQ ID NO: 34123 - protein, 11 aa, Homo Sapiens
KLPDVYGVFQF

SEQ ID NO: 34124 - protein, 11 aa, Homo Sapiens
KWFTDTSIILF

SEQ ID NO: 34125 - protein, 11 aa, Homo Sapiens
KWFTETSIILF

SEQ ID NO: 34126 - protein, 11 aa, Homo Sapiens
KWLEPLKNLRF

SEQ ID NO: 34127 - protein, 11 aa, Homo Sapiens
KYDPSIGIYGL

SEQ ID NO: 34128 - protein, 11 aa, Homo Sapiens
KYFAQEALTVL

SEQ ID NO: 34129 - protein, 11 aa, Homo Sapiens
KYIDKTIRVKF

SEQ ID NO: 34130 - protein, 11 aa, Homo Sapiens
KYIDQKFVLQL

SEQ ID NO: 34131 - protein, 11 aa, Homo Sapiens
KYIENLDNITF

SEQ ID NO: 34132 - protein, 11 aa, Homo Sapiens
KYISKPENLKL

SEQ ID NO: 34133 - protein, 11 aa, Homo Sapiens
KYISPETMVAL

SEQ ID NO: 34134 - protein, 11 aa, Homo Sapiens
KYITQGQLLQF

SEQ ID NO: 34135 - protein, 11 aa, Homo Sapiens
KYKNSEINFSF

SEQ ID NO: 34136 - protein, 11 aa, Homo Sapiens
KYLAILGSVTF

SEQ ID NO: 34137 - protein, 11 aa, Homo Sapiens
KYLDEDTIYHL

SEQ ID NO: 34138 - protein, 11 aa, Homo Sapiens
KYLDEFLLNKI

SEQ ID NO: 34139 - protein, 11 aa, Homo Sapiens
KYLEESTIRHF

SEQ ID NO: 34140 - protein, 11 aa, Homo Sapiens
KYLNENQLSQL

SEQ ID NO: 34141 - protein, 11 aa, Homo Sapiens
KYLNWDAVFRF

SEQ ID NO: 34142 - protein, 11 aa, Homo Sapiens
KYLYEEYLQAF

SEQ ID NO: 34143 - protein, 11 aa, Homo Sapiens
KYMGIPQIRQL

SEQ ID NO: 34144 - protein, 11 aa, Homo Sapiens
KYMPNVKVAVF

SEQ ID NO: 34145 - protein, 11 aa, Homo Sapiens
KYMPSVKVSVF

SEQ ID NO: 34146 - protein, 11 aa, Homo Sapiens
KYPENDLFRKL

SEQ ID NO: 34147 - protein, 11 aa, Homo Sapiens
KYPGHLAAITL

SEQ ID NO: 34148 - protein, 11 aa, Homo Sapiens
KYQEVTNNLEF

SEQ ID NO: 34149 - protein, 11 aa, Homo Sapiens
KYSVINEINKI

SEQ ID NO: 34150 - protein, 11 aa, Homo Sapiens
LFIPSSKLLFL

SEQ ID NO: 34151 - protein, 11 aa, Homo Sapiens
LFLDSNGLFLF

SEQ ID NO: 34152 - protein, 11 aa, Homo Sapiens
LPISTPHPIGF

SEQ ID NO: 34153 - protein, 11 aa, Homo Sapiens
LYIGWDKHYGF

SEQ ID NO: 34154 - protein, 11 aa, Homo Sapiens
LYISEAEGLKF

SEQ ID NO: 34155 - protein, 11 aa, Homo Sapiens
LYLPQEQLTHW

SEQ ID NO: 34156 - protein, 11 aa, Homo Sapiens
LYPAAQLQHLW

SEQ ID NO: 34157 - protein, 11 aa, Homo Sapiens
LYPDRELQSQW

SEQ ID NO: 34158 - protein, 11 aa, Homo Sapiens
LYPNIDKDHAF

SEQ ID NO: 34159 - protein, 11 aa, Homo Sapiens
LYYTWTDGYRF

SEQ ID NO: 34160 - protein, 11 aa, Homo Sapiens
MYADPNFVRTF

SEQ ID NO: 34161 - protein, 11 aa, Homo Sapiens
MYMTVSIIDRF

SEQ ID NO: 34162 - protein, 11 aa, Homo Sapiens
NYAIFDEGHML

SEQ ID NO: 34163 - protein, 11 aa, Homo Sapiens
NYFFDAAKLMF

SEQ ID NO: 34164 - protein, 11 aa, Homo Sapiens
NYFPGGVALIW

SEQ ID NO: 34165 - protein, 11 aa, Homo Sapiens
NYIPQGSIDSL

SEQ ID NO: 34166 - protein, 11 aa, Homo Sapiens
NYIPVKNGKQF

SEQ ID NO: 34167 - protein, 11 aa, Homo Sapiens
NYIPYLTKLKF

SEQ ID NO: 34168 - protein, 11 aa, Homo Sapiens
NYKSEEEFIHI

SEQ ID NO: 34169 - protein, 11 aa, Homo Sapiens
NYLDPRISIAW

SEQ ID NO: 34170 - protein, 11 aa, Homo Sapiens
NYLDPRITVAW

SEQ ID NO: 34171 - protein, 11 aa, Homo Sapiens
NYLPAINGIVF

SEQ ID NO: 34172 - protein, 11 aa, Homo Sapiens
NYNPYIGGLGI

SEQ ID NO: 34173 - protein, 11 aa, Homo Sapiens
NYPETLGRLLI

SEQ ID NO: 34174 - protein, 11 aa, Homo Sapiens
NYPPQYLILKL

SEQ ID NO: 34175 - protein, 11 aa, Homo Sapiens
NYSDVMSKLGF

SEQ ID NO: 34176 - protein, 11 aa, Homo Sapiens
NYSGAAEYLYF

SEQ ID NO: 34177 - protein, 11 aa, Homo Sapiens
NYSPVSRIGLF

SEQ ID NO: 34178 - protein, 11 aa, Homo Sapiens
NYSTVPQKQTL

SEQ ID NO: 34179 - protein, 11 aa, Homo Sapiens
NYVEEKLIPTW

SEQ ID NO: 34180 - protein, 11 aa, Homo Sapiens
NYYPGSLFLTW

SEQ ID NO: 34181 - protein, 11 aa, Homo Sapiens
PFFNPIQTQVF

SEQ ID NO: 34182 - protein, 11 aa, Homo Sapiens
PFIKSQHELLF

SEQ ID NO: 34183 - protein, 11 aa, Homo Sapiens
PYFPIPEEYTF

SEQ ID NO: 34184 - protein, 11 aa, Homo Sapiens
PYMDSPQSIGF

SEQ ID NO: 34185 - protein, 11 aa, Homo Sapiens
PYPGCEFFKEY

SEQ ID NO: 34186 - protein, 11 aa, Homo Sapiens
PYQATIDGVRF

SEQ ID NO: 34187 - protein, 11 aa, Homo Sapiens
PYQNGFTFHTW

SEQ ID NO: 34188 - protein, 11 aa, Homo Sapiens
PYSDKLFEMVL

SEQ ID NO: 34189 - protein, 11 aa, Homo Sapiens
QLPQPDVFPLF

SEQ ID NO: 34190 - protein, 11 aa, Homo Sapiens
QWPQPDKPMFF

SEQ ID NO: 34191 - protein, 11 aa, Homo Sapiens
QYGIFPDNFTF

SEQ ID NO: 34192 - protein, 11 aa, Homo Sapiens
QYLNKNALTTL

SEQ ID NO: 34193 - protein, 11 aa, Homo Sapiens
QYPPVNWAALL

SEQ ID NO: 34194 - protein, 11 aa, Homo Sapiens
QYPVYWDHLEF

SEQ ID NO: 34195 - protein, 11 aa, Homo Sapiens
QYQDTKGFSTW

SEQ ID NO: 34196 - protein, 11 aa, Homo Sapiens
QYSRFSLENNF

SEQ ID NO: 34197 - protein, 11 aa, Homo Sapiens
RFAHGTAGLVF

SEQ ID NO: 34198 - protein, 11 aa, Homo Sapiens
RFFPYTSSQMF

SEQ ID NO: 34199 - protein, 11 aa, Homo Sapiens
RFLAEEGFYKF

SEQ ID NO: 34200 - protein, 11 aa, Homo Sapiens
RFLNAENAQKF

SEQ ID NO: 34201 - protein, 11 aa, Homo Sapiens
RFLNDPGHLLW

SEQ ID NO: 34202 - protein, 11 aa, Homo Sapiens
RFRPVPLGQTF

SEQ ID NO: 34203 - protein, 11 aa, Homo Sapiens
RWFTHASPTLF

SEQ ID NO: 34204 - protein, 11 aa, Homo Sapiens
RWLKDSSLLTL

SEQ ID NO: 34205 - protein, 11 aa, Homo Sapiens
RWLPQKNAAQF

SEQ ID NO: 34206 - protein, 11 aa, Homo Sapiens
RYAPPPSFSEF

SEQ ID NO: 34207 - protein, 11 aa, Homo Sapiens
RYFDVGLHNFL

SEQ ID NO: 34208 - protein, 11 aa, Homo Sapiens
RYFISHVLAFF

SEQ ID NO: 34209 - protein, 11 aa, Homo Sapiens
RYFPDRNVALF

SEQ ID NO: 34210 - protein, 11 aa, Homo Sapiens
RYGLPAAWSTF

SEQ ID NO: 34211 - protein, 11 aa, Homo Sapiens
RYIEFHSQSGF

SEQ ID NO: 34212 - protein, 11 aa, Homo Sapiens
RYISDQLFTNF

SEQ ID NO: 34213 - protein, 11 aa, Homo Sapiens
RYISPDQLADL

SEQ ID NO: 34214 - protein, 11 aa, Homo Sapiens
RYITEALIKKL

SEQ ID NO: 34215 - protein, 11 aa, Homo Sapiens
RYLDSLKAIVF

SEQ ID NO: 34216 - protein, 11 aa, Homo Sapiens
RYLDVSILGKF

SEQ ID NO: 34217 - protein, 11 aa, Homo Sapiens
RYLMDPDTFTF

SEQ ID NO: 34218 - protein, 11 aa, Homo Sapiens
RYLPEDFMESL

SEQ ID NO: 34219 - protein, 11 aa, Homo Sapiens
RYLPTGSFPFL

SEQ ID NO: 34220 - protein, 11 aa, Homo Sapiens
RYLSPKWIKMF

SEQ ID NO: 34221 - protein, 11 aa, Homo Sapiens
RYLSPKYIKMF

SEQ ID NO: 34222 - protein, 11 aa, Homo Sapiens
RYMDLAENARF

SEQ ID NO: 34223 - protein, 11 aa, Homo Sapiens
RYMLTAGLTAF

SEQ ID NO: 34224 - protein, 11 aa, Homo Sapiens
RYMSPMEAQEF

SEQ ID NO: 34225 - protein, 11 aa, Homo Sapiens
RYNERLDRLFI

SEQ ID NO: 34226 - protein, 11 aa, Homo Sapiens
RYPDNLKHLYL

SEQ ID NO: 34227 - protein, 11 aa, Homo Sapiens
RYPNKLDTITW

SEQ ID NO: 34228 - protein, 11 aa, Homo Sapiens
RYPSTGMLVLF

SEQ ID NO: 34229 - protein, 11 aa, Homo Sapiens
RYPTSIASLAF

SEQ ID NO: 34230 - protein, 11 aa, Homo Sapiens
RYQDGVYWAEF

SEQ ID NO: 34231 - protein, 11 aa, Homo Sapiens
RYQESLGNTVF

SEQ ID NO: 34232 - protein, 11 aa, Homo Sapiens
RYRPDMPCFLL

SEQ ID NO: 34233 - protein, 11 aa, Homo Sapiens
RYSAGWDAKFF

SEQ ID NO: 34234 - protein, 11 aa, Homo Sapiens
RYSEAITQSVL

SEQ ID NO: 34235 - protein, 11 aa, Homo Sapiens
RYSGVNQSMLF

SEQ ID NO: 34236 - protein, 11 aa, Homo Sapiens
RYSTGLAGNLL

SEQ ID NO: 34237 - protein, 11 aa, Homo Sapiens
RYTNGHLFTTI

SEQ ID NO: 34238 - protein, 11 aa, Homo Sapiens
RYTPEQDTMTF

SEQ ID NO: 34239 - protein, 11 aa, Homo Sapiens
RYVASYLLAAL

SEQ ID NO: 34240 - protein, 11 aa, Homo Sapiens
RYVEQKAGITF

SEQ ID NO: 34241 - protein, 11 aa, Homo Sapiens
RYVLYPNNFQF

SEQ ID NO: 34242 - protein, 11 aa, Homo Sapiens
RYYFEGIKQTF

SEQ ID NO: 34243 - protein, 11 aa, Homo Sapiens
SFLHGNASLLF

SEQ ID NO: 34244 - protein, 11 aa, Homo Sapiens
SFLPGLHLLTF

SEQ ID NO: 34245 - protein, 11 aa, Homo Sapiens
SFMPNSPRFLL

SEQ ID NO: 34246 - protein, 11 aa, Homo Sapiens
SFNPLTSLLQW

SEQ ID NO: 34247 - protein, 11 aa, Homo Sapiens
SYINPDHLKYF

SEQ ID NO: 34248 - protein, 11 aa, Homo Sapiens
SYIPIFPQLYF

SEQ ID NO: 34249 - protein, 11 aa, Homo Sapiens
SYIRPEDIVNF

SEQ ID NO: 34250 - protein, 11 aa, Homo Sapiens
SYISDGKEYLF

SEQ ID NO: 34251 - protein, 11 aa, Homo Sapiens
SYLDMSKVIIF

SEQ ID NO: 34252 - protein, 11 aa, Homo Sapiens
SYLEPGSIRHI

SEQ ID NO: 34253 - protein, 11 aa, Homo Sapiens
SYLEPTSVTNF

SEQ ID NO: 34254 - protein, 11 aa, Homo Sapiens
SYLERHGLINF

SEQ ID NO: 34255 - protein, 11 aa, Homo Sapiens
SYLKGDNFFRF

SEQ ID NO: 34256 - protein, 11 aa, Homo Sapiens
SYLSHSEQLVF

SEQ ID NO: 34257 - protein, 11 aa, Homo Sapiens
SYMEVPTYLNF

SEQ ID NO: 34258 - protein, 11 aa, Homo Sapiens
SYMGHFDLLNY

SEQ ID NO: 34259 - protein, 11 aa, Homo Sapiens
SYMVRELLIQF

SEQ ID NO: 34260 - protein, 11 aa, Homo Sapiens
SYMWTINNFSF

SEQ ID NO: 34261 - protein, 11 aa, Homo Sapiens
SYNPAENAVLL

SEQ ID NO: 34262 - protein, 11 aa, Homo Sapiens
SYPTFFPRFEF

SEQ ID NO: 34263 - protein, 11 aa, Homo Sapiens
SYTPVGLIQNL

SEQ ID NO: 34264 - protein, 11 aa, Homo Sapiens
SYVCPDLVKEF

SEQ ID NO: 34265 - protein, 11 aa, Homo Sapiens
SYYGPLNLLTF

SEQ ID NO: 34266 - protein, 11 aa, Homo Sapiens
TLPSRVFHPAF

SEQ ID NO: 34267 - protein, 11 aa, Homo Sapiens
TWFTAGAKLLF

SEQ ID NO: 34268 - protein, 11 aa, Homo Sapiens
TWLVNSAAHLF

SEQ ID NO: 34269 - protein, 11 aa, Homo Sapiens
TWSADSKVLLF

SEQ ID NO: 34270 - protein, 11 aa, Homo Sapiens
TYAELMQTLRF

SEQ ID NO: 34271 - protein, 11 aa, Homo Sapiens
TYAPLFSLPSF

SEQ ID NO: 34272 - protein, 11 aa, Homo Sapiens
TYFPTWEGLFW

SEQ ID NO: 34273 - protein, 11 aa, Homo Sapiens
TYGDAGLTYTF

SEQ ID NO: 34274 - protein, 11 aa, Homo Sapiens
TYGGSWKFLTF

SEQ ID NO: 34275 - protein, 11 aa, Homo Sapiens
TYHEVVDEIYF

SEQ ID NO: 34276 - protein, 11 aa, Homo Sapiens
TYIHALDNGLF

SEQ ID NO: 34277 - protein, 11 aa, Homo Sapiens
TYIPSTQNPAF

SEQ ID NO: 34278 - protein, 11 aa, Homo Sapiens
TYLDLLGTWVF

SEQ ID NO: 34279 - protein, 11 aa, Homo Sapiens
TYLEAHRIVKM

SEQ ID NO: 34280 - protein, 11 aa, Homo Sapiens
TYLPAGQSVLL

SEQ ID NO: 34281 - protein, 11 aa, Homo Sapiens
TYLPREILNLI

SEQ ID NO: 34282 - protein, 11 aa, Homo Sapiens
TYMDAQLFKKV

SEQ ID NO: 34283 - protein, 11 aa, Homo Sapiens
TYPEGLEVLHF

SEQ ID NO: 34284 - protein, 11 aa, Homo Sapiens
TYPNTYIFDLF

SEQ ID NO: 34285 - protein, 11 aa, Homo Sapiens
TYPSQDVFLVI

SEQ ID NO: 34286 - protein, 11 aa, Homo Sapiens
TYSPFGDSPLF

SEQ ID NO: 34287 - protein, 11 aa, Homo Sapiens
TYTDVTPRQFF

SEQ ID NO: 34288 - protein, 11 aa, Homo Sapiens
TYTNAFAFTQF

SEQ ID NO: 34289 - protein, 11 aa, Homo Sapiens
VFMKPGLPTTF

SEQ ID NO: 34290 - protein, 11 aa, Homo Sapiens
VFPSMPIKLQL

SEQ ID NO: 34291 - protein, 11 aa, Homo Sapiens
VLPDADTLLHF

SEQ ID NO: 34292 - protein, 11 aa, Homo Sapiens
VLPNSDFLVHF

SEQ ID NO: 34293 - protein, 11 aa, Homo Sapiens
VMLGTQLLYKF

SEQ ID NO: 34294 - protein, 11 aa, Homo Sapiens
VQPKQDAFANF

SEQ ID NO: 34295 - protein, 11 aa, Homo Sapiens
VVFHPSQDLVF

SEQ ID NO: 34296 - protein, 11 aa, Homo Sapiens
VVPSGGFFPTI

SEQ ID NO: 34297 - protein, 11 aa, Homo Sapiens
VWFNIGSVDTF

SEQ ID NO: 34298 - protein, 11 aa, Homo Sapiens
VYAHFPINVVI

SEQ ID NO: 34299 - protein, 11 aa, Homo Sapiens
VYAPPVGGFSF

SEQ ID NO: 34300 - protein, 11 aa, Homo Sapiens
VYFISPQGLKF

SEQ ID NO: 34301 - protein, 11 aa, Homo Sapiens
VYFQARLYHTL

SEQ ID NO: 34302 - protein, 11 aa, Homo Sapiens
VYGNERFIQYL

SEQ ID NO: 34303 - protein, 11 aa, Homo Sapiens
VYILKGGYERF

SEQ ID NO: 34304 - protein, 11 aa, Homo Sapiens
VYISYLDSVHF

SEQ ID NO: 34305 - protein, 11 aa, Homo Sapiens
VYITGKEVFSF

SEQ ID NO: 34306 - protein, 11 aa, Homo Sapiens
VYLDGHLITTV

SEQ ID NO: 34307 - protein, 11 aa, Homo Sapiens
VYLDPLVFREF

SEQ ID NO: 34308 - protein, 11 aa, Homo Sapiens
VYLPEAMPASF

SEQ ID NO: 34309 - protein, 11 aa, Homo Sapiens
VYLTDPQGLVL

SEQ ID NO: 34310 - protein, 11 aa, Homo Sapiens
VYLTPESKSSF

SEQ ID NO: 34311 - protein, 11 aa, Homo Sapiens
VYMPASSYQSL

SEQ ID NO: 34312 - protein, 11 aa, Homo Sapiens
VYNIHLAVNFL

SEQ ID NO: 34313 - protein, 11 aa, Homo Sapiens
VYNTVSEGTHF

SEQ ID NO: 34314 - protein, 11 aa, Homo Sapiens
VYPANERFWYF

SEQ ID NO: 34315 - protein, 11 aa, Homo Sapiens
VYPASKMFPFI

SEQ ID NO: 34316 - protein, 11 aa, Homo Sapiens
VYPFPTFQPAF

SEQ ID NO: 34317 - protein, 11 aa, Homo Sapiens
VYPPIQVHVTL

SEQ ID NO: 34318 - protein, 11 aa, Homo Sapiens
VYPPPHQVFTW

SEQ ID NO: 34319 - protein, 11 aa, Homo Sapiens
VYPSRAVITTM

SEQ ID NO: 34320 - protein, 11 aa, Homo Sapiens
VYQEPIPTAQL

SEQ ID NO: 34321 - protein, 11 aa, Homo Sapiens
VYQSLANLIRW

SEQ ID NO: 34322 - protein, 11 aa, Homo Sapiens
VYQVGGVTAYF

SEQ ID NO: 34323 - protein, 11 aa, Homo Sapiens
VYQYGSALAHF

SEQ ID NO: 34324 - protein, 11 aa, Homo Sapiens
VYRNKDALSHF

SEQ ID NO: 34325 - protein, 11 aa, Homo Sapiens
VYSEAARVLQF

SEQ ID NO: 34326 - protein, 11 aa, Homo Sapiens
VYSETVDLIKF

SEQ ID NO: 34327 - protein, 11 aa, Homo Sapiens
VYSPFVLLNTL

SEQ ID NO: 34328 - protein, 11 aa, Homo Sapiens
VYSPHVLNLTL

SEQ ID NO: 34329 - protein, 11 aa, Homo Sapiens
VYSQIPAAVKL

SEQ ID NO: 34330 - protein, 11 aa, Homo Sapiens
VYTDLTPLSKF

SEQ ID NO: 34331 - protein, 11 aa, Homo Sapiens
VYTEGERLYLF

SEQ ID NO: 34332 - protein, 11 aa, Homo Sapiens
VYTPVASRQSL

SEQ ID NO: 34333 - protein, 11 aa, Homo Sapiens
VYVDLGGSHVF

SEQ ID NO: 34334 - protein, 11 aa, Homo Sapiens
VYVIEPHSMEF

SEQ ID NO: 34335 - protein, 11 aa, Homo Sapiens
VYVTSPLVNNF

SEQ ID NO: 34336 - protein, 11 aa, Homo Sapiens
VYVWIYDPVHF

SEQ ID NO: 34337 - protein, 11 aa, Homo Sapiens
YYDANQSMYVF

SEQ ID NO: 34338 - protein, 11 aa, Homo Sapiens
YYIDADLLREI

SEQ ID NO: 34339 - protein, 11 aa, Homo Sapiens
YYIEGIENSVF

SEQ ID NO: 34340 - protein, 11 aa, Homo Sapiens
YYIKYNTIETF

SEQ ID NO: 34341 - protein, 11 aa, Homo Sapiens
YYLHQNNIVHL

SEQ ID NO: 34342 - protein, 11 aa, Homo Sapiens
YYLPDGSTIEI

SEQ ID NO: 34343 - protein, 11 aa, Homo Sapiens
YYNPDLLLHTL

SEQ ID NO: 34344 - protein, 11 aa, Homo Sapiens
YYNPHLLLNTL

SEQ ID NO: 34345 - protein, 11 aa, Homo Sapiens
YYPSTPGRYSI

SEQ ID NO: 34346 - protein, 11 aa, Homo Sapiens
YYSKSVGFMQW

SEQ ID NO: 34347 - protein, 11 aa, Homo Sapiens
YYSPHGHILVL

SEQ ID NO: 34348 - protein, 8 aa, Homo Sapiens
APKPYHKF

SEQ ID NO: 34349 - protein, 8 aa, Homo Sapiens
FHEVPLKF

SEQ ID NO: 34350 - protein, 8 aa, Homo Sapiens
IYTVGKRF

SEQ ID NO: 34351 - protein, 8 aa, Homo Sapiens
PPVGGFSF

SEQ ID NO: 34352 - protein, 8 aa, Homo Sapiens
QVSTHEQS

SEQ ID NO: 34353 - protein, 8 aa, Homo Sapiens
VFFKGFKW

SEQ ID NO: 34354 - protein, 8 aa, Homo Sapiens
VFKNGNAF

SEQ ID NO: 34355 - protein, 8 aa, Homo Sapiens
VFSIGPVF

SEQ ID NO: 34356 - protein, 8 aa, Homo Sapiens
VSLTACKV

SEQ ID NO: 34357 - protein, 8 aa, Homo Sapiens
VYGGGSMW

SEQ ID NO: 34358 - protein, 8 aa, Homo Sapiens
YHPNVDKL

SEQ ID NO: 34359 - protein, 8 aa, Homo Sapiens
YIKHPHLF

SEQ ID NO: 34360 - protein, 8 aa, Homo Sapiens
YIKHPVSL

SEQ ID NO: 34361 - protein, 8 aa, Homo Sapiens
YISEHEHF

SEQ ID NO: 34362 - protein, 8 aa, Homo Sapiens
YWSHPRKF

SEQ ID NO: 34363 - protein, 9 aa, Homo Sapiens
AFGPAFALF

SEQ ID NO: 34364 - protein, 9 aa, Homo Sapiens
AFHPRYPLF

SEQ ID NO: 34365 - protein, 9 aa, Homo Sapiens
AFHPTAQLL

SEQ ID NO: 34366 - protein, 9 aa, Homo Sapiens
AFIDRHPRL

SEQ ID NO: 34367 - protein, 9 aa, Homo Sapiens
AFIDTQLYI

SEQ ID NO: 34368 - protein, 9 aa, Homo Sapiens
AFIEKHWTF

SEQ ID NO: 34369 - protein, 9 aa, Homo Sapiens
AFIGPALLF

SEQ ID NO: 34370 - protein, 9 aa, Homo Sapiens
AFIKIKMAF

SEQ ID NO: 34371 - protein, 9 aa, Homo Sapiens
AFINKFVQF

SEQ ID NO: 34372 - protein, 9 aa, Homo Sapiens
AFLKVSSVF

SEQ ID NO: 34373 - protein, 9 aa, Homo Sapiens
AFMKGVFTF

SEQ ID NO: 34374 - protein, 9 aa, Homo Sapiens
AFMVNGQKF

SEQ ID NO: 34375 - protein, 9 aa, Homo Sapiens
AFNPEPLVL

SEQ ID NO: 34376 - protein, 9 aa, Homo Sapiens
AFQNDVYEW

SEQ ID NO: 34377 - protein, 9 aa, Homo Sapiens
AFSPDSYFL

SEQ ID NO: 34378 - protein, 9 aa, Homo Sapiens
AFTTHPSQF

SEQ ID NO: 34379 - protein, 9 aa, Homo Sapiens
AFTVVQPTF

SEQ ID NO: 34380 - protein, 9 aa, Homo Sapiens
AFVDNHHEW

SEQ ID NO: 34381 - protein, 9 aa, Homo Sapiens
ALPAAFHTW

SEQ ID NO: 34382 - protein, 9 aa, Homo Sapiens
ALPDQSFLW

SEQ ID NO: 34383 - protein, 9 aa, Homo Sapiens
AWHPHTNKF

SEQ ID NO: 34384 - protein, 9 aa, Homo Sapiens
AYAANPHSF

SEQ ID NO: 34385 - protein, 9 aa, Homo Sapiens
AYAGARFVF

SEQ ID NO: 34386 - protein, 9 aa, Homo Sapiens
AYATHPFKF

SEQ ID NO: 34387 - protein, 9 aa, Homo Sapiens
AYDTVRWEF

SEQ ID NO: 34388 - protein, 9 aa, Homo Sapiens
AYEHKFYEI

SEQ ID NO: 34389 - protein, 9 aa, Homo Sapiens
AYGKDFHLI

SEQ ID NO: 34390 - protein, 9 aa, Homo Sapiens
AYGLVSATF

SEQ ID NO: 34391 - protein, 9 aa, Homo Sapiens
AYGNVFSAF

SEQ ID NO: 34392 - protein, 9 aa, Homo Sapiens
AYHNSPAYL

SEQ ID NO: 34393 - protein, 9 aa, Homo Sapiens
AYIADHLGF

SEQ ID NO: 34394 - protein, 9 aa, Homo Sapiens
AYIERMNYI

SEQ ID NO: 34395 - protein, 9 aa, Homo Sapiens
AYIKGGWIL

SEQ ID NO: 34396 - protein, 9 aa, Homo Sapiens
AYIPTPIYF

SEQ ID NO: 34397 - protein, 9 aa, Homo Sapiens
AYISGLDVF

SEQ ID NO: 34398 - protein, 9 aa, Homo Sapiens
AYKPGALTF

SEQ ID NO: 34399 - protein, 9 aa, Homo Sapiens
AYKYIQELW

SEQ ID NO: 34400 - protein, 9 aa, Homo Sapiens
AYLCYRFLF

SEQ ID NO: 34401 - protein, 9 aa, Homo Sapiens
AYLDKSPQF

SEQ ID NO: 34402 - protein, 9 aa, Homo Sapiens
AYLEAHETF

SEQ ID NO: 34403 - protein, 9 aa, Homo Sapiens
AYLEAIHNF

SEQ ID NO: 34404 - protein, 9 aa, Homo Sapiens
AYLESFYKF

SEQ ID NO: 34405 - protein, 9 aa, Homo Sapiens
AYLHSHALI

SEQ ID NO: 34406 - protein, 9 aa, Homo Sapiens
AYLIQVHKW

SEQ ID NO: 34407 - protein, 9 aa, Homo Sapiens
AYLPTGKQF

SEQ ID NO: 34408 - protein, 9 aa, Homo Sapiens
AYLPVNESF

SEQ ID NO: 34409 - protein, 9 aa, Homo Sapiens
AYLTHHQRI

SEQ ID NO: 34410 - protein, 9 aa, Homo Sapiens
AYMPHTFFI

SEQ ID NO: 34411 - protein, 9 aa, Homo Sapiens
AYNPNTQTF

SEQ ID NO: 34412 - protein, 9 aa, Homo Sapiens
AYQHLFYLL

SEQ ID NO: 34413 - protein, 9 aa, Homo Sapiens
AYTLLGHEF

SEQ ID NO: 34414 - protein, 9 aa, Homo Sapiens
AYTLLLHTW

SEQ ID NO: 34415 - protein, 9 aa, Homo Sapiens
AYTPFHAVL

SEQ ID NO: 34416 - protein, 9 aa, Homo Sapiens
AYTPVLNQF

SEQ ID NO: 34417 - protein, 9 aa, Homo Sapiens
AYTTEHWLV

SEQ ID NO: 34418 - protein, 9 aa, Homo Sapiens
AYVHMVTHF

SEQ ID NO: 34419 - protein, 9 aa, Homo Sapiens
AYVQIKTIW

SEQ ID NO: 34420 - protein, 9 aa, Homo Sapiens
CFAPYHLVL

SEQ ID NO: 34421 - protein, 9 aa, Homo Sapiens
CFNHNGNIF

SEQ ID NO: 34422 - protein, 9 aa, Homo Sapiens
CFSPNRYWL

SEQ ID NO: 34423 - protein, 9 aa, Homo Sapiens
CYGGTAAVF

SEQ ID NO: 34424 - protein, 9 aa, Homo Sapiens
CYIKILHQL

SEQ ID NO: 34425 - protein, 9 aa, Homo Sapiens
DFPTISLEF

SEQ ID NO: 34426 - protein, 9 aa, Homo Sapiens
DFVSFFPAF

SEQ ID NO: 34427 - protein, 9 aa, Homo Sapiens
DLFRKALEL

SEQ ID NO: 34428 - protein, 9 aa, Homo Sapiens
EFHPNPDVL

SEQ ID NO: 34429 - protein, 9 aa, Homo Sapiens
EFINSIILF

SEQ ID NO: 34430 - protein, 9 aa, Homo Sapiens
EFITVHSML

SEQ ID NO: 34431 - protein, 9 aa, Homo Sapiens
EFKEAFNMI

SEQ ID NO: 34432 - protein, 9 aa, Homo Sapiens
EFKEAFSLF

SEQ ID NO: 34433 - protein, 9 aa, Homo Sapiens
EFLKNPQKF

SEQ ID NO: 34434 - protein, 9 aa, Homo Sapiens
EFLKYFGTF

SEQ ID NO: 34435 - protein, 9 aa, Homo Sapiens
EFLLTHPVL

SEQ ID NO: 34436 - protein, 9 aa, Homo Sapiens
EFLTKTAKF

SEQ ID NO: 34437 - protein, 9 aa, Homo Sapiens
EFMDTFFFI

SEQ ID NO: 34438 - protein, 9 aa, Homo Sapiens
EFNSTPAVF

SEQ ID NO: 34439 - protein, 9 aa, Homo Sapiens
EFTKSIAKF

SEQ ID NO: 34440 - protein, 9 aa, Homo Sapiens
EFTPHHAGF

SEQ ID NO: 34441 - protein, 9 aa, Homo Sapiens
EFTSPPSLF

SEQ ID NO: 34442 - protein, 9 aa, Homo Sapiens
EFVAKGHLF

SEQ ID NO: 34443 - protein, 9 aa, Homo Sapiens
ELPKHYFSF

SEQ ID NO: 34444 - protein, 9 aa, Homo Sapiens
EPSVSIPFL

SEQ ID NO: 34445 - protein, 9 aa, Homo Sapiens
EWPPFVVTL

SEQ ID NO: 34446 - protein, 9 aa, Homo Sapiens
EYAHLFEVF

SEQ ID NO: 34447 - protein, 9 aa, Homo Sapiens
EYIQFVPLL

SEQ ID NO: 34448 - protein, 9 aa, Homo Sapiens
EYLEAHLKF

SEQ ID NO: 34449 - protein, 9 aa, Homo Sapiens
EYLENALKL

SEQ ID NO: 34450 - protein, 9 aa, Homo Sapiens
EYLHQHWIL

SEQ ID NO: 34451 - protein, 9 aa, Homo Sapiens
EYLIVFPKL

SEQ ID NO: 34452 - protein, 9 aa, Homo Sapiens
EYMAQHLVF

SEQ ID NO: 34453 - protein, 9 aa, Homo Sapiens
EYMEHVYLI

SEQ ID NO: 34454 - protein, 9 aa, Homo Sapiens
EYTDVYPEI

SEQ ID NO: 34455 - protein, 9 aa, Homo Sapiens
EYVEKFYRI

SEQ ID NO: 34456 - protein, 9 aa, Homo Sapiens
EYVEKPLKL

SEQ ID NO: 34457 - protein, 9 aa, Homo Sapiens
EYVPGAHQF

SEQ ID NO: 34458 - protein, 9 aa, Homo Sapiens
EYVSQHLVF

SEQ ID NO: 34459 - protein, 9 aa, Homo Sapiens
FFDPHQSTF

SEQ ID NO: 34460 - protein, 9 aa, Homo Sapiens
FFGPVGFNF

SEQ ID NO: 34461 - protein, 9 aa, Homo Sapiens
FFHQGYDLF

SEQ ID NO: 34462 - protein, 9 aa, Homo Sapiens
FFIAGRYEF

SEQ ID NO: 34463 - protein, 9 aa, Homo Sapiens
FFKDSPLLL

SEQ ID NO: 34464 - protein, 9 aa, Homo Sapiens
FFNSVRSVF

SEQ ID NO: 34465 - protein, 9 aa, Homo Sapiens
FLPFPLPLF

SEQ ID NO: 34466 - protein, 9 aa, Homo Sapiens
FLPRKFPSL

SEQ ID NO: 34467 - protein, 9 aa, Homo Sapiens
FWDPSVNLF

SEQ ID NO: 34468 - protein, 9 aa, Homo Sapiens
FYAELYHII

SEQ ID NO: 34469 - protein, 9 aa, Homo Sapiens
FYFALRDTL

SEQ ID NO: 34470 - protein, 9 aa, Homo Sapiens
FYFASKLVL

SEQ ID NO: 34471 - protein, 9 aa, Homo Sapiens
FYHEAVVLF

SEQ ID NO: 34472 - protein, 9 aa, Homo Sapiens
FYHKYFNYL

SEQ ID NO: 34473 - protein, 9 aa, Homo Sapiens
FYITSRTQF

SEQ ID NO: 34474 - protein, 9 aa, Homo Sapiens
FYLLISKTF

SEQ ID NO: 34475 - protein, 9 aa, Homo Sapiens
FYMDTSHLF

SEQ ID NO: 34476 - protein, 9 aa, Homo Sapiens
FYQRFPLSF

SEQ ID NO: 34477 - protein, 9 aa, Homo Sapiens
FYTAIAQAF

SEQ ID NO: 34478 - protein, 9 aa, Homo Sapiens
FYTLIPHDF

SEQ ID NO: 34479 - protein, 9 aa, Homo Sapiens
FYTVIPHNF

SEQ ID NO: 34480 - protein, 9 aa, Homo Sapiens
GFQVKAYTF

SEQ ID NO: 34481 - protein, 9 aa, Homo Sapiens
GFTPVFLQF

SEQ ID NO: 34482 - protein, 9 aa, Homo Sapiens
GYCPNHPVI

SEQ ID NO: 34483 - protein, 9 aa, Homo Sapiens
GYIERPQLI

SEQ ID NO: 34484 - protein, 9 aa, Homo Sapiens
GYIKNKLVF

SEQ ID NO: 34485 - protein, 9 aa, Homo Sapiens
GYSPYQLTW

SEQ ID NO: 34486 - protein, 9 aa, Homo Sapiens
HFHPSVALF

SEQ ID NO: 34487 - protein, 9 aa, Homo Sapiens
HFIAEHYMF

SEQ ID NO: 34488 - protein, 9 aa, Homo Sapiens
HFIEIHHHL

SEQ ID NO: 34489 - protein, 9 aa, Homo Sapiens
HFIEKAHTL

SEQ ID NO: 34490 - protein, 9 aa, Homo Sapiens
HFIFFVQEF

SEQ ID NO: 34491 - protein, 9 aa, Homo Sapiens
HFITKGYVI

SEQ ID NO: 34492 - protein, 9 aa, Homo Sapiens
HFLDRHLVF

SEQ ID NO: 34493 - protein, 9 aa, Homo Sapiens
HFLEQHPLL

SEQ ID NO: 34494 - protein, 9 aa, Homo Sapiens
HFSHAGALF

SEQ ID NO: 34495 - protein, 9 aa, Homo Sapiens
HYHPIVQRF

SEQ ID NO: 34496 - protein, 9 aa, Homo Sapiens
HYILHNSFF

SEQ ID NO: 34497 - protein, 9 aa, Homo Sapiens
HYIRKYNRF

SEQ ID NO: 34498 - protein, 9 aa, Homo Sapiens
HYKPTPLYF

SEQ ID NO: 34499 - protein, 9 aa, Homo Sapiens
HYPPVQVLF

SEQ ID NO: 34500 - protein, 9 aa, Homo Sapiens
HYSLFPLLF

SEQ ID NO: 34501 - protein, 9 aa, Homo Sapiens
HYSPIYLSF

SEQ ID NO: 34502 - protein, 9 aa, Homo Sapiens
HYTIVFNTF

SEQ ID NO: 34503 - protein, 9 aa, Homo Sapiens
IFCETRAEW

SEQ ID NO: 34504 - protein, 9 aa, Homo Sapiens
IFFENHPYF

SEQ ID NO: 34505 - protein, 9 aa, Homo Sapiens
IFFPGVSEF

SEQ ID NO: 34506 - protein, 9 aa, Homo Sapiens
IFGPVQPLF

SEQ ID NO: 34507 - protein, 9 aa, Homo Sapiens
IFGVIIDTF

SEQ ID NO: 34508 - protein, 9 aa, Homo Sapiens
IFHDISLRF

SEQ ID NO: 34509 - protein, 9 aa, Homo Sapiens
IFHEVPLKF

SEQ ID NO: 34510 - protein, 9 aa, Homo Sapiens
IFHEVSQLI

SEQ ID NO: 34511 - protein, 9 aa, Homo Sapiens
IFIDKIYSI

SEQ ID NO: 34512 - protein, 9 aa, Homo Sapiens
IFIKNHIRF

SEQ ID NO: 34513 - protein, 9 aa, Homo Sapiens
IFIPTSFLL

SEQ ID NO: 34514 - protein, 9 aa, Homo Sapiens
IFIRNVLLF

SEQ ID NO: 34515 - protein, 9 aa, Homo Sapiens
IFKDKPIKL

SEQ ID NO: 34516 - protein, 9 aa, Homo Sapiens
IFLKRMPSI

SEQ ID NO: 34517 - protein, 9 aa, Homo Sapiens
IFLNKTFQW

SEQ ID NO: 34518 - protein, 9 aa, Homo Sapiens
IFLSQPILL

SEQ ID NO: 34519 - protein, 9 aa, Homo Sapiens
IFNAVSLRW

SEQ ID NO: 34520 - protein, 9 aa, Homo Sapiens
IFNGTFVKL

SEQ ID NO: 34521 - protein, 9 aa, Homo Sapiens
IFNQNNHNF

SEQ ID NO: 34522 - protein, 9 aa, Homo Sapiens
IFPYKGYIW

SEQ ID NO: 34523 - protein, 9 aa, Homo Sapiens
IFQDVLLQF

SEQ ID NO: 34524 - protein, 9 aa, Homo Sapiens
IFQGNVHNF

SEQ ID NO: 34525 - protein, 9 aa, Homo Sapiens
IFRAFTELF

SEQ ID NO: 34526 - protein, 9 aa, Homo Sapiens
IFRPDNFVF

SEQ ID NO: 34527 - protein, 9 aa, Homo Sapiens
IFSKIVSLF

SEQ ID NO: 34528 - protein, 9 aa, Homo Sapiens
IFSNVRINL

SEQ ID NO: 34529 - protein, 9 aa, Homo Sapiens
IFSPNVVNL

SEQ ID NO: 34530 - protein, 9 aa, Homo Sapiens
IFSPTSNLL

SEQ ID NO: 34531 - protein, 9 aa, Homo Sapiens
IFSPVFNFF

SEQ ID NO: 34532 - protein, 9 aa, Homo Sapiens
IFTARLYYF

SEQ ID NO: 34533 - protein, 9 aa, Homo Sapiens
IFTDIFHYL

SEQ ID NO: 34534 - protein, 9 aa, Homo Sapiens
IFTDLSSRF

SEQ ID NO: 34535 - protein, 9 aa, Homo Sapiens
IFTDVALKF

SEQ ID NO: 34536 - protein, 9 aa, Homo Sapiens
IFTGARVFF

SEQ ID NO: 34537 - protein, 9 aa, Homo Sapiens
IFTKVIQEI

SEQ ID NO: 34538 - protein, 9 aa, Homo Sapiens
IFTNTVARF

SEQ ID NO: 34539 - protein, 9 aa, Homo Sapiens
IFTPIVEHL

SEQ ID NO: 34540 - protein, 9 aa, Homo Sapiens
IFTPKPTLF

SEQ ID NO: 34541 - protein, 9 aa, Homo Sapiens
IFVARLYYF

SEQ ID NO: 34542 - protein, 9 aa, Homo Sapiens
IFVDTNLYF

SEQ ID NO: 34543 - protein, 9 aa, Homo Sapiens
IFVTNPVTL

SEQ ID NO: 34544 - protein, 9 aa, Homo Sapiens
IITPIHEQW

SEQ ID NO: 34545 - protein, 9 aa, Homo Sapiens
ILPGSLFRF

SEQ ID NO: 34546 - protein, 9 aa, Homo Sapiens
ILPIKFPHL

SEQ ID NO: 34547 - protein, 9 aa, Homo Sapiens
ILPVYHSLF

SEQ ID NO: 34548 - protein, 9 aa, Homo Sapiens
IMPEKFEFW

SEQ ID NO: 34549 - protein, 9 aa, Homo Sapiens
IMPSSSHLF

SEQ ID NO: 34550 - protein, 9 aa, Homo Sapiens
IMPTIFNLI

SEQ ID NO: 34551 - protein, 9 aa, Homo Sapiens
IWIPYCIKL

SEQ ID NO: 34552 - protein, 9 aa, Homo Sapiens
IWISKLPHF

SEQ ID NO: 34553 - protein, 9 aa, Homo Sapiens
IWRPITATF

SEQ ID NO: 34554 - protein, 9 aa, Homo Sapiens
IWTDVFQTL

SEQ ID NO: 34555 - protein, 9 aa, Homo Sapiens
IYAFVGEKF

SEQ ID NO: 34556 - protein, 9 aa, Homo Sapiens
IYAPPLPSL

SEQ ID NO: 34557 - protein, 9 aa, Homo Sapiens
IYAPQGLLL

SEQ ID NO: 34558 - protein, 9 aa, Homo Sapiens
IYAPTLLVF

SEQ ID NO: 34559 - protein, 9 aa, Homo Sapiens
IYDKTSVLF

SEQ ID NO: 34560 - protein, 9 aa, Homo Sapiens
IYDSVKVYF

SEQ ID NO: 34561 - protein, 9 aa, Homo Sapiens
IYEPNFIFF

SEQ ID NO: 34562 - protein, 9 aa, Homo Sapiens
IYFPYVLKI

SEQ ID NO: 34563 - protein, 9 aa, Homo Sapiens
IYGEKTYAF

SEQ ID NO: 34564 - protein, 9 aa, Homo Sapiens
IYGGSDSRF

SEQ ID NO: 34565 - protein, 9 aa, Homo Sapiens
IYGYVAEQF

SEQ ID NO: 34566 - protein, 9 aa, Homo Sapiens
IYHNGVLEF

SEQ ID NO: 34567 - protein, 9 aa, Homo Sapiens
IYHPNVDKL

SEQ ID NO: 34568 - protein, 9 aa, Homo Sapiens
IYHQVAVQF

SEQ ID NO: 34569 - protein, 9 aa, Homo Sapiens
IYIAGHPAF

SEQ ID NO: 34570 - protein, 9 aa, Homo Sapiens
IYIDRGVVF

SEQ ID NO: 34571 - protein, 9 aa, Homo Sapiens
IYIKHPHLF

SEQ ID NO: 34572 - protein, 9 aa, Homo Sapiens
IYIKQIKTF

SEQ ID NO: 34573 - protein, 9 aa, Homo Sapiens
IYKAPSENW

SEQ ID NO: 34574 - protein, 9 aa, Homo Sapiens
IYKGIPLQL

SEQ ID NO: 34575 - protein, 9 aa, Homo Sapiens
IYKPVTDFF

SEQ ID NO: 34576 - protein, 9 aa, Homo Sapiens
IYKTSILVF

SEQ ID NO: 34577 - protein, 9 aa, Homo Sapiens
IYLDTHFRL

SEQ ID NO: 34578 - protein, 9 aa, Homo Sapiens
IYLERFPIF

SEQ ID NO: 34579 - protein, 9 aa, Homo Sapiens
IYLIHHQRF

SEQ ID NO: 34580 - protein, 9 aa, Homo Sapiens
IYLLIHNNF

SEQ ID NO: 34581 - protein, 9 aa, Homo Sapiens
IYLPYLHEW

SEQ ID NO: 34582 - protein, 9 aa, Homo Sapiens
IYLSKPTHW

SEQ ID NO: 34583 - protein, 9 aa, Homo Sapiens
IYMDTLNIF

SEQ ID NO: 34584 - protein, 9 aa, Homo Sapiens
IYNMIFHEL

SEQ ID NO: 34585 - protein, 9 aa, Homo Sapiens
IYPDSFTVL

SEQ ID NO: 34586 - protein, 9 aa, Homo Sapiens
IYPEVVHMF

SEQ ID NO: 34587 - protein, 9 aa, Homo Sapiens
IYPPKLHQF

SEQ ID NO: 34588 - protein, 9 aa, Homo Sapiens
IYPWVHVVI

SEQ ID NO: 34589 - protein, 9 aa, Homo Sapiens
IYQDVTLKW

SEQ ID NO: 34590 - protein, 9 aa, Homo Sapiens
IYQKAFEHL

SEQ ID NO: 34591 - protein, 9 aa, Homo Sapiens
IYQQNHMVL

SEQ ID NO: 34592 - protein, 9 aa, Homo Sapiens
IYQRDPLKL

SEQ ID NO: 34593 - protein, 9 aa, Homo Sapiens
IYQRHVYNL

SEQ ID NO: 34594 - protein, 9 aa, Homo Sapiens
IYQYIQSRF

SEQ ID NO: 34595 - protein, 9 aa, Homo Sapiens
IYSAERFLI

SEQ ID NO: 34596 - protein, 9 aa, Homo Sapiens
IYSEVATLI

SEQ ID NO: 34597 - protein, 9 aa, Homo Sapiens
IYSFHTLSF

SEQ ID NO: 34598 - protein, 9 aa, Homo Sapiens
IYSKLGLGF

SEQ ID NO: 34599 - protein, 9 aa, Homo Sapiens
IYSTAFDYF

SEQ ID NO: 34600 - protein, 9 aa, Homo Sapiens
IYSTKLYRF

SEQ ID NO: 34601 - protein, 9 aa, Homo Sapiens
IYSVNKEQL

SEQ ID NO: 34602 - protein, 9 aa, Homo Sapiens
IYTDIIYIF

SEQ ID NO: 34603 - protein, 9 aa, Homo Sapiens
IYTFPHASF

SEQ ID NO: 34604 - protein, 9 aa, Homo Sapiens
IYTMIYRNL

SEQ ID NO: 34605 - protein, 9 aa, Homo Sapiens
IYTSSVNRL

SEQ ID NO: 34606 - protein, 9 aa, Homo Sapiens
IYTTFRDVF

SEQ ID NO: 34607 - protein, 9 aa, Homo Sapiens
IYVHDLLTF

SEQ ID NO: 34608 - protein, 9 aa, Homo Sapiens
IYVIPQPHF

SEQ ID NO: 34609 - protein, 9 aa, Homo Sapiens
IYVISAETF

SEQ ID NO: 34610 - protein, 9 aa, Homo Sapiens
IYVPSSYHL

SEQ ID NO: 34611 - protein, 9 aa, Homo Sapiens
IYVVGGYSW

SEQ ID NO: 34612 - protein, 9 aa, Homo Sapiens
IYWDGPLAL

SEQ ID NO: 34613 - protein, 9 aa, Homo Sapiens
IYYVDVQKF

SEQ ID NO: 34614 - protein, 9 aa, Homo Sapiens
KFAEEFYSF

SEQ ID NO: 34615 - protein, 9 aa, Homo Sapiens
KFFEMVNTI

SEQ ID NO: 34616 - protein, 9 aa, Homo Sapiens
KFFYQKEHW

SEQ ID NO: 34617 - protein, 9 aa, Homo Sapiens
KFIDKQLEL

SEQ ID NO: 34618 - protein, 9 aa, Homo Sapiens
KFIDTTSKF

SEQ ID NO: 34619 - protein, 9 aa, Homo Sapiens
KFIKSFLVF

SEQ ID NO: 34620 - protein, 9 aa, Homo Sapiens
KFIWTNHKF

SEQ ID NO: 34621 - protein, 9 aa, Homo Sapiens
KFLAPYTTF

SEQ ID NO: 34622 - protein, 9 aa, Homo Sapiens
KFLEQVHQL

SEQ ID NO: 34623 - protein, 9 aa, Homo Sapiens
KFLESTDSF

SEQ ID NO: 34624 - protein, 9 aa, Homo Sapiens
KFLEYFHKL

SEQ ID NO: 34625 - protein, 9 aa, Homo Sapiens
KFMHTPHQF

SEQ ID NO: 34626 - protein, 9 aa, Homo Sapiens
KFNPVSFTW

SEQ ID NO: 34627 - protein, 9 aa, Homo Sapiens
KFSEIPQRL

SEQ ID NO: 34628 - protein, 9 aa, Homo Sapiens
KFSPFADTF

SEQ ID NO: 34629 - protein, 9 aa, Homo Sapiens
KFSPNTSQF

SEQ ID NO: 34630 - protein, 9 aa, Homo Sapiens
KFSPRPLKF

SEQ ID NO: 34631 - protein, 9 aa, Homo Sapiens
KFTPVASKF

SEQ ID NO: 34632 - protein, 9 aa, Homo Sapiens
KFVDSTFYL

SEQ ID NO: 34633 - protein, 9 aa, Homo Sapiens
KFVETHPEF

SEQ ID NO: 34634 - protein, 9 aa, Homo Sapiens
KFVNKSYLL

SEQ ID NO: 34635 - protein, 9 aa, Homo Sapiens
KFYGNRHLI

SEQ ID NO: 34636 - protein, 9 aa, Homo Sapiens
KGAVWKALF

SEQ ID NO: 34637 - protein, 9 aa, Homo Sapiens
KLPANHPLL

SEQ ID NO: 34638 - protein, 9 aa, Homo Sapiens
KLPEKTQTF

SEQ ID NO: 34639 - protein, 9 aa, Homo Sapiens
KLPSKFKKF

SEQ ID NO: 34640 - protein, 9 aa, Homo Sapiens
KLPSNLPQL

SEQ ID NO: 34641 - protein, 9 aa, Homo Sapiens
KMLDNFYNF

SEQ ID NO: 34642 - protein, 9 aa, Homo Sapiens
KMPLSTHRF

SEQ ID NO: 34643 - protein, 9 aa, Homo Sapiens
KQSPLDIHL

SEQ ID NO: 34644 - protein, 9 aa, Homo Sapiens
KWFFQKLRF

SEQ ID NO: 34645 - protein, 9 aa, Homo Sapiens
KWPETPLLL

SEQ ID NO: 34646 - protein, 9 aa, Homo Sapiens
KYAPRPIFI

SEQ ID NO: 34647 - protein, 9 aa, Homo Sapiens
KYEELFPAF

SEQ ID NO: 34648 - protein, 9 aa, Homo Sapiens
KYFEKQFEL

SEQ ID NO: 34649 - protein, 9 aa, Homo Sapiens
KYFHPPAHL

SEQ ID NO: 34650 - protein, 9 aa, Homo Sapiens
KYFLWEEKF

SEQ ID NO: 34651 - protein, 9 aa, Homo Sapiens
KYGNQLVRL

SEQ ID NO: 34652 - protein, 9 aa, Homo Sapiens
KYHDNAQLI

SEQ ID NO: 34653 - protein, 9 aa, Homo Sapiens
KYIDFDHVF

SEQ ID NO: 34654 - protein, 9 aa, Homo Sapiens
KYIDQKFVL

SEQ ID NO: 34655 - protein, 9 aa, Homo Sapiens
KYIDYLMTW

SEQ ID NO: 34656 - protein, 9 aa, Homo Sapiens
KYIESPVLF

SEQ ID NO: 34657 - protein, 9 aa, Homo Sapiens
KYIHSANVL

SEQ ID NO: 34658 - protein, 9 aa, Homo Sapiens
KYIKDDFRF

SEQ ID NO: 34659 - protein, 9 aa, Homo Sapiens
KYINTDAKF

SEQ ID NO: 34660 - protein, 9 aa, Homo Sapiens
KYIQRQETI

SEQ ID NO: 34661 - protein, 9 aa, Homo Sapiens
KYISGPHEL

SEQ ID NO: 34662 - protein, 9 aa, Homo Sapiens
KYISKPENL

SEQ ID NO: 34663 - protein, 9 aa, Homo Sapiens
KYITQGQLL

SEQ ID NO: 34664 - protein, 9 aa, Homo Sapiens
KYKDAANLL

SEQ ID NO: 34665 - protein, 9 aa, Homo Sapiens
KYKEAAHLL

SEQ ID NO: 34666 - protein, 9 aa, Homo Sapiens
KYKGIFNGF

SEQ ID NO: 34667 - protein, 9 aa, Homo Sapiens
KYLEHPLLL

SEQ ID NO: 34668 - protein, 9 aa, Homo Sapiens
KYLESFLAF

SEQ ID NO: 34669 - protein, 9 aa, Homo Sapiens
KYLLHSLVF

SEQ ID NO: 34670 - protein, 9 aa, Homo Sapiens
KYLLTPVNF

SEQ ID NO: 34671 - protein, 9 aa, Homo Sapiens
KYLSGIAHF

SEQ ID NO: 34672 - protein, 9 aa, Homo Sapiens
KYLTQHERI

SEQ ID NO: 34673 - protein, 9 aa, Homo Sapiens
KYLYQKIMF

SEQ ID NO: 34674 - protein, 9 aa, Homo Sapiens
KYMDINFDF

SEQ ID NO: 34675 - protein, 9 aa, Homo Sapiens
KYMDVQFDF

SEQ ID NO: 34676 - protein, 9 aa, Homo Sapiens
KYMLKANLI

SEQ ID NO: 34677 - protein, 9 aa, Homo Sapiens
KYMVYPQTF

SEQ ID NO: 34678 - protein, 9 aa, Homo Sapiens
KYNANFVTF

SEQ ID NO: 34679 - protein, 9 aa, Homo Sapiens
KYNPTWHCI

SEQ ID NO: 34680 - protein, 9 aa, Homo Sapiens
KYPENFFLL

SEQ ID NO: 34681 - protein, 9 aa, Homo Sapiens
KYPHYFPLL

SEQ ID NO: 34682 - protein, 9 aa, Homo Sapiens
KYPHYFPVM

SEQ ID NO: 34683 - protein, 9 aa, Homo Sapiens
KYPNVFKKI

SEQ ID NO: 34684 - protein, 9 aa, Homo Sapiens
KYPSPFFVF

SEQ ID NO: 34685 - protein, 9 aa, Homo Sapiens
KYQAHGYAF

SEQ ID NO: 34686 - protein, 9 aa, Homo Sapiens
KYQEVTNNL

SEQ ID NO: 34687 - protein, 9 aa, Homo Sapiens
KYQHLKAEF

SEQ ID NO: 34688 - protein, 9 aa, Homo Sapiens
KYQHTGAVL

SEQ ID NO: 34689 - protein, 9 aa, Homo Sapiens
KYSPFVVSF

SEQ ID NO: 34690 - protein, 9 aa, Homo Sapiens
KYVEVFHKI

SEQ ID NO: 34691 - protein, 9 aa, Homo Sapiens
KYVKVFHKF

SEQ ID NO: 34692 - protein, 9 aa, Homo Sapiens
KYVKVFNKF

SEQ ID NO: 34693 - protein, 9 aa, Homo Sapiens
KYVSGEFRF

SEQ ID NO: 34694 - protein, 9 aa, Homo Sapiens
KYVTVYNLI

SEQ ID NO: 34695 - protein, 9 aa, Homo Sapiens
LEGKRFLEL

SEQ ID NO: 34696 - protein, 9 aa, Homo Sapiens
LFIATSQKF

SEQ ID NO: 34697 - protein, 9 aa, Homo Sapiens
LFIDNIFRF

SEQ ID NO: 34698 - protein, 9 aa, Homo Sapiens
LFIEATEKF

SEQ ID NO: 34699 - protein, 9 aa, Homo Sapiens
LFIQGKLLF

SEQ ID NO: 34700 - protein, 9 aa, Homo Sapiens
LFIRDPLTL

SEQ ID NO: 34701 - protein, 9 aa, Homo Sapiens
LFKDQMELF

SEQ ID NO: 34702 - protein, 9 aa, Homo Sapiens
LFKHFADLL

SEQ ID NO: 34703 - protein, 9 aa, Homo Sapiens
LFKNDPLFF

SEQ ID NO: 34704 - protein, 9 aa, Homo Sapiens
LFLDRTYVL

SEQ ID NO: 34705 - protein, 9 aa, Homo Sapiens
LFLDTVSTF

SEQ ID NO: 34706 - protein, 9 aa, Homo Sapiens
LFLEHAHNL

SEQ ID NO: 34707 - protein, 9 aa, Homo Sapiens
LFLEKAMQL

SEQ ID NO: 34708 - protein, 9 aa, Homo Sapiens
LFLPLHELW

SEQ ID NO: 34709 - protein, 9 aa, Homo Sapiens
LFNGCPLRI

SEQ ID NO: 34710 - protein, 9 aa, Homo Sapiens
LFPGKAFSW

SEQ ID NO: 34711 - protein, 9 aa, Homo Sapiens
LFPLVPLHW

SEQ ID NO: 34712 - protein, 9 aa, Homo Sapiens
LFPPEPLVL

SEQ ID NO: 34713 - protein, 9 aa, Homo Sapiens
LFQQVPYQF

SEQ ID NO: 34714 - protein, 9 aa, Homo Sapiens
LFQRTAWVF

SEQ ID NO: 34715 - protein, 9 aa, Homo Sapiens
LFSHNRAHF

SEQ ID NO: 34716 - protein, 9 aa, Homo Sapiens
LFTDTGYIW

SEQ ID NO: 34717 - protein, 9 aa, Homo Sapiens
LFTKTHPQW

SEQ ID NO: 34718 - protein, 9 aa, Homo Sapiens
LFTSSRLFF

SEQ ID NO: 34719 - protein, 9 aa, Homo Sapiens
LFTSVYPTL

SEQ ID NO: 34720 - protein, 9 aa, Homo Sapiens
LLPDKWFDI

SEQ ID NO: 34721 - protein, 9 aa, Homo Sapiens
LLPEHFLFL

SEQ ID NO: 34722 - protein, 9 aa, Homo Sapiens
LLPGKTYSF

SEQ ID NO: 34723 - protein, 9 aa, Homo Sapiens
LLPSRQFGF

SEQ ID NO: 34724 - protein, 9 aa, Homo Sapiens
LMSLIINTF

SEQ ID NO: 34725 - protein, 9 aa, Homo Sapiens
LTVGNNKTL

SEQ ID NO: 34726 - protein, 9 aa, Homo Sapiens
LWAPRPFNL

SEQ ID NO: 34727 - protein, 9 aa, Homo Sapiens
LYAISAVYF

SEQ ID NO: 34728 - protein, 9 aa, Homo Sapiens
LYCGKTLLF

SEQ ID NO: 34729 - protein, 9 aa, Homo Sapiens
LYDKDHYKL

SEQ ID NO: 34730 - protein, 9 aa, Homo Sapiens
LYDPVISKL

SEQ ID NO: 34731 - protein, 9 aa, Homo Sapiens
LYFHINQTL

SEQ ID NO: 34732 - protein, 9 aa, Homo Sapiens
LYHDIFSRL

SEQ ID NO: 34733 - protein, 9 aa, Homo Sapiens
LYIDFGGKF

SEQ ID NO: 34734 - protein, 9 aa, Homo Sapiens
LYIDSRQNL

SEQ ID NO: 34735 - protein, 9 aa, Homo Sapiens
LYIGDGYVI

SEQ ID NO: 34736 - protein, 9 aa, Homo Sapiens
LYIGSSKTF

SEQ ID NO: 34737 - protein, 9 aa, Homo Sapiens
LYIPIFSTF

SEQ ID NO: 34738 - protein, 9 aa, Homo Sapiens
LYIQSHYQL

SEQ ID NO: 34739 - protein, 9 aa, Homo Sapiens
LYIVEPLKF

SEQ ID NO: 34740 - protein, 9 aa, Homo Sapiens
LYIVHPTMF

SEQ ID NO: 34741 - protein, 9 aa, Homo Sapiens
LYKFSADEF

SEQ ID NO: 34742 - protein, 9 aa, Homo Sapiens
LYLECSAKF

SEQ ID NO: 34743 - protein, 9 aa, Homo Sapiens
LYLILIMCN

SEQ ID NO: 34744 - protein, 9 aa, Homo Sapiens
LYMDKFEEF

SEQ ID NO: 34745 - protein, 9 aa, Homo Sapiens
LYPDHFHLL

SEQ ID NO: 34746 - protein, 9 aa, Homo Sapiens
LYPLTNYTF

SEQ ID NO: 34747 - protein, 9 aa, Homo Sapiens
LYPQFMFHL

SEQ ID NO: 34748 - protein, 9 aa, Homo Sapiens
LYQDGVFKF

SEQ ID NO: 34749 - protein, 9 aa, Homo Sapiens
LYQDKFPFF

SEQ ID NO: 34750 - protein, 9 aa, Homo Sapiens
LYQFNPAFF

SEQ ID NO: 34751 - protein, 9 aa, Homo Sapiens
LYQRAFQHL

SEQ ID NO: 34752 - protein, 9 aa, Homo Sapiens
LYRLQFNEF

SEQ ID NO: 34753 - protein, 9 aa, Homo Sapiens
LYRNFPLTI

SEQ ID NO: 34754 - protein, 9 aa, Homo Sapiens
LYSSEQLLI

SEQ ID NO: 34755 - protein, 9 aa, Homo Sapiens
LYSTIRPYL

SEQ ID NO: 34756 - protein, 9 aa, Homo Sapiens
LYTEKFEEF

SEQ ID NO: 34757 - protein, 9 aa, Homo Sapiens
LYTMNPNKF

SEQ ID NO: 34758 - protein, 9 aa, Homo Sapiens
LYTPEHHLI

SEQ ID NO: 34759 - protein, 9 aa, Homo Sapiens
LYTPHSWLL

SEQ ID NO: 34760 - protein, 9 aa, Homo Sapiens
LYTPKPQVI

SEQ ID NO: 34761 - protein, 9 aa, Homo Sapiens
LYTPVLIRF

SEQ ID NO: 34762 - protein, 9 aa, Homo Sapiens
LYTYIQSRF

SEQ ID NO: 34763 - protein, 9 aa, Homo Sapiens
LYVDFPQHL

SEQ ID NO: 34764 - protein, 9 aa, Homo Sapiens
LYVIGGNHF

SEQ ID NO: 34765 - protein, 9 aa, Homo Sapiens
LYVMVNAKF

SEQ ID NO: 34766 - protein, 9 aa, Homo Sapiens
LYWSHPRKF

SEQ ID NO: 34767 - protein, 9 aa, Homo Sapiens
MFLDRPQQW

SEQ ID NO: 34768 - protein, 9 aa, Homo Sapiens
MYIARQLSF

SEQ ID NO: 34769 - protein, 9 aa, Homo Sapiens
MYPYIFHVL

SEQ ID NO: 34770 - protein, 9 aa, Homo Sapiens
MYSGALLFF

SEQ ID NO: 34771 - protein, 9 aa, Homo Sapiens
NFCNIHVSL

SEQ ID NO: 34772 - protein, 9 aa, Homo Sapiens
NFGQHPFVF

SEQ ID NO: 34773 - protein, 9 aa, Homo Sapiens
NFHQTFATW

SEQ ID NO: 34774 - protein, 9 aa, Homo Sapiens
NFICPALEF

SEQ ID NO: 34775 - protein, 9 aa, Homo Sapiens
NFKLLSHSL

SEQ ID NO: 34776 - protein, 9 aa, Homo Sapiens
NFLSRSFYW

SEQ ID NO: 34777 - protein, 9 aa, Homo Sapiens
NFLWTPLHF

SEQ ID NO: 34778 - protein, 9 aa, Homo Sapiens
NFQIEHHLF

SEQ ID NO: 34779 - protein, 9 aa, Homo Sapiens
NFTKYPKKF

SEQ ID NO: 34780 - protein, 9 aa, Homo Sapiens
NFTNVAATF

SEQ ID NO: 34781 - protein, 9 aa, Homo Sapiens
NFTSTHLLL

SEQ ID NO: 34782 - protein, 9 aa, Homo Sapiens
NFVSFPLYL

SEQ ID NO: 34783 - protein, 9 aa, Homo Sapiens
NYAAALETF

SEQ ID NO: 34784 - protein, 9 aa, Homo Sapiens
NYAWVYYHL

SEQ ID NO: 34785 - protein, 9 aa, Homo Sapiens
NYCESRYHF

SEQ ID NO: 34786 - protein, 9 aa, Homo Sapiens
NYFHLAVAF

SEQ ID NO: 34787 - protein, 9 aa, Homo Sapiens
NYFLWTEKF

SEQ ID NO: 34788 - protein, 9 aa, Homo Sapiens
NYGQYFTLW

SEQ ID NO: 34789 - protein, 9 aa, Homo Sapiens
NYHAQHYHL

SEQ ID NO: 34790 - protein, 9 aa, Homo Sapiens
NYIEKVVAI

SEQ ID NO: 34791 - protein, 9 aa, Homo Sapiens
NYIHVGAQL

SEQ ID NO: 34792 - protein, 9 aa, Homo Sapiens
NYIKRNWRI

SEQ ID NO: 34793 - protein, 9 aa, Homo Sapiens
NYKKFYEAF

SEQ ID NO: 34794 - protein, 9 aa, Homo Sapiens
NYKKFYEQF

SEQ ID NO: 34795 - protein, 9 aa, Homo Sapiens
NYKLTSITF

SEQ ID NO: 34796 - protein, 9 aa, Homo Sapiens
NYLHLDYNF

SEQ ID NO: 34797 - protein, 9 aa, Homo Sapiens
NYLKDGPYI

SEQ ID NO: 34798 - protein, 9 aa, Homo Sapiens
NYLSHHLTI

SEQ ID NO: 34799 - protein, 9 aa, Homo Sapiens
NYLSIFRKF

SEQ ID NO: 34800 - protein, 9 aa, Homo Sapiens
NYMPGQLTI

SEQ ID NO: 34801 - protein, 9 aa, Homo Sapiens
NYQVQFVTL

SEQ ID NO: 34802 - protein, 9 aa, Homo Sapiens
NYRPHPQRF

SEQ ID NO: 34803 - protein, 9 aa, Homo Sapiens
NYSNIRFQF

SEQ ID NO: 34804 - protein, 9 aa, Homo Sapiens
NYSPYVNYF

SEQ ID NO: 34805 - protein, 9 aa, Homo Sapiens
NYSYLHCEW

SEQ ID NO: 34806 - protein, 9 aa, Homo Sapiens
NYTEAAYTL

SEQ ID NO: 34807 - protein, 9 aa, Homo Sapiens
NYTGVQILL

SEQ ID NO: 34808 - protein, 9 aa, Homo Sapiens
NYTLVSHLI

SEQ ID NO: 34809 - protein, 9 aa, Homo Sapiens
PFAKPLPTF

SEQ ID NO: 34810 - protein, 9 aa, Homo Sapiens
PFAPAIQTF

SEQ ID NO: 34811 - protein, 9 aa, Homo Sapiens
PFCDGSHFF

SEQ ID NO: 34812 - protein, 9 aa, Homo Sapiens
PFFSIPVVW

SEQ ID NO: 34813 - protein, 9 aa, Homo Sapiens
PFIDSQHVI

SEQ ID NO: 34814 - protein, 9 aa, Homo Sapiens
PFKSPSIGF

SEQ ID NO: 34815 - protein, 9 aa, Homo Sapiens
PFLDIQKRF

SEQ ID NO: 34816 - protein, 9 aa, Homo Sapiens
PFLPKPLFF

SEQ ID NO: 34817 - protein, 9 aa, Homo Sapiens
PFLTKPAGF

SEQ ID NO: 34818 - protein, 9 aa, Homo Sapiens
PFTDQIFHF

SEQ ID NO: 34819 - protein, 9 aa, Homo Sapiens
PFTHFLAFF

SEQ ID NO: 34820 - protein, 9 aa, Homo Sapiens
PFTSLHVQL

SEQ ID NO: 34821 - protein, 9 aa, Homo Sapiens
PFVDHVFTF

SEQ ID NO: 34822 - protein, 9 aa, Homo Sapiens
PSGGFFPTI

SEQ ID NO: 34823 - protein, 9 aa, Homo Sapiens
PWLFDAPKF

SEQ ID NO: 34824 - protein, 9 aa, Homo Sapiens
PYCSKPITL

SEQ ID NO: 34825 - protein, 9 aa, Homo Sapiens
PYFNAPVYL

SEQ ID NO: 34826 - protein, 9 aa, Homo Sapiens
PYHIYPFIF

SEQ ID NO: 34827 - protein, 9 aa, Homo Sapiens
PYHPHPHVF

SEQ ID NO: 34828 - protein, 9 aa, Homo Sapiens
PYISNIYLI

SEQ ID NO: 34829 - protein, 9 aa, Homo Sapiens
PYKVTQDEL

SEQ ID NO: 34830 - protein, 9 aa, Homo Sapiens
PYLDKFFAL

SEQ ID NO: 34831 - protein, 9 aa, Homo Sapiens
PYLFHVVTF

SEQ ID NO: 34832 - protein, 9 aa, Homo Sapiens
PYLISGSKF

SEQ ID NO: 34833 - protein, 9 aa, Homo Sapiens
PYMAKFVVF

SEQ ID NO: 34834 - protein, 9 aa, Homo Sapiens
PYMANVYLI

SEQ ID NO: 34835 - protein, 9 aa, Homo Sapiens
PYMSSPCHI

SEQ ID NO: 34836 - protein, 9 aa, Homo Sapiens
PYNDYFEYF

SEQ ID NO: 34837 - protein, 9 aa, Homo Sapiens
PYNHQHEYF

SEQ ID NO: 34838 - protein, 9 aa, Homo Sapiens
PYPPPPPEF

SEQ ID NO: 34839 - protein, 9 aa, Homo Sapiens
PYRPIPVTW

SEQ ID NO: 34840 - protein, 9 aa, Homo Sapiens
PYSDSTAKL

SEQ ID NO: 34841 - protein, 9 aa, Homo Sapiens
PYSPPAFRF

SEQ ID NO: 34842 - protein, 9 aa, Homo Sapiens
PYSPPTFRF

SEQ ID NO: 34843 - protein, 9 aa, Homo Sapiens
PYVDNSYKW

SEQ ID NO: 34844 - protein, 9 aa, Homo Sapiens
PYYSKFILI

SEQ ID NO: 34845 - protein, 9 aa, Homo Sapiens
QFFIHPLMI

SEQ ID NO: 34846 - protein, 9 aa, Homo Sapiens
QFHDLMELF

SEQ ID NO: 34847 - protein, 9 aa, Homo Sapiens
QFHPDGLIF

SEQ ID NO: 34848 - protein, 9 aa, Homo Sapiens
QFIDKPVCF

SEQ ID NO: 34849 - protein, 9 aa, Homo Sapiens
QFIGYPITL

SEQ ID NO: 34850 - protein, 9 aa, Homo Sapiens
QFNPKFMTF

SEQ ID NO: 34851 - protein, 9 aa, Homo Sapiens
QFTDTPLQI

SEQ ID NO: 34852 - protein, 9 aa, Homo Sapiens
QFTENHLQF

SEQ ID NO: 34853 - protein, 9 aa, Homo Sapiens
QFVPKSHLF

SEQ ID NO: 34854 - protein, 9 aa, Homo Sapiens
QLPELFHKI

SEQ ID NO: 34855 - protein, 9 aa, Homo Sapiens
QMPTVHYEF

SEQ ID NO: 34856 - protein, 9 aa, Homo Sapiens
QWPELLLRF

SEQ ID NO: 34857 - protein, 9 aa, Homo Sapiens
QYASAFHFL

SEQ ID NO: 34858 - protein, 9 aa, Homo Sapiens
QYAVLLNRF

SEQ ID NO: 34859 - protein, 9 aa, Homo Sapiens
QYEPLFHML

SEQ ID NO: 34860 - protein, 9 aa, Homo Sapiens
QYILFPLRF

SEQ ID NO: 34861 - protein, 9 aa, Homo Sapiens
QYLECPQYL

SEQ ID NO: 34862 - protein, 9 aa, Homo Sapiens
QYLEEAPKF

SEQ ID NO: 34863 - protein, 9 aa, Homo Sapiens
QYLIKHHNI

SEQ ID NO: 34864 - protein, 9 aa, Homo Sapiens
QYMELFNKI

SEQ ID NO: 34865 - protein, 9 aa, Homo Sapiens
QYNPHVHQL

SEQ ID NO: 34866 - protein, 9 aa, Homo Sapiens
QYNTYPIKL

SEQ ID NO: 34867 - protein, 9 aa, Homo Sapiens
QYPFPLPVF

SEQ ID NO: 34868 - protein, 9 aa, Homo Sapiens
QYSPLLAAF

SEQ ID NO: 34869 - protein, 9 aa, Homo Sapiens
QYTPHSHQF

SEQ ID NO: 34870 - protein, 9 aa, Homo Sapiens
QYVDFHNQL

SEQ ID NO: 34871 - protein, 9 aa, Homo Sapiens
QYYFNQHIF

SEQ ID NO: 34872 - protein, 9 aa, Homo Sapiens
RFCDAHLVL

SEQ ID NO: 34873 - protein, 9 aa, Homo Sapiens
RFCDNVWTF

SEQ ID NO: 34874 - protein, 9 aa, Homo Sapiens
RFEEAHFTF

SEQ ID NO: 34875 - protein, 9 aa, Homo Sapiens
RFEEKHAYF

SEQ ID NO: 34876 - protein, 9 aa, Homo Sapiens
RFFSDKETF

SEQ ID NO: 34877 - protein, 9 aa, Homo Sapiens
RFHEICSNL

SEQ ID NO: 34878 - protein, 9 aa, Homo Sapiens
RFHPKQLYF

SEQ ID NO: 34879 - protein, 9 aa, Homo Sapiens
RFHPTPLLL

SEQ ID NO: 34880 - protein, 9 aa, Homo Sapiens
RFHQLDVKF

SEQ ID NO: 34881 - protein, 9 aa, Homo Sapiens
RFIDAVYKL

SEQ ID NO: 34882 - protein, 9 aa, Homo Sapiens
RFIGATANF

SEQ ID NO: 34883 - protein, 9 aa, Homo Sapiens
RFILNLPTF

SEQ ID NO: 34884 - protein, 9 aa, Homo Sapiens
RFIPYTEEF

SEQ ID NO: 34885 - protein, 9 aa, Homo Sapiens
RFLAATFLL

SEQ ID NO: 34886 - protein, 9 aa, Homo Sapiens
RFLDKALEL

SEQ ID NO: 34887 - protein, 9 aa, Homo Sapiens
RFLLEGQVF

SEQ ID NO: 34888 - protein, 9 aa, Homo Sapiens
RFLPEALFL

SEQ ID NO: 34889 - protein, 9 aa, Homo Sapiens
RFLPSPVVI

SEQ ID NO: 34890 - protein, 9 aa, Homo Sapiens
RFLTGPLNL

SEQ ID NO: 34891 - protein, 9 aa, Homo Sapiens
RFLVKSHYI

SEQ ID NO: 34892 - protein, 9 aa, Homo Sapiens
RFMDGHITF

SEQ ID NO: 34893 - protein, 9 aa, Homo Sapiens
RFPNFTNQL

SEQ ID NO: 34894 - protein, 9 aa, Homo Sapiens
RFQEKFFIF

SEQ ID NO: 34895 - protein, 9 aa, Homo Sapiens
RFSEIPMKL

SEQ ID NO: 34896 - protein, 9 aa, Homo Sapiens
RFSLNTVEL

SEQ ID NO: 34897 - protein, 9 aa, Homo Sapiens
RFTLPPLVF

SEQ ID NO: 34898 - protein, 9 aa, Homo Sapiens
RFTYVLQDW

SEQ ID NO: 34899 - protein, 9 aa, Homo Sapiens
RFVMKAHSF

SEQ ID NO: 34900 - protein, 9 aa, Homo Sapiens
RFYYDPPEF

SEQ ID NO: 34901 - protein, 9 aa, Homo Sapiens
RGFHWRQKF

SEQ ID NO: 34902 - protein, 9 aa, Homo Sapiens
RISLPLPNF

SEQ ID NO: 34903 - protein, 9 aa, Homo Sapiens
RLPEEWSQW

SEQ ID NO: 34904 - protein, 9 aa, Homo Sapiens
RLPEPLPSW

SEQ ID NO: 34905 - protein, 9 aa, Homo Sapiens
RLPLRLFLI

SEQ ID NO: 34906 - protein, 9 aa, Homo Sapiens
RWHINFTTF

SEQ ID NO: 34907 - protein, 9 aa, Homo Sapiens
RWLAQPYYL

SEQ ID NO: 34908 - protein, 9 aa, Homo Sapiens
RWPKKSAEF

SEQ ID NO: 34909 - protein, 9 aa, Homo Sapiens
RWTDGLYYL

SEQ ID NO: 34910 - protein, 9 aa, Homo Sapiens
RWTEYGLTF

SEQ ID NO: 34911 - protein, 9 aa, Homo Sapiens
RYALIMHKL

SEQ ID NO: 34912 - protein, 9 aa, Homo Sapiens
RYCEGHFSL

SEQ ID NO: 34913 - protein, 9 aa, Homo Sapiens
RYDNVTILF

SEQ ID NO: 34914 - protein, 9 aa, Homo Sapiens
RYFENPQVI

SEQ ID NO: 34915 - protein, 9 aa, Homo Sapiens
RYFKTPRKF

SEQ ID NO: 34916 - protein, 9 aa, Homo Sapiens
RYGDGGSTF

SEQ ID NO: 34917 - protein, 9 aa, Homo Sapiens
RYGIHPAKF

SEQ ID NO: 34918 - protein, 9 aa, Homo Sapiens
RYGNTPFLF

SEQ ID NO: 34919 - protein, 9 aa, Homo Sapiens
RYIDRIHIF

SEQ ID NO: 34920 - protein, 9 aa, Homo Sapiens
RYIDTHNRV

SEQ ID NO: 34921 - protein, 9 aa, Homo Sapiens
RYIFAKNLF

SEQ ID NO: 34922 - protein, 9 aa, Homo Sapiens
RYILEPFFI

SEQ ID NO: 34923 - protein, 9 aa, Homo Sapiens
RYINNPLLI

SEQ ID NO: 34924 - protein, 9 aa, Homo Sapiens
RYIPTAAAF

SEQ ID NO: 34925 - protein, 9 aa, Homo Sapiens
RYIRDAHTF

SEQ ID NO: 34926 - protein, 9 aa, Homo Sapiens
RYKEKVAEL

SEQ ID NO: 34927 - protein, 9 aa, Homo Sapiens
RYKLYQEMF

SEQ ID NO: 34928 - protein, 9 aa, Homo Sapiens
RYKQDVERF

SEQ ID NO: 34929 - protein, 9 aa, Homo Sapiens
RYLAEKYEW

SEQ ID NO: 34930 - protein, 9 aa, Homo Sapiens
RYLDLFTSF

SEQ ID NO: 34931 - protein, 9 aa, Homo Sapiens
RYLDLLTTW

SEQ ID NO: 34932 - protein, 9 aa, Homo Sapiens
RYLEKNVKL

SEQ ID NO: 34933 - protein, 9 aa, Homo Sapiens
RYLEKPMEI

SEQ ID NO: 34934 - protein, 9 aa, Homo Sapiens
RYLEQLHQL

SEQ ID NO: 34935 - protein, 9 aa, Homo Sapiens
RYLEYFEKI

SEQ ID NO: 34936 - protein, 9 aa, Homo Sapiens
RYLHKPYLI

SEQ ID NO: 34937 - protein, 9 aa, Homo Sapiens
RYLLKFEQI

SEQ ID NO: 34938 - protein, 9 aa, Homo Sapiens
RYLNEFEEL

SEQ ID NO: 34939 - protein, 9 aa, Homo Sapiens
RYLNKAFHI

SEQ ID NO: 34940 - protein, 9 aa, Homo Sapiens
RYLPDTLLL

SEQ ID NO: 34941 - protein, 9 aa, Homo Sapiens
RYLPQCSYF

SEQ ID NO: 34942 - protein, 9 aa, Homo Sapiens
RYLQTLTTI

SEQ ID NO: 34943 - protein, 9 aa, Homo Sapiens
RYLTVAAVF

SEQ ID NO: 34944 - protein, 9 aa, Homo Sapiens
RYMPDICVI

SEQ ID NO: 34945 - protein, 9 aa, Homo Sapiens
RYMPQNPHI

SEQ ID NO: 34946 - protein, 9 aa, Homo Sapiens
RYNEKCFKL

SEQ ID NO: 34947 - protein, 9 aa, Homo Sapiens
RYNPENNTW

SEQ ID NO: 34948 - protein, 9 aa, Homo Sapiens
RYNPNLNTW

SEQ ID NO: 34949 - protein, 9 aa, Homo Sapiens
RYNSQLLSF

SEQ ID NO: 34950 - protein, 9 aa, Homo Sapiens
RYPCFFNTL

SEQ ID NO: 34951 - protein, 9 aa, Homo Sapiens
RYPDSHQLF

SEQ ID NO: 34952 - protein, 9 aa, Homo Sapiens
RYPSNLQLF

SEQ ID NO: 34953 - protein, 9 aa, Homo Sapiens
RYSDSTFTF

SEQ ID NO: 34954 - protein, 9 aa, Homo Sapiens
RYSEYAEEF

SEQ ID NO: 34955 - protein, 9 aa, Homo Sapiens
RYSPVLSRF

SEQ ID NO: 34956 - protein, 9 aa, Homo Sapiens
RYSRKGFLF

SEQ ID NO: 34957 - protein, 9 aa, Homo Sapiens
RYTIVQQQI

SEQ ID NO: 34958 - protein, 9 aa, Homo Sapiens
RYTLQASTF

SEQ ID NO: 34959 - protein, 9 aa, Homo Sapiens
RYTPVGRSF

SEQ ID NO: 34960 - protein, 9 aa, Homo Sapiens
RYTTAGQLW

SEQ ID NO: 34961 - protein, 9 aa, Homo Sapiens
RYVPRASYF

SEQ ID NO: 34962 - protein, 9 aa, Homo Sapiens
RYYHCAVTL

SEQ ID NO: 34963 - protein, 9 aa, Homo Sapiens
SFCDKVMRW

SEQ ID NO: 34964 - protein, 9 aa, Homo Sapiens
SFHNIHNTF

SEQ ID NO: 34965 - protein, 9 aa, Homo Sapiens
SFHQVDYTF

SEQ ID NO: 34966 - protein, 9 aa, Homo Sapiens
SFIGAFLTF

SEQ ID NO: 34967 - protein, 9 aa, Homo Sapiens
SFINSNLKF

SEQ ID NO: 34968 - protein, 9 aa, Homo Sapiens
SFIQHYYQL

SEQ ID NO: 34969 - protein, 9 aa, Homo Sapiens
SFISGLFNF

SEQ ID NO: 34970 - protein, 9 aa, Homo Sapiens
SFITSSWTF

SEQ ID NO: 34971 - protein, 9 aa, Homo Sapiens
SFLFVHPEW

SEQ ID NO: 34972 - protein, 9 aa, Homo Sapiens
SFLKFHPEL

SEQ ID NO: 34973 - protein, 9 aa, Homo Sapiens
SFLPVHLGF

SEQ ID NO: 34974 - protein, 9 aa, Homo Sapiens
SFLPVVSTF

SEQ ID NO: 34975 - protein, 9 aa, Homo Sapiens
SFLTIPLCL

SEQ ID NO: 34976 - protein, 9 aa, Homo Sapiens
SFMPNSPRF

SEQ ID NO: 34977 - protein, 9 aa, Homo Sapiens
SFNPYSEFI

SEQ ID NO: 34978 - protein, 9 aa, Homo Sapiens
SFNSLPLLI

SEQ ID NO: 34979 - protein, 9 aa, Homo Sapiens
SFSHSGYQF

SEQ ID NO: 34980 - protein, 9 aa, Homo Sapiens
SFSTVHEKF

SEQ ID NO: 34981 - protein, 9 aa, Homo Sapiens
SFSTVTNTF

SEQ ID NO: 34982 - protein, 9 aa, Homo Sapiens
SFTPVGDVF

SEQ ID NO: 34983 - protein, 9 aa, Homo Sapiens
SFTQIQATF

SEQ ID NO: 34984 - protein, 9 aa, Homo Sapiens
SFVLLPLVW

SEQ ID NO: 34985 - protein, 9 aa, Homo Sapiens
SLPDFCHKF

SEQ ID NO: 34986 - protein, 9 aa, Homo Sapiens
SLPEDFYHF

SEQ ID NO: 34987 - protein, 9 aa, Homo Sapiens
SLPGNFFYL

SEQ ID NO: 34988 - protein, 9 aa, Homo Sapiens
SLPKFYLLF

SEQ ID NO: 34989 - protein, 9 aa, Homo Sapiens
SPSTSIFFI

SEQ ID NO: 34990 - protein, 9 aa, Homo Sapiens
SWYHGALTF

SEQ ID NO: 34991 - protein, 9 aa, Homo Sapiens
SYIALPLTL

SEQ ID NO: 34992 - protein, 9 aa, Homo Sapiens
SYIDVAVKL

SEQ ID NO: 34993 - protein, 9 aa, Homo Sapiens
SYIEHIFEI

SEQ ID NO: 34994 - protein, 9 aa, Homo Sapiens
SYIELPAYL

SEQ ID NO: 34995 - protein, 9 aa, Homo Sapiens
SYIGVHQQI

SEQ ID NO: 34996 - protein, 9 aa, Homo Sapiens
SYIHQRYIL

SEQ ID NO: 34997 - protein, 9 aa, Homo Sapiens
SYIISGCLF

SEQ ID NO: 34998 - protein, 9 aa, Homo Sapiens
SYIPSTVFF

SEQ ID NO: 34999 - protein, 9 aa, Homo Sapiens
SYLDSVHFF

SEQ ID NO: 35000 - protein, 9 aa, Homo Sapiens
SYLPISPTF

SEQ ID NO: 35001 - protein, 9 aa, Homo Sapiens
SYLPLAHMF

SEQ ID NO: 35002 - protein, 9 aa, Homo Sapiens
SYLQSLLLF

SEQ ID NO: 35003 - protein, 9 aa, Homo Sapiens
SYLSSILRF

SEQ ID NO: 35004 - protein, 9 aa, Homo Sapiens
SYLTIHHRI

SEQ ID NO: 35005 - protein, 9 aa, Homo Sapiens
SYMEVPTYL

SEQ ID NO: 35006 - protein, 9 aa, Homo Sapiens
SYMGHFDLL

SEQ ID NO: 35007 - protein, 9 aa, Homo Sapiens
SYPDLLPTF

SEQ ID NO: 35008 - protein, 9 aa, Homo Sapiens
SYPNVFLVF

SEQ ID NO: 35009 - protein, 9 aa, Homo Sapiens
SYPTFFPRF

SEQ ID NO: 35010 - protein, 9 aa, Homo Sapiens
SYQDVHLLL

SEQ ID NO: 35011 - protein, 9 aa, Homo Sapiens
SYQKVIELF

SEQ ID NO: 35012 - protein, 9 aa, Homo Sapiens
SYSDPPLKF

SEQ ID NO: 35013 - protein, 9 aa, Homo Sapiens
SYSPQAFKF

SEQ ID NO: 35014 - protein, 9 aa, Homo Sapiens
SYTHIQYLF

SEQ ID NO: 35015 - protein, 9 aa, Homo Sapiens
SYTRLFSNF

SEQ ID NO: 35016 - protein, 9 aa, Homo Sapiens
SYTSVKENF

SEQ ID NO: 35017 - protein, 9 aa, Homo Sapiens
SYTYLSLGF

SEQ ID NO: 35018 - protein, 9 aa, Homo Sapiens
SYVRSLPFF

SEQ ID NO: 35019 - protein, 9 aa, Homo Sapiens
SYYKDALRF

SEQ ID NO: 35020 - protein, 9 aa, Homo Sapiens
TFDDVAVTF

SEQ ID NO: 35021 - protein, 9 aa, Homo Sapiens
TFESSHYLL

SEQ ID NO: 35022 - protein, 9 aa, Homo Sapiens
TFFPFHEYF

SEQ ID NO: 35023 - protein, 9 aa, Homo Sapiens
TFHALPSHF

SEQ ID NO: 35024 - protein, 9 aa, Homo Sapiens
TFHSFFQHF

SEQ ID NO: 35025 - protein, 9 aa, Homo Sapiens
TFILQKILL

SEQ ID NO: 35026 - protein, 9 aa, Homo Sapiens
TFISYSVTF

SEQ ID NO: 35027 - protein, 9 aa, Homo Sapiens
TFKDVGNLL

SEQ ID NO: 35028 - protein, 9 aa, Homo Sapiens
TFLLTRELW

SEQ ID NO: 35029 - protein, 9 aa, Homo Sapiens
TFLMSSFTF

SEQ ID NO: 35030 - protein, 9 aa, Homo Sapiens
TFLNHPALI

SEQ ID NO: 35031 - protein, 9 aa, Homo Sapiens
TFPSLLLVF

SEQ ID NO: 35032 - protein, 9 aa, Homo Sapiens
TFSDVEAHF

SEQ ID NO: 35033 - protein, 9 aa, Homo Sapiens
TFSPHFHHF

SEQ ID NO: 35034 - protein, 9 aa, Homo Sapiens
TFTDHVMLF

SEQ ID NO: 35035 - protein, 9 aa, Homo Sapiens
TFTFSHATF

SEQ ID NO: 35036 - protein, 9 aa, Homo Sapiens
TFTKIVNKW

SEQ ID NO: 35037 - protein, 9 aa, Homo Sapiens
TFTNQIHKW

SEQ ID NO: 35038 - protein, 9 aa, Homo Sapiens
TFTPFPHAI

SEQ ID NO: 35039 - protein, 9 aa, Homo Sapiens
TLSDIFLLF

SEQ ID NO: 35040 - protein, 9 aa, Homo Sapiens
TMLGKFYHF

SEQ ID NO: 35041 - protein, 9 aa, Homo Sapiens
TYDIGHVLL

SEQ ID NO: 35042 - protein, 9 aa, Homo Sapiens
TYDPFHNCW

SEQ ID NO: 35043 - protein, 9 aa, Homo Sapiens
TYFSTPLLL

SEQ ID NO: 35044 - protein, 9 aa, Homo Sapiens
TYGEIFEKF

SEQ ID NO: 35045 - protein, 9 aa, Homo Sapiens
TYHGVFVNI

SEQ ID NO: 35046 - protein, 9 aa, Homo Sapiens
TYHPGVPVF

SEQ ID NO: 35047 - protein, 9 aa, Homo Sapiens
TYIKSPPFF

SEQ ID NO: 35048 - protein, 9 aa, Homo Sapiens
TYINPFVSF

SEQ ID NO: 35049 - protein, 9 aa, Homo Sapiens
TYIRCPSFF

SEQ ID NO: 35050 - protein, 9 aa, Homo Sapiens
TYITSVSRL

SEQ ID NO: 35051 - protein, 9 aa, Homo Sapiens
TYKDYVDLF

SEQ ID NO: 35052 - protein, 9 aa, Homo Sapiens
TYKPNPNQI

SEQ ID NO: 35053 - protein, 9 aa, Homo Sapiens
TYLDIPLVI

SEQ ID NO: 35054 - protein, 9 aa, Homo Sapiens
TYLEKAIKI

SEQ ID NO: 35055 - protein, 9 aa, Homo Sapiens
TYLPQTYII

SEQ ID NO: 35056 - protein, 9 aa, Homo Sapiens
TYLPTSPLL

SEQ ID NO: 35057 - protein, 9 aa, Homo Sapiens
TYLTIFDLF

SEQ ID NO: 35058 - protein, 9 aa, Homo Sapiens
TYNQKHSLF

SEQ ID NO: 35059 - protein, 9 aa, Homo Sapiens
TYNYPVHYF

SEQ ID NO: 35060 - protein, 9 aa, Homo Sapiens
TYPQTPLHL

SEQ ID NO: 35061 - protein, 9 aa, Homo Sapiens
TYQDIQNTI

SEQ ID NO: 35062 - protein, 9 aa, Homo Sapiens
TYQRWQFTL

SEQ ID NO: 35063 - protein, 9 aa, Homo Sapiens
TYQVLAVTF

SEQ ID NO: 35064 - protein, 9 aa, Homo Sapiens
TYSKKHFRI

SEQ ID NO: 35065 - protein, 9 aa, Homo Sapiens
TYSNFHPLL

SEQ ID NO: 35066 - protein, 9 aa, Homo Sapiens
TYTDRVFFL

SEQ ID NO: 35067 - protein, 9 aa, Homo Sapiens
TYTSARTLL

SEQ ID NO: 35068 - protein, 9 aa, Homo Sapiens
TYTYEKLLW

SEQ ID NO: 35069 - protein, 9 aa, Homo Sapiens
TYVPWPLML

SEQ ID NO: 35070 - protein, 9 aa, Homo Sapiens
TYVSFPLEL

SEQ ID NO: 35071 - protein, 9 aa, Homo Sapiens
TYVSGTLRF

SEQ ID NO: 35072 - protein, 9 aa, Homo Sapiens
VFADVETHF

SEQ ID NO: 35073 - protein, 9 aa, Homo Sapiens
VFAGVFNTF

SEQ ID NO: 35074 - protein, 9 aa, Homo Sapiens
VFDPKVFTF

SEQ ID NO: 35075 - protein, 9 aa, Homo Sapiens
VFDPVQKTL

SEQ ID NO: 35076 - protein, 9 aa, Homo Sapiens
VFDPVTKLW

SEQ ID NO: 35077 - protein, 9 aa, Homo Sapiens
VFEDVFVYF

SEQ ID NO: 35078 - protein, 9 aa, Homo Sapiens
VFESWMHHW

SEQ ID NO: 35079 - protein, 9 aa, Homo Sapiens
VFGGQRLTL

SEQ ID NO: 35080 - protein, 9 aa, Homo Sapiens
VFGYHGYTF

SEQ ID NO: 35081 - protein, 9 aa, Homo Sapiens
VFIDGPLAL

SEQ ID NO: 35082 - protein, 9 aa, Homo Sapiens
VFIDKQTNL

SEQ ID NO: 35083 - protein, 9 aa, Homo Sapiens
VFIGNLNTL

SEQ ID NO: 35084 - protein, 9 aa, Homo Sapiens
VFIGTGHLL

SEQ ID NO: 35085 - protein, 9 aa, Homo Sapiens
VFIRGGEEF

SEQ ID NO: 35086 - protein, 9 aa, Homo Sapiens
VFKEKHHSW

SEQ ID NO: 35087 - protein, 9 aa, Homo Sapiens
VFKNDQDTW

SEQ ID NO: 35088 - protein, 9 aa, Homo Sapiens
VFKPISSTW

SEQ ID NO: 35089 - protein, 9 aa, Homo Sapiens
VFKPIVEKF

SEQ ID NO: 35090 - protein, 9 aa, Homo Sapiens
VFLALPCKF

SEQ ID NO: 35091 - protein, 9 aa, Homo Sapiens
VFLKSPIVI

SEQ ID NO: 35092 - protein, 9 aa, Homo Sapiens
VFLLKPLKW

SEQ ID NO: 35093 - protein, 9 aa, Homo Sapiens
VFLRAINKF

SEQ ID NO: 35094 - protein, 9 aa, Homo Sapiens
VFLSPLTTF

SEQ ID NO: 35095 - protein, 9 aa, Homo Sapiens
VFLTDTIRI

SEQ ID NO: 35096 - protein, 9 aa, Homo Sapiens
VFNDVRLLL

SEQ ID NO: 35097 - protein, 9 aa, Homo Sapiens
VFNGCPLRI

SEQ ID NO: 35098 - protein, 9 aa, Homo Sapiens
VFNPAKELI

SEQ ID NO: 35099 - protein, 9 aa, Homo Sapiens
VFPDFYLHL

SEQ ID NO: 35100 - protein, 9 aa, Homo Sapiens
VFPDKGYSF

SEQ ID NO: 35101 - protein, 9 aa, Homo Sapiens
VFPEKGYSF

SEQ ID NO: 35102 - protein, 9 aa, Homo Sapiens
VFPFRTFYL

SEQ ID NO: 35103 - protein, 9 aa, Homo Sapiens
VFPGHPVQF

SEQ ID NO: 35104 - protein, 9 aa, Homo Sapiens
VFPTRTARF

SEQ ID NO: 35105 - protein, 9 aa, Homo Sapiens
VFQDRQYQI

SEQ ID NO: 35106 - protein, 9 aa, Homo Sapiens
VFRLQFDEF

SEQ ID NO: 35107 - protein, 9 aa, Homo Sapiens
VFSLIGLHF

SEQ ID NO: 35108 - protein, 9 aa, Homo Sapiens
VFSPDGHLF

SEQ ID NO: 35109 - protein, 9 aa, Homo Sapiens
VFSTVVIHF

SEQ ID NO: 35110 - protein, 9 aa, Homo Sapiens
VFTAFTEEF

SEQ ID NO: 35111 - protein, 9 aa, Homo Sapiens
VFTDEMAHF

SEQ ID NO: 35112 - protein, 9 aa, Homo Sapiens
VFTEVANLF

SEQ ID NO: 35113 - protein, 9 aa, Homo Sapiens
VFTFVYDTI

SEQ ID NO: 35114 - protein, 9 aa, Homo Sapiens
VFTGGALYF

SEQ ID NO: 35115 - protein, 9 aa, Homo Sapiens
VFTGVVTKL

SEQ ID NO: 35116 - protein, 9 aa, Homo Sapiens
VFTIKADVW

SEQ ID NO: 35117 - protein, 9 aa, Homo Sapiens
VFTLKPLEF

SEQ ID NO: 35118 - protein, 9 aa, Homo Sapiens
VFTNTIKLI

SEQ ID NO: 35119 - protein, 9 aa, Homo Sapiens
VFTPVTTEI

SEQ ID NO: 35120 - protein, 9 aa, Homo Sapiens
VFTPVVQRI

SEQ ID NO: 35121 - protein, 9 aa, Homo Sapiens
VFTRSELKF

SEQ ID NO: 35122 - protein, 9 aa, Homo Sapiens
VFTSVRQKI

SEQ ID NO: 35123 - protein, 9 aa, Homo Sapiens
VFTVGPKTF

SEQ ID NO: 35124 - protein, 9 aa, Homo Sapiens
VFTYVGALF

SEQ ID NO: 35125 - protein, 9 aa, Homo Sapiens
VFVATFLRY

SEQ ID NO: 35126 - protein, 9 aa, Homo Sapiens
VFVDRAACF

SEQ ID NO: 35127 - protein, 9 aa, Homo Sapiens
VFVEATHVL

SEQ ID NO: 35128 - protein, 9 aa, Homo Sapiens
VFVGKGITF

SEQ ID NO: 35129 - protein, 9 aa, Homo Sapiens
VFVKPLVLF

SEQ ID NO: 35130 - protein, 9 aa, Homo Sapiens
VFVNIQYTL

SEQ ID NO: 35131 - protein, 9 aa, Homo Sapiens
VFVNTHHIL

SEQ ID NO: 35132 - protein, 9 aa, Homo Sapiens
VFVPVAYSL

SEQ ID NO: 35133 - protein, 9 aa, Homo Sapiens
VFYELAHQL

SEQ ID NO: 35134 - protein, 9 aa, Homo Sapiens
VFYPFVDLI

SEQ ID NO: 35135 - protein, 9 aa, Homo Sapiens
VFYPYPQYF

SEQ ID NO: 35136 - protein, 9 aa, Homo Sapiens
VLFFFNLLF

SEQ ID NO: 35137 - protein, 9 aa, Homo Sapiens
VLPGHFNTF

SEQ ID NO: 35138 - protein, 9 aa, Homo Sapiens
VLPHFNVLF

SEQ ID NO: 35139 - protein, 9 aa, Homo Sapiens
VLPKLYVKL

SEQ ID NO: 35140 - protein, 9 aa, Homo Sapiens
VLPNIHPEL

SEQ ID NO: 35141 - protein, 9 aa, Homo Sapiens
VLPNTALHL

SEQ ID NO: 35142 - protein, 9 aa, Homo Sapiens
VLPSVLNKF

SEQ ID NO: 35143 - protein, 9 aa, Homo Sapiens
VMAPRTLVL

SEQ ID NO: 35144 - protein, 9 aa, Homo Sapiens
VMPSSFFLL

SEQ ID NO: 35145 - protein, 9 aa, Homo Sapiens
VMSATFAKF

SEQ ID NO: 35146 - protein, 9 aa, Homo Sapiens
VSAYPSFKF

SEQ ID NO: 35147 - protein, 9 aa, Homo Sapiens
VWCMKALEF

SEQ ID NO: 35148 - protein, 9 aa, Homo Sapiens
VYADQPHIF

SEQ ID NO: 35149 - protein, 9 aa, Homo Sapiens
VYAFNLDTF

SEQ ID NO: 35150 - protein, 9 aa, Homo Sapiens
VYAHFPINV

SEQ ID NO: 35151 - protein, 9 aa, Homo Sapiens
VYALPTIAF

SEQ ID NO: 35152 - protein, 9 aa, Homo Sapiens
VYAPPVGGF

SEQ ID NO: 35153 - protein, 9 aa, Homo Sapiens
VYASDRATF

SEQ ID NO: 35154 - protein, 9 aa, Homo Sapiens
VYCARFVEL

SEQ ID NO: 35155 - protein, 9 aa, Homo Sapiens
VYCIGQRKF

SEQ ID NO: 35156 - protein, 9 aa, Homo Sapiens
VYDSVAFPE

SEQ ID NO: 35157 - protein, 9 aa, Homo Sapiens
VYDTNPAKF

SEQ ID NO: 35158 - protein, 9 aa, Homo Sapiens
VYDTVFKHF

SEQ ID NO: 35159 - protein, 9 aa, Homo Sapiens
VYDVVELKF

SEQ ID NO: 35160 - protein, 9 aa, Homo Sapiens
VYENVSHFL

SEQ ID NO: 35161 - protein, 9 aa, Homo Sapiens
VYGPLPQSF

SEQ ID NO: 35162 - protein, 9 aa, Homo Sapiens
VYHILKVLF

SEQ ID NO: 35163 - protein, 9 aa, Homo Sapiens
VYHKPPNAF

SEQ ID NO: 35164 - protein, 9 aa, Homo Sapiens
VYHKPPSAF

SEQ ID NO: 35165 - protein, 9 aa, Homo Sapiens
VYHNLKNVI

SEQ ID NO: 35166 - protein, 9 aa, Homo Sapiens
VYHNTEDLW

SEQ ID NO: 35167 - protein, 9 aa, Homo Sapiens
VYIGVHVPF

SEQ ID NO: 35168 - protein, 9 aa, Homo Sapiens
VYIHHFDRI

SEQ ID NO: 35169 - protein, 9 aa, Homo Sapiens
VYIKHPVSL

SEQ ID NO: 35170 - protein, 9 aa, Homo Sapiens
VYINTAQEF

SEQ ID NO: 35171 - protein, 9 aa, Homo Sapiens
VYIPCIYVL

SEQ ID NO: 35172 - protein, 9 aa, Homo Sapiens
VYIPNKVLI

SEQ ID NO: 35173 - protein, 9 aa, Homo Sapiens
VYISEHEHF

SEQ ID NO: 35174 - protein, 9 aa, Homo Sapiens
VYISNGQVL

SEQ ID NO: 35175 - protein, 9 aa, Homo Sapiens
VYIVPVIVL

SEQ ID NO: 35176 - protein, 9 aa, Homo Sapiens
VYKDLVLLL

SEQ ID NO: 35177 - protein, 9 aa, Homo Sapiens
VYKKSIFVF

SEQ ID NO: 35178 - protein, 9 aa, Homo Sapiens
VYKKYPNVF

SEQ ID NO: 35179 - protein, 9 aa, Homo Sapiens
VYKLHRETF

SEQ ID NO: 35180 - protein, 9 aa, Homo Sapiens
VYKPAQNSW

SEQ ID NO: 35181 - protein, 9 aa, Homo Sapiens
VYLDKFIRL

SEQ ID NO: 35182 - protein, 9 aa, Homo Sapiens
VYLEKFMTF

SEQ ID NO: 35183 - protein, 9 aa, Homo Sapiens
VYLHDFQRF

SEQ ID NO: 35184 - protein, 9 aa, Homo Sapiens
VYLIEHPSL

SEQ ID NO: 35185 - protein, 9 aa, Homo Sapiens
VYLLRSYCF

SEQ ID NO: 35186 - protein, 9 aa, Homo Sapiens
VYLPTAFLL

SEQ ID NO: 35187 - protein, 9 aa, Homo Sapiens
VYLPTHTSL

SEQ ID NO: 35188 - protein, 9 aa, Homo Sapiens
VYLSNVVLF

SEQ ID NO: 35189 - protein, 9 aa, Homo Sapiens
VYMDWYEKF

SEQ ID NO: 35190 - protein, 9 aa, Homo Sapiens
VYMIRVYLL

SEQ ID NO: 35191 - protein, 9 aa, Homo Sapiens
VYMNRVKEI

SEQ ID NO: 35192 - protein, 9 aa, Homo Sapiens
VYNAVLELF

SEQ ID NO: 35193 - protein, 9 aa, Homo Sapiens
VYNKVHITL

SEQ ID NO: 35194 - protein, 9 aa, Homo Sapiens
VYNPHSDTW

SEQ ID NO: 35195 - protein, 9 aa, Homo Sapiens
VYNPMPFEL

SEQ ID NO: 35196 - protein, 9 aa, Homo Sapiens
VYNPVIYVF

SEQ ID NO: 35197 - protein, 9 aa, Homo Sapiens
VYNPVRAEW

SEQ ID NO: 35198 - protein, 9 aa, Homo Sapiens
VYPEESLVI

SEQ ID NO: 35199 - protein, 9 aa, Homo Sapiens
VYPERTPLL

SEQ ID NO: 35200 - protein, 9 aa, Homo Sapiens
VYPGDPLRF

SEQ ID NO: 35201 - protein, 9 aa, Homo Sapiens
VYPGIAVFF

SEQ ID NO: 35202 - protein, 9 aa, Homo Sapiens
VYPGYYLTF

SEQ ID NO: 35203 - protein, 9 aa, Homo Sapiens
VYPLKFFFL

SEQ ID NO: 35204 - protein, 9 aa, Homo Sapiens
VYPPHSHSI

SEQ ID NO: 35205 - protein, 9 aa, Homo Sapiens
VYPPPHQVF

SEQ ID NO: 35206 - protein, 9 aa, Homo Sapiens
VYPWTQRFF

SEQ ID NO: 35207 - protein, 9 aa, Homo Sapiens
VYQHLFTRI

SEQ ID NO: 35208 - protein, 9 aa, Homo Sapiens
VYQLRFQFL

SEQ ID NO: 35209 - protein, 9 aa, Homo Sapiens
VYQYMHETI

SEQ ID NO: 35210 - protein, 9 aa, Homo Sapiens
VYRQDCETF

SEQ ID NO: 35211 - protein, 9 aa, Homo Sapiens
VYSAGVYRL

SEQ ID NO: 35212 - protein, 9 aa, Homo Sapiens
VYSEVHFTL

SEQ ID NO: 35213 - protein, 9 aa, Homo Sapiens
VYSGGVYLF

SEQ ID NO: 35214 - protein, 9 aa, Homo Sapiens
VYSIVPQSW

SEQ ID NO: 35215 - protein, 9 aa, Homo Sapiens
VYSPHVLNL

SEQ ID NO: 35216 - protein, 9 aa, Homo Sapiens
VYSPKSPSL

SEQ ID NO: 35217 - protein, 9 aa, Homo Sapiens
VYSTPTPFF

SEQ ID NO: 35218 - protein, 9 aa, Homo Sapiens
VYSVFGFSF

SEQ ID NO: 35219 - protein, 9 aa, Homo Sapiens
VYTDFAFRI

SEQ ID NO: 35220 - protein, 9 aa, Homo Sapiens
VYTDVAYYL

SEQ ID NO: 35221 - protein, 9 aa, Homo Sapiens
VYTGDALRI

SEQ ID NO: 35222 - protein, 9 aa, Homo Sapiens
VYTKANPTF

SEQ ID NO: 35223 - protein, 9 aa, Homo Sapiens
VYTKVKCKI

SEQ ID NO: 35224 - protein, 9 aa, Homo Sapiens
VYTTTRSHL

SEQ ID NO: 35225 - protein, 9 aa, Homo Sapiens
VYTWVKQCW

SEQ ID NO: 35226 - protein, 9 aa, Homo Sapiens
VYTYIQSRF

SEQ ID NO: 35227 - protein, 9 aa, Homo Sapiens
VYVATRPTI

SEQ ID NO: 35228 - protein, 9 aa, Homo Sapiens
VYVKHSISF

SEQ ID NO: 35229 - protein, 9 aa, Homo Sapiens
VYVQHPITF

SEQ ID NO: 35230 - protein, 9 aa, Homo Sapiens
VYVQNVVKL

SEQ ID NO: 35231 - protein, 9 aa, Homo Sapiens
VYVQPPLEL

SEQ ID NO: 35232 - protein, 9 aa, Homo Sapiens
VYVSDNIRI

SEQ ID NO: 35233 - protein, 9 aa, Homo Sapiens
VYVVGTAHF

SEQ ID NO: 35234 - protein, 9 aa, Homo Sapiens
VYWKIYNSI

SEQ ID NO: 35235 - protein, 9 aa, Homo Sapiens
VYWTQLNMF

SEQ ID NO: 35236 - protein, 9 aa, Homo Sapiens
VYYPVRHHL

SEQ ID NO: 35237 - protein, 9 aa, Homo Sapiens
YFDPANGKF

SEQ ID NO: 35238 - protein, 9 aa, Homo Sapiens
YFEGIKQTF

SEQ ID NO: 35239 - protein, 9 aa, Homo Sapiens
YFIPEFNLF

SEQ ID NO: 35240 - protein, 9 aa, Homo Sapiens
YFISHILAF

SEQ ID NO: 35241 - protein, 9 aa, Homo Sapiens
YFKDTHPKF

SEQ ID NO: 35242 - protein, 9 aa, Homo Sapiens
YFKRYQVKF

SEQ ID NO: 35243 - protein, 9 aa, Homo Sapiens
YFLDKIDVI

SEQ ID NO: 35244 - protein, 9 aa, Homo Sapiens
YFLKGVLVF

SEQ ID NO: 35245 - protein, 9 aa, Homo Sapiens
YFLPDHPEL

SEQ ID NO: 35246 - protein, 9 aa, Homo Sapiens
YFLQRHELL

SEQ ID NO: 35247 - protein, 9 aa, Homo Sapiens
YFLTTRQTL

SEQ ID NO: 35248 - protein, 9 aa, Homo Sapiens
YFNPHTVTL

SEQ ID NO: 35249 - protein, 9 aa, Homo Sapiens
YFSLIPTGF

SEQ ID NO: 35250 - protein, 9 aa, Homo Sapiens
YFSPSGKKF

SEQ ID NO: 35251 - protein, 9 aa, Homo Sapiens
YFSSGKYYW

SEQ ID NO: 35252 - protein, 9 aa, Homo Sapiens
YFYHGVHKI

SEQ ID NO: 35253 - protein, 9 aa, Homo Sapiens
YLPISHPRF

SEQ ID NO: 35254 - protein, 9 aa, Homo Sapiens
YVIQKFFEF

SEQ ID NO: 35255 - protein, 9 aa, Homo Sapiens
YWMHVQNTF

SEQ ID NO: 35256 - protein, 9 aa, Homo Sapiens
YWPVIPLKF

SEQ ID NO: 35257 - protein, 9 aa, Homo Sapiens
YYDKHFTEF

SEQ ID NO: 35258 - protein, 9 aa, Homo Sapiens
YYDPHQATF

SEQ ID NO: 35259 - protein, 9 aa, Homo Sapiens
YYDPKHVIF

SEQ ID NO: 35260 - protein, 9 aa, Homo Sapiens
YYEEQHPEL

SEQ ID NO: 35261 - protein, 9 aa, Homo Sapiens
YYEKQFPEI

SEQ ID NO: 35262 - protein, 9 aa, Homo Sapiens
YYEVHKELF

SEQ ID NO: 35263 - protein, 9 aa, Homo Sapiens
YYEYNHDLF

SEQ ID NO: 35264 - protein, 9 aa, Homo Sapiens
YYFALAHTV

SEQ ID NO: 35265 - protein, 9 aa, Homo Sapiens
YYFDSYAHF

SEQ ID NO: 35266 - protein, 9 aa, Homo Sapiens
YYFVFDHAL

SEQ ID NO: 35267 - protein, 9 aa, Homo Sapiens
YYGQGFPSF

SEQ ID NO: 35268 - protein, 9 aa, Homo Sapiens
YYHARVYEF

SEQ ID NO: 35269 - protein, 9 aa, Homo Sapiens
YYIDKLEYL

SEQ ID NO: 35270 - protein, 9 aa, Homo Sapiens
YYIFIPSKF

SEQ ID NO: 35271 - protein, 9 aa, Homo Sapiens
YYIIYRNVF

SEQ ID NO: 35272 - protein, 9 aa, Homo Sapiens
YYISPRITF

SEQ ID NO: 35273 - protein, 9 aa, Homo Sapiens
YYITTRAQF

SEQ ID NO: 35274 - protein, 9 aa, Homo Sapiens
YYITTRVQF

SEQ ID NO: 35275 - protein, 9 aa, Homo Sapiens
YYLDHSILL

SEQ ID NO: 35276 - protein, 9 aa, Homo Sapiens
YYLLADYHF

SEQ ID NO: 35277 - protein, 9 aa, Homo Sapiens
YYLNDLERI

SEQ ID NO: 35278 - protein, 9 aa, Homo Sapiens
YYLSDSPLL

SEQ ID NO: 35279 - protein, 9 aa, Homo Sapiens
YYLTDNLTF

SEQ ID NO: 35280 - protein, 9 aa, Homo Sapiens
YYLTHGLYL

SEQ ID NO: 35281 - protein, 9 aa, Homo Sapiens
YYNGKWEFL

SEQ ID NO: 35282 - protein, 9 aa, Homo Sapiens
YYNKVSTVF

SEQ ID NO: 35283 - protein, 9 aa, Homo Sapiens
YYPEYKLLF

SEQ ID NO: 35284 - protein, 9 aa, Homo Sapiens
YYPNPPLVL

SEQ ID NO: 35285 - protein, 9 aa, Homo Sapiens
YYQDTPKQI

SEQ ID NO: 35286 - protein, 9 aa, Homo Sapiens
YYQGGKFQF

SEQ ID NO: 35287 - protein, 9 aa, Homo Sapiens
YYQHIVTTL

SEQ ID NO: 35288 - protein, 9 aa, Homo Sapiens
YYQNYFEKL

SEQ ID NO: 35289 - protein, 9 aa, Homo Sapiens
YYSPHGHIL

SEQ ID NO: 35290 - protein, 9 aa, Homo Sapiens
YYTDIMHTL

SEQ ID NO: 35291 - protein, 9 aa, Homo Sapiens
YYTEFPTVL

SEQ ID NO: 35292 - protein, 9 aa, Homo Sapiens
YYTKGFALL

SEQ ID NO: 35293 - protein, 9 aa, Homo Sapiens
YYTPITPHL

SEQ ID NO: 35294 - protein, 9 aa, Homo Sapiens
YYTSVTPVL

SEQ ID NO: 35295 - protein, 9 aa, Homo Sapiens
YYVDFFKTL

SEQ ID NO: 35296 - protein, 9 aa, Homo Sapiens
YYVNGTYRL

SEQ ID NO: 35297 - protein, 9 aa, Homo Sapiens
YYVRILSTI

SEQ ID NO: 35298 - protein, 9 aa, Homo Sapiens
YYVWLQHTL

SEQ ID NO: 35299 - protein, 9 aa, Homo Sapiens
YYWQTSAKW

SEQ ID NO: 35300 - protein, 10 aa, Homo Sapiens
AFFEGPPFKF

SEQ ID NO: 35301 - protein, 10 aa, Homo Sapiens
AFHYIFNVQL

SEQ ID NO: 35302 - protein, 10 aa, Homo Sapiens
AFIRVVGSEF

SEQ ID NO: 35303 - protein, 10 aa, Homo Sapiens
AFLTFPGLRL

SEQ ID NO: 35304 - protein, 10 aa, Homo Sapiens
AWAPKPYHKF

SEQ ID NO: 35305 - protein, 10 aa, Homo Sapiens
AWARPLSVSF

SEQ ID NO: 35306 - protein, 10 aa, Homo Sapiens
AYTPQTHTSF

SEQ ID NO: 35307 - protein, 10 aa, Homo Sapiens
CYKLPDNVTF

SEQ ID NO: 35308 - protein, 10 aa, Homo Sapiens
EFHESGLLRF

SEQ ID NO: 35309 - protein, 10 aa, Homo Sapiens
FFHPKPVPGF

SEQ ID NO: 35310 - protein, 10 aa, Homo Sapiens
FFKPHWDEKF

SEQ ID NO: 35311 - protein, 10 aa, Homo Sapiens
FFLGLPPLLL

SEQ ID NO: 35312 - protein, 10 aa, Homo Sapiens
FFLIGPPLLI

SEQ ID NO: 35313 - protein, 10 aa, Homo Sapiens
FFLTPPCARW

SEQ ID NO: 35314 - protein, 10 aa, Homo Sapiens
FHPEAHAITL

SEQ ID NO: 35315 - protein, 10 aa, Homo Sapiens
FYLFPNRLEW

SEQ ID NO: 35316 - protein, 10 aa, Homo Sapiens
FYNSVKPIQI

SEQ ID NO: 35317 - protein, 10 aa, Homo Sapiens
GFIMPIEVHF

SEQ ID NO: 35318 - protein, 10 aa, Homo Sapiens
GLASRKPLVL

SEQ ID NO: 35319 - protein, 10 aa, Homo Sapiens
HFGPINSVAF

SEQ ID NO: 35320 - protein, 10 aa, Homo Sapiens
HYFDPQYFEF

SEQ ID NO: 35321 - protein, 10 aa, Homo Sapiens
HYIYIENQFF

SEQ ID NO: 35322 - protein, 10 aa, Homo Sapiens
HYMPPPYASL

SEQ ID NO: 35323 - protein, 10 aa, Homo Sapiens
HYNTDGSMLF

SEQ ID NO: 35324 - protein, 10 aa, Homo Sapiens
HYQDVSCLQF

SEQ ID NO: 35325 - protein, 10 aa, Homo Sapiens
IDSTNLKTHF

SEQ ID NO: 35326 - protein, 10 aa, Homo Sapiens
IFASIAGLEF

SEQ ID NO: 35327 - protein, 10 aa, Homo Sapiens
IFASIPGLEF

SEQ ID NO: 35328 - protein, 10 aa, Homo Sapiens
IFHPTQPWVF

SEQ ID NO: 35329 - protein, 10 aa, Homo Sapiens
IFIDPGYQTF

SEQ ID NO: 35330 - protein, 10 aa, Homo Sapiens
IFIDRDPTVF

SEQ ID NO: 35331 - protein, 10 aa, Homo Sapiens
IFIIPGNPGF

SEQ ID NO: 35332 - protein, 10 aa, Homo Sapiens
IFIQNSKLYF

SEQ ID NO: 35333 - protein, 10 aa, Homo Sapiens
IFLPILRTGF

SEQ ID NO: 35334 - protein, 10 aa, Homo Sapiens
IFNPRTGQLF

SEQ ID NO: 35335 - protein, 10 aa, Homo Sapiens
IFPECPHVYF

SEQ ID NO: 35336 - protein, 10 aa, Homo Sapiens
IFSKGGLVLW

SEQ ID NO: 35337 - protein, 10 aa, Homo Sapiens
IFTDLYYLTF

SEQ ID NO: 35338 - protein, 10 aa, Homo Sapiens
ILPTLVPWYF

SEQ ID NO: 35339 - protein, 10 aa, Homo Sapiens
IRDVYTLETF

SEQ ID NO: 35340 - protein, 10 aa, Homo Sapiens
IWDTAGQERF

SEQ ID NO: 35341 - protein, 10 aa, Homo Sapiens
IYADNQVMHF

SEQ ID NO: 35342 - protein, 10 aa, Homo Sapiens
IYADYIAPLF

SEQ ID NO: 35343 - protein, 10 aa, Homo Sapiens
IYDTSTDRLL

SEQ ID NO: 35344 - protein, 10 aa, Homo Sapiens
IYFDGDFGHF

SEQ ID NO: 35345 - protein, 10 aa, Homo Sapiens
IYHHALHSRW

SEQ ID NO: 35346 - protein, 10 aa, Homo Sapiens
IYHHTGNNTF

SEQ ID NO: 35347 - protein, 10 aa, Homo Sapiens
IYHNPTANSF

SEQ ID NO: 35348 - protein, 10 aa, Homo Sapiens
IYIDASCLTW

SEQ ID NO: 35349 - protein, 10 aa, Homo Sapiens
IYISTLKTEF

SEQ ID NO: 35350 - protein, 10 aa, Homo Sapiens
IYKPVTDFFL

SEQ ID NO: 35351 - protein, 10 aa, Homo Sapiens
IYLQLDCARF

SEQ ID NO: 35352 - protein, 10 aa, Homo Sapiens
IYLTFPVAMF

SEQ ID NO: 35353 - protein, 10 aa, Homo Sapiens
IYMVHIQVTL

SEQ ID NO: 35354 - protein, 10 aa, Homo Sapiens
IYPELQIERF

SEQ ID NO: 35355 - protein, 10 aa, Homo Sapiens
IYPRTQLPTW

SEQ ID NO: 35356 - protein, 10 aa, Homo Sapiens
IYPSPTGVLI

SEQ ID NO: 35357 - protein, 10 aa, Homo Sapiens
IYRDVKPENF

SEQ ID NO: 35358 - protein, 10 aa, Homo Sapiens
KFIDPIYQVW

SEQ ID NO: 35359 - protein, 10 aa, Homo Sapiens
KFINYVKNCF

SEQ ID NO: 35360 - protein, 10 aa, Homo Sapiens
KFLDPITGTF

SEQ ID NO: 35361 - protein, 10 aa, Homo Sapiens
KFLEHTNFEF

SEQ ID NO: 35362 - protein, 10 aa, Homo Sapiens
KFMPVEGMVF

SEQ ID NO: 35363 - protein, 10 aa, Homo Sapiens
KFMTHVASQF

SEQ ID NO: 35364 - protein, 10 aa, Homo Sapiens
KFNPLNTNQF

SEQ ID NO: 35365 - protein, 10 aa, Homo Sapiens
KLPDGYEFKF

SEQ ID NO: 35366 - protein, 10 aa, Homo Sapiens
KLPNFGFVVF

SEQ ID NO: 35367 - protein, 10 aa, Homo Sapiens
KMPKVKMPKF

SEQ ID NO: 35368 - protein, 10 aa, Homo Sapiens
KWNPTAGVAF

SEQ ID NO: 35369 - protein, 10 aa, Homo Sapiens
KYIERIITRF

SEQ ID NO: 35370 - protein, 10 aa, Homo Sapiens
KYITDWQNVF

SEQ ID NO: 35371 - protein, 10 aa, Homo Sapiens
KYLEDMKTYF

SEQ ID NO: 35372 - protein, 10 aa, Homo Sapiens
KYLKPSGNMF

SEQ ID NO: 35373 - protein, 10 aa, Homo Sapiens
KYLNQTSRSF

SEQ ID NO: 35374 - protein, 10 aa, Homo Sapiens
KYLSVQGQLF

SEQ ID NO: 35375 - protein, 10 aa, Homo Sapiens
KYLTEGLLQF

SEQ ID NO: 35376 - protein, 10 aa, Homo Sapiens
KYLTQVDILL

SEQ ID NO: 35377 - protein, 10 aa, Homo Sapiens
KYLVIGDLLF

SEQ ID NO: 35378 - protein, 10 aa, Homo Sapiens
KYMDVVKERI

SEQ ID NO: 35379 - protein, 10 aa, Homo Sapiens
KYMTAVVKLF

SEQ ID NO: 35380 - protein, 10 aa, Homo Sapiens
KYSPNCKLLI

SEQ ID NO: 35381 - protein, 10 aa, Homo Sapiens
KYTEITATYF

SEQ ID NO: 35382 - protein, 10 aa, Homo Sapiens
LFIPSSKLLF

SEQ ID NO: 35383 - protein, 10 aa, Homo Sapiens
LFLPRTDYSF

SEQ ID NO: 35384 - protein, 10 aa, Homo Sapiens
LYADVGGKQF

SEQ ID NO: 35385 - protein, 10 aa, Homo Sapiens
LYIDRPLPYL

SEQ ID NO: 35386 - protein, 10 aa, Homo Sapiens
LYIYPQSLNF

SEQ ID NO: 35387 - protein, 10 aa, Homo Sapiens
LYLDKATLIW

SEQ ID NO: 35388 - protein, 10 aa, Homo Sapiens
LYLKVKGNVF

SEQ ID NO: 35389 - protein, 10 aa, Homo Sapiens
LYQPNFNTNF

SEQ ID NO: 35390 - protein, 10 aa, Homo Sapiens
LYVLGTATRW

SEQ ID NO: 35391 - protein, 10 aa, Homo Sapiens
MFLTVTRLYF

SEQ ID NO: 35392 - protein, 10 aa, Homo Sapiens
MWSPTHPALF

SEQ ID NO: 35393 - protein, 10 aa, Homo Sapiens
MYDIFPFKKL

SEQ ID NO: 35394 - protein, 10 aa, Homo Sapiens
NFFPIAGLEF

SEQ ID NO: 35395 - protein, 10 aa, Homo Sapiens
NFLELTELKF

SEQ ID NO: 35396 - protein, 10 aa, Homo Sapiens
NFLHPINTIF

SEQ ID NO: 35397 - protein, 10 aa, Homo Sapiens
NWTTAAPLLL

SEQ ID NO: 35398 - protein, 10 aa, Homo Sapiens
NYITPNPIFF

SEQ ID NO: 35399 - protein, 10 aa, Homo Sapiens
NYKDLNGNVF

SEQ ID NO: 35400 - protein, 10 aa, Homo Sapiens
NYNGHTCLHL

SEQ ID NO: 35401 - protein, 10 aa, Homo Sapiens
PDTVAPIWNL

SEQ ID NO: 35402 - protein, 10 aa, Homo Sapiens
PFIAGPYNRL

SEQ ID NO: 35403 - protein, 10 aa, Homo Sapiens
PFIPASNLFF

SEQ ID NO: 35404 - protein, 10 aa, Homo Sapiens
PYAKPIPAQF

SEQ ID NO: 35405 - protein, 10 aa, Homo Sapiens
PYNPIIGETF

SEQ ID NO: 35406 - protein, 10 aa, Homo Sapiens
PYTDVNIVTI

SEQ ID NO: 35407 - protein, 10 aa, Homo Sapiens
QFIEPFEEKF

SEQ ID NO: 35408 - protein, 10 aa, Homo Sapiens
QFTELTRLYL

SEQ ID NO: 35409 - protein, 10 aa, Homo Sapiens
QTLLCHLLIL

SEQ ID NO: 35410 - protein, 10 aa, Homo Sapiens
QYFSSGKYYW

SEQ ID NO: 35411 - protein, 10 aa, Homo Sapiens
QYLPAIRALW

SEQ ID NO: 35412 - protein, 10 aa, Homo Sapiens
QYLTFKPQTF

SEQ ID NO: 35413 - protein, 10 aa, Homo Sapiens
RFCDSSGNSF

SEQ ID NO: 35414 - protein, 10 aa, Homo Sapiens
RFGNAFLNRF

SEQ ID NO: 35415 - protein, 10 aa, Homo Sapiens
RFGPNGGLVF

SEQ ID NO: 35416 - protein, 10 aa, Homo Sapiens
RFIRPMGLRF

SEQ ID NO: 35417 - protein, 10 aa, Homo Sapiens
RFLDDLGLKF

SEQ ID NO: 35418 - protein, 10 aa, Homo Sapiens
RFLPHGQLLF

SEQ ID NO: 35419 - protein, 10 aa, Homo Sapiens
RFLVDQGYSF

SEQ ID NO: 35420 - protein, 10 aa, Homo Sapiens
RLPDTALPTL

SEQ ID NO: 35421 - protein, 10 aa, Homo Sapiens
RLPSVPFETI

SEQ ID NO: 35422 - protein, 10 aa, Homo Sapiens
RMPNSPAPHF

SEQ ID NO: 35423 - protein, 10 aa, Homo Sapiens
RWFQPAIPSW

SEQ ID NO: 35424 - protein, 10 aa, Homo Sapiens
RWFTHASPTL

SEQ ID NO: 35425 - protein, 10 aa, Homo Sapiens
RWSPVRPLVF

SEQ ID NO: 35426 - protein, 10 aa, Homo Sapiens
RYAVVLNATW

SEQ ID NO: 35427 - protein, 10 aa, Homo Sapiens
RYFDPANGKF

SEQ ID NO: 35428 - protein, 10 aa, Homo Sapiens
RYFPTQALNF

SEQ ID NO: 35429 - protein, 10 aa, Homo Sapiens
RYIDRIHIFF

SEQ ID NO: 35430 - protein, 10 aa, Homo Sapiens
RYIHPQQEAF

SEQ ID NO: 35431 - protein, 10 aa, Homo Sapiens
RYIKNPRIVL

SEQ ID NO: 35432 - protein, 10 aa, Homo Sapiens
RYKGPGFEYF

SEQ ID NO: 35433 - protein, 10 aa, Homo Sapiens
RYLHVEGGNF

SEQ ID NO: 35434 - protein, 10 aa, Homo Sapiens
RYLNSQQQYF

SEQ ID NO: 35435 - protein, 10 aa, Homo Sapiens
RYNHITATYF

SEQ ID NO: 35436 - protein, 10 aa, Homo Sapiens
RYPDTIALTF

SEQ ID NO: 35437 - protein, 10 aa, Homo Sapiens
RYPNSHTHYF

SEQ ID NO: 35438 - protein, 10 aa, Homo Sapiens
RYPPKSGNYF

SEQ ID NO: 35439 - protein, 10 aa, Homo Sapiens
RYQKSTELLI

SEQ ID NO: 35440 - protein, 10 aa, Homo Sapiens
RYTVGGLETF

SEQ ID NO: 35441 - protein, 10 aa, Homo Sapiens
RYVFQSENTF

SEQ ID NO: 35442 - protein, 10 aa, Homo Sapiens
RYYEYNHDLF

SEQ ID NO: 35443 - protein, 10 aa, Homo Sapiens
SFFKISYLTF

SEQ ID NO: 35444 - protein, 10 aa, Homo Sapiens
SFHKFHYLTF

SEQ ID NO: 35445 - protein, 10 aa, Homo Sapiens
SFIPDQHMVF

SEQ ID NO: 35446 - protein, 10 aa, Homo Sapiens
SFLVPSLLQF

SEQ ID NO: 35447 - protein, 10 aa, Homo Sapiens
SWMELPGLKF

SEQ ID NO: 35448 - protein, 10 aa, Homo Sapiens
SYIAAISARF

SEQ ID NO: 35449 - protein, 10 aa, Homo Sapiens
SYLDQVKLQF

SEQ ID NO: 35450 - protein, 10 aa, Homo Sapiens
SYLEKQVVTF

SEQ ID NO: 35451 - protein, 10 aa, Homo Sapiens
SYVNKIKTRF

SEQ ID NO: 35452 - protein, 10 aa, Homo Sapiens
TLPPPPYPHL

SEQ ID NO: 35453 - protein, 10 aa, Homo Sapiens
TYIPPLLVAF

SEQ ID NO: 35454 - protein, 10 aa, Homo Sapiens
TYMGHTGAVW

SEQ ID NO: 35455 - protein, 10 aa, Homo Sapiens
TYPQLEGFKF

SEQ ID NO: 35456 - protein, 10 aa, Homo Sapiens
TYTDVTPRQF

SEQ ID NO: 35457 - protein, 10 aa, Homo Sapiens
VFDTAIAHLF

SEQ ID NO: 35458 - protein, 10 aa, Homo Sapiens
VFFEVSPVSF

SEQ ID NO: 35459 - protein, 10 aa, Homo Sapiens
VFFKELIQEF

SEQ ID NO: 35460 - protein, 10 aa, Homo Sapiens
VFFYNPTTRL

SEQ ID NO: 35461 - protein, 10 aa, Homo Sapiens
VFHDGDSVVF

SEQ ID NO: 35462 - protein, 10 aa, Homo Sapiens
VFHKPQPFQF

SEQ ID NO: 35463 - protein, 10 aa, Homo Sapiens
VFHPSQDLVF

SEQ ID NO: 35464 - protein, 10 aa, Homo Sapiens
VFIKAPESLF

SEQ ID NO: 35465 - protein, 10 aa, Homo Sapiens
VFLPREDHLF

SEQ ID NO: 35466 - protein, 10 aa, Homo Sapiens
VFLVPTGEVF

SEQ ID NO: 35467 - protein, 10 aa, Homo Sapiens
VFMKSVKLEW

SEQ ID NO: 35468 - protein, 10 aa, Homo Sapiens
VFNTAVAPLI

SEQ ID NO: 35469 - protein, 10 aa, Homo Sapiens
VFRTPPYHKM

SEQ ID NO: 35470 - protein, 10 aa, Homo Sapiens
VFSTVVIHFL

SEQ ID NO: 35471 - protein, 10 aa, Homo Sapiens
VFTKSPYQEF

SEQ ID NO: 35472 - protein, 10 aa, Homo Sapiens
VFVSPGATYF

SEQ ID NO: 35473 - protein, 10 aa, Homo Sapiens
VFWDPSVNLF

SEQ ID NO: 35474 - protein, 10 aa, Homo Sapiens
VFWKSGNALF

SEQ ID NO: 35475 - protein, 10 aa, Homo Sapiens
VFWLPHNMDF

SEQ ID NO: 35476 - protein, 10 aa, Homo Sapiens
VHAPPMQLGF

SEQ ID NO: 35477 - protein, 10 aa, Homo Sapiens
VHMPCLGHTF

SEQ ID NO: 35478 - protein, 10 aa, Homo Sapiens
VLPQVQHPKN

SEQ ID NO: 35479 - protein, 10 aa, Homo Sapiens
VLPTLPFHVL

SEQ ID NO: 35480 - protein, 10 aa, Homo Sapiens
VWDTAGQEKF

SEQ ID NO: 35481 - protein, 10 aa, Homo Sapiens
VYAEVSRLLL

SEQ ID NO: 35482 - protein, 10 aa, Homo Sapiens
VYAHIYHQHF

SEQ ID NO: 35483 - protein, 10 aa, Homo Sapiens
VYAVIPAEKF

SEQ ID NO: 35484 - protein, 10 aa, Homo Sapiens
VYFEGSDFKF

SEQ ID NO: 35485 - protein, 10 aa, Homo Sapiens
VYIHPSSALF

SEQ ID NO: 35486 - protein, 10 aa, Homo Sapiens
VYIRGSKIRF

SEQ ID NO: 35487 - protein, 10 aa, Homo Sapiens
VYKAFVMETF

SEQ ID NO: 35488 - protein, 10 aa, Homo Sapiens
VYKDSFELKF

SEQ ID NO: 35489 - protein, 10 aa, Homo Sapiens
VYLAKLGNFF

SEQ ID NO: 35490 - protein, 10 aa, Homo Sapiens
VYLPPEAFTF

SEQ ID NO: 35491 - protein, 10 aa, Homo Sapiens
VYLTIKPLNL

SEQ ID NO: 35492 - protein, 10 aa, Homo Sapiens
VYNENLVHMI

SEQ ID NO: 35493 - protein, 10 aa, Homo Sapiens
VYNPYAALSI

SEQ ID NO: 35494 - protein, 10 aa, Homo Sapiens
VYNSWKNNKF

SEQ ID NO: 35495 - protein, 10 aa, Homo Sapiens
VYSEVAAYEF

SEQ ID NO: 35496 - protein, 10 aa, Homo Sapiens
VYTPTDTLVF

SEQ ID NO: 35497 - protein, 10 aa, Homo Sapiens
VYTPVDSLVF

SEQ ID NO: 35498 - protein, 10 aa, Homo Sapiens
VYTVVDEMFL

SEQ ID NO: 35499 - protein, 10 aa, Homo Sapiens
YDAEISQIHQ

SEQ ID NO: 35500 - protein, 10 aa, Homo Sapiens
YFFDAAKLMF

SEQ ID NO: 35501 - protein, 10 aa, Homo Sapiens
YFHDATRVYL

SEQ ID NO: 35502 - protein, 10 aa, Homo Sapiens
YFIAPTGHSL

SEQ ID NO: 35503 - protein, 10 aa, Homo Sapiens
YFIPATGHSL

SEQ ID NO: 35504 - protein, 10 aa, Homo Sapiens
YFISPQGLKF

SEQ ID NO: 35505 - protein, 10 aa, Homo Sapiens
YFISPTGHSL

SEQ ID NO: 35506 - protein, 10 aa, Homo Sapiens
YFITPTGHSL

SEQ ID NO: 35507 - protein, 10 aa, Homo Sapiens
YFRDGDLVTF

SEQ ID NO: 35508 - protein, 10 aa, Homo Sapiens
YYFEGIKQTF

SEQ ID NO: 35509 - protein, 10 aa, Homo Sapiens
YYINKISSTL

SEQ ID NO: 35510 - protein, 10 aa, Homo Sapiens
YYLTPDGQRF

SEQ ID NO: 35511 - protein, 10 aa, Homo Sapiens
YYMELTKLLL

SEQ ID NO: 35512 - protein, 10 aa, Homo Sapiens
YYMTPRDFLF

SEQ ID NO: 35513 - protein, 10 aa, Homo Sapiens
YYRYPTGESY

SEQ ID NO: 35514 - protein, 10 aa, Homo Sapiens
YYSHLEGARF

SEQ ID NO: 35515 - protein, 10 aa, Homo Sapiens
YYSPLRDLLL

SEQ ID NO: 35516 - protein, 11 aa, Homo Sapiens
AFHPTAQLLLI

SEQ ID NO: 35517 - protein, 11 aa, Homo Sapiens
AFLDKQNQVKF

SEQ ID NO: 35518 - protein, 11 aa, Homo Sapiens
AFLEINRQLLF

SEQ ID NO: 35519 - protein, 11 aa, Homo Sapiens
AFYPPHPDYTW

SEQ ID NO: 35520 - protein, 11 aa, Homo Sapiens
AYCPNDYHQLF

SEQ ID NO: 35521 - protein, 11 aa, Homo Sapiens
AYHNVTAEQLF

SEQ ID NO: 35522 - protein, 11 aa, Homo Sapiens
AYIPLNNYLVF

SEQ ID NO: 35523 - protein, 11 aa, Homo Sapiens
AYLECIERITF

SEQ ID NO: 35524 - protein, 11 aa, Homo Sapiens
AYLPKKNGLYL

SEQ ID NO: 35525 - protein, 11 aa, Homo Sapiens
AYLPVNESFGF

SEQ ID NO: 35526 - protein, 11 aa, Homo Sapiens
AYSTVPGYYSW

SEQ ID NO: 35527 - protein, 11 aa, Homo Sapiens
AYYPAQGVQQF

SEQ ID NO: 35528 - protein, 11 aa, Homo Sapiens
CWSPDGSRLLF

SEQ ID NO: 35529 - protein, 11 aa, Homo Sapiens
DFLPADIQAQF

SEQ ID NO: 35530 - protein, 11 aa, Homo Sapiens
EFLPQSAFLKW

SEQ ID NO: 35531 - protein, 11 aa, Homo Sapiens
EWSFINSNLKF

SEQ ID NO: 35532 - protein, 11 aa, Homo Sapiens
EWSPYTKIFQF

SEQ ID NO: 35533 - protein, 11 aa, Homo Sapiens
EYLHIDQRLVF

SEQ ID NO: 35534 - protein, 11 aa, Homo Sapiens
EYLPIGGLAEF

SEQ ID NO: 35535 - protein, 11 aa, Homo Sapiens
EYLTPEEMVTF

SEQ ID NO: 35536 - protein, 11 aa, Homo Sapiens
FWATPGFFNKF

SEQ ID NO: 35537 - protein, 11 aa, Homo Sapiens
FYLNQSTAYHF

SEQ ID NO: 35538 - protein, 11 aa, Homo Sapiens
FYLPLDAIKQL

SEQ ID NO: 35539 - protein, 11 aa, Homo Sapiens
FYVPAEPKLAF

SEQ ID NO: 35540 - protein, 11 aa, Homo Sapiens
GFIDKNRDFLF

SEQ ID NO: 35541 - protein, 11 aa, Homo Sapiens
GFPSSVAALRF

SEQ ID NO: 35542 - protein, 11 aa, Homo Sapiens
HFHPSNPEHLF

SEQ ID NO: 35543 - protein, 11 aa, Homo Sapiens
HLDIDHNKKID

SEQ ID NO: 35544 - protein, 11 aa, Homo Sapiens
HYFQNTQGLIF

SEQ ID NO: 35545 - protein, 11 aa, Homo Sapiens
IFINQPQLTKF

SEQ ID NO: 35546 - protein, 11 aa, Homo Sapiens
IFIQNSKLYFF

SEQ ID NO: 35547 - protein, 11 aa, Homo Sapiens
IFKPPDPDNTF

SEQ ID NO: 35548 - protein, 11 aa, Homo Sapiens
IFLDPHTTQTF

SEQ ID NO: 35549 - protein, 11 aa, Homo Sapiens
IFLDQKCQNIL

SEQ ID NO: 35550 - protein, 11 aa, Homo Sapiens
IFSPTSNLLLL

SEQ ID NO: 35551 - protein, 11 aa, Homo Sapiens
IFSPYNEVLSF

SEQ ID NO: 35552 - protein, 11 aa, Homo Sapiens
IFSTITSKMNL

SEQ ID NO: 35553 - protein, 11 aa, Homo Sapiens
ILKVARQSLTM

SEQ ID NO: 35554 - protein, 11 aa, Homo Sapiens
ITQIEHEVSSS

SEQ ID NO: 35555 - protein, 11 aa, Homo Sapiens
IYDPNLAFLRF

SEQ ID NO: 35556 - protein, 11 aa, Homo Sapiens
IYDTSTDRLLW

SEQ ID NO: 35557 - protein, 11 aa, Homo Sapiens
IYFPKKEAVTF

SEQ ID NO: 35558 - protein, 11 aa, Homo Sapiens
IYLAPGDYHCF

SEQ ID NO: 35559 - protein, 11 aa, Homo Sapiens
IYMDPHYCQSF

SEQ ID NO: 35560 - protein, 11 aa, Homo Sapiens
IYPSDSFRQSL

SEQ ID NO: 35561 - protein, 11 aa, Homo Sapiens
IYRGPFADENF

SEQ ID NO: 35562 - protein, 11 aa, Homo Sapiens
IYTVKVEDLTF

SEQ ID NO: 35563 - protein, 11 aa, Homo Sapiens
IYVNPANTHQF

SEQ ID NO: 35564 - protein, 11 aa, Homo Sapiens
KFIHKPGSYIF

SEQ ID NO: 35565 - protein, 11 aa, Homo Sapiens
KFSPNTSQFLL

SEQ ID NO: 35566 - protein, 11 aa, Homo Sapiens
KFYPPKVELFF

SEQ ID NO: 35567 - protein, 11 aa, Homo Sapiens
KLPDVYGVFQF

SEQ ID NO: 35568 - protein, 11 aa, Homo Sapiens
KWLEPLKNLRF

SEQ ID NO: 35569 - protein, 11 aa, Homo Sapiens
KYIDKTIRVKF

SEQ ID NO: 35570 - protein, 11 aa, Homo Sapiens
KYISKPENLKL

SEQ ID NO: 35571 - protein, 11 aa, Homo Sapiens
KYITQGQLLQF

SEQ ID NO: 35572 - protein, 11 aa, Homo Sapiens
KYKNSEINFSF

SEQ ID NO: 35573 - protein, 11 aa, Homo Sapiens
KYMPNVKVAVF

SEQ ID NO: 35574 - protein, 11 aa, Homo Sapiens
KYQEVTNNLEF

SEQ ID NO: 35575 - protein, 11 aa, Homo Sapiens
LFIDQPQFLKF

SEQ ID NO: 35576 - protein, 11 aa, Homo Sapiens
LFIPSSKLLFL

SEQ ID NO: 35577 - protein, 11 aa, Homo Sapiens
LFVRAQELHTF

SEQ ID NO: 35578 - protein, 11 aa, Homo Sapiens
LGPEIFFHPEF

SEQ ID NO: 35579 - protein, 11 aa, Homo Sapiens
LLLKLLDFQNR

SEQ ID NO: 35580 - protein, 11 aa, Homo Sapiens
LPISTPHPIGF

SEQ ID NO: 35581 - protein, 11 aa, Homo Sapiens
LYISEAEGLKF

SEQ ID NO: 35582 - protein, 11 aa, Homo Sapiens
MWSPTHPALFA

SEQ ID NO: 35583 - protein, 11 aa, Homo Sapiens
NFISGAGILRL

SEQ ID NO: 35584 - protein, 11 aa, Homo Sapiens
NYFFDAAKLMF

SEQ ID NO: 35585 - protein, 11 aa, Homo Sapiens
NYIPVKNGKQF

SEQ ID NO: 35586 - protein, 11 aa, Homo Sapiens
NYLDPRISIAW

SEQ ID NO: 35587 - protein, 11 aa, Homo Sapiens
NYLPAINGIVF

SEQ ID NO: 35588 - protein, 11 aa, Homo Sapiens
NYSGAAEYLYF

SEQ ID NO: 35589 - protein, 11 aa, Homo Sapiens
NYSPVSRIGLF

SEQ ID NO: 35590 - protein, 11 aa, Homo Sapiens
NYSTVPQKQTL

SEQ ID NO: 35591 - protein, 11 aa, Homo Sapiens
PFFNPIQTQVF

SEQ ID NO: 35592 - protein, 11 aa, Homo Sapiens
PFIKSQHELLF

SEQ ID NO: 35593 - protein, 11 aa, Homo Sapiens
PWKSLASIVQF

SEQ ID NO: 35594 - protein, 11 aa, Homo Sapiens
PYQATIDGVRF

SEQ ID NO: 35595 - protein, 11 aa, Homo Sapiens
QLPQPDVFPLF

SEQ ID NO: 35596 - protein, 11 aa, Homo Sapiens
QWPQPDKPMFF

SEQ ID NO: 35597 - protein, 11 aa, Homo Sapiens
QYPVYWDHLEF

SEQ ID NO: 35598 - protein, 11 aa, Homo Sapiens
RFIAPAASLGF

SEQ ID NO: 35599 - protein, 11 aa, Homo Sapiens
RFIHNSHDLTY

SEQ ID NO: 35600 - protein, 11 aa, Homo Sapiens
RFLNDPGHLLW

SEQ ID NO: 35601 - protein, 11 aa, Homo Sapiens
RFLNSSNDHRF

SEQ ID NO: 35602 - protein, 11 aa, Homo Sapiens
RFLQDPYSTTF

SEQ ID NO: 35603 - protein, 11 aa, Homo Sapiens
RFNEYSKVLQF

SEQ ID NO: 35604 - protein, 11 aa, Homo Sapiens
RFRPVPLGQTF

SEQ ID NO: 35605 - protein, 11 aa, Homo Sapiens
RFVPLPASAKW

SEQ ID NO: 35606 - protein, 11 aa, Homo Sapiens
RFVTGNKILRI

SEQ ID NO: 35607 - protein, 11 aa, Homo Sapiens
RYISDQLFTNF

SEQ ID NO: 35608 - protein, 11 aa, Homo Sapiens
RYLDSLKAIVF

SEQ ID NO: 35609 - protein, 11 aa, Homo Sapiens
RYLDVSILGKF

SEQ ID NO: 35610 - protein, 11 aa, Homo Sapiens
RYLPKGFLNQF

SEQ ID NO: 35611 - protein, 11 aa, Homo Sapiens
RYLPTGSFPFL

SEQ ID NO: 35612 - protein, 11 aa, Homo Sapiens
RYLSPKYIKMF

SEQ ID NO: 35613 - protein, 11 aa, Homo Sapiens
RYPDNLKHLYL

SEQ ID NO: 35614 - protein, 11 aa, Homo Sapiens
RYPTSIASLAF

SEQ ID NO: 35615 - protein, 11 aa, Homo Sapiens
RYSGVNQSMLF

SEQ ID NO: 35616 - protein, 11 aa, Homo Sapiens
RYTPEQDTMTF

SEQ ID NO: 35617 - protein, 11 aa, Homo Sapiens
RYTSPVNPAVF

SEQ ID NO: 35618 - protein, 11 aa, Homo Sapiens
RYVEQKAGITF

SEQ ID NO: 35619 - protein, 11 aa, Homo Sapiens
SFCSKPEILEW

SEQ ID NO: 35620 - protein, 11 aa, Homo Sapiens
SFHAASESLKF

SEQ ID NO: 35621 - protein, 11 aa, Homo Sapiens
SFIPSSVPATF

SEQ ID NO: 35622 - protein, 11 aa, Homo Sapiens
SFLHGNASLLF

SEQ ID NO: 35623 - protein, 11 aa, Homo Sapiens
SFMPNSPRFLL

SEQ ID NO: 35624 - protein, 11 aa, Homo Sapiens
SIIAEVKAQYE

SEQ ID NO: 35625 - protein, 11 aa, Homo Sapiens
SYISDGKEYLF

SEQ ID NO: 35626 - protein, 11 aa, Homo Sapiens
SYLAVIEGAKF

SEQ ID NO: 35627 - protein, 11 aa, Homo Sapiens
SYLDMSKVIIF

SEQ ID NO: 35628 - protein, 11 aa, Homo Sapiens
SYLSHSEQLVF

SEQ ID NO: 35629 - protein, 11 aa, Homo Sapiens
SYMEVPTYLNF

SEQ ID NO: 35630 - protein, 11 aa, Homo Sapiens
SYYGPLNLLTF

SEQ ID NO: 35631 - protein, 11 aa, Homo Sapiens
TFCDSQLRLLF

SEQ ID NO: 35632 - protein, 11 aa, Homo Sapiens
TFIRHIALLGF

SEQ ID NO: 35633 - protein, 11 aa, Homo Sapiens
TFLFPIQAKTF

SEQ ID NO: 35634 - protein, 11 aa, Homo Sapiens
TFPNIASATKF

SEQ ID NO: 35635 - protein, 11 aa, Homo Sapiens
TFTAAAVGAVF

SEQ ID NO: 35636 - protein, 11 aa, Homo Sapiens
TLPSRVFHPAF

SEQ ID NO: 35637 - protein, 11 aa, Homo Sapiens
TMSGVTTCLRF

SEQ ID NO: 35638 - protein, 11 aa, Homo Sapiens
TWFTAGAKLLF

SEQ ID NO: 35639 - protein, 11 aa, Homo Sapiens
TWLVNSAAHLF

SEQ ID NO: 35640 - protein, 11 aa, Homo Sapiens
TYHEVVDEIYF

SEQ ID NO: 35641 - protein, 11 aa, Homo Sapiens
TYIHALDNGLF

SEQ ID NO: 35642 - protein, 11 aa, Homo Sapiens
TYLPAGQSVLL

SEQ ID NO: 35643 - protein, 11 aa, Homo Sapiens
TYLPREILNLI

SEQ ID NO: 35644 - protein, 11 aa, Homo Sapiens
TYSSGHNRLYF

SEQ ID NO: 35645 - protein, 11 aa, Homo Sapiens
TYTDVTPRQFF

SEQ ID NO: 35646 - protein, 11 aa, Homo Sapiens
VFFDEANKQVF

SEQ ID NO: 35647 - protein, 11 aa, Homo Sapiens
VFHAHSSVLNF

SEQ ID NO: 35648 - protein, 11 aa, Homo Sapiens
VFKEINTQILF

SEQ ID NO: 35649 - protein, 11 aa, Homo Sapiens
VFMKPGLPTTF

SEQ ID NO: 35650 - protein, 11 aa, Homo Sapiens
VFMPQHIMAIL

SEQ ID NO: 35651 - protein, 11 aa, Homo Sapiens
VFPSMPIKLQL

SEQ ID NO: 35652 - protein, 11 aa, Homo Sapiens
VFQPSPLASQF

SEQ ID NO: 35653 - protein, 11 aa, Homo Sapiens
VFSGFGPIMRF

SEQ ID NO: 35654 - protein, 11 aa, Homo Sapiens
VISKEAQLLVF

SEQ ID NO: 35655 - protein, 11 aa, Homo Sapiens
VLPDADTLLHF

SEQ ID NO: 35656 - protein, 11 aa, Homo Sapiens
VLPNSDFLVHF

SEQ ID NO: 35657 - protein, 11 aa, Homo Sapiens
VVPSGGFFPTI

SEQ ID NO: 35658 - protein, 11 aa, Homo Sapiens
VYAPPVGGFSF

SEQ ID NO: 35659 - protein, 11 aa, Homo Sapiens
VYISSSAGARW

SEQ ID NO: 35660 - protein, 11 aa, Homo Sapiens
VYITGKEVFSF

SEQ ID NO: 35661 - protein, 11 aa, Homo Sapiens
VYLDPLVFREF

SEQ ID NO: 35662 - protein, 11 aa, Homo Sapiens
VYNTVSEGTHF

SEQ ID NO: 35663 - protein, 11 aa, Homo Sapiens
VYPASKMFPFI

SEQ ID NO: 35664 - protein, 11 aa, Homo Sapiens
VYQAGSGQLMF

SEQ ID NO: 35665 - protein, 11 aa, Homo Sapiens
VYQEPIPTAQL

SEQ ID NO: 35666 - protein, 11 aa, Homo Sapiens
VYQSLANLIRW

SEQ ID NO: 35667 - protein, 11 aa, Homo Sapiens
VYRNKDALSHF

SEQ ID NO: 35668 - protein, 11 aa, Homo Sapiens
VYSEAARVLQF

SEQ ID NO: 35669 - protein, 11 aa, Homo Sapiens
VYSQIPAAVKL

SEQ ID NO: 35670 - protein, 11 aa, Homo Sapiens
VYTPVASRQSL

SEQ ID NO: 35671 - protein, 11 aa, Homo Sapiens
VYVDLGGSHVF

SEQ ID NO: 35672 - protein, 11 aa, Homo Sapiens
VYVIEPHSMEF

SEQ ID NO: 35673 - protein, 11 aa, Homo Sapiens
YFILNSSCLRL

SEQ ID NO: 35674 - protein, 11 aa, Homo Sapiens
YFVSKAKTRVF

SEQ ID NO: 35675 - protein, 11 aa, Homo Sapiens
YYHPPNLLELF

SEQ ID NO: 35676 - protein, 11 aa, Homo Sapiens
YYIDADLLREI

SEQ ID NO: 35677 - protein, 11 aa, Homo Sapiens
YYIKYNTIETF

SEQ ID NO: 35678 - protein, 11 aa, Homo Sapiens
YYLHQNNIVHL

SEQ ID NO: 35679 - protein, 11 aa, Homo Sapiens
YYLRPVSQQEF

SEQ ID NO: 35680 - protein, 11 aa, Homo Sapiens
YYSPHGHILVL

SEQ ID NO: 35681 - protein, 11 aa, Homo Sapiens
YYSQESKVLYL

SEQ ID NO: 35682 - protein, 8 aa, Homo Sapiens
DLLLNCSL

SEQ ID NO: 35683 - protein, 8 aa, Homo Sapiens
DPDVLNSL

SEQ ID NO: 35684 - protein, 8 aa, Homo Sapiens
EVGRITKW

SEQ ID NO: 35685 - protein, 8 aa, Homo Sapiens
FEVDTVAP

SEQ ID NO: 35686 - protein, 8 aa, Homo Sapiens
FNEKSKEL

SEQ ID NO: 35687 - protein, 8 aa, Homo Sapiens
FSGVYKKL

SEQ ID NO: 35688 - protein, 8 aa, Homo Sapiens
IDVITKTW

SEQ ID NO: 35689 - protein, 8 aa, Homo Sapiens
IEEHLGKF

SEQ ID NO: 35690 - protein, 8 aa, Homo Sapiens
IEKLLTSY

SEQ ID NO: 35691 - protein, 8 aa, Homo Sapiens
INSDPVDL

SEQ ID NO: 35692 - protein, 8 aa, Homo Sapiens
PDEVIKKW

SEQ ID NO: 35693 - protein, 8 aa, Homo Sapiens
PINGNGKQ

SEQ ID NO: 35694 - protein, 8 aa, Homo Sapiens
YDCKVEHW

SEQ ID NO: 35695 - protein, 8 aa, Homo Sapiens
YDCRVEHW

SEQ ID NO: 35696 - protein, 9 aa, Homo Sapiens
AIIERTASF

SEQ ID NO: 35697 - protein, 9 aa, Homo Sapiens
ATAQRVAAW

SEQ ID NO: 35698 - protein, 9 aa, Homo Sapiens
AVAEEYLSF

SEQ ID NO: 35699 - protein, 9 aa, Homo Sapiens
AVAGAISSF

SEQ ID NO: 35700 - protein, 9 aa, Homo Sapiens
AVIAIFKSY

SEQ ID NO: 35701 - protein, 9 aa, Homo Sapiens
AVISSVAHY

SEQ ID NO: 35702 - protein, 9 aa, Homo Sapiens
AVKEKISKF

SEQ ID NO: 35703 - protein, 9 aa, Homo Sapiens
AVKERIAKF

SEQ ID NO: 35704 - protein, 9 aa, Homo Sapiens
AVKNQIALW

SEQ ID NO: 35705 - protein, 9 aa, Homo Sapiens
AVLDSASLY

SEQ ID NO: 35706 - protein, 9 aa, Homo Sapiens
AVVGQYQSY

SEQ ID NO: 35707 - protein, 9 aa, Homo Sapiens
AVYGGGSMW

SEQ ID NO: 35708 - protein, 9 aa, Homo Sapiens
CVISKVLTF

SEQ ID NO: 35709 - protein, 9 aa, Homo Sapiens
DAAAGMLSF

SEQ ID NO: 35710 - protein, 9 aa, Homo Sapiens
DAAQHTRTW

SEQ ID NO: 35711 - protein, 9 aa, Homo Sapiens
DAIGPREQW

SEQ ID NO: 35712 - protein, 9 aa, Homo Sapiens
DAISAGKNW

SEQ ID NO: 35713 - protein, 9 aa, Homo Sapiens
DAVGRVQGW

SEQ ID NO: 35714 - protein, 9 aa, Homo Sapiens
DIADNFEAF

SEQ ID NO: 35715 - protein, 9 aa, Homo Sapiens
DIHEVRIGW

SEQ ID NO: 35716 - protein, 9 aa, Homo Sapiens
DIIDDVDSF

SEQ ID NO: 35717 - protein, 9 aa, Homo Sapiens
DIIDDVESF

SEQ ID NO: 35718 - protein, 9 aa, Homo Sapiens
DIISRIPKI

SEQ ID NO: 35719 - protein, 9 aa, Homo Sapiens
DIITDVATF

SEQ ID NO: 35720 - protein, 9 aa, Homo Sapiens
DIKLRVSEW

SEQ ID NO: 35721 - protein, 9 aa, Homo Sapiens
DIKPNFPSW

SEQ ID NO: 35722 - protein, 9 aa, Homo Sapiens
DIPTDFEGW

SEQ ID NO: 35723 - protein, 9 aa, Homo Sapiens
DIVPPASTW

SEQ ID NO: 35724 - protein, 9 aa, Homo Sapiens
DLCQRVPTW

SEQ ID NO: 35725 - protein, 9 aa, Homo Sapiens
DLCTRVPTW

SEQ ID NO: 35726 - protein, 9 aa, Homo Sapiens
DLIEHFSQF

SEQ ID NO: 35727 - protein, 9 aa, Homo Sapiens
DLIEKLLNY

SEQ ID NO: 35728 - protein, 9 aa, Homo Sapiens
DLIGHIVEF

SEQ ID NO: 35729 - protein, 9 aa, Homo Sapiens
DLIKETKLS

SEQ ID NO: 35730 - protein, 9 aa, Homo Sapiens
DLPQSIGMW

SEQ ID NO: 35731 - protein, 9 aa, Homo Sapiens
DMAFRYLSW

SEQ ID NO: 35732 - protein, 9 aa, Homo Sapiens
DPVDIYKSW

SEQ ID NO: 35733 - protein, 9 aa, Homo Sapiens
DQIPQQTAW

SEQ ID NO: 35734 - protein, 9 aa, Homo Sapiens
DQKADVSAW

SEQ ID NO: 35735 - protein, 9 aa, Homo Sapiens
DSHGGSLEW

SEQ ID NO: 35736 - protein, 9 aa, Homo Sapiens
DSKSKGLQW

SEQ ID NO: 35737 - protein, 9 aa, Homo Sapiens
DSLPSVSSI

SEQ ID NO: 35738 - protein, 9 aa, Homo Sapiens
DSSPVSTPF

SEQ ID NO: 35739 - protein, 9 aa, Homo Sapiens
DTAHIFCQW

SEQ ID NO: 35740 - protein, 9 aa, Homo Sapiens
DTCVHLNQW

SEQ ID NO: 35741 - protein, 9 aa, Homo Sapiens
DTFNHLTTW

SEQ ID NO: 35742 - protein, 9 aa, Homo Sapiens
DTHKATLVW

SEQ ID NO: 35743 - protein, 9 aa, Homo Sapiens
DTIARLPCL

SEQ ID NO: 35744 - protein, 9 aa, Homo Sapiens
DTIRMIDAY

SEQ ID NO: 35745 - protein, 9 aa, Homo Sapiens
DTISINHNW

SEQ ID NO: 35746 - protein, 9 aa, Homo Sapiens
DTISPTLGF

SEQ ID NO: 35747 - protein, 9 aa, Homo Sapiens
DTKQMMSSF

SEQ ID NO: 35748 - protein, 9 aa, Homo Sapiens
DTMDHYRTF

SEQ ID NO: 35749 - protein, 9 aa, Homo Sapiens
DTMEFIRSF

SEQ ID NO: 35750 - protein, 9 aa, Homo Sapiens
DTPEEIARW

SEQ ID NO: 35751 - protein, 9 aa, Homo Sapiens
DTPGHGSGW

SEQ ID NO: 35752 - protein, 9 aa, Homo Sapiens
DTPGHTLSW

SEQ ID NO: 35753 - protein, 9 aa, Homo Sapiens
DTQKEGTAW

SEQ ID NO: 35754 - protein, 9 aa, Homo Sapiens
DTRDYICEF

SEQ ID NO: 35755 - protein, 9 aa, Homo Sapiens
DTSDIVHIW

SEQ ID NO: 35756 - protein, 9 aa, Homo Sapiens
DTSGPRKEW

SEQ ID NO: 35757 - protein, 9 aa, Homo Sapiens
DTTSFDSAW

SEQ ID NO: 35758 - protein, 9 aa, Homo Sapiens
DTVKKIESF

SEQ ID NO: 35759 - protein, 9 aa, Homo Sapiens
DTVPSVSSI

SEQ ID NO: 35760 - protein, 9 aa, Homo Sapiens
DVAEPYKVY

SEQ ID NO: 35761 - protein, 9 aa, Homo Sapiens
DVANKIGII

SEQ ID NO: 35762 - protein, 9 aa, Homo Sapiens
DVAPTQPRW

SEQ ID NO: 35763 - protein, 9 aa, Homo Sapiens
DVAPTRPRW

SEQ ID NO: 35764 - protein, 9 aa, Homo Sapiens
DVIADIQTI

SEQ ID NO: 35765 - protein, 9 aa, Homo Sapiens
DVIDNIMRL

SEQ ID NO: 35766 - protein, 9 aa, Homo Sapiens
DVIERVIQY

SEQ ID NO: 35767 - protein, 9 aa, Homo Sapiens
DVIESVNLL

SEQ ID NO: 35768 - protein, 9 aa, Homo Sapiens
DVIGCFADF

SEQ ID NO: 35769 - protein, 9 aa, Homo Sapiens
DVIGCFANF

SEQ ID NO: 35770 - protein, 9 aa, Homo Sapiens
DVIGTLSGF

SEQ ID NO: 35771 - protein, 9 aa, Homo Sapiens
DVIKAVSTI

SEQ ID NO: 35772 - protein, 9 aa, Homo Sapiens
DVIRLIMQY

SEQ ID NO: 35773 - protein, 9 aa, Homo Sapiens
DVISNIETF

SEQ ID NO: 35774 - protein, 9 aa, Homo Sapiens
DVISSIRNF

SEQ ID NO: 35775 - protein, 9 aa, Homo Sapiens
DVISSIRQL

SEQ ID NO: 35776 - protein, 9 aa, Homo Sapiens
DVKDYIQEY

SEQ ID NO: 35777 - protein, 9 aa, Homo Sapiens
DVKKRILEF

SEQ ID NO: 35778 - protein, 9 aa, Homo Sapiens
DVKPFVPRF

SEQ ID NO: 35779 - protein, 9 aa, Homo Sapiens
DVKSEIYSF

SEQ ID NO: 35780 - protein, 9 aa, Homo Sapiens
DVMKRSESW

SEQ ID NO: 35781 - protein, 9 aa, Homo Sapiens
DVNGKIIVW

SEQ ID NO: 35782 - protein, 9 aa, Homo Sapiens
DVPEKSSLF

SEQ ID NO: 35783 - protein, 9 aa, Homo Sapiens
DVRERLQAW

SEQ ID NO: 35784 - protein, 9 aa, Homo Sapiens
DVRVSQTTW

SEQ ID NO: 35785 - protein, 9 aa, Homo Sapiens
DVSPVVSTY

SEQ ID NO: 35786 - protein, 9 aa, Homo Sapiens
DVTAQFESY

SEQ ID NO: 35787 - protein, 9 aa, Homo Sapiens
DVTDFISHL

SEQ ID NO: 35788 - protein, 9 aa, Homo Sapiens
DVTEQISRF

SEQ ID NO: 35789 - protein, 9 aa, Homo Sapiens
DVTGPHEAF

SEQ ID NO: 35790 - protein, 9 aa, Homo Sapiens
DVTGVVRQW

SEQ ID NO: 35791 - protein, 9 aa, Homo Sapiens
DVTVKMSTY

SEQ ID NO: 35792 - protein, 9 aa, Homo Sapiens
DVVDKTPVI

SEQ ID NO: 35793 - protein, 9 aa, Homo Sapiens
DVVGGLMAW

SEQ ID NO: 35794 - protein, 9 aa, Homo Sapiens
DVVKKIESF

SEQ ID NO: 35795 - protein, 9 aa, Homo Sapiens
DVVKTYKSF

SEQ ID NO: 35796 - protein, 9 aa, Homo Sapiens
DVVPAVRKW

SEQ ID NO: 35797 - protein, 9 aa, Homo Sapiens
DVVTKYSNF

SEQ ID NO: 35798 - protein, 9 aa, Homo Sapiens
EAAGPHEAF

SEQ ID NO: 35799 - protein, 9 aa, Homo Sapiens
EAAGPRVSW

SEQ ID NO: 35800 - protein, 9 aa, Homo Sapiens
EAARPSGSW

SEQ ID NO: 35801 - protein, 9 aa, Homo Sapiens
EAATRLSAY

SEQ ID NO: 35802 - protein, 9 aa, Homo Sapiens
EAAYRVLHW

SEQ ID NO: 35803 - protein, 9 aa, Homo Sapiens
EAIEQILKY

SEQ ID NO: 35804 - protein, 9 aa, Homo Sapiens
EAIGAVIHY

SEQ ID NO: 35805 - protein, 9 aa, Homo Sapiens
EAIQDLWQW

SEQ ID NO: 35806 - protein, 9 aa, Homo Sapiens
EAISYYSKY

SEQ ID NO: 35807 - protein, 9 aa, Homo Sapiens
EAIYETHTW

SEQ ID NO: 35808 - protein, 9 aa, Homo Sapiens
EAKPHMESY

SEQ ID NO: 35809 - protein, 9 aa, Homo Sapiens
EALERSSSW

SEQ ID NO: 35810 - protein, 9 aa, Homo Sapiens
EANDRNETW

SEQ ID NO: 35811 - protein, 9 aa, Homo Sapiens
EARKKINSW

SEQ ID NO: 35812 - protein, 9 aa, Homo Sapiens
EAVKQYSSY

SEQ ID NO: 35813 - protein, 9 aa, Homo Sapiens
EAVQAISMF

SEQ ID NO: 35814 - protein, 9 aa, Homo Sapiens
EIAEKMATF

SEQ ID NO: 35815 - protein, 9 aa, Homo Sapiens
EIAGHIMEF

SEQ ID NO: 35816 - protein, 9 aa, Homo Sapiens
EIFFHYSEF

SEQ ID NO: 35817 - protein, 9 aa, Homo Sapiens
EIHIQIGQF

SEQ ID NO: 35818 - protein, 9 aa, Homo Sapiens
EIIDRMPVI

SEQ ID NO: 35819 - protein, 9 aa, Homo Sapiens
EIIGPYASW

SEQ ID NO: 35820 - protein, 9 aa, Homo Sapiens
EIIHEIAVL

SEQ ID NO: 35821 - protein, 9 aa, Homo Sapiens
EIIKHMAKL

SEQ ID NO: 35822 - protein, 9 aa, Homo Sapiens
EIIKIIGKY

SEQ ID NO: 35823 - protein, 9 aa, Homo Sapiens
EIIKLYSCI

SEQ ID NO: 35824 - protein, 9 aa, Homo Sapiens
EIIKNTDSW

SEQ ID NO: 35825 - protein, 9 aa, Homo Sapiens
EIIPMFSNL

SEQ ID NO: 35826 - protein, 9 aa, Homo Sapiens
EIITDFSGI

SEQ ID NO: 35827 - protein, 9 aa, Homo Sapiens
EIITPYRSF

SEQ ID NO: 35828 - protein, 9 aa, Homo Sapiens
EIKEVILEF

SEQ ID NO: 35829 - protein, 9 aa, Homo Sapiens
EIKQKIDSY

SEQ ID NO: 35830 - protein, 9 aa, Homo Sapiens
EIMTRIQTY

SEQ ID NO: 35831 - protein, 9 aa, Homo Sapiens
EIPEQFLSY

SEQ ID NO: 35832 - protein, 9 aa, Homo Sapiens
EIPGKFMGY

SEQ ID NO: 35833 - protein, 9 aa, Homo Sapiens
EIRQQIPVF

SEQ ID NO: 35834 - protein, 9 aa, Homo Sapiens
EIRRFIKSY

SEQ ID NO: 35835 - protein, 9 aa, Homo Sapiens
EISERIVQW

SEQ ID NO: 35836 - protein, 9 aa, Homo Sapiens
EITPRIRVW

SEQ ID NO: 35837 - protein, 9 aa, Homo Sapiens
EIVGTLLGF

SEQ ID NO: 35838 - protein, 9 aa, Homo Sapiens
EIVKEVSTY

SEQ ID NO: 35839 - protein, 9 aa, Homo Sapiens
EIVKKYTQF

SEQ ID NO: 35840 - protein, 9 aa, Homo Sapiens
EIVKQITSI

SEQ ID NO: 35841 - protein, 9 aa, Homo Sapiens
EIVTTIPTI

SEQ ID NO: 35842 - protein, 9 aa, Homo Sapiens
EIVWSIKSF

SEQ ID NO: 35843 - protein, 9 aa, Homo Sapiens
EIYEESSTW

SEQ ID NO: 35844 - protein, 9 aa, Homo Sapiens
ELAENILKW

SEQ ID NO: 35845 - protein, 9 aa, Homo Sapiens
ELAKQITSY

SEQ ID NO: 35846 - protein, 9 aa, Homo Sapiens
ELFEGVQKW

SEQ ID NO: 35847 - protein, 9 aa, Homo Sapiens
ELIAKIPNF

SEQ ID NO: 35848 - protein, 9 aa, Homo Sapiens
ELIERIPEL

SEQ ID NO: 35849 - protein, 9 aa, Homo Sapiens
ELIPEYLNF

SEQ ID NO: 35850 - protein, 9 aa, Homo Sapiens
ELIREYLEF

SEQ ID NO: 35851 - protein, 9 aa, Homo Sapiens
ELIRKIEAY

SEQ ID NO: 35852 - protein, 9 aa, Homo Sapiens
ELIRTIMGW

SEQ ID NO: 35853 - protein, 9 aa, Homo Sapiens
ELIRYISEL

SEQ ID NO: 35854 - protein, 9 aa, Homo Sapiens
ELKDFFQSY

SEQ ID NO: 35855 - protein, 9 aa, Homo Sapiens
ELKDTYARW

SEQ ID NO: 35856 - protein, 9 aa, Homo Sapiens
ELKEFFMSF

SEQ ID NO: 35857 - protein, 9 aa, Homo Sapiens
ELKEKIQRW

SEQ ID NO: 35858 - protein, 9 aa, Homo Sapiens
ELKERIREY

SEQ ID NO: 35859 - protein, 9 aa, Homo Sapiens
ELPQSVLKW

SEQ ID NO: 35860 - protein, 9 aa, Homo Sapiens
ELQEKMVSF

SEQ ID NO: 35861 - protein, 9 aa, Homo Sapiens
ELRPGLIGW

SEQ ID NO: 35862 - protein, 9 aa, Homo Sapiens
ELSSQMSSF

SEQ ID NO: 35863 - protein, 9 aa, Homo Sapiens
ELTEEINKW

SEQ ID NO: 35864 - protein, 9 aa, Homo Sapiens
ELVKKIAIY

SEQ ID NO: 35865 - protein, 9 aa, Homo Sapiens
ELVKRILNF

SEQ ID NO: 35866 - protein, 9 aa, Homo Sapiens
EMMKSYVAW

SEQ ID NO: 35867 - protein, 9 aa, Homo Sapiens
EPVERVSTW

SEQ ID NO: 35868 - protein, 9 aa, Homo Sapiens
EQIDKSGSW

SEQ ID NO: 35869 - protein, 9 aa, Homo Sapiens
EQTPIHISW

SEQ ID NO: 35870 - protein, 9 aa, Homo Sapiens
EQVEERLSF

SEQ ID NO: 35871 - protein, 9 aa, Homo Sapiens
ESAPVHNSF

SEQ ID NO: 35872 - protein, 9 aa, Homo Sapiens
ESIAWFTVF

SEQ ID NO: 35873 - protein, 9 aa, Homo Sapiens
ESIDKIARW

SEQ ID NO: 35874 - protein, 9 aa, Homo Sapiens
ESIEYVQTF

SEQ ID NO: 35875 - protein, 9 aa, Homo Sapiens
ESIQGLSSW

SEQ ID NO: 35876 - protein, 9 aa, Homo Sapiens
ETAAGVGRF

SEQ ID NO: 35877 - protein, 9 aa, Homo Sapiens
ETAFGYKGL

SEQ ID NO: 35878 - protein, 9 aa, Homo Sapiens
ETAFKFKAL

SEQ ID NO: 35879 - protein, 9 aa, Homo Sapiens
ETAGAIMAF

SEQ ID NO: 35880 - protein, 9 aa, Homo Sapiens
ETAGRYITY

SEQ ID NO: 35881 - protein, 9 aa, Homo Sapiens
ETAHEAEQW

SEQ ID NO: 35882 - protein, 9 aa, Homo Sapiens
ETALGIGGF

SEQ ID NO: 35883 - protein, 9 aa, Homo Sapiens
ETFDDLPKW

SEQ ID NO: 35884 - protein, 9 aa, Homo Sapiens
ETFHHSSNW

SEQ ID NO: 35885 - protein, 9 aa, Homo Sapiens
ETFWETTKW

SEQ ID NO: 35886 - protein, 9 aa, Homo Sapiens
ETHRDLSSW

SEQ ID NO: 35887 - protein, 9 aa, Homo Sapiens
ETIASVRSL

SEQ ID NO: 35888 - protein, 9 aa, Homo Sapiens
ETIDRFNNY

SEQ ID NO: 35889 - protein, 9 aa, Homo Sapiens
ETIDVHSGY

SEQ ID NO: 35890 - protein, 9 aa, Homo Sapiens
ETIERLQQL

SEQ ID NO: 35891 - protein, 9 aa, Homo Sapiens
ETIESINQL

SEQ ID NO: 35892 - protein, 9 aa, Homo Sapiens
ETIETINQL

SEQ ID NO: 35893 - protein, 9 aa, Homo Sapiens
ETIHPRKSY

SEQ ID NO: 35894 - protein, 9 aa, Homo Sapiens
ETIPKAVSF

SEQ ID NO: 35895 - protein, 9 aa, Homo Sapiens
ETIQGTGSW

SEQ ID NO: 35896 - protein, 9 aa, Homo Sapiens
ETIQHTEAF

SEQ ID NO: 35897 - protein, 9 aa, Homo Sapiens
ETIQTYRSV

SEQ ID NO: 35898 - protein, 9 aa, Homo Sapiens
ETIRNIDCY

SEQ ID NO: 35899 - protein, 9 aa, Homo Sapiens
ETIRNIPHL

SEQ ID NO: 35900 - protein, 9 aa, Homo Sapiens
ETITKFLQL

SEQ ID NO: 35901 - protein, 9 aa, Homo Sapiens
ETIVIINKF

SEQ ID NO: 35902 - protein, 9 aa, Homo Sapiens
ETKEVYRHF

SEQ ID NO: 35903 - protein, 9 aa, Homo Sapiens
ETKEYFESW

SEQ ID NO: 35904 - protein, 9 aa, Homo Sapiens
ETKKQYDSF

SEQ ID NO: 35905 - protein, 9 aa, Homo Sapiens
ETKNTLRAF

SEQ ID NO: 35906 - protein, 9 aa, Homo Sapiens
ETKQFFLQF

SEQ ID NO: 35907 - protein, 9 aa, Homo Sapiens
ETKSRFTEY

SEQ ID NO: 35908 - protein, 9 aa, Homo Sapiens
ETLKLISGW

SEQ ID NO: 35909 - protein, 9 aa, Homo Sapiens
ETNTHVKCF

SEQ ID NO: 35910 - protein, 9 aa, Homo Sapiens
ETNTVVQTY

SEQ ID NO: 35911 - protein, 9 aa, Homo Sapiens
ETPGQILGW

SEQ ID NO: 35912 - protein, 9 aa, Homo Sapiens
ETPLHISGF

SEQ ID NO: 35913 - protein, 9 aa, Homo Sapiens
ETPPLFHSY

SEQ ID NO: 35914 - protein, 9 aa, Homo Sapiens
ETPRSVPGF

SEQ ID NO: 35915 - protein, 9 aa, Homo Sapiens
ETRKIVREF

SEQ ID NO: 35916 - protein, 9 aa, Homo Sapiens
ETRKMISTW

SEQ ID NO: 35917 - protein, 9 aa, Homo Sapiens
ETSEQVTRW

SEQ ID NO: 35918 - protein, 9 aa, Homo Sapiens
ETTDLLAHW

SEQ ID NO: 35919 - protein, 9 aa, Homo Sapiens
ETTVHASGW

SEQ ID NO: 35920 - protein, 9 aa, Homo Sapiens
ETTVKLLEF

SEQ ID NO: 35921 - protein, 9 aa, Homo Sapiens
ETVADVRTL

SEQ ID NO: 35922 - protein, 9 aa, Homo Sapiens
ETVGKFIQY

SEQ ID NO: 35923 - protein, 9 aa, Homo Sapiens
ETVKEILSI

SEQ ID NO: 35924 - protein, 9 aa, Homo Sapiens
ETVKKFMAL

SEQ ID NO: 35925 - protein, 9 aa, Homo Sapiens
ETVRELTEF

SEQ ID NO: 35926 - protein, 9 aa, Homo Sapiens
ETVRQIRQI

SEQ ID NO: 35927 - protein, 9 aa, Homo Sapiens
ETVRSILKI

SEQ ID NO: 35928 - protein, 9 aa, Homo Sapiens
ETVSGLKGY

SEQ ID NO: 35929 - protein, 9 aa, Homo Sapiens
ETVVRYEKF

SEQ ID NO: 35930 - protein, 9 aa, Homo Sapiens
ETVWHLEEF

SEQ ID NO: 35931 - protein, 9 aa, Homo Sapiens
ETVWRLEEF

SEQ ID NO: 35932 - protein, 9 aa, Homo Sapiens
ETYIRSGTY

SEQ ID NO: 35933 - protein, 9 aa, Homo Sapiens
ETYRGGMAI

SEQ ID NO: 35934 - protein, 9 aa, Homo Sapiens
EVAAAIAGY

SEQ ID NO: 35935 - protein, 9 aa, Homo Sapiens
EVAAVLLHF

SEQ ID NO: 35936 - protein, 9 aa, Homo Sapiens
EVAEAYEVL

SEQ ID NO: 35937 - protein, 9 aa, Homo Sapiens
EVAEKAGTF

SEQ ID NO: 35938 - protein, 9 aa, Homo Sapiens
EVAGHLRTY

SEQ ID NO: 35939 - protein, 9 aa, Homo Sapiens
EVAGPREAF

SEQ ID NO: 35940 - protein, 9 aa, Homo Sapiens
EVAKSLSAL

SEQ ID NO: 35941 - protein, 9 aa, Homo Sapiens
EVAPAGASY

SEQ ID NO: 35942 - protein, 9 aa, Homo Sapiens
EVAPALSVF

SEQ ID NO: 35943 - protein, 9 aa, Homo Sapiens
EVAPAPKSW

SEQ ID NO: 35944 - protein, 9 aa, Homo Sapiens
EVAPDAKSF

SEQ ID NO: 35945 - protein, 9 aa, Homo Sapiens
EVAPSFGTL

SEQ ID NO: 35946 - protein, 9 aa, Homo Sapiens
EVAQQGTMW

SEQ ID NO: 35947 - protein, 9 aa, Homo Sapiens
EVASALRSF

SEQ ID NO: 35948 - protein, 9 aa, Homo Sapiens
EVASNITSF

SEQ ID NO: 35949 - protein, 9 aa, Homo Sapiens
EVASVYQSY

SEQ ID NO: 35950 - protein, 9 aa, Homo Sapiens
EVATRMQSF

SEQ ID NO: 35951 - protein, 9 aa, Homo Sapiens
EVAVKMKQY

SEQ ID NO: 35952 - protein, 9 aa, Homo Sapiens
EVFHPTHEW

SEQ ID NO: 35953 - protein, 9 aa, Homo Sapiens
EVHDYIRAY

SEQ ID NO: 35954 - protein, 9 aa, Homo Sapiens
EVHEKLRGW

SEQ ID NO: 35955 - protein, 9 aa, Homo Sapiens
EVHESYKHL

SEQ ID NO: 35956 - protein, 9 aa, Homo Sapiens
EVHIQLSEW

SEQ ID NO: 35957 - protein, 9 aa, Homo Sapiens
EVIAKNNSF

SEQ ID NO: 35958 - protein, 9 aa, Homo Sapiens
EVIALLHSL

SEQ ID NO: 35959 - protein, 9 aa, Homo Sapiens
EVIDVVRTM

SEQ ID NO: 35960 - protein, 9 aa, Homo Sapiens
EVIEKFDYV

SEQ ID NO: 35961 - protein, 9 aa, Homo Sapiens
EVIGGLCSL

SEQ ID NO: 35962 - protein, 9 aa, Homo Sapiens
EVIGKITAL

SEQ ID NO: 35963 - protein, 9 aa, Homo Sapiens
EVIIPHSGW

SEQ ID NO: 35964 - protein, 9 aa, Homo Sapiens
EVIKELAQI

SEQ ID NO: 35965 - protein, 9 aa, Homo Sapiens
EVIKEVQEF

SEQ ID NO: 35966 - protein, 9 aa, Homo Sapiens
EVIKSQEVF

SEQ ID NO: 35967 - protein, 9 aa, Homo Sapiens
EVILKNITW

SEQ ID NO: 35968 - protein, 9 aa, Homo Sapiens
EVINRIQKL

SEQ ID NO: 35969 - protein, 9 aa, Homo Sapiens
EVIPGYEEL

SEQ ID NO: 35970 - protein, 9 aa, Homo Sapiens
EVIPLVQTF

SEQ ID NO: 35971 - protein, 9 aa, Homo Sapiens
EVIPPMKEF

SEQ ID NO: 35972 - protein, 9 aa, Homo Sapiens
EVIPPYYSY

SEQ ID NO: 35973 - protein, 9 aa, Homo Sapiens
EVIPTHTVY

SEQ ID NO: 35974 - protein, 9 aa, Homo Sapiens
EVIQALPKL

SEQ ID NO: 35975 - protein, 9 aa, Homo Sapiens
EVIQAYETL

SEQ ID NO: 35976 - protein, 9 aa, Homo Sapiens
EVIQEIKSF

SEQ ID NO: 35977 - protein, 9 aa, Homo Sapiens
EVIQNMTEF

SEQ ID NO: 35978 - protein, 9 aa, Homo Sapiens
EVIQWLAKL

SEQ ID NO: 35979 - protein, 9 aa, Homo Sapiens
EVIRELAGI

SEQ ID NO: 35980 - protein, 9 aa, Homo Sapiens
EVIRELICY

SEQ ID NO: 35981 - protein, 9 aa, Homo Sapiens
EVIRHDATW

SEQ ID NO: 35982 - protein, 9 aa, Homo Sapiens
EVIRTLPSL

SEQ ID NO: 35983 - protein, 9 aa, Homo Sapiens
EVIRVCQVW

SEQ ID NO: 35984 - protein, 9 aa, Homo Sapiens
EVISGYEEL

SEQ ID NO: 35985 - protein, 9 aa, Homo Sapiens
EVISHIGKL

SEQ ID NO: 35986 - protein, 9 aa, Homo Sapiens
EVISKLYAV

SEQ ID NO: 35987 - protein, 9 aa, Homo Sapiens
EVISKTPTL

SEQ ID NO: 35988 - protein, 9 aa, Homo Sapiens
EVISRQATI

SEQ ID NO: 35989 - protein, 9 aa, Homo Sapiens
EVISSLEKY

SEQ ID NO: 35990 - protein, 9 aa, Homo Sapiens
EVISSVSEL

SEQ ID NO: 35991 - protein, 9 aa, Homo Sapiens
EVISVLQKY

SEQ ID NO: 35992 - protein, 9 aa, Homo Sapiens
EVITGIRII

SEQ ID NO: 35993 - protein, 9 aa, Homo Sapiens
EVITKFINV

SEQ ID NO: 35994 - protein, 9 aa, Homo Sapiens
EVKEDIAKL

SEQ ID NO: 35995 - protein, 9 aa, Homo Sapiens
EVKEEVKKF

SEQ ID NO: 35996 - protein, 9 aa, Homo Sapiens
EVKEMMTTW

SEQ ID NO: 35997 - protein, 9 aa, Homo Sapiens
EVKKLMRKY

SEQ ID NO: 35998 - protein, 9 aa, Homo Sapiens
EVKKTLQQF

SEQ ID NO: 35999 - protein, 9 aa, Homo Sapiens
EVKLKVDSF

SEQ ID NO: 36000 - protein, 9 aa, Homo Sapiens
EVKPDDLEW

SEQ ID NO: 36001 - protein, 9 aa, Homo Sapiens
EVKRPGESL

SEQ ID NO: 36002 - protein, 9 aa, Homo Sapiens
EVLDHMGTF

SEQ ID NO: 36003 - protein, 9 aa, Homo Sapiens
EVLEHFQAF

SEQ ID NO: 36004 - protein, 9 aa, Homo Sapiens
EVLKRLGMW

SEQ ID NO: 36005 - protein, 9 aa, Homo Sapiens
EVMEIMSRF

SEQ ID NO: 36006 - protein, 9 aa, Homo Sapiens
EVMKRIQSL

SEQ ID NO: 36007 - protein, 9 aa, Homo Sapiens
EVMKYITSL

SEQ ID NO: 36008 - protein, 9 aa, Homo Sapiens
EVMPKICRL

SEQ ID NO: 36009 - protein, 9 aa, Homo Sapiens
EVMQKYIRY

SEQ ID NO: 36010 - protein, 9 aa, Homo Sapiens
EVMSLMSSL

SEQ ID NO: 36011 - protein, 9 aa, Homo Sapiens
EVPEKIAEL

SEQ ID NO: 36012 - protein, 9 aa, Homo Sapiens
EVPHEVAQY

SEQ ID NO: 36013 - protein, 9 aa, Homo Sapiens
EVPKKLTEW

SEQ ID NO: 36014 - protein, 9 aa, Homo Sapiens
EVPKVYSCL

SEQ ID NO: 36015 - protein, 9 aa, Homo Sapiens
EVPSMASSW

SEQ ID NO: 36016 - protein, 9 aa, Homo Sapiens
EVPTQLVSY

SEQ ID NO: 36017 - protein, 9 aa, Homo Sapiens
EVPVYVPKW

SEQ ID NO: 36018 - protein, 9 aa, Homo Sapiens
EVQDKYECL

SEQ ID NO: 36019 - protein, 9 aa, Homo Sapiens
EVQDSIHRW

SEQ ID NO: 36020 - protein, 9 aa, Homo Sapiens
EVQDSYEAY

SEQ ID NO: 36021 - protein, 9 aa, Homo Sapiens
EVQEGFLRF

SEQ ID NO: 36022 - protein, 9 aa, Homo Sapiens
EVQSLYREI

SEQ ID NO: 36023 - protein, 9 aa, Homo Sapiens
EVRQGLKAY

SEQ ID NO: 36024 - protein, 9 aa, Homo Sapiens
EVRTGGMAF

SEQ ID NO: 36025 - protein, 9 aa, Homo Sapiens
EVSQKFTSI

SEQ ID NO: 36026 - protein, 9 aa, Homo Sapiens
EVSSISSKF

SEQ ID NO: 36027 - protein, 9 aa, Homo Sapiens
EVSVPTFSW

SEQ ID NO: 36028 - protein, 9 aa, Homo Sapiens
EVTDLLASF

SEQ ID NO: 36029 - protein, 9 aa, Homo Sapiens
EVTEIISQF

SEQ ID NO: 36030 - protein, 9 aa, Homo Sapiens
EVTELLARY

SEQ ID NO: 36031 - protein, 9 aa, Homo Sapiens
EVTFIYQKL

SEQ ID NO: 36032 - protein, 9 aa, Homo Sapiens
EVTGPHEAF

SEQ ID NO: 36033 - protein, 9 aa, Homo Sapiens
EVTSKLKSY

SEQ ID NO: 36034 - protein, 9 aa, Homo Sapiens
EVTVDFHCW

SEQ ID NO: 36035 - protein, 9 aa, Homo Sapiens
EVVAEVQEF

SEQ ID NO: 36036 - protein, 9 aa, Homo Sapiens
EVVAFIQHF

SEQ ID NO: 36037 - protein, 9 aa, Homo Sapiens
EVVAGIKEY

SEQ ID NO: 36038 - protein, 9 aa, Homo Sapiens
EVVAKVMEL

SEQ ID NO: 36039 - protein, 9 aa, Homo Sapiens
EVVCIRSTW

SEQ ID NO: 36040 - protein, 9 aa, Homo Sapiens
EVVDFSSHY

SEQ ID NO: 36041 - protein, 9 aa, Homo Sapiens
EVVDNSSNW

SEQ ID NO: 36042 - protein, 9 aa, Homo Sapiens
EVVEKYEIY

SEQ ID NO: 36043 - protein, 9 aa, Homo Sapiens
EVVENLLNY

SEQ ID NO: 36044 - protein, 9 aa, Homo Sapiens
EVVERLLSV

SEQ ID NO: 36045 - protein, 9 aa, Homo Sapiens
EVVERVLTF

SEQ ID NO: 36046 - protein, 9 aa, Homo Sapiens
EVVGKIRSL

SEQ ID NO: 36047 - protein, 9 aa, Homo Sapiens
EVVGVYGSF

SEQ ID NO: 36048 - protein, 9 aa, Homo Sapiens
EVVGYFGRF

SEQ ID NO: 36049 - protein, 9 aa, Homo Sapiens
EVVHKIIEL

SEQ ID NO: 36050 - protein, 9 aa, Homo Sapiens
EVVHQLQEI

SEQ ID NO: 36051 - protein, 9 aa, Homo Sapiens
EVVKILERW

SEQ ID NO: 36052 - protein, 9 aa, Homo Sapiens
EVVNLFLHF

SEQ ID NO: 36053 - protein, 9 aa, Homo Sapiens
EVVPEYVTL

SEQ ID NO: 36054 - protein, 9 aa, Homo Sapiens
EVVRETGEY

SEQ ID NO: 36055 - protein, 9 aa, Homo Sapiens
EVVRKILLL

SEQ ID NO: 36056 - protein, 9 aa, Homo Sapiens
EVVSPLSSW

SEQ ID NO: 36057 - protein, 9 aa, Homo Sapiens
EVVSVLHVF

SEQ ID NO: 36058 - protein, 9 aa, Homo Sapiens
EVVTALTTL

SEQ ID NO: 36059 - protein, 9 aa, Homo Sapiens
EVVTTIPTI

SEQ ID NO: 36060 - protein, 9 aa, Homo Sapiens
EVYAGSHQY

SEQ ID NO: 36061 - protein, 9 aa, Homo Sapiens
EVYAKANSF

SEQ ID NO: 36062 - protein, 9 aa, Homo Sapiens
EVYDDFLHY

SEQ ID NO: 36063 - protein, 9 aa, Homo Sapiens
EVYHKSMTL

SEQ ID NO: 36064 - protein, 9 aa, Homo Sapiens
FSAEQIARW

SEQ ID NO: 36065 - protein, 9 aa, Homo Sapiens
FTINGITNW

SEQ ID NO: 36066 - protein, 9 aa, Homo Sapiens
FTKPPIGTW

SEQ ID NO: 36067 - protein, 9 aa, Homo Sapiens
FTVDQIRAI

SEQ ID NO: 36068 - protein, 9 aa, Homo Sapiens
FVEEEHQTW

SEQ ID NO: 36069 - protein, 9 aa, Homo Sapiens
FVGPVVGGW

SEQ ID NO: 36070 - protein, 9 aa, Homo Sapiens
FVKEKLLKW

SEQ ID NO: 36071 - protein, 9 aa, Homo Sapiens
FVNEAISHW

SEQ ID NO: 36072 - protein, 9 aa, Homo Sapiens
FVQQRYLSY

SEQ ID NO: 36073 - protein, 9 aa, Homo Sapiens
FVVEQVESY

SEQ ID NO: 36074 - protein, 9 aa, Homo Sapiens
FVVQNPSSW

SEQ ID NO: 36075 - protein, 9 aa, Homo Sapiens
GEIAAAVSF

SEQ ID NO: 36076 - protein, 9 aa, Homo Sapiens
GTIAEVGKW

SEQ ID NO: 36077 - protein, 9 aa, Homo Sapiens
GTIKKFLSL

SEQ ID NO: 36078 - protein, 9 aa, Homo Sapiens
GVADGVGGW

SEQ ID NO: 36079 - protein, 9 aa, Homo Sapiens
GVIWKTIGW

SEQ ID NO: 36080 - protein, 9 aa, Homo Sapiens
HAATTSLSW

SEQ ID NO: 36081 - protein, 9 aa, Homo Sapiens
HAIDIICGF

SEQ ID NO: 36082 - protein, 9 aa, Homo Sapiens
HIAENILSY

SEQ ID NO: 36083 - protein, 9 aa, Homo Sapiens
HIIGRIESY

SEQ ID NO: 36084 - protein, 9 aa, Homo Sapiens
HLIQNIPGF

SEQ ID NO: 36085 - protein, 9 aa, Homo Sapiens
HTADISSHF

SEQ ID NO: 36086 - protein, 9 aa, Homo Sapiens
HTATHILNF

SEQ ID NO: 36087 - protein, 9 aa, Homo Sapiens
HTIGKTVEY

SEQ ID NO: 36088 - protein, 9 aa, Homo Sapiens
HTIGPFSSF

SEQ ID NO: 36089 - protein, 9 aa, Homo Sapiens
HTKTTLPTF

SEQ ID NO: 36090 - protein, 9 aa, Homo Sapiens
HTQENCETW

SEQ ID NO: 36091 - protein, 9 aa, Homo Sapiens
HTQTGVSTW

SEQ ID NO: 36092 - protein, 9 aa, Homo Sapiens
HTSSTTSAW

SEQ ID NO: 36093 - protein, 9 aa, Homo Sapiens
HTVEDYQAI

SEQ ID NO: 36094 - protein, 9 aa, Homo Sapiens
HTVGLSSTW

SEQ ID NO: 36095 - protein, 9 aa, Homo Sapiens
HTVPDMGKW

SEQ ID NO: 36096 - protein, 9 aa, Homo Sapiens
HVGPILVGW

SEQ ID NO: 36097 - protein, 9 aa, Homo Sapiens
HVHSEFESF

SEQ ID NO: 36098 - protein, 9 aa, Homo Sapiens
HVIDDFVQF

SEQ ID NO: 36099 - protein, 9 aa, Homo Sapiens
HVPFKFQSF

SEQ ID NO: 36100 - protein, 9 aa, Homo Sapiens
HVPNTYTCF

SEQ ID NO: 36101 - protein, 9 aa, Homo Sapiens
HVQELYQEW

SEQ ID NO: 36102 - protein, 9 aa, Homo Sapiens
HVSDLSSSW

SEQ ID NO: 36103 - protein, 9 aa, Homo Sapiens
HVSGPFVQF

SEQ ID NO: 36104 - protein, 9 aa, Homo Sapiens
HVVAHFHEW

SEQ ID NO: 36105 - protein, 9 aa, Homo Sapiens
HVVEFSTAW

SEQ ID NO: 36106 - protein, 9 aa, Homo Sapiens
IIIPSYASW

SEQ ID NO: 36107 - protein, 9 aa, Homo Sapiens
ITKDVVLQW

SEQ ID NO: 36108 - protein, 9 aa, Homo Sapiens
ITKKQVSVW

SEQ ID NO: 36109 - protein, 9 aa, Homo Sapiens
ITPEVLPGW

SEQ ID NO: 36110 - protein, 9 aa, Homo Sapiens
KVKKTIPSW

SEQ ID NO: 36111 - protein, 9 aa, Homo Sapiens
LEVIPGYEE

SEQ ID NO: 36112 - protein, 9 aa, Homo Sapiens
LNLPEAASY

SEQ ID NO: 36113 - protein, 9 aa, Homo Sapiens
LTIDHVPIW

SEQ ID NO: 36114 - protein, 9 aa, Homo Sapiens
LVKTEIPNW

SEQ ID NO: 36115 - protein, 9 aa, Homo Sapiens
MTNGFHMTW

SEQ ID NO: 36116 - protein, 9 aa, Homo Sapiens
MVADKFTEL

SEQ ID NO: 36117 - protein, 9 aa, Homo Sapiens
MVADRFSEL

SEQ ID NO: 36118 - protein, 9 aa, Homo Sapiens
NAIEHTLQW

SEQ ID NO: 36119 - protein, 9 aa, Homo Sapiens
NIPEAIASY

SEQ ID NO: 36120 - protein, 9 aa, Homo Sapiens
NIVDKTASF

SEQ ID NO: 36121 - protein, 9 aa, Homo Sapiens
NTINLIHTF

SEQ ID NO: 36122 - protein, 9 aa, Homo Sapiens
NTVDSIESF

SEQ ID NO: 36123 - protein, 9 aa, Homo Sapiens
NVIDKLAQF

SEQ ID NO: 36124 - protein, 9 aa, Homo Sapiens
NVIESFTEL

SEQ ID NO: 36125 - protein, 9 aa, Homo Sapiens
NVIETISSL

SEQ ID NO: 36126 - protein, 9 aa, Homo Sapiens
NVIHNLATY

SEQ ID NO: 36127 - protein, 9 aa, Homo Sapiens
NVKDLTQAW

SEQ ID NO: 36128 - protein, 9 aa, Homo Sapiens
NVKDYYQKW

SEQ ID NO: 36129 - protein, 9 aa, Homo Sapiens
NVPEKYTCY

SEQ ID NO: 36130 - protein, 9 aa, Homo Sapiens
NVREALQAW

SEQ ID NO: 36131 - protein, 9 aa, Homo Sapiens
NVVAQIKPF

SEQ ID NO: 36132 - protein, 9 aa, Homo Sapiens
PDIKLFGKW

SEQ ID NO: 36133 - protein, 9 aa, Homo Sapiens
PEGYVPEHW

SEQ ID NO: 36134 - protein, 9 aa, Homo Sapiens
PGPGSSELR

SEQ ID NO: 36135 - protein, 9 aa, Homo Sapiens
PSNHVIDRW

SEQ ID NO: 36136 - protein, 9 aa, Homo Sapiens
QSTLELSEV

SEQ ID NO: 36137 - protein, 9 aa, Homo Sapiens
QTPAHIAAF

SEQ ID NO: 36138 - protein, 9 aa, Homo Sapiens
QVAPKTLPW

SEQ ID NO: 36139 - protein, 9 aa, Homo Sapiens
QVIEKFEAL

SEQ ID NO: 36140 - protein, 9 aa, Homo Sapiens
SIIQRIQEF

SEQ ID NO: 36141 - protein, 9 aa, Homo Sapiens
SIKEKISMW

SEQ ID NO: 36142 - protein, 9 aa, Homo Sapiens
SSLLEKGLD

SEQ ID NO: 36143 - protein, 9 aa, Homo Sapiens
STAPGYYSW

SEQ ID NO: 36144 - protein, 9 aa, Homo Sapiens
STIETVPYW

SEQ ID NO: 36145 - protein, 9 aa, Homo Sapiens
STIQDYLGF

SEQ ID NO: 36146 - protein, 9 aa, Homo Sapiens
STVPGYYSW

SEQ ID NO: 36147 - protein, 9 aa, Homo Sapiens
SVIATIQEY

SEQ ID NO: 36148 - protein, 9 aa, Homo Sapiens
SVIDIINKY

SEQ ID NO: 36149 - protein, 9 aa, Homo Sapiens
SVIEAVAHF

SEQ ID NO: 36150 - protein, 9 aa, Homo Sapiens
SVIEEHANW

SEQ ID NO: 36151 - protein, 9 aa, Homo Sapiens
SVIEQILHY

SEQ ID NO: 36152 - protein, 9 aa, Homo Sapiens
SVIRKIPAL

SEQ ID NO: 36153 - protein, 9 aa, Homo Sapiens
SVIRTMWAW

SEQ ID NO: 36154 - protein, 9 aa, Homo Sapiens
SVKTTTHSW

SEQ ID NO: 36155 - protein, 9 aa, Homo Sapiens
SVPDALQKW

SEQ ID NO: 36156 - protein, 9 aa, Homo Sapiens
SVPRDLPSW

SEQ ID NO: 36157 - protein, 9 aa, Homo Sapiens
SVVDDIPEF

SEQ ID NO: 36158 - protein, 9 aa, Homo Sapiens
SVVEAIPEF

SEQ ID NO: 36159 - protein, 9 aa, Homo Sapiens
SVVGAISSY

SEQ ID NO: 36160 - protein, 9 aa, Homo Sapiens
SVVKELSSF

SEQ ID NO: 36161 - protein, 9 aa, Homo Sapiens
SVVYGIGTW

SEQ ID NO: 36162 - protein, 9 aa, Homo Sapiens
SVYDTIASW

SEQ ID NO: 36163 - protein, 9 aa, Homo Sapiens
TTIAKYAQY

SEQ ID NO: 36164 - protein, 9 aa, Homo Sapiens
TTICRLESF

SEQ ID NO: 36165 - protein, 9 aa, Homo Sapiens
TTISRFEAL

SEQ ID NO: 36166 - protein, 9 aa, Homo Sapiens
TTSTRIGKF

SEQ ID NO: 36167 - protein, 9 aa, Homo Sapiens
TVETVEVVN

SEQ ID NO: 36168 - protein, 9 aa, Homo Sapiens
TVGPKTFSW

SEQ ID NO: 36169 - protein, 9 aa, Homo Sapiens
TVIEKTESW

SEQ ID NO: 36170 - protein, 9 aa, Homo Sapiens
TVIENIHTI

SEQ ID NO: 36171 - protein, 9 aa, Homo Sapiens
TVKETIHMF

SEQ ID NO: 36172 - protein, 9 aa, Homo Sapiens
TVMGRIATL

SEQ ID NO: 36173 - protein, 9 aa, Homo Sapiens
TVPEKIGVF

SEQ ID NO: 36174 - protein, 9 aa, Homo Sapiens
TVSGTTQSW

SEQ ID NO: 36175 - protein, 9 aa, Homo Sapiens
TVVVRIMEF

SEQ ID NO: 36176 - protein, 9 aa, Homo Sapiens
VPALEASAP

SEQ ID NO: 36177 - protein, 9 aa, Homo Sapiens
VTIKKDVDG

SEQ ID NO: 36178 - protein, 9 aa, Homo Sapiens
VVKERVTEW

SEQ ID NO: 36179 - protein, 9 aa, Homo Sapiens
VVVDAIPVF

SEQ ID NO: 36180 - protein, 9 aa, Homo Sapiens
YIAESRLSW

SEQ ID NO: 36181 - protein, 9 aa, Homo Sapiens
YIATKIGAF

SEQ ID NO: 36182 - protein, 9 aa, Homo Sapiens
YIIQNIPGF

SEQ ID NO: 36183 - protein, 9 aa, Homo Sapiens
YTADPYHAL

SEQ ID NO: 36184 - protein, 9 aa, Homo Sapiens
YTAENICKW

SEQ ID NO: 36185 - protein, 9 aa, Homo Sapiens
YTHEVVTLW

SEQ ID NO: 36186 - protein, 9 aa, Homo Sapiens
YTKDYTEGW

SEQ ID NO: 36187 - protein, 9 aa, Homo Sapiens
YTKFQIATW

SEQ ID NO: 36188 - protein, 9 aa, Homo Sapiens
YTSHITCRW

SEQ ID NO: 36189 - protein, 9 aa, Homo Sapiens
YVAPAYGVY

SEQ ID NO: 36190 - protein, 9 aa, Homo Sapiens
YVHSSVAQW

SEQ ID NO: 36191 - protein, 9 aa, Homo Sapiens
YVIQKFFEF

SEQ ID NO: 36192 - protein, 9 aa, Homo Sapiens
YVPEKYLQF

SEQ ID NO: 36193 - protein, 9 aa, Homo Sapiens
YVQDRVPSY

SEQ ID NO: 36194 - protein, 9 aa, Homo Sapiens
YVTGIIGKW

SEQ ID NO: 36195 - protein, 10 aa, Homo Sapiens
AAADHNYQSY

SEQ ID NO: 36196 - protein, 10 aa, Homo Sapiens
AAAGPGKTSW

SEQ ID NO: 36197 - protein, 10 aa, Homo Sapiens
APPERKYSVW

SEQ ID NO: 36198 - protein, 10 aa, Homo Sapiens
ASFDGRISVY

SEQ ID NO: 36199 - protein, 10 aa, Homo Sapiens
ATNDASLHVW

SEQ ID NO: 36200 - protein, 10 aa, Homo Sapiens
AVFEKGMKAF

SEQ ID NO: 36201 - protein, 10 aa, Homo Sapiens
AVFNRAFYSW

SEQ ID NO: 36202 - protein, 10 aa, Homo Sapiens
AVHDRLLNVW

SEQ ID NO: 36203 - protein, 10 aa, Homo Sapiens
AVIAHDFLAF

SEQ ID NO: 36204 - protein, 10 aa, Homo Sapiens
AVIEANIRSY

SEQ ID NO: 36205 - protein, 10 aa, Homo Sapiens
AVIGDVIRVY

SEQ ID NO: 36206 - protein, 10 aa, Homo Sapiens
AVKVAKGLAW

SEQ ID NO: 36207 - protein, 10 aa, Homo Sapiens
AVLSSSLTHW

SEQ ID NO: 36208 - protein, 10 aa, Homo Sapiens
AVMDHVSDSF

SEQ ID NO: 36209 - protein, 10 aa, Homo Sapiens
AVREDLGGCW

SEQ ID NO: 36210 - protein, 10 aa, Homo Sapiens
AVREGSPANW

SEQ ID NO: 36211 - protein, 10 aa, Homo Sapiens
AVYERELQTF

SEQ ID NO: 36212 - protein, 10 aa, Homo Sapiens
AVYPQATQTY

SEQ ID NO: 36213 - protein, 10 aa, Homo Sapiens
CVQEDSLQAW

SEQ ID NO: 36214 - protein, 10 aa, Homo Sapiens
DALDIHPVGW

SEQ ID NO: 36215 - protein, 10 aa, Homo Sapiens
DAMNREVSSL

SEQ ID NO: 36216 - protein, 10 aa, Homo Sapiens
DIIGVAGNHW

SEQ ID NO: 36217 - protein, 10 aa, Homo Sapiens
DIIRGPILSF

SEQ ID NO: 36218 - protein, 10 aa, Homo Sapiens
DILNGDICKW

SEQ ID NO: 36219 - protein, 10 aa, Homo Sapiens
DIPDQVIRVF

SEQ ID NO: 36220 - protein, 10 aa, Homo Sapiens
DIYGGDYERF

SEQ ID NO: 36221 - protein, 10 aa, Homo Sapiens
DIYNFPIHAF

SEQ ID NO: 36222 - protein, 10 aa, Homo Sapiens
DIYNGKVTSI

SEQ ID NO: 36223 - protein, 10 aa, Homo Sapiens
DLFNGRYHVI

SEQ ID NO: 36224 - protein, 10 aa, Homo Sapiens
DLFTKYYSEW

SEQ ID NO: 36225 - protein, 10 aa, Homo Sapiens
DLIDSCIQSF

SEQ ID NO: 36226 - protein, 10 aa, Homo Sapiens
DLYPSNPVSW

SEQ ID NO: 36227 - protein, 10 aa, Homo Sapiens
DSCDRLTQSW

SEQ ID NO: 36228 - protein, 10 aa, Homo Sapiens
DSFSDLYSSY

SEQ ID NO: 36229 - protein, 10 aa, Homo Sapiens
DSVPRDLPSW

SEQ ID NO: 36230 - protein, 10 aa, Homo Sapiens
DTFGPRAQGW

SEQ ID NO: 36231 - protein, 10 aa, Homo Sapiens
DTIARALPFW

SEQ ID NO: 36232 - protein, 10 aa, Homo Sapiens
DTIGYLLTRY

SEQ ID NO: 36233 - protein, 10 aa, Homo Sapiens
DTIYSILHHF

SEQ ID NO: 36234 - protein, 10 aa, Homo Sapiens
DTKDPAVTEW

SEQ ID NO: 36235 - protein, 10 aa, Homo Sapiens
DTKPGLYTAY

SEQ ID NO: 36236 - protein, 10 aa, Homo Sapiens
DTLSSGVHSW

SEQ ID NO: 36237 - protein, 10 aa, Homo Sapiens
DTPIFDFRVF

SEQ ID NO: 36238 - protein, 10 aa, Homo Sapiens
DTVTKELVSW

SEQ ID NO: 36239 - protein, 10 aa, Homo Sapiens
DTYPEESRSY

SEQ ID NO: 36240 - protein, 10 aa, Homo Sapiens
DVANFYVSQL

SEQ ID NO: 36241 - protein, 10 aa, Homo Sapiens
DVARHFIQRW

SEQ ID NO: 36242 - protein, 10 aa, Homo Sapiens
DVFGYHGYTF

SEQ ID NO: 36243 - protein, 10 aa, Homo Sapiens
DVFRATYAAF

SEQ ID NO: 36244 - protein, 10 aa, Homo Sapiens
DVIAQGIGKL

SEQ ID NO: 36245 - protein, 10 aa, Homo Sapiens
DVIDLRLCNW

SEQ ID NO: 36246 - protein, 10 aa, Homo Sapiens
DVIFHPTQPW

SEQ ID NO: 36247 - protein, 10 aa, Homo Sapiens
DVIGDEICCW

SEQ ID NO: 36248 - protein, 10 aa, Homo Sapiens
DVIHEVAHSW

SEQ ID NO: 36249 - protein, 10 aa, Homo Sapiens
DVINSRTQGF

SEQ ID NO: 36250 - protein, 10 aa, Homo Sapiens
DVIRKPPRNW

SEQ ID NO: 36251 - protein, 10 aa, Homo Sapiens
DVIRNAFACF

SEQ ID NO: 36252 - protein, 10 aa, Homo Sapiens
DVLDHTYQEL

SEQ ID NO: 36253 - protein, 10 aa, Homo Sapiens
DVNESRINAW

SEQ ID NO: 36254 - protein, 10 aa, Homo Sapiens
DVPAHLQNSW

SEQ ID NO: 36255 - protein, 10 aa, Homo Sapiens
DVPERDLTAF

SEQ ID NO: 36256 - protein, 10 aa, Homo Sapiens
DVPGFAIGGL

SEQ ID NO: 36257 - protein, 10 aa, Homo Sapiens
DVPSFGPACY

SEQ ID NO: 36258 - protein, 10 aa, Homo Sapiens
DVTGQFPSSF

SEQ ID NO: 36259 - protein, 10 aa, Homo Sapiens
DVVPVFKEHW

SEQ ID NO: 36260 - protein, 10 aa, Homo Sapiens
DVYDCQVEHW

SEQ ID NO: 36261 - protein, 10 aa, Homo Sapiens
DVYDCRVEHW

SEQ ID NO: 36262 - protein, 10 aa, Homo Sapiens
DVYDIKKQAW

SEQ ID NO: 36263 - protein, 10 aa, Homo Sapiens
DVYWKIYNSI

SEQ ID NO: 36264 - protein, 10 aa, Homo Sapiens
EAFEKSAATW

SEQ ID NO: 36265 - protein, 10 aa, Homo Sapiens
EAFPEKIPLF

SEQ ID NO: 36266 - protein, 10 aa, Homo Sapiens
EAFQHRSVSW

SEQ ID NO: 36267 - protein, 10 aa, Homo Sapiens
EAFTEMMEAY

SEQ ID NO: 36268 - protein, 10 aa, Homo Sapiens
EAKGPRWASW

SEQ ID NO: 36269 - protein, 10 aa, Homo Sapiens
EALGTLMRAW

SEQ ID NO: 36270 - protein, 10 aa, Homo Sapiens
EALGVPYEQW

SEQ ID NO: 36271 - protein, 10 aa, Homo Sapiens
EALHFVAAAW

SEQ ID NO: 36272 - protein, 10 aa, Homo Sapiens
EAMSGHIDQF

SEQ ID NO: 36273 - protein, 10 aa, Homo Sapiens
EAQLRFIQAW

SEQ ID NO: 36274 - protein, 10 aa, Homo Sapiens
EATHVLPLHW

SEQ ID NO: 36275 - protein, 10 aa, Homo Sapiens
EAVAYAVNSW

SEQ ID NO: 36276 - protein, 10 aa, Homo Sapiens
EAVGSVHQAW

SEQ ID NO: 36277 - protein, 10 aa, Homo Sapiens
EAVSLKPTAW

SEQ ID NO: 36278 - protein, 10 aa, Homo Sapiens
EAYDKLLESW

SEQ ID NO: 36279 - protein, 10 aa, Homo Sapiens
EAYDPETRAW

SEQ ID NO: 36280 - protein, 10 aa, Homo Sapiens
EAYNIKSNEW

SEQ ID NO: 36281 - protein, 10 aa, Homo Sapiens
EAYNIRTDSW

SEQ ID NO: 36282 - protein, 10 aa, Homo Sapiens
EAYNSLMKSY

SEQ ID NO: 36283 - protein, 10 aa, Homo Sapiens
EAYPLPGVTY

SEQ ID NO: 36284 - protein, 10 aa, Homo Sapiens
EAYSAKIALF

SEQ ID NO: 36285 - protein, 10 aa, Homo Sapiens
EIAGTVVGHW

SEQ ID NO: 36286 - protein, 10 aa, Homo Sapiens
EIASFECSGY

SEQ ID NO: 36287 - protein, 10 aa, Homo Sapiens
EICADPRVPW

SEQ ID NO: 36288 - protein, 10 aa, Homo Sapiens
EIFDGNVAHI

SEQ ID NO: 36289 - protein, 10 aa, Homo Sapiens
EIFPGNGHCY

SEQ ID NO: 36290 - protein, 10 aa, Homo Sapiens
EIFPLETPAF

SEQ ID NO: 36291 - protein, 10 aa, Homo Sapiens
EIIETGLAAF

SEQ ID NO: 36292 - protein, 10 aa, Homo Sapiens
EIIGKCTTAY

SEQ ID NO: 36293 - protein, 10 aa, Homo Sapiens
EILEKSFSEF

SEQ ID NO: 36294 - protein, 10 aa, Homo Sapiens
EILHFHYTTW

SEQ ID NO: 36295 - protein, 10 aa, Homo Sapiens
EIMDKAYDKF

SEQ ID NO: 36296 - protein, 10 aa, Homo Sapiens
EIMDRAYDSF

SEQ ID NO: 36297 - protein, 10 aa, Homo Sapiens
EIMEHRFKTY

SEQ ID NO: 36298 - protein, 10 aa, Homo Sapiens
EIMRAGMSSL

SEQ ID NO: 36299 - protein, 10 aa, Homo Sapiens
EINENNVREF

SEQ ID NO: 36300 - protein, 10 aa, Homo Sapiens
EIVPFRVAAY

SEQ ID NO: 36301 - protein, 10 aa, Homo Sapiens
EIYAGKKNNW

SEQ ID NO: 36302 - protein, 10 aa, Homo Sapiens
EIYDCKVEHW

SEQ ID NO: 36303 - protein, 10 aa, Homo Sapiens
EIYGGSDSRF

SEQ ID NO: 36304 - protein, 10 aa, Homo Sapiens
EIYNYDPETY

SEQ ID NO: 36305 - protein, 10 aa, Homo Sapiens
EIYPPEVAEF

SEQ ID NO: 36306 - protein, 10 aa, Homo Sapiens
EIYPPKLHQF

SEQ ID NO: 36307 - protein, 10 aa, Homo Sapiens
EIYQKPFQTL

SEQ ID NO: 36308 - protein, 10 aa, Homo Sapiens
EIYTRDGNSY

SEQ ID NO: 36309 - protein, 10 aa, Homo Sapiens
ELFDKKLKEL

SEQ ID NO: 36310 - protein, 10 aa, Homo Sapiens
ELFHKDIEAF

SEQ ID NO: 36311 - protein, 10 aa, Homo Sapiens
ELFMSSFQSY

SEQ ID NO: 36312 - protein, 10 aa, Homo Sapiens
ELHNGTTQSW

SEQ ID NO: 36313 - protein, 10 aa, Homo Sapiens
ELIAKIPNFW

SEQ ID NO: 36314 - protein, 10 aa, Homo Sapiens
ELIQAKVGSF

SEQ ID NO: 36315 - protein, 10 aa, Homo Sapiens
ELLNSKLPRW

SEQ ID NO: 36316 - protein, 10 aa, Homo Sapiens
ELMDHGIVSW

SEQ ID NO: 36317 - protein, 10 aa, Homo Sapiens
ELMHSIVGSY

SEQ ID NO: 36318 - protein, 10 aa, Homo Sapiens
ELMTHHVHTY

SEQ ID NO: 36319 - protein, 10 aa, Homo Sapiens
ELMYGGVSSY

SEQ ID NO: 36320 - protein, 10 aa, Homo Sapiens
ENMWNTGSTY

SEQ ID NO: 36321 - protein, 10 aa, Homo Sapiens
EQINAKVAEW

SEQ ID NO: 36322 - protein, 10 aa, Homo Sapiens
ESAGIHETTY

SEQ ID NO: 36323 - protein, 10 aa, Homo Sapiens
ESIGQRIACY

SEQ ID NO: 36324 - protein, 10 aa, Homo Sapiens
ESRDGRVDSW

SEQ ID NO: 36325 - protein, 10 aa, Homo Sapiens
ESSPGGNLGW

SEQ ID NO: 36326 - protein, 10 aa, Homo Sapiens
ESSPVHTSTF

SEQ ID NO: 36327 - protein, 10 aa, Homo Sapiens
ETAEPWFSTF

SEQ ID NO: 36328 - protein, 10 aa, Homo Sapiens
ETFAQKMDAF

SEQ ID NO: 36329 - protein, 10 aa, Homo Sapiens
ETFGFRGEAL

SEQ ID NO: 36330 - protein, 10 aa, Homo Sapiens
ETFKDFYNCW

SEQ ID NO: 36331 - protein, 10 aa, Homo Sapiens
ETFKEQGNAY

SEQ ID NO: 36332 - protein, 10 aa, Homo Sapiens
ETFQQKMLRF

SEQ ID NO: 36333 - protein, 10 aa, Homo Sapiens
ETFSGVYKKL

SEQ ID NO: 36334 - protein, 10 aa, Homo Sapiens
ETHPVQETTF

SEQ ID NO: 36335 - protein, 10 aa, Homo Sapiens
ETHTNEFITW

SEQ ID NO: 36336 - protein, 10 aa, Homo Sapiens
ETIESRLSEL

SEQ ID NO: 36337 - protein, 10 aa, Homo Sapiens
ETIHIRGGVF

SEQ ID NO: 36338 - protein, 10 aa, Homo Sapiens
ETIKDGVSRF

SEQ ID NO: 36339 - protein, 10 aa, Homo Sapiens
ETIPDGIGKL

SEQ ID NO: 36340 - protein, 10 aa, Homo Sapiens
ETIRPEETAW

SEQ ID NO: 36341 - protein, 10 aa, Homo Sapiens
ETKKPEVASW

SEQ ID NO: 36342 - protein, 10 aa, Homo Sapiens
ETLLGTMQSY

SEQ ID NO: 36343 - protein, 10 aa, Homo Sapiens
ETLPSKIQQW

SEQ ID NO: 36344 - protein, 10 aa, Homo Sapiens
ETMDREFRKW

SEQ ID NO: 36345 - protein, 10 aa, Homo Sapiens
ETMTEKLVKF

SEQ ID NO: 36346 - protein, 10 aa, Homo Sapiens
ETNGPGHQLW

SEQ ID NO: 36347 - protein, 10 aa, Homo Sapiens
ETNPHHPPAW

SEQ ID NO: 36348 - protein, 10 aa, Homo Sapiens
ETPTFKDHSF

SEQ ID NO: 36349 - protein, 10 aa, Homo Sapiens
ETQKKRLLSW

SEQ ID NO: 36350 - protein, 10 aa, Homo Sapiens
ETRPAGDGTF

SEQ ID NO: 36351 - protein, 10 aa, Homo Sapiens
ETTDSILSHF

SEQ ID NO: 36352 - protein, 10 aa, Homo Sapiens
ETTEYLKTSW

SEQ ID NO: 36353 - protein, 10 aa, Homo Sapiens
ETVHFATTQW

SEQ ID NO: 36354 - protein, 10 aa, Homo Sapiens
ETVNHHYLLF

SEQ ID NO: 36355 - protein, 10 aa, Homo Sapiens
ETVNLRSLGF

SEQ ID NO: 36356 - protein, 10 aa, Homo Sapiens
ETVTIEQTSW

SEQ ID NO: 36357 - protein, 10 aa, Homo Sapiens
ETYDPFHNCW

SEQ ID NO: 36358 - protein, 10 aa, Homo Sapiens
ETYNGHLVSC

SEQ ID NO: 36359 - protein, 10 aa, Homo Sapiens
ETYNLLSERW

SEQ ID NO: 36360 - protein, 10 aa, Homo Sapiens
EVADELVSEF

SEQ ID NO: 36361 - protein, 10 aa, Homo Sapiens
EVADRLFSSF

SEQ ID NO: 36362 - protein, 10 aa, Homo Sapiens
EVADYEATTF

SEQ ID NO: 36363 - protein, 10 aa, Homo Sapiens
EVAEESGRLW

SEQ ID NO: 36364 - protein, 10 aa, Homo Sapiens
EVAEVKISHF

SEQ ID NO: 36365 - protein, 10 aa, Homo Sapiens
EVALGGLQSW

SEQ ID NO: 36366 - protein, 10 aa, Homo Sapiens
EVANHVVQAL

SEQ ID NO: 36367 - protein, 10 aa, Homo Sapiens
EVAPCMGDRF

SEQ ID NO: 36368 - protein, 10 aa, Homo Sapiens
EVAPGALLGL

SEQ ID NO: 36369 - protein, 10 aa, Homo Sapiens
EVAPKQLHSL

SEQ ID NO: 36370 - protein, 10 aa, Homo Sapiens
EVAPVISSAY

SEQ ID NO: 36371 - protein, 10 aa, Homo Sapiens
EVAQHLAATY

SEQ ID NO: 36372 - protein, 10 aa, Homo Sapiens
EVAQKCGLSY

SEQ ID NO: 36373 - protein, 10 aa, Homo Sapiens
EVCTATGERW

SEQ ID NO: 36374 - protein, 10 aa, Homo Sapiens
EVDKRVHMTW

SEQ ID NO: 36375 - protein, 10 aa, Homo Sapiens
EVDVSKKTAW

SEQ ID NO: 36376 - protein, 10 aa, Homo Sapiens
EVEGAGVKAW

SEQ ID NO: 36377 - protein, 10 aa, Homo Sapiens
EVEVGDRTSW

SEQ ID NO: 36378 - protein, 10 aa, Homo Sapiens
EVFDKDLSKL

SEQ ID NO: 36379 - protein, 10 aa, Homo Sapiens
EVFDKTYQFL

SEQ ID NO: 36380 - protein, 10 aa, Homo Sapiens
EVFDPDANTW

SEQ ID NO: 36381 - protein, 10 aa, Homo Sapiens
EVFDPIANCW

SEQ ID NO: 36382 - protein, 10 aa, Homo Sapiens
EVFETIIHSY

SEQ ID NO: 36383 - protein, 10 aa, Homo Sapiens
EVFGPPCEAY

SEQ ID NO: 36384 - protein, 10 aa, Homo Sapiens
EVFIHKDKGF

SEQ ID NO: 36385 - protein, 10 aa, Homo Sapiens
EVFMHVSTAY

SEQ ID NO: 36386 - protein, 10 aa, Homo Sapiens
EVFPKEMTKW

SEQ ID NO: 36387 - protein, 10 aa, Homo Sapiens
EVFPLAMNYL

SEQ ID NO: 36388 - protein, 10 aa, Homo Sapiens
EVFPLKVFGY

SEQ ID NO: 36389 - protein, 10 aa, Homo Sapiens
EVFQTKIQEF

SEQ ID NO: 36390 - protein, 10 aa, Homo Sapiens
EVFSFKMVSY

SEQ ID NO: 36391 - protein, 10 aa, Homo Sapiens
EVFTGGIGSY

SEQ ID NO: 36392 - protein, 10 aa, Homo Sapiens
EVFTGGISSY

SEQ ID NO: 36393 - protein, 10 aa, Homo Sapiens
EVFTGHMGKL

SEQ ID NO: 36394 - protein, 10 aa, Homo Sapiens
EVGWHDVAGW

SEQ ID NO: 36395 - protein, 10 aa, Homo Sapiens
EVHMLDIESF

SEQ ID NO: 36396 - protein, 10 aa, Homo Sapiens
EVIASIISRY

SEQ ID NO: 36397 - protein, 10 aa, Homo Sapiens
EVIDEKVQHI

SEQ ID NO: 36398 - protein, 10 aa, Homo Sapiens
EVIDKNSGGW

SEQ ID NO: 36399 - protein, 10 aa, Homo Sapiens
EVIDLMIKEY

SEQ ID NO: 36400 - protein, 10 aa, Homo Sapiens
EVIEKKPEKF

SEQ ID NO: 36401 - protein, 10 aa, Homo Sapiens
EVIENRMAVL

SEQ ID NO: 36402 - protein, 10 aa, Homo Sapiens
EVIERLIKSY

SEQ ID NO: 36403 - protein, 10 aa, Homo Sapiens
EVIESTNLKY

SEQ ID NO: 36404 - protein, 10 aa, Homo Sapiens
EVIGGTNHTL

SEQ ID NO: 36405 - protein, 10 aa, Homo Sapiens
EVIGLLGGRY

SEQ ID NO: 36406 - protein, 10 aa, Homo Sapiens
EVIGQVLSTL

SEQ ID NO: 36407 - protein, 10 aa, Homo Sapiens
EVIGSELKHW

SEQ ID NO: 36408 - protein, 10 aa, Homo Sapiens
EVIHGIFKAY

SEQ ID NO: 36409 - protein, 10 aa, Homo Sapiens
EVIHKLLDGW

SEQ ID NO: 36410 - protein, 10 aa, Homo Sapiens
EVIITPNSAW

SEQ ID NO: 36411 - protein, 10 aa, Homo Sapiens
EVINGNIKTV

SEQ ID NO: 36412 - protein, 10 aa, Homo Sapiens
EVINRSMDTY

SEQ ID NO: 36413 - protein, 10 aa, Homo Sapiens
EVIQGLLKKF

SEQ ID NO: 36414 - protein, 10 aa, Homo Sapiens
EVIQHRFESL

SEQ ID NO: 36415 - protein, 10 aa, Homo Sapiens
EVISGKGQFF

SEQ ID NO: 36416 - protein, 10 aa, Homo Sapiens
EVISQHLVSY

SEQ ID NO: 36417 - protein, 10 aa, Homo Sapiens
EVITNRPKGF

SEQ ID NO: 36418 - protein, 10 aa, Homo Sapiens
EVKLGELPSW

SEQ ID NO: 36419 - protein, 10 aa, Homo Sapiens
EVLDKRYNVY

SEQ ID NO: 36420 - protein, 10 aa, Homo Sapiens
EVLGPKPTFW

SEQ ID NO: 36421 - protein, 10 aa, Homo Sapiens
EVLHVKTESL

SEQ ID NO: 36422 - protein, 10 aa, Homo Sapiens
EVLPAALAVY

SEQ ID NO: 36423 - protein, 10 aa, Homo Sapiens
EVLSKKGHSF

SEQ ID NO: 36424 - protein, 10 aa, Homo Sapiens
EVLTSKGDAW

SEQ ID NO: 36425 - protein, 10 aa, Homo Sapiens
EVMEQGRVTI

SEQ ID NO: 36426 - protein, 10 aa, Homo Sapiens
EVMEQQTISI

SEQ ID NO: 36427 - protein, 10 aa, Homo Sapiens
EVMNQNLAYY

SEQ ID NO: 36428 - protein, 10 aa, Homo Sapiens
EVNASPLKHF

SEQ ID NO: 36429 - protein, 10 aa, Homo Sapiens
EVNDIKTRSW

SEQ ID NO: 36430 - protein, 10 aa, Homo Sapiens
EVNNFPPQSW

SEQ ID NO: 36431 - protein, 10 aa, Homo Sapiens
EVNTEKLTAF

SEQ ID NO: 36432 - protein, 10 aa, Homo Sapiens
EVPGSIPNSW

SEQ ID NO: 36433 - protein, 10 aa, Homo Sapiens
EVPKPFPTHY

SEQ ID NO: 36434 - protein, 10 aa, Homo Sapiens
EVPVHKLQSL

SEQ ID NO: 36435 - protein, 10 aa, Homo Sapiens
EVREEYITAF

SEQ ID NO: 36436 - protein, 10 aa, Homo Sapiens
EVRGGGLTRY

SEQ ID NO: 36437 - protein, 10 aa, Homo Sapiens
EVRVGVTQAY

SEQ ID NO: 36438 - protein, 10 aa, Homo Sapiens
EVSTAKLTAF

SEQ ID NO: 36439 - protein, 10 aa, Homo Sapiens
EVTDHNLHEL

SEQ ID NO: 36440 - protein, 10 aa, Homo Sapiens
EVTEVKVSSW

SEQ ID NO: 36441 - protein, 10 aa, Homo Sapiens
EVTPQSKIAW

SEQ ID NO: 36442 - protein, 10 aa, Homo Sapiens
EVTTHILSQF

SEQ ID NO: 36443 - protein, 10 aa, Homo Sapiens
EVVAGIKEYF

SEQ ID NO: 36444 - protein, 10 aa, Homo Sapiens
EVVDFIQSKI

SEQ ID NO: 36445 - protein, 10 aa, Homo Sapiens
EVVDKKIEEF

SEQ ID NO: 36446 - protein, 10 aa, Homo Sapiens
EVVDSMVQHF

SEQ ID NO: 36447 - protein, 10 aa, Homo Sapiens
EVVEKSESGW

SEQ ID NO: 36448 - protein, 10 aa, Homo Sapiens
EVVGALVTHI

SEQ ID NO: 36449 - protein, 10 aa, Homo Sapiens
EVVGEQVTSY

SEQ ID NO: 36450 - protein, 10 aa, Homo Sapiens
EVVGYLGGRW

SEQ ID NO: 36451 - protein, 10 aa, Homo Sapiens
EVVKDGRPKW

SEQ ID NO: 36452 - protein, 10 aa, Homo Sapiens
EVVKNSVHSW

SEQ ID NO: 36453 - protein, 10 aa, Homo Sapiens
EVVPEPVARW

SEQ ID NO: 36454 - protein, 10 aa, Homo Sapiens
EVVSEPFRSF

SEQ ID NO: 36455 - protein, 10 aa, Homo Sapiens
EVYAHAGATL

SEQ ID NO: 36456 - protein, 10 aa, Homo Sapiens
EVYDPATETW

SEQ ID NO: 36457 - protein, 10 aa, Homo Sapiens
EVYDPGTNTW

SEQ ID NO: 36458 - protein, 10 aa, Homo Sapiens
EVYDPTTNAW

SEQ ID NO: 36459 - protein, 10 aa, Homo Sapiens
EVYEGEVTEL

SEQ ID NO: 36460 - protein, 10 aa, Homo Sapiens
EVYEGVYTNH

SEQ ID NO: 36461 - protein, 10 aa, Homo Sapiens
EVYEHVYETV

SEQ ID NO: 36462 - protein, 10 aa, Homo Sapiens
EVYNLESNEW

SEQ ID NO: 36463 - protein, 10 aa, Homo Sapiens
EVYPFGIVGM

SEQ ID NO: 36464 - protein, 10 aa, Homo Sapiens
EVYQGCGTEL

SEQ ID NO: 36465 - protein, 10 aa, Homo Sapiens
EVYRLAIQSF

SEQ ID NO: 36466 - protein, 10 aa, Homo Sapiens
EVYVSRPSHF

SEQ ID NO: 36467 - protein, 10 aa, Homo Sapiens
FTKTSQGRSW

SEQ ID NO: 36468 - protein, 10 aa, Homo Sapiens
FTVGPKTFSW

SEQ ID NO: 36469 - protein, 10 aa, Homo Sapiens
FVADINSGHW

SEQ ID NO: 36470 - protein, 10 aa, Homo Sapiens
FVFDKTSQSW

SEQ ID NO: 36471 - protein, 10 aa, Homo Sapiens
FVFTHSPFCW

SEQ ID NO: 36472 - protein, 10 aa, Homo Sapiens
FVIPNSTNTW

SEQ ID NO: 36473 - protein, 10 aa, Homo Sapiens
FVTEYTPRSW

SEQ ID NO: 36474 - protein, 10 aa, Homo Sapiens
GAPDAKFSGW

SEQ ID NO: 36475 - protein, 10 aa, Homo Sapiens
GAYDGKIKVW

SEQ ID NO: 36476 - protein, 10 aa, Homo Sapiens
GIGTLIYGHW

SEQ ID NO: 36477 - protein, 10 aa, Homo Sapiens
GIYEGVFKTY

SEQ ID NO: 36478 - protein, 10 aa, Homo Sapiens
GLKETQNMAW

SEQ ID NO: 36479 - protein, 10 aa, Homo Sapiens
GTYENLIHVW

SEQ ID NO: 36480 - protein, 10 aa, Homo Sapiens
GVFDHRMKCW

SEQ ID NO: 36481 - protein, 10 aa, Homo Sapiens
GVFEGKLNVI

SEQ ID NO: 36482 - protein, 10 aa, Homo Sapiens
GVIDVITKTW

SEQ ID NO: 36483 - protein, 10 aa, Homo Sapiens
GVIEKLLTSY

SEQ ID NO: 36484 - protein, 10 aa, Homo Sapiens
GVLPGKPQCW

SEQ ID NO: 36485 - protein, 10 aa, Homo Sapiens
HIISGTCASW

SEQ ID NO: 36486 - protein, 10 aa, Homo Sapiens
HIYEKSGAKW

SEQ ID NO: 36487 - protein, 10 aa, Homo Sapiens
HIYTFPHASF

SEQ ID NO: 36488 - protein, 10 aa, Homo Sapiens
HTADVQLHAW

SEQ ID NO: 36489 - protein, 10 aa, Homo Sapiens
HTAEVNCLSF

SEQ ID NO: 36490 - protein, 10 aa, Homo Sapiens
HTAPPENKTW

SEQ ID NO: 36491 - protein, 10 aa, Homo Sapiens
HTFQNDIHVY

SEQ ID NO: 36492 - protein, 10 aa, Homo Sapiens
HTIGCNAVSW

SEQ ID NO: 36493 - protein, 10 aa, Homo Sapiens
HTIKPALVGW

SEQ ID NO: 36494 - protein, 10 aa, Homo Sapiens
HTMTDDVTFW

SEQ ID NO: 36495 - protein, 10 aa, Homo Sapiens
HVADENLKAF

SEQ ID NO: 36496 - protein, 10 aa, Homo Sapiens
HVAPVTSVEW

SEQ ID NO: 36497 - protein, 10 aa, Homo Sapiens
HVATEPVATW

SEQ ID NO: 36498 - protein, 10 aa, Homo Sapiens
HVFDANTLTW

SEQ ID NO: 36499 - protein, 10 aa, Homo Sapiens
HVFEDSYREL

SEQ ID NO: 36500 - protein, 10 aa, Homo Sapiens
HVFSDGVTNW

SEQ ID NO: 36501 - protein, 10 aa, Homo Sapiens
HVHVHDLQSF

SEQ ID NO: 36502 - protein, 10 aa, Homo Sapiens
HVIEDIKGKW

SEQ ID NO: 36503 - protein, 10 aa, Homo Sapiens
HVIEDIKGRW

SEQ ID NO: 36504 - protein, 10 aa, Homo Sapiens
HVITGLLEHY

SEQ ID NO: 36505 - protein, 10 aa, Homo Sapiens
HVKDANGNSF

SEQ ID NO: 36506 - protein, 10 aa, Homo Sapiens
HVKDEQIEHW

SEQ ID NO: 36507 - protein, 10 aa, Homo Sapiens
HVKDPQSGEW

SEQ ID NO: 36508 - protein, 10 aa, Homo Sapiens
HVNTKSLISW

SEQ ID NO: 36509 - protein, 10 aa, Homo Sapiens
HVPNFIFDEF

SEQ ID NO: 36510 - protein, 10 aa, Homo Sapiens
HVQAPQIGAW

SEQ ID NO: 36511 - protein, 10 aa, Homo Sapiens
HVVDRDTEAW

SEQ ID NO: 36512 - protein, 10 aa, Homo Sapiens
HVVKERVTEW

SEQ ID NO: 36513 - protein, 10 aa, Homo Sapiens
HVVPDQLMAF

SEQ ID NO: 36514 - protein, 10 aa, Homo Sapiens
IVFDSEYCRY

SEQ ID NO: 36515 - protein, 10 aa, Homo Sapiens
LAADFEIGHF

SEQ ID NO: 36516 - protein, 10 aa, Homo Sapiens
LVFPYTHQNW

SEQ ID NO: 36517 - protein, 10 aa, Homo Sapiens
MTAGVDGHSW

SEQ ID NO: 36518 - protein, 10 aa, Homo Sapiens
MTPDQKFIQW

SEQ ID NO: 36519 - protein, 10 aa, Homo Sapiens
MVIEIPVQGW

SEQ ID NO: 36520 - protein, 10 aa, Homo Sapiens
NTFTETNNHW

SEQ ID NO: 36521 - protein, 10 aa, Homo Sapiens
NVHQSVISSW

SEQ ID NO: 36522 - protein, 10 aa, Homo Sapiens
NVIGARRASW

SEQ ID NO: 36523 - protein, 10 aa, Homo Sapiens
NVVGARRSSW

SEQ ID NO: 36524 - protein, 10 aa, Homo Sapiens
NVVGFPLNHF

SEQ ID NO: 36525 - protein, 10 aa, Homo Sapiens
NVVGGRRSAW

SEQ ID NO: 36526 - protein, 10 aa, Homo Sapiens
NVYGFDMSCI

SEQ ID NO: 36527 - protein, 10 aa, Homo Sapiens
QLIERILEAW

SEQ ID NO: 36528 - protein, 10 aa, Homo Sapiens
QTPDFTPTKY

SEQ ID NO: 36529 - protein, 10 aa, Homo Sapiens
QTVDQRLSSW

SEQ ID NO: 36530 - protein, 10 aa, Homo Sapiens
QVADAFLSKF

SEQ ID NO: 36531 - protein, 10 aa, Homo Sapiens
QVADVVVSRW

SEQ ID NO: 36532 - protein, 10 aa, Homo Sapiens
QVYHGLMERY

SEQ ID NO: 36533 - protein, 10 aa, Homo Sapiens
SIDISQSRSW

SEQ ID NO: 36534 - protein, 10 aa, Homo Sapiens
SIDYTVHEAW

SEQ ID NO: 36535 - protein, 10 aa, Homo Sapiens
SIIGVHLDTW

SEQ ID NO: 36536 - protein, 10 aa, Homo Sapiens
SIPDIQAHEW

SEQ ID NO: 36537 - protein, 10 aa, Homo Sapiens
SITDFHPDTW

SEQ ID NO: 36538 - protein, 10 aa, Homo Sapiens
SLPEHNLITW

SEQ ID NO: 36539 - protein, 10 aa, Homo Sapiens
SPAGHSFLSW

SEQ ID NO: 36540 - protein, 10 aa, Homo Sapiens
SPIDFHLQSW

SEQ ID NO: 36541 - protein, 10 aa, Homo Sapiens
SSIDHESSTW

SEQ ID NO: 36542 - protein, 10 aa, Homo Sapiens
STFDDIVHSF

SEQ ID NO: 36543 - protein, 10 aa, Homo Sapiens
STIDDTISKF

SEQ ID NO: 36544 - protein, 10 aa, Homo Sapiens
STIDWEGTSF

SEQ ID NO: 36545 - protein, 10 aa, Homo Sapiens
STPTPFFHTF

SEQ ID NO: 36546 - protein, 10 aa, Homo Sapiens
STYDGFGLAW

SEQ ID NO: 36547 - protein, 10 aa, Homo Sapiens
SVADWKVMAF

SEQ ID NO: 36548 - protein, 10 aa, Homo Sapiens
SVAEITNACF

SEQ ID NO: 36549 - protein, 10 aa, Homo Sapiens
SVAVGSGLSW

SEQ ID NO: 36550 - protein, 10 aa, Homo Sapiens
SVIDGRFEGF

SEQ ID NO: 36551 - protein, 10 aa, Homo Sapiens
SVIERQVGTF

SEQ ID NO: 36552 - protein, 10 aa, Homo Sapiens
SVKDAKIAVY

SEQ ID NO: 36553 - protein, 10 aa, Homo Sapiens
SVMQRLLTGW

SEQ ID NO: 36554 - protein, 10 aa, Homo Sapiens
SVNDGKQASW

SEQ ID NO: 36555 - protein, 10 aa, Homo Sapiens
SVPKPAFISW

SEQ ID NO: 36556 - protein, 10 aa, Homo Sapiens
SVPRGPIAQW

SEQ ID NO: 36557 - protein, 10 aa, Homo Sapiens
SVPYFLFQHW

SEQ ID NO: 36558 - protein, 10 aa, Homo Sapiens
SVVDDWIESY

SEQ ID NO: 36559 - protein, 10 aa, Homo Sapiens
SVVEKLLTNW

SEQ ID NO: 36560 - protein, 10 aa, Homo Sapiens
SVVGGFVSHY

SEQ ID NO: 36561 - protein, 10 aa, Homo Sapiens
SVVSWKTGVF

SEQ ID NO: 36562 - protein, 10 aa, Homo Sapiens
SVYAFSARPL

SEQ ID NO: 36563 - protein, 10 aa, Homo Sapiens
SVYSIVPQSW

SEQ ID NO: 36564 - protein, 10 aa, Homo Sapiens
TILPGNLQSW

SEQ ID NO: 36565 - protein, 10 aa, Homo Sapiens
TTAGFSYEKW

SEQ ID NO: 36566 - protein, 10 aa, Homo Sapiens
TTFEHDIQAL

SEQ ID NO: 36567 - protein, 10 aa, Homo Sapiens
TTPSAVFRVW

SEQ ID NO: 36568 - protein, 10 aa, Homo Sapiens
TTREPSLATW

SEQ ID NO: 36569 - protein, 10 aa, Homo Sapiens
TTVERRFSSW

SEQ ID NO: 36570 - protein, 10 aa, Homo Sapiens
TTYEGIFKTL

SEQ ID NO: 36571 - protein, 10 aa, Homo Sapiens
TVAFVPISGW

SEQ ID NO: 36572 - protein, 10 aa, Homo Sapiens
TVFGGTVTAF

SEQ ID NO: 36573 - protein, 10 aa, Homo Sapiens
TVIEEHLGKF

SEQ ID NO: 36574 - protein, 10 aa, Homo Sapiens
TVIGITPSSF

SEQ ID NO: 36575 - protein, 10 aa, Homo Sapiens
TVLPFNPAAF

SEQ ID NO: 36576 - protein, 10 aa, Homo Sapiens
TVLPGEIQNW

SEQ ID NO: 36577 - protein, 10 aa, Homo Sapiens
TVLPGELQSW

SEQ ID NO: 36578 - protein, 10 aa, Homo Sapiens
TVVERMLSNW

SEQ ID NO: 36579 - protein, 10 aa, Homo Sapiens
TVVGKTYGLW

SEQ ID NO: 36580 - protein, 10 aa, Homo Sapiens
TVYTGIDHHW

SEQ ID NO: 36581 - protein, 10 aa, Homo Sapiens
VTFPFKPESW

SEQ ID NO: 36582 - protein, 10 aa, Homo Sapiens
VVIAEPLQSW

SEQ ID NO: 36583 - protein, 10 aa, Homo Sapiens
YAADIFYSRY

SEQ ID NO: 36584 - protein, 10 aa, Homo Sapiens
YAAPHPLQSY

SEQ ID NO: 36585 - protein, 10 aa, Homo Sapiens
YIHSGLYSSF

SEQ ID NO: 36586 - protein, 10 aa, Homo Sapiens
YINPAKLTPY

SEQ ID NO: 36587 - protein, 10 aa, Homo Sapiens
YIYDKDMEII

SEQ ID NO: 36588 - protein, 10 aa, Homo Sapiens
YLPDYRMKEW

SEQ ID NO: 36589 - protein, 10 aa, Homo Sapiens
YSLEGEVTHW

SEQ ID NO: 36590 - protein, 10 aa, Homo Sapiens
YTFDQKIVEW

SEQ ID NO: 36591 - protein, 10 aa, Homo Sapiens
YVHDDGRVSY

SEQ ID NO: 36592 - protein, 10 aa, Homo Sapiens
YVIPHPVHAF

SEQ ID NO: 36593 - protein, 10 aa, Homo Sapiens
YVLESKLTEF

SEQ ID NO: 36594 - protein, 10 aa, Homo Sapiens
YVLISKPTEW

SEQ ID NO: 36595 - protein, 10 aa, Homo Sapiens
YVNCGHVTAY

SEQ ID NO: 36596 - protein, 10 aa, Homo Sapiens
YVNPANTHQF

SEQ ID NO: 36597 - protein, 11 aa, Homo Sapiens
DAADKAAVVKF

SEQ ID NO: 36598 - protein, 11 aa, Homo Sapiens
DAASGEVVGKF

SEQ ID NO: 36599 - protein, 11 aa, Homo Sapiens
DLNPRRDISSW

SEQ ID NO: 36600 - protein, 11 aa, Homo Sapiens
DLPSNHVIDRW

SEQ ID NO: 36601 - protein, 11 aa, Homo Sapiens
DSIQEFRLSGW

SEQ ID NO: 36602 - protein, 11 aa, Homo Sapiens
DTYDDRAYSSF

SEQ ID NO: 36603 - protein, 11 aa, Homo Sapiens
DVAEGDLIEHF

SEQ ID NO: 36604 - protein, 11 aa, Homo Sapiens
DVAPSTLLPSY

SEQ ID NO: 36605 - protein, 11 aa, Homo Sapiens
DVASGQVVRKF

SEQ ID NO: 36606 - protein, 11 aa, Homo Sapiens
DVGGYKLLNNW

SEQ ID NO: 36607 - protein, 11 aa, Homo Sapiens
DVIDNDSWRLW

SEQ ID NO: 36608 - protein, 11 aa, Homo Sapiens
DVIIHEISHSW

SEQ ID NO: 36609 - protein, 11 aa, Homo Sapiens
DVPDGTVVTVM

SEQ ID NO: 36610 - protein, 11 aa, Homo Sapiens
DVVDSEALQVY

SEQ ID NO: 36611 - protein, 11 aa, Homo Sapiens
DVVKEDAFYSW

SEQ ID NO: 36612 - protein, 11 aa, Homo Sapiens
DVVNKDDIIEW

SEQ ID NO: 36613 - protein, 11 aa, Homo Sapiens
DVVSGSEVLHW

SEQ ID NO: 36614 - protein, 11 aa, Homo Sapiens
EAAGSSLIGHL

SEQ ID NO: 36615 - protein, 11 aa, Homo Sapiens
EAAPGTIRGDF

SEQ ID NO: 36616 - protein, 11 aa, Homo Sapiens
EAICPEGIARL

SEQ ID NO: 36617 - protein, 11 aa, Homo Sapiens
EAIEEVKNGGW

SEQ ID NO: 36618 - protein, 11 aa, Homo Sapiens
EAIPDEVIKKW

SEQ ID NO: 36619 - protein, 11 aa, Homo Sapiens
EAVDGHTVSIF

SEQ ID NO: 36620 - protein, 11 aa, Homo Sapiens
EIAPGLTGSEW

SEQ ID NO: 36621 - protein, 11 aa, Homo Sapiens
EIIGKRGIIGY

SEQ ID NO: 36622 - protein, 11 aa, Homo Sapiens
EIPEGYVPEHW

SEQ ID NO: 36623 - protein, 11 aa, Homo Sapiens
EIYDRREYSRF

SEQ ID NO: 36624 - protein, 11 aa, Homo Sapiens
ELFPDRALSSW

SEQ ID NO: 36625 - protein, 11 aa, Homo Sapiens
ELPPSQILDTW

SEQ ID NO: 36626 - protein, 11 aa, Homo Sapiens
ETADTLMGLRY

SEQ ID NO: 36627 - protein, 11 aa, Homo Sapiens
ETAGPWGQAAW

SEQ ID NO: 36628 - protein, 11 aa, Homo Sapiens
ETASNEVVYRF

SEQ ID NO: 36629 - protein, 11 aa, Homo Sapiens
ETFGHLGALGF

SEQ ID NO: 36630 - protein, 11 aa, Homo Sapiens
ETFPDAKGWIF

SEQ ID NO: 36631 - protein, 11 aa, Homo Sapiens
ETFYNEKEESF

SEQ ID NO: 36632 - protein, 11 aa, Homo Sapiens
ETIDAHDGALW

SEQ ID NO: 36633 - protein, 11 aa, Homo Sapiens
ETIDWKVFESW

SEQ ID NO: 36634 - protein, 11 aa, Homo Sapiens
ETLPFHSGGQW

SEQ ID NO: 36635 - protein, 11 aa, Homo Sapiens
ETMDKKFGSSW

SEQ ID NO: 36636 - protein, 11 aa, Homo Sapiens
ETPDIKLFGKW

SEQ ID NO: 36637 - protein, 11 aa, Homo Sapiens
ETSPAPIPNGF

SEQ ID NO: 36638 - protein, 11 aa, Homo Sapiens
ETSQAGLFRLW

SEQ ID NO: 36639 - protein, 11 aa, Homo Sapiens
ETVDPASLWEY

SEQ ID NO: 36640 - protein, 11 aa, Homo Sapiens
ETVGEEDIRLF

SEQ ID NO: 36641 - protein, 11 aa, Homo Sapiens
ETVVERMLSNW

SEQ ID NO: 36642 - protein, 11 aa, Homo Sapiens
EVAADALGEEW

SEQ ID NO: 36643 - protein, 11 aa, Homo Sapiens
EVADEKMLSGL

SEQ ID NO: 36644 - protein, 11 aa, Homo Sapiens
EVAPAKDVTLL

SEQ ID NO: 36645 - protein, 11 aa, Homo Sapiens
EVAPGYVVTVL

SEQ ID NO: 36646 - protein, 11 aa, Homo Sapiens
EVIDKNSGGWW

SEQ ID NO: 36647 - protein, 11 aa, Homo Sapiens
EVIKLKGYTNW

SEQ ID NO: 36648 - protein, 11 aa, Homo Sapiens
EVIKLKGYTSW

SEQ ID NO: 36649 - protein, 11 aa, Homo Sapiens
EVINKEDFVAL

SEQ ID NO: 36650 - protein, 11 aa, Homo Sapiens
EVISEDAFYKW

SEQ ID NO: 36651 - protein, 11 aa, Homo Sapiens
EVIWSHAIQKY

SEQ ID NO: 36652 - protein, 11 aa, Homo Sapiens
EVKGFVRENVW

SEQ ID NO: 36653 - protein, 11 aa, Homo Sapiens
EVKGQTSGSVW

SEQ ID NO: 36654 - protein, 11 aa, Homo Sapiens
EVLPSTRLGTL

SEQ ID NO: 36655 - protein, 11 aa, Homo Sapiens
EVMDEFDGRSF

SEQ ID NO: 36656 - protein, 11 aa, Homo Sapiens
EVPENNGNNSW

SEQ ID NO: 36657 - protein, 11 aa, Homo Sapiens
EVTDEDTVKRY

SEQ ID NO: 36658 - protein, 11 aa, Homo Sapiens
EVVDARLVSVF

SEQ ID NO: 36659 - protein, 11 aa, Homo Sapiens
EVVGPEGMEKF

SEQ ID NO: 36660 - protein, 11 aa, Homo Sapiens
EVVNKDVLDVY

SEQ ID NO: 36661 - protein, 11 aa, Homo Sapiens
EVYDQEVGTSY

SEQ ID NO: 36662 - protein, 11 aa, Homo Sapiens
EVYTEEDAASY

SEQ ID NO: 36663 - protein, 11 aa, Homo Sapiens
FTAGPDEVRAW

SEQ ID NO: 36664 - protein, 11 aa, Homo Sapiens
FVYDVTKMTSF

SEQ ID NO: 36665 - protein, 11 aa, Homo Sapiens
HTAPSGVGSSW

SEQ ID NO: 36666 - protein, 11 aa, Homo Sapiens
HVAEKETLLAW

SEQ ID NO: 36667 - protein, 11 aa, Homo Sapiens
HVANGPLLHHW

SEQ ID NO: 36668 - protein, 11 aa, Homo Sapiens
HVAPDSIRGSF

SEQ ID NO: 36669 - protein, 11 aa, Homo Sapiens
HVAPSDTVLMF

SEQ ID NO: 36670 - protein, 11 aa, Homo Sapiens
HVPGADILNSY

SEQ ID NO: 36671 - protein, 11 aa, Homo Sapiens
MPVGPDAILRY

SEQ ID NO: 36672 - protein, 11 aa, Homo Sapiens
MVVPEDQLTRW

SEQ ID NO: 36673 - protein, 11 aa, Homo Sapiens
QNSGPGQPAVW

SEQ ID NO: 36674 - protein, 11 aa, Homo Sapiens
SAIDTWSPSEW

SEQ ID NO: 36675 - protein, 11 aa, Homo Sapiens
SVIDSAELQAY

SEQ ID NO: 36676 - protein, 11 aa, Homo Sapiens
SVVPPPLPATW

SEQ ID NO: 36677 - protein, 11 aa, Homo Sapiens
TLPPPKVVDRW

SEQ ID NO: 36678 - protein, 11 aa, Homo Sapiens
TTTPHTLPAAW

SEQ ID NO: 36679 - protein, 11 aa, Homo Sapiens
TVGDDKTVKQW

SEQ ID NO: 36680 - protein, 11 aa, Homo Sapiens
VGLDVTTFSKP

SEQ ID NO: 36681 - protein, 11 aa, Homo Sapiens
VPKTAENFRQF

SEQ ID NO: 36682 - protein, 11 aa, Homo Sapiens
YVIEEDKGDGW

SEQ ID NO: 36683 - protein, 8 aa, Homo Sapiens
DPDVLNSL

SEQ ID NO: 36684 - protein, 8 aa, Homo Sapiens
FEVDTVAP

SEQ ID NO: 36685 - protein, 8 aa, Homo Sapiens
FNEKSKEL

SEQ ID NO: 36686 - protein, 8 aa, Homo Sapiens
FPLKVFGY

SEQ ID NO: 36687 - protein, 8 aa, Homo Sapiens
FTGHMGKL

SEQ ID NO: 36688 - protein, 8 aa, Homo Sapiens
GKRGIIGY

SEQ ID NO: 36689 - protein, 8 aa, Homo Sapiens
IEEHLGKF

SEQ ID NO: 36690 - protein, 8 aa, Homo Sapiens
LAGHGHLY

SEQ ID NO: 36691 - protein, 8 aa, Homo Sapiens
LEQLLALY

SEQ ID NO: 36692 - protein, 8 aa, Homo Sapiens
MSLTACKV

SEQ ID NO: 36693 - protein, 8 aa, Homo Sapiens
NVKVDPEI

SEQ ID NO: 36694 - protein, 8 aa, Homo Sapiens
SPVDNHRY

SEQ ID NO: 36695 - protein, 8 aa, Homo Sapiens
TFTRVQKY

SEQ ID NO: 36696 - protein, 8 aa, Homo Sapiens
TIAKLVKY

SEQ ID NO: 36697 - protein, 8 aa, Homo Sapiens
TIRNIPHL

SEQ ID NO: 36698 - protein, 9 aa, Homo Sapiens
AIIERVQRY

SEQ ID NO: 36699 - protein, 9 aa, Homo Sapiens
APATGAHNY

SEQ ID NO: 36700 - protein, 9 aa, Homo Sapiens
ATKARIPFY

SEQ ID NO: 36701 - protein, 9 aa, Homo Sapiens
AVAEKMLQY

SEQ ID NO: 36702 - protein, 9 aa, Homo Sapiens
AVCDRISRY

SEQ ID NO: 36703 - protein, 9 aa, Homo Sapiens
AVHDITVAY

SEQ ID NO: 36704 - protein, 9 aa, Homo Sapiens
AVISSVAHY

SEQ ID NO: 36705 - protein, 9 aa, Homo Sapiens
AVISTILKY

SEQ ID NO: 36706 - protein, 9 aa, Homo Sapiens
AVKAIIYQY

SEQ ID NO: 36707 - protein, 9 aa, Homo Sapiens
AVKEKISKF

SEQ ID NO: 36708 - protein, 9 aa, Homo Sapiens
AVKEKISMF

SEQ ID NO: 36709 - protein, 9 aa, Homo Sapiens
AVKERIAKF

SEQ ID NO: 36710 - protein, 9 aa, Homo Sapiens
AVRDPYGNR

SEQ ID NO: 36711 - protein, 9 aa, Homo Sapiens
AVVNAIGLY

SEQ ID NO: 36712 - protein, 9 aa, Homo Sapiens
CAPRRKVAL

SEQ ID NO: 36713 - protein, 9 aa, Homo Sapiens
CTYDKVQSY

SEQ ID NO: 36714 - protein, 9 aa, Homo Sapiens
CVIDEIGKM

SEQ ID NO: 36715 - protein, 9 aa, Homo Sapiens
CVIKHAGVY

SEQ ID NO: 36716 - protein, 9 aa, Homo Sapiens
CVISKVLTF

SEQ ID NO: 36717 - protein, 9 aa, Homo Sapiens
CVKEEISRY

SEQ ID NO: 36718 - protein, 9 aa, Homo Sapiens
DIAQVNLKY

SEQ ID NO: 36719 - protein, 9 aa, Homo Sapiens
DIHDKFAEY

SEQ ID NO: 36720 - protein, 9 aa, Homo Sapiens
DIISKIDLM

SEQ ID NO: 36721 - protein, 9 aa, Homo Sapiens
DIISRIPKI

SEQ ID NO: 36722 - protein, 9 aa, Homo Sapiens
DIKEKLCYV

SEQ ID NO: 36723 - protein, 9 aa, Homo Sapiens
DIKPYIAEY

SEQ ID NO: 36724 - protein, 9 aa, Homo Sapiens
DIKRGIPNY

SEQ ID NO: 36725 - protein, 9 aa, Homo Sapiens
DINPHIPQY

SEQ ID NO: 36726 - protein, 9 aa, Homo Sapiens
DIPAHWSDM

SEQ ID NO: 36727 - protein, 9 aa, Homo Sapiens
DIPARVTLM

SEQ ID NO: 36728 - protein, 9 aa, Homo Sapiens
DIPERILTY

SEQ ID NO: 36729 - protein, 9 aa, Homo Sapiens
DIPETCVHY

SEQ ID NO: 36730 - protein, 9 aa, Homo Sapiens
DIPEYVLAY

SEQ ID NO: 36731 - protein, 9 aa, Homo Sapiens
DIRAFDSRF

SEQ ID NO: 36732 - protein, 9 aa, Homo Sapiens
DLANIRSEY

SEQ ID NO: 36733 - protein, 9 aa, Homo Sapiens
DLFGRDLSY

SEQ ID NO: 36734 - protein, 9 aa, Homo Sapiens
DLIEHFSQF

SEQ ID NO: 36735 - protein, 9 aa, Homo Sapiens
DLIEKLLNY

SEQ ID NO: 36736 - protein, 9 aa, Homo Sapiens
DLIGHIVEF

SEQ ID NO: 36737 - protein, 9 aa, Homo Sapiens
DLIGKTSEM

SEQ ID NO: 36738 - protein, 9 aa, Homo Sapiens
DLIKDVLRY

SEQ ID NO: 36739 - protein, 9 aa, Homo Sapiens
DLIKNIPDA

SEQ ID NO: 36740 - protein, 9 aa, Homo Sapiens
DLKDLITRM

SEQ ID NO: 36741 - protein, 9 aa, Homo Sapiens
DLKTKIQKY

SEQ ID NO: 36742 - protein, 9 aa, Homo Sapiens
DLMGLIPKY

SEQ ID NO: 36743 - protein, 9 aa, Homo Sapiens
DLPDIQIKH

SEQ ID NO: 36744 - protein, 9 aa, Homo Sapiens
DLSPITVKY

SEQ ID NO: 36745 - protein, 9 aa, Homo Sapiens
DLVTYITRF

SEQ ID NO: 36746 - protein, 9 aa, Homo Sapiens
DSIPLSSGY

SEQ ID NO: 36747 - protein, 9 aa, Homo Sapiens
DSRPGGYGY

SEQ ID NO: 36748 - protein, 9 aa, Homo Sapiens
DSSPVSTPF

SEQ ID NO: 36749 - protein, 9 aa, Homo Sapiens
DTANKVGTY

SEQ ID NO: 36750 - protein, 9 aa, Homo Sapiens
DTIARLPCL

SEQ ID NO: 36751 - protein, 9 aa, Homo Sapiens
DTIEIITDR

SEQ ID NO: 36752 - protein, 9 aa, Homo Sapiens
DTILANAKY

SEQ ID NO: 36753 - protein, 9 aa, Homo Sapiens
DTINLNSFF

SEQ ID NO: 36754 - protein, 9 aa, Homo Sapiens
DTIRMIDAY

SEQ ID NO: 36755 - protein, 9 aa, Homo Sapiens
DTISKMNDF

SEQ ID NO: 36756 - protein, 9 aa, Homo Sapiens
DTISPTLGF

SEQ ID NO: 36757 - protein, 9 aa, Homo Sapiens
DTISPYSRM

SEQ ID NO: 36758 - protein, 9 aa, Homo Sapiens
DTKEAIANY

SEQ ID NO: 36759 - protein, 9 aa, Homo Sapiens
DTKISIPAF

SEQ ID NO: 36760 - protein, 9 aa, Homo Sapiens
DTKQMMSSF

SEQ ID NO: 36761 - protein, 9 aa, Homo Sapiens
DTLAHVLYY

SEQ ID NO: 36762 - protein, 9 aa, Homo Sapiens
DTLDKVFTY

SEQ ID NO: 36763 - protein, 9 aa, Homo Sapiens
DTLPLATRY

SEQ ID NO: 36764 - protein, 9 aa, Homo Sapiens
DTMGTYHGM

SEQ ID NO: 36765 - protein, 9 aa, Homo Sapiens
DTRDYICEF

SEQ ID NO: 36766 - protein, 9 aa, Homo Sapiens
DTSGPTMRY

SEQ ID NO: 36767 - protein, 9 aa, Homo Sapiens
DTTHNLPEF

SEQ ID NO: 36768 - protein, 9 aa, Homo Sapiens
DTVHHMLLF

SEQ ID NO: 36769 - protein, 9 aa, Homo Sapiens
DTVQHGAVY

SEQ ID NO: 36770 - protein, 9 aa, Homo Sapiens
DTVSTFTSY

SEQ ID NO: 36771 - protein, 9 aa, Homo Sapiens
DVAADIAKY

SEQ ID NO: 36772 - protein, 9 aa, Homo Sapiens
DVAALLIKY

SEQ ID NO: 36773 - protein, 9 aa, Homo Sapiens
DVAAPFGGF

SEQ ID NO: 36774 - protein, 9 aa, Homo Sapiens
DVAEEIANY

SEQ ID NO: 36775 - protein, 9 aa, Homo Sapiens
DVAEFSSRY

SEQ ID NO: 36776 - protein, 9 aa, Homo Sapiens
DVAGIIADY

SEQ ID NO: 36777 - protein, 9 aa, Homo Sapiens
DVAGRVMQY

SEQ ID NO: 36778 - protein, 9 aa, Homo Sapiens
DVANKIGII

SEQ ID NO: 36779 - protein, 9 aa, Homo Sapiens
DVAPFTTKI

SEQ ID NO: 36780 - protein, 9 aa, Homo Sapiens
DVAPHVSLF

SEQ ID NO: 36781 - protein, 9 aa, Homo Sapiens
DVAPTHILY

SEQ ID NO: 36782 - protein, 9 aa, Homo Sapiens
DVARFCNRY

SEQ ID NO: 36783 - protein, 9 aa, Homo Sapiens
DVASFATKL

SEQ ID NO: 36784 - protein, 9 aa, Homo Sapiens
DVATYKVNY

SEQ ID NO: 36785 - protein, 9 aa, Homo Sapiens
DVEAIFSKY

SEQ ID NO: 36786 - protein, 9 aa, Homo Sapiens
DVFTHVLYY

SEQ ID NO: 36787 - protein, 9 aa, Homo Sapiens
DVIARIAQH

SEQ ID NO: 36788 - protein, 9 aa, Homo Sapiens
DVIDNIMRL

SEQ ID NO: 36789 - protein, 9 aa, Homo Sapiens
DVIERVIQY

SEQ ID NO: 36790 - protein, 9 aa, Homo Sapiens
DVIESVNLL

SEQ ID NO: 36791 - protein, 9 aa, Homo Sapiens
DVIETCMAY

SEQ ID NO: 36792 - protein, 9 aa, Homo Sapiens
DVIGCFADF

SEQ ID NO: 36793 - protein, 9 aa, Homo Sapiens
DVIGCFANF

SEQ ID NO: 36794 - protein, 9 aa, Homo Sapiens
DVIGKALQY

SEQ ID NO: 36795 - protein, 9 aa, Homo Sapiens
DVIGTLSGF

SEQ ID NO: 36796 - protein, 9 aa, Homo Sapiens
DVIKEIEDF

SEQ ID NO: 36797 - protein, 9 aa, Homo Sapiens
DVIQAGKEY

SEQ ID NO: 36798 - protein, 9 aa, Homo Sapiens
DVIRDVPLV

SEQ ID NO: 36799 - protein, 9 aa, Homo Sapiens
DVIRLIGQH

SEQ ID NO: 36800 - protein, 9 aa, Homo Sapiens
DVIRLIMQY

SEQ ID NO: 36801 - protein, 9 aa, Homo Sapiens
DVISKRSGY

SEQ ID NO: 36802 - protein, 9 aa, Homo Sapiens
DVISNIETF

SEQ ID NO: 36803 - protein, 9 aa, Homo Sapiens
DVISRIDRM

SEQ ID NO: 36804 - protein, 9 aa, Homo Sapiens
DVISSIRNF

SEQ ID NO: 36805 - protein, 9 aa, Homo Sapiens
DVITCFANF

SEQ ID NO: 36806 - protein, 9 aa, Homo Sapiens
DVKDLIGFF

SEQ ID NO: 36807 - protein, 9 aa, Homo Sapiens
DVKDVIEQY

SEQ ID NO: 36808 - protein, 9 aa, Homo Sapiens
DVKDYIQEY

SEQ ID NO: 36809 - protein, 9 aa, Homo Sapiens
DVKEIMSQH

SEQ ID NO: 36810 - protein, 9 aa, Homo Sapiens
DVKGQTALY

SEQ ID NO: 36811 - protein, 9 aa, Homo Sapiens
DVKKRILEF

SEQ ID NO: 36812 - protein, 9 aa, Homo Sapiens
DVKPFVPRF

SEQ ID NO: 36813 - protein, 9 aa, Homo Sapiens
DVKSLMAKY

SEQ ID NO: 36814 - protein, 9 aa, Homo Sapiens
DVKTQVAEY

SEQ ID NO: 36815 - protein, 9 aa, Homo Sapiens
DVKVGGSKY

SEQ ID NO: 36816 - protein, 9 aa, Homo Sapiens
DVMKDFEEM

SEQ ID NO: 36817 - protein, 9 aa, Homo Sapiens
DVPDGILDF

SEQ ID NO: 36818 - protein, 9 aa, Homo Sapiens
DVPEKSSLF

SEQ ID NO: 36819 - protein, 9 aa, Homo Sapiens
DVPEKWARF

SEQ ID NO: 36820 - protein, 9 aa, Homo Sapiens
DVPELQDKF

SEQ ID NO: 36821 - protein, 9 aa, Homo Sapiens
DVQELLTQY

SEQ ID NO: 36822 - protein, 9 aa, Homo Sapiens
DVRDECSKY

SEQ ID NO: 36823 - protein, 9 aa, Homo Sapiens
DVSPVVSTY

SEQ ID NO: 36824 - protein, 9 aa, Homo Sapiens
DVTDFISHL

SEQ ID NO: 36825 - protein, 9 aa, Homo Sapiens
DVTEQISRF

SEQ ID NO: 36826 - protein, 9 aa, Homo Sapiens
DVTSANAKY

SEQ ID NO: 36827 - protein, 9 aa, Homo Sapiens
DVVDFFQKY

SEQ ID NO: 36828 - protein, 9 aa, Homo Sapiens
DVVEKLNLF

SEQ ID NO: 36829 - protein, 9 aa, Homo Sapiens
DVVFLITKY

SEQ ID NO: 36830 - protein, 9 aa, Homo Sapiens
DVVGDTSGY

SEQ ID NO: 36831 - protein, 9 aa, Homo Sapiens
DVVKKIESF

SEQ ID NO: 36832 - protein, 9 aa, Homo Sapiens
DVVRVVGAY

SEQ ID NO: 36833 - protein, 9 aa, Homo Sapiens
DVYGGTNRY

SEQ ID NO: 36834 - protein, 9 aa, Homo Sapiens
DVYNHFLLY

SEQ ID NO: 36835 - protein, 9 aa, Homo Sapiens
EAAEVILRV

SEQ ID NO: 36836 - protein, 9 aa, Homo Sapiens
EAAPHDIGY

SEQ ID NO: 36837 - protein, 9 aa, Homo Sapiens
EAAPPGELY

SEQ ID NO: 36838 - protein, 9 aa, Homo Sapiens
EAASVPVVY

SEQ ID NO: 36839 - protein, 9 aa, Homo Sapiens
EAFDSTSRF

SEQ ID NO: 36840 - protein, 9 aa, Homo Sapiens
EAFRGVHRY

SEQ ID NO: 36841 - protein, 9 aa, Homo Sapiens
EAIARYQGR

SEQ ID NO: 36842 - protein, 9 aa, Homo Sapiens
EAIEQILKY

SEQ ID NO: 36843 - protein, 9 aa, Homo Sapiens
EAIGIISKM

SEQ ID NO: 36844 - protein, 9 aa, Homo Sapiens
EAIMKVGQM

SEQ ID NO: 36845 - protein, 9 aa, Homo Sapiens
EAIQRTEAY

SEQ ID NO: 36846 - protein, 9 aa, Homo Sapiens
EAIRPYVSR

SEQ ID NO: 36847 - protein, 9 aa, Homo Sapiens
EAISYYSKY

SEQ ID NO: 36848 - protein, 9 aa, Homo Sapiens
EAMHGVFLY

SEQ ID NO: 36849 - protein, 9 aa, Homo Sapiens
EATYVRSYY

SEQ ID NO: 36850 - protein, 9 aa, Homo Sapiens
EAVDIRQIY

SEQ ID NO: 36851 - protein, 9 aa, Homo Sapiens
EAVQAISMF

SEQ ID NO: 36852 - protein, 9 aa, Homo Sapiens
EAVTHIGRV

SEQ ID NO: 36853 - protein, 9 aa, Homo Sapiens
EAVWRLPEF

SEQ ID NO: 36854 - protein, 9 aa, Homo Sapiens
EAYHSVIKY

SEQ ID NO: 36855 - protein, 9 aa, Homo Sapiens
EAYNAVVRY

SEQ ID NO: 36856 - protein, 9 aa, Homo Sapiens
EIADIKSKY

SEQ ID NO: 36857 - protein, 9 aa, Homo Sapiens
EIAEAYLGY

SEQ ID NO: 36858 - protein, 9 aa, Homo Sapiens
EIAEKMATF

SEQ ID NO: 36859 - protein, 9 aa, Homo Sapiens
EIAGHIMEF

SEQ ID NO: 36860 - protein, 9 aa, Homo Sapiens
EIAGVKLLY

SEQ ID NO: 36861 - protein, 9 aa, Homo Sapiens
EIAQVGAKY

SEQ ID NO: 36862 - protein, 9 aa, Homo Sapiens
EIASTDLKY

SEQ ID NO: 36863 - protein, 9 aa, Homo Sapiens
EIFQHLMAY

SEQ ID NO: 36864 - protein, 9 aa, Homo Sapiens
EIIARIAQH

SEQ ID NO: 36865 - protein, 9 aa, Homo Sapiens
EIIEDLAFY

SEQ ID NO: 36866 - protein, 9 aa, Homo Sapiens
EIIEKDTKY

SEQ ID NO: 36867 - protein, 9 aa, Homo Sapiens
EIIEKNFDY

SEQ ID NO: 36868 - protein, 9 aa, Homo Sapiens
EIIGPYASW

SEQ ID NO: 36869 - protein, 9 aa, Homo Sapiens
EIIKEISIM

SEQ ID NO: 36870 - protein, 9 aa, Homo Sapiens
EIIKIIGKY

SEQ ID NO: 36871 - protein, 9 aa, Homo Sapiens
EIIKLIADY

SEQ ID NO: 36872 - protein, 9 aa, Homo Sapiens
EIIKNVPLK

SEQ ID NO: 36873 - protein, 9 aa, Homo Sapiens
EIIPVAAEY

SEQ ID NO: 36874 - protein, 9 aa, Homo Sapiens
EIIQDLAAM

SEQ ID NO: 36875 - protein, 9 aa, Homo Sapiens
EIISEISKL

SEQ ID NO: 36876 - protein, 9 aa, Homo Sapiens
EIISHISQH

SEQ ID NO: 36877 - protein, 9 aa, Homo Sapiens
EIKDILIQY

SEQ ID NO: 36878 - protein, 9 aa, Homo Sapiens
EIKEKICDY

SEQ ID NO: 36879 - protein, 9 aa, Homo Sapiens
EIKERIERV

SEQ ID NO: 36880 - protein, 9 aa, Homo Sapiens
EIKETLRQY

SEQ ID NO: 36881 - protein, 9 aa, Homo Sapiens
EIKEVILEF

SEQ ID NO: 36882 - protein, 9 aa, Homo Sapiens
EIKQIVSEY

SEQ ID NO: 36883 - protein, 9 aa, Homo Sapiens
EIKQKIDSY

SEQ ID NO: 36884 - protein, 9 aa, Homo Sapiens
EIMTRIQTY

SEQ ID NO: 36885 - protein, 9 aa, Homo Sapiens
EIPGKFMGY

SEQ ID NO: 36886 - protein, 9 aa, Homo Sapiens
EIPHEVGDF

SEQ ID NO: 36887 - protein, 9 aa, Homo Sapiens
EIPVGICRY

SEQ ID NO: 36888 - protein, 9 aa, Homo Sapiens
EIRDIILGM

SEQ ID NO: 36889 - protein, 9 aa, Homo Sapiens
EISDIHTKL

SEQ ID NO: 36890 - protein, 9 aa, Homo Sapiens
EISSIISKM

SEQ ID NO: 36891 - protein, 9 aa, Homo Sapiens
EITDKLGLH

SEQ ID NO: 36892 - protein, 9 aa, Homo Sapiens
EIVEKIGVH

SEQ ID NO: 36893 - protein, 9 aa, Homo Sapiens
EIVEKILSV

SEQ ID NO: 36894 - protein, 9 aa, Homo Sapiens
EIVKEVSTY

SEQ ID NO: 36895 - protein, 9 aa, Homo Sapiens
EIVNISSGY

SEQ ID NO: 36896 - protein, 9 aa, Homo Sapiens
EIVPKVAKM

SEQ ID NO: 36897 - protein, 9 aa, Homo Sapiens
EIVPRLPDY

SEQ ID NO: 36898 - protein, 9 aa, Homo Sapiens
EIYSKTTRF

SEQ ID NO: 36899 - protein, 9 aa, Homo Sapiens
EIYSYITKY

SEQ ID NO: 36900 - protein, 9 aa, Homo Sapiens
ELAKQITSY

SEQ ID NO: 36901 - protein, 9 aa, Homo Sapiens
ELANIRSKF

SEQ ID NO: 36902 - protein, 9 aa, Homo Sapiens
ELAPSLPSY

SEQ ID NO: 36903 - protein, 9 aa, Homo Sapiens
ELIAKIPNF

SEQ ID NO: 36904 - protein, 9 aa, Homo Sapiens
ELICHIGSL

SEQ ID NO: 36905 - protein, 9 aa, Homo Sapiens
ELIERIPEL

SEQ ID NO: 36906 - protein, 9 aa, Homo Sapiens
ELIESMPLL

SEQ ID NO: 36907 - protein, 9 aa, Homo Sapiens
ELIETIQEM

SEQ ID NO: 36908 - protein, 9 aa, Homo Sapiens
ELINNVAKA

SEQ ID NO: 36909 - protein, 9 aa, Homo Sapiens
ELIPEYLNF

SEQ ID NO: 36910 - protein, 9 aa, Homo Sapiens
ELIRKIEAY

SEQ ID NO: 36911 - protein, 9 aa, Homo Sapiens
ELIRYISEL

SEQ ID NO: 36912 - protein, 9 aa, Homo Sapiens
ELITKFLQY

SEQ ID NO: 36913 - protein, 9 aa, Homo Sapiens
ELKEKLTEY

SEQ ID NO: 36914 - protein, 9 aa, Homo Sapiens
ELKESLSRM

SEQ ID NO: 36915 - protein, 9 aa, Homo Sapiens
ELKEVIERF

SEQ ID NO: 36916 - protein, 9 aa, Homo Sapiens
ELKHFIAEY

SEQ ID NO: 36917 - protein, 9 aa, Homo Sapiens
ELKKLIGEV

SEQ ID NO: 36918 - protein, 9 aa, Homo Sapiens
ELKKTMALF

SEQ ID NO: 36919 - protein, 9 aa, Homo Sapiens
ELKKVVALY

SEQ ID NO: 36920 - protein, 9 aa, Homo Sapiens
ELKTKISAM

SEQ ID NO: 36921 - protein, 9 aa, Homo Sapiens
ELMAHLTEM

SEQ ID NO: 36922 - protein, 9 aa, Homo Sapiens
ELMQKVSGY

SEQ ID NO: 36923 - protein, 9 aa, Homo Sapiens
ELPDNILNF

SEQ ID NO: 36924 - protein, 9 aa, Homo Sapiens
ELPDTVGEL

SEQ ID NO: 36925 - protein, 9 aa, Homo Sapiens
ELPDYLIKY

SEQ ID NO: 36926 - protein, 9 aa, Homo Sapiens
ELQGHIGRF

SEQ ID NO: 36927 - protein, 9 aa, Homo Sapiens
ELVDLIPEY

SEQ ID NO: 36928 - protein, 9 aa, Homo Sapiens
ELVERLQSY

SEQ ID NO: 36929 - protein, 9 aa, Homo Sapiens
ELVKKIAIY

SEQ ID NO: 36930 - protein, 9 aa, Homo Sapiens
ELVKRILNF

SEQ ID NO: 36931 - protein, 9 aa, Homo Sapiens
ELVTIIPNF

SEQ ID NO: 36932 - protein, 9 aa, Homo Sapiens
ELYHQSVVY

SEQ ID NO: 36933 - protein, 9 aa, Homo Sapiens
EMKEYITKF

SEQ ID NO: 36934 - protein, 9 aa, Homo Sapiens
ENRPKYAGY

SEQ ID NO: 36935 - protein, 9 aa, Homo Sapiens
EPIYIITEY

SEQ ID NO: 36936 - protein, 9 aa, Homo Sapiens
EPIYIVTEY

SEQ ID NO: 36937 - protein, 9 aa, Homo Sapiens
EPVQRIPRY

SEQ ID NO: 36938 - protein, 9 aa, Homo Sapiens
EPVQRVPRY

SEQ ID NO: 36939 - protein, 9 aa, Homo Sapiens
ESADFCNKY

SEQ ID NO: 36940 - protein, 9 aa, Homo Sapiens
ESADLIQHY

SEQ ID NO: 36941 - protein, 9 aa, Homo Sapiens
ESAPVHNSF

SEQ ID NO: 36942 - protein, 9 aa, Homo Sapiens
ESFEDGLKY

SEQ ID NO: 36943 - protein, 9 aa, Homo Sapiens
ESIDIITRA

SEQ ID NO: 36944 - protein, 9 aa, Homo Sapiens
ESSSVVLRY

SEQ ID NO: 36945 - protein, 9 aa, Homo Sapiens
ESSYIATQY

SEQ ID NO: 36946 - protein, 9 aa, Homo Sapiens
ETAAKVALM

SEQ ID NO: 36947 - protein, 9 aa, Homo Sapiens
ETADITHAL

SEQ ID NO: 36948 - protein, 9 aa, Homo Sapiens
ETADVIAKV

SEQ ID NO: 36949 - protein, 9 aa, Homo Sapiens
ETAEKLARF

SEQ ID NO: 36950 - protein, 9 aa, Homo Sapiens
ETAENYLGH

SEQ ID NO: 36951 - protein, 9 aa, Homo Sapiens
ETAFGYKGL

SEQ ID NO: 36952 - protein, 9 aa, Homo Sapiens
ETAGAIMAF

SEQ ID NO: 36953 - protein, 9 aa, Homo Sapiens
ETAGIPSTF

SEQ ID NO: 36954 - protein, 9 aa, Homo Sapiens
ETAGRYITY

SEQ ID NO: 36955 - protein, 9 aa, Homo Sapiens
ETAIYKGDY

SEQ ID NO: 36956 - protein, 9 aa, Homo Sapiens
ETALLSSGF

SEQ ID NO: 36957 - protein, 9 aa, Homo Sapiens
ETAPKSEEF

SEQ ID NO: 36958 - protein, 9 aa, Homo Sapiens
ETAPRLPQH

SEQ ID NO: 36959 - protein, 9 aa, Homo Sapiens
ETAQAIKGM

SEQ ID NO: 36960 - protein, 9 aa, Homo Sapiens
ETASRIAKV

SEQ ID NO: 36961 - protein, 9 aa, Homo Sapiens
ETATLRSGY

SEQ ID NO: 36962 - protein, 9 aa, Homo Sapiens
ETAVAILRF

SEQ ID NO: 36963 - protein, 9 aa, Homo Sapiens
ETAVLLGSY

SEQ ID NO: 36964 - protein, 9 aa, Homo Sapiens
ETAVVNVTY

SEQ ID NO: 36965 - protein, 9 aa, Homo Sapiens
ETAWRWPEF

SEQ ID NO: 36966 - protein, 9 aa, Homo Sapiens
ETCHISNLF

SEQ ID NO: 36967 - protein, 9 aa, Homo Sapiens
ETEQKRLGL

SEQ ID NO: 36968 - protein, 9 aa, Homo Sapiens
ETFEKSRLY

SEQ ID NO: 36969 - protein, 9 aa, Homo Sapiens
ETFHHSSNW

SEQ ID NO: 36970 - protein, 9 aa, Homo Sapiens
ETFNHANGL

SEQ ID NO: 36971 - protein, 9 aa, Homo Sapiens
ETFNTPAMY

SEQ ID NO: 36972 - protein, 9 aa, Homo Sapiens
ETFNVPAMY

SEQ ID NO: 36973 - protein, 9 aa, Homo Sapiens
ETFPGVTAL

SEQ ID NO: 36974 - protein, 9 aa, Homo Sapiens
ETFTRVQKY

SEQ ID NO: 36975 - protein, 9 aa, Homo Sapiens
ETFYSTERY

SEQ ID NO: 36976 - protein, 9 aa, Homo Sapiens
ETIAKLVKY

SEQ ID NO: 36977 - protein, 9 aa, Homo Sapiens
ETIAKYEIM

SEQ ID NO: 36978 - protein, 9 aa, Homo Sapiens
ETIDRFNNY

SEQ ID NO: 36979 - protein, 9 aa, Homo Sapiens
ETIDVHSGY

SEQ ID NO: 36980 - protein, 9 aa, Homo Sapiens
ETIERLQQL

SEQ ID NO: 36981 - protein, 9 aa, Homo Sapiens
ETIESINQL

SEQ ID NO: 36982 - protein, 9 aa, Homo Sapiens
ETIETINQL

SEQ ID NO: 36983 - protein, 9 aa, Homo Sapiens
ETIFSISKA

SEQ ID NO: 36984 - protein, 9 aa, Homo Sapiens
ETIGKYWAA

SEQ ID NO: 36985 - protein, 9 aa, Homo Sapiens
ETIHPRKSY

SEQ ID NO: 36986 - protein, 9 aa, Homo Sapiens
ETIKDLPKM

SEQ ID NO: 36987 - protein, 9 aa, Homo Sapiens
ETINRIKLY

SEQ ID NO: 36988 - protein, 9 aa, Homo Sapiens
ETIPKAVSF

SEQ ID NO: 36989 - protein, 9 aa, Homo Sapiens
ETIQHTEAF

SEQ ID NO: 36990 - protein, 9 aa, Homo Sapiens
ETIQITQKY

SEQ ID NO: 36991 - protein, 9 aa, Homo Sapiens
ETIQNMSKV

SEQ ID NO: 36992 - protein, 9 aa, Homo Sapiens
ETIQVHRRY

SEQ ID NO: 36993 - protein, 9 aa, Homo Sapiens
ETIRNIDCY

SEQ ID NO: 36994 - protein, 9 aa, Homo Sapiens
ETIRNILLH

SEQ ID NO: 36995 - protein, 9 aa, Homo Sapiens
ETIRNIPHL

SEQ ID NO: 36996 - protein, 9 aa, Homo Sapiens
ETISKAQAF

SEQ ID NO: 36997 - protein, 9 aa, Homo Sapiens
ETITVSPEY

SEQ ID NO: 36998 - protein, 9 aa, Homo Sapiens
ETIVIINKF

SEQ ID NO: 36999 - protein, 9 aa, Homo Sapiens
ETIVNVLDF

SEQ ID NO: 37000 - protein, 9 aa, Homo Sapiens
ETKEAMSEM

SEQ ID NO: 37001 - protein, 9 aa, Homo Sapiens
ETMHTLLDY

SEQ ID NO: 37002 - protein, 9 aa, Homo Sapiens
ETNGFISAH

SEQ ID NO: 37003 - protein, 9 aa, Homo Sapiens
ETPDYLLKY

SEQ ID NO: 37004 - protein, 9 aa, Homo Sapiens
ETPEMLPAY

SEQ ID NO: 37005 - protein, 9 aa, Homo Sapiens
ETPRSVPGF

SEQ ID NO: 37006 - protein, 9 aa, Homo Sapiens
ETQIGGERY

SEQ ID NO: 37007 - protein, 9 aa, Homo Sapiens
ETSPIVLRY

SEQ ID NO: 37008 - protein, 9 aa, Homo Sapiens
ETTAVALAY

SEQ ID NO: 37009 - protein, 9 aa, Homo Sapiens
ETTDIISRH

SEQ ID NO: 37010 - protein, 9 aa, Homo Sapiens
ETTEAACRY

SEQ ID NO: 37011 - protein, 9 aa, Homo Sapiens
ETTKIVSEM

SEQ ID NO: 37012 - protein, 9 aa, Homo Sapiens
ETTSIATAR

SEQ ID NO: 37013 - protein, 9 aa, Homo Sapiens
ETTVLVESY

SEQ ID NO: 37014 - protein, 9 aa, Homo Sapiens
ETVEHHTEF

SEQ ID NO: 37015 - protein, 9 aa, Homo Sapiens
ETVGKFIQY

SEQ ID NO: 37016 - protein, 9 aa, Homo Sapiens
ETVKEIKEV

SEQ ID NO: 37017 - protein, 9 aa, Homo Sapiens
ETVLKTTGY

SEQ ID NO: 37018 - protein, 9 aa, Homo Sapiens
ETVNVITLY

SEQ ID NO: 37019 - protein, 9 aa, Homo Sapiens
ETVPKVSIV

SEQ ID NO: 37020 - protein, 9 aa, Homo Sapiens
ETVQTTLKF

SEQ ID NO: 37021 - protein, 9 aa, Homo Sapiens
ETVRELTEF

SEQ ID NO: 37022 - protein, 9 aa, Homo Sapiens
ETVSGLKGY

SEQ ID NO: 37023 - protein, 9 aa, Homo Sapiens
ETVSRVSSV

SEQ ID NO: 37024 - protein, 9 aa, Homo Sapiens
ETVVRYEKF

SEQ ID NO: 37025 - protein, 9 aa, Homo Sapiens
ETVWHLEEF

SEQ ID NO: 37026 - protein, 9 aa, Homo Sapiens
ETVWRLEEF

SEQ ID NO: 37027 - protein, 9 aa, Homo Sapiens
ETYGHKTPY

SEQ ID NO: 37028 - protein, 9 aa, Homo Sapiens
ETYGKIVHY

SEQ ID NO: 37029 - protein, 9 aa, Homo Sapiens
ETYIRSGTY

SEQ ID NO: 37030 - protein, 9 aa, Homo Sapiens
ETYQFSGVY

SEQ ID NO: 37031 - protein, 9 aa, Homo Sapiens
ETYSNLIKL

SEQ ID NO: 37032 - protein, 9 aa, Homo Sapiens
EVAAAIAGY

SEQ ID NO: 37033 - protein, 9 aa, Homo Sapiens
EVAATEIKM

SEQ ID NO: 37034 - protein, 9 aa, Homo Sapiens
EVAAVLLHF

SEQ ID NO: 37035 - protein, 9 aa, Homo Sapiens
EVADRIGDY

SEQ ID NO: 37036 - protein, 9 aa, Homo Sapiens
EVADVGIEV

SEQ ID NO: 37037 - protein, 9 aa, Homo Sapiens
EVAEAITQF

SEQ ID NO: 37038 - protein, 9 aa, Homo Sapiens
EVAEFLARH

SEQ ID NO: 37039 - protein, 9 aa, Homo Sapiens
EVAEHVQYM

SEQ ID NO: 37040 - protein, 9 aa, Homo Sapiens
EVAGFGESR

SEQ ID NO: 37041 - protein, 9 aa, Homo Sapiens
EVAGHLRTY

SEQ ID NO: 37042 - protein, 9 aa, Homo Sapiens
EVAGIVAAR

SEQ ID NO: 37043 - protein, 9 aa, Homo Sapiens
EVAIRLLEM

SEQ ID NO: 37044 - protein, 9 aa, Homo Sapiens
EVAKKLCSF

SEQ ID NO: 37045 - protein, 9 aa, Homo Sapiens
EVANKFAKA

SEQ ID NO: 37046 - protein, 9 aa, Homo Sapiens
EVAPAGASY

SEQ ID NO: 37047 - protein, 9 aa, Homo Sapiens
EVAPALSVF

SEQ ID NO: 37048 - protein, 9 aa, Homo Sapiens
EVAPHPVYY

SEQ ID NO: 37049 - protein, 9 aa, Homo Sapiens
EVAPRLAFA

SEQ ID NO: 37050 - protein, 9 aa, Homo Sapiens
EVAPVISSA

SEQ ID NO: 37051 - protein, 9 aa, Homo Sapiens
EVAQMAAYY

SEQ ID NO: 37052 - protein, 9 aa, Homo Sapiens
EVASNITSF

SEQ ID NO: 37053 - protein, 9 aa, Homo Sapiens
EVASNMARF

SEQ ID NO: 37054 - protein, 9 aa, Homo Sapiens
EVASNVPKV

SEQ ID NO: 37055 - protein, 9 aa, Homo Sapiens
EVASVYQSY

SEQ ID NO: 37056 - protein, 9 aa, Homo Sapiens
EVATFYTMY

SEQ ID NO: 37057 - protein, 9 aa, Homo Sapiens
EVATRMQSF

SEQ ID NO: 37058 - protein, 9 aa, Homo Sapiens
EVCKELHRF

SEQ ID NO: 37059 - protein, 9 aa, Homo Sapiens
EVCRAVLSF

SEQ ID NO: 37060 - protein, 9 aa, Homo Sapiens
EVFDKTYQF

SEQ ID NO: 37061 - protein, 9 aa, Homo Sapiens
EVFEHTVLY

SEQ ID NO: 37062 - protein, 9 aa, Homo Sapiens
EVFESVSAY

SEQ ID NO: 37063 - protein, 9 aa, Homo Sapiens
EVFGRVERY

SEQ ID NO: 37064 - protein, 9 aa, Homo Sapiens
EVFGRVSRF

SEQ ID NO: 37065 - protein, 9 aa, Homo Sapiens
EVFGYLAKY

SEQ ID NO: 37066 - protein, 9 aa, Homo Sapiens
EVFPLAMNY

SEQ ID NO: 37067 - protein, 9 aa, Homo Sapiens
EVFTEILNY

SEQ ID NO: 37068 - protein, 9 aa, Homo Sapiens
EVGGEALGR

SEQ ID NO: 37069 - protein, 9 aa, Homo Sapiens
EVGPAGSQF

SEQ ID NO: 37070 - protein, 9 aa, Homo Sapiens
EVGPKFRGV

SEQ ID NO: 37071 - protein, 9 aa, Homo Sapiens
EVHDLERKY

SEQ ID NO: 37072 - protein, 9 aa, Homo Sapiens
EVHDYIRAY

SEQ ID NO: 37073 - protein, 9 aa, Homo Sapiens
EVHTIPAKM

SEQ ID NO: 37074 - protein, 9 aa, Homo Sapiens
EVIAKNNSF

SEQ ID NO: 37075 - protein, 9 aa, Homo Sapiens
EVIDFSHGL

SEQ ID NO: 37076 - protein, 9 aa, Homo Sapiens
EVIDKCQSF

SEQ ID NO: 37077 - protein, 9 aa, Homo Sapiens
EVIDKYTAV

SEQ ID NO: 37078 - protein, 9 aa, Homo Sapiens
EVIDVFEIM

SEQ ID NO: 37079 - protein, 9 aa, Homo Sapiens
EVIDVVRTM

SEQ ID NO: 37080 - protein, 9 aa, Homo Sapiens
EVIEGYEIA

SEQ ID NO: 37081 - protein, 9 aa, Homo Sapiens
EVIEIMTDR

SEQ ID NO: 37082 - protein, 9 aa, Homo Sapiens
EVIEKFDYV

SEQ ID NO: 37083 - protein, 9 aa, Homo Sapiens
EVIEKTSYL

SEQ ID NO: 37084 - protein, 9 aa, Homo Sapiens
EVIEQIENL

SEQ ID NO: 37085 - protein, 9 aa, Homo Sapiens
EVIGAYKQA

SEQ ID NO: 37086 - protein, 9 aa, Homo Sapiens
EVIGESMEM

SEQ ID NO: 37087 - protein, 9 aa, Homo Sapiens
EVIGGADKY

SEQ ID NO: 37088 - protein, 9 aa, Homo Sapiens
EVIGKITAL

SEQ ID NO: 37089 - protein, 9 aa, Homo Sapiens
EVIGRVPQA

SEQ ID NO: 37090 - protein, 9 aa, Homo Sapiens
EVIHNLPDF

SEQ ID NO: 37091 - protein, 9 aa, Homo Sapiens
EVIKDANLY

SEQ ID NO: 37092 - protein, 9 aa, Homo Sapiens
EVIKELAQI

SEQ ID NO: 37093 - protein, 9 aa, Homo Sapiens
EVIKEVQEF

SEQ ID NO: 37094 - protein, 9 aa, Homo Sapiens
EVIKNFIQY

SEQ ID NO: 37095 - protein, 9 aa, Homo Sapiens
EVIKSMKPK

SEQ ID NO: 37096 - protein, 9 aa, Homo Sapiens
EVINDYHFR

SEQ ID NO: 37097 - protein, 9 aa, Homo Sapiens
EVINRIQKL

SEQ ID NO: 37098 - protein, 9 aa, Homo Sapiens
EVIPLVQTF

SEQ ID NO: 37099 - protein, 9 aa, Homo Sapiens
EVIPNSNFY

SEQ ID NO: 37100 - protein, 9 aa, Homo Sapiens
EVIPPMKEF

SEQ ID NO: 37101 - protein, 9 aa, Homo Sapiens
EVIPPYYSY

SEQ ID NO: 37102 - protein, 9 aa, Homo Sapiens
EVIPTHTVY

SEQ ID NO: 37103 - protein, 9 aa, Homo Sapiens
EVIPYTPAM

SEQ ID NO: 37104 - protein, 9 aa, Homo Sapiens
EVIQALPKL

SEQ ID NO: 37105 - protein, 9 aa, Homo Sapiens
EVIQEIKSF

SEQ ID NO: 37106 - protein, 9 aa, Homo Sapiens
EVIQNMTEF

SEQ ID NO: 37107 - protein, 9 aa, Homo Sapiens
EVIQPYQEF

SEQ ID NO: 37108 - protein, 9 aa, Homo Sapiens
EVIQWLAKL

SEQ ID NO: 37109 - protein, 9 aa, Homo Sapiens
EVIRELICY

SEQ ID NO: 37110 - protein, 9 aa, Homo Sapiens
EVIRILSTM

SEQ ID NO: 37111 - protein, 9 aa, Homo Sapiens
EVIRLIANF

SEQ ID NO: 37112 - protein, 9 aa, Homo Sapiens
EVIRQAGVY

SEQ ID NO: 37113 - protein, 9 aa, Homo Sapiens
EVIRTLPSL

SEQ ID NO: 37114 - protein, 9 aa, Homo Sapiens
EVISHIGKL

SEQ ID NO: 37115 - protein, 9 aa, Homo Sapiens
EVISKLYAV

SEQ ID NO: 37116 - protein, 9 aa, Homo Sapiens
EVISKTPTL

SEQ ID NO: 37117 - protein, 9 aa, Homo Sapiens
EVISKYDQF

SEQ ID NO: 37118 - protein, 9 aa, Homo Sapiens
EVISLINTR

SEQ ID NO: 37119 - protein, 9 aa, Homo Sapiens
EVISSLEKY

SEQ ID NO: 37120 - protein, 9 aa, Homo Sapiens
EVISSVSEL

SEQ ID NO: 37121 - protein, 9 aa, Homo Sapiens
EVISVLQKY

SEQ ID NO: 37122 - protein, 9 aa, Homo Sapiens
EVIVGVNKY

SEQ ID NO: 37123 - protein, 9 aa, Homo Sapiens
EVKARLQKY

SEQ ID NO: 37124 - protein, 9 aa, Homo Sapiens
EVKDKVPSL

SEQ ID NO: 37125 - protein, 9 aa, Homo Sapiens
EVKEDIAKL

SEQ ID NO: 37126 - protein, 9 aa, Homo Sapiens
EVKKLMRKY

SEQ ID NO: 37127 - protein, 9 aa, Homo Sapiens
EVKKTLQQF

SEQ ID NO: 37128 - protein, 9 aa, Homo Sapiens
EVKLEIPSF

SEQ ID NO: 37129 - protein, 9 aa, Homo Sapiens
EVKLKVDSF

SEQ ID NO: 37130 - protein, 9 aa, Homo Sapiens
EVKPVLPEL

SEQ ID NO: 37131 - protein, 9 aa, Homo Sapiens
EVKQKLQEF

SEQ ID NO: 37132 - protein, 9 aa, Homo Sapiens
EVKRLIAEA

SEQ ID NO: 37133 - protein, 9 aa, Homo Sapiens
EVKSHLLDY

SEQ ID NO: 37134 - protein, 9 aa, Homo Sapiens
EVKSRTTLF

SEQ ID NO: 37135 - protein, 9 aa, Homo Sapiens
EVLGILRYI

SEQ ID NO: 37136 - protein, 9 aa, Homo Sapiens
EVLKAVTAL

SEQ ID NO: 37137 - protein, 9 aa, Homo Sapiens
EVLNFLLRY

SEQ ID NO: 37138 - protein, 9 aa, Homo Sapiens
EVMDVFLRF

SEQ ID NO: 37139 - protein, 9 aa, Homo Sapiens
EVMEIMSRF

SEQ ID NO: 37140 - protein, 9 aa, Homo Sapiens
EVMEQVRGY

SEQ ID NO: 37141 - protein, 9 aa, Homo Sapiens
EVMPKICRL

SEQ ID NO: 37142 - protein, 9 aa, Homo Sapiens
EVMPLFAGY

SEQ ID NO: 37143 - protein, 9 aa, Homo Sapiens
EVMQKYIRY

SEQ ID NO: 37144 - protein, 9 aa, Homo Sapiens
EVMRILPRM

SEQ ID NO: 37145 - protein, 9 aa, Homo Sapiens
EVNEWFTKY

SEQ ID NO: 37146 - protein, 9 aa, Homo Sapiens
EVNGLISMY

SEQ ID NO: 37147 - protein, 9 aa, Homo Sapiens
EVNKFQMAY

SEQ ID NO: 37148 - protein, 9 aa, Homo Sapiens
EVNKVISSV

SEQ ID NO: 37149 - protein, 9 aa, Homo Sapiens
EVPDYSMAY

SEQ ID NO: 37150 - protein, 9 aa, Homo Sapiens
EVPEKIAEL

SEQ ID NO: 37151 - protein, 9 aa, Homo Sapiens
EVPGHQSVF

SEQ ID NO: 37152 - protein, 9 aa, Homo Sapiens
EVPHEVAQY

SEQ ID NO: 37153 - protein, 9 aa, Homo Sapiens
EVPHEVGDF

SEQ ID NO: 37154 - protein, 9 aa, Homo Sapiens
EVPHFHHEL

SEQ ID NO: 37155 - protein, 9 aa, Homo Sapiens
EVPNTVHQF

SEQ ID NO: 37156 - protein, 9 aa, Homo Sapiens
EVQDSYEAY

SEQ ID NO: 37157 - protein, 9 aa, Homo Sapiens
EVRGGGLTR

SEQ ID NO: 37158 - protein, 9 aa, Homo Sapiens
EVRQGLKAY

SEQ ID NO: 37159 - protein, 9 aa, Homo Sapiens
EVRTGGMAF

SEQ ID NO: 37160 - protein, 9 aa, Homo Sapiens
EVRWFQSQF

SEQ ID NO: 37161 - protein, 9 aa, Homo Sapiens
EVSAATGRF

SEQ ID NO: 37162 - protein, 9 aa, Homo Sapiens
EVSDRISSL

SEQ ID NO: 37163 - protein, 9 aa, Homo Sapiens
EVSEQILHM

SEQ ID NO: 37164 - protein, 9 aa, Homo Sapiens
EVSGIKAAY

SEQ ID NO: 37165 - protein, 9 aa, Homo Sapiens
EVSGIKALY

SEQ ID NO: 37166 - protein, 9 aa, Homo Sapiens
EVSGKVLEM

SEQ ID NO: 37167 - protein, 9 aa, Homo Sapiens
EVSPIFTQF

SEQ ID NO: 37168 - protein, 9 aa, Homo Sapiens
EVSPKLPEY

SEQ ID NO: 37169 - protein, 9 aa, Homo Sapiens
EVSPNLVRY

SEQ ID NO: 37170 - protein, 9 aa, Homo Sapiens
EVSPYCLLF

SEQ ID NO: 37171 - protein, 9 aa, Homo Sapiens
EVSSHFSHF

SEQ ID NO: 37172 - protein, 9 aa, Homo Sapiens
EVSSISSKF

SEQ ID NO: 37173 - protein, 9 aa, Homo Sapiens
EVSTEVPEM

SEQ ID NO: 37174 - protein, 9 aa, Homo Sapiens
EVTCEISRY

SEQ ID NO: 37175 - protein, 9 aa, Homo Sapiens
EVTDFAGQY

SEQ ID NO: 37176 - protein, 9 aa, Homo Sapiens
EVTDFLSFY

SEQ ID NO: 37177 - protein, 9 aa, Homo Sapiens
EVTEFGNKY

SEQ ID NO: 37178 - protein, 9 aa, Homo Sapiens
EVTEIISQF

SEQ ID NO: 37179 - protein, 9 aa, Homo Sapiens
EVTELLARY

SEQ ID NO: 37180 - protein, 9 aa, Homo Sapiens
EVTELLVKH

SEQ ID NO: 37181 - protein, 9 aa, Homo Sapiens
EVTFVPGLY

SEQ ID NO: 37182 - protein, 9 aa, Homo Sapiens
EVTGKICEM

SEQ ID NO: 37183 - protein, 9 aa, Homo Sapiens
EVTGPHEAF

SEQ ID NO: 37184 - protein, 9 aa, Homo Sapiens
EVTSINSFL

SEQ ID NO: 37185 - protein, 9 aa, Homo Sapiens
EVTSQTSHL

SEQ ID NO: 37186 - protein, 9 aa, Homo Sapiens
EVTTNIPKM

SEQ ID NO: 37187 - protein, 9 aa, Homo Sapiens
EVTWELPQY

SEQ ID NO: 37188 - protein, 9 aa, Homo Sapiens
EVVAEVQEF

SEQ ID NO: 37189 - protein, 9 aa, Homo Sapiens
EVVAFIQHF

SEQ ID NO: 37190 - protein, 9 aa, Homo Sapiens
EVVAGIKEY

SEQ ID NO: 37191 - protein, 9 aa, Homo Sapiens
EVVDEIELL

SEQ ID NO: 37192 - protein, 9 aa, Homo Sapiens
EVVDFSSHY

SEQ ID NO: 37193 - protein, 9 aa, Homo Sapiens
EVVDKINQV

SEQ ID NO: 37194 - protein, 9 aa, Homo Sapiens
EVVDKRNPM

SEQ ID NO: 37195 - protein, 9 aa, Homo Sapiens
EVVDLFRAY

SEQ ID NO: 37196 - protein, 9 aa, Homo Sapiens
EVVDVTWRY

SEQ ID NO: 37197 - protein, 9 aa, Homo Sapiens
EVVEEVEKY

SEQ ID NO: 37198 - protein, 9 aa, Homo Sapiens
EVVEKWLDY

SEQ ID NO: 37199 - protein, 9 aa, Homo Sapiens
EVVEKYEIY

SEQ ID NO: 37200 - protein, 9 aa, Homo Sapiens
EVVELLIKY

SEQ ID NO: 37201 - protein, 9 aa, Homo Sapiens
EVVENLLNY

SEQ ID NO: 37202 - protein, 9 aa, Homo Sapiens
EVVERILFI

SEQ ID NO: 37203 - protein, 9 aa, Homo Sapiens
EVVERLLSV

SEQ ID NO: 37204 - protein, 9 aa, Homo Sapiens
EVVERVEEL

SEQ ID NO: 37205 - protein, 9 aa, Homo Sapiens
EVVERVLTF

SEQ ID NO: 37206 - protein, 9 aa, Homo Sapiens
EVVGIIESR

SEQ ID NO: 37207 - protein, 9 aa, Homo Sapiens
EVVGVYGSF

SEQ ID NO: 37208 - protein, 9 aa, Homo Sapiens
EVVGYFGRF

SEQ ID NO: 37209 - protein, 9 aa, Homo Sapiens
EVVHKIIEL

SEQ ID NO: 37210 - protein, 9 aa, Homo Sapiens
EVVHLILFY

SEQ ID NO: 37211 - protein, 9 aa, Homo Sapiens
EVVIRQLEF

SEQ ID NO: 37212 - protein, 9 aa, Homo Sapiens
EVVKFTQAY

SEQ ID NO: 37213 - protein, 9 aa, Homo Sapiens
EVVKKVNEM

SEQ ID NO: 37214 - protein, 9 aa, Homo Sapiens
EVVKYLLRM

SEQ ID NO: 37215 - protein, 9 aa, Homo Sapiens
EVVPVISPM

SEQ ID NO: 37216 - protein, 9 aa, Homo Sapiens
EVVQQVVLY

SEQ ID NO: 37217 - protein, 9 aa, Homo Sapiens
EVVQRISNV

SEQ ID NO: 37218 - protein, 9 aa, Homo Sapiens
EVVQRLTRM

SEQ ID NO: 37219 - protein, 9 aa, Homo Sapiens
EVVRKILLL

SEQ ID NO: 37220 - protein, 9 aa, Homo Sapiens
EVVSHTSQV

SEQ ID NO: 37221 - protein, 9 aa, Homo Sapiens
EVVSLETRY

SEQ ID NO: 37222 - protein, 9 aa, Homo Sapiens
EVVSNVQEY

SEQ ID NO: 37223 - protein, 9 aa, Homo Sapiens
EVVSQIPNL

SEQ ID NO: 37224 - protein, 9 aa, Homo Sapiens
EVVTVFQYY

SEQ ID NO: 37225 - protein, 9 aa, Homo Sapiens
EVVVQVPYL

SEQ ID NO: 37226 - protein, 9 aa, Homo Sapiens
EVYAGSHQY

SEQ ID NO: 37227 - protein, 9 aa, Homo Sapiens
EVYCIDARY

SEQ ID NO: 37228 - protein, 9 aa, Homo Sapiens
EVYDDFLHY

SEQ ID NO: 37229 - protein, 9 aa, Homo Sapiens
EVYDKICKA

SEQ ID NO: 37230 - protein, 9 aa, Homo Sapiens
EVYEGALLY

SEQ ID NO: 37231 - protein, 9 aa, Homo Sapiens
EVYEKPVQV

SEQ ID NO: 37232 - protein, 9 aa, Homo Sapiens
EVYEKVVDY

SEQ ID NO: 37233 - protein, 9 aa, Homo Sapiens
EVYGSVAKV

SEQ ID NO: 37234 - protein, 9 aa, Homo Sapiens
EVYPGQQYL

SEQ ID NO: 37235 - protein, 9 aa, Homo Sapiens
EVYPHVSTI

SEQ ID NO: 37236 - protein, 9 aa, Homo Sapiens
EVYQHLAHY

SEQ ID NO: 37237 - protein, 9 aa, Homo Sapiens
EVYRHFTGH

SEQ ID NO: 37238 - protein, 9 aa, Homo Sapiens
FAFEHSEEY

SEQ ID NO: 37239 - protein, 9 aa, Homo Sapiens
FIIQNIPGF

SEQ ID NO: 37240 - protein, 9 aa, Homo Sapiens
FLIDKVNAF

SEQ ID NO: 37241 - protein, 9 aa, Homo Sapiens
FLRDKIASY

SEQ ID NO: 37242 - protein, 9 aa, Homo Sapiens
FTAEFSSRY

SEQ ID NO: 37243 - protein, 9 aa, Homo Sapiens
FTAERSSYY

SEQ ID NO: 37244 - protein, 9 aa, Homo Sapiens
FTITKTVEY

SEQ ID NO: 37245 - protein, 9 aa, Homo Sapiens
FTKDQMSHL

SEQ ID NO: 37246 - protein, 9 aa, Homo Sapiens
FTVDGIPYF

SEQ ID NO: 37247 - protein, 9 aa, Homo Sapiens
FVAEQKVEY

SEQ ID NO: 37248 - protein, 9 aa, Homo Sapiens
FVAGVVTFY

SEQ ID NO: 37249 - protein, 9 aa, Homo Sapiens
FVCERTLKY

SEQ ID NO: 37250 - protein, 9 aa, Homo Sapiens
FVIDTTPGM

SEQ ID NO: 37251 - protein, 9 aa, Homo Sapiens
FVIGCYLDR

SEQ ID NO: 37252 - protein, 9 aa, Homo Sapiens
FVIKRLPLF

SEQ ID NO: 37253 - protein, 9 aa, Homo Sapiens
FVINEVCEM

SEQ ID NO: 37254 - protein, 9 aa, Homo Sapiens
FVISNTTGY

SEQ ID NO: 37255 - protein, 9 aa, Homo Sapiens
FVVERQPCM

SEQ ID NO: 37256 - protein, 9 aa, Homo Sapiens
GGFGGGSFR

SEQ ID NO: 37257 - protein, 9 aa, Homo Sapiens
GTAMIFTCF

SEQ ID NO: 37258 - protein, 9 aa, Homo Sapiens
GVTHICPVY

SEQ ID NO: 37259 - protein, 9 aa, Homo Sapiens
HGIDPTGTY

SEQ ID NO: 37260 - protein, 9 aa, Homo Sapiens
HIAENILSY

SEQ ID NO: 37261 - protein, 9 aa, Homo Sapiens
HIIGRIESY

SEQ ID NO: 37262 - protein, 9 aa, Homo Sapiens
HLIQNIPGF

SEQ ID NO: 37263 - protein, 9 aa, Homo Sapiens
HLKDLISLY

SEQ ID NO: 37264 - protein, 9 aa, Homo Sapiens
HSSSIVTAY

SEQ ID NO: 37265 - protein, 9 aa, Homo Sapiens
HTAAMVQQY

SEQ ID NO: 37266 - protein, 9 aa, Homo Sapiens
HTADISSHF

SEQ ID NO: 37267 - protein, 9 aa, Homo Sapiens
HTAEYLTYY

SEQ ID NO: 37268 - protein, 9 aa, Homo Sapiens
HTAHIACKF

SEQ ID NO: 37269 - protein, 9 aa, Homo Sapiens
HTAPNVPHY

SEQ ID NO: 37270 - protein, 9 aa, Homo Sapiens
HTATHILNF

SEQ ID NO: 37271 - protein, 9 aa, Homo Sapiens
HTIGKTVEY

SEQ ID NO: 37272 - protein, 9 aa, Homo Sapiens
HTIGPFSSF

SEQ ID NO: 37273 - protein, 9 aa, Homo Sapiens
HTIHVLSAY

SEQ ID NO: 37274 - protein, 9 aa, Homo Sapiens
HTKENGLPY

SEQ ID NO: 37275 - protein, 9 aa, Homo Sapiens
HTKLSLGSY

SEQ ID NO: 37276 - protein, 9 aa, Homo Sapiens
HTKTTLPTF

SEQ ID NO: 37277 - protein, 9 aa, Homo Sapiens
HTVHVLSAY

SEQ ID NO: 37278 - protein, 9 aa, Homo Sapiens
HTVPIYEGY

SEQ ID NO: 37279 - protein, 9 aa, Homo Sapiens
HVAEQISKM

SEQ ID NO: 37280 - protein, 9 aa, Homo Sapiens
HVAQIYAIR

SEQ ID NO: 37281 - protein, 9 aa, Homo Sapiens
HVHSLLSVF

SEQ ID NO: 37282 - protein, 9 aa, Homo Sapiens
HVIDDFVQF

SEQ ID NO: 37283 - protein, 9 aa, Homo Sapiens
HVIDVKFLY

SEQ ID NO: 37284 - protein, 9 aa, Homo Sapiens
HVIEKMHHV

SEQ ID NO: 37285 - protein, 9 aa, Homo Sapiens
HVINQTGGY

SEQ ID NO: 37286 - protein, 9 aa, Homo Sapiens
HVIRDVAQF

SEQ ID NO: 37287 - protein, 9 aa, Homo Sapiens
HVIYTVNLY

SEQ ID NO: 37288 - protein, 9 aa, Homo Sapiens
HVNGIVQKY

SEQ ID NO: 37289 - protein, 9 aa, Homo Sapiens
HVPEHAVVL

SEQ ID NO: 37290 - protein, 9 aa, Homo Sapiens
HVVAGTAGY

SEQ ID NO: 37291 - protein, 9 aa, Homo Sapiens
IGKRGIIGY

SEQ ID NO: 37292 - protein, 9 aa, Homo Sapiens
IWSHAIQKY

SEQ ID NO: 37293 - protein, 9 aa, Homo Sapiens
LFNLAKDIF

SEQ ID NO: 37294 - protein, 9 aa, Homo Sapiens
MPKVKMPKF

SEQ ID NO: 37295 - protein, 9 aa, Homo Sapiens
MTKRDVPGF

SEQ ID NO: 37296 - protein, 9 aa, Homo Sapiens
MVKRYLTSF

SEQ ID NO: 37297 - protein, 9 aa, Homo Sapiens
MVTEIRLKY

SEQ ID NO: 37298 - protein, 9 aa, Homo Sapiens
NIPAKILSY

SEQ ID NO: 37299 - protein, 9 aa, Homo Sapiens
NLKDFISRF

SEQ ID NO: 37300 - protein, 9 aa, Homo Sapiens
NTIEGTAKY

SEQ ID NO: 37301 - protein, 9 aa, Homo Sapiens
NVADLHEKY

SEQ ID NO: 37302 - protein, 9 aa, Homo Sapiens
NVAEFVCKY

SEQ ID NO: 37303 - protein, 9 aa, Homo Sapiens
NVIDKLAQF

SEQ ID NO: 37304 - protein, 9 aa, Homo Sapiens
NVIGICTHY

SEQ ID NO: 37305 - protein, 9 aa, Homo Sapiens
NVIRLVGKY

SEQ ID NO: 37306 - protein, 9 aa, Homo Sapiens
NVYDFKTTY

SEQ ID NO: 37307 - protein, 9 aa, Homo Sapiens
PDGTVVTVM

SEQ ID NO: 37308 - protein, 9 aa, Homo Sapiens
PEYVLAYID

SEQ ID NO: 37309 - protein, 9 aa, Homo Sapiens
QEQNQEQPI

SEQ ID NO: 37310 - protein, 9 aa, Homo Sapiens
QIKDAIGRY

SEQ ID NO: 37311 - protein, 9 aa, Homo Sapiens
QIVKGLTAL

SEQ ID NO: 37312 - protein, 9 aa, Homo Sapiens
QTIGNHASY

SEQ ID NO: 37313 - protein, 9 aa, Homo Sapiens
QTIRSIGYY

SEQ ID NO: 37314 - protein, 9 aa, Homo Sapiens
QTPAHIAAF

SEQ ID NO: 37315 - protein, 9 aa, Homo Sapiens
QVADIDGQY

SEQ ID NO: 37316 - protein, 9 aa, Homo Sapiens
QVAEIVSKY

SEQ ID NO: 37317 - protein, 9 aa, Homo Sapiens
QVHEIQSCM

SEQ ID NO: 37318 - protein, 9 aa, Homo Sapiens
QVINNVSKF

SEQ ID NO: 37319 - protein, 9 aa, Homo Sapiens
SAPQSAGIT

SEQ ID NO: 37320 - protein, 9 aa, Homo Sapiens
SIIQRIQEF

SEQ ID NO: 37321 - protein, 9 aa, Homo Sapiens
SIKDRMAKY

SEQ ID NO: 37322 - protein, 9 aa, Homo Sapiens
SIPDIKTAF

SEQ ID NO: 37323 - protein, 9 aa, Homo Sapiens
SIRSFVSKM

SEQ ID NO: 37324 - protein, 9 aa, Homo Sapiens
SLKETIGKY

SEQ ID NO: 37325 - protein, 9 aa, Homo Sapiens
SQHYHQGYY

SEQ ID NO: 37326 - protein, 9 aa, Homo Sapiens
STFSHKTVY

SEQ ID NO: 37327 - protein, 9 aa, Homo Sapiens
STHVTISTY

SEQ ID NO: 37328 - protein, 9 aa, Homo Sapiens
STIDWNKLY

SEQ ID NO: 37329 - protein, 9 aa, Homo Sapiens
STIQDYLGF

SEQ ID NO: 37330 - protein, 9 aa, Homo Sapiens
STTAVSARY

SEQ ID NO: 37331 - protein, 9 aa, Homo Sapiens
STYEKALGY

SEQ ID NO: 37332 - protein, 9 aa, Homo Sapiens
SVADIRNAY

SEQ ID NO: 37333 - protein, 9 aa, Homo Sapiens
SVAGIFNYY

SEQ ID NO: 37334 - protein, 9 aa, Homo Sapiens
SVASIKTGF

SEQ ID NO: 37335 - protein, 9 aa, Homo Sapiens
SVIATIQEY

SEQ ID NO: 37336 - protein, 9 aa, Homo Sapiens
SVIDIINKY

SEQ ID NO: 37337 - protein, 9 aa, Homo Sapiens
SVIEAVAHF

SEQ ID NO: 37338 - protein, 9 aa, Homo Sapiens
SVIEQILHY

SEQ ID NO: 37339 - protein, 9 aa, Homo Sapiens
SVIKIQSYY

SEQ ID NO: 37340 - protein, 9 aa, Homo Sapiens
SVIRKIPAL

SEQ ID NO: 37341 - protein, 9 aa, Homo Sapiens
SVKDKITAF

SEQ ID NO: 37342 - protein, 9 aa, Homo Sapiens
SVKEKISMF

SEQ ID NO: 37343 - protein, 9 aa, Homo Sapiens
SVPDFKVFY

SEQ ID NO: 37344 - protein, 9 aa, Homo Sapiens
SVVDDIPEF

SEQ ID NO: 37345 - protein, 9 aa, Homo Sapiens
SVVDISQQY

SEQ ID NO: 37346 - protein, 9 aa, Homo Sapiens
SVVDRVASM

SEQ ID NO: 37347 - protein, 9 aa, Homo Sapiens
SVVEAIPEF

SEQ ID NO: 37348 - protein, 9 aa, Homo Sapiens
SVVELINHY

SEQ ID NO: 37349 - protein, 9 aa, Homo Sapiens
SVVGAISSY

SEQ ID NO: 37350 - protein, 9 aa, Homo Sapiens
SVVSVISRF

SEQ ID NO: 37351 - protein, 9 aa, Homo Sapiens
TISSNVASK

SEQ ID NO: 37352 - protein, 9 aa, Homo Sapiens
TLIDIMTRF

SEQ ID NO: 37353 - protein, 9 aa, Homo Sapiens
TSTDISSLY

SEQ ID NO: 37354 - protein, 9 aa, Homo Sapiens
TTIAKYAQY

SEQ ID NO: 37355 - protein, 9 aa, Homo Sapiens
TTIDIGVKY

SEQ ID NO: 37356 - protein, 9 aa, Homo Sapiens
TTSGIQVRY

SEQ ID NO: 37357 - protein, 9 aa, Homo Sapiens
TVHSIISKM

SEQ ID NO: 37358 - protein, 9 aa, Homo Sapiens
TVIDQIPFL

SEQ ID NO: 37359 - protein, 9 aa, Homo Sapiens
TVIEPLKGY

SEQ ID NO: 37360 - protein, 9 aa, Homo Sapiens
TVPEKIGVF

SEQ ID NO: 37361 - protein, 9 aa, Homo Sapiens
TVSDAILRY

SEQ ID NO: 37362 - protein, 9 aa, Homo Sapiens
TVVVRIMEF

SEQ ID NO: 37363 - protein, 9 aa, Homo Sapiens
VEELKPTPE

SEQ ID NO: 37364 - protein, 9 aa, Homo Sapiens
VLKEKIAKY

SEQ ID NO: 37365 - protein, 9 aa, Homo Sapiens
VSTSHTTIS

SEQ ID NO: 37366 - protein, 9 aa, Homo Sapiens
VVAPITTGY

SEQ ID NO: 37367 - protein, 9 aa, Homo Sapiens
YASSPGGVY

SEQ ID NO: 37368 - protein, 9 aa, Homo Sapiens
YAVSELAGH

SEQ ID NO: 37369 - protein, 9 aa, Homo Sapiens
YIATKIGAF

SEQ ID NO: 37370 - protein, 9 aa, Homo Sapiens
YIIDYYGTR

SEQ ID NO: 37371 - protein, 9 aa, Homo Sapiens
YIIQNIPGF

SEQ ID NO: 37372 - protein, 9 aa, Homo Sapiens
YTAQPTQGY

SEQ ID NO: 37373 - protein, 9 aa, Homo Sapiens
YTIATILHY

SEQ ID NO: 37374 - protein, 9 aa, Homo Sapiens
YTKHGTLKY

SEQ ID NO: 37375 - protein, 9 aa, Homo Sapiens
YTKNYLPLL

SEQ ID NO: 37376 - protein, 9 aa, Homo Sapiens
YTTDRVMTV

SEQ ID NO: 37377 - protein, 9 aa, Homo Sapiens
YTVEKREGY

SEQ ID NO: 37378 - protein, 9 aa, Homo Sapiens
YTYESPAGY

SEQ ID NO: 37379 - protein, 9 aa, Homo Sapiens
YVADHASSY

SEQ ID NO: 37380 - protein, 9 aa, Homo Sapiens
YVAEILPKY

SEQ ID NO: 37381 - protein, 9 aa, Homo Sapiens
YVIGGYTTR

SEQ ID NO: 37382 - protein, 9 aa, Homo Sapiens
YVIGRRKSY

SEQ ID NO: 37383 - protein, 9 aa, Homo Sapiens
YVILNILRF

SEQ ID NO: 37384 - protein, 9 aa, Homo Sapiens
YVIPKTGFY

SEQ ID NO: 37385 - protein, 9 aa, Homo Sapiens
YVIQKFFEF

SEQ ID NO: 37386 - protein, 9 aa, Homo Sapiens
YVPDVTGRY

SEQ ID NO: 37387 - protein, 9 aa, Homo Sapiens
YVPESVGSF

SEQ ID NO: 37388 - protein, 9 aa, Homo Sapiens
YVQDRVPSY

SEQ ID NO: 37389 - protein, 9 aa, Homo Sapiens
YVSDINSVY

SEQ ID NO: 37390 - protein, 9 aa, Homo Sapiens
YVTHLHAEY

SEQ ID NO: 37391 - protein, 9 aa, Homo Sapiens
YVTTSTRTY

SEQ ID NO: 37392 - protein, 9 aa, Homo Sapiens
YVVEPYRKY

SEQ ID NO: 37393 - protein, 9 aa, Homo Sapiens
YVYEYPSRY

SEQ ID NO: 37394 - protein, 10 aa, Homo Sapiens
AIVEKLRFTY

SEQ ID NO: 37395 - protein, 10 aa, Homo Sapiens
ATFDAISKTY

SEQ ID NO: 37396 - protein, 10 aa, Homo Sapiens
AVADKVHLMY

SEQ ID NO: 37397 - protein, 10 aa, Homo Sapiens
AVDFAERHGY

SEQ ID NO: 37398 - protein, 10 aa, Homo Sapiens
AVIAHDFLAF

SEQ ID NO: 37399 - protein, 10 aa, Homo Sapiens
AVIEDTWHYF

SEQ ID NO: 37400 - protein, 10 aa, Homo Sapiens
AVIEGAKFIM

SEQ ID NO: 37401 - protein, 10 aa, Homo Sapiens
AVIGDVIRVY

SEQ ID NO: 37402 - protein, 10 aa, Homo Sapiens
AVISAKLTGM

SEQ ID NO: 37403 - protein, 10 aa, Homo Sapiens
AVNDAHLLQY

SEQ ID NO: 37404 - protein, 10 aa, Homo Sapiens
AVRDNNMAPY

SEQ ID NO: 37405 - protein, 10 aa, Homo Sapiens
AVVSVCGHLY

SEQ ID NO: 37406 - protein, 10 aa, Homo Sapiens
AVYERELQTF

SEQ ID NO: 37407 - protein, 10 aa, Homo Sapiens
DAAKGFGGKY

SEQ ID NO: 37408 - protein, 10 aa, Homo Sapiens
DIASLVGHEF

SEQ ID NO: 37409 - protein, 10 aa, Homo Sapiens
DIGWITGHSY

SEQ ID NO: 37410 - protein, 10 aa, Homo Sapiens
DIIDHHDNTY

SEQ ID NO: 37411 - protein, 10 aa, Homo Sapiens
DILDFAYTSR

SEQ ID NO: 37412 - protein, 10 aa, Homo Sapiens
DISPVDNHRY

SEQ ID NO: 37413 - protein, 10 aa, Homo Sapiens
DIVAAIQHNY

SEQ ID NO: 37414 - protein, 10 aa, Homo Sapiens
DIYESPNHLY

SEQ ID NO: 37415 - protein, 10 aa, Homo Sapiens
DIYGGDYERF

SEQ ID NO: 37416 - protein, 10 aa, Homo Sapiens
DIYNFPIHAF

SEQ ID NO: 37417 - protein, 10 aa, Homo Sapiens
DLIGDFSKGY

SEQ ID NO: 37418 - protein, 10 aa, Homo Sapiens
DLPDDLIGYF

SEQ ID NO: 37419 - protein, 10 aa, Homo Sapiens
DLYAGMLHSM

SEQ ID NO: 37420 - protein, 10 aa, Homo Sapiens
DSFPMEIRQY

SEQ ID NO: 37421 - protein, 10 aa, Homo Sapiens
DSHEPTYGIY

SEQ ID NO: 37422 - protein, 10 aa, Homo Sapiens
DSHPFDLGLY

SEQ ID NO: 37423 - protein, 10 aa, Homo Sapiens
DSIGEKLGRY

SEQ ID NO: 37424 - protein, 10 aa, Homo Sapiens
DTAPSGVSRF

SEQ ID NO: 37425 - protein, 10 aa, Homo Sapiens
DTFIGEGKEY

SEQ ID NO: 37426 - protein, 10 aa, Homo Sapiens
DTIEEKFVPY

SEQ ID NO: 37427 - protein, 10 aa, Homo Sapiens
DTIGYLLTRY

SEQ ID NO: 37428 - protein, 10 aa, Homo Sapiens
DTPGHVDFSY

SEQ ID NO: 37429 - protein, 10 aa, Homo Sapiens
DTTAINKSYY

SEQ ID NO: 37430 - protein, 10 aa, Homo Sapiens
DTYASTIGHY

SEQ ID NO: 37431 - protein, 10 aa, Homo Sapiens
DTYCEDLTKY

SEQ ID NO: 37432 - protein, 10 aa, Homo Sapiens
DTYPEESRSY

SEQ ID NO: 37433 - protein, 10 aa, Homo Sapiens
DVFEEPMSGM

SEQ ID NO: 37434 - protein, 10 aa, Homo Sapiens
DVFNEKGWNY

SEQ ID NO: 37435 - protein, 10 aa, Homo Sapiens
DVIAQGIGKL

SEQ ID NO: 37436 - protein, 10 aa, Homo Sapiens
DVIDHDDFRY

SEQ ID NO: 37437 - protein, 10 aa, Homo Sapiens
DVIPVDGARY

SEQ ID NO: 37438 - protein, 10 aa, Homo Sapiens
DVITIIDRSF

SEQ ID NO: 37439 - protein, 10 aa, Homo Sapiens
DVKDGKYSQV

SEQ ID NO: 37440 - protein, 10 aa, Homo Sapiens
DVKGGTLTQY

SEQ ID NO: 37441 - protein, 10 aa, Homo Sapiens
DVMTALSQGY

SEQ ID NO: 37442 - protein, 10 aa, Homo Sapiens
DVPENNQHGY

SEQ ID NO: 37443 - protein, 10 aa, Homo Sapiens
DVPSFGPACY

SEQ ID NO: 37444 - protein, 10 aa, Homo Sapiens
DVTDFISHLF

SEQ ID NO: 37445 - protein, 10 aa, Homo Sapiens
DVVDEKISAM

SEQ ID NO: 37446 - protein, 10 aa, Homo Sapiens
DVVEKTIQKY

SEQ ID NO: 37447 - protein, 10 aa, Homo Sapiens
DVVKEIFFHY

SEQ ID NO: 37448 - protein, 10 aa, Homo Sapiens
DVYAKLLHRY

SEQ ID NO: 37449 - protein, 10 aa, Homo Sapiens
DVYENLYAGR

SEQ ID NO: 37450 - protein, 10 aa, Homo Sapiens
DVYGFKMSCM

SEQ ID NO: 37451 - protein, 10 aa, Homo Sapiens
DVYGGTNRYF

SEQ ID NO: 37452 - protein, 10 aa, Homo Sapiens
DVYNHFLLYY

SEQ ID NO: 37453 - protein, 10 aa, Homo Sapiens
DVYPEIIERA

SEQ ID NO: 37454 - protein, 10 aa, Homo Sapiens
DVYSGTPTKV

SEQ ID NO: 37455 - protein, 10 aa, Homo Sapiens
DVYTHVLSAF

SEQ ID NO: 37456 - protein, 10 aa, Homo Sapiens
EAFGQKIGHF

SEQ ID NO: 37457 - protein, 10 aa, Homo Sapiens
EAFPEKIPLF

SEQ ID NO: 37458 - protein, 10 aa, Homo Sapiens
EAFQTTISKY

SEQ ID NO: 37459 - protein, 10 aa, Homo Sapiens
EAFTEMMEAY

SEQ ID NO: 37460 - protein, 10 aa, Homo Sapiens
EAIDSEGHSY

SEQ ID NO: 37461 - protein, 10 aa, Homo Sapiens
EAIKILKGEY

SEQ ID NO: 37462 - protein, 10 aa, Homo Sapiens
EAIYVTRHLF

SEQ ID NO: 37463 - protein, 10 aa, Homo Sapiens
EALNKQIMEY

SEQ ID NO: 37464 - protein, 10 aa, Homo Sapiens
EAMSGHIDQF

SEQ ID NO: 37465 - protein, 10 aa, Homo Sapiens
EAVCEVALDY

SEQ ID NO: 37466 - protein, 10 aa, Homo Sapiens
EAVTHIGRVY

SEQ ID NO: 37467 - protein, 10 aa, Homo Sapiens
EAYNSLMKSY

SEQ ID NO: 37468 - protein, 10 aa, Homo Sapiens
EAYPLPGVTY

SEQ ID NO: 37469 - protein, 10 aa, Homo Sapiens
EAYSAKIALF

SEQ ID NO: 37470 - protein, 10 aa, Homo Sapiens
EAYTQLLTEM

SEQ ID NO: 37471 - protein, 10 aa, Homo Sapiens
EIADQVSREY

SEQ ID NO: 37472 - protein, 10 aa, Homo Sapiens
EIASFECSGY

SEQ ID NO: 37473 - protein, 10 aa, Homo Sapiens
EIATTFEHYY

SEQ ID NO: 37474 - protein, 10 aa, Homo Sapiens
EIFDGIQPKM

SEQ ID NO: 37475 - protein, 10 aa, Homo Sapiens
EIFDGNVAHI

SEQ ID NO: 37476 - protein, 10 aa, Homo Sapiens
EIFNPDIGMF

SEQ ID NO: 37477 - protein, 10 aa, Homo Sapiens
EIFPGNGHCY

SEQ ID NO: 37478 - protein, 10 aa, Homo Sapiens
EIFPLETPAF

SEQ ID NO: 37479 - protein, 10 aa, Homo Sapiens
EIIEHGIELF

SEQ ID NO: 37480 - protein, 10 aa, Homo Sapiens
EIIETGLAAF

SEQ ID NO: 37481 - protein, 10 aa, Homo Sapiens
EIIGRDLSGF

SEQ ID NO: 37482 - protein, 10 aa, Homo Sapiens
EIIQIDGHIY

SEQ ID NO: 37483 - protein, 10 aa, Homo Sapiens
EIITNQIPKY

SEQ ID NO: 37484 - protein, 10 aa, Homo Sapiens
EIKPEMIGHY

SEQ ID NO: 37485 - protein, 10 aa, Homo Sapiens
EILEKSFSEF

SEQ ID NO: 37486 - protein, 10 aa, Homo Sapiens
EIMDRAYDSF

SEQ ID NO: 37487 - protein, 10 aa, Homo Sapiens
EIMEHRFKTY

SEQ ID NO: 37488 - protein, 10 aa, Homo Sapiens
EIPETVSLEM

SEQ ID NO: 37489 - protein, 10 aa, Homo Sapiens
EIVEGENHTY

SEQ ID NO: 37490 - protein, 10 aa, Homo Sapiens
EIVPFRVAAY

SEQ ID NO: 37491 - protein, 10 aa, Homo Sapiens
EIVSTPRLQY

SEQ ID NO: 37492 - protein, 10 aa, Homo Sapiens
EIYGGSDSRF

SEQ ID NO: 37493 - protein, 10 aa, Homo Sapiens
EIYPPEVAEF

SEQ ID NO: 37494 - protein, 10 aa, Homo Sapiens
EIYPPKLHQF

SEQ ID NO: 37495 - protein, 10 aa, Homo Sapiens
EIYQYVLNSM

SEQ ID NO: 37496 - protein, 10 aa, Homo Sapiens
EIYTRDGNSY

SEQ ID NO: 37497 - protein, 10 aa, Homo Sapiens
ELFHGSYGTF

SEQ ID NO: 37498 - protein, 10 aa, Homo Sapiens
ELFHKDIEAF

SEQ ID NO: 37499 - protein, 10 aa, Homo Sapiens
ELIGRPIGEF

SEQ ID NO: 37500 - protein, 10 aa, Homo Sapiens
ELIQAKVGSF

SEQ ID NO: 37501 - protein, 10 aa, Homo Sapiens
ELMHSIVGSY

SEQ ID NO: 37502 - protein, 10 aa, Homo Sapiens
ELMYGGVSSY

SEQ ID NO: 37503 - protein, 10 aa, Homo Sapiens
ELPSVNIGAF

SEQ ID NO: 37504 - protein, 10 aa, Homo Sapiens
ELVTGTVRTF

SEQ ID NO: 37505 - protein, 10 aa, Homo Sapiens
ELYERPPHLY

SEQ ID NO: 37506 - protein, 10 aa, Homo Sapiens
ELYNRMLKRF

SEQ ID NO: 37507 - protein, 10 aa, Homo Sapiens
ELYPKQIRAM

SEQ ID NO: 37508 - protein, 10 aa, Homo Sapiens
ENMWNTGSTY

SEQ ID NO: 37509 - protein, 10 aa, Homo Sapiens
ESAGIHETTY

SEQ ID NO: 37510 - protein, 10 aa, Homo Sapiens
ESAPKEVSRY

SEQ ID NO: 37511 - protein, 10 aa, Homo Sapiens
ESIGQRIACY

SEQ ID NO: 37512 - protein, 10 aa, Homo Sapiens
ESIWEILHRY

SEQ ID NO: 37513 - protein, 10 aa, Homo Sapiens
ESYENDIASM

SEQ ID NO: 37514 - protein, 10 aa, Homo Sapiens
ETANITPSVY

SEQ ID NO: 37515 - protein, 10 aa, Homo Sapiens
ETAPRHMMRL

SEQ ID NO: 37516 - protein, 10 aa, Homo Sapiens
ETASELLMRL

SEQ ID NO: 37517 - protein, 10 aa, Homo Sapiens
ETASKTLSRF

SEQ ID NO: 37518 - protein, 10 aa, Homo Sapiens
ETCGDWYRGY

SEQ ID NO: 37519 - protein, 10 aa, Homo Sapiens
ETCHSVGAAY

SEQ ID NO: 37520 - protein, 10 aa, Homo Sapiens
ETFDAGLQAF

SEQ ID NO: 37521 - protein, 10 aa, Homo Sapiens
ETFDFQAMGR

SEQ ID NO: 37522 - protein, 10 aa, Homo Sapiens
ETFDGVIYGF

SEQ ID NO: 37523 - protein, 10 aa, Homo Sapiens
ETFDLQLGRF

SEQ ID NO: 37524 - protein, 10 aa, Homo Sapiens
ETFGEASQKY

SEQ ID NO: 37525 - protein, 10 aa, Homo Sapiens
ETFGFEIQSY

SEQ ID NO: 37526 - protein, 10 aa, Homo Sapiens
ETFKEQGNAY

SEQ ID NO: 37527 - protein, 10 aa, Homo Sapiens
ETFPEAYKPT

SEQ ID NO: 37528 - protein, 10 aa, Homo Sapiens
ETFPGVTALF

SEQ ID NO: 37529 - protein, 10 aa, Homo Sapiens
ETFQQKMLRF

SEQ ID NO: 37530 - protein, 10 aa, Homo Sapiens
ETFSGVYKKL

SEQ ID NO: 37531 - protein, 10 aa, Homo Sapiens
ETHQPIVETY

SEQ ID NO: 37532 - protein, 10 aa, Homo Sapiens
ETICKRLLDY

SEQ ID NO: 37533 - protein, 10 aa, Homo Sapiens
ETIDSRVQEY

SEQ ID NO: 37534 - protein, 10 aa, Homo Sapiens
ETIDTARLHY

SEQ ID NO: 37535 - protein, 10 aa, Homo Sapiens
ETIHIRGGVF

SEQ ID NO: 37536 - protein, 10 aa, Homo Sapiens
ETIKDGVSRF

SEQ ID NO: 37537 - protein, 10 aa, Homo Sapiens
ETIPDGIGKL

SEQ ID NO: 37538 - protein, 10 aa, Homo Sapiens
ETIREVCTKY

SEQ ID NO: 37539 - protein, 10 aa, Homo Sapiens
ETIYDLGTKM

SEQ ID NO: 37540 - protein, 10 aa, Homo Sapiens
ETKEPSMMEY

SEQ ID NO: 37541 - protein, 10 aa, Homo Sapiens
ETLETEKAQY

SEQ ID NO: 37542 - protein, 10 aa, Homo Sapiens
ETMKILGSLY

SEQ ID NO: 37543 - protein, 10 aa, Homo Sapiens
ETMSPGVFSR

SEQ ID NO: 37544 - protein, 10 aa, Homo Sapiens
ETMTEKLVKF

SEQ ID NO: 37545 - protein, 10 aa, Homo Sapiens
ETPFFLLTGY

SEQ ID NO: 37546 - protein, 10 aa, Homo Sapiens
ETPNRVMLDY

SEQ ID NO: 37547 - protein, 10 aa, Homo Sapiens
ETQTDSISRY

SEQ ID NO: 37548 - protein, 10 aa, Homo Sapiens
ETRDGQVLGR

SEQ ID NO: 37549 - protein, 10 aa, Homo Sapiens
ETRPAGDGTF

SEQ ID NO: 37550 - protein, 10 aa, Homo Sapiens
ETSADNQHYY

SEQ ID NO: 37551 - protein, 10 aa, Homo Sapiens
ETVGTGIMGR

SEQ ID NO: 37552 - protein, 10 aa, Homo Sapiens
ETVLYIEHRY

SEQ ID NO: 37553 - protein, 10 aa, Homo Sapiens
ETVNHHYLLF

SEQ ID NO: 37554 - protein, 10 aa, Homo Sapiens
ETVNLRSLGF

SEQ ID NO: 37555 - protein, 10 aa, Homo Sapiens
ETVRTLNNLY

SEQ ID NO: 37556 - protein, 10 aa, Homo Sapiens
ETYEAKRHEF

SEQ ID NO: 37557 - protein, 10 aa, Homo Sapiens
ETYEALLARF

SEQ ID NO: 37558 - protein, 10 aa, Homo Sapiens
ETYGNKFAAH

SEQ ID NO: 37559 - protein, 10 aa, Homo Sapiens
ETYKEAQAAM

SEQ ID NO: 37560 - protein, 10 aa, Homo Sapiens
ETYNGHLVSC

SEQ ID NO: 37561 - protein, 10 aa, Homo Sapiens
ETYPFNPPKY

SEQ ID NO: 37562 - protein, 10 aa, Homo Sapiens
ETYPNYLPLY

SEQ ID NO: 37563 - protein, 10 aa, Homo Sapiens
ETYPSNILSH

SEQ ID NO: 37564 - protein, 10 aa, Homo Sapiens
ETYQDIFRDF

SEQ ID NO: 37565 - protein, 10 aa, Homo Sapiens
ETYRMPVMEY

SEQ ID NO: 37566 - protein, 10 aa, Homo Sapiens
EVAAPDVGRM

SEQ ID NO: 37567 - protein, 10 aa, Homo Sapiens
EVADELVSEF

SEQ ID NO: 37568 - protein, 10 aa, Homo Sapiens
EVADRIGDYV

SEQ ID NO: 37569 - protein, 10 aa, Homo Sapiens
EVADRLFSSF

SEQ ID NO: 37570 - protein, 10 aa, Homo Sapiens
EVADVLVDGY

SEQ ID NO: 37571 - protein, 10 aa, Homo Sapiens
EVAEVKISHF

SEQ ID NO: 37572 - protein, 10 aa, Homo Sapiens
EVAGIINDAK

SEQ ID NO: 37573 - protein, 10 aa, Homo Sapiens
EVAGIKFWCY

SEQ ID NO: 37574 - protein, 10 aa, Homo Sapiens
EVANKVGGIY

SEQ ID NO: 37575 - protein, 10 aa, Homo Sapiens
EVAPCMGDRF

SEQ ID NO: 37576 - protein, 10 aa, Homo Sapiens
EVAPDFFEYF

SEQ ID NO: 37577 - protein, 10 aa, Homo Sapiens
EVAPENFFSL

SEQ ID NO: 37578 - protein, 10 aa, Homo Sapiens
EVAPGALLGL

SEQ ID NO: 37579 - protein, 10 aa, Homo Sapiens
EVAPPEYHRK

SEQ ID NO: 37580 - protein, 10 aa, Homo Sapiens
EVAPVISSAY

SEQ ID NO: 37581 - protein, 10 aa, Homo Sapiens
EVAQHLAATY

SEQ ID NO: 37582 - protein, 10 aa, Homo Sapiens
EVAQKCGLSY

SEQ ID NO: 37583 - protein, 10 aa, Homo Sapiens
EVAQVESLRY

SEQ ID NO: 37584 - protein, 10 aa, Homo Sapiens
EVASAVCLRL

SEQ ID NO: 37585 - protein, 10 aa, Homo Sapiens
EVASGMILVM

SEQ ID NO: 37586 - protein, 10 aa, Homo Sapiens
EVATDHKAFY

SEQ ID NO: 37587 - protein, 10 aa, Homo Sapiens
EVCPLSESRF

SEQ ID NO: 37588 - protein, 10 aa, Homo Sapiens
EVCQSYKSLY

SEQ ID NO: 37589 - protein, 10 aa, Homo Sapiens
EVCRIPTHLF

SEQ ID NO: 37590 - protein, 10 aa, Homo Sapiens
EVFANRFTQM

SEQ ID NO: 37591 - protein, 10 aa, Homo Sapiens
EVFDHMMKRM

SEQ ID NO: 37592 - protein, 10 aa, Homo Sapiens
EVFDKDLSKL

SEQ ID NO: 37593 - protein, 10 aa, Homo Sapiens
EVFDKTYQFL

SEQ ID NO: 37594 - protein, 10 aa, Homo Sapiens
EVFDSAILSA

SEQ ID NO: 37595 - protein, 10 aa, Homo Sapiens
EVFDYSYRDY

SEQ ID NO: 37596 - protein, 10 aa, Homo Sapiens
EVFETIIHSY

SEQ ID NO: 37597 - protein, 10 aa, Homo Sapiens
EVFHDQLHTF

SEQ ID NO: 37598 - protein, 10 aa, Homo Sapiens
EVFIHKDKGF

SEQ ID NO: 37599 - protein, 10 aa, Homo Sapiens
EVFMHVSTAY

SEQ ID NO: 37600 - protein, 10 aa, Homo Sapiens
EVFNGPLPRA

SEQ ID NO: 37601 - protein, 10 aa, Homo Sapiens
EVFNHREVNY

SEQ ID NO: 37602 - protein, 10 aa, Homo Sapiens
EVFNKFFKER

SEQ ID NO: 37603 - protein, 10 aa, Homo Sapiens
EVFPDSPGAY

SEQ ID NO: 37604 - protein, 10 aa, Homo Sapiens
EVFPEHLARF

SEQ ID NO: 37605 - protein, 10 aa, Homo Sapiens
EVFPKEMTKW

SEQ ID NO: 37606 - protein, 10 aa, Homo Sapiens
EVFPLAMNYL

SEQ ID NO: 37607 - protein, 10 aa, Homo Sapiens
EVFPLKVFGY

SEQ ID NO: 37608 - protein, 10 aa, Homo Sapiens
EVFQTKIQEF

SEQ ID NO: 37609 - protein, 10 aa, Homo Sapiens
EVFRKEMSQF

SEQ ID NO: 37610 - protein, 10 aa, Homo Sapiens
EVFSFKMVSY

SEQ ID NO: 37611 - protein, 10 aa, Homo Sapiens
EVFTGGIGSY

SEQ ID NO: 37612 - protein, 10 aa, Homo Sapiens
EVFTGGISSY

SEQ ID NO: 37613 - protein, 10 aa, Homo Sapiens
EVFTGHMGKL

SEQ ID NO: 37614 - protein, 10 aa, Homo Sapiens
EVGGEALGRL

SEQ ID NO: 37615 - protein, 10 aa, Homo Sapiens
EVGPEGALGK

SEQ ID NO: 37616 - protein, 10 aa, Homo Sapiens
EVHNLNQLLY

SEQ ID NO: 37617 - protein, 10 aa, Homo Sapiens
EVHRFGITGY

SEQ ID NO: 37618 - protein, 10 aa, Homo Sapiens
EVIAHCGMHY

SEQ ID NO: 37619 - protein, 10 aa, Homo Sapiens
EVIASIISRY

SEQ ID NO: 37620 - protein, 10 aa, Homo Sapiens
EVIDHKLTER

SEQ ID NO: 37621 - protein, 10 aa, Homo Sapiens
EVIDLMIKEY

SEQ ID NO: 37622 - protein, 10 aa, Homo Sapiens
EVIDTQTKLY

SEQ ID NO: 37623 - protein, 10 aa, Homo Sapiens
EVIEALLRKF

SEQ ID NO: 37624 - protein, 10 aa, Homo Sapiens
EVIEDEKQFY

SEQ ID NO: 37625 - protein, 10 aa, Homo Sapiens
EVIEKKPEKF

SEQ ID NO: 37626 - protein, 10 aa, Homo Sapiens
EVIESTNLKY

SEQ ID NO: 37627 - protein, 10 aa, Homo Sapiens
EVIETEKTLY

SEQ ID NO: 37628 - protein, 10 aa, Homo Sapiens
EVIGLLGGRY

SEQ ID NO: 37629 - protein, 10 aa, Homo Sapiens
EVIGQVLSTL

SEQ ID NO: 37630 - protein, 10 aa, Homo Sapiens
EVIHLEAGGY

SEQ ID NO: 37631 - protein, 10 aa, Homo Sapiens
EVINGNIKTV

SEQ ID NO: 37632 - protein, 10 aa, Homo Sapiens
EVINKLGPRY

SEQ ID NO: 37633 - protein, 10 aa, Homo Sapiens
EVINRSMDTY

SEQ ID NO: 37634 - protein, 10 aa, Homo Sapiens
EVIPENTVIY

SEQ ID NO: 37635 - protein, 10 aa, Homo Sapiens
EVIQGLLKKF

SEQ ID NO: 37636 - protein, 10 aa, Homo Sapiens
EVIQNLERGY

SEQ ID NO: 37637 - protein, 10 aa, Homo Sapiens
EVISGKGQFF

SEQ ID NO: 37638 - protein, 10 aa, Homo Sapiens
EVISNEGGRF

SEQ ID NO: 37639 - protein, 10 aa, Homo Sapiens
EVISPSPHFY

SEQ ID NO: 37640 - protein, 10 aa, Homo Sapiens
EVISQHLVSY

SEQ ID NO: 37641 - protein, 10 aa, Homo Sapiens
EVISTLLEKM

SEQ ID NO: 37642 - protein, 10 aa, Homo Sapiens
EVITHELQDF

SEQ ID NO: 37643 - protein, 10 aa, Homo Sapiens
EVLAGHGHLY

SEQ ID NO: 37644 - protein, 10 aa, Homo Sapiens
EVLDFITHLY

SEQ ID NO: 37645 - protein, 10 aa, Homo Sapiens
EVLDSLLVQY

SEQ ID NO: 37646 - protein, 10 aa, Homo Sapiens
EVLEVDNVKY

SEQ ID NO: 37647 - protein, 10 aa, Homo Sapiens
EVLPAALAVY

SEQ ID NO: 37648 - protein, 10 aa, Homo Sapiens
EVLPHVPLGV

SEQ ID NO: 37649 - protein, 10 aa, Homo Sapiens
EVMNQNLAYY

SEQ ID NO: 37650 - protein, 10 aa, Homo Sapiens
EVPREKLASR

SEQ ID NO: 37651 - protein, 10 aa, Homo Sapiens
EVPRIQLEEY

SEQ ID NO: 37652 - protein, 10 aa, Homo Sapiens
EVPSFLVERM

SEQ ID NO: 37653 - protein, 10 aa, Homo Sapiens
EVPTQLVSYF

SEQ ID NO: 37654 - protein, 10 aa, Homo Sapiens
EVRGGGLTRY

SEQ ID NO: 37655 - protein, 10 aa, Homo Sapiens
EVSEIKSSYY

SEQ ID NO: 37656 - protein, 10 aa, Homo Sapiens
EVSSMVLTKM

SEQ ID NO: 37657 - protein, 10 aa, Homo Sapiens
EVTGHTDHYF

SEQ ID NO: 37658 - protein, 10 aa, Homo Sapiens
EVTTHILSQF

SEQ ID NO: 37659 - protein, 10 aa, Homo Sapiens
EVVAGEFGSR

SEQ ID NO: 37660 - protein, 10 aa, Homo Sapiens
EVVAGIKEYF

SEQ ID NO: 37661 - protein, 10 aa, Homo Sapiens
EVVAIKKMSY

SEQ ID NO: 37662 - protein, 10 aa, Homo Sapiens
EVVAVAHAVY

SEQ ID NO: 37663 - protein, 10 aa, Homo Sapiens
EVVDCHLSDM

SEQ ID NO: 37664 - protein, 10 aa, Homo Sapiens
EVVDFIQSKI

SEQ ID NO: 37665 - protein, 10 aa, Homo Sapiens
EVVDKKIEEF

SEQ ID NO: 37666 - protein, 10 aa, Homo Sapiens
EVVERILFIY

SEQ ID NO: 37667 - protein, 10 aa, Homo Sapiens
EVVGEQVTSY

SEQ ID NO: 37668 - protein, 10 aa, Homo Sapiens
EVVSEPFRSF

SEQ ID NO: 37669 - protein, 10 aa, Homo Sapiens
EVVSGVVSKV

SEQ ID NO: 37670 - protein, 10 aa, Homo Sapiens
EVVTGVIGQR

SEQ ID NO: 37671 - protein, 10 aa, Homo Sapiens
EVVWPGVTSM

SEQ ID NO: 37672 - protein, 10 aa, Homo Sapiens
EVYAGDICAL

SEQ ID NO: 37673 - protein, 10 aa, Homo Sapiens
EVYAWAPKPY

SEQ ID NO: 37674 - protein, 10 aa, Homo Sapiens
EVYCDSMEQF

SEQ ID NO: 37675 - protein, 10 aa, Homo Sapiens
EVYDKICKAA

SEQ ID NO: 37676 - protein, 10 aa, Homo Sapiens
EVYDQLFKSR

SEQ ID NO: 37677 - protein, 10 aa, Homo Sapiens
EVYEGRFSLY

SEQ ID NO: 37678 - protein, 10 aa, Homo Sapiens
EVYEGVWKKY

SEQ ID NO: 37679 - protein, 10 aa, Homo Sapiens
EVYEGVYTNH

SEQ ID NO: 37680 - protein, 10 aa, Homo Sapiens
EVYGKNLTSS

SEQ ID NO: 37681 - protein, 10 aa, Homo Sapiens
EVYHSSLASL

SEQ ID NO: 37682 - protein, 10 aa, Homo Sapiens
EVYNEKIHDL

SEQ ID NO: 37683 - protein, 10 aa, Homo Sapiens
EVYNEQIHDL

SEQ ID NO: 37684 - protein, 10 aa, Homo Sapiens
EVYPFGIVGM

SEQ ID NO: 37685 - protein, 10 aa, Homo Sapiens
EVYPFQVAWY

SEQ ID NO: 37686 - protein, 10 aa, Homo Sapiens
EVYPGAKLFY

SEQ ID NO: 37687 - protein, 10 aa, Homo Sapiens
EVYRHHLEQM

SEQ ID NO: 37688 - protein, 10 aa, Homo Sapiens
EVYRLAIQSF

SEQ ID NO: 37689 - protein, 10 aa, Homo Sapiens
FTMDVIGGKY

SEQ ID NO: 37690 - protein, 10 aa, Homo Sapiens
FTPDGNHFLY

SEQ ID NO: 37691 - protein, 10 aa, Homo Sapiens
FTVETASREY

SEQ ID NO: 37692 - protein, 10 aa, Homo Sapiens
FTYDPWIGKL

SEQ ID NO: 37693 - protein, 10 aa, Homo Sapiens
FVAPVDLQAY

SEQ ID NO: 37694 - protein, 10 aa, Homo Sapiens
FVFDRPLPVS

SEQ ID NO: 37695 - protein, 10 aa, Homo Sapiens
FVHWYVGEGM

SEQ ID NO: 37696 - protein, 10 aa, Homo Sapiens
FVYEQKLNEY

SEQ ID NO: 37697 - protein, 10 aa, Homo Sapiens
FVYEVTSTKY

SEQ ID NO: 37698 - protein, 10 aa, Homo Sapiens
GTFEYEYSQR

SEQ ID NO: 37699 - protein, 10 aa, Homo Sapiens
GVIEKLLTSY

SEQ ID NO: 37700 - protein, 10 aa, Homo Sapiens
HGIDPTGTYH

SEQ ID NO: 37701 - protein, 10 aa, Homo Sapiens
HIATFNALGY

SEQ ID NO: 37702 - protein, 10 aa, Homo Sapiens
HTAEVNCLSF

SEQ ID NO: 37703 - protein, 10 aa, Homo Sapiens
HTFQNDIHVY

SEQ ID NO: 37704 - protein, 10 aa, Homo Sapiens
HTINGHNAEV

SEQ ID NO: 37705 - protein, 10 aa, Homo Sapiens
HTPENPVIRY

SEQ ID NO: 37706 - protein, 10 aa, Homo Sapiens
HTVDFTADKY

SEQ ID NO: 37707 - protein, 10 aa, Homo Sapiens
HVASCGVNLY

SEQ ID NO: 37708 - protein, 10 aa, Homo Sapiens
HVFTFGSRLY

SEQ ID NO: 37709 - protein, 10 aa, Homo Sapiens
HVISYSLSPF

SEQ ID NO: 37710 - protein, 10 aa, Homo Sapiens
HVITGLLEHY

SEQ ID NO: 37711 - protein, 10 aa, Homo Sapiens
HVKDANGNSF

SEQ ID NO: 37712 - protein, 10 aa, Homo Sapiens
HVPAGLLALF

SEQ ID NO: 37713 - protein, 10 aa, Homo Sapiens
HVPNFIFDEF

SEQ ID NO: 37714 - protein, 10 aa, Homo Sapiens
HVVDEHTGQY

SEQ ID NO: 37715 - protein, 10 aa, Homo Sapiens
HVYDGKFLAR

SEQ ID NO: 37716 - protein, 10 aa, Homo Sapiens
HVYQHGLTGF

SEQ ID NO: 37717 - protein, 10 aa, Homo Sapiens
IIGKRGIIGY

SEQ ID NO: 37718 - protein, 10 aa, Homo Sapiens
IVFDSEYCRY

SEQ ID NO: 37719 - protein, 10 aa, Homo Sapiens
LAADFEIGHF

SEQ ID NO: 37720 - protein, 10 aa, Homo Sapiens
LSNVSLDTIY

SEQ ID NO: 37721 - protein, 10 aa, Homo Sapiens
MTIEELLTRY

SEQ ID NO: 37722 - protein, 10 aa, Homo Sapiens
MVADVFSHRF

SEQ ID NO: 37723 - protein, 10 aa, Homo Sapiens
MVITPQNGRY

SEQ ID NO: 37724 - protein, 10 aa, Homo Sapiens
NLPDEIYHVY

SEQ ID NO: 37725 - protein, 10 aa, Homo Sapiens
NVIEQYIGRF

SEQ ID NO: 37726 - protein, 10 aa, Homo Sapiens
NVIEVDSAHY

SEQ ID NO: 37727 - protein, 10 aa, Homo Sapiens
NVSTVLTSKY

SEQ ID NO: 37728 - protein, 10 aa, Homo Sapiens
PENTVFDAKR

SEQ ID NO: 37729 - protein, 10 aa, Homo Sapiens
PKTAENFRQF

SEQ ID NO: 37730 - protein, 10 aa, Homo Sapiens
QIYGYEGRGS

SEQ ID NO: 37731 - protein, 10 aa, Homo Sapiens
QTIGALLTKY

SEQ ID NO: 37732 - protein, 10 aa, Homo Sapiens
QTPDFTPTKY

SEQ ID NO: 37733 - protein, 10 aa, Homo Sapiens
QVAEMLGHKY

SEQ ID NO: 37734 - protein, 10 aa, Homo Sapiens
RVPFIYGHKY

SEQ ID NO: 37735 - protein, 10 aa, Homo Sapiens
SAVEFRQTGY

SEQ ID NO: 37736 - protein, 10 aa, Homo Sapiens
SAVEKKLAEY

SEQ ID NO: 37737 - protein, 10 aa, Homo Sapiens
SSFDGIIAMM

SEQ ID NO: 37738 - protein, 10 aa, Homo Sapiens
STIGFKLPSY

SEQ ID NO: 37739 - protein, 10 aa, Homo Sapiens
STISGGYAEY

SEQ ID NO: 37740 - protein, 10 aa, Homo Sapiens
STVGGWVSTR

SEQ ID NO: 37741 - protein, 10 aa, Homo Sapiens
STYEKALGYF

SEQ ID NO: 37742 - protein, 10 aa, Homo Sapiens
SVADWKVMAF

SEQ ID NO: 37743 - protein, 10 aa, Homo Sapiens
SVAEITNACF

SEQ ID NO: 37744 - protein, 10 aa, Homo Sapiens
SVDRKFISLM

SEQ ID NO: 37745 - protein, 10 aa, Homo Sapiens
SVFGGAICRM

SEQ ID NO: 37746 - protein, 10 aa, Homo Sapiens
SVIDGRFEGF

SEQ ID NO: 37747 - protein, 10 aa, Homo Sapiens
SVIEKALRNF

SEQ ID NO: 37748 - protein, 10 aa, Homo Sapiens
SVIERQVGTF

SEQ ID NO: 37749 - protein, 10 aa, Homo Sapiens
SVISKDGELY

SEQ ID NO: 37750 - protein, 10 aa, Homo Sapiens
SVKDAKIAVY

SEQ ID NO: 37751 - protein, 10 aa, Homo Sapiens
SVPTQQGHLY

SEQ ID NO: 37752 - protein, 10 aa, Homo Sapiens
SVSTVLTSKY

SEQ ID NO: 37753 - protein, 10 aa, Homo Sapiens
SVVGGFVSHY

SEQ ID NO: 37754 - protein, 10 aa, Homo Sapiens
SVYEFQTPSY

SEQ ID NO: 37755 - protein, 10 aa, Homo Sapiens
TEPVSLFPEE

SEQ ID NO: 37756 - protein, 10 aa, Homo Sapiens
TISSNVASKA

SEQ ID NO: 37757 - protein, 10 aa, Homo Sapiens
TTISKSGGDY

SEQ ID NO: 37758 - protein, 10 aa, Homo Sapiens
TTKVGPNATY

SEQ ID NO: 37759 - protein, 10 aa, Homo Sapiens
TVAEITNACF

SEQ ID NO: 37760 - protein, 10 aa, Homo Sapiens
TVFDKLNHEY

SEQ ID NO: 37761 - protein, 10 aa, Homo Sapiens
TVIEEHLGKF

SEQ ID NO: 37762 - protein, 10 aa, Homo Sapiens
TVIEPLKGYY

SEQ ID NO: 37763 - protein, 10 aa, Homo Sapiens
TVYEEMMAKM

SEQ ID NO: 37764 - protein, 10 aa, Homo Sapiens
VGLSDELAKL

SEQ ID NO: 37765 - protein, 10 aa, Homo Sapiens
WSQHYHQGYY

SEQ ID NO: 37766 - protein, 10 aa, Homo Sapiens
WVFEHPETLY

SEQ ID NO: 37767 - protein, 10 aa, Homo Sapiens
YAADIFYSRY

SEQ ID NO: 37768 - protein, 10 aa, Homo Sapiens
YIFPSSISAM

SEQ ID NO: 37769 - protein, 10 aa, Homo Sapiens
YINPAKLTPY

SEQ ID NO: 37770 - protein, 10 aa, Homo Sapiens
YLPDFRFTPF

SEQ ID NO: 37771 - protein, 10 aa, Homo Sapiens
YNSDGYGGNY

SEQ ID NO: 37772 - protein, 10 aa, Homo Sapiens
YSKYYKTIDD

SEQ ID NO: 37773 - protein, 10 aa, Homo Sapiens
YTIHMGCHGY

SEQ ID NO: 37774 - protein, 10 aa, Homo Sapiens
YTYPENWRAF

SEQ ID NO: 37775 - protein, 10 aa, Homo Sapiens
YVFDGTNPPY

SEQ ID NO: 37776 - protein, 10 aa, Homo Sapiens
YVFEGKMLEA

SEQ ID NO: 37777 - protein, 10 aa, Homo Sapiens
YVHSFLSSGY

SEQ ID NO: 37778 - protein, 10 aa, Homo Sapiens
YVIEPHSMEF

SEQ ID NO: 37779 - protein, 10 aa, Homo Sapiens
YVNPANTHQF

SEQ ID NO: 37780 - protein, 11 aa, Homo Sapiens
AAYDEEIQHLY

SEQ ID NO: 37781 - protein, 11 aa, Homo Sapiens
CTIDEKRLAGY

SEQ ID NO: 37782 - protein, 11 aa, Homo Sapiens
CVINNQEMGFY

SEQ ID NO: 37783 - protein, 11 aa, Homo Sapiens
DAADKAAVVKF

SEQ ID NO: 37784 - protein, 11 aa, Homo Sapiens
DAASGSLLRAF

SEQ ID NO: 37785 - protein, 11 aa, Homo Sapiens
DAVKAKLISRM

SEQ ID NO: 37786 - protein, 11 aa, Homo Sapiens
DIINREKLLQY

SEQ ID NO: 37787 - protein, 11 aa, Homo Sapiens
DIPGEAMVKLY

SEQ ID NO: 37788 - protein, 11 aa, Homo Sapiens
DIPLFPVQTKY

SEQ ID NO: 37789 - protein, 11 aa, Homo Sapiens
DIQIKDAIGRY

SEQ ID NO: 37790 - protein, 11 aa, Homo Sapiens
DLLDWKYLGRY

SEQ ID NO: 37791 - protein, 11 aa, Homo Sapiens
DLPGMYPAHMY

SEQ ID NO: 37792 - protein, 11 aa, Homo Sapiens
DSFFGETSHNY

SEQ ID NO: 37793 - protein, 11 aa, Homo Sapiens
DSVDPHGFISY

SEQ ID NO: 37794 - protein, 11 aa, Homo Sapiens
DTATPDIKSHY

SEQ ID NO: 37795 - protein, 11 aa, Homo Sapiens
DTFGRPVIVAY

SEQ ID NO: 37796 - protein, 11 aa, Homo Sapiens
DTIDERAINKK

SEQ ID NO: 37797 - protein, 11 aa, Homo Sapiens
DTIDERTINKK

SEQ ID NO: 37798 - protein, 11 aa, Homo Sapiens
DTITETDLRNH

SEQ ID NO: 37799 - protein, 11 aa, Homo Sapiens
DTVDKIVVQKY

SEQ ID NO: 37800 - protein, 11 aa, Homo Sapiens
DTVTSAVMMQY

SEQ ID NO: 37801 - protein, 11 aa, Homo Sapiens
DTYDDRAYSSF

SEQ ID NO: 37802 - protein, 11 aa, Homo Sapiens
DVAALRGSRKF

SEQ ID NO: 37803 - protein, 11 aa, Homo Sapiens
DVAEGDLIEHF

SEQ ID NO: 37804 - protein, 11 aa, Homo Sapiens
DVAHSDLILHV

SEQ ID NO: 37805 - protein, 11 aa, Homo Sapiens
DVAPSTLLPSY

SEQ ID NO: 37806 - protein, 11 aa, Homo Sapiens
DVASGQVVRKF

SEQ ID NO: 37807 - protein, 11 aa, Homo Sapiens
DVASKGLGLVY

SEQ ID NO: 37808 - protein, 11 aa, Homo Sapiens
DVCSAQGVRGY

SEQ ID NO: 37809 - protein, 11 aa, Homo Sapiens
DVFPTKYGREF

SEQ ID NO: 37810 - protein, 11 aa, Homo Sapiens
DVFQQQTGGVY

SEQ ID NO: 37811 - protein, 11 aa, Homo Sapiens
DVFSEPRAIFY

SEQ ID NO: 37812 - protein, 11 aa, Homo Sapiens
DVIAEQSVSGY

SEQ ID NO: 37813 - protein, 11 aa, Homo Sapiens
DVIGVTKGKGY

SEQ ID NO: 37814 - protein, 11 aa, Homo Sapiens
DVMDSTTTQKY

SEQ ID NO: 37815 - protein, 11 aa, Homo Sapiens
DVPDGTLVTVM

SEQ ID NO: 37816 - protein, 11 aa, Homo Sapiens
DVPDGTVVTVM

SEQ ID NO: 37817 - protein, 11 aa, Homo Sapiens
DVVDSEALQVY

SEQ ID NO: 37818 - protein, 11 aa, Homo Sapiens
DVVGPEGMEKF

SEQ ID NO: 37819 - protein, 11 aa, Homo Sapiens
DVYGANLFHQY

SEQ ID NO: 37820 - protein, 11 aa, Homo Sapiens
EAAGSSLIGHL

SEQ ID NO: 37821 - protein, 11 aa, Homo Sapiens
EAAPEETRALY

SEQ ID NO: 37822 - protein, 11 aa, Homo Sapiens
EAAPGPRVLGF

SEQ ID NO: 37823 - protein, 11 aa, Homo Sapiens
EAAPGTIRGDF

SEQ ID NO: 37824 - protein, 11 aa, Homo Sapiens
EAFDELLASKY

SEQ ID NO: 37825 - protein, 11 aa, Homo Sapiens
EAICPEGIARL

SEQ ID NO: 37826 - protein, 11 aa, Homo Sapiens
EAIGIISKMMY

SEQ ID NO: 37827 - protein, 11 aa, Homo Sapiens
EAIGNEVTRLV

SEQ ID NO: 37828 - protein, 11 aa, Homo Sapiens
EAVDGHTVSIF

SEQ ID NO: 37829 - protein, 11 aa, Homo Sapiens
EIAPHFAVNHF

SEQ ID NO: 37830 - protein, 11 aa, Homo Sapiens
EIIDNIKGTEY

SEQ ID NO: 37831 - protein, 11 aa, Homo Sapiens
EIIGKRGIIGY

SEQ ID NO: 37832 - protein, 11 aa, Homo Sapiens
EIITADEVHYF

SEQ ID NO: 37833 - protein, 11 aa, Homo Sapiens
EIPAANLVNKY

SEQ ID NO: 37834 - protein, 11 aa, Homo Sapiens
EIYDRREYSRF

SEQ ID NO: 37835 - protein, 11 aa, Homo Sapiens
ELIGNLVGHLY

SEQ ID NO: 37836 - protein, 11 aa, Homo Sapiens
ELVDAFVEHRY

SEQ ID NO: 37837 - protein, 11 aa, Homo Sapiens
ELYPYGELGHY

SEQ ID NO: 37838 - protein, 11 aa, Homo Sapiens
ETADTLMGLRY

SEQ ID NO: 37839 - protein, 11 aa, Homo Sapiens
ETAMVTADSKY

SEQ ID NO: 37840 - protein, 11 aa, Homo Sapiens
ETANADIVTLL

SEQ ID NO: 37841 - protein, 11 aa, Homo Sapiens
ETAPAKLIVYL

SEQ ID NO: 37842 - protein, 11 aa, Homo Sapiens
ETCSIALVGKY

SEQ ID NO: 37843 - protein, 11 aa, Homo Sapiens
ETFGGFDSHQM

SEQ ID NO: 37844 - protein, 11 aa, Homo Sapiens
ETFGHLGALGF

SEQ ID NO: 37845 - protein, 11 aa, Homo Sapiens
ETFKEQGNAYY

SEQ ID NO: 37846 - protein, 11 aa, Homo Sapiens
ETFPANIQVVY

SEQ ID NO: 37847 - protein, 11 aa, Homo Sapiens
ETFPDAKGWIF

SEQ ID NO: 37848 - protein, 11 aa, Homo Sapiens
ETIDVHSGYDI

SEQ ID NO: 37849 - protein, 11 aa, Homo Sapiens
ETIGRDLHRQF

SEQ ID NO: 37850 - protein, 11 aa, Homo Sapiens
ETIGTGGFAKV

SEQ ID NO: 37851 - protein, 11 aa, Homo Sapiens
ETIHIRGGVFS

SEQ ID NO: 37852 - protein, 11 aa, Homo Sapiens
ETITQLNLSGY

SEQ ID NO: 37853 - protein, 11 aa, Homo Sapiens
ETIVLKEGSEY

SEQ ID NO: 37854 - protein, 11 aa, Homo Sapiens
ETLPEQLCVFY

SEQ ID NO: 37855 - protein, 11 aa, Homo Sapiens
ETMHTLLDYTY

SEQ ID NO: 37856 - protein, 11 aa, Homo Sapiens
ETSPAPIPNGF

SEQ ID NO: 37857 - protein, 11 aa, Homo Sapiens
ETTEESLRNYY

SEQ ID NO: 37858 - protein, 11 aa, Homo Sapiens
ETTSHLMGMFY

SEQ ID NO: 37859 - protein, 11 aa, Homo Sapiens
ETVDEIVKSGY

SEQ ID NO: 37860 - protein, 11 aa, Homo Sapiens
ETVDPASLWEY

SEQ ID NO: 37861 - protein, 11 aa, Homo Sapiens
ETVGEEDIRLF

SEQ ID NO: 37862 - protein, 11 aa, Homo Sapiens
ETVGTGIMGKM

SEQ ID NO: 37863 - protein, 11 aa, Homo Sapiens
ETVGTGIMGRM

SEQ ID NO: 37864 - protein, 11 aa, Homo Sapiens
EVADEKMLSGL

SEQ ID NO: 37865 - protein, 11 aa, Homo Sapiens
EVAPAKDVTLL

SEQ ID NO: 37866 - protein, 11 aa, Homo Sapiens
EVAPGYVVTVL

SEQ ID NO: 37867 - protein, 11 aa, Homo Sapiens
EVAPHHLFLSH

SEQ ID NO: 37868 - protein, 11 aa, Homo Sapiens
EVAPMLKAREY

SEQ ID NO: 37869 - protein, 11 aa, Homo Sapiens
EVASAKQSVKY

SEQ ID NO: 37870 - protein, 11 aa, Homo Sapiens
EVFDPSPQGKY

SEQ ID NO: 37871 - protein, 11 aa, Homo Sapiens
EVGGEALGRLL

SEQ ID NO: 37872 - protein, 11 aa, Homo Sapiens
EVIAHCGMHYF

SEQ ID NO: 37873 - protein, 11 aa, Homo Sapiens
EVIDEGWWRGY

SEQ ID NO: 37874 - protein, 11 aa, Homo Sapiens
EVIDFSHGLAM

SEQ ID NO: 37875 - protein, 11 aa, Homo Sapiens
EVIDVFEIMKA

SEQ ID NO: 37876 - protein, 11 aa, Homo Sapiens
EVIESTNLKYF

SEQ ID NO: 37877 - protein, 11 aa, Homo Sapiens
EVIGVLAQSKF

SEQ ID NO: 37878 - protein, 11 aa, Homo Sapiens
EVIPYTPAMQR

SEQ ID NO: 37879 - protein, 11 aa, Homo Sapiens
EVIRKGSITEY

SEQ ID NO: 37880 - protein, 11 aa, Homo Sapiens
EVISGEKVTFY

SEQ ID NO: 37881 - protein, 11 aa, Homo Sapiens
EVITDTGVVCH

SEQ ID NO: 37882 - protein, 11 aa, Homo Sapiens
EVIWSHAIQKY

SEQ ID NO: 37883 - protein, 11 aa, Homo Sapiens
EVKEDDGKGNF

SEQ ID NO: 37884 - protein, 11 aa, Homo Sapiens
EVKEDIGVGSY

SEQ ID NO: 37885 - protein, 11 aa, Homo Sapiens
EVLSECRLLAY

SEQ ID NO: 37886 - protein, 11 aa, Homo Sapiens
EVLTCLGIHLY

SEQ ID NO: 37887 - protein, 11 aa, Homo Sapiens
EVMDEFDGRSF

SEQ ID NO: 37888 - protein, 11 aa, Homo Sapiens
EVNDARRIGKY

SEQ ID NO: 37889 - protein, 11 aa, Homo Sapiens
EVNVAKSIAKF

SEQ ID NO: 37890 - protein, 11 aa, Homo Sapiens
EVPDDETVNQM

SEQ ID NO: 37891 - protein, 11 aa, Homo Sapiens
EVPDPNVVPHY

SEQ ID NO: 37892 - protein, 11 aa, Homo Sapiens
EVPHFHHELVY

SEQ ID NO: 37893 - protein, 11 aa, Homo Sapiens
EVPPPTVPMDY

SEQ ID NO: 37894 - protein, 11 aa, Homo Sapiens
EVPSWLENMAY

SEQ ID NO: 37895 - protein, 11 aa, Homo Sapiens
EVRQAMGMLAF

SEQ ID NO: 37896 - protein, 11 aa, Homo Sapiens
EVTDEDTVKRY

SEQ ID NO: 37897 - protein, 11 aa, Homo Sapiens
EVVDARLVSVF

SEQ ID NO: 37898 - protein, 11 aa, Homo Sapiens
EVVDGLEKAIY

SEQ ID NO: 37899 - protein, 11 aa, Homo Sapiens
EVVDLFRAYDA

SEQ ID NO: 37900 - protein, 11 aa, Homo Sapiens
EVVGNMAVSRY

SEQ ID NO: 37901 - protein, 11 aa, Homo Sapiens
EVVGPEGMEKF

SEQ ID NO: 37902 - protein, 11 aa, Homo Sapiens
EVVGVTGVVHM

SEQ ID NO: 37903 - protein, 11 aa, Homo Sapiens
EVVNKDVLDVY

SEQ ID NO: 37904 - protein, 11 aa, Homo Sapiens
EVVQKLKFGVY

SEQ ID NO: 37905 - protein, 11 aa, Homo Sapiens
EVVTEGLLNTY

SEQ ID NO: 37906 - protein, 11 aa, Homo Sapiens
EVVTGVIGQRM

SEQ ID NO: 37907 - protein, 11 aa, Homo Sapiens
EVVTHKTFHRY

SEQ ID NO: 37908 - protein, 11 aa, Homo Sapiens
EVYDHARRALY

SEQ ID NO: 37909 - protein, 11 aa, Homo Sapiens
EVYDQEVGTSY

SEQ ID NO: 37910 - protein, 11 aa, Homo Sapiens
EVYSADREDLY

SEQ ID NO: 37911 - protein, 11 aa, Homo Sapiens
FVADEELVHLL

SEQ ID NO: 37912 - protein, 11 aa, Homo Sapiens
FVAPATGAHNY

SEQ ID NO: 37913 - protein, 11 aa, Homo Sapiens
FVFDTIQSHQY

SEQ ID NO: 37914 - protein, 11 aa, Homo Sapiens
FVYDVTKMTSF

SEQ ID NO: 37915 - protein, 11 aa, Homo Sapiens
GFGQHGSVSGQ

SEQ ID NO: 37916 - protein, 11 aa, Homo Sapiens
GGFGGGSFRGS

SEQ ID NO: 37917 - protein, 11 aa, Homo Sapiens
GVFTGPGGHSY

SEQ ID NO: 37918 - protein, 11 aa, Homo Sapiens
HSFGGGTGSGF

SEQ ID NO: 37919 - protein, 11 aa, Homo Sapiens
HTIELEPNRQF

SEQ ID NO: 37920 - protein, 11 aa, Homo Sapiens
HTVGEKVIVDF

SEQ ID NO: 37921 - protein, 11 aa, Homo Sapiens
HVAPDSIRGSF

SEQ ID NO: 37922 - protein, 11 aa, Homo Sapiens
HVAPSDTVLMF

SEQ ID NO: 37923 - protein, 11 aa, Homo Sapiens
HVIDVDSGNSY

SEQ ID NO: 37924 - protein, 11 aa, Homo Sapiens
HVIEDHERIGY

SEQ ID NO: 37925 - protein, 11 aa, Homo Sapiens
HVIENLHAAAY

SEQ ID NO: 37926 - protein, 11 aa, Homo Sapiens
HVLIDVGTGYY

SEQ ID NO: 37927 - protein, 11 aa, Homo Sapiens
HVPDPVISIAM

SEQ ID NO: 37928 - protein, 11 aa, Homo Sapiens
HVPGADILNSY

SEQ ID NO: 37929 - protein, 11 aa, Homo Sapiens
HVVKREAILLY

SEQ ID NO: 37930 - protein, 11 aa, Homo Sapiens
HVYDGKFLARV

SEQ ID NO: 37931 - protein, 11 aa, Homo Sapiens
ITQIEHEVSSS

SEQ ID NO: 37932 - protein, 11 aa, Homo Sapiens
IVAEPGAVLLY

SEQ ID NO: 37933 - protein, 11 aa, Homo Sapiens
KKDVDNAYMIK

SEQ ID NO: 37934 - protein, 11 aa, Homo Sapiens
MPVGPDAILRY

SEQ ID NO: 37935 - protein, 11 aa, Homo Sapiens
NIPGSELMSSF

SEQ ID NO: 37936 - protein, 11 aa, Homo Sapiens
NLGGSKRISIS

SEQ ID NO: 37937 - protein, 11 aa, Homo Sapiens
NVIDVNKVVEY

SEQ ID NO: 37938 - protein, 11 aa, Homo Sapiens
NVIDYGHASKY

SEQ ID NO: 37939 - protein, 11 aa, Homo Sapiens
NVIESKAYVGR

SEQ ID NO: 37940 - protein, 11 aa, Homo Sapiens
QVIEAEGLKEM

SEQ ID NO: 37941 - protein, 11 aa, Homo Sapiens
RVVGSELIQKY

SEQ ID NO: 37942 - protein, 11 aa, Homo Sapiens
SILDRDDIFVY

SEQ ID NO: 37943 - protein, 11 aa, Homo Sapiens
SSTISSNVASK

SEQ ID NO: 37944 - protein, 11 aa, Homo Sapiens
STFKETENTAY

SEQ ID NO: 37945 - protein, 11 aa, Homo Sapiens
STIDDSQICRF

SEQ ID NO: 37946 - protein, 11 aa, Homo Sapiens
SVADKEAIANF

SEQ ID NO: 37947 - protein, 11 aa, Homo Sapiens
SVIDSAELQAY

SEQ ID NO: 37948 - protein, 11 aa, Homo Sapiens
SVINSKASLTY

SEQ ID NO: 37949 - protein, 11 aa, Homo Sapiens
SVISKIDLHKY

SEQ ID NO: 37950 - protein, 11 aa, Homo Sapiens
SVYGGGGIHEY

SEQ ID NO: 37951 - protein, 11 aa, Homo Sapiens
TVADQVLVGSY

SEQ ID NO: 37952 - protein, 11 aa, Homo Sapiens
TVAGLALIKKY

SEQ ID NO: 37953 - protein, 11 aa, Homo Sapiens
TVIDEVRTGTY

SEQ ID NO: 37954 - protein, 11 aa, Homo Sapiens
VPKTAENFRQF

SEQ ID NO: 37955 - protein, 11 aa, Homo Sapiens
VVYDGEHLGSF

SEQ ID NO: 37956 - protein, 11 aa, Homo Sapiens
YVADLENMVQY

SEQ ID NO: 37957 - protein, 11 aa, Homo Sapiens
YVFFEKDFGDM

SEQ ID NO: 37958 - protein, 8 aa, Homo Sapiens
HFDPTISL

SEQ ID NO: 37959 - protein, 8 aa, Homo Sapiens
PDVGNFHY

SEQ ID NO: 37960 - protein, 8 aa, Homo Sapiens
TILNTLIY

SEQ ID NO: 37961 - protein, 9 aa, Homo Sapiens
AAAAAALLY

SEQ ID NO: 37962 - protein, 9 aa, Homo Sapiens
AAFKIFLKY

SEQ ID NO: 37963 - protein, 9 aa, Homo Sapiens
AAIGLVIYY

SEQ ID NO: 37964 - protein, 9 aa, Homo Sapiens
AALQRYLFY

SEQ ID NO: 37965 - protein, 9 aa, Homo Sapiens
AASFINLLY

SEQ ID NO: 37966 - protein, 9 aa, Homo Sapiens
AAYQLAFRY

SEQ ID NO: 37967 - protein, 9 aa, Homo Sapiens
AFDIPRFVY

SEQ ID NO: 37968 - protein, 9 aa, Homo Sapiens
AFFAERLYY

SEQ ID NO: 37969 - protein, 9 aa, Homo Sapiens
AFGDLALFF

SEQ ID NO: 37970 - protein, 9 aa, Homo Sapiens
AFIEKHWTF

SEQ ID NO: 37971 - protein, 9 aa, Homo Sapiens
AFIHISTAY

SEQ ID NO: 37972 - protein, 9 aa, Homo Sapiens
AFISIGFSY

SEQ ID NO: 37973 - protein, 9 aa, Homo Sapiens
AFKEMFLDY

SEQ ID NO: 37974 - protein, 9 aa, Homo Sapiens
AFLNAIMRY

SEQ ID NO: 37975 - protein, 9 aa, Homo Sapiens
AFLSQELLY

SEQ ID NO: 37976 - protein, 9 aa, Homo Sapiens
AFNSKQLLY

SEQ ID NO: 37977 - protein, 9 aa, Homo Sapiens
AFQFLQLYY

SEQ ID NO: 37978 - protein, 9 aa, Homo Sapiens
AIAEIWPKY

SEQ ID NO: 37979 - protein, 9 aa, Homo Sapiens
AIDQLHLEY

SEQ ID NO: 37980 - protein, 9 aa, Homo Sapiens
AIFPSPMMY

SEQ ID NO: 37981 - protein, 9 aa, Homo Sapiens
AIIDILTHY

SEQ ID NO: 37982 - protein, 9 aa, Homo Sapiens
AIIPSHLAY

SEQ ID NO: 37983 - protein, 9 aa, Homo Sapiens
AIITTHLQY

SEQ ID NO: 37984 - protein, 9 aa, Homo Sapiens
AILHHLYFY

SEQ ID NO: 37985 - protein, 9 aa, Homo Sapiens
AILKMILMY

SEQ ID NO: 37986 - protein, 9 aa, Homo Sapiens
AILSKFLYY

SEQ ID NO: 37987 - protein, 9 aa, Homo Sapiens
ALAGTFHYY

SEQ ID NO: 37988 - protein, 9 aa, Homo Sapiens
ALAPAGFSY

SEQ ID NO: 37989 - protein, 9 aa, Homo Sapiens
ALAQARLLY

SEQ ID NO: 37990 - protein, 9 aa, Homo Sapiens
ALEKIDLKF

SEQ ID NO: 37991 - protein, 9 aa, Homo Sapiens
ALFMPPTYY

SEQ ID NO: 37992 - protein, 9 aa, Homo Sapiens
ALFTQGLGY

SEQ ID NO: 37993 - protein, 9 aa, Homo Sapiens
ALFTSVFLY

SEQ ID NO: 37994 - protein, 9 aa, Homo Sapiens
ALHMLFLLY

SEQ ID NO: 37995 - protein, 9 aa, Homo Sapiens
ALIEELLLY

SEQ ID NO: 37996 - protein, 9 aa, Homo Sapiens
ALINTVLKY

SEQ ID NO: 37997 - protein, 9 aa, Homo Sapiens
ALLDLSFAY

SEQ ID NO: 37998 - protein, 9 aa, Homo Sapiens
ALLDSQFSY

SEQ ID NO: 37999 - protein, 9 aa, Homo Sapiens
ALLEYHLSY

SEQ ID NO: 38000 - protein, 9 aa, Homo Sapiens
ALLNFVVKY

SEQ ID NO: 38001 - protein, 9 aa, Homo Sapiens
ALLQLGLKY

SEQ ID NO: 38002 - protein, 9 aa, Homo Sapiens
ALLSIFSRY

SEQ ID NO: 38003 - protein, 9 aa, Homo Sapiens
ALLSKIHLY

SEQ ID NO: 38004 - protein, 9 aa, Homo Sapiens
ALLSLHFLF

SEQ ID NO: 38005 - protein, 9 aa, Homo Sapiens
ALLTLLLVY

SEQ ID NO: 38006 - protein, 9 aa, Homo Sapiens
ALMATQTFY

SEQ ID NO: 38007 - protein, 9 aa, Homo Sapiens
ALNALILAY

SEQ ID NO: 38008 - protein, 9 aa, Homo Sapiens
ALNFSVFYY

SEQ ID NO: 38009 - protein, 9 aa, Homo Sapiens
ALPKAAFQY

SEQ ID NO: 38010 - protein, 9 aa, Homo Sapiens
ALSDLALHF

SEQ ID NO: 38011 - protein, 9 aa, Homo Sapiens
ALTDAYLLY

SEQ ID NO: 38012 - protein, 9 aa, Homo Sapiens
ALYKKILKY

SEQ ID NO: 38013 - protein, 9 aa, Homo Sapiens
AMMGLAQIY

SEQ ID NO: 38014 - protein, 9 aa, Homo Sapiens
AQVQVLLYY

SEQ ID NO: 38015 - protein, 9 aa, Homo Sapiens
ASNPAMLLY

SEQ ID NO: 38016 - protein, 9 aa, Homo Sapiens
ATADVVILY

SEQ ID NO: 38017 - protein, 9 aa, Homo Sapiens
ATALFSFLY

SEQ ID NO: 38018 - protein, 9 aa, Homo Sapiens
ATDIPCLLY

SEQ ID NO: 38019 - protein, 9 aa, Homo Sapiens
ATLPRNFHY

SEQ ID NO: 38020 - protein, 9 aa, Homo Sapiens
ATLSLFNTY

SEQ ID NO: 38021 - protein, 9 aa, Homo Sapiens
ATSKVALVY

SEQ ID NO: 38022 - protein, 9 aa, Homo Sapiens
ATSNVFAMF

SEQ ID NO: 38023 - protein, 9 aa, Homo Sapiens
AVALSLLLY

SEQ ID NO: 38024 - protein, 9 aa, Homo Sapiens
AVHDITVAY

SEQ ID NO: 38025 - protein, 9 aa, Homo Sapiens
AVIEDTWHY

SEQ ID NO: 38026 - protein, 9 aa, Homo Sapiens
AVISTILKY

SEQ ID NO: 38027 - protein, 9 aa, Homo Sapiens
AVITVPAYF

SEQ ID NO: 38028 - protein, 9 aa, Homo Sapiens
AVLLVFVRY

SEQ ID NO: 38029 - protein, 9 aa, Homo Sapiens
AVLRDLLRY

SEQ ID NO: 38030 - protein, 9 aa, Homo Sapiens
AVLRIPILY

SEQ ID NO: 38031 - protein, 9 aa, Homo Sapiens
AVNSLVNLY

SEQ ID NO: 38032 - protein, 9 aa, Homo Sapiens
AVQHFSLLY

SEQ ID NO: 38033 - protein, 9 aa, Homo Sapiens
AVSNLALQF

SEQ ID NO: 38034 - protein, 9 aa, Homo Sapiens
AVVGIGLVY

SEQ ID NO: 38035 - protein, 9 aa, Homo Sapiens
AVYPVFLFY

SEQ ID NO: 38036 - protein, 9 aa, Homo Sapiens
AVYTIALRY

SEQ ID NO: 38037 - protein, 9 aa, Homo Sapiens
AYFPYFITY

SEQ ID NO: 38038 - protein, 9 aa, Homo Sapiens
AYLDQYLWY

SEQ ID NO: 38039 - protein, 9 aa, Homo Sapiens
DFIYLHLSY

SEQ ID NO: 38040 - protein, 9 aa, Homo Sapiens
DFLDKLLRY

SEQ ID NO: 38041 - protein, 9 aa, Homo Sapiens
DIWPNPLQY

SEQ ID NO: 38042 - protein, 9 aa, Homo Sapiens
DQLKEYLFY

SEQ ID NO: 38043 - protein, 9 aa, Homo Sapiens
DVLPFALRY

SEQ ID NO: 38044 - protein, 9 aa, Homo Sapiens
DVYNHFLLY

SEQ ID NO: 38045 - protein, 9 aa, Homo Sapiens
DYLGIPLFY

SEQ ID NO: 38046 - protein, 9 aa, Homo Sapiens
EVLGLILRY

SEQ ID NO: 38047 - protein, 9 aa, Homo Sapiens
EVLNFLLRY

SEQ ID NO: 38048 - protein, 9 aa, Homo Sapiens
EVMDVFLRF

SEQ ID NO: 38049 - protein, 9 aa, Homo Sapiens
EYFLLKAKY

SEQ ID NO: 38050 - protein, 9 aa, Homo Sapiens
FALVFPLMY

SEQ ID NO: 38051 - protein, 9 aa, Homo Sapiens
FASPTQVFF

SEQ ID NO: 38052 - protein, 9 aa, Homo Sapiens
FFAAITNKY

SEQ ID NO: 38053 - protein, 9 aa, Homo Sapiens
FFAKIPYYY

SEQ ID NO: 38054 - protein, 9 aa, Homo Sapiens
FFEAVGVTY

SEQ ID NO: 38055 - protein, 9 aa, Homo Sapiens
FFFPLLQRF

SEQ ID NO: 38056 - protein, 9 aa, Homo Sapiens
FFGDFGFMF

SEQ ID NO: 38057 - protein, 9 aa, Homo Sapiens
FFGDVVLRF

SEQ ID NO: 38058 - protein, 9 aa, Homo Sapiens
FFGETSHNY

SEQ ID NO: 38059 - protein, 9 aa, Homo Sapiens
FFGMHVQEY

SEQ ID NO: 38060 - protein, 9 aa, Homo Sapiens
FFGPVGFNF

SEQ ID NO: 38061 - protein, 9 aa, Homo Sapiens
FFIAGRYEF

SEQ ID NO: 38062 - protein, 9 aa, Homo Sapiens
FFISLLESY

SEQ ID NO: 38063 - protein, 9 aa, Homo Sapiens
FFITYIPFY

SEQ ID NO: 38064 - protein, 9 aa, Homo Sapiens
FFLIVKTLY

SEQ ID NO: 38065 - protein, 9 aa, Homo Sapiens
FFNIPQIQY

SEQ ID NO: 38066 - protein, 9 aa, Homo Sapiens
FFNRINLIY

SEQ ID NO: 38067 - protein, 9 aa, Homo Sapiens
FFSLPHVGY

SEQ ID NO: 38068 - protein, 9 aa, Homo Sapiens
FFSQIGELY

SEQ ID NO: 38069 - protein, 9 aa, Homo Sapiens
FFTGDVFGY

SEQ ID NO: 38070 - protein, 9 aa, Homo Sapiens
FFYFEGTFY

SEQ ID NO: 38071 - protein, 9 aa, Homo Sapiens
FFYPLDFTF

SEQ ID NO: 38072 - protein, 9 aa, Homo Sapiens
FIALITDSY

SEQ ID NO: 38073 - protein, 9 aa, Homo Sapiens
FIANHPFLF

SEQ ID NO: 38074 - protein, 9 aa, Homo Sapiens
FIANLFNRY

SEQ ID NO: 38075 - protein, 9 aa, Homo Sapiens
FIDASRLVY

SEQ ID NO: 38076 - protein, 9 aa, Homo Sapiens
FIDSFRPLY

SEQ ID NO: 38077 - protein, 9 aa, Homo Sapiens
FIDSIIAKY

SEQ ID NO: 38078 - protein, 9 aa, Homo Sapiens
FIGEFAYTY

SEQ ID NO: 38079 - protein, 9 aa, Homo Sapiens
FIGYPITLY

SEQ ID NO: 38080 - protein, 9 aa, Homo Sapiens
FILDVITYY

SEQ ID NO: 38081 - protein, 9 aa, Homo Sapiens
FILSLILEY

SEQ ID NO: 38082 - protein, 9 aa, Homo Sapiens
FILWRHLEY

SEQ ID NO: 38083 - protein, 9 aa, Homo Sapiens
FIPFLPLEY

SEQ ID NO: 38084 - protein, 9 aa, Homo Sapiens
FIPPIVARY

SEQ ID NO: 38085 - protein, 9 aa, Homo Sapiens
FIPSAYPYY

SEQ ID NO: 38086 - protein, 9 aa, Homo Sapiens
FISGLFNFY

SEQ ID NO: 38087 - protein, 9 aa, Homo Sapiens
FISHVLAFF

SEQ ID NO: 38088 - protein, 9 aa, Homo Sapiens
FIYHLPQEF

SEQ ID NO: 38089 - protein, 9 aa, Homo Sapiens
FLDLVNYVY

SEQ ID NO: 38090 - protein, 9 aa, Homo Sapiens
FLFAPTLIY

SEQ ID NO: 38091 - protein, 9 aa, Homo Sapiens
FLIDLKTRY

SEQ ID NO: 38092 - protein, 9 aa, Homo Sapiens
FLLDRLLQY

SEQ ID NO: 38093 - protein, 9 aa, Homo Sapiens
FLLNHSLEY

SEQ ID NO: 38094 - protein, 9 aa, Homo Sapiens
FLLPIVVRY

SEQ ID NO: 38095 - protein, 9 aa, Homo Sapiens
FLNDSYLKY

SEQ ID NO: 38096 - protein, 9 aa, Homo Sapiens
FLPELIWCY

SEQ ID NO: 38097 - protein, 9 aa, Homo Sapiens
FLPFPLPLF

SEQ ID NO: 38098 - protein, 9 aa, Homo Sapiens
FLPGMAIGY

SEQ ID NO: 38099 - protein, 9 aa, Homo Sapiens
FLPGWNLIY

SEQ ID NO: 38100 - protein, 9 aa, Homo Sapiens
FLPLLNIEF

SEQ ID NO: 38101 - protein, 9 aa, Homo Sapiens
FLVHESFLY

SEQ ID NO: 38102 - protein, 9 aa, Homo Sapiens
FLWPEAFLY

SEQ ID NO: 38103 - protein, 9 aa, Homo Sapiens
FMFPVGLYY

SEQ ID NO: 38104 - protein, 9 aa, Homo Sapiens
FMITFPYGY

SEQ ID NO: 38105 - protein, 9 aa, Homo Sapiens
FMLHIWGKY

SEQ ID NO: 38106 - protein, 9 aa, Homo Sapiens
FMTHLILFF

SEQ ID NO: 38107 - protein, 9 aa, Homo Sapiens
FQLETNLLY

SEQ ID NO: 38108 - protein, 9 aa, Homo Sapiens
FQMAILLQY

SEQ ID NO: 38109 - protein, 9 aa, Homo Sapiens
FQNALIVRY

SEQ ID NO: 38110 - protein, 9 aa, Homo Sapiens
FSFGYALVY

SEQ ID NO: 38111 - protein, 9 aa, Homo Sapiens
FTLADILLY

SEQ ID NO: 38112 - protein, 9 aa, Homo Sapiens
FTSMTRLYY

SEQ ID NO: 38113 - protein, 9 aa, Homo Sapiens
FVADLHLNY

SEQ ID NO: 38114 - protein, 9 aa, Homo Sapiens
FVAGVVTFY

SEQ ID NO: 38115 - protein, 9 aa, Homo Sapiens
FVAKFMALY

SEQ ID NO: 38116 - protein, 9 aa, Homo Sapiens
FVANLFNKY

SEQ ID NO: 38117 - protein, 9 aa, Homo Sapiens
FVGGLPLAY

SEQ ID NO: 38118 - protein, 9 aa, Homo Sapiens
FVGHMDYKY

SEQ ID NO: 38119 - protein, 9 aa, Homo Sapiens
FVITKPDVY

SEQ ID NO: 38120 - protein, 9 aa, Homo Sapiens
FVKPSFDQY

SEQ ID NO: 38121 - protein, 9 aa, Homo Sapiens
FVNDYILYY

SEQ ID NO: 38122 - protein, 9 aa, Homo Sapiens
FVNKFNVLY

SEQ ID NO: 38123 - protein, 9 aa, Homo Sapiens
FVNPTSFVY

SEQ ID NO: 38124 - protein, 9 aa, Homo Sapiens
FVPFLPLEY

SEQ ID NO: 38125 - protein, 9 aa, Homo Sapiens
FVSGVKIFY

SEQ ID NO: 38126 - protein, 9 aa, Homo Sapiens
FVTDLLLHF

SEQ ID NO: 38127 - protein, 9 aa, Homo Sapiens
FVVAVGAEY

SEQ ID NO: 38128 - protein, 9 aa, Homo Sapiens
FVVSQPLNY

SEQ ID NO: 38129 - protein, 9 aa, Homo Sapiens
FYAPELLYY

SEQ ID NO: 38130 - protein, 9 aa, Homo Sapiens
FYEVFKVLY

SEQ ID NO: 38131 - protein, 9 aa, Homo Sapiens
FYNLIHPEY

SEQ ID NO: 38132 - protein, 9 aa, Homo Sapiens
FYPELKLAY

SEQ ID NO: 38133 - protein, 9 aa, Homo Sapiens
FYQGAAFPF

SEQ ID NO: 38134 - protein, 9 aa, Homo Sapiens
GAAAIILTY

SEQ ID NO: 38135 - protein, 9 aa, Homo Sapiens
GAAGILLRY

SEQ ID NO: 38136 - protein, 9 aa, Homo Sapiens
GAAGVHFIY

SEQ ID NO: 38137 - protein, 9 aa, Homo Sapiens
GALETLLRY

SEQ ID NO: 38138 - protein, 9 aa, Homo Sapiens
GAMGIMLVY

SEQ ID NO: 38139 - protein, 9 aa, Homo Sapiens
GFAALQLEY

SEQ ID NO: 38140 - protein, 9 aa, Homo Sapiens
GFTAIVLTY

SEQ ID NO: 38141 - protein, 9 aa, Homo Sapiens
GFYFAKLYY

SEQ ID NO: 38142 - protein, 9 aa, Homo Sapiens
GIADFVLKY

SEQ ID NO: 38143 - protein, 9 aa, Homo Sapiens
GIFASRLYY

SEQ ID NO: 38144 - protein, 9 aa, Homo Sapiens
GIVNILLKY

SEQ ID NO: 38145 - protein, 9 aa, Homo Sapiens
GLATQAFHY

SEQ ID NO: 38146 - protein, 9 aa, Homo Sapiens
GLDDKLLHY

SEQ ID NO: 38147 - protein, 9 aa, Homo Sapiens
GLHGVTFGY

SEQ ID NO: 38148 - protein, 9 aa, Homo Sapiens
GLIDLVFLY

SEQ ID NO: 38149 - protein, 9 aa, Homo Sapiens
GLIHLAIHY

SEQ ID NO: 38150 - protein, 9 aa, Homo Sapiens
GLLDVGLRY

SEQ ID NO: 38151 - protein, 9 aa, Homo Sapiens
GLLEEALFY

SEQ ID NO: 38152 - protein, 9 aa, Homo Sapiens
GLLEKLLDY

SEQ ID NO: 38153 - protein, 9 aa, Homo Sapiens
GLLNLSLLY

SEQ ID NO: 38154 - protein, 9 aa, Homo Sapiens
GLPDLVAKY

SEQ ID NO: 38155 - protein, 9 aa, Homo Sapiens
GLPGVFVLY

SEQ ID NO: 38156 - protein, 9 aa, Homo Sapiens
GLPSQAFEY

SEQ ID NO: 38157 - protein, 9 aa, Homo Sapiens
GLSALILRY

SEQ ID NO: 38158 - protein, 9 aa, Homo Sapiens
GMLEKAVFY

SEQ ID NO: 38159 - protein, 9 aa, Homo Sapiens
GQLVKMLLY

SEQ ID NO: 38160 - protein, 9 aa, Homo Sapiens
GSLALFLIY

SEQ ID NO: 38161 - protein, 9 aa, Homo Sapiens
GSWDKTLKF

SEQ ID NO: 38162 - protein, 9 aa, Homo Sapiens
GTADITLRF

SEQ ID NO: 38163 - protein, 9 aa, Homo Sapiens
GTDELRLLY

SEQ ID NO: 38164 - protein, 9 aa, Homo Sapiens
GTISEVWDY

SEQ ID NO: 38165 - protein, 9 aa, Homo Sapiens
GTLDSVLRY

SEQ ID NO: 38166 - protein, 9 aa, Homo Sapiens
GTVYEDLRY

SEQ ID NO: 38167 - protein, 9 aa, Homo Sapiens
GVFFPVFAY

SEQ ID NO: 38168 - protein, 9 aa, Homo Sapiens
GVLDTELRY

SEQ ID NO: 38169 - protein, 9 aa, Homo Sapiens
GVLKIQVHY

SEQ ID NO: 38170 - protein, 9 aa, Homo Sapiens
GVMDYYLKY

SEQ ID NO: 38171 - protein, 9 aa, Homo Sapiens
GVSGIFMKY

SEQ ID NO: 38172 - protein, 9 aa, Homo Sapiens
GVSQMPLRY

SEQ ID NO: 38173 - protein, 9 aa, Homo Sapiens
GWAIIPLMY

SEQ ID NO: 38174 - protein, 9 aa, Homo Sapiens
GWAPTFLGY

SEQ ID NO: 38175 - protein, 9 aa, Homo Sapiens
GYDIKLLRY

SEQ ID NO: 38176 - protein, 9 aa, Homo Sapiens
GYFAGKLSY

SEQ ID NO: 38177 - protein, 9 aa, Homo Sapiens
GYLHDFLKY

SEQ ID NO: 38178 - protein, 9 aa, Homo Sapiens
GYLRDFLRY

SEQ ID NO: 38179 - protein, 9 aa, Homo Sapiens
GYPEVALHF

SEQ ID NO: 38180 - protein, 9 aa, Homo Sapiens
HAIRLLLEY

SEQ ID NO: 38181 - protein, 9 aa, Homo Sapiens
HAISRYWYY

SEQ ID NO: 38182 - protein, 9 aa, Homo Sapiens
HFAFYAYHY

SEQ ID NO: 38183 - protein, 9 aa, Homo Sapiens
HFDSPYLLY

SEQ ID NO: 38184 - protein, 9 aa, Homo Sapiens
HFGIVEGLM

SEQ ID NO: 38185 - protein, 9 aa, Homo Sapiens
HFGLFPANY

SEQ ID NO: 38186 - protein, 9 aa, Homo Sapiens
HFLDRHLVF

SEQ ID NO: 38187 - protein, 9 aa, Homo Sapiens
HFLVTRLLY

SEQ ID NO: 38188 - protein, 9 aa, Homo Sapiens
HILGFELKY

SEQ ID NO: 38189 - protein, 9 aa, Homo Sapiens
HIMEIFSTY

SEQ ID NO: 38190 - protein, 9 aa, Homo Sapiens
HLSSLQLFY

SEQ ID NO: 38191 - protein, 9 aa, Homo Sapiens
HNLSANLFY

SEQ ID NO: 38192 - protein, 9 aa, Homo Sapiens
HTLPDSLVY

SEQ ID NO: 38193 - protein, 9 aa, Homo Sapiens
HTYQSPLLY

SEQ ID NO: 38194 - protein, 9 aa, Homo Sapiens
HVIDVKFLY

SEQ ID NO: 38195 - protein, 9 aa, Homo Sapiens
HVLFIKLLY

SEQ ID NO: 38196 - protein, 9 aa, Homo Sapiens
HVNDLFLQY

SEQ ID NO: 38197 - protein, 9 aa, Homo Sapiens
HWIDLIFGY

SEQ ID NO: 38198 - protein, 9 aa, Homo Sapiens
HWIDLTFGY

SEQ ID NO: 38199 - protein, 9 aa, Homo Sapiens
HYLNLNLFF

SEQ ID NO: 38200 - protein, 9 aa, Homo Sapiens
HYNNIMALY

SEQ ID NO: 38201 - protein, 9 aa, Homo Sapiens
HYSPIYLSF

SEQ ID NO: 38202 - protein, 9 aa, Homo Sapiens
HYYSITINY

SEQ ID NO: 38203 - protein, 9 aa, Homo Sapiens
IANQVQLFY

SEQ ID NO: 38204 - protein, 9 aa, Homo Sapiens
IAQAESLRY

SEQ ID NO: 38205 - protein, 9 aa, Homo Sapiens
IASNIWAAY

SEQ ID NO: 38206 - protein, 9 aa, Homo Sapiens
IAYGVIELY

SEQ ID NO: 38207 - protein, 9 aa, Homo Sapiens
IFAIPLQIY

SEQ ID NO: 38208 - protein, 9 aa, Homo Sapiens
IFHDISLRF

SEQ ID NO: 38209 - protein, 9 aa, Homo Sapiens
IFHEVPLKF

SEQ ID NO: 38210 - protein, 9 aa, Homo Sapiens
IFIEDAIKY

SEQ ID NO: 38211 - protein, 9 aa, Homo Sapiens
IFIEDYLKY

SEQ ID NO: 38212 - protein, 9 aa, Homo Sapiens
IFIHLNDIY

SEQ ID NO: 38213 - protein, 9 aa, Homo Sapiens
IFILPSIFY

SEQ ID NO: 38214 - protein, 9 aa, Homo Sapiens
IFKDFVNKY

SEQ ID NO: 38215 - protein, 9 aa, Homo Sapiens
IFLETELFY

SEQ ID NO: 38216 - protein, 9 aa, Homo Sapiens
IFLFLDRTY

SEQ ID NO: 38217 - protein, 9 aa, Homo Sapiens
IFMDVLFVY

SEQ ID NO: 38218 - protein, 9 aa, Homo Sapiens
IFSDLNATY

SEQ ID NO: 38219 - protein, 9 aa, Homo Sapiens
IFTDVALKF

SEQ ID NO: 38220 - protein, 9 aa, Homo Sapiens
IFWTLPHEY

SEQ ID NO: 38221 - protein, 9 aa, Homo Sapiens
IIAKVFLAY

SEQ ID NO: 38222 - protein, 9 aa, Homo Sapiens
IIFDRPLLY

SEQ ID NO: 38223 - protein, 9 aa, Homo Sapiens
IIHDFPQFY

SEQ ID NO: 38224 - protein, 9 aa, Homo Sapiens
IIIDKEYYY

SEQ ID NO: 38225 - protein, 9 aa, Homo Sapiens
IIIKPLPGY

SEQ ID NO: 38226 - protein, 9 aa, Homo Sapiens
IILPRGLEY

SEQ ID NO: 38227 - protein, 9 aa, Homo Sapiens
IIPAIWFRY

SEQ ID NO: 38228 - protein, 9 aa, Homo Sapiens
IISEFALEY

SEQ ID NO: 38229 - protein, 9 aa, Homo Sapiens
IIVPFGLLY

SEQ ID NO: 38230 - protein, 9 aa, Homo Sapiens
ILAEESYLY

SEQ ID NO: 38231 - protein, 9 aa, Homo Sapiens
ILAQLNAKY

SEQ ID NO: 38232 - protein, 9 aa, Homo Sapiens
ILFKGDLNY

SEQ ID NO: 38233 - protein, 9 aa, Homo Sapiens
ILFSGVHFY

SEQ ID NO: 38234 - protein, 9 aa, Homo Sapiens
ILLDLNISY

SEQ ID NO: 38235 - protein, 9 aa, Homo Sapiens
ILLGLIIAY

SEQ ID NO: 38236 - protein, 9 aa, Homo Sapiens
ILMSLVLSY

SEQ ID NO: 38237 - protein, 9 aa, Homo Sapiens
ILNDMVWKY

SEQ ID NO: 38238 - protein, 9 aa, Homo Sapiens
ILNSLSLCY

SEQ ID NO: 38239 - protein, 9 aa, Homo Sapiens
ILSDIGLEY

SEQ ID NO: 38240 - protein, 9 aa, Homo Sapiens
ILSPLLLLF

SEQ ID NO: 38241 - protein, 9 aa, Homo Sapiens
ILYNIKQEY

SEQ ID NO: 38242 - protein, 9 aa, Homo Sapiens
IMFGVPYVY

SEQ ID NO: 38243 - protein, 9 aa, Homo Sapiens
IMKFINDQY

SEQ ID NO: 38244 - protein, 9 aa, Homo Sapiens
IMLPFRFTY

SEQ ID NO: 38245 - protein, 9 aa, Homo Sapiens
IMLPGVLRY

SEQ ID NO: 38246 - protein, 9 aa, Homo Sapiens
IPLDPVAGY

SEQ ID NO: 38247 - protein, 9 aa, Homo Sapiens
IPLFVQLLY

SEQ ID NO: 38248 - protein, 9 aa, Homo Sapiens
ITNPKSLLY

SEQ ID NO: 38249 - protein, 9 aa, Homo Sapiens
ITSSNFLHY

SEQ ID NO: 38250 - protein, 9 aa, Homo Sapiens
IVGPDGLVY

SEQ ID NO: 38251 - protein, 9 aa, Homo Sapiens
IVLPGNFLY

SEQ ID NO: 38252 - protein, 9 aa, Homo Sapiens
IVSILYLKY

SEQ ID NO: 38253 - protein, 9 aa, Homo Sapiens
IVSSLRLAY

SEQ ID NO: 38254 - protein, 9 aa, Homo Sapiens
IWFEKRLAY

SEQ ID NO: 38255 - protein, 9 aa, Homo Sapiens
IYADLSLKY

SEQ ID NO: 38256 - protein, 9 aa, Homo Sapiens
IYFQPPSFY

SEQ ID NO: 38257 - protein, 9 aa, Homo Sapiens
IYLDIIHTY

SEQ ID NO: 38258 - protein, 9 aa, Homo Sapiens
IYSPLLFKY

SEQ ID NO: 38259 - protein, 9 aa, Homo Sapiens
KALEQILEY

SEQ ID NO: 38260 - protein, 9 aa, Homo Sapiens
KAVSLFLCY

SEQ ID NO: 38261 - protein, 9 aa, Homo Sapiens
KFFFIPLSY

SEQ ID NO: 38262 - protein, 9 aa, Homo Sapiens
KIADRFLLY

SEQ ID NO: 38263 - protein, 9 aa, Homo Sapiens
KIYPLPHMY

SEQ ID NO: 38264 - protein, 9 aa, Homo Sapiens
KLFDKLLEY

SEQ ID NO: 38265 - protein, 9 aa, Homo Sapiens
KLFGFLLEY

SEQ ID NO: 38266 - protein, 9 aa, Homo Sapiens
KLFPYALAF

SEQ ID NO: 38267 - protein, 9 aa, Homo Sapiens
KLLDAYLLY

SEQ ID NO: 38268 - protein, 9 aa, Homo Sapiens
KLWKVALHF

SEQ ID NO: 38269 - protein, 9 aa, Homo Sapiens
KLWNEELKY

SEQ ID NO: 38270 - protein, 9 aa, Homo Sapiens
KMDDLNLHY

SEQ ID NO: 38271 - protein, 9 aa, Homo Sapiens
KNFGIWLRY

SEQ ID NO: 38272 - protein, 9 aa, Homo Sapiens
KQLQVLLAY

SEQ ID NO: 38273 - protein, 9 aa, Homo Sapiens
KQSQILLVY

SEQ ID NO: 38274 - protein, 9 aa, Homo Sapiens
KSLEAFFLY

SEQ ID NO: 38275 - protein, 9 aa, Homo Sapiens
KSTAISLFY

SEQ ID NO: 38276 - protein, 9 aa, Homo Sapiens
KTPEIYLAY

SEQ ID NO: 38277 - protein, 9 aa, Homo Sapiens
KVADMALHY

SEQ ID NO: 38278 - protein, 9 aa, Homo Sapiens
KVLPQTILY

SEQ ID NO: 38279 - protein, 9 aa, Homo Sapiens
KVLPVGVLY

SEQ ID NO: 38280 - protein, 9 aa, Homo Sapiens
KVLQKFLTY

SEQ ID NO: 38281 - protein, 9 aa, Homo Sapiens
KWTDLALQY

SEQ ID NO: 38282 - protein, 9 aa, Homo Sapiens
KYFDEHYEY

SEQ ID NO: 38283 - protein, 9 aa, Homo Sapiens
LAFGVPFLY

SEQ ID NO: 38284 - protein, 9 aa, Homo Sapiens
LALHYLLTY

SEQ ID NO: 38285 - protein, 9 aa, Homo Sapiens
LALNFSVFY

SEQ ID NO: 38286 - protein, 9 aa, Homo Sapiens
LALSHPYLY

SEQ ID NO: 38287 - protein, 9 aa, Homo Sapiens
LDILVPILF

SEQ ID NO: 38288 - protein, 9 aa, Homo Sapiens
LFAPFIVYY

SEQ ID NO: 38289 - protein, 9 aa, Homo Sapiens
LFGDVAMHY

SEQ ID NO: 38290 - protein, 9 aa, Homo Sapiens
LFGTVILKY

SEQ ID NO: 38291 - protein, 9 aa, Homo Sapiens
LFIDIFHEY

SEQ ID NO: 38292 - protein, 9 aa, Homo Sapiens
LFIHFANVY

SEQ ID NO: 38293 - protein, 9 aa, Homo Sapiens
LFKPFVESY

SEQ ID NO: 38294 - protein, 9 aa, Homo Sapiens
LFLDLLQSY

SEQ ID NO: 38295 - protein, 9 aa, Homo Sapiens
LFLLVFPAY

SEQ ID NO: 38296 - protein, 9 aa, Homo Sapiens
LFMSSFQSY

SEQ ID NO: 38297 - protein, 9 aa, Homo Sapiens
LFPLLATAY

SEQ ID NO: 38298 - protein, 9 aa, Homo Sapiens
LFQHFLDSY

SEQ ID NO: 38299 - protein, 9 aa, Homo Sapiens
LFSIAPLIY

SEQ ID NO: 38300 - protein, 9 aa, Homo Sapiens
LFSRVIPEY

SEQ ID NO: 38301 - protein, 9 aa, Homo Sapiens
LFVDEFLTY

SEQ ID NO: 38302 - protein, 9 aa, Homo Sapiens
LFWFGDLNY

SEQ ID NO: 38303 - protein, 9 aa, Homo Sapiens
LFWGGVMFY

SEQ ID NO: 38304 - protein, 9 aa, Homo Sapiens
LGLAVRLEY

SEQ ID NO: 38305 - protein, 9 aa, Homo Sapiens
LIFSVPIVY

SEQ ID NO: 38306 - protein, 9 aa, Homo Sapiens
LILEEILAY

SEQ ID NO: 38307 - protein, 9 aa, Homo Sapiens
LIMGLILRY

SEQ ID NO: 38308 - protein, 9 aa, Homo Sapiens
LLAALGYRY

SEQ ID NO: 38309 - protein, 9 aa, Homo Sapiens
LLANMVYQY

SEQ ID NO: 38310 - protein, 9 aa, Homo Sapiens
LLDTNRYLY

SEQ ID NO: 38311 - protein, 9 aa, Homo Sapiens
LLHDRSFSY

SEQ ID NO: 38312 - protein, 9 aa, Homo Sapiens
LLNQMILTY

SEQ ID NO: 38313 - protein, 9 aa, Homo Sapiens
LLPFLDAQY

SEQ ID NO: 38314 - protein, 9 aa, Homo Sapiens
LLSPILARY

SEQ ID NO: 38315 - protein, 9 aa, Homo Sapiens
LLTAVQLLY

SEQ ID NO: 38316 - protein, 9 aa, Homo Sapiens
LLTDIIAAY

SEQ ID NO: 38317 - protein, 9 aa, Homo Sapiens
LLWDRILGY

SEQ ID NO: 38318 - protein, 9 aa, Homo Sapiens
LNFHVFLEY

SEQ ID NO: 38319 - protein, 9 aa, Homo Sapiens
LNLPYFLRY

SEQ ID NO: 38320 - protein, 9 aa, Homo Sapiens
LPLDIQIFY

SEQ ID NO: 38321 - protein, 9 aa, Homo Sapiens
LSFPTTKTY

SEQ ID NO: 38322 - protein, 9 aa, Homo Sapiens
LSHILEVLY

SEQ ID NO: 38323 - protein, 9 aa, Homo Sapiens
LSLGLVLSY

SEQ ID NO: 38324 - protein, 9 aa, Homo Sapiens
LSLGVAALY

SEQ ID NO: 38325 - protein, 9 aa, Homo Sapiens
LSTALSLLY

SEQ ID NO: 38326 - protein, 9 aa, Homo Sapiens
LTFPHPVYY

SEQ ID NO: 38327 - protein, 9 aa, Homo Sapiens
LTHSLVLHY

SEQ ID NO: 38328 - protein, 9 aa, Homo Sapiens
LVAACLLLY

SEQ ID NO: 38329 - protein, 9 aa, Homo Sapiens
LVAFIRAEY

SEQ ID NO: 38330 - protein, 9 aa, Homo Sapiens
LVFHLPVNY

SEQ ID NO: 38331 - protein, 9 aa, Homo Sapiens
LVFPFRTFY

SEQ ID NO: 38332 - protein, 9 aa, Homo Sapiens
LVPDLWIRY

SEQ ID NO: 38333 - protein, 9 aa, Homo Sapiens
LVSPLVYLY

SEQ ID NO: 38334 - protein, 9 aa, Homo Sapiens
LVYNGVYQY

SEQ ID NO: 38335 - protein, 9 aa, Homo Sapiens
LWGIDPVSY

SEQ ID NO: 38336 - protein, 9 aa, Homo Sapiens
LWIDRQWQY

SEQ ID NO: 38337 - protein, 9 aa, Homo Sapiens
LYIDRPLPY

SEQ ID NO: 38338 - protein, 9 aa, Homo Sapiens
LYINFRHLY

SEQ ID NO: 38339 - protein, 9 aa, Homo Sapiens
LYLPSFFTY

SEQ ID NO: 38340 - protein, 9 aa, Homo Sapiens
LYSHLVPVY

SEQ ID NO: 38341 - protein, 9 aa, Homo Sapiens
LYTSVVVKY

SEQ ID NO: 38342 - protein, 9 aa, Homo Sapiens
LYYQPGLLY

SEQ ID NO: 38343 - protein, 9 aa, Homo Sapiens
MALGLALRY

SEQ ID NO: 38344 - protein, 9 aa, Homo Sapiens
MANIPLPEY

SEQ ID NO: 38345 - protein, 9 aa, Homo Sapiens
MFFGLTPLY

SEQ ID NO: 38346 - protein, 9 aa, Homo Sapiens
MFTELAILY

SEQ ID NO: 38347 - protein, 9 aa, Homo Sapiens
MLYPLSHGF

SEQ ID NO: 38348 - protein, 9 aa, Homo Sapiens
MPLSVFPYY

SEQ ID NO: 38349 - protein, 9 aa, Homo Sapiens
MSMVANLLY

SEQ ID NO: 38350 - protein, 9 aa, Homo Sapiens
MTHNLLLNY

SEQ ID NO: 38351 - protein, 9 aa, Homo Sapiens
MVLDLRAFY

SEQ ID NO: 38352 - protein, 9 aa, Homo Sapiens
MVLNSHDLY

SEQ ID NO: 38353 - protein, 9 aa, Homo Sapiens
MVLTIFIKY

SEQ ID NO: 38354 - protein, 9 aa, Homo Sapiens
MVPAISLAY

SEQ ID NO: 38355 - protein, 9 aa, Homo Sapiens
MVSSVVGFY

SEQ ID NO: 38356 - protein, 9 aa, Homo Sapiens
MVTEIRLKY

SEQ ID NO: 38357 - protein, 9 aa, Homo Sapiens
MWSIGVITY

SEQ ID NO: 38358 - protein, 9 aa, Homo Sapiens
MYVHAYTLY

SEQ ID NO: 38359 - protein, 9 aa, Homo Sapiens
NAFDVFAAY

SEQ ID NO: 38360 - protein, 9 aa, Homo Sapiens
NFEELNFFF

SEQ ID NO: 38361 - protein, 9 aa, Homo Sapiens
NFEHFLLQY

SEQ ID NO: 38362 - protein, 9 aa, Homo Sapiens
NFFPGVFEY

SEQ ID NO: 38363 - protein, 9 aa, Homo Sapiens
NFLPLHYDY

SEQ ID NO: 38364 - protein, 9 aa, Homo Sapiens
NFVRLLMLY

SEQ ID NO: 38365 - protein, 9 aa, Homo Sapiens
NFYDETYDY

SEQ ID NO: 38366 - protein, 9 aa, Homo Sapiens
NFYLVPLHY

SEQ ID NO: 38367 - protein, 9 aa, Homo Sapiens
NIFAITFRY

SEQ ID NO: 38368 - protein, 9 aa, Homo Sapiens
NILPKVFHY

SEQ ID NO: 38369 - protein, 9 aa, Homo Sapiens
NIQYLFLEY

SEQ ID NO: 38370 - protein, 9 aa, Homo Sapiens
NKTQTILFY

SEQ ID NO: 38371 - protein, 9 aa, Homo Sapiens
NLLEKQLEY

SEQ ID NO: 38372 - protein, 9 aa, Homo Sapiens
NLLPYSLRY

SEQ ID NO: 38373 - protein, 9 aa, Homo Sapiens
NLPLFAFEY

SEQ ID NO: 38374 - protein, 9 aa, Homo Sapiens
NNMSKFFQY

SEQ ID NO: 38375 - protein, 9 aa, Homo Sapiens
NPSPYHLYY

SEQ ID NO: 38376 - protein, 9 aa, Homo Sapiens
NSLPGNFFY

SEQ ID NO: 38377 - protein, 9 aa, Homo Sapiens
NTYPIKLFY

SEQ ID NO: 38378 - protein, 9 aa, Homo Sapiens
NVFIQGFLY

SEQ ID NO: 38379 - protein, 9 aa, Homo Sapiens
NVLLVTQHY

SEQ ID NO: 38380 - protein, 9 aa, Homo Sapiens
NVMGEQFSY

SEQ ID NO: 38381 - protein, 9 aa, Homo Sapiens
NVTQVRAFY

SEQ ID NO: 38382 - protein, 9 aa, Homo Sapiens
NWKVPAILY

SEQ ID NO: 38383 - protein, 9 aa, Homo Sapiens
NWSKILLHY

SEQ ID NO: 38384 - protein, 9 aa, Homo Sapiens
NYGMQPLMY

SEQ ID NO: 38385 - protein, 9 aa, Homo Sapiens
NYLHDFLKY

SEQ ID NO: 38386 - protein, 9 aa, Homo Sapiens
PFLGIGLLY

SEQ ID NO: 38387 - protein, 9 aa, Homo Sapiens
QALDIRLSY

SEQ ID NO: 38388 - protein, 9 aa, Homo Sapiens
QHITLFLKY

SEQ ID NO: 38389 - protein, 9 aa, Homo Sapiens
QIFIGPTYY

SEQ ID NO: 38390 - protein, 9 aa, Homo Sapiens
QLDDLKVEL

SEQ ID NO: 38391 - protein, 9 aa, Homo Sapiens
QLLPFLVRY

SEQ ID NO: 38392 - protein, 9 aa, Homo Sapiens
QMLEFAFRY

SEQ ID NO: 38393 - protein, 9 aa, Homo Sapiens
QQFPEGLFY

SEQ ID NO: 38394 - protein, 9 aa, Homo Sapiens
QVHNLLLTY

SEQ ID NO: 38395 - protein, 9 aa, Homo Sapiens
QVLEPQLTY

SEQ ID NO: 38396 - protein, 9 aa, Homo Sapiens
QVLGRFFLY

SEQ ID NO: 38397 - protein, 9 aa, Homo Sapiens
QVMPQLLNY

SEQ ID NO: 38398 - protein, 9 aa, Homo Sapiens
QYHLQQLFY

SEQ ID NO: 38399 - protein, 9 aa, Homo Sapiens
QYLLVTALY

SEQ ID NO: 38400 - protein, 9 aa, Homo Sapiens
RIAEFAFEY

SEQ ID NO: 38401 - protein, 9 aa, Homo Sapiens
RLFGISLSY

SEQ ID NO: 38402 - protein, 9 aa, Homo Sapiens
RLLEIQADY

SEQ ID NO: 38403 - protein, 9 aa, Homo Sapiens
RLLLLLLRY

SEQ ID NO: 38404 - protein, 9 aa, Homo Sapiens
RLMELHFKY

SEQ ID NO: 38405 - protein, 9 aa, Homo Sapiens
RMFDMGFEY

SEQ ID NO: 38406 - protein, 9 aa, Homo Sapiens
RMVEMFLEY

SEQ ID NO: 38407 - protein, 9 aa, Homo Sapiens
RNADVFLKY

SEQ ID NO: 38408 - protein, 9 aa, Homo Sapiens
RNFHVFLEY

SEQ ID NO: 38409 - protein, 9 aa, Homo Sapiens
RQIDFVLSY

SEQ ID NO: 38410 - protein, 9 aa, Homo Sapiens
RVFPYSVFY

SEQ ID NO: 38411 - protein, 9 aa, Homo Sapiens
RVFQECLTY

SEQ ID NO: 38412 - protein, 9 aa, Homo Sapiens
RYLEMLLEY

SEQ ID NO: 38413 - protein, 9 aa, Homo Sapiens
RYVEFNLLY

SEQ ID NO: 38414 - protein, 9 aa, Homo Sapiens
SAALIIQKY

SEQ ID NO: 38415 - protein, 9 aa, Homo Sapiens
SAITVFLLF

SEQ ID NO: 38416 - protein, 9 aa, Homo Sapiens
SALPLYNLY

SEQ ID NO: 38417 - protein, 9 aa, Homo Sapiens
SFAARSFYY

SEQ ID NO: 38418 - protein, 9 aa, Homo Sapiens
SFAEIIMGY

SEQ ID NO: 38419 - protein, 9 aa, Homo Sapiens
SFAGSFLEY

SEQ ID NO: 38420 - protein, 9 aa, Homo Sapiens
SFARLSLTY

SEQ ID NO: 38421 - protein, 9 aa, Homo Sapiens
SFATLFPKY

SEQ ID NO: 38422 - protein, 9 aa, Homo Sapiens
SFDFLELNY

SEQ ID NO: 38423 - protein, 9 aa, Homo Sapiens
SFEGNVFMY

SEQ ID NO: 38424 - protein, 9 aa, Homo Sapiens
SFEQFHLFY

SEQ ID NO: 38425 - protein, 9 aa, Homo Sapiens
SFFEIYNEY

SEQ ID NO: 38426 - protein, 9 aa, Homo Sapiens
SFFTPLLLF

SEQ ID NO: 38427 - protein, 9 aa, Homo Sapiens
SFGELALIY

SEQ ID NO: 38428 - protein, 9 aa, Homo Sapiens
SFGINSILY

SEQ ID NO: 38429 - protein, 9 aa, Homo Sapiens
SFGLYGLLY

SEQ ID NO: 38430 - protein, 9 aa, Homo Sapiens
SFHVIFVLY

SEQ ID NO: 38431 - protein, 9 aa, Homo Sapiens
SFIGAFLTF

SEQ ID NO: 38432 - protein, 9 aa, Homo Sapiens
SFIRLLLNY

SEQ ID NO: 38433 - protein, 9 aa, Homo Sapiens
SFLPVHLGF

SEQ ID NO: 38434 - protein, 9 aa, Homo Sapiens
SFLSIGARY

SEQ ID NO: 38435 - protein, 9 aa, Homo Sapiens
SFLTEFINY

SEQ ID NO: 38436 - protein, 9 aa, Homo Sapiens
SFTDVIGHY

SEQ ID NO: 38437 - protein, 9 aa, Homo Sapiens
SFTTVWLIY

SEQ ID NO: 38438 - protein, 9 aa, Homo Sapiens
SFVWHALDY

SEQ ID NO: 38439 - protein, 9 aa, Homo Sapiens
SFWAYKIYY

SEQ ID NO: 38440 - protein, 9 aa, Homo Sapiens
SGLPLILHY

SEQ ID NO: 38441 - protein, 9 aa, Homo Sapiens
SIADLVFTY

SEQ ID NO: 38442 - protein, 9 aa, Homo Sapiens
SIAPFHICY

SEQ ID NO: 38443 - protein, 9 aa, Homo Sapiens
SIAWFTVFY

SEQ ID NO: 38444 - protein, 9 aa, Homo Sapiens
SIFGLGLAY

SEQ ID NO: 38445 - protein, 9 aa, Homo Sapiens
SIFHMSDSY

SEQ ID NO: 38446 - protein, 9 aa, Homo Sapiens
SIGDIFLKY

SEQ ID NO: 38447 - protein, 9 aa, Homo Sapiens
SILGLLLLY

SEQ ID NO: 38448 - protein, 9 aa, Homo Sapiens
SIMDEFQEY

SEQ ID NO: 38449 - protein, 9 aa, Homo Sapiens
SISAVVMSY

SEQ ID NO: 38450 - protein, 9 aa, Homo Sapiens
SISNLVFTY

SEQ ID NO: 38451 - protein, 9 aa, Homo Sapiens
SLFFVPLSY

SEQ ID NO: 38452 - protein, 9 aa, Homo Sapiens
SLFGIPLWY

SEQ ID NO: 38453 - protein, 9 aa, Homo Sapiens
SLIDILLAY

SEQ ID NO: 38454 - protein, 9 aa, Homo Sapiens
SLISQVFYY

SEQ ID NO: 38455 - protein, 9 aa, Homo Sapiens
SLLALIMAY

SEQ ID NO: 38456 - protein, 9 aa, Homo Sapiens
SLLERLLTY

SEQ ID NO: 38457 - protein, 9 aa, Homo Sapiens
SLLGKPLSY

SEQ ID NO: 38458 - protein, 9 aa, Homo Sapiens
SLLHLGALY

SEQ ID NO: 38459 - protein, 9 aa, Homo Sapiens
SLLSQMLHY

SEQ ID NO: 38460 - protein, 9 aa, Homo Sapiens
SLLVSVLEY

SEQ ID NO: 38461 - protein, 9 aa, Homo Sapiens
SLPHVGYLY

SEQ ID NO: 38462 - protein, 9 aa, Homo Sapiens
SLSEYVLLF

SEQ ID NO: 38463 - protein, 9 aa, Homo Sapiens
SMFNGQLLF

SEQ ID NO: 38464 - protein, 9 aa, Homo Sapiens
SMLACFLVY

SEQ ID NO: 38465 - protein, 9 aa, Homo Sapiens
SMLDILMDY

SEQ ID NO: 38466 - protein, 9 aa, Homo Sapiens
SSLVKSYLY

SEQ ID NO: 38467 - protein, 9 aa, Homo Sapiens
STFFPFHEY

SEQ ID NO: 38468 - protein, 9 aa, Homo Sapiens
STVSRFFLY

SEQ ID NO: 38469 - protein, 9 aa, Homo Sapiens
STYLVAFAY

SEQ ID NO: 38470 - protein, 9 aa, Homo Sapiens
SVAGIFNYY

SEQ ID NO: 38471 - protein, 9 aa, Homo Sapiens
SVFEKYFQF

SEQ ID NO: 38472 - protein, 9 aa, Homo Sapiens
SVFEVFVLY

SEQ ID NO: 38473 - protein, 9 aa, Homo Sapiens
SVFGMQARY

SEQ ID NO: 38474 - protein, 9 aa, Homo Sapiens
SVGNFYLLY

SEQ ID NO: 38475 - protein, 9 aa, Homo Sapiens
SVIEQILHY

SEQ ID NO: 38476 - protein, 9 aa, Homo Sapiens
SVLALVAYY

SEQ ID NO: 38477 - protein, 9 aa, Homo Sapiens
SVLDSFLKY

SEQ ID NO: 38478 - protein, 9 aa, Homo Sapiens
SVLGAFLTF

SEQ ID NO: 38479 - protein, 9 aa, Homo Sapiens
SVLGFFIQY

SEQ ID NO: 38480 - protein, 9 aa, Homo Sapiens
SVLMKALEY

SEQ ID NO: 38481 - protein, 9 aa, Homo Sapiens
SVLPAYLSY

SEQ ID NO: 38482 - protein, 9 aa, Homo Sapiens
SVLPFQIYY

SEQ ID NO: 38483 - protein, 9 aa, Homo Sapiens
SVLQFLGLY

SEQ ID NO: 38484 - protein, 9 aa, Homo Sapiens
SVLTASLSY

SEQ ID NO: 38485 - protein, 9 aa, Homo Sapiens
SVMRLTISY

SEQ ID NO: 38486 - protein, 9 aa, Homo Sapiens
SVSDQFYRY

SEQ ID NO: 38487 - protein, 9 aa, Homo Sapiens
SVSDVLLNF

SEQ ID NO: 38488 - protein, 9 aa, Homo Sapiens
SVTAITVLY

SEQ ID NO: 38489 - protein, 9 aa, Homo Sapiens
SVTEVQLRF

SEQ ID NO: 38490 - protein, 9 aa, Homo Sapiens
SVVGALLLY

SEQ ID NO: 38491 - protein, 9 aa, Homo Sapiens
SVVPHNFMY

SEQ ID NO: 38492 - protein, 9 aa, Homo Sapiens
SVYHPQLAY

SEQ ID NO: 38493 - protein, 9 aa, Homo Sapiens
SYEQLMQLY

SEQ ID NO: 38494 - protein, 9 aa, Homo Sapiens
SYFRTLLMY

SEQ ID NO: 38495 - protein, 9 aa, Homo Sapiens
SYINFELRY

SEQ ID NO: 38496 - protein, 9 aa, Homo Sapiens
SYPDIHFDM

SEQ ID NO: 38497 - protein, 9 aa, Homo Sapiens
SYPNVFLVF

SEQ ID NO: 38498 - protein, 9 aa, Homo Sapiens
SYPYFVIQY

SEQ ID NO: 38499 - protein, 9 aa, Homo Sapiens
SYSDLVLFF

SEQ ID NO: 38500 - protein, 9 aa, Homo Sapiens
TAFGGFLKY

SEQ ID NO: 38501 - protein, 9 aa, Homo Sapiens
TALAAALHY

SEQ ID NO: 38502 - protein, 9 aa, Homo Sapiens
TALAAFLSY

SEQ ID NO: 38503 - protein, 9 aa, Homo Sapiens
TALHIYANY

SEQ ID NO: 38504 - protein, 9 aa, Homo Sapiens
TFMDHVLRY

SEQ ID NO: 38505 - protein, 9 aa, Homo Sapiens
TFVSIFSLY

SEQ ID NO: 38506 - protein, 9 aa, Homo Sapiens
TIFTARLYY

SEQ ID NO: 38507 - protein, 9 aa, Homo Sapiens
TIIDRSFRY

SEQ ID NO: 38508 - protein, 9 aa, Homo Sapiens
TILSQPLMY

SEQ ID NO: 38509 - protein, 9 aa, Homo Sapiens
TIMEDYFAY

SEQ ID NO: 38510 - protein, 9 aa, Homo Sapiens
TINPILLYF

SEQ ID NO: 38511 - protein, 9 aa, Homo Sapiens
TISFLSYLF

SEQ ID NO: 38512 - protein, 9 aa, Homo Sapiens
TISPIILYF

SEQ ID NO: 38513 - protein, 9 aa, Homo Sapiens
TLADILLYY

SEQ ID NO: 38514 - protein, 9 aa, Homo Sapiens
TLAGLALKY

SEQ ID NO: 38515 - protein, 9 aa, Homo Sapiens
TLIEQQFTY

SEQ ID NO: 38516 - protein, 9 aa, Homo Sapiens
TLITQFLVY

SEQ ID NO: 38517 - protein, 9 aa, Homo Sapiens
TLLEKQLEY

SEQ ID NO: 38518 - protein, 9 aa, Homo Sapiens
TLNNLAVLY

SEQ ID NO: 38519 - protein, 9 aa, Homo Sapiens
TLSDIFLLF

SEQ ID NO: 38520 - protein, 9 aa, Homo Sapiens
TLTKIALRY

SEQ ID NO: 38521 - protein, 9 aa, Homo Sapiens
TMCPHILRY

SEQ ID NO: 38522 - protein, 9 aa, Homo Sapiens
TMLDLFFHY

SEQ ID NO: 38523 - protein, 9 aa, Homo Sapiens
TMVGKTFTY

SEQ ID NO: 38524 - protein, 9 aa, Homo Sapiens
TSSDILLCY

SEQ ID NO: 38525 - protein, 9 aa, Homo Sapiens
TTIDIGVKY

SEQ ID NO: 38526 - protein, 9 aa, Homo Sapiens
TTLDIITRY

SEQ ID NO: 38527 - protein, 9 aa, Homo Sapiens
TTLHNLLLY

SEQ ID NO: 38528 - protein, 9 aa, Homo Sapiens
TTLYIVMEY

SEQ ID NO: 38529 - protein, 9 aa, Homo Sapiens
TTNFIKAEY

SEQ ID NO: 38530 - protein, 9 aa, Homo Sapiens
TTTGQVLLY

SEQ ID NO: 38531 - protein, 9 aa, Homo Sapiens
TVFSQAIHY

SEQ ID NO: 38532 - protein, 9 aa, Homo Sapiens
TVLGEPLIY

SEQ ID NO: 38533 - protein, 9 aa, Homo Sapiens
TVSDAILRY

SEQ ID NO: 38534 - protein, 9 aa, Homo Sapiens
TVTEVLLKY

SEQ ID NO: 38535 - protein, 9 aa, Homo Sapiens
TWNPLKLHY

SEQ ID NO: 38536 - protein, 9 aa, Homo Sapiens
TYAPVAFRY

SEQ ID NO: 38537 - protein, 9 aa, Homo Sapiens
TYFAVNANY

SEQ ID NO: 38538 - protein, 9 aa, Homo Sapiens
TYLNDFFSY

SEQ ID NO: 38539 - protein, 9 aa, Homo Sapiens
VAFKKTFSY

SEQ ID NO: 38540 - protein, 9 aa, Homo Sapiens
VAYPCAILY

SEQ ID NO: 38541 - protein, 9 aa, Homo Sapiens
VFFFYPLDF

SEQ ID NO: 38542 - protein, 9 aa, Homo Sapiens
VFIYPSLIY

SEQ ID NO: 38543 - protein, 9 aa, Homo Sapiens
VFLIIKLLY

SEQ ID NO: 38544 - protein, 9 aa, Homo Sapiens
VFLPIHITY

SEQ ID NO: 38545 - protein, 9 aa, Homo Sapiens
VFMFPVGLY

SEQ ID NO: 38546 - protein, 9 aa, Homo Sapiens
VFNEKGWNY

SEQ ID NO: 38547 - protein, 9 aa, Homo Sapiens
VFSEVSPLY

SEQ ID NO: 38548 - protein, 9 aa, Homo Sapiens
VFVATFLRY

SEQ ID NO: 38549 - protein, 9 aa, Homo Sapiens
VFVESVLRY

SEQ ID NO: 38550 - protein, 9 aa, Homo Sapiens
VFYPYPQYF

SEQ ID NO: 38551 - protein, 9 aa, Homo Sapiens
VGLPVHLLF

SEQ ID NO: 38552 - protein, 9 aa, Homo Sapiens
VILDIPLLF

SEQ ID NO: 38553 - protein, 9 aa, Homo Sapiens
VILKLLLKY

SEQ ID NO: 38554 - protein, 9 aa, Homo Sapiens
VILPPLSPY

SEQ ID NO: 38555 - protein, 9 aa, Homo Sapiens
VINDGLFYY

SEQ ID NO: 38556 - protein, 9 aa, Homo Sapiens
VLAFIILNY

SEQ ID NO: 38557 - protein, 9 aa, Homo Sapiens
VLAGTQLLY

SEQ ID NO: 38558 - protein, 9 aa, Homo Sapiens
VLFEHAVGY

SEQ ID NO: 38559 - protein, 9 aa, Homo Sapiens
VLFLKFLEY

SEQ ID NO: 38560 - protein, 9 aa, Homo Sapiens
VLLDVAYAY

SEQ ID NO: 38561 - protein, 9 aa, Homo Sapiens
VLLDYHLNY

SEQ ID NO: 38562 - protein, 9 aa, Homo Sapiens
VLLEYHIAY

SEQ ID NO: 38563 - protein, 9 aa, Homo Sapiens
VLLGFLYRY

SEQ ID NO: 38564 - protein, 9 aa, Homo Sapiens
VLLPFIAYY

SEQ ID NO: 38565 - protein, 9 aa, Homo Sapiens
VLLPVALEF

SEQ ID NO: 38566 - protein, 9 aa, Homo Sapiens
VLLQLVLRY

SEQ ID NO: 38567 - protein, 9 aa, Homo Sapiens
VLREIAEEY

SEQ ID NO: 38568 - protein, 9 aa, Homo Sapiens
VLYDRVLKY

SEQ ID NO: 38569 - protein, 9 aa, Homo Sapiens
VLYNIAFMY

SEQ ID NO: 38570 - protein, 9 aa, Homo Sapiens
VMLGTQLLY

SEQ ID NO: 38571 - protein, 9 aa, Homo Sapiens
VQLTFALRY

SEQ ID NO: 38572 - protein, 9 aa, Homo Sapiens
VTFEKQWFY

SEQ ID NO: 38573 - protein, 9 aa, Homo Sapiens
VTFPEFLRY

SEQ ID NO: 38574 - protein, 9 aa, Homo Sapiens
VTVAIPLKY

SEQ ID NO: 38575 - protein, 9 aa, Homo Sapiens
VTYNYPVHY

SEQ ID NO: 38576 - protein, 9 aa, Homo Sapiens
VVFVTKFLY

SEQ ID NO: 38577 - protein, 9 aa, Homo Sapiens
VVISPPQFY

SEQ ID NO: 38578 - protein, 9 aa, Homo Sapiens
VVKEIFFHY

SEQ ID NO: 38579 - protein, 9 aa, Homo Sapiens
VVLAMYPKY

SEQ ID NO: 38580 - protein, 9 aa, Homo Sapiens
VVLQDLLAY

SEQ ID NO: 38581 - protein, 9 aa, Homo Sapiens
VVNIARYLY

SEQ ID NO: 38582 - protein, 9 aa, Homo Sapiens
VVNPFIYAY

SEQ ID NO: 38583 - protein, 9 aa, Homo Sapiens
VVPQFVVFY

SEQ ID NO: 38584 - protein, 9 aa, Homo Sapiens
VVSNILLAY

SEQ ID NO: 38585 - protein, 9 aa, Homo Sapiens
VVYPWTQRF

SEQ ID NO: 38586 - protein, 9 aa, Homo Sapiens
VWKIPAILY

SEQ ID NO: 38587 - protein, 9 aa, Homo Sapiens
VYLPMSYCY

SEQ ID NO: 38588 - protein, 9 aa, Homo Sapiens
VYNHFLLYY

SEQ ID NO: 38589 - protein, 9 aa, Homo Sapiens
VYQAVQALY

SEQ ID NO: 38590 - protein, 9 aa, Homo Sapiens
VYSDLHAFY

SEQ ID NO: 38591 - protein, 9 aa, Homo Sapiens
WIGDKSFEY

SEQ ID NO: 38592 - protein, 9 aa, Homo Sapiens
WLDKIDRRY

SEQ ID NO: 38593 - protein, 9 aa, Homo Sapiens
WLESVRLEY

SEQ ID NO: 38594 - protein, 9 aa, Homo Sapiens
WLHDIILGY

SEQ ID NO: 38595 - protein, 9 aa, Homo Sapiens
WLTDNTYKY

SEQ ID NO: 38596 - protein, 9 aa, Homo Sapiens
WVILQPLFY

SEQ ID NO: 38597 - protein, 9 aa, Homo Sapiens
WYPDLESKY

SEQ ID NO: 38598 - protein, 9 aa, Homo Sapiens
YAFLMVDRY

SEQ ID NO: 38599 - protein, 9 aa, Homo Sapiens
YAIDNPLHY

SEQ ID NO: 38600 - protein, 9 aa, Homo Sapiens
YATFIVTNY

SEQ ID NO: 38601 - protein, 9 aa, Homo Sapiens
YAYPYSYYY

SEQ ID NO: 38602 - protein, 9 aa, Homo Sapiens
YFEDQPLLY

SEQ ID NO: 38603 - protein, 9 aa, Homo Sapiens
YFEEIALKF

SEQ ID NO: 38604 - protein, 9 aa, Homo Sapiens
YFEEIKQFY

SEQ ID NO: 38605 - protein, 9 aa, Homo Sapiens
YFFGEGYTY

SEQ ID NO: 38606 - protein, 9 aa, Homo Sapiens
YFGEIALLL

SEQ ID NO: 38607 - protein, 9 aa, Homo Sapiens
YFGEIALLM

SEQ ID NO: 38608 - protein, 9 aa, Homo Sapiens
YFGNYFTYY

SEQ ID NO: 38609 - protein, 9 aa, Homo Sapiens
YFIGRIYLY

SEQ ID NO: 38610 - protein, 9 aa, Homo Sapiens
YFLPITPHY

SEQ ID NO: 38611 - protein, 9 aa, Homo Sapiens
YFPELIANF

SEQ ID NO: 38612 - protein, 9 aa, Homo Sapiens
YFPFMDLKL

SEQ ID NO: 38613 - protein, 9 aa, Homo Sapiens
YFSDPFLKY

SEQ ID NO: 38614 - protein, 9 aa, Homo Sapiens
YFVKFLDAY

SEQ ID NO: 38615 - protein, 9 aa, Homo Sapiens
YFYEAFEGY

SEQ ID NO: 38616 - protein, 9 aa, Homo Sapiens
YGIPFYLQY

SEQ ID NO: 38617 - protein, 9 aa, Homo Sapiens
YHIGIPLTY

SEQ ID NO: 38618 - protein, 9 aa, Homo Sapiens
YIYIRGEFY

SEQ ID NO: 38619 - protein, 9 aa, Homo Sapiens
YLDQISRYY

SEQ ID NO: 38620 - protein, 9 aa, Homo Sapiens
YLEQLHQLY

SEQ ID NO: 38621 - protein, 9 aa, Homo Sapiens
YLEQLILKY

SEQ ID NO: 38622 - protein, 9 aa, Homo Sapiens
YLFTEAYYY

SEQ ID NO: 38623 - protein, 9 aa, Homo Sapiens
YLGEFSITY

SEQ ID NO: 38624 - protein, 9 aa, Homo Sapiens
YLHDQFWSY

SEQ ID NO: 38625 - protein, 9 aa, Homo Sapiens
YLHYLPSYY

SEQ ID NO: 38626 - protein, 9 aa, Homo Sapiens
YLLPHILVY

SEQ ID NO: 38627 - protein, 9 aa, Homo Sapiens
YLPALKVEY

SEQ ID NO: 38628 - protein, 9 aa, Homo Sapiens
YLPKEQYLY

SEQ ID NO: 38629 - protein, 9 aa, Homo Sapiens
YLPPLFWRF

SEQ ID NO: 38630 - protein, 9 aa, Homo Sapiens
YLPVLPGDY

SEQ ID NO: 38631 - protein, 9 aa, Homo Sapiens
YLTKFIARY

SEQ ID NO: 38632 - protein, 9 aa, Homo Sapiens
YLWHIPLSY

SEQ ID NO: 38633 - protein, 9 aa, Homo Sapiens
YLWHIPLTY

SEQ ID NO: 38634 - protein, 9 aa, Homo Sapiens
YMGDFVVVY

SEQ ID NO: 38635 - protein, 9 aa, Homo Sapiens
YMIEPIDEY

SEQ ID NO: 38636 - protein, 9 aa, Homo Sapiens
YMTEPIDEY

SEQ ID NO: 38637 - protein, 9 aa, Homo Sapiens
YMWYNIIQY

SEQ ID NO: 38638 - protein, 9 aa, Homo Sapiens
YQTFLQLLY

SEQ ID NO: 38639 - protein, 9 aa, Homo Sapiens
YTAVVPLVY

SEQ ID NO: 38640 - protein, 9 aa, Homo Sapiens
YTMKEVLFY

SEQ ID NO: 38641 - protein, 9 aa, Homo Sapiens
YTSDYFISY

SEQ ID NO: 38642 - protein, 9 aa, Homo Sapiens
YVAEILPKY

SEQ ID NO: 38643 - protein, 9 aa, Homo Sapiens
YVFLYYYEY

SEQ ID NO: 38644 - protein, 9 aa, Homo Sapiens
YVIPAFLVY

SEQ ID NO: 38645 - protein, 9 aa, Homo Sapiens
YVIQKFFEF

SEQ ID NO: 38646 - protein, 9 aa, Homo Sapiens
YVLYPLDLY

SEQ ID NO: 38647 - protein, 9 aa, Homo Sapiens
YVPEHWEYY

SEQ ID NO: 38648 - protein, 9 aa, Homo Sapiens
YVYPKYLKY

SEQ ID NO: 38649 - protein, 9 aa, Homo Sapiens
YVYPLQLKY

SEQ ID NO: 38650 - protein, 9 aa, Homo Sapiens
YVYSHFLQF

SEQ ID NO: 38651 - protein, 9 aa, Homo Sapiens
YWKEVLLRY

SEQ ID NO: 38652 - protein, 9 aa, Homo Sapiens
YYFFTPYVY

SEQ ID NO: 38653 - protein, 9 aa, Homo Sapiens
YYIFIPSKF

SEQ ID NO: 38654 - protein, 9 aa, Homo Sapiens
YYIRFFITY

SEQ ID NO: 38655 - protein, 9 aa, Homo Sapiens
YYKNIGLGF

SEQ ID NO: 38656 - protein, 9 aa, Homo Sapiens
YYLPKLLSY

SEQ ID NO: 38657 - protein, 9 aa, Homo Sapiens
YYPEYKLLF

SEQ ID NO: 38658 - protein, 9 aa, Homo Sapiens
YYRAWQEYY

SEQ ID NO: 38659 - protein, 9 aa, Homo Sapiens
YYSGLIYTY

SEQ ID NO: 38660 - protein, 10 aa, Homo Sapiens
AAAAAAALLY

SEQ ID NO: 38661 - protein, 10 aa, Homo Sapiens
AFDEIVALGY

SEQ ID NO: 38662 - protein, 10 aa, Homo Sapiens
AFFEGPPFKF

SEQ ID NO: 38663 - protein, 10 aa, Homo Sapiens
AFFYFEGTFY

SEQ ID NO: 38664 - protein, 10 aa, Homo Sapiens
AFLEPLGLAY

SEQ ID NO: 38665 - protein, 10 aa, Homo Sapiens
AFLNDSYLKY

SEQ ID NO: 38666 - protein, 10 aa, Homo Sapiens
AFQKIVVLFY

SEQ ID NO: 38667 - protein, 10 aa, Homo Sapiens
AFVVAVGAEY

SEQ ID NO: 38668 - protein, 10 aa, Homo Sapiens
AFYKISTLYY

SEQ ID NO: 38669 - protein, 10 aa, Homo Sapiens
AVAALQDLRY

SEQ ID NO: 38670 - protein, 10 aa, Homo Sapiens
AVADKVHLMY

SEQ ID NO: 38671 - protein, 10 aa, Homo Sapiens
AVDPTSGQLY

SEQ ID NO: 38672 - protein, 10 aa, Homo Sapiens
AVIEDTWHYF

SEQ ID NO: 38673 - protein, 10 aa, Homo Sapiens
AVPTELALLY

SEQ ID NO: 38674 - protein, 10 aa, Homo Sapiens
AVTEYPTLKF

SEQ ID NO: 38675 - protein, 10 aa, Homo Sapiens
AYIDPIAMEY

SEQ ID NO: 38676 - protein, 10 aa, Homo Sapiens
AYIRDLALEY

SEQ ID NO: 38677 - protein, 10 aa, Homo Sapiens
AYWRQAGLSY

SEQ ID NO: 38678 - protein, 10 aa, Homo Sapiens
FFDKVIEKRY

SEQ ID NO: 38679 - protein, 10 aa, Homo Sapiens
FFEIYNELLY

SEQ ID NO: 38680 - protein, 10 aa, Homo Sapiens
FFEVPATTIY

SEQ ID NO: 38681 - protein, 10 aa, Homo Sapiens
FFHDILHTKY

SEQ ID NO: 38682 - protein, 10 aa, Homo Sapiens
FFLLSEMNIF

SEQ ID NO: 38683 - protein, 10 aa, Homo Sapiens
FFLPKGAYIY

SEQ ID NO: 38684 - protein, 10 aa, Homo Sapiens
FFNYIEKLKY

SEQ ID NO: 38685 - protein, 10 aa, Homo Sapiens
FFPDKPITQY

SEQ ID NO: 38686 - protein, 10 aa, Homo Sapiens
FFPLLDFAYM

SEQ ID NO: 38687 - protein, 10 aa, Homo Sapiens
FFPSIYDVKY

SEQ ID NO: 38688 - protein, 10 aa, Homo Sapiens
FFPVIYDVKY

SEQ ID NO: 38689 - protein, 10 aa, Homo Sapiens
FLIVPFGLLY

SEQ ID NO: 38690 - protein, 10 aa, Homo Sapiens
FLLPTTALYY

SEQ ID NO: 38691 - protein, 10 aa, Homo Sapiens
FLPLLKAQEY

SEQ ID NO: 38692 - protein, 10 aa, Homo Sapiens
FLPPNLGRHY

SEQ ID NO: 38693 - protein, 10 aa, Homo Sapiens
FLSFPTTKTY

SEQ ID NO: 38694 - protein, 10 aa, Homo Sapiens
FMGLFKSSRY

SEQ ID NO: 38695 - protein, 10 aa, Homo Sapiens
FTDVNSILRY

SEQ ID NO: 38696 - protein, 10 aa, Homo Sapiens
FTPDIPTMLY

SEQ ID NO: 38697 - protein, 10 aa, Homo Sapiens
FVPDWAEILY

SEQ ID NO: 38698 - protein, 10 aa, Homo Sapiens
FVYPGNPLRH

SEQ ID NO: 38699 - protein, 10 aa, Homo Sapiens
FYAGGFAIVY

SEQ ID NO: 38700 - protein, 10 aa, Homo Sapiens
FYEFFNEQKY

SEQ ID NO: 38701 - protein, 10 aa, Homo Sapiens
FYLFDLKAFF

SEQ ID NO: 38702 - protein, 10 aa, Homo Sapiens
FYLPIAAAMY

SEQ ID NO: 38703 - protein, 10 aa, Homo Sapiens
FYVEDLKARY

SEQ ID NO: 38704 - protein, 10 aa, Homo Sapiens
FYVHNDIFRY

SEQ ID NO: 38705 - protein, 10 aa, Homo Sapiens
FYVPFAKALY

SEQ ID NO: 38706 - protein, 10 aa, Homo Sapiens
GFASFSDYYY

SEQ ID NO: 38707 - protein, 10 aa, Homo Sapiens
GFIDSFRPLY

SEQ ID NO: 38708 - protein, 10 aa, Homo Sapiens
GFYEVFKVLY

SEQ ID NO: 38709 - protein, 10 aa, Homo Sapiens
GIKNFFTDVY

SEQ ID NO: 38710 - protein, 10 aa, Homo Sapiens
GIMTGPFFRY

SEQ ID NO: 38711 - protein, 10 aa, Homo Sapiens
GLLTTPQLHY

SEQ ID NO: 38712 - protein, 10 aa, Homo Sapiens
GSNPFTGFFY

SEQ ID NO: 38713 - protein, 10 aa, Homo Sapiens
GTVTEVLLKY

SEQ ID NO: 38714 - protein, 10 aa, Homo Sapiens
GVDVTGPHLY

SEQ ID NO: 38715 - protein, 10 aa, Homo Sapiens
HFEVPFIAFY

SEQ ID NO: 38716 - protein, 10 aa, Homo Sapiens
HFPATPLLDY

SEQ ID NO: 38717 - protein, 10 aa, Homo Sapiens
HLDEAQRLLY

SEQ ID NO: 38718 - protein, 10 aa, Homo Sapiens
HNLLLNYGLY

SEQ ID NO: 38719 - protein, 10 aa, Homo Sapiens
HVLPDPGLRY

SEQ ID NO: 38720 - protein, 10 aa, Homo Sapiens
HYFSDPFLKY

SEQ ID NO: 38721 - protein, 10 aa, Homo Sapiens
HYPPPVPFGY

SEQ ID NO: 38722 - protein, 10 aa, Homo Sapiens
HYSQELSLLY

SEQ ID NO: 38723 - protein, 10 aa, Homo Sapiens
IFLDSKGLEY

SEQ ID NO: 38724 - protein, 10 aa, Homo Sapiens
IFSEQVAMGY

SEQ ID NO: 38725 - protein, 10 aa, Homo Sapiens
ILAHLTGTEF

SEQ ID NO: 38726 - protein, 10 aa, Homo Sapiens
ILSSLEPLHR

SEQ ID NO: 38727 - protein, 10 aa, Homo Sapiens
IPFLGIGLLY

SEQ ID NO: 38728 - protein, 10 aa, Homo Sapiens
IVVKLNSGDY

SEQ ID NO: 38729 - protein, 10 aa, Homo Sapiens
KLADQIFAYY

SEQ ID NO: 38730 - protein, 10 aa, Homo Sapiens
KLIENPLLRY

SEQ ID NO: 38731 - protein, 10 aa, Homo Sapiens
KVFDGIPPPY

SEQ ID NO: 38732 - protein, 10 aa, Homo Sapiens
LFFYPLDFTF

SEQ ID NO: 38733 - protein, 10 aa, Homo Sapiens
LFIALITDSY

SEQ ID NO: 38734 - protein, 10 aa, Homo Sapiens
LFLWPEAFLY

SEQ ID NO: 38735 - protein, 10 aa, Homo Sapiens
LFPLFAQLDY

SEQ ID NO: 38736 - protein, 10 aa, Homo Sapiens
LGDLFSISAY

SEQ ID NO: 38737 - protein, 10 aa, Homo Sapiens
LLSPFSLLLY

SEQ ID NO: 38738 - protein, 10 aa, Homo Sapiens
LMKAIDFEYY

SEQ ID NO: 38739 - protein, 10 aa, Homo Sapiens
LVIFPEGTRY

SEQ ID NO: 38740 - protein, 10 aa, Homo Sapiens
LVYPGDPLRF

SEQ ID NO: 38741 - protein, 10 aa, Homo Sapiens
MFPFFDIAHY

SEQ ID NO: 38742 - protein, 10 aa, Homo Sapiens
MIPLIMSVLY

SEQ ID NO: 38743 - protein, 10 aa, Homo Sapiens
MYYYNGKAVY

SEQ ID NO: 38744 - protein, 10 aa, Homo Sapiens
NFEVFTETTY

SEQ ID NO: 38745 - protein, 10 aa, Homo Sapiens
NFLHPVIYYY

SEQ ID NO: 38746 - protein, 10 aa, Homo Sapiens
NFPPPLPALY

SEQ ID NO: 38747 - protein, 10 aa, Homo Sapiens
NTDPWAGYRY

SEQ ID NO: 38748 - protein, 10 aa, Homo Sapiens
NTLGSLALLY

SEQ ID NO: 38749 - protein, 10 aa, Homo Sapiens
NVADLHLYLY

SEQ ID NO: 38750 - protein, 10 aa, Homo Sapiens
NWGRVVALFY

SEQ ID NO: 38751 - protein, 10 aa, Homo Sapiens
NWNEVVTQQY

SEQ ID NO: 38752 - protein, 10 aa, Homo Sapiens
NYNHLMPTRY

SEQ ID NO: 38753 - protein, 10 aa, Homo Sapiens
NYSHLVSVGY

SEQ ID NO: 38754 - protein, 10 aa, Homo Sapiens
QFIQDYGMRY

SEQ ID NO: 38755 - protein, 10 aa, Homo Sapiens
QVDPLSALKY

SEQ ID NO: 38756 - protein, 10 aa, Homo Sapiens
RFQFLPHAYY

SEQ ID NO: 38757 - protein, 10 aa, Homo Sapiens
SFEGNVFMYY

SEQ ID NO: 38758 - protein, 10 aa, Homo Sapiens
SFELIVVQNY

SEQ ID NO: 38759 - protein, 10 aa, Homo Sapiens
SFISGLFNFY

SEQ ID NO: 38760 - protein, 10 aa, Homo Sapiens
SFMDPASALY

SEQ ID NO: 38761 - protein, 10 aa, Homo Sapiens
SFPALAPLTY

SEQ ID NO: 38762 - protein, 10 aa, Homo Sapiens
SFTAFANSHY

SEQ ID NO: 38763 - protein, 10 aa, Homo Sapiens
SFVDPLVTNY

SEQ ID NO: 38764 - protein, 10 aa, Homo Sapiens
SLSLENVLYY

SEQ ID NO: 38765 - protein, 10 aa, Homo Sapiens
SMESFPPLAY

SEQ ID NO: 38766 - protein, 10 aa, Homo Sapiens
STLEVTSLKY

SEQ ID NO: 38767 - protein, 10 aa, Homo Sapiens
SVFVATFLRY

SEQ ID NO: 38768 - protein, 10 aa, Homo Sapiens
SYLPVLPGDY

SEQ ID NO: 38769 - protein, 10 aa, Homo Sapiens
SYWKEVLLRY

SEQ ID NO: 38770 - protein, 10 aa, Homo Sapiens
TFADFDGVLY

SEQ ID NO: 38771 - protein, 10 aa, Homo Sapiens
TFEGWPALLY

SEQ ID NO: 38772 - protein, 10 aa, Homo Sapiens
TFHFLLGSIY

SEQ ID NO: 38773 - protein, 10 aa, Homo Sapiens
TFLIPGFYSY

SEQ ID NO: 38774 - protein, 10 aa, Homo Sapiens
TFVWPAHFKY

SEQ ID NO: 38775 - protein, 10 aa, Homo Sapiens
TLFDSRHLLY

SEQ ID NO: 38776 - protein, 10 aa, Homo Sapiens
TTSHLMGMFY

SEQ ID NO: 38777 - protein, 10 aa, Homo Sapiens
TVLPFAGLLY

SEQ ID NO: 38778 - protein, 10 aa, Homo Sapiens
TVLSIPELLY

SEQ ID NO: 38779 - protein, 10 aa, Homo Sapiens
VALPPGYYLY

SEQ ID NO: 38780 - protein, 10 aa, Homo Sapiens
VFEYINNTDF

SEQ ID NO: 38781 - protein, 10 aa, Homo Sapiens
VFFNIPQIQY

SEQ ID NO: 38782 - protein, 10 aa, Homo Sapiens
VFLSIKGIYY

SEQ ID NO: 38783 - protein, 10 aa, Homo Sapiens
VFMFPVGLYY

SEQ ID NO: 38784 - protein, 10 aa, Homo Sapiens
VFTFIPGVLY

SEQ ID NO: 38785 - protein, 10 aa, Homo Sapiens
VILDNSPGAY

SEQ ID NO: 38786 - protein, 10 aa, Homo Sapiens
VVFEGNHYFY

SEQ ID NO: 38787 - protein, 10 aa, Homo Sapiens
VVPLTAEPFL

SEQ ID NO: 38788 - protein, 10 aa, Homo Sapiens
VYIDIDPLLY

SEQ ID NO: 38789 - protein, 10 aa, Homo Sapiens
VYIVLDKAEY

SEQ ID NO: 38790 - protein, 10 aa, Homo Sapiens
VYLHYLPSYY

SEQ ID NO: 38791 - protein, 10 aa, Homo Sapiens
VYLPPEAFTF

SEQ ID NO: 38792 - protein, 10 aa, Homo Sapiens
VYSDLHAFYY

SEQ ID NO: 38793 - protein, 10 aa, Homo Sapiens
WLEEGIHWQY

SEQ ID NO: 38794 - protein, 10 aa, Homo Sapiens
WLPALFTDLY

SEQ ID NO: 38795 - protein, 10 aa, Homo Sapiens
WVPPLIGELY

SEQ ID NO: 38796 - protein, 10 aa, Homo Sapiens
WYPLWGGIMY

SEQ ID NO: 38797 - protein, 10 aa, Homo Sapiens
WYPTSVPVLY

SEQ ID NO: 38798 - protein, 10 aa, Homo Sapiens
WYVDDPYQKY

SEQ ID NO: 38799 - protein, 10 aa, Homo Sapiens
YAFQDDRYLY

SEQ ID NO: 38800 - protein, 10 aa, Homo Sapiens
YALPPPPQFY

SEQ ID NO: 38801 - protein, 10 aa, Homo Sapiens
YFDEEMAVKY

SEQ ID NO: 38802 - protein, 10 aa, Homo Sapiens
YFEEIKQFYY

SEQ ID NO: 38803 - protein, 10 aa, Homo Sapiens
YFEYIEENKY

SEQ ID NO: 38804 - protein, 10 aa, Homo Sapiens
YFFPGTGDMY

SEQ ID NO: 38805 - protein, 10 aa, Homo Sapiens
YFGSAFATPF

SEQ ID NO: 38806 - protein, 10 aa, Homo Sapiens
YFGSNIAHMY

SEQ ID NO: 38807 - protein, 10 aa, Homo Sapiens
YFIPFLPLEY

SEQ ID NO: 38808 - protein, 10 aa, Homo Sapiens
YFLGIKSLVY

SEQ ID NO: 38809 - protein, 10 aa, Homo Sapiens
YFLTSFYTKY

SEQ ID NO: 38810 - protein, 10 aa, Homo Sapiens
YFVKVVPTVY

SEQ ID NO: 38811 - protein, 10 aa, Homo Sapiens
YFVTFPYPYM

SEQ ID NO: 38812 - protein, 10 aa, Homo Sapiens
YIIRLENAFY

SEQ ID NO: 38813 - protein, 10 aa, Homo Sapiens
YIPLKVALFY

SEQ ID NO: 38814 - protein, 10 aa, Homo Sapiens
YIWDVTILEY

SEQ ID NO: 38815 - protein, 10 aa, Homo Sapiens
YLPFPIIQQY

SEQ ID NO: 38816 - protein, 10 aa, Homo Sapiens
YMGHFDLLNY

SEQ ID NO: 38817 - protein, 10 aa, Homo Sapiens
YMIDPSGVSY

SEQ ID NO: 38818 - protein, 10 aa, Homo Sapiens
YTTDFIYQLY

SEQ ID NO: 38819 - protein, 10 aa, Homo Sapiens
YVPAEPKLAF

SEQ ID NO: 38820 - protein, 10 aa, Homo Sapiens
YWGEIISQQY

SEQ ID NO: 38821 - protein, 10 aa, Homo Sapiens
YYDPNSQYYY

SEQ ID NO: 38822 - protein, 10 aa, Homo Sapiens
YYDTDPFLFY

SEQ ID NO: 38823 - protein, 10 aa, Homo Sapiens
YYLEQLILKY

SEQ ID NO: 38824 - protein, 10 aa, Homo Sapiens
YYSHLEGARF

SEQ ID NO: 38825 - protein, 10 aa, Homo Sapiens
YYYDGDIGNY

SEQ ID NO: 38826 - protein, 10 aa, Homo Sapiens
YYYDPLAGTY

SEQ ID NO: 38827 - protein, 10 aa, Homo Sapiens
YYYDPQTGLY

SEQ ID NO: 38828 - protein, 11 aa, Homo Sapiens
AFLGPKDIFPY

SEQ ID NO: 38829 - protein, 11 aa, Homo Sapiens
ALFPHPHIHEY

SEQ ID NO: 38830 - protein, 11 aa, Homo Sapiens
ALLDTTEKYLY

SEQ ID NO: 38831 - protein, 11 aa, Homo Sapiens
ALVSGKLALRY

SEQ ID NO: 38832 - protein, 11 aa, Homo Sapiens
AVAFGSFFQGY

SEQ ID NO: 38833 - protein, 11 aa, Homo Sapiens
AVASEDSVLLY

SEQ ID NO: 38834 - protein, 11 aa, Homo Sapiens
AVIENPEMLKY

SEQ ID NO: 38835 - protein, 11 aa, Homo Sapiens
AVLAPLIALVY

SEQ ID NO: 38836 - protein, 11 aa, Homo Sapiens
AVLGETLIPHY

SEQ ID NO: 38837 - protein, 11 aa, Homo Sapiens
FAVTEYPTLKF

SEQ ID NO: 38838 - protein, 11 aa, Homo Sapiens
FFASGGGKFNY

SEQ ID NO: 38839 - protein, 11 aa, Homo Sapiens
FFPLPLTPTLY

SEQ ID NO: 38840 - protein, 11 aa, Homo Sapiens
FFVYEVTSTKY

SEQ ID NO: 38841 - protein, 11 aa, Homo Sapiens
FILDGKLATMY

SEQ ID NO: 38842 - protein, 11 aa, Homo Sapiens
FLPFPLPLFAY

SEQ ID NO: 38843 - protein, 11 aa, Homo Sapiens
FTWPDGHVTKY

SEQ ID NO: 38844 - protein, 11 aa, Homo Sapiens
FVLPNGQMFVF

SEQ ID NO: 38845 - protein, 11 aa, Homo Sapiens
FVLSLGVAALY

SEQ ID NO: 38846 - protein, 11 aa, Homo Sapiens
FYAFQDDRYLY

SEQ ID NO: 38847 - protein, 11 aa, Homo Sapiens
FYDPDVGNFHY

SEQ ID NO: 38848 - protein, 11 aa, Homo Sapiens
FYPFPVPPLLY

SEQ ID NO: 38849 - protein, 11 aa, Homo Sapiens
FYPNIGGIIRY

SEQ ID NO: 38850 - protein, 11 aa, Homo Sapiens
FYYLEQLILKY

SEQ ID NO: 38851 - protein, 11 aa, Homo Sapiens
GAVPTELALLY

SEQ ID NO: 38852 - protein, 11 aa, Homo Sapiens
GLLGVDKLFSY

SEQ ID NO: 38853 - protein, 11 aa, Homo Sapiens
GLMGKPSILTY

SEQ ID NO: 38854 - protein, 11 aa, Homo Sapiens
GTAPPTLALHY

SEQ ID NO: 38855 - protein, 11 aa, Homo Sapiens
GTISQPRILLY

SEQ ID NO: 38856 - protein, 11 aa, Homo Sapiens
GVFGQNEYLRY

SEQ ID NO: 38857 - protein, 11 aa, Homo Sapiens
GVFLLPQLFLF

SEQ ID NO: 38858 - protein, 11 aa, Homo Sapiens
GVLEMVKIFRY

SEQ ID NO: 38859 - protein, 11 aa, Homo Sapiens
GYFDEEMAVKY

SEQ ID NO: 38860 - protein, 11 aa, Homo Sapiens
HVGMEPLQFDY

SEQ ID NO: 38861 - protein, 11 aa, Homo Sapiens
HVLIDVGTGYY

SEQ ID NO: 38862 - protein, 11 aa, Homo Sapiens
IALEPEQILRY

SEQ ID NO: 38863 - protein, 11 aa, Homo Sapiens
IALNPTGTFLY

SEQ ID NO: 38864 - protein, 11 aa, Homo Sapiens
IFLILTTTGHY

SEQ ID NO: 38865 - protein, 11 aa, Homo Sapiens
IFTDVNSILRY

SEQ ID NO: 38866 - protein, 11 aa, Homo Sapiens
ILLPVSSLLLY

SEQ ID NO: 38867 - protein, 11 aa, Homo Sapiens
IYIKHPHLFKY

SEQ ID NO: 38868 - protein, 11 aa, Homo Sapiens
KFYVHNDIFRY

SEQ ID NO: 38869 - protein, 11 aa, Homo Sapiens
KLLGLPEDYLY

SEQ ID NO: 38870 - protein, 11 aa, Homo Sapiens
LFLDSNGLFLF

SEQ ID NO: 38871 - protein, 11 aa, Homo Sapiens
LFPDPVVQWLY

SEQ ID NO: 38872 - protein, 11 aa, Homo Sapiens
LFWDQTQQHSY

SEQ ID NO: 38873 - protein, 11 aa, Homo Sapiens
LMLDKNNLVKY

SEQ ID NO: 38874 - protein, 11 aa, Homo Sapiens
LMLPEKLRPLY

SEQ ID NO: 38875 - protein, 11 aa, Homo Sapiens
LVIPGHLIFLY

SEQ ID NO: 38876 - protein, 11 aa, Homo Sapiens
LYYDPNSQYYY

SEQ ID NO: 38877 - protein, 11 aa, Homo Sapiens
MLLPEKLISKY

SEQ ID NO: 38878 - protein, 11 aa, Homo Sapiens
MLLRGANAVGY

SEQ ID NO: 38879 - protein, 11 aa, Homo Sapiens
MPVGPDAILRY

SEQ ID NO: 38880 - protein, 11 aa, Homo Sapiens
MVQPINLIFRY

SEQ ID NO: 38881 - protein, 11 aa, Homo Sapiens
NAFEHGGEFTY

SEQ ID NO: 38882 - protein, 11 aa, Homo Sapiens
NLFQEAEEFLY

SEQ ID NO: 38883 - protein, 11 aa, Homo Sapiens
NTIPLFVQLLY

SEQ ID NO: 38884 - protein, 11 aa, Homo Sapiens
PFLDNPDAFYY

SEQ ID NO: 38885 - protein, 11 aa, Homo Sapiens
QDPYIRELGLY

SEQ ID NO: 38886 - protein, 11 aa, Homo Sapiens
RVFSIVIPFLY

SEQ ID NO: 38887 - protein, 11 aa, Homo Sapiens
RVIGSELVQKY

SEQ ID NO: 38888 - protein, 11 aa, Homo Sapiens
RVLDLSENFLY

SEQ ID NO: 38889 - protein, 11 aa, Homo Sapiens
RVNDVPEEFLY

SEQ ID NO: 38890 - protein, 11 aa, Homo Sapiens
RVNDVPEEFMY

SEQ ID NO: 38891 - protein, 11 aa, Homo Sapiens
RVYDIPPKFFY

SEQ ID NO: 38892 - protein, 11 aa, Homo Sapiens
RVYSDLHAFYY

SEQ ID NO: 38893 - protein, 11 aa, Homo Sapiens
SFVEFILEPLY

SEQ ID NO: 38894 - protein, 11 aa, Homo Sapiens
SLEHLPANLFY

SEQ ID NO: 38895 - protein, 11 aa, Homo Sapiens
SLFPHPHIHEY

SEQ ID NO: 38896 - protein, 11 aa, Homo Sapiens
SMLPSDVSILY

SEQ ID NO: 38897 - protein, 11 aa, Homo Sapiens
SVYLLTGLELY

SEQ ID NO: 38898 - protein, 11 aa, Homo Sapiens
SYLDKEDTFFY

SEQ ID NO: 38899 - protein, 11 aa, Homo Sapiens
TAQVIILNHPG

SEQ ID NO: 38900 - protein, 11 aa, Homo Sapiens
TILDIPNQLYY

SEQ ID NO: 38901 - protein, 11 aa, Homo Sapiens
VAISEELVQKY

SEQ ID NO: 38902 - protein, 11 aa, Homo Sapiens
VAYWRQAGLSY

SEQ ID NO: 38903 - protein, 11 aa, Homo Sapiens
VFIVNSEDYMY

SEQ ID NO: 38904 - protein, 11 aa, Homo Sapiens
VMLGTQLLYKF

SEQ ID NO: 38905 - protein, 11 aa, Homo Sapiens
VMWSPTHPALF

SEQ ID NO: 38906 - protein, 11 aa, Homo Sapiens
VVFDKSDLAKY

SEQ ID NO: 38907 - protein, 11 aa, Homo Sapiens
VVLDDKDYFLF

SEQ ID NO: 38908 - protein, 11 aa, Homo Sapiens
VYLRTLAPGLF

SEQ ID NO: 38909 - protein, 11 aa, Homo Sapiens
YFEYFGPDFKL

SEQ ID NO: 38910 - protein, 11 aa, Homo Sapiens
YFINSKGIPRY

SEQ ID NO: 38911 - protein, 11 aa, Homo Sapiens
YLVIFPEGTRY

SEQ ID NO: 38912 - protein, 11 aa, Homo Sapiens
YLWKSEKPLYY

SEQ ID NO: 38913 - protein, 11 aa, Homo Sapiens
YNFTLADILLY

SEQ ID NO: 38914 - protein, 11 aa, Homo Sapiens
YTLDVPDAFYY

SEQ ID NO: 38915 - protein, 11 aa, Homo Sapiens
YVGDLMGSLAY

SEQ ID NO: 38916 - protein, 11 aa, Homo Sapiens
YYDGDVGNYYY

SEQ ID NO: 38917 - protein, 11 aa, Homo Sapiens
YYDPSTGIYYY

SEQ ID NO: 38918 - protein, 11 aa, Homo Sapiens
YYINKISSTLY

SEQ ID NO: 38919 - protein, 11 aa, Homo Sapiens
YYMNQVEETRY

SEQ ID NO: 38920 - protein, 11 aa, Homo Sapiens
YYYDPLAGTYY

SEQ ID NO: 38921 - protein, 11 aa, Homo Sapiens
YYYDPTTGLYY

SEQ ID NO: 38922 - protein, 8 aa, Homo Sapiens
GSNVKIVK

SEQ ID NO: 38923 - protein, 8 aa, Homo Sapiens
HEVKKVTL

SEQ ID NO: 38924 - protein, 8 aa, Homo Sapiens
KIHPFIRK

SEQ ID NO: 38925 - protein, 8 aa, Homo Sapiens
KTITHPRL

SEQ ID NO: 38926 - protein, 8 aa, Homo Sapiens
KVLKTLNV

SEQ ID NO: 38927 - protein, 8 aa, Homo Sapiens
KVWVPKQK

SEQ ID NO: 38928 - protein, 8 aa, Homo Sapiens
LDISRPKM

SEQ ID NO: 38929 - protein, 8 aa, Homo Sapiens
LYWSHPRK

SEQ ID NO: 38930 - protein, 8 aa, Homo Sapiens
NVPVGKVL

SEQ ID NO: 38931 - protein, 8 aa, Homo Sapiens
RTFLRPPK

SEQ ID NO: 38932 - protein, 8 aa, Homo Sapiens
SFSVKPLK

SEQ ID NO: 38933 - protein, 8 aa, Homo Sapiens
SRLIKVHL

SEQ ID NO: 38934 - protein, 8 aa, Homo Sapiens
TEELAYLK

SEQ ID NO: 38935 - protein, 8 aa, Homo Sapiens
TRIPKIQK

SEQ ID NO: 38936 - protein, 8 aa, Homo Sapiens
VSLTACKV

SEQ ID NO: 38937 - protein, 8 aa, Homo Sapiens
YRPPPKVK

SEQ ID NO: 38938 - protein, 9 aa, Homo Sapiens
AAKCIVNNV

SEQ ID NO: 38939 - protein, 9 aa, Homo Sapiens
AAPAYSRAL

SEQ ID NO: 38940 - protein, 9 aa, Homo Sapiens
AAPTSAAAL

SEQ ID NO: 38941 - protein, 9 aa, Homo Sapiens
AARAIAVQK

SEQ ID NO: 38942 - protein, 9 aa, Homo Sapiens
AFFTRPFYK

SEQ ID NO: 38943 - protein, 9 aa, Homo Sapiens
AFKELLKEK

SEQ ID NO: 38944 - protein, 9 aa, Homo Sapiens
AFKISKIYK

SEQ ID NO: 38945 - protein, 9 aa, Homo Sapiens
AFKNHVFNV

SEQ ID NO: 38946 - protein, 9 aa, Homo Sapiens
AFRSTPPGM

SEQ ID NO: 38947 - protein, 9 aa, Homo Sapiens
AFRVPTANV

SEQ ID NO: 38948 - protein, 9 aa, Homo Sapiens
AGISKRWPK

SEQ ID NO: 38949 - protein, 9 aa, Homo Sapiens
AGKTTWVTK

SEQ ID NO: 38950 - protein, 9 aa, Homo Sapiens
AGQSVRICK

SEQ ID NO: 38951 - protein, 9 aa, Homo Sapiens
AIKAKIMAK

SEQ ID NO: 38952 - protein, 9 aa, Homo Sapiens
AIKGMHIRK

SEQ ID NO: 38953 - protein, 9 aa, Homo Sapiens
AIRNDYIVK

SEQ ID NO: 38954 - protein, 9 aa, Homo Sapiens
AIRVTNPNA

SEQ ID NO: 38955 - protein, 9 aa, Homo Sapiens
ALKENSYVK

SEQ ID NO: 38956 - protein, 9 aa, Homo Sapiens
ALKKLILSK

SEQ ID NO: 38957 - protein, 9 aa, Homo Sapiens
ALKTGIVAK

SEQ ID NO: 38958 - protein, 9 aa, Homo Sapiens
ALRAVYRLK

SEQ ID NO: 38959 - protein, 9 aa, Homo Sapiens
ALRESWKTK

SEQ ID NO: 38960 - protein, 9 aa, Homo Sapiens
ALRPLVKPK

SEQ ID NO: 38961 - protein, 9 aa, Homo Sapiens
AMKEFAYMK

SEQ ID NO: 38962 - protein, 9 aa, Homo Sapiens
AMKISFAKK

SEQ ID NO: 38963 - protein, 9 aa, Homo Sapiens
AMKKVFRVY

SEQ ID NO: 38964 - protein, 9 aa, Homo Sapiens
AMRECFRTK

SEQ ID NO: 38965 - protein, 9 aa, Homo Sapiens
AQKSDFCLK

SEQ ID NO: 38966 - protein, 9 aa, Homo Sapiens
AQQKVTLPK

SEQ ID NO: 38967 - protein, 9 aa, Homo Sapiens
AQRDPIIAK

SEQ ID NO: 38968 - protein, 9 aa, Homo Sapiens
AQRGLAVLK

SEQ ID NO: 38969 - protein, 9 aa, Homo Sapiens
AQRPSSPAL

SEQ ID NO: 38970 - protein, 9 aa, Homo Sapiens
AQSIYRPSK

SEQ ID NO: 38971 - protein, 9 aa, Homo Sapiens
AQYWKRNNK

SEQ ID NO: 38972 - protein, 9 aa, Homo Sapiens
ASFDKAKLK

SEQ ID NO: 38973 - protein, 9 aa, Homo Sapiens
ASFSKRIQK

SEQ ID NO: 38974 - protein, 9 aa, Homo Sapiens
ASHISKLPK

SEQ ID NO: 38975 - protein, 9 aa, Homo Sapiens
ASKPPPISK

SEQ ID NO: 38976 - protein, 9 aa, Homo Sapiens
ASKTQYFHV

SEQ ID NO: 38977 - protein, 9 aa, Homo Sapiens
ASRATVLQK

SEQ ID NO: 38978 - protein, 9 aa, Homo Sapiens
ASRGPGPSL

SEQ ID NO: 38979 - protein, 9 aa, Homo Sapiens
ASRPNSPQL

SEQ ID NO: 38980 - protein, 9 aa, Homo Sapiens
ASRQAPPHI

SEQ ID NO: 38981 - protein, 9 aa, Homo Sapiens
ASRVVQVVK

SEQ ID NO: 38982 - protein, 9 aa, Homo Sapiens
ASSPPAIPK

SEQ ID NO: 38983 - protein, 9 aa, Homo Sapiens
ATAPPAPAY

SEQ ID NO: 38984 - protein, 9 aa, Homo Sapiens
ATAPPSPLK

SEQ ID NO: 38985 - protein, 9 aa, Homo Sapiens
ATFARIWYL

SEQ ID NO: 38986 - protein, 9 aa, Homo Sapiens
ATFLKKVAK

SEQ ID NO: 38987 - protein, 9 aa, Homo Sapiens
ATILREILK

SEQ ID NO: 38988 - protein, 9 aa, Homo Sapiens
ATKAVCVLK

SEQ ID NO: 38989 - protein, 9 aa, Homo Sapiens
ATKEILAQK

SEQ ID NO: 38990 - protein, 9 aa, Homo Sapiens
ATKGITRCL

SEQ ID NO: 38991 - protein, 9 aa, Homo Sapiens
ATKIKNYYK

SEQ ID NO: 38992 - protein, 9 aa, Homo Sapiens
ATKKITESV

SEQ ID NO: 38993 - protein, 9 aa, Homo Sapiens
ATKPLYVAL

SEQ ID NO: 38994 - protein, 9 aa, Homo Sapiens
ATKPMTYVV

SEQ ID NO: 38995 - protein, 9 aa, Homo Sapiens
ATKQMHFRV

SEQ ID NO: 38996 - protein, 9 aa, Homo Sapiens
ATKSSYLNI

SEQ ID NO: 38997 - protein, 9 aa, Homo Sapiens
ATLSICSPK

SEQ ID NO: 38998 - protein, 9 aa, Homo Sapiens
ATNYITRNK

SEQ ID NO: 38999 - protein, 9 aa, Homo Sapiens
ATQPSWLGK

SEQ ID NO: 39000 - protein, 9 aa, Homo Sapiens
ATRFDQVMK

SEQ ID NO: 39001 - protein, 9 aa, Homo Sapiens
ATRKLALQK

SEQ ID NO: 39002 - protein, 9 aa, Homo Sapiens
ATRPAGQNL

SEQ ID NO: 39003 - protein, 9 aa, Homo Sapiens
ATRPVTPPR

SEQ ID NO: 39004 - protein, 9 aa, Homo Sapiens
ATRRVHPAL

SEQ ID NO: 39005 - protein, 9 aa, Homo Sapiens
ATRSITNNV

SEQ ID NO: 39006 - protein, 9 aa, Homo Sapiens
ATRSSAVRL

SEQ ID NO: 39007 - protein, 9 aa, Homo Sapiens
ATYERVVYK

SEQ ID NO: 39008 - protein, 9 aa, Homo Sapiens
AVHPPGVSK

SEQ ID NO: 39009 - protein, 9 aa, Homo Sapiens
AVKAIIYQY

SEQ ID NO: 39010 - protein, 9 aa, Homo Sapiens
AVKDIAINL

SEQ ID NO: 39011 - protein, 9 aa, Homo Sapiens
AVKDTILQL

SEQ ID NO: 39012 - protein, 9 aa, Homo Sapiens
AVKEKAIQV

SEQ ID NO: 39013 - protein, 9 aa, Homo Sapiens
AVKEKYAKY

SEQ ID NO: 39014 - protein, 9 aa, Homo Sapiens
AVKERYSYV

SEQ ID NO: 39015 - protein, 9 aa, Homo Sapiens
AVKESTITL

SEQ ID NO: 39016 - protein, 9 aa, Homo Sapiens
AVKGKYKFL

SEQ ID NO: 39017 - protein, 9 aa, Homo Sapiens
AVKKELIPK

SEQ ID NO: 39018 - protein, 9 aa, Homo Sapiens
AVKLGAVPK

SEQ ID NO: 39019 - protein, 9 aa, Homo Sapiens
AVKNLYRNV

SEQ ID NO: 39020 - protein, 9 aa, Homo Sapiens
AVKPFGLKV

SEQ ID NO: 39021 - protein, 9 aa, Homo Sapiens
AVKPSVTCV

SEQ ID NO: 39022 - protein, 9 aa, Homo Sapiens
AVKQSILAK

SEQ ID NO: 39023 - protein, 9 aa, Homo Sapiens
AVKTKILIK

SEQ ID NO: 39024 - protein, 9 aa, Homo Sapiens
AVLDFVKQK

SEQ ID NO: 39025 - protein, 9 aa, Homo Sapiens
AVLGTHKLK

SEQ ID NO: 39026 - protein, 9 aa, Homo Sapiens
AVLHHLVNK

SEQ ID NO: 39027 - protein, 9 aa, Homo Sapiens
AVLKDRVNK

SEQ ID NO: 39028 - protein, 9 aa, Homo Sapiens
AVNNIRLIK

SEQ ID NO: 39029 - protein, 9 aa, Homo Sapiens
AVQRTLLEK

SEQ ID NO: 39030 - protein, 9 aa, Homo Sapiens
AVRGSNPHL

SEQ ID NO: 39031 - protein, 9 aa, Homo Sapiens
AVRIPGGPA

SEQ ID NO: 39032 - protein, 9 aa, Homo Sapiens
AVRIRAPQI

SEQ ID NO: 39033 - protein, 9 aa, Homo Sapiens
AVRKPIVLK

SEQ ID NO: 39034 - protein, 9 aa, Homo Sapiens
AVRPASLNL

SEQ ID NO: 39035 - protein, 9 aa, Homo Sapiens
AVRPQSVFV

SEQ ID NO: 39036 - protein, 9 aa, Homo Sapiens
AVRTSIVEK

SEQ ID NO: 39037 - protein, 9 aa, Homo Sapiens
AVRVPAPSI

SEQ ID NO: 39038 - protein, 9 aa, Homo Sapiens
AVSSLIRNK

SEQ ID NO: 39039 - protein, 9 aa, Homo Sapiens
AWRPPPPCL

SEQ ID NO: 39040 - protein, 9 aa, Homo Sapiens
AYAPPPPAK

SEQ ID NO: 39041 - protein, 9 aa, Homo Sapiens
AYKEYISNK

SEQ ID NO: 39042 - protein, 9 aa, Homo Sapiens
AYKKQFSQY

SEQ ID NO: 39043 - protein, 9 aa, Homo Sapiens
AYKSHFRNV

SEQ ID NO: 39044 - protein, 9 aa, Homo Sapiens
AYRPISASV

SEQ ID NO: 39045 - protein, 9 aa, Homo Sapiens
AYYALTKFK

SEQ ID NO: 39046 - protein, 9 aa, Homo Sapiens
AYYPSSFPK

SEQ ID NO: 39047 - protein, 9 aa, Homo Sapiens
DGRPAPPMK

SEQ ID NO: 39048 - protein, 9 aa, Homo Sapiens
EITTERPKK

SEQ ID NO: 39049 - protein, 9 aa, Homo Sapiens
FPRKPSAPK

SEQ ID NO: 39050 - protein, 9 aa, Homo Sapiens
FRVPTANVS

SEQ ID NO: 39051 - protein, 9 aa, Homo Sapiens
FVKRQFMNK

SEQ ID NO: 39052 - protein, 9 aa, Homo Sapiens
GFKNKTVLK

SEQ ID NO: 39053 - protein, 9 aa, Homo Sapiens
GGPGGVGGL

SEQ ID NO: 39054 - protein, 9 aa, Homo Sapiens
GLKKFYITK

SEQ ID NO: 39055 - protein, 9 aa, Homo Sapiens
GLLDKKSLK

SEQ ID NO: 39056 - protein, 9 aa, Homo Sapiens
GMRPPHPGM

SEQ ID NO: 39057 - protein, 9 aa, Homo Sapiens
GMRSYYYGK

SEQ ID NO: 39058 - protein, 9 aa, Homo Sapiens
GNFFCIRKK

SEQ ID NO: 39059 - protein, 9 aa, Homo Sapiens
GQRPTQPVY

SEQ ID NO: 39060 - protein, 9 aa, Homo Sapiens
GQYGNPLNK

SEQ ID NO: 39061 - protein, 9 aa, Homo Sapiens
GRTGPRAPL

SEQ ID NO: 39062 - protein, 9 aa, Homo Sapiens
GSFSVKPLK

SEQ ID NO: 39063 - protein, 9 aa, Homo Sapiens
GSHFPGPFM

SEQ ID NO: 39064 - protein, 9 aa, Homo Sapiens
GSKDICIKV

SEQ ID NO: 39065 - protein, 9 aa, Homo Sapiens
GSKNRTIGV

SEQ ID NO: 39066 - protein, 9 aa, Homo Sapiens
GSLFLRTPK

SEQ ID NO: 39067 - protein, 9 aa, Homo Sapiens
GSLGSRPPL

SEQ ID NO: 39068 - protein, 9 aa, Homo Sapiens
GSRDKTIKL

SEQ ID NO: 39069 - protein, 9 aa, Homo Sapiens
GSRFYFWTK

SEQ ID NO: 39070 - protein, 9 aa, Homo Sapiens
GSRLIKVHL

SEQ ID NO: 39071 - protein, 9 aa, Homo Sapiens
GSRPPGLSK

SEQ ID NO: 39072 - protein, 9 aa, Homo Sapiens
GSVFRAHVK

SEQ ID NO: 39073 - protein, 9 aa, Homo Sapiens
GTIPKRPWL

SEQ ID NO: 39074 - protein, 9 aa, Homo Sapiens
GTKDLIREV

SEQ ID NO: 39075 - protein, 9 aa, Homo Sapiens
GTKDVVVSV

SEQ ID NO: 39076 - protein, 9 aa, Homo Sapiens
GTKEGYLTK

SEQ ID NO: 39077 - protein, 9 aa, Homo Sapiens
GTKGTVIKV

SEQ ID NO: 39078 - protein, 9 aa, Homo Sapiens
GTKKRVITL

SEQ ID NO: 39079 - protein, 9 aa, Homo Sapiens
GTKLPGLLK

SEQ ID NO: 39080 - protein, 9 aa, Homo Sapiens
GTKMTVNNL

SEQ ID NO: 39081 - protein, 9 aa, Homo Sapiens
GTKSTWPQK

SEQ ID NO: 39082 - protein, 9 aa, Homo Sapiens
GTLERGILK

SEQ ID NO: 39083 - protein, 9 aa, Homo Sapiens
GTNPGIITK

SEQ ID NO: 39084 - protein, 9 aa, Homo Sapiens
GTQILRPPK

SEQ ID NO: 39085 - protein, 9 aa, Homo Sapiens
GTREAFFSK

SEQ ID NO: 39086 - protein, 9 aa, Homo Sapiens
GTRESAINV

SEQ ID NO: 39087 - protein, 9 aa, Homo Sapiens
GTRPPHVFA

SEQ ID NO: 39088 - protein, 9 aa, Homo Sapiens
GVHPPAPGV

SEQ ID NO: 39089 - protein, 9 aa, Homo Sapiens
GVKAWTPTK

SEQ ID NO: 39090 - protein, 9 aa, Homo Sapiens
GVRPPAPSL

SEQ ID NO: 39091 - protein, 9 aa, Homo Sapiens
GWKPLGKEK

SEQ ID NO: 39092 - protein, 9 aa, Homo Sapiens
HAKGIVLEK

SEQ ID NO: 39093 - protein, 9 aa, Homo Sapiens
HARLAPPSL

SEQ ID NO: 39094 - protein, 9 aa, Homo Sapiens
HLKDVIVGK

SEQ ID NO: 39095 - protein, 9 aa, Homo Sapiens
HSFYPTPAL

SEQ ID NO: 39096 - protein, 9 aa, Homo Sapiens
HSKVKVIYK

SEQ ID NO: 39097 - protein, 9 aa, Homo Sapiens
HSRDSSFRL

SEQ ID NO: 39098 - protein, 9 aa, Homo Sapiens
HSRIEYMIK

SEQ ID NO: 39099 - protein, 9 aa, Homo Sapiens
HTKPDIIFK

SEQ ID NO: 39100 - protein, 9 aa, Homo Sapiens
HTKSFQLAK

SEQ ID NO: 39101 - protein, 9 aa, Homo Sapiens
HTQPSYRFK

SEQ ID NO: 39102 - protein, 9 aa, Homo Sapiens
HVHEPNPLR

SEQ ID NO: 39103 - protein, 9 aa, Homo Sapiens
HVYKERFPK

SEQ ID NO: 39104 - protein, 9 aa, Homo Sapiens
HVYRERFPK

SEQ ID NO: 39105 - protein, 9 aa, Homo Sapiens
HYKYTVVMK

SEQ ID NO: 39106 - protein, 9 aa, Homo Sapiens
IAKAKFIVK

SEQ ID NO: 39107 - protein, 9 aa, Homo Sapiens
IAPGVTHEL

SEQ ID NO: 39108 - protein, 9 aa, Homo Sapiens
IARIPEAFK

SEQ ID NO: 39109 - protein, 9 aa, Homo Sapiens
IARPTPPQA

SEQ ID NO: 39110 - protein, 9 aa, Homo Sapiens
IFQPPSPPK

SEQ ID NO: 39111 - protein, 9 aa, Homo Sapiens
IGRPPGPEM

SEQ ID NO: 39112 - protein, 9 aa, Homo Sapiens
IHIKIRVPK

SEQ ID NO: 39113 - protein, 9 aa, Homo Sapiens
IIKDFTKQK

SEQ ID NO: 39114 - protein, 9 aa, Homo Sapiens
IIKLAPPPK

SEQ ID NO: 39115 - protein, 9 aa, Homo Sapiens
IIKQGCLLK

SEQ ID NO: 39116 - protein, 9 aa, Homo Sapiens
IIQSIRMGM

SEQ ID NO: 39117 - protein, 9 aa, Homo Sapiens
ILIQNRAGK

SEQ ID NO: 39118 - protein, 9 aa, Homo Sapiens
ILKDMVKVK

SEQ ID NO: 39119 - protein, 9 aa, Homo Sapiens
ILKGIPIKK

SEQ ID NO: 39120 - protein, 9 aa, Homo Sapiens
ILKPTSSVK

SEQ ID NO: 39121 - protein, 9 aa, Homo Sapiens
ILLPKRPPK

SEQ ID NO: 39122 - protein, 9 aa, Homo Sapiens
ILLYIQRTK

SEQ ID NO: 39123 - protein, 9 aa, Homo Sapiens
ILQEYRKIK

SEQ ID NO: 39124 - protein, 9 aa, Homo Sapiens
ILRPSGPGA

SEQ ID NO: 39125 - protein, 9 aa, Homo Sapiens
IQFLHKEKK

SEQ ID NO: 39126 - protein, 9 aa, Homo Sapiens
IQKNVQLYK

SEQ ID NO: 39127 - protein, 9 aa, Homo Sapiens
ISRPVGVSK

SEQ ID NO: 39128 - protein, 9 aa, Homo Sapiens
ITKEDLIQK

SEQ ID NO: 39129 - protein, 9 aa, Homo Sapiens
ITKPKVISK

SEQ ID NO: 39130 - protein, 9 aa, Homo Sapiens
ITREAQVNV

SEQ ID NO: 39131 - protein, 9 aa, Homo Sapiens
IVHQAGMLK

SEQ ID NO: 39132 - protein, 9 aa, Homo Sapiens
IVRDHWVHV

SEQ ID NO: 39133 - protein, 9 aa, Homo Sapiens
IVRGAVVEK

SEQ ID NO: 39134 - protein, 9 aa, Homo Sapiens
KAKIKFIIK

SEQ ID NO: 39135 - protein, 9 aa, Homo Sapiens
KAKPVTTNL

SEQ ID NO: 39136 - protein, 9 aa, Homo Sapiens
KAKSPAPGL

SEQ ID NO: 39137 - protein, 9 aa, Homo Sapiens
KAPVTKVAA

SEQ ID NO: 39138 - protein, 9 aa, Homo Sapiens
KARIPAPLL

SEQ ID NO: 39139 - protein, 9 aa, Homo Sapiens
KAWAIFKGK

SEQ ID NO: 39140 - protein, 9 aa, Homo Sapiens
KERDFYFGK

SEQ ID NO: 39141 - protein, 9 aa, Homo Sapiens
KERDVFLVK

SEQ ID NO: 39142 - protein, 9 aa, Homo Sapiens
KFKDKFCVY

SEQ ID NO: 39143 - protein, 9 aa, Homo Sapiens
KFKEEVNHY

SEQ ID NO: 39144 - protein, 9 aa, Homo Sapiens
KFKESFAEM

SEQ ID NO: 39145 - protein, 9 aa, Homo Sapiens
KFKFPGRQK

SEQ ID NO: 39146 - protein, 9 aa, Homo Sapiens
KFREIQQEL

SEQ ID NO: 39147 - protein, 9 aa, Homo Sapiens
KFRSNLPAK

SEQ ID NO: 39148 - protein, 9 aa, Homo Sapiens
KFYGNRHLI

SEQ ID NO: 39149 - protein, 9 aa, Homo Sapiens
KGFDQTINL

SEQ ID NO: 39150 - protein, 9 aa, Homo Sapiens
KGKYKFLQK

SEQ ID NO: 39151 - protein, 9 aa, Homo Sapiens
KIKEINVQK

SEQ ID NO: 39152 - protein, 9 aa, Homo Sapiens
KIKELHQQY

SEQ ID NO: 39153 - protein, 9 aa, Homo Sapiens
KIKSFVKVY

SEQ ID NO: 39154 - protein, 9 aa, Homo Sapiens
KILAKRINV

SEQ ID NO: 39155 - protein, 9 aa, Homo Sapiens
KIRDTFCSY

SEQ ID NO: 39156 - protein, 9 aa, Homo Sapiens
KIRDVTKCL

SEQ ID NO: 39157 - protein, 9 aa, Homo Sapiens
KIREYFQKY

SEQ ID NO: 39158 - protein, 9 aa, Homo Sapiens
KIRIEDPPR

SEQ ID NO: 39159 - protein, 9 aa, Homo Sapiens
KIRLFQPNL

SEQ ID NO: 39160 - protein, 9 aa, Homo Sapiens
KIRPYWKNY

SEQ ID NO: 39161 - protein, 9 aa, Homo Sapiens
KISPYYRTK

SEQ ID NO: 39162 - protein, 9 aa, Homo Sapiens
KITDTFKVK

SEQ ID NO: 39163 - protein, 9 aa, Homo Sapiens
KLFNKFIGK

SEQ ID NO: 39164 - protein, 9 aa, Homo Sapiens
KLHFIFRHK

SEQ ID NO: 39165 - protein, 9 aa, Homo Sapiens
KLHGVNINV

SEQ ID NO: 39166 - protein, 9 aa, Homo Sapiens
KLKAIVASK

SEQ ID NO: 39167 - protein, 9 aa, Homo Sapiens
KLKDAFSHV

SEQ ID NO: 39168 - protein, 9 aa, Homo Sapiens
KLKDYLRSK

SEQ ID NO: 39169 - protein, 9 aa, Homo Sapiens
KLKEEVINK

SEQ ID NO: 39170 - protein, 9 aa, Homo Sapiens
KLKEKFQHY

SEQ ID NO: 39171 - protein, 9 aa, Homo Sapiens
KLKEYLKNK

SEQ ID NO: 39172 - protein, 9 aa, Homo Sapiens
KLKPYVSYL

SEQ ID NO: 39173 - protein, 9 aa, Homo Sapiens
KLKSFFKEY

SEQ ID NO: 39174 - protein, 9 aa, Homo Sapiens
KLKSFTYEY

SEQ ID NO: 39175 - protein, 9 aa, Homo Sapiens
KLNDLLKEK

SEQ ID NO: 39176 - protein, 9 aa, Homo Sapiens
KLRGIVSEK

SEQ ID NO: 39177 - protein, 9 aa, Homo Sapiens
KLRHSAPGL

SEQ ID NO: 39178 - protein, 9 aa, Homo Sapiens
KLRPPGAEK

SEQ ID NO: 39179 - protein, 9 aa, Homo Sapiens
KLRQPFFQK

SEQ ID NO: 39180 - protein, 9 aa, Homo Sapiens
KLVDVVKKK

SEQ ID NO: 39181 - protein, 9 aa, Homo Sapiens
KMHVPAPKL

SEQ ID NO: 39182 - protein, 9 aa, Homo Sapiens
KMKETLQNV

SEQ ID NO: 39183 - protein, 9 aa, Homo Sapiens
KMKGDYYRY

SEQ ID NO: 39184 - protein, 9 aa, Homo Sapiens
KMKSFCQRV

SEQ ID NO: 39185 - protein, 9 aa, Homo Sapiens
KMPKIKMPK

SEQ ID NO: 39186 - protein, 9 aa, Homo Sapiens
KNKPEWFFK

SEQ ID NO: 39187 - protein, 9 aa, Homo Sapiens
KNKQKFVLK

SEQ ID NO: 39188 - protein, 9 aa, Homo Sapiens
KQKSLYREV

SEQ ID NO: 39189 - protein, 9 aa, Homo Sapiens
KQLTSHPWK

SEQ ID NO: 39190 - protein, 9 aa, Homo Sapiens
KQRLQQLFK

SEQ ID NO: 39191 - protein, 9 aa, Homo Sapiens
KSFGELVHK

SEQ ID NO: 39192 - protein, 9 aa, Homo Sapiens
KSKDFVQVM

SEQ ID NO: 39193 - protein, 9 aa, Homo Sapiens
KSKEFVQKV

SEQ ID NO: 39194 - protein, 9 aa, Homo Sapiens
KSKITHPVY

SEQ ID NO: 39195 - protein, 9 aa, Homo Sapiens
KSKPFCEKL

SEQ ID NO: 39196 - protein, 9 aa, Homo Sapiens
KSKPIFWNL

SEQ ID NO: 39197 - protein, 9 aa, Homo Sapiens
KSKPVAFAV

SEQ ID NO: 39198 - protein, 9 aa, Homo Sapiens
KSKSIFWNL

SEQ ID NO: 39199 - protein, 9 aa, Homo Sapiens
KSNGTIIHV

SEQ ID NO: 39200 - protein, 9 aa, Homo Sapiens
KSQEIFLNL

SEQ ID NO: 39201 - protein, 9 aa, Homo Sapiens
KSRDSFLKR

SEQ ID NO: 39202 - protein, 9 aa, Homo Sapiens
KSRPPAPEL

SEQ ID NO: 39203 - protein, 9 aa, Homo Sapiens
KSRQTPPLA

SEQ ID NO: 39204 - protein, 9 aa, Homo Sapiens
KSRVSPPFK

SEQ ID NO: 39205 - protein, 9 aa, Homo Sapiens
KTAMSTPHV

SEQ ID NO: 39206 - protein, 9 aa, Homo Sapiens
KTHLPPPAL

SEQ ID NO: 39207 - protein, 9 aa, Homo Sapiens
KTIDGHINL

SEQ ID NO: 39208 - protein, 9 aa, Homo Sapiens
KTKDIVNGL

SEQ ID NO: 39209 - protein, 9 aa, Homo Sapiens
KTKDLFPSL

SEQ ID NO: 39210 - protein, 9 aa, Homo Sapiens
KTKDLLNNV

SEQ ID NO: 39211 - protein, 9 aa, Homo Sapiens
KTKDLYRDL

SEQ ID NO: 39212 - protein, 9 aa, Homo Sapiens
KTKEGYYYR

SEQ ID NO: 39213 - protein, 9 aa, Homo Sapiens
KTKESSEYL

SEQ ID NO: 39214 - protein, 9 aa, Homo Sapiens
KTKEVYELL

SEQ ID NO: 39215 - protein, 9 aa, Homo Sapiens
KTKFTIENV

SEQ ID NO: 39216 - protein, 9 aa, Homo Sapiens
KTKGDFILV

SEQ ID NO: 39217 - protein, 9 aa, Homo Sapiens
KTKGFHTTI

SEQ ID NO: 39218 - protein, 9 aa, Homo Sapiens
KTKPFQLQL

SEQ ID NO: 39219 - protein, 9 aa, Homo Sapiens
KTKPVAFAV

SEQ ID NO: 39220 - protein, 9 aa, Homo Sapiens
KTKQAWNFL

SEQ ID NO: 39221 - protein, 9 aa, Homo Sapiens
KTKQVIQGL

SEQ ID NO: 39222 - protein, 9 aa, Homo Sapiens
KTKSFFDNI

SEQ ID NO: 39223 - protein, 9 aa, Homo Sapiens
KTKSVVLQL

SEQ ID NO: 39224 - protein, 9 aa, Homo Sapiens
KTKVPEVTK

SEQ ID NO: 39225 - protein, 9 aa, Homo Sapiens
KTKWGTIEV

SEQ ID NO: 39226 - protein, 9 aa, Homo Sapiens
KTNLTSVTK

SEQ ID NO: 39227 - protein, 9 aa, Homo Sapiens
KTRDEYLSL

SEQ ID NO: 39228 - protein, 9 aa, Homo Sapiens
KTREWAEQL

SEQ ID NO: 39229 - protein, 9 aa, Homo Sapiens
KTRGIFETK

SEQ ID NO: 39230 - protein, 9 aa, Homo Sapiens
KTRIIDVVY

SEQ ID NO: 39231 - protein, 9 aa, Homo Sapiens
KTRIPPRTY

SEQ ID NO: 39232 - protein, 9 aa, Homo Sapiens
KTRLDAPRL

SEQ ID NO: 39233 - protein, 9 aa, Homo Sapiens
KTRLINQVL

SEQ ID NO: 39234 - protein, 9 aa, Homo Sapiens
KTRNVPVRL

SEQ ID NO: 39235 - protein, 9 aa, Homo Sapiens
KTRPPVRLV

SEQ ID NO: 39236 - protein, 9 aa, Homo Sapiens
KTTILYKLK

SEQ ID NO: 39237 - protein, 9 aa, Homo Sapiens
KTYVIKRVK

SEQ ID NO: 39238 - protein, 9 aa, Homo Sapiens
KVFNQPKAK

SEQ ID NO: 39239 - protein, 9 aa, Homo Sapiens
KVKAEISFV

SEQ ID NO: 39240 - protein, 9 aa, Homo Sapiens
KVKAEVQNL

SEQ ID NO: 39241 - protein, 9 aa, Homo Sapiens
KVKAFIVTL

SEQ ID NO: 39242 - protein, 9 aa, Homo Sapiens
KVKDGQLTV

SEQ ID NO: 39243 - protein, 9 aa, Homo Sapiens
KVKDILSKV

SEQ ID NO: 39244 - protein, 9 aa, Homo Sapiens
KVKDLRQYL

SEQ ID NO: 39245 - protein, 9 aa, Homo Sapiens
KVKDLVARI

SEQ ID NO: 39246 - protein, 9 aa, Homo Sapiens
KVKDYISAK

SEQ ID NO: 39247 - protein, 9 aa, Homo Sapiens
KVKEFCENL

SEQ ID NO: 39248 - protein, 9 aa, Homo Sapiens
KVKEFFEKL

SEQ ID NO: 39249 - protein, 9 aa, Homo Sapiens
KVKEFLSTL

SEQ ID NO: 39250 - protein, 9 aa, Homo Sapiens
KVKEKFQQL

SEQ ID NO: 39251 - protein, 9 aa, Homo Sapiens
KVKFEERYK

SEQ ID NO: 39252 - protein, 9 aa, Homo Sapiens
KVKFTVHTK

SEQ ID NO: 39253 - protein, 9 aa, Homo Sapiens
KVKITTENV

SEQ ID NO: 39254 - protein, 9 aa, Homo Sapiens
KVKKLVVKV

SEQ ID NO: 39255 - protein, 9 aa, Homo Sapiens
KVKSSVIGA

SEQ ID NO: 39256 - protein, 9 aa, Homo Sapiens
KVKSYIHEV

SEQ ID NO: 39257 - protein, 9 aa, Homo Sapiens
KVKTKVIEL

SEQ ID NO: 39258 - protein, 9 aa, Homo Sapiens
KVKWFYNEY

SEQ ID NO: 39259 - protein, 9 aa, Homo Sapiens
KVLDHFRRK

SEQ ID NO: 39260 - protein, 9 aa, Homo Sapiens
KVQPPGPVK

SEQ ID NO: 39261 - protein, 9 aa, Homo Sapiens
KVRAGGPGL

SEQ ID NO: 39262 - protein, 9 aa, Homo Sapiens
KVRAYIQMK

SEQ ID NO: 39263 - protein, 9 aa, Homo Sapiens
KVRCSRYLY

SEQ ID NO: 39264 - protein, 9 aa, Homo Sapiens
KVRDKLNNL

SEQ ID NO: 39265 - protein, 9 aa, Homo Sapiens
KVREEFKEL

SEQ ID NO: 39266 - protein, 9 aa, Homo Sapiens
KVRIMGPNY

SEQ ID NO: 39267 - protein, 9 aa, Homo Sapiens
KVRITLVTK

SEQ ID NO: 39268 - protein, 9 aa, Homo Sapiens
KVRQRAVAL

SEQ ID NO: 39269 - protein, 9 aa, Homo Sapiens
KVSDLTIPK

SEQ ID NO: 39270 - protein, 9 aa, Homo Sapiens
KVSQVIMEK

SEQ ID NO: 39271 - protein, 9 aa, Homo Sapiens
KYIDKTIRV

SEQ ID NO: 39272 - protein, 9 aa, Homo Sapiens
KYIDVVINK

SEQ ID NO: 39273 - protein, 9 aa, Homo Sapiens
KYKDAIHFY

SEQ ID NO: 39274 - protein, 9 aa, Homo Sapiens
KYKDKIKTL

SEQ ID NO: 39275 - protein, 9 aa, Homo Sapiens
KYKERFLVY

SEQ ID NO: 39276 - protein, 9 aa, Homo Sapiens
KYKSVYKNV

SEQ ID NO: 39277 - protein, 9 aa, Homo Sapiens
KYLTKKYLK

SEQ ID NO: 39278 - protein, 9 aa, Homo Sapiens
KYMPHAVLK

SEQ ID NO: 39279 - protein, 9 aa, Homo Sapiens
KYVDTNLQK

SEQ ID NO: 39280 - protein, 9 aa, Homo Sapiens
KYVGSRPIK

SEQ ID NO: 39281 - protein, 9 aa, Homo Sapiens
KYWAPHIKK

SEQ ID NO: 39282 - protein, 9 aa, Homo Sapiens
KYWQLPKEK

SEQ ID NO: 39283 - protein, 9 aa, Homo Sapiens
LFKPPQPPA

SEQ ID NO: 39284 - protein, 9 aa, Homo Sapiens
LGRGASTFK

SEQ ID NO: 39285 - protein, 9 aa, Homo Sapiens
LGSPERPPK

SEQ ID NO: 39286 - protein, 9 aa, Homo Sapiens
LIRSPSLAK

SEQ ID NO: 39287 - protein, 9 aa, Homo Sapiens
LQIDNARLA

SEQ ID NO: 39288 - protein, 9 aa, Homo Sapiens
LQRPPVVSK

SEQ ID NO: 39289 - protein, 9 aa, Homo Sapiens
LSKAFSRLK

SEQ ID NO: 39290 - protein, 9 aa, Homo Sapiens
LSREPAPCA

SEQ ID NO: 39291 - protein, 9 aa, Homo Sapiens
LVKPKIVKK

SEQ ID NO: 39292 - protein, 9 aa, Homo Sapiens
LVKPVTINV

SEQ ID NO: 39293 - protein, 9 aa, Homo Sapiens
LVRTKTLVK

SEQ ID NO: 39294 - protein, 9 aa, Homo Sapiens
MAPLKMLAL

SEQ ID NO: 39295 - protein, 9 aa, Homo Sapiens
MIRAAPPPL

SEQ ID NO: 39296 - protein, 9 aa, Homo Sapiens
MLKQLSILK

SEQ ID NO: 39297 - protein, 9 aa, Homo Sapiens
MQKSVVITL

SEQ ID NO: 39298 - protein, 9 aa, Homo Sapiens
NIRPLFINK

SEQ ID NO: 39299 - protein, 9 aa, Homo Sapiens
NSRFGSLPK

SEQ ID NO: 39300 - protein, 9 aa, Homo Sapiens
NSSRKFLQR

SEQ ID NO: 39301 - protein, 9 aa, Homo Sapiens
PIRLLAAAA

SEQ ID NO: 39302 - protein, 9 aa, Homo Sapiens
QAPPPRPPK

SEQ ID NO: 39303 - protein, 9 aa, Homo Sapiens
QARPPGIYK

SEQ ID NO: 39304 - protein, 9 aa, Homo Sapiens
QIGPAPPLK

SEQ ID NO: 39305 - protein, 9 aa, Homo Sapiens
QIKPFYTVK

SEQ ID NO: 39306 - protein, 9 aa, Homo Sapiens
QIPEIKQTL

SEQ ID NO: 39307 - protein, 9 aa, Homo Sapiens
QIRPNTELK

SEQ ID NO: 39308 - protein, 9 aa, Homo Sapiens
QQKPPPPPK

SEQ ID NO: 39309 - protein, 9 aa, Homo Sapiens
QQKQEWLSK

SEQ ID NO: 39310 - protein, 9 aa, Homo Sapiens
QTQELRHLK

SEQ ID NO: 39311 - protein, 9 aa, Homo Sapiens
QTQPIYLAK

SEQ ID NO: 39312 - protein, 9 aa, Homo Sapiens
QTRPPASLK

SEQ ID NO: 39313 - protein, 9 aa, Homo Sapiens
QVKSLTQKV

SEQ ID NO: 39314 - protein, 9 aa, Homo Sapiens
RAKNWVKEL

SEQ ID NO: 39315 - protein, 9 aa, Homo Sapiens
RAKTVVLHI

SEQ ID NO: 39316 - protein, 9 aa, Homo Sapiens
RAYPHVFTK

SEQ ID NO: 39317 - protein, 9 aa, Homo Sapiens
REKPAPPQK

SEQ ID NO: 39318 - protein, 9 aa, Homo Sapiens
RFFDKVIEK

SEQ ID NO: 39319 - protein, 9 aa, Homo Sapiens
RFKDIFQEI

SEQ ID NO: 39320 - protein, 9 aa, Homo Sapiens
RFKDRFSKL

SEQ ID NO: 39321 - protein, 9 aa, Homo Sapiens
RFKEEFQRL

SEQ ID NO: 39322 - protein, 9 aa, Homo Sapiens
RFKNKITVV

SEQ ID NO: 39323 - protein, 9 aa, Homo Sapiens
RFSPYYRTK

SEQ ID NO: 39324 - protein, 9 aa, Homo Sapiens
RFVSVSKLK

SEQ ID NO: 39325 - protein, 9 aa, Homo Sapiens
RFYDRRFLK

SEQ ID NO: 39326 - protein, 9 aa, Homo Sapiens
RGYYRYYNK

SEQ ID NO: 39327 - protein, 9 aa, Homo Sapiens
RIFEPPPPK

SEQ ID NO: 39328 - protein, 9 aa, Homo Sapiens
RIKATVMDV

SEQ ID NO: 39329 - protein, 9 aa, Homo Sapiens
RIKDEFQFL

SEQ ID NO: 39330 - protein, 9 aa, Homo Sapiens
RIKDEFQLL

SEQ ID NO: 39331 - protein, 9 aa, Homo Sapiens
RIKDTVQKL

SEQ ID NO: 39332 - protein, 9 aa, Homo Sapiens
RIKEIFCPK

SEQ ID NO: 39333 - protein, 9 aa, Homo Sapiens
RIKPNAITY

SEQ ID NO: 39334 - protein, 9 aa, Homo Sapiens
RIKPPWVVK

SEQ ID NO: 39335 - protein, 9 aa, Homo Sapiens
RILSGVVTK

SEQ ID NO: 39336 - protein, 9 aa, Homo Sapiens
RIREFYRGR

SEQ ID NO: 39337 - protein, 9 aa, Homo Sapiens
RIRKEPPVY

SEQ ID NO: 39338 - protein, 9 aa, Homo Sapiens
RKLAYRPPK

SEQ ID NO: 39339 - protein, 9 aa, Homo Sapiens
RLFVGSIPK

SEQ ID NO: 39340 - protein, 9 aa, Homo Sapiens
RLIQMRPFL

SEQ ID NO: 39341 - protein, 9 aa, Homo Sapiens
RLKDELIAK

SEQ ID NO: 39342 - protein, 9 aa, Homo Sapiens
RLKDIIFDV

SEQ ID NO: 39343 - protein, 9 aa, Homo Sapiens
RLKDKIPNV

SEQ ID NO: 39344 - protein, 9 aa, Homo Sapiens
RLKDVVRAY

SEQ ID NO: 39345 - protein, 9 aa, Homo Sapiens
RLKELLRAK

SEQ ID NO: 39346 - protein, 9 aa, Homo Sapiens
RLKENQISV

SEQ ID NO: 39347 - protein, 9 aa, Homo Sapiens
RLKEVFQTK

SEQ ID NO: 39348 - protein, 9 aa, Homo Sapiens
RLKPLAIGK

SEQ ID NO: 39349 - protein, 9 aa, Homo Sapiens
RLKPTFISK

SEQ ID NO: 39350 - protein, 9 aa, Homo Sapiens
RLKQEILEK

SEQ ID NO: 39351 - protein, 9 aa, Homo Sapiens
RLKVLYSQK

SEQ ID NO: 39352 - protein, 9 aa, Homo Sapiens
RLRDPAQQV

SEQ ID NO: 39353 - protein, 9 aa, Homo Sapiens
RLREFWMRY

SEQ ID NO: 39354 - protein, 9 aa, Homo Sapiens
RLRPPSQGY

SEQ ID NO: 39355 - protein, 9 aa, Homo Sapiens
RLRQPPPCY

SEQ ID NO: 39356 - protein, 9 aa, Homo Sapiens
RLSDVLKRK

SEQ ID NO: 39357 - protein, 9 aa, Homo Sapiens
RLVDIKKEK

SEQ ID NO: 39358 - protein, 9 aa, Homo Sapiens
RMHQAIERF

SEQ ID NO: 39359 - protein, 9 aa, Homo Sapiens
RMMKNRPFM

SEQ ID NO: 39360 - protein, 9 aa, Homo Sapiens
RNRVCPPHL

SEQ ID NO: 39361 - protein, 9 aa, Homo Sapiens
RQFWTRTKK

SEQ ID NO: 39362 - protein, 9 aa, Homo Sapiens
RQIPYTMMK

SEQ ID NO: 39363 - protein, 9 aa, Homo Sapiens
RQKIVVIAK

SEQ ID NO: 39364 - protein, 9 aa, Homo Sapiens
RQPPPRPFL

SEQ ID NO: 39365 - protein, 9 aa, Homo Sapiens
RQRGIAVEV

SEQ ID NO: 39366 - protein, 9 aa, Homo Sapiens
RQRGINMRY

SEQ ID NO: 39367 - protein, 9 aa, Homo Sapiens
RSFFHQHYL

SEQ ID NO: 39368 - protein, 9 aa, Homo Sapiens
RSIVRIIGK

SEQ ID NO: 39369 - protein, 9 aa, Homo Sapiens
RSKTVILVK

SEQ ID NO: 39370 - protein, 9 aa, Homo Sapiens
RSLGIRVVK

SEQ ID NO: 39371 - protein, 9 aa, Homo Sapiens
RSLGSSPVK

SEQ ID NO: 39372 - protein, 9 aa, Homo Sapiens
RSNYRVFLK

SEQ ID NO: 39373 - protein, 9 aa, Homo Sapiens
RSQFYFLTK

SEQ ID NO: 39374 - protein, 9 aa, Homo Sapiens
RSYSDPPLK

SEQ ID NO: 39375 - protein, 9 aa, Homo Sapiens
RTHLPGRTY

SEQ ID NO: 39376 - protein, 9 aa, Homo Sapiens
RTIAKRLVL

SEQ ID NO: 39377 - protein, 9 aa, Homo Sapiens
RTIDKKFYK

SEQ ID NO: 39378 - protein, 9 aa, Homo Sapiens
RTIDRSVFK

SEQ ID NO: 39379 - protein, 9 aa, Homo Sapiens
RTIQRPVTM

SEQ ID NO: 39380 - protein, 9 aa, Homo Sapiens
RTKALIEKL

SEQ ID NO: 39381 - protein, 9 aa, Homo Sapiens
RTKASVHTL

SEQ ID NO: 39382 - protein, 9 aa, Homo Sapiens
RTKDTPLSL

SEQ ID NO: 39383 - protein, 9 aa, Homo Sapiens
RTKMVYCKI

SEQ ID NO: 39384 - protein, 9 aa, Homo Sapiens
RTKPQSFQV

SEQ ID NO: 39385 - protein, 9 aa, Homo Sapiens
RTKQIRESL

SEQ ID NO: 39386 - protein, 9 aa, Homo Sapiens
RTKSAFSNL

SEQ ID NO: 39387 - protein, 9 aa, Homo Sapiens
RTLLKKVWK

SEQ ID NO: 39388 - protein, 9 aa, Homo Sapiens
RTMPLLSLH

SEQ ID NO: 39389 - protein, 9 aa, Homo Sapiens
RTNNLFKQV

SEQ ID NO: 39390 - protein, 9 aa, Homo Sapiens
RTPGPRPPR

SEQ ID NO: 39391 - protein, 9 aa, Homo Sapiens
RTQNVLGEK

SEQ ID NO: 39392 - protein, 9 aa, Homo Sapiens
RTRPALWNK

SEQ ID NO: 39393 - protein, 9 aa, Homo Sapiens
RTRPPSVQV

SEQ ID NO: 39394 - protein, 9 aa, Homo Sapiens
RTRQLFVRL

SEQ ID NO: 39395 - protein, 9 aa, Homo Sapiens
RTRVQKVQV

SEQ ID NO: 39396 - protein, 9 aa, Homo Sapiens
RTSEIYVHR

SEQ ID NO: 39397 - protein, 9 aa, Homo Sapiens
RVFLRAINK

SEQ ID NO: 39398 - protein, 9 aa, Homo Sapiens
RVGLHKVFK

SEQ ID NO: 39399 - protein, 9 aa, Homo Sapiens
RVIQVKKMK

SEQ ID NO: 39400 - protein, 9 aa, Homo Sapiens
RVKAVRILA

SEQ ID NO: 39401 - protein, 9 aa, Homo Sapiens
RVKDFFKNA

SEQ ID NO: 39402 - protein, 9 aa, Homo Sapiens
RVKDQPLSL

SEQ ID NO: 39403 - protein, 9 aa, Homo Sapiens
RVKEEVRKL

SEQ ID NO: 39404 - protein, 9 aa, Homo Sapiens
RVKEIYNTY

SEQ ID NO: 39405 - protein, 9 aa, Homo Sapiens
RVKELEVRK

SEQ ID NO: 39406 - protein, 9 aa, Homo Sapiens
RVKEYFVFR

SEQ ID NO: 39407 - protein, 9 aa, Homo Sapiens
RVKGVTIVK

SEQ ID NO: 39408 - protein, 9 aa, Homo Sapiens
RVKLPSGSK

SEQ ID NO: 39409 - protein, 9 aa, Homo Sapiens
RVKNAVKYL

SEQ ID NO: 39410 - protein, 9 aa, Homo Sapiens
RVKPYIIDL

SEQ ID NO: 39411 - protein, 9 aa, Homo Sapiens
RVKQMFASR

SEQ ID NO: 39412 - protein, 9 aa, Homo Sapiens
RVKSEYMRL

SEQ ID NO: 39413 - protein, 9 aa, Homo Sapiens
RVKSFALKY

SEQ ID NO: 39414 - protein, 9 aa, Homo Sapiens
RVKTFQENL

SEQ ID NO: 39415 - protein, 9 aa, Homo Sapiens
RVLEDRALK

SEQ ID NO: 39416 - protein, 9 aa, Homo Sapiens
RVLPEFKKK

SEQ ID NO: 39417 - protein, 9 aa, Homo Sapiens
RVMGIRVLR

SEQ ID NO: 39418 - protein, 9 aa, Homo Sapiens
RVNKPPYPK

SEQ ID NO: 39419 - protein, 9 aa, Homo Sapiens
RVQEVPKLK

SEQ ID NO: 39420 - protein, 9 aa, Homo Sapiens
RVQLKYAAK

SEQ ID NO: 39421 - protein, 9 aa, Homo Sapiens
RVRDDVAEY

SEQ ID NO: 39422 - protein, 9 aa, Homo Sapiens
RVRDIQKQV

SEQ ID NO: 39423 - protein, 9 aa, Homo Sapiens
RVRDVFEAK

SEQ ID NO: 39424 - protein, 9 aa, Homo Sapiens
RVREIIINA

SEQ ID NO: 39425 - protein, 9 aa, Homo Sapiens
RVREITENL

SEQ ID NO: 39426 - protein, 9 aa, Homo Sapiens
RVREKPPWR

SEQ ID NO: 39427 - protein, 9 aa, Homo Sapiens
RVRFFPYNY

SEQ ID NO: 39428 - protein, 9 aa, Homo Sapiens
RVRNRVNFR

SEQ ID NO: 39429 - protein, 9 aa, Homo Sapiens
RVRQPPPRP

SEQ ID NO: 39430 - protein, 9 aa, Homo Sapiens
RVVWKRPRL

SEQ ID NO: 39431 - protein, 9 aa, Homo Sapiens
RWKLSQIRK

SEQ ID NO: 39432 - protein, 9 aa, Homo Sapiens
RWKPFQQDV

SEQ ID NO: 39433 - protein, 9 aa, Homo Sapiens
RYFQVEVEK

SEQ ID NO: 39434 - protein, 9 aa, Homo Sapiens
RYIEVFREK

SEQ ID NO: 39435 - protein, 9 aa, Homo Sapiens
RYIPFTHGK

SEQ ID NO: 39436 - protein, 9 aa, Homo Sapiens
RYMFSRPFR

SEQ ID NO: 39437 - protein, 9 aa, Homo Sapiens
RYNDLMKKK

SEQ ID NO: 39438 - protein, 9 aa, Homo Sapiens
RYNGLIHRK

SEQ ID NO: 39439 - protein, 9 aa, Homo Sapiens
RYRAITSAY

SEQ ID NO: 39440 - protein, 9 aa, Homo Sapiens
RYRPGTVAL

SEQ ID NO: 39441 - protein, 9 aa, Homo Sapiens
RYVSVRDFK

SEQ ID NO: 39442 - protein, 9 aa, Homo Sapiens
SAGPPSLRK

SEQ ID NO: 39443 - protein, 9 aa, Homo Sapiens
SAPDKSLEL

SEQ ID NO: 39444 - protein, 9 aa, Homo Sapiens
SAPSSDKPL

SEQ ID NO: 39445 - protein, 9 aa, Homo Sapiens
SAPTETHSL

SEQ ID NO: 39446 - protein, 9 aa, Homo Sapiens
SFKDFAKSK

SEQ ID NO: 39447 - protein, 9 aa, Homo Sapiens
SFKEKFVRK

SEQ ID NO: 39448 - protein, 9 aa, Homo Sapiens
SFKNVQQQL

SEQ ID NO: 39449 - protein, 9 aa, Homo Sapiens
SFKTVIKKK

SEQ ID NO: 39450 - protein, 9 aa, Homo Sapiens
SGPGPAAAL

SEQ ID NO: 39451 - protein, 9 aa, Homo Sapiens
SGSPATPLK

SEQ ID NO: 39452 - protein, 9 aa, Homo Sapiens
SIKKIFYMK

SEQ ID NO: 39453 - protein, 9 aa, Homo Sapiens
SIKQVIVRK

SEQ ID NO: 39454 - protein, 9 aa, Homo Sapiens
SISPYPKVK

SEQ ID NO: 39455 - protein, 9 aa, Homo Sapiens
SLKADSINK

SEQ ID NO: 39456 - protein, 9 aa, Homo Sapiens
SLKDLVKEK

SEQ ID NO: 39457 - protein, 9 aa, Homo Sapiens
SLKEIVINV

SEQ ID NO: 39458 - protein, 9 aa, Homo Sapiens
SLKEKFNGK

SEQ ID NO: 39459 - protein, 9 aa, Homo Sapiens
SLKHLCRLK

SEQ ID NO: 39460 - protein, 9 aa, Homo Sapiens
SLKQKLVNK

SEQ ID NO: 39461 - protein, 9 aa, Homo Sapiens
SLKTTLKPK

SEQ ID NO: 39462 - protein, 9 aa, Homo Sapiens
SSFLIKRNK

SEQ ID NO: 39463 - protein, 9 aa, Homo Sapiens
SSGVPNPPK

SEQ ID NO: 39464 - protein, 9 aa, Homo Sapiens
SSHLPPPPK

SEQ ID NO: 39465 - protein, 9 aa, Homo Sapiens
SSHNSSPYL

SEQ ID NO: 39466 - protein, 9 aa, Homo Sapiens
SSKPVTITV

SEQ ID NO: 39467 - protein, 9 aa, Homo Sapiens
SSPQAGSSL

SEQ ID NO: 39468 - protein, 9 aa, Homo Sapiens
SSRGPLPVK

SEQ ID NO: 39469 - protein, 9 aa, Homo Sapiens
SSRPASLGY

SEQ ID NO: 39470 - protein, 9 aa, Homo Sapiens
SSRQKWIVK

SEQ ID NO: 39471 - protein, 9 aa, Homo Sapiens
STFFYPKLK

SEQ ID NO: 39472 - protein, 9 aa, Homo Sapiens
STHGTFLNK

SEQ ID NO: 39473 - protein, 9 aa, Homo Sapiens
STKFWIKQK

SEQ ID NO: 39474 - protein, 9 aa, Homo Sapiens
STKGQSINV

SEQ ID NO: 39475 - protein, 9 aa, Homo Sapiens
STLPRISLK

SEQ ID NO: 39476 - protein, 9 aa, Homo Sapiens
STLSGRPVK

SEQ ID NO: 39477 - protein, 9 aa, Homo Sapiens
STNPFRPQK

SEQ ID NO: 39478 - protein, 9 aa, Homo Sapiens
STREWAIKK

SEQ ID NO: 39479 - protein, 9 aa, Homo Sapiens
STRIPKIQK

SEQ ID NO: 39480 - protein, 9 aa, Homo Sapiens
STRLKYAVK

SEQ ID NO: 39481 - protein, 9 aa, Homo Sapiens
STRPVVYQV

SEQ ID NO: 39482 - protein, 9 aa, Homo Sapiens
STRPVYLKK

SEQ ID NO: 39483 - protein, 9 aa, Homo Sapiens
STSRDFKIK

SEQ ID NO: 39484 - protein, 9 aa, Homo Sapiens
SVITIVKSK

SEQ ID NO: 39485 - protein, 9 aa, Homo Sapiens
SVKDPSPLY

SEQ ID NO: 39486 - protein, 9 aa, Homo Sapiens
SVKEDVHLK

SEQ ID NO: 39487 - protein, 9 aa, Homo Sapiens
SVKEIYNEK

SEQ ID NO: 39488 - protein, 9 aa, Homo Sapiens
SVKEWTITY

SEQ ID NO: 39489 - protein, 9 aa, Homo Sapiens
SVKGLLTEK

SEQ ID NO: 39490 - protein, 9 aa, Homo Sapiens
SVKKIQVEK

SEQ ID NO: 39491 - protein, 9 aa, Homo Sapiens
SVKPFICHV

SEQ ID NO: 39492 - protein, 9 aa, Homo Sapiens
SVKPSTVVK

SEQ ID NO: 39493 - protein, 9 aa, Homo Sapiens
SVNGKVLSK

SEQ ID NO: 39494 - protein, 9 aa, Homo Sapiens
SVPGRAVRP

SEQ ID NO: 39495 - protein, 9 aa, Homo Sapiens
SVQEGIKFK

SEQ ID NO: 39496 - protein, 9 aa, Homo Sapiens
SVQKPKFPK

SEQ ID NO: 39497 - protein, 9 aa, Homo Sapiens
SVRAETVPK

SEQ ID NO: 39498 - protein, 9 aa, Homo Sapiens
SVRDKLLVK

SEQ ID NO: 39499 - protein, 9 aa, Homo Sapiens
SVRDPSPEA

SEQ ID NO: 39500 - protein, 9 aa, Homo Sapiens
SVRGTSFDA

SEQ ID NO: 39501 - protein, 9 aa, Homo Sapiens
SVRGVSISK

SEQ ID NO: 39502 - protein, 9 aa, Homo Sapiens
SVRKFICHV

SEQ ID NO: 39503 - protein, 9 aa, Homo Sapiens
SVRLPPITK

SEQ ID NO: 39504 - protein, 9 aa, Homo Sapiens
SVRPAVLQV

SEQ ID NO: 39505 - protein, 9 aa, Homo Sapiens
SVRQPSLHM

SEQ ID NO: 39506 - protein, 9 aa, Homo Sapiens
SVSPASTLK

SEQ ID NO: 39507 - protein, 9 aa, Homo Sapiens
SYFKIFKTK

SEQ ID NO: 39508 - protein, 9 aa, Homo Sapiens
SYRSLTLGY

SEQ ID NO: 39509 - protein, 9 aa, Homo Sapiens
TAPQGNVDL

SEQ ID NO: 39510 - protein, 9 aa, Homo Sapiens
TFRVKNPDK

SEQ ID NO: 39511 - protein, 9 aa, Homo Sapiens
TIKEGSQLK

SEQ ID NO: 39512 - protein, 9 aa, Homo Sapiens
TLKGKLVQK

SEQ ID NO: 39513 - protein, 9 aa, Homo Sapiens
TLRAASPPR

SEQ ID NO: 39514 - protein, 9 aa, Homo Sapiens
TLRPASPLM

SEQ ID NO: 39515 - protein, 9 aa, Homo Sapiens
TQMVRMILK

SEQ ID NO: 39516 - protein, 9 aa, Homo Sapiens
TSRMAPPAS

SEQ ID NO: 39517 - protein, 9 aa, Homo Sapiens
TSRPPSMHV

SEQ ID NO: 39518 - protein, 9 aa, Homo Sapiens
TSRSIIRNV

SEQ ID NO: 39519 - protein, 9 aa, Homo Sapiens
TTFGSRVNV

SEQ ID NO: 39520 - protein, 9 aa, Homo Sapiens
TTKKIVLRL

SEQ ID NO: 39521 - protein, 9 aa, Homo Sapiens
TTKNLFLIK

SEQ ID NO: 39522 - protein, 9 aa, Homo Sapiens
TTKNVQQTV

SEQ ID NO: 39523 - protein, 9 aa, Homo Sapiens
TTKPVNWLK

SEQ ID NO: 39524 - protein, 9 aa, Homo Sapiens
TTRNTSPSL

SEQ ID NO: 39525 - protein, 9 aa, Homo Sapiens
TVKKPGPNL

SEQ ID NO: 39526 - protein, 9 aa, Homo Sapiens
TVRDPAWQK

SEQ ID NO: 39527 - protein, 9 aa, Homo Sapiens
TYIYFKRLK

SEQ ID NO: 39528 - protein, 9 aa, Homo Sapiens
TYKYEMINK

SEQ ID NO: 39529 - protein, 9 aa, Homo Sapiens
VAPAAASSL

SEQ ID NO: 39530 - protein, 9 aa, Homo Sapiens
VARPAPVAV

SEQ ID NO: 39531 - protein, 9 aa, Homo Sapiens
VARPPPIGA

SEQ ID NO: 39532 - protein, 9 aa, Homo Sapiens
VASRVGSLK

SEQ ID NO: 39533 - protein, 9 aa, Homo Sapiens
VFRGPVLPK

SEQ ID NO: 39534 - protein, 9 aa, Homo Sapiens
VGKSSFINK

SEQ ID NO: 39535 - protein, 9 aa, Homo Sapiens
VIHPPQPPK

SEQ ID NO: 39536 - protein, 9 aa, Homo Sapiens
VIKDKFIRR

SEQ ID NO: 39537 - protein, 9 aa, Homo Sapiens
VILPPRPPK

SEQ ID NO: 39538 - protein, 9 aa, Homo Sapiens
VISPPTVPK

SEQ ID NO: 39539 - protein, 9 aa, Homo Sapiens
VLKIMPVQK

SEQ ID NO: 39540 - protein, 9 aa, Homo Sapiens
VLRGVMINK

SEQ ID NO: 39541 - protein, 9 aa, Homo Sapiens
VQFIGRESK

SEQ ID NO: 39542 - protein, 9 aa, Homo Sapiens
VQFVGREAK

SEQ ID NO: 39543 - protein, 9 aa, Homo Sapiens
VQKAIPMYK

SEQ ID NO: 39544 - protein, 9 aa, Homo Sapiens
VQRNVNIFK

SEQ ID NO: 39545 - protein, 9 aa, Homo Sapiens
VQRNVNVFK

SEQ ID NO: 39546 - protein, 9 aa, Homo Sapiens
VQRTQAPAV

SEQ ID NO: 39547 - protein, 9 aa, Homo Sapiens
VSVAARMLK

SEQ ID NO: 39548 - protein, 9 aa, Homo Sapiens
VTKGLYIAK

SEQ ID NO: 39549 - protein, 9 aa, Homo Sapiens
VTNNVIRLK

SEQ ID NO: 39550 - protein, 9 aa, Homo Sapiens
VTRISSPQV

SEQ ID NO: 39551 - protein, 9 aa, Homo Sapiens
VVKPDQLIK

SEQ ID NO: 39552 - protein, 9 aa, Homo Sapiens
VVKSSFPEK

SEQ ID NO: 39553 - protein, 9 aa, Homo Sapiens
VVLKGRPCK

SEQ ID NO: 39554 - protein, 9 aa, Homo Sapiens
VVRNPIIEK

SEQ ID NO: 39555 - protein, 9 aa, Homo Sapiens
VVVDGRTLK

SEQ ID NO: 39556 - protein, 9 aa, Homo Sapiens
VYKNVILQV

SEQ ID NO: 39557 - protein, 9 aa, Homo Sapiens
VYKPPALKK

SEQ ID NO: 39558 - protein, 9 aa, Homo Sapiens
VYRPPPKVK

SEQ ID NO: 39559 - protein, 9 aa, Homo Sapiens
YARLHPRAV

SEQ ID NO: 39560 - protein, 9 aa, Homo Sapiens
YFRDLFIEK

SEQ ID NO: 39561 - protein, 9 aa, Homo Sapiens
YVKLSVGKK

SEQ ID NO: 39562 - protein, 10 aa, Homo Sapiens
ADGRPAPPMK

SEQ ID NO: 39563 - protein, 10 aa, Homo Sapiens
AFKDIKLWRK

SEQ ID NO: 39564 - protein, 10 aa, Homo Sapiens
AFKELQSTFK

SEQ ID NO: 39565 - protein, 10 aa, Homo Sapiens
AILGTGRLLK

SEQ ID NO: 39566 - protein, 10 aa, Homo Sapiens
ALKNPPINTK

SEQ ID NO: 39567 - protein, 10 aa, Homo Sapiens
ALLGVPHCRK

SEQ ID NO: 39568 - protein, 10 aa, Homo Sapiens
AMYLISKRLK

SEQ ID NO: 39569 - protein, 10 aa, Homo Sapiens
AMYSRKAMYK

SEQ ID NO: 39570 - protein, 10 aa, Homo Sapiens
AQQLVQRVPK

SEQ ID NO: 39571 - protein, 10 aa, Homo Sapiens
ASFDKAKLKK

SEQ ID NO: 39572 - protein, 10 aa, Homo Sapiens
ASKRPPLRGV

SEQ ID NO: 39573 - protein, 10 aa, Homo Sapiens
ASRPFASVNV

SEQ ID NO: 39574 - protein, 10 aa, Homo Sapiens
ASRPPIQNAC

SEQ ID NO: 39575 - protein, 10 aa, Homo Sapiens
ASRPPPPNSV

SEQ ID NO: 39576 - protein, 10 aa, Homo Sapiens
ASSGVPNPPK

SEQ ID NO: 39577 - protein, 10 aa, Homo Sapiens
ATLPKNPPPK

SEQ ID NO: 39578 - protein, 10 aa, Homo Sapiens
ATRATTPCRL

SEQ ID NO: 39579 - protein, 10 aa, Homo Sapiens
ATRIFASNLK

SEQ ID NO: 39580 - protein, 10 aa, Homo Sapiens
ATRRPPPARV

SEQ ID NO: 39581 - protein, 10 aa, Homo Sapiens
AVIFINTRRK

SEQ ID NO: 39582 - protein, 10 aa, Homo Sapiens
AVIKGRPSKL

SEQ ID NO: 39583 - protein, 10 aa, Homo Sapiens
AVLHEERFLK

SEQ ID NO: 39584 - protein, 10 aa, Homo Sapiens
AVQKAIPMYK

SEQ ID NO: 39585 - protein, 10 aa, Homo Sapiens
AVRPHSAPEY

SEQ ID NO: 39586 - protein, 10 aa, Homo Sapiens
AWIDKCRPNL

SEQ ID NO: 39587 - protein, 10 aa, Homo Sapiens
AYKNVKFVLK

SEQ ID NO: 39588 - protein, 10 aa, Homo Sapiens
AYRQGHFTYK

SEQ ID NO: 39589 - protein, 10 aa, Homo Sapiens
AYVDLDRQLK

SEQ ID NO: 39590 - protein, 10 aa, Homo Sapiens
DGSFSVKPLK

SEQ ID NO: 39591 - protein, 10 aa, Homo Sapiens
EVLKVIRTGK

SEQ ID NO: 39592 - protein, 10 aa, Homo Sapiens
GFWDPIGRYK

SEQ ID NO: 39593 - protein, 10 aa, Homo Sapiens
GSTRIPKIQK

SEQ ID NO: 39594 - protein, 10 aa, Homo Sapiens
GSTRIPKVQK

SEQ ID NO: 39595 - protein, 10 aa, Homo Sapiens
GSYVINGRTK

SEQ ID NO: 39596 - protein, 10 aa, Homo Sapiens
GTIKKINILK

SEQ ID NO: 39597 - protein, 10 aa, Homo Sapiens
GTKGPSNVFK

SEQ ID NO: 39598 - protein, 10 aa, Homo Sapiens
GTLKIIDRKK

SEQ ID NO: 39599 - protein, 10 aa, Homo Sapiens
GTRCQFQTKF

SEQ ID NO: 39600 - protein, 10 aa, Homo Sapiens
GTRPPPTPNA

SEQ ID NO: 39601 - protein, 10 aa, Homo Sapiens
GTYHFLRTQK

SEQ ID NO: 39602 - protein, 10 aa, Homo Sapiens
GVLQGIRPGK

SEQ ID NO: 39603 - protein, 10 aa, Homo Sapiens
GVMFGDRPLK

SEQ ID NO: 39604 - protein, 10 aa, Homo Sapiens
GVYSALRALK

SEQ ID NO: 39605 - protein, 10 aa, Homo Sapiens
GYIATPRVWK

SEQ ID NO: 39606 - protein, 10 aa, Homo Sapiens
HFLQQPRPLM

SEQ ID NO: 39607 - protein, 10 aa, Homo Sapiens
HLATRKFLEK

SEQ ID NO: 39608 - protein, 10 aa, Homo Sapiens
HLGDFHRTYK

SEQ ID NO: 39609 - protein, 10 aa, Homo Sapiens
HQFPAKRPRL

SEQ ID NO: 39610 - protein, 10 aa, Homo Sapiens
HSFALLGKKK

SEQ ID NO: 39611 - protein, 10 aa, Homo Sapiens
HSLEASRVPK

SEQ ID NO: 39612 - protein, 10 aa, Homo Sapiens
HTKDLPFRCK

SEQ ID NO: 39613 - protein, 10 aa, Homo Sapiens
HTYLLIVRTK

SEQ ID NO: 39614 - protein, 10 aa, Homo Sapiens
HVVNEPRIFK

SEQ ID NO: 39615 - protein, 10 aa, Homo Sapiens
HYALPLGRKK

SEQ ID NO: 39616 - protein, 10 aa, Homo Sapiens
HYKSNVEIFK

SEQ ID NO: 39617 - protein, 10 aa, Homo Sapiens
HYLPDLQRSK

SEQ ID NO: 39618 - protein, 10 aa, Homo Sapiens
IEITTERPKK

SEQ ID NO: 39619 - protein, 10 aa, Homo Sapiens
IGVSPGRPGK

SEQ ID NO: 39620 - protein, 10 aa, Homo Sapiens
IIYTGEKPCK

SEQ ID NO: 39621 - protein, 10 aa, Homo Sapiens
IMNYIIGKNK

SEQ ID NO: 39622 - protein, 10 aa, Homo Sapiens
ISRYYITRAK

SEQ ID NO: 39623 - protein, 10 aa, Homo Sapiens
ITKPLRPLGK

SEQ ID NO: 39624 - protein, 10 aa, Homo Sapiens
ITQENLGRVK

SEQ ID NO: 39625 - protein, 10 aa, Homo Sapiens
IVLPLKKPPK

SEQ ID NO: 39626 - protein, 10 aa, Homo Sapiens
IVREIENIEK

SEQ ID NO: 39627 - protein, 10 aa, Homo Sapiens
IVRMIESRQK

SEQ ID NO: 39628 - protein, 10 aa, Homo Sapiens
IWKNREPLVK

SEQ ID NO: 39629 - protein, 10 aa, Homo Sapiens
IYKTPPGIQK

SEQ ID NO: 39630 - protein, 10 aa, Homo Sapiens
KAFNQGKIFK

SEQ ID NO: 39631 - protein, 10 aa, Homo Sapiens
KAKEPPFVRK

SEQ ID NO: 39632 - protein, 10 aa, Homo Sapiens
KALSDLGRYK

SEQ ID NO: 39633 - protein, 10 aa, Homo Sapiens
KFIEIAARKK

SEQ ID NO: 39634 - protein, 10 aa, Homo Sapiens
KFKAQVQLNK

SEQ ID NO: 39635 - protein, 10 aa, Homo Sapiens
KFLPFKVVEK

SEQ ID NO: 39636 - protein, 10 aa, Homo Sapiens
KFYGVKFRNK

SEQ ID NO: 39637 - protein, 10 aa, Homo Sapiens
KGKNIKIISK

SEQ ID NO: 39638 - protein, 10 aa, Homo Sapiens
KGKPFRQPCY

SEQ ID NO: 39639 - protein, 10 aa, Homo Sapiens
KGLLIRERLK

SEQ ID NO: 39640 - protein, 10 aa, Homo Sapiens
KGVTLGFRYK

SEQ ID NO: 39641 - protein, 10 aa, Homo Sapiens
KIKEIAVTVK

SEQ ID NO: 39642 - protein, 10 aa, Homo Sapiens
KILDKQKVVK

SEQ ID NO: 39643 - protein, 10 aa, Homo Sapiens
KILQLYARKK

SEQ ID NO: 39644 - protein, 10 aa, Homo Sapiens
KINEIKKLLK

SEQ ID NO: 39645 - protein, 10 aa, Homo Sapiens
KINNEIRSVK

SEQ ID NO: 39646 - protein, 10 aa, Homo Sapiens
KKERQILPVL

SEQ ID NO: 39647 - protein, 10 aa, Homo Sapiens
KKFPGIRPYL

SEQ ID NO: 39648 - protein, 10 aa, Homo Sapiens
KLFPGRPPVK

SEQ ID NO: 39649 - protein, 10 aa, Homo Sapiens
KLFSEKRVEL

SEQ ID NO: 39650 - protein, 10 aa, Homo Sapiens
KLIDVLKRQK

SEQ ID NO: 39651 - protein, 10 aa, Homo Sapiens
KLKEGGLIDK

SEQ ID NO: 39652 - protein, 10 aa, Homo Sapiens
KLLDVVHPAA

SEQ ID NO: 39653 - protein, 10 aa, Homo Sapiens
KLLEIPRPSM

SEQ ID NO: 39654 - protein, 10 aa, Homo Sapiens
KLQTPNTFPK

SEQ ID NO: 39655 - protein, 10 aa, Homo Sapiens
KLTFISGRTK

SEQ ID NO: 39656 - protein, 10 aa, Homo Sapiens
KNYIQIERQK

SEQ ID NO: 39657 - protein, 10 aa, Homo Sapiens
KQIGIIKTNK

SEQ ID NO: 39658 - protein, 10 aa, Homo Sapiens
KQKEVEQLIK

SEQ ID NO: 39659 - protein, 10 aa, Homo Sapiens
KQKFVLKVQK

SEQ ID NO: 39660 - protein, 10 aa, Homo Sapiens
KQLIEKRIGK

SEQ ID NO: 39661 - protein, 10 aa, Homo Sapiens
KQQNPRLVYV

SEQ ID NO: 39662 - protein, 10 aa, Homo Sapiens
KSFSEDRLIK

SEQ ID NO: 39663 - protein, 10 aa, Homo Sapiens
KSILQERVKK

SEQ ID NO: 39664 - protein, 10 aa, Homo Sapiens
KSKAITPKRL

SEQ ID NO: 39665 - protein, 10 aa, Homo Sapiens
KSQIPLSKIK

SEQ ID NO: 39666 - protein, 10 aa, Homo Sapiens
KSRDSFLKRV

SEQ ID NO: 39667 - protein, 10 aa, Homo Sapiens
KSRGPTPPAM

SEQ ID NO: 39668 - protein, 10 aa, Homo Sapiens
KSYSFIARMK

SEQ ID NO: 39669 - protein, 10 aa, Homo Sapiens
KTALRAQVKK

SEQ ID NO: 39670 - protein, 10 aa, Homo Sapiens
KTFEGNLTTK

SEQ ID NO: 39671 - protein, 10 aa, Homo Sapiens
KTFTGHREWV

SEQ ID NO: 39672 - protein, 10 aa, Homo Sapiens
KTIDKKTFYK

SEQ ID NO: 39673 - protein, 10 aa, Homo Sapiens
KTIGVKHPEL

SEQ ID NO: 39674 - protein, 10 aa, Homo Sapiens
KTKDVEILHL

SEQ ID NO: 39675 - protein, 10 aa, Homo Sapiens
KTKFPAEQYY

SEQ ID NO: 39676 - protein, 10 aa, Homo Sapiens
KTKSLNKLLY

SEQ ID NO: 39677 - protein, 10 aa, Homo Sapiens
KTLDKAREKL

SEQ ID NO: 39678 - protein, 10 aa, Homo Sapiens
KTLERSYLLK

SEQ ID NO: 39679 - protein, 10 aa, Homo Sapiens
KTLGVQRPKL

SEQ ID NO: 39680 - protein, 10 aa, Homo Sapiens
KTLPFSRSYY

SEQ ID NO: 39681 - protein, 10 aa, Homo Sapiens
KTRGIFETKF

SEQ ID NO: 39682 - protein, 10 aa, Homo Sapiens
KTRGPGYTQY

SEQ ID NO: 39683 - protein, 10 aa, Homo Sapiens
KTTKLYSRFK

SEQ ID NO: 39684 - protein, 10 aa, Homo Sapiens
KTYEVSLREK

SEQ ID NO: 39685 - protein, 10 aa, Homo Sapiens
KVISGIAREK

SEQ ID NO: 39686 - protein, 10 aa, Homo Sapiens
KVKEPPILRV

SEQ ID NO: 39687 - protein, 10 aa, Homo Sapiens
KVKNFAQLTV

SEQ ID NO: 39688 - protein, 10 aa, Homo Sapiens
KVKPPHGFQK

SEQ ID NO: 39689 - protein, 10 aa, Homo Sapiens
KVKYLPQQQK

SEQ ID NO: 39690 - protein, 10 aa, Homo Sapiens
KVLDAIIQEK

SEQ ID NO: 39691 - protein, 10 aa, Homo Sapiens
KVLEFERVYL

SEQ ID NO: 39692 - protein, 10 aa, Homo Sapiens
KVLELQSPPK

SEQ ID NO: 39693 - protein, 10 aa, Homo Sapiens
KVLGVQRPLL

SEQ ID NO: 39694 - protein, 10 aa, Homo Sapiens
KVPVEKRVFK

SEQ ID NO: 39695 - protein, 10 aa, Homo Sapiens
KVRIQTQPGY

SEQ ID NO: 39696 - protein, 10 aa, Homo Sapiens
KWKDIELEKM

SEQ ID NO: 39697 - protein, 10 aa, Homo Sapiens
KYFSQNRQLK

SEQ ID NO: 39698 - protein, 10 aa, Homo Sapiens
KYIDKTIRVK

SEQ ID NO: 39699 - protein, 10 aa, Homo Sapiens
KYIQDFQREK

SEQ ID NO: 39700 - protein, 10 aa, Homo Sapiens
KYIQELWRKK

SEQ ID NO: 39701 - protein, 10 aa, Homo Sapiens
KYKEAEPLCK

SEQ ID NO: 39702 - protein, 10 aa, Homo Sapiens
KYKEETIEKM

SEQ ID NO: 39703 - protein, 10 aa, Homo Sapiens
KYMAEVKKYK

SEQ ID NO: 39704 - protein, 10 aa, Homo Sapiens
KYVGSRPIKL

SEQ ID NO: 39705 - protein, 10 aa, Homo Sapiens
LGLDIKRQEK

SEQ ID NO: 39706 - protein, 10 aa, Homo Sapiens
LGLDVERVNK

SEQ ID NO: 39707 - protein, 10 aa, Homo Sapiens
LHVQLNRPNK

SEQ ID NO: 39708 - protein, 10 aa, Homo Sapiens
LMNELRRVPK

SEQ ID NO: 39709 - protein, 10 aa, Homo Sapiens
LSLTLMSNLK

SEQ ID NO: 39710 - protein, 10 aa, Homo Sapiens
LSTLSGRPVK

SEQ ID NO: 39711 - protein, 10 aa, Homo Sapiens
LVLPSPRPYV

SEQ ID NO: 39712 - protein, 10 aa, Homo Sapiens
LWKDVGERQK

SEQ ID NO: 39713 - protein, 10 aa, Homo Sapiens
LYKYFPKSEK

SEQ ID NO: 39714 - protein, 10 aa, Homo Sapiens
LYLHLCHKIL

SEQ ID NO: 39715 - protein, 10 aa, Homo Sapiens
LYQQQGRLDK

SEQ ID NO: 39716 - protein, 10 aa, Homo Sapiens
MIRAAPPPLF

SEQ ID NO: 39717 - protein, 10 aa, Homo Sapiens
MVKSLMHLGK

SEQ ID NO: 39718 - protein, 10 aa, Homo Sapiens
MWKQLSHIKK

SEQ ID NO: 39719 - protein, 10 aa, Homo Sapiens
NYIEFTRILK

SEQ ID NO: 39720 - protein, 10 aa, Homo Sapiens
NYLDFHRCQK

SEQ ID NO: 39721 - protein, 10 aa, Homo Sapiens
QFIPYMKKYK

SEQ ID NO: 39722 - protein, 10 aa, Homo Sapiens
QLAFLEGRKK

SEQ ID NO: 39723 - protein, 10 aa, Homo Sapiens
QLLEVKRRMK

SEQ ID NO: 39724 - protein, 10 aa, Homo Sapiens
QQLYWSHPRK

SEQ ID NO: 39725 - protein, 10 aa, Homo Sapiens
QSVQVFGRKK

SEQ ID NO: 39726 - protein, 10 aa, Homo Sapiens
QTIQEIRHLK

SEQ ID NO: 39727 - protein, 10 aa, Homo Sapiens
QVLFLAGKTK

SEQ ID NO: 39728 - protein, 10 aa, Homo Sapiens
QVQKGPLKLK

SEQ ID NO: 39729 - protein, 10 aa, Homo Sapiens
RAAFTAGRMK

SEQ ID NO: 39730 - protein, 10 aa, Homo Sapiens
RAFSFSKTPK

SEQ ID NO: 39731 - protein, 10 aa, Homo Sapiens
RAFYSWGRRK

SEQ ID NO: 39732 - protein, 10 aa, Homo Sapiens
RAMIIAERQK

SEQ ID NO: 39733 - protein, 10 aa, Homo Sapiens
RFKDELDIMK

SEQ ID NO: 39734 - protein, 10 aa, Homo Sapiens
RFKDVRNPEA

SEQ ID NO: 39735 - protein, 10 aa, Homo Sapiens
RFRDASLVFK

SEQ ID NO: 39736 - protein, 10 aa, Homo Sapiens
RFYDLSSKYY

SEQ ID NO: 39737 - protein, 10 aa, Homo Sapiens
RHLNVPRPYA

SEQ ID NO: 39738 - protein, 10 aa, Homo Sapiens
RIFQGTRIVK

SEQ ID NO: 39739 - protein, 10 aa, Homo Sapiens
RIHPEGPPLK

SEQ ID NO: 39740 - protein, 10 aa, Homo Sapiens
RIKFPDNPEK

SEQ ID NO: 39741 - protein, 10 aa, Homo Sapiens
RIKSNQISKL

SEQ ID NO: 39742 - protein, 10 aa, Homo Sapiens
RIKYVGAIEK

SEQ ID NO: 39743 - protein, 10 aa, Homo Sapiens
RINFYKKTYK

SEQ ID NO: 39744 - protein, 10 aa, Homo Sapiens
RIREPALLSK

SEQ ID NO: 39745 - protein, 10 aa, Homo Sapiens
RLFDTPHTPK

SEQ ID NO: 39746 - protein, 10 aa, Homo Sapiens
RLFPGFRPAV

SEQ ID NO: 39747 - protein, 10 aa, Homo Sapiens
RLFTSEKMVK

SEQ ID NO: 39748 - protein, 10 aa, Homo Sapiens
RLGPPKRPPR

SEQ ID NO: 39749 - protein, 10 aa, Homo Sapiens
RLIQIAARKK

SEQ ID NO: 39750 - protein, 10 aa, Homo Sapiens
RLKGDAWVYK

SEQ ID NO: 39751 - protein, 10 aa, Homo Sapiens
RLKPFYLVPK

SEQ ID NO: 39752 - protein, 10 aa, Homo Sapiens
RLKQIEEQTK

SEQ ID NO: 39753 - protein, 10 aa, Homo Sapiens
RLKQQTIPLK

SEQ ID NO: 39754 - protein, 10 aa, Homo Sapiens
RLKYPPFAKK

SEQ ID NO: 39755 - protein, 10 aa, Homo Sapiens
RLLGRSRPQL

SEQ ID NO: 39756 - protein, 10 aa, Homo Sapiens
RLLHHKRIYK

SEQ ID NO: 39757 - protein, 10 aa, Homo Sapiens
RLQEKRFIQK

SEQ ID NO: 39758 - protein, 10 aa, Homo Sapiens
RLQELLERRK

SEQ ID NO: 39759 - protein, 10 aa, Homo Sapiens
RLQGVERIMK

SEQ ID NO: 39760 - protein, 10 aa, Homo Sapiens
RLRAEPPNKL

SEQ ID NO: 39761 - protein, 10 aa, Homo Sapiens
RLYFGERNVK

SEQ ID NO: 39762 - protein, 10 aa, Homo Sapiens
RMFLSFPTTK

SEQ ID NO: 39763 - protein, 10 aa, Homo Sapiens
RMKDPTFLGK

SEQ ID NO: 39764 - protein, 10 aa, Homo Sapiens
RNLDIERPTY

SEQ ID NO: 39765 - protein, 10 aa, Homo Sapiens
RQFFDERWSK

SEQ ID NO: 39766 - protein, 10 aa, Homo Sapiens
RQFGPYRLNY

SEQ ID NO: 39767 - protein, 10 aa, Homo Sapiens
RQIEIPKVSK

SEQ ID NO: 39768 - protein, 10 aa, Homo Sapiens
RSHYFEGVLK

SEQ ID NO: 39769 - protein, 10 aa, Homo Sapiens
RSIFIKYKSK

SEQ ID NO: 39770 - protein, 10 aa, Homo Sapiens
RSLFLLGKHK

SEQ ID NO: 39771 - protein, 10 aa, Homo Sapiens
RSRDFLVVNK

SEQ ID NO: 39772 - protein, 10 aa, Homo Sapiens
RSRDFSAMTK

SEQ ID NO: 39773 - protein, 10 aa, Homo Sapiens
RSRENFLSKL

SEQ ID NO: 39774 - protein, 10 aa, Homo Sapiens
RSRSEYLNRL

SEQ ID NO: 39775 - protein, 10 aa, Homo Sapiens
RSRSLPQPKL

SEQ ID NO: 39776 - protein, 10 aa, Homo Sapiens
RSSALLARTK

SEQ ID NO: 39777 - protein, 10 aa, Homo Sapiens
RTHTGERPYY

SEQ ID NO: 39778 - protein, 10 aa, Homo Sapiens
RTKELGYTVK

SEQ ID NO: 39779 - protein, 10 aa, Homo Sapiens
RTKNFIFRTK

SEQ ID NO: 39780 - protein, 10 aa, Homo Sapiens
RTKRDWLVKQ

SEQ ID NO: 39781 - protein, 10 aa, Homo Sapiens
RTKYIDDTVK

SEQ ID NO: 39782 - protein, 10 aa, Homo Sapiens
RTKYTITPVK

SEQ ID NO: 39783 - protein, 10 aa, Homo Sapiens
RTLDAKMPRK

SEQ ID NO: 39784 - protein, 10 aa, Homo Sapiens
RTLEFNRRQK

SEQ ID NO: 39785 - protein, 10 aa, Homo Sapiens
RTLGAIVRQK

SEQ ID NO: 39786 - protein, 10 aa, Homo Sapiens
RTPSFLKKNK

SEQ ID NO: 39787 - protein, 10 aa, Homo Sapiens
RTPSFLKKSK

SEQ ID NO: 39788 - protein, 10 aa, Homo Sapiens
RTQSIFTRHK

SEQ ID NO: 39789 - protein, 10 aa, Homo Sapiens
RTRSAIILHL

SEQ ID NO: 39790 - protein, 10 aa, Homo Sapiens
RTVDLPKSPK

SEQ ID NO: 39791 - protein, 10 aa, Homo Sapiens
RTVTGAKPLK

SEQ ID NO: 39792 - protein, 10 aa, Homo Sapiens
RVFSILKKHK

SEQ ID NO: 39793 - protein, 10 aa, Homo Sapiens
RVFTGQAKVK

SEQ ID NO: 39794 - protein, 10 aa, Homo Sapiens
RVKEKIIKKF

SEQ ID NO: 39795 - protein, 10 aa, Homo Sapiens
RVKEPVKELL

SEQ ID NO: 39796 - protein, 10 aa, Homo Sapiens
RVKEVEEMCK

SEQ ID NO: 39797 - protein, 10 aa, Homo Sapiens
RVKGPGISKF

SEQ ID NO: 39798 - protein, 10 aa, Homo Sapiens
RVKTNLPIFK

SEQ ID NO: 39799 - protein, 10 aa, Homo Sapiens
RVREITENLM

SEQ ID NO: 39800 - protein, 10 aa, Homo Sapiens
RVVLVEKRTK

SEQ ID NO: 39801 - protein, 10 aa, Homo Sapiens
RVWDAEHPGL

SEQ ID NO: 39802 - protein, 10 aa, Homo Sapiens
RVYPESIPRK

SEQ ID NO: 39803 - protein, 10 aa, Homo Sapiens
RWKALIEMEK

SEQ ID NO: 39804 - protein, 10 aa, Homo Sapiens
RWKPASQPTI

SEQ ID NO: 39805 - protein, 10 aa, Homo Sapiens
RWLVIDRKVY

SEQ ID NO: 39806 - protein, 10 aa, Homo Sapiens
RWVELEKPLK

SEQ ID NO: 39807 - protein, 10 aa, Homo Sapiens
RYFALVERRL

SEQ ID NO: 39808 - protein, 10 aa, Homo Sapiens
RYLGSRPVKL

SEQ ID NO: 39809 - protein, 10 aa, Homo Sapiens
RYLYYTGRIK

SEQ ID NO: 39810 - protein, 10 aa, Homo Sapiens
RYQTLYARFK

SEQ ID NO: 39811 - protein, 10 aa, Homo Sapiens
RYRLPLRVVK

SEQ ID NO: 39812 - protein, 10 aa, Homo Sapiens
RYRPGTVALR

SEQ ID NO: 39813 - protein, 10 aa, Homo Sapiens
RYTDVSTRYK

SEQ ID NO: 39814 - protein, 10 aa, Homo Sapiens
RYYNKYINVK

SEQ ID NO: 39815 - protein, 10 aa, Homo Sapiens
SFLDISRPKM

SEQ ID NO: 39816 - protein, 10 aa, Homo Sapiens
SFRYNGLIHR

SEQ ID NO: 39817 - protein, 10 aa, Homo Sapiens
SGLDVIRIRK

SEQ ID NO: 39818 - protein, 10 aa, Homo Sapiens
SIFDGRVVAK

SEQ ID NO: 39819 - protein, 10 aa, Homo Sapiens
SIKIKTDSAK

SEQ ID NO: 39820 - protein, 10 aa, Homo Sapiens
SIPEKNRPLK

SEQ ID NO: 39821 - protein, 10 aa, Homo Sapiens
SQIQEQRIMK

SEQ ID NO: 39822 - protein, 10 aa, Homo Sapiens
SSHLPPPPKL

SEQ ID NO: 39823 - protein, 10 aa, Homo Sapiens
SSPLVGRPAK

SEQ ID NO: 39824 - protein, 10 aa, Homo Sapiens
SSRPTSPEKF

SEQ ID NO: 39825 - protein, 10 aa, Homo Sapiens
SSTNPFRPQK

SEQ ID NO: 39826 - protein, 10 aa, Homo Sapiens
STFSGGRIPK

SEQ ID NO: 39827 - protein, 10 aa, Homo Sapiens
STKKFWIQKL

SEQ ID NO: 39828 - protein, 10 aa, Homo Sapiens
STLTNPRQSP

SEQ ID NO: 39829 - protein, 10 aa, Homo Sapiens
STRFITRPAK

SEQ ID NO: 39830 - protein, 10 aa, Homo Sapiens
STRIPKIQKL

SEQ ID NO: 39831 - protein, 10 aa, Homo Sapiens
STRPVYLKKL

SEQ ID NO: 39832 - protein, 10 aa, Homo Sapiens
STSFLEKKVK

SEQ ID NO: 39833 - protein, 10 aa, Homo Sapiens
SVASLVGRSK

SEQ ID NO: 39834 - protein, 10 aa, Homo Sapiens
SVFAEERNLK

SEQ ID NO: 39835 - protein, 10 aa, Homo Sapiens
SVFDFQKAYK

SEQ ID NO: 39836 - protein, 10 aa, Homo Sapiens
SVFVIVNKEK

SEQ ID NO: 39837 - protein, 10 aa, Homo Sapiens
SVKNFQIVHK

SEQ ID NO: 39838 - protein, 10 aa, Homo Sapiens
SVKSITNPRY

SEQ ID NO: 39839 - protein, 10 aa, Homo Sapiens
SVLNLVIVKK

SEQ ID NO: 39840 - protein, 10 aa, Homo Sapiens
SVLPTIRVPK

SEQ ID NO: 39841 - protein, 10 aa, Homo Sapiens
SVRLPPITKF

SEQ ID NO: 39842 - protein, 10 aa, Homo Sapiens
SVRPPKKSWK

SEQ ID NO: 39843 - protein, 10 aa, Homo Sapiens
SWLDVRHIEK

SEQ ID NO: 39844 - protein, 10 aa, Homo Sapiens
SYINLNPRLK

SEQ ID NO: 39845 - protein, 10 aa, Homo Sapiens
TILLPKRPPK

SEQ ID NO: 39846 - protein, 10 aa, Homo Sapiens
TIQSGEQPYK

SEQ ID NO: 39847 - protein, 10 aa, Homo Sapiens
TTKAVVSPPK

SEQ ID NO: 39848 - protein, 10 aa, Homo Sapiens
TTSAIQNRFK

SEQ ID NO: 39849 - protein, 10 aa, Homo Sapiens
TTSYLIGRQK

SEQ ID NO: 39850 - protein, 10 aa, Homo Sapiens
TTVPRRLGPK

SEQ ID NO: 39851 - protein, 10 aa, Homo Sapiens
TVFPKAKQVK

SEQ ID NO: 39852 - protein, 10 aa, Homo Sapiens
TYLEAHRIVK

SEQ ID NO: 39853 - protein, 10 aa, Homo Sapiens
VTHRPPLSPK

SEQ ID NO: 39854 - protein, 10 aa, Homo Sapiens
VVLKGRPCKI

SEQ ID NO: 39855 - protein, 10 aa, Homo Sapiens
VVSSVTTKVK

SEQ ID NO: 39856 - protein, 10 aa, Homo Sapiens
VYVKNFGRRK

SEQ ID NO: 39857 - protein, 10 aa, Homo Sapiens
YAKDIGFIKK

SEQ ID NO: 39858 - protein, 10 aa, Homo Sapiens
YILTHKRILK

SEQ ID NO: 39859 - protein, 10 aa, Homo Sapiens
YIYDGELVSK

SEQ ID NO: 39860 - protein, 10 aa, Homo Sapiens
YTKDAMPINK

SEQ ID NO: 39861 - protein, 11 aa, Homo Sapiens
AFQQKPPPPPK

SEQ ID NO: 39862 - protein, 11 aa, Homo Sapiens
AQICSSIRTHK

SEQ ID NO: 39863 - protein, 11 aa, Homo Sapiens
AQNGQLFGRFK

SEQ ID NO: 39864 - protein, 11 aa, Homo Sapiens
ASDPNVSKKLK

SEQ ID NO: 39865 - protein, 11 aa, Homo Sapiens
ASKTTTTIIPK

SEQ ID NO: 39866 - protein, 11 aa, Homo Sapiens
ASNPLLLKRRK

SEQ ID NO: 39867 - protein, 11 aa, Homo Sapiens
ATKDAGTIAGL

SEQ ID NO: 39868 - protein, 11 aa, Homo Sapiens
ATLEETLVKKK

SEQ ID NO: 39869 - protein, 11 aa, Homo Sapiens
ATLKDITRRLK

SEQ ID NO: 39870 - protein, 11 aa, Homo Sapiens
ATNPSFDGRLK

SEQ ID NO: 39871 - protein, 11 aa, Homo Sapiens
ATRTQNVLGEK

SEQ ID NO: 39872 - protein, 11 aa, Homo Sapiens
ATSPDFDGKLK

SEQ ID NO: 39873 - protein, 11 aa, Homo Sapiens
AVHEAWAGMLK

SEQ ID NO: 39874 - protein, 11 aa, Homo Sapiens
AVIKGRPSKLR

SEQ ID NO: 39875 - protein, 11 aa, Homo Sapiens
AVKNGDYITVK

SEQ ID NO: 39876 - protein, 11 aa, Homo Sapiens
AVKSESQSLPK

SEQ ID NO: 39877 - protein, 11 aa, Homo Sapiens
AVNLLDRFLSK

SEQ ID NO: 39878 - protein, 11 aa, Homo Sapiens
AYKDKDISFFK

SEQ ID NO: 39879 - protein, 11 aa, Homo Sapiens
AYKSILQERVK

SEQ ID NO: 39880 - protein, 11 aa, Homo Sapiens
EGSYLAHTQGK

SEQ ID NO: 39881 - protein, 11 aa, Homo Sapiens
FSIPEKNRPLK

SEQ ID NO: 39882 - protein, 11 aa, Homo Sapiens
GGSTRIPKIQK

SEQ ID NO: 39883 - protein, 11 aa, Homo Sapiens
GHYADSYLKRK

SEQ ID NO: 39884 - protein, 11 aa, Homo Sapiens
HLKDAQIFIQK

SEQ ID NO: 39885 - protein, 11 aa, Homo Sapiens
HQQLYWSHPRK

SEQ ID NO: 39886 - protein, 11 aa, Homo Sapiens
HTFEQIPSRQK

SEQ ID NO: 39887 - protein, 11 aa, Homo Sapiens
HYLPAEILQKK

SEQ ID NO: 39888 - protein, 11 aa, Homo Sapiens
IGKPAHLIVSL

SEQ ID NO: 39889 - protein, 11 aa, Homo Sapiens
IQKPADLARHL

SEQ ID NO: 39890 - protein, 11 aa, Homo Sapiens
ITKGVDYIHSK

SEQ ID NO: 39891 - protein, 11 aa, Homo Sapiens
IVKDASIIHRL

SEQ ID NO: 39892 - protein, 11 aa, Homo Sapiens
IVKQDSLVINL

SEQ ID NO: 39893 - protein, 11 aa, Homo Sapiens
KFLNILEKPKK

SEQ ID NO: 39894 - protein, 11 aa, Homo Sapiens
KGFESPRPYKL

SEQ ID NO: 39895 - protein, 11 aa, Homo Sapiens
KGLEGERPARL

SEQ ID NO: 39896 - protein, 11 aa, Homo Sapiens
KIIDRKKHIFK

SEQ ID NO: 39897 - protein, 11 aa, Homo Sapiens
KIKEAADIIQK

SEQ ID NO: 39898 - protein, 11 aa, Homo Sapiens
KIKEIAVTVKK

SEQ ID NO: 39899 - protein, 11 aa, Homo Sapiens
KIKELDHNISK

SEQ ID NO: 39900 - protein, 11 aa, Homo Sapiens
KILERDQQICK

SEQ ID NO: 39901 - protein, 11 aa, Homo Sapiens
KLKDDEVAQLK

SEQ ID NO: 39902 - protein, 11 aa, Homo Sapiens
KLKFIDPKKIK

SEQ ID NO: 39903 - protein, 11 aa, Homo Sapiens
KLKGDDLQAIK

SEQ ID NO: 39904 - protein, 11 aa, Homo Sapiens
KLKPEGLHQLL

SEQ ID NO: 39905 - protein, 11 aa, Homo Sapiens
KQKEVEQLIKK

SEQ ID NO: 39906 - protein, 11 aa, Homo Sapiens
KQLGEGLRPAL

SEQ ID NO: 39907 - protein, 11 aa, Homo Sapiens
KSFLTVPQRKK

SEQ ID NO: 39908 - protein, 11 aa, Homo Sapiens
KSKSMDAIRSL

SEQ ID NO: 39909 - protein, 11 aa, Homo Sapiens
KSLPAEINRMK

SEQ ID NO: 39910 - protein, 11 aa, Homo Sapiens
KSRPAHLAVFL

SEQ ID NO: 39911 - protein, 11 aa, Homo Sapiens
KSRVSPPFKQA

SEQ ID NO: 39912 - protein, 11 aa, Homo Sapiens
KTAVAPIERVK

SEQ ID NO: 39913 - protein, 11 aa, Homo Sapiens
KTFANRVNNLK

SEQ ID NO: 39914 - protein, 11 aa, Homo Sapiens
KTIDMELVKRK

SEQ ID NO: 39915 - protein, 11 aa, Homo Sapiens
KTKDRDYIDFL

SEQ ID NO: 39916 - protein, 11 aa, Homo Sapiens
KTKGPENIICS

SEQ ID NO: 39917 - protein, 11 aa, Homo Sapiens
KTKHEEILQNL

SEQ ID NO: 39918 - protein, 11 aa, Homo Sapiens
KTKQQIEEQRV

SEQ ID NO: 39919 - protein, 11 aa, Homo Sapiens
KTLAYRGFIFK

SEQ ID NO: 39920 - protein, 11 aa, Homo Sapiens
KTLDEILQEKK

SEQ ID NO: 39921 - protein, 11 aa, Homo Sapiens
KTLDQAKAVLK

SEQ ID NO: 39922 - protein, 11 aa, Homo Sapiens
KTLEGVITRTK

SEQ ID NO: 39923 - protein, 11 aa, Homo Sapiens
KTLLHTLCKLK

SEQ ID NO: 39924 - protein, 11 aa, Homo Sapiens
KTLPKIVGRTK

SEQ ID NO: 39925 - protein, 11 aa, Homo Sapiens
KTMDVSKVKLK

SEQ ID NO: 39926 - protein, 11 aa, Homo Sapiens
KTQEPFSVRNK

SEQ ID NO: 39927 - protein, 11 aa, Homo Sapiens
KTRAPGDHQFY

SEQ ID NO: 39928 - protein, 11 aa, Homo Sapiens
KTRPGLLNSKL

SEQ ID NO: 39929 - protein, 11 aa, Homo Sapiens
KTWTTADFRTK

SEQ ID NO: 39930 - protein, 11 aa, Homo Sapiens
KVFEVHVRPKK

SEQ ID NO: 39931 - protein, 11 aa, Homo Sapiens
KVFHAERIVRK

SEQ ID NO: 39932 - protein, 11 aa, Homo Sapiens
KVKDEYMVAEY

SEQ ID NO: 39933 - protein, 11 aa, Homo Sapiens
KVKDGQLTVGL

SEQ ID NO: 39934 - protein, 11 aa, Homo Sapiens
KVKDILSKVQK

SEQ ID NO: 39935 - protein, 11 aa, Homo Sapiens
KVKSAFLLQNL

SEQ ID NO: 39936 - protein, 11 aa, Homo Sapiens
KVKSLNDITAK

SEQ ID NO: 39937 - protein, 11 aa, Homo Sapiens
KVKTPEMIIQK

SEQ ID NO: 39938 - protein, 11 aa, Homo Sapiens
KVKYLPQQQKK

SEQ ID NO: 39939 - protein, 11 aa, Homo Sapiens
KVLDHKDRVLK

SEQ ID NO: 39940 - protein, 11 aa, Homo Sapiens
KVRKIGELVRY

SEQ ID NO: 39941 - protein, 11 aa, Homo Sapiens
KYKGDSTIREL

SEQ ID NO: 39942 - protein, 11 aa, Homo Sapiens
KYKSGEQILRL

SEQ ID NO: 39943 - protein, 11 aa, Homo Sapiens
KYLDIHERMGK

SEQ ID NO: 39944 - protein, 11 aa, Homo Sapiens
LDKPELGPVIL

SEQ ID NO: 39945 - protein, 11 aa, Homo Sapiens
MDGSFSVKPLK

SEQ ID NO: 39946 - protein, 11 aa, Homo Sapiens
MQMQVEAERRK

SEQ ID NO: 39947 - protein, 11 aa, Homo Sapiens
NLKSVNELIYK

SEQ ID NO: 39948 - protein, 11 aa, Homo Sapiens
NLKSVRELILK

SEQ ID NO: 39949 - protein, 11 aa, Homo Sapiens
PMFIVNTNVPR

SEQ ID NO: 39950 - protein, 11 aa, Homo Sapiens
QFIPKGRPPKL

SEQ ID NO: 39951 - protein, 11 aa, Homo Sapiens
QIIPTEEKPYK

SEQ ID NO: 39952 - protein, 11 aa, Homo Sapiens
QSTFSGGRIPK

SEQ ID NO: 39953 - protein, 11 aa, Homo Sapiens
QVFEKSPLRVK

SEQ ID NO: 39954 - protein, 11 aa, Homo Sapiens
RAKAQALIQNL

SEQ ID NO: 39955 - protein, 11 aa, Homo Sapiens
RAKDMHLVKKL

SEQ ID NO: 39956 - protein, 11 aa, Homo Sapiens
RFKGTESISKV

SEQ ID NO: 39957 - protein, 11 aa, Homo Sapiens
RFRDASLVFKV

SEQ ID NO: 39958 - protein, 11 aa, Homo Sapiens
RIFDLGRKKAK

SEQ ID NO: 39959 - protein, 11 aa, Homo Sapiens
RIIKEVQKRYK

SEQ ID NO: 39960 - protein, 11 aa, Homo Sapiens
RIKEIAQDALK

SEQ ID NO: 39961 - protein, 11 aa, Homo Sapiens
RIKGQEFIRQV

SEQ ID NO: 39962 - protein, 11 aa, Homo Sapiens
RIKRALDLNLK

SEQ ID NO: 39963 - protein, 11 aa, Homo Sapiens
RIRDGDFVVLK

SEQ ID NO: 39964 - protein, 11 aa, Homo Sapiens
RIRKLEKLIKK

SEQ ID NO: 39965 - protein, 11 aa, Homo Sapiens
RIRNISNTVMK

SEQ ID NO: 39966 - protein, 11 aa, Homo Sapiens
RLIDQKWQRKK

SEQ ID NO: 39967 - protein, 11 aa, Homo Sapiens
RLKEAEEERLK

SEQ ID NO: 39968 - protein, 11 aa, Homo Sapiens
RLKEKKLVKEV

SEQ ID NO: 39969 - protein, 11 aa, Homo Sapiens
RLKPTNPAAQK

SEQ ID NO: 39970 - protein, 11 aa, Homo Sapiens
RNKAENLLRGK

SEQ ID NO: 39971 - protein, 11 aa, Homo Sapiens
RQKQQLVERLK

SEQ ID NO: 39972 - protein, 11 aa, Homo Sapiens
RQKSAALIIQK

SEQ ID NO: 39973 - protein, 11 aa, Homo Sapiens
RQKTELQQIGK

SEQ ID NO: 39974 - protein, 11 aa, Homo Sapiens
RQLEEKDRVLK

SEQ ID NO: 39975 - protein, 11 aa, Homo Sapiens
RQQIKELEKLK

SEQ ID NO: 39976 - protein, 11 aa, Homo Sapiens
RQYAKDIGFIK

SEQ ID NO: 39977 - protein, 11 aa, Homo Sapiens
RSKDEKILHIK

SEQ ID NO: 39978 - protein, 11 aa, Homo Sapiens
RSKSYELIRKI

SEQ ID NO: 39979 - protein, 11 aa, Homo Sapiens
RSYPVTEQRVK

SEQ ID NO: 39980 - protein, 11 aa, Homo Sapiens
RTAAPSVRPEK

SEQ ID NO: 39981 - protein, 11 aa, Homo Sapiens
RTFLRPPKVKM

SEQ ID NO: 39982 - protein, 11 aa, Homo Sapiens
RTIAPIIGRTA

SEQ ID NO: 39983 - protein, 11 aa, Homo Sapiens
RTIELDGKKIK

SEQ ID NO: 39984 - protein, 11 aa, Homo Sapiens
RTIELDGKRIK

SEQ ID NO: 39985 - protein, 11 aa, Homo Sapiens
RTKAATIIQKY

SEQ ID NO: 39986 - protein, 11 aa, Homo Sapiens
RTKTEDMVSQL

SEQ ID NO: 39987 - protein, 11 aa, Homo Sapiens
RTLSKDDVNYK

SEQ ID NO: 39988 - protein, 11 aa, Homo Sapiens
RTLYIQGERRL

SEQ ID NO: 39989 - protein, 11 aa, Homo Sapiens
RTMPLLSLHSR

SEQ ID NO: 39990 - protein, 11 aa, Homo Sapiens
RTQMPDPKTFK

SEQ ID NO: 39991 - protein, 11 aa, Homo Sapiens
RTRDYASLPPK

SEQ ID NO: 39992 - protein, 11 aa, Homo Sapiens
RTRELPDGTFY

SEQ ID NO: 39993 - protein, 11 aa, Homo Sapiens
RTRPAANPIQF

SEQ ID NO: 39994 - protein, 11 aa, Homo Sapiens
RVAPRSGLAAK

SEQ ID NO: 39995 - protein, 11 aa, Homo Sapiens
RVKEGSKIRNL

SEQ ID NO: 39996 - protein, 11 aa, Homo Sapiens
RVKPLHYISWL

SEQ ID NO: 39997 - protein, 11 aa, Homo Sapiens
RVKTEALIRYL

SEQ ID NO: 39998 - protein, 11 aa, Homo Sapiens
RVLDALVAREK

SEQ ID NO: 39999 - protein, 11 aa, Homo Sapiens
RVLSKAFSRLK

SEQ ID NO: 40000 - protein, 11 aa, Homo Sapiens
RVQEAVESMVK

SEQ ID NO: 40001 - protein, 11 aa, Homo Sapiens
RVQQHIESKLL

SEQ ID NO: 40002 - protein, 11 aa, Homo Sapiens
RVRDGSKIRNL

SEQ ID NO: 40003 - protein, 11 aa, Homo Sapiens
RVRQPPPRPFL

SEQ ID NO: 40004 - protein, 11 aa, Homo Sapiens
RVWDISGLRKK

SEQ ID NO: 40005 - protein, 11 aa, Homo Sapiens
RVYNTDPLKEK

SEQ ID NO: 40006 - protein, 11 aa, Homo Sapiens
RYAQTQLDKLK

SEQ ID NO: 40007 - protein, 11 aa, Homo Sapiens
RYLDSSVRNSK

SEQ ID NO: 40008 - protein, 11 aa, Homo Sapiens
SFKPGDVIHYV

SEQ ID NO: 40009 - protein, 11 aa, Homo Sapiens
SFKPLENAVFK

SEQ ID NO: 40010 - protein, 11 aa, Homo Sapiens
SFRYNGLIHRK

SEQ ID NO: 40011 - protein, 11 aa, Homo Sapiens
SSNPALALRRK

SEQ ID NO: 40012 - protein, 11 aa, Homo Sapiens
SSSPVNVKKLK

SEQ ID NO: 40013 - protein, 11 aa, Homo Sapiens
SSSTNPFRPQK

SEQ ID NO: 40014 - protein, 11 aa, Homo Sapiens
STIPPELVKQK

SEQ ID NO: 40015 - protein, 11 aa, Homo Sapiens
STKPSSIISTK

SEQ ID NO: 40016 - protein, 11 aa, Homo Sapiens
SVILKPENIKK

SEQ ID NO: 40017 - protein, 11 aa, Homo Sapiens
SVKGPELINMY

SEQ ID NO: 40018 - protein, 11 aa, Homo Sapiens
SVKSVPENLLK

SEQ ID NO: 40019 - protein, 11 aa, Homo Sapiens
SWRDGQKLVKK

SEQ ID NO: 40020 - protein, 11 aa, Homo Sapiens
SYKDSTLIMQL

SEQ ID NO: 40021 - protein, 11 aa, Homo Sapiens
TSKKPNLILNV

SEQ ID NO: 40022 - protein, 11 aa, Homo Sapiens
TYFQAKIRALK

SEQ ID NO: 40023 - protein, 11 aa, Homo Sapiens
VFLPQAIRHLK

SEQ ID NO: 40024 - protein, 11 aa, Homo Sapiens
VLSTLSGRPVK

SEQ ID NO: 40025 - protein, 11 aa, Homo Sapiens
VLVGGSTRIPK

SEQ ID NO: 40026 - protein, 11 aa, Homo Sapiens
VTLTGGFRRGK

SEQ ID NO: 40027 - protein, 11 aa, Homo Sapiens
VTNPDIAAKKK

SEQ ID NO: 40028 - protein, 11 aa, Homo Sapiens
VVKPDQLIKRR

SEQ ID NO: 40029 - protein, 11 aa, Homo Sapiens
VVKSVELMSVY

SEQ ID NO: 40030 - protein, 8 aa, Homo Sapiens
ADYPDYKY

SEQ ID NO: 40031 - protein, 8 aa, Homo Sapiens
APVISAEK

SEQ ID NO: 40032 - protein, 8 aa, Homo Sapiens
EEQLQQIR

SEQ ID NO: 40033 - protein, 8 aa, Homo Sapiens
EGEFSEAR

SEQ ID NO: 40034 - protein, 8 aa, Homo Sapiens
FPHIKHNY

SEQ ID NO: 40035 - protein, 8 aa, Homo Sapiens
GAEVVHRY

SEQ ID NO: 40036 - protein, 8 aa, Homo Sapiens
HIAGILAR

SEQ ID NO: 40037 - protein, 8 aa, Homo Sapiens
HTNLIAFY

SEQ ID NO: 40038 - protein, 8 aa, Homo Sapiens
KSITNPRY

SEQ ID NO: 40039 - protein, 8 aa, Homo Sapiens
KTAAPELQ

SEQ ID NO: 40040 - protein, 8 aa, Homo Sapiens
KVGIVGKY

SEQ ID NO: 40041 - protein, 8 aa, Homo Sapiens
KYFKAGKY

SEQ ID NO: 40042 - protein, 8 aa, Homo Sapiens
LKAAAHHY

SEQ ID NO: 40043 - protein, 8 aa, Homo Sapiens
LSESTHKY

SEQ ID NO: 40044 - protein, 8 aa, Homo Sapiens
NGLPKHSY

SEQ ID NO: 40045 - protein, 8 aa, Homo Sapiens
NPHVNHLY

SEQ ID NO: 40046 - protein, 8 aa, Homo Sapiens
NPRVNHLY

SEQ ID NO: 40047 - protein, 8 aa, Homo Sapiens
QAPKPRKQ

SEQ ID NO: 40048 - protein, 8 aa, Homo Sapiens
QNAVRLHY

SEQ ID NO: 40049 - protein, 8 aa, Homo Sapiens
RVDSKQRY

SEQ ID NO: 40050 - protein, 8 aa, Homo Sapiens
RVQNMALY

SEQ ID NO: 40051 - protein, 8 aa, Homo Sapiens
RVQVVGTY

SEQ ID NO: 40052 - protein, 8 aa, Homo Sapiens
SGLDRSKY

SEQ ID NO: 40053 - protein, 8 aa, Homo Sapiens
SHLPSHHY

SEQ ID NO: 40054 - protein, 8 aa, Homo Sapiens
THTVSVKY

SEQ ID NO: 40055 - protein, 8 aa, Homo Sapiens
VKEKYAKY

SEQ ID NO: 40056 - protein, 8 aa, Homo Sapiens
VQELQNLL

SEQ ID NO: 40057 - protein, 8 aa, Homo Sapiens
VQKAIAHY

SEQ ID NO: 40058 - protein, 8 aa, Homo Sapiens
VSLTACKV

SEQ ID NO: 40059 - protein, 8 aa, Homo Sapiens
VTFVPGLY

SEQ ID NO: 40060 - protein, 8 aa, Homo Sapiens
YPGHGRRY

SEQ ID NO: 40061 - protein, 9 aa, Homo Sapiens
AAAAGLHRY

SEQ ID NO: 40062 - protein, 9 aa, Homo Sapiens
AAHTVTAAY

SEQ ID NO: 40063 - protein, 9 aa, Homo Sapiens
AAKGFGGKY

SEQ ID NO: 40064 - protein, 9 aa, Homo Sapiens
AANPAYGRY

SEQ ID NO: 40065 - protein, 9 aa, Homo Sapiens
AANPISGHY

SEQ ID NO: 40066 - protein, 9 aa, Homo Sapiens
AANPVYGRY

SEQ ID NO: 40067 - protein, 9 aa, Homo Sapiens
AAPAYSRAL

SEQ ID NO: 40068 - protein, 9 aa, Homo Sapiens
AASPVVAEY

SEQ ID NO: 40069 - protein, 9 aa, Homo Sapiens
AFISIVHMY

SEQ ID NO: 40070 - protein, 9 aa, Homo Sapiens
AFKDAVPEY

SEQ ID NO: 40071 - protein, 9 aa, Homo Sapiens
AFLEILHTY

SEQ ID NO: 40072 - protein, 9 aa, Homo Sapiens
AFPHIKHNY

SEQ ID NO: 40073 - protein, 9 aa, Homo Sapiens
AFRALQHSY

SEQ ID NO: 40074 - protein, 9 aa, Homo Sapiens
AFRYLAQYY

SEQ ID NO: 40075 - protein, 9 aa, Homo Sapiens
AFYKISTLY

SEQ ID NO: 40076 - protein, 9 aa, Homo Sapiens
AGAEVVHRY

SEQ ID NO: 40077 - protein, 9 aa, Homo Sapiens
AGHAIITNY

SEQ ID NO: 40078 - protein, 9 aa, Homo Sapiens
AGHQISRDY

SEQ ID NO: 40079 - protein, 9 aa, Homo Sapiens
AGILLKHKY

SEQ ID NO: 40080 - protein, 9 aa, Homo Sapiens
AGKTVCAEY

SEQ ID NO: 40081 - protein, 9 aa, Homo Sapiens
AGKTVVAEY

SEQ ID NO: 40082 - protein, 9 aa, Homo Sapiens
AGKVLAHFY

SEQ ID NO: 40083 - protein, 9 aa, Homo Sapiens
AGNWKFAAY

SEQ ID NO: 40084 - protein, 9 aa, Homo Sapiens
AIANLQRAY

SEQ ID NO: 40085 - protein, 9 aa, Homo Sapiens
AIATLAACY

SEQ ID NO: 40086 - protein, 9 aa, Homo Sapiens
AIGGIARTY

SEQ ID NO: 40087 - protein, 9 aa, Homo Sapiens
AIHDVFSQY

SEQ ID NO: 40088 - protein, 9 aa, Homo Sapiens
AIHPIPGEY

SEQ ID NO: 40089 - protein, 9 aa, Homo Sapiens
AIHPVPGHY

SEQ ID NO: 40090 - protein, 9 aa, Homo Sapiens
AIHSLAHMY

SEQ ID NO: 40091 - protein, 9 aa, Homo Sapiens
AIIQERLRY

SEQ ID NO: 40092 - protein, 9 aa, Homo Sapiens
AIKDFVLKY

SEQ ID NO: 40093 - protein, 9 aa, Homo Sapiens
AIKEQLHKY

SEQ ID NO: 40094 - protein, 9 aa, Homo Sapiens
AILKKYGKY

SEQ ID NO: 40095 - protein, 9 aa, Homo Sapiens
AINASTGNY

SEQ ID NO: 40096 - protein, 9 aa, Homo Sapiens
AIQAVLSLY

SEQ ID NO: 40097 - protein, 9 aa, Homo Sapiens
AIQEVMESY

SEQ ID NO: 40098 - protein, 9 aa, Homo Sapiens
AIQPDAGYY

SEQ ID NO: 40099 - protein, 9 aa, Homo Sapiens
AIQPGSINY

SEQ ID NO: 40100 - protein, 9 aa, Homo Sapiens
AIQQILGKY

SEQ ID NO: 40101 - protein, 9 aa, Homo Sapiens
AIWADPGKY

SEQ ID NO: 40102 - protein, 9 aa, Homo Sapiens
ALAGTFHYY

SEQ ID NO: 40103 - protein, 9 aa, Homo Sapiens
ALAPAGFSY

SEQ ID NO: 40104 - protein, 9 aa, Homo Sapiens
ALCDIKQAY

SEQ ID NO: 40105 - protein, 9 aa, Homo Sapiens
ALGQVLRSY

SEQ ID NO: 40106 - protein, 9 aa, Homo Sapiens
ALNIATHVL

SEQ ID NO: 40107 - protein, 9 aa, Homo Sapiens
ALQDLLSEY

SEQ ID NO: 40108 - protein, 9 aa, Homo Sapiens
ALQDTLALY

SEQ ID NO: 40109 - protein, 9 aa, Homo Sapiens
ALQKLDQEK

SEQ ID NO: 40110 - protein, 9 aa, Homo Sapiens
ALSPVRGCY

SEQ ID NO: 40111 - protein, 9 aa, Homo Sapiens
ALSRIMGKY

SEQ ID NO: 40112 - protein, 9 aa, Homo Sapiens
ALVDIIHGY

SEQ ID NO: 40113 - protein, 9 aa, Homo Sapiens
AMMGSTHIY

SEQ ID NO: 40114 - protein, 9 aa, Homo Sapiens
ANGLPKHSY

SEQ ID NO: 40115 - protein, 9 aa, Homo Sapiens
AQAALSHEY

SEQ ID NO: 40116 - protein, 9 aa, Homo Sapiens
AQAELESRY

SEQ ID NO: 40117 - protein, 9 aa, Homo Sapiens
AQHRIAPGY

SEQ ID NO: 40118 - protein, 9 aa, Homo Sapiens
AQKIDLPEY

SEQ ID NO: 40119 - protein, 9 aa, Homo Sapiens
AQKSISQHY

SEQ ID NO: 40120 - protein, 9 aa, Homo Sapiens
AQLGLGHSY

SEQ ID NO: 40121 - protein, 9 aa, Homo Sapiens
AQNAVRLHY

SEQ ID NO: 40122 - protein, 9 aa, Homo Sapiens
AQNRWLHIY

SEQ ID NO: 40123 - protein, 9 aa, Homo Sapiens
AQQKNLEGY

SEQ ID NO: 40124 - protein, 9 aa, Homo Sapiens
AQQPCYLLY

SEQ ID NO: 40125 - protein, 9 aa, Homo Sapiens
AQQPMLPQY

SEQ ID NO: 40126 - protein, 9 aa, Homo Sapiens
AQQSIREKY

SEQ ID NO: 40127 - protein, 9 aa, Homo Sapiens
AQQVVLSSY

SEQ ID NO: 40128 - protein, 9 aa, Homo Sapiens
AQTEVAKKY

SEQ ID NO: 40129 - protein, 9 aa, Homo Sapiens
ASAIVEYAY

SEQ ID NO: 40130 - protein, 9 aa, Homo Sapiens
ASKSLLNRY

SEQ ID NO: 40131 - protein, 9 aa, Homo Sapiens
ASNPAMLLY

SEQ ID NO: 40132 - protein, 9 aa, Homo Sapiens
ASNPRQAAY

SEQ ID NO: 40133 - protein, 9 aa, Homo Sapiens
ASQALIEAY

SEQ ID NO: 40134 - protein, 9 aa, Homo Sapiens
ASQLKLDHY

SEQ ID NO: 40135 - protein, 9 aa, Homo Sapiens
ASYAVQAKY

SEQ ID NO: 40136 - protein, 9 aa, Homo Sapiens
ASYAVQSKY

SEQ ID NO: 40137 - protein, 9 aa, Homo Sapiens
ASYSLIRKY

SEQ ID NO: 40138 - protein, 9 aa, Homo Sapiens
ATFPVAPRY

SEQ ID NO: 40139 - protein, 9 aa, Homo Sapiens
ATFSSSHRY

SEQ ID NO: 40140 - protein, 9 aa, Homo Sapiens
ATILTDHQY

SEQ ID NO: 40141 - protein, 9 aa, Homo Sapiens
ATQERTDLY

SEQ ID NO: 40142 - protein, 9 aa, Homo Sapiens
ATQVFREQY

SEQ ID NO: 40143 - protein, 9 aa, Homo Sapiens
ATSIPNFSY

SEQ ID NO: 40144 - protein, 9 aa, Homo Sapiens
ATSKSLHSY

SEQ ID NO: 40145 - protein, 9 aa, Homo Sapiens
ATSSVGRVY

SEQ ID NO: 40146 - protein, 9 aa, Homo Sapiens
ATSTIKRMY

SEQ ID NO: 40147 - protein, 9 aa, Homo Sapiens
ATTVIPRVY

SEQ ID NO: 40148 - protein, 9 aa, Homo Sapiens
ATVTISHRY

SEQ ID NO: 40149 - protein, 9 aa, Homo Sapiens
AVAPFFKSY

SEQ ID NO: 40150 - protein, 9 aa, Homo Sapiens
AVASVPIMY

SEQ ID NO: 40151 - protein, 9 aa, Homo Sapiens
AVDLMTHNY

SEQ ID NO: 40152 - protein, 9 aa, Homo Sapiens
AVGEGFHNY

SEQ ID NO: 40153 - protein, 9 aa, Homo Sapiens
AVGFPTHLY

SEQ ID NO: 40154 - protein, 9 aa, Homo Sapiens
AVHDITVAY

SEQ ID NO: 40155 - protein, 9 aa, Homo Sapiens
AVHLVDSHY

SEQ ID NO: 40156 - protein, 9 aa, Homo Sapiens
AVIAFRSSY

SEQ ID NO: 40157 - protein, 9 aa, Homo Sapiens
AVIEDTWHY

SEQ ID NO: 40158 - protein, 9 aa, Homo Sapiens
AVIKSNHSY

SEQ ID NO: 40159 - protein, 9 aa, Homo Sapiens
AVISSVAHY

SEQ ID NO: 40160 - protein, 9 aa, Homo Sapiens
AVKEKYAKY

SEQ ID NO: 40161 - protein, 9 aa, Homo Sapiens
AVKYDYHKY

SEQ ID NO: 40162 - protein, 9 aa, Homo Sapiens
AVLGKGHQY

SEQ ID NO: 40163 - protein, 9 aa, Homo Sapiens
AVNKVIKSY

SEQ ID NO: 40164 - protein, 9 aa, Homo Sapiens
AVNMVPFPR

SEQ ID NO: 40165 - protein, 9 aa, Homo Sapiens
AVNSIAKRY

SEQ ID NO: 40166 - protein, 9 aa, Homo Sapiens
AVNSLISKY

SEQ ID NO: 40167 - protein, 9 aa, Homo Sapiens
AVQAALAKY

SEQ ID NO: 40168 - protein, 9 aa, Homo Sapiens
AVQAKFGDY

SEQ ID NO: 40169 - protein, 9 aa, Homo Sapiens
AVQAKYGDY

SEQ ID NO: 40170 - protein, 9 aa, Homo Sapiens
AVQELLPQY

SEQ ID NO: 40171 - protein, 9 aa, Homo Sapiens
AVQKAIAHY

SEQ ID NO: 40172 - protein, 9 aa, Homo Sapiens
AVQKAIPMY

SEQ ID NO: 40173 - protein, 9 aa, Homo Sapiens
AVQKERYDY

SEQ ID NO: 40174 - protein, 9 aa, Homo Sapiens
AVQSLIRAY

SEQ ID NO: 40175 - protein, 9 aa, Homo Sapiens
AVRPLELAY

SEQ ID NO: 40176 - protein, 9 aa, Homo Sapiens
AVSAVVHEY

SEQ ID NO: 40177 - protein, 9 aa, Homo Sapiens
AVSPAVPVY

SEQ ID NO: 40178 - protein, 9 aa, Homo Sapiens
AVSPLARSY

SEQ ID NO: 40179 - protein, 9 aa, Homo Sapiens
AVTASIHVY

SEQ ID NO: 40180 - protein, 9 aa, Homo Sapiens
AVTHIGRVY

SEQ ID NO: 40181 - protein, 9 aa, Homo Sapiens
AVVSSMPRY

SEQ ID NO: 40182 - protein, 9 aa, Homo Sapiens
AVYPVRSAY

SEQ ID NO: 40183 - protein, 9 aa, Homo Sapiens
AVYTLTSLY

SEQ ID NO: 40184 - protein, 9 aa, Homo Sapiens
AWKGIAHKY

SEQ ID NO: 40185 - protein, 9 aa, Homo Sapiens
AWNTVSRAY

SEQ ID NO: 40186 - protein, 9 aa, Homo Sapiens
AWSPVFRNY

SEQ ID NO: 40187 - protein, 9 aa, Homo Sapiens
AYAHELPKY

SEQ ID NO: 40188 - protein, 9 aa, Homo Sapiens
AYFPYFITY

SEQ ID NO: 40189 - protein, 9 aa, Homo Sapiens
AYHQLFQEY

SEQ ID NO: 40190 - protein, 9 aa, Homo Sapiens
AYKKQFSQY

SEQ ID NO: 40191 - protein, 9 aa, Homo Sapiens
AYLQRIALY

SEQ ID NO: 40192 - protein, 9 aa, Homo Sapiens
AYPEIVAVY

SEQ ID NO: 40193 - protein, 9 aa, Homo Sapiens
AYQELLQHY

SEQ ID NO: 40194 - protein, 9 aa, Homo Sapiens
AYSHIYSSY

SEQ ID NO: 40195 - protein, 9 aa, Homo Sapiens
AYSSIYGSY

SEQ ID NO: 40196 - protein, 9 aa, Homo Sapiens
AYTDKIDRY

SEQ ID NO: 40197 - protein, 9 aa, Homo Sapiens
CVKPDVHVY

SEQ ID NO: 40198 - protein, 9 aa, Homo Sapiens
EGEFSEARE

SEQ ID NO: 40199 - protein, 9 aa, Homo Sapiens
EMYDIFGKY

SEQ ID NO: 40200 - protein, 9 aa, Homo Sapiens
EQGPSSHYY

SEQ ID NO: 40201 - protein, 9 aa, Homo Sapiens
EVLWPLPAY

SEQ ID NO: 40202 - protein, 9 aa, Homo Sapiens
FQAILDHTY

SEQ ID NO: 40203 - protein, 9 aa, Homo Sapiens
FQVAERALY

SEQ ID NO: 40204 - protein, 9 aa, Homo Sapiens
FSGMSDHRY

SEQ ID NO: 40205 - protein, 9 aa, Homo Sapiens
FTGPGGHSY

SEQ ID NO: 40206 - protein, 9 aa, Homo Sapiens
GFSDVDHTY

SEQ ID NO: 40207 - protein, 9 aa, Homo Sapiens
GGKDFSFRY

SEQ ID NO: 40208 - protein, 9 aa, Homo Sapiens
GGMVEYGKY

SEQ ID NO: 40209 - protein, 9 aa, Homo Sapiens
GGQRVIGHY

SEQ ID NO: 40210 - protein, 9 aa, Homo Sapiens
GIHIIKGEY

SEQ ID NO: 40211 - protein, 9 aa, Homo Sapiens
GLMKGKHYY

SEQ ID NO: 40212 - protein, 9 aa, Homo Sapiens
GLSTAFHHY

SEQ ID NO: 40213 - protein, 9 aa, Homo Sapiens
GLTDSIHRY

SEQ ID NO: 40214 - protein, 9 aa, Homo Sapiens
GMKYIQHTY

SEQ ID NO: 40215 - protein, 9 aa, Homo Sapiens
GMNDPDFGY

SEQ ID NO: 40216 - protein, 9 aa, Homo Sapiens
GQASGGHYY

SEQ ID NO: 40217 - protein, 9 aa, Homo Sapiens
GQKINIHEY

SEQ ID NO: 40218 - protein, 9 aa, Homo Sapiens
GQKPWSQHY

SEQ ID NO: 40219 - protein, 9 aa, Homo Sapiens
GQKRVVNVY

SEQ ID NO: 40220 - protein, 9 aa, Homo Sapiens
GQLGLLARY

SEQ ID NO: 40221 - protein, 9 aa, Homo Sapiens
GQMPHSHQY

SEQ ID NO: 40222 - protein, 9 aa, Homo Sapiens
GQNAQTMAY

SEQ ID NO: 40223 - protein, 9 aa, Homo Sapiens
GQQRCIATY

SEQ ID NO: 40224 - protein, 9 aa, Homo Sapiens
GQQSSYPGY

SEQ ID NO: 40225 - protein, 9 aa, Homo Sapiens
GSAAGGHYY

SEQ ID NO: 40226 - protein, 9 aa, Homo Sapiens
GSAHSMPKY

SEQ ID NO: 40227 - protein, 9 aa, Homo Sapiens
GSFHIRASY

SEQ ID NO: 40228 - protein, 9 aa, Homo Sapiens
GSGFHFHLY

SEQ ID NO: 40229 - protein, 9 aa, Homo Sapiens
GSHFVEATY

SEQ ID NO: 40230 - protein, 9 aa, Homo Sapiens
GSHTIQIMY

SEQ ID NO: 40231 - protein, 9 aa, Homo Sapiens
GSSFIQHYY

SEQ ID NO: 40232 - protein, 9 aa, Homo Sapiens
GSTMVEHNY

SEQ ID NO: 40233 - protein, 9 aa, Homo Sapiens
GTFSKPGGY

SEQ ID NO: 40234 - protein, 9 aa, Homo Sapiens
GTHENPGLY

SEQ ID NO: 40235 - protein, 9 aa, Homo Sapiens
GTHGVIVVY

SEQ ID NO: 40236 - protein, 9 aa, Homo Sapiens
GTHTVSVKY

SEQ ID NO: 40237 - protein, 9 aa, Homo Sapiens
GTLPIGARY

SEQ ID NO: 40238 - protein, 9 aa, Homo Sapiens
GTMYPMSVY

SEQ ID NO: 40239 - protein, 9 aa, Homo Sapiens
GTNHVEYRY

SEQ ID NO: 40240 - protein, 9 aa, Homo Sapiens
GTQFLSAAY

SEQ ID NO: 40241 - protein, 9 aa, Homo Sapiens
GTQPAYPAY

SEQ ID NO: 40242 - protein, 9 aa, Homo Sapiens
GTQRFLERY

SEQ ID NO: 40243 - protein, 9 aa, Homo Sapiens
GTSAGVHVY

SEQ ID NO: 40244 - protein, 9 aa, Homo Sapiens
GTWKHARRY

SEQ ID NO: 40245 - protein, 9 aa, Homo Sapiens
GVHAVMYSY

SEQ ID NO: 40246 - protein, 9 aa, Homo Sapiens
GVHTVSVKY

SEQ ID NO: 40247 - protein, 9 aa, Homo Sapiens
GVNDKMAEY

SEQ ID NO: 40248 - protein, 9 aa, Homo Sapiens
GVYKVHGNY

SEQ ID NO: 40249 - protein, 9 aa, Homo Sapiens
GYYGQSARY

SEQ ID NO: 40250 - protein, 9 aa, Homo Sapiens
HFEETQHTY

SEQ ID NO: 40251 - protein, 9 aa, Homo Sapiens
HGCVTIHRY

SEQ ID NO: 40252 - protein, 9 aa, Homo Sapiens
HGGIPPHKY

SEQ ID NO: 40253 - protein, 9 aa, Homo Sapiens
HGIDPTGTY

SEQ ID NO: 40254 - protein, 9 aa, Homo Sapiens
HIKNPDWRY

SEQ ID NO: 40255 - protein, 9 aa, Homo Sapiens
HIQESRFLY

SEQ ID NO: 40256 - protein, 9 aa, Homo Sapiens
HLIQTTHHY

SEQ ID NO: 40257 - protein, 9 aa, Homo Sapiens
HQGPVPLSY

SEQ ID NO: 40258 - protein, 9 aa, Homo Sapiens
HQITVLHVY

SEQ ID NO: 40259 - protein, 9 aa, Homo Sapiens
HQKKEFVKY

SEQ ID NO: 40260 - protein, 9 aa, Homo Sapiens
HQQPPSQQY

SEQ ID NO: 40261 - protein, 9 aa, Homo Sapiens
HSLLQTKNY

SEQ ID NO: 40262 - protein, 9 aa, Homo Sapiens
HSQGLGGHY

SEQ ID NO: 40263 - protein, 9 aa, Homo Sapiens
HSSAVAATY

SEQ ID NO: 40264 - protein, 9 aa, Homo Sapiens
HSSTVAAHY

SEQ ID NO: 40265 - protein, 9 aa, Homo Sapiens
HSTYPSHQY

SEQ ID NO: 40266 - protein, 9 aa, Homo Sapiens
HTAPNVPHY

SEQ ID NO: 40267 - protein, 9 aa, Homo Sapiens
HTHVELPYY

SEQ ID NO: 40268 - protein, 9 aa, Homo Sapiens
HVGSGDHDY

SEQ ID NO: 40269 - protein, 9 aa, Homo Sapiens
HVIDVKFLY

SEQ ID NO: 40270 - protein, 9 aa, Homo Sapiens
HVSRVRALY

SEQ ID NO: 40271 - protein, 9 aa, Homo Sapiens
HYKTDWHRY

SEQ ID NO: 40272 - protein, 9 aa, Homo Sapiens
HYNNIMALY

SEQ ID NO: 40273 - protein, 9 aa, Homo Sapiens
HYYDSDRRY

SEQ ID NO: 40274 - protein, 9 aa, Homo Sapiens
HYYSITINY

SEQ ID NO: 40275 - protein, 9 aa, Homo Sapiens
IAVKVNHSY

SEQ ID NO: 40276 - protein, 9 aa, Homo Sapiens
IENLGAIQV

SEQ ID NO: 40277 - protein, 9 aa, Homo Sapiens
IFWTLPHEY

SEQ ID NO: 40278 - protein, 9 aa, Homo Sapiens
IGWITGHSY

SEQ ID NO: 40279 - protein, 9 aa, Homo Sapiens
IHHIIKHDY

SEQ ID NO: 40280 - protein, 9 aa, Homo Sapiens
IIAPPERKY

SEQ ID NO: 40281 - protein, 9 aa, Homo Sapiens
IIIDKEYYY

SEQ ID NO: 40282 - protein, 9 aa, Homo Sapiens
IIQSIRMGM

SEQ ID NO: 40283 - protein, 9 aa, Homo Sapiens
ILAKIRWKY

SEQ ID NO: 40284 - protein, 9 aa, Homo Sapiens
ILAQLNAKY

SEQ ID NO: 40285 - protein, 9 aa, Homo Sapiens
ILFSGVHFY

SEQ ID NO: 40286 - protein, 9 aa, Homo Sapiens
ILHSIFSSY

SEQ ID NO: 40287 - protein, 9 aa, Homo Sapiens
ILYNIKQEY

SEQ ID NO: 40288 - protein, 9 aa, Homo Sapiens
IQKQISYNY

SEQ ID NO: 40289 - protein, 9 aa, Homo Sapiens
IQNPDPAVY

SEQ ID NO: 40290 - protein, 9 aa, Homo Sapiens
IQQDTKGDY

SEQ ID NO: 40291 - protein, 9 aa, Homo Sapiens
IQQNLILHY

SEQ ID NO: 40292 - protein, 9 aa, Homo Sapiens
IQSHVIRGY

SEQ ID NO: 40293 - protein, 9 aa, Homo Sapiens
ISKALVAYY

SEQ ID NO: 40294 - protein, 9 aa, Homo Sapiens
ISNPTRHVY

SEQ ID NO: 40295 - protein, 9 aa, Homo Sapiens
ISNTAKHFY

SEQ ID NO: 40296 - protein, 9 aa, Homo Sapiens
ITLEIIHRY

SEQ ID NO: 40297 - protein, 9 aa, Homo Sapiens
ITNKLIGCY

SEQ ID NO: 40298 - protein, 9 aa, Homo Sapiens
IVAAIQHNY

SEQ ID NO: 40299 - protein, 9 aa, Homo Sapiens
IVKDSFLLY

SEQ ID NO: 40300 - protein, 9 aa, Homo Sapiens
IVLSSSHSY

SEQ ID NO: 40301 - protein, 9 aa, Homo Sapiens
KAALLNQHY

SEQ ID NO: 40302 - protein, 9 aa, Homo Sapiens
KAANAFHVY

SEQ ID NO: 40303 - protein, 9 aa, Homo Sapiens
KAASLKSNY

SEQ ID NO: 40304 - protein, 9 aa, Homo Sapiens
KAIAIDSKY

SEQ ID NO: 40305 - protein, 9 aa, Homo Sapiens
KAKDTQGFY

SEQ ID NO: 40306 - protein, 9 aa, Homo Sapiens
KALELKAKY

SEQ ID NO: 40307 - protein, 9 aa, Homo Sapiens
KANDHQGFY

SEQ ID NO: 40308 - protein, 9 aa, Homo Sapiens
KANILTNRY

SEQ ID NO: 40309 - protein, 9 aa, Homo Sapiens
KAPVTKVAA

SEQ ID NO: 40310 - protein, 9 aa, Homo Sapiens
KASGIIHSY

SEQ ID NO: 40311 - protein, 9 aa, Homo Sapiens
KASGTLREY

SEQ ID NO: 40312 - protein, 9 aa, Homo Sapiens
KAVKERYSY

SEQ ID NO: 40313 - protein, 9 aa, Homo Sapiens
KAYPKRPLL

SEQ ID NO: 40314 - protein, 9 aa, Homo Sapiens
KFIAIKNKY

SEQ ID NO: 40315 - protein, 9 aa, Homo Sapiens
KFKEEVNHY

SEQ ID NO: 40316 - protein, 9 aa, Homo Sapiens
KFSENPHVY

SEQ ID NO: 40317 - protein, 9 aa, Homo Sapiens
KFVDFCGKY

SEQ ID NO: 40318 - protein, 9 aa, Homo Sapiens
KFYATLVRY

SEQ ID NO: 40319 - protein, 9 aa, Homo Sapiens
KFYSVNVDY

SEQ ID NO: 40320 - protein, 9 aa, Homo Sapiens
KGHEIFNTY

SEQ ID NO: 40321 - protein, 9 aa, Homo Sapiens
KGHETYSYY

SEQ ID NO: 40322 - protein, 9 aa, Homo Sapiens
KGKGLILHY

SEQ ID NO: 40323 - protein, 9 aa, Homo Sapiens
KGQEILHCY

SEQ ID NO: 40324 - protein, 9 aa, Homo Sapiens
KGQVTTGQY

SEQ ID NO: 40325 - protein, 9 aa, Homo Sapiens
KGSSAVRVY

SEQ ID NO: 40326 - protein, 9 aa, Homo Sapiens
KIADRFLLY

SEQ ID NO: 40327 - protein, 9 aa, Homo Sapiens
KIFALRHGY

SEQ ID NO: 40328 - protein, 9 aa, Homo Sapiens
KIFFENHPY

SEQ ID NO: 40329 - protein, 9 aa, Homo Sapiens
KIFPSVIKY

SEQ ID NO: 40330 - protein, 9 aa, Homo Sapiens
KIFYDRAEY

SEQ ID NO: 40331 - protein, 9 aa, Homo Sapiens
KIHGVQQKY

SEQ ID NO: 40332 - protein, 9 aa, Homo Sapiens
KIHTTMSGY

SEQ ID NO: 40333 - protein, 9 aa, Homo Sapiens
KIHTVDKPY

SEQ ID NO: 40334 - protein, 9 aa, Homo Sapiens
KIHTVERCY

SEQ ID NO: 40335 - protein, 9 aa, Homo Sapiens
KIIRNVGKY

SEQ ID NO: 40336 - protein, 9 aa, Homo Sapiens
KIKDAIGRY

SEQ ID NO: 40337 - protein, 9 aa, Homo Sapiens
KIKSFVKVY

SEQ ID NO: 40338 - protein, 9 aa, Homo Sapiens
KILEVVGRY

SEQ ID NO: 40339 - protein, 9 aa, Homo Sapiens
KINEARENY

SEQ ID NO: 40340 - protein, 9 aa, Homo Sapiens
KINELMPKY

SEQ ID NO: 40341 - protein, 9 aa, Homo Sapiens
KINPRPAKF

SEQ ID NO: 40342 - protein, 9 aa, Homo Sapiens
KIQEVFSSY

SEQ ID NO: 40343 - protein, 9 aa, Homo Sapiens
KIQGIIAEY

SEQ ID NO: 40344 - protein, 9 aa, Homo Sapiens
KIQKFENQY

SEQ ID NO: 40345 - protein, 9 aa, Homo Sapiens
KIQQVQKKY

SEQ ID NO: 40346 - protein, 9 aa, Homo Sapiens
KIQSAFRGY

SEQ ID NO: 40347 - protein, 9 aa, Homo Sapiens
KIREQIKKY

SEQ ID NO: 40348 - protein, 9 aa, Homo Sapiens
KISNIIKQF

SEQ ID NO: 40349 - protein, 9 aa, Homo Sapiens
KISSIHIRY

SEQ ID NO: 40350 - protein, 9 aa, Homo Sapiens
KITDIVNKY

SEQ ID NO: 40351 - protein, 9 aa, Homo Sapiens
KIVDAVIKY

SEQ ID NO: 40352 - protein, 9 aa, Homo Sapiens
KIYPLPHMY

SEQ ID NO: 40353 - protein, 9 aa, Homo Sapiens
KIYPSREEY

SEQ ID NO: 40354 - protein, 9 aa, Homo Sapiens
KKWFSDHRY

SEQ ID NO: 40355 - protein, 9 aa, Homo Sapiens
KLAALCKKY

SEQ ID NO: 40356 - protein, 9 aa, Homo Sapiens
KLAQIRHIY

SEQ ID NO: 40357 - protein, 9 aa, Homo Sapiens
KLEAIKARY

SEQ ID NO: 40358 - protein, 9 aa, Homo Sapiens
KLIDSLHSY

SEQ ID NO: 40359 - protein, 9 aa, Homo Sapiens
KLISINKRY

SEQ ID NO: 40360 - protein, 9 aa, Homo Sapiens
KLKEKFQHY

SEQ ID NO: 40361 - protein, 9 aa, Homo Sapiens
KLKELGTKY

SEQ ID NO: 40362 - protein, 9 aa, Homo Sapiens
KLKEVFSRY

SEQ ID NO: 40363 - protein, 9 aa, Homo Sapiens
KLKGSGLRY

SEQ ID NO: 40364 - protein, 9 aa, Homo Sapiens
KLKKERPDF

SEQ ID NO: 40365 - protein, 9 aa, Homo Sapiens
KLLDATHVY

SEQ ID NO: 40366 - protein, 9 aa, Homo Sapiens
KLLEQRAQY

SEQ ID NO: 40367 - protein, 9 aa, Homo Sapiens
KLLQALAQY

SEQ ID NO: 40368 - protein, 9 aa, Homo Sapiens
KLLQAVAKY

SEQ ID NO: 40369 - protein, 9 aa, Homo Sapiens
KLNDNVSAY

SEQ ID NO: 40370 - protein, 9 aa, Homo Sapiens
KLNPVPGSY

SEQ ID NO: 40371 - protein, 9 aa, Homo Sapiens
KLNSIGNYY

SEQ ID NO: 40372 - protein, 9 aa, Homo Sapiens
KLPDFESRY

SEQ ID NO: 40373 - protein, 9 aa, Homo Sapiens
KLPDIFSVY

SEQ ID NO: 40374 - protein, 9 aa, Homo Sapiens
KLQEALMHY

SEQ ID NO: 40375 - protein, 9 aa, Homo Sapiens
KLQEDRFLY

SEQ ID NO: 40376 - protein, 9 aa, Homo Sapiens
KLQGEVEKY

SEQ ID NO: 40377 - protein, 9 aa, Homo Sapiens
KLQLITHAY

SEQ ID NO: 40378 - protein, 9 aa, Homo Sapiens
KLQSFFSQY

SEQ ID NO: 40379 - protein, 9 aa, Homo Sapiens
KLQSPKHAY

SEQ ID NO: 40380 - protein, 9 aa, Homo Sapiens
KLQVQIQAY

SEQ ID NO: 40381 - protein, 9 aa, Homo Sapiens
KLQVTLKKY

SEQ ID NO: 40382 - protein, 9 aa, Homo Sapiens
KLREIFGLY

SEQ ID NO: 40383 - protein, 9 aa, Homo Sapiens
KLRPEIAVY

SEQ ID NO: 40384 - protein, 9 aa, Homo Sapiens
KLSCSTWNY

SEQ ID NO: 40385 - protein, 9 aa, Homo Sapiens
KLSELLRYY

SEQ ID NO: 40386 - protein, 9 aa, Homo Sapiens
KLTELLRYY

SEQ ID NO: 40387 - protein, 9 aa, Homo Sapiens
KLVSKIAKY

SEQ ID NO: 40388 - protein, 9 aa, Homo Sapiens
KLVTEMGTY

SEQ ID NO: 40389 - protein, 9 aa, Homo Sapiens
KLYDVETKY

SEQ ID NO: 40390 - protein, 9 aa, Homo Sapiens
KLYYDKRWY

SEQ ID NO: 40391 - protein, 9 aa, Homo Sapiens
KMHQSRISY

SEQ ID NO: 40392 - protein, 9 aa, Homo Sapiens
KMIISPGRY

SEQ ID NO: 40393 - protein, 9 aa, Homo Sapiens
KMKEDCFRY

SEQ ID NO: 40394 - protein, 9 aa, Homo Sapiens
KMKEIAEAY

SEQ ID NO: 40395 - protein, 9 aa, Homo Sapiens
KMKELATTY

SEQ ID NO: 40396 - protein, 9 aa, Homo Sapiens
KMKETVSRF

SEQ ID NO: 40397 - protein, 9 aa, Homo Sapiens
KMKGDYFRY

SEQ ID NO: 40398 - protein, 9 aa, Homo Sapiens
KMKGDYHRY

SEQ ID NO: 40399 - protein, 9 aa, Homo Sapiens
KMKGDYYRY

SEQ ID NO: 40400 - protein, 9 aa, Homo Sapiens
KMKTCVDTY

SEQ ID NO: 40401 - protein, 9 aa, Homo Sapiens
KMNTERILY

SEQ ID NO: 40402 - protein, 9 aa, Homo Sapiens
KMPQSMPEY

SEQ ID NO: 40403 - protein, 9 aa, Homo Sapiens
KMWEVQTGY

SEQ ID NO: 40404 - protein, 9 aa, Homo Sapiens
KNFGIWLRY

SEQ ID NO: 40405 - protein, 9 aa, Homo Sapiens
KQCVPFRRY

SEQ ID NO: 40406 - protein, 9 aa, Homo Sapiens
KQFPEVIKY

SEQ ID NO: 40407 - protein, 9 aa, Homo Sapiens
KQIKTIERY

SEQ ID NO: 40408 - protein, 9 aa, Homo Sapiens
KQITADKQY

SEQ ID NO: 40409 - protein, 9 aa, Homo Sapiens
KQIVDRVSY

SEQ ID NO: 40410 - protein, 9 aa, Homo Sapiens
KQKALNAGY

SEQ ID NO: 40411 - protein, 9 aa, Homo Sapiens
KQKEVIEGY

SEQ ID NO: 40412 - protein, 9 aa, Homo Sapiens
KQKNTVVRY

SEQ ID NO: 40413 - protein, 9 aa, Homo Sapiens
KQLRALRKY

SEQ ID NO: 40414 - protein, 9 aa, Homo Sapiens
KQQASHYLY

SEQ ID NO: 40415 - protein, 9 aa, Homo Sapiens
KQQNPRLVY

SEQ ID NO: 40416 - protein, 9 aa, Homo Sapiens
KQQSTLKKY

SEQ ID NO: 40417 - protein, 9 aa, Homo Sapiens
KQSDVMRFL

SEQ ID NO: 40418 - protein, 9 aa, Homo Sapiens
KQSFLTRKY

SEQ ID NO: 40419 - protein, 9 aa, Homo Sapiens
KQSQELSQY

SEQ ID NO: 40420 - protein, 9 aa, Homo Sapiens
KQSQILLVY

SEQ ID NO: 40421 - protein, 9 aa, Homo Sapiens
KQVKYFIHY

SEQ ID NO: 40422 - protein, 9 aa, Homo Sapiens
KSFEDIHHY

SEQ ID NO: 40423 - protein, 9 aa, Homo Sapiens
KSFSDHGFY

SEQ ID NO: 40424 - protein, 9 aa, Homo Sapiens
KSKAIMAKY

SEQ ID NO: 40425 - protein, 9 aa, Homo Sapiens
KSKITHPVY

SEQ ID NO: 40426 - protein, 9 aa, Homo Sapiens
KSLGKRDLY

SEQ ID NO: 40427 - protein, 9 aa, Homo Sapiens
KSLTGTARY

SEQ ID NO: 40428 - protein, 9 aa, Homo Sapiens
KSNPHRDFY

SEQ ID NO: 40429 - protein, 9 aa, Homo Sapiens
KSQLDHGTY

SEQ ID NO: 40430 - protein, 9 aa, Homo Sapiens
KSSDIAKTF

SEQ ID NO: 40431 - protein, 9 aa, Homo Sapiens
KSSDLVGSY

SEQ ID NO: 40432 - protein, 9 aa, Homo Sapiens
KSSDVYVSY

SEQ ID NO: 40433 - protein, 9 aa, Homo Sapiens
KSTDVAKTF

SEQ ID NO: 40434 - protein, 9 aa, Homo Sapiens
KSTFDAHIY

SEQ ID NO: 40435 - protein, 9 aa, Homo Sapiens
KSVYSTHNY

SEQ ID NO: 40436 - protein, 9 aa, Homo Sapiens
KTAIGKAGY

SEQ ID NO: 40437 - protein, 9 aa, Homo Sapiens
KTEGGKVLY

SEQ ID NO: 40438 - protein, 9 aa, Homo Sapiens
KTFDHYCEY

SEQ ID NO: 40439 - protein, 9 aa, Homo Sapiens
KTFPYQHRY

SEQ ID NO: 40440 - protein, 9 aa, Homo Sapiens
KTGFVPSNY

SEQ ID NO: 40441 - protein, 9 aa, Homo Sapiens
KTIDKKTFY

SEQ ID NO: 40442 - protein, 9 aa, Homo Sapiens
KTKEIEQVY

SEQ ID NO: 40443 - protein, 9 aa, Homo Sapiens
KTKMDNLKY

SEQ ID NO: 40444 - protein, 9 aa, Homo Sapiens
KTLDVDATY

SEQ ID NO: 40445 - protein, 9 aa, Homo Sapiens
KTMLLIAHY

SEQ ID NO: 40446 - protein, 9 aa, Homo Sapiens
KTNQLHRMY

SEQ ID NO: 40447 - protein, 9 aa, Homo Sapiens
KTNQVKMKY

SEQ ID NO: 40448 - protein, 9 aa, Homo Sapiens
KTQIPTQRY

SEQ ID NO: 40449 - protein, 9 aa, Homo Sapiens
KTQRAFSKY

SEQ ID NO: 40450 - protein, 9 aa, Homo Sapiens
KTTNVRQTY

SEQ ID NO: 40451 - protein, 9 aa, Homo Sapiens
KVARVKALY

SEQ ID NO: 40452 - protein, 9 aa, Homo Sapiens
KVCNNPGLY

SEQ ID NO: 40453 - protein, 9 aa, Homo Sapiens
KVDAGKLHY

SEQ ID NO: 40454 - protein, 9 aa, Homo Sapiens
KVDKEKWLY

SEQ ID NO: 40455 - protein, 9 aa, Homo Sapiens
KVGEARALY

SEQ ID NO: 40456 - protein, 9 aa, Homo Sapiens
KVGSFLRIY

SEQ ID NO: 40457 - protein, 9 aa, Homo Sapiens
KVHAVIGVL

SEQ ID NO: 40458 - protein, 9 aa, Homo Sapiens
KVHAYIISY

SEQ ID NO: 40459 - protein, 9 aa, Homo Sapiens
KVINNRAKL

SEQ ID NO: 40460 - protein, 9 aa, Homo Sapiens
KVIPCPPFY

SEQ ID NO: 40461 - protein, 9 aa, Homo Sapiens
KVIQSVANY

SEQ ID NO: 40462 - protein, 9 aa, Homo Sapiens
KVKAIANLY

SEQ ID NO: 40463 - protein, 9 aa, Homo Sapiens
KVKDILSKV

SEQ ID NO: 40464 - protein, 9 aa, Homo Sapiens
KVKIPTSKY

SEQ ID NO: 40465 - protein, 9 aa, Homo Sapiens
KVKLAVLKY

SEQ ID NO: 40466 - protein, 9 aa, Homo Sapiens
KVKLLIGAY

SEQ ID NO: 40467 - protein, 9 aa, Homo Sapiens
KVKWFYNEY

SEQ ID NO: 40468 - protein, 9 aa, Homo Sapiens
KVLAQQGEY

SEQ ID NO: 40469 - protein, 9 aa, Homo Sapiens
KVLDIPSKY

SEQ ID NO: 40470 - protein, 9 aa, Homo Sapiens
KVLPGDHEY

SEQ ID NO: 40471 - protein, 9 aa, Homo Sapiens
KVLPQTILY

SEQ ID NO: 40472 - protein, 9 aa, Homo Sapiens
KVLQERENY

SEQ ID NO: 40473 - protein, 9 aa, Homo Sapiens
KVMELHKSY

SEQ ID NO: 40474 - protein, 9 aa, Homo Sapiens
KVMKNYGRY

SEQ ID NO: 40475 - protein, 9 aa, Homo Sapiens
KVNDILELY

SEQ ID NO: 40476 - protein, 9 aa, Homo Sapiens
KVNQELAGY

SEQ ID NO: 40477 - protein, 9 aa, Homo Sapiens
KVNVAKLRY

SEQ ID NO: 40478 - protein, 9 aa, Homo Sapiens
KVPTTLAEY

SEQ ID NO: 40479 - protein, 9 aa, Homo Sapiens
KVQDAFISY

SEQ ID NO: 40480 - protein, 9 aa, Homo Sapiens
KVQGLMKEY

SEQ ID NO: 40481 - protein, 9 aa, Homo Sapiens
KVQYVIQGY

SEQ ID NO: 40482 - protein, 9 aa, Homo Sapiens
KVRCSRYLY

SEQ ID NO: 40483 - protein, 9 aa, Homo Sapiens
KVREEIAEY

SEQ ID NO: 40484 - protein, 9 aa, Homo Sapiens
KVSRVVNTY

SEQ ID NO: 40485 - protein, 9 aa, Homo Sapiens
KVTDAPHFY

SEQ ID NO: 40486 - protein, 9 aa, Homo Sapiens
KVTTFEHQY

SEQ ID NO: 40487 - protein, 9 aa, Homo Sapiens
KVWDTCTTY

SEQ ID NO: 40488 - protein, 9 aa, Homo Sapiens
KVYDLVKAY

SEQ ID NO: 40489 - protein, 9 aa, Homo Sapiens
KVYENYPTY

SEQ ID NO: 40490 - protein, 9 aa, Homo Sapiens
KVYNIQIRY

SEQ ID NO: 40491 - protein, 9 aa, Homo Sapiens
KYFDEHYEY

SEQ ID NO: 40492 - protein, 9 aa, Homo Sapiens
KYIDFTSDY

SEQ ID NO: 40493 - protein, 9 aa, Homo Sapiens
KYIDKTIRV

SEQ ID NO: 40494 - protein, 9 aa, Homo Sapiens
KYIPELAYY

SEQ ID NO: 40495 - protein, 9 aa, Homo Sapiens
KYKDAIHFY

SEQ ID NO: 40496 - protein, 9 aa, Homo Sapiens
KYKERFLVY

SEQ ID NO: 40497 - protein, 9 aa, Homo Sapiens
KYLDVKFEY

SEQ ID NO: 40498 - protein, 9 aa, Homo Sapiens
KYLHPPPHL

SEQ ID NO: 40499 - protein, 9 aa, Homo Sapiens
KYLYGFEEY

SEQ ID NO: 40500 - protein, 9 aa, Homo Sapiens
KYMAEVKKY

SEQ ID NO: 40501 - protein, 9 aa, Homo Sapiens
KYNACILEY

SEQ ID NO: 40502 - protein, 9 aa, Homo Sapiens
KYNKILNKY

SEQ ID NO: 40503 - protein, 9 aa, Homo Sapiens
KYPPVNRKY

SEQ ID NO: 40504 - protein, 9 aa, Homo Sapiens
KYRDAVSRY

SEQ ID NO: 40505 - protein, 9 aa, Homo Sapiens
KYSELIILY

SEQ ID NO: 40506 - protein, 9 aa, Homo Sapiens
KYSNRLYKY

SEQ ID NO: 40507 - protein, 9 aa, Homo Sapiens
KYSVLLPTY

SEQ ID NO: 40508 - protein, 9 aa, Homo Sapiens
KYTDKIMTY

SEQ ID NO: 40509 - protein, 9 aa, Homo Sapiens
KYTKVKCGY

SEQ ID NO: 40510 - protein, 9 aa, Homo Sapiens
KYVKVFHKY

SEQ ID NO: 40511 - protein, 9 aa, Homo Sapiens
KYYDAIACL

SEQ ID NO: 40512 - protein, 9 aa, Homo Sapiens
LAHEVGWKY

SEQ ID NO: 40513 - protein, 9 aa, Homo Sapiens
LAKTGVHHY

SEQ ID NO: 40514 - protein, 9 aa, Homo Sapiens
LILCVPHLY

SEQ ID NO: 40515 - protein, 9 aa, Homo Sapiens
LIQPEIPKY

SEQ ID NO: 40516 - protein, 9 aa, Homo Sapiens
LLNKLIGRY

SEQ ID NO: 40517 - protein, 9 aa, Homo Sapiens
LMHSIVGSY

SEQ ID NO: 40518 - protein, 9 aa, Homo Sapiens
LMNVPLFKY

SEQ ID NO: 40519 - protein, 9 aa, Homo Sapiens
LQHPDVAAY

SEQ ID NO: 40520 - protein, 9 aa, Homo Sapiens
LQHRVQLKY

SEQ ID NO: 40521 - protein, 9 aa, Homo Sapiens
LQIGVIRVY

SEQ ID NO: 40522 - protein, 9 aa, Homo Sapiens
LQKKEIHLY

SEQ ID NO: 40523 - protein, 9 aa, Homo Sapiens
LQKLLPGYY

SEQ ID NO: 40524 - protein, 9 aa, Homo Sapiens
LQKVVLPSY

SEQ ID NO: 40525 - protein, 9 aa, Homo Sapiens
LQSEVIRHY

SEQ ID NO: 40526 - protein, 9 aa, Homo Sapiens
LQTLVLHQY

SEQ ID NO: 40527 - protein, 9 aa, Homo Sapiens
LSGMYDHRY

SEQ ID NO: 40528 - protein, 9 aa, Homo Sapiens
LSHLPSHHY

SEQ ID NO: 40529 - protein, 9 aa, Homo Sapiens
LVANATHIY

SEQ ID NO: 40530 - protein, 9 aa, Homo Sapiens
LVKLVQHTY

SEQ ID NO: 40531 - protein, 9 aa, Homo Sapiens
LVNKRIGLY

SEQ ID NO: 40532 - protein, 9 aa, Homo Sapiens
LVSGTPGAY

SEQ ID NO: 40533 - protein, 9 aa, Homo Sapiens
LVWRPDFAY

SEQ ID NO: 40534 - protein, 9 aa, Homo Sapiens
LWKHIKHKY

SEQ ID NO: 40535 - protein, 9 aa, Homo Sapiens
LYERPPHLY

SEQ ID NO: 40536 - protein, 9 aa, Homo Sapiens
LYSHLVPVY

SEQ ID NO: 40537 - protein, 9 aa, Homo Sapiens
MAWLVDHVY

SEQ ID NO: 40538 - protein, 9 aa, Homo Sapiens
MIAEPAHFY

SEQ ID NO: 40539 - protein, 9 aa, Homo Sapiens
MQQIQKGSY

SEQ ID NO: 40540 - protein, 9 aa, Homo Sapiens
MSTSVTRGY

SEQ ID NO: 40541 - protein, 9 aa, Homo Sapiens
MTHKLLSRY

SEQ ID NO: 40542 - protein, 9 aa, Homo Sapiens
MTHNLLLNY

SEQ ID NO: 40543 - protein, 9 aa, Homo Sapiens
MTNPHNHLY

SEQ ID NO: 40544 - protein, 9 aa, Homo Sapiens
MVVEERCVY

SEQ ID NO: 40545 - protein, 9 aa, Homo Sapiens
NEAIYDICR

SEQ ID NO: 40546 - protein, 9 aa, Homo Sapiens
NISNVSHNY

SEQ ID NO: 40547 - protein, 9 aa, Homo Sapiens
NLFCGLHRY

SEQ ID NO: 40548 - protein, 9 aa, Homo Sapiens
NQHGIILKY

SEQ ID NO: 40549 - protein, 9 aa, Homo Sapiens
NVAVPSHLY

SEQ ID NO: 40550 - protein, 9 aa, Homo Sapiens
PPPPPPHIY

SEQ ID NO: 40551 - protein, 9 aa, Homo Sapiens
PVQPNPIVY

SEQ ID NO: 40552 - protein, 9 aa, Homo Sapiens
QAGWLQHDY

SEQ ID NO: 40553 - protein, 9 aa, Homo Sapiens
QFHPNLDYY

SEQ ID NO: 40554 - protein, 9 aa, Homo Sapiens
QIHRIRHFY

SEQ ID NO: 40555 - protein, 9 aa, Homo Sapiens
QIKDAIGRY

SEQ ID NO: 40556 - protein, 9 aa, Homo Sapiens
QLHTLLGLY

SEQ ID NO: 40557 - protein, 9 aa, Homo Sapiens
QLKGGIHKY

SEQ ID NO: 40558 - protein, 9 aa, Homo Sapiens
QLLKLAHKY

SEQ ID NO: 40559 - protein, 9 aa, Homo Sapiens
QLSRLLHDY

SEQ ID NO: 40560 - protein, 9 aa, Homo Sapiens
QMAIVEHLY

SEQ ID NO: 40561 - protein, 9 aa, Homo Sapiens
QMKNIVHNY

SEQ ID NO: 40562 - protein, 9 aa, Homo Sapiens
QMNSFLSRY

SEQ ID NO: 40563 - protein, 9 aa, Homo Sapiens
QQFPYGASY

SEQ ID NO: 40564 - protein, 9 aa, Homo Sapiens
QQHRVGFQY

SEQ ID NO: 40565 - protein, 9 aa, Homo Sapiens
QQNNVEHKV

SEQ ID NO: 40566 - protein, 9 aa, Homo Sapiens
QQNQYQASY

SEQ ID NO: 40567 - protein, 9 aa, Homo Sapiens
QQQPALVNY

SEQ ID NO: 40568 - protein, 9 aa, Homo Sapiens
QQTNSIRNY

SEQ ID NO: 40569 - protein, 9 aa, Homo Sapiens
QQVLLEHSY

SEQ ID NO: 40570 - protein, 9 aa, Homo Sapiens
QQVPVPHVY

SEQ ID NO: 40571 - protein, 9 aa, Homo Sapiens
QTGIVLHKY

SEQ ID NO: 40572 - protein, 9 aa, Homo Sapiens
QTLRFLGLY

SEQ ID NO: 40573 - protein, 9 aa, Homo Sapiens
QTNLVPYPR

SEQ ID NO: 40574 - protein, 9 aa, Homo Sapiens
QTWLLLHMY

SEQ ID NO: 40575 - protein, 9 aa, Homo Sapiens
QVADIDGQY

SEQ ID NO: 40576 - protein, 9 aa, Homo Sapiens
QVELNAAIV

SEQ ID NO: 40577 - protein, 9 aa, Homo Sapiens
QVHNLLLTY

SEQ ID NO: 40578 - protein, 9 aa, Homo Sapiens
QVQQVAAEY

SEQ ID NO: 40579 - protein, 9 aa, Homo Sapiens
QWKELKATY

SEQ ID NO: 40580 - protein, 9 aa, Homo Sapiens
QWYEIYDKY

SEQ ID NO: 40581 - protein, 9 aa, Homo Sapiens
QYSPFLSQY

SEQ ID NO: 40582 - protein, 9 aa, Homo Sapiens
RAKDFAAKY

SEQ ID NO: 40583 - protein, 9 aa, Homo Sapiens
RALQIIARY

SEQ ID NO: 40584 - protein, 9 aa, Homo Sapiens
RAMKENGRY

SEQ ID NO: 40585 - protein, 9 aa, Homo Sapiens
RANPQLGAY

SEQ ID NO: 40586 - protein, 9 aa, Homo Sapiens
RAQAVLQQY

SEQ ID NO: 40587 - protein, 9 aa, Homo Sapiens
RAQDKVHYY

SEQ ID NO: 40588 - protein, 9 aa, Homo Sapiens
RAQIAGYLY

SEQ ID NO: 40589 - protein, 9 aa, Homo Sapiens
RAQILRIQY

SEQ ID NO: 40590 - protein, 9 aa, Homo Sapiens
RAQMKRELY

SEQ ID NO: 40591 - protein, 9 aa, Homo Sapiens
RAQPRGAVY

SEQ ID NO: 40592 - protein, 9 aa, Homo Sapiens
RAQRKFRPY

SEQ ID NO: 40593 - protein, 9 aa, Homo Sapiens
RAYLVRWEY

SEQ ID NO: 40594 - protein, 9 aa, Homo Sapiens
RDYFGAHTY

SEQ ID NO: 40595 - protein, 9 aa, Homo Sapiens
REKELQHRY

SEQ ID NO: 40596 - protein, 9 aa, Homo Sapiens
RFADSTHRY

SEQ ID NO: 40597 - protein, 9 aa, Homo Sapiens
RFAELAQIY

SEQ ID NO: 40598 - protein, 9 aa, Homo Sapiens
RFCDEIHLY

SEQ ID NO: 40599 - protein, 9 aa, Homo Sapiens
RFHTITTSY

SEQ ID NO: 40600 - protein, 9 aa, Homo Sapiens
RFKEPLPEY

SEQ ID NO: 40601 - protein, 9 aa, Homo Sapiens
RFNGQFKTY

SEQ ID NO: 40602 - protein, 9 aa, Homo Sapiens
RFQFLPHAY

SEQ ID NO: 40603 - protein, 9 aa, Homo Sapiens
RFSINGHFY

SEQ ID NO: 40604 - protein, 9 aa, Homo Sapiens
RFWDIKSKY

SEQ ID NO: 40605 - protein, 9 aa, Homo Sapiens
RFYDLSSKY

SEQ ID NO: 40606 - protein, 9 aa, Homo Sapiens
RFYGKNSSY

SEQ ID NO: 40607 - protein, 9 aa, Homo Sapiens
RFYTDNKKY

SEQ ID NO: 40608 - protein, 9 aa, Homo Sapiens
RGSAVVGQY

SEQ ID NO: 40609 - protein, 9 aa, Homo Sapiens
RGTHMQHAY

SEQ ID NO: 40610 - protein, 9 aa, Homo Sapiens
RGVEFVHVY

SEQ ID NO: 40611 - protein, 9 aa, Homo Sapiens
RHIDCAHVY

SEQ ID NO: 40612 - protein, 9 aa, Homo Sapiens
RHPTVPHLY

SEQ ID NO: 40613 - protein, 9 aa, Homo Sapiens
RIADISQVY

SEQ ID NO: 40614 - protein, 9 aa, Homo Sapiens
RIADRGAEY

SEQ ID NO: 40615 - protein, 9 aa, Homo Sapiens
RIFANAHTY

SEQ ID NO: 40616 - protein, 9 aa, Homo Sapiens
RIHRLARYY

SEQ ID NO: 40617 - protein, 9 aa, Homo Sapiens
RIHSLMEKY

SEQ ID NO: 40618 - protein, 9 aa, Homo Sapiens
RIKDIRMMY

SEQ ID NO: 40619 - protein, 9 aa, Homo Sapiens
RIKDLGQFY

SEQ ID NO: 40620 - protein, 9 aa, Homo Sapiens
RIKFFVSHY

SEQ ID NO: 40621 - protein, 9 aa, Homo Sapiens
RIKPIYNLY

SEQ ID NO: 40622 - protein, 9 aa, Homo Sapiens
RILHNVHLY

SEQ ID NO: 40623 - protein, 9 aa, Homo Sapiens
RILKARLEY

SEQ ID NO: 40624 - protein, 9 aa, Homo Sapiens
RILPHTVLY

SEQ ID NO: 40625 - protein, 9 aa, Homo Sapiens
RILPVAASY

SEQ ID NO: 40626 - protein, 9 aa, Homo Sapiens
RIMGESGKY

SEQ ID NO: 40627 - protein, 9 aa, Homo Sapiens
RIMKKTSLY

SEQ ID NO: 40628 - protein, 9 aa, Homo Sapiens
RIQDQGVRY

SEQ ID NO: 40629 - protein, 9 aa, Homo Sapiens
RIQDVLFLY

SEQ ID NO: 40630 - protein, 9 aa, Homo Sapiens
RIQEKLECY

SEQ ID NO: 40631 - protein, 9 aa, Homo Sapiens
RIQGFQVHY

SEQ ID NO: 40632 - protein, 9 aa, Homo Sapiens
RIQQQTHTY

SEQ ID NO: 40633 - protein, 9 aa, Homo Sapiens
RIREDIAKY

SEQ ID NO: 40634 - protein, 9 aa, Homo Sapiens
RIRKEPPVY

SEQ ID NO: 40635 - protein, 9 aa, Homo Sapiens
RISGVDRYY

SEQ ID NO: 40636 - protein, 9 aa, Homo Sapiens
RITAVRRVY

SEQ ID NO: 40637 - protein, 9 aa, Homo Sapiens
RIVAPPGGR

SEQ ID NO: 40638 - protein, 9 aa, Homo Sapiens
RIYSIGKSY

SEQ ID NO: 40639 - protein, 9 aa, Homo Sapiens
RLAELYHGY

SEQ ID NO: 40640 - protein, 9 aa, Homo Sapiens
RLAQTLRHY

SEQ ID NO: 40641 - protein, 9 aa, Homo Sapiens
RLCDSKGAY

SEQ ID NO: 40642 - protein, 9 aa, Homo Sapiens
RLDDKKFLY

SEQ ID NO: 40643 - protein, 9 aa, Homo Sapiens
RLEADKAKY

SEQ ID NO: 40644 - protein, 9 aa, Homo Sapiens
RLEEAKACY

SEQ ID NO: 40645 - protein, 9 aa, Homo Sapiens
RLFFHCSQY

SEQ ID NO: 40646 - protein, 9 aa, Homo Sapiens
RLFVGARIY

SEQ ID NO: 40647 - protein, 9 aa, Homo Sapiens
RLGKVPHRY

SEQ ID NO: 40648 - protein, 9 aa, Homo Sapiens
RLIGIYKTY

SEQ ID NO: 40649 - protein, 9 aa, Homo Sapiens
RLKDFRDAY

SEQ ID NO: 40650 - protein, 9 aa, Homo Sapiens
RLKNDQANY

SEQ ID NO: 40651 - protein, 9 aa, Homo Sapiens
RLKTMTDTY

SEQ ID NO: 40652 - protein, 9 aa, Homo Sapiens
RLLALNSLY

SEQ ID NO: 40653 - protein, 9 aa, Homo Sapiens
RLNSVVGEY

SEQ ID NO: 40654 - protein, 9 aa, Homo Sapiens
RLPKDKPRY

SEQ ID NO: 40655 - protein, 9 aa, Homo Sapiens
RLPLISGFY

SEQ ID NO: 40656 - protein, 9 aa, Homo Sapiens
RLPLVPSKY

SEQ ID NO: 40657 - protein, 9 aa, Homo Sapiens
RLQDAIAKV

SEQ ID NO: 40658 - protein, 9 aa, Homo Sapiens
RLQDLLLHY

SEQ ID NO: 40659 - protein, 9 aa, Homo Sapiens
RLQDQHMFY

SEQ ID NO: 40660 - protein, 9 aa, Homo Sapiens
RLQEFLTAY

SEQ ID NO: 40661 - protein, 9 aa, Homo Sapiens
RLQEVLNDY

SEQ ID NO: 40662 - protein, 9 aa, Homo Sapiens
RLQKQFAGY

SEQ ID NO: 40663 - protein, 9 aa, Homo Sapiens
RLQLPVWEY

SEQ ID NO: 40664 - protein, 9 aa, Homo Sapiens
RLQPEVQRY

SEQ ID NO: 40665 - protein, 9 aa, Homo Sapiens
RLQPFLQRY

SEQ ID NO: 40666 - protein, 9 aa, Homo Sapiens
RLQTALSLY

SEQ ID NO: 40667 - protein, 9 aa, Homo Sapiens
RLQTLKHQY

SEQ ID NO: 40668 - protein, 9 aa, Homo Sapiens
RLREFWMRY

SEQ ID NO: 40669 - protein, 9 aa, Homo Sapiens
RLSDSFSLY

SEQ ID NO: 40670 - protein, 9 aa, Homo Sapiens
RLTGIPAGY

SEQ ID NO: 40671 - protein, 9 aa, Homo Sapiens
RLWAVAASY

SEQ ID NO: 40672 - protein, 9 aa, Homo Sapiens
RLWISVARY

SEQ ID NO: 40673 - protein, 9 aa, Homo Sapiens
RMCFQPYTY

SEQ ID NO: 40674 - protein, 9 aa, Homo Sapiens
RMHHIQPHY

SEQ ID NO: 40675 - protein, 9 aa, Homo Sapiens
RMIKEKLCY

SEQ ID NO: 40676 - protein, 9 aa, Homo Sapiens
RMNCVLATY

SEQ ID NO: 40677 - protein, 9 aa, Homo Sapiens
RMNSKMQVY

SEQ ID NO: 40678 - protein, 9 aa, Homo Sapiens
RMQEMIARM

SEQ ID NO: 40679 - protein, 9 aa, Homo Sapiens
RMQPRGSFY

SEQ ID NO: 40680 - protein, 9 aa, Homo Sapiens
RMQQQLDEY

SEQ ID NO: 40681 - protein, 9 aa, Homo Sapiens
RMQVDPQKY

SEQ ID NO: 40682 - protein, 9 aa, Homo Sapiens
RMSGMIRLY

SEQ ID NO: 40683 - protein, 9 aa, Homo Sapiens
RNFNQQGLY

SEQ ID NO: 40684 - protein, 9 aa, Homo Sapiens
RNKELIGKY

SEQ ID NO: 40685 - protein, 9 aa, Homo Sapiens
RNTLQLHRY

SEQ ID NO: 40686 - protein, 9 aa, Homo Sapiens
RQAHLTNQY

SEQ ID NO: 40687 - protein, 9 aa, Homo Sapiens
RQALLTQHY

SEQ ID NO: 40688 - protein, 9 aa, Homo Sapiens
RQAVFTAKY

SEQ ID NO: 40689 - protein, 9 aa, Homo Sapiens
RQFDLAWQY

SEQ ID NO: 40690 - protein, 9 aa, Homo Sapiens
RQFEGLQGY

SEQ ID NO: 40691 - protein, 9 aa, Homo Sapiens
RQGFVPAAY

SEQ ID NO: 40692 - protein, 9 aa, Homo Sapiens
RQHEIVLKV

SEQ ID NO: 40693 - protein, 9 aa, Homo Sapiens
RQHLFYGQY

SEQ ID NO: 40694 - protein, 9 aa, Homo Sapiens
RQHRMMILY

SEQ ID NO: 40695 - protein, 9 aa, Homo Sapiens
RQIKHMIKY

SEQ ID NO: 40696 - protein, 9 aa, Homo Sapiens
RQKDNLNNY

SEQ ID NO: 40697 - protein, 9 aa, Homo Sapiens
RQKELESNY

SEQ ID NO: 40698 - protein, 9 aa, Homo Sapiens
RQKKLFCRY

SEQ ID NO: 40699 - protein, 9 aa, Homo Sapiens
RQKLVRNIY

SEQ ID NO: 40700 - protein, 9 aa, Homo Sapiens
RQLAHIYHY

SEQ ID NO: 40701 - protein, 9 aa, Homo Sapiens
RQLGSLSKY

SEQ ID NO: 40702 - protein, 9 aa, Homo Sapiens
RQMTVIRKV

SEQ ID NO: 40703 - protein, 9 aa, Homo Sapiens
RQQKTDMQY

SEQ ID NO: 40704 - protein, 9 aa, Homo Sapiens
RQQSHFAMM

SEQ ID NO: 40705 - protein, 9 aa, Homo Sapiens
RQRGINMRY

SEQ ID NO: 40706 - protein, 9 aa, Homo Sapiens
RQSKVDKLY

SEQ ID NO: 40707 - protein, 9 aa, Homo Sapiens
RQTFVIHKL

SEQ ID NO: 40708 - protein, 9 aa, Homo Sapiens
RQVHPFHVY

SEQ ID NO: 40709 - protein, 9 aa, Homo Sapiens
RQVYLPMSY

SEQ ID NO: 40710 - protein, 9 aa, Homo Sapiens
RQWLIDTLY

SEQ ID NO: 40711 - protein, 9 aa, Homo Sapiens
RSAFLSQRY

SEQ ID NO: 40712 - protein, 9 aa, Homo Sapiens
RSHPFIKEY

SEQ ID NO: 40713 - protein, 9 aa, Homo Sapiens
RSHPPLHEY

SEQ ID NO: 40714 - protein, 9 aa, Homo Sapiens
RSHYLMHNY

SEQ ID NO: 40715 - protein, 9 aa, Homo Sapiens
RSIAEMGAY

SEQ ID NO: 40716 - protein, 9 aa, Homo Sapiens
RSKPQLARY

SEQ ID NO: 40717 - protein, 9 aa, Homo Sapiens
RSMGFIGHY

SEQ ID NO: 40718 - protein, 9 aa, Homo Sapiens
RSMPPSFGY

SEQ ID NO: 40719 - protein, 9 aa, Homo Sapiens
RSQIHLHKY

SEQ ID NO: 40720 - protein, 9 aa, Homo Sapiens
RSQPVYIQY

SEQ ID NO: 40721 - protein, 9 aa, Homo Sapiens
RSQVQRARY

SEQ ID NO: 40722 - protein, 9 aa, Homo Sapiens
RSSNVSYKY

SEQ ID NO: 40723 - protein, 9 aa, Homo Sapiens
RSSPPGHYY

SEQ ID NO: 40724 - protein, 9 aa, Homo Sapiens
RSSYVARQY

SEQ ID NO: 40725 - protein, 9 aa, Homo Sapiens
RSTLVEHVY

SEQ ID NO: 40726 - protein, 9 aa, Homo Sapiens
RTAHVILRY

SEQ ID NO: 40727 - protein, 9 aa, Homo Sapiens
RTAPRFGLY

SEQ ID NO: 40728 - protein, 9 aa, Homo Sapiens
RTFGHLLRY

SEQ ID NO: 40729 - protein, 9 aa, Homo Sapiens
RTGDGKILY

SEQ ID NO: 40730 - protein, 9 aa, Homo Sapiens
RTGPMGHTY

SEQ ID NO: 40731 - protein, 9 aa, Homo Sapiens
RTGPVSGRY

SEQ ID NO: 40732 - protein, 9 aa, Homo Sapiens
RTHPVEIFY

SEQ ID NO: 40733 - protein, 9 aa, Homo Sapiens
RTIVIRRDY

SEQ ID NO: 40734 - protein, 9 aa, Homo Sapiens
RTKEEPAHY

SEQ ID NO: 40735 - protein, 9 aa, Homo Sapiens
RTKNNIQRY

SEQ ID NO: 40736 - protein, 9 aa, Homo Sapiens
RTLGEIPTY

SEQ ID NO: 40737 - protein, 9 aa, Homo Sapiens
RTLHHNWRY

SEQ ID NO: 40738 - protein, 9 aa, Homo Sapiens
RTLKEILRY

SEQ ID NO: 40739 - protein, 9 aa, Homo Sapiens
RTLPVLLLY

SEQ ID NO: 40740 - protein, 9 aa, Homo Sapiens
RTLSGMESY

SEQ ID NO: 40741 - protein, 9 aa, Homo Sapiens
RTMPIYPTY

SEQ ID NO: 40742 - protein, 9 aa, Homo Sapiens
RTMQEIERY

SEQ ID NO: 40743 - protein, 9 aa, Homo Sapiens
RTNNIELHY

SEQ ID NO: 40744 - protein, 9 aa, Homo Sapiens
RTPQTVAGY

SEQ ID NO: 40745 - protein, 9 aa, Homo Sapiens
RTQEIINKY

SEQ ID NO: 40746 - protein, 9 aa, Homo Sapiens
RTQNVLGEK

SEQ ID NO: 40747 - protein, 9 aa, Homo Sapiens
RTQYMKYLY

SEQ ID NO: 40748 - protein, 9 aa, Homo Sapiens
RTSIIEAQY

SEQ ID NO: 40749 - protein, 9 aa, Homo Sapiens
RTSIVEKRF

SEQ ID NO: 40750 - protein, 9 aa, Homo Sapiens
RTSPFFSVY

SEQ ID NO: 40751 - protein, 9 aa, Homo Sapiens
RTSSLKASY

SEQ ID NO: 40752 - protein, 9 aa, Homo Sapiens
RTTEILHHL

SEQ ID NO: 40753 - protein, 9 aa, Homo Sapiens
RTTFFHHEY

SEQ ID NO: 40754 - protein, 9 aa, Homo Sapiens
RTVRIWRQY

SEQ ID NO: 40755 - protein, 9 aa, Homo Sapiens
RTYDLYITY

SEQ ID NO: 40756 - protein, 9 aa, Homo Sapiens
RTYGVVAQY

SEQ ID NO: 40757 - protein, 9 aa, Homo Sapiens
RVADTFQDY

SEQ ID NO: 40758 - protein, 9 aa, Homo Sapiens
RVAHMEFCY

SEQ ID NO: 40759 - protein, 9 aa, Homo Sapiens
RVAMYVHAY

SEQ ID NO: 40760 - protein, 9 aa, Homo Sapiens
RVAPYRILY

SEQ ID NO: 40761 - protein, 9 aa, Homo Sapiens
RVAQLEQVY

SEQ ID NO: 40762 - protein, 9 aa, Homo Sapiens
RVASVMQEY

SEQ ID NO: 40763 - protein, 9 aa, Homo Sapiens
RVFNVFCLY

SEQ ID NO: 40764 - protein, 9 aa, Homo Sapiens
RVFPYSVFY

SEQ ID NO: 40765 - protein, 9 aa, Homo Sapiens
RVGFFPRSY

SEQ ID NO: 40766 - protein, 9 aa, Homo Sapiens
RVIELAVKY

SEQ ID NO: 40767 - protein, 9 aa, Homo Sapiens
RVIELVQKY

SEQ ID NO: 40768 - protein, 9 aa, Homo Sapiens
RVILERALV

SEQ ID NO: 40769 - protein, 9 aa, Homo Sapiens
RVIMERDTY

SEQ ID NO: 40770 - protein, 9 aa, Homo Sapiens
RVIQCYIQY

SEQ ID NO: 40771 - protein, 9 aa, Homo Sapiens
RVKAWTSRY

SEQ ID NO: 40772 - protein, 9 aa, Homo Sapiens
RVKDEPAYY

SEQ ID NO: 40773 - protein, 9 aa, Homo Sapiens
RVKEIYNTY

SEQ ID NO: 40774 - protein, 9 aa, Homo Sapiens
RVKPNIFSY

SEQ ID NO: 40775 - protein, 9 aa, Homo Sapiens
RVKQEEQRY

SEQ ID NO: 40776 - protein, 9 aa, Homo Sapiens
RVKSFALKY

SEQ ID NO: 40777 - protein, 9 aa, Homo Sapiens
RVLPCAHAY

SEQ ID NO: 40778 - protein, 9 aa, Homo Sapiens
RVLPPNWKY

SEQ ID NO: 40779 - protein, 9 aa, Homo Sapiens
RVMLETPEY

SEQ ID NO: 40780 - protein, 9 aa, Homo Sapiens
RVNAQAAAY

SEQ ID NO: 40781 - protein, 9 aa, Homo Sapiens
RVNKEMARY

SEQ ID NO: 40782 - protein, 9 aa, Homo Sapiens
RVNKLLQHY

SEQ ID NO: 40783 - protein, 9 aa, Homo Sapiens
RVNTTQKRY

SEQ ID NO: 40784 - protein, 9 aa, Homo Sapiens
RVQDLMAQM

SEQ ID NO: 40785 - protein, 9 aa, Homo Sapiens
RVQEAIAEV

SEQ ID NO: 40786 - protein, 9 aa, Homo Sapiens
RVQEGNESY

SEQ ID NO: 40787 - protein, 9 aa, Homo Sapiens
RVQGFQVEY

SEQ ID NO: 40788 - protein, 9 aa, Homo Sapiens
RVQKIRPSI

SEQ ID NO: 40789 - protein, 9 aa, Homo Sapiens
RVQKLVRRY

SEQ ID NO: 40790 - protein, 9 aa, Homo Sapiens
RVQLKYAAK

SEQ ID NO: 40791 - protein, 9 aa, Homo Sapiens
RVQYWIENY

SEQ ID NO: 40792 - protein, 9 aa, Homo Sapiens
RVRDDVAEY

SEQ ID NO: 40793 - protein, 9 aa, Homo Sapiens
RVRDVVTKY

SEQ ID NO: 40794 - protein, 9 aa, Homo Sapiens
RVSEVKPSY

SEQ ID NO: 40795 - protein, 9 aa, Homo Sapiens
RVSEVKPTY

SEQ ID NO: 40796 - protein, 9 aa, Homo Sapiens
RVSGVKPKY

SEQ ID NO: 40797 - protein, 9 aa, Homo Sapiens
RVSHINSNY

SEQ ID NO: 40798 - protein, 9 aa, Homo Sapiens
RVSNVKSVY

SEQ ID NO: 40799 - protein, 9 aa, Homo Sapiens
RVTPAAANY

SEQ ID NO: 40800 - protein, 9 aa, Homo Sapiens
RVVHDFPKY

SEQ ID NO: 40801 - protein, 9 aa, Homo Sapiens
RVVSYQIRY

SEQ ID NO: 40802 - protein, 9 aa, Homo Sapiens
RVVVEHGTY

SEQ ID NO: 40803 - protein, 9 aa, Homo Sapiens
RVWDIRNTY

SEQ ID NO: 40804 - protein, 9 aa, Homo Sapiens
RVWDIVRHY

SEQ ID NO: 40805 - protein, 9 aa, Homo Sapiens
RVYDIPPKF

SEQ ID NO: 40806 - protein, 9 aa, Homo Sapiens
RVYDVTRFL

SEQ ID NO: 40807 - protein, 9 aa, Homo Sapiens
RVYEIGRQF

SEQ ID NO: 40808 - protein, 9 aa, Homo Sapiens
RVYESIGQY

SEQ ID NO: 40809 - protein, 9 aa, Homo Sapiens
RVYEVATFY

SEQ ID NO: 40810 - protein, 9 aa, Homo Sapiens
RVYIGRLSY

SEQ ID NO: 40811 - protein, 9 aa, Homo Sapiens
RVYNNTARY

SEQ ID NO: 40812 - protein, 9 aa, Homo Sapiens
RVYVGSIYY

SEQ ID NO: 40813 - protein, 9 aa, Homo Sapiens
RWYVVQTNY

SEQ ID NO: 40814 - protein, 9 aa, Homo Sapiens
RYAESLGQY

SEQ ID NO: 40815 - protein, 9 aa, Homo Sapiens
RYGEQPASY

SEQ ID NO: 40816 - protein, 9 aa, Homo Sapiens
RYGEVMPVY

SEQ ID NO: 40817 - protein, 9 aa, Homo Sapiens
RYHELITKY

SEQ ID NO: 40818 - protein, 9 aa, Homo Sapiens
RYIGKTMDY

SEQ ID NO: 40819 - protein, 9 aa, Homo Sapiens
RYIKTSAHY

SEQ ID NO: 40820 - protein, 9 aa, Homo Sapiens
RYKAVLQEY

SEQ ID NO: 40821 - protein, 9 aa, Homo Sapiens
RYKPSPERY

SEQ ID NO: 40822 - protein, 9 aa, Homo Sapiens
RYLDLFTNY

SEQ ID NO: 40823 - protein, 9 aa, Homo Sapiens
RYLDLHDCY

SEQ ID NO: 40824 - protein, 9 aa, Homo Sapiens
RYLVEKPKY

SEQ ID NO: 40825 - protein, 9 aa, Homo Sapiens
RYMDLLWRY

SEQ ID NO: 40826 - protein, 9 aa, Homo Sapiens
RYMELEQRY

SEQ ID NO: 40827 - protein, 9 aa, Homo Sapiens
RYNDITKVY

SEQ ID NO: 40828 - protein, 9 aa, Homo Sapiens
RYNENLSKY

SEQ ID NO: 40829 - protein, 9 aa, Homo Sapiens
RYPDIQASY

SEQ ID NO: 40830 - protein, 9 aa, Homo Sapiens
RYPHLSPKY

SEQ ID NO: 40831 - protein, 9 aa, Homo Sapiens
RYSEAVFYY

SEQ ID NO: 40832 - protein, 9 aa, Homo Sapiens
RYSPVLSRF

SEQ ID NO: 40833 - protein, 9 aa, Homo Sapiens
RYTDVSTRY

SEQ ID NO: 40834 - protein, 9 aa, Homo Sapiens
RYVELLDKY

SEQ ID NO: 40835 - protein, 9 aa, Homo Sapiens
RYYSSEYHY

SEQ ID NO: 40836 - protein, 9 aa, Homo Sapiens
RYYYYHRQY

SEQ ID NO: 40837 - protein, 9 aa, Homo Sapiens
SAIQNRFKY

SEQ ID NO: 40838 - protein, 9 aa, Homo Sapiens
SAKPPTHKY

SEQ ID NO: 40839 - protein, 9 aa, Homo Sapiens
SFLEILHTY

SEQ ID NO: 40840 - protein, 9 aa, Homo Sapiens
SFTDVIGHY

SEQ ID NO: 40841 - protein, 9 aa, Homo Sapiens
SGHAIIAYY

SEQ ID NO: 40842 - protein, 9 aa, Homo Sapiens
SGHSQPGLY

SEQ ID NO: 40843 - protein, 9 aa, Homo Sapiens
SGNFIDHEY

SEQ ID NO: 40844 - protein, 9 aa, Homo Sapiens
SGSGLSHDY

SEQ ID NO: 40845 - protein, 9 aa, Homo Sapiens
SIHSLAAYY

SEQ ID NO: 40846 - protein, 9 aa, Homo Sapiens
SILTLSHLY

SEQ ID NO: 40847 - protein, 9 aa, Homo Sapiens
SINRIYGFY

SEQ ID NO: 40848 - protein, 9 aa, Homo Sapiens
SISGVTAAY

SEQ ID NO: 40849 - protein, 9 aa, Homo Sapiens
SIWEILHRY

SEQ ID NO: 40850 - protein, 9 aa, Homo Sapiens
SLASVLAQY

SEQ ID NO: 40851 - protein, 9 aa, Homo Sapiens
SLFVSNHAY

SEQ ID NO: 40852 - protein, 9 aa, Homo Sapiens
SLKFLGHLY

SEQ ID NO: 40853 - protein, 9 aa, Homo Sapiens
SLYIANHAY

SEQ ID NO: 40854 - protein, 9 aa, Homo Sapiens
SMHSFLHQY

SEQ ID NO: 40855 - protein, 9 aa, Homo Sapiens
SMRKTFARY

SEQ ID NO: 40856 - protein, 9 aa, Homo Sapiens
SMSSLTGAY

SEQ ID NO: 40857 - protein, 9 aa, Homo Sapiens
SNFLLSHEY

SEQ ID NO: 40858 - protein, 9 aa, Homo Sapiens
SQFIFEHSY

(The sequence listing continues in the following parts.)
